United States Patent Application Publication US 2005/0244851 A1 - sequence listing, part 59

SEQ ID NO: 2291568 - DNA, 25 bp, Homo sapien
tcttgactcttctaacccatgacat

SEQ ID NO: 2291569 - DNA, 25 bp, Homo sapien
gccgcggttgagtgcaatgtgtcac

SEQ ID NO: 2291570 - DNA, 25 bp, Homo sapien
tgtggctggccaccggacttgcttt

SEQ ID NO: 2291571 - DNA, 25 bp, Homo sapien
gcagcagagcggactgtttttcctc

SEQ ID NO: 2291572 - DNA, 25 bp, Homo sapien
gcttgcgtcctctcgttcagcacag

SEQ ID NO: 2291573 - DNA, 25 bp, Homo sapien
gaatcttcaagcaaaccatatgctc

SEQ ID NO: 2291574 - DNA, 25 bp, Homo sapien
gagtctgaccgactcctgtttctgc

SEQ ID NO: 2291575 - DNA, 25 bp, Homo sapien
tatgctctgttctcatagccagaag

SEQ ID NO: 2291576 - DNA, 25 bp, Homo sapien
catatttgccttggacttgaggtga

SEQ ID NO: 2291577 - DNA, 25 bp, Homo sapien
caatagagtaaatgctttatgcctc

SEQ ID NO: 2291578 - DNA, 25 bp, Homo sapien
catgacaatatagccatgaaggata

SEQ ID NO: 2291579 - DNA, 25 bp, Homo sapien
caagaatgttgtgagataaaccacc

SEQ ID NO: 2291580 - DNA, 25 bp, Homo sapien
tagatctagagttgtgttcagaaaa

SEQ ID NO: 2291581 - DNA, 25 bp, Homo sapien
tgggatagtttggtctacgtcacaa

SEQ ID NO: 2291582 - DNA, 25 bp, Homo sapien
aatatcagaattttatggacagtca

SEQ ID NO: 2291583 - DNA, 25 bp, Homo sapien
cagaccagttgagatcaggagtatg

SEQ ID NO: 2291584 - DNA, 25 bp, Homo sapien
gagtggtcataactacaatttggac

SEQ ID NO: 2291585 - DNA, 25 bp, Homo sapien
tgaggtgtgtttgaggatcctaaaa

SEQ ID NO: 2291586 - DNA, 25 bp, Homo sapien
ggtctagaatggctggtaaatactg

SEQ ID NO: 2291587 - DNA, 25 bp, Homo sapien
tgaggatcctaaaagggtctagaat

SEQ ID NO: 2291588 - DNA, 25 bp, Homo sapien
tgatgcaggtgcaagctgaggctac

SEQ ID NO: 2291589 - DNA, 25 bp, Homo sapien
acagttggcgaactggtgaaagttc

SEQ ID NO: 2291590 - DNA, 25 bp, Homo sapien
tgatgagattggtgacgacagttgg

SEQ ID NO: 2291591 - DNA, 25 bp, Homo sapien
gattggtgacgacagttggcgaact

SEQ ID NO: 2291592 - DNA, 25 bp, Homo sapien
gtgaaagttcgcttccttttgagtc

SEQ ID NO: 2291593 - DNA, 25 bp, Homo sapien
tgggaatcagcgtctcactttaggg

SEQ ID NO: 2291594 - DNA, 25 bp, Homo sapien
gaaaattagacttgagccagccttg

SEQ ID NO: 2291595 - DNA, 25 bp, Homo sapien
tgggtttgtaaaatcgcggcgtcgc

SEQ ID NO: 2291596 - DNA, 25 bp, Homo sapien
caaatccgcttccttacgtggctaa

SEQ ID NO: 2291597 - DNA, 25 bp, Homo sapien
tcaaaggccacaggaacggagtctt

SEQ ID NO: 2291598 - DNA, 25 bp, Homo sapien
tggctcttgagaaaatccggtgtta

SEQ ID NO: 2291599 - DNA, 25 bp, Homo sapien
taaagttgtcaagcgttcaaaggcc

SEQ ID NO: 2291600 - DNA, 25 bp, Homo sapien
tgggctgcatccatagtaccaggat

SEQ ID NO: 2291601 - DNA, 25 bp, Homo sapien
tctctctccatagatgccctggaga

SEQ ID NO: 2291602 - DNA, 25 bp, Homo sapien
agcctctggcctcgcgtccagcttg

SEQ ID NO: 2291603 - DNA, 25 bp, Homo sapien
ctctccatagatgccctggagagcc

SEQ ID NO: 2291604 - DNA, 25 bp, Homo sapien
tattggcaccccctatttccagttc

SEQ ID NO: 2291605 - DNA, 25 bp, Homo sapien
ccagacacaagggagtatgtactgt

SEQ ID NO: 2291606 - DNA, 25 bp, Homo sapien
taatctccagtgatagacttcaggt

SEQ ID NO: 2291607 - DNA, 25 bp, Homo sapien
tagactgactagttaaaggcacaag

SEQ ID NO: 2291608 - DNA, 25 bp, Homo sapien
taccctaagtgagagacagttagac

SEQ ID NO: 2291609 - DNA, 25 bp, Homo sapien
tgatgccatattgtccactttgtct

SEQ ID NO: 2291610 - DNA, 25 bp, Homo sapien
ggcatgatgccatattgtccacttt

SEQ ID NO: 2291611 - DNA, 25 bp, Homo sapien
tggaacaagcacaaaggatgggagt

SEQ ID NO: 2291612 - DNA, 25 bp, Homo sapien
gggagtgaagttatagcacttccca

SEQ ID NO: 2291613 - DNA, 25 bp, Homo sapien
aaaaaagtgacaggcgcaggacaaa

SEQ ID NO: 2291614 - DNA, 25 bp, Homo sapien
tcttctgagctttgcagaataagga

SEQ ID NO: 2291615 - DNA, 25 bp, Homo sapien
gaaaaaagtgacaggcgcaggacaa

SEQ ID NO: 2291616 - DNA, 25 bp, Homo sapien
tctgagctttgcagaataaggaaaa

SEQ ID NO: 2291617 - DNA, 25 bp, Homo sapien
gattgaaggccctaaagagacctga

SEQ ID NO: 2291618 - DNA, 25 bp, Homo sapien
catagactcagcagtaataccggcc

SEQ ID NO: 2291619 - DNA, 25 bp, Homo sapien
gaatctccaaccttacaaacggcag

SEQ ID NO: 2291620 - DNA, 25 bp, Homo sapien
tgtatgaacttcacgaccaaggacc

SEQ ID NO: 2291621 - DNA, 25 bp, Homo sapien
agcatgcggaggcacgcagcacagc

SEQ ID NO: 2291622 - DNA, 25 bp, Homo sapien
ccagcatgcggaggcacgcagcaca

SEQ ID NO: 2291623 - DNA, 25 bp, Homo sapien
gaccccagcatgcggaggcacgcag

SEQ ID NO: 2291624 - DNA, 25 bp, Homo sapien
catgcggaggcacgcagcacagctc

SEQ ID NO: 2291625 - DNA, 25 bp, Homo sapien
caatcatcgttgcaatggcacctcc

SEQ ID NO: 2291626 - DNA, 25 bp, Homo sapien
gggcctccttgaaataagcaaacca

SEQ ID NO: 2291627 - DNA, 25 bp, Homo sapien
tggcacctccatgaacgaatccagg

SEQ ID NO: 2291628 - DNA, 25 bp, Homo sapien
aacagtagcatcaatcatcgttgca

SEQ ID NO: 2291629 - DNA, 25 bp, Homo sapien
gacttttagcaggattcagctttat

SEQ ID NO: 2291630 - DNA, 25 bp, Homo sapien
tgatgttgagattggcagtcatgac

SEQ ID NO: 2291631 - DNA, 25 bp, Homo sapien
tatgtcagacttttagcaggattca

SEQ ID NO: 2291632 - DNA, 25 bp, Homo sapien
tcagacttttagcaggattcagctt

SEQ ID NO: 2291633 - DNA, 25 bp, Homo sapien
ggtcactgttggcaggcttctccct

SEQ ID NO: 2291634 - DNA, 25 bp, Homo sapien
tcactgttggcaggcttctccctac

SEQ ID NO: 2291635 - DNA, 25 bp, Homo sapien
aaggtcactgttggcaggcttctcc

SEQ ID NO: 2291636 - DNA, 25 bp, Homo sapien
gaaggtcactgttggcaggcttctc

SEQ ID NO: 2291637 - DNA, 25 bp, Homo sapien
gcgctcaggtctgcacgtccactct

SEQ ID NO: 2291638 - DNA, 25 bp, Homo sapien
ttgagatcacatgtcttgacacagc

SEQ ID NO: 2291639 - DNA, 25 bp, Homo sapien
tttgagatcacatgtcttgacacag

SEQ ID NO: 2291640 - DNA, 25 bp, Homo sapien
agtgttaatgaccaggccacagcgc

SEQ ID NO: 2291641 - DNA, 25 bp, Homo sapien
caaggagtccgtggatttggtgtct

SEQ ID NO: 2291642 - DNA, 25 bp, Homo sapien
ggaagggactagctataagtgcacc

SEQ ID NO: 2291643 - DNA, 25 bp, Homo sapien
agaagaagtcttctcgccgcaccct

SEQ ID NO: 2291644 - DNA, 25 bp, Homo sapien
tctcaaaggctcgaccttctaatac

SEQ ID NO: 2291645 - DNA, 25 bp, Homo sapien
atccccgcctggcagctggcgcgcg

SEQ ID NO: 2291646 - DNA, 25 bp, Homo sapien
ccgcccgatccccgcctggcagctg

SEQ ID NO: 2291647 - DNA, 25 bp, Homo sapien
tcaccacctcagctcggcgccgccc

SEQ ID NO: 2291648 - DNA, 25 bp, Homo sapien
acctcagctcggcgccgcccgatcc

SEQ ID NO: 2291649 - DNA, 25 bp, Homo sapien
ttctccccagcttctccacatccgg

SEQ ID NO: 2291650 - DNA, 25 bp, Homo sapien
cttcctcccacgccttctccccagc

SEQ ID NO: 2291651 - DNA, 25 bp, Homo sapien
tccccagcttctccacatccgggag

SEQ ID NO: 2291652 - DNA, 25 bp, Homo sapien
ttcctcccacgccttctccccagct

SEQ ID NO: 2291653 - DNA, 25 bp, Homo sapien
gccaggtgcttaatgttcttcaggg

SEQ ID NO: 2291654 - DNA, 25 bp, Homo sapien
tggccgccgcgagagttgcgctgca

SEQ ID NO: 2291655 - DNA, 25 bp, Homo sapien
ttcttcagggggatgcctttgctgc

SEQ ID NO: 2291656 - DNA, 25 bp, Homo sapien
cccgggccagaattagggctgccag

SEQ ID NO: 2291657 - DNA, 25 bp, Homo sapien
gcccctgaatccagggccgcacgca

SEQ ID NO: 2291658 - DNA, 25 bp, Homo sapien
aggcccctgaatccagggccgcacg

SEQ ID NO: 2291659 - DNA, 25 bp, Homo sapien
aaggcccctgaatccagggccgcac

SEQ ID NO: 2291660 - DNA, 25 bp, Homo sapien
ggcccctgaatccagggccgcacgc

SEQ ID NO: 2291661 - DNA, 25 bp, Homo sapien
gcagctacggaacaaggaaggagct

SEQ ID NO: 2291662 - DNA, 25 bp, Homo sapien
gaactgtcccaggttatgaccattg

SEQ ID NO: 2291663 - DNA, 25 bp, Homo sapien
gtgtaatctccccttttacggatga

SEQ ID NO: 2291664 - DNA, 25 bp, Homo sapien
tcaagggcggagacaggaactgtcc

SEQ ID NO: 2291665 - DNA, 25 bp, Homo sapien
gaagaacatgacttcattagctcaa

SEQ ID NO: 2291666 - DNA, 25 bp, Homo sapien
gaatcagctgggttatagccattga

SEQ ID NO: 2291667 - DNA, 25 bp, Homo sapien
taaccgcaggttacacagttgccta

SEQ ID NO: 2291668 - DNA, 25 bp, Homo sapien
tagcctttacaaaatgatgagtagg

SEQ ID NO: 2291669 - DNA, 25 bp, Homo sapien
tggcatctagtgaggtagagctgtc

SEQ ID NO: 2291670 - DNA, 25 bp, Homo sapien
tatgatggcatctagtgaggtagag

SEQ ID NO: 2291671 - DNA, 25 bp, Homo sapien
catctagtgaggtagagctgtcttt

SEQ ID NO: 2291672 - DNA, 25 bp, Homo sapien
ctagtgaggtagagctgtcttttga

SEQ ID NO: 2291673 - DNA, 25 bp, Homo sapien
gaatttcactccatcgaaactgatg

SEQ ID NO: 2291674 - DNA, 25 bp, Homo sapien
gatgtaaacatggagaagtagcttg

SEQ ID NO: 2291675 - DNA, 25 bp, Homo sapien
tgaatatttcctacaatgtcaacct

SEQ ID NO: 2291676 - DNA, 25 bp, Homo sapien
gaaactgatggcgtctcacaacaga

SEQ ID NO: 2291677 - DNA, 25 bp, Homo sapien
cacgttgccctgaatatagaaagtg

SEQ ID NO: 2291678 - DNA, 25 bp, Homo sapien
tgccctgaatatagaaagtgttaat

SEQ ID NO: 2291679 - DNA, 25 bp, Homo sapien
ttagagtaagtccacgttgccctga

SEQ ID NO: 2291680 - DNA, 25 bp, Homo sapien
agcaaaaagttagagtaagtccacg

SEQ ID NO: 2291681 - DNA, 25 bp, Homo sapien
ggccgtttagctggatttaaattca

SEQ ID NO: 2291682 - DNA, 25 bp, Homo sapien
aattcagaggttcggtcacttcacg

SEQ ID NO: 2291683 - DNA, 25 bp, Homo sapien
catcccagtcttgtcgacgaggccg

SEQ ID NO: 2291684 - DNA, 25 bp, Homo sapien
ttaaattcagaggttcggtcacttc

SEQ ID NO: 2291685 - DNA, 25 bp, Homo sapien
catggattacgtagttttgagtgga

SEQ ID NO: 2291686 - DNA, 25 bp, Homo sapien
tatgagtaccaggacatgtgtagac

SEQ ID NO: 2291687 - DNA, 25 bp, Homo sapien
ccctagaactcaaagtatgcctaca

SEQ ID NO: 2291688 - DNA, 25 bp, Homo sapien
tatcgttgtagcagaattccttgca

SEQ ID NO: 2291689 - DNA, 25 bp, Homo sapien
tgggttaatcatggtcctccttaga

SEQ ID NO: 2291690 - DNA, 25 bp, Homo sapien
tccaagtcacatgcaggcaaaggca

SEQ ID NO: 2291691 - DNA, 25 bp, Homo sapien
aagggcagtctcttgattctaggca

SEQ ID NO: 2291692 - DNA, 25 bp, Homo sapien
tgcctacacattgaccagaagattt

SEQ ID NO: 2291693 - DNA, 25 bp, Homo sapien
tgcaataggccaatcaatatccaca

SEQ ID NO: 2291694 - DNA, 25 bp, Homo sapien
taatactctttgctctgcaataggc

SEQ ID NO: 2291695 - DNA, 25 bp, Homo sapien
atccacatctatatccacactatgt

SEQ ID NO: 2291696 - DNA, 25 bp, Homo sapien
gctcgcatttcgtagtatgccattt

SEQ ID NO: 2291697 - DNA, 25 bp, Homo sapien
caatattgcaaaccaaaagttttat

SEQ ID NO: 2291698 - DNA, 25 bp, Homo sapien
tctttaataaacttatcccaatagc

SEQ ID NO: 2291699 - DNA, 25 bp, Homo sapien
tggtctcctgatacataaatgtggc

SEQ ID NO: 2291700 - DNA, 25 bp, Homo sapien
ttggtgagacatccatcaatattgc

SEQ ID NO: 2291701 - DNA, 25 bp, Homo sapien
actgacttccattttgcaatccagt

SEQ ID NO: 2291702 - DNA, 25 bp, Homo sapien
tgctagcttgtctgatacactgact

SEQ ID NO: 2291703 - DNA, 25 bp, Homo sapien
gaacaggccctttctgagattagcc

SEQ ID NO: 2291704 - DNA, 25 bp, Homo sapien
gacagcgtctgctttgaacaggccc

SEQ ID NO: 2291705 - DNA, 25 bp, Homo sapien
ctatgggtgaataaaaagataccaa

SEQ ID NO: 2291706 - DNA, 25 bp, Homo sapien
tatgggtgaataaaaagataccaac

SEQ ID NO: 2291707 - DNA, 25 bp, Homo sapien
ctatctgtaggcactatgttaagca

SEQ ID NO: 2291708 - DNA, 25 bp, Homo sapien
gaagtctctagatcacatgctccca

SEQ ID NO: 2291709 - DNA, 25 bp, Homo sapien
ccatgctgcgtatcatcataggtac

SEQ ID NO: 2291710 - DNA, 25 bp, Homo sapien
gaaaactaaggtatacagaagcttg

SEQ ID NO: 2291711 - DNA, 25 bp, Homo sapien
tctggcaacttcagtaagacctagg

SEQ ID NO: 2291712 - DNA, 25 bp, Homo sapien
tacagtataattgaggtccagggtt

SEQ ID NO: 2291713 - DNA, 25 bp, Homo sapien
gagcataattgctacctgccatgca

SEQ ID NO: 2291714 - DNA, 25 bp, Homo sapien
tttcaaacatatgcgagaaccccaa

SEQ ID NO: 2291715 - DNA, 25 bp, Homo sapien
tagaacaggcatcagcaggagcgcc

SEQ ID NO: 2291716 - DNA, 25 bp, Homo sapien
tgcaaattctcggatggcaccacgg

SEQ ID NO: 2291717 - DNA, 25 bp, Homo sapien
ggcaccacggccaccattacatttg

SEQ ID NO: 2291718 - DNA, 25 bp, Homo sapien
cattagtaggcaaatgtgctctgca

SEQ ID NO: 2291719 - DNA, 25 bp, Homo sapien
ataaaatcccaacatctttgaaagc

SEQ ID NO: 2291720 - DNA, 25 bp, Homo sapien
taatagaagggcatgtcttaccata

SEQ ID NO: 2291721 - DNA, 25 bp, Homo sapien
cacacagttttacagggtacaatac

SEQ ID NO: 2291722 - DNA, 25 bp, Homo sapien
cactgtccccagataaataaaatcc

SEQ ID NO: 2291723 - DNA, 25 bp, Homo sapien
agtttcgtctgcatggagattgtcg

SEQ ID NO: 2291724 - DNA, 25 bp, Homo sapien
gaaaccttgaatagagatgtgatac

SEQ ID NO: 2291725 - DNA, 25 bp, Homo sapien
agattatatttgagtttcgtctgca

SEQ ID NO: 2291726 - DNA, 25 bp, Homo sapien
ctgcatggagattgtcgctgaaacc

SEQ ID NO: 2291727 - DNA, 25 bp, Homo sapien
tcagtgcctcttaatccattctgag

SEQ ID NO: 2291728 - DNA, 25 bp, Homo sapien
gtcacaatatgttattgattcttgc

SEQ ID NO: 2291729 - DNA, 25 bp, Homo sapien
gcctttcagtgcctcttaatccatt

SEQ ID NO: 2291730 - DNA, 25 bp, Homo sapien
ccattctgagtgtaataagaaattt

SEQ ID NO: 2291731 - DNA, 25 bp, Homo sapien
cctgggcacgagagcttgagcttca

SEQ ID NO: 2291732 - DNA, 25 bp, Homo sapien
gcctcctgggcacgagagcttgagc

SEQ ID NO: 2291733 - DNA, 25 bp, Homo sapien
gagtgtgacactgagtctctaaccc

SEQ ID NO: 2291734 - DNA, 25 bp, Homo sapien
cttggagtgtgacactgagtctcta

SEQ ID NO: 2291735 - DNA, 25 bp, Homo sapien
tcataggtcacccttccaaggttca

SEQ ID NO: 2291736 - DNA, 25 bp, Homo sapien
accaatgattttatccgatagttga

SEQ ID NO: 2291737 - DNA, 25 bp, Homo sapien
gatcccaaatcgtcttagcttttca

SEQ ID NO: 2291738 - DNA, 25 bp, Homo sapien
gcttttcataggtcacccttccaag

SEQ ID NO: 2291739 - DNA, 25 bp, Homo sapien
ttttcctcaaaagttactgtggcca

SEQ ID NO: 2291740 - DNA, 25 bp, Homo sapien
tttcctcaaaagttactgtggccac

SEQ ID NO: 2291741 - DNA, 25 bp, Homo sapien
tgtaaatatagtcgtaatctttcag

SEQ ID NO: 2291742 - DNA, 25 bp, Homo sapien
actgtaaatatagtcgtaatctttc

SEQ ID NO: 2291743 - DNA, 25 bp, Homo sapien
ctggcagtgactgtaaatatagtcg

SEQ ID NO: 2291744 - DNA, 25 bp, Homo sapien
gcagtgactgtaaatatagtcgtaa

SEQ ID NO: 2291745 - DNA, 25 bp, Homo sapien
taataccagggcacatgcttattcc

SEQ ID NO: 2291746 - DNA, 25 bp, Homo sapien
agctgcctcttgcaaatatccttga

SEQ ID NO: 2291747 - DNA, 25 bp, Homo sapien
ttagtcactatgttcctcctcttgt

SEQ ID NO: 2291748 - DNA, 25 bp, Homo sapien
cagtttgtgggcagcgtaagaacag

SEQ ID NO: 2291749 - DNA, 25 bp, Homo sapien
aatttaaccgtatccttaatgactg

SEQ ID NO: 2291750 - DNA, 25 bp, Homo sapien
tttaaccgtatccttaatgactgac

SEQ ID NO: 2291751 - DNA, 25 bp, Homo sapien
tcagttgacattcgtttgagttgga

SEQ ID NO: 2291752 - DNA, 25 bp, Homo sapien
tgacattcgtttgagttggaaaaaa

SEQ ID NO: 2291753 - DNA, 25 bp, Homo sapien
tctctagctgctttaaagatcctgt

SEQ ID NO: 2291754 - DNA, 25 bp, Homo sapien
tttcccagaactagcaaatacactc

SEQ ID NO: 2291755 - DNA, 25 bp, Homo sapien
gctgctttaaagatcctgtaaatga

SEQ ID NO: 2291756 - DNA, 25 bp, Homo sapien
gcaaatacactctctagctgcttta

SEQ ID NO: 2291757 - DNA, 25 bp, Homo sapien
cattggagacagcataaggatctac

SEQ ID NO: 2291758 - DNA, 25 bp, Homo sapien
ggacaagctcagatcaacttcacca

SEQ ID NO: 2291759 - DNA, 25 bp, Homo sapien
taaggatctactatttccgtgagga

SEQ ID NO: 2291760 - DNA, 25 bp, Homo sapien
aaggacaagctcagatcaacttcac

SEQ ID NO: 2291761 - DNA, 25 bp, Homo sapien
gttggaatgtcaagtcagcatttcc

SEQ ID NO: 2291762 - DNA, 25 bp, Homo sapien
tggagtgaaggtgttagtgataggg

SEQ ID NO: 2291763 - DNA, 25 bp, Homo sapien
tgatagggtggtgatcgtggaacag

SEQ ID NO: 2291764 - DNA, 25 bp, Homo sapien
tgatcgtggaacagttggaatgtca

SEQ ID NO: 2291765 - DNA, 25 bp, Homo sapien
tactaagcactgcacaaccatgagg

SEQ ID NO: 2291766 - DNA, 25 bp, Homo sapien
catgaggcacatagaactgatacgc

SEQ ID NO: 2291767 - DNA, 25 bp, Homo sapien
tatggttggcatcgcagcttacccg

SEQ ID NO: 2291768 - DNA, 25 bp, Homo sapien
tacccgtgttttactgcgagagaag

SEQ ID NO: 2291769 - DNA, 25 bp, Homo sapien
tcaaggcaacagactagtttgttcc

SEQ ID NO: 2291770 - DNA, 25 bp, Homo sapien
tctttgcagtgaaaacccgccttgt

SEQ ID NO: 2291771 - DNA, 25 bp, Homo sapien
tgcacttcagggaggctttttaaaa

SEQ ID NO: 2291772 - DNA, 25 bp, Homo sapien
tatgtgcatggccaattggagagga

SEQ ID NO: 2291773 - DNA, 25 bp, Homo sapien
gggctataatgcgtgtctcagctct

SEQ ID NO: 2291774 - DNA, 25 bp, Homo sapien
tctttagtcaattcattttgggttg

SEQ ID NO: 2291775 - DNA, 25 bp, Homo sapien
tagtcaattcattttgggttgccat

SEQ ID NO: 2291776 - DNA, 25 bp, Homo sapien
ctataatgcgtgtctcagctcttct

SEQ ID NO: 2291777 - DNA, 25 bp, Homo sapien
ctggatgccctgcctgttctttgtg

SEQ ID NO: 2291778 - DNA, 25 bp, Homo sapien
ggatgccctgcctgttctttgtgtt

SEQ ID NO: 2291779 - DNA, 25 bp, Homo sapien
ctttgtgttttgcatgtcttctgtg

SEQ ID NO: 2291780 - DNA, 25 bp, Homo sapien
ttgtgttttgcatgtcttctgtgac

SEQ ID NO: 2291781 - DNA, 25 bp, Homo sapien
tgtagccatgttgtcagtttctctg

SEQ ID NO: 2291782 - DNA, 25 bp, Homo sapien
cagctgtttgtacatgtggtgggat

SEQ ID NO: 2291783 - DNA, 25 bp, Homo sapien
agagtgcagggtttcatgtagccat

SEQ ID NO: 2291784 - DNA, 25 bp, Homo sapien
tacatgtggtgggattaagctagca

SEQ ID NO: 2291785 - DNA, 25 bp, Homo sapien
catattttggccttgtgggataatc

SEQ ID NO: 2291786 - DNA, 25 bp, Homo sapien
tgttaggaggcatactggctggctt

SEQ ID NO: 2291787 - DNA, 25 bp, Homo sapien
aagttaaagctatcaccatgatggc

SEQ ID NO: 2291788 - DNA, 25 bp, Homo sapien
ccatgatggcatacgttgaggagga

SEQ ID NO: 2291789 - DNA, 25 bp, Homo sapien
ggttccaaggcttacagtttgactg

SEQ ID NO: 2291790 - DNA, 25 bp, Homo sapien
gaactgtcttctagctgtggcattg

SEQ ID NO: 2291791 - DNA, 25 bp, Homo sapien
tagggcttggtaccatctgaagttt

SEQ ID NO: 2291792 - DNA, 25 bp, Homo sapien
gcagccaagaccgtaagagctgtgt

SEQ ID NO: 2291793 - DNA, 25 bp, Homo sapien
gacgccacgggccacatgtttagga

SEQ ID NO: 2291794 - DNA, 25 bp, Homo sapien
gaccctcgccgagggcgaccgtgat

SEQ ID NO: 2291795 - DNA, 25 bp, Homo sapien
agggcgaccgtgatgctgcagaacc

SEQ ID NO: 2291796 - DNA, 25 bp, Homo sapien
gtttaggagggagccgagccttctc

SEQ ID NO: 2291797 - DNA, 25 bp, Homo sapien
tccaaggacttggtgcggcgcagag

SEQ ID NO: 2291798 - DNA, 25 bp, Homo sapien
ctgatgagagcgagttcttttcttc

SEQ ID NO: 2291799 - DNA, 25 bp, Homo sapien
gaattaactgatgagagcgagttct

SEQ ID NO: 2291800 - DNA, 25 bp, Homo sapien
tccccgggcgtttgtctgcgaagtc

SEQ ID NO: 2291801 - DNA, 25 bp, Homo sapien
aggatattagccagtctccgccaca

SEQ ID NO: 2291802 - DNA, 25 bp, Homo sapien
acactcagggactgatatatttcta

SEQ ID NO: 2291803 - DNA, 25 bp, Homo sapien
gatcgggtcgaaggaggcaattttg

SEQ ID NO: 2291804 - DNA, 25 bp, Homo sapien
tttttattgtctgccgttatctcca

SEQ ID NO: 2291805 - DNA, 25 bp, Homo sapien
tagtttgagaaccaacctctcgcct

SEQ ID NO: 2291806 - DNA, 25 bp, Homo sapien
tctgcatgtgcaggataggtactgg

SEQ ID NO: 2291807 - DNA, 25 bp, Homo sapien
gaagtctaccggcttgctgaaagtc

SEQ ID NO: 2291808 - DNA, 25 bp, Homo sapien
tctcgcctctcacttgtttttccag

SEQ ID NO: 2291809 - DNA, 25 bp, Homo sapien
ctgctttcattgcatcccataattt

SEQ ID NO: 2291810 - DNA, 25 bp, Homo sapien
ctaatgtagatgtttatagctagtg

SEQ ID NO: 2291811 - DNA, 25 bp, Homo sapien
atagctagtgatttccctctaagca

SEQ ID NO: 2291812 - DNA, 25 bp, Homo sapien
tagatgtttatagctagtgatttcc

SEQ ID NO: 2291813 - DNA, 25 bp, Homo sapien
agtgaccttctgcacatcagtgaaa

SEQ ID NO: 2291814 - DNA, 25 bp, Homo sapien
ggaggctctatcttggatacagtga

SEQ ID NO: 2291815 - DNA, 25 bp, Homo sapien
cttctgcacatcagtgaaaggactg

SEQ ID NO: 2291816 - DNA, 25 bp, Homo sapien
catcagtgaaaggactgaaactaga

SEQ ID NO: 2291817 - DNA, 25 bp, Homo sapien
taaaggatctccacttaatgggttc

SEQ ID NO: 2291818 - DNA, 25 bp, Homo sapien
tgttccagaggcacaaataaaggat

SEQ ID NO: 2291819 - DNA, 25 bp, Homo sapien
aaggatctccacttaatgggttcca

SEQ ID NO: 2291820 - DNA, 25 bp, Homo sapien
ggatctccacttaatgggttccaag

SEQ ID NO: 2291821 - DNA, 25 bp, Homo sapien
gaaactgctagaaatcaggttgagg

SEQ ID NO: 2291822 - DNA, 25 bp, Homo sapien
tctcatggataagattttcaaagaa

SEQ ID NO: 2291823 - DNA, 25 bp, Homo sapien
tataaggctgcaggtaactattcca

SEQ ID NO: 2291824 - DNA, 25 bp, Homo sapien
ttttgtattgcagtcagtcacaagc

SEQ ID NO: 2291825 - DNA, 25 bp, Homo sapien
gtagagaagccattttgtctccatc

SEQ ID NO: 2291826 - DNA, 25 bp, Homo sapien
gagcccagaagtactactttaataa

SEQ ID NO: 2291827 - DNA, 25 bp, Homo sapien
tgagagcccagaagtactactttaa

SEQ ID NO: 2291828 - DNA, 25 bp, Homo sapien
gagagcccagaagtactactttaat

SEQ ID NO: 2291829 - DNA, 25 bp, Homo sapien
gcaagtgctgttaattcattcctct

SEQ ID NO: 2291830 - DNA, 25 bp, Homo sapien
tccaggtcactgcaagtgctgttaa

SEQ ID NO: 2291831 - DNA, 25 bp, Homo sapien
taagttattggggtgcatgtggtgt

SEQ ID NO: 2291832 - DNA, 25 bp, Homo sapien
catatgatgtttgggtttccaatcc

SEQ ID NO: 2291833 - DNA, 25 bp, Homo sapien
tgatggtgagttagactgtatttgg

SEQ ID NO: 2291834 - DNA, 25 bp, Homo sapien
tttttctgtcgacgccaaatgcccg

SEQ ID NO: 2291835 - DNA, 25 bp, Homo sapien
taatatctgagggattgttgatggt

SEQ ID NO: 2291836 - DNA, 25 bp, Homo sapien
ctgtatttggcatagaatttggaaa

SEQ ID NO: 2291837 - DNA, 25 bp, Homo sapien
tgaccccatattatcagaggctttg

SEQ ID NO: 2291838 - DNA, 25 bp, Homo sapien
tatctgacttgaaaaggaccattct

SEQ ID NO: 2291839 - DNA, 25 bp, Homo sapien
tttgttgcccaaaatcagacatgga

SEQ ID NO: 2291840 - DNA, 25 bp, Homo sapien
gaaatgctcagcctgctaactgaga

SEQ ID NO: 2291841 - DNA, 25 bp, Homo sapien
cgatggattgagatgcatgtgctaa

SEQ ID NO: 2291842 - DNA, 25 bp, Homo sapien
tattattacgcactaaaaaggaaca

SEQ ID NO: 2291843 - DNA, 25 bp, Homo sapien
ctgagggagacttaacgatggattg

SEQ ID NO: 2291844 - DNA, 25 bp, Homo sapien
gagaacatttactgatctccaggcc

SEQ ID NO: 2291845 - DNA, 25 bp, Homo sapien
tttgtcatccccagtgctttaaatg

SEQ ID NO: 2291846 - DNA, 25 bp, Homo sapien
aactagctggggtcagtagggctct

SEQ ID NO: 2291847 - DNA, 25 bp, Homo sapien
tgtgctttatttgtcatccccagtg

SEQ ID NO: 2291848 - DNA, 25 bp, Homo sapien
gctttaaatgtttcgatcattttat

SEQ ID NO: 2291849 - DNA, 25 bp, Homo sapien
gatggtcttgctagtgacttctcat

SEQ ID NO: 2291850 - DNA, 25 bp, Homo sapien
cagggacctaggatttacctgtgtc

SEQ ID NO: 2291851 - DNA, 25 bp, Homo sapien
tctcatttgcttagtgtaatttgtc

SEQ ID NO: 2291852 - DNA, 25 bp, Homo sapien
ttttcattacgtgggatagatggtc

SEQ ID NO: 2291853 - DNA, 25 bp, Homo sapien
taaaggccgactgaaaacgctcttc

SEQ ID NO: 2291854 - DNA, 25 bp, Homo sapien
gcttcggcccgcaagatggagcgtt

SEQ ID NO: 2291855 - DNA, 25 bp, Homo sapien
gaacgatcgatgctttcttccgcgc

SEQ ID NO: 2291856 - DNA, 25 bp, Homo sapien
tatcacagcccatccgaaaagcggc

SEQ ID NO: 2291857 - DNA, 25 bp, Homo sapien
ccaggaagggcaagataaacacttg

SEQ ID NO: 2291858 - DNA, 25 bp, Homo sapien
cattatgagttgcagacaggtgata

SEQ ID NO: 2291859 - DNA, 25 bp, Homo sapien
gaattaatcaccattgcctggaccc

SEQ ID NO: 2291860 - DNA, 25 bp, Homo sapien
catcaaatcaggagacacataaggt

SEQ ID NO: 2291861 - DNA, 25 bp, Homo sapien
tgcagtttgttaacagaaggatcca

SEQ ID NO: 2291862 - DNA, 25 bp, Homo sapien
caactagaggctgcttttaggtact

SEQ ID NO: 2291863 - DNA, 25 bp, Homo sapien
ggtacagttagcacaattcagtccc

SEQ ID NO: 2291864 - DNA, 25 bp, Homo sapien
tacaacacagatgctatgcctaaaa

SEQ ID NO: 2291865 - DNA, 25 bp, Homo sapien
cagtaacccagacctactttctcta

SEQ ID NO: 2291866 - DNA, 25 bp, Homo sapien
cccagacctactttctctaaggatg

SEQ ID NO: 2291867 - DNA, 25 bp, Homo sapien
ttcccagatcacagtaacccagacc

SEQ ID NO: 2291868 - DNA, 25 bp, Homo sapien
tttgttttgagttagtatcgtagca

SEQ ID NO: 2291869 - DNA, 25 bp, Homo sapien
ttaagaagtaacaccaacttgcact

SEQ ID NO: 2291870 - DNA, 25 bp, Homo sapien
tgtacctcagtcttggatttaggct

SEQ ID NO: 2291871 - DNA, 25 bp, Homo sapien
ttacaagcaaagaatccaacgtgcc

SEQ ID NO: 2291872 - DNA, 25 bp, Homo sapien
ccaacgtgcctttgaattgtttcca

SEQ ID NO: 2291873 - DNA, 25 bp, Homo sapien
tgtttaattagccatccctcttgtt

SEQ ID NO: 2291874 - DNA, 25 bp, Homo sapien
aacttcctgacattgtcatagaatt

SEQ ID NO: 2291875 - DNA, 25 bp, Homo sapien
cctgacattgtcatagaatttgtaa

SEQ ID NO: 2291876 - DNA, 25 bp, Homo sapien
acttcaacctgtttaattagccatc

SEQ ID NO: 2291877 - DNA, 25 bp, Homo sapien
ccattagcagtacgcgggatcgcag

SEQ ID NO: 2291878 - DNA, 25 bp, Homo sapien
taagacaactgcaacacttcagagg

SEQ ID NO: 2291879 - DNA, 25 bp, Homo sapien
gggatcgcagtactcgggacaagct

SEQ ID NO: 2291880 - DNA, 25 bp, Homo sapien
gatcactctccgaacttggcctgag

SEQ ID NO: 2291881 - DNA, 25 bp, Homo sapien
ctgacgctggcgtcacgcgcggggc

SEQ ID NO: 2291882 - DNA, 25 bp, Homo sapien
acgctggcgtcacgcgcggggcggg

SEQ ID NO: 2291883 - DNA, 25 bp, Homo sapien
ctggcctgacgctggcgtcacgcgc

SEQ ID NO: 2291884 - DNA, 25 bp, Homo sapien
tggcctgacgctggcgtcacgcgcg

SEQ ID NO: 2291885 - DNA, 25 bp, Homo sapien
agaaaattcctgttgtcggagctgg

SEQ ID NO: 2291886 - DNA, 25 bp, Homo sapien
gaaaattcctgttgtcggagctgga

SEQ ID NO: 2291887 - DNA, 25 bp, Homo sapien
aaaattcctgttgtcggagctggac

SEQ ID NO: 2291888 - DNA, 25 bp, Homo sapien
ggcgccgacagactggtggatcctt

SEQ ID NO: 2291889 - DNA, 25 bp, Homo sapien
gagactaccaccacgacgacggcga

SEQ ID NO: 2291890 - DNA, 25 bp, Homo sapien
caggcgacggcggagactaccacca

SEQ ID NO: 2291891 - DNA, 25 bp, Homo sapien
gcactgttgccgatccgggtctgga

SEQ ID NO: 2291892 - DNA, 25 bp, Homo sapien
cagtgaggccgcaggtgttgcagga

SEQ ID NO: 2291893 - DNA, 25 bp, Homo sapien
tcccggcagcgatgctcctcctgat

SEQ ID NO: 2291894 - DNA, 25 bp, Homo sapien
gaacggtgacgttcagcttgggcac

SEQ ID NO: 2291895 - DNA, 25 bp, Homo sapien
gagggacgtggatgtaattggccat

SEQ ID NO: 2291896 - DNA, 25 bp, Homo sapien
cattttgcagtgaccgtggactggg

SEQ ID NO: 2291897 - DNA, 25 bp, Homo sapien
catggtcgtggtcattactttggga

SEQ ID NO: 2291898 - DNA, 25 bp, Homo sapien
gaagacaaaacgcagtgtgaggcat

SEQ ID NO: 2291899 - DNA, 25 bp, Homo sapien
taagaaccgacctagcgatgcatgg

SEQ ID NO: 2291900 - DNA, 25 bp, Homo sapien
ggaacaacgctttacttacacagag

SEQ ID NO: 2291901 - DNA, 25 bp, Homo sapien
tatcccatggtgagcaagttcctcc

SEQ ID NO: 2291902 - DNA, 25 bp, Homo sapien
ccagatggagcttgtgtggacttca

SEQ ID NO: 2291903 - DNA, 25 bp, Homo sapien
actgccccggcttaatgtcttgaga

SEQ ID NO: 2291904 - DNA, 25 bp, Homo sapien
gccagatcttcctattcttaagaaa

SEQ ID NO: 2291905 - DNA, 25 bp, Homo sapien
ggccagatcttcctattcttaagaa

SEQ ID NO: 2291906 - DNA, 25 bp, Homo sapien
gcccggccagatcttcctattctta

SEQ ID NO: 2291907 - DNA, 25 bp, Homo sapien
ccggccagatcttcctattcttaag

SEQ ID NO: 2291908 - DNA, 25 bp, Homo sapien
cgttctaggtacgattaagatgccc

SEQ ID NO: 2291909 - DNA, 25 bp, Homo sapien
tcctggctaatatgagtgactgctg

SEQ ID NO: 2291910 - DNA, 25 bp, Homo sapien
ttagtagcaaaacaacggcctggca

SEQ ID NO: 2291911 - DNA, 25 bp, Homo sapien
cactaggccttgaagtcatgctgaa

SEQ ID NO: 2291912 - DNA, 25 bp, Homo sapien
acgtaacagccaataagtttatttg

SEQ ID NO: 2291913 - DNA, 25 bp, Homo sapien
gtttatttgtgattccatctgtgaa

SEQ ID NO: 2291914 - DNA, 25 bp, Homo sapien
tcccacgtaacagccaataagttta

SEQ ID NO: 2291915 - DNA, 25 bp, Homo sapien
ggtgtttcccacgtaacagccaata

SEQ ID NO: 2291916 - DNA, 25 bp, Homo sapien
gtggtgcacacccatgagcctgcaa

SEQ ID NO: 2291917 - DNA, 25 bp, Homo sapien
ttattgccataaattctcaccagga

SEQ ID NO: 2291918 - DNA, 25 bp, Homo sapien
ggatccagtgcttctccttgtataa

SEQ ID NO: 2291919 - DNA, 25 bp, Homo sapien
tcatctcgatcgactaataactcag

SEQ ID NO: 2291920 - DNA, 25 bp, Homo sapien
gaccctctgcagccggttaatccaa

SEQ ID NO: 2291921 - DNA, 25 bp, Homo sapien
cctctgcagccggttaatccaaaac

SEQ ID NO: 2291922 - DNA, 25 bp, Homo sapien
cggttaatccaaaacatcttgtagt

SEQ ID NO: 2291923 - DNA, 25 bp, Homo sapien
tgcagccggttaatccaaaacatct

SEQ ID NO: 2291924 - DNA, 25 bp, Homo sapien
taagaaatgtataacacttcaactc

SEQ ID NO: 2291925 - DNA, 25 bp, Homo sapien
aagcaatcggcagtaagaaatgtat

SEQ ID NO: 2291926 - DNA, 25 bp, Homo sapien
attaagtaataagcaatcggcagta

SEQ ID NO: 2291927 - DNA, 25 bp, Homo sapien
tcggcagtaagaaatgtataacact

SEQ ID NO: 2291928 - DNA, 25 bp, Homo sapien
gtgtacagtgtacctttcaagaggt

SEQ ID NO: 2291929 - DNA, 25 bp, Homo sapien
tatgtgatggctaaaaactagggtt

SEQ ID NO: 2291930 - DNA, 25 bp, Homo sapien
ttaacctatgatccagggagccccg

SEQ ID NO: 2291931 - DNA, 25 bp, Homo sapien
tcacaatgatagctaacaggacatg

SEQ ID NO: 2291932 - DNA, 25 bp, Homo sapien
acagggttcttcagtgtcatcttct

SEQ ID NO: 2291933 - DNA, 25 bp, Homo sapien
tttgcttactttctcggcctccact

SEQ ID NO: 2291934 - DNA, 25 bp, Homo sapien
tcatacagggttcttcagtgtcatc

SEQ ID NO: 2291935 - DNA, 25 bp, Homo sapien
tttctcggcctccactctgcttctc

SEQ ID NO: 2291936 - DNA, 25 bp, Homo sapien
gattatctcaggtatacaaggctgg

SEQ ID NO: 2291937 - DNA, 25 bp, Homo sapien
tagttgtggaacaaccaacctcagg

SEQ ID NO: 2291938 - DNA, 25 bp, Homo sapien
gccaagtagagaaccatctgcataa

SEQ ID NO: 2291939 - DNA, 25 bp, Homo sapien
ggtattaccccagataaaaatgctg

SEQ ID NO: 2291940 - DNA, 25 bp, Homo sapien
caaccactaagatatccttcaaggg

SEQ ID NO: 2291941 - DNA, 25 bp, Homo sapien
tgtggtcagaacttagaggaggtac

SEQ ID NO: 2291942 - DNA, 25 bp, Homo sapien
cagttatcttagcaacagacctgga

SEQ ID NO: 2291943 - DNA, 25 bp, Homo sapien
gaaattcaccataagaccagagaag

SEQ ID NO: 2291944 - DNA, 25 bp, Homo sapien
tctctttagaactaagccgtttctg

SEQ ID NO: 2291945 - DNA, 25 bp, Homo sapien
gaactaagccgtttctgctcttctg

SEQ ID NO: 2291946 - DNA, 25 bp, Homo sapien
tcagtgaataagcaaaactcaggga

SEQ ID NO: 2291947 - DNA, 25 bp, Homo sapien
gagggctcggcacagtagttctgct

SEQ ID NO: 2291948 - DNA, 25 bp, Homo sapien
tctgaaactagattggagtcccacg

SEQ ID NO: 2291949 - DNA, 25 bp, Homo sapien
tgaacatacactgaagctggcaaga

SEQ ID NO: 2291950 - DNA, 25 bp, Homo sapien
tctgatttaactggcctggtgtgca

SEQ ID NO: 2291951 - DNA, 25 bp, Homo sapien
gatccactggtgagtcagattcctg

SEQ ID NO: 2291952 - DNA, 25 bp, Homo sapien
tttagcaagctgacgagctattagc

SEQ ID NO: 2291953 - DNA, 25 bp, Homo sapien
tctttagccaaagattagatttggg

SEQ ID NO: 2291954 - DNA, 25 bp, Homo sapien
tagcatggattttagcaagctgacg

SEQ ID NO: 2291955 - DNA, 25 bp, Homo sapien
gccattgtgtgcatgaatagcatgg

SEQ ID NO: 2291956 - DNA, 25 bp, Homo sapien
caacacttaagtgatgaccaggcac

SEQ ID NO: 2291957 - DNA, 25 bp, Homo sapien
tgtgggattcgaaggattataaaac

SEQ ID NO: 2291958 - DNA, 25 bp, Homo sapien
cttggagagcctagggaaaaaatat

SEQ ID NO: 2291959 - DNA, 25 bp, Homo sapien
gatttaaagtataccttggagagcc

SEQ ID NO: 2291960 - DNA, 25 bp, Homo sapien
gaaatcgcgactttttgtcctatcc

SEQ ID NO: 2291961 - DNA, 25 bp, Homo sapien
catggtaagctggactagaaatcgc

SEQ ID NO: 2291962 - DNA, 25 bp, Homo sapien
caggcttacaaaacggctatactcc

SEQ ID NO: 2291963 - DNA, 25 bp, Homo sapien
taattcctcaatagcaccaatcagg

SEQ ID NO: 2291964 - DNA, 25 bp, Homo sapien
ctgagagcttgggatatcacttagg

SEQ ID NO: 2291965 - DNA, 25 bp, Homo sapien
gaatctgagagcttgggatatcact

SEQ ID NO: 2291966 - DNA, 25 bp, Homo sapien
agagcttgggatatcacttaggaac

SEQ ID NO: 2291967 - DNA, 25 bp, Homo sapien
gagaatctgagagcttgggatatca

SEQ ID NO: 2291968 - DNA, 25 bp, Homo sapien
ttatggcaaagcacaacaggtgagc

SEQ ID NO: 2291969 - DNA, 25 bp, Homo sapien
ttcttacacaataggtcattatggc

SEQ ID NO: 2291970 - DNA, 25 bp, Homo sapien
ggtcattatggcaaagcacaacagg

SEQ ID NO: 2291971 - DNA, 25 bp, Homo sapien
caataggtcattatggcaaagcaca

SEQ ID NO: 2291972 - DNA, 25 bp, Homo sapien
tagagataagtgaccacttaaataa

SEQ ID NO: 2291973 - DNA, 25 bp, Homo sapien
gtaacttggcacaaaaacaaatgac

SEQ ID NO: 2291974 - DNA, 25 bp, Homo sapien
aatagttcatctgtacagctgtaaa

SEQ ID NO: 2291975 - DNA, 25 bp, Homo sapien
gaaaacatgggaacttttcacataa

SEQ ID NO: 2291976 - DNA, 25 bp, Homo sapien
tgttgcaatggagactatccagccc

SEQ ID NO: 2291977 - DNA, 25 bp, Homo sapien
aatgcctacaaactgcagggtgctc

SEQ ID NO: 2291978 - DNA, 25 bp, Homo sapien
cctgtcaactgacatggtgagagca

SEQ ID NO: 2291979 - DNA, 25 bp, Homo sapien
aatttcttcccgtgatgcctatctg

SEQ ID NO: 2291980 - DNA, 25 bp, Homo sapien
tctgctaactagtggttgagaatac

SEQ ID NO: 2291981 - DNA, 25 bp, Homo sapien
gagtaacatgacaactacaaagctt

SEQ ID NO: 2291982 - DNA, 25 bp, Homo sapien
tgtatagaactcttaaaacaaagca

SEQ ID NO: 2291983 - DNA, 25 bp, Homo sapien
gatttagagccaaacaagtgactat

SEQ ID NO: 2291984 - DNA, 25 bp, Homo sapien
taatcttcacgctggtgtcctgtag

SEQ ID NO: 2291985 - DNA, 25 bp, Homo sapien
gcaggttcgaagagaacgatacgaa

SEQ ID NO: 2291986 - DNA, 25 bp, Homo sapien
gacagggagtattctagtctgaaac

SEQ ID NO: 2291987 - DNA, 25 bp, Homo sapien
gctctgcaatgttaggcaggttcga

SEQ ID NO: 2291988 - DNA, 25 bp, Homo sapien
gattaatggataaaactacaatttg

SEQ ID NO: 2291989 - DNA, 25 bp, Homo sapien
ctactactttaagggctaggtgtgt

SEQ ID NO: 2291990 - DNA, 25 bp, Homo sapien
tctttatcagcgtaatcaaatcccg

SEQ ID NO: 2291991 - DNA, 25 bp, Homo sapien
tgtaattatcacaatgacaagcaca

SEQ ID NO: 2291992 - DNA, 25 bp, Homo sapien
aatttggcaaactcacattgtacaa

SEQ ID NO: 2291993 - DNA, 25 bp, Homo sapien
caacttcccttagttagggtgccag

SEQ ID NO: 2291994 - DNA, 25 bp, Homo sapien
tggcatacctaatctgtagcagatg

SEQ ID NO: 2291995 - DNA, 25 bp, Homo sapien
tgcaaacaaagtggaactcaacctt

SEQ ID NO: 2291996 - DNA, 25 bp, Homo sapien
tgcgataaacctccagtcagtgcgt

SEQ ID NO: 2291997 - DNA, 25 bp, Homo sapien
gtgcatgtgaacaagtgatgcgata

SEQ ID NO: 2291998 - DNA, 25 bp, Homo sapien
agtcagtgcgtttaagaagcacggg

SEQ ID NO: 2291999 - DNA, 25 bp, Homo sapien
tgaacaagtgatgcgataaacctcc

SEQ ID NO: 2292000 - DNA, 25 bp, Homo sapien
aaaatgaagctaacaagatacagat

SEQ ID NO: 2292001 - DNA, 25 bp, Homo sapien
ttgtacaactgagctaacctaacag

SEQ ID NO: 2292002 - DNA, 25 bp, Homo sapien
gatttcagagatacctatccaccag

SEQ ID NO: 2292003 - DNA, 25 bp, Homo sapien
taaaaatacacagcccagtcctgaa

SEQ ID NO: 2292004 - DNA, 25 bp, Homo sapien
catccctgcttgtagagtaaataca

SEQ ID NO: 2292005 - DNA, 25 bp, Homo sapien
taaatcacggcaattcaactacctc

SEQ ID NO: 2292006 - DNA, 25 bp, Homo sapien
taggagagtgaagacaaccatcatg

SEQ ID NO: 2292007 - DNA, 25 bp, Homo sapien
tcaccagggatcacaaactcaaagg

SEQ ID NO: 2292008 - DNA, 25 bp, Homo sapien
ggtcctatattcgagagaaaaagca

SEQ ID NO: 2292009 - DNA, 25 bp, Homo sapien
tatgccaggtagttgtatccagaat

SEQ ID NO: 2292010 - DNA, 25 bp, Homo sapien
atatgccaggtagttgtatccagaa

SEQ ID NO: 2292011 - DNA, 25 bp, Homo sapien
catatgccaggtagttgtatccaga

SEQ ID NO: 2292012 - DNA, 25 bp, Homo sapien
tgcaaactgattgacttgaatgaag

SEQ ID NO: 2292013 - DNA, 25 bp, Homo sapien
tccttttcagtaacttcagtcccaa

SEQ ID NO: 2292014 - DNA, 25 bp, Homo sapien
ttcaaggtaagcacgcagccactga

SEQ ID NO: 2292015 - DNA, 25 bp, Homo sapien
gactctgtagttctctatctggata

SEQ ID NO: 2292016 - DNA, 25 bp, Homo sapien
tctgaacacttagtctgtgacaggc

SEQ ID NO: 2292017 - DNA, 25 bp, Homo sapien
caaacttgtactgcgccactactgg

SEQ ID NO: 2292018 - DNA, 25 bp, Homo sapien
gacggcctactgtgagacttcaact

SEQ ID NO: 2292019 - DNA, 25 bp, Homo sapien
tcaacttgtgatcaggtgagccaat

SEQ ID NO: 2292020 - DNA, 25 bp, Homo sapien
gtatgtattcctccacccttcaaga

SEQ ID NO: 2292021 - DNA, 25 bp, Homo sapien
ccttcaagaatatggccaggtgagg

SEQ ID NO: 2292022 - DNA, 25 bp, Homo sapien
cagtaaaggctaatgttggcaagag

SEQ ID NO: 2292023 - DNA, 25 bp, Homo sapien
tactgttaacatgtaagagggctgg

SEQ ID NO: 2292024 - DNA, 25 bp, Homo sapien
caaaagcttgtagaggtcttcaaaa

SEQ ID NO: 2292025 - DNA, 25 bp, Homo sapien
cattgtcaagcagagatggtaacta

SEQ ID NO: 2292026 - DNA, 25 bp, Homo sapien
gaaccactagtctaaattgccttgc

SEQ ID NO: 2292027 - DNA, 25 bp, Homo sapien
gactacttacccctgttgcaaagaa

SEQ ID NO: 2292028 - DNA, 25 bp, Homo sapien
ccaatgataaaattcaagttttcac

SEQ ID NO: 2292029 - DNA, 25 bp, Homo sapien
cagtgaaaataactgacaatatttg

SEQ ID NO: 2292030 - DNA, 25 bp, Homo sapien
catttcagtgaaaataactgacaat

SEQ ID NO: 2292031 - DNA, 25 bp, Homo sapien
caatgataaaattcaagttttcacc

SEQ ID NO: 2292032 - DNA, 25 bp, Homo sapien
caaactcaatagtggagtatttggc

SEQ ID NO: 2292033 - DNA, 25 bp, Homo sapien
ccaaggaaatcaaactcaatagtgg

SEQ ID NO: 2292034 - DNA, 25 bp, Homo sapien
tcaaagcccacaatccccaaaagaa

SEQ ID NO: 2292035 - DNA, 25 bp, Homo sapien
gagtatttggcttgaatcaaagccc

SEQ ID NO: 2292036 - DNA, 25 bp, Homo sapien
gtactggttaaaacgaacaattgca

SEQ ID NO: 2292037 - DNA, 25 bp, Homo sapien
actggttaaaacgaacaattgcata

SEQ ID NO: 2292038 - DNA, 25 bp, Homo sapien
tactggttaaaacgaacaattgcat

SEQ ID NO: 2292039 - DNA, 25 bp, Homo sapien
ctggttaaaacgaacaattgcatac

SEQ ID NO: 2292040 - DNA, 25 bp, Homo sapien
actcaggcacttttaatgcagtaac

SEQ ID NO: 2292041 - DNA, 25 bp, Homo sapien
ttactcaggcacttttaatgcagta

SEQ ID NO: 2292042 - DNA, 25 bp, Homo sapien
tactcaggcacttttaatgcagtaa

SEQ ID NO: 2292043 - DNA, 25 bp, Homo sapien
tacactcaacgaacgtgaaacagag

SEQ ID NO: 2292044 - DNA, 25 bp, Homo sapien
gatgtaccaccaacagagacagtga

SEQ ID NO: 2292045 - DNA, 25 bp, Homo sapien
ttatactgccagactacatagagaa

SEQ ID NO: 2292046 - DNA, 25 bp, Homo sapien
caccacatacggatagcagtaggta

SEQ ID NO: 2292047 - DNA, 25 bp, Homo sapien
caatactagtgactatttaataatc

SEQ ID NO: 2292048 - DNA, 25 bp, Homo sapien
tcaaaaattagcaatactagtgact

SEQ ID NO: 2292049 - DNA, 25 bp, Homo sapien
tagtgactatttaataatcaaaaac

SEQ ID NO: 2292050 - DNA, 25 bp, Homo sapien
tagcaatactagtgactatttaata

SEQ ID NO: 2292051 - DNA, 25 bp, Homo sapien
gtgtacaagatcaatgccctaagtg

SEQ ID NO: 2292052 - DNA, 25 bp, Homo sapien
tacatgggcacttatgtgaccgaag

SEQ ID NO: 2292053 - DNA, 25 bp, Homo sapien
gaatatgcagatccagtaagccaac

SEQ ID NO: 2292054 - DNA, 25 bp, Homo sapien
gaccgaagtgcaaagcttgtcagac

SEQ ID NO: 2292055 - DNA, 25 bp, Homo sapien
tgcatagtcccagagctaaagtgag

SEQ ID NO: 2292056 - DNA, 25 bp, Homo sapien
aacagacatcttagcacaccacagg

SEQ ID NO: 2292057 - DNA, 25 bp, Homo sapien
tccaggcagacctacttgatgagtt

SEQ ID NO: 2292058 - DNA, 25 bp, Homo sapien
caggaagtaggagcatcacaacaac

SEQ ID NO: 2292059 - DNA, 25 bp, Homo sapien
cagttcctgtgatctcactgtgtag

SEQ ID NO: 2292060 - DNA, 25 bp, Homo sapien
tagccacaactgttggctattttta

SEQ ID NO: 2292061 - DNA, 25 bp, Homo sapien
caaagccgacaaaccctatttccag

SEQ ID NO: 2292062 - DNA, 25 bp, Homo sapien
actgtgtagccacaactgttggcta

SEQ ID NO: 2292063 - DNA, 25 bp, Homo sapien
caagtttcctagcataaagcatcgc

SEQ ID NO: 2292064 - DNA, 25 bp, Homo sapien
gaatcatgactcaaagaacggagct

SEQ ID NO: 2292065 - DNA, 25 bp, Homo sapien
tttacagactaagcctcaaacatgg

SEQ ID NO: 2292066 - DNA, 25 bp, Homo sapien
tctgcataaagtcgcacaggttact

SEQ ID NO: 2292067 - DNA, 25 bp, Homo sapien
caggagctaatttacagggatacca

SEQ ID NO: 2292068 - DNA, 25 bp, Homo sapien
ggtcttttccagtcacaggagctaa

SEQ ID NO: 2292069 - DNA, 25 bp, Homo sapien
tttctgaggcatagcaaaacaccta

SEQ ID NO: 2292070 - DNA, 25 bp, Homo sapien
tgaccaagctgtacaaaggctccta

SEQ ID NO: 2292071 - DNA, 25 bp, Homo sapien
tgggtggcttccacaacacaaattt

SEQ ID NO: 2292072 - DNA, 25 bp, Homo sapien
aaaactgtccacatagctaccacct

SEQ ID NO: 2292073 - DNA, 25 bp, Homo sapien
tccaaaaactgtccacatagctacc

SEQ ID NO: 2292074 - DNA, 25 bp, Homo sapien
cataacgaaataccatgggctgggt

SEQ ID NO: 2292075 - DNA, 25 bp, Homo sapien
actggcaggccccatttgccaagga

SEQ ID NO: 2292076 - DNA, 25 bp, Homo sapien
cattagaggatctgaacatgccctg

SEQ ID NO: 2292077 - DNA, 25 bp, Homo sapien
tacttctgtagtaattaggtctgaa

SEQ ID NO: 2292078 - DNA, 25 bp, Homo sapien
catttgccaaggagcaattacttct

SEQ ID NO: 2292079 - DNA, 25 bp, Homo sapien
ccctgtcgcaccaacaaagcaggaa

SEQ ID NO: 2292080 - DNA, 25 bp, Homo sapien
gtcattccctgtcgcaccaacaaag

SEQ ID NO: 2292081 - DNA, 25 bp, Homo sapien
gtgtcattccctgtcgcaccaacaa

SEQ ID NO: 2292082 - DNA, 25 bp, Homo sapien
gtcgcaccaacaaagcaggaagctt

SEQ ID NO: 2292083 - DNA, 25 bp, Homo sapien
tcttgctcatgagatgcattaagcg

SEQ ID NO: 2292084 - DNA, 25 bp, Homo sapien
tgaccaatattgatgcaacctgacc

SEQ ID NO: 2292085 - DNA, 25 bp, Homo sapien
gaagagctcctgtcatcgctggaga

SEQ ID NO: 2292086 - DNA, 25 bp, Homo sapien
ggagatgtctcacctacagaactag

SEQ ID NO: 2292087 - DNA, 25 bp, Homo sapien
ctggagagggaatatagtacacggg

SEQ ID NO: 2292088 - DNA, 25 bp, Homo sapien
aacactgtctttggaatggagagtc

SEQ ID NO: 2292089 - DNA, 25 bp, Homo sapien
ggtgagtaggaattgaaaaacactg

SEQ ID NO: 2292090 - DNA, 25 bp, Homo sapien
tacacggggtgagtaggaattgaaa

SEQ ID NO: 2292091 - DNA, 25 bp, Homo sapien
ctccaagtttcttccgtgctttctg

SEQ ID NO: 2292092 - DNA, 25 bp, Homo sapien
ttcaattttcatacatcctccgctc

SEQ ID NO: 2292093 - DNA, 25 bp, Homo sapien
aacttttcaattttcatacatcctc

SEQ ID NO: 2292094 - DNA, 25 bp, Homo sapien
ttttcaattttcatacatcctccgc

SEQ ID NO: 2292095 - DNA, 25 bp, Homo sapien
aattttcatacatcctccgctccta

SEQ ID NO: 2292096 - DNA, 25 bp, Homo sapien
gcatcaggcactccttgtgtttcct

SEQ ID NO: 2292097 - DNA, 25 bp, Homo sapien
tatttcatatccatgaagtgcctgg

SEQ ID NO: 2292098 - DNA, 25 bp, Homo sapien
ttcatatccatgaagtgcctggggc

SEQ ID NO: 2292099 - DNA, 25 bp, Homo sapien
tgggtatttcatatccatgaagtgc

SEQ ID NO: 2292100 - DNA, 25 bp, Homo sapien
tggagccaccaacacataaaactac

SEQ ID NO: 2292101 - DNA, 25 bp, Homo sapien
agtggagccaccaacacataaaact

SEQ ID NO: 2292102 - DNA, 25 bp, Homo sapien
tgtgcctggctaaagaccctggcga

SEQ ID NO: 2292103 - DNA, 25 bp, Homo sapien
tgcctggctaaagaccctggcgatt

SEQ ID NO: 2292104 - DNA, 25 bp, Homo sapien
tcttcaccagagatgtgatgtttaa

SEQ ID NO: 2292105 - DNA, 25 bp, Homo sapien
cagagatgtgatgtttaattgcttc

SEQ ID NO: 2292106 - DNA, 25 bp, Homo sapien
caccagagatgtgatgtttaattgc

SEQ ID NO: 2292107 - DNA, 25 bp, Homo sapien
agagatgtgatgtttaattgcttca

SEQ ID NO: 2292108 - DNA, 25 bp, Homo sapien
cgctttgcaccatggactaatcata

SEQ ID NO: 2292109 - DNA, 25 bp, Homo sapien
ggtcccttggagtaaacatgcataa

SEQ ID NO: 2292110 - DNA, 25 bp, Homo sapien
tcttgtcagcactttcttgggtaga

SEQ ID NO: 2292111 - DNA, 25 bp, Homo sapien
cttgggtagagtgagtgggaaacat

SEQ ID NO: 2292112 - DNA, 25 bp, Homo sapien
caggacccagaacctccggaagagg

SEQ ID NO: 2292113 - DNA, 25 bp, Homo sapien
tatgacccttattaccttcctgagg

SEQ ID NO: 2292114 - DNA, 25 bp, Homo sapien
cagcaaaaacagcaatagccttatg

SEQ ID NO: 2292115 - DNA, 25 bp, Homo sapien
ccttcctgaggttctaaagcaggac

SEQ ID NO: 2292116 - DNA, 25 bp, Homo sapien
aatgtaaaactatgagccgctactg

SEQ ID NO: 2292117 - DNA, 25 bp, Homo sapien
tcttttgttacaccaggctttccac

SEQ ID NO: 2292118 - DNA, 25 bp, Homo sapien
cacagggcaatacataggacagctc

SEQ ID NO: 2292119 - DNA, 25 bp, Homo sapien
aaagccttgttcaattcacagggca

SEQ ID NO: 2292120 - DNA, 25 bp, Homo sapien
tctggcagatcttagccccacactg

SEQ ID NO: 2292121 - DNA, 25 bp, Homo sapien
agatcttagccccacactgtgtaag

SEQ ID NO: 2292122 - DNA, 25 bp, Homo sapien
aagaacaaggcctgtgcatgcagcc

SEQ ID NO: 2292123 - DNA, 25 bp, Homo sapien
gtaagaacaaggcctgtgcatgcag

SEQ ID NO: 2292124 - DNA, 25 bp, Homo sapien
tcctgtcttctacggccctgctaaa

SEQ ID NO: 2292125 - DNA, 25 bp, Homo sapien
cagtggacataggaaatctttttga

SEQ ID NO: 2292126 - DNA, 25 bp, Homo sapien
ctttttgaatcaaaatcttctaaga

SEQ ID NO: 2292127 - DNA, 25 bp, Homo sapien
tcaaaatcttctaagaagggtgatt

SEQ ID NO: 2292128 - DNA, 25 bp, Homo sapien
tgaccccacatcccacttggcttct

SEQ ID NO: 2292129 - DNA, 25 bp, Homo sapien
tgttgaccccacatcccacttggct

SEQ ID NO: 2292130 - DNA, 25 bp, Homo sapien
aataaagctgtggtctggaagtcac

SEQ ID NO: 2292131 - DNA, 25 bp, Homo sapien
gaataaagctgtggtctggaagtca

SEQ ID NO: 2292132 - DNA, 25 bp, Homo sapien
attccctgagatactgccccagtct

SEQ ID NO: 2292133 - DNA, 25 bp, Homo sapien
tccctgagatactgccccagtcttt

SEQ ID NO: 2292134 - DNA, 25 bp, Homo sapien
tattccctgagatactgccccagtc

SEQ ID NO: 2292135 - DNA, 25 bp, Homo sapien
ttccctgagatactgccccagtctt

SEQ ID NO: 2292136 - DNA, 25 bp, Homo sapien
gagtccattggaaacttgggttgag

SEQ ID NO: 2292137 - DNA, 25 bp, Homo sapien
ccagcaagacattgcttcttggtat

SEQ ID NO: 2292138 - DNA, 25 bp, Homo sapien
acagatttgatggttagggagaaga

SEQ ID NO: 2292139 - DNA, 25 bp, Homo sapien
agggagaagagtccattggaaactt

SEQ ID NO: 2292140 - DNA, 25 bp, Homo sapien
aatgccctcgcatgatcctgagctg

SEQ ID NO: 2292141 - DNA, 25 bp, Homo sapien
tacaggaagtgatcgctcactagct

SEQ ID NO: 2292142 - DNA, 25 bp, Homo sapien
aagttccccagtgatccctagggag

SEQ ID NO: 2292143 - DNA, 25 bp, Homo sapien
gacttgaagaatctgtgttgcctcc

SEQ ID NO: 2292144 - DNA, 25 bp, Homo sapien
tggacagttaggttattatcaacct

SEQ ID NO: 2292145 - DNA, 25 bp, Homo sapien
tatcaacttctaggatctctgcaaa

SEQ ID NO: 2292146 - DNA, 25 bp, Homo sapien
gtcttattctgagcgagtttgaaca

SEQ ID NO: 2292147 - DNA, 25 bp, Homo sapien
gagctaccttgtattacattgtagg

SEQ ID NO: 2292148 - DNA, 25 bp, Homo sapien
aggattcatcaactgcttctatttc

SEQ ID NO: 2292149 - DNA, 25 bp, Homo sapien
tcatcaactgcttctatttctgctg

SEQ ID NO: 2292150 - DNA, 25 bp, Homo sapien
ccaggattcatcaactgcttctatt

SEQ ID NO: 2292151 - DNA, 25 bp, Homo sapien
attcatcaactgcttctatttctgc

SEQ ID NO: 2292152 - DNA, 25 bp, Homo sapien
aaaataaccctctttccttcagcat

SEQ ID NO: 2292153 - DNA, 25 bp, Homo sapien
ctctaaagggtgaatggctgtggct

SEQ ID NO: 2292154 - DNA, 25 bp, Homo sapien
taggatcccttggagttttgatgtg

SEQ ID NO: 2292155 - DNA, 25 bp, Homo sapien
actctgggatgtaaactctaaaggg

SEQ ID NO: 2292156 - DNA, 25 bp, Homo sapien
tcaagcctaaggaataggcttcata

SEQ ID NO: 2292157 - DNA, 25 bp, Homo sapien
gagttgtgaagctgtgtcgcccacc

SEQ ID NO: 2292158 - DNA, 25 bp, Homo sapien
ggtctttggttctcatggccagtgg

SEQ ID NO: 2292159 - DNA, 25 bp, Homo sapien
aaggagttgtgaagctgtgtcgccc

SEQ ID NO: 2292160 - DNA, 25 bp, Homo sapien
tttggttctcatggccagtggaaga

SEQ ID NO: 2292161 - DNA, 25 bp, Homo sapien
tcattaagaatgactcccgggcgaa

SEQ ID NO: 2292162 - DNA, 25 bp, Homo sapien
attaagaatgactcccgggcgaacg

SEQ ID NO: 2292163 - DNA, 25 bp, Homo sapien
ctcccgggcgaacgcagcatctaat

SEQ ID NO: 2292164 - DNA, 25 bp, Homo sapien
cgggcgaacgcagcatctaatgggt

SEQ ID NO: 2292165 - DNA, 25 bp, Homo sapien
tagaagcaccactcgttttccaaaa

SEQ ID NO: 2292166 - DNA, 25 bp, Homo sapien
ctgcacctagaagcaccactcgttt

SEQ ID NO: 2292167 - DNA, 25 bp, Homo sapien
gcacctagaagcaccactcgttttc

SEQ ID NO: 2292168 - DNA, 25 bp, Homo sapien
aacaacatctaatcttgccatctcc

SEQ ID NO: 2292169 - DNA, 25 bp, Homo sapien
gagatgtggtgtcaaaaaatgcaga

SEQ ID NO: 2292170 - DNA, 25 bp, Homo sapien
tgagatgtggtgtcaaaaaatgcag

SEQ ID NO: 2292171 - DNA, 25 bp, Homo sapien
aaagccattgcaagcagcttcaatc

SEQ ID NO: 2292172 - DNA, 25 bp, Homo sapien
ttgttgttataagtaacagaaagcc

SEQ ID NO: 2292173 - DNA, 25 bp, Homo sapien
ataagtaacagaaagccattgcaag

SEQ ID NO: 2292174 - DNA, 25 bp, Homo sapien
gccattgcaagcagcttcaatcaat

SEQ ID NO: 2292175 - DNA, 25 bp, Homo sapien
acagatatagactgtccctcagaga

SEQ ID NO: 2292176 - DNA, 25 bp, Homo sapien
ccaaaaagatgtcaggccaccagga

SEQ ID NO: 2292177 - DNA, 25 bp, Homo sapien
cacagccattactagagtaaacaga

SEQ ID NO: 2292178 - DNA, 25 bp, Homo sapien
aacatggtttcgctgaagccacagg

SEQ ID NO: 2292179 - DNA, 25 bp, Homo sapien
caacaagtttctatgatgatagtcg

SEQ ID NO: 2292180 - DNA, 25 bp, Homo sapien
gtttctatgatgatagtcgttgtag

SEQ ID NO: 2292181 - DNA, 25 bp, Homo sapien
tagcaacaagtttctatgatgatag

SEQ ID NO: 2292182 - DNA, 25 bp, Homo sapien
atgatagtcgttgtagacatctgga

SEQ ID NO: 2292183 - DNA, 25 bp, Homo sapien
gcaatgtagcatctttctgcctttg

SEQ ID NO: 2292184 - DNA, 25 bp, Homo sapien
caatgtagcatctttctgcctttgc

SEQ ID NO: 2292185 - DNA, 25 bp, Homo sapien
atgtagcatctttctgcctttgctt

SEQ ID NO: 2292186 - DNA, 25 bp, Homo sapien
ggcaatgtagcatctttctgccttt

SEQ ID NO: 2292187 - DNA, 25 bp, Homo sapien
ttatttctcatgaatctggaggctg

SEQ ID NO: 2292188 - DNA, 25 bp, Homo sapien
aaagtccaatatcacaggaggtgct

SEQ ID NO: 2292189 - DNA, 25 bp, Homo sapien
gctggaaagtccaatatcacaggag

SEQ ID NO: 2292190 - DNA, 25 bp, Homo sapien
tggaaagtccaatatcacaggaggt

SEQ ID NO: 2292191 - DNA, 25 bp, Homo sapien
gtaagagactcaagttgtttgagaa

SEQ ID NO: 2292192 - DNA, 25 bp, Homo sapien
tacttataattgtaagagactcaag

SEQ ID NO: 2292193 - DNA, 25 bp, Homo sapien
aattgtaagagactcaagttgtttg

SEQ ID NO: 2292194 - DNA, 25 bp, Homo sapien
tataattgtaagagactcaagttgt

SEQ ID NO: 2292195 - DNA, 25 bp, Homo sapien
actcccagaactcaaaaacttgaga

SEQ ID NO: 2292196 - DNA, 25 bp, Homo sapien
ccagaactcaaaaacttgagagagg

SEQ ID NO: 2292197 - DNA, 25 bp, Homo sapien
tcccagaactcaaaaacttgagaga

SEQ ID NO: 2292198 - DNA, 25 bp, Homo sapien
cccagaactcaaaaacttgagagag

SEQ ID NO: 2292199 - DNA, 25 bp, Homo sapien
cttcatcagtccaccgggtagctct

SEQ ID NO: 2292200 - DNA, 25 bp, Homo sapien
gctcttctgttgaaacactgctctc

SEQ ID NO: 2292201 - DNA, 25 bp, Homo sapien
tcattatagtccgtattgaggacca

SEQ ID NO: 2292202 - DNA, 25 bp, Homo sapien
aagctcaaatcccagagcccttcat

SEQ ID NO: 2292203 - DNA, 25 bp, Homo sapien
tcttgagtcacatcttgtctcttaa

SEQ ID NO: 2292204 - DNA, 25 bp, Homo sapien
catgaaggtacccatcattgcgctg

SEQ ID NO: 2292205 - DNA, 25 bp, Homo sapien
cctgatatcttgagtcacatcttgt

SEQ ID NO: 2292206 - DNA, 25 bp, Homo sapien
cattgcgctgtatctcctgatatct

SEQ ID NO: 2292207 - DNA, 25 bp, Homo sapien
cattcctctagcagatcccacagtg

SEQ ID NO: 2292208 - DNA, 25 bp, Homo sapien
acattcctctagcagatcccacagt

SEQ ID NO: 2292209 - DNA, 25 bp, Homo sapien
gcacagtggtttgcagtattttcct

SEQ ID NO: 2292210 - DNA, 25 bp, Homo sapien
ccacagccagaattggcacagtggt

SEQ ID NO: 2292211 - DNA, 25 bp, Homo sapien
gatataatccaatgcgacctccatc

SEQ ID NO: 2292212 - DNA, 25 bp, Homo sapien
atataatccaatgcgacctccatcc

SEQ ID NO: 2292213 - DNA, 25 bp, Homo sapien
atacagagctaccagcagcatactt

SEQ ID NO: 2292214 - DNA, 25 bp, Homo sapien
tacagagctaccagcagcatacttg

SEQ ID NO: 2292215 - DNA, 25 bp, Homo sapien
agggaaatcagcaagaacctttttg

SEQ ID NO: 2292216 - DNA, 25 bp, Homo sapien
tttccaatctgtcataaactttccc

SEQ ID NO: 2292217 - DNA, 25 bp, Homo sapien
cctaagttagtacagaagatcttgc

SEQ ID NO: 2292218 - DNA, 25 bp, Homo sapien
ctgtcataaactttccctaagttag

SEQ ID NO: 2292219 - DNA, 25 bp, Homo sapien
tgtgggcttccatcagaactataaa

SEQ ID NO: 2292220 - DNA, 25 bp, Homo sapien
tctgaccaggaagttcactaacact

SEQ ID NO: 2292221 - DNA, 25 bp, Homo sapien
catttacttaatgaccaggtgggct

SEQ ID NO: 2292222 - DNA, 25 bp, Homo sapien
tacacaaggtataaaatgcaggcca

SEQ ID NO: 2292223 - DNA, 25 bp, Homo sapien
cacttgggacgaccagctgtggaaa

SEQ ID NO: 2292224 - DNA, 25 bp, Homo sapien
ggtgctatagcaacccagccaggtg

SEQ ID NO: 2292225 - DNA, 25 bp, Homo sapien
tgcctgcggagaggagctaagcact

SEQ ID NO: 2292226 - DNA, 25 bp, Homo sapien
cgtcatatcaatggaagaggtggcc

SEQ ID NO: 2292227 - DNA, 25 bp, Homo sapien
gactgtcttgtgcaacgtcctcatt

SEQ ID NO: 2292228 - DNA, 25 bp, Homo sapien
taaactctgggtatcagggactgtc

SEQ ID NO: 2292229 - DNA, 25 bp, Homo sapien
cagattattggtttgaaggatgtat

SEQ ID NO: 2292230 - DNA, 25 bp, Homo sapien
tcctctcttaggcagtaaactctgg

SEQ ID NO: 2292231 - DNA, 25 bp, Homo sapien
tgtttccaagtgactcagaagtatg

SEQ ID NO: 2292232 - DNA, 25 bp, Homo sapien
caatatcgatggtaacttcatggag

SEQ ID NO: 2292233 - DNA, 25 bp, Homo sapien
aatttttgttccctcagaatctaag

SEQ ID NO: 2292234 - DNA, 25 bp, Homo sapien
ccaggatgagttcctacattaggaa

SEQ ID NO: 2292235 - DNA, 25 bp, Homo sapien
aaagtgagagccaaactctgagcta

SEQ ID NO: 2292236 - DNA, 25 bp, Homo sapien
tatatctgaaactcaaccgttccag

SEQ ID NO: 2292237 - DNA, 25 bp, Homo sapien
ggaagctctccaatctatatctgaa

SEQ ID NO: 2292238 - DNA, 25 bp, Homo sapien
cagaggaaatcaagttgccgccagt

SEQ ID NO: 2292239 - DNA, 25 bp, Homo sapien
tctaaatcggtaggaagctccttag

SEQ ID NO: 2292240 - DNA, 25 bp, Homo sapien
ctgtctcttctaaatcggtaggaag

SEQ ID NO: 2292241 - DNA, 25 bp, Homo sapien
tcctatcagcatataagagcttctt

SEQ ID NO: 2292242 - DNA, 25 bp, Homo sapien
tcggtaggaagctccttagatctcc

SEQ ID NO: 2292243 - DNA, 25 bp, Homo sapien
agcagttgagtggtagatccaaacc

SEQ ID NO: 2292244 - DNA, 25 bp, Homo sapien
ttgagtggtagatccaaacccattc

SEQ ID NO: 2292245 - DNA, 25 bp, Homo sapien
actggtctgaagtcataaagcagtt

SEQ ID NO: 2292246 - DNA, 25 bp, Homo sapien
cagttgagtggtagatccaaaccca

SEQ ID NO: 2292247 - DNA, 25 bp, Homo sapien
gcacaataatttgggatgacagagg

SEQ ID NO: 2292248 - DNA, 25 bp, Homo sapien
ttgggatgacagagggcattgccat

SEQ ID NO: 2292249 - DNA, 25 bp, Homo sapien
attgggtcttggaccacagcacaat

SEQ ID NO: 2292250 - DNA, 25 bp, Homo sapien
accacagcacaataatttgggatga

SEQ ID NO: 2292251 - DNA, 25 bp, Homo sapien
tagggcatcagtcacagccagcaac

SEQ ID NO: 2292252 - DNA, 25 bp, Homo sapien
cagccagcaacttggtatggtgaca

SEQ ID NO: 2292253 - DNA, 25 bp, Homo sapien
caacttggtatggtgacaataaaac

SEQ ID NO: 2292254 - DNA, 25 bp, Homo sapien
ctacaatgagcaaagatctagggca

SEQ ID NO: 2292255 - DNA, 25 bp, Homo sapien
cccaagtccttcagtaaagcaaatg

SEQ ID NO: 2292256 - DNA, 25 bp, Homo sapien
cagaagtttcacatgccgggttgag

SEQ ID NO: 2292257 - DNA, 25 bp, Homo sapien
agaagtttcacatgccgggttgagc

SEQ ID NO: 2292258 - DNA, 25 bp, Homo sapien
gtccttcagtaaagcaaatgtttca

SEQ ID NO: 2292259 - DNA, 25 bp, Homo sapien
tcaggtccagggcatatatatgtgc

SEQ ID NO: 2292260 - DNA, 25 bp, Homo sapien
gatgggacacgggaaactttcagaa

SEQ ID NO: 2292261 - DNA, 25 bp, Homo sapien
taaacatgctgttaccccgaggatg

SEQ ID NO: 2292262 - DNA, 25 bp, Homo sapien
catatgcatgagaactctggtttcc

SEQ ID NO: 2292263 - DNA, 25 bp, Homo sapien
gatgccaaaatcattccacgaggtc

SEQ ID NO: 2292264 - DNA, 25 bp, Homo sapien
cacgaggtctgctccaagttttcct

SEQ ID NO: 2292265 - DNA, 25 bp, Homo sapien
acactaattgtctcccagccagttg

SEQ ID NO: 2292266 - DNA, 25 bp, Homo sapien
aagtcagactttgttgcagcctgcg

SEQ ID NO: 2292267 - DNA, 25 bp, Homo sapien
tcttgctgggtctgaggtcgtatca

SEQ ID NO: 2292268 - DNA, 25 bp, Homo sapien
catgtacacatccagagcatttcat

SEQ ID NO: 2292269 - DNA, 25 bp, Homo sapien
atttcatgaactgtatgatgtcggc

SEQ ID NO: 2292270 - DNA, 25 bp, Homo sapien
tatgatgtcggcaggtcattaataa

SEQ ID NO: 2292271 - DNA, 25 bp, Homo sapien
catgcacatctgattggctctccac

SEQ ID NO: 2292272 - DNA, 25 bp, Homo sapien
gaaccaatgcccactctgattcttc

SEQ ID NO: 2292273 - DNA, 25 bp, Homo sapien
aaatgtcatggccctccaatccatc

SEQ ID NO: 2292274 - DNA, 25 bp, Homo sapien
acatctgattggctctccactattc

SEQ ID NO: 2292275 - DNA, 25 bp, Homo sapien
ctcctgtggcactgctcacagctct

SEQ ID NO: 2292276 - DNA, 25 bp, Homo sapien
atctcctcctgtggcactgctcaca

SEQ ID NO: 2292277 - DNA, 25 bp, Homo sapien
agtcatctcctcctgtggcactgct

SEQ ID NO: 2292278 - DNA, 25 bp, Homo sapien
gcactgctcacagctctccgggctg

SEQ ID NO: 2292279 - DNA, 25 bp, Homo sapien
ccagctgaacatccagaaggagaag

SEQ ID NO: 2292280 - DNA, 25 bp, Homo sapien
tctaccatccaggtgttgcgggtcc

SEQ ID NO: 2292281 - DNA, 25 bp, Homo sapien
gatgaaagccactcagaatattcct

SEQ ID NO: 2292282 - DNA, 25 bp, Homo sapien
ccaagatgaaagtgggagcagtcag

SEQ ID NO: 2292283 - DNA, 25 bp, Homo sapien
gaagtctgcaaataggtgtctacct

SEQ ID NO: 2292284 - DNA, 25 bp, Homo sapien
tctgcaaataggtgtctaccttcag

SEQ ID NO: 2292285 - DNA, 25 bp, Homo sapien
caaataggtgtctaccttcagagat

SEQ ID NO: 2292286 - DNA, 25 bp, Homo sapien
agaagtctgcaaataggtgtctacc

SEQ ID NO: 2292287 - DNA, 25 bp, Homo sapien
atcactaccaccacatgctacatac

SEQ ID NO: 2292288 - DNA, 25 bp, Homo sapien
caagaacctgagcaaatatatgttg

SEQ ID NO: 2292289 - DNA, 25 bp, Homo sapien
taagccaagccagtccaagctcatt

SEQ ID NO: 2292290 - DNA, 25 bp, Homo sapien
cccaaaaaatactgctaagccaagc

SEQ ID NO: 2292291 - DNA, 25 bp, Homo sapien
gcatgtggtacaagtgcacagcact

SEQ ID NO: 2292292 - DNA, 25 bp, Homo sapien
gaagaatgaactgtctgagaagttg

SEQ ID NO: 2292293 - DNA, 25 bp, Homo sapien
ctttcttagatggtagtaggtgagg

SEQ ID NO: 2292294 - DNA, 25 bp, Homo sapien
acaagtagagcacatccatatagcc

SEQ ID NO: 2292295 - DNA, 25 bp, Homo sapien
agttgcggctgttctgtcctggtaa

SEQ ID NO: 2292296 - DNA, 25 bp, Homo sapien
ttcagtcagtcacacaaatggttct

SEQ ID NO: 2292297 - DNA, 25 bp, Homo sapien
aatggttctaatgagctggtgctgc

SEQ ID NO: 2292298 - DNA, 25 bp, Homo sapien
ctgcccaccctgtggtaagaaaagg

SEQ ID NO: 2292299 - DNA, 25 bp, Homo sapien
gaaaaggactcttgtctaaagccac

SEQ ID NO: 2292300 - DNA, 25 bp, Homo sapien
tatagctaggaacattgatccctgg

SEQ ID NO: 2292301 - DNA, 25 bp, Homo sapien
gaccagaccacgttgtaagtcagct

SEQ ID NO: 2292302 - DNA, 25 bp, Homo sapien
taagaatactcagtcagtccagcat

SEQ ID NO: 2292303 - DNA, 25 bp, Homo sapien
aaatgtacgttgttgtgccagcacc

SEQ ID NO: 2292304 - DNA, 25 bp, Homo sapien
ggctttgttgaactacccatcctta

SEQ ID NO: 2292305 - DNA, 25 bp, Homo sapien
cagataattgaaacattgactttga

SEQ ID NO: 2292306 - DNA, 25 bp, Homo sapien
gttgaactacccatccttatatccc

SEQ ID NO: 2292307 - DNA, 25 bp, Homo sapien
ttgggggcggtggagtaaggagcat

SEQ ID NO: 2292308 - DNA, 25 bp, Homo sapien
gaaacgtagattgccctgatattaa

SEQ ID NO: 2292309 - DNA, 25 bp, Homo sapien
cttgttactgtgatcctttcgtgac

SEQ ID NO: 2292310 - DNA, 25 bp, Homo sapien
tagaggattgttcttttgaaccttg

SEQ ID NO: 2292311 - DNA, 25 bp, Homo sapien
gatattaagggtgcagtagctctca

SEQ ID NO: 2292312 - DNA, 25 bp, Homo sapien
atcgtcccatagtttcactttcctc

SEQ ID NO: 2292313 - DNA, 25 bp, Homo sapien
tagaagcacttggaggcaatgtgtt

SEQ ID NO: 2292314 - DNA, 25 bp, Homo sapien
cacttggaggcaatgtgttttgtga

SEQ ID NO: 2292315 - DNA, 25 bp, Homo sapien
gtcttattgcagattggaaagccct

SEQ ID NO: 2292316 - DNA, 25 bp, Homo sapien
tgggggcaccggttcacaaattctg

SEQ ID NO: 2292317 - DNA, 25 bp, Homo sapien
tccgaccagcttcaaaaaacggcac

SEQ ID NO: 2292318 - DNA, 25 bp, Homo sapien
cgaccagcttcaaaaaacggcacac

SEQ ID NO: 2292319 - DNA, 25 bp, Homo sapien
ttccgaccagcttcaaaaaacggca

SEQ ID NO: 2292320 - DNA, 25 bp, Homo sapien
ccgaccagcttcaaaaaacggcaca

SEQ ID NO: 2292321 - DNA, 25 bp, Homo sapien
agtctgaaaatgacggtcccctccg

SEQ ID NO: 2292322 - DNA, 25 bp, Homo sapien
cgtgcaggctgcagtaggggcacct

SEQ ID NO: 2292323 - DNA, 25 bp, Homo sapien
acagtctgaaaatgacggtcccctc

SEQ ID NO: 2292324 - DNA, 25 bp, Homo sapien
tgaaaatgacggtcccctccgtgca

SEQ ID NO: 2292325 - DNA, 25 bp, Homo sapien
ggtatctaaccaaattgcaatcgac

SEQ ID NO: 2292326 - DNA, 25 bp, Homo sapien
cttcaacaacagacaggtggatatt

SEQ ID NO: 2292327 - DNA, 25 bp, Homo sapien
agtggtggtagagtgatgaccatcc

SEQ ID NO: 2292328 - DNA, 25 bp, Homo sapien
tcctccgggtttcacttgcaatgac

SEQ ID NO: 2292329 - DNA, 25 bp, Homo sapien
taagtggttggtcttgcctatccag

SEQ ID NO: 2292330 - DNA, 25 bp, Homo sapien
cttgcctatccaggtgtaggagcag

SEQ ID NO: 2292331 - DNA, 25 bp, Homo sapien
ctggtaagtggttggtcttgcctat

SEQ ID NO: 2292332 - DNA, 25 bp, Homo sapien
ggttggtcttgcctatccaggtgta

SEQ ID NO: 2292333 - DNA, 25 bp, Homo sapien
ttgacattcttggtccccttaacaa

SEQ ID NO: 2292334 - DNA, 25 bp, Homo sapien
tcattgacattcttggtccccttaa

SEQ ID NO: 2292335 - DNA, 25 bp, Homo sapien
tttagttcattgacattcttggtcc

SEQ ID NO: 2292336 - DNA, 25 bp, Homo sapien
ctggtccagaaacttttagttcatt

SEQ ID NO: 2292337 - DNA, 25 bp, Homo sapien
ctttcatacccacaaatgcccgcat

SEQ ID NO: 2292338 - DNA, 25 bp, Homo sapien
ctgctttcatacccacaaatgcccg

SEQ ID NO: 2292339 - DNA, 25 bp, Homo sapien
tggcacccaagctgaacccgtttta

SEQ ID NO: 2292340 - DNA, 25 bp, Homo sapien
ctggcacccaagctgaacccgtttt

SEQ ID NO: 2292341 - DNA, 25 bp, Homo sapien
gggcactggtatcaccttcactggg

SEQ ID NO: 2292342 - DNA, 25 bp, Homo sapien
tgtgggcactggtatcaccttcact

SEQ ID NO: 2292343 - DNA, 25 bp, Homo sapien
gatgtgggcactggtatcaccttca

SEQ ID NO: 2292344 - DNA, 25 bp, Homo sapien
gggatgtgggcactggtatcacctt

SEQ ID NO: 2292345 - DNA, 25 bp, Homo sapien
tatcttgtggctggtactgtcctac

SEQ ID NO: 2292346 - DNA, 25 bp, Homo sapien
tgtggctggtactgtcctacgacca

SEQ ID NO: 2292347 - DNA, 25 bp, Homo sapien
gtcctacgaccatcttgctcatcat

SEQ ID NO: 2292348 - DNA, 25 bp, Homo sapien
ggtactgtcctacgaccatcttgct

SEQ ID NO: 2292349 - DNA, 25 bp, Homo sapien
ggatatcgccatgaatgctccagga

SEQ ID NO: 2292350 - DNA, 25 bp, Homo sapien
tcatctgccaacattgcggatatcg

SEQ ID NO: 2292351 - DNA, 25 bp, Homo sapien
gacatgagatactctcttggcctga

SEQ ID NO: 2292352 - DNA, 25 bp, Homo sapien
gtaatggaaactctagactgttcag

SEQ ID NO: 2292353 - DNA, 25 bp, Homo sapien
tcgtctagccgagaggttcaacatg

SEQ ID NO: 2292354 - DNA, 25 bp, Homo sapien
tcatcctcagtaggccagactggct

SEQ ID NO: 2292355 - DNA, 25 bp, Homo sapien
tcatatgctggagggtcgtctagcc

SEQ ID NO: 2292356 - DNA, 25 bp, Homo sapien
cactatataacaagggtggcccttt

SEQ ID NO: 2292357 - DNA, 25 bp, Homo sapien
gggaaatccaagatggtctcactta

SEQ ID NO: 2292358 - DNA, 25 bp, Homo sapien
gcagtcagtgttggatgctgcctag

SEQ ID NO: 2292359 - DNA, 25 bp, Homo sapien
gcctaggttggcttcctttcgtgaa

SEQ ID NO: 2292360 - DNA, 25 bp, Homo sapien
tgatttcacttattcagccagatgg

SEQ ID NO: 2292361 - DNA, 25 bp, Homo sapien
caaaaaatatacttccatgttacag

SEQ ID NO: 2292362 - DNA, 25 bp, Homo sapien
tcagttacctatgtgaacaaccata

SEQ ID NO: 2292363 - DNA, 25 bp, Homo sapien
aatgtgcagccaaacgtaacttgac

SEQ ID NO: 2292364 - DNA, 25 bp, Homo sapien
taaaacctctatagtacacctttgc

SEQ ID NO: 2292365 - DNA, 25 bp, Homo sapien
tttgagtcataagctttggaactcc

SEQ ID NO: 2292366 - DNA, 25 bp, Homo sapien
tttggaactccaagccgttactgac

SEQ ID NO: 2292367 - DNA, 25 bp, Homo sapien
ggaatttgtagacttctttggaggc

SEQ ID NO: 2292368 - DNA, 25 bp, Homo sapien
caagccgttactgactgatggaatt

SEQ ID NO: 2292369 - DNA, 25 bp, Homo sapien
gactagccccaggtccatgctctga

SEQ ID NO: 2292370 - DNA, 25 bp, Homo sapien
agactagccccaggtccatgctctg

SEQ ID NO: 2292371 - DNA, 25 bp, Homo sapien
tttagcagttaccaatccagactag

SEQ ID NO: 2292372 - DNA, 25 bp, Homo sapien
agcagttaccaatccagactagccc

SEQ ID NO: 2292373 - DNA, 25 bp, Homo sapien
tgtattggccatgcgagttcactca

SEQ ID NO: 2292374 - DNA, 25 bp, Homo sapien
gatggcatcctctcatagggtctgg

SEQ ID NO: 2292375 - DNA, 25 bp, Homo sapien
gacctgagctgaacgtactacacat

SEQ ID NO: 2292376 - DNA, 25 bp, Homo sapien
gggctcctggaacgtgaatctctgg

SEQ ID NO: 2292377 - DNA, 25 bp, Homo sapien
tgatttgcactatcgcctgggagac

SEQ ID NO: 2292378 - DNA, 25 bp, Homo sapien
cctacgtgggtaggctgaaagaact

SEQ ID NO: 2292379 - DNA, 25 bp, Homo sapien
tgcagataaatgtcagcctacgtgg

SEQ ID NO: 2292380 - DNA, 25 bp, Homo sapien
tattttccaggttatcagctatagg

SEQ ID NO: 2292381 - DNA, 25 bp, Homo sapien
ggaaagcagagagttcaattgtggt

SEQ ID NO: 2292382 - DNA, 25 bp, Homo sapien
tctttgtacacaacagggtgggcga

SEQ ID NO: 2292383 - DNA, 25 bp, Homo sapien
ggctcctgctatattgcatatctgc

SEQ ID NO: 2292384 - DNA, 25 bp, Homo sapien
tacacaacagggtgggcgactgatg

SEQ ID NO: 2292385 - DNA, 25 bp, Homo sapien
gccctttaaagcataacaacccgca

SEQ ID NO: 2292386 - DNA, 25 bp, Homo sapien
taacaacccgcagtgatgtaagtgc

SEQ ID NO: 2292387 - DNA, 25 bp, Homo sapien
tcatgtctgtttggacgtgctgggt

SEQ ID NO: 2292388 - DNA, 25 bp, Homo sapien
tgtaagtgcctttctgtctcatata

SEQ ID NO: 2292389 - DNA, 25 bp, Homo sapien
tacaaggaaaatcatcagggacaaa

SEQ ID NO: 2292390 - DNA, 25 bp, Homo sapien
ctacaaggaaaatcatcagggacaa

SEQ ID NO: 2292391 - DNA, 25 bp, Homo sapien
aagtctttgtaaagttcgtgttcat

SEQ ID NO: 2292392 - DNA, 25 bp, Homo sapien
caaaagcttccagtggattgtgttt

SEQ ID NO: 2292393 - DNA, 25 bp, Homo sapien
aaagttcgtgttcataaaattcttg

SEQ ID NO: 2292394 - DNA, 25 bp, Homo sapien
acaaaagcttccagtggattgtgtt

SEQ ID NO: 2292395 - DNA, 25 bp, Homo sapien
aaagctgctgattgatctattgatt

SEQ ID NO: 2292396 - DNA, 25 bp, Homo sapien
aaaagctgctgattgatctattgat

SEQ ID NO: 2292397 - DNA, 25 bp, Homo sapien
gataaaagctgctgattgatctatt

SEQ ID NO: 2292398 - DNA, 25 bp, Homo sapien
taaaagctgctgattgatctattga

SEQ ID NO: 2292399 - DNA, 25 bp, Homo sapien
ttcaatcaacgtgcaccctgtaggg

SEQ ID NO: 2292400 - DNA, 25 bp, Homo sapien
tttgggaaacgatcagaagtgtcag

SEQ ID NO: 2292401 - DNA, 25 bp, Homo sapien
cctctatgagttatgctgaagcaac

SEQ ID NO: 2292402 - DNA, 25 bp, Homo sapien
gattgaagaacatttagattgcctc

SEQ ID NO: 2292403 - DNA, 25 bp, Homo sapien
tacagggattatgataagctggtaa

SEQ ID NO: 2292404 - DNA, 25 bp, Homo sapien
tatgataagctggtaaagtatgagg

SEQ ID NO: 2292405 - DNA, 25 bp, Homo sapien
gaggtacgttccatcccatatatct

SEQ ID NO: 2292406 - DNA, 25 bp, Homo sapien
ccattggaaacgaggtacgttccat

SEQ ID NO: 2292407 - DNA, 25 bp, Homo sapien
tatgcaatattagggaaccacctgc

SEQ ID NO: 2292408 - DNA, 25 bp, Homo sapien
caagagttggctgaattctttccct

SEQ ID NO: 2292409 - DNA, 25 bp, Homo sapien
tagccaagctagttagtgacctcac

SEQ ID NO: 2292410 - DNA, 25 bp, Homo sapien
gaaatcacccttgttcaatcttctg

SEQ ID NO: 2292411 - DNA, 25 bp, Homo sapien
gacaatatgccgtggactataccat

SEQ ID NO: 2292412 - DNA, 25 bp, Homo sapien
tatagccatagtgtgtgaacagcca

SEQ ID NO: 2292413 - DNA, 25 bp, Homo sapien
gaatgttgttctagcaatccctagg

SEQ ID NO: 2292414 - DNA, 25 bp, Homo sapien
gagcttacggtatcctgacagaata

SEQ ID NO: 2292415 - DNA, 25 bp, Homo sapien
caagttctccaaatatggctccagc

SEQ ID NO: 2292416 - DNA, 25 bp, Homo sapien
agctccaagttctccaaatatggct

SEQ ID NO: 2292417 - DNA, 25 bp, Homo sapien
aagttctccaaatatggctccagca

SEQ ID NO: 2292418 - DNA, 25 bp, Homo sapien
tccaagttctccaaatatggctcca

SEQ ID NO: 2292419 - DNA, 25 bp, Homo sapien
caacacaactggcaatataagcaaa

SEQ ID NO: 2292420 - DNA, 25 bp, Homo sapien
cataagttgggaattttatagcaga

SEQ ID NO: 2292421 - DNA, 25 bp, Homo sapien
cattgagggagaatatggaagcccc

SEQ ID NO: 2292422 - DNA, 25 bp, Homo sapien
gaaaatttgatctggaagtcattga

SEQ ID NO: 2292423 - DNA, 25 bp, Homo sapien
cagtgacggtagaagaagcaaagtg

SEQ ID NO: 2292424 - DNA, 25 bp, Homo sapien
aacacagctggatcttcagatccca

SEQ ID NO: 2292425 - DNA, 25 bp, Homo sapien
gatcccaggtcgagtctgcagggct

SEQ ID NO: 2292426 - DNA, 25 bp, Homo sapien
tgtcagccatgtagcatgttcatta

SEQ ID NO: 2292427 - DNA, 25 bp, Homo sapien
gacaagctagattatattcaacctc

SEQ ID NO: 2292428 - DNA, 25 bp, Homo sapien
cttcttaggctagcagagtcagaaa

SEQ ID NO: 2292429 - DNA, 25 bp, Homo sapien
aaatccttcacagaagagacaagct

SEQ ID NO: 2292430 - DNA, 25 bp, Homo sapien
ttcttaggctagcagagtcagaaaa

SEQ ID NO: 2292431 - DNA, 25 bp, Homo sapien
aacattctcgtttctaatgcactca

SEQ ID NO: 2292432 - DNA, 25 bp, Homo sapien
tgcagccaacccttaacattctcgt

SEQ ID NO: 2292433 - DNA, 25 bp, Homo sapien
gtgctccagggaggacgaatcattg

SEQ ID NO: 2292434 - DNA, 25 bp, Homo sapien
acacccagaaaaggcgagcccagtg

SEQ ID NO: 2292435 - DNA, 25 bp, Homo sapien
aaagcttctgttcggtgatgatcca

SEQ ID NO: 2292436 - DNA, 25 bp, Homo sapien
aaaagcttctgttcggtgatgatcc

SEQ ID NO: 2292437 - DNA, 25 bp, Homo sapien
tctgttcggtgatgatccaggagtg

SEQ ID NO: 2292438 - DNA, 25 bp, Homo sapien
gcttctgttcggtgatgatccagga

SEQ ID NO: 2292439 - DNA, 25 bp, Homo sapien
ctgccaatctgactgagagttgaca

SEQ ID NO: 2292440 - DNA, 25 bp, Homo sapien
gccaatctgactgagagttgacatc

SEQ ID NO: 2292441 - DNA, 25 bp, Homo sapien
gctgccaatctgactgagagttgac

SEQ ID NO: 2292442 - DNA, 25 bp, Homo sapien
tagctgccaatctgactgagagttg

SEQ ID NO: 2292443 - DNA, 25 bp, Homo sapien
cattatggctcctgggtttgtgccc

SEQ ID NO: 2292444 - DNA, 25 bp, Homo sapien
ttaacaacactacattggtaccgct

SEQ ID NO: 2292445 - DNA, 25 bp, Homo sapien
cgctcaatcagtgatattataacaa

SEQ ID NO: 2292446 - DNA, 25 bp, Homo sapien
atggctcctgggtttgtgcccttaa

SEQ ID NO: 2292447 - DNA, 25 bp, Homo sapien
cacagtaggctctatcttgtacatg

SEQ ID NO: 2292448 - DNA, 25 bp, Homo sapien
ggacaattaaagagacagcaccatg

SEQ ID NO: 2292449 - DNA, 25 bp, Homo sapien
accatgctccgcgagaccttttact

SEQ ID NO: 2292450 - DNA, 25 bp, Homo sapien
aatgtatgatgggaagcaacagacg

SEQ ID NO: 2292451 - DNA, 25 bp, Homo sapien
ttggaggaatcatgcatgatggtgt

SEQ ID NO: 2292452 - DNA, 25 bp, Homo sapien
ggtgtgcgtggcaattctactttta

SEQ ID NO: 2292453 - DNA, 25 bp, Homo sapien
ctatgagggcatacgggaagcagaa

SEQ ID NO: 2292454 - DNA, 25 bp, Homo sapien
gaaaagaggaatcttatatgattcc

SEQ ID NO: 2292455 - DNA, 25 bp, Homo sapien
tgattactccttggtggctgccgtt

SEQ ID NO: 2292456 - DNA, 25 bp, Homo sapien
ggtggctgccgttctgttttcttcc

SEQ ID NO: 2292457 - DNA, 25 bp, Homo sapien
ctcttggtaggagtgattactcctt

SEQ ID NO: 2292458 - DNA, 25 bp, Homo sapien
tttcttccagtctcttggtaggagt

SEQ ID NO: 2292459 - DNA, 25 bp, Homo sapien
gggatgggaaacatcacattaatga

SEQ ID NO: 2292460 - DNA, 25 bp, Homo sapien
ttgctcattggagcaatccctccac

SEQ ID NO: 2292461 - DNA, 25 bp, Homo sapien
tcacattaatgaatttgctcattgg

SEQ ID NO: 2292462 - DNA, 25 bp, Homo sapien
tgtgggatgggaaacatcacattaa

SEQ ID NO: 2292463 - DNA, 25 bp, Homo sapien
gggcttcaggccttcaaaactctgc

SEQ ID NO: 2292464 - DNA, 25 bp, Homo sapien
ggagcaatgacttctgattggtctg

SEQ ID NO: 2292465 - DNA, 25 bp, Homo sapien
tgattggtctgttccttgtcagtca

SEQ ID NO: 2292466 - DNA, 25 bp, Homo sapien
gcttctcatctaagaggagcaatga

SEQ ID NO: 2292467 - DNA, 25 bp, Homo sapien
tactctgatttagctttgagatttc

SEQ ID NO: 2292468 - DNA, 25 bp, Homo sapien
ttactctgatttagctttgagattt

SEQ ID NO: 2292469 - DNA, 25 bp, Homo sapien
caggaactactggaaattttatgtg

SEQ ID NO: 2292470 - DNA, 25 bp, Homo sapien
tgagaagattcacaggtgattatca

SEQ ID NO: 2292471 - DNA, 25 bp, Homo sapien
ggcatttttggttgtattaacttca

SEQ ID NO: 2292472 - DNA, 25 bp, Homo sapien
tatagcaaagtctgttctattggca

SEQ ID NO: 2292473 - DNA, 25 bp, Homo sapien
cattctttggctttaatttcatata

SEQ ID NO: 2292474 - DNA, 25 bp, Homo sapien
aatgaaatgtaaagcatccccagac

SEQ ID NO: 2292475 - DNA, 25 bp, Homo sapien
aaaatgaaatgtaaagcatccccag

SEQ ID NO: 2292476 - DNA, 25 bp, Homo sapien
tgaaatgtaaagcatccccagacat

SEQ ID NO: 2292477 - DNA, 25 bp, Homo sapien
ttgaagttgctcacaaaaaacagag

SEQ ID NO: 2292478 - DNA, 25 bp, Homo sapien
gcctattatgttgccatttccgaag

SEQ ID NO: 2292479 - DNA, 25 bp, Homo sapien
aaaacagaggcactgcgttgctgca

SEQ ID NO: 2292480 - DNA, 25 bp, Homo sapien
caagtccttgcatttaaaccaacac

SEQ ID NO: 2292481 - DNA, 25 bp, Homo sapien
agtttagttcctcagtacatgcttc

SEQ ID NO: 2292482 - DNA, 25 bp, Homo sapien
gcttctagcctatacttctccttca

SEQ ID NO: 2292483 - DNA, 25 bp, Homo sapien
cccctagaatagtttagttcctcag

SEQ ID NO: 2292484 - DNA, 25 bp, Homo sapien
cctcagtacatgcttctagcctata

SEQ ID NO: 2292485 - DNA, 25 bp, Homo sapien
cagttcaatttggacagagactcaa

SEQ ID NO: 2292486 - DNA, 25 bp, Homo sapien
tctttttgattgatgatctaatctg

SEQ ID NO: 2292487 - DNA, 25 bp, Homo sapien
tctgaccagatgtacgcagttcaat

SEQ ID NO: 2292488 - DNA, 25 bp, Homo sapien
tgtttgattatttcaggtgttgttc

SEQ ID NO: 2292489 - DNA, 25 bp, Homo sapien
tacgcaagagggagtggacagttcc

SEQ ID NO: 2292490 - DNA, 25 bp, Homo sapien
aagggctacacgataggaagtgaac

SEQ ID NO: 2292491 - DNA, 25 bp, Homo sapien
tcccaggagaccttagaacaattct

SEQ ID NO: 2292492 - DNA, 25 bp, Homo sapien
gaacacggtgtagtaagtacgcaag

SEQ ID NO: 2292493 - DNA, 25 bp, Homo sapien
cctgggtcaacagctgaaatggact

SEQ ID NO: 2292494 - DNA, 25 bp, Homo sapien
gaaatggactgggaaaatggcttcc

SEQ ID NO: 2292495 - DNA, 25 bp, Homo sapien
ttgcctgggtcaacagctgaaatgg

SEQ ID NO: 2292496 - DNA, 25 bp, Homo sapien
ttgcttgcctgggtcaacagctgaa

SEQ ID NO: 2292497 - DNA, 25 bp, Homo sapien
tccatggtcagagtgggaccatcgc

SEQ ID NO: 2292498 - DNA, 25 bp, Homo sapien
agggcacccatcatcccatgaaggt

SEQ ID NO: 2292499 - DNA, 25 bp, Homo sapien
agagaagggcttagcagggcaccca

SEQ ID NO: 2292500 - DNA, 25 bp, Homo sapien
ccatcgccacggagcagagaagggc

SEQ ID NO: 2292501 - DNA, 25 bp, Homo sapien
tgtgaaatatataatcgcctaagga

SEQ ID NO: 2292502 - DNA, 25 bp, Homo sapien
cagctgcctagcagtcatgtgaaat

SEQ ID NO: 2292503 - DNA, 25 bp, Homo sapien
gctgcctagcagtcatgtgaaatat

SEQ ID NO: 2292504 - DNA, 25 bp, Homo sapien
tataatcgcctaaggaagaacattc

SEQ ID NO: 2292505 - DNA, 25 bp, Homo sapien
tcacggctccgtaacagtgctggaa

SEQ ID NO: 2292506 - DNA, 25 bp, Homo sapien
gagaaccaaatgttcctgggattca

SEQ ID NO: 2292507 - DNA, 25 bp, Homo sapien
cgccagttgtgaagaagaataacaa

SEQ ID NO: 2292508 - DNA, 25 bp, Homo sapien
ccattctgattggtgctggcactga

SEQ ID NO: 2292509 - DNA, 25 bp, Homo sapien
aaatacataaaggtctcttcactct

SEQ ID NO: 2292510 - DNA, 25 bp, Homo sapien
caatctcatcacattgatgcatgaa

SEQ ID NO: 2292511 - DNA, 25 bp, Homo sapien
taaccccagatccagttggccaatg

SEQ ID NO: 2292512 - DNA, 25 bp, Homo sapien
caaatatgatgggtagttgatacac

SEQ ID NO: 2292513 - DNA, 25 bp, Homo sapien
gaacaatagggtaaaattaatgcca

SEQ ID NO: 2292514 - DNA, 25 bp, Homo sapien
tgacaaccacgtgcaatgtggaaag

SEQ ID NO: 2292515 - DNA, 25 bp, Homo sapien
ccatgtgaagtagagggtccaatat

SEQ ID NO: 2292516 - DNA, 25 bp, Homo sapien
gcagggtttatatctgaactgtcca

SEQ ID NO: 2292517 - DNA, 25 bp, Homo sapien
cctcatgcgggtaccacactgtctt

SEQ ID NO: 2292518 - DNA, 25 bp, Homo sapien
tgtgaattctgagtatccctgctgt

SEQ ID NO: 2292519 - DNA, 25 bp, Homo sapien
tctccttgccccacatattctaaca

SEQ ID NO: 2292520 - DNA, 25 bp, Homo sapien
ttctccttgccccacatattctaac

SEQ ID NO: 2292521 - DNA, 25 bp, Homo sapien
ctccttgccccacatattctaacat

SEQ ID NO: 2292522 - DNA, 25 bp, Homo sapien
tctggcccaacgctaaaatacctgc

SEQ ID NO: 2292523 - DNA, 25 bp, Homo sapien
ttgccggcaattctcctctctggga

SEQ ID NO: 2292524 - DNA, 25 bp, Homo sapien
tatcagctgtatgccatcacaacgg

SEQ ID NO: 2292525 - DNA, 25 bp, Homo sapien
ccagtgcttgggagtaacaaaggtc

SEQ ID NO: 2292526 - DNA, 25 bp, Homo sapien
tcttataaggagatagtcctatcaa

SEQ ID NO: 2292527 - DNA, 25 bp, Homo sapien
tcaaattagagtgccacccttatga

SEQ ID NO: 2292528 - DNA, 25 bp, Homo sapien
taaggagatagtcctatcaaattag

SEQ ID NO: 2292529 - DNA, 25 bp, Homo sapien
cagggtttcactgccgaagagggtg

SEQ ID NO: 2292530 - DNA, 25 bp, Homo sapien
tagctccaggtagatgccattgaag

SEQ ID NO: 2292531 - DNA, 25 bp, Homo sapien
tcatttcatgagtttgggctacaag

SEQ ID NO: 2292532 - DNA, 25 bp, Homo sapien
tgggttcacctctcacgtttgctgg

SEQ ID NO: 2292533 - DNA, 25 bp, Homo sapien
cacttaccgatgaattgacaacact

SEQ ID NO: 2292534 - DNA, 25 bp, Homo sapien
ccaaggcagttgtagggcctgtaca

SEQ ID NO: 2292535 - DNA, 25 bp, Homo sapien
ttttgccagccaaatgccaaggcag

SEQ ID NO: 2292536 - DNA, 25 bp, Homo sapien
gaagtccaactttggttcaagcaga

SEQ ID NO: 2292537 - DNA, 25 bp, Homo sapien
tgcagcccaataaaatggagcctgg

SEQ ID NO: 2292538 - DNA, 25 bp, Homo sapien
ctgtaggtgctgttctcaggtgaaa

SEQ ID NO: 2292539 - DNA, 25 bp, Homo sapien
tgtactgaagtgttgaccaagttca

SEQ ID NO: 2292540 - DNA, 25 bp, Homo sapien
gagcaagtgccaaatttgtactgaa

SEQ ID NO: 2292541 - DNA, 25 bp, Homo sapien
gaggactttatctattgcacaccac

SEQ ID NO: 2292542 - DNA, 25 bp, Homo sapien
gaaccccacataaagcgtccaatga

SEQ ID NO: 2292543 - DNA, 25 bp, Homo sapien
gaacggagaaagatccttcaagcct

SEQ ID NO: 2292544 - DNA, 25 bp, Homo sapien
tcaagaatttatagggaatcccgag

SEQ ID NO: 2292545 - DNA, 25 bp, Homo sapien
tcccgagggcgtggtagcaatgaac

SEQ ID NO: 2292546 - DNA, 25 bp, Homo sapien
tatttgattcacatagggcccagga

SEQ ID NO: 2292547 - DNA, 25 bp, Homo sapien
gatatcctccatgttgaatgtacct

SEQ ID NO: 2292548 - DNA, 25 bp, Homo sapien
ggcttctgacatagctgccggcatt

SEQ ID NO: 2292549 - DNA, 25 bp, Homo sapien
gagagagcgcgcttcctcatgcaga

SEQ ID NO: 2292550 - DNA, 25 bp, Homo sapien
ttgaaacaggattgagctcataaac

SEQ ID NO: 2292551 - DNA, 25 bp, Homo sapien
cagttgaaacaggattgagctcata

SEQ ID NO: 2292552 - DNA, 25 bp, Homo sapien
ctatctttccttgatgtaaagagtg

SEQ ID NO: 2292553 - DNA, 25 bp, Homo sapien
tgacagttgaaacaggattgagctc

SEQ ID NO: 2292554 - DNA, 25 bp, Homo sapien
atgtctcgatacaccaaggcctcca

SEQ ID NO: 2292555 - DNA, 25 bp, Homo sapien
gtttgatggtgggaagcagtccaaa

SEQ ID NO: 2292556 - DNA, 25 bp, Homo sapien
tcaccccaaggcatgtctcgataca

SEQ ID NO: 2292557 - DNA, 25 bp, Homo sapien
tcactgtaaatttcaccccaaggca

SEQ ID NO: 2292558 - DNA, 25 bp, Homo sapien
ctttgttcaccctctgtgctgctcc

SEQ ID NO: 2292559 - DNA, 25 bp, Homo sapien
ttccatcgttagtcaagaatcccag

SEQ ID NO: 2292560 - DNA, 25 bp, Homo sapien
tgagataccgtggaaacagtgtgtg

SEQ ID NO: 2292561 - DNA, 25 bp, Homo sapien
tctagagaccagaaataagaagggt

SEQ ID NO: 2292562 - DNA, 25 bp, Homo sapien
gaagttatgtctgccgtgagatacc

SEQ ID NO: 2292563 - DNA, 25 bp, Homo sapien
ccagtaagcatgttctaagactcca

SEQ ID NO: 2292564 - DNA, 25 bp, Homo sapien
tgtgctgtcagccaaaagacttcaa

SEQ ID NO: 2292565 - DNA, 25 bp, Homo sapien
caacctgaagtgtaagcccagaaga

SEQ ID NO: 2292566 - DNA, 25 bp, Homo sapien
tgagtttgtcatagctgagcctaac

SEQ ID NO: 2292567 - DNA, 25 bp, Homo sapien
ccaggcttcagctataaggctggat

SEQ ID NO: 2292568 - DNA, 25 bp, Homo sapien
ctgatcaacggacactggctgcagc

SEQ ID NO: 2292569 - DNA, 25 bp, Homo sapien
taatgattcccgtattccctcctga

SEQ ID NO: 2292570 - DNA, 25 bp, Homo sapien
cgtattccctcctgatcaacggaca

SEQ ID NO: 2292571 - DNA, 25 bp, Homo sapien
gatgcatagactgattcaggcagac

SEQ ID NO: 2292572 - DNA, 25 bp, Homo sapien
atagactgattcaggcagacctctc

SEQ ID NO: 2292573 - DNA, 25 bp, Homo sapien
ctgatgcatagactgattcaggcag

SEQ ID NO: 2292574 - DNA, 25 bp, Homo sapien
tgcatagactgattcaggcagacct

SEQ ID NO: 2292575 - DNA, 25 bp, Homo sapien
tggcttcccatagcgtggcctctga

SEQ ID NO: 2292576 - DNA, 25 bp, Homo sapien
tcagcttcggactggagtgtccatc

SEQ ID NO: 2292577 - DNA, 25 bp, Homo sapien
ttaacttctggcttcccatagcgtg

SEQ ID NO: 2292578 - DNA, 25 bp, Homo sapien
tggcctctgaagatctcctccctca

SEQ ID NO: 2292579 - DNA, 25 bp, Homo sapien
tatagatttagtaaggtacccatgg

SEQ ID NO: 2292580 - DNA, 25 bp, Homo sapien
agggcaagtggatggaaagaattca

SEQ ID NO: 2292581 - DNA, 25 bp, Homo sapien
taggcaggttacagtgctttgtgct

SEQ ID NO: 2292582 - DNA, 25 bp, Homo sapien
caactgcccatcaaagtgcctttgg

SEQ ID NO: 2292583 - DNA, 25 bp, Homo sapien
aaggggaccgcttcacattctggct

SEQ ID NO: 2292584 - DNA, 25 bp, Homo sapien
catcaaaaggggaccgcttcacatt

SEQ ID NO: 2292585 - DNA, 25 bp, Homo sapien
ggaacatcaaaaggggaccgcttca

SEQ ID NO: 2292586 - DNA, 25 bp, Homo sapien
aaaaggggaccgcttcacattctgg

SEQ ID NO: 2292587 - DNA, 25 bp, Homo sapien
cgattggatgacctaaagaaccagc

SEQ ID NO: 2292588 - DNA, 25 bp, Homo sapien
ctaacgattggatgacctaaagaac

SEQ ID NO: 2292589 - DNA, 25 bp, Homo sapien
taacgattggatgacctaaagaacc

SEQ ID NO: 2292590 - DNA, 25 bp, Homo sapien
aacgattggatgacctaaagaacca

SEQ ID NO: 2292591 - DNA, 25 bp, Homo sapien
tgtgaagtgtagtatagaggtacct

SEQ ID NO: 2292592 - DNA, 25 bp, Homo sapien
tactctgtggcaaatagttctgagc

SEQ ID NO: 2292593 - DNA, 25 bp, Homo sapien
cattcagtcgctgaaataccagcca

SEQ ID NO: 2292594 - DNA, 25 bp, Homo sapien
gccacgtattctatgaggaagtcct

SEQ ID NO: 2292595 - DNA, 25 bp, Homo sapien
taaggtacttagagtaataatgggc

SEQ ID NO: 2292596 - DNA, 25 bp, Homo sapien
tgtatttagtggataactactaatg

SEQ ID NO: 2292597 - DNA, 25 bp, Homo sapien
ggataactactaatgttgttattgg

SEQ ID NO: 2292598 - DNA, 25 bp, Homo sapien
tgttattggtcataaaagttgttaa

SEQ ID NO: 2292599 - DNA, 25 bp, Homo sapien
taaaggagcatatgggagccgttga

SEQ ID NO: 2292600 - DNA, 25 bp, Homo sapien
gccgttgattgcttcgccacaactg

SEQ ID NO: 2292601 - DNA, 25 bp, Homo sapien
tctgtatggaattcatgctttaaag

SEQ ID NO: 2292602 - DNA, 25 bp, Homo sapien
acaactggcgtcttgcctccagctg

SEQ ID NO: 2292603 - DNA, 25 bp, Homo sapien
ccatggcttggcgaatacctacatc

SEQ ID NO: 2292604 - DNA, 25 bp, Homo sapien
ttctacttctgtattcctttccatg

SEQ ID NO: 2292605 - DNA, 25 bp, Homo sapien
tggcttggcgaatacctacatccat

SEQ ID NO: 2292606 - DNA, 25 bp, Homo sapien
tcctttccatggcttggcgaatacc

SEQ ID NO: 2292607 - DNA, 25 bp, Homo sapien
taaagaagagagatctgcatgtaaa

SEQ ID NO: 2292608 - DNA, 25 bp, Homo sapien
ctaaagaagagagatctgcatgtaa

SEQ ID NO: 2292609 - DNA, 25 bp, Homo sapien
tgaatcctgggttcatttaatctat

SEQ ID NO: 2292610 - DNA, 25 bp, Homo sapien
gcagtatgatttctgaagtgaatcc

SEQ ID NO: 2292611 - DNA, 25 bp, Homo sapien
gtttctttcttctacaatctttgca

SEQ ID NO: 2292612 - DNA, 25 bp, Homo sapien
taaactttggttagcgttgctgtgg

SEQ ID NO: 2292613 - DNA, 25 bp, Homo sapien
caggtgcaaacaaagtacgctacag

SEQ ID NO: 2292614 - DNA, 25 bp, Homo sapien
tgtaacaatggctggcacagttggg

SEQ ID NO: 2292615 - DNA, 25 bp, Homo sapien
gtgctaccagatgaaagcttccaag

SEQ ID NO: 2292616 - DNA, 25 bp, Homo sapien
ccagtggccgactagctgtaatact

SEQ ID NO: 2292617 - DNA, 25 bp, Homo sapien
gcagttcattgcctttagtatggac

SEQ ID NO: 2292618 - DNA, 25 bp, Homo sapien
tacctagtgttactttacatgaagc

SEQ ID NO: 2292619 - DNA, 25 bp, Homo sapien
tatggtggcagacctcaagccttca

SEQ ID NO: 2292620 - DNA, 25 bp, Homo sapien
ctatagactatagaccgttgttggg

SEQ ID NO: 2292621 - DNA, 25 bp, Homo sapien
gtgcctgagtgtgcgcatgtgcctc

SEQ ID NO: 2292622 - DNA, 25 bp, Homo sapien
taacattggatttgtgatatttctg

SEQ ID NO: 2292623 - DNA, 25 bp, Homo sapien
gaagacaaatataattgaagcccac

SEQ ID NO: 2292624 - DNA, 25 bp, Homo sapien
gtaaatgtgaatatgagctgaagac

SEQ ID NO: 2292625 - DNA, 25 bp, Homo sapien
tacaggtcagtttgttatcacaatc

SEQ ID NO: 2292626 - DNA, 25 bp, Homo sapien
catgtcctcttacccactattttac

SEQ ID NO: 2292627 - DNA, 25 bp, Homo sapien
gaaagtaatgatgtaaccctggtag

SEQ ID NO: 2292628 - DNA, 25 bp, Homo sapien
tgtttaatcattttgggtctgaaat

SEQ ID NO: 2292629 - DNA, 25 bp, Homo sapien
gagacttgtggccataggactccca

SEQ ID NO: 2292630 - DNA, 25 bp, Homo sapien
taaccacacaatgacggcattaagg

SEQ ID NO: 2292631 - DNA, 25 bp, Homo sapien
ggtagccatggtgacaagcagacag

SEQ ID NO: 2292632 - DNA, 25 bp, Homo sapien
tgctctctgctagcacaaaaaggca

SEQ ID NO: 2292633 - DNA, 25 bp, Homo sapien
tatccatgaatgaacatccatcttc

SEQ ID NO: 2292634 - DNA, 25 bp, Homo sapien
ctgaccagtgttatccatgaatgaa

SEQ ID NO: 2292635 - DNA, 25 bp, Homo sapien
cagtgttatccatgaatgaacatcc

SEQ ID NO: 2292636 - DNA, 25 bp, Homo sapien
gttatccatgaatgaacatccatct

SEQ ID NO: 2292637 - DNA, 25 bp, Homo sapien
taaataaatgccgatgtttggcaat

SEQ ID NO: 2292638 - DNA, 25 bp, Homo sapien
taaatgccgatgtttggcaatagga

SEQ ID NO: 2292639 - DNA, 25 bp, Homo sapien
gattaaataaatgccgatgtttggc

SEQ ID NO: 2292640 - DNA, 25 bp, Homo sapien
tgattaaataaatgccgatgtttgg

SEQ ID NO: 2292641 - DNA, 25 bp, Homo sapien
ctgggagaagtgtaactatgtagta

SEQ ID NO: 2292642 - DNA, 25 bp, Homo sapien
ggagaagtgtaactatgtagtattt

SEQ ID NO: 2292643 - DNA, 25 bp, Homo sapien
tgggagaagtgtaactatgtagtat

SEQ ID NO: 2292644 - DNA, 25 bp, Homo sapien
gggagaagtgtaactatgtagtatt

SEQ ID NO: 2292645 - DNA, 25 bp, Homo sapien
acaggacagtttgttagtaccgtct

SEQ ID NO: 2292646 - DNA, 25 bp, Homo sapien
cgctcgtgtatgttattttggcatg

SEQ ID NO: 2292647 - DNA, 25 bp, Homo sapien
ttgggtttttgttcgctcgtgtatg

SEQ ID NO: 2292648 - DNA, 25 bp, Homo sapien
gcatgtggatacctattcccctcca

SEQ ID NO: 2292649 - DNA, 25 bp, Homo sapien
ttttatctagataattggaactgct

SEQ ID NO: 2292650 - DNA, 25 bp, Homo sapien
tatctagataattggaactgctatg

SEQ ID NO: 2292651 - DNA, 25 bp, Homo sapien
gataattggaactgctatggaggct

SEQ ID NO: 2292652 - DNA, 25 bp, Homo sapien
agatttttatctagataattggaac

SEQ ID NO: 2292653 - DNA, 25 bp, Homo sapien
tggctccctgtaactcacccatcct

SEQ ID NO: 2292654 - DNA, 25 bp, Homo sapien
cccatggctccctgtaactcaccca

SEQ ID NO: 2292655 - DNA, 25 bp, Homo sapien
tctctctgcgtcctctcctcccgcc

SEQ ID NO: 2292656 - DNA, 25 bp, Homo sapien
ctctctgcgtcctctcctcccgcct

SEQ ID NO: 2292657 - DNA, 25 bp, Homo sapien
cattttggcagagttcccatttagc

SEQ ID NO: 2292658 - DNA, 25 bp, Homo sapien
ttgtgcacgctgacatgcttcttca

SEQ ID NO: 2292659 - DNA, 25 bp, Homo sapien
gggacagttggccacagaactttga

SEQ ID NO: 2292660 - DNA, 25 bp, Homo sapien
gagttttgccggcacacttgcgtcc

SEQ ID NO: 2292661 - DNA, 25 bp, Homo sapien
gataaactgttgcacagcaagaatg

SEQ ID NO: 2292662 - DNA, 25 bp, Homo sapien
taaactgttgcacagcaagaatgtg

SEQ ID NO: 2292663 - DNA, 25 bp, Homo sapien
tgataaactgttgcacagcaagaat

SEQ ID NO: 2292664 - DNA, 25 bp, Homo sapien
ataaactgttgcacagcaagaatgt

SEQ ID NO: 2292665 - DNA, 25 bp, Homo sapien
tgggtactcatccttgggccaaagg

SEQ ID NO: 2292666 - DNA, 25 bp, Homo sapien
gcttgaccatgtcttcctcagcgtg

SEQ ID NO: 2292667 - DNA, 25 bp, Homo sapien
tgctgccagagcttgaccatgtctt

SEQ ID NO: 2292668 - DNA, 25 bp, Homo sapien
gccataacagcttgatctgctgcca

SEQ ID NO: 2292669 - DNA, 25 bp, Homo sapien
cactcattatcccttagagatggaa

SEQ ID NO: 2292670 - DNA, 25 bp, Homo sapien
catgtattgtgggaaagcttgggca

SEQ ID NO: 2292671 - DNA, 25 bp, Homo sapien
tatctgcttttagtgtgcactgcca

SEQ ID NO: 2292672 - DNA, 25 bp, Homo sapien
gaaggctcttcacttagcattgtta

SEQ ID NO: 2292673 - DNA, 25 bp, Homo sapien
tgctagtcagatcccagcctaaatg

SEQ ID NO: 2292674 - DNA, 25 bp, Homo sapien
gagaggccatctctgaccgcacaat

SEQ ID NO: 2292675 - DNA, 25 bp, Homo sapien
catgatggagttgtggttgcctctc

SEQ ID NO: 2292676 - DNA, 25 bp, Homo sapien
ttacatccattagtggccccactgg

SEQ ID NO: 2292677 - DNA, 25 bp, Homo sapien
ggcgacactcgcttccatctgcgag

SEQ ID NO: 2292678 - DNA, 25 bp, Homo sapien
aggcgacactcgcttccatctgcga

SEQ ID NO: 2292679 - DNA, 25 bp, Homo sapien
ctcgcttccatctgcgaggaacaat

SEQ ID NO: 2292680 - DNA, 25 bp, Homo sapien
gacactcgcttccatctgcgaggaa

SEQ ID NO: 2292681 - DNA, 25 bp, Homo sapien
acaagaggcgaacaataatgttctg

SEQ ID NO: 2292682 - DNA, 25 bp, Homo sapien
cataatacaccaccattttccagct

SEQ ID NO: 2292683 - DNA, 25 bp, Homo sapien
tgttctgtgtcacataatacaccac

SEQ ID NO: 2292684 - DNA, 25 bp, Homo sapien
tttaagatgccaaacaataagctgt

SEQ ID NO: 2292685 - DNA, 25 bp, Homo sapien
cttccgagggagttgattaagcgac

SEQ ID NO: 2292686 - DNA, 25 bp, Homo sapien
cctgggagggctgcaattcgcataa

SEQ ID NO: 2292687 - DNA, 25 bp, Homo sapien
gactccggatgaaattgaaatcctg

SEQ ID NO: 2292688 - DNA, 25 bp, Homo sapien
gaaatcctgtgatttgacctttgtc

SEQ ID NO: 2292689 - DNA, 25 bp, Homo sapien
tctacgtcagtagatgtagattgct

SEQ ID NO: 2292690 - DNA, 25 bp, Homo sapien
ctgtaagtctacgtcagtagatgta

SEQ ID NO: 2292691 - DNA, 25 bp, Homo sapien
tagatgtagattgctttagaaggct

SEQ ID NO: 2292692 - DNA, 25 bp, Homo sapien
gattgctttagaaggcttgtgagaa

SEQ ID NO: 2292693 - DNA, 25 bp, Homo sapien
aggaaagtcttcattagcactacca

SEQ ID NO: 2292694 - DNA, 25 bp, Homo sapien
ctcaggaaagtcttcattagcacta

SEQ ID NO: 2292695 - DNA, 25 bp, Homo sapien
tcactcaggaaagtcttcattagca

SEQ ID NO: 2292696 - DNA, 25 bp, Homo sapien
ggaaagtcttcattagcactaccac

SEQ ID NO: 2292697 - DNA, 25 bp, Homo sapien
gaaatgcatttgaatcacatctaga

SEQ ID NO: 2292698 - DNA, 25 bp, Homo sapien
tgagagtagggctatgatcattata

SEQ ID NO: 2292699 - DNA, 25 bp, Homo sapien
gaagcagtctgatttgtcatagcag

SEQ ID NO: 2292700 - DNA, 25 bp, Homo sapien
cactgccttcctgaaatattgagag

SEQ ID NO: 2292701 - DNA, 25 bp, Homo sapien
ttaagacgaagtgacatttaataat

SEQ ID NO: 2292702 - DNA, 25 bp, Homo sapien
tgcatgttgaatctgggtacttttt

SEQ ID NO: 2292703 - DNA, 25 bp, Homo sapien
gcatgttgaatctgggtactttttg

SEQ ID NO: 2292704 - DNA, 25 bp, Homo sapien
gacgaagtgacatttaataatgtgc

SEQ ID NO: 2292705 - DNA, 25 bp, Homo sapien
agtcaatttagaacctactgtacca

SEQ ID NO: 2292706 - DNA, 25 bp, Homo sapien
tactgtaccagtgtacataagagtc

SEQ ID NO: 2292707 - DNA, 25 bp, Homo sapien
atcgggtgccgtggttaccagatgt

SEQ ID NO: 2292708 - DNA, 25 bp, Homo sapien
tctgatggaactgatcgggtgccgt

SEQ ID NO: 2292709 - DNA, 25 bp, Homo sapien
gagggcacagagtgattaggtaaga

SEQ ID NO: 2292710 - DNA, 25 bp, Homo sapien
tggcagcaatacaagtttctctgcg

SEQ ID NO: 2292711 - DNA, 25 bp, Homo sapien
aagtttctctgcgagtgagtcatct

SEQ ID NO: 2292712 - DNA, 25 bp, Homo sapien
tctctgcgagtgagtcatctttcat

SEQ ID NO: 2292713 - DNA, 25 bp, Homo sapien
caatacaagtttctctgcgagtgag

SEQ ID NO: 2292714 - DNA, 25 bp, Homo sapien
tagctcctccccatgattgtcaaga

SEQ ID NO: 2292715 - DNA, 25 bp, Homo sapien
taactggtgtaatgttaggcctggc

SEQ ID NO: 2292716 - DNA, 25 bp, Homo sapien
tctccccggttgttgacagatttaa

SEQ ID NO: 2292717 - DNA, 25 bp, Homo sapien
gcaataggtgcagtagtaaatggct

SEQ ID NO: 2292718 - DNA, 25 bp, Homo sapien
tagactgtaaagtcgactgtggtag

SEQ ID NO: 2292719 - DNA, 25 bp, Homo sapien
tgtggtagcatgacaaaaattggtc

SEQ ID NO: 2292720 - DNA, 25 bp, Homo sapien
catgattgatacagattgttggagc

SEQ ID NO: 2292721 - DNA, 25 bp, Homo sapien
tgtgtagcttgccactgccaatctt

SEQ ID NO: 2292722 - DNA, 25 bp, Homo sapien
tcttcaaacattggaagtttcaaca

SEQ ID NO: 2292723 - DNA, 25 bp, Homo sapien
gcagatcttcaaacattggaagttt

SEQ ID NO: 2292724 - DNA, 25 bp, Homo sapien
cttcaaacattggaagtttcaacac

SEQ ID NO: 2292725 - DNA, 25 bp, Homo sapien
ttacagggagttggcaaaccaggaa

SEQ ID NO: 2292726 - DNA, 25 bp, Homo sapien
tttgtcatgtgcaaatatggtgacc

SEQ ID NO: 2292727 - DNA, 25 bp, Homo sapien
ctgagtttgccatgagagaaagcgg

SEQ ID NO: 2292728 - DNA, 25 bp, Homo sapien
gcagtgacctcaattcggtacagta

SEQ ID NO: 2292729 - DNA, 25 bp, Homo sapien
cacctagagggtacttctgtgcctc

SEQ ID NO: 2292730 - DNA, 25 bp, Homo sapien
tatgctgtttggttatcacctagag

SEQ ID NO: 2292731 - DNA, 25 bp, Homo sapien
ggttatcacctagagggtacttctg

SEQ ID NO: 2292732 - DNA, 25 bp, Homo sapien
tgtttggttatcacctagagggtac

SEQ ID NO: 2292733 - DNA, 25 bp, Homo sapien
ggtctaaccagtttcttccagtcaa

SEQ ID NO: 2292734 - DNA, 25 bp, Homo sapien
tttattggtgaagcatccactttgg

SEQ ID NO: 2292735 - DNA, 25 bp, Homo sapien
gcttcttgggtgtgagcatctatat

SEQ ID NO: 2292736 - DNA, 25 bp, Homo sapien
atattgaggcggcatttattggtga

SEQ ID NO: 2292737 - DNA, 25 bp, Homo sapien
catgtcaatctgtggcgttaaaggc

SEQ ID NO: 2292738 - DNA, 25 bp, Homo sapien
gacattttgactgatagggcacccg

SEQ ID NO: 2292739 - DNA, 25 bp, Homo sapien
gcacccgtagtgacaaagtattgat

SEQ ID NO: 2292740 - DNA, 25 bp, Homo sapien
tagcctaggcttcttcacatgtcaa

SEQ ID NO: 2292741 - DNA, 25 bp, Homo sapien
tgttaagaacagcttgcattccctg

SEQ ID NO: 2292742 - DNA, 25 bp, Homo sapien
cataggatagtaggaggaaccaggt

SEQ ID NO: 2292743 - DNA, 25 bp, Homo sapien
tgtttcttgtagaataatgttaaga

SEQ ID NO: 2292744 - DNA, 25 bp, Homo sapien
ggaaatcacattttgcccttgtgaa

SEQ ID NO: 2292745 - DNA, 25 bp, Homo sapien
ggtctgctggtcaaaattgcctgat

SEQ ID NO: 2292746 - DNA, 25 bp, Homo sapien
gctggtcaaaattgcctgatattta

SEQ ID NO: 2292747 - DNA, 25 bp, Homo sapien
cttttgagtggtctgctggtcaaaa

SEQ ID NO: 2292748 - DNA, 25 bp, Homo sapien
tgagtggtctgctggtcaaaattgc

SEQ ID NO: 2292749 - DNA, 25 bp, Homo sapien
caatgaggcacttctaatacattcc

SEQ ID NO: 2292750 - DNA, 25 bp, Homo sapien
ataatgttcatcaatgaggcacttc

SEQ ID NO: 2292751 - DNA, 25 bp, Homo sapien
ctaaatccataccttcttaattagg

SEQ ID NO: 2292752 - DNA, 25 bp, Homo sapien
atgcctggcctaaatccataccttc

SEQ ID NO: 2292753 - DNA, 25 bp, Homo sapien
gatgcattgtataaattcttcattc

SEQ ID NO: 2292754 - DNA, 25 bp, Homo sapien
ggatgcattgtataaattcttcatt

SEQ ID NO: 2292755 - DNA, 25 bp, Homo sapien
aggatgcattgtataaattcttcat

SEQ ID NO: 2292756 - DNA, 25 bp, Homo sapien
tcttgcaggttgcagttttctagat

SEQ ID NO: 2292757 - DNA, 25 bp, Homo sapien
ttagctaacaattccaagtctggaa

SEQ ID NO: 2292758 - DNA, 25 bp, Homo sapien
tggaaccttccttaagtataacaga

SEQ ID NO: 2292759 - DNA, 25 bp, Homo sapien
tataacagataacagggcacccagt

SEQ ID NO: 2292760 - DNA, 25 bp, Homo sapien
tacaagtacaaagtggatcaggaca

SEQ ID NO: 2292761 - DNA, 25 bp, Homo sapien
gaggaatgactgaagtgtcccaagc

SEQ ID NO: 2292762 - DNA, 25 bp, Homo sapien
gctaatttccatgaggcctgcactt

SEQ ID NO: 2292763 - DNA, 25 bp, Homo sapien
aaaaccacgctccaaatgttctgtg

SEQ ID NO: 2292764 - DNA, 25 bp, Homo sapien
tcagggtgctctttaaggagtcgag

SEQ ID NO: 2292765 - DNA, 25 bp, Homo sapien
cttggaacagttgcagctgagcagt

SEQ ID NO: 2292766 - DNA, 25 bp, Homo sapien
catgcctgttgtctggtgtttcgca

SEQ ID NO: 2292767 - DNA, 25 bp, Homo sapien
ttagccttgcatattatcagggtgc

SEQ ID NO: 2292768 - DNA, 25 bp, Homo sapien
cacagagaccatcatacccgaatat

SEQ ID NO: 2292769 - DNA, 25 bp, Homo sapien
gagaccatcatacccgaatataaac

SEQ ID NO: 2292770 - DNA, 25 bp, Homo sapien
cagagaccatcatacccgaatataa

SEQ ID NO: 2292771 - DNA, 25 bp, Homo sapien
cattcacagagaccatcatacccga

SEQ ID NO: 2292772 - DNA, 25 bp, Homo sapien
tctgctccacatagggcgtgagaac

SEQ ID NO: 2292773 - DNA, 25 bp, Homo sapien
tagctcattgccagaggacacacgc

SEQ ID NO: 2292774 - DNA, 25 bp, Homo sapien
gcaagcatcatggtttccccagtgg

SEQ ID NO: 2292775 - DNA, 25 bp, Homo sapien
gacacacgcaggctggcaacaataa

SEQ ID NO: 2292776 - DNA, 25 bp, Homo sapien
tcaaggacctgatgctctagagccg

SEQ ID NO: 2292777 - DNA, 25 bp, Homo sapien
tgggagttgggtgctctgaaccact

SEQ ID NO: 2292778 - DNA, 25 bp, Homo sapien
cagaaatagcgtccataaacagcat

SEQ ID NO: 2292779 - DNA, 25 bp, Homo sapien
cactaaagagagcatcaggtctgag

SEQ ID NO: 2292780 - DNA, 25 bp, Homo sapien
tctctgtcggaagtggatgacccac

SEQ ID NO: 2292781 - DNA, 25 bp, Homo sapien
tttgttgttaaagattccacaggac

SEQ ID NO: 2292782 - DNA, 25 bp, Homo sapien
tccacaggacaaaataggtaaccca

SEQ ID NO: 2292783 - DNA, 25 bp, Homo sapien
cagtgactccttagctctttgaaac

SEQ ID NO: 2292784 - DNA, 25 bp, Homo sapien
aaggctgccgtctcactggagcgcc

SEQ ID NO: 2292785 - DNA, 25 bp, Homo sapien
cagcctctcggaccttgatcatttg

SEQ ID NO: 2292786 - DNA, 25 bp, Homo sapien
tgtgcagccacgtctgtactctttt

SEQ ID NO: 2292787 - DNA, 25 bp, Homo sapien
tcatgggatatctgcaaggctgccg

SEQ ID NO: 2292788 - DNA, 25 bp, Homo sapien
caaaggaaccttgagcagcaactga

SEQ ID NO: 2292789 - DNA, 25 bp, Homo sapien
caattagcattttgagcataagggc

SEQ ID NO: 2292790 - DNA, 25 bp, Homo sapien
ggaggacgtcagatccaaaggaacc

SEQ ID NO: 2292791 - DNA, 25 bp, Homo sapien
ggttcccaggtctggtaccagtgga

SEQ ID NO: 2292792 - DNA, 25 bp, Homo sapien
taattcccagtcacgaagctgtaca

SEQ ID NO: 2292793 - DNA, 25 bp, Homo sapien
gtaagcgtaattacaagctttcctg

SEQ ID NO: 2292794 - DNA, 25 bp, Homo sapien
agctttcctgttgaagtctgaccca

SEQ ID NO: 2292795 - DNA, 25 bp, Homo sapien
cagtggatctgctgataaaaaggat

SEQ ID NO: 2292796 - DNA, 25 bp, Homo sapien
accttctgctgggtagttggcacac

SEQ ID NO: 2292797 - DNA, 25 bp, Homo sapien
tctgctgggtagttggcacacagtt

SEQ ID NO: 2292798 - DNA, 25 bp, Homo sapien
ctgggtagttggcacacagttgcac

SEQ ID NO: 2292799 - DNA, 25 bp, Homo sapien
gttggcacacagttgcacaggaaag

SEQ ID NO: 2292800 - DNA, 25 bp, Homo sapien
ggaaacttcatgtttatgtgatgag

SEQ ID NO: 2292801 - DNA, 25 bp, Homo sapien
cttttggaggaaacttcatgtttat

SEQ ID NO: 2292802 - DNA, 25 bp, Homo sapien
ttggaggaaacttcatgtttatgtg

SEQ ID NO: 2292803 - DNA, 25 bp, Homo sapien
aggaaacttcatgtttatgtgatga

SEQ ID NO: 2292804 - DNA, 25 bp, Homo sapien
tgtctgacgtctgctgtttcctcaa

SEQ ID NO: 2292805 - DNA, 25 bp, Homo sapien
tctttaatagaacctctgagctttc

SEQ ID NO: 2292806 - DNA, 25 bp, Homo sapien
tcagtccacttcaagggtaaaagga

SEQ ID NO: 2292807 - DNA, 25 bp, Homo sapien
tgagctttcctctcaccattagtga

SEQ ID NO: 2292808 - DNA, 25 bp, Homo sapien
agcagcaaggtctcagctaatgacg

SEQ ID NO: 2292809 - DNA, 25 bp, Homo sapien
ggaagtctttaaagtttgcgctgca

SEQ ID NO: 2292810 - DNA, 25 bp, Homo sapien
tctcagctaatgacgggaagtcttt

SEQ ID NO: 2292811 - DNA, 25 bp, Homo sapien
gctgcactatttcatttctgccatc

SEQ ID NO: 2292812 - DNA, 25 bp, Homo sapien
gaaacctgtgatttagataacggaa

SEQ ID NO: 2292813 - DNA, 25 bp, Homo sapien
tactagtcaggttttgttattcagc

SEQ ID NO: 2292814 - DNA, 25 bp, Homo sapien
tatgaaataacaaaggtcagagctg

SEQ ID NO: 2292815 - DNA, 25 bp, Homo sapien
tggttgaaccatatgcttgagactt

SEQ ID NO: 2292816 - DNA, 25 bp, Homo sapien
tcaggcaaagttaatccataattac

SEQ ID NO: 2292817 - DNA, 25 bp, Homo sapien
caaagttaatccataattacttcca

SEQ ID NO: 2292818 - DNA, 25 bp, Homo sapien
gaaatatcaggcaaagttaatccat

SEQ ID NO: 2292819 - DNA, 25 bp, Homo sapien
tatcaggcaaagttaatccataatt

SEQ ID NO: 2292820 - DNA, 25 bp, Homo sapien
taggagatcatcatttgtgcttgat

SEQ ID NO: 2292821 - DNA, 25 bp, Homo sapien
ctgaagatcaccagggattcctgga

SEQ ID NO: 2292822 - DNA, 25 bp, Homo sapien
ctggagatggaatcattctttccct

SEQ ID NO: 2292823 - DNA, 25 bp, Homo sapien
agctgccactgtcctaggagatcat

SEQ ID NO: 2292824 - DNA, 25 bp, Homo sapien
cacacgttgtgcttataagagacac

SEQ ID NO: 2292825 - DNA, 25 bp, Homo sapien
tgtgcttataagagacacctctgcc

SEQ ID NO: 2292826 - DNA, 25 bp, Homo sapien
aagagacacctctgcctttaatgtt

SEQ ID NO: 2292827 - DNA, 25 bp, Homo sapien
ctggtcacacgttgtgcttataaga

SEQ ID NO: 2292828 - DNA, 25 bp, Homo sapien
ggacatcggcttcaaagagaatggt

SEQ ID NO: 2292829 - DNA, 25 bp, Homo sapien
aaacatatatacttgggacatcggc

SEQ ID NO: 2292830 - DNA, 25 bp, Homo sapien
gagccgtgtattccctctgtggcaa

SEQ ID NO: 2292831 - DNA, 25 bp, Homo sapien
tgtcttcagaccctatactggttct

SEQ ID NO: 2292832 - DNA, 25 bp, Homo sapien
catatgcagcacagtcagtaggagg

SEQ ID NO: 2292833 - DNA, 25 bp, Homo sapien
ccctggggggacatatgcagcacag

SEQ ID NO: 2292834 - DNA, 25 bp, Homo sapien
ttttcctgcctatgtgaggagtggg

SEQ ID NO: 2292835 - DNA, 25 bp, Homo sapien
cctttttcctgcctatgtgaggagt

SEQ ID NO: 2292836 - DNA, 25 bp, Homo sapien
cactagaagctgacagtaatccaag

SEQ ID NO: 2292837 - DNA, 25 bp, Homo sapien
tattaatagttgaagagccactgtg

SEQ ID NO: 2292838 - DNA, 25 bp, Homo sapien
ttatgaatgatggagacactagaag

SEQ ID NO: 2292839 - DNA, 25 bp, Homo sapien
taaagtgggtggaccaacacagtgc

SEQ ID NO: 2292840 - DNA, 25 bp, Homo sapien
ggtgactcctagagaagcctgagaa

SEQ ID NO: 2292841 - DNA, 25 bp, Homo sapien
tgactcctagagaagcctgagaaac

SEQ ID NO: 2292842 - DNA, 25 bp, Homo sapien
tggaaggtgactcctagagaagcct

SEQ ID NO: 2292843 - DNA, 25 bp, Homo sapien
gaaggtgactcctagagaagcctga

SEQ ID NO: 2292844 - DNA, 25 bp, Homo sapien
gccatgacagaaggcacggttgaag

SEQ ID NO: 2292845 - DNA, 25 bp, Homo sapien
agccctgctgagctcgcgcttctgt

SEQ ID NO: 2292846 - DNA, 25 bp, Homo sapien
gctgagctcgcgcttctgtgttctt

SEQ ID NO: 2292847 - DNA, 25 bp, Homo sapien
atgggctgagtagccatgacagaag

SEQ ID NO: 2292848 - DNA, 25 bp, Homo sapien
gattagattttcctaacttggccac

SEQ ID NO: 2292849 - DNA, 25 bp, Homo sapien
taagacctggtgtgttttctcaaac

SEQ ID NO: 2292850 - DNA, 25 bp, Homo sapien
aacaggaaaggtttcagaaaatgca

SEQ ID NO: 2292851 - DNA, 25 bp, Homo sapien
gcagcattaggccaattgcagaacc

SEQ ID NO: 2292852 - DNA, 25 bp, Homo sapien
cgctgcggtattgggctgcttttca

SEQ ID NO: 2292853 - DNA, 25 bp, Homo sapien
catttccgtatacccacgctgcggt

SEQ ID NO: 2292854 - DNA, 25 bp, Homo sapien
attaatttagctcgtggaccacttg

SEQ ID NO: 2292855 - DNA, 25 bp, Homo sapien
ggaccacttgtagtagttaatgaaa

SEQ ID NO: 2292856 - DNA, 25 bp, Homo sapien
tgcgtttccatagtgcagtagttcc

SEQ ID NO: 2292857 - DNA, 25 bp, Homo sapien
cgtttccatagtgcagtagttcctg

SEQ ID NO: 2292858 - DNA, 25 bp, Homo sapien
gctgcgtttccatagtgcagtagtt

SEQ ID NO: 2292859 - DNA, 25 bp, Homo sapien
ttccatagtgcagtagttcctgaag

SEQ ID NO: 2292860 - DNA, 25 bp, Homo sapien
tcatatggaagtgccaattttaagg

SEQ ID NO: 2292861 - DNA, 25 bp, Homo sapien
tagaaaagggtgagcgcattgatgt

SEQ ID NO: 2292862 - DNA, 25 bp, Homo sapien
gctggctctcaggataaacatcgtt

SEQ ID NO: 2292863 - DNA, 25 bp, Homo sapien
gcgcattgatgttggatgctggctc

SEQ ID NO: 2292864 - DNA, 25 bp, Homo sapien
tagtgaatattggtctcgttgcaag

SEQ ID NO: 2292865 - DNA, 25 bp, Homo sapien
tgagtccaaaatagctcacacatct

SEQ ID NO: 2292866 - DNA, 25 bp, Homo sapien
taataaattgccaccaaccatcagg

SEQ ID NO: 2292867 - DNA, 25 bp, Homo sapien
tggtctcgttgcaaggataatgtcc

SEQ ID NO: 2292868 - DNA, 25 bp, Homo sapien
ccctataactaatgtgaagtcagca

SEQ ID NO: 2292869 - DNA, 25 bp, Homo sapien
tttcccctataactaatgtgaagtc

SEQ ID NO: 2292870 - DNA, 25 bp, Homo sapien
catcagctgtccctgtataatggct

SEQ ID NO: 2292871 - DNA, 25 bp, Homo sapien
gtataatggcttttgatatgtccca

SEQ ID NO: 2292872 - DNA, 25 bp, Homo sapien
cacttcggtggcagaatcatagatt

SEQ ID NO: 2292873 - DNA, 25 bp, Homo sapien
tttgtgggtgccatctaggcacaac

SEQ ID NO: 2292874 - DNA, 25 bp, Homo sapien
tctcttgtcaaagtggccagagcgc

SEQ ID NO: 2292875 - DNA, 25 bp, Homo sapien
cagaagtggcctcagcgttgcctct

SEQ ID NO: 2292876 - DNA, 25 bp, Homo sapien
tttggctatcttggatgtgagagga

SEQ ID NO: 2292877 - DNA, 25 bp, Homo sapien
tggctatcttggatgtgagaggaaa

SEQ ID NO: 2292878 - DNA, 25 bp, Homo sapien
ggctatcttggatgtgagaggaaaa

SEQ ID NO: 2292879 - DNA, 25 bp, Homo sapien
ttggctatcttggatgtgagaggaa

SEQ ID NO: 2292880 - DNA, 25 bp, Homo sapien
tgtgttctaagcttgacatgtccga

SEQ ID NO: 2292881 - DNA, 25 bp, Homo sapien
catattttgggttattgtgttctaa

SEQ ID NO: 2292882 - DNA, 25 bp, Homo sapien
tctgtagttttctcaattgtcaagg

SEQ ID NO: 2292883 - DNA, 25 bp, Homo sapien
tctcaattgtcaaggtcccatattt

SEQ ID NO: 2292884 - DNA, 25 bp, Homo sapien
cacgagtgatcagttcatcatcaag

SEQ ID NO: 2292885 - DNA, 25 bp, Homo sapien
gggaaacaaggagcacgagtgatca

SEQ ID NO: 2292886 - DNA, 25 bp, Homo sapien
tcaagaccaagaccttgaacaaagt

SEQ ID NO: 2292887 - DNA, 25 bp, Homo sapien
ccttgaacaaagtcctgccagaaca

SEQ ID NO: 2292888 - DNA, 25 bp, Homo sapien
tgaagtgaactgaagttccaataga

SEQ ID NO: 2292889 - DNA, 25 bp, Homo sapien
ggagcaagccgttttactctactgc

SEQ ID NO: 2292890 - DNA, 25 bp, Homo sapien
aagttccaatagaaaagggcatgaa

SEQ ID NO: 2292891 - DNA, 25 bp, Homo sapien
tggatccagattgtaaagtagaggg

SEQ ID NO: 2292892 - DNA, 25 bp, Homo sapien
agccctgaatgttgggtcatttgtt

SEQ ID NO: 2292893 - DNA, 25 bp, Homo sapien
cagccctgaatgttgggtcatttgt

SEQ ID NO: 2292894 - DNA, 25 bp, Homo sapien
attagtttcctggtgtcgactcctt

SEQ ID NO: 2292895 - DNA, 25 bp, Homo sapien
ttcctggtgtcgactccttacctga

SEQ ID NO: 2292896 - DNA, 25 bp, Homo sapien
ggtgtcgactccttacctgatcaca

SEQ ID NO: 2292897 - DNA, 25 bp, Homo sapien
cagccaggttaatattagtttcctg

SEQ ID NO: 2292898 - DNA, 25 bp, Homo sapien
ccaatagggcctgaaggttttctgt

SEQ ID NO: 2292899 - DNA, 25 bp, Homo sapien
gacaactgatccaatagggcctgaa

SEQ ID NO: 2292900 - DNA, 25 bp, Homo sapien
cagacaactgatccaatagggcctg

SEQ ID NO: 2292901 - DNA, 25 bp, Homo sapien
actgatccaatagggcctgaaggtt

SEQ ID NO: 2292902 - DNA, 25 bp, Homo sapien
ctaaaaatgcctgccgacgaaaaca

SEQ ID NO: 2292903 - DNA, 25 bp, Homo sapien
ttttctaaaaatgcctgccgacgaa

SEQ ID NO: 2292904 - DNA, 25 bp, Homo sapien
gttttctaaaaatgcctgccgacga

SEQ ID NO: 2292905 - DNA, 25 bp, Homo sapien
ttctaaaaatgcctgccgacgaaaa

SEQ ID NO: 2292906 - DNA, 25 bp, Homo sapien
agttggcatattggttttcagtcag

SEQ ID NO: 2292907 - DNA, 25 bp, Homo sapien
cacagtatgggctgtagttggcata

SEQ ID NO: 2292908 - DNA, 25 bp, Homo sapien
ttccaatggataagagcagtgtgct

SEQ ID NO: 2292909 - DNA, 25 bp, Homo sapien
tcagtcagatgaatgatgcggaaca

SEQ ID NO: 2292910 - DNA, 25 bp, Homo sapien
agtgatttgaagagggtgacagaat

SEQ ID NO: 2292911 - DNA, 25 bp, Homo sapien
tccatctcctggagtgatttgaaga

SEQ ID NO: 2292912 - DNA, 25 bp, Homo sapien
tctcctggagtgatttgaagagggt

SEQ ID NO: 2292913 - DNA, 25 bp, Homo sapien
gtgacagaatagacccccagggaat

SEQ ID NO: 2292914 - DNA, 25 bp, Homo sapien
cgaatctgtccccagtcctacatgt

SEQ ID NO: 2292915 - DNA, 25 bp, Homo sapien
ccagtgtgatgggaagacttgccga

SEQ ID NO: 2292916 - DNA, 25 bp, Homo sapien
gatgggaagacttgccgaatctgtc

SEQ ID NO: 2292917 - DNA, 25 bp, Homo sapien
ggccctaaagcccagtgtgatggga

SEQ ID NO: 2292918 - DNA, 25 bp, Homo sapien
ggcttctctcggctatagtagggtt

SEQ ID NO: 2292919 - DNA, 25 bp, Homo sapien
gatgagatcgccttctcatgggatg

SEQ ID NO: 2292920 - DNA, 25 bp, Homo sapien
ggtgaggatgagatcgccttctcat

SEQ ID NO: 2292921 - DNA, 25 bp, Homo sapien
tctcggctatagtagggttcttgat

SEQ ID NO: 2292922 - DNA, 25 bp, Homo sapien
tgagacctcttcaaagggtaaagac

SEQ ID NO: 2292923 - DNA, 25 bp, Homo sapien
ggtggaaatcaccacatctgtcctg

SEQ ID NO: 2292924 - DNA, 25 bp, Homo sapien
cctgtgagacctcttcaaagggtaa

SEQ ID NO: 2292925 - DNA, 25 bp, Homo sapien
gtctggatggtcaggtcagcaaatg

SEQ ID NO: 2292926 - DNA, 25 bp, Homo sapien
ggccaacaaagtgcattttttacac

SEQ ID NO: 2292927 - DNA, 25 bp, Homo sapien
ccaacaaagtgcattttttacacta

SEQ ID NO: 2292928 - DNA, 25 bp, Homo sapien
tttttgtattcatattagagatagg

SEQ ID NO: 2292929 - DNA, 25 bp, Homo sapien
ctggccaacaaagtgcattttttac

SEQ ID NO: 2292930 - DNA, 25 bp, Homo sapien
ggcacttctcagattgcagagctgc

SEQ ID NO: 2292931 - DNA, 25 bp, Homo sapien
tgcgggcacttctcagattgcagag

SEQ ID NO: 2292932 - DNA, 25 bp, Homo sapien
ggctgcgggcacttctcagattgca

SEQ ID NO: 2292933 - DNA, 25 bp, Homo sapien
ttctcagattgcagagctgctccta

SEQ ID NO: 2292934 - DNA, 25 bp, Homo sapien
gaataccgccgttgatcctcttggg

SEQ ID NO: 2292935 - DNA, 25 bp, Homo sapien
ggtttcagatagtctgttccctctg

SEQ ID NO: 2292936 - DNA, 25 bp, Homo sapien
gaaaacatgcctcttatgaaccttc

SEQ ID NO: 2292937 - DNA, 25 bp, Homo sapien
tggcccacacctgctctaggaaaac

SEQ ID NO: 2292938 - DNA, 25 bp, Homo sapien
tcagcgccctactccccactcagca

SEQ ID NO: 2292939 - DNA, 25 bp, Homo sapien
tgaaattaaatgctgttcggaccct

SEQ ID NO: 2292940 - DNA, 25 bp, Homo sapien
ttctcgagggggtggatcccagttc

SEQ ID NO: 2292941 - DNA, 25 bp, Homo sapien
ctatgagatgccaagttctcgaggg

SEQ ID NO: 2292942 - DNA, 25 bp, Homo sapien
ctgaagttctggataaggctatgag

SEQ ID NO: 2292943 - DNA, 25 bp, Homo sapien
gctttatcctttgaccagtacacgg

SEQ ID NO: 2292944 - DNA, 25 bp, Homo sapien
tctggacatgatgcttaacgatgct

SEQ ID NO: 2292945 - DNA, 25 bp, Homo sapien
cgtcatcacatgtggcacctctggg

SEQ ID NO: 2292946 - DNA, 25 bp, Homo sapien
gaccccaagttagcctgtgaaccaa

SEQ ID NO: 2292947 - DNA, 25 bp, Homo sapien
tatcatcgctcaaagtacaaataac

SEQ ID NO: 2292948 - DNA, 25 bp, Homo sapien
cagccctcttgagaatactcggtgc

SEQ ID NO: 2292949 - DNA, 25 bp, Homo sapien
caaactgtgtttgactatcatcgct

SEQ ID NO: 2292950 - DNA, 25 bp, Homo sapien
caaataacttcaactgtgtggacct

SEQ ID NO: 2292951 - DNA, 25 bp, Homo sapien
caccgtcgtggatttctgcctgtta

SEQ ID NO: 2292952 - DNA, 25 bp, Homo sapien
ggaggaaagttttatcaagcgctgg

SEQ ID NO: 2292953 - DNA, 25 bp, Homo sapien
gatgcatagccgatatatactacat

SEQ ID NO: 2292954 - DNA, 25 bp, Homo sapien
gaaaagtagcattttagccatggat

SEQ ID NO: 2292955 - DNA, 25 bp, Homo sapien
tgttcagaaagccttatctcaggca

SEQ ID NO: 2292956 - DNA, 25 bp, Homo sapien
tcagaaagccttatctcaggcagac

SEQ ID NO: 2292957 - DNA, 25 bp, Homo sapien
gttcagaaagccttatctcaggcag

SEQ ID NO: 2292958 - DNA, 25 bp, Homo sapien
cagaaagccttatctcaggcagaca

SEQ ID NO: 2292959 - DNA, 25 bp, Homo sapien
cttgtcaggtttctttgaatggacc

SEQ ID NO: 2292960 - DNA, 25 bp, Homo sapien
ttgtcaggtttctttgaatggacca

SEQ ID NO: 2292961 - DNA, 25 bp, Homo sapien
tgtcaggtttctttgaatggaccat

SEQ ID NO: 2292962 - DNA, 25 bp, Homo sapien
gctggctgaagtcctttttgttact

SEQ ID NO: 2292963 - DNA, 25 bp, Homo sapien
ctttttgttacttctagtgtaagct

SEQ ID NO: 2292964 - DNA, 25 bp, Homo sapien
ttgctggctgaagtcctttttgtta

SEQ ID NO: 2292965 - DNA, 25 bp, Homo sapien
gttacttctagtgtaagcttttaga

SEQ ID NO: 2292966 - DNA, 25 bp, Homo sapien
tgtctgcaatagtgttagatattgc

SEQ ID NO: 2292967 - DNA, 25 bp, Homo sapien
catgaatgatttgccgtcaacaact

SEQ ID NO: 2292968 - DNA, 25 bp, Homo sapien
tagatattgcaggttctcccgaaag

SEQ ID NO: 2292969 - DNA, 25 bp, Homo sapien
tctatggggaagtgctgtgacagcc

SEQ ID NO: 2292970 - DNA, 25 bp, Homo sapien
acattctttcttggtatttagccta

SEQ ID NO: 2292971 - DNA, 25 bp, Homo sapien
cattctttcttggtatttagcctaa

SEQ ID NO: 2292972 - DNA, 25 bp, Homo sapien
aatcctgctacggaagagagatgag

SEQ ID NO: 2292973 - DNA, 25 bp, Homo sapien
gagagatgagaactctacccttatc

SEQ ID NO: 2292974 - DNA, 25 bp, Homo sapien
tgataaaggtgttccccaatcctgc

SEQ ID NO: 2292975 - DNA, 25 bp, Homo sapien
ggtttgaaacgtactgaatccttgc

SEQ ID NO: 2292976 - DNA, 25 bp, Homo sapien
cttttgggctctttgtagttctaat

SEQ ID NO: 2292977 - DNA, 25 bp, Homo sapien
tttgggctctttgtagttctaattg

SEQ ID NO: 2292978 - DNA, 25 bp, Homo sapien
ggaaaggactctctcggaactgagc

SEQ ID NO: 2292979 - DNA, 25 bp, Homo sapien
gatctgcattccttgcgtaccacac

SEQ ID NO: 2292980 - DNA, 25 bp, Homo sapien
agctctagatggagatctgcattcc

SEQ ID NO: 2292981 - DNA, 25 bp, Homo sapien
tttgcctctgctaggaaaggactct

SEQ ID NO: 2292982 - DNA, 25 bp, Homo sapien
ttgtatataacttcccctgcttctc

SEQ ID NO: 2292983 - DNA, 25 bp, Homo sapien
ataacttcccctgcttctcacttct

SEQ ID NO: 2292984 - DNA, 25 bp, Homo sapien
atataacttcccctgcttctcactt

SEQ ID NO: 2292985 - DNA, 25 bp, Homo sapien
tgtatataacttcccctgcttctca

SEQ ID NO: 2292986 - DNA, 25 bp, Homo sapien
ttcgacattttgctcttgcatgttt

SEQ ID NO: 2292987 - DNA, 25 bp, Homo sapien
ggcttgctgcttccccaagtggcca

SEQ ID NO: 2292988 - DNA, 25 bp, Homo sapien
aagtggccagccctcgcatcccctc

SEQ ID NO: 2292989 - DNA, 25 bp, Homo sapien
cgacattttgctcttgcatgttttc

SEQ ID NO: 2292990 - DNA, 25 bp, Homo sapien
ccgttaatgttccatcggaggatgg

SEQ ID NO: 2292991 - DNA, 25 bp, Homo sapien
gctcagggcagcgactgcaatgtaa

SEQ ID NO: 2292992 - DNA, 25 bp, Homo sapien
ggagaatattgcttcccgttaatgt

SEQ ID NO: 2292993 - DNA, 25 bp, Homo sapien
gcagtgtatgcttcatagctttgga

SEQ ID NO: 2292994 - DNA, 25 bp, Homo sapien
catttcgggtagcattattattact

SEQ ID NO: 2292995 - DNA, 25 bp, Homo sapien
ggataaatacatttcgggtagcatt

SEQ ID NO: 2292996 - DNA, 25 bp, Homo sapien
ctgctcatgagatactggttgcttt

SEQ ID NO: 2292997 - DNA, 25 bp, Homo sapien
tactggttgctttaaatttcttgga

SEQ ID NO: 2292998 - DNA, 25 bp, Homo sapien
tatcctgccttatatcccagaatgc

SEQ ID NO: 2292999 - DNA, 25 bp, Homo sapien
taatttatgatccatatcctgcctt

SEQ ID NO: 2293000 - DNA, 25 bp, Homo sapien
ctgtatatctggctctaatttatga

SEQ ID NO: 2293001 - DNA, 25 bp, Homo sapien
tatcccagaatgcttttgaatgttc

SEQ ID NO: 2293002 - DNA, 25 bp, Homo sapien
tccctctggtcatctcccagtgttt

SEQ ID NO: 2293003 - DNA, 25 bp, Homo sapien
ctattgggatactccctctggtcat

SEQ ID NO: 2293004 - DNA, 25 bp, Homo sapien
taccttctctattaaccgaatagga

SEQ ID NO: 2293005 - DNA, 25 bp, Homo sapien
tctctattaaccgaataggagtgtc

SEQ ID NO: 2293006 - DNA, 25 bp, Homo sapien
cacgtaccttctctattaaccgaat

SEQ ID NO: 2293007 - DNA, 25 bp, Homo sapien
tctattaaccgaataggagtgtctt

SEQ ID NO: 2293008 - DNA, 25 bp, Homo sapien
gagcagtccttcgattgtcagctaa

SEQ ID NO: 2293009 - DNA, 25 bp, Homo sapien
tgccatgagcagtccttcgattgtc

SEQ ID NO: 2293010 - DNA, 25 bp, Homo sapien
cagtccttcgattgtcagctaagag

SEQ ID NO: 2293011 - DNA, 25 bp, Homo sapien
agagccccttcagggagttgtccct

SEQ ID NO: 2293012 - DNA, 25 bp, Homo sapien
gaaatgtttgcgttggagagcagca

SEQ ID NO: 2293013 - DNA, 25 bp, Homo sapien
cctacactttgcaaagcgactatat

SEQ ID NO: 2293014 - DNA, 25 bp, Homo sapien
agcagtttgttgagtattgatcgga

SEQ ID NO: 2293015 - DNA, 25 bp, Homo sapien
ggatgcacacgaagcactgtttaca

SEQ ID NO: 2293016 - DNA, 25 bp, Homo sapien
gattctagggatttcagagaccgga

SEQ ID NO: 2293017 - DNA, 25 bp, Homo sapien
gaagaccactcacgtgttgtgtcac

SEQ ID NO: 2293018 - DNA, 25 bp, Homo sapien
tgtgtcactttaagcgcgggtttgg

SEQ ID NO: 2293019 - DNA, 25 bp, Homo sapien
cgggtttgggaaatctcgcttgcac

SEQ ID NO: 2293020 - DNA, 25 bp, Homo sapien
aatgtccaaggccagaccctaaaag

SEQ ID NO: 2293021 - DNA, 25 bp, Homo sapien
atgtccaaggccagaccctaaaagt

SEQ ID NO: 2293022 - DNA, 25 bp, Homo sapien
caatgtccaaggccagaccctaaaa

SEQ ID NO: 2293023 - DNA, 25 bp, Homo sapien
ggtggaggtggttgatgcgagagga

SEQ ID NO: 2293024 - DNA, 25 bp, Homo sapien
tggttgatgcgagaggagagtgcgg

SEQ ID NO: 2293025 - DNA, 25 bp, Homo sapien
ggaggtggttgatgcgagaggagag

SEQ ID NO: 2293026 - DNA, 25 bp, Homo sapien
ggcggtggaggtggttgatgcgaga

SEQ ID NO: 2293027 - DNA, 25 bp, Homo sapien
tctatttttgttgggaagcctgcgt

SEQ ID NO: 2293028 - DNA, 25 bp, Homo sapien
tatttttgttgggaagcctgcgtac

SEQ ID NO: 2293029 - DNA, 25 bp, Homo sapien
ttctatttttgttgggaagcctgcg

SEQ ID NO: 2293030 - DNA, 25 bp, Homo sapien
ctttctatttttgttgggaagcctg

SEQ ID NO: 2293031 - DNA, 25 bp, Homo sapien
cgggggaccctggagcgccggcttg

SEQ ID NO: 2293032 - DNA, 25 bp, Homo sapien
gcggctggccgggggaccctggagc

SEQ ID NO: 2293033 - DNA, 25 bp, Homo sapien
gggaccctggagcgccggcttggac

SEQ ID NO: 2293034 - DNA, 25 bp, Homo sapien
ctggccgggggaccctggagcgccg

SEQ ID NO: 2293035 - DNA, 25 bp, Homo sapien
ccgatgttgttgtgggcagacctcc

SEQ ID NO: 2293036 - DNA, 25 bp, Homo sapien
aactttgttgttcgtcccgatgttg

SEQ ID NO: 2293037 - DNA, 25 bp, Homo sapien
gaatcgctgcgttttaactttgttg

SEQ ID NO: 2293038 - DNA, 25 bp, Homo sapien
ggcagacctccaaggcgcagagctc

SEQ ID NO: 2293039 - DNA, 25 bp, Homo sapien
caagctcctccggagtcctgctctt

SEQ ID NO: 2293040 - DNA, 25 bp, Homo sapien
aagccccgagcctcgctcccaagct

SEQ ID NO: 2293041 - DNA, 25 bp, Homo sapien
taactgccgtttagaaatcagcccg

SEQ ID NO: 2293042 - DNA, 25 bp, Homo sapien
tgggagagatcgcccagagacagcc

SEQ ID NO: 2293043 - DNA, 25 bp, Homo sapien
tgccagtaggaagcctagtggcccc

SEQ ID NO: 2293044 - DNA, 25 bp, Homo sapien
tggccccagaaacggttacactcaa

SEQ ID NO: 2293045 - DNA, 25 bp, Homo sapien
ttcgtaacctactggtcaggtgcca

SEQ ID NO: 2293046 - DNA, 25 bp, Homo sapien
taggccaagcaggtaggttcgtaac

SEQ ID NO: 2293047 - DNA, 25 bp, Homo sapien
ctctcttgtaagccagacaatccag

SEQ ID NO: 2293048 - DNA, 25 bp, Homo sapien
aaacttccccgcctccacgtgagag

SEQ ID NO: 2293049 - DNA, 25 bp, Homo sapien
acgtgagagccggctccgccgtgac

SEQ ID NO: 2293050 - DNA, 25 bp, Homo sapien
ggctccgccgtgacccggaagtcca

SEQ ID NO: 2293051 - DNA, 25 bp, Homo sapien
cagggcccaggtctactttccggtg

SEQ ID NO: 2293052 - DNA, 25 bp, Homo sapien
ggagatggccagagatgacttcctt

SEQ ID NO: 2293053 - DNA, 25 bp, Homo sapien
atggccagagatgacttccttttct

SEQ ID NO: 2293054 - DNA, 25 bp, Homo sapien
gatggccagagatgacttccttttc

SEQ ID NO: 2293055 - DNA, 25 bp, Homo sapien
gagatggccagagatgacttccttt

SEQ ID NO: 2293056 - DNA, 25 bp, Homo sapien
tttacttcgtttcctagggcagctc

SEQ ID NO: 2293057 - DNA, 25 bp, Homo sapien
ctttgactggcttctttttacttcg

SEQ ID NO: 2293058 - DNA, 25 bp, Homo sapien
tattccggagcctccactttgactg

SEQ ID NO: 2293059 - DNA, 25 bp, Homo sapien
cttggagtggcttgggagggcgtct

SEQ ID NO: 2293060 - DNA, 25 bp, Homo sapien
aatgactggctgctttaccttcttc

SEQ ID NO: 2293061 - DNA, 25 bp, Homo sapien
ctttgcagagccggctcctcaatga

SEQ ID NO: 2293062 - DNA, 25 bp, Homo sapien
ttcctttgcagagccggctcctcaa

SEQ ID NO: 2293063 - DNA, 25 bp, Homo sapien
gcagagccggctcctcaatgactgg

SEQ ID NO: 2293064 - DNA, 25 bp, Homo sapien
taatagacccaaatgcaggtgcggg

SEQ ID NO: 2293065 - DNA, 25 bp, Homo sapien
tcagcctgggtttagggtgttccaa

SEQ ID NO: 2293066 - DNA, 25 bp, Homo sapien
tcctggagggtgtgacaatagtcag

SEQ ID NO: 2293067 - DNA, 25 bp, Homo sapien
gtccagcagtcaaacccaaagaggt

SEQ ID NO: 2293068 - DNA, 25 bp, Homo sapien
tctactagaggtacaaagaggagct

SEQ ID NO: 2293069 - DNA, 25 bp, Homo sapien
aattcacagccaaattctactagag

SEQ ID NO: 2293070 - DNA, 25 bp, Homo sapien
gtccgggactggacaaattcacagc

SEQ ID NO: 2293071 - DNA, 25 bp, Homo sapien
tactagaggtacaaagaggagctgg

SEQ ID NO: 2293072 - DNA, 25 bp, Homo sapien
gggtgttctcgtgttggctcttaaa

SEQ ID NO: 2293073 - DNA, 25 bp, Homo sapien
aaatcttcaatacccggtgttcact

SEQ ID NO: 2293074 - DNA, 25 bp, Homo sapien
gaggcagttggataaagaagatgac

SEQ ID NO: 2293075 - DNA, 25 bp, Homo sapien
ttcactgccagtgggtgttctcgtg

SEQ ID NO: 2293076 - DNA, 25 bp, Homo sapien
ttgtttatagcaatgccaatgaatg

SEQ ID NO: 2293077 - DNA, 25 bp, Homo sapien
gctatcccaggtcttacagtgctta

SEQ ID NO: 2293078 - DNA, 25 bp, Homo sapien
tgccaatgaatggcatgctgggtaa

SEQ ID NO: 2293079 - DNA, 25 bp, Homo sapien
ccatggaaatacttgcaggacattc

SEQ ID NO: 2293080 - DNA, 25 bp, Homo sapien
aggaaattctggtgtcttgatgtca

SEQ ID NO: 2293081 - DNA, 25 bp, Homo sapien
taagctactacgactggttccagga

SEQ ID NO: 2293082 - DNA, 25 bp, Homo sapien
ctttcacactatgccaaggaaattc

SEQ ID NO: 2293083 - DNA, 25 bp, Homo sapien
catcatcgtattcaagtttcaaggg

SEQ ID NO: 2293084 - DNA, 25 bp, Homo sapien
taataaaatatgctggaagctttgc

SEQ ID NO: 2293085 - DNA, 25 bp, Homo sapien
gagctttcctgatggttgcatactc

SEQ ID NO: 2293086 - DNA, 25 bp, Homo sapien
cctggtgtgggctatggtgtctggc

SEQ ID NO: 2293087 - DNA, 25 bp, Homo sapien
catactcagtgcacgaattgagcat

SEQ ID NO: 2293088 - DNA, 25 bp, Homo sapien
cagcgctgttatgatcagacctgag

SEQ ID NO: 2293089 - DNA, 25 bp, Homo sapien
gccagcgctgttatgatcagacctg

SEQ ID NO: 2293090 - DNA, 25 bp, Homo sapien
tagccagcgctgttatgatcagacc

SEQ ID NO: 2293091 - DNA, 25 bp, Homo sapien
gggtagccagcgctgttatgatcag

SEQ ID NO: 2293092 - DNA, 25 bp, Homo sapien
ccaaatccctctctgagagaaacac

SEQ ID NO: 2293093 - DNA, 25 bp, Homo sapien
aatccctctctgagagaaacaccca

SEQ ID NO: 2293094 - DNA, 25 bp, Homo sapien
ctgccaaatccctctctgagagaaa

SEQ ID NO: 2293095 - DNA, 25 bp, Homo sapien
ccctgccaaatccctctctgagaga

SEQ ID NO: 2293096 - DNA, 25 bp, Homo sapien
tttgccagatggccactctgaaaga

SEQ ID NO: 2293097 - DNA, 25 bp, Homo sapien
ttgccagatggccactctgaaagat

SEQ ID NO: 2293098 - DNA, 25 bp, Homo sapien
tgccagatggccactctgaaagatt

SEQ ID NO: 2293099 - DNA, 25 bp, Homo sapien
cagggatcttggctctgacgatctg

SEQ ID NO: 2293100 - DNA, 25 bp, Homo sapien
catgactggagtcttgcagggatct

SEQ ID NO: 2293101 - DNA, 25 bp, Homo sapien
gctctgacgatctgtctacatttca

SEQ ID NO: 2293102 - DNA, 25 bp, Homo sapien
ttcagagtcggagaacataggacag

SEQ ID NO: 2293103 - DNA, 25 bp, Homo sapien
gaaaggcagtaggaagccgaagtcc

SEQ ID NO: 2293104 - DNA, 25 bp, Homo sapien
gaaagacatctacgtttaaacctga

SEQ ID NO: 2293105 - DNA, 25 bp, Homo sapien
gccgaagtccaataacgatcataaa

SEQ ID NO: 2293106 - DNA, 25 bp, Homo sapien
tactggacaaaatcttgcgatggcc

SEQ ID NO: 2293107 - DNA, 25 bp, Homo sapien
ctttgccagccccgtaggccccgct

SEQ ID NO: 2293108 - DNA, 25 bp, Homo sapien
tgcttccgacctgggtccattcacc

SEQ ID NO: 2293109 - DNA, 25 bp, Homo sapien
gccccgctaacaggaggttaccata

SEQ ID NO: 2293110 - DNA, 25 bp, Homo sapien
gccagccccgtaggccccgctaaca

SEQ ID NO: 2293111 - DNA, 25 bp, Homo sapien
caagagcaacatcaagtgaaatagt

SEQ ID NO: 2293112 - DNA, 25 bp, Homo sapien
aacatcaagtgaaatagtattttgg

SEQ ID NO: 2293113 - DNA, 25 bp, Homo sapien
atccaagagcaacatcaagtgaaat

SEQ ID NO: 2293114 - DNA, 25 bp, Homo sapien
gagcaacatcaagtgaaatagtatt

SEQ ID NO: 2293115 - DNA, 25 bp, Homo sapien
cctgtaacaatctccaggacagtca

SEQ ID NO: 2293116 - DNA, 25 bp, Homo sapien
gcctgaagcctgagaccctgtaaca

SEQ ID NO: 2293117 - DNA, 25 bp, Homo sapien
tgaagtagttgctgcagccttggtg

SEQ ID NO: 2293118 - DNA, 25 bp, Homo sapien
tgaggaggcttaccacagctttctc

SEQ ID NO: 2293119 - DNA, 25 bp, Homo sapien
ctaagtgttgggctgttgaaaacca

SEQ ID NO: 2293120 - DNA, 25 bp, Homo sapien
cgtgaccctgaggacaacacacctt

SEQ ID NO: 2293121 - DNA, 25 bp, Homo sapien
cattccgtgaccctgaggacaacac

SEQ ID NO: 2293122 - DNA, 25 bp, Homo sapien
accttcattccgtgaccctgaggac

SEQ ID NO: 2293123 - DNA, 25 bp, Homo sapien
caccttcattgcactcaaccctaga

SEQ ID NO: 2293124 - DNA, 25 bp, Homo sapien
tccaatgtgacatccccattagaat

SEQ ID NO: 2293125 - DNA, 25 bp, Homo sapien
ctgagagtgctggtaagattggaat

SEQ ID NO: 2293126 - DNA, 25 bp, Homo sapien
cacagcactgtgtcggattggctga

SEQ ID NO: 2293127 - DNA, 25 bp, Homo sapien
attggctgagagtgctggtaagatt

SEQ ID NO: 2293128 - DNA, 25 bp, Homo sapien
tctgcaggatgggtggttccacagc

SEQ ID NO: 2293129 - DNA, 25 bp, Homo sapien
tggatctggtctactgcataaagca

SEQ ID NO: 2293130 - DNA, 25 bp, Homo sapien
cctgtgcaatatggatctggtctac

SEQ ID NO: 2293131 - DNA, 25 bp, Homo sapien
gagtgcggtgtaaatacctgtgcaa

SEQ ID NO: 2293132 - DNA, 25 bp, Homo sapien
tggcgctcttgagtgcggtgtaaat

SEQ ID NO: 2293133 - DNA, 25 bp, Homo sapien
gccctttgtgctcgggactcttgag

SEQ ID NO: 2293134 - DNA, 25 bp, Homo sapien
aacactccacggatagcctacaact

SEQ ID NO: 2293135 - DNA, 25 bp, Homo sapien
gggccctttgtgctcgggactcttg

SEQ ID NO: 2293136 - DNA, 25 bp, Homo sapien
ccaggaaacactccacggatagcct

SEQ ID NO: 2293137 - DNA, 25 bp, Homo sapien
gtattccatggaaaatgaatggagt

SEQ ID NO: 2293138 - DNA, 25 bp, Homo sapien
atgaatggagtgttttttctactgc

SEQ ID NO: 2293139 - DNA, 25 bp, Homo sapien
tattccatggaaaatgaatggagtg

SEQ ID NO: 2293140 - DNA, 25 bp, Homo sapien
aaatgaatggagtgttttttctact

SEQ ID NO: 2293141 - DNA, 25 bp, Homo sapien
ctaacataagaagtgcatcctttct

SEQ ID NO: 2293142 - DNA, 25 bp, Homo sapien
agacgggcacgaacattaaaggatg

SEQ ID NO: 2293143 - DNA, 25 bp, Homo sapien
cataagaagtgcatcctttctatca

SEQ ID NO: 2293144 - DNA, 25 bp, Homo sapien
ctttctatcaagcactaaggagacg

SEQ ID NO: 2293145 - DNA, 25 bp, Homo sapien
cgtggattccaggtgactcaatgtt

SEQ ID NO: 2293146 - DNA, 25 bp, Homo sapien
tcaacctcagctgaacgtggattcc

SEQ ID NO: 2293147 - DNA, 25 bp, Homo sapien
cctcagctgaacgtggattccaggt

SEQ ID NO: 2293148 - DNA, 25 bp, Homo sapien
aacctcagctgaacgtggattccag

SEQ ID NO: 2293149 - DNA, 25 bp, Homo sapien
cagagataagaactgtgagttttgc

SEQ ID NO: 2293150 - DNA, 25 bp, Homo sapien
ctatcttcgttgcatttctgttaga

SEQ ID NO: 2293151 - DNA, 25 bp, Homo sapien
cagctgcagagataagaactgtgag

SEQ ID NO: 2293152 - DNA, 25 bp, Homo sapien
gtttgcagctgcagagataagaact

SEQ ID NO: 2293153 - DNA, 25 bp, Homo sapien
tctaataaagatctgctggacacag

SEQ ID NO: 2293154 - DNA, 25 bp, Homo sapien
gttacccgtagtgccctgattccag

SEQ ID NO: 2293155 - DNA, 25 bp, Homo sapien
taagtgtcaaaagtccaagtggagg

SEQ ID NO: 2293156 - DNA, 25 bp, Homo sapien
catcatattgtcttggaaagcaggg

SEQ ID NO: 2293157 - DNA, 25 bp, Homo sapien
tcctccttttatctttgttactagc

SEQ ID NO: 2293158 - DNA, 25 bp, Homo sapien
cctccttttatctttgttactagct

SEQ ID NO: 2293159 - DNA, 25 bp, Homo sapien
tgctttcctccttttatctttgtta

SEQ ID NO: 2293160 - DNA, 25 bp, Homo sapien
ctgctttcctccttttatctttgtt

SEQ ID NO: 2293161 - DNA, 25 bp, Homo sapien
tgatacttctgggtatgacgctcat

SEQ ID NO: 2293162 - DNA, 25 bp, Homo sapien
taacatcctagtcagtagagaggtc

SEQ ID NO: 2293163 - DNA, 25 bp, Homo sapien
ttttctcacccttcagtctgtggac

SEQ ID NO: 2293164 - DNA, 25 bp, Homo sapien
tctgtggacctggacaatgggcctt

SEQ ID NO: 2293165 - DNA, 25 bp, Homo sapien
tcccactaccaggttcaagttagga

SEQ ID NO: 2293166 - DNA, 25 bp, Homo sapien
ctaccaggttcaagttaggaaacat

SEQ ID NO: 2293167 - DNA, 25 bp, Homo sapien
ttaaagttatcttttgcaagtcagt

SEQ ID NO: 2293168 - DNA, 25 bp, Homo sapien
caggttcaagttaggaaacatctct

SEQ ID NO: 2293169 - DNA, 25 bp, Homo sapien
tgagcattacctattacttggcaaa

SEQ ID NO: 2293170 - DNA, 25 bp, Homo sapien
tatgcggatatgcaaaaacttcagt

SEQ ID NO: 2293171 - DNA, 25 bp, Homo sapien
tcatcagaggtaccaagtaagccgg

SEQ ID NO: 2293172 - DNA, 25 bp, Homo sapien
ttagatcataagcaaagaaggccag

SEQ ID NO: 2293173 - DNA, 25 bp, Homo sapien
tctacatttcagaccgagcttgtca

SEQ ID NO: 2293174 - DNA, 25 bp, Homo sapien
cctgagcagttcctaaaaagatttg

SEQ ID NO: 2293175 - DNA, 25 bp, Homo sapien
taaacagaactggtggcacttaaaa

SEQ ID NO: 2293176 - DNA, 25 bp, Homo sapien
gattcaactcgtgatacaccaaaag

SEQ ID NO: 2293177 - DNA, 25 bp, Homo sapien
tgtgtaccccgagcaacattctaag

SEQ ID NO: 2293178 - DNA, 25 bp, Homo sapien
caaatttattgtggcgagacttgtc

SEQ ID NO: 2293179 - DNA, 25 bp, Homo sapien
ggtgctcttgactgtcgcctgcgca

SEQ ID NO: 2293180 - DNA, 25 bp, Homo sapien
cagggagagctactatgggtgatat

SEQ ID NO: 2293181 - DNA, 25 bp, Homo sapien
tcccctttgcatgtaaactaccagg

SEQ ID NO: 2293182 - DNA, 25 bp, Homo sapien
taccaggtggtaggtagacccattc

SEQ ID NO: 2293183 - DNA, 25 bp, Homo sapien
tgcatgtaaactaccaggtggtagg

SEQ ID NO: 2293184 - DNA, 25 bp, Homo sapien
accaggtggtaggtagacccattct

SEQ ID NO: 2293185 - DNA, 25 bp, Homo sapien
tcttgaagaatattccctttgctca

SEQ ID NO: 2293186 - DNA, 25 bp, Homo sapien
tgctcacctggataaggccttggct

SEQ ID NO: 2293187 - DNA, 25 bp, Homo sapien
gactcatctcgttcagaagcctttt

SEQ ID NO: 2293188 - DNA, 25 bp, Homo sapien
gaagccttttgaatctctcttgaag

SEQ ID NO: 2293189 - DNA, 25 bp, Homo sapien
catgaagctttcactgaggaaggaa

SEQ ID NO: 2293190 - DNA, 25 bp, Homo sapien
tcatgaagctttcactgaggaagga

SEQ ID NO: 2293191 - DNA, 25 bp, Homo sapien
tgaagctttcactgaggaaggaaac

SEQ ID NO: 2293192 - DNA, 25 bp, Homo sapien
gaagctttcactgaggaaggaaact

SEQ ID NO: 2293193 - DNA, 25 bp, Homo sapien
caccatggatgacttgacaacagcc

SEQ ID NO: 2293194 - DNA, 25 bp, Homo sapien
tcaccatggatgacttgacaacagc

SEQ ID NO: 2293195 - DNA, 25 bp, Homo sapien
ttacatacttaagtactatggttgt

SEQ ID NO: 2293196 - DNA, 25 bp, Homo sapien
ctcagaatattcttggtgaaacagt

SEQ ID NO: 2293197 - DNA, 25 bp, Homo sapien
aaaatagcaatgtcacataaagtgc

SEQ ID NO: 2293198 - DNA, 25 bp, Homo sapien
caaagtgctggctcagtcattatgt

SEQ ID NO: 2293199 - DNA, 25 bp, Homo sapien
tcagtttgcacatagcggtcagtgg

SEQ ID NO: 2293200 - DNA, 25 bp, Homo sapien
tttggagtcggtggaaaagctgccc

SEQ ID NO: 2293201 - DNA, 25 bp, Homo sapien
taatttaggctgacgttgccccagg

SEQ ID NO: 2293202 - DNA, 25 bp, Homo sapien
cagttaatacagatggaggccgggc

SEQ ID NO: 2293203 - DNA, 25 bp, Homo sapien
gatattggttgagttaaatcgagag

SEQ ID NO: 2293204 - DNA, 25 bp, Homo sapien
tcaagattcagattaattgattctg

SEQ ID NO: 2293205 - DNA, 25 bp, Homo sapien
gactttcaagattcagattaattga

SEQ ID NO: 2293206 - DNA, 25 bp, Homo sapien
agttaaatcgagagcctatttctgg

SEQ ID NO: 2293207 - DNA, 25 bp, Homo sapien
tcgtggccgacggaacaatgaaggt

SEQ ID NO: 2293208 - DNA, 25 bp, Homo sapien
gtggccgacggaacaatgaaggtaa

SEQ ID NO: 2293209 - DNA, 25 bp, Homo sapien
ctcgtggccgacggaacaatgaagg

SEQ ID NO: 2293210 - DNA, 25 bp, Homo sapien
cgtggccgacggaacaatgaaggta

SEQ ID NO: 2293211 - DNA, 25 bp, Homo sapien
cggatacgcacccacagtggctgat

SEQ ID NO: 2293212 - DNA, 25 bp, Homo sapien
tgcaatccgctaggtcgcgagtctc

SEQ ID NO: 2293213 - DNA, 25 bp, Homo sapien
tataaatgttacacgggcatcccca

SEQ ID NO: 2293214 - DNA, 25 bp, Homo sapien
cgaatcttcgggctgggagagactc

SEQ ID NO: 2293215 - DNA, 25 bp, Homo sapien
tcttataggataggtctactgttga

SEQ ID NO: 2293216 - DNA, 25 bp, Homo sapien
tatttcttataggataggtctactg

SEQ ID NO: 2293217 - DNA, 25 bp, Homo sapien
ttaatatttcttataggataggtct

SEQ ID NO: 2293218 - DNA, 25 bp, Homo sapien
taggataggtctactgttgatgaaa

SEQ ID NO: 2293219 - DNA, 25 bp, Homo sapien
ggtcagggtacagctcacttttaca

SEQ ID NO: 2293220 - DNA, 25 bp, Homo sapien
aaggtgtggttccaggtagataaga

SEQ ID NO: 2293221 - DNA, 25 bp, Homo sapien
tgtgtcctggcaacatgtgctcaag

SEQ ID NO: 2293222 - DNA, 25 bp, Homo sapien
gacagttccaggtagataaggtgtg

SEQ ID NO: 2293223 - DNA, 25 bp, Homo sapien
tatttcttggtgttcgtctgtgggc

SEQ ID NO: 2293224 - DNA, 25 bp, Homo sapien
gtctgtgggctatcaaaactgctag

SEQ ID NO: 2293225 - DNA, 25 bp, Homo sapien
aacttgaccaatgagagccgggcgt

SEQ ID NO: 2293226 - DNA, 25 bp, Homo sapien
gacttcggctttgagacgttttcag

SEQ ID NO: 2293227 - DNA, 25 bp, Homo sapien
ctttccgtttgatgtcacatgcatt

SEQ ID NO: 2293228 - DNA, 25 bp, Homo sapien
ctttggaaaaagaagagcagatcag

SEQ ID NO: 2293229 - DNA, 25 bp, Homo sapien
ttggaaaaagaagagcagatcagtt

SEQ ID NO: 2293230 - DNA, 25 bp, Homo sapien
tttggaaaaagaagagcagatcagt

SEQ ID NO: 2293231 - DNA, 25 bp, Homo sapien
gcatgttccacaactgctcaaggcc

SEQ ID NO: 2293232 - DNA, 25 bp, Homo sapien
gaattttggctagttgtttgtctca

SEQ ID NO: 2293233 - DNA, 25 bp, Homo sapien
aagtttccaggtccacatgtgggtc

SEQ ID NO: 2293234 - DNA, 25 bp, Homo sapien
tcatcatggcctggaaagtttccag

SEQ ID NO: 2293235 - DNA, 25 bp, Homo sapien
caaacagaatcatcgatgatgctgc

SEQ ID NO: 2293236 - DNA, 25 bp, Homo sapien
tgattttatgccatcctgttcacaa

SEQ ID NO: 2293237 - DNA, 25 bp, Homo sapien
tgatgctgcttaatctatgattcac

SEQ ID NO: 2293238 - DNA, 25 bp, Homo sapien
tatgccatcctgttcacaaacagaa

SEQ ID NO: 2293239 - DNA, 25 bp, Homo sapien
cccaatgtagaatctgttatatctg

SEQ ID NO: 2293240 - DNA, 25 bp, Homo sapien
gaagctccccaatgtagaatctgtt

SEQ ID NO: 2293241 - DNA, 25 bp, Homo sapien
caaagcctcgaagctccccaatgta

SEQ ID NO: 2293242 - DNA, 25 bp, Homo sapien
agcctcgaagctccccaatgtagaa

SEQ ID NO: 2293243 - DNA, 25 bp, Homo sapien
ggcgcaattcggtacagtcctctga

SEQ ID NO: 2293244 - DNA, 25 bp, Homo sapien
ttcttttgttgaaatgaaggtctgc

SEQ ID NO: 2293245 - DNA, 25 bp, Homo sapien
gtctgctacgtaggcaatcaaatca

SEQ ID NO: 2293246 - DNA, 25 bp, Homo sapien
tgataactggctgttagtttcttcc

SEQ ID NO: 2293247 - DNA, 25 bp, Homo sapien
ttcatactaagtttcagttcctcca

SEQ ID NO: 2293248 - DNA, 25 bp, Homo sapien
taattgtttgctctgggctacaatc

SEQ ID NO: 2293249 - DNA, 25 bp, Homo sapien
tgttctcataatagcctggtgggca

SEQ ID NO: 2293250 - DNA, 25 bp, Homo sapien
gctctgggctacaatcatgctcttc

SEQ ID NO: 2293251 - DNA, 25 bp, Homo sapien
tcttcctgtagaatccgaatcttaa

SEQ ID NO: 2293252 - DNA, 25 bp, Homo sapien
tccgaatcttaagaatcagagcccg

SEQ ID NO: 2293253 - DNA, 25 bp, Homo sapien
gtagaatccgaatcttaagaatcag

SEQ ID NO: 2293254 - DNA, 25 bp, Homo sapien
tcttaagaatcagagcccggttttc

SEQ ID NO: 2293255 - DNA, 25 bp, Homo sapien
gttttagacaagtcttcaatcttct

SEQ ID NO: 2293256 - DNA, 25 bp, Homo sapien
tcttttccagtctgtctatatccat

SEQ ID NO: 2293257 - DNA, 25 bp, Homo sapien
tgtctcagttttagacaagtcttca

SEQ ID NO: 2293258 - DNA, 25 bp, Homo sapien
ttttccagtctgtctatatccatga

SEQ ID NO: 2293259 - DNA, 25 bp, Homo sapien
tgttctcatatgtgtgtaactgcat

SEQ ID NO: 2293260 - DNA, 25 bp, Homo sapien
gtgttctcatatgtgtgtaactgca

SEQ ID NO: 2293261 - DNA, 25 bp, Homo sapien
agtgttctcatatgtgtgtaactgc

SEQ ID NO: 2293262 - DNA, 25 bp, Homo sapien
taatgcttccatattctatgatggt

SEQ ID NO: 2293263 - DNA, 25 bp, Homo sapien
ccatattctatgatggttgatttaa

SEQ ID NO: 2293264 - DNA, 25 bp, Homo sapien
ctctataatgcttccatattctatg

SEQ ID NO: 2293265 - DNA, 25 bp, Homo sapien
ttctatgatggttgatttaagttct

SEQ ID NO: 2293266 - DNA, 25 bp, Homo sapien
cttgcaaggtgtgagattaataata

SEQ ID NO: 2293267 - DNA, 25 bp, Homo sapien
aaggtgtgagattaataataacagg

SEQ ID NO: 2293268 - DNA, 25 bp, Homo sapien
tgcaaggtgtgagattaataataac

SEQ ID NO: 2293269 - DNA, 25 bp, Homo sapien
gcaaggtgtgagattaataataaca

SEQ ID NO: 2293270 - DNA, 25 bp, Homo sapien
actcatgagccagtttacttttttc

SEQ ID NO: 2293271 - DNA, 25 bp, Homo sapien
caagtgctgtaactcatgagccagt

SEQ ID NO: 2293272 - DNA, 25 bp, Homo sapien
gagtgcctgttgcaagtgctgtaac

SEQ ID NO: 2293273 - DNA, 25 bp, Homo sapien
gtgatgagtgcctgttgcaagtgct

SEQ ID NO: 2293274 - DNA, 25 bp, Homo sapien
cattaacattcaactggatcccatt

SEQ ID NO: 2293275 - DNA, 25 bp, Homo sapien
tgagcaagagtgagttcgtaatgta

SEQ ID NO: 2293276 - DNA, 25 bp, Homo sapien
gcaagagtgagttcgtaatgtaaag

SEQ ID NO: 2293277 - DNA, 25 bp, Homo sapien
gagtgagttcgtaatgtaaagactt

SEQ ID NO: 2293278 - DNA, 25 bp, Homo sapien
gaaatgcccacaattgacatctgaa

SEQ ID NO: 2293279 - DNA, 25 bp, Homo sapien
ctgaaacaaggatcgaaatgcccac

SEQ ID NO: 2293280 - DNA, 25 bp, Homo sapien
cacttaacaaaaatgatgctcatga

SEQ ID NO: 2293281 - DNA, 25 bp, Homo sapien
gctcatgagttaatgtcattgtcct

SEQ ID NO: 2293282 - DNA, 25 bp, Homo sapien
catcatggcgtccagagatgacaag

SEQ ID NO: 2293283 - DNA, 25 bp, Homo sapien
cactgccttctgtgcgggctctctt

SEQ ID NO: 2293284 - DNA, 25 bp, Homo sapien
gcgggctctcttagtaatagcagca

SEQ ID NO: 2293285 - DNA, 25 bp, Homo sapien
tagcagcatttcctgatccatcatg

SEQ ID NO: 2293286 - DNA, 25 bp, Homo sapien
tcaatgagggttgcaattttagaaa

SEQ ID NO: 2293287 - DNA, 25 bp, Homo sapien
cacagtaatttctggattagttacc

SEQ ID NO: 2293288 - DNA, 25 bp, Homo sapien
caccgtcgagagttttcaatgaggg

SEQ ID NO: 2293289 - DNA, 25 bp, Homo sapien
tctggattagttacccaccgtcgag

SEQ ID NO: 2293290 - DNA, 25 bp, Homo sapien
gcttctcttccatgatattgttgaa

SEQ ID NO: 2293291 - DNA, 25 bp, Homo sapien
cagcattaatatgcaaagatctagc

SEQ ID NO: 2293292 - DNA, 25 bp, Homo sapien
agactctttgtggtttcccaagatg

SEQ ID NO: 2293293 - DNA, 25 bp, Homo sapien
aagagactctttgtggtttcccaag

SEQ ID NO: 2293294 - DNA, 25 bp, Homo sapien
gaaatcccttaatcaatccaggaag

SEQ ID NO: 2293295 - DNA, 25 bp, Homo sapien
tagtactccgagacaggtaagacag

SEQ ID NO: 2293296 - DNA, 25 bp, Homo sapien
cacatactggtctcataccggagaa

SEQ ID NO: 2293297 - DNA, 25 bp, Homo sapien
gcatgatgcatctcatagtactccg

SEQ ID NO: 2293298 - DNA, 25 bp, Homo sapien
taaagtgagactcttgagacagcat

SEQ ID NO: 2293299 - DNA, 25 bp, Homo sapien
tatgttcagccctctatgtcttttg

SEQ ID NO: 2293300 - DNA, 25 bp, Homo sapien
gtctgatatagttacccatactctc

SEQ ID NO: 2293301 - DNA, 25 bp, Homo sapien
cttcaccttcagtttatgtatgtac

SEQ ID NO: 2293302 - DNA, 25 bp, Homo sapien
taaaatgccctcttaggagtactgc

SEQ ID NO: 2293303 - DNA, 25 bp, Homo sapien
ctctctagtgccattcaagcctgct

SEQ ID NO: 2293304 - DNA, 25 bp, Homo sapien
atttccgttttccttctgctataca

SEQ ID NO: 2293305 - DNA, 25 bp, Homo sapien
tccattatggtaggaaaaagataat

SEQ ID NO: 2293306 - DNA, 25 bp, Homo sapien
gctctggctagtactacactgaaca

SEQ ID NO: 2293307 - DNA, 25 bp, Homo sapien
caatgttgctcatatataaacgaaa

SEQ ID NO: 2293308 - DNA, 25 bp, Homo sapien
ctttgtgttttaccattgagtgatg

SEQ ID NO: 2293309 - DNA, 25 bp, Homo sapien
ccttgctttgttgctgatcttagag

SEQ ID NO: 2293310 - DNA, 25 bp, Homo sapien
catcctccagccgttggctggtttc

SEQ ID NO: 2293311 - DNA, 25 bp, Homo sapien
cttcctgtagttgtttaatggcttc

SEQ ID NO: 2293312 - DNA, 25 bp, Homo sapien
tccagccgttggctggtttcttgga

SEQ ID NO: 2293313 - DNA, 25 bp, Homo sapien
cttcctaaggatgccttcctggttg

SEQ ID NO: 2293314 - DNA, 25 bp, Homo sapien
tctgaggagatgtcccctgaatcta

SEQ ID NO: 2293315 - DNA, 25 bp, Homo sapien
cagagtcgcctctttcatcagcagg

SEQ ID NO: 2293316 - DNA, 25 bp, Homo sapien
tctgctcactgttagtcgctaggga

SEQ ID NO: 2293317 - DNA, 25 bp, Homo sapien
tctcagggaagtgataagcctctcc

SEQ ID NO: 2293318 - DNA, 25 bp, Homo sapien
gcctggcaagtgttcgataattcag

SEQ ID NO: 2293319 - DNA, 25 bp, Homo sapien
aaattgcttcctctaatttatgcag

SEQ ID NO: 2293320 - DNA, 25 bp, Homo sapien
cagtgtgggcttctcgatctcgatc

SEQ ID NO: 2293321 - DNA, 25 bp, Homo sapien
agtaaagacgtagctttttcactgg

SEQ ID NO: 2293322 - DNA, 25 bp, Homo sapien
caccaggcaatcttgggttttagaa

SEQ ID NO: 2293323 - DNA, 25 bp, Homo sapien
gagttggacctgtaatgcctctaga

SEQ ID NO: 2293324 - DNA, 25 bp, Homo sapien
tgctttacatgtttggagttggacc

SEQ ID NO: 2293325 - DNA, 25 bp, Homo sapien
gcaaaacaagttggcttatgaccac

SEQ ID NO: 2293326 - DNA, 25 bp, Homo sapien
caagactctgtctcaggggaaaaaa

SEQ ID NO: 2293327 - DNA, 25 bp, Homo sapien
caattatgtagaaaattacctatgt

SEQ ID NO: 2293328 - DNA, 25 bp, Homo sapien
aaaataacttacttctcaatcaagc

SEQ ID NO: 2293329 - DNA, 25 bp, Homo sapien
taggcccactaggagcaaaacagat

SEQ ID NO: 2293330 - DNA, 25 bp, Homo sapien
caagcttgacatagtgttactaggc

SEQ ID NO: 2293331 - DNA, 25 bp, Homo sapien
ggctgaagccatcctcctgtttcaa

SEQ ID NO: 2293332 - DNA, 25 bp, Homo sapien
ccacccacactcagctagttttggt

SEQ ID NO: 2293333 - DNA, 25 bp, Homo sapien
tgaagccatcctcctgtttcaacct

SEQ ID NO: 2293334 - DNA, 25 bp, Homo sapien
tgccacccacactcagctagttttg

SEQ ID NO: 2293335 - DNA, 25 bp, Homo sapien
ctgaaacagcaagccatggtgttcc

SEQ ID NO: 2293336 - DNA, 25 bp, Homo sapien
agccatggtgttccccttcaatgaa

SEQ ID NO: 2293337 - DNA, 25 bp, Homo sapien
aacagcaagccatggtgttcccctt

SEQ ID NO: 2293338 - DNA, 25 bp, Homo sapien
gcaagccatggtgttccccttcaat

SEQ ID NO: 2293339 - DNA, 25 bp, Homo sapien
tgaattgcatctgcgcaggacaggg

SEQ ID NO: 2293340 - DNA, 25 bp, Homo sapien
ggaatcatagtgaggaaattcctca

SEQ ID NO: 2293341 - DNA, 25 bp, Homo sapien
cagggaatcatagtgaggaaattcc

SEQ ID NO: 2293342 - DNA, 25 bp, Homo sapien
tctgcgcaggacagggaatcatagt

SEQ ID NO: 2293343 - DNA, 25 bp, Homo sapien
cagcacgtatgtttcaaggtcaggg

SEQ ID NO: 2293344 - DNA, 25 bp, Homo sapien
caggggtgtctgatgtattcttgct

SEQ ID NO: 2293345 - DNA, 25 bp, Homo sapien
ccaccatatagtttgtggcaacact

SEQ ID NO: 2293346 - DNA, 25 bp, Homo sapien
tgcttcttgaccaccatatagtttg

SEQ ID NO: 2293347 - DNA, 25 bp, Homo sapien
gctgtaaaactatccagagataagg

SEQ ID NO: 2293348 - DNA, 25 bp, Homo sapien
gaactgctgtaaaactatccagaga

SEQ ID NO: 2293349 - DNA, 25 bp, Homo sapien
ttggaactgctgtaaaactatccag

SEQ ID NO: 2293350 - DNA, 25 bp, Homo sapien
ggttggaactgctgtaaaactatcc

SEQ ID NO: 2293351 - DNA, 25 bp, Homo sapien
gtggatttggttggctacacctgag

SEQ ID NO: 2293352 - DNA, 25 bp, Homo sapien
gtgtggatttggttggctacacctg

SEQ ID NO: 2293353 - DNA, 25 bp, Homo sapien
tgtggatttggttggctacacctga

SEQ ID NO: 2293354 - DNA, 25 bp, Homo sapien
tggatttggttggctacacctgaga

SEQ ID NO: 2293355 - DNA, 25 bp, Homo sapien
tctaacgcggtatctcttggtgggc

SEQ ID NO: 2293356 - DNA, 25 bp, Homo sapien
gacgcgaagctcctgaatctcttga

SEQ ID NO: 2293357 - DNA, 25 bp, Homo sapien
tcaatcgtgcctagtaaagcctcca

SEQ ID NO: 2293358 - DNA, 25 bp, Homo sapien
tacgagcatcttctgttctaacgcg

SEQ ID NO: 2293359 - DNA, 25 bp, Homo sapien
tgatgcagcctgagagattcgttcc

SEQ ID NO: 2293360 - DNA, 25 bp, Homo sapien
cctgatgcagcctgagagattcgtt

SEQ ID NO: 2293361 - DNA, 25 bp, Homo sapien
cagcctgagagattcgttcctgggc

SEQ ID NO: 2293362 - DNA, 25 bp, Homo sapien
cctgagagattcgttcctgggctgg

SEQ ID NO: 2293363 - DNA, 25 bp, Homo sapien
tcactcaacctcctccttccggatt

SEQ ID NO: 2293364 - DNA, 25 bp, Homo sapien
agtagaaattgggtttcactacatt

SEQ ID NO: 2293365 - DNA, 25 bp, Homo sapien
gctcactcaacctcctccttccgga

SEQ ID NO: 2293366 - DNA, 25 bp, Homo sapien
caaggagctggttttacaggcgcct

SEQ ID NO: 2293367 - DNA, 25 bp, Homo sapien
tgttcttggccttaataaatcaccg

SEQ ID NO: 2293368 - DNA, 25 bp, Homo sapien
catacaacttggaagaacaggacag

SEQ ID NO: 2293369 - DNA, 25 bp, Homo sapien
caaggttattaatgctgcacccaca

SEQ ID NO: 2293370 - DNA, 25 bp, Homo sapien
gaaggataacgcaaagagagacaag

SEQ ID NO: 2293371 - DNA, 25 bp, Homo sapien
gcacgcaccaactgtgacacctgga

SEQ ID NO: 2293372 - DNA, 25 bp, Homo sapien
ggcccacagcagaacataaccagca

SEQ ID NO: 2293373 - DNA, 25 bp, Homo sapien
catgaaaaatccatggtccagccca

SEQ ID NO: 2293374 - DNA, 25 bp, Homo sapien
taacacatgccgatagcacagagca

SEQ ID NO: 2293375 - DNA, 25 bp, Homo sapien
ggacacacgcgttcaacaccattct

SEQ ID NO: 2293376 - DNA, 25 bp, Homo sapien
gacacacgcgttcaacaccattctc

SEQ ID NO: 2293377 - DNA, 25 bp, Homo sapien
caggacacacgcgttcaacaccatt

SEQ ID NO: 2293378 - DNA, 25 bp, Homo sapien
tcaggacacacgcgttcaacaccat

SEQ ID NO: 2293379 - DNA, 25 bp, Homo sapien
gggtaatggtagtgaggaatattcc

SEQ ID NO: 2293380 - DNA, 25 bp, Homo sapien
cacttgaagttatagtaccgtctgt

SEQ ID NO: 2293381 - DNA, 25 bp, Homo sapien
tctgggtaatggtagtgaggaatat

SEQ ID NO: 2293382 - DNA, 25 bp, Homo sapien
ccgtctgtcgatgaagtgtgtctgg

SEQ ID NO: 2293383 - DNA, 25 bp, Homo sapien
tatgttcttctcatttgctcacacc

SEQ ID NO: 2293384 - DNA, 25 bp, Homo sapien
tcacagaacatcaggctgaaagctg

SEQ ID NO: 2293385 - DNA, 25 bp, Homo sapien
caggagaaacaaatggtgcgaatac

SEQ ID NO: 2293386 - DNA, 25 bp, Homo sapien
tttaactatactatgcaaaaggagt

SEQ ID NO: 2293387 - DNA, 25 bp, Homo sapien
cttgggcctctatcgtgggagaagc

SEQ ID NO: 2293388 - DNA, 25 bp, Homo sapien
gagaagctgatcttgtatcctcctc

SEQ ID NO: 2293389 - DNA, 25 bp, Homo sapien
gggcctctatcgtgggagaagctga

SEQ ID NO: 2293390 - DNA, 25 bp, Homo sapien
ggagaagctgatcttgtatcctcct

SEQ ID NO: 2293391 - DNA, 25 bp, Homo sapien
ttatagtagccctcccttatccaag

SEQ ID NO: 2293392 - DNA, 25 bp, Homo sapien
cccaagaaacagtagtccttttatg

SEQ ID NO: 2293393 - DNA, 25 bp, Homo sapien
tcagaggatatatacattcaacatt

SEQ ID NO: 2293394 - DNA, 25 bp, Homo sapien
tagtattctattacatggatatgcc

SEQ ID NO: 2293395 - DNA, 25 bp, Homo sapien
tcctcccatccatgacttccagaaa

SEQ ID NO: 2293396 - DNA, 25 bp, Homo sapien
agattcatatggttcataaatcaaa

SEQ ID NO: 2293397 - DNA, 25 bp, Homo sapien
attaaattttgtctagctttccagg

SEQ ID NO: 2293398 - DNA, 25 bp, Homo sapien
aattttaggacaagtagtagattca

SEQ ID NO: 2293399 - DNA, 25 bp, Homo sapien
tatggttttatccttactcgtagag

SEQ ID NO: 2293400 - DNA, 25 bp, Homo sapien
atgcaatattatcatgagctggact

SEQ ID NO: 2293401 - DNA, 25 bp, Homo sapien
tgcaatattatcatgagctggactt

SEQ ID NO: 2293402 - DNA, 25 bp, Homo sapien
tatccttactcgtagagtcttggaa

SEQ ID NO: 2293403 - DNA, 25 bp, Homo sapien
cctttgttgtgaacatacgtatttc

SEQ ID NO: 2293404 - DNA, 25 bp, Homo sapien
cacctttgttgtgaacatacgtatt

SEQ ID NO: 2293405 - DNA, 25 bp, Homo sapien
tttgttgtgaacatacgtatttcct

SEQ ID NO: 2293406 - DNA, 25 bp, Homo sapien
ctttgttgtgaacatacgtatttcc

SEQ ID NO: 2293407 - DNA, 25 bp, Homo sapien
tcctccgtgacatgttttctggcct

SEQ ID NO: 2293408 - DNA, 25 bp, Homo sapien
cattaacatggtacttcctccgtga

SEQ ID NO: 2293409 - DNA, 25 bp, Homo sapien
cactctgggcctaatgaattttctc

SEQ ID NO: 2293410 - DNA, 25 bp, Homo sapien
catatcgttaggatagataccaccg

SEQ ID NO: 2293411 - DNA, 25 bp, Homo sapien
taaaattggctgcaagggcgcttcc

SEQ ID NO: 2293412 - DNA, 25 bp, Homo sapien
gacccctgctctacagtttttaatg

SEQ ID NO: 2293413 - DNA, 25 bp, Homo sapien
gcaaaaagggcgtaaatacatgaaa

SEQ ID NO: 2293414 - DNA, 25 bp, Homo sapien
gcctcgaatgggttctgatccctgg

SEQ ID NO: 2293415 - DNA, 25 bp, Homo sapien
tagatggctcgcttgcacagttcac

SEQ ID NO: 2293416 - DNA, 25 bp, Homo sapien
tcctaaggaacatgcaatctagatg

SEQ ID NO: 2293417 - DNA, 25 bp, Homo sapien
gatcatcaggcgttattctcctaag

SEQ ID NO: 2293418 - DNA, 25 bp, Homo sapien
tcctaagcctactctgacaaaaaca

SEQ ID NO: 2293419 - DNA, 25 bp, Homo sapien
atgttcttctattgtttctggttcc

SEQ ID NO: 2293420 - DNA, 25 bp, Homo sapien
ctcctgaagcatgttcttttttatg

SEQ ID NO: 2293421 - DNA, 25 bp, Homo sapien
tcttctattgtttctggttcctctt

SEQ ID NO: 2293422 - DNA, 25 bp, Homo sapien
ttttatgttcttctattgtttctgg

SEQ ID NO: 2293423 - DNA, 25 bp, Homo sapien
gaacaaaagttcacatggggattga

SEQ ID NO: 2293424 - DNA, 25 bp, Homo sapien
catggggattgaaagaaacattcct

SEQ ID NO: 2293425 - DNA, 25 bp, Homo sapien
cagacagatttcacccacaaaaata

SEQ ID NO: 2293426 - DNA, 25 bp, Homo sapien
tagctttattcagacagatttcacc

SEQ ID NO: 2293427 - DNA, 25 bp, Homo sapien
ccatcccaatggaggtaggctaagg

SEQ ID NO: 2293428 - DNA, 25 bp, Homo sapien
tagctagtcagagattgatcccatg

SEQ ID NO: 2293429 - DNA, 25 bp, Homo sapien
gaactaacagtagagcatagcattt

SEQ ID NO: 2293430 - DNA, 25 bp, Homo sapien
ggttttctgggatcgcacagtcaac

SEQ ID NO: 2293431 - DNA, 25 bp, Homo sapien
tacagttatgtgagcttgaacaagt

SEQ ID NO: 2293432 - DNA, 25 bp, Homo sapien
tgttgtagatacttttattgtccac

SEQ ID NO: 2293433 - DNA, 25 bp, Homo sapien
tcacaaagtcattaagccatctaag

SEQ ID NO: 2293434 - DNA, 25 bp, Homo sapien
gagcattggatttaaagtcaaacaa

SEQ ID NO: 2293435 - DNA, 25 bp, Homo sapien
ttgtctaaggttaaccgatttcaca

SEQ ID NO: 2293436 - DNA, 25 bp, Homo sapien
ctcactttgtctaaggttaaccgat

SEQ ID NO: 2293437 - DNA, 25 bp, Homo sapien
ctaaggttaaccgatttcacagtgg

SEQ ID NO: 2293438 - DNA, 25 bp, Homo sapien
tctcactttgtctaaggttaaccga

SEQ ID NO: 2293439 - DNA, 25 bp, Homo sapien
cacctccttctcattagcagaagtg

SEQ ID NO: 2293440 - DNA, 25 bp, Homo sapien
tccaaggtaaaccagtcacacttaa

SEQ ID NO: 2293441 - DNA, 25 bp, Homo sapien
gccaagtcacgggacctctcttcaa

SEQ ID NO: 2293442 - DNA, 25 bp, Homo sapien
ctctaatagttttaaacagttagtg

SEQ ID NO: 2293443 - DNA, 25 bp, Homo sapien
tctcttctccaaggtaaaccagtca

SEQ ID NO: 2293444 - DNA, 25 bp, Homo sapien
tctcagtaccctacagcaggcttgc

SEQ ID NO: 2293445 - DNA, 25 bp, Homo sapien
tcaccatatggaaggataatagtag

SEQ ID NO: 2293446 - DNA, 25 bp, Homo sapien
agtagttgttacactcctctgcacc

SEQ ID NO: 2293447 - DNA, 25 bp, Homo sapien
tctctaaatgtatggtaacttcacc

SEQ ID NO: 2293448 - DNA, 25 bp, Homo sapien
catccattagggtggctatcataaa

SEQ ID NO: 2293449 - DNA, 25 bp, Homo sapien
acctcacatccattagggtggctat

SEQ ID NO: 2293450 - DNA, 25 bp, Homo sapien
tcacatccattagggtggctatcat

SEQ ID NO: 2293451 - DNA, 25 bp, Homo sapien
ccattagggtggctatcataaaatc

SEQ ID NO: 2293452 - DNA, 25 bp, Homo sapien
tcgtgctgcacactggctaagaaac

SEQ ID NO: 2293453 - DNA, 25 bp, Homo sapien
gctcccaacatctcagccctactgg

SEQ ID NO: 2293454 - DNA, 25 bp, Homo sapien
atctcagccctactggccactcgtg

SEQ ID NO: 2293455 - DNA, 25 bp, Homo sapien
ctggttgtcatcttcacacagaggt

SEQ ID NO: 2293456 - DNA, 25 bp, Homo sapien
caaaacagaatggaggcttagatca

SEQ ID NO: 2293457 - DNA, 25 bp, Homo sapien
acagagctgcccttgagtgaagtaa

SEQ ID NO: 2293458 - DNA, 25 bp, Homo sapien
gcagggagaccatataggaacctat

SEQ ID NO: 2293459 - DNA, 25 bp, Homo sapien
gaaaggtgttgagaattaccccagc

SEQ ID NO: 2293460 - DNA, 25 bp, Homo sapien
gagttacaccctcaaggcaggcagt

SEQ ID NO: 2293461 - DNA, 25 bp, Homo sapien
aaaagcctagaagcaacctacactg

SEQ ID NO: 2293462 - DNA, 25 bp, Homo sapien
tggtgaaagactacatacagttgga

SEQ ID NO: 2293463 - DNA, 25 bp, Homo sapien
aagattaggtccagagactccttcc

SEQ ID NO: 2293464 - DNA, 25 bp, Homo sapien
cttcaagaggattgaaagacctttc

SEQ ID NO: 2293465 - DNA, 25 bp, Homo sapien
aagaacctgtttcagttcttctaat

SEQ ID NO: 2293466 - DNA, 25 bp, Homo sapien
ttcagcgtgctctttggcatacatc

SEQ ID NO: 2293467 - DNA, 25 bp, Homo sapien
tcatcttcaagaggattgaaagacc

SEQ ID NO: 2293468 - DNA, 25 bp, Homo sapien
tgtgatgtccataatgcctagctag

SEQ ID NO: 2293469 - DNA, 25 bp, Homo sapien
taatgcctagctagcacagggtagg

SEQ ID NO: 2293470 - DNA, 25 bp, Homo sapien
cataatgcctagctagcacagggta

SEQ ID NO: 2293471 - DNA, 25 bp, Homo sapien
tgtccataatgcctagctagcacag

SEQ ID NO: 2293472 - DNA, 25 bp, Homo sapien
agctgaacgttttttaatttggcag

SEQ ID NO: 2293473 - DNA, 25 bp, Homo sapien
tgaacgttttttaatttggcagtca

SEQ ID NO: 2293474 - DNA, 25 bp, Homo sapien
tggagtttagagaagctgaacgttt

SEQ ID NO: 2293475 - DNA, 25 bp, Homo sapien
cttggagtttagagaagctgaacgt

SEQ ID NO: 2293476 - DNA, 25 bp, Homo sapien
gccatcttagactctgaggcagaag

SEQ ID NO: 2293477 - DNA, 25 bp, Homo sapien
tttacacaacagagagaaaccattg

SEQ ID NO: 2293478 - DNA, 25 bp, Homo sapien
tgctgtgccattgtcgggttaccca

SEQ ID NO: 2293479 - DNA, 25 bp, Homo sapien
cttggtgcctggatctaaagtagcc

SEQ ID NO: 2293480 - DNA, 25 bp, Homo sapien
tttacactgtggcaaaacctgccag

SEQ ID NO: 2293481 - DNA, 25 bp, Homo sapien
aataagcctcctgatttttagctag

SEQ ID NO: 2293482 - DNA, 25 bp, Homo sapien
caagaatatgaaactgcggcccaag

SEQ ID NO: 2293483 - DNA, 25 bp, Homo sapien
taatttcataggttagttgagcatc

SEQ ID NO: 2293484 - DNA, 25 bp, Homo sapien
tgcaacaccaataaatatccttgta

SEQ ID NO: 2293485 - DNA, 25 bp, Homo sapien
tgtacttgaccacagctgagttaaa

SEQ ID NO: 2293486 - DNA, 25 bp, Homo sapien
tatccttgtacatgcatatccgtgt

SEQ ID NO: 2293487 - DNA, 25 bp, Homo sapien
gagttaaacagacatatcttaaagg

SEQ ID NO: 2293488 - DNA, 25 bp, Homo sapien
ttccaatatttctgggtaaagaggc

SEQ ID NO: 2293489 - DNA, 25 bp, Homo sapien
caatatttctgggtaaagaggcaat

SEQ ID NO: 2293490 - DNA, 25 bp, Homo sapien
gaggcaatagtcactcttcgtagag

SEQ ID NO: 2293491 - DNA, 25 bp, Homo sapien
tagtcactcttcgtagagaagatgg

SEQ ID NO: 2293492 - DNA, 25 bp, Homo sapien
ctttgactaagaacacttaggaatt

SEQ ID NO: 2293493 - DNA, 25 bp, Homo sapien
tgactaagaacacttaggaattgtc

SEQ ID NO: 2293494 - DNA, 25 bp, Homo sapien
gactaagaacacttaggaattgtct

SEQ ID NO: 2293495 - DNA, 25 bp, Homo sapien
taagaacacttaggaattgtcttac

SEQ ID NO: 2293496 - DNA, 25 bp, Homo sapien
tatacgtttatattttctgtcatat

SEQ ID NO: 2293497 - DNA, 25 bp, Homo sapien
aatatacgtttatattttctgtcat

SEQ ID NO: 2293498 - DNA, 25 bp, Homo sapien
tacgtttatattttctgtcatatga

SEQ ID NO: 2293499 - DNA, 25 bp, Homo sapien
cgtttatattttctgtcatatgaaa

SEQ ID NO: 2293500 - DNA, 25 bp, Homo sapien
tctactgaatcgatcattattttcc

SEQ ID NO: 2293501 - DNA, 25 bp, Homo sapien
caactgcttgaccttctactgaatc

SEQ ID NO: 2293502 - DNA, 25 bp, Homo sapien
gcttgaccttctactgaatcgatca

SEQ ID NO: 2293503 - DNA, 25 bp, Homo sapien
tgaccttctactgaatcgatcatta

SEQ ID NO: 2293504 - DNA, 25 bp, Homo sapien
tttgagcactcatttaggttagccc

SEQ ID NO: 2293505 - DNA, 25 bp, Homo sapien
cacttaatttgagcactcatttagg

SEQ ID NO: 2293506 - DNA, 25 bp, Homo sapien
tcatttaggttagcccaagtataaa

SEQ ID NO: 2293507 - DNA, 25 bp, Homo sapien
actatatcacttaatttgagcactc

SEQ ID NO: 2293508 - DNA, 25 bp, Homo sapien
cccaggaataggtgctaataaatcg

SEQ ID NO: 2293509 - DNA, 25 bp, Homo sapien
tcttcagcatctgcccaggaatagg

SEQ ID NO: 2293510 - DNA, 25 bp, Homo sapien
agggacggtgttcactctgctttga

SEQ ID NO: 2293511 - DNA, 25 bp, Homo sapien
taataaatcgaggtaatgagggacg

SEQ ID NO: 2293512 - DNA, 25 bp, Homo sapien
ttcttttcagaaagacttggcttcc

SEQ ID NO: 2293513 - DNA, 25 bp, Homo sapien
ctgaagagacatcccactttgatgg

SEQ ID NO: 2293514 - DNA, 25 bp, Homo sapien
ttggcttccttgtcctttctactgt

SEQ ID NO: 2293515 - DNA, 25 bp, Homo sapien
gaagagacatcccactttgatggat

SEQ ID NO: 2293516 - DNA, 25 bp, Homo sapien
tggaggacttgagatttgttgccca

SEQ ID NO: 2293517 - DNA, 25 bp, Homo sapien
atttgttgcccaggaagctattgtg

SEQ ID NO: 2293518 - DNA, 25 bp, Homo sapien
tttgttgcccaggaagctattgtgt

SEQ ID NO: 2293519 - DNA, 25 bp, Homo sapien
tgatggaggacttgagatttgttgc

SEQ ID NO: 2293520 - DNA, 25 bp, Homo sapien
cacaagatatgttctagagacgtcc

SEQ ID NO: 2293521 - DNA, 25 bp, Homo sapien
gagacgtccatgagtcctcttgctg

SEQ ID NO: 2293522 - DNA, 25 bp, Homo sapien
ctcttgctgtgtgggagcggcatcc

SEQ ID NO: 2293523 - DNA, 25 bp, Homo sapien
caatgaatgcaatagagagccagag

SEQ ID NO: 2293524 - DNA, 25 bp, Homo sapien
gctatactttcccagctaaaagtta

SEQ ID NO: 2293525 - DNA, 25 bp, Homo sapien
aacttaaaaatcaagatccatatat

SEQ ID NO: 2293526 - DNA, 25 bp, Homo sapien
agttactaatttacgaagttcagat

SEQ ID NO: 2293527 - DNA, 25 bp, Homo sapien
tttacgaagttcagatactgaaact

SEQ ID NO: 2293528 - DNA, 25 bp, Homo sapien
ctcattcaaagatcataggcagact

SEQ ID NO: 2293529 - DNA, 25 bp, Homo sapien
cttcttccccattgtattttagttg

SEQ ID NO: 2293530 - DNA, 25 bp, Homo sapien
taagctatcttacagtcattctgag

SEQ ID NO: 2293531 - DNA, 25 bp, Homo sapien
cttccttaaaaagctcattcaaaga

SEQ ID NO: 2293532 - DNA, 25 bp, Homo sapien
caacatagtagggtgctagcataga

SEQ ID NO: 2293533 - DNA, 25 bp, Homo sapien
tgctatagagcacgacacagatggc

SEQ ID NO: 2293534 - DNA, 25 bp, Homo sapien
tttgtcctataaagatgacccctcc

SEQ ID NO: 2293535 - DNA, 25 bp, Homo sapien
ttgtcaacagaaccctccaatcgag

SEQ ID NO: 2293536 - DNA, 25 bp, Homo sapien
ttatttatttttgcaactactgtaa

SEQ ID NO: 2293537 - DNA, 25 bp, Homo sapien
ggtctttcagctccttggttaggtg

SEQ ID NO: 2293538 - DNA, 25 bp, Homo sapien
ttgcaactactgtaaaaggggctga

SEQ ID NO: 2293539 - DNA, 25 bp, Homo sapien
cagctccttggttaggtgtattcct

SEQ ID NO: 2293540 - DNA, 25 bp, Homo sapien
tcatactgcatcctatcagaagcca

SEQ ID NO: 2293541 - DNA, 25 bp, Homo sapien
catagttaactggtagatccgaggg

SEQ ID NO: 2293542 - DNA, 25 bp, Homo sapien
gtttaattagattcagagccaccat

SEQ ID NO: 2293543 - DNA, 25 bp, Homo sapien
tcttaggtaatgacaagttgccact

SEQ ID NO: 2293544 - DNA, 25 bp, Homo sapien
gagttgacatatgcaagccttcttt

SEQ ID NO: 2293545 - DNA, 25 bp, Homo sapien
tacaggtatcgcctttaactgccat

SEQ ID NO: 2293546 - DNA, 25 bp, Homo sapien
cagagttgacatatgcaagccttct

SEQ ID NO: 2293547 - DNA, 25 bp, Homo sapien
ccagttttatacaggtatcgccttt

SEQ ID NO: 2293548 - DNA, 25 bp, Homo sapien
cggacaggtaggagtcccaaaccag

SEQ ID NO: 2293549 - DNA, 25 bp, Homo sapien
tggctttccttacctggaccaggcg

SEQ ID NO: 2293550 - DNA, 25 bp, Homo sapien
gcaatggctttccttacctggacca

SEQ ID NO: 2293551 - DNA, 25 bp, Homo sapien
accaggcggacaggtaggagtccca

SEQ ID NO: 2293552 - DNA, 25 bp, Homo sapien
acgccggagccgcaaaagcctcgac

SEQ ID NO: 2293553 - DNA, 25 bp, Homo sapien
tcgaccgctacgactcctctgtccg

SEQ ID NO: 2293554 - DNA, 25 bp, Homo sapien
ctctgtccgtctactgcgaagcggg

SEQ ID NO: 2293555 - DNA, 25 bp, Homo sapien
ggagccgcaaaagcctcgaccgcta

SEQ ID NO: 2293556 - DNA, 25 bp, Homo sapien
ccgtcaacgtcaggagacgctcaga

SEQ ID NO: 2293557 - DNA, 25 bp, Homo sapien
ctaggaaataaaccgtcaacgtcag

SEQ ID NO: 2293558 - DNA, 25 bp, Homo sapien
gcccagagcatatttcgcctccaga

SEQ ID NO: 2293559 - DNA, 25 bp, Homo sapien
ggtcctcgcccagagcatatttcgc

SEQ ID NO: 2293560 - DNA, 25 bp, Homo sapien
gaaaccctcacagaaagacccaaca

SEQ ID NO: 2293561 - DNA, 25 bp, Homo sapien
cgggtgtccgctgcatgaaccagtc

SEQ ID NO: 2293562 - DNA, 25 bp, Homo sapien
tgtttccttctcgaaaccctcacag

SEQ ID NO: 2293563 - DNA, 25 bp, Homo sapien
cgctgcatgaaccagtcgcatgcct

SEQ ID NO: 2293564 - DNA, 25 bp, Homo sapien
ctctctttaaattgcggaatgagcc

SEQ ID NO: 2293565 - DNA, 25 bp, Homo sapien
cccctgctggattaaaccgcagagg

SEQ ID NO: 2293566 - DNA, 25 bp, Homo sapien
taaattgcggaatgagccccatccc

SEQ ID NO: 2293567 - DNA, 25 bp, Homo sapien
tggattaaaccgcagaggcccaggc

SEQ ID NO: 2293568 - DNA, 25 bp, Homo sapien
caattacagagaactcagtcgggct

SEQ ID NO: 2293569 - DNA, 25 bp, Homo sapien
tttcctgtcggtgtaaggtgccggc

SEQ ID NO: 2293570 - DNA, 25 bp, Homo sapien
gggcctcagcgatcttcatgttaag

SEQ ID NO: 2293571 - DNA, 25 bp, Homo sapien
taaaattagtctgtgacctcgggaa

SEQ ID NO: 2293572 - DNA, 25 bp, Homo sapien
aggccagggctggaggatggcttga

SEQ ID NO: 2293573 - DNA, 25 bp, Homo sapien
ttgggaggccagggctggaggatgg

SEQ ID NO: 2293574 - DNA, 25 bp, Homo sapien
ggcaacatagtgagtgagaccttgt

SEQ ID NO: 2293575 - DNA, 25 bp, Homo sapien
gctcaggagtttgagaccagcctgg

SEQ ID NO: 2293576 - DNA, 25 bp, Homo sapien
aatctgaaagacacttgccgccagc

SEQ ID NO: 2293577 - DNA, 25 bp, Homo sapien
cgccagcatagcagtgaagccatga

SEQ ID NO: 2293578 - DNA, 25 bp, Homo sapien
ctactagttaatgagctaattcaca

SEQ ID NO: 2293579 - DNA, 25 bp, Homo sapien
gaaggaaccctggaatatacacttg

SEQ ID NO: 2293580 - DNA, 25 bp, Homo sapien
caaagcagtcctggtaagtgatcct

SEQ ID NO: 2293581 - DNA, 25 bp, Homo sapien
gcaaataccggtaagaatctgagcc

SEQ ID NO: 2293582 - DNA, 25 bp, Homo sapien
gagtgtcctcagttggtccagtcag

SEQ ID NO: 2293583 - DNA, 25 bp, Homo sapien
tggacactcagttggcccttgcaat

SEQ ID NO: 2293584 - DNA, 25 bp, Homo sapien
cttctccaggctttctggatccctt

SEQ ID NO: 2293585 - DNA, 25 bp, Homo sapien
tagattctcattgtgacctcacctg

SEQ ID NO: 2293586 - DNA, 25 bp, Homo sapien
cgtgcccggccgcaacttatatttt

SEQ ID NO: 2293587 - DNA, 25 bp, Homo sapien
tttgagcagcaagcacgaatctagc

SEQ ID NO: 2293588 - DNA, 25 bp, Homo sapien
tgaaccccgaagtacaatagtgtag

SEQ ID NO: 2293589 - DNA, 25 bp, Homo sapien
ccaaggtctgggtgctaaaaatgct

SEQ ID NO: 2293590 - DNA, 25 bp, Homo sapien
gaggaggctccaaacttaaaggcat

SEQ ID NO: 2293591 - DNA, 25 bp, Homo sapien
ggtgcttatccaaagggaggctgaa

SEQ ID NO: 2293592 - DNA, 25 bp, Homo sapien
tcctatcaggtggatgcaactgcaa

SEQ ID NO: 2293593 - DNA, 25 bp, Homo sapien
gggatatagttataaacacttccga

SEQ ID NO: 2293594 - DNA, 25 bp, Homo sapien
tttcgttccacgtactgggatatag

SEQ ID NO: 2293595 - DNA, 25 bp, Homo sapien
acctgctgtcataattgacgttttc

SEQ ID NO: 2293596 - DNA, 25 bp, Homo sapien
acacttccgataaaattacctgctg

SEQ ID NO: 2293597 - DNA, 25 bp, Homo sapien
catgtaaattatccacttttatgca

SEQ ID NO: 2293598 - DNA, 25 bp, Homo sapien
tagtacttctcctcttaaagaattg

SEQ ID NO: 2293599 - DNA, 25 bp, Homo sapien
cttctcctcttaaagaattggccat

SEQ ID NO: 2293600 - DNA, 25 bp, Homo sapien
gtacttctcctcttaaagaattggc

SEQ ID NO: 2293601 - DNA, 25 bp, Homo sapien
tacttctcctcttaaagaattggcc

SEQ ID NO: 2293602 - DNA, 25 bp, Homo sapien
acaatccatgtcatataataacatt

SEQ ID NO: 2293603 - DNA, 25 bp, Homo sapien
aaacaatccatgtcatataataaca

SEQ ID NO: 2293604 - DNA, 25 bp, Homo sapien
aacaatccatgtcatataataacat

SEQ ID NO: 2293605 - DNA, 25 bp, Homo sapien
taaacaatccatgtcatataataac

SEQ ID NO: 2293606 - DNA, 25 bp, Homo sapien
cttcaaaaagaaagattatatattt

SEQ ID NO: 2293607 - DNA, 25 bp, Homo sapien
ttttggatagtctcgtccaagatac

SEQ ID NO: 2293608 - DNA, 25 bp, Homo sapien
ccttttggatagtctcgtccaagat

SEQ ID NO: 2293609 - DNA, 25 bp, Homo sapien
tttggatagtctcgtccaagataca

SEQ ID NO: 2293610 - DNA, 25 bp, Homo sapien
ttggatagtctcgtccaagatacag

SEQ ID NO: 2293611 - DNA, 25 bp, Homo sapien
gctgttaatataccaaattgggtga

SEQ ID NO: 2293612 - DNA, 25 bp, Homo sapien
accagcaggctatttcaaggtcaga

SEQ ID NO: 2293613 - DNA, 25 bp, Homo sapien
gatactttctccgtatgaacagaag

SEQ ID NO: 2293614 - DNA, 25 bp, Homo sapien
aaatgttcggtaaatggcattctct

SEQ ID NO: 2293615 - DNA, 25 bp, Homo sapien
tagttacagtgactatgagtgtgta

SEQ ID NO: 2293616 - DNA, 25 bp, Homo sapien
gccatagacactatagtataccagt

SEQ ID NO: 2293617 - DNA, 25 bp, Homo sapien
tttgaactgtttgccccgaaatgga

SEQ ID NO: 2293618 - DNA, 25 bp, Homo sapien
gaactgtactactcctaattattgt

SEQ ID NO: 2293619 - DNA, 25 bp, Homo sapien
tctgcattgagaaactgaatagctg

SEQ ID NO: 2293620 - DNA, 25 bp, Homo sapien
taatactggatagcatgaattctgc

SEQ ID NO: 2293621 - DNA, 25 bp, Homo sapien
catcatttggttgcgctgacctagg

SEQ ID NO: 2293622 - DNA, 25 bp, Homo sapien
tgtgggacatatgcagtgtgatcca

SEQ ID NO: 2293623 - DNA, 25 bp, Homo sapien
taatcccggtccttaggtagtgcta

SEQ ID NO: 2293624 - DNA, 25 bp, Homo sapien
taaggcctttggtatacgacccaga

SEQ ID NO: 2293625 - DNA, 25 bp, Homo sapien
aatggccatacttcaggaactgcag

SEQ ID NO: 2293626 - DNA, 25 bp, Homo sapien
caaggcactgggtatatggtatccc

SEQ ID NO: 2293627 - DNA, 25 bp, Homo sapien
ccttggcctcataaacctgttttgc

SEQ ID NO: 2293628 - DNA, 25 bp, Homo sapien
tcataaacctgttttgcagaactca

SEQ ID NO: 2293629 - DNA, 25 bp, Homo sapien
ttggcctcataaacctgttttgcag

SEQ ID NO: 2293630 - DNA, 25 bp, Homo sapien
ggcctcataaacctgttttgcagaa

SEQ ID NO: 2293631 - DNA, 25 bp, Homo sapien
cacatgccccatgacttgatgcagt

SEQ ID NO: 2293632 - DNA, 25 bp, Homo sapien
gccagtcttgggcaaaattgtgcaa

SEQ ID NO: 2293633 - DNA, 25 bp, Homo sapien
gatacacttatttgtcaagctcagc

SEQ ID NO: 2293634 - DNA, 25 bp, Homo sapien
cagataccataaagggatttgacct

SEQ ID NO: 2293635 - DNA, 25 bp, Homo sapien
taagtgccagtattcccagagtttt

SEQ ID NO: 2293636 - DNA, 25 bp, Homo sapien
tgaactagcaatgcctgtgaaaaag

SEQ ID NO: 2293637 - DNA, 25 bp, Homo sapien
tgtaaagttacactgttcacaaagg

SEQ ID NO: 2293638 - DNA, 25 bp, Homo sapien
cattgagggaacacaaatttatggg

SEQ ID NO: 2293639 - DNA, 25 bp, Homo sapien
tgatgacttaggtttgccaatgtgg

SEQ ID NO: 2293640 - DNA, 25 bp, Homo sapien
gacaaaacacctatgcggatgacat

SEQ ID NO: 2293641 - DNA, 25 bp, Homo sapien
tcttaaggcatactagtacaagtgg

SEQ ID NO: 2293642 - DNA, 25 bp, Homo sapien
gatgccttctatacattagttcgag

SEQ ID NO: 2293643 - DNA, 25 bp, Homo sapien
aattgacttgtgtatggatcttgca

SEQ ID NO: 2293644 - DNA, 25 bp, Homo sapien
cagttttcattgttcctaaagtggc

SEQ ID NO: 2293645 - DNA, 25 bp, Homo sapien
aatctactaccagtttgagagtgcc

SEQ ID NO: 2293646 - DNA, 25 bp, Homo sapien
atgcacttcgcctctccgggttcag

SEQ ID NO: 2293647 - DNA, 25 bp, Homo sapien
ggtgtactaatctactaaactcaga

SEQ ID NO: 2293648 - DNA, 25 bp, Homo sapien
tacaagttggtgttctttattacat

SEQ ID NO: 2293649 - DNA, 25 bp, Homo sapien
catttgaatagtagactcaatccca

SEQ ID NO: 2293650 - DNA, 25 bp, Homo sapien
tcaatcccaaaagatactacgtggt

SEQ ID NO: 2293651 - DNA, 25 bp, Homo sapien
gacagcagtaatattgaatggccca

SEQ ID NO: 2293652 - DNA, 25 bp, Homo sapien
gccatcattcattgtgaaaccggag

SEQ ID NO: 2293653 - DNA, 25 bp, Homo sapien
tatgtcatcattagttcaggcccct

SEQ ID NO: 2293654 - DNA, 25 bp, Homo sapien
gaattttaggatgactcctaccgcc

SEQ ID NO: 2293655 - DNA, 25 bp, Homo sapien
gctgtgcaccatggtagtctcccaa

SEQ ID NO: 2293656 - DNA, 25 bp, Homo sapien
ccaaaaggctggtagtcttgcattt

SEQ ID NO: 2293657 - DNA, 25 bp, Homo sapien
aaaattgacggaacagttactgtgc

SEQ ID NO: 2293658 - DNA, 25 bp, Homo sapien
gcacagttgggttttagaatacatc

SEQ ID NO: 2293659 - DNA, 25 bp, Homo sapien
ccagttactggtgaaaatgtcaagt

SEQ ID NO: 2293660 - DNA, 25 bp, Homo sapien
actcatctgttattcagcttattta

SEQ ID NO: 2293661 - DNA, 25 bp, Homo sapien
tttgttactcatctgttattcagct

SEQ ID NO: 2293662 - DNA, 25 bp, Homo sapien
cagttactggtgaaaatgtcaagtc

SEQ ID NO: 2293663 - DNA, 25 bp, Homo sapien
tcttggtacttggaccatactttga

SEQ ID NO: 2293664 - DNA, 25 bp, Homo sapien
ttgagtagaaaagcagtagaggaca

SEQ ID NO: 2293665 - DNA, 25 bp, Homo sapien
ccagattctaattcagaaggtttag

SEQ ID NO: 2293666 - DNA, 25 bp, Homo sapien
ttttcttatgcatacaaatcagctg

SEQ ID NO: 2293667 - DNA, 25 bp, Homo sapien
cgtactacagtgttaggatggctat

SEQ ID NO: 2293668 - DNA, 25 bp, Homo sapien
cacgtgagcaatgtgtcgtactaca

SEQ ID NO: 2293669 - DNA, 25 bp, Homo sapien
catgactgtactaagaaattgatcc

SEQ ID NO: 2293670 - DNA, 25 bp, Homo sapien
ggttacatttacctgtgagcccaga

SEQ ID NO: 2293671 - DNA, 25 bp, Homo sapien
ttgaaacatcagcaaagacaagaca

SEQ ID NO: 2293672 - DNA, 25 bp, Homo sapien
tcttcaattctgagcacatgttaac

SEQ ID NO: 2293673 - DNA, 25 bp, Homo sapien
cagtgtccatggtactgcttttggc

SEQ ID NO: 2293674 - DNA, 25 bp, Homo sapien
tctctcaattatgctatactaggaa

SEQ ID NO: 2293675 - DNA, 25 bp, Homo sapien
gggaggtcacgttttggaagagcat

SEQ ID NO: 2293676 - DNA, 25 bp, Homo sapien
ataaacttctccctcgagcgcaggc

SEQ ID NO: 2293677 - DNA, 25 bp, Homo sapien
gatagtggtccttttccgtgtgtag

SEQ ID NO: 2293678 - DNA, 25 bp, Homo sapien
ctctaggacgaaggtataaacttct

SEQ ID NO: 2293679 - DNA, 25 bp, Homo sapien
ccagcactcggctgcctcggtccag

SEQ ID NO: 2293680 - DNA, 25 bp, Homo sapien
cagcactcggctgcctcggtccagc

SEQ ID NO: 2293681 - DNA, 25 bp, Homo sapien
gcactcggctgcctcggtccagcct

SEQ ID NO: 2293682 - DNA, 25 bp, Homo sapien
tccagcactcggctgcctcggtcca

SEQ ID NO: 2293683 - DNA, 25 bp, Homo sapien
ccgctccgggtcagaattggcggct

SEQ ID NO: 2293684 - DNA, 25 bp, Homo sapien
cggtcccgctccgggtcagaattgg

SEQ ID NO: 2293685 - DNA, 25 bp, Homo sapien
gctcgcggcgtctccctggtggcat

SEQ ID NO: 2293686 - DNA, 25 bp, Homo sapien
tggtggcatccgcacagcccgccgc

SEQ ID NO: 2293687 - DNA, 25 bp, Homo sapien
taagcgaagtccctgtttagagacc

SEQ ID NO: 2293688 - DNA, 25 bp, Homo sapien
gatcctatcaggtacaggcgctgct

SEQ ID NO: 2293689 - DNA, 25 bp, Homo sapien
tcctgacccgagaagattagcgttg

SEQ ID NO: 2293690 - DNA, 25 bp, Homo sapien
tagtttatcaacacagactccgggt

SEQ ID NO: 2293691 - DNA, 25 bp, Homo sapien
agagggtagaaacttcagttgtagc

SEQ ID NO: 2293692 - DNA, 25 bp, Homo sapien
ttcagttgtagctgagagcaggcct

SEQ ID NO: 2293693 - DNA, 25 bp, Homo sapien
gacagtctgacagtagagggtagaa

SEQ ID NO: 2293694 - DNA, 25 bp, Homo sapien
cagtctgacagtagagggtagaaac

SEQ ID NO: 2293695 - DNA, 25 bp, Homo sapien
gataaaaagggtatgtacgtgcaca

SEQ ID NO: 2293696 - DNA, 25 bp, Homo sapien
agcagataaaaagggtatgtacgtg

SEQ ID NO: 2293697 - DNA, 25 bp, Homo sapien
tatggtcttttatctgtacagcaga

SEQ ID NO: 2293698 - DNA, 25 bp, Homo sapien
gaaagggtcagtatggtcttttatc

SEQ ID NO: 2293699 - DNA, 25 bp, Homo sapien
taagggtactcctgttgttctggct

SEQ ID NO: 2293700 - DNA, 25 bp, Homo sapien
ccaggtaacataagggtactcctgt

SEQ ID NO: 2293701 - DNA, 25 bp, Homo sapien
taacataagggtactcctgttgttc

SEQ ID NO: 2293702 - DNA, 25 bp, Homo sapien
cataagggtactcctgttgttctgg

SEQ ID NO: 2293703 - DNA, 25 bp, Homo sapien
aaaggttgtgctgaagtagagtcca

SEQ ID NO: 2293704 - DNA, 25 bp, Homo sapien
tccatgaaagcatcgtagatggctc

SEQ ID NO: 2293705 - DNA, 25 bp, Homo sapien
ctgctctgcgtcctgctactctggc

SEQ ID NO: 2293706 - DNA, 25 bp, Homo sapien
gccagagtcaaaaggttgtgctgaa

SEQ ID NO: 2293707 - DNA, 25 bp, Homo sapien
tgctgcgagtgagcccctgcatctc

SEQ ID NO: 2293708 - DNA, 25 bp, Homo sapien
gatgggcgagtcattgaggaatgct

SEQ ID NO: 2293709 - DNA, 25 bp, Homo sapien
aggaatgctgctgcgagtgagcccc

SEQ ID NO: 2293710 - DNA, 25 bp, Homo sapien
cttgtgatgggcgagtcattgagga

SEQ ID NO: 2293711 - DNA, 25 bp, Homo sapien
tcatgaacatgactatactggcagt

SEQ ID NO: 2293712 - DNA, 25 bp, Homo sapien
tgagccatcaggcattcatgaacat

SEQ ID NO: 2293713 - DNA, 25 bp, Homo sapien
taccggtagttctgaaacaagccag

SEQ ID NO: 2293714 - DNA, 25 bp, Homo sapien
gatatttgtatcatctaccggtagt

SEQ ID NO: 2293715 - DNA, 25 bp, Homo sapien
tcgtacaaacagacatccgatttct

SEQ ID NO: 2293716 - DNA, 25 bp, Homo sapien
ttaatatcgtacaaacagacatccg

SEQ ID NO: 2293717 - DNA, 25 bp, Homo sapien
ctatgtgtgcttaatatcgtacaaa

SEQ ID NO: 2293718 - DNA, 25 bp, Homo sapien
cagacatccgatttctgtagacctt

SEQ ID NO: 2293719 - DNA, 25 bp, Homo sapien
ctgaatgctgtcctgttcatgaaga

SEQ ID NO: 2293720 - DNA, 25 bp, Homo sapien
catgaagactgattgccaacatcat

SEQ ID NO: 2293721 - DNA, 25 bp, Homo sapien
tgctgtcctgttcatgaagactgat

SEQ ID NO: 2293722 - DNA, 25 bp, Homo sapien
cctgttcatgaagactgattgccaa

SEQ ID NO: 2293723 - DNA, 25 bp, Homo sapien
acatgatggtttgtgcttgactcca

SEQ ID NO: 2293724 - DNA, 25 bp, Homo sapien
ctctgacatgatggtttgtgcttga

SEQ ID NO: 2293725 - DNA, 25 bp, Homo sapien
tgacatgatggtttgtgcttgactc

SEQ ID NO: 2293726 - DNA, 25 bp, Homo sapien
tctgacatgatggtttgtgcttgac

SEQ ID NO: 2293727 - DNA, 25 bp, Homo sapien
tgttatcccaaatctcccacaaggg

SEQ ID NO: 2293728 - DNA, 25 bp, Homo sapien
tttcaagccacccaatgagtcaggg

SEQ ID NO: 2293729 - DNA, 25 bp, Homo sapien
cccaagtgccaagtacagtgttata

SEQ ID NO: 2293730 - DNA, 25 bp, Homo sapien
gacccaaaacttctagcactctgag

SEQ ID NO: 2293731 - DNA, 25 bp, Homo sapien
gacaggatcaagaacacgtttagtg

SEQ ID NO: 2293732 - DNA, 25 bp, Homo sapien
catcagcaagatgcaggaagagtac

SEQ ID NO: 2293733 - DNA, 25 bp, Homo sapien
gatgcaggaagagtacccagacagg

SEQ ID NO: 2293734 - DNA, 25 bp, Homo sapien
acacgtttagtgtggtgccctcgcc

SEQ ID NO: 2293735 - DNA, 25 bp, Homo sapien
gtttctgcaagtgagaaccaaggac

SEQ ID NO: 2293736 - DNA, 25 bp, Homo sapien
aaccaaggaccgtctgcatccgagt

SEQ ID NO: 2293737 - DNA, 25 bp, Homo sapien
caagtgagaaccaaggaccgtctgc

SEQ ID NO: 2293738 - DNA, 25 bp, Homo sapien
aggaccgtctgcatccgagtcacct

SEQ ID NO: 2293739 - DNA, 25 bp, Homo sapien
gggacgagccatcccaaatctaacc

SEQ ID NO: 2293740 - DNA, 25 bp, Homo sapien
agggacgagccatcccaaatctaac

SEQ ID NO: 2293741 - DNA, 25 bp, Homo sapien
gtcacttggacagcactgcactgaa

SEQ ID NO: 2293742 - DNA, 25 bp, Homo sapien
catcaacatcagatgggatctgctg

SEQ ID NO: 2293743 - DNA, 25 bp, Homo sapien
tacaacgatacagttcgtaggccat

SEQ ID NO: 2293744 - DNA, 25 bp, Homo sapien
tctttgccctcatacaacgatacag

SEQ ID NO: 2293745 - DNA, 25 bp, Homo sapien
ttccaactattatcctccatcttca

SEQ ID NO: 2293746 - DNA, 25 bp, Homo sapien
tcttccttccaactattatcctcca

SEQ ID NO: 2293747 - DNA, 25 bp, Homo sapien
ccttccaactattatcctccatctt

SEQ ID NO: 2293748 - DNA, 25 bp, Homo sapien
ttccttccaactattatcctccatc

SEQ ID NO: 2293749 - DNA, 25 bp, Homo sapien
catgctgatgacagcaattgtatag

SEQ ID NO: 2293750 - DNA, 25 bp, Homo sapien
tcaaatgtgtacatgctgatgacag

SEQ ID NO: 2293751 - DNA, 25 bp, Homo sapien
tgtacatgctgatgacagcaattgt

SEQ ID NO: 2293752 - DNA, 25 bp, Homo sapien
tgtgtacatgctgatgacagcaatt

SEQ ID NO: 2293753 - DNA, 25 bp, Homo sapien
tgaacacacgctccaaagtgcactg

SEQ ID NO: 2293754 - DNA, 25 bp, Homo sapien
taaagatactttaccaaactagatg

SEQ ID NO: 2293755 - DNA, 25 bp, Homo sapien
tagatgggtcctgtaagtgaacaca

SEQ ID NO: 2293756 - DNA, 25 bp, Homo sapien
cagcattcttttccgtgaacacaga

SEQ ID NO: 2293757 - DNA, 25 bp, Homo sapien
aaataagtgatgagcaagtacccta

SEQ ID NO: 2293758 - DNA, 25 bp, Homo sapien
aggtaaacacaaatgctgaaataag

SEQ ID NO: 2293759 - DNA, 25 bp, Homo sapien
agtaccctaaagttaggaggcagag

SEQ ID NO: 2293760 - DNA, 25 bp, Homo sapien
gatgagcaagtaccctaaagttagg

SEQ ID NO: 2293761 - DNA, 25 bp, Homo sapien
catttttggacactccggagcagac

SEQ ID NO: 2293762 - DNA, 25 bp, Homo sapien
tatagctagtatttccaagatggaa

SEQ ID NO: 2293763 - DNA, 25 bp, Homo sapien
ggagcagacttgtacattttcagaa

SEQ ID NO: 2293764 - DNA, 25 bp, Homo sapien
caggtgttggccaaatcgtgtagac

SEQ ID NO: 2293765 - DNA, 25 bp, Homo sapien
tacagccacgtgaaccctaacttgt

SEQ ID NO: 2293766 - DNA, 25 bp, Homo sapien
ctaaatagctaatgacaaggtggtg

SEQ ID NO: 2293767 - DNA, 25 bp, Homo sapien
tgttgccctcgttcactactggtct

SEQ ID NO: 2293768 - DNA, 25 bp, Homo sapien
catacagcctactggctctccgggt

SEQ ID NO: 2293769 - DNA, 25 bp, Homo sapien
ttcttcctttcagttcttgctgacc

SEQ ID NO: 2293770 - DNA, 25 bp, Homo sapien
agttcttgctgaccctctccttcct

SEQ ID NO: 2293771 - DNA, 25 bp, Homo sapien
ctccttcctgagcagacacagccat

SEQ ID NO: 2293772 - DNA, 25 bp, Homo sapien
ctttcagttcttgctgaccctctcc

SEQ ID NO: 2293773 - DNA, 25 bp, Homo sapien
tacccaaatttacaaatctctccat

SEQ ID NO: 2293774 - DNA, 25 bp, Homo sapien
ttacccaaatttacaaatctctcca

SEQ ID NO: 2293775 - DNA, 25 bp, Homo sapien
aattctgccatcaagtccaacctgt

SEQ ID NO: 2293776 - DNA, 25 bp, Homo sapien
caacctgtgagtacaggcagcaaag

SEQ ID NO: 2293777 - DNA, 25 bp, Homo sapien
agtcagatccaaagctggctagacc

SEQ ID NO: 2293778 - DNA, 25 bp, Homo sapien
tggcagtcagatccaaagctggcta

SEQ ID NO: 2293779 - DNA, 25 bp, Homo sapien
aatgctgtccttctggcgtgatggg

SEQ ID NO: 2293780 - DNA, 25 bp, Homo sapien
cagcttgcagattctttcaagtccc

SEQ ID NO: 2293781 - DNA, 25 bp, Homo sapien
tttaatcttagcagcttgcagattc

SEQ ID NO: 2293782 - DNA, 25 bp, Homo sapien
gatgggattatccataaccgaggca

SEQ ID NO: 2293783 - DNA, 25 bp, Homo sapien
cttggtggtggaacaccttgtttca

SEQ ID NO: 2293784 - DNA, 25 bp, Homo sapien
ggtcccttccaattcacaggatatt

SEQ ID NO: 2293785 - DNA, 25 bp, Homo sapien
ccatcacattagcatgagcccttgg

SEQ ID NO: 2293786 - DNA, 25 bp, Homo sapien
ggatattggcaatgggtccaccatc

SEQ ID NO: 2293787 - DNA, 25 bp, Homo sapien
ttcttcatgaagttgcttttgctcc

SEQ ID NO: 2293788 - DNA, 25 bp, Homo sapien
tttcttcatgaagttgcttttgctc

SEQ ID NO: 2293789 - DNA, 25 bp, Homo sapien
ggtttcttcatgaagttgcttttgc

SEQ ID NO: 2293790 - DNA, 25 bp, Homo sapien
tggtttcttcatgaagttgcttttg

SEQ ID NO: 2293791 - DNA, 25 bp, Homo sapien
gctcctgggtaattggcctccccat

SEQ ID NO: 2293792 - DNA, 25 bp, Homo sapien
aaagagctgcagtaggatcccagga

SEQ ID NO: 2293793 - DNA, 25 bp, Homo sapien
gggagccaggctaaagatcagcctc

SEQ ID NO: 2293794 - DNA, 25 bp, Homo sapien
atggctcctgggtaattggcctccc

SEQ ID NO: 2293795 - DNA, 25 bp, Homo sapien
tgcaaataatcttccctttccttta

SEQ ID NO: 2293796 - DNA, 25 bp, Homo sapien
ttttcctcaatcactactgcctgaa

SEQ ID NO: 2293797 - DNA, 25 bp, Homo sapien
tctgccttgcatggggaaggtcatt

SEQ ID NO: 2293798 - DNA, 25 bp, Homo sapien
cttgcatggggaaggtcattatttt

SEQ ID NO: 2293799 - DNA, 25 bp, Homo sapien
ttcctcaatcactactgcctgaaga

SEQ ID NO: 2293800 - DNA, 25 bp, Homo sapien
aaagctatcagctaagttgtagcta

SEQ ID NO: 2293801 - DNA, 25 bp, Homo sapien
tgtagctaactagggccatgcacag

SEQ ID NO: 2293802 - DNA, 25 bp, Homo sapien
tccttctgctgtacccattttccaa

SEQ ID NO: 2293803 - DNA, 25 bp, Homo sapien
gacttcatcatgtataatagtcaca

SEQ ID NO: 2293804 - DNA, 25 bp, Homo sapien
gattcaaggttgtagctgcctccag

SEQ ID NO: 2293805 - DNA, 25 bp, Homo sapien
aattctacggctgataggatggatc

SEQ ID NO: 2293806 - DNA, 25 bp, Homo sapien
ataggatggatccaccagggaggca

SEQ ID NO: 2293807 - DNA, 25 bp, Homo sapien
ggcagccaccaaagtccatgatgca

SEQ ID NO: 2293808 - DNA, 25 bp, Homo sapien
ccgttgtatcactgatgcttgtgta

SEQ ID NO: 2293809 - DNA, 25 bp, Homo sapien
tctcctccgttgtatcactgatgct

SEQ ID NO: 2293810 - DNA, 25 bp, Homo sapien
tatcactgatgcttgtgtaaccact

SEQ ID NO: 2293811 - DNA, 25 bp, Homo sapien
tttttctcctccgttgtatcactga

SEQ ID NO: 2293812 - DNA, 25 bp, Homo sapien
tatccatgggacctattagaagcag

SEQ ID NO: 2293813 - DNA, 25 bp, Homo sapien
tcatatattagaggcctgccctggt

SEQ ID NO: 2293814 - DNA, 25 bp, Homo sapien
tgtgcatcttgattagaacgagtcc

SEQ ID NO: 2293815 - DNA, 25 bp, Homo sapien
cctttgaggccattgattcatctga

SEQ ID NO: 2293816 - DNA, 25 bp, Homo sapien
cagaaaggacagagcccaatctctt

SEQ ID NO: 2293817 - DNA, 25 bp, Homo sapien
cagagcccaatctcttgtttcaaga

SEQ ID NO: 2293818 - DNA, 25 bp, Homo sapien
aggacagagcccaatctcttgtttc

SEQ ID NO: 2293819 - DNA, 25 bp, Homo sapien
gcccaatctcttgtttcaagagtaa

SEQ ID NO: 2293820 - DNA, 25 bp, Homo sapien
tgagcggtgtatctgctgacagtgc

SEQ ID NO: 2293821 - DNA, 25 bp, Homo sapien
taagatttgtgatattgttggagat

SEQ ID NO: 2293822 - DNA, 25 bp, Homo sapien
ttggagatataagatggtgagtgat

SEQ ID NO: 2293823 - DNA, 25 bp, Homo sapien
ctgagcggtgtatctgctgacagtg

SEQ ID NO: 2293824 - DNA, 25 bp, Homo sapien
tcccaggttctgactttgggggcag

SEQ ID NO: 2293825 - DNA, 25 bp, Homo sapien
ttgggggcagaaaagattcccagat

SEQ ID NO: 2293826 - DNA, 25 bp, Homo sapien
ctatgcttatattgttctctttccc

SEQ ID NO: 2293827 - DNA, 25 bp, Homo sapien
ggcagaaaagattcccagattcttt

SEQ ID NO: 2293828 - DNA, 25 bp, Homo sapien
taaactgggctgagcaaagtaggct

SEQ ID NO: 2293829 - DNA, 25 bp, Homo sapien
cttgaacaactgagtcaatcccatt

SEQ ID NO: 2293830 - DNA, 25 bp, Homo sapien
tccaaataggatgaggagggaattt

SEQ ID NO: 2293831 - DNA, 25 bp, Homo sapien
cggtccaggcatggaattgtcatcc

SEQ ID NO: 2293832 - DNA, 25 bp, Homo sapien
tccacagtgactacaccaagtcttc

SEQ ID NO: 2293833 - DNA, 25 bp, Homo sapien
agagatatccaagggcagaggatct

SEQ ID NO: 2293834 - DNA, 25 bp, Homo sapien
cactgtgatactgaataggagtcat

SEQ ID NO: 2293835 - DNA, 25 bp, Homo sapien
aagactggggtgtgagagatatcca

SEQ ID NO: 2293836 - DNA, 25 bp, Homo sapien
gagaaggacttctgcctaaaagtac

SEQ ID NO: 2293837 - DNA, 25 bp, Homo sapien
ttaaagcagcggtagggaccagaga

SEQ ID NO: 2293838 - DNA, 25 bp, Homo sapien
tcacagggtgttaaagcagcggtag

SEQ ID NO: 2293839 - DNA, 25 bp, Homo sapien
cctaaaagtacatgcagacctgtcc

SEQ ID NO: 2293840 - DNA, 25 bp, Homo sapien
gacctcacctgttgactttttatcc

SEQ ID NO: 2293841 - DNA, 25 bp, Homo sapien
catgatgggtcaaaactgctcacca

SEQ ID NO: 2293842 - DNA, 25 bp, Homo sapien
actttttatcctacatgatgggtca

SEQ ID NO: 2293843 - DNA, 25 bp, Homo sapien
caaccccagagacctcacctgttga

SEQ ID NO: 2293844 - DNA, 25 bp, Homo sapien
gcttcagccatcagttgttgaaatg

SEQ ID NO: 2293845 - DNA, 25 bp, Homo sapien
tggaaacgtataaaaagcttgagct

SEQ ID NO: 2293846 - DNA, 25 bp, Homo sapien
catcagttgttgaaatggaaacgta

SEQ ID NO: 2293847 - DNA, 25 bp, Homo sapien
actgccatattaggagcttcagcca

SEQ ID NO: 2293848 - DNA, 25 bp, Homo sapien
ttttcttccttttggagcctcttgc

SEQ ID NO: 2293849 - DNA, 25 bp, Homo sapien
tttcttccttttggagcctcttgca

SEQ ID NO: 2293850 - DNA, 25 bp, Homo sapien
ttcttccttttggagcctcttgcac

SEQ ID NO: 2293851 - DNA, 25 bp, Homo sapien
tggttgttttggttctgttgttctg

SEQ ID NO: 2293852 - DNA, 25 bp, Homo sapien
ctagatttttttgactcaacaggtt

SEQ ID NO: 2293853 - DNA, 25 bp, Homo sapien
cttttcttttgattttgcagacttg

SEQ ID NO: 2293854 - DNA, 25 bp, Homo sapien
tgcttttcttttgattttgcagact

SEQ ID NO: 2293855 - DNA, 25 bp, Homo sapien
tcttgcttttcttttgattttgcag

SEQ ID NO: 2293856 - DNA, 25 bp, Homo sapien
ttgcttttcttttgattttgcagac

SEQ ID NO: 2293857 - DNA, 25 bp, Homo sapien
aaatatcggggagagtcttggtcag

SEQ ID NO: 2293858 - DNA, 25 bp, Homo sapien
agcttctgaaacaccattaaaacgg

SEQ ID NO: 2293859 - DNA, 25 bp, Homo sapien
ccagattgaaggtcaaaatatcggg

SEQ ID NO: 2293860 - DNA, 25 bp, Homo sapien
aatgtccagattgaaggtcaaaata

SEQ ID NO: 2293861 - DNA, 25 bp, Homo sapien
gtttccaggtccagggtaatgatgc

SEQ ID NO: 2293862 - DNA, 25 bp, Homo sapien
accatacttccctggtagagtgtga

SEQ ID NO: 2293863 - DNA, 25 bp, Homo sapien
gatgccctttgtaagcagccattag

SEQ ID NO: 2293864 - DNA, 25 bp, Homo sapien
ccctggtagagtgtgatcatccata

SEQ ID NO: 2293865 - DNA, 25 bp, Homo sapien
gatctttgctgccaggcgtggtcct

SEQ ID NO: 2293866 - DNA, 25 bp, Homo sapien
atctttgctgccaggcgtggtcctt

SEQ ID NO: 2293867 - DNA, 25 bp, Homo sapien
tggagagatctttgctgccaggcgt

SEQ ID NO: 2293868 - DNA, 25 bp, Homo sapien
agagatctttgctgccaggcgtggt

SEQ ID NO: 2293869 - DNA, 25 bp, Homo sapien
taatttctgtactagaatacgtcct

SEQ ID NO: 2293870 - DNA, 25 bp, Homo sapien
tttctgtactagaatacgtcctcct

SEQ ID NO: 2293871 - DNA, 25 bp, Homo sapien
tctgtactagaatacgtcctccttc

SEQ ID NO: 2293872 - DNA, 25 bp, Homo sapien
tactagaatacgtcctccttcacga

SEQ ID NO: 2293873 - DNA, 25 bp, Homo sapien
ttcataaatacattttccattaaac

SEQ ID NO: 2293874 - DNA, 25 bp, Homo sapien
aaatttcataaatacattttccatt

SEQ ID NO: 2293875 - DNA, 25 bp, Homo sapien
taaatacattttccattaaacactg

SEQ ID NO: 2293876 - DNA, 25 bp, Homo sapien
aaaatttcataaatacattttccat

SEQ ID NO: 2293877 - DNA, 25 bp, Homo sapien
tcttaactccaggctctcaattagc

SEQ ID NO: 2293878 - DNA, 25 bp, Homo sapien
cttaactccaggctctcaattagcc

SEQ ID NO: 2293879 - DNA, 25 bp, Homo sapien
ttaactccaggctctcaattagccc

SEQ ID NO: 2293880 - DNA, 25 bp, Homo sapien
tatatcaacatttactactcatctg

SEQ ID NO: 2293881 - DNA, 25 bp, Homo sapien
ctcaaacccatctctagtggatgtc

SEQ ID NO: 2293882 - DNA, 25 bp, Homo sapien
aggcacttcaaagcacccgcacaaa

SEQ ID NO: 2293883 - DNA, 25 bp, Homo sapien
tattacacgcttggaaaatcctcaa

SEQ ID NO: 2293884 - DNA, 25 bp, Homo sapien
tttggttgatatcttctcagtggac

SEQ ID NO: 2293885 - DNA, 25 bp, Homo sapien
aaggacaatctcactttcacatcca

SEQ ID NO: 2293886 - DNA, 25 bp, Homo sapien
cttctcagtggactcaaggacaatc

SEQ ID NO: 2293887 - DNA, 25 bp, Homo sapien
acatccatctctttgtgataaaatg

SEQ ID NO: 2293888 - DNA, 25 bp, Homo sapien
attcttcatgtgtagtctccactag

SEQ ID NO: 2293889 - DNA, 25 bp, Homo sapien
gtagtctccactagttcagaatcaa

SEQ ID NO: 2293890 - DNA, 25 bp, Homo sapien
ttcatgtgtagtctccactagttca

SEQ ID NO: 2293891 - DNA, 25 bp, Homo sapien
tacatattcttcatgtgtagtctcc

SEQ ID NO: 2293892 - DNA, 25 bp, Homo sapien
accaatgtgtgagagtgaagagcag

SEQ ID NO: 2293893 - DNA, 25 bp, Homo sapien
aagcaaccaatgtgtgagagtgaag

SEQ ID NO: 2293894 - DNA, 25 bp, Homo sapien
aatgtgtgagagtgaagagcagaca

SEQ ID NO: 2293895 - DNA, 25 bp, Homo sapien
caaccaatgtgtgagagtgaagagc

SEQ ID NO: 2293896 - DNA, 25 bp, Homo sapien
ggcattcttcgttcccaacttccag

SEQ ID NO: 2293897 - DNA, 25 bp, Homo sapien
aagggtggtctacccacgtcttatg

SEQ ID NO: 2293898 - DNA, 25 bp, Homo sapien
aacttccagtcttgatgcctagagc

SEQ ID NO: 2293899 - DNA, 25 bp, Homo sapien
gagtggagacctcattggcattctt

SEQ ID NO: 2293900 - DNA, 25 bp, Homo sapien
gaccattccaatggttcatctctct

SEQ ID NO: 2293901 - DNA, 25 bp, Homo sapien
acagcctttgattttggtagaagga

SEQ ID NO: 2293902 - DNA, 25 bp, Homo sapien
ttttggtagaaggaccattccaatg

SEQ ID NO: 2293903 - DNA, 25 bp, Homo sapien
gttcatctctctcagcaacaatcat

SEQ ID NO: 2293904 - DNA, 25 bp, Homo sapien
aggctggtttggactcgacgagtgt

SEQ ID NO: 2293905 - DNA, 25 bp, Homo sapien
cgacgagtgtttgtgagcagggtga

SEQ ID NO: 2293906 - DNA, 25 bp, Homo sapien
tggactcgacgagtgtttgtgagca

SEQ ID NO: 2293907 - DNA, 25 bp, Homo sapien
tggtttggactcgacgagtgtttgt

SEQ ID NO: 2293908 - DNA, 25 bp, Homo sapien
gaacgtggtgagcattactgtttgc

SEQ ID NO: 2293909 - DNA, 25 bp, Homo sapien
tgaacgtggtgagcattactgtttg

SEQ ID NO: 2293910 - DNA, 25 bp, Homo sapien
ctaatagcaagacatgtgcttgtga

SEQ ID NO: 2293911 - DNA, 25 bp, Homo sapien
taatagcaagacatgtgcttgtgac

SEQ ID NO: 2293912 - DNA, 25 bp, Homo sapien
ttaatttcacctccattagactgtg

SEQ ID NO: 2293913 - DNA, 25 bp, Homo sapien
ttgctgaagttaatttcacctccat

SEQ ID NO: 2293914 - DNA, 25 bp, Homo sapien
tcagattctctgcagaaagtttctg

SEQ ID NO: 2293915 - DNA, 25 bp, Homo sapien
cctcttcaatatgaatcttaagttt

SEQ ID NO: 2293916 - DNA, 25 bp, Homo sapien
tgctgaaccttcctggtacctgagt

SEQ ID NO: 2293917 - DNA, 25 bp, Homo sapien
tacctgagtggttaaaatctgagaa

SEQ ID NO: 2293918 - DNA, 25 bp, Homo sapien
tgtctcagggatccaagactgaatg

SEQ ID NO: 2293919 - DNA, 25 bp, Homo sapien
tcagcacagtggaaacttggcatgt

SEQ ID NO: 2293920 - DNA, 25 bp, Homo sapien
ctgccttgcctacttaaccactggg

SEQ ID NO: 2293921 - DNA, 25 bp, Homo sapien
tgcctacttaaccactgggatgaga

SEQ ID NO: 2293922 - DNA, 25 bp, Homo sapien
tacttaaccactgggatgagagctc

SEQ ID NO: 2293923 - DNA, 25 bp, Homo sapien
taaccactgggatgagagctcagca

SEQ ID NO: 2293924 - DNA, 25 bp, Homo sapien
cttgaggaaagagtctgagtgcttt

SEQ ID NO: 2293925 - DNA, 25 bp, Homo sapien
tcttgaggaaagagtctgagtgctt

SEQ ID NO: 2293926 - DNA, 25 bp, Homo sapien
gggcctctcctgagaacctcaggag

SEQ ID NO: 2293927 - DNA, 25 bp, Homo sapien
gagtcattggatccctgtgcaggtg

SEQ ID NO: 2293928 - DNA, 25 bp, Homo sapien
tggacagtagaacccgtgggcctct

SEQ ID NO: 2293929 - DNA, 25 bp, Homo sapien
ggcaggtaaaccttgcgagcaggac

SEQ ID NO: 2293930 - DNA, 25 bp, Homo sapien
ttttgttccccagatctacctctaa

SEQ ID NO: 2293931 - DNA, 25 bp, Homo sapien
tacctctaacacaaagctgataagc

SEQ ID NO: 2293932 - DNA, 25 bp, Homo sapien
ttttgcttgtgataaaccttgaagg

SEQ ID NO: 2293933 - DNA, 25 bp, Homo sapien
catagagacttgtacttggaagcct

SEQ ID NO: 2293934 - DNA, 25 bp, Homo sapien
tgactgggtcagatagaaaccgcca

SEQ ID NO: 2293935 - DNA, 25 bp, Homo sapien
aaatggaatccttgggctaggcgtg

SEQ ID NO: 2293936 - DNA, 25 bp, Homo sapien
tcgatagacattggactgggtccag

SEQ ID NO: 2293937 - DNA, 25 bp, Homo sapien
gcttggatccagttagatgcctcgg

SEQ ID NO: 2293938 - DNA, 25 bp, Homo sapien
tccctttttaatgtccagtggagtc

SEQ ID NO: 2293939 - DNA, 25 bp, Homo sapien
atccctttttaatgtccagtggagt

SEQ ID NO: 2293940 - DNA, 25 bp, Homo sapien
ccctttttaatgtccagtggagtca

SEQ ID NO: 2293941 - DNA, 25 bp, Homo sapien
ctccagtcttactgatggctgccaa

SEQ ID NO: 2293942 - DNA, 25 bp, Homo sapien
tgccaaagtcagtgaatttgcctcc

SEQ ID NO: 2293943 - DNA, 25 bp, Homo sapien
ccaaagtcagtgaatttgcctccat

SEQ ID NO: 2293944 - DNA, 25 bp, Homo sapien
tccagtcttactgatggctgccaaa

SEQ ID NO: 2293945 - DNA, 25 bp, Homo sapien
ctttagttactccacacctcattag

SEQ ID NO: 2293946 - DNA, 25 bp, Homo sapien
tactccacacctcattagttccttg

SEQ ID NO: 2293947 - DNA, 25 bp, Homo sapien
tagttactccacacctcattagttc

SEQ ID NO: 2293948 - DNA, 25 bp, Homo sapien
gttactccacacctcattagttcct

SEQ ID NO: 2293949 - DNA, 25 bp, Homo sapien
ctgaggacccgaaagccgggcgcgg

SEQ ID NO: 2293950 - DNA, 25 bp, Homo sapien
cgggcaaaatcttccatcgcccggg

SEQ ID NO: 2293951 - DNA, 25 bp, Homo sapien
tgaccggtggctcgtgacggtccca

SEQ ID NO: 2293952 - DNA, 25 bp, Homo sapien
gacttgtcaaactgccctctacggt

SEQ ID NO: 2293953 - DNA, 25 bp, Homo sapien
tcagtttcgcaactgcgccgccccc

SEQ ID NO: 2293954 - DNA, 25 bp, Homo sapien
caggccgcccagaggggccggccgg

SEQ ID NO: 2293955 - DNA, 25 bp, Homo sapien
tggggacgcggcggcacccggagct

SEQ ID NO: 2293956 - DNA, 25 bp, Homo sapien
agtttcgcaactgcgccgcccccgc

SEQ ID NO: 2293957 - DNA, 25 bp, Homo sapien
ctggctggcattcactaccgcctca

SEQ ID NO: 2293958 - DNA, 25 bp, Homo sapien
aagctggctggcattcactaccgcc

SEQ ID NO: 2293959 - DNA, 25 bp, Homo sapien
agctggctggcattcactaccgcct

SEQ ID NO: 2293960 - DNA, 25 bp, Homo sapien
ggctggcattcactaccgcctcact

SEQ ID NO: 2293961 - DNA, 25 bp, Homo sapien
gcgtcctgatttttgcgtccaccct

SEQ ID NO: 2293962 - DNA, 25 bp, Homo sapien
gtcctgatttttgcgtccaccctgc

SEQ ID NO: 2293963 - DNA, 25 bp, Homo sapien
aaaccacttccccaaatgatagtgc

SEQ ID NO: 2293964 - DNA, 25 bp, Homo sapien
caaatgatagtgctgtctcctgcgt

SEQ ID NO: 2293965 - DNA, 25 bp, Homo sapien
tgcaacccaagtctggctggcagtg

SEQ ID NO: 2293966 - DNA, 25 bp, Homo sapien
gtacagtggcttgcattaggatggc

SEQ ID NO: 2293967 - DNA, 25 bp, Homo sapien
tgaaagtttgagtgaccaagagctc

SEQ ID NO: 2293968 - DNA, 25 bp, Homo sapien
tgagctactccttggatggatgaga

SEQ ID NO: 2293969 - DNA, 25 bp, Homo sapien
ccgacagcagctgactaacgtgtta

SEQ ID NO: 2293970 - DNA, 25 bp, Homo sapien
tccagacttctaggtggctcccact

SEQ ID NO: 2293971 - DNA, 25 bp, Homo sapien
tggacagcactgagcatccttagaa

SEQ ID NO: 2293972 - DNA, 25 bp, Homo sapien
caacagaaagtcacaagggtaacac

SEQ ID NO: 2293973 - DNA, 25 bp, Homo sapien
caggctacggaaacctcagggtcca

SEQ ID NO: 2293974 - DNA, 25 bp, Homo sapien
aacccaagagcacccaggctacgga

SEQ ID NO: 2293975 - DNA, 25 bp, Homo sapien
ctcctcttcgagagcacccaacagg

SEQ ID NO: 2293976 - DNA, 25 bp, Homo sapien
ccaacaggggctcaaaaatgctgct

SEQ ID NO: 2293977 - DNA, 25 bp, Homo sapien
cacgaggcaaatcacctggtgtgcc

SEQ ID NO: 2293978 - DNA, 25 bp, Homo sapien
atcaggtctaaataagcaccagggt

SEQ ID NO: 2293979 - DNA, 25 bp, Homo sapien
ctacacgaggcaaatcacctggtgt

SEQ ID NO: 2293980 - DNA, 25 bp, Homo sapien
taagcaccagggtaagggtctggct

SEQ ID NO: 2293981 - DNA, 25 bp, Homo sapien
gaacccctgttcaagagggagcaga

SEQ ID NO: 2293982 - DNA, 25 bp, Homo sapien
catgcacccacatattccggaatgg

SEQ ID NO: 2293983 - DNA, 25 bp, Homo sapien
cagataggatgctgagtacccctgg

SEQ ID NO: 2293984 - DNA, 25 bp, Homo sapien
caaaatatacccaggatgtgaccct

SEQ ID NO: 2293985 - DNA, 25 bp, Homo sapien
cagctattcgcttaggctttctgag

SEQ ID NO: 2293986 - DNA, 25 bp, Homo sapien
tattcgcttaggctttctgagctta

SEQ ID NO: 2293987 - DNA, 25 bp, Homo sapien
aacagggtcataatgacaatgttgc

SEQ ID NO: 2293988 - DNA, 25 bp, Homo sapien
ctcatctgcagctattcgcttaggc

SEQ ID NO: 2293989 - DNA, 25 bp, Homo sapien
tgaatccatgcaaacttctcagtga

SEQ ID NO: 2293990 - DNA, 25 bp, Homo sapien
agcccaacaaggatgaatccatgca

SEQ ID NO: 2293991 - DNA, 25 bp, Homo sapien
ggtaataagtcagaatcagtcaggt

SEQ ID NO: 2293992 - DNA, 25 bp, Homo sapien
ccataacgacgtggctggcgtgcat

SEQ ID NO: 2293993 - DNA, 25 bp, Homo sapien
caacctctgaggtctggtggaatgc

SEQ ID NO: 2293994 - DNA, 25 bp, Homo sapien
gataatatgctaataatgcccctca

SEQ ID NO: 2293995 - DNA, 25 bp, Homo sapien
aatcatccagaatgaaaggtcctgt

SEQ ID NO: 2293996 - DNA, 25 bp, Homo sapien
ccagacagaggatcatggcccttag

SEQ ID NO: 2293997 - DNA, 25 bp, Homo sapien
taggcccaccaggacagataatcaa

SEQ ID NO: 2293998 - DNA, 25 bp, Homo sapien
ctgattaattgttgggtgtgctccc

SEQ ID NO: 2293999 - DNA, 25 bp, Homo sapien
taaaagagtgggaacattcaaggtg

SEQ ID NO: 2294000 - DNA, 25 bp, Homo sapien
ttttggaggaaaccagctactctct

SEQ ID NO: 2294001 - DNA, 25 bp, Homo sapien
tgccaagcttgacaaaagtcagggc

SEQ ID NO: 2294002 - DNA, 25 bp, Homo sapien
ggcttaagtgaaaacggtctcagga

SEQ ID NO: 2294003 - DNA, 25 bp, Homo sapien
tgtgcgagtacctaggaaggcaatg

SEQ ID NO: 2294004 - DNA, 25 bp, Homo sapien
aagtcagggcttgggctcttgtgaa

SEQ ID NO: 2294005 - DNA, 25 bp, Homo sapien
gggtcaaccctgctgcgaaagacga

SEQ ID NO: 2294006 - DNA, 25 bp, Homo sapien
taccagatgttgagttagagtcttc

SEQ ID NO: 2294007 - DNA, 25 bp, Homo sapien
gctagctggatacacagaatttcta

SEQ ID NO: 2294008 - DNA, 25 bp, Homo sapien
ggacggtgccatccaaaaagcaatg

SEQ ID NO: 2294009 - DNA, 25 bp, Homo sapien
tattctaggatgatctacacaggca

SEQ ID NO: 2294010 - DNA, 25 bp, Homo sapien
caggagtctccgagccagtgagaat

SEQ ID NO: 2294011 - DNA, 25 bp, Homo sapien
ccacacaggtattctaggatgatct

SEQ ID NO: 2294012 - DNA, 25 bp, Homo sapien
tcttgaggaaggacagcaccacaca

SEQ ID NO: 2294013 - DNA, 25 bp, Homo sapien
ctttctacaggccaattgcatttct

SEQ ID NO: 2294014 - DNA, 25 bp, Homo sapien
ttcttaccgagtttaatccctggca

SEQ ID NO: 2294015 - DNA, 25 bp, Homo sapien
tcctatccagaaacataagtctcct

SEQ ID NO: 2294016 - DNA, 25 bp, Homo sapien
tgatttacagtggaaccctactaaa

SEQ ID NO: 2294017 - DNA, 25 bp, Homo sapien
actgccagaattgggaattacagag

SEQ ID NO: 2294018 - DNA, 25 bp, Homo sapien
caacaaaacacgagcccactgaact

SEQ ID NO: 2294019 - DNA, 25 bp, Homo sapien
aacaaaacacgagcccactgaactc

SEQ ID NO: 2294020 - DNA, 25 bp, Homo sapien
tcagactcagcgtcgggtgagagcc

SEQ ID NO: 2294021 - DNA, 25 bp, Homo sapien
cagcgtcgggtgagagcctgctttc

SEQ ID NO: 2294022 - DNA, 25 bp, Homo sapien
gtccaaggtcaagtcaccgtcagac

SEQ ID NO: 2294023 - DNA, 25 bp, Homo sapien
aagtcaccgtcagactcagcgtcgg

SEQ ID NO: 2294024 - DNA, 25 bp, Homo sapien
tgagtgtctgactgtacatgccaag

SEQ ID NO: 2294025 - DNA, 25 bp, Homo sapien
ttagagccaaggatagcacatacgt

SEQ ID NO: 2294026 - DNA, 25 bp, Homo sapien
tatcttgcctactaagcttgagtgt

SEQ ID NO: 2294027 - DNA, 25 bp, Homo sapien
ccactgaagtatagtaaggtctcaa

SEQ ID NO: 2294028 - DNA, 25 bp, Homo sapien
tgaccacgtcactctaatctatgcc

SEQ ID NO: 2294029 - DNA, 25 bp, Homo sapien
tcaagctgttggtggcttcaggtgt

SEQ ID NO: 2294030 - DNA, 25 bp, Homo sapien
cagggtccctccaatggttgcagga

SEQ ID NO: 2294031 - DNA, 25 bp, Homo sapien
tacaaagtgcagtagtttcctggag

SEQ ID NO: 2294032 - DNA, 25 bp, Homo sapien
tacaaagtgctagacattgccctga

SEQ ID NO: 2294033 - DNA, 25 bp, Homo sapien
tagtccttcgtaagatacacatgtt

SEQ ID NO: 2294034 - DNA, 25 bp, Homo sapien
ttccaacggctgcataattttgttc

SEQ ID NO: 2294035 - DNA, 25 bp, Homo sapien
gatgagaacataggccccaaaagct

SEQ ID NO: 2294036 - DNA, 25 bp, Homo sapien
gccaggagtataactcggacgtcat

SEQ ID NO: 2294037 - DNA, 25 bp, Homo sapien
ttactggcagactaaacaagttaag

SEQ ID NO: 2294038 - DNA, 25 bp, Homo sapien
tatctctgaggaagcaagccaatta

SEQ ID NO: 2294039 - DNA, 25 bp, Homo sapien
acgatttggtggtcatttactggca

SEQ ID NO: 2294040 - DNA, 25 bp, Homo sapien
tagtaactctactgggcctgtggca

SEQ ID NO: 2294041 - DNA, 25 bp, Homo sapien
aagggctgctgattgagttcaagaa

SEQ ID NO: 2294042 - DNA, 25 bp, Homo sapien
cctaacaagtgcctttagaagcagg

SEQ ID NO: 2294043 - DNA, 25 bp, Homo sapien
ggcagaagcttaacaaagggctgct

SEQ ID NO: 2294044 - DNA, 25 bp, Homo sapien
tactattcatcttatgcctctatca

SEQ ID NO: 2294045 - DNA, 25 bp, Homo sapien
catttttctagcaaaaccacttaca

SEQ ID NO: 2294046 - DNA, 25 bp, Homo sapien
aatgctaatgtgcttttagcatgaa

SEQ ID NO: 2294047 - DNA, 25 bp, Homo sapien
aacccaacagtgtttgcagaactta

SEQ ID NO: 2294048 - DNA, 25 bp, Homo sapien
cctgtggacttagggacattgacac

SEQ ID NO: 2294049 - DNA, 25 bp, Homo sapien
tctgtcctagacagaccatagggct

SEQ ID NO: 2294050 - DNA, 25 bp, Homo sapien
gaacagtgtgccacgtgcttaccat

SEQ ID NO: 2294051 - DNA, 25 bp, Homo sapien
ggctattttgtcctgcccctgtgga

SEQ ID NO: 2294052 - DNA, 25 bp, Homo sapien
taatccacatacctagagcagcagc

SEQ ID NO: 2294053 - DNA, 25 bp, Homo sapien
tagtggaaacaagatgcaccaaggt

SEQ ID NO: 2294054 - DNA, 25 bp, Homo sapien
gagtcaagacgcatatttttccaag

SEQ ID NO: 2294055 - DNA, 25 bp, Homo sapien
cttatctagtacagggctcggcaca

SEQ ID NO: 2294056 - DNA, 25 bp, Homo sapien
tcagcccaaaatactccactctagg

SEQ ID NO: 2294057 - DNA, 25 bp, Homo sapien
tgatgttaggtatctcacagacgtt

SEQ ID NO: 2294058 - DNA, 25 bp, Homo sapien
tttttagactttagcatactgccac

SEQ ID NO: 2294059 - DNA, 25 bp, Homo sapien
tctaggagctgtaaccctgatcttt

SEQ ID NO: 2294060 - DNA, 25 bp, Homo sapien
taagatctatccatttaacacattt

SEQ ID NO: 2294061 - DNA, 25 bp, Homo sapien
ttataccccttctacaagcaactgc

SEQ ID NO: 2294062 - DNA, 25 bp, Homo sapien
gaaaacataagatctatccatttaa

SEQ ID NO: 2294063 - DNA, 25 bp, Homo sapien
aagcaactgcccatttcgccctgtc

SEQ ID NO: 2294064 - DNA, 25 bp, Homo sapien
tggagaagactaagtctgtgtagtc

SEQ ID NO: 2294065 - DNA, 25 bp, Homo sapien
gtggagaagactaagtctgtgtagt

SEQ ID NO: 2294066 - DNA, 25 bp, Homo sapien
ggagaagactaagtctgtgtagtca

SEQ ID NO: 2294067 - DNA, 25 bp, Homo sapien
gagaagactaagtctgtgtagtcag

SEQ ID NO: 2294068 - DNA, 25 bp, Homo sapien
tcatcagggtgttaggtcatgtctc

SEQ ID NO: 2294069 - DNA, 25 bp, Homo sapien
ggtcatcagggtgttaggtcatgtc

SEQ ID NO: 2294070 - DNA, 25 bp, Homo sapien
ggtgcaccggccagtcactcaaggt

SEQ ID NO: 2294071 - DNA, 25 bp, Homo sapien
gtgcaccggccagtcactcaaggtc

SEQ ID NO: 2294072 - DNA, 25 bp, Homo sapien
agtgactccacaaacaatcctctga

SEQ ID NO: 2294073 - DNA, 25 bp, Homo sapien
taaggctatgacaacctcctggcaa

SEQ ID NO: 2294074 - DNA, 25 bp, Homo sapien
cctggcaagttgtgacttcagtgac

SEQ ID NO: 2294075 - DNA, 25 bp, Homo sapien
tgcttgagctaaggctatgacaacc

SEQ ID NO: 2294076 - DNA, 25 bp, Homo sapien
ccattataacttgagatagatgatc

SEQ ID NO: 2294077 - DNA, 25 bp, Homo sapien
gtttcacttagatttgagaagcagt

SEQ ID NO: 2294078 - DNA, 25 bp, Homo sapien
gagaagcagtttagactctgaaaaa

SEQ ID NO: 2294079 - DNA, 25 bp, Homo sapien
ggtgtacagtgacaaactccgagtg

SEQ ID NO: 2294080 - DNA, 25 bp, Homo sapien
tctcatcttttgttagctggacttt

SEQ ID NO: 2294081 - DNA, 25 bp, Homo sapien
cctctctcatcttttgttagctgga

SEQ ID NO: 2294082 - DNA, 25 bp, Homo sapien
catcttttgttagctggacttttat

SEQ ID NO: 2294083 - DNA, 25 bp, Homo sapien
tctctcatcttttgttagctggact

SEQ ID NO: 2294084 - DNA, 25 bp, Homo sapien
aatgacaccaagtatcaaagtaccg

SEQ ID NO: 2294085 - DNA, 25 bp, Homo sapien
acaccaagtatcaaagtaccgtgga

SEQ ID NO: 2294086 - DNA, 25 bp, Homo sapien
tataaatgtagaaaagtaatcaatt

SEQ ID NO: 2294087 - DNA, 25 bp, Homo sapien
tgtgaagctaagagttaaatatgac

SEQ ID NO: 2294088 - DNA, 25 bp, Homo sapien
tttgcaattactgcatcaataaatg

SEQ ID NO: 2294089 - DNA, 25 bp, Homo sapien
ttcatgagcttctgagccaatagta

SEQ ID NO: 2294090 - DNA, 25 bp, Homo sapien
tgcaattactgcatcaataaatgga

SEQ ID NO: 2294091 - DNA, 25 bp, Homo sapien
gagcttctgagccaatagtagtatt

SEQ ID NO: 2294092 - DNA, 25 bp, Homo sapien
ccaacccatcgctcacacagctgac

SEQ ID NO: 2294093 - DNA, 25 bp, Homo sapien
tgagtgctccaccaacccatcgctc

SEQ ID NO: 2294094 - DNA, 25 bp, Homo sapien
accaacccatcgctcacacagctga

SEQ ID NO: 2294095 - DNA, 25 bp, Homo sapien
gtgctccaccaacccatcgctcaca

SEQ ID NO: 2294096 - DNA, 25 bp, Homo sapien
gtggagaactgtgactcagccacag

SEQ ID NO: 2294097 - DNA, 25 bp, Homo sapien
agtggagaactgtgactcagccaca

SEQ ID NO: 2294098 - DNA, 25 bp, Homo sapien
cagtggagaactgtgactcagccac

SEQ ID NO: 2294099 - DNA, 25 bp, Homo sapien
ggaattcgagccacactgtctgaag

SEQ ID NO: 2294100 - DNA, 25 bp, Homo sapien
gagacggcccagttcgtcgtagaat

SEQ ID NO: 2294101 - DNA, 25 bp, Homo sapien
tgaagtgggtcgctcactgagagac

SEQ ID NO: 2294102 - DNA, 25 bp, Homo sapien
tataagggtgtaccttccagttcga

SEQ ID NO: 2294103 - DNA, 25 bp, Homo sapien
ttcaagaccactttccatagtccgg

SEQ ID NO: 2294104 - DNA, 25 bp, Homo sapien
cctcagactctgctggccttgaatg

SEQ ID NO: 2294105 - DNA, 25 bp, Homo sapien
catagtccggatctgtgccaaatag

SEQ ID NO: 2294106 - DNA, 25 bp, Homo sapien
ggtggcttgtccaagagatctttcc

SEQ ID NO: 2294107 - DNA, 25 bp, Homo sapien
atttcaatgggctccgctggcaaaa

SEQ ID NO: 2294108 - DNA, 25 bp, Homo sapien
gcaactccttagtcaactgctccag

SEQ ID NO: 2294109 - DNA, 25 bp, Homo sapien
aatgggctccgctggcaaaacggta

SEQ ID NO: 2294110 - DNA, 25 bp, Homo sapien
tgaactgctggagattgacttgccg

SEQ ID NO: 2294111 - DNA, 25 bp, Homo sapien
ggtcgcttcagggacccagactgga

SEQ ID NO: 2294112 - DNA, 25 bp, Homo sapien
aaaccagatgagataggattctgca

SEQ ID NO: 2294113 - DNA, 25 bp, Homo sapien
ccagatgagataggattctgcagaa

SEQ ID NO: 2294114 - DNA, 25 bp, Homo sapien
gagctgccgagatgaaccaggtcgc

SEQ ID NO: 2294115 - DNA, 25 bp, Homo sapien
taagcaatggctaggacagtttcac

SEQ ID NO: 2294116 - DNA, 25 bp, Homo sapien
ggtggagcaccctaggacacttgtg

SEQ ID NO: 2294117 - DNA, 25 bp, Homo sapien
tgtgatactctgctgggaacccaag

SEQ ID NO: 2294118 - DNA, 25 bp, Homo sapien
catttagggctatcaccatgtctgg

SEQ ID NO: 2294119 - DNA, 25 bp, Homo sapien
tttcattctggaccatgtcagaccc

SEQ ID NO: 2294120 - DNA, 25 bp, Homo sapien
gcaggagacttgtaaatattgactt

SEQ ID NO: 2294121 - DNA, 25 bp, Homo sapien
gaatttgtactgtccaccttcttca

SEQ ID NO: 2294122 - DNA, 25 bp, Homo sapien
taaatattgactttgtgtacacgga

SEQ ID NO: 2294123 - DNA, 25 bp, Homo sapien
taatctttacactcctgcttatcag

SEQ ID NO: 2294124 - DNA, 25 bp, Homo sapien
cactcctgcttatcagaaagaatga

SEQ ID NO: 2294125 - DNA, 25 bp, Homo sapien
tacactcctgcttatcagaaagaat

SEQ ID NO: 2294126 - DNA, 25 bp, Homo sapien
tgcttatcagaaagaatgatgatcc

SEQ ID NO: 2294127 - DNA, 25 bp, Homo sapien
ggactgctgggttgtatgatagttt

SEQ ID NO: 2294128 - DNA, 25 bp, Homo sapien
gggtgttagcccatcatggtgttag

SEQ ID NO: 2294129 - DNA, 25 bp, Homo sapien
atagcagatgtaacctaacaggtgt

SEQ ID NO: 2294130 - DNA, 25 bp, Homo sapien
caatctacagtccaccttttcattt

SEQ ID NO: 2294131 - DNA, 25 bp, Homo sapien
cagtttttttggcatcttgccacct

SEQ ID NO: 2294132 - DNA, 25 bp, Homo sapien
tttttttggcatcttgccacctcat

SEQ ID NO: 2294133 - DNA, 25 bp, Homo sapien
aaccagtttttttggcatcttgcca

SEQ ID NO: 2294134 - DNA, 25 bp, Homo sapien
accagtttttttggcatcttgccac

SEQ ID NO: 2294135 - DNA, 25 bp, Homo sapien
gttggttacaagagccccgatgtgc

SEQ ID NO: 2294136 - DNA, 25 bp, Homo sapien
cctctcggagattaggattcctttc

SEQ ID NO: 2294137 - DNA, 25 bp, Homo sapien
ctgcctctcggagattaggattcct

SEQ ID NO: 2294138 - DNA, 25 bp, Homo sapien
ttcctgaaagttggttacaagagcc

SEQ ID NO: 2294139 - DNA, 25 bp, Homo sapien
cagcatggccatactcctttataaa

SEQ ID NO: 2294140 - DNA, 25 bp, Homo sapien
ctttataaacagtaatctttcttat

SEQ ID NO: 2294141 - DNA, 25 bp, Homo sapien
gcatggccatactcctttataaaca

SEQ ID NO: 2294142 - DNA, 25 bp, Homo sapien
tcagcatggccatactcctttataa

SEQ ID NO: 2294143 - DNA, 25 bp, Homo sapien
actcgggactcctcaaaccattctg

SEQ ID NO: 2294144 - DNA, 25 bp, Homo sapien
cctcccgaattaaagctggctctga

SEQ ID NO: 2294145 - DNA, 25 bp, Homo sapien
gacacagcagtttccgagcggccct

SEQ ID NO: 2294146 - DNA, 25 bp, Homo sapien
gacacccgcctcagaagggccttgg

SEQ ID NO: 2294147 - DNA, 25 bp, Homo sapien
tggagacatccagaaatgtgccttt

SEQ ID NO: 2294148 - DNA, 25 bp, Homo sapien
gctttctgcccctctatacctgtgt

SEQ ID NO: 2294149 - DNA, 25 bp, Homo sapien
ttggagacatccagaaatgtgcctt

SEQ ID NO: 2294150 - DNA, 25 bp, Homo sapien
gaagtctccacataacggtgggctt

SEQ ID NO: 2294151 - DNA, 25 bp, Homo sapien
tgatatgatacaaacagtgaaggat

SEQ ID NO: 2294152 - DNA, 25 bp, Homo sapien
tgagagtcagattgtataagatgta

SEQ ID NO: 2294153 - DNA, 25 bp, Homo sapien
ggcaactgaactgcaagtcataaca

SEQ ID NO: 2294154 - DNA, 25 bp, Homo sapien
gattgtcagcttttagtttcaggaa

SEQ ID NO: 2294155 - DNA, 25 bp, Homo sapien
taaactcttagcctacaaggtggct

SEQ ID NO: 2294156 - DNA, 25 bp, Homo sapien
tgtttgcctcaaacgctgtgtttaa

SEQ ID NO: 2294157 - DNA, 25 bp, Homo sapien
ggatacaaatcactacagttctcag

SEQ ID NO: 2294158 - DNA, 25 bp, Homo sapien
tgtcattggcttgatgtcacacatt

SEQ ID NO: 2294159 - DNA, 25 bp, Homo sapien
gaagtcctgtgaggccttcctatct

SEQ ID NO: 2294160 - DNA, 25 bp, Homo sapien
cacaacagtctgactatgagtgagg

SEQ ID NO: 2294161 - DNA, 25 bp, Homo sapien
tttttagtttgttgccaaggtagca

SEQ ID NO: 2294162 - DNA, 25 bp, Homo sapien
ttctggagaccaaaccagataccag

SEQ ID NO: 2294163 - DNA, 25 bp, Homo sapien
tgcactcgttaaagaaacacggagc

SEQ ID NO: 2294164 - DNA, 25 bp, Homo sapien
tctgaagtggtttaaatggtatctc

SEQ ID NO: 2294165 - DNA, 25 bp, Homo sapien
gaaggccagaatcattcctagtaca

SEQ ID NO: 2294166 - DNA, 25 bp, Homo sapien
tgggccatcgtcagaactaagtcag

SEQ ID NO: 2294167 - DNA, 25 bp, Homo sapien
gaggatgcagtttctcacgttgcaa

SEQ ID NO: 2294168 - DNA, 25 bp, Homo sapien
aggatgcagtttctcacgttgcaac

SEQ ID NO: 2294169 - DNA, 25 bp, Homo sapien
tagttctcaaagctgccctgcctgt

SEQ ID NO: 2294170 - DNA, 25 bp, Homo sapien
tttaggaggcgttccacaaacagat

SEQ ID NO: 2294171 - DNA, 25 bp, Homo sapien
tgttaacacctttgacgtctttgga

SEQ ID NO: 2294172 - DNA, 25 bp, Homo sapien
tctgtggctgagctaggtgaacccc

SEQ ID NO: 2294173 - DNA, 25 bp, Homo sapien
gacaagagcggcctggagaagtatc

SEQ ID NO: 2294174 - DNA, 25 bp, Homo sapien
aatacccttaaggaggttcaagcag

SEQ ID NO: 2294175 - DNA, 25 bp, Homo sapien
cccgaaggacggaggttcaagcaga

SEQ ID NO: 2294176 - DNA, 25 bp, Homo sapien
tccctcgcagccaggaaaggaagct

SEQ ID NO: 2294177 - DNA, 25 bp, Homo sapien
agctcgccgccgagaacgacacgga

SEQ ID NO: 2294178 - DNA, 25 bp, Homo sapien
cggccggaccgcgagaaaggcaaag

SEQ ID NO: 2294179 - DNA, 25 bp, Homo sapien
agccgcgtcaccatcaagcaggagc

SEQ ID NO: 2294180 - DNA, 25 bp, Homo sapien
acggacaccgacagcggctacggcg

SEQ ID NO: 2294181 - DNA, 25 bp, Homo sapien
tggccctgtgctggtacccgtttga

SEQ ID NO: 2294182 - DNA, 25 bp, Homo sapien
cagcggtagtaaacgtgggctctgc

SEQ ID NO: 2294183 - DNA, 25 bp, Homo sapien
tgagaccggattaaggagggaggct

SEQ ID NO: 2294184 - DNA, 25 bp, Homo sapien
tgggctctgcacactccgggcgtct

SEQ ID NO: 2294185 - DNA, 25 bp, Homo sapien
gaaacatgagttaaaaggtgaatat

SEQ ID NO: 2294186 - DNA, 25 bp, Homo sapien
ggtagacagagaacataagggaaag

SEQ ID NO: 2294187 - DNA, 25 bp, Homo sapien
gggaaaaggtagacagagaacataa

SEQ ID NO: 2294188 - DNA, 25 bp, Homo sapien
aaggggatcaagaacaacaaaggag

SEQ ID NO: 2294189 - DNA, 25 bp, Homo sapien
actgacatggcaaaagactgcctct

SEQ ID NO: 2294190 - DNA, 25 bp, Homo sapien
taaatttgaagctagatgccaactg

SEQ ID NO: 2294191 - DNA, 25 bp, Homo sapien
tctaaactgtacttccatctgtcca

SEQ ID NO: 2294192 - DNA, 25 bp, Homo sapien
gccaactgaatgactcactgacatg

SEQ ID NO: 2294193 - DNA, 25 bp, Homo sapien
tgctgagtatgcaactggaaaaccc

SEQ ID NO: 2294194 - DNA, 25 bp, Homo sapien
tgctccttgaagctatgcaaagact

SEQ ID NO: 2294195 - DNA, 25 bp, Homo sapien
cataggtatgtttatggctacagac

SEQ ID NO: 2294196 - DNA, 25 bp, Homo sapien
taataagtgcataaacttcttgagc

SEQ ID NO: 2294197 - DNA, 25 bp, Homo sapien
cttctgggcaccgagcacatcaatc

SEQ ID NO: 2294198 - DNA, 25 bp, Homo sapien
gccttctgggcaccgagcacatcaa

SEQ ID NO: 2294199 - DNA, 25 bp, Homo sapien
ctgggcaccgagcacatcaatcctg

SEQ ID NO: 2294200 - DNA, 25 bp, Homo sapien
ttctgggcaccgagcacatcaatcc

SEQ ID NO: 2294201 - DNA, 25 bp, Homo sapien
tgtgtacatgggtccacaaagtcct

SEQ ID NO: 2294202 - DNA, 25 bp, Homo sapien
tggtcgacataggaacaggaacagg

SEQ ID NO: 2294203 - DNA, 25 bp, Homo sapien
gaaaggctaacttccagctccatgg

SEQ ID NO: 2294204 - DNA, 25 bp, Homo sapien
gctccatggacagcaaaaggtcaat

SEQ ID NO: 2294205 - DNA, 25 bp, Homo sapien
gttggcccgttctttatcatcacac

SEQ ID NO: 2294206 - DNA, 25 bp, Homo sapien
gcacatcatgttggcccgttcttta

SEQ ID NO: 2294207 - DNA, 25 bp, Homo sapien
taaagcagcacatcatgttggcccg

SEQ ID NO: 2294208 - DNA, 25 bp, Homo sapien
ctctgtaaagcagcacatcatgttg

SEQ ID NO: 2294209 - DNA, 25 bp, Homo sapien
tttcttgtggctaatgtcggcttgg

SEQ ID NO: 2294210 - DNA, 25 bp, Homo sapien
taatgtcggcttggccttgagcact

SEQ ID NO: 2294211 - DNA, 25 bp, Homo sapien
tgtggctaatgtcggcttggccttg

SEQ ID NO: 2294212 - DNA, 25 bp, Homo sapien
gctgctccggagtcaaacccatttc

SEQ ID NO: 2294213 - DNA, 25 bp, Homo sapien
tccattttcagatacgtgctcccat

SEQ ID NO: 2294214 - DNA, 25 bp, Homo sapien
tgttgaaggtttgatgatctttcgc

SEQ ID NO: 2294215 - DNA, 25 bp, Homo sapien
ttgatgatctttcgctcttttcctc

SEQ ID NO: 2294216 - DNA, 25 bp, Homo sapien
gatacgtgctcccatctttgtcatc

SEQ ID NO: 2294217 - DNA, 25 bp, Homo sapien
gactttcagttgagtgatctgctta

SEQ ID NO: 2294218 - DNA, 25 bp, Homo sapien
tgtttagcacagtggagttcactag

SEQ ID NO: 2294219 - DNA, 25 bp, Homo sapien
tatgtgatgctgcaatgactttcag

SEQ ID NO: 2294220 - DNA, 25 bp, Homo sapien
tgcacagacctgagatttaagatta

SEQ ID NO: 2294221 - DNA, 25 bp, Homo sapien
aggtgggactgcaagcctgcgccat

SEQ ID NO: 2294222 - DNA, 25 bp, Homo sapien
ttcatccttctatgtcttaaaatat

SEQ ID NO: 2294223 - DNA, 25 bp, Homo sapien
gtgggactgcaagcctgcgccatca

SEQ ID NO: 2294224 - DNA, 25 bp, Homo sapien
tccttctatgtcttaaaatattcaa

SEQ ID NO: 2294225 - DNA, 25 bp, Homo sapien
tttcaaacttgcataggaaagaggg

SEQ ID NO: 2294226 - DNA, 25 bp, Homo sapien
ttcttttccttggatcagaagggcc

SEQ ID NO: 2294227 - DNA, 25 bp, Homo sapien
gaagggccaggcttagacctactcc

SEQ ID NO: 2294228 - DNA, 25 bp, Homo sapien
tcctctatgtcatatcctcttctct

SEQ ID NO: 2294229 - DNA, 25 bp, Homo sapien
cacagtaagtacaacaagaggaggc

SEQ ID NO: 2294230 - DNA, 25 bp, Homo sapien
agacttctggtcctcaaaggcttcc

SEQ ID NO: 2294231 - DNA, 25 bp, Homo sapien
gattcacgagtagaacctatcgcct

SEQ ID NO: 2294232 - DNA, 25 bp, Homo sapien
gcagcatgactgttcaaggttacac

SEQ ID NO: 2294233 - DNA, 25 bp, Homo sapien
tgctgctatgagcacgaccgtgtga

SEQ ID NO: 2294234 - DNA, 25 bp, Homo sapien
tcttgagtccctagctatgtagaag

SEQ ID NO: 2294235 - DNA, 25 bp, Homo sapien
tgagattccatgcagtctaagggca

SEQ ID NO: 2294236 - DNA, 25 bp, Homo sapien
gacactctgttcatcgtgacaagaa

SEQ ID NO: 2294237 - DNA, 25 bp, Homo sapien
ggatttgcaggtcgcccgcggaaac

SEQ ID NO: 2294238 - DNA, 25 bp, Homo sapien
gagtgcggggcgtctgttttcctca

SEQ ID NO: 2294239 - DNA, 25 bp, Homo sapien
gcctgaacctctgcacttcagacag

SEQ ID NO: 2294240 - DNA, 25 bp, Homo sapien
cttcagacaggctgcgagtgcgcgc

SEQ ID NO: 2294241 - DNA, 25 bp, Homo sapien
gtgggtgcgtgtgcggcgccctggg

SEQ ID NO: 2294242 - DNA, 25 bp, Homo sapien
cggcgcacggctggctcggcctgcc

SEQ ID NO: 2294243 - DNA, 25 bp, Homo sapien
gggtgggtgcgtgtgcggcgccctg

SEQ ID NO: 2294244 - DNA, 25 bp, Homo sapien
tgggtgggtgcgtgtgcggcgccct

SEQ ID NO: 2294245 - DNA, 25 bp, Homo sapien
tgctggccgcgtggctgcttgttct

SEQ ID NO: 2294246 - DNA, 25 bp, Homo sapien
cctctgctggccgcgtggctgcttg

SEQ ID NO: 2294247 - DNA, 25 bp, Homo sapien
tctgctggccgcgtggctgcttgtt

SEQ ID NO: 2294248 - DNA, 25 bp, Homo sapien
tgcctctgctggccgcgtggctgct

SEQ ID NO: 2294249 - DNA, 25 bp, Homo sapien
cccccgtgcccttcttcggctccat

SEQ ID NO: 2294250 - DNA, 25 bp, Homo sapien
atggagtgtccctgactagcaggga

SEQ ID NO: 2294251 - DNA, 25 bp, Homo sapien
ggaagcccaccacggtcacggcgat

SEQ ID NO: 2294252 - DNA, 25 bp, Homo sapien
aaatggagtgtccctgactagcagg

SEQ ID NO: 2294253 - DNA, 25 bp, Homo sapien
gagcgcgagttagaagagtgaaccc

SEQ ID NO: 2294254 - DNA, 25 bp, Homo sapien
caaacgcgcttaggcaaaacagact

SEQ ID NO: 2294255 - DNA, 25 bp, Homo sapien
cagctgggttagtctcaactcgacc

SEQ ID NO: 2294256 - DNA, 25 bp, Homo sapien
cgcattcctgtttggcaaacgcgct

SEQ ID NO: 2294257 - DNA, 25 bp, Homo sapien
ccggcctcaccaaattcttgaatat

SEQ ID NO: 2294258 - DNA, 25 bp, Homo sapien
tcaccaaattcttgaatattccatt

SEQ ID NO: 2294259 - DNA, 25 bp, Homo sapien
tgcccggcctcaccaaattcttgaa

SEQ ID NO: 2294260 - DNA, 25 bp, Homo sapien
gcctcaccaaattcttgaatattcc

SEQ ID NO: 2294261 - DNA, 25 bp, Homo sapien
tctctcagtaccacggcactcccag

SEQ ID NO: 2294262 - DNA, 25 bp, Homo sapien
cacctctctcagtaccacggcactc

SEQ ID NO: 2294263 - DNA, 25 bp, Homo sapien
acctctctcagtaccacggcactcc

SEQ ID NO: 2294264 - DNA, 25 bp, Homo sapien
tcagtaccacggcactcccagccag

SEQ ID NO: 2294265 - DNA, 25 bp, Homo sapien
tttgtctccataagagacacattcc

SEQ ID NO: 2294266 - DNA, 25 bp, Homo sapien
agtagctacttctttgtagccttca

SEQ ID NO: 2294267 - DNA, 25 bp, Homo sapien
tcagtgcgtctacttgaacaaaatt

SEQ ID NO: 2294268 - DNA, 25 bp, Homo sapien
gcctaactagcaccttaaaaatctg

SEQ ID NO: 2294269 - DNA, 25 bp, Homo sapien
caagccaagataggccactaagcag

SEQ ID NO: 2294270 - DNA, 25 bp, Homo sapien
ttcgtcaacctgatatgagacacaa

SEQ ID NO: 2294271 - DNA, 25 bp, Homo sapien
aaaattgaatacatgtccgttcgtc

SEQ ID NO: 2294272 - DNA, 25 bp, Homo sapien
aaacaagccaagataggccactaag

SEQ ID NO: 2294273 - DNA, 25 bp, Homo sapien
gcctgaacgggaagggcccttctgc

SEQ ID NO: 2294274 - DNA, 25 bp, Homo sapien
ggaggctgccgcaagcagcccaggg

SEQ ID NO: 2294275 - DNA, 25 bp, Homo sapien
ttctgcagcgcactgctcgggagga

SEQ ID NO: 2294276 - DNA, 25 bp, Homo sapien
atgtgggcaggagggaacgtgccct

SEQ ID NO: 2294277 - DNA, 25 bp, Homo sapien
ctgcaagaaagcagaagaaaacctt

SEQ ID NO: 2294278 - DNA, 25 bp, Homo sapien
tgcaagaaagcagaagaaaaccttt

SEQ ID NO: 2294279 - DNA, 25 bp, Homo sapien
gcaagagtcgagtgtggtctcacag

SEQ ID NO: 2294280 - DNA, 25 bp, Homo sapien
tctcacaggtaaactgtgtgagctg

SEQ ID NO: 2294281 - DNA, 25 bp, Homo sapien
gccagtgacgctggtacagtccgtc

SEQ ID NO: 2294282 - DNA, 25 bp, Homo sapien
cacatcccggtaaacaaaggtcctg

SEQ ID NO: 2294283 - DNA, 25 bp, Homo sapien
gaagccgtgagggagcatatcctga

SEQ ID NO: 2294284 - DNA, 25 bp, Homo sapien
tgacacccacatagaagacctggta

SEQ ID NO: 2294285 - DNA, 25 bp, Homo sapien
ggccgcagaccaaattaagaatcat

SEQ ID NO: 2294286 - DNA, 25 bp, Homo sapien
ccacatcacaaagcaggccaacaag

SEQ ID NO: 2294287 - DNA, 25 bp, Homo sapien
gaattaactccagactgtaaagata

SEQ ID NO: 2294288 - DNA, 25 bp, Homo sapien
gtgctactttctctcgcaactttga

SEQ ID NO: 2294289 - DNA, 25 bp, Homo sapien
gtttgtttaacctcagctactccat

SEQ ID NO: 2294290 - DNA, 25 bp, Homo sapien
tagaagagtgacttttattgtcaat

SEQ ID NO: 2294291 - DNA, 25 bp, Homo sapien
cacaaaatttagcaactgggcctga

SEQ ID NO: 2294292 - DNA, 25 bp, Homo sapien
gagtaatttctcttaacaccgacag

SEQ ID NO: 2294293 - DNA, 25 bp, Homo sapien
cttacggagccaagctaagggagct

SEQ ID NO: 2294294 - DNA, 25 bp, Homo sapien
tatcaataggcaatgcggagaggcg

SEQ ID NO: 2294295 - DNA, 25 bp, Homo sapien
tatacagcgagctcatagcaaaggg

SEQ ID NO: 2294296 - DNA, 25 bp, Homo sapien
cagcccaaagcggttattcatgcaa

SEQ ID NO: 2294297 - DNA, 25 bp, Homo sapien
gcaacacaattcttacacttatcaa

SEQ ID NO: 2294298 - DNA, 25 bp, Homo sapien
cccaaagcggttattcatgcaacac

SEQ ID NO: 2294299 - DNA, 25 bp, Homo sapien
ggcgccttgtcagattttaaatgta

SEQ ID NO: 2294300 - DNA, 25 bp, Homo sapien
cttggcgccttgtcagattttaaat

SEQ ID NO: 2294301 - DNA, 25 bp, Homo sapien
acattctgctaagtgtaaagctgtg

SEQ ID NO: 2294302 - DNA, 25 bp, Homo sapien
taaagctgtgtatctgttccttttc

SEQ ID NO: 2294303 - DNA, 25 bp, Homo sapien
ctttcgtggtttagaggagacagtc

SEQ ID NO: 2294304 - DNA, 25 bp, Homo sapien
tctttcgtggtttagaggagacagt

SEQ ID NO: 2294305 - DNA, 25 bp, Homo sapien
tcgtggtttagaggagacagtcacc

SEQ ID NO: 2294306 - DNA, 25 bp, Homo sapien
gtggtttagaggagacagtcaccat

SEQ ID NO: 2294307 - DNA, 25 bp, Homo sapien
tgtttcaagtactgccaagtcccgg

SEQ ID NO: 2294308 - DNA, 25 bp, Homo sapien
gagtgggctcggctacaaagtctgt

SEQ ID NO: 2294309 - DNA, 25 bp, Homo sapien
taaagctggaaacccctcagtagag

SEQ ID NO: 2294310 - DNA, 25 bp, Homo sapien
cacagatggtggtcacgtgaaggca

SEQ ID NO: 2294311 - DNA, 25 bp, Homo sapien
aataaagaaaatctgcattacacat

SEQ ID NO: 2294312 - DNA, 25 bp, Homo sapien
aaagaaaatctgcattacacatatc

SEQ ID NO: 2294313 - DNA, 25 bp, Homo sapien
aagaaaatctgcattacacatatcc

SEQ ID NO: 2294314 - DNA, 25 bp, Homo sapien
taaagaaaatctgcattacacatat

SEQ ID NO: 2294315 - DNA, 25 bp, Homo sapien
aaggcagtgtgtcaattccccaagg

SEQ ID NO: 2294316 - DNA, 25 bp, Homo sapien
gcagtgtgtcaattccccaaggatc

SEQ ID NO: 2294317 - DNA, 25 bp, Homo sapien
gaaggcagtgtgtcaattccccaag

SEQ ID NO: 2294318 - DNA, 25 bp, Homo sapien
ggcagtgtgtcaattccccaaggat

SEQ ID NO: 2294319 - DNA, 25 bp, Homo sapien
gtttctaactgttccggcggcatgg

SEQ ID NO: 2294320 - DNA, 25 bp, Homo sapien
caagataagctggagccgggtcctt

SEQ ID NO: 2294321 - DNA, 25 bp, Homo sapien
tacggactcccacgtccaatgtgtg

SEQ ID NO: 2294322 - DNA, 25 bp, Homo sapien
gcttatttctgttgtacctacggac

SEQ ID NO: 2294323 - DNA, 25 bp, Homo sapien
aacagctcagaagtcatgacaatgg

SEQ ID NO: 2294324 - DNA, 25 bp, Homo sapien
cagctcagaagtcatgacaatggat

SEQ ID NO: 2294325 - DNA, 25 bp, Homo sapien
acagctcagaagtcatgacaatgga

SEQ ID NO: 2294326 - DNA, 25 bp, Homo sapien
aaacagctcagaagtcatgacaatg

SEQ ID NO: 2294327 - DNA, 25 bp, Homo sapien
accaaaggcttggtcttacgtctga

SEQ ID NO: 2294328 - DNA, 25 bp, Homo sapien
aaaggcttggtcttacgtctgattt

SEQ ID NO: 2294329 - DNA, 25 bp, Homo sapien
ccaaaggcttggtcttacgtctgat

SEQ ID NO: 2294330 - DNA, 25 bp, Homo sapien
tcaccaaaggcttggtcttacgtct

SEQ ID NO: 2294331 - DNA, 25 bp, Homo sapien
gatgattgctgatggcctacgtgcc

SEQ ID NO: 2294332 - DNA, 25 bp, Homo sapien
ttaacctaggtctggcaagctgccc

SEQ ID NO: 2294333 - DNA, 25 bp, Homo sapien
cagggctccatttgtctagggctac

SEQ ID NO: 2294334 - DNA, 25 bp, Homo sapien
gatattgaccactgattggccccaa

SEQ ID NO: 2294335 - DNA, 25 bp, Homo sapien
tcattgagaagtcaaatccaaccaa

SEQ ID NO: 2294336 - DNA, 25 bp, Homo sapien
tcctctgtggtgttagtccaggtag

SEQ ID NO: 2294337 - DNA, 25 bp, Homo sapien
atatttatcatcgaaatctcagaag

SEQ ID NO: 2294338 - DNA, 25 bp, Homo sapien
ggtagagaatcattgtgtatcattg

SEQ ID NO: 2294339 - DNA, 25 bp, Homo sapien
aatggcttcttcctctttcactttc

SEQ ID NO: 2294340 - DNA, 25 bp, Homo sapien
tggcttcttcctctttcactttctg

SEQ ID NO: 2294341 - DNA, 25 bp, Homo sapien
cagacgtcgaatggcttcttcctct

SEQ ID NO: 2294342 - DNA, 25 bp, Homo sapien
cctctttcactttctgccacagtgt

SEQ ID NO: 2294343 - DNA, 25 bp, Homo sapien
taaccctgttatgttggacagaagc

SEQ ID NO: 2294344 - DNA, 25 bp, Homo sapien
ggcagattagggacagacagcgtaa

SEQ ID NO: 2294345 - DNA, 25 bp, Homo sapien
tgccctgggtgttagaggacctatg

SEQ ID NO: 2294346 - DNA, 25 bp, Homo sapien
gaacatcatcagtctgtgccctggg

SEQ ID NO: 2294347 - DNA, 25 bp, Homo sapien
taaatgcacaggcacgtaacctagc

SEQ ID NO: 2294348 - DNA, 25 bp, Homo sapien
tgccggcgatgctcgtgataggttc

SEQ ID NO: 2294349 - DNA, 25 bp, Homo sapien
ctaggaggaataagggatgacagcc

SEQ ID NO: 2294350 - DNA, 25 bp, Homo sapien
tagctgattctaaactgcgtaggtg

SEQ ID NO: 2294351 - DNA, 25 bp, Homo sapien
actcctacacttgcggcatgaaaca

SEQ ID NO: 2294352 - DNA, 25 bp, Homo sapien
cctacacttgcggcatgaaacaggc

SEQ ID NO: 2294353 - DNA, 25 bp, Homo sapien
tatactcctacacttgcggcatgaa

SEQ ID NO: 2294354 - DNA, 25 bp, Homo sapien
tactcctacacttgcggcatgaaac

SEQ ID NO: 2294355 - DNA, 25 bp, Homo sapien
agttctactgcttcgatacatacat

SEQ ID NO: 2294356 - DNA, 25 bp, Homo sapien
tactgcttcgatacatacattgtag

SEQ ID NO: 2294357 - DNA, 25 bp, Homo sapien
ctgcttcgatacatacattgtagca

SEQ ID NO: 2294358 - DNA, 25 bp, Homo sapien
tctactgcttcgatacatacattgt

SEQ ID NO: 2294359 - DNA, 25 bp, Homo sapien
cacagcaggtggcaatttgcctgtg

SEQ ID NO: 2294360 - DNA, 25 bp, Homo sapien
tgtaataggctccaatgttctggct

SEQ ID NO: 2294361 - DNA, 25 bp, Homo sapien
cctgtgctactcaacaatttcaaca

SEQ ID NO: 2294362 - DNA, 25 bp, Homo sapien
ctgtaataggctccaatgttctggc

SEQ ID NO: 2294363 - DNA, 25 bp, Homo sapien
cttaggtgagtatcagttaacatcc

SEQ ID NO: 2294364 - DNA, 25 bp, Homo sapien
tgaggctcaagagcttaatgccagt

SEQ ID NO: 2294365 - DNA, 25 bp, Homo sapien
tcatcttgaactttgatgttaaggg

SEQ ID NO: 2294366 - DNA, 25 bp, Homo sapien
aataagcttattttcttgcacatca

SEQ ID NO: 2294367 - DNA, 25 bp, Homo sapien
caaccactttgtagtggcagatcac

SEQ ID NO: 2294368 - DNA, 25 bp, Homo sapien
catttgtatacatctgagcaacctg

SEQ ID NO: 2294369 - DNA, 25 bp, Homo sapien
caaaagagactgcaactaacaagac

SEQ ID NO: 2294370 - DNA, 25 bp, Homo sapien
tagaaatgacctaatgtccccaacc

SEQ ID NO: 2294371 - DNA, 25 bp, Homo sapien
caaactgtagctgtcacagggcaat

SEQ ID NO: 2294372 - DNA, 25 bp, Homo sapien
gtgattgccttctctgggattcaga

SEQ ID NO: 2294373 - DNA, 25 bp, Homo sapien
ggctctgtcaatgtggagcacaaaa

SEQ ID NO: 2294374 - DNA, 25 bp, Homo sapien
tggatttacagctctaggaacttag

SEQ ID NO: 2294375 - DNA, 25 bp, Homo sapien
taatacacagaattcactcctgaca

SEQ ID NO: 2294376 - DNA, 25 bp, Homo sapien
aatgggtagaacatatgagaataag

SEQ ID NO: 2294377 - DNA, 25 bp, Homo sapien
ttgtaatacacagaattcactcctg

SEQ ID NO: 2294378 - DNA, 25 bp, Homo sapien
ggtagaacatatgagaataagtagt

SEQ ID NO: 2294379 - DNA, 25 bp, Homo sapien
tggcagaggtaaataggggtttaca

SEQ ID NO: 2294380 - DNA, 25 bp, Homo sapien
tcctgtggcagaggtaaataggggt

SEQ ID NO: 2294381 - DNA, 25 bp, Homo sapien
ttacaacgggaagaggagtattctc

SEQ ID NO: 2294382 - DNA, 25 bp, Homo sapien
caacgggaagaggagtattctcttt

SEQ ID NO: 2294383 - DNA, 25 bp, Homo sapien
tgtaggaccaagtaatcagctcatg

SEQ ID NO: 2294384 - DNA, 25 bp, Homo sapien
ttaatcgctcccagttctaatggca

SEQ ID NO: 2294385 - DNA, 25 bp, Homo sapien
cgagaagtgactgctctacaggttg

SEQ ID NO: 2294386 - DNA, 25 bp, Homo sapien
caaataggcatcctttcgagaagtg

SEQ ID NO: 2294387 - DNA, 25 bp, Homo sapien
gaatgtaacctgcattagggcaaca

SEQ ID NO: 2294388 - DNA, 25 bp, Homo sapien
taggctccagctacatggactttgc

SEQ ID NO: 2294389 - DNA, 25 bp, Homo sapien
tattatcgggacttagagcagtggc

SEQ ID NO: 2294390 - DNA, 25 bp, Homo sapien
tagtctgtctcagttcacatgccag

SEQ ID NO: 2294391 - DNA, 25 bp, Homo sapien
agaaataatattccggccctccaag

SEQ ID NO: 2294392 - DNA, 25 bp, Homo sapien
tcagaggtaattactcagggatttc

SEQ ID NO: 2294393 - DNA, 25 bp, Homo sapien
taaaaagcaccagttcaccagaacc

SEQ ID NO: 2294394 - DNA, 25 bp, Homo sapien
taccactctgaatgcaaccgatctc

SEQ ID NO: 2294395 - DNA, 25 bp, Homo sapien
gaagccaggcaagcttccttgttca

SEQ ID NO: 2294396 - DNA, 25 bp, Homo sapien
aacggagcagaattggaagccaggc

SEQ ID NO: 2294397 - DNA, 25 bp, Homo sapien
ttgccacaatctcttcctaccataa

SEQ ID NO: 2294398 - DNA, 25 bp, Homo sapien
taccataacaagcacaacgaatgtg

SEQ ID NO: 2294399 - DNA, 25 bp, Homo sapien
tctcaaggtgtatcccagcatgttt

SEQ ID NO: 2294400 - DNA, 25 bp, Homo sapien
gaatgtgccttggactcagcgctaa

SEQ ID NO: 2294401 - DNA, 25 bp, Homo sapien
tcagcgctaaggtaagtgaccaagc

SEQ ID NO: 2294402 - DNA, 25 bp, Homo sapien
gacctcactagcacattccagactg

SEQ ID NO: 2294403 - DNA, 25 bp, Homo sapien
gacctcaggtagtctgcccacttca

SEQ ID NO: 2294404 - DNA, 25 bp, Homo sapien
acctcaggtagtctgcccacttcag

SEQ ID NO: 2294405 - DNA, 25 bp, Homo sapien
ccagcgccagaaaattcacgcagta

SEQ ID NO: 2294406 - DNA, 25 bp, Homo sapien
gaaaattcacgcagtaactggcaac

SEQ ID NO: 2294407 - DNA, 25 bp, Homo sapien
ggtacagacatacacagtagcttaa

SEQ ID NO: 2294408 - DNA, 25 bp, Homo sapien
gcttaataacaagcctcacggtgac

SEQ ID NO: 2294409 - DNA, 25 bp, Homo sapien
ctaaagctgaatggtaaagccatca

SEQ ID NO: 2294410 - DNA, 25 bp, Homo sapien
atggtaaagccatcacagggccctg

SEQ ID NO: 2294411 - DNA, 25 bp, Homo sapien
acgggtaattggcaaatgccattgc

SEQ ID NO: 2294412 - DNA, 25 bp, Homo sapien
ccctgtgagaatagaggacgggtaa

SEQ ID NO: 2294413 - DNA, 25 bp, Homo sapien
tgtattatgtttacgtgccagtttg

SEQ ID NO: 2294414 - DNA, 25 bp, Homo sapien
tgtttacgtgccagtttgtaagcaa

SEQ ID NO: 2294415 - DNA, 25 bp, Homo sapien
aactgcaaaggatgcaagttttgca

SEQ ID NO: 2294416 - DNA, 25 bp, Homo sapien
cgtgccagtttgtaagcaatgctga

SEQ ID NO: 2294417 - DNA, 25 bp, Homo sapien
aaatagtactcagtagacaaagtcc

SEQ ID NO: 2294418 - DNA, 25 bp, Homo sapien
tcagtagacaaagtccatgataaaa

SEQ ID NO: 2294419 - DNA, 25 bp, Homo sapien
tagtactcagtagacaaagtccatg

SEQ ID NO: 2294420 - DNA, 25 bp, Homo sapien
gtttaaaatagtactcagtagacaa

SEQ ID NO: 2294421 - DNA, 25 bp, Homo sapien
ctattcatcaagctctagatcaagg

SEQ ID NO: 2294422 - DNA, 25 bp, Homo sapien
tgtcagttatcaactccactccacg

SEQ ID NO: 2294423 - DNA, 25 bp, Homo sapien
gtcaagacttagtgaagagaacagg

SEQ ID NO: 2294424 - DNA, 25 bp, Homo sapien
catcaagctctagatcaaggttcaa

SEQ ID NO: 2294425 - DNA, 25 bp, Homo sapien
tgttgacttgaggaacctcttagca

SEQ ID NO: 2294426 - DNA, 25 bp, Homo sapien
gaaggactggttagacgatgtcaac

SEQ ID NO: 2294427 - DNA, 25 bp, Homo sapien
taatggcactgacaaatgaaggact

SEQ ID NO: 2294428 - DNA, 25 bp, Homo sapien
tttttgtcacccacatggacccttg

SEQ ID NO: 2294429 - DNA, 25 bp, Homo sapien
gattggattcctgagcacacactgg

SEQ ID NO: 2294430 - DNA, 25 bp, Homo sapien
ggtcagtgataaagccagaagtcat

SEQ ID NO: 2294431 - DNA, 25 bp, Homo sapien
ttaaggagcattaggagcacagatc

SEQ ID NO: 2294432 - DNA, 25 bp, Homo sapien
gctaatttgcgcacttcagattgga

SEQ ID NO: 2294433 - DNA, 25 bp, Homo sapien
ggtttcttagcaggccaatccctaa

SEQ ID NO: 2294434 - DNA, 25 bp, Homo sapien
tgctgatctttctgcaggtgactcc

SEQ ID NO: 2294435 - DNA, 25 bp, Homo sapien
ccttggctttctctaggctaggatg

SEQ ID NO: 2294436 - DNA, 25 bp, Homo sapien
ggagtcatttccttgccaccatata

SEQ ID NO: 2294437 - DNA, 25 bp, Homo sapien
gtgcccctgttataacctgtggatg

SEQ ID NO: 2294438 - DNA, 25 bp, Homo sapien
gacaaactccctgctacagtccata

SEQ ID NO: 2294439 - DNA, 25 bp, Homo sapien
gaagcctaggctccatatctcactg

SEQ ID NO: 2294440 - DNA, 25 bp, Homo sapien
aatatgtcacctgccctataaagac

SEQ ID NO: 2294441 - DNA, 25 bp, Homo sapien
ggtcctcctgtaatgactagattaa

SEQ ID NO: 2294442 - DNA, 25 bp, Homo sapien
tggcttatgctcaaagtcagggttt

SEQ ID NO: 2294443 - DNA, 25 bp, Homo sapien
agcttcatggctggcttatgctcaa

SEQ ID NO: 2294444 - DNA, 25 bp, Homo sapien
ggctggcttatgctcaaagtcaggg

SEQ ID NO: 2294445 - DNA, 25 bp, Homo sapien
catggctggcttatgctcaaagtca

SEQ ID NO: 2294446 - DNA, 25 bp, Homo sapien
ttcctttcctatctgcgtctttaaa

SEQ ID NO: 2294447 - DNA, 25 bp, Homo sapien
ctatctgcgtctttaaaagatgaga

SEQ ID NO: 2294448 - DNA, 25 bp, Homo sapien
cctttcctatctgcgtctttaaaag

SEQ ID NO: 2294449 - DNA, 25 bp, Homo sapien
ttcctatctgcgtctttaaaagatg

SEQ ID NO: 2294450 - DNA, 25 bp, Homo sapien
aagcacttttcgactgtgtttcagc

SEQ ID NO: 2294451 - DNA, 25 bp, Homo sapien
gcacttttcgactgtgtttcagcat

SEQ ID NO: 2294452 - DNA, 25 bp, Homo sapien
caagcacttttcgactgtgtttcag

SEQ ID NO: 2294453 - DNA, 25 bp, Homo sapien
agcacttttcgactgtgtttcagca

SEQ ID NO: 2294454 - DNA, 25 bp, Homo sapien
aaaatgcaccgagcagcttgcgggc

SEQ ID NO: 2294455 - DNA, 25 bp, Homo sapien
ttctgtgtatgcttctcttgtgcgc

SEQ ID NO: 2294456 - DNA, 25 bp, Homo sapien
tctgtgtatgcttctcttgtgcgca

SEQ ID NO: 2294457 - DNA, 25 bp, Homo sapien
gcagccaaaatgcaccgagcagctt

SEQ ID NO: 2294458 - DNA, 25 bp, Homo sapien
cttcttgccatctaccaccctggtg

SEQ ID NO: 2294459 - DNA, 25 bp, Homo sapien
ggatgcttctttaggcttcttgcca

SEQ ID NO: 2294460 - DNA, 25 bp, Homo sapien
ttgaggatgcttctttaggcttctt

SEQ ID NO: 2294461 - DNA, 25 bp, Homo sapien
gaggatgcttctttaggcttcttgc

SEQ ID NO: 2294462 - DNA, 25 bp, Homo sapien
ccatctggtgcttgaacatcttaaa

SEQ ID NO: 2294463 - DNA, 25 bp, Homo sapien
ttcttcagagtaggcctggttcctg

SEQ ID NO: 2294464 - DNA, 25 bp, Homo sapien
tggttcctgcatattccatctggtg

SEQ ID NO: 2294465 - DNA, 25 bp, Homo sapien
actgatttcttcagagtaggcctgg

SEQ ID NO: 2294466 - DNA, 25 bp, Homo sapien
ccaggtaacagcaggtttctttgta

SEQ ID NO: 2294467 - DNA, 25 bp, Homo sapien
ttgtatttgacatccctgcaaactt

SEQ ID NO: 2294468 - DNA, 25 bp, Homo sapien
ctttgtatttgacatccctgcaaac

SEQ ID NO: 2294469 - DNA, 25 bp, Homo sapien
tatactttgcatatctctgttaccc

SEQ ID NO: 2294470 - DNA, 25 bp, Homo sapien
ctttaagtgtcagcgggcagttgtc

SEQ ID NO: 2294471 - DNA, 25 bp, Homo sapien
tcagcgggcagttgtcatgcttctc

SEQ ID NO: 2294472 - DNA, 25 bp, Homo sapien
ggacatgccggccaggtttctgcct

SEQ ID NO: 2294473 - DNA, 25 bp, Homo sapien
ctctgtcctgtgttcataccattcc

SEQ ID NO: 2294474 - DNA, 25 bp, Homo sapien
ctagattggtgggatccaaccccac

SEQ ID NO: 2294475 - DNA, 25 bp, Homo sapien
gattggtgggatccaaccccacgaa

SEQ ID NO: 2294476 - DNA, 25 bp, Homo sapien
ccccacgaaaatttagccaacagct

SEQ ID NO: 2294477 - DNA, 25 bp, Homo sapien
aaataccctagtcaactggcttcag

SEQ ID NO: 2294478 - DNA, 25 bp, Homo sapien
atcttatcttacatcaactgaatgc

SEQ ID NO: 2294479 - DNA, 25 bp, Homo sapien
agatcttatcttacatcaactgaat

SEQ ID NO: 2294480 - DNA, 25 bp, Homo sapien
tcactttaattgagctaactccttc

SEQ ID NO: 2294481 - DNA, 25 bp, Homo sapien
atcactttaattgagctaactcctt

SEQ ID NO: 2294482 - DNA, 25 bp, Homo sapien
tggctcctacatccaaatctgaact

SEQ ID NO: 2294483 - DNA, 25 bp, Homo sapien
cattcgtccacgtatgcctttctta

SEQ ID NO: 2294484 - DNA, 25 bp, Homo sapien
gcttggtgagttcccgtgagatctg

SEQ ID NO: 2294485 - DNA, 25 bp, Homo sapien
aatgggattccgacgttggaggtgg

SEQ ID NO: 2294486 - DNA, 25 bp, Homo sapien
gaagagtgaggtttccatatcaatc

SEQ ID NO: 2294487 - DNA, 25 bp, Homo sapien
catctgaacagttaaggctctggaa

SEQ ID NO: 2294488 - DNA, 25 bp, Homo sapien
cttgttggtcccttccatctgaaca

SEQ ID NO: 2294489 - DNA, 25 bp, Homo sapien
tcgaagggtataatcaagataggtg

SEQ ID NO: 2294490 - DNA, 25 bp, Homo sapien
tctccagctcgagagtccaaatctt

SEQ ID NO: 2294491 - DNA, 25 bp, Homo sapien
ccagctcgagagtccaaatcttttc

SEQ ID NO: 2294492 - DNA, 25 bp, Homo sapien
tccagctcgagagtccaaatctttt

SEQ ID NO: 2294493 - DNA, 25 bp, Homo sapien
ctccagctcgagagtccaaatcttt

SEQ ID NO: 2294494 - DNA, 25 bp, Homo sapien
gcttatcttctgattaatagctatg

SEQ ID NO: 2294495 - DNA, 25 bp, Homo sapien
tatgtgtgttgcaaaacaacctttt

SEQ ID NO: 2294496 - DNA, 25 bp, Homo sapien
ggttagtctaaatatgatctttgca

SEQ ID NO: 2294497 - DNA, 25 bp, Homo sapien
taatcttcctcgttcattgaatggc

SEQ ID NO: 2294498 - DNA, 25 bp, Homo sapien
ggaaatcccagattgtggaaagtac

SEQ ID NO: 2294499 - DNA, 25 bp, Homo sapien
gcatgatgtctagaaccaactttca

SEQ ID NO: 2294500 - DNA, 25 bp, Homo sapien
gaatgatcttacaactctactagga

SEQ ID NO: 2294501 - DNA, 25 bp, Homo sapien
agacaaaggtcgatgccagagagga

SEQ ID NO: 2294502 - DNA, 25 bp, Homo sapien
tgaattgcggaaaacacctaggaac

SEQ ID NO: 2294503 - DNA, 25 bp, Homo sapien
tccaacaggatagtttagggattcg

SEQ ID NO: 2294504 - DNA, 25 bp, Homo sapien
tcctgcaagatagtaaagctaacca

SEQ ID NO: 2294505 - DNA, 25 bp, Homo sapien
gaaatggtcccttattcaatgtaaa

SEQ ID NO: 2294506 - DNA, 25 bp, Homo sapien
tcagagcgcaggtaagatcattagg

SEQ ID NO: 2294507 - DNA, 25 bp, Homo sapien
tctgcttacatcagctggcaagaat

SEQ ID NO: 2294508 - DNA, 25 bp, Homo sapien
gaggaagtgctactaaacaggccag

SEQ ID NO: 2294509 - DNA, 25 bp, Homo sapien
tcaaatgggctgaattacaaatacc

SEQ ID NO: 2294510 - DNA, 25 bp, Homo sapien
tgcctgtgaaattggccacgtgcat

SEQ ID NO: 2294511 - DNA, 25 bp, Homo sapien
ctccgttgcctgtgaaattggccac

SEQ ID NO: 2294512 - DNA, 25 bp, Homo sapien
cgttgcctgtgaaattggccacgtg

SEQ ID NO: 2294513 - DNA, 25 bp, Homo sapien
tccgttgcctgtgaaattggccacg

SEQ ID NO: 2294514 - DNA, 25 bp, Homo sapien
tgttaacgtgctgtgggttacgtgc

SEQ ID NO: 2294515 - DNA, 25 bp, Homo sapien
tttgagtggctttcgtatttcttcc

SEQ ID NO: 2294516 - DNA, 25 bp, Homo sapien
atttcttccctctgctagcatttgt

SEQ ID NO: 2294517 - DNA, 25 bp, Homo sapien
tacgtgctccataccatttgagtgg

SEQ ID NO: 2294518 - DNA, 25 bp, Homo sapien
catttttgggcccttgtaggataat

SEQ ID NO: 2294519 - DNA, 25 bp, Homo sapien
gaacttctctggcttgctactgtgc

SEQ ID NO: 2294520 - DNA, 25 bp, Homo sapien
gctactgtgctcttctgtcgtattg

SEQ ID NO: 2294521 - DNA, 25 bp, Homo sapien
tattgctttctgagtggagggcttg

SEQ ID NO: 2294522 - DNA, 25 bp, Homo sapien
aagctgccacttggaggtcgcaggc

SEQ ID NO: 2294523 - DNA, 25 bp, Homo sapien
gctgccacttggaggtcgcaggcca

SEQ ID NO: 2294524 - DNA, 25 bp, Homo sapien
aggagccctcgagtggtctctcaat

SEQ ID NO: 2294525 - DNA, 25 bp, Homo sapien
gccctcgagtggtctctcaatcagt

SEQ ID NO: 2294526 - DNA, 25 bp, Homo sapien
cacgtccatgccttggtcagtggct

SEQ ID NO: 2294527 - DNA, 25 bp, Homo sapien
tccatgccttggtcagtggctactt

SEQ ID NO: 2294528 - DNA, 25 bp, Homo sapien
caatgtccacgtccatgccttggtc

SEQ ID NO: 2294529 - DNA, 25 bp, Homo sapien
gccttggtcagtggctactttgccc

SEQ ID NO: 2294530 - DNA, 25 bp, Homo sapien
ttggccttgccgaaccaggactcgc

SEQ ID NO: 2294531 - DNA, 25 bp, Homo sapien
tccttttggccttgccgaaccagga

SEQ ID NO: 2294532 - DNA, 25 bp, Homo sapien
cgtcccctcttcgctggagcagttt

SEQ ID NO: 2294533 - DNA, 25 bp, Homo sapien
gtcccctcttcgctggagcagtttc

SEQ ID NO: 2294534 - DNA, 25 bp, Homo sapien
agggctcggtcaacggcttcatcag

SEQ ID NO: 2294535 - DNA, 25 bp, Homo sapien
gcgccgtgcgctccgctctctcgct

SEQ ID NO: 2294536 - DNA, 25 bp, Homo sapien
catcagcaccttggggtaagcggga

SEQ ID NO: 2294537 - DNA, 25 bp, Homo sapien
ctcgcgctccgggtcctgggaacca

SEQ ID NO: 2294538 - DNA, 25 bp, Homo sapien
gcgcagggaagaagagggacgtcca

SEQ ID NO: 2294539 - DNA, 25 bp, Homo sapien
ctggagagagggcggcgagggcgca

SEQ ID NO: 2294540 - DNA, 25 bp, Homo sapien
gggcgcagggaagaagagggacgtc

SEQ ID NO: 2294541 - DNA, 25 bp, Homo sapien
gcggcgagggcgcagggaagaagag

SEQ ID NO: 2294542 - DNA, 25 bp, Homo sapien
ctcttggccgctgtagtcccgcgat

SEQ ID NO: 2294543 - DNA, 25 bp, Homo sapien
cacctggtccaaaaattcccctgag

SEQ ID NO: 2294544 - DNA, 25 bp, Homo sapien
gctgagccgcgacgctcagtggctc

SEQ ID NO: 2294545 - DNA, 25 bp, Homo sapien
gcaaaggtgttggagagaaaacttc

SEQ ID NO: 2294546 - DNA, 25 bp, Homo sapien
gcgccgcccagcgtcgcgtccccgc

SEQ ID NO: 2294547 - DNA, 25 bp, Homo sapien
ccggccgctgctccctgattggccg

SEQ ID NO: 2294548 - DNA, 25 bp, Homo sapien
cccggccgctgctccctgattggcc

SEQ ID NO: 2294549 - DNA, 25 bp, Homo sapien
ccagcgccgcccagcgtcgcgtccc

SEQ ID NO: 2294550 - DNA, 25 bp, Homo sapien
ggccagcaaattacccaccccgctg

SEQ ID NO: 2294551 - DNA, 25 bp, Homo sapien
tctccagcagttcgggggctctctc

SEQ ID NO: 2294552 - DNA, 25 bp, Homo sapien
gccagcaaattacccaccccgctgg

SEQ ID NO: 2294553 - DNA, 25 bp, Homo sapien
tcatctccagcagttcgggggctct

SEQ ID NO: 2294554 - DNA, 25 bp, Homo sapien
tgaaggttggctacaaaaactggct

SEQ ID NO: 2294555 - DNA, 25 bp, Homo sapien
ccaagtgacgtttacctccttggag

SEQ ID NO: 2294556 - DNA, 25 bp, Homo sapien
ggtcgagtttcattaacgccgcgta

SEQ ID NO: 2294557 - DNA, 25 bp, Homo sapien
tcgcgtccacctggacatcagcgga

SEQ ID NO: 2294558 - DNA, 25 bp, Homo sapien
tagacaataagctgtcattggaggt

SEQ ID NO: 2294559 - DNA, 25 bp, Homo sapien
gtagacaataagctgtcattggagg

SEQ ID NO: 2294560 - DNA, 25 bp, Homo sapien
gatgagatcaactttgtaagtataa

SEQ ID NO: 2294561 - DNA, 25 bp, Homo sapien
tgtagacaataagctgtcattggag

SEQ ID NO: 2294562 - DNA, 25 bp, Homo sapien
gcattctctggtgttagatggcagt

SEQ ID NO: 2294563 - DNA, 25 bp, Homo sapien
cattctctggtgttagatggcagtt

SEQ ID NO: 2294564 - DNA, 25 bp, Homo sapien
tctctgtgggttttatccgctacct

SEQ ID NO: 2294565 - DNA, 25 bp, Homo sapien
tgcccaaccaaagtattatgtcttc

SEQ ID NO: 2294566 - DNA, 25 bp, Homo sapien
gaagcccccaaaagtccattctagc

SEQ ID NO: 2294567 - DNA, 25 bp, Homo sapien
gtcttgatcaagaagcccccaaaag

SEQ ID NO: 2294568 - DNA, 25 bp, Homo sapien
agaagcccccaaaagtccattctag

SEQ ID NO: 2294569 - DNA, 25 bp, Homo sapien
gatcaagaagcccccaaaagtccat

SEQ ID NO: 2294570 - DNA, 25 bp, Homo sapien
gccctgcggcaaccccactgggtct

SEQ ID NO: 2294571 - DNA, 25 bp, Homo sapien
ccacagaattgggagggatttgctg

SEQ ID NO: 2294572 - DNA, 25 bp, Homo sapien
tgggagggatttgctgcagtggccc

SEQ ID NO: 2294573 - DNA, 25 bp, Homo sapien
ccactgggtctcagttcatgtgcct

SEQ ID NO: 2294574 - DNA, 25 bp, Homo sapien
tcagatttcacctggcggtatgtgg

SEQ ID NO: 2294575 - DNA, 25 bp, Homo sapien
cttgtcaggttgctgcccgttctgt

SEQ ID NO: 2294576 - DNA, 25 bp, Homo sapien
gggttccgaggtccacgtgatgtcc

SEQ ID NO: 2294577 - DNA, 25 bp, Homo sapien
gcctctctggcgcaatgtctcttgt

SEQ ID NO: 2294578 - DNA, 25 bp, Homo sapien
tgcttcaccagtccgctcttaacta

SEQ ID NO: 2294579 - DNA, 25 bp, Homo sapien
gctgcagatgccgtgtcatccctct

SEQ ID NO: 2294580 - DNA, 25 bp, Homo sapien
gctgctgcagatgccgtgtcatccc

SEQ ID NO: 2294581 - DNA, 25 bp, Homo sapien
agtccgctcttaactaaaactccag

SEQ ID NO: 2294582 - DNA, 25 bp, Homo sapien
cttgtggtttccgtgtgagaggagt

SEQ ID NO: 2294583 - DNA, 25 bp, Homo sapien
tttccgtgtgagaggagtcagtact

SEQ ID NO: 2294584 - DNA, 25 bp, Homo sapien
tggtttccgtgtgagaggagtcagt

SEQ ID NO: 2294585 - DNA, 25 bp, Homo sapien
tgtggtttccgtgtgagaggagtca

SEQ ID NO: 2294586 - DNA, 25 bp, Homo sapien
catccttccccttgggccctggcca

SEQ ID NO: 2294587 - DNA, 25 bp, Homo sapien
tgcagctggcatccttccccttggg

SEQ ID NO: 2294588 - DNA, 25 bp, Homo sapien
gaagctgcagctggcatccttcccc

SEQ ID NO: 2294589 - DNA, 25 bp, Homo sapien
gcctggagaagctgcagctggcatc

SEQ ID NO: 2294590 - DNA, 25 bp, Homo sapien
ggtttggtagttcctgcttgtcagc

SEQ ID NO: 2294591 - DNA, 25 bp, Homo sapien
tggcccacagacacttcacggtttg

SEQ ID NO: 2294592 - DNA, 25 bp, Homo sapien
gaatggcacgagcaccagaatgtgt

SEQ ID NO: 2294593 - DNA, 25 bp, Homo sapien
aataaagctcgactctgtcagtggc

SEQ ID NO: 2294594 - DNA, 25 bp, Homo sapien
gctgacttctctgcataaagtgggc

SEQ ID NO: 2294595 - DNA, 25 bp, Homo sapien
gggctgcatccatactttctctaat

SEQ ID NO: 2294596 - DNA, 25 bp, Homo sapien
tcacccgtgtgggtggacttacctc

SEQ ID NO: 2294597 - DNA, 25 bp, Homo sapien
tttctctaatgaagtctaaacctca

SEQ ID NO: 2294598 - DNA, 25 bp, Homo sapien
tgaaccggtatatccagtggcactc

SEQ ID NO: 2294599 - DNA, 25 bp, Homo sapien
tggcatgttccagacctcacgttgg

SEQ ID NO: 2294600 - DNA, 25 bp, Homo sapien
aaaagctcagcgatacacaggtacc

SEQ ID NO: 2294601 - DNA, 25 bp, Homo sapien
tcagcccacgttgtgtgaaccggta

SEQ ID NO: 2294602 - DNA, 25 bp, Homo sapien
gtcacagctagcatattcacaaaga

SEQ ID NO: 2294603 - DNA, 25 bp, Homo sapien
tatggtattgctgaaactcttctga

SEQ ID NO: 2294604 - DNA, 25 bp, Homo sapien
cacatgagtagtgggtagtcacagc

SEQ ID NO: 2294605 - DNA, 25 bp, Homo sapien
catgatgaacttggatctcttcaca

SEQ ID NO: 2294606 - DNA, 25 bp, Homo sapien
tcaggtatacacgaaacataaagtc

SEQ ID NO: 2294607 - DNA, 25 bp, Homo sapien
ctgttcaggtatacacgaaacataa

SEQ ID NO: 2294608 - DNA, 25 bp, Homo sapien
aggtatacacgaaacataaagtctg

SEQ ID NO: 2294609 - DNA, 25 bp, Homo sapien
gttcaggtatacacgaaacataaag

SEQ ID NO: 2294610 - DNA, 25 bp, Homo sapien
gccagcacatgaagggtaaagatga

SEQ ID NO: 2294611 - DNA, 25 bp, Homo sapien
gggagaatgatattccagccatctt

SEQ ID NO: 2294612 - DNA, 25 bp, Homo sapien
tctaagggcagtccttgcaaggtct

SEQ ID NO: 2294613 - DNA, 25 bp, Homo sapien
aacagagaaccccagatacaagcac

SEQ ID NO: 2294614 - DNA, 25 bp, Homo sapien
taatgagttcagttggccccatcgt

SEQ ID NO: 2294615 - DNA, 25 bp, Homo sapien
gccattagtaccatcgaaggagtga

SEQ ID NO: 2294616 - DNA, 25 bp, Homo sapien
gaaatagtcggccagcgtgtatacc

SEQ ID NO: 2294617 - DNA, 25 bp, Homo sapien
gaaacacttgcattagctctggcag

SEQ ID NO: 2294618 - DNA, 25 bp, Homo sapien
aatgtacagatttttcccagtcgac

SEQ ID NO: 2294619 - DNA, 25 bp, Homo sapien
tacccggcttgactaattgattctg

SEQ ID NO: 2294620 - DNA, 25 bp, Homo sapien
aaaggagagcttgtgaatacccggc

SEQ ID NO: 2294621 - DNA, 25 bp, Homo sapien
ggctatatcctgcattactgagggc

SEQ ID NO: 2294622 - DNA, 25 bp, Homo sapien
gaaccagtcactaagaatatgcatc

SEQ ID NO: 2294623 - DNA, 25 bp, Homo sapien
aatatgcatcatagtttttgagccc

SEQ ID NO: 2294624 - DNA, 25 bp, Homo sapien
gaaagggacagttcagataagtcat

SEQ ID NO: 2294625 - DNA, 25 bp, Homo sapien
aatttagacacctcagaaagggaca

SEQ ID NO: 2294626 - DNA, 25 bp, Homo sapien
tgtgacgtggtctcaggtttctgag

SEQ ID NO: 2294627 - DNA, 25 bp, Homo sapien
ctgggtgtgacgtggtctcaggttt

SEQ ID NO: 2294628 - DNA, 25 bp, Homo sapien
ggtttctgagattcagaatgcagag

SEQ ID NO: 2294629 - DNA, 25 bp, Homo sapien
gaatgcagagcacatgttctcagca

SEQ ID NO: 2294630 - DNA, 25 bp, Homo sapien
ttttggcaaacagcctaaattctta

SEQ ID NO: 2294631 - DNA, 25 bp, Homo sapien
atcaaatctggtttaggggacttca

SEQ ID NO: 2294632 - DNA, 25 bp, Homo sapien
caaatctggtttaggggacttcaga

SEQ ID NO: 2294633 - DNA, 25 bp, Homo sapien
tttggcaaacagcctaaattcttaa

SEQ ID NO: 2294634 - DNA, 25 bp, Homo sapien
tctgggcccgaaggatactcattta

SEQ ID NO: 2294635 - DNA, 25 bp, Homo sapien
tggatggacatttccgtcaggcctc

SEQ ID NO: 2294636 - DNA, 25 bp, Homo sapien
tagtagacacgtacttgccagcaag

SEQ ID NO: 2294637 - DNA, 25 bp, Homo sapien
caattttgtattccggcagcatagc

SEQ ID NO: 2294638 - DNA, 25 bp, Homo sapien
cctcgggctacaagcagtccttcca

SEQ ID NO: 2294639 - DNA, 25 bp, Homo sapien
cagcatcgacccctcgggctacaag

SEQ ID NO: 2294640 - DNA, 25 bp, Homo sapien
actgcagcatcgacccctcgggcta

SEQ ID NO: 2294641 - DNA, 25 bp, Homo sapien
atcgacccctcgggctacaagcagt

SEQ ID NO: 2294642 - DNA, 25 bp, Homo sapien
tacagtgttgaatggaagtgatgag

SEQ ID NO: 2294643 - DNA, 25 bp, Homo sapien
catctttgttactgataagtaggga

SEQ ID NO: 2294644 - DNA, 25 bp, Homo sapien
tttttcataggtgtcctttatcttc

SEQ ID NO: 2294645 - DNA, 25 bp, Homo sapien
ggagaattcatccaatctttcacca

SEQ ID NO: 2294646 - DNA, 25 bp, Homo sapien
ctgtgcgctgactctccccgcccag

SEQ ID NO: 2294647 - DNA, 25 bp, Homo sapien
cagacactcccgactgtgcgctgac

SEQ ID NO: 2294648 - DNA, 25 bp, Homo sapien
tgtgcgctgactctccccgcccagc

SEQ ID NO: 2294649 - DNA, 25 bp, Homo sapien
gacactcccgactgtgcgctgactc

SEQ ID NO: 2294650 - DNA, 25 bp, Homo sapien
caaagtctcgcgagtttttccaggg

SEQ ID NO: 2294651 - DNA, 25 bp, Homo sapien
tgtggggcagaaccgaccactctcc

SEQ ID NO: 2294652 - DNA, 25 bp, Homo sapien
caggctttcgctcggcctctcgcaa

SEQ ID NO: 2294653 - DNA, 25 bp, Homo sapien
gatttctttcctcgcgttactgtgg

SEQ ID NO: 2294654 - DNA, 25 bp, Homo sapien
ctccgccgaccgcctccgaccggcg

SEQ ID NO: 2294655 - DNA, 25 bp, Homo sapien
gccgaccgcctccgaccggcgctcc

SEQ ID NO: 2294656 - DNA, 25 bp, Homo sapien
cgaccgcctccgaccggcgctcccg

SEQ ID NO: 2294657 - DNA, 25 bp, Homo sapien
ccgccgaccgcctccgaccggcgct

SEQ ID NO: 2294658 - DNA, 25 bp, Homo sapien
gaagccagtggcgttcaacgccatc

SEQ ID NO: 2294659 - DNA, 25 bp, Homo sapien
tcagctgtggcgatgcggactcaaa

SEQ ID NO: 2294660 - DNA, 25 bp, Homo sapien
tgcactcaagggaagagactccgcg

SEQ ID NO: 2294661 - DNA, 25 bp, Homo sapien
tcagcaagcagacgcagaatcggac

SEQ ID NO: 2294662 - DNA, 25 bp, Homo sapien
aaggcttttcattgaactttccgca

SEQ ID NO: 2294663 - DNA, 25 bp, Homo sapien
tttccgcaccgcatctccattaaga

SEQ ID NO: 2294664 - DNA, 25 bp, Homo sapien
tccattaagaggagctcggagtcgg

SEQ ID NO: 2294665 - DNA, 25 bp, Homo sapien
gttcaagaggcgcaaggcaccggcc

SEQ ID NO: 2294666 - DNA, 25 bp, Homo sapien
gaaatattgtggctactgatacacc

SEQ ID NO: 2294667 - DNA, 25 bp, Homo sapien
tctgctgctgataaaagagaaacca

SEQ ID NO: 2294668 - DNA, 25 bp, Homo sapien
aatgtttactgattggacacttctg

SEQ ID NO: 2294669 - DNA, 25 bp, Homo sapien
ctcctggcagaaggcttagaacatt

SEQ ID NO: 2294670 - DNA, 25 bp, Homo sapien
ggtgttggaagaactggacatctat

SEQ ID NO: 2294671 - DNA, 25 bp, Homo sapien
tcaaatcacttatccaactaaggac

SEQ ID NO: 2294672 - DNA, 25 bp, Homo sapien
ggtgcaaaggcaagtcaaaggagaa

SEQ ID NO: 2294673 - DNA, 25 bp, Homo sapien
tacttcaatcaaggtggcatagagc

SEQ ID NO: 2294674 - DNA, 25 bp, Homo sapien
gactggaagactcaacatagtaggg

SEQ ID NO: 2294675 - DNA, 25 bp, Homo sapien
gaaaaaccatacaggctggaaaaga

SEQ ID NO: 2294676 - DNA, 25 bp, Homo sapien
tacattggtgtaataaggctaggaa

SEQ ID NO: 2294677 - DNA, 25 bp, Homo sapien
ggatgtctgcagtcaccagtcctgt

SEQ ID NO: 2294678 - DNA, 25 bp, Homo sapien
ctttagcgtcggcaagtgccttctc

SEQ ID NO: 2294679 - DNA, 25 bp, Homo sapien
tctttcaacaagagctttagcgtcg

SEQ ID NO: 2294680 - DNA, 25 bp, Homo sapien
aagagctttagcgtcggcaagtgcc

SEQ ID NO: 2294681 - DNA, 25 bp, Homo sapien
caacaagagctttagcgtcggcaag

SEQ ID NO: 2294682 - DNA, 25 bp, Homo sapien
aagcttggcatagctgctttgggaa

SEQ ID NO: 2294683 - DNA, 25 bp, Homo sapien
atcggaagaagaattatcacgctgc

SEQ ID NO: 2294684 - DNA, 25 bp, Homo sapien
ttatcacgctgcacataaaatacac

SEQ ID NO: 2294685 - DNA, 25 bp, Homo sapien
cagccagcaagtcacaggtcggaca

SEQ ID NO: 2294686 - DNA, 25 bp, Homo sapien
tgtctcgcgacttcattaagttctt

SEQ ID NO: 2294687 - DNA, 25 bp, Homo sapien
gtctcgcgacttcattaagttcttg

SEQ ID NO: 2294688 - DNA, 25 bp, Homo sapien
gaccgtggccgatgtctcgcgactt

SEQ ID NO: 2294689 - DNA, 25 bp, Homo sapien
tcggtacttgctcattataagttcc

SEQ ID NO: 2294690 - DNA, 25 bp, Homo sapien
gtacttgctcattataagttccaag

SEQ ID NO: 2294691 - DNA, 25 bp, Homo sapien
gttctcggtacttgctcattataag

SEQ ID NO: 2294692 - DNA, 25 bp, Homo sapien
tctcggtacttgctcattataagtt

SEQ ID NO: 2294693 - DNA, 25 bp, Homo sapien
tgaacacagaataatcaatcgtctc

SEQ ID NO: 2294694 - DNA, 25 bp, Homo sapien
aataatcaatcgtctctcttttcca

SEQ ID NO: 2294695 - DNA, 25 bp, Homo sapien
tgttaaaatgccattactagatacc

SEQ ID NO: 2294696 - DNA, 25 bp, Homo sapien
agtttctaagaaacagtgagagttt

SEQ ID NO: 2294697 - DNA, 25 bp, Homo sapien
tattgttccctctagcgttccagta

SEQ ID NO: 2294698 - DNA, 25 bp, Homo sapien
tcatagttgctaccagatgggacct

SEQ ID NO: 2294699 - DNA, 25 bp, Homo sapien
catctactttgggattcatcacgcc

SEQ ID NO: 2294700 - DNA, 25 bp, Homo sapien
cattttatgggaggcaaggatcatc

SEQ ID NO: 2294701 - DNA, 25 bp, Homo sapien
gatttccaaaaaggcatctgttcaa

SEQ ID NO: 2294702 - DNA, 25 bp, Homo sapien
gtatttgggtaaaaatgagctctca

SEQ ID NO: 2294703 - DNA, 25 bp, Homo sapien
gagtgttagttcatgcgtgttagcc

SEQ ID NO: 2294704 - DNA, 25 bp, Homo sapien
tgagctctcaaactttctactgatt

SEQ ID NO: 2294705 - DNA, 25 bp, Homo sapien
tccagtccatgttgaggtgcttcaa

SEQ ID NO: 2294706 - DNA, 25 bp, Homo sapien
gacttgttacgatgtaccatgtcaa

SEQ ID NO: 2294707 - DNA, 25 bp, Homo sapien
tgcttcaaggatgtgtcgagatgca

SEQ ID NO: 2294708 - DNA, 25 bp, Homo sapien
gcatcaaggaagaatccttcggact

SEQ ID NO: 2294709 - DNA, 25 bp, Homo sapien
aatctgggagggaaattcaatgtaa

SEQ ID NO: 2294710 - DNA, 25 bp, Homo sapien
tttatttgctgatctaatctgggag

SEQ ID NO: 2294711 - DNA, 25 bp, Homo sapien
tctaatctgggagggaaattcaatg

SEQ ID NO: 2294712 - DNA, 25 bp, Homo sapien
atctaatctgggagggaaattcaat

SEQ ID NO: 2294713 - DNA, 25 bp, Homo sapien
gaagtgtcaccaacataacccttga

SEQ ID NO: 2294714 - DNA, 25 bp, Homo sapien
taggcgcagcaagtagcataaattc

SEQ ID NO: 2294715 - DNA, 25 bp, Homo sapien
gacatccacatttgttaggcgcagc

SEQ ID NO: 2294716 - DNA, 25 bp, Homo sapien
gacatgtcccctgatctgaagaagc

SEQ ID NO: 2294717 - DNA, 25 bp, Homo sapien
ctgttgctcgtcaatttcaatggct

SEQ ID NO: 2294718 - DNA, 25 bp, Homo sapien
atggctttcctcattactgctgcca

SEQ ID NO: 2294719 - DNA, 25 bp, Homo sapien
cagttatctggtcaacatgtgcttg

SEQ ID NO: 2294720 - DNA, 25 bp, Homo sapien
gttcttgttccttgcaaccctgttg

SEQ ID NO: 2294721 - DNA, 25 bp, Homo sapien
aagaagtactttccgacgcatcatc

SEQ ID NO: 2294722 - DNA, 25 bp, Homo sapien
gacgcatcatctttccttaggttca

SEQ ID NO: 2294723 - DNA, 25 bp, Homo sapien
aatgattctcgagttatttgaagga

SEQ ID NO: 2294724 - DNA, 25 bp, Homo sapien
aaatcactgttggtcactaatgctg

SEQ ID NO: 2294725 - DNA, 25 bp, Homo sapien
aatcctccgttcacaaaacagtggc

SEQ ID NO: 2294726 - DNA, 25 bp, Homo sapien
catgtaagaagctcacagactcaga

SEQ ID NO: 2294727 - DNA, 25 bp, Homo sapien
tagcccgtgcactgtacatatttac

SEQ ID NO: 2294728 - DNA, 25 bp, Homo sapien
aaatcttgcaggttatgaggaccag

SEQ ID NO: 2294729 - DNA, 25 bp, Homo sapien
tgcctcaatgaactgcctcagactt

SEQ ID NO: 2294730 - DNA, 25 bp, Homo sapien
ggttcctatgcagtacatacctcaa

SEQ ID NO: 2294731 - DNA, 25 bp, Homo sapien
aaatatcaaataaggcctctgactg

SEQ ID NO: 2294732 - DNA, 25 bp, Homo sapien
tatataatgtttgggccattagccc

SEQ ID NO: 2294733 - DNA, 25 bp, Homo sapien
catggtgaaaccccgtctctactaa

SEQ ID NO: 2294734 - DNA, 25 bp, Homo sapien
caacatggtgaaaccccgtctctac

SEQ ID NO: 2294735 - DNA, 25 bp, Homo sapien
aaaaataacgagccgggcatgatgg

SEQ ID NO: 2294736 - DNA, 25 bp, Homo sapien
aaataaaaataacgagccgggcatg

SEQ ID NO: 2294737 - DNA, 25 bp, Homo sapien
gacaccctgggttgcatacttacta

SEQ ID NO: 2294738 - DNA, 25 bp, Homo sapien
tgtttcaccacaagaaagcacccga

SEQ ID NO: 2294739 - DNA, 25 bp, Homo sapien
cacactattttggagggaggatact

SEQ ID NO: 2294740 - DNA, 25 bp, Homo sapien
tattgtgagctggtgactctgcagg

SEQ ID NO: 2294741 - DNA, 25 bp, Homo sapien
gtagaatatatactactacaccctg

SEQ ID NO: 2294742 - DNA, 25 bp, Homo sapien
gcattagatgacatatggattactt

SEQ ID NO: 2294743 - DNA, 25 bp, Homo sapien
tctatattgccgaccaggtgcggtg

SEQ ID NO: 2294744 - DNA, 25 bp, Homo sapien
catagtggtctctactatagtatag

SEQ ID NO: 2294745 - DNA, 25 bp, Homo sapien
tcggagggagtttattattgagtct

SEQ ID NO: 2294746 - DNA, 25 bp, Homo sapien
gagcctgtctaaactttcggaggga

SEQ ID NO: 2294747 - DNA, 25 bp, Homo sapien
tctatgatcaacttattccattaaa

SEQ ID NO: 2294748 - DNA, 25 bp, Homo sapien
agggatttgatacttaggcctttga

SEQ ID NO: 2294749 - DNA, 25 bp, Homo sapien
tggaagagcttggactattccagtg

SEQ ID NO: 2294750 - DNA, 25 bp, Homo sapien
gatttagagcttggagatataattc

SEQ ID NO: 2294751 - DNA, 25 bp, Homo sapien
gagcttggactattccagtgtcttc

SEQ ID NO: 2294752 - DNA, 25 bp, Homo sapien
tcacagagctagtgaatggaagagc

SEQ ID NO: 2294753 - DNA, 25 bp, Homo sapien
caaggaccgttagagtgatcatctc

SEQ ID NO: 2294754 - DNA, 25 bp, Homo sapien
gaactatctcatagctcaaggaccg

SEQ ID NO: 2294755 - DNA, 25 bp, Homo sapien
taaagtagtctagagcagttgtctc

SEQ ID NO: 2294756 - DNA, 25 bp, Homo sapien
taggcttggcgaaatgacagattca

SEQ ID NO: 2294757 - DNA, 25 bp, Homo sapien
ctatcttcatagatttgtagctggg

SEQ ID NO: 2294758 - DNA, 25 bp, Homo sapien
gggtcttgtagtcgtgagtctactg

SEQ ID NO: 2294759 - DNA, 25 bp, Homo sapien
tagtcgtgagtctactgagttgcaa

SEQ ID NO: 2294760 - DNA, 25 bp, Homo sapien
tctactatcttcatagatttgtagc

SEQ ID NO: 2294761 - DNA, 25 bp, Homo sapien
attctggaaaacaggtattatgtcc

SEQ ID NO: 2294762 - DNA, 25 bp, Homo sapien
ttgcagtcttttcagtgttgctggg

SEQ ID NO: 2294763 - DNA, 25 bp, Homo sapien
gtttctttggacacagattctggaa

SEQ ID NO: 2294764 - DNA, 25 bp, Homo sapien
tatgtccaatgtagttgctatttcc

SEQ ID NO: 2294765 - DNA, 25 bp, Homo sapien
tccttagaccagagcagagtacatg

SEQ ID NO: 2294766 - DNA, 25 bp, Homo sapien
gacaatgtttcttctggactgcaga

SEQ ID NO: 2294767 - DNA, 25 bp, Homo sapien
tccaattcctcggaaacaggcactg

SEQ ID NO: 2294768 - DNA, 25 bp, Homo sapien
taggacatgcacactggatcagctc

SEQ ID NO: 2294769 - DNA, 25 bp, Homo sapien
cctttagggctattgaacatttgta

SEQ ID NO: 2294770 - DNA, 25 bp, Homo sapien
gcacagcatcatttgggcctttcag

SEQ ID NO: 2294771 - DNA, 25 bp, Homo sapien
ggcggttgactgctgaccaactcaa

SEQ ID NO: 2294772 - DNA, 25 bp, Homo sapien
caggctgttcatggttagttgcaag

SEQ ID NO: 2294773 - DNA, 25 bp, Homo sapien
aagctgcatggaatttttacacccc

SEQ ID NO: 2294774 - DNA, 25 bp, Homo sapien
caaatctagaggcttttcaaactgg

SEQ ID NO: 2294775 - DNA, 25 bp, Homo sapien
tgactgatggctctcaagctgcatg

SEQ ID NO: 2294776 - DNA, 25 bp, Homo sapien
gaactagcggcttaatgactgatgg

SEQ ID NO: 2294777 - DNA, 25 bp, Homo sapien
gctcttccgcgactgggcagctctg

SEQ ID NO: 2294778 - DNA, 25 bp, Homo sapien
gcaaacagacgccaaaacagctgct

SEQ ID NO: 2294779 - DNA, 25 bp, Homo sapien
cgcagcaaacagacgccaaaacagc

SEQ ID NO: 2294780 - DNA, 25 bp, Homo sapien
caaaacagctgctcttccgcgactg

SEQ ID NO: 2294781 - DNA, 25 bp, Homo sapien
gcgtcctgaagctgcgtgagccgat

SEQ ID NO: 2294782 - DNA, 25 bp, Homo sapien
acagcgtcctgaagctgcgtgagcc

SEQ ID NO: 2294783 - DNA, 25 bp, Homo sapien
tcacagcgtcctgaagctgcgtgag

SEQ ID NO: 2294784 - DNA, 25 bp, Homo sapien
attcacagcgtcctgaagctgcgtg

SEQ ID NO: 2294785 - DNA, 25 bp, Homo sapien
aaagacagaggctaatcgaatgaaa

SEQ ID NO: 2294786 - DNA, 25 bp, Homo sapien
aagagaaagacagaggctaatcgaa

SEQ ID NO: 2294787 - DNA, 25 bp, Homo sapien
gacagaggctaatcgaatgaaattc

SEQ ID NO: 2294788 - DNA, 25 bp, Homo sapien
aggctaatcgaatgaaattcctcac

SEQ ID NO: 2294789 - DNA, 25 bp, Homo sapien
tcaaacctccgagttcgcggtggcg

SEQ ID NO: 2294790 - DNA, 25 bp, Homo sapien
cagtccgctccccactttcaagttt

SEQ ID NO: 2294791 - DNA, 25 bp, Homo sapien
tctcctcaagcgaaagagtctgctc

SEQ ID NO: 2294792 - DNA, 25 bp, Homo sapien
tatgccgaagccctgtctctcagtc

SEQ ID NO: 2294793 - DNA, 25 bp, Homo sapien
aatggcaacaacaataagtttctgt

SEQ ID NO: 2294794 - DNA, 25 bp, Homo sapien
agaaaacatatcaaggttagaaagg

SEQ ID NO: 2294795 - DNA, 25 bp, Homo sapien
aagaaaacatatcaaggttagaaag

SEQ ID NO: 2294796 - DNA, 25 bp, Homo sapien
gaaaacatatcaaggttagaaagga

SEQ ID NO: 2294797 - DNA, 25 bp, Homo sapien
acattgctgcaatactccaatggca

SEQ ID NO: 2294798 - DNA, 25 bp, Homo sapien
attgctgcaatactccaatggcatt

SEQ ID NO: 2294799 - DNA, 25 bp, Homo sapien
accacattgctgcaatactccaatg

SEQ ID NO: 2294800 - DNA, 25 bp, Homo sapien
cacattgctgcaatactccaatggc

SEQ ID NO: 2294801 - DNA, 25 bp, Homo sapien
tcgtgcaatcagtgctgcaaaaagc

SEQ ID NO: 2294802 - DNA, 25 bp, Homo sapien
tgttcgtgcaatcagtgctgcaaaa

SEQ ID NO: 2294803 - DNA, 25 bp, Homo sapien
tgcaatcagtgctgcaaaaagctgg

SEQ ID NO: 2294804 - DNA, 25 bp, Homo sapien
tgctgttcgtgcaatcagtgctgca

SEQ ID NO: 2294805 - DNA, 25 bp, Homo sapien
agcaagtgcgctttgtatcttctcc

SEQ ID NO: 2294806 - DNA, 25 bp, Homo sapien
tctccagaagcatgtctcctcgata

SEQ ID NO: 2294807 - DNA, 25 bp, Homo sapien
tccagaagcatgtctcctcgataaa

SEQ ID NO: 2294808 - DNA, 25 bp, Homo sapien
ctcctcgataaacaacatcctccag

SEQ ID NO: 2294809 - DNA, 25 bp, Homo sapien
ctatgagtctggaagagactggcta

SEQ ID NO: 2294810 - DNA, 25 bp, Homo sapien
atgagtctggaagagactggctatg

SEQ ID NO: 2294811 - DNA, 25 bp, Homo sapien
agtctggaagagactggctatgggt

SEQ ID NO: 2294812 - DNA, 25 bp, Homo sapien
tctggaagagactggctatgggtac

SEQ ID NO: 2294813 - DNA, 25 bp, Homo sapien
tgttggtaaggcttgtatctaagtc

SEQ ID NO: 2294814 - DNA, 25 bp, Homo sapien
tatctaagtctgatgcagaattctt

SEQ ID NO: 2294815 - DNA, 25 bp, Homo sapien
aaggcttgtatctaagtctgatgca

SEQ ID NO: 2294816 - DNA, 25 bp, Homo sapien
tctgatgcagaattcttaatggcac

SEQ ID NO: 2294817 - DNA, 25 bp, Homo sapien
aaaatgatggtatgatgctttaaag

SEQ ID NO: 2294818 - DNA, 25 bp, Homo sapien
ttaaaaaatgatggtatgatgcttt

SEQ ID NO: 2294819 - DNA, 25 bp, Homo sapien
taaagctgattcaatcatgatttta

SEQ ID NO: 2294820 - DNA, 25 bp, Homo sapien
gttcattaatgtattacatgcctta

SEQ ID NO: 2294821 - DNA, 25 bp, Homo sapien
gaaaaattctttcacaacagccagg

SEQ ID NO: 2294822 - DNA, 25 bp, Homo sapien
acagctaacgctggtgttcctgaaa

SEQ ID NO: 2294823 - DNA, 25 bp, Homo sapien
cagattgcagcaaatgtagctcagc

SEQ ID NO: 2294824 - DNA, 25 bp, Homo sapien
tccagtggagattatcagtagactc

SEQ ID NO: 2294825 - DNA, 25 bp, Homo sapien
tgaagagtacagatttatgccaaat

SEQ ID NO: 2294826 - DNA, 25 bp, Homo sapien
tgtttctcgttcctgggttacctga

SEQ ID NO: 2294827 - DNA, 25 bp, Homo sapien
ggaaaaatctgtgtcgctctaggga

SEQ ID NO: 2294828 - DNA, 25 bp, Homo sapien
cagagaatcacatacaacaacgtta

SEQ ID NO: 2294829 - DNA, 25 bp, Homo sapien
ggtcctctcaaagctgggtaccagg

SEQ ID NO: 2294830 - DNA, 25 bp, Homo sapien
tgacatgttttgctaccagaagtgg

SEQ ID NO: 2294831 - DNA, 25 bp, Homo sapien
aaaaatcatcggcaggaggtaccat

SEQ ID NO: 2294832 - DNA, 25 bp, Homo sapien
tggctgacctggacttaactggcac

SEQ ID NO: 2294833 - DNA, 25 bp, Homo sapien
tgacgttaatgggacagctgagcag

SEQ ID NO: 2294834 - DNA, 25 bp, Homo sapien
ctcaatgggactattcttgctggca

SEQ ID NO: 2294835 - DNA, 25 bp, Homo sapien
tcaggctgaaggtggatcaaagtcc

SEQ ID NO: 2294836 - DNA, 25 bp, Homo sapien
tctcttacagggaggaataaacagg

SEQ ID NO: 2294837 - DNA, 25 bp, Homo sapien
gctgtcttggccgaataccacaagt

SEQ ID NO: 2294838 - DNA, 25 bp, Homo sapien
catacgaatgatgatgggtcgagcc

SEQ ID NO: 2294839 - DNA, 25 bp, Homo sapien
tagtacctctaaagaggcccaagag

SEQ ID NO: 2294840 - DNA, 25 bp, Homo sapien
tcacagtaaatgagtgcctctgctc

SEQ ID NO: 2294841 - DNA, 25 bp, Homo sapien
tctctaggcttggtggctagaaggt

SEQ ID NO: 2294842 - DNA, 25 bp, Homo sapien
tttgacaagagctttatactttctg

SEQ ID NO: 2294843 - DNA, 25 bp, Homo sapien
tctcattaataaaactctctaggct

SEQ ID NO: 2294844 - DNA, 25 bp, Homo sapien
tatttagcaaaactcacaactcact

SEQ ID NO: 2294845 - DNA, 25 bp, Homo sapien
aaaggaacccacatctccaagtcaa

SEQ ID NO: 2294846 - DNA, 25 bp, Homo sapien
ctaagccaaaagaacaaagctggag

SEQ ID NO: 2294847 - DNA, 25 bp, Homo sapien
aggaacccacatctccaagtcaatc

SEQ ID NO: 2294848 - DNA, 25 bp, Homo sapien
ccaaaaaggaacccacatctccaag

SEQ ID NO: 2294849 - DNA, 25 bp, Homo sapien
tccctattgagagactggtgtacag

SEQ ID NO: 2294850 - DNA, 25 bp, Homo sapien
tgagaatcaccagcttaaagatgag

SEQ ID NO: 2294851 - DNA, 25 bp, Homo sapien
ttttctaaagacagaactgccatgc

SEQ ID NO: 2294852 - DNA, 25 bp, Homo sapien
ctgtcttattcccaagctgaaaggg

SEQ ID NO: 2294853 - DNA, 25 bp, Homo sapien
gcctgtgtggcaaagcgagaccctg

SEQ ID NO: 2294854 - DNA, 25 bp, Homo sapien
ccagcctgtgtggcaaagcgagacc

SEQ ID NO: 2294855 - DNA, 25 bp, Homo sapien
tgagctatgactgtgccattgcact

SEQ ID NO: 2294856 - DNA, 25 bp, Homo sapien
caaatgtggaaggctgaggttgcag

SEQ ID NO: 2294857 - DNA, 25 bp, Homo sapien
ctgtagataaagtaactgtactcat

SEQ ID NO: 2294858 - DNA, 25 bp, Homo sapien
tgcctctggatgctaactctcaggc

SEQ ID NO: 2294859 - DNA, 25 bp, Homo sapien
tgctgcctctggatgctaactctca

SEQ ID NO: 2294860 - DNA, 25 bp, Homo sapien
gctgcctctggatgctaactctcag

SEQ ID NO: 2294861 - DNA, 25 bp, Homo sapien
ctctggatgctaactctcaggcctc

SEQ ID NO: 2294862 - DNA, 25 bp, Homo sapien
gagccattggtgtaggatgttctgc

SEQ ID NO: 2294863 - DNA, 25 bp, Homo sapien
gacagacaaagcacagccaagatcc

SEQ ID NO: 2294864 - DNA, 25 bp, Homo sapien
gtaggatgttctgctggcaatgatc

SEQ ID NO: 2294865 - DNA, 25 bp, Homo sapien
caaacttaggcatgaagctagacag

SEQ ID NO: 2294866 - DNA, 25 bp, Homo sapien
tcaacagtaagagggcaagattacg

SEQ ID NO: 2294867 - DNA, 25 bp, Homo sapien
ctatcccgatccctacagcttcttt

SEQ ID NO: 2294868 - DNA, 25 bp, Homo sapien
aggccctatcccgatccctacagct

SEQ ID NO: 2294869 - DNA, 25 bp, Homo sapien
agtaagagggcaagattacggtgca

SEQ ID NO: 2294870 - DNA, 25 bp, Homo sapien
caaatcttggatgtatttagcaagc

SEQ ID NO: 2294871 - DNA, 25 bp, Homo sapien
gaaccatggccagaagttacttcac

SEQ ID NO: 2294872 - DNA, 25 bp, Homo sapien
ttagcaagctaatccacacaagttc

SEQ ID NO: 2294873 - DNA, 25 bp, Homo sapien
cactgagaggtaattgcaggcttta

SEQ ID NO: 2294874 - DNA, 25 bp, Homo sapien
catctggtccatgccccttggttgg

SEQ ID NO: 2294875 - DNA, 25 bp, Homo sapien
cagcataccggttgctcctggagca

SEQ ID NO: 2294876 - DNA, 25 bp, Homo sapien
tgttagatagctcatggacacagag

SEQ ID NO: 2294877 - DNA, 25 bp, Homo sapien
gcataaggtccctcagcaaagagct

SEQ ID NO: 2294878 - DNA, 25 bp, Homo sapien
catcacacccggctaattttgtatt

SEQ ID NO: 2294879 - DNA, 25 bp, Homo sapien
cacccgccacaacaccccgctattt

SEQ ID NO: 2294880 - DNA, 25 bp, Homo sapien
cgctatttttttgtattttcagtag

SEQ ID NO: 2294881 - DNA, 25 bp, Homo sapien
ggcacccgccacaacaccccgctat

SEQ ID NO: 2294882 - DNA, 25 bp, Homo sapien
gcttctgtctagatccaacccatac

SEQ ID NO: 2294883 - DNA, 25 bp, Homo sapien
taccacatctagtgacatctgccat

SEQ ID NO: 2294884 - DNA, 25 bp, Homo sapien
tttgacttcaccaagatttggagtc

SEQ ID NO: 2294885 - DNA, 25 bp, Homo sapien
gatttggagtcctatcaccacacct

SEQ ID NO: 2294886 - DNA, 25 bp, Homo sapien
tcctcaatttcaattctgtatccct

SEQ ID NO: 2294887 - DNA, 25 bp, Homo sapien
gcaaagcatatgactcttcagtttc

SEQ ID NO: 2294888 - DNA, 25 bp, Homo sapien
tcagagtttacgtggcaaagcatat

SEQ ID NO: 2294889 - DNA, 25 bp, Homo sapien
tacgtggcaaagcatatgactcttc

SEQ ID NO: 2294890 - DNA, 25 bp, Homo sapien
ataagatcgcagttctcggatggga

SEQ ID NO: 2294891 - DNA, 25 bp, Homo sapien
tgctgaatataagatcgcagttctc

SEQ ID NO: 2294892 - DNA, 25 bp, Homo sapien
cgcagttctcggatgggaacagcag

SEQ ID NO: 2294893 - DNA, 25 bp, Homo sapien
gatcgcagttctcggatgggaacag

SEQ ID NO: 2294894 - DNA, 25 bp, Homo sapien
ttcttatttgtcaggggcaaattcc

SEQ ID NO: 2294895 - DNA, 25 bp, Homo sapien
gtcaggggcaaattccaacccagat

SEQ ID NO: 2294896 - DNA, 25 bp, Homo sapien
ttgtcaggggcaaattccaacccag

SEQ ID NO: 2294897 - DNA, 25 bp, Homo sapien
tatttgtcaggggcaaattccaacc

SEQ ID NO: 2294898 - DNA, 25 bp, Homo sapien
aacgtcgcagccaatatgtcacttg

SEQ ID NO: 2294899 - DNA, 25 bp, Homo sapien
gctccaacgtcgcagccaatatgtc

SEQ ID NO: 2294900 - DNA, 25 bp, Homo sapien
tccaacgtcgcagccaatatgtcac

SEQ ID NO: 2294901 - DNA, 25 bp, Homo sapien
ctgctccaacgtcgcagccaatatg

SEQ ID NO: 2294902 - DNA, 25 bp, Homo sapien
gcatttctactgttgaatctgggaa

SEQ ID NO: 2294903 - DNA, 25 bp, Homo sapien
tactgttgaatctgggaactggcag

SEQ ID NO: 2294904 - DNA, 25 bp, Homo sapien
gactttgaaaccattcaattagcat

SEQ ID NO: 2294905 - DNA, 25 bp, Homo sapien
gaactggcagctcaagtcttctttc

SEQ ID NO: 2294906 - DNA, 25 bp, Homo sapien
ccccactaaaggatagattgtacta

SEQ ID NO: 2294907 - DNA, 25 bp, Homo sapien
accaggtgggaacacagagtattca

SEQ ID NO: 2294908 - DNA, 25 bp, Homo sapien
gaaagtataatagtaaggcattatg

SEQ ID NO: 2294909 - DNA, 25 bp, Homo sapien
tattcgctctcagaaacgcagaggt

SEQ ID NO: 2294910 - DNA, 25 bp, Homo sapien
gcctctgggtgtgggatagaaatac

SEQ ID NO: 2294911 - DNA, 25 bp, Homo sapien
gaactacaggtacgcttcggctact

SEQ ID NO: 2294912 - DNA, 25 bp, Homo sapien
cactgcatgctaaatggtcagaaga

SEQ ID NO: 2294913 - DNA, 25 bp, Homo sapien
tactttcacagaacagattaagcac

SEQ ID NO: 2294914 - DNA, 25 bp, Homo sapien
ctggtttgccaaggcctgagaaaat

SEQ ID NO: 2294915 - DNA, 25 bp, Homo sapien
gtttgccaaggcctgagaaaatatt

SEQ ID NO: 2294916 - DNA, 25 bp, Homo sapien
ggtttgccaaggcctgagaaaatat

SEQ ID NO: 2294917 - DNA, 25 bp, Homo sapien
ttgccaaggcctgagaaaatatttc

SEQ ID NO: 2294918 - DNA, 25 bp, Homo sapien
cctttcttgatacacatctccgttc

SEQ ID NO: 2294919 - DNA, 25 bp, Homo sapien
cagcctttcttgatacacatctccg

SEQ ID NO: 2294920 - DNA, 25 bp, Homo sapien
tttcttgatacacatctccgttccc

SEQ ID NO: 2294921 - DNA, 25 bp, Homo sapien
gcctttcttgatacacatctccgtt

SEQ ID NO: 2294922 - DNA, 25 bp, Homo sapien
tttcttctgtggcattcaccttctc

SEQ ID NO: 2294923 - DNA, 25 bp, Homo sapien
aaatctctaatcttctctccctcat

SEQ ID NO: 2294924 - DNA, 25 bp, Homo sapien
tgtgctcttcaagacaaaactccaa

SEQ ID NO: 2294925 - DNA, 25 bp, Homo sapien
gacaaaactccaaatctctaatctt

SEQ ID NO: 2294926 - DNA, 25 bp, Homo sapien
tattccaatcaatagaagaaggggg

SEQ ID NO: 2294927 - DNA, 25 bp, Homo sapien
ttccaatcaatagaagaagggggaa

SEQ ID NO: 2294928 - DNA, 25 bp, Homo sapien
ccaatcaatagaagaagggggaatc

SEQ ID NO: 2294929 - DNA, 25 bp, Homo sapien
tcaatagaagaagggggaatcctcc

SEQ ID NO: 2294930 - DNA, 25 bp, Homo sapien
gccatcagatccaacttctgagttt

SEQ ID NO: 2294931 - DNA, 25 bp, Homo sapien
cttcaagttagatatttcagccatc

SEQ ID NO: 2294932 - DNA, 25 bp, Homo sapien
tcagccatcagatccaacttctgag

SEQ ID NO: 2294933 - DNA, 25 bp, Homo sapien
aacttcaagttagatatttcagcca

SEQ ID NO: 2294934 - DNA, 25 bp, Homo sapien
cctcaaatcattgatctcctgaatc

SEQ ID NO: 2294935 - DNA, 25 bp, Homo sapien
taacctcaaatcattgatctcctga

SEQ ID NO: 2294936 - DNA, 25 bp, Homo sapien
tcactaacttttaacctcaaatcat

SEQ ID NO: 2294937 - DNA, 25 bp, Homo sapien
ttcactaacttttaacctcaaatca

SEQ ID NO: 2294938 - DNA, 25 bp, Homo sapien
agagagacagaggagtgaaagaaaa

SEQ ID NO: 2294939 - DNA, 25 bp, Homo sapien
cagagagacagaggagtgaaagaaa

SEQ ID NO: 2294940 - DNA, 25 bp, Homo sapien
gcagagagacagaggagtgaaagaa

SEQ ID NO: 2294941 - DNA, 25 bp, Homo sapien
ggcagagagacagaggagtgaaaga

SEQ ID NO: 2294942 - DNA, 25 bp, Homo sapien
ccttgattttcatgctagaaagttt

SEQ ID NO: 2294943 - DNA, 25 bp, Homo sapien
accttgattttcatgctagaaagtt

SEQ ID NO: 2294944 - DNA, 25 bp, Homo sapien
ttcttgtagcctttttacttcagat

SEQ ID NO: 2294945 - DNA, 25 bp, Homo sapien
ttgtagcctttttacttcagattcc

SEQ ID NO: 2294946 - DNA, 25 bp, Homo sapien
cttgtagcctttttacttcagattc

SEQ ID NO: 2294947 - DNA, 25 bp, Homo sapien
tgtagcctttttacttcagattcct

SEQ ID NO: 2294948 - DNA, 25 bp, Homo sapien
ctgtcttcactgaattgcacttcct

SEQ ID NO: 2294949 - DNA, 25 bp, Homo sapien
ttttaaagggtgattgttctgtcat

SEQ ID NO: 2294950 - DNA, 25 bp, Homo sapien
tgtcatttccagattgaagacaatc

SEQ ID NO: 2294951 - DNA, 25 bp, Homo sapien
cactgaattgcacttccttatttta

SEQ ID NO: 2294952 - DNA, 25 bp, Homo sapien
gaattaaggctgtcacatactgaag

SEQ ID NO: 2294953 - DNA, 25 bp, Homo sapien
gaaacaactttccatcagactcgaa

SEQ ID NO: 2294954 - DNA, 25 bp, Homo sapien
catactgaagggctagctggcttag

SEQ ID NO: 2294955 - DNA, 25 bp, Homo sapien
tcaaaactgctcgataagaggaaac

SEQ ID NO: 2294956 - DNA, 25 bp, Homo sapien
tagaatatgttaaggctgcctaagg

SEQ ID NO: 2294957 - DNA, 25 bp, Homo sapien
ggccagtggaagcagtaaagactta

SEQ ID NO: 2294958 - DNA, 25 bp, Homo sapien
aaattctgtaaaccctgagtagcta

SEQ ID NO: 2294959 - DNA, 25 bp, Homo sapien
caactctagtgaagacaacggaagg

SEQ ID NO: 2294960 - DNA, 25 bp, Homo sapien
ctcacacatttttcacgtattagaa

SEQ ID NO: 2294961 - DNA, 25 bp, Homo sapien
ggaattcccactggattattgaaaa

SEQ ID NO: 2294962 - DNA, 25 bp, Homo sapien
agctctcttgcttctaagaggaatt

SEQ ID NO: 2294963 - DNA, 25 bp, Homo sapien
gctaagtctgtgcaatcatcttctc

SEQ ID NO: 2294964 - DNA, 25 bp, Homo sapien
cctctctcatactaagaatcataaa

SEQ ID NO: 2294965 - DNA, 25 bp, Homo sapien
ttcctctctcatactaagaatcata

SEQ ID NO: 2294966 - DNA, 25 bp, Homo sapien
tcctctctcatactaagaatcataa

SEQ ID NO: 2294967 - DNA, 25 bp, Homo sapien
tgtgataattctgggcccggctttt

SEQ ID NO: 2294968 - DNA, 25 bp, Homo sapien
tcagctgccaagctacgaagagacc

SEQ ID NO: 2294969 - DNA, 25 bp, Homo sapien
gaggactggaaacttctaattcttc

SEQ ID NO: 2294970 - DNA, 25 bp, Homo sapien
taggcctgagactgatttgaccaat

SEQ ID NO: 2294971 - DNA, 25 bp, Homo sapien
atggcaactactatggatgtcaagg

SEQ ID NO: 2294972 - DNA, 25 bp, Homo sapien
tcatgacctgccctgtagagcaaag

SEQ ID NO: 2294973 - DNA, 25 bp, Homo sapien
tacacataaaggagaccagatcagc

SEQ ID NO: 2294974 - DNA, 25 bp, Homo sapien
caagtcagattctaagggtcagcag

SEQ ID NO: 2294975 - DNA, 25 bp, Homo sapien
gaaggctgttatctgtccagtcgac

SEQ ID NO: 2294976 - DNA, 25 bp, Homo sapien
caattattgataccttgaggcccat

SEQ ID NO: 2294977 - DNA, 25 bp, Homo sapien
gaatatataaacacagagagatggc

SEQ ID NO: 2294978 - DNA, 25 bp, Homo sapien
gtaattgcgggtttcaaaagctgaa

SEQ ID NO: 2294979 - DNA, 25 bp, Homo sapien
taagtaaattgtggtctaagcatcc

SEQ ID NO: 2294980 - DNA, 25 bp, Homo sapien
caattgaaaacttctgtgtggcaaa

SEQ ID NO: 2294981 - DNA, 25 bp, Homo sapien
aatattaacaatactgtccaaaggc

SEQ ID NO: 2294982 - DNA, 25 bp, Homo sapien
agaaaataatgggtataagtcacag

SEQ ID NO: 2294983 - DNA, 25 bp, Homo sapien
tccacacaataataaaagagcttac

SEQ ID NO: 2294984 - DNA, 25 bp, Homo sapien
actcattggtcagtgggcccttagg

SEQ ID NO: 2294985 - DNA, 25 bp, Homo sapien
cccatagaggttgtcctgatttata

SEQ ID NO: 2294986 - DNA, 25 bp, Homo sapien
gatacccagtgttgggaatgctgga

SEQ ID NO: 2294987 - DNA, 25 bp, Homo sapien
catacaagggcaggtatctttgata

SEQ ID NO: 2294988 - DNA, 25 bp, Homo sapien
tttccccgatgctttctttgcccaa

SEQ ID NO: 2294989 - DNA, 25 bp, Homo sapien
caaacagccgtggatggttggagat

SEQ ID NO: 2294990 - DNA, 25 bp, Homo sapien
ctttgcccaaacagccgtggatggt

SEQ ID NO: 2294991 - DNA, 25 bp, Homo sapien
ccgtggatggttggagatcttctct

SEQ ID NO: 2294992 - DNA, 25 bp, Homo sapien
aatatgtgtgattcctattgaggaa

SEQ ID NO: 2294993 - DNA, 25 bp, Homo sapien
tgtgattcctattgaggaaaagtca

SEQ ID NO: 2294994 - DNA, 25 bp, Homo sapien
aaaatatgtgtgattcctattgagg

SEQ ID NO: 2294995 - DNA, 25 bp, Homo sapien
tatgtgtgattcctattgaggaaaa

SEQ ID NO: 2294996 - DNA, 25 bp, Homo sapien
cctccctgaactctcgcgagccttg

SEQ ID NO: 2294997 - DNA, 25 bp, Homo sapien
tcgccggaatctcagggcggcctcc

SEQ ID NO: 2294998 - DNA, 25 bp, Homo sapien
cctcgccggaatctcagggcggcct

SEQ ID NO: 2294999 - DNA, 25 bp, Homo sapien
ttgcctcctcggcttctcggtggct

SEQ ID NO: 2295000 - DNA, 25 bp, Homo sapien
ctgcctccggtcgcgcccgcggccg

SEQ ID NO: 2295001 - DNA, 25 bp, Homo sapien
gctcagcctccgcacggaccgcagc

SEQ ID NO: 2295002 - DNA, 25 bp, Homo sapien
agcctccgcacggaccgcagccggc

SEQ ID NO: 2295003 - DNA, 25 bp, Homo sapien
gcacggaccgcagccggccgggcgc

SEQ ID NO: 2295004 - DNA, 25 bp, Homo sapien
tctaaacacatcacaaccaaatggg

SEQ ID NO: 2295005 - DNA, 25 bp, Homo sapien
caaactcaagagcaaatggctagag

SEQ ID NO: 2295006 - DNA, 25 bp, Homo sapien
ttcattcctagtggcaaggcctttc

SEQ ID NO: 2295007 - DNA, 25 bp, Homo sapien
caaagctaagtgaggtcaaaccaaa

SEQ ID NO: 2295008 - DNA, 25 bp, Homo sapien
gagggccacaccagattgaatattg

SEQ ID NO: 2295009 - DNA, 25 bp, Homo sapien
cttcagtagctgacctaaatcctgg

SEQ ID NO: 2295010 - DNA, 25 bp, Homo sapien
tccagtaagaggtacccagatatcc

SEQ ID NO: 2295011 - DNA, 25 bp, Homo sapien
cactgttagggtaatggcggactga

SEQ ID NO: 2295012 - DNA, 25 bp, Homo sapien
gaagagacccaaatagtaggagaca

SEQ ID NO: 2295013 - DNA, 25 bp, Homo sapien
gctgactttagctactttgccaagg

SEQ ID NO: 2295014 - DNA, 25 bp, Homo sapien
tcagggtgaccaaataaagacaaac

SEQ ID NO: 2295015 - DNA, 25 bp, Homo sapien
tgatttaaactatccagcctcagct

SEQ ID NO: 2295016 - DNA, 25 bp, Homo sapien
tgccagtgtctcagggcaatcaaat

SEQ ID NO: 2295017 - DNA, 25 bp, Homo sapien
gctgccagtgtctcagggcaatcaa

SEQ ID NO: 2295018 - DNA, 25 bp, Homo sapien
ctcagctgccagtgtctcagggcaa

SEQ ID NO: 2295019 - DNA, 25 bp, Homo sapien
cagctgccagtgtctcagggcaatc

SEQ ID NO: 2295020 - DNA, 25 bp, Homo sapien
gagaaagatgtatgttgaacttggg

SEQ ID NO: 2295021 - DNA, 25 bp, Homo sapien
cttggagggagctgactgtctgcca

SEQ ID NO: 2295022 - DNA, 25 bp, Homo sapien
ctgttcacagttatgcttgcagaaa

SEQ ID NO: 2295023 - DNA, 25 bp, Homo sapien
aaggggccttgtcgagcaggctgcc

SEQ ID NO: 2295024 - DNA, 25 bp, Homo sapien
agttatatccactgcaggatatgtc

SEQ ID NO: 2295025 - DNA, 25 bp, Homo sapien
ggatatgtctctgcaggaatctgct

SEQ ID NO: 2295026 - DNA, 25 bp, Homo sapien
aagctcttccatgacctatccctga

SEQ ID NO: 2295027 - DNA, 25 bp, Homo sapien
tccctgaagcagttatatccactgc

SEQ ID NO: 2295028 - DNA, 25 bp, Homo sapien
actctttcccgggtatggttgctca

SEQ ID NO: 2295029 - DNA, 25 bp, Homo sapien
ctctctcttcatgctgtaaaattag

SEQ ID NO: 2295030 - DNA, 25 bp, Homo sapien
ggttgttgtagtccctgccgtcatt

SEQ ID NO: 2295031 - DNA, 25 bp, Homo sapien
tctccaatgtgagcttggctacagt

SEQ ID NO: 2295032 - DNA, 25 bp, Homo sapien
ggtatatagatgcacaagacttggg

SEQ ID NO: 2295033 - DNA, 25 bp, Homo sapien
ggcacctcaggaaactactctgtga

SEQ ID NO: 2295034 - DNA, 25 bp, Homo sapien
tgtgcactgtcagtacaggaaactc

SEQ ID NO: 2295035 - DNA, 25 bp, Homo sapien
agcatgcagggatccataatattca

SEQ ID NO: 2295036 - DNA, 25 bp, Homo sapien
taccatatctaaacaggaagatcca

SEQ ID NO: 2295037 - DNA, 25 bp, Homo sapien
ctcattctggaagagatacagtaac

SEQ ID NO: 2295038 - DNA, 25 bp, Homo sapien
aggaccattattctgggaggagcta

SEQ ID NO: 2295039 - DNA, 25 bp, Homo sapien
tattgccaagactaacacttcatga

SEQ ID NO: 2295040 - DNA, 25 bp, Homo sapien
acttcagtgctgcttgttgaatgat

SEQ ID NO: 2295041 - DNA, 25 bp, Homo sapien
cttcagtgctgcttgttgaatgatt

SEQ ID NO: 2295042 - DNA, 25 bp, Homo sapien
ttcagtgctgcttgttgaatgattt

SEQ ID NO: 2295043 - DNA, 25 bp, Homo sapien
cccaacccttagacaagaataatct

SEQ ID NO: 2295044 - DNA, 25 bp, Homo sapien
taacatcagattctgtgctgccatc

SEQ ID NO: 2295045 - DNA, 25 bp, Homo sapien
acccttagacaagaataatctccta

SEQ ID NO: 2295046 - DNA, 25 bp, Homo sapien
caacccttagacaagaataatctcc

SEQ ID NO: 2295047 - DNA, 25 bp, Homo sapien
agaggatgaggcctaagagcatatt

SEQ ID NO: 2295048 - DNA, 25 bp, Homo sapien
gaggcctaagagcatattctccaac

SEQ ID NO: 2295049 - DNA, 25 bp, Homo sapien
gagcatattctccaacacatgtttc

SEQ ID NO: 2295050 - DNA, 25 bp, Homo sapien
taagagcatattctccaacacatgt

SEQ ID NO: 2295051 - DNA, 25 bp, Homo sapien
ctcttcatctgctaatccttcttct

SEQ ID NO: 2295052 - DNA, 25 bp, Homo sapien
tcttcatctgctaatccttcttctt

SEQ ID NO: 2295053 - DNA, 25 bp, Homo sapien
ccttcttcttccatggccacttcta

SEQ ID NO: 2295054 - DNA, 25 bp, Homo sapien
cttccatggccacttctaatttctt

SEQ ID NO: 2295055 - DNA, 25 bp, Homo sapien
actgggggtgcttttgtacagtaat

SEQ ID NO: 2295056 - DNA, 25 bp, Homo sapien
ctgatgtcaaatgaatgaaaagtca

SEQ ID NO: 2295057 - DNA, 25 bp, Homo sapien
atgaatgaaaagtcactgggggtgc

SEQ ID NO: 2295058 - DNA, 25 bp, Homo sapien
tgtacagtaattataggtaattaca

SEQ ID NO: 2295059 - DNA, 25 bp, Homo sapien
tggcaatgttctcttaaatacgtgt

SEQ ID NO: 2295060 - DNA, 25 bp, Homo sapien
tttagaccaattactctagctgcag

SEQ ID NO: 2295061 - DNA, 25 bp, Homo sapien
cacacctaaaatacacttggcaatg

SEQ ID NO: 2295062 - DNA, 25 bp, Homo sapien
aacgattgattaattcctcccggag

SEQ ID NO: 2295063 - DNA, 25 bp, Homo sapien
taactttcagagactcaaagtcatc

SEQ ID NO: 2295064 - DNA, 25 bp, Homo sapien
tgcgagcgtgttgtgatcgacgtaa

SEQ ID NO: 2295065 - DNA, 25 bp, Homo sapien
agaactctgtttctttgcgagcgtg

SEQ ID NO: 2295066 - DNA, 25 bp, Homo sapien
caagtctggtccttttgagccgtaa

SEQ ID NO: 2295067 - DNA, 25 bp, Homo sapien
tatctttcttctggaccaaccgcac

SEQ ID NO: 2295068 - DNA, 25 bp, Homo sapien
caatatcttcattgcatagatatgg

SEQ ID NO: 2295069 - DNA, 25 bp, Homo sapien
cattgcatagatatggcctgtatct

SEQ ID NO: 2295070 - DNA, 25 bp, Homo sapien
atggcctgtatctttcttctggacc

SEQ ID NO: 2295071 - DNA, 25 bp, Homo sapien
ttcccgcacctgaaaatgaccattt

SEQ ID NO: 2295072 - DNA, 25 bp, Homo sapien
aaaaatcacccagctatgccaatgg

SEQ ID NO: 2295073 - DNA, 25 bp, Homo sapien
catgactgcaaatctcaatgagcct

SEQ ID NO: 2295074 - DNA, 25 bp, Homo sapien
cttgtaactgcattaaggcacagga

SEQ ID NO: 2295075 - DNA, 25 bp, Homo sapien
attccatgattagataaagattcct

SEQ ID NO: 2295076 - DNA, 25 bp, Homo sapien
atatctctttctgctcggatatggg

SEQ ID NO: 2295077 - DNA, 25 bp, Homo sapien
tctctttctgctcggatatgggcca

SEQ ID NO: 2295078 - DNA, 25 bp, Homo sapien
gattagataaagattcctcttatcc

SEQ ID NO: 2295079 - DNA, 25 bp, Homo sapien
cccagctagctttcctgagtttgca

SEQ ID NO: 2295080 - DNA, 25 bp, Homo sapien
catcttgggacaaataaaagtgcta

SEQ ID NO: 2295081 - DNA, 25 bp, Homo sapien
tgcattttatgatctacccagtata

SEQ ID NO: 2295082 - DNA, 25 bp, Homo sapien
gctattgcatagcagaagtttcatg

SEQ ID NO: 2295083 - DNA, 25 bp, Homo sapien
aaaatgcctcaaaggtggaatacct

SEQ ID NO: 2295084 - DNA, 25 bp, Homo sapien
attattgaaaatgcctcaaaggtgg

SEQ ID NO: 2295085 - DNA, 25 bp, Homo sapien
tgcctcaaaggtggaataccttgta

SEQ ID NO: 2295086 - DNA, 25 bp, Homo sapien
attattattgaaaatgcctcaaagg

SEQ ID NO: 2295087 - DNA, 25 bp, Homo sapien
tcaaggtgtctttcttcattagcaa

SEQ ID NO: 2295088 - DNA, 25 bp, Homo sapien
ttcattagcaatgtcatcatgtcac

SEQ ID NO: 2295089 - DNA, 25 bp, Homo sapien
cttcattagcaatgtcatcatgtca

SEQ ID NO: 2295090 - DNA, 25 bp, Homo sapien
ctgtcaaggtgtctttcttcattag

SEQ ID NO: 2295091 - DNA, 25 bp, Homo sapien
ataaaaggttgtctggcttaatatc

SEQ ID NO: 2295092 - DNA, 25 bp, Homo sapien
gatgaaacccaactggtggatcgca

SEQ ID NO: 2295093 - DNA, 25 bp, Homo sapien
ctggcttaatatcccgatggatgaa

SEQ ID NO: 2295094 - DNA, 25 bp, Homo sapien
ggatcgcatctattgccagaacagt

SEQ ID NO: 2295095 - DNA, 25 bp, Homo sapien
aattcttagcttgggatttatacac

SEQ ID NO: 2295096 - DNA, 25 bp, Homo sapien
gcagttgctgatttccattcacaaa

SEQ ID NO: 2295097 - DNA, 25 bp, Homo sapien
gcctagtaattcaccagtttattca

SEQ ID NO: 2295098 - DNA, 25 bp, Homo sapien
aaaaagagagccatattccctgttg

SEQ ID NO: 2295099 - DNA, 25 bp, Homo sapien
gaagtcacttggtgggttgtgtgtg

SEQ ID NO: 2295100 - DNA, 25 bp, Homo sapien
ccgtacataaaccaaaatcagataa

SEQ ID NO: 2295101 - DNA, 25 bp, Homo sapien
taatcccgtacataaaccaaaatca

SEQ ID NO: 2295102 - DNA, 25 bp, Homo sapien
tgagctttctttaatcccgtacata

SEQ ID NO: 2295103 - DNA, 25 bp, Homo sapien
tttctgctttcctctttgagttcat

SEQ ID NO: 2295104 - DNA, 25 bp, Homo sapien
cagttgtctcctgttcttcttccaa

SEQ ID NO: 2295105 - DNA, 25 bp, Homo sapien
tgtctcctgttcttcttccaagttt

SEQ ID NO: 2295106 - DNA, 25 bp, Homo sapien
tcctgttcttcttccaagtttctgc

SEQ ID NO: 2295107 - DNA, 25 bp, Homo sapien
taataagctcaataatgcaaaggtc

SEQ ID NO: 2295108 - DNA, 25 bp, Homo sapien
taacctgtagactgttgatggacca

SEQ ID NO: 2295109 - DNA, 25 bp, Homo sapien
gcaaaacctgatctaaaatggacac

SEQ ID NO: 2295110 - DNA, 25 bp, Homo sapien
tggaccatgttaacaggacaaaggg

SEQ ID NO: 2295111 - DNA, 25 bp, Homo sapien
aaatgtaggaccacagattttgtca

SEQ ID NO: 2295112 - DNA, 25 bp, Homo sapien
aatgtaggaccacagattttgtcat

SEQ ID NO: 2295113 - DNA, 25 bp, Homo sapien
aaaatgtaggaccacagattttgtc

SEQ ID NO: 2295114 - DNA, 25 bp, Homo sapien
aaaaatgatttctacaaggcagtaa

SEQ ID NO: 2295115 - DNA, 25 bp, Homo sapien
ccaggggtagtactcttggggccat

SEQ ID NO: 2295116 - DNA, 25 bp, Homo sapien
tctcaaccaggggtagtactcttgg

SEQ ID NO: 2295117 - DNA, 25 bp, Homo sapien
tacaaggcagtaattctcaaccagg

SEQ ID NO: 2295118 - DNA, 25 bp, Homo sapien
tcctttcatcacttagttgaacaaa

SEQ ID NO: 2295119 - DNA, 25 bp, Homo sapien
catgtgcaaggcttagtggtaggta

SEQ ID NO: 2295120 - DNA, 25 bp, Homo sapien
ggagcaactcgtcaaaccagcattc

SEQ ID NO: 2295121 - DNA, 25 bp, Homo sapien
caatatatagaggagttaaattttc

SEQ ID NO: 2295122 - DNA, 25 bp, Homo sapien
tagcatttcatacataatcactccc

SEQ ID NO: 2295123 - DNA, 25 bp, Homo sapien
gtaatctggtgtcccaactgtggaa

SEQ ID NO: 2295124 - DNA, 25 bp, Homo sapien
taaccagtctgcatgaatacttctg

SEQ ID NO: 2295125 - DNA, 25 bp, Homo sapien
cttctggagcaatgtaatctggtgt

SEQ ID NO: 2295126 - DNA, 25 bp, Homo sapien
gagcagtgaagtttatacccaccaa

SEQ ID NO: 2295127 - DNA, 25 bp, Homo sapien
taaaggattgaaagcactgcctccc

SEQ ID NO: 2295128 - DNA, 25 bp, Homo sapien
caaacatgtgcgacaagaaaccaaa

SEQ ID NO: 2295129 - DNA, 25 bp, Homo sapien
tatgttcaaacaatggcactcaagg

SEQ ID NO: 2295130 - DNA, 25 bp, Homo sapien
tggctttctcagatataggtacctc

SEQ ID NO: 2295131 - DNA, 25 bp, Homo sapien
tcttgaggtgtttcagagcagaaag

SEQ ID NO: 2295132 - DNA, 25 bp, Homo sapien
tctgtacgtttcttgaggtgtttca

SEQ ID NO: 2295133 - DNA, 25 bp, Homo sapien
ctgagaattaagtccttggctttct

SEQ ID NO: 2295134 - DNA, 25 bp, Homo sapien
tactccactatttccaattctgttt

SEQ ID NO: 2295135 - DNA, 25 bp, Homo sapien
tctactccactatttccaattctgt

SEQ ID NO: 2295136 - DNA, 25 bp, Homo sapien
ctactccactatttccaattctgtt

SEQ ID NO: 2295137 - DNA, 25 bp, Homo sapien
atatcagattcagggaagtcatcaa

SEQ ID NO: 2295138 - DNA, 25 bp, Homo sapien
gattcagggaagtcatcaaaatttg

SEQ ID NO: 2295139 - DNA, 25 bp, Homo sapien
taaaatatcagattcagggaagtca

SEQ ID NO: 2295140 - DNA, 25 bp, Homo sapien
caaaatttgaagtatcatcaatgct

SEQ ID NO: 2295141 - DNA, 25 bp, Homo sapien
ttgtagtccggttctgtggtatttg

SEQ ID NO: 2295142 - DNA, 25 bp, Homo sapien
tggatttgtagtccggttctgtggt

SEQ ID NO: 2295143 - DNA, 25 bp, Homo sapien
tagtccggttctgtggtatttggca

SEQ ID NO: 2295144 - DNA, 25 bp, Homo sapien
ctttggatttgtagtccggttctgt

SEQ ID NO: 2295145 - DNA, 25 bp, Homo sapien
cacgttgagtcaacccttcaaacct

SEQ ID NO: 2295146 - DNA, 25 bp, Homo sapien
ttcccagctttcatgtaggtgggga

SEQ ID NO: 2295147 - DNA, 25 bp, Homo sapien
caaaccttttataggtataattgag

SEQ ID NO: 2295148 - DNA, 25 bp, Homo sapien
gggatagagccacgttgagtcaacc

SEQ ID NO: 2295149 - DNA, 25 bp, Homo sapien
tcttgtagtcaataagcaccaccat

SEQ ID NO: 2295150 - DNA, 25 bp, Homo sapien
ggcactgccaaccaattcctatagt

SEQ ID NO: 2295151 - DNA, 25 bp, Homo sapien
ccatcttcaggagtatttcagtgta

SEQ ID NO: 2295152 - DNA, 25 bp, Homo sapien
tattgttatctacgccaagcaagcc

SEQ ID NO: 2295153 - DNA, 25 bp, Homo sapien
ccttaatacgcatgtaggcagtgca

SEQ ID NO: 2295154 - DNA, 25 bp, Homo sapien
tacagatgtccaaaccaatagggca

SEQ ID NO: 2295155 - DNA, 25 bp, Homo sapien
tgtggagctacccagcagcaacatt

SEQ ID NO: 2295156 - DNA, 25 bp, Homo sapien
tgaatacagcatgcccacaggaaag

SEQ ID NO: 2295157 - DNA, 25 bp, Homo sapien
cttttaattcaaaatagagtctaat

SEQ ID NO: 2295158 - DNA, 25 bp, Homo sapien
actcttttaattcaaaatagagtct

SEQ ID NO: 2295159 - DNA, 25 bp, Homo sapien
aaagaaaatgtcattatgcccagtt

SEQ ID NO: 2295160 - DNA, 25 bp, Homo sapien
tttaaagaaaatgtcattatgccca

SEQ ID NO: 2295161 - DNA, 25 bp, Homo sapien
attatacaagctttctatatactta

SEQ ID NO: 2295162 - DNA, 25 bp, Homo sapien
atctgaattatacaagctttctata

SEQ ID NO: 2295163 - DNA, 25 bp, Homo sapien
gaattatacaagctttctatatact

SEQ ID NO: 2295164 - DNA, 25 bp, Homo sapien
tctgaattatacaagctttctatat

SEQ ID NO: 2295165 - DNA, 25 bp, Homo sapien
tattttcagacagcacaatgcttca

SEQ ID NO: 2295166 - DNA, 25 bp, Homo sapien
tatcttaggccttaccaaccaaaga

SEQ ID NO: 2295167 - DNA, 25 bp, Homo sapien
tttaaagcagcaatatcccctcaca

SEQ ID NO: 2295168 - DNA, 25 bp, Homo sapien
tgtttggtagccagggacctctatg

SEQ ID NO: 2295169 - DNA, 25 bp, Homo sapien
tctagacaattgctgaattatattg

SEQ ID NO: 2295170 - DNA, 25 bp, Homo sapien
ttttgaaactcagtaactgaacacc

SEQ ID NO: 2295171 - DNA, 25 bp, Homo sapien
tgaaattttgtcctcatgccaccaa

SEQ ID NO: 2295172 - DNA, 25 bp, Homo sapien
gaacaccaaactcagtagcctcatg

SEQ ID NO: 2295173 - DNA, 25 bp, Homo sapien
gggccctgccgggtgccgcggcggc

SEQ ID NO: 2295174 - DNA, 25 bp, Homo sapien
cggcggctctggagcagggaagcgg

SEQ ID NO: 2295175 - DNA, 25 bp, Homo sapien
caccgcagcccgtaggcgcgcacgg

SEQ ID NO: 2295176 - DNA, 25 bp, Homo sapien
ggaagcggggactggcgggccctgc

SEQ ID NO: 2295177 - DNA, 25 bp, Homo sapien
cgcaggagccacttggtcggctccg

SEQ ID NO: 2295178 - DNA, 25 bp, Homo sapien
aggagccacttggtcggctccgcag

SEQ ID NO: 2295179 - DNA, 25 bp, Homo sapien
gagccacttggtcggctccgcagcc

SEQ ID NO: 2295180 - DNA, 25 bp, Homo sapien
caggagccacttggtcggctccgca

SEQ ID NO: 2295181 - DNA, 25 bp, Homo sapien
ctcccgccgcagcctcctcttccgc

SEQ ID NO: 2295182 - DNA, 25 bp, Homo sapien
ccgcagcctcctcttccgccgccat

SEQ ID NO: 2295183 - DNA, 25 bp, Homo sapien
ccgccgcagcctcctcttccgccgc

SEQ ID NO: 2295184 - DNA, 25 bp, Homo sapien
gccgcagcctcctcttccgccgcca

SEQ ID NO: 2295185 - DNA, 25 bp, Homo sapien
ccgtcgcctcgccaccggcaacctc

SEQ ID NO: 2295186 - DNA, 25 bp, Homo sapien
tggggccgtcgcctcgccaccggca

SEQ ID NO: 2295187 - DNA, 25 bp, Homo sapien
gtcgcctcgccaccggcaacctcac

SEQ ID NO: 2295188 - DNA, 25 bp, Homo sapien
gggccgtcgcctcgccaccggcaac

SEQ ID NO: 2295189 - DNA, 25 bp, Homo sapien
cccgagaggacaggcgcgggcgctt

SEQ ID NO: 2295190 - DNA, 25 bp, Homo sapien
gggggcagacctggcgtcgcgggga

SEQ ID NO: 2295191 - DNA, 25 bp, Homo sapien
tcggaggcgatgctccggcccgaga

SEQ ID NO: 2295192 - DNA, 25 bp, Homo sapien
ccccagcgcgtcagacgccgcgcgc

SEQ ID NO: 2295193 - DNA, 25 bp, Homo sapien
ccaggggagccactacaggtagtaa

SEQ ID NO: 2295194 - DNA, 25 bp, Homo sapien
ctgaaggctcttagttcccactggc

SEQ ID NO: 2295195 - DNA, 25 bp, Homo sapien
caataagggcttacactgaaggctc

SEQ ID NO: 2295196 - DNA, 25 bp, Homo sapien
tgcagtcctagctccaataagggct

SEQ ID NO: 2295197 - DNA, 25 bp, Homo sapien
ccagcctaatagattttgtaagctc

SEQ ID NO: 2295198 - DNA, 25 bp, Homo sapien
tatccacttctgcttctctgtttgc

SEQ ID NO: 2295199 - DNA, 25 bp, Homo sapien
taagctctttaaccccttctcctgc

SEQ ID NO: 2295200 - DNA, 25 bp, Homo sapien
ttctcctgctttatccacttctgct

SEQ ID NO: 2295201 - DNA, 25 bp, Homo sapien
aagtgtttgtatcggaagtcaaggc

SEQ ID NO: 2295202 - DNA, 25 bp, Homo sapien
aaccttcattaagtgtttgtatcgg

SEQ ID NO: 2295203 - DNA, 25 bp, Homo sapien
gtttgtatcggaagtcaaggctgag

SEQ ID NO: 2295204 - DNA, 25 bp, Homo sapien
cattaagtgtttgtatcggaagtca

SEQ ID NO: 2295205 - DNA, 25 bp, Homo sapien
tgccatttgcaagggagataaaaaa

SEQ ID NO: 2295206 - DNA, 25 bp, Homo sapien
tctacttccctatattgttccaaac

SEQ ID NO: 2295207 - DNA, 25 bp, Homo sapien
aaatgttactaggagttttatctca

SEQ ID NO: 2295208 - DNA, 25 bp, Homo sapien
tcagtagccaatcaaaggatttttc

SEQ ID NO: 2295209 - DNA, 25 bp, Homo sapien
tcttgtccctggactcacgcggctg

SEQ ID NO: 2295210 - DNA, 25 bp, Homo sapien
actcacgcggctggaaaccacagga

SEQ ID NO: 2295211 - DNA, 25 bp, Homo sapien
tgttggtcttgtccctggactcacg

SEQ ID NO: 2295212 - DNA, 25 bp, Homo sapien
gtccctggactcacgcggctggaaa

SEQ ID NO: 2295213 - DNA, 25 bp, Homo sapien
ttttcgtggaaactctgtcatgtgt

SEQ ID NO: 2295214 - DNA, 25 bp, Homo sapien
gaatcacttcctttgcgttttcgtg

SEQ ID NO: 2295215 - DNA, 25 bp, Homo sapien
tctgaatcacttcctttgcgttttc

SEQ ID NO: 2295216 - DNA, 25 bp, Homo sapien
atcacttcctttgcgttttcgtgga

SEQ ID NO: 2295217 - DNA, 25 bp, Homo sapien
caccactttttctgtcatgattcct

SEQ ID NO: 2295218 - DNA, 25 bp, Homo sapien
cactttttctgtcatgattcctgac

SEQ ID NO: 2295219 - DNA, 25 bp, Homo sapien
ccactttttctgtcatgattcctga

SEQ ID NO: 2295220 - DNA, 25 bp, Homo sapien
ttccaccactttttctgtcatgatt

SEQ ID NO: 2295221 - DNA, 25 bp, Homo sapien
gatatttctatccttgttgaaagaa

SEQ ID NO: 2295222 - DNA, 25 bp, Homo sapien
aagaagataggtaaggggattctga

SEQ ID NO: 2295223 - DNA, 25 bp, Homo sapien
cactggaggctgatatttctatcct

SEQ ID NO: 2295224 - DNA, 25 bp, Homo sapien
tgccactggaggctgatatttctat

SEQ ID NO: 2295225 - DNA, 25 bp, Homo sapien
ctgaaggccttcattttaacttggt

SEQ ID NO: 2295226 - DNA, 25 bp, Homo sapien
aacttggtgttcaccatcttccact

SEQ ID NO: 2295227 - DNA, 25 bp, Homo sapien
tttaacttggtgttcaccatcttcc

SEQ ID NO: 2295228 - DNA, 25 bp, Homo sapien
tgaaggccttcattttaacttggtg

SEQ ID NO: 2295229 - DNA, 25 bp, Homo sapien
tacagcagaggaaggggtgctctct

SEQ ID NO: 2295230 - DNA, 25 bp, Homo sapien
aggaaggggtgctctctctgagcca

SEQ ID NO: 2295231 - DNA, 25 bp, Homo sapien
gcagaggaaggggtgctctctctga

SEQ ID NO: 2295232 - DNA, 25 bp, Homo sapien
ggatgtacagcagaggaaggggtgc

SEQ ID NO: 2295233 - DNA, 25 bp, Homo sapien
cactttgctgtaaatccctctccta

SEQ ID NO: 2295234 - DNA, 25 bp, Homo sapien
ctctattagaatagtttaggggcaa

SEQ ID NO: 2295235 - DNA, 25 bp, Homo sapien
tgctgtaaatccctctcctacaaca

SEQ ID NO: 2295236 - DNA, 25 bp, Homo sapien
tcacactttgctgtaaatccctctc

SEQ ID NO: 2295237 - DNA, 25 bp, Homo sapien
gtgttgctcactggagcagatgctg

SEQ ID NO: 2295238 - DNA, 25 bp, Homo sapien
ccccgtgttgctcactggagcagat

SEQ ID NO: 2295239 - DNA, 25 bp, Homo sapien
cccgtgttgctcactggagcagatg

SEQ ID NO: 2295240 - DNA, 25 bp, Homo sapien
agtcacccccgtgttgctcactgga

SEQ ID NO: 2295241 - DNA, 25 bp, Homo sapien
tgaacagccattcttaaaactgtaa

SEQ ID NO: 2295242 - DNA, 25 bp, Homo sapien
gtttgtccagtttacgcgccatggg

SEQ ID NO: 2295243 - DNA, 25 bp, Homo sapien
taaagatctcaagtgttgaacagcc

SEQ ID NO: 2295244 - DNA, 25 bp, Homo sapien
gacagttcttcaatcaggttattca

SEQ ID NO: 2295245 - DNA, 25 bp, Homo sapien
cgaagtgtggaagccatcgtcaaac

SEQ ID NO: 2295246 - DNA, 25 bp, Homo sapien
tctggatagaacctcaacagctgac

SEQ ID NO: 2295247 - DNA, 25 bp, Homo sapien
tagaacctcaacagctgacagcaaa

SEQ ID NO: 2295248 - DNA, 25 bp, Homo sapien
gcagatttcacttatcgaagtgtgg

SEQ ID NO: 2295249 - DNA, 25 bp, Homo sapien
tctgacatccaattcagtattctct

SEQ ID NO: 2295250 - DNA, 25 bp, Homo sapien
taaagaattgagaggtatgaaaggc

SEQ ID NO: 2295251 - DNA, 25 bp, Homo sapien
tattctctccacatacagactatag

SEQ ID NO: 2295252 - DNA, 25 bp, Homo sapien
gaaaggcaggtgatattctcttcat

SEQ ID NO: 2295253 - DNA, 25 bp, Homo sapien
gggatgagtacttaaccatgtcact

SEQ ID NO: 2295254 - DNA, 25 bp, Homo sapien
gcagagctgaggcaaaatctacgcc

SEQ ID NO: 2295255 - DNA, 25 bp, Homo sapien
gaggcaaaatctacgccctgttcca

SEQ ID NO: 2295256 - DNA, 25 bp, Homo sapien
tctcactcgaaccactgctgtaaca

SEQ ID NO: 2295257 - DNA, 25 bp, Homo sapien
gacgacaaagccaagcaagccatcc

SEQ ID NO: 2295258 - DNA, 25 bp, Homo sapien
cagggcaaggatgattcagaagtaa

SEQ ID NO: 2295259 - DNA, 25 bp, Homo sapien
caaccttcttgactcctatcccttc

SEQ ID NO: 2295260 - DNA, 25 bp, Homo sapien
caagggggcgtatgacacagacgac

SEQ ID NO: 2295261 - DNA, 25 bp, Homo sapien
tgggaggagtaagggaatccaccaa

SEQ ID NO: 2295262 - DNA, 25 bp, Homo sapien
ctgggaggagtaagggaatccacca

SEQ ID NO: 2295263 - DNA, 25 bp, Homo sapien
agaaatgatggtctataattacttc

SEQ ID NO: 2295264 - DNA, 25 bp, Homo sapien
aagaaatgatggtctataattactt

SEQ ID NO: 2295265 - DNA, 25 bp, Homo sapien
cttaaggattaaatgtctgagctca

SEQ ID NO: 2295266 - DNA, 25 bp, Homo sapien
ggattaaatgtctgagctcattatc

SEQ ID NO: 2295267 - DNA, 25 bp, Homo sapien
ttaaggattaaatgtctgagctcat

SEQ ID NO: 2295268 - DNA, 25 bp, Homo sapien
aaggattaaatgtctgagctcatta

SEQ ID NO: 2295269 - DNA, 25 bp, Homo sapien
ctctttcacatccaaccacaaataa

SEQ ID NO: 2295270 - DNA, 25 bp, Homo sapien
agtattttggagactgacttagaaa

SEQ ID NO: 2295271 - DNA, 25 bp, Homo sapien
agttgttcctttactttggcaacat

SEQ ID NO: 2295272 - DNA, 25 bp, Homo sapien
cctttactttggcaacatcttttgg

SEQ ID NO: 2295273 - DNA, 25 bp, Homo sapien
catcttttggatgtaagaagtcaaa

SEQ ID NO: 2295274 - DNA, 25 bp, Homo sapien
aacatcttttggatgtaagaagtca

SEQ ID NO: 2295275 - DNA, 25 bp, Homo sapien
tcttctttgagttgggtaagcatcc

SEQ ID NO: 2295276 - DNA, 25 bp, Homo sapien
cacacgtgtccttccagcgtggaga

SEQ ID NO: 2295277 - DNA, 25 bp, Homo sapien
tcttgagccagaatacacacgtgtc

SEQ ID NO: 2295278 - DNA, 25 bp, Homo sapien
tttatccgacagaaaaaagatcgtc

SEQ ID NO: 2295279 - DNA, 25 bp, Homo sapien
tggggggatatgccatggggcactg

SEQ ID NO: 2295280 - DNA, 25 bp, Homo sapien
ctggggggatatgccatggggcact

SEQ ID NO: 2295281 - DNA, 25 bp, Homo sapien
ggggggatatgccatggggcactga

SEQ ID NO: 2295282 - DNA, 25 bp, Homo sapien
agatcaggcggagagtcccggcttt

SEQ ID NO: 2295283 - DNA, 25 bp, Homo sapien
gaaacctgcaagttcctggagccac

SEQ ID NO: 2295284 - DNA, 25 bp, Homo sapien
tcccggctttggacactggaggcca

SEQ ID NO: 2295285 - DNA, 25 bp, Homo sapien
tggcatgccctgtccgcagtagtgg

SEQ ID NO: 2295286 - DNA, 25 bp, Homo sapien
taaccagtgcaatggatagtataga

SEQ ID NO: 2295287 - DNA, 25 bp, Homo sapien
ccagtgcaatggatagtatagaatt

SEQ ID NO: 2295288 - DNA, 25 bp, Homo sapien
tggatagtatagaattttctgtgct

SEQ ID NO: 2295289 - DNA, 25 bp, Homo sapien
tcaagtaaccagtgcaatggatagt

SEQ ID NO: 2295290 - DNA, 25 bp, Homo sapien
ctgtggaacaatatatggctgtaat

SEQ ID NO: 2295291 - DNA, 25 bp, Homo sapien
ctgtaatcttccaatggccacaagg

SEQ ID NO: 2295292 - DNA, 25 bp, Homo sapien
tatatggctgtaatcttccaatggc

SEQ ID NO: 2295293 - DNA, 25 bp, Homo sapien
ggaacaatatatggctgtaatcttc

SEQ ID NO: 2295294 - DNA, 25 bp, Homo sapien
cattcactgcaaaccgggttataaa

SEQ ID NO: 2295295 - DNA, 25 bp, Homo sapien
ggttataaattcagttggtttcaca

SEQ ID NO: 2295296 - DNA, 25 bp, Homo sapien
ctgcaaaccgggttataaattcagt

SEQ ID NO: 2295297 - DNA, 25 bp, Homo sapien
ggtttcacattaatctctccactgt

SEQ ID NO: 2295298 - DNA, 25 bp, Homo sapien
cccaaaagttcctgaggcagatatc

SEQ ID NO: 2295299 - DNA, 25 bp, Homo sapien
tattcataacaagaagttcccaaaa

SEQ ID NO: 2295300 - DNA, 25 bp, Homo sapien
cagatatcctaaaatcgctgttgcc

SEQ ID NO: 2295301 - DNA, 25 bp, Homo sapien
gcttgtcagtcaaattattgtggtc

SEQ ID NO: 2295302 - DNA, 25 bp, Homo sapien
ctaaagtgttgacagatacaatata

SEQ ID NO: 2295303 - DNA, 25 bp, Homo sapien
aatttgtaggaatctgtaagtattt

SEQ ID NO: 2295304 - DNA, 25 bp, Homo sapien
aaactaaagtgttgacagatacaat

SEQ ID NO: 2295305 - DNA, 25 bp, Homo sapien
aagtgttgacagatacaatatattc

SEQ ID NO: 2295306 - DNA, 25 bp, Homo sapien
cttctgatgattgagagctacaagg

SEQ ID NO: 2295307 - DNA, 25 bp, Homo sapien
acaaggtaaaaatgatgcttctcca

SEQ ID NO: 2295308 - DNA, 25 bp, Homo sapien
tgatgattgagagctacaaggtaaa

SEQ ID NO: 2295309 - DNA, 25 bp, Homo sapien
tgatgcttctccaggctcactatgt

SEQ ID NO: 2295310 - DNA, 25 bp, Homo sapien
ccaagtactgttccagtagacattc

SEQ ID NO: 2295311 - DNA, 25 bp, Homo sapien
caatactaccagcaccaagtactgt

SEQ ID NO: 2295312 - DNA, 25 bp, Homo sapien
cagcaccaagtactgttccagtaga

SEQ ID NO: 2295313 - DNA, 25 bp, Homo sapien
gcaatatctgttccaatactaccag

SEQ ID NO: 2295314 - DNA, 25 bp, Homo sapien
tctttgcctctgactttctctatcc

SEQ ID NO: 2295315 - DNA, 25 bp, Homo sapien
agctgctgaacgcttatgtgggttc

SEQ ID NO: 2295316 - DNA, 25 bp, Homo sapien
ttcttttacatgtgacaagttgctt

SEQ ID NO: 2295317 - DNA, 25 bp, Homo sapien
atcctattctctcccggcctgcaag

SEQ ID NO: 2295318 - DNA, 25 bp, Homo sapien
cagtatgagtatctttcattaaacc

SEQ ID NO: 2295319 - DNA, 25 bp, Homo sapien
aacctgttggactcgaatcatcaag

SEQ ID NO: 2295320 - DNA, 25 bp, Homo sapien
cctgcagtttacagtatgagtatct

SEQ ID NO: 2295321 - DNA, 25 bp, Homo sapien
cattaaacctgttggactcgaatca

SEQ ID NO: 2295322 - DNA, 25 bp, Homo sapien
tactctggttttgcctggtagcctc

SEQ ID NO: 2295323 - DNA, 25 bp, Homo sapien
tgtggacagcaacagtactctggtt

SEQ ID NO: 2295324 - DNA, 25 bp, Homo sapien
ttttgcctggtagcctctagctccc

SEQ ID NO: 2295325 - DNA, 25 bp, Homo sapien
cttggtggaaacaactccttatttg

SEQ ID NO: 2295326 - DNA, 25 bp, Homo sapien
tagctgattccattgataactgaat

SEQ ID NO: 2295327 - DNA, 25 bp, Homo sapien
agctgattccattgataactgaatt

SEQ ID NO: 2295328 - DNA, 25 bp, Homo sapien
aggcccccctctgcttctaagtaat

SEQ ID NO: 2295329 - DNA, 25 bp, Homo sapien
catcattgtcacatagggcatcgaa

SEQ ID NO: 2295330 - DNA, 25 bp, Homo sapien
ggctgtgtcatcattgtcacatagg

SEQ ID NO: 2295331 - DNA, 25 bp, Homo sapien
cattgtcacatagggcatcgaaatc

SEQ ID NO: 2295332 - DNA, 25 bp, Homo sapien
gaggttaatccccaagatctagggc

SEQ ID NO: 2295333 - DNA, 25 bp, Homo sapien
caaatcctggcatcacgagggcaag

SEQ ID NO: 2295334 - DNA, 25 bp, Homo sapien
aaagtgatattggtaggcaggcccc

SEQ ID NO: 2295335 - DNA, 25 bp, Homo sapien
aagacatttaatctgcccgggccta

SEQ ID NO: 2295336 - DNA, 25 bp, Homo sapien
tggaagtaaacatagagatcaaacc

SEQ ID NO: 2295337 - DNA, 25 bp, Homo sapien
aatggcttgcatgaggtcatacagc

SEQ ID NO: 2295338 - DNA, 25 bp, Homo sapien
gctaaattcagcctcaacagggtct

SEQ ID NO: 2295339 - DNA, 25 bp, Homo sapien
agcacagttctaggttccaccctaa

SEQ ID NO: 2295340 - DNA, 25 bp, Homo sapien
tataatgttctagagcagcgctgtc

SEQ ID NO: 2295341 - DNA, 25 bp, Homo sapien
tagatgtcggcctgtctgcccgtaa

SEQ ID NO: 2295342 - DNA, 25 bp, Homo sapien
tattggcactacacctggaaagctc

SEQ ID NO: 2295343 - DNA, 25 bp, Homo sapien
cctgtgccccagattttacggagat

SEQ ID NO: 2295344 - DNA, 25 bp, Homo sapien
gccagaaacttgagtcattgttcac

SEQ ID NO: 2295345 - DNA, 25 bp, Homo sapien
tactgtcagacaatgtgtaagcact

SEQ ID NO: 2295346 - DNA, 25 bp, Homo sapien
caactatctgctagacatcacctga

SEQ ID NO: 2295347 - DNA, 25 bp, Homo sapien
cagtgtgccgctcatctcagctttc

SEQ ID NO: 2295348 - DNA, 25 bp, Homo sapien
gattgaggctcacatactcaaagtg

SEQ ID NO: 2295349 - DNA, 25 bp, Homo sapien
ggctcacatactcaaagtgcctttg

SEQ ID NO: 2295350 - DNA, 25 bp, Homo sapien
taaaaaggtgtgacacagctttctc

SEQ ID NO: 2295351 - DNA, 25 bp, Homo sapien
aaggtgtgacacagctttctctgcc

SEQ ID NO: 2295352 - DNA, 25 bp, Homo sapien
gaagcccactttgggttcaacaaga

SEQ ID NO: 2295353 - DNA, 25 bp, Homo sapien
ggttgcctggagctctgtgttgaaa

SEQ ID NO: 2295354 - DNA, 25 bp, Homo sapien
cattgtgaatctgcagctatgactg

SEQ ID NO: 2295355 - DNA, 25 bp, Homo sapien
tgtcacctcagttgatcatgaatgg

SEQ ID NO: 2295356 - DNA, 25 bp, Homo sapien
cagttcacagatattccctgcagag

SEQ ID NO: 2295357 - DNA, 25 bp, Homo sapien
tgtggaaagatagaccatggagact

SEQ ID NO: 2295358 - DNA, 25 bp, Homo sapien
ggatttcacttcaggaagacaggcc

SEQ ID NO: 2295359 - DNA, 25 bp, Homo sapien
ggaacagtgtcctatcagctatgat

SEQ ID NO: 2295360 - DNA, 25 bp, Homo sapien
gcagcagcttttatctcagtaggct

SEQ ID NO: 2295361 - DNA, 25 bp, Homo sapien
ggagaggcaaccatatcggccaaca

SEQ ID NO: 2295362 - DNA, 25 bp, Homo sapien
agttcattttagtgaggcctcaggc

SEQ ID NO: 2295363 - DNA, 25 bp, Homo sapien
ctgaaatagcactcacatgccccgg

SEQ ID NO: 2295364 - DNA, 25 bp, Homo sapien
tgaattcagctccctggggcaggga

SEQ ID NO: 2295365 - DNA, 25 bp, Homo sapien
ttgaattcagctccctggggcaggg

SEQ ID NO: 2295366 - DNA, 25 bp, Homo sapien
ttattcttggtgaactcggcaccca

SEQ ID NO: 2295367 - DNA, 25 bp, Homo sapien
ttccaggacttcagtgccaggctca

SEQ ID NO: 2295368 - DNA, 25 bp, Homo sapien
cttccaggacttcagtgccaggctc

SEQ ID NO: 2295369 - DNA, 25 bp, Homo sapien
ccctctcccattattcttggtgaac

SEQ ID NO: 2295370 - DNA, 25 bp, Homo sapien
ggcaggtaagtgtgctgctggactt

SEQ ID NO: 2295371 - DNA, 25 bp, Homo sapien
accatttgagtggtaaacaccaagg

SEQ ID NO: 2295372 - DNA, 25 bp, Homo sapien
tccaggcctgaccacccagattacc

SEQ ID NO: 2295373 - DNA, 25 bp, Homo sapien
acccagattaccctcttggttcctg

SEQ ID NO: 2295374 - DNA, 25 bp, Homo sapien
tgaccacccagattaccctcttggt

SEQ ID NO: 2295375 - DNA, 25 bp, Homo sapien
agattaccctcttggttcctgctac

SEQ ID NO: 2295376 - DNA, 25 bp, Homo sapien
tattcaagtgagtgatagcagtaga

SEQ ID NO: 2295377 - DNA, 25 bp, Homo sapien
tagaactagagggtagcctggctcc

SEQ ID NO: 2295378 - DNA, 25 bp, Homo sapien
tagcagtagattggcctagaactag

SEQ ID NO: 2295379 - DNA, 25 bp, Homo sapien
agaactagagggtagcctggctccc

SEQ ID NO: 2295380 - DNA, 25 bp, Homo sapien
gtttgtgggcgtgagagccatttct

SEQ ID NO: 2295381 - DNA, 25 bp, Homo sapien
ttgttatttaggtttgtgggcgtga

SEQ ID NO: 2295382 - DNA, 25 bp, Homo sapien
agctgttgttcctggcagtccatct

SEQ ID NO: 2295383 - DNA, 25 bp, Homo sapien
atttaggtttgtgggcgtgagagcc

SEQ ID NO: 2295384 - DNA, 25 bp, Homo sapien
ggttttcggaggaaatgtcatcctc

SEQ ID NO: 2295385 - DNA, 25 bp, Homo sapien
tctgtctaagatgtggtccactttg

SEQ ID NO: 2295386 - DNA, 25 bp, Homo sapien
tcatcctcatcatccgatctgtcta

SEQ ID NO: 2295387 - DNA, 25 bp, Homo sapien
catccgatctgtctaagatgtggtc

SEQ ID NO: 2295388 - DNA, 25 bp, Homo sapien
aaactgcagagatgtagacgcttga

SEQ ID NO: 2295389 - DNA, 25 bp, Homo sapien
gtttcttgcttatcctgtttactca

SEQ ID NO: 2295390 - DNA, 25 bp, Homo sapien
tactcaggtcctggtcatgctcagc

SEQ ID NO: 2295391 - DNA, 25 bp, Homo sapien
gatgtagacgcttgagggtcctcat

SEQ ID NO: 2295392 - DNA, 25 bp, Homo sapien
cttgaggaacatgcccttcagacac

SEQ ID NO: 2295393 - DNA, 25 bp, Homo sapien
aatattgtcaattttctccgttccg

SEQ ID NO: 2295394 - DNA, 25 bp, Homo sapien
caattttctccgttccgtctatgta

SEQ ID NO: 2295395 - DNA, 25 bp, Homo sapien
gagacctatctttgtgttccagtag

SEQ ID NO: 2295396 - DNA, 25 bp, Homo sapien
tctatgtaatcagctccaagttctt

SEQ ID NO: 2295397 - DNA, 25 bp, Homo sapien
caatttgacccttcagggtcagcat

SEQ ID NO: 2295398 - DNA, 25 bp, Homo sapien
ttcaatttgacccttcagggtcagc

SEQ ID NO: 2295399 - DNA, 25 bp, Homo sapien
gatcaaggtcaaggccccggtcctc

SEQ ID NO: 2295400 - DNA, 25 bp, Homo sapien
ttgatcaaggtcaaggccccggtcc

SEQ ID NO: 2295401 - DNA, 25 bp, Homo sapien
aattcataaacttcattacaagtat

SEQ ID NO: 2295402 - DNA, 25 bp, Homo sapien
cataaacttcattacaagtattcac

SEQ ID NO: 2295403 - DNA, 25 bp, Homo sapien
ttcataaacttcattacaagtattc

SEQ ID NO: 2295404 - DNA, 25 bp, Homo sapien
ttaattcataaacttcattacaagt

SEQ ID NO: 2295405 - DNA, 25 bp, Homo sapien
catctcttccgtatctatttcctca

SEQ ID NO: 2295406 - DNA, 25 bp, Homo sapien
cttctgcactaaaaaggatgctggg

SEQ ID NO: 2295407 - DNA, 25 bp, Homo sapien
tccttagctttgcactcagcagttc

SEQ ID NO: 2295408 - DNA, 25 bp, Homo sapien
tattgcggggaggagacttctgcac

SEQ ID NO: 2295409 - DNA, 25 bp, Homo sapien
gtgtgtttccaataccatccaaggg

SEQ ID NO: 2295410 - DNA, 25 bp, Homo sapien
gagctgagattctacctgggttggt

SEQ ID NO: 2295411 - DNA, 25 bp, Homo sapien
taaatgatggtgtggcatctcctgg

SEQ ID NO: 2295412 - DNA, 25 bp, Homo sapien
cagaatttgctggtagtgtgtttcc

SEQ ID NO: 2295413 - DNA, 25 bp, Homo sapien
tacatggtttaacctaagcacctcg

SEQ ID NO: 2295414 - DNA, 25 bp, Homo sapien
cttgcaggtgaggaatatgcatgtc

SEQ ID NO: 2295415 - DNA, 25 bp, Homo sapien
aaggcctgaagatttccaataggag

SEQ ID NO: 2295416 - DNA, 25 bp, Homo sapien
tatgatggtcaacatgaggtggcct

SEQ ID NO: 2295417 - DNA, 25 bp, Homo sapien
ttattcccgggatattgaactcctc

SEQ ID NO: 2295418 - DNA, 25 bp, Homo sapien
gcagcagcgtacaccacatgttcac

SEQ ID NO: 2295419 - DNA, 25 bp, Homo sapien
ttgtcgatctttctccacacaatag

SEQ ID NO: 2295420 - DNA, 25 bp, Homo sapien
cagcatctactgcttcacgcagcag

SEQ ID NO: 2295421 - DNA, 25 bp, Homo sapien
cccgtaggtcccatgtggtgcggca

SEQ ID NO: 2295422 - DNA, 25 bp, Homo sapien
tccagtgacggtgaggacatcaaac

SEQ ID NO: 2295423 - DNA, 25 bp, Homo sapien
tgtaacataaaagtccagtgacggt

SEQ ID NO: 2295424 - DNA, 25 bp, Homo sapien
tgcggcacccaagcattctcagaag

SEQ ID NO: 2295425 - DNA, 25 bp, Homo sapien
agtagggtgacagtaacttctgtat

SEQ ID NO: 2295426 - DNA, 25 bp, Homo sapien
aagtcagtagggtgacagtaacttc

SEQ ID NO: 2295427 - DNA, 25 bp, Homo sapien
gtcagtagggtgacagtaacttctg

SEQ ID NO: 2295428 - DNA, 25 bp, Homo sapien
cagtagggtgacagtaacttctgta

SEQ ID NO: 2295429 - DNA, 25 bp, Homo sapien
gaaactctgatgctgctaactccac

SEQ ID NO: 2295430 - DNA, 25 bp, Homo sapien
aaaagggtgttccatgaaactctga

SEQ ID NO: 2295431 - DNA, 25 bp, Homo sapien
tccttctgagagtccgaaatggctc

SEQ ID NO: 2295432 - DNA, 25 bp, Homo sapien
tctgtatacccaggattcctcggca

SEQ ID NO: 2295433 - DNA, 25 bp, Homo sapien
tgccaaagagtatcactattgcggg

SEQ ID NO: 2295434 - DNA, 25 bp, Homo sapien
ttttgccaaagagtatcactattgc

SEQ ID NO: 2295435 - DNA, 25 bp, Homo sapien
ctttttgccaaagagtatcactatt

SEQ ID NO: 2295436 - DNA, 25 bp, Homo sapien
tattgcggggtagggagcaagagac

SEQ ID NO: 2295437 - DNA, 25 bp, Homo sapien
ttgttaagtggtggtgttgtcagcc

SEQ ID NO: 2295438 - DNA, 25 bp, Homo sapien
cacacaagcttctcgggcaagtaaa

SEQ ID NO: 2295439 - DNA, 25 bp, Homo sapien
aagagactcctgaaaacggtgaccg

SEQ ID NO: 2295440 - DNA, 25 bp, Homo sapien
gcttttagcgatgaaaatcacacca

SEQ ID NO: 2295441 - DNA, 25 bp, Homo sapien
aaaagttctggtccacctcctctcg

SEQ ID NO: 2295442 - DNA, 25 bp, Homo sapien
caccgagctgggagctgacatcact

SEQ ID NO: 2295443 - DNA, 25 bp, Homo sapien
accatgtcaggaatccgggcaggca

SEQ ID NO: 2295444 - DNA, 25 bp, Homo sapien
gccggcactagttccaaaagttctg

SEQ ID NO: 2295445 - DNA, 25 bp, Homo sapien
gcactgatgagagggtcctgaatcg

SEQ ID NO: 2295446 - DNA, 25 bp, Homo sapien
ggtgtatggagtcaatttccccgcc

SEQ ID NO: 2295447 - DNA, 25 bp, Homo sapien
ggcacacaaaatctccacataggaa

SEQ ID NO: 2295448 - DNA, 25 bp, Homo sapien
taagagtttatatgccacgccttcc

SEQ ID NO: 2295449 - DNA, 25 bp, Homo sapien
cctggcaacagtaggatcctcactg

SEQ ID NO: 2295450 - DNA, 25 bp, Homo sapien
cacaatgaagtccactcccatttcc

SEQ ID NO: 2295451 - DNA, 25 bp, Homo sapien
taggatcctcactgctgaggaggaa

SEQ ID NO: 2295452 - DNA, 25 bp, Homo sapien
gggcctgggatacggattttgactc

SEQ ID NO: 2295453 - DNA, 25 bp, Homo sapien
ttgtgcttcttcccttggccaccat

SEQ ID NO: 2295454 - DNA, 25 bp, Homo sapien
gttgtgcttcttcccttggccacca

SEQ ID NO: 2295455 - DNA, 25 bp, Homo sapien
acagctttgtaacgagtctgttgca

SEQ ID NO: 2295456 - DNA, 25 bp, Homo sapien
gacagtctgttggatacagctttgt

SEQ ID NO: 2295457 - DNA, 25 bp, Homo sapien
tggatacagctttgtaacgagtctg

SEQ ID NO: 2295458 - DNA, 25 bp, Homo sapien
cagggacagtctgttggatacagct

SEQ ID NO: 2295459 - DNA, 25 bp, Homo sapien
ttcatcagcccccgtgtagtcctca

SEQ ID NO: 2295460 - DNA, 25 bp, Homo sapien
catcagcccccgtgtagtcctcaat

SEQ ID NO: 2295461 - DNA, 25 bp, Homo sapien
tcagcccccgtgtagtcctcaattt

SEQ ID NO: 2295462 - DNA, 25 bp, Homo sapien
agttcatcagcccccgtgtagtcct

SEQ ID NO: 2295463 - DNA, 25 bp, Homo sapien
cagagagaaggaggatgcgaaccca

SEQ ID NO: 2295464 - DNA, 25 bp, Homo sapien
ccagtaggagacaacggcaaggtct

SEQ ID NO: 2295465 - DNA, 25 bp, Homo sapien
cggcaaggtctgtatcagagagaag

SEQ ID NO: 2295466 - DNA, 25 bp, Homo sapien
gaaggaggatgcgaacccagatata

SEQ ID NO: 2295467 - DNA, 25 bp, Homo sapien
taagcaaagagaagagcgataggaa

SEQ ID NO: 2295468 - DNA, 25 bp, Homo sapien
agaggttaagcaaagagaagagcga

SEQ ID NO: 2295469 - DNA, 25 bp, Homo sapien
gaggagaggttaagcaaagagaaga

SEQ ID NO: 2295470 - DNA, 25 bp, Homo sapien
agagaagagcgataggaaaaacaga

SEQ ID NO: 2295471 - DNA, 25 bp, Homo sapien
cacgagtgagttctgactgagactg

SEQ ID NO: 2295472 - DNA, 25 bp, Homo sapien
aagttcctgcacgagtgagttctga

SEQ ID NO: 2295473 - DNA, 25 bp, Homo sapien
cctgatgaactgcttttaagtgggt

SEQ ID NO: 2295474 - DNA, 25 bp, Homo sapien
cctgcaaagttcctgcacgagtgag

SEQ ID NO: 2295475 - DNA, 25 bp, Homo sapien
ccgaattggtacttgagcagttaaa

SEQ ID NO: 2295476 - DNA, 25 bp, Homo sapien
caccgaattggtacttgagcagtta

SEQ ID NO: 2295477 - DNA, 25 bp, Homo sapien
gaattggtacttgagcagttaaaac

SEQ ID NO: 2295478 - DNA, 25 bp, Homo sapien
tggtacttgagcagttaaaacccca

SEQ ID NO: 2295479 - DNA, 25 bp, Homo sapien
tcagaatagagacttccagagcagt

SEQ ID NO: 2295480 - DNA, 25 bp, Homo sapien
caggaaaccctgtgataccctactt

SEQ ID NO: 2295481 - DNA, 25 bp, Homo sapien
tttcccatgatacatagtgggtgcc

SEQ ID NO: 2295482 - DNA, 25 bp, Homo sapien
gacagaggaaagttggagaaccgca

SEQ ID NO: 2295483 - DNA, 25 bp, Homo sapien
catcactaggcatattttttagtcc

SEQ ID NO: 2295484 - DNA, 25 bp, Homo sapien
gttaatagtcaagtcagtaccaagt

SEQ ID NO: 2295485 - DNA, 25 bp, Homo sapien
tcctttgtatcctgtcagttaatag

SEQ ID NO: 2295486 - DNA, 25 bp, Homo sapien
gtaccaagtttgtttgtccattctc

SEQ ID NO: 2295487 - DNA, 25 bp, Homo sapien
gaggctaagccctgttacaccgtaa

SEQ ID NO: 2295488 - DNA, 25 bp, Homo sapien
gttacggcgacccattcaactgcat

SEQ ID NO: 2295489 - DNA, 25 bp, Homo sapien
tagacatttgttcagtgcaactggc

SEQ ID NO: 2295490 - DNA, 25 bp, Homo sapien
gatggaggagcacaacccattgcct

SEQ ID NO: 2295491 - DNA, 25 bp, Homo sapien
acccggagccttggattactgccca

SEQ ID NO: 2295492 - DNA, 25 bp, Homo sapien
agccgagctcgggttcaaagtttgc

SEQ ID NO: 2295493 - DNA, 25 bp, Homo sapien
cactgatagagtccagctccctgtt

SEQ ID NO: 2295494 - DNA, 25 bp, Homo sapien
gggacaatgtatgggcacccagagc

SEQ ID NO: 2295495 - DNA, 25 bp, Homo sapien
gttttacctctaagcacagatgcag

SEQ ID NO: 2295496 - DNA, 25 bp, Homo sapien
gatttagatcctgactttgtgccct

SEQ ID NO: 2295497 - DNA, 25 bp, Homo sapien
cagtcctgctttgaggaacagccaa

SEQ ID NO: 2295498 - DNA, 25 bp, Homo sapien
caaggataaacctctggaccaggag

SEQ ID NO: 2295499 - DNA, 25 bp, Homo sapien
ccagcacctggccttgacggggagt

SEQ ID NO: 2295500 - DNA, 25 bp, Homo sapien
acagggcagtcatggcataagacag

SEQ ID NO: 2295501 - DNA, 25 bp, Homo sapien
gggcagtcatggcataagacaggaa

SEQ ID NO: 2295502 - DNA, 25 bp, Homo sapien
cagcacctggccttgacggggagtc

SEQ ID NO: 2295503 - DNA, 25 bp, Homo sapien
aggccctgtcccgatccccaccagc

SEQ ID NO: 2295504 - DNA, 25 bp, Homo sapien
catggcgggtttctgcaagtcagtc

SEQ ID NO: 2295505 - DNA, 25 bp, Homo sapien
ggcgggtttctgcaagtcagtcact

SEQ ID NO: 2295506 - DNA, 25 bp, Homo sapien
acatggcgggtttctgcaagtcagt

SEQ ID NO: 2295507 - DNA, 25 bp, Homo sapien
aaaagcaggtttaaagctgatttat

SEQ ID NO: 2295508 - DNA, 25 bp, Homo sapien
agcaggtttaaagctgatttatttc

SEQ ID NO: 2295509 - DNA, 25 bp, Homo sapien
gcaaagtgatccacacgttctttta

SEQ ID NO: 2295510 - DNA, 25 bp, Homo sapien
aaagtgatccacacgttcttttata

SEQ ID NO: 2295511 - DNA, 25 bp, Homo sapien
taagggattacacctcagctcaagg

SEQ ID NO: 2295512 - DNA, 25 bp, Homo sapien
taggattacaccactggtaagggat

SEQ ID NO: 2295513 - DNA, 25 bp, Homo sapien
tagcctaactatgtcaagccaagca

SEQ ID NO: 2295514 - DNA, 25 bp, Homo sapien
taagaacacagaagacaattaactg

SEQ ID NO: 2295515 - DNA, 25 bp, Homo sapien
caacttccggacttcaatgtattgg

SEQ ID NO: 2295516 - DNA, 25 bp, Homo sapien
gaacaaagccgtcatccaagtgcag

SEQ ID NO: 2295517 - DNA, 25 bp, Homo sapien
gtagaaatgtgacctccttgagcag

SEQ ID NO: 2295518 - DNA, 25 bp, Homo sapien
ccttgagcaggaaaacaacttccgg

SEQ ID NO: 2295519 - DNA, 25 bp, Homo sapien
gaggtgcccctaggtgctggccatt

SEQ ID NO: 2295520 - DNA, 25 bp, Homo sapien
tcctaagatgccctacagtgggcca

SEQ ID NO: 2295521 - DNA, 25 bp, Homo sapien
tctaaatgttcaaagcctggcagca

SEQ ID NO: 2295522 - DNA, 25 bp, Homo sapien
ggctgtgcacgaaaatgagcatgat

SEQ ID NO: 2295523 - DNA, 25 bp, Homo sapien
tattgaagctcctccgtagaacaga

SEQ ID NO: 2295524 - DNA, 25 bp, Homo sapien
tctataatcggatcctgaggcaatt

SEQ ID NO: 2295525 - DNA, 25 bp, Homo sapien
cttggaactggcctaatgtgctact

SEQ ID NO: 2295526 - DNA, 25 bp, Homo sapien
ggtaagaattcgtacctggcacata

SEQ ID NO: 2295527 - DNA, 25 bp, Homo sapien
tgctgcctgaactttgggtgggcct

SEQ ID NO: 2295528 - DNA, 25 bp, Homo sapien
agctggctgaggcagcatatcctct

SEQ ID NO: 2295529 - DNA, 25 bp, Homo sapien
ctggctgaggcagcatatcctctcc

SEQ ID NO: 2295530 - DNA, 25 bp, Homo sapien
tgaactttgggtgggccttcagctg

SEQ ID NO: 2295531 - DNA, 25 bp, Homo sapien
ggatgtgagttccataaatgagtaa

SEQ ID NO: 2295532 - DNA, 25 bp, Homo sapien
acttggctgctgtcatggttacgcc

SEQ ID NO: 2295533 - DNA, 25 bp, Homo sapien
gcctacttgggctatttttgctaaa

SEQ ID NO: 2295534 - DNA, 25 bp, Homo sapien
taggcgtctgctaccctaacttttg

SEQ ID NO: 2295535 - DNA, 25 bp, Homo sapien
gctcccctccagaaatggttcaggt

SEQ ID NO: 2295536 - DNA, 25 bp, Homo sapien
taaacaagagggtagcaagcaagga

SEQ ID NO: 2295537 - DNA, 25 bp, Homo sapien
gcttctaaatggagccaacctgtgg

SEQ ID NO: 2295538 - DNA, 25 bp, Homo sapien
gaatcttacgaccactaggaagcag

SEQ ID NO: 2295539 - DNA, 25 bp, Homo sapien
gaggacgacagctccaaatccaatt

SEQ ID NO: 2295540 - DNA, 25 bp, Homo sapien
caacctgatcctctctgtgggctat

SEQ ID NO: 2295541 - DNA, 25 bp, Homo sapien
tctaacagcgacatagaggacgaca

SEQ ID NO: 2295542 - DNA, 25 bp, Homo sapien
tgtgaggacacaacctcctgggaag

SEQ ID NO: 2295543 - DNA, 25 bp, Homo sapien
gaatataagatttgtagttctcgga

SEQ ID NO: 2295544 - DNA, 25 bp, Homo sapien
tgtagttctcggatgcagcagctgt

SEQ ID NO: 2295545 - DNA, 25 bp, Homo sapien
ataagatttgtagttctcggatgca

SEQ ID NO: 2295546 - DNA, 25 bp, Homo sapien
atttgtagttctcggatgcagcagc

SEQ ID NO: 2295547 - DNA, 25 bp, Homo sapien
gagctatgaatgtcaaaactgcaca

SEQ ID NO: 2295548 - DNA, 25 bp, Homo sapien
ctctgacggcatccctggacaacat

SEQ ID NO: 2295549 - DNA, 25 bp, Homo sapien
actggagagctatgaatgtcaaaac

SEQ ID NO: 2295550 - DNA, 25 bp, Homo sapien
gagagctatgaatgtcaaaactgca

SEQ ID NO: 2295551 - DNA, 25 bp, Homo sapien
gccagaaccatcaggtcaccagatg

SEQ ID NO: 2295552 - DNA, 25 bp, Homo sapien
cagaaccatcaggtcaccagatgga

SEQ ID NO: 2295553 - DNA, 25 bp, Homo sapien
ccagatggaagatggaaggtctggg

SEQ ID NO: 2295554 - DNA, 25 bp, Homo sapien
gaaccatcaggtcaccagatggaag

SEQ ID NO: 2295555 - DNA, 25 bp, Homo sapien
gctctgatagcatatctaccctgga

SEQ ID NO: 2295556 - DNA, 25 bp, Homo sapien
aaaacatccttacatctaagctctg

SEQ ID NO: 2295557 - DNA, 25 bp, Homo sapien
tctaccctggagagagtacttctgt

SEQ ID NO: 2295558 - DNA, 25 bp, Homo sapien
ctggagagagtacttctgtcaattc

SEQ ID NO: 2295559 - DNA, 25 bp, Homo sapien
atgcccttggaatgagtagtcacac

SEQ ID NO: 2295560 - DNA, 25 bp, Homo sapien
tcacccttcctgtgttacgatccag

SEQ ID NO: 2295561 - DNA, 25 bp, Homo sapien
tggaatgagtagtcacacagtctgc

SEQ ID NO: 2295562 - DNA, 25 bp, Homo sapien
tgcttactctccacaatgatgccct

SEQ ID NO: 2295563 - DNA, 25 bp, Homo sapien
tgcctcttgatttagctgtaccaag

SEQ ID NO: 2295564 - DNA, 25 bp, Homo sapien
ttccatcacaggaagagtctccgcc

SEQ ID NO: 2295565 - DNA, 25 bp, Homo sapien
cttgactgggcacttaatgttactc

SEQ ID NO: 2295566 - DNA, 25 bp, Homo sapien
aatgcctgctgtctaatcttgactg

SEQ ID NO: 2295567 - DNA, 25 bp, Homo sapien
catgcacacgctattcaggaaatgg

SEQ ID NO: 2295568 - DNA, 25 bp, Homo sapien
tactaagggctcaccaaatatttat

SEQ ID NO: 2295569 - DNA, 25 bp, Homo sapien
accttcaaccatgacatattgtctt

SEQ ID NO: 2295570 - DNA, 25 bp, Homo sapien
tcataacctcaagcatactaagggc

SEQ ID NO: 2295571 - DNA, 25 bp, Homo sapien
gtcaggggcaaattccaacccagat

SEQ ID NO: 2295572 - DNA, 25 bp, Homo sapien
ttattatttgtcaggggcaaattcc

SEQ ID NO: 2295573 - DNA, 25 bp, Homo sapien
tttgtcaggggcaaattccaaccca

SEQ ID NO: 2295574 - DNA, 25 bp, Homo sapien
tattatttgtcaggggcaaattcca

SEQ ID NO: 2295575 - DNA, 25 bp, Homo sapien
caacgctgcagccaacatgtcactt

SEQ ID NO: 2295576 - DNA, 25 bp, Homo sapien
ctgctccaacgctgcagccaacatg

SEQ ID NO: 2295577 - DNA, 25 bp, Homo sapien
tccaacgctgcagccaacatgtcac

SEQ ID NO: 2295578 - DNA, 25 bp, Homo sapien
acgctgcagccaacatgtcacttgc

SEQ ID NO: 2295579 - DNA, 25 bp, Homo sapien
ggagattggcaatcaaaaatcccat

SEQ ID NO: 2295580 - DNA, 25 bp, Homo sapien
aacttcccatgaatggagaggtggg

SEQ ID NO: 2295581 - DNA, 25 bp, Homo sapien
tcttccacaaggtgcagagctcgca

SEQ ID NO: 2295582 - DNA, 25 bp, Homo sapien
aaatcccattggaatattccagagc

SEQ ID NO: 2295583 - DNA, 25 bp, Homo sapien
tttttatgggcagaatcaggtgacc

SEQ ID NO: 2295584 - DNA, 25 bp, Homo sapien
taaaatcggagcacatgtgttgccc

SEQ ID NO: 2295585 - DNA, 25 bp, Homo sapien
cacagtaggtcattcaggcacaatc

SEQ ID NO: 2295586 - DNA, 25 bp, Homo sapien
tggcacttccggtcaaatactgctg

SEQ ID NO: 2295587 - DNA, 25 bp, Homo sapien
cttgtttgccaaggcctgagaaaac

SEQ ID NO: 2295588 - DNA, 25 bp, Homo sapien
tgtttgccaaggcctgagaaaacat

SEQ ID NO: 2295589 - DNA, 25 bp, Homo sapien
tttgccaaggcctgagaaaacattt

SEQ ID NO: 2295590 - DNA, 25 bp, Homo sapien
ttgccaaggcctgagaaaacatttc

SEQ ID NO: 2295591 - DNA, 25 bp, Homo sapien
cagcctttcttgatacacatctccg

SEQ ID NO: 2295592 - DNA, 25 bp, Homo sapien
gcctttcttgatacacatctccgtt

SEQ ID NO: 2295593 - DNA, 25 bp, Homo sapien
cctttcttgatacacatctccgttc

SEQ ID NO: 2295594 - DNA, 25 bp, Homo sapien
tttcttgatacacatctccgttccc

SEQ ID NO: 2295595 - DNA, 25 bp, Homo sapien
tttcttctgtggcattcaccttctc

SEQ ID NO: 2295596 - DNA, 25 bp, Homo sapien
cttcaagacaaaactccaaatctcg

SEQ ID NO: 2295597 - DNA, 25 bp, Homo sapien
aatctcgaatcttctctccctgagc

SEQ ID NO: 2295598 - DNA, 25 bp, Homo sapien
gacaaaactccaaatctcgaatctt

SEQ ID NO: 2295599 - DNA, 25 bp, Homo sapien
aaatcccatcttggttctggcctct

SEQ ID NO: 2295600 - DNA, 25 bp, Homo sapien
cagggaaatcccatcttggttctgg

SEQ ID NO: 2295601 - DNA, 25 bp, Homo sapien
tcagcagggaaatcccatcttggtt

SEQ ID NO: 2295602 - DNA, 25 bp, Homo sapien
aatcccatcttggttctggcctctg

SEQ ID NO: 2295603 - DNA, 25 bp, Homo sapien
taaaacacatgctatgggtgagagg

SEQ ID NO: 2295604 - DNA, 25 bp, Homo sapien
caagaaacttactgctgcatcagag

SEQ ID NO: 2295605 - DNA, 25 bp, Homo sapien
taatgtgctggtctaaatgaatcaa

SEQ ID NO: 2295606 - DNA, 25 bp, Homo sapien
tgcatgtgttttgagactctactac

SEQ ID NO: 2295607 - DNA, 25 bp, Homo sapien
aacctacgaggttttgctcaagtgc

SEQ ID NO: 2295608 - DNA, 25 bp, Homo sapien
tacagagcctctcctatatgttaga

SEQ ID NO: 2295609 - DNA, 25 bp, Homo sapien
ctgacgtgctactaaatactaggcc

SEQ ID NO: 2295610 - DNA, 25 bp, Homo sapien
cacagcaggaatggaaacctacgag

SEQ ID NO: 2295611 - DNA, 25 bp, Homo sapien
gccatcagatccaacttctgagttt

SEQ ID NO: 2295612 - DNA, 25 bp, Homo sapien
cttcaagttagatatttcagccatc

SEQ ID NO: 2295613 - DNA, 25 bp, Homo sapien
tcagccatcagatccaacttctgag

SEQ ID NO: 2295614 - DNA, 25 bp, Homo sapien
aacttcaagttagatatttcagcca

SEQ ID NO: 2295615 - DNA, 25 bp, Homo sapien
tcttaagaagtcaccagctcctagg

SEQ ID NO: 2295616 - DNA, 25 bp, Homo sapien
taaagttgtatgaatcagatgagac

SEQ ID NO: 2295617 - DNA, 25 bp, Homo sapien
tagcagcttggaaatcttaagaagt

SEQ ID NO: 2295618 - DNA, 25 bp, Homo sapien
cctatacctataaaatagcagcttg

SEQ ID NO: 2295619 - DNA, 25 bp, Homo sapien
cctcaaatcattgatctcctgaatc

SEQ ID NO: 2295620 - DNA, 25 bp, Homo sapien
taacctcaaatcattgatctcctga

SEQ ID NO: 2295621 - DNA, 25 bp, Homo sapien
tcactaacttttaacctcaaatcat

SEQ ID NO: 2295622 - DNA, 25 bp, Homo sapien
ttcactaacttttaacctcaaatca

SEQ ID NO: 2295623 - DNA, 25 bp, Homo sapien
tatgttctgtcggatgagttaagcc

SEQ ID NO: 2295624 - DNA, 25 bp, Homo sapien
caagctaaataaccgagaaaacagt

SEQ ID NO: 2295625 - DNA, 25 bp, Homo sapien
tcagatcagtggtgcttaaattcaa

SEQ ID NO: 2295626 - DNA, 25 bp, Homo sapien
ggaggttagatacaactcagagaaa

SEQ ID NO: 2295627 - DNA, 25 bp, Homo sapien
agagagacagaggagtgaaagaaaa

SEQ ID NO: 2295628 - DNA, 25 bp, Homo sapien
tagagagacagaggagtgaaagaaa

SEQ ID NO: 2295629 - DNA, 25 bp, Homo sapien
ctggtagagagacagaggagtgaaa

SEQ ID NO: 2295630 - DNA, 25 bp, Homo sapien
ggtagagagacagaggagtgaaaga

SEQ ID NO: 2295631 - DNA, 25 bp, Homo sapien
ccttgattttcatgctagaaagttt

SEQ ID NO: 2295632 - DNA, 25 bp, Homo sapien
accttgattttcatgctagaaagtt

SEQ ID NO: 2295633 - DNA, 25 bp, Homo sapien
gggatcccattgtcccttcaatcag

SEQ ID NO: 2295634 - DNA, 25 bp, Homo sapien
ggtgatttgtaatcaacaggtgaca

SEQ ID NO: 2295635 - DNA, 25 bp, Homo sapien
ccttcaatcagcttgaggtgatttg

SEQ ID NO: 2295636 - DNA, 25 bp, Homo sapien
gccactaaaaacatcatcacagcaa

SEQ ID NO: 2295637 - DNA, 25 bp, Homo sapien
tattttactaggcttgggtctcaga

SEQ ID NO: 2295638 - DNA, 25 bp, Homo sapien
gacagaatctcctacaacaatggga

SEQ ID NO: 2295639 - DNA, 25 bp, Homo sapien
gaaaatgacctctactgtggatacg

SEQ ID NO: 2295640 - DNA, 25 bp, Homo sapien
ttcgaaaacagatagtggagccctc

SEQ ID NO: 2295641 - DNA, 25 bp, Homo sapien
ttcttgtagcctttttacttcagat

SEQ ID NO: 2295642 - DNA, 25 bp, Homo sapien
ttgtagcctttttacttcagattcc

SEQ ID NO: 2295643 - DNA, 25 bp, Homo sapien
cttgtagcctttttacttcagattc

SEQ ID NO: 2295644 - DNA, 25 bp, Homo sapien
tgtagcctttttacttcagattcct

SEQ ID NO: 2295645 - DNA, 25 bp, Homo sapien
caggaaaacccattggattggaagt

SEQ ID NO: 2295646 - DNA, 25 bp, Homo sapien
gttagcatacattacaacaataagt

SEQ ID NO: 2295647 - DNA, 25 bp, Homo sapien
ctgtgcaggaaaacccattggattg

SEQ ID NO: 2295648 - DNA, 25 bp, Homo sapien
agttagcatacattacaacaataag

SEQ ID NO: 2295649 - DNA, 25 bp, Homo sapien
catgcaaagaacagtccaaggtagt

SEQ ID NO: 2295650 - DNA, 25 bp, Homo sapien
cactgtagagcggaaaggttgaatc

SEQ ID NO: 2295651 - DNA, 25 bp, Homo sapien
tacatccacaatgctgtgtgcccgg

SEQ ID NO: 2295652 - DNA, 25 bp, Homo sapien
tgaccctgaatcacctagactgcag

SEQ ID NO: 2295653 - DNA, 25 bp, Homo sapien
taatagatcccagacaaatagtgga

SEQ ID NO: 2295654 - DNA, 25 bp, Homo sapien
gatcccagacaaatagtggacttca

SEQ ID NO: 2295655 - DNA, 25 bp, Homo sapien
tctaatagatcccagacaaatagtg

SEQ ID NO: 2295656 - DNA, 25 bp, Homo sapien
tagatcccagacaaatagtggactt

SEQ ID NO: 2295657 - DNA, 25 bp, Homo sapien
attaaatattcaggctccatgaatc

SEQ ID NO: 2295658 - DNA, 25 bp, Homo sapien
ttaatgttgcattaaatattcaggc

SEQ ID NO: 2295659 - DNA, 25 bp, Homo sapien
gttgcattaaatattcaggctccat

SEQ ID NO: 2295660 - DNA, 25 bp, Homo sapien
ggatttaccttaatgttgcattaaa

SEQ ID NO: 2295661 - DNA, 25 bp, Homo sapien
aaaatcagctaaagttgcctgcttc

SEQ ID NO: 2295662 - DNA, 25 bp, Homo sapien
aaaaatcagctaaagttgcctgctt

SEQ ID NO: 2295663 - DNA, 25 bp, Homo sapien
catgaatgaacggtaagtgcctgat

SEQ ID NO: 2295664 - DNA, 25 bp, Homo sapien
gacataaaggccaaagtaagctgaa

SEQ ID NO: 2295665 - DNA, 25 bp, Homo sapien
caagggtgtgtgagaactagctatc

SEQ ID NO: 2295666 - DNA, 25 bp, Homo sapien
cagtgcgtgaaagccatgaatggta

SEQ ID NO: 2295667 - DNA, 25 bp, Homo sapien
agttatttactctccagactgaaat

SEQ ID NO: 2295668 - DNA, 25 bp, Homo sapien
catcaaatcagaagtcagttcagtt

SEQ ID NO: 2295669 - DNA, 25 bp, Homo sapien
aatcagaagtcagttcagttcacat

SEQ ID NO: 2295670 - DNA, 25 bp, Homo sapien
ttaaggtaaagatgttaatgatttc

SEQ ID NO: 2295671 - DNA, 25 bp, Homo sapien
catttgctgccatcaaggactccac

SEQ ID NO: 2295672 - DNA, 25 bp, Homo sapien
tcatttgctgccatcaaggactcca

SEQ ID NO: 2295673 - DNA, 25 bp, Homo sapien
tttgctgccatcaaggactccacag

SEQ ID NO: 2295674 - DNA, 25 bp, Homo sapien
ttgctgccatcaaggactccacagc

SEQ ID NO: 2295675 - DNA, 25 bp, Homo sapien
cactgtcgaagatcttctattttcc

SEQ ID NO: 2295676 - DNA, 25 bp, Homo sapien
ctgttcaggcactgtcgaagatctt

SEQ ID NO: 2295677 - DNA, 25 bp, Homo sapien
gtcgaagatcttctattttccgatc

SEQ ID NO: 2295678 - DNA, 25 bp, Homo sapien
tcaggcactgtcgaagatcttctat

SEQ ID NO: 2295679 - DNA, 25 bp, Homo sapien
gggccagtaccaccgtgtcttgcat

SEQ ID NO: 2295680 - DNA, 25 bp, Homo sapien
tgggccagtaccaccgtgtcttgca

SEQ ID NO: 2295681 - DNA, 25 bp, Homo sapien
cttgggccagtaccaccgtgtcttg

SEQ ID NO: 2295682 - DNA, 25 bp, Homo sapien
gccagtaccaccgtgtcttgcattt

SEQ ID NO: 2295683 - DNA, 25 bp, Homo sapien
tcactgaaaccctgtgcatccagca

SEQ ID NO: 2295684 - DNA, 25 bp, Homo sapien
ctgggagatcccattactggagtgg

SEQ ID NO: 2295685 - DNA, 25 bp, Homo sapien
ggaacacttgtgttaaatgggtcac

SEQ ID NO: 2295686 - DNA, 25 bp, Homo sapien
gagtgggtgatggacttttctccag

SEQ ID NO: 2295687 - DNA, 25 bp, Homo sapien
acacagtctcttcaacataaaggaa

SEQ ID NO: 2295688 - DNA, 25 bp, Homo sapien
ataaaggaaatactgaaagtctatt

SEQ ID NO: 2295689 - DNA, 25 bp, Homo sapien
ggaaatactgaaagtctattaatac

SEQ ID NO: 2295690 - DNA, 25 bp, Homo sapien
aaggaaatactgaaagtctattaat

SEQ ID NO: 2295691 - DNA, 25 bp, Homo sapien
cagggaaacttagctagagataggc

SEQ ID NO: 2295692 - DNA, 25 bp, Homo sapien
cctcaggatggactagactagaatc

SEQ ID NO: 2295693 - DNA, 25 bp, Homo sapien
tgtggctgtaaaaccctttgctaag

SEQ ID NO: 2295694 - DNA, 25 bp, Homo sapien
gatcaagcacaagggctatcaggaa

SEQ ID NO: 2295695 - DNA, 25 bp, Homo sapien
tgaagggatggaaacttgcaagatg

SEQ ID NO: 2295696 - DNA, 25 bp, Homo sapien
aaatgaagtctctggcttaggagtc

SEQ ID NO: 2295697 - DNA, 25 bp, Homo sapien
gaaacttgcaagatggtagtatgga

SEQ ID NO: 2295698 - DNA, 25 bp, Homo sapien
ccatgcttacagttgctggcaataa

SEQ ID NO: 2295699 - DNA, 25 bp, Homo sapien
ggcaccaaggattatgtttccatca

SEQ ID NO: 2295700 - DNA, 25 bp, Homo sapien
gggtatcaacagtggcaccaaggat

SEQ ID NO: 2295701 - DNA, 25 bp, Homo sapien
tatcacacagttgggtatcaacagt

SEQ ID NO: 2295702 - DNA, 25 bp, Homo sapien
aaaagtttatcacacagttgggtat

SEQ ID NO: 2295703 - DNA, 25 bp, Homo sapien
agtaataacaattaataataagtgg

SEQ ID NO: 2295704 - DNA, 25 bp, Homo sapien
cagtaataacaattaataataagtg

SEQ ID NO: 2295705 - DNA, 25 bp, Homo sapien
taacagtaataacaattaataataa

SEQ ID NO: 2295706 - DNA, 25 bp, Homo sapien
aacagtaataacaattaataataag

SEQ ID NO: 2295707 - DNA, 25 bp, Homo sapien
caggctgctggacttctgcagactt

SEQ ID NO: 2295708 - DNA, 25 bp, Homo sapien
cccaggctgctggacttctgcagac

SEQ ID NO: 2295709 - DNA, 25 bp, Homo sapien
gatgtctctttcttcagattgccca

SEQ ID NO: 2295710 - DNA, 25 bp, Homo sapien
gctggacttctgcagacttgaagtt

SEQ ID NO: 2295711 - DNA, 25 bp, Homo sapien
ctgaagtcttctgaatagtttcctt

SEQ ID NO: 2295712 - DNA, 25 bp, Homo sapien
tctgaagtcttctgaatagtttcct

SEQ ID NO: 2295713 - DNA, 25 bp, Homo sapien
tgaagtcttctgaatagtttccttt

SEQ ID NO: 2295714 - DNA, 25 bp, Homo sapien
ctctgaagtcttctgaatagtttcc

SEQ ID NO: 2295715 - DNA, 25 bp, Homo sapien
aagatctgacttttcgagtgccgaa

SEQ ID NO: 2295716 - DNA, 25 bp, Homo sapien
ctaagtttggtgcacttgctgttct

SEQ ID NO: 2295717 - DNA, 25 bp, Homo sapien
tgccgaaggggttgtcatccatgga

SEQ ID NO: 2295718 - DNA, 25 bp, Homo sapien
gtcccaaatggcctgctttctgccg

SEQ ID NO: 2295719 - DNA, 25 bp, Homo sapien
cacacgcagcccaatggagagaaca

SEQ ID NO: 2295720 - DNA, 25 bp, Homo sapien
cggcacacagtgcttctgatgttac

SEQ ID NO: 2295721 - DNA, 25 bp, Homo sapien
gggaaactccatgatgaagtcaaag

SEQ ID NO: 2295722 - DNA, 25 bp, Homo sapien
caaatacacaccgtggaggagaggc

SEQ ID NO: 2295723 - DNA, 25 bp, Homo sapien
ctagggtgggtgcactggcacttcg

SEQ ID NO: 2295724 - DNA, 25 bp, Homo sapien
ggtgggtgcactggcacttcgttta

SEQ ID NO: 2295725 - DNA, 25 bp, Homo sapien
ggtgcactggcacttcgtttacgat

SEQ ID NO: 2295726 - DNA, 25 bp, Homo sapien
tgggtgcactggcacttcgtttacg

SEQ ID NO: 2295727 - DNA, 25 bp, Homo sapien
gaagtcccgtttgctggtccatgtg

SEQ ID NO: 2295728 - DNA, 25 bp, Homo sapien
atggagaacggactgcaaggacctg

SEQ ID NO: 2295729 - DNA, 25 bp, Homo sapien
tatatcgatagagagagaagtcccg

SEQ ID NO: 2295730 - DNA, 25 bp, Homo sapien
cactctgagggatgctgcacacgtc

SEQ ID NO: 2295731 - DNA, 25 bp, Homo sapien
tcaaatcagttacccagttcaagca

SEQ ID NO: 2295732 - DNA, 25 bp, Homo sapien
taaaagaatcacatccacagttgcc

SEQ ID NO: 2295733 - DNA, 25 bp, Homo sapien
acacaagggctactgttgtcttcag

SEQ ID NO: 2295734 - DNA, 25 bp, Homo sapien
caagaacagtgtttcagcaagatct

SEQ ID NO: 2295735 - DNA, 25 bp, Homo sapien
acccgccaccacacctggctaattt

SEQ ID NO: 2295736 - DNA, 25 bp, Homo sapien
tctctgcctcagtgtcccaggtagc

SEQ ID NO: 2295737 - DNA, 25 bp, Homo sapien
aattctctgcctcagtgtcccaggt

SEQ ID NO: 2295738 - DNA, 25 bp, Homo sapien
cacccgccaccacacctggctaatt

SEQ ID NO: 2295739 - DNA, 25 bp, Homo sapien
ctttgctgtagcacccctgcttttt

SEQ ID NO: 2295740 - DNA, 25 bp, Homo sapien
gtcatctgatagtgtctttgctgta

SEQ ID NO: 2295741 - DNA, 25 bp, Homo sapien
tgacatgaccactctcctacatctg

SEQ ID NO: 2295742 - DNA, 25 bp, Homo sapien
tccttttgcttcttgacatgaccac

SEQ ID NO: 2295743 - DNA, 25 bp, Homo sapien
taatcttcttggttctagaactgtt

SEQ ID NO: 2295744 - DNA, 25 bp, Homo sapien
ctagaactgttaagaattcttctgt

SEQ ID NO: 2295745 - DNA, 25 bp, Homo sapien
tcttcttggttctagaactgttaag

SEQ ID NO: 2295746 - DNA, 25 bp, Homo sapien
gatgttaatcttcttggttctagaa

SEQ ID NO: 2295747 - DNA, 25 bp, Homo sapien
ctccaagagcagaatgcagacaatg

SEQ ID NO: 2295748 - DNA, 25 bp, Homo sapien
gagcagaatgcagacaatgaatttt

SEQ ID NO: 2295749 - DNA, 25 bp, Homo sapien
cagaatgcagacaatgaattttaaa

SEQ ID NO: 2295750 - DNA, 25 bp, Homo sapien
tccaagagcagaatgcagacaatga

SEQ ID NO: 2295751 - DNA, 25 bp, Homo sapien
tctgtgaatcttttggccgagaaga

SEQ ID NO: 2295752 - DNA, 25 bp, Homo sapien
agccagatctaggtgctctgctgtc

SEQ ID NO: 2295753 - DNA, 25 bp, Homo sapien
atggaggcggtatctggaagggact

SEQ ID NO: 2295754 - DNA, 25 bp, Homo sapien
ttttggccgagaagaagcaccagcc

SEQ ID NO: 2295755 - DNA, 25 bp, Homo sapien
tcttttgaattcaggctcagacatg

SEQ ID NO: 2295756 - DNA, 25 bp, Homo sapien
aagtctcgagaccaacctaatcggg

SEQ ID NO: 2295757 - DNA, 25 bp, Homo sapien
cgcggttgcccttgtccctcctctt

SEQ ID NO: 2295758 - DNA, 25 bp, Homo sapien
gaatgtagttgattgacttctccta

SEQ ID NO: 2295759 - DNA, 25 bp, Homo sapien
gttccatcagccaattgcaaacctg

SEQ ID NO: 2295760 - DNA, 25 bp, Homo sapien
tgcaaaagcgtttggccagatgcaa

SEQ ID NO: 2295761 - DNA, 25 bp, Homo sapien
tgctccttggtccacttggcaaatg

SEQ ID NO: 2295762 - DNA, 25 bp, Homo sapien
ccagtgcttgccagaattcaggtac

SEQ ID NO: 2295763 - DNA, 25 bp, Homo sapien
ctggagtttctttcgatgaagtgaa

SEQ ID NO: 2295764 - DNA, 25 bp, Homo sapien
tagtgacccagttgaaatccagctt

SEQ ID NO: 2295765 - DNA, 25 bp, Homo sapien
tgacccagttgaaatccagcttccc

SEQ ID NO: 2295766 - DNA, 25 bp, Homo sapien
ccagggcttggagtgctagctggag

SEQ ID NO: 2295767 - DNA, 25 bp, Homo sapien
aactgggtcttatattgagggaggc

SEQ ID NO: 2295768 - DNA, 25 bp, Homo sapien
tgtagcattcgaccatcaacccgtc

SEQ ID NO: 2295769 - DNA, 25 bp, Homo sapien
aacagtcatgtaatgtagcattcga

SEQ ID NO: 2295770 - DNA, 25 bp, Homo sapien
tcaacccgtccttcatcaaactggg

SEQ ID NO: 2295771 - DNA, 25 bp, Homo sapien
aaatccttgaggctactaaccaggc

SEQ ID NO: 2295772 - DNA, 25 bp, Homo sapien
taaggacctgtctgctattgaatag

SEQ ID NO: 2295773 - DNA, 25 bp, Homo sapien
ggctgggttttctgaactaaggcac

SEQ ID NO: 2295774 - DNA, 25 bp, Homo sapien
gcaccgctcctagcaaggctgggtt

SEQ ID NO: 2295775 - DNA, 25 bp, Homo sapien
tattgatcctcaggacctggatggc

SEQ ID NO: 2295776 - DNA, 25 bp, Homo sapien
caaccttcagagacagtaagtcatc

SEQ ID NO: 2295777 - DNA, 25 bp, Homo sapien
ctggatggcccttttgatactgaga

SEQ ID NO: 2295778 - DNA, 25 bp, Homo sapien
gcctccgtagacagtttggttcaaa

SEQ ID NO: 2295779 - DNA, 25 bp, Homo sapien
ggaagtctttatagtgatatttatc

SEQ ID NO: 2295780 - DNA, 25 bp, Homo sapien
ataggcattggccactatacttggc

SEQ ID NO: 2295781 - DNA, 25 bp, Homo sapien
cacgctggcgttgcagtggtataat

SEQ ID NO: 2295782 - DNA, 25 bp, Homo sapien
tctctgttgattagagtcaggaaaa

SEQ ID NO: 2295783 - DNA, 25 bp, Homo sapien
atattctgccaagtccacggagcgc

SEQ ID NO: 2295784 - DNA, 25 bp, Homo sapien
accactgcctctgagattgggcgca

SEQ ID NO: 2295785 - DNA, 25 bp, Homo sapien
actcgatggttagtccacttctgaa

SEQ ID NO: 2295786 - DNA, 25 bp, Homo sapien
tctgaacttctgatggggcgatggt

SEQ ID NO: 2295787 - DNA, 25 bp, Homo sapien
tgcctcagccccaatcagaaggttg

SEQ ID NO: 2295788 - DNA, 25 bp, Homo sapien
tagaagtacataatccggcagctcc

SEQ ID NO: 2295789 - DNA, 25 bp, Homo sapien
gagtggccaaatgtcttcgcagcaa

SEQ ID NO: 2295790 - DNA, 25 bp, Homo sapien
cgcagcaaagtcttattgggtggga

SEQ ID NO: 2295791 - DNA, 25 bp, Homo sapien
ttgcgccaagcaattattaaaccgt

SEQ ID NO: 2295792 - DNA, 25 bp, Homo sapien
caaaacgttgcctttgcgccaagca

SEQ ID NO: 2295793 - DNA, 25 bp, Homo sapien
ccgacaaaacgttgcctttgcgcca

SEQ ID NO: 2295794 - DNA, 25 bp, Homo sapien
ttaaaccgtatgagcctgaaccaac

SEQ ID NO: 2295795 - DNA, 25 bp, Homo sapien
aagggacatgaaccttggaccctca

SEQ ID NO: 2295796 - DNA, 25 bp, Homo sapien
cacccaaaaagggacatgaaccttg

SEQ ID NO: 2295797 - DNA, 25 bp, Homo sapien
tgatgctctactgactgagctatct

SEQ ID NO: 2295798 - DNA, 25 bp, Homo sapien
ctctactgactgagctatctgggtg

SEQ ID NO: 2295799 - DNA, 25 bp, Homo sapien
gaatccaattttgcaaggtttttca

SEQ ID NO: 2295800 - DNA, 25 bp, Homo sapien
agctgaatccaattttgcaaggttt

SEQ ID NO: 2295801 - DNA, 25 bp, Homo sapien
gctgaatccaattttgcaaggtttt

SEQ ID NO: 2295802 - DNA, 25 bp, Homo sapien
atccaattttgcaaggtttttcaat

SEQ ID NO: 2295803 - DNA, 25 bp, Homo sapien
taaccggtccaaatcatcttcctca

SEQ ID NO: 2295804 - DNA, 25 bp, Homo sapien
caggcgcatatccaaaccaggttta

SEQ ID NO: 2295805 - DNA, 25 bp, Homo sapien
gtcccaattccattggacaaacata

SEQ ID NO: 2295806 - DNA, 25 bp, Homo sapien
tcttagatgcacttcctgatgcctg

SEQ ID NO: 2295807 - DNA, 25 bp, Homo sapien
tcactgtcccttctgaatcttccat

SEQ ID NO: 2295808 - DNA, 25 bp, Homo sapien
ttgttgatgccttcagagaatgcac

SEQ ID NO: 2295809 - DNA, 25 bp, Homo sapien
attgttgatgccttcagagaatgca

SEQ ID NO: 2295810 - DNA, 25 bp, Homo sapien
gtcttcatctgtaatgctggcactg

SEQ ID NO: 2295811 - DNA, 25 bp, Homo sapien
cttcatctgtaatgctggcactggg

SEQ ID NO: 2295812 - DNA, 25 bp, Homo sapien
cactgggggaacgggcagcaaaatc

SEQ ID NO: 2295813 - DNA, 25 bp, Homo sapien
gagtcttcatctgtaatgctggcac

SEQ ID NO: 2295814 - DNA, 25 bp, Homo sapien
tatttgggcccagtgctacagaaaa

SEQ ID NO: 2295815 - DNA, 25 bp, Homo sapien
taccgcggatatgaatggaaacact

SEQ ID NO: 2295816 - DNA, 25 bp, Homo sapien
tacttaggtggctacagtgaacact

SEQ ID NO: 2295817 - DNA, 25 bp, Homo sapien
tttttgtggcaacttcagaatcggc

SEQ ID NO: 2295818 - DNA, 25 bp, Homo sapien
tttttgaagtggtgacatctagtca

SEQ ID NO: 2295819 - DNA, 25 bp, Homo sapien
caaatcaattgttatgaataaatag

SEQ ID NO: 2295820 - DNA, 25 bp, Homo sapien
tgggagaccgaggggggcgattcac

SEQ ID NO: 2295821 - DNA, 25 bp, Homo sapien
caggttctaagaacaaattgatttt

SEQ ID NO: 2295822 - DNA, 25 bp, Homo sapien
taggttataccatcctgaataaaaa

SEQ ID NO: 2295823 - DNA, 25 bp, Homo sapien
tacctattatcagttaggttatacc

SEQ ID NO: 2295824 - DNA, 25 bp, Homo sapien
catatggtaacaccagcagtgtatg

SEQ ID NO: 2295825 - DNA, 25 bp, Homo sapien
atttcctttcatatggtaacaccag

SEQ ID NO: 2295826 - DNA, 25 bp, Homo sapien
aagcctgttactatgaacaacggaa

SEQ ID NO: 2295827 - DNA, 25 bp, Homo sapien
ttctcaaacaaaggcctcaaattcc

SEQ ID NO: 2295828 - DNA, 25 bp, Homo sapien
ccattcgaacaaatttatggcagtt

SEQ ID NO: 2295829 - DNA, 25 bp, Homo sapien
tctgttgatacacattataaactcc

SEQ ID NO: 2295830 - DNA, 25 bp, Homo sapien
tggttcagacgtacttctttttcaa

SEQ ID NO: 2295831 - DNA, 25 bp, Homo sapien
ggaggccacatctgttaatggttca

SEQ ID NO: 2295832 - DNA, 25 bp, Homo sapien
tatcaaacatgtgaatctggttcag

SEQ ID NO: 2295833 - DNA, 25 bp, Homo sapien
caaagtaaaagttctgcagggaggc

SEQ ID NO: 2295834 - DNA, 25 bp, Homo sapien
cattcagagtatttgcagctgggca

SEQ ID NO: 2295835 - DNA, 25 bp, Homo sapien
cagtctgcaccaaacaggaaggctt

SEQ ID NO: 2295836 - DNA, 25 bp, Homo sapien
cagagtctgtactgcgagctgaagc

SEQ ID NO: 2295837 - DNA, 25 bp, Homo sapien
cacaaggcttagattccacaggagg

SEQ ID NO: 2295838 - DNA, 25 bp, Homo sapien
gcagctctttgatgaacacacaatc

SEQ ID NO: 2295839 - DNA, 25 bp, Homo sapien
gagaatgctgatataaaccttgccc

SEQ ID NO: 2295840 - DNA, 25 bp, Homo sapien
gaatgctgatataaaccttgcccac

SEQ ID NO: 2295841 - DNA, 25 bp, Homo sapien
cagagaatgctgatataaaccttgc

SEQ ID NO: 2295842 - DNA, 25 bp, Homo sapien
tcagagaatgctgatataaaccttg

SEQ ID NO: 2295843 - DNA, 25 bp, Homo sapien
aaaatcccatgctggaatgatgcaa

SEQ ID NO: 2295844 - DNA, 25 bp, Homo sapien
tctctctctgtaattgcgacatgaa

SEQ ID NO: 2295845 - DNA, 25 bp, Homo sapien
tacaggccactcacataatacatat

SEQ ID NO: 2295846 - DNA, 25 bp, Homo sapien
cgacatgaatgtactttgatcccag

SEQ ID NO: 2295847 - DNA, 25 bp, Homo sapien
tctagattgaagttaatgacgcgcc

SEQ ID NO: 2295848 - DNA, 25 bp, Homo sapien
taatgaaggacaactacaaggccac

SEQ ID NO: 2295849 - DNA, 25 bp, Homo sapien
tgacgcgcctttagattcactgtgg

SEQ ID NO: 2295850 - DNA, 25 bp, Homo sapien
ggtgttccccaatgttgcaaggcgt

SEQ ID NO: 2295851 - DNA, 25 bp, Homo sapien
gttgagttactttttcctcagtgag

SEQ ID NO: 2295852 - DNA, 25 bp, Homo sapien
ccttctgacaagtatgcataaagaa

SEQ ID NO: 2295853 - DNA, 25 bp, Homo sapien
ctccttctgacaagtatgcataaag

SEQ ID NO: 2295854 - DNA, 25 bp, Homo sapien
tgcataaagaatgcgtataatgaca

SEQ ID NO: 2295855 - DNA, 25 bp, Homo sapien
tgcgtataatgacatttttgcctct

SEQ ID NO: 2295856 - DNA, 25 bp, Homo sapien
ttcataatgggtcttttgcctgagt

SEQ ID NO: 2295857 - DNA, 25 bp, Homo sapien
tcataatgggtcttttgcctgagtt

SEQ ID NO: 2295858 - DNA, 25 bp, Homo sapien
cataatgggtcttttgcctgagttt

SEQ ID NO: 2295859 - DNA, 25 bp, Homo sapien
ataatgggtcttttgcctgagtttg

SEQ ID NO: 2295860 - DNA, 25 bp, Homo sapien
atatttgtccttcagcttcgcagcc

SEQ ID NO: 2295861 - DNA, 25 bp, Homo sapien
tgcttgtcatctgcaacagtgtcat

SEQ ID NO: 2295862 - DNA, 25 bp, Homo sapien
tcagtctgctacaatatccttttca

SEQ ID NO: 2295863 - DNA, 25 bp, Homo sapien
atctgcaacagtgtcattccacctc

SEQ ID NO: 2295864 - DNA, 25 bp, Homo sapien
cgtaagcttacacttcagtatataa

SEQ ID NO: 2295865 - DNA, 25 bp, Homo sapien
ctctgaaattttcgtaagcttacac

SEQ ID NO: 2295866 - DNA, 25 bp, Homo sapien
ctaggttctctgaaattttcgtaag

SEQ ID NO: 2295867 - DNA, 25 bp, Homo sapien
aaattttcgtaagcttacacttcag

SEQ ID NO: 2295868 - DNA, 25 bp, Homo sapien
tgggcgacttgaaagtcaagtaccc

SEQ ID NO: 2295869 - DNA, 25 bp, Homo sapien
ggtctatgtcccttctcccctgatt

SEQ ID NO: 2295870 - DNA, 25 bp, Homo sapien
tgtgtttattggagtcgtatacatg

SEQ ID NO: 2295871 - DNA, 25 bp, Homo sapien
ttggagtcgtatacatgcttacttg

SEQ ID NO: 2295872 - DNA, 25 bp, Homo sapien
acggcaagccggaggggacaagcgg

SEQ ID NO: 2295873 - DNA, 25 bp, Homo sapien
ggacaagcggcgttcagtgtcaggg

SEQ ID NO: 2295874 - DNA, 25 bp, Homo sapien
gctaagcgcaggctccctgggctgg

SEQ ID NO: 2295875 - DNA, 25 bp, Homo sapien
tggggccgctaagcgcaggctccct

SEQ ID NO: 2295876 - DNA, 25 bp, Homo sapien
ttgccctcgactgcagagacagcca

SEQ ID NO: 2295877 - DNA, 25 bp, Homo sapien
gcaggctaggtgtcgggaccggagt

SEQ ID NO: 2295878 - DNA, 25 bp, Homo sapien
ggagaatgcacgcagagtccttgcc

SEQ ID NO: 2295879 - DNA, 25 bp, Homo sapien
ccgagtagacggcagtggagaatgc

SEQ ID NO: 2295880 - DNA, 25 bp, Homo sapien
gcagcaatttgtcctagcacagccg

SEQ ID NO: 2295881 - DNA, 25 bp, Homo sapien
gccgatgcccgataaacaacacagc

SEQ ID NO: 2295882 - DNA, 25 bp, Homo sapien
gcacagccgtatgactctcttaatg

SEQ ID NO: 2295883 - DNA, 25 bp, Homo sapien
aatccatggttcaacagcgccgatg

SEQ ID NO: 2295884 - DNA, 25 bp, Homo sapien
tcctccggggtaagcacgctatcaa

SEQ ID NO: 2295885 - DNA, 25 bp, Homo sapien
gcacttctccgctaataaatctgta

SEQ ID NO: 2295886 - DNA, 25 bp, Homo sapien
gctatcaagcatccctacaatctct

SEQ ID NO: 2295887 - DNA, 25 bp, Homo sapien
tccactagagtcctccggggtaagc

SEQ ID NO: 2295888 - DNA, 25 bp, Homo sapien
gactggattgaggaatacatagaca

SEQ ID NO: 2295889 - DNA, 25 bp, Homo sapien
taaagacatgagcacacccggctaa

SEQ ID NO: 2295890 - DNA, 25 bp, Homo sapien
gtgcccagccatgatagttaacttt

SEQ ID NO: 2295891 - DNA, 25 bp, Homo sapien
tacatagacatgtggtaaagcatta

SEQ ID NO: 2295892 - DNA, 25 bp, Homo sapien
cttggtggcctttcatttccgggtg

SEQ ID NO: 2295893 - DNA, 25 bp, Homo sapien
tactgcagagggtttaaatggtgct

SEQ ID NO: 2295894 - DNA, 25 bp, Homo sapien
tgctgcaactgggtaaacactaggc

SEQ ID NO: 2295895 - DNA, 25 bp, Homo sapien
taggccagtcctggtcaacagccat

SEQ ID NO: 2295896 - DNA, 25 bp, Homo sapien
gaagaggtactgcagagggtttaaa

SEQ ID NO: 2295897 - DNA, 25 bp, Homo sapien
gttctagatttccctcctttgccat

SEQ ID NO: 2295898 - DNA, 25 bp, Homo sapien
agttctagatttccctcctttgcca

SEQ ID NO: 2295899 - DNA, 25 bp, Homo sapien
taattgctacaggagtcaaatgcag

SEQ ID NO: 2295900 - DNA, 25 bp, Homo sapien
ttaattgctacaggagtcaaatgca

SEQ ID NO: 2295901 - DNA, 25 bp, Homo sapien
tgcttctcacatttctcgtcactgt

SEQ ID NO: 2295902 - DNA, 25 bp, Homo sapien
ttaagactactactcgtgctctggg

SEQ ID NO: 2295903 - DNA, 25 bp, Homo sapien
tctcgtcactgtccagtgcggctgg

SEQ ID NO: 2295904 - DNA, 25 bp, Homo sapien
cagatggtcctgatgaaacataatc

SEQ ID NO: 2295905 - DNA, 25 bp, Homo sapien
tatcaagttgacaggtaatatgtag

SEQ ID NO: 2295906 - DNA, 25 bp, Homo sapien
aatatgtaggttggtgagagcacag

SEQ ID NO: 2295907 - DNA, 25 bp, Homo sapien
taatatgtaggttggtgagagcaca

SEQ ID NO: 2295908 - DNA, 25 bp, Homo sapien
caagttgacaggtaatatgtaggtt

SEQ ID NO: 2295909 - DNA, 25 bp, Homo sapien
gggttgtttgccattccagataaca

SEQ ID NO: 2295910 - DNA, 25 bp, Homo sapien
taggtgtcagaaatgttaaggtact

SEQ ID NO: 2295911 - DNA, 25 bp, Homo sapien
aataccattttgtaaggcaataggg

SEQ ID NO: 2295912 - DNA, 25 bp, Homo sapien
tatttaactggaatcttatcagccc

SEQ ID NO: 2295913 - DNA, 25 bp, Homo sapien
ggtcttgcagtatcgctctcctaca

SEQ ID NO: 2295914 - DNA, 25 bp, Homo sapien
taatttcttctttgcgtgatcatct

SEQ ID NO: 2295915 - DNA, 25 bp, Homo sapien
tctgttttgatggtaagcacatctg

SEQ ID NO: 2295916 - DNA, 25 bp, Homo sapien
gatcatctaaattcaaactggaaag

SEQ ID NO: 2295917 - DNA, 25 bp, Homo sapien
cactgttagtagatacactgcataa

SEQ ID NO: 2295918 - DNA, 25 bp, Homo sapien
tcatggtataacactgttagtagat

SEQ ID NO: 2295919 - DNA, 25 bp, Homo sapien
tacactgcataatcgtaattctgcc

SEQ ID NO: 2295920 - DNA, 25 bp, Homo sapien
ctgcataatcgtaattctgcctcct

SEQ ID NO: 2295921 - DNA, 25 bp, Homo sapien
gctctttaaacccacaaggcctaga

SEQ ID NO: 2295922 - DNA, 25 bp, Homo sapien
tgcctgctctttaaacccacaaggc

SEQ ID NO: 2295923 - DNA, 25 bp, Homo sapien
ataccctggctacaccaaacttctg

SEQ ID NO: 2295924 - DNA, 25 bp, Homo sapien
tggccctgttagttctataccctgg

SEQ ID NO: 2295925 - DNA, 25 bp, Homo sapien
tgcaatgagaatctgccctgacccc

SEQ ID NO: 2295926 - DNA, 25 bp, Homo sapien
tcgactcctattttaatgctttgac

SEQ ID NO: 2295927 - DNA, 25 bp, Homo sapien
tgcacaactattctgccaggcatag

SEQ ID NO: 2295928 - DNA, 25 bp, Homo sapien
tccattccatgtgatcctgttctct

SEQ ID NO: 2295929 - DNA, 25 bp, Homo sapien
aattttgtgccctgacttatagttc

SEQ ID NO: 2295930 - DNA, 25 bp, Homo sapien
aattctgttacccaaagatggccca

SEQ ID NO: 2295931 - DNA, 25 bp, Homo sapien
ctgatatagtatcagcaggttgcaa

SEQ ID NO: 2295932 - DNA, 25 bp, Homo sapien
tcctggtcttttagcgaaagttcag

SEQ ID NO: 2295933 - DNA, 25 bp, Homo sapien
caaaccgccgagataaaggtggaca

SEQ ID NO: 2295934 - DNA, 25 bp, Homo sapien
aacatggctcttgtgcaggcactgg

SEQ ID NO: 2295935 - DNA, 25 bp, Homo sapien
gctcggcttgcacatgcccagataa

SEQ ID NO: 2295936 - DNA, 25 bp, Homo sapien
gctaccgttgtacaggcgctcttgg

SEQ ID NO: 2295937 - DNA, 25 bp, Homo sapien
aggctagtcgagtagtgagaacggg

SEQ ID NO: 2295938 - DNA, 25 bp, Homo sapien
gcaggtaaggtttccacccgtgcca

SEQ ID NO: 2295939 - DNA, 25 bp, Homo sapien
gcaccaagaagcaggtaaggtttcc

SEQ ID NO: 2295940 - DNA, 25 bp, Homo sapien
agagattccagcttgagtagacagc

SEQ ID NO: 2295941 - DNA, 25 bp, Homo sapien
attccagcttgagtagacagctcca

SEQ ID NO: 2295942 - DNA, 25 bp, Homo sapien
gtaggctttacagtaatacagcata

SEQ ID NO: 2295943 - DNA, 25 bp, Homo sapien
tttgtgaggctgtcagaaatactat

SEQ ID NO: 2295944 - DNA, 25 bp, Homo sapien
tataccctggttcaaagaagtgctg

SEQ ID NO: 2295945 - DNA, 25 bp, Homo sapien
gctacaggctgctatggaatcatct

SEQ ID NO: 2295946 - DNA, 25 bp, Homo sapien
aacttctttagtaccaaggagatca

SEQ ID NO: 2295947 - DNA, 25 bp, Homo sapien
agcagcctcgaccttgcagtctcag

SEQ ID NO: 2295948 - DNA, 25 bp, Homo sapien
gaatatgatgcacataatacgtggt

SEQ ID NO: 2295949 - DNA, 25 bp, Homo sapien
tgcatttctgagttgtaatcttcaa

SEQ ID NO: 2295950 - DNA, 25 bp, Homo sapien
cactggtctgtcaagctctgttacc

SEQ ID NO: 2295951 - DNA, 25 bp, Homo sapien
aatctgtctgccttacaatctgtac

SEQ ID NO: 2295952 - DNA, 25 bp, Homo sapien
aaccctgtactgttagccacctgca

SEQ ID NO: 2295953 - DNA, 25 bp, Homo sapien
caacaccttgtctgtgcactttggc

SEQ ID NO: 2295954 - DNA, 25 bp, Homo sapien
tttctttagtaccaaggagctcttc

SEQ ID NO: 2295955 - DNA, 25 bp, Homo sapien
tccatgtctgcttcagtcttacttt

SEQ ID NO: 2295956 - DNA, 25 bp, Homo sapien
tttcatctggagaagcgtttccagg

SEQ ID NO: 2295957 - DNA, 25 bp, Homo sapien
tctgatgagctattttcccatatat

SEQ ID NO: 2295958 - DNA, 25 bp, Homo sapien
tgagccccacaatctagaaagtagg

SEQ ID NO: 2295959 - DNA, 25 bp, Homo sapien
ggcacccagagagatacataccagg

SEQ ID NO: 2295960 - DNA, 25 bp, Homo sapien
tacattgaatgcagggtttcccagg

SEQ ID NO: 2295961 - DNA, 25 bp, Homo sapien
cttttctggtagcttggccctggca

SEQ ID NO: 2295962 - DNA, 25 bp, Homo sapien
gagttcattcataagtcagccctag

SEQ ID NO: 2295963 - DNA, 25 bp, Homo sapien
tccttcataacctacagactcctgg

SEQ ID NO: 2295964 - DNA, 25 bp, Homo sapien
tacttaccaattcagctcagtctag

SEQ ID NO: 2295965 - DNA, 25 bp, Homo sapien
gataagtagtataagggtgccccag

SEQ ID NO: 2295966 - DNA, 25 bp, Homo sapien
tgtgtaagaaaacgcagtttggtta

SEQ ID NO: 2295967 - DNA, 25 bp, Homo sapien
cggctgttgtatagtcatcctggca

SEQ ID NO: 2295968 - DNA, 25 bp, Homo sapien
tgttccacctggactcaacagtagc

SEQ ID NO: 2295969 - DNA, 25 bp, Homo sapien
gcagcagggccagtataaaccagga

SEQ ID NO: 2295970 - DNA, 25 bp, Homo sapien
catccaatagatgggacagactaag

SEQ ID NO: 2295971 - DNA, 25 bp, Homo sapien
ggcccgggcgcctcggctgcggacg

SEQ ID NO: 2295972 - DNA, 25 bp, Homo sapien
cggacgcgcagctgcgggaggcgga

SEQ ID NO: 2295973 - DNA, 25 bp, Homo sapien
ctcggctgcggacgcgcagctgcgg

SEQ ID NO: 2295974 - DNA, 25 bp, Homo sapien
gggcgcctcggctgcggacgcgcag

SEQ ID NO: 2295975 - DNA, 25 bp, Homo sapien
tcagcgccaaaaaagggccggcgga

SEQ ID NO: 2295976 - DNA, 25 bp, Homo sapien
tcccagcccctacgcgcgcgccggt

SEQ ID NO: 2295977 - DNA, 25 bp, Homo sapien
agcgctcaccgccagatctgcgcgc

SEQ ID NO: 2295978 - DNA, 25 bp, Homo sapien
ctcccgggcggcgccaggcgggaag

SEQ ID NO: 2295979 - DNA, 25 bp, Homo sapien
ggaagtagtcgctctgctcgatgag

SEQ ID NO: 2295980 - DNA, 25 bp, Homo sapien
ttgctcaccgggtagcagcggtcct

SEQ ID NO: 2295981 - DNA, 25 bp, Homo sapien
cggagcggtagagggcgcggaagta

SEQ ID NO: 2295982 - DNA, 25 bp, Homo sapien
tcctcttgctcaccgggtagcagcg

SEQ ID NO: 2295983 - DNA, 25 bp, Homo sapien
cgccggcgttgatgaagtccagcac

SEQ ID NO: 2295984 - DNA, 25 bp, Homo sapien
ggccccgccggcgttgatgaagtcc

SEQ ID NO: 2295985 - DNA, 25 bp, Homo sapien
ccccgccggcgttgatgaagtccag

SEQ ID NO: 2295986 - DNA, 25 bp, Homo sapien
caggagccagccttcgcgggccccg

SEQ ID NO: 2295987 - DNA, 25 bp, Homo sapien
gcacctcgtggaagtggacgaccat

SEQ ID NO: 2295988 - DNA, 25 bp, Homo sapien
ggcagttattgagccgcacctggga

SEQ ID NO: 2295989 - DNA, 25 bp, Homo sapien
tctcctcgtacctgagcatggacgg

SEQ ID NO: 2295990 - DNA, 25 bp, Homo sapien
gaggacaggagtcccagtcatccgg

SEQ ID NO: 2295991 - DNA, 25 bp, Homo sapien
ctgtacccgcccactatgaagaggt

SEQ ID NO: 2295992 - DNA, 25 bp, Homo sapien
tgtacccgcccactatgaagaggta

SEQ ID NO: 2295993 - DNA, 25 bp, Homo sapien
ccacctggagccactcgttggtgct

SEQ ID NO: 2295994 - DNA, 25 bp, Homo sapien
gaatgcgcagcggagatctcctggc

SEQ ID NO: 2295995 - DNA, 25 bp, Homo sapien
acctggagccactcgttggtgctgg

SEQ ID NO: 2295996 - DNA, 25 bp, Homo sapien
gggttgtaggaatgcgcagcggaga

SEQ ID NO: 2295997 - DNA, 25 bp, Homo sapien
gaggaggaccctcgagtcaaataaa

SEQ ID NO: 2295998 - DNA, 25 bp, Homo sapien
tgccaacctggttactgcctctagg

SEQ ID NO: 2295999 - DNA, 25 bp, Homo sapien
gatgtgtagctagaggaatgcaaga

SEQ ID NO: 2296000 - DNA, 25 bp, Homo sapien
gactaccaaggatgtatgaagggaa

SEQ ID NO: 2296001 - DNA, 25 bp, Homo sapien
caattacgtcatcagtttctgtaca

SEQ ID NO: 2296002 - DNA, 25 bp, Homo sapien
catccaacagtgactagaagaatgc

SEQ ID NO: 2296003 - DNA, 25 bp, Homo sapien
aatgctgggcttaaaggctgtcgtg

SEQ ID NO: 2296004 - DNA, 25 bp, Homo sapien
tcttgagggcagcaattacgtcatc

SEQ ID NO: 2296005 - DNA, 25 bp, Homo sapien
tcagtctgctgtgaggtgtgcaaca

SEQ ID NO: 2296006 - DNA, 25 bp, Homo sapien
gctgataaccagctatctgaccctg

SEQ ID NO: 2296007 - DNA, 25 bp, Homo sapien
aaaggtgctagaccaagtgaatttc

SEQ ID NO: 2296008 - DNA, 25 bp, Homo sapien
caagtttacaagaggatgagcagca

SEQ ID NO: 2296009 - DNA, 25 bp, Homo sapien
tctggtagtgtatcctccaatgaca

SEQ ID NO: 2296010 - DNA, 25 bp, Homo sapien
tgtaacactcaacgttagaaacggc

SEQ ID NO: 2296011 - DNA, 25 bp, Homo sapien
tgaattaacagccacaagtttgaag

SEQ ID NO: 2296012 - DNA, 25 bp, Homo sapien
caaaattccacgcatcctgctcggg

SEQ ID NO: 2296013 - DNA, 25 bp, Homo sapien
tacacatgggcagaccacctacctg

SEQ ID NO: 2296014 - DNA, 25 bp, Homo sapien
acatgggcagaccacctacctggtc

SEQ ID NO: 2296015 - DNA, 25 bp, Homo sapien
tgcccttcccagactgctgacgcct

SEQ ID NO: 2296016 - DNA, 25 bp, Homo sapien
gactgctgacgcctacacatgggca

SEQ ID NO: 2296017 - DNA, 25 bp, Homo sapien
tgctggtcaggaaagagctctcttg

SEQ ID NO: 2296018 - DNA, 25 bp, Homo sapien
taaatagatagtacaaccacctccc

SEQ ID NO: 2296019 - DNA, 25 bp, Homo sapien
gcaaggatgctctggtactaaattc

SEQ ID NO: 2296020 - DNA, 25 bp, Homo sapien
ggctgaccaaaaagctgggtttcca

SEQ ID NO: 2296021 - DNA, 25 bp, Homo sapien
catgtcaaataaaacggcaggtcta

SEQ ID NO: 2296022 - DNA, 25 bp, Homo sapien
taaagtcctaagagccaggttacac

SEQ ID NO: 2296023 - DNA, 25 bp, Homo sapien
ggaaaggcacccctctgcttgactg

SEQ ID NO: 2296024 - DNA, 25 bp, Homo sapien
tgaccaggcctatcttgaacaccca

SEQ ID NO: 2296025 - DNA, 25 bp, Homo sapien
acagaaatcacggtgggtggcccaa

SEQ ID NO: 2296026 - DNA, 25 bp, Homo sapien
cattttgacggctgcaggcgcttgg

SEQ ID NO: 2296027 - DNA, 25 bp, Homo sapien
aagccacggcattaggaaactgtcc

SEQ ID NO: 2296028 - DNA, 25 bp, Homo sapien
aaagtgctccttagtaacctggctg

SEQ ID NO: 2296029 - DNA, 25 bp, Homo sapien
tgtgcacctatggtaccagctgcta

SEQ ID NO: 2296030 - DNA, 25 bp, Homo sapien
cctatggtaccagctgctacttgga

SEQ ID NO: 2296031 - DNA, 25 bp, Homo sapien
tgcacctatggtaccagctgctact

SEQ ID NO: 2296032 - DNA, 25 bp, Homo sapien
tatggtaccagctgctacttggaag

SEQ ID NO: 2296033 - DNA, 25 bp, Homo sapien
tcccaactctttgggtgggctgaag

SEQ ID NO: 2296034 - DNA, 25 bp, Homo sapien
gagagacactaacaaaggtcctccc

SEQ ID NO: 2296035 - DNA, 25 bp, Homo sapien
attttcggccaagcatggtgtctca

SEQ ID NO: 2296036 - DNA, 25 bp, Homo sapien
gacagttgtagcgtagataagatca

SEQ ID NO: 2296037 - DNA, 25 bp, Homo sapien
taaaaccaggaaaaagcgcagctct

SEQ ID NO: 2296038 - DNA, 25 bp, Homo sapien
gaaatgtctacctctgcctgcataa

SEQ ID NO: 2296039 - DNA, 25 bp, Homo sapien
gaaagacaagtgatgacaccgcctc

SEQ ID NO: 2296040 - DNA, 25 bp, Homo sapien
tcttccgtgggagactcagactgga

SEQ ID NO: 2296041 - DNA, 25 bp, Homo sapien
tggacgtcacatgtttcaaagagcg

SEQ ID NO: 2296042 - DNA, 25 bp, Homo sapien
aacactcggtgttccaagctggtcg

SEQ ID NO: 2296043 - DNA, 25 bp, Homo sapien
tgtagatgccgtcgttatggagcgc

SEQ ID NO: 2296044 - DNA, 25 bp, Homo sapien
tctgctgcttgcgaatgtggacgtc

SEQ ID NO: 2296045 - DNA, 25 bp, Homo sapien
taaggattcactgtagggctccatc

SEQ ID NO: 2296046 - DNA, 25 bp, Homo sapien
tacatctgcacagtggacggcatac

SEQ ID NO: 2296047 - DNA, 25 bp, Homo sapien
tacagaatgcctagcagtgcaacct

SEQ ID NO: 2296048 - DNA, 25 bp, Homo sapien
gctaactgaaatggttctgcccgct

SEQ ID NO: 2296049 - DNA, 25 bp, Homo sapien
tggccaaacaggtagggtcagaact

SEQ ID NO: 2296050 - DNA, 25 bp, Homo sapien
tctttgagaaggacgccctggtgaa

SEQ ID NO: 2296051 - DNA, 25 bp, Homo sapien
cacagcaggaaggacgatgtcacaa

SEQ ID NO: 2296052 - DNA, 25 bp, Homo sapien
tggatcagagtacaccctcacttgg

SEQ ID NO: 2296053 - DNA, 25 bp, Homo sapien
ggattcggatcagggctccggatca

SEQ ID NO: 2296054 - DNA, 25 bp, Homo sapien
gccccatcagctctgcgagcatggt

SEQ ID NO: 2296055 - DNA, 25 bp, Homo sapien
tggactgtagtcaaacaagggattc

SEQ ID NO: 2296056 - DNA, 25 bp, Homo sapien
gctgtttgaaacacttggactgtag

SEQ ID NO: 2296057 - DNA, 25 bp, Homo sapien
tggggttttcccagctatgaaagac

SEQ ID NO: 2296058 - DNA, 25 bp, Homo sapien
agcttggggttttcccagctatgaa

SEQ ID NO: 2296059 - DNA, 25 bp, Homo sapien
gcttggggttttcccagctatgaaa

SEQ ID NO: 2296060 - DNA, 25 bp, Homo sapien
ctagcttggggttttcccagctatg

SEQ ID NO: 2296061 - DNA, 25 bp, Homo sapien
gacttggagggtagcgggctggcaa

SEQ ID NO: 2296062 - DNA, 25 bp, Homo sapien
tatgtggtaaacaaaccctccactc

SEQ ID NO: 2296063 - DNA, 25 bp, Homo sapien
agccgcctgttaattgggacttgga

SEQ ID NO: 2296064 - DNA, 25 bp, Homo sapien
cccttatggttatagcgtagccgcc

SEQ ID NO: 2296065 - DNA, 25 bp, Homo sapien
tcatgagctgtcctggtctaaattg

SEQ ID NO: 2296066 - DNA, 25 bp, Homo sapien
cctggtctaaattgcctttgccagc

SEQ ID NO: 2296067 - DNA, 25 bp, Homo sapien
catgagctgtcctggtctaaattgc

SEQ ID NO: 2296068 - DNA, 25 bp, Homo sapien
gagctgtcctggtctaaattgcctt

SEQ ID NO: 2296069 - DNA, 25 bp, Homo sapien
gacaatggttgcagaacaatgcgaa

SEQ ID NO: 2296070 - DNA, 25 bp, Homo sapien
aaaacacatcattgagtacccaaac

SEQ ID NO: 2296071 - DNA, 25 bp, Homo sapien
tgacaatggttgcagaacaatgcga

SEQ ID NO: 2296072 - DNA, 25 bp, Homo sapien
catcattgagtacccaaacattccc

SEQ ID NO: 2296073 - DNA, 25 bp, Homo sapien
tgtgccgaaagttgccaagtaagga

SEQ ID NO: 2296074 - DNA, 25 bp, Homo sapien
ctgtgccgaaagttgccaagtaagg

SEQ ID NO: 2296075 - DNA, 25 bp, Homo sapien
ccgaaagttgccaagtaaggaagct

SEQ ID NO: 2296076 - DNA, 25 bp, Homo sapien
aaagttgccaagtaaggaagcttct

SEQ ID NO: 2296077 - DNA, 25 bp, Homo sapien
ctccccattaatgattgaccaagta

SEQ ID NO: 2296078 - DNA, 25 bp, Homo sapien
cattaatgattgaccaagtaactgc

SEQ ID NO: 2296079 - DNA, 25 bp, Homo sapien
taatggcggcagtgaaatattagcc

SEQ ID NO: 2296080 - DNA, 25 bp, Homo sapien
gtaactgcaataatggcggcagtga

SEQ ID NO: 2296081 - DNA, 25 bp, Homo sapien
ctttatggtggaggttgtctggctc

SEQ ID NO: 2296082 - DNA, 25 bp, Homo sapien
taccctcacccactgtgatgaaggt

SEQ ID NO: 2296083 - DNA, 25 bp, Homo sapien
tgacagaccttctctggtccctgag

SEQ ID NO: 2296084 - DNA, 25 bp, Homo sapien
tgtctggctccgaccatcaaggagg

SEQ ID NO: 2296085 - DNA, 25 bp, Homo sapien
cagggcataggctgcattgcaactg

SEQ ID NO: 2296086 - DNA, 25 bp, Homo sapien
gaacgttcagaagccaaatagtcat

SEQ ID NO: 2296087 - DNA, 25 bp, Homo sapien
tggaatatgtaatagcagaagaacg

SEQ ID NO: 2296088 - DNA, 25 bp, Homo sapien
actttctgtacagctttggaatatg

SEQ ID NO: 2296089 - DNA, 25 bp, Homo sapien
aactgaatttgggtaagctttctgc

SEQ ID NO: 2296090 - DNA, 25 bp, Homo sapien
tgggtaagctttctgctggtgccac

SEQ ID NO: 2296091 - DNA, 25 bp, Homo sapien
ttctgctggtgccacctggaattac

SEQ ID NO: 2296092 - DNA, 25 bp, Homo sapien
cacctggaattacaaggggaaacat

SEQ ID NO: 2296093 - DNA, 25 bp, Homo sapien
tccctgctttggccacaaagcccat

SEQ ID NO: 2296094 - DNA, 25 bp, Homo sapien
agtttgactgcaactttccctgctt

SEQ ID NO: 2296095 - DNA, 25 bp, Homo sapien
tttgactgcaactttccctgctttg

SEQ ID NO: 2296096 - DNA, 25 bp, Homo sapien
tgactgcaactttccctgctttggc

SEQ ID NO: 2296097 - DNA, 25 bp, Homo sapien
ctttaagtgtataccatctttaagt

SEQ ID NO: 2296098 - DNA, 25 bp, Homo sapien
ccttccaaggacatattgcaggatt

SEQ ID NO: 2296099 - DNA, 25 bp, Homo sapien
caggaggcattgaaattttcagcag

SEQ ID NO: 2296100 - DNA, 25 bp, Homo sapien
attttcagcagagaccttccaagga

SEQ ID NO: 2296101 - DNA, 25 bp, Homo sapien
tccttctttttgcaggaggcattga

SEQ ID NO: 2296102 - DNA, 25 bp, Homo sapien
tcctttccgcacatatgggctaagt

SEQ ID NO: 2296103 - DNA, 25 bp, Homo sapien
gtgagagattgtccaaatgagcacc

SEQ ID NO: 2296104 - DNA, 25 bp, Homo sapien
gcatgattggaaacgcaggcccttt

SEQ ID NO: 2296105 - DNA, 25 bp, Homo sapien
gatggatggtccaacgtaacctcat

SEQ ID NO: 2296106 - DNA, 25 bp, Homo sapien
tatatgtctgccatgtaaaactctg

SEQ ID NO: 2296107 - DNA, 25 bp, Homo sapien
tagccaatcaaattccattctgtag

SEQ ID NO: 2296108 - DNA, 25 bp, Homo sapien
aatgacatagccaatcaaattccat

SEQ ID NO: 2296109 - DNA, 25 bp, Homo sapien
taaaactctgccacaactctgactg

SEQ ID NO: 2296110 - DNA, 25 bp, Homo sapien
tcttcaacgggagacaggcaagaga

SEQ ID NO: 2296111 - DNA, 25 bp, Homo sapien
tggagaaagcacagttggagtagcc

SEQ ID NO: 2296112 - DNA, 25 bp, Homo sapien
cgatgcagcggagactggttcagca

SEQ ID NO: 2296113 - DNA, 25 bp, Homo sapien
ttccataagagggagcgtttcacag

SEQ ID NO: 2296114 - DNA, 25 bp, Homo sapien
gagccaccagctagattgattttta

SEQ ID NO: 2296115 - DNA, 25 bp, Homo sapien
ccagctctgcgcaatttacaaactc

SEQ ID NO: 2296116 - DNA, 25 bp, Homo sapien
ttttatgccctggagagatgccacg

SEQ ID NO: 2296117 - DNA, 25 bp, Homo sapien
cgaggacgcacatcaacgagcctta

SEQ ID NO: 2296118 - DNA, 25 bp, Homo sapien
tggatgtgcatcatactaaagaggc

SEQ ID NO: 2296119 - DNA, 25 bp, Homo sapien
tcaaggctaacaatccatggatgtg

SEQ ID NO: 2296120 - DNA, 25 bp, Homo sapien
gaggcaatgtagtgtcaggcaaaac

SEQ ID NO: 2296121 - DNA, 25 bp, Homo sapien
gagaagataccagttgcctagccgg

SEQ ID NO: 2296122 - DNA, 25 bp, Homo sapien
agagcctgagttaggctccattcaa

SEQ ID NO: 2296123 - DNA, 25 bp, Homo sapien
tgccagaaacgttgcccacttttat

SEQ ID NO: 2296124 - DNA, 25 bp, Homo sapien
gttaggctccattcaaacagtcttc

SEQ ID NO: 2296125 - DNA, 25 bp, Homo sapien
ttggcattctgccagaaacgttgcc

SEQ ID NO: 2296126 - DNA, 25 bp, Homo sapien
ttataagatgaaagtagtttccact

SEQ ID NO: 2296127 - DNA, 25 bp, Homo sapien
ataagatgaaagtagtttccactac

SEQ ID NO: 2296128 - DNA, 25 bp, Homo sapien
tataagatgaaagtagtttccacta

SEQ ID NO: 2296129 - DNA, 25 bp, Homo sapien
tccacctttaagagtactgactgag

SEQ ID NO: 2296130 - DNA, 25 bp, Homo sapien
caaaacatccacctttaagagtact

SEQ ID NO: 2296131 - DNA, 25 bp, Homo sapien
gagtactgactgaggtactgagaaa

SEQ ID NO: 2296132 - DNA, 25 bp, Homo sapien
cctttaagagtactgactgaggtac

SEQ ID NO: 2296133 - DNA, 25 bp, Homo sapien
cctacagagaggatctgttctgctc

SEQ ID NO: 2296134 - DNA, 25 bp, Homo sapien
ttctcctgttggatctgctgcctac

SEQ ID NO: 2296135 - DNA, 25 bp, Homo sapien
tcctgttggatctgctgcctacaga

SEQ ID NO: 2296136 - DNA, 25 bp, Homo sapien
gcaagcttctcctgttggatctgct

SEQ ID NO: 2296137 - DNA, 25 bp, Homo sapien
tcagacatgggctcacgatctggtg

SEQ ID NO: 2296138 - DNA, 25 bp, Homo sapien
gcaaggaaaggtggctcttctaaga

SEQ ID NO: 2296139 - DNA, 25 bp, Homo sapien
tatgcaggtgctctattcagctcaa

SEQ ID NO: 2296140 - DNA, 25 bp, Homo sapien
catatgtcttatgactggagctcag

SEQ ID NO: 2296141 - DNA, 25 bp, Homo sapien
tcattgggtcactagctgttgagtc

SEQ ID NO: 2296142 - DNA, 25 bp, Homo sapien
atccgtgtagccataggccctggaa

SEQ ID NO: 2296143 - DNA, 25 bp, Homo sapien
tgtccagagaactgaatgcccagtt

SEQ ID NO: 2296144 - DNA, 25 bp, Homo sapien
ccttgtccagagaactgaatgccca

SEQ ID NO: 2296145 - DNA, 25 bp, Homo sapien
ctaagtgggcctgatcaatgagcag

SEQ ID NO: 2296146 - DNA, 25 bp, Homo sapien
tgctgcccattgcagaacgtctggt

SEQ ID NO: 2296147 - DNA, 25 bp, Homo sapien
agtccactgagggacgacggctgcc

SEQ ID NO: 2296148 - DNA, 25 bp, Homo sapien
gagcctgcggtctgtaccctgctaa

SEQ ID NO: 2296149 - DNA, 25 bp, Homo sapien
gactcagttctgtattcccgtttca

SEQ ID NO: 2296150 - DNA, 25 bp, Homo sapien
ctccaaaatgctttgaaccggactc

SEQ ID NO: 2296151 - DNA, 25 bp, Homo sapien
cacttcatggtcctgggcacttgat

SEQ ID NO: 2296152 - DNA, 25 bp, Homo sapien
gtcacttcatggtcctgggcacttg

SEQ ID NO: 2296153 - DNA, 25 bp, Homo sapien
gatcctgcccacaactctcttttat

SEQ ID NO: 2296154 - DNA, 25 bp, Homo sapien
tcctgcccacaactctcttttatat

SEQ ID NO: 2296155 - DNA, 25 bp, Homo sapien
tgcccacaactctcttttatatcct

SEQ ID NO: 2296156 - DNA, 25 bp, Homo sapien
tgatcctgcccacaactctctttta

SEQ ID NO: 2296157 - DNA, 25 bp, Homo sapien
ctgggcttatccatatctactgctg

SEQ ID NO: 2296158 - DNA, 25 bp, Homo sapien
ctagaaagtctccacaaatctgcct

SEQ ID NO: 2296159 - DNA, 25 bp, Homo sapien
taattgatacgcttatcgcccaccc

SEQ ID NO: 2296160 - DNA, 25 bp, Homo sapien
ccaggtgtttcttcgagttagccaa

SEQ ID NO: 2296161 - DNA, 25 bp, Homo sapien
tagcacccaaccagtcagactagag

SEQ ID NO: 2296162 - DNA, 25 bp, Homo sapien
gtagaatttccactccctgtccaag

SEQ ID NO: 2296163 - DNA, 25 bp, Homo sapien
atataatctattttggaggaagttc

SEQ ID NO: 2296164 - DNA, 25 bp, Homo sapien
atgtgaccatgatgttcactaggcc

SEQ ID NO: 2296165 - DNA, 25 bp, Homo sapien
aggaagttccacatgcagtggagag

SEQ ID NO: 2296166 - DNA, 25 bp, Homo sapien
cagtggagagcaatgtgtattctgc

SEQ ID NO: 2296167 - DNA, 25 bp, Homo sapien
ctgtatcatagaaggacaacagata

SEQ ID NO: 2296168 - DNA, 25 bp, Homo sapien
tatcatagaaggacaacagatacat

SEQ ID NO: 2296169 - DNA, 25 bp, Homo sapien
tgtatcatagaaggacaacagatac

SEQ ID NO: 2296170 - DNA, 25 bp, Homo sapien
agcccaaatcagctggaaatacctt

SEQ ID NO: 2296171 - DNA, 25 bp, Homo sapien
aaagtacctcggtgctagagttgga

SEQ ID NO: 2296172 - DNA, 25 bp, Homo sapien
caaatctggataaaagcttcggtgg

SEQ ID NO: 2296173 - DNA, 25 bp, Homo sapien
tcggtgggtcccactaggtcaatct

SEQ ID NO: 2296174 - DNA, 25 bp, Homo sapien
gagttggagtcagcaccagtcttga

SEQ ID NO: 2296175 - DNA, 25 bp, Homo sapien
caggtttcggtcctgtttctgctgc

SEQ ID NO: 2296176 - DNA, 25 bp, Homo sapien
agccaggtttcggtcctgtttctgc

SEQ ID NO: 2296177 - DNA, 25 bp, Homo sapien
agagccaggtttcggtcctgtttct

SEQ ID NO: 2296178 - DNA, 25 bp, Homo sapien
ccaggtttcggtcctgtttctgctg

SEQ ID NO: 2296179 - DNA, 25 bp, Homo sapien
gcgaaaactttaggatttgaatcca

SEQ ID NO: 2296180 - DNA, 25 bp, Homo sapien
tttgaatccagtcacagtcttgacc

SEQ ID NO: 2296181 - DNA, 25 bp, Homo sapien
tccagtcacagtcttgacccaaagc

SEQ ID NO: 2296182 - DNA, 25 bp, Homo sapien
cagcacacagtgtagcgaaaacttt

SEQ ID NO: 2296183 - DNA, 25 bp, Homo sapien
agctggcacaagagaagacacccat

SEQ ID NO: 2296184 - DNA, 25 bp, Homo sapien
gcatctacatgcacgtcgctgactt

SEQ ID NO: 2296185 - DNA, 25 bp, Homo sapien
tagcaggcctgcatctacatgcacg

SEQ ID NO: 2296186 - DNA, 25 bp, Homo sapien
cctctagcaggcctgcatctacatg

SEQ ID NO: 2296187 - DNA, 25 bp, Homo sapien
tgcacgtcgctgactttataagatc

SEQ ID NO: 2296188 - DNA, 25 bp, Homo sapien
gggtcaatcctgcccagtgaacaaa

SEQ ID NO: 2296189 - DNA, 25 bp, Homo sapien
acatggacgtgtgcgtcaccatgta

SEQ ID NO: 2296190 - DNA, 25 bp, Homo sapien
gtggggtcaatcctgcccagtgaac

SEQ ID NO: 2296191 - DNA, 25 bp, Homo sapien
aacatggacgtgtgcgtcaccatgt

SEQ ID NO: 2296192 - DNA, 25 bp, Homo sapien
ttgttggcttcagtccacatactct

SEQ ID NO: 2296193 - DNA, 25 bp, Homo sapien
tttctagttgttggcttcagtccac

SEQ ID NO: 2296194 - DNA, 25 bp, Homo sapien
ttctttctagttgttggcttcagtc

SEQ ID NO: 2296195 - DNA, 25 bp, Homo sapien
tgttggcttcagtccacatactctt

SEQ ID NO: 2296196 - DNA, 25 bp, Homo sapien
tggcattgcacactgaggagtccat

SEQ ID NO: 2296197 - DNA, 25 bp, Homo sapien
ctgctgagtggcattgcacactgag

SEQ ID NO: 2296198 - DNA, 25 bp, Homo sapien
ccagggagccgttatgagctgctga

SEQ ID NO: 2296199 - DNA, 25 bp, Homo sapien
atccttccatatctccagggagccg

SEQ ID NO: 2296200 - DNA, 25 bp, Homo sapien
ggattctctgatccattgcaccttt

SEQ ID NO: 2296201 - DNA, 25 bp, Homo sapien
ttctaacgaggagtggtagcccttg

SEQ ID NO: 2296202 - DNA, 25 bp, Homo sapien
ctttctgcagtatttggctgcagaa

SEQ ID NO: 2296203 - DNA, 25 bp, Homo sapien
ttggcaaattctaacgaggagtggt

SEQ ID NO: 2296204 - DNA, 25 bp, Homo sapien
tgtgcagtaatcaactcttttgctt

SEQ ID NO: 2296205 - DNA, 25 bp, Homo sapien
agtgtgcagtaatcaactcttttgc

SEQ ID NO: 2296206 - DNA, 25 bp, Homo sapien
gcagtgtgcagtaatcaactctttt

SEQ ID NO: 2296207 - DNA, 25 bp, Homo sapien
tgcagtaatcaactcttttgcttcc

SEQ ID NO: 2296208 - DNA, 25 bp, Homo sapien
gtcctccacacaacctatccaacct

SEQ ID NO: 2296209 - DNA, 25 bp, Homo sapien
atcatctgtcctccacacaacctat

SEQ ID NO: 2296210 - DNA, 25 bp, Homo sapien
ctccacacaacctatccaacctcct

SEQ ID NO: 2296211 - DNA, 25 bp, Homo sapien
tctgtcctccacacaacctatccaa

SEQ ID NO: 2296212 - DNA, 25 bp, Homo sapien
gagagagcatgagcctgtgaaggag

SEQ ID NO: 2296213 - DNA, 25 bp, Homo sapien
tcttaaaagctttctgtcaaatagc

SEQ ID NO: 2296214 - DNA, 25 bp, Homo sapien
tgaactctcaagcaccggatgcaag

SEQ ID NO: 2296215 - DNA, 25 bp, Homo sapien
gatgcaagtagactgagagcctccg

SEQ ID NO: 2296216 - DNA, 25 bp, Homo sapien
gcctccgccaaccagtaagatgact

SEQ ID NO: 2296217 - DNA, 25 bp, Homo sapien
caaagaattctgctctagagttact

SEQ ID NO: 2296218 - DNA, 25 bp, Homo sapien
accacccggcttcgaacacctctgc

SEQ ID NO: 2296219 - DNA, 25 bp, Homo sapien
cagccacacaggttggggtagccca

SEQ ID NO: 2296220 - DNA, 25 bp, Homo sapien
cttgaggggagaccgcggcccagcc

SEQ ID NO: 2296221 - DNA, 25 bp, Homo sapien
cacctctgcccccggaagttgattt

SEQ ID NO: 2296222 - DNA, 25 bp, Homo sapien
cctacgcgtacacccgaggcacggc

SEQ ID NO: 2296223 - DNA, 25 bp, Homo sapien
cgctgcgccgctcacccacgctgcc

SEQ ID NO: 2296224 - DNA, 25 bp, Homo sapien
cacagacccctacgcgtacacccga

SEQ ID NO: 2296225 - DNA, 25 bp, Homo sapien
cagcacacagacccctacgcgtaca

SEQ ID NO: 2296226 - DNA, 25 bp, Homo sapien
ggcggcggaagctcgtccgcgctcc

SEQ ID NO: 2296227 - DNA, 25 bp, Homo sapien
gcggcggaagctcgtccgcgctcct

SEQ ID NO: 2296228 - DNA, 25 bp, Homo sapien
aggcggcggaagctcgtccgcgctc

SEQ ID NO: 2296229 - DNA, 25 bp, Homo sapien
caggcggcggaagctcgtccgcgct

SEQ ID NO: 2296230 - DNA, 25 bp, Homo sapien
gactcctggtcgctgcgacagccaa

SEQ ID NO: 2296231 - DNA, 25 bp, Homo sapien
tccgttcccgcaggaggttggtcac

SEQ ID NO: 2296232 - DNA, 25 bp, Homo sapien
tgggcgtagactttcgaaaacactc

SEQ ID NO: 2296233 - DNA, 25 bp, Homo sapien
tctgggacgtgcagataccggtacc

SEQ ID NO: 2296234 - DNA, 25 bp, Homo sapien
cggtaggcgcttcggtgacacaata

SEQ ID NO: 2296235 - DNA, 25 bp, Homo sapien
gggatacataaaccaggcgcgttct

SEQ ID NO: 2296236 - DNA, 25 bp, Homo sapien
caaagctttcctccgcagtaggcga

SEQ ID NO: 2296237 - DNA, 25 bp, Homo sapien
gagaaaggtggcatcagtatccgca

SEQ ID NO: 2296238 - DNA, 25 bp, Homo sapien
caaactggtcagtaataacctttgc

SEQ ID NO: 2296239 - DNA, 25 bp, Homo sapien
agcctcgctgttcaagatggcccag

SEQ ID NO: 2296240 - DNA, 25 bp, Homo sapien
aaaaccctggaagcctcgctgttca

SEQ ID NO: 2296241 - DNA, 25 bp, Homo sapien
ccctggaagcctcgctgttcaagat

SEQ ID NO: 2296242 - DNA, 25 bp, Homo sapien
agtcacataaaggagggttagaagc

SEQ ID NO: 2296243 - DNA, 25 bp, Homo sapien
gagtcacataaaggagggttagaag

SEQ ID NO: 2296244 - DNA, 25 bp, Homo sapien
aatattatgtccactcactgctgca

SEQ ID NO: 2296245 - DNA, 25 bp, Homo sapien
tcaccctcagaagtacaatgcaatg

SEQ ID NO: 2296246 - DNA, 25 bp, Homo sapien
gcaatgaagtacagaatgaccccag

SEQ ID NO: 2296247 - DNA, 25 bp, Homo sapien
tgtgtaggcacctatttccagtgac

SEQ ID NO: 2296248 - DNA, 25 bp, Homo sapien
aatttaggacaatctccactgagac

SEQ ID NO: 2296249 - DNA, 25 bp, Homo sapien
tgggtctaataccaaaaggctacac

SEQ ID NO: 2296250 - DNA, 25 bp, Homo sapien
aattccaataaggagacctgtgttc

SEQ ID NO: 2296251 - DNA, 25 bp, Homo sapien
aacagtttgataaggaccacttgct

SEQ ID NO: 2296252 - DNA, 25 bp, Homo sapien
cagtagcatgggtgagatatgtgcc

SEQ ID NO: 2296253 - DNA, 25 bp, Homo sapien
tctgccagttatgcaaagaccagca

SEQ ID NO: 2296254 - DNA, 25 bp, Homo sapien
gagactaccatgctgtaaagaagcc

SEQ ID NO: 2296255 - DNA, 25 bp, Homo sapien
gaaatttgactatgctgagactacc

SEQ ID NO: 2296256 - DNA, 25 bp, Homo sapien
tcagcatctaacaaagcatgacaca

SEQ ID NO: 2296257 - DNA, 25 bp, Homo sapien
gcaaagcatagcaaggtctactgaa

SEQ ID NO: 2296258 - DNA, 25 bp, Homo sapien
taacactacgcacagcttaagtacc

SEQ ID NO: 2296259 - DNA, 25 bp, Homo sapien
agtttcttcagctagcattcactgg

SEQ ID NO: 2296260 - DNA, 25 bp, Homo sapien
ggtcctaaattgtggctcgccagta

SEQ ID NO: 2296261 - DNA, 25 bp, Homo sapien
tacgtggtcctaaattgtggctcgc

SEQ ID NO: 2296262 - DNA, 25 bp, Homo sapien
tcacattttacgtggtcctaaattg

SEQ ID NO: 2296263 - DNA, 25 bp, Homo sapien
tgaaaataaattctaatctgtttcc

SEQ ID NO: 2296264 - DNA, 25 bp, Homo sapien
tattggcaaatcacttgggcttgtt

SEQ ID NO: 2296265 - DNA, 25 bp, Homo sapien
ttttacataggtcacatataattaa

SEQ ID NO: 2296266 - DNA, 25 bp, Homo sapien
atttattggcaaatcacttgggctt

SEQ ID NO: 2296267 - DNA, 25 bp, Homo sapien
tctattcctcaaaattttggtagag

SEQ ID NO: 2296268 - DNA, 25 bp, Homo sapien
aacgttcacatcatcccaactgagg

SEQ ID NO: 2296269 - DNA, 25 bp, Homo sapien
gatgccattatgtgagacagaccaa

SEQ ID NO: 2296270 - DNA, 25 bp, Homo sapien
gcaagtcacctccagtgttcaacgt

SEQ ID NO: 2296271 - DNA, 25 bp, Homo sapien
tttaagatgaatccagcccctagcc

SEQ ID NO: 2296272 - DNA, 25 bp, Homo sapien
tgatagtgagtgagccctacaacta

SEQ ID NO: 2296273 - DNA, 25 bp, Homo sapien
cccataaacactgtgggtctgtttc

SEQ ID NO: 2296274 - DNA, 25 bp, Homo sapien
taaatacccctaaagatgtctcaaa

SEQ ID NO: 2296275 - DNA, 25 bp, Homo sapien
tccttgctaatctgataagccatct

SEQ ID NO: 2296276 - DNA, 25 bp, Homo sapien
cttgtcattctgctctccaatcctt

SEQ ID NO: 2296277 - DNA, 25 bp, Homo sapien
tccaatcctttcattatactgtata

SEQ ID NO: 2296278 - DNA, 25 bp, Homo sapien
tactgtataactatttctaaaacaa

SEQ ID NO: 2296279 - DNA, 25 bp, Homo sapien
tgtataactatttctaaaacaatca

SEQ ID NO: 2296280 - DNA, 25 bp, Homo sapien
ccctccaccatgcccagctaatttt

SEQ ID NO: 2296281 - DNA, 25 bp, Homo sapien
gcagtggcccggtctcggctaactg

SEQ ID NO: 2296282 - DNA, 25 bp, Homo sapien
cagtggcccggtctcggctaactgc

SEQ ID NO: 2296283 - DNA, 25 bp, Homo sapien
cctccaccatgcccagctaattttt

SEQ ID NO: 2296284 - DNA, 25 bp, Homo sapien
taacatcctcacagtcgcaataata

SEQ ID NO: 2296285 - DNA, 25 bp, Homo sapien
tcctcacagtcgcaataatactttt

SEQ ID NO: 2296286 - DNA, 25 bp, Homo sapien
tgctaacatcctcacagtcgcaata

SEQ ID NO: 2296287 - DNA, 25 bp, Homo sapien
cacagtcgcaataatacttttccat

SEQ ID NO: 2296288 - DNA, 25 bp, Homo sapien
tggaaactagtgctaacaccttcaa

SEQ ID NO: 2296289 - DNA, 25 bp, Homo sapien
tcaacgattgttttaacaggcaaag

SEQ ID NO: 2296290 - DNA, 25 bp, Homo sapien
tatctgtgctttaccttctggaaac

SEQ ID NO: 2296291 - DNA, 25 bp, Homo sapien
gaaactcagtaggtaatgacactaa

SEQ ID NO: 2296292 - DNA, 25 bp, Homo sapien
aactccagctaagaacaggactgtg

SEQ ID NO: 2296293 - DNA, 25 bp, Homo sapien
ttcccaaattggcactagagctcaa

SEQ ID NO: 2296294 - DNA, 25 bp, Homo sapien
taagatattgaaacaagcccgcaca

SEQ ID NO: 2296295 - DNA, 25 bp, Homo sapien
ccattttatgttgagatgccaggag

SEQ ID NO: 2296296 - DNA, 25 bp, Homo sapien
aaccaccaaaatcatcatcatccat

SEQ ID NO: 2296297 - DNA, 25 bp, Homo sapien
caaaaccaccaaaatcatcatcatc

SEQ ID NO: 2296298 - DNA, 25 bp, Homo sapien
ctcaaaaccaccaaaatcatcatca

SEQ ID NO: 2296299 - DNA, 25 bp, Homo sapien
aaaccaccaaaatcatcatcatcca

SEQ ID NO: 2296300 - DNA, 25 bp, Homo sapien
tgtttgggtttcaccacttccacca

SEQ ID NO: 2296301 - DNA, 25 bp, Homo sapien
ttccaccatcaaaagtctccgcagc

SEQ ID NO: 2296302 - DNA, 25 bp, Homo sapien
caggagatgttgtttgggtttcacc

SEQ ID NO: 2296303 - DNA, 25 bp, Homo sapien
gaaaggcagcccaaggaatagcagg

SEQ ID NO: 2296304 - DNA, 25 bp, Homo sapien
caacatctgctggtccaattcccat

SEQ ID NO: 2296305 - DNA, 25 bp, Homo sapien
tgtatgcaaatagctccagatgcaa

SEQ ID NO: 2296306 - DNA, 25 bp, Homo sapien
catgaaatccaaaaggcatctgtct

SEQ ID NO: 2296307 - DNA, 25 bp, Homo sapien
tctctctgccaatgtcttgagaaaa

SEQ ID NO: 2296308 - DNA, 25 bp, Homo sapien
gtcctggatatagctctgtggccaa

SEQ ID NO: 2296309 - DNA, 25 bp, Homo sapien
gatgatgacttctaccctctgaaga

SEQ ID NO: 2296310 - DNA, 25 bp, Homo sapien
tgaagattcagacacggggcttgct

SEQ ID NO: 2296311 - DNA, 25 bp, Homo sapien
tgaagcagtcctggatatagctctg

SEQ ID NO: 2296312 - DNA, 25 bp, Homo sapien
caaatgcagttgtattcagtttttg

SEQ ID NO: 2296313 - DNA, 25 bp, Homo sapien
aagttatgatattcagaaggctcct

SEQ ID NO: 2296314 - DNA, 25 bp, Homo sapien
gcacacagagtagtcagcttctata

SEQ ID NO: 2296315 - DNA, 25 bp, Homo sapien
tggtggaaattatcgaaggtaagaa

SEQ ID NO: 2296316 - DNA, 25 bp, Homo sapien
caacttaacggtagtacgtgaggct

SEQ ID NO: 2296317 - DNA, 25 bp, Homo sapien
catcttcaaaagctacctgtgcaca

SEQ ID NO: 2296318 - DNA, 25 bp, Homo sapien
gcaaagggtgctagacagtccagaa

SEQ ID NO: 2296319 - DNA, 25 bp, Homo sapien
cggccaacaatcactatttctatag

SEQ ID NO: 2296320 - DNA, 25 bp, Homo sapien
tccatataacaagaagtacatgcct

SEQ ID NO: 2296321 - DNA, 25 bp, Homo sapien
gataccactaagtgctaacttcact

SEQ ID NO: 2296322 - DNA, 25 bp, Homo sapien
aacaggtataccaagcttgcccatc

SEQ ID NO: 2296323 - DNA, 25 bp, Homo sapien
caagcttgcccatcatcttaaataa

SEQ ID NO: 2296324 - DNA, 25 bp, Homo sapien
agttgtccaacaggtataccaagct

SEQ ID NO: 2296325 - DNA, 25 bp, Homo sapien
cataccaggtatagaacaatggaca

SEQ ID NO: 2296326 - DNA, 25 bp, Homo sapien
taagatgtcatgctgtcccaagtta

SEQ ID NO: 2296327 - DNA, 25 bp, Homo sapien
tggagtgagaaggaatacagccttg

SEQ ID NO: 2296328 - DNA, 25 bp, Homo sapien
tagactctagaaccacactgccata

SEQ ID NO: 2296329 - DNA, 25 bp, Homo sapien
taattaatatagtctagcttcaccc

SEQ ID NO: 2296330 - DNA, 25 bp, Homo sapien
tagcttcacccataggcatttcttt

SEQ ID NO: 2296331 - DNA, 25 bp, Homo sapien
aatatagtctagcttcacccatagg

SEQ ID NO: 2296332 - DNA, 25 bp, Homo sapien
tatgtgccatactatataattaata

SEQ ID NO: 2296333 - DNA, 25 bp, Homo sapien
agttctaccataaactctggaaggc

SEQ ID NO: 2296334 - DNA, 25 bp, Homo sapien
ccataaactctggaaggcagctcac

SEQ ID NO: 2296335 - DNA, 25 bp, Homo sapien
gctcacaatgaaaattgcatgtttc

SEQ ID NO: 2296336 - DNA, 25 bp, Homo sapien
tctaccataaactctggaaggcagc

SEQ ID NO: 2296337 - DNA, 25 bp, Homo sapien
caacacagtgccataaggagtacat

SEQ ID NO: 2296338 - DNA, 25 bp, Homo sapien
aagaagagtggtcacggtccagtac

SEQ ID NO: 2296339 - DNA, 25 bp, Homo sapien
aagagaggcagccaatggaagaaga

SEQ ID NO: 2296340 - DNA, 25 bp, Homo sapien
gaagatggtgaaagatggactccag

SEQ ID NO: 2296341 - DNA, 25 bp, Homo sapien
cagtacaatctcaggagaagatggt

SEQ ID NO: 2296342 - DNA, 25 bp, Homo sapien
tgtgcttttggaatagtttgactca

SEQ ID NO: 2296343 - DNA, 25 bp, Homo sapien
gtgcttttggaatagtttgactcac

SEQ ID NO: 2296344 - DNA, 25 bp, Homo sapien
ctgtgcttttggaatagtttgactc

SEQ ID NO: 2296345 - DNA, 25 bp, Homo sapien
tttttcatcagttaaacccaatgga

SEQ ID NO: 2296346 - DNA, 25 bp, Homo sapien
tatgttagatacattggctccagga

SEQ ID NO: 2296347 - DNA, 25 bp, Homo sapien
catccacaagggcaattgttccatt

SEQ ID NO: 2296348 - DNA, 25 bp, Homo sapien
gaaaaagtgagatatccagatgagt

SEQ ID NO: 2296349 - DNA, 25 bp, Homo sapien
ttatgcttttccatcaatgattcca

SEQ ID NO: 2296350 - DNA, 25 bp, Homo sapien
gcttttccatcaatgattccacatc

SEQ ID NO: 2296351 - DNA, 25 bp, Homo sapien
ttttctaagacattatgcttttcca

SEQ ID NO: 2296352 - DNA, 25 bp, Homo sapien
tttttctaagacattatgcttttcc

SEQ ID NO: 2296353 - DNA, 25 bp, Homo sapien
cagaaggaagctagagttcagcgag

SEQ ID NO: 2296354 - DNA, 25 bp, Homo sapien
gatgtatgtctcactaaagggtcca

SEQ ID NO: 2296355 - DNA, 25 bp, Homo sapien
gctgagcaagtacaaagggccttat

SEQ ID NO: 2296356 - DNA, 25 bp, Homo sapien
tacagcacgattaagaaaagcctcc

SEQ ID NO: 2296357 - DNA, 25 bp, Homo sapien
tggaaacttatgacttgagagtaag

SEQ ID NO: 2296358 - DNA, 25 bp, Homo sapien
aaatggaaacttatgacttgagagt

SEQ ID NO: 2296359 - DNA, 25 bp, Homo sapien
tatgacttgagagtaagaaactaca

SEQ ID NO: 2296360 - DNA, 25 bp, Homo sapien
aacttatgacttgagagtaagaaac

SEQ ID NO: 2296361 - DNA, 25 bp, Homo sapien
gcttactaaataggcatatcagggc

SEQ ID NO: 2296362 - DNA, 25 bp, Homo sapien
taggagctcagctggtaagaatctg

SEQ ID NO: 2296363 - DNA, 25 bp, Homo sapien
caaagaccagagtttctaacagtga

SEQ ID NO: 2296364 - DNA, 25 bp, Homo sapien
agtgaactatctcctagctctgggt

SEQ ID NO: 2296365 - DNA, 25 bp, Homo sapien
gagctacgtcctagaaaagtcagag

SEQ ID NO: 2296366 - DNA, 25 bp, Homo sapien
cattctcagctaaggtcataccagg

SEQ ID NO: 2296367 - DNA, 25 bp, Homo sapien
tactgatgagtgaggaaaacaactg

SEQ ID NO: 2296368 - DNA, 25 bp, Homo sapien
tccccaagcatagtagtaaggtgct

SEQ ID NO: 2296369 - DNA, 25 bp, Homo sapien
aatgtcagaccttcctattctcctg

SEQ ID NO: 2296370 - DNA, 25 bp, Homo sapien
atgtcagaccttcctattctcctgt

SEQ ID NO: 2296371 - DNA, 25 bp, Homo sapien
tgtcagaccttcctattctcctgtc

SEQ ID NO: 2296372 - DNA, 25 bp, Homo sapien
tacagggccttatgtagggtggccc

SEQ ID NO: 2296373 - DNA, 25 bp, Homo sapien
caatcttatctcagggcattcacac

SEQ ID NO: 2296374 - DNA, 25 bp, Homo sapien
tctgaaagcacatcaagcacaatct

SEQ ID NO: 2296375 - DNA, 25 bp, Homo sapien
gaacatggcaatggcatcctactgg

SEQ ID NO: 2296376 - DNA, 25 bp, Homo sapien
gatacagataaggagggatgatact

SEQ ID NO: 2296377 - DNA, 25 bp, Homo sapien
ggttcatgtactagctgcctattca

SEQ ID NO: 2296378 - DNA, 25 bp, Homo sapien
atgtttaagtatgccagccccaaac

SEQ ID NO: 2296379 - DNA, 25 bp, Homo sapien
tctgaaggtgatcacatctagccac

SEQ ID NO: 2296380 - DNA, 25 bp, Homo sapien
cagctctcaacagaactaaccacaa

SEQ ID NO: 2296381 - DNA, 25 bp, Homo sapien
aagaccctgggatgtataaccagca

SEQ ID NO: 2296382 - DNA, 25 bp, Homo sapien
ccagcatagcgccaggacacttgag

SEQ ID NO: 2296383 - DNA, 25 bp, Homo sapien
gagattcacagctctcaacagaact

SEQ ID NO: 2296384 - DNA, 25 bp, Homo sapien
taaaggagccataatccttgcaacg

SEQ ID NO: 2296385 - DNA, 25 bp, Homo sapien
gcaataagcctggttgtttttccta

SEQ ID NO: 2296386 - DNA, 25 bp, Homo sapien
taggtttcatgagcatgatacaaca

SEQ ID NO: 2296387 - DNA, 25 bp, Homo sapien
caaccacatcacttgacagctgcaa

SEQ ID NO: 2296388 - DNA, 25 bp, Homo sapien
attcatccacaataatgctgagggc

SEQ ID NO: 2296389 - DNA, 25 bp, Homo sapien
caataatgctgagggcttcgtgacc

SEQ ID NO: 2296390 - DNA, 25 bp, Homo sapien
tccacaataatgctgagggcttcgt

SEQ ID NO: 2296391 - DNA, 25 bp, Homo sapien
taatgctgagggcttcgtgaccagc

SEQ ID NO: 2296392 - DNA, 25 bp, Homo sapien
cctctatgcaaaaagatactttctc

SEQ ID NO: 2296393 - DNA, 25 bp, Homo sapien
aaaatgagaagtaaacacctctatg

SEQ ID NO: 2296394 - DNA, 25 bp, Homo sapien
acacctctatgcaaaaagatacttt

SEQ ID NO: 2296395 - DNA, 25 bp, Homo sapien
gctataatgttacatctattttagc

SEQ ID NO: 2296396 - DNA, 25 bp, Homo sapien
cgaaaaagatacttgaacacacgtt

SEQ ID NO: 2296397 - DNA, 25 bp, Homo sapien
gatgctggaagggatatggtgaaaa

SEQ ID NO: 2296398 - DNA, 25 bp, Homo sapien
tagatgctggaagggatatggtgaa

SEQ ID NO: 2296399 - DNA, 25 bp, Homo sapien
gctggaagggatatggtgaaaagag

SEQ ID NO: 2296400 - DNA, 25 bp, Homo sapien
ttttcaatagcttctacttgttgct

SEQ ID NO: 2296401 - DNA, 25 bp, Homo sapien
tgtttctcaattgcagaaatgtact

SEQ ID NO: 2296402 - DNA, 25 bp, Homo sapien
tctcaattgcagaaatgtactgttt

SEQ ID NO: 2296403 - DNA, 25 bp, Homo sapien
gcttctacttgttgcttaactgaag

SEQ ID NO: 2296404 - DNA, 25 bp, Homo sapien
catgcttcgtgtcttaagttgccta

SEQ ID NO: 2296405 - DNA, 25 bp, Homo sapien
ccaccctggattcaactgtctgaca

SEQ ID NO: 2296406 - DNA, 25 bp, Homo sapien
tcatgagctgtcttagcctatccct

SEQ ID NO: 2296407 - DNA, 25 bp, Homo sapien
caatgaccatctatatacttaggac

SEQ ID NO: 2296408 - DNA, 25 bp, Homo sapien
gggctctcgcccatacatttaaatg

SEQ ID NO: 2296409 - DNA, 25 bp, Homo sapien
ggtccctctacctacagtgttgtct

SEQ ID NO: 2296410 - DNA, 25 bp, Homo sapien
taaatgagctctacttctaggccga

SEQ ID NO: 2296411 - DNA, 25 bp, Homo sapien
caccactctgttgaaactactcttg

SEQ ID NO: 2296412 - DNA, 25 bp, Homo sapien
gagatgatttagcatatctagtgga

SEQ ID NO: 2296413 - DNA, 25 bp, Homo sapien
gatttagcatatctagtggaagaaa

SEQ ID NO: 2296414 - DNA, 25 bp, Homo sapien
gatgatttagcatatctagtggaag

SEQ ID NO: 2296415 - DNA, 25 bp, Homo sapien
agagagatgatttagcatatctagt

SEQ ID NO: 2296416 - DNA, 25 bp, Homo sapien
acaactgagcgtgtgccatggcatc

SEQ ID NO: 2296417 - DNA, 25 bp, Homo sapien
gacgtgacggatgctgttaagtatc

SEQ ID NO: 2296418 - DNA, 25 bp, Homo sapien
gacagtcaacgttcatagataagaa

SEQ ID NO: 2296419 - DNA, 25 bp, Homo sapien
gttaagtatcatgtaacgcacaggg

SEQ ID NO: 2296420 - DNA, 25 bp, Homo sapien
tgtatgtccctaataacagagcagc

SEQ ID NO: 2296421 - DNA, 25 bp, Homo sapien
tctaacatagaccaaattcgggacc

SEQ ID NO: 2296422 - DNA, 25 bp, Homo sapien
ggaagtctatatactgcaaccagca

SEQ ID NO: 2296423 - DNA, 25 bp, Homo sapien
tctgctttcagaccacggtggaatt

SEQ ID NO: 2296424 - DNA, 25 bp, Homo sapien
gagtgctgtctaggtgctgactcct

SEQ ID NO: 2296425 - DNA, 25 bp, Homo sapien
tgggtgaggagtgctgtctaggtgc

SEQ ID NO: 2296426 - DNA, 25 bp, Homo sapien
atttttggaaactccaagaagcagc

SEQ ID NO: 2296427 - DNA, 25 bp, Homo sapien
agatttttggaaactccaagaagca

SEQ ID NO: 2296428 - DNA, 25 bp, Homo sapien
gacagactagctatatttcagacac

SEQ ID NO: 2296429 - DNA, 25 bp, Homo sapien
tttcagacacaggaaacctcagaac

SEQ ID NO: 2296430 - DNA, 25 bp, Homo sapien
acagagattgtcagagtggagcaaa

SEQ ID NO: 2296431 - DNA, 25 bp, Homo sapien
tggccacaaatcataagaacctcag

SEQ ID NO: 2296432 - DNA, 25 bp, Homo sapien
taatgcaaaggtgtcagagataatc

SEQ ID NO: 2296433 - DNA, 25 bp, Homo sapien
tgtagacaaatttaatcacaatcac

SEQ ID NO: 2296434 - DNA, 25 bp, Homo sapien
catggagtcccactaatacattaga

SEQ ID NO: 2296435 - DNA, 25 bp, Homo sapien
cacaatcacacatggcagttttctg

SEQ ID NO: 2296436 - DNA, 25 bp, Homo sapien
ttatatactctggatataaactctt

SEQ ID NO: 2296437 - DNA, 25 bp, Homo sapien
ttattactgatttatatactctgga

SEQ ID NO: 2296438 - DNA, 25 bp, Homo sapien
tttattactgatttatatactctgg

SEQ ID NO: 2296439 - DNA, 25 bp, Homo sapien
ggtattctagatccatgccctctga

SEQ ID NO: 2296440 - DNA, 25 bp, Homo sapien
tagagaatgacaacgcatcctcctg

SEQ ID NO: 2296441 - DNA, 25 bp, Homo sapien
cattcacagcggcaaattggccttt

SEQ ID NO: 2296442 - DNA, 25 bp, Homo sapien
tggcaaacaaggactcaaaaactct

SEQ ID NO: 2296443 - DNA, 25 bp, Homo sapien
ttagagacctagatcataacagata

SEQ ID NO: 2296444 - DNA, 25 bp, Homo sapien
tgcctaggactccttttctggatta

SEQ ID NO: 2296445 - DNA, 25 bp, Homo sapien
cttacagaagtttaccctctagagg

SEQ ID NO: 2296446 - DNA, 25 bp, Homo sapien
cttagaaaagaggtcgagggcagca

SEQ ID NO: 2296447 - DNA, 25 bp, Homo sapien
ccttctctgtatctagcatttcaag

SEQ ID NO: 2296448 - DNA, 25 bp, Homo sapien
ttctctgtatctagcatttcaagga

SEQ ID NO: 2296449 - DNA, 25 bp, Homo sapien
cttctctgtatctagcatttcaagg

SEQ ID NO: 2296450 - DNA, 25 bp, Homo sapien
ctgttcttgagattgctgaatcaaa

SEQ ID NO: 2296451 - DNA, 25 bp, Homo sapien
ctttgcagcggatactaatgcctct

SEQ ID NO: 2296452 - DNA, 25 bp, Homo sapien
tccctttcttcagcatgcgcttttt

SEQ ID NO: 2296453 - DNA, 25 bp, Homo sapien
ttcagcatgcgctttttctaaattt

SEQ ID NO: 2296454 - DNA, 25 bp, Homo sapien
cttcagcatgcgctttttctaaatt

SEQ ID NO: 2296455 - DNA, 25 bp, Homo sapien
ctttcttcagcatgcgctttttcta

SEQ ID NO: 2296456 - DNA, 25 bp, Homo sapien
catcatgtgggctatgctgccctct

SEQ ID NO: 2296457 - DNA, 25 bp, Homo sapien
ctgccatcatgtgggctatgctgcc

SEQ ID NO: 2296458 - DNA, 25 bp, Homo sapien
caactgccatcatgtgggctatgct

SEQ ID NO: 2296459 - DNA, 25 bp, Homo sapien
ccatcatgtgggctatgctgccctc

SEQ ID NO: 2296460 - DNA, 25 bp, Homo sapien
tcccagctttctagatcccagtgga

SEQ ID NO: 2296461 - DNA, 25 bp, Homo sapien
ggagattcctgaaaacatatgagag

SEQ ID NO: 2296462 - DNA, 25 bp, Homo sapien
gtggtagagtacctcctccaggaga

SEQ ID NO: 2296463 - DNA, 25 bp, Homo sapien
gagggttccctatatattccttgaa

SEQ ID NO: 2296464 - DNA, 25 bp, Homo sapien
ttctcaacaggagagcaatcatcga

SEQ ID NO: 2296465 - DNA, 25 bp, Homo sapien
gacggcatcggttgcaaaatcaata

SEQ ID NO: 2296466 - DNA, 25 bp, Homo sapien
tgttagtcaagtcagaaatgccatt

SEQ ID NO: 2296467 - DNA, 25 bp, Homo sapien
gtctgcatggaacaactataggtag

SEQ ID NO: 2296468 - DNA, 25 bp, Homo sapien
ccccagtgtgtgatgatccccatca

SEQ ID NO: 2296469 - DNA, 25 bp, Homo sapien
tgatccccatcatgtgtccaaatgt

SEQ ID NO: 2296470 - DNA, 25 bp, Homo sapien
tgatgatccccatcatgtgtccaaa

SEQ ID NO: 2296471 - DNA, 25 bp, Homo sapien
gatccccatcatgtgtccaaatgtt

SEQ ID NO: 2296472 - DNA, 25 bp, Homo sapien
tctgttcttttatatactctatcaa

SEQ ID NO: 2296473 - DNA, 25 bp, Homo sapien
cttttcacttcgtttctgctcttct

SEQ ID NO: 2296474 - DNA, 25 bp, Homo sapien
gttcttttatatactctatcaattc

SEQ ID NO: 2296475 - DNA, 25 bp, Homo sapien
cttttatatactctatcaattcatc

SEQ ID NO: 2296476 - DNA, 25 bp, Homo sapien
ttaaaactcttcaggagatacttac

SEQ ID NO: 2296477 - DNA, 25 bp, Homo sapien
attaaaactcttcaggagatactta

SEQ ID NO: 2296478 - DNA, 25 bp, Homo sapien
tacagtaaacatctaatcttaaaga

SEQ ID NO: 2296479 - DNA, 25 bp, Homo sapien
gcatattctgagttatggttttgaa

SEQ ID NO: 2296480 - DNA, 25 bp, Homo sapien
agcctgaatttgctaactgtaatta

SEQ ID NO: 2296481 - DNA, 25 bp, Homo sapien
tttattgaaacgacaacaaatcaag

SEQ ID NO: 2296482 - DNA, 25 bp, Homo sapien
tcttcccaatttatctgggtcttac

SEQ ID NO: 2296483 - DNA, 25 bp, Homo sapien
tcccaatttatctgggtcttactga

SEQ ID NO: 2296484 - DNA, 25 bp, Homo sapien
ttcccaatttatctgggtcttactg

SEQ ID NO: 2296485 - DNA, 25 bp, Homo sapien
ttcttcccaatttatctgggtctta

SEQ ID NO: 2296486 - DNA, 25 bp, Homo sapien
tatagccacttgaaataaagtgacc

SEQ ID NO: 2296487 - DNA, 25 bp, Homo sapien
ctgaaggcaagactttcagtggccc

SEQ ID NO: 2296488 - DNA, 25 bp, Homo sapien
gcccaacatttggatacttctatta

SEQ ID NO: 2296489 - DNA, 25 bp, Homo sapien
catttggatacttctattaccagat

SEQ ID NO: 2296490 - DNA, 25 bp, Homo sapien
tcagacgagatcgggagcgttcagg

SEQ ID NO: 2296491 - DNA, 25 bp, Homo sapien
agcgttcagggtggtatggccgtag

SEQ ID NO: 2296492 - DNA, 25 bp, Homo sapien
gttcagggtggtatggccgtagacg

SEQ ID NO: 2296493 - DNA, 25 bp, Homo sapien
cccgaccctccttagcttccgagat

SEQ ID NO: 2296494 - DNA, 25 bp, Homo sapien
ggatctgaactactagccctgttat

SEQ ID NO: 2296495 - DNA, 25 bp, Homo sapien
tagcaaagaggcaagcatgtgaccc

SEQ ID NO: 2296496 - DNA, 25 bp, Homo sapien
tggactgtaactaggaatcctgcct

SEQ ID NO: 2296497 - DNA, 25 bp, Homo sapien
gaattaattcttactcactggactg

SEQ ID NO: 2296498 - DNA, 25 bp, Homo sapien
aattggtaaagaggaagttacactg

SEQ ID NO: 2296499 - DNA, 25 bp, Homo sapien
aagatacaaagagcatccaaattgg

SEQ ID NO: 2296500 - DNA, 25 bp, Homo sapien
gatacaaagagcatccaaattggta

SEQ ID NO: 2296501 - DNA, 25 bp, Homo sapien
tgtcactgtttgctgatgacctgtt

SEQ ID NO: 2296502 - DNA, 25 bp, Homo sapien
cagccatttgggttagacgggagct

SEQ ID NO: 2296503 - DNA, 25 bp, Homo sapien
aattccactgacgtgggaacctcac

SEQ ID NO: 2296504 - DNA, 25 bp, Homo sapien
gacctgcccaagtagagtccaagcc

SEQ ID NO: 2296505 - DNA, 25 bp, Homo sapien
tcctaggaacataattccactgacg

SEQ ID NO: 2296506 - DNA, 25 bp, Homo sapien
cttctttggcggatgacttgatcga

SEQ ID NO: 2296507 - DNA, 25 bp, Homo sapien
ggagaggaacagttccaaactggac

SEQ ID NO: 2296508 - DNA, 25 bp, Homo sapien
cagttccaaactggacaggcttctt

SEQ ID NO: 2296509 - DNA, 25 bp, Homo sapien
tggacaggcttctttggcggatgac

SEQ ID NO: 2296510 - DNA, 25 bp, Homo sapien
ggttccgtagctattaaagcactta

SEQ ID NO: 2296511 - DNA, 25 bp, Homo sapien
atgtcaactggttccgtagctatta

SEQ ID NO: 2296512 - DNA, 25 bp, Homo sapien
aactggttccgtagctattaaagca

SEQ ID NO: 2296513 - DNA, 25 bp, Homo sapien
tcaactggttccgtagctattaaag

SEQ ID NO: 2296514 - DNA, 25 bp, Homo sapien
gaaatctcagaaacgtacaaagccc

SEQ ID NO: 2296515 - DNA, 25 bp, Homo sapien
ggttacattctagcatctcatcaag

SEQ ID NO: 2296516 - DNA, 25 bp, Homo sapien
tgcattgaagcatcctgcctgtgaa

SEQ ID NO: 2296517 - DNA, 25 bp, Homo sapien
tacaaagcccatgaaagtagatgca

SEQ ID NO: 2296518 - DNA, 25 bp, Homo sapien
tgtcaatgatagtgaagcttatccc

SEQ ID NO: 2296519 - DNA, 25 bp, Homo sapien
gcgtaatggcagaactgtcaatgat

SEQ ID NO: 2296520 - DNA, 25 bp, Homo sapien
gatagtgaagcttatcccatgctca

SEQ ID NO: 2296521 - DNA, 25 bp, Homo sapien
tggcagtaaagagcgtaatggcaga

SEQ ID NO: 2296522 - DNA, 25 bp, Homo sapien
cagagtagagatctccatctgtcaa

SEQ ID NO: 2296523 - DNA, 25 bp, Homo sapien
ggcttcagagtagagatctccatct

SEQ ID NO: 2296524 - DNA, 25 bp, Homo sapien
ttcagagtagagatctccatctgtc

SEQ ID NO: 2296525 - DNA, 25 bp, Homo sapien
gcttcagagtagagatctccatctg

SEQ ID NO: 2296526 - DNA, 25 bp, Homo sapien
ttcagttacctgtggtcaaccgtgg

SEQ ID NO: 2296527 - DNA, 25 bp, Homo sapien
ctgtcatctcattcctgtggtttca

SEQ ID NO: 2296528 - DNA, 25 bp, Homo sapien
tcatctcattcctgtggtttcagtt

SEQ ID NO: 2296529 - DNA, 25 bp, Homo sapien
tcagttacctgtggtcaaccgtggt

SEQ ID NO: 2296530 - DNA, 25 bp, Homo sapien
caggggcgactgagggaaattctgg

SEQ ID NO: 2296531 - DNA, 25 bp, Homo sapien
tgaagatgtaggagaacttgtcagg

SEQ ID NO: 2296532 - DNA, 25 bp, Homo sapien
cttttttgccatctcacaagtagcc

SEQ ID NO: 2296533 - DNA, 25 bp, Homo sapien
ttttttgccatctcacaagtagccc

SEQ ID NO: 2296534 - DNA, 25 bp, Homo sapien
gagtagtgcttaatccaagtccaga

SEQ ID NO: 2296535 - DNA, 25 bp, Homo sapien
tgagatcaccgtgaagtggcggccc

SEQ ID NO: 2296536 - DNA, 25 bp, Homo sapien
gatgggccttaagtcatggctcaca

SEQ ID NO: 2296537 - DNA, 25 bp, Homo sapien
gaaccccgatgctctaggtaaacag

SEQ ID NO: 2296538 - DNA, 25 bp, Homo sapien
caacaggttagatgcatcttcagca

SEQ ID NO: 2296539 - DNA, 25 bp, Homo sapien
gaaacctaaatctccattgggacag

SEQ ID NO: 2296540 - DNA, 25 bp, Homo sapien
tgctttagcaattggtgtgtaccct

SEQ ID NO: 2296541 - DNA, 25 bp, Homo sapien
tcagaaagtcgactagcaaggcagc

SEQ ID NO: 2296542 - DNA, 25 bp, Homo sapien
gctacaggcccatgaagcgacctat

SEQ ID NO: 2296543 - DNA, 25 bp, Homo sapien
tgtgaggcctttcccaatacctggg

SEQ ID NO: 2296544 - DNA, 25 bp, Homo sapien
tttaggctcagggtgcacatctgca

SEQ ID NO: 2296545 - DNA, 25 bp, Homo sapien
ttttaagacagcaagggcagagcat

SEQ ID NO: 2296546 - DNA, 25 bp, Homo sapien
taaatttttagcgagactcccaggc

SEQ ID NO: 2296547 - DNA, 25 bp, Homo sapien
tcaatgaccttctatatcctacagg

SEQ ID NO: 2296548 - DNA, 25 bp, Homo sapien
tcaatatatgccactgcctacatgt

SEQ ID NO: 2296549 - DNA, 25 bp, Homo sapien
cattacaccagagtgatctaaacag

SEQ ID NO: 2296550 - DNA, 25 bp, Homo sapien
tttaaagtcattctggaactatggc

SEQ ID NO: 2296551 - DNA, 25 bp, Homo sapien
tatgccctagatcactcgctgaatg

SEQ ID NO: 2296552 - DNA, 25 bp, Homo sapien
cattgctcgtgcagtaatatatgcc

SEQ ID NO: 2296553 - DNA, 25 bp, Homo sapien
gattttgcaatcatgtatgccctag

SEQ ID NO: 2296554 - DNA, 25 bp, Homo sapien
accaagcacctcatgaaggatccac

SEQ ID NO: 2296555 - DNA, 25 bp, Homo sapien
actcattacagtgaagactgcacca

SEQ ID NO: 2296556 - DNA, 25 bp, Homo sapien
gggtgtcacactcttctaaacaacc

SEQ ID NO: 2296557 - DNA, 25 bp, Homo sapien
gagatgggaagggtgtcacactctt

SEQ ID NO: 2296558 - DNA, 25 bp, Homo sapien
tgctgaggctatggaaactccaatc

SEQ ID NO: 2296559 - DNA, 25 bp, Homo sapien
tggaaactccaatctttttggtcat

SEQ ID NO: 2296560 - DNA, 25 bp, Homo sapien
tatggaaactccaatctttttggtc

SEQ ID NO: 2296561 - DNA, 25 bp, Homo sapien
ctgcaactgctgaggctatggaaac

SEQ ID NO: 2296562 - DNA, 25 bp, Homo sapien
tcccttttctcatggaaacgtcatc

SEQ ID NO: 2296563 - DNA, 25 bp, Homo sapien
tttctcatggaaacgtcatcataaa

SEQ ID NO: 2296564 - DNA, 25 bp, Homo sapien
ctcatggaaacgtcatcataaaatc

SEQ ID NO: 2296565 - DNA, 25 bp, Homo sapien
cccttttctcatggaaacgtcatca

SEQ ID NO: 2296566 - DNA, 25 bp, Homo sapien
ctttttgttgattactttacatgac

SEQ ID NO: 2296567 - DNA, 25 bp, Homo sapien
ttgttgattactttacatgaccaca

SEQ ID NO: 2296568 - DNA, 25 bp, Homo sapien
tgttgattactttacatgaccacat

SEQ ID NO: 2296569 - DNA, 25 bp, Homo sapien
ttttgttgattactttacatgacca

SEQ ID NO: 2296570 - DNA, 25 bp, Homo sapien
tatagcccacagaatgtagacagtt

SEQ ID NO: 2296571 - DNA, 25 bp, Homo sapien
agacagttgggccattccgttttag

SEQ ID NO: 2296572 - DNA, 25 bp, Homo sapien
cacagaatgtagacagttgggccat

SEQ ID NO: 2296573 - DNA, 25 bp, Homo sapien
catgcatttgctatagcccacagaa

SEQ ID NO: 2296574 - DNA, 25 bp, Homo sapien
cttgggactctttcttgtggcttta

SEQ ID NO: 2296575 - DNA, 25 bp, Homo sapien
tgggactctttcttgtggctttagc

SEQ ID NO: 2296576 - DNA, 25 bp, Homo sapien
actctttcttgtggctttagctcca

SEQ ID NO: 2296577 - DNA, 25 bp, Homo sapien
gactctttcttgtggctttagctcc

SEQ ID NO: 2296578 - DNA, 25 bp, Homo sapien
tccctgcattcactgccatcagttg

SEQ ID NO: 2296579 - DNA, 25 bp, Homo sapien
tgcattcactgccatcagttggcat

SEQ ID NO: 2296580 - DNA, 25 bp, Homo sapien
tcctggctctccctgcattcactgc

SEQ ID NO: 2296581 - DNA, 25 bp, Homo sapien
cctgcattcactgccatcagttggc

SEQ ID NO: 2296582 - DNA, 25 bp, Homo sapien
agaagactggagtagtgggtagaac

SEQ ID NO: 2296583 - DNA, 25 bp, Homo sapien
gccagaagactggagtagtgggtag

SEQ ID NO: 2296584 - DNA, 25 bp, Homo sapien
atacattgtgaactcagactctttc

SEQ ID NO: 2296585 - DNA, 25 bp, Homo sapien
tacattgtgaactcagactctttcc

SEQ ID NO: 2296586 - DNA, 25 bp, Homo sapien
taaaagccagaacaagcccctttgc

SEQ ID NO: 2296587 - DNA, 25 bp, Homo sapien
cttcctttcagggtgacactattca

SEQ ID NO: 2296588 - DNA, 25 bp, Homo sapien
agcccctttgcaaaggcttgcttcc

SEQ ID NO: 2296589 - DNA, 25 bp, Homo sapien
ttcctttcagggtgacactattcat

SEQ ID NO: 2296590 - DNA, 25 bp, Homo sapien
cctcccacaagttagtgttgggtgc

SEQ ID NO: 2296591 - DNA, 25 bp, Homo sapien
tcctcccacaagttagtgttgggtg

SEQ ID NO: 2296592 - DNA, 25 bp, Homo sapien
ctggtcagtctcttgtttgtagatt

SEQ ID NO: 2296593 - DNA, 25 bp, Homo sapien
ggtcagtctcttgtttgtagattgc

SEQ ID NO: 2296594 - DNA, 25 bp, Homo sapien
tcagtctcttgtttgtagattgcca

SEQ ID NO: 2296595 - DNA, 25 bp, Homo sapien
cagtctcttgtttgtagattgccat

SEQ ID NO: 2296596 - DNA, 25 bp, Homo sapien
agtggacaatcgtagacagaagatc

SEQ ID NO: 2296597 - DNA, 25 bp, Homo sapien
tgttgaagtggacaatcgtagacag

SEQ ID NO: 2296598 - DNA, 25 bp, Homo sapien
ctttttgttgaagtggacaatcgta

SEQ ID NO: 2296599 - DNA, 25 bp, Homo sapien
agagaacaggataagaaatcttttt

SEQ ID NO: 2296600 - DNA, 25 bp, Homo sapien
tccaaccccagcgtccaactgagac

SEQ ID NO: 2296601 - DNA, 25 bp, Homo sapien
ctactgttgtgtggaaggcatccaa

SEQ ID NO: 2296602 - DNA, 25 bp, Homo sapien
tgttgtgtggaaggcatccaacccc

SEQ ID NO: 2296603 - DNA, 25 bp, Homo sapien
tggtgatctgatctccaatgataag

SEQ ID NO: 2296604 - DNA, 25 bp, Homo sapien
ggaggatgtcgtctcatgagcttgc

SEQ ID NO: 2296605 - DNA, 25 bp, Homo sapien
tggaggatgtcgtctcatgagcttg

SEQ ID NO: 2296606 - DNA, 25 bp, Homo sapien
tccttttatacatcgctggatttga

SEQ ID NO: 2296607 - DNA, 25 bp, Homo sapien
aagttgaggaagtttgccgctattc

SEQ ID NO: 2296608 - DNA, 25 bp, Homo sapien
gcatctactgatataatcatatgac

SEQ ID NO: 2296609 - DNA, 25 bp, Homo sapien
tgccgctattcctagtttagttggt

SEQ ID NO: 2296610 - DNA, 25 bp, Homo sapien
cttggcactgagaatgcagcagaaa

SEQ ID NO: 2296611 - DNA, 25 bp, Homo sapien
tgttctacacatacacagaattggt

SEQ ID NO: 2296612 - DNA, 25 bp, Homo sapien
agaggtgctattccgtaaatgccag

SEQ ID NO: 2296613 - DNA, 25 bp, Homo sapien
ggttatggccaaggatcctagaaat

SEQ ID NO: 2296614 - DNA, 25 bp, Homo sapien
tattgcaagccgatcattgggcatt

SEQ ID NO: 2296615 - DNA, 25 bp, Homo sapien
tgtttatgcatattgcaagccgatc

SEQ ID NO: 2296616 - DNA, 25 bp, Homo sapien
gcccagtgcccatttgcctgtgttt

SEQ ID NO: 2296617 - DNA, 25 bp, Homo sapien
gcctactagcacaattatggaagtg

SEQ ID NO: 2296618 - DNA, 25 bp, Homo sapien
tcacaggctttttctgcacctattg

SEQ ID NO: 2296619 - DNA, 25 bp, Homo sapien
tgtcacaggctttttctgcacctat

SEQ ID NO: 2296620 - DNA, 25 bp, Homo sapien
cacaggctttttctgcacctattga

SEQ ID NO: 2296621 - DNA, 25 bp, Homo sapien
tttgtcacaggctttttctgcacct

SEQ ID NO: 2296622 - DNA, 25 bp, Homo sapien
tgctgaacctcaacaaccctaaaat

SEQ ID NO: 2296623 - DNA, 25 bp, Homo sapien
gaacctcaacaaccctaaaatgcat

SEQ ID NO: 2296624 - DNA, 25 bp, Homo sapien
ctgaacctcaacaaccctaaaatgc

SEQ ID NO: 2296625 - DNA, 25 bp, Homo sapien
tgctgctgaacctcaacaaccctaa

SEQ ID NO: 2296626 - DNA, 25 bp, Homo sapien
ggaaactcatcccattgaaaccctc

SEQ ID NO: 2296627 - DNA, 25 bp, Homo sapien
ccctgatgtccaatcaaactgccat

SEQ ID NO: 2296628 - DNA, 25 bp, Homo sapien
cccagcacggatattgttgtcaagt

SEQ ID NO: 2296629 - DNA, 25 bp, Homo sapien
gaggtcttgggtggcccgtttgagc

SEQ ID NO: 2296630 - DNA, 25 bp, Homo sapien
gagtgacgctctggagtatcagtga

SEQ ID NO: 2296631 - DNA, 25 bp, Homo sapien
caggaacaaacatggctcagcctac

SEQ ID NO: 2296632 - DNA, 25 bp, Homo sapien
ccatagccaaccacagagtgacgct

SEQ ID NO: 2296633 - DNA, 25 bp, Homo sapien
tgcgctgttgccttcgctatgggaa

SEQ ID NO: 2296634 - DNA, 25 bp, Homo sapien
tcttcctgtgtgaccaagacgcctc

SEQ ID NO: 2296635 - DNA, 25 bp, Homo sapien
ttcttcctgtgtgaccaagacgcct

SEQ ID NO: 2296636 - DNA, 25 bp, Homo sapien
gaaggggatcgagtccttctgacac

SEQ ID NO: 2296637 - DNA, 25 bp, Homo sapien
acaagagggtatgtgcaggccagtt

SEQ ID NO: 2296638 - DNA, 25 bp, Homo sapien
aggaaggggatcgagtccttctgac

SEQ ID NO: 2296639 - DNA, 25 bp, Homo sapien
cagcacaagagggtatgtgcaggcc

SEQ ID NO: 2296640 - DNA, 25 bp, Homo sapien
tcaattctccagcataagtaagctc

SEQ ID NO: 2296641 - DNA, 25 bp, Homo sapien
gactgagtgaccaccccttccaatt

SEQ ID NO: 2296642 - DNA, 25 bp, Homo sapien
taaggagtccgatcatcacttccac

SEQ ID NO: 2296643 - DNA, 25 bp, Homo sapien
taagggcaagatacatgtgaatcac

SEQ ID NO: 2296644 - DNA, 25 bp, Homo sapien
tgagccaccgcgccccgccctgttg

SEQ ID NO: 2296645 - DNA, 25 bp, Homo sapien
gccaccgcgccccgccctgttggcc

SEQ ID NO: 2296646 - DNA, 25 bp, Homo sapien
gagccaccgcgccccgccctgttgg

SEQ ID NO: 2296647 - DNA, 25 bp, Homo sapien
agccaccgcgccccgccctgttggc

SEQ ID NO: 2296648 - DNA, 25 bp, Homo sapien
attcttgaagggatgaacaccccat

SEQ ID NO: 2296649 - DNA, 25 bp, Homo sapien
taccccatcaatgtatgcacctact

SEQ ID NO: 2296650 - DNA, 25 bp, Homo sapien
tgtcttgaagacttaattgataact

SEQ ID NO: 2296651 - DNA, 25 bp, Homo sapien
tataattgagttgtttataacacag

SEQ ID NO: 2296652 - DNA, 25 bp, Homo sapien
tgtgaggtcagttgtaacatcgccc

SEQ ID NO: 2296653 - DNA, 25 bp, Homo sapien
tctgtgaggtcagttgtaacatcgc

SEQ ID NO: 2296654 - DNA, 25 bp, Homo sapien
gaggtcagttgtaacatcgcccttg

SEQ ID NO: 2296655 - DNA, 25 bp, Homo sapien
tcagttgtaacatcgcccttgtcat

SEQ ID NO: 2296656 - DNA, 25 bp, Homo sapien
ctgaggcctgtttctgttgcatccc

SEQ ID NO: 2296657 - DNA, 25 bp, Homo sapien
aggcctgtttctgttgcatcccagc

SEQ ID NO: 2296658 - DNA, 25 bp, Homo sapien
gaggcctgtttctgttgcatcccag

SEQ ID NO: 2296659 - DNA, 25 bp, Homo sapien
gcctgtttctgttgcatcccagcca

SEQ ID NO: 2296660 - DNA, 25 bp, Homo sapien
ttcggaaaggttgccagggaacagc

SEQ ID NO: 2296661 - DNA, 25 bp, Homo sapien
cagagaccaagacttttccaaggcc

SEQ ID NO: 2296662 - DNA, 25 bp, Homo sapien
gagtcttggcataagctcctctatc

SEQ ID NO: 2296663 - DNA, 25 bp, Homo sapien
tctcgaagacaagaaggatgggcct

SEQ ID NO: 2296664 - DNA, 25 bp, Homo sapien
tcaggcttctgtgatgagcccttct

SEQ ID NO: 2296665 - DNA, 25 bp, Homo sapien
aggcttctgtgatgagcccttctat

SEQ ID NO: 2296666 - DNA, 25 bp, Homo sapien
tggtccctgcagaagagtgtggagg

SEQ ID NO: 2296667 - DNA, 25 bp, Homo sapien
ccctgcagaagagtgtggaggacaa

SEQ ID NO: 2296668 - DNA, 25 bp, Homo sapien
caagcgaggactcaatgggccatac

SEQ ID NO: 2296669 - DNA, 25 bp, Homo sapien
ctgactgagtcaggccacaatggca

SEQ ID NO: 2296670 - DNA, 25 bp, Homo sapien
gccacatatatatgccaagcgagga

SEQ ID NO: 2296671 - DNA, 25 bp, Homo sapien
ggccataccataacccaggaatctg

SEQ ID NO: 2296672 - DNA, 25 bp, Homo sapien
ggttggaaatatccatttctaagca

SEQ ID NO: 2296673 - DNA, 25 bp, Homo sapien
tttctaagcatttatgatgacagcc

SEQ ID NO: 2296674 - DNA, 25 bp, Homo sapien
tttatgatgacagccatagctggca

SEQ ID NO: 2296675 - DNA, 25 bp, Homo sapien
ctggttggaaatatccatttctaag

SEQ ID NO: 2296676 - DNA, 25 bp, Homo sapien
ccgaagcgggcttagatgaacaaaa

SEQ ID NO: 2296677 - DNA, 25 bp, Homo sapien
tgaacaaaagcctcggacagaggga

SEQ ID NO: 2296678 - DNA, 25 bp, Homo sapien
caccagaaagtatgcgtgactagga

SEQ ID NO: 2296679 - DNA, 25 bp, Homo sapien
cacaggttttctatgccccagatca

SEQ ID NO: 2296680 - DNA, 25 bp, Homo sapien
gggatacttgcacttcactattgtt

SEQ ID NO: 2296681 - DNA, 25 bp, Homo sapien
aaaaggactctctacgccatggctt

SEQ ID NO: 2296682 - DNA, 25 bp, Homo sapien
aagctttcaactgaacttagaggtg

SEQ ID NO: 2296683 - DNA, 25 bp, Homo sapien
caactgaacttagaggtgaatttaa

SEQ ID NO: 2296684 - DNA, 25 bp, Homo sapien
cagccagtggcttccgcaatgtgga

SEQ ID NO: 2296685 - DNA, 25 bp, Homo sapien
gcacccacgtgaggatgagacacag

SEQ ID NO: 2296686 - DNA, 25 bp, Homo sapien
agtactcagagcatgcatgtagtcc

SEQ ID NO: 2296687 - DNA, 25 bp, Homo sapien
tgcacatccctaaataagtactcag

SEQ ID NO: 2296688 - DNA, 25 bp, Homo sapien
gagagaaaactgagcaccgtcttta

SEQ ID NO: 2296689 - DNA, 25 bp, Homo sapien
gaaaactgagcaccgtctttagcat

SEQ ID NO: 2296690 - DNA, 25 bp, Homo sapien
tgagcaccgtctttagcattcccca

SEQ ID NO: 2296691 - DNA, 25 bp, Homo sapien
caagagagaaaactgagcaccgtct

SEQ ID NO: 2296692 - DNA, 25 bp, Homo sapien
tgtgaaaatgcagccaagcaaacag

SEQ ID NO: 2296693 - DNA, 25 bp, Homo sapien
acacagtactcccatggactgctgg

SEQ ID NO: 2296694 - DNA, 25 bp, Homo sapien
aggaaggtgcctcgagtcttagaag

SEQ ID NO: 2296695 - DNA, 25 bp, Homo sapien
gaaagattgtgaaaatgcagccaag

SEQ ID NO: 2296696 - DNA, 25 bp, Homo sapien
ggagcatcccttggtagttgtgggc

SEQ ID NO: 2296697 - DNA, 25 bp, Homo sapien
tcagacttggagatgttgcaagggg

SEQ ID NO: 2296698 - DNA, 25 bp, Homo sapien
tgtggaattgttcagctggtctgct

SEQ ID NO: 2296699 - DNA, 25 bp, Homo sapien
gtggaattgttcagctggtctgctg

SEQ ID NO: 2296700 - DNA, 25 bp, Homo sapien
gtactgtcttatgcggaagagtgcc

SEQ ID NO: 2296701 - DNA, 25 bp, Homo sapien
aatctggctcgtgctgagcaaaagg

SEQ ID NO: 2296702 - DNA, 25 bp, Homo sapien
gtgccaggggagacccaagaatctg

SEQ ID NO: 2296703 - DNA, 25 bp, Homo sapien
gagtttgtgaagtactgtcttatgc

SEQ ID NO: 2296704 - DNA, 25 bp, Homo sapien
tggtcatggcaagggcaagatgttt

SEQ ID NO: 2296705 - DNA, 25 bp, Homo sapien
tcggatgcatataagtctgggaatc

SEQ ID NO: 2296706 - DNA, 25 bp, Homo sapien
taagtgatcattcttgtgaacaatc

SEQ ID NO: 2296707 - DNA, 25 bp, Homo sapien
tttaagttcttcaatctcggatgca

SEQ ID NO: 2296708 - DNA, 25 bp, Homo sapien
tcatgagactatgtgggggtttcca

SEQ ID NO: 2296709 - DNA, 25 bp, Homo sapien
gctcatgagactatgtgggggtttc

SEQ ID NO: 2296710 - DNA, 25 bp, Homo sapien
ctcatgagactatgtgggggtttcc

SEQ ID NO: 2296711 - DNA, 25 bp, Homo sapien
catgagactatgtgggggtttccaa

SEQ ID NO: 2296712 - DNA, 25 bp, Homo sapien
aattctatgattttcaggagcagaa

SEQ ID NO: 2296713 - DNA, 25 bp, Homo sapien
tcacgttctgcagcattagaagttt

SEQ ID NO: 2296714 - DNA, 25 bp, Homo sapien
cgttctgcagcattagaagttttac

SEQ ID NO: 2296715 - DNA, 25 bp, Homo sapien
tttcacgttctgcagcattagaagt

SEQ ID NO: 2296716 - DNA, 25 bp, Homo sapien
ttctgcagcattagaagttttactc

SEQ ID NO: 2296717 - DNA, 25 bp, Homo sapien
gagttaccagtttaatggtgcccat

SEQ ID NO: 2296718 - DNA, 25 bp, Homo sapien
agagttaccagtttaatggtgccca

SEQ ID NO: 2296719 - DNA, 25 bp, Homo sapien
gagagttaccagtttaatggtgccc

SEQ ID NO: 2296720 - DNA, 25 bp, Homo sapien
atgagagttaccagtttaatggtgc

SEQ ID NO: 2296721 - DNA, 25 bp, Homo sapien
tacctatctataggcttgctctgat

SEQ ID NO: 2296722 - DNA, 25 bp, Homo sapien
gggaacattatctcatctgggtcac

SEQ ID NO: 2296723 - DNA, 25 bp, Homo sapien
ttacagaggtacattgaaaacattg

SEQ ID NO: 2296724 - DNA, 25 bp, Homo sapien
ccagcttagtcaattcacttgagga

SEQ ID NO: 2296725 - DNA, 25 bp, Homo sapien
taactgataatggtaactcccacct

SEQ ID NO: 2296726 - DNA, 25 bp, Homo sapien
tctggacgtcctcagtggaaaaggc

SEQ ID NO: 2296727 - DNA, 25 bp, Homo sapien
ggtgaacagtgcagcgttctcagga

SEQ ID NO: 2296728 - DNA, 25 bp, Homo sapien
cggttcctgcagcttaactgataat

SEQ ID NO: 2296729 - DNA, 25 bp, Homo sapien
gaaacggctccagtctttcggctcc

SEQ ID NO: 2296730 - DNA, 25 bp, Homo sapien
gacactctatatatccggctcggag

SEQ ID NO: 2296731 - DNA, 25 bp, Homo sapien
tttcggctcccaaacgtgacactct

SEQ ID NO: 2296732 - DNA, 25 bp, Homo sapien
caactagtggtcctctaaatcctgc

SEQ ID NO: 2296733 - DNA, 25 bp, Homo sapien
cgcgcgtaaacggccggtgacgatt

SEQ ID NO: 2296734 - DNA, 25 bp, Homo sapien
cccacattaaccttgctgggtcctt

SEQ ID NO: 2296735 - DNA, 25 bp, Homo sapien
cattaaccttgctgggtccttcccg

SEQ ID NO: 2296736 - DNA, 25 bp, Homo sapien
accttggcgggctccgccgacgcca

SEQ ID NO: 2296737 - DNA, 25 bp, Homo sapien
tcaggtttgtactggagaactcacc

SEQ ID NO: 2296738 - DNA, 25 bp, Homo sapien
aaattattaagccagcagacggtga

SEQ ID NO: 2296739 - DNA, 25 bp, Homo sapien
tagcagaacattaccaaacgcaggg

SEQ ID NO: 2296740 - DNA, 25 bp, Homo sapien
tttagaccaagtttgtcagcctggg

SEQ ID NO: 2296741 - DNA, 25 bp, Homo sapien
tgaagctagctagagggaatttctg

SEQ ID NO: 2296742 - DNA, 25 bp, Homo sapien
ctgttgcagaactttaagggctatc

SEQ ID NO: 2296743 - DNA, 25 bp, Homo sapien
tcagaacaccaaaacggagtcagtg

SEQ ID NO: 2296744 - DNA, 25 bp, Homo sapien
cctgggcacccaaaagtcttgtttg

SEQ ID NO: 2296745 - DNA, 25 bp, Homo sapien
tgaggatgcctcacagggcctagtc

SEQ ID NO: 2296746 - DNA, 25 bp, Homo sapien
ggcctagtctgtcagtaagcacact

SEQ ID NO: 2296747 - DNA, 25 bp, Homo sapien
cagaaatgagctgaccagaaatatc

SEQ ID NO: 2296748 - DNA, 25 bp, Homo sapien
catttgctaagaatataaggtcccc

SEQ ID NO: 2296749 - DNA, 25 bp, Homo sapien
cagaggcactcctcatgcaaggaca

SEQ ID NO: 2296750 - DNA, 25 bp, Homo sapien
ttcacttactagacagggcagcggc

SEQ ID NO: 2296751 - DNA, 25 bp, Homo sapien
acttaccagtcagttgggcggcagg

SEQ ID NO: 2296752 - DNA, 25 bp, Homo sapien
tcctcacttcacaggcggttggcag

SEQ ID NO: 2296753 - DNA, 25 bp, Homo sapien
ccttctcagacagttggtggccggg

SEQ ID NO: 2296754 - DNA, 25 bp, Homo sapien
cagcgaccaggcagagacacttctc

SEQ ID NO: 2296755 - DNA, 25 bp, Homo sapien
cctcccttctcagacagttggtggc

SEQ ID NO: 2296756 - DNA, 25 bp, Homo sapien
gggcagcgaccaggcagagacactt

SEQ ID NO: 2296757 - DNA, 25 bp, Homo sapien
agactccagacccaccacctttaag

SEQ ID NO: 2296758 - DNA, 25 bp, Homo sapien
gaatttgggggctaaatactgggca

SEQ ID NO: 2296759 - DNA, 25 bp, Homo sapien
gggcaatcagctatcgccaagtggg

SEQ ID NO: 2296760 - DNA, 25 bp, Homo sapien
ggagtaccatcggatccctttcact

SEQ ID NO: 2296761 - DNA, 25 bp, Homo sapien
cacgtgtgtcgcttccacattctta

SEQ ID NO: 2296762 - DNA, 25 bp, Homo sapien
gaatcttgtccattctgcctccaca

SEQ ID NO: 2296763 - DNA, 25 bp, Homo sapien
cattcttaccgcaagtgcttgagac

SEQ ID NO: 2296764 - DNA, 25 bp, Homo sapien
cactgctgccagtgagatcttttgt

SEQ ID NO: 2296765 - DNA, 25 bp, Homo sapien
gagcttaaagtgtggaatagatttt

SEQ ID NO: 2296766 - DNA, 25 bp, Homo sapien
aagtgtggaatagattttagtatcc

SEQ ID NO: 2296767 - DNA, 25 bp, Homo sapien
agcaggagcttaaagtgtggaatag

SEQ ID NO: 2296768 - DNA, 25 bp, Homo sapien
aaagtgtggaatagattttagtatc

SEQ ID NO: 2296769 - DNA, 25 bp, Homo sapien
agatttaaaggaccatgaagctttt

SEQ ID NO: 2296770 - DNA, 25 bp, Homo sapien
tttctgaatcactgagaccctttca

SEQ ID NO: 2296771 - DNA, 25 bp, Homo sapien
tagttgctatttcctagaaatggag

SEQ ID NO: 2296772 - DNA, 25 bp, Homo sapien
tgtagcctctggtagcatttggctg

SEQ ID NO: 2296773 - DNA, 25 bp, Homo sapien
tggtaccaaatctcgaaggaatgtt

SEQ ID NO: 2296774 - DNA, 25 bp, Homo sapien
aaactctggcgtcacctttggaata

SEQ ID NO: 2296775 - DNA, 25 bp, Homo sapien
tcaggtaaactctggcgtcaccttt

SEQ ID NO: 2296776 - DNA, 25 bp, Homo sapien
gaatatactggcttaattgctcctg

SEQ ID NO: 2296777 - DNA, 25 bp, Homo sapien
cttctattttgccacaccgaggttg

SEQ ID NO: 2296778 - DNA, 25 bp, Homo sapien
gaggttgcattttgccattggaaca

SEQ ID NO: 2296779 - DNA, 25 bp, Homo sapien
ttgccacaccgaggttgcattttgc

SEQ ID NO: 2296780 - DNA, 25 bp, Homo sapien
gaacattctcccatgattttgctca

SEQ ID NO: 2296781 - DNA, 25 bp, Homo sapien
aatcaatacattgacgattgacctg

SEQ ID NO: 2296782 - DNA, 25 bp, Homo sapien
agacttggagcccaagatagtccaa

SEQ ID NO: 2296783 - DNA, 25 bp, Homo sapien
tgacgattgacctgatgcatcttat

SEQ ID NO: 2296784 - DNA, 25 bp, Homo sapien
tagtccaacctcaaaatcaatacat

SEQ ID NO: 2296785 - DNA, 25 bp, Homo sapien
catcaactccatgaactgtgtgtga

SEQ ID NO: 2296786 - DNA, 25 bp, Homo sapien
cacatgagagcaataagagattccc

SEQ ID NO: 2296787 - DNA, 25 bp, Homo sapien
gcagcatctgctgtacacatgagag

SEQ ID NO: 2296788 - DNA, 25 bp, Homo sapien
cagagtcaatgaacccaagatcccc

SEQ ID NO: 2296789 - DNA, 25 bp, Homo sapien
caatagactgttgggaggactaaga

SEQ ID NO: 2296790 - DNA, 25 bp, Homo sapien
tctctgtctgtaatcctgggatggg

SEQ ID NO: 2296791 - DNA, 25 bp, Homo sapien
gacagctggcgtcagttacctataa

SEQ ID NO: 2296792 - DNA, 25 bp, Homo sapien
caaatgattcaggacagtacctggc

SEQ ID NO: 2296793 - DNA, 25 bp, Homo sapien
tcagaagaaccttcagaagaatggt

SEQ ID NO: 2296794 - DNA, 25 bp, Homo sapien
tattatatccccatgcctgaagtgc

SEQ ID NO: 2296795 - DNA, 25 bp, Homo sapien
tatgaccagaatacgagctgagcag

SEQ ID NO: 2296796 - DNA, 25 bp, Homo sapien
gaagtgcagctcaccccaagctgaa

SEQ ID NO: 2296797 - DNA, 25 bp, Homo sapien
ctagtttctctggcttcaggttcct

SEQ ID NO: 2296798 - DNA, 25 bp, Homo sapien
ctttttgtctagtttctctggcttc

SEQ ID NO: 2296799 - DNA, 25 bp, Homo sapien
ttttgtctagtttctctggcttcag

SEQ ID NO: 2296800 - DNA, 25 bp, Homo sapien
ttgtctagtttctctggcttcaggt

SEQ ID NO: 2296801 - DNA, 25 bp, Homo sapien
cccattgtcttagggcagcggaaag

SEQ ID NO: 2296802 - DNA, 25 bp, Homo sapien
aatagtattacagagcttattccag

SEQ ID NO: 2296803 - DNA, 25 bp, Homo sapien
ctaggttctatatgagttctgatcc

SEQ ID NO: 2296804 - DNA, 25 bp, Homo sapien
gatccttctttgaggtgtactctga

SEQ ID NO: 2296805 - DNA, 25 bp, Homo sapien
ggtgacaaacaccagaatcataaat

SEQ ID NO: 2296806 - DNA, 25 bp, Homo sapien
caaaggggtcaaatctggtgacaaa

SEQ ID NO: 2296807 - DNA, 25 bp, Homo sapien
aatataacaattataggcacgtaag

SEQ ID NO: 2296808 - DNA, 25 bp, Homo sapien
aacaattataggcacgtaaggtgcc

SEQ ID NO: 2296809 - DNA, 25 bp, Homo sapien
tccaaagatgttgaggccacccttg

SEQ ID NO: 2296810 - DNA, 25 bp, Homo sapien
ccaccacagtacttgggatatctaa

SEQ ID NO: 2296811 - DNA, 25 bp, Homo sapien
tttggaactcttaatctgatacccc

SEQ ID NO: 2296812 - DNA, 25 bp, Homo sapien
tccaaactcgttgccagactgcagc

SEQ ID NO: 2296813 - DNA, 25 bp, Homo sapien
tgggagagggaatgcccatgaagca

SEQ ID NO: 2296814 - DNA, 25 bp, Homo sapien
ggagagggaatgcccatgaagcaaa

SEQ ID NO: 2296815 - DNA, 25 bp, Homo sapien
gagggaatgcccatgaagcaaactg

SEQ ID NO: 2296816 - DNA, 25 bp, Homo sapien
gggaatgcccatgaagcaaactggg

SEQ ID NO: 2296817 - DNA, 25 bp, Homo sapien
gttactaaacgctgcctgactacat

SEQ ID NO: 2296818 - DNA, 25 bp, Homo sapien
gagaggagtaagagagcttgagtgc

SEQ ID NO: 2296819 - DNA, 25 bp, Homo sapien
tctggatatagttactaaacgctgc

SEQ ID NO: 2296820 - DNA, 25 bp, Homo sapien
taaacgctgcctgactacattccag

SEQ ID NO: 2296821 - DNA, 25 bp, Homo sapien
tgcccatttctaatccaagactcca

SEQ ID NO: 2296822 - DNA, 25 bp, Homo sapien
gcccatttctaatccaagactccaa

SEQ ID NO: 2296823 - DNA, 25 bp, Homo sapien
ccatttctaatccaagactccaaca

SEQ ID NO: 2296824 - DNA, 25 bp, Homo sapien
ctgcccatttctaatccaagactcc

SEQ ID NO: 2296825 - DNA, 25 bp, Homo sapien
caacgctggcataattccacagaaa

SEQ ID NO: 2296826 - DNA, 25 bp, Homo sapien
ggatatatcaacataacctgagctt

SEQ ID NO: 2296827 - DNA, 25 bp, Homo sapien
taaggaattcagaggtattaggcct

SEQ ID NO: 2296828 - DNA, 25 bp, Homo sapien
taactgctacaccattccaacgctg

SEQ ID NO: 2296829 - DNA, 25 bp, Homo sapien
tagagccctggagtttcttttggac

SEQ ID NO: 2296830 - DNA, 25 bp, Homo sapien
agagccctggagtttcttttggact

SEQ ID NO: 2296831 - DNA, 25 bp, Homo sapien
cttctgctggatcaactctcatgtt

SEQ ID NO: 2296832 - DNA, 25 bp, Homo sapien
ctgctggatcaactctcatgttaag

SEQ ID NO: 2296833 - DNA, 25 bp, Homo sapien
ccaaataaactgtcttcaagctctc

SEQ ID NO: 2296834 - DNA, 25 bp, Homo sapien
tccaaataaactgtcttcaagctct

SEQ ID NO: 2296835 - DNA, 25 bp, Homo sapien
aaaatgaatctggtagcaggaagcc

SEQ ID NO: 2296836 - DNA, 25 bp, Homo sapien
gaagccagatgcaactcttgctgca

SEQ ID NO: 2296837 - DNA, 25 bp, Homo sapien
tgggctgcaatgcaaggcttggttt

SEQ ID NO: 2296838 - DNA, 25 bp, Homo sapien
tttggtgtgccctgaaatagcttgg

SEQ ID NO: 2296839 - DNA, 25 bp, Homo sapien
cttttatagctcctgaaagaggttc

SEQ ID NO: 2296840 - DNA, 25 bp, Homo sapien
tcttttatagctcctgaaagaggtt

SEQ ID NO: 2296841 - DNA, 25 bp, Homo sapien
ctaggatctggaaaaccctctgctg

SEQ ID NO: 2296842 - DNA, 25 bp, Homo sapien
ggcctcacaaggatgtaaatgactt

SEQ ID NO: 2296843 - DNA, 25 bp, Homo sapien
ctgtggcccccgtgatgagaatgga

SEQ ID NO: 2296844 - DNA, 25 bp, Homo sapien
gtctgggctggtgcgaaacagcttc

SEQ ID NO: 2296845 - DNA, 25 bp, Homo sapien
cctggactgaaactaagcactcttt

SEQ ID NO: 2296846 - DNA, 25 bp, Homo sapien
ctgccctggactgaaactaagcact

SEQ ID NO: 2296847 - DNA, 25 bp, Homo sapien
cctggtccccacttgcaatatgaga

SEQ ID NO: 2296848 - DNA, 25 bp, Homo sapien
tgccttcctctacctgtgcaggtag

SEQ ID NO: 2296849 - DNA, 25 bp, Homo sapien
gtttctgggcagtctacaatgtgct

SEQ ID NO: 2296850 - DNA, 25 bp, Homo sapien
ctgttgcaagcagataaatttgatc

SEQ ID NO: 2296851 - DNA, 25 bp, Homo sapien
aatttgatcatcagtgtttctgggc

SEQ ID NO: 2296852 - DNA, 25 bp, Homo sapien
tgtgcatcatagatgttaacattcc

SEQ ID NO: 2296853 - DNA, 25 bp, Homo sapien
gccatccttgtggttagatgcccag

SEQ ID NO: 2296854 - DNA, 25 bp, Homo sapien
ggaaagcagatatttggcgacctaa

SEQ ID NO: 2296855 - DNA, 25 bp, Homo sapien
tccaagaataccaaaccagaagctg

SEQ ID NO: 2296856 - DNA, 25 bp, Homo sapien
tgcaataatggtatgagaccctggg

SEQ ID NO: 2296857 - DNA, 25 bp, Homo sapien
tcagaggtgacagccagggaataag

SEQ ID NO: 2296858 - DNA, 25 bp, Homo sapien
tatgccaagctgtcacattgtgtgc

SEQ ID NO: 2296859 - DNA, 25 bp, Homo sapien
ccaaagatcgcaagaagagcacact

SEQ ID NO: 2296860 - DNA, 25 bp, Homo sapien
cactcccagtgtaggaagcttctca

SEQ ID NO: 2296861 - DNA, 25 bp, Homo sapien
ggttttagaagtagagttggctgaa

SEQ ID NO: 2296862 - DNA, 25 bp, Homo sapien
gttggctgaaattaaagtctcgagt

SEQ ID NO: 2296863 - DNA, 25 bp, Homo sapien
cataagaggttggttttagaagtag

SEQ ID NO: 2296864 - DNA, 25 bp, Homo sapien
gacaggatcattgcataagaggttg

SEQ ID NO: 2296865 - DNA, 25 bp, Homo sapien
gacactaggaaactcgaaatgcttt

SEQ ID NO: 2296866 - DNA, 25 bp, Homo sapien
tattcccttggtatagatactgtcc

SEQ ID NO: 2296867 - DNA, 25 bp, Homo sapien
taagatcctaaacagatagacgtgg

SEQ ID NO: 2296868 - DNA, 25 bp, Homo sapien
gaaacatatcggtaagacactagga

SEQ ID NO: 2296869 - DNA, 25 bp, Homo sapien
tatgccaaaatcatgttgaacctca

SEQ ID NO: 2296870 - DNA, 25 bp, Homo sapien
tgaacctcatggcttggtaactttt

SEQ ID NO: 2296871 - DNA, 25 bp, Homo sapien
tatcctgtgatccagatacttctaa

SEQ ID NO: 2296872 - DNA, 25 bp, Homo sapien
catgccaacgtttctgattttatcc

SEQ ID NO: 2296873 - DNA, 25 bp, Homo sapien
actcatttccctttataactgccca

SEQ ID NO: 2296874 - DNA, 25 bp, Homo sapien
tgcccagagcaatcttcgcatcagt

SEQ ID NO: 2296875 - DNA, 25 bp, Homo sapien
catttccctttataactgcccagag

SEQ ID NO: 2296876 - DNA, 25 bp, Homo sapien
tccctttataactgcccagagcaat

SEQ ID NO: 2296877 - DNA, 25 bp, Homo sapien
tcaaagcgtacagtggctgcacagt

SEQ ID NO: 2296878 - DNA, 25 bp, Homo sapien
tatgtttgtacaggagagaagctcc

SEQ ID NO: 2296879 - DNA, 25 bp, Homo sapien
gagatctgcataaatagctctgatc

SEQ ID NO: 2296880 - DNA, 25 bp, Homo sapien
tctgatcttctcatgcacatttgga

SEQ ID NO: 2296881 - DNA, 25 bp, Homo sapien
tgactagccataagcaagagctgcc

SEQ ID NO: 2296882 - DNA, 25 bp, Homo sapien
tagccataagcaagagctgccgggt

SEQ ID NO: 2296883 - DNA, 25 bp, Homo sapien
agccataagcaagagctgccgggtg

SEQ ID NO: 2296884 - DNA, 25 bp, Homo sapien
actagccataagcaagagctgccgg

SEQ ID NO: 2296885 - DNA, 25 bp, Homo sapien
tgcatcctaggacagtaaagaaagt

SEQ ID NO: 2296886 - DNA, 25 bp, Homo sapien
aggtaaacttagtaaaatggagcag

SEQ ID NO: 2296887 - DNA, 25 bp, Homo sapien
ggtttctgctcattggcaagaagag

SEQ ID NO: 2296888 - DNA, 25 bp, Homo sapien
caaacttattctaagacctgagctg

SEQ ID NO: 2296889 - DNA, 25 bp, Homo sapien
gcagtaaatgacagatggaggttaa

SEQ ID NO: 2296890 - DNA, 25 bp, Homo sapien
tgtagcaattacctgccttgtctgg

SEQ ID NO: 2296891 - DNA, 25 bp, Homo sapien
tggttgacatatacttgagggagga

SEQ ID NO: 2296892 - DNA, 25 bp, Homo sapien
tatggagtacctagagaagcccttc

SEQ ID NO: 2296893 - DNA, 25 bp, Homo sapien
gagtccctagctggagatgcaaaga

SEQ ID NO: 2296894 - DNA, 25 bp, Homo sapien
tgtagataagcaaccagacattcag

SEQ ID NO: 2296895 - DNA, 25 bp, Homo sapien
ttcattcagtgagcattgagtccct

SEQ ID NO: 2296896 - DNA, 25 bp, Homo sapien
ccatctggtataggagtcgttgaaa

SEQ ID NO: 2296897 - DNA, 25 bp, Homo sapien
ggtataaatattgggccaatctctg

SEQ ID NO: 2296898 - DNA, 25 bp, Homo sapien
aggccttggtgtaggtataaatatt

SEQ ID NO: 2296899 - DNA, 25 bp, Homo sapien
gccttggtgtaggtataaatattgg

SEQ ID NO: 2296900 - DNA, 25 bp, Homo sapien
atattgggccaatctctgatcagct

SEQ ID NO: 2296901 - DNA, 25 bp, Homo sapien
caataatgattccattaggtccatt

SEQ ID NO: 2296902 - DNA, 25 bp, Homo sapien
tccattaggtccatttatattatca

SEQ ID NO: 2296903 - DNA, 25 bp, Homo sapien
cgcaataatgattccattaggtcca

SEQ ID NO: 2296904 - DNA, 25 bp, Homo sapien
gattccattaggtccatttatatta

SEQ ID NO: 2296905 - DNA, 25 bp, Homo sapien
tcaactggaattacgtctgccacag

SEQ ID NO: 2296906 - DNA, 25 bp, Homo sapien
gacgactgtatcaactggaattacg

SEQ ID NO: 2296907 - DNA, 25 bp, Homo sapien
ccatcctacagctagcatgagattg

SEQ ID NO: 2296908 - DNA, 25 bp, Homo sapien
gctagcatgagattgacgactgtat

SEQ ID NO: 2296909 - DNA, 25 bp, Homo sapien
taatgtggtagactaatgttgactt

SEQ ID NO: 2296910 - DNA, 25 bp, Homo sapien
ccattttgtgccaattgcagggatt

SEQ ID NO: 2296911 - DNA, 25 bp, Homo sapien
agatgtaatgtggtagactaatgtt

SEQ ID NO: 2296912 - DNA, 25 bp, Homo sapien
aattgcagggattcatgttaccaga

SEQ ID NO: 2296913 - DNA, 25 bp, Homo sapien
tctaagctccatgacacactttgtc

SEQ ID NO: 2296914 - DNA, 25 bp, Homo sapien
aagctctaagctccatgacacactt

SEQ ID NO: 2296915 - DNA, 25 bp, Homo sapien
tccccatataagctctaagctccat

SEQ ID NO: 2296916 - DNA, 25 bp, Homo sapien
catataagctctaagctccatgaca

SEQ ID NO: 2296917 - DNA, 25 bp, Homo sapien
actggaatgtgtagaggtagtgtta

SEQ ID NO: 2296918 - DNA, 25 bp, Homo sapien
ctggaatgtgtagaggtagtgttac

SEQ ID NO: 2296919 - DNA, 25 bp, Homo sapien
cactggaatgtgtagaggtagtgtt

SEQ ID NO: 2296920 - DNA, 25 bp, Homo sapien
tagaactctcagtgtggcaccatgg

SEQ ID NO: 2296921 - DNA, 25 bp, Homo sapien
gctgccctgcaatagaactctcagt

SEQ ID NO: 2296922 - DNA, 25 bp, Homo sapien
tgtctagctgccctgcaatagaact

SEQ ID NO: 2296923 - DNA, 25 bp, Homo sapien
tgagccacagtgtctagctgccctg

SEQ ID NO: 2296924 - DNA, 25 bp, Homo sapien
gagccgcagatagcagtcatagata

SEQ ID NO: 2296925 - DNA, 25 bp, Homo sapien
aaaattagcatttggcctcctgaaa

SEQ ID NO: 2296926 - DNA, 25 bp, Homo sapien
tccagtactgtgatgtgaagctgtt

SEQ ID NO: 2296927 - DNA, 25 bp, Homo sapien
ggtggctgaccgcattccagtactg

SEQ ID NO: 2296928 - DNA, 25 bp, Homo sapien
tgtattgtacgtgctccattcccaa

SEQ ID NO: 2296929 - DNA, 25 bp, Homo sapien
gcatttctgtattgtacgtgctcca

SEQ ID NO: 2296930 - DNA, 25 bp, Homo sapien
aagccgattcatgagctttgtcatc

SEQ ID NO: 2296931 - DNA, 25 bp, Homo sapien
caactccggttgatgaaatactcca

SEQ ID NO: 2296932 - DNA, 25 bp, Homo sapien
actggcgcacgtcaaagttgaatac

SEQ ID NO: 2296933 - DNA, 25 bp, Homo sapien
ttttcaatgtattccaaccagttca

SEQ ID NO: 2296934 - DNA, 25 bp, Homo sapien
aaccagttcaactggcgcacgtcaa

SEQ ID NO: 2296935 - DNA, 25 bp, Homo sapien
cccagccatatcctctttcaataag

SEQ ID NO: 2296936 - DNA, 25 bp, Homo sapien
gaagaaccagacattccgagccatc

SEQ ID NO: 2296937 - DNA, 25 bp, Homo sapien
gacattccgagccatctgagatctt

SEQ ID NO: 2296938 - DNA, 25 bp, Homo sapien
ttgcaatgagaaggcgccaggcgat

SEQ ID NO: 2296939 - DNA, 25 bp, Homo sapien
gagccatctgagatcttgcaatgag

SEQ ID NO: 2296940 - DNA, 25 bp, Homo sapien
taaactttgagcgtgctggatgctc

SEQ ID NO: 2296941 - DNA, 25 bp, Homo sapien
ctttgagcgtgctggatgctctaaa

SEQ ID NO: 2296942 - DNA, 25 bp, Homo sapien
tgagcgtgctggatgctctaaagta

SEQ ID NO: 2296943 - DNA, 25 bp, Homo sapien
gcgtgctggatgctctaaagtagga

SEQ ID NO: 2296944 - DNA, 25 bp, Homo sapien
tagggacgaatacataacaggtgac

SEQ ID NO: 2296945 - DNA, 25 bp, Homo sapien
gaggttccagataaaaagcgatggc

SEQ ID NO: 2296946 - DNA, 25 bp, Homo sapien
ctttcacgtttaatacgcaagggca

SEQ ID NO: 2296947 - DNA, 25 bp, Homo sapien
caggtgacatttgacagtttgggca

SEQ ID NO: 2296948 - DNA, 25 bp, Homo sapien
tcagtggcaaagatcaaatgggacc

SEQ ID NO: 2296949 - DNA, 25 bp, Homo sapien
gatattgcccagaagagttcctcca

SEQ ID NO: 2296950 - DNA, 25 bp, Homo sapien
gatcaccaggtgcttagtttcagag

SEQ ID NO: 2296951 - DNA, 25 bp, Homo sapien
taaaagcataatacacgagtcccca

SEQ ID NO: 2296952 - DNA, 25 bp, Homo sapien
ttaaaagttaaaggcttccatctga

SEQ ID NO: 2296953 - DNA, 25 bp, Homo sapien
aagtattaaaattccgatcagccct

SEQ ID NO: 2296954 - DNA, 25 bp, Homo sapien
ggcttccatctgaaactcctcaaat

SEQ ID NO: 2296955 - DNA, 25 bp, Homo sapien
gatcagccctttggacgatgaagtt

SEQ ID NO: 2296956 - DNA, 25 bp, Homo sapien
gaactctggttattgacttatctaa

SEQ ID NO: 2296957 - DNA, 25 bp, Homo sapien
tgagaagtgcaaatgttcgcatcct

SEQ ID NO: 2296958 - DNA, 25 bp, Homo sapien
tgttaagccatattgacaagaccag

SEQ ID NO: 2296959 - DNA, 25 bp, Homo sapien
ggcagatatgtaggtgttatgtaac

SEQ ID NO: 2296960 - DNA, 25 bp, Homo sapien
taacacctcccgattgaaggagaaa

SEQ ID NO: 2296961 - DNA, 25 bp, Homo sapien
ccttttgaggatggccacacagaca

SEQ ID NO: 2296962 - DNA, 25 bp, Homo sapien
catgcagctaaacgatgaagaagcc

SEQ ID NO: 2296963 - DNA, 25 bp, Homo sapien
gcttcttgctgataaaaagcctgaa

SEQ ID NO: 2296964 - DNA, 25 bp, Homo sapien
gaagtgaataatgcaaactgctttg

SEQ ID NO: 2296965 - DNA, 25 bp, Homo sapien
tgctgagatcgtgaattatgtggcc

SEQ ID NO: 2296966 - DNA, 25 bp, Homo sapien
tatacatggtgctgatctctaaatc

SEQ ID NO: 2296967 - DNA, 25 bp, Homo sapien
tacaggcatgttacatggaattgga

SEQ ID NO: 2296968 - DNA, 25 bp, Homo sapien
tttcatcttcagtccttattcagta

SEQ ID NO: 2296969 - DNA, 25 bp, Homo sapien
ttagatggagctgggtagtttatta

SEQ ID NO: 2296970 - DNA, 25 bp, Homo sapien
gtcctgagatcctggaattcgctaa

SEQ ID NO: 2296971 - DNA, 25 bp, Homo sapien
tgtaatcagtaacatgtttatgatt

SEQ ID NO: 2296972 - DNA, 25 bp, Homo sapien
gatcctggaattcgctaagattatt

SEQ ID NO: 2296973 - DNA, 25 bp, Homo sapien
cctgagatcctggaattcgctaaga

SEQ ID NO: 2296974 - DNA, 25 bp, Homo sapien
aatagatcacctaccttttctgagg

SEQ ID NO: 2296975 - DNA, 25 bp, Homo sapien
tataatggtgagttggaaagatcct

SEQ ID NO: 2296976 - DNA, 25 bp, Homo sapien
tcatttacttggtggtagcttggaa

SEQ ID NO: 2296977 - DNA, 25 bp, Homo sapien
cctaatttgcaagtgtgctatagga

SEQ ID NO: 2296978 - DNA, 25 bp, Homo sapien
gtgctccattctagagtgatatccc

SEQ ID NO: 2296979 - DNA, 25 bp, Homo sapien
ccagacagtgacttttacagtaggt

SEQ ID NO: 2296980 - DNA, 25 bp, Homo sapien
tttcttggaggtaggttagtgctga

SEQ ID NO: 2296981 - DNA, 25 bp, Homo sapien
ggcgaggtgctccattctagagtga

SEQ ID NO: 2296982 - DNA, 25 bp, Homo sapien
ggatcccaatcggtcgagtcccagt

SEQ ID NO: 2296983 - DNA, 25 bp, Homo sapien
cgaaggcaacgtgtcaactcgtggt

SEQ ID NO: 2296984 - DNA, 25 bp, Homo sapien
cccggaaggagtttcgcacagtgct

SEQ ID NO: 2296985 - DNA, 25 bp, Homo sapien
gtccgcaggcgagtaggatcccaat

SEQ ID NO: 2296986 - DNA, 25 bp, Homo sapien
agttcaggtgcttcctcgatcgcac

SEQ ID NO: 2296987 - DNA, 25 bp, Homo sapien
cctgcaactcgaaggagttcaggtg

SEQ ID NO: 2296988 - DNA, 25 bp, Homo sapien
gcaactcgaaggagttcaggtgctt

SEQ ID NO: 2296989 - DNA, 25 bp, Homo sapien
gagttcaggtgcttcctcgatcgca

SEQ ID NO: 2296990 - DNA, 25 bp, Homo sapien
ctcgcgatatttccgggtacgcggg

SEQ ID NO: 2296991 - DNA, 25 bp, Homo sapien
gatagtcgcttttgttctcgcgata

SEQ ID NO: 2296992 - DNA, 25 bp, Homo sapien
tttgttctcgcgatatttccgggta

SEQ ID NO: 2296993 - DNA, 25 bp, Homo sapien
tcagctgtgatagtcgcttttgttc

SEQ ID NO: 2296994 - DNA, 25 bp, Homo sapien
taatgaaatacggtgtgaggagctg

SEQ ID NO: 2296995 - DNA, 25 bp, Homo sapien
tagggataatttctgcgcccaaggc

SEQ ID NO: 2296996 - DNA, 25 bp, Homo sapien
tacctatggcggaaaaggaagctca

SEQ ID NO: 2296997 - DNA, 25 bp, Homo sapien
gaggagctgagattcgttctgcagt

SEQ ID NO: 2296998 - DNA, 25 bp, Homo sapien
atatttgaaggcatagttggtgttg

SEQ ID NO: 2296999 - DNA, 25 bp, Homo sapien
tatttgaaggcatagttggtgttgg

SEQ ID NO: 2297000 - DNA, 25 bp, Homo sapien
acaaatatttgaaggcatagttggt

SEQ ID NO: 2297001 - DNA, 25 bp, Homo sapien
ttaacaaatatttgaaggcatagtt

SEQ ID NO: 2297002 - DNA, 25 bp, Homo sapien
tcccagcggtctgaatttgggtaaa

SEQ ID NO: 2297003 - DNA, 25 bp, Homo sapien
tattaactcctgttctatgaagtgg

SEQ ID NO: 2297004 - DNA, 25 bp, Homo sapien
aattatgccgttgttagacttctag

SEQ ID NO: 2297005 - DNA, 25 bp, Homo sapien
tcttctaagagtgttgtgaggatac

SEQ ID NO: 2297006 - DNA, 25 bp, Homo sapien
gatttcacccactacactatacttc

SEQ ID NO: 2297007 - DNA, 25 bp, Homo sapien
ttaagcatgtcaagaaagtgagaac

SEQ ID NO: 2297008 - DNA, 25 bp, Homo sapien
gtcctgtctccagtgtctatgattt

SEQ ID NO: 2297009 - DNA, 25 bp, Homo sapien
gaattctaacccaggaagtcctgtc

SEQ ID NO: 2297010 - DNA, 25 bp, Homo sapien
ccaatggcgacagagtggtcacccg

SEQ ID NO: 2297011 - DNA, 25 bp, Homo sapien
cttagagctgatgttatctcacttc

SEQ ID NO: 2297012 - DNA, 25 bp, Homo sapien
agtttgtccgctatatacacagtag

SEQ ID NO: 2297013 - DNA, 25 bp, Homo sapien
ataggcacgtgtcacttagagctga

SEQ ID NO: 2297014 - DNA, 25 bp, Homo sapien
tatttcatatcaaaaggatagctac

SEQ ID NO: 2297015 - DNA, 25 bp, Homo sapien
gagcattaagacttatcctttaata

SEQ ID NO: 2297016 - DNA, 25 bp, Homo sapien
aacatactttgagcattaagactta

SEQ ID NO: 2297017 - DNA, 25 bp, Homo sapien
tactttgagcattaagacttatcct

SEQ ID NO: 2297018 - DNA, 25 bp, Homo sapien
aaagggactgatttactacatctat

SEQ ID NO: 2297019 - DNA, 25 bp, Homo sapien
gacctgtggttatcatctaaaacca

SEQ ID NO: 2297020 - DNA, 25 bp, Homo sapien
tagacctgtggttatcatctaaaac

SEQ ID NO: 2297021 - DNA, 25 bp, Homo sapien
agacctgtggttatcatctaaaacc

SEQ ID NO: 2297022 - DNA, 25 bp, Homo sapien
gcattagcagagctacaccattaaa

SEQ ID NO: 2297023 - DNA, 25 bp, Homo sapien
tgcattagcagagctacaccattaa

SEQ ID NO: 2297024 - DNA, 25 bp, Homo sapien
taatatgtccattataggaaaccaa

SEQ ID NO: 2297025 - DNA, 25 bp, Homo sapien
ttaaaagttaatatgtccattatag

SEQ ID NO: 2297026 - DNA, 25 bp, Homo sapien
atatgtccattataggaaaccaaaa

SEQ ID NO: 2297027 - DNA, 25 bp, Homo sapien
gttaatatgtccattataggaaacc

SEQ ID NO: 2297028 - DNA, 25 bp, Homo sapien
ccgtgcgcagctcaccgtgcgtgag

SEQ ID NO: 2297029 - DNA, 25 bp, Homo sapien
actcctgcccaagtactgcgctttt

SEQ ID NO: 2297030 - DNA, 25 bp, Homo sapien
tatgtgacatctaagtgtactctgt

SEQ ID NO: 2297031 - DNA, 25 bp, Homo sapien
taatggatctaaaggtgacttcctg

SEQ ID NO: 2297032 - DNA, 25 bp, Homo sapien
tatgctaaggtctgtgctttctcgt

SEQ ID NO: 2297033 - DNA, 25 bp, Homo sapien
cattaaagctatagctcagtttggg

SEQ ID NO: 2297034 - DNA, 25 bp, Homo sapien
agcccttgctgtgattttgatagaa

SEQ ID NO: 2297035 - DNA, 25 bp, Homo sapien
gggatagccagttgctctaacacca

SEQ ID NO: 2297036 - DNA, 25 bp, Homo sapien
cctcagtttaaaggttgctcagtac

SEQ ID NO: 2297037 - DNA, 25 bp, Homo sapien
ctcaaataacttggtgagcaggacc

SEQ ID NO: 2297038 - DNA, 25 bp, Homo sapien
gagcaggacccttcagtgaatcaaa

SEQ ID NO: 2297039 - DNA, 25 bp, Homo sapien
tggtctcccagaagtagtgagatgg

SEQ ID NO: 2297040 - DNA, 25 bp, Homo sapien
gaatatcccccttggtcaaacacaa

SEQ ID NO: 2297041 - DNA, 25 bp, Homo sapien
tagctgagtctcacaagttctttac

SEQ ID NO: 2297042 - DNA, 25 bp, Homo sapien
aaggaacgttggcaaactggagtgc

SEQ ID NO: 2297043 - DNA, 25 bp, Homo sapien
cttgttggtgtgcaatctggttact

SEQ ID NO: 2297044 - DNA, 25 bp, Homo sapien
ggagagaaagatttctgccaggtga

SEQ ID NO: 2297045 - DNA, 25 bp, Homo sapien
tggagagaaagatttctgccaggtg

SEQ ID NO: 2297046 - DNA, 25 bp, Homo sapien
ctggagagaaagatttctgccaggt

SEQ ID NO: 2297047 - DNA, 25 bp, Homo sapien
gagaagggccaaacacataatagtg

SEQ ID NO: 2297048 - DNA, 25 bp, Homo sapien
taaatgatatcaagcagcatccgct

SEQ ID NO: 2297049 - DNA, 25 bp, Homo sapien
tcctctggagtacaactcggtggtg

SEQ ID NO: 2297050 - DNA, 25 bp, Homo sapien
tgaggccagtatgtctcccacacag

SEQ ID NO: 2297051 - DNA, 25 bp, Homo sapien
cttttagaagtggtgctgtggatcc

SEQ ID NO: 2297052 - DNA, 25 bp, Homo sapien
gagataccaaacctgtcgtctgcag

SEQ ID NO: 2297053 - DNA, 25 bp, Homo sapien
gtggatcctaccacaggccagcact

SEQ ID NO: 2297054 - DNA, 25 bp, Homo sapien
catcgctttctcatggcagtccaag

SEQ ID NO: 2297055 - DNA, 25 bp, Homo sapien
tggtatctcccaaatataggttaac

SEQ ID NO: 2297056 - DNA, 25 bp, Homo sapien
caccattgactcctacctggagaga

SEQ ID NO: 2297057 - DNA, 25 bp, Homo sapien
tttgtaagcatagatcaccattgac

SEQ ID NO: 2297058 - DNA, 25 bp, Homo sapien
taagtacctgtcaaatctagcattg

SEQ ID NO: 2297059 - DNA, 25 bp, Homo sapien
gacacaattcctcgttctcagatgg

SEQ ID NO: 2297060 - DNA, 25 bp, Homo sapien
gcacttgtggcaattggactgcaat

SEQ ID NO: 2297061 - DNA, 25 bp, Homo sapien
gcatgtaccagactaagtgccagta

SEQ ID NO: 2297062 - DNA, 25 bp, Homo sapien
tcgtgactcatagaaggtgtccatg

SEQ ID NO: 2297063 - DNA, 25 bp, Homo sapien
caggttctcagattgaagagctaca

SEQ ID NO: 2297064 - DNA, 25 bp, Homo sapien
cacacgtagtggctctcaacacggg

SEQ ID NO: 2297065 - DNA, 25 bp, Homo sapien
gcaacggcctttcagtcagactaaa

SEQ ID NO: 2297066 - DNA, 25 bp, Homo sapien
cacaataactgtactctgaggcgaa

SEQ ID NO: 2297067 - DNA, 25 bp, Homo sapien
taaaaatggagtgccctggttcatc

SEQ ID NO: 2297068 - DNA, 25 bp, Homo sapien
gaagcaccccgagctcagttgaatg

SEQ ID NO: 2297069 - DNA, 25 bp, Homo sapien
ccttcttgaaatggaggagctcagc

SEQ ID NO: 2297070 - DNA, 25 bp, Homo sapien
ccttcactgagatgtggccaatgca

SEQ ID NO: 2297071 - DNA, 25 bp, Homo sapien
tgattacgccttacttgaagtgcta

SEQ ID NO: 2297072 - DNA, 25 bp, Homo sapien
tctgagggtaaaggatcacatgacc

SEQ ID NO: 2297073 - DNA, 25 bp, Homo sapien
tgtgcaacagtaatccaagaatgta

SEQ ID NO: 2297074 - DNA, 25 bp, Homo sapien
ccaaattttgaatagtgattacgcc

SEQ ID NO: 2297075 - DNA, 25 bp, Homo sapien
cagtactgtttatagtgctgagcca

SEQ ID NO: 2297076 - DNA, 25 bp, Homo sapien
aaaacttcttcggaaggcatggcga

SEQ ID NO: 2297077 - DNA, 25 bp, Homo sapien
caggtagcacacagacatagtagcc

SEQ ID NO: 2297078 - DNA, 25 bp, Homo sapien
cacataattcgcatgctcaggccag

SEQ ID NO: 2297079 - DNA, 25 bp, Homo sapien
ttgcctgtgtaaaattgttgtgtag

SEQ ID NO: 2297080 - DNA, 25 bp, Homo sapien
ctagaagaaacctctagttgggcag

SEQ ID NO: 2297081 - DNA, 25 bp, Homo sapien
attgttgtgtagtgccacctgctgg

SEQ ID NO: 2297082 - DNA, 25 bp, Homo sapien
cacctgctggttcattggccacata

SEQ ID NO: 2297083 - DNA, 25 bp, Homo sapien
gggcatcctattcgaacaactattt

SEQ ID NO: 2297084 - DNA, 25 bp, Homo sapien
ccccggtaggcgtgcatgttgtaca

SEQ ID NO: 2297085 - DNA, 25 bp, Homo sapien
gtcaccggggtgaagggcatcctat

SEQ ID NO: 2297086 - DNA, 25 bp, Homo sapien
catcatctttttcgccctaagggaa

SEQ ID NO: 2297087 - DNA, 25 bp, Homo sapien
tgatggcccacctaataaacagtgc

SEQ ID NO: 2297088 - DNA, 25 bp, Homo sapien
cgtatcttcaaggaggttcacagaa

SEQ ID NO: 2297089 - DNA, 25 bp, Homo sapien
aattcaaattacctatgatggccca

SEQ ID NO: 2297090 - DNA, 25 bp, Homo sapien
cagtattaagcatatactcatggag

SEQ ID NO: 2297091 - DNA, 25 bp, Homo sapien
aattgtcagagtagtgttgatcaca

SEQ ID NO: 2297092 - DNA, 25 bp, Homo sapien
ctttaaagtggtcacttcttgtttg

SEQ ID NO: 2297093 - DNA, 25 bp, Homo sapien
tttgtgtaaattgtcagagtagtgt

SEQ ID NO: 2297094 - DNA, 25 bp, Homo sapien
cattccatctttaaagtggtcactt

SEQ ID NO: 2297095 - DNA, 25 bp, Homo sapien
tagagcacaaggcatagtaaaggcc

SEQ ID NO: 2297096 - DNA, 25 bp, Homo sapien
tacttctcttcttactattcgcttt

SEQ ID NO: 2297097 - DNA, 25 bp, Homo sapien
tccaagttggttcttagagcacaag

SEQ ID NO: 2297098 - DNA, 25 bp, Homo sapien
ggccttttctcttatagcgcttctg

SEQ ID NO: 2297099 - DNA, 25 bp, Homo sapien
gttgagctaagagtttctgaaatct

SEQ ID NO: 2297100 - DNA, 25 bp, Homo sapien
gaggattttacagatgctataggca

SEQ ID NO: 2297101 - DNA, 25 bp, Homo sapien
gccacggaggattttacagatgcta

SEQ ID NO: 2297102 - DNA, 25 bp, Homo sapien
taatggagaatagcaaacagttgag

SEQ ID NO: 2297103 - DNA, 25 bp, Homo sapien
tcacagtcattattgtaactaaaac

SEQ ID NO: 2297104 - DNA, 25 bp, Homo sapien
taaaactgcaagggagctatgttcc

SEQ ID NO: 2297105 - DNA, 25 bp, Homo sapien
ctatgttccttttggccctggattc

SEQ ID NO: 2297106 - DNA, 25 bp, Homo sapien
cacagtcattattgtaactaaaact

SEQ ID NO: 2297107 - DNA, 25 bp, Homo sapien
agggtggaggtgctttcctgaccct

SEQ ID NO: 2297108 - DNA, 25 bp, Homo sapien
cagatgccagagccaccggagcaga

SEQ ID NO: 2297109 - DNA, 25 bp, Homo sapien
tcctgacccttagaggtggtctggg

SEQ ID NO: 2297110 - DNA, 25 bp, Homo sapien
aggctactttccccctccggagatg

SEQ ID NO: 2297111 - DNA, 25 bp, Homo sapien
ttcagcacgccggtcaaaaggttta

SEQ ID NO: 2297112 - DNA, 25 bp, Homo sapien
ttaaattcagcacgccggtcaaaag

SEQ ID NO: 2297113 - DNA, 25 bp, Homo sapien
tgttaaattcagcacgccggtcaaa

SEQ ID NO: 2297114 - DNA, 25 bp, Homo sapien
cacgccggtcaaaaggtttatattg

SEQ ID NO: 2297115 - DNA, 25 bp, Homo sapien
ggagaccactgcagtattcgataga

SEQ ID NO: 2297116 - DNA, 25 bp, Homo sapien
cagcccagttgatgcagcctcttct

SEQ ID NO: 2297117 - DNA, 25 bp, Homo sapien
gatagatggaccctgatgatgcctt

SEQ ID NO: 2297118 - DNA, 25 bp, Homo sapien
ccagtgccatgagagtagccattgt

SEQ ID NO: 2297119 - DNA, 25 bp, Homo sapien
tcagagtggctagaacctattagat

SEQ ID NO: 2297120 - DNA, 25 bp, Homo sapien
ttaagaagggacagttcaaatgtct

SEQ ID NO: 2297121 - DNA, 25 bp, Homo sapien
cattaaaaggtcagcacctcagagt

SEQ ID NO: 2297122 - DNA, 25 bp, Homo sapien
tttccttcctagcattcatttccag

SEQ ID NO: 2297123 - DNA, 25 bp, Homo sapien
gaaagttgactgtaattattaattg

SEQ ID NO: 2297124 - DNA, 25 bp, Homo sapien
cagaaagttgactgtaattattaat

SEQ ID NO: 2297125 - DNA, 25 bp, Homo sapien
aaagttgactgtaattattaattgc

SEQ ID NO: 2297126 - DNA, 25 bp, Homo sapien
accagaaagttgactgtaattatta

SEQ ID NO: 2297127 - DNA, 25 bp, Homo sapien
gagctgcttgcattttatagtcctg

SEQ ID NO: 2297128 - DNA, 25 bp, Homo sapien
gctgtgggcccagtaactttctagg

SEQ ID NO: 2297129 - DNA, 25 bp, Homo sapien
tagtcctgccatctggaatggctaa

SEQ ID NO: 2297130 - DNA, 25 bp, Homo sapien
gactatataggccacccaagactaa

SEQ ID NO: 2297131 - DNA, 25 bp, Homo sapien
ccctatagtaccactcataaaaggc

SEQ ID NO: 2297132 - DNA, 25 bp, Homo sapien
tttttgtgccaaccaagttaccaga

SEQ ID NO: 2297133 - DNA, 25 bp, Homo sapien
ctggtccctgttacactgcccatgg

SEQ ID NO: 2297134 - DNA, 25 bp, Homo sapien
taccagagggcatagacctttcaca

SEQ ID NO: 2297135 - DNA, 25 bp, Homo sapien
cactttgcactaccacctctggata

SEQ ID NO: 2297136 - DNA, 25 bp, Homo sapien
ggcctgctgcttctatgaacattac

SEQ ID NO: 2297137 - DNA, 25 bp, Homo sapien
caccctggtatagaggcggtaactc

SEQ ID NO: 2297138 - DNA, 25 bp, Homo sapien
gcatgtgcttttatgcaccctggta

SEQ ID NO: 2297139 - DNA, 25 bp, Homo sapien
cagtttagctgcgacttggctggct

SEQ ID NO: 2297140 - DNA, 25 bp, Homo sapien
taggctggtgattcttaaagtggac

SEQ ID NO: 2297141 - DNA, 25 bp, Homo sapien
cttgccaggtggttatggccgtctg

SEQ ID NO: 2297142 - DNA, 25 bp, Homo sapien
tactgaatttaggaactttgcgcat

SEQ ID NO: 2297143 - DNA, 25 bp, Homo sapien
tttaggtatctctccctggccttca

SEQ ID NO: 2297144 - DNA, 25 bp, Homo sapien
catttttaggtatctctccctggcc

SEQ ID NO: 2297145 - DNA, 25 bp, Homo sapien
ggccttcaaaatctccagggctgct

SEQ ID NO: 2297146 - DNA, 25 bp, Homo sapien
ctctccctggccttcaaaatctcca

SEQ ID NO: 2297147 - DNA, 25 bp, Homo sapien
cacaaatgtttccgtggcaaaactg

SEQ ID NO: 2297148 - DNA, 25 bp, Homo sapien
tccgtggcaaaactggaggagtcta

SEQ ID NO: 2297149 - DNA, 25 bp, Homo sapien
taatttgctatgatgaggaacacaa

SEQ ID NO: 2297150 - DNA, 25 bp, Homo sapien
tcaagggaatggttcctgttcgaaa

SEQ ID NO: 2297151 - DNA, 25 bp, Homo sapien
tgagagctgacagtatccctggtgt

SEQ ID NO: 2297152 - DNA, 25 bp, Homo sapien
ggacagtagctatccccgtgggttg

SEQ ID NO: 2297153 - DNA, 25 bp, Homo sapien
cactaaagatcgaagtcaaggactt

SEQ ID NO: 2297154 - DNA, 25 bp, Homo sapien
tttaggcaacgaagaacccagttga

SEQ ID NO: 2297155 - DNA, 25 bp, Homo sapien
agcagaaataaccagagtggtcgtg

SEQ ID NO: 2297156 - DNA, 25 bp, Homo sapien
gcagaaataaccagagtggtcgtgg

SEQ ID NO: 2297157 - DNA, 25 bp, Homo sapien
cagaaataaccagagtggtcgtggt

SEQ ID NO: 2297158 - DNA, 25 bp, Homo sapien
tctgagtccacggtacatggatggc

SEQ ID NO: 2297159 - DNA, 25 bp, Homo sapien
ttcaacctgcagcaatcactacatg

SEQ ID NO: 2297160 - DNA, 25 bp, Homo sapien
catgcgttaacttttaaaagcgtgc

SEQ ID NO: 2297161 - DNA, 25 bp, Homo sapien
ggatggcacttgtgtttcaacctgc

SEQ ID NO: 2297162 - DNA, 25 bp, Homo sapien
acagtgaactgcctgggtgaaatca

SEQ ID NO: 2297163 - DNA, 25 bp, Homo sapien
gggagatggagtcaccatcaatcat

SEQ ID NO: 2297164 - DNA, 25 bp, Homo sapien
ctgcctgggtgaaatcatggatggc

SEQ ID NO: 2297165 - DNA, 25 bp, Homo sapien
agggagatggagtcaccatcaatca

SEQ ID NO: 2297166 - DNA, 25 bp, Homo sapien
aattagagttggaaacatggcaggg

SEQ ID NO: 2297167 - DNA, 25 bp, Homo sapien
caaattagagttggaaacatggcag

SEQ ID NO: 2297168 - DNA, 25 bp, Homo sapien
gcaaattagagttggaaacatggca

SEQ ID NO: 2297169 - DNA, 25 bp, Homo sapien
aaattagagttggaaacatggcagg

SEQ ID NO: 2297170 - DNA, 25 bp, Homo sapien
catgtgaatgaggatggggtgagag

SEQ ID NO: 2297171 - DNA, 25 bp, Homo sapien
tgtgaatgaggatggggtgagagga

SEQ ID NO: 2297172 - DNA, 25 bp, Homo sapien
gagcatgtgaatgaggatggggtga

SEQ ID NO: 2297173 - DNA, 25 bp, Homo sapien
gcatgtgaatgaggatggggtgaga

SEQ ID NO: 2297174 - DNA, 25 bp, Homo sapien
ccaagtgatctatttcaggaggagc

SEQ ID NO: 2297175 - DNA, 25 bp, Homo sapien
tatgaggccacctactttactgcag

SEQ ID NO: 2297176 - DNA, 25 bp, Homo sapien
gtgtgtacgtgtgtctgagagcttc

SEQ ID NO: 2297177 - DNA, 25 bp, Homo sapien
aaatgtcctacttggcccctgagag

SEQ ID NO: 2297178 - DNA, 25 bp, Homo sapien
tccctggaaatcgatctctgactga

SEQ ID NO: 2297179 - DNA, 25 bp, Homo sapien
agagtgtagatgggatccctggaaa

SEQ ID NO: 2297180 - DNA, 25 bp, Homo sapien
cctggaggtgacctttcgtttgaag

SEQ ID NO: 2297181 - DNA, 25 bp, Homo sapien
ctttcgtttgaaggcagagtgtaga

SEQ ID NO: 2297182 - DNA, 25 bp, Homo sapien
gagggcatcatcttctatcagtttc

SEQ ID NO: 2297183 - DNA, 25 bp, Homo sapien
ttcatttggctgcacgagggcatca

SEQ ID NO: 2297184 - DNA, 25 bp, Homo sapien
aactgcccacactgatatggcctgg

SEQ ID NO: 2297185 - DNA, 25 bp, Homo sapien
ttggctgcacgagggcatcatcttc

SEQ ID NO: 2297186 - DNA, 25 bp, Homo sapien
cttgtcagatagtggtgggcatgca

SEQ ID NO: 2297187 - DNA, 25 bp, Homo sapien
ctgagacttggcttgtcagatagtg

SEQ ID NO: 2297188 - DNA, 25 bp, Homo sapien
tcagatagtggtgggcatgcacctc

SEQ ID NO: 2297189 - DNA, 25 bp, Homo sapien
agacttggcttgtcagatagtggtg

SEQ ID NO: 2297190 - DNA, 25 bp, Homo sapien
ccttggaacacgataaggcattact

SEQ ID NO: 2297191 - DNA, 25 bp, Homo sapien
tggaacacgataaggcattactaag

SEQ ID NO: 2297192 - DNA, 25 bp, Homo sapien
cgataaggcattactaagttgaaca

SEQ ID NO: 2297193 - DNA, 25 bp, Homo sapien
tctgccttggaacacgataaggcat

SEQ ID NO: 2297194 - DNA, 25 bp, Homo sapien
ttataggctactacctcataccatg

SEQ ID NO: 2297195 - DNA, 25 bp, Homo sapien
gaatctgttataggctactacctca

SEQ ID NO: 2297196 - DNA, 25 bp, Homo sapien
tcatacagtctggaaagaggtttcc

SEQ ID NO: 2297197 - DNA, 25 bp, Homo sapien
tgacatgatgaatttaattgggtag

SEQ ID NO: 2297198 - DNA, 25 bp, Homo sapien
tcaggtctgactgtccccataggac

SEQ ID NO: 2297199 - DNA, 25 bp, Homo sapien
tcttctgcctcgtaattgattgcca

SEQ ID NO: 2297200 - DNA, 25 bp, Homo sapien
tcttcagggttggaacactgttaac

SEQ ID NO: 2297201 - DNA, 25 bp, Homo sapien
gacatccacgaggtgaaaagcaacc

SEQ ID NO: 2297202 - DNA, 25 bp, Homo sapien
gtgtgttatggtttttatgctgcat

SEQ ID NO: 2297203 - DNA, 25 bp, Homo sapien
tacagagaagctgagacattgtgtg

SEQ ID NO: 2297204 - DNA, 25 bp, Homo sapien
gaagctgagacattgtgtgttatgg

SEQ ID NO: 2297205 - DNA, 25 bp, Homo sapien
cagagaagctgagacattgtgtgtt

SEQ ID NO: 2297206 - DNA, 25 bp, Homo sapien
agctgccattggcgtttccttggcc

SEQ ID NO: 2297207 - DNA, 25 bp, Homo sapien
agagagaagctggtttgcgtggcct

SEQ ID NO: 2297208 - DNA, 25 bp, Homo sapien
gagagaagctggtttgcgtggcctc

SEQ ID NO: 2297209 - DNA, 25 bp, Homo sapien
tgccattggcgtttccttggccatg

SEQ ID NO: 2297210 - DNA, 25 bp, Homo sapien
ctggatgcacagggacatatgttga

SEQ ID NO: 2297211 - DNA, 25 bp, Homo sapien
tggatgcacagggacatatgttgaa

SEQ ID NO: 2297212 - DNA, 25 bp, Homo sapien
tggcaatatttgatcccctgtgaat

SEQ ID NO: 2297213 - DNA, 25 bp, Homo sapien
gggtatcggttcttggcaatatttg

SEQ ID NO: 2297214 - DNA, 25 bp, Homo sapien
tgcttcatcttgattgggtatcggt

SEQ ID NO: 2297215 - DNA, 25 bp, Homo sapien
gagtaatcaagcttaggcatctgcc

SEQ ID NO: 2297216 - DNA, 25 bp, Homo sapien
cacgagctgtgtggtccatgatgag

SEQ ID NO: 2297217 - DNA, 25 bp, Homo sapien
ccagtgtccccacgagctgtgtggt

SEQ ID NO: 2297218 - DNA, 25 bp, Homo sapien
tccccacgagctgtgtggtccatga

SEQ ID NO: 2297219 - DNA, 25 bp, Homo sapien
cagtgtccccacgagctgtgtggtc

SEQ ID NO: 2297220 - DNA, 25 bp, Homo sapien
ttcttgctgctcagtttgtttctgg

SEQ ID NO: 2297221 - DNA, 25 bp, Homo sapien
ttccacggtgtctcccttcttcttg

SEQ ID NO: 2297222 - DNA, 25 bp, Homo sapien
tcagggctgtgttgggggaagtttc

SEQ ID NO: 2297223 - DNA, 25 bp, Homo sapien
tttgtttctggggacctgtgcgatg

SEQ ID NO: 2297224 - DNA, 25 bp, Homo sapien
cttcatgactgcaaagcgtgctcat

SEQ ID NO: 2297225 - DNA, 25 bp, Homo sapien
actgcttctccttcatgactgcaaa

SEQ ID NO: 2297226 - DNA, 25 bp, Homo sapien
tctccttcatgactgcaaagcgtgc

SEQ ID NO: 2297227 - DNA, 25 bp, Homo sapien
catgcttattcactgcttctccttc

SEQ ID NO: 2297228 - DNA, 25 bp, Homo sapien
tcagttgtgctgtgatgagtgccct

SEQ ID NO: 2297229 - DNA, 25 bp, Homo sapien
gatgcttaggcttatctcaagactg

SEQ ID NO: 2297230 - DNA, 25 bp, Homo sapien
tgagtgcccttctcggtccagatgc

SEQ ID NO: 2297231 - DNA, 25 bp, Homo sapien
tcaagactgttgctagagagctagg

SEQ ID NO: 2297232 - DNA, 25 bp, Homo sapien
agagagcctatcagtgttacacgaa

SEQ ID NO: 2297233 - DNA, 25 bp, Homo sapien
ttctttatatctgggcacatccagc

SEQ ID NO: 2297234 - DNA, 25 bp, Homo sapien
gcaagggacactacattctttatat

SEQ ID NO: 2297235 - DNA, 25 bp, Homo sapien
gttacacgaatatttgaacaccctc

SEQ ID NO: 2297236 - DNA, 25 bp, Homo sapien
ttagaatacgcgtatgtcatctcta

SEQ ID NO: 2297237 - DNA, 25 bp, Homo sapien
gaatacgcgtatgtcatctctaaag

SEQ ID NO: 2297238 - DNA, 25 bp, Homo sapien
tagaatacgcgtatgtcatctctaa

SEQ ID NO: 2297239 - DNA, 25 bp, Homo sapien
agaatacgcgtatgtcatctctaaa

SEQ ID NO: 2297240 - DNA, 25 bp, Homo sapien
tatcccaatcagctgttaacttaga

SEQ ID NO: 2297241 - DNA, 25 bp, Homo sapien
gctagacttttatggtgttaaccac

SEQ ID NO: 2297242 - DNA, 25 bp, Homo sapien
gcacctggcctagagtcactctttt

SEQ ID NO: 2297243 - DNA, 25 bp, Homo sapien
ggttaagacgttctctctagaaagc

SEQ ID NO: 2297244 - DNA, 25 bp, Homo sapien
tacacaggccacgacttgtaccata

SEQ ID NO: 2297245 - DNA, 25 bp, Homo sapien
gtggcatgtggtttgcatgctctac

SEQ ID NO: 2297246 - DNA, 25 bp, Homo sapien
tggtttgcatgctctacacaggcca

SEQ ID NO: 2297247 - DNA, 25 bp, Homo sapien
catgtggtttgcatgctctacacag

SEQ ID NO: 2297248 - DNA, 25 bp, Homo sapien
accttttgggagctgttatctgaat

SEQ ID NO: 2297249 - DNA, 25 bp, Homo sapien
tacaagtaggtagcaatgacagcat

SEQ ID NO: 2297250 - DNA, 25 bp, Homo sapien
tagaagtaggtgtaatgctaattgt

SEQ ID NO: 2297251 - DNA, 25 bp, Homo sapien
gctgttatctgaattttgggccaag

SEQ ID NO: 2297252 - DNA, 25 bp, Homo sapien
caggaatttgcttacagcctcagtc

SEQ ID NO: 2297253 - DNA, 25 bp, Homo sapien
caaaagatcgggaagaccctaccag

SEQ ID NO: 2297254 - DNA, 25 bp, Homo sapien
tctgcctcctattgggatactcact

SEQ ID NO: 2297255 - DNA, 25 bp, Homo sapien
caaaagaagacctagtacccaatgg

SEQ ID NO: 2297256 - DNA, 25 bp, Homo sapien
aagcagtcgtttggatggtcaacct

SEQ ID NO: 2297257 - DNA, 25 bp, Homo sapien
tggtcaacctttggccaggagcctc

SEQ ID NO: 2297258 - DNA, 25 bp, Homo sapien
catcgggaagaactctagaagcagt

SEQ ID NO: 2297259 - DNA, 25 bp, Homo sapien
gatctgattggtttgacaacactcc

SEQ ID NO: 2297260 - DNA, 25 bp, Homo sapien
gggaaacgctccttggcaatagtat

SEQ ID NO: 2297261 - DNA, 25 bp, Homo sapien
cccagactctaatgctaaagaaaca

SEQ ID NO: 2297262 - DNA, 25 bp, Homo sapien
gtttttccttagactgattagctgc

SEQ ID NO: 2297263 - DNA, 25 bp, Homo sapien
ttttgatgtaaacagggcccccaga

SEQ ID NO: 2297264 - DNA, 25 bp, Homo sapien
acaccgtccacacggtactcaccac

SEQ ID NO: 2297265 - DNA, 25 bp, Homo sapien
ccaacaccgtccacacggtactcac

SEQ ID NO: 2297266 - DNA, 25 bp, Homo sapien
aacaccgtccacacggtactcacca

SEQ ID NO: 2297267 - DNA, 25 bp, Homo sapien
ccgtccacacggtactcaccacctc

SEQ ID NO: 2297268 - DNA, 25 bp, Homo sapien
gtcattgtcatcacacccctgcata

SEQ ID NO: 2297269 - DNA, 25 bp, Homo sapien
ccagctgccccctacagaagagcgt

SEQ ID NO: 2297270 - DNA, 25 bp, Homo sapien
acctccaccccaagcgcgtcattgt

SEQ ID NO: 2297271 - DNA, 25 bp, Homo sapien
tgcatactctccaagtgccagctgc

SEQ ID NO: 2297272 - DNA, 25 bp, Homo sapien
ctgtaaacaaattttgtgactctaa

SEQ ID NO: 2297273 - DNA, 25 bp, Homo sapien
ttgtgactctaaaaaattccttgtg

SEQ ID NO: 2297274 - DNA, 25 bp, Homo sapien
tgtgactctaaaaaattccttgtgt

SEQ ID NO: 2297275 - DNA, 25 bp, Homo sapien
tgtaaacaaattttgtgactctaaa

SEQ ID NO: 2297276 - DNA, 25 bp, Homo sapien
gctcttggcagctcttacatgtaaa

SEQ ID NO: 2297277 - DNA, 25 bp, Homo sapien
tggagttagcaggtttttcggtctc

SEQ ID NO: 2297278 - DNA, 25 bp, Homo sapien
ttgctttccgttcttccctgatgct

SEQ ID NO: 2297279 - DNA, 25 bp, Homo sapien
cccacctggattcctgcagggtttt

SEQ ID NO: 2297280 - DNA, 25 bp, Homo sapien
tccttcccgaagcacctgtgtttct

SEQ ID NO: 2297281 - DNA, 25 bp, Homo sapien
tgtccaaatctctggcctcaacatt

SEQ ID NO: 2297282 - DNA, 25 bp, Homo sapien
tgtgttcgcaacctctaagtccatc

SEQ ID NO: 2297283 - DNA, 25 bp, Homo sapien
tctgctttttaccacgctctttcca

SEQ ID NO: 2297284 - DNA, 25 bp, Homo sapien
cctgaatcttgggatcatattcaca

SEQ ID NO: 2297285 - DNA, 25 bp, Homo sapien
gattactccctgaatcttgggatca

SEQ ID NO: 2297286 - DNA, 25 bp, Homo sapien
tccctgaatcttgggatcatattca

SEQ ID NO: 2297287 - DNA, 25 bp, Homo sapien
cctgctggattactccctgaatctt

SEQ ID NO: 2297288 - DNA, 25 bp, Homo sapien
ggaattgacaaaattgccttggtta

SEQ ID NO: 2297289 - DNA, 25 bp, Homo sapien
attgacaaaattgccttggttatgg

SEQ ID NO: 2297290 - DNA, 25 bp, Homo sapien
aatggaattgacaaaattgccttgg

SEQ ID NO: 2297291 - DNA, 25 bp, Homo sapien
ccttggttatggcagtataaatgca

SEQ ID NO: 2297292 - DNA, 25 bp, Homo sapien
accagatcccgcgtaagcttaatgg

SEQ ID NO: 2297293 - DNA, 25 bp, Homo sapien
atgttttgtcaagggctctcaccag

SEQ ID NO: 2297294 - DNA, 25 bp, Homo sapien
cattaatgttttgtcaagggctctc

SEQ ID NO: 2297295 - DNA, 25 bp, Homo sapien
aatgggttgtttgtgctcttccagc

SEQ ID NO: 2297296 - DNA, 25 bp, Homo sapien
agttcagtgaagcattcgttgagtt

SEQ ID NO: 2297297 - DNA, 25 bp, Homo sapien
gagttatatagatgaaacactttgt

SEQ ID NO: 2297298 - DNA, 25 bp, Homo sapien
gggataattaccagcaggattttgt

SEQ ID NO: 2297299 - DNA, 25 bp, Homo sapien
accagcaggattttgtgtgacatac

SEQ ID NO: 2297300 - DNA, 25 bp, Homo sapien
gaaccctgtgtgagctctatctgca

SEQ ID NO: 2297301 - DNA, 25 bp, Homo sapien
tcagatctataattgggccctgccg

SEQ ID NO: 2297302 - DNA, 25 bp, Homo sapien
gagagttacgtttcccttgtgtgcc

SEQ ID NO: 2297303 - DNA, 25 bp, Homo sapien
ctaaattaggaaagccagattggcc

SEQ ID NO: 2297304 - DNA, 25 bp, Homo sapien
cttgtgatccatgtctacctgcagt

SEQ ID NO: 2297305 - DNA, 25 bp, Homo sapien
ttcttgtgatccatgtctacctgca

SEQ ID NO: 2297306 - DNA, 25 bp, Homo sapien
tgtcttcttgtgatccatgtctacc

SEQ ID NO: 2297307 - DNA, 25 bp, Homo sapien
tcttcttgtgatccatgtctacctg

SEQ ID NO: 2297308 - DNA, 25 bp, Homo sapien
gctgtaacccatgactgagtgagaa

SEQ ID NO: 2297309 - DNA, 25 bp, Homo sapien
ggatgttcacaagtgacaccttcat

SEQ ID NO: 2297310 - DNA, 25 bp, Homo sapien
catctctatgacatgataagcaagg

SEQ ID NO: 2297311 - DNA, 25 bp, Homo sapien
tagagctagagaaccttgaacagct

SEQ ID NO: 2297312 - DNA, 25 bp, Homo sapien
aacaagatgtaaggcctgggtctct

SEQ ID NO: 2297313 - DNA, 25 bp, Homo sapien
tctaagcggctcctcaattgtagtg

SEQ ID NO: 2297314 - DNA, 25 bp, Homo sapien
gctcgatgcttagtgtacccagctg

SEQ ID NO: 2297315 - DNA, 25 bp, Homo sapien
cctgcctgagtgaatgaatacccgg

SEQ ID NO: 2297316 - DNA, 25 bp, Homo sapien
tctcttcctgctttctgagtaccat

SEQ ID NO: 2297317 - DNA, 25 bp, Homo sapien
acctctcttcctgctttctgagtac

SEQ ID NO: 2297318 - DNA, 25 bp, Homo sapien
tctcttttctgaacctctcttcctg

SEQ ID NO: 2297319 - DNA, 25 bp, Homo sapien
cttttctgaacctctcttcctgctt

SEQ ID NO: 2297320 - DNA, 25 bp, Homo sapien
tttaactcttagactttgaggatgg

SEQ ID NO: 2297321 - DNA, 25 bp, Homo sapien
tgatttaactcttagactttgagga

SEQ ID NO: 2297322 - DNA, 25 bp, Homo sapien
ggagtgaataatccaatgcattgat

SEQ ID NO: 2297323 - DNA, 25 bp, Homo sapien
ttgattcctaccctgataatcattg

SEQ ID NO: 2297324 - DNA, 25 bp, Homo sapien
cagtcctgactgagtgccagggaag

SEQ ID NO: 2297325 - DNA, 25 bp, Homo sapien
gatgttaaaggcgattctatgctca

SEQ ID NO: 2297326 - DNA, 25 bp, Homo sapien
ctgtgtcgttctctattggctgtga

SEQ ID NO: 2297327 - DNA, 25 bp, Homo sapien
tatgctcattgtcaactcctgtcag

SEQ ID NO: 2297328 - DNA, 25 bp, Homo sapien
ttgtaaatgcaccagcaacgctctg

SEQ ID NO: 2297329 - DNA, 25 bp, Homo sapien
aacagtgggcaactcactctggtcc

SEQ ID NO: 2297330 - DNA, 25 bp, Homo sapien
tcaccactccgtaaaaacgcaccag

SEQ ID NO: 2297331 - DNA, 25 bp, Homo sapien
ccaagccaacagtgggcaactcact

SEQ ID NO: 2297332 - DNA, 25 bp, Homo sapien
gagaaggaagctggtgtgcgtggcc

SEQ ID NO: 2297333 - DNA, 25 bp, Homo sapien
tggcgtttccctggcggtgactgtc

SEQ ID NO: 2297334 - DNA, 25 bp, Homo sapien
tttccctggcggtgactgtccagga

SEQ ID NO: 2297335 - DNA, 25 bp, Homo sapien
gctgtcattggcgtttccctggcgg

SEQ ID NO: 2297336 - DNA, 25 bp, Homo sapien
cctctctgctatgtaatgtatctgt

SEQ ID NO: 2297337 - DNA, 25 bp, Homo sapien
cctgcactgtctttctccggcagct

SEQ ID NO: 2297338 - DNA, 25 bp, Homo sapien
gcttgtaatggttttagtattgcca

SEQ ID NO: 2297339 - DNA, 25 bp, Homo sapien
cagctgtacactcattggcctcgtg

SEQ ID NO: 2297340 - DNA, 25 bp, Homo sapien
cgttggcgcagaacctgagggaagg

SEQ ID NO: 2297341 - DNA, 25 bp, Homo sapien
tgtcacactccatttctaagcagcc

SEQ ID NO: 2297342 - DNA, 25 bp, Homo sapien
taagcagccctcaaatacatctttg

SEQ ID NO: 2297343 - DNA, 25 bp, Homo sapien
tgtgtatgtgtcacactccatttct

SEQ ID NO: 2297344 - DNA, 25 bp, Homo sapien
catttctaagcagccctcaaataca

SEQ ID NO: 2297345 - DNA, 25 bp, Homo sapien
taagtgaaatttccctgtccagggc

SEQ ID NO: 2297346 - DNA, 25 bp, Homo sapien
gataagtgaaatttccctgtccagg

SEQ ID NO: 2297347 - DNA, 25 bp, Homo sapien
ataagtgaaatttccctgtccaggg

SEQ ID NO: 2297348 - DNA, 25 bp, Homo sapien
gcgataagtgaaatttccctgtcca

SEQ ID NO: 2297349 - DNA, 25 bp, Homo sapien
gaaactgggacagaagttctcaagg

SEQ ID NO: 2297350 - DNA, 25 bp, Homo sapien
gcaatttcagagagtgggataatta

SEQ ID NO: 2297351 - DNA, 25 bp, Homo sapien
caaggttgtcacgtttgtgggtaag

SEQ ID NO: 2297352 - DNA, 25 bp, Homo sapien
aattagattacaacaggtagcactg

SEQ ID NO: 2297353 - DNA, 25 bp, Homo sapien
gtcaggtggtggacttcggaggtca

SEQ ID NO: 2297354 - DNA, 25 bp, Homo sapien
ggagtcaggtggtggacttcggagg

SEQ ID NO: 2297355 - DNA, 25 bp, Homo sapien
agtcaggtggtggacttcggaggtc

SEQ ID NO: 2297356 - DNA, 25 bp, Homo sapien
tcaggtggtggacttcggaggtcat

SEQ ID NO: 2297357 - DNA, 25 bp, Homo sapien
actgaaatttgtcatcacagatggc

SEQ ID NO: 2297358 - DNA, 25 bp, Homo sapien
tgtgatgggcattggcagacttcct

SEQ ID NO: 2297359 - DNA, 25 bp, Homo sapien
ggctttgaaccgtctgtgatgcagg

SEQ ID NO: 2297360 - DNA, 25 bp, Homo sapien
gctgcctttgcatgctcagatgaga

SEQ ID NO: 2297361 - DNA, 25 bp, Homo sapien
ttagcacgacattcaaggcttttca

SEQ ID NO: 2297362 - DNA, 25 bp, Homo sapien
aatgtagcactttgttataatacgg

SEQ ID NO: 2297363 - DNA, 25 bp, Homo sapien
tacggtcaatcagcttagcacgaca

SEQ ID NO: 2297364 - DNA, 25 bp, Homo sapien
gttataatacggtcaatcagcttag

SEQ ID NO: 2297365 - DNA, 25 bp, Homo sapien
gaggaatgcgatgctctccccgtat

SEQ ID NO: 2297366 - DNA, 25 bp, Homo sapien
cctttcccttggaggaatgcgatgc

SEQ ID NO: 2297367 - DNA, 25 bp, Homo sapien
cgtatcttaagggacttcctactca

SEQ ID NO: 2297368 - DNA, 25 bp, Homo sapien
tttccgattcccagcatctctccct

SEQ ID NO: 2297369 - DNA, 25 bp, Homo sapien
ccagcgcctcgctctgctggggcat

SEQ ID NO: 2297370 - DNA, 25 bp, Homo sapien
gcccagcgcctcgctctgctggggc

SEQ ID NO: 2297371 - DNA, 25 bp, Homo sapien
ggcccagcgcctcgctctgctgggg

SEQ ID NO: 2297372 - DNA, 25 bp, Homo sapien
cccagcgcctcgctctgctggggca

SEQ ID NO: 2297373 - DNA, 25 bp, Homo sapien
gcacgatcggggcattcgcagtggg

SEQ ID NO: 2297374 - DNA, 25 bp, Homo sapien
gagttcgtgggcgaccgtgaacaac

SEQ ID NO: 2297375 - DNA, 25 bp, Homo sapien
ccgttccctgcagggcgagttcgtg

SEQ ID NO: 2297376 - DNA, 25 bp, Homo sapien
ctgcctgtgctaaggccgttccctg

SEQ ID NO: 2297377 - DNA, 25 bp, Homo sapien
actctcgccatctggtactcaagcg

SEQ ID NO: 2297378 - DNA, 25 bp, Homo sapien
tactcaagcgcctgcagtgagagcg

SEQ ID NO: 2297379 - DNA, 25 bp, Homo sapien
gagcgctgcggtaaacagaaggcac

SEQ ID NO: 2297380 - DNA, 25 bp, Homo sapien
ctgggtagcctagcgccaggatccc

SEQ ID NO: 2297381 - DNA, 25 bp, Homo sapien
cattcgggtctcttgtcagcccctt

SEQ ID NO: 2297382 - DNA, 25 bp, Homo sapien
tcttgttagtgtgccctatatccat

SEQ ID NO: 2297383 - DNA, 25 bp, Homo sapien
ccacaggcccattcgggtctcttgt

SEQ ID NO: 2297384 - DNA, 25 bp, Homo sapien
gcaatggtttctacggactgacccc

SEQ ID NO: 2297385 - DNA, 25 bp, Homo sapien
tgggctggtgtaatgtgagctcaat

SEQ ID NO: 2297386 - DNA, 25 bp, Homo sapien
tggcttgggctggtgtaatgtgagc

SEQ ID NO: 2297387 - DNA, 25 bp, Homo sapien
cctataaaagctgatggatgggccg

SEQ ID NO: 2297388 - DNA, 25 bp, Homo sapien
gatggatgggccgacagagccttcc

SEQ ID NO: 2297389 - DNA, 25 bp, Homo sapien
tgtttgacacaatgcaaggtattgg

SEQ ID NO: 2297390 - DNA, 25 bp, Homo sapien
ctggaagaaccgtgacaacatagtc

SEQ ID NO: 2297391 - DNA, 25 bp, Homo sapien
catatttagggacatcattacagaa

SEQ ID NO: 2297392 - DNA, 25 bp, Homo sapien
cagcaaaagcgatttgactgtgaca

SEQ ID NO: 2297393 - DNA, 25 bp, Homo sapien
ccacagatgtgtgctttcgaagtct

SEQ ID NO: 2297394 - DNA, 25 bp, Homo sapien
gatgtgtgctttcgaagtcttttaa

SEQ ID NO: 2297395 - DNA, 25 bp, Homo sapien
cagatgtgtgctttcgaagtctttt

SEQ ID NO: 2297396 - DNA, 25 bp, Homo sapien
ttccacagatgtgtgctttcgaagt

SEQ ID NO: 2297397 - DNA, 25 bp, Homo sapien
ttgtctactttttcagaggaaacca

SEQ ID NO: 2297398 - DNA, 25 bp, Homo sapien
ctactttttcagaggaaaccaacat

SEQ ID NO: 2297399 - DNA, 25 bp, Homo sapien
ctgagttgtctactttttcagagga

SEQ ID NO: 2297400 - DNA, 25 bp, Homo sapien
gagttgtctactttttcagaggaaa

SEQ ID NO: 2297401 - DNA, 25 bp, Homo sapien
ccggaacaacagcattggcgcaggg

SEQ ID NO: 2297402 - DNA, 25 bp, Homo sapien
attcgccccttgctcgcgtccagtc

SEQ ID NO: 2297403 - DNA, 25 bp, Homo sapien
tcagcacccggaacaacagcattgg

SEQ ID NO: 2297404 - DNA, 25 bp, Homo sapien
agcacccggaacaacagcattggcg

SEQ ID NO: 2297405 - DNA, 25 bp, Homo sapien
tgcagggagcggccttagcacaggc

SEQ ID NO: 2297406 - DNA, 25 bp, Homo sapien
gcagggagcggccttagcacaggca

SEQ ID NO: 2297407 - DNA, 25 bp, Homo sapien
ctgcagggagcggccttagcacagg

SEQ ID NO: 2297408 - DNA, 25 bp, Homo sapien
cagggagcggccttagcacaggcag

SEQ ID NO: 2297409 - DNA, 25 bp, Homo sapien
ggactggttttcttgctcacccaga

SEQ ID NO: 2297410 - DNA, 25 bp, Homo sapien
taggactggttttcttgctcaccca

SEQ ID NO: 2297411 - DNA, 25 bp, Homo sapien
ggaagtgaggtggccgctccagccg

SEQ ID NO: 2297412 - DNA, 25 bp, Homo sapien
gtgtaggactggttttcttgctcac

SEQ ID NO: 2297413 - DNA, 25 bp, Homo sapien
tgtacaaaactctcatggcccagga

SEQ ID NO: 2297414 - DNA, 25 bp, Homo sapien
catttaaattgaacgctccatccta

SEQ ID NO: 2297415 - DNA, 25 bp, Homo sapien
gaaaaccacttagccacaatgccag

SEQ ID NO: 2297416 - DNA, 25 bp, Homo sapien
ccagtgtaaagcttaagttatcagc

SEQ ID NO: 2297417 - DNA, 25 bp, Homo sapien
ccaggaaccagtgcaaacacgatgg

SEQ ID NO: 2297418 - DNA, 25 bp, Homo sapien
tcacaatgtatctgaagtaccgaag

SEQ ID NO: 2297419 - DNA, 25 bp, Homo sapien
tgtatctgaagtaccgaaggatgta

SEQ ID NO: 2297420 - DNA, 25 bp, Homo sapien
agtaccgaaggatgtaattccagga

SEQ ID NO: 2297421 - DNA, 25 bp, Homo sapien
ttcaccaataccaggagcaaatgag

SEQ ID NO: 2297422 - DNA, 25 bp, Homo sapien
tttcaccaataccaggagcaaatga

SEQ ID NO: 2297423 - DNA, 25 bp, Homo sapien
ttttcaccaataccaggagcaaatg

SEQ ID NO: 2297424 - DNA, 25 bp, Homo sapien
gattcactattaaggctgggtgctg

SEQ ID NO: 2297425 - DNA, 25 bp, Homo sapien
tataagattcactattaaggctggg

SEQ ID NO: 2297426 - DNA, 25 bp, Homo sapien
ggtataagattcactattaaggctg

SEQ ID NO: 2297427 - DNA, 25 bp, Homo sapien
aagattcactattaaggctgggtgc

SEQ ID NO: 2297428 - DNA, 25 bp, Homo sapien
cattggttaccacctcacaagggac

SEQ ID NO: 2297429 - DNA, 25 bp, Homo sapien
tctttcctgaacaaatggtgatcca

SEQ ID NO: 2297430 - DNA, 25 bp, Homo sapien
cttcagggcatcagagagcttattc

SEQ ID NO: 2297431 - DNA, 25 bp, Homo sapien
gagtccccgccgctagagatgatct

SEQ ID NO: 2297432 - DNA, 25 bp, Homo sapien
ctattgctcgtaggcacctgcacag

SEQ ID NO: 2297433 - DNA, 25 bp, Homo sapien
tagcctacagggaatagcctattgc

SEQ ID NO: 2297434 - DNA, 25 bp, Homo sapien
cctaagacattactatgcactactg

SEQ ID NO: 2297435 - DNA, 25 bp, Homo sapien
cacacacctagattgtataggctat

SEQ ID NO: 2297436 - DNA, 25 bp, Homo sapien
ttcctcaacatagccctgatccagg

SEQ ID NO: 2297437 - DNA, 25 bp, Homo sapien
aaaacattcctcaacatagccctga

SEQ ID NO: 2297438 - DNA, 25 bp, Homo sapien
aacattcctcaacatagccctgatc

SEQ ID NO: 2297439 - DNA, 25 bp, Homo sapien
gaaaaacattcctcaacatagccct

SEQ ID NO: 2297440 - DNA, 25 bp, Homo sapien
cttgcttgtggaaaaggtaaaagag

SEQ ID NO: 2297441 - DNA, 25 bp, Homo sapien
ctatgactttgacttatcttgcttg

SEQ ID NO: 2297442 - DNA, 25 bp, Homo sapien
gactttgacttatcttgcttgtgga

SEQ ID NO: 2297443 - DNA, 25 bp, Homo sapien
tgactttgacttatcttgcttgtgg

SEQ ID NO: 2297444 - DNA, 25 bp, Homo sapien
ctggttcaatctggtaggtcatatg

SEQ ID NO: 2297445 - DNA, 25 bp, Homo sapien
tgtctggtaaaactcagcagtaaag

SEQ ID NO: 2297446 - DNA, 25 bp, Homo sapien
tatcagaaaattaatggcctcatag

SEQ ID NO: 2297447 - DNA, 25 bp, Homo sapien
tcatatgtatctagcaagtgatcca

SEQ ID NO: 2297448 - DNA, 25 bp, Homo sapien
taaagggagcaaccattgtgaaatg

SEQ ID NO: 2297449 - DNA, 25 bp, Homo sapien
tgctggcatgaatctgtccgctgga

SEQ ID NO: 2297450 - DNA, 25 bp, Homo sapien
cagtctgctgtgaacctgttgctgg

SEQ ID NO: 2297451 - DNA, 25 bp, Homo sapien
aatgcaggagtgaggtgccgtcaca

SEQ ID NO: 2297452 - DNA, 25 bp, Homo sapien
tcttcttggggctgacagataggaa

SEQ ID NO: 2297453 - DNA, 25 bp, Homo sapien
cttggggctgacagataggaagcct

SEQ ID NO: 2297454 - DNA, 25 bp, Homo sapien
ccagcaggtgtggcctaagggtgtt

SEQ ID NO: 2297455 - DNA, 25 bp, Homo sapien
agcaggtgtggcctaagggtgttgg

SEQ ID NO: 2297456 - DNA, 25 bp, Homo sapien
ttttcttccctgcttgccgaatctc

SEQ ID NO: 2297457 - DNA, 25 bp, Homo sapien
agttttcttccctgcttgccgaatc

SEQ ID NO: 2297458 - DNA, 25 bp, Homo sapien
tgcttctcttgatagttttcttccc

SEQ ID NO: 2297459 - DNA, 25 bp, Homo sapien
atagttttcttccctgcttgccgaa

SEQ ID NO: 2297460 - DNA, 25 bp, Homo sapien
gctaaatcgcccagcagtgatgaca

SEQ ID NO: 2297461 - DNA, 25 bp, Homo sapien
actgcctcctggcacaggaatcctg

SEQ ID NO: 2297462 - DNA, 25 bp, Homo sapien
cagcagcagctgtaggtagagctcc

SEQ ID NO: 2297463 - DNA, 25 bp, Homo sapien
cctccttgctgtgttctaccatctt

SEQ ID NO: 2297464 - DNA, 25 bp, Homo sapien
gggtgaatcgaaaatggctgaaggt

SEQ ID NO: 2297465 - DNA, 25 bp, Homo sapien
actgccccgcatatggcaattaagg

SEQ ID NO: 2297466 - DNA, 25 bp, Homo sapien
gcagatttgtcaacgcccaagcaca

SEQ ID NO: 2297467 - DNA, 25 bp, Homo sapien
tgctaccgactaaagtagcagcaga

SEQ ID NO: 2297468 - DNA, 25 bp, Homo sapien
gtttcagcgcctgcttatggtgagc

SEQ ID NO: 2297469 - DNA, 25 bp, Homo sapien
ttcagcgcctgcttatggtgagcca

SEQ ID NO: 2297470 - DNA, 25 bp, Homo sapien
tttcagcgcctgcttatggtgagcc

SEQ ID NO: 2297471 - DNA, 25 bp, Homo sapien
ccgaagaaatccatcctgaactttc

SEQ ID NO: 2297472 - DNA, 25 bp, Homo sapien
ttttccgaagaaatccatcctgaac

SEQ ID NO: 2297473 - DNA, 25 bp, Homo sapien
tccgaagaaatccatcctgaacttt

SEQ ID NO: 2297474 - DNA, 25 bp, Homo sapien
cctgaactttcagatgctcttgctt

SEQ ID NO: 2297475 - DNA, 25 bp, Homo sapien
gctaagaatgcaggagctttcttat

SEQ ID NO: 2297476 - DNA, 25 bp, Homo sapien
tcagaaccatgagcattttttccag

SEQ ID NO: 2297477 - DNA, 25 bp, Homo sapien
caaatccaaaacaggatggatctat

SEQ ID NO: 2297478 - DNA, 25 bp, Homo sapien
aaacaggatggatctattcagaacc

SEQ ID NO: 2297479 - DNA, 25 bp, Homo sapien
gtggcagctgctgattaaagaacat

SEQ ID NO: 2297480 - DNA, 25 bp, Homo sapien
tgtggcagctgctgattaaagaaca

SEQ ID NO: 2297481 - DNA, 25 bp, Homo sapien
agcaagtatttgttgtcataatggg

SEQ ID NO: 2297482 - DNA, 25 bp, Homo sapien
ggtaacggcgttggtccatagctct

SEQ ID NO: 2297483 - DNA, 25 bp, Homo sapien
cattaggatcgggattaggtgaaga

SEQ ID NO: 2297484 - DNA, 25 bp, Homo sapien
ttttattcctgtcttggccattagg

SEQ ID NO: 2297485 - DNA, 25 bp, Homo sapien
gagaatgcggcttgcattgctggtg

SEQ ID NO: 2297486 - DNA, 25 bp, Homo sapien
taagttatggatagattcactgagt

SEQ ID NO: 2297487 - DNA, 25 bp, Homo sapien
aagcatgtgcttagtgggcttggta

SEQ ID NO: 2297488 - DNA, 25 bp, Homo sapien
tgggttggggagaatgcggcttgca

SEQ ID NO: 2297489 - DNA, 25 bp, Homo sapien
caccatgctccattgcagatggcaa

SEQ ID NO: 2297490 - DNA, 25 bp, Homo sapien
tcaccatgctccattgcagatggca

SEQ ID NO: 2297491 - DNA, 25 bp, Homo sapien
catgctccattgcagatggcaatgc

SEQ ID NO: 2297492 - DNA, 25 bp, Homo sapien
tgctccattgcagatggcaatgcca

SEQ ID NO: 2297493 - DNA, 25 bp, Homo sapien
gcaaaagtgtgtggccttagagaaa

SEQ ID NO: 2297494 - DNA, 25 bp, Homo sapien
catccccacgggaatcacacttcct

SEQ ID NO: 2297495 - DNA, 25 bp, Homo sapien
tcagatcagtccactctttaggtca

SEQ ID NO: 2297496 - DNA, 25 bp, Homo sapien
cagtccactctttaggtcagcaaaa

SEQ ID NO: 2297497 - DNA, 25 bp, Homo sapien
tgtgataactattcccaccttgtct

SEQ ID NO: 2297498 - DNA, 25 bp, Homo sapien
gataactattcccaccttgtcttta

SEQ ID NO: 2297499 - DNA, 25 bp, Homo sapien
actattcccaccttgtctttatcag

SEQ ID NO: 2297500 - DNA, 25 bp, Homo sapien
ctttgtgataactattcccaccttg

SEQ ID NO: 2297501 - DNA, 25 bp, Homo sapien
aaagtggctggaccttaaatgtcag

SEQ ID NO: 2297502 - DNA, 25 bp, Homo sapien
aaatgtcagtagcacagagagtcgt

SEQ ID NO: 2297503 - DNA, 25 bp, Homo sapien
aattactgactttgggacaaggtgt

SEQ ID NO: 2297504 - DNA, 25 bp, Homo sapien
tcataagttgctaatctcagcccct

SEQ ID NO: 2297505 - DNA, 25 bp, Homo sapien
gaaataatggatctactgcaatgat

SEQ ID NO: 2297506 - DNA, 25 bp, Homo sapien
tggtagtcatggatagatggcccat

SEQ ID NO: 2297507 - DNA, 25 bp, Homo sapien
cccagggcagtggtagtcatggata

SEQ ID NO: 2297508 - DNA, 25 bp, Homo sapien
agcccgggttggacagagtgacaat

SEQ ID NO: 2297509 - DNA, 25 bp, Homo sapien
caaagcccgggttggacagagtgac

SEQ ID NO: 2297510 - DNA, 25 bp, Homo sapien
atcctccatgggtccacggcagagc

SEQ ID NO: 2297511 - DNA, 25 bp, Homo sapien
tcttctcctctgacacatcgcagag

SEQ ID NO: 2297512 - DNA, 25 bp, Homo sapien
cacatcgcagagtgacctcaggacc

SEQ ID NO: 2297513 - DNA, 25 bp, Homo sapien
tccatgggtccacggcagagcctct

SEQ ID NO: 2297514 - DNA, 25 bp, Homo sapien
ccagctccaggcaaagtataacctg

SEQ ID NO: 2297515 - DNA, 25 bp, Homo sapien
gctccaggcaaagtataacctggaa

SEQ ID NO: 2297516 - DNA, 25 bp, Homo sapien
ggaagctccttgctgtcgctttctc

SEQ ID NO: 2297517 - DNA, 25 bp, Homo sapien
ccaggcaaagtataacctggaagct

SEQ ID NO: 2297518 - DNA, 25 bp, Homo sapien
tgcccatggcactgactgctgcttg

SEQ ID NO: 2297519 - DNA, 25 bp, Homo sapien
gcccatggcactgactgctgcttgg

SEQ ID NO: 2297520 - DNA, 25 bp, Homo sapien
ttcctagggccactgccagactgtt

SEQ ID NO: 2297521 - DNA, 25 bp, Homo sapien
gctttctgaccacttcctagggcca

SEQ ID NO: 2297522 - DNA, 25 bp, Homo sapien
agtgctttctgaccacttcctaggg

SEQ ID NO: 2297523 - DNA, 25 bp, Homo sapien
ccagtgctttctgaccacttcctag

SEQ ID NO: 2297524 - DNA, 25 bp, Homo sapien
ccgtgtacacaaaggatgcagtagc

SEQ ID NO: 2297525 - DNA, 25 bp, Homo sapien
cagtccgtgtacacaaaggatgcag

SEQ ID NO: 2297526 - DNA, 25 bp, Homo sapien
gtccgtgtacacaaaggatgcagta

SEQ ID NO: 2297527 - DNA, 25 bp, Homo sapien
tcagtccgtgtacacaaaggatgca

SEQ ID NO: 2297528 - DNA, 25 bp, Homo sapien
caggaacttcaatcctgtttcagca

SEQ ID NO: 2297529 - DNA, 25 bp, Homo sapien
caacagaaaacaacacgatcaggaa

SEQ ID NO: 2297530 - DNA, 25 bp, Homo sapien
acaacacgatcaggaacttcaatcc

SEQ ID NO: 2297531 - DNA, 25 bp, Homo sapien
ggaacttcaatcctgtttcagcagt

SEQ ID NO: 2297532 - DNA, 25 bp, Homo sapien
ggacagtcatgatcactaactacag

SEQ ID NO: 2297533 - DNA, 25 bp, Homo sapien
tatattcactcatgattccactgcc

SEQ ID NO: 2297534 - DNA, 25 bp, Homo sapien
aggtggacagtcatgatcactaact

SEQ ID NO: 2297535 - DNA, 25 bp, Homo sapien
catgatcactaactacagaattgtt

SEQ ID NO: 2297536 - DNA, 25 bp, Homo sapien
ctacttgcttaggtaaagctctctg

SEQ ID NO: 2297537 - DNA, 25 bp, Homo sapien
cagatttaaggcgtgtccagtgaat

SEQ ID NO: 2297538 - DNA, 25 bp, Homo sapien
gtgaatacgctgatggcaattccca

SEQ ID NO: 2297539 - DNA, 25 bp, Homo sapien
agctctctgacctctaacagattta

SEQ ID NO: 2297540 - DNA, 25 bp, Homo sapien
ccactaccacttccatcgtggccat

SEQ ID NO: 2297541 - DNA, 25 bp, Homo sapien
cttcaagtttccgtgaaagggtcat

SEQ ID NO: 2297542 - DNA, 25 bp, Homo sapien
atggattcacttcaagtttccgtga

SEQ ID NO: 2297543 - DNA, 25 bp, Homo sapien
actgtcctgcatagaatcttaatgg

SEQ ID NO: 2297544 - DNA, 25 bp, Homo sapien
agtctctcacactgtaactgtcctg

SEQ ID NO: 2297545 - DNA, 25 bp, Homo sapien
ttgttgttaacccaagttgctggta

SEQ ID NO: 2297546 - DNA, 25 bp, Homo sapien
tccaaggcgtggctgttgatcaact

SEQ ID NO: 2297547 - DNA, 25 bp, Homo sapien
taattcactgtctccaacttccaag

SEQ ID NO: 2297548 - DNA, 25 bp, Homo sapien
taaatctctcaggagtaattcactg

SEQ ID NO: 2297549 - DNA, 25 bp, Homo sapien
tgtaaataaagaaacccagaggcaa

SEQ ID NO: 2297550 - DNA, 25 bp, Homo sapien
ctgtaaataaagaaacccagaggca

SEQ ID NO: 2297551 - DNA, 25 bp, Homo sapien
tgaactgtaaataaagaaacccaga

SEQ ID NO: 2297552 - DNA, 25 bp, Homo sapien
gtggtggtttcacaaatctgtacat

SEQ ID NO: 2297553 - DNA, 25 bp, Homo sapien
caggatttgactacaaaagagcagc

SEQ ID NO: 2297554 - DNA, 25 bp, Homo sapien
tcacagaattgtacaccaaaagtca

SEQ ID NO: 2297555 - DNA, 25 bp, Homo sapien
aaagaagtcttttgaccagtgatga

SEQ ID NO: 2297556 - DNA, 25 bp, Homo sapien
aatgttctccacaaaatttgtcacg

SEQ ID NO: 2297557 - DNA, 25 bp, Homo sapien
cacaaaatttgtcacggtactttct

SEQ ID NO: 2297558 - DNA, 25 bp, Homo sapien
ttgtcacggtactttcttcatcttt

SEQ ID NO: 2297559 - DNA, 25 bp, Homo sapien
tctccacaaaatttgtcacggtact

SEQ ID NO: 2297560 - DNA, 25 bp, Homo sapien
atttcacttgaatttccaccgcagg

SEQ ID NO: 2297561 - DNA, 25 bp, Homo sapien
tgtgccactgcttgtttaggccgtg

SEQ ID NO: 2297562 - DNA, 25 bp, Homo sapien
aatttccaccgcaggcatttgaatg

SEQ ID NO: 2297563 - DNA, 25 bp, Homo sapien
gtttaggccgtgcttggcagaagat

SEQ ID NO: 2297564 - DNA, 25 bp, Homo sapien
gggtccagatcaatggcacttcctg

SEQ ID NO: 2297565 - DNA, 25 bp, Homo sapien
cagatcaatggcacttcctgcgtat

SEQ ID NO: 2297566 - DNA, 25 bp, Homo sapien
atggcacttcctgcgtatattgttc

SEQ ID NO: 2297567 - DNA, 25 bp, Homo sapien
ccagggtccagatcaatggcacttc

SEQ ID NO: 2297568 - DNA, 25 bp, Homo sapien
tctctggatcccctcttatcatttg

SEQ ID NO: 2297569 - DNA, 25 bp, Homo sapien
tggatcccctcttatcatttgtagg

SEQ ID NO: 2297570 - DNA, 25 bp, Homo sapien
tctggatcccctcttatcatttgta

SEQ ID NO: 2297571 - DNA, 25 bp, Homo sapien
cttctctggatcccctcttatcatt

SEQ ID NO: 2297572 - DNA, 25 bp, Homo sapien
catgtgatgacttgggctcagttgg

SEQ ID NO: 2297573 - DNA, 25 bp, Homo sapien
aatgacctgtagagtttccccaagt

SEQ ID NO: 2297574 - DNA, 25 bp, Homo sapien
tctcccaatgacctgtagagtttcc

SEQ ID NO: 2297575 - DNA, 25 bp, Homo sapien
tttctctctcccaatgacctgtaga

SEQ ID NO: 2297576 - DNA, 25 bp, Homo sapien
tgccaggcagaattccctgtgggaa

SEQ ID NO: 2297577 - DNA, 25 bp, Homo sapien
tagtgccaggcagaattccctgtgg

SEQ ID NO: 2297578 - DNA, 25 bp, Homo sapien
ccaggcagaattccctgtgggaagg

SEQ ID NO: 2297579 - DNA, 25 bp, Homo sapien
agtgccaggcagaattccctgtggg

SEQ ID NO: 2297580 - DNA, 25 bp, Homo sapien
ggtcatagggtttttattcagcaaa

SEQ ID NO: 2297581 - DNA, 25 bp, Homo sapien
gcagctgcacttttaggttgcctat

SEQ ID NO: 2297582 - DNA, 25 bp, Homo sapien
ttttctgacctagttcaagaccaga

SEQ ID NO: 2297583 - DNA, 25 bp, Homo sapien
caagaccagaacatgggtcataggg

SEQ ID NO: 2297584 - DNA, 25 bp, Homo sapien
taccatctggcattaggcagcactt

SEQ ID NO: 2297585 - DNA, 25 bp, Homo sapien
cgcatttaattttgggactgtgccc

SEQ ID NO: 2297586 - DNA, 25 bp, Homo sapien
gaaaacaaaggagtcctctccgcat

SEQ ID NO: 2297587 - DNA, 25 bp, Homo sapien
gaaggaaagaacatcagctgaccaa

SEQ ID NO: 2297588 - DNA, 25 bp, Homo sapien
gcctgttatgggtacacacttaatt

SEQ ID NO: 2297589 - DNA, 25 bp, Homo sapien
ggaaggcttttcactaatcttgcag

SEQ ID NO: 2297590 - DNA, 25 bp, Homo sapien
gacatacacttgtgttatcacccag

SEQ ID NO: 2297591 - DNA, 25 bp, Homo sapien
gagtgctctgcaataaagtgtgccc

SEQ ID NO: 2297592 - DNA, 25 bp, Homo sapien
tgtagcctcgctagtcaagctgtga

SEQ ID NO: 2297593 - DNA, 25 bp, Homo sapien
gccctcatgactgattggtttagga

SEQ ID NO: 2297594 - DNA, 25 bp, Homo sapien
agcttactaaactgactgcctcaag

SEQ ID NO: 2297595 - DNA, 25 bp, Homo sapien
gcaagttacaatgccttgttgtgcc

SEQ ID NO: 2297596 - DNA, 25 bp, Homo sapien
ggagactcttgcatctacattgaaa

SEQ ID NO: 2297597 - DNA, 25 bp, Homo sapien
aaatcttgtgcacgtcagcaatagc

SEQ ID NO: 2297598 - DNA, 25 bp, Homo sapien
tgtaagaaggtgtgctatcatccag

SEQ ID NO: 2297599 - DNA, 25 bp, Homo sapien
tagactttctggctaacttgatgca

SEQ ID NO: 2297600 - DNA, 25 bp, Homo sapien
ctagctgcctcaccttaattccttt

SEQ ID NO: 2297601 - DNA, 25 bp, Homo sapien
tctagctgcctcaccttaattcctt

SEQ ID NO: 2297602 - DNA, 25 bp, Homo sapien
ttctgtccttggtttggggatgctc

SEQ ID NO: 2297603 - DNA, 25 bp, Homo sapien
gcctgttctgtccttggtttgggga

SEQ ID NO: 2297604 - DNA, 25 bp, Homo sapien
tgttctgtccttggtttggggatgc

SEQ ID NO: 2297605 - DNA, 25 bp, Homo sapien
cctgttctgtccttggtttggggat

SEQ ID NO: 2297606 - DNA, 25 bp, Homo sapien
gacttgagggggtgcgcgctggcgt

SEQ ID NO: 2297607 - DNA, 25 bp, Homo sapien
tcaggctcccccggagacttgaggg

SEQ ID NO: 2297608 - DNA, 25 bp, Homo sapien
tctccgtggccgctcgggagaggtg

SEQ ID NO: 2297609 - DNA, 25 bp, Homo sapien
agaggtgctcttcgctcaggctccc

SEQ ID NO: 2297610 - DNA, 25 bp, Homo sapien
ccttgcagaagcggcttctgcgtac

SEQ ID NO: 2297611 - DNA, 25 bp, Homo sapien
ggccgcggtcggtgcgttttccgca

SEQ ID NO: 2297612 - DNA, 25 bp, Homo sapien
tcggtgcgttttccgcaggtcagcc

SEQ ID NO: 2297613 - DNA, 25 bp, Homo sapien
ctcccgagggccgcggtcggtgcgt

SEQ ID NO: 2297614 - DNA, 25 bp, Homo sapien
gccggtccacctccgcagcgctcct

SEQ ID NO: 2297615 - DNA, 25 bp, Homo sapien
tctctggcgccgcagaggccgcggg

SEQ ID NO: 2297616 - DNA, 25 bp, Homo sapien
cggctgagtcggctgggtctctggc

SEQ ID NO: 2297617 - DNA, 25 bp, Homo sapien
ggagacgcgagtgcggggtggcgcc

SEQ ID NO: 2297618 - DNA, 25 bp, Homo sapien
gcccaagctgggcccggaactaaca

SEQ ID NO: 2297619 - DNA, 25 bp, Homo sapien
ccggaactaacacccgacaagcgct

SEQ ID NO: 2297620 - DNA, 25 bp, Homo sapien
accagcccaagctgggcccggaact

SEQ ID NO: 2297621 - DNA, 25 bp, Homo sapien
actaacacccgacaagcgctggcgg

SEQ ID NO: 2297622 - DNA, 25 bp, Homo sapien
ctgcgcaaaggctgggagaccgcgc

SEQ ID NO: 2297623 - DNA, 25 bp, Homo sapien
aaaggctgggagaccgcgccctctc

SEQ ID NO: 2297624 - DNA, 25 bp, Homo sapien
caaaggctgggagaccgcgccctct

SEQ ID NO: 2297625 - DNA, 25 bp, Homo sapien
cgcaaaggctgggagaccgcgccct

SEQ ID NO: 2297626 - DNA, 25 bp, Homo sapien
gtgccgccggcaatcagcgaggtcc

SEQ ID NO: 2297627 - DNA, 25 bp, Homo sapien
gcctgccggcgttcggcgtcgcctc

SEQ ID NO: 2297628 - DNA, 25 bp, Homo sapien
ttcaaggtcgcgaaaccaccggtgc

SEQ ID NO: 2297629 - DNA, 25 bp, Homo sapien
gggctgcgcggtttccggcctgccg

SEQ ID NO: 2297630 - DNA, 25 bp, Homo sapien
tagttccgcgaagggctcgctgccc

SEQ ID NO: 2297631 - DNA, 25 bp, Homo sapien
tatctggtagttccgcgaagggctc

SEQ ID NO: 2297632 - DNA, 25 bp, Homo sapien
ttatctggtagttccgcgaagggct

SEQ ID NO: 2297633 - DNA, 25 bp, Homo sapien
tggtagttccgcgaagggctcgctg

SEQ ID NO: 2297634 - DNA, 25 bp, Homo sapien
aagggaaaatctagtatttctctga

SEQ ID NO: 2297635 - DNA, 25 bp, Homo sapien
aaagggaaaatctagtatttctctg

SEQ ID NO: 2297636 - DNA, 25 bp, Homo sapien
agggaaaatctagtatttctctgac

SEQ ID NO: 2297637 - DNA, 25 bp, Homo sapien
gggaaaatctagtatttctctgacc

SEQ ID NO: 2297638 - DNA, 25 bp, Homo sapien
ttttgtgttaccaaaggtgaaggca

SEQ ID NO: 2297639 - DNA, 25 bp, Homo sapien
ttgtgttaccaaaggtgaaggcata

SEQ ID NO: 2297640 - DNA, 25 bp, Homo sapien
ggcatagccttcctctcctcatgtt

SEQ ID NO: 2297641 - DNA, 25 bp, Homo sapien
aaggcatagccttcctctcctcatg

SEQ ID NO: 2297642 - DNA, 25 bp, Homo sapien
aaattcatggcttagagtcacatta

SEQ ID NO: 2297643 - DNA, 25 bp, Homo sapien
ctgatgtcatgatccgcgcgcttca

SEQ ID NO: 2297644 - DNA, 25 bp, Homo sapien
ggcagctttcatgtttttgggaaaa

SEQ ID NO: 2297645 - DNA, 25 bp, Homo sapien
tcctaaaataaaggctactggatca

SEQ ID NO: 2297646 - DNA, 25 bp, Homo sapien
aaataaccattgcacaggctgctct

SEQ ID NO: 2297647 - DNA, 25 bp, Homo sapien
cacaggctgctctgaagaagatgca

SEQ ID NO: 2297648 - DNA, 25 bp, Homo sapien
caaataaccattgcacaggctgctc

SEQ ID NO: 2297649 - DNA, 25 bp, Homo sapien
aaacaaataaccattgcacaggctg

SEQ ID NO: 2297650 - DNA, 25 bp, Homo sapien
tgccaccctggagtgagtacctgca

SEQ ID NO: 2297651 - DNA, 25 bp, Homo sapien
gaaccgatagtcaaggctgggagcc

SEQ ID NO: 2297652 - DNA, 25 bp, Homo sapien
aaatctgtcaaaacgccagagggag

SEQ ID NO: 2297653 - DNA, 25 bp, Homo sapien
cagacatgcagctaaggccaggtgg

SEQ ID NO: 2297654 - DNA, 25 bp, Homo sapien
ccatgactgtcatccagaggaatct

SEQ ID NO: 2297655 - DNA, 25 bp, Homo sapien
cccatgactgtcatccagaggaatc

SEQ ID NO: 2297656 - DNA, 25 bp, Homo sapien
tcccatgactgtcatccagaggaat

SEQ ID NO: 2297657 - DNA, 25 bp, Homo sapien
ggagaactgcgcagagggtggccaa

SEQ ID NO: 2297658 - DNA, 25 bp, Homo sapien
cgtggcatgacctttcagggagaac

SEQ ID NO: 2297659 - DNA, 25 bp, Homo sapien
ggaccagagtgctaagacgtggcat

SEQ ID NO: 2297660 - DNA, 25 bp, Homo sapien
gggcgaagccctgagatgtgaggat

SEQ ID NO: 2297661 - DNA, 25 bp, Homo sapien
tgcgtcgagacaagtgggggatccg

SEQ ID NO: 2297662 - DNA, 25 bp, Homo sapien
ctgcgtcgagacaagtgggggatcc

SEQ ID NO: 2297663 - DNA, 25 bp, Homo sapien
agcgggcggcccgactgacttcagc

SEQ ID NO: 2297664 - DNA, 25 bp, Homo sapien
agtcccacggctgccgtgcagcaag

SEQ ID NO: 2297665 - DNA, 25 bp, Homo sapien
tgccgaggagcctgtgccagtccca

SEQ ID NO: 2297666 - DNA, 25 bp, Homo sapien
agaagtggccgctctaccagctgcc

SEQ ID NO: 2297667 - DNA, 25 bp, Homo sapien
ctggctccaagtcgcgtgccctaca

SEQ ID NO: 2297668 - DNA, 25 bp, Homo sapien
ctggacctggctccaagtcgcgtgc

SEQ ID NO: 2297669 - DNA, 25 bp, Homo sapien
gctccaagtcgcgtgccctacacac

SEQ ID NO: 2297670 - DNA, 25 bp, Homo sapien
acctggctccaagtcgcgtgcccta

SEQ ID NO: 2297671 - DNA, 25 bp, Homo sapien
gccgcagttcagagaaggctaccgc

SEQ ID NO: 2297672 - DNA, 25 bp, Homo sapien
tccgcctgagccgcagttcagagaa

SEQ ID NO: 2297673 - DNA, 25 bp, Homo sapien
ttcagagaaggctaccgcggcgctg

SEQ ID NO: 2297674 - DNA, 25 bp, Homo sapien
tgagccgcagttcagagaaggctac

SEQ ID NO: 2297675 - DNA, 25 bp, Homo sapien
ggactctggggcttggacacaaaaa

SEQ ID NO: 2297676 - DNA, 25 bp, Homo sapien
ggcacgcgttgcataacctgacctg

SEQ ID NO: 2297677 - DNA, 25 bp, Homo sapien
cacccggagcggtgggaactgcggt

SEQ ID NO: 2297678 - DNA, 25 bp, Homo sapien
tggacacaaaaatcgcggcgcactg

SEQ ID NO: 2297679 - DNA, 25 bp, Homo sapien
tgaaggagaacccaatcaagttgtc

SEQ ID NO: 2297680 - DNA, 25 bp, Homo sapien
caagttgtcagctggcaaattattg

SEQ ID NO: 2297681 - DNA, 25 bp, Homo sapien
aaattattgaaagtatttggctgag

SEQ ID NO: 2297682 - DNA, 25 bp, Homo sapien
cttgggcaacctaatgagaccacat

SEQ ID NO: 2297683 - DNA, 25 bp, Homo sapien
ccaaaactgttgtttggctatcaac

SEQ ID NO: 2297684 - DNA, 25 bp, Homo sapien
tggctatcaactgtctcctttagac

SEQ ID NO: 2297685 - DNA, 25 bp, Homo sapien
ctttagacacttctcgagggcgctt

SEQ ID NO: 2297686 - DNA, 25 bp, Homo sapien
tgattcttgataccagtctactgct

SEQ ID NO: 2297687 - DNA, 25 bp, Homo sapien
caggaatgggatcagtgggcatttc

SEQ ID NO: 2297688 - DNA, 25 bp, Homo sapien
attttcctcattgtgaagggtattc

SEQ ID NO: 2297689 - DNA, 25 bp, Homo sapien
catagccaaagacaccaccaagtgc

SEQ ID NO: 2297690 - DNA, 25 bp, Homo sapien
tcattgtgaagggtattctgtctcc

SEQ ID NO: 2297691 - DNA, 25 bp, Homo sapien
ggtcaagcatgtgcatgtcagctca

SEQ ID NO: 2297692 - DNA, 25 bp, Homo sapien
aagggcatcacatgacaagtggtca

SEQ ID NO: 2297693 - DNA, 25 bp, Homo sapien
ttaacaccagcagcgcacatattgg

SEQ ID NO: 2297694 - DNA, 25 bp, Homo sapien
tgttaggaaatgactcccagtccct

SEQ ID NO: 2297695 - DNA, 25 bp, Homo sapien
ttagttcatgaatatggaggctgag

SEQ ID NO: 2297696 - DNA, 25 bp, Homo sapien
agttcatgaatatggaggctgagaa

SEQ ID NO: 2297697 - DNA, 25 bp, Homo sapien
tagttcatgaatatggaggctgaga

SEQ ID NO: 2297698 - DNA, 25 bp, Homo sapien
tatgtattaatcatctacagtgtat

SEQ ID NO: 2297699 - DNA, 25 bp, Homo sapien
cactgggagtatggttgtcttagtc

SEQ ID NO: 2297700 - DNA, 25 bp, Homo sapien
tacctaacagaatactatatgctgg

SEQ ID NO: 2297701 - DNA, 25 bp, Homo sapien
tacagtgtatgtattaatctaggca

SEQ ID NO: 2297702 - DNA, 25 bp, Homo sapien
gtgccactgaactaactatagcctg

SEQ ID NO: 2297703 - DNA, 25 bp, Homo sapien
aaataacttgaactggagaagcaga

SEQ ID NO: 2297704 - DNA, 25 bp, Homo sapien
ttgtgccactgaactaactatagcc

SEQ ID NO: 2297705 - DNA, 25 bp, Homo sapien
cactgaactaactatagcctgggtg

SEQ ID NO: 2297706 - DNA, 25 bp, Homo sapien
tctagctctagcactaaaaatggcc

SEQ ID NO: 2297707 - DNA, 25 bp, Homo sapien
tccacacgtggaagcctaaggattc

SEQ ID NO: 2297708 - DNA, 25 bp, Homo sapien
gatacatgctccaggttttcaagga

SEQ ID NO: 2297709 - DNA, 25 bp, Homo sapien
tagggaggcttcaactaggatggcc

SEQ ID NO: 2297710 - DNA, 25 bp, Homo sapien
gacctaatgattccctactttggct

SEQ ID NO: 2297711 - DNA, 25 bp, Homo sapien
tctaagcctctgattctatggactc

SEQ ID NO: 2297712 - DNA, 25 bp, Homo sapien
tctgcagccatgttattgacaagca

SEQ ID NO: 2297713 - DNA, 25 bp, Homo sapien
tagctctatacacctcaccacattg

SEQ ID NO: 2297714 - DNA, 25 bp, Homo sapien
ttttttccttgctaggtcactgcct

SEQ ID NO: 2297715 - DNA, 25 bp, Homo sapien
gcccaggtttgctacagttctagta

SEQ ID NO: 2297716 - DNA, 25 bp, Homo sapien
gagttcacatattgcctgccatctt

SEQ ID NO: 2297717 - DNA, 25 bp, Homo sapien
ccatcttattaagatcagtcactgg

SEQ ID NO: 2297718 - DNA, 25 bp, Homo sapien
ggacaaaagacacgagcagacatct

SEQ ID NO: 2297719 - DNA, 25 bp, Homo sapien
gacttagtccttagacatggcacca

SEQ ID NO: 2297720 - DNA, 25 bp, Homo sapien
gaaatggcatgctatagactgagtg

SEQ ID NO: 2297721 - DNA, 25 bp, Homo sapien
tctcaccaaaaaagggatatgaggc

SEQ ID NO: 2297722 - DNA, 25 bp, Homo sapien
gcagttgccagagtctaggttctcc

SEQ ID NO: 2297723 - DNA, 25 bp, Homo sapien
agggcagctcgcagttgccagagtc

SEQ ID NO: 2297724 - DNA, 25 bp, Homo sapien
tcgcagttgccagagtctaggttct

SEQ ID NO: 2297725 - DNA, 25 bp, Homo sapien
cagctcgcagttgccagagtctagg

SEQ ID NO: 2297726 - DNA, 25 bp, Homo sapien
ttatagaggctgaacgatgcacact

SEQ ID NO: 2297727 - DNA, 25 bp, Homo sapien
gatagactagaaccctggtaattgg

SEQ ID NO: 2297728 - DNA, 25 bp, Homo sapien
aaaacttgctgatagagtctgggcc

SEQ ID NO: 2297729 - DNA, 25 bp, Homo sapien
gatggtatctccatgcctacaggcc

SEQ ID NO: 2297730 - DNA, 25 bp, Homo sapien
gccagcacaggagaagcagaccttt

SEQ ID NO: 2297731 - DNA, 25 bp, Homo sapien
cagcacaggagaagcagacctttcc

SEQ ID NO: 2297732 - DNA, 25 bp, Homo sapien
ccagcacaggagaagcagacctttc

SEQ ID NO: 2297733 - DNA, 25 bp, Homo sapien
cccagtgggcttcccgctgactggg

SEQ ID NO: 2297734 - DNA, 25 bp, Homo sapien
ccaggtacttgtctggagtgaagct

SEQ ID NO: 2297735 - DNA, 25 bp, Homo sapien
gaagctgcctatcactccctgacag

SEQ ID NO: 2297736 - DNA, 25 bp, Homo sapien
ctgttagttatagcccccagtgggc

SEQ ID NO: 2297737 - DNA, 25 bp, Homo sapien
ggagttccccatctagggcagtgga

SEQ ID NO: 2297738 - DNA, 25 bp, Homo sapien
tttaggcaggcacaaagcgccactt

SEQ ID NO: 2297739 - DNA, 25 bp, Homo sapien
cattgtttgaactagtacccagggt

SEQ ID NO: 2297740 - DNA, 25 bp, Homo sapien
tatggaagtagtctcaggctggctg

SEQ ID NO: 2297741 - DNA, 25 bp, Homo sapien
tacccaggtagggttcaatagaagc

SEQ ID NO: 2297742 - DNA, 25 bp, Homo sapien
tcacttttgccagtgtaactcgggt

SEQ ID NO: 2297743 - DNA, 25 bp, Homo sapien
caatagaagcctttgttggagaatt

SEQ ID NO: 2297744 - DNA, 25 bp, Homo sapien
gtttacaaagtcctgtagccaccca

SEQ ID NO: 2297745 - DNA, 25 bp, Homo sapien
tccctctcagggctatagaaggatg

SEQ ID NO: 2297746 - DNA, 25 bp, Homo sapien
ctggtgaagtggtacatgactcccc

SEQ ID NO: 2297747 - DNA, 25 bp, Homo sapien
ccaaactgatggtatgtcaagcctc

SEQ ID NO: 2297748 - DNA, 25 bp, Homo sapien
gatggctggcttgggaaaatatgac

SEQ ID NO: 2297749 - DNA, 25 bp, Homo sapien
cacaaaccaaagagcccggcctatc

SEQ ID NO: 2297750 - DNA, 25 bp, Homo sapien
agggttggcagcacaaaccaaagag

SEQ ID NO: 2297751 - DNA, 25 bp, Homo sapien
aaagagcccggcctatcttctccat

SEQ ID NO: 2297752 - DNA, 25 bp, Homo sapien
cagggttggcagcacaaaccaaaga

SEQ ID NO: 2297753 - DNA, 25 bp, Homo sapien
gcatacatctcccttctccctaccc

SEQ ID NO: 2297754 - DNA, 25 bp, Homo sapien
atacatctcccttctccctacccat

SEQ ID NO: 2297755 - DNA, 25 bp, Homo sapien
catacatctcccttctccctaccca

SEQ ID NO: 2297756 - DNA, 25 bp, Homo sapien
acacaacccgtttctgaaccacgtg

SEQ ID NO: 2297757 - DNA, 25 bp, Homo sapien
tggcccacaatggccgctctgggca

SEQ ID NO: 2297758 - DNA, 25 bp, Homo sapien
tttggcccccaaggaccacaatggc

SEQ ID NO: 2297759 - DNA, 25 bp, Homo sapien
tcctgggggttcatgttgatgagcc

SEQ ID NO: 2297760 - DNA, 25 bp, Homo sapien
tcttctgaaacattgagccatcctg

SEQ ID NO: 2297761 - DNA, 25 bp, Homo sapien
tctgaaacattgagccatcctgacc

SEQ ID NO: 2297762 - DNA, 25 bp, Homo sapien
ctgctcttctgaaacattgagccat

SEQ ID NO: 2297763 - DNA, 25 bp, Homo sapien
gctcttctgaaacattgagccatcc

SEQ ID NO: 2297764 - DNA, 25 bp, Homo sapien
atgaaatatgctccaatggcctcat

SEQ ID NO: 2297765 - DNA, 25 bp, Homo sapien
ctgaaaatgaaatatgctccaatgg

SEQ ID NO: 2297766 - DNA, 25 bp, Homo sapien
aaaatgaaatatgctccaatggcct

SEQ ID NO: 2297767 - DNA, 25 bp, Homo sapien
aaatgaaatatgctccaatggcctc

SEQ ID NO: 2297768 - DNA, 25 bp, Homo sapien
gggaatcagggcaatgcttatcagc

SEQ ID NO: 2297769 - DNA, 25 bp, Homo sapien
gaccaaatatccgacattggtgcct

SEQ ID NO: 2297770 - DNA, 25 bp, Homo sapien
tatcagctcaatttgcctgatgggc

SEQ ID NO: 2297771 - DNA, 25 bp, Homo sapien
cgctccacatgcagttatttgttct

SEQ ID NO: 2297772 - DNA, 25 bp, Homo sapien
gcaacccagttaagccatatccagg

SEQ ID NO: 2297773 - DNA, 25 bp, Homo sapien
agctcagacaagcatgtcggttccc

SEQ ID NO: 2297774 - DNA, 25 bp, Homo sapien
gcctcaggagtctggcggtttccca

SEQ ID NO: 2297775 - DNA, 25 bp, Homo sapien
gaatcccttggctaaaggctgccct

SEQ ID NO: 2297776 - DNA, 25 bp, Homo sapien
tgcagacaaaggcacggcctcctct

SEQ ID NO: 2297777 - DNA, 25 bp, Homo sapien
gaagtccttgggcagccctaggaag

SEQ ID NO: 2297778 - DNA, 25 bp, Homo sapien
gaaggaggtggacctcctgcctctg

SEQ ID NO: 2297779 - DNA, 25 bp, Homo sapien
tcctctgaaggtagagcctggggaa

SEQ ID NO: 2297780 - DNA, 25 bp, Homo sapien
tccttgccatgcaaccactgagtct

SEQ ID NO: 2297781 - DNA, 25 bp, Homo sapien
catccttgccatgcaaccactgagt

SEQ ID NO: 2297782 - DNA, 25 bp, Homo sapien
acatccttgccatgcaaccactgag

SEQ ID NO: 2297783 - DNA, 25 bp, Homo sapien
ccacatccttgccatgcaaccactg

SEQ ID NO: 2297784 - DNA, 25 bp, Homo sapien
ggtgctatctccctctacttctaca

SEQ ID NO: 2297785 - DNA, 25 bp, Homo sapien
gagttggtgctatctccctctactt

SEQ ID NO: 2297786 - DNA, 25 bp, Homo sapien
tatctccctctacttctacaggcat

SEQ ID NO: 2297787 - DNA, 25 bp, Homo sapien
gatgagttggtgctatctccctcta

SEQ ID NO: 2297788 - DNA, 25 bp, Homo sapien
tgcaatgaccaaggagattgaggca

SEQ ID NO: 2297789 - DNA, 25 bp, Homo sapien
gattgaggcaaaggcggctgctgag

SEQ ID NO: 2297790 - DNA, 25 bp, Homo sapien
gcaatgaccaaggagattgaggcaa

SEQ ID NO: 2297791 - DNA, 25 bp, Homo sapien
ccgggagccccgcacgcgagctgcc

SEQ ID NO: 2297792 - DNA, 25 bp, Homo sapien
cgcacgcgagctgccggctctttgt

SEQ ID NO: 2297793 - DNA, 25 bp, Homo sapien
ctgccggccctctagtccccgcctg

SEQ ID NO: 2297794 - DNA, 25 bp, Homo sapien
tgcccagcgctcggccgcgacgccc

SEQ ID NO: 2297795 - DNA, 25 bp, Homo sapien
gatggctttagtgcaggcaccagcc

SEQ ID NO: 2297796 - DNA, 25 bp, Homo sapien
gatgagagatacagacctatgtcca

SEQ ID NO: 2297797 - DNA, 25 bp, Homo sapien
tcagcctcagatgagagatacagac

SEQ ID NO: 2297798 - DNA, 25 bp, Homo sapien
tgtgggaacgtgcaggatgcatttc

SEQ ID NO: 2297799 - DNA, 25 bp, Homo sapien
cttggtggtctctggcggaagctaa

SEQ ID NO: 2297800 - DNA, 25 bp, Homo sapien
gccgtcactgcaaagaaaccaactg

SEQ ID NO: 2297801 - DNA, 25 bp, Homo sapien
tcagcagtgccatgacggccgtcac

SEQ ID NO: 2297802 - DNA, 25 bp, Homo sapien
actgcttggagaaccctctggaggg

SEQ ID NO: 2297803 - DNA, 25 bp, Homo sapien
aatgtcaaggatttcccagatatcc

SEQ ID NO: 2297804 - DNA, 25 bp, Homo sapien
gaaatgtcaaggatttcccagatat

SEQ ID NO: 2297805 - DNA, 25 bp, Homo sapien
tgaaatgtcaaggatttcccagata

SEQ ID NO: 2297806 - DNA, 25 bp, Homo sapien
aaatgtcaaggatttcccagatatc

SEQ ID NO: 2297807 - DNA, 25 bp, Homo sapien
cagcaagtgatctgggtccttttca

SEQ ID NO: 2297808 - DNA, 25 bp, Homo sapien
tgatctgggtccttttcagtaccat

SEQ ID NO: 2297809 - DNA, 25 bp, Homo sapien
ccacagcaagtgatctgggtccttt

SEQ ID NO: 2297810 - DNA, 25 bp, Homo sapien
caagtgatctgggtccttttcagta

SEQ ID NO: 2297811 - DNA, 25 bp, Homo sapien
cacctccgtgaagctggtcttttct

SEQ ID NO: 2297812 - DNA, 25 bp, Homo sapien
cccacctccgtgaagctggtctttt

SEQ ID NO: 2297813 - DNA, 25 bp, Homo sapien
cgtgaagctggtcttttctttggcc

SEQ ID NO: 2297814 - DNA, 25 bp, Homo sapien
cctccgtgaagctggtcttttcttt

SEQ ID NO: 2297815 - DNA, 25 bp, Homo sapien
ccctgccagtgaacggagggacctg

SEQ ID NO: 2297816 - DNA, 25 bp, Homo sapien
gaagcaaacatatgccacttgatgt

SEQ ID NO: 2297817 - DNA, 25 bp, Homo sapien
ctttgcctagagagtgacacatgag

SEQ ID NO: 2297818 - DNA, 25 bp, Homo sapien
gacctgggctttggataatcccctg

SEQ ID NO: 2297819 - DNA, 25 bp, Homo sapien
cagtcttataatggaccatggctgc

SEQ ID NO: 2297820 - DNA, 25 bp, Homo sapien
agtcttataatggaccatggctgct

SEQ ID NO: 2297821 - DNA, 25 bp, Homo sapien
ggcatggcttatgcttattcaggca

SEQ ID NO: 2297822 - DNA, 25 bp, Homo sapien
gaaccataagcaatgaggcatggct

SEQ ID NO: 2297823 - DNA, 25 bp, Homo sapien
tatgcttattcaggcagacgatcag

SEQ ID NO: 2297824 - DNA, 25 bp, Homo sapien
tatttcagaaccataagcaatgagg

SEQ ID NO: 2297825 - DNA, 25 bp, Homo sapien
cacagagtagttgctctttaagaaa

SEQ ID NO: 2297826 - DNA, 25 bp, Homo sapien
cagagtagttgctctttaagaaatt

SEQ ID NO: 2297827 - DNA, 25 bp, Homo sapien
gagtagttgctctttaagaaattac

SEQ ID NO: 2297828 - DNA, 25 bp, Homo sapien
ccacactcacagagtagttgctctt

SEQ ID NO: 2297829 - DNA, 25 bp, Homo sapien
cagtcttatagtgggccatggcttc

SEQ ID NO: 2297830 - DNA, 25 bp, Homo sapien
ctgctcagtcttatagtgggccatg

SEQ ID NO: 2297831 - DNA, 25 bp, Homo sapien
cttcaagtagatgatcagccagtcg

SEQ ID NO: 2297832 - DNA, 25 bp, Homo sapien
aaatacttcaagtagatgatcagcc

SEQ ID NO: 2297833 - DNA, 25 bp, Homo sapien
gagagttgccatagagattattttc

SEQ ID NO: 2297834 - DNA, 25 bp, Homo sapien
aggcagcagtagttggagcctccag

SEQ ID NO: 2297835 - DNA, 25 bp, Homo sapien
gcagcagtagttggagcctccagga

SEQ ID NO: 2297836 - DNA, 25 bp, Homo sapien
ggcagcagtagttggagcctccagg

SEQ ID NO: 2297837 - DNA, 25 bp, Homo sapien
cttgcccaggaagataaaagtgaca

SEQ ID NO: 2297838 - DNA, 25 bp, Homo sapien
catcctattggatttgtctctcaga

SEQ ID NO: 2297839 - DNA, 25 bp, Homo sapien
catcacaacttcactattgcaggaa

SEQ ID NO: 2297840 - DNA, 25 bp, Homo sapien
cctttcaggaactttgcaaacaaca

SEQ ID NO: 2297841 - DNA, 25 bp, Homo sapien
cctcagtgctccccatagcctgaca

SEQ ID NO: 2297842 - DNA, 25 bp, Homo sapien
gtgctccccatagcctgacagagtg

SEQ ID NO: 2297843 - DNA, 25 bp, Homo sapien
agcctctccaggcaagggagcagct

SEQ ID NO: 2297844 - DNA, 25 bp, Homo sapien
aggcaagggagcagctgcttcctca

SEQ ID NO: 2297845 - DNA, 25 bp, Homo sapien
acagaggggcagaagaccatggtgt

SEQ ID NO: 2297846 - DNA, 25 bp, Homo sapien
gtcccaggccattcagcaactcaaa

SEQ ID NO: 2297847 - DNA, 25 bp, Homo sapien
ggggtcccaggccattcagcaactc

SEQ ID NO: 2297848 - DNA, 25 bp, Homo sapien
cagaggggcagaagaccatggtgtg

SEQ ID NO: 2297849 - DNA, 25 bp, Homo sapien
agaccaaatgcatatccccctcgac

SEQ ID NO: 2297850 - DNA, 25 bp, Homo sapien
ccctcgactgtgaccctgtctccca

SEQ ID NO: 2297851 - DNA, 25 bp, Homo sapien
atatccccctcgactgtgaccctgt

SEQ ID NO: 2297852 - DNA, 25 bp, Homo sapien
ctgccacggcactgtgcagaccaaa

SEQ ID NO: 2297853 - DNA, 25 bp, Homo sapien
gtacgcccgcaaagatgaggatgta

SEQ ID NO: 2297854 - DNA, 25 bp, Homo sapien
ggccaggacgctgaggtagccactc

SEQ ID NO: 2297855 - DNA, 25 bp, Homo sapien
tcccagaggatggcaccgaagccca

SEQ ID NO: 2297856 - DNA, 25 bp, Homo sapien
ggtcaccatgacaagtacgcccgca

SEQ ID NO: 2297857 - DNA, 25 bp, Homo sapien
tgcagagcacagggcgggcactgac

SEQ ID NO: 2297858 - DNA, 25 bp, Homo sapien
ctgggtggtgcagggctccccatcc

SEQ ID NO: 2297859 - DNA, 25 bp, Homo sapien
ttgctggaaacctgactgggtggtg

SEQ ID NO: 2297860 - DNA, 25 bp, Homo sapien
gggctccccatccctgcagagcaca

SEQ ID NO: 2297861 - DNA, 25 bp, Homo sapien
tgggagtgaacgcaggcaagtctct

SEQ ID NO: 2297862 - DNA, 25 bp, Homo sapien
gatgtgtctgtttagtgacttggac

SEQ ID NO: 2297863 - DNA, 25 bp, Homo sapien
gtctctacagaagagggtaaagtgg

SEQ ID NO: 2297864 - DNA, 25 bp, Homo sapien
agctgttgcctccttgatgtgtctg

SEQ ID NO: 2297865 - DNA, 25 bp, Homo sapien
tcaagtgctcgatgcttcacgggct

SEQ ID NO: 2297866 - DNA, 25 bp, Homo sapien
cacttgactctaaatgggagcctgg

SEQ ID NO: 2297867 - DNA, 25 bp, Homo sapien
tttgctgtttgctagcgccctggca

SEQ ID NO: 2297868 - DNA, 25 bp, Homo sapien
caaggaaggaactgctaagagccat

SEQ ID NO: 2297869 - DNA, 25 bp, Homo sapien
gaattaggcagtcccatcaatgcaa

SEQ ID NO: 2297870 - DNA, 25 bp, Homo sapien
caaaccctatgagtctcttgagcgg

SEQ ID NO: 2297871 - DNA, 25 bp, Homo sapien
gctaattggccatagaaccacccca

SEQ ID NO: 2297872 - DNA, 25 bp, Homo sapien
cccgagaaggatggatgtcaacaca

SEQ ID NO: 2297873 - DNA, 25 bp, Homo sapien
tgacggaaacaggtaacgagaattc

SEQ ID NO: 2297874 - DNA, 25 bp, Homo sapien
ctgacggaaacaggtaacgagaatt

SEQ ID NO: 2297875 - DNA, 25 bp, Homo sapien
gtaacgagaattccaaagaaagctc

SEQ ID NO: 2297876 - DNA, 25 bp, Homo sapien
caggtaacgagaattccaaagaaag

SEQ ID NO: 2297877 - DNA, 25 bp, Homo sapien
cagggctgccggtccttccaaaatc

SEQ ID NO: 2297878 - DNA, 25 bp, Homo sapien
tgtgacctgaacctatcccactgac

SEQ ID NO: 2297879 - DNA, 25 bp, Homo sapien
tgcccttggtgtgacctgaacctat

SEQ ID NO: 2297880 - DNA, 25 bp, Homo sapien
gtccttccaaaatcgatcccctgtg

SEQ ID NO: 2297881 - DNA, 25 bp, Homo sapien
ccaggtacaacccaagagctctcag

SEQ ID NO: 2297882 - DNA, 25 bp, Homo sapien
gaccccggggctggaattccatgag

SEQ ID NO: 2297883 - DNA, 25 bp, Homo sapien
tggtttcctccagttgcctcagtga

SEQ ID NO: 2297884 - DNA, 25 bp, Homo sapien
ggtgtgacgccataaggtttgtgtt

SEQ ID NO: 2297885 - DNA, 25 bp, Homo sapien
aaggaatgttacctagctcccgaag

SEQ ID NO: 2297886 - DNA, 25 bp, Homo sapien
ggaatgttacctagctcccgaagag

SEQ ID NO: 2297887 - DNA, 25 bp, Homo sapien
tccaaggaatgttacctagctcccg

SEQ ID NO: 2297888 - DNA, 25 bp, Homo sapien
taagatccaaggaatgttacctagc

SEQ ID NO: 2297889 - DNA, 25 bp, Homo sapien
tgatttgcgtatgtgtccctatgca

SEQ ID NO: 2297890 - DNA, 25 bp, Homo sapien
acacgctggctctgtgtgcaaagct

SEQ ID NO: 2297891 - DNA, 25 bp, Homo sapien
ggcccctgcggcacacgctggctct

SEQ ID NO: 2297892 - DNA, 25 bp, Homo sapien
ggtccggcgcgatcatctcagggcc

SEQ ID NO: 2297893 - DNA, 25 bp, Homo sapien
tgactccctgggtccggcgcgatca

SEQ ID NO: 2297894 - DNA, 25 bp, Homo sapien
ctcgagctccagtgtgttaagatgc

SEQ ID NO: 2297895 - DNA, 25 bp, Homo sapien
tctcgagctccagtgtgttaagatg

SEQ ID NO: 2297896 - DNA, 25 bp, Homo sapien
tggatagctggcagtgtcacgccac

SEQ ID NO: 2297897 - DNA, 25 bp, Homo sapien
ctggcagtgtcacgccacttctcgg

SEQ ID NO: 2297898 - DNA, 25 bp, Homo sapien
tgagtcaggcccgtaggatactcct

SEQ ID NO: 2297899 - DNA, 25 bp, Homo sapien
taggatactcctggatagctggcag

SEQ ID NO: 2297900 - DNA, 25 bp, Homo sapien
ggaagaggtgatggagtgcccctga

SEQ ID NO: 2297901 - DNA, 25 bp, Homo sapien
gaagaggtgatggagtgcccctgac

SEQ ID NO: 2297902 - DNA, 25 bp, Homo sapien
ctgaaggcattgatgccagtggctc

SEQ ID NO: 2297903 - DNA, 25 bp, Homo sapien
tgaaggcattgatgccagtggctcc

SEQ ID NO: 2297904 - DNA, 25 bp, Homo sapien
gtgctgaggccggatccctcctgct

SEQ ID NO: 2297905 - DNA, 25 bp, Homo sapien
ggtgctgaggccggatccctcctgc

SEQ ID NO: 2297906 - DNA, 25 bp, Homo sapien
tgggccctgcggctcctttctgaca

SEQ ID NO: 2297907 - DNA, 25 bp, Homo sapien
ggccctgcggctcctttctgacatg

SEQ ID NO: 2297908 - DNA, 25 bp, Homo sapien
tttctgacatgcgtgcccttcctgc

SEQ ID NO: 2297909 - DNA, 25 bp, Homo sapien
tcctttctgacatgcgtgcccttcc

SEQ ID NO: 2297910 - DNA, 25 bp, Homo sapien
atgaggggtacggtccctgtcagcc

SEQ ID NO: 2297911 - DNA, 25 bp, Homo sapien
agcatgaggggtacggtccctgtca

SEQ ID NO: 2297912 - DNA, 25 bp, Homo sapien
cacagcatgaggggtacggtccctg

SEQ ID NO: 2297913 - DNA, 25 bp, Homo sapien
tgaggggtacggtccctgtcagcca

SEQ ID NO: 2297914 - DNA, 25 bp, Homo sapien
cctgggtctgcgtgtggtactgagt

SEQ ID NO: 2297915 - DNA, 25 bp, Homo sapien
tgtggtactgagtggtatgcagggt

SEQ ID NO: 2297916 - DNA, 25 bp, Homo sapien
tgaagagagcgtctgtggatggtcc

SEQ ID NO: 2297917 - DNA, 25 bp, Homo sapien
gctgaagagagcgtctgtggatggt

SEQ ID NO: 2297918 - DNA, 25 bp, Homo sapien
caatgctaatccatgggcccatggg

SEQ ID NO: 2297919 - DNA, 25 bp, Homo sapien
catctcctgcacgactcagcaggga

SEQ ID NO: 2297920 - DNA, 25 bp, Homo sapien
gcccaggatagacagagcatttcag

SEQ ID NO: 2297921 - DNA, 25 bp, Homo sapien
tcagaggcaatgctaatccatgggc

SEQ ID NO: 2297922 - DNA, 25 bp, Homo sapien
ctggcttcccagccgtgcattcagt

SEQ ID NO: 2297923 - DNA, 25 bp, Homo sapien
gctggcttcccagccgtgcattcag

SEQ ID NO: 2297924 - DNA, 25 bp, Homo sapien
accaggaagatgacgagcaacaggc

SEQ ID NO: 2297925 - DNA, 25 bp, Homo sapien
aaccaggaagatgacgagcaacagg

SEQ ID NO: 2297926 - DNA, 25 bp, Homo sapien
tgcccgtagttctcagccagagtcc

SEQ ID NO: 2297927 - DNA, 25 bp, Homo sapien
tcggtccactgaggcggtgatctgc

SEQ ID NO: 2297928 - DNA, 25 bp, Homo sapien
gccagagtccggttcaagtgctgct

SEQ ID NO: 2297929 - DNA, 25 bp, Homo sapien
atcctgctggagtcggtccactgag

SEQ ID NO: 2297930 - DNA, 25 bp, Homo sapien
cacggatataagcagcctggagagg

SEQ ID NO: 2297931 - DNA, 25 bp, Homo sapien
gccccacggatataagcagcctgga

SEQ ID NO: 2297932 - DNA, 25 bp, Homo sapien
cccacggatataagcagcctggaga

SEQ ID NO: 2297933 - DNA, 25 bp, Homo sapien
ggcagccccacggatataagcagcc

SEQ ID NO: 2297934 - DNA, 25 bp, Homo sapien
gcccagtgagtggagtgcacactta

SEQ ID NO: 2297935 - DNA, 25 bp, Homo sapien
tgtcccgggccactatttcagagaa

SEQ ID NO: 2297936 - DNA, 25 bp, Homo sapien
cacacttagttttgcacagggctgg

SEQ ID NO: 2297937 - DNA, 25 bp, Homo sapien
tcctggtcctgagctaagcccatgg

SEQ ID NO: 2297938 - DNA, 25 bp, Homo sapien
ggcctcccgcaacaggatgtacgtg

SEQ ID NO: 2297939 - DNA, 25 bp, Homo sapien
tcccgcaacaggatgtacgtgctgt

SEQ ID NO: 2297940 - DNA, 25 bp, Homo sapien
cgcaacaggatgtacgtgctgtgct

SEQ ID NO: 2297941 - DNA, 25 bp, Homo sapien
acaggatgtacgtgctgtgctgcca

SEQ ID NO: 2297942 - DNA, 25 bp, Homo sapien
ccccaacttgagcttgggtgctcac

SEQ ID NO: 2297943 - DNA, 25 bp, Homo sapien
gggcatgccatggtgtcctatactc

SEQ ID NO: 2297944 - DNA, 25 bp, Homo sapien
ggtgtcctatactctccggtatgag

SEQ ID NO: 2297945 - DNA, 25 bp, Homo sapien
tatactctccggtatgagctgcttg

SEQ ID NO: 2297946 - DNA, 25 bp, Homo sapien
tctccggtatgagctgcttgtccca

SEQ ID NO: 2297947 - DNA, 25 bp, Homo sapien
agcaggtggtcggccaggaactgct

SEQ ID NO: 2297948 - DNA, 25 bp, Homo sapien
ataagcagcaggtggtcggccagga

SEQ ID NO: 2297949 - DNA, 25 bp, Homo sapien
cagcaggtggtcggccaggaactgc

SEQ ID NO: 2297950 - DNA, 25 bp, Homo sapien
aagcagcaggtggtcggccaggaac

SEQ ID NO: 2297951 - DNA, 25 bp, Homo sapien
gaagcaggcgtgttcgtgagctggg

SEQ ID NO: 2297952 - DNA, 25 bp, Homo sapien
tcggacccttgactagagtaaccca

SEQ ID NO: 2297953 - DNA, 25 bp, Homo sapien
actcagctcctgctgagcggaagca

SEQ ID NO: 2297954 - DNA, 25 bp, Homo sapien
ctagagtaacccaagagtgtcaccc

SEQ ID NO: 2297955 - DNA, 25 bp, Homo sapien
cctctggtgcaagcagcaggtgaga

SEQ ID NO: 2297956 - DNA, 25 bp, Homo sapien
ttagtaaaaatgccgctggagcctc

SEQ ID NO: 2297957 - DNA, 25 bp, Homo sapien
aatgccgctggagcctctggtgcaa

SEQ ID NO: 2297958 - DNA, 25 bp, Homo sapien
agcaggtgagaaccatcccgcagat

SEQ ID NO: 2297959 - DNA, 25 bp, Homo sapien
gaaaggatcatttccctgcccagga

SEQ ID NO: 2297960 - DNA, 25 bp, Homo sapien
tccagaaacagcaaggtcagggctt

SEQ ID NO: 2297961 - DNA, 25 bp, Homo sapien
tcaggcactcggtggattcgcagga

SEQ ID NO: 2297962 - DNA, 25 bp, Homo sapien
cacagaagctatggtctcaggcact

SEQ ID NO: 2297963 - DNA, 25 bp, Homo sapien
ggaaaaagctctgtccactctagga

SEQ ID NO: 2297964 - DNA, 25 bp, Homo sapien
cagctccgactttgcagggttgcga

SEQ ID NO: 2297965 - DNA, 25 bp, Homo sapien
aaagtgaggttcaggcagatgcccc

SEQ ID NO: 2297966 - DNA, 25 bp, Homo sapien
tgaatttgcattggcaaccccaggg

SEQ ID NO: 2297967 - DNA, 25 bp, Homo sapien
tataccctcagtggatgtgagcccg

SEQ ID NO: 2297968 - DNA, 25 bp, Homo sapien
cacctcggcaggaagaacatggctc

SEQ ID NO: 2297969 - DNA, 25 bp, Homo sapien
tgatgctgctttcctagggccctgg

SEQ ID NO: 2297970 - DNA, 25 bp, Homo sapien
ggatgtaaacacctctggccatgca

SEQ ID NO: 2297971 - DNA, 25 bp, Homo sapien
ggcgatccaagagtcctccagggaa

SEQ ID NO: 2297972 - DNA, 25 bp, Homo sapien
gaagctgggcttccacctagatcag

SEQ ID NO: 2297973 - DNA, 25 bp, Homo sapien
gccaacatgtagcaggttctcccaa

SEQ ID NO: 2297974 - DNA, 25 bp, Homo sapien
tggaataacggctggcacttgcaca

SEQ ID NO: 2297975 - DNA, 25 bp, Homo sapien
tacttccttttagctctggactggg

SEQ ID NO: 2297976 - DNA, 25 bp, Homo sapien
tcagctggtccacggtggagaaacc

SEQ ID NO: 2297977 - DNA, 25 bp, Homo sapien
tgcagtaggagtgtgtgtctcaaca

SEQ ID NO: 2297978 - DNA, 25 bp, Homo sapien
tggcgcctgcagtggtaagagctca

SEQ ID NO: 2297979 - DNA, 25 bp, Homo sapien
gaggaaggaggacggacatctcaga

SEQ ID NO: 2297980 - DNA, 25 bp, Homo sapien
aagaggaaggaggacggacatctca

SEQ ID NO: 2297981 - DNA, 25 bp, Homo sapien
aaggaggacggacatctcagatcat

SEQ ID NO: 2297982 - DNA, 25 bp, Homo sapien
ggaaggaggacggacatctcagatc

SEQ ID NO: 2297983 - DNA, 25 bp, Homo sapien
aggctcctgcgtgtcccggatttcc

SEQ ID NO: 2297984 - DNA, 25 bp, Homo sapien
actgaggctcctgcgtgtcccggat

SEQ ID NO: 2297985 - DNA, 25 bp, Homo sapien
tgaggctcctgcgtgtcccggattt

SEQ ID NO: 2297986 - DNA, 25 bp, Homo sapien
cactgaggctcctgcgtgtcccgga

SEQ ID NO: 2297987 - DNA, 25 bp, Homo sapien
tgatcgcaggtaggatggaggaggc

SEQ ID NO: 2297988 - DNA, 25 bp, Homo sapien
gcacctgcctggtgaggtgagacta

SEQ ID NO: 2297989 - DNA, 25 bp, Homo sapien
tatggtcagattcacggaggcatct

SEQ ID NO: 2297990 - DNA, 25 bp, Homo sapien
tgtagtaataaagttgatcgcaggt

SEQ ID NO: 2297991 - DNA, 25 bp, Homo sapien
gtgtagagaacaggcattcttggcc

SEQ ID NO: 2297992 - DNA, 25 bp, Homo sapien
ctgtgtagagaacaggcattcttgg

SEQ ID NO: 2297993 - DNA, 25 bp, Homo sapien
tgtgtagagaacaggcattcttggc

SEQ ID NO: 2297994 - DNA, 25 bp, Homo sapien
gtagagaacaggcattcttggccct

SEQ ID NO: 2297995 - DNA, 25 bp, Homo sapien
tgcattgctacagttaaaccacagg

SEQ ID NO: 2297996 - DNA, 25 bp, Homo sapien
catccccagagtcggtaaacaaaca

SEQ ID NO: 2297997 - DNA, 25 bp, Homo sapien
cagcactctttccagggtgtgcagg

SEQ ID NO: 2297998 - DNA, 25 bp, Homo sapien
aggtgcagcactctttccagggtgt

SEQ ID NO: 2297999 - DNA, 25 bp, Homo sapien
gacaagccctcacagcacttgggcg

SEQ ID NO: 2298000 - DNA, 25 bp, Homo sapien
ctcacagcacttgggcggacatcat

SEQ ID NO: 2298001 - DNA, 25 bp, Homo sapien
gcacttgggcggacatcatttacca

SEQ ID NO: 2298002 - DNA, 25 bp, Homo sapien
gccctcacagcacttgggcggacat

SEQ ID NO: 2298003 - DNA, 25 bp, Homo sapien
cttcccttagggctgcaaggctcct

SEQ ID NO: 2298004 - DNA, 25 bp, Homo sapien
cccttagggctgcaaggctcctcat

SEQ ID NO: 2298005 - DNA, 25 bp, Homo sapien
ttagggctgcaaggctcctcatctc

SEQ ID NO: 2298006 - DNA, 25 bp, Homo sapien
ggctgcaaggctcctcatctcccct

SEQ ID NO: 2298007 - DNA, 25 bp, Homo sapien
acggtgtagccaagggacatctgga

SEQ ID NO: 2298008 - DNA, 25 bp, Homo sapien
catctggagggtgacactctttgct

SEQ ID NO: 2298009 - DNA, 25 bp, Homo sapien
ggccacggtgtagccaagggacatc

SEQ ID NO: 2298010 - DNA, 25 bp, Homo sapien
ccaagggacatctggagggtgacac

SEQ ID NO: 2298011 - DNA, 25 bp, Homo sapien
gggttggcactcgtccacttgcatt

SEQ ID NO: 2298012 - DNA, 25 bp, Homo sapien
ttggcactcgtccacttgcatttct

SEQ ID NO: 2298013 - DNA, 25 bp, Homo sapien
ggttggcactcgtccacttgcattt

SEQ ID NO: 2298014 - DNA, 25 bp, Homo sapien
gttggcactcgtccacttgcatttc

SEQ ID NO: 2298015 - DNA, 25 bp, Homo sapien
ggagctcatacccgtctagatccat

SEQ ID NO: 2298016 - DNA, 25 bp, Homo sapien
caggagctcatacccgtctagatcc

SEQ ID NO: 2298017 - DNA, 25 bp, Homo sapien
ccaggagctcatacccgtctagatc

SEQ ID NO: 2298018 - DNA, 25 bp, Homo sapien
agcaccaaggacgaagcagaggcca

SEQ ID NO: 2298019 - DNA, 25 bp, Homo sapien
tcccagaagcagtaaacttcctgct

SEQ ID NO: 2298020 - DNA, 25 bp, Homo sapien
ctgcctgaagatgcactgctgctgc

SEQ ID NO: 2298021 - DNA, 25 bp, Homo sapien
caggaggccttctgcaggactccca

SEQ ID NO: 2298022 - DNA, 25 bp, Homo sapien
aacgttcaagaaacacaacacccag

SEQ ID NO: 2298023 - DNA, 25 bp, Homo sapien
cagatgaaaggaaacgttcaagaaa

SEQ ID NO: 2298024 - DNA, 25 bp, Homo sapien
ctacagatgaaaggaaacgttcaag

SEQ ID NO: 2298025 - DNA, 25 bp, Homo sapien
tgaaaggaaacgttcaagaaacaca

SEQ ID NO: 2298026 - DNA, 25 bp, Homo sapien
aaaatgccagaagtcactaccaagg

SEQ ID NO: 2298027 - DNA, 25 bp, Homo sapien
ccaaggatcgatatacatttaggaa

SEQ ID NO: 2298028 - DNA, 25 bp, Homo sapien
cagaagtcactaccaaggatcgata

SEQ ID NO: 2298029 - DNA, 25 bp, Homo sapien
cactaccaaggatcgatatacattt

SEQ ID NO: 2298030 - DNA, 25 bp, Homo sapien
tgactgtgaatcctaaagattcatc

SEQ ID NO: 2298031 - DNA, 25 bp, Homo sapien
tgcagtcacgggtgttgctttcaca

SEQ ID NO: 2298032 - DNA, 25 bp, Homo sapien
tggatgttcacccatttgactgtga

SEQ ID NO: 2298033 - DNA, 25 bp, Homo sapien
tggatctggtggatgttcacccatt

SEQ ID NO: 2298034 - DNA, 25 bp, Homo sapien
tcaggagaggtctcagaatgagact

SEQ ID NO: 2298035 - DNA, 25 bp, Homo sapien
gaatgttgtaagtgcttttcccagg

SEQ ID NO: 2298036 - DNA, 25 bp, Homo sapien
cccaggagagccagatagccatggt

SEQ ID NO: 2298037 - DNA, 25 bp, Homo sapien
gaagtgaagatgaacaatgacacag

SEQ ID NO: 2298038 - DNA, 25 bp, Homo sapien
ctgaggataaagatggagagaggca

SEQ ID NO: 2298039 - DNA, 25 bp, Homo sapien
ggataaagatggagagaggcactga

SEQ ID NO: 2298040 - DNA, 25 bp, Homo sapien
gataaagatggagagaggcactgag

SEQ ID NO: 2298041 - DNA, 25 bp, Homo sapien
gaggataaagatggagagaggcact

SEQ ID NO: 2298042 - DNA, 25 bp, Homo sapien
gggatcttcccttaatgccttctgg

SEQ ID NO: 2298043 - DNA, 25 bp, Homo sapien
atcttcccttaatgccttctggggt

SEQ ID NO: 2298044 - DNA, 25 bp, Homo sapien
ctgggatcttcccttaatgccttct

SEQ ID NO: 2298045 - DNA, 25 bp, Homo sapien
ggatcttcccttaatgccttctggg

SEQ ID NO: 2298046 - DNA, 25 bp, Homo sapien
ccctagtatagatactgacagccaa

SEQ ID NO: 2298047 - DNA, 25 bp, Homo sapien
cctagtatagatactgacagccaac

SEQ ID NO: 2298048 - DNA, 25 bp, Homo sapien
cactgtatgtatcccacagcccacc

SEQ ID NO: 2298049 - DNA, 25 bp, Homo sapien
tgacgggggctatagtcagcagcac

SEQ ID NO: 2298050 - DNA, 25 bp, Homo sapien
atatacccacgagagtgtggcaacc

SEQ ID NO: 2298051 - DNA, 25 bp, Homo sapien
cctatgctctcatccgtaatccaaa

SEQ ID NO: 2298052 - DNA, 25 bp, Homo sapien
ctgcaatgggacaggcacctgcaaa

SEQ ID NO: 2298053 - DNA, 25 bp, Homo sapien
aatgggacaggcacctgcaaagcct

SEQ ID NO: 2298054 - DNA, 25 bp, Homo sapien
caatgggacaggcacctgcaaagcc

SEQ ID NO: 2298055 - DNA, 25 bp, Homo sapien
cctgcaaagcctcagcatcatttgc

SEQ ID NO: 2298056 - DNA, 25 bp, Homo sapien
attatctggataatcctctggtgga

SEQ ID NO: 2298057 - DNA, 25 bp, Homo sapien
atctggataatcctctggtggaggg

SEQ ID NO: 2298058 - DNA, 25 bp, Homo sapien
gcaactcagggtactgtgctggtac

SEQ ID NO: 2298059 - DNA, 25 bp, Homo sapien
cagggtactgtgctggtactgcagc

SEQ ID NO: 2298060 - DNA, 25 bp, Homo sapien
ctaggtgatgcggttaaaggaggaa

SEQ ID NO: 2298061 - DNA, 25 bp, Homo sapien
taggtgatgcggttaaaggaggaaa

SEQ ID NO: 2298062 - DNA, 25 bp, Homo sapien
agggcgagtaagtaatacccttcag

SEQ ID NO: 2298063 - DNA, 25 bp, Homo sapien
ctgcttccgacttcggcagtttgga

SEQ ID NO: 2298064 - DNA, 25 bp, Homo sapien
gagggcgagtaagtaatacccttca

SEQ ID NO: 2298065 - DNA, 25 bp, Homo sapien
ttccgacttcggcagtttggagagg

SEQ ID NO: 2298066 - DNA, 25 bp, Homo sapien
gccaggccccgggaatcagggcaaa

SEQ ID NO: 2298067 - DNA, 25 bp, Homo sapien
ctgaaagccaggccccgggaatcag

SEQ ID NO: 2298068 - DNA, 25 bp, Homo sapien
gccccgggaatcagggcaaacgcca

SEQ ID NO: 2298069 - DNA, 25 bp, Homo sapien
cgggaatcagggcaaacgccactga

SEQ ID NO: 2298070 - DNA, 25 bp, Homo sapien
cttcttcgccggcagaattgctacg

SEQ ID NO: 2298071 - DNA, 25 bp, Homo sapien
taaggagctctgctgccacacagca

SEQ ID NO: 2298072 - DNA, 25 bp, Homo sapien
ctctgctgccacacagcactgcgct

SEQ ID NO: 2298073 - DNA, 25 bp, Homo sapien
tgctgccacacagcactgcgctcac

SEQ ID NO: 2298074 - DNA, 25 bp, Homo sapien
ctaaggagctctgctgccacacagc

SEQ ID NO: 2298075 - DNA, 25 bp, Homo sapien
agtctgcccttcctcgtcccgctgc

SEQ ID NO: 2298076 - DNA, 25 bp, Homo sapien
cttcctcgtcccgctgctcctcgtc

SEQ ID NO: 2298077 - DNA, 25 bp, Homo sapien
gcccttcctcgtcccgctgctcctc

SEQ ID NO: 2298078 - DNA, 25 bp, Homo sapien
cagtctgcccttcctcgtcccgctg

SEQ ID NO: 2298079 - DNA, 25 bp, Homo sapien
gaacagacgcccagtttgcgatttc

SEQ ID NO: 2298080 - DNA, 25 bp, Homo sapien
acagacgcccagtttgcgatttcac

SEQ ID NO: 2298081 - DNA, 25 bp, Homo sapien
ggaacagacgcccagtttgcgattt

SEQ ID NO: 2298082 - DNA, 25 bp, Homo sapien
gccggaacagacgcccagtttgcga

SEQ ID NO: 2298083 - DNA, 25 bp, Homo sapien
caggggttcccgcttgtcaatcacg

SEQ ID NO: 2298084 - DNA, 25 bp, Homo sapien
ggggttcccgcttgtcaatcacgct

SEQ ID NO: 2298085 - DNA, 25 bp, Homo sapien
gggttcccgcttgtcaatcacgctg

SEQ ID NO: 2298086 - DNA, 25 bp, Homo sapien
ggttcccgcttgtcaatcacgctgg

SEQ ID NO: 2298087 - DNA, 25 bp, Homo sapien
aaagctcaacacagctgggccaaat

SEQ ID NO: 2298088 - DNA, 25 bp, Homo sapien
tgttgcagtgtcttatctacgtaag

SEQ ID NO: 2298089 - DNA, 25 bp, Homo sapien
cacagctgggccaaatctaagaccc

SEQ ID NO: 2298090 - DNA, 25 bp, Homo sapien
tatctacgtaagataatccatgaaa

SEQ ID NO: 2298091 - DNA, 25 bp, Homo sapien
tcagtttccgtaagagacaggtggg

SEQ ID NO: 2298092 - DNA, 25 bp, Homo sapien
cagctgtatccttgctaaagttagc

SEQ ID NO: 2298093 - DNA, 25 bp, Homo sapien
gacaggtgggttacaagcgctcact

SEQ ID NO: 2298094 - DNA, 25 bp, Homo sapien
cagctaactttatcggctctgggct

SEQ ID NO: 2298095 - DNA, 25 bp, Homo sapien
gcactgctgttaagccagggccaca

SEQ ID NO: 2298096 - DNA, 25 bp, Homo sapien
tatgacacttccgtcaacaatctgg

SEQ ID NO: 2298097 - DNA, 25 bp, Homo sapien
tggaggatggcctggcccataatac

SEQ ID NO: 2298098 - DNA, 25 bp, Homo sapien
aagcttttccgcactgctgttaagc

SEQ ID NO: 2298099 - DNA, 25 bp, Homo sapien
agaactagcattattttaccctctg

SEQ ID NO: 2298100 - DNA, 25 bp, Homo sapien
tctgtcttcacagaggtatatttgg

SEQ ID NO: 2298101 - DNA, 25 bp, Homo sapien
cagaggtatatttggctgttttgtt

SEQ ID NO: 2298102 - DNA, 25 bp, Homo sapien
tatatttggctgttttgttagacat

SEQ ID NO: 2298103 - DNA, 25 bp, Homo sapien
tctccaagctctttgccaggtctgt

SEQ ID NO: 2298104 - DNA, 25 bp, Homo sapien
tccaagctctttgccaggtctgtct

SEQ ID NO: 2298105 - DNA, 25 bp, Homo sapien
aagctctttgccaggtctgtctctt

SEQ ID NO: 2298106 - DNA, 25 bp, Homo sapien
gctatctggaggcctgactcttcca

SEQ ID NO: 2298107 - DNA, 25 bp, Homo sapien
tagcggcatttaacggctgtagcag

SEQ ID NO: 2298108 - DNA, 25 bp, Homo sapien
gaatcacgcactccatctagcggca

SEQ ID NO: 2298109 - DNA, 25 bp, Homo sapien
tccacgtgaggccataccagaatca

SEQ ID NO: 2298110 - DNA, 25 bp, Homo sapien
tgcatttcaccgtggctccgatacc

SEQ ID NO: 2298111 - DNA, 25 bp, Homo sapien
caaccttctgtgtttcattagccat

SEQ ID NO: 2298112 - DNA, 25 bp, Homo sapien
ctggatggaatagggtgtgaaggga

SEQ ID NO: 2298113 - DNA, 25 bp, Homo sapien
gcaccaaccttctgtgtttcattag

SEQ ID NO: 2298114 - DNA, 25 bp, Homo sapien
ggatggcaccaaccttctgtgtttc

SEQ ID NO: 2298115 - DNA, 25 bp, Homo sapien
ccaaaacccggtacagctctgccat

SEQ ID NO: 2298116 - DNA, 25 bp, Homo sapien
ccagcctccaaaacccggtacagct

SEQ ID NO: 2298117 - DNA, 25 bp, Homo sapien
gttggactctcaaatatcccaatct

SEQ ID NO: 2298118 - DNA, 25 bp, Homo sapien
tgccagttggactctcaaatatccc

SEQ ID NO: 2298119 - DNA, 25 bp, Homo sapien
aacatcgacaattaaaggctgagca

SEQ ID NO: 2298120 - DNA, 25 bp, Homo sapien
gaagatgaagctatagaaccagaaa

SEQ ID NO: 2298121 - DNA, 25 bp, Homo sapien
gctatagaaccagaaacatcgacaa

SEQ ID NO: 2298122 - DNA, 25 bp, Homo sapien
gaaccagaaacatcgacaattaaag

SEQ ID NO: 2298123 - DNA, 25 bp, Homo sapien
agacacaatggttagaaagccagtg

SEQ ID NO: 2298124 - DNA, 25 bp, Homo sapien
agccagtgccctccatttgaaagtg

SEQ ID NO: 2298125 - DNA, 25 bp, Homo sapien
ccagtgccctccatttgaaagtgag

SEQ ID NO: 2298126 - DNA, 25 bp, Homo sapien
ggagacacaatggttagaaagccag

SEQ ID NO: 2298127 - DNA, 25 bp, Homo sapien
gatgagactactaggacgggaccca

SEQ ID NO: 2298128 - DNA, 25 bp, Homo sapien
agactactaggacgggacccagcct

SEQ ID NO: 2298129 - DNA, 25 bp, Homo sapien
gttaagatgagactactaggacggg

SEQ ID NO: 2298130 - DNA, 25 bp, Homo sapien
agggctaatatccttattggaaagg

SEQ ID NO: 2298131 - DNA, 25 bp, Homo sapien
cttcacgcttcttctgttcaaagtc

SEQ ID NO: 2298132 - DNA, 25 bp, Homo sapien
aggagtcgtgcctcttcttcacgct

SEQ ID NO: 2298133 - DNA, 25 bp, Homo sapien
tctcatcatgtaaggggccagttcc

SEQ ID NO: 2298134 - DNA, 25 bp, Homo sapien
gacacagggattcatctttctcatc

SEQ ID NO: 2298135 - DNA, 25 bp, Homo sapien
tctgcacaaactgagtaacccaggc

SEQ ID NO: 2298136 - DNA, 25 bp, Homo sapien
ttctgcacaaactgagtaacccagg

SEQ ID NO: 2298137 - DNA, 25 bp, Homo sapien
gatccatttgcagccattgaaccat

SEQ ID NO: 2298138 - DNA, 25 bp, Homo sapien
tcctttcccaggtgagtaataaatg

SEQ ID NO: 2298139 - DNA, 25 bp, Homo sapien
agttccttatgtggagaaggcctgc

SEQ ID NO: 2298140 - DNA, 25 bp, Homo sapien
tgggcaccaacagttccttatgtgg

SEQ ID NO: 2298141 - DNA, 25 bp, Homo sapien
caggcgcttggctgcatacttgagc

SEQ ID NO: 2298142 - DNA, 25 bp, Homo sapien
gcagctgctgcaggcgttcttctcg

SEQ ID NO: 2298143 - DNA, 25 bp, Homo sapien
tattcggcgaggaccagctcctcct

SEQ ID NO: 2298144 - DNA, 25 bp, Homo sapien
tccgggcctgtctctagcatctccc

SEQ ID NO: 2298145 - DNA, 25 bp, Homo sapien
ggcctgtctctagcatctccctgct

SEQ ID NO: 2298146 - DNA, 25 bp, Homo sapien
ctcgtattcggcgaggaccagctcc

SEQ ID NO: 2298147 - DNA, 25 bp, Homo sapien
ctgctcgccacctttttctcctcat

SEQ ID NO: 2298148 - DNA, 25 bp, Homo sapien
tgctcgccacctttttctcctcatc

SEQ ID NO: 2298149 - DNA, 25 bp, Homo sapien
ctcgccacctttttctcctcatcac

SEQ ID NO: 2298150 - DNA, 25 bp, Homo sapien
gctcgccacctttttctcctcatca

SEQ ID NO: 2298151 - DNA, 25 bp, Homo sapien
gcctggggcagggtagtgctaccgc

SEQ ID NO: 2298152 - DNA, 25 bp, Homo sapien
ggcagggtagtgctaccgcctctgt

SEQ ID NO: 2298153 - DNA, 25 bp, Homo sapien
gggcagggtagtgctaccgcctctg

SEQ ID NO: 2298154 - DNA, 25 bp, Homo sapien
agggtagtgctaccgcctctgtctc

SEQ ID NO: 2298155 - DNA, 25 bp, Homo sapien
agggtgtttggccacagcacgttgc

SEQ ID NO: 2298156 - DNA, 25 bp, Homo sapien
tgcgctggaggaagttcagggcagc

SEQ ID NO: 2298157 - DNA, 25 bp, Homo sapien
gcatgagcaaatcctcagacaggac

SEQ ID NO: 2298158 - DNA, 25 bp, Homo sapien
ggccacagcacgttgcatgagcaaa

SEQ ID NO: 2298159 - DNA, 25 bp, Homo sapien
aagttctctgccttgtccccacggg

SEQ ID NO: 2298160 - DNA, 25 bp, Homo sapien
ccactcaagttctctgccttgtccc

SEQ ID NO: 2298161 - DNA, 25 bp, Homo sapien
caagttctctgccttgtccccacgg

SEQ ID NO: 2298162 - DNA, 25 bp, Homo sapien
actcaagttctctgccttgtcccca

SEQ ID NO: 2298163 - DNA, 25 bp, Homo sapien
attcccagcaatgggttccaccaag

SEQ ID NO: 2298164 - DNA, 25 bp, Homo sapien
tgggttccaccaaggtagcaggtgc

SEQ ID NO: 2298165 - DNA, 25 bp, Homo sapien
gggttccaccaaggtagcaggtgct

SEQ ID NO: 2298166 - DNA, 25 bp, Homo sapien
ggttccaccaaggtagcaggtgctg

SEQ ID NO: 2298167 - DNA, 25 bp, Homo sapien
tcttccctcagcaaactcagcaaaa

SEQ ID NO: 2298168 - DNA, 25 bp, Homo sapien
agagagaacagaaaacagtcttccc

SEQ ID NO: 2298169 - DNA, 25 bp, Homo sapien
ttccctcagcaaactcagcaaaacg

SEQ ID NO: 2298170 - DNA, 25 bp, Homo sapien
gagaacagaaaacagtcttccctca

SEQ ID NO: 2298171 - DNA, 25 bp, Homo sapien
tatgtgttcttcctccaggtcatcc

SEQ ID NO: 2298172 - DNA, 25 bp, Homo sapien
caggtcatcctcatcctcatccact

SEQ ID NO: 2298173 - DNA, 25 bp, Homo sapien
ctccaggtcatcctcatcctcatcc

SEQ ID NO: 2298174 - DNA, 25 bp, Homo sapien
ttatgtgttcttcctccaggtcatc

SEQ ID NO: 2298175 - DNA, 25 bp, Homo sapien
cagcaccagctgaggacacttgtgt

SEQ ID NO: 2298176 - DNA, 25 bp, Homo sapien
gcaccagctgaggacacttgtgtta

SEQ ID NO: 2298177 - DNA, 25 bp, Homo sapien
caccagctgaggacacttgtgttac

SEQ ID NO: 2298178 - DNA, 25 bp, Homo sapien
cacagcaccagctgaggacacttgt

SEQ ID NO: 2298179 - DNA, 25 bp, Homo sapien
gggagaccagccgaacatccttgcc

SEQ ID NO: 2298180 - DNA, 25 bp, Homo sapien
tcttcttcacctcatgcacaaactg

SEQ ID NO: 2298181 - DNA, 25 bp, Homo sapien
ttcacctcatgcacaaactgggcca

SEQ ID NO: 2298182 - DNA, 25 bp, Homo sapien
ccagccgaacatccttgccaaaggg

SEQ ID NO: 2298183 - DNA, 25 bp, Homo sapien
gcccctggtggaaatactggctact

SEQ ID NO: 2298184 - DNA, 25 bp, Homo sapien
tggtgccagctaaatgacatcctac

SEQ ID NO: 2298185 - DNA, 25 bp, Homo sapien
agaaagaggcaaaaagatggtgcca

SEQ ID NO: 2298186 - DNA, 25 bp, Homo sapien
ccaaggcctggacgagcaggacaaa

SEQ ID NO: 2298187 - DNA, 25 bp, Homo sapien
tgataagctgcacagaacctaggct

SEQ ID NO: 2298188 - DNA, 25 bp, Homo sapien
ttgataagctgcacagaacctaggc

SEQ ID NO: 2298189 - DNA, 25 bp, Homo sapien
gataagctgcacagaacctaggctt

SEQ ID NO: 2298190 - DNA, 25 bp, Homo sapien
cggctacaccatggtcccagtggct

SEQ ID NO: 2298191 - DNA, 25 bp, Homo sapien
gctacaccatggtcccagtggctac

SEQ ID NO: 2298192 - DNA, 25 bp, Homo sapien
ctgcggctacaccatggtcccagtg

SEQ ID NO: 2298193 - DNA, 25 bp, Homo sapien
tgcggctacaccatggtcccagtgg

SEQ ID NO: 2298194 - DNA, 25 bp, Homo sapien
gccaaggattcggaccagacactga

SEQ ID NO: 2298195 - DNA, 25 bp, Homo sapien
tactgcctactgtggtctcatcgga

SEQ ID NO: 2298196 - DNA, 25 bp, Homo sapien
tctataagaccctcccaagtactgc

SEQ ID NO: 2298197 - DNA, 25 bp, Homo sapien
tctgttctccagaaagagcccgtaa

SEQ ID NO: 2298198 - DNA, 25 bp, Homo sapien
ctctttggcttctcctcctcagctc

SEQ ID NO: 2298199 - DNA, 25 bp, Homo sapien
ctgcctcctcctctttggcttctcc

SEQ ID NO: 2298200 - DNA, 25 bp, Homo sapien
tcctgcctcctcctctttggcttct

SEQ ID NO: 2298201 - DNA, 25 bp, Homo sapien
ctcctctttggcttctcctcctcag

SEQ ID NO: 2298202 - DNA, 25 bp, Homo sapien
tcatcccggagaaggcccatctgct

SEQ ID NO: 2298203 - DNA, 25 bp, Homo sapien
ccatctgctcgtggttgtagaaggg

SEQ ID NO: 2298204 - DNA, 25 bp, Homo sapien
gaaggcccatctgctcgtggttgta

SEQ ID NO: 2298205 - DNA, 25 bp, Homo sapien
tgccagggcctcatcccggagaagg

SEQ ID NO: 2298206 - DNA, 25 bp, Homo sapien
gcatctgatagggcagcaccaccag

SEQ ID NO: 2298207 - DNA, 25 bp, Homo sapien
cgatcaggttgtgcgcctcgtcgat

SEQ ID NO: 2298208 - DNA, 25 bp, Homo sapien
tgggagccgctgacctccacgctgt

SEQ ID NO: 2298209 - DNA, 25 bp, Homo sapien
cctgccgagtggccgcatgcagcag

SEQ ID NO: 2298210 - DNA, 25 bp, Homo sapien
gcagctgggaatgggcctggcagag

SEQ ID NO: 2298211 - DNA, 25 bp, Homo sapien
cgctccacgtactgcagcagctggg

SEQ ID NO: 2298212 - DNA, 25 bp, Homo sapien
ccgtatcgctccacgtactgcagca

SEQ ID NO: 2298213 - DNA, 25 bp, Homo sapien
atcgctccacgtactgcagcagctg

SEQ ID NO: 2298214 - DNA, 25 bp, Homo sapien
cacgaatttctccagcaaatacagg

SEQ ID NO: 2298215 - DNA, 25 bp, Homo sapien
cctagcacagccacgaatttctcca

SEQ ID NO: 2298216 - DNA, 25 bp, Homo sapien
agccacgaatttctccagcaaatac

SEQ ID NO: 2298217 - DNA, 25 bp, Homo sapien
aatttctccagcaaatacaggatct

SEQ ID NO: 2298218 - DNA, 25 bp, Homo sapien
ccagcgagttttgcaggcccggggt

SEQ ID NO: 2298219 - DNA, 25 bp, Homo sapien
agcgagttttgcaggcccggggtca

SEQ ID NO: 2298220 - DNA, 25 bp, Homo sapien
gcagcccagcgagttttgcaggccc

SEQ ID NO: 2298221 - DNA, 25 bp, Homo sapien
agcccagcgagttttgcaggcccgg

SEQ ID NO: 2298222 - DNA, 25 bp, Homo sapien
gcagccagaccaaggtatgcagggc

SEQ ID NO: 2298223 - DNA, 25 bp, Homo sapien
ttctccaggaggccgggacacagca

SEQ ID NO: 2298224 - DNA, 25 bp, Homo sapien
gtgcttgcacgtggaacccaaagcc

SEQ ID NO: 2298225 - DNA, 25 bp, Homo sapien
ccaaggtatgcagggcaccggagca

SEQ ID NO: 2298226 - DNA, 25 bp, Homo sapien
ctgtgacagactctgtgtattggga

SEQ ID NO: 2298227 - DNA, 25 bp, Homo sapien
tgacagactctgtgtattgggattt

SEQ ID NO: 2298228 - DNA, 25 bp, Homo sapien
gtattgggattttgcttaatgttcc

SEQ ID NO: 2298229 - DNA, 25 bp, Homo sapien
gactctgtgtattgggattttgctt

SEQ ID NO: 2298230 - DNA, 25 bp, Homo sapien
tgatgttgtcgatctggctctggaa

SEQ ID NO: 2298231 - DNA, 25 bp, Homo sapien
tgttgtcgatctggctctggaagag

SEQ ID NO: 2298232 - DNA, 25 bp, Homo sapien
cttgaacaggttgatgttgtcgatc

SEQ ID NO: 2298233 - DNA, 25 bp, Homo sapien
ggctctggaagagaaagtcgttgat

SEQ ID NO: 2298234 - DNA, 25 bp, Homo sapien
aggtggtgacaggaaggaaattgga

SEQ ID NO: 2298235 - DNA, 25 bp, Homo sapien
gaatgtggaaaggtggaaacctcta

SEQ ID NO: 2298236 - DNA, 25 bp, Homo sapien
gaaattggatgtggaatgtggaaag

SEQ ID NO: 2298237 - DNA, 25 bp, Homo sapien
tggtgacaggaaggaaattggatgt

SEQ ID NO: 2298238 - DNA, 25 bp, Homo sapien
gaacaaatcaacgtcctattcctgt

SEQ ID NO: 2298239 - DNA, 25 bp, Homo sapien
cacagaacaaatcaacgtcctattc

SEQ ID NO: 2298240 - DNA, 25 bp, Homo sapien
caacgtcctattcctgtccataagc

SEQ ID NO: 2298241 - DNA, 25 bp, Homo sapien
aatcaacgtcctattcctgtccata

SEQ ID NO: 2298242 - DNA, 25 bp, Homo sapien
tgctgatttgagttacgagcttggg

SEQ ID NO: 2298243 - DNA, 25 bp, Homo sapien
ccgggggcagtcactgttgctgatt

SEQ ID NO: 2298244 - DNA, 25 bp, Homo sapien
ttcatctggggagcgctgggtacac

SEQ ID NO: 2298245 - DNA, 25 bp, Homo sapien
ttcaggcggcagtggccgtgtttca

SEQ ID NO: 2298246 - DNA, 25 bp, Homo sapien
gctgatcatgctcttctcacagtat

SEQ ID NO: 2298247 - DNA, 25 bp, Homo sapien
tttctgctgatcatgctcttctcac

SEQ ID NO: 2298248 - DNA, 25 bp, Homo sapien
gatcatgctcttctcacagtatcgc

SEQ ID NO: 2298249 - DNA, 25 bp, Homo sapien
ctgctgatcatgctcttctcacagt

SEQ ID NO: 2298250 - DNA, 25 bp, Homo sapien
tgagaacactgctccgtaccgttca

SEQ ID NO: 2298251 - DNA, 25 bp, Homo sapien
acactgctccgtaccgttcagtgaa

SEQ ID NO: 2298252 - DNA, 25 bp, Homo sapien
tgaaacccagccagtttgggctgct

SEQ ID NO: 2298253 - DNA, 25 bp, Homo sapien
ggctctgcaggaattgctgaaaccc

SEQ ID NO: 2298254 - DNA, 25 bp, Homo sapien
gctggcctgactctcgtctgcaggg

SEQ ID NO: 2298255 - DNA, 25 bp, Homo sapien
ctgccgtcctggttggccgtagtga

SEQ ID NO: 2298256 - DNA, 25 bp, Homo sapien
accctgccgtcctggttggccgtag

SEQ ID NO: 2298257 - DNA, 25 bp, Homo sapien
tgaccctgccgtcctggttggccgt

SEQ ID NO: 2298258 - DNA, 25 bp, Homo sapien
agcccttcgatctcctcccatccac

SEQ ID NO: 2298259 - DNA, 25 bp, Homo sapien
gaagttcccaggatggaaggaaaga

SEQ ID NO: 2298260 - DNA, 25 bp, Homo sapien
aaagaatcctttcacgctgcggctc

SEQ ID NO: 2298261 - DNA, 25 bp, Homo sapien
cctgggaactgaacctggccaagaa

SEQ ID NO: 2298262 - DNA, 25 bp, Homo sapien
ggctcatagatgacaaaatcatgac

SEQ ID NO: 2298263 - DNA, 25 bp, Homo sapien
tagtccaaatcacaaggctcataga

SEQ ID NO: 2298264 - DNA, 25 bp, Homo sapien
gacaaaatcatgacccaaaccaaag

SEQ ID NO: 2298265 - DNA, 25 bp, Homo sapien
aaatagtccaaatcacaaggctcat

SEQ ID NO: 2298266 - DNA, 25 bp, Homo sapien
cagctggattcaggagcaaaaactt

SEQ ID NO: 2298267 - DNA, 25 bp, Homo sapien
tgcccggcattccttcaccacttgg

SEQ ID NO: 2298268 - DNA, 25 bp, Homo sapien
tcaggagcaaaaacttcagggtgct

SEQ ID NO: 2298269 - DNA, 25 bp, Homo sapien
gcaatgaccactgcccggcattcct

SEQ ID NO: 2298270 - DNA, 25 bp, Homo sapien
gcagctgctgccggaagtcagacac

SEQ ID NO: 2298271 - DNA, 25 bp, Homo sapien
ttccaccccggcacaggccagcagc

SEQ ID NO: 2298272 - DNA, 25 bp, Homo sapien
acaggaaaactccaccacgcgctca

SEQ ID NO: 2298273 - DNA, 25 bp, Homo sapien
ccagcagctgctgccggaagtcaga

SEQ ID NO: 2298274 - DNA, 25 bp, Homo sapien
ggccagaacctgacctctagcctgc

SEQ ID NO: 2298275 - DNA, 25 bp, Homo sapien
cccctgtgcctggtcgcagtatgag

SEQ ID NO: 2298276 - DNA, 25 bp, Homo sapien
gcagtatgaggtattacccacagaa

SEQ ID NO: 2298277 - DNA, 25 bp, Homo sapien
tatgaggtattacccacagaaaacg

SEQ ID NO: 2298278 - DNA, 25 bp, Homo sapien
tggagatgcaggtgtgctgcaagac

SEQ ID NO: 2298279 - DNA, 25 bp, Homo sapien
ggagatgcaggtgtgctgcaagaca

SEQ ID NO: 2298280 - DNA, 25 bp, Homo sapien
ctggagatgcaggtgtgctgcaaga

SEQ ID NO: 2298281 - DNA, 25 bp, Homo sapien
ctggtaagagccagggaggggccga

SEQ ID NO: 2298282 - DNA, 25 bp, Homo sapien
tggtaagagccagggaggggccgaa

SEQ ID NO: 2298283 - DNA, 25 bp, Homo sapien
tgcagatgacgaggggcaggatgtt

SEQ ID NO: 2298284 - DNA, 25 bp, Homo sapien
gcagatgacgaggggcaggatgttg

SEQ ID NO: 2298285 - DNA, 25 bp, Homo sapien
cagatgacgaggggcaggatgttgt

SEQ ID NO: 2298286 - DNA, 25 bp, Homo sapien
ctgcagatgacgaggggcaggatgt

SEQ ID NO: 2298287 - DNA, 25 bp, Homo sapien
ctctcttttctggaacgtgaattcc

SEQ ID NO: 2298288 - DNA, 25 bp, Homo sapien
gaggcagctctcttttctggaacgt

SEQ ID NO: 2298289 - DNA, 25 bp, Homo sapien
gaacgtgaattccagcggctggttg

SEQ ID NO: 2298290 - DNA, 25 bp, Homo sapien
ttccagcggctggttggagatcccg

SEQ ID NO: 2298291 - DNA, 25 bp, Homo sapien
gggcagatataaccaaagggcaaga

SEQ ID NO: 2298292 - DNA, 25 bp, Homo sapien
gcaggggcagatataaccaaagggc

SEQ ID NO: 2298293 - DNA, 25 bp, Homo sapien
ggcagatataaccaaagggcaagag

SEQ ID NO: 2298294 - DNA, 25 bp, Homo sapien
agatataaccaaagggcaagagagc

SEQ ID NO: 2298295 - DNA, 25 bp, Homo sapien
ccaggcacaccacaggagatgcccc

SEQ ID NO: 2298296 - DNA, 25 bp, Homo sapien
atgggcaccacaacgacaatcaggg

SEQ ID NO: 2298297 - DNA, 25 bp, Homo sapien
ctgatgggcaccacaacgacaatca

SEQ ID NO: 2298298 - DNA, 25 bp, Homo sapien
accacaggagatgcccccaagcccc

SEQ ID NO: 2298299 - DNA, 25 bp, Homo sapien
ggcctccctattgccctggcactga

SEQ ID NO: 2298300 - DNA, 25 bp, Homo sapien
ggggcctccctattgccctggcact

SEQ ID NO: 2298301 - DNA, 25 bp, Homo sapien
gggggcctccctattgccctggcac

SEQ ID NO: 2298302 - DNA, 25 bp, Homo sapien
gacacatgtcacagcactagcgtcc

SEQ ID NO: 2298303 - DNA, 25 bp, Homo sapien
ttcctggcagccagacggcccagca

SEQ ID NO: 2298304 - DNA, 25 bp, Homo sapien
tcccagtgggcatggacctggcgca

SEQ ID NO: 2298305 - DNA, 25 bp, Homo sapien
ttctcccagtgggcatggacctggc

SEQ ID NO: 2298306 - DNA, 25 bp, Homo sapien
cctggcagccagacggcccagcagg

SEQ ID NO: 2298307 - DNA, 25 bp, Homo sapien
gctcccaggaggactcagtggcact

SEQ ID NO: 2298308 - DNA, 25 bp, Homo sapien
tgtcctcacaagtgggaaggctgcc

SEQ ID NO: 2298309 - DNA, 25 bp, Homo sapien
ccgatgagcacgagagctcccagga

SEQ ID NO: 2298310 - DNA, 25 bp, Homo sapien
gggaaggctgccgacaggccactca

SEQ ID NO: 2298311 - DNA, 25 bp, Homo sapien
ctgctccacctggtgtgcgctctta

SEQ ID NO: 2298312 - DNA, 25 bp, Homo sapien
tggtgtgcgctcttaggttcctgga

SEQ ID NO: 2298313 - DNA, 25 bp, Homo sapien
gctccacctggtgtgcgctcttagg

SEQ ID NO: 2298314 - DNA, 25 bp, Homo sapien
tccacctggtgtgcgctcttaggtt

SEQ ID NO: 2298315 - DNA, 25 bp, Homo sapien
acctggcctctctcctggccacagg

SEQ ID NO: 2298316 - DNA, 25 bp, Homo sapien
gtcacctggcctctctcctggccac

SEQ ID NO: 2298317 - DNA, 25 bp, Homo sapien
cctggcctctctcctggccacaggc

SEQ ID NO: 2298318 - DNA, 25 bp, Homo sapien
ctgtcacctggcctctctcctggcc

SEQ ID NO: 2298319 - DNA, 25 bp, Homo sapien
gtcagagaagttgatcccttcactc

SEQ ID NO: 2298320 - DNA, 25 bp, Homo sapien
tcatctttcctccaaccacagagag

SEQ ID NO: 2298321 - DNA, 25 bp, Homo sapien
tttcctccaaccacagagaggagca

SEQ ID NO: 2298322 - DNA, 25 bp, Homo sapien
tcagagaagttgatcccttcactca

SEQ ID NO: 2298323 - DNA, 25 bp, Homo sapien
ctaatggcagcagagagcaggcagg

SEQ ID NO: 2298324 - DNA, 25 bp, Homo sapien
cagcagagagcaggcaggggcccag

SEQ ID NO: 2298325 - DNA, 25 bp, Homo sapien
atggcagcagagagcaggcaggggc

SEQ ID NO: 2298326 - DNA, 25 bp, Homo sapien
ggcagcagagagcaggcaggggccc

SEQ ID NO: 2298327 - DNA, 25 bp, Homo sapien
ggctgagagatcccgtctaggccaa

SEQ ID NO: 2298328 - DNA, 25 bp, Homo sapien
ctgagagatcccgtctaggccaatt

SEQ ID NO: 2298329 - DNA, 25 bp, Homo sapien
tgagagatcccgtctaggccaattg

SEQ ID NO: 2298330 - DNA, 25 bp, Homo sapien
gagagatcccgtctaggccaattga

SEQ ID NO: 2298331 - DNA, 25 bp, Homo sapien
ctctgcagacctgatgttggggaag

SEQ ID NO: 2298332 - DNA, 25 bp, Homo sapien
ggggaagggcatgcccaccatcacc

SEQ ID NO: 2298333 - DNA, 25 bp, Homo sapien
ctgatgttggggaagggcatgccca

SEQ ID NO: 2298334 - DNA, 25 bp, Homo sapien
cagacctgatgttggggaagggcat

SEQ ID NO: 2298335 - DNA, 25 bp, Homo sapien
gagggtttgatccaagtaggccatc

SEQ ID NO: 2298336 - DNA, 25 bp, Homo sapien
agggtttgatccaagtaggccatct

SEQ ID NO: 2298337 - DNA, 25 bp, Homo sapien
accctctgtgacactggggtcactc

SEQ ID NO: 2298338 - DNA, 25 bp, Homo sapien
tctcctgtcaccctctgtgacactg

SEQ ID NO: 2298339 - DNA, 25 bp, Homo sapien
cctctgtgacactggggtcactcac

SEQ ID NO: 2298340 - DNA, 25 bp, Homo sapien
tcctgtcaccctctgtgacactggg

SEQ ID NO: 2298341 - DNA, 25 bp, Homo sapien
tatggactggttgacggccttcatg

SEQ ID NO: 2298342 - DNA, 25 bp, Homo sapien
tgggggtgcctggccgggggctctg

SEQ ID NO: 2298343 - DNA, 25 bp, Homo sapien
tccaccagagccttccctgggggtg

SEQ ID NO: 2298344 - DNA, 25 bp, Homo sapien
tgacggccttcatgcacaggttctc

SEQ ID NO: 2298345 - DNA, 25 bp, Homo sapien
ccgggcatatcgctggtccaggagc

SEQ ID NO: 2298346 - DNA, 25 bp, Homo sapien
gagcactacgctggcaaaatccttc

SEQ ID NO: 2298347 - DNA, 25 bp, Homo sapien
caaaggtagctttgacctccacacg

SEQ ID NO: 2298348 - DNA, 25 bp, Homo sapien
aaaatccttctggtgcctgatggcc

SEQ ID NO: 2298349 - DNA, 25 bp, Homo sapien
tcggggtggggaggctctcagaaag

SEQ ID NO: 2298350 - DNA, 25 bp, Homo sapien
ggtggggaggctctcagaaagaaaa

SEQ ID NO: 2298351 - DNA, 25 bp, Homo sapien
tctcggggtggggaggctctcagaa

SEQ ID NO: 2298352 - DNA, 25 bp, Homo sapien
ggggtggggaggctctcagaaagaa

SEQ ID NO: 2298353 - DNA, 25 bp, Homo sapien
gaagaggccgacttctcccggtgaa

SEQ ID NO: 2298354 - DNA, 25 bp, Homo sapien
ggaagaggccgacttctcccggtga

SEQ ID NO: 2298355 - DNA, 25 bp, Homo sapien
tcaggaagaggccgacttctcccgg

SEQ ID NO: 2298356 - DNA, 25 bp, Homo sapien
aggaagaggccgacttctcccggtg

SEQ ID NO: 2298357 - DNA, 25 bp, Homo sapien
agaccacgcccacgacaaacactgt

SEQ ID NO: 2298358 - DNA, 25 bp, Homo sapien
cattttctcctacgggagctaacgc

SEQ ID NO: 2298359 - DNA, 25 bp, Homo sapien
tctcctacgggagctaacgcctgtg

SEQ ID NO: 2298360 - DNA, 25 bp, Homo sapien
acgcccacgacaaacactgtctcca

SEQ ID NO: 2298361 - DNA, 25 bp, Homo sapien
ggaacgccccaaggacagccaggac

SEQ ID NO: 2298362 - DNA, 25 bp, Homo sapien
ctggaacgccccaaggacagccagg

SEQ ID NO: 2298363 - DNA, 25 bp, Homo sapien
tggaacgccccaaggacagccagga

SEQ ID NO: 2298364 - DNA, 25 bp, Homo sapien
aagattctattccaggaggggagct

SEQ ID NO: 2298365 - DNA, 25 bp, Homo sapien
agattctattccaggaggggagctg

SEQ ID NO: 2298366 - DNA, 25 bp, Homo sapien
gggcagctataaccttggctagaaa

SEQ ID NO: 2298367 - DNA, 25 bp, Homo sapien
agcagtccagggcagctataacctt

SEQ ID NO: 2298368 - DNA, 25 bp, Homo sapien
tccagggcagctataaccttggcta

SEQ ID NO: 2298369 - DNA, 25 bp, Homo sapien
aaggtgggcaggacggagatgccac

SEQ ID NO: 2298370 - DNA, 25 bp, Homo sapien
gggaaggtgacaagcccctgggcag

SEQ ID NO: 2298371 - DNA, 25 bp, Homo sapien
ggggaaggtgacaagcccctgggca

SEQ ID NO: 2298372 - DNA, 25 bp, Homo sapien
caaggatacaaatccaggcagggct

SEQ ID NO: 2298373 - DNA, 25 bp, Homo sapien
gagcagggccttctactgaaggagt

SEQ ID NO: 2298374 - DNA, 25 bp, Homo sapien
cagggccttctactgaaggagtgac

SEQ ID NO: 2298375 - DNA, 25 bp, Homo sapien
gaagccaaggatacaaatccaggca

SEQ ID NO: 2298376 - DNA, 25 bp, Homo sapien
cggggtctctatagtcatgttgaga

SEQ ID NO: 2298377 - DNA, 25 bp, Homo sapien
ctctatagtcatgttgagagcctaa

SEQ ID NO: 2298378 - DNA, 25 bp, Homo sapien
agggagaagacaggcgcagtcagca

SEQ ID NO: 2298379 - DNA, 25 bp, Homo sapien
ggtctctatagtcatgttgagagcc

SEQ ID NO: 2298380 - DNA, 25 bp, Homo sapien
caggatgcaaacatctgggcatcag

SEQ ID NO: 2298381 - DNA, 25 bp, Homo sapien
atctgggcatcagtgactttcctcc

SEQ ID NO: 2298382 - DNA, 25 bp, Homo sapien
aacatctgggcatcagtgactttcc

SEQ ID NO: 2298383 - DNA, 25 bp, Homo sapien
atgcaaacatctgggcatcagtgac

SEQ ID NO: 2298384 - DNA, 25 bp, Homo sapien
tggatcagctgcctgcataattaat

SEQ ID NO: 2298385 - DNA, 25 bp, Homo sapien
caaggttacacagcactggatcagc

SEQ ID NO: 2298386 - DNA, 25 bp, Homo sapien
gctgcctgcataattaattagcaaa

SEQ ID NO: 2298387 - DNA, 25 bp, Homo sapien
ggttacacagcactggatcagctgc

SEQ ID NO: 2298388 - DNA, 25 bp, Homo sapien
tgcagcaatggacaagcatgtgggc

SEQ ID NO: 2298389 - DNA, 25 bp, Homo sapien
tttcagtggggatgtgacgtgctcc

SEQ ID NO: 2298390 - DNA, 25 bp, Homo sapien
cagcaatggacaagcatgtgggctt

SEQ ID NO: 2298391 - DNA, 25 bp, Homo sapien
caatggacaagcatgtgggcttttc

SEQ ID NO: 2298392 - DNA, 25 bp, Homo sapien
agcaaaattgcaataccattatcat

SEQ ID NO: 2298393 - DNA, 25 bp, Homo sapien
ccatcgcacactactattctttaat

SEQ ID NO: 2298394 - DNA, 25 bp, Homo sapien
taatactaccaactaccctactgtc

SEQ ID NO: 2298395 - DNA, 25 bp, Homo sapien
tatcataccaaccatcgcacactac

SEQ ID NO: 2298396 - DNA, 25 bp, Homo sapien
tgagcaaccacgccctgatgaacta

SEQ ID NO: 2298397 - DNA, 25 bp, Homo sapien
gagcaaccacgccctgatgaactat

SEQ ID NO: 2298398 - DNA, 25 bp, Homo sapien
gaactcttaacttcataccccaata

SEQ ID NO: 2298399 - DNA, 25 bp, Homo sapien
cttaacttcataccccaatagtctt

SEQ ID NO: 2298400 - DNA, 25 bp, Homo sapien
ccagtgagatccagtttaacggtca

SEQ ID NO: 2298401 - DNA, 25 bp, Homo sapien
cagtgagatccagtttaacggtcat

SEQ ID NO: 2298402 - DNA, 25 bp, Homo sapien
gcagtgaaggatccagtgagatcca

SEQ ID NO: 2298403 - DNA, 25 bp, Homo sapien
ctttagcagtgaaggatccagtgag

SEQ ID NO: 2298404 - DNA, 25 bp, Homo sapien
tcctcgcctcgcggggagtgcctcc

SEQ ID NO: 2298405 - DNA, 25 bp, Homo sapien
tcgcctcgcggggagtgcctccctc

SEQ ID NO: 2298406 - DNA, 25 bp, Homo sapien
gcctcacgaggggtgcctcccccca

SEQ ID NO: 2298407 - DNA, 25 bp, Homo sapien
cacgaggggtgcctccccccactgc

SEQ ID NO: 2298408 - DNA, 25 bp, Homo sapien
ttacctccccctctgcgatggcagt

SEQ ID NO: 2298409 - DNA, 25 bp, Homo sapien
ctcgcatgtggtgcctccccactct

SEQ ID NO: 2298410 - DNA, 25 bp, Homo sapien
cgcagtccccgcctcgcatgtggtg

SEQ ID NO: 2298411 - DNA, 25 bp, Homo sapien
cagaggtgaagaggggctggctgtc

SEQ ID NO: 2298412 - DNA, 25 bp, Homo sapien
tgtctgccctgctgcgatgggggtc

SEQ ID NO: 2298413 - DNA, 25 bp, Homo sapien
ctcagttcccgccttggggtgtgtg

SEQ ID NO: 2298414 - DNA, 25 bp, Homo sapien
tccccgcctctcagggggtgcctcc

SEQ ID NO: 2298415 - DNA, 25 bp, Homo sapien
gggagcctccccacacagcgatggg

SEQ ID NO: 2298416 - DNA, 25 bp, Homo sapien
caccctcgtgttagatggtccttaa

SEQ ID NO: 2298417 - DNA, 25 bp, Homo sapien
tatacaccctcgtgttagatggtcc

SEQ ID NO: 2298418 - DNA, 25 bp, Homo sapien
caggacgtatacaccctcgtgttag

SEQ ID NO: 2298419 - DNA, 25 bp, Homo sapien
gacgtatacaccctcgtgttagatg

SEQ ID NO: 2298420 - DNA, 25 bp, Homo sapien
ctgcccttaggctctggtagattgc

SEQ ID NO: 2298421 - DNA, 25 bp, Homo sapien
ccttctgcccttaggctctggtaga

SEQ ID NO: 2298422 - DNA, 25 bp, Homo sapien
gtgatcccgggctgcattcggaccc

SEQ ID NO: 2298423 - DNA, 25 bp, Homo sapien
cgacctgctttctttgtgatcccgg

SEQ ID NO: 2298424 - DNA, 25 bp, Homo sapien
caccctcgtgttagatggtccttaa

SEQ ID NO: 2298425 - DNA, 25 bp, Homo sapien
tatacaccctcgtgttagatggtcc

SEQ ID NO: 2298426 - DNA, 25 bp, Homo sapien
caggacgtatacaccctcgtgttag

SEQ ID NO: 2298427 - DNA, 25 bp, Homo sapien
gacgtatacaccctcgtgttagatg

SEQ ID NO: 2298428 - DNA, 25 bp, Homo sapien
ttctaagggttgatattgaagtcca

SEQ ID NO: 2298429 - DNA, 25 bp, Homo sapien
aacaatttgcacaagcaaggatatt

SEQ ID NO: 2298430 - DNA, 25 bp, Homo sapien
tatcattcaggatattgcttcttgg

SEQ ID NO: 2298431 - DNA, 25 bp, Homo sapien
gatgaccaatattgtgttgtaactg

SEQ ID NO: 2298432 - DNA, 25 bp, Homo sapien
tttgaagctgggctcaattccactg

SEQ ID NO: 2298433 - DNA, 25 bp, Homo sapien
gatgaagaggacatttcactcactg

SEQ ID NO: 2298434 - DNA, 25 bp, Homo sapien
gagtcagagtcacttgagattctaa

SEQ ID NO: 2298435 - DNA, 25 bp, Homo sapien
tttgtgctctgctgtcccgaatgac

SEQ ID NO: 2298436 - DNA, 25 bp, Homo sapien
gaatgacgggttcccatttgtccca

SEQ ID NO: 2298437 - DNA, 25 bp, Homo sapien
gaaccagctgcctactgaggctctg

SEQ ID NO: 2298438 - DNA, 25 bp, Homo sapien
agggcttctcaagaacaggttttgc

SEQ ID NO: 2298439 - DNA, 25 bp, Homo sapien
cattggttggtatgaaccagctgcc

SEQ ID NO: 2298440 - DNA, 25 bp, Homo sapien
atccatatcctaaagatggattata

SEQ ID NO: 2298441 - DNA, 25 bp, Homo sapien
tataatccatatcctaaagatggat

SEQ ID NO: 2298442 - DNA, 25 bp, Homo sapien
tttccttccaccatcacatataatc

SEQ ID NO: 2298443 - DNA, 25 bp, Homo sapien
tccaccatcacatataatccatatc

SEQ ID NO: 2298444 - DNA, 25 bp, Homo sapien
tgttgctctgctgtttcgtcctccg

SEQ ID NO: 2298445 - DNA, 25 bp, Homo sapien
gaggacctagctgtgtcagccagga

SEQ ID NO: 2298446 - DNA, 25 bp, Homo sapien
tgcggctccttgaaaggcacagctc

SEQ ID NO: 2298447 - DNA, 25 bp, Homo sapien
tcctccgcggtgttctcttgcagag

SEQ ID NO: 2298448 - DNA, 25 bp, Homo sapien
cagcctctagggactggcatgatga

SEQ ID NO: 2298449 - DNA, 25 bp, Homo sapien
catcagcctctagggactggcatga

SEQ ID NO: 2298450 - DNA, 25 bp, Homo sapien
tcagcctctagggactggcatgatg

SEQ ID NO: 2298451 - DNA, 25 bp, Homo sapien
cctctagggactggcatgatgatgg

SEQ ID NO: 2298452 - DNA, 25 bp, Homo sapien
atctcccaccgtgtgctccccattg

SEQ ID NO: 2298453 - DNA, 25 bp, Homo sapien
gtggccaacacggtgtccttaggag

SEQ ID NO: 2298454 - DNA, 25 bp, Homo sapien
gatgtggccaacacggtgtccttag

SEQ ID NO: 2298455 - DNA, 25 bp, Homo sapien
caaagatgtggccaacacggtgtcc

SEQ ID NO: 2298456 - DNA, 25 bp, Homo sapien
tctctccagtcccagcaatacaccc

SEQ ID NO: 2298457 - DNA, 25 bp, Homo sapien
ggtggttctgggcagtcctctctcc

SEQ ID NO: 2298458 - DNA, 25 bp, Homo sapien
cccagcaatacaccctctgggagca

SEQ ID NO: 2298459 - DNA, 25 bp, Homo sapien
ggttctgggcagtcctctctccagt

SEQ ID NO: 2298460 - DNA, 25 bp, Homo sapien
ggtcccttaatattcttcctggcat

SEQ ID NO: 2298461 - DNA, 25 bp, Homo sapien
gtgtaccatggggtctgaaggagga

SEQ ID NO: 2298462 - DNA, 25 bp, Homo sapien
ctggggatgaaatccctgcactgtg

SEQ ID NO: 2298463 - DNA, 25 bp, Homo sapien
gagggggcaaggttgagggctctga

SEQ ID NO: 2298464 - DNA, 25 bp, Homo sapien
ccctccttggtgtgagtgtaccatg

SEQ ID NO: 2298465 - DNA, 25 bp, Homo sapien
gaagagggttcacagcggccagttc

SEQ ID NO: 2298466 - DNA, 25 bp, Homo sapien
gagggttcacagcggccagttcctg

SEQ ID NO: 2298467 - DNA, 25 bp, Homo sapien
agagggttcacagcggccagttcct

SEQ ID NO: 2298468 - DNA, 25 bp, Homo sapien
tgggaagagggttcacagcggccag

SEQ ID NO: 2298469 - DNA, 25 bp, Homo sapien
ggaccatgtggtggctggtctcttt

SEQ ID NO: 2298470 - DNA, 25 bp, Homo sapien
ccctgtaaccgggaccatgtggtgg

SEQ ID NO: 2298471 - DNA, 25 bp, Homo sapien
ggctggtctctttagtcacagtgtg

SEQ ID NO: 2298472 - DNA, 25 bp, Homo sapien
agctgcccctgtaaccgggaccatg

SEQ ID NO: 2298473 - DNA, 25 bp, Homo sapien
ccaaacagtgcactccaaggtggag

SEQ ID NO: 2298474 - DNA, 25 bp, Homo sapien
gcttgtccatcggaactgctgggtg

SEQ ID NO: 2298475 - DNA, 25 bp, Homo sapien
tctctcgctgggaaccaagggctta

SEQ ID NO: 2298476 - DNA, 25 bp, Homo sapien
tacgtgatgctgtttttgaccccag

SEQ ID NO: 2298477 - DNA, 25 bp, Homo sapien
caggcctctgcccctccactctcac

SEQ ID NO: 2298478 - DNA, 25 bp, Homo sapien
tcacagcaggagaagcagccaggcc

SEQ ID NO: 2298479 - DNA, 25 bp, Homo sapien
agccaggcctctgcccctccactct

SEQ ID NO: 2298480 - DNA, 25 bp, Homo sapien
agcaggagaagcagccaggcctctg

SEQ ID NO: 2298481 - DNA, 25 bp, Homo sapien
tccaggccacgataggccctgactg

SEQ ID NO: 2298482 - DNA, 25 bp, Homo sapien
agaggccccagacttaccagtgtgc

SEQ ID NO: 2298483 - DNA, 25 bp, Homo sapien
gtgccctcagtcctgctgtagtcag

SEQ ID NO: 2298484 - DNA, 25 bp, Homo sapien
tcctgctgtagtcagtgtggtaggt

SEQ ID NO: 2298485 - DNA, 25 bp, Homo sapien
gaaggactcgtgctctcagtccact

SEQ ID NO: 2298486 - DNA, 25 bp, Homo sapien
tgccgtggaaggactcgtgctctca

SEQ ID NO: 2298487 - DNA, 25 bp, Homo sapien
gttgggctggaattgaaaaactggc

SEQ ID NO: 2298488 - DNA, 25 bp, Homo sapien
ccgcccgaggcaggctgccgtggaa

SEQ ID NO: 2298489 - DNA, 25 bp, Homo sapien
caacactcattccaggatcagctgc

SEQ ID NO: 2298490 - DNA, 25 bp, Homo sapien
aacgtagagtggtctgtgctgctct

SEQ ID NO: 2298491 - DNA, 25 bp, Homo sapien
gcagaaacgtagagtggtctgtgct

SEQ ID NO: 2298492 - DNA, 25 bp, Homo sapien
gctgatggctgtatcatctctgctg

SEQ ID NO: 2298493 - DNA, 25 bp, Homo sapien
actaacatctgatcgaacagtgcca

SEQ ID NO: 2298494 - DNA, 25 bp, Homo sapien
catctgatcgaacagtgccagatgc

SEQ ID NO: 2298495 - DNA, 25 bp, Homo sapien
taaatattaagaggaggatcaagct

SEQ ID NO: 2298496 - DNA, 25 bp, Homo sapien
taacatctgatcgaacagtgccaga

SEQ ID NO: 2298497 - DNA, 25 bp, Homo sapien
ccgcatcttctggcggaccgtgcga

SEQ ID NO: 2298498 - DNA, 25 bp, Homo sapien
cggaccgtgcgaggtatgctgcccc

SEQ ID NO: 2298499 - DNA, 25 bp, Homo sapien
tcttctggcggaccgtgcgaggtat

SEQ ID NO: 2298500 - DNA, 25 bp, Homo sapien
ggaccgtgcgaggtatgctgcccca

SEQ ID NO: 2298501 - DNA, 25 bp, Homo sapien
tggagtataaattgttactgaagtc

SEQ ID NO: 2298502 - DNA, 25 bp, Homo sapien
taagactatctctgtgattattaaa

SEQ ID NO: 2298503 - DNA, 25 bp, Homo sapien
tagatgagatcgtatactctatgga

SEQ ID NO: 2298504 - DNA, 25 bp, Homo sapien
tatttttggtaatgaatgagtaaga

SEQ ID NO: 2298505 - DNA, 25 bp, Homo sapien
gctttttggcaaatccgacacaata

SEQ ID NO: 2298506 - DNA, 25 bp, Homo sapien
tgaatccgtctctttttgatggtgg

SEQ ID NO: 2298507 - DNA, 25 bp, Homo sapien
taccgatggatgacaccagccttca

SEQ ID NO: 2298508 - DNA, 25 bp, Homo sapien
ggagcacctactggataccgatgga

SEQ ID NO: 2298509 - DNA, 25 bp, Homo sapien
catagtaagaccccaactctattta

SEQ ID NO: 2298510 - DNA, 25 bp, Homo sapien
tccaggagtttgagagtttgagact

SEQ ID NO: 2298511 - DNA, 25 bp, Homo sapien
gagactagcctaggtaacatagtaa

SEQ ID NO: 2298512 - DNA, 25 bp, Homo sapien
ccaggagtttgagagtttgagacta

SEQ ID NO: 2298513 - DNA, 25 bp, Homo sapien
tgaaacctggctaaagtgatctgac

SEQ ID NO: 2298514 - DNA, 25 bp, Homo sapien
caaaatgaatcctcgcagtgacagt

SEQ ID NO: 2298515 - DNA, 25 bp, Homo sapien
taaagtgatctgacagttaaggtcc

SEQ ID NO: 2298516 - DNA, 25 bp, Homo sapien
gttaaggtccaaaatgaatcctcgc

SEQ ID NO: 2298517 - DNA, 25 bp, Homo sapien
cccagttatgctagtgctaaagaca

SEQ ID NO: 2298518 - DNA, 25 bp, Homo sapien
tggccagtctagactccttgaacaa

SEQ ID NO: 2298519 - DNA, 25 bp, Homo sapien
catagttattgaagccaggccggtt

SEQ ID NO: 2298520 - DNA, 25 bp, Homo sapien
tataggttacagagatggtgctcct

SEQ ID NO: 2298521 - DNA, 25 bp, Homo sapien
tgaggtgaattacaaaagtccagcc

SEQ ID NO: 2298522 - DNA, 25 bp, Homo sapien
gtaacatgaacttgcccctagaggt

SEQ ID NO: 2298523 - DNA, 25 bp, Homo sapien
taataacaataaggagtaagccacc

SEQ ID NO: 2298524 - DNA, 25 bp, Homo sapien
taccgcatggtagagaacacactcg

SEQ ID NO: 2298525 - DNA, 25 bp, Homo sapien
tgtcaggacaaaagtaaggtcacgg

SEQ ID NO: 2298526 - DNA, 25 bp, Homo sapien
caaagcccgaaatgaaacccctgtg

SEQ ID NO: 2298527 - DNA, 25 bp, Homo sapien
cattgcctaggagagggtaagccct

SEQ ID NO: 2298528 - DNA, 25 bp, Homo sapien
tatttgctgcagattcccaggtgcc

SEQ ID NO: 2298529 - DNA, 25 bp, Homo sapien
ctcacacgtgtgaatgcccagtcat

SEQ ID NO: 2298530 - DNA, 25 bp, Homo sapien
cgtgtgaatgcccagtcatcacact

SEQ ID NO: 2298531 - DNA, 25 bp, Homo sapien
cacacttacaaatgacaaaaggatc

SEQ ID NO: 2298532 - DNA, 25 bp, Homo sapien
acatctcacacgtgtgaatgcccag

SEQ ID NO: 2298533 - DNA, 25 bp, Homo sapien
tcgttgcagtaatcctaaccttgcc

SEQ ID NO: 2298534 - DNA, 25 bp, Homo sapien
tctaatgttaccatctcgttgcagt

SEQ ID NO: 2298535 - DNA, 25 bp, Homo sapien
aaaactgttggagagatagtcatgg

SEQ ID NO: 2298536 - DNA, 25 bp, Homo sapien
tccgtattcagttgagctacttctg

SEQ ID NO: 2298537 - DNA, 25 bp, Homo sapien
caaaaggctgtacacttaacaatgg

SEQ ID NO: 2298538 - DNA, 25 bp, Homo sapien
taatgactggtcaactggctgacca

SEQ ID NO: 2298539 - DNA, 25 bp, Homo sapien
caaacaatttgggtgatgcactacc

SEQ ID NO: 2298540 - DNA, 25 bp, Homo sapien
catgactgactaggtgatggccaga

SEQ ID NO: 2298541 - DNA, 25 bp, Homo sapien
ggctgcgggacccactcactggctt

SEQ ID NO: 2298542 - DNA, 25 bp, Homo sapien
agggggctgcgggacccactcactg

SEQ ID NO: 2298543 - DNA, 25 bp, Homo sapien
gggctgcgggacccactcactggct

SEQ ID NO: 2298544 - DNA, 25 bp, Homo sapien
tccagggggctgcgggacccactca

SEQ ID NO: 2298545 - DNA, 25 bp, Homo sapien
ttcaagtatggagtgataaagtcac

SEQ ID NO: 2298546 - DNA, 25 bp, Homo sapien
cagaaatgttcaagtatggagtgat

SEQ ID NO: 2298547 - DNA, 25 bp, Homo sapien
gagtgataaagtcactgggagacat

SEQ ID NO: 2298548 - DNA, 25 bp, Homo sapien
gttggatctgctctctcagttaaag

SEQ ID NO: 2298549 - DNA, 25 bp, Homo sapien
gaccgtttgtgaaaagtgttgctcc

SEQ ID NO: 2298550 - DNA, 25 bp, Homo sapien
gcctagccgcgggagaatacaaagc

SEQ ID NO: 2298551 - DNA, 25 bp, Homo sapien
caaagcatttagtcctgttgaccgt

SEQ ID NO: 2298552 - DNA, 25 bp, Homo sapien
catgggtttccttaactgcagatga

SEQ ID NO: 2298553 - DNA, 25 bp, Homo sapien
tgtggattccatagacagccacagt

SEQ ID NO: 2298554 - DNA, 25 bp, Homo sapien
atgctttaccatataatttctcaga

SEQ ID NO: 2298555 - DNA, 25 bp, Homo sapien
tatttctgagtttgacctctttcct

SEQ ID NO: 2298556 - DNA, 25 bp, Homo sapien
atataggatgagttttaggctcttc

SEQ ID NO: 2298557 - DNA, 25 bp, Homo sapien
tcgctctaccaaaattggaggggcc

SEQ ID NO: 2298558 - DNA, 25 bp, Homo sapien
ggtgttttacactatctaaagccca

SEQ ID NO: 2298559 - DNA, 25 bp, Homo sapien
cctcttaatctagaattgggagacc

SEQ ID NO: 2298560 - DNA, 25 bp, Homo sapien
ctaaagcccagagacttgaatttgt

SEQ ID NO: 2298561 - DNA, 25 bp, Homo sapien
cttgtgccgatctttgtgttgatgt

SEQ ID NO: 2298562 - DNA, 25 bp, Homo sapien
tgtgttgatgctttacagatactat

SEQ ID NO: 2298563 - DNA, 25 bp, Homo sapien
tttgtgttgatgttgtgttgatgct

SEQ ID NO: 2298564 - DNA, 25 bp, Homo sapien
actattcaggagatttggatttgtc

SEQ ID NO: 2298565 - DNA, 25 bp, Homo sapien
tgtgtactatgtacagccagcacct

SEQ ID NO: 2298566 - DNA, 25 bp, Homo sapien
gccagcacctggttgtaatacaaga

SEQ ID NO: 2298567 - DNA, 25 bp, Homo sapien
gacttagtttctgctctacagcggt

SEQ ID NO: 2298568 - DNA, 25 bp, Homo sapien
ggctgccccactctttgagtagtta

SEQ ID NO: 2298569 - DNA, 25 bp, Homo sapien
tttgaatcatgtgtaaggcctagaa

SEQ ID NO: 2298570 - DNA, 25 bp, Homo sapien
tagtctagacatccgatacccacca

SEQ ID NO: 2298571 - DNA, 25 bp, Homo sapien
gggtttgcctgtagtctagacatcc

SEQ ID NO: 2298572 - DNA, 25 bp, Homo sapien
caccaccatatctgttgcttctttc

SEQ ID NO: 2298573 - DNA, 25 bp, Homo sapien
ccttccattacttcaggcactcgga

SEQ ID NO: 2298574 - DNA, 25 bp, Homo sapien
ggcggtgcagtttgttctggtaact

SEQ ID NO: 2298575 - DNA, 25 bp, Homo sapien
tctggtaactatgaccctagtcagt

SEQ ID NO: 2298576 - DNA, 25 bp, Homo sapien
gcactcggaagattaggatttactc

SEQ ID NO: 2298577 - DNA, 25 bp, Homo sapien
tctctctcggcagtcaccggagtgc

SEQ ID NO: 2298578 - DNA, 25 bp, Homo sapien
gcgaattgtgcgtgcggccagtttc

SEQ ID NO: 2298579 - DNA, 25 bp, Homo sapien
gccctactaagggaagtgaggactg

SEQ ID NO: 2298580 - DNA, 25 bp, Homo sapien
tactgctttcagagaaacgggtgag

SEQ ID NO: 2298581 - DNA, 25 bp, Homo sapien
tacccagggtgatcgtccagtgtcc

SEQ ID NO: 2298582 - DNA, 25 bp, Homo sapien
caaaactttgattaaatgggcctgc

SEQ ID NO: 2298583 - DNA, 25 bp, Homo sapien
tacttgtgcgaggtgccatgctggt

SEQ ID NO: 2298584 - DNA, 25 bp, Homo sapien
aacaaagggctgcatgtgcccgtgc

SEQ ID NO: 2298585 - DNA, 25 bp, Homo sapien
tacgtgacagaccacgtgcttcggg

SEQ ID NO: 2298586 - DNA, 25 bp, Homo sapien
tgtacgccgcgggagtcagtgaact

SEQ ID NO: 2298587 - DNA, 25 bp, Homo sapien
cgaagttttgctcccggtgcgttca

SEQ ID NO: 2298588 - DNA, 25 bp, Homo sapien
gccgtccgcgctgtaagatggccag

SEQ ID NO: 2298589 - DNA, 25 bp, Homo sapien
tgacaatgacttttctccgccgcag

SEQ ID NO: 2298590 - DNA, 25 bp, Homo sapien
tatttgaggcaaaccgaaagtctcg

SEQ ID NO: 2298591 - DNA, 25 bp, Homo sapien
cattcgctcggaaactaagttgcca

SEQ ID NO: 2298592 - DNA, 25 bp, Homo sapien
tgtttgctcaactccggagggatgc

SEQ ID NO: 2298593 - DNA, 25 bp, Homo sapien
gggagcgctgttttcgtgatcttca

SEQ ID NO: 2298594 - DNA, 25 bp, Homo sapien
aggtggcattgttgggagcgctgtt

SEQ ID NO: 2298595 - DNA, 25 bp, Homo sapien
gcattgttgggagcgctgttttcgt

SEQ ID NO: 2298596 - DNA, 25 bp, Homo sapien
tgttgggagcgctgttttcgtgatc

SEQ ID NO: 2298597 - DNA, 25 bp, Homo sapien
gagactatctttctagacaaggcag

SEQ ID NO: 2298598 - DNA, 25 bp, Homo sapien
cattattgcgcgtggaacggctgct

SEQ ID NO: 2298599 - DNA, 25 bp, Homo sapien
ggccagcggtagcaactgcagaact

SEQ ID NO: 2298600 - DNA, 25 bp, Homo sapien
gcaaaactgtctcacgaggctttga

SEQ ID NO: 2298601 - DNA, 25 bp, Homo sapien
gtttgtttatgtgacgtccgccgta

SEQ ID NO: 2298602 - DNA, 25 bp, Homo sapien
gggcgtttgtttatgtgacgtccgc

SEQ ID NO: 2298603 - DNA, 25 bp, Homo sapien
tgacgtccgccgtagtaagcagtcc

SEQ ID NO: 2298604 - DNA, 25 bp, Homo sapien
tttatgtgacgtccgccgtagtaag

SEQ ID NO: 2298605 - DNA, 25 bp, Homo sapien
ctttattaaacgactcattacaact

SEQ ID NO: 2298606 - DNA, 25 bp, Homo sapien
ttattaaacgactcattacaactgc

SEQ ID NO: 2298607 - DNA, 25 bp, Homo sapien
tttattaaacgactcattacaactg

SEQ ID NO: 2298608 - DNA, 25 bp, Homo sapien
tctggcacatagtgatgatcattaa

SEQ ID NO: 2298609 - DNA, 25 bp, Homo sapien
cagcgagacatacattataagaaag

SEQ ID NO: 2298610 - DNA, 25 bp, Homo sapien
attcaagcgttagggataattctac

SEQ ID NO: 2298611 - DNA, 25 bp, Homo sapien
tataagaaagtagttagctttcaac

SEQ ID NO: 2298612 - DNA, 25 bp, Homo sapien
ttgatggtatcactagtctattccg

SEQ ID NO: 2298613 - DNA, 25 bp, Homo sapien
cataaaattcaacaggagttcagag

SEQ ID NO: 2298614 - DNA, 25 bp, Homo sapien
tctattccgtgcaatcaaagattca

SEQ ID NO: 2298615 - DNA, 25 bp, Homo sapien
ttggaagtatcctgaaccatccttg

SEQ ID NO: 2298616 - DNA, 25 bp, Homo sapien
cagcactacacttattaaatggtcc

SEQ ID NO: 2298617 - DNA, 25 bp, Homo sapien
gcactacacttattaaatggtccat

SEQ ID NO: 2298618 - DNA, 25 bp, Homo sapien
tgcaccccctaacttcagcactaca

SEQ ID NO: 2298619 - DNA, 25 bp, Homo sapien
ttcagcactacacttattaaatggt

SEQ ID NO: 2298620 - DNA, 25 bp, Homo sapien
ggccatcttcatgtgaccactcaga

SEQ ID NO: 2298621 - DNA, 25 bp, Homo sapien
ccatcttcatgtgaccactcagaac

SEQ ID NO: 2298622 - DNA, 25 bp, Homo sapien
aggccatcttcatgtgaccactcag

SEQ ID NO: 2298623 - DNA, 25 bp, Homo sapien
gccatcttcatgtgaccactcagaa

SEQ ID NO: 2298624 - DNA, 25 bp, Homo sapien
gcacacagaatatgacggctaacat

SEQ ID NO: 2298625 - DNA, 25 bp, Homo sapien
agaggaatggatgtgcctgaacctg

SEQ ID NO: 2298626 - DNA, 25 bp, Homo sapien
aggaatggatgtgcctgaacctgcc

SEQ ID NO: 2298627 - DNA, 25 bp, Homo sapien
ttgctttggcctcaccacgatggaa

SEQ ID NO: 2298628 - DNA, 25 bp, Homo sapien
gctttggcctcaccacgatggaagg

SEQ ID NO: 2298629 - DNA, 25 bp, Homo sapien
cgtcagcactctcagcagttttcct

SEQ ID NO: 2298630 - DNA, 25 bp, Homo sapien
ctcctgcaattactttctgctcagc

SEQ ID NO: 2298631 - DNA, 25 bp, Homo sapien
caattactttctgctcagctgcttg

SEQ ID NO: 2298632 - DNA, 25 bp, Homo sapien
tctgcctcctgcaattactttctgc

SEQ ID NO: 2298633 - DNA, 25 bp, Homo sapien
aatgaatgttggagagacatgcctg

SEQ ID NO: 2298634 - DNA, 25 bp, Homo sapien
ggtgccgaagcaggggaaatgaatg

SEQ ID NO: 2298635 - DNA, 25 bp, Homo sapien
gacatgcctgggtctgaactcacct

SEQ ID NO: 2298636 - DNA, 25 bp, Homo sapien
ctatggtgccgaagcaggggaaatg

SEQ ID NO: 2298637 - DNA, 25 bp, Homo sapien
tcggtacaccattgcgccgtgtcct

SEQ ID NO: 2298638 - DNA, 25 bp, Homo sapien
ttctgttaccctgtacttgctgtac

SEQ ID NO: 2298639 - DNA, 25 bp, Homo sapien
aactcctgagtccaatccttcaagt

SEQ ID NO: 2298640 - DNA, 25 bp, Homo sapien
gctgtacactaccacggtggccggg

SEQ ID NO: 2298641 - DNA, 25 bp, Homo sapien
ctggggccacgcttttgtggctttt

SEQ ID NO: 2298642 - DNA, 25 bp, Homo sapien
cagcccttcactgctagtattataa

SEQ ID NO: 2298643 - DNA, 25 bp, Homo sapien
tgagggcttgcccatatctctgccc

SEQ ID NO: 2298644 - DNA, 25 bp, Homo sapien
ggtgtttccacctgtcatgcccagc

SEQ ID NO: 2298645 - DNA, 25 bp, Homo sapien
tccatgctctgagttctagagtcag

SEQ ID NO: 2298646 - DNA, 25 bp, Homo sapien
tctggacccctgcctgccaccatac

SEQ ID NO: 2298647 - DNA, 25 bp, Homo sapien
ctctggacccctgcctgccaccata

SEQ ID NO: 2298648 - DNA, 25 bp, Homo sapien
ggcttcccgtgattcctggctttct

SEQ ID NO: 2298649 - DNA, 25 bp, Homo sapien
gtgaatgacaattggcaagactttc

SEQ ID NO: 2298650 - DNA, 25 bp, Homo sapien
tcatagtactcgaagctctcttctg

SEQ ID NO: 2298651 - DNA, 25 bp, Homo sapien
tagtactcgaagctctcttctggct

SEQ ID NO: 2298652 - DNA, 25 bp, Homo sapien
tctgttaccgttccagtgttccaat

SEQ ID NO: 2298653 - DNA, 25 bp, Homo sapien
atcttctctgttaccgttccagtgt

SEQ ID NO: 2298654 - DNA, 25 bp, Homo sapien
ttagtacatgtacggccgaatcagg

SEQ ID NO: 2298655 - DNA, 25 bp, Homo sapien
ttttagtacatgtacggccgaatca

SEQ ID NO: 2298656 - DNA, 25 bp, Homo sapien
caaagtagcgcaacttcctggaacg

SEQ ID NO: 2298657 - DNA, 25 bp, Homo sapien
catgtcggcgttctttccgcggtga

SEQ ID NO: 2298658 - DNA, 25 bp, Homo sapien
caatcctaagatttccatgtcggcg

SEQ ID NO: 2298659 - DNA, 25 bp, Homo sapien
tctgattagaaacagtcccagaggt

SEQ ID NO: 2298660 - DNA, 25 bp, Homo sapien
ttcacaacattaggagtgtagctct

SEQ ID NO: 2298661 - DNA, 25 bp, Homo sapien
aagaggttcaagactatacaacagc

SEQ ID NO: 2298662 - DNA, 25 bp, Homo sapien
cagacaaggacctcaaatttccagg

SEQ ID NO: 2298663 - DNA, 25 bp, Homo sapien
tattttgaaacatgaggtgacagac

SEQ ID NO: 2298664 - DNA, 25 bp, Homo sapien
cctggtcgggagtcatatgccttaa

SEQ ID NO: 2298665 - DNA, 25 bp, Homo sapien
aaccttgcagaagtgtggatttccc

SEQ ID NO: 2298666 - DNA, 25 bp, Homo sapien
tatgtcatgaaacccctaatcttga

SEQ ID NO: 2298667 - DNA, 25 bp, Homo sapien
agtcctacgtgggaaaaagcaggct

SEQ ID NO: 2298668 - DNA, 25 bp, Homo sapien
caatttgcttgccatcctcgtgcag

SEQ ID NO: 2298669 - DNA, 25 bp, Homo sapien
cttcaccaatttgcttgccatcctc

SEQ ID NO: 2298670 - DNA, 25 bp, Homo sapien
accaatttgcttgccatcctcgtgc

SEQ ID NO: 2298671 - DNA, 25 bp, Homo sapien
caccaatttgcttgccatcctcgtg

SEQ ID NO: 2298672 - DNA, 25 bp, Homo sapien
cacccgccttagcttctgaaagtgc

SEQ ID NO: 2298673 - DNA, 25 bp, Homo sapien
gaaagtgctgggattagaggcatga

SEQ ID NO: 2298674 - DNA, 25 bp, Homo sapien
tccacccgccttagcttctgaaagt

SEQ ID NO: 2298675 - DNA, 25 bp, Homo sapien
agatccacccgccttagcttctgaa

SEQ ID NO: 2298676 - DNA, 25 bp, Homo sapien
gctttaagaactcgtagctctggcc

SEQ ID NO: 2298677 - DNA, 25 bp, Homo sapien
tatccatgcagtagactcaaagcca

SEQ ID NO: 2298678 - DNA, 25 bp, Homo sapien
taagttagagcatggtgatgccttc

SEQ ID NO: 2298679 - DNA, 25 bp, Homo sapien
agatgccatcatccctaagttagag

SEQ ID NO: 2298680 - DNA, 25 bp, Homo sapien
gtagtctgggtacttgcaaggctga

SEQ ID NO: 2298681 - DNA, 25 bp, Homo sapien
tgtagtctgggtacttgcaaggctg

SEQ ID NO: 2298682 - DNA, 25 bp, Homo sapien
acctgtagtctgggtacttgcaagg

SEQ ID NO: 2298683 - DNA, 25 bp, Homo sapien
tcagcatcagtatatagtggtgaat

SEQ ID NO: 2298684 - DNA, 25 bp, Homo sapien
ttgcctaaaagagctagattctctc

SEQ ID NO: 2298685 - DNA, 25 bp, Homo sapien
tagtggtgaattaaagttcttgcct

SEQ ID NO: 2298686 - DNA, 25 bp, Homo sapien
gcctaaaagagctagattctctctc

SEQ ID NO: 2298687 - DNA, 25 bp, Homo sapien
tgttctaacatggtaacaaagtttg

SEQ ID NO: 2298688 - DNA, 25 bp, Homo sapien
taatgttctaacatggtaacaaagt

SEQ ID NO: 2298689 - DNA, 25 bp, Homo sapien
gtaatgttctaacatggtaacaaag

SEQ ID NO: 2298690 - DNA, 25 bp, Homo sapien
aatgttctaacatggtaacaaagtt

SEQ ID NO: 2298691 - DNA, 25 bp, Homo sapien
tattctccacagtgatgctggtgga

SEQ ID NO: 2298692 - DNA, 25 bp, Homo sapien
cttattctccacagtgatgctggtg

SEQ ID NO: 2298693 - DNA, 25 bp, Homo sapien
tctccacagtgatgctggtggacag

SEQ ID NO: 2298694 - DNA, 25 bp, Homo sapien
ccacagtgatgctggtggacagcat

SEQ ID NO: 2298695 - DNA, 25 bp, Homo sapien
cactagaagattttggtgcaacagc

SEQ ID NO: 2298696 - DNA, 25 bp, Homo sapien
ggtgttcagcaaggtatcttggccc

SEQ ID NO: 2298697 - DNA, 25 bp, Homo sapien
ttgattatttgacccactcctgtgc

SEQ ID NO: 2298698 - DNA, 25 bp, Homo sapien
actatatatccccaagcaattccag

SEQ ID NO: 2298699 - DNA, 25 bp, Homo sapien
aataaaccactacccacaccacact

SEQ ID NO: 2298700 - DNA, 25 bp, Homo sapien
tagtggaaataaaccactacccaca

SEQ ID NO: 2298701 - DNA, 25 bp, Homo sapien
tggaaataaaccactacccacacca

SEQ ID NO: 2298702 - DNA, 25 bp, Homo sapien
gaaataaaccactacccacaccaca

SEQ ID NO: 2298703 - DNA, 25 bp, Homo sapien
tgaatccaatctatgtaaacgagag

SEQ ID NO: 2298704 - DNA, 25 bp, Homo sapien
tgcattcactgaagcaatatgcttg

SEQ ID NO: 2298705 - DNA, 25 bp, Homo sapien
taaacgagagacttcacaccttttg

SEQ ID NO: 2298706 - DNA, 25 bp, Homo sapien
tgaaggctgaaacgctttatatgga

SEQ ID NO: 2298707 - DNA, 25 bp, Homo sapien
tcatccccaaaagtcatcaccaaga

SEQ ID NO: 2298708 - DNA, 25 bp, Homo sapien
taaaatgagaagtataggttgttcc

SEQ ID NO: 2298709 - DNA, 25 bp, Homo sapien
cccagcagtaaattctaagttagag

SEQ ID NO: 2298710 - DNA, 25 bp, Homo sapien
ttcttttggccagtgctagtaggaa

SEQ ID NO: 2298711 - DNA, 25 bp, Homo sapien
tttctatgaaaggtggagaacatgc

SEQ ID NO: 2298712 - DNA, 25 bp, Homo sapien
caccctagaccttcaagtttgctga

SEQ ID NO: 2298713 - DNA, 25 bp, Homo sapien
gaaaggataacaagcttgtcatggg

SEQ ID NO: 2298714 - DNA, 25 bp, Homo sapien
ggctagaacctgtggtcttcataaa

SEQ ID NO: 2298715 - DNA, 25 bp, Homo sapien
tgtgttgttgaatattccttaatgg

SEQ ID NO: 2298716 - DNA, 25 bp, Homo sapien
ccttaatggagtcgatgaatttgca

SEQ ID NO: 2298717 - DNA, 25 bp, Homo sapien
gaatattccttaatggagtcgatga

SEQ ID NO: 2298718 - DNA, 25 bp, Homo sapien
tcgatgaatttgcagagacccctcc

SEQ ID NO: 2298719 - DNA, 25 bp, Homo sapien
tccagcaatgcaaggctgagttgag

SEQ ID NO: 2298720 - DNA, 25 bp, Homo sapien
tgagaggtttctgacttccagagct

SEQ ID NO: 2298721 - DNA, 25 bp, Homo sapien
tcccattgcagagactgcccgcaga

SEQ ID NO: 2298722 - DNA, 25 bp, Homo sapien
gactgcccgcagatctacctttggg

SEQ ID NO: 2298723 - DNA, 25 bp, Homo sapien
ccctcctattctgggaatgctaaca

SEQ ID NO: 2298724 - DNA, 25 bp, Homo sapien
gctaacatcctcagggaatctccca

SEQ ID NO: 2298725 - DNA, 25 bp, Homo sapien
cttgggagtttcacagccccactct

SEQ ID NO: 2298726 - DNA, 25 bp, Homo sapien
gaatctcccatattggtcccctata

SEQ ID NO: 2298727 - DNA, 25 bp, Homo sapien
tccagaattgcaagaataggccagg

SEQ ID NO: 2298728 - DNA, 25 bp, Homo sapien
ccaggattgtgtcagcaacaggatg

SEQ ID NO: 2298729 - DNA, 25 bp, Homo sapien
tgcattcccgcttaagtgccaggat

SEQ ID NO: 2298730 - DNA, 25 bp, Homo sapien
gatggcctaaacaatctcagtcttg

SEQ ID NO: 2298731 - DNA, 25 bp, Homo sapien
agaaagttccagaatatatagccat

SEQ ID NO: 2298732 - DNA, 25 bp, Homo sapien
gcagccagtctatggttgcagtggg

SEQ ID NO: 2298733 - DNA, 25 bp, Homo sapien
agccagtctatggttgcagtgggtt

SEQ ID NO: 2298734 - DNA, 25 bp, Homo sapien
cagccagtctatggttgcagtgggt

SEQ ID NO: 2298735 - DNA, 25 bp, Homo sapien
tggcagccagtctatggttgcagtg

SEQ ID NO: 2298736 - DNA, 25 bp, Homo sapien
agtacttactatgtagcctggcagg

SEQ ID NO: 2298737 - DNA, 25 bp, Homo sapien
ctgcctgctattggttgataatgct

SEQ ID NO: 2298738 - DNA, 25 bp, Homo sapien
tagaagaatctgatgttgaactgcc

SEQ ID NO: 2298739 - DNA, 25 bp, Homo sapien
cagctaatgttccagtcatctggta

SEQ ID NO: 2298740 - DNA, 25 bp, Homo sapien
catcagaaagatttgtaacaatgaa

SEQ ID NO: 2298741 - DNA, 25 bp, Homo sapien
taggactttggtttgcgtgggggca

SEQ ID NO: 2298742 - DNA, 25 bp, Homo sapien
tcagaaagatttgtaacaatgaagc

SEQ ID NO: 2298743 - DNA, 25 bp, Homo sapien
aatgaagctgtaggactttggtttg

SEQ ID NO: 2298744 - DNA, 25 bp, Homo sapien
ccttcttcaaagatcacccttattt

SEQ ID NO: 2298745 - DNA, 25 bp, Homo sapien
gcttgacacaagattgctcatagac

SEQ ID NO: 2298746 - DNA, 25 bp, Homo sapien
gctcatagaccaggcttttgtactt

SEQ ID NO: 2298747 - DNA, 25 bp, Homo sapien
cacaagattgctcatagaccaggct

SEQ ID NO: 2298748 - DNA, 25 bp, Homo sapien
gtgcctggccgaaagctacaatttt

SEQ ID NO: 2298749 - DNA, 25 bp, Homo sapien
taatgtcaattaatggactcccaat

SEQ ID NO: 2298750 - DNA, 25 bp, Homo sapien
ttaagaagcattttgaaatcttaat

SEQ ID NO: 2298751 - DNA, 25 bp, Homo sapien
tgtgcctggccgaaagctacaattt

SEQ ID NO: 2298752 - DNA, 25 bp, Homo sapien
ttcgtgctgtgcgggatcgacgcgg

SEQ ID NO: 2298753 - DNA, 25 bp, Homo sapien
gtgcgggatcgacgcggacagcggg

SEQ ID NO: 2298754 - DNA, 25 bp, Homo sapien
ggatcgacgcggacagcgggctgga

SEQ ID NO: 2298755 - DNA, 25 bp, Homo sapien
tgctgtgcgggatcgacgcggacag

SEQ ID NO: 2298756 - DNA, 25 bp, Homo sapien
tccgcagaaagccttcccgggcggc

SEQ ID NO: 2298757 - DNA, 25 bp, Homo sapien
catgggcgcgccagtgtcgccctag

SEQ ID NO: 2298758 - DNA, 25 bp, Homo sapien
agcgcggccgggatgagcgggagct

SEQ ID NO: 2298759 - DNA, 25 bp, Homo sapien
cacagaccacagccggagcggtggt

SEQ ID NO: 2298760 - DNA, 25 bp, Homo sapien
tcttagaggcatctccagaactcac

SEQ ID NO: 2298761 - DNA, 25 bp, Homo sapien
cccaacaatgttgacaaggtggctc

SEQ ID NO: 2298762 - DNA, 25 bp, Homo sapien
caaccctcctgttagaagtaaaatg

SEQ ID NO: 2298763 - DNA, 25 bp, Homo sapien
actgatgtctgagggttacctatta

SEQ ID NO: 2298764 - DNA, 25 bp, Homo sapien
tgcaacaatagcagtacaaaccagt

SEQ ID NO: 2298765 - DNA, 25 bp, Homo sapien
acaaaccagttgaaaagtagccatg

SEQ ID NO: 2298766 - DNA, 25 bp, Homo sapien
caagtaggctatcaagatattactc

SEQ ID NO: 2298767 - DNA, 25 bp, Homo sapien
gctatattcctagaccttggataaa

SEQ ID NO: 2298768 - DNA, 25 bp, Homo sapien
ttcttttgacagtgtctaacgctgt

SEQ ID NO: 2298769 - DNA, 25 bp, Homo sapien
gtgtctaacgctgtcaccctagctg

SEQ ID NO: 2298770 - DNA, 25 bp, Homo sapien
tttgacagtgtctaacgctgtcacc

SEQ ID NO: 2298771 - DNA, 25 bp, Homo sapien
gacagtgtctaacgctgtcacccta

SEQ ID NO: 2298772 - DNA, 25 bp, Homo sapien
caggagatggtaggaagaccaaata

SEQ ID NO: 2298773 - DNA, 25 bp, Homo sapien
aatatcacatccctaatgtaggtcc

SEQ ID NO: 2298774 - DNA, 25 bp, Homo sapien
gattaagaaatcaagaccgccttcc

SEQ ID NO: 2298775 - DNA, 25 bp, Homo sapien
gtaggtcctattatcaccattctca

SEQ ID NO: 2298776 - DNA, 25 bp, Homo sapien
gctctttgatcaagccaaggaccat

SEQ ID NO: 2298777 - DNA, 25 bp, Homo sapien
tgctctttgatcaagccaaggacca

SEQ ID NO: 2298778 - DNA, 25 bp, Homo sapien
gaggcttggattccattaagaatat

SEQ ID NO: 2298779 - DNA, 25 bp, Homo sapien
tcatggttggttggtgtgtggtcaa

SEQ ID NO: 2298780 - DNA, 25 bp, Homo sapien
taagaatattaattgggagtcatgg

SEQ ID NO: 2298781 - DNA, 25 bp, Homo sapien
tggtgtgtggtcaagggaacaataa

SEQ ID NO: 2298782 - DNA, 25 bp, Homo sapien
ttcaatggtacagccggattcctga

SEQ ID NO: 2298783 - DNA, 25 bp, Homo sapien
tggtacagccggattcctgaccaca

SEQ ID NO: 2298784 - DNA, 25 bp, Homo sapien
cttcaatggtacagccggattcctg

SEQ ID NO: 2298785 - DNA, 25 bp, Homo sapien
cagccggattcctgaccacagcttt

SEQ ID NO: 2298786 - DNA, 25 bp, Homo sapien
tgtcgcttgggttctgcgctcctgc

SEQ ID NO: 2298787 - DNA, 25 bp, Homo sapien
ctgcgctcctgccatgggtgtgaca

SEQ ID NO: 2298788 - DNA, 25 bp, Homo sapien
tcaaaattagaatttgtcgcttggg

SEQ ID NO: 2298789 - DNA, 25 bp, Homo sapien
cctgccatgggtgtgacagctttct

SEQ ID NO: 2298790 - DNA, 25 bp, Homo sapien
cgactgttcccgctcatgctttaca

SEQ ID NO: 2298791 - DNA, 25 bp, Homo sapien
taaagcatagggctcgcctgtcact

SEQ ID NO: 2298792 - DNA, 25 bp, Homo sapien
gggtcccgctaccaaaactgagcca

SEQ ID NO: 2298793 - DNA, 25 bp, Homo sapien
gctttgctgacaccgccctcggaag

SEQ ID NO: 2298794 - DNA, 25 bp, Homo sapien
cctgtgaactcagcgtagacttcca

SEQ ID NO: 2298795 - DNA, 25 bp, Homo sapien
tgtcctgggatcgtaggggtctctc

SEQ ID NO: 2298796 - DNA, 25 bp, Homo sapien
tcagcgtagacttccagtgggtgtt

SEQ ID NO: 2298797 - DNA, 25 bp, Homo sapien
tagacttccagtgggtgttagttac

SEQ ID NO: 2298798 - DNA, 25 bp, Homo sapien
catcagcaactcattcaaatatcaa

SEQ ID NO: 2298799 - DNA, 25 bp, Homo sapien
ggtcaaaatgcatgtcaggtcatac

SEQ ID NO: 2298800 - DNA, 25 bp, Homo sapien
gcttgtaaacatcagcaactcattc

SEQ ID NO: 2298801 - DNA, 25 bp, Homo sapien
ggccagcttcggcttgtaaacatca

SEQ ID NO: 2298802 - DNA, 25 bp, Homo sapien
atgaagtctagccaagagttctggg

SEQ ID NO: 2298803 - DNA, 25 bp, Homo sapien
cttatattctagtggtgggataaag

SEQ ID NO: 2298804 - DNA, 25 bp, Homo sapien
gcagttaacagggcaaacacagttt

SEQ ID NO: 2298805 - DNA, 25 bp, Homo sapien
tattctagtggtgggataaagcagt

SEQ ID NO: 2298806 - DNA, 25 bp, Homo sapien
aaacacaggttctgtcaatgttctg

SEQ ID NO: 2298807 - DNA, 25 bp, Homo sapien
tgttctgttgataatagctgcttct

SEQ ID NO: 2298808 - DNA, 25 bp, Homo sapien
tcaatgttctgttgataatagctgc

SEQ ID NO: 2298809 - DNA, 25 bp, Homo sapien
caacttgatctcaaccggaacctct

SEQ ID NO: 2298810 - DNA, 25 bp, Homo sapien
ctgtgtgctttccaacctagactca

SEQ ID NO: 2298811 - DNA, 25 bp, Homo sapien
cagggaaacaagagaagaccactgc

SEQ ID NO: 2298812 - DNA, 25 bp, Homo sapien
aacaagagaagaccactgcttcgca

SEQ ID NO: 2298813 - DNA, 25 bp, Homo sapien
agagaagaccactgcttcgcagagc

SEQ ID NO: 2298814 - DNA, 25 bp, Homo sapien
cacagggaaacaagagaagaccact

SEQ ID NO: 2298815 - DNA, 25 bp, Homo sapien
tcagggtccaaaaagcttccagctc

SEQ ID NO: 2298816 - DNA, 25 bp, Homo sapien
agggtccaaaaagcttccagctcct

SEQ ID NO: 2298817 - DNA, 25 bp, Homo sapien
ggtccaaaaagcttccagctcctct

SEQ ID NO: 2298818 - DNA, 25 bp, Homo sapien
ctcagggtccaaaaagcttccagct

SEQ ID NO: 2298819 - DNA, 25 bp, Homo sapien
aggctaccactgctggtgacttcag

SEQ ID NO: 2298820 - DNA, 25 bp, Homo sapien
gaatttgcatctgggggtcaaaagc

SEQ ID NO: 2298821 - DNA, 25 bp, Homo sapien
ggtgaggctaccactgctggtgact

SEQ ID NO: 2298822 - DNA, 25 bp, Homo sapien
caaaagccgcaactggatttcaggg

SEQ ID NO: 2298823 - DNA, 25 bp, Homo sapien
cagtagattgcccagtaaggatcac

SEQ ID NO: 2298824 - DNA, 25 bp, Homo sapien
gattgcccagtaaggatcactgtgg

SEQ ID NO: 2298825 - DNA, 25 bp, Homo sapien
tcctggccagtagattgcccagtaa

SEQ ID NO: 2298826 - DNA, 25 bp, Homo sapien
ggccagtagattgcccagtaaggat

SEQ ID NO: 2298827 - DNA, 25 bp, Homo sapien
tcatcttagcagcaatagctgtagc

SEQ ID NO: 2298828 - DNA, 25 bp, Homo sapien
cttgatgccccactcatcttagcag

SEQ ID NO: 2298829 - DNA, 25 bp, Homo sapien
taatacagattttcctctgacaaca

SEQ ID NO: 2298830 - DNA, 25 bp, Homo sapien
cagattttcctctgacaacatcagg

SEQ ID NO: 2298831 - DNA, 25 bp, Homo sapien
tgttttcctgcctagtagactccaa

SEQ ID NO: 2298832 - DNA, 25 bp, Homo sapien
tctaccactttgtgcaggtgatgct

SEQ ID NO: 2298833 - DNA, 25 bp, Homo sapien
gaacaacaaggtcccacttatcttg

SEQ ID NO: 2298834 - DNA, 25 bp, Homo sapien
cagggtcaccaatcagtactcgagt

SEQ ID NO: 2298835 - DNA, 25 bp, Homo sapien
gaagtaaaaaacatcgtcaggctgg

SEQ ID NO: 2298836 - DNA, 25 bp, Homo sapien
tgcagcttcccaaggtggtttaccg

SEQ ID NO: 2298837 - DNA, 25 bp, Homo sapien
gaaatacccagtaatacccagcctg

SEQ ID NO: 2298838 - DNA, 25 bp, Homo sapien
gaaccatagcttacagggagcagaa

SEQ ID NO: 2298839 - DNA, 25 bp, Homo sapien
cataggttgtatctatggaaacaag

SEQ ID NO: 2298840 - DNA, 25 bp, Homo sapien
tgttgtacataaaacataggttgta

SEQ ID NO: 2298841 - DNA, 25 bp, Homo sapien
tatgagtaatatttaaactaacaaa

SEQ ID NO: 2298842 - DNA, 25 bp, Homo sapien
tccaagactaggttagagatatgtt

SEQ ID NO: 2298843 - DNA, 25 bp, Homo sapien
cccaggcaagagtacgatggcatgg

SEQ ID NO: 2298844 - DNA, 25 bp, Homo sapien
caagagtacgatggcatggtcttgg

SEQ ID NO: 2298845 - DNA, 25 bp, Homo sapien
gcaaggaatgtggtagtttctagaa

SEQ ID NO: 2298846 - DNA, 25 bp, Homo sapien
caggcaagagtacgatggcatggtc

SEQ ID NO: 2298847 - DNA, 25 bp, Homo sapien
cattatggagatcactagtaaccaa

SEQ ID NO: 2298848 - DNA, 25 bp, Homo sapien
gaaactagagccagtaaggacactg

SEQ ID NO: 2298849 - DNA, 25 bp, Homo sapien
agttgatgtgatttcagacaccagg

SEQ ID NO: 2298850 - DNA, 25 bp, Homo sapien
gctttgtgtcggaaaattttgccca

SEQ ID NO: 2298851 - DNA, 25 bp, Homo sapien
caaactgtagacattaggatcagaa

SEQ ID NO: 2298852 - DNA, 25 bp, Homo sapien
ggcagcagtagttgtgttcatgata

SEQ ID NO: 2298853 - DNA, 25 bp, Homo sapien
tatgaagaagattatgatggcagca

SEQ ID NO: 2298854 - DNA, 25 bp, Homo sapien
aattccttatgtggtggccttgcac

SEQ ID NO: 2298855 - DNA, 25 bp, Homo sapien
gacaatgccacgtttttgccaaaat

SEQ ID NO: 2298856 - DNA, 25 bp, Homo sapien
tatccttgagttattgcccaaagag

SEQ ID NO: 2298857 - DNA, 25 bp, Homo sapien
ttaaaaagccaactattgtaatgga

SEQ ID NO: 2298858 - DNA, 25 bp, Homo sapien
ttatatatctgggtcttggtagcat

SEQ ID NO: 2298859 - DNA, 25 bp, Homo sapien
tgatctgtcgtttcctggctgagga

SEQ ID NO: 2298860 - DNA, 25 bp, Homo sapien
ctctgaagaggccccgcgtgtgttt

SEQ ID NO: 2298861 - DNA, 25 bp, Homo sapien
agttgtgcaaagtgggtctcttggc

SEQ ID NO: 2298862 - DNA, 25 bp, Homo sapien
actccgctgcgcgatgagcgtccat

SEQ ID NO: 2298863 - DNA, 25 bp, Homo sapien
caatgtgtagcatcctgaacaggca

SEQ ID NO: 2298864 - DNA, 25 bp, Homo sapien
ttaatggagtccgtatccgagcggg

SEQ ID NO: 2298865 - DNA, 25 bp, Homo sapien
taaggcctagaaagcacgtagctca

SEQ ID NO: 2298866 - DNA, 25 bp, Homo sapien
tctccagtgtgcatcgccaagggta

SEQ ID NO: 2298867 - DNA, 25 bp, Homo sapien
tatggcaagccacgggtctggagaa

SEQ ID NO: 2298868 - DNA, 25 bp, Homo sapien
tccaagatgtacagctatggcaagc

SEQ ID NO: 2298869 - DNA, 25 bp, Homo sapien
caagttgaatagctgtgaccaagcc

SEQ ID NO: 2298870 - DNA, 25 bp, Homo sapien
tgggccaaacgtcctttcgacagta

SEQ ID NO: 2298871 - DNA, 25 bp, Homo sapien
tgtatagcttgcaacttaaggatgg

SEQ ID NO: 2298872 - DNA, 25 bp, Homo sapien
cacatggacaaatggctcaagggtc

SEQ ID NO: 2298873 - DNA, 25 bp, Homo sapien
ttagctttctagatcaggtgagggc

SEQ ID NO: 2298874 - DNA, 25 bp, Homo sapien
cgtgaggcatgtgcattttagcttt

SEQ ID NO: 2298875 - DNA, 25 bp, Homo sapien
ttgcctccagagataagccacaaaa

SEQ ID NO: 2298876 - DNA, 25 bp, Homo sapien
aaactatattaaagtgggcacagca

SEQ ID NO: 2298877 - DNA, 25 bp, Homo sapien
ggaaaatatcttgcccttagcctaa

SEQ ID NO: 2298878 - DNA, 25 bp, Homo sapien
taaaccatgaatagcgggaacctcc

SEQ ID NO: 2298879 - DNA, 25 bp, Homo sapien
atcacctccttctcggtccctgaag

SEQ ID NO: 2298880 - DNA, 25 bp, Homo sapien
gattgaaggcaacagatccaggccc

SEQ ID NO: 2298881 - DNA, 25 bp, Homo sapien
ctccttctcggtccctgaagggctt

SEQ ID NO: 2298882 - DNA, 25 bp, Homo sapien
tgcaagattgaaggcaacagatcca

SEQ ID NO: 2298883 - DNA, 25 bp, Homo sapien
aggacccagtcaagccatgctcaga

SEQ ID NO: 2298884 - DNA, 25 bp, Homo sapien
gaagagtctgggcagcaaatacagg

SEQ ID NO: 2298885 - DNA, 25 bp, Homo sapien
ggtgagactgcagtccctgatgaca

SEQ ID NO: 2298886 - DNA, 25 bp, Homo sapien
ttttgagaccataagcagaggaccc

SEQ ID NO: 2298887 - DNA, 25 bp, Homo sapien
ccagcgaagaccagccgtggttgag

SEQ ID NO: 2298888 - DNA, 25 bp, Homo sapien
ggggcacggaggtcttgctgcggat

SEQ ID NO: 2298889 - DNA, 25 bp, Homo sapien
gtcttgctgcggatgtggatcacgg

SEQ ID NO: 2298890 - DNA, 25 bp, Homo sapien
tggtggggcacggaggtcttgctgc

SEQ ID NO: 2298891 - DNA, 25 bp, Homo sapien
acatggtggggcacggaggtcttgc

SEQ ID NO: 2298892 - DNA, 25 bp, Homo sapien
tatctatgggcttggaagattaata

SEQ ID NO: 2298893 - DNA, 25 bp, Homo sapien
ctatctatgggcttggaagattaat

SEQ ID NO: 2298894 - DNA, 25 bp, Homo sapien
atctatgggcttggaagattaatac

SEQ ID NO: 2298895 - DNA, 25 bp, Homo sapien
tctatgggcttggaagattaatact

SEQ ID NO: 2298896 - DNA, 25 bp, Homo sapien
gccgtcgtaaaaaagtgtgtgagga

SEQ ID NO: 2298897 - DNA, 25 bp, Homo sapien
tggaaggtggagtacaaaggataca

SEQ ID NO: 2298898 - DNA, 25 bp, Homo sapien
tattgaatgccgtcgtaaaaaagtg

SEQ ID NO: 2298899 - DNA, 25 bp, Homo sapien
gaatgccgtcgtaaaaaagtgtgtg

SEQ ID NO: 2298900 - DNA, 25 bp, Homo sapien
taactattttacacatgcagcaggt

SEQ ID NO: 2298901 - DNA, 25 bp, Homo sapien
taggccctcagctttatgcaaactt

SEQ ID NO: 2298902 - DNA, 25 bp, Homo sapien
tgctttgacaaggacagctaggccc

SEQ ID NO: 2298903 - DNA, 25 bp, Homo sapien
tgtgcacagatagccagtaacaggg

SEQ ID NO: 2298904 - DNA, 25 bp, Homo sapien
catcctatattatcaagttatgcct

SEQ ID NO: 2298905 - DNA, 25 bp, Homo sapien
aagttttatcatgttgaagcatcct

SEQ ID NO: 2298906 - DNA, 25 bp, Homo sapien
catttattgttagattattcccaga

SEQ ID NO: 2298907 - DNA, 25 bp, Homo sapien
tcaagccagtaacgcccggctaatt

SEQ ID NO: 2298908 - DNA, 25 bp, Homo sapien
ttgaggatagggtgaaagctgccat

SEQ ID NO: 2298909 - DNA, 25 bp, Homo sapien
cagcctcttttctatagacgggagt

SEQ ID NO: 2298910 - DNA, 25 bp, Homo sapien
tctgctgttcgttagtaaacccagg

SEQ ID NO: 2298911 - DNA, 25 bp, Homo sapien
tgcctcggcttttgacgttagtcct

SEQ ID NO: 2298912 - DNA, 25 bp, Homo sapien
tcacttagttttgtgaaggaaagaa

SEQ ID NO: 2298913 - DNA, 25 bp, Homo sapien
cagattcaacactttaagtttgtca

SEQ ID NO: 2298914 - DNA, 25 bp, Homo sapien
aagtttgtcacacacattgttttga

SEQ ID NO: 2298915 - DNA, 25 bp, Homo sapien
caacactttaagtttgtcacacaca

SEQ ID NO: 2298916 - DNA, 25 bp, Homo sapien
gtcacacacattgttttgatattga

SEQ ID NO: 2298917 - DNA, 25 bp, Homo sapien
taattcaagattgctgtcccataca

SEQ ID NO: 2298918 - DNA, 25 bp, Homo sapien
ctgtcccatacatcatcgataatta

SEQ ID NO: 2298919 - DNA, 25 bp, Homo sapien
acatcatcgataattatgctttctg

SEQ ID NO: 2298920 - DNA, 25 bp, Homo sapien
aattcaagattgctgtcccatacat

SEQ ID NO: 2298921 - DNA, 25 bp, Homo sapien
atattgcaaggccttttgctcaaag

SEQ ID NO: 2298922 - DNA, 25 bp, Homo sapien
gtgcttgcttggatgctgaactacc

SEQ ID NO: 2298923 - DNA, 25 bp, Homo sapien
tgcctgggatattgcaaggcctttt

SEQ ID NO: 2298924 - DNA, 25 bp, Homo sapien
tggatgctgaactacctgtcctgca

SEQ ID NO: 2298925 - DNA, 25 bp, Homo sapien
gtctgggtccaacagaccctcttgg

SEQ ID NO: 2298926 - DNA, 25 bp, Homo sapien
acttgacttcaagaaggtgtgtgag

SEQ ID NO: 2298927 - DNA, 25 bp, Homo sapien
ttgacttcaagaaggtgtgtgagcc

SEQ ID NO: 2298928 - DNA, 25 bp, Homo sapien
ctcagcctgtggaagtccttaagtt

SEQ ID NO: 2298929 - DNA, 25 bp, Homo sapien
tgtctcctccttctcttgtagctgt

SEQ ID NO: 2298930 - DNA, 25 bp, Homo sapien
gtgtctcctccttctcttgtagctg

SEQ ID NO: 2298931 - DNA, 25 bp, Homo sapien
tcaactttggtgtctcctccttctc

SEQ ID NO: 2298932 - DNA, 25 bp, Homo sapien
ctcctccttctcttgtagctgtcac

SEQ ID NO: 2298933 - DNA, 25 bp, Homo sapien
ggatctgtgtctcccaattgcaatt

SEQ ID NO: 2298934 - DNA, 25 bp, Homo sapien
gcctaatctcaccaagacggaacat

SEQ ID NO: 2298935 - DNA, 25 bp, Homo sapien
tttgtttgccactccacagtgttgg

SEQ ID NO: 2298936 - DNA, 25 bp, Homo sapien
aaaggcttcactcaatgcgtggagc

SEQ ID NO: 2298937 - DNA, 25 bp, Homo sapien
cgtacactcaccgttgcacaactgt

SEQ ID NO: 2298938 - DNA, 25 bp, Homo sapien
cattcggtggcattacgtacactca

SEQ ID NO: 2298939 - DNA, 25 bp, Homo sapien
gcttcatcaatcaaagaacagttgc

SEQ ID NO: 2298940 - DNA, 25 bp, Homo sapien
gattgcagagttactttgggaacac

SEQ ID NO: 2298941 - DNA, 25 bp, Homo sapien
ggtaatcaatatcatcactaattct

SEQ ID NO: 2298942 - DNA, 25 bp, Homo sapien
atcaatgacacgtaattcctcaaaa

SEQ ID NO: 2298943 - DNA, 25 bp, Homo sapien
ttggcatagtcatcaatgacacgta

SEQ ID NO: 2298944 - DNA, 25 bp, Homo sapien
aaaataagtggctgtcattgcttca

SEQ ID NO: 2298945 - DNA, 25 bp, Homo sapien
actgatgatcttgctgcactggttg

SEQ ID NO: 2298946 - DNA, 25 bp, Homo sapien
attgtacaggatcttcttgacgtcc

SEQ ID NO: 2298947 - DNA, 25 bp, Homo sapien
gccttattgcttatattgtacagga

SEQ ID NO: 2298948 - DNA, 25 bp, Homo sapien
gctgcactggttgccattggcctta

SEQ ID NO: 2298949 - DNA, 25 bp, Homo sapien
gagtgagttttatttgtctgaaaca

SEQ ID NO: 2298950 - DNA, 25 bp, Homo sapien
gtgagttttatttgtctgaaacaat

SEQ ID NO: 2298951 - DNA, 25 bp, Homo sapien
tggcgaaagagtgagttttatttgt

SEQ ID NO: 2298952 - DNA, 25 bp, Homo sapien
ttttagggccgggagaggtggctca

SEQ ID NO: 2298953 - DNA, 25 bp, Homo sapien
gttggtccggagaactttagctctg

SEQ ID NO: 2298954 - DNA, 25 bp, Homo sapien
ttagctaattccctaaatgctaaca

SEQ ID NO: 2298955 - DNA, 25 bp, Homo sapien
tcaaatccaatctcgctggaatgct

SEQ ID NO: 2298956 - DNA, 25 bp, Homo sapien
taaggtttacatctccaaaggactg

SEQ ID NO: 2298957 - DNA, 25 bp, Homo sapien
tcattagggttgaacttcggtggca

SEQ ID NO: 2298958 - DNA, 25 bp, Homo sapien
gatctcattagggttgaacttcggt

SEQ ID NO: 2298959 - DNA, 25 bp, Homo sapien
cattagggttgaacttcggtggcat

SEQ ID NO: 2298960 - DNA, 25 bp, Homo sapien
tctcattagggttgaacttcggtgg

SEQ ID NO: 2298961 - DNA, 25 bp, Homo sapien
ttttggagacagaccagggggccga

SEQ ID NO: 2298962 - DNA, 25 bp, Homo sapien
gggccagtgcagaagtggcactgac

SEQ ID NO: 2298963 - DNA, 25 bp, Homo sapien
gccgatcttgggggccagtgcagaa

SEQ ID NO: 2298964 - DNA, 25 bp, Homo sapien
ggagacagaccagggggccgatctt

SEQ ID NO: 2298965 - DNA, 25 bp, Homo sapien
tgtttccttggcaatgtcatcacca

SEQ ID NO: 2298966 - DNA, 25 bp, Homo sapien
ctgtttccttggcaatgtcatcacc

SEQ ID NO: 2298967 - DNA, 25 bp, Homo sapien
gtttccttggcaatgtcatcaccaa

SEQ ID NO: 2298968 - DNA, 25 bp, Homo sapien
tttccttggcaatgtcatcaccaac

SEQ ID NO: 2298969 - DNA, 25 bp, Homo sapien
agaagccaccacctcaatctgggtc

SEQ ID NO: 2298970 - DNA, 25 bp, Homo sapien
aagccaccacctcaatctgggtctg

SEQ ID NO: 2298971 - DNA, 25 bp, Homo sapien
atttctgtctcttggtgcttccttg

SEQ ID NO: 2298972 - DNA, 25 bp, Homo sapien
ttaatttctgtctcttggtgcttcc

SEQ ID NO: 2298973 - DNA, 25 bp, Homo sapien
tcagtgccgcatctgtcaagcaatg

SEQ ID NO: 2298974 - DNA, 25 bp, Homo sapien
aaggatcagtgccgcatctgtcaag

SEQ ID NO: 2298975 - DNA, 25 bp, Homo sapien
ctggctaaggatcagtgccgcatct

SEQ ID NO: 2298976 - DNA, 25 bp, Homo sapien
gatcagtgccgcatctgtcaagcaa

SEQ ID NO: 2298977 - DNA, 25 bp, Homo sapien
tgagggtagtggccatcaacattac

SEQ ID NO: 2298978 - DNA, 25 bp, Homo sapien
atgtcatgagggtagtggccatcaa

SEQ ID NO: 2298979 - DNA, 25 bp, Homo sapien
gtcatgagggtagtggccatcaaca

SEQ ID NO: 2298980 - DNA, 25 bp, Homo sapien
ctatgatgtcatgagggtagtggcc

SEQ ID NO: 2298981 - DNA, 25 bp, Homo sapien
ctttattgaaatattttcctttgtg

SEQ ID NO: 2298982 - DNA, 25 bp, Homo sapien
tttattgaaatattttcctttgtgc

SEQ ID NO: 2298983 - DNA, 25 bp, Homo sapien
tgattctttattgaaatattttcct

SEQ ID NO: 2298984 - DNA, 25 bp, Homo sapien
aatgattctttattgaaatattttc

SEQ ID NO: 2298985 - DNA, 25 bp, Homo sapien
agtcaagtggggtccgcctccaggg

SEQ ID NO: 2298986 - DNA, 25 bp, Homo sapien
aagtcaagtggggtccgcctccagg

SEQ ID NO: 2298987 - DNA, 25 bp, Homo sapien
taagtcaagtggggtccgcctccag

SEQ ID NO: 2298988 - DNA, 25 bp, Homo sapien
ttaagtcaagtggggtccgcctcca

SEQ ID NO: 2298989 - DNA, 25 bp, Homo sapien
ctctttaattatcgtgtacattccc

SEQ ID NO: 2298990 - DNA, 25 bp, Homo sapien
cctctccacacagtgtttacttctt

SEQ ID NO: 2298991 - DNA, 25 bp, Homo sapien
ttccctccaaacacgtcagtccctc

SEQ ID NO: 2298992 - DNA, 25 bp, Homo sapien
ccaaacacgtcagtccctctccaca

SEQ ID NO: 2298993 - DNA, 25 bp, Homo sapien
taaggcagcattacatgtcccaggc

SEQ ID NO: 2298994 - DNA, 25 bp, Homo sapien
tgggcacttgccatgcatcaggagc

SEQ ID NO: 2298995 - DNA, 25 bp, Homo sapien
atttagagcttaaatgaaccagctg

SEQ ID NO: 2298996 - DNA, 25 bp, Homo sapien
aactgtgatatgcatgaaactcatg

SEQ ID NO: 2298997 - DNA, 25 bp, Homo sapien
ctggcctacaaatacgttttaagca

SEQ ID NO: 2298998 - DNA, 25 bp, Homo sapien
atgttggccaacttgaggccagggc

SEQ ID NO: 2298999 - DNA, 25 bp, Homo sapien
tttgtcctgcctaggaatttggagg

SEQ ID NO: 2299000 - DNA, 25 bp, Homo sapien
tgagctccaattatatccaagacac

SEQ ID NO: 2299001 - DNA, 25 bp, Homo sapien
tactatggattgaatccaatagtcc

SEQ ID NO: 2299002 - DNA, 25 bp, Homo sapien
aactgtccattagtagacttctagg

SEQ ID NO: 2299003 - DNA, 25 bp, Homo sapien
gattgaatccaatagtccaagtatt

SEQ ID NO: 2299004 - DNA, 25 bp, Homo sapien
ctcaacatgtaggtgggtgactaac

SEQ ID NO: 2299005 - DNA, 25 bp, Homo sapien
taagatagacaattggtaccaggaa

SEQ ID NO: 2299006 - DNA, 25 bp, Homo sapien
ggcccctgtttcagttattctgcta

SEQ ID NO: 2299007 - DNA, 25 bp, Homo sapien
ctttaatcgggccttggtctttcag

SEQ ID NO: 2299008 - DNA, 25 bp, Homo sapien
tctcaaccaggtgcaccttcaaagg

SEQ ID NO: 2299009 - DNA, 25 bp, Homo sapien
ccccccacttctgatgccaacacca

SEQ ID NO: 2299010 - DNA, 25 bp, Homo sapien
cgcccagccgagactgccccccact

SEQ ID NO: 2299011 - DNA, 25 bp, Homo sapien
tgcgcccagccgagactgcccccca

SEQ ID NO: 2299012 - DNA, 25 bp, Homo sapien
cttctgatgccaacaccaagtccca

SEQ ID NO: 2299013 - DNA, 25 bp, Homo sapien
catagggattacgacttagggtggc

SEQ ID NO: 2299014 - DNA, 25 bp, Homo sapien
caaggtagtgtgtggatgcagtccc

SEQ ID NO: 2299015 - DNA, 25 bp, Homo sapien
gaaactccaagtgtagccagacaag

SEQ ID NO: 2299016 - DNA, 25 bp, Homo sapien
tgaaaactcgaaaagcactccggaa

SEQ ID NO: 2299017 - DNA, 25 bp, Homo sapien
ttaagagtcaatacaatcccagtgg

SEQ ID NO: 2299018 - DNA, 25 bp, Homo sapien
tgaatagcgaagacatacacacact

SEQ ID NO: 2299019 - DNA, 25 bp, Homo sapien
catgaagctaggtcaattggttatc

SEQ ID NO: 2299020 - DNA, 25 bp, Homo sapien
tatatgccacgaatgaaaataagcc

SEQ ID NO: 2299021 - DNA, 25 bp, Homo sapien
gtgacctcagagaaagcataccttg

SEQ ID NO: 2299022 - DNA, 25 bp, Homo sapien
aaacctggacttgtgactagcttca

SEQ ID NO: 2299023 - DNA, 25 bp, Homo sapien
aacattgagatgtgatgagccgagc

SEQ ID NO: 2299024 - DNA, 25 bp, Homo sapien
aagtgctgggaaggtagtgacctca

SEQ ID NO: 2299025 - DNA, 25 bp, Homo sapien
gaagaggagcaatagaggatacaac

SEQ ID NO: 2299026 - DNA, 25 bp, Homo sapien
tccacacaatgacagctagcttttt

SEQ ID NO: 2299027 - DNA, 25 bp, Homo sapien
gctgactgtccatcctaattactga

SEQ ID NO: 2299028 - DNA, 25 bp, Homo sapien
aaaatgctgttttgcctagatagaa

SEQ ID NO: 2299029 - DNA, 25 bp, Homo sapien
agttataagtcagttacaagtcagt

SEQ ID NO: 2299030 - DNA, 25 bp, Homo sapien
tagtagcagtgtattacaagtcagt

SEQ ID NO: 2299031 - DNA, 25 bp, Homo sapien
tgatatagtagcagtgtattacaag

SEQ ID NO: 2299032 - DNA, 25 bp, Homo sapien
tgtcggtttgatatagtagcagtgt

SEQ ID NO: 2299033 - DNA, 25 bp, Homo sapien
aaaggtggctggcttttaggataca

SEQ ID NO: 2299034 - DNA, 25 bp, Homo sapien
taaagactggtgcaaaaaaggtggc

SEQ ID NO: 2299035 - DNA, 25 bp, Homo sapien
tggtaatgtagcactctttggtttt

SEQ ID NO: 2299036 - DNA, 25 bp, Homo sapien
gatacagtggtggtaatgtagcact

SEQ ID NO: 2299037 - DNA, 25 bp, Homo sapien
taacggtgacactacagctatctga

SEQ ID NO: 2299038 - DNA, 25 bp, Homo sapien
tcagtttgatgagatacagttgccc

SEQ ID NO: 2299039 - DNA, 25 bp, Homo sapien
aattaccgggatacatgcatgcttc

SEQ ID NO: 2299040 - DNA, 25 bp, Homo sapien
gaatcacgactttgtccagctgcag

SEQ ID NO: 2299041 - DNA, 25 bp, Homo sapien
gagccagcccaatgcacagcagtgg

SEQ ID NO: 2299042 - DNA, 25 bp, Homo sapien
cagcccaatgcacagcagtggatat

SEQ ID NO: 2299043 - DNA, 25 bp, Homo sapien
ccttcgtaaaccatggagagccagc

SEQ ID NO: 2299044 - DNA, 25 bp, Homo sapien
ggtactccttcgtaaaccatggaga

SEQ ID NO: 2299045 - DNA, 25 bp, Homo sapien
gttggtatccaaaggagaacactgc

SEQ ID NO: 2299046 - DNA, 25 bp, Homo sapien
acagtgacatctctatcagaagttc

SEQ ID NO: 2299047 - DNA, 25 bp, Homo sapien
ctactgtcgtcttgtagttcaggaa

SEQ ID NO: 2299048 - DNA, 25 bp, Homo sapien
ggctcttaaattgaacaacagtgac

SEQ ID NO: 2299049 - DNA, 25 bp, Homo sapien
tagtggacgtgagttctgtgttaca

SEQ ID NO: 2299050 - DNA, 25 bp, Homo sapien
tactggagtgaaaggttacctcgtg

SEQ ID NO: 2299051 - DNA, 25 bp, Homo sapien
gaagcttgttcataagatgctgtca

SEQ ID NO: 2299052 - DNA, 25 bp, Homo sapien
taatgactgtcccaaagaactatgc

SEQ ID NO: 2299053 - DNA, 25 bp, Homo sapien
gatgaactcgctttcgtgtctacag

SEQ ID NO: 2299054 - DNA, 25 bp, Homo sapien
tttagaggtctgcacgccgctgctg

SEQ ID NO: 2299055 - DNA, 25 bp, Homo sapien
gaggtttttaccatggcttgtcaag

SEQ ID NO: 2299056 - DNA, 25 bp, Homo sapien
tcacgttcagtgcatttaaacccaa

SEQ ID NO: 2299057 - DNA, 25 bp, Homo sapien
taggatgaggctttacatccttccg

SEQ ID NO: 2299058 - DNA, 25 bp, Homo sapien
cttccacagagtttgtattctttag

SEQ ID NO: 2299059 - DNA, 25 bp, Homo sapien
tacatccttccgttcttccacagag

SEQ ID NO: 2299060 - DNA, 25 bp, Homo sapien
gggcttgctccttcctaggatgagg

SEQ ID NO: 2299061 - DNA, 25 bp, Homo sapien
tttacaatattgtagacaccaccaa

SEQ ID NO: 2299062 - DNA, 25 bp, Homo sapien
gcatgagaggtgctagcccaaatat

SEQ ID NO: 2299063 - DNA, 25 bp, Homo sapien
gcccaaatattgacctacgactctt

SEQ ID NO: 2299064 - DNA, 25 bp, Homo sapien
caaatactaggtagtggcataacac

SEQ ID NO: 2299065 - DNA, 25 bp, Homo sapien
gaggacaattagttgacccatttcc

SEQ ID NO: 2299066 - DNA, 25 bp, Homo sapien
cttatgagtaggctagatgttacca

SEQ ID NO: 2299067 - DNA, 25 bp, Homo sapien
tttacatatagctcgtcatgacgac

SEQ ID NO: 2299068 - DNA, 25 bp, Homo sapien
ccatcaactgtttcaaagaggacaa

SEQ ID NO: 2299069 - DNA, 25 bp, Homo sapien
tgttcccctcacatgaactgaagag

SEQ ID NO: 2299070 - DNA, 25 bp, Homo sapien
gaaaggccctagatataaccacatg

SEQ ID NO: 2299071 - DNA, 25 bp, Homo sapien
gaagaggttaatacatctccagata

SEQ ID NO: 2299072 - DNA, 25 bp, Homo sapien
tcagaactctagatattgctaatca

SEQ ID NO: 2299073 - DNA, 25 bp, Homo sapien
tctttgtagcaacaaattttaacca

SEQ ID NO: 2299074 - DNA, 25 bp, Homo sapien
tgtagcaacaaattttaaccagtct

SEQ ID NO: 2299075 - DNA, 25 bp, Homo sapien
tctcttggctgtctttctgtgtcct

SEQ ID NO: 2299076 - DNA, 25 bp, Homo sapien
agcaacaaattttaaccagtcttct

SEQ ID NO: 2299077 - DNA, 25 bp, Homo sapien
tagtcaggacagacaccttatgacc

SEQ ID NO: 2299078 - DNA, 25 bp, Homo sapien
atctacatattatctgcagccattt

SEQ ID NO: 2299079 - DNA, 25 bp, Homo sapien
agtagtcaggacagacaccttatga

SEQ ID NO: 2299080 - DNA, 25 bp, Homo sapien
tcaggacagacaccttatgacccag

SEQ ID NO: 2299081 - DNA, 25 bp, Homo sapien
atgcatgtttcaatgctaactgact

SEQ ID NO: 2299082 - DNA, 25 bp, Homo sapien
tatgcatgtttcaatgctaactgac

SEQ ID NO: 2299083 - DNA, 25 bp, Homo sapien
tatttcagcctcacattcaccgtgc

SEQ ID NO: 2299084 - DNA, 25 bp, Homo sapien
ccttccaacccgagaggcattgttt

SEQ ID NO: 2299085 - DNA, 25 bp, Homo sapien
gacttgtctcctggactgtctcacc

SEQ ID NO: 2299086 - DNA, 25 bp, Homo sapien
tgtgccatgacaaagctgtatgact

SEQ ID NO: 2299087 - DNA, 25 bp, Homo sapien
tctcaatgttagctgtgatcaatat

SEQ ID NO: 2299088 - DNA, 25 bp, Homo sapien
tgttagctgtgatcaatatataatc

SEQ ID NO: 2299089 - DNA, 25 bp, Homo sapien
gaaaatatatattggagggataaaa

SEQ ID NO: 2299090 - DNA, 25 bp, Homo sapien
aatcaaaattcagagggaaaatata

SEQ ID NO: 2299091 - DNA, 25 bp, Homo sapien
ttgtagcatctcaaatccatctgca

SEQ ID NO: 2299092 - DNA, 25 bp, Homo sapien
ttttacaggactgctaccaaggctt

SEQ ID NO: 2299093 - DNA, 25 bp, Homo sapien
ttattttacaggactgctaccaagg

SEQ ID NO: 2299094 - DNA, 25 bp, Homo sapien
gaatcttttactgggttttgtagca

SEQ ID NO: 2299095 - DNA, 25 bp, Homo sapien
aggaacggtcctccctcaagatggg

SEQ ID NO: 2299096 - DNA, 25 bp, Homo sapien
cacatggctacccaaagttctcaag

SEQ ID NO: 2299097 - DNA, 25 bp, Homo sapien
aacgttgtcccaaaattgtgttcag

SEQ ID NO: 2299098 - DNA, 25 bp, Homo sapien
tgtttccccggtgaataccatccat

SEQ ID NO: 2299099 - DNA, 25 bp, Homo sapien
gccacctcgcatttcagcttttgaa

SEQ ID NO: 2299100 - DNA, 25 bp, Homo sapien
taagccacctcgcatttcagctttt

SEQ ID NO: 2299101 - DNA, 25 bp, Homo sapien
cctcgcatttcagcttttgaaagca

SEQ ID NO: 2299102 - DNA, 25 bp, Homo sapien
cataagccacctcgcatttcagctt

SEQ ID NO: 2299103 - DNA, 25 bp, Homo sapien
aaataaccaacatgctctgggcgtg

SEQ ID NO: 2299104 - DNA, 25 bp, Homo sapien
aatgacagaggaccgtagttgtttc

SEQ ID NO: 2299105 - DNA, 25 bp, Homo sapien
aatccattggtctaccttgtacata

SEQ ID NO: 2299106 - DNA, 25 bp, Homo sapien
ggtctaccttgtacatagttttcaa

SEQ ID NO: 2299107 - DNA, 25 bp, Homo sapien
cggcactccagcctgtatgggaggc

SEQ ID NO: 2299108 - DNA, 25 bp, Homo sapien
cagcctgtatgggaggcagagcaaa

SEQ ID NO: 2299109 - DNA, 25 bp, Homo sapien
gtatgggaggcagagcaaaactccg

SEQ ID NO: 2299110 - DNA, 25 bp, Homo sapien
ctgtatgggaggcagagcaaaactc

SEQ ID NO: 2299111 - DNA, 25 bp, Homo sapien
ctggtttgtgtttagtatgttatgc

SEQ ID NO: 2299112 - DNA, 25 bp, Homo sapien
ttactggtttgtgtttagtatgtta

SEQ ID NO: 2299113 - DNA, 25 bp, Homo sapien
gccaccgagcccaccaatgtttgta

SEQ ID NO: 2299114 - DNA, 25 bp, Homo sapien
ggtttgtgtttagtatgttatgctt

SEQ ID NO: 2299115 - DNA, 25 bp, Homo sapien
tcctgggcaacatggcgaaacccta

SEQ ID NO: 2299116 - DNA, 25 bp, Homo sapien
gagttcaccatcctgggcaacatgg

SEQ ID NO: 2299117 - DNA, 25 bp, Homo sapien
agttcaccatcctgggcaacatggc

SEQ ID NO: 2299118 - DNA, 25 bp, Homo sapien
tgggcaacatggcgaaaccctatta

SEQ ID NO: 2299119 - DNA, 25 bp, Homo sapien
gccaccgtgcccagccgtgcctggc

SEQ ID NO: 2299120 - DNA, 25 bp, Homo sapien
tcctgacctcaggtaatctacccac

SEQ ID NO: 2299121 - DNA, 25 bp, Homo sapien
accgtgcccagccgtgcctggctaa

SEQ ID NO: 2299122 - DNA, 25 bp, Homo sapien
ctcctgacctcaggtaatctaccca

SEQ ID NO: 2299123 - DNA, 25 bp, Homo sapien
gagaatacaaggcaaccaggtgctg

SEQ ID NO: 2299124 - DNA, 25 bp, Homo sapien
taggcacaagcttataggaatccca

SEQ ID NO: 2299125 - DNA, 25 bp, Homo sapien
tgcagataagacctcaggcaggctt

SEQ ID NO: 2299126 - DNA, 25 bp, Homo sapien
tactaaacgttaatggtccatgtcc

SEQ ID NO: 2299127 - DNA, 25 bp, Homo sapien
tattcaagatttccttcccatcccg

SEQ ID NO: 2299128 - DNA, 25 bp, Homo sapien
gcttgtcaggtccaattagcataat

SEQ ID NO: 2299129 - DNA, 25 bp, Homo sapien
tcccatcccgtcatgcatgtgtttt

SEQ ID NO: 2299130 - DNA, 25 bp, Homo sapien
tatcatcaaagaaacggaccaacgt

SEQ ID NO: 2299131 - DNA, 25 bp, Homo sapien
ggtgtgaatggaaagtgaactgcta

SEQ ID NO: 2299132 - DNA, 25 bp, Homo sapien
gtgctaggggtagggtggtgtgaat

SEQ ID NO: 2299133 - DNA, 25 bp, Homo sapien
agtagcttagtggttgtcaggtgct

SEQ ID NO: 2299134 - DNA, 25 bp, Homo sapien
caggtgctaggggtagggtggtgtg

SEQ ID NO: 2299135 - DNA, 25 bp, Homo sapien
gacactcttatcatcaacaggcatg

SEQ ID NO: 2299136 - DNA, 25 bp, Homo sapien
gaaggtgcttactgatcatgtgcca

SEQ ID NO: 2299137 - DNA, 25 bp, Homo sapien
ttaaattccggttgcctgaggccta

SEQ ID NO: 2299138 - DNA, 25 bp, Homo sapien
ggctgagaccgataagcctcaccag

SEQ ID NO: 2299139 - DNA, 25 bp, Homo sapien
accttttcatacacccgttggccat

SEQ ID NO: 2299140 - DNA, 25 bp, Homo sapien
tcatacacccgttggccatttgtgt

SEQ ID NO: 2299141 - DNA, 25 bp, Homo sapien
gagacagagtcgcagagtgcagtgg

SEQ ID NO: 2299142 - DNA, 25 bp, Homo sapien
agcaccttttcatacacccgttggc

SEQ ID NO: 2299143 - DNA, 25 bp, Homo sapien
tcttaaagagtgaatgtgcttccct

SEQ ID NO: 2299144 - DNA, 25 bp, Homo sapien
tctgtggcccgggttatttgctctt

SEQ ID NO: 2299145 - DNA, 25 bp, Homo sapien
ctaggaacaagataatactgtggac

SEQ ID NO: 2299146 - DNA, 25 bp, Homo sapien
gaacaagataatactgtggactgca

SEQ ID NO: 2299147 - DNA, 25 bp, Homo sapien
gaagttaaggtcctgtgtccatgac

SEQ ID NO: 2299148 - DNA, 25 bp, Homo sapien
gagccactgtgtatggccgagtaag

SEQ ID NO: 2299149 - DNA, 25 bp, Homo sapien
caagagtaagttgtcttacaagtga

SEQ ID NO: 2299150 - DNA, 25 bp, Homo sapien
gccatcttcaaacgagaagaaacat

SEQ ID NO: 2299151 - DNA, 25 bp, Homo sapien
taaggactgttttgagctgaagatg

SEQ ID NO: 2299152 - DNA, 25 bp, Homo sapien
agtttgctacccctggaagcctgaa

SEQ ID NO: 2299153 - DNA, 25 bp, Homo sapien
tatgccacccctaaataaggactgt

SEQ ID NO: 2299154 - DNA, 25 bp, Homo sapien
ctggtgaaaactctagactctgtcc

SEQ ID NO: 2299155 - DNA, 25 bp, Homo sapien
tgctaaaagacagccccagtagcgc

SEQ ID NO: 2299156 - DNA, 25 bp, Homo sapien
taacactgtcagaggcgtatgaacc

SEQ ID NO: 2299157 - DNA, 25 bp, Homo sapien
tacagaccatagaacaggttgttga

SEQ ID NO: 2299158 - DNA, 25 bp, Homo sapien
ggaagttacccagcatggtctaaaa

SEQ ID NO: 2299159 - DNA, 25 bp, Homo sapien
tggagtccctgcgctgtgcttctgg

SEQ ID NO: 2299160 - DNA, 25 bp, Homo sapien
gagtccctgcgctgtgcttctgggg

SEQ ID NO: 2299161 - DNA, 25 bp, Homo sapien
ggagtccctgcgctgtgcttctggg

SEQ ID NO: 2299162 - DNA, 25 bp, Homo sapien
actcctgtgtgcttcgactgaagca

SEQ ID NO: 2299163 - DNA, 25 bp, Homo sapien
cactcctgtgtgcttcgactgaagc

SEQ ID NO: 2299164 - DNA, 25 bp, Homo sapien
ctcctgtgtgcttcgactgaagcat

SEQ ID NO: 2299165 - DNA, 25 bp, Homo sapien
ttccaattggacagaaatcatttac

SEQ ID NO: 2299166 - DNA, 25 bp, Homo sapien
gagttccaattggacagaaatcatt

SEQ ID NO: 2299167 - DNA, 25 bp, Homo sapien
ttggagttccaattggacagaaatc

SEQ ID NO: 2299168 - DNA, 25 bp, Homo sapien
ctttggagttccaattggacagaaa

SEQ ID NO: 2299169 - DNA, 25 bp, Homo sapien
acttggcacagtggagccggcatct

SEQ ID NO: 2299170 - DNA, 25 bp, Homo sapien
tgtttgatactgactggcccgtgct

SEQ ID NO: 2299171 - DNA, 25 bp, Homo sapien
gcccgtgcttagagtgccctcagtg

SEQ ID NO: 2299172 - DNA, 25 bp, Homo sapien
tgtctaccgttgactccgttctcag

SEQ ID NO: 2299173 - DNA, 25 bp, Homo sapien
cagcccatgcacagagtcattccgt

SEQ ID NO: 2299174 - DNA, 25 bp, Homo sapien
gcccatgcacagagtcattccgtct

SEQ ID NO: 2299175 - DNA, 25 bp, Homo sapien
ccatgcacagagtcattccgtctca

SEQ ID NO: 2299176 - DNA, 25 bp, Homo sapien
atgcacagagtcattccgtctcagc

SEQ ID NO: 2299177 - DNA, 25 bp, Homo sapien
agcggcagctacaccgcccgagaaa

SEQ ID NO: 2299178 - DNA, 25 bp, Homo sapien
tctgcttattcagagacgcccgtcc

SEQ ID NO: 2299179 - DNA, 25 bp, Homo sapien
gaaactgacgagaaatgcaacatgg

SEQ ID NO: 2299180 - DNA, 25 bp, Homo sapien
ccggatgaatgagcagcgcgatgcc

SEQ ID NO: 2299181 - DNA, 25 bp, Homo sapien
cagcctggatcttctcgtgggtggt

SEQ ID NO: 2299182 - DNA, 25 bp, Homo sapien
gtgagctccttggttagcctctcta

SEQ ID NO: 2299183 - DNA, 25 bp, Homo sapien
tcatactgctgtttgagggtcagct

SEQ ID NO: 2299184 - DNA, 25 bp, Homo sapien
taatggtccaccgtctgcaatacct

SEQ ID NO: 2299185 - DNA, 25 bp, Homo sapien
aaagggagaggtgacaggcaactca

SEQ ID NO: 2299186 - DNA, 25 bp, Homo sapien
tcaatcacctcctttatgacttctt

SEQ ID NO: 2299187 - DNA, 25 bp, Homo sapien
gaagaaaaaacagtcctttcaatca

SEQ ID NO: 2299188 - DNA, 25 bp, Homo sapien
ttgatcatgatgagtgggccttgcg

SEQ ID NO: 2299189 - DNA, 25 bp, Homo sapien
ctgggtttgagataacagcggtttt

SEQ ID NO: 2299190 - DNA, 25 bp, Homo sapien
agtgctgagacttgatgactcttac

SEQ ID NO: 2299191 - DNA, 25 bp, Homo sapien
cagcggttttgagaagtttgattta

SEQ ID NO: 2299192 - DNA, 25 bp, Homo sapien
tgaatgtcgtcttagagtgctgaga

SEQ ID NO: 2299193 - DNA, 25 bp, Homo sapien
ctcataagacttggacatggcccag

SEQ ID NO: 2299194 - DNA, 25 bp, Homo sapien
ctcgctccgaggtgaaatcaaggca

SEQ ID NO: 2299195 - DNA, 25 bp, Homo sapien
catccgacaggctttaaaagaggcc

SEQ ID NO: 2299196 - DNA, 25 bp, Homo sapien
aatcaaggcagtgggatcacccagc

SEQ ID NO: 2299197 - DNA, 25 bp, Homo sapien
tattacacactaaattggaaggcaa

SEQ ID NO: 2299198 - DNA, 25 bp, Homo sapien
ttttttggtagacaggcatccaaat

SEQ ID NO: 2299199 - DNA, 25 bp, Homo sapien
ggcaagttgattcagtatgtcataa

SEQ ID NO: 2299200 - DNA, 25 bp, Homo sapien
tctaaaagtataaatgcttaccata

SEQ ID NO: 2299201 - DNA, 25 bp, Homo sapien
caatattgactagtgaacccttgat

SEQ ID NO: 2299202 - DNA, 25 bp, Homo sapien
tatgcaaggtaagtgcaatgacaga

SEQ ID NO: 2299203 - DNA, 25 bp, Homo sapien
aaaagtgtgccttcttctagtacaa

SEQ ID NO: 2299204 - DNA, 25 bp, Homo sapien
caaagctcatggtgtagcaaaggca

SEQ ID NO: 2299205 - DNA, 25 bp, Homo sapien
gagcactaaacaacatcaggccagg

SEQ ID NO: 2299206 - DNA, 25 bp, Homo sapien
tgcacatctttaggcaacactgccg

SEQ ID NO: 2299207 - DNA, 25 bp, Homo sapien
aacataactgggcatgggtgaccct

SEQ ID NO: 2299208 - DNA, 25 bp, Homo sapien
caacattggtgggtactgactctgg

SEQ ID NO: 2299209 - DNA, 25 bp, Homo sapien
gctgatacacgtatctccatcagca

SEQ ID NO: 2299210 - DNA, 25 bp, Homo sapien
ttatgctgatacacgtatctccatc

SEQ ID NO: 2299211 - DNA, 25 bp, Homo sapien
tgctgatacacgtatctccatcagc

SEQ ID NO: 2299212 - DNA, 25 bp, Homo sapien
tatgctgatacacgtatctccatca

SEQ ID NO: 2299213 - DNA, 25 bp, Homo sapien
tacaatgacctatctgctcacagca

SEQ ID NO: 2299214 - DNA, 25 bp, Homo sapien
gactaaaatctcattggtctagagc

SEQ ID NO: 2299215 - DNA, 25 bp, Homo sapien
gagaccctggtctaaattttagcaa

SEQ ID NO: 2299216 - DNA, 25 bp, Homo sapien
taggctccgcaaatatggaccttct

SEQ ID NO: 2299217 - DNA, 25 bp, Homo sapien
gaagagaatgccatatacctcatgg

SEQ ID NO: 2299218 - DNA, 25 bp, Homo sapien
tacctcatgggatactgagttaatg

SEQ ID NO: 2299219 - DNA, 25 bp, Homo sapien
tgtgcccgaccacaactggctgtct

SEQ ID NO: 2299220 - DNA, 25 bp, Homo sapien
taaacacctgctatggtgggaagga

SEQ ID NO: 2299221 - DNA, 25 bp, Homo sapien
agcatctatccaaccacgcagagga

SEQ ID NO: 2299222 - DNA, 25 bp, Homo sapien
tccctaattcacaggagcccagaag

SEQ ID NO: 2299223 - DNA, 25 bp, Homo sapien
tagtcacaggtactcctggtctggc

SEQ ID NO: 2299224 - DNA, 25 bp, Homo sapien
caaagggccaattaggcaacctggt

SEQ ID NO: 2299225 - DNA, 25 bp, Homo sapien
gcatcaggggctctcaaagccaaga

SEQ ID NO: 2299226 - DNA, 25 bp, Homo sapien
ggggctctcaaagccaagagtgaag

SEQ ID NO: 2299227 - DNA, 25 bp, Homo sapien
tcaggggctctcaaagccaagagtg

SEQ ID NO: 2299228 - DNA, 25 bp, Homo sapien
caggggctctcaaagccaagagtga

SEQ ID NO: 2299229 - DNA, 25 bp, Homo sapien
gggtctgatcaaccattagaagctc

SEQ ID NO: 2299230 - DNA, 25 bp, Homo sapien
aagggtctgatcaaccattagaagc

SEQ ID NO: 2299231 - DNA, 25 bp, Homo sapien
gtctgatcaaccattagaagctcag

SEQ ID NO: 2299232 - DNA, 25 bp, Homo sapien
attcaagggtctgatcaaccattag

SEQ ID NO: 2299233 - DNA, 25 bp, Homo sapien
ggaccactgtattgccagaatctaa

SEQ ID NO: 2299234 - DNA, 25 bp, Homo sapien
tgagcatccttaccaagtagtcgac

SEQ ID NO: 2299235 - DNA, 25 bp, Homo sapien
tcagatgtcttagaccacaggacca

SEQ ID NO: 2299236 - DNA, 25 bp, Homo sapien
ctagcaggaaggttagtcagatgtc

SEQ ID NO: 2299237 - DNA, 25 bp, Homo sapien
gagagctgcaggcatgaccaacctg

SEQ ID NO: 2299238 - DNA, 25 bp, Homo sapien
tatttctagcccaccatgatagcga

SEQ ID NO: 2299239 - DNA, 25 bp, Homo sapien
tcctttctacacaaactcggtgtga

SEQ ID NO: 2299240 - DNA, 25 bp, Homo sapien
tgaacagtctgcaaaccgtggtgag

SEQ ID NO: 2299241 - DNA, 25 bp, Homo sapien
caaataagtcagtcctcccttttga

SEQ ID NO: 2299242 - DNA, 25 bp, Homo sapien
taataattgtttgtaagtcatccac

SEQ ID NO: 2299243 - DNA, 25 bp, Homo sapien
gtatcttgcttagggaaatttcctc

SEQ ID NO: 2299244 - DNA, 25 bp, Homo sapien
tccacatcgcactatttcttccaaa

SEQ ID NO: 2299245 - DNA, 25 bp, Homo sapien
tttactggagccaccgaaatagaaa

SEQ ID NO: 2299246 - DNA, 25 bp, Homo sapien
tggagccaccgaaatagaaaatgag

SEQ ID NO: 2299247 - DNA, 25 bp, Homo sapien
aaatgagcaccaccttttgtcaaaa

SEQ ID NO: 2299248 - DNA, 25 bp, Homo sapien
caaatcttttcaagaccgagaagag

SEQ ID NO: 2299249 - DNA, 25 bp, Homo sapien
gataactcagatgagatggaatggt

SEQ ID NO: 2299250 - DNA, 25 bp, Homo sapien
gtgagataactcagatgagatggaa

SEQ ID NO: 2299251 - DNA, 25 bp, Homo sapien
atagtgagataactcagatgagatg

SEQ ID NO: 2299252 - DNA, 25 bp, Homo sapien
tggggactctggtgaattagagatt

SEQ ID NO: 2299253 - DNA, 25 bp, Homo sapien
catcctccacacgcctctcctttgt

SEQ ID NO: 2299254 - DNA, 25 bp, Homo sapien
tcatcctccacacgcctctcctttg

SEQ ID NO: 2299255 - DNA, 25 bp, Homo sapien
aatacgcctaacctatcaaatacag

SEQ ID NO: 2299256 - DNA, 25 bp, Homo sapien
aaacagaatagacgtgtgggcaccc

SEQ ID NO: 2299257 - DNA, 25 bp, Homo sapien
caaatacagcttacttagcctcacc

SEQ ID NO: 2299258 - DNA, 25 bp, Homo sapien
gatgagattatgtcctagtaaaccc

SEQ ID NO: 2299259 - DNA, 25 bp, Homo sapien
tctgggtcatgcaaacacgtacgtt

SEQ ID NO: 2299260 - DNA, 25 bp, Homo sapien
taagtcgccgcatttcctctggtgt

SEQ ID NO: 2299261 - DNA, 25 bp, Homo sapien
tctgaacttatatgccctcgaaggg

SEQ ID NO: 2299262 - DNA, 25 bp, Homo sapien
ctttaaagcggcagatggagcgcct

SEQ ID NO: 2299263 - DNA, 25 bp, Homo sapien
tacatgccagactaaggagcttgac

SEQ ID NO: 2299264 - DNA, 25 bp, Homo sapien
caagtaatggtgagtgctacatgcc

SEQ ID NO: 2299265 - DNA, 25 bp, Homo sapien
tctaacagtggtgggtaagaggcac

SEQ ID NO: 2299266 - DNA, 25 bp, Homo sapien
gaacaccacgagctacattcattgg

SEQ ID NO: 2299267 - DNA, 25 bp, Homo sapien
ggttaagatattgctcagagagcca

SEQ ID NO: 2299268 - DNA, 25 bp, Homo sapien
tcattaaggcttccagactaaaggt

SEQ ID NO: 2299269 - DNA, 25 bp, Homo sapien
agagagccacagagttaacctattc

SEQ ID NO: 2299270 - DNA, 25 bp, Homo sapien
taataaaccctaaattgctgcatga

SEQ ID NO: 2299271 - DNA, 25 bp, Homo sapien
cactgcttcctagagtgttagtgga

SEQ ID NO: 2299272 - DNA, 25 bp, Homo sapien
tgcgcagttgtcagggagctcatta

SEQ ID NO: 2299273 - DNA, 25 bp, Homo sapien
ctaattagggcagtgtcaggcacgg

SEQ ID NO: 2299274 - DNA, 25 bp, Homo sapien
ttcacccgtgctgtcaggatgcgca

SEQ ID NO: 2299275 - DNA, 25 bp, Homo sapien
gatctcttactaccttttctctgga

SEQ ID NO: 2299276 - DNA, 25 bp, Homo sapien
atctcttactaccttttctctggag

SEQ ID NO: 2299277 - DNA, 25 bp, Homo sapien
ggatctcttactaccttttctctgg

SEQ ID NO: 2299278 - DNA, 25 bp, Homo sapien
gaaaaaacagatacatctgactctg

SEQ ID NO: 2299279 - DNA, 25 bp, Homo sapien
aaagatgcataaagcccacagagaa

SEQ ID NO: 2299280 - DNA, 25 bp, Homo sapien
gactctgtagacatcatacatttta

SEQ ID NO: 2299281 - DNA, 25 bp, Homo sapien
gacaaaagatgcataaagcccacag

SEQ ID NO: 2299282 - DNA, 25 bp, Homo sapien
gcagatgtttttgtgttaaacaaaa

SEQ ID NO: 2299283 - DNA, 25 bp, Homo sapien
ctggcagatgtttttgtgttaaaca

SEQ ID NO: 2299284 - DNA, 25 bp, Homo sapien
caactggcagatgtttttgtgttaa

SEQ ID NO: 2299285 - DNA, 25 bp, Homo sapien
actggcagatgtttttgtgttaaac

SEQ ID NO: 2299286 - DNA, 25 bp, Homo sapien
ggctcagtggattacactttaactg

SEQ ID NO: 2299287 - DNA, 25 bp, Homo sapien
cagtggattacactttaactgaaaa

SEQ ID NO: 2299288 - DNA, 25 bp, Homo sapien
gctcagtggattacactttaactga

SEQ ID NO: 2299289 - DNA, 25 bp, Homo sapien
cctggctcagtggattacactttaa

SEQ ID NO: 2299290 - DNA, 25 bp, Homo sapien
gtaaagtgacttaatactagataaa

SEQ ID NO: 2299291 - DNA, 25 bp, Homo sapien
ccagcaattacactcttgggaattc

SEQ ID NO: 2299292 - DNA, 25 bp, Homo sapien
cttggcctcaaggcatgcgcccgcc

SEQ ID NO: 2299293 - DNA, 25 bp, Homo sapien
tgacttaatactagataaaaaacag

SEQ ID NO: 2299294 - DNA, 25 bp, Homo sapien
tccactagatagaacagcccggagc

SEQ ID NO: 2299295 - DNA, 25 bp, Homo sapien
catgcaaaactgagtgacgtcctcc

SEQ ID NO: 2299296 - DNA, 25 bp, Homo sapien
tttgctgacctagccaacaggccag

SEQ ID NO: 2299297 - DNA, 25 bp, Homo sapien
caaatgtgatgcaagagcctcatgc

SEQ ID NO: 2299298 - DNA, 25 bp, Homo sapien
gactttgccacttcataaagggaga

SEQ ID NO: 2299299 - DNA, 25 bp, Homo sapien
tattgaacccagaagctcagggaca

SEQ ID NO: 2299300 - DNA, 25 bp, Homo sapien
ctcagggacatagacggccacatct

SEQ ID NO: 2299301 - DNA, 25 bp, Homo sapien
tctttaagaggagtcgcagagctga

SEQ ID NO: 2299302 - DNA, 25 bp, Homo sapien
cacaatgccagacagcagggaatgc

SEQ ID NO: 2299303 - DNA, 25 bp, Homo sapien
tctgctcaggacagaaatttacata

SEQ ID NO: 2299304 - DNA, 25 bp, Homo sapien
tctctggaagtgaatcatctgctca

SEQ ID NO: 2299305 - DNA, 25 bp, Homo sapien
aatgcaaagatccttttctctggaa

SEQ ID NO: 2299306 - DNA, 25 bp, Homo sapien
tcttcaaccaagtagttgttcagga

SEQ ID NO: 2299307 - DNA, 25 bp, Homo sapien
tgctgcatcctgtaacttttggtat

SEQ ID NO: 2299308 - DNA, 25 bp, Homo sapien
cagaaaaggtactggagatgattcc

SEQ ID NO: 2299309 - DNA, 25 bp, Homo sapien
tcttccgaatgtaggcctttatccc

SEQ ID NO: 2299310 - DNA, 25 bp, Homo sapien
gactataaatcctaactcttgctgg

SEQ ID NO: 2299311 - DNA, 25 bp, Homo sapien
tcagatgtgcagacctcagaaatgt

SEQ ID NO: 2299312 - DNA, 25 bp, Homo sapien
taaaactcgggcatactgggactat

SEQ ID NO: 2299313 - DNA, 25 bp, Homo sapien
tcaaagctttgtgctggagagtcac

SEQ ID NO: 2299314 - DNA, 25 bp, Homo sapien
aactaggatctgatcttgtttcctg

SEQ ID NO: 2299315 - DNA, 25 bp, Homo sapien
gatcttgtttcctggtgaatctgtc

SEQ ID NO: 2299316 - DNA, 25 bp, Homo sapien
tctcaaactaggatctgatcttgtt

SEQ ID NO: 2299317 - DNA, 25 bp, Homo sapien
ctcaaccaaacagacgccatctgcc

SEQ ID NO: 2299318 - DNA, 25 bp, Homo sapien
gggaccaagacccactagcctcaaa

SEQ ID NO: 2299319 - DNA, 25 bp, Homo sapien
gatgaaatccttccatatgcactct

SEQ ID NO: 2299320 - DNA, 25 bp, Homo sapien
tcattctgattaatgtagctgcagc

SEQ ID NO: 2299321 - DNA, 25 bp, Homo sapien
atctctctcattgtaccttcggcca

SEQ ID NO: 2299322 - DNA, 25 bp, Homo sapien
cgactcgtctggctccaccaggtac

SEQ ID NO: 2299323 - DNA, 25 bp, Homo sapien
gactcgtctggctccaccaggtacc

SEQ ID NO: 2299324 - DNA, 25 bp, Homo sapien
actcgtctggctccaccaggtacct

SEQ ID NO: 2299325 - DNA, 25 bp, Homo sapien
ccgactcgtctggctccaccaggta

SEQ ID NO: 2299326 - DNA, 25 bp, Homo sapien
tggctgcttgttaaagctgatttac

SEQ ID NO: 2299327 - DNA, 25 bp, Homo sapien
ctggctgcttgttaaagctgattta

SEQ ID NO: 2299328 - DNA, 25 bp, Homo sapien
tgtacaaaatcactggtcgggactc

SEQ ID NO: 2299329 - DNA, 25 bp, Homo sapien
cactagtaggacaatcggcaaactg

SEQ ID NO: 2299330 - DNA, 25 bp, Homo sapien
cattgggaagggcacaacatcactt

SEQ ID NO: 2299331 - DNA, 25 bp, Homo sapien
tagaaagactcctccggactagatg

SEQ ID NO: 2299332 - DNA, 25 bp, Homo sapien
aaaagacactgaatatcatctctgt

SEQ ID NO: 2299333 - DNA, 25 bp, Homo sapien
catatatgtgcctgtttatttgtgc

SEQ ID NO: 2299334 - DNA, 25 bp, Homo sapien
taaattgcccagtaccacacaaaaa

SEQ ID NO: 2299335 - DNA, 25 bp, Homo sapien
gagactgaaacgtgacagaagggat

SEQ ID NO: 2299336 - DNA, 25 bp, Homo sapien
gttttcttctgcttatatgtgtaag

SEQ ID NO: 2299337 - DNA, 25 bp, Homo sapien
gcatcataaccctcttttaagactt

SEQ ID NO: 2299338 - DNA, 25 bp, Homo sapien
aaatgcatcataaccctcttttaag

SEQ ID NO: 2299339 - DNA, 25 bp, Homo sapien
caatgaaatgcatcataaccctctt

SEQ ID NO: 2299340 - DNA, 25 bp, Homo sapien
gatagtaagcctccttcgatgctga

SEQ ID NO: 2299341 - DNA, 25 bp, Homo sapien
tgtacattagtgaccacagcccggc

SEQ ID NO: 2299342 - DNA, 25 bp, Homo sapien
tgcagaagcgtttcctcccgagtct

SEQ ID NO: 2299343 - DNA, 25 bp, Homo sapien
ttcagcaaccttccggtggatggag

SEQ ID NO: 2299344 - DNA, 25 bp, Homo sapien
ccttcagatcctgcacgactgcggt

SEQ ID NO: 2299345 - DNA, 25 bp, Homo sapien
cttcagatcctgcacgactgcggtg

SEQ ID NO: 2299346 - DNA, 25 bp, Homo sapien
cagatcctgcacgactgcggtgagc

SEQ ID NO: 2299347 - DNA, 25 bp, Homo sapien
tcagatcctgcacgactgcggtgag

SEQ ID NO: 2299348 - DNA, 25 bp, Homo sapien
catccaactggccatcaagaatact

SEQ ID NO: 2299349 - DNA, 25 bp, Homo sapien
cacacaatggggattgcagctttca

SEQ ID NO: 2299350 - DNA, 25 bp, Homo sapien
caagaatactcgactcattggtcac

SEQ ID NO: 2299351 - DNA, 25 bp, Homo sapien
cagctgcagctgctacacacaatgg

SEQ ID NO: 2299352 - DNA, 25 bp, Homo sapien
tcccaagcatctagggacaggcacc

SEQ ID NO: 2299353 - DNA, 25 bp, Homo sapien
ctcaaactcccaagcatctagggac

SEQ ID NO: 2299354 - DNA, 25 bp, Homo sapien
caaactcccaagcatctagggacag

SEQ ID NO: 2299355 - DNA, 25 bp, Homo sapien
gcctcaaactcccaagcatctaggg

SEQ ID NO: 2299356 - DNA, 25 bp, Homo sapien
ctatgctcttggcagctacggtgac

SEQ ID NO: 2299357 - DNA, 25 bp, Homo sapien
gttcggaagagggaaacctatgctc

SEQ ID NO: 2299358 - DNA, 25 bp, Homo sapien
cctgagttcagatcatggcctgtca

SEQ ID NO: 2299359 - DNA, 25 bp, Homo sapien
aatgccttgtcctcatacgctggaa

SEQ ID NO: 2299360 - DNA, 25 bp, Homo sapien
tattccctgacataagacaatattg

SEQ ID NO: 2299361 - DNA, 25 bp, Homo sapien
cacagtggcctcaaagtgtccaagt

SEQ ID NO: 2299362 - DNA, 25 bp, Homo sapien
gtgtccaagtgaaagaatcgtactt

SEQ ID NO: 2299363 - DNA, 25 bp, Homo sapien
caagttaagttagctaagttagcca

SEQ ID NO: 2299364 - DNA, 25 bp, Homo sapien
gaggctaggggaggcgatggagggc

SEQ ID NO: 2299365 - DNA, 25 bp, Homo sapien
ggctaggggaggcgatggagggcct

SEQ ID NO: 2299366 - DNA, 25 bp, Homo sapien
agaggctaggggaggcgatggaggg

SEQ ID NO: 2299367 - DNA, 25 bp, Homo sapien
ctaggggaggcgatggagggccttg

SEQ ID NO: 2299368 - DNA, 25 bp, Homo sapien
atcatctttctgtccaagaagaaga

SEQ ID NO: 2299369 - DNA, 25 bp, Homo sapien
aaggactgtgagatcaactagcctg

SEQ ID NO: 2299370 - DNA, 25 bp, Homo sapien
atgaaggactgtgagatcaactagc

SEQ ID NO: 2299371 - DNA, 25 bp, Homo sapien
tttcacctgatgaaggactgtgaga

SEQ ID NO: 2299372 - DNA, 25 bp, Homo sapien
aatagctggtgggtggagcactcag

SEQ ID NO: 2299373 - DNA, 25 bp, Homo sapien
gcttttgacctatctaggctttcaa

SEQ ID NO: 2299374 - DNA, 25 bp, Homo sapien
tttgacctatctaggctttcaacat

SEQ ID NO: 2299375 - DNA, 25 bp, Homo sapien
atagctggtgggtggagcactcaga

SEQ ID NO: 2299376 - DNA, 25 bp, Homo sapien
tcgccatgttagccagcacggtctt

SEQ ID NO: 2299377 - DNA, 25 bp, Homo sapien
cgccatgttagccagcacggtcttg

SEQ ID NO: 2299378 - DNA, 25 bp, Homo sapien
tgaactgcatttccggcctctagaa

SEQ ID NO: 2299379 - DNA, 25 bp, Homo sapien
tgaaacaagatgctacacggctgct

SEQ ID NO: 2299380 - DNA, 25 bp, Homo sapien
ggaaatgtacgcttccccagagcct

SEQ ID NO: 2299381 - DNA, 25 bp, Homo sapien
tatccggaattagcaaggtagaccc

SEQ ID NO: 2299382 - DNA, 25 bp, Homo sapien
tacatgcagctattcccagcagtgt

SEQ ID NO: 2299383 - DNA, 25 bp, Homo sapien
tttgccgctgtctggaaaattgtag

SEQ ID NO: 2299384 - DNA, 25 bp, Homo sapien
tgcaaagcgtttgcacagagtaggt

SEQ ID NO: 2299385 - DNA, 25 bp, Homo sapien
ccagagggcactaatcagactgtgt

SEQ ID NO: 2299386 - DNA, 25 bp, Homo sapien
caaggccatctaggacatgcataac

SEQ ID NO: 2299387 - DNA, 25 bp, Homo sapien
tacaggtgtgtcttaccatgtcccg

SEQ ID NO: 2299388 - DNA, 25 bp, Homo sapien
caggtgcctaggtcctatctggcca

SEQ ID NO: 2299389 - DNA, 25 bp, Homo sapien
tggagaacagatcaatttcaaggcc

SEQ ID NO: 2299390 - DNA, 25 bp, Homo sapien
gctagagtgaagtgagtgtgcacca

SEQ ID NO: 2299391 - DNA, 25 bp, Homo sapien
gcccagacttgtgtatccaattacc

SEQ ID NO: 2299392 - DNA, 25 bp, Homo sapien
ccacttgaaggtctaataggcattt

SEQ ID NO: 2299393 - DNA, 25 bp, Homo sapien
taggttatctcctccaagcccatgg

SEQ ID NO: 2299394 - DNA, 25 bp, Homo sapien
tttgtgatgaataagcattaattgg

SEQ ID NO: 2299395 - DNA, 25 bp, Homo sapien
cattaattggaagcttaatattgac

SEQ ID NO: 2299396 - DNA, 25 bp, Homo sapien
ttgtgatgaataagcattaattgga

SEQ ID NO: 2299397 - DNA, 25 bp, Homo sapien
ttggaagcttaatattgacctctgc

SEQ ID NO: 2299398 - DNA, 25 bp, Homo sapien
cactaaattccagaagacttggccc

SEQ ID NO: 2299399 - DNA, 25 bp, Homo sapien
tgcgactgtcccaattgaatgagac

SEQ ID NO: 2299400 - DNA, 25 bp, Homo sapien
taattcaaaggctcgattcagcaag

SEQ ID NO: 2299401 - DNA, 25 bp, Homo sapien
tgagacagtgaccacacaatgtgct

SEQ ID NO: 2299402 - DNA, 25 bp, Homo sapien
gctatgacccagaagtggtttgtga

SEQ ID NO: 2299403 - DNA, 25 bp, Homo sapien
gaagacaggcagatacagtcatgga

SEQ ID NO: 2299404 - DNA, 25 bp, Homo sapien
catgcatgcgagtccttggtagcaa

SEQ ID NO: 2299405 - DNA, 25 bp, Homo sapien
tgttttcaacctatgggctatgacc

SEQ ID NO: 2299406 - DNA, 25 bp, Homo sapien
cctttaaccaagacattcgcatggg

SEQ ID NO: 2299407 - DNA, 25 bp, Homo sapien
actgaacgaagtacaggaagcagct

SEQ ID NO: 2299408 - DNA, 25 bp, Homo sapien
catcgtgcccaaccctgtaattctt

SEQ ID NO: 2299409 - DNA, 25 bp, Homo sapien
aaccaactgaattgatgtgaaagtc

SEQ ID NO: 2299410 - DNA, 25 bp, Homo sapien
tatgtttccttaaccacattgtggc

SEQ ID NO: 2299411 - DNA, 25 bp, Homo sapien
tggccagactggaataaacaagttt

SEQ ID NO: 2299412 - DNA, 25 bp, Homo sapien
gccaggtctcactagtagctgagat

SEQ ID NO: 2299413 - DNA, 25 bp, Homo sapien
acaagagtctagaacaccatgtgac

SEQ ID NO: 2299414 - DNA, 25 bp, Homo sapien
taccctttggaatcttgtgagtctt

SEQ ID NO: 2299415 - DNA, 25 bp, Homo sapien
tccagtttatactctaccagtatac

SEQ ID NO: 2299416 - DNA, 25 bp, Homo sapien
gactctgtgtcactactccaatttc

SEQ ID NO: 2299417 - DNA, 25 bp, Homo sapien
ctctgtgtcactactccaatttcag

SEQ ID NO: 2299418 - DNA, 25 bp, Homo sapien
cattttagtgaactctctggttggg

SEQ ID NO: 2299419 - DNA, 25 bp, Homo sapien
tagtgaactctctggttgggtgtga

SEQ ID NO: 2299420 - DNA, 25 bp, Homo sapien
ttttagtgaactctctggttgggtg

SEQ ID NO: 2299421 - DNA, 25 bp, Homo sapien
ttagtgaactctctggttgggtgtg

SEQ ID NO: 2299422 - DNA, 25 bp, Homo sapien
gcccaggtgccttaatcacagctta

SEQ ID NO: 2299423 - DNA, 25 bp, Homo sapien
ccaggtgccttaatcacagcttatt

SEQ ID NO: 2299424 - DNA, 25 bp, Homo sapien
gttgcccaggtgccttaatcacagc

SEQ ID NO: 2299425 - DNA, 25 bp, Homo sapien
tgcccaggtgccttaatcacagctt

SEQ ID NO: 2299426 - DNA, 25 bp, Homo sapien
ggttctgcttcaacgtggacactag

SEQ ID NO: 2299427 - DNA, 25 bp, Homo sapien
catccttcatccgtattctctgtag

SEQ ID NO: 2299428 - DNA, 25 bp, Homo sapien
caattcagtatagtcctgaaggagc

SEQ ID NO: 2299429 - DNA, 25 bp, Homo sapien
ggagccgtgcctcccggaacttata

SEQ ID NO: 2299430 - DNA, 25 bp, Homo sapien
gacaggataaagaagattcataaaa

SEQ ID NO: 2299431 - DNA, 25 bp, Homo sapien
tcagacaggataaagaagattcata

SEQ ID NO: 2299432 - DNA, 25 bp, Homo sapien
aatcagacaggataaagaagattca

SEQ ID NO: 2299433 - DNA, 25 bp, Homo sapien
ctgaatcagacaggataaagaagat

SEQ ID NO: 2299434 - DNA, 25 bp, Homo sapien
taaggtgggagtccgatagtctcca

SEQ ID NO: 2299435 - DNA, 25 bp, Homo sapien
caagaggcccatggatatgaccgtt

SEQ ID NO: 2299436 - DNA, 25 bp, Homo sapien
gatatactgggagagctccttccgc

SEQ ID NO: 2299437 - DNA, 25 bp, Homo sapien
ttaaagtctcgagggcttcttccag

SEQ ID NO: 2299438 - DNA, 25 bp, Homo sapien
ggccttgagctaatagcccaaaaat

SEQ ID NO: 2299439 - DNA, 25 bp, Homo sapien
taaaggaccaatggagttgaaataa

SEQ ID NO: 2299440 - DNA, 25 bp, Homo sapien
aaagtgagtgcctaataaattaaag

SEQ ID NO: 2299441 - DNA, 25 bp, Homo sapien
ccttttggggtgattggccttgagc

SEQ ID NO: 2299442 - DNA, 25 bp, Homo sapien
tgtttgtggtgatgtaactgagcct

SEQ ID NO: 2299443 - DNA, 25 bp, Homo sapien
aagtctgattgagctgcgggacaca

SEQ ID NO: 2299444 - DNA, 25 bp, Homo sapien
tagtcattcggtagacggtagtcac

SEQ ID NO: 2299445 - DNA, 25 bp, Homo sapien
tccatgcatgactgcttgcacgtag

SEQ ID NO: 2299446 - DNA, 25 bp, Homo sapien
aaatgtatttaattgatgtctcatg

SEQ ID NO: 2299447 - DNA, 25 bp, Homo sapien
cgcacccggcccaatgtatttctta

SEQ ID NO: 2299448 - DNA, 25 bp, Homo sapien
ccgcacccggcccaatgtatttctt

SEQ ID NO: 2299449 - DNA, 25 bp, Homo sapien
gtatttaattgatgtctcatgcctc

SEQ ID NO: 2299450 - DNA, 25 bp, Homo sapien
taatccagcatgaccctgttgggag

SEQ ID NO: 2299451 - DNA, 25 bp, Homo sapien
gaatgtcactaactcatcctgggcc

SEQ ID NO: 2299452 - DNA, 25 bp, Homo sapien
gcgggtgactctgctctgcctatag

SEQ ID NO: 2299453 - DNA, 25 bp, Homo sapien
gatcatcgggccctttcaggctgcc

SEQ ID NO: 2299454 - DNA, 25 bp, Homo sapien
cagcagggactttagcttgaggatc

SEQ ID NO: 2299455 - DNA, 25 bp, Homo sapien
aatgtggcgatctgctcccgtttgg

SEQ ID NO: 2299456 - DNA, 25 bp, Homo sapien
tgacgagacagttgcaaggaccggt

SEQ ID NO: 2299457 - DNA, 25 bp, Homo sapien
cgagccgctgctctttgacgagaca

SEQ ID NO: 2299458 - DNA, 25 bp, Homo sapien
ctaactgggcacaggtatttcatca

SEQ ID NO: 2299459 - DNA, 25 bp, Homo sapien
catcttgacgatactcgatactcaa

SEQ ID NO: 2299460 - DNA, 25 bp, Homo sapien
gactggcatgctttcaccagtagaa

SEQ ID NO: 2299461 - DNA, 25 bp, Homo sapien
tactcgatactcaataaaattaggg

SEQ ID NO: 2299462 - DNA, 25 bp, Homo sapien
atgaaaaaatccttaagtaaatgag

SEQ ID NO: 2299463 - DNA, 25 bp, Homo sapien
ctatgaaaaaatccttaagtaaatg

SEQ ID NO: 2299464 - DNA, 25 bp, Homo sapien
tatgaaaaaatccttaagtaaatga

SEQ ID NO: 2299465 - DNA, 25 bp, Homo sapien
tgaaaaaatccttaagtaaatgaga

SEQ ID NO: 2299466 - DNA, 25 bp, Homo sapien
ctagatggacggtgcttcataagca

SEQ ID NO: 2299467 - DNA, 25 bp, Homo sapien
gtgaagtcttttccgctcctctagg

SEQ ID NO: 2299468 - DNA, 25 bp, Homo sapien
ttgtgacaaataccccaaagcctca

SEQ ID NO: 2299469 - DNA, 25 bp, Homo sapien
taggcctttgtgagcattccctgaa

SEQ ID NO: 2299470 - DNA, 25 bp, Homo sapien
catttctaagcttcgtcatggtttc

SEQ ID NO: 2299471 - DNA, 25 bp, Homo sapien
tgttcttgagattagctagcgccac

SEQ ID NO: 2299472 - DNA, 25 bp, Homo sapien
ttgagattagctagcgccacctcag

SEQ ID NO: 2299473 - DNA, 25 bp, Homo sapien
tgagaaggttgcagcatcttctttc

SEQ ID NO: 2299474 - DNA, 25 bp, Homo sapien
gcctttgctgcgtcgggactgctca

SEQ ID NO: 2299475 - DNA, 25 bp, Homo sapien
tctctgcatctcatccaactgggtg

SEQ ID NO: 2299476 - DNA, 25 bp, Homo sapien
tagggctgccgatcttgctctttcc

SEQ ID NO: 2299477 - DNA, 25 bp, Homo sapien
cagggcgagtttttgctggatagcc

SEQ ID NO: 2299478 - DNA, 25 bp, Homo sapien
ccctgactatgcaggaggtaagtgt

SEQ ID NO: 2299479 - DNA, 25 bp, Homo sapien
ctctgagtgccactgctgacccgaa

SEQ ID NO: 2299480 - DNA, 25 bp, Homo sapien
gctgacccgaatgttgggtgtctgt

SEQ ID NO: 2299481 - DNA, 25 bp, Homo sapien
tgggcacggtgactgatgcctcccc

SEQ ID NO: 2299482 - DNA, 25 bp, Homo sapien
tatccttgccccgttaaagagaagc

SEQ ID NO: 2299483 - DNA, 25 bp, Homo sapien
taactaaaatctggccactgcaccg

SEQ ID NO: 2299484 - DNA, 25 bp, Homo sapien
tacagttagtcagcttgaaccgcaa

SEQ ID NO: 2299485 - DNA, 25 bp, Homo sapien
tggaaagacccacattagcaagacc

SEQ ID NO: 2299486 - DNA, 25 bp, Homo sapien
caggagatccaagaaaaatacatat

SEQ ID NO: 2299487 - DNA, 25 bp, Homo sapien
cttgcaggagatccaagaaaaatac

SEQ ID NO: 2299488 - DNA, 25 bp, Homo sapien
tgcaggagatccaagaaaaatacat

SEQ ID NO: 2299489 - DNA, 25 bp, Homo sapien
ggagatccaagaaaaatacatatag

SEQ ID NO: 2299490 - DNA, 25 bp, Homo sapien
ctgatcacaaagggaaggtgaaaat

SEQ ID NO: 2299491 - DNA, 25 bp, Homo sapien
gatcacaaagggaaggtgaaaattg

SEQ ID NO: 2299492 - DNA, 25 bp, Homo sapien
tgatcacaaagggaaggtgaaaatt

SEQ ID NO: 2299493 - DNA, 25 bp, Homo sapien
atcacaaagggaaggtgaaaattgt

SEQ ID NO: 2299494 - DNA, 25 bp, Homo sapien
cccttggatgaattcactcatggaa

SEQ ID NO: 2299495 - DNA, 25 bp, Homo sapien
ttttttccttgctgagccggtgccc

SEQ ID NO: 2299496 - DNA, 25 bp, Homo sapien
actcttaataaattctgtaggtagg

SEQ ID NO: 2299497 - DNA, 25 bp, Homo sapien
aggggggcccttcagaagaaatgat

SEQ ID NO: 2299498 - DNA, 25 bp, Homo sapien
catgcacccaaggaaaaaatgttta

SEQ ID NO: 2299499 - DNA, 25 bp, Homo sapien
cacatgcacccaaggaaaaaatgtt

SEQ ID NO: 2299500 - DNA, 25 bp, Homo sapien
acatgcacccaaggaaaaaatgttt

SEQ ID NO: 2299501 - DNA, 25 bp, Homo sapien
tcacatgcacccaaggaaaaaatgt

SEQ ID NO: 2299502 - DNA, 25 bp, Homo sapien
caaagtgcgaagcttgccctaacag

SEQ ID NO: 2299503 - DNA, 25 bp, Homo sapien
acaggtgttgacatgcgtgaacgca

SEQ ID NO: 2299504 - DNA, 25 bp, Homo sapien
gattgaggagacgttctgagtcacc

SEQ ID NO: 2299505 - DNA, 25 bp, Homo sapien
caacggtggcaaactcaaagactac

SEQ ID NO: 2299506 - DNA, 25 bp, Homo sapien
aaaacaataggaaatcagttatgaa

SEQ ID NO: 2299507 - DNA, 25 bp, Homo sapien
ctaaaacaataggaaatcagttatg

SEQ ID NO: 2299508 - DNA, 25 bp, Homo sapien
taaaacaataggaaatcagttatga

SEQ ID NO: 2299509 - DNA, 25 bp, Homo sapien
gaaatcagttatgaaattaaaaaca

SEQ ID NO: 2299510 - DNA, 25 bp, Homo sapien
atacttcaaggtaccttccaaggag

SEQ ID NO: 2299511 - DNA, 25 bp, Homo sapien
cattaccactttggtgattcacaga

SEQ ID NO: 2299512 - DNA, 25 bp, Homo sapien
gttttatccgagttaggtatcctga

SEQ ID NO: 2299513 - DNA, 25 bp, Homo sapien
gatagtgctactaaatccatttgga

SEQ ID NO: 2299514 - DNA, 25 bp, Homo sapien
aacaaaaaccagtcatacaaaaatg

SEQ ID NO: 2299515 - DNA, 25 bp, Homo sapien
ttttaaccttattgagatgttatct

SEQ ID NO: 2299516 - DNA, 25 bp, Homo sapien
ttaaacagcaataggagttatttat

SEQ ID NO: 2299517 - DNA, 25 bp, Homo sapien
tgttcatggcttaaacaatgtaatg

SEQ ID NO: 2299518 - DNA, 25 bp, Homo sapien
catggattccctttacgtattctga

SEQ ID NO: 2299519 - DNA, 25 bp, Homo sapien
cacagtgtgaagagcaagctgctta

SEQ ID NO: 2299520 - DNA, 25 bp, Homo sapien
gctgcagtcaggtctttactacaga

SEQ ID NO: 2299521 - DNA, 25 bp, Homo sapien
cagaaataacaactcccgcctgtga

SEQ ID NO: 2299522 - DNA, 25 bp, Homo sapien
cgacccatacctgcgctgccacctt

SEQ ID NO: 2299523 - DNA, 25 bp, Homo sapien
aggttcttcttacgacccatacctg

SEQ ID NO: 2299524 - DNA, 25 bp, Homo sapien
gttcttcttacgacccatacctgcg

SEQ ID NO: 2299525 - DNA, 25 bp, Homo sapien
cttacgacccatacctgcgctgcca

SEQ ID NO: 2299526 - DNA, 25 bp, Homo sapien
tgcaccaggttgtagtgctgagctc

SEQ ID NO: 2299527 - DNA, 25 bp, Homo sapien
caccaggttgtagtgctgagctcat

SEQ ID NO: 2299528 - DNA, 25 bp, Homo sapien
gcaccaggttgtagtgctgagctca

SEQ ID NO: 2299529 - DNA, 25 bp, Homo sapien
ctgcaccaggttgtagtgctgagct

SEQ ID NO: 2299530 - DNA, 25 bp, Homo sapien
gcctcgctttctattacttcgaagt

SEQ ID NO: 2299531 - DNA, 25 bp, Homo sapien
tgcagcctcgctttctattacttcg

SEQ ID NO: 2299532 - DNA, 25 bp, Homo sapien
tcttcaggtccctgtccacctttgc

SEQ ID NO: 2299533 - DNA, 25 bp, Homo sapien
cacctttgcagcctcgctttctatt

SEQ ID NO: 2299534 - DNA, 25 bp, Homo sapien
tgtacctgcttctttatcttcgatg

SEQ ID NO: 2299535 - DNA, 25 bp, Homo sapien
ccaccttgtcatcagggtgatttta

SEQ ID NO: 2299536 - DNA, 25 bp, Homo sapien
tgcatattttatgagtctctgtacc

SEQ ID NO: 2299537 - DNA, 25 bp, Homo sapien
taaaactgctaagctatgcccgtgg

SEQ ID NO: 2299538 - DNA, 25 bp, Homo sapien
agtacaaaatactgaggccatgagt

SEQ ID NO: 2299539 - DNA, 25 bp, Homo sapien
gagttcaagattgactgatctcctt

SEQ ID NO: 2299540 - DNA, 25 bp, Homo sapien
agcagtaagagcaggtcgtgtgtgc

SEQ ID NO: 2299541 - DNA, 25 bp, Homo sapien
catacagaacatggaaagcagtaag

SEQ ID NO: 2299542 - DNA, 25 bp, Homo sapien
tggcagattccaaactaaagacaac

SEQ ID NO: 2299543 - DNA, 25 bp, Homo sapien
gaagaattctgtggaaactatgttc

SEQ ID NO: 2299544 - DNA, 25 bp, Homo sapien
tctgacatcaagaagtgcccaggcc

SEQ ID NO: 2299545 - DNA, 25 bp, Homo sapien
tgagtgcatgccagcacatccagct

SEQ ID NO: 2299546 - DNA, 25 bp, Homo sapien
gactactagactactagagaattta

SEQ ID NO: 2299547 - DNA, 25 bp, Homo sapien
acacatagaaacattccaagctttc

SEQ ID NO: 2299548 - DNA, 25 bp, Homo sapien
aacatgactactagactactagaga

SEQ ID NO: 2299549 - DNA, 25 bp, Homo sapien
cattccaagctttcttaaagagctc

SEQ ID NO: 2299550 - DNA, 25 bp, Homo sapien
tatattgacaaggagatctagtaac

SEQ ID NO: 2299551 - DNA, 25 bp, Homo sapien
tctagtaacaaataagagatgtatg

SEQ ID NO: 2299552 - DNA, 25 bp, Homo sapien
aactggcaggatgcattttaaacct

SEQ ID NO: 2299553 - DNA, 25 bp, Homo sapien
aggaaggcacaagaaataatcaacc

SEQ ID NO: 2299554 - DNA, 25 bp, Homo sapien
aaaaacacgaataggaccatggtca

SEQ ID NO: 2299555 - DNA, 25 bp, Homo sapien
tgtagcatggaatggtttactcagt

SEQ ID NO: 2299556 - DNA, 25 bp, Homo sapien
taatttctggacaggaatactggac

SEQ ID NO: 2299557 - DNA, 25 bp, Homo sapien
tattgcatttttgtcgaatgggtcc

SEQ ID NO: 2299558 - DNA, 25 bp, Homo sapien
cactttatggatatattagagaaaa

SEQ ID NO: 2299559 - DNA, 25 bp, Homo sapien
cttaggtgaacataagtatgaacta

SEQ ID NO: 2299560 - DNA, 25 bp, Homo sapien
tatgtaacaattaagaatatcaaat

SEQ ID NO: 2299561 - DNA, 25 bp, Homo sapien
tatgaactaattactcttgctctta

SEQ ID NO: 2299562 - DNA, 25 bp, Homo sapien
tgttcctccctgttactcctccgga

SEQ ID NO: 2299563 - DNA, 25 bp, Homo sapien
gccaccttctgaaggccgctatcct

SEQ ID NO: 2299564 - DNA, 25 bp, Homo sapien
gaaggccgctatcctcagcaatgta

SEQ ID NO: 2299565 - DNA, 25 bp, Homo sapien
tactcctccggaaacagccaccttc

SEQ ID NO: 2299566 - DNA, 25 bp, Homo sapien
ttaaataggtatgagtacagcacag

SEQ ID NO: 2299567 - DNA, 25 bp, Homo sapien
tggactacaacaaatggccctagct

SEQ ID NO: 2299568 - DNA, 25 bp, Homo sapien
gcacagaagatacggatggctctct

SEQ ID NO: 2299569 - DNA, 25 bp, Homo sapien
aaatggccctagctgcccaccagaa

SEQ ID NO: 2299570 - DNA, 25 bp, Homo sapien
tgttggcacgttgtcagaattcagc

SEQ ID NO: 2299571 - DNA, 25 bp, Homo sapien
gagatatgcaagaggaatccctgag

SEQ ID NO: 2299572 - DNA, 25 bp, Homo sapien
tatttatgtaggcactgtcacccag

SEQ ID NO: 2299573 - DNA, 25 bp, Homo sapien
aatgggaagtagcaagcctgggcct

SEQ ID NO: 2299574 - DNA, 25 bp, Homo sapien
cacacctggccaaaaataactttag

SEQ ID NO: 2299575 - DNA, 25 bp, Homo sapien
atttttatatccactaagaataact

SEQ ID NO: 2299576 - DNA, 25 bp, Homo sapien
gagtaaaggacctcagaactagtct

SEQ ID NO: 2299577 - DNA, 25 bp, Homo sapien
catgtaatccacatttctggtggga

SEQ ID NO: 2299578 - DNA, 25 bp, Homo sapien
tgaagcaaagctactcaggaacaaa

SEQ ID NO: 2299579 - DNA, 25 bp, Homo sapien
gatgtcaagtagtgcataaaaagag

SEQ ID NO: 2299580 - DNA, 25 bp, Homo sapien
gaagaccagctgtacctttgaaatg

SEQ ID NO: 2299581 - DNA, 25 bp, Homo sapien
ttaactcaaggtggtacgatgatgg

SEQ ID NO: 2299582 - DNA, 25 bp, Homo sapien
taacagcacatatctaatgaagacc

SEQ ID NO: 2299583 - DNA, 25 bp, Homo sapien
cgatgatggtctgttcttgttaagc

SEQ ID NO: 2299584 - DNA, 25 bp, Homo sapien
gcccttaaggttttcagcttcgaga

SEQ ID NO: 2299585 - DNA, 25 bp, Homo sapien
gaacattaaataccaatcttgcagg

SEQ ID NO: 2299586 - DNA, 25 bp, Homo sapien
ccaacaaccagtagctagggacact

SEQ ID NO: 2299587 - DNA, 25 bp, Homo sapien
catcggaaatgctcttgtctatcag

SEQ ID NO: 2299588 - DNA, 25 bp, Homo sapien
tgatgtcaatttccctcactcgtct

SEQ ID NO: 2299589 - DNA, 25 bp, Homo sapien
tgtgtggtaagatatgcccagtgaa

SEQ ID NO: 2299590 - DNA, 25 bp, Homo sapien
tgactcttgtgttacagcctccaga

SEQ ID NO: 2299591 - DNA, 25 bp, Homo sapien
gttccggtttgtgcacatccttcta

SEQ ID NO: 2299592 - DNA, 25 bp, Homo sapien
gattttaaggcaaccagcgctctca

SEQ ID NO: 2299593 - DNA, 25 bp, Homo sapien
tcaaattgacaccagctacctctag

SEQ ID NO: 2299594 - DNA, 25 bp, Homo sapien
cacacagttaggaagtggcggaaca

SEQ ID NO: 2299595 - DNA, 25 bp, Homo sapien
tctaaaatagctgggtcgacaggct

SEQ ID NO: 2299596 - DNA, 25 bp, Homo sapien
tcaggcactgtataggcacttaata

SEQ ID NO: 2299597 - DNA, 25 bp, Homo sapien
tagggtgttacaggacctcacagcg

SEQ ID NO: 2299598 - DNA, 25 bp, Homo sapien
tattgtttacgatgtctcaggcact

SEQ ID NO: 2299599 - DNA, 25 bp, Homo sapien
tccaggattgtatggtccaagggct

SEQ ID NO: 2299600 - DNA, 25 bp, Homo sapien
taacgaggctctactgatatttaca

SEQ ID NO: 2299601 - DNA, 25 bp, Homo sapien
tctggatttatagccttaacgaggc

SEQ ID NO: 2299602 - DNA, 25 bp, Homo sapien
aaaaagcctgcctatatagttacat

SEQ ID NO: 2299603 - DNA, 25 bp, Homo sapien
taattagcgcatcttaataggaaca

SEQ ID NO: 2299604 - DNA, 25 bp, Homo sapien
tgatgccaatagaaaagacaggctt

SEQ ID NO: 2299605 - DNA, 25 bp, Homo sapien
gactttactatcaggacacatggac

SEQ ID NO: 2299606 - DNA, 25 bp, Homo sapien
aattagtgacacagcattagtagcg

SEQ ID NO: 2299607 - DNA, 25 bp, Homo sapien
tacaaagagatgacagagcaaggtg

SEQ ID NO: 2299608 - DNA, 25 bp, Homo sapien
gtggcggtacggaggcagcaggctg

SEQ ID NO: 2299609 - DNA, 25 bp, Homo sapien
tgtggcggtacggaggcagcaggct

SEQ ID NO: 2299610 - DNA, 25 bp, Homo sapien
cttgcctcccggctagttgtgagca

SEQ ID NO: 2299611 - DNA, 25 bp, Homo sapien
gacagttgggcagtcttgcctcccg

SEQ ID NO: 2299612 - DNA, 25 bp, Homo sapien
ctgacagttgggcagtcttgcctcc

SEQ ID NO: 2299613 - DNA, 25 bp, Homo sapien
agtcttgcctcccggctagttgtga

SEQ ID NO: 2299614 - DNA, 25 bp, Homo sapien
tgtagagtctaccagctggcagcca

SEQ ID NO: 2299615 - DNA, 25 bp, Homo sapien
tgaaacagtggactaatccaagtat

SEQ ID NO: 2299616 - DNA, 25 bp, Homo sapien
caaaatacaatgatgcgtaggcagt

SEQ ID NO: 2299617 - DNA, 25 bp, Homo sapien
tctatggatctgacatgcagctggg

SEQ ID NO: 2299618 - DNA, 25 bp, Homo sapien
ggactacagccatgtgccattatac

SEQ ID NO: 2299619 - DNA, 25 bp, Homo sapien
cagccatgtgccattatacctggct

SEQ ID NO: 2299620 - DNA, 25 bp, Homo sapien
ctacagccatgtgccattatacctg

SEQ ID NO: 2299621 - DNA, 25 bp, Homo sapien
acagccatgtgccattatacctggc

SEQ ID NO: 2299622 - DNA, 25 bp, Homo sapien
ttttgagcagaatctcactttgtcg

SEQ ID NO: 2299623 - DNA, 25 bp, Homo sapien
aggcctgcgccaccacacctggcta

SEQ ID NO: 2299624 - DNA, 25 bp, Homo sapien
cctgcgccaccacacctggctaatt

SEQ ID NO: 2299625 - DNA, 25 bp, Homo sapien
tttgagcagaatctcactttgtcgc

SEQ ID NO: 2299626 - DNA, 25 bp, Homo sapien
aaacaagcacgtcagcaagaaacac

SEQ ID NO: 2299627 - DNA, 25 bp, Homo sapien
caatggtaggggttagacgagatat

SEQ ID NO: 2299628 - DNA, 25 bp, Homo sapien
aggagaaacaagcacgtcagcaaga

SEQ ID NO: 2299629 - DNA, 25 bp, Homo sapien
gagaaacaagcacgtcagcaagaaa

SEQ ID NO: 2299630 - DNA, 25 bp, Homo sapien
ggaggcttggagagacagtggagag

SEQ ID NO: 2299631 - DNA, 25 bp, Homo sapien
taaggagcccgagagtgttagacct

SEQ ID NO: 2299632 - DNA, 25 bp, Homo sapien
ccagatgttcgtccacaggagatga

SEQ ID NO: 2299633 - DNA, 25 bp, Homo sapien
gcagcacttgatggttaaggagccc

SEQ ID NO: 2299634 - DNA, 25 bp, Homo sapien
tatgctatcgaggtaaagccagcca

SEQ ID NO: 2299635 - DNA, 25 bp, Homo sapien
tttctcagtgccctacactggtaac

SEQ ID NO: 2299636 - DNA, 25 bp, Homo sapien
tctcagtgccctacactggtaactg

SEQ ID NO: 2299637 - DNA, 25 bp, Homo sapien
cctacactggtaactgtcctttgtg

SEQ ID NO: 2299638 - DNA, 25 bp, Homo sapien
agtgccctacactggtaactgtcct

SEQ ID NO: 2299639 - DNA, 25 bp, Homo sapien
ggtctctgatggaccactccatttc

SEQ ID NO: 2299640 - DNA, 25 bp, Homo sapien
tctctgatggaccactccatttctg

SEQ ID NO: 2299641 - DNA, 25 bp, Homo sapien
tggtctctgatggaccactccattt

SEQ ID NO: 2299642 - DNA, 25 bp, Homo sapien
catttggtctctgatggaccactcc

SEQ ID NO: 2299643 - DNA, 25 bp, Homo sapien
gacccggcttttcatggagtcctag

SEQ ID NO: 2299644 - DNA, 25 bp, Homo sapien
gagacgatctacgaacatgttctga

SEQ ID NO: 2299645 - DNA, 25 bp, Homo sapien
tggtactaggcagatacaacgccag

SEQ ID NO: 2299646 - DNA, 25 bp, Homo sapien
gactaacgaaagctcctgcaatgtg

SEQ ID NO: 2299647 - DNA, 25 bp, Homo sapien
gcagtttatccaggcttcagcttaa

SEQ ID NO: 2299648 - DNA, 25 bp, Homo sapien
tcctaatggacagaagatcacagag

SEQ ID NO: 2299649 - DNA, 25 bp, Homo sapien
catccgagggcattattacagacaa

SEQ ID NO: 2299650 - DNA, 25 bp, Homo sapien
caatggaaaatgtcactcgggagct

SEQ ID NO: 2299651 - DNA, 25 bp, Homo sapien
ccagatttacttctcggtgttttca

SEQ ID NO: 2299652 - DNA, 25 bp, Homo sapien
agatttacttctcggtgttttcatt

SEQ ID NO: 2299653 - DNA, 25 bp, Homo sapien
agagaacaatgattgaggaataatt

SEQ ID NO: 2299654 - DNA, 25 bp, Homo sapien
tagagaacaatgattgaggaataat

SEQ ID NO: 2299655 - DNA, 25 bp, Homo sapien
gactggctgcacaaatcatacctat

SEQ ID NO: 2299656 - DNA, 25 bp, Homo sapien
tcatacctatgaacccaatgagtca

SEQ ID NO: 2299657 - DNA, 25 bp, Homo sapien
gagtgccttttccaaccattgagtg

SEQ ID NO: 2299658 - DNA, 25 bp, Homo sapien
tacggtgtacaaatcagagttggcc

SEQ ID NO: 2299659 - DNA, 25 bp, Homo sapien
cagtgccctcgggaagaagtccagc

SEQ ID NO: 2299660 - DNA, 25 bp, Homo sapien
ctcgggaagaagtccagctactctg

SEQ ID NO: 2299661 - DNA, 25 bp, Homo sapien
acgcagtgccctcgggaagaagtcc

SEQ ID NO: 2299662 - DNA, 25 bp, Homo sapien
gccctcgggaagaagtccagctact

SEQ ID NO: 2299663 - DNA, 25 bp, Homo sapien
gggcgtcgcctgcatgcccaggttc

SEQ ID NO: 2299664 - DNA, 25 bp, Homo sapien
tgcggcgtctcctcagcgagtgcct

SEQ ID NO: 2299665 - DNA, 25 bp, Homo sapien
tgcatgcccaggttcggcgcgactc

SEQ ID NO: 2299666 - DNA, 25 bp, Homo sapien
cgcggcgagtttggctgcggcgact

SEQ ID NO: 2299667 - DNA, 25 bp, Homo sapien
ctacacgtcccaggtgcgacgcggg

SEQ ID NO: 2299668 - DNA, 25 bp, Homo sapien
aggcagcggtccctacacgtcccag

SEQ ID NO: 2299669 - DNA, 25 bp, Homo sapien
gggttggacttccgccggatcgcca

SEQ ID NO: 2299670 - DNA, 25 bp, Homo sapien
atcgccacccgcctgaagttggagc

SEQ ID NO: 2299671 - DNA, 25 bp, Homo sapien
tttcagggttgttataagaactaga

SEQ ID NO: 2299672 - DNA, 25 bp, Homo sapien
ttccagccatggtgagtaccagaaa

SEQ ID NO: 2299673 - DNA, 25 bp, Homo sapien
tcttccccagagatgaaattagtac

SEQ ID NO: 2299674 - DNA, 25 bp, Homo sapien
tagaggtaacatacacatagtcctg

SEQ ID NO: 2299675 - DNA, 25 bp, Homo sapien
taaaaattgtgtatcggcacaaatt

SEQ ID NO: 2299676 - DNA, 25 bp, Homo sapien
ctcagataccccagtctgataaaaa

SEQ ID NO: 2299677 - DNA, 25 bp, Homo sapien
tcaggtctacttcaagagggagagg

SEQ ID NO: 2299678 - DNA, 25 bp, Homo sapien
ggcacaaattcaggtctacttcaag

SEQ ID NO: 2299679 - DNA, 25 bp, Homo sapien
caatgttgtaaacacaagccagtcc

SEQ ID NO: 2299680 - DNA, 25 bp, Homo sapien
gctatttgggaattcattgctgacc

SEQ ID NO: 2299681 - DNA, 25 bp, Homo sapien
taggtatagataccctctgctgaac

SEQ ID NO: 2299682 - DNA, 25 bp, Homo sapien
ttaagcaggcccttgaaaacgcgga

SEQ ID NO: 2299683 - DNA, 25 bp, Homo sapien
tgtgtgcatgtccaacgtacaatgg

SEQ ID NO: 2299684 - DNA, 25 bp, Homo sapien
taaaatggtaggagtagtgcttacc

SEQ ID NO: 2299685 - DNA, 25 bp, Homo sapien
tgcaaaccgaatactaattgttgtg

SEQ ID NO: 2299686 - DNA, 25 bp, Homo sapien
gcccaatgagctgttgcctaaaaga

SEQ ID NO: 2299687 - DNA, 25 bp, Homo sapien
gatcctacagaccagcatgctcttg

SEQ ID NO: 2299688 - DNA, 25 bp, Homo sapien
cacacaaggaaagctgagtaccact

SEQ ID NO: 2299689 - DNA, 25 bp, Homo sapien
tggtggctaatgctggtaaatccca

SEQ ID NO: 2299690 - DNA, 25 bp, Homo sapien
aataaggccctacgacaacatcaga

SEQ ID NO: 2299691 - DNA, 25 bp, Homo sapien
gcgcccagcccagaatcttttctaa

SEQ ID NO: 2299692 - DNA, 25 bp, Homo sapien
agcgcgcccagcccagaatcttttc

SEQ ID NO: 2299693 - DNA, 25 bp, Homo sapien
gcccagcccagaatcttttctaata

SEQ ID NO: 2299694 - DNA, 25 bp, Homo sapien
ccagcgcgcccagcccagaatcttt

SEQ ID NO: 2299695 - DNA, 25 bp, Homo sapien
aattagcaccctagtcagttcccag

SEQ ID NO: 2299696 - DNA, 25 bp, Homo sapien
tctgggtgtgaatactctcactcaa

SEQ ID NO: 2299697 - DNA, 25 bp, Homo sapien
cagttcccagtcttgaagctagttc

SEQ ID NO: 2299698 - DNA, 25 bp, Homo sapien
aagctagttcttctactttggacag

SEQ ID NO: 2299699 - DNA, 25 bp, Homo sapien
aatgtatttgttggggacaggttga

SEQ ID NO: 2299700 - DNA, 25 bp, Homo sapien
tgagtcttcgttctccaatcacagg

SEQ ID NO: 2299701 - DNA, 25 bp, Homo sapien
cgttctccaatcacaggataatcaa

SEQ ID NO: 2299702 - DNA, 25 bp, Homo sapien
cttcgttctccaatcacaggataat

SEQ ID NO: 2299703 - DNA, 25 bp, Homo sapien
tccaatcacaggataatcaactttt

SEQ ID NO: 2299704 - DNA, 25 bp, Homo sapien
caggtgttcctgaaaagaaccataa

SEQ ID NO: 2299705 - DNA, 25 bp, Homo sapien
aaaagatacaggtgttcctgaaaag

SEQ ID NO: 2299706 - DNA, 25 bp, Homo sapien
tccagtccaaccacataatttattt

SEQ ID NO: 2299707 - DNA, 25 bp, Homo sapien
ttccacttccagtcatagtgtgcct

SEQ ID NO: 2299708 - DNA, 25 bp, Homo sapien
cccagtggccaagaatgttatcagt

SEQ ID NO: 2299709 - DNA, 25 bp, Homo sapien
gaaattacccggacatgatggcgta

SEQ ID NO: 2299710 - DNA, 25 bp, Homo sapien
cccaagtccgctctatggaagtgca

SEQ ID NO: 2299711 - DNA, 25 bp, Homo sapien
cttgaacccgagagtagagcctgca

SEQ ID NO: 2299712 - DNA, 25 bp, Homo sapien
cacactgaactgtctgctgctcaca

SEQ ID NO: 2299713 - DNA, 25 bp, Homo sapien
cagcccaaggctgctaacacactga

SEQ ID NO: 2299714 - DNA, 25 bp, Homo sapien
tggactgtgcttccggctctgggca

SEQ ID NO: 2299715 - DNA, 25 bp, Homo sapien
tctgctgctcacaataactggactg

SEQ ID NO: 2299716 - DNA, 25 bp, Homo sapien
ccataatcatgaggatcacaggcag

SEQ ID NO: 2299717 - DNA, 25 bp, Homo sapien
tgatatgattacagactccatgcaa

SEQ ID NO: 2299718 - DNA, 25 bp, Homo sapien
tttaagcagggtctaacatctttgc

SEQ ID NO: 2299719 - DNA, 25 bp, Homo sapien
agtctagttctattgggcactctga

SEQ ID NO: 2299720 - DNA, 25 bp, Homo sapien
gatggctgcaacactgaccactaga

SEQ ID NO: 2299721 - DNA, 25 bp, Homo sapien
gcttttggaggaacagttatctgcc

SEQ ID NO: 2299722 - DNA, 25 bp, Homo sapien
caaaaatttctatgtaccacaggca

SEQ ID NO: 2299723 - DNA, 25 bp, Homo sapien
tctgtctggtacttactggcaatga

SEQ ID NO: 2299724 - DNA, 25 bp, Homo sapien
taaatattggcttcacaatactagt

SEQ ID NO: 2299725 - DNA, 25 bp, Homo sapien
tgtatcctccaacctcaagcatcag

SEQ ID NO: 2299726 - DNA, 25 bp, Homo sapien
cactgcagccttgtatcctccaacc

SEQ ID NO: 2299727 - DNA, 25 bp, Homo sapien
tcacaatactagttaatatctcaag

SEQ ID NO: 2299728 - DNA, 25 bp, Homo sapien
tcatacaggaccatgaaaactctca

SEQ ID NO: 2299729 - DNA, 25 bp, Homo sapien
catacaggaccatgaaaactctcat

SEQ ID NO: 2299730 - DNA, 25 bp, Homo sapien
ttcagtgctctgtgcaaatacgtgg

SEQ ID NO: 2299731 - DNA, 25 bp, Homo sapien
gctctgtgcaaatacgtggattcaa

SEQ ID NO: 2299732 - DNA, 25 bp, Homo sapien
tcttctgtttgctttaagggagctt

SEQ ID NO: 2299733 - DNA, 25 bp, Homo sapien
cagtgctctgtgcaaatacgtggat

SEQ ID NO: 2299734 - DNA, 25 bp, Homo sapien
aggttgaggcacgacaatcactgaa

SEQ ID NO: 2299735 - DNA, 25 bp, Homo sapien
gttgaggcacgacaatcactgaaat

SEQ ID NO: 2299736 - DNA, 25 bp, Homo sapien
ttgaggcacgacaatcactgaaatc

SEQ ID NO: 2299737 - DNA, 25 bp, Homo sapien
ggttgaggcacgacaatcactgaaa

SEQ ID NO: 2299738 - DNA, 25 bp, Homo sapien
gttttctcaatggtccagctatctg

SEQ ID NO: 2299739 - DNA, 25 bp, Homo sapien
gttctatggcttccattccactttg

SEQ ID NO: 2299740 - DNA, 25 bp, Homo sapien
agttttctcaatggtccagctatct

SEQ ID NO: 2299741 - DNA, 25 bp, Homo sapien
ttctatggcttccattccactttgt

SEQ ID NO: 2299742 - DNA, 25 bp, Homo sapien
tagaagacttatgtgcactacaggc

SEQ ID NO: 2299743 - DNA, 25 bp, Homo sapien
gataatgttccacctgacctgccaa

SEQ ID NO: 2299744 - DNA, 25 bp, Homo sapien
tatgaactccatatgcaactgcagc

SEQ ID NO: 2299745 - DNA, 25 bp, Homo sapien
caggagtccagttggttcagttaca

SEQ ID NO: 2299746 - DNA, 25 bp, Homo sapien
tgaaaagacagcctagcgcacatac

SEQ ID NO: 2299747 - DNA, 25 bp, Homo sapien
gtgcagctaggaagattatacccag

SEQ ID NO: 2299748 - DNA, 25 bp, Homo sapien
tatcggatactgcagtggaagaact

SEQ ID NO: 2299749 - DNA, 25 bp, Homo sapien
aatcaggcagggcaaaaggtctcca

SEQ ID NO: 2299750 - DNA, 25 bp, Homo sapien
ttttagtaaaaatgccaggagctct

SEQ ID NO: 2299751 - DNA, 25 bp, Homo sapien
tgtggcatgactgaaaggctcgagc

SEQ ID NO: 2299752 - DNA, 25 bp, Homo sapien
aaatggcaattgtacctgcacaacg

SEQ ID NO: 2299753 - DNA, 25 bp, Homo sapien
tgcacaacggcacacaatttaggat

SEQ ID NO: 2299754 - DNA, 25 bp, Homo sapien
gaagtgtgtgactactgcttattgg

SEQ ID NO: 2299755 - DNA, 25 bp, Homo sapien
tggtggattccatggtaaccagccc

SEQ ID NO: 2299756 - DNA, 25 bp, Homo sapien
tgcttattgggtaacaatcgctgtc

SEQ ID NO: 2299757 - DNA, 25 bp, Homo sapien
cctaaggcgattggtagaagtgtgt

SEQ ID NO: 2299758 - DNA, 25 bp, Homo sapien
atttgttcttccagcgagccaaagc

SEQ ID NO: 2299759 - DNA, 25 bp, Homo sapien
tgttcttccagcgagccaaagcaag

SEQ ID NO: 2299760 - DNA, 25 bp, Homo sapien
caaagcaagcctcccattaacccgg

SEQ ID NO: 2299761 - DNA, 25 bp, Homo sapien
cattgcagataatctcacccagcac

SEQ ID NO: 2299762 - DNA, 25 bp, Homo sapien
acacacgtcaatcctgaagttagtc

SEQ ID NO: 2299763 - DNA, 25 bp, Homo sapien
ctacacacgtcaatcctgaagttag

SEQ ID NO: 2299764 - DNA, 25 bp, Homo sapien
tacacacgtcaatcctgaagttagt

SEQ ID NO: 2299765 - DNA, 25 bp, Homo sapien
gttcctagacagatagtctttcaca

SEQ ID NO: 2299766 - DNA, 25 bp, Homo sapien
ttcctagacagatagtctttcacaa

SEQ ID NO: 2299767 - DNA, 25 bp, Homo sapien
cctagacagatagtctttcacaaga

SEQ ID NO: 2299768 - DNA, 25 bp, Homo sapien
tcctagacagatagtctttcacaag

SEQ ID NO: 2299769 - DNA, 25 bp, Homo sapien
tagaacactgctccatagaaggcat

SEQ ID NO: 2299770 - DNA, 25 bp, Homo sapien
ctcctagaatgtaggcagtagtcat

SEQ ID NO: 2299771 - DNA, 25 bp, Homo sapien
actgctccatagaaggcatctccta

SEQ ID NO: 2299772 - DNA, 25 bp, Homo sapien
ttcatcttttgcaccctgtagggca

SEQ ID NO: 2299773 - DNA, 25 bp, Homo sapien
ggtcttgaactccaaggtctagtac

SEQ ID NO: 2299774 - DNA, 25 bp, Homo sapien
cggcatgtgccaccagtatcggcta

SEQ ID NO: 2299775 - DNA, 25 bp, Homo sapien
ttaaccagccatgcttaaaatgcca

SEQ ID NO: 2299776 - DNA, 25 bp, Homo sapien
caagtgagcttgcattgtccagtct

SEQ ID NO: 2299777 - DNA, 25 bp, Homo sapien
taaatgcaagcagataaaagtttat

SEQ ID NO: 2299778 - DNA, 25 bp, Homo sapien
tccatccctccgtgtcagtccctta

SEQ ID NO: 2299779 - DNA, 25 bp, Homo sapien
aaatgcaagcagataaaagtttatt

SEQ ID NO: 2299780 - DNA, 25 bp, Homo sapien
cgtgtcagtcccttagcttcatcca

SEQ ID NO: 2299781 - DNA, 25 bp, Homo sapien
cagcgtatgcccctgacacttaagg

SEQ ID NO: 2299782 - DNA, 25 bp, Homo sapien
gaatactggtaactgtgaaggctgc

SEQ ID NO: 2299783 - DNA, 25 bp, Homo sapien
gaaggctgccggttctaagttgtag

SEQ ID NO: 2299784 - DNA, 25 bp, Homo sapien
cctgacacttaaggaaggaaagagc

SEQ ID NO: 2299785 - DNA, 25 bp, Homo sapien
catggactgggctgcttaaccctcc

SEQ ID NO: 2299786 - DNA, 25 bp, Homo sapien
gcaagagtggtggaacgcctgcaaa

SEQ ID NO: 2299787 - DNA, 25 bp, Homo sapien
tttggagagatcacaagacctccaa

SEQ ID NO: 2299788 - DNA, 25 bp, Homo sapien
ggtggaacgcctgcaaaagaattca

SEQ ID NO: 2299789 - DNA, 25 bp, Homo sapien
taaatgcaccaacactatcatttgt

SEQ ID NO: 2299790 - DNA, 25 bp, Homo sapien
caaaagctgctactttaaatgcacc

SEQ ID NO: 2299791 - DNA, 25 bp, Homo sapien
gttccaaggtaaggatcacccagac

SEQ ID NO: 2299792 - DNA, 25 bp, Homo sapien
tgcaccaacactatcatttgttcca

SEQ ID NO: 2299793 - DNA, 25 bp, Homo sapien
tctaagtgacaaggatcagagagct

SEQ ID NO: 2299794 - DNA, 25 bp, Homo sapien
gaaatgactcttggcgtaaccctag

SEQ ID NO: 2299795 - DNA, 25 bp, Homo sapien
gatcagaagcatggaactttcagac

SEQ ID NO: 2299796 - DNA, 25 bp, Homo sapien
gagcatcttttgttcctaacggaga

SEQ ID NO: 2299797 - DNA, 25 bp, Homo sapien
ttacagaacttgacctaaataatca

SEQ ID NO: 2299798 - DNA, 25 bp, Homo sapien
aacctctaggtttctgtgaactcat

SEQ ID NO: 2299799 - DNA, 25 bp, Homo sapien
tctaggtttctgtgaactcattagc

SEQ ID NO: 2299800 - DNA, 25 bp, Homo sapien
ggcaacaaactatgaattaccacta

SEQ ID NO: 2299801 - DNA, 25 bp, Homo sapien
cttttcctcttgttctgctccccat

SEQ ID NO: 2299802 - DNA, 25 bp, Homo sapien
cacctcttcagctctgcacactcct

SEQ ID NO: 2299803 - DNA, 25 bp, Homo sapien
ttcagctctgcacactcctgacctt

SEQ ID NO: 2299804 - DNA, 25 bp, Homo sapien
ctctgcacactcctgaccttcttct

SEQ ID NO: 2299805 - DNA, 25 bp, Homo sapien
tactagtgggcatatcagaggctct

SEQ ID NO: 2299806 - DNA, 25 bp, Homo sapien
tgaattcagagcacatgccacaggc

SEQ ID NO: 2299807 - DNA, 25 bp, Homo sapien
ttccgaaccccagaattaagagcca

SEQ ID NO: 2299808 - DNA, 25 bp, Homo sapien
taagagccaggcgaaaatgaattca

SEQ ID NO: 2299809 - DNA, 25 bp, Homo sapien
tctataaatatctggaatgcctgcc

SEQ ID NO: 2299810 - DNA, 25 bp, Homo sapien
aattcagggccaattatacacaggc

SEQ ID NO: 2299811 - DNA, 25 bp, Homo sapien
gcaacattgctagtgtgacagggaa

SEQ ID NO: 2299812 - DNA, 25 bp, Homo sapien
tgagaccagaagtaaggccgtgccg

SEQ ID NO: 2299813 - DNA, 25 bp, Homo sapien
cttctccatttgacgtttcttcatt

SEQ ID NO: 2299814 - DNA, 25 bp, Homo sapien
tagtatcacaattgctagtttttga

SEQ ID NO: 2299815 - DNA, 25 bp, Homo sapien
atttgctagtatcacaattgctagt

SEQ ID NO: 2299816 - DNA, 25 bp, Homo sapien
tctccatttgacgtttcttcatttg

SEQ ID NO: 2299817 - DNA, 25 bp, Homo sapien
caattctagttgacaccatcttgag

SEQ ID NO: 2299818 - DNA, 25 bp, Homo sapien
gactgctgtgctttatctgaaaatt

SEQ ID NO: 2299819 - DNA, 25 bp, Homo sapien
aggaggttcgcagactgctgtgctt

SEQ ID NO: 2299820 - DNA, 25 bp, Homo sapien
gtttccaattcagcttaacacccat

SEQ ID NO: 2299821 - DNA, 25 bp, Homo sapien
ggtggaactaaagcgatctttggac

SEQ ID NO: 2299822 - DNA, 25 bp, Homo sapien
actaaagcgatctttggacaggtac

SEQ ID NO: 2299823 - DNA, 25 bp, Homo sapien
cttgtggctttggacttgcagctga

SEQ ID NO: 2299824 - DNA, 25 bp, Homo sapien
caaggtggaactaaagcgatctttg

SEQ ID NO: 2299825 - DNA, 25 bp, Homo sapien
accccgaacacaaactcccagtgag

SEQ ID NO: 2299826 - DNA, 25 bp, Homo sapien
cgaacacaaactcccagtgagcata

SEQ ID NO: 2299827 - DNA, 25 bp, Homo sapien
cccgaacacaaactcccagtgagca

SEQ ID NO: 2299828 - DNA, 25 bp, Homo sapien
ccaccccgaacacaaactcccagtg

SEQ ID NO: 2299829 - DNA, 25 bp, Homo sapien
agatgcacagatggactcttctcta

SEQ ID NO: 2299830 - DNA, 25 bp, Homo sapien
aagatgcacagatggactcttctct

SEQ ID NO: 2299831 - DNA, 25 bp, Homo sapien
gaccaatctatgtggcagctcatct

SEQ ID NO: 2299832 - DNA, 25 bp, Homo sapien
aatactaagatgtagcctcgtttca

SEQ ID NO: 2299833 - DNA, 25 bp, Homo sapien
gcagctcatctgacaatactaagat

SEQ ID NO: 2299834 - DNA, 25 bp, Homo sapien
tgaccaatctatgtggcagctcatc

SEQ ID NO: 2299835 - DNA, 25 bp, Homo sapien
aagggtgaggagtcatgtcgcctcc

SEQ ID NO: 2299836 - DNA, 25 bp, Homo sapien
tgccgtaagtgcacaatcagtaaag

SEQ ID NO: 2299837 - DNA, 25 bp, Homo sapien
aacagcttaagatggttggcctgca

SEQ ID NO: 2299838 - DNA, 25 bp, Homo sapien
cagttagctgacagttggctcatgc

SEQ ID NO: 2299839 - DNA, 25 bp, Homo sapien
cactaggtaaagctttatgcctggg

SEQ ID NO: 2299840 - DNA, 25 bp, Homo sapien
tgtatattggacgaaggtgaattct

SEQ ID NO: 2299841 - DNA, 25 bp, Homo sapien
tttgcactaggtaaagctttatgcc

SEQ ID NO: 2299842 - DNA, 25 bp, Homo sapien
tttggtgtatattggacgaaggtga

SEQ ID NO: 2299843 - DNA, 25 bp, Homo sapien
ctgcctccttcaaagcgactgatga

SEQ ID NO: 2299844 - DNA, 25 bp, Homo sapien
gatctgataccttactgggtttttc

SEQ ID NO: 2299845 - DNA, 25 bp, Homo sapien
caaagcgactgatgagatctgatac

SEQ ID NO: 2299846 - DNA, 25 bp, Homo sapien
aagcagaggcaggtttaatttcctc

SEQ ID NO: 2299847 - DNA, 25 bp, Homo sapien
gacccacaaggagtaacacatagag

SEQ ID NO: 2299848 - DNA, 25 bp, Homo sapien
acccagatattgagcgtcccacaga

SEQ ID NO: 2299849 - DNA, 25 bp, Homo sapien
agaggcatccgctcagactttccaa

SEQ ID NO: 2299850 - DNA, 25 bp, Homo sapien
ttcatgaaaaagctggtggcctaca

SEQ ID NO: 2299851 - DNA, 25 bp, Homo sapien
cagacaatccaaccaatgtggcctc

SEQ ID NO: 2299852 - DNA, 25 bp, Homo sapien
gaccagactccactctaacagatgt

SEQ ID NO: 2299853 - DNA, 25 bp, Homo sapien
gagatacggttctgccacattaccc

SEQ ID NO: 2299854 - DNA, 25 bp, Homo sapien
cagccgggtaaggtcttaacaacag

SEQ ID NO: 2299855 - DNA, 25 bp, Homo sapien
gcgcccggccatttgtacagatttt

SEQ ID NO: 2299856 - DNA, 25 bp, Homo sapien
acaaaactgtgggctatactctttg

SEQ ID NO: 2299857 - DNA, 25 bp, Homo sapien
tatcattcggggttctgttcaggta

SEQ ID NO: 2299858 - DNA, 25 bp, Homo sapien
tctgttcaggtatcacatctccaaa

SEQ ID NO: 2299859 - DNA, 25 bp, Homo sapien
agtgtatgtgtcttggggtctttgc

SEQ ID NO: 2299860 - DNA, 25 bp, Homo sapien
tgtgttcttgccatactccttgctg

SEQ ID NO: 2299861 - DNA, 25 bp, Homo sapien
caagtctcttgggatgctatccaca

SEQ ID NO: 2299862 - DNA, 25 bp, Homo sapien
taaagaagatgaccccgagtctacc

SEQ ID NO: 2299863 - DNA, 25 bp, Homo sapien
tgagggcttcctcacacactcaagg

SEQ ID NO: 2299864 - DNA, 25 bp, Homo sapien
tgaatattcttagtgtagacccaag

SEQ ID NO: 2299865 - DNA, 25 bp, Homo sapien
tcactatgtgcgtatcaagcaaggg

SEQ ID NO: 2299866 - DNA, 25 bp, Homo sapien
ggttgtcaatccatgccttcctggg

SEQ ID NO: 2299867 - DNA, 25 bp, Homo sapien
gcctggagtcctgtagctactgtca

SEQ ID NO: 2299868 - DNA, 25 bp, Homo sapien
tacaccgttggccacacaagtctgt

SEQ ID NO: 2299869 - DNA, 25 bp, Homo sapien
gcagccagagcttgaaaatcgttta

SEQ ID NO: 2299870 - DNA, 25 bp, Homo sapien
gggatacagcaccaacatctagagc

SEQ ID NO: 2299871 - DNA, 25 bp, Homo sapien
tagtggcaagttcatcttacaggcc

SEQ ID NO: 2299872 - DNA, 25 bp, Homo sapien
taagacaacaatcgaataggcaggg

SEQ ID NO: 2299873 - DNA, 25 bp, Homo sapien
catagggattcactttgcaatgtcc

SEQ ID NO: 2299874 - DNA, 25 bp, Homo sapien
tgccgcagcacacttatgaaatcct

SEQ ID NO: 2299875 - DNA, 25 bp, Homo sapien
aaaagtaccatccaacaaccatagg

SEQ ID NO: 2299876 - DNA, 25 bp, Homo sapien
ggtgttcgcatcaaccgctctgcag

SEQ ID NO: 2299877 - DNA, 25 bp, Homo sapien
cattcaaaagcccattgcagtctgt

SEQ ID NO: 2299878 - DNA, 25 bp, Homo sapien
gattatgcagtcagaaatattcctc

SEQ ID NO: 2299879 - DNA, 25 bp, Homo sapien
ctggccctcaactagtactcctggg

SEQ ID NO: 2299880 - DNA, 25 bp, Homo sapien
caaatgcagcatctacaatcttgcc

SEQ ID NO: 2299881 - DNA, 25 bp, Homo sapien
tagaaattaaagaacaggcaccaag

SEQ ID NO: 2299882 - DNA, 25 bp, Homo sapien
caggcctacttgtgacttaccacca

SEQ ID NO: 2299883 - DNA, 25 bp, Homo sapien
tatagtgtcataagcatcaacaggc

SEQ ID NO: 2299884 - DNA, 25 bp, Homo sapien
ctgtcagctcggcatgatccttcaa

SEQ ID NO: 2299885 - DNA, 25 bp, Homo sapien
gaaacacttgggtggcatcagcgat

SEQ ID NO: 2299886 - DNA, 25 bp, Homo sapien
tttggcatgactctcccatatggct

SEQ ID NO: 2299887 - DNA, 25 bp, Homo sapien
cattaactggataggcagaaacact

SEQ ID NO: 2299888 - DNA, 25 bp, Homo sapien
gcagctcacagagttcattaactgg

SEQ ID NO: 2299889 - DNA, 25 bp, Homo sapien
tcggcctggttgttagtcactgtag

SEQ ID NO: 2299890 - DNA, 25 bp, Homo sapien
taggttcggcctggttgttagtcac

SEQ ID NO: 2299891 - DNA, 25 bp, Homo sapien
ctgggcttaggttcggcctggttgt

SEQ ID NO: 2299892 - DNA, 25 bp, Homo sapien
tgttagtcactgtagcccactgctt

SEQ ID NO: 2299893 - DNA, 25 bp, Homo sapien
tttctgtgtaatgcacttcctaggc

SEQ ID NO: 2299894 - DNA, 25 bp, Homo sapien
cacttcctaggctgttactgtctgc

SEQ ID NO: 2299895 - DNA, 25 bp, Homo sapien
cctcttacagtaacagagtatgcaa

SEQ ID NO: 2299896 - DNA, 25 bp, Homo sapien
tatcagcaccaaaagttacactcct

SEQ ID NO: 2299897 - DNA, 25 bp, Homo sapien
taagccagaatggttgaggcataat

SEQ ID NO: 2299898 - DNA, 25 bp, Homo sapien
aaatgcatgtgataatgtaacccag

SEQ ID NO: 2299899 - DNA, 25 bp, Homo sapien
gccaggcctattttgcttttctaag

SEQ ID NO: 2299900 - DNA, 25 bp, Homo sapien
tgtgataatgtaacccagaggtccc

SEQ ID NO: 2299901 - DNA, 25 bp, Homo sapien
atatgcgaagatttctgctctgaga

SEQ ID NO: 2299902 - DNA, 25 bp, Homo sapien
tgtattgctgtatgagggatctttc

SEQ ID NO: 2299903 - DNA, 25 bp, Homo sapien
cttctgtattgctgtatgagggatc

SEQ ID NO: 2299904 - DNA, 25 bp, Homo sapien
tctgtattgctgtatgagggatctt

SEQ ID NO: 2299905 - DNA, 25 bp, Homo sapien
attgctgtatgagggatctttctaa

SEQ ID NO: 2299906 - DNA, 25 bp, Homo sapien
agtaaagtgaacccccacatgccca

SEQ ID NO: 2299907 - DNA, 25 bp, Homo sapien
acagtaaagtgaacccccacatgcc

SEQ ID NO: 2299908 - DNA, 25 bp, Homo sapien
gtcattccaacatattgggaggtag

SEQ ID NO: 2299909 - DNA, 25 bp, Homo sapien
aaacagtaaagtgaacccccacatg

SEQ ID NO: 2299910 - DNA, 25 bp, Homo sapien
ttgacataagctctttcagtaagca

SEQ ID NO: 2299911 - DNA, 25 bp, Homo sapien
ctgatctaagaggtcaagtcggttg

SEQ ID NO: 2299912 - DNA, 25 bp, Homo sapien
aaagttcattggctattttgtgaag

SEQ ID NO: 2299913 - DNA, 25 bp, Homo sapien
tcagtaagcaaaagttcattggcta

SEQ ID NO: 2299914 - DNA, 25 bp, Homo sapien
cataatgtccagatggttgttaatt

SEQ ID NO: 2299915 - DNA, 25 bp, Homo sapien
gaaggaggtctattccttcataatg

SEQ ID NO: 2299916 - DNA, 25 bp, Homo sapien
ggtctattccttcataatgtccaga

SEQ ID NO: 2299917 - DNA, 25 bp, Homo sapien
tttctaaattcacctccactctatt

SEQ ID NO: 2299918 - DNA, 25 bp, Homo sapien
tgctggaaacgagcctcggtttgct

SEQ ID NO: 2299919 - DNA, 25 bp, Homo sapien
ctggaaacgagcctcggtttgcttc

SEQ ID NO: 2299920 - DNA, 25 bp, Homo sapien
gctggaaacgagcctcggtttgctt

SEQ ID NO: 2299921 - DNA, 25 bp, Homo sapien
tggaaacgagcctcggtttgcttct

SEQ ID NO: 2299922 - DNA, 25 bp, Homo sapien
ggcaagaggaatttactatggaagg

SEQ ID NO: 2299923 - DNA, 25 bp, Homo sapien
ttcttgcattcgtttctccagctct

SEQ ID NO: 2299924 - DNA, 25 bp, Homo sapien
gcaagaggaatttactatggaaggc

SEQ ID NO: 2299925 - DNA, 25 bp, Homo sapien
catattctccatacatcttaaggaa

SEQ ID NO: 2299926 - DNA, 25 bp, Homo sapien
taaccaattccattgcattatcaaa

SEQ ID NO: 2299927 - DNA, 25 bp, Homo sapien
gtctccaattctaggagtagtttcc

SEQ ID NO: 2299928 - DNA, 25 bp, Homo sapien
gaactggggaatacgttctgtcatg

SEQ ID NO: 2299929 - DNA, 25 bp, Homo sapien
aatggctaagtaaacccaggaggcg

SEQ ID NO: 2299930 - DNA, 25 bp, Homo sapien
ggcaggagaatggctaagtaaaccc

SEQ ID NO: 2299931 - DNA, 25 bp, Homo sapien
ggagaatggctaagtaaacccagga

SEQ ID NO: 2299932 - DNA, 25 bp, Homo sapien
gagcttgcagtgagcctagatcacg

SEQ ID NO: 2299933 - DNA, 25 bp, Homo sapien
caatatttttcgacaaagtgtgact

SEQ ID NO: 2299934 - DNA, 25 bp, Homo sapien
tcgacaaagtgtgactgtccatcac

SEQ ID NO: 2299935 - DNA, 25 bp, Homo sapien
tatttttcgacaaagtgtgactgtc

SEQ ID NO: 2299936 - DNA, 25 bp, Homo sapien
taaaacagaactttcgtcaagggca

SEQ ID NO: 2299937 - DNA, 25 bp, Homo sapien
gaggcaatttccttagatagtcctt

SEQ ID NO: 2299938 - DNA, 25 bp, Homo sapien
tccttaaggagcatctcataccggg

SEQ ID NO: 2299939 - DNA, 25 bp, Homo sapien
tgaacaggttctagcatgtgatgct

SEQ ID NO: 2299940 - DNA, 25 bp, Homo sapien
gatgctgcaaagttaagctcccaca

SEQ ID NO: 2299941 - DNA, 25 bp, Homo sapien
attgcactattagaatggcttgctg

SEQ ID NO: 2299942 - DNA, 25 bp, Homo sapien
ccttattgcactattagaatggctt

SEQ ID NO: 2299943 - DNA, 25 bp, Homo sapien
ggcttgctgctgtagatataatttc

SEQ ID NO: 2299944 - DNA, 25 bp, Homo sapien
atggcttgctgctgtagatataatt

SEQ ID NO: 2299945 - DNA, 25 bp, Homo sapien
ttccgagcagctagtttgaggatct

SEQ ID NO: 2299946 - DNA, 25 bp, Homo sapien
tgtgctgaagtgttccgagcagcta

SEQ ID NO: 2299947 - DNA, 25 bp, Homo sapien
aaaaggtagcgttcttgtgctgaag

SEQ ID NO: 2299948 - DNA, 25 bp, Homo sapien
ttcatttgaagggtttacaatgtct

SEQ ID NO: 2299949 - DNA, 25 bp, Homo sapien
tctgcatgacaattagttcctaagt

SEQ ID NO: 2299950 - DNA, 25 bp, Homo sapien
ttgtactgaacacccctctgcatga

SEQ ID NO: 2299951 - DNA, 25 bp, Homo sapien
catgacaactcatgctatggtgggt

SEQ ID NO: 2299952 - DNA, 25 bp, Homo sapien
tgggtgagatgactgcctcagagca

SEQ ID NO: 2299953 - DNA, 25 bp, Homo sapien
aattttcattccatcaatgccaacc

SEQ ID NO: 2299954 - DNA, 25 bp, Homo sapien
actgtgaatttagagcctaccaagc

SEQ ID NO: 2299955 - DNA, 25 bp, Homo sapien
ccctggttcgaactgtgaatttaga

SEQ ID NO: 2299956 - DNA, 25 bp, Homo sapien
aatgccaaccctggttcgaactgtg

SEQ ID NO: 2299957 - DNA, 25 bp, Homo sapien
cacctggaaagtatgtggatattct

SEQ ID NO: 2299958 - DNA, 25 bp, Homo sapien
tctttcccagacacctggaaagtat

SEQ ID NO: 2299959 - DNA, 25 bp, Homo sapien
ttcccagacacctggaaagtatgtg

SEQ ID NO: 2299960 - DNA, 25 bp, Homo sapien
cagacacctggaaagtatgtggata

SEQ ID NO: 2299961 - DNA, 25 bp, Homo sapien
tgcatttacatccaaccagagttcc

SEQ ID NO: 2299962 - DNA, 25 bp, Homo sapien
gacatgactcctgcttttcaagaac

SEQ ID NO: 2299963 - DNA, 25 bp, Homo sapien
cctaggcactatggaggaatcaaga

SEQ ID NO: 2299964 - DNA, 25 bp, Homo sapien
ccagagttccagagatatgcagcat

SEQ ID NO: 2299965 - DNA, 25 bp, Homo sapien
atattaatgattcacactgggtgaa

SEQ ID NO: 2299966 - DNA, 25 bp, Homo sapien
gggtgaataaaactatgctttcctg

SEQ ID NO: 2299967 - DNA, 25 bp, Homo sapien
tcacactgggtgaataaaactatgc

SEQ ID NO: 2299968 - DNA, 25 bp, Homo sapien
aactatgctttcctgttgttccaac

SEQ ID NO: 2299969 - DNA, 25 bp, Homo sapien
gatccattcttctttgtcttgcgca

SEQ ID NO: 2299970 - DNA, 25 bp, Homo sapien
ccattcttctttgtcttgcgcagaa

SEQ ID NO: 2299971 - DNA, 25 bp, Homo sapien
tccattcttctttgtcttgcgcaga

SEQ ID NO: 2299972 - DNA, 25 bp, Homo sapien
cttgatccattcttctttgtcttgc

SEQ ID NO: 2299973 - DNA, 25 bp, Homo sapien
tgggcagcatggcaaaacctcgtct

SEQ ID NO: 2299974 - DNA, 25 bp, Homo sapien
ctgggcagcatggcaaaacctcgtc

SEQ ID NO: 2299975 - DNA, 25 bp, Homo sapien
gcatttctgaaggtttcatgccttt

SEQ ID NO: 2299976 - DNA, 25 bp, Homo sapien
gaatgtcattatcctttgcaattgc

SEQ ID NO: 2299977 - DNA, 25 bp, Homo sapien
aagcatcgatggtttcttgaagggc

SEQ ID NO: 2299978 - DNA, 25 bp, Homo sapien
catgcctttgatgaaaagcatcgat

SEQ ID NO: 2299979 - DNA, 25 bp, Homo sapien
ttggggctcttttccctagctcagc

SEQ ID NO: 2299980 - DNA, 25 bp, Homo sapien
tggggctcttttccctagctcagca

SEQ ID NO: 2299981 - DNA, 25 bp, Homo sapien
cttggggctcttttccctagctcag

SEQ ID NO: 2299982 - DNA, 25 bp, Homo sapien
gggctcttttccctagctcagcagt

SEQ ID NO: 2299983 - DNA, 25 bp, Homo sapien
tacacattgtcacttcattatctcg

SEQ ID NO: 2299984 - DNA, 25 bp, Homo sapien
gcctccttcgtgtcagtgcattgaa

SEQ ID NO: 2299985 - DNA, 25 bp, Homo sapien
gcattgaaaggttctttacatttca

SEQ ID NO: 2299986 - DNA, 25 bp, Homo sapien
ttgtcacttcattatctcggatcca

SEQ ID NO: 2299987 - DNA, 25 bp, Homo sapien
tgtcttccccattacaacgtaagct

SEQ ID NO: 2299988 - DNA, 25 bp, Homo sapien
cacagtcctctgcacgtaattggca

SEQ ID NO: 2299989 - DNA, 25 bp, Homo sapien
aacgtaagctctgtaaagccaggga

SEQ ID NO: 2299990 - DNA, 25 bp, Homo sapien
tctaacgttttttctccagggctca

SEQ ID NO: 2299991 - DNA, 25 bp, Homo sapien
catcagcctgtttcctagctttcct

SEQ ID NO: 2299992 - DNA, 25 bp, Homo sapien
ccatacatctctgaacttaccgaaa

SEQ ID NO: 2299993 - DNA, 25 bp, Homo sapien
tcattatactactctggataaaccg

SEQ ID NO: 2299994 - DNA, 25 bp, Homo sapien
ttcattgcccccaagatgtccgcta

SEQ ID NO: 2299995 - DNA, 25 bp, Homo sapien
tccagttcctcaaggaggactcctc

SEQ ID NO: 2299996 - DNA, 25 bp, Homo sapien
gacactggcttcttatagttcccaa

SEQ ID NO: 2299997 - DNA, 25 bp, Homo sapien
taacttaacgctcacccttcagatg

SEQ ID NO: 2299998 - DNA, 25 bp, Homo sapien
tctccttcactgagttaacttaacg

SEQ ID NO: 2299999 - DNA, 25 bp, Homo sapien
tcactgtctgtgaatccacttatga

SEQ ID NO: 2300000 - DNA, 25 bp, Homo sapien
tagtcggagcatttccaacaaacca

SEQ ID NO: 2300001 - DNA, 25 bp, Homo sapien
aactttgctcaatttaccaccatca

SEQ ID NO: 2300002 - DNA, 25 bp, Homo sapien
tccacttatgatttgataacagtct

SEQ ID NO: 2300003 - DNA, 25 bp, Homo sapien
ggttttgtaagtgtctgacagttct

SEQ ID NO: 2300004 - DNA, 25 bp, Homo sapien
tgctcactctcgcttgccaccatgt

SEQ ID NO: 2300005 - DNA, 25 bp, Homo sapien
acagttcttccttcatacacttgct

SEQ ID NO: 2300006 - DNA, 25 bp, Homo sapien
ttttgtaagtgtctgacagttcttc

SEQ ID NO: 2300007 - DNA, 25 bp, Homo sapien
tctccatatactgaagaaagctgca

SEQ ID NO: 2300008 - DNA, 25 bp, Homo sapien
tacatgtacagcacaagagggtctt

SEQ ID NO: 2300009 - DNA, 25 bp, Homo sapien
gtcttgcttggggatcacacaccaa

SEQ ID NO: 2300010 - DNA, 25 bp, Homo sapien
gaaagctgcacaccacactgtttcc

SEQ ID NO: 2300011 - DNA, 25 bp, Homo sapien
tttgagtccgctgtccactcgcttc

SEQ ID NO: 2300012 - DNA, 25 bp, Homo sapien
tcttgttctacagattttgagtccg

SEQ ID NO: 2300013 - DNA, 25 bp, Homo sapien
agtgaaactgcctgaactcttgttc

SEQ ID NO: 2300014 - DNA, 25 bp, Homo sapien
tcccttcagacagatgtggtttaga

SEQ ID NO: 2300015 - DNA, 25 bp, Homo sapien
acatcagacattaaaagcaggtgat

SEQ ID NO: 2300016 - DNA, 25 bp, Homo sapien
aagacatcagacattaaaagcaggt

SEQ ID NO: 2300017 - DNA, 25 bp, Homo sapien
agaaaagacatcagacattaaaagc

SEQ ID NO: 2300018 - DNA, 25 bp, Homo sapien
taaagaaaagacatcagacattaaa

SEQ ID NO: 2300019 - DNA, 25 bp, Homo sapien
tagactgggtcagtttgaaactgtg

SEQ ID NO: 2300020 - DNA, 25 bp, Homo sapien
gcaaagctgtgcacggacttagact

SEQ ID NO: 2300021 - DNA, 25 bp, Homo sapien
ctgtgacagctaaaaggatgacttt

SEQ ID NO: 2300022 - DNA, 25 bp, Homo sapien
tgtggcaggtctgcgctccttggca

SEQ ID NO: 2300023 - DNA, 25 bp, Homo sapien
caaggtggctggatgctcatttgga

SEQ ID NO: 2300024 - DNA, 25 bp, Homo sapien
gctggatgctcatttggaccacctg

SEQ ID NO: 2300025 - DNA, 25 bp, Homo sapien
tgctcatttggaccacctggtgtct

SEQ ID NO: 2300026 - DNA, 25 bp, Homo sapien
ggtggctggatgctcatttggacca

SEQ ID NO: 2300027 - DNA, 25 bp, Homo sapien
tgacaaggaatcatgtgaccagccc

SEQ ID NO: 2300028 - DNA, 25 bp, Homo sapien
ttatcggtagaatgactctgcacac

SEQ ID NO: 2300029 - DNA, 25 bp, Homo sapien
tatgactttgactgtcccagtgacc

SEQ ID NO: 2300030 - DNA, 25 bp, Homo sapien
tgagctgtaagtcctgagacctcca

SEQ ID NO: 2300031 - DNA, 25 bp, Homo sapien
taacaaggcctgaataaatgtgtgg

SEQ ID NO: 2300032 - DNA, 25 bp, Homo sapien
ggaagggaacctattatgtcagcaa

SEQ ID NO: 2300033 - DNA, 25 bp, Homo sapien
tgtagatttctagcagactggtaca

SEQ ID NO: 2300034 - DNA, 25 bp, Homo sapien
tggtgaccggataaccagaaattct

SEQ ID NO: 2300035 - DNA, 25 bp, Homo sapien
agagaagcgggtaaggctgtttcac

SEQ ID NO: 2300036 - DNA, 25 bp, Homo sapien
tctttaataagagagaagcgggtaa

SEQ ID NO: 2300037 - DNA, 25 bp, Homo sapien
taataagagagaagcgggtaaggct

SEQ ID NO: 2300038 - DNA, 25 bp, Homo sapien
gtgattctttaataagagagaagcg

SEQ ID NO: 2300039 - DNA, 25 bp, Homo sapien
tactcaggttgtatctagtccagaa

SEQ ID NO: 2300040 - DNA, 25 bp, Homo sapien
gaagtttacttgctccggttggtgc

SEQ ID NO: 2300041 - DNA, 25 bp, Homo sapien
tacttaacacgccaaatggtaggct

SEQ ID NO: 2300042 - DNA, 25 bp, Homo sapien
ccaagacgcttgttccctagaagtt

SEQ ID NO: 2300043 - DNA, 25 bp, Homo sapien
gattctcttataatggtccccacag

SEQ ID NO: 2300044 - DNA, 25 bp, Homo sapien
aaactatcttgtagaagccatgtgc

SEQ ID NO: 2300045 - DNA, 25 bp, Homo sapien
cagaaagtagaagaccatgattgac

SEQ ID NO: 2300046 - DNA, 25 bp, Homo sapien
catagtctagcatttacaggccaag

SEQ ID NO: 2300047 - DNA, 25 bp, Homo sapien
gccgcattgtagactgttcttccca

SEQ ID NO: 2300048 - DNA, 25 bp, Homo sapien
ccagcagagcaggataaggggggct

SEQ ID NO: 2300049 - DNA, 25 bp, Homo sapien
gggcggccgcattgtagactgttct

SEQ ID NO: 2300050 - DNA, 25 bp, Homo sapien
gcggccgcattgtagactgttcttc

SEQ ID NO: 2300051 - DNA, 25 bp, Homo sapien
gagagcctctcagtgaagcctgtgg

SEQ ID NO: 2300052 - DNA, 25 bp, Homo sapien
agagcctctcagtgaagcctgtgga

SEQ ID NO: 2300053 - DNA, 25 bp, Homo sapien
actctgaaaacacggggccccagtg

SEQ ID NO: 2300054 - DNA, 25 bp, Homo sapien
gcccgccggccacggcaatgaatgg

SEQ ID NO: 2300055 - DNA, 25 bp, Homo sapien
tcctcggaagccggcacccattgga

SEQ ID NO: 2300056 - DNA, 25 bp, Homo sapien
gaagccggcacccattggaccgggc

SEQ ID NO: 2300057 - DNA, 25 bp, Homo sapien
gacgtcctggagcttgtttatgaca

SEQ ID NO: 2300058 - DNA, 25 bp, Homo sapien
ccactacgacgatttgaggcagctg

SEQ ID NO: 2300059 - DNA, 25 bp, Homo sapien
atgtcggcgcccaccgtgttgaaga

SEQ ID NO: 2300060 - DNA, 25 bp, Homo sapien
tttatgacaggaattagcgcctcca

SEQ ID NO: 2300061 - DNA, 25 bp, Homo sapien
ggtctggcccgagcgaacgccgcct

SEQ ID NO: 2300062 - DNA, 25 bp, Homo sapien
ggggtctggcccgagcgaacgccgc

SEQ ID NO: 2300063 - DNA, 25 bp, Homo sapien
gccggggtctggcccgagcgaacgc

SEQ ID NO: 2300064 - DNA, 25 bp, Homo sapien
ctggcccgagcgaacgccgcctgct

SEQ ID NO: 2300065 - DNA, 25 bp, Homo sapien
gtctctcagcctcaacagagcgatt

SEQ ID NO: 2300066 - DNA, 25 bp, Homo sapien
tcagcctcaacagagcgattccaaa

SEQ ID NO: 2300067 - DNA, 25 bp, Homo sapien
cgtagcgtctctcagcctcaacaga

SEQ ID NO: 2300068 - DNA, 25 bp, Homo sapien
cctcaacagagcgattccaaaacta

SEQ ID NO: 2300069 - DNA, 25 bp, Homo sapien
ttttaaaatgctgcttcggcgttct

SEQ ID NO: 2300070 - DNA, 25 bp, Homo sapien
cggcgttctcgaaacctggtggaat

SEQ ID NO: 2300071 - DNA, 25 bp, Homo sapien
tacgcagaaaaatcggatattcctt

SEQ ID NO: 2300072 - DNA, 25 bp, Homo sapien
gcagaactctagatacacgttttgt

SEQ ID NO: 2300073 - DNA, 25 bp, Homo sapien
atacaagagcaaaatgagtttctta

SEQ ID NO: 2300074 - DNA, 25 bp, Homo sapien
tatacaagagcaaaatgagtttctt

SEQ ID NO: 2300075 - DNA, 25 bp, Homo sapien
ggtctccgggtgacaattccagtac

SEQ ID NO: 2300076 - DNA, 25 bp, Homo sapien
agaggtctccgggtgacaattccag

SEQ ID NO: 2300077 - DNA, 25 bp, Homo sapien
agaatgagaggtctccgggtgacaa

SEQ ID NO: 2300078 - DNA, 25 bp, Homo sapien
gggtgacaattccagtacctctggg

SEQ ID NO: 2300079 - DNA, 25 bp, Homo sapien
taattatctcaaatctgaaatttac

SEQ ID NO: 2300080 - DNA, 25 bp, Homo sapien
ataattatctcaaatctgaaattta

SEQ ID NO: 2300081 - DNA, 25 bp, Homo sapien
aaataattatctcaaatctgaaatt

SEQ ID NO: 2300082 - DNA, 25 bp, Homo sapien
aataattatctcaaatctgaaattt

SEQ ID NO: 2300083 - DNA, 25 bp, Homo sapien
caccaacagctcctacagtaaatga

SEQ ID NO: 2300084 - DNA, 25 bp, Homo sapien
gaaacagatatggtactctgctgca

SEQ ID NO: 2300085 - DNA, 25 bp, Homo sapien
aaattcaagtcatcaccaccaacag

SEQ ID NO: 2300086 - DNA, 25 bp, Homo sapien
aactgcattgaaaacagatctctgc

SEQ ID NO: 2300087 - DNA, 25 bp, Homo sapien
ggagacatcaacaaaacatagtgga

SEQ ID NO: 2300088 - DNA, 25 bp, Homo sapien
gatttactgaccaaccactaagagg

SEQ ID NO: 2300089 - DNA, 25 bp, Homo sapien
cactacgatagctgaaatgtacacc

SEQ ID NO: 2300090 - DNA, 25 bp, Homo sapien
tatcaggctgtcaggtagttcacac

SEQ ID NO: 2300091 - DNA, 25 bp, Homo sapien
tagaaaggtgtcttgagtttttcca

SEQ ID NO: 2300092 - DNA, 25 bp, Homo sapien
gaaaggtgtcttgagtttttccatg

SEQ ID NO: 2300093 - DNA, 25 bp, Homo sapien
gtcttgagtttttccatgtagcagg

SEQ ID NO: 2300094 - DNA, 25 bp, Homo sapien
cttgagtttttccatgtagcagggt

SEQ ID NO: 2300095 - DNA, 25 bp, Homo sapien
ggttacctgtagagccacaacttgc

SEQ ID NO: 2300096 - DNA, 25 bp, Homo sapien
aaaaattaagaatcccactgagtag

SEQ ID NO: 2300097 - DNA, 25 bp, Homo sapien
gctagctgctttgtaatttacacac

SEQ ID NO: 2300098 - DNA, 25 bp, Homo sapien
agatgtacacatatgactcaaggaa

SEQ ID NO: 2300099 - DNA, 25 bp, Homo sapien
tggtgtgaagaaatttaccccattc

SEQ ID NO: 2300100 - DNA, 25 bp, Homo sapien
tgaagaaatttaccccattcttctg

SEQ ID NO: 2300101 - DNA, 25 bp, Homo sapien
agaaatttaccccattcttctgctt

SEQ ID NO: 2300102 - DNA, 25 bp, Homo sapien
tgtgaagaaatttaccccattcttc

SEQ ID NO: 2300103 - DNA, 25 bp, Homo sapien
caaatcacagagaaaatcggcctca

SEQ ID NO: 2300104 - DNA, 25 bp, Homo sapien
ctttaaaataacgtaattgccaatg

SEQ ID NO: 2300105 - DNA, 25 bp, Homo sapien
gcctggccattacgaacttttcaaa

SEQ ID NO: 2300106 - DNA, 25 bp, Homo sapien
acaattaagaatcaccaaatcacag

SEQ ID NO: 2300107 - DNA, 25 bp, Homo sapien
tcgaatttcatcaaaatccgtgtaa

SEQ ID NO: 2300108 - DNA, 25 bp, Homo sapien
ttgtcgaatttcatcaaaatccgtg

SEQ ID NO: 2300109 - DNA, 25 bp, Homo sapien
ttcttgtcgaatttcatcaaaatcc

SEQ ID NO: 2300110 - DNA, 25 bp, Homo sapien
gaatttcatcaaaatccgtgtaaag

SEQ ID NO: 2300111 - DNA, 25 bp, Homo sapien
taagaatactgcgtaggctccctcc

SEQ ID NO: 2300112 - DNA, 25 bp, Homo sapien
cactggccctctacaagtattagga

SEQ ID NO: 2300113 - DNA, 25 bp, Homo sapien
tccgagttcagagagtaaggcgtag

SEQ ID NO: 2300114 - DNA, 25 bp, Homo sapien
ccaaatttatgaggttccgagttca

SEQ ID NO: 2300115 - DNA, 25 bp, Homo sapien
cttaagatgaattggttcagggctt

SEQ ID NO: 2300116 - DNA, 25 bp, Homo sapien
taagatgaattggttcagggcttac

SEQ ID NO: 2300117 - DNA, 25 bp, Homo sapien
gatgaattggttcagggcttactcc

SEQ ID NO: 2300118 - DNA, 25 bp, Homo sapien
agatgaattggttcagggcttactc

SEQ ID NO: 2300119 - DNA, 25 bp, Homo sapien
cttggtcattcctggcaaatccaca

SEQ ID NO: 2300120 - DNA, 25 bp, Homo sapien
tcaaattgacaacgttgggtgaaaa

SEQ ID NO: 2300121 - DNA, 25 bp, Homo sapien
attcctggcaaatccacaagtgtca

SEQ ID NO: 2300122 - DNA, 25 bp, Homo sapien
aagtgtcaaattgacaacgttgggt

SEQ ID NO: 2300123 - DNA, 25 bp, Homo sapien
ctggagataaacctgtagagtgtgg

SEQ ID NO: 2300124 - DNA, 25 bp, Homo sapien
tgtttagacattggggagatgagaa

SEQ ID NO: 2300125 - DNA, 25 bp, Homo sapien
ggccagtgagactggagataaacct

SEQ ID NO: 2300126 - DNA, 25 bp, Homo sapien
tgagactggagataaacctgtagag

SEQ ID NO: 2300127 - DNA, 25 bp, Homo sapien
taagggagcaataacatacagacat

SEQ ID NO: 2300128 - DNA, 25 bp, Homo sapien
tgcacctggccattaggattatgat

SEQ ID NO: 2300129 - DNA, 25 bp, Homo sapien
tccaaagagagtgaacaataagggc

SEQ ID NO: 2300130 - DNA, 25 bp, Homo sapien
cactgagacaactgacacttaagag

SEQ ID NO: 2300131 - DNA, 25 bp, Homo sapien
tgatgaaccgaagaatgagctctct

SEQ ID NO: 2300132 - DNA, 25 bp, Homo sapien
tagcagcagtgacagcgaggataat

SEQ ID NO: 2300133 - DNA, 25 bp, Homo sapien
gatttgaagctcaatatccttaggt

SEQ ID NO: 2300134 - DNA, 25 bp, Homo sapien
tccttaggttgatcacctacaggca

SEQ ID NO: 2300135 - DNA, 25 bp, Homo sapien
ttttcgcctagtctgtatagcaact

SEQ ID NO: 2300136 - DNA, 25 bp, Homo sapien
tgtattcaaaaccagagatactgtt

SEQ ID NO: 2300137 - DNA, 25 bp, Homo sapien
caactattcaaatacctaggtcaca

SEQ ID NO: 2300138 - DNA, 25 bp, Homo sapien
tgcaaagccaccgtattatttttaa

SEQ ID NO: 2300139 - DNA, 25 bp, Homo sapien
tgtagataccataattctctactgt

SEQ ID NO: 2300140 - DNA, 25 bp, Homo sapien
gtagataccataattctctactgta

SEQ ID NO: 2300141 - DNA, 25 bp, Homo sapien
atgtagataccataattctctactg

SEQ ID NO: 2300142 - DNA, 25 bp, Homo sapien
tttacttaatctttccaactgctgg

SEQ ID NO: 2300143 - DNA, 25 bp, Homo sapien
tctgtactgctacaaatctacaaaa

SEQ ID NO: 2300144 - DNA, 25 bp, Homo sapien
caactgctggccatattaagttgtt

SEQ ID NO: 2300145 - DNA, 25 bp, Homo sapien
tgctacaaatctacaaaatcatcct

SEQ ID NO: 2300146 - DNA, 25 bp, Homo sapien
caagtttagtgattacagctagggt

SEQ ID NO: 2300147 - DNA, 25 bp, Homo sapien
catcaatacatccatggcatcagta

SEQ ID NO: 2300148 - DNA, 25 bp, Homo sapien
gtgattacagctagggttctgcgac

SEQ ID NO: 2300149 - DNA, 25 bp, Homo sapien
gtacccgcatccatgagatcaagtt

SEQ ID NO: 2300150 - DNA, 25 bp, Homo sapien
gagtcctagcaagatactttgttcc

SEQ ID NO: 2300151 - DNA, 25 bp, Homo sapien
agaaaagcatactcatcacggattg

SEQ ID NO: 2300152 - DNA, 25 bp, Homo sapien
ctgtttagagtcctagcaagatact

SEQ ID NO: 2300153 - DNA, 25 bp, Homo sapien
cggattgaatcagttacactcttct

SEQ ID NO: 2300154 - DNA, 25 bp, Homo sapien
ggtaaacaatctctgatgtgatgca

SEQ ID NO: 2300155 - DNA, 25 bp, Homo sapien
taataagttggagtaaagtagcact

SEQ ID NO: 2300156 - DNA, 25 bp, Homo sapien
aagtagcacttttatcatccacggg

SEQ ID NO: 2300157 - DNA, 25 bp, Homo sapien
caccgtagctatttagaagagactg

SEQ ID NO: 2300158 - DNA, 25 bp, Homo sapien
aagtgacctagcaatctaggtaacc

SEQ ID NO: 2300159 - DNA, 25 bp, Homo sapien
ctagcaatctaggtaaccaaatcta

SEQ ID NO: 2300160 - DNA, 25 bp, Homo sapien
ggaaaagtgacctagcaatctaggt

SEQ ID NO: 2300161 - DNA, 25 bp, Homo sapien
caaaaggaaaagtgacctagcaatc

SEQ ID NO: 2300162 - DNA, 25 bp, Homo sapien
agtagatggatgcactatttcacaa

SEQ ID NO: 2300163 - DNA, 25 bp, Homo sapien
ttctgtatgactgcatagtagtaaa

SEQ ID NO: 2300164 - DNA, 25 bp, Homo sapien
tttatagaagtagatggatgcacta

SEQ ID NO: 2300165 - DNA, 25 bp, Homo sapien
ggccaatgtggctcctatttttata

SEQ ID NO: 2300166 - DNA, 25 bp, Homo sapien
acaatttatgaacctacagaggaag

SEQ ID NO: 2300167 - DNA, 25 bp, Homo sapien
aatacaatttatgaacctacagagg

SEQ ID NO: 2300168 - DNA, 25 bp, Homo sapien
tacaatttatgaacctacagaggaa

SEQ ID NO: 2300169 - DNA, 25 bp, Homo sapien
caatttatgaacctacagaggaaga

SEQ ID NO: 2300170 - DNA, 25 bp, Homo sapien
tgaagtatatggtttctggcattgc

SEQ ID NO: 2300171 - DNA, 25 bp, Homo sapien
aggcaatgaagtatatggtttctgg

SEQ ID NO: 2300172 - DNA, 25 bp, Homo sapien
caatgaagtatatggtttctggcat

SEQ ID NO: 2300173 - DNA, 25 bp, Homo sapien
agtatatggtttctggcattgcaaa

SEQ ID NO: 2300174 - DNA, 25 bp, Homo sapien
taaggttcgcccaaaagtctcatgg

SEQ ID NO: 2300175 - DNA, 25 bp, Homo sapien
gtagcatttctaatggcagtcaaaa

SEQ ID NO: 2300176 - DNA, 25 bp, Homo sapien
caccaagtggatcaacagattctaa

SEQ ID NO: 2300177 - DNA, 25 bp, Homo sapien
gtcaatagtgttaaggccaccaagt

SEQ ID NO: 2300178 - DNA, 25 bp, Homo sapien
gacgtttgatttgccgcttcaccag

SEQ ID NO: 2300179 - DNA, 25 bp, Homo sapien
catgaaccagttccacacagcggag

SEQ ID NO: 2300180 - DNA, 25 bp, Homo sapien
ggctgggctcttctagacgtttgat

SEQ ID NO: 2300181 - DNA, 25 bp, Homo sapien
taattgctacagtgctgaatgatcc

SEQ ID NO: 2300182 - DNA, 25 bp, Homo sapien
tccttccacccagtgaaaccaccac

SEQ ID NO: 2300183 - DNA, 25 bp, Homo sapien
atgtgaaacctgttacatttctctc

SEQ ID NO: 2300184 - DNA, 25 bp, Homo sapien
tgaaacctgttacatttctctccgt

SEQ ID NO: 2300185 - DNA, 25 bp, Homo sapien
tccacccagtgaaaccaccacttca

SEQ ID NO: 2300186 - DNA, 25 bp, Homo sapien
aattcaatttggagactacatttaa

SEQ ID NO: 2300187 - DNA, 25 bp, Homo sapien
tcaggtaagggaactacagatttta

SEQ ID NO: 2300188 - DNA, 25 bp, Homo sapien
caatttggagactacatttaagaat

SEQ ID NO: 2300189 - DNA, 25 bp, Homo sapien
atttggagactacatttaagaatcc

SEQ ID NO: 2300190 - DNA, 25 bp, Homo sapien
caactatggcatcatgaagtttagg

SEQ ID NO: 2300191 - DNA, 25 bp, Homo sapien
atgaagtttaggaaatcgtaacaat

SEQ ID NO: 2300192 - DNA, 25 bp, Homo sapien
aagacaagtcaccacttcaactatg

SEQ ID NO: 2300193 - DNA, 25 bp, Homo sapien
tgtaacaggcaaccttttacgaaga

SEQ ID NO: 2300194 - DNA, 25 bp, Homo sapien
attattgttcattagcccacaagca

SEQ ID NO: 2300195 - DNA, 25 bp, Homo sapien
gttcaattgccactaagttatggac

SEQ ID NO: 2300196 - DNA, 25 bp, Homo sapien
tgtgttgatataagccagttcaatt

SEQ ID NO: 2300197 - DNA, 25 bp, Homo sapien
gttcattagcccacaagcatcagca

SEQ ID NO: 2300198 - DNA, 25 bp, Homo sapien
tcacagaaaactccgcaaagccttt

SEQ ID NO: 2300199 - DNA, 25 bp, Homo sapien
cataaatgtggaacgtggtaagcct

SEQ ID NO: 2300200 - DNA, 25 bp, Homo sapien
taacacactgatcaattgcctactg

SEQ ID NO: 2300201 - DNA, 25 bp, Homo sapien
tccaggaaatagtgttgacaactgc

SEQ ID NO: 2300202 - DNA, 25 bp, Homo sapien
cttgtctcgtgatacagctgaaggt

SEQ ID NO: 2300203 - DNA, 25 bp, Homo sapien
aattctctggctagcctgtttctcc

SEQ ID NO: 2300204 - DNA, 25 bp, Homo sapien
tctcgtgatacagctgaaggtaatt

SEQ ID NO: 2300205 - DNA, 25 bp, Homo sapien
gaaggtaattctctggctagcctgt

SEQ ID NO: 2300206 - DNA, 25 bp, Homo sapien
ggaggcaggtgccaaagcacttgga

SEQ ID NO: 2300207 - DNA, 25 bp, Homo sapien
ccaaagcacttggaactttagaaga

SEQ ID NO: 2300208 - DNA, 25 bp, Homo sapien
ggtgccaaagcacttggaactttag

SEQ ID NO: 2300209 - DNA, 25 bp, Homo sapien
ctgggaggcaggtgccaaagcactt

SEQ ID NO: 2300210 - DNA, 25 bp, Homo sapien
tgaaattcaaaaagtgcaggataat

SEQ ID NO: 2300211 - DNA, 25 bp, Homo sapien
tttctcttctgctgtcctgaattaa

SEQ ID NO: 2300212 - DNA, 25 bp, Homo sapien
tttagtttctcttctgctgtcctga

SEQ ID NO: 2300213 - DNA, 25 bp, Homo sapien
tagtttctcttctgctgtcctgaat

SEQ ID NO: 2300214 - DNA, 25 bp, Homo sapien
atttttagtttctcttctgctgtcc

SEQ ID NO: 2300215 - DNA, 25 bp, Homo sapien
tcaaatgcggaatgtgacaaacaac

SEQ ID NO: 2300216 - DNA, 25 bp, Homo sapien
tgtttcagtgagaaccaaaggtacc

SEQ ID NO: 2300217 - DNA, 25 bp, Homo sapien
tagcatgtataactggaaccctgac

SEQ ID NO: 2300218 - DNA, 25 bp, Homo sapien
tcagaaggagacactaggtagcatg

SEQ ID NO: 2300219 - DNA, 25 bp, Homo sapien
ggctggcataattggaatgggtttt

SEQ ID NO: 2300220 - DNA, 25 bp, Homo sapien
ggactggctggcataattggaatgg

SEQ ID NO: 2300221 - DNA, 25 bp, Homo sapien
tggttggttcttgaacaccatctcc

SEQ ID NO: 2300222 - DNA, 25 bp, Homo sapien
cagttgcctgtggttggttcttgaa

SEQ ID NO: 2300223 - DNA, 25 bp, Homo sapien
catctagcaggttcacggcatgacc

SEQ ID NO: 2300224 - DNA, 25 bp, Homo sapien
cacatctagcaggttcacggcatga

SEQ ID NO: 2300225 - DNA, 25 bp, Homo sapien
acatctagcaggttcacggcatgac

SEQ ID NO: 2300226 - DNA, 25 bp, Homo sapien
ctactaacttggtcacctaccttat

SEQ ID NO: 2300227 - DNA, 25 bp, Homo sapien
ttattacctaaaccaaattgtcatg

SEQ ID NO: 2300228 - DNA, 25 bp, Homo sapien
ttctttctgtctaatcgttttccta

SEQ ID NO: 2300229 - DNA, 25 bp, Homo sapien
tctgtctaatcgttttcctactaac

SEQ ID NO: 2300230 - DNA, 25 bp, Homo sapien
caatctcgctgttcccgagcagata

SEQ ID NO: 2300231 - DNA, 25 bp, Homo sapien
aatgagtcgttcaataacctcacaa

SEQ ID NO: 2300232 - DNA, 25 bp, Homo sapien
gagtcgttcaataacctcacaatct

SEQ ID NO: 2300233 - DNA, 25 bp, Homo sapien
gatagttttcgtgcaacaggaactg

SEQ ID NO: 2300234 - DNA, 25 bp, Homo sapien
tggcctactagctcactctgaagag

SEQ ID NO: 2300235 - DNA, 25 bp, Homo sapien
ggatgatttatacagctggcctact

SEQ ID NO: 2300236 - DNA, 25 bp, Homo sapien
tctgtcagaagatcatccaataagg

SEQ ID NO: 2300237 - DNA, 25 bp, Homo sapien
aaaatgcattactgcctttggcaca

SEQ ID NO: 2300238 - DNA, 25 bp, Homo sapien
taatttgactggctccttgtaatgc

SEQ ID NO: 2300239 - DNA, 25 bp, Homo sapien
tcaccaaagatgagtctcccggatt

SEQ ID NO: 2300240 - DNA, 25 bp, Homo sapien
gcaataatttgactggctccttgta

SEQ ID NO: 2300241 - DNA, 25 bp, Homo sapien
tgagtctcccggatttcagcaataa

SEQ ID NO: 2300242 - DNA, 25 bp, Homo sapien
gattcataccattgcaatacacagg

SEQ ID NO: 2300243 - DNA, 25 bp, Homo sapien
tatagccagtctccacatgagcaga

SEQ ID NO: 2300244 - DNA, 25 bp, Homo sapien
caacaaagtctcagtattacatagt

SEQ ID NO: 2300245 - DNA, 25 bp, Homo sapien
actcaggtaggcagtaactagcaag

SEQ ID NO: 2300246 - DNA, 25 bp, Homo sapien
ggaggactatggcagcagctttaag

SEQ ID NO: 2300247 - DNA, 25 bp, Homo sapien
tacacaggtcatcttatccacaggc

SEQ ID NO: 2300248 - DNA, 25 bp, Homo sapien
agtatgcacaccacagccatgtcag

SEQ ID NO: 2300249 - DNA, 25 bp, Homo sapien
gactctatgtgaggaacttgccaac

SEQ ID NO: 2300250 - DNA, 25 bp, Homo sapien
gcctggtgtaagtgctccactttag

SEQ ID NO: 2300251 - DNA, 25 bp, Homo sapien
tcaaagtgaatcttagagcctggtg

SEQ ID NO: 2300252 - DNA, 25 bp, Homo sapien
tctagataatcaagggtagatggct

SEQ ID NO: 2300253 - DNA, 25 bp, Homo sapien
ggaactgaccatcattaccaagtct

SEQ ID NO: 2300254 - DNA, 25 bp, Homo sapien
caccacgcccagccttgggtgtttt

SEQ ID NO: 2300255 - DNA, 25 bp, Homo sapien
taaatgcagcttaggtctgtaagtc

SEQ ID NO: 2300256 - DNA, 25 bp, Homo sapien
tacaggtatcgtcagagatcatctc

SEQ ID NO: 2300257 - DNA, 25 bp, Homo sapien
tcgttcataccaagaatcatctggg

SEQ ID NO: 2300258 - DNA, 25 bp, Homo sapien
ggagcatgtatcctctgtcaagatg

SEQ ID NO: 2300259 - DNA, 25 bp, Homo sapien
gcttgattaccatagaaaaccatga

SEQ ID NO: 2300260 - DNA, 25 bp, Homo sapien
tattctcaagaatggactttcctta

SEQ ID NO: 2300261 - DNA, 25 bp, Homo sapien
cagaatggactaggactcagtgtga

SEQ ID NO: 2300262 - DNA, 25 bp, Homo sapien
gatgaaaagtccttctggttgtcca

SEQ ID NO: 2300263 - DNA, 25 bp, Homo sapien
catgtgggtcatctacttgcgctgc

SEQ ID NO: 2300264 - DNA, 25 bp, Homo sapien
tgtttcatttgcagcgagcgggcca

SEQ ID NO: 2300265 - DNA, 25 bp, Homo sapien
cttttcactgatgggcgctcctggg

SEQ ID NO: 2300266 - DNA, 25 bp, Homo sapien
ggcttgaggccctggcggctaatca

SEQ ID NO: 2300267 - DNA, 25 bp, Homo sapien
tatgaaattgcttgcgtctcagcag

SEQ ID NO: 2300268 - DNA, 25 bp, Homo sapien
gacttcaaagaacttgcgcatcaca

SEQ ID NO: 2300269 - DNA, 25 bp, Homo sapien
cgaggtgcaattagggaatcggtac

SEQ ID NO: 2300270 - DNA, 25 bp, Homo sapien
cctggaagagccgatgaatactggg

SEQ ID NO: 2300271 - DNA, 25 bp, Homo sapien
catttgtcctaagtaagataagcaa

SEQ ID NO: 2300272 - DNA, 25 bp, Homo sapien
ggttgctaacctagttcaaaatgaa

SEQ ID NO: 2300273 - DNA, 25 bp, Homo sapien
gctgaatgaagacaacttaggttgc

SEQ ID NO: 2300274 - DNA, 25 bp, Homo sapien
gataagcatttggagtgcatttatt

SEQ ID NO: 2300275 - DNA, 25 bp, Homo sapien
gccctggactagtgaaagaatggac

SEQ ID NO: 2300276 - DNA, 25 bp, Homo sapien
gggcactgaaaatacggctcatgtt

SEQ ID NO: 2300277 - DNA, 25 bp, Homo sapien
tttaaatggttgacatcatccagcg

SEQ ID NO: 2300278 - DNA, 25 bp, Homo sapien
gaatgtgtcaagaccatccagaaat

SEQ ID NO: 2300279 - DNA, 25 bp, Homo sapien
tctggcctacaactatgtcgactgg

SEQ ID NO: 2300280 - DNA, 25 bp, Homo sapien
aaaaatgatggctgaactccttacc

SEQ ID NO: 2300281 - DNA, 25 bp, Homo sapien
tagctaccagcagtgtgcagaggtg

SEQ ID NO: 2300282 - DNA, 25 bp, Homo sapien
tgaggatgctctatatgctgttgcc

SEQ ID NO: 2300283 - DNA, 25 bp, Homo sapien
ctgcaaagattttgttattacatga

SEQ ID NO: 2300284 - DNA, 25 bp, Homo sapien
ctgcagggagactcaattggatgat

SEQ ID NO: 2300285 - DNA, 25 bp, Homo sapien
gagactcaattggatgatgactgca

SEQ ID NO: 2300286 - DNA, 25 bp, Homo sapien
gcaaagattttgttattacatgaca

SEQ ID NO: 2300287 - DNA, 25 bp, Homo sapien
actgtgttcatgcgcccaagttacc

SEQ ID NO: 2300288 - DNA, 25 bp, Homo sapien
gtgttcatgcgcccaagttaccttt

SEQ ID NO: 2300289 - DNA, 25 bp, Homo sapien
ccactgtgttcatgcgcccaagtta

SEQ ID NO: 2300290 - DNA, 25 bp, Homo sapien
tgtgttcatgcgcccaagttacctt

SEQ ID NO: 2300291 - DNA, 25 bp, Homo sapien
agttctcagtagtcaactgcggtga

SEQ ID NO: 2300292 - DNA, 25 bp, Homo sapien
ttcgattgaaagttggaggccctct

SEQ ID NO: 2300293 - DNA, 25 bp, Homo sapien
cgtggatctctctacaaagagcctg

SEQ ID NO: 2300294 - DNA, 25 bp, Homo sapien
gacttaatcaacgttagcagggcta

SEQ ID NO: 2300295 - DNA, 25 bp, Homo sapien
gctgagtgtaatggtgacatcttgg

SEQ ID NO: 2300296 - DNA, 25 bp, Homo sapien
tcgtctaggctgagtgtaatggtga

SEQ ID NO: 2300297 - DNA, 25 bp, Homo sapien
tctaggctgagtgtaatggtgacat

SEQ ID NO: 2300298 - DNA, 25 bp, Homo sapien
taggctgagtgtaatggtgacatct

SEQ ID NO: 2300299 - DNA, 25 bp, Homo sapien
cttcacgtctagtgaaacatgtcat

SEQ ID NO: 2300300 - DNA, 25 bp, Homo sapien
actgcttcacgtctagtgaaacatg

SEQ ID NO: 2300301 - DNA, 25 bp, Homo sapien
gcttcacgtctagtgaaacatgtca

SEQ ID NO: 2300302 - DNA, 25 bp, Homo sapien
tgcttcacgtctagtgaaacatgtc

SEQ ID NO: 2300303 - DNA, 25 bp, Homo sapien
gatgacaaatagactgatatctcag

SEQ ID NO: 2300304 - DNA, 25 bp, Homo sapien
cataattcctacactgtacctgtgg

SEQ ID NO: 2300305 - DNA, 25 bp, Homo sapien
ttcttatagagtccccagagacatt

SEQ ID NO: 2300306 - DNA, 25 bp, Homo sapien
ggaaacacaggctctagagccctga

SEQ ID NO: 2300307 - DNA, 25 bp, Homo sapien
gagtacaatggcttggcaaaaggac

SEQ ID NO: 2300308 - DNA, 25 bp, Homo sapien
tatcaagccgtccacaatgtgctcc

SEQ ID NO: 2300309 - DNA, 25 bp, Homo sapien
gacaacttccgtttattgctgaaga

SEQ ID NO: 2300310 - DNA, 25 bp, Homo sapien
ggtgcttaagaaacactcgtgggtc

SEQ ID NO: 2300311 - DNA, 25 bp, Homo sapien
tcagcaaagtcattctccatccagc

SEQ ID NO: 2300312 - DNA, 25 bp, Homo sapien
tttagcttgaagtagtttgatcttc

SEQ ID NO: 2300313 - DNA, 25 bp, Homo sapien
cttcctcctttagcttgaagtagtt

SEQ ID NO: 2300314 - DNA, 25 bp, Homo sapien
cagcaaagtcattctccatccagct

SEQ ID NO: 2300315 - DNA, 25 bp, Homo sapien
caagttccccagagatttttctgct

SEQ ID NO: 2300316 - DNA, 25 bp, Homo sapien
cccagagatttttctgctaatcagc

SEQ ID NO: 2300317 - DNA, 25 bp, Homo sapien
cagagatttttctgctaatcagcat

SEQ ID NO: 2300318 - DNA, 25 bp, Homo sapien
tccccagagatttttctgctaatca

SEQ ID NO: 2300319 - DNA, 25 bp, Homo sapien
gacaacaagtaacttcaggtagcat

SEQ ID NO: 2300320 - DNA, 25 bp, Homo sapien
cagacaacaagtaacttcaggtagc

SEQ ID NO: 2300321 - DNA, 25 bp, Homo sapien
gacagacaacaagtaacttcaggta

SEQ ID NO: 2300322 - DNA, 25 bp, Homo sapien
tgacagacaacaagtaacttcaggt

SEQ ID NO: 2300323 - DNA, 25 bp, Homo sapien
agttatgaatgcagtggttgggttt

SEQ ID NO: 2300324 - DNA, 25 bp, Homo sapien
gtggttgggtttatgtttcagtgac

SEQ ID NO: 2300325 - DNA, 25 bp, Homo sapien
actgtgttgtggaatacttagttac

SEQ ID NO: 2300326 - DNA, 25 bp, Homo sapien
cagtgactgtgttgtggaatactta

SEQ ID NO: 2300327 - DNA, 25 bp, Homo sapien
accacagagccttttctggacatag

SEQ ID NO: 2300328 - DNA, 25 bp, Homo sapien
cacagagccttttctggacatagcg

SEQ ID NO: 2300329 - DNA, 25 bp, Homo sapien
gaaccacagagccttttctggacat

SEQ ID NO: 2300330 - DNA, 25 bp, Homo sapien
cagagccttttctggacatagcgtc

SEQ ID NO: 2300331 - DNA, 25 bp, Homo sapien
gttggccaggtaggcaatgacatca

SEQ ID NO: 2300332 - DNA, 25 bp, Homo sapien
ccttgttccttcagctacaggagga

SEQ ID NO: 2300333 - DNA, 25 bp, Homo sapien
ccttcagctacaggaggatgcagga

SEQ ID NO: 2300334 - DNA, 25 bp, Homo sapien
ggtaggcaatgacatcatagccttg

SEQ ID NO: 2300335 - DNA, 25 bp, Homo sapien
gcttcttcctggtttccttgaaatc

SEQ ID NO: 2300336 - DNA, 25 bp, Homo sapien
ttcaatgcttcttcctggtttcctt

SEQ ID NO: 2300337 - DNA, 25 bp, Homo sapien
tcttcctggtttccttgaaatcttc

SEQ ID NO: 2300338 - DNA, 25 bp, Homo sapien
aatgcttcttcctggtttccttgaa

SEQ ID NO: 2300339 - DNA, 25 bp, Homo sapien
cctcccggtgggcaatttccacttg

SEQ ID NO: 2300340 - DNA, 25 bp, Homo sapien
tagcggtcctcatgcagtgcgctga

SEQ ID NO: 2300341 - DNA, 25 bp, Homo sapien
atgcagtgcgctgaactggatggct

SEQ ID NO: 2300342 - DNA, 25 bp, Homo sapien
ctcccggtgggcaatttccacttgt

SEQ ID NO: 2300343 - DNA, 25 bp, Homo sapien
gtattccatcaggtcgttgtggccc

SEQ ID NO: 2300344 - DNA, 25 bp, Homo sapien
tcgctcccctttcccgtgacgccat

SEQ ID NO: 2300345 - DNA, 25 bp, Homo sapien
tcccgtgacgccatgggacacatac

SEQ ID NO: 2300346 - DNA, 25 bp, Homo sapien
cctgatcgctcccctttcccgtgac

SEQ ID NO: 2300347 - DNA, 25 bp, Homo sapien
gaggttcttgttcatgctccacagg

SEQ ID NO: 2300348 - DNA, 25 bp, Homo sapien
atgaggttcttgttcatgctccaca

SEQ ID NO: 2300349 - DNA, 25 bp, Homo sapien
ggttcttgttcatgctccacaggtt

SEQ ID NO: 2300350 - DNA, 25 bp, Homo sapien
tcttgttcatgctccacaggttctt

SEQ ID NO: 2300351 - DNA, 25 bp, Homo sapien
cgggtcctgggtcttcgcgtagaga

SEQ ID NO: 2300352 - DNA, 25 bp, Homo sapien
ctcaatctcgagaatgtcaggggtg

SEQ ID NO: 2300353 - DNA, 25 bp, Homo sapien
caatctcgagaatgtcaggggtgtt

SEQ ID NO: 2300354 - DNA, 25 bp, Homo sapien
gccgggtcctgggtcttcgcgtaga

SEQ ID NO: 2300355 - DNA, 25 bp, Homo sapien
ggcccacgccgtgtttgcccgcgac

SEQ ID NO: 2300356 - DNA, 25 bp, Homo sapien
cggcccacgccgtgtttgcccgcga

SEQ ID NO: 2300357 - DNA, 25 bp, Homo sapien
acggcccacgccgtgtttgcccgcg

SEQ ID NO: 2300358 - DNA, 25 bp, Homo sapien
cttcattccaataaagcggttctcc

SEQ ID NO: 2300359 - DNA, 25 bp, Homo sapien
cgagacttcattccaataaagcggt

SEQ ID NO: 2300360 - DNA, 25 bp, Homo sapien
tcattccaataaagcggttctccac

SEQ ID NO: 2300361 - DNA, 25 bp, Homo sapien
ctcgagacttcattccaataaagcg

SEQ ID NO: 2300362 - DNA, 25 bp, Homo sapien
gtgcctgccggggcctcctagatac

SEQ ID NO: 2300363 - DNA, 25 bp, Homo sapien
tggcgaagcagtggcaggcaaattc

SEQ ID NO: 2300364 - DNA, 25 bp, Homo sapien
ggacttggcgaagcagtggcaggca

SEQ ID NO: 2300365 - DNA, 25 bp, Homo sapien
aggcaaattcacactcagtgctgtg

SEQ ID NO: 2300366 - DNA, 25 bp, Homo sapien
gaagcagtggcaggcaaattcacac

SEQ ID NO: 2300367 - DNA, 25 bp, Homo sapien
catgttcacgctcaccagcttttca

SEQ ID NO: 2300368 - DNA, 25 bp, Homo sapien
atgttcacgctcaccagcttttcat

SEQ ID NO: 2300369 - DNA, 25 bp, Homo sapien
gcacctgtacttgggggctctgcat

SEQ ID NO: 2300370 - DNA, 25 bp, Homo sapien
gagaacaagtcacaattacaaattg

SEQ ID NO: 2300371 - DNA, 25 bp, Homo sapien
ttgtcacaacaattagcacctgtac

SEQ ID NO: 2300372 - DNA, 25 bp, Homo sapien
ggctctgcatattgaggaggcccca

SEQ ID NO: 2300373 - DNA, 25 bp, Homo sapien
cccttcccttcaacgatgacgtttg

SEQ ID NO: 2300374 - DNA, 25 bp, Homo sapien
ttcccttcaacgatgacgtttgcag

SEQ ID NO: 2300375 - DNA, 25 bp, Homo sapien
cacacccttcccttcaacgatgacg

SEQ ID NO: 2300376 - DNA, 25 bp, Homo sapien
cccactgcagctgacccacaccctt

SEQ ID NO: 2300377 - DNA, 25 bp, Homo sapien
tttcaatcttcaggtcacaaacaag

SEQ ID NO: 2300378 - DNA, 25 bp, Homo sapien
gaaatgcacacaggatcggccagct

SEQ ID NO: 2300379 - DNA, 25 bp, Homo sapien
tattgatggttgatcagaaatgcac

SEQ ID NO: 2300380 - DNA, 25 bp, Homo sapien
aatgtggaggcttagtcccagggtc

SEQ ID NO: 2300381 - DNA, 25 bp, Homo sapien
cagctaccttgacagcaaggaggta

SEQ ID NO: 2300382 - DNA, 25 bp, Homo sapien
tgtttgctgacagttcccccatagg

SEQ ID NO: 2300383 - DNA, 25 bp, Homo sapien
aggtagactaaggacacatcctgtg

SEQ ID NO: 2300384 - DNA, 25 bp, Homo sapien
tccagctaccttgacagcaaggagg

SEQ ID NO: 2300385 - DNA, 25 bp, Homo sapien
ttggctctgtattcctctccattac

SEQ ID NO: 2300386 - DNA, 25 bp, Homo sapien
ccagtactcctaacaatgccccagc

SEQ ID NO: 2300387 - DNA, 25 bp, Homo sapien
cctctccattacatggtgttatcat

SEQ ID NO: 2300388 - DNA, 25 bp, Homo sapien
actcctaacaatgccccagctcttg

SEQ ID NO: 2300389 - DNA, 25 bp, Homo sapien
gacctgtgctgtaccctataggagc

SEQ ID NO: 2300390 - DNA, 25 bp, Homo sapien
taccctataggagctccccttatct

SEQ ID NO: 2300391 - DNA, 25 bp, Homo sapien
tttgacctgtgctgtaccctatagg

SEQ ID NO: 2300392 - DNA, 25 bp, Homo sapien
tgctgtaccctataggagctcccct

SEQ ID NO: 2300393 - DNA, 25 bp, Homo sapien
caaagtgtcgctggagggtggctgg

SEQ ID NO: 2300394 - DNA, 25 bp, Homo sapien
aaagtgtcgctggagggtggctggc

SEQ ID NO: 2300395 - DNA, 25 bp, Homo sapien
tagagtacagggaggccaaagggga

SEQ ID NO: 2300396 - DNA, 25 bp, Homo sapien
tctccaggtgaaaagccccggaagc

SEQ ID NO: 2300397 - DNA, 25 bp, Homo sapien
gagtggggggtgtttctccaggtga

SEQ ID NO: 2300398 - DNA, 25 bp, Homo sapien
agtacagggaggccaaaggggagtg

SEQ ID NO: 2300399 - DNA, 25 bp, Homo sapien
gtctttgcttccatggcaagaacta

SEQ ID NO: 2300400 - DNA, 25 bp, Homo sapien
gcttccatggcaagaactagaccca

SEQ ID NO: 2300401 - DNA, 25 bp, Homo sapien
tcagagcatccagggtaaggaaaga

SEQ ID NO: 2300402 - DNA, 25 bp, Homo sapien
aagaactagacccatgcgtggagtc

SEQ ID NO: 2300403 - DNA, 25 bp, Homo sapien
atatagttgagtctgtatttaccat

SEQ ID NO: 2300404 - DNA, 25 bp, Homo sapien
cttgtaatatagttgagtctgtatt

SEQ ID NO: 2300405 - DNA, 25 bp, Homo sapien
atagcacttagcttcctgcatgcag

SEQ ID NO: 2300406 - DNA, 25 bp, Homo sapien
ttcttctcttctatagcacttagct

SEQ ID NO: 2300407 - DNA, 25 bp, Homo sapien
gatctagccaattttcaatgtcaca

SEQ ID NO: 2300408 - DNA, 25 bp, Homo sapien
gtgatgcacctgaggccatgggaat

SEQ ID NO: 2300409 - DNA, 25 bp, Homo sapien
tatctctaaggtgtaagtcatccca

SEQ ID NO: 2300410 - DNA, 25 bp, Homo sapien
tgtcacatgaccacaagagtatctc

SEQ ID NO: 2300411 - DNA, 25 bp, Homo sapien
gagacaagaagtcaaagtcctcacg

SEQ ID NO: 2300412 - DNA, 25 bp, Homo sapien
agacaagaagtcaaagtcctcacgc

SEQ ID NO: 2300413 - DNA, 25 bp, Homo sapien
acaagaagtcaaagtcctcacgcat

SEQ ID NO: 2300414 - DNA, 25 bp, Homo sapien
gacaagaagtcaaagtcctcacgca

SEQ ID NO: 2300415 - DNA, 25 bp, Homo sapien
tcttcctcgttctgttgtctcccca

SEQ ID NO: 2300416 - DNA, 25 bp, Homo sapien
atgttgctgtaggacccttctctgc

SEQ ID NO: 2300417 - DNA, 25 bp, Homo sapien
catgttgctgccatgttgctgtagg

SEQ ID NO: 2300418 - DNA, 25 bp, Homo sapien
tgctgccatgttgctgtaggaccct

SEQ ID NO: 2300419 - DNA, 25 bp, Homo sapien
tggacataaaagttaggatgacctt

SEQ ID NO: 2300420 - DNA, 25 bp, Homo sapien
taggatgaccttttttcaggggcat

SEQ ID NO: 2300421 - DNA, 25 bp, Homo sapien
aactggacataaaagttaggatgac

SEQ ID NO: 2300422 - DNA, 25 bp, Homo sapien
ttaggatgaccttttttcaggggca

SEQ ID NO: 2300423 - DNA, 25 bp, Homo sapien
aagctagagctgaaggggaccactc

SEQ ID NO: 2300424 - DNA, 25 bp, Homo sapien
ctgggctgcataccagaataagagg

SEQ ID NO: 2300425 - DNA, 25 bp, Homo sapien
tgaaggggaccactcagacctggca

SEQ ID NO: 2300426 - DNA, 25 bp, Homo sapien
gggctgcataccagaataagaggga

SEQ ID NO: 2300427 - DNA, 25 bp, Homo sapien
tcttccttctgatgtagcttcaact

SEQ ID NO: 2300428 - DNA, 25 bp, Homo sapien
aaatcttcaaaatggagctattgcc

SEQ ID NO: 2300429 - DNA, 25 bp, Homo sapien
caaaatggagctattgccaaccaca

SEQ ID NO: 2300430 - DNA, 25 bp, Homo sapien
gctattgccaaccacaacctttctt

SEQ ID NO: 2300431 - DNA, 25 bp, Homo sapien
tgttcattgtattgtctcttctccc

SEQ ID NO: 2300432 - DNA, 25 bp, Homo sapien
ctaaatgttcattgtattgtctctt

SEQ ID NO: 2300433 - DNA, 25 bp, Homo sapien
aatgttcattgtattgtctcttctc

SEQ ID NO: 2300434 - DNA, 25 bp, Homo sapien
ttcattgtattgtctcttctcccca

SEQ ID NO: 2300435 - DNA, 25 bp, Homo sapien
ttagaaatggagtcagtggtatttg

SEQ ID NO: 2300436 - DNA, 25 bp, Homo sapien
tttagaaatggagtcagtggtattt

SEQ ID NO: 2300437 - DNA, 25 bp, Homo sapien
tagaaatggagtcagtggtatttgt

SEQ ID NO: 2300438 - DNA, 25 bp, Homo sapien
atgtaagtaagggtcatcttctggg

SEQ ID NO: 2300439 - DNA, 25 bp, Homo sapien
ctttctagtgaaccccaatcaaaat

SEQ ID NO: 2300440 - DNA, 25 bp, Homo sapien
tagtccaaagcacctttgccttttc

SEQ ID NO: 2300441 - DNA, 25 bp, Homo sapien
agtgaaccccaatcaaaatgtaagt

SEQ ID NO: 2300442 - DNA, 25 bp, Homo sapien
tcaaaatgggcaagatgtgctgtgg

SEQ ID NO: 2300443 - DNA, 25 bp, Homo sapien
gggccacagaagattatcaaaatgg

SEQ ID NO: 2300444 - DNA, 25 bp, Homo sapien
gctccctggctatctttcataagaa

SEQ ID NO: 2300445 - DNA, 25 bp, Homo sapien
taacaggacagctactagactcagg

SEQ ID NO: 2300446 - DNA, 25 bp, Homo sapien
tagacagcgttgtttctgtggcagt

SEQ ID NO: 2300447 - DNA, 25 bp, Homo sapien
cattggcagaacctgagataaaatc

SEQ ID NO: 2300448 - DNA, 25 bp, Homo sapien
ttctgcttgatttctattaggttga

SEQ ID NO: 2300449 - DNA, 25 bp, Homo sapien
tctattaggttgatgtctgcatggt

SEQ ID NO: 2300450 - DNA, 25 bp, Homo sapien
cccagatggtgatagagttttttcc

SEQ ID NO: 2300451 - DNA, 25 bp, Homo sapien
cttcccagatggtgatagagttttt

SEQ ID NO: 2300452 - DNA, 25 bp, Homo sapien
ttttccattgtccacttaggaccca

SEQ ID NO: 2300453 - DNA, 25 bp, Homo sapien
tttccattgtccacttaggacccat

SEQ ID NO: 2300454 - DNA, 25 bp, Homo sapien
agtagtttcaactgcgggaagacag

SEQ ID NO: 2300455 - DNA, 25 bp, Homo sapien
taaccacagactcagtagtttcaac

SEQ ID NO: 2300456 - DNA, 25 bp, Homo sapien
gagaaaatagtctggtgccagttct

SEQ ID NO: 2300457 - DNA, 25 bp, Homo sapien
ctggagtaaccacagactcagtagt

SEQ ID NO: 2300458 - DNA, 25 bp, Homo sapien
acagcagtgacccatgtgcatgaaa

SEQ ID NO: 2300459 - DNA, 25 bp, Homo sapien
aaattgttatcccaaactagatagt

SEQ ID NO: 2300460 - DNA, 25 bp, Homo sapien
ctagatagtattccccaaatgtaac

SEQ ID NO: 2300461 - DNA, 25 bp, Homo sapien
cagtgacccatgtgcatgaaattta

SEQ ID NO: 2300462 - DNA, 25 bp, Homo sapien
cagagctatatagcatctgctgaat

SEQ ID NO: 2300463 - DNA, 25 bp, Homo sapien
cattgccatagctgatgtcgccaga

SEQ ID NO: 2300464 - DNA, 25 bp, Homo sapien
tgatgtcgccagagctatatagcat

SEQ ID NO: 2300465 - DNA, 25 bp, Homo sapien
ggaccaggaagccattgccatagct

SEQ ID NO: 2300466 - DNA, 25 bp, Homo sapien
tgtttgtatagcaccattccacaaa

SEQ ID NO: 2300467 - DNA, 25 bp, Homo sapien
caccaagtgtgtgtattggatggaa

SEQ ID NO: 2300468 - DNA, 25 bp, Homo sapien
ctgaatcagtaagaaagctactagc

SEQ ID NO: 2300469 - DNA, 25 bp, Homo sapien
gggaggacactggagtccaacatct

SEQ ID NO: 2300470 - DNA, 25 bp, Homo sapien
tcctgatccccaaaatggcatctgg

SEQ ID NO: 2300471 - DNA, 25 bp, Homo sapien
catctggatgcatgtaagagcttaa

SEQ ID NO: 2300472 - DNA, 25 bp, Homo sapien
gactgatgtctactgccatggaact

SEQ ID NO: 2300473 - DNA, 25 bp, Homo sapien
tcctgacactaaagtcggtggccct

SEQ ID NO: 2300474 - DNA, 25 bp, Homo sapien
cattatccaacaagttgaattgtcc

SEQ ID NO: 2300475 - DNA, 25 bp, Homo sapien
cagggagcatgctttcttgatctct

SEQ ID NO: 2300476 - DNA, 25 bp, Homo sapien
ttctttgcgatacggcagggagcat

SEQ ID NO: 2300477 - DNA, 25 bp, Homo sapien
ggaaaggatgcttggttctttgcga

SEQ ID NO: 2300478 - DNA, 25 bp, Homo sapien
tcatttaaggacttctatacactgg

SEQ ID NO: 2300479 - DNA, 25 bp, Homo sapien
aaggacttctatacactggttattc

SEQ ID NO: 2300480 - DNA, 25 bp, Homo sapien
ccacttgatcaaatcagctactgaa

SEQ ID NO: 2300481 - DNA, 25 bp, Homo sapien
atttaaggacttctatacactggtt

SEQ ID NO: 2300482 - DNA, 25 bp, Homo sapien
tatgatatgggatcaaactctgccc

SEQ ID NO: 2300483 - DNA, 25 bp, Homo sapien
tgaatgcttccctactggagtgcta

SEQ ID NO: 2300484 - DNA, 25 bp, Homo sapien
ctaggtttaccatagtcctgtgcaa

SEQ ID NO: 2300485 - DNA, 25 bp, Homo sapien
taaaccaatcgtcctatggatcagg

SEQ ID NO: 2300486 - DNA, 25 bp, Homo sapien
agtagcagatggcactttaccctgc

SEQ ID NO: 2300487 - DNA, 25 bp, Homo sapien
cagatggcactttaccctgcatgct

SEQ ID NO: 2300488 - DNA, 25 bp, Homo sapien
gatggcactttaccctgcatgcttt

SEQ ID NO: 2300489 - DNA, 25 bp, Homo sapien
ggcactttaccctgcatgctttcca

SEQ ID NO: 2300490 - DNA, 25 bp, Homo sapien
ctggttcaatcacaccttcattatc

SEQ ID NO: 2300491 - DNA, 25 bp, Homo sapien
ggttcaatcacaccttcattatcag

SEQ ID NO: 2300492 - DNA, 25 bp, Homo sapien
gttcaatcacaccttcattatcagt

SEQ ID NO: 2300493 - DNA, 25 bp, Homo sapien
tcaatcacaccttcattatcagttc

SEQ ID NO: 2300494 - DNA, 25 bp, Homo sapien
gaatgggtcgatggctttctgcagt

SEQ ID NO: 2300495 - DNA, 25 bp, Homo sapien
gtgaatgggtcgatggctttctgca

SEQ ID NO: 2300496 - DNA, 25 bp, Homo sapien
tcgtcatcagttagggcttcagtgg

SEQ ID NO: 2300497 - DNA, 25 bp, Homo sapien
ttcgtcatcagttagggcttcagtg

SEQ ID NO: 2300498 - DNA, 25 bp, Homo sapien
caaatggcaggatttggcttctgta

SEQ ID NO: 2300499 - DNA, 25 bp, Homo sapien
tcaaatggcaggatttggcttctgt

SEQ ID NO: 2300500 - DNA, 25 bp, Homo sapien
ggcttctgtaatttgacaaagacac

SEQ ID NO: 2300501 - DNA, 25 bp, Homo sapien
tttggcttctgtaatttgacaaaga

SEQ ID NO: 2300502 - DNA, 25 bp, Homo sapien
taaaggcaaggccaagcaagatcat

SEQ ID NO: 2300503 - DNA, 25 bp, Homo sapien
atccaatttaaaggcaaggccaagc

SEQ ID NO: 2300504 - DNA, 25 bp, Homo sapien
ttaaaggcaaggccaagcaagatca

SEQ ID NO: 2300505 - DNA, 25 bp, Homo sapien
cattataatccaatttaaaggcaag

SEQ ID NO: 2300506 - DNA, 25 bp, Homo sapien
gctggaaggccactataacttttgg

SEQ ID NO: 2300507 - DNA, 25 bp, Homo sapien
ctgggttctggactacatgctggaa

SEQ ID NO: 2300508 - DNA, 25 bp, Homo sapien
ggttctggactacatgctggaaggc

SEQ ID NO: 2300509 - DNA, 25 bp, Homo sapien
catgtttgctgggttctggactaca

SEQ ID NO: 2300510 - DNA, 25 bp, Homo sapien
tttggctgataatttactgataaga

SEQ ID NO: 2300511 - DNA, 25 bp, Homo sapien
ttatgcttgacatccaaatttggct

SEQ ID NO: 2300512 - DNA, 25 bp, Homo sapien
gctgataatttactgataagattca

SEQ ID NO: 2300513 - DNA, 25 bp, Homo sapien
tgcttgacatccaaatttggctgat

SEQ ID NO: 2300514 - DNA, 25 bp, Homo sapien
cacacctttccttacacatgcatgg

SEQ ID NO: 2300515 - DNA, 25 bp, Homo sapien
tatggttaactctggaaatcaaatc

SEQ ID NO: 2300516 - DNA, 25 bp, Homo sapien
cctttcccagggcttgcagttttat

SEQ ID NO: 2300517 - DNA, 25 bp, Homo sapien
tgtgccaaatatcagcctgtggtgt

SEQ ID NO: 2300518 - DNA, 25 bp, Homo sapien
ctctcttctgacaaactggcatgct

SEQ ID NO: 2300519 - DNA, 25 bp, Homo sapien
cccttttgtataatgaagatgatca

SEQ ID NO: 2300520 - DNA, 25 bp, Homo sapien
ttctgacaaactggcatgcttctcc

SEQ ID NO: 2300521 - DNA, 25 bp, Homo sapien
tcccttttgtataatgaagatgatc

SEQ ID NO: 2300522 - DNA, 25 bp, Homo sapien
actatatggaacggtcaagaatttg

SEQ ID NO: 2300523 - DNA, 25 bp, Homo sapien
aactatatggaacggtcaagaattt

SEQ ID NO: 2300524 - DNA, 25 bp, Homo sapien
acattgatgctgccaattctctgtg

SEQ ID NO: 2300525 - DNA, 25 bp, Homo sapien
taagtcatttacaaaggcctgtttg

SEQ ID NO: 2300526 - DNA, 25 bp, Homo sapien
taattgtggcctttagcgtctgtgg

SEQ ID NO: 2300527 - DNA, 25 bp, Homo sapien
tgtatttgctttcgacccatgactg

SEQ ID NO: 2300528 - DNA, 25 bp, Homo sapien
tcagtttgcgtcgaatttttctgct

SEQ ID NO: 2300529 - DNA, 25 bp, Homo sapien
tctgctgttctagcatagaacagct

SEQ ID NO: 2300530 - DNA, 25 bp, Homo sapien
gttctagcatagaacagctcttcca

SEQ ID NO: 2300531 - DNA, 25 bp, Homo sapien
tttgcgtcgaatttttctgctgttc

SEQ ID NO: 2300532 - DNA, 25 bp, Homo sapien
ggaaatagcataagctctggctttg

SEQ ID NO: 2300533 - DNA, 25 bp, Homo sapien
gcctgtggcaaggaccagattgtca

SEQ ID NO: 2300534 - DNA, 25 bp, Homo sapien
ggaccagattgtcagcacggtacat

SEQ ID NO: 2300535 - DNA, 25 bp, Homo sapien
tggcaaggaccagattgtcagcacg

SEQ ID NO: 2300536 - DNA, 25 bp, Homo sapien
tgataactagccttcggactagggt

SEQ ID NO: 2300537 - DNA, 25 bp, Homo sapien
caagaacactgataactagccttcg

SEQ ID NO: 2300538 - DNA, 25 bp, Homo sapien
tactgaagcctcaggatgttccttt

SEQ ID NO: 2300539 - DNA, 25 bp, Homo sapien
tcggactagggttactgaagcctca

SEQ ID NO: 2300540 - DNA, 25 bp, Homo sapien
ttggtagctcccttctaagcccaca

SEQ ID NO: 2300541 - DNA, 25 bp, Homo sapien
acatcgcctatgtgtcttccaagtt

SEQ ID NO: 2300542 - DNA, 25 bp, Homo sapien
gcccacattaggataattccaaaga

SEQ ID NO: 2300543 - DNA, 25 bp, Homo sapien
aagccacatcgcctatgtgtcttcc

SEQ ID NO: 2300544 - DNA, 25 bp, Homo sapien
tgtgacccatgctatcatggcttac

SEQ ID NO: 2300545 - DNA, 25 bp, Homo sapien
gacatcttggaggtgtgacccatgc

SEQ ID NO: 2300546 - DNA, 25 bp, Homo sapien
tcttggaggtgtgacccatgctatc

SEQ ID NO: 2300547 - DNA, 25 bp, Homo sapien
ggaggtgtgacccatgctatcatgg

SEQ ID NO: 2300548 - DNA, 25 bp, Homo sapien
aattctgagtcaatacttgctttat

SEQ ID NO: 2300549 - DNA, 25 bp, Homo sapien
tggctcgggatattgaaggagttcc

SEQ ID NO: 2300550 - DNA, 25 bp, Homo sapien
aagagagggtcatgttgacactggt

SEQ ID NO: 2300551 - DNA, 25 bp, Homo sapien
acattggcgggtaaaggcatttgcc

SEQ ID NO: 2300552 - DNA, 25 bp, Homo sapien
tcctctgtgagattcagctttgctg

SEQ ID NO: 2300553 - DNA, 25 bp, Homo sapien
gtcctctgtgagattcagctttgct

SEQ ID NO: 2300554 - DNA, 25 bp, Homo sapien
ccctacagatctcactgctagctga

SEQ ID NO: 2300555 - DNA, 25 bp, Homo sapien
cctacagatctcactgctagctgac

SEQ ID NO: 2300556 - DNA, 25 bp, Homo sapien
gcacctccatgttctttcacttgca

SEQ ID NO: 2300557 - DNA, 25 bp, Homo sapien
cacctccatgttctttcacttgcat

SEQ ID NO: 2300558 - DNA, 25 bp, Homo sapien
cagcacctccatgttctttcacttg

SEQ ID NO: 2300559 - DNA, 25 bp, Homo sapien
agcacctccatgttctttcacttgc

SEQ ID NO: 2300560 - DNA, 25 bp, Homo sapien
taaaactttttgtgacatcagagcc

SEQ ID NO: 2300561 - DNA, 25 bp, Homo sapien
ctgagaggaggtaaaactttttgtg

SEQ ID NO: 2300562 - DNA, 25 bp, Homo sapien
aggtaaaactttttgtgacatcaga

SEQ ID NO: 2300563 - DNA, 25 bp, Homo sapien
tgagaggaggtaaaactttttgtga

SEQ ID NO: 2300564 - DNA, 25 bp, Homo sapien
tcaagttctgcaatttgttttcctc

SEQ ID NO: 2300565 - DNA, 25 bp, Homo sapien
aactaagagcctttggagtctcttc

SEQ ID NO: 2300566 - DNA, 25 bp, Homo sapien
agcctttggagtctcttcaagttct

SEQ ID NO: 2300567 - DNA, 25 bp, Homo sapien
taagagcctttggagtctcttcaag

SEQ ID NO: 2300568 - DNA, 25 bp, Homo sapien
aagatggcatggatctgactcttac

SEQ ID NO: 2300569 - DNA, 25 bp, Homo sapien
aggaggtgggcataaccactgcagt

SEQ ID NO: 2300570 - DNA, 25 bp, Homo sapien
gcactggtatgtgccagtttctgag

SEQ ID NO: 2300571 - DNA, 25 bp, Homo sapien
gtgactgatgtctgaggcactggta

SEQ ID NO: 2300572 - DNA, 25 bp, Homo sapien
tttctgaggtgtagatgcttgtgga

SEQ ID NO: 2300573 - DNA, 25 bp, Homo sapien
gcacaggcccatgaggaacaatcat

SEQ ID NO: 2300574 - DNA, 25 bp, Homo sapien
gtgttgggttctggagcacaggccc

SEQ ID NO: 2300575 - DNA, 25 bp, Homo sapien
cacagtgttgggttctggagcacag

SEQ ID NO: 2300576 - DNA, 25 bp, Homo sapien
gggccacagtgttgggttctggagc

SEQ ID NO: 2300577 - DNA, 25 bp, Homo sapien
tcatcggatttcttggagattattc

SEQ ID NO: 2300578 - DNA, 25 bp, Homo sapien
atcggatttcttggagattattctg

SEQ ID NO: 2300579 - DNA, 25 bp, Homo sapien
catcggatttcttggagattattct

SEQ ID NO: 2300580 - DNA, 25 bp, Homo sapien
tcggatttcttggagattattctgg

SEQ ID NO: 2300581 - DNA, 25 bp, Homo sapien
gactgagaatctggagttagtgtct

SEQ ID NO: 2300582 - DNA, 25 bp, Homo sapien
actgagaatctggagttagtgtctt

SEQ ID NO: 2300583 - DNA, 25 bp, Homo sapien
ggactgagaatctggagttagtgtc

SEQ ID NO: 2300584 - DNA, 25 bp, Homo sapien
aggactgagaatctggagttagtgt

SEQ ID NO: 2300585 - DNA, 25 bp, Homo sapien
taggccctctatctctgctaatatt

SEQ ID NO: 2300586 - DNA, 25 bp, Homo sapien
tccttgctaattccagcagttggat

SEQ ID NO: 2300587 - DNA, 25 bp, Homo sapien
ccttgaacacttttgaattagctga

SEQ ID NO: 2300588 - DNA, 25 bp, Homo sapien
tgtctgctgactgaactcttccttc

SEQ ID NO: 2300589 - DNA, 25 bp, Homo sapien
ctagaatcacgattgccaagaggaa

SEQ ID NO: 2300590 - DNA, 25 bp, Homo sapien
tctgaaagtaccatcatctagaatc

SEQ ID NO: 2300591 - DNA, 25 bp, Homo sapien
ttctcatggcctccatgaattctga

SEQ ID NO: 2300592 - DNA, 25 bp, Homo sapien
aaaaattctcatggcctccatgaat

SEQ ID NO: 2300593 - DNA, 25 bp, Homo sapien
ggtctaaaattggttgtactgctgc

SEQ ID NO: 2300594 - DNA, 25 bp, Homo sapien
atttttggtaatccagtcagggtct

SEQ ID NO: 2300595 - DNA, 25 bp, Homo sapien
tccagtcagggtctaaaattggttg

SEQ ID NO: 2300596 - DNA, 25 bp, Homo sapien
ctaaaattggttgtactgctgctgc

SEQ ID NO: 2300597 - DNA, 25 bp, Homo sapien
tagtatttgcaacctgaagagccat

SEQ ID NO: 2300598 - DNA, 25 bp, Homo sapien
cactgaaagccaattagtatttgca

SEQ ID NO: 2300599 - DNA, 25 bp, Homo sapien
ccaattagtatttgcaacctgaaga

SEQ ID NO: 2300600 - DNA, 25 bp, Homo sapien
tgttacccactgaaagccaattagt

SEQ ID NO: 2300601 - DNA, 25 bp, Homo sapien
caatcctcatagttgccaacagcaa

SEQ ID NO: 2300602 - DNA, 25 bp, Homo sapien
aatcctcatagttgccaacagcaac

SEQ ID NO: 2300603 - DNA, 25 bp, Homo sapien
tgctgctttcgccagtgaagcttga

SEQ ID NO: 2300604 - DNA, 25 bp, Homo sapien
agccttggatgatgaacaaagctat

SEQ ID NO: 2300605 - DNA, 25 bp, Homo sapien
tgaagcttgattggcttgagccttg

SEQ ID NO: 2300606 - DNA, 25 bp, Homo sapien
agagcttattaacccaggctccttg

SEQ ID NO: 2300607 - DNA, 25 bp, Homo sapien
aaaggatgctgggagagcgcggatc

SEQ ID NO: 2300608 - DNA, 25 bp, Homo sapien
tcggatttcgccagcgcgggaggtg

SEQ ID NO: 2300609 - DNA, 25 bp, Homo sapien
gatccggaaagatcgggtcgctgtt

SEQ ID NO: 2300610 - DNA, 25 bp, Homo sapien
gataacggaccggatgattaccctc

SEQ ID NO: 2300611 - DNA, 25 bp, Homo sapien
ggtacagctcaaggcggccgagaaa

SEQ ID NO: 2300612 - DNA, 25 bp, Homo sapien
tcacagtagcgctgcgcctgaggca

SEQ ID NO: 2300613 - DNA, 25 bp, Homo sapien
actaaaaaggtacagctcaaggcgg

SEQ ID NO: 2300614 - DNA, 25 bp, Homo sapien
gagaaatggccctcacagtagcgct

SEQ ID NO: 2300615 - DNA, 25 bp, Homo sapien
tagtaaatagaagttgccaacactg

SEQ ID NO: 2300616 - DNA, 25 bp, Homo sapien
ctgagcatcccaatggagcagacaa

SEQ ID NO: 2300617 - DNA, 25 bp, Homo sapien
taacaaatctgagcatcccaatgga

SEQ ID NO: 2300618 - DNA, 25 bp, Homo sapien
aatatagtaaatagaagttgccaac

SEQ ID NO: 2300619 - DNA, 25 bp, Homo sapien
tactgctagtgttaatgttgacaag

SEQ ID NO: 2300620 - DNA, 25 bp, Homo sapien
tgttaatgttgacaagactctctgg

SEQ ID NO: 2300621 - DNA, 25 bp, Homo sapien
tgttgacaagactctctggatactt

SEQ ID NO: 2300622 - DNA, 25 bp, Homo sapien
gctagtgttaatgttgacaagactc

SEQ ID NO: 2300623 - DNA, 25 bp, Homo sapien
cagcccagatgatatttgtttgccg

SEQ ID NO: 2300624 - DNA, 25 bp, Homo sapien
ttgtttgccgaaacatgaagccaca

SEQ ID NO: 2300625 - DNA, 25 bp, Homo sapien
cccagaaggatgtagggccaagtca

SEQ ID NO: 2300626 - DNA, 25 bp, Homo sapien
tactccgatcgccaataacaattcc

SEQ ID NO: 2300627 - DNA, 25 bp, Homo sapien
tgagtcagctatactccaaccagca

SEQ ID NO: 2300628 - DNA, 25 bp, Homo sapien
gaaaaactcttttccacacatagaa

SEQ ID NO: 2300629 - DNA, 25 bp, Homo sapien
caaatatataggctggaactaacaa

SEQ ID NO: 2300630 - DNA, 25 bp, Homo sapien
agtcttaattttgctaggagacagg

SEQ ID NO: 2300631 - DNA, 25 bp, Homo sapien
gaatgtcctgactatttggccactg

SEQ ID NO: 2300632 - DNA, 25 bp, Homo sapien
aacctttgaatgtcctgactatttg

SEQ ID NO: 2300633 - DNA, 25 bp, Homo sapien
taaaatgaagtaacgaaattccagc

SEQ ID NO: 2300634 - DNA, 25 bp, Homo sapien
tgttaagcctataaatgacataagg

SEQ ID NO: 2300635 - DNA, 25 bp, Homo sapien
ttccatgttttccacctattcagtt

SEQ ID NO: 2300636 - DNA, 25 bp, Homo sapien
tctttgtagaaatggtctaattatt

SEQ ID NO: 2300637 - DNA, 25 bp, Homo sapien
catgttttccacctattcagttgtt

SEQ ID NO: 2300638 - DNA, 25 bp, Homo sapien
ctttgtagaaatggtctaattatta

SEQ ID NO: 2300639 - DNA, 25 bp, Homo sapien
tgcacacagccacaagatattagga

SEQ ID NO: 2300640 - DNA, 25 bp, Homo sapien
tccagtaatatgaagcatacccagt

SEQ ID NO: 2300641 - DNA, 25 bp, Homo sapien
gacaagatttgtccagaagccaaag

SEQ ID NO: 2300642 - DNA, 25 bp, Homo sapien
ccaacaatttgatgtctagacaggc

SEQ ID NO: 2300643 - DNA, 25 bp, Homo sapien
ggatctaaacacctaagaatggtct

SEQ ID NO: 2300644 - DNA, 25 bp, Homo sapien
aaatggccatctttgaactgcctag

SEQ ID NO: 2300645 - DNA, 25 bp, Homo sapien
cagttgtttcaagtgaatgactttg

SEQ ID NO: 2300646 - DNA, 25 bp, Homo sapien
gaaaattcaccagcaaatggccatc

SEQ ID NO: 2300647 - DNA, 25 bp, Homo sapien
aaagtatttgtaattagttgaaatg

SEQ ID NO: 2300648 - DNA, 25 bp, Homo sapien
acagctattcctagagtggtaaaat

SEQ ID NO: 2300649 - DNA, 25 bp, Homo sapien
taacagctattcctagagtggtaaa

SEQ ID NO: 2300650 - DNA, 25 bp, Homo sapien
attcctagagtggtaaaatgtagcc

SEQ ID NO: 2300651 - DNA, 25 bp, Homo sapien
taaacatcccacatacttttagcca

SEQ ID NO: 2300652 - DNA, 25 bp, Homo sapien
ataacatgccatgaatggtctggaa

SEQ ID NO: 2300653 - DNA, 25 bp, Homo sapien
aaaataacatgccatgaatggtctg

SEQ ID NO: 2300654 - DNA, 25 bp, Homo sapien
tcccacatacttttagccatttgtc

SEQ ID NO: 2300655 - DNA, 25 bp, Homo sapien
tcaggctgcctggttatgaatccca

SEQ ID NO: 2300656 - DNA, 25 bp, Homo sapien
gtcaggctgcctggttatgaatccc

SEQ ID NO: 2300657 - DNA, 25 bp, Homo sapien
aggctgcctggttatgaatcccagc

SEQ ID NO: 2300658 - DNA, 25 bp, Homo sapien
agtcaggctgcctggttatgaatcc

SEQ ID NO: 2300659 - DNA, 25 bp, Homo sapien
gaaacgtttctcctaagactgcatc

SEQ ID NO: 2300660 - DNA, 25 bp, Homo sapien
gaaagactgatagggtacctgctac

SEQ ID NO: 2300661 - DNA, 25 bp, Homo sapien
tacaacaggatctacaggagagtgg

SEQ ID NO: 2300662 - DNA, 25 bp, Homo sapien
tgtttccgatggagagcaaccttct

SEQ ID NO: 2300663 - DNA, 25 bp, Homo sapien
gcaatacccctaaagttctcatgct

SEQ ID NO: 2300664 - DNA, 25 bp, Homo sapien
tagcaatacccctaaagttctcatg

SEQ ID NO: 2300665 - DNA, 25 bp, Homo sapien
aatacccctaaagttctcatgctca

SEQ ID NO: 2300666 - DNA, 25 bp, Homo sapien
tcctagcaatacccctaaagttctc

SEQ ID NO: 2300667 - DNA, 25 bp, Homo sapien
cacagcatgctaatggcagaaccag

SEQ ID NO: 2300668 - DNA, 25 bp, Homo sapien
ggtattctgactctagctcaagtgt

SEQ ID NO: 2300669 - DNA, 25 bp, Homo sapien
taagttcaccttcctaggttcacac

SEQ ID NO: 2300670 - DNA, 25 bp, Homo sapien
tgaataactattttagacaaggaca

SEQ ID NO: 2300671 - DNA, 25 bp, Homo sapien
gtctccttgggcatctagttattca

SEQ ID NO: 2300672 - DNA, 25 bp, Homo sapien
gaacattaaggtagttgcatctcag

SEQ ID NO: 2300673 - DNA, 25 bp, Homo sapien
taagtactccatacagtgttgctag

SEQ ID NO: 2300674 - DNA, 25 bp, Homo sapien
aaagtctacacattggtgagccgag

SEQ ID NO: 2300675 - DNA, 25 bp, Homo sapien
tgcacatatgggcatacgcatacaa

SEQ ID NO: 2300676 - DNA, 25 bp, Homo sapien
acacgtgcacatatgggcatacgca

SEQ ID NO: 2300677 - DNA, 25 bp, Homo sapien
catatgggcatacgcatacaaatat

SEQ ID NO: 2300678 - DNA, 25 bp, Homo sapien
caaagcaaatcaccaccactataat

SEQ ID NO: 2300679 - DNA, 25 bp, Homo sapien
ctgactgcctgaagaatttatcgat

SEQ ID NO: 2300680 - DNA, 25 bp, Homo sapien
aactgactgcctgaagaatttatcg

SEQ ID NO: 2300681 - DNA, 25 bp, Homo sapien
gactgcctgaagaatttatcgatat

SEQ ID NO: 2300682 - DNA, 25 bp, Homo sapien
ctgcctgaagaatttatcgatataa

SEQ ID NO: 2300683 - DNA, 25 bp, Homo sapien
gctgttgggcctcagtctaactcca

SEQ ID NO: 2300684 - DNA, 25 bp, Homo sapien
gcctttgacattgggagggacagaa

SEQ ID NO: 2300685 - DNA, 25 bp, Homo sapien
tgtagaagtaacaggtcatcgctgg

SEQ ID NO: 2300686 - DNA, 25 bp, Homo sapien
tcatcgctggaacatggactaagtt

SEQ ID NO: 2300687 - DNA, 25 bp, Homo sapien
tcctgactcaatggaagaatctgcc

SEQ ID NO: 2300688 - DNA, 25 bp, Homo sapien
tattctgagggccagttctagccct

SEQ ID NO: 2300689 - DNA, 25 bp, Homo sapien
tgatatgagcatagggatcctgttg

SEQ ID NO: 2300690 - DNA, 25 bp, Homo sapien
taatgactgctaaggtgatatgagc

SEQ ID NO: 2300691 - DNA, 25 bp, Homo sapien
aaaccatggcaagttcacaagtgca

SEQ ID NO: 2300692 - DNA, 25 bp, Homo sapien
cacaagtgcattttccctggcgtag

SEQ ID NO: 2300693 - DNA, 25 bp, Homo sapien
catgaattgccatttcctgggaggg

SEQ ID NO: 2300694 - DNA, 25 bp, Homo sapien
tctgagtcctgaattgcacactatc

SEQ ID NO: 2300695 - DNA, 25 bp, Homo sapien
cttatgaatataggcttctttattc

SEQ ID NO: 2300696 - DNA, 25 bp, Homo sapien
tcttatgaatataggcttctttatt

SEQ ID NO: 2300697 - DNA, 25 bp, Homo sapien
ggccttcttcaactggcctttctag

SEQ ID NO: 2300698 - DNA, 25 bp, Homo sapien
caactggcctttctagccctttaag

SEQ ID NO: 2300699 - DNA, 25 bp, Homo sapien
ttcttcaactggcctttctagccct

SEQ ID NO: 2300700 - DNA, 25 bp, Homo sapien
ctggcctttctagccctttaagaat

SEQ ID NO: 2300701 - DNA, 25 bp, Homo sapien
ctcataatcttgtagccacttcttg

SEQ ID NO: 2300702 - DNA, 25 bp, Homo sapien
aaaagatcaaagaattcccaggcat

SEQ ID NO: 2300703 - DNA, 25 bp, Homo sapien
taataggacaatttccatagcagaa

SEQ ID NO: 2300704 - DNA, 25 bp, Homo sapien
acaggactaggagggcaacattgca

SEQ ID NO: 2300705 - DNA, 25 bp, Homo sapien
tgcaggtgggtcatgtagacatgct

SEQ ID NO: 2300706 - DNA, 25 bp, Homo sapien
ggcagatttcacagctgttactgac

SEQ ID NO: 2300707 - DNA, 25 bp, Homo sapien
gggcagatttcacagctgttactga

SEQ ID NO: 2300708 - DNA, 25 bp, Homo sapien
ctaaagacaacaggggcagatttca

SEQ ID NO: 2300709 - DNA, 25 bp, Homo sapien
acaacaggggcagatttcacagctg

SEQ ID NO: 2300710 - DNA, 25 bp, Homo sapien
tgagttaggattcaggaggactgaa

SEQ ID NO: 2300711 - DNA, 25 bp, Homo sapien
ctgaatgtttgttttagctcggctg

SEQ ID NO: 2300712 - DNA, 25 bp, Homo sapien
gggtcacagcatctgagatcttttc

SEQ ID NO: 2300713 - DNA, 25 bp, Homo sapien
caaagtggtcacttcatctcttgga

SEQ ID NO: 2300714 - DNA, 25 bp, Homo sapien
tcttgacctggatataaggctttcc

SEQ ID NO: 2300715 - DNA, 25 bp, Homo sapien
tgacctggatataaggctttccctt

SEQ ID NO: 2300716 - DNA, 25 bp, Homo sapien
cttgacctggatataaggctttccc

SEQ ID NO: 2300717 - DNA, 25 bp, Homo sapien
ggatcttgacctggatataaggctt

SEQ ID NO: 2300718 - DNA, 25 bp, Homo sapien
ggagctgcaggtacgcaggctgtac

SEQ ID NO: 2300719 - DNA, 25 bp, Homo sapien
tggagctgcaggtacgcaggctgta

SEQ ID NO: 2300720 - DNA, 25 bp, Homo sapien
agctgcaggtacgcaggctgtacca

SEQ ID NO: 2300721 - DNA, 25 bp, Homo sapien
gagctgcaggtacgcaggctgtacc

SEQ ID NO: 2300722 - DNA, 25 bp, Homo sapien
accctaaaaaaggagatgctggcat

SEQ ID NO: 2300723 - DNA, 25 bp, Homo sapien
gatgaggaaggagataccctaaaaa

SEQ ID NO: 2300724 - DNA, 25 bp, Homo sapien
ctgatgaggaaggagataccctaaa

SEQ ID NO: 2300725 - DNA, 25 bp, Homo sapien
gagataccctaaaaaaggagatgct

SEQ ID NO: 2300726 - DNA, 25 bp, Homo sapien
ggtgtgacattcagtggcctggttt

SEQ ID NO: 2300727 - DNA, 25 bp, Homo sapien
tgacattcagtggcctggttttcag

SEQ ID NO: 2300728 - DNA, 25 bp, Homo sapien
tgtgacattcagtggcctggttttc

SEQ ID NO: 2300729 - DNA, 25 bp, Homo sapien
gccacctggtgtgacattcagtggc

SEQ ID NO: 2300730 - DNA, 25 bp, Homo sapien
agctgtttggctgccccagtttctg

SEQ ID NO: 2300731 - DNA, 25 bp, Homo sapien
ttgccagctgtttggctgccccagt

SEQ ID NO: 2300732 - DNA, 25 bp, Homo sapien
ccagctgtttggctgccccagtttc

SEQ ID NO: 2300733 - DNA, 25 bp, Homo sapien
cctttgccagctgtttggctgcccc

SEQ ID NO: 2300734 - DNA, 25 bp, Homo sapien
aaatagcatagagcccgggcccttc

SEQ ID NO: 2300735 - DNA, 25 bp, Homo sapien
tggatttgtggaagctctagatgag

SEQ ID NO: 2300736 - DNA, 25 bp, Homo sapien
ggaattcacggaggcttggatttgt

SEQ ID NO: 2300737 - DNA, 25 bp, Homo sapien
ggatatggaaatagcatagagcccg

SEQ ID NO: 2300738 - DNA, 25 bp, Homo sapien
tagtggtacagccagagtggcagag

SEQ ID NO: 2300739 - DNA, 25 bp, Homo sapien
ggcaagtcacggctgcagttcccac

SEQ ID NO: 2300740 - DNA, 25 bp, Homo sapien
ctgtagtggtacagccagagtggca

SEQ ID NO: 2300741 - DNA, 25 bp, Homo sapien
gagggggcaagtcacggctgcagtt

SEQ ID NO: 2300742 - DNA, 25 bp, Homo sapien
ccatctgagatggcttcccatggat

SEQ ID NO: 2300743 - DNA, 25 bp, Homo sapien
tctccactcacatgtggggtcagat

SEQ ID NO: 2300744 - DNA, 25 bp, Homo sapien
catgtggggtcagatgttcctccct

SEQ ID NO: 2300745 - DNA, 25 bp, Homo sapien
tctgagatggcttcccatggatctg

SEQ ID NO: 2300746 - DNA, 25 bp, Homo sapien
taggccctgtggctactgctgccag

SEQ ID NO: 2300747 - DNA, 25 bp, Homo sapien
tataggccctgtggctactgctgcc

SEQ ID NO: 2300748 - DNA, 25 bp, Homo sapien
ctttctataggccctgtggctactg

SEQ ID NO: 2300749 - DNA, 25 bp, Homo sapien
ccaacttctttctataggccctgtg

SEQ ID NO: 2300750 - DNA, 25 bp, Homo sapien
agaaccctttaagcgtgtctcagag

SEQ ID NO: 2300751 - DNA, 25 bp, Homo sapien
ccgataacaaaaacagccgtctgtg

SEQ ID NO: 2300752 - DNA, 25 bp, Homo sapien
caggggctaaaaacatcgtccactt

SEQ ID NO: 2300753 - DNA, 25 bp, Homo sapien
gactggctccccgataacaaaaaca

SEQ ID NO: 2300754 - DNA, 25 bp, Homo sapien
ctccatgagggaggtggatgaacaa

SEQ ID NO: 2300755 - DNA, 25 bp, Homo sapien
tccatgagggaggtggatgaacaaa

SEQ ID NO: 2300756 - DNA, 25 bp, Homo sapien
catgagggaggtggatgaacaaatg

SEQ ID NO: 2300757 - DNA, 25 bp, Homo sapien
ccatgagggaggtggatgaacaaat

SEQ ID NO: 2300758 - DNA, 25 bp, Homo sapien
tggtggtgaacttggtcccatttcc

SEQ ID NO: 2300759 - DNA, 25 bp, Homo sapien
gacctgtggaagctggtggtgaact

SEQ ID NO: 2300760 - DNA, 25 bp, Homo sapien
tgacctgtggaagctggtggtgaac

SEQ ID NO: 2300761 - DNA, 25 bp, Homo sapien
tggggtcaccacatgcctgtgcttt

SEQ ID NO: 2300762 - DNA, 25 bp, Homo sapien
aggtgtcagacatcgttgtagagcc

SEQ ID NO: 2300763 - DNA, 25 bp, Homo sapien
ccaaggtgtcagacatcgttgtaga

SEQ ID NO: 2300764 - DNA, 25 bp, Homo sapien
caaggtgtcagacatcgttgtagag

SEQ ID NO: 2300765 - DNA, 25 bp, Homo sapien
aaggtgtcagacatcgttgtagagc

SEQ ID NO: 2300766 - DNA, 25 bp, Homo sapien
tgggggactgggtctgggatgggta

SEQ ID NO: 2300767 - DNA, 25 bp, Homo sapien
ccagctgacccacttcctgggttgg

SEQ ID NO: 2300768 - DNA, 25 bp, Homo sapien
ctgggtctgggatgggtacccttct

SEQ ID NO: 2300769 - DNA, 25 bp, Homo sapien
agctgacccacttcctgggttgggg

SEQ ID NO: 2300770 - DNA, 25 bp, Homo sapien
ttgagtgactgactgtactgtctta

SEQ ID NO: 2300771 - DNA, 25 bp, Homo sapien
tgtactgtcttacaggtcagtgtgg

SEQ ID NO: 2300772 - DNA, 25 bp, Homo sapien
gatgaccatatacctggccattgag

SEQ ID NO: 2300773 - DNA, 25 bp, Homo sapien
gagcattttgcattgtggtgaccac

SEQ ID NO: 2300774 - DNA, 25 bp, Homo sapien
gctggagcgtatcaacgtgtactac

SEQ ID NO: 2300775 - DNA, 25 bp, Homo sapien
gggcagatcttcaggccagacaact

SEQ ID NO: 2300776 - DNA, 25 bp, Homo sapien
tgtactacaatgaggccagcggtga

SEQ ID NO: 2300777 - DNA, 25 bp, Homo sapien
gatcagtgacctgcagctggagcgt

SEQ ID NO: 2300778 - DNA, 25 bp, Homo sapien
ctatttcagcgttggcggagggcgg

SEQ ID NO: 2300779 - DNA, 25 bp, Homo sapien
ggctgggtcactgcgcgtctgctcc

SEQ ID NO: 2300780 - DNA, 25 bp, Homo sapien
ttggccatgagggagatagcgttca

SEQ ID NO: 2300781 - DNA, 25 bp, Homo sapien
ccagatcggcgccaaggttggcagc

SEQ ID NO: 2300782 - DNA, 25 bp, Homo sapien
cgagagtgaccccaacagaggactc

SEQ ID NO: 2300783 - DNA, 25 bp, Homo sapien
cagggcgagagtgaccccaacagag

SEQ ID NO: 2300784 - DNA, 25 bp, Homo sapien
gaccccaacagaggactccagatct

SEQ ID NO: 2300785 - DNA, 25 bp, Homo sapien
gagtgaccccaacagaggactccag

SEQ ID NO: 2300786 - DNA, 25 bp, Homo sapien
cagaagcagtgtgcctgagagcatc

SEQ ID NO: 2300787 - DNA, 25 bp, Homo sapien
cttcagaagcagtgtgcctgagagc

SEQ ID NO: 2300788 - DNA, 25 bp, Homo sapien
agcagtgtgcctgagagcatcttcc

SEQ ID NO: 2300789 - DNA, 25 bp, Homo sapien
gcctctaatgtttcttcagaagcag

SEQ ID NO: 2300790 - DNA, 25 bp, Homo sapien
cagactttgagctttccgggaggcc

SEQ ID NO: 2300791 - DNA, 25 bp, Homo sapien
caagggcgtgcactggatcgccgca

SEQ ID NO: 2300792 - DNA, 25 bp, Homo sapien
gagtggggacgccagagttttccat

SEQ ID NO: 2300793 - DNA, 25 bp, Homo sapien
cactcaggacgggttgtgctcccag

SEQ ID NO: 2300794 - DNA, 25 bp, Homo sapien
cacagaccagagaagatcaggcgcc

SEQ ID NO: 2300795 - DNA, 25 bp, Homo sapien
gaccagagaagatcaggcgccttca

SEQ ID NO: 2300796 - DNA, 25 bp, Homo sapien
cagaccagagaagatcaggcgcctt

SEQ ID NO: 2300797 - DNA, 25 bp, Homo sapien
ccagagaagatcaggcgccttcagg

SEQ ID NO: 2300798 - DNA, 25 bp, Homo sapien
aagcgtgatcatgttgtctgtttgc

SEQ ID NO: 2300799 - DNA, 25 bp, Homo sapien
tgtgagggtatcacagcaacggcga

SEQ ID NO: 2300800 - DNA, 25 bp, Homo sapien
caaaaacttccagagaagcgtggaa

SEQ ID NO: 2300801 - DNA, 25 bp, Homo sapien
gagctctgcgaggacacaaaaactt

SEQ ID NO: 2300802 - DNA, 25 bp, Homo sapien
aggagtcactcaggacgactgaagc

SEQ ID NO: 2300803 - DNA, 25 bp, Homo sapien
actgagtactgcaacggagcacgag

SEQ ID NO: 2300804 - DNA, 25 bp, Homo sapien
acgactgaagcgtgatttcggattc

SEQ ID NO: 2300805 - DNA, 25 bp, Homo sapien
tactgcaacggagcacgaggaggat

SEQ ID NO: 2300806 - DNA, 25 bp, Homo sapien
caaattcccggattcaagttcgaga

SEQ ID NO: 2300807 - DNA, 25 bp, Homo sapien
cttgattctgggatgtcgaagctgc

SEQ ID NO: 2300808 - DNA, 25 bp, Homo sapien
gagtatgagaatgtaatctcggctc

SEQ ID NO: 2300809 - DNA, 25 bp, Homo sapien
ggtgatcttgctatctcaaccttcc

SEQ ID NO: 2300810 - DNA, 25 bp, Homo sapien
tgctctgaccacattaggttctccc

SEQ ID NO: 2300811 - DNA, 25 bp, Homo sapien
caactgctctgaccacattaggttc

SEQ ID NO: 2300812 - DNA, 25 bp, Homo sapien
cccatccctctgaacttctcaaggg

SEQ ID NO: 2300813 - DNA, 25 bp, Homo sapien
tctgaccacattaggttctccccat

SEQ ID NO: 2300814 - DNA, 25 bp, Homo sapien
cttgtggctagttcctcacagacac

SEQ ID NO: 2300815 - DNA, 25 bp, Homo sapien
ctttggaagcctcgttctaccctgg

SEQ ID NO: 2300816 - DNA, 25 bp, Homo sapien
ctcacagacactgagaagcttctca

SEQ ID NO: 2300817 - DNA, 25 bp, Homo sapien
tggaagcctcgttctaccctggcct

SEQ ID NO: 2300818 - DNA, 25 bp, Homo sapien
gcataaaatggtaaacgaagctgaa

SEQ ID NO: 2300819 - DNA, 25 bp, Homo sapien
attttatgcttcatggttagaacca

SEQ ID NO: 2300820 - DNA, 25 bp, Homo sapien
gaagatcgttttcagttgaaaaggc

SEQ ID NO: 2300821 - DNA, 25 bp, Homo sapien
tcatggttagaaccatgtaaggcat

SEQ ID NO: 2300822 - DNA, 25 bp, Homo sapien
tcaacacgagtcacataaaggctct

SEQ ID NO: 2300823 - DNA, 25 bp, Homo sapien
cagcaagttcaacacgagtcacata

SEQ ID NO: 2300824 - DNA, 25 bp, Homo sapien
ggtgacagtcccaagctactttttg

SEQ ID NO: 2300825 - DNA, 25 bp, Homo sapien
ggctctctgtaatgaggtggtgaca

SEQ ID NO: 2300826 - DNA, 25 bp, Homo sapien
tatagaaatgctggcaacaccatgg

SEQ ID NO: 2300827 - DNA, 25 bp, Homo sapien
tagaaatgctggcaacaccatggct

SEQ ID NO: 2300828 - DNA, 25 bp, Homo sapien
tttatagaaatgctggcaacaccat

SEQ ID NO: 2300829 - DNA, 25 bp, Homo sapien
agaaatgctggcaacaccatggctg

SEQ ID NO: 2300830 - DNA, 25 bp, Homo sapien
ttaatctgagcaaatcaacagcttt

SEQ ID NO: 2300831 - DNA, 25 bp, Homo sapien
taatctgagcaaatcaacagctttc

SEQ ID NO: 2300832 - DNA, 25 bp, Homo sapien
aaagggacagacagtatgagtcacc

SEQ ID NO: 2300833 - DNA, 25 bp, Homo sapien
aagggacagacagtatgagtcacca

SEQ ID NO: 2300834 - DNA, 25 bp, Homo sapien
acattcatgtattccagtcctgata

SEQ ID NO: 2300835 - DNA, 25 bp, Homo sapien
gatgcaggttctttgtctagtgtgg

SEQ ID NO: 2300836 - DNA, 25 bp, Homo sapien
ttcggaagcaacgatggcttgccgc

SEQ ID NO: 2300837 - DNA, 25 bp, Homo sapien
gacgtctccgagtgccttgctcaca

SEQ ID NO: 2300838 - DNA, 25 bp, Homo sapien
tcaagtcttttgtacaatacagtgg

SEQ ID NO: 2300839 - DNA, 25 bp, Homo sapien
agagtcttccaattataaccccttg

SEQ ID NO: 2300840 - DNA, 25 bp, Homo sapien
gggatgttgtggcttcttcatagag

SEQ ID NO: 2300841 - DNA, 25 bp, Homo sapien
tcacgctgaatattgtctgttagag

SEQ ID NO: 2300842 - DNA, 25 bp, Homo sapien
agtgttactgatatacttgaacaat

SEQ ID NO: 2300843 - DNA, 25 bp, Homo sapien
ttcagatgtttaggtttctcatgga

SEQ ID NO: 2300844 - DNA, 25 bp, Homo sapien
aaagtagctggccttataggtcaag

SEQ ID NO: 2300845 - DNA, 25 bp, Homo sapien
gattataaagtagctggccttatag

SEQ ID NO: 2300846 - DNA, 25 bp, Homo sapien
tgtttaactcaaagtgtcatgttcg

SEQ ID NO: 2300847 - DNA, 25 bp, Homo sapien
caaagtgtcatgttcggatctcttg

SEQ ID NO: 2300848 - DNA, 25 bp, Homo sapien
tcggatctcttgataggatacatcc

SEQ ID NO: 2300849 - DNA, 25 bp, Homo sapien
catgttcggatctcttgataggata

SEQ ID NO: 2300850 - DNA, 25 bp, Homo sapien
ccagcctgacttaatacatctggtc

SEQ ID NO: 2300851 - DNA, 25 bp, Homo sapien
atggtggccaagtgtcctgtactcc

SEQ ID NO: 2300852 - DNA, 25 bp, Homo sapien
ggtctcattacatcatgaccacgtg

SEQ ID NO: 2300853 - DNA, 25 bp, Homo sapien
tccctaagtgttgcagttgcaggtg

SEQ ID NO: 2300854 - DNA, 25 bp, Homo sapien
ggaccccgcgaatgcgcggcaaggg

SEQ ID NO: 2300855 - DNA, 25 bp, Homo sapien
accccgcgaatgcgcggcaaggggt

SEQ ID NO: 2300856 - DNA, 25 bp, Homo sapien
cgcgaatgcgcggcaaggggtgcat

SEQ ID NO: 2300857 - DNA, 25 bp, Homo sapien
cccgcgaatgcgcggcaaggggtgc

SEQ ID NO: 2300858 - DNA, 25 bp, Homo sapien
gaccccgtacatgcgcggcagggat

SEQ ID NO: 2300859 - DNA, 25 bp, Homo sapien
gggcgcgaaccccagatccccatgt

SEQ ID NO: 2300860 - DNA, 25 bp, Homo sapien
caggagccctagcatgccaacagct

SEQ ID NO: 2300861 - DNA, 25 bp, Homo sapien
tgccgctttagacggcaccctgtgg

SEQ ID NO: 2300862 - DNA, 25 bp, Homo sapien
caggaacccgtgcatgcacagtagg

SEQ ID NO: 2300863 - DNA, 25 bp, Homo sapien
ttttcctttggtgcctcgacatccc

SEQ ID NO: 2300864 - DNA, 25 bp, Homo sapien
agggaccaagaaccgtgctctaccg

SEQ ID NO: 2300865 - DNA, 25 bp, Homo sapien
tgtgcaagaggccaagtgccctgct

SEQ ID NO: 2300866 - DNA, 25 bp, Homo sapien
agcatccccagtaccccacgcatgt

SEQ ID NO: 2300867 - DNA, 25 bp, Homo sapien
cagtaccccacgcatgtgcggcagg

SEQ ID NO: 2300868 - DNA, 25 bp, Homo sapien
gcagggtgagcgttggtggggacag

SEQ ID NO: 2300869 - DNA, 25 bp, Homo sapien
ctgactctttgggcgggcccccgcg

SEQ ID NO: 2300870 - DNA, 25 bp, Homo sapien
cctgctcagccttgcccgttttttt

SEQ ID NO: 2300871 - DNA, 25 bp, Homo sapien
ccctgctcagccttgcccgtttttt

SEQ ID NO: 2300872 - DNA, 25 bp, Homo sapien
ggtgcctcgatctcatttttcaagc

SEQ ID NO: 2300873 - DNA, 25 bp, Homo sapien
tcaagcctgcctgactatttgggca

SEQ ID NO: 2300874 - DNA, 25 bp, Homo sapien
gctccggggcacgaaccctggacat

SEQ ID NO: 2300875 - DNA, 25 bp, Homo sapien
tatttgggcagtcccccgtctggtc

SEQ ID NO: 2300876 - DNA, 25 bp, Homo sapien
ctctggtggagcgaacccagaaccc

SEQ ID NO: 2300877 - DNA, 25 bp, Homo sapien
tttttgggcagcaccccacgaggtc

SEQ ID NO: 2300878 - DNA, 25 bp, Homo sapien
tttggcggcagggtcccctggacca

SEQ ID NO: 2300879 - DNA, 25 bp, Homo sapien
gctctacatcgtcaggttttcttcc

SEQ ID NO: 2300880 - DNA, 25 bp, Homo sapien
tctgggacgcaagtgtccccgggcc

SEQ ID NO: 2300881 - DNA, 25 bp, Homo sapien
gcccccgtgcatgcgtggcaggtgg

SEQ ID NO: 2300882 - DNA, 25 bp, Homo sapien
gagtgaatctgggacgcaagtgtcc

SEQ ID NO: 2300883 - DNA, 25 bp, Homo sapien
gaatctgggacgcaagtgtccccgg

SEQ ID NO: 2300884 - DNA, 25 bp, Homo sapien
ccccatgagggaccgccgaaggttg

SEQ ID NO: 2300885 - DNA, 25 bp, Homo sapien
gagggaccgccgaaggttgcaggga

SEQ ID NO: 2300886 - DNA, 25 bp, Homo sapien
ccgggttcgtgcctccggagctgct

SEQ ID NO: 2300887 - DNA, 25 bp, Homo sapien
cctgccgtgcatgcgcgaggtcccg

SEQ ID NO: 2300888 - DNA, 25 bp, Homo sapien
atacgtggggtccagcgaaacctgg

SEQ ID NO: 2300889 - DNA, 25 bp, Homo sapien
gattttcgcccccgtagaggctgga

SEQ ID NO: 2300890 - DNA, 25 bp, Homo sapien
ccgtagaggctggaccccgcaaggt

SEQ ID NO: 2300891 - DNA, 25 bp, Homo sapien
gccccctctgtagcgcatacgtggg

SEQ ID NO: 2300892 - DNA, 25 bp, Homo sapien
gtgattgaggcaccggtggaaggaa

SEQ ID NO: 2300893 - DNA, 25 bp, Homo sapien
ccttgcatgctttgggttccaggga

SEQ ID NO: 2300894 - DNA, 25 bp, Homo sapien
tcttgaaaggggtgattgaggcacc

SEQ ID NO: 2300895 - DNA, 25 bp, Homo sapien
gccgcccgaataggcagggtgtctt

SEQ ID NO: 2300896 - DNA, 25 bp, Homo sapien
tagtcttgaaaaaggatgtcgaggc

SEQ ID NO: 2300897 - DNA, 25 bp, Homo sapien
tttgtgcccccggagtgactgggcc

SEQ ID NO: 2300898 - DNA, 25 bp, Homo sapien
cgaggcaccggtggaatgaaaatac

SEQ ID NO: 2300899 - DNA, 25 bp, Homo sapien
tgcatgcgtccagtcctgggaaccc

SEQ ID NO: 2300900 - DNA, 25 bp, Homo sapien
ccacaccacacaggtgcctcgacct

SEQ ID NO: 2300901 - DNA, 25 bp, Homo sapien
ctcccctttcaagatttcctgccat

SEQ ID NO: 2300902 - DNA, 25 bp, Homo sapien
caaatgagtctgtgatgaatgttga

SEQ ID NO: 2300903 - DNA, 25 bp, Homo sapien
tctgtgatgaatgttgatggtgact

SEQ ID NO: 2300904 - DNA, 25 bp, Homo sapien
ttgatggtgactggtaatttacctg

SEQ ID NO: 2300905 - DNA, 25 bp, Homo sapien
tgatggtgactggtaatttacctga

SEQ ID NO: 2300906 - DNA, 25 bp, Homo sapien
cagccagttggaaatacgctgttta

SEQ ID NO: 2300907 - DNA, 25 bp, Homo sapien
attcagccagttggaaatacgctgt

SEQ ID NO: 2300908 - DNA, 25 bp, Homo sapien
atctgtaaaaacctttggtgatgtg

SEQ ID NO: 2300909 - DNA, 25 bp, Homo sapien
cagttggaaatacgctgtttataga

SEQ ID NO: 2300910 - DNA, 25 bp, Homo sapien
tttatactgggagttgggaatacac

SEQ ID NO: 2300911 - DNA, 25 bp, Homo sapien
tactatgagacattactgagcccga

SEQ ID NO: 2300912 - DNA, 25 bp, Homo sapien
actgaatatcctgcggtaaaaacta

SEQ ID NO: 2300913 - DNA, 25 bp, Homo sapien
tgtgtgctttccaatgcgtagattc

SEQ ID NO: 2300914 - DNA, 25 bp, Homo sapien
cactcaaagccacaacccacttgca

SEQ ID NO: 2300915 - DNA, 25 bp, Homo sapien
ccactcaaagccacaacccacttgc

SEQ ID NO: 2300916 - DNA, 25 bp, Homo sapien
actcaaagccacaacccacttgcat

SEQ ID NO: 2300917 - DNA, 25 bp, Homo sapien
gccactcaaagccacaacccacttg

SEQ ID NO: 2300918 - DNA, 25 bp, Homo sapien
tacacccaagattcatgagttattt

SEQ ID NO: 2300919 - DNA, 25 bp, Homo sapien
ctacacccaagattcatgagttatt

SEQ ID NO: 2300920 - DNA, 25 bp, Homo sapien
acactctgaccccatagaatttcca

SEQ ID NO: 2300921 - DNA, 25 bp, Homo sapien
gtcacactctgaccccatagaattt

SEQ ID NO: 2300922 - DNA, 25 bp, Homo sapien
tatttccttttccagcataggcctc

SEQ ID NO: 2300923 - DNA, 25 bp, Homo sapien
aagatatttccttttccagcatagg

SEQ ID NO: 2300924 - DNA, 25 bp, Homo sapien
atttgaagatatttccttttccagc

SEQ ID NO: 2300925 - DNA, 25 bp, Homo sapien
ttatttgaagatatttccttttcca

SEQ ID NO: 2300926 - DNA, 25 bp, Homo sapien
cacaaagaagtttctgagaatgctt

SEQ ID NO: 2300927 - DNA, 25 bp, Homo sapien
agtttctgagaatgcttctgtctag

SEQ ID NO: 2300928 - DNA, 25 bp, Homo sapien
gaagtttctgagaatgcttctgtct

SEQ ID NO: 2300929 - DNA, 25 bp, Homo sapien
aagaagtttctgagaatgcttctgt

SEQ ID NO: 2300930 - DNA, 25 bp, Homo sapien
gtaggcctcaaatcgctccaaatat

SEQ ID NO: 2300931 - DNA, 25 bp, Homo sapien
cctcaaatcgctccaaatatccaat

SEQ ID NO: 2300932 - DNA, 25 bp, Homo sapien
caaaaagactctttcaaaactgatc

SEQ ID NO: 2300933 - DNA, 25 bp, Homo sapien
ctttcaaaactgatctctcaaaagg

SEQ ID NO: 2300934 - DNA, 25 bp, Homo sapien
tattttgagtgttttgaggccaatg

SEQ ID NO: 2300935 - DNA, 25 bp, Homo sapien
agggttgaacctatcttatgattga

SEQ ID NO: 2300936 - DNA, 25 bp, Homo sapien
ggttgaacctatcttatgattgagc

SEQ ID NO: 2300937 - DNA, 25 bp, Homo sapien
ttttgagtgttttgaggccaatggt

SEQ ID NO: 2300938 - DNA, 25 bp, Homo sapien
tataggcctccacacgttccaaaat

SEQ ID NO: 2300939 - DNA, 25 bp, Homo sapien
gctccaaaatatcctctcacagaat

SEQ ID NO: 2300940 - DNA, 25 bp, Homo sapien
ttcactatttgcctcagtatgctcc

SEQ ID NO: 2300941 - DNA, 25 bp, Homo sapien
ggactgaatctacacgtcacaaagc

SEQ ID NO: 2300942 - DNA, 25 bp, Homo sapien
ttaagtccagcacgacagcaacctc

SEQ ID NO: 2300943 - DNA, 25 bp, Homo sapien
tgcttaagtccagcacgacagcaac

SEQ ID NO: 2300944 - DNA, 25 bp, Homo sapien
tctgcttaagtccagcacgacagca

SEQ ID NO: 2300945 - DNA, 25 bp, Homo sapien
gcttaagtccagcacgacagcaacc

SEQ ID NO: 2300946 - DNA, 25 bp, Homo sapien
gcatcactcattggccaccgttttt

SEQ ID NO: 2300947 - DNA, 25 bp, Homo sapien
tggtggtcgccaggcatcactcatt

SEQ ID NO: 2300948 - DNA, 25 bp, Homo sapien
tgcattggtggtcgccaggcatcac

SEQ ID NO: 2300949 - DNA, 25 bp, Homo sapien
ggctgacatttgcattggtggtcgc

SEQ ID NO: 2300950 - DNA, 25 bp, Homo sapien
gaaaggtaggctgtgtaccctgaag

SEQ ID NO: 2300951 - DNA, 25 bp, Homo sapien
gggaaggaagttccagacgatccca

SEQ ID NO: 2300952 - DNA, 25 bp, Homo sapien
tcgggacctagtctctgtccgcact

SEQ ID NO: 2300953 - DNA, 25 bp, Homo sapien
tctggtcgactagtcgtgggcatcg

SEQ ID NO: 2300954 - DNA, 25 bp, Homo sapien
gtcttctgccttagataggtcccac

SEQ ID NO: 2300955 - DNA, 25 bp, Homo sapien
ggtcttctgccttagataggtccca

SEQ ID NO: 2300956 - DNA, 25 bp, Homo sapien
tggtcttctgccttagataggtccc

SEQ ID NO: 2300957 - DNA, 25 bp, Homo sapien
tcagaaactgcaaaccactgtagtt

SEQ ID NO: 2300958 - DNA, 25 bp, Homo sapien
cagaaactgcaaaccactgtagttt

SEQ ID NO: 2300959 - DNA, 25 bp, Homo sapien
ccacctttgctagtttggccaggac

SEQ ID NO: 2300960 - DNA, 25 bp, Homo sapien
agaagcttttgcaggcaccacccca

SEQ ID NO: 2300961 - DNA, 25 bp, Homo sapien
aaagccccactaaaatgcacaaagc

SEQ ID NO: 2300962 - DNA, 25 bp, Homo sapien
gcgaggcgcatcactttggaaggca

SEQ ID NO: 2300963 - DNA, 25 bp, Homo sapien
gttgcatcagtatcaggactgaaat

SEQ ID NO: 2300964 - DNA, 25 bp, Homo sapien
agtttctctagtgctgtaacccagc

SEQ ID NO: 2300965 - DNA, 25 bp, Homo sapien
ttgcagtttctctagtgctgtaacc

SEQ ID NO: 2300966 - DNA, 25 bp, Homo sapien
tctttcttctcatccgacaccactg

SEQ ID NO: 2300967 - DNA, 25 bp, Homo sapien
gtggtgttgcagtttctctagtgct

SEQ ID NO: 2300968 - DNA, 25 bp, Homo sapien
ggagaacgccccaacaactctgatg

SEQ ID NO: 2300969 - DNA, 25 bp, Homo sapien
gggagaacgccccaacaactctgat

SEQ ID NO: 2300970 - DNA, 25 bp, Homo sapien
agaacgccccaacaactctgatgag

SEQ ID NO: 2300971 - DNA, 25 bp, Homo sapien
gagaacgccccaacaactctgatga

SEQ ID NO: 2300972 - DNA, 25 bp, Homo sapien
tgcagctcctcagtgcttcgcagcc

SEQ ID NO: 2300973 - DNA, 25 bp, Homo sapien
aagtggtttggcatgttgctgtcca

SEQ ID NO: 2300974 - DNA, 25 bp, Homo sapien
tgggaagtggtttggcatgttgctg

SEQ ID NO: 2300975 - DNA, 25 bp, Homo sapien
cctgcttttggaggccatccccaag

SEQ ID NO: 2300976 - DNA, 25 bp, Homo sapien
tccgggatgcagagacctcagagga

SEQ ID NO: 2300977 - DNA, 25 bp, Homo sapien
tcatccgggatgcagagacctcaga

SEQ ID NO: 2300978 - DNA, 25 bp, Homo sapien
ctggccctgcttttggaggccatcc

SEQ ID NO: 2300979 - DNA, 25 bp, Homo sapien
gtggcacacagtgaaagaggctcat

SEQ ID NO: 2300980 - DNA, 25 bp, Homo sapien
ggtggcacacagtgaaagaggctca

SEQ ID NO: 2300981 - DNA, 25 bp, Homo sapien
gctctggagatacaatggcccctcc

SEQ ID NO: 2300982 - DNA, 25 bp, Homo sapien
atgaggtccccttgcatcttgcagt

SEQ ID NO: 2300983 - DNA, 25 bp, Homo sapien
tgaggtccccttgcatcttgcagtt

SEQ ID NO: 2300984 - DNA, 25 bp, Homo sapien
tggatccagtaagagccccacgtgg

SEQ ID NO: 2300985 - DNA, 25 bp, Homo sapien
cttgtagggagccagcagagactca

SEQ ID NO: 2300986 - DNA, 25 bp, Homo sapien
ttgtagggagccagcagagactcac

SEQ ID NO: 2300987 - DNA, 25 bp, Homo sapien
aaacccaggacaagtggcatcccag

SEQ ID NO: 2300988 - DNA, 25 bp, Homo sapien
aacccaggacaagtggcatcccagg

SEQ ID NO: 2300989 - DNA, 25 bp, Homo sapien
ccacaaacccaggacaagtggcatc

SEQ ID NO: 2300990 - DNA, 25 bp, Homo sapien
acaaacccaggacaagtggcatccc

SEQ ID NO: 2300991 - DNA, 25 bp, Homo sapien
tctttcatggcatgacaaagtgttt

SEQ ID NO: 2300992 - DNA, 25 bp, Homo sapien
ttctttcatggcatgacaaagtgtt

SEQ ID NO: 2300993 - DNA, 25 bp, Homo sapien
ctttcatggcatgacaaagtgtttt

SEQ ID NO: 2300994 - DNA, 25 bp, Homo sapien
gatcttctcgccctaagaagctacc

SEQ ID NO: 2300995 - DNA, 25 bp, Homo sapien
aggatcttctcgccctaagaagcta

SEQ ID NO: 2300996 - DNA, 25 bp, Homo sapien
ggatcttctcgccctaagaagctac

SEQ ID NO: 2300997 - DNA, 25 bp, Homo sapien
gcccatcaagcccagaaccctgcca

SEQ ID NO: 2300998 - DNA, 25 bp, Homo sapien
caccatctcgggatgttttcttaaa

SEQ ID NO: 2300999 - DNA, 25 bp, Homo sapien
gctgactgctggagaagtagcacag

SEQ ID NO: 2301000 - DNA, 25 bp, Homo sapien
cagcatgaggtagcaggtatggcat

SEQ ID NO: 2301001 - DNA, 25 bp, Homo sapien
gcagcaccatctcgggatgttttct

SEQ ID NO: 2301002 - DNA, 25 bp, Homo sapien
cagtgtcaggtgatgttcatctgtg

SEQ ID NO: 2301003 - DNA, 25 bp, Homo sapien
agtgtcaggtgatgttcatctgtgc

SEQ ID NO: 2301004 - DNA, 25 bp, Homo sapien
gtgtcaggtgatgttcatctgtgcc

SEQ ID NO: 2301005 - DNA, 25 bp, Homo sapien
gctccacacaggagattggcaaaaa

SEQ ID NO: 2301006 - DNA, 25 bp, Homo sapien
ctggctgccagttactatctttgca

SEQ ID NO: 2301007 - DNA, 25 bp, Homo sapien
ggccagaaatagctctgaggcttcc

SEQ ID NO: 2301008 - DNA, 25 bp, Homo sapien
tgcatggtgtataaggagcagcagt

SEQ ID NO: 2301009 - DNA, 25 bp, Homo sapien
atgttttcgtttggtgggatgactc

SEQ ID NO: 2301010 - DNA, 25 bp, Homo sapien
gaatgttttcgtttggtgggatgac

SEQ ID NO: 2301011 - DNA, 25 bp, Homo sapien
ttttcgtttggtgggatgactcagg

SEQ ID NO: 2301012 - DNA, 25 bp, Homo sapien
tgttttcgtttggtgggatgactca

SEQ ID NO: 2301013 - DNA, 25 bp, Homo sapien
ttccaccccagtatgctcccctcat

SEQ ID NO: 2301014 - DNA, 25 bp, Homo sapien
cttccaccccagtatgctcccctca

SEQ ID NO: 2301015 - DNA, 25 bp, Homo sapien
ctgggaagttgcaaaacaagcatgc

SEQ ID NO: 2301016 - DNA, 25 bp, Homo sapien
tgggaagttgcaaaacaagcatgca

SEQ ID NO: 2301017 - DNA, 25 bp, Homo sapien
ccttgcgacttttggaggagagcag

SEQ ID NO: 2301018 - DNA, 25 bp, Homo sapien
caatgggagccttgcgacttttgga

SEQ ID NO: 2301019 - DNA, 25 bp, Homo sapien
gttgtcgggatgtctgccacctgtc

SEQ ID NO: 2301020 - DNA, 25 bp, Homo sapien
tggcttcctgtgaaccgtgacaatg

SEQ ID NO: 2301021 - DNA, 25 bp, Homo sapien
aatatggcaacaccagggccctggc

SEQ ID NO: 2301022 - DNA, 25 bp, Homo sapien
tgaaaaccaggggaatatggcaaca

SEQ ID NO: 2301023 - DNA, 25 bp, Homo sapien
ccctggcagtcccaggagggaaacg

SEQ ID NO: 2301024 - DNA, 25 bp, Homo sapien
aacgggtctaacaggaatgcccctg

SEQ ID NO: 2301025 - DNA, 25 bp, Homo sapien
ggatggataagatgcatggcaaggg

SEQ ID NO: 2301026 - DNA, 25 bp, Homo sapien
gtcctagacaatgggcctagcaggt

SEQ ID NO: 2301027 - DNA, 25 bp, Homo sapien
caatgagggtcgtgagggatggata

SEQ ID NO: 2301028 - DNA, 25 bp, Homo sapien
tcaggtcctagacaatgggcctagc

SEQ ID NO: 2301029 - DNA, 25 bp, Homo sapien
tgagggcttttgtcagatcacctac

SEQ ID NO: 2301030 - DNA, 25 bp, Homo sapien
ctgtatctgaaaacgtggcccatgc

SEQ ID NO: 2301031 - DNA, 25 bp, Homo sapien
ctcttcaaatgcaactagtgtcaca

SEQ ID NO: 2301032 - DNA, 25 bp, Homo sapien
gattatggacgtgagacaccgcacg

SEQ ID NO: 2301033 - DNA, 25 bp, Homo sapien
tgaggaacacacaataaaactaacc

SEQ ID NO: 2301034 - DNA, 25 bp, Homo sapien
ggcagcaacacatgaggaacacaca

SEQ ID NO: 2301035 - DNA, 25 bp, Homo sapien
tctcacatgggtctaaccagaatgc

SEQ ID NO: 2301036 - DNA, 25 bp, Homo sapien
gcaacacatgaggaacacacaataa

SEQ ID NO: 2301037 - DNA, 25 bp, Homo sapien
gctcctcagccaaggacataggcca

SEQ ID NO: 2301038 - DNA, 25 bp, Homo sapien
gtctgaacctgttgttcctcttcta

SEQ ID NO: 2301039 - DNA, 25 bp, Homo sapien
gccaaggacataggccaaatgtctg

SEQ ID NO: 2301040 - DNA, 25 bp, Homo sapien
cctcttctactgagcaggatgacca

SEQ ID NO: 2301041 - DNA, 25 bp, Homo sapien
cataatcctacatatggtagcttta

SEQ ID NO: 2301042 - DNA, 25 bp, Homo sapien
cagtcataatcctacatatggtagc

SEQ ID NO: 2301043 - DNA, 25 bp, Homo sapien
tgacttagagtcgttcagtcataat

SEQ ID NO: 2301044 - DNA, 25 bp, Homo sapien
ttagagtcgttcagtcataatccta

SEQ ID NO: 2301045 - DNA, 25 bp, Homo sapien
aacaaaaggtccgtggagctgccat

SEQ ID NO: 2301046 - DNA, 25 bp, Homo sapien
ctatccgaggccaacaaaaggtccg

SEQ ID NO: 2301047 - DNA, 25 bp, Homo sapien
ggcgcacggcgaggatcgcctatcc

SEQ ID NO: 2301048 - DNA, 25 bp, Homo sapien
cagcagcgcgtttcccaggatgaag

SEQ ID NO: 2301049 - DNA, 25 bp, Homo sapien
agagacccttgtgtggagatctgat

SEQ ID NO: 2301050 - DNA, 25 bp, Homo sapien
cagaagcagggcgtctacgaatagc

SEQ ID NO: 2301051 - DNA, 25 bp, Homo sapien
tctgattttcaatagatggcaggga

SEQ ID NO: 2301052 - DNA, 25 bp, Homo sapien
gcgtctacgaatagcttagcatcag

SEQ ID NO: 2301053 - DNA, 25 bp, Homo sapien
gaagcggtcggacccagttggaatc

SEQ ID NO: 2301054 - DNA, 25 bp, Homo sapien
aacccggcagcggagagagaaggaa

SEQ ID NO: 2301055 - DNA, 25 bp, Homo sapien
ggaatcttatcacacagagccggcc

SEQ ID NO: 2301056 - DNA, 25 bp, Homo sapien
actgtccgctggttgaacccggcag

SEQ ID NO: 2301057 - DNA, 25 bp, Homo sapien
gtctcttgtgaaaccaattaaattc

SEQ ID NO: 2301058 - DNA, 25 bp, Homo sapien
tctcttgtgaaaccaattaaattca

SEQ ID NO: 2301059 - DNA, 25 bp, Homo sapien
ctcttgtgaaaccaattaaattcat

SEQ ID NO: 2301060 - DNA, 25 bp, Homo sapien
tcatcgtgcgttctttggtctccca

SEQ ID NO: 2301061 - DNA, 25 bp, Homo sapien
gatcaacaatctggcgcagccagaa

SEQ ID NO: 2301062 - DNA, 25 bp, Homo sapien
aagatcaacaatctggcgcagccag

SEQ ID NO: 2301063 - DNA, 25 bp, Homo sapien
atctttaaaaccgaggcagaagagt

SEQ ID NO: 2301064 - DNA, 25 bp, Homo sapien
caatctggcgcagccagaatctcca

SEQ ID NO: 2301065 - DNA, 25 bp, Homo sapien
ggaccagaccccaaaggcgcaggca

SEQ ID NO: 2301066 - DNA, 25 bp, Homo sapien
caaaggcgcaggcacaggttccctg

SEQ ID NO: 2301067 - DNA, 25 bp, Homo sapien
accaggtccccaactctaggcaggg

SEQ ID NO: 2301068 - DNA, 25 bp, Homo sapien
ctcgtgggggtccaccgctgcagca

SEQ ID NO: 2301069 - DNA, 25 bp, Homo sapien
tacagtgctccggcatggagtggga

SEQ ID NO: 2301070 - DNA, 25 bp, Homo sapien
gggtatcccaatccgagccctgcgg

SEQ ID NO: 2301071 - DNA, 25 bp, Homo sapien
gtggctcaggggtatcccaatccga

SEQ ID NO: 2301072 - DNA, 25 bp, Homo sapien
tcaggggtatcccaatccgagccct

SEQ ID NO: 2301073 - DNA, 25 bp, Homo sapien
taaactgctaacccaaacagagtaa

SEQ ID NO: 2301074 - DNA, 25 bp, Homo sapien
ataaactgctaacccaaacagagta

SEQ ID NO: 2301075 - DNA, 25 bp, Homo sapien
tttccctggtggactgcttgggcca

SEQ ID NO: 2301076 - DNA, 25 bp, Homo sapien
gatgtacactgggtccaggtttccc

SEQ ID NO: 2301077 - DNA, 25 bp, Homo sapien
ttccctggtggactgcttgggccat

SEQ ID NO: 2301078 - DNA, 25 bp, Homo sapien
ctgcattgatgtacactgggtccag

SEQ ID NO: 2301079 - DNA, 25 bp, Homo sapien
tcaacctggcgagtacaccaaagct

SEQ ID NO: 2301080 - DNA, 25 bp, Homo sapien
ctgtaccgctctcaacctggcgagt

SEQ ID NO: 2301081 - DNA, 25 bp, Homo sapien
gcaaatgccatccagtatttcagct

SEQ ID NO: 2301082 - DNA, 25 bp, Homo sapien
gtacaccaaagctgttttatattgc

SEQ ID NO: 2301083 - DNA, 25 bp, Homo sapien
ggtctgcgtgagcacaatctgcctc

SEQ ID NO: 2301084 - DNA, 25 bp, Homo sapien
cggtctgcgtgagcacaatctgcct

SEQ ID NO: 2301085 - DNA, 25 bp, Homo sapien
tctgcgtgagcacaatctgcctcat

SEQ ID NO: 2301086 - DNA, 25 bp, Homo sapien
gcccggtctgcgtgagcacaatctg

SEQ ID NO: 2301087 - DNA, 25 bp, Homo sapien
cgccagctggccagttccactgcgt

SEQ ID NO: 2301088 - DNA, 25 bp, Homo sapien
ccgcaacgcaggggcgccagcccca

SEQ ID NO: 2301089 - DNA, 25 bp, Homo sapien
caccactgccgctaccaacatcttc

SEQ ID NO: 2301090 - DNA, 25 bp, Homo sapien
agccccaccactgccgctaccaaca

SEQ ID NO: 2301091 - DNA, 25 bp, Homo sapien
ccctggacttattgtagtacacgtt

SEQ ID NO: 2301092 - DNA, 25 bp, Homo sapien
ctggcctgaagttctgccccaaggg

SEQ ID NO: 2301093 - DNA, 25 bp, Homo sapien
ttgtctggcctgaagttctgcccca

SEQ ID NO: 2301094 - DNA, 25 bp, Homo sapien
ggcctgaagttctgccccaagggcc

SEQ ID NO: 2301095 - DNA, 25 bp, Homo sapien
gtctggcctgaagttctgccccaag

SEQ ID NO: 2301096 - DNA, 25 bp, Homo sapien
ctgcacattttgtatagtgcccctt

SEQ ID NO: 2301097 - DNA, 25 bp, Homo sapien
ctctgcacattttgtatagtgcccc

SEQ ID NO: 2301098 - DNA, 25 bp, Homo sapien
tctgcacattttgtatagtgcccct

SEQ ID NO: 2301099 - DNA, 25 bp, Homo sapien
ttgcagggttccacaacagtgtctg

SEQ ID NO: 2301100 - DNA, 25 bp, Homo sapien
tggaacagatgttatatagagcttt

SEQ ID NO: 2301101 - DNA, 25 bp, Homo sapien
tggcattgcagggttccacaacagt

SEQ ID NO: 2301102 - DNA, 25 bp, Homo sapien
tatatagagctttgttatctacgca

SEQ ID NO: 2301103 - DNA, 25 bp, Homo sapien
gaaacgcaggcacgtggtgacccca

SEQ ID NO: 2301104 - DNA, 25 bp, Homo sapien
gggaaacgcaggcacgtggtgaccc

SEQ ID NO: 2301105 - DNA, 25 bp, Homo sapien
ggaaacgcaggcacgtggtgacccc

SEQ ID NO: 2301106 - DNA, 25 bp, Homo sapien
ctgggaaacgcaggcacgtggtgac

SEQ ID NO: 2301107 - DNA, 25 bp, Homo sapien
ggccagcttccacaggtcagcattc

SEQ ID NO: 2301108 - DNA, 25 bp, Homo sapien
ttccacaggtcagcattcagctggc

SEQ ID NO: 2301109 - DNA, 25 bp, Homo sapien
cagcttccacaggtcagcattcagc

SEQ ID NO: 2301110 - DNA, 25 bp, Homo sapien
gcttccacaggtcagcattcagctg

SEQ ID NO: 2301111 - DNA, 25 bp, Homo sapien
gccgccattcggtagcggccatggc

SEQ ID NO: 2301112 - DNA, 25 bp, Homo sapien
atgaagaaatgtagcgggggaaaca

SEQ ID NO: 2301113 - DNA, 25 bp, Homo sapien
agccgccattcggtagcggccatgg

SEQ ID NO: 2301114 - DNA, 25 bp, Homo sapien
ttatgttgtaggggagccagtcaac

SEQ ID NO: 2301115 - DNA, 25 bp, Homo sapien
ttgctgatattctgacacaagatcg

SEQ ID NO: 2301116 - DNA, 25 bp, Homo sapien
gctgatattctgacacaagatcgtt

SEQ ID NO: 2301117 - DNA, 25 bp, Homo sapien
gatattctgacacaagatcgttcat

SEQ ID NO: 2301118 - DNA, 25 bp, Homo sapien
atattgctgatattctgacacaaga

SEQ ID NO: 2301119 - DNA, 25 bp, Homo sapien
cagtaatgcattatgttttgtggac

SEQ ID NO: 2301120 - DNA, 25 bp, Homo sapien
cacatcatcacaatgtagtgaccca

SEQ ID NO: 2301121 - DNA, 25 bp, Homo sapien
tttcttgccctggaaaatcagtcaa

SEQ ID NO: 2301122 - DNA, 25 bp, Homo sapien
caatgaagggcctgtgctatgcaca

SEQ ID NO: 2301123 - DNA, 25 bp, Homo sapien
cagagctgtgggctgtacatattcc

SEQ ID NO: 2301124 - DNA, 25 bp, Homo sapien
gcagccagatgctgttgagcagagc

SEQ ID NO: 2301125 - DNA, 25 bp, Homo sapien
ctgtgggctgtacatattcctgtgt

SEQ ID NO: 2301126 - DNA, 25 bp, Homo sapien
gagctgtgggctgtacatattcctg

SEQ ID NO: 2301127 - DNA, 25 bp, Homo sapien
agactctgatggagatacaggcaca

SEQ ID NO: 2301128 - DNA, 25 bp, Homo sapien
gactctgatggagatacaggcacac

SEQ ID NO: 2301129 - DNA, 25 bp, Homo sapien
gatggagatacaggcacacatggca

SEQ ID NO: 2301130 - DNA, 25 bp, Homo sapien
tctgatggagatacaggcacacatg

SEQ ID NO: 2301131 - DNA, 25 bp, Homo sapien
tgatccgaattaattaaaccctcaa

SEQ ID NO: 2301132 - DNA, 25 bp, Homo sapien
cagtgatccgaattaattaaaccct

SEQ ID NO: 2301133 - DNA, 25 bp, Homo sapien
cagaaggtggcgacgtttccccacg

SEQ ID NO: 2301134 - DNA, 25 bp, Homo sapien
tctctccagtgatccgaattaatta

SEQ ID NO: 2301135 - DNA, 25 bp, Homo sapien
gggccacataccggaaggcaaagga

SEQ ID NO: 2301136 - DNA, 25 bp, Homo sapien
ggccacataccggaaggcaaaggat

SEQ ID NO: 2301137 - DNA, 25 bp, Homo sapien
agacggggccacataccggaaggca

SEQ ID NO: 2301138 - DNA, 25 bp, Homo sapien
cggggccacataccggaaggcaaag

SEQ ID NO: 2301139 - DNA, 25 bp, Homo sapien
gaaacttgggctcgaaatgggcgcg

SEQ ID NO: 2301140 - DNA, 25 bp, Homo sapien
ggaaacttgggctcgaaatgggcgc

SEQ ID NO: 2301141 - DNA, 25 bp, Homo sapien
agaaacagtaaccctctagctgcgc

SEQ ID NO: 2301142 - DNA, 25 bp, Homo sapien
aacagtaaccctctagctgcgccat

SEQ ID NO: 2301143 - DNA, 25 bp, Homo sapien
aaacagtaaccctctagctgcgcca

SEQ ID NO: 2301144 - DNA, 25 bp, Homo sapien
gaaacagtaaccctctagctgcgcc

SEQ ID NO: 2301145 - DNA, 25 bp, Homo sapien
ctgggaaagggagaaatggccctca

SEQ ID NO: 2301146 - DNA, 25 bp, Homo sapien
tgggaaagggagaaatggccctcac

SEQ ID NO: 2301147 - DNA, 25 bp, Homo sapien
cagtaccctatattgtgtcaccaga

SEQ ID NO: 2301148 - DNA, 25 bp, Homo sapien
tgagacagaaattgtgccaaaccct

SEQ ID NO: 2301149 - DNA, 25 bp, Homo sapien
cttagtgatggttcaggtagcagca

SEQ ID NO: 2301150 - DNA, 25 bp, Homo sapien
gattaagtaagtccttggcagaaca

SEQ ID NO: 2301151 - DNA, 25 bp, Homo sapien
tagtaaatagaagttgccaacactg

SEQ ID NO: 2301152 - DNA, 25 bp, Homo sapien
ctgagcatcccaatggagcagacaa

SEQ ID NO: 2301153 - DNA, 25 bp, Homo sapien
taacaaatctgagcatcccaatgga

SEQ ID NO: 2301154 - DNA, 25 bp, Homo sapien
aatatagtaaatagaagttgccaac

SEQ ID NO: 2301155 - DNA, 25 bp, Homo sapien
cagcccagatgatatttgtttgccg

SEQ ID NO: 2301156 - DNA, 25 bp, Homo sapien
gcttcatgactactccgatcgccaa

SEQ ID NO: 2301157 - DNA, 25 bp, Homo sapien
ttgtttgccgaaacatgaagccaca

SEQ ID NO: 2301158 - DNA, 25 bp, Homo sapien
cccagaaggatgtagggccaagtca

SEQ ID NO: 2301159 - DNA, 25 bp, Homo sapien
tgagtcagctatactccaaccagca

SEQ ID NO: 2301160 - DNA, 25 bp, Homo sapien
gaatgtcctgactatttggccactg

SEQ ID NO: 2301161 - DNA, 25 bp, Homo sapien
taaaatgaagtaacgaaattccagc

SEQ ID NO: 2301162 - DNA, 25 bp, Homo sapien
cagcagtttctgaggaactataaca

SEQ ID NO: 2301163 - DNA, 25 bp, Homo sapien
tctttgtagaaatggtctaattatt

SEQ ID NO: 2301164 - DNA, 25 bp, Homo sapien
catgttttccacctattcagttgtt

SEQ ID NO: 2301165 - DNA, 25 bp, Homo sapien
ttccatgttttccacctattcagtt

SEQ ID NO: 2301166 - DNA, 25 bp, Homo sapien
ctttgtagaaatggtctaattatta

SEQ ID NO: 2301167 - DNA, 25 bp, Homo sapien
cagctaataattaagcactgtatgt

SEQ ID NO: 2301168 - DNA, 25 bp, Homo sapien
ttcaatactgttgagagtacatttc

SEQ ID NO: 2301169 - DNA, 25 bp, Homo sapien
gccacttcgtacctcataagtatat

SEQ ID NO: 2301170 - DNA, 25 bp, Homo sapien
tattacacaacatggtgaatacagc

SEQ ID NO: 2301171 - DNA, 25 bp, Homo sapien
aaaacacgtttttctacaatcactg

SEQ ID NO: 2301172 - DNA, 25 bp, Homo sapien
ctaatgccgatctattttctgagta

SEQ ID NO: 2301173 - DNA, 25 bp, Homo sapien
tacaatcactgttataactaatgcc

SEQ ID NO: 2301174 - DNA, 25 bp, Homo sapien
cactgttataactaatgccgatcta

SEQ ID NO: 2301175 - DNA, 25 bp, Homo sapien
ttttgccagactagatcagagtgga

SEQ ID NO: 2301176 - DNA, 25 bp, Homo sapien
aattttgccagactagatcagagtg

SEQ ID NO: 2301177 - DNA, 25 bp, Homo sapien
attttgccagactagatcagagtgg

SEQ ID NO: 2301178 - DNA, 25 bp, Homo sapien
catagacgcagttcaaaagattcct

SEQ ID NO: 2301179 - DNA, 25 bp, Homo sapien
tgaatcttactcatgctacctaaag

SEQ ID NO: 2301180 - DNA, 25 bp, Homo sapien
tatgactggctatgcacatttcaga

SEQ ID NO: 2301181 - DNA, 25 bp, Homo sapien
gtaactgtagggctccagatgccct

SEQ ID NO: 2301182 - DNA, 25 bp, Homo sapien
tttctacaagcccacagttcctaag

SEQ ID NO: 2301183 - DNA, 25 bp, Homo sapien
accacttgccttattgatcccagag

SEQ ID NO: 2301184 - DNA, 25 bp, Homo sapien
taaaaatggtagatcccttcctctc

SEQ ID NO: 2301185 - DNA, 25 bp, Homo sapien
gatcccagagccacaaccaaatata

SEQ ID NO: 2301186 - DNA, 25 bp, Homo sapien
ataaacagtaattatgttgaaatca

SEQ ID NO: 2301187 - DNA, 25 bp, Homo sapien
taaacagtaattatgttgaaatcat

SEQ ID NO: 2301188 - DNA, 25 bp, Homo sapien
aaacagtaattatgttgaaatcata

SEQ ID NO: 2301189 - DNA, 25 bp, Homo sapien
agcaattattttgaaattataccct

SEQ ID NO: 2301190 - DNA, 25 bp, Homo sapien
acctgttattcgttgaaggttactg

SEQ ID NO: 2301191 - DNA, 25 bp, Homo sapien
cctgttattcgttgaaggttactga

SEQ ID NO: 2301192 - DNA, 25 bp, Homo sapien
aaataacacgtcatgaatggtttgg

SEQ ID NO: 2301193 - DNA, 25 bp, Homo sapien
tgtgtacggtactgatctcatagag

SEQ ID NO: 2301194 - DNA, 25 bp, Homo sapien
cagtggctgatacaatgttacacga

SEQ ID NO: 2301195 - DNA, 25 bp, Homo sapien
tatcttagcttcatacaacgcagaa

SEQ ID NO: 2301196 - DNA, 25 bp, Homo sapien
aatcacattacttgcgacaattttt

SEQ ID NO: 2301197 - DNA, 25 bp, Homo sapien
cattacttgcgacaatttttccttc

SEQ ID NO: 2301198 - DNA, 25 bp, Homo sapien
cacattacttgcgacaatttttcct

SEQ ID NO: 2301199 - DNA, 25 bp, Homo sapien
atcacattacttgcgacaatttttc

SEQ ID NO: 2301200 - DNA, 25 bp, Homo sapien
cagagtccatttcaccaggcccttt

SEQ ID NO: 2301201 - DNA, 25 bp, Homo sapien
tccagagtccatttcaccaggccct

SEQ ID NO: 2301202 - DNA, 25 bp, Homo sapien
ccagagtccatttcaccaggccctt

SEQ ID NO: 2301203 - DNA, 25 bp, Homo sapien
tgcaggtgggtcatgtagacatgct

SEQ ID NO: 2301204 - DNA, 25 bp, Homo sapien
atttcacagctgttactgacaagtg

SEQ ID NO: 2301205 - DNA, 25 bp, Homo sapien
tgagcctcatattcaacaacttccc

SEQ ID NO: 2301206 - DNA, 25 bp, Homo sapien
ggttctgagattcacttagcagatg

SEQ ID NO: 2301207 - DNA, 25 bp, Homo sapien
tgtatttgagcctcatattcaacaa

SEQ ID NO: 2301208 - DNA, 25 bp, Homo sapien
gagattcacttagcagatgtatttg

SEQ ID NO: 2301209 - DNA, 25 bp, Homo sapien
gatgatttagggctggctgcatata

SEQ ID NO: 2301210 - DNA, 25 bp, Homo sapien
tttagggctggctgcatataactga

SEQ ID NO: 2301211 - DNA, 25 bp, Homo sapien
tgatttagggctggctgcatataac

SEQ ID NO: 2301212 - DNA, 25 bp, Homo sapien
tggatgatttagggctggctgcata

SEQ ID NO: 2301213 - DNA, 25 bp, Homo sapien
aaaattatttcaaggcgctgatata

SEQ ID NO: 2301214 - DNA, 25 bp, Homo sapien
tatattctgaatggtagcacattta

SEQ ID NO: 2301215 - DNA, 25 bp, Homo sapien
tcaaggcgctgatatagaggtagag

SEQ ID NO: 2301216 - DNA, 25 bp, Homo sapien
tctgaatggtagcacatttaagaat

SEQ ID NO: 2301217 - DNA, 25 bp, Homo sapien
ttatccatagtttgtcatggcctct

SEQ ID NO: 2301218 - DNA, 25 bp, Homo sapien
cttgtttctgttcaccagattggac

SEQ ID NO: 2301219 - DNA, 25 bp, Homo sapien
ctttctctggtttatctggaatgga

SEQ ID NO: 2301220 - DNA, 25 bp, Homo sapien
tctctggtttatctggaatggaaag

SEQ ID NO: 2301221 - DNA, 25 bp, Homo sapien
ctggaatggaaagtattgacctcag

SEQ ID NO: 2301222 - DNA, 25 bp, Homo sapien
tggaaagtattgacctcagtgccac

SEQ ID NO: 2301223 - DNA, 25 bp, Homo sapien
tctattttctagagcctatgtgagg

SEQ ID NO: 2301224 - DNA, 25 bp, Homo sapien
tccctaggattgatccctggtgtct

SEQ ID NO: 2301225 - DNA, 25 bp, Homo sapien
tattttccaggtgtgcatcattgtg

SEQ ID NO: 2301226 - DNA, 25 bp, Homo sapien
tatggctggtgtactataaccttct

SEQ ID NO: 2301227 - DNA, 25 bp, Homo sapien
tactcctatatactgacctgcctgt

SEQ ID NO: 2301228 - DNA, 25 bp, Homo sapien
caaatggccttaaattctcacggaa

SEQ ID NO: 2301229 - DNA, 25 bp, Homo sapien
cctgcctgtccacgaataattgtaa

SEQ ID NO: 2301230 - DNA, 25 bp, Homo sapien
ttgtcccaagttgacctagggtgac

SEQ ID NO: 2301231 - DNA, 25 bp, Homo sapien
tgtgtataggaaagcagtctctgta

SEQ ID NO: 2301232 - DNA, 25 bp, Homo sapien
ttaactgtgaactatgtagcagatg

SEQ ID NO: 2301233 - DNA, 25 bp, Homo sapien
gactgtctggacaaacacaattgca

SEQ ID NO: 2301234 - DNA, 25 bp, Homo sapien
gtatgggagtttaagcccggcagat

SEQ ID NO: 2301235 - DNA, 25 bp, Homo sapien
ctcacggagactggaagatagggct

SEQ ID NO: 2301236 - DNA, 25 bp, Homo sapien
aagtcctagaggacattagcccgga

SEQ ID NO: 2301237 - DNA, 25 bp, Homo sapien
ctgaggtgagctactggaaaagtcc

SEQ ID NO: 2301238 - DNA, 25 bp, Homo sapien
gttaggcttctatcttctcacggag

SEQ ID NO: 2301239 - DNA, 25 bp, Homo sapien
aaagtttgtactcacttaggttcat

SEQ ID NO: 2301240 - DNA, 25 bp, Homo sapien
gacgaagcaatgtgctgatggtgat

SEQ ID NO: 2301241 - DNA, 25 bp, Homo sapien
caatgtgctgatggtgattgttctt

SEQ ID NO: 2301242 - DNA, 25 bp, Homo sapien
cacagcatgacgaagcaatgtgctg

SEQ ID NO: 2301243 - DNA, 25 bp, Homo sapien
tgacggttatgctgtagcattctgg

SEQ ID NO: 2301244 - DNA, 25 bp, Homo sapien
agtcttgtatctgcaaccagtgctt

SEQ ID NO: 2301245 - DNA, 25 bp, Homo sapien
ttctaggaagctgacggttatgctg

SEQ ID NO: 2301246 - DNA, 25 bp, Homo sapien
ttgtatctgcaaccagtgcttctag

SEQ ID NO: 2301247 - DNA, 25 bp, Homo sapien
ttgtcatcatattgttgtagtaatt

SEQ ID NO: 2301248 - DNA, 25 bp, Homo sapien
taagctcatcgtattgttgtcatca

SEQ ID NO: 2301249 - DNA, 25 bp, Homo sapien
tacgtctaagctcatcgtattgttg

SEQ ID NO: 2301250 - DNA, 25 bp, Homo sapien
tcaaagttctaatacgtctaagctc

SEQ ID NO: 2301251 - DNA, 25 bp, Homo sapien
ttaaaagacattgctcccggctggg

SEQ ID NO: 2301252 - DNA, 25 bp, Homo sapien
gctcattgtcatgcatcctctttca

SEQ ID NO: 2301253 - DNA, 25 bp, Homo sapien
aaatggtggcaattggagagcttcc

SEQ ID NO: 2301254 - DNA, 25 bp, Homo sapien
gcagaatgactgtctggcctctcaa

SEQ ID NO: 2301255 - DNA, 25 bp, Homo sapien
catgatatgtgacaagtgattcaaa

SEQ ID NO: 2301256 - DNA, 25 bp, Homo sapien
aaatgttattatgtccttggaatga

SEQ ID NO: 2301257 - DNA, 25 bp, Homo sapien
gaaagagagacattagtcggctgac

SEQ ID NO: 2301258 - DNA, 25 bp, Homo sapien
gactatgcaggtaatatatgtcatg

SEQ ID NO: 2301259 - DNA, 25 bp, Homo sapien
gatttcaagctttgtgaatttgtta

SEQ ID NO: 2301260 - DNA, 25 bp, Homo sapien
tttgcatgatttcaagctttgtgaa

SEQ ID NO: 2301261 - DNA, 25 bp, Homo sapien
aatttctcctatggtctcctctttg

SEQ ID NO: 2301262 - DNA, 25 bp, Homo sapien
cactatatcataagtttggtatgta

SEQ ID NO: 2301263 - DNA, 25 bp, Homo sapien
cacagaggcttctctagagaccttg

SEQ ID NO: 2301264 - DNA, 25 bp, Homo sapien
cagttgcatttatcaaagctttgca

SEQ ID NO: 2301265 - DNA, 25 bp, Homo sapien
aagctttgcatttcggtacacagag

SEQ ID NO: 2301266 - DNA, 25 bp, Homo sapien
tcctaagcagttgcatttatcaaag

SEQ ID NO: 2301267 - DNA, 25 bp, Homo sapien
tcattttcgaatgtgagtgagctca

SEQ ID NO: 2301268 - DNA, 25 bp, Homo sapien
ggattgtaaaggatatgaccagtca

SEQ ID NO: 2301269 - DNA, 25 bp, Homo sapien
tgggaaagcctctcgaaaaatggta

SEQ ID NO: 2301270 - DNA, 25 bp, Homo sapien
gatacttcaccagcctagagtagag

SEQ ID NO: 2301271 - DNA, 25 bp, Homo sapien
gtgaatgcacttagagatcaaatgt

SEQ ID NO: 2301272 - DNA, 25 bp, Homo sapien
tggacttatcctgaaagttaggctt

SEQ ID NO: 2301273 - DNA, 25 bp, Homo sapien
ggctttgactgtgaatgcacttaga

SEQ ID NO: 2301274 - DNA, 25 bp, Homo sapien
tatcctgaaagttaggctttgactg

SEQ ID NO: 2301275 - DNA, 25 bp, Homo sapien
cagcagctgttttgactaaaggacg

SEQ ID NO: 2301276 - DNA, 25 bp, Homo sapien
gcactttgtgatctaggcagttggt

SEQ ID NO: 2301277 - DNA, 25 bp, Homo sapien
aggttcgtagatggatgattgtgtc

SEQ ID NO: 2301278 - DNA, 25 bp, Homo sapien
tttttgtaggctggcaaaagcactt

SEQ ID NO: 2301279 - DNA, 25 bp, Homo sapien
tctcagtgatggattcggcaaagcc

SEQ ID NO: 2301280 - DNA, 25 bp, Homo sapien
gtcttctatctttagggatctcagt

SEQ ID NO: 2301281 - DNA, 25 bp, Homo sapien
gtcaaagagtcgtatgtcttctatc

SEQ ID NO: 2301282 - DNA, 25 bp, Homo sapien
gaatcagcaccggtttaagaaagat

SEQ ID NO: 2301283 - DNA, 25 bp, Homo sapien
ctaatttactcttgtgtaatctctg

SEQ ID NO: 2301284 - DNA, 25 bp, Homo sapien
actcatctaatttactcttgtgtaa

SEQ ID NO: 2301285 - DNA, 25 bp, Homo sapien
tactcatctaatttactcttgtgta

SEQ ID NO: 2301286 - DNA, 25 bp, Homo sapien
catctaatttactcttgtgtaatct

SEQ ID NO: 2301287 - DNA, 25 bp, Homo sapien
agtattattaactattggcagtgaa

SEQ ID NO: 2301288 - DNA, 25 bp, Homo sapien
tgttgctgcatatagcaggattacc

SEQ ID NO: 2301289 - DNA, 25 bp, Homo sapien
gaatgctgtatagttaaccataggc

SEQ ID NO: 2301290 - DNA, 25 bp, Homo sapien
taccttattttgtaaagctgaataa

SEQ ID NO: 2301291 - DNA, 25 bp, Homo sapien
tgattaattcaatgtggagagagtg

SEQ ID NO: 2301292 - DNA, 25 bp, Homo sapien
atgctgattaattcaatgtggagag

SEQ ID NO: 2301293 - DNA, 25 bp, Homo sapien
agtgtggaataaaacagtcgttaga

SEQ ID NO: 2301294 - DNA, 25 bp, Homo sapien
gaatagtgtggatttgtaaatgcac

SEQ ID NO: 2301295 - DNA, 25 bp, Homo sapien
accggaatcgaaggggacagcactg

SEQ ID NO: 2301296 - DNA, 25 bp, Homo sapien
ctggatggttgggtgatgaccggaa

SEQ ID NO: 2301297 - DNA, 25 bp, Homo sapien
agctgtgggaacaccggccgccgcc

SEQ ID NO: 2301298 - DNA, 25 bp, Homo sapien
caaacccgggctggatggttgggtg

SEQ ID NO: 2301299 - DNA, 25 bp, Homo sapien
tccgagggcgaggtgagaaccaatt

SEQ ID NO: 2301300 - DNA, 25 bp, Homo sapien
caactcaggcgaggaaacttcgaga

SEQ ID NO: 2301301 - DNA, 25 bp, Homo sapien
ccttactgtaggaggaatgtcgccg

SEQ ID NO: 2301302 - DNA, 25 bp, Homo sapien
tctcaagtggccgacagtgggcagt

SEQ ID NO: 2301303 - DNA, 25 bp, Homo sapien
caggtgaatggacaatttatagcgc

SEQ ID NO: 2301304 - DNA, 25 bp, Homo sapien
tgtaattgcccaaagttcgaacaac

SEQ ID NO: 2301305 - DNA, 25 bp, Homo sapien
gtacatatatgttcatatcagtttc

SEQ ID NO: 2301306 - DNA, 25 bp, Homo sapien
tcagtttcatttgtaattgcccaaa

SEQ ID NO: 2301307 - DNA, 25 bp, Homo sapien
catggccttgttctcggtctgtatt

SEQ ID NO: 2301308 - DNA, 25 bp, Homo sapien
tcacaattttgagggtcagaagtct

SEQ ID NO: 2301309 - DNA, 25 bp, Homo sapien
cagggtcaggctccttccaaggtct

SEQ ID NO: 2301310 - DNA, 25 bp, Homo sapien
tggtggtacaacttcagtctctgcc

SEQ ID NO: 2301311 - DNA, 25 bp, Homo sapien
ggttgcatgaaatccaaacaagaaa

SEQ ID NO: 2301312 - DNA, 25 bp, Homo sapien
aaataaatctattctctgccccaga

SEQ ID NO: 2301313 - DNA, 25 bp, Homo sapien
taaccaataactgacaaacaccctg

SEQ ID NO: 2301314 - DNA, 25 bp, Homo sapien
caaccttgggacgatagtccagaac

SEQ ID NO: 2301315 - DNA, 25 bp, Homo sapien
gagcctggtactttgtggactgaca

SEQ ID NO: 2301316 - DNA, 25 bp, Homo sapien
tggactgacacatagagcccgcaga

SEQ ID NO: 2301317 - DNA, 25 bp, Homo sapien
gcccgcagaaacgttacacagatgt

SEQ ID NO: 2301318 - DNA, 25 bp, Homo sapien
tacacagatgttctgcttggctgac

SEQ ID NO: 2301319 - DNA, 25 bp, Homo sapien
gctgtattcttagggcatctggaca

SEQ ID NO: 2301320 - DNA, 25 bp, Homo sapien
taaagtgggctgtattcttagggca

SEQ ID NO: 2301321 - DNA, 25 bp, Homo sapien
ctaaacttgttcattggtgctgtct

SEQ ID NO: 2301322 - DNA, 25 bp, Homo sapien
ggtgggagatgctctatatggccat

SEQ ID NO: 2301323 - DNA, 25 bp, Homo sapien
ggtggccactgaaagcgactttttg

SEQ ID NO: 2301324 - DNA, 25 bp, Homo sapien
gaagttgatccaaaccagggggagc

SEQ ID NO: 2301325 - DNA, 25 bp, Homo sapien
gatgtgcctgatagaagttgatcca

SEQ ID NO: 2301326 - DNA, 25 bp, Homo sapien
agtccagttcgggaaggatgtgcct

SEQ ID NO: 2301327 - DNA, 25 bp, Homo sapien
tgaagccccgaagagcaagagggac

SEQ ID NO: 2301328 - DNA, 25 bp, Homo sapien
tcgtctgaaggtcgcggactctgtc

SEQ ID NO: 2301329 - DNA, 25 bp, Homo sapien
cggatccgacgtcaagaactgggca

SEQ ID NO: 2301330 - DNA, 25 bp, Homo sapien
taggaggtcccttcatgaagccccg

SEQ ID NO: 2301331 - DNA, 25 bp, Homo sapien
cttcttggctccatctgttttttct

SEQ ID NO: 2301332 - DNA, 25 bp, Homo sapien
ttggctccatctgttttttcttgca

SEQ ID NO: 2301333 - DNA, 25 bp, Homo sapien
tttttcttgcaaagagaatcctgtt

SEQ ID NO: 2301334 - DNA, 25 bp, Homo sapien
ttcttgcaaagagaatcctgttcat

SEQ ID NO: 2301335 - DNA, 25 bp, Homo sapien
cagaagctctggtgtcacatttatg

SEQ ID NO: 2301336 - DNA, 25 bp, Homo sapien
taagatgggaacatgacagccagaa

SEQ ID NO: 2301337 - DNA, 25 bp, Homo sapien
tttataagatgggaacatgacagcc

SEQ ID NO: 2301338 - DNA, 25 bp, Homo sapien
tatgcgattttataagatgggaaca

SEQ ID NO: 2301339 - DNA, 25 bp, Homo sapien
ccccatgttgataggctgttagata

SEQ ID NO: 2301340 - DNA, 25 bp, Homo sapien
ccatgttgataggctgttagataac

SEQ ID NO: 2301341 - DNA, 25 bp, Homo sapien
cccatgttgataggctgttagataa

SEQ ID NO: 2301342 - DNA, 25 bp, Homo sapien
ggcatacatgtgctcagtccctcat

SEQ ID NO: 2301343 - DNA, 25 bp, Homo sapien
cctgatcctgtaggcatacatgtgc

SEQ ID NO: 2301344 - DNA, 25 bp, Homo sapien
tcattaagtcttcgacctgatcctg

SEQ ID NO: 2301345 - DNA, 25 bp, Homo sapien
ttaagtcttcgacctgatcctgtag

SEQ ID NO: 2301346 - DNA, 25 bp, Homo sapien
tattttctgattagatgggatcagc

SEQ ID NO: 2301347 - DNA, 25 bp, Homo sapien
ctctctacagcaggtcttgatattt

SEQ ID NO: 2301348 - DNA, 25 bp, Homo sapien
tggtcagacacccagttgtcaggca

SEQ ID NO: 2301349 - DNA, 25 bp, Homo sapien
tatgtaaatccactctagaatgtat

SEQ ID NO: 2301350 - DNA, 25 bp, Homo sapien
gaaatggctatgaggaagcctgctc

SEQ ID NO: 2301351 - DNA, 25 bp, Homo sapien
gcattccacagtaattatctacgct

SEQ ID NO: 2301352 - DNA, 25 bp, Homo sapien
gcggtcctgccttattgtggtatgg

SEQ ID NO: 2301353 - DNA, 25 bp, Homo sapien
cagtaattatctacgcttgtgccat

SEQ ID NO: 2301354 - DNA, 25 bp, Homo sapien
tcactattgtaagtgttttcttggc

SEQ ID NO: 2301355 - DNA, 25 bp, Homo sapien
ttaaacatgttgggagtgtgagatg

SEQ ID NO: 2301356 - DNA, 25 bp, Homo sapien
tagtggcagcgagtgctttggttat

SEQ ID NO: 2301357 - DNA, 25 bp, Homo sapien
gctttggttatcactggttttattg

SEQ ID NO: 2301358 - DNA, 25 bp, Homo sapien
gatcctgtgatttgaggacgttttt

SEQ ID NO: 2301359 - DNA, 25 bp, Homo sapien
tgtgatttgaggacgttttttgtac

SEQ ID NO: 2301360 - DNA, 25 bp, Homo sapien
gcctgggatcctgtgatttgaggac

SEQ ID NO: 2301361 - DNA, 25 bp, Homo sapien
cgttttttgtaccttcagtagccat

SEQ ID NO: 2301362 - DNA, 25 bp, Homo sapien
tggggcttgtctgaaatataggcct

SEQ ID NO: 2301363 - DNA, 25 bp, Homo sapien
ttgtctgaaatataggcctttcctt

SEQ ID NO: 2301364 - DNA, 25 bp, Homo sapien
acagccttggggcttgtctgaaata

SEQ ID NO: 2301365 - DNA, 25 bp, Homo sapien
gcttgtctgaaatataggcctttcc

SEQ ID NO: 2301366 - DNA, 25 bp, Homo sapien
ggtttataggacactggagacagca

SEQ ID NO: 2301367 - DNA, 25 bp, Homo sapien
attgggtttataggacactggagac

SEQ ID NO: 2301368 - DNA, 25 bp, Homo sapien
tgggtttataggacactggagacag

SEQ ID NO: 2301369 - DNA, 25 bp, Homo sapien
agaattgggtttataggacactgga

SEQ ID NO: 2301370 - DNA, 25 bp, Homo sapien
ctaggacatagaaggagccccaaat

SEQ ID NO: 2301371 - DNA, 25 bp, Homo sapien
tcaggttccatgggaccaattattt

SEQ ID NO: 2301372 - DNA, 25 bp, Homo sapien
tttttgagatcaattttcacctcct

SEQ ID NO: 2301373 - DNA, 25 bp, Homo sapien
tggttttttgagatcaattttcacc

SEQ ID NO: 2301374 - DNA, 25 bp, Homo sapien
gtcggtccatccgttgtcatatatt

SEQ ID NO: 2301375 - DNA, 25 bp, Homo sapien
ggtccatccgttgtcatatattcca

SEQ ID NO: 2301376 - DNA, 25 bp, Homo sapien
ccatccgttgtcatatattccagaa

SEQ ID NO: 2301377 - DNA, 25 bp, Homo sapien
gtccatccgttgtcatatattccag

SEQ ID NO: 2301378 - DNA, 25 bp, Homo sapien
attctccaattttgtgcctgtagca

SEQ ID NO: 2301379 - DNA, 25 bp, Homo sapien
caaggtgcagtgctttcagtgccca

SEQ ID NO: 2301380 - DNA, 25 bp, Homo sapien
caattttgtgcctgtagcaaggtgc

SEQ ID NO: 2301381 - DNA, 25 bp, Homo sapien
tgtgcctgtagcaaggtgcagtgct

SEQ ID NO: 2301382 - DNA, 25 bp, Homo sapien
aaatttcgtattccagtgtcactgg

SEQ ID NO: 2301383 - DNA, 25 bp, Homo sapien
tgatgatgcgttgtagatgcctgaa

SEQ ID NO: 2301384 - DNA, 25 bp, Homo sapien
cactgggagaccatctgatgatgcg

SEQ ID NO: 2301385 - DNA, 25 bp, Homo sapien
tgatttgtcctgaagtggtcactgg

SEQ ID NO: 2301386 - DNA, 25 bp, Homo sapien
tgatgagagctattatcatctgtgg

SEQ ID NO: 2301387 - DNA, 25 bp, Homo sapien
cctatggagttgtttctattatgac

SEQ ID NO: 2301388 - DNA, 25 bp, Homo sapien
aatatactatgtttgcgaaccttgg

SEQ ID NO: 2301389 - DNA, 25 bp, Homo sapien
gagactatcttgtgttgtgcctgta

SEQ ID NO: 2301390 - DNA, 25 bp, Homo sapien
aaaattgtgatacctgttttctgtc

SEQ ID NO: 2301391 - DNA, 25 bp, Homo sapien
caagaagatttcttactctcaacaa

SEQ ID NO: 2301392 - DNA, 25 bp, Homo sapien
tctgtctgtaatctgaatcttttct

SEQ ID NO: 2301393 - DNA, 25 bp, Homo sapien
tcaagttttatgaatattgatgtca

SEQ ID NO: 2301394 - DNA, 25 bp, Homo sapien
tagtttggtataacataaatgaagt

SEQ ID NO: 2301395 - DNA, 25 bp, Homo sapien
tacattacagtgtatatatgacttt

SEQ ID NO: 2301396 - DNA, 25 bp, Homo sapien
tatcccacaatgttgtggtggagca

SEQ ID NO: 2301397 - DNA, 25 bp, Homo sapien
ttgaatatcttttgtaggttataca

SEQ ID NO: 2301398 - DNA, 25 bp, Homo sapien
ggaattagagtactgcctaatctaa

SEQ ID NO: 2301399 - DNA, 25 bp, Homo sapien
gagtactgcctaatctaaaccaaaa

SEQ ID NO: 2301400 - DNA, 25 bp, Homo sapien
cattttcaggaattagagtactgcc

SEQ ID NO: 2301401 - DNA, 25 bp, Homo sapien
ggtgtcattttcaggaattagagta

SEQ ID NO: 2301402 - DNA, 25 bp, Homo sapien
tagtgtacgtattgactagaactgt

SEQ ID NO: 2301403 - DNA, 25 bp, Homo sapien
aaggcttactctgaagaaacgaatg

SEQ ID NO: 2301404 - DNA, 25 bp, Homo sapien
tatccaaccccatgtggctattaag

SEQ ID NO: 2301405 - DNA, 25 bp, Homo sapien
tggatttggataacagcccttgcta

SEQ ID NO: 2301406 - DNA, 25 bp, Homo sapien
ccaacggctcgatcgctgcccgccg

SEQ ID NO: 2301407 - DNA, 25 bp, Homo sapien
ccgcggccccagtggcgcctcagct

SEQ ID NO: 2301408 - DNA, 25 bp, Homo sapien
gtgccgaggcccaacggctcgatcg

SEQ ID NO: 2301409 - DNA, 25 bp, Homo sapien
ctctgcggtgccgaggcccaacggc

SEQ ID NO: 2301410 - DNA, 25 bp, Homo sapien
cattcagtcgcccaacatggctgga

SEQ ID NO: 2301411 - DNA, 25 bp, Homo sapien
tgagcggtggagaaggggcgggcgc

SEQ ID NO: 2301412 - DNA, 25 bp, Homo sapien
gccgccgccacctttccattcagtc

SEQ ID NO: 2301413 - DNA, 25 bp, Homo sapien
agcgcggcggaggtgagccggccgc

SEQ ID NO: 2301414 - DNA, 25 bp, Homo sapien
gcgctcgccgttcaagcgcgctttg

SEQ ID NO: 2301415 - DNA, 25 bp, Homo sapien
ggccgctggcggcctgttggcttct

SEQ ID NO: 2301416 - DNA, 25 bp, Homo sapien
aagcgcgctttgtccccgccccaga

SEQ ID NO: 2301417 - DNA, 25 bp, Homo sapien
cttctccacaggcgcgctcgccgtt

SEQ ID NO: 2301418 - DNA, 25 bp, Homo sapien
ctgggagtccgtttagcatgaatga

SEQ ID NO: 2301419 - DNA, 25 bp, Homo sapien
gctatgcgtgggacacaaagccgaa

SEQ ID NO: 2301420 - DNA, 25 bp, Homo sapien
ggcgcgccgctgaatcaagcttcga

SEQ ID NO: 2301421 - DNA, 25 bp, Homo sapien
cttcgatttgagaagggacctggca

SEQ ID NO: 2301422 - DNA, 25 bp, Homo sapien
atttccatatcccacccgagctggt

SEQ ID NO: 2301423 - DNA, 25 bp, Homo sapien
taccagtgtacaaatgattgaacag

SEQ ID NO: 2301424 - DNA, 25 bp, Homo sapien
aacgggcgatgaactgtagaacagc

SEQ ID NO: 2301425 - DNA, 25 bp, Homo sapien
gcattcaggagtctcgaataaatca

SEQ ID NO: 2301426 - DNA, 25 bp, Homo sapien
ttaatgactgattagaatgtggaaa

SEQ ID NO: 2301427 - DNA, 25 bp, Homo sapien
ccttcagcgtctgatgcatgccaca

SEQ ID NO: 2301428 - DNA, 25 bp, Homo sapien
cttcagcgtctgatgcatgccacat

SEQ ID NO: 2301429 - DNA, 25 bp, Homo sapien
ttcagcgtctgatgcatgccacatt

SEQ ID NO: 2301430 - DNA, 25 bp, Homo sapien
ggcatcatgctacccgacttcagac

SEQ ID NO: 2301431 - DNA, 25 bp, Homo sapien
gaggcatcatgctacccgacttcag

SEQ ID NO: 2301432 - DNA, 25 bp, Homo sapien
catgctacccgacttcagactatac

SEQ ID NO: 2301433 - DNA, 25 bp, Homo sapien
atcatgctacccgacttcagactat

SEQ ID NO: 2301434 - DNA, 25 bp, Homo sapien
tatacccgaaattctatcattgcta

SEQ ID NO: 2301435 - DNA, 25 bp, Homo sapien
gaaattctatcattgctagccccaa

SEQ ID NO: 2301436 - DNA, 25 bp, Homo sapien
ggacaccatatacccgaaattctat

SEQ ID NO: 2301437 - DNA, 25 bp, Homo sapien
cttggacaccatatacccgaaattc

SEQ ID NO: 2301438 - DNA, 25 bp, Homo sapien
aatcatttacttgggttgcttcagc

SEQ ID NO: 2301439 - DNA, 25 bp, Homo sapien
ctagttccaactaaccaccagtcta

SEQ ID NO: 2301440 - DNA, 25 bp, Homo sapien
gaaactctatgtccattaaactctc

SEQ ID NO: 2301441 - DNA, 25 bp, Homo sapien
gatgttcagaactttatctggcaga

SEQ ID NO: 2301442 - DNA, 25 bp, Homo sapien
gttgtatgtattgcaaaccacttgc

SEQ ID NO: 2301443 - DNA, 25 bp, Homo sapien
tctctggttgtatgtattgcaaacc

SEQ ID NO: 2301444 - DNA, 25 bp, Homo sapien
tggctgtctctggttgtatgtattg

SEQ ID NO: 2301445 - DNA, 25 bp, Homo sapien
tattgcaaaccacttgcctcgactg

SEQ ID NO: 2301446 - DNA, 25 bp, Homo sapien
gacctggctgacatcgttttaatcg

SEQ ID NO: 2301447 - DNA, 25 bp, Homo sapien
ttccggtcctgatagggccgcaagg

SEQ ID NO: 2301448 - DNA, 25 bp, Homo sapien
tgcggcaaagcagccgacctggctg

SEQ ID NO: 2301449 - DNA, 25 bp, Homo sapien
tctgcggcttctgcgtgttccttcc

SEQ ID NO: 2301450 - DNA, 25 bp, Homo sapien
gcccgagtaagctccttctggtcca

SEQ ID NO: 2301451 - DNA, 25 bp, Homo sapien
tccttctggtccaccgcctgaggcc

SEQ ID NO: 2301452 - DNA, 25 bp, Homo sapien
ctgacaacgtcagggcccgagtaag

SEQ ID NO: 2301453 - DNA, 25 bp, Homo sapien
acgtcagggcccgagtaagctcctt

SEQ ID NO: 2301454 - DNA, 25 bp, Homo sapien
tctagagctcagacatctcagctct

SEQ ID NO: 2301455 - DNA, 25 bp, Homo sapien
tgtgtctagagctcagacatctcag

SEQ ID NO: 2301456 - DNA, 25 bp, Homo sapien
cccgacccaattcatcttcccaaat

SEQ ID NO: 2301457 - DNA, 25 bp, Homo sapien
gcgccaaatcgcagcttcagcagga

SEQ ID NO: 2301458 - DNA, 25 bp, Homo sapien
aacaaatggaagaaccttccaagct

SEQ ID NO: 2301459 - DNA, 25 bp, Homo sapien
acaaatggaagaaccttccaagctc

SEQ ID NO: 2301460 - DNA, 25 bp, Homo sapien
ttccacaaaactaaagcaggtcgac

SEQ ID NO: 2301461 - DNA, 25 bp, Homo sapien
tctttcctgcttgatcagaaccctg

SEQ ID NO: 2301462 - DNA, 25 bp, Homo sapien
tcttctttcctgcttgatcagaacc

SEQ ID NO: 2301463 - DNA, 25 bp, Homo sapien
ttctttcctgcttgatcagaaccct

SEQ ID NO: 2301464 - DNA, 25 bp, Homo sapien
ctttcctgcttgatcagaaccctgg

SEQ ID NO: 2301465 - DNA, 25 bp, Homo sapien
tgtctaagctgacagcagaattttt

SEQ ID NO: 2301466 - DNA, 25 bp, Homo sapien
ctgatttaccatatataggttaaga

SEQ ID NO: 2301467 - DNA, 25 bp, Homo sapien
cttcttgcaagatatctgatttacc

SEQ ID NO: 2301468 - DNA, 25 bp, Homo sapien
ggttaagaatgtctaagctgacagc

SEQ ID NO: 2301469 - DNA, 25 bp, Homo sapien
tctatgattaacatcccaggaaagt

SEQ ID NO: 2301470 - DNA, 25 bp, Homo sapien
tagtcattgaagcaaaaatctttgc

SEQ ID NO: 2301471 - DNA, 25 bp, Homo sapien
caagtgatgacataggaaactagtc

SEQ ID NO: 2301472 - DNA, 25 bp, Homo sapien
attttgcagtattagacttctatga

SEQ ID NO: 2301473 - DNA, 25 bp, Homo sapien
tcacatgggttggttttctcacagt

SEQ ID NO: 2301474 - DNA, 25 bp, Homo sapien
acatgggttggttttctcacagttt

SEQ ID NO: 2301475 - DNA, 25 bp, Homo sapien
gttcacatgggttggttttctcaca

SEQ ID NO: 2301476 - DNA, 25 bp, Homo sapien
ttcacatgggttggttttctcacag

SEQ ID NO: 2301477 - DNA, 25 bp, Homo sapien
ggtacacagtgaggcgacattgtaa

SEQ ID NO: 2301478 - DNA, 25 bp, Homo sapien
ggcgacattgtaagttctaaattat

SEQ ID NO: 2301479 - DNA, 25 bp, Homo sapien
cgacattgtaagttctaaattatgc

SEQ ID NO: 2301480 - DNA, 25 bp, Homo sapien
tagaaggtacacagtgaggcgacat

SEQ ID NO: 2301481 - DNA, 25 bp, Homo sapien
tccttgctacttagtctttgacagt

SEQ ID NO: 2301482 - DNA, 25 bp, Homo sapien
ggccaagatcttccttgctacttag

SEQ ID NO: 2301483 - DNA, 25 bp, Homo sapien
ttgctgaactgagggtgaagcatac

SEQ ID NO: 2301484 - DNA, 25 bp, Homo sapien
tttgctgaactgagggtgaagcata

SEQ ID NO: 2301485 - DNA, 25 bp, Homo sapien
tgctgaactgagggtgaagcatact

SEQ ID NO: 2301486 - DNA, 25 bp, Homo sapien
ttttgctgaactgagggtgaagcat

SEQ ID NO: 2301487 - DNA, 25 bp, Homo sapien
tgaaatatgtctgttagaaggtaac

SEQ ID NO: 2301488 - DNA, 25 bp, Homo sapien
aatatgtctgttagaaggtaactcc

SEQ ID NO: 2301489 - DNA, 25 bp, Homo sapien
aaatatgtctgttagaaggtaactc

SEQ ID NO: 2301490 - DNA, 25 bp, Homo sapien
atatgtctgttagaaggtaactcca

SEQ ID NO: 2301491 - DNA, 25 bp, Homo sapien
caaataatgtcccaaatcgtgtagt

SEQ ID NO: 2301492 - DNA, 25 bp, Homo sapien
aatcagaacagttaacagtactgcg

SEQ ID NO: 2301493 - DNA, 25 bp, Homo sapien
aatcgtgtagttttatgtgatggac

SEQ ID NO: 2301494 - DNA, 25 bp, Homo sapien
taatgtcccaaatcgtgtagtttta

SEQ ID NO: 2301495 - DNA, 25 bp, Homo sapien
cagcagggcttttagtaagtaaatt

SEQ ID NO: 2301496 - DNA, 25 bp, Homo sapien
gactgtcttatttcatccgtgcttc

SEQ ID NO: 2301497 - DNA, 25 bp, Homo sapien
gactaacaaaagagtcacaattctc

SEQ ID NO: 2301498 - DNA, 25 bp, Homo sapien
tccgtgcttctacaatcttcatcca

SEQ ID NO: 2301499 - DNA, 25 bp, Homo sapien
taggagtagactggttcacatcttc

SEQ ID NO: 2301500 - DNA, 25 bp, Homo sapien
tcagtgacatggtttttatcagaac

SEQ ID NO: 2301501 - DNA, 25 bp, Homo sapien
tagtgactacacaagtatctcccat

SEQ ID NO: 2301502 - DNA, 25 bp, Homo sapien
tcgaattactaaaagtcaactctgg

SEQ ID NO: 2301503 - DNA, 25 bp, Homo sapien
gctgcttgggtagtaatcgttctca

SEQ ID NO: 2301504 - DNA, 25 bp, Homo sapien
gtttgctggatatttctgaatactt

SEQ ID NO: 2301505 - DNA, 25 bp, Homo sapien
tttgctggatatttctgaatacttt

SEQ ID NO: 2301506 - DNA, 25 bp, Homo sapien
ttaacatcaacacataatggatgag

SEQ ID NO: 2301507 - DNA, 25 bp, Homo sapien
tcaacacataatggatgagtgtaaa

SEQ ID NO: 2301508 - DNA, 25 bp, Homo sapien
taatggatgagtgtaaaaatcacct

SEQ ID NO: 2301509 - DNA, 25 bp, Homo sapien
aaatttaacatcaacacataatgga

SEQ ID NO: 2301510 - DNA, 25 bp, Homo sapien
gaaagttaggactattttagctaga

SEQ ID NO: 2301511 - DNA, 25 bp, Homo sapien
ctagaaactactagctaaaataaag

SEQ ID NO: 2301512 - DNA, 25 bp, Homo sapien
ttttagctagaaactactagctaaa

SEQ ID NO: 2301513 - DNA, 25 bp, Homo sapien
tagctagaaactactagctaaaata

SEQ ID NO: 2301514 - DNA, 25 bp, Homo sapien
tagagtgcaattcttccgaaggtat

SEQ ID NO: 2301515 - DNA, 25 bp, Homo sapien
tgactgcttagagtgcaattcttcc

SEQ ID NO: 2301516 - DNA, 25 bp, Homo sapien
cccatgactgcttagagtgcaattc

SEQ ID NO: 2301517 - DNA, 25 bp, Homo sapien
gcttagagtgcaattcttccgaagg

SEQ ID NO: 2301518 - DNA, 25 bp, Homo sapien
agtagatattcgcttgctttttaaa

SEQ ID NO: 2301519 - DNA, 25 bp, Homo sapien
ttcttagtagatattcgcttgcttt

SEQ ID NO: 2301520 - DNA, 25 bp, Homo sapien
ttagtagatattcgcttgcttttta

SEQ ID NO: 2301521 - DNA, 25 bp, Homo sapien
tcttagtagatattcgcttgctttt

SEQ ID NO: 2301522 - DNA, 25 bp, Homo sapien
aattaacttatacagttatactgac

SEQ ID NO: 2301523 - DNA, 25 bp, Homo sapien
aatagagtaaaattaacttatacag

SEQ ID NO: 2301524 - DNA, 25 bp, Homo sapien
actgatttctatttaattgttagtt

SEQ ID NO: 2301525 - DNA, 25 bp, Homo sapien
aaaattaacttatacagttatactg

SEQ ID NO: 2301526 - DNA, 25 bp, Homo sapien
ggagagtaactagtagaccgactac

SEQ ID NO: 2301527 - DNA, 25 bp, Homo sapien
gtaactagtagaccgactactctgt

SEQ ID NO: 2301528 - DNA, 25 bp, Homo sapien
gttggtcttggagagtaactagtag

SEQ ID NO: 2301529 - DNA, 25 bp, Homo sapien
cgactactctgtgcagaatcaagag

SEQ ID NO: 2301530 - DNA, 25 bp, Homo sapien
ttttaacaatcctgtcacctgaaag

SEQ ID NO: 2301531 - DNA, 25 bp, Homo sapien
gtttgtatccctgcatcacaccttg

SEQ ID NO: 2301532 - DNA, 25 bp, Homo sapien
gcctgcagaacgcagttatcattgg

SEQ ID NO: 2301533 - DNA, 25 bp, Homo sapien
ttagatcacactgtatggcaacatc

SEQ ID NO: 2301534 - DNA, 25 bp, Homo sapien
tgaacactgtcagcttatgcttagc

SEQ ID NO: 2301535 - DNA, 25 bp, Homo sapien
tgaaccgtgaatatacaccctgaac

SEQ ID NO: 2301536 - DNA, 25 bp, Homo sapien
taaaaactctaccatataccaaagc

SEQ ID NO: 2301537 - DNA, 25 bp, Homo sapien
cccataaataacagcgcatcattgt

SEQ ID NO: 2301538 - DNA, 25 bp, Homo sapien
gctcaggatacccacggcatgtgtc

SEQ ID NO: 2301539 - DNA, 25 bp, Homo sapien
ggctgagaagacccaaaacgctggg

SEQ ID NO: 2301540 - DNA, 25 bp, Homo sapien
catggaggctttagggtagctagac

SEQ ID NO: 2301541 - DNA, 25 bp, Homo sapien
atctagtgcttgggctgagaagacc

SEQ ID NO: 2301542 - DNA, 25 bp, Homo sapien
taaaaatgaataggtccatgcatct

SEQ ID NO: 2301543 - DNA, 25 bp, Homo sapien
atcttggaaccggaccctgtgctca

SEQ ID NO: 2301544 - DNA, 25 bp, Homo sapien
cagcaaaggaatagcggaagttttt

SEQ ID NO: 2301545 - DNA, 25 bp, Homo sapien
cagtcagcaaaggaatagcggaagt

SEQ ID NO: 2301546 - DNA, 25 bp, Homo sapien
ctgaataacggacacctgaatagtg

SEQ ID NO: 2301547 - DNA, 25 bp, Homo sapien
gaatagtgcagaacatgtcagtatc

SEQ ID NO: 2301548 - DNA, 25 bp, Homo sapien
gtgcagaacatgtcagtatcagtgg

SEQ ID NO: 2301549 - DNA, 25 bp, Homo sapien
gacacctgaatagtgcagaacatgt

SEQ ID NO: 2301550 - DNA, 25 bp, Homo sapien
tggactgcacttctgggccttattt

SEQ ID NO: 2301551 - DNA, 25 bp, Homo sapien
tactccatactcctggactgcactt

SEQ ID NO: 2301552 - DNA, 25 bp, Homo sapien
ggactgcacttctgggccttatttt

SEQ ID NO: 2301553 - DNA, 25 bp, Homo sapien
atttctgccctactccatactcctg

SEQ ID NO: 2301554 - DNA, 25 bp, Homo sapien
tgcagtgccctctgagcagcttccc

SEQ ID NO: 2301555 - DNA, 25 bp, Homo sapien
cagtgccctctgagcagcttcccat

SEQ ID NO: 2301556 - DNA, 25 bp, Homo sapien
ctgattgcatgcaattctgctgctt

SEQ ID NO: 2301557 - DNA, 25 bp, Homo sapien
tgctgctttgtccactgcagtgccc

SEQ ID NO: 2301558 - DNA, 25 bp, Homo sapien
tgtttccaggtagactttatgaagt

SEQ ID NO: 2301559 - DNA, 25 bp, Homo sapien
ttgtttccaggtagactttatgaag

SEQ ID NO: 2301560 - DNA, 25 bp, Homo sapien
tatccatataacttattctctggca

SEQ ID NO: 2301561 - DNA, 25 bp, Homo sapien
tattctctggcagtatttgtagttt

SEQ ID NO: 2301562 - DNA, 25 bp, Homo sapien
catataacttattctctggcagtat

SEQ ID NO: 2301563 - DNA, 25 bp, Homo sapien
cagtcactcttatccatataactta

SEQ ID NO: 2301564 - DNA, 25 bp, Homo sapien
tggtttctcgttccacagtttcagt

SEQ ID NO: 2301565 - DNA, 25 bp, Homo sapien
tggtccatttgatgtactgtagtcc

SEQ ID NO: 2301566 - DNA, 25 bp, Homo sapien
cttatccatggtttctcgttccaca

SEQ ID NO: 2301567 - DNA, 25 bp, Homo sapien
ctgcagaaagccatgattggtccat

SEQ ID NO: 2301568 - DNA, 25 bp, Homo sapien
caacgttacgttgcacttgctgttt

SEQ ID NO: 2301569 - DNA, 25 bp, Homo sapien
ttcacatacgtctggcttcttattg

SEQ ID NO: 2301570 - DNA, 25 bp, Homo sapien
cagatcacatatccctgaatgacag

SEQ ID NO: 2301571 - DNA, 25 bp, Homo sapien
ttccaccatcttcacatacgtctgg

SEQ ID NO: 2301572 - DNA, 25 bp, Homo sapien
attgagattgtagatggtagtggct

SEQ ID NO: 2301573 - DNA, 25 bp, Homo sapien
gcagccgtgtttcaagtctccctga

SEQ ID NO: 2301574 - DNA, 25 bp, Homo sapien
tgtaggcttcagacagtttccagga

SEQ ID NO: 2301575 - DNA, 25 bp, Homo sapien
aattgtccaagattgaaactttcga

SEQ ID NO: 2301576 - DNA, 25 bp, Homo sapien
aactttcgaaatgtggagttatcca

SEQ ID NO: 2301577 - DNA, 25 bp, Homo sapien
tggagttatccaagatgtgactgtg

SEQ ID NO: 2301578 - DNA, 25 bp, Homo sapien
aaaatgaaattggacctgtggccat

SEQ ID NO: 2301579 - DNA, 25 bp, Homo sapien
gcagaaaatgaaattggacctgtgg

SEQ ID NO: 2301580 - DNA, 25 bp, Homo sapien
ctgcagaaaatgaaattggacctgt

SEQ ID NO: 2301581 - DNA, 25 bp, Homo sapien
agaaaatgaaattggacctgtggcc

SEQ ID NO: 2301582 - DNA, 25 bp, Homo sapien
tcagtactgatataggaatctgtcc

SEQ ID NO: 2301583 - DNA, 25 bp, Homo sapien
gaatctgtccttcacgaggctccaa

SEQ ID NO: 2301584 - DNA, 25 bp, Homo sapien
tccaagcaaggcatggagtcgctgt

SEQ ID NO: 2301585 - DNA, 25 bp, Homo sapien
tagtggcggtgttctctggtaaacc

SEQ ID NO: 2301586 - DNA, 25 bp, Homo sapien
tggcacaagctaatataccatgagg

SEQ ID NO: 2301587 - DNA, 25 bp, Homo sapien
gcatcagtaattcatagcatcttga

SEQ ID NO: 2301588 - DNA, 25 bp, Homo sapien
actaatatctacagacccattggag

SEQ ID NO: 2301589 - DNA, 25 bp, Homo sapien
tgaaagttggaacaaaaagtccaca

SEQ ID NO: 2301590 - DNA, 25 bp, Homo sapien
aatcaggcaggttcattccagtggc

SEQ ID NO: 2301591 - DNA, 25 bp, Homo sapien
gagaagttcctatgtggctcccacc

SEQ ID NO: 2301592 - DNA, 25 bp, Homo sapien
cctgtttcacaggtcagagggcttt

SEQ ID NO: 2301593 - DNA, 25 bp, Homo sapien
gcaagaacgctcagaatgaagcaga

SEQ ID NO: 2301594 - DNA, 25 bp, Homo sapien
tggctctttgtgtatccagagatac

SEQ ID NO: 2301595 - DNA, 25 bp, Homo sapien
tctttgtgtatccagagatacacca

SEQ ID NO: 2301596 - DNA, 25 bp, Homo sapien
ctgagatggctctttgtgtatccag

SEQ ID NO: 2301597 - DNA, 25 bp, Homo sapien
gagatggctctttgtgtatccagag

SEQ ID NO: 2301598 - DNA, 25 bp, Homo sapien
ttaggaaataatggaataattaaca

SEQ ID NO: 2301599 - DNA, 25 bp, Homo sapien
tcatttcaaggattaaagttgttac

SEQ ID NO: 2301600 - DNA, 25 bp, Homo sapien
ggaaataatggaataattaacagga

SEQ ID NO: 2301601 - DNA, 25 bp, Homo sapien
aacaggaagataatagtctcatttc

SEQ ID NO: 2301602 - DNA, 25 bp, Homo sapien
cctctacccgtcgatacaggatttg

SEQ ID NO: 2301603 - DNA, 25 bp, Homo sapien
taccctctacccgtcgatacaggat

SEQ ID NO: 2301604 - DNA, 25 bp, Homo sapien
tctttaccctctacccgtcgataca

SEQ ID NO: 2301605 - DNA, 25 bp, Homo sapien
cccgtcgatacaggatttgaggcat

SEQ ID NO: 2301606 - DNA, 25 bp, Homo sapien
ggcccatctgttggtctagtgccag

SEQ ID NO: 2301607 - DNA, 25 bp, Homo sapien
tagtgccaggcacgtttgattgctt

SEQ ID NO: 2301608 - DNA, 25 bp, Homo sapien
ctttaccagctctattaaggcccat

SEQ ID NO: 2301609 - DNA, 25 bp, Homo sapien
gtttgattgcttgttctctgaattt

SEQ ID NO: 2301610 - DNA, 25 bp, Homo sapien
ttttacgccatccaatacctccttg

SEQ ID NO: 2301611 - DNA, 25 bp, Homo sapien
aatttctcttttacgccatccaata

SEQ ID NO: 2301612 - DNA, 25 bp, Homo sapien
aaatttctcttttacgccatccaat

SEQ ID NO: 2301613 - DNA, 25 bp, Homo sapien
ccatccaatacctccttgtattctg

SEQ ID NO: 2301614 - DNA, 25 bp, Homo sapien
aaagctgtcattgtttgcggaagtc

SEQ ID NO: 2301615 - DNA, 25 bp, Homo sapien
tgcggaagtctatgtagaaaactca

SEQ ID NO: 2301616 - DNA, 25 bp, Homo sapien
cactgcagcttagacaatagaacga

SEQ ID NO: 2301617 - DNA, 25 bp, Homo sapien
gaacgagtcttcatctccaagaaaa

SEQ ID NO: 2301618 - DNA, 25 bp, Homo sapien
cgttgtactgaaaatactagccaat

SEQ ID NO: 2301619 - DNA, 25 bp, Homo sapien
atactagccaatattaggccgggcg

SEQ ID NO: 2301620 - DNA, 25 bp, Homo sapien
tgtactgaaaatactagccaatatt

SEQ ID NO: 2301621 - DNA, 25 bp, Homo sapien
aaaatactagccaatattaggccgg

SEQ ID NO: 2301622 - DNA, 25 bp, Homo sapien
catacagagtcctggtgctgatggt

SEQ ID NO: 2301623 - DNA, 25 bp, Homo sapien
gctgatggtgaattgcatttgacag

SEQ ID NO: 2301624 - DNA, 25 bp, Homo sapien
ttggagcctaccatacagagtcctg

SEQ ID NO: 2301625 - DNA, 25 bp, Homo sapien
gatggtgaattgcatttgacagtaa

SEQ ID NO: 2301626 - DNA, 25 bp, Homo sapien
attgtgtttcttgacatcaaggacc

SEQ ID NO: 2301627 - DNA, 25 bp, Homo sapien
ttgtgtttcttgacatcaaggacca

SEQ ID NO: 2301628 - DNA, 25 bp, Homo sapien
cattgtgtttcttgacatcaaggac

SEQ ID NO: 2301629 - DNA, 25 bp, Homo sapien
tgtgtttcttgacatcaaggaccat

SEQ ID NO: 2301630 - DNA, 25 bp, Homo sapien
taactgtcacggccattttccataa

SEQ ID NO: 2301631 - DNA, 25 bp, Homo sapien
aactgtcacggccattttccataat

SEQ ID NO: 2301632 - DNA, 25 bp, Homo sapien
ttaactgtcacggccattttccata

SEQ ID NO: 2301633 - DNA, 25 bp, Homo sapien
tgcttccaccttgagcctgtattcc

SEQ ID NO: 2301634 - DNA, 25 bp, Homo sapien
tgagcctgtattcccaatctctctt

SEQ ID NO: 2301635 - DNA, 25 bp, Homo sapien
gagtaacagtgtcaactgtccttgt

SEQ ID NO: 2301636 - DNA, 25 bp, Homo sapien
tgcttattctctctgccagagtaac

SEQ ID NO: 2301637 - DNA, 25 bp, Homo sapien
tcattcttccggttataaatagccc

SEQ ID NO: 2301638 - DNA, 25 bp, Homo sapien
cctctatgactttcttgttggagtc

SEQ ID NO: 2301639 - DNA, 25 bp, Homo sapien
aatagccccggcttggtcatccaaa

SEQ ID NO: 2301640 - DNA, 25 bp, Homo sapien
cttaattagtccgtcctctatgact

SEQ ID NO: 2301641 - DNA, 25 bp, Homo sapien
ggaaatccccaatagagtactacac

SEQ ID NO: 2301642 - DNA, 25 bp, Homo sapien
ccatgttggcctaaactggtgttca

SEQ ID NO: 2301643 - DNA, 25 bp, Homo sapien
tgatgtctttagaagcatgccagaa

SEQ ID NO: 2301644 - DNA, 25 bp, Homo sapien
atcactacagtggtaataatactgg

SEQ ID NO: 2301645 - DNA, 25 bp, Homo sapien
tgcaccatgataagaatgaacaatt

SEQ ID NO: 2301646 - DNA, 25 bp, Homo sapien
catcttggcggctgttcttggttgg

SEQ ID NO: 2301647 - DNA, 25 bp, Homo sapien
tatttgtgcaccatgataagaatga

SEQ ID NO: 2301648 - DNA, 25 bp, Homo sapien
caaaatatttgtgcaccatgataag

SEQ ID NO: 2301649 - DNA, 25 bp, Homo sapien
cctaataacagagtgaccaaattct

SEQ ID NO: 2301650 - DNA, 25 bp, Homo sapien
tgaccaaattctcaatgcaaatact

SEQ ID NO: 2301651 - DNA, 25 bp, Homo sapien
gcctaataacagagtgaccaaattc

SEQ ID NO: 2301652 - DNA, 25 bp, Homo sapien
agtgaccaaattctcaatgcaaata

SEQ ID NO: 2301653 - DNA, 25 bp, Homo sapien
gtgttgatcgaaatggggtaagtct

SEQ ID NO: 2301654 - DNA, 25 bp, Homo sapien
gatcgaaatggggtaagtcttccac

SEQ ID NO: 2301655 - DNA, 25 bp, Homo sapien
ccacagcctgtctctccactgatta

SEQ ID NO: 2301656 - DNA, 25 bp, Homo sapien
cagcctgtctctccactgattacaa

SEQ ID NO: 2301657 - DNA, 25 bp, Homo sapien
tcgagaagtgctctgaactcagccc

SEQ ID NO: 2301658 - DNA, 25 bp, Homo sapien
cttcctgtcaacctccatatgttca

SEQ ID NO: 2301659 - DNA, 25 bp, Homo sapien
catagggcaagacttggaagggtcc

SEQ ID NO: 2301660 - DNA, 25 bp, Homo sapien
ggagtcctccactgttggtacatgg

SEQ ID NO: 2301661 - DNA, 25 bp, Homo sapien
cattctgattgccaatgcatccgtg

SEQ ID NO: 2301662 - DNA, 25 bp, Homo sapien
cacctgcattctgattgccaatgca

SEQ ID NO: 2301663 - DNA, 25 bp, Homo sapien
aatgcatccgtgattggtgccttgc

SEQ ID NO: 2301664 - DNA, 25 bp, Homo sapien
tgattgccaatgcatccgtgattgg

SEQ ID NO: 2301665 - DNA, 25 bp, Homo sapien
ctgttggtgtaataagaaaaagcat

SEQ ID NO: 2301666 - DNA, 25 bp, Homo sapien
tggataggagacaacaatgcatgtc

SEQ ID NO: 2301667 - DNA, 25 bp, Homo sapien
tagtcctgacgcctatgaatgccca

SEQ ID NO: 2301668 - DNA, 25 bp, Homo sapien
tccttgtcattcagcttgtggatag

SEQ ID NO: 2301669 - DNA, 25 bp, Homo sapien
gactgtcttgtctgaattgccttct

SEQ ID NO: 2301670 - DNA, 25 bp, Homo sapien
catcggtgagttcgggctccgtgaa

SEQ ID NO: 2301671 - DNA, 25 bp, Homo sapien
gctgctgctcaagcggcagctcagt

SEQ ID NO: 2301672 - DNA, 25 bp, Homo sapien
ctggctgcggccaacaacaaggaga

SEQ ID NO: 2301673 - DNA, 25 bp, Homo sapien
agctcagtctggacgcgctgtggca

SEQ ID NO: 2301674 - DNA, 25 bp, Homo sapien
tctgcagggacacccctatctattg

SEQ ID NO: 2301675 - DNA, 25 bp, Homo sapien
attgccttgtgaacataaaaattgg

SEQ ID NO: 2301676 - DNA, 25 bp, Homo sapien
acccctatctattgccttgtgaaca

SEQ ID NO: 2301677 - DNA, 25 bp, Homo sapien
ctataggagctgacacatctgcagg

SEQ ID NO: 2301678 - DNA, 25 bp, Homo sapien
tagatgttgttgttgcagctgtcca

SEQ ID NO: 2301679 - DNA, 25 bp, Homo sapien
gatgttgttgttgcagctgtccaaa

SEQ ID NO: 2301680 - DNA, 25 bp, Homo sapien
gaggcagtgtttagcatctaaacac

SEQ ID NO: 2301681 - DNA, 25 bp, Homo sapien
caccatatgccaagggatagatgtt

SEQ ID NO: 2301682 - DNA, 25 bp, Homo sapien
gaaacttcctcagtgaggctgtcat

SEQ ID NO: 2301683 - DNA, 25 bp, Homo sapien
aagaaacttcctcagtgaggctgtc

SEQ ID NO: 2301684 - DNA, 25 bp, Homo sapien
caagaaacttcctcagtgaggctgt

SEQ ID NO: 2301685 - DNA, 25 bp, Homo sapien
agaaacttcctcagtgaggctgtca

SEQ ID NO: 2301686 - DNA, 25 bp, Homo sapien
ttggccaagctgtaaacagacgcac

SEQ ID NO: 2301687 - DNA, 25 bp, Homo sapien
ttgccctttggccaagctgtaaaca

SEQ ID NO: 2301688 - DNA, 25 bp, Homo sapien
ttcgaaaagaagtgtccacttgccc

SEQ ID NO: 2301689 - DNA, 25 bp, Homo sapien
cgaaaagaagtgtccacttgccctt

SEQ ID NO: 2301690 - DNA, 25 bp, Homo sapien
tgaggattgtctgggtccagtagtt

SEQ ID NO: 2301691 - DNA, 25 bp, Homo sapien
gattgtctgggtccagtagtttgag

SEQ ID NO: 2301692 - DNA, 25 bp, Homo sapien
aaagtgtgaggattgtctgggtcca

SEQ ID NO: 2301693 - DNA, 25 bp, Homo sapien
caaagtgtgaggattgtctgggtcc

SEQ ID NO: 2301694 - DNA, 25 bp, Homo sapien
ggagttgcgatcatgtcatcagatg

SEQ ID NO: 2301695 - DNA, 25 bp, Homo sapien
tcatcagatgttaactttaggtaag

SEQ ID NO: 2301696 - DNA, 25 bp, Homo sapien
tcaactcaggatatggagttgcgat

SEQ ID NO: 2301697 - DNA, 25 bp, Homo sapien
caggatatggagttgcgatcatgtc

SEQ ID NO: 2301698 - DNA, 25 bp, Homo sapien
ctttcttatacatgtgaacgctttt

SEQ ID NO: 2301699 - DNA, 25 bp, Homo sapien
tcagttcaagatcagggaggtgtcc

SEQ ID NO: 2301700 - DNA, 25 bp, Homo sapien
cattctgtacgtgaccatttctatc

SEQ ID NO: 2301701 - DNA, 25 bp, Homo sapien
gaagaagctttgatatggttgaacc

SEQ ID NO: 2301702 - DNA, 25 bp, Homo sapien
aatatattagttctagtgagtcaca

SEQ ID NO: 2301703 - DNA, 25 bp, Homo sapien
tgcagataaatgattactgacacaa

SEQ ID NO: 2301704 - DNA, 25 bp, Homo sapien
tgattactgacacaattaattgttc

SEQ ID NO: 2301705 - DNA, 25 bp, Homo sapien
tctgatttggagcactctattctgc

SEQ ID NO: 2301706 - DNA, 25 bp, Homo sapien
tgcagcaacaaagcgaggtaaatga

SEQ ID NO: 2301707 - DNA, 25 bp, Homo sapien
gaaacagagcacagggcttaagaag

SEQ ID NO: 2301708 - DNA, 25 bp, Homo sapien
tacttcatagcaggtaaatgcagca

SEQ ID NO: 2301709 - DNA, 25 bp, Homo sapien
actgagagtagacgcctttggaaaa

SEQ ID NO: 2301710 - DNA, 25 bp, Homo sapien
catcaatcacatgacaccatgaatt

SEQ ID NO: 2301711 - DNA, 25 bp, Homo sapien
tacaaattgaagtcaaatactcaat

SEQ ID NO: 2301712 - DNA, 25 bp, Homo sapien
gctttgtacataagttgattataca

SEQ ID NO: 2301713 - DNA, 25 bp, Homo sapien
caagtggtaaagtttaaatgacatg

SEQ ID NO: 2301714 - DNA, 25 bp, Homo sapien
tggggatgttctggggaaaacgctg

SEQ ID NO: 2301715 - DNA, 25 bp, Homo sapien
gatgttctggggaaaacgctgccat

SEQ ID NO: 2301716 - DNA, 25 bp, Homo sapien
ggatgttctggggaaaacgctgcca

SEQ ID NO: 2301717 - DNA, 25 bp, Homo sapien
gggatgttctggggaaaacgctgcc

SEQ ID NO: 2301718 - DNA, 25 bp, Homo sapien
tgtgtgtttcaatccatagtcctcc

SEQ ID NO: 2301719 - DNA, 25 bp, Homo sapien
caattgtatcagtcaggtaggagcc

SEQ ID NO: 2301720 - DNA, 25 bp, Homo sapien
tgaagggcatgcacagccaaagatg

SEQ ID NO: 2301721 - DNA, 25 bp, Homo sapien
tccaaggccagtaagttcacagttt

SEQ ID NO: 2301722 - DNA, 25 bp, Homo sapien
gctacagctattgattcagcaggaa

SEQ ID NO: 2301723 - DNA, 25 bp, Homo sapien
gaggagacataggagaccacttaac

SEQ ID NO: 2301724 - DNA, 25 bp, Homo sapien
ggtgcagggaagtcaccaacgtcca

SEQ ID NO: 2301725 - DNA, 25 bp, Homo sapien
tagggcttttacgtgattgctcaaa

SEQ ID NO: 2301726 - DNA, 25 bp, Homo sapien
gattagtaagatagcaaactcctac

SEQ ID NO: 2301727 - DNA, 25 bp, Homo sapien
cagcaaatctcctaactccaggtag

SEQ ID NO: 2301728 - DNA, 25 bp, Homo sapien
cctactcaacctggatattgggtct

SEQ ID NO: 2301729 - DNA, 25 bp, Homo sapien
gaagttgagagccaggacttcaacc

SEQ ID NO: 2301730 - DNA, 25 bp, Homo sapien
gactatcaacttcttcagagtttcc

SEQ ID NO: 2301731 - DNA, 25 bp, Homo sapien
ggatttggaccagcgtttctatctg

SEQ ID NO: 2301732 - DNA, 25 bp, Homo sapien
cagcgtttctatctgttttccttcc

SEQ ID NO: 2301733 - DNA, 25 bp, Homo sapien
ctccaggatttggaccagcgtttct

SEQ ID NO: 2301734 - DNA, 25 bp, Homo sapien
gactctcatataggagtccaagacg

SEQ ID NO: 2301735 - DNA, 25 bp, Homo sapien
gacgatcaacagaggcacatggata

SEQ ID NO: 2301736 - DNA, 25 bp, Homo sapien
tgcacactcgcgactctcatatagg

SEQ ID NO: 2301737 - DNA, 25 bp, Homo sapien
gagtccaagacgatcaacagaggca

SEQ ID NO: 2301738 - DNA, 25 bp, Homo sapien
agaatggctgctccccaagtaatga

SEQ ID NO: 2301739 - DNA, 25 bp, Homo sapien
gaataatagaggcaagaaacgtggc

SEQ ID NO: 2301740 - DNA, 25 bp, Homo sapien
tctacatctgataggagaaaaagag

SEQ ID NO: 2301741 - DNA, 25 bp, Homo sapien
aaatgaagtggcttataatgaagga

SEQ ID NO: 2301742 - DNA, 25 bp, Homo sapien
ttgtacctggacagacttctattaa

SEQ ID NO: 2301743 - DNA, 25 bp, Homo sapien
gggtcccattaagctttgcattgta

SEQ ID NO: 2301744 - DNA, 25 bp, Homo sapien
acaccaaggacttcccaatcatttc

SEQ ID NO: 2301745 - DNA, 25 bp, Homo sapien
ttgcattgtacctggacagacttct

SEQ ID NO: 2301746 - DNA, 25 bp, Homo sapien
agttaggaggagatctaaggtcttc

SEQ ID NO: 2301747 - DNA, 25 bp, Homo sapien
ctgaagttaggaggagatctaaggt

SEQ ID NO: 2301748 - DNA, 25 bp, Homo sapien
gaagttaggaggagatctaaggtct

SEQ ID NO: 2301749 - DNA, 25 bp, Homo sapien
ggcattatgaactgttagcatttta

SEQ ID NO: 2301750 - DNA, 25 bp, Homo sapien
gtttttccctcatactctcatcttc

SEQ ID NO: 2301751 - DNA, 25 bp, Homo sapien
ttttccctcatactctcatcttcct

SEQ ID NO: 2301752 - DNA, 25 bp, Homo sapien
ttgtttttccctcatactctcatct

SEQ ID NO: 2301753 - DNA, 25 bp, Homo sapien
tgtttttccctcatactctcatctt

SEQ ID NO: 2301754 - DNA, 25 bp, Homo sapien
gacttcatcattggctggaaatgag

SEQ ID NO: 2301755 - DNA, 25 bp, Homo sapien
tgagtgcatggcatcaaaaattaac

SEQ ID NO: 2301756 - DNA, 25 bp, Homo sapien
tcttcatccaatatcagcaaggtga

SEQ ID NO: 2301757 - DNA, 25 bp, Homo sapien
gcacatgtaaagctttgcatccaag

SEQ ID NO: 2301758 - DNA, 25 bp, Homo sapien
tataatctttgttctcaacaaattc

SEQ ID NO: 2301759 - DNA, 25 bp, Homo sapien
tgtaaacaatgcagcacatgaagca

SEQ ID NO: 2301760 - DNA, 25 bp, Homo sapien
aaggaatcgctagggaatgtaaaca

SEQ ID NO: 2301761 - DNA, 25 bp, Homo sapien
aatcgctagggaatgtaaacaatgc

SEQ ID NO: 2301762 - DNA, 25 bp, Homo sapien
catgaagcacaatttcctcttcatc

SEQ ID NO: 2301763 - DNA, 25 bp, Homo sapien
ggctcacaccttcagattgacacag

SEQ ID NO: 2301764 - DNA, 25 bp, Homo sapien
ttttactctgcctacaccgaaggct

SEQ ID NO: 2301765 - DNA, 25 bp, Homo sapien
cacaagggcattgggttttactctg

SEQ ID NO: 2301766 - DNA, 25 bp, Homo sapien
gcaatcattggtagcatacacatca

SEQ ID NO: 2301767 - DNA, 25 bp, Homo sapien
gaaatgtaaaaccatggcctttctc

SEQ ID NO: 2301768 - DNA, 25 bp, Homo sapien
aaaccatggcctttctctattattg

SEQ ID NO: 2301769 - DNA, 25 bp, Homo sapien
aatgtaaaaccatggcctttctcta

SEQ ID NO: 2301770 - DNA, 25 bp, Homo sapien
taaaaccatggcctttctctattat

SEQ ID NO: 2301771 - DNA, 25 bp, Homo sapien
gtgaacctacatggagaaaacatgt

SEQ ID NO: 2301772 - DNA, 25 bp, Homo sapien
gaaaggaaagaaagactctaccaga

SEQ ID NO: 2301773 - DNA, 25 bp, Homo sapien
tgaggtgtgaacctacatggagaaa

SEQ ID NO: 2301774 - DNA, 25 bp, Homo sapien
gaagtgaggtgtgaacctacatgga

SEQ ID NO: 2301775 - DNA, 25 bp, Homo sapien
aaaagatgggagaacgaaagagagg

SEQ ID NO: 2301776 - DNA, 25 bp, Homo sapien
aagggcaaccaatgtacaaggcagc

SEQ ID NO: 2301777 - DNA, 25 bp, Homo sapien
gggcaaccaatgtacaaggcagcaa

SEQ ID NO: 2301778 - DNA, 25 bp, Homo sapien
caaccaatgtacaaggcagcaaaat

SEQ ID NO: 2301779 - DNA, 25 bp, Homo sapien
tcaagaatatgtcaccagatggaac

SEQ ID NO: 2301780 - DNA, 25 bp, Homo sapien
caaccattgtggagggtctatttct

SEQ ID NO: 2301781 - DNA, 25 bp, Homo sapien
ttaacgaggctcaaccccattggag

SEQ ID NO: 2301782 - DNA, 25 bp, Homo sapien
tggagggtctatttcttaacgaggc

SEQ ID NO: 2301783 - DNA, 25 bp, Homo sapien
tattataacacctgacattgccact

SEQ ID NO: 2301784 - DNA, 25 bp, Homo sapien
ttgaattctttcactcatagggaat

SEQ ID NO: 2301785 - DNA, 25 bp, Homo sapien
tcatagggaatgctttcatagcttc

SEQ ID NO: 2301786 - DNA, 25 bp, Homo sapien
taatgtaagcctatggagcaaacag

SEQ ID NO: 2301787 - DNA, 25 bp, Homo sapien
ttgctcagtcaacctgcagctacct

SEQ ID NO: 2301788 - DNA, 25 bp, Homo sapien
tatttcacaaagaaggacataccaa

SEQ ID NO: 2301789 - DNA, 25 bp, Homo sapien
taaaaagacagactatcctgtgaac

SEQ ID NO: 2301790 - DNA, 25 bp, Homo sapien
gatgttcaagggaaggtattttcaa

SEQ ID NO: 2301791 - DNA, 25 bp, Homo sapien
actgctgcacagctttcaccacaaa

SEQ ID NO: 2301792 - DNA, 25 bp, Homo sapien
catggacttcgtttaataccaggat

SEQ ID NO: 2301793 - DNA, 25 bp, Homo sapien
aatgctgcattctctgggtactgct

SEQ ID NO: 2301794 - DNA, 25 bp, Homo sapien
agcgctgagatctgcaatgctgcat

SEQ ID NO: 2301795 - DNA, 25 bp, Homo sapien
ctttctatgccacgttaatgctttg

SEQ ID NO: 2301796 - DNA, 25 bp, Homo sapien
gcacgtgcttgttctttctatgcca

SEQ ID NO: 2301797 - DNA, 25 bp, Homo sapien
gccacgttaatgctttgtaacaggc

SEQ ID NO: 2301798 - DNA, 25 bp, Homo sapien
ctgcacgtgcttgttctttctatgc

SEQ ID NO: 2301799 - DNA, 25 bp, Homo sapien
ggagattatttagtgcccagcatgc

SEQ ID NO: 2301800 - DNA, 25 bp, Homo sapien
taaactgttttggtacataaggaga

SEQ ID NO: 2301801 - DNA, 25 bp, Homo sapien
taaggagattatttagtgcccagca

SEQ ID NO: 2301802 - DNA, 25 bp, Homo sapien
ctgttttggtacataaggagattat

SEQ ID NO: 2301803 - DNA, 25 bp, Homo sapien
ctttgatgaagaatgcatcagcatg

SEQ ID NO: 2301804 - DNA, 25 bp, Homo sapien
catcagcatggagagcatcacttcc

SEQ ID NO: 2301805 - DNA, 25 bp, Homo sapien
atgcatcagcatggagagcatcact

SEQ ID NO: 2301806 - DNA, 25 bp, Homo sapien
tttgatgaagaatgcatcagcatgg

SEQ ID NO: 2301807 - DNA, 25 bp, Homo sapien
agagagttgacaatgcattcgcaga

SEQ ID NO: 2301808 - DNA, 25 bp, Homo sapien
gagagttgacaatgcattcgcagat

SEQ ID NO: 2301809 - DNA, 25 bp, Homo sapien
agagttgacaatgcattcgcagatg

SEQ ID NO: 2301810 - DNA, 25 bp, Homo sapien
gagttgacaatgcattcgcagatgc

SEQ ID NO: 2301811 - DNA, 25 bp, Homo sapien
ggtgtattccttttgataacagtat

SEQ ID NO: 2301812 - DNA, 25 bp, Homo sapien
ttacagccactttcagccacttcag

SEQ ID NO: 2301813 - DNA, 25 bp, Homo sapien
agccacttcaggagaatgtatatgc

SEQ ID NO: 2301814 - DNA, 25 bp, Homo sapien
tccaaaacattcaggtgtattcctt

SEQ ID NO: 2301815 - DNA, 25 bp, Homo sapien
taaaatgtaaaatagctcgaagcgc

SEQ ID NO: 2301816 - DNA, 25 bp, Homo sapien
agcgcctccagctgcactggtaatg

SEQ ID NO: 2301817 - DNA, 25 bp, Homo sapien
taatgatgtctcatgacgtttcata

SEQ ID NO: 2301818 - DNA, 25 bp, Homo sapien
ctgttagtattttggggaccactgc

SEQ ID NO: 2301819 - DNA, 25 bp, Homo sapien
atttagcttatgatgaaattctgta

SEQ ID NO: 2301820 - DNA, 25 bp, Homo sapien
tatttagcttatgatgaaattctgt

SEQ ID NO: 2301821 - DNA, 25 bp, Homo sapien
tttagcttatgatgaaattctgtat

SEQ ID NO: 2301822 - DNA, 25 bp, Homo sapien
gctaggaccagtttgtgaatatcat

SEQ ID NO: 2301823 - DNA, 25 bp, Homo sapien
gctaaaaggatcaggcataaatgga

SEQ ID NO: 2301824 - DNA, 25 bp, Homo sapien
aaggatcaggcataaatggaacatc

SEQ ID NO: 2301825 - DNA, 25 bp, Homo sapien
caggcataaatggaacatcgctgtt

SEQ ID NO: 2301826 - DNA, 25 bp, Homo sapien
aaaagctaaaaggatcaggcataaa

SEQ ID NO: 2301827 - DNA, 25 bp, Homo sapien
caagccagacgtctttgaccaaaat

SEQ ID NO: 2301828 - DNA, 25 bp, Homo sapien
tccaaagacgtgatggcctccacca

SEQ ID NO: 2301829 - DNA, 25 bp, Homo sapien
gcctccaccacagataatccaaaga

SEQ ID NO: 2301830 - DNA, 25 bp, Homo sapien
ctgaaatagcttcaagccagacgtc

SEQ ID NO: 2301831 - DNA, 25 bp, Homo sapien
ttttaatccacatttctgaatccca

SEQ ID NO: 2301832 - DNA, 25 bp, Homo sapien
cttggtcatctggatacatctgcag

SEQ ID NO: 2301833 - DNA, 25 bp, Homo sapien
tcaggaaaatgtacaatagaagaaa

SEQ ID NO: 2301834 - DNA, 25 bp, Homo sapien
gggataacatctctaatgcatcagg

SEQ ID NO: 2301835 - DNA, 25 bp, Homo sapien
cagcaacatccttaaatcggtataa

SEQ ID NO: 2301836 - DNA, 25 bp, Homo sapien
agcagatgtccagttcctatgaaca

SEQ ID NO: 2301837 - DNA, 25 bp, Homo sapien
tttgtaatcaagtatcctataagac

SEQ ID NO: 2301838 - DNA, 25 bp, Homo sapien
tatcctataagacttaaacccagac

SEQ ID NO: 2301839 - DNA, 25 bp, Homo sapien
gatgctgacaatttgaggattgcta

SEQ ID NO: 2301840 - DNA, 25 bp, Homo sapien
ttgaggattgctaagattgtctgaa

SEQ ID NO: 2301841 - DNA, 25 bp, Homo sapien
tattactaagtcaaatgaatgatgc

SEQ ID NO: 2301842 - DNA, 25 bp, Homo sapien
gttccatgatattggaagacatttg

SEQ ID NO: 2301843 - DNA, 25 bp, Homo sapien
tattctgatcacacgctctctctag

SEQ ID NO: 2301844 - DNA, 25 bp, Homo sapien
agatccctcctttgcttgattggca

SEQ ID NO: 2301845 - DNA, 25 bp, Homo sapien
catccatagctacttttgcaaaaca

SEQ ID NO: 2301846 - DNA, 25 bp, Homo sapien
ggcatctgctcccaatagaagcaag

SEQ ID NO: 2301847 - DNA, 25 bp, Homo sapien
ccaatttgggactgctctctttctc

SEQ ID NO: 2301848 - DNA, 25 bp, Homo sapien
tacatcttgttcacgagatccacta

SEQ ID NO: 2301849 - DNA, 25 bp, Homo sapien
cctccaaggcaaatgctattgttgg

SEQ ID NO: 2301850 - DNA, 25 bp, Homo sapien
gatccactattcagtaagagttcca

SEQ ID NO: 2301851 - DNA, 25 bp, Homo sapien
gaataaaggtccattcatcaaattt

SEQ ID NO: 2301852 - DNA, 25 bp, Homo sapien
ctttgcaaatttggtgagcaacgct

SEQ ID NO: 2301853 - DNA, 25 bp, Homo sapien
tacggcatctcggtaaaattctcct

SEQ ID NO: 2301854 - DNA, 25 bp, Homo sapien
taaaattctcctacactaattgaat

SEQ ID NO: 2301855 - DNA, 25 bp, Homo sapien
gcaacgctgtaatacggcatctcgg

SEQ ID NO: 2301856 - DNA, 25 bp, Homo sapien
gagtgaatcatctgaagataatatt

SEQ ID NO: 2301857 - DNA, 25 bp, Homo sapien
aatcttcatgatcaaaaatgggccc

SEQ ID NO: 2301858 - DNA, 25 bp, Homo sapien
tgagtgaatcatctgaagataatat

SEQ ID NO: 2301859 - DNA, 25 bp, Homo sapien
gtgaatcatctgaagataatatttt

SEQ ID NO: 2301860 - DNA, 25 bp, Homo sapien
gaatgcctcatatgggattgaagtt

SEQ ID NO: 2301861 - DNA, 25 bp, Homo sapien
ctgaatgcctcatatgggattgaag

SEQ ID NO: 2301862 - DNA, 25 bp, Homo sapien
gcctcatatgggattgaagttttga

SEQ ID NO: 2301863 - DNA, 25 bp, Homo sapien
atatgggattgaagttttgatgacc

SEQ ID NO: 2301864 - DNA, 25 bp, Homo sapien
tcacatagctgttgtggaaagctcg

SEQ ID NO: 2301865 - DNA, 25 bp, Homo sapien
aatgaacacttatacagcatttctg

SEQ ID NO: 2301866 - DNA, 25 bp, Homo sapien
aagctcgtgagtgcattctggtgaa

SEQ ID NO: 2301867 - DNA, 25 bp, Homo sapien
ggcttagggcatcaatatctcttag

SEQ ID NO: 2301868 - DNA, 25 bp, Homo sapien
aaataagaaggaaatgatgtaaatt

SEQ ID NO: 2301869 - DNA, 25 bp, Homo sapien
tccaaatgtgtcaaactcttcagag

SEQ ID NO: 2301870 - DNA, 25 bp, Homo sapien
ttattactgtgcaagtccaaatgtg

SEQ ID NO: 2301871 - DNA, 25 bp, Homo sapien
caaataagaaggaaatgatgtaaat

SEQ ID NO: 2301872 - DNA, 25 bp, Homo sapien
cagagttggacatttcactgtagga

SEQ ID NO: 2301873 - DNA, 25 bp, Homo sapien
catcagtgaggttctcaggtacaaa

SEQ ID NO: 2301874 - DNA, 25 bp, Homo sapien
catttcgagagacatcaagattagc

SEQ ID NO: 2301875 - DNA, 25 bp, Homo sapien
tgtaggatctaaaaccactgagggt

SEQ ID NO: 2301876 - DNA, 25 bp, Homo sapien
caagggggagcatatccctgatatt

SEQ ID NO: 2301877 - DNA, 25 bp, Homo sapien
gaaagttctctgatagggatgaaat

SEQ ID NO: 2301878 - DNA, 25 bp, Homo sapien
aactctccactttaggacaagcctc

SEQ ID NO: 2301879 - DNA, 25 bp, Homo sapien
tttaggacaagcctcaagaaagttc

SEQ ID NO: 2301880 - DNA, 25 bp, Homo sapien
tgacacactgaccatacacaagctt

SEQ ID NO: 2301881 - DNA, 25 bp, Homo sapien
caatttcctcaattgggcagaggtc

SEQ ID NO: 2301882 - DNA, 25 bp, Homo sapien
gaaatgctttcctgactccacagtc

SEQ ID NO: 2301883 - DNA, 25 bp, Homo sapien
gattcccctgaggtaccacagagca

SEQ ID NO: 2301884 - DNA, 25 bp, Homo sapien
ttttaggattgtcatagaaggaggc

SEQ ID NO: 2301885 - DNA, 25 bp, Homo sapien
taggattgtcatagaaggaggcaag

SEQ ID NO: 2301886 - DNA, 25 bp, Homo sapien
taattttaggattgtcatagaagga

SEQ ID NO: 2301887 - DNA, 25 bp, Homo sapien
ggattgtcatagaaggaggcaagaa

SEQ ID NO: 2301888 - DNA, 25 bp, Homo sapien
gcgggacctggtaggtactgaatat

SEQ ID NO: 2301889 - DNA, 25 bp, Homo sapien
tatggctaaataagagttcccttaa

SEQ ID NO: 2301890 - DNA, 25 bp, Homo sapien
cactcaagtccaagatgctgatctg

SEQ ID NO: 2301891 - DNA, 25 bp, Homo sapien
ttcaaagatttccagtgtgcgggac

SEQ ID NO: 2301892 - DNA, 25 bp, Homo sapien
ccatttaccatagggtaggcttaca

SEQ ID NO: 2301893 - DNA, 25 bp, Homo sapien
tagtggaagtattaaggctactacc

SEQ ID NO: 2301894 - DNA, 25 bp, Homo sapien
gagatttggtgatacaatgacacac

SEQ ID NO: 2301895 - DNA, 25 bp, Homo sapien
taacaggaagcttctagtttcatga

SEQ ID NO: 2301896 - DNA, 25 bp, Homo sapien
ttcaagacagccaatctcaggagga

SEQ ID NO: 2301897 - DNA, 25 bp, Homo sapien
tgtcagattttcaagacagccaatc

SEQ ID NO: 2301898 - DNA, 25 bp, Homo sapien
tccagagatgtcagattttcaagac

SEQ ID NO: 2301899 - DNA, 25 bp, Homo sapien
gacatccagagatgtcagattttca

SEQ ID NO: 2301900 - DNA, 25 bp, Homo sapien
ccatttcattgggaaaggatcttag

SEQ ID NO: 2301901 - DNA, 25 bp, Homo sapien
ggctttacatcctatatgtttaaaa

SEQ ID NO: 2301902 - DNA, 25 bp, Homo sapien
ttatgatgtctttggctttacatcc

SEQ ID NO: 2301903 - DNA, 25 bp, Homo sapien
aatcaaagttaagatgcagttcatc

SEQ ID NO: 2301904 - DNA, 25 bp, Homo sapien
tgctgcaataaggtggttttaccac

SEQ ID NO: 2301905 - DNA, 25 bp, Homo sapien
tgtctcttatttggataggccagtc

SEQ ID NO: 2301906 - DNA, 25 bp, Homo sapien
tttcattcggttataaggcacagcc

SEQ ID NO: 2301907 - DNA, 25 bp, Homo sapien
cacacatttaggacgagatctctct

SEQ ID NO: 2301908 - DNA, 25 bp, Homo sapien
ctttatattgaagagccaaggcttc

SEQ ID NO: 2301909 - DNA, 25 bp, Homo sapien
tgagtactatagaattcctcacgac

SEQ ID NO: 2301910 - DNA, 25 bp, Homo sapien
gcttcatggcatcaacttcagcctg

SEQ ID NO: 2301911 - DNA, 25 bp, Homo sapien
aatgctcgctgcgtcataaaatggg

SEQ ID NO: 2301912 - DNA, 25 bp, Homo sapien
caaactgggcctgctcacattcctg

SEQ ID NO: 2301913 - DNA, 25 bp, Homo sapien
ctgttgatatttgctttccgtgaca

SEQ ID NO: 2301914 - DNA, 25 bp, Homo sapien
agacacaaaaccctcttgtgtttgc

SEQ ID NO: 2301915 - DNA, 25 bp, Homo sapien
tcttgtgtttgctttcaaactgggc

SEQ ID NO: 2301916 - DNA, 25 bp, Homo sapien
tcagattcctcggtggcattcacaa

SEQ ID NO: 2301917 - DNA, 25 bp, Homo sapien
ccaaatgtgtgccaacgagaatcac

SEQ ID NO: 2301918 - DNA, 25 bp, Homo sapien
caaagtggtaatctcgtatggcagg

SEQ ID NO: 2301919 - DNA, 25 bp, Homo sapien
gcagggaaccctcgcttattcagga

SEQ ID NO: 2301920 - DNA, 25 bp, Homo sapien
tctacatagcagtctggaatcagct

SEQ ID NO: 2301921 - DNA, 25 bp, Homo sapien
aaagtgaactgcgtgaggaagctca

SEQ ID NO: 2301922 - DNA, 25 bp, Homo sapien
tgtccaacaacaagctgatctcgga

SEQ ID NO: 2301923 - DNA, 25 bp, Homo sapien
caattggcacatttttacgctccga

SEQ ID NO: 2301924 - DNA, 25 bp, Homo sapien
tacagctgagctttgaaaataagga

SEQ ID NO: 2301925 - DNA, 25 bp, Homo sapien
cagctgagctttgaaaataaggaac

SEQ ID NO: 2301926 - DNA, 25 bp, Homo sapien
tgagctttgaaaataaggaacgaaa

SEQ ID NO: 2301927 - DNA, 25 bp, Homo sapien
gctgagctttgaaaataaggaacga

SEQ ID NO: 2301928 - DNA, 25 bp, Homo sapien
ttacaaagccacttgggttccacaa

SEQ ID NO: 2301929 - DNA, 25 bp, Homo sapien
tgtgccatgattttacaaagccact

SEQ ID NO: 2301930 - DNA, 25 bp, Homo sapien
tttacaaagccacttgggttccaca

SEQ ID NO: 2301931 - DNA, 25 bp, Homo sapien
gccatgattttacaaagccacttgg

SEQ ID NO: 2301932 - DNA, 25 bp, Homo sapien
ttccacatctctacgcgaaataatg

SEQ ID NO: 2301933 - DNA, 25 bp, Homo sapien
tgcttggaaccagcaaatattcttc

SEQ ID NO: 2301934 - DNA, 25 bp, Homo sapien
tctcctattggcaaagcaatctgga

SEQ ID NO: 2301935 - DNA, 25 bp, Homo sapien
tacgcgaaataatgcccttagggtg

SEQ ID NO: 2301936 - DNA, 25 bp, Homo sapien
tgtaaggtgaaatctcaagtaatcg

SEQ ID NO: 2301937 - DNA, 25 bp, Homo sapien
aaataaggcatttcatatagtcgga

SEQ ID NO: 2301938 - DNA, 25 bp, Homo sapien
gggaagctctatcacaggcctgtgg

SEQ ID NO: 2301939 - DNA, 25 bp, Homo sapien
ctctccctgaaagcatgtaaggtga

SEQ ID NO: 2301940 - DNA, 25 bp, Homo sapien
aaatctactgcacacaacacaagtg

SEQ ID NO: 2301941 - DNA, 25 bp, Homo sapien
gggttgttactgatatgagtcctca

SEQ ID NO: 2301942 - DNA, 25 bp, Homo sapien
gagttaaatcccctgcacattaaga

SEQ ID NO: 2301943 - DNA, 25 bp, Homo sapien
cagtttaatatgctcgacagatgaa

SEQ ID NO: 2301944 - DNA, 25 bp, Homo sapien
gaaactctctggatgattgtctaag

SEQ ID NO: 2301945 - DNA, 25 bp, Homo sapien
taagcttcaggagaccaatttaagt

SEQ ID NO: 2301946 - DNA, 25 bp, Homo sapien
taagacttcagatcctaccagacaa

SEQ ID NO: 2301947 - DNA, 25 bp, Homo sapien
agtaaatgccttgtcgccaatacat

SEQ ID NO: 2301948 - DNA, 25 bp, Homo sapien
gaaaacattcaaattgatttcctta

SEQ ID NO: 2301949 - DNA, 25 bp, Homo sapien
aattgaaaacattcaaattgatttc

SEQ ID NO: 2301950 - DNA, 25 bp, Homo sapien
ttgcaattgaaaacattcaaattga

SEQ ID NO: 2301951 - DNA, 25 bp, Homo sapien
ttgaaaacattcaaattgatttcct

SEQ ID NO: 2301952 - DNA, 25 bp, Homo sapien
tgtggtccacaacttggcccaaaag

SEQ ID NO: 2301953 - DNA, 25 bp, Homo sapien
tccagcaacccaggaaaccattctt

SEQ ID NO: 2301954 - DNA, 25 bp, Homo sapien
cttcatcaagtcatcaagtaagatt

SEQ ID NO: 2301955 - DNA, 25 bp, Homo sapien
catgagagaatcaatgtggtccaca

SEQ ID NO: 2301956 - DNA, 25 bp, Homo sapien
gcaatctgagatattggaatggtga

SEQ ID NO: 2301957 - DNA, 25 bp, Homo sapien
caggtcagccaaaatcaagtcaggg

SEQ ID NO: 2301958 - DNA, 25 bp, Homo sapien
ggagaaactctggagcttgttcaaa

SEQ ID NO: 2301959 - DNA, 25 bp, Homo sapien
aatggtgagccttggttgatctgga

SEQ ID NO: 2301960 - DNA, 25 bp, Homo sapien
tgcgcccggcagagatttctaattt

SEQ ID NO: 2301961 - DNA, 25 bp, Homo sapien
ccactgcgcccggcagagatttcta

SEQ ID NO: 2301962 - DNA, 25 bp, Homo sapien
ggactacagccgcccacaccaccac

SEQ ID NO: 2301963 - DNA, 25 bp, Homo sapien
tacagccgcccacaccaccacgcct

SEQ ID NO: 2301964 - DNA, 25 bp, Homo sapien
cgtggactgttactctccaccgaca

SEQ ID NO: 2301965 - DNA, 25 bp, Homo sapien
tgccttgaaatgtagtcacttgatg

SEQ ID NO: 2301966 - DNA, 25 bp, Homo sapien
tatggttctcatatagtgccttgaa

SEQ ID NO: 2301967 - DNA, 25 bp, Homo sapien
gacatttagcaaatcctgtttgtac

SEQ ID NO: 2301968 - DNA, 25 bp, Homo sapien
ataggctgctcggtaaactgatcca

SEQ ID NO: 2301969 - DNA, 25 bp, Homo sapien
ttcataggctgctcggtaaactgat

SEQ ID NO: 2301970 - DNA, 25 bp, Homo sapien
ctccttcataggctgctcggtaaac

SEQ ID NO: 2301971 - DNA, 25 bp, Homo sapien
ggctgctcggtaaactgatccaaaa

SEQ ID NO: 2301972 - DNA, 25 bp, Homo sapien
caggtatggtctcagcagtgatccc

SEQ ID NO: 2301973 - DNA, 25 bp, Homo sapien
tgatccctgcccatgtaacctaaag

SEQ ID NO: 2301974 - DNA, 25 bp, Homo sapien
taacttgaacaagcaaacctacatg

SEQ ID NO: 2301975 - DNA, 25 bp, Homo sapien
acaccctgatctagatactctgcag

SEQ ID NO: 2301976 - DNA, 25 bp, Homo sapien
ctgccagcaaagatatcaaactggg

SEQ ID NO: 2301977 - DNA, 25 bp, Homo sapien
gccagcaaagatatcaaactggggt

SEQ ID NO: 2301978 - DNA, 25 bp, Homo sapien
caaagatatcaaactggggtggtgg

SEQ ID NO: 2301979 - DNA, 25 bp, Homo sapien
agcaaagatatcaaactggggtggt

SEQ ID NO: 2301980 - DNA, 25 bp, Homo sapien
tcctgctgaagcaggcgatccaagg

SEQ ID NO: 2301981 - DNA, 25 bp, Homo sapien
cgtggagtgcaatcctgtgctgtag

SEQ ID NO: 2301982 - DNA, 25 bp, Homo sapien
ggaacccttggaggctaactccatc

SEQ ID NO: 2301983 - DNA, 25 bp, Homo sapien
tcaaaccatcagctacgtggagtgc

SEQ ID NO: 2301984 - DNA, 25 bp, Homo sapien
aagcttgctctggatgcagggttag

SEQ ID NO: 2301985 - DNA, 25 bp, Homo sapien
cctctccaaagcttgctctggatgc

SEQ ID NO: 2301986 - DNA, 25 bp, Homo sapien
tccaaagcttgctctggatgcaggg

SEQ ID NO: 2301987 - DNA, 25 bp, Homo sapien
gctccctctccaaagcttgctctgg

SEQ ID NO: 2301988 - DNA, 25 bp, Homo sapien
tgatggcagcattgggatacagtgt

SEQ ID NO: 2301989 - DNA, 25 bp, Homo sapien
tggtgtgccctctgatgtttttatc

SEQ ID NO: 2301990 - DNA, 25 bp, Homo sapien
tctacagcagtactgagcaatgccg

SEQ ID NO: 2301991 - DNA, 25 bp, Homo sapien
gcaatgccgtagtcagcaatctttg

SEQ ID NO: 2301992 - DNA, 25 bp, Homo sapien
gagagatccactgtccaattaagca

SEQ ID NO: 2301993 - DNA, 25 bp, Homo sapien
gcagagctcaagtacaagcgcacag

SEQ ID NO: 2301994 - DNA, 25 bp, Homo sapien
tagctggcctagaccacagagtgaa

SEQ ID NO: 2301995 - DNA, 25 bp, Homo sapien
tacaaagtactaagcagcctgtgag

SEQ ID NO: 2301996 - DNA, 25 bp, Homo sapien
cctctactattctacctccagttgt

SEQ ID NO: 2301997 - DNA, 25 bp, Homo sapien
taaatgacatttcctctggcaactt

SEQ ID NO: 2301998 - DNA, 25 bp, Homo sapien
tattctacctccagttgtcaaaatg

SEQ ID NO: 2301999 - DNA, 25 bp, Homo sapien
aatgaataaacatcagcctgttggt

SEQ ID NO: 2302000 - DNA, 25 bp, Homo sapien
taattaatttctcaaccataggcca

SEQ ID NO: 2302001 - DNA, 25 bp, Homo sapien
gcagaagtaggcctttcttgaggat

SEQ ID NO: 2302002 - DNA, 25 bp, Homo sapien
ttaatttctcaaccataggccatgg

SEQ ID NO: 2302003 - DNA, 25 bp, Homo sapien
ggccatggggcacaaccatattctt

SEQ ID NO: 2302004 - DNA, 25 bp, Homo sapien
gagagctgtcctctgtcggtgtgcc

SEQ ID NO: 2302005 - DNA, 25 bp, Homo sapien
tgcattcaacaattacgtttttagg

SEQ ID NO: 2302006 - DNA, 25 bp, Homo sapien
taataaaatgcgtctcgtcagacag

SEQ ID NO: 2302007 - DNA, 25 bp, Homo sapien
agtgtatccttcagtatttaagtca

SEQ ID NO: 2302008 - DNA, 25 bp, Homo sapien
gaagatgcaccaaggctaagcacaa

SEQ ID NO: 2302009 - DNA, 25 bp, Homo sapien
ccaggagagtaccagactgtgtccc

SEQ ID NO: 2302010 - DNA, 25 bp, Homo sapien
tcccatcttcggtattgatgaccag

SEQ ID NO: 2302011 - DNA, 25 bp, Homo sapien
gacagaatcagtcatcttttctagg

SEQ ID NO: 2302012 - DNA, 25 bp, Homo sapien
taaagagatagagccacagttgagg

SEQ ID NO: 2302013 - DNA, 25 bp, Homo sapien
tgcacacaattcagtcgtttaaaag

SEQ ID NO: 2302014 - DNA, 25 bp, Homo sapien
gctggtaggcctgaataaatggttg

SEQ ID NO: 2302015 - DNA, 25 bp, Homo sapien
gaagaggccctacaaagattcattg

SEQ ID NO: 2302016 - DNA, 25 bp, Homo sapien
tgtatgttgactaaaatggccttaa

SEQ ID NO: 2302017 - DNA, 25 bp, Homo sapien
tattaaactttagatagacttctca

SEQ ID NO: 2302018 - DNA, 25 bp, Homo sapien
ttattaaactttagatagacttctc

SEQ ID NO: 2302019 - DNA, 25 bp, Homo sapien
aacatgtatgttgactaaaatggcc

SEQ ID NO: 2302020 - DNA, 25 bp, Homo sapien
catcagcggttccaaccaaaagaaa

SEQ ID NO: 2302021 - DNA, 25 bp, Homo sapien
gctaacttgccatcagcggttccaa

SEQ ID NO: 2302022 - DNA, 25 bp, Homo sapien
tgccatcagcggttccaaccaaaag

SEQ ID NO: 2302023 - DNA, 25 bp, Homo sapien
tcaaaaattgctaacttgccatcag

SEQ ID NO: 2302024 - DNA, 25 bp, Homo sapien
tctgcctcagttatgtacaaattga

SEQ ID NO: 2302025 - DNA, 25 bp, Homo sapien
tcccaatattatcaatcagatgtca

SEQ ID NO: 2302026 - DNA, 25 bp, Homo sapien
aatttagatgtagaatgcattcaac

SEQ ID NO: 2302027 - DNA, 25 bp, Homo sapien
aaatatacagtcaatcagcaagtat

SEQ ID NO: 2302028 - DNA, 25 bp, Homo sapien
tttgtggattcactcaaacacatca

SEQ ID NO: 2302029 - DNA, 25 bp, Homo sapien
tggcttgttcttgtctcaatgagtt

SEQ ID NO: 2302030 - DNA, 25 bp, Homo sapien
catcaatggagtactgacatttcct

SEQ ID NO: 2302031 - DNA, 25 bp, Homo sapien
cacattacatttctttccgttgaat

SEQ ID NO: 2302032 - DNA, 25 bp, Homo sapien
caatatagagagcagtgtctaccac

SEQ ID NO: 2302033 - DNA, 25 bp, Homo sapien
cttaaaaagtgcacgcagtctatta

SEQ ID NO: 2302034 - DNA, 25 bp, Homo sapien
gcacgcagtctattagtccacagag

SEQ ID NO: 2302035 - DNA, 25 bp, Homo sapien
caacagggctattttgcttagcaat

SEQ ID NO: 2302036 - DNA, 25 bp, Homo sapien
ttagcgcctcggtcagtccattgca

SEQ ID NO: 2302037 - DNA, 25 bp, Homo sapien
ctctttttctttagagcagataatc

SEQ ID NO: 2302038 - DNA, 25 bp, Homo sapien
ggtcttgatccccactccttagcgc

SEQ ID NO: 2302039 - DNA, 25 bp, Homo sapien
aggctgcatcagactaagcactatg

SEQ ID NO: 2302040 - DNA, 25 bp, Homo sapien
taagtcgacgagttgaaagatccag

SEQ ID NO: 2302041 - DNA, 25 bp, Homo sapien
cctatccaaagagcagtgttcttct

SEQ ID NO: 2302042 - DNA, 25 bp, Homo sapien
aaagatccaggagtaaaatatggcc

SEQ ID NO: 2302043 - DNA, 25 bp, Homo sapien
ctcctccagttcctatccaaagagc

SEQ ID NO: 2302044 - DNA, 25 bp, Homo sapien
tagctgtgctgtcatcatgactctg

SEQ ID NO: 2302045 - DNA, 25 bp, Homo sapien
gctgtgctgtcatcatgactctgac

SEQ ID NO: 2302046 - DNA, 25 bp, Homo sapien
agctgtgctgtcatcatgactctga

SEQ ID NO: 2302047 - DNA, 25 bp, Homo sapien
ctagctgtgctgtcatcatgactct

SEQ ID NO: 2302048 - DNA, 25 bp, Homo sapien
tactgagacaacctattgagagacc

SEQ ID NO: 2302049 - DNA, 25 bp, Homo sapien
tatgtaggccctaggctagatcctg

SEQ ID NO: 2302050 - DNA, 25 bp, Homo sapien
gattctttaacaagctgggaggcta

SEQ ID NO: 2302051 - DNA, 25 bp, Homo sapien
taagcaagctatttgggtcccaaag

SEQ ID NO: 2302052 - DNA, 25 bp, Homo sapien
ctgttaaaactatatattaaactgg

SEQ ID NO: 2302053 - DNA, 25 bp, Homo sapien
tgttaaaactatatattaaactggc

SEQ ID NO: 2302054 - DNA, 25 bp, Homo sapien
tcagtatttttccggttgtagccca

SEQ ID NO: 2302055 - DNA, 25 bp, Homo sapien
tttccggttgtagcccaataccagc

SEQ ID NO: 2302056 - DNA, 25 bp, Homo sapien
ttccggttgtagcccaataccagca

SEQ ID NO: 2302057 - DNA, 25 bp, Homo sapien
tccggttgtagcccaataccagcat

SEQ ID NO: 2302058 - DNA, 25 bp, Homo sapien
tcatgtttcaaagatccatcataaa

SEQ ID NO: 2302059 - DNA, 25 bp, Homo sapien
cacatttcgtttaaggttgagctag

SEQ ID NO: 2302060 - DNA, 25 bp, Homo sapien
tagtgattgacacctctacttcagc

SEQ ID NO: 2302061 - DNA, 25 bp, Homo sapien
ccatcattcacatcattgccctgtt

SEQ ID NO: 2302062 - DNA, 25 bp, Homo sapien
cccaaacggtcaagcaagattgtat

SEQ ID NO: 2302063 - DNA, 25 bp, Homo sapien
tgtggaagattgatgtcccaaacgg

SEQ ID NO: 2302064 - DNA, 25 bp, Homo sapien
tttctaaattttgcacttcatgtgg

SEQ ID NO: 2302065 - DNA, 25 bp, Homo sapien
gatgttcgtctcattttttcagcta

SEQ ID NO: 2302066 - DNA, 25 bp, Homo sapien
tacacacgagctatttcaaaaaatg

SEQ ID NO: 2302067 - DNA, 25 bp, Homo sapien
gaaaaatcgacaagcaatagtcctg

SEQ ID NO: 2302068 - DNA, 25 bp, Homo sapien
ggaatacattacatgggaaactgtc

SEQ ID NO: 2302069 - DNA, 25 bp, Homo sapien
cattataccgtgcagatttctagaa

SEQ ID NO: 2302070 - DNA, 25 bp, Homo sapien
tatttggccctgatactcctattgt

SEQ ID NO: 2302071 - DNA, 25 bp, Homo sapien
cctcatggtcttggtaggagctgtg

SEQ ID NO: 2302072 - DNA, 25 bp, Homo sapien
tgtaagatgcactgtttgcaacagc

SEQ ID NO: 2302073 - DNA, 25 bp, Homo sapien
tgtcctatcacagggaattatctga

SEQ ID NO: 2302074 - DNA, 25 bp, Homo sapien
tcttttctttatcatacacgacttc

SEQ ID NO: 2302075 - DNA, 25 bp, Homo sapien
catacacgacttcattgtgaagaag

SEQ ID NO: 2302076 - DNA, 25 bp, Homo sapien
tatcatacacgacttcattgtgaag

SEQ ID NO: 2302077 - DNA, 25 bp, Homo sapien
tctttatcatacacgacttcattgt

SEQ ID NO: 2302078 - DNA, 25 bp, Homo sapien
accaaatccagctcataccaaaccc

SEQ ID NO: 2302079 - DNA, 25 bp, Homo sapien
ggaccaaatccagctcataccaaac

SEQ ID NO: 2302080 - DNA, 25 bp, Homo sapien
tatgacatcttctatcttggaccaa

SEQ ID NO: 2302081 - DNA, 25 bp, Homo sapien
tggaccaaatccagctcataccaaa

SEQ ID NO: 2302082 - DNA, 25 bp, Homo sapien
cacaaccaagtaccataagatcaac

SEQ ID NO: 2302083 - DNA, 25 bp, Homo sapien
ccaaagtgccacaaccaagtaccat

SEQ ID NO: 2302084 - DNA, 25 bp, Homo sapien
ttgaagaagcaccaaagtgccacaa

SEQ ID NO: 2302085 - DNA, 25 bp, Homo sapien
gaagcaccaaagtgccacaaccaag

SEQ ID NO: 2302086 - DNA, 25 bp, Homo sapien
ttgtcggtaaagtaaggcttccaca

SEQ ID NO: 2302087 - DNA, 25 bp, Homo sapien
tgtcggtaaagtaaggcttccacat

SEQ ID NO: 2302088 - DNA, 25 bp, Homo sapien
atatgttctcataaattgttgtcaa

SEQ ID NO: 2302089 - DNA, 25 bp, Homo sapien
catatgttctcataaattgttgtca

SEQ ID NO: 2302090 - DNA, 25 bp, Homo sapien
tgttctcataaattgttgtcaaaac

SEQ ID NO: 2302091 - DNA, 25 bp, Homo sapien
tatgttctcataaattgttgtcaaa

SEQ ID NO: 2302092 - DNA, 25 bp, Homo sapien
taaacccaaactgaacgcattattc

SEQ ID NO: 2302093 - DNA, 25 bp, Homo sapien
tatctatgctctgtaacctttaaat

SEQ ID NO: 2302094 - DNA, 25 bp, Homo sapien
aaataaatagtcaaggcacatggtc

SEQ ID NO: 2302095 - DNA, 25 bp, Homo sapien
tatttggagacttacaggattgtgc

SEQ ID NO: 2302096 - DNA, 25 bp, Homo sapien
ctgatctgcttgctgctattttacc

SEQ ID NO: 2302097 - DNA, 25 bp, Homo sapien
gatctgcttgctgctattttaccat

SEQ ID NO: 2302098 - DNA, 25 bp, Homo sapien
tgatctgcttgctgctattttacca

SEQ ID NO: 2302099 - DNA, 25 bp, Homo sapien
tcccagcatcctgacgttgtctgga

SEQ ID NO: 2302100 - DNA, 25 bp, Homo sapien
catcctgacgttgtctggacttgtc

SEQ ID NO: 2302101 - DNA, 25 bp, Homo sapien
tcaccagaggatgaactaccataag

SEQ ID NO: 2302102 - DNA, 25 bp, Homo sapien
caccagaggatgaactaccataaga

SEQ ID NO: 2302103 - DNA, 25 bp, Homo sapien
caccggaggatgaactactgttaaa

SEQ ID NO: 2302104 - DNA, 25 bp, Homo sapien
ccaagtcctaagctaaagaatggct

SEQ ID NO: 2302105 - DNA, 25 bp, Homo sapien
gtgtcttctgactttgaacctccag

SEQ ID NO: 2302106 - DNA, 25 bp, Homo sapien
gactgtctccggacttgtcttcagc

SEQ ID NO: 2302107 - DNA, 25 bp, Homo sapien
tcaccagaggatgaactaccataaa

SEQ ID NO: 2302108 - DNA, 25 bp, Homo sapien
tcctctcctgtagcaccaaattcaa

SEQ ID NO: 2302109 - DNA, 25 bp, Homo sapien
cagcatcccagcgttctctggactt

SEQ ID NO: 2302110 - DNA, 25 bp, Homo sapien
atcccagcgttctctggacttgtct

SEQ ID NO: 2302111 - DNA, 25 bp, Homo sapien
gactatggtttcacccccagcagat

SEQ ID NO: 2302112 - DNA, 25 bp, Homo sapien
ccagcagatccactgcctctagttt

SEQ ID NO: 2302113 - DNA, 25 bp, Homo sapien
ctgcatcaggtccaaagactatggt

SEQ ID NO: 2302114 - DNA, 25 bp, Homo sapien
tcagctttactgacttccaatccct

SEQ ID NO: 2302115 - DNA, 25 bp, Homo sapien
caaatgaattcgaatcagaaacttc

SEQ ID NO: 2302116 - DNA, 25 bp, Homo sapien
aaatgcagcatcacctttccctgct

SEQ ID NO: 2302117 - DNA, 25 bp, Homo sapien
tactaatgccagtgtcaccaaatga

SEQ ID NO: 2302118 - DNA, 25 bp, Homo sapien
ttcaaaccagaagaaccagttccaa

SEQ ID NO: 2302119 - DNA, 25 bp, Homo sapien
ctcagcagatacactgccactcatt

SEQ ID NO: 2302120 - DNA, 25 bp, Homo sapien
cttgaatcagatccaaaacctttga

SEQ ID NO: 2302121 - DNA, 25 bp, Homo sapien
tatcgaatttagagagccaccacca

SEQ ID NO: 2302122 - DNA, 25 bp, Homo sapien
aaatccctcttgaccagaatcccat

SEQ ID NO: 2302123 - DNA, 25 bp, Homo sapien
ttcactaagctcattaccaccaaat

SEQ ID NO: 2302124 - DNA, 25 bp, Homo sapien
aattcaagagactcaagcattccca

SEQ ID NO: 2302125 - DNA, 25 bp, Homo sapien
tccttgaaccagaatacttaaaatc

SEQ ID NO: 2302126 - DNA, 25 bp, Homo sapien
gattctctagtaacttttattccat

SEQ ID NO: 2302127 - DNA, 25 bp, Homo sapien
ctcattccaaccagatccacttgtt

SEQ ID NO: 2302128 - DNA, 25 bp, Homo sapien
gctcattccaaccagatccacttgt

SEQ ID NO: 2302129 - DNA, 25 bp, Homo sapien
tgctctgctcattccaaccagatcc

SEQ ID NO: 2302130 - DNA, 25 bp, Homo sapien
tgctcattccaaccagatccacttg

SEQ ID NO: 2302131 - DNA, 25 bp, Homo sapien
agctccacccttcgtttctccaagt

SEQ ID NO: 2302132 - DNA, 25 bp, Homo sapien
cagaatctctaaagttaaattcagc

SEQ ID NO: 2302133 - DNA, 25 bp, Homo sapien
tcaaaatctttactactattgccat

SEQ ID NO: 2302134 - DNA, 25 bp, Homo sapien
tccacccttcgtttctccaagtcca

SEQ ID NO: 2302135 - DNA, 25 bp, Homo sapien
tctattcccaccagttctactgagt

SEQ ID NO: 2302136 - DNA, 25 bp, Homo sapien
gttgatcagatgaccccaatatgac

SEQ ID NO: 2302137 - DNA, 25 bp, Homo sapien
tgagtcactgacatcagatccagga

SEQ ID NO: 2302138 - DNA, 25 bp, Homo sapien
tcagagataccactagaattttcaa

SEQ ID NO: 2302139 - DNA, 25 bp, Homo sapien
cactaaggccagtttcaccaaattc

SEQ ID NO: 2302140 - DNA, 25 bp, Homo sapien
accactaaggccagtttcaccaaat

SEQ ID NO: 2302141 - DNA, 25 bp, Homo sapien
ctgaaccactaaggccagtttcacc

SEQ ID NO: 2302142 - DNA, 25 bp, Homo sapien
ctaaggccagtttcaccaaattcat

SEQ ID NO: 2302143 - DNA, 25 bp, Homo sapien
ggaataagatccagtaacattgctt

SEQ ID NO: 2302144 - DNA, 25 bp, Homo sapien
taggaataagatccagtaacattgc

SEQ ID NO: 2302145 - DNA, 25 bp, Homo sapien
ccataggaataagatccagtaacat

SEQ ID NO: 2302146 - DNA, 25 bp, Homo sapien
aataagatccagtaacattgcttcc

SEQ ID NO: 2302147 - DNA, 25 bp, Homo sapien
tcttctcagcaatgggcttgcaaag

SEQ ID NO: 2302148 - DNA, 25 bp, Homo sapien
attaaagccgccaagtccagatttg

SEQ ID NO: 2302149 - DNA, 25 bp, Homo sapien
ttcacagctgtgaaaccggttccac

SEQ ID NO: 2302150 - DNA, 25 bp, Homo sapien
agtttgagaccaacagttcagctgc

SEQ ID NO: 2302151 - DNA, 25 bp, Homo sapien
cattttactggaagtgatccactgc

SEQ ID NO: 2302152 - DNA, 25 bp, Homo sapien
gcctactttagtggttcccaggaca

SEQ ID NO: 2302153 - DNA, 25 bp, Homo sapien
tgatgtccaaagtttaagaacgacc

SEQ ID NO: 2302154 - DNA, 25 bp, Homo sapien
gatagtcaatcctgtgtcaggtcaa

SEQ ID NO: 2302155 - DNA, 25 bp, Homo sapien
caataattgcatttgtttctgagta

SEQ ID NO: 2302156 - DNA, 25 bp, Homo sapien
gtttctgagtattttggagttgctt

SEQ ID NO: 2302157 - DNA, 25 bp, Homo sapien
tttgtttctgagtattttggagttg

SEQ ID NO: 2302158 - DNA, 25 bp, Homo sapien
aataattgcatttgtttctgagtat

SEQ ID NO: 2302159 - DNA, 25 bp, Homo sapien
cctccagattcaatgcagtgacggc

SEQ ID NO: 2302160 - DNA, 25 bp, Homo sapien
gatgcggccgttgaaagatttatat

SEQ ID NO: 2302161 - DNA, 25 bp, Homo sapien
agtgtatgggcatgaagattcaaag

SEQ ID NO: 2302162 - DNA, 25 bp, Homo sapien
tagagacgtcgttattgtcaattag

SEQ ID NO: 2302163 - DNA, 25 bp, Homo sapien
tttctccattaactaaaatggtgtc

SEQ ID NO: 2302164 - DNA, 25 bp, Homo sapien
ttctccattaactaaaatggtgtca

SEQ ID NO: 2302165 - DNA, 25 bp, Homo sapien
tctccattaactaaaatggtgtcac

SEQ ID NO: 2302166 - DNA, 25 bp, Homo sapien
ctttctccattaactaaaatggtgt

SEQ ID NO: 2302167 - DNA, 25 bp, Homo sapien
cattaaagtcaggattcctctacgg

SEQ ID NO: 2302168 - DNA, 25 bp, Homo sapien
ccacattaaagtcaggattcctcta

SEQ ID NO: 2302169 - DNA, 25 bp, Homo sapien
gagagtttgttatttttgtcccaca

SEQ ID NO: 2302170 - DNA, 25 bp, Homo sapien
tcccacattaaagtcaggattcctc

SEQ ID NO: 2302171 - DNA, 25 bp, Homo sapien
tggagtgctgttgaagttaccacaa

SEQ ID NO: 2302172 - DNA, 25 bp, Homo sapien
tgttgaagttaccacaaagaccaca

SEQ ID NO: 2302173 - DNA, 25 bp, Homo sapien
gtgctgttgaagttaccacaaagac

SEQ ID NO: 2302174 - DNA, 25 bp, Homo sapien
aagaccacaagttggatactgcttg

SEQ ID NO: 2302175 - DNA, 25 bp, Homo sapien
caaacttcatagcttttaccaacag

SEQ ID NO: 2302176 - DNA, 25 bp, Homo sapien
tagcttttaccaacagcattgggac

SEQ ID NO: 2302177 - DNA, 25 bp, Homo sapien
cagcattgggacaatcaccaggaat

SEQ ID NO: 2302178 - DNA, 25 bp, Homo sapien
aatcaccaggaattttactattggc

SEQ ID NO: 2302179 - DNA, 25 bp, Homo sapien
agtcatgggtatttgctctgggaac

SEQ ID NO: 2302180 - DNA, 25 bp, Homo sapien
ggaaacttggcatcttggattgcta

SEQ ID NO: 2302181 - DNA, 25 bp, Homo sapien
catagttcaaccaccatatagctgt

SEQ ID NO: 2302182 - DNA, 25 bp, Homo sapien
tgtcctttcttagtcggagtcatgg

SEQ ID NO: 2302183 - DNA, 25 bp, Homo sapien
cattggatagagcagcaacctttcc

SEQ ID NO: 2302184 - DNA, 25 bp, Homo sapien
cacagaggcgggacagttctgaata

SEQ ID NO: 2302185 - DNA, 25 bp, Homo sapien
ttcaaaggtgccaggaccatctgag

SEQ ID NO: 2302186 - DNA, 25 bp, Homo sapien
gagtcgcttcgccaggattcaaagg

SEQ ID NO: 2302187 - DNA, 25 bp, Homo sapien
tggagggtccacattctttgtagat

SEQ ID NO: 2302188 - DNA, 25 bp, Homo sapien
gtgcagccgctcacacattcactgt

SEQ ID NO: 2302189 - DNA, 25 bp, Homo sapien
ccacattagaacaagttgcagggtt

SEQ ID NO: 2302190 - DNA, 25 bp, Homo sapien
tcactgtcttgaaaaggagccacat

SEQ ID NO: 2302191 - DNA, 25 bp, Homo sapien
caaggaccttctcggacttctcctg

SEQ ID NO: 2302192 - DNA, 25 bp, Homo sapien
tggattcacagggacattcagcttt

SEQ ID NO: 2302193 - DNA, 25 bp, Homo sapien
gatacactgttccactggattcaca

SEQ ID NO: 2302194 - DNA, 25 bp, Homo sapien
ctggctgatacactgttccactgga

SEQ ID NO: 2302195 - DNA, 25 bp, Homo sapien
tgcttcggtgcaagaccactttgca

SEQ ID NO: 2302196 - DNA, 25 bp, Homo sapien
catcttccagggcataatgcttcgg

SEQ ID NO: 2302197 - DNA, 25 bp, Homo sapien
gaaagttgtacttaacaccatcaaa

SEQ ID NO: 2302198 - DNA, 25 bp, Homo sapien
cagggcataatgcttcggtgcaaga

SEQ ID NO: 2302199 - DNA, 25 bp, Homo sapien
tatttaagcacgttcctgtctgacc

SEQ ID NO: 2302200 - DNA, 25 bp, Homo sapien
acttgggcacggacggagctcaaca

SEQ ID NO: 2302201 - DNA, 25 bp, Homo sapien
accacttgggcacggacggagctca

SEQ ID NO: 2302202 - DNA, 25 bp, Homo sapien
aattcaagagaagtgtaacgctatt

SEQ ID NO: 2302203 - DNA, 25 bp, Homo sapien
tcttgtcatttgtgactgttccatc

SEQ ID NO: 2302204 - DNA, 25 bp, Homo sapien
ccatcactgttgaatacgtatttgt

SEQ ID NO: 2302205 - DNA, 25 bp, Homo sapien
ctgaatagtaataaccttgatttct

SEQ ID NO: 2302206 - DNA, 25 bp, Homo sapien
taaccttgatttctaatcttgtcat

SEQ ID NO: 2302207 - DNA, 25 bp, Homo sapien
aaacatacaattgcatcacaggaac

SEQ ID NO: 2302208 - DNA, 25 bp, Homo sapien
gtatgaggaagatgcattgaatatc

SEQ ID NO: 2302209 - DNA, 25 bp, Homo sapien
tggttgggtggcatagaaacataca

SEQ ID NO: 2302210 - DNA, 25 bp, Homo sapien
gcatcacaggaacaatttgtatttg

SEQ ID NO: 2302211 - DNA, 25 bp, Homo sapien
gatgtcttctccaatatattctgac

SEQ ID NO: 2302212 - DNA, 25 bp, Homo sapien
tgctttgttgttgtaggaaccacag

SEQ ID NO: 2302213 - DNA, 25 bp, Homo sapien
caggacatcatttcccaagagttag

SEQ ID NO: 2302214 - DNA, 25 bp, Homo sapien
ccaatatattctgacttgacatgaa

SEQ ID NO: 2302215 - DNA, 25 bp, Homo sapien
ctcatgatagggtttagggttcaca

SEQ ID NO: 2302216 - DNA, 25 bp, Homo sapien
aagccaaaggcccacttgaatcaag

SEQ ID NO: 2302217 - DNA, 25 bp, Homo sapien
caaaggcccacttgaatcaagaaga

SEQ ID NO: 2302218 - DNA, 25 bp, Homo sapien
tttagggttcacaattgggtggcag

SEQ ID NO: 2302219 - DNA, 25 bp, Homo sapien
tttgtcaatatcagcaaagtatttc

SEQ ID NO: 2302220 - DNA, 25 bp, Homo sapien
ctcaacaagaggtgttaatgttaga

SEQ ID NO: 2302221 - DNA, 25 bp, Homo sapien
tttctcaacaagaggtgttaatgtt

SEQ ID NO: 2302222 - DNA, 25 bp, Homo sapien
gtatttctcaacaagaggtgttaat

SEQ ID NO: 2302223 - DNA, 25 bp, Homo sapien
tcacatagttgcctaaaattgtaca

SEQ ID NO: 2302224 - DNA, 25 bp, Homo sapien
tcacaagtgcaagtatattttttgc

SEQ ID NO: 2302225 - DNA, 25 bp, Homo sapien
tcagcacacgctttcacatagttgc

SEQ ID NO: 2302226 - DNA, 25 bp, Homo sapien
cataggcagtcctgactgttttcac

SEQ ID NO: 2302227 - DNA, 25 bp, Homo sapien
tacattgtacttgaacactaggcca

SEQ ID NO: 2302228 - DNA, 25 bp, Homo sapien
tattctggtacattgcatcagggca

SEQ ID NO: 2302229 - DNA, 25 bp, Homo sapien
tttgcctggttgcatgacctcgtcg

SEQ ID NO: 2302230 - DNA, 25 bp, Homo sapien
ggatcggcaagaactattacaggct

SEQ ID NO: 2302231 - DNA, 25 bp, Homo sapien
gcaagtatacgtataatttccatac

SEQ ID NO: 2302232 - DNA, 25 bp, Homo sapien
aaaagaacgcagtctcttgatttca

SEQ ID NO: 2302233 - DNA, 25 bp, Homo sapien
tttcagtgtcatagcaagtatacgt

SEQ ID NO: 2302234 - DNA, 25 bp, Homo sapien
tttatctgaaaagaacgcagtctct

SEQ ID NO: 2302235 - DNA, 25 bp, Homo sapien
aagaagaattccatcccgacagacg

SEQ ID NO: 2302236 - DNA, 25 bp, Homo sapien
caaagaagaattccatcccgacaga

SEQ ID NO: 2302237 - DNA, 25 bp, Homo sapien
atgggaatctggcaaagaagaattc

SEQ ID NO: 2302238 - DNA, 25 bp, Homo sapien
gtagggttaaatcaatgggaatctg

SEQ ID NO: 2302239 - DNA, 25 bp, Homo sapien
aaaacaggtatgttccgagtactgc

SEQ ID NO: 2302240 - DNA, 25 bp, Homo sapien
ggtatgttccgagtactgcatgttc

SEQ ID NO: 2302241 - DNA, 25 bp, Homo sapien
cttgggatcactgcagtctacatac

SEQ ID NO: 2302242 - DNA, 25 bp, Homo sapien
gatcactgcagtctacatactcagc

SEQ ID NO: 2302243 - DNA, 25 bp, Homo sapien
gaatttcgaaccattccttctggac

SEQ ID NO: 2302244 - DNA, 25 bp, Homo sapien
tcattgcagccaacagaagtgacac

SEQ ID NO: 2302245 - DNA, 25 bp, Homo sapien
tattctcgtccaccaaaagagcatg

SEQ ID NO: 2302246 - DNA, 25 bp, Homo sapien
agcacccacgtttgcaaggcaagtt

SEQ ID NO: 2302247 - DNA, 25 bp, Homo sapien
tggcagagaccgtcaaaactgtaac

SEQ ID NO: 2302248 - DNA, 25 bp, Homo sapien
actccaagaccctttaatgcaggta

SEQ ID NO: 2302249 - DNA, 25 bp, Homo sapien
gaccttccccatagatgtggcagat

SEQ ID NO: 2302250 - DNA, 25 bp, Homo sapien
tcaaaagttctaacatgaccttccc

SEQ ID NO: 2302251 - DNA, 25 bp, Homo sapien
cactctccgttaaaatacgaaatgt

SEQ ID NO: 2302252 - DNA, 25 bp, Homo sapien
cacagcatggaacactctccgttaa

SEQ ID NO: 2302253 - DNA, 25 bp, Homo sapien
tttttcttgagcacgttagcccatc

SEQ ID NO: 2302254 - DNA, 25 bp, Homo sapien
tgtgccattttcatgaccacaataa

SEQ ID NO: 2302255 - DNA, 25 bp, Homo sapien
gccaacagtatgtatggagtatgca

SEQ ID NO: 2302256 - DNA, 25 bp, Homo sapien
tcagaattaagtacaggccaacagt

SEQ ID NO: 2302257 - DNA, 25 bp, Homo sapien
agatttgactgctgttactttaccg

SEQ ID NO: 2302258 - DNA, 25 bp, Homo sapien
ggatccagaataacagacagtcttg

SEQ ID NO: 2302259 - DNA, 25 bp, Homo sapien
actgaagagtatcttgttgtgaaat

SEQ ID NO: 2302260 - DNA, 25 bp, Homo sapien
gagtatcttgttgtgaaatcatcct

SEQ ID NO: 2302261 - DNA, 25 bp, Homo sapien
gaggatctcacatttccgcacagcc

SEQ ID NO: 2302262 - DNA, 25 bp, Homo sapien
ttgttgtgaaatcatccttgagatc

SEQ ID NO: 2302263 - DNA, 25 bp, Homo sapien
atagccacggcagtgcagaatccca

SEQ ID NO: 2302264 - DNA, 25 bp, Homo sapien
cacagactccaactgcactacacgc

SEQ ID NO: 2302265 - DNA, 25 bp, Homo sapien
gtgcagaatcccaggtacttcccct

SEQ ID NO: 2302266 - DNA, 25 bp, Homo sapien
tgcactacacgcctctgcgtacata

SEQ ID NO: 2302267 - DNA, 25 bp, Homo sapien
agtcactgtgccacaaggttcataa

SEQ ID NO: 2302268 - DNA, 25 bp, Homo sapien
aagtgaagaaaatttctggccaacg

SEQ ID NO: 2302269 - DNA, 25 bp, Homo sapien
cgagctgatctttgcatgtttttgc

SEQ ID NO: 2302270 - DNA, 25 bp, Homo sapien
gcattccccaggcgcattgtagtaa

SEQ ID NO: 2302271 - DNA, 25 bp, Homo sapien
actccccctgctggtatgacatcat

SEQ ID NO: 2302272 - DNA, 25 bp, Homo sapien
gacatcattatagaaacagctgcac

SEQ ID NO: 2302273 - DNA, 25 bp, Homo sapien
caagtaaggagcactatctgggcac

SEQ ID NO: 2302274 - DNA, 25 bp, Homo sapien
acagctgcactcagataaactgaca

SEQ ID NO: 2302275 - DNA, 25 bp, Homo sapien
actccaactgccctgcaatgcagta

SEQ ID NO: 2302276 - DNA, 25 bp, Homo sapien
ctccaactgccctgcaatgcagtag

SEQ ID NO: 2302277 - DNA, 25 bp, Homo sapien
cactgcactccaactgccctgcaat

SEQ ID NO: 2302278 - DNA, 25 bp, Homo sapien
tgcactccaactgccctgcaatgca

SEQ ID NO: 2302279 - DNA, 25 bp, Homo sapien
ccggtgcttaatatggtggtagctg

SEQ ID NO: 2302280 - DNA, 25 bp, Homo sapien
ctgctccggtgcttaatatggtggt

SEQ ID NO: 2302281 - DNA, 25 bp, Homo sapien
taatatggtggtagctgttgtagtg

SEQ ID NO: 2302282 - DNA, 25 bp, Homo sapien
gcttaatatggtggtagctgttgta

SEQ ID NO: 2302283 - DNA, 25 bp, Homo sapien
tgcttgggccaccggtaaccagtgt

SEQ ID NO: 2302284 - DNA, 25 bp, Homo sapien
gcttgggccaccggtaaccagtgta

SEQ ID NO: 2302285 - DNA, 25 bp, Homo sapien
tgtgcttgggccaccggtaaccagt

SEQ ID NO: 2302286 - DNA, 25 bp, Homo sapien
gtgcttgggccaccggtaaccagtg

SEQ ID NO: 2302287 - DNA, 25 bp, Homo sapien
ttcggtgagaggacctagagttgtt

SEQ ID NO: 2302288 - DNA, 25 bp, Homo sapien
ctgtagtaaaaggttcggtgagagg

SEQ ID NO: 2302289 - DNA, 25 bp, Homo sapien
tgtagtaaaaggttcggtgagagga

SEQ ID NO: 2302290 - DNA, 25 bp, Homo sapien
tcggtgagaggacctagagttgttc

SEQ ID NO: 2302291 - DNA, 25 bp, Homo sapien
gggctcactactcctgtcatgcctg

SEQ ID NO: 2302292 - DNA, 25 bp, Homo sapien
cactactcctgtcatgcctgcattt

SEQ ID NO: 2302293 - DNA, 25 bp, Homo sapien
atgcctgaagcaccagtgacggtgg

SEQ ID NO: 2302294 - DNA, 25 bp, Homo sapien
tgacggtggggctcactactcctgt

SEQ ID NO: 2302295 - DNA, 25 bp, Homo sapien
ttttcactagcagctccagtggtgg

SEQ ID NO: 2302296 - DNA, 25 bp, Homo sapien
agatgtattttcactagcagctcca

SEQ ID NO: 2302297 - DNA, 25 bp, Homo sapien
gctctctcagatgtattttcactag

SEQ ID NO: 2302298 - DNA, 25 bp, Homo sapien
ggctgcatccactcctccagttgtt

SEQ ID NO: 2302299 - DNA, 25 bp, Homo sapien
tgctaagaaagttaaatccttataa

SEQ ID NO: 2302300 - DNA, 25 bp, Homo sapien
ctgctaagaaagttaaatccttata

SEQ ID NO: 2302301 - DNA, 25 bp, Homo sapien
agataccctcggtgtgcctaatttt

SEQ ID NO: 2302302 - DNA, 25 bp, Homo sapien
tccagataccctcggtgtgcctaat

SEQ ID NO: 2302303 - DNA, 25 bp, Homo sapien
gcttctccaggggtactgccacctc

SEQ ID NO: 2302304 - DNA, 25 bp, Homo sapien
tctccagataccctcggtgtgccta

SEQ ID NO: 2302305 - DNA, 25 bp, Homo sapien
gagcctgcagaaactcctgtacttc

SEQ ID NO: 2302306 - DNA, 25 bp, Homo sapien
tgacatgccttcagatgatgtcgct

SEQ ID NO: 2302307 - DNA, 25 bp, Homo sapien
gccttcagatgatgtcgcttcactg

SEQ ID NO: 2302308 - DNA, 25 bp, Homo sapien
gatgatgtcgcttcactgcttgtgg

SEQ ID NO: 2302309 - DNA, 25 bp, Homo sapien
gcttcactgcttgtggctccagttt

SEQ ID NO: 2302310 - DNA, 25 bp, Homo sapien
ccactaaagtgaccaggtgagcccg

SEQ ID NO: 2302311 - DNA, 25 bp, Homo sapien
gtcagatccagcagtagatccaaga

SEQ ID NO: 2302312 - DNA, 25 bp, Homo sapien
gatccaagagactgtcctgttacac

SEQ ID NO: 2302313 - DNA, 25 bp, Homo sapien
tttcccaggtggactggaaccagtg

SEQ ID NO: 2302314 - DNA, 25 bp, Homo sapien
tgtgtttccactgcctgcgctggtg

SEQ ID NO: 2302315 - DNA, 25 bp, Homo sapien
ctgtgtttccactgcctgcgctggt

SEQ ID NO: 2302316 - DNA, 25 bp, Homo sapien
gtgtttccactgcctgcgctggtgg

SEQ ID NO: 2302317 - DNA, 25 bp, Homo sapien
aactggtgtttccaatgtctgcttc

SEQ ID NO: 2302318 - DNA, 25 bp, Homo sapien
agaactgttaaggagtcatgtccag

SEQ ID NO: 2302319 - DNA, 25 bp, Homo sapien
tctgaggaaggcagggttgagaact

SEQ ID NO: 2302320 - DNA, 25 bp, Homo sapien
catgtccagacttgcctgattttcc

SEQ ID NO: 2302321 - DNA, 25 bp, Homo sapien
gtgtgtttactcacagggctactgg

SEQ ID NO: 2302322 - DNA, 25 bp, Homo sapien
tagttgaggcagcagatactgttgg

SEQ ID NO: 2302323 - DNA, 25 bp, Homo sapien
tactcacagggctactggtagttga

SEQ ID NO: 2302324 - DNA, 25 bp, Homo sapien
ctactggtagttgaggcagcagata

SEQ ID NO: 2302325 - DNA, 25 bp, Homo sapien
tggtgtatttgaagcgcccgtgctg

SEQ ID NO: 2302326 - DNA, 25 bp, Homo sapien
taattttgcctccactagttgcacc

SEQ ID NO: 2302327 - DNA, 25 bp, Homo sapien
ctccactagttgcaccacctggtgt

SEQ ID NO: 2302328 - DNA, 25 bp, Homo sapien
tggaccatccagatgtaattttgcc

SEQ ID NO: 2302329 - DNA, 25 bp, Homo sapien
gtgaccttttagtgctttgctaatc

SEQ ID NO: 2302330 - DNA, 25 bp, Homo sapien
taataccctactgaataagctttta

SEQ ID NO: 2302331 - DNA, 25 bp, Homo sapien
atttctacactgactcccatttttg

SEQ ID NO: 2302332 - DNA, 25 bp, Homo sapien
tataaacaaatttctacactgactc

SEQ ID NO: 2302333 - DNA, 25 bp, Homo sapien
tgtccctgatactccaactgatggt

SEQ ID NO: 2302334 - DNA, 25 bp, Homo sapien
tgatggttcagatgccaccgtgact

SEQ ID NO: 2302335 - DNA, 25 bp, Homo sapien
cagtcactgtagcagattgcccaaa

SEQ ID NO: 2302336 - DNA, 25 bp, Homo sapien
tctgattgccccattgtccctgaaa

SEQ ID NO: 2302337 - DNA, 25 bp, Homo sapien
aaaggacttgttagtgccactccag

SEQ ID NO: 2302338 - DNA, 25 bp, Homo sapien
tgcttttacaacaggaggtccagtt

SEQ ID NO: 2302339 - DNA, 25 bp, Homo sapien
cagctgaaggtctagttgtctctaa

SEQ ID NO: 2302340 - DNA, 25 bp, Homo sapien
cattctagctgattgtccggatgtc

SEQ ID NO: 2302341 - DNA, 25 bp, Homo sapien
gttgtactatgtcctccagatgaag

SEQ ID NO: 2302342 - DNA, 25 bp, Homo sapien
cactgtaggtgattgccgaggtgtc

SEQ ID NO: 2302343 - DNA, 25 bp, Homo sapien
tccagatgatggtctagtggtccct

SEQ ID NO: 2302344 - DNA, 25 bp, Homo sapien
tctgtgtatcctgtaactggccctg

SEQ ID NO: 2302345 - DNA, 25 bp, Homo sapien
agttgtctctgtcaacccagctgat

SEQ ID NO: 2302346 - DNA, 25 bp, Homo sapien
aacccagctgatggttcagttgtcc

SEQ ID NO: 2302347 - DNA, 25 bp, Homo sapien
cctgtcaccccagttgatgatccag

SEQ ID NO: 2302348 - DNA, 25 bp, Homo sapien
cctgtcacttcagctgattgtccag

SEQ ID NO: 2302349 - DNA, 25 bp, Homo sapien
attgttgaccgagggatggctcccg

SEQ ID NO: 2302350 - DNA, 25 bp, Homo sapien
tacttcctggtgcaattgttgaccg

SEQ ID NO: 2302351 - DNA, 25 bp, Homo sapien
cctggtgcaattgttgaccgaggga

SEQ ID NO: 2302352 - DNA, 25 bp, Homo sapien
cagtagtggtacttcctggtgcaat

SEQ ID NO: 2302353 - DNA, 25 bp, Homo sapien
tgccagtggttaccccagtggtacc

SEQ ID NO: 2302354 - DNA, 25 bp, Homo sapien
agaaagtccagagatcaccatactg

SEQ ID NO: 2302355 - DNA, 25 bp, Homo sapien
ggcaagagttgtgccagtggttacc

SEQ ID NO: 2302356 - DNA, 25 bp, Homo sapien
tgttgaaacttctaggggcaagagt

SEQ ID NO: 2302357 - DNA, 25 bp, Homo sapien
gagacataacttccaggtttgaggg

SEQ ID NO: 2302358 - DNA, 25 bp, Homo sapien
tcctgacggtcctgctccaggagtc

SEQ ID NO: 2302359 - DNA, 25 bp, Homo sapien
ctcctgacggtcctgctccaggagt

SEQ ID NO: 2302360 - DNA, 25 bp, Homo sapien
cctgctccaggagtccctgtagcag

SEQ ID NO: 2302361 - DNA, 25 bp, Homo sapien
ggtcctgctccaggagtccctgtag

SEQ ID NO: 2302362 - DNA, 25 bp, Homo sapien
gaaacttctgaaatggtactgactt

SEQ ID NO: 2302363 - DNA, 25 bp, Homo sapien
acttcaggagaactgatagtggtgc

SEQ ID NO: 2302364 - DNA, 25 bp, Homo sapien
ctgaaatggtactgacttcaggaga

SEQ ID NO: 2302365 - DNA, 25 bp, Homo sapien
ctgtgttggaaacttctgaaatggt

SEQ ID NO: 2302366 - DNA, 25 bp, Homo sapien
ggaaattcctgtttcaatagatgtc

SEQ ID NO: 2302367 - DNA, 25 bp, Homo sapien
tcaatagatgtctcagagcctactc

SEQ ID NO: 2302368 - DNA, 25 bp, Homo sapien
ttcaatagatgtctcagagcctact

SEQ ID NO: 2302369 - DNA, 25 bp, Homo sapien
ctgaaacaccaagaggactgggatc

SEQ ID NO: 2302370 - DNA, 25 bp, Homo sapien
aacaccaagaggactgggatcacca

SEQ ID NO: 2302371 - DNA, 25 bp, Homo sapien
gaaacaccaagaggactgggatcac

SEQ ID NO: 2302372 - DNA, 25 bp, Homo sapien
acaccaagaggactgggatcaccat

SEQ ID NO: 2302373 - DNA, 25 bp, Homo sapien
tgccaggggcaagggttgtgccagg

SEQ ID NO: 2302374 - DNA, 25 bp, Homo sapien
gtgccaggagccaccccagtcgtag

SEQ ID NO: 2302375 - DNA, 25 bp, Homo sapien
ctgtactggaactgccaggggcaag

SEQ ID NO: 2302376 - DNA, 25 bp, Homo sapien
ccaggggcaagggttgtgccaggag

SEQ ID NO: 2302377 - DNA, 25 bp, Homo sapien
gatgcacttcctcctatggaagttg

SEQ ID NO: 2302378 - DNA, 25 bp, Homo sapien
ttgttgatgcacttcctcctatgga

SEQ ID NO: 2302379 - DNA, 25 bp, Homo sapien
ctcctcttgttgatgcacttcctcc

SEQ ID NO: 2302380 - DNA, 25 bp, Homo sapien
cttcctcctatggaagttgtggcct

SEQ ID NO: 2302381 - DNA, 25 bp, Homo sapien
gatccagtggtcctgacccctcttg

SEQ ID NO: 2302382 - DNA, 25 bp, Homo sapien
atccagtggtcctgacccctcttgt

SEQ ID NO: 2302383 - DNA, 25 bp, Homo sapien
tccagtggtcctgacccctcttgtg

SEQ ID NO: 2302384 - DNA, 25 bp, Homo sapien
gcctccagatgaaatggttgtccca

SEQ ID NO: 2302385 - DNA, 25 bp, Homo sapien
ctccagatgaaatggttgtcccaga

SEQ ID NO: 2302386 - DNA, 25 bp, Homo sapien
aaatggttgtcccagagaattctcc

SEQ ID NO: 2302387 - DNA, 25 bp, Homo sapien
gaagcctccagatgaaatggttgtc

SEQ ID NO: 2302388 - DNA, 25 bp, Homo sapien
cctacctcctgtgagagttgtggct

SEQ ID NO: 2302389 - DNA, 25 bp, Homo sapien
gattcagttccaatactgcccctac

SEQ ID NO: 2302390 - DNA, 25 bp, Homo sapien
tgctctggattcagttccaatactg

SEQ ID NO: 2302391 - DNA, 25 bp, Homo sapien
ctgcccctacctcctgtgagagttg

SEQ ID NO: 2302392 - DNA, 25 bp, Homo sapien
tgtttttgcactttgtggtagggaa

SEQ ID NO: 2302393 - DNA, 25 bp, Homo sapien
tttgcactttgtggtagggaagttg

SEQ ID NO: 2302394 - DNA, 25 bp, Homo sapien
agcagccatggtgtagcattctctg

SEQ ID NO: 2302395 - DNA, 25 bp, Homo sapien
tgagcagccatggtgtagcattctc

SEQ ID NO: 2302396 - DNA, 25 bp, Homo sapien
ctgtgttgtcaatcccaggttccag

SEQ ID NO: 2302397 - DNA, 25 bp, Homo sapien
gagcagccatggtgtagcattctct

SEQ ID NO: 2302398 - DNA, 25 bp, Homo sapien
tgcagtatggggagtacagggttac

SEQ ID NO: 2302399 - DNA, 25 bp, Homo sapien
aagcatgaagtctgcagtatgggga

SEQ ID NO: 2302400 - DNA, 25 bp, Homo sapien
aagcaagcatgaagtctgcagtatg

SEQ ID NO: 2302401 - DNA, 25 bp, Homo sapien
agaaagcaagcatgaagtctgcagt

SEQ ID NO: 2302402 - DNA, 25 bp, Homo sapien
cttctgatccggtcgccctgatcct

SEQ ID NO: 2302403 - DNA, 25 bp, Homo sapien
tcctggagcttctgatccggtcgcc

SEQ ID NO: 2302404 - DNA, 25 bp, Homo sapien
ggagcttctgatccggtcgccctga

SEQ ID NO: 2302405 - DNA, 25 bp, Homo sapien
ttctgatccggtcgccctgatcctt

SEQ ID NO: 2302406 - DNA, 25 bp, Homo sapien
acctccagatgtaaatgttgtccct

SEQ ID NO: 2302407 - DNA, 25 bp, Homo sapien
tgttgtccctgggaattcaccagag

SEQ ID NO: 2302408 - DNA, 25 bp, Homo sapien
gttgtccctgggaattcaccagagg

SEQ ID NO: 2302409 - DNA, 25 bp, Homo sapien
ccagatgtaaatgttgtccctggga

SEQ ID NO: 2302410 - DNA, 25 bp, Homo sapien
cagttccagtactgcccttgtctcc

SEQ ID NO: 2302411 - DNA, 25 bp, Homo sapien
gattcagttccagtactgcccttgt

SEQ ID NO: 2302412 - DNA, 25 bp, Homo sapien
ttcagttccagtactgcccttgtct

SEQ ID NO: 2302413 - DNA, 25 bp, Homo sapien
tcagttccagtactgcccttgtctc

SEQ ID NO: 2302414 - DNA, 25 bp, Homo sapien
ctgccagggacaagagttgtgccag

SEQ ID NO: 2302415 - DNA, 25 bp, Homo sapien
ttggaactgccagggacaagagttg

SEQ ID NO: 2302416 - DNA, 25 bp, Homo sapien
ttgtgccaggagttgccctagtggt

SEQ ID NO: 2302417 - DNA, 25 bp, Homo sapien
ctgtattggaactgccagggacaag

SEQ ID NO: 2302418 - DNA, 25 bp, Homo sapien
cggtggttattctacctcttgtcat

SEQ ID NO: 2302419 - DNA, 25 bp, Homo sapien
tggttattctacctcttgtcattgc

SEQ ID NO: 2302420 - DNA, 25 bp, Homo sapien
ggtggttattctacctcttgtcatt

SEQ ID NO: 2302421 - DNA, 25 bp, Homo sapien
gtggttattctacctcttgtcattg

SEQ ID NO: 2302422 - DNA, 25 bp, Homo sapien
catggcatagcattccctgtgtggc

SEQ ID NO: 2302423 - DNA, 25 bp, Homo sapien
ttgtcattctcagattcgagagtct

SEQ ID NO: 2302424 - DNA, 25 bp, Homo sapien
tgttgtcattctcagattcgagagt

SEQ ID NO: 2302425 - DNA, 25 bp, Homo sapien
agcagtcatggcatagcattccctg

SEQ ID NO: 2302426 - DNA, 25 bp, Homo sapien
ctcctggtgcttctgacctggtggt

SEQ ID NO: 2302427 - DNA, 25 bp, Homo sapien
tcctggtgcttctgacctggtggtc

SEQ ID NO: 2302428 - DNA, 25 bp, Homo sapien
cctggtggtcctgacccctctggtg

SEQ ID NO: 2302429 - DNA, 25 bp, Homo sapien
cctgacccctctggtggaacttgtg

SEQ ID NO: 2302430 - DNA, 25 bp, Homo sapien
tgtcccagggaattcaccagaagta

SEQ ID NO: 2302431 - DNA, 25 bp, Homo sapien
ctgtgtaggaacctccagatgtaat

SEQ ID NO: 2302432 - DNA, 25 bp, Homo sapien
aattcttgtcccagggaattcacca

SEQ ID NO: 2302433 - DNA, 25 bp, Homo sapien
ccagatgtaattcttgtcccaggga

SEQ ID NO: 2302434 - DNA, 25 bp, Homo sapien
gattcagttccagtactgcccttgc

SEQ ID NO: 2302435 - DNA, 25 bp, Homo sapien
ttgcctcctgttaaagttgcggccg

SEQ ID NO: 2302436 - DNA, 25 bp, Homo sapien
tgcccttgcctcctgttaaagttgc

SEQ ID NO: 2302437 - DNA, 25 bp, Homo sapien
ttcagttccagtactgcccttgcct

SEQ ID NO: 2302438 - DNA, 25 bp, Homo sapien
gtgaattatgggctgctcatcctca

SEQ ID NO: 2302439 - DNA, 25 bp, Homo sapien
gaaacacaaagaagagtgggatcac

SEQ ID NO: 2302440 - DNA, 25 bp, Homo sapien
aacacaaagaagagtgggatcacca

SEQ ID NO: 2302441 - DNA, 25 bp, Homo sapien
acacaaagaagagtgggatcaccat

SEQ ID NO: 2302442 - DNA, 25 bp, Homo sapien
ctgaaacacaaagaagagtgggatc

SEQ ID NO: 2302443 - DNA, 25 bp, Homo sapien
cgtgttggaactgccaggggcaaga

SEQ ID NO: 2302444 - DNA, 25 bp, Homo sapien
ggggcaagagttgtgccaggagctg

SEQ ID NO: 2302445 - DNA, 25 bp, Homo sapien
caagagttgtgccaggagctgccct

SEQ ID NO: 2302446 - DNA, 25 bp, Homo sapien
aactgccaggggcaagagttgtgcc

SEQ ID NO: 2302447 - DNA, 25 bp, Homo sapien
tggttattctacctcttgtcattgc

SEQ ID NO: 2302448 - DNA, 25 bp, Homo sapien
cggtggttattctacctcttgtcat

SEQ ID NO: 2302449 - DNA, 25 bp, Homo sapien
ggtggttattctacctcttgtcatt

SEQ ID NO: 2302450 - DNA, 25 bp, Homo sapien
gtggttattctacctcttgtcattg

SEQ ID NO: 2302451 - DNA, 25 bp, Homo sapien
ctgtatacttattcaatatctcagg

SEQ ID NO: 2302452 - DNA, 25 bp, Homo sapien
tacttattcaatatctcaggaaact

SEQ ID NO: 2302453 - DNA, 25 bp, Homo sapien
ttattcaatatctcaggaaactggg

SEQ ID NO: 2302454 - DNA, 25 bp, Homo sapien
tgtatacttattcaatatctcagga

SEQ ID NO: 2302455 - DNA, 25 bp, Homo sapien
gaataacaacctcataaatggataa

SEQ ID NO: 2302456 - DNA, 25 bp, Homo sapien
tcaagtggacagagaataacaacct

SEQ ID NO: 2302457 - DNA, 25 bp, Homo sapien
cagagaataacaacctcataaatgg

SEQ ID NO: 2302458 - DNA, 25 bp, Homo sapien
ggacagagaataacaacctcataaa

SEQ ID NO: 2302459 - DNA, 25 bp, Homo sapien
ggagcttctgatctggtggtcctga

SEQ ID NO: 2302460 - DNA, 25 bp, Homo sapien
agcttctgatctggtggtcctgacc

SEQ ID NO: 2302461 - DNA, 25 bp, Homo sapien
tcctgacccctctggtggaacttgt

SEQ ID NO: 2302462 - DNA, 25 bp, Homo sapien
tcctggagcttctgatctggtggtc

SEQ ID NO: 2302463 - DNA, 25 bp, Homo sapien
gttctggattcacttccggtactgc

SEQ ID NO: 2302464 - DNA, 25 bp, Homo sapien
ctggattcacttccggtactgctcc

SEQ ID NO: 2302465 - DNA, 25 bp, Homo sapien
gattcacttccggtactgctcctgt

SEQ ID NO: 2302466 - DNA, 25 bp, Homo sapien
ttcacttccggtactgctcctgtct

SEQ ID NO: 2302467 - DNA, 25 bp, Homo sapien
ggtaactccccaatcataagctgcc

SEQ ID NO: 2302468 - DNA, 25 bp, Homo sapien
agtcatggttcttggtaactcccca

SEQ ID NO: 2302469 - DNA, 25 bp, Homo sapien
ttccaagcaagttatcccgaaagtc

SEQ ID NO: 2302470 - DNA, 25 bp, Homo sapien
gcaagttatcccgaaagtcatggtt

SEQ ID NO: 2302471 - DNA, 25 bp, Homo sapien
tgtcctgaagacctgcctctagaag

SEQ ID NO: 2302472 - DNA, 25 bp, Homo sapien
cagtagtaactggatgtcaaaggcc

SEQ ID NO: 2302473 - DNA, 25 bp, Homo sapien
gtttacatcaaaggccagtagtaac

SEQ ID NO: 2302474 - DNA, 25 bp, Homo sapien
gaagacctgcctctagaaggaatct

SEQ ID NO: 2302475 - DNA, 25 bp, Homo sapien
cagttgtgccaggagctactccagt

SEQ ID NO: 2302476 - DNA, 25 bp, Homo sapien
gttgtgccaggagctactccagtgg

SEQ ID NO: 2302477 - DNA, 25 bp, Homo sapien
agttgtgccaggagctactccagtg

SEQ ID NO: 2302478 - DNA, 25 bp, Homo sapien
cttactcctaggaaagtggtggcct

SEQ ID NO: 2302479 - DNA, 25 bp, Homo sapien
tccacttactcctaggaaagtggtg

SEQ ID NO: 2302480 - DNA, 25 bp, Homo sapien
tgttccacttactcctaggaaagtg

SEQ ID NO: 2302481 - DNA, 25 bp, Homo sapien
cacttactcctaggaaagtggtggc

SEQ ID NO: 2302482 - DNA, 25 bp, Homo sapien
gcttggctggtgtcactccctacta

SEQ ID NO: 2302483 - DNA, 25 bp, Homo sapien
gttctgcttggctggtgtcactccc

SEQ ID NO: 2302484 - DNA, 25 bp, Homo sapien
ggtgtcactccctactatggaagtt

SEQ ID NO: 2302485 - DNA, 25 bp, Homo sapien
ctccctactatggaagttgtggcac

SEQ ID NO: 2302486 - DNA, 25 bp, Homo sapien
ctggcctggagctctgtgaagtgct

SEQ ID NO: 2302487 - DNA, 25 bp, Homo sapien
tggctccaggtgaaaccacagttgt

SEQ ID NO: 2302488 - DNA, 25 bp, Homo sapien
gctgctggctccaggtgaaaccaca

SEQ ID NO: 2302489 - DNA, 25 bp, Homo sapien
gctccaggtgaaaccacagttgtac

SEQ ID NO: 2302490 - DNA, 25 bp, Homo sapien
ttcagatgctgaactgtctggtgtg

SEQ ID NO: 2302491 - DNA, 25 bp, Homo sapien
gatgctgaactgtctggtgtgacag

SEQ ID NO: 2302492 - DNA, 25 bp, Homo sapien
gaactgtctggtgtgacagaggtgc

SEQ ID NO: 2302493 - DNA, 25 bp, Homo sapien
cagatgctgaactgtctggtgtgac

SEQ ID NO: 2302494 - DNA, 25 bp, Homo sapien
cggtgtgggaagttctagatatagc

SEQ ID NO: 2302495 - DNA, 25 bp, Homo sapien
tgggaagttctagatatagcagttg

SEQ ID NO: 2302496 - DNA, 25 bp, Homo sapien
ttctagatatagcagttgtcccaga

SEQ ID NO: 2302497 - DNA, 25 bp, Homo sapien
gaagttctagatatagcagttgtcc

SEQ ID NO: 2302498 - DNA, 25 bp, Homo sapien
tggaggaacgctgcggccttctgtt

SEQ ID NO: 2302499 - DNA, 25 bp, Homo sapien
cgctgcggccttctgttaaagttgc

SEQ ID NO: 2302500 - DNA, 25 bp, Homo sapien
cagatggaggaacgctgcggccttc

SEQ ID NO: 2302501 - DNA, 25 bp, Homo sapien
tggatccagatggaggaacgctgcg

SEQ ID NO: 2302502 - DNA, 25 bp, Homo sapien
agttgtgccaggagctaccccagtg

SEQ ID NO: 2302503 - DNA, 25 bp, Homo sapien
gccaggtgcaacagttgtgccagga

SEQ ID NO: 2302504 - DNA, 25 bp, Homo sapien
tgttggaactgccaggtgcaacagt

SEQ ID NO: 2302505 - DNA, 25 bp, Homo sapien
caacagttgtgccaggagctacccc

SEQ ID NO: 2302506 - DNA, 25 bp, Homo sapien
ctttctcctacagaagttgtggcct

SEQ ID NO: 2302507 - DNA, 25 bp, Homo sapien
cagcttccagagttttcccagagat

SEQ ID NO: 2302508 - DNA, 25 bp, Homo sapien
tccagcttccagagttttcccagag

SEQ ID NO: 2302509 - DNA, 25 bp, Homo sapien
ttccagcttccagagttttcccaga

SEQ ID NO: 2302510 - DNA, 25 bp, Homo sapien
cttccagagttttcccagagatgcc

SEQ ID NO: 2302511 - DNA, 25 bp, Homo sapien
atataatggttgttccagataattc

SEQ ID NO: 2302512 - DNA, 25 bp, Homo sapien
agatataatggttgttccagataat

SEQ ID NO: 2302513 - DNA, 25 bp, Homo sapien
tataatggttgttccagataattct

SEQ ID NO: 2302514 - DNA, 25 bp, Homo sapien
gatataatggttgttccagataatt

SEQ ID NO: 2302515 - DNA, 25 bp, Homo sapien
ctccctacaatggaagttgtggctt

SEQ ID NO: 2302516 - DNA, 25 bp, Homo sapien
tgtcaccagttttgagttcagttcc

SEQ ID NO: 2302517 - DNA, 25 bp, Homo sapien
tcagttccagcagtgccactcccta

SEQ ID NO: 2302518 - DNA, 25 bp, Homo sapien
gaggccaaagtatgggctgtttatt

SEQ ID NO: 2302519 - DNA, 25 bp, Homo sapien
gcttgcttccctgttgctgcagtga

SEQ ID NO: 2302520 - DNA, 25 bp, Homo sapien
ttccctgttgctgcagtgatgcctg

SEQ ID NO: 2302521 - DNA, 25 bp, Homo sapien
gcttccctgttgctgcagtgatgcc

SEQ ID NO: 2302522 - DNA, 25 bp, Homo sapien
ctgcttgcttccctgttgctgcagt

SEQ ID NO: 2302523 - DNA, 25 bp, Homo sapien
actgttgtggaaggagctacctccg

SEQ ID NO: 2302524 - DNA, 25 bp, Homo sapien
ctgttgtggaaggagctacctccga

SEQ ID NO: 2302525 - DNA, 25 bp, Homo sapien
tgttgtggaaggagctacctccgag

SEQ ID NO: 2302526 - DNA, 25 bp, Homo sapien
aactgttgtggaaggagctacctcc

SEQ ID NO: 2302527 - DNA, 25 bp, Homo sapien
ttcagggggcatggaatggaatggt

SEQ ID NO: 2302528 - DNA, 25 bp, Homo sapien
ctggaagaagaaagacacaaatgga

SEQ ID NO: 2302529 - DNA, 25 bp, Homo sapien
acacaaatggaaaagattcaggggg

SEQ ID NO: 2302530 - DNA, 25 bp, Homo sapien
ggcatggaatggaatggtggagctc

SEQ ID NO: 2302531 - DNA, 25 bp, Homo sapien
tccacttgctccaggagaagttgtg

SEQ ID NO: 2302532 - DNA, 25 bp, Homo sapien
cttgctccaggagaagttgtggctg

SEQ ID NO: 2302533 - DNA, 25 bp, Homo sapien
ttgtaaccccagtcgttccacttgc

SEQ ID NO: 2302534 - DNA, 25 bp, Homo sapien
tgtaaccccagtcgttccacttgct

SEQ ID NO: 2302535 - DNA, 25 bp, Homo sapien
ccaggggagactgttgtagcagagg

SEQ ID NO: 2302536 - DNA, 25 bp, Homo sapien
caggggagactgttgtagcagaggg

SEQ ID NO: 2302537 - DNA, 25 bp, Homo sapien
ctcccaggggagactgttgtagcag

SEQ ID NO: 2302538 - DNA, 25 bp, Homo sapien
gctcccaggggagactgttgtagca

SEQ ID NO: 2302539 - DNA, 25 bp, Homo sapien
ctttctcctacagaagttgtggcct

SEQ ID NO: 2302540 - DNA, 25 bp, Homo sapien
gcctccagagttctgccagagatgc

SEQ ID NO: 2302541 - DNA, 25 bp, Homo sapien
cctccagagttctgccagagatgcc

SEQ ID NO: 2302542 - DNA, 25 bp, Homo sapien
ttcaggagcagaataactgaccagg

SEQ ID NO: 2302543 - DNA, 25 bp, Homo sapien
ggttgacaggacaccatattgccca

SEQ ID NO: 2302544 - DNA, 25 bp, Homo sapien
ctctgtagctaccagatagagacat

SEQ ID NO: 2302545 - DNA, 25 bp, Homo sapien
gaataaaatgcaggccctacttcaa

SEQ ID NO: 2302546 - DNA, 25 bp, Homo sapien
cagttttgaatccagttccagaagt

SEQ ID NO: 2302547 - DNA, 25 bp, Homo sapien
cagaagtaccagtcccttctgtgga

SEQ ID NO: 2302548 - DNA, 25 bp, Homo sapien
tccagttccagaagtaccagtccct

SEQ ID NO: 2302549 - DNA, 25 bp, Homo sapien
gtcccttctgtggaagtggtggcct

SEQ ID NO: 2302550 - DNA, 25 bp, Homo sapien
tgtgctgaaacttcctggggcaacc

SEQ ID NO: 2302551 - DNA, 25 bp, Homo sapien
aaccgttgtggcaggagctacctct

SEQ ID NO: 2302552 - DNA, 25 bp, Homo sapien
cgttgtggcaggagctacctctgag

SEQ ID NO: 2302553 - DNA, 25 bp, Homo sapien
cttcctggggcaaccgttgtggcag

SEQ ID NO: 2302554 - DNA, 25 bp, Homo sapien
ttgtagttgttgtaaccccagtcat

SEQ ID NO: 2302555 - DNA, 25 bp, Homo sapien
gtagttgttgtaaccccagtcattc

SEQ ID NO: 2302556 - DNA, 25 bp, Homo sapien
tgtagttgttgtaaccccagtcatt

SEQ ID NO: 2302557 - DNA, 25 bp, Homo sapien
cttcctcctagggaagttgtggtct

SEQ ID NO: 2302558 - DNA, 25 bp, Homo sapien
tttttgctccagtggtgccacttcc

SEQ ID NO: 2302559 - DNA, 25 bp, Homo sapien
attttatttttgctccagtggtgcc

SEQ ID NO: 2302560 - DNA, 25 bp, Homo sapien
ttatttttgctccagtggtgccact

SEQ ID NO: 2302561 - DNA, 25 bp, Homo sapien
gtgattacttcggctcttgttattc

SEQ ID NO: 2302562 - DNA, 25 bp, Homo sapien
gattacttcggctcttgttattctg

SEQ ID NO: 2302563 - DNA, 25 bp, Homo sapien
tgtgattacttcggctcttgttatt

SEQ ID NO: 2302564 - DNA, 25 bp, Homo sapien
ttacttcggctcttgttattctgct

SEQ ID NO: 2302565 - DNA, 25 bp, Homo sapien
ttcctttccaggaacatatccctct

SEQ ID NO: 2302566 - DNA, 25 bp, Homo sapien
agatataaagttcgttccagaaaat

SEQ ID NO: 2302567 - DNA, 25 bp, Homo sapien
cagatataaagttcgttccagaaaa

SEQ ID NO: 2302568 - DNA, 25 bp, Homo sapien
ccagatataaagttcgttccagaaa

SEQ ID NO: 2302569 - DNA, 25 bp, Homo sapien
agaagtacctgtcccttctgtggaa

SEQ ID NO: 2302570 - DNA, 25 bp, Homo sapien
tgtcccttctgtggaagtggtggcc

SEQ ID NO: 2302571 - DNA, 25 bp, Homo sapien
aattttgaatccagttccagaagta

SEQ ID NO: 2302572 - DNA, 25 bp, Homo sapien
tgaatccagttccagaagtacctgt

SEQ ID NO: 2302573 - DNA, 25 bp, Homo sapien
ctgcttgtttccctggggcagaagt

SEQ ID NO: 2302574 - DNA, 25 bp, Homo sapien
ttgtttccctggggcagaagtgatg

SEQ ID NO: 2302575 - DNA, 25 bp, Homo sapien
ttccctggggcagaagtgatgcctg

SEQ ID NO: 2302576 - DNA, 25 bp, Homo sapien
gtttccctggggcagaagtgatgcc

SEQ ID NO: 2302577 - DNA, 25 bp, Homo sapien
tgttgtggcaagagataccccagag

SEQ ID NO: 2302578 - DNA, 25 bp, Homo sapien
actgttgtggcaagagataccccag

SEQ ID NO: 2302579 - DNA, 25 bp, Homo sapien
gtggcaagagataccccagaggtgc

SEQ ID NO: 2302580 - DNA, 25 bp, Homo sapien
ttgtggcaagagataccccagaggt

SEQ ID NO: 2302581 - DNA, 25 bp, Homo sapien
ccctagttattccacttgctccaga

SEQ ID NO: 2302582 - DNA, 25 bp, Homo sapien
gggcaactgttgtaccagagggcac

SEQ ID NO: 2302583 - DNA, 25 bp, Homo sapien
agctcccaggggcaactgttgtacc

SEQ ID NO: 2302584 - DNA, 25 bp, Homo sapien
gcaactgttgtaccagagggcactg

SEQ ID NO: 2302585 - DNA, 25 bp, Homo sapien
aactgttgtaccagagggcactgca

SEQ ID NO: 2302586 - DNA, 25 bp, Homo sapien
ttttctcctacagaagttgtggctt

SEQ ID NO: 2302587 - DNA, 25 bp, Homo sapien
tttccattttctcctacagaagttg

SEQ ID NO: 2302588 - DNA, 25 bp, Homo sapien
cattttctcctacagaagttgtggc

SEQ ID NO: 2302589 - DNA, 25 bp, Homo sapien
tgtgattatttcacctcttgttttt

SEQ ID NO: 2302590 - DNA, 25 bp, Homo sapien
tgtgtgggcacttccaggttccaga

SEQ ID NO: 2302591 - DNA, 25 bp, Homo sapien
ggttccagaactttgccagaggtgc

SEQ ID NO: 2302592 - DNA, 25 bp, Homo sapien
ttgccagaggtgccctcagtagtat

SEQ ID NO: 2302593 - DNA, 25 bp, Homo sapien
ggcacttccaggttccagaactttg

SEQ ID NO: 2302594 - DNA, 25 bp, Homo sapien
ggtcctgctcgggtagtcccactgc

SEQ ID NO: 2302595 - DNA, 25 bp, Homo sapien
gtggtcctgctcgggtagtcccact

SEQ ID NO: 2302596 - DNA, 25 bp, Homo sapien
ctggtggtcctgctcgggtagtccc

SEQ ID NO: 2302597 - DNA, 25 bp, Homo sapien
actgcctcctgggaaagttgtggcc

SEQ ID NO: 2302598 - DNA, 25 bp, Homo sapien
ttagaacttccaggtataatggtca

SEQ ID NO: 2302599 - DNA, 25 bp, Homo sapien
taatggtcattctagacaattctcc

SEQ ID NO: 2302600 - DNA, 25 bp, Homo sapien
caggtataatggtcattctagacaa

SEQ ID NO: 2302601 - DNA, 25 bp, Homo sapien
gaacttccaggtataatggtcattc

SEQ ID NO: 2302602 - DNA, 25 bp, Homo sapien
tccagaagtaccagtcccttttgtg

SEQ ID NO: 2302603 - DNA, 25 bp, Homo sapien
tttgaagccagttccagaagtacca

SEQ ID NO: 2302604 - DNA, 25 bp, Homo sapien
agttttgaagccagttccagaagta

SEQ ID NO: 2302605 - DNA, 25 bp, Homo sapien
cagaagtaccagtcccttttgtgga

SEQ ID NO: 2302606 - DNA, 25 bp, Homo sapien
tccaggggaaactgttgtgccaggc

SEQ ID NO: 2302607 - DNA, 25 bp, Homo sapien
ctgtgctgaaacttccaggggaaac

SEQ ID NO: 2302608 - DNA, 25 bp, Homo sapien
acttccaggggaaactgttgtgcca

SEQ ID NO: 2302609 - DNA, 25 bp, Homo sapien
gtgctgaaacttccaggggaaactg

SEQ ID NO: 2302610 - DNA, 25 bp, Homo sapien
ggtgcagccccagtcgttctacttg

SEQ ID NO: 2302611 - DNA, 25 bp, Homo sapien
gtgcagccccagtcgttctacttgc

SEQ ID NO: 2302612 - DNA, 25 bp, Homo sapien
tgcagccccagtcgttctacttgct

SEQ ID NO: 2302613 - DNA, 25 bp, Homo sapien
tccagtggtgccacctccttctagg

SEQ ID NO: 2302614 - DNA, 25 bp, Homo sapien
tttatttctgctccagtggtgccac

SEQ ID NO: 2302615 - DNA, 25 bp, Homo sapien
cacctccttctagggaagttgtggt

SEQ ID NO: 2302616 - DNA, 25 bp, Homo sapien
tatttctgctccagtggtgccacct

SEQ ID NO: 2302617 - DNA, 25 bp, Homo sapien
caattgttgtagcagagggcactcc

SEQ ID NO: 2302618 - DNA, 25 bp, Homo sapien
gctcccaggggcaattgttgtagca

SEQ ID NO: 2302619 - DNA, 25 bp, Homo sapien
gttggagctcccaggggcaattgtt

SEQ ID NO: 2302620 - DNA, 25 bp, Homo sapien
cccaggggcaattgttgtagcagag

SEQ ID NO: 2302621 - DNA, 25 bp, Homo sapien
ctttctcctaaagaagtcgtggcct

SEQ ID NO: 2302622 - DNA, 25 bp, Homo sapien
tccactttctcctaaagaagtcgtg

SEQ ID NO: 2302623 - DNA, 25 bp, Homo sapien
tgtgattgtttcaactcttgttttt

SEQ ID NO: 2302624 - DNA, 25 bp, Homo sapien
ctgtgattgtttcaactcttgtttt

SEQ ID NO: 2302625 - DNA, 25 bp, Homo sapien
cagctgccagagttttaccctcagt

SEQ ID NO: 2302626 - DNA, 25 bp, Homo sapien
cttccagctgccagagttttaccct

SEQ ID NO: 2302627 - DNA, 25 bp, Homo sapien
ctgtgtgggcacttccagctgccag

SEQ ID NO: 2302628 - DNA, 25 bp, Homo sapien
ctgccagagttttaccctcagtagt

SEQ ID NO: 2302629 - DNA, 25 bp, Homo sapien
ccagtggtcctgctcgggtgctccc

SEQ ID NO: 2302630 - DNA, 25 bp, Homo sapien
acccagtggtcctgctcgggtgctc

SEQ ID NO: 2302631 - DNA, 25 bp, Homo sapien
cagtggtcctgctcgggtgctcccg

SEQ ID NO: 2302632 - DNA, 25 bp, Homo sapien
cccagtggtcctgctcgggtgctcc

SEQ ID NO: 2302633 - DNA, 25 bp, Homo sapien
gacatatcctcctgatgtaccagaa

SEQ ID NO: 2302634 - DNA, 25 bp, Homo sapien
tatcctcctgatgtaccagaagcgc

SEQ ID NO: 2302635 - DNA, 25 bp, Homo sapien
ttccagggacatatcctcctgatgt

SEQ ID NO: 2302636 - DNA, 25 bp, Homo sapien
tgtttcccttccagggacatatcct

SEQ ID NO: 2302637 - DNA, 25 bp, Homo sapien
agtagaatagggtttaaatcacgct

SEQ ID NO: 2302638 - DNA, 25 bp, Homo sapien
agaatagggtttaaatcacgctgac

SEQ ID NO: 2302639 - DNA, 25 bp, Homo sapien
gctgctgggtttcccttttactata

SEQ ID NO: 2302640 - DNA, 25 bp, Homo sapien
gcaaagtagaatagggtttaaatca

SEQ ID NO: 2302641 - DNA, 25 bp, Homo sapien
tgagggaacaaatacagtagggaag

SEQ ID NO: 2302642 - DNA, 25 bp, Homo sapien
ctgagggaacaaatacagtagggaa

SEQ ID NO: 2302643 - DNA, 25 bp, Homo sapien
ttccagtttcttcaatggaagttgt

SEQ ID NO: 2302644 - DNA, 25 bp, Homo sapien
cagttttgaatatagttctggaagt

SEQ ID NO: 2302645 - DNA, 25 bp, Homo sapien
agtttcttcaatggaagttgtgggc

SEQ ID NO: 2302646 - DNA, 25 bp, Homo sapien
ccagtttcttcaatggaagttgtgg

SEQ ID NO: 2302647 - DNA, 25 bp, Homo sapien
ctccctggggctgaagtgatgccta

SEQ ID NO: 2302648 - DNA, 25 bp, Homo sapien
gcctccctggggctgaagtgatgcc

SEQ ID NO: 2302649 - DNA, 25 bp, Homo sapien
ttgcctccctggggctgaagtgatg

SEQ ID NO: 2302650 - DNA, 25 bp, Homo sapien
ctgcttgcctccctggggctgaagt

SEQ ID NO: 2302651 - DNA, 25 bp, Homo sapien
ttgtgctaggcgccaccacagaggt

SEQ ID NO: 2302652 - DNA, 25 bp, Homo sapien
gtgctaggcgccaccacagaggtgc

SEQ ID NO: 2302653 - DNA, 25 bp, Homo sapien
tgttgtgctaggcgccaccacagag

SEQ ID NO: 2302654 - DNA, 25 bp, Homo sapien
actgttgtgctaggcgccaccacag

SEQ ID NO: 2302655 - DNA, 25 bp, Homo sapien
ttgaagtggttctaaccccagtcat

SEQ ID NO: 2302656 - DNA, 25 bp, Homo sapien
gaagtggttctaaccccagtcattc

SEQ ID NO: 2302657 - DNA, 25 bp, Homo sapien
tgaagtggttctaaccccagtcatt

SEQ ID NO: 2302658 - DNA, 25 bp, Homo sapien
cagttccacctagggaagttgtagt

SEQ ID NO: 2302659 - DNA, 25 bp, Homo sapien
ccagttccacctagggaagttgtag

SEQ ID NO: 2302660 - DNA, 25 bp, Homo sapien
taattcctggtgctccagtggtggc

SEQ ID NO: 2302661 - DNA, 25 bp, Homo sapien
attcctggtgctccagtggtggctc

SEQ ID NO: 2302662 - DNA, 25 bp, Homo sapien
ctgtcttaattcctggtgctccagt

SEQ ID NO: 2302663 - DNA, 25 bp, Homo sapien
tcttaattcctggtgctccagtggt

SEQ ID NO: 2302664 - DNA, 25 bp, Homo sapien
gaacttccagatagaatggtcgttc

SEQ ID NO: 2302665 - DNA, 25 bp, Homo sapien
aatggtcgttctagaagattctccc

SEQ ID NO: 2302666 - DNA, 25 bp, Homo sapien
cagatagaatggtcgttctagaaga

SEQ ID NO: 2302667 - DNA, 25 bp, Homo sapien
ttagaacttccagatagaatggtcg

SEQ ID NO: 2302668 - DNA, 25 bp, Homo sapien
tccagaagtaccagtctcttcaatg

SEQ ID NO: 2302669 - DNA, 25 bp, Homo sapien
ttccagaagtaccagtctcttcaat

SEQ ID NO: 2302670 - DNA, 25 bp, Homo sapien
tgctttcctggtgctgcagtgatgc

SEQ ID NO: 2302671 - DNA, 25 bp, Homo sapien
gcttgctttcctggtgctgcagtga

SEQ ID NO: 2302672 - DNA, 25 bp, Homo sapien
tttcctggtgctgcagtgatgcctg

SEQ ID NO: 2302673 - DNA, 25 bp, Homo sapien
ctgcttgctttcctggtgctgcagt

SEQ ID NO: 2302674 - DNA, 25 bp, Homo sapien
tgtgctgaaacttccaggggcaact

SEQ ID NO: 2302675 - DNA, 25 bp, Homo sapien
tgggtccagtgccagtcactccact

SEQ ID NO: 2302676 - DNA, 25 bp, Homo sapien
gcagtgggtccagtgccagtcactc

SEQ ID NO: 2302677 - DNA, 25 bp, Homo sapien
agtgggtccagtgccagtcactcca

SEQ ID NO: 2302678 - DNA, 25 bp, Homo sapien
ctgcagtgggtccagtgccagtcac

SEQ ID NO: 2302679 - DNA, 25 bp, Homo sapien
ttctgctccagtggtgctacttcct

SEQ ID NO: 2302680 - DNA, 25 bp, Homo sapien
gctacttcctcctaggaaagttgtg

SEQ ID NO: 2302681 - DNA, 25 bp, Homo sapien
tttatttctgctccagtggtgctac

SEQ ID NO: 2302682 - DNA, 25 bp, Homo sapien
cttcctcctaggaaagttgtggtct

SEQ ID NO: 2302683 - DNA, 25 bp, Homo sapien
gtcttacttcctggtgctccagtgg

SEQ ID NO: 2302684 - DNA, 25 bp, Homo sapien
cttacttcctggtgctccagtggtg

SEQ ID NO: 2302685 - DNA, 25 bp, Homo sapien
cttcctggtgctccagtggtggctc

SEQ ID NO: 2302686 - DNA, 25 bp, Homo sapien
ctgtcttacttcctggtgctccagt

SEQ ID NO: 2302687 - DNA, 25 bp, Homo sapien
gaggcaactgtcgtaccagagagca

SEQ ID NO: 2302688 - DNA, 25 bp, Homo sapien
ccagaggcaactgtcgtaccagaga

SEQ ID NO: 2302689 - DNA, 25 bp, Homo sapien
gcaactgtcgtaccagagagcactt

SEQ ID NO: 2302690 - DNA, 25 bp, Homo sapien
aactgtcgtaccagagagcacttta

SEQ ID NO: 2302691 - DNA, 25 bp, Homo sapien
actgcttcagtgattccagagaaag

SEQ ID NO: 2302692 - DNA, 25 bp, Homo sapien
gttactgcttcagtgattccagaga

SEQ ID NO: 2302693 - DNA, 25 bp, Homo sapien
tactgcttcagtgattccagagaaa

SEQ ID NO: 2302694 - DNA, 25 bp, Homo sapien
ctgttactgcttcagtgattccaga

SEQ ID NO: 2302695 - DNA, 25 bp, Homo sapien
ctgtagaagagaaaagagagagaat

SEQ ID NO: 2302696 - DNA, 25 bp, Homo sapien
gtagaagagaaaagagagagaatat

SEQ ID NO: 2302697 - DNA, 25 bp, Homo sapien
tgtagaagagaaaagagagagaata

SEQ ID NO: 2302698 - DNA, 25 bp, Homo sapien
gactgctggagagttggctccccag

SEQ ID NO: 2302699 - DNA, 25 bp, Homo sapien
tggagagttggctccccagtgcagt

SEQ ID NO: 2302700 - DNA, 25 bp, Homo sapien
ctgtttgactgctggagagttggct

SEQ ID NO: 2302701 - DNA, 25 bp, Homo sapien
ctccccagtgcagtggtcatagatc

SEQ ID NO: 2302702 - DNA, 25 bp, Homo sapien
tccaggtgcaacagttgtgtgagag

SEQ ID NO: 2302703 - DNA, 25 bp, Homo sapien
gacttgatcatctgatgcaccagtg

SEQ ID NO: 2302704 - DNA, 25 bp, Homo sapien
ttgatcatctgatgcaccagtggtg

SEQ ID NO: 2302705 - DNA, 25 bp, Homo sapien
gtgacttgatcatctgatgcaccag

SEQ ID NO: 2302706 - DNA, 25 bp, Homo sapien
cagtgacttgatcatctgatgcacc

SEQ ID NO: 2302707 - DNA, 25 bp, Homo sapien
tgtactggaacttccaggtgcaaca

SEQ ID NO: 2302708 - DNA, 25 bp, Homo sapien
gtgctcaaggccacaccagtagtgc

SEQ ID NO: 2302709 - DNA, 25 bp, Homo sapien
ccaggtgcaacagttgtgctcaagg

SEQ ID NO: 2302710 - DNA, 25 bp, Homo sapien
cttccaggtgcaacagttgtgctca

SEQ ID NO: 2302711 - DNA, 25 bp, Homo sapien
tgtcttctgtcccactacagtggtt

SEQ ID NO: 2302712 - DNA, 25 bp, Homo sapien
tggttctatggactcctgtggaagt

SEQ ID NO: 2302713 - DNA, 25 bp, Homo sapien
acagtggttctatggactcctgtgg

SEQ ID NO: 2302714 - DNA, 25 bp, Homo sapien
tccttgctttgctgaccctctagtg

SEQ ID NO: 2302715 - DNA, 25 bp, Homo sapien
tattgtgcttctagttccttgcttt

SEQ ID NO: 2302716 - DNA, 25 bp, Homo sapien
ttgctttgctgaccctctagtggta

SEQ ID NO: 2302717 - DNA, 25 bp, Homo sapien
tttgctgaccctctagtggtagctc

SEQ ID NO: 2302718 - DNA, 25 bp, Homo sapien
ccagtgcctctaaaggacgtcgtag

SEQ ID NO: 2302719 - DNA, 25 bp, Homo sapien
cccagtgcctctaaaggacgtcgta

SEQ ID NO: 2302720 - DNA, 25 bp, Homo sapien
cagtgcctctaaaggacgtcgtagc

SEQ ID NO: 2302721 - DNA, 25 bp, Homo sapien
gtgcctctaaaggacgtcgtagctt

SEQ ID NO: 2302722 - DNA, 25 bp, Homo sapien
ctagttgaatgctagtgacttggct

SEQ ID NO: 2302723 - DNA, 25 bp, Homo sapien
ctagtgacttggctacctgataccc

SEQ ID NO: 2302724 - DNA, 25 bp, Homo sapien
aatgctagtgacttggctacctgat

SEQ ID NO: 2302725 - DNA, 25 bp, Homo sapien
tagttgaatgctagtgacttggcta

SEQ ID NO: 2302726 - DNA, 25 bp, Homo sapien
gagatggtgttgccagagaccactc

SEQ ID NO: 2302727 - DNA, 25 bp, Homo sapien
aactgctaggtgagatggtgttgcc

SEQ ID NO: 2302728 - DNA, 25 bp, Homo sapien
agggtttggcctctcagatgtgcca

SEQ ID NO: 2302729 - DNA, 25 bp, Homo sapien
ctatttcacttccagggtttggcct

SEQ ID NO: 2302730 - DNA, 25 bp, Homo sapien
cctctcagatgtgccactggtagct

SEQ ID NO: 2302731 - DNA, 25 bp, Homo sapien
tttggcctctcagatgtgccactgg

SEQ ID NO: 2302732 - DNA, 25 bp, Homo sapien
gtgccagagactatgccagtggtgc

SEQ ID NO: 2302733 - DNA, 25 bp, Homo sapien
caccattgcccaaagaagttgtggc

SEQ ID NO: 2302734 - DNA, 25 bp, Homo sapien
ccattgcccaaagaagttgtggctt

SEQ ID NO: 2302735 - DNA, 25 bp, Homo sapien
tccagcctcagtggttccaccattg

SEQ ID NO: 2302736 - DNA, 25 bp, Homo sapien
ctattttacttccagcctcagtggt

SEQ ID NO: 2302737 - DNA, 25 bp, Homo sapien
cccaggtacaatggtcgtgccagta

SEQ ID NO: 2302738 - DNA, 25 bp, Homo sapien
tgtgttgaaactcccaggtacaatg

SEQ ID NO: 2302739 - DNA, 25 bp, Homo sapien
gaaactcccaggtacaatggtcgtg

SEQ ID NO: 2302740 - DNA, 25 bp, Homo sapien
ggtcgtgccagtagttatcccagtg

SEQ ID NO: 2302741 - DNA, 25 bp, Homo sapien
gtggcaactccaacgtctgtagaag

SEQ ID NO: 2302742 - DNA, 25 bp, Homo sapien
ccaacgtctgtagaagtggtagcct

SEQ ID NO: 2302743 - DNA, 25 bp, Homo sapien
aactccagtggcaactccaacgtct

SEQ ID NO: 2302744 - DNA, 25 bp, Homo sapien
caactccaacgtctgtagaagtggt

SEQ ID NO: 2302745 - DNA, 25 bp, Homo sapien
ctgttttacttccagtaggttggct

SEQ ID NO: 2302746 - DNA, 25 bp, Homo sapien
ctccaggtaaggctgttgttccaga

SEQ ID NO: 2302747 - DNA, 25 bp, Homo sapien
ccaggtaaggctgttgttccagagc

SEQ ID NO: 2302748 - DNA, 25 bp, Homo sapien
tccaggtaaggctgttgttccagag

SEQ ID NO: 2302749 - DNA, 25 bp, Homo sapien
acctccaggtaaggctgttgttcca

SEQ ID NO: 2302750 - DNA, 25 bp, Homo sapien
ctgtaagagcaaatcaagaaaagtg

SEQ ID NO: 2302751 - DNA, 25 bp, Homo sapien
gcaaatcaagaaaagtggaaaagat

SEQ ID NO: 2302752 - DNA, 25 bp, Homo sapien
agagcaaatcaagaaaagtggaaaa

SEQ ID NO: 2302753 - DNA, 25 bp, Homo sapien
gtaagagcaaatcaagaaaagtgga

SEQ ID NO: 2302754 - DNA, 25 bp, Homo sapien
acatcacctttaaaagttgtggcct

SEQ ID NO: 2302755 - DNA, 25 bp, Homo sapien
aatttctgcttcagtggttccaaca

SEQ ID NO: 2302756 - DNA, 25 bp, Homo sapien
cagtggttccaacatcacctttaaa

SEQ ID NO: 2302757 - DNA, 25 bp, Homo sapien
ctgcttcagtggttccaacatcacc

SEQ ID NO: 2302758 - DNA, 25 bp, Homo sapien
gactcccgttgatcctggggtattg

SEQ ID NO: 2302759 - DNA, 25 bp, Homo sapien
ctgctggtgactcccgttgatcctg

SEQ ID NO: 2302760 - DNA, 25 bp, Homo sapien
ggtgactcccgttgatcctggggta

SEQ ID NO: 2302761 - DNA, 25 bp, Homo sapien
actcccgttgatcctggggtattgc

SEQ ID NO: 2302762 - DNA, 25 bp, Homo sapien
ctgtgtttgagcttccagaaatatt

SEQ ID NO: 2302763 - DNA, 25 bp, Homo sapien
cagaaatatttatgctagaggctac

SEQ ID NO: 2302764 - DNA, 25 bp, Homo sapien
gtaataagagggaaggacacaacac

SEQ ID NO: 2302765 - DNA, 25 bp, Homo sapien
ggcttttccacatagcctcgtttct

SEQ ID NO: 2302766 - DNA, 25 bp, Homo sapien
gattccacttgataccacagtggtt

SEQ ID NO: 2302767 - DNA, 25 bp, Homo sapien
gtgattccacttgataccacagtgg

SEQ ID NO: 2302768 - DNA, 25 bp, Homo sapien
cagtgattccacttgataccacagt

SEQ ID NO: 2302769 - DNA, 25 bp, Homo sapien
ccagtgattccacttgataccacag

SEQ ID NO: 2302770 - DNA, 25 bp, Homo sapien
gtggttttgtcagatgcttccttgg

SEQ ID NO: 2302771 - DNA, 25 bp, Homo sapien
aggtccaggagcagtggttttgtca

SEQ ID NO: 2302772 - DNA, 25 bp, Homo sapien
ttgtcagatgcttccttggaaggac

SEQ ID NO: 2302773 - DNA, 25 bp, Homo sapien
ggttttgtcagatgcttccttggaa

SEQ ID NO: 2302774 - DNA, 25 bp, Homo sapien
tttctttgactcctgtggaagcagt

SEQ ID NO: 2302775 - DNA, 25 bp, Homo sapien
ttctttgactcctgtggaagcagtg

SEQ ID NO: 2302776 - DNA, 25 bp, Homo sapien
tctttgactcctgtggaagcagtga

SEQ ID NO: 2302777 - DNA, 25 bp, Homo sapien
ttaggaggggagccccagcaaaagc

SEQ ID NO: 2302778 - DNA, 25 bp, Homo sapien
tcataattctctgctcagaattctc

SEQ ID NO: 2302779 - DNA, 25 bp, Homo sapien
gactagcacccttcataattctctg

SEQ ID NO: 2302780 - DNA, 25 bp, Homo sapien
gaattctcagtctgcacgaaggagt

SEQ ID NO: 2302781 - DNA, 25 bp, Homo sapien
tataagacattttaggactagcacc

SEQ ID NO: 2302782 - DNA, 25 bp, Homo sapien
ggctgggatacttgtggtcttgttg

SEQ ID NO: 2302783 - DNA, 25 bp, Homo sapien
tggctgggatacttgtggtcttgtt

SEQ ID NO: 2302784 - DNA, 25 bp, Homo sapien
atacttgtggtcttgttggcactcc

SEQ ID NO: 2302785 - DNA, 25 bp, Homo sapien
tacttgtggtcttgttggcactcca

SEQ ID NO: 2302786 - DNA, 25 bp, Homo sapien
ttctctggttgccacgacagtggtt

SEQ ID NO: 2302787 - DNA, 25 bp, Homo sapien
tttcggtttctacttctctggttgc

SEQ ID NO: 2302788 - DNA, 25 bp, Homo sapien
tcggtttctacttctctggttgcca

SEQ ID NO: 2302789 - DNA, 25 bp, Homo sapien
tctctggttgccacgacagtggttt

SEQ ID NO: 2302790 - DNA, 25 bp, Homo sapien
ctggagctggtggaagtgaggctag

SEQ ID NO: 2302791 - DNA, 25 bp, Homo sapien
gctggtggaagtgaggctagacatt

SEQ ID NO: 2302792 - DNA, 25 bp, Homo sapien
ggagctggtggaagtgaggctagac

SEQ ID NO: 2302793 - DNA, 25 bp, Homo sapien
gagctggtggaagtgaggctagaca

SEQ ID NO: 2302794 - DNA, 25 bp, Homo sapien
tagcgtgacctctgaaatttgattg

SEQ ID NO: 2302795 - DNA, 25 bp, Homo sapien
tgtggaacaattctgaagtcgtgga

SEQ ID NO: 2302796 - DNA, 25 bp, Homo sapien
caagaggaaccattaatgtggaaca

SEQ ID NO: 2302797 - DNA, 25 bp, Homo sapien
ccatggctagtgacttttattagcg

SEQ ID NO: 2302798 - DNA, 25 bp, Homo sapien
tgttttgcagtctgacttccgcttt

SEQ ID NO: 2302799 - DNA, 25 bp, Homo sapien
gcagtctgacttccgcttttccaat

SEQ ID NO: 2302800 - DNA, 25 bp, Homo sapien
ttttgcagtctgacttccgcttttc

SEQ ID NO: 2302801 - DNA, 25 bp, Homo sapien
ttgcagtctgacttccgcttttcca

SEQ ID NO: 2302802 - DNA, 25 bp, Homo sapien
tctcttctcccaatggaccgtgaca

SEQ ID NO: 2302803 - DNA, 25 bp, Homo sapien
ctcttctcccaatggaccgtgacaa

SEQ ID NO: 2302804 - DNA, 25 bp, Homo sapien
tcttctcccaatggaccgtgacaaa

SEQ ID NO: 2302805 - DNA, 25 bp, Homo sapien
gggcactcctcaggtttacagtcta

SEQ ID NO: 2302806 - DNA, 25 bp, Homo sapien
cacagcaggtgtcattagattggaa

SEQ ID NO: 2302807 - DNA, 25 bp, Homo sapien
cacagtatccgatttcacagcaggt

SEQ ID NO: 2302808 - DNA, 25 bp, Homo sapien
gcttctcgccggttttgcatgtggg

SEQ ID NO: 2302809 - DNA, 25 bp, Homo sapien
agtcagtattgttaaataaacatgt

SEQ ID NO: 2302810 - DNA, 25 bp, Homo sapien
gtcagtattgttaaataaacatgtt

SEQ ID NO: 2302811 - DNA, 25 bp, Homo sapien
tagtcagtattgttaaataaacatg

SEQ ID NO: 2302812 - DNA, 25 bp, Homo sapien
atagtcagtattgttaaataaacat

SEQ ID NO: 2302813 - DNA, 25 bp, Homo sapien
agcccgtgtctttgcaggagtagga

SEQ ID NO: 2302814 - DNA, 25 bp, Homo sapien
gctggggtcatcgaatgaagcacca

SEQ ID NO: 2302815 - DNA, 25 bp, Homo sapien
ctactgcagcaaagcccgtgtcttt

SEQ ID NO: 2302816 - DNA, 25 bp, Homo sapien
gtttgctttgggcagtcctggacta

SEQ ID NO: 2302817 - DNA, 25 bp, Homo sapien
ccggccagggtttgtttaatatgag

SEQ ID NO: 2302818 - DNA, 25 bp, Homo sapien
gagaactgaatctcggcgttcatta

SEQ ID NO: 2302819 - DNA, 25 bp, Homo sapien
tttaatatgagaactgaatctcggc

SEQ ID NO: 2302820 - DNA, 25 bp, Homo sapien
gaatctcggcgttcattagttaaga

SEQ ID NO: 2302821 - DNA, 25 bp, Homo sapien
atgtatagcaacatttttttgaatc

SEQ ID NO: 2302822 - DNA, 25 bp, Homo sapien
caacatttttttgaatcatagattc

SEQ ID NO: 2302823 - DNA, 25 bp, Homo sapien
catttttttgaatcatagattctgt

SEQ ID NO: 2302824 - DNA, 25 bp, Homo sapien
gcaacatttttttgaatcatagatt

SEQ ID NO: 2302825 - DNA, 25 bp, Homo sapien
tacaagggaagatctgcaattattc

SEQ ID NO: 2302826 - DNA, 25 bp, Homo sapien
accactgtagataacagtcacattt

SEQ ID NO: 2302827 - DNA, 25 bp, Homo sapien
tttacaagggaagatctgcaattat

SEQ ID NO: 2302828 - DNA, 25 bp, Homo sapien
agggaagatctgcaattattcttac

SEQ ID NO: 2302829 - DNA, 25 bp, Homo sapien
tgtactgccatcaggacagtcaagt

SEQ ID NO: 2302830 - DNA, 25 bp, Homo sapien
tcttctcggcagcaaaggcatgaat

SEQ ID NO: 2302831 - DNA, 25 bp, Homo sapien
gtattggtaagggattgtactgcca

SEQ ID NO: 2302832 - DNA, 25 bp, Homo sapien
catgaatgttccaagagtaagatat

SEQ ID NO: 2302833 - DNA, 25 bp, Homo sapien
tttcagatccagtcaacaagagaac

SEQ ID NO: 2302834 - DNA, 25 bp, Homo sapien
acaaaattcctcacaatgagaactc

SEQ ID NO: 2302835 - DNA, 25 bp, Homo sapien
tcagcattaactgtacatgaaggtc

SEQ ID NO: 2302836 - DNA, 25 bp, Homo sapien
ataaataccaggcctgttaaaactg

SEQ ID NO: 2302837 - DNA, 25 bp, Homo sapien
acactgagtgtgaatatcctgcagt

SEQ ID NO: 2302838 - DNA, 25 bp, Homo sapien
gttgatggacttgtttcttgtcatc

SEQ ID NO: 2302839 - DNA, 25 bp, Homo sapien
catcttgtgtctttaaatcccttaa

SEQ ID NO: 2302840 - DNA, 25 bp, Homo sapien
cagatagtaactataattgttggaa

SEQ ID NO: 2302841 - DNA, 25 bp, Homo sapien
acaggatcagcagatcacacggtac

SEQ ID NO: 2302842 - DNA, 25 bp, Homo sapien
tatagcaacattgacatatccaaag

SEQ ID NO: 2302843 - DNA, 25 bp, Homo sapien
gacatatccaaagagcagagctgac

SEQ ID NO: 2302844 - DNA, 25 bp, Homo sapien
tgacacaggatcagcagatcacacg

SEQ ID NO: 2302845 - DNA, 25 bp, Homo sapien
gtcggggaagctcgggcgacacagg

SEQ ID NO: 2302846 - DNA, 25 bp, Homo sapien
ctcgtcggggaagctcgggcgacac

SEQ ID NO: 2302847 - DNA, 25 bp, Homo sapien
ggaagctcgggcgacacaggagccc

SEQ ID NO: 2302848 - DNA, 25 bp, Homo sapien
acgagccctgccccgcaagaaggca

SEQ ID NO: 2302849 - DNA, 25 bp, Homo sapien
ggcctcatgatgatgtagcactgca

SEQ ID NO: 2302850 - DNA, 25 bp, Homo sapien
tagttttgaagagagcaagggtcag

SEQ ID NO: 2302851 - DNA, 25 bp, Homo sapien
gcaagggtcagtggtcatggaaggc

SEQ ID NO: 2302852 - DNA, 25 bp, Homo sapien
aagcagttgcaaactttaataatag

SEQ ID NO: 2302853 - DNA, 25 bp, Homo sapien
gataggggtgagagtctctgtctct

SEQ ID NO: 2302854 - DNA, 25 bp, Homo sapien
ttcttttagttcagctgaaatgcca

SEQ ID NO: 2302855 - DNA, 25 bp, Homo sapien
acatctccatccacaagctctgctt

SEQ ID NO: 2302856 - DNA, 25 bp, Homo sapien
aagtgtgtgtagttcagcagccaaa

SEQ ID NO: 2302857 - DNA, 25 bp, Homo sapien
gcccagtgatcacatataaagccct

SEQ ID NO: 2302858 - DNA, 25 bp, Homo sapien
gcttcaatccatgggccttggatgc

SEQ ID NO: 2302859 - DNA, 25 bp, Homo sapien
gtttctgtgccccatatagtcactt

SEQ ID NO: 2302860 - DNA, 25 bp, Homo sapien
tctgtgccccatatagtcacttggg

SEQ ID NO: 2302861 - DNA, 25 bp, Homo sapien
cagtgactcttctatcacctagagc

SEQ ID NO: 2302862 - DNA, 25 bp, Homo sapien
tctatcacctagagcctccataact

SEQ ID NO: 2302863 - DNA, 25 bp, Homo sapien
ttccgctgcaaacacctgggagcgc

SEQ ID NO: 2302864 - DNA, 25 bp, Homo sapien
tccgctgcaaacacctgggagcgca

SEQ ID NO: 2302865 - DNA, 25 bp, Homo sapien
tgcaaacacctgggagcgcatctcc

SEQ ID NO: 2302866 - DNA, 25 bp, Homo sapien
gctgcaaacacctgggagcgcatct

SEQ ID NO: 2302867 - DNA, 25 bp, Homo sapien
tcctgctcgcctcggtgcggcacag

SEQ ID NO: 2302868 - DNA, 25 bp, Homo sapien
tgctcgcctcggtgcggcacagctg

SEQ ID NO: 2302869 - DNA, 25 bp, Homo sapien
gctcctgctcgcctcggtgcggcac

SEQ ID NO: 2302870 - DNA, 25 bp, Homo sapien
gcctcggtgcggcacagctggacca

SEQ ID NO: 2302871 - DNA, 25 bp, Homo sapien
tctttcacagagaatttttcaatcc

SEQ ID NO: 2302872 - DNA, 25 bp, Homo sapien
tttttcaatccactgcagaatgacc

SEQ ID NO: 2302873 - DNA, 25 bp, Homo sapien
aaatagttttctttcacagagaatt

SEQ ID NO: 2302874 - DNA, 25 bp, Homo sapien
gaatttttcaatccactgcagaatg

SEQ ID NO: 2302875 - DNA, 25 bp, Homo sapien
ttgactggaagcctctcgggttcct

SEQ ID NO: 2302876 - DNA, 25 bp, Homo sapien
gttccttatcggagaaggcactgaa

SEQ ID NO: 2302877 - DNA, 25 bp, Homo sapien
tttgcccactaggacaaaaatagtg

SEQ ID NO: 2302878 - DNA, 25 bp, Homo sapien
tgggctctaccagcatgactgaatt

SEQ ID NO: 2302879 - DNA, 25 bp, Homo sapien
tccagccacctgtctccttggccac

SEQ ID NO: 2302880 - DNA, 25 bp, Homo sapien
ctggggactccagccacctgtctcc

SEQ ID NO: 2302881 - DNA, 25 bp, Homo sapien
ctccagccacctgtctccttggcca

SEQ ID NO: 2302882 - DNA, 25 bp, Homo sapien
agccacctgtctccttggccaccat

SEQ ID NO: 2302883 - DNA, 25 bp, Homo sapien
agcagttacacctggcttaaccagc

SEQ ID NO: 2302884 - DNA, 25 bp, Homo sapien
ctgtgggaaagtataataattcaga

SEQ ID NO: 2302885 - DNA, 25 bp, Homo sapien
tgtacagcatggtctgttccttcag

SEQ ID NO: 2302886 - DNA, 25 bp, Homo sapien
aatgcattctaagtgtacagcatgg

SEQ ID NO: 2302887 - DNA, 25 bp, Homo sapien
caatgcaataaagagtgatgtcgac

SEQ ID NO: 2302888 - DNA, 25 bp, Homo sapien
gatgtcgacattaacaatatcacct

SEQ ID NO: 2302889 - DNA, 25 bp, Homo sapien
tctgaacaaatttccgtgcatcctc

SEQ ID NO: 2302890 - DNA, 25 bp, Homo sapien
tgatggcttgcatgaggcactcata

SEQ ID NO: 2302891 - DNA, 25 bp, Homo sapien
gattggatgtttgtatgaggccagc

SEQ ID NO: 2302892 - DNA, 25 bp, Homo sapien
gtatgaggccagcatgtcttgcccc

SEQ ID NO: 2302893 - DNA, 25 bp, Homo sapien
tatgaggccagcatgtcttgcccca

SEQ ID NO: 2302894 - DNA, 25 bp, Homo sapien
cctggggattggatgtttgtatgag

SEQ ID NO: 2302895 - DNA, 25 bp, Homo sapien
gaattaatgcctaatgcacatacta

SEQ ID NO: 2302896 - DNA, 25 bp, Homo sapien
tcattagagtttttcttggaaccac

SEQ ID NO: 2302897 - DNA, 25 bp, Homo sapien
gagatttggcatttactagtggtaa

SEQ ID NO: 2302898 - DNA, 25 bp, Homo sapien
ataaaccagtgtaaggacatagtca

SEQ ID NO: 2302899 - DNA, 25 bp, Homo sapien
gaacaccaggttaatcattcctata

SEQ ID NO: 2302900 - DNA, 25 bp, Homo sapien
taatctccaattaggtctgtcatag

SEQ ID NO: 2302901 - DNA, 25 bp, Homo sapien
tgaatacactgaggataaaagccaa

SEQ ID NO: 2302902 - DNA, 25 bp, Homo sapien
cactaataaatcaggagaacaccag

SEQ ID NO: 2302903 - DNA, 25 bp, Homo sapien
gcccatcttgggtagacaaactgag

SEQ ID NO: 2302904 - DNA, 25 bp, Homo sapien
caggtcacttttaggcatggtagga

SEQ ID NO: 2302905 - DNA, 25 bp, Homo sapien
tgatcagccgtatctccaaagcagg

SEQ ID NO: 2302906 - DNA, 25 bp, Homo sapien
ttttcaagagaaagacacgtggtcc

SEQ ID NO: 2302907 - DNA, 25 bp, Homo sapien
gaaatactgtagctgccatattgta

SEQ ID NO: 2302908 - DNA, 25 bp, Homo sapien
ggtatgagcatcattccaggagcca

SEQ ID NO: 2302909 - DNA, 25 bp, Homo sapien
gatgagatacctcttgctaacagag

SEQ ID NO: 2302910 - DNA, 25 bp, Homo sapien
catactcaatagaggactgggacca

SEQ ID NO: 2302911 - DNA, 25 bp, Homo sapien
tttgtcccacaggtacggttgtgca

SEQ ID NO: 2302912 - DNA, 25 bp, Homo sapien
taatgcatttaactaaagtactact

SEQ ID NO: 2302913 - DNA, 25 bp, Homo sapien
gacttttgtccgaactcattttcac

SEQ ID NO: 2302914 - DNA, 25 bp, Homo sapien
tctgacttttgtccgaactcatttt

SEQ ID NO: 2302915 - DNA, 25 bp, Homo sapien
cgttctgacttttgtccgaactcat

SEQ ID NO: 2302916 - DNA, 25 bp, Homo sapien
tgacttttgtccgaactcattttca

SEQ ID NO: 2302917 - DNA, 25 bp, Homo sapien
gaatagaaggttaggtactagatgt

SEQ ID NO: 2302918 - DNA, 25 bp, Homo sapien
tgaagtgtcatacacagaaagataa

SEQ ID NO: 2302919 - DNA, 25 bp, Homo sapien
aacagaatagaaggttaggtactag

SEQ ID NO: 2302920 - DNA, 25 bp, Homo sapien
ttatgctaactgaagtgtcatacac

SEQ ID NO: 2302921 - DNA, 25 bp, Homo sapien
taaggcaatctaatcagttatcaaa

SEQ ID NO: 2302922 - DNA, 25 bp, Homo sapien
aagcccagaaatggatgactttact

SEQ ID NO: 2302923 - DNA, 25 bp, Homo sapien
aacacaaaggattctaagaggctac

SEQ ID NO: 2302924 - DNA, 25 bp, Homo sapien
tcagtgagacgaaggaaaaaggaga

SEQ ID NO: 2302925 - DNA, 25 bp, Homo sapien
cagttataccacaatacgcctctct

SEQ ID NO: 2302926 - DNA, 25 bp, Homo sapien
cgtcctgggtataatatctattgca

SEQ ID NO: 2302927 - DNA, 25 bp, Homo sapien
ttatgtgttgacttatctgtcgtcc

SEQ ID NO: 2302928 - DNA, 25 bp, Homo sapien
gaataaatacagcaacagttatacc

SEQ ID NO: 2302929 - DNA, 25 bp, Homo sapien
taaagacaacagatctggagacaac

SEQ ID NO: 2302930 - DNA, 25 bp, Homo sapien
tccctttatcaaccacaacttggaa

SEQ ID NO: 2302931 - DNA, 25 bp, Homo sapien
tcattgaaaagacaacttgttggcc

SEQ ID NO: 2302932 - DNA, 25 bp, Homo sapien
ttcacatttctagaggatataccct

SEQ ID NO: 2302933 - DNA, 25 bp, Homo sapien
cttgctgcccttccatctgctatca

SEQ ID NO: 2302934 - DNA, 25 bp, Homo sapien
ttgctgcccttccatctgctatcat

SEQ ID NO: 2302935 - DNA, 25 bp, Homo sapien
gtcaactttcatcaaagttcctaag

SEQ ID NO: 2302936 - DNA, 25 bp, Homo sapien
caactttcatcaaagttcctaagac

SEQ ID NO: 2302937 - DNA, 25 bp, Homo sapien
aagttcctaagacatctccactgcc

SEQ ID NO: 2302938 - DNA, 25 bp, Homo sapien
aactttcatcaaagttcctaagaca

SEQ ID NO: 2302939 - DNA, 25 bp, Homo sapien
tcatttctctactggagcagcacca

SEQ ID NO: 2302940 - DNA, 25 bp, Homo sapien
ctggagcagcaccatagttctgtct

SEQ ID NO: 2302941 - DNA, 25 bp, Homo sapien
gagcagcaccatagttctgtctatt

SEQ ID NO: 2302942 - DNA, 25 bp, Homo sapien
accatagttctgtctattttctgag

SEQ ID NO: 2302943 - DNA, 25 bp, Homo sapien
tcataaaatatcaaggtccctgaac

SEQ ID NO: 2302944 - DNA, 25 bp, Homo sapien
ccatcagctaatgaacggatacaga

SEQ ID NO: 2302945 - DNA, 25 bp, Homo sapien
cagtttggtggtaactttgcctcca

SEQ ID NO: 2302946 - DNA, 25 bp, Homo sapien
cagatagtcattgctgcattattca

SEQ ID NO: 2302947 - DNA, 25 bp, Homo sapien
cacccttaattgtatgcatgagaga

SEQ ID NO: 2302948 - DNA, 25 bp, Homo sapien
gggacttcaatatattaggcatcag

SEQ ID NO: 2302949 - DNA, 25 bp, Homo sapien
cctgattgtgattggataaggcaac

SEQ ID NO: 2302950 - DNA, 25 bp, Homo sapien
ccttttcttagtttgattcagagac

SEQ ID NO: 2302951 - DNA, 25 bp, Homo sapien
tttacagggacagataggcagaagt

SEQ ID NO: 2302952 - DNA, 25 bp, Homo sapien
tttgattctttcataaaacaaaata

SEQ ID NO: 2302953 - DNA, 25 bp, Homo sapien
ttctttcataaaacaaaatattgag

SEQ ID NO: 2302954 - DNA, 25 bp, Homo sapien
gattctttcataaaacaaaatattg

SEQ ID NO: 2302955 - DNA, 25 bp, Homo sapien
ctttcataaaacaaaatattgagat

SEQ ID NO: 2302956 - DNA, 25 bp, Homo sapien
tctgtgaacttcataacctgtcttc

SEQ ID NO: 2302957 - DNA, 25 bp, Homo sapien
tgtctctgtgaacttcataacctgt

SEQ ID NO: 2302958 - DNA, 25 bp, Homo sapien
taacctgtcttctcacagaggacca

SEQ ID NO: 2302959 - DNA, 25 bp, Homo sapien
gaacttcataacctgtcttctcaca

SEQ ID NO: 2302960 - DNA, 25 bp, Homo sapien
tcaactttttacagcttcagtcaaa

SEQ ID NO: 2302961 - DNA, 25 bp, Homo sapien
ctttttacagcttcagtcaaaatac

SEQ ID NO: 2302962 - DNA, 25 bp, Homo sapien
ggcctgaacgcccactggcaagacg

SEQ ID NO: 2302963 - DNA, 25 bp, Homo sapien
tccatggagcgcatccctggcacag

SEQ ID NO: 2302964 - DNA, 25 bp, Homo sapien
catcgatgcaactaccttcattaag

SEQ ID NO: 2302965 - DNA, 25 bp, Homo sapien
aagaaatcttgaagcggccgggcac

SEQ ID NO: 2302966 - DNA, 25 bp, Homo sapien
taagaaatcttgaagcggccgggca

SEQ ID NO: 2302967 - DNA, 25 bp, Homo sapien
tgaacatcgatgcaactaccttcat

SEQ ID NO: 2302968 - DNA, 25 bp, Homo sapien
tcagtagaagttcggttcaattttc

SEQ ID NO: 2302969 - DNA, 25 bp, Homo sapien
gtattcagtagaagttcggttcaat

SEQ ID NO: 2302970 - DNA, 25 bp, Homo sapien
gctctatggcagttggataatttta

SEQ ID NO: 2302971 - DNA, 25 bp, Homo sapien
aagaatttagctctatggcagttgg

SEQ ID NO: 2302972 - DNA, 25 bp, Homo sapien
taatagatattatcacaagatgact

SEQ ID NO: 2302973 - DNA, 25 bp, Homo sapien
ctgctaaacaggtagtaatagatat

SEQ ID NO: 2302974 - DNA, 25 bp, Homo sapien
acaagatgactgaccagcaaccaca

SEQ ID NO: 2302975 - DNA, 25 bp, Homo sapien
gatattatcacaagatgactgacca

SEQ ID NO: 2302976 - DNA, 25 bp, Homo sapien
tgtcctgtgacccacctctgaagca

SEQ ID NO: 2302977 - DNA, 25 bp, Homo sapien
cctctgaagcatctagattctgttt

SEQ ID NO: 2302978 - DNA, 25 bp, Homo sapien
cacatctctctagaggaactacttc

SEQ ID NO: 2302979 - DNA, 25 bp, Homo sapien
ttctgttttacatacctggctgggc

SEQ ID NO: 2302980 - DNA, 25 bp, Homo sapien
cagttgagtgagacttttccttcca

SEQ ID NO: 2302981 - DNA, 25 bp, Homo sapien
tctggataaatggtattgattggct

SEQ ID NO: 2302982 - DNA, 25 bp, Homo sapien
ttcctctggataaatggtattgatt

SEQ ID NO: 2302983 - DNA, 25 bp, Homo sapien
ggaaagggctggctcgtgccctaca

SEQ ID NO: 2302984 - DNA, 25 bp, Homo sapien
caaggagaagcatagccttttccat

SEQ ID NO: 2302985 - DNA, 25 bp, Homo sapien
gcaaggagaagcatagccttttcca

SEQ ID NO: 2302986 - DNA, 25 bp, Homo sapien
cctccacatggatctgattgtgctt

SEQ ID NO: 2302987 - DNA, 25 bp, Homo sapien
catggatctgattgtgcttgtgaca

SEQ ID NO: 2302988 - DNA, 25 bp, Homo sapien
cttcctccacatggatctgattgtg

SEQ ID NO: 2302989 - DNA, 25 bp, Homo sapien
cacatggatctgattgtgcttgtga

SEQ ID NO: 2302990 - DNA, 25 bp, Homo sapien
gataacaaggtttcctcctaccata

SEQ ID NO: 2302991 - DNA, 25 bp, Homo sapien
agtgcttctgaccatcccgtagtta

SEQ ID NO: 2302992 - DNA, 25 bp, Homo sapien
caaagctcagggttgcttcagtgct

SEQ ID NO: 2302993 - DNA, 25 bp, Homo sapien
tcacttgtgagatcaacgtccccat

SEQ ID NO: 2302994 - DNA, 25 bp, Homo sapien
cctcaggacgttcctcaggtgggaa

SEQ ID NO: 2302995 - DNA, 25 bp, Homo sapien
gacgttcctcaggtgggaaaggatc

SEQ ID NO: 2302996 - DNA, 25 bp, Homo sapien
tgacctcaggacgttcctcaggtgg

SEQ ID NO: 2302997 - DNA, 25 bp, Homo sapien
ctcaggacgttcctcaggtgggaaa

SEQ ID NO: 2302998 - DNA, 25 bp, Homo sapien
cgctctttgtaatagaaggactgga

SEQ ID NO: 2302999 - DNA, 25 bp, Homo sapien
aattcatttagaagccagcgatagc

SEQ ID NO: 2303000 - DNA, 25 bp, Homo sapien
caaatcgccgtttatccattgtgat

SEQ ID NO: 2303001 - DNA, 25 bp, Homo sapien
taattgcctttgtcggaagcctcaa

SEQ ID NO: 2303002 - DNA, 25 bp, Homo sapien
ttttggcccatcaatgcatatacat

SEQ ID NO: 2303003 - DNA, 25 bp, Homo sapien
gcatatacatccttgaactgaacta

SEQ ID NO: 2303004 - DNA, 25 bp, Homo sapien
tacaatatcagcaggatatggtttt

SEQ ID NO: 2303005 - DNA, 25 bp, Homo sapien
gcccatcaatgcatatacatccttg

SEQ ID NO: 2303006 - DNA, 25 bp, Homo sapien
aaccttccgccatcggatatccgga

SEQ ID NO: 2303007 - DNA, 25 bp, Homo sapien
ccgccatcggatatccggaacagga

SEQ ID NO: 2303008 - DNA, 25 bp, Homo sapien
agaaccttccgccatcggatatccg

SEQ ID NO: 2303009 - DNA, 25 bp, Homo sapien
ggttctagaaccttccgccatcgga

SEQ ID NO: 2303010 - DNA, 25 bp, Homo sapien
caaccatcggattgtagggatgggc

SEQ ID NO: 2303011 - DNA, 25 bp, Homo sapien
ggccacacaaggccagtagagatca

SEQ ID NO: 2303012 - DNA, 25 bp, Homo sapien
tgtgtcattgatgtgttctacccac

SEQ ID NO: 2303013 - DNA, 25 bp, Homo sapien
actgcctatgtccacctctgtgtca

SEQ ID NO: 2303014 - DNA, 25 bp, Homo sapien
ggctcttgttctattcatcctacag

SEQ ID NO: 2303015 - DNA, 25 bp, Homo sapien
ttcatcctacagagctgagagtcca

SEQ ID NO: 2303016 - DNA, 25 bp, Homo sapien
gagctgagagtccaccttttcccct

SEQ ID NO: 2303017 - DNA, 25 bp, Homo sapien
tgcccaaaggctcttgttctattca

SEQ ID NO: 2303018 - DNA, 25 bp, Homo sapien
aaaagtcacatcatacagtcttaat

SEQ ID NO: 2303019 - DNA, 25 bp, Homo sapien
gcactgatacattccggcattttca

SEQ ID NO: 2303020 - DNA, 25 bp, Homo sapien
catatgtgttttcagctatgcactg

SEQ ID NO: 2303021 - DNA, 25 bp, Homo sapien
gcatttgcataaatggctccatatg

SEQ ID NO: 2303022 - DNA, 25 bp, Homo sapien
ttaggtttgcattcaattatcaccc

SEQ ID NO: 2303023 - DNA, 25 bp, Homo sapien
ccatgaaaactttggtttcggtgca

SEQ ID NO: 2303024 - DNA, 25 bp, Homo sapien
attatcacccttccacctttagcag

SEQ ID NO: 2303025 - DNA, 25 bp, Homo sapien
ttcatttcaaaagttggagccaacg

SEQ ID NO: 2303026 - DNA, 25 bp, Homo sapien
taacaagggttccagtgctattagc

SEQ ID NO: 2303027 - DNA, 25 bp, Homo sapien
ccatcattccttgtaatgttgttga

SEQ ID NO: 2303028 - DNA, 25 bp, Homo sapien
tgttgatttccaagctaccatcttc

SEQ ID NO: 2303029 - DNA, 25 bp, Homo sapien
tctgcaaagcatgtatagatacctc

SEQ ID NO: 2303030 - DNA, 25 bp, Homo sapien
caactgtgatatcggcattaattgg

SEQ ID NO: 2303031 - DNA, 25 bp, Homo sapien
ttggggccaatataattcgcgtagg

SEQ ID NO: 2303032 - DNA, 25 bp, Homo sapien
ggtggcgttttctccaactgtgata

SEQ ID NO: 2303033 - DNA, 25 bp, Homo sapien
gttttctccaactgtgatatcggca

SEQ ID NO: 2303034 - DNA, 25 bp, Homo sapien
gatcaaaggacgcagcacactgcat

SEQ ID NO: 2303035 - DNA, 25 bp, Homo sapien
atcgatcacatagccattgaaggac

SEQ ID NO: 2303036 - DNA, 25 bp, Homo sapien
gttaaaatcgatcacatagccattg

SEQ ID NO: 2303037 - DNA, 25 bp, Homo sapien
agatccaaggcaggatcaaaggacg

SEQ ID NO: 2303038 - DNA, 25 bp, Homo sapien
gaagttaggctagagagtgacatca

SEQ ID NO: 2303039 - DNA, 25 bp, Homo sapien
tgtgtgtcacaagactgtgccagga

SEQ ID NO: 2303040 - DNA, 25 bp, Homo sapien
gagcaatttgacattggccgaatgc

SEQ ID NO: 2303041 - DNA, 25 bp, Homo sapien
tagcccaactgaaaacacacccagg

SEQ ID NO: 2303042 - DNA, 25 bp, Homo sapien
tctcactacaaggtcagctgaagct

SEQ ID NO: 2303043 - DNA, 25 bp, Homo sapien
tatcttccagcatgtttcagctgcg

SEQ ID NO: 2303044 - DNA, 25 bp, Homo sapien
ccacaattgtctgggcagtgcatgt

SEQ ID NO: 2303045 - DNA, 25 bp, Homo sapien
tcagctgcgcatttcggattagtaa

SEQ ID NO: 2303046 - DNA, 25 bp, Homo sapien
tgacgaggcaacccgaaatatactt

SEQ ID NO: 2303047 - DNA, 25 bp, Homo sapien
ttgacgaggcaacccgaaatatact

SEQ ID NO: 2303048 - DNA, 25 bp, Homo sapien
tttgacgaggcaacccgaaatatac

SEQ ID NO: 2303049 - DNA, 25 bp, Homo sapien
ggaggcaggcttgcacagacgggga

SEQ ID NO: 2303050 - DNA, 25 bp, Homo sapien
gcaggcttgcacagacggggagaaa

SEQ ID NO: 2303051 - DNA, 25 bp, Homo sapien
aggcaggcttgcacagacggggaga

SEQ ID NO: 2303052 - DNA, 25 bp, Homo sapien
ggcttgcacagacggggagaaagga

SEQ ID NO: 2303053 - DNA, 25 bp, Homo sapien
cagagccatggtaggacttcagttg

SEQ ID NO: 2303054 - DNA, 25 bp, Homo sapien
taaaatcttgctactcagatgaggg

SEQ ID NO: 2303055 - DNA, 25 bp, Homo sapien
aaaagactgccggagtaatgcccct

SEQ ID NO: 2303056 - DNA, 25 bp, Homo sapien
tcaagtcctcccagtaaaaatcaca

SEQ ID NO: 2303057 - DNA, 25 bp, Homo sapien
attgctagatgaagtaaaagagaaa

SEQ ID NO: 2303058 - DNA, 25 bp, Homo sapien
agagaaactcatacctaaacacaaa

SEQ ID NO: 2303059 - DNA, 25 bp, Homo sapien
gaattgctagatgaagtaaaagaga

SEQ ID NO: 2303060 - DNA, 25 bp, Homo sapien
aaagagaaactcatacctaaacaca

SEQ ID NO: 2303061 - DNA, 25 bp, Homo sapien
ccttttcttggcaagggcagtccaa

SEQ ID NO: 2303062 - DNA, 25 bp, Homo sapien
catctgcgggagaaaaccttgattt

SEQ ID NO: 2303063 - DNA, 25 bp, Homo sapien
ttgatttccgccacccacaagtctg

SEQ ID NO: 2303064 - DNA, 25 bp, Homo sapien
caacctcgggaacaggtcgtcagga

SEQ ID NO: 2303065 - DNA, 25 bp, Homo sapien
ggctctaatgtcttctattctcaga

SEQ ID NO: 2303066 - DNA, 25 bp, Homo sapien
tgattgtctgaaccacggctccaag

SEQ ID NO: 2303067 - DNA, 25 bp, Homo sapien
ctccaagtaagtgccacagaagtgg

SEQ ID NO: 2303068 - DNA, 25 bp, Homo sapien
gaatagtcttggtctggatagtgta

SEQ ID NO: 2303069 - DNA, 25 bp, Homo sapien
cacaagcagaatctttgatgtcccc

SEQ ID NO: 2303070 - DNA, 25 bp, Homo sapien
tctttaagatccgaacacaagcaga

SEQ ID NO: 2303071 - DNA, 25 bp, Homo sapien
cgaacacaagcagaatctttgatgt

SEQ ID NO: 2303072 - DNA, 25 bp, Homo sapien
gtatttctttaagatccgaacacaa

SEQ ID NO: 2303073 - DNA, 25 bp, Homo sapien
ggctctcctctacccagtgtattgg

SEQ ID NO: 2303074 - DNA, 25 bp, Homo sapien
aattctgttagatggtatactgggc

SEQ ID NO: 2303075 - DNA, 25 bp, Homo sapien
tgttagatggtatactgggctctcc

SEQ ID NO: 2303076 - DNA, 25 bp, Homo sapien
taccacgcggaattcatactccatc

SEQ ID NO: 2303077 - DNA, 25 bp, Homo sapien
tgagtaccaactatggacattgtgt

SEQ ID NO: 2303078 - DNA, 25 bp, Homo sapien
atcatcatcttaccctcctggtttc

SEQ ID NO: 2303079 - DNA, 25 bp, Homo sapien
tgttgtgtgaagcactaaagataac

SEQ ID NO: 2303080 - DNA, 25 bp, Homo sapien
tccagtactggatatgattttctca

SEQ ID NO: 2303081 - DNA, 25 bp, Homo sapien
atggaaaggaaagaccagcaccaga

SEQ ID NO: 2303082 - DNA, 25 bp, Homo sapien
ggaatcactagatatggaaaggaaa

SEQ ID NO: 2303083 - DNA, 25 bp, Homo sapien
tggaaaggaaagaccagcaccagac

SEQ ID NO: 2303084 - DNA, 25 bp, Homo sapien
atcactagatatggaaaggaaagac

SEQ ID NO: 2303085 - DNA, 25 bp, Homo sapien
gcccatgttatggtcagctctctgt

SEQ ID NO: 2303086 - DNA, 25 bp, Homo sapien
cgcccatgttatggtcagctctctg

SEQ ID NO: 2303087 - DNA, 25 bp, Homo sapien
tcctacatctgaaggagccacattt

SEQ ID NO: 2303088 - DNA, 25 bp, Homo sapien
ggataatgacacacacggaggcgtg

SEQ ID NO: 2303089 - DNA, 25 bp, Homo sapien
cggaggcgtgctctttgtaaaaaca

SEQ ID NO: 2303090 - DNA, 25 bp, Homo sapien
tcctagatgttatgtgactcctccc

SEQ ID NO: 2303091 - DNA, 25 bp, Homo sapien
gaatacacgttttatgaatgcagcg

SEQ ID NO: 2303092 - DNA, 25 bp, Homo sapien
catctttatggacatatcggccagt

SEQ ID NO: 2303093 - DNA, 25 bp, Homo sapien
tcggccagtatcaggattagtaact

SEQ ID NO: 2303094 - DNA, 25 bp, Homo sapien
aaatgcagtggaagggctcatggtt

SEQ ID NO: 2303095 - DNA, 25 bp, Homo sapien
cactatgtaaccaaaattgttgcca

SEQ ID NO: 2303096 - DNA, 25 bp, Homo sapien
agacttttacacctacttctgttgg

SEQ ID NO: 2303097 - DNA, 25 bp, Homo sapien
cagatatctcagaagatgataagac

SEQ ID NO: 2303098 - DNA, 25 bp, Homo sapien
aagacttttacacctacttctgttg

SEQ ID NO: 2303099 - DNA, 25 bp, Homo sapien
tgttcccaatgaacagatatctcag

SEQ ID NO: 2303100 - DNA, 25 bp, Homo sapien
tcctttgaacccatatagaagctag

SEQ ID NO: 2303101 - DNA, 25 bp, Homo sapien
tagttactatgtggcctagaatacg

SEQ ID NO: 2303102 - DNA, 25 bp, Homo sapien
cagttggagaggaatataattttgc

SEQ ID NO: 2303103 - DNA, 25 bp, Homo sapien
caaacttcttctgagccattcttaa

SEQ ID NO: 2303104 - DNA, 25 bp, Homo sapien
tggaggtccacaccctgcactattg

SEQ ID NO: 2303105 - DNA, 25 bp, Homo sapien
tgcaggccccgacttctataaaata

SEQ ID NO: 2303106 - DNA, 25 bp, Homo sapien
tcgagcctggccgagtactcttggc

SEQ ID NO: 2303107 - DNA, 25 bp, Homo sapien
tctggcagaaggttctcgagcctgg

SEQ ID NO: 2303108 - DNA, 25 bp, Homo sapien
gaccttactgaactgatgatccttg

SEQ ID NO: 2303109 - DNA, 25 bp, Homo sapien
tagtgcaacgacatgatcccaggtg

SEQ ID NO: 2303110 - DNA, 25 bp, Homo sapien
tcccaggtgattatatagcgtgaac

SEQ ID NO: 2303111 - DNA, 25 bp, Homo sapien
tatatcccgtcactgtagattcatt

SEQ ID NO: 2303112 - DNA, 25 bp, Homo sapien
cttataaagtacagaaatgtaaata

SEQ ID NO: 2303113 - DNA, 25 bp, Homo sapien
aagtcataataatgagccaatgctc

SEQ ID NO: 2303114 - DNA, 25 bp, Homo sapien
tcataataatgagccaatgctctaa

SEQ ID NO: 2303115 - DNA, 25 bp, Homo sapien
ataataatgagccaatgctctaaca

SEQ ID NO: 2303116 - DNA, 25 bp, Homo sapien
gtttgtgagttgaatacagcttgcc

SEQ ID NO: 2303117 - DNA, 25 bp, Homo sapien
ctccacaacgtattctccatctctg

SEQ ID NO: 2303118 - DNA, 25 bp, Homo sapien
atctcctccatcactgtgcgcgcga

SEQ ID NO: 2303119 - DNA, 25 bp, Homo sapien
gcgcgaacctccacaacgtattctc

SEQ ID NO: 2303120 - DNA, 25 bp, Homo sapien
tagtctaaatcccagaagctaggtt

SEQ ID NO: 2303121 - DNA, 25 bp, Homo sapien
ccagtgccattagtgataggtaaac

SEQ ID NO: 2303122 - DNA, 25 bp, Homo sapien
caagggtgagtacagagagcaaaag

SEQ ID NO: 2303123 - DNA, 25 bp, Homo sapien
cctttcggtgaggaatgatgaacca

SEQ ID NO: 2303124 - DNA, 25 bp, Homo sapien
gcaaatccgtggctgtaatgtccct

SEQ ID NO: 2303125 - DNA, 25 bp, Homo sapien
ttcaaagtaagagcaaatccgtggc

SEQ ID NO: 2303126 - DNA, 25 bp, Homo sapien
aactcaaaagaagatctaggtactg

SEQ ID NO: 2303127 - DNA, 25 bp, Homo sapien
gaggtacccgtgcttcttcaaagta

SEQ ID NO: 2303128 - DNA, 25 bp, Homo sapien
tatactccctattcctgccactact

SEQ ID NO: 2303129 - DNA, 25 bp, Homo sapien
ttcttgcgtttgtcacaggaccact

SEQ ID NO: 2303130 - DNA, 25 bp, Homo sapien
tgcgtttgtcacaggaccacttctc

SEQ ID NO: 2303131 - DNA, 25 bp, Homo sapien
tctccctctatactccctattcctg

SEQ ID NO: 2303132 - DNA, 25 bp, Homo sapien
agttgagcactgtgactaggacttc

SEQ ID NO: 2303133 - DNA, 25 bp, Homo sapien
gccaaggttaatggttcctcttcag

SEQ ID NO: 2303134 - DNA, 25 bp, Homo sapien
tatgccaaggttaatggttcctctt

SEQ ID NO: 2303135 - DNA, 25 bp, Homo sapien
gactaggacttcttggacattttca

SEQ ID NO: 2303136 - DNA, 25 bp, Homo sapien
caagtagacaaggatgccaaaggca

SEQ ID NO: 2303137 - DNA, 25 bp, Homo sapien
ttccaagtagacaaggatgccaaag

SEQ ID NO: 2303138 - DNA, 25 bp, Homo sapien
aattccaagtagacaaggatgccaa

SEQ ID NO: 2303139 - DNA, 25 bp, Homo sapien
cagcagtaagccgagaagacttggg

SEQ ID NO: 2303140 - DNA, 25 bp, Homo sapien
gagacaccatcggaaagacatatta

SEQ ID NO: 2303141 - DNA, 25 bp, Homo sapien
ggttaaatcatgcaactgtcacaga

SEQ ID NO: 2303142 - DNA, 25 bp, Homo sapien
tattcctaaccatgtaaagactgtc

SEQ ID NO: 2303143 - DNA, 25 bp, Homo sapien
tggaaggaattgtggtcatcccagg

SEQ ID NO: 2303144 - DNA, 25 bp, Homo sapien
tcagaatcttgcgtcttaaagcaga

SEQ ID NO: 2303145 - DNA, 25 bp, Homo sapien
gactgttgacatacttccactggga

SEQ ID NO: 2303146 - DNA, 25 bp, Homo sapien
ccaacatgggtcacattgcaaaagt

SEQ ID NO: 2303147 - DNA, 25 bp, Homo sapien
taaaaggcaagcatgcatttggcaa

SEQ ID NO: 2303148 - DNA, 25 bp, Homo sapien
tgaacaacggagaagtattatccct

SEQ ID NO: 2303149 - DNA, 25 bp, Homo sapien
ttgcaaccacgagcattctgactgt

SEQ ID NO: 2303150 - DNA, 25 bp, Homo sapien
tactgcccctaagagttccctcatg

SEQ ID NO: 2303151 - DNA, 25 bp, Homo sapien
tgcatagatttgagtcaccacaacc

SEQ ID NO: 2303152 - DNA, 25 bp, Homo sapien
ccatctaagggcagctttgaacagc

SEQ ID NO: 2303153 - DNA, 25 bp, Homo sapien
acctactgctgtccaaatgtgtgag

SEQ ID NO: 2303154 - DNA, 25 bp, Homo sapien
gaagcggagccaagttatcctaaag

SEQ ID NO: 2303155 - DNA, 25 bp, Homo sapien
tgcacctctgtcagccgtgagaacg

SEQ ID NO: 2303156 - DNA, 25 bp, Homo sapien
tggactggaatctatgccattgacc

SEQ ID NO: 2303157 - DNA, 25 bp, Homo sapien
ggccttcagactacagcaatagttt

SEQ ID NO: 2303158 - DNA, 25 bp, Homo sapien
tagttttcctaagtctccagcttgc

SEQ ID NO: 2303159 - DNA, 25 bp, Homo sapien
gacagcaatatcagatcatgggact

SEQ ID NO: 2303160 - DNA, 25 bp, Homo sapien
tttcccgtgacctgtgggttttgca

SEQ ID NO: 2303161 - DNA, 25 bp, Homo sapien
ttcccgtgacctgtgggttttgcat

SEQ ID NO: 2303162 - DNA, 25 bp, Homo sapien
ctgctgtctgtacacttgatgatac

SEQ ID NO: 2303163 - DNA, 25 bp, Homo sapien
tctgctgtctgtacacttgatgata

SEQ ID NO: 2303164 - DNA, 25 bp, Homo sapien
tgatgatacaggaaggaacgagggg

SEQ ID NO: 2303165 - DNA, 25 bp, Homo sapien
caaatctggagaacaatctggcagc

SEQ ID NO: 2303166 - DNA, 25 bp, Homo sapien
gcagctttgtcttggcaccagggaa

SEQ ID NO: 2303167 - DNA, 25 bp, Homo sapien
tcaagaatgtgcagccctatgaccc

SEQ ID NO: 2303168 - DNA, 25 bp, Homo sapien
taaagttactctaacatgcccctga

SEQ ID NO: 2303169 - DNA, 25 bp, Homo sapien
ggccgcacagtttgcactccagagc

SEQ ID NO: 2303170 - DNA, 25 bp, Homo sapien
ttctgcgaagcgctccagggcaaag

SEQ ID NO: 2303171 - DNA, 25 bp, Homo sapien
ctccagagccgggtccacggcttct

SEQ ID NO: 2303172 - DNA, 25 bp, Homo sapien
ctggccgcacagtttgcactccaga

SEQ ID NO: 2303173 - DNA, 25 bp, Homo sapien
ccgcacggcgtgcacaggggctctt

SEQ ID NO: 2303174 - DNA, 25 bp, Homo sapien
agacgtgcccgcacggcgtgcacag

SEQ ID NO: 2303175 - DNA, 25 bp, Homo sapien
acgtgcccgcacggcgtgcacaggg

SEQ ID NO: 2303176 - DNA, 25 bp, Homo sapien
gcccgcacggcgtgcacaggggctc

SEQ ID NO: 2303177 - DNA, 25 bp, Homo sapien
cctccgcaccgcccagggcaacagg

SEQ ID NO: 2303178 - DNA, 25 bp, Homo sapien
agcacccggtacagctcgccgggcg

SEQ ID NO: 2303179 - DNA, 25 bp, Homo sapien
tgcgcagcggcagcacccggtacag

SEQ ID NO: 2303180 - DNA, 25 bp, Homo sapien
ggctggcactgcagcgggcaccggc

SEQ ID NO: 2303181 - DNA, 25 bp, Homo sapien
gcgggcagggccgaagtcgcagtgc

SEQ ID NO: 2303182 - DNA, 25 bp, Homo sapien
tccagctcgtgcagcctgaccgagt

SEQ ID NO: 2303183 - DNA, 25 bp, Homo sapien
aagtcgcagtgctcgacgtgcgcct

SEQ ID NO: 2303184 - DNA, 25 bp, Homo sapien
agctcgtgcagcctgaccgagtggc

SEQ ID NO: 2303185 - DNA, 25 bp, Homo sapien
gtgtcggaccgcagcccccccgcgc

SEQ ID NO: 2303186 - DNA, 25 bp, Homo sapien
tgtcggaccgcagcccccccgcgcg

SEQ ID NO: 2303187 - DNA, 25 bp, Homo sapien
ccagccctgggtgtcggaccgcagc

SEQ ID NO: 2303188 - DNA, 25 bp, Homo sapien
cagcccccccgcgcgggcacctcac

SEQ ID NO: 2303189 - DNA, 25 bp, Homo sapien
ctccaggcgaggacccgaggcccgg

SEQ ID NO: 2303190 - DNA, 25 bp, Homo sapien
tgcagcgcccagagctgcgccagca

SEQ ID NO: 2303191 - DNA, 25 bp, Homo sapien
ctgcagcgcccagagctgcgccagc

SEQ ID NO: 2303192 - DNA, 25 bp, Homo sapien
acgaagttgcggacgtgagccatgt

SEQ ID NO: 2303193 - DNA, 25 bp, Homo sapien
gacgtgagccatgtattgggtgaac

SEQ ID NO: 2303194 - DNA, 25 bp, Homo sapien
cgaggtcgccgacgaagttgcggac

SEQ ID NO: 2303195 - DNA, 25 bp, Homo sapien
gtattgggtgaacttctcctggtac

SEQ ID NO: 2303196 - DNA, 25 bp, Homo sapien
cgggaaagtcttcgctttctgtctt

SEQ ID NO: 2303197 - DNA, 25 bp, Homo sapien
aaagtcttcgctttctgtctttcct

SEQ ID NO: 2303198 - DNA, 25 bp, Homo sapien
gccgggaaagtcttcgctttctgtc

SEQ ID NO: 2303199 - DNA, 25 bp, Homo sapien
ggaaagtcttcgctttctgtctttc

SEQ ID NO: 2303200 - DNA, 25 bp, Homo sapien
tgacaccagtcccaggtgtgcgtgc

SEQ ID NO: 2303201 - DNA, 25 bp, Homo sapien
acgctgacaccagtcccaggtgtgc

SEQ ID NO: 2303202 - DNA, 25 bp, Homo sapien
tgcgtgcgcggctgccagggccgcg

SEQ ID NO: 2303203 - DNA, 25 bp, Homo sapien
tcaacgctgacaccagtcccaggtg

SEQ ID NO: 2303204 - DNA, 25 bp, Homo sapien
tcaggcagtggcagcgcaagtgtca

SEQ ID NO: 2303205 - DNA, 25 bp, Homo sapien
tatctgtgcttttccccgggtcctc

SEQ ID NO: 2303206 - DNA, 25 bp, Homo sapien
tgaaacctggactggtaatacaaag

SEQ ID NO: 2303207 - DNA, 25 bp, Homo sapien
ctatctgtgcttttccccgggtcct

SEQ ID NO: 2303208 - DNA, 25 bp, Homo sapien
gatttcactgcaattgaaaacagat

SEQ ID NO: 2303209 - DNA, 25 bp, Homo sapien
gctcttttatcctaatgcagtatct

SEQ ID NO: 2303210 - DNA, 25 bp, Homo sapien
caggatctgttaggctactgtagtc

SEQ ID NO: 2303211 - DNA, 25 bp, Homo sapien
gcagtatctaaatctgatttcactg

SEQ ID NO: 2303212 - DNA, 25 bp, Homo sapien
tttgcaagtatgtatttgaaaaaga

SEQ ID NO: 2303213 - DNA, 25 bp, Homo sapien
caagtatgtatttgaaaaagaacaa

SEQ ID NO: 2303214 - DNA, 25 bp, Homo sapien
tgcaagtatgtatttgaaaaagaac

SEQ ID NO: 2303215 - DNA, 25 bp, Homo sapien
gcaagtatgtatttgaaaaagaaca

SEQ ID NO: 2303216 - DNA, 25 bp, Homo sapien
gttgaatgtggcagaaggttgacat

SEQ ID NO: 2303217 - DNA, 25 bp, Homo sapien
tcctacaataagtttttatgtactg

SEQ ID NO: 2303218 - DNA, 25 bp, Homo sapien
aaaattaaggatggttgaatgtggc

SEQ ID NO: 2303219 - DNA, 25 bp, Homo sapien
tactgtaagttaactgacatgtgaa

SEQ ID NO: 2303220 - DNA, 25 bp, Homo sapien
gatttggtcgacctcctataatatt

SEQ ID NO: 2303221 - DNA, 25 bp, Homo sapien
tgatttggtcgacctcctataatat

SEQ ID NO: 2303222 - DNA, 25 bp, Homo sapien
tagtgaatggcttatgctctccatc

SEQ ID NO: 2303223 - DNA, 25 bp, Homo sapien
ctgatttggtcgacctcctataata

SEQ ID NO: 2303224 - DNA, 25 bp, Homo sapien
aaattccttcagtcgatgttccttc

SEQ ID NO: 2303225 - DNA, 25 bp, Homo sapien
taaattccttcagtcgatgttcctt

SEQ ID NO: 2303226 - DNA, 25 bp, Homo sapien
ctccatgattttgtcatgaatctcc

SEQ ID NO: 2303227 - DNA, 25 bp, Homo sapien
gccatctgctctgtcagcaggtcca

SEQ ID NO: 2303228 - DNA, 25 bp, Homo sapien
tccaggccatctgctctgtcagcag

SEQ ID NO: 2303229 - DNA, 25 bp, Homo sapien
tcatgaatctccaggccatctgctc

SEQ ID NO: 2303230 - DNA, 25 bp, Homo sapien
agagaagcactgtgcctccagcact

SEQ ID NO: 2303231 - DNA, 25 bp, Homo sapien
gtgctctgagctattcatctcaaag

SEQ ID NO: 2303232 - DNA, 25 bp, Homo sapien
gctctgagctattcatctcaaagat

SEQ ID NO: 2303233 - DNA, 25 bp, Homo sapien
tctgagctattcatctcaaagattc

SEQ ID NO: 2303234 - DNA, 25 bp, Homo sapien
gagctattcatctcaaagattccac

SEQ ID NO: 2303235 - DNA, 25 bp, Homo sapien
gatgcctgttgcttacgacttccca

SEQ ID NO: 2303236 - DNA, 25 bp, Homo sapien
tcgagactgggctccaaaccaatgc

SEQ ID NO: 2303237 - DNA, 25 bp, Homo sapien
tgttagaccaaaaggaggatgcctg

SEQ ID NO: 2303238 - DNA, 25 bp, Homo sapien
catctgaactactgcactggctgac

SEQ ID NO: 2303239 - DNA, 25 bp, Homo sapien
ttaacgtaatgtttgatgattccat

SEQ ID NO: 2303240 - DNA, 25 bp, Homo sapien
taacgtaatgtttgatgattccata

SEQ ID NO: 2303241 - DNA, 25 bp, Homo sapien
aacgtaatgtttgatgattccatat

SEQ ID NO: 2303242 - DNA, 25 bp, Homo sapien
gtgaccgagtacagcagcaacctgt

SEQ ID NO: 2303243 - DNA, 25 bp, Homo sapien
tgtgaccgagtacagcagcaacctg

SEQ ID NO: 2303244 - DNA, 25 bp, Homo sapien
tctgtgtgaccgagtacagcagcaa

SEQ ID NO: 2303245 - DNA, 25 bp, Homo sapien
tgtgtgaccgagtacagcagcaacc

SEQ ID NO: 2303246 - DNA, 25 bp, Homo sapien
tgtggaaaattggctagccatatgt

SEQ ID NO: 2303247 - DNA, 25 bp, Homo sapien
tggtgtggaaaattggctagccata

SEQ ID NO: 2303248 - DNA, 25 bp, Homo sapien
atggtgtggaaaattggctagccat

SEQ ID NO: 2303249 - DNA, 25 bp, Homo sapien
ggtgtggaaaattggctagccatat

SEQ ID NO: 2303250 - DNA, 25 bp, Homo sapien
atctaatttgtagcccaggcattgt

SEQ ID NO: 2303251 - DNA, 25 bp, Homo sapien
tctaatttgtagcccaggcattgtt

SEQ ID NO: 2303252 - DNA, 25 bp, Homo sapien
cttctatcacccaactggactgagc

SEQ ID NO: 2303253 - DNA, 25 bp, Homo sapien
agctggtcacaagtaaagccaaacc

SEQ ID NO: 2303254 - DNA, 25 bp, Homo sapien
tcacaagtaaagccaaacccaggaa

SEQ ID NO: 2303255 - DNA, 25 bp, Homo sapien
attggagtcaaaagggcgatgaacc

SEQ ID NO: 2303256 - DNA, 25 bp, Homo sapien
gaattggagtcaaaagggcgatgaa

SEQ ID NO: 2303257 - DNA, 25 bp, Homo sapien
gatgataaatccatcgttatgcttc

SEQ ID NO: 2303258 - DNA, 25 bp, Homo sapien
tgcataatacttcaggccccagtaa

SEQ ID NO: 2303259 - DNA, 25 bp, Homo sapien
gcttcttaaataattgaggttgaaa

SEQ ID NO: 2303260 - DNA, 25 bp, Homo sapien
tcagcaaagcactcttggatgatga

SEQ ID NO: 2303261 - DNA, 25 bp, Homo sapien
cagttctttgtgatactcaagcagc

SEQ ID NO: 2303262 - DNA, 25 bp, Homo sapien
tctggagggttgacaaacaataaca

SEQ ID NO: 2303263 - DNA, 25 bp, Homo sapien
tactagtctttctccaccgtgtcaa

SEQ ID NO: 2303264 - DNA, 25 bp, Homo sapien
cagttctttgtgatactcaaggcac

SEQ ID NO: 2303265 - DNA, 25 bp, Homo sapien
tatgaacatttacctgtttgtggca

SEQ ID NO: 2303266 - DNA, 25 bp, Homo sapien
taagtgtttcttgtgaatgaaactt

SEQ ID NO: 2303267 - DNA, 25 bp, Homo sapien
tagaatttgcctctatcagtggtca

SEQ ID NO: 2303268 - DNA, 25 bp, Homo sapien
tgtgtctgcctgctatcactcagga

SEQ ID NO: 2303269 - DNA, 25 bp, Homo sapien
ctggcctctagtggccaggaatcta

SEQ ID NO: 2303270 - DNA, 25 bp, Homo sapien
tggcactgataaaactggataactg

SEQ ID NO: 2303271 - DNA, 25 bp, Homo sapien
tttttggccatatgcccagtagtga

SEQ ID NO: 2303272 - DNA, 25 bp, Homo sapien
tctatgttgctgcacatgacacaat

SEQ ID NO: 2303273 - DNA, 25 bp, Homo sapien
tgtcttggcttaattatcgaactct

SEQ ID NO: 2303274 - DNA, 25 bp, Homo sapien
taaaggacctgcatgatctggctgc

SEQ ID NO: 2303275 - DNA, 25 bp, Homo sapien
tttgtgtgacaaacatacctgtctt

SEQ ID NO: 2303276 - DNA, 25 bp, Homo sapien
taaggtttatggattcaccagcagg

SEQ ID NO: 2303277 - DNA, 25 bp, Homo sapien
tagtctggctaattctgttaatctt

SEQ ID NO: 2303278 - DNA, 25 bp, Homo sapien
tatttgcacagaagtgttataatat

SEQ ID NO: 2303279 - DNA, 25 bp, Homo sapien
tccttcggttcaattgtcatcttag

SEQ ID NO: 2303280 - DNA, 25 bp, Homo sapien
tgaagccaccttgatcacggtggaa

SEQ ID NO: 2303281 - DNA, 25 bp, Homo sapien
tctctgacctctgcacctttgccat

SEQ ID NO: 2303282 - DNA, 25 bp, Homo sapien
agggcccttttactgccttctctga

SEQ ID NO: 2303283 - DNA, 25 bp, Homo sapien
ttctctgacctctgcacctttgcca

SEQ ID NO: 2303284 - DNA, 25 bp, Homo sapien
ttttactgccttctctgacctctgc

SEQ ID NO: 2303285 - DNA, 25 bp, Homo sapien
tatttctgcctctacttggagtaca

SEQ ID NO: 2303286 - DNA, 25 bp, Homo sapien
tggagtacaacataccagggatatg

SEQ ID NO: 2303287 - DNA, 25 bp, Homo sapien
tttgccaggatgagttatttctgcc

SEQ ID NO: 2303288 - DNA, 25 bp, Homo sapien
tctaaggaaatctgccaaactgctg

SEQ ID NO: 2303289 - DNA, 25 bp, Homo sapien
gctctttttagcccacctaatagtc

SEQ ID NO: 2303290 - DNA, 25 bp, Homo sapien
ctgtgctctttttagcccacctaat

SEQ ID NO: 2303291 - DNA, 25 bp, Homo sapien
gccttttaatctgctattcttgcct

SEQ ID NO: 2303292 - DNA, 25 bp, Homo sapien
ttgcctgtctgcaatgctgtgctct

SEQ ID NO: 2303293 - DNA, 25 bp, Homo sapien
gcagtgcgatttggccataacggac

SEQ ID NO: 2303294 - DNA, 25 bp, Homo sapien
ctaagaagggcagtgcgatttggcc

SEQ ID NO: 2303295 - DNA, 25 bp, Homo sapien
gatttggccataacggacactggag

SEQ ID NO: 2303296 - DNA, 25 bp, Homo sapien
gacactggagttgctagcctccggg

SEQ ID NO: 2303297 - DNA, 25 bp, Homo sapien
caatgtgatggacagatgctatggc

SEQ ID NO: 2303298 - DNA, 25 bp, Homo sapien
gaggaagaattccttctcttggaga

SEQ ID NO: 2303299 - DNA, 25 bp, Homo sapien
gatgtccatggatggggctcaacga

SEQ ID NO: 2303300 - DNA, 25 bp, Homo sapien
caagaaagtcatctcaacagaggtg

SEQ ID NO: 2303301 - DNA, 25 bp, Homo sapien
tcatgagagggcctgtgtgcttgtg

SEQ ID NO: 2303302 - DNA, 25 bp, Homo sapien
ggcctgtgtgcttgtgagcttttgc

SEQ ID NO: 2303303 - DNA, 25 bp, Homo sapien
cctgtgtgcttgtgagcttttgcct

SEQ ID NO: 2303304 - DNA, 25 bp, Homo sapien
gagagggcctgtgtgcttgtgagct

SEQ ID NO: 2303305 - DNA, 25 bp, Homo sapien
cagggtctccccattcagttatagg

SEQ ID NO: 2303306 - DNA, 25 bp, Homo sapien
ttgttaagatagaaaaccgatggcc

SEQ ID NO: 2303307 - DNA, 25 bp, Homo sapien
cagcctgaggtcaactggaaataca

SEQ ID NO: 2303308 - DNA, 25 bp, Homo sapien
atttagtcagcacacatcaggagag

SEQ ID NO: 2303309 - DNA, 25 bp, Homo sapien
catattagacctacagaactgcaag

SEQ ID NO: 2303310 - DNA, 25 bp, Homo sapien
tattctgaattactttggctactgg

SEQ ID NO: 2303311 - DNA, 25 bp, Homo sapien
gcattgaatgcatacaaagtcatgc

SEQ ID NO: 2303312 - DNA, 25 bp, Homo sapien
ctcatgagctttatggaataggtac

SEQ ID NO: 2303313 - DNA, 25 bp, Homo sapien
tatcagaggatctttcccatcacaa

SEQ ID NO: 2303314 - DNA, 25 bp, Homo sapien
taggcaccatcacgaaacctggaaa

SEQ ID NO: 2303315 - DNA, 25 bp, Homo sapien
tcagccagtaggctgatccatgcaa

SEQ ID NO: 2303316 - DNA, 25 bp, Homo sapien
catgcaatcacaagacccctaggtt

SEQ ID NO: 2303317 - DNA, 25 bp, Homo sapien
tataggagctcagagattcaaatgc

SEQ ID NO: 2303318 - DNA, 25 bp, Homo sapien
aaattctgttctgagggactcagac

SEQ ID NO: 2303319 - DNA, 25 bp, Homo sapien
gactcagactggtgtgaggccagca

SEQ ID NO: 2303320 - DNA, 25 bp, Homo sapien
tatactaccaaagatggactcttgg

SEQ ID NO: 2303321 - DNA, 25 bp, Homo sapien
tttgccagtcaaagccgtgataagg

SEQ ID NO: 2303322 - DNA, 25 bp, Homo sapien
gacagcctttgccagtcaaagccgt

SEQ ID NO: 2303323 - DNA, 25 bp, Homo sapien
gcagacatgatccattgtgtcccca

SEQ ID NO: 2303324 - DNA, 25 bp, Homo sapien
agccgtgataaggactgggttctga

SEQ ID NO: 2303325 - DNA, 25 bp, Homo sapien
agtggtcccatttctcgagtggaga

SEQ ID NO: 2303326 - DNA, 25 bp, Homo sapien
gagaaactggaaagacgtgacaggt

SEQ ID NO: 2303327 - DNA, 25 bp, Homo sapien
cgtgacaggtataggaaagcagagc

SEQ ID NO: 2303328 - DNA, 25 bp, Homo sapien
ctggacatggtacctgtgggtacca

SEQ ID NO: 2303329 - DNA, 25 bp, Homo sapien
agggcaaggttggaggtcccatcct

SEQ ID NO: 2303330 - DNA, 25 bp, Homo sapien
cagggcaaggttggaggtcccatcc

SEQ ID NO: 2303331 - DNA, 25 bp, Homo sapien
gcaaggttggaggtcccatcctctt

SEQ ID NO: 2303332 - DNA, 25 bp, Homo sapien
ggcaaggttggaggtcccatcctct

SEQ ID NO: 2303333 - DNA, 25 bp, Homo sapien
gaattctgaattttacttcccatcc

SEQ ID NO: 2303334 - DNA, 25 bp, Homo sapien
taacagatccatcctgagcaaatgc

SEQ ID NO: 2303335 - DNA, 25 bp, Homo sapien
tgcaacctgaacaaatgcatcctga

SEQ ID NO: 2303336 - DNA, 25 bp, Homo sapien
gaaatctgaataaatgcatccttaa

SEQ ID NO: 2303337 - DNA, 25 bp, Homo sapien
tcccaaacagttacatcctgaataa

SEQ ID NO: 2303338 - DNA, 25 bp, Homo sapien
ttctccatatccagcaattaccaga

SEQ ID NO: 2303339 - DNA, 25 bp, Homo sapien
tctccatatccagcaattaccagat

SEQ ID NO: 2303340 - DNA, 25 bp, Homo sapien
actgtcactatccctgctgactgca

SEQ ID NO: 2303341 - DNA, 25 bp, Homo sapien
ctgtcactatccctgctgactgcat

SEQ ID NO: 2303342 - DNA, 25 bp, Homo sapien
tgctgtcctaggaagtaacccattc

SEQ ID NO: 2303343 - DNA, 25 bp, Homo sapien
cctaggaagtaacccattccaagag

SEQ ID NO: 2303344 - DNA, 25 bp, Homo sapien
taacccattccaagagcggaggaca

SEQ ID NO: 2303345 - DNA, 25 bp, Homo sapien
ctaggatgtgctgtcctaggaagta

SEQ ID NO: 2303346 - DNA, 25 bp, Homo sapien
gtttaataggtatagcattgaactt

SEQ ID NO: 2303347 - DNA, 25 bp, Homo sapien
gaagtgtggccgttataacaatatt

SEQ ID NO: 2303348 - DNA, 25 bp, Homo sapien
aagtgtggccgttataacaatattg

SEQ ID NO: 2303349 - DNA, 25 bp, Homo sapien
ttaataggtatagcattgaacttat

SEQ ID NO: 2303350 - DNA, 25 bp, Homo sapien
ccaggtgagtccaacttccatttga

SEQ ID NO: 2303351 - DNA, 25 bp, Homo sapien
atttgacctctttgtgcccagcacg

SEQ ID NO: 2303352 - DNA, 25 bp, Homo sapien
gaaggtggtaaaatccagcagaacc

SEQ ID NO: 2303353 - DNA, 25 bp, Homo sapien
actacactcagtgttttgcagaagg

SEQ ID NO: 2303354 - DNA, 25 bp, Homo sapien
cacaaatgtgattggaagtggatct

SEQ ID NO: 2303355 - DNA, 25 bp, Homo sapien
gcttacaagtagaatatatccacca

SEQ ID NO: 2303356 - DNA, 25 bp, Homo sapien
gaatacccgacattctcactgtgca

SEQ ID NO: 2303357 - DNA, 25 bp, Homo sapien
aaaacctcacaagagacgttgagcc

SEQ ID NO: 2303358 - DNA, 25 bp, Homo sapien
ccatctctcacgttcccgatggaaa

SEQ ID NO: 2303359 - DNA, 25 bp, Homo sapien
cgttcccgatggaaatagcttatat

SEQ ID NO: 2303360 - DNA, 25 bp, Homo sapien
tcaaaacagccgaaatatttccttc

SEQ ID NO: 2303361 - DNA, 25 bp, Homo sapien
cgatggaaatagcttatattcacca

SEQ ID NO: 2303362 - DNA, 25 bp, Homo sapien
caataaatacatgagcgcatgtgtc

SEQ ID NO: 2303363 - DNA, 25 bp, Homo sapien
aattcagtactgatccgcatttagg

SEQ ID NO: 2303364 - DNA, 25 bp, Homo sapien
catcctcctgacaacagtaggcgtt

SEQ ID NO: 2303365 - DNA, 25 bp, Homo sapien
ggtaatgacgtaaggagccatcctc

SEQ ID NO: 2303366 - DNA, 25 bp, Homo sapien
gccaatagcatgcttgccctttcca

SEQ ID NO: 2303367 - DNA, 25 bp, Homo sapien
gaatcacaacaaatagacgcaaatg

SEQ ID NO: 2303368 - DNA, 25 bp, Homo sapien
tagacgcaaatgtaagctgtgagct

SEQ ID NO: 2303369 - DNA, 25 bp, Homo sapien
ctaagctggcacgagaatcacaaca

SEQ ID NO: 2303370 - DNA, 25 bp, Homo sapien
caagtgaactgaaagggaatcaccc

SEQ ID NO: 2303371 - DNA, 25 bp, Homo sapien
gagagagcaaatcttctaatttccc

SEQ ID NO: 2303372 - DNA, 25 bp, Homo sapien
ttagctggaagcgtaagccagagtg

SEQ ID NO: 2303373 - DNA, 25 bp, Homo sapien
gtccagaaacacagacaaaccgctg

SEQ ID NO: 2303374 - DNA, 25 bp, Homo sapien
ggaaacttcatacagcagtttgtag

SEQ ID NO: 2303375 - DNA, 25 bp, Homo sapien
catacagcagtttgtagtgttcctc

SEQ ID NO: 2303376 - DNA, 25 bp, Homo sapien
ctgggaaacttcatacagcagtttg

SEQ ID NO: 2303377 - DNA, 25 bp, Homo sapien
cttcatacagcagtttgtagtgttc

SEQ ID NO: 2303378 - DNA, 25 bp, Homo sapien
acatcctgatgaggtgaccgtggca

SEQ ID NO: 2303379 - DNA, 25 bp, Homo sapien
gagcccgaccttgtctcataagtga

SEQ ID NO: 2303380 - DNA, 25 bp, Homo sapien
gacaatgtaaccttaaggagcccga

SEQ ID NO: 2303381 - DNA, 25 bp, Homo sapien
taatgggtacagaacatcagtcaca

SEQ ID NO: 2303382 - DNA, 25 bp, Homo sapien
catccagccatctttaatgaagttt

SEQ ID NO: 2303383 - DNA, 25 bp, Homo sapien
taaatggcaatataggcgggcccac

SEQ ID NO: 2303384 - DNA, 25 bp, Homo sapien
ataattgcccctgagtgatagccct

SEQ ID NO: 2303385 - DNA, 25 bp, Homo sapien
cagggatcatgaggagcacaccaat

SEQ ID NO: 2303386 - DNA, 25 bp, Homo sapien
tacttggccagtaagtacagagtcc

SEQ ID NO: 2303387 - DNA, 25 bp, Homo sapien
ggagtcaccagtatcaccaggcagt

SEQ ID NO: 2303388 - DNA, 25 bp, Homo sapien
caccaggcagtagatcaaaattagc

SEQ ID NO: 2303389 - DNA, 25 bp, Homo sapien
ctttctgcattatgagttgggagtc

SEQ ID NO: 2303390 - DNA, 25 bp, Homo sapien
ctgatattctttggtgtctgatgtc

SEQ ID NO: 2303391 - DNA, 25 bp, Homo sapien
taataaacaggagtagtatatgcaa

SEQ ID NO: 2303392 - DNA, 25 bp, Homo sapien
gattgagaggatagggtgtcataat

SEQ ID NO: 2303393 - DNA, 25 bp, Homo sapien
tccaaaacggttgttatatcgaatg

SEQ ID NO: 2303394 - DNA, 25 bp, Homo sapien
tgttatatcgaatgattgagaggat

SEQ ID NO: 2303395 - DNA, 25 bp, Homo sapien
tcataagctgcacttctgaagccat

SEQ ID NO: 2303396 - DNA, 25 bp, Homo sapien
gatgtgttcgaaggtgatgtccgtc

SEQ ID NO: 2303397 - DNA, 25 bp, Homo sapien
gctggtctactaagaggtgttcgcc

SEQ ID NO: 2303398 - DNA, 25 bp, Homo sapien
cttggcattgcgaaaagcttccact

SEQ ID NO: 2303399 - DNA, 25 bp, Homo sapien
aacagggctttggaagaaatgatag

SEQ ID NO: 2303400 - DNA, 25 bp, Homo sapien
acaaacagggctttggaagaaatga

SEQ ID NO: 2303401 - DNA, 25 bp, Homo sapien
aaacagggctttggaagaaatgata

SEQ ID NO: 2303402 - DNA, 25 bp, Homo sapien
caaacagggctttggaagaaatgat

SEQ ID NO: 2303403 - DNA, 25 bp, Homo sapien
tgctagtggaactgcttcttttcaa

SEQ ID NO: 2303404 - DNA, 25 bp, Homo sapien
ctgctagtggaactgcttcttttca

SEQ ID NO: 2303405 - DNA, 25 bp, Homo sapien
aactgcttcttttcaacatctgctt

SEQ ID NO: 2303406 - DNA, 25 bp, Homo sapien
tgcttcttttcaacatctgctttac

SEQ ID NO: 2303407 - DNA, 25 bp, Homo sapien
gtccgcatagcccttttgggctctt

SEQ ID NO: 2303408 - DNA, 25 bp, Homo sapien
tcttggaatatcgaagcctgctgct

SEQ ID NO: 2303409 - DNA, 25 bp, Homo sapien
tgctgctttggacatctgatgtgtt

SEQ ID NO: 2303410 - DNA, 25 bp, Homo sapien
ttatagctggactgggtccgcatag

SEQ ID NO: 2303411 - DNA, 25 bp, Homo sapien
gtgtctaccagataaatctccttgc

SEQ ID NO: 2303412 - DNA, 25 bp, Homo sapien
cttgccttgtgtctaccagataaat

SEQ ID NO: 2303413 - DNA, 25 bp, Homo sapien
gccttgtgtctaccagataaatctc

SEQ ID NO: 2303414 - DNA, 25 bp, Homo sapien
cttgtgtctaccagataaatctcct

SEQ ID NO: 2303415 - DNA, 25 bp, Homo sapien
tgagagaatgctaggaataagggcc

SEQ ID NO: 2303416 - DNA, 25 bp, Homo sapien
tgctctgctttggaataagatctgt

SEQ ID NO: 2303417 - DNA, 25 bp, Homo sapien
tctacgtgaagtccatcaatttgca

SEQ ID NO: 2303418 - DNA, 25 bp, Homo sapien
agggcctatggtcagagttgtattc

SEQ ID NO: 2303419 - DNA, 25 bp, Homo sapien
gaaatatactcattgtcctcataaa

SEQ ID NO: 2303420 - DNA, 25 bp, Homo sapien
aatatactcattgtcctcataaaat

SEQ ID NO: 2303421 - DNA, 25 bp, Homo sapien
actcattgtcctcataaaattcatg

SEQ ID NO: 2303422 - DNA, 25 bp, Homo sapien
tatactcattgtcctcataaaattc

SEQ ID NO: 2303423 - DNA, 25 bp, Homo sapien
tcaaccgtaacttcatgaagaaatg

SEQ ID NO: 2303424 - DNA, 25 bp, Homo sapien
aaccgtaacttcatgaagaaatgtg

SEQ ID NO: 2303425 - DNA, 25 bp, Homo sapien
cctcaaccgtaacttcatgaagaaa

SEQ ID NO: 2303426 - DNA, 25 bp, Homo sapien
ccctcaaccgtaacttcatgaagaa

SEQ ID NO: 2303427 - DNA, 25 bp, Homo sapien
gtaaagtggaagagaacactttgct

SEQ ID NO: 2303428 - DNA, 25 bp, Homo sapien
tggaagagaacactttgctgaactt

SEQ ID NO: 2303429 - DNA, 25 bp, Homo sapien
aaagtggaagagaacactttgctga

SEQ ID NO: 2303430 - DNA, 25 bp, Homo sapien
agtggaagagaacactttgctgaac

SEQ ID NO: 2303431 - DNA, 25 bp, Homo sapien
gatttatttcaacctttagctggct

SEQ ID NO: 2303432 - DNA, 25 bp, Homo sapien
tttatgatttatttcaacctttagc

SEQ ID NO: 2303433 - DNA, 25 bp, Homo sapien
tgatttatttcaacctttagctggc

SEQ ID NO: 2303434 - DNA, 25 bp, Homo sapien
tatgatttatttcaacctttagctg

SEQ ID NO: 2303435 - DNA, 25 bp, Homo sapien
tttagatacaggaaactagctttag

SEQ ID NO: 2303436 - DNA, 25 bp, Homo sapien
tacaggaaactagctttagtccaga

SEQ ID NO: 2303437 - DNA, 25 bp, Homo sapien
ggaaactagctttagtccagataga

SEQ ID NO: 2303438 - DNA, 25 bp, Homo sapien
tagctttagtccagatagagctgtc

SEQ ID NO: 2303439 - DNA, 25 bp, Homo sapien
taaagtccaagtttctcattatgaa

SEQ ID NO: 2303440 - DNA, 25 bp, Homo sapien
tagcgtaaagtccaagtttctcatt

SEQ ID NO: 2303441 - DNA, 25 bp, Homo sapien
tttccttatatggtcctgcccatgg

SEQ ID NO: 2303442 - DNA, 25 bp, Homo sapien
ctgtagcgtaaagtccaagtttctc

SEQ ID NO: 2303443 - DNA, 25 bp, Homo sapien
tcactcagagtattgtagatctgcc

SEQ ID NO: 2303444 - DNA, 25 bp, Homo sapien
gccatggaagtcttatgccgttgtt

SEQ ID NO: 2303445 - DNA, 25 bp, Homo sapien
gagtattgtagatctgccatggaag

SEQ ID NO: 2303446 - DNA, 25 bp, Homo sapien
gatctgccatggaagtcttatgccg

SEQ ID NO: 2303447 - DNA, 25 bp, Homo sapien
cttcaaaagagagtgttaacaacct

SEQ ID NO: 2303448 - DNA, 25 bp, Homo sapien
gctgtggttgtctctgattcgatga

SEQ ID NO: 2303449 - DNA, 25 bp, Homo sapien
tggccccgcggtcttgattgcatct

SEQ ID NO: 2303450 - DNA, 25 bp, Homo sapien
gacattagctatgtgcactctgcaa

SEQ ID NO: 2303451 - DNA, 25 bp, Homo sapien
agaatccagaatccaaggtttttca

SEQ ID NO: 2303452 - DNA, 25 bp, Homo sapien
gaatccagaatccaaggtttttcat

SEQ ID NO: 2303453 - DNA, 25 bp, Homo sapien
tggaagaatccagaatccaaggttt

SEQ ID NO: 2303454 - DNA, 25 bp, Homo sapien
ctttggaagaatccagaatccaagg

SEQ ID NO: 2303455 - DNA, 25 bp, Homo sapien
aaagtgaaatgctacctctgtacat

SEQ ID NO: 2303456 - DNA, 25 bp, Homo sapien
acttggaagctgtttgatgaaacac

SEQ ID NO: 2303457 - DNA, 25 bp, Homo sapien
cctctgtcacttggaagctgtttga

SEQ ID NO: 2303458 - DNA, 25 bp, Homo sapien
ctgtcacttggaagctgtttgatga

SEQ ID NO: 2303459 - DNA, 25 bp, Homo sapien
taaatgccggtgtcttcttcatcat

SEQ ID NO: 2303460 - DNA, 25 bp, Homo sapien
taacagactgtcaggcccagcttct

SEQ ID NO: 2303461 - DNA, 25 bp, Homo sapien
ttgactgctaacacgacacaactcg

SEQ ID NO: 2303462 - DNA, 25 bp, Homo sapien
tcttcatcatctgttcggtaacaga

SEQ ID NO: 2303463 - DNA, 25 bp, Homo sapien
ccggccgtctttggcagcaatgcta

SEQ ID NO: 2303464 - DNA, 25 bp, Homo sapien
tggcagcaatgctatttgggtcaac

SEQ ID NO: 2303465 - DNA, 25 bp, Homo sapien
ttgcaaaatccgatccccttctcga

SEQ ID NO: 2303466 - DNA, 25 bp, Homo sapien
cccttctcgaatccggccgtctttg

SEQ ID NO: 2303467 - DNA, 25 bp, Homo sapien
aactttggacagatcgtggggaact

SEQ ID NO: 2303468 - DNA, 25 bp, Homo sapien
ctttggacagatcgtggggaactaa

SEQ ID NO: 2303469 - DNA, 25 bp, Homo sapien
taactttggacagatcgtggggaac

SEQ ID NO: 2303470 - DNA, 25 bp, Homo sapien
ttggacagatcgtggggaactaaag

SEQ ID NO: 2303471 - DNA, 25 bp, Homo sapien
agccatatcgatccgtgaaggatgg

SEQ ID NO: 2303472 - DNA, 25 bp, Homo sapien
catcagaggaagcagttatgttcat

SEQ ID NO: 2303473 - DNA, 25 bp, Homo sapien
tgtaagagccatatcgatccgtgaa

SEQ ID NO: 2303474 - DNA, 25 bp, Homo sapien
tgaaggatggcggacatcagaggaa

SEQ ID NO: 2303475 - DNA, 25 bp, Homo sapien
aatctctggccttgcaacaagcagc

SEQ ID NO: 2303476 - DNA, 25 bp, Homo sapien
cttctcgattctggacatcttcccc

SEQ ID NO: 2303477 - DNA, 25 bp, Homo sapien
gcaacaagcagcacgattctcttac

SEQ ID NO: 2303478 - DNA, 25 bp, Homo sapien
tcatcgttagacagcaaggccactg

SEQ ID NO: 2303479 - DNA, 25 bp, Homo sapien
tgggctgcattgcttcattatgctc

SEQ ID NO: 2303480 - DNA, 25 bp, Homo sapien
caagtttaactcctctaagaattca

SEQ ID NO: 2303481 - DNA, 25 bp, Homo sapien
gtgggctgcattgcttcattatgct

SEQ ID NO: 2303482 - DNA, 25 bp, Homo sapien
aagtttaactcctctaagaattcat

SEQ ID NO: 2303483 - DNA, 25 bp, Homo sapien
gtaagggatgtgttcgctgactgcc

SEQ ID NO: 2303484 - DNA, 25 bp, Homo sapien
catctgggttgccaatgcagtctga

SEQ ID NO: 2303485 - DNA, 25 bp, Homo sapien
catgtagctttgataatgccgggcg

SEQ ID NO: 2303486 - DNA, 25 bp, Homo sapien
tattcaccagatacgaggctctcat

SEQ ID NO: 2303487 - DNA, 25 bp, Homo sapien
tctctttgtgatgtaccgtgtcccg

SEQ ID NO: 2303488 - DNA, 25 bp, Homo sapien
tctttggccctaaccaggtgctgct

SEQ ID NO: 2303489 - DNA, 25 bp, Homo sapien
ttcaggattcggtctcgcacgggtc

SEQ ID NO: 2303490 - DNA, 25 bp, Homo sapien
tggtcaccgacaagaaggcattatg

SEQ ID NO: 2303491 - DNA, 25 bp, Homo sapien
ggcaatcatactctaccgaaactgg

SEQ ID NO: 2303492 - DNA, 25 bp, Homo sapien
tataaaaacgccacattgaacgagg

SEQ ID NO: 2303493 - DNA, 25 bp, Homo sapien
tctcagccaaaaagaaggtaccagt

SEQ ID NO: 2303494 - DNA, 25 bp, Homo sapien
catatcacaggaagattgtccacct

SEQ ID NO: 2303495 - DNA, 25 bp, Homo sapien
tattaagtatgtccccaatatgcgt

SEQ ID NO: 2303496 - DNA, 25 bp, Homo sapien
tcagatccccaaccagtagccttga

SEQ ID NO: 2303497 - DNA, 25 bp, Homo sapien
gaatagttcaccttctcttgctaag

SEQ ID NO: 2303498 - DNA, 25 bp, Homo sapien
ccagtggatggtactattagtgccc

SEQ ID NO: 2303499 - DNA, 25 bp, Homo sapien
cgcgcccggctacatgttcatatga

SEQ ID NO: 2303500 - DNA, 25 bp, Homo sapien
acctgaatcttgatataaatttcag

SEQ ID NO: 2303501 - DNA, 25 bp, Homo sapien
ctgaatcttgatataaatttcaggg

SEQ ID NO: 2303502 - DNA, 25 bp, Homo sapien
cctgaatcttgatataaatttcagg

SEQ ID NO: 2303503 - DNA, 25 bp, Homo sapien
cattttaagggttgtggcagtcttt

SEQ ID NO: 2303504 - DNA, 25 bp, Homo sapien
cgatatttagcaaaattgtagctca

SEQ ID NO: 2303505 - DNA, 25 bp, Homo sapien
cctggattgagttgttaggcccaga

SEQ ID NO: 2303506 - DNA, 25 bp, Homo sapien
tgtgattaagaagtacttagctttc

SEQ ID NO: 2303507 - DNA, 25 bp, Homo sapien
gcttgtcgttctaactgagtgcaga

SEQ ID NO: 2303508 - DNA, 25 bp, Homo sapien
gcctaccacactctggcgtccctcc

SEQ ID NO: 2303509 - DNA, 25 bp, Homo sapien
cgttctaactgagtgcagagtccat

SEQ ID NO: 2303510 - DNA, 25 bp, Homo sapien
tcaggcttgtcgttctaactgagtg

SEQ ID NO: 2303511 - DNA, 25 bp, Homo sapien
caagatgggttacacttactaaatc

SEQ ID NO: 2303512 - DNA, 25 bp, Homo sapien
tatgaggacatgctgatgtagagaa

SEQ ID NO: 2303513 - DNA, 25 bp, Homo sapien
tagcccttgcaatatatttggtgag

SEQ ID NO: 2303514 - DNA, 25 bp, Homo sapien
catattgtaagttataacagcaagc

SEQ ID NO: 2303515 - DNA, 25 bp, Homo sapien
caacaggaccatttgatagagcacc

SEQ ID NO: 2303516 - DNA, 25 bp, Homo sapien
cagaggtgcaaaaggttccccagag

SEQ ID NO: 2303517 - DNA, 25 bp, Homo sapien
taaagtgagcaggtaacagaggtgc

SEQ ID NO: 2303518 - DNA, 25 bp, Homo sapien
gaccatttgatagagcacctgaagc

SEQ ID NO: 2303519 - DNA, 25 bp, Homo sapien
ctttcttgccaaagaaaaacacgtg

SEQ ID NO: 2303520 - DNA, 25 bp, Homo sapien
tctctccagtttcccctttcttgcc

SEQ ID NO: 2303521 - DNA, 25 bp, Homo sapien
acacgtgaatgctgctgactctcat

SEQ ID NO: 2303522 - DNA, 25 bp, Homo sapien
cttgccaaagaaaaacacgtgaatg

SEQ ID NO: 2303523 - DNA, 25 bp, Homo sapien
tctgtcctgaacgatgctccatgct

SEQ ID NO: 2303524 - DNA, 25 bp, Homo sapien
catgcatatagcctggcgtgaagga

SEQ ID NO: 2303525 - DNA, 25 bp, Homo sapien
gctccatgcttatcatgggtgatgg

SEQ ID NO: 2303526 - DNA, 25 bp, Homo sapien
tccaaagaattgacctccagctcca

SEQ ID NO: 2303527 - DNA, 25 bp, Homo sapien
tctcttgtatggtgtcttgatgata

SEQ ID NO: 2303528 - DNA, 25 bp, Homo sapien
tctcttcccgggatatagtagccat

SEQ ID NO: 2303529 - DNA, 25 bp, Homo sapien
ggtgtccctccctggctatttctct

SEQ ID NO: 2303530 - DNA, 25 bp, Homo sapien
atgagggctacccttacagcaccgg

SEQ ID NO: 2303531 - DNA, 25 bp, Homo sapien
ctggcatgcttagggtgatatggcc

SEQ ID NO: 2303532 - DNA, 25 bp, Homo sapien
tactcaaatgctaaccaggccagac

SEQ ID NO: 2303533 - DNA, 25 bp, Homo sapien
tctcctactcaaatgctaaccaggc

SEQ ID NO: 2303534 - DNA, 25 bp, Homo sapien
tgagatcagacaaggtctggcatgc

SEQ ID NO: 2303535 - DNA, 25 bp, Homo sapien
cccctggtgagagctttggatcgtg

SEQ ID NO: 2303536 - DNA, 25 bp, Homo sapien
ctttctcccctggtgagagctttgg

SEQ ID NO: 2303537 - DNA, 25 bp, Homo sapien
ctggtgagagctttggatcgtgtac

SEQ ID NO: 2303538 - DNA, 25 bp, Homo sapien
agagctttggatcgtgtacagaatg

SEQ ID NO: 2303539 - DNA, 25 bp, Homo sapien
ggagcccctgctggttgaacttaga

SEQ ID NO: 2303540 - DNA, 25 bp, Homo sapien
ctatgagtcagtgtagttggcaatc

SEQ ID NO: 2303541 - DNA, 25 bp, Homo sapien
tagttggcaatctctccagtggcgt

SEQ ID NO: 2303542 - DNA, 25 bp, Homo sapien
ttgtcaattagctgagatgaccacc

SEQ ID NO: 2303543 - DNA, 25 bp, Homo sapien
ggagttgagtgtattcctgagaatc

SEQ ID NO: 2303544 - DNA, 25 bp, Homo sapien
gttgagtgtattcctgagaatcaaa

SEQ ID NO: 2303545 - DNA, 25 bp, Homo sapien
tataggagttgagtgtattcctgag

SEQ ID NO: 2303546 - DNA, 25 bp, Homo sapien
gaattataggagttgagtgtattcc

SEQ ID NO: 2303547 - DNA, 25 bp, Homo sapien
tgtcattaccctagctattatcctc

SEQ ID NO: 2303548 - DNA, 25 bp, Homo sapien
caaaatatgcgctatttggcgcact

SEQ ID NO: 2303549 - DNA, 25 bp, Homo sapien
tatttggcgcactaccagcagtagc

SEQ ID NO: 2303550 - DNA, 25 bp, Homo sapien
tgtctatcttaggatcaggatgagc

SEQ ID NO: 2303551 - DNA, 25 bp, Homo sapien
tgggggcctttgacaggagaatcac

SEQ ID NO: 2303552 - DNA, 25 bp, Homo sapien
tcagaaaagggtcaaatggcggcat

SEQ ID NO: 2303553 - DNA, 25 bp, Homo sapien
caggggacagtctgtttttgtctcc

SEQ ID NO: 2303554 - DNA, 25 bp, Homo sapien
gagaggtgtccattccctggatgtc

SEQ ID NO: 2303555 - DNA, 25 bp, Homo sapien
gatggcacttttggagtgacggaaa

SEQ ID NO: 2303556 - DNA, 25 bp, Homo sapien
ttaaagggcatagggcatgaactac

SEQ ID NO: 2303557 - DNA, 25 bp, Homo sapien
tacacttcaatatggagtactctca

SEQ ID NO: 2303558 - DNA, 25 bp, Homo sapien
aactgtaataaagaatgatggcact

SEQ ID NO: 2303559 - DNA, 25 bp, Homo sapien
tttcctgtttgagcacagggaagcc

SEQ ID NO: 2303560 - DNA, 25 bp, Homo sapien
cagggaagccgaatggacactgagt

SEQ ID NO: 2303561 - DNA, 25 bp, Homo sapien
cacttgatgaagtctccaagagatc

SEQ ID NO: 2303562 - DNA, 25 bp, Homo sapien
taatggactctgtctaatggactca

SEQ ID NO: 2303563 - DNA, 25 bp, Homo sapien
aggacagtgtcttcatattttgcat

SEQ ID NO: 2303564 - DNA, 25 bp, Homo sapien
gcagcataatctgcagttggagcag

SEQ ID NO: 2303565 - DNA, 25 bp, Homo sapien
cagcagcataatctgcagttggagc

SEQ ID NO: 2303566 - DNA, 25 bp, Homo sapien
tgcagttggagcagctgatacggcc

SEQ ID NO: 2303567 - DNA, 25 bp, Homo sapien
cagttggagcagctgatacggccat

SEQ ID NO: 2303568 - DNA, 25 bp, Homo sapien
ctgcctggagtgaaagcttctttct

SEQ ID NO: 2303569 - DNA, 25 bp, Homo sapien
ctcctgcctggagtgaaagcttctt

SEQ ID NO: 2303570 - DNA, 25 bp, Homo sapien
tcctcctgcctggagtgaaagcttc

SEQ ID NO: 2303571 - DNA, 25 bp, Homo sapien
ctggagtgaaagcttctttcttctc

SEQ ID NO: 2303572 - DNA, 25 bp, Homo sapien
cactcaggaaaaacctcccatttgt

SEQ ID NO: 2303573 - DNA, 25 bp, Homo sapien
tggtttgttaccctttcttgctcag

SEQ ID NO: 2303574 - DNA, 25 bp, Homo sapien
ctcaggaaaaacctcccatttgttg

SEQ ID NO: 2303575 - DNA, 25 bp, Homo sapien
tggctggtttgttaccctttcttgc

SEQ ID NO: 2303576 - DNA, 25 bp, Homo sapien
cagagattttctagggtcaggagga

SEQ ID NO: 2303577 - DNA, 25 bp, Homo sapien
ctacagaggtatcagaggacatggt

SEQ ID NO: 2303578 - DNA, 25 bp, Homo sapien
atcagaggacatggtgagatgtttg

SEQ ID NO: 2303579 - DNA, 25 bp, Homo sapien
cagaagtaggttgtggcagatgact

SEQ ID NO: 2303580 - DNA, 25 bp, Homo sapien
ctgacgggactgtatgtgtgttccc

SEQ ID NO: 2303581 - DNA, 25 bp, Homo sapien
aatgttgcaccgaggagtataagag

SEQ ID NO: 2303582 - DNA, 25 bp, Homo sapien
tgcaccgaggagtataagagacacc

SEQ ID NO: 2303583 - DNA, 25 bp, Homo sapien
tccaaaatgttgcaccgaggagtat

SEQ ID NO: 2303584 - DNA, 25 bp, Homo sapien
ccaaaatgttgcaccgaggagtata

SEQ ID NO: 2303585 - DNA, 25 bp, Homo sapien
gcaggtgagcatttttgggacattt

SEQ ID NO: 2303586 - DNA, 25 bp, Homo sapien
gaaccatggtgcaatactgctgctt

SEQ ID NO: 2303587 - DNA, 25 bp, Homo sapien
tgcccagtgggcactcttgcctctt

SEQ ID NO: 2303588 - DNA, 25 bp, Homo sapien
gagtaattcctctttgcaggtgagc

SEQ ID NO: 2303589 - DNA, 25 bp, Homo sapien
cactgtcttcctccctcaggtttac

SEQ ID NO: 2303590 - DNA, 25 bp, Homo sapien
tcactgtcttcctccctcaggttta

SEQ ID NO: 2303591 - DNA, 25 bp, Homo sapien
caagctctttgatggccgggcccat

SEQ ID NO: 2303592 - DNA, 25 bp, Homo sapien
gaaaggaggctatcagggaaaatca

SEQ ID NO: 2303593 - DNA, 25 bp, Homo sapien
acacggaaatgtcccgaggtctcca

SEQ ID NO: 2303594 - DNA, 25 bp, Homo sapien
gaacacaggcatctgaatgtcagac

SEQ ID NO: 2303595 - DNA, 25 bp, Homo sapien
ctgtcacagtcataactcttgctgc

SEQ ID NO: 2303596 - DNA, 25 bp, Homo sapien
tgtcacagtcataactcttgctgct

SEQ ID NO: 2303597 - DNA, 25 bp, Homo sapien
gtcacagtcataactcttgctgctt

SEQ ID NO: 2303598 - DNA, 25 bp, Homo sapien
agagctgatatagtccctgtccaga

SEQ ID NO: 2303599 - DNA, 25 bp, Homo sapien
gacatgccagcaaatgctctaagag

SEQ ID NO: 2303600 - DNA, 25 bp, Homo sapien
ttaatgctgccatagagtgaagagc

SEQ ID NO: 2303601 - DNA, 25 bp, Homo sapien
gagcaacagagttaatgctgccata

SEQ ID NO: 2303602 - DNA, 25 bp, Homo sapien
ggctcctgccatccaaccagtgatt

SEQ ID NO: 2303603 - DNA, 25 bp, Homo sapien
gagggccttcagtatggctctcaaa

SEQ ID NO: 2303604 - DNA, 25 bp, Homo sapien
ccagtgatttctacaccagggttac

SEQ ID NO: 2303605 - DNA, 25 bp, Homo sapien
ttgtgcacacaaaccccaacactct

SEQ ID NO: 2303606 - DNA, 25 bp, Homo sapien
cacacagcagttggaatgagtcttt

SEQ ID NO: 2303607 - DNA, 25 bp, Homo sapien
gcctgttgtgagcattcgactctga

SEQ ID NO: 2303608 - DNA, 25 bp, Homo sapien
tggtctttacaaagctggtgctcat

SEQ ID NO: 2303609 - DNA, 25 bp, Homo sapien
gaattagcatgaaatgacacggttt

SEQ ID NO: 2303610 - DNA, 25 bp, Homo sapien
tgagatgatcttgcctgaaagtttc

SEQ ID NO: 2303611 - DNA, 25 bp, Homo sapien
taactaactgtgctccaacctcttc

SEQ ID NO: 2303612 - DNA, 25 bp, Homo sapien
gcctggtttctctgcataactaact

SEQ ID NO: 2303613 - DNA, 25 bp, Homo sapien
tcttctttctacaacagcggcctgg

SEQ ID NO: 2303614 - DNA, 25 bp, Homo sapien
gaatatctgagactgctccaaattg

SEQ ID NO: 2303615 - DNA, 25 bp, Homo sapien
tacatatgcagcaagctctgcaaag

SEQ ID NO: 2303616 - DNA, 25 bp, Homo sapien
ccaaattgagttcttgtacatatgc

SEQ ID NO: 2303617 - DNA, 25 bp, Homo sapien
tctgagactgctccaaattgagttc

SEQ ID NO: 2303618 - DNA, 25 bp, Homo sapien
ctttcttttcatgctggtccaaatt

SEQ ID NO: 2303619 - DNA, 25 bp, Homo sapien
tttcatgctggtccaaatttaactc

SEQ ID NO: 2303620 - DNA, 25 bp, Homo sapien
actcacttctgggttgaaatggaca

SEQ ID NO: 2303621 - DNA, 25 bp, Homo sapien
catgctggtccaaatttaactcact

SEQ ID NO: 2303622 - DNA, 25 bp, Homo sapien
aagctagtctccaggagagatggga

SEQ ID NO: 2303623 - DNA, 25 bp, Homo sapien
gtggctgtgctttctacaatgtgga

SEQ ID NO: 2303624 - DNA, 25 bp, Homo sapien
aatgtggaggaagctagtctccagg

SEQ ID NO: 2303625 - DNA, 25 bp, Homo sapien
ggtcaccaaggggagcccctctctg

SEQ ID NO: 2303626 - DNA, 25 bp, Homo sapien
tgacaacgaggcctataacacatcc

SEQ ID NO: 2303627 - DNA, 25 bp, Homo sapien
cccagaagccttgatggtctagata

SEQ ID NO: 2303628 - DNA, 25 bp, Homo sapien
gttcctgctgtacagtgtgttaaac

SEQ ID NO: 2303629 - DNA, 25 bp, Homo sapien
gtaactatatccttcgctgacctca

SEQ ID NO: 2303630 - DNA, 25 bp, Homo sapien
gtctgggataattgaactccagtgg

SEQ ID NO: 2303631 - DNA, 25 bp, Homo sapien
tctggtgtttgaggccctttggtaa

SEQ ID NO: 2303632 - DNA, 25 bp, Homo sapien
cagtggttcctctggtgtttgaggc

SEQ ID NO: 2303633 - DNA, 25 bp, Homo sapien
gataattgaactccagtggttcctc

SEQ ID NO: 2303634 - DNA, 25 bp, Homo sapien
tgtgctggatgaagtcttgtgcttt

SEQ ID NO: 2303635 - DNA, 25 bp, Homo sapien
gcacagcatgcaccaactctttatg

SEQ ID NO: 2303636 - DNA, 25 bp, Homo sapien
tgcagccaaatatagggcacagcat

SEQ ID NO: 2303637 - DNA, 25 bp, Homo sapien
gatgtgtaagtggaatggttgtgct

SEQ ID NO: 2303638 - DNA, 25 bp, Homo sapien
ctgctggagtaagagtaatgcctgt

SEQ ID NO: 2303639 - DNA, 25 bp, Homo sapien
tgctggagtaagagtaatgcctgtg

SEQ ID NO: 2303640 - DNA, 25 bp, Homo sapien
gctggagtaagagtaatgcctgtga

SEQ ID NO: 2303641 - DNA, 25 bp, Homo sapien
taaggctgaactgctgactgttgcc

SEQ ID NO: 2303642 - DNA, 25 bp, Homo sapien
tgactctgtccttaaggctgaactg

SEQ ID NO: 2303643 - DNA, 25 bp, Homo sapien
tgactgttgccactgtgtcttcact

SEQ ID NO: 2303644 - DNA, 25 bp, Homo sapien
ctatgactctgtccttaaggctgaa

SEQ ID NO: 2303645 - DNA, 25 bp, Homo sapien
gacacagtcaggagtaatgttcagt

SEQ ID NO: 2303646 - DNA, 25 bp, Homo sapien
agacacagtcaggagtaatgttcag

SEQ ID NO: 2303647 - DNA, 25 bp, Homo sapien
cacagtcaggagtaatgttcagtgc

SEQ ID NO: 2303648 - DNA, 25 bp, Homo sapien
cagtcaggagtaatgttcagtgcct

SEQ ID NO: 2303649 - DNA, 25 bp, Homo sapien
atcactgtgtttcgatgaaggtcag

SEQ ID NO: 2303650 - DNA, 25 bp, Homo sapien
agctcaagaaaagtccccaggatct

SEQ ID NO: 2303651 - DNA, 25 bp, Homo sapien
cattgcttgttcatgtttctgcaac

SEQ ID NO: 2303652 - DNA, 25 bp, Homo sapien
ggcagggtccagtgttgcagctcaa

SEQ ID NO: 2303653 - DNA, 25 bp, Homo sapien
cattgtcctgagtggaatatttctt

SEQ ID NO: 2303654 - DNA, 25 bp, Homo sapien
aatgtaatgcattgtcctgagtgga

SEQ ID NO: 2303655 - DNA, 25 bp, Homo sapien
tgaggtccccaacgttcatggaatc

SEQ ID NO: 2303656 - DNA, 25 bp, Homo sapien
cagtcacataccgaatgtacttcat

SEQ ID NO: 2303657 - DNA, 25 bp, Homo sapien
tgtcaaagtgcgtgcctgctagctg

SEQ ID NO: 2303658 - DNA, 25 bp, Homo sapien
gtgcgtgcctgctagctgtacttca

SEQ ID NO: 2303659 - DNA, 25 bp, Homo sapien
tcacacaacttgtcaaagtgcgtgc

SEQ ID NO: 2303660 - DNA, 25 bp, Homo sapien
tatccattcacacaacttgtcaaag

SEQ ID NO: 2303661 - DNA, 25 bp, Homo sapien
gtggctgcccatcaagcacggtctc

SEQ ID NO: 2303662 - DNA, 25 bp, Homo sapien
gtccagtccagtggctgcccatcaa

SEQ ID NO: 2303663 - DNA, 25 bp, Homo sapien
agtccagtggctgcccatcaagcac

SEQ ID NO: 2303664 - DNA, 25 bp, Homo sapien
gtgtgtgtccagtccagtggctgcc

SEQ ID NO: 2303665 - DNA, 25 bp, Homo sapien
cagggtcccctgcaccaatggagtt

SEQ ID NO: 2303666 - DNA, 25 bp, Homo sapien
ccttggcagggattagacaatggaa

SEQ ID NO: 2303667 - DNA, 25 bp, Homo sapien
cctggcccctgaagtagtgtggaag

SEQ ID NO: 2303668 - DNA, 25 bp, Homo sapien
tcctaggtgaagtctgagagaacag

SEQ ID NO: 2303669 - DNA, 25 bp, Homo sapien
ctgttaatcacgttcatattcaggg

SEQ ID NO: 2303670 - DNA, 25 bp, Homo sapien
cacgttcatattcagggtgttatct

SEQ ID NO: 2303671 - DNA, 25 bp, Homo sapien
catcactgttaatcacgttcatatt

SEQ ID NO: 2303672 - DNA, 25 bp, Homo sapien
taatcacgttcatattcagggtgtt

SEQ ID NO: 2303673 - DNA, 25 bp, Homo sapien
tgaagaaatccaacattagtttccc

SEQ ID NO: 2303674 - DNA, 25 bp, Homo sapien
gtctccaatcctcaacccggtgaag

SEQ ID NO: 2303675 - DNA, 25 bp, Homo sapien
gaagacaccgacagctttcaaaaat

SEQ ID NO: 2303676 - DNA, 25 bp, Homo sapien
atgctgctgtcaaccatctgaagaa

SEQ ID NO: 2303677 - DNA, 25 bp, Homo sapien
gagaaagccttgaatgtatagctca

SEQ ID NO: 2303678 - DNA, 25 bp, Homo sapien
cttgaacatagcaaaccagggtacg

SEQ ID NO: 2303679 - DNA, 25 bp, Homo sapien
tagagacacgctggaaatataagag

SEQ ID NO: 2303680 - DNA, 25 bp, Homo sapien
tcctcaggctctggacatagagaca

SEQ ID NO: 2303681 - DNA, 25 bp, Homo sapien
ctggaggacgtgcagtttctgttac

SEQ ID NO: 2303682 - DNA, 25 bp, Homo sapien
cgtgtgttggattaaccgggctcat

SEQ ID NO: 2303683 - DNA, 25 bp, Homo sapien
gcttcatactgatctgtgctctgga

SEQ ID NO: 2303684 - DNA, 25 bp, Homo sapien
tacatgtgatccagggggctgcgtg

SEQ ID NO: 2303685 - DNA, 25 bp, Homo sapien
ggacaggaatccaactttggcagag

SEQ ID NO: 2303686 - DNA, 25 bp, Homo sapien
gcgggacaggaatccaactttggca

SEQ ID NO: 2303687 - DNA, 25 bp, Homo sapien
gtggcgggacaggaatccaactttg

SEQ ID NO: 2303688 - DNA, 25 bp, Homo sapien
ctcggtggcgggacaggaatccaac

SEQ ID NO: 2303689 - DNA, 25 bp, Homo sapien
tagcaattccgtagcagcctcgact

SEQ ID NO: 2303690 - DNA, 25 bp, Homo sapien
cagcagatggcgctgcgcttcccat

SEQ ID NO: 2303691 - DNA, 25 bp, Homo sapien
cctcgacggacagcagatggcgctg

SEQ ID NO: 2303692 - DNA, 25 bp, Homo sapien
cttccatacaccgtagcaattccgt

SEQ ID NO: 2303693 - DNA, 25 bp, Homo sapien
gaattgctttgcaaaggagtccagg

SEQ ID NO: 2303694 - DNA, 25 bp, Homo sapien
tatagtggagagaattgctttgcaa

SEQ ID NO: 2303695 - DNA, 25 bp, Homo sapien
aattgctttgcaaaggagtccaggt

SEQ ID NO: 2303696 - DNA, 25 bp, Homo sapien
tggaccccagaccatgtaaccaggg

SEQ ID NO: 2303697 - DNA, 25 bp, Homo sapien
aaacttgaacttgaggatgatgcca

SEQ ID NO: 2303698 - DNA, 25 bp, Homo sapien
gagtcattgcttgccggttcccttt

SEQ ID NO: 2303699 - DNA, 25 bp, Homo sapien
catatgacgtgtgcacttttagagc

SEQ ID NO: 2303700 - DNA, 25 bp, Homo sapien
gtgaatactatttggagggtccctg

SEQ ID NO: 2303701 - DNA, 25 bp, Homo sapien
aaacttaagaactgacatggagcct

SEQ ID NO: 2303702 - DNA, 25 bp, Homo sapien
tgattagtttatatacaggatctga

SEQ ID NO: 2303703 - DNA, 25 bp, Homo sapien
tagcaacctcttgtaaaaaatcatg

SEQ ID NO: 2303704 - DNA, 25 bp, Homo sapien
catcccaagtgttagactgcaagac

SEQ ID NO: 2303705 - DNA, 25 bp, Homo sapien
gaatcactgccctgccttggatggc

SEQ ID NO: 2303706 - DNA, 25 bp, Homo sapien
cgcagatgatactgacgagaggcca

SEQ ID NO: 2303707 - DNA, 25 bp, Homo sapien
taactacatattccccagtggaggt

SEQ ID NO: 2303708 - DNA, 25 bp, Homo sapien
aggcagcagcagtccttcggcttca

SEQ ID NO: 2303709 - DNA, 25 bp, Homo sapien
ggactgtatgctgtggtctcactca

SEQ ID NO: 2303710 - DNA, 25 bp, Homo sapien
tagagcgtggtcacagtttaatcca

SEQ ID NO: 2303711 - DNA, 25 bp, Homo sapien
cctcagtgaacggagaatctcagcc

SEQ ID NO: 2303712 - DNA, 25 bp, Homo sapien
tattatttaagacatcgcccagcac

SEQ ID NO: 2303713 - DNA, 25 bp, Homo sapien
cagtactcctgtagaaattggtgaa

SEQ ID NO: 2303714 - DNA, 25 bp, Homo sapien
aacaatccttgctgaaatacctggg

SEQ ID NO: 2303715 - DNA, 25 bp, Homo sapien
ttcactaaaaaggatcccaaacaga

SEQ ID NO: 2303716 - DNA, 25 bp, Homo sapien
tgattgccaattacatactgaggtt

SEQ ID NO: 2303717 - DNA, 25 bp, Homo sapien
tactgaggtttaaagcaacatgaag

SEQ ID NO: 2303718 - DNA, 25 bp, Homo sapien
gaaaaatggcgccaatagccttgct

SEQ ID NO: 2303719 - DNA, 25 bp, Homo sapien
cgttctgacctcattgagtgtggga

SEQ ID NO: 2303720 - DNA, 25 bp, Homo sapien
cctgcttcggactccccagagtgtt

SEQ ID NO: 2303721 - DNA, 25 bp, Homo sapien
tttcttgatcaacccttatatacca

SEQ ID NO: 2303722 - DNA, 25 bp, Homo sapien
ggagtttttgctcggtcacctaggc

SEQ ID NO: 2303723 - DNA, 25 bp, Homo sapien
tcagattacccacctgcttcggact

SEQ ID NO: 2303724 - DNA, 25 bp, Homo sapien
gcatagttatatttacacttggttt

SEQ ID NO: 2303725 - DNA, 25 bp, Homo sapien
tgcatagttatatttacacttggtt

SEQ ID NO: 2303726 - DNA, 25 bp, Homo sapien
ctgcatagttatatttacacttggt

SEQ ID NO: 2303727 - DNA, 25 bp, Homo sapien
tagttggccgggcttgctgactcac

SEQ ID NO: 2303728 - DNA, 25 bp, Homo sapien
tattgtgtggacagtaaatactgag

SEQ ID NO: 2303729 - DNA, 25 bp, Homo sapien
gtaatctagttttcacaaacctgag

SEQ ID NO: 2303730 - DNA, 25 bp, Homo sapien
aaggaagttacttgggatagcttct

SEQ ID NO: 2303731 - DNA, 25 bp, Homo sapien
acagatccacattgtttgaagttat

SEQ ID NO: 2303732 - DNA, 25 bp, Homo sapien
tgcctcgaggaccaaggaaccgttg

SEQ ID NO: 2303733 - DNA, 25 bp, Homo sapien
tgaagttattgtgagtgcctcgagg

SEQ ID NO: 2303734 - DNA, 25 bp, Homo sapien
tattgggtaatctccacagatccac

SEQ ID NO: 2303735 - DNA, 25 bp, Homo sapien
tcaaccatacagctcatccaaggcc

SEQ ID NO: 2303736 - DNA, 25 bp, Homo sapien
aaccatacagctcatccaaggccat

SEQ ID NO: 2303737 - DNA, 25 bp, Homo sapien
accatacagctcatccaaggccatc

SEQ ID NO: 2303738 - DNA, 25 bp, Homo sapien
ccatacagctcatccaaggccatct

SEQ ID NO: 2303739 - DNA, 25 bp, Homo sapien
gcgccgaggccttcaagtgcatgat

SEQ ID NO: 2303740 - DNA, 25 bp, Homo sapien
ttactgggactgtagcgtctgcacc

SEQ ID NO: 2303741 - DNA, 25 bp, Homo sapien
gctgtaacgttttttgctgccaaga

SEQ ID NO: 2303742 - DNA, 25 bp, Homo sapien
ggtcacattgatcgcaacccaggcg

SEQ ID NO: 2303743 - DNA, 25 bp, Homo sapien
attgacaaacagagcggtcgcggcg

SEQ ID NO: 2303744 - DNA, 25 bp, Homo sapien
gactctcggcgtgcggtgatagcca

SEQ ID NO: 2303745 - DNA, 25 bp, Homo sapien
cagtcggtgggacagacgttttcct

SEQ ID NO: 2303746 - DNA, 25 bp, Homo sapien
aggagtttccccgacagctggaggc

SEQ ID NO: 2303747 - DNA, 25 bp, Homo sapien
cagacactcgaatagtatagcacac

SEQ ID NO: 2303748 - DNA, 25 bp, Homo sapien
cactcgaatagtatagcacactaca

SEQ ID NO: 2303749 - DNA, 25 bp, Homo sapien
ttagtgcagacactcgaatagtata

SEQ ID NO: 2303750 - DNA, 25 bp, Homo sapien
agtgcagacactcgaatagtatagc

SEQ ID NO: 2303751 - DNA, 25 bp, Homo sapien
gacatagtccccaccatgttgccta

SEQ ID NO: 2303752 - DNA, 25 bp, Homo sapien
agcatgggagttttttgtttctgtt

SEQ ID NO: 2303753 - DNA, 25 bp, Homo sapien
cagcatgggagttttttgtttctgt

SEQ ID NO: 2303754 - DNA, 25 bp, Homo sapien
agagacatagtccccaccatgttgc

SEQ ID NO: 2303755 - DNA, 25 bp, Homo sapien
cagttttagctcttagctgagacca

SEQ ID NO: 2303756 - DNA, 25 bp, Homo sapien
aaaacactatgtgctgaatgttggc

SEQ ID NO: 2303757 - DNA, 25 bp, Homo sapien
ggtataggcctccttagtgctgcta

SEQ ID NO: 2303758 - DNA, 25 bp, Homo sapien
tgttgtgactgctttaataatcccc

SEQ ID NO: 2303759 - DNA, 25 bp, Homo sapien
ccccgcccgataccctgcgctcctc

SEQ ID NO: 2303760 - DNA, 25 bp, Homo sapien
ctcccccgcccgataccctgcgctc

SEQ ID NO: 2303761 - DNA, 25 bp, Homo sapien
gctcccccgcccgataccctgcgct

SEQ ID NO: 2303762 - DNA, 25 bp, Homo sapien
gcggctcccccgcccgataccctgc

SEQ ID NO: 2303763 - DNA, 25 bp, Homo sapien
tgccggaggtcttcggcggtgacgg

SEQ ID NO: 2303764 - DNA, 25 bp, Homo sapien
gcggggctcaggttcccgatgaaaa

SEQ ID NO: 2303765 - DNA, 25 bp, Homo sapien
caggttcccgatgaaaagcttgttc

SEQ ID NO: 2303766 - DNA, 25 bp, Homo sapien
tccacgaaggcgtagcgggacttga

SEQ ID NO: 2303767 - DNA, 25 bp, Homo sapien
tatttcgaatcggaatgttcctgct

SEQ ID NO: 2303768 - DNA, 25 bp, Homo sapien
ttcgaatcggaatgttcctgctcct

SEQ ID NO: 2303769 - DNA, 25 bp, Homo sapien
aggagggatatttcgaatcggaatg

SEQ ID NO: 2303770 - DNA, 25 bp, Homo sapien
gggatatttcgaatcggaatgttcc

SEQ ID NO: 2303771 - DNA, 25 bp, Homo sapien
aggaaatcttgaagtagtggttctc

SEQ ID NO: 2303772 - DNA, 25 bp, Homo sapien
gacgttgacaacagcggtctctgtg

SEQ ID NO: 2303773 - DNA, 25 bp, Homo sapien
gtgtctgtgttgacttgttccacat

SEQ ID NO: 2303774 - DNA, 25 bp, Homo sapien
tgatgcccgcttagcttcttcatgg

SEQ ID NO: 2303775 - DNA, 25 bp, Homo sapien
caggacacgcagtgggaaatcaatc

SEQ ID NO: 2303776 - DNA, 25 bp, Homo sapien
gacacgcagtgggaaatcaatctgt

SEQ ID NO: 2303777 - DNA, 25 bp, Homo sapien
gggaacaggacacgcagtgggaaat

SEQ ID NO: 2303778 - DNA, 25 bp, Homo sapien
gaacaggacacgcagtgggaaatca

SEQ ID NO: 2303779 - DNA, 25 bp, Homo sapien
tctctgcagctctggagttctcttg

SEQ ID NO: 2303780 - DNA, 25 bp, Homo sapien
aggcttctctgcagctctggagttc

SEQ ID NO: 2303781 - DNA, 25 bp, Homo sapien
ctctgcagctctggagttctcttgt

SEQ ID NO: 2303782 - DNA, 25 bp, Homo sapien
gcttctctgcagctctggagttctc

SEQ ID NO: 2303783 - DNA, 25 bp, Homo sapien
tatttcaagaatcatgcggcatgct

SEQ ID NO: 2303784 - DNA, 25 bp, Homo sapien
tcatgcggcatgcttcagaagtccc

SEQ ID NO: 2303785 - DNA, 25 bp, Homo sapien
atcatgcggcatgcttcagaagtcc

SEQ ID NO: 2303786 - DNA, 25 bp, Homo sapien
tgcattatttcaagaatcatgcggc

SEQ ID NO: 2303787 - DNA, 25 bp, Homo sapien
gccttcttttccaatcagtcttcca

SEQ ID NO: 2303788 - DNA, 25 bp, Homo sapien
cacagtgatggttctttccgggttg

SEQ ID NO: 2303789 - DNA, 25 bp, Homo sapien
cagcgtatcattttcaaaggcctca

SEQ ID NO: 2303790 - DNA, 25 bp, Homo sapien
agcgtatcattttcaaaggcctcac

SEQ ID NO: 2303791 - DNA, 25 bp, Homo sapien
tcagcgtatcattttcaaaggcctc

SEQ ID NO: 2303792 - DNA, 25 bp, Homo sapien
agtcagcgtatcattttcaaaggcc

SEQ ID NO: 2303793 - DNA, 25 bp, Homo sapien
ctggagaagtatccgaagtgggtat

SEQ ID NO: 2303794 - DNA, 25 bp, Homo sapien
tggagaagtatccgaagtgggtatt

SEQ ID NO: 2303795 - DNA, 25 bp, Homo sapien
gagaagtatccgaagtgggtattaa

SEQ ID NO: 2303796 - DNA, 25 bp, Homo sapien
ggagaagtatccgaagtgggtatta

SEQ ID NO: 2303797 - DNA, 25 bp, Homo sapien
cctgctctggataagagtgatgatg

SEQ ID NO: 2303798 - DNA, 25 bp, Homo sapien
tgctctggataagagtgatgatgcg

SEQ ID NO: 2303799 - DNA, 25 bp, Homo sapien
ctgctctggataagagtgatgatgc

SEQ ID NO: 2303800 - DNA, 25 bp, Homo sapien
acgcaggggcgatcttgatggaggc

SEQ ID NO: 2303801 - DNA, 25 bp, Homo sapien
gggcgatcttgatggaggctcccac

SEQ ID NO: 2303802 - DNA, 25 bp, Homo sapien
tgacgcaggggcgatcttgatggag

SEQ ID NO: 2303803 - DNA, 25 bp, Homo sapien
caggggcgatcttgatggaggctcc

SEQ ID NO: 2303804 - DNA, 25 bp, Homo sapien
gattccggtggccaggtgatgatga

SEQ ID NO: 2303805 - DNA, 25 bp, Homo sapien
cttgaactgggattccggtggccag

SEQ ID NO: 2303806 - DNA, 25 bp, Homo sapien
actgggattccggtggccaggtgat

SEQ ID NO: 2303807 - DNA, 25 bp, Homo sapien
attccggtggccaggtgatgatgac

SEQ ID NO: 2303808 - DNA, 25 bp, Homo sapien
ttcttctttcagtttcccaaagatc

SEQ ID NO: 2303809 - DNA, 25 bp, Homo sapien
tcagtttcccaaagatccgtccctg

SEQ ID NO: 2303810 - DNA, 25 bp, Homo sapien
cagtttcccaaagatccgtccctgg

SEQ ID NO: 2303811 - DNA, 25 bp, Homo sapien
tctttcagtttcccaaagatccgtc

SEQ ID NO: 2303812 - DNA, 25 bp, Homo sapien
gtacaatttccctgatcttgcgctg

SEQ ID NO: 2303813 - DNA, 25 bp, Homo sapien
acaatttccctgatcttgcgctgtg

SEQ ID NO: 2303814 - DNA, 25 bp, Homo sapien
tacaatttccctgatcttgcgctgt

SEQ ID NO: 2303815 - DNA, 25 bp, Homo sapien
gagggtatttctgctcctgctgctt

SEQ ID NO: 2303816 - DNA, 25 bp, Homo sapien
gactccctgagggtatttctgctcc

SEQ ID NO: 2303817 - DNA, 25 bp, Homo sapien
ttgctgcgctgtgaggcgactccct

SEQ ID NO: 2303818 - DNA, 25 bp, Homo sapien
gcgactccctgagggtatttctgct

SEQ ID NO: 2303819 - DNA, 25 bp, Homo sapien
gttgaggctggtttgtgtgtttcgc

SEQ ID NO: 2303820 - DNA, 25 bp, Homo sapien
ctaggacaagtaccattgactcttg

SEQ ID NO: 2303821 - DNA, 25 bp, Homo sapien
tgtgatgtgatactcagagcactgc

SEQ ID NO: 2303822 - DNA, 25 bp, Homo sapien
tgagtaaccaagtgtaagttgaggc

SEQ ID NO: 2303823 - DNA, 25 bp, Homo sapien
ggccatgttactagtcaccatagaa

SEQ ID NO: 2303824 - DNA, 25 bp, Homo sapien
taaaatgagcaacagagccgaccct

SEQ ID NO: 2303825 - DNA, 25 bp, Homo sapien
gaccacgatggtaatttgaagagga

SEQ ID NO: 2303826 - DNA, 25 bp, Homo sapien
tagaacagcttctttcggtcagcca

SEQ ID NO: 2303827 - DNA, 25 bp, Homo sapien
agaagaaactacttacatgtgcaca

SEQ ID NO: 2303828 - DNA, 25 bp, Homo sapien
tatttgtctgccctacccatagcac

SEQ ID NO: 2303829 - DNA, 25 bp, Homo sapien
tcctgaagaccgaaaagttgaatga

SEQ ID NO: 2303830 - DNA, 25 bp, Homo sapien
taaagtaacatagctctaaaaggct

SEQ ID NO: 2303831 - DNA, 25 bp, Homo sapien
gatgtattggttttatttggaatta

SEQ ID NO: 2303832 - DNA, 25 bp, Homo sapien
attaataatacttggtttaggccag

SEQ ID NO: 2303833 - DNA, 25 bp, Homo sapien
ataatacttggtttaggccaggtgt

SEQ ID NO: 2303834 - DNA, 25 bp, Homo sapien
gtctgatgtattggttttatttgga

SEQ ID NO: 2303835 - DNA, 25 bp, Homo sapien
atcccaggtaggtacttccggcgcg

SEQ ID NO: 2303836 - DNA, 25 bp, Homo sapien
tatcccaggtaggtacttccggcgc

SEQ ID NO: 2303837 - DNA, 25 bp, Homo sapien
tcccaggtaggtacttccggcgcgc

SEQ ID NO: 2303838 - DNA, 25 bp, Homo sapien
ctccgggagaccccgtaaatgcagc

SEQ ID NO: 2303839 - DNA, 25 bp, Homo sapien
gggagaccccgtaaatgcagccgtc

SEQ ID NO: 2303840 - DNA, 25 bp, Homo sapien
ccgggagaccccgtaaatgcagccg

SEQ ID NO: 2303841 - DNA, 25 bp, Homo sapien
gagaccccgtaaatgcagccgtccg

SEQ ID NO: 2303842 - DNA, 25 bp, Homo sapien
ttagcagcccgcacacgctctgcat

SEQ ID NO: 2303843 - DNA, 25 bp, Homo sapien
ccgacacagaaaactcccgcccact

SEQ ID NO: 2303844 - DNA, 25 bp, Homo sapien
cctcaaccgcatgggcagaattgtc

SEQ ID NO: 2303845 - DNA, 25 bp, Homo sapien
aggagaatccaggacccgacacaga

SEQ ID NO: 2303846 - DNA, 25 bp, Homo sapien
aggctgctggaacgcaggctcccag

SEQ ID NO: 2303847 - DNA, 25 bp, Homo sapien
ttccgtctctatagaagacatcggc

SEQ ID NO: 2303848 - DNA, 25 bp, Homo sapien
ctctggattgattgtgcaggctcca

SEQ ID NO: 2303849 - DNA, 25 bp, Homo sapien
gctcccagggagtggttagaggcct

SEQ ID NO: 2303850 - DNA, 25 bp, Homo sapien
cggtaaccaaggataacagagatgt

SEQ ID NO: 2303851 - DNA, 25 bp, Homo sapien
tcttgggcggtaaccaaggataaca

SEQ ID NO: 2303852 - DNA, 25 bp, Homo sapien
aaccaaggataacagagatgtaaag

SEQ ID NO: 2303853 - DNA, 25 bp, Homo sapien
ggcggtaaccaaggataacagagat

SEQ ID NO: 2303854 - DNA, 25 bp, Homo sapien
gaagtgcaggacagctaagagtaca

SEQ ID NO: 2303855 - DNA, 25 bp, Homo sapien
catgtgataaatgccgtgagggaag

SEQ ID NO: 2303856 - DNA, 25 bp, Homo sapien
cagtctcgcttagtagggatggcaa

SEQ ID NO: 2303857 - DNA, 25 bp, Homo sapien
tagatgttctggcaaaactgggatc

SEQ ID NO: 2303858 - DNA, 25 bp, Homo sapien
gtgcaggtcctccatatgctaagtg

SEQ ID NO: 2303859 - DNA, 25 bp, Homo sapien
gccacatcatcactacatctcctca

SEQ ID NO: 2303860 - DNA, 25 bp, Homo sapien
ctgccacatcatcactacatctcct

SEQ ID NO: 2303861 - DNA, 25 bp, Homo sapien
tgccacatcatcactacatctcctc

SEQ ID NO: 2303862 - DNA, 25 bp, Homo sapien
ccacatcatcactacatctcctcat

SEQ ID NO: 2303863 - DNA, 25 bp, Homo sapien
tgagtccttttaggaatcaaattta

SEQ ID NO: 2303864 - DNA, 25 bp, Homo sapien
ttcatattcatatcgtccctcagac

SEQ ID NO: 2303865 - DNA, 25 bp, Homo sapien
ggtgctcgttctctcggaattcttt

SEQ ID NO: 2303866 - DNA, 25 bp, Homo sapien
actgggatgacttcgaggaggtgct

SEQ ID NO: 2303867 - DNA, 25 bp, Homo sapien
tattcatatcgtccctcagaccaca

SEQ ID NO: 2303868 - DNA, 25 bp, Homo sapien
tggtgacagtgtgtcaaaaacataa

SEQ ID NO: 2303869 - DNA, 25 bp, Homo sapien
ctgagtcattccaacgtcttttggt

SEQ ID NO: 2303870 - DNA, 25 bp, Homo sapien
cattccaacgtcttttggtgacagt

SEQ ID NO: 2303871 - DNA, 25 bp, Homo sapien
aaatattggtgtttctgagtcattc

SEQ ID NO: 2303872 - DNA, 25 bp, Homo sapien
ccaggtctgtctagcagtggtggtt

SEQ ID NO: 2303873 - DNA, 25 bp, Homo sapien
catgagaaaaactgcggccctcgtc

SEQ ID NO: 2303874 - DNA, 25 bp, Homo sapien
gccctcgtcatagtctcggtaatca

SEQ ID NO: 2303875 - DNA, 25 bp, Homo sapien
ggtggaccacttcttcgatcatgag

SEQ ID NO: 2303876 - DNA, 25 bp, Homo sapien
ctgcttgcagaatgatcgtctcttg

SEQ ID NO: 2303877 - DNA, 25 bp, Homo sapien
ctcttgtccatctataaccagattc

SEQ ID NO: 2303878 - DNA, 25 bp, Homo sapien
ctgtattcaggttgcctgcttgcag

SEQ ID NO: 2303879 - DNA, 25 bp, Homo sapien
tcttgtccatctataaccagattca

SEQ ID NO: 2303880 - DNA, 25 bp, Homo sapien
aatgccaagagatgtggaacactag

SEQ ID NO: 2303881 - DNA, 25 bp, Homo sapien
gtgccttgagtctatatttccaaag

SEQ ID NO: 2303882 - DNA, 25 bp, Homo sapien
aaatatttcatctatgtgccttgag

SEQ ID NO: 2303883 - DNA, 25 bp, Homo sapien
tcccaaagcacggagattaacagtg

SEQ ID NO: 2303884 - DNA, 25 bp, Homo sapien
ctatccactgacactgaacagtttc

SEQ ID NO: 2303885 - DNA, 25 bp, Homo sapien
tccactgacactgaacagtttctgt

SEQ ID NO: 2303886 - DNA, 25 bp, Homo sapien
cactgacactgaacagtttctgtag

SEQ ID NO: 2303887 - DNA, 25 bp, Homo sapien
tatccactgacactgaacagtttct

SEQ ID NO: 2303888 - DNA, 25 bp, Homo sapien
acaattctctttgcacggttcacaa

SEQ ID NO: 2303889 - DNA, 25 bp, Homo sapien
taactcagacgtcaagtgaagacac

SEQ ID NO: 2303890 - DNA, 25 bp, Homo sapien
gatgccaggcagtaaaagctatagc

SEQ ID NO: 2303891 - DNA, 25 bp, Homo sapien
caagtaggaaatcgtcaatgagccc

SEQ ID NO: 2303892 - DNA, 25 bp, Homo sapien
gaagctaacttgaagggactctcac

SEQ ID NO: 2303893 - DNA, 25 bp, Homo sapien
gtaaagaaactttgcagactccatc

SEQ ID NO: 2303894 - DNA, 25 bp, Homo sapien
tcttagtagggttggactgccgtaa

SEQ ID NO: 2303895 - DNA, 25 bp, Homo sapien
tatagaaagaatgggctaaccaccc

SEQ ID NO: 2303896 - DNA, 25 bp, Homo sapien
gactcaaaagaggtattcgtaggcc

SEQ ID NO: 2303897 - DNA, 25 bp, Homo sapien
caagaacgtggagcaactgggaact

SEQ ID NO: 2303898 - DNA, 25 bp, Homo sapien
tcgtaggccaatgttcactgtagca

SEQ ID NO: 2303899 - DNA, 25 bp, Homo sapien
tataacaagcattggcaagaacgtg

SEQ ID NO: 2303900 - DNA, 25 bp, Homo sapien
tcatgtgcactagtacctaagagta

SEQ ID NO: 2303901 - DNA, 25 bp, Homo sapien
gatttctagccaaacccaagtgttg

SEQ ID NO: 2303902 - DNA, 25 bp, Homo sapien
tttaaccttgatttatgggccagag

SEQ ID NO: 2303903 - DNA, 25 bp, Homo sapien
taagaaaggcgttctgacagtcata

SEQ ID NO: 2303904 - DNA, 25 bp, Homo sapien
ctctcgcataatgggaagagtagaa

SEQ ID NO: 2303905 - DNA, 25 bp, Homo sapien
taaggagaccgctctctcgcataat

SEQ ID NO: 2303906 - DNA, 25 bp, Homo sapien
agaccgctctctcgcataatgggaa

SEQ ID NO: 2303907 - DNA, 25 bp, Homo sapien
cccttttataaggagaccgctctct

SEQ ID NO: 2303908 - DNA, 25 bp, Homo sapien
gtggagaatcctttcggccaacagg

SEQ ID NO: 2303909 - DNA, 25 bp, Homo sapien
atggaaagagtatgatttgctcctt

SEQ ID NO: 2303910 - DNA, 25 bp, Homo sapien
tctatgttgagactgatggaaagag

SEQ ID NO: 2303911 - DNA, 25 bp, Homo sapien
tagcttctgctactgacactggaac

SEQ ID NO: 2303912 - DNA, 25 bp, Homo sapien
tgtgtgtatggtgtttgttatacta

SEQ ID NO: 2303913 - DNA, 25 bp, Homo sapien
aaataaatctcttacacctagaagg

SEQ ID NO: 2303914 - DNA, 25 bp, Homo sapien
cacctagaaggaaatctgactcagt

SEQ ID NO: 2303915 - DNA, 25 bp, Homo sapien
gactcagtacattctcatcagagga

SEQ ID NO: 2303916 - DNA, 25 bp, Homo sapien
gaagaatatgatagtactcctccaa

SEQ ID NO: 2303917 - DNA, 25 bp, Homo sapien
caatccagtaatgaaatgtggttgc

SEQ ID NO: 2303918 - DNA, 25 bp, Homo sapien
gaaagcaaaaggtctggaaaccatg

SEQ ID NO: 2303919 - DNA, 25 bp, Homo sapien
taggcttcagttgcctacaatccag

SEQ ID NO: 2303920 - DNA, 25 bp, Homo sapien
attctgccgtttgtaggaggcacca

SEQ ID NO: 2303921 - DNA, 25 bp, Homo sapien
cattctgccgtttgtaggaggcacc

SEQ ID NO: 2303922 - DNA, 25 bp, Homo sapien
tctgccgtttgtaggaggcaccagg

SEQ ID NO: 2303923 - DNA, 25 bp, Homo sapien
ttctgccgtttgtaggaggcaccag

SEQ ID NO: 2303924 - DNA, 25 bp, Homo sapien
ttctagctaatttgtttttgataaa

SEQ ID NO: 2303925 - DNA, 25 bp, Homo sapien
tatataagaaaacataagatgtaat

SEQ ID NO: 2303926 - DNA, 25 bp, Homo sapien
ttttctagctaatttgtttttgata

SEQ ID NO: 2303927 - DNA, 25 bp, Homo sapien
ctatataagaaaacataagatgtaa

SEQ ID NO: 2303928 - DNA, 25 bp, Homo sapien
aagaaactgctgaaccacttgaggg

SEQ ID NO: 2303929 - DNA, 25 bp, Homo sapien
gatgttttcaaagactggacaggcc

SEQ ID NO: 2303930 - DNA, 25 bp, Homo sapien
aaccacttgagggtgaagtatctct

SEQ ID NO: 2303931 - DNA, 25 bp, Homo sapien
tgagggtgaagtatctcttgatgtt

SEQ ID NO: 2303932 - DNA, 25 bp, Homo sapien
cttttcagttagcctactgggtttg

SEQ ID NO: 2303933 - DNA, 25 bp, Homo sapien
tcatctgatttctctagcttttcag

SEQ ID NO: 2303934 - DNA, 25 bp, Homo sapien
tcaggcaagttactttcatctgatt

SEQ ID NO: 2303935 - DNA, 25 bp, Homo sapien
ctcatactcagaaatttcaggcaag

SEQ ID NO: 2303936 - DNA, 25 bp, Homo sapien
catctgatttctctagcttttcagc

SEQ ID NO: 2303937 - DNA, 25 bp, Homo sapien
ggcttagcatgatttcctgagatac

SEQ ID NO: 2303938 - DNA, 25 bp, Homo sapien
ttcggtattcaagactcatcaaggt

SEQ ID NO: 2303939 - DNA, 25 bp, Homo sapien
ctcgggttgcccagacaatgaataa

SEQ ID NO: 2303940 - DNA, 25 bp, Homo sapien
gacaaagcgtgattactgaattcag

SEQ ID NO: 2303941 - DNA, 25 bp, Homo sapien
gtttcattccaatttttagtgcatg

SEQ ID NO: 2303942 - DNA, 25 bp, Homo sapien
ccacgctaatcttctgtttcattcc

SEQ ID NO: 2303943 - DNA, 25 bp, Homo sapien
ttcattccaatttttagtgcatgtg

SEQ ID NO: 2303944 - DNA, 25 bp, Homo sapien
ggggccacgctaatcttctgtttca

SEQ ID NO: 2303945 - DNA, 25 bp, Homo sapien
tggctggtcagtaaacaatggtgct

SEQ ID NO: 2303946 - DNA, 25 bp, Homo sapien
aaataattctatcccatgtgttgtg

SEQ ID NO: 2303947 - DNA, 25 bp, Homo sapien
gatgctattgctttagagcgagtgg

SEQ ID NO: 2303948 - DNA, 25 bp, Homo sapien
ggttagctgactatcttcaaataat

SEQ ID NO: 2303949 - DNA, 25 bp, Homo sapien
cacatactgttctcggtgatggcag

SEQ ID NO: 2303950 - DNA, 25 bp, Homo sapien
tgtagaaatcggacagcacctagag

SEQ ID NO: 2303951 - DNA, 25 bp, Homo sapien
taagctacacggtcacatctaggat

SEQ ID NO: 2303952 - DNA, 25 bp, Homo sapien
gggaccatactgatcaaactgactg

SEQ ID NO: 2303953 - DNA, 25 bp, Homo sapien
tttgaaagtaatcaatattgcaaag

SEQ ID NO: 2303954 - DNA, 25 bp, Homo sapien
taagaagtaatttgaaagtaatcaa

SEQ ID NO: 2303955 - DNA, 25 bp, Homo sapien
ttaagaagtaatttgaaagtaatca

SEQ ID NO: 2303956 - DNA, 25 bp, Homo sapien
gtaatttgaaagtaatcaatattgc

SEQ ID NO: 2303957 - DNA, 25 bp, Homo sapien
tacagttttgacaatcacaatagag

SEQ ID NO: 2303958 - DNA, 25 bp, Homo sapien
gttttgacaatcacaatagagaatg

SEQ ID NO: 2303959 - DNA, 25 bp, Homo sapien
tacatggggtccttacagttttgac

SEQ ID NO: 2303960 - DNA, 25 bp, Homo sapien
gggtccttacagttttgacaatcac

SEQ ID NO: 2303961 - DNA, 25 bp, Homo sapien
ctttcaaaatgtatgccataatctc

SEQ ID NO: 2303962 - DNA, 25 bp, Homo sapien
gaaaaataagtctttgctcatgcag

SEQ ID NO: 2303963 - DNA, 25 bp, Homo sapien
agtatttctgggagactttcaaaat

SEQ ID NO: 2303964 - DNA, 25 bp, Homo sapien
ctttttttgtggctgaagcgagtgg

SEQ ID NO: 2303965 - DNA, 25 bp, Homo sapien
gatgtacagattgtaaagatcttct

SEQ ID NO: 2303966 - DNA, 25 bp, Homo sapien
cagattgtaaagatcttctcccact

SEQ ID NO: 2303967 - DNA, 25 bp, Homo sapien
tcagatgtacagattgtaaagatct

SEQ ID NO: 2303968 - DNA, 25 bp, Homo sapien
tacagattgtaaagatcttctccca

SEQ ID NO: 2303969 - DNA, 25 bp, Homo sapien
tggtggaccacgtggtggcaaatcc

SEQ ID NO: 2303970 - DNA, 25 bp, Homo sapien
cacgtggtggcaaatcctccatcag

SEQ ID NO: 2303971 - DNA, 25 bp, Homo sapien
gcccaaagatccagacagcaatcca

SEQ ID NO: 2303972 - DNA, 25 bp, Homo sapien
tctgtgcccaaagatccagacagca

SEQ ID NO: 2303973 - DNA, 25 bp, Homo sapien
gaggcactcatgagacaaccagaac

SEQ ID NO: 2303974 - DNA, 25 bp, Homo sapien
ggatcctggaacatatcccctaagg

SEQ ID NO: 2303975 - DNA, 25 bp, Homo sapien
gagtaagttcttcctagcaccacaa

SEQ ID NO: 2303976 - DNA, 25 bp, Homo sapien
cttagtagccctctcagttgtcgga

SEQ ID NO: 2303977 - DNA, 25 bp, Homo sapien
tgagatctgctgacaatacctgaat

SEQ ID NO: 2303978 - DNA, 25 bp, Homo sapien
taagaacaaaggctagggaagacat

SEQ ID NO: 2303979 - DNA, 25 bp, Homo sapien
ttaaacctctatccatgagatctgc

SEQ ID NO: 2303980 - DNA, 25 bp, Homo sapien
tggcatttgtcagtgtaaggcagtc

SEQ ID NO: 2303981 - DNA, 25 bp, Homo sapien
gcattgtcactattaccagaggcca

SEQ ID NO: 2303982 - DNA, 25 bp, Homo sapien
tttctcgcccttgcattgtcactat

SEQ ID NO: 2303983 - DNA, 25 bp, Homo sapien
tgcattgtcactattaccagaggcc

SEQ ID NO: 2303984 - DNA, 25 bp, Homo sapien
cattgtcactattaccagaggccat

SEQ ID NO: 2303985 - DNA, 25 bp, Homo sapien
aaggtaaaacacattctggttagct

SEQ ID NO: 2303986 - DNA, 25 bp, Homo sapien
cacattctggttagctgagaatgaa

SEQ ID NO: 2303987 - DNA, 25 bp, Homo sapien
gctaactgagttggcagaattatga

SEQ ID NO: 2303988 - DNA, 25 bp, Homo sapien
caaatacttagctaactgagttggc

SEQ ID NO: 2303989 - DNA, 25 bp, Homo sapien
ccgaaagtttcacagtcttgtcggt

SEQ ID NO: 2303990 - DNA, 25 bp, Homo sapien
cccgaaagtttcacagtcttgtcgg

SEQ ID NO: 2303991 - DNA, 25 bp, Homo sapien
gaaagtttcacagtcttgtcggtaa

SEQ ID NO: 2303992 - DNA, 25 bp, Homo sapien
cgaaagtttcacagtcttgtcggta

SEQ ID NO: 2303993 - DNA, 25 bp, Homo sapien
aatgaaggatctttttcaatcagca

SEQ ID NO: 2303994 - DNA, 25 bp, Homo sapien
tctgcctcaatgcaaactgtataga

SEQ ID NO: 2303995 - DNA, 25 bp, Homo sapien
tctaatgaaggatctttttcaatca

SEQ ID NO: 2303996 - DNA, 25 bp, Homo sapien
caaactgtatagacttttctaatga

SEQ ID NO: 2303997 - DNA, 25 bp, Homo sapien
aggctctccaaaatcttgagtggaa

SEQ ID NO: 2303998 - DNA, 25 bp, Homo sapien
gcttgagttcttcaacacaccgctc

SEQ ID NO: 2303999 - DNA, 25 bp, Homo sapien
caatgaaatgcttgagttcttcaac

SEQ ID NO: 2304000 - DNA, 25 bp, Homo sapien
ggaagtatcatactctgcaatgaaa

SEQ ID NO: 2304001 - DNA, 25 bp, Homo sapien
caactatcataaagtatttctctgc

SEQ ID NO: 2304002 - DNA, 25 bp, Homo sapien
gcaagcaacaagtcaataaaatcac

SEQ ID NO: 2304003 - DNA, 25 bp, Homo sapien
ttcagatggtatatgtgttgggcag

SEQ ID NO: 2304004 - DNA, 25 bp, Homo sapien
ttaaggatttacacaatccaggaaa

SEQ ID NO: 2304005 - DNA, 25 bp, Homo sapien
ggattattgtaatagaagacactga

SEQ ID NO: 2304006 - DNA, 25 bp, Homo sapien
tgtatatgatattatttaagactca

SEQ ID NO: 2304007 - DNA, 25 bp, Homo sapien
ttttctgaggtatctctcagagatt

SEQ ID NO: 2304008 - DNA, 25 bp, Homo sapien
cttctatttattagtcttgtatatg

SEQ ID NO: 2304009 - DNA, 25 bp, Homo sapien
gcctcggggtaagagaattagctgc

SEQ ID NO: 2304010 - DNA, 25 bp, Homo sapien
acactaccttgttacctactcttcg

SEQ ID NO: 2304011 - DNA, 25 bp, Homo sapien
gtcttgcactgatcaagggttggtt

SEQ ID NO: 2304012 - DNA, 25 bp, Homo sapien
cactgatcaagggttggtttctgga

SEQ ID NO: 2304013 - DNA, 25 bp, Homo sapien
cagtctcttcgccttcgttttcggg

SEQ ID NO: 2304014 - DNA, 25 bp, Homo sapien
gggttccgtcgtgatccatttcagt

SEQ ID NO: 2304015 - DNA, 25 bp, Homo sapien
tgctgccaagtctgtcctgcagact

SEQ ID NO: 2304016 - DNA, 25 bp, Homo sapien
tttcagtgttcctcacagggggtac

SEQ ID NO: 2304017 - DNA, 25 bp, Homo sapien
tgggctgccccataaacataaaagt

SEQ ID NO: 2304018 - DNA, 25 bp, Homo sapien
cagggccggctcgagagtagactta

SEQ ID NO: 2304019 - DNA, 25 bp, Homo sapien
caattttgtatcactgggcaggcca

SEQ ID NO: 2304020 - DNA, 25 bp, Homo sapien
tatctttatctggtaacggcaggac

SEQ ID NO: 2304021 - DNA, 25 bp, Homo sapien
ggtcctagccccactatggtatggt

SEQ ID NO: 2304022 - DNA, 25 bp, Homo sapien
gtcctagccccactatggtatggtt

SEQ ID NO: 2304023 - DNA, 25 bp, Homo sapien
gggctcctgtcgtccgacgaagctg

SEQ ID NO: 2304024 - DNA, 25 bp, Homo sapien
gaagctgtgtcgtccgacgaacccg

SEQ ID NO: 2304025 - DNA, 25 bp, Homo sapien
tgtcgtccgacgaagctgtgtcgtc

SEQ ID NO: 2304026 - DNA, 25 bp, Homo sapien
tccgacgaagctgtgtcgtccgacg

SEQ ID NO: 2304027 - DNA, 25 bp, Homo sapien
tctgtgttcggagcaggatcctctc

SEQ ID NO: 2304028 - DNA, 25 bp, Homo sapien
tagaattagtaaacaacaagagaca

SEQ ID NO: 2304029 - DNA, 25 bp, Homo sapien
cactgctagacgctgggaagggaat

SEQ ID NO: 2304030 - DNA, 25 bp, Homo sapien
gggtatgttagtccctcctagctaa

SEQ ID NO: 2304031 - DNA, 25 bp, Homo sapien
taggtacgggtaacaggcaaagtga

SEQ ID NO: 2304032 - DNA, 25 bp, Homo sapien
tactgcttgttttctggctttacat

SEQ ID NO: 2304033 - DNA, 25 bp, Homo sapien
actgcttgttttctggctttacatc

SEQ ID NO: 2304034 - DNA, 25 bp, Homo sapien
ttactgcttgttttctggctttaca

SEQ ID NO: 2304035 - DNA, 25 bp, Homo sapien
tatattttggctcaatgccgctggg

SEQ ID NO: 2304036 - DNA, 25 bp, Homo sapien
tgccagctttagtgcagccgagaag

SEQ ID NO: 2304037 - DNA, 25 bp, Homo sapien
gcaacagttttgtcaggcatagcag

SEQ ID NO: 2304038 - DNA, 25 bp, Homo sapien
cagtcttgcatgatttccggagggc

SEQ ID NO: 2304039 - DNA, 25 bp, Homo sapien
tcccctctctgcctgaataagtcat

SEQ ID NO: 2304040 - DNA, 25 bp, Homo sapien
tgtcatcttcagcacacagcttcag

SEQ ID NO: 2304041 - DNA, 25 bp, Homo sapien
ttcgtcccctgtcatcttcagcaca

SEQ ID NO: 2304042 - DNA, 25 bp, Homo sapien
tcctggatttctaataaatgcttcc

SEQ ID NO: 2304043 - DNA, 25 bp, Homo sapien
cactgaatcttgtctagaatgaata

SEQ ID NO: 2304044 - DNA, 25 bp, Homo sapien
tagaatgaatacttcagagatgatc

SEQ ID NO: 2304045 - DNA, 25 bp, Homo sapien
gcagcactgaatcttgtctagaatg

SEQ ID NO: 2304046 - DNA, 25 bp, Homo sapien
cagagatgatcagatcatcatctcc

SEQ ID NO: 2304047 - DNA, 25 bp, Homo sapien
aatggaaaagcaggagtggtgcggc

SEQ ID NO: 2304048 - DNA, 25 bp, Homo sapien
atggaaaagcaggagtggtgcggcc

SEQ ID NO: 2304049 - DNA, 25 bp, Homo sapien
tggaaaagcaggagtggtgcggcct

SEQ ID NO: 2304050 - DNA, 25 bp, Homo sapien
ggaaaagcaggagtggtgcggcctg

SEQ ID NO: 2304051 - DNA, 25 bp, Homo sapien
tgatagggaaataaccatcctcaag

SEQ ID NO: 2304052 - DNA, 25 bp, Homo sapien
gcactgatagggaaataaccatcct

SEQ ID NO: 2304053 - DNA, 25 bp, Homo sapien
gcatatgcactgatagggaaataac

SEQ ID NO: 2304054 - DNA, 25 bp, Homo sapien
gggaaataaccatcctcaagcttct

SEQ ID NO: 2304055 - DNA, 25 bp, Homo sapien
aacaccactgcactcgaagcagccg

SEQ ID NO: 2304056 - DNA, 25 bp, Homo sapien
tcagcagtcaccggagaacattttg

SEQ ID NO: 2304057 - DNA, 25 bp, Homo sapien
cagcagtcaccggagaacattttgc

SEQ ID NO: 2304058 - DNA, 25 bp, Homo sapien
ctatctacaacggaagaaagaagca

SEQ ID NO: 2304059 - DNA, 25 bp, Homo sapien
cttacagttctgtaaagaattggca

SEQ ID NO: 2304060 - DNA, 25 bp, Homo sapien
ttaatcccagtttgtagcaataaca

SEQ ID NO: 2304061 - DNA, 25 bp, Homo sapien
cactgcgtctggcaataatgtaact

SEQ ID NO: 2304062 - DNA, 25 bp, Homo sapien
tcaaggaaaacttacgttggatctg

SEQ ID NO: 2304063 - DNA, 25 bp, Homo sapien
tatacatctcagtcctaactaaagg

SEQ ID NO: 2304064 - DNA, 25 bp, Homo sapien
gatatgtgccactcttgcatataca

SEQ ID NO: 2304065 - DNA, 25 bp, Homo sapien
ttacgttggatctgaaccaatgagc

SEQ ID NO: 2304066 - DNA, 25 bp, Homo sapien
tatgacattgaaatccggcagcctc

SEQ ID NO: 2304067 - DNA, 25 bp, Homo sapien
gagaagtagaaagtcccgctccgac

SEQ ID NO: 2304068 - DNA, 25 bp, Homo sapien
catttatgtaagtcaggtcggctca

SEQ ID NO: 2304069 - DNA, 25 bp, Homo sapien
cattgtattgtatcagcgccagcta

SEQ ID NO: 2304070 - DNA, 25 bp, Homo sapien
gatggatattcgagccagtgagcac

SEQ ID NO: 2304071 - DNA, 25 bp, Homo sapien
cagatgacctatgacgggcagcact

SEQ ID NO: 2304072 - DNA, 25 bp, Homo sapien
gaaaacgcggcagtagatagaccag

SEQ ID NO: 2304073 - DNA, 25 bp, Homo sapien
gaagattatatgacgcagctcctcc

SEQ ID NO: 2304074 - DNA, 25 bp, Homo sapien
cacatctcgattgaagttaaggaca

SEQ ID NO: 2304075 - DNA, 25 bp, Homo sapien
tttgaatggagaacctgtgatctgc

SEQ ID NO: 2304076 - DNA, 25 bp, Homo sapien
gccccttgagtgtgtgaaaccttta

SEQ ID NO: 2304077 - DNA, 25 bp, Homo sapien
cacctgcatatgtagtctgggagaa

SEQ ID NO: 2304078 - DNA, 25 bp, Homo sapien
caaagaggagtgttgttcaggagcc

SEQ ID NO: 2304079 - DNA, 25 bp, Homo sapien
agaattggccggctgagttttccca

SEQ ID NO: 2304080 - DNA, 25 bp, Homo sapien
gaaacttgtttcaaatgggtgctgt

SEQ ID NO: 2304081 - DNA, 25 bp, Homo sapien
gtctgtgtccttataagccaggcta

SEQ ID NO: 2304082 - DNA, 25 bp, Homo sapien
tttgtgggatgcctcacggctgctg

SEQ ID NO: 2304083 - DNA, 25 bp, Homo sapien
tggcctggacgaggtgactccaacc

SEQ ID NO: 2304084 - DNA, 25 bp, Homo sapien
tctcctccggaaatgagtgggtgcg

SEQ ID NO: 2304085 - DNA, 25 bp, Homo sapien
cgaaggcgactgttctatgctggag

SEQ ID NO: 2304086 - DNA, 25 bp, Homo sapien
gtgctcgagccgctaggctggccaa

SEQ ID NO: 2304087 - DNA, 25 bp, Homo sapien
taacttttcgaggaattgtgcgcgc

SEQ ID NO: 2304088 - DNA, 25 bp, Homo sapien
gctcgggagaatggagcgggcgggc

SEQ ID NO: 2304089 - DNA, 25 bp, Homo sapien
gcgggacctcgtggagatcggccag

SEQ ID NO: 2304090 - DNA, 25 bp, Homo sapien
tattctcccagcgtttcgtggcccg

SEQ ID NO: 2304091 - DNA, 25 bp, Homo sapien
cccagcgtttcgtggcccgcgcgtg

SEQ ID NO: 2304092 - DNA, 25 bp, Homo sapien
tcccagcgtttcgtggcccgcgcgt

SEQ ID NO: 2304093 - DNA, 25 bp, Homo sapien
ttctcccagcgtttcgtggcccgcg

SEQ ID NO: 2304094 - DNA, 25 bp, Homo sapien
ttgctgacatcattgttatgggcag

SEQ ID NO: 2304095 - DNA, 25 bp, Homo sapien
catcattgttatgggcagagtggag

SEQ ID NO: 2304096 - DNA, 25 bp, Homo sapien
aagtgagaacttgcttaaatgtgcc

SEQ ID NO: 2304097 - DNA, 25 bp, Homo sapien
tgagaacttgcttaaatgtgccatt

SEQ ID NO: 2304098 - DNA, 25 bp, Homo sapien
caatgggtaataaaccatgacagta

SEQ ID NO: 2304099 - DNA, 25 bp, Homo sapien
cactgcttcatcactaaaaacgctt

SEQ ID NO: 2304100 - DNA, 25 bp, Homo sapien
gaagcttgcaactgtctccacactg

SEQ ID NO: 2304101 - DNA, 25 bp, Homo sapien
tcactaaaaacgcttacaatgggta

SEQ ID NO: 2304102 - DNA, 25 bp, Homo sapien
gggccactacgcttggccgagattt

SEQ ID NO: 2304103 - DNA, 25 bp, Homo sapien
ggccactacgcttggccgagatttt

SEQ ID NO: 2304104 - DNA, 25 bp, Homo sapien
tgggccactacgcttggccgagatt

SEQ ID NO: 2304105 - DNA, 25 bp, Homo sapien
tgtgggccactacgcttggccgaga

SEQ ID NO: 2304106 - DNA, 25 bp, Homo sapien
tatgaacaagttagtcattcaccac

SEQ ID NO: 2304107 - DNA, 25 bp, Homo sapien
tctaatgtaccaggccagagtatct

SEQ ID NO: 2304108 - DNA, 25 bp, Homo sapien
tagtatgcgcaagattctgagtcag

SEQ ID NO: 2304109 - DNA, 25 bp, Homo sapien
cctagatgccaggtaaagtatctgc

SEQ ID NO: 2304110 - DNA, 25 bp, Homo sapien
tggaagtgaactcacaatatctctg

SEQ ID NO: 2304111 - DNA, 25 bp, Homo sapien
gaagtatgcctgtacagagtcaata

SEQ ID NO: 2304112 - DNA, 25 bp, Homo sapien
tacgtaactgaatgatgataggcaa

SEQ ID NO: 2304113 - DNA, 25 bp, Homo sapien
gcacgtgacacagtgcctagtggag

SEQ ID NO: 2304114 - DNA, 25 bp, Homo sapien
gccggaacactaatgaacactcaga

SEQ ID NO: 2304115 - DNA, 25 bp, Homo sapien
cactaatgaacactcagaacgcagg

SEQ ID NO: 2304116 - DNA, 25 bp, Homo sapien
ggaacactaatgaacactcagaacg

SEQ ID NO: 2304117 - DNA, 25 bp, Homo sapien
ccgtgtgccggaacactaatgaaca

SEQ ID NO: 2304118 - DNA, 25 bp, Homo sapien
tctgcaggaagatgcttattcccat

SEQ ID NO: 2304119 - DNA, 25 bp, Homo sapien
ctctgcaggaagatgcttattccca

SEQ ID NO: 2304120 - DNA, 25 bp, Homo sapien
cagttcgccctttgagtaacttgta

SEQ ID NO: 2304121 - DNA, 25 bp, Homo sapien
tccagttcgccctttgagtaacttg

SEQ ID NO: 2304122 - DNA, 25 bp, Homo sapien
agtaacttgtaaactgcaaacgagt

SEQ ID NO: 2304123 - DNA, 25 bp, Homo sapien
cacaggtttccagttcgccctttga

SEQ ID NO: 2304124 - DNA, 25 bp, Homo sapien
ccttttaaggatcccattgttgatt

SEQ ID NO: 2304125 - DNA, 25 bp, Homo sapien
ttaaggatcccattgttgatttcat

SEQ ID NO: 2304126 - DNA, 25 bp, Homo sapien
tttaaggatcccattgttgatttca

SEQ ID NO: 2304127 - DNA, 25 bp, Homo sapien
gtgccttttaaggatcccattgttg

SEQ ID NO: 2304128 - DNA, 25 bp, Homo sapien
acacagactggcttccattgtccca

SEQ ID NO: 2304129 - DNA, 25 bp, Homo sapien
cagactggcttccattgtcccacat

SEQ ID NO: 2304130 - DNA, 25 bp, Homo sapien
tcgccacacagactggcttccattg

SEQ ID NO: 2304131 - DNA, 25 bp, Homo sapien
gccacacagactggcttccattgtc

SEQ ID NO: 2304132 - DNA, 25 bp, Homo sapien
tgcttctactaagagccctccacag

SEQ ID NO: 2304133 - DNA, 25 bp, Homo sapien
tgtgcttctactaagagccctccac

SEQ ID NO: 2304134 - DNA, 25 bp, Homo sapien
aatgtgcttctactaagagccctcc

SEQ ID NO: 2304135 - DNA, 25 bp, Homo sapien
ccaaatgtgcttctactaagagccc

SEQ ID NO: 2304136 - DNA, 25 bp, Homo sapien
aaagcagagtgatccgtccaaaatg

SEQ ID NO: 2304137 - DNA, 25 bp, Homo sapien
aaatgaggatctcatgataccacac

SEQ ID NO: 2304138 - DNA, 25 bp, Homo sapien
ccaaaatgaggatctcatgatacca

SEQ ID NO: 2304139 - DNA, 25 bp, Homo sapien
cagagtgatccgtccaaaatgagga

SEQ ID NO: 2304140 - DNA, 25 bp, Homo sapien
ctaagacagctgaaacagtacaatc

SEQ ID NO: 2304141 - DNA, 25 bp, Homo sapien
cgatttccttatcgccacagctggc

SEQ ID NO: 2304142 - DNA, 25 bp, Homo sapien
gctgaaacagtacaatcgatttcct

SEQ ID NO: 2304143 - DNA, 25 bp, Homo sapien
agtacaatcgatttccttatcgcca

SEQ ID NO: 2304144 - DNA, 25 bp, Homo sapien
cagctgaacaccctagcttgccaga

SEQ ID NO: 2304145 - DNA, 25 bp, Homo sapien
gaacaccctagcttgccagacacat

SEQ ID NO: 2304146 - DNA, 25 bp, Homo sapien
tgaacaccctagcttgccagacaca

SEQ ID NO: 2304147 - DNA, 25 bp, Homo sapien
gctgaacaccctagcttgccagaca

SEQ ID NO: 2304148 - DNA, 25 bp, Homo sapien
tctgctttgcgtgtgcttctctctg

SEQ ID NO: 2304149 - DNA, 25 bp, Homo sapien
tctcattgggtctccggaagaaaga

SEQ ID NO: 2304150 - DNA, 25 bp, Homo sapien
gcagacccgtaagtagactcctcca

SEQ ID NO: 2304151 - DNA, 25 bp, Homo sapien
aatgaaaatattgctgtgagatgca

SEQ ID NO: 2304152 - DNA, 25 bp, Homo sapien
acagcacgttccaaggaccaagatg

SEQ ID NO: 2304153 - DNA, 25 bp, Homo sapien
aaacctcatgcagcctatggagcca

SEQ ID NO: 2304154 - DNA, 25 bp, Homo sapien
tggagccagcgctccacagcacgtt

SEQ ID NO: 2304155 - DNA, 25 bp, Homo sapien
tgttgcagttcctcgaaacctcatg

SEQ ID NO: 2304156 - DNA, 25 bp, Homo sapien
ttttaaacttaaacagcagccattc

SEQ ID NO: 2304157 - DNA, 25 bp, Homo sapien
gagtggactctagccccttgggagc

SEQ ID NO: 2304158 - DNA, 25 bp, Homo sapien
gctgtctccattatcctcagtgaag

SEQ ID NO: 2304159 - DNA, 25 bp, Homo sapien
ttgaccgtccccaacattatgtctg

SEQ ID NO: 2304160 - DNA, 25 bp, Homo sapien
tgtcagtgttcagccgccttctatt

SEQ ID NO: 2304161 - DNA, 25 bp, Homo sapien
gtgcgttggcgtgttcccgccgctt

SEQ ID NO: 2304162 - DNA, 25 bp, Homo sapien
tgtagcccgagggtcgaggcgatgc

SEQ ID NO: 2304163 - DNA, 25 bp, Homo sapien
gttcccgccgcttaggatcgcctgt

SEQ ID NO: 2304164 - DNA, 25 bp, Homo sapien
gccgggaggcgagggtgcgttggcg

SEQ ID NO: 2304165 - DNA, 25 bp, Homo sapien
gatcagggagaaggtcataatcggt

SEQ ID NO: 2304166 - DNA, 25 bp, Homo sapien
cataatcggtttgttgggctgtgta

SEQ ID NO: 2304167 - DNA, 25 bp, Homo sapien
actgggtcggtgtcgcagaagatca

SEQ ID NO: 2304168 - DNA, 25 bp, Homo sapien
gaggctctccgcatggctcctgttt

SEQ ID NO: 2304169 - DNA, 25 bp, Homo sapien
tggcagcctggatcccggcggattc

SEQ ID NO: 2304170 - DNA, 25 bp, Homo sapien
gacagtgcagccgagttgcgtctcc

SEQ ID NO: 2304171 - DNA, 25 bp, Homo sapien
gctctggatggttcgtgcgctgctc

SEQ ID NO: 2304172 - DNA, 25 bp, Homo sapien
tctccctcgcgcgaggtgagtggca

SEQ ID NO: 2304173 - DNA, 25 bp, Homo sapien
gtgcgccacgttcacttgggtcagg

SEQ ID NO: 2304174 - DNA, 25 bp, Homo sapien
ttttcatggagacgaccagggccgt

SEQ ID NO: 2304175 - DNA, 25 bp, Homo sapien
tgaacccgcttttaagtgcgccacg

SEQ ID NO: 2304176 - DNA, 25 bp, Homo sapien
ggaacggactagaggctgaactttg

SEQ ID NO: 2304177 - DNA, 25 bp, Homo sapien
tttacagaaaccatggagcccaggc

SEQ ID NO: 2304178 - DNA, 25 bp, Homo sapien
ttaggcacgtgcctgtggaacattc

SEQ ID NO: 2304179 - DNA, 25 bp, Homo sapien
aagcaggtaggcacactcttcgctg

SEQ ID NO: 2304180 - DNA, 25 bp, Homo sapien
tagtggcccagaaataactgcctaa

SEQ ID NO: 2304181 - DNA, 25 bp, Homo sapien
cggacttcttgccaaagagttctcc

SEQ ID NO: 2304182 - DNA, 25 bp, Homo sapien
gacttcttgccaaagagttctccaa

SEQ ID NO: 2304183 - DNA, 25 bp, Homo sapien
ttcttgccaaagagttctccaaagg

SEQ ID NO: 2304184 - DNA, 25 bp, Homo sapien
cttcttgccaaagagttctccaaag

SEQ ID NO: 2304185 - DNA, 25 bp, Homo sapien
gatttggacattagaacgtttacta

SEQ ID NO: 2304186 - DNA, 25 bp, Homo sapien
ttggacattagaacgtttactatta

SEQ ID NO: 2304187 - DNA, 25 bp, Homo sapien
atttggacattagaacgtttactat

SEQ ID NO: 2304188 - DNA, 25 bp, Homo sapien
tggacattagaacgtttactattat

SEQ ID NO: 2304189 - DNA, 25 bp, Homo sapien
cacaagatggcagagaccgaagcag

SEQ ID NO: 2304190 - DNA, 25 bp, Homo sapien
aggcaccttcgccatcatcaaggca

SEQ ID NO: 2304191 - DNA, 25 bp, Homo sapien
gaagcaggtgaagccccaactgaga

SEQ ID NO: 2304192 - DNA, 25 bp, Homo sapien
gagcagcgctgagttacaccaggca

SEQ ID NO: 2304193 - DNA, 25 bp, Homo sapien
tttgggcaccatacgttgccttcat

SEQ ID NO: 2304194 - DNA, 25 bp, Homo sapien
aagaacagcgtgtggccgtgtacca

SEQ ID NO: 2304195 - DNA, 25 bp, Homo sapien
tgtggccgtgtaccatttgggcacc

SEQ ID NO: 2304196 - DNA, 25 bp, Homo sapien
cgtgtaccatttgggcaccatacgt

SEQ ID NO: 2304197 - DNA, 25 bp, Homo sapien
caccatcactctggatacagacaga

SEQ ID NO: 2304198 - DNA, 25 bp, Homo sapien
ttggaaccagagtgatacatccgcc

SEQ ID NO: 2304199 - DNA, 25 bp, Homo sapien
cagaagccatggagtatgattacca

SEQ ID NO: 2304200 - DNA, 25 bp, Homo sapien
gctctctagttgctcttggaaccag

SEQ ID NO: 2304201 - DNA, 25 bp, Homo sapien
gtcaagtttaggtcgatgaacatag

SEQ ID NO: 2304202 - DNA, 25 bp, Homo sapien
aactgtcaagtttaggtcgatgaac

SEQ ID NO: 2304203 - DNA, 25 bp, Homo sapien
taacacaaactgtcaagtttaggtc

SEQ ID NO: 2304204 - DNA, 25 bp, Homo sapien
tgagcataacacaaactgtcaagtt

SEQ ID NO: 2304205 - DNA, 25 bp, Homo sapien
gatcatggcttggataagtttgttc

SEQ ID NO: 2304206 - DNA, 25 bp, Homo sapien
tatcttcaagtcactcataccccaa

SEQ ID NO: 2304207 - DNA, 25 bp, Homo sapien
ccaatgtcagttagatgtcccacct

SEQ ID NO: 2304208 - DNA, 25 bp, Homo sapien
gtcccacctttatcttcaagtcact

SEQ ID NO: 2304209 - DNA, 25 bp, Homo sapien
ccatctccccaggcacgtctgcatt

SEQ ID NO: 2304210 - DNA, 25 bp, Homo sapien
cccaggcacgtctgcattgtcccag

SEQ ID NO: 2304211 - DNA, 25 bp, Homo sapien
tccccaggcacgtctgcattgtccc

SEQ ID NO: 2304212 - DNA, 25 bp, Homo sapien
atctccccaggcacgtctgcattgt

SEQ ID NO: 2304213 - DNA, 25 bp, Homo sapien
gctgtggccctcagagactaaggtg

SEQ ID NO: 2304214 - DNA, 25 bp, Homo sapien
tgtggccctcagagactaaggtgaa

SEQ ID NO: 2304215 - DNA, 25 bp, Homo sapien
catgtaaatgaagctgtggccctca

SEQ ID NO: 2304216 - DNA, 25 bp, Homo sapien
ctcatgtaaatgaagctgtggccct

SEQ ID NO: 2304217 - DNA, 25 bp, Homo sapien
agaagtaaattctcagttccgcaaa

SEQ ID NO: 2304218 - DNA, 25 bp, Homo sapien
tccgcaaatgttccaagaattggca

SEQ ID NO: 2304219 - DNA, 25 bp, Homo sapien
tccaagaattggcagagtaggcata

SEQ ID NO: 2304220 - DNA, 25 bp, Homo sapien
cagagtaggcataacactaaaaatc

SEQ ID NO: 2304221 - DNA, 25 bp, Homo sapien
ttttctcaagcaatgcaatcagaat

SEQ ID NO: 2304222 - DNA, 25 bp, Homo sapien
ctgtgctgcattttaaggagattcc

SEQ ID NO: 2304223 - DNA, 25 bp, Homo sapien
catgccatgttttgttgaatgatct

SEQ ID NO: 2304224 - DNA, 25 bp, Homo sapien
gattcccagactgagaattttctca

SEQ ID NO: 2304225 - DNA, 25 bp, Homo sapien
gaggctcaccatgctagatactgga

SEQ ID NO: 2304226 - DNA, 25 bp, Homo sapien
cagaggctattaagtcccagagagg

SEQ ID NO: 2304227 - DNA, 25 bp, Homo sapien
cttcatgagtcagtaaaggctagcc

SEQ ID NO: 2304228 - DNA, 25 bp, Homo sapien
aaaacactctcttcgttggtcacag

SEQ ID NO: 2304229 - DNA, 25 bp, Homo sapien
tgccctctcaacataggtgttccca

SEQ ID NO: 2304230 - DNA, 25 bp, Homo sapien
gttcccaaggttctgtcctcggcca

SEQ ID NO: 2304231 - DNA, 25 bp, Homo sapien
ttctctcccatctaagaagttccct

SEQ ID NO: 2304232 - DNA, 25 bp, Homo sapien
cataggtgttcccaaggttctgtcc

SEQ ID NO: 2304233 - DNA, 25 bp, Homo sapien
ttagccacgtaattgccgaatccca

SEQ ID NO: 2304234 - DNA, 25 bp, Homo sapien
gactgagtaatcacgttcaatctgg

SEQ ID NO: 2304235 - DNA, 25 bp, Homo sapien
cccacttggtagatacagctgtaat

SEQ ID NO: 2304236 - DNA, 25 bp, Homo sapien
cactcccactgagggctaaaaagca

SEQ ID NO: 2304237 - DNA, 25 bp, Homo sapien
tcaaggcctgttaccttggatccca

SEQ ID NO: 2304238 - DNA, 25 bp, Homo sapien
caaggcctgttaccttggatcccat

SEQ ID NO: 2304239 - DNA, 25 bp, Homo sapien
gttgtatccttgatgcttgctgcta

SEQ ID NO: 2304240 - DNA, 25 bp, Homo sapien
aaatccagatttgttggaagctgtc

SEQ ID NO: 2304241 - DNA, 25 bp, Homo sapien
gaaaaagaagtcagttgcttccacg

SEQ ID NO: 2304242 - DNA, 25 bp, Homo sapien
cacgttgttccctgtctgactagca

SEQ ID NO: 2304243 - DNA, 25 bp, Homo sapien
gcctttcgctttatgctaattctta

SEQ ID NO: 2304244 - DNA, 25 bp, Homo sapien
aattcttattcatttgagaggctca

SEQ ID NO: 2304245 - DNA, 25 bp, Homo sapien
tcttgcctttcgctttatgctaatt

SEQ ID NO: 2304246 - DNA, 25 bp, Homo sapien
ttattcatttgagaggctcaactga

SEQ ID NO: 2304247 - DNA, 25 bp, Homo sapien
ctgtcttcatgcctttgttcgttat

SEQ ID NO: 2304248 - DNA, 25 bp, Homo sapien
tcttcatgcctttgttcgttattct

SEQ ID NO: 2304249 - DNA, 25 bp, Homo sapien
tgcctttgttcgttattcttccctc

SEQ ID NO: 2304250 - DNA, 25 bp, Homo sapien
tcatgcctttgttcgttattcttcc

SEQ ID NO: 2304251 - DNA, 25 bp, Homo sapien
ggcaatggccatctaaaacttttct

SEQ ID NO: 2304252 - DNA, 25 bp, Homo sapien
taaactgctatgctgattcaagtca

SEQ ID NO: 2304253 - DNA, 25 bp, Homo sapien
cactggtctgcaaagggcaatggcc

SEQ ID NO: 2304254 - DNA, 25 bp, Homo sapien
cgcttcaatgaatccctaacatggc

SEQ ID NO: 2304255 - DNA, 25 bp, Homo sapien
ccctttaagaacttccaagccactg

SEQ ID NO: 2304256 - DNA, 25 bp, Homo sapien
cctttaagaacttccaagccactga

SEQ ID NO: 2304257 - DNA, 25 bp, Homo sapien
cccctcctctaacccatttcacatc

SEQ ID NO: 2304258 - DNA, 25 bp, Homo sapien
cctccatacaaatgttcttcctgct

SEQ ID NO: 2304259 - DNA, 25 bp, Homo sapien
atacctgttctccagtcttttgccc

SEQ ID NO: 2304260 - DNA, 25 bp, Homo sapien
tcctcctctttgctcacaactccct

SEQ ID NO: 2304261 - DNA, 25 bp, Homo sapien
ggctgagtccaacagtctccttgag

SEQ ID NO: 2304262 - DNA, 25 bp, Homo sapien
taggacttcaggtaacaaatgacag

SEQ ID NO: 2304263 - DNA, 25 bp, Homo sapien
ccaggcacctagagttcgcagggta

SEQ ID NO: 2304264 - DNA, 25 bp, Homo sapien
gaagagagctctaattgagactgag

SEQ ID NO: 2304265 - DNA, 25 bp, Homo sapien
tagcttttgcagtacaattcatatt

SEQ ID NO: 2304266 - DNA, 25 bp, Homo sapien
ggaatgagtttcaaccagaaatgga

SEQ ID NO: 2304267 - DNA, 25 bp, Homo sapien
tcattaccagattggaaaagattaa

SEQ ID NO: 2304268 - DNA, 25 bp, Homo sapien
tgtctagcttttgcagtacaattca

SEQ ID NO: 2304269 - DNA, 25 bp, Homo sapien
ggtactgtttacttggcctgctccc

SEQ ID NO: 2304270 - DNA, 25 bp, Homo sapien
gggtacacatgtagcctctcgcatg

SEQ ID NO: 2304271 - DNA, 25 bp, Homo sapien
caatttcggttaggcctccattctg

SEQ ID NO: 2304272 - DNA, 25 bp, Homo sapien
tgtcctcaatgggaacaagactagt

SEQ ID NO: 2304273 - DNA, 25 bp, Homo sapien
tgtccataggtatctccaccaatag

SEQ ID NO: 2304274 - DNA, 25 bp, Homo sapien
tacaggaccgcggtgcattgcaggc

SEQ ID NO: 2304275 - DNA, 25 bp, Homo sapien
ggaccgcggtgcattgcaggcacaa

SEQ ID NO: 2304276 - DNA, 25 bp, Homo sapien
ttttcaacttaactgtccataggta

SEQ ID NO: 2304277 - DNA, 25 bp, Homo sapien
gttgcaacacagaggagattgtctt

SEQ ID NO: 2304278 - DNA, 25 bp, Homo sapien
tctcgccagatatagagttgcaaca

SEQ ID NO: 2304279 - DNA, 25 bp, Homo sapien
caaaccaatcgttgaagaactaggc

SEQ ID NO: 2304280 - DNA, 25 bp, Homo sapien
gaatggcaaagtccccacaaaccaa

SEQ ID NO: 2304281 - DNA, 25 bp, Homo sapien
caaaagtgaggctcatgacggtgcc

SEQ ID NO: 2304282 - DNA, 25 bp, Homo sapien
gacttctacagaagcgccatcaacc

SEQ ID NO: 2304283 - DNA, 25 bp, Homo sapien
tgtggcaagttcagtacagaccgaa

SEQ ID NO: 2304284 - DNA, 25 bp, Homo sapien
ccagcttctaacatgatgtgccaag

SEQ ID NO: 2304285 - DNA, 25 bp, Homo sapien
gttaccatgagggtgatgctctgaa

SEQ ID NO: 2304286 - DNA, 25 bp, Homo sapien
tggttaccatgagggtgatgctctg

SEQ ID NO: 2304287 - DNA, 25 bp, Homo sapien
taccatgagggtgatgctctgaaaa

SEQ ID NO: 2304288 - DNA, 25 bp, Homo sapien
accatgagggtgatgctctgaaaac

SEQ ID NO: 2304289 - DNA, 25 bp, Homo sapien
ccaccaggtgttcacagtcctctct

SEQ ID NO: 2304290 - DNA, 25 bp, Homo sapien
tccacccaccaggtgttcacagtcc

SEQ ID NO: 2304291 - DNA, 25 bp, Homo sapien
ccaggtgttcacagtcctctctccc

SEQ ID NO: 2304292 - DNA, 25 bp, Homo sapien
caccaggtgttcacagtcctctctc

SEQ ID NO: 2304293 - DNA, 25 bp, Homo sapien
ctcattcttctacatcgctttcctt

SEQ ID NO: 2304294 - DNA, 25 bp, Homo sapien
tcattcttctacatcgctttccttc

SEQ ID NO: 2304295 - DNA, 25 bp, Homo sapien
gtctttgggcagcacttccagaaga

SEQ ID NO: 2304296 - DNA, 25 bp, Homo sapien
tgtctttgggcagcacttccagaag

SEQ ID NO: 2304297 - DNA, 25 bp, Homo sapien
atgtctttgggcagcacttccagaa

SEQ ID NO: 2304298 - DNA, 25 bp, Homo sapien
caggagattctcttccaggacttca

SEQ ID NO: 2304299 - DNA, 25 bp, Homo sapien
ggctcagagtatcccagaatggaaa

SEQ ID NO: 2304300 - DNA, 25 bp, Homo sapien
taagccgcaggaattaaccaatatg

SEQ ID NO: 2304301 - DNA, 25 bp, Homo sapien
catgatgacctgtgacaaaatgggc

SEQ ID NO: 2304302 - DNA, 25 bp, Homo sapien
ccatggaatcatggctagggcctat

SEQ ID NO: 2304303 - DNA, 25 bp, Homo sapien
gagaccactcccttttccggaatgc

SEQ ID NO: 2304304 - DNA, 25 bp, Homo sapien
gagccatcctgattcctaatgaggc

SEQ ID NO: 2304305 - DNA, 25 bp, Homo sapien
tagggcctattctgacagagccatc

SEQ ID NO: 2304306 - DNA, 25 bp, Homo sapien
cacattgactagagtcagtattctg

SEQ ID NO: 2304307 - DNA, 25 bp, Homo sapien
ttacatctctttctagggtgcatgc

SEQ ID NO: 2304308 - DNA, 25 bp, Homo sapien
tctttctagggtgcatgcaacagga

SEQ ID NO: 2304309 - DNA, 25 bp, Homo sapien
catctctttctagggtgcatgcaac

SEQ ID NO: 2304310 - DNA, 25 bp, Homo sapien
ctagggtgcatgcaacaggaatcct

SEQ ID NO: 2304311 - DNA, 25 bp, Homo sapien
ccaaaccactgatttttgaccagca

SEQ ID NO: 2304312 - DNA, 25 bp, Homo sapien
tttgaccagcaggacagctgctaat

SEQ ID NO: 2304313 - DNA, 25 bp, Homo sapien
aaaccactgatttttgaccagcagg

SEQ ID NO: 2304314 - DNA, 25 bp, Homo sapien
actgatttttgaccagcaggacagc

SEQ ID NO: 2304315 - DNA, 25 bp, Homo sapien
agcccagcgacaaacctcagagctg

SEQ ID NO: 2304316 - DNA, 25 bp, Homo sapien
actgccattcccacaagatgtcgat

SEQ ID NO: 2304317 - DNA, 25 bp, Homo sapien
cactctcggtagctaaattctggac

SEQ ID NO: 2304318 - DNA, 25 bp, Homo sapien
cacaaacgatgttttccaccgaggc

SEQ ID NO: 2304319 - DNA, 25 bp, Homo sapien
tggcagtttgtctagagactgggcc

SEQ ID NO: 2304320 - DNA, 25 bp, Homo sapien
gagactgggccctaatcgagtcaac

SEQ ID NO: 2304321 - DNA, 25 bp, Homo sapien
tgtctagagactgggccctaatcga

SEQ ID NO: 2304322 - DNA, 25 bp, Homo sapien
ctaatgtggcagtttgtctagagac

SEQ ID NO: 2304323 - DNA, 25 bp, Homo sapien
tccacatggacaaccttcattcgtt

SEQ ID NO: 2304324 - DNA, 25 bp, Homo sapien
tctccacatggacaaccttcattcg

SEQ ID NO: 2304325 - DNA, 25 bp, Homo sapien
cacatggacaaccttcattcgttca

SEQ ID NO: 2304326 - DNA, 25 bp, Homo sapien
cagccagcccgggaattttctctcc

SEQ ID NO: 2304327 - DNA, 25 bp, Homo sapien
ccttttcctcttcatgctggtgcat

SEQ ID NO: 2304328 - DNA, 25 bp, Homo sapien
cctgccttttcctcttcatgctggt

SEQ ID NO: 2304329 - DNA, 25 bp, Homo sapien
tgcttcttctcctgccttttcctct

SEQ ID NO: 2304330 - DNA, 25 bp, Homo sapien
ctcctgccttttcctcttcatgctg

SEQ ID NO: 2304331 - DNA, 25 bp, Homo sapien
tcacatacacatggcttttgtttat

SEQ ID NO: 2304332 - DNA, 25 bp, Homo sapien
gccttaaggaatgactttgatgctg

SEQ ID NO: 2304333 - DNA, 25 bp, Homo sapien
acatttttatacatggccttaagga

SEQ ID NO: 2304334 - DNA, 25 bp, Homo sapien
cttaaggaatgactttgatgctgaa

SEQ ID NO: 2304335 - DNA, 25 bp, Homo sapien
ggtcagtaacgtagcctgctggctt

SEQ ID NO: 2304336 - DNA, 25 bp, Homo sapien
caatgaggcctcattaaggaaagga

SEQ ID NO: 2304337 - DNA, 25 bp, Homo sapien
tgcaaaggctagaattatctggcgt

SEQ ID NO: 2304338 - DNA, 25 bp, Homo sapien
ttttggactggaacgaaccattaca

SEQ ID NO: 2304339 - DNA, 25 bp, Homo sapien
aacactagatgacagagctctgggc

SEQ ID NO: 2304340 - DNA, 25 bp, Homo sapien
tggaagggagccagcttattgccct

SEQ ID NO: 2304341 - DNA, 25 bp, Homo sapien
gacaggttgctaaggtttactccag

SEQ ID NO: 2304342 - DNA, 25 bp, Homo sapien
agcccagatttcactcaaaccttag

SEQ ID NO: 2304343 - DNA, 25 bp, Homo sapien
ccaaaagcgttcaccagcttctcct

SEQ ID NO: 2304344 - DNA, 25 bp, Homo sapien
tccaaaagcgttcaccagcttctcc

SEQ ID NO: 2304345 - DNA, 25 bp, Homo sapien
cctccaaaagcgttcaccagcttct

SEQ ID NO: 2304346 - DNA, 25 bp, Homo sapien
ccacctccaaaagcgttcaccagct

SEQ ID NO: 2304347 - DNA, 25 bp, Homo sapien
tgaaaattcaccctcaatggtctca

SEQ ID NO: 2304348 - DNA, 25 bp, Homo sapien
gcctctggtgtcaaatgtgcctttt

SEQ ID NO: 2304349 - DNA, 25 bp, Homo sapien
atcattccctgtaatccagcctcca

SEQ ID NO: 2304350 - DNA, 25 bp, Homo sapien
tgtctcatcccatacagcctctggt

SEQ ID NO: 2304351 - DNA, 25 bp, Homo sapien
tagagttgcctatggtgccacctaa

SEQ ID NO: 2304352 - DNA, 25 bp, Homo sapien
tgagacttccacagcgtcagtgctg

SEQ ID NO: 2304353 - DNA, 25 bp, Homo sapien
gttgcctatggtgccacctaaaagt

SEQ ID NO: 2304354 - DNA, 25 bp, Homo sapien
gcgtcagtgctgtagagttgcctat

SEQ ID NO: 2304355 - DNA, 25 bp, Homo sapien
ccaaggcttgccaattggcctgagt

SEQ ID NO: 2304356 - DNA, 25 bp, Homo sapien
atcttgcagagttaatactcccagc

SEQ ID NO: 2304357 - DNA, 25 bp, Homo sapien
agagttaatactcccagcccagcca

SEQ ID NO: 2304358 - DNA, 25 bp, Homo sapien
ggcttgccaattggcctgagtcacc

SEQ ID NO: 2304359 - DNA, 25 bp, Homo sapien
ctgaagcccaataaatagttgatga

SEQ ID NO: 2304360 - DNA, 25 bp, Homo sapien
tgcaatagctgcagagtttatctcc

SEQ ID NO: 2304361 - DNA, 25 bp, Homo sapien
ccttgcctgcaatagctgcagagtt

SEQ ID NO: 2304362 - DNA, 25 bp, Homo sapien
tcttcttccaggacaacgggaccat

SEQ ID NO: 2304363 - DNA, 25 bp, Homo sapien
ataaatgccaattcttgtacatttg

SEQ ID NO: 2304364 - DNA, 25 bp, Homo sapien
gttcctccaccttattgctgaactt

SEQ ID NO: 2304365 - DNA, 25 bp, Homo sapien
tcctccaccttattgctgaacttac

SEQ ID NO: 2304366 - DNA, 25 bp, Homo sapien
aagttcctccaccttattgctgaac

SEQ ID NO: 2304367 - DNA, 25 bp, Homo sapien
tccaagttcctccaccttattgctg

SEQ ID NO: 2304368 - DNA, 25 bp, Homo sapien
gcttccactggttgatttgctgcca

SEQ ID NO: 2304369 - DNA, 25 bp, Homo sapien
aactgcttccactggttgatttgct

SEQ ID NO: 2304370 - DNA, 25 bp, Homo sapien
ggcgcaactgcttccactggttgat

SEQ ID NO: 2304371 - DNA, 25 bp, Homo sapien
gcaactgcttccactggttgatttg

SEQ ID NO: 2304372 - DNA, 25 bp, Homo sapien
tcagataccaaggtccaacttgctt

SEQ ID NO: 2304373 - DNA, 25 bp, Homo sapien
cacaacttgcatctctagagtccca

SEQ ID NO: 2304374 - DNA, 25 bp, Homo sapien
ttccctgggccacataaggtaacca

SEQ ID NO: 2304375 - DNA, 25 bp, Homo sapien
cacataaggtaaccacagtttcttt

SEQ ID NO: 2304376 - DNA, 25 bp, Homo sapien
tctcactctcattagcaatatatat

SEQ ID NO: 2304377 - DNA, 25 bp, Homo sapien
ttagcttcattcctagatggaccat

SEQ ID NO: 2304378 - DNA, 25 bp, Homo sapien
aaagcaggtaccttttcattgagcc

SEQ ID NO: 2304379 - DNA, 25 bp, Homo sapien
tttaaggcttgaacttagagctgtt

SEQ ID NO: 2304380 - DNA, 25 bp, Homo sapien
ttccataaatgtggctatcattggc

SEQ ID NO: 2304381 - DNA, 25 bp, Homo sapien
gctatcattggcctgaaccccaact

SEQ ID NO: 2304382 - DNA, 25 bp, Homo sapien
cccaactccggctctaggtaattgt

SEQ ID NO: 2304383 - DNA, 25 bp, Homo sapien
catggctgccttgtttctaacctgc

SEQ ID NO: 2304384 - DNA, 25 bp, Homo sapien
cttccaccctgccattagtcttgtg

SEQ ID NO: 2304385 - DNA, 25 bp, Homo sapien
tgccattagtcttgtgggaagtgtg

SEQ ID NO: 2304386 - DNA, 25 bp, Homo sapien
ggatcacctgttgaggctctgaaac

SEQ ID NO: 2304387 - DNA, 25 bp, Homo sapien
tggatcacctgttgaggctctgaaa

SEQ ID NO: 2304388 - DNA, 25 bp, Homo sapien
cccagctgcctgagacagaaatttt

SEQ ID NO: 2304389 - DNA, 25 bp, Homo sapien
ccagctgcctgagacagaaattttc

SEQ ID NO: 2304390 - DNA, 25 bp, Homo sapien
tttctggtttctcttgacttgttcc

SEQ ID NO: 2304391 - DNA, 25 bp, Homo sapien
ctggtttctcttgacttgttccttt

SEQ ID NO: 2304392 - DNA, 25 bp, Homo sapien
tctcaaaactcaacttgcttgttct

SEQ ID NO: 2304393 - DNA, 25 bp, Homo sapien
gtcatctcaaaactcaacttgcttg

SEQ ID NO: 2304394 - DNA, 25 bp, Homo sapien
gctccagggtcatctcaaaactcaa

SEQ ID NO: 2304395 - DNA, 25 bp, Homo sapien
caaaactcaacttgcttgttctcat

SEQ ID NO: 2304396 - DNA, 25 bp, Homo sapien
tccacaaacatatgcagaaacacac

SEQ ID NO: 2304397 - DNA, 25 bp, Homo sapien
ctccttccacaaacatatgcagaaa

SEQ ID NO: 2304398 - DNA, 25 bp, Homo sapien
actgcagtgccctactgtccaccac

SEQ ID NO: 2304399 - DNA, 25 bp, Homo sapien
agaaacacactgcagtgccctactg

SEQ ID NO: 2304400 - DNA, 25 bp, Homo sapien
cttttgttcccatcttgtgttaact

SEQ ID NO: 2304401 - DNA, 25 bp, Homo sapien
ttctggtctttctttggcattcact

SEQ ID NO: 2304402 - DNA, 25 bp, Homo sapien
ctggtctttctttggcattcactgt

SEQ ID NO: 2304403 - DNA, 25 bp, Homo sapien
ttcttttgttcccatcttgtgttaa

SEQ ID NO: 2304404 - DNA, 25 bp, Homo sapien
ccttcaccaaggcacggcaatgatt

SEQ ID NO: 2304405 - DNA, 25 bp, Homo sapien
tccttcctaaaagccccgatgtgtg

SEQ ID NO: 2304406 - DNA, 25 bp, Homo sapien
caaggcacggcaatgattccttcct

SEQ ID NO: 2304407 - DNA, 25 bp, Homo sapien
tgtgtgacattttccagtatgaaac

SEQ ID NO: 2304408 - DNA, 25 bp, Homo sapien
tccaccagcagttgttaaagccata

SEQ ID NO: 2304409 - DNA, 25 bp, Homo sapien
acaggtagataggtggtaggacatc

SEQ ID NO: 2304410 - DNA, 25 bp, Homo sapien
aactctcaggagacaagcaattgca

SEQ ID NO: 2304411 - DNA, 25 bp, Homo sapien
taggacatctggactgtgagttaac

SEQ ID NO: 2304412 - DNA, 25 bp, Homo sapien
aacttcgatttgatattgctaaatc

SEQ ID NO: 2304413 - DNA, 25 bp, Homo sapien
ttaaaatcaatggtcctccaagttc

SEQ ID NO: 2304414 - DNA, 25 bp, Homo sapien
tcgatttgatattgctaaatcactg

SEQ ID NO: 2304415 - DNA, 25 bp, Homo sapien
tcaaggttctgaagacataagagga

SEQ ID NO: 2304416 - DNA, 25 bp, Homo sapien
tcaatagccactttgtgacaggaga

SEQ ID NO: 2304417 - DNA, 25 bp, Homo sapien
tgagttagaactaggatcacagagt

SEQ ID NO: 2304418 - DNA, 25 bp, Homo sapien
aaaataactccacatggcatgatgg

SEQ ID NO: 2304419 - DNA, 25 bp, Homo sapien
gacatccatcctggagttctatcca

SEQ ID NO: 2304420 - DNA, 25 bp, Homo sapien
gtggtccatgaatcatttgttgcca

SEQ ID NO: 2304421 - DNA, 25 bp, Homo sapien
gtctatagatgagtggtggtccatg

SEQ ID NO: 2304422 - DNA, 25 bp, Homo sapien
ctaatgtctggtctatagatgagtg

SEQ ID NO: 2304423 - DNA, 25 bp, Homo sapien
ggtccatgaatcatttgttgccaac

SEQ ID NO: 2304424 - DNA, 25 bp, Homo sapien
gttctgcaagcttaacaggaaccat

SEQ ID NO: 2304425 - DNA, 25 bp, Homo sapien
tgcaagcttaacaggaaccatgact

SEQ ID NO: 2304426 - DNA, 25 bp, Homo sapien
tctgcaagcttaacaggaaccatga

SEQ ID NO: 2304427 - DNA, 25 bp, Homo sapien
tacagtcatggtgaaaggcgaagga

SEQ ID NO: 2304428 - DNA, 25 bp, Homo sapien
tagggacctcataaacaccacattc

SEQ ID NO: 2304429 - DNA, 25 bp, Homo sapien
actaaaccaacaaacgcatgaataa

SEQ ID NO: 2304430 - DNA, 25 bp, Homo sapien
caaacgcatgaataatccccatgcc

SEQ ID NO: 2304431 - DNA, 25 bp, Homo sapien
ttattctgttgtagggacctcataa

SEQ ID NO: 2304432 - DNA, 25 bp, Homo sapien
atgtatagatgtttgttgaggcttt

SEQ ID NO: 2304433 - DNA, 25 bp, Homo sapien
gtaagtctgcaattatcctctgaat

SEQ ID NO: 2304434 - DNA, 25 bp, Homo sapien
tgaggctttcaagtctacgttgaca

SEQ ID NO: 2304435 - DNA, 25 bp, Homo sapien
ggcatcatttaacatgtaagtctgc

SEQ ID NO: 2304436 - DNA, 25 bp, Homo sapien
caagatgagctatattgctgcttac

SEQ ID NO: 2304437 - DNA, 25 bp, Homo sapien
cagtgtcccaaacctagaacaggat

SEQ ID NO: 2304438 - DNA, 25 bp, Homo sapien
taaaaatattagaactccagtgtcc

SEQ ID NO: 2304439 - DNA, 25 bp, Homo sapien
taacaataggacagatctgaaaggc

SEQ ID NO: 2304440 - DNA, 25 bp, Homo sapien
aaggctttgtcccagaatactatgc

SEQ ID NO: 2304441 - DNA, 25 bp, Homo sapien
tcttgtaccaactatctccaggaca

SEQ ID NO: 2304442 - DNA, 25 bp, Homo sapien
gatgatatagcatctcttgtaccaa

SEQ ID NO: 2304443 - DNA, 25 bp, Homo sapien
atccaaggctttgtcccagaatact

SEQ ID NO: 2304444 - DNA, 25 bp, Homo sapien
ttctgcacttcaagagctctccctg

SEQ ID NO: 2304445 - DNA, 25 bp, Homo sapien
tgcacttcaagagctctccctgcat

SEQ ID NO: 2304446 - DNA, 25 bp, Homo sapien
gctctccctgcatctagctgccctt

SEQ ID NO: 2304447 - DNA, 25 bp, Homo sapien
caagagctctccctgcatctagctg

SEQ ID NO: 2304448 - DNA, 25 bp, Homo sapien
gatttggcagatttgtaagaaggaa

SEQ ID NO: 2304449 - DNA, 25 bp, Homo sapien
taacacttctgggatgcttccatgc

SEQ ID NO: 2304450 - DNA, 25 bp, Homo sapien
tcattataggttgtttttcataaca

SEQ ID NO: 2304451 - DNA, 25 bp, Homo sapien
tctccataagtccagtgggccaggc

SEQ ID NO: 2304452 - DNA, 25 bp, Homo sapien
tttccacccaggagaatactgaaag

SEQ ID NO: 2304453 - DNA, 25 bp, Homo sapien
ttccacccaggagaatactgaaagt

SEQ ID NO: 2304454 - DNA, 25 bp, Homo sapien
atttccacccaggagaatactgaaa

SEQ ID NO: 2304455 - DNA, 25 bp, Homo sapien
gggaggtcagaagctgccaaacaag

SEQ ID NO: 2304456 - DNA, 25 bp, Homo sapien
gctgccaaacaagcagcacctgctg

SEQ ID NO: 2304457 - DNA, 25 bp, Homo sapien
tgaaaagagataggagaaagctgtg

SEQ ID NO: 2304458 - DNA, 25 bp, Homo sapien
caagcagcacctgctgatccagcag

SEQ ID NO: 2304459 - DNA, 25 bp, Homo sapien
caatagcttgcctttcattaagtgt

SEQ ID NO: 2304460 - DNA, 25 bp, Homo sapien
tctctctctccgtatggatatcaat

SEQ ID NO: 2304461 - DNA, 25 bp, Homo sapien
ttgctaccctaagatcaaaagatgt

SEQ ID NO: 2304462 - DNA, 25 bp, Homo sapien
gagtttatgtacacttgtggatcta

SEQ ID NO: 2304463 - DNA, 25 bp, Homo sapien
aagcttcagccgctcataatagttc

SEQ ID NO: 2304464 - DNA, 25 bp, Homo sapien
cttcagccgctcataatagttctta

SEQ ID NO: 2304465 - DNA, 25 bp, Homo sapien
gtgatgtaagcttcagccgctcata

SEQ ID NO: 2304466 - DNA, 25 bp, Homo sapien
gatgtaagcttcagccgctcataat

SEQ ID NO: 2304467 - DNA, 25 bp, Homo sapien
cagaacagtctcagaagtctcataa

SEQ ID NO: 2304468 - DNA, 25 bp, Homo sapien
actcctgggttagctcaaacttctg

SEQ ID NO: 2304469 - DNA, 25 bp, Homo sapien
ccaccccatagaaaactttgtgagc

SEQ ID NO: 2304470 - DNA, 25 bp, Homo sapien
acccactcctgggttagctcaaact

SEQ ID NO: 2304471 - DNA, 25 bp, Homo sapien
tctttcgcaagctgtggcctgttcc

SEQ ID NO: 2304472 - DNA, 25 bp, Homo sapien
ggaaggaagtaatgtcagccaagtc

SEQ ID NO: 2304473 - DNA, 25 bp, Homo sapien
catagtgagtcacactggcagaaca

SEQ ID NO: 2304474 - DNA, 25 bp, Homo sapien
tctctgttgaattgactcatgggct

SEQ ID NO: 2304475 - DNA, 25 bp, Homo sapien
accattaaattgtagtaatggtata

SEQ ID NO: 2304476 - DNA, 25 bp, Homo sapien
taccattaaattgtagtaatggtat

SEQ ID NO: 2304477 - DNA, 25 bp, Homo sapien
tgaagacctgctctaaattcttaaa

SEQ ID NO: 2304478 - DNA, 25 bp, Homo sapien
gacctgctctaaattcttaaaggag

SEQ ID NO: 2304479 - DNA, 25 bp, Homo sapien
cctgaagacctgctctaaattctta

SEQ ID NO: 2304480 - DNA, 25 bp, Homo sapien
aagacctgctctaaattcttaaagg

SEQ ID NO: 2304481 - DNA, 25 bp, Homo sapien
tctctgattggatgtcaatgtccgt

SEQ ID NO: 2304482 - DNA, 25 bp, Homo sapien
aatgtccgtgggcttttagagatcc

SEQ ID NO: 2304483 - DNA, 25 bp, Homo sapien
tttagagatccctggatgatggccc

SEQ ID NO: 2304484 - DNA, 25 bp, Homo sapien
ggatgatggccctgctcagtgacct

SEQ ID NO: 2304485 - DNA, 25 bp, Homo sapien
catacaaataggtccctgacttcaa

SEQ ID NO: 2304486 - DNA, 25 bp, Homo sapien
acaaataggtccctgacttcaaaat

SEQ ID NO: 2304487 - DNA, 25 bp, Homo sapien
cagatcatacaaataggtccctgac

SEQ ID NO: 2304488 - DNA, 25 bp, Homo sapien
agatcatacaaataggtccctgact

SEQ ID NO: 2304489 - DNA, 25 bp, Homo sapien
aaaagctaaaacagacagccaagca

SEQ ID NO: 2304490 - DNA, 25 bp, Homo sapien
taagacaatatgctgcttagagcaa

SEQ ID NO: 2304491 - DNA, 25 bp, Homo sapien
tttattagaggcaatgtgaatatct

SEQ ID NO: 2304492 - DNA, 25 bp, Homo sapien
agcaagaggtttactttgctccaag

SEQ ID NO: 2304493 - DNA, 25 bp, Homo sapien
ctcaatagggacatgtaggtacttc

SEQ ID NO: 2304494 - DNA, 25 bp, Homo sapien
tatatcttctagtggaaaagcacct

SEQ ID NO: 2304495 - DNA, 25 bp, Homo sapien
tttggacagacccatcaactttagg

SEQ ID NO: 2304496 - DNA, 25 bp, Homo sapien
ggttctaaatgcctgcctgataaca

SEQ ID NO: 2304497 - DNA, 25 bp, Homo sapien
ctgtgcttcctggtgaaaggcacct

SEQ ID NO: 2304498 - DNA, 25 bp, Homo sapien
ggtgaaaggcacctgccaagtcagt

SEQ ID NO: 2304499 - DNA, 25 bp, Homo sapien
cttcctggtgaaaggcacctgccaa

SEQ ID NO: 2304500 - DNA, 25 bp, Homo sapien
tgaaaggcacctgccaagtcagtgg

SEQ ID NO: 2304501 - DNA, 25 bp, Homo sapien
tgtaatcgttcactggcatgaagat

SEQ ID NO: 2304502 - DNA, 25 bp, Homo sapien
tgcattcttacacctaacaaataag

SEQ ID NO: 2304503 - DNA, 25 bp, Homo sapien
acaaataagagtgggattccaatgc

SEQ ID NO: 2304504 - DNA, 25 bp, Homo sapien
ttttggtagattgcaccaatgtttc

SEQ ID NO: 2304505 - DNA, 25 bp, Homo sapien
cacaaatcatgctcaaatgctggag

SEQ ID NO: 2304506 - DNA, 25 bp, Homo sapien
ccctgataagggtactaaagcagaa

SEQ ID NO: 2304507 - DNA, 25 bp, Homo sapien
gttggtgcccctttgacattatgag

SEQ ID NO: 2304508 - DNA, 25 bp, Homo sapien
tgagtcacagtcagtagaggatgct

SEQ ID NO: 2304509 - DNA, 25 bp, Homo sapien
actatcgcttcactgcctacgggca

SEQ ID NO: 2304510 - DNA, 25 bp, Homo sapien
tcgctgttgttgcagaagccctggt

SEQ ID NO: 2304511 - DNA, 25 bp, Homo sapien
tggagaagtgttccctcagagccac

SEQ ID NO: 2304512 - DNA, 25 bp, Homo sapien
cgaagtagtgatccccgagcgggtc

SEQ ID NO: 2304513 - DNA, 25 bp, Homo sapien
tggtccactggcaagcagaggtctg

SEQ ID NO: 2304514 - DNA, 25 bp, Homo sapien
ggtacagagagataggactactctt

SEQ ID NO: 2304515 - DNA, 25 bp, Homo sapien
gtccactggcaagcagaggtctgct

SEQ ID NO: 2304516 - DNA, 25 bp, Homo sapien
gaggtacagagagataggactactc

SEQ ID NO: 2304517 - DNA, 25 bp, Homo sapien
agtaggaaatcagctcatcagcagt

SEQ ID NO: 2304518 - DNA, 25 bp, Homo sapien
cccagtaggaaatcagctcatcagc

SEQ ID NO: 2304519 - DNA, 25 bp, Homo sapien
aaggttaaggatgcagcaaagggag

SEQ ID NO: 2304520 - DNA, 25 bp, Homo sapien
ggttaaggatgcagcaaagggaggt

SEQ ID NO: 2304521 - DNA, 25 bp, Homo sapien
ctttcagtttatccaagacccaggc

SEQ ID NO: 2304522 - DNA, 25 bp, Homo sapien
tttcagtttatccaagacccaggca

SEQ ID NO: 2304523 - DNA, 25 bp, Homo sapien
tcagtttatccaagacccaggcata

SEQ ID NO: 2304524 - DNA, 25 bp, Homo sapien
ttcagtttatccaagacccaggcat

SEQ ID NO: 2304525 - DNA, 25 bp, Homo sapien
tgacagtcgcgtagtacttgctggt

SEQ ID NO: 2304526 - DNA, 25 bp, Homo sapien
atgacagtcgcgtagtacttgctgg

SEQ ID NO: 2304527 - DNA, 25 bp, Homo sapien
aatgacagtcgcgtagtacttgctg

SEQ ID NO: 2304528 - DNA, 25 bp, Homo sapien
tcacacccagtatacaagccagaag

SEQ ID NO: 2304529 - DNA, 25 bp, Homo sapien
tgtttcacacccagtatacaagcca

SEQ ID NO: 2304530 - DNA, 25 bp, Homo sapien
cacacccagtatacaagccagaagg

SEQ ID NO: 2304531 - DNA, 25 bp, Homo sapien
cccagtatacaagccagaagggcat

SEQ ID NO: 2304532 - DNA, 25 bp, Homo sapien
gttgtcaccattcccaccagaaatt

SEQ ID NO: 2304533 - DNA, 25 bp, Homo sapien
cccaccagaaattggcacaaatgtt

SEQ ID NO: 2304534 - DNA, 25 bp, Homo sapien
gtcaccattcccaccagaaattggc

SEQ ID NO: 2304535 - DNA, 25 bp, Homo sapien
tcccaccagaaattggcacaaatgt

SEQ ID NO: 2304536 - DNA, 25 bp, Homo sapien
tggctccacaggcattgccatcctc

SEQ ID NO: 2304537 - DNA, 25 bp, Homo sapien
gcagcgtggctccacaggcattgcc

SEQ ID NO: 2304538 - DNA, 25 bp, Homo sapien
catcctcatgggtgattttccatcc

SEQ ID NO: 2304539 - DNA, 25 bp, Homo sapien
tgagttgatggtaggatgcattcca

SEQ ID NO: 2304540 - DNA, 25 bp, Homo sapien
cagccaacaggaacagtaccaatac

SEQ ID NO: 2304541 - DNA, 25 bp, Homo sapien
tcagccaacaggaacagtaccaata

SEQ ID NO: 2304542 - DNA, 25 bp, Homo sapien
ccgtttttgagaacaccagtctcca

SEQ ID NO: 2304543 - DNA, 25 bp, Homo sapien
aacagacttgacttcagttgtgaca

SEQ ID NO: 2304544 - DNA, 25 bp, Homo sapien
cttgacttcagttgtgacattgacc

SEQ ID NO: 2304545 - DNA, 25 bp, Homo sapien
tcaacagacttgacttcagttgtga

SEQ ID NO: 2304546 - DNA, 25 bp, Homo sapien
gacttcagttgtgacattgaccgga

SEQ ID NO: 2304547 - DNA, 25 bp, Homo sapien
aggataatcactgagcagtgaagcc

SEQ ID NO: 2304548 - DNA, 25 bp, Homo sapien
aatcactgagcagtgaagccagctg

SEQ ID NO: 2304549 - DNA, 25 bp, Homo sapien
tggatggttcaggataatcactgag

SEQ ID NO: 2304550 - DNA, 25 bp, Homo sapien
gatggttcaggataatcactgagca

SEQ ID NO: 2304551 - DNA, 25 bp, Homo sapien
gtggcaatccagtacgggagcacag

SEQ ID NO: 2304552 - DNA, 25 bp, Homo sapien
tggcaatccagtacgggagcacagc

SEQ ID NO: 2304553 - DNA, 25 bp, Homo sapien
gcaatccagtacgggagcacagcca

SEQ ID NO: 2304554 - DNA, 25 bp, Homo sapien
aatccagtacgggagcacagccagc

SEQ ID NO: 2304555 - DNA, 25 bp, Homo sapien
tcaagaaagtagggccatcttccag

SEQ ID NO: 2304556 - DNA, 25 bp, Homo sapien
aagtagggccatcttccagcttttt

SEQ ID NO: 2304557 - DNA, 25 bp, Homo sapien
cttcaagaaagtagggccatcttcc

SEQ ID NO: 2304558 - DNA, 25 bp, Homo sapien
gtagggccatcttccagctttttac

SEQ ID NO: 2304559 - DNA, 25 bp, Homo sapien
tcagaggtgggtagactgagaagct

SEQ ID NO: 2304560 - DNA, 25 bp, Homo sapien
tcacaaacagcaaagcgactcagag

SEQ ID NO: 2304561 - DNA, 25 bp, Homo sapien
tccattgcttcgatgacacccacag

SEQ ID NO: 2304562 - DNA, 25 bp, Homo sapien
gcaaagcgactcagaggtgggtaga

SEQ ID NO: 2304563 - DNA, 25 bp, Homo sapien
taatgttctaactgggtggccttcg

SEQ ID NO: 2304564 - DNA, 25 bp, Homo sapien
tctataaaatatcgcaaaggaatcg

SEQ ID NO: 2304565 - DNA, 25 bp, Homo sapien
ttcacatttaggaggcaatagcaaa

SEQ ID NO: 2304566 - DNA, 25 bp, Homo sapien
cagtatctatgcagtaacagtccaa

SEQ ID NO: 2304567 - DNA, 25 bp, Homo sapien
gcagtatggagcattatatatcagt

SEQ ID NO: 2304568 - DNA, 25 bp, Homo sapien
tgtggttactgatagaatcaagaca

SEQ ID NO: 2304569 - DNA, 25 bp, Homo sapien
gacaaataataggattatctccaca

SEQ ID NO: 2304570 - DNA, 25 bp, Homo sapien
cattcttagattctagctctgacac

SEQ ID NO: 2304571 - DNA, 25 bp, Homo sapien
ctttgtttcagaggatgctaaaggc

SEQ ID NO: 2304572 - DNA, 25 bp, Homo sapien
taccctttgtttcagaggatgctaa

SEQ ID NO: 2304573 - DNA, 25 bp, Homo sapien
ctgatttaccctttgtttcagagga

SEQ ID NO: 2304574 - DNA, 25 bp, Homo sapien
ccctttgtttcagaggatgctaaag

SEQ ID NO: 2304575 - DNA, 25 bp, Homo sapien
gagagagttccaaattcgaatctgg

SEQ ID NO: 2304576 - DNA, 25 bp, Homo sapien
tgtctatgctaagtcttgtctaggg

SEQ ID NO: 2304577 - DNA, 25 bp, Homo sapien
gggcaatgggagaaatagtttctta

SEQ ID NO: 2304578 - DNA, 25 bp, Homo sapien
caaattcgaatctggcactgatgac

SEQ ID NO: 2304579 - DNA, 25 bp, Homo sapien
taaaattgtttcttacaccagaaga

SEQ ID NO: 2304580 - DNA, 25 bp, Homo sapien
aaattgtttcttacaccagaagact

SEQ ID NO: 2304581 - DNA, 25 bp, Homo sapien
tgtgtccatatttaactctttgatc

SEQ ID NO: 2304582 - DNA, 25 bp, Homo sapien
gagccctcagagtggttcttgatct

SEQ ID NO: 2304583 - DNA, 25 bp, Homo sapien
ttaactctttgatctggacattgtc

SEQ ID NO: 2304584 - DNA, 25 bp, Homo sapien
gagttcactagtttctacttctgag

SEQ ID NO: 2304585 - DNA, 25 bp, Homo sapien
aaagccagttatttgtgctgaggca

SEQ ID NO: 2304586 - DNA, 25 bp, Homo sapien
ttgatagtactctcaatataacctc

SEQ ID NO: 2304587 - DNA, 25 bp, Homo sapien
tgatagtactctcaatataacctct

SEQ ID NO: 2304588 - DNA, 25 bp, Homo sapien
tttgatagtactctcaatataacct

SEQ ID NO: 2304589 - DNA, 25 bp, Homo sapien
catgctcgtggttgttggcagactt

SEQ ID NO: 2304590 - DNA, 25 bp, Homo sapien
cagcttagctgagtggctctggatc

SEQ ID NO: 2304591 - DNA, 25 bp, Homo sapien
agtcacacaattggcccggatgtgt

SEQ ID NO: 2304592 - DNA, 25 bp, Homo sapien
ggcccggatgtgtagtctctgaaga

SEQ ID NO: 2304593 - DNA, 25 bp, Homo sapien
ctgaagccggcgacagaagaaccag

SEQ ID NO: 2304594 - DNA, 25 bp, Homo sapien
tgaagccggcgacagaagaaccagc

SEQ ID NO: 2304595 - DNA, 25 bp, Homo sapien
ctgctgaagccggcgacagaagaac

SEQ ID NO: 2304596 - DNA, 25 bp, Homo sapien
gctgaagccggcgacagaagaacca

SEQ ID NO: 2304597 - DNA, 25 bp, Homo sapien
aaagagatttccgttccgcagccga

SEQ ID NO: 2304598 - DNA, 25 bp, Homo sapien
tgagaaacttgaggtccgactgcgc

SEQ ID NO: 2304599 - DNA, 25 bp, Homo sapien
aattacaatcgtgtggaggctcagc

SEQ ID NO: 2304600 - DNA, 25 bp, Homo sapien
gagtaagctctgtcaaaggaaccca

SEQ ID NO: 2304601 - DNA, 25 bp, Homo sapien
tactttgtgctagatactgctccag

SEQ ID NO: 2304602 - DNA, 25 bp, Homo sapien
tctactttgtgctagatactgctcc

SEQ ID NO: 2304603 - DNA, 25 bp, Homo sapien
actttgtgctagatactgctccagg

SEQ ID NO: 2304604 - DNA, 25 bp, Homo sapien
ctttgtgctagatactgctccaggc

SEQ ID NO: 2304605 - DNA, 25 bp, Homo sapien
gaacaggatatgttgcttacaaata

SEQ ID NO: 2304606 - DNA, 25 bp, Homo sapien
gtaaataccttcatgactgtttcct

SEQ ID NO: 2304607 - DNA, 25 bp, Homo sapien
ttagtacacttaggattaacacagg

SEQ ID NO: 2304608 - DNA, 25 bp, Homo sapien
taccactaactctcatagtaaagaa

SEQ ID NO: 2304609 - DNA, 25 bp, Homo sapien
gaccatccacatcgattttcgagga

SEQ ID NO: 2304610 - DNA, 25 bp, Homo sapien
gaagagtacctataattaacagcag

SEQ ID NO: 2304611 - DNA, 25 bp, Homo sapien
ttacgagtatgatcctaaagcacaa

SEQ ID NO: 2304612 - DNA, 25 bp, Homo sapien
ttgatggctgcccaaactgttgtac

SEQ ID NO: 2304613 - DNA, 25 bp, Homo sapien
tagtccaacattgaggcagcgcaca

SEQ ID NO: 2304614 - DNA, 25 bp, Homo sapien
aatctgacagcttcctaattagtcc

SEQ ID NO: 2304615 - DNA, 25 bp, Homo sapien
gattgtatctatcatcaccagatgg

SEQ ID NO: 2304616 - DNA, 25 bp, Homo sapien
tgaggcagcgcacatatgttgatgg

SEQ ID NO: 2304617 - DNA, 25 bp, Homo sapien
tggcttgccaaacagggaaccacag

SEQ ID NO: 2304618 - DNA, 25 bp, Homo sapien
gaggttacctactaccaatgtctcc

SEQ ID NO: 2304619 - DNA, 25 bp, Homo sapien
gccacattagacagtacttatacca

SEQ ID NO: 2304620 - DNA, 25 bp, Homo sapien
tattagccctattgacatatgggac

SEQ ID NO: 2304621 - DNA, 25 bp, Homo sapien
tttctgtcacaggaatgagtcttgg

SEQ ID NO: 2304622 - DNA, 25 bp, Homo sapien
tgctcacatgcacgagaacaaccac

SEQ ID NO: 2304623 - DNA, 25 bp, Homo sapien
gaatcagttactcattggtggttgc

SEQ ID NO: 2304624 - DNA, 25 bp, Homo sapien
cagtgatgagccttgcatgaatcag

SEQ ID NO: 2304625 - DNA, 25 bp, Homo sapien
ctttcccattgtatcacatccaggg

SEQ ID NO: 2304626 - DNA, 25 bp, Homo sapien
catatctgggctcttgtgcattctc

SEQ ID NO: 2304627 - DNA, 25 bp, Homo sapien
tgtgtgttttagaatacgggccaga

SEQ ID NO: 2304628 - DNA, 25 bp, Homo sapien
tatagaatgggtctaacagcctaga

SEQ ID NO: 2304629 - DNA, 25 bp, Homo sapien
cagtaattcagaagtgggacttttt

SEQ ID NO: 2304630 - DNA, 25 bp, Homo sapien
gactcgcaggagcaaaaaattcatt

SEQ ID NO: 2304631 - DNA, 25 bp, Homo sapien
gtggtgccccagtcaaacagtaatt

SEQ ID NO: 2304632 - DNA, 25 bp, Homo sapien
tcaaaagatccacaagatcaccaac

SEQ ID NO: 2304633 - DNA, 25 bp, Homo sapien
caggtggcatatagctttgttcaag

SEQ ID NO: 2304634 - DNA, 25 bp, Homo sapien
tgtattagcagttttgggaacagca

SEQ ID NO: 2304635 - DNA, 25 bp, Homo sapien
gaactgttatagcttctttagaagg

SEQ ID NO: 2304636 - DNA, 25 bp, Homo sapien
gttcaagattctgcacaggtgtcat

SEQ ID NO: 2304637 - DNA, 25 bp, Homo sapien
agaaatgggtcgttcatcaaagtta

SEQ ID NO: 2304638 - DNA, 25 bp, Homo sapien
cagaaatgggtcgttcatcaaagtt

SEQ ID NO: 2304639 - DNA, 25 bp, Homo sapien
gaaatgggtcgttcatcaaagttat

SEQ ID NO: 2304640 - DNA, 25 bp, Homo sapien
ttatatacaactccaaatcctccct

SEQ ID NO: 2304641 - DNA, 25 bp, Homo sapien
tttatatacaactccaaatcctccc

SEQ ID NO: 2304642 - DNA, 25 bp, Homo sapien
acagttgtgttatttacgtagcctt

SEQ ID NO: 2304643 - DNA, 25 bp, Homo sapien
gttatttacgtagcctttatataca

SEQ ID NO: 2304644 - DNA, 25 bp, Homo sapien
ggtaaacacctcagtagaaatggca

SEQ ID NO: 2304645 - DNA, 25 bp, Homo sapien
caactttagtttgtgaatctcccaa

SEQ ID NO: 2304646 - DNA, 25 bp, Homo sapien
cctattatagggcacactatgaagc

SEQ ID NO: 2304647 - DNA, 25 bp, Homo sapien
tcttgtgtacatggacataaccaca

SEQ ID NO: 2304648 - DNA, 25 bp, Homo sapien
tgctgtttcagttcttcagtagtaa

SEQ ID NO: 2304649 - DNA, 25 bp, Homo sapien
tatttcttgatcaaactgctgtttc

SEQ ID NO: 2304650 - DNA, 25 bp, Homo sapien
ctgtttcagttcttcagtagtaatg

SEQ ID NO: 2304651 - DNA, 25 bp, Homo sapien
aactgctgtttcagttcttcagtag

SEQ ID NO: 2304652 - DNA, 25 bp, Homo sapien
tagttcatggcatactctagagtga

SEQ ID NO: 2304653 - DNA, 25 bp, Homo sapien
agtgaaccaggttctttactccttg

SEQ ID NO: 2304654 - DNA, 25 bp, Homo sapien
aaacatcactagttcatggcatact

SEQ ID NO: 2304655 - DNA, 25 bp, Homo sapien
caccgcactgccagattaagactta

SEQ ID NO: 2304656 - DNA, 25 bp, Homo sapien
gagtatatgtaatcatagaattatg

SEQ ID NO: 2304657 - DNA, 25 bp, Homo sapien
tgagtatatgtaatcatagaattat

SEQ ID NO: 2304658 - DNA, 25 bp, Homo sapien
atgagtatatgtaatcatagaatta

SEQ ID NO: 2304659 - DNA, 25 bp, Homo sapien
tgaaatttcacgtaactttgttgtg

SEQ ID NO: 2304660 - DNA, 25 bp, Homo sapien
atctctcatgaattctggaagtgga

SEQ ID NO: 2304661 - DNA, 25 bp, Homo sapien
gaaatttcacgtaactttgttgtga

SEQ ID NO: 2304662 - DNA, 25 bp, Homo sapien
tctcatgaattctggaagtggaaaa

SEQ ID NO: 2304663 - DNA, 25 bp, Homo sapien
caatctaataaagtggcagcatctg

SEQ ID NO: 2304664 - DNA, 25 bp, Homo sapien
ggttaaggactaggctgatgctcac

SEQ ID NO: 2304665 - DNA, 25 bp, Homo sapien
tgatgctcactttctttagcccaat

SEQ ID NO: 2304666 - DNA, 25 bp, Homo sapien
actacagctggccaaacctctttct

SEQ ID NO: 2304667 - DNA, 25 bp, Homo sapien
catctccatcacttgagaaaccaag

SEQ ID NO: 2304668 - DNA, 25 bp, Homo sapien
caagagagtctgtctagcaatgaac

SEQ ID NO: 2304669 - DNA, 25 bp, Homo sapien
gaaccattaggcatgtaaacatata

SEQ ID NO: 2304670 - DNA, 25 bp, Homo sapien
catatactaagcagaggtcatctcc

SEQ ID NO: 2304671 - DNA, 25 bp, Homo sapien
tgcatctcatgtgccaagaaagtgg

SEQ ID NO: 2304672 - DNA, 25 bp, Homo sapien
gcaatcttgcatctcatgtgccaag

SEQ ID NO: 2304673 - DNA, 25 bp, Homo sapien
ctgagcaatcttgcatctcatgtgc

SEQ ID NO: 2304674 - DNA, 25 bp, Homo sapien
tctcatgtgccaagaaagtggtgga

SEQ ID NO: 2304675 - DNA, 25 bp, Homo sapien
gaaaattgatgccattagctgcacc

SEQ ID NO: 2304676 - DNA, 25 bp, Homo sapien
catgtagaaaattgatgccattagc

SEQ ID NO: 2304677 - DNA, 25 bp, Homo sapien
tttcatgtagaaaattgatgccatt

SEQ ID NO: 2304678 - DNA, 25 bp, Homo sapien
atctctatgaatatgatgattttca

SEQ ID NO: 2304679 - DNA, 25 bp, Homo sapien
ggaactgtaggcatgcaataccacg

SEQ ID NO: 2304680 - DNA, 25 bp, Homo sapien
aattgtgtctacttatttcctgccc

SEQ ID NO: 2304681 - DNA, 25 bp, Homo sapien
tcagctgccctagtgtctggaactg

SEQ ID NO: 2304682 - DNA, 25 bp, Homo sapien
ttgttcagggaacatagtcaggtct

SEQ ID NO: 2304683 - DNA, 25 bp, Homo sapien
ggtgccatataagctgttgttccca

SEQ ID NO: 2304684 - DNA, 25 bp, Homo sapien
tgggtgttatttctccacgcaaagc

SEQ ID NO: 2304685 - DNA, 25 bp, Homo sapien
gtcatgactgtctgggcaaacttct

SEQ ID NO: 2304686 - DNA, 25 bp, Homo sapien
aacttctcagaagcccgtgcaaggc

SEQ ID NO: 2304687 - DNA, 25 bp, Homo sapien
gaagtccagttattatttctagtaa

SEQ ID NO: 2304688 - DNA, 25 bp, Homo sapien
gctggaagtccagttattatttcta

SEQ ID NO: 2304689 - DNA, 25 bp, Homo sapien
cggtgttcatccacagctggaagtc

SEQ ID NO: 2304690 - DNA, 25 bp, Homo sapien
caataactgaggttcacggtgttca

SEQ ID NO: 2304691 - DNA, 25 bp, Homo sapien
caatataatcttcaattgtcttttc

SEQ ID NO: 2304692 - DNA, 25 bp, Homo sapien
cagagtacatagcttcaactgaagt

SEQ ID NO: 2304693 - DNA, 25 bp, Homo sapien
gcaacagagtacatagcttcaactg

SEQ ID NO: 2304694 - DNA, 25 bp, Homo sapien
acatagcttcaactgaagtggaatc

SEQ ID NO: 2304695 - DNA, 25 bp, Homo sapien
ttaagaagctgtcatctcttgcagc

SEQ ID NO: 2304696 - DNA, 25 bp, Homo sapien
tgtcatctcttgcagcagctgttga

SEQ ID NO: 2304697 - DNA, 25 bp, Homo sapien
tcatctcttgcagcagctgttgaac

SEQ ID NO: 2304698 - DNA, 25 bp, Homo sapien
aagaagctgtcatctcttgcagcag

SEQ ID NO: 2304699 - DNA, 25 bp, Homo sapien
aaaaatggttgagataggtgtatat

SEQ ID NO: 2304700 - DNA, 25 bp, Homo sapien
tcaacccatgctttaataaccactg

SEQ ID NO: 2304701 - DNA, 25 bp, Homo sapien
tatattttggaagttcaacccatgc

SEQ ID NO: 2304702 - DNA, 25 bp, Homo sapien
tgtcctgcaacagcctatgccttgt

SEQ ID NO: 2304703 - DNA, 25 bp, Homo sapien
ggagatttctcagggattactgtaa

SEQ ID NO: 2304704 - DNA, 25 bp, Homo sapien
tagtggctcacagcagctaagtgta

SEQ ID NO: 2304705 - DNA, 25 bp, Homo sapien
gatcagagtgtttccaccctacata

SEQ ID NO: 2304706 - DNA, 25 bp, Homo sapien
acagcaaattagtagtggagtcagc

SEQ ID NO: 2304707 - DNA, 25 bp, Homo sapien
tcaaggcttacaaggagaattcttc

SEQ ID NO: 2304708 - DNA, 25 bp, Homo sapien
gctgacaactggaaggtaggtctca

SEQ ID NO: 2304709 - DNA, 25 bp, Homo sapien
ggtcaggccctttcaacagtctcaa

SEQ ID NO: 2304710 - DNA, 25 bp, Homo sapien
ccaggctgtggttatcatctgaagc

SEQ ID NO: 2304711 - DNA, 25 bp, Homo sapien
agtacgtacactataagcctcccgc

SEQ ID NO: 2304712 - DNA, 25 bp, Homo sapien
tccctcatggttgaagttgagtgcc

SEQ ID NO: 2304713 - DNA, 25 bp, Homo sapien
catacccctcaaatgtgggcaaaac

SEQ ID NO: 2304714 - DNA, 25 bp, Homo sapien
tccaagctcagagtgcaagctgctg

SEQ ID NO: 2304715 - DNA, 25 bp, Homo sapien
gagcagactcttttaagccaccaga

SEQ ID NO: 2304716 - DNA, 25 bp, Homo sapien
aaggtaagttcctgccgcctatgag

SEQ ID NO: 2304717 - DNA, 25 bp, Homo sapien
gaaggttacaatcacaatggaaggc

SEQ ID NO: 2304718 - DNA, 25 bp, Homo sapien
ttctgcaggccatactagcacggca

SEQ ID NO: 2304719 - DNA, 25 bp, Homo sapien
cgtgttagtggtaaagatcgcaaac

SEQ ID NO: 2304720 - DNA, 25 bp, Homo sapien
caaagccatattgcaaaaggcatca

SEQ ID NO: 2304721 - DNA, 25 bp, Homo sapien
tctaaaactcagcacaatgtttggc

SEQ ID NO: 2304722 - DNA, 25 bp, Homo sapien
gatcgcaaactgataccagatgcta

SEQ ID NO: 2304723 - DNA, 25 bp, Homo sapien
cacacaaaatggcagtactgaccca

SEQ ID NO: 2304724 - DNA, 25 bp, Homo sapien
ggaaaactcactagcactggcaaaa

SEQ ID NO: 2304725 - DNA, 25 bp, Homo sapien
cctgcgaaagccatgggttctacca

SEQ ID NO: 2304726 - DNA, 25 bp, Homo sapien
gcaaaatctcttgccctgcgaaagc

SEQ ID NO: 2304727 - DNA, 25 bp, Homo sapien
gggtgtacacgtagacagacacaca

SEQ ID NO: 2304728 - DNA, 25 bp, Homo sapien
tataagttgttccatgggtgtacac

SEQ ID NO: 2304729 - DNA, 25 bp, Homo sapien
caggaagactacctgtcatgaaggt

SEQ ID NO: 2304730 - DNA, 25 bp, Homo sapien
ggcagtatcatacctagatggtgaa

SEQ ID NO: 2304731 - DNA, 25 bp, Homo sapien
gaatatgttaaggaccaggctagag

SEQ ID NO: 2304732 - DNA, 25 bp, Homo sapien
gcagcatgcacacaagcaaagtttt

SEQ ID NO: 2304733 - DNA, 25 bp, Homo sapien
gccgcaagttgcttactccgagtag

SEQ ID NO: 2304734 - DNA, 25 bp, Homo sapien
aacttactactttcttgtgggacag

SEQ ID NO: 2304735 - DNA, 25 bp, Homo sapien
tgctgtcacaatcttcccctgcccc

SEQ ID NO: 2304736 - DNA, 25 bp, Homo sapien
agatgtatcattacatggatataaa

SEQ ID NO: 2304737 - DNA, 25 bp, Homo sapien
gctgtcacaatcttcccctgcccca

SEQ ID NO: 2304738 - DNA, 25 bp, Homo sapien
ctgtcacaatcttcccctgccccac

SEQ ID NO: 2304739 - DNA, 25 bp, Homo sapien
atttggaggtggccacattaaagat

SEQ ID NO: 2304740 - DNA, 25 bp, Homo sapien
aatttggaggtggccacattaaaga

SEQ ID NO: 2304741 - DNA, 25 bp, Homo sapien
atgttgtatgcagcaacaagagcaa

SEQ ID NO: 2304742 - DNA, 25 bp, Homo sapien
gttgtatgcagcaacaagagcaact

SEQ ID NO: 2304743 - DNA, 25 bp, Homo sapien
tcctgggataaggattatgattcct

SEQ ID NO: 2304744 - DNA, 25 bp, Homo sapien
tgttggaggacaaacaaccatgcta

SEQ ID NO: 2304745 - DNA, 25 bp, Homo sapien
caacttgtgattggatcatatagtc

SEQ ID NO: 2304746 - DNA, 25 bp, Homo sapien
gattctcagaatgcccagggatatg

SEQ ID NO: 2304747 - DNA, 25 bp, Homo sapien
aattatgtgactatcagggaaacag

SEQ ID NO: 2304748 - DNA, 25 bp, Homo sapien
tattttgtgcaggtccctatgggcc

SEQ ID NO: 2304749 - DNA, 25 bp, Homo sapien
ctatgggcccctaatttcattctga

SEQ ID NO: 2304750 - DNA, 25 bp, Homo sapien
tatgaagcaagttcaaatcttacgg

SEQ ID NO: 2304751 - DNA, 25 bp, Homo sapien
cttctgaaaatatctattgaaaatg

SEQ ID NO: 2304752 - DNA, 25 bp, Homo sapien
cagacttctgaaaatatctattgaa

SEQ ID NO: 2304753 - DNA, 25 bp, Homo sapien
tacagacttctgaaaatatctattg

SEQ ID NO: 2304754 - DNA, 25 bp, Homo sapien
gacttctgaaaatatctattgaaaa

SEQ ID NO: 2304755 - DNA, 25 bp, Homo sapien
tgccgtcacgttgcagattgatccg

SEQ ID NO: 2304756 - DNA, 25 bp, Homo sapien
ccttttggtcacgtagggaagagct

SEQ ID NO: 2304757 - DNA, 25 bp, Homo sapien
aaattggctttcgaggcggcctggt

SEQ ID NO: 2304758 - DNA, 25 bp, Homo sapien
ttcagtacgctgtcgagaaccaggc

SEQ ID NO: 2304759 - DNA, 25 bp, Homo sapien
ggggccggcggaggagcagccactt

SEQ ID NO: 2304760 - DNA, 25 bp, Homo sapien
cgccggggccggcggaggagcagcc

SEQ ID NO: 2304761 - DNA, 25 bp, Homo sapien
agccacttcctggggccgccggccg

SEQ ID NO: 2304762 - DNA, 25 bp, Homo sapien
cagccacttcctggggccgccggcc

SEQ ID NO: 2304763 - DNA, 25 bp, Homo sapien
cccgccgcaaagtccgcggccgcgg

SEQ ID NO: 2304764 - DNA, 25 bp, Homo sapien
gccgggcaacgcgagcgcaagggca

SEQ ID NO: 2304765 - DNA, 25 bp, Homo sapien
gcgccgcgcaggtgaccgcgatcat

SEQ ID NO: 2304766 - DNA, 25 bp, Homo sapien
gcgctcccgccgcaaagtccgcggc

SEQ ID NO: 2304767 - DNA, 25 bp, Homo sapien
ggcgccctccgcgccggtgcttcac

SEQ ID NO: 2304768 - DNA, 25 bp, Homo sapien
tataaataccggctcggcccacacc

SEQ ID NO: 2304769 - DNA, 25 bp, Homo sapien
ctataaataccggctcggcccacac

SEQ ID NO: 2304770 - DNA, 25 bp, Homo sapien
cggcgagacgggccggcggcgtcgc

SEQ ID NO: 2304771 - DNA, 25 bp, Homo sapien
ggcgagacgggccggcggcgtcgct

SEQ ID NO: 2304772 - DNA, 25 bp, Homo sapien
gggcgactgcacacgggattcgcgg

SEQ ID NO: 2304773 - DNA, 25 bp, Homo sapien
tgcacacgggattcgcggtcgagca

SEQ ID NO: 2304774 - DNA, 25 bp, Homo sapien
attcgcggtcgagcacagccctcgg

SEQ ID NO: 2304775 - DNA, 25 bp, Homo sapien
acgggattcgcggtcgagcacagcc

SEQ ID NO: 2304776 - DNA, 25 bp, Homo sapien
actcgcgggcagtgacgaggtggca

SEQ ID NO: 2304777 - DNA, 25 bp, Homo sapien
gagcagaggcgccggagaattcggg

SEQ ID NO: 2304778 - DNA, 25 bp, Homo sapien
ggggttccgcggctgcttccgcact

SEQ ID NO: 2304779 - DNA, 25 bp, Homo sapien
ggctggaccgaacggctggggaggc

SEQ ID NO: 2304780 - DNA, 25 bp, Homo sapien
ttcagaactcccagttcgtagttta

SEQ ID NO: 2304781 - DNA, 25 bp, Homo sapien
cttcagaactcccagttcgtagttt

SEQ ID NO: 2304782 - DNA, 25 bp, Homo sapien
tcagaactcccagttcgtagtttac

SEQ ID NO: 2304783 - DNA, 25 bp, Homo sapien
tgggtcctccgcaaatattaagaag

SEQ ID NO: 2304784 - DNA, 25 bp, Homo sapien
taagccacaatcatgcgagaccagg

SEQ ID NO: 2304785 - DNA, 25 bp, Homo sapien
ggaacagaaatttgccagctattag

SEQ ID NO: 2304786 - DNA, 25 bp, Homo sapien
tggcaagtagccatagaagcacctt

SEQ ID NO: 2304787 - DNA, 25 bp, Homo sapien
ttagtgatattacatttcatgggtc

SEQ ID NO: 2304788 - DNA, 25 bp, Homo sapien
acatttcatgggtcatggtacttac

SEQ ID NO: 2304789 - DNA, 25 bp, Homo sapien
ttacatttcatgggtcatggtactt

SEQ ID NO: 2304790 - DNA, 25 bp, Homo sapien
tgatattacatttcatgggtcatgg

SEQ ID NO: 2304791 - DNA, 25 bp, Homo sapien
tattttaatcccactcacgcttgag

SEQ ID NO: 2304792 - DNA, 25 bp, Homo sapien
gttgtggaggtttcacatcgcctca

SEQ ID NO: 2304793 - DNA, 25 bp, Homo sapien
actcaatttaggtcccacatgggca

SEQ ID NO: 2304794 - DNA, 25 bp, Homo sapien
taccccatgacctgaaatctataag

SEQ ID NO: 2304795 - DNA, 25 bp, Homo sapien
tttttatgcagctggctatcttggg

SEQ ID NO: 2304796 - DNA, 25 bp, Homo sapien
taatttattcgcaaaacctgaccaa

SEQ ID NO: 2304797 - DNA, 25 bp, Homo sapien
tatcatagtcaagtacaggtccaca

SEQ ID NO: 2304798 - DNA, 25 bp, Homo sapien
cacagttccgagatccaaaagactc

SEQ ID NO: 2304799 - DNA, 25 bp, Homo sapien
gctacaaagttcagtagctccaaca

SEQ ID NO: 2304800 - DNA, 25 bp, Homo sapien
tgaaaagggctacaaagttcagtag

SEQ ID NO: 2304801 - DNA, 25 bp, Homo sapien
ggaacacaaagtaataagatcagct

SEQ ID NO: 2304802 - DNA, 25 bp, Homo sapien
ggagagagaacataacaggaacaca

SEQ ID NO: 2304803 - DNA, 25 bp, Homo sapien
catgaagctcattgccctttagcgc

SEQ ID NO: 2304804 - DNA, 25 bp, Homo sapien
cgctaatggatgtgcaactgactgc

SEQ ID NO: 2304805 - DNA, 25 bp, Homo sapien
gacgattctatcacactgaaagctg

SEQ ID NO: 2304806 - DNA, 25 bp, Homo sapien
aagtccttgaggtatccttttacag

SEQ ID NO: 2304807 - DNA, 25 bp, Homo sapien
aagcatcttccttcacttctatgtc

SEQ ID NO: 2304808 - DNA, 25 bp, Homo sapien
ctaaaaagcatcttccttcacttct

SEQ ID NO: 2304809 - DNA, 25 bp, Homo sapien
aaaagcatcttccttcacttctatg

SEQ ID NO: 2304810 - DNA, 25 bp, Homo sapien
taaaaagcatcttccttcacttcta

SEQ ID NO: 2304811 - DNA, 25 bp, Homo sapien
cactgtgacagtgttccgaagaaga

SEQ ID NO: 2304812 - DNA, 25 bp, Homo sapien
gatgaattgcaggaatgaccgacca

SEQ ID NO: 2304813 - DNA, 25 bp, Homo sapien
cattgaggatcagttaagggcccta

SEQ ID NO: 2304814 - DNA, 25 bp, Homo sapien
gactcaagcagacagcgaagcaact

SEQ ID NO: 2304815 - DNA, 25 bp, Homo sapien
ggcctcccttgttcgtgataagaaa

SEQ ID NO: 2304816 - DNA, 25 bp, Homo sapien
gaacactgttataaagtctttgcta

SEQ ID NO: 2304817 - DNA, 25 bp, Homo sapien
cccctatgtgaaatgtgaccttagt

SEQ ID NO: 2304818 - DNA, 25 bp, Homo sapien
tctggatcatctaagtgctgtttct

SEQ ID NO: 2304819 - DNA, 25 bp, Homo sapien
tatttttagaatagtattcgtgctc

SEQ ID NO: 2304820 - DNA, 25 bp, Homo sapien
atagtattcgtgctcataatgatgg

SEQ ID NO: 2304821 - DNA, 25 bp, Homo sapien
caagccaatctttgattactacagg

SEQ ID NO: 2304822 - DNA, 25 bp, Homo sapien
gattactacaggatataagccaaaa

SEQ ID NO: 2304823 - DNA, 25 bp, Homo sapien
ctggccgaacagtcaaaatgccttc

SEQ ID NO: 2304824 - DNA, 25 bp, Homo sapien
aatacctgctatgtcactgagttcc

SEQ ID NO: 2304825 - DNA, 25 bp, Homo sapien
cactggccgaacagtcaaaatgcct

SEQ ID NO: 2304826 - DNA, 25 bp, Homo sapien
ttatttcttaatacctgctatgtca

SEQ ID NO: 2304827 - DNA, 25 bp, Homo sapien
aataagtacaacttctgctgaactt

SEQ ID NO: 2304828 - DNA, 25 bp, Homo sapien
ccttggcagtgagatgcatcagagc

SEQ ID NO: 2304829 - DNA, 25 bp, Homo sapien
gaactttctgccgtcataagtgtaa

SEQ ID NO: 2304830 - DNA, 25 bp, Homo sapien
agggtgctggcggtcttctgcagca

SEQ ID NO: 2304831 - DNA, 25 bp, Homo sapien
ctttgggtgatactaccatggtctg

SEQ ID NO: 2304832 - DNA, 25 bp, Homo sapien
cactgaatctaggactggctcctct

SEQ ID NO: 2304833 - DNA, 25 bp, Homo sapien
catggtctgtctggttccaataccc

SEQ ID NO: 2304834 - DNA, 25 bp, Homo sapien
aaacattaatagtcacctttgggtg

SEQ ID NO: 2304835 - DNA, 25 bp, Homo sapien
gaagggtgatcatcttctggtcccc

SEQ ID NO: 2304836 - DNA, 25 bp, Homo sapien
tcaagctgcagatcaaagagcccag

SEQ ID NO: 2304837 - DNA, 25 bp, Homo sapien
cccactgagtgcctagaaaatgcag

SEQ ID NO: 2304838 - DNA, 25 bp, Homo sapien
ttcatgtgatctaagcaaaagctac

SEQ ID NO: 2304839 - DNA, 25 bp, Homo sapien
tttgtctgttttgatcttttttggc

SEQ ID NO: 2304840 - DNA, 25 bp, Homo sapien
tctgttttgatcttttttggcttaa

SEQ ID NO: 2304841 - DNA, 25 bp, Homo sapien
tgatcttttttggcttaaagcctgt

SEQ ID NO: 2304842 - DNA, 25 bp, Homo sapien
ttgatcttttttggcttaaagcctg

SEQ ID NO: 2304843 - DNA, 25 bp, Homo sapien
actctgcccagccatagtactatta

SEQ ID NO: 2304844 - DNA, 25 bp, Homo sapien
gcatgtaactcatcacatctaaaac

SEQ ID NO: 2304845 - DNA, 25 bp, Homo sapien
catagggaggccgtaaataaatggt

SEQ ID NO: 2304846 - DNA, 25 bp, Homo sapien
atcaataaatcagatttgatctctg

SEQ ID NO: 2304847 - DNA, 25 bp, Homo sapien
aagatgaccataacaacctgagggc

SEQ ID NO: 2304848 - DNA, 25 bp, Homo sapien
gatgaccataacaacctgagggctg

SEQ ID NO: 2304849 - DNA, 25 bp, Homo sapien
gaccataacaacctgagggctgctt

SEQ ID NO: 2304850 - DNA, 25 bp, Homo sapien
cataacaacctgagggctgcttctt

SEQ ID NO: 2304851 - DNA, 25 bp, Homo sapien
ccattactgaagtggcagtaggaga

SEQ ID NO: 2304852 - DNA, 25 bp, Homo sapien
gctaaaggagtcttttcagtaactg

SEQ ID NO: 2304853 - DNA, 25 bp, Homo sapien
tttcagtaactgtagccctggaact

SEQ ID NO: 2304854 - DNA, 25 bp, Homo sapien
ccaaagtggtagaagaccattactg

SEQ ID NO: 2304855 - DNA, 25 bp, Homo sapien
gtgcacaatgacctgagtagatccc

SEQ ID NO: 2304856 - DNA, 25 bp, Homo sapien
tgcacaatgacctgagtagatccca

SEQ ID NO: 2304857 - DNA, 25 bp, Homo sapien
gaagaacattgtcatccacgaccca

SEQ ID NO: 2304858 - DNA, 25 bp, Homo sapien
gaagaatcgtgttgtatatgtgaga

SEQ ID NO: 2304859 - DNA, 25 bp, Homo sapien
tgttcccatccattagaagaatcgt

SEQ ID NO: 2304860 - DNA, 25 bp, Homo sapien
acgacccatgatcttctcgaaacat

SEQ ID NO: 2304861 - DNA, 25 bp, Homo sapien
ttttctgcagaactaaaccatttgt

SEQ ID NO: 2304862 - DNA, 25 bp, Homo sapien
tgcagaactaaaccatttgtccctt

SEQ ID NO: 2304863 - DNA, 25 bp, Homo sapien
tcagtaaacgatgcttttcctatga

SEQ ID NO: 2304864 - DNA, 25 bp, Homo sapien
taatatatcctctcagtaaacgatg

SEQ ID NO: 2304865 - DNA, 25 bp, Homo sapien
gttagtgcatacttcagggaatcca

SEQ ID NO: 2304866 - DNA, 25 bp, Homo sapien
cagagatgtctaaagccataagagt

SEQ ID NO: 2304867 - DNA, 25 bp, Homo sapien
cttggctccccagagatgtctaaag

SEQ ID NO: 2304868 - DNA, 25 bp, Homo sapien
taaagccataagagttagtgcatac

SEQ ID NO: 2304869 - DNA, 25 bp, Homo sapien
ctctttccctctccatctgactgcc

SEQ ID NO: 2304870 - DNA, 25 bp, Homo sapien
tctttccctctccatctgactgcct

SEQ ID NO: 2304871 - DNA, 25 bp, Homo sapien
ctttccctctccatctgactgcctt

SEQ ID NO: 2304872 - DNA, 25 bp, Homo sapien
tataacccactctctaaagcctact

SEQ ID NO: 2304873 - DNA, 25 bp, Homo sapien
tcagtgaaatcagttataacccact

SEQ ID NO: 2304874 - DNA, 25 bp, Homo sapien
ccggcttccgggattttcagcattt

SEQ ID NO: 2304875 - DNA, 25 bp, Homo sapien
tatgttcctctacagactgtttatt

SEQ ID NO: 2304876 - DNA, 25 bp, Homo sapien
tcttaagtgtgtcaaatcagtgttc

SEQ ID NO: 2304877 - DNA, 25 bp, Homo sapien
taggtaataaagcactcccacagag

SEQ ID NO: 2304878 - DNA, 25 bp, Homo sapien
cccacagagtaacaaggatccaaca

SEQ ID NO: 2304879 - DNA, 25 bp, Homo sapien
gagagctggagtaaacaaccatgaa

SEQ ID NO: 2304880 - DNA, 25 bp, Homo sapien
cttcagcagcttttcaagctgaata

SEQ ID NO: 2304881 - DNA, 25 bp, Homo sapien
cagcagcttttcaagctgaatattt

SEQ ID NO: 2304882 - DNA, 25 bp, Homo sapien
gcagcttttcaagctgaatatttac

SEQ ID NO: 2304883 - DNA, 25 bp, Homo sapien
tcagcagcttttcaagctgaatatt

SEQ ID NO: 2304884 - DNA, 25 bp, Homo sapien
gagccttaatattggccctggagac

SEQ ID NO: 2304885 - DNA, 25 bp, Homo sapien
ttatacaggccatatagagcatgcc

SEQ ID NO: 2304886 - DNA, 25 bp, Homo sapien
tatacaggccacagatgatgcaatc

SEQ ID NO: 2304887 - DNA, 25 bp, Homo sapien
gagaccttttccgttcagcctatca

SEQ ID NO: 2304888 - DNA, 25 bp, Homo sapien
tgaacatggatacattagaacctgc

SEQ ID NO: 2304889 - DNA, 25 bp, Homo sapien
gaaactattttagctgacccacaca

SEQ ID NO: 2304890 - DNA, 25 bp, Homo sapien
ttcctgtacctaacgtgaagccagt

SEQ ID NO: 2304891 - DNA, 25 bp, Homo sapien
tcattagccactcagtagtgcaccc

SEQ ID NO: 2304892 - DNA, 25 bp, Homo sapien
caggagagattgtgactgaggaatt

SEQ ID NO: 2304893 - DNA, 25 bp, Homo sapien
aggagagattgtgactgaggaattt

SEQ ID NO: 2304894 - DNA, 25 bp, Homo sapien
gtagtgctccactaagctcattttg

SEQ ID NO: 2304895 - DNA, 25 bp, Homo sapien
tatggttatacaagatgatggctgc

SEQ ID NO: 2304896 - DNA, 25 bp, Homo sapien
cattttgagtcaagtgcccatctct

SEQ ID NO: 2304897 - DNA, 25 bp, Homo sapien
ctgatccgactaaagactgccactg

SEQ ID NO: 2304898 - DNA, 25 bp, Homo sapien
tcaatgtagaagcttccaatgcctg

SEQ ID NO: 2304899 - DNA, 25 bp, Homo sapien
tttcctgatgtctccgggactgcca

SEQ ID NO: 2304900 - DNA, 25 bp, Homo sapien
gcaggaactcatgaactagcacttc

SEQ ID NO: 2304901 - DNA, 25 bp, Homo sapien
tgccagaagccttcgaggagtcgaa

SEQ ID NO: 2304902 - DNA, 25 bp, Homo sapien
ctcaacagcaaagccctcccattct

SEQ ID NO: 2304903 - DNA, 25 bp, Homo sapien
aagtcctgtccctggctcaacagca

SEQ ID NO: 2304904 - DNA, 25 bp, Homo sapien
tcccattctcattcttgtcttcttt

SEQ ID NO: 2304905 - DNA, 25 bp, Homo sapien
tctttaacttcctcttctccgtcca

SEQ ID NO: 2304906 - DNA, 25 bp, Homo sapien
tcatgaggatcagcaaagtccccag

SEQ ID NO: 2304907 - DNA, 25 bp, Homo sapien
aagaggtgatcatataaactggcca

SEQ ID NO: 2304908 - DNA, 25 bp, Homo sapien
gatgtactagatcaatggacccagc

SEQ ID NO: 2304909 - DNA, 25 bp, Homo sapien
cagcagttattgctcctcatgagga

SEQ ID NO: 2304910 - DNA, 25 bp, Homo sapien
ggtcaggggtttccgcattatagta

SEQ ID NO: 2304911 - DNA, 25 bp, Homo sapien
caggggtttccgcattatagtacct

SEQ ID NO: 2304912 - DNA, 25 bp, Homo sapien
ttgggtcaggggtttccgcattata

SEQ ID NO: 2304913 - DNA, 25 bp, Homo sapien
gtttccgcattatagtaccttccat

SEQ ID NO: 2304914 - DNA, 25 bp, Homo sapien
gctctgggggcactaaaagtaacca

SEQ ID NO: 2304915 - DNA, 25 bp, Homo sapien
tgggggcactaaaagtaaccagata

SEQ ID NO: 2304916 - DNA, 25 bp, Homo sapien
ctggactggattgagactgctctgg

SEQ ID NO: 2304917 - DNA, 25 bp, Homo sapien
tgcattgggaggctggattattgcc

SEQ ID NO: 2304918 - DNA, 25 bp, Homo sapien
tctccgtacagcaggtgcatgacat

SEQ ID NO: 2304919 - DNA, 25 bp, Homo sapien
tcttggtgtctctacgtctctgagc

SEQ ID NO: 2304920 - DNA, 25 bp, Homo sapien
tgggagataggattttcagtcttgg

SEQ ID NO: 2304921 - DNA, 25 bp, Homo sapien
tcaactgagaagacattgtgtgtct

SEQ ID NO: 2304922 - DNA, 25 bp, Homo sapien
taaattagtatgagcttccaaaccc

SEQ ID NO: 2304923 - DNA, 25 bp, Homo sapien
ggaggcccataaattcacctagcat

SEQ ID NO: 2304924 - DNA, 25 bp, Homo sapien
tagaatctccctaatactggaagag

SEQ ID NO: 2304925 - DNA, 25 bp, Homo sapien
tttgatcctgccagatgtaggtctc

SEQ ID NO: 2304926 - DNA, 25 bp, Homo sapien
taagagtgcagcttcaggctttgtc

SEQ ID NO: 2304927 - DNA, 25 bp, Homo sapien
tgtagccacaaatagaataccgaac

SEQ ID NO: 2304928 - DNA, 25 bp, Homo sapien
taccgaacactggacatcaacttgc

SEQ ID NO: 2304929 - DNA, 25 bp, Homo sapien
gctttgtctacaccatatcttcgag

SEQ ID NO: 2304930 - DNA, 25 bp, Homo sapien
tcatctcggtgcactacaacctgtg

SEQ ID NO: 2304931 - DNA, 25 bp, Homo sapien
ttctttaaaatagtacctctctgga

SEQ ID NO: 2304932 - DNA, 25 bp, Homo sapien
caatgccatcatctcggtgcactac

SEQ ID NO: 2304933 - DNA, 25 bp, Homo sapien
acctctctggagataaacaattttt

SEQ ID NO: 2304934 - DNA, 25 bp, Homo sapien
gaacttaagactctaccagaaggaa

SEQ ID NO: 2304935 - DNA, 25 bp, Homo sapien
gaaggaaatcactgtacagcagaaa

SEQ ID NO: 2304936 - DNA, 25 bp, Homo sapien
tataaacggatgatcacagaacaca

SEQ ID NO: 2304937 - DNA, 25 bp, Homo sapien
taatactgcctgcacaaagaaacca

SEQ ID NO: 2304938 - DNA, 25 bp, Homo sapien
caagagcaacctgagtaacatggcg

SEQ ID NO: 2304939 - DNA, 25 bp, Homo sapien
atacctgtgatccatattgtcttca

SEQ ID NO: 2304940 - DNA, 25 bp, Homo sapien
tcaaagccctgagcagcaacagaga

SEQ ID NO: 2304941 - DNA, 25 bp, Homo sapien
cacatatttgtgtcctttatacctg

SEQ ID NO: 2304942 - DNA, 25 bp, Homo sapien
gtcttcatgcttaatacttgaagta

SEQ ID NO: 2304943 - DNA, 25 bp, Homo sapien
gaaaggaacaccctgtcagaggatg

SEQ ID NO: 2304944 - DNA, 25 bp, Homo sapien
aaggaacaccctgtcagaggatgtg

SEQ ID NO: 2304945 - DNA, 25 bp, Homo sapien
atgattttagcaacatgtgaagaat

SEQ ID NO: 2304946 - DNA, 25 bp, Homo sapien
aggaacaccctgtcagaggatgtga

SEQ ID NO: 2304947 - DNA, 25 bp, Homo sapien
caagctctgatggtacccatcagta

SEQ ID NO: 2304948 - DNA, 25 bp, Homo sapien
aagctctgatggtacccatcagtac

SEQ ID NO: 2304949 - DNA, 25 bp, Homo sapien
tcaagctctgatggtacccatcagt

SEQ ID NO: 2304950 - DNA, 25 bp, Homo sapien
tatttgtgtcgattgatttatgctc

SEQ ID NO: 2304951 - DNA, 25 bp, Homo sapien
aaccatctagaattgctccgtgtgc

SEQ ID NO: 2304952 - DNA, 25 bp, Homo sapien
aatactggacatgaaagacaaggtt

SEQ ID NO: 2304953 - DNA, 25 bp, Homo sapien
tccgtgtgctagagatgtcaaaggt

SEQ ID NO: 2304954 - DNA, 25 bp, Homo sapien
cttagtgataatggaattcctatct

SEQ ID NO: 2304955 - DNA, 25 bp, Homo sapien
gaaatatcgacttggatgcccagag

SEQ ID NO: 2304956 - DNA, 25 bp, Homo sapien
ttagaaatatcgacttggatgccca

SEQ ID NO: 2304957 - DNA, 25 bp, Homo sapien
aatatcgacttggatgcccagagtg

SEQ ID NO: 2304958 - DNA, 25 bp, Homo sapien
gcaagttatttccctaatttgcact

SEQ ID NO: 2304959 - DNA, 25 bp, Homo sapien
agtcctcagtgacctacaaagagac

SEQ ID NO: 2304960 - DNA, 25 bp, Homo sapien
cataaagcaagtcctcagtgaccta

SEQ ID NO: 2304961 - DNA, 25 bp, Homo sapien
aagtcctcagtgacctacaaagaga

SEQ ID NO: 2304962 - DNA, 25 bp, Homo sapien
aagcaagtcctcagtgacctacaaa

SEQ ID NO: 2304963 - DNA, 25 bp, Homo sapien
ggggttagaaacagcgctgtggccc

SEQ ID NO: 2304964 - DNA, 25 bp, Homo sapien
gttagaaacagcgctgtggcccatg

SEQ ID NO: 2304965 - DNA, 25 bp, Homo sapien
tagaaacagcgctgtggcccatgca

SEQ ID NO: 2304966 - DNA, 25 bp, Homo sapien
ttctggggttagaaacagcgctgtg

SEQ ID NO: 2304967 - DNA, 25 bp, Homo sapien
gagcaacatgagtgtccacttaata

SEQ ID NO: 2304968 - DNA, 25 bp, Homo sapien
gatatacctgtgtgcaatcggcctt

SEQ ID NO: 2304969 - DNA, 25 bp, Homo sapien
ggtttatcactaggacagccagagg

SEQ ID NO: 2304970 - DNA, 25 bp, Homo sapien
gggatcctgacaatactcctttgat

SEQ ID NO: 2304971 - DNA, 25 bp, Homo sapien
tcggatgcccatatagtctgtaatg

SEQ ID NO: 2304972 - DNA, 25 bp, Homo sapien
tccctactgcagctaatttcatgaa

SEQ ID NO: 2304973 - DNA, 25 bp, Homo sapien
tcatgaaactttcatttcggatgcc

SEQ ID NO: 2304974 - DNA, 25 bp, Homo sapien
tccaagctgtgacaaagtcccccat

SEQ ID NO: 2304975 - DNA, 25 bp, Homo sapien
atcattgatattcatttcacgatga

SEQ ID NO: 2304976 - DNA, 25 bp, Homo sapien
attgatattcatttcacgatgagaa

SEQ ID NO: 2304977 - DNA, 25 bp, Homo sapien
cattgatattcatttcacgatgaga

SEQ ID NO: 2304978 - DNA, 25 bp, Homo sapien
tgatattcatttcacgatgagaatc

SEQ ID NO: 2304979 - DNA, 25 bp, Homo sapien
tggaagcaactagaacaggatgtac

SEQ ID NO: 2304980 - DNA, 25 bp, Homo sapien
caactagaacaggatgtaccagggg

SEQ ID NO: 2304981 - DNA, 25 bp, Homo sapien
gtaagatggaagcaactagaacagg

SEQ ID NO: 2304982 - DNA, 25 bp, Homo sapien
taagatggaagcaactagaacagga

SEQ ID NO: 2304983 - DNA, 25 bp, Homo sapien
ttatctatacccctcaccccaacaa

SEQ ID NO: 2304984 - DNA, 25 bp, Homo sapien
ggttctattgtgagtcataccattt

SEQ ID NO: 2304985 - DNA, 25 bp, Homo sapien
gatgccctggttctattgtgagtca

SEQ ID NO: 2304986 - DNA, 25 bp, Homo sapien
gagtctgatgccctggttctattgt

SEQ ID NO: 2304987 - DNA, 25 bp, Homo sapien
tttacactcaagaatgacatcacca

SEQ ID NO: 2304988 - DNA, 25 bp, Homo sapien
cgaagaatgcactggcaggatctgc

SEQ ID NO: 2304989 - DNA, 25 bp, Homo sapien
gccccagagctgggatcaacacagt

SEQ ID NO: 2304990 - DNA, 25 bp, Homo sapien
cactgagagcagtaatgaccattcg

SEQ ID NO: 2304991 - DNA, 25 bp, Homo sapien
cagggcagacactgatggccactga

SEQ ID NO: 2304992 - DNA, 25 bp, Homo sapien
ggcagacactgatggccactgacaa

SEQ ID NO: 2304993 - DNA, 25 bp, Homo sapien
cagacactgatggccactgacaaca

SEQ ID NO: 2304994 - DNA, 25 bp, Homo sapien
gggcagacactgatggccactgaca

SEQ ID NO: 2304995 - DNA, 25 bp, Homo sapien
tctacttgcacattagctacaatct

SEQ ID NO: 2304996 - DNA, 25 bp, Homo sapien
acattagctacaatctgccagccag

SEQ ID NO: 2304997 - DNA, 25 bp, Homo sapien
ttgcacattagctacaatctgccag

SEQ ID NO: 2304998 - DNA, 25 bp, Homo sapien
tcttctctacttgcacattagctac

SEQ ID NO: 2304999 - DNA, 25 bp, Homo sapien
gtcttgtattctgcaacccttgctc

SEQ ID NO: 2305000 - DNA, 25 bp, Homo sapien
ggcgtcttgtattctgcaacccttg

SEQ ID NO: 2305001 - DNA, 25 bp, Homo sapien
gaggctgctggcgtcttgtattctg

SEQ ID NO: 2305002 - DNA, 25 bp, Homo sapien
gctggcgtcttgtattctgcaaccc

SEQ ID NO: 2305003 - DNA, 25 bp, Homo sapien
cacggtatagtcttctcattccaag

SEQ ID NO: 2305004 - DNA, 25 bp, Homo sapien
atgctgtctctcgggtttctcttat

SEQ ID NO: 2305005 - DNA, 25 bp, Homo sapien
aatcccaatcccaccctagctcctg

SEQ ID NO: 2305006 - DNA, 25 bp, Homo sapien
cattccaagaccactggggatggag

SEQ ID NO: 2305007 - DNA, 25 bp, Homo sapien
ataagaaaggttctagtgttttcag

SEQ ID NO: 2305008 - DNA, 25 bp, Homo sapien
tgataataagaaaggttctagtgtt

SEQ ID NO: 2305009 - DNA, 25 bp, Homo sapien
tgtcctgaagcatcatatcagtgac

SEQ ID NO: 2305010 - DNA, 25 bp, Homo sapien
caattgaaagatatcaatatgaaca

SEQ ID NO: 2305011 - DNA, 25 bp, Homo sapien
ttcatcagggtgtatgtttcttgtt

SEQ ID NO: 2305012 - DNA, 25 bp, Homo sapien
aactctgttcatcagggtgtatgtt

SEQ ID NO: 2305013 - DNA, 25 bp, Homo sapien
gtttcttgttccatattacattccc

SEQ ID NO: 2305014 - DNA, 25 bp, Homo sapien
ttcctgggggctcatcaaggttcat

SEQ ID NO: 2305015 - DNA, 25 bp, Homo sapien
atctgccagcgctaatgtcacatcc

SEQ ID NO: 2305016 - DNA, 25 bp, Homo sapien
atgtgccacatctgccagcgctaat

SEQ ID NO: 2305017 - DNA, 25 bp, Homo sapien
gccacatctgccagcgctaatgtca

SEQ ID NO: 2305018 - DNA, 25 bp, Homo sapien
catcaggcactgtggaacacagccc

SEQ ID NO: 2305019 - DNA, 25 bp, Homo sapien
catcaagatccaagcctggtgttgg

SEQ ID NO: 2305020 - DNA, 25 bp, Homo sapien
ggcactgtggaacacagccctcagc

SEQ ID NO: 2305021 - DNA, 25 bp, Homo sapien
ggtgttggggcaccctggtgcatca

SEQ ID NO: 2305022 - DNA, 25 bp, Homo sapien
ctcacagaaacactggctccagtgt

SEQ ID NO: 2305023 - DNA, 25 bp, Homo sapien
tcacagaaacactggctccagtgtc

SEQ ID NO: 2305024 - DNA, 25 bp, Homo sapien
aattgattgaccgtaaatggatgga

SEQ ID NO: 2305025 - DNA, 25 bp, Homo sapien
cccagaatataatggaacatttccc

SEQ ID NO: 2305026 - DNA, 25 bp, Homo sapien
tgagtggaggatcaaaaaccattct

SEQ ID NO: 2305027 - DNA, 25 bp, Homo sapien
tcttcagcatgtggactgtcagttt

SEQ ID NO: 2305028 - DNA, 25 bp, Homo sapien
taatgcaactactccagtttagttc

SEQ ID NO: 2305029 - DNA, 25 bp, Homo sapien
tactatagctctatagcctaatttg

SEQ ID NO: 2305030 - DNA, 25 bp, Homo sapien
tagttttcattactaagttctttca

SEQ ID NO: 2305031 - DNA, 25 bp, Homo sapien
aaacaatattgatccttctaatcca

SEQ ID NO: 2305032 - DNA, 25 bp, Homo sapien
aaatccccgattcagcttgtcccag

SEQ ID NO: 2305033 - DNA, 25 bp, Homo sapien
caataagaaggtcaaagaccaagat

SEQ ID NO: 2305034 - DNA, 25 bp, Homo sapien
tgtcccagctgatccagtccgttgt

SEQ ID NO: 2305035 - DNA, 25 bp, Homo sapien
tcacaagtacaaccacagacgtcag

SEQ ID NO: 2305036 - DNA, 25 bp, Homo sapien
tttatgttcacctgtactcaatgtt

SEQ ID NO: 2305037 - DNA, 25 bp, Homo sapien
tgatgggcacctaggctggatgaac

SEQ ID NO: 2305038 - DNA, 25 bp, Homo sapien
ttatgttcacctgtactcaatgttt

SEQ ID NO: 2305039 - DNA, 25 bp, Homo sapien
ggcacctaggctggatgaacatatg

SEQ ID NO: 2305040 - DNA, 25 bp, Homo sapien
taacgtacatagattagagtgtagc

SEQ ID NO: 2305041 - DNA, 25 bp, Homo sapien
ttctgttccacgcatgcaggcagat

SEQ ID NO: 2305042 - DNA, 25 bp, Homo sapien
tagagtgtagcagggcctcttctgt

SEQ ID NO: 2305043 - DNA, 25 bp, Homo sapien
ctgttccacgcatgcaggcagatct

SEQ ID NO: 2305044 - DNA, 25 bp, Homo sapien
agagagaactaatacccgagccatg

SEQ ID NO: 2305045 - DNA, 25 bp, Homo sapien
cagagagaactaatacccgagccat

SEQ ID NO: 2305046 - DNA, 25 bp, Homo sapien
gcagagagaactaatacccgagcca

SEQ ID NO: 2305047 - DNA, 25 bp, Homo sapien
ggactgactctaaatgcaatatgca

SEQ ID NO: 2305048 - DNA, 25 bp, Homo sapien
gcaatatgcaatacacctgagtaac

SEQ ID NO: 2305049 - DNA, 25 bp, Homo sapien
cacacttatatctgaaaggactgac

SEQ ID NO: 2305050 - DNA, 25 bp, Homo sapien
tgattgctagaaaaactagaactcc

SEQ ID NO: 2305051 - DNA, 25 bp, Homo sapien
gaaggctagtagcaggcatggattc

SEQ ID NO: 2305052 - DNA, 25 bp, Homo sapien
tcttcatcagtcaatgaattagcaa

SEQ ID NO: 2305053 - DNA, 25 bp, Homo sapien
tagcaagtgtcacaaagtactgctg

SEQ ID NO: 2305054 - DNA, 25 bp, Homo sapien
gtgcccaaggtgacaagaataaagt

SEQ ID NO: 2305055 - DNA, 25 bp, Homo sapien
tgatgggtaccctagaagccctgac

SEQ ID NO: 2305056 - DNA, 25 bp, Homo sapien
cctctgtagctcgagactggctgaa

SEQ ID NO: 2305057 - DNA, 25 bp, Homo sapien
tgcactatgcatgtagcaggactgc

SEQ ID NO: 2305058 - DNA, 25 bp, Homo sapien
caataggtccagagtgcaaagagct

SEQ ID NO: 2305059 - DNA, 25 bp, Homo sapien
gcctgtagcttggaaatctcattct

SEQ ID NO: 2305060 - DNA, 25 bp, Homo sapien
agtccccagatagttgaaatccctg

SEQ ID NO: 2305061 - DNA, 25 bp, Homo sapien
gattcttgatgactggtttaatgca

SEQ ID NO: 2305062 - DNA, 25 bp, Homo sapien
tggtttaatgcaccttctctcggta

SEQ ID NO: 2305063 - DNA, 25 bp, Homo sapien
ggaacaaggaacaaagcatgtcctg

SEQ ID NO: 2305064 - DNA, 25 bp, Homo sapien
tgcctataccatgggatcgcacagt

SEQ ID NO: 2305065 - DNA, 25 bp, Homo sapien
tcaagccgcatttgacacaacgagg

SEQ ID NO: 2305066 - DNA, 25 bp, Homo sapien
tcgcacagtatgtgcaagagtctga

SEQ ID NO: 2305067 - DNA, 25 bp, Homo sapien
tactgatattttggcctatggcatc

SEQ ID NO: 2305068 - DNA, 25 bp, Homo sapien
tttactgatattttggcctatggca

SEQ ID NO: 2305069 - DNA, 25 bp, Homo sapien
caaccattttgccacttcagtgagc

SEQ ID NO: 2305070 - DNA, 25 bp, Homo sapien
taatacaaccacttgcaaagagaca

SEQ ID NO: 2305071 - DNA, 25 bp, Homo sapien
ttggttggagaaattccttttcagc

SEQ ID NO: 2305072 - DNA, 25 bp, Homo sapien
tggttggagaaattccttttcagct

SEQ ID NO: 2305073 - DNA, 25 bp, Homo sapien
tctaattgagaatcactgaaggcag

SEQ ID NO: 2305074 - DNA, 25 bp, Homo sapien
aattgagaatcactgaaggcagtca

SEQ ID NO: 2305075 - DNA, 25 bp, Homo sapien
taattgagaatcactgaaggcagtc

SEQ ID NO: 2305076 - DNA, 25 bp, Homo sapien
tttctaattgagaatcactgaaggc

SEQ ID NO: 2305077 - DNA, 25 bp, Homo sapien
ttaatctcttaaagccttgcctcca

SEQ ID NO: 2305078 - DNA, 25 bp, Homo sapien
tcataaagtctttcatatccatcct

SEQ ID NO: 2305079 - DNA, 25 bp, Homo sapien
aaactctggcctaatttgacttgga

SEQ ID NO: 2305080 - DNA, 25 bp, Homo sapien
tacctcttcagactcatcattctcg

SEQ ID NO: 2305081 - DNA, 25 bp, Homo sapien
gaaaggaatcttgaactgcatgtga

SEQ ID NO: 2305082 - DNA, 25 bp, Homo sapien
tgttatgtgaatacgatattcctcc

SEQ ID NO: 2305083 - DNA, 25 bp, Homo sapien
gaatacgatattcctccttgaagat

SEQ ID NO: 2305084 - DNA, 25 bp, Homo sapien
caacatctcccatgaaatgtgggaa

SEQ ID NO: 2305085 - DNA, 25 bp, Homo sapien
gagacaatattagtgtaatgatggc

SEQ ID NO: 2305086 - DNA, 25 bp, Homo sapien
aagttctgtacttaagcaggatatt

SEQ ID NO: 2305087 - DNA, 25 bp, Homo sapien
gcaggatatttttgacaaggcattc

SEQ ID NO: 2305088 - DNA, 25 bp, Homo sapien
cagagacaatattagtgtaatgatg

SEQ ID NO: 2305089 - DNA, 25 bp, Homo sapien
ttaataggactcagaggagcttccg

SEQ ID NO: 2305090 - DNA, 25 bp, Homo sapien
tccgagactgaattgagaggccatt

SEQ ID NO: 2305091 - DNA, 25 bp, Homo sapien
cctttggctgcgatgacagatggca

SEQ ID NO: 2305092 - DNA, 25 bp, Homo sapien
aaaagggttcccgtgggcatcatcg

SEQ ID NO: 2305093 - DNA, 25 bp, Homo sapien
ctctcccccacagaagagaggccat

SEQ ID NO: 2305094 - DNA, 25 bp, Homo sapien
ttgtaaaagggagcaccatggcaac

SEQ ID NO: 2305095 - DNA, 25 bp, Homo sapien
tttctaccaagtgaatagtgctggg

SEQ ID NO: 2305096 - DNA, 25 bp, Homo sapien
tgaacttaaagcatatgaccttggg

SEQ ID NO: 2305097 - DNA, 25 bp, Homo sapien
ccatggcaacaaagctgcaggctgg

SEQ ID NO: 2305098 - DNA, 25 bp, Homo sapien
aaaatatctatagcgtctggtgctg

SEQ ID NO: 2305099 - DNA, 25 bp, Homo sapien
gaatagtaactgcttgtcctgacat

SEQ ID NO: 2305100 - DNA, 25 bp, Homo sapien
gaacacactggtagatgctgaaaac

SEQ ID NO: 2305101 - DNA, 25 bp, Homo sapien
tacatctggaggtgccaaatgagtg

SEQ ID NO: 2305102 - DNA, 25 bp, Homo sapien
ctgcattaaaaaagaaatactgcat

SEQ ID NO: 2305103 - DNA, 25 bp, Homo sapien
cccaggatagcttggttctgttcaa

SEQ ID NO: 2305104 - DNA, 25 bp, Homo sapien
tgtgattggacctccattcccagga

SEQ ID NO: 2305105 - DNA, 25 bp, Homo sapien
tatatatcttctgccccgggccgat

SEQ ID NO: 2305106 - DNA, 25 bp, Homo sapien
tattaagatccaaaatcaagacgag

SEQ ID NO: 2305107 - DNA, 25 bp, Homo sapien
gactggctcctatgaacctgctgtg

SEQ ID NO: 2305108 - DNA, 25 bp, Homo sapien
gatcagcttctgttgcactagtaga

SEQ ID NO: 2305109 - DNA, 25 bp, Homo sapien
gaagcctgggtgttttctcgagtga

SEQ ID NO: 2305110 - DNA, 25 bp, Homo sapien
gcttggaacaaaggccagacacttg

SEQ ID NO: 2305111 - DNA, 25 bp, Homo sapien
tgcacggcttctctacctgacaagg

SEQ ID NO: 2305112 - DNA, 25 bp, Homo sapien
aaagcatgttgagcaccgttgtggc

SEQ ID NO: 2305113 - DNA, 25 bp, Homo sapien
tagttgtatacaaaacgcccatgtg

SEQ ID NO: 2305114 - DNA, 25 bp, Homo sapien
tacatgggtcatcagctaatcttcc

SEQ ID NO: 2305115 - DNA, 25 bp, Homo sapien
gatacttatgcttagacctcacaca

SEQ ID NO: 2305116 - DNA, 25 bp, Homo sapien
taactgatggtaaaatgccaagcag

SEQ ID NO: 2305117 - DNA, 25 bp, Homo sapien
tgtgtagaatcctggctggcaaggc

SEQ ID NO: 2305118 - DNA, 25 bp, Homo sapien
cacaattgatttgcttagggctagg

SEQ ID NO: 2305119 - DNA, 25 bp, Homo sapien
gagtgactcctaccaaaatccagcg

SEQ ID NO: 2305120 - DNA, 25 bp, Homo sapien
gcactagatatacaggattgagcca

SEQ ID NO: 2305121 - DNA, 25 bp, Homo sapien
gcagttaggcctgttctcaggagcc

SEQ ID NO: 2305122 - DNA, 25 bp, Homo sapien
tgagccatacaaataactagaggga

SEQ ID NO: 2305123 - DNA, 25 bp, Homo sapien
gggaacgctgaaccatggaaccatt

SEQ ID NO: 2305124 - DNA, 25 bp, Homo sapien
ggagcctgtagaacattcctagcca

SEQ ID NO: 2305125 - DNA, 25 bp, Homo sapien
cattcctagccagtcacctttctta

SEQ ID NO: 2305126 - DNA, 25 bp, Homo sapien
tgtgttcctgcaagggtagtggagc

SEQ ID NO: 2305127 - DNA, 25 bp, Homo sapien
atacctatcaaaggtagtagggact

SEQ ID NO: 2305128 - DNA, 25 bp, Homo sapien
acaatttctatatactgaaaggtac

SEQ ID NO: 2305129 - DNA, 25 bp, Homo sapien
cctatcaaaggtagtagggactgtg

SEQ ID NO: 2305130 - DNA, 25 bp, Homo sapien
tgaaaggtacaagtatagtgggatt

SEQ ID NO: 2305131 - DNA, 25 bp, Homo sapien
tattgactttccaccatgtaccagc

SEQ ID NO: 2305132 - DNA, 25 bp, Homo sapien
gaagaaggcactattactagttagc

SEQ ID NO: 2305133 - DNA, 25 bp, Homo sapien
tgtgacattttagacccaaaagttg

SEQ ID NO: 2305134 - DNA, 25 bp, Homo sapien
tacttgctccttagtgaacaaaagg

SEQ ID NO: 2305135 - DNA, 25 bp, Homo sapien
cttctaataggagctcatcagtgga

SEQ ID NO: 2305136 - DNA, 25 bp, Homo sapien
ttctaataggagctcatcagtggag

SEQ ID NO: 2305137 - DNA, 25 bp, Homo sapien
ttcagctgtagaaactcttgtgttc

SEQ ID NO: 2305138 - DNA, 25 bp, Homo sapien
tcactcctgagttcgtgcttgttca

SEQ ID NO: 2305139 - DNA, 25 bp, Homo sapien
gcttgttcagctgtagaaactcttg

SEQ ID NO: 2305140 - DNA, 25 bp, Homo sapien
gagttcgtgcttgttcagctgtaga

SEQ ID NO: 2305141 - DNA, 25 bp, Homo sapien
tcagagaaactgagggcgcctgcaa

SEQ ID NO: 2305142 - DNA, 25 bp, Homo sapien
cagagaaactgagggcgcctgcaaa

SEQ ID NO: 2305143 - DNA, 25 bp, Homo sapien
cctgcaaagaggcaaggccagcatt

SEQ ID NO: 2305144 - DNA, 25 bp, Homo sapien
tgagggcgcctgcaaagaggcaagg

SEQ ID NO: 2305145 - DNA, 25 bp, Homo sapien
gctgggtcctgtgcatggactgcca

SEQ ID NO: 2305146 - DNA, 25 bp, Homo sapien
gtgggagccgggactgcaagccgcg

SEQ ID NO: 2305147 - DNA, 25 bp, Homo sapien
cctaggttctgggtgggcgcggctt

SEQ ID NO: 2305148 - DNA, 25 bp, Homo sapien
gcaagccgcgctggcaggctggcct

SEQ ID NO: 2305149 - DNA, 25 bp, Homo sapien
gagcccattggatctgtgaaagcct

SEQ ID NO: 2305150 - DNA, 25 bp, Homo sapien
cagttaggttcctcactgcaagaaa

SEQ ID NO: 2305151 - DNA, 25 bp, Homo sapien
tttctaacaggaaaagtcatcccta

SEQ ID NO: 2305152 - DNA, 25 bp, Homo sapien
taccgtgacatcctgaaccctggat

SEQ ID NO: 2305153 - DNA, 25 bp, Homo sapien
tcaaatcacttacagatgagactgt

SEQ ID NO: 2305154 - DNA, 25 bp, Homo sapien
ttcacaaggaattactcagcaactc

SEQ ID NO: 2305155 - DNA, 25 bp, Homo sapien
tcataaattgtggatcagctttcaa

SEQ ID NO: 2305156 - DNA, 25 bp, Homo sapien
aaaaacatgccttctagtgggaagt

SEQ ID NO: 2305157 - DNA, 25 bp, Homo sapien
ctgtgtggtgttgtacagaacaacc

SEQ ID NO: 2305158 - DNA, 25 bp, Homo sapien
gaacaaccagtcttgtgctaccata

SEQ ID NO: 2305159 - DNA, 25 bp, Homo sapien
aacaaccagtcttgtgctaccatac

SEQ ID NO: 2305160 - DNA, 25 bp, Homo sapien
ccagtgatctgtgtggtgttgtaca

SEQ ID NO: 2305161 - DNA, 25 bp, Homo sapien
tccaaccctagcagaactcaagtgt

SEQ ID NO: 2305162 - DNA, 25 bp, Homo sapien
cttagtgtatgctttcagactggca

SEQ ID NO: 2305163 - DNA, 25 bp, Homo sapien
cataatgtttatagggttggaagta

SEQ ID NO: 2305164 - DNA, 25 bp, Homo sapien
cattctcttcacctattgtactcca

SEQ ID NO: 2305165 - DNA, 25 bp, Homo sapien
tttgttttggtaagactagcaggca

SEQ ID NO: 2305166 - DNA, 25 bp, Homo sapien
ggttcaattatacgttcagcaagag

SEQ ID NO: 2305167 - DNA, 25 bp, Homo sapien
ctagcaggcatttcgcagattgtga

SEQ ID NO: 2305168 - DNA, 25 bp, Homo sapien
tcggtgcctcaaaaggaagggaatg

SEQ ID NO: 2305169 - DNA, 25 bp, Homo sapien
gacatagcaacacgattaaatttcc

SEQ ID NO: 2305170 - DNA, 25 bp, Homo sapien
accagcatcgccacacatgacatag

SEQ ID NO: 2305171 - DNA, 25 bp, Homo sapien
ctaattgtggagcaccagcatcgcc

SEQ ID NO: 2305172 - DNA, 25 bp, Homo sapien
tcgccacacatgacatagcaacacg

SEQ ID NO: 2305173 - DNA, 25 bp, Homo sapien
ctgtgatgcttttctgtgagagctc

SEQ ID NO: 2305174 - DNA, 25 bp, Homo sapien
tttgtgtcacttctgtgatgctttt

SEQ ID NO: 2305175 - DNA, 25 bp, Homo sapien
tgtcacttctgtgatgcttttctgt

SEQ ID NO: 2305176 - DNA, 25 bp, Homo sapien
ttctgtgatgcttttctgtgagagc

SEQ ID NO: 2305177 - DNA, 25 bp, Homo sapien
catctgcagcgtactgtggcatgca

SEQ ID NO: 2305178 - DNA, 25 bp, Homo sapien
gacaaattatcctccacaatgtccc

SEQ ID NO: 2305179 - DNA, 25 bp, Homo sapien
tgtcccctaagccagtggacgtcat

SEQ ID NO: 2305180 - DNA, 25 bp, Homo sapien
ggaagatccctgagacaaattatcc

SEQ ID NO: 2305181 - DNA, 25 bp, Homo sapien
ataagcatactttcagatctaacac

SEQ ID NO: 2305182 - DNA, 25 bp, Homo sapien
taagcatactttcagatctaacaca

SEQ ID NO: 2305183 - DNA, 25 bp, Homo sapien
aagcatactttcagatctaacacac

SEQ ID NO: 2305184 - DNA, 25 bp, Homo sapien
atctctcctaatgggtgatattggc

SEQ ID NO: 2305185 - DNA, 25 bp, Homo sapien
tctctcctaatgggtgatattggct

SEQ ID NO: 2305186 - DNA, 25 bp, Homo sapien
aaaatgcaatgtgtcatctctccta

SEQ ID NO: 2305187 - DNA, 25 bp, Homo sapien
tataacttcttaatcactatctcca

SEQ ID NO: 2305188 - DNA, 25 bp, Homo sapien
gaatgactctcttggaaatccgata

SEQ ID NO: 2305189 - DNA, 25 bp, Homo sapien
ggaaatccgatataacttcttaatc

SEQ ID NO: 2305190 - DNA, 25 bp, Homo sapien
tcttaatcactatctccataatgtt

SEQ ID NO: 2305191 - DNA, 25 bp, Homo sapien
ggtatgtgttcagatagggcctcac

SEQ ID NO: 2305192 - DNA, 25 bp, Homo sapien
cttagggtatgtgttcagatagggc

SEQ ID NO: 2305193 - DNA, 25 bp, Homo sapien
tagggtatgtgttcagatagggcct

SEQ ID NO: 2305194 - DNA, 25 bp, Homo sapien
ctacttagggtatgtgttcagatag

SEQ ID NO: 2305195 - DNA, 25 bp, Homo sapien
actgcaggggtaccgcaattctgca

SEQ ID NO: 2305196 - DNA, 25 bp, Homo sapien
attactgcaggggtaccgcaattct

SEQ ID NO: 2305197 - DNA, 25 bp, Homo sapien
ttactgcaggggtaccgcaattctg

SEQ ID NO: 2305198 - DNA, 25 bp, Homo sapien
ttattactgcaggggtaccgcaatt

SEQ ID NO: 2305199 - DNA, 25 bp, Homo sapien
ccatctcagttacatctggttccaa

SEQ ID NO: 2305200 - DNA, 25 bp, Homo sapien
tatgctccatctcagttacatctgg

SEQ ID NO: 2305201 - DNA, 25 bp, Homo sapien
tagcggtgagggctttgcatggagc

SEQ ID NO: 2305202 - DNA, 25 bp, Homo sapien
tttgcatggagctagccatatgctc

SEQ ID NO: 2305203 - DNA, 25 bp, Homo sapien
tgctgatgtagctggatccagcccc

SEQ ID NO: 2305204 - DNA, 25 bp, Homo sapien
tagaagttgttaaggtaccacactg

SEQ ID NO: 2305205 - DNA, 25 bp, Homo sapien
tgtgtcctcaaaccacaggcttctg

SEQ ID NO: 2305206 - DNA, 25 bp, Homo sapien
agagcagtcttcctttctagtttca

SEQ ID NO: 2305207 - DNA, 25 bp, Homo sapien
tggtgacattgcctcgcctcgctgc

SEQ ID NO: 2305208 - DNA, 25 bp, Homo sapien
ccattctgctgctgatctaatcttg

SEQ ID NO: 2305209 - DNA, 25 bp, Homo sapien
taatcttgcagtgggtgtataacct

SEQ ID NO: 2305210 - DNA, 25 bp, Homo sapien
ctccgtggagcagagttcgtcttcc

SEQ ID NO: 2305211 - DNA, 25 bp, Homo sapien
cttggaactggccttgagtaatgga

SEQ ID NO: 2305212 - DNA, 25 bp, Homo sapien
taattaaattgggtagatcttcttg

SEQ ID NO: 2305213 - DNA, 25 bp, Homo sapien
ggttcactcacgtaagcattaatta

SEQ ID NO: 2305214 - DNA, 25 bp, Homo sapien
tacttatatggacgaatggcttttt

SEQ ID NO: 2305215 - DNA, 25 bp, Homo sapien
cctgcatgggttcgccttggttaaa

SEQ ID NO: 2305216 - DNA, 25 bp, Homo sapien
ggacggtcctgtagccattgtggta

SEQ ID NO: 2305217 - DNA, 25 bp, Homo sapien
tcagttagagaattccagggacggt

SEQ ID NO: 2305218 - DNA, 25 bp, Homo sapien
gaatttgcacctgatacctgcatgg

SEQ ID NO: 2305219 - DNA, 25 bp, Homo sapien
caataagctggaattccaaaaccag

SEQ ID NO: 2305220 - DNA, 25 bp, Homo sapien
gacagaaacaaaagcgaagaaccta

SEQ ID NO: 2305221 - DNA, 25 bp, Homo sapien
agaccctcatcacaataagctggaa

SEQ ID NO: 2305222 - DNA, 25 bp, Homo sapien
ggaggaagcattcaacagaccctca

SEQ ID NO: 2305223 - DNA, 25 bp, Homo sapien
tgctgtactgacttcccgagggaaa

SEQ ID NO: 2305224 - DNA, 25 bp, Homo sapien
tacagtagttcctgctgtactgact

SEQ ID NO: 2305225 - DNA, 25 bp, Homo sapien
aacctttagggatagactgaactga

SEQ ID NO: 2305226 - DNA, 25 bp, Homo sapien
ctgaactgaagggatagacagcttc

SEQ ID NO: 2305227 - DNA, 25 bp, Homo sapien
tgagccactcccttaaggccatcat

SEQ ID NO: 2305228 - DNA, 25 bp, Homo sapien
gagccactcccttaaggccatcatt

SEQ ID NO: 2305229 - DNA, 25 bp, Homo sapien
tgacttggcaatcgactgaaatagt

SEQ ID NO: 2305230 - DNA, 25 bp, Homo sapien
gcagtacatgacttggcaatcgact

SEQ ID NO: 2305231 - DNA, 25 bp, Homo sapien
ggaggagtaatgatgccaacaattt

SEQ ID NO: 2305232 - DNA, 25 bp, Homo sapien
aatgatgccaacaatttcagttgta

SEQ ID NO: 2305233 - DNA, 25 bp, Homo sapien
ctaggcagtggcagtgagcggggca

SEQ ID NO: 2305234 - DNA, 25 bp, Homo sapien
ctcatagttggcagcagtgacagct

SEQ ID NO: 2305235 - DNA, 25 bp, Homo sapien
cagtgacagctgtcttcttggacat

SEQ ID NO: 2305236 - DNA, 25 bp, Homo sapien
gcagtgacagctgtcttcttggaca

SEQ ID NO: 2305237 - DNA, 25 bp, Homo sapien
gcagcagtgacagctgtcttcttgg

SEQ ID NO: 2305238 - DNA, 25 bp, Homo sapien
gagctctatctctttgggccacatc

SEQ ID NO: 2305239 - DNA, 25 bp, Homo sapien
ccttgaacctctctgcggatctgag

SEQ ID NO: 2305240 - DNA, 25 bp, Homo sapien
gcggatctgagcatcatttgtgtat

SEQ ID NO: 2305241 - DNA, 25 bp, Homo sapien
tgctgtaagagctctatctctttgg

SEQ ID NO: 2305242 - DNA, 25 bp, Homo sapien
tgatagtttcccttcacctacagtt

SEQ ID NO: 2305243 - DNA, 25 bp, Homo sapien
caaattgccagacttctcaagcggt

SEQ ID NO: 2305244 - DNA, 25 bp, Homo sapien
ttctttcttgaagcaaccattccac

SEQ ID NO: 2305245 - DNA, 25 bp, Homo sapien
tcaaaacgctgattgatcaattttt

SEQ ID NO: 2305246 - DNA, 25 bp, Homo sapien
aaccgggagatggcagatttggggc

SEQ ID NO: 2305247 - DNA, 25 bp, Homo sapien
tcagaaaccgggagatggcagattt

SEQ ID NO: 2305248 - DNA, 25 bp, Homo sapien
gaaaccgggagatggcagatttggg

SEQ ID NO: 2305249 - DNA, 25 bp, Homo sapien
cagaaaccgggagatggcagatttg

SEQ ID NO: 2305250 - DNA, 25 bp, Homo sapien
ttaaccaaacgggagtgggcacaga

SEQ ID NO: 2305251 - DNA, 25 bp, Homo sapien
caacacgacaaggactgcccgcgtg

SEQ ID NO: 2305252 - DNA, 25 bp, Homo sapien
acgacaaggactgcccgcgtgtcca

SEQ ID NO: 2305253 - DNA, 25 bp, Homo sapien
acacgacaaggactgcccgcgtgtc

SEQ ID NO: 2305254 - DNA, 25 bp, Homo sapien
gctcttcaggataactctcatggaa

SEQ ID NO: 2305255 - DNA, 25 bp, Homo sapien
ggctcaaagactttccctggaagtg

SEQ ID NO: 2305256 - DNA, 25 bp, Homo sapien
cctggaagtggaggtaaattgaatt

SEQ ID NO: 2305257 - DNA, 25 bp, Homo sapien
aaattgaattttgctgcttcaggct

SEQ ID NO: 2305258 - DNA, 25 bp, Homo sapien
tggtaataatgagtcccttgcccat

SEQ ID NO: 2305259 - DNA, 25 bp, Homo sapien
ccttacttcactggtgaggttggca

SEQ ID NO: 2305260 - DNA, 25 bp, Homo sapien
gaatgagggttcaaatattctactt

SEQ ID NO: 2305261 - DNA, 25 bp, Homo sapien
gagttgctgctctgcccatggtaat

SEQ ID NO: 2305262 - DNA, 25 bp, Homo sapien
ctctggaacttggtctcgctggtac

SEQ ID NO: 2305263 - DNA, 25 bp, Homo sapien
gattgttgccaaccttggaaactga

SEQ ID NO: 2305264 - DNA, 25 bp, Homo sapien
tggaaactgaaataggccatttcgc

SEQ ID NO: 2305265 - DNA, 25 bp, Homo sapien
tgatgcgtgaaaagacctgggcact

SEQ ID NO: 2305266 - DNA, 25 bp, Homo sapien
gaaatgctagattttgtgtaggagc

SEQ ID NO: 2305267 - DNA, 25 bp, Homo sapien
tgtaggagctaaagtcagatgactt

SEQ ID NO: 2305268 - DNA, 25 bp, Homo sapien
tgctagattttgtgtaggagctaaa

SEQ ID NO: 2305269 - DNA, 25 bp, Homo sapien
gggctttcaggtggaaatgctagat

SEQ ID NO: 2305270 - DNA, 25 bp, Homo sapien
gatatactggctacacctggtaggg

SEQ ID NO: 2305271 - DNA, 25 bp, Homo sapien
gcaactgtaattctggatgaggctc

SEQ ID NO: 2305272 - DNA, 25 bp, Homo sapien
ccctataggctgatgttcatgagaa

SEQ ID NO: 2305273 - DNA, 25 bp, Homo sapien
tctcaacaccttgaggaaccaaagg

SEQ ID NO: 2305274 - DNA, 25 bp, Homo sapien
tgcctgttctcagatctccagctgc

SEQ ID NO: 2305275 - DNA, 25 bp, Homo sapien
catagctcagagtaatttgatcgtc

SEQ ID NO: 2305276 - DNA, 25 bp, Homo sapien
gaggagaggcgctctgtgttttaga

SEQ ID NO: 2305277 - DNA, 25 bp, Homo sapien
atagctcagagtaatttgatcgtct

SEQ ID NO: 2305278 - DNA, 25 bp, Homo sapien
tgctggggaagacggcaattaggga

SEQ ID NO: 2305279 - DNA, 25 bp, Homo sapien
ctggggaagacggcaattagggagc

SEQ ID NO: 2305280 - DNA, 25 bp, Homo sapien
ggggaagacggcaattagggagcat

SEQ ID NO: 2305281 - DNA, 25 bp, Homo sapien
cttcactgggcccttcatacagggc

SEQ ID NO: 2305282 - DNA, 25 bp, Homo sapien
gtagcccaggttgcgagcaaaggct

SEQ ID NO: 2305283 - DNA, 25 bp, Homo sapien
ctcagggtagcccaggttgcgagca

SEQ ID NO: 2305284 - DNA, 25 bp, Homo sapien
cccaggttgcgagcaaaggctggaa

SEQ ID NO: 2305285 - DNA, 25 bp, Homo sapien
cagggtagcccaggttgcgagcaaa

SEQ ID NO: 2305286 - DNA, 25 bp, Homo sapien
tgatataaaagatctcggagggacc

SEQ ID NO: 2305287 - DNA, 25 bp, Homo sapien
ttctaatggcattgaaacccagggc

SEQ ID NO: 2305288 - DNA, 25 bp, Homo sapien
gacacatcaccgaaagcaacttgtt

SEQ ID NO: 2305289 - DNA, 25 bp, Homo sapien
tcagcacactgagcaattgtgagca

SEQ ID NO: 2305290 - DNA, 25 bp, Homo sapien
tccttcatctagttccctgtcacag

SEQ ID NO: 2305291 - DNA, 25 bp, Homo sapien
cctcacaaagaacactcccagattt

SEQ ID NO: 2305292 - DNA, 25 bp, Homo sapien
cagcttctcaagactccttcatcta

SEQ ID NO: 2305293 - DNA, 25 bp, Homo sapien
tgtgaccactcctgatcatcagctt

SEQ ID NO: 2305294 - DNA, 25 bp, Homo sapien
gaggggcttgcatggagaccttctg

SEQ ID NO: 2305295 - DNA, 25 bp, Homo sapien
aagtctattgttagatggcttaacc

SEQ ID NO: 2305296 - DNA, 25 bp, Homo sapien
tttctcagtgcttctacagttacag

SEQ ID NO: 2305297 - DNA, 25 bp, Homo sapien
gactcatcagttacttcagggaggg

SEQ ID NO: 2305298 - DNA, 25 bp, Homo sapien
taccaaacatagcaaaaactgatcc

SEQ ID NO: 2305299 - DNA, 25 bp, Homo sapien
tggcagattcaatgctaccaaacat

SEQ ID NO: 2305300 - DNA, 25 bp, Homo sapien
tggcaaagtaatcttccttgaaaag

SEQ ID NO: 2305301 - DNA, 25 bp, Homo sapien
cagattcaatgctaccaaacatagc

SEQ ID NO: 2305302 - DNA, 25 bp, Homo sapien
gactctcagggaactttacgtagct

SEQ ID NO: 2305303 - DNA, 25 bp, Homo sapien
gaatagtaagctgtaagaaccctga

SEQ ID NO: 2305304 - DNA, 25 bp, Homo sapien
tagcatctgcaagtgcctacaaaag

SEQ ID NO: 2305305 - DNA, 25 bp, Homo sapien
cgttggtccctctaacagctgcagg

SEQ ID NO: 2305306 - DNA, 25 bp, Homo sapien
tcccttcctccttagtgaataaaca

SEQ ID NO: 2305307 - DNA, 25 bp, Homo sapien
tttagctgggcacattttgcacagg

SEQ ID NO: 2305308 - DNA, 25 bp, Homo sapien
agctgggcacattttgcacaggtaa

SEQ ID NO: 2305309 - DNA, 25 bp, Homo sapien
aaagaaccacattgaccagcctttc

SEQ ID NO: 2305310 - DNA, 25 bp, Homo sapien
atcaagttagaaacgactgcctttg

SEQ ID NO: 2305311 - DNA, 25 bp, Homo sapien
agttagaaacgactgcctttgttct

SEQ ID NO: 2305312 - DNA, 25 bp, Homo sapien
caagttagaaacgactgcctttgtt

SEQ ID NO: 2305313 - DNA, 25 bp, Homo sapien
tcaagttagaaacgactgcctttgt

SEQ ID NO: 2305314 - DNA, 25 bp, Homo sapien
tgcttcataatgctctatgatgatg

SEQ ID NO: 2305315 - DNA, 25 bp, Homo sapien
tgctctatgatgatgccagcaagag

SEQ ID NO: 2305316 - DNA, 25 bp, Homo sapien
ccagcaagaggtttaggaagccagc

SEQ ID NO: 2305317 - DNA, 25 bp, Homo sapien
tttgctgatgtaagtctgaaaacct

SEQ ID NO: 2305318 - DNA, 25 bp, Homo sapien
tagatttgaccccatgaagtttagg

SEQ ID NO: 2305319 - DNA, 25 bp, Homo sapien
catggtccattaccctttctttaga

SEQ ID NO: 2305320 - DNA, 25 bp, Homo sapien
caggtctattaagctggacctcatg

SEQ ID NO: 2305321 - DNA, 25 bp, Homo sapien
gctgctgtgttaatatcaggtctat

SEQ ID NO: 2305322 - DNA, 25 bp, Homo sapien
gatgatgtcgttaatgttaatttac

SEQ ID NO: 2305323 - DNA, 25 bp, Homo sapien
ttgcatcatatgaactgaagttcca

SEQ ID NO: 2305324 - DNA, 25 bp, Homo sapien
tttcattgcatcatatgaactgaag

SEQ ID NO: 2305325 - DNA, 25 bp, Homo sapien
ccatgagagagtgagtgatgatgtc

SEQ ID NO: 2305326 - DNA, 25 bp, Homo sapien
cttgccagttgtctaagttagaaag

SEQ ID NO: 2305327 - DNA, 25 bp, Homo sapien
tcttgccagttgtctaagttagaaa

SEQ ID NO: 2305328 - DNA, 25 bp, Homo sapien
aagcctacggcacttagtattccaa

SEQ ID NO: 2305329 - DNA, 25 bp, Homo sapien
tctaagtactaatcaggcttgaccc

SEQ ID NO: 2305330 - DNA, 25 bp, Homo sapien
ttagtattccaaggaggtctcccat

SEQ ID NO: 2305331 - DNA, 25 bp, Homo sapien
tcagatgagatagggatgttcagga

SEQ ID NO: 2305332 - DNA, 25 bp, Homo sapien
ggtgaagaagaagcacattatcagc

SEQ ID NO: 2305333 - DNA, 25 bp, Homo sapien
agaagaagcacattatcagcagcag

SEQ ID NO: 2305334 - DNA, 25 bp, Homo sapien
agcagaaatggtttctgggaattta

SEQ ID NO: 2305335 - DNA, 25 bp, Homo sapien
gtttctgggaatttattatcagtca

SEQ ID NO: 2305336 - DNA, 25 bp, Homo sapien
cccaggaccgccttgaaggaagcag

SEQ ID NO: 2305337 - DNA, 25 bp, Homo sapien
gatttgtgccctacgacaagtccac

SEQ ID NO: 2305338 - DNA, 25 bp, Homo sapien
gacaagtccacaggagaaagcccag

SEQ ID NO: 2305339 - DNA, 25 bp, Homo sapien
ccaacttatggagatggtgctgctg

SEQ ID NO: 2305340 - DNA, 25 bp, Homo sapien
gaaattttcgggtcgtgattctatc

SEQ ID NO: 2305341 - DNA, 25 bp, Homo sapien
cagtgtagtaactaggaaattttcg

SEQ ID NO: 2305342 - DNA, 25 bp, Homo sapien
ggacagagggctttagttttggctc

SEQ ID NO: 2305343 - DNA, 25 bp, Homo sapien
tttccaatagtctggttgttcacag

SEQ ID NO: 2305344 - DNA, 25 bp, Homo sapien
ggccggtgggcgtgggctgagtggc

SEQ ID NO: 2305345 - DNA, 25 bp, Homo sapien
gggtgaggcaggtcgggcgtcccca

SEQ ID NO: 2305346 - DNA, 25 bp, Homo sapien
agcaccgggtgatggccctgctgct

SEQ ID NO: 2305347 - DNA, 25 bp, Homo sapien
gcagcaccgggtgatggccctgctg

SEQ ID NO: 2305348 - DNA, 25 bp, Homo sapien
tctcagctgtactcaaagctgttat

SEQ ID NO: 2305349 - DNA, 25 bp, Homo sapien
tagtagcacaactgactgatctatc

SEQ ID NO: 2305350 - DNA, 25 bp, Homo sapien
gactgatctatcttctacctcttct

SEQ ID NO: 2305351 - DNA, 25 bp, Homo sapien
ccctccttccctgataggataggac

SEQ ID NO: 2305352 - DNA, 25 bp, Homo sapien
cagtctttaggagcttttagactct

SEQ ID NO: 2305353 - DNA, 25 bp, Homo sapien
tctttaggagcttttagactcttca

SEQ ID NO: 2305354 - DNA, 25 bp, Homo sapien
ctgcagtctttaggagcttttagac

SEQ ID NO: 2305355 - DNA, 25 bp, Homo sapien
gcagtctttaggagcttttagactc

SEQ ID NO: 2305356 - DNA, 25 bp, Homo sapien
atgacagtcttacttggaacctgct

SEQ ID NO: 2305357 - DNA, 25 bp, Homo sapien
tccatgacagtcttacttggaacct

SEQ ID NO: 2305358 - DNA, 25 bp, Homo sapien
acagtcttacttggaacctgctgct

SEQ ID NO: 2305359 - DNA, 25 bp, Homo sapien
cagtcttacttggaacctgctgctg

SEQ ID NO: 2305360 - DNA, 25 bp, Homo sapien
tccatgtgctgtattgggccagccc

SEQ ID NO: 2305361 - DNA, 25 bp, Homo sapien
aatgatgccaatttgcctccctcca

SEQ ID NO: 2305362 - DNA, 25 bp, Homo sapien
atgtgctgtattgggccagccctcc

SEQ ID NO: 2305363 - DNA, 25 bp, Homo sapien
caatgatgccaatttgcctccctcc

SEQ ID NO: 2305364 - DNA, 25 bp, Homo sapien
acaactgcagaaccctggaaggcga

SEQ ID NO: 2305365 - DNA, 25 bp, Homo sapien
gagcattgatcccaaacagggcagc

SEQ ID NO: 2305366 - DNA, 25 bp, Homo sapien
cagggcagcttttcgttccaaggtc

SEQ ID NO: 2305367 - DNA, 25 bp, Homo sapien
taaattactctagctccgaagtggg

SEQ ID NO: 2305368 - DNA, 25 bp, Homo sapien
gcggctccgaacttggcgcgaagtt

SEQ ID NO: 2305369 - DNA, 25 bp, Homo sapien
cccggttttacgaggcgcgcagaag

SEQ ID NO: 2305370 - DNA, 25 bp, Homo sapien
cggctcgctgcggaatgattgaact

SEQ ID NO: 2305371 - DNA, 25 bp, Homo sapien
ccgggttccagaacggcgcggctct

SEQ ID NO: 2305372 - DNA, 25 bp, Homo sapien
ctcctcctccatttgtagcaaaaca

SEQ ID NO: 2305373 - DNA, 25 bp, Homo sapien
ctccatttgtagcaaaacattcctg

SEQ ID NO: 2305374 - DNA, 25 bp, Homo sapien
tcctccatttgtagcaaaacattcc

SEQ ID NO: 2305375 - DNA, 25 bp, Homo sapien
ccatttgtagcaaaacattcctgct

SEQ ID NO: 2305376 - DNA, 25 bp, Homo sapien
tgcccggagcggccgagcgtctcgg

SEQ ID NO: 2305377 - DNA, 25 bp, Homo sapien
ttcttcccgcgtcggctcgggctct

SEQ ID NO: 2305378 - DNA, 25 bp, Homo sapien
tctcggccaacctcccccgcggaga

SEQ ID NO: 2305379 - DNA, 25 bp, Homo sapien
cagccggggacagcgggcttcctcc

SEQ ID NO: 2305380 - DNA, 25 bp, Homo sapien
gtctgggagtcaatgctacagtgag

SEQ ID NO: 2305381 - DNA, 25 bp, Homo sapien
gccatgattgcgctactccactact

SEQ ID NO: 2305382 - DNA, 25 bp, Homo sapien
agtctgggagtcaatgctacagtga

SEQ ID NO: 2305383 - DNA, 25 bp, Homo sapien
gattgcgctactccactactgcact

SEQ ID NO: 2305384 - DNA, 25 bp, Homo sapien
tcccactagcgaacagtgagctctg

SEQ ID NO: 2305385 - DNA, 25 bp, Homo sapien
tgacaactggcaaggtggaacgtga

SEQ ID NO: 2305386 - DNA, 25 bp, Homo sapien
tctgtaatacccacacttagctggg

SEQ ID NO: 2305387 - DNA, 25 bp, Homo sapien
tcatcccggaccctgagaaaagatc

SEQ ID NO: 2305388 - DNA, 25 bp, Homo sapien
ccagagcatgtccataaaggctgta

SEQ ID NO: 2305389 - DNA, 25 bp, Homo sapien
ttagatgaaattgggaaagaattac

SEQ ID NO: 2305390 - DNA, 25 bp, Homo sapien
caggttgaagcgctgtcagggctca

SEQ ID NO: 2305391 - DNA, 25 bp, Homo sapien
ttttttaagtaaccagagcatgtcc

SEQ ID NO: 2305392 - DNA, 25 bp, Homo sapien
cccaggcaatgatgatccacaacat

SEQ ID NO: 2305393 - DNA, 25 bp, Homo sapien
tcatggatctggcagatactgcctc

SEQ ID NO: 2305394 - DNA, 25 bp, Homo sapien
gagccaaagtcatggatctggcaga

SEQ ID NO: 2305395 - DNA, 25 bp, Homo sapien
gcaatgatgatccacaacatcccca

SEQ ID NO: 2305396 - DNA, 25 bp, Homo sapien
cagatttgaggagacgagattggaa

SEQ ID NO: 2305397 - DNA, 25 bp, Homo sapien
tgttttcccatatagagagcacata

SEQ ID NO: 2305398 - DNA, 25 bp, Homo sapien
gctttggacagataaatttggcaac

SEQ ID NO: 2305399 - DNA, 25 bp, Homo sapien
ttggcaacagtatgaaggaagacag

SEQ ID NO: 2305400 - DNA, 25 bp, Homo sapien
aacctatagtctttaacttgcaaag

SEQ ID NO: 2305401 - DNA, 25 bp, Homo sapien
tagaaccacagactttgcctataga

SEQ ID NO: 2305402 - DNA, 25 bp, Homo sapien
caacccaaagataaatatgtggtac

SEQ ID NO: 2305403 - DNA, 25 bp, Homo sapien
tgcaaagatttgtaagtgggttaag

SEQ ID NO: 2305404 - DNA, 25 bp, Homo sapien
atgagcggccaggcgtcctggtctc

SEQ ID NO: 2305405 - DNA, 25 bp, Homo sapien
aatgagcggccaggcgtcctggtct

SEQ ID NO: 2305406 - DNA, 25 bp, Homo sapien
tgagcggccaggcgtcctggtctcc

SEQ ID NO: 2305407 - DNA, 25 bp, Homo sapien
caatgagcggccaggcgtcctggtc

SEQ ID NO: 2305408 - DNA, 25 bp, Homo sapien
tgcacttaatctcaaggctgccgct

SEQ ID NO: 2305409 - DNA, 25 bp, Homo sapien
taatctcaaggctgccgctgttagc

SEQ ID NO: 2305410 - DNA, 25 bp, Homo sapien
cagagcctctgcattgcacttaatc

SEQ ID NO: 2305411 - DNA, 25 bp, Homo sapien
gagcctctgcattgcacttaatctc

SEQ ID NO: 2305412 - DNA, 25 bp, Homo sapien
tatgaggagtcagaaaaggcctcct

SEQ ID NO: 2305413 - DNA, 25 bp, Homo sapien
tgagtatgaggagtcagaaaaggcc

SEQ ID NO: 2305414 - DNA, 25 bp, Homo sapien
agtcagaaaaggcctcctggaggca

SEQ ID NO: 2305415 - DNA, 25 bp, Homo sapien
caggctggatgggaggtgagtatga

SEQ ID NO: 2305416 - DNA, 25 bp, Homo sapien
cagaagcaggatatccagatcaggc

SEQ ID NO: 2305417 - DNA, 25 bp, Homo sapien
ccgcaatggctatcttaactaagga

SEQ ID NO: 2305418 - DNA, 25 bp, Homo sapien
aaacagggaaggagtcaagtgcaac

SEQ ID NO: 2305419 - DNA, 25 bp, Homo sapien
caagtgcaactctatcagtagaagc

SEQ ID NO: 2305420 - DNA, 25 bp, Homo sapien
gaacgttgctcttttcgcatgtgga

SEQ ID NO: 2305421 - DNA, 25 bp, Homo sapien
caaaaaccagttgggccattgacat

SEQ ID NO: 2305422 - DNA, 25 bp, Homo sapien
tagctcttgcacgtgggttaatcca

SEQ ID NO: 2305423 - DNA, 25 bp, Homo sapien
tcctcattgagtgtatctggcacgc

SEQ ID NO: 2305424 - DNA, 25 bp, Homo sapien
aaacattccacagcagaacaaaagg

SEQ ID NO: 2305425 - DNA, 25 bp, Homo sapien
tctaccttaagtgacaactctgaag

SEQ ID NO: 2305426 - DNA, 25 bp, Homo sapien
tgagaagagtttcagtaagcacaat

SEQ ID NO: 2305427 - DNA, 25 bp, Homo sapien
gacaattcggtgagtccttgacgct

SEQ ID NO: 2305428 - DNA, 25 bp, Homo sapien
tctggatggatcagtctcttaccca

SEQ ID NO: 2305429 - DNA, 25 bp, Homo sapien
ccaaaagcgggagccattcttgacc

SEQ ID NO: 2305430 - DNA, 25 bp, Homo sapien
ttcgaataactacaacgttctgggc

SEQ ID NO: 2305431 - DNA, 25 bp, Homo sapien
tggccagggtccagtactatacatt

SEQ ID NO: 2305432 - DNA, 25 bp, Homo sapien
cttccggcctggattcaattttagg

SEQ ID NO: 2305433 - DNA, 25 bp, Homo sapien
cgcttccggcctggattcaatttta

SEQ ID NO: 2305434 - DNA, 25 bp, Homo sapien
tgagtcaccgcttccggcctggatt

SEQ ID NO: 2305435 - DNA, 25 bp, Homo sapien
accgcttccggcctggattcaattt

SEQ ID NO: 2305436 - DNA, 25 bp, Homo sapien
gggttcgaaaatcatgctgactttc

SEQ ID NO: 2305437 - DNA, 25 bp, Homo sapien
aactccggggttcgaaaatcatgct

SEQ ID NO: 2305438 - DNA, 25 bp, Homo sapien
gactttccagtgatcccaaatcggg

SEQ ID NO: 2305439 - DNA, 25 bp, Homo sapien
gctgactttccagtgatcccaaatc

SEQ ID NO: 2305440 - DNA, 25 bp, Homo sapien
tgggagtacactggctaagctgatg

SEQ ID NO: 2305441 - DNA, 25 bp, Homo sapien
aaggcaccacttctacaccttctgt

SEQ ID NO: 2305442 - DNA, 25 bp, Homo sapien
caccttctgtttgtttaccatggag

SEQ ID NO: 2305443 - DNA, 25 bp, Homo sapien
gacagcagtttatgtttactgtgga

SEQ ID NO: 2305444 - DNA, 25 bp, Homo sapien
tggcatttgcctgcctatacaatgg

SEQ ID NO: 2305445 - DNA, 25 bp, Homo sapien
cctggcatttgcctgcctatacaat

SEQ ID NO: 2305446 - DNA, 25 bp, Homo sapien
catttgcctgcctatacaatgggag

SEQ ID NO: 2305447 - DNA, 25 bp, Homo sapien
tgcctgcctatacaatgggagccac

SEQ ID NO: 2305448 - DNA, 25 bp, Homo sapien
tagtttagctaaacttatctgcctc

SEQ ID NO: 2305449 - DNA, 25 bp, Homo sapien
catagtttagctaaacttatctgcc

SEQ ID NO: 2305450 - DNA, 25 bp, Homo sapien
tttttgcatagtttagctaaactta

SEQ ID NO: 2305451 - DNA, 25 bp, Homo sapien
tgcatagtttagctaaacttatctg

SEQ ID NO: 2305452 - DNA, 25 bp, Homo sapien
tgactgccccttagatctcctttgc

SEQ ID NO: 2305453 - DNA, 25 bp, Homo sapien
gagttcctgggtcaatgtcaacaga

SEQ ID NO: 2305454 - DNA, 25 bp, Homo sapien
tgtcaacagagtcagagtttctaga

SEQ ID NO: 2305455 - DNA, 25 bp, Homo sapien
tgtactcaggcaactggcccatctg

SEQ ID NO: 2305456 - DNA, 25 bp, Homo sapien
tataaacctaatactcttttgccat

SEQ ID NO: 2305457 - DNA, 25 bp, Homo sapien
ctgtgacacttaattaatgggacat

SEQ ID NO: 2305458 - DNA, 25 bp, Homo sapien
gagtcagttacacaaaatctcaggg

SEQ ID NO: 2305459 - DNA, 25 bp, Homo sapien
taactcttccttgggatcacatgtg

SEQ ID NO: 2305460 - DNA, 25 bp, Homo sapien
aatgtttctcagtcaccgtgcagtc

SEQ ID NO: 2305461 - DNA, 25 bp, Homo sapien
ggaaaagcgacttgtccacagaggt

SEQ ID NO: 2305462 - DNA, 25 bp, Homo sapien
cagggttgcatggaaaaacagggtt

SEQ ID NO: 2305463 - DNA, 25 bp, Homo sapien
tagggcaaccttcagaatagctttc

SEQ ID NO: 2305464 - DNA, 25 bp, Homo sapien
aaccaaccaaccagcgtcaactgca

SEQ ID NO: 2305465 - DNA, 25 bp, Homo sapien
taacactgtcagacaataagatgat

SEQ ID NO: 2305466 - DNA, 25 bp, Homo sapien
ggtgaacagtatgcccactcttggc

SEQ ID NO: 2305467 - DNA, 25 bp, Homo sapien
gagcctgaggtgaacagtatgccca

SEQ ID NO: 2305468 - DNA, 25 bp, Homo sapien
taaacctgggtgtacattatggtca

SEQ ID NO: 2305469 - DNA, 25 bp, Homo sapien
ggcgagaactacaaccctaactgaa

SEQ ID NO: 2305470 - DNA, 25 bp, Homo sapien
agcttgggccttcatatttcaaaag

SEQ ID NO: 2305471 - DNA, 25 bp, Homo sapien
tactaagaccaagataagcacatga

SEQ ID NO: 2305472 - DNA, 25 bp, Homo sapien
gtgttgggtacattcacatagctca

SEQ ID NO: 2305473 - DNA, 25 bp, Homo sapien
ctggaatgagaaccacatctgtaca

SEQ ID NO: 2305474 - DNA, 25 bp, Homo sapien
tggaatgagaaccacatctgtacat

SEQ ID NO: 2305475 - DNA, 25 bp, Homo sapien
ctcacggaagttaagttctgaagaa

SEQ ID NO: 2305476 - DNA, 25 bp, Homo sapien
tcatcctcatatactagaacaaagt

SEQ ID NO: 2305477 - DNA, 25 bp, Homo sapien
cctcatatactagaacaaagtcaat

SEQ ID NO: 2305478 - DNA, 25 bp, Homo sapien
catcctcatatactagaacaaagtc

SEQ ID NO: 2305479 - DNA, 25 bp, Homo sapien
tcctcatatactagaacaaagtcaa

SEQ ID NO: 2305480 - DNA, 25 bp, Homo sapien
tccactaagcatttcttttgaacgt

SEQ ID NO: 2305481 - DNA, 25 bp, Homo sapien
tacacagtaatagtactgattgtaa

SEQ ID NO: 2305482 - DNA, 25 bp, Homo sapien
acagtaatagtactgattgtaaaca

SEQ ID NO: 2305483 - DNA, 25 bp, Homo sapien
cacagtaatagtactgattgtaaac

SEQ ID NO: 2305484 - DNA, 25 bp, Homo sapien
acacagtaatagtactgattgtaaa

SEQ ID NO: 2305485 - DNA, 25 bp, Homo sapien
taaaatgtttaaacgaggctcactg

SEQ ID NO: 2305486 - DNA, 25 bp, Homo sapien
taaatgaatacctgaggccacacaa

SEQ ID NO: 2305487 - DNA, 25 bp, Homo sapien
tgactgtaatcactgaggacctagg

SEQ ID NO: 2305488 - DNA, 25 bp, Homo sapien
tatctatgtgccttactggaaacct

SEQ ID NO: 2305489 - DNA, 25 bp, Homo sapien
tgatatctgatggatatctatcttt

SEQ ID NO: 2305490 - DNA, 25 bp, Homo sapien
tatctgatggatatctatcttttcc

SEQ ID NO: 2305491 - DNA, 25 bp, Homo sapien
gatatctgatggatatctatctttt

SEQ ID NO: 2305492 - DNA, 25 bp, Homo sapien
tttgatatctgatggatatctatct

SEQ ID NO: 2305493 - DNA, 25 bp, Homo sapien
gacatgtaagtgttggatccccaag

SEQ ID NO: 2305494 - DNA, 25 bp, Homo sapien
tctgagtcctattcactgatacgag

SEQ ID NO: 2305495 - DNA, 25 bp, Homo sapien
gagggtacttcgatgccctggcacc

SEQ ID NO: 2305496 - DNA, 25 bp, Homo sapien
gctttgacacaatcccacgtacttt

SEQ ID NO: 2305497 - DNA, 25 bp, Homo sapien
gaatatatgttagacctttagttta

SEQ ID NO: 2305498 - DNA, 25 bp, Homo sapien
aaagaagttggaatatatgttagac

SEQ ID NO: 2305499 - DNA, 25 bp, Homo sapien
gttggaatatatgttagacctttag

SEQ ID NO: 2305500 - DNA, 25 bp, Homo sapien
agaagttggaatatatgttagacct

SEQ ID NO: 2305501 - DNA, 25 bp, Homo sapien
gttgcttctaactgcaggccatgac

SEQ ID NO: 2305502 - DNA, 25 bp, Homo sapien
tgcaggccatgacagataaggttag

SEQ ID NO: 2305503 - DNA, 25 bp, Homo sapien
gacagataaggttagattcgtatgc

SEQ ID NO: 2305504 - DNA, 25 bp, Homo sapien
taaggttagattcgtatgcttgtct

SEQ ID NO: 2305505 - DNA, 25 bp, Homo sapien
taaaacagctcagaaggactgcaaa

SEQ ID NO: 2305506 - DNA, 25 bp, Homo sapien
ccaagtattccaagtggcacgaagc

SEQ ID NO: 2305507 - DNA, 25 bp, Homo sapien
gcatgtttccaatgtcacccaagta

SEQ ID NO: 2305508 - DNA, 25 bp, Homo sapien
tctatgactaagatgtggccagggc

SEQ ID NO: 2305509 - DNA, 25 bp, Homo sapien
gatgatgctttcgtctacactgagg

SEQ ID NO: 2305510 - DNA, 25 bp, Homo sapien
gaggaccggtttttcagatcattgg

SEQ ID NO: 2305511 - DNA, 25 bp, Homo sapien
aaccagttgagtgtaccaaaggctg

SEQ ID NO: 2305512 - DNA, 25 bp, Homo sapien
tacataacacctcccatggtgcgtg

SEQ ID NO: 2305513 - DNA, 25 bp, Homo sapien
tcacttgatacttgacccgagagag

SEQ ID NO: 2305514 - DNA, 25 bp, Homo sapien
ttgacccgagagaggatgaagtaaa

SEQ ID NO: 2305515 - DNA, 25 bp, Homo sapien
gagtttacaagtctgttgatcccaa

SEQ ID NO: 2305516 - DNA, 25 bp, Homo sapien
tgatcccaaacttgctaacattgtt

SEQ ID NO: 2305517 - DNA, 25 bp, Homo sapien
tctcaaataccacatgggaccattt

SEQ ID NO: 2305518 - DNA, 25 bp, Homo sapien
catttgttagcctgaatacaggacc

SEQ ID NO: 2305519 - DNA, 25 bp, Homo sapien
gggaccatttgttagcctgaataca

SEQ ID NO: 2305520 - DNA, 25 bp, Homo sapien
catgggaccatttgttagcctgaat

SEQ ID NO: 2305521 - DNA, 25 bp, Homo sapien
gatgagcccattctctgtacagaag

SEQ ID NO: 2305522 - DNA, 25 bp, Homo sapien
ttgtatatgcttcgaggatgagccc

SEQ ID NO: 2305523 - DNA, 25 bp, Homo sapien
cgttcattagggcagctgggatcct

SEQ ID NO: 2305524 - DNA, 25 bp, Homo sapien
gaaggtaccgttcattagggcagct

SEQ ID NO: 2305525 - DNA, 25 bp, Homo sapien
gtctaaactcttttcggcgctcctg

SEQ ID NO: 2305526 - DNA, 25 bp, Homo sapien
tctcagggccactgtacaagctgcc

SEQ ID NO: 2305527 - DNA, 25 bp, Homo sapien
tgtttctcactagcactggtctctg

SEQ ID NO: 2305528 - DNA, 25 bp, Homo sapien
caagctgcccctattcctagaagga

SEQ ID NO: 2305529 - DNA, 25 bp, Homo sapien
tctcaagtaggtggcaagtgcatgg

SEQ ID NO: 2305530 - DNA, 25 bp, Homo sapien
taaacaagtcctgtcgacccgactc

SEQ ID NO: 2305531 - DNA, 25 bp, Homo sapien
cagacagacatgaagttaactctcc

SEQ ID NO: 2305532 - DNA, 25 bp, Homo sapien
tagaagctaatgaaacgacgtgaca

SEQ ID NO: 2305533 - DNA, 25 bp, Homo sapien
aaggtctgagaccagttccatgggt

SEQ ID NO: 2305534 - DNA, 25 bp, Homo sapien
gaaggtctgagaccagttccatggg

SEQ ID NO: 2305535 - DNA, 25 bp, Homo sapien
ggaaggtctgagaccagttccatgg

SEQ ID NO: 2305536 - DNA, 25 bp, Homo sapien
gccactcctacaactgcggccagga

SEQ ID NO: 2305537 - DNA, 25 bp, Homo sapien
actcctacaactgcggccaggagaa

SEQ ID NO: 2305538 - DNA, 25 bp, Homo sapien
cactcctacaactgcggccaggaga

SEQ ID NO: 2305539 - DNA, 25 bp, Homo sapien
agattccaatcttctctccatagta

SEQ ID NO: 2305540 - DNA, 25 bp, Homo sapien
taatattgagtttccagaatggaca

SEQ ID NO: 2305541 - DNA, 25 bp, Homo sapien
gacaaagcctatcacactgaggaca

SEQ ID NO: 2305542 - DNA, 25 bp, Homo sapien
tttgaggactcgcaagtaatattga

SEQ ID NO: 2305543 - DNA, 25 bp, Homo sapien
actgaggacacattatgatcttgcc

SEQ ID NO: 2305544 - DNA, 25 bp, Homo sapien
gtcagagggtaagtttcagaattcc

SEQ ID NO: 2305545 - DNA, 25 bp, Homo sapien
cctggtcagagggtaagtttcagaa

SEQ ID NO: 2305546 - DNA, 25 bp, Homo sapien
ggtttatctcgaagtggctctcctc

SEQ ID NO: 2305547 - DNA, 25 bp, Homo sapien
tttcctgttaagagacgtacaaagc

SEQ ID NO: 2305548 - DNA, 25 bp, Homo sapien
taaatactgcaaagaccagggttcc

SEQ ID NO: 2305549 - DNA, 25 bp, Homo sapien
ataaatactgcaaagaccagggttc

SEQ ID NO: 2305550 - DNA, 25 bp, Homo sapien
caaaactgtcgaagatgcacaattt

SEQ ID NO: 2305551 - DNA, 25 bp, Homo sapien
agggttccaaaactgtcgaagatgc

SEQ ID NO: 2305552 - DNA, 25 bp, Homo sapien
gaccgtgcatgatcacagacagaaa

SEQ ID NO: 2305553 - DNA, 25 bp, Homo sapien
cctggggtgaccgtgcatgatcaca

SEQ ID NO: 2305554 - DNA, 25 bp, Homo sapien
cagacagaaatttctgttccgtatc

SEQ ID NO: 2305555 - DNA, 25 bp, Homo sapien
gtgtgtcccagattgagggcaccaa

SEQ ID NO: 2305556 - DNA, 25 bp, Homo sapien
gaaggaatgagaagttgctttctat

SEQ ID NO: 2305557 - DNA, 25 bp, Homo sapien
aaggaatgagaagttgctttctatg

SEQ ID NO: 2305558 - DNA, 25 bp, Homo sapien
aatgcaggaggcagtcttgggatgc

SEQ ID NO: 2305559 - DNA, 25 bp, Homo sapien
tgaaatgcaggaggcagtcttggga

SEQ ID NO: 2305560 - DNA, 25 bp, Homo sapien
ctgaaatgcaggaggcagtcttggg

SEQ ID NO: 2305561 - DNA, 25 bp, Homo sapien
tgcaggaggcagtcttgggatgcac

SEQ ID NO: 2305562 - DNA, 25 bp, Homo sapien
gccagaatgaaatcctgcagaccct

SEQ ID NO: 2305563 - DNA, 25 bp, Homo sapien
ccagaatgaaatcctgcagaccctg

SEQ ID NO: 2305564 - DNA, 25 bp, Homo sapien
agtagagagtgaagagagccagaat

SEQ ID NO: 2305565 - DNA, 25 bp, Homo sapien
gagccagaatgaaatcctgcagacc

SEQ ID NO: 2305566 - DNA, 25 bp, Homo sapien
gagtaatctcatttatcactacgtg

SEQ ID NO: 2305567 - DNA, 25 bp, Homo sapien
tcactacgtgagtacatcgtgcttc

SEQ ID NO: 2305568 - DNA, 25 bp, Homo sapien
tcgtattctggtcgggcttgttctt

SEQ ID NO: 2305569 - DNA, 25 bp, Homo sapien
tcctgctgtaactcaacagtatccc

SEQ ID NO: 2305570 - DNA, 25 bp, Homo sapien
tgcacctaaatacgaccctgcttac

SEQ ID NO: 2305571 - DNA, 25 bp, Homo sapien
ccagaaaaagacagcactggcacag

SEQ ID NO: 2305572 - DNA, 25 bp, Homo sapien
ctggcacagagggttatccgtatac

SEQ ID NO: 2305573 - DNA, 25 bp, Homo sapien
cagcactggcacagagggttatccg

SEQ ID NO: 2305574 - DNA, 25 bp, Homo sapien
gcacagagggttatccgtatacatt

SEQ ID NO: 2305575 - DNA, 25 bp, Homo sapien
gaactcacacttaacaaggtgtgtg

SEQ ID NO: 2305576 - DNA, 25 bp, Homo sapien
tctcacataagtgataccagcggtg

SEQ ID NO: 2305577 - DNA, 25 bp, Homo sapien
tgaactcacacttaacaaggtgtgt

SEQ ID NO: 2305578 - DNA, 25 bp, Homo sapien
taagtgataccagcggtggtagaaa

SEQ ID NO: 2305579 - DNA, 25 bp, Homo sapien
agcacaacaaacacagtagcatgag

SEQ ID NO: 2305580 - DNA, 25 bp, Homo sapien
caacaaacacagtagcatgagactc

SEQ ID NO: 2305581 - DNA, 25 bp, Homo sapien
aacacagtagcatgagactcaccaa

SEQ ID NO: 2305582 - DNA, 25 bp, Homo sapien
cagtagcatgagactcaccaataac

SEQ ID NO: 2305583 - DNA, 25 bp, Homo sapien
gaaaatacaatgaacaccgagagcc

SEQ ID NO: 2305584 - DNA, 25 bp, Homo sapien
tctgtggagtcaggtatttctggat

SEQ ID NO: 2305585 - DNA, 25 bp, Homo sapien
caatgatcccaataactgaagcgat

SEQ ID NO: 2305586 - DNA, 25 bp, Homo sapien
cgaagttagtaatcataattgccac

SEQ ID NO: 2305587 - DNA, 25 bp, Homo sapien
aagcatgaagagtagtagttgacaa

SEQ ID NO: 2305588 - DNA, 25 bp, Homo sapien
gaggctgttctcataatcagtctgg

SEQ ID NO: 2305589 - DNA, 25 bp, Homo sapien
cctggatagcctacaaatttgccct

SEQ ID NO: 2305590 - DNA, 25 bp, Homo sapien
caaccaataaactgggtctcctgga

SEQ ID NO: 2305591 - DNA, 25 bp, Homo sapien
ggcaataatacttcttgtatgttat

SEQ ID NO: 2305592 - DNA, 25 bp, Homo sapien
tgattattgtcagctgagttgtcag

SEQ ID NO: 2305593 - DNA, 25 bp, Homo sapien
cctcccatgattattgtcagctgag

SEQ ID NO: 2305594 - DNA, 25 bp, Homo sapien
ttttcctcccatgattattgtcagc

SEQ ID NO: 2305595 - DNA, 25 bp, Homo sapien
gatctaacatctggatacactggct

SEQ ID NO: 2305596 - DNA, 25 bp, Homo sapien
aaacatgtgggtgtggacttcaaac

SEQ ID NO: 2305597 - DNA, 25 bp, Homo sapien
cagaagaggcataacaacaactcca

SEQ ID NO: 2305598 - DNA, 25 bp, Homo sapien
actccaaatacagatctaacatctg

SEQ ID NO: 2305599 - DNA, 25 bp, Homo sapien
tgtgaaatcgcccaattagattcat

SEQ ID NO: 2305600 - DNA, 25 bp, Homo sapien
agtttgcccataggctgcagatggt

SEQ ID NO: 2305601 - DNA, 25 bp, Homo sapien
cccatcgtggggttatcttttctga

SEQ ID NO: 2305602 - DNA, 25 bp, Homo sapien
cataggctgcagatggtagtcctgt

SEQ ID NO: 2305603 - DNA, 25 bp, Homo sapien
gctctagcagaggacgcagtagctg

SEQ ID NO: 2305604 - DNA, 25 bp, Homo sapien
agtagctgcctccatcgggctcggt

SEQ ID NO: 2305605 - DNA, 25 bp, Homo sapien
aggcactggcgctctagcagaggac

SEQ ID NO: 2305606 - DNA, 25 bp, Homo sapien
acagagcgtataccaccacggcagg

SEQ ID NO: 2305607 - DNA, 25 bp, Homo sapien
ttgatattcctgctaggcatgcctg

SEQ ID NO: 2305608 - DNA, 25 bp, Homo sapien
attcctgctaggcatgcctgattca

SEQ ID NO: 2305609 - DNA, 25 bp, Homo sapien
tcctgctaggcatgcctgattcacc

SEQ ID NO: 2305610 - DNA, 25 bp, Homo sapien
gatattcctgctaggcatgcctgat

SEQ ID NO: 2305611 - DNA, 25 bp, Homo sapien
caaattcctctgaagcaacgttatc

SEQ ID NO: 2305612 - DNA, 25 bp, Homo sapien
aattcctctgaagcaacgttatcat

SEQ ID NO: 2305613 - DNA, 25 bp, Homo sapien
ccaaattcctctgaagcaacgttat

SEQ ID NO: 2305614 - DNA, 25 bp, Homo sapien
aaattcctctgaagcaacgttatca

SEQ ID NO: 2305615 - DNA, 25 bp, Homo sapien
caacccaggtctagcaattaggact

SEQ ID NO: 2305616 - DNA, 25 bp, Homo sapien
acttcccaacccaggtctagcaatt

SEQ ID NO: 2305617 - DNA, 25 bp, Homo sapien
ttaggacttgtgtaggtgctggctc

SEQ ID NO: 2305618 - DNA, 25 bp, Homo sapien
tagctatagcactgcttccacttcc

SEQ ID NO: 2305619 - DNA, 25 bp, Homo sapien
aggaaacatctacagatatgtaact

SEQ ID NO: 2305620 - DNA, 25 bp, Homo sapien
cttcagaggaaacatctacagatat

SEQ ID NO: 2305621 - DNA, 25 bp, Homo sapien
cagaggaaacatctacagatatgta

SEQ ID NO: 2305622 - DNA, 25 bp, Homo sapien
aacatctacagatatgtaactaaaa

SEQ ID NO: 2305623 - DNA, 25 bp, Homo sapien
cagtccttgtggtcataataagtca

SEQ ID NO: 2305624 - DNA, 25 bp, Homo sapien
gaacaagcaaatgagtgagctcccc

SEQ ID NO: 2305625 - DNA, 25 bp, Homo sapien
tatcctcaagttttagaccctgccc

SEQ ID NO: 2305626 - DNA, 25 bp, Homo sapien
tccttgtttgtaattgacacggcct

SEQ ID NO: 2305627 - DNA, 25 bp, Homo sapien
tattgttcacgagagccaacagagg

SEQ ID NO: 2305628 - DNA, 25 bp, Homo sapien
gggctgccatgctccaatgtcttgg

SEQ ID NO: 2305629 - DNA, 25 bp, Homo sapien
taccaggcgtctaaactgggtggtc

SEQ ID NO: 2305630 - DNA, 25 bp, Homo sapien
gaggccacaaataaggtgacgaacc

SEQ ID NO: 2305631 - DNA, 25 bp, Homo sapien
ccatggtgtaggaagtgtggtcccc

SEQ ID NO: 2305632 - DNA, 25 bp, Homo sapien
cactaggcgggggatcatgtccgac

SEQ ID NO: 2305633 - DNA, 25 bp, Homo sapien
gaaggaccagtagtacactaggcgg

SEQ ID NO: 2305634 - DNA, 25 bp, Homo sapien
tgtccgacgtgaaagctatgatcat

SEQ ID NO: 2305635 - DNA, 25 bp, Homo sapien
agatggagagagtgttgttgatgta

SEQ ID NO: 2305636 - DNA, 25 bp, Homo sapien
gatggagagagtgttgttgatgtac

SEQ ID NO: 2305637 - DNA, 25 bp, Homo sapien
aagatggagagagtgttgttgatgt

SEQ ID NO: 2305638 - DNA, 25 bp, Homo sapien
gaagatggagagagtgttgttgatg

SEQ ID NO: 2305639 - DNA, 25 bp, Homo sapien
ggtatggttacccaggtcagagtac

SEQ ID NO: 2305640 - DNA, 25 bp, Homo sapien
tgtggtatggttacccaggtcagag

SEQ ID NO: 2305641 - DNA, 25 bp, Homo sapien
catgtggtatggttacccaggtcag

SEQ ID NO: 2305642 - DNA, 25 bp, Homo sapien
ctgcatgtggtatggttacccaggt

SEQ ID NO: 2305643 - DNA, 25 bp, Homo sapien
ccaggtgggtatcggaaatcacgat

SEQ ID NO: 2305644 - DNA, 25 bp, Homo sapien
tccatgacaatgataaaagccagct

SEQ ID NO: 2305645 - DNA, 25 bp, Homo sapien
catgccaatagtagatgttgtgttt

SEQ ID NO: 2305646 - DNA, 25 bp, Homo sapien
acaatgataaaagccagcttggctg

SEQ ID NO: 2305647 - DNA, 25 bp, Homo sapien
gaggacttactctatagtggaacaa

SEQ ID NO: 2305648 - DNA, 25 bp, Homo sapien
caaatgcagccctgttttgggtctc

SEQ ID NO: 2305649 - DNA, 25 bp, Homo sapien
ccttgaggttactgagggtccaaat

SEQ ID NO: 2305650 - DNA, 25 bp, Homo sapien
ccaataaaaaccacatggtctggtg

SEQ ID NO: 2305651 - DNA, 25 bp, Homo sapien
tggcaactcattcaacggcgctggc

SEQ ID NO: 2305652 - DNA, 25 bp, Homo sapien
gaataagtgactggcatagaacctg

SEQ ID NO: 2305653 - DNA, 25 bp, Homo sapien
gaatcgaggacagcatgtactggca

SEQ ID NO: 2305654 - DNA, 25 bp, Homo sapien
gatgacaaccaagggatgagtccca

SEQ ID NO: 2305655 - DNA, 25 bp, Homo sapien
ccaacttagtgattatgaaatggac

SEQ ID NO: 2305656 - DNA, 25 bp, Homo sapien
taaaccaacttagtgattatgaaat

SEQ ID NO: 2305657 - DNA, 25 bp, Homo sapien
tatgaaatggactttccctttggtc

SEQ ID NO: 2305658 - DNA, 25 bp, Homo sapien
gattatgaaatggactttccctttg

SEQ ID NO: 2305659 - DNA, 25 bp, Homo sapien
tgttcccctatgaacaggcattgag

SEQ ID NO: 2305660 - DNA, 25 bp, Homo sapien
tgaatcctagagcattatctgcaag

SEQ ID NO: 2305661 - DNA, 25 bp, Homo sapien
gctcaagtgatccagaagtatgcca

SEQ ID NO: 2305662 - DNA, 25 bp, Homo sapien
cttaaaaactaggatgctgacaatg

SEQ ID NO: 2305663 - DNA, 25 bp, Homo sapien
tgcgttttgatacatcgggaattgc

SEQ ID NO: 2305664 - DNA, 25 bp, Homo sapien
ttgatacatcgggaattgcatatga

SEQ ID NO: 2305665 - DNA, 25 bp, Homo sapien
ggatcttgctctttgtgcgttttga

SEQ ID NO: 2305666 - DNA, 25 bp, Homo sapien
gctctttgtgcgttttgatacatcg

SEQ ID NO: 2305667 - DNA, 25 bp, Homo sapien
atctactgcttctatcatccgctca

SEQ ID NO: 2305668 - DNA, 25 bp, Homo sapien
tgcttctatcatccgctcagctatc

SEQ ID NO: 2305669 - DNA, 25 bp, Homo sapien
gctatcacccccatatttttcgtca

SEQ ID NO: 2305670 - DNA, 25 bp, Homo sapien
ctgattttggccgtaaattgttatc

SEQ ID NO: 2305671 - DNA, 25 bp, Homo sapien
cctgattggctctagaggaggctaa

SEQ ID NO: 2305672 - DNA, 25 bp, Homo sapien
caacattgattaggcacggaacctc

SEQ ID NO: 2305673 - DNA, 25 bp, Homo sapien
tactgggcccagagtaacaggatgg

SEQ ID NO: 2305674 - DNA, 25 bp, Homo sapien
tggtttttaagcacactgagggact

SEQ ID NO: 2305675 - DNA, 25 bp, Homo sapien
gcctctgaagccacttacagatgca

SEQ ID NO: 2305676 - DNA, 25 bp, Homo sapien
tgccacacccatcaatttccccagg

SEQ ID NO: 2305677 - DNA, 25 bp, Homo sapien
caggctgaaggctagattctccctc

SEQ ID NO: 2305678 - DNA, 25 bp, Homo sapien
ctagtggttaacactggacaggctg

SEQ ID NO: 2305679 - DNA, 25 bp, Homo sapien
tgccacaatgtgtgaaaagcatcat

SEQ ID NO: 2305680 - DNA, 25 bp, Homo sapien
ggtacaagaagtgtttcaacaagag

SEQ ID NO: 2305681 - DNA, 25 bp, Homo sapien
ttcacaggcattaaaaaaggatata

SEQ ID NO: 2305682 - DNA, 25 bp, Homo sapien
tatgaaattcaaggcacacatgcaa

SEQ ID NO: 2305683 - DNA, 25 bp, Homo sapien
aagacatgccatgtctatatcattg

SEQ ID NO: 2305684 - DNA, 25 bp, Homo sapien
gcccaggttgatatataagaattga

SEQ ID NO: 2305685 - DNA, 25 bp, Homo sapien
tcaacgtgctttcaggcttgcccag

SEQ ID NO: 2305686 - DNA, 25 bp, Homo sapien
ctgaggaagtgagagagccttactg

SEQ ID NO: 2305687 - DNA, 25 bp, Homo sapien
taacgactcctgcatacttttggtt

SEQ ID NO: 2305688 - DNA, 25 bp, Homo sapien
gctgattgtaagtgtttgactttgt

SEQ ID NO: 2305689 - DNA, 25 bp, Homo sapien
ttttgtgatataagaataacgactc

SEQ ID NO: 2305690 - DNA, 25 bp, Homo sapien
ggttaatttcactagtggcctatca

SEQ ID NO: 2305691 - DNA, 25 bp, Homo sapien
gggtagttgtggcaagttcttagaa

SEQ ID NO: 2305692 - DNA, 25 bp, Homo sapien
cttagaatgagacaacaatgaactt

SEQ ID NO: 2305693 - DNA, 25 bp, Homo sapien
caatatagagggctgctgagtgacc

SEQ ID NO: 2305694 - DNA, 25 bp, Homo sapien
caatcatctgtgtcttcaacgagtc

SEQ ID NO: 2305695 - DNA, 25 bp, Homo sapien
gggctcccgtcagagatcctgattg

SEQ ID NO: 2305696 - DNA, 25 bp, Homo sapien
gatacttatggtagccaacaaggac

SEQ ID NO: 2305697 - DNA, 25 bp, Homo sapien
tcttacatctaagcttcgactggga

SEQ ID NO: 2305698 - DNA, 25 bp, Homo sapien
tccccatagtgctggaacaggttag

SEQ ID NO: 2305699 - DNA, 25 bp, Homo sapien
tatgtactgcagtggttgacgactg

SEQ ID NO: 2305700 - DNA, 25 bp, Homo sapien
gagtttcattgaacggtactgcaca

SEQ ID NO: 2305701 - DNA, 25 bp, Homo sapien
tacactgcacgtttcctaaatctca

SEQ ID NO: 2305702 - DNA, 25 bp, Homo sapien
cagaagtttagagcttatcttgaaa

SEQ ID NO: 2305703 - DNA, 25 bp, Homo sapien
gatttggatatggttcgtttggtcc

SEQ ID NO: 2305704 - DNA, 25 bp, Homo sapien
taggcaaaggacttgctgtgatttg

SEQ ID NO: 2305705 - DNA, 25 bp, Homo sapien
tatggttcgtttggtcctgccaagt

SEQ ID NO: 2305706 - DNA, 25 bp, Homo sapien
ggcaaaggacttgctgtgatttgga

SEQ ID NO: 2305707 - DNA, 25 bp, Homo sapien
caagtactgtgcatgtgtggctaga

SEQ ID NO: 2305708 - DNA, 25 bp, Homo sapien
tattatctataaagggacttatggg

SEQ ID NO: 2305709 - DNA, 25 bp, Homo sapien
gaattgaaatttttacgatgtggag

SEQ ID NO: 2305710 - DNA, 25 bp, Homo sapien
cacaacctacataatagtttggaag

SEQ ID NO: 2305711 - DNA, 25 bp, Homo sapien
tgtgttagaaacaagccctaatagt

SEQ ID NO: 2305712 - DNA, 25 bp, Homo sapien
caagccctaatagtttttcgtgtga

SEQ ID NO: 2305713 - DNA, 25 bp, Homo sapien
cactgtgttagaaacaagccctaat

SEQ ID NO: 2305714 - DNA, 25 bp, Homo sapien
agtttttcgtgtgaatctctatgca

SEQ ID NO: 2305715 - DNA, 25 bp, Homo sapien
tctatccgctggctgaagttggtgc

SEQ ID NO: 2305716 - DNA, 25 bp, Homo sapien
ctatccgctggctgaagttggtgct

SEQ ID NO: 2305717 - DNA, 25 bp, Homo sapien
cacaaatgtgtggtggaacctgtcc

SEQ ID NO: 2305718 - DNA, 25 bp, Homo sapien
gaatcttcggcaaacacaaatgtgt

SEQ ID NO: 2305719 - DNA, 25 bp, Homo sapien
cattctggttctggactaatcgcca

SEQ ID NO: 2305720 - DNA, 25 bp, Homo sapien
taactaaggtactcagaatcttcgg

SEQ ID NO: 2305721 - DNA, 25 bp, Homo sapien
tccaggtaaactcgggaacttctgc

SEQ ID NO: 2305722 - DNA, 25 bp, Homo sapien
aagaatgggctgcttagggatccag

SEQ ID NO: 2305723 - DNA, 25 bp, Homo sapien
tatttcgctcggctgagctctctaa

SEQ ID NO: 2305724 - DNA, 25 bp, Homo sapien
tcgggaacttctgcaaacacatctt

SEQ ID NO: 2305725 - DNA, 25 bp, Homo sapien
gattgcacggaactgtctactacag

SEQ ID NO: 2305726 - DNA, 25 bp, Homo sapien
ttcatgtcccagtgagtaagctctc

SEQ ID NO: 2305727 - DNA, 25 bp, Homo sapien
cacacatccaaggtgtagcgtgagg

SEQ ID NO: 2305728 - DNA, 25 bp, Homo sapien
cagaatgtggtaagacacacatcca

SEQ ID NO: 2305729 - DNA, 25 bp, Homo sapien
ctctttgcttctatgagctggttta

SEQ ID NO: 2305730 - DNA, 25 bp, Homo sapien
tatgagctggtttacatctttccaa

SEQ ID NO: 2305731 - DNA, 25 bp, Homo sapien
gcttctatgagctggtttacatctt

SEQ ID NO: 2305732 - DNA, 25 bp, Homo sapien
gctggtttacatctttccaacaaat

SEQ ID NO: 2305733 - DNA, 25 bp, Homo sapien
actgccactgggtgcctagtctcac

SEQ ID NO: 2305734 - DNA, 25 bp, Homo sapien
gaccactgccactgggtgcctagtc

SEQ ID NO: 2305735 - DNA, 25 bp, Homo sapien
cactgccactgggtgcctagtctca

SEQ ID NO: 2305736 - DNA, 25 bp, Homo sapien
ttatttatcagaccactgccactgg

SEQ ID NO: 2305737 - DNA, 25 bp, Homo sapien
gataagcacaattccacgacaatga

SEQ ID NO: 2305738 - DNA, 25 bp, Homo sapien
atgaaaaattgtgaggtagcattca

SEQ ID NO: 2305739 - DNA, 25 bp, Homo sapien
tgggataagcacaattccacgacaa

SEQ ID NO: 2305740 - DNA, 25 bp, Homo sapien
gaaaaattgtgaggtagcattcaaa

SEQ ID NO: 2305741 - DNA, 25 bp, Homo sapien
tttctgcaaagttggcaagcagcat

SEQ ID NO: 2305742 - DNA, 25 bp, Homo sapien
ctggaggtagttcctttgtttcaca

SEQ ID NO: 2305743 - DNA, 25 bp, Homo sapien
tgatttcctggacagattacaactc

SEQ ID NO: 2305744 - DNA, 25 bp, Homo sapien
catgctgcaaagtgctttctgcaaa

SEQ ID NO: 2305745 - DNA, 25 bp, Homo sapien
ggtctgccttatcaatggtctctcc

SEQ ID NO: 2305746 - DNA, 25 bp, Homo sapien
ttatggtctgccttatcaatggtct

SEQ ID NO: 2305747 - DNA, 25 bp, Homo sapien
gccttatcaatggtctctcccagtc

SEQ ID NO: 2305748 - DNA, 25 bp, Homo sapien
tccagaggggatgaaatcctttatc

SEQ ID NO: 2305749 - DNA, 25 bp, Homo sapien
actgactttatcatcggacattttc

SEQ ID NO: 2305750 - DNA, 25 bp, Homo sapien
tgactttatcatcggacattttctt

SEQ ID NO: 2305751 - DNA, 25 bp, Homo sapien
atactgactttatcatcggacattt

SEQ ID NO: 2305752 - DNA, 25 bp, Homo sapien
ctttatcatcggacattttcttcat

SEQ ID NO: 2305753 - DNA, 25 bp, Homo sapien
atccttgttcagactaaggatgcta

SEQ ID NO: 2305754 - DNA, 25 bp, Homo sapien
ctatccttgttcagactaaggatgc

SEQ ID NO: 2305755 - DNA, 25 bp, Homo sapien
tatccttgttcagactaaggatgct

SEQ ID NO: 2305756 - DNA, 25 bp, Homo sapien
tccttgttcagactaaggatgctac

SEQ ID NO: 2305757 - DNA, 25 bp, Homo sapien
tcttgggcatctgagacgcattctc

SEQ ID NO: 2305758 - DNA, 25 bp, Homo sapien
gcattctccgtctgtcttgggcacc

SEQ ID NO: 2305759 - DNA, 25 bp, Homo sapien
tgctctcctttcaggctgccataga

SEQ ID NO: 2305760 - DNA, 25 bp, Homo sapien
tgtttagacaacttccgcagatgtt

SEQ ID NO: 2305761 - DNA, 25 bp, Homo sapien
gattcacaaacttgagagcaagggt

SEQ ID NO: 2305762 - DNA, 25 bp, Homo sapien
ctggttgtatagaccttgccagcag

SEQ ID NO: 2305763 - DNA, 25 bp, Homo sapien
tattgctgattcacaaacttgagag

SEQ ID NO: 2305764 - DNA, 25 bp, Homo sapien
caagggttcctactgctggttgtat

SEQ ID NO: 2305765 - DNA, 25 bp, Homo sapien
ctgatgtgaacaggatatataccac

SEQ ID NO: 2305766 - DNA, 25 bp, Homo sapien
caggttctgtagattggtgttcggc

SEQ ID NO: 2305767 - DNA, 25 bp, Homo sapien
cagtatcttagatggcagatttaag

SEQ ID NO: 2305768 - DNA, 25 bp, Homo sapien
cggcttttattacgaaggtctgatg

SEQ ID NO: 2305769 - DNA, 25 bp, Homo sapien
cctcagggtttgtcgctgggtcagc

SEQ ID NO: 2305770 - DNA, 25 bp, Homo sapien
aagaaagctgtgcccccattgttgc

SEQ ID NO: 2305771 - DNA, 25 bp, Homo sapien
caagaaagctgtgcccccattgttg

SEQ ID NO: 2305772 - DNA, 25 bp, Homo sapien
ctttcttgctagatgtaaccaagaa

SEQ ID NO: 2305773 - DNA, 25 bp, Homo sapien
gcttctttggggcacatggtcccct

SEQ ID NO: 2305774 - DNA, 25 bp, Homo sapien
ttttgtattaatttcctcctcagac

SEQ ID NO: 2305775 - DNA, 25 bp, Homo sapien
cagacagtgccttttggatcacttt

SEQ ID NO: 2305776 - DNA, 25 bp, Homo sapien
tgtcctgctcttttgaaccgacagc

SEQ ID NO: 2305777 - DNA, 25 bp, Homo sapien
gggctgcaagaactacatgtctcaa

SEQ ID NO: 2305778 - DNA, 25 bp, Homo sapien
tcttggcctttgcacctgtgaggcc

SEQ ID NO: 2305779 - DNA, 25 bp, Homo sapien
tcctgcattacctccttgtctcata

SEQ ID NO: 2305780 - DNA, 25 bp, Homo sapien
tctcccttgaaccatctgggctttc

SEQ ID NO: 2305781 - DNA, 25 bp, Homo sapien
caggctgcagtccaaccacagcagc

SEQ ID NO: 2305782 - DNA, 25 bp, Homo sapien
agctgctgtgatgaatctttgacct

SEQ ID NO: 2305783 - DNA, 25 bp, Homo sapien
agcagctgctgtgatgaatctttga

SEQ ID NO: 2305784 - DNA, 25 bp, Homo sapien
gccatcaacaggctgcagtccaacc

SEQ ID NO: 2305785 - DNA, 25 bp, Homo sapien
ccactggacagtcgcgggcactggc

SEQ ID NO: 2305786 - DNA, 25 bp, Homo sapien
acagttgccactggacagtcgcggg

SEQ ID NO: 2305787 - DNA, 25 bp, Homo sapien
tggcacagttgccactggacagtcg

SEQ ID NO: 2305788 - DNA, 25 bp, Homo sapien
cactggcacagttgccactggacag

SEQ ID NO: 2305789 - DNA, 25 bp, Homo sapien
ccagtccgagtttagataggcagct

SEQ ID NO: 2305790 - DNA, 25 bp, Homo sapien
catcaggcaggcatacaaatgtgag

SEQ ID NO: 2305791 - DNA, 25 bp, Homo sapien
tgcaacgagcatggagatacaactg

SEQ ID NO: 2305792 - DNA, 25 bp, Homo sapien
tgttgtcctgaaatggcctgacccc

SEQ ID NO: 2305793 - DNA, 25 bp, Homo sapien
cttctctggacactcttatctaaaa

SEQ ID NO: 2305794 - DNA, 25 bp, Homo sapien
gtttatcatttgtctcccaacccat

SEQ ID NO: 2305795 - DNA, 25 bp, Homo sapien
tctaaaatagcttgtttatcatttg

SEQ ID NO: 2305796 - DNA, 25 bp, Homo sapien
ggattctatcatggcatctgggtgt

SEQ ID NO: 2305797 - DNA, 25 bp, Homo sapien
attctatcatggcatctgggtgtct

SEQ ID NO: 2305798 - DNA, 25 bp, Homo sapien
gaaatcctggatcatgtgacttatc

SEQ ID NO: 2305799 - DNA, 25 bp, Homo sapien
gtgtctgagcagaagaaatcctgga

SEQ ID NO: 2305800 - DNA, 25 bp, Homo sapien
tctatttgttattccctctgtatcc

SEQ ID NO: 2305801 - DNA, 25 bp, Homo sapien
tgttattccctctgtatcccttaat

SEQ ID NO: 2305802 - DNA, 25 bp, Homo sapien
aagctattctatttgttattccctc

SEQ ID NO: 2305803 - DNA, 25 bp, Homo sapien
ttatagatagttgtggttttagaag

SEQ ID NO: 2305804 - DNA, 25 bp, Homo sapien
caggctctgtcttccactcatgaac

SEQ ID NO: 2305805 - DNA, 25 bp, Homo sapien
aatccaatccttgctgctgaagatt

SEQ ID NO: 2305806 - DNA, 25 bp, Homo sapien
cactcatgaacctgcaaaatccaat

SEQ ID NO: 2305807 - DNA, 25 bp, Homo sapien
tcttccactcatgaacctgcaaaat

SEQ ID NO: 2305808 - DNA, 25 bp, Homo sapien
tcttgtaattgacaacagatccagc

SEQ ID NO: 2305809 - DNA, 25 bp, Homo sapien
catgttattcgggtagaggcactgg

SEQ ID NO: 2305810 - DNA, 25 bp, Homo sapien
tttgagtttccatagccaagaacgt

SEQ ID NO: 2305811 - DNA, 25 bp, Homo sapien
ggcactggtatggtaggagtttctc

SEQ ID NO: 2305812 - DNA, 25 bp, Homo sapien
ttggcccagaacttgcttttgtaga

SEQ ID NO: 2305813 - DNA, 25 bp, Homo sapien
ttgctgcagtttctagcgagtgtat

SEQ ID NO: 2305814 - DNA, 25 bp, Homo sapien
cagtttctagcgagtgtatgtaggt

SEQ ID NO: 2305815 - DNA, 25 bp, Homo sapien
ggcccagaacttgcttttgtagaga

SEQ ID NO: 2305816 - DNA, 25 bp, Homo sapien
taagagaacatactaaaccaaggaa

SEQ ID NO: 2305817 - DNA, 25 bp, Homo sapien
aaaggttataatgaagctgggcaca

SEQ ID NO: 2305818 - DNA, 25 bp, Homo sapien
tgtgctcattatacacagtttatag

SEQ ID NO: 2305819 - DNA, 25 bp, Homo sapien
gagaatgacttgaccctcaagaaac

SEQ ID NO: 2305820 - DNA, 25 bp, Homo sapien
ttacttttcaagaggcggttgccac

SEQ ID NO: 2305821 - DNA, 25 bp, Homo sapien
caggttaatattgtctcaggcgaga

SEQ ID NO: 2305822 - DNA, 25 bp, Homo sapien
gcatttcctatagtgggcagcatag

SEQ ID NO: 2305823 - DNA, 25 bp, Homo sapien
gcaggctgcgcctcaatcgctaagt

SEQ ID NO: 2305824 - DNA, 25 bp, Homo sapien
ggatgcatccgagtttggaaacccc

SEQ ID NO: 2305825 - DNA, 25 bp, Homo sapien
ccattttgtgggaggcgagagatct

SEQ ID NO: 2305826 - DNA, 25 bp, Homo sapien
gaagcgccagaagcctgtggagtaa

SEQ ID NO: 2305827 - DNA, 25 bp, Homo sapien
tgaatcgtgggctttgggaaccttg

SEQ ID NO: 2305828 - DNA, 25 bp, Homo sapien
ggctcctgccgccgcgccgccgccg

SEQ ID NO: 2305829 - DNA, 25 bp, Homo sapien
cgggctcctgccgccgcgccgccgc

SEQ ID NO: 2305830 - DNA, 25 bp, Homo sapien
cccgggctcctgccgccgcgccgcc

SEQ ID NO: 2305831 - DNA, 25 bp, Homo sapien
ccgggctcctgccgccgcgccgccg

SEQ ID NO: 2305832 - DNA, 25 bp, Homo sapien
cccagggccagtgagtgtctcggaa

SEQ ID NO: 2305833 - DNA, 25 bp, Homo sapien
ggattccctaaacgccgcacttgcg

SEQ ID NO: 2305834 - DNA, 25 bp, Homo sapien
tgctgcgaggaagacccggtcagct

SEQ ID NO: 2305835 - DNA, 25 bp, Homo sapien
taggaagatcctgacaacccagggc

SEQ ID NO: 2305836 - DNA, 25 bp, Homo sapien
cagagcccggagcccattcctcggc

SEQ ID NO: 2305837 - DNA, 25 bp, Homo sapien
gcgcttcctaccagagcccggagcc

SEQ ID NO: 2305838 - DNA, 25 bp, Homo sapien
tcccagcgcttcctaccagagcccg

SEQ ID NO: 2305839 - DNA, 25 bp, Homo sapien
cagcgcttcctaccagagcccggag

SEQ ID NO: 2305840 - DNA, 25 bp, Homo sapien
gaggcgccttccccgtcgagtttgc

SEQ ID NO: 2305841 - DNA, 25 bp, Homo sapien
ttctccgctcgtccggaggcgcctt

SEQ ID NO: 2305842 - DNA, 25 bp, Homo sapien
cagctcgtccaggaaagcgagtccc

SEQ ID NO: 2305843 - DNA, 25 bp, Homo sapien
cctctgctgtggtggaactgccgca

SEQ ID NO: 2305844 - DNA, 25 bp, Homo sapien
tgactctggtgtagagaccgtgaag

SEQ ID NO: 2305845 - DNA, 25 bp, Homo sapien
tccgcctaaagtagtgactctggtg

SEQ ID NO: 2305846 - DNA, 25 bp, Homo sapien
tcgcgaatccgcctaaagtagtgac

SEQ ID NO: 2305847 - DNA, 25 bp, Homo sapien
aagtagtgactctggtgtagagacc

SEQ ID NO: 2305848 - DNA, 25 bp, Homo sapien
aaggcagcgttagaacaacttctgg

SEQ ID NO: 2305849 - DNA, 25 bp, Homo sapien
ttctgggaaagttgaactcttcaac

SEQ ID NO: 2305850 - DNA, 25 bp, Homo sapien
gaaagttgaactcttcaacaatttc

SEQ ID NO: 2305851 - DNA, 25 bp, Homo sapien
aggcagcgttagaacaacttctggg

SEQ ID NO: 2305852 - DNA, 25 bp, Homo sapien
catcacagatgattagtatccaatt

SEQ ID NO: 2305853 - DNA, 25 bp, Homo sapien
aatgtgggaaactataccttatcct

SEQ ID NO: 2305854 - DNA, 25 bp, Homo sapien
ttggtccaattaatgaaatgttccc

SEQ ID NO: 2305855 - DNA, 25 bp, Homo sapien
gaacacattgagatgtacatgccaa

SEQ ID NO: 2305856 - DNA, 25 bp, Homo sapien
tcaaagacgttatagatttcacacg

SEQ ID NO: 2305857 - DNA, 25 bp, Homo sapien
gcccggccacaatatacttgtctat

SEQ ID NO: 2305858 - DNA, 25 bp, Homo sapien
tatgaaagagtgcttctattcaggg

SEQ ID NO: 2305859 - DNA, 25 bp, Homo sapien
caacaaagcagagataggattatga

SEQ ID NO: 2305860 - DNA, 25 bp, Homo sapien
actaggatatagctacacgatggga

SEQ ID NO: 2305861 - DNA, 25 bp, Homo sapien
aatttaacaagccagacaacagagc

SEQ ID NO: 2305862 - DNA, 25 bp, Homo sapien
caatctaagtgccattatgtaggga

SEQ ID NO: 2305863 - DNA, 25 bp, Homo sapien
ttctctcctacaaagggaatctggc

SEQ ID NO: 2305864 - DNA, 25 bp, Homo sapien
gtaaactacatgatgtctttacaga

SEQ ID NO: 2305865 - DNA, 25 bp, Homo sapien
aactttatagcatgactcaaactga

SEQ ID NO: 2305866 - DNA, 25 bp, Homo sapien
tgactcttaagagtaaactacatga

SEQ ID NO: 2305867 - DNA, 25 bp, Homo sapien
gcatgactcaaactgactcttaaga

SEQ ID NO: 2305868 - DNA, 25 bp, Homo sapien
catgcactagccacacaaatgtgtg

SEQ ID NO: 2305869 - DNA, 25 bp, Homo sapien
tacatcccagtagataattctcccc

SEQ ID NO: 2305870 - DNA, 25 bp, Homo sapien
tagaaaatgtattctaggctgggcg

SEQ ID NO: 2305871 - DNA, 25 bp, Homo sapien
taagatatgatgctaagtacatccc

SEQ ID NO: 2305872 - DNA, 25 bp, Homo sapien
cacagagcacatgaaagccagagtc

SEQ ID NO: 2305873 - DNA, 25 bp, Homo sapien
ccagagtctactcactgatgggaag

SEQ ID NO: 2305874 - DNA, 25 bp, Homo sapien
cactctacagatgacgctgaggtaa

SEQ ID NO: 2305875 - DNA, 25 bp, Homo sapien
taagcagtgcctacggacaagtgtc

SEQ ID NO: 2305876 - DNA, 25 bp, Homo sapien
ctttagaagtaagatataggttttg

SEQ ID NO: 2305877 - DNA, 25 bp, Homo sapien
ttgttaggcatcaccaattgctggc

SEQ ID NO: 2305878 - DNA, 25 bp, Homo sapien
taggcaagtctctatctctggagct

SEQ ID NO: 2305879 - DNA, 25 bp, Homo sapien
cccaatgtggaactgctggattaca

SEQ ID NO: 2305880 - DNA, 25 bp, Homo sapien
tttgaatgacaacccagctagagga

SEQ ID NO: 2305881 - DNA, 25 bp, Homo sapien
tctggttgacttacaatgctgttca

SEQ ID NO: 2305882 - DNA, 25 bp, Homo sapien
tacagtgttgcatatggtgtttcct

SEQ ID NO: 2305883 - DNA, 25 bp, Homo sapien
gagaatattccgtttgcactacaga

SEQ ID NO: 2305884 - DNA, 25 bp, Homo sapien
gccaagttgttctatccgttaatga

SEQ ID NO: 2305885 - DNA, 25 bp, Homo sapien
tatttccctagtgctctggttaccc

SEQ ID NO: 2305886 - DNA, 25 bp, Homo sapien
cacaccaactgctgtaagaaggtac

SEQ ID NO: 2305887 - DNA, 25 bp, Homo sapien
tgctatttccctagtgctctggtta

SEQ ID NO: 2305888 - DNA, 25 bp, Homo sapien
tttccctagtgctctggttacccat

SEQ ID NO: 2305889 - DNA, 25 bp, Homo sapien
ctggattcagatggagtcttattgg

SEQ ID NO: 2305890 - DNA, 25 bp, Homo sapien
ggagtcttattggatgtgataagga

SEQ ID NO: 2305891 - DNA, 25 bp, Homo sapien
tcagatggagtcttattggatgtga

SEQ ID NO: 2305892 - DNA, 25 bp, Homo sapien
gattcagatggagtcttattggatg

SEQ ID NO: 2305893 - DNA, 25 bp, Homo sapien
ggaaggctagcaagtaatgaccaat

SEQ ID NO: 2305894 - DNA, 25 bp, Homo sapien
gaaggctagcaagtaatgaccaatg

SEQ ID NO: 2305895 - DNA, 25 bp, Homo sapien
aaggctagcaagtaatgaccaatga

SEQ ID NO: 2305896 - DNA, 25 bp, Homo sapien
cggaaggctagcaagtaatgaccaa

SEQ ID NO: 2305897 - DNA, 25 bp, Homo sapien
gaaaaagaaatattgccccagtaga

SEQ ID NO: 2305898 - DNA, 25 bp, Homo sapien
ccaagggacatctgactaagaagga

SEQ ID NO: 2305899 - DNA, 25 bp, Homo sapien
tagaaggctaacatctgaagaacca

SEQ ID NO: 2305900 - DNA, 25 bp, Homo sapien
taaagctacagaagaccaggatggt

SEQ ID NO: 2305901 - DNA, 25 bp, Homo sapien
taccattcctgatctaggcaggtgc

SEQ ID NO: 2305902 - DNA, 25 bp, Homo sapien
caatgaacatgtaagagtatcctgg

SEQ ID NO: 2305903 - DNA, 25 bp, Homo sapien
cagggaaacaactggtcgaaaccat

SEQ ID NO: 2305904 - DNA, 25 bp, Homo sapien
taaaagcttggcagctacctaccct

SEQ ID NO: 2305905 - DNA, 25 bp, Homo sapien
gctttggattgcctggtggtacctc

SEQ ID NO: 2305906 - DNA, 25 bp, Homo sapien
tgtgttgctggtaattgtaggaaga

SEQ ID NO: 2305907 - DNA, 25 bp, Homo sapien
gaattgcaccaataggaagctgtgg

SEQ ID NO: 2305908 - DNA, 25 bp, Homo sapien
atgaactttctcgtacttttctagg

SEQ ID NO: 2305909 - DNA, 25 bp, Homo sapien
ttcaaaactgcggacatatatcctg

SEQ ID NO: 2305910 - DNA, 25 bp, Homo sapien
ggacatatatcctgttaatttgcag

SEQ ID NO: 2305911 - DNA, 25 bp, Homo sapien
aaactgcggacatatatcctgttaa

SEQ ID NO: 2305912 - DNA, 25 bp, Homo sapien
cctgttaatttgcagtgatatttac

SEQ ID NO: 2305913 - DNA, 25 bp, Homo sapien
agcccataactttgacgcagataat

SEQ ID NO: 2305914 - DNA, 25 bp, Homo sapien
gacagcccataactttgacgcagat

SEQ ID NO: 2305915 - DNA, 25 bp, Homo sapien
ggacagcccataactttgacgcaga

SEQ ID NO: 2305916 - DNA, 25 bp, Homo sapien
cagcccataactttgacgcagataa

SEQ ID NO: 2305917 - DNA, 25 bp, Homo sapien
gcatacgttaatagcaaagtccact

SEQ ID NO: 2305918 - DNA, 25 bp, Homo sapien
cacttcatttgggagtccagataac

SEQ ID NO: 2305919 - DNA, 25 bp, Homo sapien
tccagataacagtgaaagcaccaat

SEQ ID NO: 2305920 - DNA, 25 bp, Homo sapien
catttgataggagagtgcatacgtt

SEQ ID NO: 2305921 - DNA, 25 bp, Homo sapien
tgtcgtcaaacaccccggcattagc

SEQ ID NO: 2305922 - DNA, 25 bp, Homo sapien
caaacaccccggcattagcaagtag

SEQ ID NO: 2305923 - DNA, 25 bp, Homo sapien
caccccggcattagcaagtagtaaa

SEQ ID NO: 2305924 - DNA, 25 bp, Homo sapien
aacaccccggcattagcaagtagta

SEQ ID NO: 2305925 - DNA, 25 bp, Homo sapien
taacgaagtctctatcagtcttctc

SEQ ID NO: 2305926 - DNA, 25 bp, Homo sapien
ttaacgaagtctctatcagtcttct

SEQ ID NO: 2305927 - DNA, 25 bp, Homo sapien
cttaacgaagtctctatcagtcttc

SEQ ID NO: 2305928 - DNA, 25 bp, Homo sapien
gaattgcatagtttcagaacacaca

SEQ ID NO: 2305929 - DNA, 25 bp, Homo sapien
aactttaaaatcgttgtgtatggca

SEQ ID NO: 2305930 - DNA, 25 bp, Homo sapien
tcccagttgagaagagggtcattca

SEQ ID NO: 2305931 - DNA, 25 bp, Homo sapien
tatgtctgttcgtgggtattctaaa

SEQ ID NO: 2305932 - DNA, 25 bp, Homo sapien
tttaagtgattaatcaaacaccatt

SEQ ID NO: 2305933 - DNA, 25 bp, Homo sapien
attgatttatcggttgattttagag

SEQ ID NO: 2305934 - DNA, 25 bp, Homo sapien
gatttatcggttgattttagagaca

SEQ ID NO: 2305935 - DNA, 25 bp, Homo sapien
agtgattaatcaaacaccattaaat

SEQ ID NO: 2305936 - DNA, 25 bp, Homo sapien
cagctttagatattagaacaatcaa

SEQ ID NO: 2305937 - DNA, 25 bp, Homo sapien
tggcaattgcaatagagtagtggaa

SEQ ID NO: 2305938 - DNA, 25 bp, Homo sapien
aactggtctgctgaaatttgtaacc

SEQ ID NO: 2305939 - DNA, 25 bp, Homo sapien
cagtcattctgaaccagtatttctc

SEQ ID NO: 2305940 - DNA, 25 bp, Homo sapien
gatttcatgtgattagtgattatac

SEQ ID NO: 2305941 - DNA, 25 bp, Homo sapien
gattatactgataactgccactccc

SEQ ID NO: 2305942 - DNA, 25 bp, Homo sapien
catgtgattagtgattatactgata

SEQ ID NO: 2305943 - DNA, 25 bp, Homo sapien
tatactgataactgccactccccat

SEQ ID NO: 2305944 - DNA, 25 bp, Homo sapien
gattcagagaccagactgtaaatgt

SEQ ID NO: 2305945 - DNA, 25 bp, Homo sapien
ttcagagaccagactgtaaatgtag

SEQ ID NO: 2305946 - DNA, 25 bp, Homo sapien
ccatggattcagagaccagactgta

SEQ ID NO: 2305947 - DNA, 25 bp, Homo sapien
tggattcagagaccagactgtaaat

SEQ ID NO: 2305948 - DNA, 25 bp, Homo sapien
ctaaagcataaggaagagaaaccca

SEQ ID NO: 2305949 - DNA, 25 bp, Homo sapien
gcaagactgtaatcactgaacaaga

SEQ ID NO: 2305950 - DNA, 25 bp, Homo sapien
gagaaacccaagatatcatagtgat

SEQ ID NO: 2305951 - DNA, 25 bp, Homo sapien
tatggtactggagtagtcatcctac

SEQ ID NO: 2305952 - DNA, 25 bp, Homo sapien
aaaaaggcttactggcttcatgtga

SEQ ID NO: 2305953 - DNA, 25 bp, Homo sapien
taggcatttaaaaccattagttgga

SEQ ID NO: 2305954 - DNA, 25 bp, Homo sapien
ccacaagaattcagatattaaagat

SEQ ID NO: 2305955 - DNA, 25 bp, Homo sapien
tattaaagatatcagacacaaaact

SEQ ID NO: 2305956 - DNA, 25 bp, Homo sapien
ctgtcagaaatgaggtcacgaactt

SEQ ID NO: 2305957 - DNA, 25 bp, Homo sapien
tatcatcaacgatgtctttccaaaa

SEQ ID NO: 2305958 - DNA, 25 bp, Homo sapien
attatcatcaacgatgtctttccaa

SEQ ID NO: 2305959 - DNA, 25 bp, Homo sapien
catgagacttgtttctgtcagaaat

SEQ ID NO: 2305960 - DNA, 25 bp, Homo sapien
taatgcccagctttcgaggtggatg

SEQ ID NO: 2305961 - DNA, 25 bp, Homo sapien
gacaggtacgattagctgccaagag

SEQ ID NO: 2305962 - DNA, 25 bp, Homo sapien
tgcaatctgaagtacccgctgtcct

SEQ ID NO: 2305963 - DNA, 25 bp, Homo sapien
tgtccttcaatatcgttaatgccca

SEQ ID NO: 2305964 - DNA, 25 bp, Homo sapien
gttttgaaatcaacagggtccagta

SEQ ID NO: 2305965 - DNA, 25 bp, Homo sapien
ttttgaaatcaacagggtccagtaa

SEQ ID NO: 2305966 - DNA, 25 bp, Homo sapien
tagttttgaaatcaacagggtccag

SEQ ID NO: 2305967 - DNA, 25 bp, Homo sapien
gagtagttttgaaatcaacagggtc

SEQ ID NO: 2305968 - DNA, 25 bp, Homo sapien
tctttaaaaatctatcccttgacat

SEQ ID NO: 2305969 - DNA, 25 bp, Homo sapien
aaatctatcccttgacattagacat

SEQ ID NO: 2305970 - DNA, 25 bp, Homo sapien
cattagacattttgtaacagtatga

SEQ ID NO: 2305971 - DNA, 25 bp, Homo sapien
tagacattttgtaacagtatgaaac

SEQ ID NO: 2305972 - DNA, 25 bp, Homo sapien
aatgatctctctgtaggaatcctga

SEQ ID NO: 2305973 - DNA, 25 bp, Homo sapien
atagcacctcgagtgttgagattac

SEQ ID NO: 2305974 - DNA, 25 bp, Homo sapien
catctcccatttccgtgagcatgta

SEQ ID NO: 2305975 - DNA, 25 bp, Homo sapien
ggaatcctgatccacatattcacaa

SEQ ID NO: 2305976 - DNA, 25 bp, Homo sapien
gtgcatcagggccaaacatctgaat

SEQ ID NO: 2305977 - DNA, 25 bp, Homo sapien
ctagtgcatcagggccaaacatctg

SEQ ID NO: 2305978 - DNA, 25 bp, Homo sapien
atcagggccaaacatctgaatatcc

SEQ ID NO: 2305979 - DNA, 25 bp, Homo sapien
gcatcagggccaaacatctgaatat

SEQ ID NO: 2305980 - DNA, 25 bp, Homo sapien
gcttgtggcctaatttcagataaca

SEQ ID NO: 2305981 - DNA, 25 bp, Homo sapien
tttggacttgctctatagcttgtgg

SEQ ID NO: 2305982 - DNA, 25 bp, Homo sapien
gataacatttgatgactggaacttg

SEQ ID NO: 2305983 - DNA, 25 bp, Homo sapien
actggaacttgggtgttcaatgagt

SEQ ID NO: 2305984 - DNA, 25 bp, Homo sapien
gactcataatgagccagtggaagga

SEQ ID NO: 2305985 - DNA, 25 bp, Homo sapien
ggccaggtatttaggaagactcaac

SEQ ID NO: 2305986 - DNA, 25 bp, Homo sapien
tacttacgcgtcctgatgatcacct

SEQ ID NO: 2305987 - DNA, 25 bp, Homo sapien
gctctactgcctaaggtggatccag

SEQ ID NO: 2305988 - DNA, 25 bp, Homo sapien
tcttctcccctatgttatacaaagg

SEQ ID NO: 2305989 - DNA, 25 bp, Homo sapien
ttctcccctatgttatacaaaggaa

SEQ ID NO: 2305990 - DNA, 25 bp, Homo sapien
tttcttctcccctatgttatacaaa

SEQ ID NO: 2305991 - DNA, 25 bp, Homo sapien
ttcttctcccctatgttatacaaag

SEQ ID NO: 2305992 - DNA, 25 bp, Homo sapien
tattttctaacatgttgaagagatc

SEQ ID NO: 2305993 - DNA, 25 bp, Homo sapien
ttattttctaacatgttgaagagat

SEQ ID NO: 2305994 - DNA, 25 bp, Homo sapien
tttctaacatgttgaagagatctgt

SEQ ID NO: 2305995 - DNA, 25 bp, Homo sapien
ttttctaacatgttgaagagatctg

SEQ ID NO: 2305996 - DNA, 25 bp, Homo sapien
aagcaaacttctcactatctatttc

SEQ ID NO: 2305997 - DNA, 25 bp, Homo sapien
agcaacatgctgcgctacaactgct

SEQ ID NO: 2305998 - DNA, 25 bp, Homo sapien
agcaaacttctcactatctatttcc

SEQ ID NO: 2305999 - DNA, 25 bp, Homo sapien
tggagcaacatgctgcgctacaact

SEQ ID NO: 2306000 - DNA, 25 bp, Homo sapien
gattccaccacgagctaatttactg

SEQ ID NO: 2306001 - DNA, 25 bp, Homo sapien
tccagttgatgttaggattccacca

SEQ ID NO: 2306002 - DNA, 25 bp, Homo sapien
tctgctcgagaaacagaacaatctg

SEQ ID NO: 2306003 - DNA, 25 bp, Homo sapien
caagtcgagaggtattcagaataca

SEQ ID NO: 2306004 - DNA, 25 bp, Homo sapien
tgctgatagtacatctgaatgggaa

SEQ ID NO: 2306005 - DNA, 25 bp, Homo sapien
gaatgggaagtggtatagccctccg

SEQ ID NO: 2306006 - DNA, 25 bp, Homo sapien
tgaatatgtgcctgcccattgctac

SEQ ID NO: 2306007 - DNA, 25 bp, Homo sapien
cactgtatgatttggaaagaccgtt

SEQ ID NO: 2306008 - DNA, 25 bp, Homo sapien
taccactgtgtgtaatggagactgc

SEQ ID NO: 2306009 - DNA, 25 bp, Homo sapien
gaagggatctgtcctggtaccactg

SEQ ID NO: 2306010 - DNA, 25 bp, Homo sapien
ggcttgtggacttgggacaccagca

SEQ ID NO: 2306011 - DNA, 25 bp, Homo sapien
gaataggctgctgtaccactgtaga

SEQ ID NO: 2306012 - DNA, 25 bp, Homo sapien
ggagaataagcttaccacctggtgt

SEQ ID NO: 2306013 - DNA, 25 bp, Homo sapien
cacctgagggctaggagctcttgca

SEQ ID NO: 2306014 - DNA, 25 bp, Homo sapien
gaaggaccacgtttcggaagcagaa

SEQ ID NO: 2306015 - DNA, 25 bp, Homo sapien
taatcagactcgactcaccagaggc

SEQ ID NO: 2306016 - DNA, 25 bp, Homo sapien
gcgttgctgaggcacatctgaattc

SEQ ID NO: 2306017 - DNA, 25 bp, Homo sapien
cttgggcgttgctgaggcacatctg

SEQ ID NO: 2306018 - DNA, 25 bp, Homo sapien
tgggcgttgctgaggcacatctgaa

SEQ ID NO: 2306019 - DNA, 25 bp, Homo sapien
gttgctgaggcacatctgaattcaa

SEQ ID NO: 2306020 - DNA, 25 bp, Homo sapien
gatacttttgatcctgagtcgggaa

SEQ ID NO: 2306021 - DNA, 25 bp, Homo sapien
tgtgccatttgtagaccgaacgtca

SEQ ID NO: 2306022 - DNA, 25 bp, Homo sapien
tagctacagtgcttggatctgctcc

SEQ ID NO: 2306023 - DNA, 25 bp, Homo sapien
gcaaccattgttgcgctgcagccag

SEQ ID NO: 2306024 - DNA, 25 bp, Homo sapien
cctgcacttgtacagctggtgaagg

SEQ ID NO: 2306025 - DNA, 25 bp, Homo sapien
gctgagaactgttaggctggccctg

SEQ ID NO: 2306026 - DNA, 25 bp, Homo sapien
ccctgcacttgtacagctggtgaag

SEQ ID NO: 2306027 - DNA, 25 bp, Homo sapien
ctgcacttgtacagctggtgaaggt

SEQ ID NO: 2306028 - DNA, 25 bp, Homo sapien
caggttttctcattggatctccagg

SEQ ID NO: 2306029 - DNA, 25 bp, Homo sapien
cacatgaagttctgtccaggttttc

SEQ ID NO: 2306030 - DNA, 25 bp, Homo sapien
agttctgtccaggttttctcattgg

SEQ ID NO: 2306031 - DNA, 25 bp, Homo sapien
aagactgccacagacacatgaagtt

SEQ ID NO: 2306032 - DNA, 25 bp, Homo sapien
ccagcataaagttctttactagtat

SEQ ID NO: 2306033 - DNA, 25 bp, Homo sapien
tgcccagcataaagttctttactag

SEQ ID NO: 2306034 - DNA, 25 bp, Homo sapien
tcttactttataaccgaggctggag

SEQ ID NO: 2306035 - DNA, 25 bp, Homo sapien
catgcccagcataaagttctttact

SEQ ID NO: 2306036 - DNA, 25 bp, Homo sapien
tcactgaccgaaaatggcacaattt

SEQ ID NO: 2306037 - DNA, 25 bp, Homo sapien
aacttttgcagggtgatagtgagca

SEQ ID NO: 2306038 - DNA, 25 bp, Homo sapien
taggaactattcctcaaagaaggca

SEQ ID NO: 2306039 - DNA, 25 bp, Homo sapien
cctgggaaatccacttgaagaggct

SEQ ID NO: 2306040 - DNA, 25 bp, Homo sapien
tattctatgaggacagcataaccct

SEQ ID NO: 2306041 - DNA, 25 bp, Homo sapien
agtaccaggaccacaggtttctctg

SEQ ID NO: 2306042 - DNA, 25 bp, Homo sapien
gatgaaatcggccaattccctgaaa

SEQ ID NO: 2306043 - DNA, 25 bp, Homo sapien
cctaccagacaatagaagcagaggg

SEQ ID NO: 2306044 - DNA, 25 bp, Homo sapien
cagtcagtgtagtgtgctacagccc

SEQ ID NO: 2306045 - DNA, 25 bp, Homo sapien
ttacaggcactatcctagtactgat

SEQ ID NO: 2306046 - DNA, 25 bp, Homo sapien
cctagtactgatcagcgttggagtt

SEQ ID NO: 2306047 - DNA, 25 bp, Homo sapien
ccagtcagtgtagtgtgctacagcc

SEQ ID NO: 2306048 - DNA, 25 bp, Homo sapien
tgacaatgtatctaggtgcccaaga

SEQ ID NO: 2306049 - DNA, 25 bp, Homo sapien
taaagcaagtcctgatgcagaagct

SEQ ID NO: 2306050 - DNA, 25 bp, Homo sapien
caagtgaacacccaaatgtcaggaa

SEQ ID NO: 2306051 - DNA, 25 bp, Homo sapien
gctaaatctacattgcctgggcaac

SEQ ID NO: 2306052 - DNA, 25 bp, Homo sapien
gtgacaagcaagactatcagcacca

SEQ ID NO: 2306053 - DNA, 25 bp, Homo sapien
ctgtgacaagcaagactatcagcac

SEQ ID NO: 2306054 - DNA, 25 bp, Homo sapien
tgtgacaagcaagactatcagcacc

SEQ ID NO: 2306055 - DNA, 25 bp, Homo sapien
cctgtgacaagcaagactatcagca

SEQ ID NO: 2306056 - DNA, 25 bp, Homo sapien
gcgcccgccagcacccccagctgat

SEQ ID NO: 2306057 - DNA, 25 bp, Homo sapien
cgcccgccagcacccccagctgatt

SEQ ID NO: 2306058 - DNA, 25 bp, Homo sapien
cgccagcacccccagctgatttttt

SEQ ID NO: 2306059 - DNA, 25 bp, Homo sapien
aggcgcccgccagcacccccagctg

SEQ ID NO: 2306060 - DNA, 25 bp, Homo sapien
aaacctgtgagggtgtctgaaacca

SEQ ID NO: 2306061 - DNA, 25 bp, Homo sapien
aacctgtgagggtgtctgaaaccac

SEQ ID NO: 2306062 - DNA, 25 bp, Homo sapien
aaagacactgccctggatatacatc

SEQ ID NO: 2306063 - DNA, 25 bp, Homo sapien
taataaaagaaaaccgctgtcgctg

SEQ ID NO: 2306064 - DNA, 25 bp, Homo sapien
aaggctcacaaccttcccaaagaca

SEQ ID NO: 2306065 - DNA, 25 bp, Homo sapien
gaaaaccgctgtcgctgaaaaggct

SEQ ID NO: 2306066 - DNA, 25 bp, Homo sapien
tggtagaagacttctgacttcctgc

SEQ ID NO: 2306067 - DNA, 25 bp, Homo sapien
cttgttttaatcctgcaagtagggc

SEQ ID NO: 2306068 - DNA, 25 bp, Homo sapien
ggtagaagacttctgacttcctgct

SEQ ID NO: 2306069 - DNA, 25 bp, Homo sapien
ttggtagaagacttctgacttcctg

SEQ ID NO: 2306070 - DNA, 25 bp, Homo sapien
tctcctcagagccataagtgcagca

SEQ ID NO: 2306071 - DNA, 25 bp, Homo sapien
gctctaggagttgagcttgtgcccc

SEQ ID NO: 2306072 - DNA, 25 bp, Homo sapien
gatgattcacaatggccttttgtgc

SEQ ID NO: 2306073 - DNA, 25 bp, Homo sapien
taagtgcagcactgggatgattcac

SEQ ID NO: 2306074 - DNA, 25 bp, Homo sapien
gatgtgtttagttattggtccctct

SEQ ID NO: 2306075 - DNA, 25 bp, Homo sapien
gcagctgttagtcggatgtgtttag

SEQ ID NO: 2306076 - DNA, 25 bp, Homo sapien
taatattaaggcagctgttagtcgg

SEQ ID NO: 2306077 - DNA, 25 bp, Homo sapien
tcggatgtgtttagttattggtccc

SEQ ID NO: 2306078 - DNA, 25 bp, Homo sapien
tggactccacgtgattcaaatgatc

SEQ ID NO: 2306079 - DNA, 25 bp, Homo sapien
catcatggcctgacctaggcataaa

SEQ ID NO: 2306080 - DNA, 25 bp, Homo sapien
aaactaaattcactttggctacaga

SEQ ID NO: 2306081 - DNA, 25 bp, Homo sapien
tcctctttagtacagctgctttttg

SEQ ID NO: 2306082 - DNA, 25 bp, Homo sapien
ccttctcatactgtgtcacttttgt

SEQ ID NO: 2306083 - DNA, 25 bp, Homo sapien
aggcacattgaccatctccgcagca

SEQ ID NO: 2306084 - DNA, 25 bp, Homo sapien
cacattgaccatctccgcagcagag

SEQ ID NO: 2306085 - DNA, 25 bp, Homo sapien
atactgtgtcacttttgtaaggctg

SEQ ID NO: 2306086 - DNA, 25 bp, Homo sapien
ggaactgccctgttttacacagtag

SEQ ID NO: 2306087 - DNA, 25 bp, Homo sapien
gcttcaaattttgacgaagtacagt

SEQ ID NO: 2306088 - DNA, 25 bp, Homo sapien
tacacagtagttaggcattctctat

SEQ ID NO: 2306089 - DNA, 25 bp, Homo sapien
tctcagacaggtgacttgcaattat

SEQ ID NO: 2306090 - DNA, 25 bp, Homo sapien
atgttggccaggatgatctcaatat

SEQ ID NO: 2306091 - DNA, 25 bp, Homo sapien
cctccgccttacgggttcaaatgat

SEQ ID NO: 2306092 - DNA, 25 bp, Homo sapien
cctggttataacttttgtagcactt

SEQ ID NO: 2306093 - DNA, 25 bp, Homo sapien
ttggccaggatgatctcaatatctt

SEQ ID NO: 2306094 - DNA, 25 bp, Homo sapien
gagtaaccatacacagattgggaaa

SEQ ID NO: 2306095 - DNA, 25 bp, Homo sapien
tacaaaagtagaggtgttaatatcc

SEQ ID NO: 2306096 - DNA, 25 bp, Homo sapien
gacaccactaagaacaggatgttat

SEQ ID NO: 2306097 - DNA, 25 bp, Homo sapien
aggatgttataaaatagtaacaact

SEQ ID NO: 2306098 - DNA, 25 bp, Homo sapien
atttagaaaatggtgtcagaaaaca

SEQ ID NO: 2306099 - DNA, 25 bp, Homo sapien
aaaatggtgtcagaaaacagctgga

SEQ ID NO: 2306100 - DNA, 25 bp, Homo sapien
tagaaaatggtgtcagaaaacagct

SEQ ID NO: 2306101 - DNA, 25 bp, Homo sapien
gaaaatggtgtcagaaaacagctgg

SEQ ID NO: 2306102 - DNA, 25 bp, Homo sapien
ggaaggctgcacagcaaaattcttt

SEQ ID NO: 2306103 - DNA, 25 bp, Homo sapien
ttctttttcaatcttcattcatgtt

SEQ ID NO: 2306104 - DNA, 25 bp, Homo sapien
aggctgcacagcaaaattctttttc

SEQ ID NO: 2306105 - DNA, 25 bp, Homo sapien
tctaaatatggaaggctgcacagca

SEQ ID NO: 2306106 - DNA, 25 bp, Homo sapien
cacagcgatgactctttatcatgaa

SEQ ID NO: 2306107 - DNA, 25 bp, Homo sapien
tctccaaggtcacagcgatgactct

SEQ ID NO: 2306108 - DNA, 25 bp, Homo sapien
catagctccacaccccgtaaatgtt

SEQ ID NO: 2306109 - DNA, 25 bp, Homo sapien
agcatctgggaaacaactagaagga

SEQ ID NO: 2306110 - DNA, 25 bp, Homo sapien
ctgtaaaattaagttcataaaggca

SEQ ID NO: 2306111 - DNA, 25 bp, Homo sapien
cactgataagttattttcatgtctc

SEQ ID NO: 2306112 - DNA, 25 bp, Homo sapien
cttccatgttactaatggctagcac

SEQ ID NO: 2306113 - DNA, 25 bp, Homo sapien
tactaatggctagcactgataagtt

SEQ ID NO: 2306114 - DNA, 25 bp, Homo sapien
tctcagcatcatgggaggagataaa

SEQ ID NO: 2306115 - DNA, 25 bp, Homo sapien
gaaatgtggctgactttgagtcccc

SEQ ID NO: 2306116 - DNA, 25 bp, Homo sapien
tcagaatacgaagcttcctctcagc

SEQ ID NO: 2306117 - DNA, 25 bp, Homo sapien
gaacaaagggattcactcagagatc

SEQ ID NO: 2306118 - DNA, 25 bp, Homo sapien
accagtttccatcaggatttatcag

SEQ ID NO: 2306119 - DNA, 25 bp, Homo sapien
aggatttatcagatctgaaacatcc

SEQ ID NO: 2306120 - DNA, 25 bp, Homo sapien
tcatctgctcatgtaggttttacaa

SEQ ID NO: 2306121 - DNA, 25 bp, Homo sapien
tggatggtactgaattctgatcata

SEQ ID NO: 2306122 - DNA, 25 bp, Homo sapien
aaaaaattctgtccaagctctgagc

SEQ ID NO: 2306123 - DNA, 25 bp, Homo sapien
gctctgagcttgtacacgacaaacg

SEQ ID NO: 2306124 - DNA, 25 bp, Homo sapien
tttcagccagcaaaatgagttctac

SEQ ID NO: 2306125 - DNA, 25 bp, Homo sapien
gacaaacgtttacagtggatacatg

SEQ ID NO: 2306126 - DNA, 25 bp, Homo sapien
aaacattcctttgagacatggcagg

SEQ ID NO: 2306127 - DNA, 25 bp, Homo sapien
caagtttctgtctagcaaggagcac

SEQ ID NO: 2306128 - DNA, 25 bp, Homo sapien
tagggatacccacatgatttcagcg

SEQ ID NO: 2306129 - DNA, 25 bp, Homo sapien
gaccgttataccttgccttcagctg

SEQ ID NO: 2306130 - DNA, 25 bp, Homo sapien
tgtttgtattatgaagttggagtgc

SEQ ID NO: 2306131 - DNA, 25 bp, Homo sapien
ttgtattatgaagttggagtgctgt

SEQ ID NO: 2306132 - DNA, 25 bp, Homo sapien
gatgtagcttcagaagcacagtgat

SEQ ID NO: 2306133 - DNA, 25 bp, Homo sapien
cagtgattgccccagggtccatgag

SEQ ID NO: 2306134 - DNA, 25 bp, Homo sapien
taatttggtgaccaggtggtagcca

SEQ ID NO: 2306135 - DNA, 25 bp, Homo sapien
tagatccaaggagatacatgcctca

SEQ ID NO: 2306136 - DNA, 25 bp, Homo sapien
catgcctcagtgagataaactgacc

SEQ ID NO: 2306137 - DNA, 25 bp, Homo sapien
taatggagtcctggttagcctttca

SEQ ID NO: 2306138 - DNA, 25 bp, Homo sapien
caaattagaatcgagtggtgggtgc

SEQ ID NO: 2306139 - DNA, 25 bp, Homo sapien
cagacaaacactggataaagctgtt

SEQ ID NO: 2306140 - DNA, 25 bp, Homo sapien
taaagctgtttattatccattacca

SEQ ID NO: 2306141 - DNA, 25 bp, Homo sapien
gggaactagtgattaagtactgtga

SEQ ID NO: 2306142 - DNA, 25 bp, Homo sapien
aatgagtcagccagaggccggaaaa

SEQ ID NO: 2306143 - DNA, 25 bp, Homo sapien
tacaacttggtcacccaacaaagac

SEQ ID NO: 2306144 - DNA, 25 bp, Homo sapien
gaaagcccaaaagataccatagata

SEQ ID NO: 2306145 - DNA, 25 bp, Homo sapien
gaaagcaggaagtctcaatcaccat

SEQ ID NO: 2306146 - DNA, 25 bp, Homo sapien
gttgaaacagaagtccttcctctca

SEQ ID NO: 2306147 - DNA, 25 bp, Homo sapien
aaaggcacataaccacatgatctca

SEQ ID NO: 2306148 - DNA, 25 bp, Homo sapien
taggctaagtgaataaggcaggcac

SEQ ID NO: 2306149 - DNA, 25 bp, Homo sapien
tgatctcgtagaactagattgtaga

SEQ ID NO: 2306150 - DNA, 25 bp, Homo sapien
tcctgatacattacctggaattgga

SEQ ID NO: 2306151 - DNA, 25 bp, Homo sapien
tttcctgatacattacctggaattg

SEQ ID NO: 2306152 - DNA, 25 bp, Homo sapien
ctgatacattacctggaattggaag

SEQ ID NO: 2306153 - DNA, 25 bp, Homo sapien
cctgatacattacctggaattggaa

SEQ ID NO: 2306154 - DNA, 25 bp, Homo sapien
gaatcttactcagaactgttttttg

SEQ ID NO: 2306155 - DNA, 25 bp, Homo sapien
agggggggaatcttactcagaactg

SEQ ID NO: 2306156 - DNA, 25 bp, Homo sapien
tgaaacggatcaaatggaatggctc

SEQ ID NO: 2306157 - DNA, 25 bp, Homo sapien
tttttgaaacggatcaaatggaatg

SEQ ID NO: 2306158 - DNA, 25 bp, Homo sapien
agacctttctggatagatatctgct

SEQ ID NO: 2306159 - DNA, 25 bp, Homo sapien
tccttaaaattaggccagtctgggc

SEQ ID NO: 2306160 - DNA, 25 bp, Homo sapien
actgaggtgaggccatcgcttgaac

SEQ ID NO: 2306161 - DNA, 25 bp, Homo sapien
gatataagagtgaggcatccttggg

SEQ ID NO: 2306162 - DNA, 25 bp, Homo sapien
aaaacactggtctgtaagaaactgg

SEQ ID NO: 2306163 - DNA, 25 bp, Homo sapien
caagggatagcctgacgttaaaatc

SEQ ID NO: 2306164 - DNA, 25 bp, Homo sapien
taagtgtcttcagccttctaacagg

SEQ ID NO: 2306165 - DNA, 25 bp, Homo sapien
gagatttgtacccaaggttcactga

SEQ ID NO: 2306166 - DNA, 25 bp, Homo sapien
acttttatggtgtcgaacaaatcat

SEQ ID NO: 2306167 - DNA, 25 bp, Homo sapien
tacttttatggtgtcgaacaaatca

SEQ ID NO: 2306168 - DNA, 25 bp, Homo sapien
cttttatggtgtcgaacaaatcata

SEQ ID NO: 2306169 - DNA, 25 bp, Homo sapien
acttcatcatagaaaacccttcaga

SEQ ID NO: 2306170 - DNA, 25 bp, Homo sapien
catcatagaaaacccttcagatagg

SEQ ID NO: 2306171 - DNA, 25 bp, Homo sapien
aaacttcatcatagaaaacccttca

SEQ ID NO: 2306172 - DNA, 25 bp, Homo sapien
acccttcagataggacagttttaat

SEQ ID NO: 2306173 - DNA, 25 bp, Homo sapien
ggaaggggctccacgccagaaccgc

SEQ ID NO: 2306174 - DNA, 25 bp, Homo sapien
gtctcccgccgccttagctggcgaa

SEQ ID NO: 2306175 - DNA, 25 bp, Homo sapien
gccagaaccgccacagacaccctcc

SEQ ID NO: 2306176 - DNA, 25 bp, Homo sapien
ttagctggcgaagcctgtccccgtc

SEQ ID NO: 2306177 - DNA, 25 bp, Homo sapien
cacaaagcggacgaaggagtccatg

SEQ ID NO: 2306178 - DNA, 25 bp, Homo sapien
ctcggtctgaggtaaacactggtcg

SEQ ID NO: 2306179 - DNA, 25 bp, Homo sapien
gagaccctgtaacaccacaaagcgg

SEQ ID NO: 2306180 - DNA, 25 bp, Homo sapien
accgagccagcggagtcagtgtcct

SEQ ID NO: 2306181 - DNA, 25 bp, Homo sapien
cgcaccatccgcagtgtgggcgaag

SEQ ID NO: 2306182 - DNA, 25 bp, Homo sapien
tgcgcatgcgcaccatccgcagtgt

SEQ ID NO: 2306183 - DNA, 25 bp, Homo sapien
attgtcctccgcgacgcagcctgta

SEQ ID NO: 2306184 - DNA, 25 bp, Homo sapien
cgcagcctgtaaaactgccaaagga

SEQ ID NO: 2306185 - DNA, 25 bp, Homo sapien
aaggcggcagtgaagcggtcggtcg

SEQ ID NO: 2306186 - DNA, 25 bp, Homo sapien
ggacgccgcaacgtagtctgcgaga

SEQ ID NO: 2306187 - DNA, 25 bp, Homo sapien
gaatgcataggatgaaagtgccaga

SEQ ID NO: 2306188 - DNA, 25 bp, Homo sapien
agtgccagaaaagcgacgtcctcag

SEQ ID NO: 2306189 - DNA, 25 bp, Homo sapien
catgaaggtagaaaccacagtggca

SEQ ID NO: 2306190 - DNA, 25 bp, Homo sapien
gaaagaatggcctattacaaaccac

SEQ ID NO: 2306191 - DNA, 25 bp, Homo sapien
tcacatgatatctaggaggccaaca

SEQ ID NO: 2306192 - DNA, 25 bp, Homo sapien
cacagtggcattaagagcatttttc

SEQ ID NO: 2306193 - DNA, 25 bp, Homo sapien
gcccaagttcccatgaccgagatgg

SEQ ID NO: 2306194 - DNA, 25 bp, Homo sapien
catgaccgagatggtactttgagcc

SEQ ID NO: 2306195 - DNA, 25 bp, Homo sapien
tgatgatccctgagtcacaacttgt

SEQ ID NO: 2306196 - DNA, 25 bp, Homo sapien
cctgagtcacaacttgtcccaagag

SEQ ID NO: 2306197 - DNA, 25 bp, Homo sapien
tagagatgcctggagaagacttcac

SEQ ID NO: 2306198 - DNA, 25 bp, Homo sapien
cagagtgcccatgacatgttcagca

SEQ ID NO: 2306199 - DNA, 25 bp, Homo sapien
cagcaagtgcttggtaacacaggcc

SEQ ID NO: 2306200 - DNA, 25 bp, Homo sapien
gacgatatgaggtgctgcttgcaga

SEQ ID NO: 2306201 - DNA, 25 bp, Homo sapien
tgctctatcttcaagccttgcatcc

SEQ ID NO: 2306202 - DNA, 25 bp, Homo sapien
ctgagcaagagggtgtaactgctct

SEQ ID NO: 2306203 - DNA, 25 bp, Homo sapien
tatgacacttgaattctgagcaaga

SEQ ID NO: 2306204 - DNA, 25 bp, Homo sapien
gagggtgtaactgctctatcttcaa

SEQ ID NO: 2306205 - DNA, 25 bp, Homo sapien
aagaccctaatgttcgtaatgtaag

SEQ ID NO: 2306206 - DNA, 25 bp, Homo sapien
taagtccattggttcattctcccct

SEQ ID NO: 2306207 - DNA, 25 bp, Homo sapien
ggcacatgtaacaatgttattttgc

SEQ ID NO: 2306208 - DNA, 25 bp, Homo sapien
ggaaagagccattattgatctcaga

SEQ ID NO: 2306209 - DNA, 25 bp, Homo sapien
gaacacacttgaactcgccactgaa

SEQ ID NO: 2306210 - DNA, 25 bp, Homo sapien
acttgaactcgccactgaacacttg

SEQ ID NO: 2306211 - DNA, 25 bp, Homo sapien
acacacttgaactcgccactgaaca

SEQ ID NO: 2306212 - DNA, 25 bp, Homo sapien
actgaacacacttgaactcgccact

SEQ ID NO: 2306213 - DNA, 25 bp, Homo sapien
cagtgatcatctgcaggtgcaggat

SEQ ID NO: 2306214 - DNA, 25 bp, Homo sapien
agtgatcatctgcaggtgcaggatg

SEQ ID NO: 2306215 - DNA, 25 bp, Homo sapien
ccgaaggtctccaaggctccgggct

SEQ ID NO: 2306216 - DNA, 25 bp, Homo sapien
acagtgatcatctgcaggtgcagga

SEQ ID NO: 2306217 - DNA, 25 bp, Homo sapien
ttggccaggaatcttttccaaagac

SEQ ID NO: 2306218 - DNA, 25 bp, Homo sapien
acagtcaaccatactgtacctcagg

SEQ ID NO: 2306219 - DNA, 25 bp, Homo sapien
cattggccaggaatcttttccaaag

SEQ ID NO: 2306220 - DNA, 25 bp, Homo sapien
agtcaaccatactgtacctcagggc

SEQ ID NO: 2306221 - DNA, 25 bp, Homo sapien
ttgtcaacttatcactgacattctt

SEQ ID NO: 2306222 - DNA, 25 bp, Homo sapien
aacaccggccctgtgtaatctgtta

SEQ ID NO: 2306223 - DNA, 25 bp, Homo sapien
catttccgccactgccacatgatgt

SEQ ID NO: 2306224 - DNA, 25 bp, Homo sapien
cacatgatgtccttgttgaacaccg

SEQ ID NO: 2306225 - DNA, 25 bp, Homo sapien
tcataggtccacaacttgaggaggg

SEQ ID NO: 2306226 - DNA, 25 bp, Homo sapien
caaactttgggatctatgaaagcgg

SEQ ID NO: 2306227 - DNA, 25 bp, Homo sapien
tgttgacgccaacatagactgtcta

SEQ ID NO: 2306228 - DNA, 25 bp, Homo sapien
tctaatcaagctttgaaagtcctgc

SEQ ID NO: 2306229 - DNA, 25 bp, Homo sapien
aatcttggtcgttggtatgtaatcc

SEQ ID NO: 2306230 - DNA, 25 bp, Homo sapien
taagattcctcagtgcttcggcgag

SEQ ID NO: 2306231 - DNA, 25 bp, Homo sapien
cttcggcgagcacctaagactatta

SEQ ID NO: 2306232 - DNA, 25 bp, Homo sapien
agtgtggcccctagaccagtagcat

SEQ ID NO: 2306233 - DNA, 25 bp, Homo sapien
ttaactctccaggaataagctggga

SEQ ID NO: 2306234 - DNA, 25 bp, Homo sapien
tcctggcagctgaactcgggtagtc

SEQ ID NO: 2306235 - DNA, 25 bp, Homo sapien
tgtccaccagctagttgcacagaga

SEQ ID NO: 2306236 - DNA, 25 bp, Homo sapien
tttagtacattataggcccagcagc

SEQ ID NO: 2306237 - DNA, 25 bp, Homo sapien
tctgaaagttatagggcactgccac

SEQ ID NO: 2306238 - DNA, 25 bp, Homo sapien
agggaacaagttttcatatgtaact

SEQ ID NO: 2306239 - DNA, 25 bp, Homo sapien
taccggcgtttactgcttcttcatc

SEQ ID NO: 2306240 - DNA, 25 bp, Homo sapien
cctgaatgaacagtttaccggcgtt

SEQ ID NO: 2306241 - DNA, 25 bp, Homo sapien
tctcctattcaaattatcctgaagc

SEQ ID NO: 2306242 - DNA, 25 bp, Homo sapien
tagcttcccaggtttttcactacca

SEQ ID NO: 2306243 - DNA, 25 bp, Homo sapien
ccaaggaagttagcggttcatctcc

SEQ ID NO: 2306244 - DNA, 25 bp, Homo sapien
gatcctgttaagataggatgcactg

SEQ ID NO: 2306245 - DNA, 25 bp, Homo sapien
gttcatctccatgccccacaaagag

SEQ ID NO: 2306246 - DNA, 25 bp, Homo sapien
gaattatggaacgattaagagcagg

SEQ ID NO: 2306247 - DNA, 25 bp, Homo sapien
tggttcgaccccagcctcaaaatgg

SEQ ID NO: 2306248 - DNA, 25 bp, Homo sapien
gagagtcactcgatttctcagtatg

SEQ ID NO: 2306249 - DNA, 25 bp, Homo sapien
atcttgcaaaacagccaattccggg

SEQ ID NO: 2306250 - DNA, 25 bp, Homo sapien
gcatggctggcctcgttgtcaaatg

SEQ ID NO: 2306251 - DNA, 25 bp, Homo sapien
aaatcgcccgcctgaggtttgtgct

SEQ ID NO: 2306252 - DNA, 25 bp, Homo sapien
tgttttttcgagagccgggatgtgc

SEQ ID NO: 2306253 - DNA, 25 bp, Homo sapien
aaaggccacctcttgcgcggtcttg

SEQ ID NO: 2306254 - DNA, 25 bp, Homo sapien
cagaggcctttaaacgcgtgggtcg

SEQ ID NO: 2306255 - DNA, 25 bp, Homo sapien
catgtttgccgtccttcctggtgct

SEQ ID NO: 2306256 - DNA, 25 bp, Homo sapien
gaaaatttcctgtgtccgcaaggcc

SEQ ID NO: 2306257 - DNA, 25 bp, Homo sapien
aaagcagagagagctcggctgtgcc

SEQ ID NO: 2306258 - DNA, 25 bp, Homo sapien
tctgggagtgtttgaatccccggcc

SEQ ID NO: 2306259 - DNA, 25 bp, Homo sapien
caagccatggttgcggaagggccac

SEQ ID NO: 2306260 - DNA, 25 bp, Homo sapien
gctttggttaaagagcgggcgcaca

SEQ ID NO: 2306261 - DNA, 25 bp, Homo sapien
tcagcgccggtgcatgtcgatgtaa

SEQ ID NO: 2306262 - DNA, 25 bp, Homo sapien
gaggaatggcctgtccgcgttaaac

SEQ ID NO: 2306263 - DNA, 25 bp, Homo sapien
taaaaatgtacgctggatcatgtcc

SEQ ID NO: 2306264 - DNA, 25 bp, Homo sapien
tagagtccaaacaagggtcacgtcc

SEQ ID NO: 2306265 - DNA, 25 bp, Homo sapien
aagagtcatgctcctttctgcagag

SEQ ID NO: 2306266 - DNA, 25 bp, Homo sapien
tcacgaaagactagcagaaggcctg

SEQ ID NO: 2306267 - DNA, 25 bp, Homo sapien
catggcatctacctttgtgaaactt

SEQ ID NO: 2306268 - DNA, 25 bp, Homo sapien
gctatgtgctgggaaaccattaaga

SEQ ID NO: 2306269 - DNA, 25 bp, Homo sapien
tctgtagtagagacattaggtgccc

SEQ ID NO: 2306270 - DNA, 25 bp, Homo sapien
acacataagctagtttgggtttcag

SEQ ID NO: 2306271 - DNA, 25 bp, Homo sapien
cgtcacataggatttattatctgca

SEQ ID NO: 2306272 - DNA, 25 bp, Homo sapien
ctctccgtcacataggatttattat

SEQ ID NO: 2306273 - DNA, 25 bp, Homo sapien
tttattatctgcactgtctcctagc

SEQ ID NO: 2306274 - DNA, 25 bp, Homo sapien
tgtctcctagcactttctggtcact

SEQ ID NO: 2306275 - DNA, 25 bp, Homo sapien
tgtccttctttccacgatagccctc

SEQ ID NO: 2306276 - DNA, 25 bp, Homo sapien
cttctttccacgatagccctcaggc

SEQ ID NO: 2306277 - DNA, 25 bp, Homo sapien
tctttccacgatagccctcaggcat

SEQ ID NO: 2306278 - DNA, 25 bp, Homo sapien
tccttctttccacgatagccctcag

SEQ ID NO: 2306279 - DNA, 25 bp, Homo sapien
ccatgaggtgctgccttaacctggg

SEQ ID NO: 2306280 - DNA, 25 bp, Homo sapien
ttaacctgggcctctatggaatgtg

SEQ ID NO: 2306281 - DNA, 25 bp, Homo sapien
tttacccataatggtccatgaggtg

SEQ ID NO: 2306282 - DNA, 25 bp, Homo sapien
cttaacctgggcctctatggaatgt

SEQ ID NO: 2306283 - DNA, 25 bp, Homo sapien
tgtggtacttcgctcatcaggcata

SEQ ID NO: 2306284 - DNA, 25 bp, Homo sapien
tacattgggtgaaaccgttggtcca

SEQ ID NO: 2306285 - DNA, 25 bp, Homo sapien
tatgggagaagatactgtggcaacc

SEQ ID NO: 2306286 - DNA, 25 bp, Homo sapien
aatatccccactgtactgttagagg

SEQ ID NO: 2306287 - DNA, 25 bp, Homo sapien
tataagttctctttgcgtaggccac

SEQ ID NO: 2306288 - DNA, 25 bp, Homo sapien
tagaggtctaatccacaggttacac

SEQ ID NO: 2306289 - DNA, 25 bp, Homo sapien
tgggccagcccttttttgacattgc

SEQ ID NO: 2306290 - DNA, 25 bp, Homo sapien
gattgggtacacaatgcacctggag

SEQ ID NO: 2306291 - DNA, 25 bp, Homo sapien
gacgagtggttcattgaatcctcaa

SEQ ID NO: 2306292 - DNA, 25 bp, Homo sapien
ggtggcgtcatagtctcattacagt

SEQ ID NO: 2306293 - DNA, 25 bp, Homo sapien
ggatagattccttgttacttgggca

SEQ ID NO: 2306294 - DNA, 25 bp, Homo sapien
caaaagatttcagttggtggcgtca

SEQ ID NO: 2306295 - DNA, 25 bp, Homo sapien
cctgatctcgtgacaggtgtgcaaa

SEQ ID NO: 2306296 - DNA, 25 bp, Homo sapien
tgttcaatgcaaaatacaggctgga

SEQ ID NO: 2306297 - DNA, 25 bp, Homo sapien
aagggatactcaacatgtgccagaa

SEQ ID NO: 2306298 - DNA, 25 bp, Homo sapien
tgtatgtgcaggtactccaaagtcc

SEQ ID NO: 2306299 - DNA, 25 bp, Homo sapien
cagaaaggtggcaagcatacagctc

SEQ ID NO: 2306300 - DNA, 25 bp, Homo sapien
gaacgtgtctcagttgaatttccca

SEQ ID NO: 2306301 - DNA, 25 bp, Homo sapien
catgctatgtttggctcagtgggta

SEQ ID NO: 2306302 - DNA, 25 bp, Homo sapien
tacagctcattattgtggtgccaga

SEQ ID NO: 2306303 - DNA, 25 bp, Homo sapien
tactgcgtgcagtttgttcatacgg

SEQ ID NO: 2306304 - DNA, 25 bp, Homo sapien
gactaggtcctgtaaaacttctggc

SEQ ID NO: 2306305 - DNA, 25 bp, Homo sapien
tcagcaccttacatggtactgcgtg

SEQ ID NO: 2306306 - DNA, 25 bp, Homo sapien
gaatggtagtgtaaagccacttcct

SEQ ID NO: 2306307 - DNA, 25 bp, Homo sapien
actcgcgggccgctgcacccaccgc

SEQ ID NO: 2306308 - DNA, 25 bp, Homo sapien
gcgggccgctgcacccaccgccaag

SEQ ID NO: 2306309 - DNA, 25 bp, Homo sapien
gcacccaccgccaaggacaaaagga

SEQ ID NO: 2306310 - DNA, 25 bp, Homo sapien
ccgctgcacccaccgccaaggacaa

SEQ ID NO: 2306311 - DNA, 25 bp, Homo sapien
ggctccgccgtctgtacttttccgc

SEQ ID NO: 2306312 - DNA, 25 bp, Homo sapien
gctggtacttttccactcgcctggc

SEQ ID NO: 2306313 - DNA, 25 bp, Homo sapien
ggcatcatctttgttctccccgcgg

SEQ ID NO: 2306314 - DNA, 25 bp, Homo sapien
ctcgacggccgcaacacagcggtgg

SEQ ID NO: 2306315 - DNA, 25 bp, Homo sapien
tctgcgtgagaatagagaccaccga

SEQ ID NO: 2306316 - DNA, 25 bp, Homo sapien
ttagaacgcctttccagtactgcta

SEQ ID NO: 2306317 - DNA, 25 bp, Homo sapien
agtactgctagcagcagcccgacca

SEQ ID NO: 2306318 - DNA, 25 bp, Homo sapien
tgagagaaacccactgaagacgtct

SEQ ID NO: 2306319 - DNA, 25 bp, Homo sapien
tttccatggccgtacaaaaagcaca

SEQ ID NO: 2306320 - DNA, 25 bp, Homo sapien
caccattgaagggaaaggaccaggc

SEQ ID NO: 2306321 - DNA, 25 bp, Homo sapien
taagagaagcaacgtgtcagcgagt

SEQ ID NO: 2306322 - DNA, 25 bp, Homo sapien
cagacccgcattcagacaaggcagt

SEQ ID NO: 2306323 - DNA, 25 bp, Homo sapien
tgggtcgcgggcgcgcagaggcggg

SEQ ID NO: 2306324 - DNA, 25 bp, Homo sapien
gtgggtcgcgggcgcgcagaggcgg

SEQ ID NO: 2306325 - DNA, 25 bp, Homo sapien
cgaagcttcagggattttcttgtgg

SEQ ID NO: 2306326 - DNA, 25 bp, Homo sapien
gcttcagggattttcttgtgggtct

SEQ ID NO: 2306327 - DNA, 25 bp, Homo sapien
ttcagggattttcttgtgggtctgg

SEQ ID NO: 2306328 - DNA, 25 bp, Homo sapien
cagggattttcttgtgggtctgggg

SEQ ID NO: 2306329 - DNA, 25 bp, Homo sapien
gcaaagtgtgactggcactgcttca

SEQ ID NO: 2306330 - DNA, 25 bp, Homo sapien
ggctaaaggcatagctgacgaggct

SEQ ID NO: 2306331 - DNA, 25 bp, Homo sapien
cagagaggctccatcagcaaaagtc

SEQ ID NO: 2306332 - DNA, 25 bp, Homo sapien
tgacgaggctccttcataaccacag

SEQ ID NO: 2306333 - DNA, 25 bp, Homo sapien
cagatgatctgggttctacctccaa

SEQ ID NO: 2306334 - DNA, 25 bp, Homo sapien
tgttgtcacgtcacagaactgtggg

SEQ ID NO: 2306335 - DNA, 25 bp, Homo sapien
caataagtcattttcctgtctggcc

SEQ ID NO: 2306336 - DNA, 25 bp, Homo sapien
tcctgcagataacagtgactggcca

SEQ ID NO: 2306337 - DNA, 25 bp, Homo sapien
ggcatcctccttgtagggcacagaa

SEQ ID NO: 2306338 - DNA, 25 bp, Homo sapien
gaagaatcttgggagctaatgtcaa

SEQ ID NO: 2306339 - DNA, 25 bp, Homo sapien
tgctatgcttgatttaagtccaaac

SEQ ID NO: 2306340 - DNA, 25 bp, Homo sapien
gaacagttattacctgatcagcatc

SEQ ID NO: 2306341 - DNA, 25 bp, Homo sapien
tattctttgggtagcacagtatgcg

SEQ ID NO: 2306342 - DNA, 25 bp, Homo sapien
gagcctaaattttcaatgccctgtg

SEQ ID NO: 2306343 - DNA, 25 bp, Homo sapien
cagtatgcggatctctgagctttag

SEQ ID NO: 2306344 - DNA, 25 bp, Homo sapien
agtcaccctttaaattgtctgcgag

SEQ ID NO: 2306345 - DNA, 25 bp, Homo sapien
cctaaggaaggtgtagtaaccagca

SEQ ID NO: 2306346 - DNA, 25 bp, Homo sapien
tcctcccagagatgttgtaaggtag

SEQ ID NO: 2306347 - DNA, 25 bp, Homo sapien
ggcactgggtactcttaaaagcagc

SEQ ID NO: 2306348 - DNA, 25 bp, Homo sapien
taagcattgtgcagggtaccttgca

SEQ ID NO: 2306349 - DNA, 25 bp, Homo sapien
tcttaaagcactcggcatctaggcc

SEQ ID NO: 2306350 - DNA, 25 bp, Homo sapien
ctctgttcagaaccccaaaatggtg

SEQ ID NO: 2306351 - DNA, 25 bp, Homo sapien
tggtgtcccatctcactctaaataa

SEQ ID NO: 2306352 - DNA, 25 bp, Homo sapien
aaccaaagccttagaatggctcaaa

SEQ ID NO: 2306353 - DNA, 25 bp, Homo sapien
ctaacatttcagtctttaatccatg

SEQ ID NO: 2306354 - DNA, 25 bp, Homo sapien
gccattccttttgctgttttagtca

SEQ ID NO: 2306355 - DNA, 25 bp, Homo sapien
ttgccattccttttgctgttttagt

SEQ ID NO: 2306356 - DNA, 25 bp, Homo sapien
cattccttttgctgttttagtcatg

SEQ ID NO: 2306357 - DNA, 25 bp, Homo sapien
acctcacgacacgcccggatgtgtg

SEQ ID NO: 2306358 - DNA, 25 bp, Homo sapien
cccacctcacgacacgcccggatgt

SEQ ID NO: 2306359 - DNA, 25 bp, Homo sapien
tcacgacacgcccggatgtgtgatg

SEQ ID NO: 2306360 - DNA, 25 bp, Homo sapien
ctcacgacacgcccggatgtgtgat

SEQ ID NO: 2306361 - DNA, 25 bp, Homo sapien
taaacagggagaggcttgaccacct

SEQ ID NO: 2306362 - DNA, 25 bp, Homo sapien
tggccacctcagctacgttgccaga

SEQ ID NO: 2306363 - DNA, 25 bp, Homo sapien
cagggaagctcaagatcatggcacc

SEQ ID NO: 2306364 - DNA, 25 bp, Homo sapien
tcactgggaagtgatgagacaccac

SEQ ID NO: 2306365 - DNA, 25 bp, Homo sapien
aacaagctaagcatccaggtctata

SEQ ID NO: 2306366 - DNA, 25 bp, Homo sapien
tagatatctgactggtaagttaccc

SEQ ID NO: 2306367 - DNA, 25 bp, Homo sapien
aaaaatggtacaaacgaagctgtgc

SEQ ID NO: 2306368 - DNA, 25 bp, Homo sapien
ttgactagggttgcacaaacaagct

SEQ ID NO: 2306369 - DNA, 25 bp, Homo sapien
tctgttaagagagcaaatctcacat

SEQ ID NO: 2306370 - DNA, 25 bp, Homo sapien
ggtgctactcaataggtataaacct

SEQ ID NO: 2306371 - DNA, 25 bp, Homo sapien
tataagacaaatgaattctagagat

SEQ ID NO: 2306372 - DNA, 25 bp, Homo sapien
cattaaatgtgagacctacaggcac

SEQ ID NO: 2306373 - DNA, 25 bp, Homo sapien
gctaaatacttcgattgtatacgca

SEQ ID NO: 2306374 - DNA, 25 bp, Homo sapien
tacgcaagcgtactgaaataaggct

SEQ ID NO: 2306375 - DNA, 25 bp, Homo sapien
tgcaaacattgaagtgctaaatact

SEQ ID NO: 2306376 - DNA, 25 bp, Homo sapien
aaataaggctgcataagtaaagttt

SEQ ID NO: 2306377 - DNA, 25 bp, Homo sapien
tgtgaaactttttctctggcagctg

SEQ ID NO: 2306378 - DNA, 25 bp, Homo sapien
aaactttttctctggcagctgaaaa

SEQ ID NO: 2306379 - DNA, 25 bp, Homo sapien
cccagtttgtgaaactttttctctg

SEQ ID NO: 2306380 - DNA, 25 bp, Homo sapien
tgaaactttttctctggcagctgaa

SEQ ID NO: 2306381 - DNA, 25 bp, Homo sapien
gcagaggcacgccagaggcaaactc

SEQ ID NO: 2306382 - DNA, 25 bp, Homo sapien
agcagaggcacgccagaggcaaact

SEQ ID NO: 2306383 - DNA, 25 bp, Homo sapien
cagaggcacgccagaggcaaactct

SEQ ID NO: 2306384 - DNA, 25 bp, Homo sapien
ccatttcaccctcaagagcagaggc

SEQ ID NO: 2306385 - DNA, 25 bp, Homo sapien
tgtaagcacatagccggaagtccac

SEQ ID NO: 2306386 - DNA, 25 bp, Homo sapien
ttagcacatacagataccagacagg

SEQ ID NO: 2306387 - DNA, 25 bp, Homo sapien
ggtacgtgaagagcaaacatgggca

SEQ ID NO: 2306388 - DNA, 25 bp, Homo sapien
ctagacaacatgctcattgagggca

SEQ ID NO: 2306389 - DNA, 25 bp, Homo sapien
ctaatgtcggaatgtggcacttggc

SEQ ID NO: 2306390 - DNA, 25 bp, Homo sapien
ctactaatgtcggaatgtggcactt

SEQ ID NO: 2306391 - DNA, 25 bp, Homo sapien
cggaatgtggcacttggcagattgt

SEQ ID NO: 2306392 - DNA, 25 bp, Homo sapien
aatgtcggaatgtggcacttggcag

SEQ ID NO: 2306393 - DNA, 25 bp, Homo sapien
ttccaagttgtagtgcactatcatc

SEQ ID NO: 2306394 - DNA, 25 bp, Homo sapien
tccaagttgtagtgcactatcatca

SEQ ID NO: 2306395 - DNA, 25 bp, Homo sapien
caagttgtagtgcactatcatcatg

SEQ ID NO: 2306396 - DNA, 25 bp, Homo sapien
aagttgtagtgcactatcatcatgc

SEQ ID NO: 2306397 - DNA, 25 bp, Homo sapien
tattactggtggcaggttccacctg

SEQ ID NO: 2306398 - DNA, 25 bp, Homo sapien
tgatctttgagagttgagtgacagg

SEQ ID NO: 2306399 - DNA, 25 bp, Homo sapien
ttgagctgccaagactgagtcacct

SEQ ID NO: 2306400 - DNA, 25 bp, Homo sapien
tgagtcaccttctctactcagtggg

SEQ ID NO: 2306401 - DNA, 25 bp, Homo sapien
cagaggtgtgtcaggtgtgtccagt

SEQ ID NO: 2306402 - DNA, 25 bp, Homo sapien
gtgtccagttgcactgaattgttca

SEQ ID NO: 2306403 - DNA, 25 bp, Homo sapien
tcctgaagctgacttagagcaggtg

SEQ ID NO: 2306404 - DNA, 25 bp, Homo sapien
caggtgtgtccagttgcactgaatt

SEQ ID NO: 2306405 - DNA, 25 bp, Homo sapien
ttgagttgtaggaactgctcctgtg

SEQ ID NO: 2306406 - DNA, 25 bp, Homo sapien
aactctgagctgcatatcaagcctt

SEQ ID NO: 2306407 - DNA, 25 bp, Homo sapien
agccttggagcaaacactccttcca

SEQ ID NO: 2306408 - DNA, 25 bp, Homo sapien
aactctcccttgagttgtaggaact

SEQ ID NO: 2306409 - DNA, 25 bp, Homo sapien
ccaaggctgacggaagcactgctga

SEQ ID NO: 2306410 - DNA, 25 bp, Homo sapien
cagcctgactgcttagaaacctcca

SEQ ID NO: 2306411 - DNA, 25 bp, Homo sapien
cactgctgaaggcacttgcaaggta

SEQ ID NO: 2306412 - DNA, 25 bp, Homo sapien
ctccagattataccctccaaggctg

SEQ ID NO: 2306413 - DNA, 25 bp, Homo sapien
caccaatgtcaggtaacttcataac

SEQ ID NO: 2306414 - DNA, 25 bp, Homo sapien
ctaaaaagtgacaccaatgtcaggt

SEQ ID NO: 2306415 - DNA, 25 bp, Homo sapien
gcagttaccagattcacttcccaaa

SEQ ID NO: 2306416 - DNA, 25 bp, Homo sapien
tttctgttcaggcagttaccagatt

SEQ ID NO: 2306417 - DNA, 25 bp, Homo sapien
taatcaactgctatattgataccac

SEQ ID NO: 2306418 - DNA, 25 bp, Homo sapien
tcaaaggaaagcacacaagggaaag

SEQ ID NO: 2306419 - DNA, 25 bp, Homo sapien
aatttggaatcctacttcctgtgga

SEQ ID NO: 2306420 - DNA, 25 bp, Homo sapien
aatcttgatcttggcaataagaaca

SEQ ID NO: 2306421 - DNA, 25 bp, Homo sapien
tcagaagccatggcaacaatagtag

SEQ ID NO: 2306422 - DNA, 25 bp, Homo sapien
gttcttgaccctggcatagctccat

SEQ ID NO: 2306423 - DNA, 25 bp, Homo sapien
ttggctatttctgctgacaaacagg

SEQ ID NO: 2306424 - DNA, 25 bp, Homo sapien
cttggctatttctgctgacaaacag

SEQ ID NO: 2306425 - DNA, 25 bp, Homo sapien
gggcagctgcctttatgctgtgtgc

SEQ ID NO: 2306426 - DNA, 25 bp, Homo sapien
tatggtcggtttctgatgatgcttc

SEQ ID NO: 2306427 - DNA, 25 bp, Homo sapien
gcagctgcctttatgctgtgtgctc

SEQ ID NO: 2306428 - DNA, 25 bp, Homo sapien
tcaggaagccagtatggtcggtttc

SEQ ID NO: 2306429 - DNA, 25 bp, Homo sapien
tcttagtgggaggttatctttacta

SEQ ID NO: 2306430 - DNA, 25 bp, Homo sapien
tgggaggttatctttactaggatat

SEQ ID NO: 2306431 - DNA, 25 bp, Homo sapien
ttttctgctgattgtttgctgactc

SEQ ID NO: 2306432 - DNA, 25 bp, Homo sapien
tgtttgctgactcttagtgggaggt

SEQ ID NO: 2306433 - DNA, 25 bp, Homo sapien
caatcacgattgtctgcctcagtgt

SEQ ID NO: 2306434 - DNA, 25 bp, Homo sapien
ctccagggtgagctcaatgcttggt

SEQ ID NO: 2306435 - DNA, 25 bp, Homo sapien
gataacctcgttccaactgattctg

SEQ ID NO: 2306436 - DNA, 25 bp, Homo sapien
acttaggaattgtttgttgactgac

SEQ ID NO: 2306437 - DNA, 25 bp, Homo sapien
tggcagctgggctccgtatctccac

SEQ ID NO: 2306438 - DNA, 25 bp, Homo sapien
accactggagaggcaattccccggg

SEQ ID NO: 2306439 - DNA, 25 bp, Homo sapien
ctccaccactggagaggcaattccc

SEQ ID NO: 2306440 - DNA, 25 bp, Homo sapien
gctgggctccgtatctccaccactg

SEQ ID NO: 2306441 - DNA, 25 bp, Homo sapien
catacagtggtaacagcaccattgc

SEQ ID NO: 2306442 - DNA, 25 bp, Homo sapien
acatacagtggtaacagcaccattg

SEQ ID NO: 2306443 - DNA, 25 bp, Homo sapien
tacagtggtaacagcaccattgctc

SEQ ID NO: 2306444 - DNA, 25 bp, Homo sapien
cacatacagtggtaacagcaccatt

SEQ ID NO: 2306445 - DNA, 25 bp, Homo sapien
agtcccctaacatctctgcagagcc

SEQ ID NO: 2306446 - DNA, 25 bp, Homo sapien
gagccccccagtgcctttattgcag

SEQ ID NO: 2306447 - DNA, 25 bp, Homo sapien
cataagtcccctaacatctctgcag

SEQ ID NO: 2306448 - DNA, 25 bp, Homo sapien
taagtcccctaacatctctgcagag

SEQ ID NO: 2306449 - DNA, 25 bp, Homo sapien
ggagcggaccaggaaagccggatta

SEQ ID NO: 2306450 - DNA, 25 bp, Homo sapien
gaaagccggattatggggcagcaca

SEQ ID NO: 2306451 - DNA, 25 bp, Homo sapien
gagggagcggaccaggaaagccgga

SEQ ID NO: 2306452 - DNA, 25 bp, Homo sapien
agcggaccaggaaagccggattatg

SEQ ID NO: 2306453 - DNA, 25 bp, Homo sapien
cttctgtgaaggctctatgagaaca

SEQ ID NO: 2306454 - DNA, 25 bp, Homo sapien
tgtgaaggctctatgagaacaaaga

SEQ ID NO: 2306455 - DNA, 25 bp, Homo sapien
tctgtgaaggctctatgagaacaaa

SEQ ID NO: 2306456 - DNA, 25 bp, Homo sapien
tgaaggctctatgagaacaaagaga

SEQ ID NO: 2306457 - DNA, 25 bp, Homo sapien
caatcaatgtccctttggtacacag

SEQ ID NO: 2306458 - DNA, 25 bp, Homo sapien
gctttttgacatacatccaaacaaa

SEQ ID NO: 2306459 - DNA, 25 bp, Homo sapien
aatgtccctttggtacacaggagcc

SEQ ID NO: 2306460 - DNA, 25 bp, Homo sapien
cagaaaagctttttgacatacatcc

SEQ ID NO: 2306461 - DNA, 25 bp, Homo sapien
cattgcaatggcgaaattgtgaaat

SEQ ID NO: 2306462 - DNA, 25 bp, Homo sapien
gcaggttgcatcatccagttctcgg

SEQ ID NO: 2306463 - DNA, 25 bp, Homo sapien
atatggcagagatgtatagcttttc

SEQ ID NO: 2306464 - DNA, 25 bp, Homo sapien
cacagttaaggatgtatgcccggga

SEQ ID NO: 2306465 - DNA, 25 bp, Homo sapien
ggtcagtacccttgatgaacatcag

SEQ ID NO: 2306466 - DNA, 25 bp, Homo sapien
caatcaagtaggcttaatccccagg

SEQ ID NO: 2306467 - DNA, 25 bp, Homo sapien
gattcacagccgatttctataaggt

SEQ ID NO: 2306468 - DNA, 25 bp, Homo sapien
tctataaggtgtacaaggaagagct

SEQ ID NO: 2306469 - DNA, 25 bp, Homo sapien
ccttaggaaagaggctgaatccagg

SEQ ID NO: 2306470 - DNA, 25 bp, Homo sapien
ttaggaaagaggctgaatccagggg

SEQ ID NO: 2306471 - DNA, 25 bp, Homo sapien
aggaaagaggctgaatccagggggc

SEQ ID NO: 2306472 - DNA, 25 bp, Homo sapien
ggaaagaggctgaatccagggggct

SEQ ID NO: 2306473 - DNA, 25 bp, Homo sapien
gaaaagttcaattggagtcctagct

SEQ ID NO: 2306474 - DNA, 25 bp, Homo sapien
ggacaggccactttacttccctgga

SEQ ID NO: 2306475 - DNA, 25 bp, Homo sapien
gagttctgataagaccactccagtg

SEQ ID NO: 2306476 - DNA, 25 bp, Homo sapien
taaatgatacctgcacgtggaaggc

SEQ ID NO: 2306477 - DNA, 25 bp, Homo sapien
tggatggagaggtacagctcagacc

SEQ ID NO: 2306478 - DNA, 25 bp, Homo sapien
cagacagtaactgagcaaggcagta

SEQ ID NO: 2306479 - DNA, 25 bp, Homo sapien
taggaaatctactgcgctgctttgc

SEQ ID NO: 2306480 - DNA, 25 bp, Homo sapien
tactaaaagacgtctgtggcatgga

SEQ ID NO: 2306481 - DNA, 25 bp, Homo sapien
gaagacagctgtttgtgcactaaaa

SEQ ID NO: 2306482 - DNA, 25 bp, Homo sapien
gaacacagccagcttcttttgcaag

SEQ ID NO: 2306483 - DNA, 25 bp, Homo sapien
cattccctgagcttgagagtgctac

SEQ ID NO: 2306484 - DNA, 25 bp, Homo sapien
taagggctggtaacctgcatcacga

SEQ ID NO: 2306485 - DNA, 25 bp, Homo sapien
ctttccgggacagataaatgactga

SEQ ID NO: 2306486 - DNA, 25 bp, Homo sapien
gggacagataaatgactgatattgg

SEQ ID NO: 2306487 - DNA, 25 bp, Homo sapien
ccgggacagataaatgactgatatt

SEQ ID NO: 2306488 - DNA, 25 bp, Homo sapien
ttccgggacagataaatgactgata

SEQ ID NO: 2306489 - DNA, 25 bp, Homo sapien
tcaatgtcacatgggagaatgaggc

SEQ ID NO: 2306490 - DNA, 25 bp, Homo sapien
catgggagaatgaggcacagctgca

SEQ ID NO: 2306491 - DNA, 25 bp, Homo sapien
agagaactcaatgtcacatgggaga

SEQ ID NO: 2306492 - DNA, 25 bp, Homo sapien
tgtcacatgggagaatgaggcacag

SEQ ID NO: 2306493 - DNA, 25 bp, Homo sapien
gccatgttgctgtccatcaccctct

SEQ ID NO: 2306494 - DNA, 25 bp, Homo sapien
caatctgctggcgactgctttctgt

SEQ ID NO: 2306495 - DNA, 25 bp, Homo sapien
attgcttcaatctgctggcgactgc

SEQ ID NO: 2306496 - DNA, 25 bp, Homo sapien
tggcgactgctttctgtggacttcc

SEQ ID NO: 2306497 - DNA, 25 bp, Homo sapien
gccttgttcttgatctcagtgggaa

SEQ ID NO: 2306498 - DNA, 25 bp, Homo sapien
tctcagcatgaagtatggcattagc

SEQ ID NO: 2306499 - DNA, 25 bp, Homo sapien
tgcattagccaggacttcaaatatg

SEQ ID NO: 2306500 - DNA, 25 bp, Homo sapien
cagtggtgagaaggaatatccgtgc

SEQ ID NO: 2306501 - DNA, 25 bp, Homo sapien
aatgaacctacattgtcacccaagg

SEQ ID NO: 2306502 - DNA, 25 bp, Homo sapien
ttgagcagagaatacagagatttcc

SEQ ID NO: 2306503 - DNA, 25 bp, Homo sapien
tagggtttatccttggtcctataca

SEQ ID NO: 2306504 - DNA, 25 bp, Homo sapien
taaatagactattttccagaacagc

SEQ ID NO: 2306505 - DNA, 25 bp, Homo sapien
attttgtgtagggctgccttttcat

SEQ ID NO: 2306506 - DNA, 25 bp, Homo sapien
aataatagatctctgattgtcggat

SEQ ID NO: 2306507 - DNA, 25 bp, Homo sapien
gatttctttagccttgtaagaggcc

SEQ ID NO: 2306508 - DNA, 25 bp, Homo sapien
tgtaagaggccctgtcacagtccct

SEQ ID NO: 2306509 - DNA, 25 bp, Homo sapien
ccatagatttcacggtgaccaaggc

SEQ ID NO: 2306510 - DNA, 25 bp, Homo sapien
caatccatagatttcacggtgacca

SEQ ID NO: 2306511 - DNA, 25 bp, Homo sapien
tagatttcacggtgaccaaggccat

SEQ ID NO: 2306512 - DNA, 25 bp, Homo sapien
aatccatagatttcacggtgaccaa

SEQ ID NO: 2306513 - DNA, 25 bp, Homo sapien
ctggattcagcaggatttttcttcc

SEQ ID NO: 2306514 - DNA, 25 bp, Homo sapien
caggtccatagctcattgagtctga

SEQ ID NO: 2306515 - DNA, 25 bp, Homo sapien
gtccacaggtccatagctcattgag

SEQ ID NO: 2306516 - DNA, 25 bp, Homo sapien
catagctcattgagtctgagccaca

SEQ ID NO: 2306517 - DNA, 25 bp, Homo sapien
ctcattgagtctgagccacaaagac

SEQ ID NO: 2306518 - DNA, 25 bp, Homo sapien
gcctttattaccactgtggtggtgg

SEQ ID NO: 2306519 - DNA, 25 bp, Homo sapien
caagggcagtggaaggtcgtttagc

SEQ ID NO: 2306520 - DNA, 25 bp, Homo sapien
tcgtttagcctttattaccactgtg

SEQ ID NO: 2306521 - DNA, 25 bp, Homo sapien
ttgttttagctttagttaccactgc

SEQ ID NO: 2306522 - DNA, 25 bp, Homo sapien
gcatatcctgcgttacaccaaagaa

SEQ ID NO: 2306523 - DNA, 25 bp, Homo sapien
tctgtgggactttgaagaaacggaa

SEQ ID NO: 2306524 - DNA, 25 bp, Homo sapien
aaattgccagccatttctgtgggac

SEQ ID NO: 2306525 - DNA, 25 bp, Homo sapien
gacgtgctcttgttctaattatgga

SEQ ID NO: 2306526 - DNA, 25 bp, Homo sapien
ttccctccaatgtaactatccttac

SEQ ID NO: 2306527 - DNA, 25 bp, Homo sapien
tttccctccaatgtaactatcctta

SEQ ID NO: 2306528 - DNA, 25 bp, Homo sapien
tccctccaatgtaactatccttaca

SEQ ID NO: 2306529 - DNA, 25 bp, Homo sapien
cctccaatgtaactatccttacatg

SEQ ID NO: 2306530 - DNA, 25 bp, Homo sapien
caaacatgtagctaccagtctgcat

SEQ ID NO: 2306531 - DNA, 25 bp, Homo sapien
aagcaaatttccctgcgtaccatga

SEQ ID NO: 2306532 - DNA, 25 bp, Homo sapien
catgaggaatgcgacagagacaggc

SEQ ID NO: 2306533 - DNA, 25 bp, Homo sapien
taagggccagaaaaatgggcgtatc

SEQ ID NO: 2306534 - DNA, 25 bp, Homo sapien
tgaagcatttataagttaaatcacc

SEQ ID NO: 2306535 - DNA, 25 bp, Homo sapien
agttaaatcacctctgtcataaatt

SEQ ID NO: 2306536 - DNA, 25 bp, Homo sapien
ttaaatcacctctgtcataaattgg

SEQ ID NO: 2306537 - DNA, 25 bp, Homo sapien
cctaggggtaaagtgtgatgaagca

SEQ ID NO: 2306538 - DNA, 25 bp, Homo sapien
gctgcaggcatcatactaccagaat

SEQ ID NO: 2306539 - DNA, 25 bp, Homo sapien
caaatggtatggacaaagacaacaa

SEQ ID NO: 2306540 - DNA, 25 bp, Homo sapien
ggaaactaatccacgtatctatagg

SEQ ID NO: 2306541 - DNA, 25 bp, Homo sapien
ccccaaactatgaatgtactagaag

SEQ ID NO: 2306542 - DNA, 25 bp, Homo sapien
tgtaagctttgcctccaagtactgg

SEQ ID NO: 2306543 - DNA, 25 bp, Homo sapien
tatatatgactaactgacagtgaac

SEQ ID NO: 2306544 - DNA, 25 bp, Homo sapien
ctcttattcaacatggcactggaag

SEQ ID NO: 2306545 - DNA, 25 bp, Homo sapien
tagccagagcaactagtcaagagag

SEQ ID NO: 2306546 - DNA, 25 bp, Homo sapien
aggattggaggacccaaaccacaag

SEQ ID NO: 2306547 - DNA, 25 bp, Homo sapien
catacagcaatggcacctttatgag

SEQ ID NO: 2306548 - DNA, 25 bp, Homo sapien
tcttttgtcccgagtttaatgccaa

SEQ ID NO: 2306549 - DNA, 25 bp, Homo sapien
ggtgaaaccacacttttatgaggat

SEQ ID NO: 2306550 - DNA, 25 bp, Homo sapien
cttccgcagccgagtgagggactgt

SEQ ID NO: 2306551 - DNA, 25 bp, Homo sapien
acagattaggtagtgggtgcagccc

SEQ ID NO: 2306552 - DNA, 25 bp, Homo sapien
actgtgctatccagcgcaggtacta

SEQ ID NO: 2306553 - DNA, 25 bp, Homo sapien
ccaggagattccctgtgtgcataca

SEQ ID NO: 2306554 - DNA, 25 bp, Homo sapien
cctagccaggatgattattaaaaga

SEQ ID NO: 2306555 - DNA, 25 bp, Homo sapien
tgcgcctagccaggatgattattaa

SEQ ID NO: 2306556 - DNA, 25 bp, Homo sapien
actgcgcctagccaggatgattatt

SEQ ID NO: 2306557 - DNA, 25 bp, Homo sapien
cgcctagccaggatgattattaaaa

SEQ ID NO: 2306558 - DNA, 25 bp, Homo sapien
gcaaaaacgttgtagccagactgcc

SEQ ID NO: 2306559 - DNA, 25 bp, Homo sapien
acagctcagcaaaaacgttgtagcc

SEQ ID NO: 2306560 - DNA, 25 bp, Homo sapien
gtttcagtaggtggtattcccttca

SEQ ID NO: 2306561 - DNA, 25 bp, Homo sapien
tttcagtaggtggtattcccttcac

SEQ ID NO: 2306562 - DNA, 25 bp, Homo sapien
tagggcaattgaaagtgcccaatcc

SEQ ID NO: 2306563 - DNA, 25 bp, Homo sapien
tacgcttctgagatgctcaacaaat

SEQ ID NO: 2306564 - DNA, 25 bp, Homo sapien
caaagaggaaacattgaaaccagca

SEQ ID NO: 2306565 - DNA, 25 bp, Homo sapien
gggctgtggtgcactatcaagcaga

SEQ ID NO: 2306566 - DNA, 25 bp, Homo sapien
taattgggcatgtgcgtgttctgct

SEQ ID NO: 2306567 - DNA, 25 bp, Homo sapien
tctgtggtttttagccacagggccc

SEQ ID NO: 2306568 - DNA, 25 bp, Homo sapien
ggcgttgaacaattccaggtaccaa

SEQ ID NO: 2306569 - DNA, 25 bp, Homo sapien
tccctgactttagccatagtgactg

SEQ ID NO: 2306570 - DNA, 25 bp, Homo sapien
ttctttagctagtaagaagaaaata

SEQ ID NO: 2306571 - DNA, 25 bp, Homo sapien
gaatacatcgacgttctcccttgag

SEQ ID NO: 2306572 - DNA, 25 bp, Homo sapien
tttgacagactggaatacatcgacg

SEQ ID NO: 2306573 - DNA, 25 bp, Homo sapien
taccttttgacagactggaatacat

SEQ ID NO: 2306574 - DNA, 25 bp, Homo sapien
tatagtttccagctaaggagagtct

SEQ ID NO: 2306575 - DNA, 25 bp, Homo sapien
gaaagaccagtagaggctgaaagcc

SEQ ID NO: 2306576 - DNA, 25 bp, Homo sapien
ttcaaaggaaagacatggactggag

SEQ ID NO: 2306577 - DNA, 25 bp, Homo sapien
cctgaggaagaagtatagagcaaga

SEQ ID NO: 2306578 - DNA, 25 bp, Homo sapien
ttcggctcgtgcatggtgcgctgca

SEQ ID NO: 2306579 - DNA, 25 bp, Homo sapien
tgcttcggctcgtgcatggtgcgct

SEQ ID NO: 2306580 - DNA, 25 bp, Homo sapien
cggctcgtgcatggtgcgctgcacc

SEQ ID NO: 2306581 - DNA, 25 bp, Homo sapien
cttcggctcgtgcatggtgcgctgc

SEQ ID NO: 2306582 - DNA, 25 bp, Homo sapien
tctgccaagagatccgctgttagtc

SEQ ID NO: 2306583 - DNA, 25 bp, Homo sapien
catgattttgcggtggctggtaccg

SEQ ID NO: 2306584 - DNA, 25 bp, Homo sapien
ctgccaagagatccgctgttagtct

SEQ ID NO: 2306585 - DNA, 25 bp, Homo sapien
aatcacaaactgcacaaagtaggca

SEQ ID NO: 2306586 - DNA, 25 bp, Homo sapien
actgcatgctctgattgatgagatg

SEQ ID NO: 2306587 - DNA, 25 bp, Homo sapien
tgtcttcctagaaccaacaataagc

SEQ ID NO: 2306588 - DNA, 25 bp, Homo sapien
tagcaaaaacaagcttctgactgca

SEQ ID NO: 2306589 - DNA, 25 bp, Homo sapien
tagccagctgtcactccataccgaa

SEQ ID NO: 2306590 - DNA, 25 bp, Homo sapien
ataccgaaagccactggtgtctaga

SEQ ID NO: 2306591 - DNA, 25 bp, Homo sapien
tcactccataccgaaagccactggt

SEQ ID NO: 2306592 - DNA, 25 bp, Homo sapien
caggtatccattggcaatgtaagtg

SEQ ID NO: 2306593 - DNA, 25 bp, Homo sapien
tacaaatcaaaagcgtacttcaaga

SEQ ID NO: 2306594 - DNA, 25 bp, Homo sapien
caaatcaaaagcgtacttcaagaat

SEQ ID NO: 2306595 - DNA, 25 bp, Homo sapien
gtacaaatcaaaagcgtacttcaag

SEQ ID NO: 2306596 - DNA, 25 bp, Homo sapien
cagtacaaatcaaaagcgtacttca

SEQ ID NO: 2306597 - DNA, 25 bp, Homo sapien
tctcaaaactggtagggtgcctgct

SEQ ID NO: 2306598 - DNA, 25 bp, Homo sapien
caaagattagcgatggtgacaacct

SEQ ID NO: 2306599 - DNA, 25 bp, Homo sapien
tgtagcccaatgttgcaaacaggtg

SEQ ID NO: 2306600 - DNA, 25 bp, Homo sapien
aagggtgccaagtgacaggagccaa

SEQ ID NO: 2306601 - DNA, 25 bp, Homo sapien
cattcattgctgttggcaatgcaga

SEQ ID NO: 2306602 - DNA, 25 bp, Homo sapien
cactcttgttcgtatttacccaaag

SEQ ID NO: 2306603 - DNA, 25 bp, Homo sapien
tactcttaccacatgatctagcaat

SEQ ID NO: 2306604 - DNA, 25 bp, Homo sapien
catggctggttacagaaactttgtt

SEQ ID NO: 2306605 - DNA, 25 bp, Homo sapien
atatcagaaagtagtgtgtgtagct

SEQ ID NO: 2306606 - DNA, 25 bp, Homo sapien
cttcagcaagataataaatatcaga

SEQ ID NO: 2306607 - DNA, 25 bp, Homo sapien
tatcagaaagtagtgtgtgtagctc

SEQ ID NO: 2306608 - DNA, 25 bp, Homo sapien
gacactttgtggcccggtggcaggg

SEQ ID NO: 2306609 - DNA, 25 bp, Homo sapien
acactttgtggcccggtggcagggc

SEQ ID NO: 2306610 - DNA, 25 bp, Homo sapien
cacaggcttccattctacagtgaag

SEQ ID NO: 2306611 - DNA, 25 bp, Homo sapien
tgatgttgaagctcagaattagcca

SEQ ID NO: 2306612 - DNA, 25 bp, Homo sapien
tcagtgtgaagaactacgggtttcc

SEQ ID NO: 2306613 - DNA, 25 bp, Homo sapien
gcatgatgccaggaaaatcacaggc

SEQ ID NO: 2306614 - DNA, 25 bp, Homo sapien
aaatatcagctttattaccaaggat

SEQ ID NO: 2306615 - DNA, 25 bp, Homo sapien
aatatcagctttattaccaaggatg

SEQ ID NO: 2306616 - DNA, 25 bp, Homo sapien
atatcagctttattaccaaggatga

SEQ ID NO: 2306617 - DNA, 25 bp, Homo sapien
aaaatatcagctttattaccaagga

SEQ ID NO: 2306618 - DNA, 25 bp, Homo sapien
actcacgtgaagagacaggtgccct

SEQ ID NO: 2306619 - DNA, 25 bp, Homo sapien
cactagcctggtgattgccggtccc

SEQ ID NO: 2306620 - DNA, 25 bp, Homo sapien
tggagagtagctaccacccaactga

SEQ ID NO: 2306621 - DNA, 25 bp, Homo sapien
tctttggataatagcactcacgtga

SEQ ID NO: 2306622 - DNA, 25 bp, Homo sapien
cataactttaatgctccaacctgag

SEQ ID NO: 2306623 - DNA, 25 bp, Homo sapien
tagactaagatgaccattgaatgca

SEQ ID NO: 2306624 - DNA, 25 bp, Homo sapien
gggaatatcccagtacgttttatga

SEQ ID NO: 2306625 - DNA, 25 bp, Homo sapien
tctcagcagcatgcaccagaaagca

SEQ ID NO: 2306626 - DNA, 25 bp, Homo sapien
aacagtgagcacctgaaggtcatcc

SEQ ID NO: 2306627 - DNA, 25 bp, Homo sapien
tcctcatgaacagtgagcacctgaa

SEQ ID NO: 2306628 - DNA, 25 bp, Homo sapien
cagctcctcatgaacagtgagcacc

SEQ ID NO: 2306629 - DNA, 25 bp, Homo sapien
catgaacagtgagcacctgaaggtc

SEQ ID NO: 2306630 - DNA, 25 bp, Homo sapien
cacggtataagcacaaggctgtaga

SEQ ID NO: 2306631 - DNA, 25 bp, Homo sapien
tgccagacctgtggtagttactgac

SEQ ID NO: 2306632 - DNA, 25 bp, Homo sapien
gctttgctgaattaccaaatcctct

SEQ ID NO: 2306633 - DNA, 25 bp, Homo sapien
tcctttccttcacgagtcacggtat

SEQ ID NO: 2306634 - DNA, 25 bp, Homo sapien
catatgtcatcaccaaatccagcag

SEQ ID NO: 2306635 - DNA, 25 bp, Homo sapien
gagagtctgggctaaacttcatgaa

SEQ ID NO: 2306636 - DNA, 25 bp, Homo sapien
ccgttgaacttcctagcagagtaga

SEQ ID NO: 2306637 - DNA, 25 bp, Homo sapien
cattatatgcccatgttagccacac

SEQ ID NO: 2306638 - DNA, 25 bp, Homo sapien
tcttaacggcagagtaccctagaac

SEQ ID NO: 2306639 - DNA, 25 bp, Homo sapien
tacacgtgtcagattaaactgctcc

SEQ ID NO: 2306640 - DNA, 25 bp, Homo sapien
taaagagtactttatacgctgccag

SEQ ID NO: 2306641 - DNA, 25 bp, Homo sapien
cacctggctgagtttaattccattt

SEQ ID NO: 2306642 - DNA, 25 bp, Homo sapien
gctgcctaacagcttgctaccaaaa

SEQ ID NO: 2306643 - DNA, 25 bp, Homo sapien
tcccattaatggctgacaatctata

SEQ ID NO: 2306644 - DNA, 25 bp, Homo sapien
gatctgctatttgccagtatatcag

SEQ ID NO: 2306645 - DNA, 25 bp, Homo sapien
aaaacagaatgacttctgaaggatc

SEQ ID NO: 2306646 - DNA, 25 bp, Homo sapien
gctaagggagcttcacatgaaagcc

SEQ ID NO: 2306647 - DNA, 25 bp, Homo sapien
gagtatgtgccttcacaatgtcagc

SEQ ID NO: 2306648 - DNA, 25 bp, Homo sapien
aacatgttttgaccaatgctgagct

SEQ ID NO: 2306649 - DNA, 25 bp, Homo sapien
gaggaggaaaaacctagccacggca

SEQ ID NO: 2306650 - DNA, 25 bp, Homo sapien
gagtggcgagaagtgccatctgacc

SEQ ID NO: 2306651 - DNA, 25 bp, Homo sapien
ggcccatgggaattcacagcccctt

SEQ ID NO: 2306652 - DNA, 25 bp, Homo sapien
tctgacctggtctggcggactttga

SEQ ID NO: 2306653 - DNA, 25 bp, Homo sapien
tcaggtgttaagcaggctgaactta

SEQ ID NO: 2306654 - DNA, 25 bp, Homo sapien
agattctctgttccgttcccttgat

SEQ ID NO: 2306655 - DNA, 25 bp, Homo sapien
cagattctctgttccgttcccttga

SEQ ID NO: 2306656 - DNA, 25 bp, Homo sapien
taaaaatcctattcttaagacatga

SEQ ID NO: 2306657 - DNA, 25 bp, Homo sapien
ctgagagacataaatagagagagga

SEQ ID NO: 2306658 - DNA, 25 bp, Homo sapien
ccaatgagggatataattgatgaag

SEQ ID NO: 2306659 - DNA, 25 bp, Homo sapien
taataaccaggaggggacagtacga

SEQ ID NO: 2306660 - DNA, 25 bp, Homo sapien
tggtggcagtcaaccttcaaaggta

SEQ ID NO: 2306661 - DNA, 25 bp, Homo sapien
caatcggaatagtctgactcgtgtc

SEQ ID NO: 2306662 - DNA, 25 bp, Homo sapien
gactcgtgtcagactacggcattgg

SEQ ID NO: 2306663 - DNA, 25 bp, Homo sapien
tgcgaaatagatttgtgagagcagc

SEQ ID NO: 2306664 - DNA, 25 bp, Homo sapien
cagcttggctgagaagcgtaagtct

SEQ ID NO: 2306665 - DNA, 25 bp, Homo sapien
aacagtgtcgtgcagaggttaaaca

SEQ ID NO: 2306666 - DNA, 25 bp, Homo sapien
tctgtttccaggtggctgaaaaatg

SEQ ID NO: 2306667 - DNA, 25 bp, Homo sapien
caggagttggaatactgattctgcc

SEQ ID NO: 2306668 - DNA, 25 bp, Homo sapien
gaatttctggcctcatgcattctgc

SEQ ID NO: 2306669 - DNA, 25 bp, Homo sapien
gagaagtgtccaatcatttcttttg

SEQ ID NO: 2306670 - DNA, 25 bp, Homo sapien
tttgagaagtgtccaatcatttctt

SEQ ID NO: 2306671 - DNA, 25 bp, Homo sapien
tctacgactgaatataagccaaatg

SEQ ID NO: 2306672 - DNA, 25 bp, Homo sapien
agacattgctgacctactgcaccgg

SEQ ID NO: 2306673 - DNA, 25 bp, Homo sapien
tacagtagtgttaaccataagcacc

SEQ ID NO: 2306674 - DNA, 25 bp, Homo sapien
tggtgaatgcctaaatgtgccctcc

SEQ ID NO: 2306675 - DNA, 25 bp, Homo sapien
tagttcagtttagctcacacaggtg

SEQ ID NO: 2306676 - DNA, 25 bp, Homo sapien
ccacaatcgtggagatacactaccc

SEQ ID NO: 2306677 - DNA, 25 bp, Homo sapien
tgttcaagagcatcctatagtgcca

SEQ ID NO: 2306678 - DNA, 25 bp, Homo sapien
taagttggtgggctcgaaaatccat

SEQ ID NO: 2306679 - DNA, 25 bp, Homo sapien
tatattgctatcaactgcagtggag

SEQ ID NO: 2306680 - DNA, 25 bp, Homo sapien
gcagtgattcgtaggttttccaaca

SEQ ID NO: 2306681 - DNA, 25 bp, Homo sapien
tcaaagtgtgagctacgtctaaaca

SEQ ID NO: 2306682 - DNA, 25 bp, Homo sapien
tccttccagaggactgatcatgtca

SEQ ID NO: 2306683 - DNA, 25 bp, Homo sapien
tctgtacagcggagatagatttatc

SEQ ID NO: 2306684 - DNA, 25 bp, Homo sapien
cacaatgtaaatgagcttgagaggc

SEQ ID NO: 2306685 - DNA, 25 bp, Homo sapien
gctcagaggcaagaccagaggtgcc

SEQ ID NO: 2306686 - DNA, 25 bp, Homo sapien
tgaaggttgcatagctaatgagctc

SEQ ID NO: 2306687 - DNA, 25 bp, Homo sapien
tccagtgaccgcacgtcctgggcgg

SEQ ID NO: 2306688 - DNA, 25 bp, Homo sapien
cccagcagcatctaggggcgtggct

SEQ ID NO: 2306689 - DNA, 25 bp, Homo sapien
gataggtcgctgttctgtctgcaat

SEQ ID NO: 2306690 - DNA, 25 bp, Homo sapien
ggctctccagtgaccgcacgtcctg

SEQ ID NO: 2306691 - DNA, 25 bp, Homo sapien
cagcgcgcggtgaggtactcttcat

SEQ ID NO: 2306692 - DNA, 25 bp, Homo sapien
ttcatctagcggtggtacaggtgga

SEQ ID NO: 2306693 - DNA, 25 bp, Homo sapien
cagctcctctttgtgatccagcagg

SEQ ID NO: 2306694 - DNA, 25 bp, Homo sapien
gcccttactttgagcaccaggactg

SEQ ID NO: 2306695 - DNA, 25 bp, Homo sapien
aggagaggtggcgagcgcggcacac

SEQ ID NO: 2306696 - DNA, 25 bp, Homo sapien
agcgtaagccgggagcacccttgag

SEQ ID NO: 2306697 - DNA, 25 bp, Homo sapien
gtaagccgggagcacccttgagtcc

SEQ ID NO: 2306698 - DNA, 25 bp, Homo sapien
ccccgagaagcgtaagccgggagca

SEQ ID NO: 2306699 - DNA, 25 bp, Homo sapien
gcctgctgcgcgctggagtgaaggg

SEQ ID NO: 2306700 - DNA, 25 bp, Homo sapien
gcagaaatgcgaacggggacggata

SEQ ID NO: 2306701 - DNA, 25 bp, Homo sapien
gcgcggtcggattgcccggcctgct

SEQ ID NO: 2306702 - DNA, 25 bp, Homo sapien
tcgcggcaaccgagctaagagaagc

SEQ ID NO: 2306703 - DNA, 25 bp, Homo sapien
tgaaaactgcgccagcggttccgag

SEQ ID NO: 2306704 - DNA, 25 bp, Homo sapien
ggcggtgggcgagtctgaaaactgc

SEQ ID NO: 2306705 - DNA, 25 bp, Homo sapien
agtctgaaaactgcgccagcggttc

SEQ ID NO: 2306706 - DNA, 25 bp, Homo sapien
gtctctgggcggtgggcgagtctga

SEQ ID NO: 2306707 - DNA, 25 bp, Homo sapien
ccctgggctgttggatttcgagttg

SEQ ID NO: 2306708 - DNA, 25 bp, Homo sapien
tgcctggctgagaggcccgacttcc

SEQ ID NO: 2306709 - DNA, 25 bp, Homo sapien
tattgggactgcgttccgtggccgc

SEQ ID NO: 2306710 - DNA, 25 bp, Homo sapien
tcctgctggcaaggtgttacccgag

SEQ ID NO: 2306711 - DNA, 25 bp, Homo sapien
caggaaacgcgacactggggatgtt

SEQ ID NO: 2306712 - DNA, 25 bp, Homo sapien
tccactctttagaaaggcgaaaaga

SEQ ID NO: 2306713 - DNA, 25 bp, Homo sapien
tcaggttgccgcctgacgattggtg

SEQ ID NO: 2306714 - DNA, 25 bp, Homo sapien
gggatgttgcccctatcacatgatg

SEQ ID NO: 2306715 - DNA, 25 bp, Homo sapien
agaatgattacacccaagttcaggt

SEQ ID NO: 2306716 - DNA, 25 bp, Homo sapien
tatagaatgattacacccaagttca

SEQ ID NO: 2306717 - DNA, 25 bp, Homo sapien
cccaagttcaggtgtaagaatttct

SEQ ID NO: 2306718 - DNA, 25 bp, Homo sapien
caagttcaggtgtaagaatttcttc

SEQ ID NO: 2306719 - DNA, 25 bp, Homo sapien
tggttcctgccctgggtcctaagga

SEQ ID NO: 2306720 - DNA, 25 bp, Homo sapien
acatgtaggagaggcttttatggca

SEQ ID NO: 2306721 - DNA, 25 bp, Homo sapien
gaattcttcgcaaccacactttggg

SEQ ID NO: 2306722 - DNA, 25 bp, Homo sapien
agcttgggaattcttcgcaaccaca

SEQ ID NO: 2306723 - DNA, 25 bp, Homo sapien
ttaatttatccttatcattagagac

SEQ ID NO: 2306724 - DNA, 25 bp, Homo sapien
ggtttgatcaactccaccctacttg

SEQ ID NO: 2306725 - DNA, 25 bp, Homo sapien
tagagacctcagtaatcatatgggt

SEQ ID NO: 2306726 - DNA, 25 bp, Homo sapien
gcttctaggatggtaaagagccatc

SEQ ID NO: 2306727 - DNA, 25 bp, Homo sapien
ggccggatgccaaagatgctaaatc

SEQ ID NO: 2306728 - DNA, 25 bp, Homo sapien
tcttttcaatgcttaaccagggctg

SEQ ID NO: 2306729 - DNA, 25 bp, Homo sapien
tcaagcaaagtatgcacagctgtgc

SEQ ID NO: 2306730 - DNA, 25 bp, Homo sapien
gacagggctaactaacacatgctgg

SEQ ID NO: 2306731 - DNA, 25 bp, Homo sapien
tgacttgatcgtggtagatatgttt

SEQ ID NO: 2306732 - DNA, 25 bp, Homo sapien
tcaggcttgtcgaagaccagatggc

SEQ ID NO: 2306733 - DNA, 25 bp, Homo sapien
cagttttcggcatgaagggattttg

SEQ ID NO: 2306734 - DNA, 25 bp, Homo sapien
tctagtttattgacagttttcggca

SEQ ID NO: 2306735 - DNA, 25 bp, Homo sapien
ttggcaaatggactagaactgactg

SEQ ID NO: 2306736 - DNA, 25 bp, Homo sapien
ggagcctcgggatcattggcaaatg

SEQ ID NO: 2306737 - DNA, 25 bp, Homo sapien
gactgaacctcagaacgactaactt

SEQ ID NO: 2306738 - DNA, 25 bp, Homo sapien
tttcagaccataaaaggagcctcgg

SEQ ID NO: 2306739 - DNA, 25 bp, Homo sapien
caagtgtgcaccaccacgcccagct

SEQ ID NO: 2306740 - DNA, 25 bp, Homo sapien
cgagtagctggccctacaagtgtgc

SEQ ID NO: 2306741 - DNA, 25 bp, Homo sapien
cccagctaattttttcctttgcagt

SEQ ID NO: 2306742 - DNA, 25 bp, Homo sapien
ctaattttttcctttgcagttgtgt

SEQ ID NO: 2306743 - DNA, 25 bp, Homo sapien
aattggtatgttagcaatttttgca

SEQ ID NO: 2306744 - DNA, 25 bp, Homo sapien
tttgtctgaattgtggaatatgctt

SEQ ID NO: 2306745 - DNA, 25 bp, Homo sapien
aggaatatttgtctgaattgtggaa

SEQ ID NO: 2306746 - DNA, 25 bp, Homo sapien
atatgcttgaaattggtatgttagc

SEQ ID NO: 2306747 - DNA, 25 bp, Homo sapien
gggctaggttatcaacatgtgaact

SEQ ID NO: 2306748 - DNA, 25 bp, Homo sapien
tggcagatgggcaagtaatctctct

SEQ ID NO: 2306749 - DNA, 25 bp, Homo sapien
tatttctagtcctgaaggctgggaa

SEQ ID NO: 2306750 - DNA, 25 bp, Homo sapien
actggcagattcattgtttggcaag

SEQ ID NO: 2306751 - DNA, 25 bp, Homo sapien
attactgcatgctctccccttccga

SEQ ID NO: 2306752 - DNA, 25 bp, Homo sapien
tcctgtattgggtcacaatcatctg

SEQ ID NO: 2306753 - DNA, 25 bp, Homo sapien
tcattctaacacctcctcctgtatt

SEQ ID NO: 2306754 - DNA, 25 bp, Homo sapien
ttgggtcacaatcatctgccacttc

SEQ ID NO: 2306755 - DNA, 25 bp, Homo sapien
ccactataatggtcaaataattctg

SEQ ID NO: 2306756 - DNA, 25 bp, Homo sapien
gaaagagaccactataatggtcaaa

SEQ ID NO: 2306757 - DNA, 25 bp, Homo sapien
caggaaagagaccactataatggtc

SEQ ID NO: 2306758 - DNA, 25 bp, Homo sapien
gagaccactataatggtcaaataat

SEQ ID NO: 2306759 - DNA, 25 bp, Homo sapien
gctcctatgctgctaggaattgcgg

SEQ ID NO: 2306760 - DNA, 25 bp, Homo sapien
tctgcatatttgagagctcctatgc

SEQ ID NO: 2306761 - DNA, 25 bp, Homo sapien
cattcattggatgacttatcctctt

SEQ ID NO: 2306762 - DNA, 25 bp, Homo sapien
agctcctatgctgctaggaattgcg

SEQ ID NO: 2306763 - DNA, 25 bp, Homo sapien
tctcacagaactcatctgaatgttc

SEQ ID NO: 2306764 - DNA, 25 bp, Homo sapien
acagaactcatctgaatgttcacac

SEQ ID NO: 2306765 - DNA, 25 bp, Homo sapien
tcacagaactcatctgaatgttcac

SEQ ID NO: 2306766 - DNA, 25 bp, Homo sapien
tccttctcacagaactcatctgaat

SEQ ID NO: 2306767 - DNA, 25 bp, Homo sapien
tacaatatgcatggtcaaaaagtag

SEQ ID NO: 2306768 - DNA, 25 bp, Homo sapien
tcaaaaagtagacccgttctgcaac

SEQ ID NO: 2306769 - DNA, 25 bp, Homo sapien
cagtcaagaggcacacttaaaatag

SEQ ID NO: 2306770 - DNA, 25 bp, Homo sapien
gtagacccgttctgcaaccggacag

SEQ ID NO: 2306771 - DNA, 25 bp, Homo sapien
gattcaaacgtaaatgaacataagt

SEQ ID NO: 2306772 - DNA, 25 bp, Homo sapien
ctatttattcatgccaatcacggtg

SEQ ID NO: 2306773 - DNA, 25 bp, Homo sapien
cagaggtgagggtgattcaaacgta

SEQ ID NO: 2306774 - DNA, 25 bp, Homo sapien
cacggtgttgagagctaatgaagag

SEQ ID NO: 2306775 - DNA, 25 bp, Homo sapien
tctgaatagggaatcaaggtctctg

SEQ ID NO: 2306776 - DNA, 25 bp, Homo sapien
ggcactttctctgaactccttacag

SEQ ID NO: 2306777 - DNA, 25 bp, Homo sapien
tccatagtatcaagagatgaagccc

SEQ ID NO: 2306778 - DNA, 25 bp, Homo sapien
caagtctcaacagaaaggttcggac

SEQ ID NO: 2306779 - DNA, 25 bp, Homo sapien
cagaatggtgaagccgtcgcaccga

SEQ ID NO: 2306780 - DNA, 25 bp, Homo sapien
caggatagcacatggaagacaacgg

SEQ ID NO: 2306781 - DNA, 25 bp, Homo sapien
ggaggatgcctaacacagttggaga

SEQ ID NO: 2306782 - DNA, 25 bp, Homo sapien
gctctaaggtttccagcagctaaag

SEQ ID NO: 2306783 - DNA, 25 bp, Homo sapien
tatagtggccaagggtaatgttccc

SEQ ID NO: 2306784 - DNA, 25 bp, Homo sapien
gtgttggctgaggtcctggtttcat

SEQ ID NO: 2306785 - DNA, 25 bp, Homo sapien
taggttgttggcagtatagtggcca

SEQ ID NO: 2306786 - DNA, 25 bp, Homo sapien
tgttggctgaggtcctggtttcatc

SEQ ID NO: 2306787 - DNA, 25 bp, Homo sapien
caccacatcgcctctgcgtgcactt

SEQ ID NO: 2306788 - DNA, 25 bp, Homo sapien
taaatgggcatctggtcagtgtggg

SEQ ID NO: 2306789 - DNA, 25 bp, Homo sapien
ggacctcatctgctgccgcagatca

SEQ ID NO: 2306790 - DNA, 25 bp, Homo sapien
gcaggagcagaatacaggacctcat

SEQ ID NO: 2306791 - DNA, 25 bp, Homo sapien
ggtaaagatttacaatctctagatt

SEQ ID NO: 2306792 - DNA, 25 bp, Homo sapien
aagatttacaatctctagatttacc

SEQ ID NO: 2306793 - DNA, 25 bp, Homo sapien
aaagatttacaatctctagatttac

SEQ ID NO: 2306794 - DNA, 25 bp, Homo sapien
ccaggtaaagatttacaatctctag

SEQ ID NO: 2306795 - DNA, 25 bp, Homo sapien
tgtaatcctgcctcctagaaatcac

SEQ ID NO: 2306796 - DNA, 25 bp, Homo sapien
gtaatcctgcctcctagaaatcaca

SEQ ID NO: 2306797 - DNA, 25 bp, Homo sapien
taatcctgcctcctagaaatcacac

SEQ ID NO: 2306798 - DNA, 25 bp, Homo sapien
gttgtaatcctgcctcctagaaatc

SEQ ID NO: 2306799 - DNA, 25 bp, Homo sapien
caacaaggataaagctagcatggac

SEQ ID NO: 2306800 - DNA, 25 bp, Homo sapien
aaagtcctgagagtaatgtgacaca

SEQ ID NO: 2306801 - DNA, 25 bp, Homo sapien
gagtggtcagcaaagccttcttgga

SEQ ID NO: 2306802 - DNA, 25 bp, Homo sapien
gctagcatggactgagtcatttcct

SEQ ID NO: 2306803 - DNA, 25 bp, Homo sapien
gatatgggtttccaacaagatcttg

SEQ ID NO: 2306804 - DNA, 25 bp, Homo sapien
tatgggtttccaacaagatcttgaa

SEQ ID NO: 2306805 - DNA, 25 bp, Homo sapien
gggtttccaacaagatcttgaagca

SEQ ID NO: 2306806 - DNA, 25 bp, Homo sapien
ttccttgggatatgggtttccaaca

SEQ ID NO: 2306807 - DNA, 25 bp, Homo sapien
gaaaaccaactgcagaagttccaaa

SEQ ID NO: 2306808 - DNA, 25 bp, Homo sapien
gtcagaaaaccaactgcagaagttc

SEQ ID NO: 2306809 - DNA, 25 bp, Homo sapien
ttaagtcagaaaaccaactgcagaa

SEQ ID NO: 2306810 - DNA, 25 bp, Homo sapien
taagtcagaaaaccaactgcagaag

SEQ ID NO: 2306811 - DNA, 25 bp, Homo sapien
caaacaagatttggaggactgtgta

SEQ ID NO: 2306812 - DNA, 25 bp, Homo sapien
tagcccaagaataagtgagctcatg

SEQ ID NO: 2306813 - DNA, 25 bp, Homo sapien
agctctagggctgtgactaaatggc

SEQ ID NO: 2306814 - DNA, 25 bp, Homo sapien
gaaaagtagataggagaaccacatg

SEQ ID NO: 2306815 - DNA, 25 bp, Homo sapien
agcctgcaatgagaggaacccggga

SEQ ID NO: 2306816 - DNA, 25 bp, Homo sapien
gcaatgagaggaacccgggagagcc

SEQ ID NO: 2306817 - DNA, 25 bp, Homo sapien
ctgcaatgagaggaacccgggagag

SEQ ID NO: 2306818 - DNA, 25 bp, Homo sapien
cctgcaatgagaggaacccgggaga

SEQ ID NO: 2306819 - DNA, 25 bp, Homo sapien
agtgggttgggcatcttgactcaag

SEQ ID NO: 2306820 - DNA, 25 bp, Homo sapien
attaccgcccggcttggagctggac

SEQ ID NO: 2306821 - DNA, 25 bp, Homo sapien
gctctgcgcggccgttctagaggtc

SEQ ID NO: 2306822 - DNA, 25 bp, Homo sapien
cgaagggacgtaattggtaggcgag

SEQ ID NO: 2306823 - DNA, 25 bp, Homo sapien
cagactaaagaatagcgcctagcac

SEQ ID NO: 2306824 - DNA, 25 bp, Homo sapien
gtttgttgaaccctgaacgctgaga

SEQ ID NO: 2306825 - DNA, 25 bp, Homo sapien
ccaaggctggactaagaatgtgcca

SEQ ID NO: 2306826 - DNA, 25 bp, Homo sapien
aatatccgccgaataaacaatgcag

SEQ ID NO: 2306827 - DNA, 25 bp, Homo sapien
agtttgtgtttgtcggctcttcact

SEQ ID NO: 2306828 - DNA, 25 bp, Homo sapien
aagagcagaagagtcgtatagcctc

SEQ ID NO: 2306829 - DNA, 25 bp, Homo sapien
tcttggaatccattgtacataaaaa

SEQ ID NO: 2306830 - DNA, 25 bp, Homo sapien
caaaagtgtactgtgccaactgctc

SEQ ID NO: 2306831 - DNA, 25 bp, Homo sapien
gataacaatttggagcatgggtaac

SEQ ID NO: 2306832 - DNA, 25 bp, Homo sapien
tagtctttggagcatggataacaat

SEQ ID NO: 2306833 - DNA, 25 bp, Homo sapien
ggtaagaccttatttgctatggcat

SEQ ID NO: 2306834 - DNA, 25 bp, Homo sapien
catgggtaacaatttggtttctggt

SEQ ID NO: 2306835 - DNA, 25 bp, Homo sapien
gagagtctgattgttgtggtccacg

SEQ ID NO: 2306836 - DNA, 25 bp, Homo sapien
cactgaccgtagtttctgtaacccg

SEQ ID NO: 2306837 - DNA, 25 bp, Homo sapien
ttgtggtccacgagtctacccctgg

SEQ ID NO: 2306838 - DNA, 25 bp, Homo sapien
tgtaacccggctcagaatcgtaaga

SEQ ID NO: 2306839 - DNA, 25 bp, Homo sapien
gatgtcttacggctttgagcttggg

SEQ ID NO: 2306840 - DNA, 25 bp, Homo sapien
tcttacggctttgagcttgggtgga

SEQ ID NO: 2306841 - DNA, 25 bp, Homo sapien
gggctgtggcttgccgggaagacag

SEQ ID NO: 2306842 - DNA, 25 bp, Homo sapien
ctgatgtcttacggctttgagcttg

SEQ ID NO: 2306843 - DNA, 25 bp, Homo sapien
actcccctgacttttcctcttatgg

SEQ ID NO: 2306844 - DNA, 25 bp, Homo sapien
cccctgacttttcctcttatggcat

SEQ ID NO: 2306845 - DNA, 25 bp, Homo sapien
taggaggcagagtcttcaacactcc

SEQ ID NO: 2306846 - DNA, 25 bp, Homo sapien
gagtcttcaacactcccctgacttt

SEQ ID NO: 2306847 - DNA, 25 bp, Homo sapien
tttccaaactcagcggagactccca

SEQ ID NO: 2306848 - DNA, 25 bp, Homo sapien
ccactcccctctgtataggagcttt

SEQ ID NO: 2306849 - DNA, 25 bp, Homo sapien
cccctctgtataggagctttccctg

SEQ ID NO: 2306850 - DNA, 25 bp, Homo sapien
tgtctctgctttgtaaggtccacag

SEQ ID NO: 2306851 - DNA, 25 bp, Homo sapien
gggcatcccctgtccagagtgggtt

SEQ ID NO: 2306852 - DNA, 25 bp, Homo sapien
taggggacgatctgcaggagccctc

SEQ ID NO: 2306853 - DNA, 25 bp, Homo sapien
tatgcttgagccctggccgggtaac

SEQ ID NO: 2306854 - DNA, 25 bp, Homo sapien
gcaggagccctctgccattattggg

SEQ ID NO: 2306855 - DNA, 25 bp, Homo sapien
ctgtgtctatctggaaatcctcatc

SEQ ID NO: 2306856 - DNA, 25 bp, Homo sapien
tcatacaagcctggcgaagatgtgg

SEQ ID NO: 2306857 - DNA, 25 bp, Homo sapien
gatcatacaagcctggcgaagatgt

SEQ ID NO: 2306858 - DNA, 25 bp, Homo sapien
atgatcatacaagcctggcgaagat

SEQ ID NO: 2306859 - DNA, 25 bp, Homo sapien
caacaggaacgtgtagggtgcagaa

SEQ ID NO: 2306860 - DNA, 25 bp, Homo sapien
tgaagtggaaccctattgcgctttc

SEQ ID NO: 2306861 - DNA, 25 bp, Homo sapien
tactacaagggataccagagatcat

SEQ ID NO: 2306862 - DNA, 25 bp, Homo sapien
tgtggcaacatgaagtagaatctcc

SEQ ID NO: 2306863 - DNA, 25 bp, Homo sapien
ggttccatatgaaaatcacccgagg

SEQ ID NO: 2306864 - DNA, 25 bp, Homo sapien
aatcctctcatctccctataatccc

SEQ ID NO: 2306865 - DNA, 25 bp, Homo sapien
ctctcatctccctataatcccaata

SEQ ID NO: 2306866 - DNA, 25 bp, Homo sapien
cctctcatctccctataatcccaat

SEQ ID NO: 2306867 - DNA, 25 bp, Homo sapien
atcctctcatctccctataatccca

SEQ ID NO: 2306868 - DNA, 25 bp, Homo sapien
catccttttaagtacctccagtgaa

SEQ ID NO: 2306869 - DNA, 25 bp, Homo sapien
gtaaacatatcttggtacacatggg

SEQ ID NO: 2306870 - DNA, 25 bp, Homo sapien
cagcttagaggcatgtagtctgtca

SEQ ID NO: 2306871 - DNA, 25 bp, Homo sapien
tagaaatgatccctagttgaaggcc

SEQ ID NO: 2306872 - DNA, 25 bp, Homo sapien
cagaggttacccatttttggcaaga

SEQ ID NO: 2306873 - DNA, 25 bp, Homo sapien
caggatcccacattgtgtgtaattt

SEQ ID NO: 2306874 - DNA, 25 bp, Homo sapien
ctcagtgtatatctcaggaggtgtg

SEQ ID NO: 2306875 - DNA, 25 bp, Homo sapien
gaagactccagaagcaatattgtgc

SEQ ID NO: 2306876 - DNA, 25 bp, Homo sapien
acttttactaactgtcagcctaatg

SEQ ID NO: 2306877 - DNA, 25 bp, Homo sapien
cccggcctgaatttctatattctaa

SEQ ID NO: 2306878 - DNA, 25 bp, Homo sapien
ggcctgaatttctatattctaagca

SEQ ID NO: 2306879 - DNA, 25 bp, Homo sapien
tactaactgtcagcctaatgttatt

SEQ ID NO: 2306880 - DNA, 25 bp, Homo sapien
tgtcaagacggtggccagttgccat

SEQ ID NO: 2306881 - DNA, 25 bp, Homo sapien
gtggccagttgccattcaactataa

SEQ ID NO: 2306882 - DNA, 25 bp, Homo sapien
agacggtggccagttgccattcaac

SEQ ID NO: 2306883 - DNA, 25 bp, Homo sapien
taattcatacactattgctattgac

SEQ ID NO: 2306884 - DNA, 25 bp, Homo sapien
tttctttagcccaatcacaggtagg

SEQ ID NO: 2306885 - DNA, 25 bp, Homo sapien
tggctttgagtgatcatctgaggaa

SEQ ID NO: 2306886 - DNA, 25 bp, Homo sapien
aagactgttggagagacagccacaa

SEQ ID NO: 2306887 - DNA, 25 bp, Homo sapien
gtaggtgacacagttggctttgagt

SEQ ID NO: 2306888 - DNA, 25 bp, Homo sapien
tataacagaataccaactcaaaatg

SEQ ID NO: 2306889 - DNA, 25 bp, Homo sapien
ataacagaataccaactcaaaatgt

SEQ ID NO: 2306890 - DNA, 25 bp, Homo sapien
taacagaataccaactcaaaatgtc

SEQ ID NO: 2306891 - DNA, 25 bp, Homo sapien
gcctgcccaggtactgctcgagagt

SEQ ID NO: 2306892 - DNA, 25 bp, Homo sapien
taggagagcaatgttggcctgccca

SEQ ID NO: 2306893 - DNA, 25 bp, Homo sapien
cagctggtcaagctgggccttagga

SEQ ID NO: 2306894 - DNA, 25 bp, Homo sapien
gctcttttgagctagaaggcccatc

SEQ ID NO: 2306895 - DNA, 25 bp, Homo sapien
cttcctgatactcagagagaaggac

SEQ ID NO: 2306896 - DNA, 25 bp, Homo sapien
gacataagaccctcacatgagaggt

SEQ ID NO: 2306897 - DNA, 25 bp, Homo sapien
tcagtcaccatgctgggccaaaaag

SEQ ID NO: 2306898 - DNA, 25 bp, Homo sapien
tctcccctgaaatacgacataagac

SEQ ID NO: 2306899 - DNA, 25 bp, Homo sapien
ttagtgtgagggtgattggaaccac

SEQ ID NO: 2306900 - DNA, 25 bp, Homo sapien
ccctcagtgaatcatttaggtaggc

SEQ ID NO: 2306901 - DNA, 25 bp, Homo sapien
tgtcagtcaccccattagcagtcag

SEQ ID NO: 2306902 - DNA, 25 bp, Homo sapien
tccagtgcttgggattagttatccc

SEQ ID NO: 2306903 - DNA, 25 bp, Homo sapien
agtgtcccacagagcacatgttagg

SEQ ID NO: 2306904 - DNA, 25 bp, Homo sapien
ctgcctagcatagcaccaactggtg

SEQ ID NO: 2306905 - DNA, 25 bp, Homo sapien
tggaaaatattcttggcctggtgcg

SEQ ID NO: 2306906 - DNA, 25 bp, Homo sapien
cacgtggcacacaattctaagatgg

SEQ ID NO: 2306907 - DNA, 25 bp, Homo sapien
tgagaagaatgctagctaaacttgc

SEQ ID NO: 2306908 - DNA, 25 bp, Homo sapien
tttgaagggctagaaccagtggtgt

SEQ ID NO: 2306909 - DNA, 25 bp, Homo sapien
ccaatgtggcgggagtatttgcatc

SEQ ID NO: 2306910 - DNA, 25 bp, Homo sapien
gctggcagcagttaccgagagcaga

SEQ ID NO: 2306911 - DNA, 25 bp, Homo sapien
gcaaatgagctagaatcttggagac

SEQ ID NO: 2306912 - DNA, 25 bp, Homo sapien
ggaaaccagaatgcagcttagtgag

SEQ ID NO: 2306913 - DNA, 25 bp, Homo sapien
tcctgcaaggaggtctcaacacagt

SEQ ID NO: 2306914 - DNA, 25 bp, Homo sapien
tcaggagcatggagggaagttatct

SEQ ID NO: 2306915 - DNA, 25 bp, Homo sapien
taacagtatcttttgccaagccgaa

SEQ ID NO: 2306916 - DNA, 25 bp, Homo sapien
gctttatagtaacactcgatgccag

SEQ ID NO: 2306917 - DNA, 25 bp, Homo sapien
ggatgtcctgttgttctagaaccat

SEQ ID NO: 2306918 - DNA, 25 bp, Homo sapien
cgatgccagatagtgtcagtctttc

SEQ ID NO: 2306919 - DNA, 25 bp, Homo sapien
tgtgtaaggaagatttccttattgt

SEQ ID NO: 2306920 - DNA, 25 bp, Homo sapien
tgtaaggaagatttccttattgtca

SEQ ID NO: 2306921 - DNA, 25 bp, Homo sapien
atatttgtgtaaggaagatttcctt

SEQ ID NO: 2306922 - DNA, 25 bp, Homo sapien
gaagatttccttattgtcatttcct

SEQ ID NO: 2306923 - DNA, 25 bp, Homo sapien
gctttgcatatacgattggcccata

SEQ ID NO: 2306924 - DNA, 25 bp, Homo sapien
ctagaattcaatgttgggagtgcat

SEQ ID NO: 2306925 - DNA, 25 bp, Homo sapien
tgaaaatagcgccatgaaaagtagc

SEQ ID NO: 2306926 - DNA, 25 bp, Homo sapien
tatatcactattccattttaccggt

SEQ ID NO: 2306927 - DNA, 25 bp, Homo sapien
cactgcaggaatagactgcgcaagt

SEQ ID NO: 2306928 - DNA, 25 bp, Homo sapien
tgcaggaatagactgcgcaagtgga

SEQ ID NO: 2306929 - DNA, 25 bp, Homo sapien
caggaatagactgcgcaagtggagg

SEQ ID NO: 2306930 - DNA, 25 bp, Homo sapien
ctgcaggaatagactgcgcaagtgg

SEQ ID NO: 2306931 - DNA, 25 bp, Homo sapien
ttgatgggcactgttccatgggctg

SEQ ID NO: 2306932 - DNA, 25 bp, Homo sapien
tttgatgggcactgttccatgggct

SEQ ID NO: 2306933 - DNA, 25 bp, Homo sapien
tgatgggcactgttccatgggctgg

SEQ ID NO: 2306934 - DNA, 25 bp, Homo sapien
gatgggcactgttccatgggctggt

SEQ ID NO: 2306935 - DNA, 25 bp, Homo sapien
tcttgctttaggaagcggaagacta

SEQ ID NO: 2306936 - DNA, 25 bp, Homo sapien
taatgaccgaagcttcaagactttg

SEQ ID NO: 2306937 - DNA, 25 bp, Homo sapien
gacccttggctcttattgttcttgc

SEQ ID NO: 2306938 - DNA, 25 bp, Homo sapien
gggcaaacgacacaagtcagcattt

SEQ ID NO: 2306939 - DNA, 25 bp, Homo sapien
cagacgggagatctcagagcttggg

SEQ ID NO: 2306940 - DNA, 25 bp, Homo sapien
ggaaataggttagcctctgggtgct

SEQ ID NO: 2306941 - DNA, 25 bp, Homo sapien
gctataggggaaataggttagcctc

SEQ ID NO: 2306942 - DNA, 25 bp, Homo sapien
gctgctgtgcttgcaagccagcgtc

SEQ ID NO: 2306943 - DNA, 25 bp, Homo sapien
ctagatctcgtccctagatagcttt

SEQ ID NO: 2306944 - DNA, 25 bp, Homo sapien
ttcctctcctgtagatcattgtgac

SEQ ID NO: 2306945 - DNA, 25 bp, Homo sapien
aagtaactggtgatttttaagcatc

SEQ ID NO: 2306946 - DNA, 25 bp, Homo sapien
taaagtaactggtgatttttaagca

SEQ ID NO: 2306947 - DNA, 25 bp, Homo sapien
aaagtaactggtgatttttaagcat

SEQ ID NO: 2306948 - DNA, 25 bp, Homo sapien
cctgtctacagtaagtgcccaaaaa

SEQ ID NO: 2306949 - DNA, 25 bp, Homo sapien
tggtcaaccacaacatacaagattg

SEQ ID NO: 2306950 - DNA, 25 bp, Homo sapien
tgttattgccaagcaccagttgtct

SEQ ID NO: 2306951 - DNA, 25 bp, Homo sapien
gctagggtgctgattcctgtctaca

SEQ ID NO: 2306952 - DNA, 25 bp, Homo sapien
cagccgagctctcgcttctctcttc

SEQ ID NO: 2306953 - DNA, 25 bp, Homo sapien
tttctccctgctgccgtgtccagcc

SEQ ID NO: 2306954 - DNA, 25 bp, Homo sapien
cgtgtccagccgagctctcgcttct

SEQ ID NO: 2306955 - DNA, 25 bp, Homo sapien
ctgctgccgtgtccagccgagctct

SEQ ID NO: 2306956 - DNA, 25 bp, Homo sapien
gagcggaagaaaggacaagcaaggt

SEQ ID NO: 2306957 - DNA, 25 bp, Homo sapien
aagaaaggacaagcaaggtccaggg

SEQ ID NO: 2306958 - DNA, 25 bp, Homo sapien
agaaaggacaagcaaggtccaggga

SEQ ID NO: 2306959 - DNA, 25 bp, Homo sapien
cttggagcggaagaaaggacaagca

SEQ ID NO: 2306960 - DNA, 25 bp, Homo sapien
ttggcagtgcaactgaggacttgcc

SEQ ID NO: 2306961 - DNA, 25 bp, Homo sapien
gattctggaaacttgagttcccact

SEQ ID NO: 2306962 - DNA, 25 bp, Homo sapien
gaaacttgagttcccactgctttgc

SEQ ID NO: 2306963 - DNA, 25 bp, Homo sapien
tgctttgcctgttggcagtgcaact

SEQ ID NO: 2306964 - DNA, 25 bp, Homo sapien
gcaggtgtgaaataacttagttcga

SEQ ID NO: 2306965 - DNA, 25 bp, Homo sapien
caccacacccattattgacagtgaa

SEQ ID NO: 2306966 - DNA, 25 bp, Homo sapien
caaagcctgagcttttaatctcagc

SEQ ID NO: 2306967 - DNA, 25 bp, Homo sapien
ctaggtagttgggactttaggctca

SEQ ID NO: 2306968 - DNA, 25 bp, Homo sapien
cagcctttatctcccaggtttaaga

SEQ ID NO: 2306969 - DNA, 25 bp, Homo sapien
caggctcttgctttgtggcccagtc

SEQ ID NO: 2306970 - DNA, 25 bp, Homo sapien
gcctttatctcccaggtttaagaga

SEQ ID NO: 2306971 - DNA, 25 bp, Homo sapien
ttatctcccaggtttaagagatcct

SEQ ID NO: 2306972 - DNA, 25 bp, Homo sapien
gaaaagcagtctatgcaggccccta

SEQ ID NO: 2306973 - DNA, 25 bp, Homo sapien
ggtaggaaaagcagtctatgcaggc

SEQ ID NO: 2306974 - DNA, 25 bp, Homo sapien
gcagtctatgcaggcccctatcact

SEQ ID NO: 2306975 - DNA, 25 bp, Homo sapien
taggaaaagcagtctatgcaggccc

SEQ ID NO: 2306976 - DNA, 25 bp, Homo sapien
tccttaggcgtaaagcttcctcagc

SEQ ID NO: 2306977 - DNA, 25 bp, Homo sapien
tcagggacttcgctcccggatatcc

SEQ ID NO: 2306978 - DNA, 25 bp, Homo sapien
cagctcagggacttcgctcccggat

SEQ ID NO: 2306979 - DNA, 25 bp, Homo sapien
tgcattttctttaccctccttggcc

SEQ ID NO: 2306980 - DNA, 25 bp, Homo sapien
tgaatccccgcatcatgaaaccacg

SEQ ID NO: 2306981 - DNA, 25 bp, Homo sapien
agagagccctgcgtctatctacggc

SEQ ID NO: 2306982 - DNA, 25 bp, Homo sapien
aaactgggctccgtgtaatcacagg

SEQ ID NO: 2306983 - DNA, 25 bp, Homo sapien
cctacgtaggtctcggatctgcagt

SEQ ID NO: 2306984 - DNA, 25 bp, Homo sapien
gaggagggaggtttatgaacaatca

SEQ ID NO: 2306985 - DNA, 25 bp, Homo sapien
agaggagggaggtttatgaacaatc

SEQ ID NO: 2306986 - DNA, 25 bp, Homo sapien
aggagggaggtttatgaacaatcat

SEQ ID NO: 2306987 - DNA, 25 bp, Homo sapien
gccttgtctagtggcagttcaggcc

SEQ ID NO: 2306988 - DNA, 25 bp, Homo sapien
ttgacctatgaatgacctgaggctg

SEQ ID NO: 2306989 - DNA, 25 bp, Homo sapien
ggaagggagccaaaagccttgtcta

SEQ ID NO: 2306990 - DNA, 25 bp, Homo sapien
gcttgacctatgaatgacctgaggc

SEQ ID NO: 2306991 - DNA, 25 bp, Homo sapien
gagtggacctggagtgcccgcataa

SEQ ID NO: 2306992 - DNA, 25 bp, Homo sapien
ggagtgcccgcataacaggctccac

SEQ ID NO: 2306993 - DNA, 25 bp, Homo sapien
tggacctggagtgcccgcataacag

SEQ ID NO: 2306994 - DNA, 25 bp, Homo sapien
ctggagtgcccgcataacaggctcc

SEQ ID NO: 2306995 - DNA, 25 bp, Homo sapien
aggagagaagggctgggagggactc

SEQ ID NO: 2306996 - DNA, 25 bp, Homo sapien
gagagaagggctgggagggactcac

SEQ ID NO: 2306997 - DNA, 25 bp, Homo sapien
ctaggacagaaggagagaagggctg

SEQ ID NO: 2306998 - DNA, 25 bp, Homo sapien
acagaaggagagaagggctgggagg

SEQ ID NO: 2306999 - DNA, 25 bp, Homo sapien
ccagggcgcacagcctagctccttc

SEQ ID NO: 2307000 - DNA, 25 bp, Homo sapien
tagctccttcctttgcacaggatgg

SEQ ID NO: 2307001 - DNA, 25 bp, Homo sapien
gctccttcctttgcacaggatggct

SEQ ID NO: 2307002 - DNA, 25 bp, Homo sapien
acgcccagggcgcacagcctagctc

SEQ ID NO: 2307003 - DNA, 25 bp, Homo sapien
tcgcggacctcacggtagttaaggc

SEQ ID NO: 2307004 - DNA, 25 bp, Homo sapien
aaacgtaccagatggtggtcggagc

SEQ ID NO: 2307005 - DNA, 25 bp, Homo sapien
tgtatactgccctatgcacagagtc

SEQ ID NO: 2307006 - DNA, 25 bp, Homo sapien
cttgctctaagctgcccgggagtga

SEQ ID NO: 2307007 - DNA, 25 bp, Homo sapien
atgaccaggtcgggggcgtgctcgc

SEQ ID NO: 2307008 - DNA, 25 bp, Homo sapien
ggtcgggggcgtgctcgcccgactg

SEQ ID NO: 2307009 - DNA, 25 bp, Homo sapien
gggcgtgctcgcccgactgcagctc

SEQ ID NO: 2307010 - DNA, 25 bp, Homo sapien
ccgactgcagctctttcaagatggt

SEQ ID NO: 2307011 - DNA, 25 bp, Homo sapien
ctggagatgtcccagaggcaggaat

SEQ ID NO: 2307012 - DNA, 25 bp, Homo sapien
agatgtcccagaggcaggaattcat

SEQ ID NO: 2307013 - DNA, 25 bp, Homo sapien
tggagatgtcccagaggcaggaatt

SEQ ID NO: 2307014 - DNA, 25 bp, Homo sapien
gagatgtcccagaggcaggaattca

SEQ ID NO: 2307015 - DNA, 25 bp, Homo sapien
agcggtgcacacgtccattccagtg

SEQ ID NO: 2307016 - DNA, 25 bp, Homo sapien
gaaatgcaagtccagtacatcgaag

SEQ ID NO: 2307017 - DNA, 25 bp, Homo sapien
gctttgaccacttcgtttttcagga

SEQ ID NO: 2307018 - DNA, 25 bp, Homo sapien
agttatgtttacgtgcctcggtggc

SEQ ID NO: 2307019 - DNA, 25 bp, Homo sapien
gggtggcggtggggcagctccacac

SEQ ID NO: 2307020 - DNA, 25 bp, Homo sapien
ggggtggcggtggggcagctccaca

SEQ ID NO: 2307021 - DNA, 25 bp, Homo sapien
gaacccaagcagggggcggtatgtg

SEQ ID NO: 2307022 - DNA, 25 bp, Homo sapien
cctggggcggcccttcgactctcgg

SEQ ID NO: 2307023 - DNA, 25 bp, Homo sapien
cggcccttcgactctcgggccaggt

SEQ ID NO: 2307024 - DNA, 25 bp, Homo sapien
aggtaaggccgggtgatttctgttg

SEQ ID NO: 2307025 - DNA, 25 bp, Homo sapien
gcattccctggtgatggagaatggg

SEQ ID NO: 2307026 - DNA, 25 bp, Homo sapien
cattccctggtgatggagaatggga

SEQ ID NO: 2307027 - DNA, 25 bp, Homo sapien
ctgaggaaaaacaggcatctggggg

SEQ ID NO: 2307028 - DNA, 25 bp, Homo sapien
gaggaaaaacaggcatctgggggac

SEQ ID NO: 2307029 - DNA, 25 bp, Homo sapien
tgaggaaaaacaggcatctggggga

SEQ ID NO: 2307030 - DNA, 25 bp, Homo sapien
tcgacgaagaaacctgcatgggctg

SEQ ID NO: 2307031 - DNA, 25 bp, Homo sapien
tctgaatggcaatagaattgatccg

SEQ ID NO: 2307032 - DNA, 25 bp, Homo sapien
gggacatctgaatggcaatagaatt

SEQ ID NO: 2307033 - DNA, 25 bp, Homo sapien
ccataaaattgtcttcgacgaagaa

SEQ ID NO: 2307034 - DNA, 25 bp, Homo sapien
gatacctgccaaaacccctatgtac

SEQ ID NO: 2307035 - DNA, 25 bp, Homo sapien
ggccacggggacgatacctgccaaa

SEQ ID NO: 2307036 - DNA, 25 bp, Homo sapien
ttctctttgaaggtcgaggccgctg

SEQ ID NO: 2307037 - DNA, 25 bp, Homo sapien
gccgctgtccccagggcgtataggg

SEQ ID NO: 2307038 - DNA, 25 bp, Homo sapien
tcagtctgttcaggccaagcaatgg

SEQ ID NO: 2307039 - DNA, 25 bp, Homo sapien
ccaagaagaatgagtcaggctgctc

SEQ ID NO: 2307040 - DNA, 25 bp, Homo sapien
caatgaacaaaaggaagacgaggca

SEQ ID NO: 2307041 - DNA, 25 bp, Homo sapien
tggactccaggcttaagttaacaag

SEQ ID NO: 2307042 - DNA, 25 bp, Homo sapien
cgttgtgctaagatttgagacacag

SEQ ID NO: 2307043 - DNA, 25 bp, Homo sapien
agacacagagataagataaaggtcc

SEQ ID NO: 2307044 - DNA, 25 bp, Homo sapien
caggcgttgtgctaagatttgagac

SEQ ID NO: 2307045 - DNA, 25 bp, Homo sapien
tgccaggcgttgtgctaagatttga

SEQ ID NO: 2307046 - DNA, 25 bp, Homo sapien
gaaatggtcctgaaaggcctcttag

SEQ ID NO: 2307047 - DNA, 25 bp, Homo sapien
cattgcagagtgaggtaagccatac

SEQ ID NO: 2307048 - DNA, 25 bp, Homo sapien
tgcaaaggcccaagttataaaagag

SEQ ID NO: 2307049 - DNA, 25 bp, Homo sapien
ggcctcttaggagggaacttgcaag

SEQ ID NO: 2307050 - DNA, 25 bp, Homo sapien
gcttgattgcactgctaggtctcct

SEQ ID NO: 2307051 - DNA, 25 bp, Homo sapien
tgagaaacatgctgcttcgatgatg

SEQ ID NO: 2307052 - DNA, 25 bp, Homo sapien
cctgcattctaaacctcaacagtgg

SEQ ID NO: 2307053 - DNA, 25 bp, Homo sapien
tttgttttcaaatgccggaccttgc

SEQ ID NO: 2307054 - DNA, 25 bp, Homo sapien
taaaattgtcgaagagacgggcggc

SEQ ID NO: 2307055 - DNA, 25 bp, Homo sapien
gacgggcggccgctttgtacaactc

SEQ ID NO: 2307056 - DNA, 25 bp, Homo sapien
ttgcagaagtcgtgaacataaaatt

SEQ ID NO: 2307057 - DNA, 25 bp, Homo sapien
atttaaccgtaaatgttgcctcctg

SEQ ID NO: 2307058 - DNA, 25 bp, Homo sapien
tgcgccaggccctattttttgagag

SEQ ID NO: 2307059 - DNA, 25 bp, Homo sapien
gcgccaggccctattttttgagaga

SEQ ID NO: 2307060 - DNA, 25 bp, Homo sapien
actgcgccaggccctattttttgag

SEQ ID NO: 2307061 - DNA, 25 bp, Homo sapien
agtctctattgcccacgttggaatg

SEQ ID NO: 2307062 - DNA, 25 bp, Homo sapien
ctgtttgaagagagctctaccatct

SEQ ID NO: 2307063 - DNA, 25 bp, Homo sapien
ttttctgaggcaaagtctccctcta

SEQ ID NO: 2307064 - DNA, 25 bp, Homo sapien
gctgaaccaggttagtgattctttt

SEQ ID NO: 2307065 - DNA, 25 bp, Homo sapien
gagagctctaccatcttaggcaagt

SEQ ID NO: 2307066 - DNA, 25 bp, Homo sapien
tctgccatacgaggccattttttaa

SEQ ID NO: 2307067 - DNA, 25 bp, Homo sapien
gcatacctgacttatgtatctgcca

SEQ ID NO: 2307068 - DNA, 25 bp, Homo sapien
ggctctaagataagcaggtattttt

SEQ ID NO: 2307069 - DNA, 25 bp, Homo sapien
tcccatccgatatgatcccaggagt

SEQ ID NO: 2307070 - DNA, 25 bp, Homo sapien
cagagagtctgtggatcctctcagg

SEQ ID NO: 2307071 - DNA, 25 bp, Homo sapien
tttgggggtctcctgggtcctgcag

SEQ ID NO: 2307072 - DNA, 25 bp, Homo sapien
tatttgggggtctcctgggtcctgc

SEQ ID NO: 2307073 - DNA, 25 bp, Homo sapien
ttcagagagtctgtggatcctctca

SEQ ID NO: 2307074 - DNA, 25 bp, Homo sapien
ggtcctgtgtgacttatcctttaaa

SEQ ID NO: 2307075 - DNA, 25 bp, Homo sapien
tttagcagttcttatagtggtggcc

SEQ ID NO: 2307076 - DNA, 25 bp, Homo sapien
ttcttatagtggtggcctggtaatg

SEQ ID NO: 2307077 - DNA, 25 bp, Homo sapien
gtggcctggtaatggcgaattctct

SEQ ID NO: 2307078 - DNA, 25 bp, Homo sapien
gatgggaaggtgaccgcttccacct

SEQ ID NO: 2307079 - DNA, 25 bp, Homo sapien
attgaggctcgttttgagagatagg

SEQ ID NO: 2307080 - DNA, 25 bp, Homo sapien
tagatgggaaggtgaccgcttccac

SEQ ID NO: 2307081 - DNA, 25 bp, Homo sapien
gaggctcgttttgagagataggact

SEQ ID NO: 2307082 - DNA, 25 bp, Homo sapien
ggtatctaatttctcctgacttaag

SEQ ID NO: 2307083 - DNA, 25 bp, Homo sapien
gtatctaatttctcctgacttaagc

SEQ ID NO: 2307084 - DNA, 25 bp, Homo sapien
gctgcaaagtattccatcagatata

SEQ ID NO: 2307085 - DNA, 25 bp, Homo sapien
tgagcagtatacagtgcgccatatt

SEQ ID NO: 2307086 - DNA, 25 bp, Homo sapien
cacatatatatgcaccaccgtttct

SEQ ID NO: 2307087 - DNA, 25 bp, Homo sapien
tacacttatatacctacacacacat

SEQ ID NO: 2307088 - DNA, 25 bp, Homo sapien
agaaacgctccgtggacatgcacag

SEQ ID NO: 2307089 - DNA, 25 bp, Homo sapien
aacgctccgtggacatgcacaggat

SEQ ID NO: 2307090 - DNA, 25 bp, Homo sapien
tcagaaacgctccgtggacatgcac

SEQ ID NO: 2307091 - DNA, 25 bp, Homo sapien
aaacgctccgtggacatgcacagga

SEQ ID NO: 2307092 - DNA, 25 bp, Homo sapien
ttatttcttgttgaagagttcctta

SEQ ID NO: 2307093 - DNA, 25 bp, Homo sapien
tcttgttgaagagttccttattaaa

SEQ ID NO: 2307094 - DNA, 25 bp, Homo sapien
tatttcttgttgaagagttccttat

SEQ ID NO: 2307095 - DNA, 25 bp, Homo sapien
tttcttgttgaagagttccttatta

SEQ ID NO: 2307096 - DNA, 25 bp, Homo sapien
gattatcagttctgcacaacgcctg

SEQ ID NO: 2307097 - DNA, 25 bp, Homo sapien
cactaatcgtgtgagcttctacaag

SEQ ID NO: 2307098 - DNA, 25 bp, Homo sapien
taaagccagcgtggagattgactct

SEQ ID NO: 2307099 - DNA, 25 bp, Homo sapien
gaaagccttggcacatagtaacact

SEQ ID NO: 2307100 - DNA, 25 bp, Homo sapien
cttttctagcaagaagccttcataa

SEQ ID NO: 2307101 - DNA, 25 bp, Homo sapien
gattttgctgattacatccccaggt

SEQ ID NO: 2307102 - DNA, 25 bp, Homo sapien
gatctataagtcctctctctcattg

SEQ ID NO: 2307103 - DNA, 25 bp, Homo sapien
cagatatgctatcaaatcggaatcc

SEQ ID NO: 2307104 - DNA, 25 bp, Homo sapien
ggtgcagcagtctaagaccatttat

SEQ ID NO: 2307105 - DNA, 25 bp, Homo sapien
tgttgtggcacacacgtgcagcctc

SEQ ID NO: 2307106 - DNA, 25 bp, Homo sapien
tatctatgggcaacaaactccttgt

SEQ ID NO: 2307107 - DNA, 25 bp, Homo sapien
acctctccgggacttatatttctca

SEQ ID NO: 2307108 - DNA, 25 bp, Homo sapien
cttatgattcctgaaaccactgtca

SEQ ID NO: 2307109 - DNA, 25 bp, Homo sapien
tttccttatgattcctgaaaccact

SEQ ID NO: 2307110 - DNA, 25 bp, Homo sapien
tgttggaagtaaaggcctgctgtac

SEQ ID NO: 2307111 - DNA, 25 bp, Homo sapien
gattgacttccagttgtttccttat

SEQ ID NO: 2307112 - DNA, 25 bp, Homo sapien
gtttcctttggcaatcattcctgta

SEQ ID NO: 2307113 - DNA, 25 bp, Homo sapien
tctacttcggctgctattgttcttt

SEQ ID NO: 2307114 - DNA, 25 bp, Homo sapien
tcctgtactgtcctaggtttggcat

SEQ ID NO: 2307115 - DNA, 25 bp, Homo sapien
tttccttctacttcggctgctattg

SEQ ID NO: 2307116 - DNA, 25 bp, Homo sapien
atcagggtcgggttttcttagccag

SEQ ID NO: 2307117 - DNA, 25 bp, Homo sapien
tggagtttcaacagtgcctgcggtg

SEQ ID NO: 2307118 - DNA, 25 bp, Homo sapien
tcattggaaggcgtttccatcaggg

SEQ ID NO: 2307119 - DNA, 25 bp, Homo sapien
aatgcaacaggaattgtgttgagtc

SEQ ID NO: 2307120 - DNA, 25 bp, Homo sapien
gaagacctggttagtggcaggcact

SEQ ID NO: 2307121 - DNA, 25 bp, Homo sapien
atgcaaaggcaacaatgtgatctcc

SEQ ID NO: 2307122 - DNA, 25 bp, Homo sapien
ggcactggactaacattgtggtgaa

SEQ ID NO: 2307123 - DNA, 25 bp, Homo sapien
ggcaacaatgtgatctccattcagg

SEQ ID NO: 2307124 - DNA, 25 bp, Homo sapien
aaaggcgatgcgtctggagttattc

SEQ ID NO: 2307125 - DNA, 25 bp, Homo sapien
cgtggctgacatcaggagtgaagct

SEQ ID NO: 2307126 - DNA, 25 bp, Homo sapien
gttcataaaggcagtgccaacccaa

SEQ ID NO: 2307127 - DNA, 25 bp, Homo sapien
tggaattgttcgtccctcctggtga

SEQ ID NO: 2307128 - DNA, 25 bp, Homo sapien
gtaaatgatcagagcatgccctttc

SEQ ID NO: 2307129 - DNA, 25 bp, Homo sapien
gatttttattggctacaattgctta

SEQ ID NO: 2307130 - DNA, 25 bp, Homo sapien
taaaggttctttattgctatggact

SEQ ID NO: 2307131 - DNA, 25 bp, Homo sapien
gcgtctttacgccaggttcacctca

SEQ ID NO: 2307132 - DNA, 25 bp, Homo sapien
tcatgtaagacttgccagtttcccc

SEQ ID NO: 2307133 - DNA, 25 bp, Homo sapien
tcatgtcttgtgtaaatcccctccc

SEQ ID NO: 2307134 - DNA, 25 bp, Homo sapien
gctgatgggatacgattgtgcaaca

SEQ ID NO: 2307135 - DNA, 25 bp, Homo sapien
ttgtacagcccgtggcactgtgagc

SEQ ID NO: 2307136 - DNA, 25 bp, Homo sapien
tgtacctagtgcatctgacaccctg

SEQ ID NO: 2307137 - DNA, 25 bp, Homo sapien
taatatagactatgaaatatgaaca

SEQ ID NO: 2307138 - DNA, 25 bp, Homo sapien
aaattaagtaggataaagggcagtg

SEQ ID NO: 2307139 - DNA, 25 bp, Homo sapien
caataaatcaggcaagtattatgac

SEQ ID NO: 2307140 - DNA, 25 bp, Homo sapien
tgtcctcccctcagatggccctgac

SEQ ID NO: 2307141 - DNA, 25 bp, Homo sapien
agctgacagccatgtcctcccctca

SEQ ID NO: 2307142 - DNA, 25 bp, Homo sapien
caggagtggagaggggccaacctgg

SEQ ID NO: 2307143 - DNA, 25 bp, Homo sapien
tcagatggccctgacgtcaggagtg

SEQ ID NO: 2307144 - DNA, 25 bp, Homo sapien
tgaaagtaatctgggtggtcagaga

SEQ ID NO: 2307145 - DNA, 25 bp, Homo sapien
cagccgtgacgcagtctttgcccat

SEQ ID NO: 2307146 - DNA, 25 bp, Homo sapien
gctgctgtgatcgttttggctgttt

SEQ ID NO: 2307147 - DNA, 25 bp, Homo sapien
ctgttttgttgaactgatctcagtc

SEQ ID NO: 2307148 - DNA, 25 bp, Homo sapien
ccatatcagatgtggaccatttttt

SEQ ID NO: 2307149 - DNA, 25 bp, Homo sapien
aagcccaaccatatcagatgtggac

SEQ ID NO: 2307150 - DNA, 25 bp, Homo sapien
caaccatatcagatgtggaccattt

SEQ ID NO: 2307151 - DNA, 25 bp, Homo sapien
gcccaaccatatcagatgtggacca

SEQ ID NO: 2307152 - DNA, 25 bp, Homo sapien
aattgttcctgaagactgttttctt

SEQ ID NO: 2307153 - DNA, 25 bp, Homo sapien
ttcctgaaattgttcctgaagactg

SEQ ID NO: 2307154 - DNA, 25 bp, Homo sapien
ctgaaattgttcctgaagactgttt

SEQ ID NO: 2307155 - DNA, 25 bp, Homo sapien
cttcctgaaattgttcctgaagact

SEQ ID NO: 2307156 - DNA, 25 bp, Homo sapien
gacactctgacaatagcaggtcttc

SEQ ID NO: 2307157 - DNA, 25 bp, Homo sapien
acagaacttttgtcacagatggaaa

SEQ ID NO: 2307158 - DNA, 25 bp, Homo sapien
taatccacagaaagatagaaagagg

SEQ ID NO: 2307159 - DNA, 25 bp, Homo sapien
tactccaagtgaaggtagaaaccag

SEQ ID NO: 2307160 - DNA, 25 bp, Homo sapien
tgagactggcttatatgattaattc

SEQ ID NO: 2307161 - DNA, 25 bp, Homo sapien
aatgagactggcttatatgattaat

SEQ ID NO: 2307162 - DNA, 25 bp, Homo sapien
gagactggcttatatgattaattct

SEQ ID NO: 2307163 - DNA, 25 bp, Homo sapien
agactggcttatatgattaattcta

SEQ ID NO: 2307164 - DNA, 25 bp, Homo sapien
tgggcttgatccaagaggccttttc

SEQ ID NO: 2307165 - DNA, 25 bp, Homo sapien
ccttttttgaaagggactctctctg

SEQ ID NO: 2307166 - DNA, 25 bp, Homo sapien
tgaaagggactctctctgatgtcca

SEQ ID NO: 2307167 - DNA, 25 bp, Homo sapien
tccaagaggccttttcgaaagtaga

SEQ ID NO: 2307168 - DNA, 25 bp, Homo sapien
catcagaacatgtcaacactccagg

SEQ ID NO: 2307169 - DNA, 25 bp, Homo sapien
gattgttcagaatgctccgacagag

SEQ ID NO: 2307170 - DNA, 25 bp, Homo sapien
gagatgaagcatggctgtcattgca

SEQ ID NO: 2307171 - DNA, 25 bp, Homo sapien
gatcttttgaggagtggactctgct

SEQ ID NO: 2307172 - DNA, 25 bp, Homo sapien
taagccggcttcttcagttgaccac

SEQ ID NO: 2307173 - DNA, 25 bp, Homo sapien
gacatgttgtcagctctgatgaggg

SEQ ID NO: 2307174 - DNA, 25 bp, Homo sapien
tgagcacctgactggagcaactaag

SEQ ID NO: 2307175 - DNA, 25 bp, Homo sapien
ggtagagcccagaccgagttctcat

SEQ ID NO: 2307176 - DNA, 25 bp, Homo sapien
ggcctcttgaactggtgctgcttga

SEQ ID NO: 2307177 - DNA, 25 bp, Homo sapien
ggttcttagcaacatgggcctcttg

SEQ ID NO: 2307178 - DNA, 25 bp, Homo sapien
gatgtcagtcaggaccactgtcagc

SEQ ID NO: 2307179 - DNA, 25 bp, Homo sapien
gctgctcactagcaagatgccttgg

SEQ ID NO: 2307180 - DNA, 25 bp, Homo sapien
ccaatatgaggtggtaataaatccc

SEQ ID NO: 2307181 - DNA, 25 bp, Homo sapien
ccttttcatccaatatgaggtggta

SEQ ID NO: 2307182 - DNA, 25 bp, Homo sapien
gtccttttcatccaatatgaggtgg

SEQ ID NO: 2307183 - DNA, 25 bp, Homo sapien
gtggtaataaatcccttgaggaata

SEQ ID NO: 2307184 - DNA, 25 bp, Homo sapien
gctaagttcaccactgactccctga

SEQ ID NO: 2307185 - DNA, 25 bp, Homo sapien
tgactccctgattgtctcccagaac

SEQ ID NO: 2307186 - DNA, 25 bp, Homo sapien
actgactccctgattgtctcccaga

SEQ ID NO: 2307187 - DNA, 25 bp, Homo sapien
cagggctaagttcaccactgactcc

SEQ ID NO: 2307188 - DNA, 25 bp, Homo sapien
gctctgtctatgagcaagttgctag

SEQ ID NO: 2307189 - DNA, 25 bp, Homo sapien
taaacctggagcctcaagactgcca

SEQ ID NO: 2307190 - DNA, 25 bp, Homo sapien
ccccaggaagagtgcctagacaaca

SEQ ID NO: 2307191 - DNA, 25 bp, Homo sapien
tcatagtcagccaagtccaattgtg

SEQ ID NO: 2307192 - DNA, 25 bp, Homo sapien
aggtgagagtgccatggcatcaatg

SEQ ID NO: 2307193 - DNA, 25 bp, Homo sapien
cagtggaggtgagagtgccatggca

SEQ ID NO: 2307194 - DNA, 25 bp, Homo sapien
ggtgagagtgccatggcatcaatgt

SEQ ID NO: 2307195 - DNA, 25 bp, Homo sapien
tggaggtgagagtgccatggcatca

SEQ ID NO: 2307196 - DNA, 25 bp, Homo sapien
cttaatacctcaggaattaagagtt

SEQ ID NO: 2307197 - DNA, 25 bp, Homo sapien
ggcactgccagggccgcatttctct

SEQ ID NO: 2307198 - DNA, 25 bp, Homo sapien
tcaggaattaagagtttcccagctt

SEQ ID NO: 2307199 - DNA, 25 bp, Homo sapien
cctcaggaattaagagtttcccagc

SEQ ID NO: 2307200 - DNA, 25 bp, Homo sapien
tggtaactatttccatccccttcca

SEQ ID NO: 2307201 - DNA, 25 bp, Homo sapien
gtaactatttccatccccttccaca

SEQ ID NO: 2307202 - DNA, 25 bp, Homo sapien
aagcagaatggttcttgttaggata

SEQ ID NO: 2307203 - DNA, 25 bp, Homo sapien
tcttgttaggatagatgtgtatggt

SEQ ID NO: 2307204 - DNA, 25 bp, Homo sapien
ttaggatagatgtgtatggtacttt

SEQ ID NO: 2307205 - DNA, 25 bp, Homo sapien
tggttcttgttaggatagatgtgta

SEQ ID NO: 2307206 - DNA, 25 bp, Homo sapien
cccggatctcccaatactggttggt

SEQ ID NO: 2307207 - DNA, 25 bp, Homo sapien
ttccactgcagtgggggcccgcata

SEQ ID NO: 2307208 - DNA, 25 bp, Homo sapien
tctcccaatactggttggttattct

SEQ ID NO: 2307209 - DNA, 25 bp, Homo sapien
gtgggggcccgcatactgcccactt

SEQ ID NO: 2307210 - DNA, 25 bp, Homo sapien
tgatcgttgaaagaacaggctagtt

SEQ ID NO: 2307211 - DNA, 25 bp, Homo sapien
cagatgatcgttgaaagaacaggct

SEQ ID NO: 2307212 - DNA, 25 bp, Homo sapien
gatgatcgttgaaagaacaggctag

SEQ ID NO: 2307213 - DNA, 25 bp, Homo sapien
gctttttcagatgatcgttgaaaga

SEQ ID NO: 2307214 - DNA, 25 bp, Homo sapien
cttaaagcctgaaggaagctcggtc

SEQ ID NO: 2307215 - DNA, 25 bp, Homo sapien
aagctcggtcatcatcattttatag

SEQ ID NO: 2307216 - DNA, 25 bp, Homo sapien
tcatggaatcttcttaaagcctgaa

SEQ ID NO: 2307217 - DNA, 25 bp, Homo sapien
ctgaaggaagctcggtcatcatcat

SEQ ID NO: 2307218 - DNA, 25 bp, Homo sapien
tgctccataagtgacggtgaggcag

SEQ ID NO: 2307219 - DNA, 25 bp, Homo sapien
gtgctccataagtgacggtgaggca

SEQ ID NO: 2307220 - DNA, 25 bp, Homo sapien
ggtgctccataagtgacggtgaggc

SEQ ID NO: 2307221 - DNA, 25 bp, Homo sapien
tggtgctccataagtgacggtgagg

SEQ ID NO: 2307222 - DNA, 25 bp, Homo sapien
tttcacagtccttacacaaggtgaa

SEQ ID NO: 2307223 - DNA, 25 bp, Homo sapien
ttcacagtccttacacaaggtgaaa

SEQ ID NO: 2307224 - DNA, 25 bp, Homo sapien
cagcaagcttcaatagtatggaccc

SEQ ID NO: 2307225 - DNA, 25 bp, Homo sapien
caatgcagcaagcttcaatagtatg

SEQ ID NO: 2307226 - DNA, 25 bp, Homo sapien
gcttcatcaatgcagcaagcttcaa

SEQ ID NO: 2307227 - DNA, 25 bp, Homo sapien
atagtatggacccatgccagccacc

SEQ ID NO: 2307228 - DNA, 25 bp, Homo sapien
ggcttgatttctaaggtcacgttca

SEQ ID NO: 2307229 - DNA, 25 bp, Homo sapien
tcacttctgattattgtggtgcgaa

SEQ ID NO: 2307230 - DNA, 25 bp, Homo sapien
gatctaaacctacggcttacactag

SEQ ID NO: 2307231 - DNA, 25 bp, Homo sapien
tacactaggcttgatttctaaggtc

SEQ ID NO: 2307232 - DNA, 25 bp, Homo sapien
ctcaagggtaatggtcttacctgtc

SEQ ID NO: 2307233 - DNA, 25 bp, Homo sapien
tgtcatagtcagatggtgtgctcat

SEQ ID NO: 2307234 - DNA, 25 bp, Homo sapien
tacctgtcaaggtgttcacaaagtt

SEQ ID NO: 2307235 - DNA, 25 bp, Homo sapien
aagtacagaaacaagtgccaagtgg

SEQ ID NO: 2307236 - DNA, 25 bp, Homo sapien
cagagcttccctgtatgaggtttat

SEQ ID NO: 2307237 - DNA, 25 bp, Homo sapien
tatgtcaaccccttttgagaggtct

SEQ ID NO: 2307238 - DNA, 25 bp, Homo sapien
aaccctccttgtcaagatctactgc

SEQ ID NO: 2307239 - DNA, 25 bp, Homo sapien
tttacctgagtatcaccagggaagg

SEQ ID NO: 2307240 - DNA, 25 bp, Homo sapien
tactgtgcttttgcagtactggtgc

SEQ ID NO: 2307241 - DNA, 25 bp, Homo sapien
cagtactggtgctgggctgataact

SEQ ID NO: 2307242 - DNA, 25 bp, Homo sapien
gaaaggctcaatcaggggtttgatg

SEQ ID NO: 2307243 - DNA, 25 bp, Homo sapien
tatggaatcagtactgtgcttttgc

SEQ ID NO: 2307244 - DNA, 25 bp, Homo sapien
caagctggttccatcctgagaagga

SEQ ID NO: 2307245 - DNA, 25 bp, Homo sapien
tagacggaaggactagtttgccaac

SEQ ID NO: 2307246 - DNA, 25 bp, Homo sapien
ccaggattaccggttgacagtagtc

SEQ ID NO: 2307247 - DNA, 25 bp, Homo sapien
caaaagatgcgaggagttagacgga

SEQ ID NO: 2307248 - DNA, 25 bp, Homo sapien
tgagaactaaatgctgtaccacaga

SEQ ID NO: 2307249 - DNA, 25 bp, Homo sapien
cagagccgggtgtgaactatggttt

SEQ ID NO: 2307250 - DNA, 25 bp, Homo sapien
tgaataactctacgagaccagagag

SEQ ID NO: 2307251 - DNA, 25 bp, Homo sapien
gaccagagagactgtagttccctat

SEQ ID NO: 2307252 - DNA, 25 bp, Homo sapien
tcctgccagggccgctgctacgaag

SEQ ID NO: 2307253 - DNA, 25 bp, Homo sapien
gaaggcttgttcaccttggaccatc

SEQ ID NO: 2307254 - DNA, 25 bp, Homo sapien
gtttctgatttgcaactcagaaccc

SEQ ID NO: 2307255 - DNA, 25 bp, Homo sapien
cccagcgtagtagccatttcatctt

SEQ ID NO: 2307256 - DNA, 25 bp, Homo sapien
tcaagataaaggcaatacccagcgt

SEQ ID NO: 2307257 - DNA, 25 bp, Homo sapien
aaaggaggcgcaaagacacatctta

SEQ ID NO: 2307258 - DNA, 25 bp, Homo sapien
gcataatcattgcacaggttgtgcg

SEQ ID NO: 2307259 - DNA, 25 bp, Homo sapien
catggtcactgaagccacgttaggt

SEQ ID NO: 2307260 - DNA, 25 bp, Homo sapien
catcaggttttgtgcactggtgaag

SEQ ID NO: 2307261 - DNA, 25 bp, Homo sapien
caagggaacctagttaagcagcaag

SEQ ID NO: 2307262 - DNA, 25 bp, Homo sapien
tgtaaaaatggtagcaaactctcac

SEQ ID NO: 2307263 - DNA, 25 bp, Homo sapien
gacggacacgattcataccactctt

SEQ ID NO: 2307264 - DNA, 25 bp, Homo sapien
ctcacaacttgtgtactgccaggaa

SEQ ID NO: 2307265 - DNA, 25 bp, Homo sapien
tctagtgaagggaccacgtggtgca

SEQ ID NO: 2307266 - DNA, 25 bp, Homo sapien
cagacatgggtgaccatcctgcgct

SEQ ID NO: 2307267 - DNA, 25 bp, Homo sapien
gagaaccagcatcttcatgtgccag

SEQ ID NO: 2307268 - DNA, 25 bp, Homo sapien
tcaaggcctgttgatcctgacagac

SEQ ID NO: 2307269 - DNA, 25 bp, Homo sapien
cctctgctgaaatgacgtggccttg

SEQ ID NO: 2307270 - DNA, 25 bp, Homo sapien
tgagatgagtctctagaccccacgt

SEQ ID NO: 2307271 - DNA, 25 bp, Homo sapien
gccagtggagtttgaggacatgcaa

SEQ ID NO: 2307272 - DNA, 25 bp, Homo sapien
gctggaagactgaccagtgccctga

SEQ ID NO: 2307273 - DNA, 25 bp, Homo sapien
tagaccctctttaaagccagtggag

SEQ ID NO: 2307274 - DNA, 25 bp, Homo sapien
tctttgaggccagaacagcccagct

SEQ ID NO: 2307275 - DNA, 25 bp, Homo sapien
atttcaaatcatgggtcaggaaccg

SEQ ID NO: 2307276 - DNA, 25 bp, Homo sapien
tagatttcaaatcatgggtcaggaa

SEQ ID NO: 2307277 - DNA, 25 bp, Homo sapien
atctttgaggccagaacagcccagc

SEQ ID NO: 2307278 - DNA, 25 bp, Homo sapien
gtgctgtggtgagatcttggcttac

SEQ ID NO: 2307279 - DNA, 25 bp, Homo sapien
tcttggagacggagtcctgttctgt

SEQ ID NO: 2307280 - DNA, 25 bp, Homo sapien
ttacagatgtgcatcaccacgccca

SEQ ID NO: 2307281 - DNA, 25 bp, Homo sapien
gctgtggtgagatcttggcttactg

SEQ ID NO: 2307282 - DNA, 25 bp, Homo sapien
gcatgatcaggtggcaaggtccaga

SEQ ID NO: 2307283 - DNA, 25 bp, Homo sapien
agttgctgctcttagcttagcccca

SEQ ID NO: 2307284 - DNA, 25 bp, Homo sapien
gtttcaccctctcagcgttgctggg

SEQ ID NO: 2307285 - DNA, 25 bp, Homo sapien
tcatcaaatagagcacaaggctcag

SEQ ID NO: 2307286 - DNA, 25 bp, Homo sapien
tttcctggcacttaggcgatcctag

SEQ ID NO: 2307287 - DNA, 25 bp, Homo sapien
agctagagctgttttggactgctga

SEQ ID NO: 2307288 - DNA, 25 bp, Homo sapien
ggctttcctggcacttaggcgatcc

SEQ ID NO: 2307289 - DNA, 25 bp, Homo sapien
gagtgagttgtaggcagctagagct

SEQ ID NO: 2307290 - DNA, 25 bp, Homo sapien
tagcagggtagacaggtgaagtaac

SEQ ID NO: 2307291 - DNA, 25 bp, Homo sapien
tcttttgcaggattagacccaagca

SEQ ID NO: 2307292 - DNA, 25 bp, Homo sapien
tcctgatgacagaataggtactaca

SEQ ID NO: 2307293 - DNA, 25 bp, Homo sapien
taactggatgtgtatcagccatgcc

SEQ ID NO: 2307294 - DNA, 25 bp, Homo sapien
gaattaggagttcttagactggaag

SEQ ID NO: 2307295 - DNA, 25 bp, Homo sapien
catccagacaaatacgggctgcctt

SEQ ID NO: 2307296 - DNA, 25 bp, Homo sapien
agacatccagacaaatacgggctgc

SEQ ID NO: 2307297 - DNA, 25 bp, Homo sapien
ttagactggaagaatgaagacatcc

SEQ ID NO: 2307298 - DNA, 25 bp, Homo sapien
taacacgagcatagagtccttgccc

SEQ ID NO: 2307299 - DNA, 25 bp, Homo sapien
tgtaccttactttggaggccactgc

SEQ ID NO: 2307300 - DNA, 25 bp, Homo sapien
ccagtgagtccctgtccagtgggta

SEQ ID NO: 2307301 - DNA, 25 bp, Homo sapien
tgggtcctcagcacacaaaggagtg

SEQ ID NO: 2307302 - DNA, 25 bp, Homo sapien
aaatagttgtgtgatctctctgggc

SEQ ID NO: 2307303 - DNA, 25 bp, Homo sapien
ctttctaaatagttgtgtgatctct

SEQ ID NO: 2307304 - DNA, 25 bp, Homo sapien
tgctttccttgtcaaaatgagaggg

SEQ ID NO: 2307305 - DNA, 25 bp, Homo sapien
ttgtcaaaatgagagggattcctta

SEQ ID NO: 2307306 - DNA, 25 bp, Homo sapien
aacaaggcctttccgtgccaggtgg

SEQ ID NO: 2307307 - DNA, 25 bp, Homo sapien
gacaataggtcactggaggatctcc

SEQ ID NO: 2307308 - DNA, 25 bp, Homo sapien
cactgccagttattgaggccagacc

SEQ ID NO: 2307309 - DNA, 25 bp, Homo sapien
tgtgagcatgcacgcccatggtgaa

SEQ ID NO: 2307310 - DNA, 25 bp, Homo sapien
ggcagttgtactgtggcccagccgc

SEQ ID NO: 2307311 - DNA, 25 bp, Homo sapien
acactgggtcaggaagcttgtctgc

SEQ ID NO: 2307312 - DNA, 25 bp, Homo sapien
tgagtacctttcacctgcccaggtg

SEQ ID NO: 2307313 - DNA, 25 bp, Homo sapien
gactctaaggaagtagttctgcctg

SEQ ID NO: 2307314 - DNA, 25 bp, Homo sapien
cagccttttgctagagcctgcacgg

SEQ ID NO: 2307315 - DNA, 25 bp, Homo sapien
cacggctgtgcgagcttgaaaagaa

SEQ ID NO: 2307316 - DNA, 25 bp, Homo sapien
ctccggatccccttatcaaagctga

SEQ ID NO: 2307317 - DNA, 25 bp, Homo sapien
ggatccccttatcaaagctgatggg

SEQ ID NO: 2307318 - DNA, 25 bp, Homo sapien
gcccgcgctgggccatttgcacagt

SEQ ID NO: 2307319 - DNA, 25 bp, Homo sapien
cctcattatcgtcctgaattacggg

SEQ ID NO: 2307320 - DNA, 25 bp, Homo sapien
tccaaaccctcattatcgtcctgaa

SEQ ID NO: 2307321 - DNA, 25 bp, Homo sapien
cgtcctgaattacgggtcgctgtcc

SEQ ID NO: 2307322 - DNA, 25 bp, Homo sapien
aggatgcgggcttggcatcccaaaa

SEQ ID NO: 2307323 - DNA, 25 bp, Homo sapien
tggaggatgcgggcttggcatccca

SEQ ID NO: 2307324 - DNA, 25 bp, Homo sapien
tgcgggcttggcatcccaaaattgg

SEQ ID NO: 2307325 - DNA, 25 bp, Homo sapien
atgcgggcttggcatcccaaaattg

SEQ ID NO: 2307326 - DNA, 25 bp, Homo sapien
tcctttcctgtcagtttccaggttg

SEQ ID NO: 2307327 - DNA, 25 bp, Homo sapien
aaaactccaccagcgtttcttaatg

SEQ ID NO: 2307328 - DNA, 25 bp, Homo sapien
cgtttcttaatgtgtggacacagca

SEQ ID NO: 2307329 - DNA, 25 bp, Homo sapien
aattaccagaactccgttgaatgga

SEQ ID NO: 2307330 - DNA, 25 bp, Homo sapien
gcacctggtctaatttcttaccaag

SEQ ID NO: 2307331 - DNA, 25 bp, Homo sapien
aaatgggcagtagatctgatgccag

SEQ ID NO: 2307332 - DNA, 25 bp, Homo sapien
ggaggaaatgggcagtagatctgat

SEQ ID NO: 2307333 - DNA, 25 bp, Homo sapien
aggaaatgggcagtagatctgatgc

SEQ ID NO: 2307334 - DNA, 25 bp, Homo sapien
agtttattggacatgtcagggcttc

SEQ ID NO: 2307335 - DNA, 25 bp, Homo sapien
gaagtctcttttgaactgggtccca

SEQ ID NO: 2307336 - DNA, 25 bp, Homo sapien
tccccgcagatatacacattccaga

SEQ ID NO: 2307337 - DNA, 25 bp, Homo sapien
ccacaatgctgggtcaaggatacac

SEQ ID NO: 2307338 - DNA, 25 bp, Homo sapien
gaacagggattgcatgacatacgcc

SEQ ID NO: 2307339 - DNA, 25 bp, Homo sapien
tactacgacccctacaagatgcaca

SEQ ID NO: 2307340 - DNA, 25 bp, Homo sapien
tgcctgcgccagaaactactagtgc

SEQ ID NO: 2307341 - DNA, 25 bp, Homo sapien
tccttccaaggtattctcagagagt

SEQ ID NO: 2307342 - DNA, 25 bp, Homo sapien
acgtgagcccagcttccggccggga

SEQ ID NO: 2307343 - DNA, 25 bp, Homo sapien
tgccacagcactaaggatccacatg

SEQ ID NO: 2307344 - DNA, 25 bp, Homo sapien
gaagagacagatctgtagcaggagg

SEQ ID NO: 2307345 - DNA, 25 bp, Homo sapien
tcccagcacaataacaagggctctg

SEQ ID NO: 2307346 - DNA, 25 bp, Homo sapien
gagggcgagcgcggccgagagtcac

SEQ ID NO: 2307347 - DNA, 25 bp, Homo sapien
gcgagcgcggccgagagtcacaggt

SEQ ID NO: 2307348 - DNA, 25 bp, Homo sapien
aggtgcagggcccgaagccgccagc

SEQ ID NO: 2307349 - DNA, 25 bp, Homo sapien
agcgcggccgagagtcacaggtgca

SEQ ID NO: 2307350 - DNA, 25 bp, Homo sapien
agaagccggccacggagctgatgcc

SEQ ID NO: 2307351 - DNA, 25 bp, Homo sapien
ccgtccagacgaggaagatggagaa

SEQ ID NO: 2307352 - DNA, 25 bp, Homo sapien
gcggtccccggctgtcggtagacca

SEQ ID NO: 2307353 - DNA, 25 bp, Homo sapien
ggtagaccaccgtccagacgaggaa

SEQ ID NO: 2307354 - DNA, 25 bp, Homo sapien
accaggacccacagtgccagcaccc

SEQ ID NO: 2307355 - DNA, 25 bp, Homo sapien
cacgtgcgtcaccaggacccacagt

SEQ ID NO: 2307356 - DNA, 25 bp, Homo sapien
gtcaccaggacccacagtgccagca

SEQ ID NO: 2307357 - DNA, 25 bp, Homo sapien
acgtgcgtcaccaggacccacagtg

SEQ ID NO: 2307358 - DNA, 25 bp, Homo sapien
aagaggacgcccacgaagaagaagc

SEQ ID NO: 2307359 - DNA, 25 bp, Homo sapien
ggtgatggccagcacgaggaaggtg

SEQ ID NO: 2307360 - DNA, 25 bp, Homo sapien
gcagaaggcagcgatggagacggcc

SEQ ID NO: 2307361 - DNA, 25 bp, Homo sapien
gagccaggtcctccaataatcttgc

SEQ ID NO: 2307362 - DNA, 25 bp, Homo sapien
cgcatgcgcctcacaacagggtttg

SEQ ID NO: 2307363 - DNA, 25 bp, Homo sapien
gctttagttagcatcagactcccgg

SEQ ID NO: 2307364 - DNA, 25 bp, Homo sapien
gcttgtatgggctatgcactgctca

SEQ ID NO: 2307365 - DNA, 25 bp, Homo sapien
tcatagaatccacccaacttgcgag

SEQ ID NO: 2307366 - DNA, 25 bp, Homo sapien
aggaaggcccacttgaaggaaatga

SEQ ID NO: 2307367 - DNA, 25 bp, Homo sapien
aggaaatgaagctccagacgctgga

SEQ ID NO: 2307368 - DNA, 25 bp, Homo sapien
tccagacgctggagaggtagtagct

SEQ ID NO: 2307369 - DNA, 25 bp, Homo sapien
cacttgaaggaaatgaagctccaga

SEQ ID NO: 2307370 - DNA, 25 bp, Homo sapien
tcagcaaagtcagcccggtagcggt

SEQ ID NO: 2307371 - DNA, 25 bp, Homo sapien
aagtcagcccggtagcggtgggcat

SEQ ID NO: 2307372 - DNA, 25 bp, Homo sapien
tcagaaatcgctgaggatgctgatg

SEQ ID NO: 2307373 - DNA, 25 bp, Homo sapien
aaatcgctgaggatgctgatgtcag

SEQ ID NO: 2307374 - DNA, 25 bp, Homo sapien
tgaaaaggtctaaagctgccctctg

SEQ ID NO: 2307375 - DNA, 25 bp, Homo sapien
cacactcgtcctgctgtgtattttc

SEQ ID NO: 2307376 - DNA, 25 bp, Homo sapien
tcactgcgtgctaagaaaacagatc

SEQ ID NO: 2307377 - DNA, 25 bp, Homo sapien
ctgggagaccacactcgtcctgctg

SEQ ID NO: 2307378 - DNA, 25 bp, Homo sapien
tatctggctctagcacactcatggg

SEQ ID NO: 2307379 - DNA, 25 bp, Homo sapien
taatcagatagctcgagaactgcca

SEQ ID NO: 2307380 - DNA, 25 bp, Homo sapien
tgaaagctctagttgaagggcagtg

SEQ ID NO: 2307381 - DNA, 25 bp, Homo sapien
gagtctgtccggtttttccagcagg

SEQ ID NO: 2307382 - DNA, 25 bp, Homo sapien
acagctgcacggcacagtgtgggtc

SEQ ID NO: 2307383 - DNA, 25 bp, Homo sapien
cggcatccccgaagagttgtgactc

SEQ ID NO: 2307384 - DNA, 25 bp, Homo sapien
gagtgggaatacaggagctcagccc

SEQ ID NO: 2307385 - DNA, 25 bp, Homo sapien
ggagctcaggtaagtcaaatcgtct

SEQ ID NO: 2307386 - DNA, 25 bp, Homo sapien
tctaccactgggcactgagacgaag

SEQ ID NO: 2307387 - DNA, 25 bp, Homo sapien
aagaagcgcagcatacccctgggac

SEQ ID NO: 2307388 - DNA, 25 bp, Homo sapien
cacataggagtagcctgactgaggg

SEQ ID NO: 2307389 - DNA, 25 bp, Homo sapien
tgtgcttcctgatccaatggtgcca

SEQ ID NO: 2307390 - DNA, 25 bp, Homo sapien
cacagggctctcgagaacagattct

SEQ ID NO: 2307391 - DNA, 25 bp, Homo sapien
tggctctgcaaaccccagactttgc

SEQ ID NO: 2307392 - DNA, 25 bp, Homo sapien
caggactgcacagaggaggactggc

SEQ ID NO: 2307393 - DNA, 25 bp, Homo sapien
aacagattctcccctccagtatggg

SEQ ID NO: 2307394 - DNA, 25 bp, Homo sapien
cagactcctgggtgcctagagtgcc

SEQ ID NO: 2307395 - DNA, 25 bp, Homo sapien
agaaaggctgggcacctgctaggac

SEQ ID NO: 2307396 - DNA, 25 bp, Homo sapien
caacctcaatatccggtctaggacg

SEQ ID NO: 2307397 - DNA, 25 bp, Homo sapien
tgttgaacccactctgtgtaccctg

SEQ ID NO: 2307398 - DNA, 25 bp, Homo sapien
gagtaagattcctgtgagtgaccca

SEQ ID NO: 2307399 - DNA, 25 bp, Homo sapien
gaaggatcttggtggtaccctgccc

SEQ ID NO: 2307400 - DNA, 25 bp, Homo sapien
taggttttggatacatgacgcagca

SEQ ID NO: 2307401 - DNA, 25 bp, Homo sapien
tgttccaagttaggtccaggcagca

SEQ ID NO: 2307402 - DNA, 25 bp, Homo sapien
accaggcggcctggctgtaccctcc

SEQ ID NO: 2307403 - DNA, 25 bp, Homo sapien
caggaagcaaaggtgctcgttaagg

SEQ ID NO: 2307404 - DNA, 25 bp, Homo sapien
aagcaaaggtgctcgttaaggaagg

SEQ ID NO: 2307405 - DNA, 25 bp, Homo sapien
agcaggaagcaaaggtgctcgttaa

SEQ ID NO: 2307406 - DNA, 25 bp, Homo sapien
ccagcttgggccctactataggttt

SEQ ID NO: 2307407 - DNA, 25 bp, Homo sapien
gctgaccagcttgggccctactata

SEQ ID NO: 2307408 - DNA, 25 bp, Homo sapien
tgctgctgaccagcttgggccctac

SEQ ID NO: 2307409 - DNA, 25 bp, Homo sapien
ggccctactataggttttcttgctg

SEQ ID NO: 2307410 - DNA, 25 bp, Homo sapien
catggtgtccggaatctgtggttac

SEQ ID NO: 2307411 - DNA, 25 bp, Homo sapien
caaattagtagtaacagccctcgga

SEQ ID NO: 2307412 - DNA, 25 bp, Homo sapien
tgctattggaagcagccccgttgcc

SEQ ID NO: 2307413 - DNA, 25 bp, Homo sapien
gggtcttaatctctgtcgctctgcg

SEQ ID NO: 2307414 - DNA, 25 bp, Homo sapien
cagagacagcaacctcgggtgtgaa

SEQ ID NO: 2307415 - DNA, 25 bp, Homo sapien
tgaacccaggactatggccttctgc

SEQ ID NO: 2307416 - DNA, 25 bp, Homo sapien
tccagcctatgtcagggaaggagaa

SEQ ID NO: 2307417 - DNA, 25 bp, Homo sapien
ggaggcctggcaaccacagtgttct

SEQ ID NO: 2307418 - DNA, 25 bp, Homo sapien
tcttcttgctacattctgctgcctc

SEQ ID NO: 2307419 - DNA, 25 bp, Homo sapien
tggaactgttgagtgtcatccctaa

SEQ ID NO: 2307420 - DNA, 25 bp, Homo sapien
tgagtgtcatccctaaaggtcaatg

SEQ ID NO: 2307421 - DNA, 25 bp, Homo sapien
catccctaaaggtcaatgttggcaa

SEQ ID NO: 2307422 - DNA, 25 bp, Homo sapien
agtgagcatggactcgcgggctggg

SEQ ID NO: 2307423 - DNA, 25 bp, Homo sapien
gggcctgggaatctaggcgagtggc

SEQ ID NO: 2307424 - DNA, 25 bp, Homo sapien
gaatctaggcgagtggcctgagtga

SEQ ID NO: 2307425 - DNA, 25 bp, Homo sapien
cgagtggcctgagtgagcatggact

SEQ ID NO: 2307426 - DNA, 25 bp, Homo sapien
ggctgtcttgcgcacccaaaggcct

SEQ ID NO: 2307427 - DNA, 25 bp, Homo sapien
tcgctgccaacgctccctgcccact

SEQ ID NO: 2307428 - DNA, 25 bp, Homo sapien
tctccccgctggctgtcttgcgcac

SEQ ID NO: 2307429 - DNA, 25 bp, Homo sapien
gacactggctgtctcgctgccaacg

SEQ ID NO: 2307430 - DNA, 25 bp, Homo sapien
gggaacctgttgaccagccaatata

SEQ ID NO: 2307431 - DNA, 25 bp, Homo sapien
ctaaaagacactcctggggaaagag

SEQ ID NO: 2307432 - DNA, 25 bp, Homo sapien
agaggtgagtgtcttcaggccaaga

SEQ ID NO: 2307433 - DNA, 25 bp, Homo sapien
ggcatatggcaaggccgaagctgaa

SEQ ID NO: 2307434 - DNA, 25 bp, Homo sapien
gactcacaggtgcataatccaaact

SEQ ID NO: 2307435 - DNA, 25 bp, Homo sapien
tggtgatcatcatgggtggagtttt

SEQ ID NO: 2307436 - DNA, 25 bp, Homo sapien
tcatgggtggagtttttcaaggtct

SEQ ID NO: 2307437 - DNA, 25 bp, Homo sapien
gcctgagagtctgacacggtgcctg

SEQ ID NO: 2307438 - DNA, 25 bp, Homo sapien
gcacattttgagctccatttctaat

SEQ ID NO: 2307439 - DNA, 25 bp, Homo sapien
acattttgagctccatttctaatgc

SEQ ID NO: 2307440 - DNA, 25 bp, Homo sapien
caggcacattttgagctccatttct

SEQ ID NO: 2307441 - DNA, 25 bp, Homo sapien
ggcacattttgagctccatttctaa

SEQ ID NO: 2307442 - DNA, 25 bp, Homo sapien
cagctttttccttcacctcttgagc

SEQ ID NO: 2307443 - DNA, 25 bp, Homo sapien
cttgagcctcttccccaataagaga

SEQ ID NO: 2307444 - DNA, 25 bp, Homo sapien
tttttccttcacctcttgagcctct

SEQ ID NO: 2307445 - DNA, 25 bp, Homo sapien
tcttgagcctcttccccaataagag

SEQ ID NO: 2307446 - DNA, 25 bp, Homo sapien
tggcagtcccctgagtcgctgtgga

SEQ ID NO: 2307447 - DNA, 25 bp, Homo sapien
taaagataacggaaggaaggctcgc

SEQ ID NO: 2307448 - DNA, 25 bp, Homo sapien
tcgctgtggaactgctggctatttg

SEQ ID NO: 2307449 - DNA, 25 bp, Homo sapien
gaatcctgatagtgtctcttactga

SEQ ID NO: 2307450 - DNA, 25 bp, Homo sapien
gaaagccacgttccttactgcagaa

SEQ ID NO: 2307451 - DNA, 25 bp, Homo sapien
tgcaagagccttggtgtccacctgg

SEQ ID NO: 2307452 - DNA, 25 bp, Homo sapien
tttagctgcagaacgtattggtcca

SEQ ID NO: 2307453 - DNA, 25 bp, Homo sapien
aaaactgacagaggagggcgtgact

SEQ ID NO: 2307454 - DNA, 25 bp, Homo sapien
tcacccacagggctaagagctagcg

SEQ ID NO: 2307455 - DNA, 25 bp, Homo sapien
gcgtctgtccgtttactccaaggtg

SEQ ID NO: 2307456 - DNA, 25 bp, Homo sapien
caatgtggttgcaaggccgctgttc

SEQ ID NO: 2307457 - DNA, 25 bp, Homo sapien
aaggcgttcttcgaggtggatcaca

SEQ ID NO: 2307458 - DNA, 25 bp, Homo sapien
cattttggttgtagtgataggagcg

SEQ ID NO: 2307459 - DNA, 25 bp, Homo sapien
gctgagacactcctactgcattgca

SEQ ID NO: 2307460 - DNA, 25 bp, Homo sapien
tgtgagcccggcattgctctgagcc

SEQ ID NO: 2307461 - DNA, 25 bp, Homo sapien
gcaggagcaagcgacagatcttgtg

SEQ ID NO: 2307462 - DNA, 25 bp, Homo sapien
ctggcattgggctaggagttgtcaa

SEQ ID NO: 2307463 - DNA, 25 bp, Homo sapien
tatggagattctcaccgaaggtcat

SEQ ID NO: 2307464 - DNA, 25 bp, Homo sapien
catttggttatggagtctctacccc

SEQ ID NO: 2307465 - DNA, 25 bp, Homo sapien
cttgtcagtctgcaaccaaagcatt

SEQ ID NO: 2307466 - DNA, 25 bp, Homo sapien
tagcaacaccacgatgactcggagc

SEQ ID NO: 2307467 - DNA, 25 bp, Homo sapien
ccagactctgtagcaacaccacgat

SEQ ID NO: 2307468 - DNA, 25 bp, Homo sapien
tgttttccacgaaatccaccggata

SEQ ID NO: 2307469 - DNA, 25 bp, Homo sapien
caccggatacttgggagcctggatg

SEQ ID NO: 2307470 - DNA, 25 bp, Homo sapien
tcctcatcagccgcaacttccctgg

SEQ ID NO: 2307471 - DNA, 25 bp, Homo sapien
ttcaggtaggtgtttcctcatcagc

SEQ ID NO: 2307472 - DNA, 25 bp, Homo sapien
caggtaggtgtttcctcatcagccg

SEQ ID NO: 2307473 - DNA, 25 bp, Homo sapien
tcaggtaggtgtttcctcatcagcc

SEQ ID NO: 2307474 - DNA, 25 bp, Homo sapien
gcacttggacttagaggctgaatct

SEQ ID NO: 2307475 - DNA, 25 bp, Homo sapien
ttaacagaagctgccgcaagatggg

SEQ ID NO: 2307476 - DNA, 25 bp, Homo sapien
caagactgccgtaggcgagatggcc

SEQ ID NO: 2307477 - DNA, 25 bp, Homo sapien
ttgctaaggcaaggtcagcactggg

SEQ ID NO: 2307478 - DNA, 25 bp, Homo sapien
ggctctgaatttccggacttctgcc

SEQ ID NO: 2307479 - DNA, 25 bp, Homo sapien
tggaactaattcgaggttgggtgtc

SEQ ID NO: 2307480 - DNA, 25 bp, Homo sapien
tttggcaagcacacccatatcttgg

SEQ ID NO: 2307481 - DNA, 25 bp, Homo sapien
ggcagagttctttgttccaaacggc

SEQ ID NO: 2307482 - DNA, 25 bp, Homo sapien
catacctagggttggaattgctgcc

SEQ ID NO: 2307483 - DNA, 25 bp, Homo sapien
caagaatttctgtagggcacatacc

SEQ ID NO: 2307484 - DNA, 25 bp, Homo sapien
tcagcattgctatagggtgccaaac

SEQ ID NO: 2307485 - DNA, 25 bp, Homo sapien
ttccagcagtggatgaaagtctcca

SEQ ID NO: 2307486 - DNA, 25 bp, Homo sapien
catgtggaagagaaactgtcctgcc

SEQ ID NO: 2307487 - DNA, 25 bp, Homo sapien
gagccgccacgatgaccatgtagtg

SEQ ID NO: 2307488 - DNA, 25 bp, Homo sapien
tgctcaatccaagtgacaggcgttg

SEQ ID NO: 2307489 - DNA, 25 bp, Homo sapien
tccagatgcaaagggtgggatcccc

SEQ ID NO: 2307490 - DNA, 25 bp, Homo sapien
ggaggcttaatgctcaagggaaaac

SEQ ID NO: 2307491 - DNA, 25 bp, Homo sapien
gacttcccttcacccttgacttgtg

SEQ ID NO: 2307492 - DNA, 25 bp, Homo sapien
tgacttgtgactggcctcacctttg

SEQ ID NO: 2307493 - DNA, 25 bp, Homo sapien
tgctccctggtgttatcagccaatt

SEQ ID NO: 2307494 - DNA, 25 bp, Homo sapien
ggatttcccattcgtgcggagctag

SEQ ID NO: 2307495 - DNA, 25 bp, Homo sapien
cctaatctgtgggatcaggctgagc

SEQ ID NO: 2307496 - DNA, 25 bp, Homo sapien
gagcggtgcctatcacacagtcaag

SEQ ID NO: 2307497 - DNA, 25 bp, Homo sapien
gctcccttgggtgagattcgcgaca

SEQ ID NO: 2307498 - DNA, 25 bp, Homo sapien
ttgcaagatgtcaggccagtcaagc

SEQ ID NO: 2307499 - DNA, 25 bp, Homo sapien
tcagactggcaggacctctaaaggg

SEQ ID NO: 2307500 - DNA, 25 bp, Homo sapien
ctggctaaaggaggtcatcgactgc

SEQ ID NO: 2307501 - DNA, 25 bp, Homo sapien
tcattacaggtagagaatccatcca

SEQ ID NO: 2307502 - DNA, 25 bp, Homo sapien
ctctcagttactacggaatacttag

SEQ ID NO: 2307503 - DNA, 25 bp, Homo sapien
gtgaaaaaagactaactctcagtta

SEQ ID NO: 2307504 - DNA, 25 bp, Homo sapien
gaatacttagtacgcatcttccacc

SEQ ID NO: 2307505 - DNA, 25 bp, Homo sapien
cacatgtgaattacaagtacctctc

SEQ ID NO: 2307506 - DNA, 25 bp, Homo sapien
ttcacatccaatatatcgtccagtc

SEQ ID NO: 2307507 - DNA, 25 bp, Homo sapien
tccaatatatcgtccagtccaccag

SEQ ID NO: 2307508 - DNA, 25 bp, Homo sapien
atatatcgtccagtccaccagatcc

SEQ ID NO: 2307509 - DNA, 25 bp, Homo sapien
aaaaatgcacttgctttgccaccat

SEQ ID NO: 2307510 - DNA, 25 bp, Homo sapien
ttcttggcgatgctctgcctcccag

SEQ ID NO: 2307511 - DNA, 25 bp, Homo sapien
tgttcctccgatttttacaactgga

SEQ ID NO: 2307512 - DNA, 25 bp, Homo sapien
gatctttgttcttgattgttcctcc

SEQ ID NO: 2307513 - DNA, 25 bp, Homo sapien
gaaactggcggtgtctttgttccca

SEQ ID NO: 2307514 - DNA, 25 bp, Homo sapien
tcccatcggcttaggaaggagatgt

SEQ ID NO: 2307515 - DNA, 25 bp, Homo sapien
aggctcccagggagatgagttggag

SEQ ID NO: 2307516 - DNA, 25 bp, Homo sapien
ctggcaagaaatggcaaggctccca

SEQ ID NO: 2307517 - DNA, 25 bp, Homo sapien
aaggctcccagggagatgagttgga

SEQ ID NO: 2307518 - DNA, 25 bp, Homo sapien
caagaaatggcaaggctcccaggga

SEQ ID NO: 2307519 - DNA, 25 bp, Homo sapien
gctttatcagtaggatcctggtttc

SEQ ID NO: 2307520 - DNA, 25 bp, Homo sapien
cctggctttatcagtaggatcctgg

SEQ ID NO: 2307521 - DNA, 25 bp, Homo sapien
cagtaggatcctggtttctgagtac

SEQ ID NO: 2307522 - DNA, 25 bp, Homo sapien
tctcctggctttatcagtaggatcc

SEQ ID NO: 2307523 - DNA, 25 bp, Homo sapien
acagcacacttccctttcgcccttc

SEQ ID NO: 2307524 - DNA, 25 bp, Homo sapien
ccgtcctccagcgccctggtttcat

SEQ ID NO: 2307525 - DNA, 25 bp, Homo sapien
cagcacacttccctttcgcccttcc

SEQ ID NO: 2307526 - DNA, 25 bp, Homo sapien
ctggaacagccaataagtgtcctgg

SEQ ID NO: 2307527 - DNA, 25 bp, Homo sapien
ggaacagccaataagtgtcctggct

SEQ ID NO: 2307528 - DNA, 25 bp, Homo sapien
gagggatgaatcttcctccataaat

SEQ ID NO: 2307529 - DNA, 25 bp, Homo sapien
tgtcctggctgcagttggagggatg

SEQ ID NO: 2307530 - DNA, 25 bp, Homo sapien
ttgggccgcggtagtccgcggagtc

SEQ ID NO: 2307531 - DNA, 25 bp, Homo sapien
tgttgggccgcggtagtccgcggag

SEQ ID NO: 2307532 - DNA, 25 bp, Homo sapien
agtccgcggagtcgggatgatgctc

SEQ ID NO: 2307533 - DNA, 25 bp, Homo sapien
cggtagtccgcggagtcgggatgat

SEQ ID NO: 2307534 - DNA, 25 bp, Homo sapien
agcctcttcggtcggcggagcggca

SEQ ID NO: 2307535 - DNA, 25 bp, Homo sapien
ggaggccttcccaatatcgcagctg

SEQ ID NO: 2307536 - DNA, 25 bp, Homo sapien
taccaagcccgccaggagaacgcgg

SEQ ID NO: 2307537 - DNA, 25 bp, Homo sapien
gtctggctccctcggttccggtaga

SEQ ID NO: 2307538 - DNA, 25 bp, Homo sapien
accacctgccagcttgaggacttac

SEQ ID NO: 2307539 - DNA, 25 bp, Homo sapien
ccgaccacctgccagcttgaggact

SEQ ID NO: 2307540 - DNA, 25 bp, Homo sapien
ccccgaccacctgccagcttgagga

SEQ ID NO: 2307541 - DNA, 25 bp, Homo sapien
gctcccccgaccacctgccagcttg

SEQ ID NO: 2307542 - DNA, 25 bp, Homo sapien
aggagcgaacgccagcgtcgcagac

SEQ ID NO: 2307543 - DNA, 25 bp, Homo sapien
ggtcacgccccttggcaaaaagcga

SEQ ID NO: 2307544 - DNA, 25 bp, Homo sapien
aacaggcaccaaattgataaccggc

SEQ ID NO: 2307545 - DNA, 25 bp, Homo sapien
tgataaccggccttaacgattccca

SEQ ID NO: 2307546 - DNA, 25 bp, Homo sapien
cgtgatatgccactggtgtcatgtc

SEQ ID NO: 2307547 - DNA, 25 bp, Homo sapien
ccgtgatatgccactggtgtcatgt

SEQ ID NO: 2307548 - DNA, 25 bp, Homo sapien
gagcagcagcggaatgctgagaccc

SEQ ID NO: 2307549 - DNA, 25 bp, Homo sapien
ggcgagcagcagcggaatgctgaga

SEQ ID NO: 2307550 - DNA, 25 bp, Homo sapien
cagcagcggaatgctgagaccccat

SEQ ID NO: 2307551 - DNA, 25 bp, Homo sapien
gcagcagcggaatgctgagacccca

SEQ ID NO: 2307552 - DNA, 25 bp, Homo sapien
tctcccggtgaattccacatatggg

SEQ ID NO: 2307553 - DNA, 25 bp, Homo sapien
gagacaggtgatgctatctctcccg

SEQ ID NO: 2307554 - DNA, 25 bp, Homo sapien
gcaaaccgtccctgtcatcttcttg

SEQ ID NO: 2307555 - DNA, 25 bp, Homo sapien
tgtcccctggcacgtgagacaggtg

SEQ ID NO: 2307556 - DNA, 25 bp, Homo sapien
gttcgctgagggcgcaatctctgat

SEQ ID NO: 2307557 - DNA, 25 bp, Homo sapien
cgctgagggcgcaatctctgatcac

SEQ ID NO: 2307558 - DNA, 25 bp, Homo sapien
ttcgctgagggcgcaatctctgatc

SEQ ID NO: 2307559 - DNA, 25 bp, Homo sapien
tcgctgagggcgcaatctctgatca

SEQ ID NO: 2307560 - DNA, 25 bp, Homo sapien
ggcagagatatcttgcttgggcaaa

SEQ ID NO: 2307561 - DNA, 25 bp, Homo sapien
cagaagtaggtattaacaggtgaga

SEQ ID NO: 2307562 - DNA, 25 bp, Homo sapien
caaggttcaatgtgtcaagattaaa

SEQ ID NO: 2307563 - DNA, 25 bp, Homo sapien
gctgaagaaaggagctatgtggaca

SEQ ID NO: 2307564 - DNA, 25 bp, Homo sapien
accaccaaaccagatgccaggagac

SEQ ID NO: 2307565 - DNA, 25 bp, Homo sapien
caaaccagatgccaggagacaaagc

SEQ ID NO: 2307566 - DNA, 25 bp, Homo sapien
caccaaaccagatgccaggagacaa

SEQ ID NO: 2307567 - DNA, 25 bp, Homo sapien
accaaaccagatgccaggagacaaa

SEQ ID NO: 2307568 - DNA, 25 bp, Homo sapien
tttgatgccgtcatcatccacaagg

SEQ ID NO: 2307569 - DNA, 25 bp, Homo sapien
ttaaatgtgactttcaccactttga

SEQ ID NO: 2307570 - DNA, 25 bp, Homo sapien
accactttgatgccgtcatcatcca

SEQ ID NO: 2307571 - DNA, 25 bp, Homo sapien
ttattaaatgtgactttcaccactt

SEQ ID NO: 2307572 - DNA, 25 bp, Homo sapien
ttcatgtactgaatctggctggaca

SEQ ID NO: 2307573 - DNA, 25 bp, Homo sapien
gttcatgtactgaatctggctggac

SEQ ID NO: 2307574 - DNA, 25 bp, Homo sapien
aataagggagacgttagtagtcaca

SEQ ID NO: 2307575 - DNA, 25 bp, Homo sapien
gaataagggagacgttagtagtcac

SEQ ID NO: 2307576 - DNA, 25 bp, Homo sapien
cgttagtagtcacatatgtactgac

SEQ ID NO: 2307577 - DNA, 25 bp, Homo sapien
tggaataagggagacgttagtagtc

SEQ ID NO: 2307578 - DNA, 25 bp, Homo sapien
caaaatacttccctgagattgtccc

SEQ ID NO: 2307579 - DNA, 25 bp, Homo sapien
agtgacacagctatggcattcctac

SEQ ID NO: 2307580 - DNA, 25 bp, Homo sapien
tggacctcaggctgtaacactgctg

SEQ ID NO: 2307581 - DNA, 25 bp, Homo sapien
gagcctctaattgatactgccaacc

SEQ ID NO: 2307582 - DNA, 25 bp, Homo sapien
cacataggaaaacggtcctcccatc

SEQ ID NO: 2307583 - DNA, 25 bp, Homo sapien
ataggaaaacggtcctcccatctcg

SEQ ID NO: 2307584 - DNA, 25 bp, Homo sapien
cataggaaaacggtcctcccatctc

SEQ ID NO: 2307585 - DNA, 25 bp, Homo sapien
tacacataggaaaacggtcctccca

SEQ ID NO: 2307586 - DNA, 25 bp, Homo sapien
cacataagtgctggagcttggtaac

SEQ ID NO: 2307587 - DNA, 25 bp, Homo sapien
tttaaagcctcagtagaagagtgca

SEQ ID NO: 2307588 - DNA, 25 bp, Homo sapien
gctgagatctaaggcaggaccaggc

SEQ ID NO: 2307589 - DNA, 25 bp, Homo sapien
gaagagtgcagagttacactgtcct

SEQ ID NO: 2307590 - DNA, 25 bp, Homo sapien
ggatctcaggtaccgtgcagaagaa

SEQ ID NO: 2307591 - DNA, 25 bp, Homo sapien
caggatctcaggtaccgtgcagaag

SEQ ID NO: 2307592 - DNA, 25 bp, Homo sapien
caccaggatctcaggtaccgtgcag

SEQ ID NO: 2307593 - DNA, 25 bp, Homo sapien
tcactatgttgtgcaccaggatctc

SEQ ID NO: 2307594 - DNA, 25 bp, Homo sapien
ggaagtctggtcaaatgcccagtac

SEQ ID NO: 2307595 - DNA, 25 bp, Homo sapien
tgtcccctcgggctaggtgcctctg

SEQ ID NO: 2307596 - DNA, 25 bp, Homo sapien
tgtttagagaacaccaagggtctac

SEQ ID NO: 2307597 - DNA, 25 bp, Homo sapien
gtaggctcacatggccggacaggcc

SEQ ID NO: 2307598 - DNA, 25 bp, Homo sapien
attaattatgtttgggggatgaaat

SEQ ID NO: 2307599 - DNA, 25 bp, Homo sapien
aaggagctctgggtcatgaggccaa

SEQ ID NO: 2307600 - DNA, 25 bp, Homo sapien
gtcatgaggccaatgtatgaaatct

SEQ ID NO: 2307601 - DNA, 25 bp, Homo sapien
catagtgatgtgtctccaaggagct

SEQ ID NO: 2307602 - DNA, 25 bp, Homo sapien
tcctccacaatccacatagtgatgt

SEQ ID NO: 2307603 - DNA, 25 bp, Homo sapien
tgtgtggaagaaccaatagcagttg

SEQ ID NO: 2307604 - DNA, 25 bp, Homo sapien
ctgtgtggaagaaccaatagcagtt

SEQ ID NO: 2307605 - DNA, 25 bp, Homo sapien
tgtttgctgggagttaagtgaacca

SEQ ID NO: 2307606 - DNA, 25 bp, Homo sapien
caggccttgggaacatatgctgtgc

SEQ ID NO: 2307607 - DNA, 25 bp, Homo sapien
tattgagtgccaactatttgctggg

SEQ ID NO: 2307608 - DNA, 25 bp, Homo sapien
gctgggcacaggctaggcactgatt

SEQ ID NO: 2307609 - DNA, 25 bp, Homo sapien
aatggatgaagggtgaatcaagccc

SEQ ID NO: 2307610 - DNA, 25 bp, Homo sapien
tagctccacatcactccatggtttg

SEQ ID NO: 2307611 - DNA, 25 bp, Homo sapien
cacagatgaggcactgataatggcc

SEQ ID NO: 2307612 - DNA, 25 bp, Homo sapien
aatcaagccccacatagactcttgg

SEQ ID NO: 2307613 - DNA, 25 bp, Homo sapien
ccgggcgcaggaactgtgtgtgtcc

SEQ ID NO: 2307614 - DNA, 25 bp, Homo sapien
gtcaaatgccccctgagtgactgcc

SEQ ID NO: 2307615 - DNA, 25 bp, Homo sapien
ggcaggaaactaactggtgtgagtc

SEQ ID NO: 2307616 - DNA, 25 bp, Homo sapien
tggtgctattctgtgtcaaacacct

SEQ ID NO: 2307617 - DNA, 25 bp, Homo sapien
cacaatccgttgcaaacccaaagga

SEQ ID NO: 2307618 - DNA, 25 bp, Homo sapien
gacattgcacccatggacataggag

SEQ ID NO: 2307619 - DNA, 25 bp, Homo sapien
tctaagagacctgaactgggcagac

SEQ ID NO: 2307620 - DNA, 25 bp, Homo sapien
cgagcaggaattcggtgtggacata

SEQ ID NO: 2307621 - DNA, 25 bp, Homo sapien
tacagataattgcttagagtggctc

SEQ ID NO: 2307622 - DNA, 25 bp, Homo sapien
taatgatgcgctggagtgactaaga

SEQ ID NO: 2307623 - DNA, 25 bp, Homo sapien
ggcccttagcagagccagagagtct

SEQ ID NO: 2307624 - DNA, 25 bp, Homo sapien
ttgatgaaaaggctggtggcgccca

SEQ ID NO: 2307625 - DNA, 25 bp, Homo sapien
ttcgttgcttccatttgggagccat

SEQ ID NO: 2307626 - DNA, 25 bp, Homo sapien
cactggagcaggataaacttggttt

SEQ ID NO: 2307627 - DNA, 25 bp, Homo sapien
tctaccctactagtcctagggacat

SEQ ID NO: 2307628 - DNA, 25 bp, Homo sapien
cttttcagggacttcctagagggca

SEQ ID NO: 2307629 - DNA, 25 bp, Homo sapien
ggctttctctgaggtggcatctacc

SEQ ID NO: 2307630 - DNA, 25 bp, Homo sapien
tagttacaccatgggacagatgtga

SEQ ID NO: 2307631 - DNA, 25 bp, Homo sapien
taaggattccagagtcgggtctccg

SEQ ID NO: 2307632 - DNA, 25 bp, Homo sapien
tagcccagttaagctgccagacgaa

SEQ ID NO: 2307633 - DNA, 25 bp, Homo sapien
ttatgaggacctcgctggtagccca

SEQ ID NO: 2307634 - DNA, 25 bp, Homo sapien
tgagtaaagaaagatgaagcggctg

SEQ ID NO: 2307635 - DNA, 25 bp, Homo sapien
ctcttctcattggccccagtgcccc

SEQ ID NO: 2307636 - DNA, 25 bp, Homo sapien
tcgcattcttgccgagctgcaggag

SEQ ID NO: 2307637 - DNA, 25 bp, Homo sapien
gcagcacagcttgctctctcgtaac

SEQ ID NO: 2307638 - DNA, 25 bp, Homo sapien
tgctctctcgtaaccttcctgaggg

SEQ ID NO: 2307639 - DNA, 25 bp, Homo sapien
tcatcccaagatgggcaaagcagca

SEQ ID NO: 2307640 - DNA, 25 bp, Homo sapien
tgagggcaccattgtcttgaccgag

SEQ ID NO: 2307641 - DNA, 25 bp, Homo sapien
aagatccaaatagtgcagctccagc

SEQ ID NO: 2307642 - DNA, 25 bp, Homo sapien
gcgcaagcttgctcaggcaataggg

SEQ ID NO: 2307643 - DNA, 25 bp, Homo sapien
taggagagacggtgcagatgaacca

SEQ ID NO: 2307644 - DNA, 25 bp, Homo sapien
aagatggcctcagggattctggtcc

SEQ ID NO: 2307645 - DNA, 25 bp, Homo sapien
ggaaagaaacatgcacctaggctct

SEQ ID NO: 2307646 - DNA, 25 bp, Homo sapien
gaacactgtagccagggaatctcag

SEQ ID NO: 2307647 - DNA, 25 bp, Homo sapien
ttcttccgagatggagacaagggca

SEQ ID NO: 2307648 - DNA, 25 bp, Homo sapien
tatgagtacagcacgtgggtctgca

SEQ ID NO: 2307649 - DNA, 25 bp, Homo sapien
ttggacagtcctcaagcactacatt

SEQ ID NO: 2307650 - DNA, 25 bp, Homo sapien
gggcgcagcatcacaggctatgagt

SEQ ID NO: 2307651 - DNA, 25 bp, Homo sapien
ccagacccacagatgaatttacctt

SEQ ID NO: 2307652 - DNA, 25 bp, Homo sapien
tgagttgaaaattggctctccttgg

SEQ ID NO: 2307653 - DNA, 25 bp, Homo sapien
ggtcactgtgctatcgatgaggaca

SEQ ID NO: 2307654 - DNA, 25 bp, Homo sapien
ttggtcactgtgctatcgatgagga

SEQ ID NO: 2307655 - DNA, 25 bp, Homo sapien
tcactgtgctatcgatgaggacatc

SEQ ID NO: 2307656 - DNA, 25 bp, Homo sapien
cactgtgctatcgatgaggacatca

SEQ ID NO: 2307657 - DNA, 25 bp, Homo sapien
accacctgaccaggcctgcaaggga

SEQ ID NO: 2307658 - DNA, 25 bp, Homo sapien
caaacaccacctgaccaggcctgca

SEQ ID NO: 2307659 - DNA, 25 bp, Homo sapien
cctttgctttacaaacaccacctga

SEQ ID NO: 2307660 - DNA, 25 bp, Homo sapien
acctgaccaggcctgcaagggaagg

SEQ ID NO: 2307661 - DNA, 25 bp, Homo sapien
ggcgacaagaccttagctgcagaat

SEQ ID NO: 2307662 - DNA, 25 bp, Homo sapien
tccattccaatctaaggagtagcca

SEQ ID NO: 2307663 - DNA, 25 bp, Homo sapien
tctggagattgccttatcctttgca

SEQ ID NO: 2307664 - DNA, 25 bp, Homo sapien
gcttggttttagagttaaggcgaca

SEQ ID NO: 2307665 - DNA, 25 bp, Homo sapien
ccattgttaactgaatgttactgtt

SEQ ID NO: 2307666 - DNA, 25 bp, Homo sapien
ctgaatgttactgtttccactccag

SEQ ID NO: 2307667 - DNA, 25 bp, Homo sapien
caactacatgtcctcccttcaactg

SEQ ID NO: 2307668 - DNA, 25 bp, Homo sapien
tgtttccactccagcaactacatgt

SEQ ID NO: 2307669 - DNA, 25 bp, Homo sapien
gagagctcctcaggcttagatagtg

SEQ ID NO: 2307670 - DNA, 25 bp, Homo sapien
tttgccatatgggtagaggttacag

SEQ ID NO: 2307671 - DNA, 25 bp, Homo sapien
tagtgaagtgatcaaatgccagtgt

SEQ ID NO: 2307672 - DNA, 25 bp, Homo sapien
cgttgtaccgcattctttccagcat

SEQ ID NO: 2307673 - DNA, 25 bp, Homo sapien
tatttagcataaaattccagcgctg

SEQ ID NO: 2307674 - DNA, 25 bp, Homo sapien
ggagcggtttcagtggcgcaacaaa

SEQ ID NO: 2307675 - DNA, 25 bp, Homo sapien
tgtagcttcatcctatccggaggca

SEQ ID NO: 2307676 - DNA, 25 bp, Homo sapien
tactgttgcctacttctgaccaaga

SEQ ID NO: 2307677 - DNA, 25 bp, Homo sapien
caaattttcatgtcatcgttgtaca

SEQ ID NO: 2307678 - DNA, 25 bp, Homo sapien
tcatgtcatcgttgtacaggggcca

SEQ ID NO: 2307679 - DNA, 25 bp, Homo sapien
ttctctatatagttccagtcttagt

SEQ ID NO: 2307680 - DNA, 25 bp, Homo sapien
tatatgtgctcctaaagtgagccca

SEQ ID NO: 2307681 - DNA, 25 bp, Homo sapien
gatcactgcgatgagcttccttctc

SEQ ID NO: 2307682 - DNA, 25 bp, Homo sapien
cgtgtccttgtctctgatcactgcg

SEQ ID NO: 2307683 - DNA, 25 bp, Homo sapien
ttgtctctgatcactgcgatgagct

SEQ ID NO: 2307684 - DNA, 25 bp, Homo sapien
tctgatcactgcgatgagcttcctt

SEQ ID NO: 2307685 - DNA, 25 bp, Homo sapien
gcagttcttgttaagctcccctatg

SEQ ID NO: 2307686 - DNA, 25 bp, Homo sapien
tgttaagctcccctatgctgcccag

SEQ ID NO: 2307687 - DNA, 25 bp, Homo sapien
caccaccaggaaattggggtggcag

SEQ ID NO: 2307688 - DNA, 25 bp, Homo sapien
attggggtggcagttcttgttaagc

SEQ ID NO: 2307689 - DNA, 25 bp, Homo sapien
tctctgcgatgtactggttgatgag

SEQ ID NO: 2307690 - DNA, 25 bp, Homo sapien
ccatctctgcgatgtactggttgat

SEQ ID NO: 2307691 - DNA, 25 bp, Homo sapien
caccatctctgcgatgtactggttg

SEQ ID NO: 2307692 - DNA, 25 bp, Homo sapien
cggaaagtgtcttcgatctcattga

SEQ ID NO: 2307693 - DNA, 25 bp, Homo sapien
cttaaccagccttgattttaacagc

SEQ ID NO: 2307694 - DNA, 25 bp, Homo sapien
ttaaccagccttgattttaacagca

SEQ ID NO: 2307695 - DNA, 25 bp, Homo sapien
tccttaaccagccttgattttaaca

SEQ ID NO: 2307696 - DNA, 25 bp, Homo sapien
ccttaaccagccttgattttaacag

SEQ ID NO: 2307697 - DNA, 25 bp, Homo sapien
ggagagaccgtctccctgccgttac

SEQ ID NO: 2307698 - DNA, 25 bp, Homo sapien
ttccggggctttcccgccagagctg

SEQ ID NO: 2307699 - DNA, 25 bp, Homo sapien
gctttctgtggtaccggcttcatct

SEQ ID NO: 2307700 - DNA, 25 bp, Homo sapien
ggagagctgttttcaccgggaagct

SEQ ID NO: 2307701 - DNA, 25 bp, Homo sapien
gagactgtgtcggacccggtcagcc

SEQ ID NO: 2307702 - DNA, 25 bp, Homo sapien
caggagactgtgtcggacccggtca

SEQ ID NO: 2307703 - DNA, 25 bp, Homo sapien
agactgtgtcggacccggtcagccg

SEQ ID NO: 2307704 - DNA, 25 bp, Homo sapien
gtccaggagactgtgtcggacccgg

SEQ ID NO: 2307705 - DNA, 25 bp, Homo sapien
ctcttccggtgctgtgaaggcggtt

SEQ ID NO: 2307706 - DNA, 25 bp, Homo sapien
aaaccccttcgcatggcagccggtt

SEQ ID NO: 2307707 - DNA, 25 bp, Homo sapien
tgtgaaggcggttccggttcgcggc

SEQ ID NO: 2307708 - DNA, 25 bp, Homo sapien
tccggttcggtgagtggcggcggga

SEQ ID NO: 2307709 - DNA, 25 bp, Homo sapien
ctgccccagccccctcctcttcagc

SEQ ID NO: 2307710 - DNA, 25 bp, Homo sapien
tctgttctttgacctcctgccccag

SEQ ID NO: 2307711 - DNA, 25 bp, Homo sapien
tcctgccccagccccctcctcttca

SEQ ID NO: 2307712 - DNA, 25 bp, Homo sapien
gccccagccccctcctcttcagcca

SEQ ID NO: 2307713 - DNA, 25 bp, Homo sapien
ctgaaaagggtactgagaaattacg

SEQ ID NO: 2307714 - DNA, 25 bp, Homo sapien
agtattccgagtacgagaaagcgaa

SEQ ID NO: 2307715 - DNA, 25 bp, Homo sapien
tacgactagtcttaaatgctccctt

SEQ ID NO: 2307716 - DNA, 25 bp, Homo sapien
gaaagcgaaaaagcccagactgaaa

SEQ ID NO: 2307717 - DNA, 25 bp, Homo sapien
tacatcttgccagagtctagcctaa

SEQ ID NO: 2307718 - DNA, 25 bp, Homo sapien
ggtgattcctgggtccttctctatc

SEQ ID NO: 2307719 - DNA, 25 bp, Homo sapien
aaagcagatctctagtgggctccca

SEQ ID NO: 2307720 - DNA, 25 bp, Homo sapien
tcctccagagttctggaaggttcta

SEQ ID NO: 2307721 - DNA, 25 bp, Homo sapien
gtcctgactaactggcgagactgaa

SEQ ID NO: 2307722 - DNA, 25 bp, Homo sapien
ctgaggagtcctgactaactggcga

SEQ ID NO: 2307723 - DNA, 25 bp, Homo sapien
tttcagatgaaactcgtctttatgc

SEQ ID NO: 2307724 - DNA, 25 bp, Homo sapien
tgaaactcgtctttatgcatggctg

SEQ ID NO: 2307725 - DNA, 25 bp, Homo sapien
tggctttggtatgagcatgctggaa

SEQ ID NO: 2307726 - DNA, 25 bp, Homo sapien
tctagactcttcaagatgtctgtct

SEQ ID NO: 2307727 - DNA, 25 bp, Homo sapien
cacggtgtctggatcatccatagta

SEQ ID NO: 2307728 - DNA, 25 bp, Homo sapien
gaaaacaggtatgcttcccacggtg

SEQ ID NO: 2307729 - DNA, 25 bp, Homo sapien
tgcttacttgtatctctacctctgc

SEQ ID NO: 2307730 - DNA, 25 bp, Homo sapien
ctcttgcttacttgtatctctacct

SEQ ID NO: 2307731 - DNA, 25 bp, Homo sapien
tcttgcttacttgtatctctacctc

SEQ ID NO: 2307732 - DNA, 25 bp, Homo sapien
ttgcttacttgtatctctacctctg

SEQ ID NO: 2307733 - DNA, 25 bp, Homo sapien
tccgccgctgctttcttgcagattg

SEQ ID NO: 2307734 - DNA, 25 bp, Homo sapien
ttttagtcttagctctcctccgccg

SEQ ID NO: 2307735 - DNA, 25 bp, Homo sapien
cttgcagattgtccttgggaaaggg

SEQ ID NO: 2307736 - DNA, 25 bp, Homo sapien
gctgctttcttgcagattgtccttg

SEQ ID NO: 2307737 - DNA, 25 bp, Homo sapien
agggttttggctgcatggtgctctt

SEQ ID NO: 2307738 - DNA, 25 bp, Homo sapien
agcaatggctttgccaatccccagg

SEQ ID NO: 2307739 - DNA, 25 bp, Homo sapien
cagggttttggctgcatggtgctct

SEQ ID NO: 2307740 - DNA, 25 bp, Homo sapien
gcaatggctttgccaatccccaggg

SEQ ID NO: 2307741 - DNA, 25 bp, Homo sapien
tagcaaagcccaaaattcccgtgaa

SEQ ID NO: 2307742 - DNA, 25 bp, Homo sapien
ttagcaaagcccaaaattcccgtga

SEQ ID NO: 2307743 - DNA, 25 bp, Homo sapien
tagcatagttttggcggctgaagcc

SEQ ID NO: 2307744 - DNA, 25 bp, Homo sapien
tgtaatggctggctatctggagaca

SEQ ID NO: 2307745 - DNA, 25 bp, Homo sapien
ccgatgtcataaggctaaaggtagc

SEQ ID NO: 2307746 - DNA, 25 bp, Homo sapien
tccaggggtagaatatgccgatgtc

SEQ ID NO: 2307747 - DNA, 25 bp, Homo sapien
tgcacctggccgatcccgtcccatc

SEQ ID NO: 2307748 - DNA, 25 bp, Homo sapien
gcacctggccgatcccgtcccatct

SEQ ID NO: 2307749 - DNA, 25 bp, Homo sapien
ctgcacctggccgatcccgtcccat

SEQ ID NO: 2307750 - DNA, 25 bp, Homo sapien
atggacaaagaagacacgggcaccg

SEQ ID NO: 2307751 - DNA, 25 bp, Homo sapien
gaagacacgggcaccggtgaagata

SEQ ID NO: 2307752 - DNA, 25 bp, Homo sapien
ggcaccggtgaagataccaactcga

SEQ ID NO: 2307753 - DNA, 25 bp, Homo sapien
ggtgaagataccaactcgaaccaca

SEQ ID NO: 2307754 - DNA, 25 bp, Homo sapien
gcatcatcgaaacgctctcccaggt

SEQ ID NO: 2307755 - DNA, 25 bp, Homo sapien
gctgaagcatcatcgaaacgctctc

SEQ ID NO: 2307756 - DNA, 25 bp, Homo sapien
cagctgaagcatcatcgaaacgctc

SEQ ID NO: 2307757 - DNA, 25 bp, Homo sapien
gaagcatcatcgaaacgctctccca

SEQ ID NO: 2307758 - DNA, 25 bp, Homo sapien
ttaggagaccatgagcccaaaacag

SEQ ID NO: 2307759 - DNA, 25 bp, Homo sapien
aacaaggacagagcaaatatgggac

SEQ ID NO: 2307760 - DNA, 25 bp, Homo sapien
atgacagggaatttaggagaccatg

SEQ ID NO: 2307761 - DNA, 25 bp, Homo sapien
acaaggacagagcaaatatgggaca

SEQ ID NO: 2307762 - DNA, 25 bp, Homo sapien
tctggaggtcactcaacaagtcact

SEQ ID NO: 2307763 - DNA, 25 bp, Homo sapien
tcactccactcagaacggaaggtgt

SEQ ID NO: 2307764 - DNA, 25 bp, Homo sapien
gacacagagattggtgatcccacgc

SEQ ID NO: 2307765 - DNA, 25 bp, Homo sapien
ttcaccaggttgtaggcagctcgga

SEQ ID NO: 2307766 - DNA, 25 bp, Homo sapien
caatggtcatatcggtgccacagaa

SEQ ID NO: 2307767 - DNA, 25 bp, Homo sapien
attgtcaattgacccaaccaggccc

SEQ ID NO: 2307768 - DNA, 25 bp, Homo sapien
catgatccgatgcagggcagagtca

SEQ ID NO: 2307769 - DNA, 25 bp, Homo sapien
tcaggtagctggacttcgtagcctc

SEQ ID NO: 2307770 - DNA, 25 bp, Homo sapien
gtggcggcccattacttctaacaca

SEQ ID NO: 2307771 - DNA, 25 bp, Homo sapien
cagtggcggcccattacttctaaca

SEQ ID NO: 2307772 - DNA, 25 bp, Homo sapien
ccacagtggcggcccattacttcta

SEQ ID NO: 2307773 - DNA, 25 bp, Homo sapien
acagtggcggcccattacttctaac

SEQ ID NO: 2307774 - DNA, 25 bp, Homo sapien
ctgagtcggcgacaaaggtgttcct

SEQ ID NO: 2307775 - DNA, 25 bp, Homo sapien
aggtgttcctcccagtcgtcatctg

SEQ ID NO: 2307776 - DNA, 25 bp, Homo sapien
cgctgagtcggcgacaaaggtgttc

SEQ ID NO: 2307777 - DNA, 25 bp, Homo sapien
tggtggacattcaggaataaaaacc

SEQ ID NO: 2307778 - DNA, 25 bp, Homo sapien
gggtaaaatggtccatggaatgaag

SEQ ID NO: 2307779 - DNA, 25 bp, Homo sapien
ctggttgagaacaaagggtaaaatg

SEQ ID NO: 2307780 - DNA, 25 bp, Homo sapien
aagggtaaaatggtccatggaatga

SEQ ID NO: 2307781 - DNA, 25 bp, Homo sapien
agaacaaagggtaaaatggtccatg

SEQ ID NO: 2307782 - DNA, 25 bp, Homo sapien
tttccattcttgtcaattgcaccct

SEQ ID NO: 2307783 - DNA, 25 bp, Homo sapien
gtcttctgaggtgattggttttcca

SEQ ID NO: 2307784 - DNA, 25 bp, Homo sapien
gcaccctcagccacaatgatgatgt

SEQ ID NO: 2307785 - DNA, 25 bp, Homo sapien
gtcaattgcaccctcagccacaatg

SEQ ID NO: 2307786 - DNA, 25 bp, Homo sapien
cagagagagggttacgcagagtcaa

SEQ ID NO: 2307787 - DNA, 25 bp, Homo sapien
gagacttgggtaaaccatggacagc

SEQ ID NO: 2307788 - DNA, 25 bp, Homo sapien
actcagaagccagaagggaatgggc

SEQ ID NO: 2307789 - DNA, 25 bp, Homo sapien
cttgtcttgtaatggttctttgtgg

SEQ ID NO: 2307790 - DNA, 25 bp, Homo sapien
ccaagacagtaacccgggtgtcata

SEQ ID NO: 2307791 - DNA, 25 bp, Homo sapien
gtgtcatatcccagacgcttaacca

SEQ ID NO: 2307792 - DNA, 25 bp, Homo sapien
cagtaacccgggtgtcatatcccag

SEQ ID NO: 2307793 - DNA, 25 bp, Homo sapien
tctgcacatgccccaagacagtaac

SEQ ID NO: 2307794 - DNA, 25 bp, Homo sapien
ccagagaggctcactacacaggctg

SEQ ID NO: 2307795 - DNA, 25 bp, Homo sapien
ggcgcacagcctggttaccagagag

SEQ ID NO: 2307796 - DNA, 25 bp, Homo sapien
cctggttaccagagaggctcactac

SEQ ID NO: 2307797 - DNA, 25 bp, Homo sapien
tcccctccaaaagtgccatcactgc

SEQ ID NO: 2307798 - DNA, 25 bp, Homo sapien
gggcttcgtcaaatttcttctcatc

SEQ ID NO: 2307799 - DNA, 25 bp, Homo sapien
cagggcttcgtcaaatttcttctca

SEQ ID NO: 2307800 - DNA, 25 bp, Homo sapien
tctcagcttcagggcttcgtcaaat

SEQ ID NO: 2307801 - DNA, 25 bp, Homo sapien
gcttcagggcttcgtcaaatttctt

SEQ ID NO: 2307802 - DNA, 25 bp, Homo sapien
tctttggcttcgttcacgcctctga

SEQ ID NO: 2307803 - DNA, 25 bp, Homo sapien
ggagccatggagatctttggcttcg

SEQ ID NO: 2307804 - DNA, 25 bp, Homo sapien
atttctgtagctagtgagcttcccg

SEQ ID NO: 2307805 - DNA, 25 bp, Homo sapien
cttcgttcacgcctctgatttctgt

SEQ ID NO: 2307806 - DNA, 25 bp, Homo sapien
ctcccagagggaagttccatagggc

SEQ ID NO: 2307807 - DNA, 25 bp, Homo sapien
gaagtacaaatagagagaggtgtct

SEQ ID NO: 2307808 - DNA, 25 bp, Homo sapien
gctcccagagggaagttccataggg

SEQ ID NO: 2307809 - DNA, 25 bp, Homo sapien
aagtacaaatagagagaggtgtctt

SEQ ID NO: 2307810 - DNA, 25 bp, Homo sapien
catgagctagaagcttgtacacctc

SEQ ID NO: 2307811 - DNA, 25 bp, Homo sapien
ataccgggggtctgacatgagctag

SEQ ID NO: 2307812 - DNA, 25 bp, Homo sapien
tctgacatgagctagaagcttgtac

SEQ ID NO: 2307813 - DNA, 25 bp, Homo sapien
tacacctcccagttgttcatgaagc

SEQ ID NO: 2307814 - DNA, 25 bp, Homo sapien
aatcctcacagtggagcgaacagca

SEQ ID NO: 2307815 - DNA, 25 bp, Homo sapien
tcacagccactgtgtgcgaaccact

SEQ ID NO: 2307816 - DNA, 25 bp, Homo sapien
catcatggacaacgagcactcggtt

SEQ ID NO: 2307817 - DNA, 25 bp, Homo sapien
tgccctggataaggccaatcctcac

SEQ ID NO: 2307818 - DNA, 25 bp, Homo sapien
gtttagagccaccttggccagtcca

SEQ ID NO: 2307819 - DNA, 25 bp, Homo sapien
cccaacatagctccagccagcttcc

SEQ ID NO: 2307820 - DNA, 25 bp, Homo sapien
tagtcccaagtttagagccaccttg

SEQ ID NO: 2307821 - DNA, 25 bp, Homo sapien
cagtccagcccccaacatagctcca

SEQ ID NO: 2307822 - DNA, 25 bp, Homo sapien
tgccctcatggcagcaactgtgagg

SEQ ID NO: 2307823 - DNA, 25 bp, Homo sapien
tactggagctctaagttgccagagc

SEQ ID NO: 2307824 - DNA, 25 bp, Homo sapien
gaagcagaccatggcataatgaacc

SEQ ID NO: 2307825 - DNA, 25 bp, Homo sapien
acccagacaacagggtggttgaagc

SEQ ID NO: 2307826 - DNA, 25 bp, Homo sapien
tgatctgttcaaagctcttcttggg

SEQ ID NO: 2307827 - DNA, 25 bp, Homo sapien
tcaaagcccccaatgatgacaaggc

SEQ ID NO: 2307828 - DNA, 25 bp, Homo sapien
acttagttatattggcactgatctg

SEQ ID NO: 2307829 - DNA, 25 bp, Homo sapien
gatgacaaggccctgaatgttaaac

SEQ ID NO: 2307830 - DNA, 25 bp, Homo sapien
agagaggaagaaatggtggcaggca

SEQ ID NO: 2307831 - DNA, 25 bp, Homo sapien
cacaagggcaggattggggagaggg

SEQ ID NO: 2307832 - DNA, 25 bp, Homo sapien
ggaagaaatggtggcaggcactcac

SEQ ID NO: 2307833 - DNA, 25 bp, Homo sapien
ctaagaagaagagagcacaagggca

SEQ ID NO: 2307834 - DNA, 25 bp, Homo sapien
gatagtattgagtgctgtgtcagcc

SEQ ID NO: 2307835 - DNA, 25 bp, Homo sapien
agactgtagcaggaatgaccacaaa

SEQ ID NO: 2307836 - DNA, 25 bp, Homo sapien
gctgaagtctgagccagggacattg

SEQ ID NO: 2307837 - DNA, 25 bp, Homo sapien
tgtgtcagccccaacgctgaagtct

SEQ ID NO: 2307838 - DNA, 25 bp, Homo sapien
tactggtgcatttctaggtgaggaa

SEQ ID NO: 2307839 - DNA, 25 bp, Homo sapien
cactgcagaacgtctctcctgggaa

SEQ ID NO: 2307840 - DNA, 25 bp, Homo sapien
tatattctccataggctagcagggc

SEQ ID NO: 2307841 - DNA, 25 bp, Homo sapien
tataatcctggccaaaagggatggg

SEQ ID NO: 2307842 - DNA, 25 bp, Homo sapien
cagtagccacccatagtctcaatga

SEQ ID NO: 2307843 - DNA, 25 bp, Homo sapien
aaaaatgtaggcagcatcggcccca

SEQ ID NO: 2307844 - DNA, 25 bp, Homo sapien
aacacccgacgcttggtgccagctg

SEQ ID NO: 2307845 - DNA, 25 bp, Homo sapien
cagtccagccatggtagccaggtag

SEQ ID NO: 2307846 - DNA, 25 bp, Homo sapien
taaagggcttagcaccaggtcgcct

SEQ ID NO: 2307847 - DNA, 25 bp, Homo sapien
gcattccaacaacagtagctgcggt

SEQ ID NO: 2307848 - DNA, 25 bp, Homo sapien
gagtaaatcctaagcctaactggga

SEQ ID NO: 2307849 - DNA, 25 bp, Homo sapien
tgtttacaatcctgggcctgaactg

SEQ ID NO: 2307850 - DNA, 25 bp, Homo sapien
atcttttgcaccagatgttcaacat

SEQ ID NO: 2307851 - DNA, 25 bp, Homo sapien
tttaggaacaaaccatggatgaggt

SEQ ID NO: 2307852 - DNA, 25 bp, Homo sapien
ccaaggattcaagggataggctggc

SEQ ID NO: 2307853 - DNA, 25 bp, Homo sapien
ctcagggtgtcccaacaatggccat

SEQ ID NO: 2307854 - DNA, 25 bp, Homo sapien
aatggccattctatgggtttgagcc

SEQ ID NO: 2307855 - DNA, 25 bp, Homo sapien
gaagtcagtggtatagttctcattg

SEQ ID NO: 2307856 - DNA, 25 bp, Homo sapien
tcttcctgctgtcgaagatgccctt

SEQ ID NO: 2307857 - DNA, 25 bp, Homo sapien
tgctgtcgaagatgcccttcccctc

SEQ ID NO: 2307858 - DNA, 25 bp, Homo sapien
aatgaagtcagtggtatagttctca

SEQ ID NO: 2307859 - DNA, 25 bp, Homo sapien
tttattggccaatgggtcagctgcc

SEQ ID NO: 2307860 - DNA, 25 bp, Homo sapien
caaagctgccaaggttgaaaagccc

SEQ ID NO: 2307861 - DNA, 25 bp, Homo sapien
gaagtcaaactatgaaagggtgccc

SEQ ID NO: 2307862 - DNA, 25 bp, Homo sapien
tgactgtaagagactgcaggcccat

SEQ ID NO: 2307863 - DNA, 25 bp, Homo sapien
gccttggcgcccatcttagtggcaa

SEQ ID NO: 2307864 - DNA, 25 bp, Homo sapien
gacatccagttcatagccttggcgc

SEQ ID NO: 2307865 - DNA, 25 bp, Homo sapien
catcttagtggcaaaattcctatca

SEQ ID NO: 2307866 - DNA, 25 bp, Homo sapien
agtggcaaaattcctatcaaatggg

SEQ ID NO: 2307867 - DNA, 25 bp, Homo sapien
gggaaccagcctctatagagggcac

SEQ ID NO: 2307868 - DNA, 25 bp, Homo sapien
tcagcttctatactggggaaccagc

SEQ ID NO: 2307869 - DNA, 25 bp, Homo sapien
agcctctatagagggcactcgctct

SEQ ID NO: 2307870 - DNA, 25 bp, Homo sapien
gagggatgggcagtcagcttctata

SEQ ID NO: 2307871 - DNA, 25 bp, Homo sapien
atctggagtattggcaaagatccgc

SEQ ID NO: 2307872 - DNA, 25 bp, Homo sapien
cccgaatctggagtattggcaaaga

SEQ ID NO: 2307873 - DNA, 25 bp, Homo sapien
agaacacagcccgaatctggagtat

SEQ ID NO: 2307874 - DNA, 25 bp, Homo sapien
agagccctcttacgcatccccagaa

SEQ ID NO: 2307875 - DNA, 25 bp, Homo sapien
gaccgcttccgggtgatgtgctcca

SEQ ID NO: 2307876 - DNA, 25 bp, Homo sapien
ggtgggcatggtctgaagtgtccaa

SEQ ID NO: 2307877 - DNA, 25 bp, Homo sapien
tctcgtacttggctaggattttgag

SEQ ID NO: 2307878 - DNA, 25 bp, Homo sapien
cgcttccgggtgatgtgctccaggt

SEQ ID NO: 2307879 - DNA, 25 bp, Homo sapien
gaccatgatcaggtaatctattccc

SEQ ID NO: 2307880 - DNA, 25 bp, Homo sapien
ccagaactggtcatggctgcaaggt

SEQ ID NO: 2307881 - DNA, 25 bp, Homo sapien
tgagtaagtgatatctagcagtagc

SEQ ID NO: 2307882 - DNA, 25 bp, Homo sapien
tagcagtagcactagaggtgcccag

SEQ ID NO: 2307883 - DNA, 25 bp, Homo sapien
caagtagtgtactagagataatccc

SEQ ID NO: 2307884 - DNA, 25 bp, Homo sapien
tatttggctgccttattccctgact

SEQ ID NO: 2307885 - DNA, 25 bp, Homo sapien
aatttttcagacagccagcaagtag

SEQ ID NO: 2307886 - DNA, 25 bp, Homo sapien
gacagtattacattccacttaggaa

SEQ ID NO: 2307887 - DNA, 25 bp, Homo sapien
gaatggaatctactgacacagctaa

SEQ ID NO: 2307888 - DNA, 25 bp, Homo sapien
ttaaagctgattgggaactacaaac

SEQ ID NO: 2307889 - DNA, 25 bp, Homo sapien
gcctggctgttctatgtaactttcc

SEQ ID NO: 2307890 - DNA, 25 bp, Homo sapien
agttcttcgtttactgcctggctgt

SEQ ID NO: 2307891 - DNA, 25 bp, Homo sapien
cagaactgggctggatgacatccct

SEQ ID NO: 2307892 - DNA, 25 bp, Homo sapien
tgtgcccaagggctacagtagctct

SEQ ID NO: 2307893 - DNA, 25 bp, Homo sapien
taacctcaaatggtgcagatccaga

SEQ ID NO: 2307894 - DNA, 25 bp, Homo sapien
cacctacggtgtgtgttccagcagg

SEQ ID NO: 2307895 - DNA, 25 bp, Homo sapien
tatagatttcgaagcaacatgtcac

SEQ ID NO: 2307896 - DNA, 25 bp, Homo sapien
gtcacaacaataacctccatagcac

SEQ ID NO: 2307897 - DNA, 25 bp, Homo sapien
ggaaggagtcaacagtgtaactaaa

SEQ ID NO: 2307898 - DNA, 25 bp, Homo sapien
caaaagaagaggtctccctcaatcc

SEQ ID NO: 2307899 - DNA, 25 bp, Homo sapien
tcttgaattctcatgctcaagcaac

SEQ ID NO: 2307900 - DNA, 25 bp, Homo sapien
gtgagcctttcttcatacctgggtt

SEQ ID NO: 2307901 - DNA, 25 bp, Homo sapien
ttcatacctgggttacaataattac

SEQ ID NO: 2307902 - DNA, 25 bp, Homo sapien
gaattctcatgctcaagcaacccac

SEQ ID NO: 2307903 - DNA, 25 bp, Homo sapien
catatgtaatccattgagctcaaag

SEQ ID NO: 2307904 - DNA, 25 bp, Homo sapien
gctcaaagtcttctatacatgtttt

SEQ ID NO: 2307905 - DNA, 25 bp, Homo sapien
ttgagctcaaagtcttctatacatg

SEQ ID NO: 2307906 - DNA, 25 bp, Homo sapien
ctgagtacgatgcatatgtaatcca

SEQ ID NO: 2307907 - DNA, 25 bp, Homo sapien
aaatgtttcagataacttttcatta

SEQ ID NO: 2307908 - DNA, 25 bp, Homo sapien
ttacctattttagaatactacctca

SEQ ID NO: 2307909 - DNA, 25 bp, Homo sapien
tgactccagggtagttatacttttg

SEQ ID NO: 2307910 - DNA, 25 bp, Homo sapien
ttatataaatgactccagggtagtt

SEQ ID NO: 2307911 - DNA, 25 bp, Homo sapien
aaagcagccgagctgattgccaact

SEQ ID NO: 2307912 - DNA, 25 bp, Homo sapien
tgagggcgactccaaagcagccgag

SEQ ID NO: 2307913 - DNA, 25 bp, Homo sapien
ccagatctgtggtggaaacggctga

SEQ ID NO: 2307914 - DNA, 25 bp, Homo sapien
actcactggccactgcaggagacgg

SEQ ID NO: 2307915 - DNA, 25 bp, Homo sapien
gcttccccttcagtcaaaatgccat

SEQ ID NO: 2307916 - DNA, 25 bp, Homo sapien
aaatgccatcaaacctctgatggaa

SEQ ID NO: 2307917 - DNA, 25 bp, Homo sapien
ttgagccttcttggagcttcccctt

SEQ ID NO: 2307918 - DNA, 25 bp, Homo sapien
gttcttgagccttcttggagcttcc

SEQ ID NO: 2307919 - DNA, 25 bp, Homo sapien
ggtgtcgcggatgctcctctgtttc

SEQ ID NO: 2307920 - DNA, 25 bp, Homo sapien
gtctcttgggatcgccccgggacga

SEQ ID NO: 2307921 - DNA, 25 bp, Homo sapien
tgccggttccgtgggtcacagacgc

SEQ ID NO: 2307922 - DNA, 25 bp, Homo sapien
ggcgacgcacggcacgtaaatgacg

SEQ ID NO: 2307923 - DNA, 25 bp, Homo sapien
tccattgagtggcagaagcgggtgg

SEQ ID NO: 2307924 - DNA, 25 bp, Homo sapien
ccagcagaccgtcctccattgagtg

SEQ ID NO: 2307925 - DNA, 25 bp, Homo sapien
cctccattgagtggcagaagcgggt

SEQ ID NO: 2307926 - DNA, 25 bp, Homo sapien
cagcagaccgtcctccattgagtgg

SEQ ID NO: 2307927 - DNA, 25 bp, Homo sapien
cctggatgtgcgaggcctgctcgtc

SEQ ID NO: 2307928 - DNA, 25 bp, Homo sapien
acgtcctcaaacagggcttgcagct

SEQ ID NO: 2307929 - DNA, 25 bp, Homo sapien
gcatgtcgccgccgtccttggtcat

SEQ ID NO: 2307930 - DNA, 25 bp, Homo sapien
cagttccttcatgccgccgttgtac

SEQ ID NO: 2307931 - DNA, 25 bp, Homo sapien
gtccccgatcccaggcgaaggagtc

SEQ ID NO: 2307932 - DNA, 25 bp, Homo sapien
tctggcacatggagacgatggctcg

SEQ ID NO: 2307933 - DNA, 25 bp, Homo sapien
caggcgaaggagtctccggctcttg

SEQ ID NO: 2307934 - DNA, 25 bp, Homo sapien
acgatggctcgctggttggcgcaca

SEQ ID NO: 2307935 - DNA, 25 bp, Homo sapien
tcctcctcgtcctcgggatcgcgac

SEQ ID NO: 2307936 - DNA, 25 bp, Homo sapien
ttcctcctcgtcctcgggatcgcga

SEQ ID NO: 2307937 - DNA, 25 bp, Homo sapien
ctccagttgcagcagggtaatgtcg

SEQ ID NO: 2307938 - DNA, 25 bp, Homo sapien
ggcgctcacagtgactggagggtgt

SEQ ID NO: 2307939 - DNA, 25 bp, Homo sapien
tcgggcatgtcgaggggctccacaa

SEQ ID NO: 2307940 - DNA, 25 bp, Homo sapien
agggaggcctcgccctccagttgca

SEQ ID NO: 2307941 - DNA, 25 bp, Homo sapien
tgtccaagtgaagcatgccgcaccg

SEQ ID NO: 2307942 - DNA, 25 bp, Homo sapien
catgcactcggaaacccaaagacag

SEQ ID NO: 2307943 - DNA, 25 bp, Homo sapien
agcagctgtccaagtgaagcatgcc

SEQ ID NO: 2307944 - DNA, 25 bp, Homo sapien
cagcccgggaaggtagtgccccacg

SEQ ID NO: 2307945 - DNA, 25 bp, Homo sapien
taattcgcttagttgggcagaaaga

SEQ ID NO: 2307946 - DNA, 25 bp, Homo sapien
gaattctcgatgctcccaaagtcct

SEQ ID NO: 2307947 - DNA, 25 bp, Homo sapien
gcagaaagaattctcgatgctccca

SEQ ID NO: 2307948 - DNA, 25 bp, Homo sapien
ctttccgcagttcgctataattcgc

SEQ ID NO: 2307949 - DNA, 25 bp, Homo sapien
tttacacaattcacgggttctcctg

SEQ ID NO: 2307950 - DNA, 25 bp, Homo sapien
tcagcagaagggtaaatttcctgtt

SEQ ID NO: 2307951 - DNA, 25 bp, Homo sapien
tgccatggtcctaggtaagtccttt

SEQ ID NO: 2307952 - DNA, 25 bp, Homo sapien
ttgttagagattatttgccatggtc

SEQ ID NO: 2307953 - DNA, 25 bp, Homo sapien
caatcccagatgaagtcagtgacaa

SEQ ID NO: 2307954 - DNA, 25 bp, Homo sapien
gagacagtttttggctgcggcccca

SEQ ID NO: 2307955 - DNA, 25 bp, Homo sapien
gaagggtctgaagcccctgaaccta

SEQ ID NO: 2307956 - DNA, 25 bp, Homo sapien
tagcttggagctcgtagaagggtct

SEQ ID NO: 2307957 - DNA, 25 bp, Homo sapien
aaggttaacaccaaggaaagcattg

SEQ ID NO: 2307958 - DNA, 25 bp, Homo sapien
ggtggaagggcggcacatcagtaaa

SEQ ID NO: 2307959 - DNA, 25 bp, Homo sapien
caccaaggaaagcattgagaaggaa

SEQ ID NO: 2307960 - DNA, 25 bp, Homo sapien
gaggggagatgacgcctttttatta

SEQ ID NO: 2307961 - DNA, 25 bp, Homo sapien
agttggcaatgcctgtcccaaccag

SEQ ID NO: 2307962 - DNA, 25 bp, Homo sapien
gttggcaatgcctgtcccaaccagg

SEQ ID NO: 2307963 - DNA, 25 bp, Homo sapien
ttggcaatgcctgtcccaaccaggg

SEQ ID NO: 2307964 - DNA, 25 bp, Homo sapien
gggtcactaaccaaaatctgaactg

SEQ ID NO: 2307965 - DNA, 25 bp, Homo sapien
tattatattaccacccactggactc

SEQ ID NO: 2307966 - DNA, 25 bp, Homo sapien
gactctgggaagggtcactaaccaa

SEQ ID NO: 2307967 - DNA, 25 bp, Homo sapien
cttcttggtgctgttattatattac

SEQ ID NO: 2307968 - DNA, 25 bp, Homo sapien
ggcgcagcccaaagaccgaaaatat

SEQ ID NO: 2307969 - DNA, 25 bp, Homo sapien
gacacttgtcgctggtgagcacgca

SEQ ID NO: 2307970 - DNA, 25 bp, Homo sapien
aaccaggctctgaggttaccacggc

SEQ ID NO: 2307971 - DNA, 25 bp, Homo sapien
gaagctgtcgccatatttccgaggc

SEQ ID NO: 2307972 - DNA, 25 bp, Homo sapien
cattccctaggtcgtaaaactggca

SEQ ID NO: 2307973 - DNA, 25 bp, Homo sapien
taagagctgctgtacgggaaatcac

SEQ ID NO: 2307974 - DNA, 25 bp, Homo sapien
gaatctcagtctagtagggcaggca

SEQ ID NO: 2307975 - DNA, 25 bp, Homo sapien
cactactcaaacaagggtctgggaa

SEQ ID NO: 2307976 - DNA, 25 bp, Homo sapien
gccctggcagatgagtaactctcct

SEQ ID NO: 2307977 - DNA, 25 bp, Homo sapien
cctgaaagttcctcctgatgtccaa

SEQ ID NO: 2307978 - DNA, 25 bp, Homo sapien
cacagtctgtctagcaggaaggccc

SEQ ID NO: 2307979 - DNA, 25 bp, Homo sapien
ccatggtgagggcacttggaagaac

SEQ ID NO: 2307980 - DNA, 25 bp, Homo sapien
cccaaggtcaatgtttaggatggtg

SEQ ID NO: 2307981 - DNA, 25 bp, Homo sapien
tgtttaagattccattgtagcagac

SEQ ID NO: 2307982 - DNA, 25 bp, Homo sapien
tgtagcagactagagaagggttgta

SEQ ID NO: 2307983 - DNA, 25 bp, Homo sapien
cttcaaaggaaccacgatcaggttg

SEQ ID NO: 2307984 - DNA, 25 bp, Homo sapien
ccattgtagcagactagagaagggt

SEQ ID NO: 2307985 - DNA, 25 bp, Homo sapien
caaaggcaccacttcttctgaattc

SEQ ID NO: 2307986 - DNA, 25 bp, Homo sapien
agtgcaggccagatttcagcatcta

SEQ ID NO: 2307987 - DNA, 25 bp, Homo sapien
ggtatttaagccaagcaaccattag

SEQ ID NO: 2307988 - DNA, 25 bp, Homo sapien
tacacagcttggtcagttgagtgca

SEQ ID NO: 2307989 - DNA, 25 bp, Homo sapien
ctgggctagctcatctgcaagctcc

SEQ ID NO: 2307990 - DNA, 25 bp, Homo sapien
gggctagctcatctgcaagctccat

SEQ ID NO: 2307991 - DNA, 25 bp, Homo sapien
tgggctagctcatctgcaagctcca

SEQ ID NO: 2307992 - DNA, 25 bp, Homo sapien
aagaacatgaagggctatggagatg

SEQ ID NO: 2307993 - DNA, 25 bp, Homo sapien
tggagatgagtgagtggacgatgac

SEQ ID NO: 2307994 - DNA, 25 bp, Homo sapien
cccacttaaatgagtggatgtacct

SEQ ID NO: 2307995 - DNA, 25 bp, Homo sapien
ttaaatgagtggatgtaccttgatg

SEQ ID NO: 2307996 - DNA, 25 bp, Homo sapien
tacatcgttgataaatggaggagtc

SEQ ID NO: 2307997 - DNA, 25 bp, Homo sapien
taaatccttttctcagttggtagct

SEQ ID NO: 2307998 - DNA, 25 bp, Homo sapien
tatattgtaccactgtttgctaggc

SEQ ID NO: 2307999 - DNA, 25 bp, Homo sapien
gatctgtgtgagtatagggactcca

SEQ ID NO: 2308000 - DNA, 25 bp, Homo sapien
tataccatgagtttaagccttccaa

SEQ ID NO: 2308001 - DNA, 25 bp, Homo sapien
tccttattctgagggctaatgttca

SEQ ID NO: 2308002 - DNA, 25 bp, Homo sapien
tgcatctgcttaagagcctgtcttt

SEQ ID NO: 2308003 - DNA, 25 bp, Homo sapien
tatagctccactatctgtaagcagc

SEQ ID NO: 2308004 - DNA, 25 bp, Homo sapien
tatctgctatctcccactcatgtgg

SEQ ID NO: 2308005 - DNA, 25 bp, Homo sapien
ctctggagggaagatgataaacaac

SEQ ID NO: 2308006 - DNA, 25 bp, Homo sapien
gaaaaaatccagtctaatgctcagt

SEQ ID NO: 2308007 - DNA, 25 bp, Homo sapien
tgtggcatgccaagcaaaatccctc

SEQ ID NO: 2308008 - DNA, 25 bp, Homo sapien
taagaaagcaatgtagttgggcatg

SEQ ID NO: 2308009 - DNA, 25 bp, Homo sapien
ctatgatagcatacgtgaaagccac

SEQ ID NO: 2308010 - DNA, 25 bp, Homo sapien
gatagcatacgtgaaagccactgca

SEQ ID NO: 2308011 - DNA, 25 bp, Homo sapien
tgcactatgatagcatacgtgaaag

SEQ ID NO: 2308012 - DNA, 25 bp, Homo sapien
ttttaatgtattgcattgggatcag

SEQ ID NO: 2308013 - DNA, 25 bp, Homo sapien
tgccataaacatatccatctgtttt

SEQ ID NO: 2308014 - DNA, 25 bp, Homo sapien
ggttttgatatgcagtgctgtcact

SEQ ID NO: 2308015 - DNA, 25 bp, Homo sapien
ctttactgagttatgactgacatac

SEQ ID NO: 2308016 - DNA, 25 bp, Homo sapien
ttccagggtgacatacaaccaaaat

SEQ ID NO: 2308017 - DNA, 25 bp, Homo sapien
cagtgatcggacaaaattttaaggc

SEQ ID NO: 2308018 - DNA, 25 bp, Homo sapien
ccaagctgtagtgcatggcactatc

SEQ ID NO: 2308019 - DNA, 25 bp, Homo sapien
catttaaagcagtgatcggacaaaa

SEQ ID NO: 2308020 - DNA, 25 bp, Homo sapien
agagagtggggggaaatattgaaca

SEQ ID NO: 2308021 - DNA, 25 bp, Homo sapien
aaatgaaggaaaaaacagccagaga

SEQ ID NO: 2308022 - DNA, 25 bp, Homo sapien
atgaaggaaaaaacagccagagaga

SEQ ID NO: 2308023 - DNA, 25 bp, Homo sapien
agaagagagtggggggaaatattga

SEQ ID NO: 2308024 - DNA, 25 bp, Homo sapien
aatatctatggagtttattatatca

SEQ ID NO: 2308025 - DNA, 25 bp, Homo sapien
atatctatggagtttattatatcat

SEQ ID NO: 2308026 - DNA, 25 bp, Homo sapien
tatctctattagattaatatagtat

SEQ ID NO: 2308027 - DNA, 25 bp, Homo sapien
gcaatgcggcggcttcttcaggtct

SEQ ID NO: 2308028 - DNA, 25 bp, Homo sapien
gatcgtatttggtgggcctctaccg

SEQ ID NO: 2308029 - DNA, 25 bp, Homo sapien
tatctccgtgtccagtaggttgcct

SEQ ID NO: 2308030 - DNA, 25 bp, Homo sapien
aatgatttccgtgcagtttcgccaa

SEQ ID NO: 2308031 - DNA, 25 bp, Homo sapien
aaaactcgtacttggagctggaaga

SEQ ID NO: 2308032 - DNA, 25 bp, Homo sapien
aatcccttaatatcagtggtgtggc

SEQ ID NO: 2308033 - DNA, 25 bp, Homo sapien
gctgtcagatggatgtgccggccat

SEQ ID NO: 2308034 - DNA, 25 bp, Homo sapien
tacacagcgggcatttaattgagcc

SEQ ID NO: 2308035 - DNA, 25 bp, Homo sapien
tcacctacctatagagtctccaggg

SEQ ID NO: 2308036 - DNA, 25 bp, Homo sapien
tgtgtatgtggtcctgcaaaccatc

SEQ ID NO: 2308037 - DNA, 25 bp, Homo sapien
aatccaagtcttcagcgcctgtcca

SEQ ID NO: 2308038 - DNA, 25 bp, Homo sapien
agctgaggtagactgggccacgtca

SEQ ID NO: 2308039 - DNA, 25 bp, Homo sapien
ccggctttgggcctcaccagtcaag

SEQ ID NO: 2308040 - DNA, 25 bp, Homo sapien
ctctgcggggccaccggctttgggc

SEQ ID NO: 2308041 - DNA, 25 bp, Homo sapien
gggcctcaccagtcaaggcctgttc

SEQ ID NO: 2308042 - DNA, 25 bp, Homo sapien
gggccaccggctttgggcctcacca

SEQ ID NO: 2308043 - DNA, 25 bp, Homo sapien
cagttttttccgctggcagctgagt

SEQ ID NO: 2308044 - DNA, 25 bp, Homo sapien
ccccgacagttttttccgctggcag

SEQ ID NO: 2308045 - DNA, 25 bp, Homo sapien
cagctgagtggctgagtgtcctcgg

SEQ ID NO: 2308046 - DNA, 25 bp, Homo sapien
ctcgggattcgccactgggcccagg

SEQ ID NO: 2308047 - DNA, 25 bp, Homo sapien
ccagagtcagccctttgtgagtgga

SEQ ID NO: 2308048 - DNA, 25 bp, Homo sapien
ttcgtagccggcgtttcggagctcc

SEQ ID NO: 2308049 - DNA, 25 bp, Homo sapien
ggcgtttcggagctccttcttgaga

SEQ ID NO: 2308050 - DNA, 25 bp, Homo sapien
ggcctggagcaccaactgggacact

SEQ ID NO: 2308051 - DNA, 25 bp, Homo sapien
cccctgggcgcttcgtggcggccgc

SEQ ID NO: 2308052 - DNA, 25 bp, Homo sapien
gtcgctgccgctgacccggaggagc

SEQ ID NO: 2308053 - DNA, 25 bp, Homo sapien
ccgctgacccggaggagcgtggcct

SEQ ID NO: 2308054 - DNA, 25 bp, Homo sapien
tgggcgcttcgtggcggccgctctt

SEQ ID NO: 2308055 - DNA, 25 bp, Homo sapien
gacctcggcgtggtgtcttccttca

SEQ ID NO: 2308056 - DNA, 25 bp, Homo sapien
tgggcttggagcttcgcctcttgtc

SEQ ID NO: 2308057 - DNA, 25 bp, Homo sapien
ttggccttggctttcgccctcgcgt

SEQ ID NO: 2308058 - DNA, 25 bp, Homo sapien
ggctctggcacacggcggctccttg

SEQ ID NO: 2308059 - DNA, 25 bp, Homo sapien
catttcaatgagtgtgacagccgct

SEQ ID NO: 2308060 - DNA, 25 bp, Homo sapien
gctagatgtccggtcggttttagcc

SEQ ID NO: 2308061 - DNA, 25 bp, Homo sapien
aagatgcattcccaactggatcagg

SEQ ID NO: 2308062 - DNA, 25 bp, Homo sapien
tggagtcttcccctgcccgctagat

SEQ ID NO: 2308063 - DNA, 25 bp, Homo sapien
tagtcaccaatatcagaaactatgg

SEQ ID NO: 2308064 - DNA, 25 bp, Homo sapien
cactgaggatacttgggtccagaaa

SEQ ID NO: 2308065 - DNA, 25 bp, Homo sapien
gggcttccaatatgggcactgagga

SEQ ID NO: 2308066 - DNA, 25 bp, Homo sapien
agctcctgtgattcattggggctgg

SEQ ID NO: 2308067 - DNA, 25 bp, Homo sapien
gacttagaggagagggacattctga

SEQ ID NO: 2308068 - DNA, 25 bp, Homo sapien
ttcacagttcgggacatcatcattc

SEQ ID NO: 2308069 - DNA, 25 bp, Homo sapien
catgctttctcaactagaaggagga

SEQ ID NO: 2308070 - DNA, 25 bp, Homo sapien
gacattctgagggtcacatatacag

SEQ ID NO: 2308071 - DNA, 25 bp, Homo sapien
taccactaggacagcaccaagatat

SEQ ID NO: 2308072 - DNA, 25 bp, Homo sapien
ctcagaagccttacaatgatggtgg

SEQ ID NO: 2308073 - DNA, 25 bp, Homo sapien
gaactcgtagaatgagaactcaatc

SEQ ID NO: 2308074 - DNA, 25 bp, Homo sapien
tatcacagggagtcataaagtattc

SEQ ID NO: 2308075 - DNA, 25 bp, Homo sapien
cagagtcttcagagggaacacaacc

SEQ ID NO: 2308076 - DNA, 25 bp, Homo sapien
actggagtgattggagctgcaagcc

SEQ ID NO: 2308077 - DNA, 25 bp, Homo sapien
tatagccgttaaagcttagggcaca

SEQ ID NO: 2308078 - DNA, 25 bp, Homo sapien
gatatgtctatgctcaaatccctgg

SEQ ID NO: 2308079 - DNA, 25 bp, Homo sapien
catgatgggtggaaacacgtataca

SEQ ID NO: 2308080 - DNA, 25 bp, Homo sapien
gcagttattacgtacctttccacaa

SEQ ID NO: 2308081 - DNA, 25 bp, Homo sapien
aacttcgtgtgtatatttctgggcc

SEQ ID NO: 2308082 - DNA, 25 bp, Homo sapien
tacgttgctactaactagagtcacc

SEQ ID NO: 2308083 - DNA, 25 bp, Homo sapien
gtttcaggtacaccagtcagacgta

SEQ ID NO: 2308084 - DNA, 25 bp, Homo sapien
tccccatcagtttcaggtacaccag

SEQ ID NO: 2308085 - DNA, 25 bp, Homo sapien
caccatagtctagtgccttaagcaa

SEQ ID NO: 2308086 - DNA, 25 bp, Homo sapien
aattggactgctatagcaaaacacc

SEQ ID NO: 2308087 - DNA, 25 bp, Homo sapien
taaatctatatgctcactgttctgg

SEQ ID NO: 2308088 - DNA, 25 bp, Homo sapien
tatctaaagcacaggtagaggcatt

SEQ ID NO: 2308089 - DNA, 25 bp, Homo sapien
gtataatcatataatgcgacacttt

SEQ ID NO: 2308090 - DNA, 25 bp, Homo sapien
catataatgcgacactttataacaa

SEQ ID NO: 2308091 - DNA, 25 bp, Homo sapien
atgtagtataatcatataatgcgac

SEQ ID NO: 2308092 - DNA, 25 bp, Homo sapien
gcgacactttataacaattaaatga

SEQ ID NO: 2308093 - DNA, 25 bp, Homo sapien
atttgccttcatttgactgactgtt

SEQ ID NO: 2308094 - DNA, 25 bp, Homo sapien
aaatttagatgtatgaggtttggac

SEQ ID NO: 2308095 - DNA, 25 bp, Homo sapien
tctaggcccactgaggctctgttac

SEQ ID NO: 2308096 - DNA, 25 bp, Homo sapien
aatttgccttcatttgactgactgt

SEQ ID NO: 2308097 - DNA, 25 bp, Homo sapien
tctccattgttataaccttcatcct

SEQ ID NO: 2308098 - DNA, 25 bp, Homo sapien
tcctctcttgctcccacagcaacgt

SEQ ID NO: 2308099 - DNA, 25 bp, Homo sapien
aatagattattccacttaggcatcg

SEQ ID NO: 2308100 - DNA, 25 bp, Homo sapien
cagtttcttattttcgcttctgacc

SEQ ID NO: 2308101 - DNA, 25 bp, Homo sapien
tttgccccactccttcacccctaga

SEQ ID NO: 2308102 - DNA, 25 bp, Homo sapien
ttgccccactccttcacccctagac

SEQ ID NO: 2308103 - DNA, 25 bp, Homo sapien
tgccccactccttcacccctagact

SEQ ID NO: 2308104 - DNA, 25 bp, Homo sapien
ttgttctcagacagaaaccaaggac

SEQ ID NO: 2308105 - DNA, 25 bp, Homo sapien
tctgctgcttggaggtcatttctac

SEQ ID NO: 2308106 - DNA, 25 bp, Homo sapien
ctgatcctggcagggatgctgtgcc

SEQ ID NO: 2308107 - DNA, 25 bp, Homo sapien
ttctctgctgcttggaggtcatttc

SEQ ID NO: 2308108 - DNA, 25 bp, Homo sapien
ttgttcctgatcctggcagggatgc

SEQ ID NO: 2308109 - DNA, 25 bp, Homo sapien
ggtctcattgtctcttctatggatg

SEQ ID NO: 2308110 - DNA, 25 bp, Homo sapien
gtctcattgtctcttctatggatgt

SEQ ID NO: 2308111 - DNA, 25 bp, Homo sapien
tggtctcattgtctcttctatggat

SEQ ID NO: 2308112 - DNA, 25 bp, Homo sapien
ccacagggtttcagtgatggttacc

SEQ ID NO: 2308113 - DNA, 25 bp, Homo sapien
agggtttcagtgatggttacctgtt

SEQ ID NO: 2308114 - DNA, 25 bp, Homo sapien
cacagggtttcagtgatggttacct

SEQ ID NO: 2308115 - DNA, 25 bp, Homo sapien
tcccacagggtttcagtgatggtta

SEQ ID NO: 2308116 - DNA, 25 bp, Homo sapien
catctcagcggctataggatccagg

SEQ ID NO: 2308117 - DNA, 25 bp, Homo sapien
ttaggtatcaacatctcagcggcta

SEQ ID NO: 2308118 - DNA, 25 bp, Homo sapien
tatcaacatctcagcggctatagga

SEQ ID NO: 2308119 - DNA, 25 bp, Homo sapien
cagcggctataggatccagggccag

SEQ ID NO: 2308120 - DNA, 25 bp, Homo sapien
cctcattcataaggttccagtagaa

SEQ ID NO: 2308121 - DNA, 25 bp, Homo sapien
cattcataaggttccagtagaaatg

SEQ ID NO: 2308122 - DNA, 25 bp, Homo sapien
ttcataaggttccagtagaaatgtc

SEQ ID NO: 2308123 - DNA, 25 bp, Homo sapien
ctcattcataaggttccagtagaaa

SEQ ID NO: 2308124 - DNA, 25 bp, Homo sapien
cagactccaggggccaatgaaggta

SEQ ID NO: 2308125 - DNA, 25 bp, Homo sapien
ggcacagactccaggggccaatgaa

SEQ ID NO: 2308126 - DNA, 25 bp, Homo sapien
gactccaggggccaatgaaggtaat

SEQ ID NO: 2308127 - DNA, 25 bp, Homo sapien
gcacagactccaggggccaatgaag

SEQ ID NO: 2308128 - DNA, 25 bp, Homo sapien
cccctcttgtaagtcttccagatcg

SEQ ID NO: 2308129 - DNA, 25 bp, Homo sapien
ttgtatatccttaaaaactgtcagc

SEQ ID NO: 2308130 - DNA, 25 bp, Homo sapien
gtatatccttaaaaactgtcagcac

SEQ ID NO: 2308131 - DNA, 25 bp, Homo sapien
ttttgtatatccttaaaaactgtca

SEQ ID NO: 2308132 - DNA, 25 bp, Homo sapien
tgtatatccttaaaaactgtcagca

SEQ ID NO: 2308133 - DNA, 25 bp, Homo sapien
gctgagacaagttctagcagataca

SEQ ID NO: 2308134 - DNA, 25 bp, Homo sapien
tacaaccacatagagtattcttgct

SEQ ID NO: 2308135 - DNA, 25 bp, Homo sapien
tagccgcctggactgacaagtcagt

SEQ ID NO: 2308136 - DNA, 25 bp, Homo sapien
ttatcacatttcctcaagggaactg

SEQ ID NO: 2308137 - DNA, 25 bp, Homo sapien
ctaataaggcagtttactacatcac

SEQ ID NO: 2308138 - DNA, 25 bp, Homo sapien
ttactacatcactaggggattctcc

SEQ ID NO: 2308139 - DNA, 25 bp, Homo sapien
actacatcactaggggattctcccc

SEQ ID NO: 2308140 - DNA, 25 bp, Homo sapien
aataaggcagtttactacatcacta

SEQ ID NO: 2308141 - DNA, 25 bp, Homo sapien
ctcgaatccgagcatcttcctgcag

SEQ ID NO: 2308142 - DNA, 25 bp, Homo sapien
tggcaaatggatacaatgagacttg

SEQ ID NO: 2308143 - DNA, 25 bp, Homo sapien
atggatacaatgagacttgaattcc

SEQ ID NO: 2308144 - DNA, 25 bp, Homo sapien
caaatggatacaatgagacttgaat

SEQ ID NO: 2308145 - DNA, 25 bp, Homo sapien
ggatacaatgagacttgaattccaa

SEQ ID NO: 2308146 - DNA, 25 bp, Homo sapien
acctaacaggcccatcagagaggca

SEQ ID NO: 2308147 - DNA, 25 bp, Homo sapien
gaggcagttgcagaatgtggcacca

SEQ ID NO: 2308148 - DNA, 25 bp, Homo sapien
ggcccatcagagaggcagttgcaga

SEQ ID NO: 2308149 - DNA, 25 bp, Homo sapien
gttgcagaatgtggcaccagaaatc

SEQ ID NO: 2308150 - DNA, 25 bp, Homo sapien
agtggacacagagaagagtcattct

SEQ ID NO: 2308151 - DNA, 25 bp, Homo sapien
gacacagagaagagtcattctgtta

SEQ ID NO: 2308152 - DNA, 25 bp, Homo sapien
agtcctgggtgctgatgtcatgggt

SEQ ID NO: 2308153 - DNA, 25 bp, Homo sapien
ctgatgtcatgggtgtcatggagca

SEQ ID NO: 2308154 - DNA, 25 bp, Homo sapien
tagctatattcatggccagcacacc

SEQ ID NO: 2308155 - DNA, 25 bp, Homo sapien
cttgaacattgtcagaatagggaca

SEQ ID NO: 2308156 - DNA, 25 bp, Homo sapien
agcacacccatatccaggtgggtgc

SEQ ID NO: 2308157 - DNA, 25 bp, Homo sapien
gtgggtgccatctcccttgaacatt

SEQ ID NO: 2308158 - DNA, 25 bp, Homo sapien
ctttcctagctgtcattctttctat

SEQ ID NO: 2308159 - DNA, 25 bp, Homo sapien
tttctcaatattagggcattttaac

SEQ ID NO: 2308160 - DNA, 25 bp, Homo sapien
tttctcctcatcttgttatggaaga

SEQ ID NO: 2308161 - DNA, 25 bp, Homo sapien
ttaaagccctctgaagtacatggcg

SEQ ID NO: 2308162 - DNA, 25 bp, Homo sapien
gaaaagtctttcctccctatgtcta

SEQ ID NO: 2308163 - DNA, 25 bp, Homo sapien
cagggatctagggagttcacctttt

SEQ ID NO: 2308164 - DNA, 25 bp, Homo sapien
tctgttcaaacagggatctagggag

SEQ ID NO: 2308165 - DNA, 25 bp, Homo sapien
ttttctgagatagggacaaattctg

SEQ ID NO: 2308166 - DNA, 25 bp, Homo sapien
gttcgggaaaaaccatagcatgtca

SEQ ID NO: 2308167 - DNA, 25 bp, Homo sapien
gggtcatcaaggaatctggaggcct

SEQ ID NO: 2308168 - DNA, 25 bp, Homo sapien
ggggtcatcaaggaatctggaggcc

SEQ ID NO: 2308169 - DNA, 25 bp, Homo sapien
tggatacggcctcctgatggctgct

SEQ ID NO: 2308170 - DNA, 25 bp, Homo sapien
tgtcttcaggttgtggatacggcct

SEQ ID NO: 2308171 - DNA, 25 bp, Homo sapien
agggtagtaagctgattgactgaag

SEQ ID NO: 2308172 - DNA, 25 bp, Homo sapien
gctgattgactgaagagctgtgtct

SEQ ID NO: 2308173 - DNA, 25 bp, Homo sapien
cagagatgtccttcttccttgattg

SEQ ID NO: 2308174 - DNA, 25 bp, Homo sapien
atgtccttcttccttgattgtagag

SEQ ID NO: 2308175 - DNA, 25 bp, Homo sapien
cggaagcagagatgtccttcttcct

SEQ ID NO: 2308176 - DNA, 25 bp, Homo sapien
ctggcggaagcagagatgtccttct

SEQ ID NO: 2308177 - DNA, 25 bp, Homo sapien
cctattgccccttgtatgactgcac

SEQ ID NO: 2308178 - DNA, 25 bp, Homo sapien
tgctgccctgccatgttgggatgag

SEQ ID NO: 2308179 - DNA, 25 bp, Homo sapien
tgagggcctaagaggcctgggttcc

SEQ ID NO: 2308180 - DNA, 25 bp, Homo sapien
cccttgtatgactgcacctgcttca

SEQ ID NO: 2308181 - DNA, 25 bp, Homo sapien
tatagagggtgtggctagcatagtc

SEQ ID NO: 2308182 - DNA, 25 bp, Homo sapien
cacctgagacagtcttcttctccag

SEQ ID NO: 2308183 - DNA, 25 bp, Homo sapien
tctccaggtgggttaggtgtcagat

SEQ ID NO: 2308184 - DNA, 25 bp, Homo sapien
ggtgagcacctgagacagtcttctt

SEQ ID NO: 2308185 - DNA, 25 bp, Homo sapien
tggtgacgcttctaccctcatgacc

SEQ ID NO: 2308186 - DNA, 25 bp, Homo sapien
taaaagcagtcctcgtggtgacgct

SEQ ID NO: 2308187 - DNA, 25 bp, Homo sapien
catagtcatatggatgggaataaaa

SEQ ID NO: 2308188 - DNA, 25 bp, Homo sapien
caggtgaccctgagagtaaaagcag

SEQ ID NO: 2308189 - DNA, 25 bp, Homo sapien
tgtctgctaatatcttccccaactg

SEQ ID NO: 2308190 - DNA, 25 bp, Homo sapien
caagctggtttccttgctttggcag

SEQ ID NO: 2308191 - DNA, 25 bp, Homo sapien
cagtttcagccatagaccctggcat

SEQ ID NO: 2308192 - DNA, 25 bp, Homo sapien
agctgtttgccaaaccaagctggtt

SEQ ID NO: 2308193 - DNA, 25 bp, Homo sapien
tctttgaaccaaatgcactatcata

SEQ ID NO: 2308194 - DNA, 25 bp, Homo sapien
tttgaaccaaatgcactatcatact

SEQ ID NO: 2308195 - DNA, 25 bp, Homo sapien
gctgttctttgaaccaaatgcacta

SEQ ID NO: 2308196 - DNA, 25 bp, Homo sapien
tgttctttgaaccaaatgcactatc

SEQ ID NO: 2308197 - DNA, 25 bp, Homo sapien
tgctggtgttgtgaaaaattcttac

SEQ ID NO: 2308198 - DNA, 25 bp, Homo sapien
tttgctggtgttgtgaaaaattctt

SEQ ID NO: 2308199 - DNA, 25 bp, Homo sapien
gggttaaatcttacatgatagaata

SEQ ID NO: 2308200 - DNA, 25 bp, Homo sapien
tacttcaggggttaaatcttacatg

SEQ ID NO: 2308201 - DNA, 25 bp, Homo sapien
cagaatcttcgtcgccccacattgg

SEQ ID NO: 2308202 - DNA, 25 bp, Homo sapien
attgccagaatcttcgtcgccccac

SEQ ID NO: 2308203 - DNA, 25 bp, Homo sapien
gctctagcattccattgccagaatc

SEQ ID NO: 2308204 - DNA, 25 bp, Homo sapien
ttccacacgctctagcattccattg

SEQ ID NO: 2308205 - DNA, 25 bp, Homo sapien
ggtatctttctctcaatcatggtca

SEQ ID NO: 2308206 - DNA, 25 bp, Homo sapien
tacctgtgccttctggtatctttct

SEQ ID NO: 2308207 - DNA, 25 bp, Homo sapien
ttccattatagggactttacctgtg

SEQ ID NO: 2308208 - DNA, 25 bp, Homo sapien
caatcatggtcatccatgtgatacc

SEQ ID NO: 2308209 - DNA, 25 bp, Homo sapien
ccattatggtcaggaggtaaatccc

SEQ ID NO: 2308210 - DNA, 25 bp, Homo sapien
cttatggagacaagaatcagccctg

SEQ ID NO: 2308211 - DNA, 25 bp, Homo sapien
tttccattatggtcaggaggtaaat

SEQ ID NO: 2308212 - DNA, 25 bp, Homo sapien
ggatgttggggtcggcagacagccc

SEQ ID NO: 2308213 - DNA, 25 bp, Homo sapien
ccatgatctgtccataaagtagtgg

SEQ ID NO: 2308214 - DNA, 25 bp, Homo sapien
tgatctgtccataaagtagtgggcg

SEQ ID NO: 2308215 - DNA, 25 bp, Homo sapien
tctgtccataaagtagtgggcggca

SEQ ID NO: 2308216 - DNA, 25 bp, Homo sapien
tccataaagtagtgggcggcagatg

SEQ ID NO: 2308217 - DNA, 25 bp, Homo sapien
aaaagaccatgtttacagctaggag

SEQ ID NO: 2308218 - DNA, 25 bp, Homo sapien
attgatgagtgcgtccagaaagccc

SEQ ID NO: 2308219 - DNA, 25 bp, Homo sapien
ccatgagccccacacaaggtgcata

SEQ ID NO: 2308220 - DNA, 25 bp, Homo sapien
tacagctaggaggacattgatgagt

SEQ ID NO: 2308221 - DNA, 25 bp, Homo sapien
tctgcccgaggtagagctgatgctt

SEQ ID NO: 2308222 - DNA, 25 bp, Homo sapien
ttcccagcccatgtaggagagtgga

SEQ ID NO: 2308223 - DNA, 25 bp, Homo sapien
tatacgggtgtaggataagaagacc

SEQ ID NO: 2308224 - DNA, 25 bp, Homo sapien
atgagatggcggagcaaacctgagc

SEQ ID NO: 2308225 - DNA, 25 bp, Homo sapien
aacgtctggtatattgcaaatattt

SEQ ID NO: 2308226 - DNA, 25 bp, Homo sapien
attgcaaatatttttccaaagttct

SEQ ID NO: 2308227 - DNA, 25 bp, Homo sapien
ttttccaaagttcttttcagagcta

SEQ ID NO: 2308228 - DNA, 25 bp, Homo sapien
tatattgcaaatatttttccaaagt

SEQ ID NO: 2308229 - DNA, 25 bp, Homo sapien
cttgtaacagatacgtttttttcat

SEQ ID NO: 2308230 - DNA, 25 bp, Homo sapien
tgtaacagatacgtttttttcatga

SEQ ID NO: 2308231 - DNA, 25 bp, Homo sapien
taacagatacgtttttttcatgaaa

SEQ ID NO: 2308232 - DNA, 25 bp, Homo sapien
cagatacgtttttttcatgaaaagc

SEQ ID NO: 2308233 - DNA, 25 bp, Homo sapien
gaggcgtgaccggaatgctcagctc

SEQ ID NO: 2308234 - DNA, 25 bp, Homo sapien
gccttcggtgaaggctggtctcttc

SEQ ID NO: 2308235 - DNA, 25 bp, Homo sapien
gatgaggaggccaacatctcactgg

SEQ ID NO: 2308236 - DNA, 25 bp, Homo sapien
agctgaggcaaatgactgctgtccc

SEQ ID NO: 2308237 - DNA, 25 bp, Homo sapien
aaatacggcttcttctccgggacag

SEQ ID NO: 2308238 - DNA, 25 bp, Homo sapien
ggacatattcttgggaagcgccctg

SEQ ID NO: 2308239 - DNA, 25 bp, Homo sapien
caaatggagctttcaaaacgggtgg

SEQ ID NO: 2308240 - DNA, 25 bp, Homo sapien
tgggcgcccaggatctcgtgaattg

SEQ ID NO: 2308241 - DNA, 25 bp, Homo sapien
tcccaactaaccttatgatgataag

SEQ ID NO: 2308242 - DNA, 25 bp, Homo sapien
ctcttatacctgtacaattcattct

SEQ ID NO: 2308243 - DNA, 25 bp, Homo sapien
ttctgggtcccaactaaccttatga

SEQ ID NO: 2308244 - DNA, 25 bp, Homo sapien
tatacctgtacaattcattcttcca

SEQ ID NO: 2308245 - DNA, 25 bp, Homo sapien
ttgctgtagctgcagcttagctcag

SEQ ID NO: 2308246 - DNA, 25 bp, Homo sapien
tcccaccttccgattgctgtagctg

SEQ ID NO: 2308247 - DNA, 25 bp, Homo sapien
cagacgggacttccatgggacctgg

SEQ ID NO: 2308248 - DNA, 25 bp, Homo sapien
gcagcttagctcaggaaagccttgg

SEQ ID NO: 2308249 - DNA, 25 bp, Homo sapien
ctaatgttcctggaacatccatgtt

SEQ ID NO: 2308250 - DNA, 25 bp, Homo sapien
ctaaaaagaatgctccagtgggtta

SEQ ID NO: 2308251 - DNA, 25 bp, Homo sapien
cagtgggttatcagtggcagggcat

SEQ ID NO: 2308252 - DNA, 25 bp, Homo sapien
gagcattcaggtttcccttttgact

SEQ ID NO: 2308253 - DNA, 25 bp, Homo sapien
caggtttcccttttgactgacaaga

SEQ ID NO: 2308254 - DNA, 25 bp, Homo sapien
ggagcattcaggtttcccttttgac

SEQ ID NO: 2308255 - DNA, 25 bp, Homo sapien
attcaggtttcccttttgactgaca

SEQ ID NO: 2308256 - DNA, 25 bp, Homo sapien
ctaggagaataaacacagtgactgt

SEQ ID NO: 2308257 - DNA, 25 bp, Homo sapien
taggagaataaacacagtgactgtg

SEQ ID NO: 2308258 - DNA, 25 bp, Homo sapien
gagaataaacacagtgactgtggtc

SEQ ID NO: 2308259 - DNA, 25 bp, Homo sapien
gaataaacacagtgactgtggtcat

SEQ ID NO: 2308260 - DNA, 25 bp, Homo sapien
gacacatggcctgaaaccggtcata

SEQ ID NO: 2308261 - DNA, 25 bp, Homo sapien
ccagggagatctgagtgaaacactc

SEQ ID NO: 2308262 - DNA, 25 bp, Homo sapien
cataggccatgaccgagaggaggca

SEQ ID NO: 2308263 - DNA, 25 bp, Homo sapien
ggttccccagtagagtcaagaggta

SEQ ID NO: 2308264 - DNA, 25 bp, Homo sapien
ccattcctatggcccaggatgcccc

SEQ ID NO: 2308265 - DNA, 25 bp, Homo sapien
ttaattaggccagtccccattccta

SEQ ID NO: 2308266 - DNA, 25 bp, Homo sapien
gtgttaattaggccagtccccattc

SEQ ID NO: 2308267 - DNA, 25 bp, Homo sapien
tgttaattaggccagtccccattcc

SEQ ID NO: 2308268 - DNA, 25 bp, Homo sapien
atgatgatacagctgtaggaaccca

SEQ ID NO: 2308269 - DNA, 25 bp, Homo sapien
tgagaatggagacgatgctagcgca

SEQ ID NO: 2308270 - DNA, 25 bp, Homo sapien
aaactgtggatgacattagggccgc

SEQ ID NO: 2308271 - DNA, 25 bp, Homo sapien
tcagaacaggtcaataagagcaccg

SEQ ID NO: 2308272 - DNA, 25 bp, Homo sapien
ggtgaccacaaggaaatgggaagag

SEQ ID NO: 2308273 - DNA, 25 bp, Homo sapien
agcaggtggaaaagatcttgctccg

SEQ ID NO: 2308274 - DNA, 25 bp, Homo sapien
aactcctgaagtataaaagatggtg

SEQ ID NO: 2308275 - DNA, 25 bp, Homo sapien
caggtggaaaagatcttgctccgac

SEQ ID NO: 2308276 - DNA, 25 bp, Homo sapien
acttatgacaatggtgacaattctc

SEQ ID NO: 2308277 - DNA, 25 bp, Homo sapien
ggtgacaattctcactgttggcagc

SEQ ID NO: 2308278 - DNA, 25 bp, Homo sapien
tgttggcagcaataattcatcccct

SEQ ID NO: 2308279 - DNA, 25 bp, Homo sapien
gaaaagcaacttatgacaatggtga

SEQ ID NO: 2308280 - DNA, 25 bp, Homo sapien
tatcacactgtactgcacggagagc

SEQ ID NO: 2308281 - DNA, 25 bp, Homo sapien
gggttatcacactgtactgcacgga

SEQ ID NO: 2308282 - DNA, 25 bp, Homo sapien
cacactgtactgcacggagagcact

SEQ ID NO: 2308283 - DNA, 25 bp, Homo sapien
ttcagcaggggggttatcacactgt

SEQ ID NO: 2308284 - DNA, 25 bp, Homo sapien
tcctggccagcatcctcctcagagc

SEQ ID NO: 2308285 - DNA, 25 bp, Homo sapien
ggacttcctggccagcatcctcctc

SEQ ID NO: 2308286 - DNA, 25 bp, Homo sapien
ctacaagggaagcctggacttcctg

SEQ ID NO: 2308287 - DNA, 25 bp, Homo sapien
acttcctggccagcatcctcctcag

SEQ ID NO: 2308288 - DNA, 25 bp, Homo sapien
tgccagtagtcttcttcgccttctc

SEQ ID NO: 2308289 - DNA, 25 bp, Homo sapien
tcagcttcatgacatacatgccagt

SEQ ID NO: 2308290 - DNA, 25 bp, Homo sapien
ccagtgaggtatggctggatcagct

SEQ ID NO: 2308291 - DNA, 25 bp, Homo sapien
ttatccagtgaggtatggctggatc

SEQ ID NO: 2308292 - DNA, 25 bp, Homo sapien
tgaaggaattgacagtaagagattt

SEQ ID NO: 2308293 - DNA, 25 bp, Homo sapien
gaaggaattgacagtaagagattta

SEQ ID NO: 2308294 - DNA, 25 bp, Homo sapien
aaggaattgacagtaagagatttat

SEQ ID NO: 2308295 - DNA, 25 bp, Homo sapien
ctgaaggaattgacagtaagagatt

SEQ ID NO: 2308296 - DNA, 25 bp, Homo sapien
cacctgtgtgggcaagtacaccgta

SEQ ID NO: 2308297 - DNA, 25 bp, Homo sapien
aatgacattcgcattgttgctcagc

SEQ ID NO: 2308298 - DNA, 25 bp, Homo sapien
ctgagaatgacattcgcattgttgc

SEQ ID NO: 2308299 - DNA, 25 bp, Homo sapien
aagtacaccgtatatgagttcatga

SEQ ID NO: 2308300 - DNA, 25 bp, Homo sapien
gtctttctgtaattctcgtccacgc

SEQ ID NO: 2308301 - DNA, 25 bp, Homo sapien
atggactgtattccacttgatggct

SEQ ID NO: 2308302 - DNA, 25 bp, Homo sapien
tgtaattctcgtccacgctcttcca

SEQ ID NO: 2308303 - DNA, 25 bp, Homo sapien
ggcttgtgtcgcttgacatcaggcc

SEQ ID NO: 2308304 - DNA, 25 bp, Homo sapien
gagaggaaggtagttaatattaaca

SEQ ID NO: 2308305 - DNA, 25 bp, Homo sapien
agatactattatggccacactccat

SEQ ID NO: 2308306 - DNA, 25 bp, Homo sapien
caaagatactattatggccacactc

SEQ ID NO: 2308307 - DNA, 25 bp, Homo sapien
gaagagaggaaggtagttaatatta

SEQ ID NO: 2308308 - DNA, 25 bp, Homo sapien
ttcccactgtcaccactggactgct

SEQ ID NO: 2308309 - DNA, 25 bp, Homo sapien
actgtcaccactggactgcttcttc

SEQ ID NO: 2308310 - DNA, 25 bp, Homo sapien
cccactgtcaccactggactgcttc

SEQ ID NO: 2308311 - DNA, 25 bp, Homo sapien
tggttcccactgtcaccactggact

SEQ ID NO: 2308312 - DNA, 25 bp, Homo sapien
gaagcccactaggatcagccaggtg

SEQ ID NO: 2308313 - DNA, 25 bp, Homo sapien
caagtaacagtcataggacacggca

SEQ ID NO: 2308314 - DNA, 25 bp, Homo sapien
acacggcagatagcaggaggcactc

SEQ ID NO: 2308315 - DNA, 25 bp, Homo sapien
gcagccagcgaggaaaacacgtaga

SEQ ID NO: 2308316 - DNA, 25 bp, Homo sapien
gaagaagccactgaaccaagcacca

SEQ ID NO: 2308317 - DNA, 25 bp, Homo sapien
agggccatagtgaaggcagaggaga

SEQ ID NO: 2308318 - DNA, 25 bp, Homo sapien
cagggccatagtgaaggcagaggag

SEQ ID NO: 2308319 - DNA, 25 bp, Homo sapien
cataaaataccccaactacggtgag

SEQ ID NO: 2308320 - DNA, 25 bp, Homo sapien
gttgaccatgggagtgaacactgtg

SEQ ID NO: 2308321 - DNA, 25 bp, Homo sapien
tcttggttcttgaggctgtggatga

SEQ ID NO: 2308322 - DNA, 25 bp, Homo sapien
gaacactgtgtagaggacagagaag

SEQ ID NO: 2308323 - DNA, 25 bp, Homo sapien
ctgtccgcgcgatctgtgtggagca

SEQ ID NO: 2308324 - DNA, 25 bp, Homo sapien
tcttgccaaccaatcgggggaggat

SEQ ID NO: 2308325 - DNA, 25 bp, Homo sapien
gttatgaacaggattcggattcacg

SEQ ID NO: 2308326 - DNA, 25 bp, Homo sapien
tgcatgtcctttggaaactgtccgc

SEQ ID NO: 2308327 - DNA, 25 bp, Homo sapien
ttcgtgctgcagctgtgcgagtcct

SEQ ID NO: 2308328 - DNA, 25 bp, Homo sapien
aaatggcgctcgcataggcttccga

SEQ ID NO: 2308329 - DNA, 25 bp, Homo sapien
tggagccgtaggacaaaatggcgct

SEQ ID NO: 2308330 - DNA, 25 bp, Homo sapien
tgaagatacattcagcgtggtgtgg

SEQ ID NO: 2308331 - DNA, 25 bp, Homo sapien
tacaaagtggaagtgccagctggct

SEQ ID NO: 2308332 - DNA, 25 bp, Homo sapien
aatggtgagaaatagccctccgagg

SEQ ID NO: 2308333 - DNA, 25 bp, Homo sapien
tcagtgactttgatacctccccaag

SEQ ID NO: 2308334 - DNA, 25 bp, Homo sapien
gaaacaagcacggtacagtaatcct

SEQ ID NO: 2308335 - DNA, 25 bp, Homo sapien
taatgcctcctggtactgtcttaag

SEQ ID NO: 2308336 - DNA, 25 bp, Homo sapien
gatgtgcctgtcaactagcatgtgt

SEQ ID NO: 2308337 - DNA, 25 bp, Homo sapien
catatgtcatgaagctccttgtggg

SEQ ID NO: 2308338 - DNA, 25 bp, Homo sapien
taagtgatggtgataagtaggcctg

SEQ ID NO: 2308339 - DNA, 25 bp, Homo sapien
caaagtttatctctcaatttattct

SEQ ID NO: 2308340 - DNA, 25 bp, Homo sapien
tctctcaatttattctagttaactt

SEQ ID NO: 2308341 - DNA, 25 bp, Homo sapien
agtttatctctcaatttattctagt

SEQ ID NO: 2308342 - DNA, 25 bp, Homo sapien
ttatctctcaatttattctagttaa

SEQ ID NO: 2308343 - DNA, 25 bp, Homo sapien
tcctaagcatcctgtcagtatggag

SEQ ID NO: 2308344 - DNA, 25 bp, Homo sapien
tatcttaagggtgtgttcatctcaa

SEQ ID NO: 2308345 - DNA, 25 bp, Homo sapien
aaattttcttgggtgcagcttctat

SEQ ID NO: 2308346 - DNA, 25 bp, Homo sapien
tgaggtaacctctcccacatatttt

SEQ ID NO: 2308347 - DNA, 25 bp, Homo sapien
aattcgtatccttcccggctttgtg

SEQ ID NO: 2308348 - DNA, 25 bp, Homo sapien
tgctgggaattcgtatccttcccgg

SEQ ID NO: 2308349 - DNA, 25 bp, Homo sapien
cttgctgggaattcgtatccttccc

SEQ ID NO: 2308350 - DNA, 25 bp, Homo sapien
ctgggaattcgtatccttcccggct

SEQ ID NO: 2308351 - DNA, 25 bp, Homo sapien
gccttggagttggtcccgccatgct

SEQ ID NO: 2308352 - DNA, 25 bp, Homo sapien
gccatgctctggcgtccgggtctca

SEQ ID NO: 2308353 - DNA, 25 bp, Homo sapien
ttcggccttggagttggtcccgcca

SEQ ID NO: 2308354 - DNA, 25 bp, Homo sapien
cttggagttggtcccgccatgctct

SEQ ID NO: 2308355 - DNA, 25 bp, Homo sapien
gccttcgccgctgccttctggttga

SEQ ID NO: 2308356 - DNA, 25 bp, Homo sapien
aagttcgtcaagtcgcagttgcccc

SEQ ID NO: 2308357 - DNA, 25 bp, Homo sapien
cccgcacagcggatgtgggtcgcct

SEQ ID NO: 2308358 - DNA, 25 bp, Homo sapien
tcttaggtgacgctgggaagtgcct

SEQ ID NO: 2308359 - DNA, 25 bp, Homo sapien
tccctggcctcttctggaacgtcca

SEQ ID NO: 2308360 - DNA, 25 bp, Homo sapien
tggcctcttctggaacgtccaggtt

SEQ ID NO: 2308361 - DNA, 25 bp, Homo sapien
cctcttctggaacgtccaggttggg

SEQ ID NO: 2308362 - DNA, 25 bp, Homo sapien
cctggcctcttctggaacgtccagg

SEQ ID NO: 2308363 - DNA, 25 bp, Homo sapien
caatagatacaagttgaagaaggcc

SEQ ID NO: 2308364 - DNA, 25 bp, Homo sapien
tttgatatcccaatagatacaagtt

SEQ ID NO: 2308365 - DNA, 25 bp, Homo sapien
tcccaatagatacaagttgaagaag

SEQ ID NO: 2308366 - DNA, 25 bp, Homo sapien
tgatatcccaatagatacaagttga

SEQ ID NO: 2308367 - DNA, 25 bp, Homo sapien
caggaattcttaactctagggataa

SEQ ID NO: 2308368 - DNA, 25 bp, Homo sapien
gaattcttaactctagggataaaca

SEQ ID NO: 2308369 - DNA, 25 bp, Homo sapien
aagcctagtaggctctggttccttc

SEQ ID NO: 2308370 - DNA, 25 bp, Homo sapien
gaagcctagtaggctctggttcctt

SEQ ID NO: 2308371 - DNA, 25 bp, Homo sapien
gataatggggggaagcctagtaggc

SEQ ID NO: 2308372 - DNA, 25 bp, Homo sapien
ttctggtgcacggaataattcccat

SEQ ID NO: 2308373 - DNA, 25 bp, Homo sapien
acagcttcgtggtatcttgtgtggc

SEQ ID NO: 2308374 - DNA, 25 bp, Homo sapien
gtcttcaacaacaccttccggacag

SEQ ID NO: 2308375 - DNA, 25 bp, Homo sapien
tgtgtggctattctggtgcacggaa

SEQ ID NO: 2308376 - DNA, 25 bp, Homo sapien
gcatggtttcctctggacgcactcc

SEQ ID NO: 2308377 - DNA, 25 bp, Homo sapien
tgggctccggatccatggcatggtt

SEQ ID NO: 2308378 - DNA, 25 bp, Homo sapien
gacgcactcctggatcatgggacca

SEQ ID NO: 2308379 - DNA, 25 bp, Homo sapien
ttatgagacaatggcgtgggctccg

SEQ ID NO: 2308380 - DNA, 25 bp, Homo sapien
ttaatacagactgaaggtcctgtca

SEQ ID NO: 2308381 - DNA, 25 bp, Homo sapien
cagactgaaggtcctgtcattgaga

SEQ ID NO: 2308382 - DNA, 25 bp, Homo sapien
gaaggtcctgtcattgagaatagag

SEQ ID NO: 2308383 - DNA, 25 bp, Homo sapien
cattgagaatagagtgatccataaa

SEQ ID NO: 2308384 - DNA, 25 bp, Homo sapien
tcagccatcggaactgggaaacctc

SEQ ID NO: 2308385 - DNA, 25 bp, Homo sapien
cagccatcggaactgggaaacctcc

SEQ ID NO: 2308386 - DNA, 25 bp, Homo sapien
gtccagtctgtttactgtgctttct

SEQ ID NO: 2308387 - DNA, 25 bp, Homo sapien
agtccagtctgtttactgtgctttc

SEQ ID NO: 2308388 - DNA, 25 bp, Homo sapien
gtgctttctccatctcctcctccca

SEQ ID NO: 2308389 - DNA, 25 bp, Homo sapien
tttctccatctcctcctcccattag

SEQ ID NO: 2308390 - DNA, 25 bp, Homo sapien
tcctcacccagttggtagaggagtc

SEQ ID NO: 2308391 - DNA, 25 bp, Homo sapien
ctttggttttataatgtaaccactg

SEQ ID NO: 2308392 - DNA, 25 bp, Homo sapien
tgggggaggatggtgaaccatgtat

SEQ ID NO: 2308393 - DNA, 25 bp, Homo sapien
tggttttataatgtaaccactgtgg

SEQ ID NO: 2308394 - DNA, 25 bp, Homo sapien
gtcctgggacatggtatgctttggg

SEQ ID NO: 2308395 - DNA, 25 bp, Homo sapien
ctctgaggacctggatactggtact

SEQ ID NO: 2308396 - DNA, 25 bp, Homo sapien
cttcagcctgagtctagcatgtttc

SEQ ID NO: 2308397 - DNA, 25 bp, Homo sapien
gggtagcatggaatccctctgagga

SEQ ID NO: 2308398 - DNA, 25 bp, Homo sapien
gagtgggcaactcggcccccacttc

SEQ ID NO: 2308399 - DNA, 25 bp, Homo sapien
cccgctgctaggaaggggagtgggc

SEQ ID NO: 2308400 - DNA, 25 bp, Homo sapien
caactcggcccccacttctggggag

SEQ ID NO: 2308401 - DNA, 25 bp, Homo sapien
tgggcaactcggcccccacttctgg

SEQ ID NO: 2308402 - DNA, 25 bp, Homo sapien
tggcgccttgtggaatgagagctta

SEQ ID NO: 2308403 - DNA, 25 bp, Homo sapien
aactgagttcccgcgggagggcgca

SEQ ID NO: 2308404 - DNA, 25 bp, Homo sapien
acaggcagggcgggaatggctaggt

SEQ ID NO: 2308405 - DNA, 25 bp, Homo sapien
gccttgtggaatgagagcttaatta

SEQ ID NO: 2308406 - DNA, 25 bp, Homo sapien
catctcccaggtaacttgggcagct

SEQ ID NO: 2308407 - DNA, 25 bp, Homo sapien
agggttaaccagctttcacacgatt

SEQ ID NO: 2308408 - DNA, 25 bp, Homo sapien
caccattactctaatcctcaaaggg

SEQ ID NO: 2308409 - DNA, 25 bp, Homo sapien
tacgtacatcctggagtgaaactcc

SEQ ID NO: 2308410 - DNA, 25 bp, Homo sapien
tctgtcctggacttaggaatcccag

SEQ ID NO: 2308411 - DNA, 25 bp, Homo sapien
taggaatcccagtggtgatttggag

SEQ ID NO: 2308412 - DNA, 25 bp, Homo sapien
ccaaggtatatagtttgcaggtaca

SEQ ID NO: 2308413 - DNA, 25 bp, Homo sapien
cacgtggctgataaatgttggaaac

SEQ ID NO: 2308414 - DNA, 25 bp, Homo sapien
cagtgagccttggatccagtctgaa

SEQ ID NO: 2308415 - DNA, 25 bp, Homo sapien
tccttgctgcaaaggcagtgagcct

SEQ ID NO: 2308416 - DNA, 25 bp, Homo sapien
ggactgagttccaactgactgaaaa

SEQ ID NO: 2308417 - DNA, 25 bp, Homo sapien
catgacgtgactaggcaattcctgc

SEQ ID NO: 2308418 - DNA, 25 bp, Homo sapien
gatctgactctgaacaatcaattca

SEQ ID NO: 2308419 - DNA, 25 bp, Homo sapien
caatcaattcagattgcttgctacc

SEQ ID NO: 2308420 - DNA, 25 bp, Homo sapien
caattcagattgcttgctacctttg

SEQ ID NO: 2308421 - DNA, 25 bp, Homo sapien
gattgcttgctacctttgtactagc

SEQ ID NO: 2308422 - DNA, 25 bp, Homo sapien
tctgcagagaaggtaggaacttcag

SEQ ID NO: 2308423 - DNA, 25 bp, Homo sapien
tgtgacgtgactggcaggattatcc

SEQ ID NO: 2308424 - DNA, 25 bp, Homo sapien
aggcccttctctgtgacgtgactgg

SEQ ID NO: 2308425 - DNA, 25 bp, Homo sapien
ggaacttcagagctagagccagcag

SEQ ID NO: 2308426 - DNA, 25 bp, Homo sapien
gcagcgtcctggccgggactgggca

SEQ ID NO: 2308427 - DNA, 25 bp, Homo sapien
gcagggagtacagagtcgcgggacc

SEQ ID NO: 2308428 - DNA, 25 bp, Homo sapien
gaggggcgccccagctaagccgggc

SEQ ID NO: 2308429 - DNA, 25 bp, Homo sapien
acagagtcgcgggaccgctcctcgg

SEQ ID NO: 2308430 - DNA, 25 bp, Homo sapien
aaagacatagaccaggctagcggcc

SEQ ID NO: 2308431 - DNA, 25 bp, Homo sapien
tgtctccagagggatcggcatccct

SEQ ID NO: 2308432 - DNA, 25 bp, Homo sapien
gaaaggaccgaaaagcaagagtgct

SEQ ID NO: 2308433 - DNA, 25 bp, Homo sapien
tcgttcagcaggaaggttgcactgg

SEQ ID NO: 2308434 - DNA, 25 bp, Homo sapien
agagttgttagactggcagctggca

SEQ ID NO: 2308435 - DNA, 25 bp, Homo sapien
ggcaggtacccaagtcatagaagca

SEQ ID NO: 2308436 - DNA, 25 bp, Homo sapien
ggagctggaatatattgaaaccttc

SEQ ID NO: 2308437 - DNA, 25 bp, Homo sapien
tctcctctaagtgtaccaggaagct

SEQ ID NO: 2308438 - DNA, 25 bp, Homo sapien
ctggagaggtgtcaaagagtaagac

SEQ ID NO: 2308439 - DNA, 25 bp, Homo sapien
ggagaggtgtcaaagagtaagaccc

SEQ ID NO: 2308440 - DNA, 25 bp, Homo sapien
ggtgtcaaagagtaagaccctcaag

SEQ ID NO: 2308441 - DNA, 25 bp, Homo sapien
gaggtgtcaaagagtaagaccctca

SEQ ID NO: 2308442 - DNA, 25 bp, Homo sapien
caactttgttgcagcccctgtggct

SEQ ID NO: 2308443 - DNA, 25 bp, Homo sapien
tgtattggaagttcccagacactgc

SEQ ID NO: 2308444 - DNA, 25 bp, Homo sapien
tcctcatgctgggtttgacaaacaa

SEQ ID NO: 2308445 - DNA, 25 bp, Homo sapien
cacttatcggtgttatcttggcaag

SEQ ID NO: 2308446 - DNA, 25 bp, Homo sapien
gagcgagccgcgaagaccagctgct

SEQ ID NO: 2308447 - DNA, 25 bp, Homo sapien
gctgctcggagctcagatcaccgct

SEQ ID NO: 2308448 - DNA, 25 bp, Homo sapien
tggaaggtgggtccccgagcaccta

SEQ ID NO: 2308449 - DNA, 25 bp, Homo sapien
ggcgccggctcctacaacaatagtg

SEQ ID NO: 2308450 - DNA, 25 bp, Homo sapien
cgggcacgtaggagtcgtcatacat

SEQ ID NO: 2308451 - DNA, 25 bp, Homo sapien
gcctccgagtcctcaaacccgggca

SEQ ID NO: 2308452 - DNA, 25 bp, Homo sapien
aacccgggcacgtaggagtcgtcat

SEQ ID NO: 2308453 - DNA, 25 bp, Homo sapien
ctcaaacccgggcacgtaggagtcg

SEQ ID NO: 2308454 - DNA, 25 bp, Homo sapien
tgctgggcaagagctcaggatgccc

SEQ ID NO: 2308455 - DNA, 25 bp, Homo sapien
tccatgctgggcaagagctcaggat

SEQ ID NO: 2308456 - DNA, 25 bp, Homo sapien
gggcaagagctcaggatgcccgctg

SEQ ID NO: 2308457 - DNA, 25 bp, Homo sapien
tcaggatgcccgctgcagaggaagc

SEQ ID NO: 2308458 - DNA, 25 bp, Homo sapien
tgggtcaggagataaaagcaaagag

SEQ ID NO: 2308459 - DNA, 25 bp, Homo sapien
tgctgtctgagctccgggaatcact

SEQ ID NO: 2308460 - DNA, 25 bp, Homo sapien
gtttctctgagcaaagcgcttcctc

SEQ ID NO: 2308461 - DNA, 25 bp, Homo sapien
catttgagggaaagttgtcagctcc

SEQ ID NO: 2308462 - DNA, 25 bp, Homo sapien
caggagttggcacagtgccctggtg

SEQ ID NO: 2308463 - DNA, 25 bp, Homo sapien
agtgccctggtggtgccccccttgc

SEQ ID NO: 2308464 - DNA, 25 bp, Homo sapien
cccttgcctagtgagtgtgtgggca

SEQ ID NO: 2308465 - DNA, 25 bp, Homo sapien
gctgccaggagttggcacagtgccc

SEQ ID NO: 2308466 - DNA, 25 bp, Homo sapien
cagggagacgtctgagtccagagat

SEQ ID NO: 2308467 - DNA, 25 bp, Homo sapien
cctcctccagggagacgtctgagtc

SEQ ID NO: 2308468 - DNA, 25 bp, Homo sapien
tcctccagggagacgtctgagtcca

SEQ ID NO: 2308469 - DNA, 25 bp, Homo sapien
ttcacgccgggcactctcccggtcc

SEQ ID NO: 2308470 - DNA, 25 bp, Homo sapien
gagctgctgctgagcctggctctct

SEQ ID NO: 2308471 - DNA, 25 bp, Homo sapien
tcgagctgctgctgagcctggctct

SEQ ID NO: 2308472 - DNA, 25 bp, Homo sapien
cttggccctttcgagctgctgctga

SEQ ID NO: 2308473 - DNA, 25 bp, Homo sapien
gctgctgctgagcctggctctctac

SEQ ID NO: 2308474 - DNA, 25 bp, Homo sapien
catccagtacgccacagtagctgac

SEQ ID NO: 2308475 - DNA, 25 bp, Homo sapien
aatctttggcctcaaagttgactcc

SEQ ID NO: 2308476 - DNA, 25 bp, Homo sapien
cctcaaagttgactccagagccctg

SEQ ID NO: 2308477 - DNA, 25 bp, Homo sapien
tcctcaccgcaaatgccacaggttt

SEQ ID NO: 2308478 - DNA, 25 bp, Homo sapien
ctgtttgagccggatgctctccagg

SEQ ID NO: 2308479 - DNA, 25 bp, Homo sapien
cgccctctttcactagccgcccgat

SEQ ID NO: 2308480 - DNA, 25 bp, Homo sapien
gatgtccccgccctctttcactagc

SEQ ID NO: 2308481 - DNA, 25 bp, Homo sapien
ccttctgctcctgtttgagccggat

SEQ ID NO: 2308482 - DNA, 25 bp, Homo sapien
gggagcgtcggttgccaatgtcact

SEQ ID NO: 2308483 - DNA, 25 bp, Homo sapien
actcaggctggaagggttcccagat

SEQ ID NO: 2308484 - DNA, 25 bp, Homo sapien
caggctggaagggttcccagatctc

SEQ ID NO: 2308485 - DNA, 25 bp, Homo sapien
gcgtcggttgccaatgtcactcagg

SEQ ID NO: 2308486 - DNA, 25 bp, Homo sapien
gaaaggtccctgggggcatggtatc

SEQ ID NO: 2308487 - DNA, 25 bp, Homo sapien
aggaaatacaagattaaagttggtg

SEQ ID NO: 2308488 - DNA, 25 bp, Homo sapien
ggaaatacaagattaaagttggtga

SEQ ID NO: 2308489 - DNA, 25 bp, Homo sapien
gcatggtatccccgtccccagggga

SEQ ID NO: 2308490 - DNA, 25 bp, Homo sapien
aatggacatgaggtcagtagaaacc

SEQ ID NO: 2308491 - DNA, 25 bp, Homo sapien
cctggttggcgtcagggcagatcca

SEQ ID NO: 2308492 - DNA, 25 bp, Homo sapien
ctgcagaatggacatgaggtcagta

SEQ ID NO: 2308493 - DNA, 25 bp, Homo sapien
tctcatgcctggttggcgtcagggc

SEQ ID NO: 2308494 - DNA, 25 bp, Homo sapien
accacaggccgcatggagggcacca

SEQ ID NO: 2308495 - DNA, 25 bp, Homo sapien
aggccgcatggagggcaccacgtca

SEQ ID NO: 2308496 - DNA, 25 bp, Homo sapien
agcaccacaggccgcatggagggca

SEQ ID NO: 2308497 - DNA, 25 bp, Homo sapien
ccgcatggagggcaccacgtcatat

SEQ ID NO: 2308498 - DNA, 25 bp, Homo sapien
gaagtcgaagagagccttctgcatc

SEQ ID NO: 2308499 - DNA, 25 bp, Homo sapien
aggaagtcgaagagagccttctgca

SEQ ID NO: 2308500 - DNA, 25 bp, Homo sapien
gtcgaagagagccttctgcatcatg

SEQ ID NO: 2308501 - DNA, 25 bp, Homo sapien
ttgaggaagtcgaagagagccttct

SEQ ID NO: 2308502 - DNA, 25 bp, Homo sapien
gaatcacagcttgcttctaaacctg

SEQ ID NO: 2308503 - DNA, 25 bp, Homo sapien
caggcatctggaagtaggccatgag

SEQ ID NO: 2308504 - DNA, 25 bp, Homo sapien
gcttgcttctaaacctgtgcctcag

SEQ ID NO: 2308505 - DNA, 25 bp, Homo sapien
ttcccttagagaagactagctacag

SEQ ID NO: 2308506 - DNA, 25 bp, Homo sapien
ccagggagaggtcggctgtgactcg

SEQ ID NO: 2308507 - DNA, 25 bp, Homo sapien
tcctcttgcccggattgttgagcac

SEQ ID NO: 2308508 - DNA, 25 bp, Homo sapien
cccggattgttgagcacagatcgct

SEQ ID NO: 2308509 - DNA, 25 bp, Homo sapien
ttgagcacagatcgctttgccaggg

SEQ ID NO: 2308510 - DNA, 25 bp, Homo sapien
tctcactggcacttgagtgggcaca

SEQ ID NO: 2308511 - DNA, 25 bp, Homo sapien
gaaggttctcactggcacttgagtg

SEQ ID NO: 2308512 - DNA, 25 bp, Homo sapien
gttctcactggcacttgagtgggca

SEQ ID NO: 2308513 - DNA, 25 bp, Homo sapien
tggcacttgagtgggcacagaagca

SEQ ID NO: 2308514 - DNA, 25 bp, Homo sapien
caggtagaggagttgggcagaaaga

SEQ ID NO: 2308515 - DNA, 25 bp, Homo sapien
aggtagaggagttgggcagaaagac

SEQ ID NO: 2308516 - DNA, 25 bp, Homo sapien
cagcagcagtgctcaccaggagctc

SEQ ID NO: 2308517 - DNA, 25 bp, Homo sapien
ccagcaggctttgagggctcccgaa

SEQ ID NO: 2308518 - DNA, 25 bp, Homo sapien
tgcccactgctcactccagcaggct

SEQ ID NO: 2308519 - DNA, 25 bp, Homo sapien
ggcagcagcagtgctcaccaggagc

SEQ ID NO: 2308520 - DNA, 25 bp, Homo sapien
ctgcagggatttggccagctcaaat

SEQ ID NO: 2308521 - DNA, 25 bp, Homo sapien
cgctcgatctcactctgcacttccg

SEQ ID NO: 2308522 - DNA, 25 bp, Homo sapien
gggatttggccagctcaaatatgcg

SEQ ID NO: 2308523 - DNA, 25 bp, Homo sapien
gccagctcaaatatgcgctcgatct

SEQ ID NO: 2308524 - DNA, 25 bp, Homo sapien
tggtgtcagcgtccaacactactag

SEQ ID NO: 2308525 - DNA, 25 bp, Homo sapien
gatggtgtcagcgtccaacactact

SEQ ID NO: 2308526 - DNA, 25 bp, Homo sapien
ttgatggtgtcagcgtccaacacta

SEQ ID NO: 2308527 - DNA, 25 bp, Homo sapien
ggttgatggtgtcagcgtccaacac

SEQ ID NO: 2308528 - DNA, 25 bp, Homo sapien
gtacggtcaggtgcttcatctgtga

SEQ ID NO: 2308529 - DNA, 25 bp, Homo sapien
ggcactgaaccagcttatcatatgc

SEQ ID NO: 2308530 - DNA, 25 bp, Homo sapien
gacttcccccgggagcgaatgagac

SEQ ID NO: 2308531 - DNA, 25 bp, Homo sapien
atatgccatcatctgtacggtcagg

SEQ ID NO: 2308532 - DNA, 25 bp, Homo sapien
tggtgcgtggcccgccagtaaacct

SEQ ID NO: 2308533 - DNA, 25 bp, Homo sapien
gggctgggtggtgcgtggcccgcca

SEQ ID NO: 2308534 - DNA, 25 bp, Homo sapien
tggcccgccagtaaacctccaggta

SEQ ID NO: 2308535 - DNA, 25 bp, Homo sapien
agtaaacctccaggtactcagccag

SEQ ID NO: 2308536 - DNA, 25 bp, Homo sapien
ccttggctggcttagcttgagcatc

SEQ ID NO: 2308537 - DNA, 25 bp, Homo sapien
tggctggcttagcttgagcatctct

SEQ ID NO: 2308538 - DNA, 25 bp, Homo sapien
ttggctggcttagcttgagcatctc

SEQ ID NO: 2308539 - DNA, 25 bp, Homo sapien
tgccttggctggcttagcttgagca

SEQ ID NO: 2308540 - DNA, 25 bp, Homo sapien
tcagtagctatccttgggccaaggc

SEQ ID NO: 2308541 - DNA, 25 bp, Homo sapien
gagctacgctgtgaagatcctgtcc

SEQ ID NO: 2308542 - DNA, 25 bp, Homo sapien
gggtcatgcccgttagcactaggca

SEQ ID NO: 2308543 - DNA, 25 bp, Homo sapien
tcctggtaggcatctgcatagtcct

SEQ ID NO: 2308544 - DNA, 25 bp, Homo sapien
cacagctagtacctggaatgggagc

SEQ ID NO: 2308545 - DNA, 25 bp, Homo sapien
agtctggtgggaaggaccctgctaa

SEQ ID NO: 2308546 - DNA, 25 bp, Homo sapien
tcctgtcacatgttaagaagcttcc

SEQ ID NO: 2308547 - DNA, 25 bp, Homo sapien
cagcaaacagatgggtgtgccaccc

SEQ ID NO: 2308548 - DNA, 25 bp, Homo sapien
catctaaccctaacctaacaagcgg

SEQ ID NO: 2308549 - DNA, 25 bp, Homo sapien
ggttctccaaagatgtatgagggac

SEQ ID NO: 2308550 - DNA, 25 bp, Homo sapien
ggtcacacactagagccataaggca

SEQ ID NO: 2308551 - DNA, 25 bp, Homo sapien
taacaagcggcagctatgagtcagg

SEQ ID NO: 2308552 - DNA, 25 bp, Homo sapien
cagattgaggaagagaccatcaagt

SEQ ID NO: 2308553 - DNA, 25 bp, Homo sapien
ggaaaccgctaggtatccgcactgt

SEQ ID NO: 2308554 - DNA, 25 bp, Homo sapien
cattggtggcatctccagagaagac

SEQ ID NO: 2308555 - DNA, 25 bp, Homo sapien
cacccgtgagttggctcaacagatt

SEQ ID NO: 2308556 - DNA, 25 bp, Homo sapien
tagtttctaggaagaccagccgatt

SEQ ID NO: 2308557 - DNA, 25 bp, Homo sapien
aaattcctccactgtaagccacggg

SEQ ID NO: 2308558 - DNA, 25 bp, Homo sapien
aagccacgggcaaggacagtcatag

SEQ ID NO: 2308559 - DNA, 25 bp, Homo sapien
gggagaacctaatgccgaaagccta

SEQ ID NO: 2308560 - DNA, 25 bp, Homo sapien
ccctgaggatcccaaagtggccagg

SEQ ID NO: 2308561 - DNA, 25 bp, Homo sapien
gggtctctagtggtaattgtgcatt

SEQ ID NO: 2308562 - DNA, 25 bp, Homo sapien
cattgctagttaggatcaatcaccc

SEQ ID NO: 2308563 - DNA, 25 bp, Homo sapien
gtaacttctttcttcgcctgccgac

SEQ ID NO: 2308564 - DNA, 25 bp, Homo sapien
ggaaagaagcctcggtctgcctcgg

SEQ ID NO: 2308565 - DNA, 25 bp, Homo sapien
tctcagccctcgaacaggagagatc

SEQ ID NO: 2308566 - DNA, 25 bp, Homo sapien
ttgtgggaccggagatctcagccct

SEQ ID NO: 2308567 - DNA, 25 bp, Homo sapien
tcggcccgcgttacagagcttagaa

SEQ ID NO: 2308568 - DNA, 25 bp, Homo sapien
gaagcagctgcttctcatcggacag

SEQ ID NO: 2308569 - DNA, 25 bp, Homo sapien
tctcatcggacaggggcgtcttggc

SEQ ID NO: 2308570 - DNA, 25 bp, Homo sapien
gcaacttctgctgaaacagaagcag

SEQ ID NO: 2308571 - DNA, 25 bp, Homo sapien
gagcctctccttctttttggccatc

SEQ ID NO: 2308572 - DNA, 25 bp, Homo sapien
tggtcttgacttcccgaaggacagt

SEQ ID NO: 2308573 - DNA, 25 bp, Homo sapien
gacattgtccttacagtccaccact

SEQ ID NO: 2308574 - DNA, 25 bp, Homo sapien
caccactcgttcaaatgtttggctg

SEQ ID NO: 2308575 - DNA, 25 bp, Homo sapien
caatgtccttatgaagttctctggt

SEQ ID NO: 2308576 - DNA, 25 bp, Homo sapien
cagggcatgggcgtactgctcctcg

SEQ ID NO: 2308577 - DNA, 25 bp, Homo sapien
ccaagagctggtcaacattgtgcaa

SEQ ID NO: 2308578 - DNA, 25 bp, Homo sapien
cattgtgcaagtggctgcgcagggc

SEQ ID NO: 2308579 - DNA, 25 bp, Homo sapien
ccatgttgtaactttcctccaggag

SEQ ID NO: 2308580 - DNA, 25 bp, Homo sapien
aggcaactccttgacacggactctg

SEQ ID NO: 2308581 - DNA, 25 bp, Homo sapien
ctggattcaattccccatcttctct

SEQ ID NO: 2308582 - DNA, 25 bp, Homo sapien
caactccttgacacggactctgggc

SEQ ID NO: 2308583 - DNA, 25 bp, Homo sapien
tgggcactcccctggattcaattcc

SEQ ID NO: 2308584 - DNA, 25 bp, Homo sapien
tggccatgaagatatcttgcagata

SEQ ID NO: 2308585 - DNA, 25 bp, Homo sapien
gtttttgagatcattccacatgctc

SEQ ID NO: 2308586 - DNA, 25 bp, Homo sapien
ctcatgttggtcaataattgtcttc

SEQ ID NO: 2308587 - DNA, 25 bp, Homo sapien
ttccacatgctctggaactccagct

SEQ ID NO: 2308588 - DNA, 25 bp, Homo sapien
tagtgccctttcacttctaccagca

SEQ ID NO: 2308589 - DNA, 25 bp, Homo sapien
caatcccaccctcttgaactgtttg

SEQ ID NO: 2308590 - DNA, 25 bp, Homo sapien
aatcccaccctcttgaactgtttgt

SEQ ID NO: 2308591 - DNA, 25 bp, Homo sapien
gaattaccttattagtgccctttca

SEQ ID NO: 2308592 - DNA, 25 bp, Homo sapien
gtgtaattcttgagtacatcctgga

SEQ ID NO: 2308593 - DNA, 25 bp, Homo sapien
ctccaggtgcagtcttagaaagtgc

SEQ ID NO: 2308594 - DNA, 25 bp, Homo sapien
cctctgtggcatcagtgtaattctt

SEQ ID NO: 2308595 - DNA, 25 bp, Homo sapien
gttctccaggtgcagtcttagaaag

SEQ ID NO: 2308596 - DNA, 25 bp, Homo sapien
taagttttcgcagttgtacaaggac

SEQ ID NO: 2308597 - DNA, 25 bp, Homo sapien
ggtggcattactttccagggtgagt

SEQ ID NO: 2308598 - DNA, 25 bp, Homo sapien
tgctgcccgggcctgagttctttgg

SEQ ID NO: 2308599 - DNA, 25 bp, Homo sapien
gactaagttcttctgggatgctgcc

SEQ ID NO: 2308600 - DNA, 25 bp, Homo sapien
aaaatgtagaccagacgcggtggct

SEQ ID NO: 2308601 - DNA, 25 bp, Homo sapien
atttaaaatgtagaccagacgcggt

SEQ ID NO: 2308602 - DNA, 25 bp, Homo sapien
ttcaatttaaaatgtagaccagacg

SEQ ID NO: 2308603 - DNA, 25 bp, Homo sapien
agcacttgagaagccaaagtgggtg

SEQ ID NO: 2308604 - DNA, 25 bp, Homo sapien
actgcagccgcgatgtcccaggctc

SEQ ID NO: 2308605 - DNA, 25 bp, Homo sapien
tcactgcagccgcgatgtcccaggc

SEQ ID NO: 2308606 - DNA, 25 bp, Homo sapien
ggctcactgcagccgcgatgtccca

SEQ ID NO: 2308607 - DNA, 25 bp, Homo sapien
ctggctcactgcagccgcgatgtcc

SEQ ID NO: 2308608 - DNA, 25 bp, Homo sapien
ccttaggagtcaatactgatgaata

SEQ ID NO: 2308609 - DNA, 25 bp, Homo sapien
aaatttcctacatatttcagcaagt

SEQ ID NO: 2308610 - DNA, 25 bp, Homo sapien
ataaaaaggcagcactttttcttct

SEQ ID NO: 2308611 - DNA, 25 bp, Homo sapien
cagtaagctcttctagattattctt

SEQ ID NO: 2308612 - DNA, 25 bp, Homo sapien
tgtgcagcgagacccattagcaaat

SEQ ID NO: 2308613 - DNA, 25 bp, Homo sapien
gcagcgagacccattagcaaatgct

SEQ ID NO: 2308614 - DNA, 25 bp, Homo sapien
aaggtgtgcagcgagacccattagc

SEQ ID NO: 2308615 - DNA, 25 bp, Homo sapien
gagaaggtgtgcagcgagacccatt

SEQ ID NO: 2308616 - DNA, 25 bp, Homo sapien
tgggctcgtctatgttggaggctca

SEQ ID NO: 2308617 - DNA, 25 bp, Homo sapien
cccgcagcttcccattgatatctag

SEQ ID NO: 2308618 - DNA, 25 bp, Homo sapien
gaaattctccattcctatgtagtcc

SEQ ID NO: 2308619 - DNA, 25 bp, Homo sapien
gatatctagcagctgggctcgtcta

SEQ ID NO: 2308620 - DNA, 25 bp, Homo sapien
taaagagtgggttgagctggctcag

SEQ ID NO: 2308621 - DNA, 25 bp, Homo sapien
tataaagagtgggttgagctggctc

SEQ ID NO: 2308622 - DNA, 25 bp, Homo sapien
ataaagagtgggttgagctggctca

SEQ ID NO: 2308623 - DNA, 25 bp, Homo sapien
aagagtgggttgagctggctcagca

SEQ ID NO: 2308624 - DNA, 25 bp, Homo sapien
caagggctggagtaagttgctttga

SEQ ID NO: 2308625 - DNA, 25 bp, Homo sapien
gacaagggctggagtaagttgcttt

SEQ ID NO: 2308626 - DNA, 25 bp, Homo sapien
tgggctatacgtatggacaagggct

SEQ ID NO: 2308627 - DNA, 25 bp, Homo sapien
ctggatgggctatacgtatggacaa

SEQ ID NO: 2308628 - DNA, 25 bp, Homo sapien
taagtggttggatgttgtttatcac

SEQ ID NO: 2308629 - DNA, 25 bp, Homo sapien
ttaagtggttggatgttgtttatca

SEQ ID NO: 2308630 - DNA, 25 bp, Homo sapien
tccttagatcacaggttgtggaaga

SEQ ID NO: 2308631 - DNA, 25 bp, Homo sapien
aaaaaatctctaggagttgaaagat

SEQ ID NO: 2308632 - DNA, 25 bp, Homo sapien
tagatcacaggttgtggaagatcat

SEQ ID NO: 2308633 - DNA, 25 bp, Homo sapien
tttttccttagatcacaggttgtgg

SEQ ID NO: 2308634 - DNA, 25 bp, Homo sapien
cacagtgttcctagtgtcctcaaag

SEQ ID NO: 2308635 - DNA, 25 bp, Homo sapien
cttaaggtatgggttttggctctca

SEQ ID NO: 2308636 - DNA, 25 bp, Homo sapien
gcttaattgagcagtgagcctcctg

SEQ ID NO: 2308637 - DNA, 25 bp, Homo sapien
tgaattgcatcttgcctggcatggg

SEQ ID NO: 2308638 - DNA, 25 bp, Homo sapien
ctggacccaagccacatgtgtagtt

SEQ ID NO: 2308639 - DNA, 25 bp, Homo sapien
gggtcaacatgattatcactggact

SEQ ID NO: 2308640 - DNA, 25 bp, Homo sapien
cactggactctgctcgtaaatcctc

SEQ ID NO: 2308641 - DNA, 25 bp, Homo sapien
tgctcgtaaatcctcctctactctt

SEQ ID NO: 2308642 - DNA, 25 bp, Homo sapien
gccagatatgctcgcttgaactcag

SEQ ID NO: 2308643 - DNA, 25 bp, Homo sapien
taagaagccgaagggggcagatcac

SEQ ID NO: 2308644 - DNA, 25 bp, Homo sapien
gcactttaagaagccgaagggggca

SEQ ID NO: 2308645 - DNA, 25 bp, Homo sapien
ttagccagatatgctcgcttgaact

SEQ ID NO: 2308646 - DNA, 25 bp, Homo sapien
aagatctagctcaagtttcacctcc

SEQ ID NO: 2308647 - DNA, 25 bp, Homo sapien
tcccttgtattgctatatatcttgt

SEQ ID NO: 2308648 - DNA, 25 bp, Homo sapien
cctttagctctgttagcacaactca

SEQ ID NO: 2308649 - DNA, 25 bp, Homo sapien
tgtgccctctgcaactacaaggact

SEQ ID NO: 2308650 - DNA, 25 bp, Homo sapien
tctagtctctggccaaatcccttac

SEQ ID NO: 2308651 - DNA, 25 bp, Homo sapien
tggatattgtgtttaatagttttgc

SEQ ID NO: 2308652 - DNA, 25 bp, Homo sapien
ctgtgggtggatattgtgtttaata

SEQ ID NO: 2308653 - DNA, 25 bp, Homo sapien
tgggtggatattgtgtttaatagtt

SEQ ID NO: 2308654 - DNA, 25 bp, Homo sapien
gatattgtgtttaatagttttgccc

SEQ ID NO: 2308655 - DNA, 25 bp, Homo sapien
ccctccagggtgcagatgggcttgt

SEQ ID NO: 2308656 - DNA, 25 bp, Homo sapien
aaagctccttctctggtccctccag

SEQ ID NO: 2308657 - DNA, 25 bp, Homo sapien
gtccctccagggtgcagatgggctt

SEQ ID NO: 2308658 - DNA, 25 bp, Homo sapien
aacttgatccaaggaaaaagctcct

SEQ ID NO: 2308659 - DNA, 25 bp, Homo sapien
ggtttctcctacacactgacagaga

SEQ ID NO: 2308660 - DNA, 25 bp, Homo sapien
gccccatgagtcttggaagcccagg

SEQ ID NO: 2308661 - DNA, 25 bp, Homo sapien
tgacagagacacctttgagtgtgga

SEQ ID NO: 2308662 - DNA, 25 bp, Homo sapien
ggaggcttttctagcaatggttctg

SEQ ID NO: 2308663 - DNA, 25 bp, Homo sapien
cgccaccgcactggtgacacagcaa

SEQ ID NO: 2308664 - DNA, 25 bp, Homo sapien
tgcgccaccgcactggtgacacagc

SEQ ID NO: 2308665 - DNA, 25 bp, Homo sapien
gcgccaccgcactggtgacacagca

SEQ ID NO: 2308666 - DNA, 25 bp, Homo sapien
agagggttaggacagaggaaatgga

SEQ ID NO: 2308667 - DNA, 25 bp, Homo sapien
gaagagggttaggacagaggaaatg

SEQ ID NO: 2308668 - DNA, 25 bp, Homo sapien
agggttaggacagaggaaatggaat

SEQ ID NO: 2308669 - DNA, 25 bp, Homo sapien
ggttaggacagaggaaatggaatca

SEQ ID NO: 2308670 - DNA, 25 bp, Homo sapien
ataggatccggatgcccgccttcct

SEQ ID NO: 2308671 - DNA, 25 bp, Homo sapien
ggtttcctgaccctgattgctggta

SEQ ID NO: 2308672 - DNA, 25 bp, Homo sapien
gagtgataggatccggatgcccgcc

SEQ ID NO: 2308673 - DNA, 25 bp, Homo sapien
ggtatgggtaagaatgactctgaat

SEQ ID NO: 2308674 - DNA, 25 bp, Homo sapien
agtgtgaaggtaggagagccagaat

SEQ ID NO: 2308675 - DNA, 25 bp, Homo sapien
ggcagaaaagcttcttttccagttc

SEQ ID NO: 2308676 - DNA, 25 bp, Homo sapien
cacttcaggataatctgggcaaggg

SEQ ID NO: 2308677 - DNA, 25 bp, Homo sapien
ggtccacttcaggataatctgggca

SEQ ID NO: 2308678 - DNA, 25 bp, Homo sapien
ttcaggataatctgggcaagggagc

SEQ ID NO: 2308679 - DNA, 25 bp, Homo sapien
agggtccacttcaggataatctggg

SEQ ID NO: 2308680 - DNA, 25 bp, Homo sapien
gagccctcttgtggcagttgctgaa

SEQ ID NO: 2308681 - DNA, 25 bp, Homo sapien
gaggggagccctcttgtggcagttg

SEQ ID NO: 2308682 - DNA, 25 bp, Homo sapien
aatttagaatgccaggaaggaagta

SEQ ID NO: 2308683 - DNA, 25 bp, Homo sapien
tggcagttgctgaagccttccagtt

SEQ ID NO: 2308684 - DNA, 25 bp, Homo sapien
ggtcacagtcatcgcgttatcccac

SEQ ID NO: 2308685 - DNA, 25 bp, Homo sapien
tcatcgcgttatcccacattttgag

SEQ ID NO: 2308686 - DNA, 25 bp, Homo sapien
cagggtcacagtcatcgcgttatcc

SEQ ID NO: 2308687 - DNA, 25 bp, Homo sapien
caaggatagagaaggtgagttatta

SEQ ID NO: 2308688 - DNA, 25 bp, Homo sapien
cacagtcatcgcgttatcccacatt

SEQ ID NO: 2308689 - DNA, 25 bp, Homo sapien
aaccagggtcacagtcatcgcgtta

SEQ ID NO: 2308690 - DNA, 25 bp, Homo sapien
ctcaaaatgtgggataacgcgatga

SEQ ID NO: 2308691 - DNA, 25 bp, Homo sapien
taacgcgatgactgtgaccctggtt

SEQ ID NO: 2308692 - DNA, 25 bp, Homo sapien
taataactcaccttctctatccttg

SEQ ID NO: 2308693 - DNA, 25 bp, Homo sapien
gataacgcgatgactgtgaccctgg

SEQ ID NO: 2308694 - DNA, 25 bp, Homo sapien
caaaatgtgggataacgcgatgact

SEQ ID NO: 2308695 - DNA, 25 bp, Homo sapien
gtgggataacgcgatgactgtgacc

SEQ ID NO: 2308696 - DNA, 25 bp, Homo sapien
gcttagcagccagggatactaccaa

SEQ ID NO: 2308697 - DNA, 25 bp, Homo sapien
tatacagtctacattccagaggagg

SEQ ID NO: 2308698 - DNA, 25 bp, Homo sapien
tataacaccacagacaaactttggg

SEQ ID NO: 2308699 - DNA, 25 bp, Homo sapien
gaggaggaactgcagttaccactat

SEQ ID NO: 2308700 - DNA, 25 bp, Homo sapien
gaaatggaatgaaacacccaatccc

SEQ ID NO: 2308701 - DNA, 25 bp, Homo sapien
ggaatgtagaaaggaccacccctgc

SEQ ID NO: 2308702 - DNA, 25 bp, Homo sapien
cccaaagtttgtctgtggtgttata

SEQ ID NO: 2308703 - DNA, 25 bp, Homo sapien
cctcctctggaatgtagactgtata

SEQ ID NO: 2308704 - DNA, 25 bp, Homo sapien
tatagtggtaactgcagttcctcct

SEQ ID NO: 2308705 - DNA, 25 bp, Homo sapien
gcagtaagtgatcttggtagtatcc

SEQ ID NO: 2308706 - DNA, 25 bp, Homo sapien
ggtagtatccctggctgctaagccc

SEQ ID NO: 2308707 - DNA, 25 bp, Homo sapien
attttatgctttccctgattccagc

SEQ ID NO: 2308708 - DNA, 25 bp, Homo sapien
gggttactaatattgatccatctgc

SEQ ID NO: 2308709 - DNA, 25 bp, Homo sapien
gcctagagagcaagatacctgcaca

SEQ ID NO: 2308710 - DNA, 25 bp, Homo sapien
tgggtaacacatcactaagtaactg

SEQ ID NO: 2308711 - DNA, 25 bp, Homo sapien
taactggcactgagggagatacccc

SEQ ID NO: 2308712 - DNA, 25 bp, Homo sapien
agatacccctggaacctctctttca

SEQ ID NO: 2308713 - DNA, 25 bp, Homo sapien
gaaaacctatttaggactgacatct

SEQ ID NO: 2308714 - DNA, 25 bp, Homo sapien
ttattttgtcttgccccattgcctc

SEQ ID NO: 2308715 - DNA, 25 bp, Homo sapien
gggtatctccctcagtgccagttac

SEQ ID NO: 2308716 - DNA, 25 bp, Homo sapien
tgtgcaggtatcttgctctctaggc

SEQ ID NO: 2308717 - DNA, 25 bp, Homo sapien
cagatggatcaatattagtaacccc

SEQ ID NO: 2308718 - DNA, 25 bp, Homo sapien
tacttagtgatgtgttacccaggat

SEQ ID NO: 2308719 - DNA, 25 bp, Homo sapien
taaccccatccaagattgaactgtg

SEQ ID NO: 2308720 - DNA, 25 bp, Homo sapien
gctcctcattagaatacccagtcag

SEQ ID NO: 2308721 - DNA, 25 bp, Homo sapien
ccttgggaacagtcatctagagata

SEQ ID NO: 2308722 - DNA, 25 bp, Homo sapien
gagcagagtggcatctccttgggaa

SEQ ID NO: 2308723 - DNA, 25 bp, Homo sapien
tctagagataaatgccatcctccag

SEQ ID NO: 2308724 - DNA, 25 bp, Homo sapien
gtcaagctccagaggaacagatctg

SEQ ID NO: 2308725 - DNA, 25 bp, Homo sapien
caacccctaagatcagaagggtggt

SEQ ID NO: 2308726 - DNA, 25 bp, Homo sapien
tatctctagatgactgttcccaagg

SEQ ID NO: 2308727 - DNA, 25 bp, Homo sapien
tccatggtgtgtgttagggacccag

SEQ ID NO: 2308728 - DNA, 25 bp, Homo sapien
gagagaggaacccactcactcttat

SEQ ID NO: 2308729 - DNA, 25 bp, Homo sapien
ctgactgggtattctaatgaggagc

SEQ ID NO: 2308730 - DNA, 25 bp, Homo sapien
cagatctgttcctctggagcttgac

SEQ ID NO: 2308731 - DNA, 25 bp, Homo sapien
gttcccaaggagatgccactctgct

SEQ ID NO: 2308732 - DNA, 25 bp, Homo sapien
tcatataggtggacaggaaaaagga

SEQ ID NO: 2308733 - DNA, 25 bp, Homo sapien
ccttaatctcaccaacacggaaggg

SEQ ID NO: 2308734 - DNA, 25 bp, Homo sapien
ggcagtccggcttgactaatgccct

SEQ ID NO: 2308735 - DNA, 25 bp, Homo sapien
gagaggcccgtgcaatttccatgta

SEQ ID NO: 2308736 - DNA, 25 bp, Homo sapien
tcagatgccaagaggacagcaacca

SEQ ID NO: 2308737 - DNA, 25 bp, Homo sapien
tgccaaacaaagagaataccccact

SEQ ID NO: 2308738 - DNA, 25 bp, Homo sapien
gagggcattagtcaagccggactgc

SEQ ID NO: 2308739 - DNA, 25 bp, Homo sapien
aattgctgtcctgatgatgagtcat

SEQ ID NO: 2308740 - DNA, 25 bp, Homo sapien
tttttcctgtccacctatatgacca

SEQ ID NO: 2308741 - DNA, 25 bp, Homo sapien
gccccttccgtgttggtgagattaa

SEQ ID NO: 2308742 - DNA, 25 bp, Homo sapien
ggttgctgtcctcttggcatctgag

SEQ ID NO: 2308743 - DNA, 25 bp, Homo sapien
tacatggaaattgcacgggcctctc

SEQ ID NO: 2308744 - DNA, 25 bp, Homo sapien
cacacatatttgacgcaggactggt

SEQ ID NO: 2308745 - DNA, 25 bp, Homo sapien
tacagtgggactgatgaataactga

SEQ ID NO: 2308746 - DNA, 25 bp, Homo sapien
ctgtccagtaggatttggtatctct

SEQ ID NO: 2308747 - DNA, 25 bp, Homo sapien
aatatctaaatagctggccaggcat

SEQ ID NO: 2308748 - DNA, 25 bp, Homo sapien
gagttgcttagctatcctgtccatt

SEQ ID NO: 2308749 - DNA, 25 bp, Homo sapien
tctgtgtaatgcacagcgagttgct

SEQ ID NO: 2308750 - DNA, 25 bp, Homo sapien
accagtcctgcgtcaaatatgtgtg

SEQ ID NO: 2308751 - DNA, 25 bp, Homo sapien
gaatggacaggatagctaagcaact

SEQ ID NO: 2308752 - DNA, 25 bp, Homo sapien
taagcaactcgctgtgcattacaca

SEQ ID NO: 2308753 - DNA, 25 bp, Homo sapien
agagataccaaatcctactggacag

SEQ ID NO: 2308754 - DNA, 25 bp, Homo sapien
atgcctggccagctatttagatatt

SEQ ID NO: 2308755 - DNA, 25 bp, Homo sapien
aatcccaccaattctagtcttctag

SEQ ID NO: 2308756 - DNA, 25 bp, Homo sapien
ccaggcactgtttggagccataaga

SEQ ID NO: 2308757 - DNA, 25 bp, Homo sapien
atcatactgagacttgttcttggtt

SEQ ID NO: 2308758 - DNA, 25 bp, Homo sapien
tagaaagagatcacccactcctatg

SEQ ID NO: 2308759 - DNA, 25 bp, Homo sapien
tctgtccaggcccttagggaagttg

SEQ ID NO: 2308760 - DNA, 25 bp, Homo sapien
caggagagctggtctactttgagaa

SEQ ID NO: 2308761 - DNA, 25 bp, Homo sapien
ttgatacccacaaccgcaattctgg

SEQ ID NO: 2308762 - DNA, 25 bp, Homo sapien
tgagcgagaccccactatgggctcc

SEQ ID NO: 2308763 - DNA, 25 bp, Homo sapien
gacacgagttgagcgctgccattgc

SEQ ID NO: 2308764 - DNA, 25 bp, Homo sapien
gggtcatgcacgcagtagccacggc

SEQ ID NO: 2308765 - DNA, 25 bp, Homo sapien
cagtggtgagcaggatcggctgagg

SEQ ID NO: 2308766 - DNA, 25 bp, Homo sapien
gcactgtcccgaggcaagagtttcc

SEQ ID NO: 2308767 - DNA, 25 bp, Homo sapien
gggtggctgtaaccatgacatggac

SEQ ID NO: 2308768 - DNA, 25 bp, Homo sapien
ccctggaagaatgcggctctgacaa

SEQ ID NO: 2308769 - DNA, 25 bp, Homo sapien
acgtgcacacgaggaagagacaggc

SEQ ID NO: 2308770 - DNA, 25 bp, Homo sapien
taagcagcactagtgaagcccaggc

SEQ ID NO: 2308771 - DNA, 25 bp, Homo sapien
gaagcacagagacgcatagagagcc

SEQ ID NO: 2308772 - DNA, 25 bp, Homo sapien
cagaaggcgcattaagcggagggtg

SEQ ID NO: 2308773 - DNA, 25 bp, Homo sapien
tgcagcagaaggcgcattaagcgga

SEQ ID NO: 2308774 - DNA, 25 bp, Homo sapien
agctcaccgccacgggcgcatccat

SEQ ID NO: 2308775 - DNA, 25 bp, Homo sapien
aaggcgcattaagcggagggtgggc

SEQ ID NO: 2308776 - DNA, 25 bp, Homo sapien
tatatgtgctgccaaaacaagcacc

SEQ ID NO: 2308777 - DNA, 25 bp, Homo sapien
ttttagtatatgtgctgccaaaaca

SEQ ID NO: 2308778 - DNA, 25 bp, Homo sapien
catgctaatctctatatcattccaa

SEQ ID NO: 2308779 - DNA, 25 bp, Homo sapien
tagtatatgtgctgccaaaacaagc

SEQ ID NO: 2308780 - DNA, 25 bp, Homo sapien
gggcggcaccgcctcttatagttgc

SEQ ID NO: 2308781 - DNA, 25 bp, Homo sapien
atggctcgcggtcccggctggtggg

SEQ ID NO: 2308782 - DNA, 25 bp, Homo sapien
ctgaagtgacgggaggaggctgccc

SEQ ID NO: 2308783 - DNA, 25 bp, Homo sapien
tccgggccgcactgtggcaccaggg

SEQ ID NO: 2308784 - DNA, 25 bp, Homo sapien
gctttgcccgctctgtgctgcagtt

SEQ ID NO: 2308785 - DNA, 25 bp, Homo sapien
tggctttgcccgctctgtgctgcag

SEQ ID NO: 2308786 - DNA, 25 bp, Homo sapien
tgcagttgcggcgactttggttgtt

SEQ ID NO: 2308787 - DNA, 25 bp, Homo sapien
tgcccgcgacggtgggacgggacgc

SEQ ID NO: 2308788 - DNA, 25 bp, Homo sapien
ccagcagcagcgtagcagaaaccca

SEQ ID NO: 2308789 - DNA, 25 bp, Homo sapien
agcagcagcgtagcagaaacccagc

SEQ ID NO: 2308790 - DNA, 25 bp, Homo sapien
aacccagccaggcaacagcgcccag

SEQ ID NO: 2308791 - DNA, 25 bp, Homo sapien
cagcagcgtagcagaaacccagcca

SEQ ID NO: 2308792 - DNA, 25 bp, Homo sapien
gtttcatgccagatcgcccttcggt

SEQ ID NO: 2308793 - DNA, 25 bp, Homo sapien
gagtgtctaccttggatctccgagc

SEQ ID NO: 2308794 - DNA, 25 bp, Homo sapien
tcagcctgagcgagataatcatggc

SEQ ID NO: 2308795 - DNA, 25 bp, Homo sapien
caaggcgtgaaatgcttaggagtcc

SEQ ID NO: 2308796 - DNA, 25 bp, Homo sapien
tcaggaaggggatccgcaccctaac

SEQ ID NO: 2308797 - DNA, 25 bp, Homo sapien
tatgatagctcaggctcaggaaggg

SEQ ID NO: 2308798 - DNA, 25 bp, Homo sapien
gtgggacgtatgatagctcaggctc

SEQ ID NO: 2308799 - DNA, 25 bp, Homo sapien
cataaaaactgtgccacccggtcct

SEQ ID NO: 2308800 - DNA, 25 bp, Homo sapien
ggaggaggctacgttcacaataccc

SEQ ID NO: 2308801 - DNA, 25 bp, Homo sapien
tgggctcgagtaccagttgcagact

SEQ ID NO: 2308802 - DNA, 25 bp, Homo sapien
tgtttgcggctcaacagctgcagac

SEQ ID NO: 2308803 - DNA, 25 bp, Homo sapien
cagtgggacagttccagcggcgatt

SEQ ID NO: 2308804 - DNA, 25 bp, Homo sapien
cagggtgcacggctggaaaacgcct

SEQ ID NO: 2308805 - DNA, 25 bp, Homo sapien
agttaagcttcgtttccagggtgca

SEQ ID NO: 2308806 - DNA, 25 bp, Homo sapien
ctggtagaagtctggccccgagctg

SEQ ID NO: 2308807 - DNA, 25 bp, Homo sapien
cgcgacccgaaactttctttatctg

SEQ ID NO: 2308808 - DNA, 25 bp, Homo sapien
ccagagagacaaaccgaagagaggg

SEQ ID NO: 2308809 - DNA, 25 bp, Homo sapien
gattctagggcgcattttggctcga

SEQ ID NO: 2308810 - DNA, 25 bp, Homo sapien
ctcgatagcggaagtggagcagccc

SEQ ID NO: 2308811 - DNA, 25 bp, Homo sapien
tcggcccattttggcggtgcaagcc

SEQ ID NO: 2308812 - DNA, 25 bp, Homo sapien
ccagggccggcagtgctggaaagct

SEQ ID NO: 2308813 - DNA, 25 bp, Homo sapien
ccgactccgcactttgagtcctgag

SEQ ID NO: 2308814 - DNA, 25 bp, Homo sapien
ggccagcaccctcatgaagggcttg

SEQ ID NO: 2308815 - DNA, 25 bp, Homo sapien
gcactttgagtcctgagagccaggg

SEQ ID NO: 2308816 - DNA, 25 bp, Homo sapien
gcaggattcgatggaaccttctgag

SEQ ID NO: 2308817 - DNA, 25 bp, Homo sapien
tgaccccggcggaggtgatagcgaa

SEQ ID NO: 2308818 - DNA, 25 bp, Homo sapien
gagcgcgccaccgaatgggtgaccc

SEQ ID NO: 2308819 - DNA, 25 bp, Homo sapien
aagataaacgccgtttctcgacagc

SEQ ID NO: 2308820 - DNA, 25 bp, Homo sapien
cggggccgcgccgccggtagtcaca

SEQ ID NO: 2308821 - DNA, 25 bp, Homo sapien
cagcccccccagtgccagtcggggc

SEQ ID NO: 2308822 - DNA, 25 bp, Homo sapien
ctgcagcccccccagtgccagtcgg

SEQ ID NO: 2308823 - DNA, 25 bp, Homo sapien
ggggccgcgccgccggtagtcacac

SEQ ID NO: 2308824 - DNA, 25 bp, Homo sapien
agtccacgaactcccggccgaagag

SEQ ID NO: 2308825 - DNA, 25 bp, Homo sapien
atgaggaagcgcaggtcccgcccct

SEQ ID NO: 2308826 - DNA, 25 bp, Homo sapien
ttcatgaggaagcgcaggtcccgcc

SEQ ID NO: 2308827 - DNA, 25 bp, Homo sapien
agaggcggccgaagtcaatgttgtc

SEQ ID NO: 2308828 - DNA, 25 bp, Homo sapien
aatctgtacagcgaagagactgtgc

SEQ ID NO: 2308829 - DNA, 25 bp, Homo sapien
tgtccgcgggccagacatacctttg

SEQ ID NO: 2308830 - DNA, 25 bp, Homo sapien
gaggcgcgaaatgttccgctgagat

SEQ ID NO: 2308831 - DNA, 25 bp, Homo sapien
tgagatttggaaaccctgcccaacc

SEQ ID NO: 2308832 - DNA, 25 bp, Homo sapien
tcacagacactcgtgcagtacgcgc

SEQ ID NO: 2308833 - DNA, 25 bp, Homo sapien
tcctggcgcatctcggagaatacgg

SEQ ID NO: 2308834 - DNA, 25 bp, Homo sapien
tccgctgtacgtgcagaagttgggc

SEQ ID NO: 2308835 - DNA, 25 bp, Homo sapien
ttgctgccgcggttgccgtacagga

SEQ ID NO: 2308836 - DNA, 25 bp, Homo sapien
caatggctccacgacagagactggg

SEQ ID NO: 2308837 - DNA, 25 bp, Homo sapien
ccatcaggatggcaagagggttcat

SEQ ID NO: 2308838 - DNA, 25 bp, Homo sapien
aataaccgggtcttgagtgctagcg

SEQ ID NO: 2308839 - DNA, 25 bp, Homo sapien
ccaggcaagtggtttgaggagtccc

SEQ ID NO: 2308840 - DNA, 25 bp, Homo sapien
tgaggatttaatgcgataatgtatg

SEQ ID NO: 2308841 - DNA, 25 bp, Homo sapien
taatgtatgtaaagcgccttgcaca

SEQ ID NO: 2308842 - DNA, 25 bp, Homo sapien
tatgtaaagcgccttgcacactgcc

SEQ ID NO: 2308843 - DNA, 25 bp, Homo sapien
gccatgtgaacttggccacatcact

SEQ ID NO: 2308844 - DNA, 25 bp, Homo sapien
ctgcaggaggcgaccaactggcggg

SEQ ID NO: 2308845 - DNA, 25 bp, Homo sapien
gaggccaaggagaccgagcgaaaaa

SEQ ID NO: 2308846 - DNA, 25 bp, Homo sapien
gaccgagcgaaaaaggcgcaaggct

SEQ ID NO: 2308847 - DNA, 25 bp, Homo sapien
tccgagctcgggagcaagagaaaag

SEQ ID NO: 2308848 - DNA, 25 bp, Homo sapien
gccaccgcacccggccagcactatc

SEQ ID NO: 2308849 - DNA, 25 bp, Homo sapien
agtaaagacggagtttcacccatat

SEQ ID NO: 2308850 - DNA, 25 bp, Homo sapien
gagccaccgcacccggccagcacta

SEQ ID NO: 2308851 - DNA, 25 bp, Homo sapien
caccgcacccggccagcactatctt

SEQ ID NO: 2308852 - DNA, 25 bp, Homo sapien
ggaggccaagtccatttagtgacat

SEQ ID NO: 2308853 - DNA, 25 bp, Homo sapien
cacctgttccgtgctatatggagga

SEQ ID NO: 2308854 - DNA, 25 bp, Homo sapien
tcttggccctgattcaaccctaaga

SEQ ID NO: 2308855 - DNA, 25 bp, Homo sapien
cagcgtggttagctaaggttattgc

SEQ ID NO: 2308856 - DNA, 25 bp, Homo sapien
tttgtacagcatcgagtctcagccc

SEQ ID NO: 2308857 - DNA, 25 bp, Homo sapien
tggaagagctacagattggcaccta

SEQ ID NO: 2308858 - DNA, 25 bp, Homo sapien
agatcactgagttccccaagccaga

SEQ ID NO: 2308859 - DNA, 25 bp, Homo sapien
aattgtttgtaagtgctcctcagcc

SEQ ID NO: 2308860 - DNA, 25 bp, Homo sapien
tgctaagtatatgaaagggaaagct

SEQ ID NO: 2308861 - DNA, 25 bp, Homo sapien
ttatccaggttttgtggaaacaata

SEQ ID NO: 2308862 - DNA, 25 bp, Homo sapien
cctatagggaccaatagataaagtc

SEQ ID NO: 2308863 - DNA, 25 bp, Homo sapien
gataaagtcttaacctggagacagg

SEQ ID NO: 2308864 - DNA, 25 bp, Homo sapien
ggagactgaggcgggaggccaggag

SEQ ID NO: 2308865 - DNA, 25 bp, Homo sapien
tcaagaccagctcagcaacacagca

SEQ ID NO: 2308866 - DNA, 25 bp, Homo sapien
gaccagctcagcaacacagcaagac

SEQ ID NO: 2308867 - DNA, 25 bp, Homo sapien
gactgaggcgggaggccaggagttc

SEQ ID NO: 2308868 - DNA, 25 bp, Homo sapien
cagatgctgcgggttgcctgctaca

SEQ ID NO: 2308869 - DNA, 25 bp, Homo sapien
agggagccaattctgactaatcagg

SEQ ID NO: 2308870 - DNA, 25 bp, Homo sapien
tactgtagttacgaaaggactgcag

SEQ ID NO: 2308871 - DNA, 25 bp, Homo sapien
aatgattcgcagttggtctcccagg

SEQ ID NO: 2308872 - DNA, 25 bp, Homo sapien
agccgggcgcctcttgcaatggaga

SEQ ID NO: 2308873 - DNA, 25 bp, Homo sapien
gaagatctttatactgcgtccagtg

SEQ ID NO: 2308874 - DNA, 25 bp, Homo sapien
ttttccgagagcagaaggtctaggc

SEQ ID NO: 2308875 - DNA, 25 bp, Homo sapien
tgccccaagagagtttcctaaagcg

SEQ ID NO: 2308876 - DNA, 25 bp, Homo sapien
tagggcaggtggtatgacccccatt

SEQ ID NO: 2308877 - DNA, 25 bp, Homo sapien
tggtagcagggctttctcgaaggtc

SEQ ID NO: 2308878 - DNA, 25 bp, Homo sapien
gattaaatgactaggcaaaggtcac

SEQ ID NO: 2308879 - DNA, 25 bp, Homo sapien
cctaggctgttgtagaatgtcagag

SEQ ID NO: 2308880 - DNA, 25 bp, Homo sapien
ttgcccagcattctagacagacagg

SEQ ID NO: 2308881 - DNA, 25 bp, Homo sapien
gaatctagggctttgcaacagtgcc

SEQ ID NO: 2308882 - DNA, 25 bp, Homo sapien
gactacaggtgatgcccaaaacagc

SEQ ID NO: 2308883 - DNA, 25 bp, Homo sapien
gcttgggctgtgctagttggactaa

SEQ ID NO: 2308884 - DNA, 25 bp, Homo sapien
ttcagagtggccatgacccatcctg

SEQ ID NO: 2308885 - DNA, 25 bp, Homo sapien
ggaggctggaaactgtcccatggcc

SEQ ID NO: 2308886 - DNA, 25 bp, Homo sapien
gtggttcagagtggccatgacccat

SEQ ID NO: 2308887 - DNA, 25 bp, Homo sapien
gctggaaactgtcccatggccctct

SEQ ID NO: 2308888 - DNA, 25 bp, Homo sapien
caccaccggaggcatctcgtctgtt

SEQ ID NO: 2308889 - DNA, 25 bp, Homo sapien
tgaagaatctcctttgtccccgcca

SEQ ID NO: 2308890 - DNA, 25 bp, Homo sapien
tcgtctgttcccaccatttgaagag

SEQ ID NO: 2308891 - DNA, 25 bp, Homo sapien
cctgtccccaccatttgaagaatct

SEQ ID NO: 2308892 - DNA, 25 bp, Homo sapien
gaatcatcacctttttctccactgg

SEQ ID NO: 2308893 - DNA, 25 bp, Homo sapien
ttttctccactggaggagtcgccct

SEQ ID NO: 2308894 - DNA, 25 bp, Homo sapien
gtctcccccacctgaatcatcacct

SEQ ID NO: 2308895 - DNA, 25 bp, Homo sapien
ctttttctccactggaggagtcgcc

SEQ ID NO: 2308896 - DNA, 25 bp, Homo sapien
ccctaaacgaggagatgccactgct

SEQ ID NO: 2308897 - DNA, 25 bp, Homo sapien
gaaagcaggggtccaacttgagccc

SEQ ID NO: 2308898 - DNA, 25 bp, Homo sapien
acctgaggaatcacccacgtcccca

SEQ ID NO: 2308899 - DNA, 25 bp, Homo sapien
caacttgagccccagttggaggccc

SEQ ID NO: 2308900 - DNA, 25 bp, Homo sapien
actgacgagcccgatgctctgtacg

SEQ ID NO: 2308901 - DNA, 25 bp, Homo sapien
gtgggcacgtgacctctatgcaacc

SEQ ID NO: 2308902 - DNA, 25 bp, Homo sapien
tctgtacgttgcatgccaagggcag

SEQ ID NO: 2308903 - DNA, 25 bp, Homo sapien
tgacctctatgcaacccaaggaacc

SEQ ID NO: 2308904 - DNA, 25 bp, Homo sapien
gaactgaatcccaactcggagtggt

SEQ ID NO: 2308905 - DNA, 25 bp, Homo sapien
agactatccgctccgttgctgagca

SEQ ID NO: 2308906 - DNA, 25 bp, Homo sapien
gcccagggaggtcagactatccgct

SEQ ID NO: 2308907 - DNA, 25 bp, Homo sapien
ttgctgagcagcataccccggtgtg

SEQ ID NO: 2308908 - DNA, 25 bp, Homo sapien
ctaaaaccacccatggaggaactgc

SEQ ID NO: 2308909 - DNA, 25 bp, Homo sapien
tgttggtttgtgagacgtgtgacaa

SEQ ID NO: 2308910 - DNA, 25 bp, Homo sapien
ggataccatactttctgcctaaaac

SEQ ID NO: 2308911 - DNA, 25 bp, Homo sapien
gaaacctgggaatgactctaagatg

SEQ ID NO: 2308912 - DNA, 25 bp, Homo sapien
tgaatgcaaagtgtgccaagcctgc

SEQ ID NO: 2308913 - DNA, 25 bp, Homo sapien
tgtgggcatcactatcacggggcct

SEQ ID NO: 2308914 - DNA, 25 bp, Homo sapien
tgactgcccgcaaacgtgctggctg

SEQ ID NO: 2308915 - DNA, 25 bp, Homo sapien
ctggcagtgccctgaatgcaaagtg

SEQ ID NO: 2308916 - DNA, 25 bp, Homo sapien
caggctcggtgcctccatcccttgc

SEQ ID NO: 2308917 - DNA, 25 bp, Homo sapien
ggatgtccacggctttaccacttcc

SEQ ID NO: 2308918 - DNA, 25 bp, Homo sapien
atcccttgccgctcacctggatgtc

SEQ ID NO: 2308919 - DNA, 25 bp, Homo sapien
ctgcgcgactgccagcggttccttc

SEQ ID NO: 2308920 - DNA, 25 bp, Homo sapien
actatgtggtgtggacaaggccatc

SEQ ID NO: 2308921 - DNA, 25 bp, Homo sapien
aaggccatcttctcagggatctcac

SEQ ID NO: 2308922 - DNA, 25 bp, Homo sapien
ccattggtgtgctgcatggtcggca

SEQ ID NO: 2308923 - DNA, 25 bp, Homo sapien
ggcccagaactatgtggtgtggaca

SEQ ID NO: 2308924 - DNA, 25 bp, Homo sapien
tcacagattggtttccctgagggcc

SEQ ID NO: 2308925 - DNA, 25 bp, Homo sapien
gagttgccatttgattggccccggt

SEQ ID NO: 2308926 - DNA, 25 bp, Homo sapien
agtctacacgggcagcgggagctac

SEQ ID NO: 2308927 - DNA, 25 bp, Homo sapien
gagctacggcgctttgagttgccat

SEQ ID NO: 2308928 - DNA, 25 bp, Homo sapien
tgtccttagttctgggagtcccagg

SEQ ID NO: 2308929 - DNA, 25 bp, Homo sapien
tgccactgagtcagacctgcccaac

SEQ ID NO: 2308930 - DNA, 25 bp, Homo sapien
ctgatggacctgcagcttctgagga

SEQ ID NO: 2308931 - DNA, 25 bp, Homo sapien
tgcagcttctgaggacccaagtgcc

SEQ ID NO: 2308932 - DNA, 25 bp, Homo sapien
gggccctgcccagtcggagagaggg

SEQ ID NO: 2308933 - DNA, 25 bp, Homo sapien
tgcccagtcggagagagggatggac

SEQ ID NO: 2308934 - DNA, 25 bp, Homo sapien
gatgaggatttctggatcgccctgt

SEQ ID NO: 2308935 - DNA, 25 bp, Homo sapien
tgaagaggtgagtgaagtccgcccg

SEQ ID NO: 2308936 - DNA, 25 bp, Homo sapien
ttctcggatgaggatttctggatcg

SEQ ID NO: 2308937 - DNA, 25 bp, Homo sapien
ggatttctggatcgccctgtgaaga

SEQ ID NO: 2308938 - DNA, 25 bp, Homo sapien
atcgctctggcggttggaggtcggg

SEQ ID NO: 2308939 - DNA, 25 bp, Homo sapien
gggcggctgtgatcgctctggcggt

SEQ ID NO: 2308940 - DNA, 25 bp, Homo sapien
tgtgatcgctctggcggttggaggt

SEQ ID NO: 2308941 - DNA, 25 bp, Homo sapien
ggctgtgatcgctctggcggttgga

SEQ ID NO: 2308942 - DNA, 25 bp, Homo sapien
ggcggcgcggcattccttccgggct

SEQ ID NO: 2308943 - DNA, 25 bp, Homo sapien
taggccgcctgcgatcacagtcagc

SEQ ID NO: 2308944 - DNA, 25 bp, Homo sapien
aaatggctgcctcgttccccacttt

SEQ ID NO: 2308945 - DNA, 25 bp, Homo sapien
gggaagggaggcgagcgcagggcct

SEQ ID NO: 2308946 - DNA, 25 bp, Homo sapien
tttcctctccggttgcaaatggctg

SEQ ID NO: 2308947 - DNA, 25 bp, Homo sapien
gaatcttcacgaccgctgcccagct

SEQ ID NO: 2308948 - DNA, 25 bp, Homo sapien
ggccaggaaatagccccttcgcagg

SEQ ID NO: 2308949 - DNA, 25 bp, Homo sapien
tgggccaggaaatagccccttcgca

SEQ ID NO: 2308950 - DNA, 25 bp, Homo sapien
tcacgaatcttcacgaccgctgccc

SEQ ID NO: 2308951 - DNA, 25 bp, Homo sapien
taggaggttcttctggtaggtcacc

SEQ ID NO: 2308952 - DNA, 25 bp, Homo sapien
tttatcaataatctcaaggcctggg

SEQ ID NO: 2308953 - DNA, 25 bp, Homo sapien
gggcctaccgcctcaatgaattgat

SEQ ID NO: 2308954 - DNA, 25 bp, Homo sapien
ggagcccgaggtaccctatcaatgt

SEQ ID NO: 2308955 - DNA, 25 bp, Homo sapien
tgtctaccatgaaggtgcaatctga

SEQ ID NO: 2308956 - DNA, 25 bp, Homo sapien
ccatgaaggtgcaatctgagtgctc

SEQ ID NO: 2308957 - DNA, 25 bp, Homo sapien
tgatgtttgtggtgagcatagagtt

SEQ ID NO: 2308958 - DNA, 25 bp, Homo sapien
taccatgaaggtgcaatctgagtgc

SEQ ID NO: 2308959 - DNA, 25 bp, Homo sapien
gaattagttgtcctatgttgatggg

SEQ ID NO: 2308960 - DNA, 25 bp, Homo sapien
tgactaatccgataaatgaattagt

SEQ ID NO: 2308961 - DNA, 25 bp, Homo sapien
tccgataaatgaattagttgtccta

SEQ ID NO: 2308962 - DNA, 25 bp, Homo sapien
tagttgtcctatgttgatgggctcc

SEQ ID NO: 2308963 - DNA, 25 bp, Homo sapien
ctgacatctgacgttttcctgcaag

SEQ ID NO: 2308964 - DNA, 25 bp, Homo sapien
ctgcaaggtgggctaataaagggaa

SEQ ID NO: 2308965 - DNA, 25 bp, Homo sapien
gctttcaggagcttactggaaaaca

SEQ ID NO: 2308966 - DNA, 25 bp, Homo sapien
tataatgattcccttgcccagcttg

SEQ ID NO: 2308967 - DNA, 25 bp, Homo sapien
gacgctgctggtgaacgatgtcctg

SEQ ID NO: 2308968 - DNA, 25 bp, Homo sapien
tgtcctggcctcttgctacgcggtt

SEQ ID NO: 2308969 - DNA, 25 bp, Homo sapien
tgctacgcggttctggagagtcacc

SEQ ID NO: 2308970 - DNA, 25 bp, Homo sapien
ggaggaagccgtgggcgtgttcgcg

SEQ ID NO: 2308971 - DNA, 25 bp, Homo sapien
acatacatacatagaaaagagaaga

SEQ ID NO: 2308972 - DNA, 25 bp, Homo sapien
gattctatctcaaaatacatacata

SEQ ID NO: 2308973 - DNA, 25 bp, Homo sapien
cactccatctactgggcgacagagc

SEQ ID NO: 2308974 - DNA, 25 bp, Homo sapien
agcgagattctatctcaaaatacat

SEQ ID NO: 2308975 - DNA, 25 bp, Homo sapien
ggtgctactcccacgcccttctggg

SEQ ID NO: 2308976 - DNA, 25 bp, Homo sapien
tctgggctgcatctagagcagagat

SEQ ID NO: 2308977 - DNA, 25 bp, Homo sapien
gggctccccagatccgcacaaggag

SEQ ID NO: 2308978 - DNA, 25 bp, Homo sapien
ggagaccgttattctcaggtgctac

SEQ ID NO: 2308979 - DNA, 25 bp, Homo sapien
ctccttggccgtggaacattgtggc

SEQ ID NO: 2308980 - DNA, 25 bp, Homo sapien
tccttggccgtggaacattgtggcc

SEQ ID NO: 2308981 - DNA, 25 bp, Homo sapien
cctccttggccgtggaacattgtgg

SEQ ID NO: 2308982 - DNA, 25 bp, Homo sapien
cagcctggccagtgatcttgaatgt

SEQ ID NO: 2308983 - DNA, 25 bp, Homo sapien
ccagcctggccagtgatcttgaatg

SEQ ID NO: 2308984 - DNA, 25 bp, Homo sapien
gcctggccagtgatcttgaatgtta

SEQ ID NO: 2308985 - DNA, 25 bp, Homo sapien
tggccagtgatcttgaatgttagaa

SEQ ID NO: 2308986 - DNA, 25 bp, Homo sapien
ccatcactttgagactaggagtccg

SEQ ID NO: 2308987 - DNA, 25 bp, Homo sapien
cctgggtaacatggctgagataacg

SEQ ID NO: 2308988 - DNA, 25 bp, Homo sapien
taatgtttgactcagccccactctt

SEQ ID NO: 2308989 - DNA, 25 bp, Homo sapien
cctctgaagtgttgttgtgacgtta

SEQ ID NO: 2308990 - DNA, 25 bp, Homo sapien
gaagcaaccggccatagtggttcat

SEQ ID NO: 2308991 - DNA, 25 bp, Homo sapien
gactaactggattgaaaatacttgg

SEQ ID NO: 2308992 - DNA, 25 bp, Homo sapien
gtgggttccatatctagatttgact

SEQ ID NO: 2308993 - DNA, 25 bp, Homo sapien
caaaatgtagtcagccctccctatc

SEQ ID NO: 2308994 - DNA, 25 bp, Homo sapien
ttttggccctgcagcatgtcatgct

SEQ ID NO: 2308995 - DNA, 25 bp, Homo sapien
cagcttcagcttaactgacagacgt

SEQ ID NO: 2308996 - DNA, 25 bp, Homo sapien
gaaggagaggaatactaattatcca

SEQ ID NO: 2308997 - DNA, 25 bp, Homo sapien
agctttctggttagattgttttcac

SEQ ID NO: 2308998 - DNA, 25 bp, Homo sapien
cacagctttggtgggggaactggtt

SEQ ID NO: 2308999 - DNA, 25 bp, Homo sapien
ttcttggttttccacagctttggtg

SEQ ID NO: 2309000 - DNA, 25 bp, Homo sapien
cagctttggtgggggaactggttct

SEQ ID NO: 2309001 - DNA, 25 bp, Homo sapien
ggcttcttggttttccacagctttg

SEQ ID NO: 2309002 - DNA, 25 bp, Homo sapien
tggacgcgcgcgcggactcttccag

SEQ ID NO: 2309003 - DNA, 25 bp, Homo sapien
ttactccgccttgggtggacgcgcg

SEQ ID NO: 2309004 - DNA, 25 bp, Homo sapien
gtcctgggtgcggtccctcgagtcc

SEQ ID NO: 2309005 - DNA, 25 bp, Homo sapien
gcagtcctttccagcgcatgccctt

SEQ ID NO: 2309006 - DNA, 25 bp, Homo sapien
ttcagggaagcagggaaaagcgagc

SEQ ID NO: 2309007 - DNA, 25 bp, Homo sapien
tatggtgagtaagccgtgcggctcc

SEQ ID NO: 2309008 - DNA, 25 bp, Homo sapien
cctcagagccgtccgtttggagggc

SEQ ID NO: 2309009 - DNA, 25 bp, Homo sapien
tgcggctcccggctgctttcaggga

SEQ ID NO: 2309010 - DNA, 25 bp, Homo sapien
accgggacccggtgtctgctcctgt

SEQ ID NO: 2309011 - DNA, 25 bp, Homo sapien
cgggacccggtgtctgctcctgtcg

SEQ ID NO: 2309012 - DNA, 25 bp, Homo sapien
ccgggacccggtgtctgctcctgtc

SEQ ID NO: 2309013 - DNA, 25 bp, Homo sapien
aaccgggacccggtgtctgctcctg

SEQ ID NO: 2309014 - DNA, 25 bp, Homo sapien
cagccgctacttaagaggctccagc

SEQ ID NO: 2309015 - DNA, 25 bp, Homo sapien
ctacttaagaggctccagcgccggc

SEQ ID NO: 2309016 - DNA, 25 bp, Homo sapien
cgctacttaagaggctccagcgccg

SEQ ID NO: 2309017 - DNA, 25 bp, Homo sapien
cggaggaggggccagcgaccgcggc

SEQ ID NO: 2309018 - DNA, 25 bp, Homo sapien
actttctgcatttcacggtgcttcg

SEQ ID NO: 2309019 - DNA, 25 bp, Homo sapien
gagctatccgaaccacaactttctg

SEQ ID NO: 2309020 - DNA, 25 bp, Homo sapien
gaattaaggcaagcctcgtcgccca

SEQ ID NO: 2309021 - DNA, 25 bp, Homo sapien
caaattgtatggctctctcaagtcc

SEQ ID NO: 2309022 - DNA, 25 bp, Homo sapien
tcagagccgacagcaaaatggagtt

SEQ ID NO: 2309023 - DNA, 25 bp, Homo sapien
tactcctataatgtgggcctccaag

SEQ ID NO: 2309024 - DNA, 25 bp, Homo sapien
ggagcaaatccctgcagtggcggct

SEQ ID NO: 2309025 - DNA, 25 bp, Homo sapien
tgggcactactcttcgaatgactga

SEQ ID NO: 2309026 - DNA, 25 bp, Homo sapien
caactctttatagatctgtaggaga

SEQ ID NO: 2309027 - DNA, 25 bp, Homo sapien
caacaactctttatagatctgtagg

SEQ ID NO: 2309028 - DNA, 25 bp, Homo sapien
tctgtaggagaaactagataaaaaa

SEQ ID NO: 2309029 - DNA, 25 bp, Homo sapien
tgccaacaactctttatagatctgt

SEQ ID NO: 2309030 - DNA, 25 bp, Homo sapien
ttctcccataatgagacgtccaggg

SEQ ID NO: 2309031 - DNA, 25 bp, Homo sapien
gcaatgcagggcttgacagctccat

SEQ ID NO: 2309032 - DNA, 25 bp, Homo sapien
gaagattactagaactccacaggac

SEQ ID NO: 2309033 - DNA, 25 bp, Homo sapien
tcatcaggcacctagactctatctt

SEQ ID NO: 2309034 - DNA, 25 bp, Homo sapien
ttgccttagcttcccgagtgtctgg

SEQ ID NO: 2309035 - DNA, 25 bp, Homo sapien
cacgcccggactgtttcactttctt

SEQ ID NO: 2309036 - DNA, 25 bp, Homo sapien
caccacgcccggactgtttcacttt

SEQ ID NO: 2309037 - DNA, 25 bp, Homo sapien
ctcactgcaatgttcacctctgggg

SEQ ID NO: 2309038 - DNA, 25 bp, Homo sapien
ccaagctgtccatttctgtgatggg

SEQ ID NO: 2309039 - DNA, 25 bp, Homo sapien
gttaaaacgtcacaaaggtgctgct

SEQ ID NO: 2309040 - DNA, 25 bp, Homo sapien
tactgacctatgctctaaaacatga

SEQ ID NO: 2309041 - DNA, 25 bp, Homo sapien
gaaaagttgtggtctgatcagttaa

SEQ ID NO: 2309042 - DNA, 25 bp, Homo sapien
cctgaatgttgacctgacagaattc

SEQ ID NO: 2309043 - DNA, 25 bp, Homo sapien
catctgtcgtagaaacctcgatatt

SEQ ID NO: 2309044 - DNA, 25 bp, Homo sapien
gaataggttaataggtcaaattgtg

SEQ ID NO: 2309045 - DNA, 25 bp, Homo sapien
tccaacctatactaacctgaatagg

SEQ ID NO: 2309046 - DNA, 25 bp, Homo sapien
tcgatattgagcgtccaacctatac

SEQ ID NO: 2309047 - DNA, 25 bp, Homo sapien
gcctaggcgcctgtgttatccgaga

SEQ ID NO: 2309048 - DNA, 25 bp, Homo sapien
gcaaccatggtgagaatcggcttcg

SEQ ID NO: 2309049 - DNA, 25 bp, Homo sapien
tacatcgaccgcctaagagtcgcgc

SEQ ID NO: 2309050 - DNA, 25 bp, Homo sapien
tctttcgtaagctctctgggcgagg

SEQ ID NO: 2309051 - DNA, 25 bp, Homo sapien
aacagtctacggatgctagagaaaa

SEQ ID NO: 2309052 - DNA, 25 bp, Homo sapien
ggccgactgcttctgcacggtctct

SEQ ID NO: 2309053 - DNA, 25 bp, Homo sapien
ctgcacggtctctttgtctaaagga

SEQ ID NO: 2309054 - DNA, 25 bp, Homo sapien
ggatgcaaacagtctacggatgcta

SEQ ID NO: 2309055 - DNA, 25 bp, Homo sapien
aatgaatgggttccgcagagcactg

SEQ ID NO: 2309056 - DNA, 25 bp, Homo sapien
tgaggccggctaaaattcccacagt

SEQ ID NO: 2309057 - DNA, 25 bp, Homo sapien
gacttactccggatcgttgctgaga

SEQ ID NO: 2309058 - DNA, 25 bp, Homo sapien
caacatccagtggtacgaagtccag

SEQ ID NO: 2309059 - DNA, 25 bp, Homo sapien
agatggtgacaatgaactaatatta

SEQ ID NO: 2309060 - DNA, 25 bp, Homo sapien
gctttgcagaccagaaagatggtga

SEQ ID NO: 2309061 - DNA, 25 bp, Homo sapien
cctaatagcagggatcataggtgtg

SEQ ID NO: 2309062 - DNA, 25 bp, Homo sapien
ccgaggttattttaatctagctttg

SEQ ID NO: 2309063 - DNA, 25 bp, Homo sapien
tcgtttctggggatgacactgatgt

SEQ ID NO: 2309064 - DNA, 25 bp, Homo sapien
actgatgtggatctttaatcggaat

SEQ ID NO: 2309065 - DNA, 25 bp, Homo sapien
ttaatcggaatattctagactcttc

SEQ ID NO: 2309066 - DNA, 25 bp, Homo sapien
ctcttctgtggaaatagtatcatca

SEQ ID NO: 2309067 - DNA, 25 bp, Homo sapien
aatgctgaactagtggaccatatat

SEQ ID NO: 2309068 - DNA, 25 bp, Homo sapien
tagagtgtattgtgtacagtaagag

SEQ ID NO: 2309069 - DNA, 25 bp, Homo sapien
ggaccatatatgatctgctttacaa

SEQ ID NO: 2309070 - DNA, 25 bp, Homo sapien
tacttttaacaatagatggatggtc

SEQ ID NO: 2309071 - DNA, 25 bp, Homo sapien
gcgcttcacactgcatcacacgagg

SEQ ID NO: 2309072 - DNA, 25 bp, Homo sapien
acacgaggaggcacacagtttccgg

SEQ ID NO: 2309073 - DNA, 25 bp, Homo sapien
actgcatcacacgaggaggcacaca

SEQ ID NO: 2309074 - DNA, 25 bp, Homo sapien
aggcacacagtttccggttctccag

SEQ ID NO: 2309075 - DNA, 25 bp, Homo sapien
gaagagtcctggtgaagtaaataag

SEQ ID NO: 2309076 - DNA, 25 bp, Homo sapien
ccagttagagatgtacagttttgca

SEQ ID NO: 2309077 - DNA, 25 bp, Homo sapien
gatctaattccaagcacacaaagca

SEQ ID NO: 2309078 - DNA, 25 bp, Homo sapien
gatgtgcatgtgttaaaaggcgcag

SEQ ID NO: 2309079 - DNA, 25 bp, Homo sapien
acctgggttcaaggcccgactgcct

SEQ ID NO: 2309080 - DNA, 25 bp, Homo sapien
tccagggaagaccaatagattagag

SEQ ID NO: 2309081 - DNA, 25 bp, Homo sapien
cagagtggagaggatagtaacacac

SEQ ID NO: 2309082 - DNA, 25 bp, Homo sapien
aatacaccaagctaaaatccaccgc

SEQ ID NO: 2309083 - DNA, 25 bp, Homo sapien
tactgccaggtaaagatctccacaa

SEQ ID NO: 2309084 - DNA, 25 bp, Homo sapien
agatctccacaaggcatagactgtt

SEQ ID NO: 2309085 - DNA, 25 bp, Homo sapien
taagcatactgccaggtaaagatct

SEQ ID NO: 2309086 - DNA, 25 bp, Homo sapien
aagatctccacaaggcatagactgt

SEQ ID NO: 2309087 - DNA, 25 bp, Homo sapien
cagccagaaagcttgcacctgtctc

SEQ ID NO: 2309088 - DNA, 25 bp, Homo sapien
tttttagtaacactccagccagcca

SEQ ID NO: 2309089 - DNA, 25 bp, Homo sapien
gccagccagaaagcttgcacctgtc

SEQ ID NO: 2309090 - DNA, 25 bp, Homo sapien
tcttctcctatgtttttagtaacac

SEQ ID NO: 2309091 - DNA, 25 bp, Homo sapien
tactgcctttttgtccgtgtcagga

SEQ ID NO: 2309092 - DNA, 25 bp, Homo sapien
aagactttttgattacgcaatccca

SEQ ID NO: 2309093 - DNA, 25 bp, Homo sapien
gtcaggagccctttttattcgaata

SEQ ID NO: 2309094 - DNA, 25 bp, Homo sapien
taagttgcaatgcatttgagatgtc

SEQ ID NO: 2309095 - DNA, 25 bp, Homo sapien
gttattgaagtaccaaaggatgtcc

SEQ ID NO: 2309096 - DNA, 25 bp, Homo sapien
cagcaggtctcattcacgagggctt

SEQ ID NO: 2309097 - DNA, 25 bp, Homo sapien
tgtttcagtcaatggtggacctcat

SEQ ID NO: 2309098 - DNA, 25 bp, Homo sapien
tctgagtatcttcttcaagcaccca

SEQ ID NO: 2309099 - DNA, 25 bp, Homo sapien
ccagctactatccattgcagaaaag

SEQ ID NO: 2309100 - DNA, 25 bp, Homo sapien
gggactcagtcctcgtgggatccga

SEQ ID NO: 2309101 - DNA, 25 bp, Homo sapien
gctcgcaatcagcatcctaagcggg

SEQ ID NO: 2309102 - DNA, 25 bp, Homo sapien
tgggatccgaggctctccaggtagt

SEQ ID NO: 2309103 - DNA, 25 bp, Homo sapien
tgtaagccttgtcatttcctaagtg

SEQ ID NO: 2309104 - DNA, 25 bp, Homo sapien
taccaaactcttcaagacacctgag

SEQ ID NO: 2309105 - DNA, 25 bp, Homo sapien
cacgcggccaactctacaaatatta

SEQ ID NO: 2309106 - DNA, 25 bp, Homo sapien
taatgaggcgaaaatcaggatggct

SEQ ID NO: 2309107 - DNA, 25 bp, Homo sapien
tattattggagacaatgttttgctc

SEQ ID NO: 2309108 - DNA, 25 bp, Homo sapien
tttttcgcttggctaatcttattat

SEQ ID NO: 2309109 - DNA, 25 bp, Homo sapien
ttttttcgcttggctaatcttatta

SEQ ID NO: 2309110 - DNA, 25 bp, Homo sapien
tattattattggagacaatgttttg

SEQ ID NO: 2309111 - DNA, 25 bp, Homo sapien
ttatatgtacggaacccaagggaca

SEQ ID NO: 2309112 - DNA, 25 bp, Homo sapien
tgtaaatgggtgatacggaacagcc

SEQ ID NO: 2309113 - DNA, 25 bp, Homo sapien
tcgacttcttatccagttccctcag

SEQ ID NO: 2309114 - DNA, 25 bp, Homo sapien
gcctgtaactacaaaatcgacttct

SEQ ID NO: 2309115 - DNA, 25 bp, Homo sapien
gtgccgctgcggccccaccttcgag

SEQ ID NO: 2309116 - DNA, 25 bp, Homo sapien
tgcggccccaccttcgagccctggc

SEQ ID NO: 2309117 - DNA, 25 bp, Homo sapien
gagaagtagtgaaagggtggccggc

SEQ ID NO: 2309118 - DNA, 25 bp, Homo sapien
cgctgcggccccaccttcgagccct

SEQ ID NO: 2309119 - DNA, 25 bp, Homo sapien
gtctgcggcggtgaaggaggcgaag

SEQ ID NO: 2309120 - DNA, 25 bp, Homo sapien
cgaagggacggcaacaaggatctcc

SEQ ID NO: 2309121 - DNA, 25 bp, Homo sapien
cggcggtgaaggaggcgaagggacg

SEQ ID NO: 2309122 - DNA, 25 bp, Homo sapien
actagaacttgaaggggtctgcggc

SEQ ID NO: 2309123 - DNA, 25 bp, Homo sapien
tgggacgcgcactcttccccagccc

SEQ ID NO: 2309124 - DNA, 25 bp, Homo sapien
ccgtcccctgggacgcgcactcttc

SEQ ID NO: 2309125 - DNA, 25 bp, Homo sapien
caggcagtagtttccgggcccgccg

SEQ ID NO: 2309126 - DNA, 25 bp, Homo sapien
ccctgggacgcgcactcttccccag

SEQ ID NO: 2309127 - DNA, 25 bp, Homo sapien
tgccaagtgaactcgaccttccagc

SEQ ID NO: 2309128 - DNA, 25 bp, Homo sapien
tggtgtctgccaagtgaactcgacc

SEQ ID NO: 2309129 - DNA, 25 bp, Homo sapien
aagtgaactcgaccttccagcccgg

SEQ ID NO: 2309130 - DNA, 25 bp, Homo sapien
tgtctgccaagtgaactcgaccttc

SEQ ID NO: 2309131 - DNA, 25 bp, Homo sapien
tccctagggcagtagcgggccctgc

SEQ ID NO: 2309132 - DNA, 25 bp, Homo sapien
tagggcagtagcgggccctgcgggg

SEQ ID NO: 2309133 - DNA, 25 bp, Homo sapien
ctccctagggcagtagcgggccctg

SEQ ID NO: 2309134 - DNA, 25 bp, Homo sapien
cctagggcagtagcgggccctgcgg

SEQ ID NO: 2309135 - DNA, 25 bp, Homo sapien
cattctcaagtggactggcgcagtt

SEQ ID NO: 2309136 - DNA, 25 bp, Homo sapien
ctgcgccgggccaactctggtttta

SEQ ID NO: 2309137 - DNA, 25 bp, Homo sapien
cccagtttgtaaggcagtaggaagg

SEQ ID NO: 2309138 - DNA, 25 bp, Homo sapien
tagattaacaccagaaatgcaggat

SEQ ID NO: 2309139 - DNA, 25 bp, Homo sapien
agtgttcacctaaaccagtccgctg

SEQ ID NO: 2309140 - DNA, 25 bp, Homo sapien
ttgaagcttagcaggcagtcagcgg

SEQ ID NO: 2309141 - DNA, 25 bp, Homo sapien
cacaggtggagtcaattggtctagt

SEQ ID NO: 2309142 - DNA, 25 bp, Homo sapien
agcaataagttgttacagtgcgaca

SEQ ID NO: 2309143 - DNA, 25 bp, Homo sapien
caacgtggatggagatgcactcacg

SEQ ID NO: 2309144 - DNA, 25 bp, Homo sapien
ggccatcgggctggatgccgtgttc

SEQ ID NO: 2309145 - DNA, 25 bp, Homo sapien
cctggccaacgtggatggagatgca

SEQ ID NO: 2309146 - DNA, 25 bp, Homo sapien
gcatctggccatcgggctggatgcc

SEQ ID NO: 2309147 - DNA, 25 bp, Homo sapien
cagcacccgtttcactgaagaaggt

SEQ ID NO: 2309148 - DNA, 25 bp, Homo sapien
tccaagtctacaaacactgcccggg

SEQ ID NO: 2309149 - DNA, 25 bp, Homo sapien
tgcttgccagcacccgtttcactga

SEQ ID NO: 2309150 - DNA, 25 bp, Homo sapien
gggcacatgcttgccagcacccgtt

SEQ ID NO: 2309151 - DNA, 25 bp, Homo sapien
cacttgggttactgaggtcaactca

SEQ ID NO: 2309152 - DNA, 25 bp, Homo sapien
cagcaccctgggatctcacttgggt

SEQ ID NO: 2309153 - DNA, 25 bp, Homo sapien
ccctgggatctcacttgggttactg

SEQ ID NO: 2309154 - DNA, 25 bp, Homo sapien
gatctcacttgggttactgaggtca

SEQ ID NO: 2309155 - DNA, 25 bp, Homo sapien
gggagagtgggtgagtgaccagcgg

SEQ ID NO: 2309156 - DNA, 25 bp, Homo sapien
ggagagtgggtgagtgaccagcgga

SEQ ID NO: 2309157 - DNA, 25 bp, Homo sapien
cttgccaatggtgtagtgccctcgg

SEQ ID NO: 2309158 - DNA, 25 bp, Homo sapien
aagatgaactattgccttaggcaga

SEQ ID NO: 2309159 - DNA, 25 bp, Homo sapien
tcacatttggtgaaacctacagagg

SEQ ID NO: 2309160 - DNA, 25 bp, Homo sapien
tgcatacagggctcaagttttggta

SEQ ID NO: 2309161 - DNA, 25 bp, Homo sapien
gaccaccagcctggtacagtggatg

SEQ ID NO: 2309162 - DNA, 25 bp, Homo sapien
aagaagccctgaagaccggtgcact

SEQ ID NO: 2309163 - DNA, 25 bp, Homo sapien
cctgaagaccggtgcactggtcagc

SEQ ID NO: 2309164 - DNA, 25 bp, Homo sapien
agccctgaagaccggtgcactggtc

SEQ ID NO: 2309165 - DNA, 25 bp, Homo sapien
caagaagccctgaagaccggtgcac

SEQ ID NO: 2309166 - DNA, 25 bp, Homo sapien
aactgagagacgttccatgagcagc

SEQ ID NO: 2309167 - DNA, 25 bp, Homo sapien
tcgaggtttctacgacagatgtcat

SEQ ID NO: 2309168 - DNA, 25 bp, Homo sapien
tgagagacgttccatgagcagcgag

SEQ ID NO: 2309169 - DNA, 25 bp, Homo sapien
cgaggtttctacgacagatgtcata

SEQ ID NO: 2309170 - DNA, 25 bp, Homo sapien
ctcggcaacagctgtggtattgctc

SEQ ID NO: 2309171 - DNA, 25 bp, Homo sapien
ggaaccacgtcaccacggtataaca

SEQ ID NO: 2309172 - DNA, 25 bp, Homo sapien
agtgggaggctggtaattaatgcca

SEQ ID NO: 2309173 - DNA, 25 bp, Homo sapien
tacagtaagctgttcgtggtaggct

SEQ ID NO: 2309174 - DNA, 25 bp, Homo sapien
cgggcctctgaaaactcgccttcct

SEQ ID NO: 2309175 - DNA, 25 bp, Homo sapien
cactatctgctccaacctcctcata

SEQ ID NO: 2309176 - DNA, 25 bp, Homo sapien
tcatcctctccgtcagcactatctg

SEQ ID NO: 2309177 - DNA, 25 bp, Homo sapien
gcactatctgctccaacctcctcat

SEQ ID NO: 2309178 - DNA, 25 bp, Homo sapien
tcctctccgtcagcactatctgctc

SEQ ID NO: 2309179 - DNA, 25 bp, Homo sapien
caagacaaaggagtgtaaaagtaca

SEQ ID NO: 2309180 - DNA, 25 bp, Homo sapien
aaataagacagttccaagacaaagg

SEQ ID NO: 2309181 - DNA, 25 bp, Homo sapien
tccaagacaaaggagtgtaaaagta

SEQ ID NO: 2309182 - DNA, 25 bp, Homo sapien
aagacaaaggagtgtaaaagtacag

SEQ ID NO: 2309183 - DNA, 25 bp, Homo sapien
gcctgggaaagagaccatctcaaag

SEQ ID NO: 2309184 - DNA, 25 bp, Homo sapien
cctttgctactgtacatgtggtcac

SEQ ID NO: 2309185 - DNA, 25 bp, Homo sapien
gaagcctcacctcaagcctatagaa

SEQ ID NO: 2309186 - DNA, 25 bp, Homo sapien
ggtcacatcagaccaacagcatcat

SEQ ID NO: 2309187 - DNA, 25 bp, Homo sapien
cacatgctggttccttaaccaggcc

SEQ ID NO: 2309188 - DNA, 25 bp, Homo sapien
taaccaggccctggcgaaacaactg

SEQ ID NO: 2309189 - DNA, 25 bp, Homo sapien
tttccataattacatcacatgctgg

SEQ ID NO: 2309190 - DNA, 25 bp, Homo sapien
tggaattaccttgattggcttaggg

SEQ ID NO: 2309191 - DNA, 25 bp, Homo sapien
tattgagcggtagcttttgtcctcg

SEQ ID NO: 2309192 - DNA, 25 bp, Homo sapien
tctgtgttgccttgctattgagcgg

SEQ ID NO: 2309193 - DNA, 25 bp, Homo sapien
tgtgctcacgcagtaatgcccaggg

SEQ ID NO: 2309194 - DNA, 25 bp, Homo sapien
ctggtcacaagacggctgcagcaac

SEQ ID NO: 2309195 - DNA, 25 bp, Homo sapien
aactagagtccctgaaaattgcgag

SEQ ID NO: 2309196 - DNA, 25 bp, Homo sapien
gagttgacctggcttaggccccata

SEQ ID NO: 2309197 - DNA, 25 bp, Homo sapien
tattgatgagttgcaggtaccaggg

SEQ ID NO: 2309198 - DNA, 25 bp, Homo sapien
tactccagagttagcgagaaggctg

SEQ ID NO: 2309199 - DNA, 25 bp, Homo sapien
agctggacgagtaggagaaggcccc

SEQ ID NO: 2309200 - DNA, 25 bp, Homo sapien
cttctcgttgctgcgcgtggccagg

SEQ ID NO: 2309201 - DNA, 25 bp, Homo sapien
aaggtacggcggtatgaggtggagc

SEQ ID NO: 2309202 - DNA, 25 bp, Homo sapien
ccatggagaagtcgaggcgctccga

SEQ ID NO: 2309203 - DNA, 25 bp, Homo sapien
acagctggtcggcgcgcgccggctc

SEQ ID NO: 2309204 - DNA, 25 bp, Homo sapien
cagctggtcggcgcgcgccggctcc

SEQ ID NO: 2309205 - DNA, 25 bp, Homo sapien
cacagctggtcggcgcgcgccggct

SEQ ID NO: 2309206 - DNA, 25 bp, Homo sapien
ggcacagctggtcggcgcgcgccgg

SEQ ID NO: 2309207 - DNA, 25 bp, Homo sapien
acctgcacccggtcacgctcgcggc

SEQ ID NO: 2309208 - DNA, 25 bp, Homo sapien
gctccacctgcacccggtcacgctc

SEQ ID NO: 2309209 - DNA, 25 bp, Homo sapien
gcccgtcgcgctccacctgcacccg

SEQ ID NO: 2309210 - DNA, 25 bp, Homo sapien
gtcgcgctccacctgcacccggtca

SEQ ID NO: 2309211 - DNA, 25 bp, Homo sapien
gaggctgtctaatggaattgccccg

SEQ ID NO: 2309212 - DNA, 25 bp, Homo sapien
cccaggatccggttagaggctgttc

SEQ ID NO: 2309213 - DNA, 25 bp, Homo sapien
tctctaacggactgggagctgaaaa

SEQ ID NO: 2309214 - DNA, 25 bp, Homo sapien
gctgcccaggactctaaatggaggg

SEQ ID NO: 2309215 - DNA, 25 bp, Homo sapien
ggaagagcacgaggttgtgctccgc

SEQ ID NO: 2309216 - DNA, 25 bp, Homo sapien
ccgcttgcgcgtctcctcctccaac

SEQ ID NO: 2309217 - DNA, 25 bp, Homo sapien
cttgcggaagagcacgaggttgtgc

SEQ ID NO: 2309218 - DNA, 25 bp, Homo sapien
gttgtgctccgcgtcctcccgcttg

SEQ ID NO: 2309219 - DNA, 25 bp, Homo sapien
cttcttgaggaactcaatctcatcc

SEQ ID NO: 2309220 - DNA, 25 bp, Homo sapien
gctctagttccaggcgggacagagt

SEQ ID NO: 2309221 - DNA, 25 bp, Homo sapien
gaggaactcaatctcatccatcaga

SEQ ID NO: 2309222 - DNA, 25 bp, Homo sapien
gagactcaatcttgcgctctagttc

SEQ ID NO: 2309223 - DNA, 25 bp, Homo sapien
cagaggatggacagcggcgcaaatt

SEQ ID NO: 2309224 - DNA, 25 bp, Homo sapien
agcggcgcaaattccacgcgggcca

SEQ ID NO: 2309225 - DNA, 25 bp, Homo sapien
ttccacgcgggccacgcagttcgtg

SEQ ID NO: 2309226 - DNA, 25 bp, Homo sapien
cacgcagttcgtgcacagaaaagag

SEQ ID NO: 2309227 - DNA, 25 bp, Homo sapien
tcctgcaggttcttcgcggcgatgc

SEQ ID NO: 2309228 - DNA, 25 bp, Homo sapien
tgccgtcagctcgggcttcaccgtg

SEQ ID NO: 2309229 - DNA, 25 bp, Homo sapien
tgcgcgcggatgtccctcagcgctg

SEQ ID NO: 2309230 - DNA, 25 bp, Homo sapien
gcggcgatgctctcgtactgcgcgc

SEQ ID NO: 2309231 - DNA, 25 bp, Homo sapien
tgggacgcgcgacaccaccccagcg

SEQ ID NO: 2309232 - DNA, 25 bp, Homo sapien
tcccgcctcgcaggccctcccggct

SEQ ID NO: 2309233 - DNA, 25 bp, Homo sapien
ggacgcgcgacaccaccccagcgtc

SEQ ID NO: 2309234 - DNA, 25 bp, Homo sapien
cgcctcgcaggccctcccggctctt

SEQ ID NO: 2309235 - DNA, 25 bp, Homo sapien
ctgagaagtgggggtaacccaggct

SEQ ID NO: 2309236 - DNA, 25 bp, Homo sapien
tctggcgtcgggactcgttcatctc

SEQ ID NO: 2309237 - DNA, 25 bp, Homo sapien
cggttggcagcgtcggacaggtccg

SEQ ID NO: 2309238 - DNA, 25 bp, Homo sapien
cagggcctcgtggttccggttggca

SEQ ID NO: 2309239 - DNA, 25 bp, Homo sapien
gtccacctcgcacgttagactctgg

SEQ ID NO: 2309240 - DNA, 25 bp, Homo sapien
gccatcttgacgttgaggagctcct

SEQ ID NO: 2309241 - DNA, 25 bp, Homo sapien
ggtactccctcaggtgccgcgccat

SEQ ID NO: 2309242 - DNA, 25 bp, Homo sapien
gcctccagggcgaactgctcctcca

SEQ ID NO: 2309243 - DNA, 25 bp, Homo sapien
tcctcttttagctgtcgcagctcct

SEQ ID NO: 2309244 - DNA, 25 bp, Homo sapien
gcaaaagaatggacgggcacggaga

SEQ ID NO: 2309245 - DNA, 25 bp, Homo sapien
aaaagaatggacgggcacggagatc

SEQ ID NO: 2309246 - DNA, 25 bp, Homo sapien
ggcaaaagaatggacgggcacggag

SEQ ID NO: 2309247 - DNA, 25 bp, Homo sapien
caaaagaatggacgggcacggagat

SEQ ID NO: 2309248 - DNA, 25 bp, Homo sapien
cagaaccgtcttccggctgtggctg

SEQ ID NO: 2309249 - DNA, 25 bp, Homo sapien
tccccattccgggtctcaatggtct

SEQ ID NO: 2309250 - DNA, 25 bp, Homo sapien
gtcttgatcagaaccgtcttccggc

SEQ ID NO: 2309251 - DNA, 25 bp, Homo sapien
ccgggtctcaatggtcttgatcaga

SEQ ID NO: 2309252 - DNA, 25 bp, Homo sapien
tgctccttctgggactctgtcacca

SEQ ID NO: 2309253 - DNA, 25 bp, Homo sapien
tgcgctgctccttctgggactctgt

SEQ ID NO: 2309254 - DNA, 25 bp, Homo sapien
gctgctccttctgggactctgtcac

SEQ ID NO: 2309255 - DNA, 25 bp, Homo sapien
cgctgctccttctgggactctgtca

SEQ ID NO: 2309256 - DNA, 25 bp, Homo sapien
aactgtgggcagaagacttgtccag

SEQ ID NO: 2309257 - DNA, 25 bp, Homo sapien
gtgggcagaagacttgtccagctca

SEQ ID NO: 2309258 - DNA, 25 bp, Homo sapien
tgggcagaagacttgtccagctcac

SEQ ID NO: 2309259 - DNA, 25 bp, Homo sapien
agtaactgtgggcagaagacttgtc

SEQ ID NO: 2309260 - DNA, 25 bp, Homo sapien
caattcaggagtggtcttagggttt

SEQ ID NO: 2309261 - DNA, 25 bp, Homo sapien
cttttagacacatgcagagggagag

SEQ ID NO: 2309262 - DNA, 25 bp, Homo sapien
agaggagacaattcaggagtggtct

SEQ ID NO: 2309263 - DNA, 25 bp, Homo sapien
tttagacacatgcagagggagagga

SEQ ID NO: 2309264 - DNA, 25 bp, Homo sapien
cagggagaggcccagcgactgctgg

SEQ ID NO: 2309265 - DNA, 25 bp, Homo sapien
tagggcttggccataagccaggaaa

SEQ ID NO: 2309266 - DNA, 25 bp, Homo sapien
ttggccataagccaggaaagggatg

SEQ ID NO: 2309267 - DNA, 25 bp, Homo sapien
tgctggccgggtagggcttggccat

SEQ ID NO: 2309268 - DNA, 25 bp, Homo sapien
aatgtgaaactcagaccctggctca

SEQ ID NO: 2309269 - DNA, 25 bp, Homo sapien
gggaagcacataggtcacatcaagt

SEQ ID NO: 2309270 - DNA, 25 bp, Homo sapien
acttctcatcgtggctggagtagat

SEQ ID NO: 2309271 - DNA, 25 bp, Homo sapien
cattggcttcttatcgggacatgaa

SEQ ID NO: 2309272 - DNA, 25 bp, Homo sapien
ctcgtaaattcctattcaatggacc

SEQ ID NO: 2309273 - DNA, 25 bp, Homo sapien
gtatccttttaacataacctcatca

SEQ ID NO: 2309274 - DNA, 25 bp, Homo sapien
caagttgcctactgtatccttttaa

SEQ ID NO: 2309275 - DNA, 25 bp, Homo sapien
ggaccactatccagttactaatact

SEQ ID NO: 2309276 - DNA, 25 bp, Homo sapien
gctggttattggtgggcaaggctgt

SEQ ID NO: 2309277 - DNA, 25 bp, Homo sapien
ctgctggttattggtgggcaaggct

SEQ ID NO: 2309278 - DNA, 25 bp, Homo sapien
aggctgtgagactgagagatcctag

SEQ ID NO: 2309279 - DNA, 25 bp, Homo sapien
tgctggttattggtgggcaaggctg

SEQ ID NO: 2309280 - DNA, 25 bp, Homo sapien
tgatcgttccgattgctgccaacgg

SEQ ID NO: 2309281 - DNA, 25 bp, Homo sapien
ttgaccatagcacggcgccaagctt

SEQ ID NO: 2309282 - DNA, 25 bp, Homo sapien
gatcaatcagccaatccgagagtgg

SEQ ID NO: 2309283 - DNA, 25 bp, Homo sapien
tactgagggtacagttgatcgttcc

SEQ ID NO: 2309284 - DNA, 25 bp, Homo sapien
tcagtttgtaaaatacgccaagctc

SEQ ID NO: 2309285 - DNA, 25 bp, Homo sapien
gcgtagccagactcagccgtccaat

SEQ ID NO: 2309286 - DNA, 25 bp, Homo sapien
aagctcttgattggcccggtcgcgc

SEQ ID NO: 2309287 - DNA, 25 bp, Homo sapien
agaaggaccaattgtcgaaccgctt

SEQ ID NO: 2309288 - DNA, 25 bp, Homo sapien
gatccttcgtggcttgccgggtggt

SEQ ID NO: 2309289 - DNA, 25 bp, Homo sapien
ccggaggaggggatccttcgtggct

SEQ ID NO: 2309290 - DNA, 25 bp, Homo sapien
ccttcgtggcttgccgggtggtcat

SEQ ID NO: 2309291 - DNA, 25 bp, Homo sapien
gggatccttcgtggcttgccgggtg

SEQ ID NO: 2309292 - DNA, 25 bp, Homo sapien
cctggtccacggcgcacgatgtaac

SEQ ID NO: 2309293 - DNA, 25 bp, Homo sapien
ggtccacggcgcacgatgtaacagt

SEQ ID NO: 2309294 - DNA, 25 bp, Homo sapien
ccacggcgcacgatgtaacagtggg

SEQ ID NO: 2309295 - DNA, 25 bp, Homo sapien
tccacggcgcacgatgtaacagtgg

SEQ ID NO: 2309296 - DNA, 25 bp, Homo sapien
gtgcattactggtgtgactactgtc

SEQ ID NO: 2309297 - DNA, 25 bp, Homo sapien
gggtgcattactggtgtgactactg

SEQ ID NO: 2309298 - DNA, 25 bp, Homo sapien
tttagtgttggggtgcattactggt

SEQ ID NO: 2309299 - DNA, 25 bp, Homo sapien
attactggtgtgactactgtcttcc

SEQ ID NO: 2309300 - DNA, 25 bp, Homo sapien
cctggggcctgctgaatcaacgagg

SEQ ID NO: 2309301 - DNA, 25 bp, Homo sapien
atattgagcggtggtttctgcaccc

SEQ ID NO: 2309302 - DNA, 25 bp, Homo sapien
aatctttgtgatgtctctgcctggt

SEQ ID NO: 2309303 - DNA, 25 bp, Homo sapien
gcgttgaatattgagcggtggtttc

SEQ ID NO: 2309304 - DNA, 25 bp, Homo sapien
gggttccgaggctgactgatcccca

SEQ ID NO: 2309305 - DNA, 25 bp, Homo sapien
ttttgacccctagggctaggcctga

SEQ ID NO: 2309306 - DNA, 25 bp, Homo sapien
ccacattttgacccctagggctagg

SEQ ID NO: 2309307 - DNA, 25 bp, Homo sapien
tcttccaaggggttccgaggctgac

SEQ ID NO: 2309308 - DNA, 25 bp, Homo sapien
tagtcccctactcagccatggaggc

SEQ ID NO: 2309309 - DNA, 25 bp, Homo sapien
caggagtgagtgcaaaaccccaaaa

SEQ ID NO: 2309310 - DNA, 25 bp, Homo sapien
catggaggccgtgttaccatggctc

SEQ ID NO: 2309311 - DNA, 25 bp, Homo sapien
agcaggagtgagtgcaaaaccccaa

SEQ ID NO: 2309312 - DNA, 25 bp, Homo sapien
aggaaagggagatcttctaagagca

SEQ ID NO: 2309313 - DNA, 25 bp, Homo sapien
gaggaaagggagatcttctaagagc

SEQ ID NO: 2309314 - DNA, 25 bp, Homo sapien
ttaaagagatgggatctccctctgt

SEQ ID NO: 2309315 - DNA, 25 bp, Homo sapien
tttttaaagagatgggatctccctc

SEQ ID NO: 2309316 - DNA, 25 bp, Homo sapien
tcatccaggctggtctccaactcct

SEQ ID NO: 2309317 - DNA, 25 bp, Homo sapien
ggcctccagtgatcctcctgcttca

SEQ ID NO: 2309318 - DNA, 25 bp, Homo sapien
tgctgcaaagtattaggagaacaca

SEQ ID NO: 2309319 - DNA, 25 bp, Homo sapien
acctggtcaccaaatgttcatagaa

SEQ ID NO: 2309320 - DNA, 25 bp, Homo sapien
gacaaagcccctatcctcaagaggc

SEQ ID NO: 2309321 - DNA, 25 bp, Homo sapien
ggtaacagactcaagccaaggtata

SEQ ID NO: 2309322 - DNA, 25 bp, Homo sapien
aattggctgggtgcggtagctcact

SEQ ID NO: 2309323 - DNA, 25 bp, Homo sapien
caaaaattggctgggtgcggtagct

SEQ ID NO: 2309324 - DNA, 25 bp, Homo sapien
tagctggacctggtggcgcgcgcct

SEQ ID NO: 2309325 - DNA, 25 bp, Homo sapien
attagctggacctggtggcgcgcgc

SEQ ID NO: 2309326 - DNA, 25 bp, Homo sapien
ggctgcagggtcagccacaaactct

SEQ ID NO: 2309327 - DNA, 25 bp, Homo sapien
cagggctgcagggtcagccacaaac

SEQ ID NO: 2309328 - DNA, 25 bp, Homo sapien
gggtcagccacaaactctatggtcc

SEQ ID NO: 2309329 - DNA, 25 bp, Homo sapien
tgcagggtcagccacaaactctatg

SEQ ID NO: 2309330 - DNA, 25 bp, Homo sapien
tgacttcctcgaaccagtactcttt

SEQ ID NO: 2309331 - DNA, 25 bp, Homo sapien
cagtactcttttagccagactaggc

SEQ ID NO: 2309332 - DNA, 25 bp, Homo sapien
gccagactaggctggcgccccaggt

SEQ ID NO: 2309333 - DNA, 25 bp, Homo sapien
tcctcgaaccagtactcttttagcc

SEQ ID NO: 2309334 - DNA, 25 bp, Homo sapien
ctggcagggtccagtcggtgggtgg

SEQ ID NO: 2309335 - DNA, 25 bp, Homo sapien
gggccaaatatgcagaggcccgaac

SEQ ID NO: 2309336 - DNA, 25 bp, Homo sapien
ccaaatatgcagaggcccgaacacc

SEQ ID NO: 2309337 - DNA, 25 bp, Homo sapien
cctggcagggtccagtcggtgggtg

SEQ ID NO: 2309338 - DNA, 25 bp, Homo sapien
ggcacaatgtccggcctcgaggtcc

SEQ ID NO: 2309339 - DNA, 25 bp, Homo sapien
ctgggggcacaatgtccggcctcga

SEQ ID NO: 2309340 - DNA, 25 bp, Homo sapien
tgggggcacaatgtccggcctcgag

SEQ ID NO: 2309341 - DNA, 25 bp, Homo sapien
ggggcacaatgtccggcctcgaggt

SEQ ID NO: 2309342 - DNA, 25 bp, Homo sapien
tggaagggtgaaaggaaggtcctga

SEQ ID NO: 2309343 - DNA, 25 bp, Homo sapien
tgaaaggaaggtcctgaaggtgaaa

SEQ ID NO: 2309344 - DNA, 25 bp, Homo sapien
ctggggcgagtggaagggtgaaagg

SEQ ID NO: 2309345 - DNA, 25 bp, Homo sapien
tggggcgagtggaagggtgaaagga

SEQ ID NO: 2309346 - DNA, 25 bp, Homo sapien
gctgctgccagctgtctcccttctt

SEQ ID NO: 2309347 - DNA, 25 bp, Homo sapien
gctgccagctgtctcccttcttagc

SEQ ID NO: 2309348 - DNA, 25 bp, Homo sapien
cggctgctgccagctgtctcccttc

SEQ ID NO: 2309349 - DNA, 25 bp, Homo sapien
tgctgccagctgtctcccttcttag

SEQ ID NO: 2309350 - DNA, 25 bp, Homo sapien
acaataaggacattagccagcagtc

SEQ ID NO: 2309351 - DNA, 25 bp, Homo sapien
caataaggacattagccagcagtca

SEQ ID NO: 2309352 - DNA, 25 bp, Homo sapien
gacaataaggacattagccagcagt

SEQ ID NO: 2309353 - DNA, 25 bp, Homo sapien
tgacaataaggacattagccagcag

SEQ ID NO: 2309354 - DNA, 25 bp, Homo sapien
gggtctccaggagcaatcctgaggc

SEQ ID NO: 2309355 - DNA, 25 bp, Homo sapien
tctccaggagcaatcctgaggcctg

SEQ ID NO: 2309356 - DNA, 25 bp, Homo sapien
ccaggagcaatcctgaggcctggct

SEQ ID NO: 2309357 - DNA, 25 bp, Homo sapien
tccaggagcaatcctgaggcctggc

SEQ ID NO: 2309358 - DNA, 25 bp, Homo sapien
gaagaaacaggacatttgttgtaga

SEQ ID NO: 2309359 - DNA, 25 bp, Homo sapien
ctaggaagaaacaggacatttgttg

SEQ ID NO: 2309360 - DNA, 25 bp, Homo sapien
ggaagaaacaggacatttgttgtag

SEQ ID NO: 2309361 - DNA, 25 bp, Homo sapien
taggaagaaacaggacatttgttgt

SEQ ID NO: 2309362 - DNA, 25 bp, Homo sapien
caacctcgcgttctcctttaggaag

SEQ ID NO: 2309363 - DNA, 25 bp, Homo sapien
tcatctgagtgagtgacaacctcgc

SEQ ID NO: 2309364 - DNA, 25 bp, Homo sapien
aagagaggccacacctccttcatct

SEQ ID NO: 2309365 - DNA, 25 bp, Homo sapien
ttttctcttaatggtactcgctggg

SEQ ID NO: 2309366 - DNA, 25 bp, Homo sapien
ttgtggagccaagggatgaatgctt

SEQ ID NO: 2309367 - DNA, 25 bp, Homo sapien
tacaaatatgacctctcaccctagg

SEQ ID NO: 2309368 - DNA, 25 bp, Homo sapien
tgtcagatctgtctcacccttagca

SEQ ID NO: 2309369 - DNA, 25 bp, Homo sapien
gtaggctggtgctactcagtaaata

SEQ ID NO: 2309370 - DNA, 25 bp, Homo sapien
ggagggtacacgctgagcccgtcca

SEQ ID NO: 2309371 - DNA, 25 bp, Homo sapien
gatggacatggcaccacatggccag

SEQ ID NO: 2309372 - DNA, 25 bp, Homo sapien
ggtacacgctgagcccgtccaaagg

SEQ ID NO: 2309373 - DNA, 25 bp, Homo sapien
ggtgatggacatggcaccacatggc

SEQ ID NO: 2309374 - DNA, 25 bp, Homo sapien
tgaactctgggggttgatggcatgg

SEQ ID NO: 2309375 - DNA, 25 bp, Homo sapien
taggttgaacggtgagacgccgcaa

SEQ ID NO: 2309376 - DNA, 25 bp, Homo sapien
tttaggttgaacggtgagacgccgc

SEQ ID NO: 2309377 - DNA, 25 bp, Homo sapien
gttgaacggtgagacgccgcaacac

SEQ ID NO: 2309378 - DNA, 25 bp, Homo sapien
aggggagacaccacgcagccactgg

SEQ ID NO: 2309379 - DNA, 25 bp, Homo sapien
ggggagacaccacgcagccactggg

SEQ ID NO: 2309380 - DNA, 25 bp, Homo sapien
agggcagggcaggatcttcagagca

SEQ ID NO: 2309381 - DNA, 25 bp, Homo sapien
ccagggcagggcaggatcttcagag

SEQ ID NO: 2309382 - DNA, 25 bp, Homo sapien
gcagggcaggatcttcagagcagga

SEQ ID NO: 2309383 - DNA, 25 bp, Homo sapien
ggcagggcaggatcttcagagcagg

SEQ ID NO: 2309384 - DNA, 25 bp, Homo sapien
gaatggattgaagcccctaactgag

SEQ ID NO: 2309385 - DNA, 25 bp, Homo sapien
ccctaactgagaggccctagatgta

SEQ ID NO: 2309386 - DNA, 25 bp, Homo sapien
gaggccctagatgtacattaggagg

SEQ ID NO: 2309387 - DNA, 25 bp, Homo sapien
agcctgagtcccaccctcatgagga

SEQ ID NO: 2309388 - DNA, 25 bp, Homo sapien
tatacaactctcctggtcaaacaac

SEQ ID NO: 2309389 - DNA, 25 bp, Homo sapien
tcaaacaaccggacggcaacctgct

SEQ ID NO: 2309390 - DNA, 25 bp, Homo sapien
tcctggtcaaacaaccggacggcaa

SEQ ID NO: 2309391 - DNA, 25 bp, Homo sapien
gagtggccaccggtggtttcccaga

SEQ ID NO: 2309392 - DNA, 25 bp, Homo sapien
gagagagcaccccagtgtgacatca

SEQ ID NO: 2309393 - DNA, 25 bp, Homo sapien
tacccacactgtcctattcctgatc

SEQ ID NO: 2309394 - DNA, 25 bp, Homo sapien
tgcgttcagtagtctacccacactg

SEQ ID NO: 2309395 - DNA, 25 bp, Homo sapien
acatcaagatgtgcgttcagtagtc

SEQ ID NO: 2309396 - DNA, 25 bp, Homo sapien
gaagttcaaccatatccagagaaga

SEQ ID NO: 2309397 - DNA, 25 bp, Homo sapien
cagagaagagcctccattaagaggg

SEQ ID NO: 2309398 - DNA, 25 bp, Homo sapien
tgtggttccccgcactcctctggaa

SEQ ID NO: 2309399 - DNA, 25 bp, Homo sapien
tgagtgttttaacagtccaggaagg

SEQ ID NO: 2309400 - DNA, 25 bp, Homo sapien
ggtagggctctggtacttcaagctg

SEQ ID NO: 2309401 - DNA, 25 bp, Homo sapien
tgctggagggtagggctctggtact

SEQ ID NO: 2309402 - DNA, 25 bp, Homo sapien
agggtagggctctggtacttcaagc

SEQ ID NO: 2309403 - DNA, 25 bp, Homo sapien
tagggctctggtacttcaagctgtt

SEQ ID NO: 2309404 - DNA, 25 bp, Homo sapien
gagaggactccggtatctcaggctc

SEQ ID NO: 2309405 - DNA, 25 bp, Homo sapien
ttcctggcgagaggactccggtatc

SEQ ID NO: 2309406 - DNA, 25 bp, Homo sapien
tggcgagaggactccggtatctcag

SEQ ID NO: 2309407 - DNA, 25 bp, Homo sapien
tgttcctggcgagaggactccggta

SEQ ID NO: 2309408 - DNA, 25 bp, Homo sapien
gagaggactccggtatctcaggctc

SEQ ID NO: 2309409 - DNA, 25 bp, Homo sapien
gcgagaggactccggtatctcaggc

SEQ ID NO: 2309410 - DNA, 25 bp, Homo sapien
ctggcgagaggactccggtatctca

SEQ ID NO: 2309411 - DNA, 25 bp, Homo sapien
tggcgagaggactccggtatctcag

SEQ ID NO: 2309412 - DNA, 25 bp, Homo sapien
agtgagcagataggggggctggcac

SEQ ID NO: 2309413 - DNA, 25 bp, Homo sapien
gggtggtagactggactctagactt

SEQ ID NO: 2309414 - DNA, 25 bp, Homo sapien
gcacaaagcgggtgttgggaagaga

SEQ ID NO: 2309415 - DNA, 25 bp, Homo sapien
tgatgcccccagctctaccctaggg

SEQ ID NO: 2309416 - DNA, 25 bp, Homo sapien
tgcctggcctgctgggggtctcaaa

SEQ ID NO: 2309417 - DNA, 25 bp, Homo sapien
cctggcctgctgggggtctcaaaga

SEQ ID NO: 2309418 - DNA, 25 bp, Homo sapien
gcctggcctgctgggggtctcaaag

SEQ ID NO: 2309419 - DNA, 25 bp, Homo sapien
ctgcctggcctgctgggggtctcaa

SEQ ID NO: 2309420 - DNA, 25 bp, Homo sapien
gaaggtgtggaagcatgagattgcc

SEQ ID NO: 2309421 - DNA, 25 bp, Homo sapien
cggccaagccaattaggagcacagg

SEQ ID NO: 2309422 - DNA, 25 bp, Homo sapien
gggtcctatacttccaccatgtact

SEQ ID NO: 2309423 - DNA, 25 bp, Homo sapien
tgcagctcacagtgaggtgaggacc

SEQ ID NO: 2309424 - DNA, 25 bp, Homo sapien
gaagcagtggatggcggttaaacac

SEQ ID NO: 2309425 - DNA, 25 bp, Homo sapien
tgtaaaaggcacactcatcgtccag

SEQ ID NO: 2309426 - DNA, 25 bp, Homo sapien
tgccattcgagtaatgtagccacag

SEQ ID NO: 2309427 - DNA, 25 bp, Homo sapien
gttaaacacgatttgaggcgctccc

SEQ ID NO: 2309428 - DNA, 25 bp, Homo sapien
ccacagctgggctgtgggttggagt

SEQ ID NO: 2309429 - DNA, 25 bp, Homo sapien
cagctgggctgtgggttggagtctc

SEQ ID NO: 2309430 - DNA, 25 bp, Homo sapien
gctgggctgtgggttggagtctcac

SEQ ID NO: 2309431 - DNA, 25 bp, Homo sapien
acagctgggctgtgggttggagtct

SEQ ID NO: 2309432 - DNA, 25 bp, Homo sapien
tcagccaaccttgcactgtagccaa

SEQ ID NO: 2309433 - DNA, 25 bp, Homo sapien
agccaaccttgcactgtagccaagc

SEQ ID NO: 2309434 - DNA, 25 bp, Homo sapien
cagctcagccaaccttgcactgtag

SEQ ID NO: 2309435 - DNA, 25 bp, Homo sapien
agctcagccaaccttgcactgtagc

SEQ ID NO: 2309436 - DNA, 25 bp, Homo sapien
cagcagaaccaactggaatgaaaca

SEQ ID NO: 2309437 - DNA, 25 bp, Homo sapien
ggggggcagcagaaccaactggaat

SEQ ID NO: 2309438 - DNA, 25 bp, Homo sapien
ggcagcagaaccaactggaatgaaa

SEQ ID NO: 2309439 - DNA, 25 bp, Homo sapien
ggggcagcagaaccaactggaatga

SEQ ID NO: 2309440 - DNA, 25 bp, Homo sapien
tgggcagaccgacaataaataaggg

SEQ ID NO: 2309441 - DNA, 25 bp, Homo sapien
gcagaccgacaataaataagggcta

SEQ ID NO: 2309442 - DNA, 25 bp, Homo sapien
gaagaagtacggcagggcaggagtg

SEQ ID NO: 2309443 - DNA, 25 bp, Homo sapien
agtcccatgggcagaccgacaataa

SEQ ID NO: 2309444 - DNA, 25 bp, Homo sapien
ggacggcttctggatgggagcctgg

SEQ ID NO: 2309445 - DNA, 25 bp, Homo sapien
cctctgagctggaggacactgccat

SEQ ID NO: 2309446 - DNA, 25 bp, Homo sapien
gagcctgggggatcccaagagccca

SEQ ID NO: 2309447 - DNA, 25 bp, Homo sapien
tcaggacggcttctggatgggagcc

SEQ ID NO: 2309448 - DNA, 25 bp, Homo sapien
cagagcttgcaagggggtgggctag

SEQ ID NO: 2309449 - DNA, 25 bp, Homo sapien
gagcttgcaagggggtgggctaggc

SEQ ID NO: 2309450 - DNA, 25 bp, Homo sapien
cttgcaagggggtgggctaggcagg

SEQ ID NO: 2309451 - DNA, 25 bp, Homo sapien
tcagagcttgcaagggggtgggcta

SEQ ID NO: 2309452 - DNA, 25 bp, Homo sapien
tgcttttctgcccaatgcacgcaga

SEQ ID NO: 2309453 - DNA, 25 bp, Homo sapien
caatgcacgcagagagttctagaag

SEQ ID NO: 2309454 - DNA, 25 bp, Homo sapien
tctgcccaatgcacgcagagagttc

SEQ ID NO: 2309455 - DNA, 25 bp, Homo sapien
ttttctgcccaatgcacgcagagag

SEQ ID NO: 2309456 - DNA, 25 bp, Homo sapien
tcaattcggcaaacatacgttgcgc

SEQ ID NO: 2309457 - DNA, 25 bp, Homo sapien
ccagcagagcgtgacaaggatcgga

SEQ ID NO: 2309458 - DNA, 25 bp, Homo sapien
ggatgggtggtctatcccagcccag

SEQ ID NO: 2309459 - DNA, 25 bp, Homo sapien
tcagagcgacctcgagtgccttctt

SEQ ID NO: 2309460 - DNA, 25 bp, Homo sapien
acaaactgcagcgagaggaaagggt

SEQ ID NO: 2309461 - DNA, 25 bp, Homo sapien
tttgtcacaattacggggccgtcac

SEQ ID NO: 2309462 - DNA, 25 bp, Homo sapien
ttctataaactggtgcagagtggga

SEQ ID NO: 2309463 - DNA, 25 bp, Homo sapien
gggatctgacaaactgcagcgagag

SEQ ID NO: 2309464 - DNA, 25 bp, Homo sapien
tgcaacggagctgcaatgcaagacg

SEQ ID NO: 2309465 - DNA, 25 bp, Homo sapien
tctactccgtgaacttggctaagtc

SEQ ID NO: 2309466 - DNA, 25 bp, Homo sapien
gaccttcaagactggatggttccac

SEQ ID NO: 2309467 - DNA, 25 bp, Homo sapien
ttcccttaaggcagagacatccacg

SEQ ID NO: 2309468 - DNA, 25 bp, Homo sapien
gcaagggacgctcctatctgtagtg

SEQ ID NO: 2309469 - DNA, 25 bp, Homo sapien
gtccccagacaccttgtgcgggtac

SEQ ID NO: 2309470 - DNA, 25 bp, Homo sapien
tgcgggtaccgaggcacagcagcac

SEQ ID NO: 2309471 - DNA, 25 bp, Homo sapien
gcaggagcaagggacgctcctatct

SEQ ID NO: 2309472 - DNA, 25 bp, Homo sapien
aactcggtgcaaggctctgcagacg

SEQ ID NO: 2309473 - DNA, 25 bp, Homo sapien
tctgcagacgcctgcagctccggtg

SEQ ID NO: 2309474 - DNA, 25 bp, Homo sapien
gccctcgcggggaaactcggtgcaa

SEQ ID NO: 2309475 - DNA, 25 bp, Homo sapien
tcacattcccgcctgggactcctcc

SEQ ID NO: 2309476 - DNA, 25 bp, Homo sapien
tcccagaccgagtcagaccagtcat

SEQ ID NO: 2309477 - DNA, 25 bp, Homo sapien
cacagagtgaaaatggcccgtctcg

SEQ ID NO: 2309478 - DNA, 25 bp, Homo sapien
tgtctgttgtgtcacggaagtccgg

SEQ ID NO: 2309479 - DNA, 25 bp, Homo sapien
cccacttccatccaaatggactttg

SEQ ID NO: 2309480 - DNA, 25 bp, Homo sapien
ctacttccaaatcaagtggccatac

SEQ ID NO: 2309481 - DNA, 25 bp, Homo sapien
ccggttactcgcagcacagaagtct

SEQ ID NO: 2309482 - DNA, 25 bp, Homo sapien
gcaaaggtctcagaacaagtccggt

SEQ ID NO: 2309483 - DNA, 25 bp, Homo sapien
tctgtgagactcatggctgtcatgg

SEQ ID NO: 2309484 - DNA, 25 bp, Homo sapien
catggccccagagttatccttagac

SEQ ID NO: 2309485 - DNA, 25 bp, Homo sapien
cagcaaagcgaatgggactcagagg

SEQ ID NO: 2309486 - DNA, 25 bp, Homo sapien
cctgagctacaaagcttgggagctt

SEQ ID NO: 2309487 - DNA, 25 bp, Homo sapien
agagcagggcgtggctgtcccttcc

SEQ ID NO: 2309488 - DNA, 25 bp, Homo sapien
cagagggcataggtcaccaggagcc

SEQ ID NO: 2309489 - DNA, 25 bp, Homo sapien
gaggacaaactccatgaggcggcca

SEQ ID NO: 2309490 - DNA, 25 bp, Homo sapien
caaagctttgtagcggcgatgcctc

SEQ ID NO: 2309491 - DNA, 25 bp, Homo sapien
gtaagccaagcccagacgatagagc

SEQ ID NO: 2309492 - DNA, 25 bp, Homo sapien
tcagtagcctccagatccggtaagg

SEQ ID NO: 2309493 - DNA, 25 bp, Homo sapien
gtgctggaaatgttccatcccttga

SEQ ID NO: 2309494 - DNA, 25 bp, Homo sapien
agaaacttcttagtgctggaaatgt

SEQ ID NO: 2309495 - DNA, 25 bp, Homo sapien
tgaatagaaatgacctctgaaggtg

SEQ ID NO: 2309496 - DNA, 25 bp, Homo sapien
ctaatgtatggtgacgaaagtctga

SEQ ID NO: 2309497 - DNA, 25 bp, Homo sapien
gacttcatacgcagcctggatctcc

SEQ ID NO: 2309498 - DNA, 25 bp, Homo sapien
tctgggtgccagaccttcactagct

SEQ ID NO: 2309499 - DNA, 25 bp, Homo sapien
ctggtaactccgatgtatttcttca

SEQ ID NO: 2309500 - DNA, 25 bp, Homo sapien
tgggttgactcaggacttcatacgc

SEQ ID NO: 2309501 - DNA, 25 bp, Homo sapien
gatttgggacaagttgcccagctct

SEQ ID NO: 2309502 - DNA, 25 bp, Homo sapien
caaagctagatttgggacaagttgc

SEQ ID NO: 2309503 - DNA, 25 bp, Homo sapien
gctctgctaggaagagtcagtcctc

SEQ ID NO: 2309504 - DNA, 25 bp, Homo sapien
gatgccattcgtgggcaaagctaga

SEQ ID NO: 2309505 - DNA, 25 bp, Homo sapien
ccatactctaaaagatatttgattg

SEQ ID NO: 2309506 - DNA, 25 bp, Homo sapien
tccttctaccacaaccttttctcac

SEQ ID NO: 2309507 - DNA, 25 bp, Homo sapien
cttttctcaccccattgttttctca

SEQ ID NO: 2309508 - DNA, 25 bp, Homo sapien
gaatataaacacatccttctaccac

SEQ ID NO: 2309509 - DNA, 25 bp, Homo sapien
tgttctctaaaagatatattttttc

SEQ ID NO: 2309510 - DNA, 25 bp, Homo sapien
ggtgtgttctctaaaagatatattt

SEQ ID NO: 2309511 - DNA, 25 bp, Homo sapien
tgtgttctctaaaagatatattttt

SEQ ID NO: 2309512 - DNA, 25 bp, Homo sapien
gtgtgttctctaaaagatatatttt

SEQ ID NO: 2309513 - DNA, 25 bp, Homo sapien
gaagtcagccagtccaatcacctat

SEQ ID NO: 2309514 - DNA, 25 bp, Homo sapien
gtatgtagcccagaatcagacctca

SEQ ID NO: 2309515 - DNA, 25 bp, Homo sapien
tgagatgctctagccgctggttccc

SEQ ID NO: 2309516 - DNA, 25 bp, Homo sapien
gcaagaaagctgcagtaaaggcaca

SEQ ID NO: 2309517 - DNA, 25 bp, Homo sapien
gagagagagaatagagagaatagtc

SEQ ID NO: 2309518 - DNA, 25 bp, Homo sapien
gtgagccaagatccagcctgggtga

SEQ ID NO: 2309519 - DNA, 25 bp, Homo sapien
gagagaatagagagaatagtcatca

SEQ ID NO: 2309520 - DNA, 25 bp, Homo sapien
gagagagaatagagagaatagtcat

SEQ ID NO: 2309521 - DNA, 25 bp, Homo sapien
atttattgtagccttgcttatgctg

SEQ ID NO: 2309522 - DNA, 25 bp, Homo sapien
aaaactccataatacaatttgagaa

SEQ ID NO: 2309523 - DNA, 25 bp, Homo sapien
tcagtagttcccatttgagtaaatt

SEQ ID NO: 2309524 - DNA, 25 bp, Homo sapien
cagtagttcccatttgagtaaatta

SEQ ID NO: 2309525 - DNA, 25 bp, Homo sapien
agaccgtacttatcacttattggga

SEQ ID NO: 2309526 - DNA, 25 bp, Homo sapien
ggtttctaacatgcaaggattccac

SEQ ID NO: 2309527 - DNA, 25 bp, Homo sapien
gagtggtaacattccaggccagtta

SEQ ID NO: 2309528 - DNA, 25 bp, Homo sapien
catgcgtggcccaatatgatatcaa

SEQ ID NO: 2309529 - DNA, 25 bp, Homo sapien
ttgggactacaggcgtgtgccacca

SEQ ID NO: 2309530 - DNA, 25 bp, Homo sapien
attctccccactcagcctccagagt

SEQ ID NO: 2309531 - DNA, 25 bp, Homo sapien
agttgggactacaggcgtgtgccac

SEQ ID NO: 2309532 - DNA, 25 bp, Homo sapien
ggtgagacaggtagaagatttccaa

SEQ ID NO: 2309533 - DNA, 25 bp, Homo sapien
cctgtgcaacaaagtagatttcgtc

SEQ ID NO: 2309534 - DNA, 25 bp, Homo sapien
ccagtatggtcaatgcaagaggtag

SEQ ID NO: 2309535 - DNA, 25 bp, Homo sapien
gcttgggatacaggccttctcagtt

SEQ ID NO: 2309536 - DNA, 25 bp, Homo sapien
cctcagctgaaaagctaataactcc

SEQ ID NO: 2309537 - DNA, 25 bp, Homo sapien
cttcccaaaacaatgtccacaaggg

SEQ ID NO: 2309538 - DNA, 25 bp, Homo sapien
agaatgcaggttgaaagcaagctta

SEQ ID NO: 2309539 - DNA, 25 bp, Homo sapien
ggttgaaagcaagcttaaaggtcat

SEQ ID NO: 2309540 - DNA, 25 bp, Homo sapien
cagtgtgatgcaagtgaatttttgg

SEQ ID NO: 2309541 - DNA, 25 bp, Homo sapien
cgactagaagtgaacatgaataact

SEQ ID NO: 2309542 - DNA, 25 bp, Homo sapien
ggaaagtacaaaattatgtccctga

SEQ ID NO: 2309543 - DNA, 25 bp, Homo sapien
tgtacatttatgaacgacgactaga

SEQ ID NO: 2309544 - DNA, 25 bp, Homo sapien
ccttgcaggttcattaagacttgac

SEQ ID NO: 2309545 - DNA, 25 bp, Homo sapien
caaggctaacatacccaaattttca

SEQ ID NO: 2309546 - DNA, 25 bp, Homo sapien
tcagttcaatgtgagccttgcaggt

SEQ ID NO: 2309547 - DNA, 25 bp, Homo sapien
tcaaaggttgaagtgttacatcaca

SEQ ID NO: 2309548 - DNA, 25 bp, Homo sapien
ctgtggcagccaacgggtgcgcgag

SEQ ID NO: 2309549 - DNA, 25 bp, Homo sapien
cgccaccggagactgggaattaccg

SEQ ID NO: 2309550 - DNA, 25 bp, Homo sapien
accagtcgggttaccgctcttctcg

SEQ ID NO: 2309551 - DNA, 25 bp, Homo sapien
tccggcgcgccaagctcgaggctgt

SEQ ID NO: 2309552 - DNA, 25 bp, Homo sapien
aaagtagaatattggtagccagcag

SEQ ID NO: 2309553 - DNA, 25 bp, Homo sapien
gaaagtagaatattggtagccagca

SEQ ID NO: 2309554 - DNA, 25 bp, Homo sapien
agaaagtagaatattggtagccagc

SEQ ID NO: 2309555 - DNA, 25 bp, Homo sapien
tgggctaaccacactgacatgctat

SEQ ID NO: 2309556 - DNA, 25 bp, Homo sapien
gaagagtcacttctgccacacacta

SEQ ID NO: 2309557 - DNA, 25 bp, Homo sapien
gcatgctatacaaagggctcctgca

SEQ ID NO: 2309558 - DNA, 25 bp, Homo sapien
taacagtaggccaggaagagccagc

SEQ ID NO: 2309559 - DNA, 25 bp, Homo sapien
cctgggcaatatacagcaagagccc

SEQ ID NO: 2309560 - DNA, 25 bp, Homo sapien
taccactggacctgggggtgagtaa

SEQ ID NO: 2309561 - DNA, 25 bp, Homo sapien
gggtgagtaagtgtcctctttgctc

SEQ ID NO: 2309562 - DNA, 25 bp, Homo sapien
gtaagtgtcctctttgctcctcaca

SEQ ID NO: 2309563 - DNA, 25 bp, Homo sapien
cagatgtttccaaatcagtctccct

SEQ ID NO: 2309564 - DNA, 25 bp, Homo sapien
tctcatctcccatctcccacattct

SEQ ID NO: 2309565 - DNA, 25 bp, Homo sapien
tcatctcccatctcccacattcttt

SEQ ID NO: 2309566 - DNA, 25 bp, Homo sapien
atctcccatctcccacattcttttt

SEQ ID NO: 2309567 - DNA, 25 bp, Homo sapien
cccagactcccacatctctcatctc

SEQ ID NO: 2309568 - DNA, 25 bp, Homo sapien
agtgccttctcaattgtgcaactca

SEQ ID NO: 2309569 - DNA, 25 bp, Homo sapien
gtgccttctcaattgtgcaactcat

SEQ ID NO: 2309570 - DNA, 25 bp, Homo sapien
caacaagagttttagcatcagcaag

SEQ ID NO: 2309571 - DNA, 25 bp, Homo sapien
gttttagcatcagcaagtgccttct

SEQ ID NO: 2309572 - DNA, 25 bp, Homo sapien
gaccgtggccgatgttcttgcgact

SEQ ID NO: 2309573 - DNA, 25 bp, Homo sapien
ttctgatactgcttcgtggcttcta

SEQ ID NO: 2309574 - DNA, 25 bp, Homo sapien
gatactgcttcgtggcttctactcg

SEQ ID NO: 2309575 - DNA, 25 bp, Homo sapien
ttcttgcgacttcattaagctcttg

SEQ ID NO: 2309576 - DNA, 25 bp, Homo sapien
atttgttctcgatacttgctcatcg

SEQ ID NO: 2309577 - DNA, 25 bp, Homo sapien
tccagggatgtacgcaattcttttc

SEQ ID NO: 2309578 - DNA, 25 bp, Homo sapien
gatacttgctcatcgtaagttccaa

SEQ ID NO: 2309579 - DNA, 25 bp, Homo sapien
cttccagggatgtacgcaattcttt

SEQ ID NO: 2309580 - DNA, 25 bp, Homo sapien
catcttttttgctagccattagcaa

SEQ ID NO: 2309581 - DNA, 25 bp, Homo sapien
tcatcttttttgctagccattagca

SEQ ID NO: 2309582 - DNA, 25 bp, Homo sapien
catgtgcctgtatccttggagtgct

SEQ ID NO: 2309583 - DNA, 25 bp, Homo sapien
tgtgcctgtatccttggagtgctgc

SEQ ID NO: 2309584 - DNA, 25 bp, Homo sapien
atgtgcctgtatccttggagtgctg

SEQ ID NO: 2309585 - DNA, 25 bp, Homo sapien
cacaagctaattaagttctacaggt

SEQ ID NO: 2309586 - DNA, 25 bp, Homo sapien
acaaagagttgctattcagtgggta

SEQ ID NO: 2309587 - DNA, 25 bp, Homo sapien
caaaagatttgtcaggagggtagat

SEQ ID NO: 2309588 - DNA, 25 bp, Homo sapien
ggtctgctgtaaaacactgtcccta

SEQ ID NO: 2309589 - DNA, 25 bp, Homo sapien
agcactcagccagccagtaaatatt

SEQ ID NO: 2309590 - DNA, 25 bp, Homo sapien
tcttagcctgccaaagctgtgggat

SEQ ID NO: 2309591 - DNA, 25 bp, Homo sapien
cccatcttagcctgccaaagctgtg

SEQ ID NO: 2309592 - DNA, 25 bp, Homo sapien
acagcactcagccagccagtaaata

SEQ ID NO: 2309593 - DNA, 25 bp, Homo sapien
caaaatcagagtaggcaccatagtg

SEQ ID NO: 2309594 - DNA, 25 bp, Homo sapien
gttcaaaatcagagtaggcaccata

SEQ ID NO: 2309595 - DNA, 25 bp, Homo sapien
aatcagagtaggcaccatagtgaga

SEQ ID NO: 2309596 - DNA, 25 bp, Homo sapien
ggagttcaaaatcagagtaggcacc

SEQ ID NO: 2309597 - DNA, 25 bp, Homo sapien
gaatattgagtcatgcagataccca

SEQ ID NO: 2309598 - DNA, 25 bp, Homo sapien
caagggcattacatggcaagaggac

SEQ ID NO: 2309599 - DNA, 25 bp, Homo sapien
ggcacatccggtgggagccttcttg

SEQ ID NO: 2309600 - DNA, 25 bp, Homo sapien
gatgtgtcctgagatgaccaagggc

SEQ ID NO: 2309601 - DNA, 25 bp, Homo sapien
gaaagaagaatagcaaggaggcctg

SEQ ID NO: 2309602 - DNA, 25 bp, Homo sapien
ttttcctagactgtcaaatgcttga

SEQ ID NO: 2309603 - DNA, 25 bp, Homo sapien
gtgtgagcacttccaactagacaca

SEQ ID NO: 2309604 - DNA, 25 bp, Homo sapien
cagctgagccaagaactaattggcc

SEQ ID NO: 2309605 - DNA, 25 bp, Homo sapien
cccaaggaaccatatctgagtagcc

SEQ ID NO: 2309606 - DNA, 25 bp, Homo sapien
ttcagaattgctgtggacccatgac

SEQ ID NO: 2309607 - DNA, 25 bp, Homo sapien
cattcctaggcagtagggctgatcc

SEQ ID NO: 2309608 - DNA, 25 bp, Homo sapien
caagagctatggaggatcattccta

SEQ ID NO: 2309609 - DNA, 25 bp, Homo sapien
catcacctaaccgcttttcaaaatt

SEQ ID NO: 2309610 - DNA, 25 bp, Homo sapien
agtctctacattctaaattatctcc

SEQ ID NO: 2309611 - DNA, 25 bp, Homo sapien
atctccatcacctaaccgcttttca

SEQ ID NO: 2309612 - DNA, 25 bp, Homo sapien
tccatcacctaaccgcttttcaaaa

SEQ ID NO: 2309613 - DNA, 25 bp, Homo sapien
aagaagcccaaaccagaaatcaatg

SEQ ID NO: 2309614 - DNA, 25 bp, Homo sapien
tctaataccactagtctctatggaa

SEQ ID NO: 2309615 - DNA, 25 bp, Homo sapien
tggaattactggtttcacaaagcag

SEQ ID NO: 2309616 - DNA, 25 bp, Homo sapien
gaaagggtatatcaatgctcagatc

SEQ ID NO: 2309617 - DNA, 25 bp, Homo sapien
actagagggaagattaaggaggtca

SEQ ID NO: 2309618 - DNA, 25 bp, Homo sapien
gaacttgaggtttgcgagtttccca

SEQ ID NO: 2309619 - DNA, 25 bp, Homo sapien
ggaggtcataccaaatgactgcaac

SEQ ID NO: 2309620 - DNA, 25 bp, Homo sapien
gtgccagccactgtaacatccatta

SEQ ID NO: 2309621 - DNA, 25 bp, Homo sapien
cctaaatgaacactggtaggctaaa

SEQ ID NO: 2309622 - DNA, 25 bp, Homo sapien
aactgatgctatccattacccttag

SEQ ID NO: 2309623 - DNA, 25 bp, Homo sapien
tctaggatcctgatctgaatagtgg

SEQ ID NO: 2309624 - DNA, 25 bp, Homo sapien
gcatgaattgactaacacccctaaa

SEQ ID NO: 2309625 - DNA, 25 bp, Homo sapien
agacggggtctcgctccttagccca

SEQ ID NO: 2309626 - DNA, 25 bp, Homo sapien
acggggtctcgctccttagcccagg

SEQ ID NO: 2309627 - DNA, 25 bp, Homo sapien
gacggggtctcgctccttagcccag

SEQ ID NO: 2309628 - DNA, 25 bp, Homo sapien
acatgcttgtaaccctagctgctca

SEQ ID NO: 2309629 - DNA, 25 bp, Homo sapien
tcctcaggtcaaaatggtgaatatg

SEQ ID NO: 2309630 - DNA, 25 bp, Homo sapien
gaagaagagaaagacctaaattcta

SEQ ID NO: 2309631 - DNA, 25 bp, Homo sapien
ggatttcctcaggtcaaaatggtga

SEQ ID NO: 2309632 - DNA, 25 bp, Homo sapien
tcaacatctgaagatactggaactt

SEQ ID NO: 2309633 - DNA, 25 bp, Homo sapien
cttatcaacatctgaagatactgga

SEQ ID NO: 2309634 - DNA, 25 bp, Homo sapien
ctaacggcttatcaacatctgaaga

SEQ ID NO: 2309635 - DNA, 25 bp, Homo sapien
tatcaacatctgaagatactggaac

SEQ ID NO: 2309636 - DNA, 25 bp, Homo sapien
tgtcttatccgtggtcctagtctcc

SEQ ID NO: 2309637 - DNA, 25 bp, Homo sapien
acgacaaacgaggagggttcagcct

SEQ ID NO: 2309638 - DNA, 25 bp, Homo sapien
agcctccaacgcagcaagagagaaa

SEQ ID NO: 2309639 - DNA, 25 bp, Homo sapien
tagtctcccttcttgcacaatccag

SEQ ID NO: 2309640 - DNA, 25 bp, Homo sapien
agcggatggcttgagaatatagaca

SEQ ID NO: 2309641 - DNA, 25 bp, Homo sapien
agtgtggtcatatgaactgaagcgg

SEQ ID NO: 2309642 - DNA, 25 bp, Homo sapien
tctttgtccactgctgtaaatgctg

SEQ ID NO: 2309643 - DNA, 25 bp, Homo sapien
tgttgctgacatgcaagtgtggtca

SEQ ID NO: 2309644 - DNA, 25 bp, Homo sapien
gggggacgtgaaatgagaaacacac

SEQ ID NO: 2309645 - DNA, 25 bp, Homo sapien
gaatttcttatatctaacctctcct

SEQ ID NO: 2309646 - DNA, 25 bp, Homo sapien
gaacagcaaacgtgagactttttaa

SEQ ID NO: 2309647 - DNA, 25 bp, Homo sapien
taataacggtctagccaggtgcagt

SEQ ID NO: 2309648 - DNA, 25 bp, Homo sapien
caggaagtatcattgcagacattca

SEQ ID NO: 2309649 - DNA, 25 bp, Homo sapien
tcaggaagtatcattgcagacattc

SEQ ID NO: 2309650 - DNA, 25 bp, Homo sapien
tgttcgaaattctgctcactagctg

SEQ ID NO: 2309651 - DNA, 25 bp, Homo sapien
aagtgggcaacggaagtgtgcagtt

SEQ ID NO: 2309652 - DNA, 25 bp, Homo sapien
caaaaaatacgaaatcctgctgttc

SEQ ID NO: 2309653 - DNA, 25 bp, Homo sapien
tcactagctgttaatctcctttcct

SEQ ID NO: 2309654 - DNA, 25 bp, Homo sapien
gccttgtctgggttttgagtgtagg

SEQ ID NO: 2309655 - DNA, 25 bp, Homo sapien
gaaaagtatccttttgccttgtctg

SEQ ID NO: 2309656 - DNA, 25 bp, Homo sapien
cttgtctgggttttgagtgtaggta

SEQ ID NO: 2309657 - DNA, 25 bp, Homo sapien
agaaaagtatccttttgccttgtct

SEQ ID NO: 2309658 - DNA, 25 bp, Homo sapien
ccttctggttctgtttcctggacat

SEQ ID NO: 2309659 - DNA, 25 bp, Homo sapien
taagccgtccacaaatggcagagcc

SEQ ID NO: 2309660 - DNA, 25 bp, Homo sapien
gagttcacccctgctggtactgaag

SEQ ID NO: 2309661 - DNA, 25 bp, Homo sapien
tcaggagccacgagtgcagatacaa

SEQ ID NO: 2309662 - DNA, 25 bp, Homo sapien
aactagctggacgtcaggatgtcgg

SEQ ID NO: 2309663 - DNA, 25 bp, Homo sapien
tgatgggtaagcaacaaaacactgg

SEQ ID NO: 2309664 - DNA, 25 bp, Homo sapien
ctggaacaaggctaacaggctaatg

SEQ ID NO: 2309665 - DNA, 25 bp, Homo sapien
tatggcatgattatcactaggcaga

SEQ ID NO: 2309666 - DNA, 25 bp, Homo sapien
caactaactgtactaggtggttggg

SEQ ID NO: 2309667 - DNA, 25 bp, Homo sapien
tgacatgcctattcttgcccagttt

SEQ ID NO: 2309668 - DNA, 25 bp, Homo sapien
gattctggtatgagatcagtattac

SEQ ID NO: 2309669 - DNA, 25 bp, Homo sapien
tgtaataatgtactgacatcaattc

SEQ ID NO: 2309670 - DNA, 25 bp, Homo sapien
gaacctgagttataggtatatagga

SEQ ID NO: 2309671 - DNA, 25 bp, Homo sapien
ttccagttaactaagatcagtacag

SEQ ID NO: 2309672 - DNA, 25 bp, Homo sapien
gcactaattccagtttagatctgag

SEQ ID NO: 2309673 - DNA, 25 bp, Homo sapien
cagaatagctagtaagaatctggac

SEQ ID NO: 2309674 - DNA, 25 bp, Homo sapien
ccagtgatagacaaccaggtattaa

SEQ ID NO: 2309675 - DNA, 25 bp, Homo sapien
tacacgtatcctctccggaggttgt

SEQ ID NO: 2309676 - DNA, 25 bp, Homo sapien
actgacggttcatcaatcagtcttc

SEQ ID NO: 2309677 - DNA, 25 bp, Homo sapien
ggttgtaagcataccgactgacggt

SEQ ID NO: 2309678 - DNA, 25 bp, Homo sapien
tcctctccggaggttgtaagcatac

SEQ ID NO: 2309679 - DNA, 25 bp, Homo sapien
tatttcaaatagcacacattcaggt

SEQ ID NO: 2309680 - DNA, 25 bp, Homo sapien
gaacaggtgtcttgacaagctttaa

SEQ ID NO: 2309681 - DNA, 25 bp, Homo sapien
tttttaggcactgagaatgacatag

SEQ ID NO: 2309682 - DNA, 25 bp, Homo sapien
tgacatagaaatagctgagcctgat

SEQ ID NO: 2309683 - DNA, 25 bp, Homo sapien
gctaaatattctctaatcctgggtg

SEQ ID NO: 2309684 - DNA, 25 bp, Homo sapien
tatgaggatgcctaggccagatgca

SEQ ID NO: 2309685 - DNA, 25 bp, Homo sapien
gaggcactgagatggtctacatagg

SEQ ID NO: 2309686 - DNA, 25 bp, Homo sapien
tacataggtcaggagggcacaaatg

SEQ ID NO: 2309687 - DNA, 25 bp, Homo sapien
gaagcagttacaggagccaaagaca

SEQ ID NO: 2309688 - DNA, 25 bp, Homo sapien
cgaatggcatactcaaattgggcaa

SEQ ID NO: 2309689 - DNA, 25 bp, Homo sapien
tgttagcaaagagtagggaaaccac

SEQ ID NO: 2309690 - DNA, 25 bp, Homo sapien
tgtgcactgctacttgagacttgag

SEQ ID NO: 2309691 - DNA, 25 bp, Homo sapien
ggtattggactgcaaatcaaaaatg

SEQ ID NO: 2309692 - DNA, 25 bp, Homo sapien
cctccctgggccagtacggtattgg

SEQ ID NO: 2309693 - DNA, 25 bp, Homo sapien
ccagtacggtattggactgcaaatc

SEQ ID NO: 2309694 - DNA, 25 bp, Homo sapien
gggccagtacggtattggactgcaa

SEQ ID NO: 2309695 - DNA, 25 bp, Homo sapien
tattaggaactattgcacgtaccgc

SEQ ID NO: 2309696 - DNA, 25 bp, Homo sapien
ttatcaaagtgctgcaaaaccagga

SEQ ID NO: 2309697 - DNA, 25 bp, Homo sapien
aaaaccaggataatttcattgttgc

SEQ ID NO: 2309698 - DNA, 25 bp, Homo sapien
tttcattgttgctcttattaggaac

SEQ ID NO: 2309699 - DNA, 25 bp, Homo sapien
ttcttgcctgttactgtccattctt

SEQ ID NO: 2309700 - DNA, 25 bp, Homo sapien
ctgtccattctttgagtacttcact

SEQ ID NO: 2309701 - DNA, 25 bp, Homo sapien
ctttttcttgcctgttactgtccat

SEQ ID NO: 2309702 - DNA, 25 bp, Homo sapien
tctttgagtacttcactggcactac

SEQ ID NO: 2309703 - DNA, 25 bp, Homo sapien
aataatatacacatcatcatgcttt

SEQ ID NO: 2309704 - DNA, 25 bp, Homo sapien
caggtaaacagaagatatgtatgtg

SEQ ID NO: 2309705 - DNA, 25 bp, Homo sapien
aggtaaacagaagatatgtatgtga

SEQ ID NO: 2309706 - DNA, 25 bp, Homo sapien
tctagcatggcagactcgggatcct

SEQ ID NO: 2309707 - DNA, 25 bp, Homo sapien
ttctctgaggaaggcgcagactgtt

SEQ ID NO: 2309708 - DNA, 25 bp, Homo sapien
cagactcagtgtcattgatggcacc

SEQ ID NO: 2309709 - DNA, 25 bp, Homo sapien
gttctatccagcgtatctagcatgg

SEQ ID NO: 2309710 - DNA, 25 bp, Homo sapien
agttagatgatttccacaaaactga

SEQ ID NO: 2309711 - DNA, 25 bp, Homo sapien
gaacaagaattgtattttttcagcc

SEQ ID NO: 2309712 - DNA, 25 bp, Homo sapien
gaggtatttctctgctattaaccca

SEQ ID NO: 2309713 - DNA, 25 bp, Homo sapien
tggaacactagggttcaagttagat

SEQ ID NO: 2309714 - DNA, 25 bp, Homo sapien
ctgagtttctgtggtaggtcttgag

SEQ ID NO: 2309715 - DNA, 25 bp, Homo sapien
cattcctgggttgttgagaattgtg

SEQ ID NO: 2309716 - DNA, 25 bp, Homo sapien
tgaatagagtgcatagtcaaagact

SEQ ID NO: 2309717 - DNA, 25 bp, Homo sapien
acttggtctcaaaatcagagacacc

SEQ ID NO: 2309718 - DNA, 25 bp, Homo sapien
agtctgtcagaggactctagctcag

SEQ ID NO: 2309719 - DNA, 25 bp, Homo sapien
tcaacgccacatacttaagagaaaa

SEQ ID NO: 2309720 - DNA, 25 bp, Homo sapien
agctcagtaagagcatgaagttatg

SEQ ID NO: 2309721 - DNA, 25 bp, Homo sapien
gcatgaagttatgaagaggagtgaa

SEQ ID NO: 2309722 - DNA, 25 bp, Homo sapien
tctttaactacaactcgataccgtg

SEQ ID NO: 2309723 - DNA, 25 bp, Homo sapien
agacactgtgcagcgctggaggtct

SEQ ID NO: 2309724 - DNA, 25 bp, Homo sapien
cagcgctggaggtcttttacagatt

SEQ ID NO: 2309725 - DNA, 25 bp, Homo sapien
tcgataccgtgcaagagacactgtg

SEQ ID NO: 2309726 - DNA, 25 bp, Homo sapien
gatgaattatctagccccaaagtaa

SEQ ID NO: 2309727 - DNA, 25 bp, Homo sapien
aacagagacacagttaggtataacc

SEQ ID NO: 2309728 - DNA, 25 bp, Homo sapien
ggtataacctgagggaacagtctac

SEQ ID NO: 2309729 - DNA, 25 bp, Homo sapien
tcaggacaaggcatgggtagactaa

SEQ ID NO: 2309730 - DNA, 25 bp, Homo sapien
tggtgccaaatggagttagctcact

SEQ ID NO: 2309731 - DNA, 25 bp, Homo sapien
tacacagttcccaggtaggaaacca

SEQ ID NO: 2309732 - DNA, 25 bp, Homo sapien
aactcaatcaaccagagcaaagggc

SEQ ID NO: 2309733 - DNA, 25 bp, Homo sapien
caaagggctttatactagcaggaaa

SEQ ID NO: 2309734 - DNA, 25 bp, Homo sapien
ggcacgtgtcattgcgcccagttaa

SEQ ID NO: 2309735 - DNA, 25 bp, Homo sapien
caactgtaataatcgccaagtgtca

SEQ ID NO: 2309736 - DNA, 25 bp, Homo sapien
gagaacagacgaatacagcctcccg

SEQ ID NO: 2309737 - DNA, 25 bp, Homo sapien
actgtttttgtggtagtaggtctca

SEQ ID NO: 2309738 - DNA, 25 bp, Homo sapien
tgcaatcgtattaaccggtaaatca

SEQ ID NO: 2309739 - DNA, 25 bp, Homo sapien
taattgagctcagtaaatagcggca

SEQ ID NO: 2309740 - DNA, 25 bp, Homo sapien
gtgaaccgatattgcgccactacat

SEQ ID NO: 2309741 - DNA, 25 bp, Homo sapien
taacatgaacgtaataccacaagtg

SEQ ID NO: 2309742 - DNA, 25 bp, Homo sapien
tgtctatcatttgaagcaagtcctc

SEQ ID NO: 2309743 - DNA, 25 bp, Homo sapien
agctgttactgaagcatccccattg

SEQ ID NO: 2309744 - DNA, 25 bp, Homo sapien
gcaagtcctctaattaatatacaga

SEQ ID NO: 2309745 - DNA, 25 bp, Homo sapien
gagattctagctcttgccttcaata

SEQ ID NO: 2309746 - DNA, 25 bp, Homo sapien
aaatcaccttaagatgcagacgctg

SEQ ID NO: 2309747 - DNA, 25 bp, Homo sapien
gagctgccaggcctacagtttgaca

SEQ ID NO: 2309748 - DNA, 25 bp, Homo sapien
gaaaagtcctatgatgtcagcccag

SEQ ID NO: 2309749 - DNA, 25 bp, Homo sapien
tcataggactgtgcatggacaacca

SEQ ID NO: 2309750 - DNA, 25 bp, Homo sapien
tccaagaactctagcagcattggaa

SEQ ID NO: 2309751 - DNA, 25 bp, Homo sapien
aagaactctagcagcattggaatac

SEQ ID NO: 2309752 - DNA, 25 bp, Homo sapien
gctccaagaactctagcagcattgg

SEQ ID NO: 2309753 - DNA, 25 bp, Homo sapien
cttggcaatattttgctccaagaac

SEQ ID NO: 2309754 - DNA, 25 bp, Homo sapien
tagtaccctagtattcaacctctgg

SEQ ID NO: 2309755 - DNA, 25 bp, Homo sapien
tacaaaaatgtctaaggcagggtca

SEQ ID NO: 2309756 - DNA, 25 bp, Homo sapien
tgttgttataaaagagcccacagcc

SEQ ID NO: 2309757 - DNA, 25 bp, Homo sapien
tagggaagtgccagagaacataggt

SEQ ID NO: 2309758 - DNA, 25 bp, Homo sapien
caccacgctcgtctattttttttgt

SEQ ID NO: 2309759 - DNA, 25 bp, Homo sapien
ccacgctcgtctattttttttgtat

SEQ ID NO: 2309760 - DNA, 25 bp, Homo sapien
tgtagacgtctaagagttgagaacc

SEQ ID NO: 2309761 - DNA, 25 bp, Homo sapien
tgctaaagcaaaagtccgtgtggaa

SEQ ID NO: 2309762 - DNA, 25 bp, Homo sapien
tgcagcagtacaccaattgtagacg

SEQ ID NO: 2309763 - DNA, 25 bp, Homo sapien
accagtgagtttgtttgctaaaagc

SEQ ID NO: 2309764 - DNA, 25 bp, Homo sapien
ttcagcaagcaacgccacttctcga

SEQ ID NO: 2309765 - DNA, 25 bp, Homo sapien
aagcaacgccacttctcgatccatt

SEQ ID NO: 2309766 - DNA, 25 bp, Homo sapien
gcaacgccacttctcgatccattaa

SEQ ID NO: 2309767 - DNA, 25 bp, Homo sapien
gtccatttcagcaagcaacgccact

SEQ ID NO: 2309768 - DNA, 25 bp, Homo sapien
aaatattcatctagagtaagttggg

SEQ ID NO: 2309769 - DNA, 25 bp, Homo sapien
cacaaatggaagtatatcatacaca

SEQ ID NO: 2309770 - DNA, 25 bp, Homo sapien
tcttacgtacacatccaaatattgt

SEQ ID NO: 2309771 - DNA, 25 bp, Homo sapien
tctccaggggaaacgactgttcacc

SEQ ID NO: 2309772 - DNA, 25 bp, Homo sapien
tctgacatttgaacagccacatgag

SEQ ID NO: 2309773 - DNA, 25 bp, Homo sapien
tgatatcagctctgagctcaaccaa

SEQ ID NO: 2309774 - DNA, 25 bp, Homo sapien
gctcaaccaattgctgctctgacat

SEQ ID NO: 2309775 - DNA, 25 bp, Homo sapien
tctttagaagttcagccttcttttg

SEQ ID NO: 2309776 - DNA, 25 bp, Homo sapien
ctctacatcacaggtgaaccgggct

SEQ ID NO: 2309777 - DNA, 25 bp, Homo sapien
caatgctcttctttagggtctctac

SEQ ID NO: 2309778 - DNA, 25 bp, Homo sapien
catatttacgttcactaacaaagtg

SEQ ID NO: 2309779 - DNA, 25 bp, Homo sapien
tcgtcccagatcctcatcatattta

SEQ ID NO: 2309780 - DNA, 25 bp, Homo sapien
caaacttgatctgactgtagggccc

SEQ ID NO: 2309781 - DNA, 25 bp, Homo sapien
gttatctccactctggagaggagta

SEQ ID NO: 2309782 - DNA, 25 bp, Homo sapien
tgtagggccccatgctctttatacc

SEQ ID NO: 2309783 - DNA, 25 bp, Homo sapien
gagcctcggcgcgtggcctgttatc

SEQ ID NO: 2309784 - DNA, 25 bp, Homo sapien
gcaggagtctctcccggtgcaaagt

SEQ ID NO: 2309785 - DNA, 25 bp, Homo sapien
gtaactgagctacatcgggatctgg

SEQ ID NO: 2309786 - DNA, 25 bp, Homo sapien
acttgggctactcaaggacacagat

SEQ ID NO: 2309787 - DNA, 25 bp, Homo sapien
cgggatctggtcgaatagctgttct

SEQ ID NO: 2309788 - DNA, 25 bp, Homo sapien
gtttctgtaacgacccatactgtca

SEQ ID NO: 2309789 - DNA, 25 bp, Homo sapien
ggaaccagatgaataccacgagctg

SEQ ID NO: 2309790 - DNA, 25 bp, Homo sapien
tgtcatgccgcccttggttcatggg

SEQ ID NO: 2309791 - DNA, 25 bp, Homo sapien
tcattggacttttggccttgtggcc

SEQ ID NO: 2309792 - DNA, 25 bp, Homo sapien
tctgagaggtcctgggtttgcgctg

SEQ ID NO: 2309793 - DNA, 25 bp, Homo sapien
ccctttttgaatgaaggcgtgggag

SEQ ID NO: 2309794 - DNA, 25 bp, Homo sapien
atgctgactccagttccattggtcc

SEQ ID NO: 2309795 - DNA, 25 bp, Homo sapien
ttgcgctgggggagcccctttttga

SEQ ID NO: 2309796 - DNA, 25 bp, Homo sapien
cacctgtggcttcggcttagattgg

SEQ ID NO: 2309797 - DNA, 25 bp, Homo sapien
cagcctggacagtggagggatcaac

SEQ ID NO: 2309798 - DNA, 25 bp, Homo sapien
ggatcaactggaaggccgaaacctg

SEQ ID NO: 2309799 - DNA, 25 bp, Homo sapien
tagacttccctagactggtttgcaa

SEQ ID NO: 2309800 - DNA, 25 bp, Homo sapien
tcagacttgggagaacacatgccag

SEQ ID NO: 2309801 - DNA, 25 bp, Homo sapien
tacacgcaggagctcaattatacgg

SEQ ID NO: 2309802 - DNA, 25 bp, Homo sapien
tgcacggctgccacttacagtctgg

SEQ ID NO: 2309803 - DNA, 25 bp, Homo sapien
ttcactcagccaaggaggcaaggga

SEQ ID NO: 2309804 - DNA, 25 bp, Homo sapien
aaacatgccttgtcccatctgtctg

SEQ ID NO: 2309805 - DNA, 25 bp, Homo sapien
tacggtcttgcctggatacagggac

SEQ ID NO: 2309806 - DNA, 25 bp, Homo sapien
ggacagacctcataatccttcaagg

SEQ ID NO: 2309807 - DNA, 25 bp, Homo sapien
tcaaggtcacttcaatctctggatt

SEQ ID NO: 2309808 - DNA, 25 bp, Homo sapien
cgtcggggggcaatgcgcagaccgg

SEQ ID NO: 2309809 - DNA, 25 bp, Homo sapien
cgcgagggggcgtccgcgccgtcgg

SEQ ID NO: 2309810 - DNA, 25 bp, Homo sapien
ggcaatgcgcagaccgggatccggg

SEQ ID NO: 2309811 - DNA, 25 bp, Homo sapien
ggtcgcgccggacgctggcgcgcga

SEQ ID NO: 2309812 - DNA, 25 bp, Homo sapien
cgcgccgggggagggcgcccagctc

SEQ ID NO: 2309813 - DNA, 25 bp, Homo sapien
gccgggggagggcgcccagctcggc

SEQ ID NO: 2309814 - DNA, 25 bp, Homo sapien
cttaggcgcccgcggctgcccgccc

SEQ ID NO: 2309815 - DNA, 25 bp, Homo sapien
ctgcccgccccatccctccggggtg

SEQ ID NO: 2309816 - DNA, 25 bp, Homo sapien
tcgaagcgcgtagcgatggtgtcca

SEQ ID NO: 2309817 - DNA, 25 bp, Homo sapien
cgtgccgtcgaagcgcgtagcgatg

SEQ ID NO: 2309818 - DNA, 25 bp, Homo sapien
ccgtcgaagcgcgtagcgatggtgt

SEQ ID NO: 2309819 - DNA, 25 bp, Homo sapien
gcgtgccgtcgaagcgcgtagcgat

SEQ ID NO: 2309820 - DNA, 25 bp, Homo sapien
ctgttgcctcgcctgaagcagtgtt

SEQ ID NO: 2309821 - DNA, 25 bp, Homo sapien
ctgaagcagtgttgaccccgaacct

SEQ ID NO: 2309822 - DNA, 25 bp, Homo sapien
ttctggccctgttgcctcgcctgaa

SEQ ID NO: 2309823 - DNA, 25 bp, Homo sapien
aagcagtgttgaccccgaaccttcg

SEQ ID NO: 2309824 - DNA, 25 bp, Homo sapien
tgaactccttgtgctcgtccagggc

SEQ ID NO: 2309825 - DNA, 25 bp, Homo sapien
gatctgttggcggacgagctcactg

SEQ ID NO: 2309826 - DNA, 25 bp, Homo sapien
gctgcatgacctcagcccgggagaa

SEQ ID NO: 2309827 - DNA, 25 bp, Homo sapien
tgtctggcccataaaggaaggagca

SEQ ID NO: 2309828 - DNA, 25 bp, Homo sapien
ccctgccgaaatgcggatgtttttc

SEQ ID NO: 2309829 - DNA, 25 bp, Homo sapien
gaaacccgaggttggaactgaatgc

SEQ ID NO: 2309830 - DNA, 25 bp, Homo sapien
tttctgttggatgcgggaaacccga

SEQ ID NO: 2309831 - DNA, 25 bp, Homo sapien
ctgtcgtgtggtagatctgccctgc

SEQ ID NO: 2309832 - DNA, 25 bp, Homo sapien
tgatgtccttgtgagagactaggaa

SEQ ID NO: 2309833 - DNA, 25 bp, Homo sapien
catctgtcggggccccctcggttct

SEQ ID NO: 2309834 - DNA, 25 bp, Homo sapien
ctgatgtccttgtgagagactagga

SEQ ID NO: 2309835 - DNA, 25 bp, Homo sapien
tcttggtttcgctgatgtccttgtg

SEQ ID NO: 2309836 - DNA, 25 bp, Homo sapien
tgcttctgcaggtgcccggacaggt

SEQ ID NO: 2309837 - DNA, 25 bp, Homo sapien
aggtggtagagcacggcccggctcc

SEQ ID NO: 2309838 - DNA, 25 bp, Homo sapien
ttgaagcctttggatcgtgcccggc

SEQ ID NO: 2309839 - DNA, 25 bp, Homo sapien
gctccgccgccggttggcattgaag

SEQ ID NO: 2309840 - DNA, 25 bp, Homo sapien
tgtggcgagcaggatgaagccatcc

SEQ ID NO: 2309841 - DNA, 25 bp, Homo sapien
gatggcggctactttgtactcaggc

SEQ ID NO: 2309842 - DNA, 25 bp, Homo sapien
tgcaacaggatgaagggcgacttcc

SEQ ID NO: 2309843 - DNA, 25 bp, Homo sapien
cacacacgctgtagggcacagtgac

SEQ ID NO: 2309844 - DNA, 25 bp, Homo sapien
ggcccttcccatacatcgtcttagt

SEQ ID NO: 2309845 - DNA, 25 bp, Homo sapien
tacatcgtcttagttctcacagtaa

SEQ ID NO: 2309846 - DNA, 25 bp, Homo sapien
cactttctcagtagttgacactgtc

SEQ ID NO: 2309847 - DNA, 25 bp, Homo sapien
tcagtagttgacactgtccccggcc

SEQ ID NO: 2309848 - DNA, 25 bp, Homo sapien
caaagggcagcgctgcgatgacatc

SEQ ID NO: 2309849 - DNA, 25 bp, Homo sapien
tggcccgacttggacacgaatgtgg

SEQ ID NO: 2309850 - DNA, 25 bp, Homo sapien
ccttgaaggcatgtagcaggtcaaa

SEQ ID NO: 2309851 - DNA, 25 bp, Homo sapien
tgacgtagtggaggcaaatggactt

SEQ ID NO: 2309852 - DNA, 25 bp, Homo sapien
cgcagcaggcgcaccgtcttcagca

SEQ ID NO: 2309853 - DNA, 25 bp, Homo sapien
tccagccgcggaagcaggcgcagca

SEQ ID NO: 2309854 - DNA, 25 bp, Homo sapien
ctgcgagtaccggtccagccgcgga

SEQ ID NO: 2309855 - DNA, 25 bp, Homo sapien
agtaccggtccagccgcggaagcag

SEQ ID NO: 2309856 - DNA, 25 bp, Homo sapien
acccagtgcgcgagcagggcgaaca

SEQ ID NO: 2309857 - DNA, 25 bp, Homo sapien
agcagggcgaacacggccatgagca

SEQ ID NO: 2309858 - DNA, 25 bp, Homo sapien
caatgtaaaaccagacgcaggcgac

SEQ ID NO: 2309859 - DNA, 25 bp, Homo sapien
ctcgatctcccgctggccaatgtaa

SEQ ID NO: 2309860 - DNA, 25 bp, Homo sapien
cacatgcagagggagcctccagtac

SEQ ID NO: 2309861 - DNA, 25 bp, Homo sapien
ctggaagctgacaaagggctggagg

SEQ ID NO: 2309862 - DNA, 25 bp, Homo sapien
tggaagctgacaaagggctggaggg

SEQ ID NO: 2309863 - DNA, 25 bp, Homo sapien
ggtcttcttaatgtcagatcagcaa

SEQ ID NO: 2309864 - DNA, 25 bp, Homo sapien
gtcttcttaatgtcagatcagcaac

SEQ ID NO: 2309865 - DNA, 25 bp, Homo sapien
gagattcttgggagctgaaggtctt

SEQ ID NO: 2309866 - DNA, 25 bp, Homo sapien
aggtcttcttaatgtcagatcagca

SEQ ID NO: 2309867 - DNA, 25 bp, Homo sapien
cggcccaccaggtagtagggagtct

SEQ ID NO: 2309868 - DNA, 25 bp, Homo sapien
ggtagtagggagtctccagtcggcg

SEQ ID NO: 2309869 - DNA, 25 bp, Homo sapien
tagggagtctccagtcggcgggcca

SEQ ID NO: 2309870 - DNA, 25 bp, Homo sapien
ggagtctccagtcggcgggccagct

SEQ ID NO: 2309871 - DNA, 25 bp, Homo sapien
cagccccgtcccgttggcctcgctg

SEQ ID NO: 2309872 - DNA, 25 bp, Homo sapien
tccagccccgtcccgttggcctcgc

SEQ ID NO: 2309873 - DNA, 25 bp, Homo sapien
gccccgtcccgttggcctcgctgct

SEQ ID NO: 2309874 - DNA, 25 bp, Homo sapien
ccccgtcccgttggcctcgctgctg

SEQ ID NO: 2309875 - DNA, 25 bp, Homo sapien
gctgctgagtgcgaagtagagggag

SEQ ID NO: 2309876 - DNA, 25 bp, Homo sapien
aagatcttctcggtgtccgtgttgg

SEQ ID NO: 2309877 - DNA, 25 bp, Homo sapien
tagagggaggtgatgtaggcgctgc

SEQ ID NO: 2309878 - DNA, 25 bp, Homo sapien
ccgtgttggcggacacgttgccgaa

SEQ ID NO: 2309879 - DNA, 25 bp, Homo sapien
tgccattgttcaccgcccaggtggc

SEQ ID NO: 2309880 - DNA, 25 bp, Homo sapien
caggtggcctggaagtactccagca

SEQ ID NO: 2309881 - DNA, 25 bp, Homo sapien
tgcggatgtagtcgcgcaggtcgcg

SEQ ID NO: 2309882 - DNA, 25 bp, Homo sapien
tcgcgcgtgcggctgtggtacagaa

SEQ ID NO: 2309883 - DNA, 25 bp, Homo sapien
tggccgcctcaaacagtggcagctg

SEQ ID NO: 2309884 - DNA, 25 bp, Homo sapien
ccagagcagacaaagtagagggcct

SEQ ID NO: 2309885 - DNA, 25 bp, Homo sapien
ctaggatggcgagcacggtgccacc

SEQ ID NO: 2309886 - DNA, 25 bp, Homo sapien
tgcatggcgatgtctgcgcgcagct

SEQ ID NO: 2309887 - DNA, 25 bp, Homo sapien
agacacagccccatgtttccctgag

SEQ ID NO: 2309888 - DNA, 25 bp, Homo sapien
agctaccgcgcccggtcctttagtg

SEQ ID NO: 2309889 - DNA, 25 bp, Homo sapien
aactctccaaatcctagagtgcagg

SEQ ID NO: 2309890 - DNA, 25 bp, Homo sapien
ccctgagagttagaatgtgctccca

SEQ ID NO: 2309891 - DNA, 25 bp, Homo sapien
gattcgatgtcgtcagcagtggtca

SEQ ID NO: 2309892 - DNA, 25 bp, Homo sapien
ctattctgagacgtggtgcctggca

SEQ ID NO: 2309893 - DNA, 25 bp, Homo sapien
tacacgtgccttggctgcctgagga

SEQ ID NO: 2309894 - DNA, 25 bp, Homo sapien
cataaaccgcatgtaggcaccaaag

SEQ ID NO: 2309895 - DNA, 25 bp, Homo sapien
cagggcatctagagcctccaagtca

SEQ ID NO: 2309896 - DNA, 25 bp, Homo sapien
gtcaacagggaagtagttcacccaa

SEQ ID NO: 2309897 - DNA, 25 bp, Homo sapien
tagaaggtgacaggatggatcaacg

SEQ ID NO: 2309898 - DNA, 25 bp, Homo sapien
gatcaacggtggcataagtcctggt

SEQ ID NO: 2309899 - DNA, 25 bp, Homo sapien
tgcagacactgcaggacgcagtacg

SEQ ID NO: 2309900 - DNA, 25 bp, Homo sapien
gtcagccccttcacgtcggcattgg

SEQ ID NO: 2309901 - DNA, 25 bp, Homo sapien
tacagcgcaaggctgtcgtgcaggc

SEQ ID NO: 2309902 - DNA, 25 bp, Homo sapien
gggcagctcacagccgatcaggtcg

SEQ ID NO: 2309903 - DNA, 25 bp, Homo sapien
taagggtattgtcgccgctcaggga

SEQ ID NO: 2309904 - DNA, 25 bp, Homo sapien
ccagcgtggacataagggtattgtc

SEQ ID NO: 2309905 - DNA, 25 bp, Homo sapien
cctccagcgtggacataagggtatt

SEQ ID NO: 2309906 - DNA, 25 bp, Homo sapien
tggacataagggtattgtcgccgct

SEQ ID NO: 2309907 - DNA, 25 bp, Homo sapien
agacgaggccggggtgctgttcgac

SEQ ID NO: 2309908 - DNA, 25 bp, Homo sapien
ctagacgaggccggggtgctgttcg

SEQ ID NO: 2309909 - DNA, 25 bp, Homo sapien
tagacgaggccggggtgctgttcga

SEQ ID NO: 2309910 - DNA, 25 bp, Homo sapien
ctcagccttcaaagcccctgccctg

SEQ ID NO: 2309911 - DNA, 25 bp, Homo sapien
ccagcctcagccttcaaagcccctg

SEQ ID NO: 2309912 - DNA, 25 bp, Homo sapien
ctagggcccgtgggggagcagaggg

SEQ ID NO: 2309913 - DNA, 25 bp, Homo sapien
agcctcagccttcaaagcccctgcc

SEQ ID NO: 2309914 - DNA, 25 bp, Homo sapien
tggggctcagatctgggggcacatt

SEQ ID NO: 2309915 - DNA, 25 bp, Homo sapien
acattccatggcatggggggcagcc

SEQ ID NO: 2309916 - DNA, 25 bp, Homo sapien
ctggggctcagatctgggggcacat

SEQ ID NO: 2309917 - DNA, 25 bp, Homo sapien
ttccatggcatggggggcagccgta

SEQ ID NO: 2309918 - DNA, 25 bp, Homo sapien
gagaaagctaacatggggtcccttc

SEQ ID NO: 2309919 - DNA, 25 bp, Homo sapien
tgcaggagcgtggaactgaccagga

SEQ ID NO: 2309920 - DNA, 25 bp, Homo sapien
gagcgtggaactgaccaggagccca

SEQ ID NO: 2309921 - DNA, 25 bp, Homo sapien
caggagcccaggagaaagctaacat

SEQ ID NO: 2309922 - DNA, 25 bp, Homo sapien
caacaaatcaatggacaggcagcca

SEQ ID NO: 2309923 - DNA, 25 bp, Homo sapien
gggtcatacgggacgggatgcccca

SEQ ID NO: 2309924 - DNA, 25 bp, Homo sapien
acaacaaatcaatggacaggcagcc

SEQ ID NO: 2309925 - DNA, 25 bp, Homo sapien
tacgggacgggatgccccagcgtcc

SEQ ID NO: 2309926 - DNA, 25 bp, Homo sapien
agagaacttgggctggtccgagcca

SEQ ID NO: 2309927 - DNA, 25 bp, Homo sapien
gcggaaagagaacttgggctggtcc

SEQ ID NO: 2309928 - DNA, 25 bp, Homo sapien
tggtccgagccacagccgtcttcaa

SEQ ID NO: 2309929 - DNA, 25 bp, Homo sapien
agccgtcttcaatgccatctactac

SEQ ID NO: 2309930 - DNA, 25 bp, Homo sapien
gggctgctgctacattccgggccag

SEQ ID NO: 2309931 - DNA, 25 bp, Homo sapien
ggctgctgctacattccgggccaga

SEQ ID NO: 2309932 - DNA, 25 bp, Homo sapien
tgctgctacattccgggccagactg

SEQ ID NO: 2309933 - DNA, 25 bp, Homo sapien
tgctacattccgggccagactggcc

SEQ ID NO: 2309934 - DNA, 25 bp, Homo sapien
tagtaggatggggttatcagctggg

SEQ ID NO: 2309935 - DNA, 25 bp, Homo sapien
gggtagtaggatggggttatcagct

SEQ ID NO: 2309936 - DNA, 25 bp, Homo sapien
ctgtgggtagtaggatggggttatc

SEQ ID NO: 2309937 - DNA, 25 bp, Homo sapien
tgggtagtaggatggggttatcagc

SEQ ID NO: 2309938 - DNA, 25 bp, Homo sapien
gtgttccttgcctcgctgggcccat

SEQ ID NO: 2309939 - DNA, 25 bp, Homo sapien
cctgccgaagcttgtccagtgtgtc

SEQ ID NO: 2309940 - DNA, 25 bp, Homo sapien
tgtgttccttgcctcgctgggccca

SEQ ID NO: 2309941 - DNA, 25 bp, Homo sapien
gtgactgcagtccttcccgcatctg

SEQ ID NO: 2309942 - DNA, 25 bp, Homo sapien
gactgcagtccttcccgcatctgca

SEQ ID NO: 2309943 - DNA, 25 bp, Homo sapien
gctgcacagcctggcgaagtgactg

SEQ ID NO: 2309944 - DNA, 25 bp, Homo sapien
cagtccttcccgcatctgcagcacc

SEQ ID NO: 2309945 - DNA, 25 bp, Homo sapien
gcacggcccctctcccgatgcccga

SEQ ID NO: 2309946 - DNA, 25 bp, Homo sapien
tgggcacggcccctctcccgatgcc

SEQ ID NO: 2309947 - DNA, 25 bp, Homo sapien
tctcccgatgcccgagggcacggac

SEQ ID NO: 2309948 - DNA, 25 bp, Homo sapien
ctctcccgatgcccgagggcacgga

SEQ ID NO: 2309949 - DNA, 25 bp, Homo sapien
ggtggggccaagtcccactcaagac

SEQ ID NO: 2309950 - DNA, 25 bp, Homo sapien
ctgcaggcagtaggaggatgcccca

SEQ ID NO: 2309951 - DNA, 25 bp, Homo sapien
caagtcccactcaagacagagccag

SEQ ID NO: 2309952 - DNA, 25 bp, Homo sapien
cagggtgccatgaggggaggaggcc

SEQ ID NO: 2309953 - DNA, 25 bp, Homo sapien
gtccagaaagctgtggctcgaggcc

SEQ ID NO: 2309954 - DNA, 25 bp, Homo sapien
tggctcgaggccagggggagctctg

SEQ ID NO: 2309955 - DNA, 25 bp, Homo sapien
tcagagcagaggtctcctgaggcag

SEQ ID NO: 2309956 - DNA, 25 bp, Homo sapien
tctccagtgctggtagcctcagcct

SEQ ID NO: 2309957 - DNA, 25 bp, Homo sapien
ttcttcctgggtccactggactgtg

SEQ ID NO: 2309958 - DNA, 25 bp, Homo sapien
gcagccaataagcaccatctccagg

SEQ ID NO: 2309959 - DNA, 25 bp, Homo sapien
tgtgccagagccatggcagccaata

SEQ ID NO: 2309960 - DNA, 25 bp, Homo sapien
cttcctgggtccactggactgtgcc

SEQ ID NO: 2309961 - DNA, 25 bp, Homo sapien
gagggagaccgggaggtcagaggag

SEQ ID NO: 2309962 - DNA, 25 bp, Homo sapien
tcactctgaggttgggccgaacagc

SEQ ID NO: 2309963 - DNA, 25 bp, Homo sapien
atggcagcacacctggcaacgctga

SEQ ID NO: 2309964 - DNA, 25 bp, Homo sapien
ctgagagtcaggagccaggtcctcc

SEQ ID NO: 2309965 - DNA, 25 bp, Homo sapien
gcaggggatggcaaagctcttcctt

SEQ ID NO: 2309966 - DNA, 25 bp, Homo sapien
agtctgacctgagcaccatgtgctg

SEQ ID NO: 2309967 - DNA, 25 bp, Homo sapien
gcgtgtcggcatcaccagtctgacc

SEQ ID NO: 2309968 - DNA, 25 bp, Homo sapien
cagagggagcagttatgcccagagc

SEQ ID NO: 2309969 - DNA, 25 bp, Homo sapien
gagctgctgctctttagcacggctg

SEQ ID NO: 2309970 - DNA, 25 bp, Homo sapien
gaagtagacgtacctcacggaagcc

SEQ ID NO: 2309971 - DNA, 25 bp, Homo sapien
ggctttggccctgcggctgctaccg

SEQ ID NO: 2309972 - DNA, 25 bp, Homo sapien
ccttcacacacgttgccaagacgaa

SEQ ID NO: 2309973 - DNA, 25 bp, Homo sapien
acgaaccggaagagattgccagccc

SEQ ID NO: 2309974 - DNA, 25 bp, Homo sapien
tggaagtcgaaatccagtccgcggt

SEQ ID NO: 2309975 - DNA, 25 bp, Homo sapien
gagtcaaacaatgcataaggtcctg

SEQ ID NO: 2309976 - DNA, 25 bp, Homo sapien
taaggtcctgtgcaaccctcagact

SEQ ID NO: 2309977 - DNA, 25 bp, Homo sapien
caggcgggcctgatagaagtttctc

SEQ ID NO: 2309978 - DNA, 25 bp, Homo sapien
gactttagtacctcgcaaaggaagc

SEQ ID NO: 2309979 - DNA, 25 bp, Homo sapien
catagtataccgtcagggccaaaag

SEQ ID NO: 2309980 - DNA, 25 bp, Homo sapien
taaatgaggttggtactctcgaagc

SEQ ID NO: 2309981 - DNA, 25 bp, Homo sapien
tctcgaagcagagggccatagtata

SEQ ID NO: 2309982 - DNA, 25 bp, Homo sapien
tatctcagagggtttcaatctgtgc

SEQ ID NO: 2309983 - DNA, 25 bp, Homo sapien
ttcaatctgtgcatgagaatcttcc

SEQ ID NO: 2309984 - DNA, 25 bp, Homo sapien
gtttcaatctgtgcatgagaatctt

SEQ ID NO: 2309985 - DNA, 25 bp, Homo sapien
ctagggggttgatatctcagagggt

SEQ ID NO: 2309986 - DNA, 25 bp, Homo sapien
tctgaggatgctactgaagcaacat

SEQ ID NO: 2309987 - DNA, 25 bp, Homo sapien
gcaacatggttatccctgatgcaaa

SEQ ID NO: 2309988 - DNA, 25 bp, Homo sapien
tattcaggttgcgtactctgttggt

SEQ ID NO: 2309989 - DNA, 25 bp, Homo sapien
tctgatggttatctaagtgttcctc

SEQ ID NO: 2309990 - DNA, 25 bp, Homo sapien
atggaggactttgaccttctgcacg

SEQ ID NO: 2309991 - DNA, 25 bp, Homo sapien
gcctggtggctgaacttgctctggt

SEQ ID NO: 2309992 - DNA, 25 bp, Homo sapien
tgcacgtcctctagcgagctctctg

SEQ ID NO: 2309993 - DNA, 25 bp, Homo sapien
tctggcaagcatgcagagtgtctga

SEQ ID NO: 2309994 - DNA, 25 bp, Homo sapien
aaggctgagactccagaaagctgag

SEQ ID NO: 2309995 - DNA, 25 bp, Homo sapien
ggaatggcgcccatccttgcttcca

SEQ ID NO: 2309996 - DNA, 25 bp, Homo sapien
gaacagctggttctgtggatgatgc

SEQ ID NO: 2309997 - DNA, 25 bp, Homo sapien
atgtccagcggttctcttcctcagg

SEQ ID NO: 2309998 - DNA, 25 bp, Homo sapien
ggtccgctattttggcatgaggatc

SEQ ID NO: 2309999 - DNA, 25 bp, Homo sapien
tggccgtgctgcctcctttgggcgt

SEQ ID NO: 2310000 - DNA, 25 bp, Homo sapien
cctgtttactgcgttgatctcacca

SEQ ID NO: 2310001 - DNA, 25 bp, Homo sapien
tttgggcgtgccctcctggacattg

SEQ ID NO: 2310002 - DNA, 25 bp, Homo sapien
aattctagtcaccttggcttccctg

SEQ ID NO: 2310003 - DNA, 25 bp, Homo sapien
cctgttgtctgaatgggtatacatc

SEQ ID NO: 2310004 - DNA, 25 bp, Homo sapien
ggcttccctgatacccagatgctgt

SEQ ID NO: 2310005 - DNA, 25 bp, Homo sapien
gaccatgccctatgggttaggaacc

SEQ ID NO: 2310006 - DNA, 25 bp, Homo sapien
cacagaggccatgctagtagtcttc

SEQ ID NO: 2310007 - DNA, 25 bp, Homo sapien
tgcacagaggccatgctagtagtct

SEQ ID NO: 2310008 - DNA, 25 bp, Homo sapien
cagaggccatgctagtagtcttctc

SEQ ID NO: 2310009 - DNA, 25 bp, Homo sapien
agtcttctctgtattattccaactt

SEQ ID NO: 2310010 - DNA, 25 bp, Homo sapien
tgtgagcccctttttactctgagtg

SEQ ID NO: 2310011 - DNA, 25 bp, Homo sapien
cccggcctgtgtaagatattttgag

SEQ ID NO: 2310012 - DNA, 25 bp, Homo sapien
ggtactgaggtttcaggcgtccact

SEQ ID NO: 2310013 - DNA, 25 bp, Homo sapien
aatgtcctgggtgtcattgtgagcc

SEQ ID NO: 2310014 - DNA, 25 bp, Homo sapien
ttcctaacaataatgtgagcatatt

SEQ ID NO: 2310015 - DNA, 25 bp, Homo sapien
catgctattgtagaactattttata

SEQ ID NO: 2310016 - DNA, 25 bp, Homo sapien
gctattgtagaactattttatacta

SEQ ID NO: 2310017 - DNA, 25 bp, Homo sapien
tgtagaactattttatactaagact

SEQ ID NO: 2310018 - DNA, 25 bp, Homo sapien
gatagtggctataaggcccttctgg

SEQ ID NO: 2310019 - DNA, 25 bp, Homo sapien
tagaactactatgtcatatggtccc

SEQ ID NO: 2310020 - DNA, 25 bp, Homo sapien
tcattttgtccttagcaagcgggag

SEQ ID NO: 2310021 - DNA, 25 bp, Homo sapien
accttaatcccagcttgcctcatga

SEQ ID NO: 2310022 - DNA, 25 bp, Homo sapien
tctaccattgttttgtctagagcga

SEQ ID NO: 2310023 - DNA, 25 bp, Homo sapien
tgtgacttcacaactatacttcggc

SEQ ID NO: 2310024 - DNA, 25 bp, Homo sapien
cggcaaaagcagtaatgacggtggc

SEQ ID NO: 2310025 - DNA, 25 bp, Homo sapien
agtaatgacggtggcttctgaacac

SEQ ID NO: 2310026 - DNA, 25 bp, Homo sapien
agcaacagcggagatgggtccagct

SEQ ID NO: 2310027 - DNA, 25 bp, Homo sapien
agctatcattagtgcctgccccaag

SEQ ID NO: 2310028 - DNA, 25 bp, Homo sapien
tcttcacacccaccagtcgatggag

SEQ ID NO: 2310029 - DNA, 25 bp, Homo sapien
gcagtggaatctggaagacctggcc

SEQ ID NO: 2310030 - DNA, 25 bp, Homo sapien
tctgacctatgagattgggcccagg

SEQ ID NO: 2310031 - DNA, 25 bp, Homo sapien
cagcagctctggacgaatggattga

SEQ ID NO: 2310032 - DNA, 25 bp, Homo sapien
tgtgaatttctacatggcaggcctc

SEQ ID NO: 2310033 - DNA, 25 bp, Homo sapien
gagaaagtgttaccgctgtccctca

SEQ ID NO: 2310034 - DNA, 25 bp, Homo sapien
tgagacccaaagaggctaagcgact

SEQ ID NO: 2310035 - DNA, 25 bp, Homo sapien
tgtccaaggtcacgctgctagcatg

SEQ ID NO: 2310036 - DNA, 25 bp, Homo sapien
caatgtcaattgtgtcatcaaccgc

SEQ ID NO: 2310037 - DNA, 25 bp, Homo sapien
tgtatgacattctccgctggctggg

SEQ ID NO: 2310038 - DNA, 25 bp, Homo sapien
cactgcaacccaggactcctgggtt

SEQ ID NO: 2310039 - DNA, 25 bp, Homo sapien
cagctcactgcaacccaggactcct

SEQ ID NO: 2310040 - DNA, 25 bp, Homo sapien
ccacacccagctaatttttatgttt

SEQ ID NO: 2310041 - DNA, 25 bp, Homo sapien
cacacccagctaatttttatgtttt

SEQ ID NO: 2310042 - DNA, 25 bp, Homo sapien
ttgtataatacatatgcaacaattg

SEQ ID NO: 2310043 - DNA, 25 bp, Homo sapien
atgtggatcagatgatgcaacattt

SEQ ID NO: 2310044 - DNA, 25 bp, Homo sapien
gatcagatgatgcaacattttagta

SEQ ID NO: 2310045 - DNA, 25 bp, Homo sapien
cctgctcttcagtttgtataataca

SEQ ID NO: 2310046 - DNA, 25 bp, Homo sapien
gaaaaactcctgacacgaagagtta

SEQ ID NO: 2310047 - DNA, 25 bp, Homo sapien
ctcctgacacgaagagttagaggtg

SEQ ID NO: 2310048 - DNA, 25 bp, Homo sapien
ggtagaaaaactcctgacacgaaga

SEQ ID NO: 2310049 - DNA, 25 bp, Homo sapien
aactcctgacacgaagagttagagg

SEQ ID NO: 2310050 - DNA, 25 bp, Homo sapien
agcccacccgccagtaagagccgct

SEQ ID NO: 2310051 - DNA, 25 bp, Homo sapien
tcgcaccccttcgtggccggggctc

SEQ ID NO: 2310052 - DNA, 25 bp, Homo sapien
cggctcagcccacccgccagtaaga

SEQ ID NO: 2310053 - DNA, 25 bp, Homo sapien
agtaagagccgctctgattggccag

SEQ ID NO: 2310054 - DNA, 25 bp, Homo sapien
tcccagctatccccagcggcctccc

SEQ ID NO: 2310055 - DNA, 25 bp, Homo sapien
agctatccccagcggcctccccgcc

SEQ ID NO: 2310056 - DNA, 25 bp, Homo sapien
ccagctatccccagcggcctccccg

SEQ ID NO: 2310057 - DNA, 25 bp, Homo sapien
cagctatccccagcggcctccccgc

SEQ ID NO: 2310058 - DNA, 25 bp, Homo sapien
gtcccgccactctcgcacctttcgc

SEQ ID NO: 2310059 - DNA, 25 bp, Homo sapien
cactctcgcacctttcgcccccggc

SEQ ID NO: 2310060 - DNA, 25 bp, Homo sapien
ccgccactctcgcacctttcgcccc

SEQ ID NO: 2310061 - DNA, 25 bp, Homo sapien
tctcgcacctttcgcccccggccag

SEQ ID NO: 2310062 - DNA, 25 bp, Homo sapien
atgtcgcacaccaaatatcccagga

SEQ ID NO: 2310063 - DNA, 25 bp, Homo sapien
ggaagggcatgtcgcacaccaaata

SEQ ID NO: 2310064 - DNA, 25 bp, Homo sapien
caaggtcacacagagtcgttagttt

SEQ ID NO: 2310065 - DNA, 25 bp, Homo sapien
ccctctccacctcaggagacaagct

SEQ ID NO: 2310066 - DNA, 25 bp, Homo sapien
gctgccccaaacagcacctgccctt

SEQ ID NO: 2310067 - DNA, 25 bp, Homo sapien
ctgccccaaacagcacctgcccttc

SEQ ID NO: 2310068 - DNA, 25 bp, Homo sapien
ggattcagacactggcctattctgg

SEQ ID NO: 2310069 - DNA, 25 bp, Homo sapien
ccaagtgtttagtcagggccctgca

SEQ ID NO: 2310070 - DNA, 25 bp, Homo sapien
tgctgtgataaaatgcagtctcatc

SEQ ID NO: 2310071 - DNA, 25 bp, Homo sapien
caacttgggatgaagacctctggcc

SEQ ID NO: 2310072 - DNA, 25 bp, Homo sapien
tgctgggggccggggaccagaatcg

SEQ ID NO: 2310073 - DNA, 25 bp, Homo sapien
cccggtgggaagggggcaggcgctg

SEQ ID NO: 2310074 - DNA, 25 bp, Homo sapien
cggtgggaagggggcaggcgctgct

SEQ ID NO: 2310075 - DNA, 25 bp, Homo sapien
aggcgctgctgggggccggggacca

SEQ ID NO: 2310076 - DNA, 25 bp, Homo sapien
gaagagatactgagcagggaagaca

SEQ ID NO: 2310077 - DNA, 25 bp, Homo sapien
ggaagagatactgagcagggaagac

SEQ ID NO: 2310078 - DNA, 25 bp, Homo sapien
aaggaagagatactgagcagggaag

SEQ ID NO: 2310079 - DNA, 25 bp, Homo sapien
taaaggaagagatactgagcaggga

SEQ ID NO: 2310080 - DNA, 25 bp, Homo sapien
gggatagctggtggtctctgactca

SEQ ID NO: 2310081 - DNA, 25 bp, Homo sapien
gtggcgcccccattggtggaagcat

SEQ ID NO: 2310082 - DNA, 25 bp, Homo sapien
aagcattgggggcaggatgccaggt

SEQ ID NO: 2310083 - DNA, 25 bp, Homo sapien
actcatggggggtagccccatcgga

SEQ ID NO: 2310084 - DNA, 25 bp, Homo sapien
tacaaagaagacagaaaccaaccac

SEQ ID NO: 2310085 - DNA, 25 bp, Homo sapien
ctatggatacaaagaagacagaaac

SEQ ID NO: 2310086 - DNA, 25 bp, Homo sapien
tatggatacaaagaagacagaaacc

SEQ ID NO: 2310087 - DNA, 25 bp, Homo sapien
agaagacagaaaccaaccaccaagg

SEQ ID NO: 2310088 - DNA, 25 bp, Homo sapien
gctggcatcagcattcctggcatca

SEQ ID NO: 2310089 - DNA, 25 bp, Homo sapien
attcctggcatcatcggaggtacca

SEQ ID NO: 2310090 - DNA, 25 bp, Homo sapien
ggcaccgctggcatcagcattcctg

SEQ ID NO: 2310091 - DNA, 25 bp, Homo sapien
ttcctggcatcatcggaggtaccat

SEQ ID NO: 2310092 - DNA, 25 bp, Homo sapien
aaagaatggaggtcatagtcctgca

SEQ ID NO: 2310093 - DNA, 25 bp, Homo sapien
aaactagaagagctgagtacatggc

SEQ ID NO: 2310094 - DNA, 25 bp, Homo sapien
gctggacaaggcacgtgagtaacaa

SEQ ID NO: 2310095 - DNA, 25 bp, Homo sapien
tgcattccaagtcagactcacggga

SEQ ID NO: 2310096 - DNA, 25 bp, Homo sapien
cactgagcgatagcataagaaggca

SEQ ID NO: 2310097 - DNA, 25 bp, Homo sapien
tgagcgatagcataagaaggcacag

SEQ ID NO: 2310098 - DNA, 25 bp, Homo sapien
gctacactgagcgatagcataagaa

SEQ ID NO: 2310099 - DNA, 25 bp, Homo sapien
agactctgctacactgagcgatagc

SEQ ID NO: 2310100 - DNA, 25 bp, Homo sapien
gaggctcattccttcacagtggatg

SEQ ID NO: 2310101 - DNA, 25 bp, Homo sapien
tgtcctgctcctagagatctctgct

SEQ ID NO: 2310102 - DNA, 25 bp, Homo sapien
gggccatagctctgggatcccaagg

SEQ ID NO: 2310103 - DNA, 25 bp, Homo sapien
tcccaagggagaatcgcatagcagc

SEQ ID NO: 2310104 - DNA, 25 bp, Homo sapien
agctggcggtgtccgcacccggagc

SEQ ID NO: 2310105 - DNA, 25 bp, Homo sapien
gctggcggtgtccgcacccggagcc

SEQ ID NO: 2310106 - DNA, 25 bp, Homo sapien
tggcggtgtccgcacccggagccgt

SEQ ID NO: 2310107 - DNA, 25 bp, Homo sapien
ctggcggtgtccgcacccggagccg

SEQ ID NO: 2310108 - DNA, 25 bp, Homo sapien
ctccgagcctggggggagcaggccc

SEQ ID NO: 2310109 - DNA, 25 bp, Homo sapien
gagcctggggggagcaggcccccag

SEQ ID NO: 2310110 - DNA, 25 bp, Homo sapien
ctggggggagcaggcccccagaaga

SEQ ID NO: 2310111 - DNA, 25 bp, Homo sapien
cctggggggagcaggcccccagaag

SEQ ID NO: 2310112 - DNA, 25 bp, Homo sapien
gacctccatcttattcccacctatg

SEQ ID NO: 2310113 - DNA, 25 bp, Homo sapien
aagccaaaggatacatactaagtcc

SEQ ID NO: 2310114 - DNA, 25 bp, Homo sapien
cagccccagtaaatagtcccctggt

SEQ ID NO: 2310115 - DNA, 25 bp, Homo sapien
acatactaagtccttgctccgacct

SEQ ID NO: 2310116 - DNA, 25 bp, Homo sapien
cggagggcctgtcccagccacagca

SEQ ID NO: 2310117 - DNA, 25 bp, Homo sapien
ggagggcctgtcccagccacagcag

SEQ ID NO: 2310118 - DNA, 25 bp, Homo sapien
tgtagtagtagatgcgcccatctgg

SEQ ID NO: 2310119 - DNA, 25 bp, Homo sapien
gccttggacttgagcacgctgggct

SEQ ID NO: 2310120 - DNA, 25 bp, Homo sapien
ccacatgctcactccatagggccct

SEQ ID NO: 2310121 - DNA, 25 bp, Homo sapien
tcccacacggactgcttgtcgtcag

SEQ ID NO: 2310122 - DNA, 25 bp, Homo sapien
catcagtgggatgggcaagttctcc

SEQ ID NO: 2310123 - DNA, 25 bp, Homo sapien
cttgagatcctatggaggcatttcc

SEQ ID NO: 2310124 - DNA, 25 bp, Homo sapien
gacctagtgagtagaggacacagga

SEQ ID NO: 2310125 - DNA, 25 bp, Homo sapien
ggacacaggaacctttagctaccac

SEQ ID NO: 2310126 - DNA, 25 bp, Homo sapien
tctaggtcatccagatccttgggcc

SEQ ID NO: 2310127 - DNA, 25 bp, Homo sapien
gcgggactctttactctggttgtta

SEQ ID NO: 2310128 - DNA, 25 bp, Homo sapien
ccgacttgtactctttccagggaca

SEQ ID NO: 2310129 - DNA, 25 bp, Homo sapien
aaggtttgcctgtgtccgacttgta

SEQ ID NO: 2310130 - DNA, 25 bp, Homo sapien
cctgcagcctcttgtttgactagaa

SEQ ID NO: 2310131 - DNA, 25 bp, Homo sapien
ccaggtgccccaactataaatggat

SEQ ID NO: 2310132 - DNA, 25 bp, Homo sapien
tgtagagatcatggcgacagagtct

SEQ ID NO: 2310133 - DNA, 25 bp, Homo sapien
gggatgactccacaaggagacagag

SEQ ID NO: 2310134 - DNA, 25 bp, Homo sapien
agagtctacttccacactccaggtg

SEQ ID NO: 2310135 - DNA, 25 bp, Homo sapien
cacctggctcaggttccaggaggcc

SEQ ID NO: 2310136 - DNA, 25 bp, Homo sapien
tgggtggcctccaacacatcacaat

SEQ ID NO: 2310137 - DNA, 25 bp, Homo sapien
ggctgtggctgaagtgtctgtggca

SEQ ID NO: 2310138 - DNA, 25 bp, Homo sapien
gctgctgcaggaacccctgttccag

SEQ ID NO: 2310139 - DNA, 25 bp, Homo sapien
gccttctcccggttgctccaactga

SEQ ID NO: 2310140 - DNA, 25 bp, Homo sapien
tgccttctcccggttgctccaactg

SEQ ID NO: 2310141 - DNA, 25 bp, Homo sapien
ccttctcccggttgctccaactgag

SEQ ID NO: 2310142 - DNA, 25 bp, Homo sapien
tttgccttctcccggttgctccaac

SEQ ID NO: 2310143 - DNA, 25 bp, Homo sapien
cgggggtcggtgaccaccatcttca

SEQ ID NO: 2310144 - DNA, 25 bp, Homo sapien
tcatggcctgttcccatgaggcatt

SEQ ID NO: 2310145 - DNA, 25 bp, Homo sapien
catggcctgttcccatgaggcattg

SEQ ID NO: 2310146 - DNA, 25 bp, Homo sapien
atggcctgttcccatgaggcattgg

SEQ ID NO: 2310147 - DNA, 25 bp, Homo sapien
aacgtgttgtgtcagatacctttcc

SEQ ID NO: 2310148 - DNA, 25 bp, Homo sapien
tcctgactctggttcccttagggct

SEQ ID NO: 2310149 - DNA, 25 bp, Homo sapien
ccttgcaccccaacccaatctatca

SEQ ID NO: 2310150 - DNA, 25 bp, Homo sapien
ttttttagggagtccctagcacagc

SEQ ID NO: 2310151 - DNA, 25 bp, Homo sapien
ggtcatgcgttcatgctgctccagg

SEQ ID NO: 2310152 - DNA, 25 bp, Homo sapien
tttctcactcagtttaggcaaggca

SEQ ID NO: 2310153 - DNA, 25 bp, Homo sapien
tgaatgcctgctttttctcactcag

SEQ ID NO: 2310154 - DNA, 25 bp, Homo sapien
tcccgctgcgccttgtaggcattga

SEQ ID NO: 2310155 - DNA, 25 bp, Homo sapien
ctcttttcgatccctctcagggacc

SEQ ID NO: 2310156 - DNA, 25 bp, Homo sapien
cttttcgatccctctcagggaccac

SEQ ID NO: 2310157 - DNA, 25 bp, Homo sapien
agctccccaaaggtctgttctgccc

SEQ ID NO: 2310158 - DNA, 25 bp, Homo sapien
ctccccaaaggtctgttctgcccgc

SEQ ID NO: 2310159 - DNA, 25 bp, Homo sapien
ggtttggaagttgacactactcatc

SEQ ID NO: 2310160 - DNA, 25 bp, Homo sapien
gctggggttatccatgaggtactgc

SEQ ID NO: 2310161 - DNA, 25 bp, Homo sapien
gttgacactactcatcccatccagg

SEQ ID NO: 2310162 - DNA, 25 bp, Homo sapien
ggaccacgtggtttggaagttgaca

SEQ ID NO: 2310163 - DNA, 25 bp, Homo sapien
ttgagtactcctagggtgtccggga

SEQ ID NO: 2310164 - DNA, 25 bp, Homo sapien
gagtgttgagtactcctagggtgtc

SEQ ID NO: 2310165 - DNA, 25 bp, Homo sapien
aaagaggtacaaggactgggtgagt

SEQ ID NO: 2310166 - DNA, 25 bp, Homo sapien
aaatgtctaggccaagagtggaccc

SEQ ID NO: 2310167 - DNA, 25 bp, Homo sapien
ggaaggcctcccgattcttgcgttg

SEQ ID NO: 2310168 - DNA, 25 bp, Homo sapien
tcttgcgttgttggcgtcgctcccg

SEQ ID NO: 2310169 - DNA, 25 bp, Homo sapien
tccctctccaaagctcggatgtgct

SEQ ID NO: 2310170 - DNA, 25 bp, Homo sapien
gatgtgctcctcaaaacagatcagt

SEQ ID NO: 2310171 - DNA, 25 bp, Homo sapien
aagcggacatcagtgctgactgctg

SEQ ID NO: 2310172 - DNA, 25 bp, Homo sapien
agcatgttggcaaagcggacatcag

SEQ ID NO: 2310173 - DNA, 25 bp, Homo sapien
tggatatagctccatccaggtggac

SEQ ID NO: 2310174 - DNA, 25 bp, Homo sapien
gtggacatagagtgcagctgccctg

SEQ ID NO: 2310175 - DNA, 25 bp, Homo sapien
cttttcatcatggaatcgtgccttc

SEQ ID NO: 2310176 - DNA, 25 bp, Homo sapien
tcatggaatcgtgccttcaactcct

SEQ ID NO: 2310177 - DNA, 25 bp, Homo sapien
tagaacttgaataagtccagagggg

SEQ ID NO: 2310178 - DNA, 25 bp, Homo sapien
ccttaatgatcttcttttcatcatg

SEQ ID NO: 2310179 - DNA, 25 bp, Homo sapien
gacttttactgtaggcagtctgcct

SEQ ID NO: 2310180 - DNA, 25 bp, Homo sapien
gtactgtattatctcctcaaatgca

SEQ ID NO: 2310181 - DNA, 25 bp, Homo sapien
ggtgtactctggtggaacactcacc

SEQ ID NO: 2310182 - DNA, 25 bp, Homo sapien
caaggtttagtccatcactcactca

SEQ ID NO: 2310183 - DNA, 25 bp, Homo sapien
aagaacagctggagcgctacagcct

SEQ ID NO: 2310184 - DNA, 25 bp, Homo sapien
tggacttttgtaccaagtagcccca

SEQ ID NO: 2310185 - DNA, 25 bp, Homo sapien
tagccccaacagtaggagagaggtc

SEQ ID NO: 2310186 - DNA, 25 bp, Homo sapien
aaggcacctacatagaaacccagag

SEQ ID NO: 2310187 - DNA, 25 bp, Homo sapien
tggcaggcagagtggtcacattaca

SEQ ID NO: 2310188 - DNA, 25 bp, Homo sapien
ggcaccacgtgcctgaggccaaagc

SEQ ID NO: 2310189 - DNA, 25 bp, Homo sapien
ggcaggcagagtggtcacattacag

SEQ ID NO: 2310190 - DNA, 25 bp, Homo sapien
aggggcaccacgtgcctgaggccaa

SEQ ID NO: 2310191 - DNA, 25 bp, Homo sapien
cgtgggcgaagtcctcaaaggccgt

SEQ ID NO: 2310192 - DNA, 25 bp, Homo sapien
tattgaaggtcagcttgatgttgcc

SEQ ID NO: 2310193 - DNA, 25 bp, Homo sapien
gcagccctcttgtcaaagcttatga

SEQ ID NO: 2310194 - DNA, 25 bp, Homo sapien
tgttgcctgcgtccagtgcggcagc

SEQ ID NO: 2310195 - DNA, 25 bp, Homo sapien
acagcctgcctcagcatgcttcgaa

SEQ ID NO: 2310196 - DNA, 25 bp, Homo sapien
ttcccaggcagtgcctagctccaga

SEQ ID NO: 2310197 - DNA, 25 bp, Homo sapien
gcatgcttcgaaaggcagcttccct

SEQ ID NO: 2310198 - DNA, 25 bp, Homo sapien
gtgcctagctccagagcaggcacag

SEQ ID NO: 2310199 - DNA, 25 bp, Homo sapien
gctgatcagactaggccccactcag

SEQ ID NO: 2310200 - DNA, 25 bp, Homo sapien
ctcagtggtgaagcaccgctgccct

SEQ ID NO: 2310201 - DNA, 25 bp, Homo sapien
tggacaccgccatgagcacagggca

SEQ ID NO: 2310202 - DNA, 25 bp, Homo sapien
gaggagagcactgctgatcagacta

SEQ ID NO: 2310203 - DNA, 25 bp, Homo sapien
ggctgagtcacacacaaaacgctca

SEQ ID NO: 2310204 - DNA, 25 bp, Homo sapien
ggaagagccggatccgctccgactc

SEQ ID NO: 2310205 - DNA, 25 bp, Homo sapien
agcacctgtaggaactcccggaaga

SEQ ID NO: 2310206 - DNA, 25 bp, Homo sapien
tccgctccgactccagggtgatctg

SEQ ID NO: 2310207 - DNA, 25 bp, Homo sapien
tcctgccatgctttcggcctttggt

SEQ ID NO: 2310208 - DNA, 25 bp, Homo sapien
catgctttcggcctttggtgtggag

SEQ ID NO: 2310209 - DNA, 25 bp, Homo sapien
ctgccatgctttcggcctttggtgt

SEQ ID NO: 2310210 - DNA, 25 bp, Homo sapien
gccatgctttcggcctttggtgtgg

SEQ ID NO: 2310211 - DNA, 25 bp, Homo sapien
gaacgcttgtgatggtgcttcttgc

SEQ ID NO: 2310212 - DNA, 25 bp, Homo sapien
tgagtgggaacgcttgtgatggtgc

SEQ ID NO: 2310213 - DNA, 25 bp, Homo sapien
tgggaacgcttgtgatggtgcttct

SEQ ID NO: 2310214 - DNA, 25 bp, Homo sapien
ggtgagtgggaacgcttgtgatggt

SEQ ID NO: 2310215 - DNA, 25 bp, Homo sapien
cagcagatacatgtcagtgcagagg

SEQ ID NO: 2310216 - DNA, 25 bp, Homo sapien
tccctccaagggagatattgtaagg

SEQ ID NO: 2310217 - DNA, 25 bp, Homo sapien
aggaatcctcaaacttccctccaag

SEQ ID NO: 2310218 - DNA, 25 bp, Homo sapien
cagaagccctcgtctgggaattcga

SEQ ID NO: 2310219 - DNA, 25 bp, Homo sapien
ctttcaactgaatcaagtgaggaag

SEQ ID NO: 2310220 - DNA, 25 bp, Homo sapien
aactgaatcaagtgaggaagagggc

SEQ ID NO: 2310221 - DNA, 25 bp, Homo sapien
ccccactttcaactgaatcaagtga

SEQ ID NO: 2310222 - DNA, 25 bp, Homo sapien
tgactctgaggggttccgcctcctc

SEQ ID NO: 2310223 - DNA, 25 bp, Homo sapien
cacaggcaggaacctcatgctctga

SEQ ID NO: 2310224 - DNA, 25 bp, Homo sapien
gttctttctacttccacaggtgcag

SEQ ID NO: 2310225 - DNA, 25 bp, Homo sapien
gagggcatcctctcagtctgggaca

SEQ ID NO: 2310226 - DNA, 25 bp, Homo sapien
cagcttcttgcttgggcaggtagag

SEQ ID NO: 2310227 - DNA, 25 bp, Homo sapien
gtttcttggctttccgaaggccatg

SEQ ID NO: 2310228 - DNA, 25 bp, Homo sapien
acagaactcacaaaatagcaggggc

SEQ ID NO: 2310229 - DNA, 25 bp, Homo sapien
ctcacaaaatagcaggggcttaggt

SEQ ID NO: 2310230 - DNA, 25 bp, Homo sapien
ggcttaggtagaagttccttcactc

SEQ ID NO: 2310231 - DNA, 25 bp, Homo sapien
gcttaggtagaagttccttcactca

SEQ ID NO: 2310232 - DNA, 25 bp, Homo sapien
tgtaagagtccagagcccacctcct

SEQ ID NO: 2310233 - DNA, 25 bp, Homo sapien
agtccagagcccacctcctcagttc

SEQ ID NO: 2310234 - DNA, 25 bp, Homo sapien
agagcccacctcctcagttcctgtg

SEQ ID NO: 2310235 - DNA, 25 bp, Homo sapien
cacctcctcagttcctgtggatagc

SEQ ID NO: 2310236 - DNA, 25 bp, Homo sapien
gggaacggttagggagctctgcctg

SEQ ID NO: 2310237 - DNA, 25 bp, Homo sapien
cttgttctttctcatcgctctcctt

SEQ ID NO: 2310238 - DNA, 25 bp, Homo sapien
tgttggagctccctgtccttgtcct

SEQ ID NO: 2310239 - DNA, 25 bp, Homo sapien
tcatcgctctccttgccagctttct

SEQ ID NO: 2310240 - DNA, 25 bp, Homo sapien
gtgctgactggcctagggcccctgc

SEQ ID NO: 2310241 - DNA, 25 bp, Homo sapien
gagcaaaggcacagttcacccttag

SEQ ID NO: 2310242 - DNA, 25 bp, Homo sapien
cgtggaagcttgaccagcgtgctga

SEQ ID NO: 2310243 - DNA, 25 bp, Homo sapien
tagcctgcactaagggccgtggaag

SEQ ID NO: 2310244 - DNA, 25 bp, Homo sapien
tgtaggagtgtccgccgccgcctct

SEQ ID NO: 2310245 - DNA, 25 bp, Homo sapien
tcagctcactttctgacgtgtccca

SEQ ID NO: 2310246 - DNA, 25 bp, Homo sapien
gctgctgtaggagtgtccgccgccg

SEQ ID NO: 2310247 - DNA, 25 bp, Homo sapien
gctgtaggagtgtccgccgccgcct

SEQ ID NO: 2310248 - DNA, 25 bp, Homo sapien
aaacacacgtacattaggtcctggg

SEQ ID NO: 2310249 - DNA, 25 bp, Homo sapien
caaccttgagaggtgccaacaatgg

SEQ ID NO: 2310250 - DNA, 25 bp, Homo sapien
tgatgctagagggtgatgaccctgc

SEQ ID NO: 2310251 - DNA, 25 bp, Homo sapien
agacccgaggcagagaacagctcat

SEQ ID NO: 2310252 - DNA, 25 bp, Homo sapien
tgctgggcatgtgtccagtccccag

SEQ ID NO: 2310253 - DNA, 25 bp, Homo sapien
catgagacactagtgccctctgctg

SEQ ID NO: 2310254 - DNA, 25 bp, Homo sapien
gtgggctctagccacacaaagggaa

SEQ ID NO: 2310255 - DNA, 25 bp, Homo sapien
tttggaggagatgagatcagaactc

SEQ ID NO: 2310256 - DNA, 25 bp, Homo sapien
tctcaacaaaggcttgatgcaccag

SEQ ID NO: 2310257 - DNA, 25 bp, Homo sapien
gtcttggctatttgcttaccttccc

SEQ ID NO: 2310258 - DNA, 25 bp, Homo sapien
tactgtacataaacctcagactctc

SEQ ID NO: 2310259 - DNA, 25 bp, Homo sapien
gctagggtggccatttagtctgacc

SEQ ID NO: 2310260 - DNA, 25 bp, Homo sapien
gccctctgaagcatgggccgtgcca

SEQ ID NO: 2310261 - DNA, 25 bp, Homo sapien
aagcatgggccgtgccagctgtgcc

SEQ ID NO: 2310262 - DNA, 25 bp, Homo sapien
cctctgaagcatgggccgtgccagc

SEQ ID NO: 2310263 - DNA, 25 bp, Homo sapien
aggccctctgaagcatgggccgtgc

SEQ ID NO: 2310264 - DNA, 25 bp, Homo sapien
tgaggctggatctttctacttgtgc

SEQ ID NO: 2310265 - DNA, 25 bp, Homo sapien
taggtctgtaggtccctggtgcttc

SEQ ID NO: 2310266 - DNA, 25 bp, Homo sapien
gcactttgcccccaaggtctttgac

SEQ ID NO: 2310267 - DNA, 25 bp, Homo sapien
tacttgtgccactatgggcactagg

SEQ ID NO: 2310268 - DNA, 25 bp, Homo sapien
cttacttcttccttggagtctcctg

SEQ ID NO: 2310269 - DNA, 25 bp, Homo sapien
tcccttacttcttccttggagtctc

SEQ ID NO: 2310270 - DNA, 25 bp, Homo sapien
ctcccttacttcttccttggagtct

SEQ ID NO: 2310271 - DNA, 25 bp, Homo sapien
acttcttccttggagtctcctgcca

SEQ ID NO: 2310272 - DNA, 25 bp, Homo sapien
cagatctgttggtttgtgaggggaa

SEQ ID NO: 2310273 - DNA, 25 bp, Homo sapien
gatctgttggtttgtgaggggaatc

SEQ ID NO: 2310274 - DNA, 25 bp, Homo sapien
cttttggcagctagtaatgggcctt

SEQ ID NO: 2310275 - DNA, 25 bp, Homo sapien
ttggcagctagtaatgggcctttgt

SEQ ID NO: 2310276 - DNA, 25 bp, Homo sapien
tagagacatgtggaggccgttcctt

SEQ ID NO: 2310277 - DNA, 25 bp, Homo sapien
gagacatgtggaggccgttccttac

SEQ ID NO: 2310278 - DNA, 25 bp, Homo sapien
cagtagagacatgtggaggccgttc

SEQ ID NO: 2310279 - DNA, 25 bp, Homo sapien
agtagagacatgtggaggccgttcc

SEQ ID NO: 2310280 - DNA, 25 bp, Homo sapien
ggctgtctgtttcaagttatcttct

SEQ ID NO: 2310281 - DNA, 25 bp, Homo sapien
ccaggtactggggtaattcttggct

SEQ ID NO: 2310282 - DNA, 25 bp, Homo sapien
caggtactggggtaattcttggctt

SEQ ID NO: 2310283 - DNA, 25 bp, Homo sapien
cctttagcacattttgtctcttgtg

SEQ ID NO: 2310284 - DNA, 25 bp, Homo sapien
ttagcacattttgtctcttgtgtag

SEQ ID NO: 2310285 - DNA, 25 bp, Homo sapien
tgggtcccttatacacaccaacagg

SEQ ID NO: 2310286 - DNA, 25 bp, Homo sapien
cagagttatggccaaaactggagtt

SEQ ID NO: 2310287 - DNA, 25 bp, Homo sapien
ccagtagaggacaagtttaggctct

SEQ ID NO: 2310288 - DNA, 25 bp, Homo sapien
caccaacagggaagatacgtacttt

SEQ ID NO: 2310289 - DNA, 25 bp, Homo sapien
cctctgtcgggtaagggcttcctca

SEQ ID NO: 2310290 - DNA, 25 bp, Homo sapien
tacaggtgatgataagacggccacc

SEQ ID NO: 2310291 - DNA, 25 bp, Homo sapien
gaaaatgttgtgactgactgggcct

SEQ ID NO: 2310292 - DNA, 25 bp, Homo sapien
ctgggtcatgcggtcctttggaact

SEQ ID NO: 2310293 - DNA, 25 bp, Homo sapien
atggctgtcatgaactccctctcca

SEQ ID NO: 2310294 - DNA, 25 bp, Homo sapien
gcttgtcatcagtaggaacgccacc

SEQ ID NO: 2310295 - DNA, 25 bp, Homo sapien
gcagccagaaccagttgacagcact

SEQ ID NO: 2310296 - DNA, 25 bp, Homo sapien
agaaccagttgacagcactgttgtc

SEQ ID NO: 2310297 - DNA, 25 bp, Homo sapien
tcactattatcttggtgatggaggg

SEQ ID NO: 2310298 - DNA, 25 bp, Homo sapien
tcttcaccgatgcagctcactatta

SEQ ID NO: 2310299 - DNA, 25 bp, Homo sapien
tcctgcaccagacttggagctcttt

SEQ ID NO: 2310300 - DNA, 25 bp, Homo sapien
caccagacttggagctcttttgaag

SEQ ID NO: 2310301 - DNA, 25 bp, Homo sapien
tgcctctcctgcaccagacttggag

SEQ ID NO: 2310302 - DNA, 25 bp, Homo sapien
ttgcctctcctgcaccagacttgga

SEQ ID NO: 2310303 - DNA, 25 bp, Homo sapien
ccaatgatcttacacggttccttca

SEQ ID NO: 2310304 - DNA, 25 bp, Homo sapien
actgggtccacactcctccgctcta

SEQ ID NO: 2310305 - DNA, 25 bp, Homo sapien
atcttacacggttccttcaaactgg

SEQ ID NO: 2310306 - DNA, 25 bp, Homo sapien
tgatcttacacggttccttcaaact

SEQ ID NO: 2310307 - DNA, 25 bp, Homo sapien
aaatatctgtgttgacacttctccc

SEQ ID NO: 2310308 - DNA, 25 bp, Homo sapien
tatctgtgttgacacttctcccaca

SEQ ID NO: 2310309 - DNA, 25 bp, Homo sapien
atatctgtgttgacacttctcccac

SEQ ID NO: 2310310 - DNA, 25 bp, Homo sapien
aatatctgtgttgacacttctccca

SEQ ID NO: 2310311 - DNA, 25 bp, Homo sapien
gctactttgactatttctcctggcc

SEQ ID NO: 2310312 - DNA, 25 bp, Homo sapien
agagatgtgtcatgtttctatagca

SEQ ID NO: 2310313 - DNA, 25 bp, Homo sapien
gccaagcaaggttgtagagatgtgt

SEQ ID NO: 2310314 - DNA, 25 bp, Homo sapien
tgagaaaaaggccaatcaccctgct

SEQ ID NO: 2310315 - DNA, 25 bp, Homo sapien
ttgtaccagtgtggccctttcaggt

SEQ ID NO: 2310316 - DNA, 25 bp, Homo sapien
tttgtaccagtgtggccctttcagg

SEQ ID NO: 2310317 - DNA, 25 bp, Homo sapien
ccagggtcacggtgcgctgctgcct

SEQ ID NO: 2310318 - DNA, 25 bp, Homo sapien
cgtagtaagccagggtcacggtgcg

SEQ ID NO: 2310319 - DNA, 25 bp, Homo sapien
tagtaagccagggtcacggtgcgct

SEQ ID NO: 2310320 - DNA, 25 bp, Homo sapien
taagccagggtcacggtgcgctgct

SEQ ID NO: 2310321 - DNA, 25 bp, Homo sapien
taacaccggatgtgctctgactcgc

SEQ ID NO: 2310322 - DNA, 25 bp, Homo sapien
ctccaaggcctaccagcgcttctaa

SEQ ID NO: 2310323 - DNA, 25 bp, Homo sapien
taccagcgcttctaacaccggatgt

SEQ ID NO: 2310324 - DNA, 25 bp, Homo sapien
ggatgtgctctgactcgcccacttc

SEQ ID NO: 2310325 - DNA, 25 bp, Homo sapien
ccatctgtccgcagaaggaagctac

SEQ ID NO: 2310326 - DNA, 25 bp, Homo sapien
ggtctccgagcagggcctcgttcct

SEQ ID NO: 2310327 - DNA, 25 bp, Homo sapien
tcttgctcagacagtaactgctaac

SEQ ID NO: 2310328 - DNA, 25 bp, Homo sapien
cctgttttcccgagtctggtctccg

SEQ ID NO: 2310329 - DNA, 25 bp, Homo sapien
cccgcagactcgcctccgccccacc

SEQ ID NO: 2310330 - DNA, 25 bp, Homo sapien
gggcagaatagaggcctcgacaccc

SEQ ID NO: 2310331 - DNA, 25 bp, Homo sapien
tggggcagaatagaggcctcgacac

SEQ ID NO: 2310332 - DNA, 25 bp, Homo sapien
caaaacccccgcagactcgcctccg

SEQ ID NO: 2310333 - DNA, 25 bp, Homo sapien
gatgggtggagtttcgcgttccttc

SEQ ID NO: 2310334 - DNA, 25 bp, Homo sapien
gcccgcagccgaacagcaatcggat

SEQ ID NO: 2310335 - DNA, 25 bp, Homo sapien
ttcacctcggaaggacgtgctctga

SEQ ID NO: 2310336 - DNA, 25 bp, Homo sapien
aattcgaacgatcgaagctaggcca

SEQ ID NO: 2310337 - DNA, 25 bp, Homo sapien
taactgaggagcctcgcgtgtcaca

SEQ ID NO: 2310338 - DNA, 25 bp, Homo sapien
cgcctctgccgttggctaagtaact

SEQ ID NO: 2310339 - DNA, 25 bp, Homo sapien
tgtcacagaggagtgtgacatcacc

SEQ ID NO: 2310340 - DNA, 25 bp, Homo sapien
acagaggagtgtgacatcacccgcc

SEQ ID NO: 2310341 - DNA, 25 bp, Homo sapien
caaagcctacttgttaccacaggtc

SEQ ID NO: 2310342 - DNA, 25 bp, Homo sapien
caggtccagcaagtaggcccaagat

SEQ ID NO: 2310343 - DNA, 25 bp, Homo sapien
gcagacttagaaagacgcccacaaa

SEQ ID NO: 2310344 - DNA, 25 bp, Homo sapien
caaaacctcaagaccaagcaaagca

SEQ ID NO: 2310345 - DNA, 25 bp, Homo sapien
cagtcagcccttctactgggttaca

SEQ ID NO: 2310346 - DNA, 25 bp, Homo sapien
cacagtctcaagttcatagtgattt

SEQ ID NO: 2310347 - DNA, 25 bp, Homo sapien
ttgtctgtttcaagcacagtcagcc

SEQ ID NO: 2310348 - DNA, 25 bp, Homo sapien
cacaagttgctagaacacagtctca

SEQ ID NO: 2310349 - DNA, 25 bp, Homo sapien
catgagaattgaatgcaccagggag

SEQ ID NO: 2310350 - DNA, 25 bp, Homo sapien
tgagaattgaatgcaccagggaggc

SEQ ID NO: 2310351 - DNA, 25 bp, Homo sapien
gttctggagttggtaagcctgggca

SEQ ID NO: 2310352 - DNA, 25 bp, Homo sapien
aaataaatcgcttgagttctggagt

SEQ ID NO: 2310353 - DNA, 25 bp, Homo sapien
tctttaggaaaggattacacctgta

SEQ ID NO: 2310354 - DNA, 25 bp, Homo sapien
tgtgtataaaaactacgaagggctg

SEQ ID NO: 2310355 - DNA, 25 bp, Homo sapien
ggtctcgaacaccatctttggaaaa

SEQ ID NO: 2310356 - DNA, 25 bp, Homo sapien
ggctgcatgcagtttggttagaaac

SEQ ID NO: 2310357 - DNA, 25 bp, Homo sapien
tctccttggtctcgaacaccatctt

SEQ ID NO: 2310358 - DNA, 25 bp, Homo sapien
tactatctctcttgtcccacagggc

SEQ ID NO: 2310359 - DNA, 25 bp, Homo sapien
tcttgtcccacagggccatggacat

SEQ ID NO: 2310360 - DNA, 25 bp, Homo sapien
ttcttctagcacatttatactatct

SEQ ID NO: 2310361 - DNA, 25 bp, Homo sapien
tttatactatctctcttgtcccaca

SEQ ID NO: 2310362 - DNA, 25 bp, Homo sapien
gcaggtggatcactttgacgtcagg

SEQ ID NO: 2310363 - DNA, 25 bp, Homo sapien
tggccaacacggcgaaaccctgtct

SEQ ID NO: 2310364 - DNA, 25 bp, Homo sapien
gtctggccaacacggcgaaaccctg

SEQ ID NO: 2310365 - DNA, 25 bp, Homo sapien
agttcgagaccagtctggccaacac

SEQ ID NO: 2310366 - DNA, 25 bp, Homo sapien
tctggatacacccattgtaaattaa

SEQ ID NO: 2310367 - DNA, 25 bp, Homo sapien
ggtacactccttgatttgcgatggc

SEQ ID NO: 2310368 - DNA, 25 bp, Homo sapien
aaaatatcgttgactcaaaaatgac

SEQ ID NO: 2310369 - DNA, 25 bp, Homo sapien
gaaattgatactcattcggtacact

SEQ ID NO: 2310370 - DNA, 25 bp, Homo sapien
ccctgcttggcggaatctgttcgag

SEQ ID NO: 2310371 - DNA, 25 bp, Homo sapien
ggagaatggcagaaactcccctttc

SEQ ID NO: 2310372 - DNA, 25 bp, Homo sapien
gatacttctctgacgtttcccaggg

SEQ ID NO: 2310373 - DNA, 25 bp, Homo sapien
aaactcccctttctcagatacttct

SEQ ID NO: 2310374 - DNA, 25 bp, Homo sapien
tcttgcttccaattacaagaattaa

SEQ ID NO: 2310375 - DNA, 25 bp, Homo sapien
ctgaagcaactttcagagccaagtt

SEQ ID NO: 2310376 - DNA, 25 bp, Homo sapien
ggtggatcctcaaacgcccagggga

SEQ ID NO: 2310377 - DNA, 25 bp, Homo sapien
gagcggggtggatcctcaaacgccc

SEQ ID NO: 2310378 - DNA, 25 bp, Homo sapien
agcacctggaaagtgtctttgttta

SEQ ID NO: 2310379 - DNA, 25 bp, Homo sapien
ggcagaattcagcacctggaaagtg

SEQ ID NO: 2310380 - DNA, 25 bp, Homo sapien
agcatggcagaattcagcacctgga

SEQ ID NO: 2310381 - DNA, 25 bp, Homo sapien
agaattcagcacctggaaagtgtct

SEQ ID NO: 2310382 - DNA, 25 bp, Homo sapien
tgagaagctgcagaacctactaagg

SEQ ID NO: 2310383 - DNA, 25 bp, Homo sapien
ttaaggacagatacagtgagaagct

SEQ ID NO: 2310384 - DNA, 25 bp, Homo sapien
tttgttaattctgttcttaaggaca

SEQ ID NO: 2310385 - DNA, 25 bp, Homo sapien
ttgttaattctgttcttaaggacag

SEQ ID NO: 2310386 - DNA, 25 bp, Homo sapien
ctgcagaataaagaaaggttagagt

SEQ ID NO: 2310387 - DNA, 25 bp, Homo sapien
tgcagaataaagaaaggttagagtc

SEQ ID NO: 2310388 - DNA, 25 bp, Homo sapien
gttccagagtccgtgcagcagtctc

SEQ ID NO: 2310389 - DNA, 25 bp, Homo sapien
tccagagtccgtgcagcagtctcca

SEQ ID NO: 2310390 - DNA, 25 bp, Homo sapien
cagagtccgtgcagcagtctccact

SEQ ID NO: 2310391 - DNA, 25 bp, Homo sapien
ggttccagagtccgtgcagcagtct

SEQ ID NO: 2310392 - DNA, 25 bp, Homo sapien
aaagcgcatcaaagttgatctttcg

SEQ ID NO: 2310393 - DNA, 25 bp, Homo sapien
aagcgcatcaaagttgatctttcga

SEQ ID NO: 2310394 - DNA, 25 bp, Homo sapien
cgcatcaaagttgatctttcgatca

SEQ ID NO: 2310395 - DNA, 25 bp, Homo sapien
taaaagcgcatcaaagttgatcttt

SEQ ID NO: 2310396 - DNA, 25 bp, Homo sapien
tgcatagaccttcttcaggtgctgc

SEQ ID NO: 2310397 - DNA, 25 bp, Homo sapien
accatatggacataggcccctgcag

SEQ ID NO: 2310398 - DNA, 25 bp, Homo sapien
gggcaaaacttgcatagaccttctt

SEQ ID NO: 2310399 - DNA, 25 bp, Homo sapien
ctgcagccgccacaaacatacaaag

SEQ ID NO: 2310400 - DNA, 25 bp, Homo sapien
catggctatgaggtgttgccatcag

SEQ ID NO: 2310401 - DNA, 25 bp, Homo sapien
tggctatgaggtgttgccatcagcc

SEQ ID NO: 2310402 - DNA, 25 bp, Homo sapien
tgcaaatccagcaagaagtcccagt

SEQ ID NO: 2310403 - DNA, 25 bp, Homo sapien
gtttcatggctatgaggtgttgcca

SEQ ID NO: 2310404 - DNA, 25 bp, Homo sapien
caggtggacacctgccaacaggagg

SEQ ID NO: 2310405 - DNA, 25 bp, Homo sapien
tgccttcaaaaactagcttgccctg

SEQ ID NO: 2310406 - DNA, 25 bp, Homo sapien
ggactgactcccctttgtagcaaag

SEQ ID NO: 2310407 - DNA, 25 bp, Homo sapien
gcctcgtggccagcaaccttatagt

SEQ ID NO: 2310408 - DNA, 25 bp, Homo sapien
cagcaatacaaaactccagggcagg

SEQ ID NO: 2310409 - DNA, 25 bp, Homo sapien
acagcaatacaaaactccagggcag

SEQ ID NO: 2310410 - DNA, 25 bp, Homo sapien
tacggcgcctggcatagagtgcact

SEQ ID NO: 2310411 - DNA, 25 bp, Homo sapien
ggtgaagcaggtaaagatcattgcc

SEQ ID NO: 2310412 - DNA, 25 bp, Homo sapien
ttgccgtgcccatgaaagcagtggg

SEQ ID NO: 2310413 - DNA, 25 bp, Homo sapien
ccagaaagaggtagctacggcgcct

SEQ ID NO: 2310414 - DNA, 25 bp, Homo sapien
gcaacaagctcagggctgacatcaa

SEQ ID NO: 2310415 - DNA, 25 bp, Homo sapien
gaaaagccaaatggatccaaagaaa

SEQ ID NO: 2310416 - DNA, 25 bp, Homo sapien
gacaaaagcaacaagctcagggctg

SEQ ID NO: 2310417 - DNA, 25 bp, Homo sapien
cagggaagacaaaagcaacaagctc

SEQ ID NO: 2310418 - DNA, 25 bp, Homo sapien
aaagaagtgtgaggcaaatggctgc

SEQ ID NO: 2310419 - DNA, 25 bp, Homo sapien
aagaagtgtgaggcaaatggctgct

SEQ ID NO: 2310420 - DNA, 25 bp, Homo sapien
gaaagaagtgtgaggcaaatggctg

SEQ ID NO: 2310421 - DNA, 25 bp, Homo sapien
gcagaaggctccatcctatgaagga

SEQ ID NO: 2310422 - DNA, 25 bp, Homo sapien
cagcctagggtgaagaccactttac

SEQ ID NO: 2310423 - DNA, 25 bp, Homo sapien
taacaatcagccactgccagactgg

SEQ ID NO: 2310424 - DNA, 25 bp, Homo sapien
cactggtcactggaagagtttcaat

SEQ ID NO: 2310425 - DNA, 25 bp, Homo sapien
taatgagttgagtatcaaaaaggac

SEQ ID NO: 2310426 - DNA, 25 bp, Homo sapien
gtatcaaaaaggacgaagccacaca

SEQ ID NO: 2310427 - DNA, 25 bp, Homo sapien
aagccacacatgaccaccagtccca

SEQ ID NO: 2310428 - DNA, 25 bp, Homo sapien
aatcttgatctccatgttcggcctt

SEQ ID NO: 2310429 - DNA, 25 bp, Homo sapien
ttttctgaagacagtaatgaaatct

SEQ ID NO: 2310430 - DNA, 25 bp, Homo sapien
catggccaggatcatcatgagtttt

SEQ ID NO: 2310431 - DNA, 25 bp, Homo sapien
aatgaaatctaagaagagatcaatg

SEQ ID NO: 2310432 - DNA, 25 bp, Homo sapien
tttctgaagacagtaatgaaatcta

SEQ ID NO: 2310433 - DNA, 25 bp, Homo sapien
ggttgtgtttactgccactgaagct

SEQ ID NO: 2310434 - DNA, 25 bp, Homo sapien
catctttgggttgtaggctaactaa

SEQ ID NO: 2310435 - DNA, 25 bp, Homo sapien
atacacacatgccaagctcaggagc

SEQ ID NO: 2310436 - DNA, 25 bp, Homo sapien
gttaccctggacctaacacagtgtg

SEQ ID NO: 2310437 - DNA, 25 bp, Homo sapien
tccaatggaaaactcacggcccagt

SEQ ID NO: 2310438 - DNA, 25 bp, Homo sapien
gaggctgagttaacaatgggaccac

SEQ ID NO: 2310439 - DNA, 25 bp, Homo sapien
tgtgcgcataccaaacaacaatgag

SEQ ID NO: 2310440 - DNA, 25 bp, Homo sapien
cctggtgggaaagcggactcctgaa

SEQ ID NO: 2310441 - DNA, 25 bp, Homo sapien
tagtagaggccgctcagtaagggga

SEQ ID NO: 2310442 - DNA, 25 bp, Homo sapien
ggccgctcagtaaggggataacaaa

SEQ ID NO: 2310443 - DNA, 25 bp, Homo sapien
tagaggccgctcagtaaggggataa

SEQ ID NO: 2310444 - DNA, 25 bp, Homo sapien
gaggccgctcagtaaggggataaca

SEQ ID NO: 2310445 - DNA, 25 bp, Homo sapien
tggttgttaaaggagattttgctcc

SEQ ID NO: 2310446 - DNA, 25 bp, Homo sapien
cactgccccaaacaggtctggcagg

SEQ ID NO: 2310447 - DNA, 25 bp, Homo sapien
ccaaacaggtccttatctaggtttg

SEQ ID NO: 2310448 - DNA, 25 bp, Homo sapien
aacaggtctggcaggattggttaca

SEQ ID NO: 2310449 - DNA, 25 bp, Homo sapien
caaatgatttcgtaggatagcacag

SEQ ID NO: 2310450 - DNA, 25 bp, Homo sapien
aatggctcgatcctctcacactgaa

SEQ ID NO: 2310451 - DNA, 25 bp, Homo sapien
tcctcagtgaaagtgagccattcgg

SEQ ID NO: 2310452 - DNA, 25 bp, Homo sapien
gaacctgaggccactgtgtcaaact

SEQ ID NO: 2310453 - DNA, 25 bp, Homo sapien
ttcaagagatgttaactcaaaatct

SEQ ID NO: 2310454 - DNA, 25 bp, Homo sapien
cacagaaggtggagtttggcttcaa

SEQ ID NO: 2310455 - DNA, 25 bp, Homo sapien
cagaaggtggagtttggcttcaaga

SEQ ID NO: 2310456 - DNA, 25 bp, Homo sapien
gttaactcaaaatcttaggcctagc

SEQ ID NO: 2310457 - DNA, 25 bp, Homo sapien
tgagttagaatgcagcctgagctga

SEQ ID NO: 2310458 - DNA, 25 bp, Homo sapien
tctgaatcaaaaacacctttgtctt

SEQ ID NO: 2310459 - DNA, 25 bp, Homo sapien
tatatttctgaatcaaaaacacctt

SEQ ID NO: 2310460 - DNA, 25 bp, Homo sapien
aattaagactatgcagatttcatat

SEQ ID NO: 2310461 - DNA, 25 bp, Homo sapien
gggaagtcgcgaagatatgggatgg

SEQ ID NO: 2310462 - DNA, 25 bp, Homo sapien
aagtcgcgaagatatgggatggcca

SEQ ID NO: 2310463 - DNA, 25 bp, Homo sapien
tcgcgaagatatgggatggccactg

SEQ ID NO: 2310464 - DNA, 25 bp, Homo sapien
aagatatgggatggccactggagac

SEQ ID NO: 2310465 - DNA, 25 bp, Homo sapien
tttatatattgaagcgcctggccca

SEQ ID NO: 2310466 - DNA, 25 bp, Homo sapien
cccgcactgcggttaatttatgtgt

SEQ ID NO: 2310467 - DNA, 25 bp, Homo sapien
tctgcttctgccgtatccctaataa

SEQ ID NO: 2310468 - DNA, 25 bp, Homo sapien
tttaaaatgcggctgctctgcttcc

SEQ ID NO: 2310469 - DNA, 25 bp, Homo sapien
ggagcgcctcttggggggtctggga

SEQ ID NO: 2310470 - DNA, 25 bp, Homo sapien
ggcaacctgggaggcctgctgcact

SEQ ID NO: 2310471 - DNA, 25 bp, Homo sapien
tcctcttctgatgaggcaggtgacc

SEQ ID NO: 2310472 - DNA, 25 bp, Homo sapien
gctgcactgggagcgcctcttgggg

SEQ ID NO: 2310473 - DNA, 25 bp, Homo sapien
tctcccctaaggtatgttgggagca

SEQ ID NO: 2310474 - DNA, 25 bp, Homo sapien
cccctaaggtatgttgggagcagca

SEQ ID NO: 2310475 - DNA, 25 bp, Homo sapien
ccagcgctggatgccctatccccgt

SEQ ID NO: 2310476 - DNA, 25 bp, Homo sapien
atcatctctcccctaaggtatgttg

SEQ ID NO: 2310477 - DNA, 25 bp, Homo sapien
atgtttcctagcaaatatctggaga

SEQ ID NO: 2310478 - DNA, 25 bp, Homo sapien
tgtttcctagcaaatatctggagaa

SEQ ID NO: 2310479 - DNA, 25 bp, Homo sapien
ctgcacttcccggggtgggcggcag

SEQ ID NO: 2310480 - DNA, 25 bp, Homo sapien
gcacttcccggggtgggcggcagga

SEQ ID NO: 2310481 - DNA, 25 bp, Homo sapien
ctcttcttcctgcacttcccggggt

SEQ ID NO: 2310482 - DNA, 25 bp, Homo sapien
cttcttcctgcacttcccggggtgg

SEQ ID NO: 2310483 - DNA, 25 bp, Homo sapien
tgttgtgagcctaaatggcatctga

SEQ ID NO: 2310484 - DNA, 25 bp, Homo sapien
tgaatatttactcacctatggtgga

SEQ ID NO: 2310485 - DNA, 25 bp, Homo sapien
tgatgtgtggtttctaagaggcaga

SEQ ID NO: 2310486 - DNA, 25 bp, Homo sapien
atataggcccttttttgatgtgtgg

SEQ ID NO: 2310487 - DNA, 25 bp, Homo sapien
ggttgccaaccatgtggtacaggcg

SEQ ID NO: 2310488 - DNA, 25 bp, Homo sapien
ggcacttgcccaggccaacgaaaac

SEQ ID NO: 2310489 - DNA, 25 bp, Homo sapien
acttatgagcgctgtctggacgagg

SEQ ID NO: 2310490 - DNA, 25 bp, Homo sapien
aaaccagcgggagacttatgagcgc

SEQ ID NO: 2310491 - DNA, 25 bp, Homo sapien
tctacttggccactgtatcccccag

SEQ ID NO: 2310492 - DNA, 25 bp, Homo sapien
gtctacttggccactgtatccccca

SEQ ID NO: 2310493 - DNA, 25 bp, Homo sapien
cacagggatgagtgtcctaaccccc

SEQ ID NO: 2310494 - DNA, 25 bp, Homo sapien
tccttacctctcatgcctctgcagg

SEQ ID NO: 2310495 - DNA, 25 bp, Homo sapien
ggctcggggacaagaagcatgcaca

SEQ ID NO: 2310496 - DNA, 25 bp, Homo sapien
ccatggctcaggagttgagggataa

SEQ ID NO: 2310497 - DNA, 25 bp, Homo sapien
ttctgcaccgactgcgggagctgga

SEQ ID NO: 2310498 - DNA, 25 bp, Homo sapien
tccaaggagactaaagggtttcatc

SEQ ID NO: 2310499 - DNA, 25 bp, Homo sapien
ggtcacactgacctaagctccaagg

SEQ ID NO: 2310500 - DNA, 25 bp, Homo sapien
ctcattccctggagtagcctgccgg

SEQ ID NO: 2310501 - DNA, 25 bp, Homo sapien
ggatgtggtcatgagcttcgtctag

SEQ ID NO: 2310502 - DNA, 25 bp, Homo sapien
agcaacaatggcaatggtttggtgg

SEQ ID NO: 2310503 - DNA, 25 bp, Homo sapien
gagcttcgtctagtcatcagtctgt

SEQ ID NO: 2310504 - DNA, 25 bp, Homo sapien
tgaagactagtcagttcaagctagc

SEQ ID NO: 2310505 - DNA, 25 bp, Homo sapien
cccatgtatgttcttagctgtccct

SEQ ID NO: 2310506 - DNA, 25 bp, Homo sapien
tcagtatggtttgtcctatgggccc

SEQ ID NO: 2310507 - DNA, 25 bp, Homo sapien
gggagctccccttctaacagtatag

SEQ ID NO: 2310508 - DNA, 25 bp, Homo sapien
gaaatactgatcttgcaggaggcac

SEQ ID NO: 2310509 - DNA, 25 bp, Homo sapien
aattcttttgtgagatgtattgctt

SEQ ID NO: 2310510 - DNA, 25 bp, Homo sapien
gtaattcttttgtgagatgtattgc

SEQ ID NO: 2310511 - DNA, 25 bp, Homo sapien
aagtaattcttttgtgagatgtatt

SEQ ID NO: 2310512 - DNA, 25 bp, Homo sapien
ataagaggattttaacctctattgt

SEQ ID NO: 2310513 - DNA, 25 bp, Homo sapien
gtagattgtctctttaatctgctgt

SEQ ID NO: 2310514 - DNA, 25 bp, Homo sapien
gtttgatgtaatcccctttgttgcc

SEQ ID NO: 2310515 - DNA, 25 bp, Homo sapien
gatgtaatcccctttgttgcctgtg

SEQ ID NO: 2310516 - DNA, 25 bp, Homo sapien
aatgagatgtgtggtttacaaacat

SEQ ID NO: 2310517 - DNA, 25 bp, Homo sapien
tctctgttctagacgccctcattcc

SEQ ID NO: 2310518 - DNA, 25 bp, Homo sapien
gccgggcagacttagctcgcgtcct

SEQ ID NO: 2310519 - DNA, 25 bp, Homo sapien
cctctacccaggcacggctgaggtt

SEQ ID NO: 2310520 - DNA, 25 bp, Homo sapien
cacggctgaggtttaccaagcccgg

SEQ ID NO: 2310521 - DNA, 25 bp, Homo sapien
gaggaaacgaccagcactgccgtct

SEQ ID NO: 2310522 - DNA, 25 bp, Homo sapien
cactgccgtctgatgagaggagcct

SEQ ID NO: 2310523 - DNA, 25 bp, Homo sapien
agtggttgagaacaaggttgcatcc

SEQ ID NO: 2310524 - DNA, 25 bp, Homo sapien
gccttccccgcaaaccagtgaggaa

SEQ ID NO: 2310525 - DNA, 25 bp, Homo sapien
acagccagattacaaaaatgttttg

SEQ ID NO: 2310526 - DNA, 25 bp, Homo sapien
tcctcttactgatcaggaaagacat

SEQ ID NO: 2310527 - DNA, 25 bp, Homo sapien
aaagacattgagattgcactcagag

SEQ ID NO: 2310528 - DNA, 25 bp, Homo sapien
tattcctatatagcaagtggaccaa

SEQ ID NO: 2310529 - DNA, 25 bp, Homo sapien
cagattgtgcagatcttgacccagg

SEQ ID NO: 2310530 - DNA, 25 bp, Homo sapien
ttgccatccgaggtgacatgcccaa

SEQ ID NO: 2310531 - DNA, 25 bp, Homo sapien
tgctttggcaacaccagttgggaca

SEQ ID NO: 2310532 - DNA, 25 bp, Homo sapien
caaggcgtctccgaaagctgggact

SEQ ID NO: 2310533 - DNA, 25 bp, Homo sapien
tcatgaatcaaaggacccggaaggt

SEQ ID NO: 2310534 - DNA, 25 bp, Homo sapien
cattacagcatgtgacccctggagg

SEQ ID NO: 2310535 - DNA, 25 bp, Homo sapien
gagacactggttatgcctctggacc

SEQ ID NO: 2310536 - DNA, 25 bp, Homo sapien
tgaagcgagccgaaaaagaatgtcc

SEQ ID NO: 2310537 - DNA, 25 bp, Homo sapien
tcatccatgttgtgcaccaagctgg

SEQ ID NO: 2310538 - DNA, 25 bp, Homo sapien
tctacccagaggtaacaactagcct

SEQ ID NO: 2310539 - DNA, 25 bp, Homo sapien
cagagactgacgctggtggattgct

SEQ ID NO: 2310540 - DNA, 25 bp, Homo sapien
caagctgggtgccttcattttttaa

SEQ ID NO: 2310541 - DNA, 25 bp, Homo sapien
ggtgtccacagcaggggatggttct

SEQ ID NO: 2310542 - DNA, 25 bp, Homo sapien
ttattgtgtggacaccggggagcct

SEQ ID NO: 2310543 - DNA, 25 bp, Homo sapien
gcaggacgcaattgttctgtcctcc

SEQ ID NO: 2310544 - DNA, 25 bp, Homo sapien
tttcagcaggggcaggacgcaattg

SEQ ID NO: 2310545 - DNA, 25 bp, Homo sapien
ttagaagtcctgctcccagcaggcc

SEQ ID NO: 2310546 - DNA, 25 bp, Homo sapien
tttagaagtcctgctcccagcaggc

SEQ ID NO: 2310547 - DNA, 25 bp, Homo sapien
cttttagaagtcctgctcccagcag

SEQ ID NO: 2310548 - DNA, 25 bp, Homo sapien
ttttagaagtcctgctcccagcagg

SEQ ID NO: 2310549 - DNA, 25 bp, Homo sapien
gagactgtgcttatagtcagcaaaa

SEQ ID NO: 2310550 - DNA, 25 bp, Homo sapien
tcagtgagaccgtgcgtgaaagctg

SEQ ID NO: 2310551 - DNA, 25 bp, Homo sapien
aacctaacgtgtgtgggaggcgcct

SEQ ID NO: 2310552 - DNA, 25 bp, Homo sapien
cttgaggagactgcgggcgaaggct

SEQ ID NO: 2310553 - DNA, 25 bp, Homo sapien
ctggaagtgaggcactgccgtagca

SEQ ID NO: 2310554 - DNA, 25 bp, Homo sapien
aggtgatccgcagtgttgcttggca

SEQ ID NO: 2310555 - DNA, 25 bp, Homo sapien
tgttagctttcctaggactgccata

SEQ ID NO: 2310556 - DNA, 25 bp, Homo sapien
tgtgtcttgaagctccctctccgtc

SEQ ID NO: 2310557 - DNA, 25 bp, Homo sapien
ttgcttggcaatggcgcctccagtc

SEQ ID NO: 2310558 - DNA, 25 bp, Homo sapien
ccaacggtggtgcaagagagaaacc

SEQ ID NO: 2310559 - DNA, 25 bp, Homo sapien
cctggatcagggctcaaagtgtgca

SEQ ID NO: 2310560 - DNA, 25 bp, Homo sapien
gcactgtggctcgagaccgtgcagc

SEQ ID NO: 2310561 - DNA, 25 bp, Homo sapien
cagccgtgggtcctgagaagatgca

SEQ ID NO: 2310562 - DNA, 25 bp, Homo sapien
ccagagctgctgagtttgaagtaaa

SEQ ID NO: 2310563 - DNA, 25 bp, Homo sapien
gctgctgagtttgaagtaaatctcc

SEQ ID NO: 2310564 - DNA, 25 bp, Homo sapien
gagctgctgagtttgaagtaaatct

SEQ ID NO: 2310565 - DNA, 25 bp, Homo sapien
caccagagctgctgagtttgaagta

SEQ ID NO: 2310566 - DNA, 25 bp, Homo sapien
aacgatggttgcatctctcggacac

SEQ ID NO: 2310567 - DNA, 25 bp, Homo sapien
aagttccccagtgtccgcacctgtt

SEQ ID NO: 2310568 - DNA, 25 bp, Homo sapien
ttagctcctgcaagttccccagtgt

SEQ ID NO: 2310569 - DNA, 25 bp, Homo sapien
tctcatcagccaccgctgttttctt

SEQ ID NO: 2310570 - DNA, 25 bp, Homo sapien
caagattaaggaaaccgcagctgag

SEQ ID NO: 2310571 - DNA, 25 bp, Homo sapien
gggcacacctatggctccttcggta

SEQ ID NO: 2310572 - DNA, 25 bp, Homo sapien
cagccaggaatctgactgtccggaa

SEQ ID NO: 2310573 - DNA, 25 bp, Homo sapien
tgaaacaccaggagaggcgtcagaa

SEQ ID NO: 2310574 - DNA, 25 bp, Homo sapien
gccaaagtctatgcgttccatctcc

SEQ ID NO: 2310575 - DNA, 25 bp, Homo sapien
cagggtcagggccaaagtctatgcg

SEQ ID NO: 2310576 - DNA, 25 bp, Homo sapien
tcagggccaaagtctatgcgttcca

SEQ ID NO: 2310577 - DNA, 25 bp, Homo sapien
gggtggcaggtaccacagtgtaggc

SEQ ID NO: 2310578 - DNA, 25 bp, Homo sapien
aggaggcaatcgctgtagctgccag

SEQ ID NO: 2310579 - DNA, 25 bp, Homo sapien
gctgccacaggcctaaggctgagtg

SEQ ID NO: 2310580 - DNA, 25 bp, Homo sapien
cagctgatgctaacagccagggcca

SEQ ID NO: 2310581 - DNA, 25 bp, Homo sapien
taacccgaggctgtgtgggagtccc

SEQ ID NO: 2310582 - DNA, 25 bp, Homo sapien
gctccttggtaagggcctgccctgg

SEQ ID NO: 2310583 - DNA, 25 bp, Homo sapien
tctagggatttggacctggaggcca

SEQ ID NO: 2310584 - DNA, 25 bp, Homo sapien
tgctgcttgctgtgaatggccctcc

SEQ ID NO: 2310585 - DNA, 25 bp, Homo sapien
tctcttggctctgggaccagcggct

SEQ ID NO: 2310586 - DNA, 25 bp, Homo sapien
aacaaaagcagactgcggagtggga

SEQ ID NO: 2310587 - DNA, 25 bp, Homo sapien
cccagacagagctggcaacaaaagc

SEQ ID NO: 2310588 - DNA, 25 bp, Homo sapien
gacagagctggcaacaaaagcagac

SEQ ID NO: 2310589 - DNA, 25 bp, Homo sapien
gctggcaacaaaagcagactgcgga

SEQ ID NO: 2310590 - DNA, 25 bp, Homo sapien
gtgagctgggccttgtctagcccct

SEQ ID NO: 2310591 - DNA, 25 bp, Homo sapien
ggtgagctgggccttgtctagcccc

SEQ ID NO: 2310592 - DNA, 25 bp, Homo sapien
tcttgtcccgcgttttggagaccat

SEQ ID NO: 2310593 - DNA, 25 bp, Homo sapien
gcgactcagaatgccgatgcctgcc

SEQ ID NO: 2310594 - DNA, 25 bp, Homo sapien
gctgggaagcatggcgactcagaat

SEQ ID NO: 2310595 - DNA, 25 bp, Homo sapien
gaggcttcggcttcttgtcccgcgt

SEQ ID NO: 2310596 - DNA, 25 bp, Homo sapien
ggccaatccttttcaatctcccaat

SEQ ID NO: 2310597 - DNA, 25 bp, Homo sapien
ttcaatctcccaatcagatataact

SEQ ID NO: 2310598 - DNA, 25 bp, Homo sapien
tccttcaggccaatccttttcaatc

SEQ ID NO: 2310599 - DNA, 25 bp, Homo sapien
ccaaaagcacagtactgataacctt

SEQ ID NO: 2310600 - DNA, 25 bp, Homo sapien
cttttctgccttcacaggtcctccc

SEQ ID NO: 2310601 - DNA, 25 bp, Homo sapien
gaacactagcacgtaggagcagcat

SEQ ID NO: 2310602 - DNA, 25 bp, Homo sapien
ctcttcaggcggattggacagcacc

SEQ ID NO: 2310603 - DNA, 25 bp, Homo sapien
ccaaggtattgctggaggctcacca

SEQ ID NO: 2310604 - DNA, 25 bp, Homo sapien
gtcctgtgacaacgagagaactggc

SEQ ID NO: 2310605 - DNA, 25 bp, Homo sapien
cttcaggtcacaaattccgagggcc

SEQ ID NO: 2310606 - DNA, 25 bp, Homo sapien
tccttcaggtcacaaattccgaggg

SEQ ID NO: 2310607 - DNA, 25 bp, Homo sapien
cttccttcaggtcacaaattccgag

SEQ ID NO: 2310608 - DNA, 25 bp, Homo sapien
ttcaggtcacaaattccgagggcct

SEQ ID NO: 2310609 - DNA, 25 bp, Homo sapien
tgggagcccttagtcagcaatatca

SEQ ID NO: 2310610 - DNA, 25 bp, Homo sapien
gccccagtggctagagacagtctta

SEQ ID NO: 2310611 - DNA, 25 bp, Homo sapien
tcatgccaatgctggagaatcccca

SEQ ID NO: 2310612 - DNA, 25 bp, Homo sapien
taggcggaggcggtcaaatgattct

SEQ ID NO: 2310613 - DNA, 25 bp, Homo sapien
ggcgaggggacgtgcaggcactgct

SEQ ID NO: 2310614 - DNA, 25 bp, Homo sapien
aaggtcacgtccactagctggtaca

SEQ ID NO: 2310615 - DNA, 25 bp, Homo sapien
tgacattgtggcgaggggacgtgca

SEQ ID NO: 2310616 - DNA, 25 bp, Homo sapien
tacatcagctgcgtgccgccctttg

SEQ ID NO: 2310617 - DNA, 25 bp, Homo sapien
aatactactgctaggttcatcttca

SEQ ID NO: 2310618 - DNA, 25 bp, Homo sapien
gccagcatccaggtaggaccaggta

SEQ ID NO: 2310619 - DNA, 25 bp, Homo sapien
ggcacacaacaagtggtgtaaatac

SEQ ID NO: 2310620 - DNA, 25 bp, Homo sapien
catccatagagcactcggcatggcg

SEQ ID NO: 2310621 - DNA, 25 bp, Homo sapien
gtatttaaattccagagcgtcctcg

SEQ ID NO: 2310622 - DNA, 25 bp, Homo sapien
caggatttttgtgacaactcagtga

SEQ ID NO: 2310623 - DNA, 25 bp, Homo sapien
gagcgtcctcgagaatgaactttgc

SEQ ID NO: 2310624 - DNA, 25 bp, Homo sapien
cacttaatctgtatgatcttggcaa

SEQ ID NO: 2310625 - DNA, 25 bp, Homo sapien
ctctgtaccatcagcttgatgagtg

SEQ ID NO: 2310626 - DNA, 25 bp, Homo sapien
gatgagtgatcttaacacatcattt

SEQ ID NO: 2310627 - DNA, 25 bp, Homo sapien
gtaccatcagcttgatgagtgatct

SEQ ID NO: 2310628 - DNA, 25 bp, Homo sapien
ttgatgagtgatcttaacacatcat

SEQ ID NO: 2310629 - DNA, 25 bp, Homo sapien
tatgatccctctccaacaatattcc

SEQ ID NO: 2310630 - DNA, 25 bp, Homo sapien
caggcatcccaacaccattgattga

SEQ ID NO: 2310631 - DNA, 25 bp, Homo sapien
gatgccgacccattggaagagacag

SEQ ID NO: 2310632 - DNA, 25 bp, Homo sapien
ttttctccattgagttgagtggaca

SEQ ID NO: 2310633 - DNA, 25 bp, Homo sapien
ccactgtgccaggcagctatcttta

SEQ ID NO: 2310634 - DNA, 25 bp, Homo sapien
cagctatctttagaaaaaactgctt

SEQ ID NO: 2310635 - DNA, 25 bp, Homo sapien
tgccaggcagctatctttagaaaaa

SEQ ID NO: 2310636 - DNA, 25 bp, Homo sapien
tagaaaaaactgcttcagtgttctc

SEQ ID NO: 2310637 - DNA, 25 bp, Homo sapien
cgtggtggagcttgacctccctgtc

SEQ ID NO: 2310638 - DNA, 25 bp, Homo sapien
cctccctgtctatgtcgtatgcttt

SEQ ID NO: 2310639 - DNA, 25 bp, Homo sapien
ccctgtctatgtcgtatgcttttct

SEQ ID NO: 2310640 - DNA, 25 bp, Homo sapien
tgcacctcatctgcgtggtggagct

SEQ ID NO: 2310641 - DNA, 25 bp, Homo sapien
ggttgtaactggctccgggatgctc

SEQ ID NO: 2310642 - DNA, 25 bp, Homo sapien
cccagaagtgggcaagagtttccag

SEQ ID NO: 2310643 - DNA, 25 bp, Homo sapien
tgcctgcgtcctacgaaagttaagg

SEQ ID NO: 2310644 - DNA, 25 bp, Homo sapien
aaacatttggcataggcagaggccc

SEQ ID NO: 2310645 - DNA, 25 bp, Homo sapien
agcttctcacaagggccggcccaag

SEQ ID NO: 2310646 - DNA, 25 bp, Homo sapien
caattcgatatcagcttccaatttg

SEQ ID NO: 2310647 - DNA, 25 bp, Homo sapien
gccggcccaagccttggtattctct

SEQ ID NO: 2310648 - DNA, 25 bp, Homo sapien
gctcattttgctgcaattcgatatc

SEQ ID NO: 2310649 - DNA, 25 bp, Homo sapien
tggtcctggagagctggtgtctgtt

SEQ ID NO: 2310650 - DNA, 25 bp, Homo sapien
tggagagctggtgtctgtttcagcc

SEQ ID NO: 2310651 - DNA, 25 bp, Homo sapien
cagctggtcctggagagctggtgtc

SEQ ID NO: 2310652 - DNA, 25 bp, Homo sapien
cctggagagctggtgtctgtttcag

SEQ ID NO: 2310653 - DNA, 25 bp, Homo sapien
gatggagagagggagcatgtgcatg

SEQ ID NO: 2310654 - DNA, 25 bp, Homo sapien
cttggatggagagagggagcatgtg

SEQ ID NO: 2310655 - DNA, 25 bp, Homo sapien
atggagagagggagcatgtgcatgt

SEQ ID NO: 2310656 - DNA, 25 bp, Homo sapien
tggatggagagagggagcatgtgca

SEQ ID NO: 2310657 - DNA, 25 bp, Homo sapien
ttcagggtagaggttgattcctgga

SEQ ID NO: 2310658 - DNA, 25 bp, Homo sapien
acctggttcagggtagaggttgatt

SEQ ID NO: 2310659 - DNA, 25 bp, Homo sapien
cctcagggacctggttcagggtaga

SEQ ID NO: 2310660 - DNA, 25 bp, Homo sapien
tggttcagggtagaggttgattcct

SEQ ID NO: 2310661 - DNA, 25 bp, Homo sapien
tgaaggatggagggcgttggatcgt

SEQ ID NO: 2310662 - DNA, 25 bp, Homo sapien
ctgaaggatggagggcgttggatcg

SEQ ID NO: 2310663 - DNA, 25 bp, Homo sapien
gaaggatggagggcgttggatcgtt

SEQ ID NO: 2310664 - DNA, 25 bp, Homo sapien
ggtgggagttgtgtccccggactca

SEQ ID NO: 2310665 - DNA, 25 bp, Homo sapien
agttgtgtccccggactcagacagc

SEQ ID NO: 2310666 - DNA, 25 bp, Homo sapien
ttgtgtccccggactcagacagcct

SEQ ID NO: 2310667 - DNA, 25 bp, Homo sapien
tgggagttgtgtccccggactcaga

SEQ ID NO: 2310668 - DNA, 25 bp, Homo sapien
agaagggagcgggtagatccacagt

SEQ ID NO: 2310669 - DNA, 25 bp, Homo sapien
cagcaggcctgtgagtctggtgctt

SEQ ID NO: 2310670 - DNA, 25 bp, Homo sapien
gaagcgggacgaagtgaagagagca

SEQ ID NO: 2310671 - DNA, 25 bp, Homo sapien
tagatccacagtcggggcgaagcgg

SEQ ID NO: 2310672 - DNA, 25 bp, Homo sapien
ctgaccaagtttaggtatgcgcagg

SEQ ID NO: 2310673 - DNA, 25 bp, Homo sapien
gtatgcgcaggcaatgacggccact

SEQ ID NO: 2310674 - DNA, 25 bp, Homo sapien
ccaagtttaggtatgcgcaggcaat

SEQ ID NO: 2310675 - DNA, 25 bp, Homo sapien
tttaggtatgcgcaggcaatgacgg

SEQ ID NO: 2310676 - DNA, 25 bp, Homo sapien
actcgctctcgcactctatcgctct

SEQ ID NO: 2310677 - DNA, 25 bp, Homo sapien
tgcggggctggcccagctgtctcag

SEQ ID NO: 2310678 - DNA, 25 bp, Homo sapien
gctctcgcactctatcgctctcttt

SEQ ID NO: 2310679 - DNA, 25 bp, Homo sapien
cgggcactcgctctcgcactctatc

SEQ ID NO: 2310680 - DNA, 25 bp, Homo sapien
caggaactctgcgaacacagccctg

SEQ ID NO: 2310681 - DNA, 25 bp, Homo sapien
gaaggctatggagcggagctcccac

SEQ ID NO: 2310682 - DNA, 25 bp, Homo sapien
tgctggcgtgatctcatggagcaga

SEQ ID NO: 2310683 - DNA, 25 bp, Homo sapien
gagcctgtaccagggtgccaatacc

SEQ ID NO: 2310684 - DNA, 25 bp, Homo sapien
ccttgtggatggcaaagttgtggct

SEQ ID NO: 2310685 - DNA, 25 bp, Homo sapien
ctgccccttgtggatggcaaagttg

SEQ ID NO: 2310686 - DNA, 25 bp, Homo sapien
tgtggatggcaaagttgtggctact

SEQ ID NO: 2310687 - DNA, 25 bp, Homo sapien
ccccttgtggatggcaaagttgtgg

SEQ ID NO: 2310688 - DNA, 25 bp, Homo sapien
gagagagcaggggtgcccgggttct

SEQ ID NO: 2310689 - DNA, 25 bp, Homo sapien
cgcctggccagccgtcgtgctgttg

SEQ ID NO: 2310690 - DNA, 25 bp, Homo sapien
gtgcccgggttctctccgcggcgct

SEQ ID NO: 2310691 - DNA, 25 bp, Homo sapien
gcgctcatcggtggaggcgaagatg

SEQ ID NO: 2310692 - DNA, 25 bp, Homo sapien
ctggagccagggagcgggcaggatt

SEQ ID NO: 2310693 - DNA, 25 bp, Homo sapien
caaatttgccagtgacgacagctgg

SEQ ID NO: 2310694 - DNA, 25 bp, Homo sapien
aaatttgccagtgacgacagctgga

SEQ ID NO: 2310695 - DNA, 25 bp, Homo sapien
gagtctttggcatcagatctgaggg

SEQ ID NO: 2310696 - DNA, 25 bp, Homo sapien
ccagtgaggtaagctgttgtcatcc

SEQ ID NO: 2310697 - DNA, 25 bp, Homo sapien
taattacaacgacaacgccagctgc

SEQ ID NO: 2310698 - DNA, 25 bp, Homo sapien
ttaagggtgcgaattctgaagccac

SEQ ID NO: 2310699 - DNA, 25 bp, Homo sapien
tggctggcggaaacagcacgtagtt

SEQ ID NO: 2310700 - DNA, 25 bp, Homo sapien
cacgtagttgtagaggagggagccc

SEQ ID NO: 2310701 - DNA, 25 bp, Homo sapien
aaacagcacgtagttgtagaggagg

SEQ ID NO: 2310702 - DNA, 25 bp, Homo sapien
cccaccaggggtccgatccagaaga

SEQ ID NO: 2310703 - DNA, 25 bp, Homo sapien
aggctctgcggcgagtgcagctcca

SEQ ID NO: 2310704 - DNA, 25 bp, Homo sapien
ttcagcactgccaggcgctccgaca

SEQ ID NO: 2310705 - DNA, 25 bp, Homo sapien
gctcctcccaatcggtgtccggctc

SEQ ID NO: 2310706 - DNA, 25 bp, Homo sapien
tcaggccttggtaccccgtggcagg

SEQ ID NO: 2310707 - DNA, 25 bp, Homo sapien
caccaacgtaggcaaacctgttcac

SEQ ID NO: 2310708 - DNA, 25 bp, Homo sapien
tccaggaagcagctactctgcgctg

SEQ ID NO: 2310709 - DNA, 25 bp, Homo sapien
ggccaacttcagacctgcgggagag

SEQ ID NO: 2310710 - DNA, 25 bp, Homo sapien
gggtctgtacactccccactcagta

SEQ ID NO: 2310711 - DNA, 25 bp, Homo sapien
gaagtgtctaggtgcaaatctcccc

SEQ ID NO: 2310712 - DNA, 25 bp, Homo sapien
taggagaacgccatccaagaactgg

SEQ ID NO: 2310713 - DNA, 25 bp, Homo sapien
tgttctctgactgaccgggtgctct

SEQ ID NO: 2310714 - DNA, 25 bp, Homo sapien
tcagataagtccgtgcatgcaaggc

SEQ ID NO: 2310715 - DNA, 25 bp, Homo sapien
gcctgcaggaatgctaaggacttgg

SEQ ID NO: 2310716 - DNA, 25 bp, Homo sapien
gaagtagagaacaggtgcctcctct

SEQ ID NO: 2310717 - DNA, 25 bp, Homo sapien
gctggacaatgaccctgatgacccc

SEQ ID NO: 2310718 - DNA, 25 bp, Homo sapien
tcttaaggccggaggtcagtctgtc

SEQ ID NO: 2310719 - DNA, 25 bp, Homo sapien
ccgcgctctcctcggtgccgtgcgc

SEQ ID NO: 2310720 - DNA, 25 bp, Homo sapien
ggccctgcgcatgatgcgcccaggt

SEQ ID NO: 2310721 - DNA, 25 bp, Homo sapien
cggcgcgcgggttgggaggctccag

SEQ ID NO: 2310722 - DNA, 25 bp, Homo sapien
gcggcggtgtagaccggcccagcgt

SEQ ID NO: 2310723 - DNA, 25 bp, Homo sapien
aaagcccggagcagcgagatctggt

SEQ ID NO: 2310724 - DNA, 25 bp, Homo sapien
tctggttgcccaccaagagggccag

SEQ ID NO: 2310725 - DNA, 25 bp, Homo sapien
cgccagcgcgatctgcaggatggta

SEQ ID NO: 2310726 - DNA, 25 bp, Homo sapien
agaactctgcgaacacggccttgag

SEQ ID NO: 2310727 - DNA, 25 bp, Homo sapien
ttgggaggctcttgccttcctggtg

SEQ ID NO: 2310728 - DNA, 25 bp, Homo sapien
tgagcccaccccagggtcgaggctc

SEQ ID NO: 2310729 - DNA, 25 bp, Homo sapien
cactctgcggcaccccttttttcca

SEQ ID NO: 2310730 - DNA, 25 bp, Homo sapien
caggtggggtaagaggcctggtcct

SEQ ID NO: 2310731 - DNA, 25 bp, Homo sapien
tggtgcggcgggagtcagtggaggc

SEQ ID NO: 2310732 - DNA, 25 bp, Homo sapien
cctggccctgcgttgtgttgttgtt

SEQ ID NO: 2310733 - DNA, 25 bp, Homo sapien
cagagtgccagctggaaggtcagaa

SEQ ID NO: 2310734 - DNA, 25 bp, Homo sapien
cagacaggccaatggacagggctgg

SEQ ID NO: 2310735 - DNA, 25 bp, Homo sapien
gatcccagctgcttggttaaccatg

SEQ ID NO: 2310736 - DNA, 25 bp, Homo sapien
atctgaagtgggctccgctccaggg

SEQ ID NO: 2310737 - DNA, 25 bp, Homo sapien
gcggtggagagaaaggcaacatcct

SEQ ID NO: 2310738 - DNA, 25 bp, Homo sapien
cattatttgccttgagtgcctgccc

SEQ ID NO: 2310739 - DNA, 25 bp, Homo sapien
tgaaccgattcatgaccaccgcagg

SEQ ID NO: 2310740 - DNA, 25 bp, Homo sapien
atgaccaccgcagggccaaaagagc

SEQ ID NO: 2310741 - DNA, 25 bp, Homo sapien
cagggccaaaagagcgggctgggtt

SEQ ID NO: 2310742 - DNA, 25 bp, Homo sapien
agtgagcggggctgaaccgattcat

SEQ ID NO: 2310743 - DNA, 25 bp, Homo sapien
cccaagctctagacccacagaatcc

SEQ ID NO: 2310744 - DNA, 25 bp, Homo sapien
agctctagacccacagaatccaggt

SEQ ID NO: 2310745 - DNA, 25 bp, Homo sapien
aagctctagacccacagaatccagg

SEQ ID NO: 2310746 - DNA, 25 bp, Homo sapien
caagctctagacccacagaatccag

SEQ ID NO: 2310747 - DNA, 25 bp, Homo sapien
cctcgtcaggctcatacgtgccttt

SEQ ID NO: 2310748 - DNA, 25 bp, Homo sapien
catacgtgcctttgatgatggccac

SEQ ID NO: 2310749 - DNA, 25 bp, Homo sapien
gctcatacgtgcctttgatgatggc

SEQ ID NO: 2310750 - DNA, 25 bp, Homo sapien
tttgatgatggccacacgctcactc

SEQ ID NO: 2310751 - DNA, 25 bp, Homo sapien
cccctctctaactgtgcagccaggg

SEQ ID NO: 2310752 - DNA, 25 bp, Homo sapien
caggagtcccatcatgggttccttc

SEQ ID NO: 2310753 - DNA, 25 bp, Homo sapien
cggttgtgcaaaaaggaagcttgtg

SEQ ID NO: 2310754 - DNA, 25 bp, Homo sapien
tcagccaagaggaccggttgtgcaa

SEQ ID NO: 2310755 - DNA, 25 bp, Homo sapien
tcagtgatttattgggtagccccca

SEQ ID NO: 2310756 - DNA, 25 bp, Homo sapien
taaggcggcattcaatgaaccagtc

SEQ ID NO: 2310757 - DNA, 25 bp, Homo sapien
cacctaggggctgggatcccttcag

SEQ ID NO: 2310758 - DNA, 25 bp, Homo sapien
ttgcagcctgtgagcttggcactgc

SEQ ID NO: 2310759 - DNA, 25 bp, Homo sapien
ggagactgagcggagaagggctccc

SEQ ID NO: 2310760 - DNA, 25 bp, Homo sapien
cccaggggactcaagcatgagggac

SEQ ID NO: 2310761 - DNA, 25 bp, Homo sapien
cggggatgcattgggataggctgcc

SEQ ID NO: 2310762 - DNA, 25 bp, Homo sapien
ttctgcgccccacccggatagcggg

SEQ ID NO: 2310763 - DNA, 25 bp, Homo sapien
gaggttccttatctggctgcctagg

SEQ ID NO: 2310764 - DNA, 25 bp, Homo sapien
tgctgatacctaggagagggcctcc

SEQ ID NO: 2310765 - DNA, 25 bp, Homo sapien
tgatgtcctcatccacacatgacgg

SEQ ID NO: 2310766 - DNA, 25 bp, Homo sapien
gccatgtgtattgcaccctaagcag

SEQ ID NO: 2310767 - DNA, 25 bp, Homo sapien
tggctccctttgagtgactgggacc

SEQ ID NO: 2310768 - DNA, 25 bp, Homo sapien
ccagtctcacctgtggctttcaggc

SEQ ID NO: 2310769 - DNA, 25 bp, Homo sapien
gactgggaccctctcttggcctttc

SEQ ID NO: 2310770 - DNA, 25 bp, Homo sapien
gcccttctccagtgtacaagtcggg

SEQ ID NO: 2310771 - DNA, 25 bp, Homo sapien
gactcaaaccgcgtcagatcacaca

SEQ ID NO: 2310772 - DNA, 25 bp, Homo sapien
cacagcgactcaaaccgcgtcagat

SEQ ID NO: 2310773 - DNA, 25 bp, Homo sapien
tattccacagcgactcaaaccgcgt

SEQ ID NO: 2310774 - DNA, 25 bp, Homo sapien
accgcgtcagatcacacaaggccat

SEQ ID NO: 2310775 - DNA, 25 bp, Homo sapien
cgactttaccaaggacgctgtggac

SEQ ID NO: 2310776 - DNA, 25 bp, Homo sapien
cagatgtgaatacagtcgactttac

SEQ ID NO: 2310777 - DNA, 25 bp, Homo sapien
gaatacagtcgactttaccaaggac

SEQ ID NO: 2310778 - DNA, 25 bp, Homo sapien
gaatgcagatgtgaatacagtcgac

SEQ ID NO: 2310779 - DNA, 25 bp, Homo sapien
gcttagatacagcaagatcactcag

SEQ ID NO: 2310780 - DNA, 25 bp, Homo sapien
tggccccctccatatctaggctttg

SEQ ID NO: 2310781 - DNA, 25 bp, Homo sapien
catgttccaatgtcagcttagatac

SEQ ID NO: 2310782 - DNA, 25 bp, Homo sapien
ttccaaatgggctgacaccacaccg

SEQ ID NO: 2310783 - DNA, 25 bp, Homo sapien
ctacgatgatttccagggcgggttg

SEQ ID NO: 2310784 - DNA, 25 bp, Homo sapien
gactcgtgttgtagacagtccaagg

SEQ ID NO: 2310785 - DNA, 25 bp, Homo sapien
gagctggaacctcctacgatgattt

SEQ ID NO: 2310786 - DNA, 25 bp, Homo sapien
gttgggcctgactcgtgttgtagac

SEQ ID NO: 2310787 - DNA, 25 bp, Homo sapien
gcgcaggcggatgggcttatgcatg

SEQ ID NO: 2310788 - DNA, 25 bp, Homo sapien
tgaggggtgttgctcatatgcctgc

SEQ ID NO: 2310789 - DNA, 25 bp, Homo sapien
atgaggggtgttgctcatatgcctg

SEQ ID NO: 2310790 - DNA, 25 bp, Homo sapien
tggcagggcgcaggcggatgggctt

SEQ ID NO: 2310791 - DNA, 25 bp, Homo sapien
ctgtccccaggactgtgctggtcag

SEQ ID NO: 2310792 - DNA, 25 bp, Homo sapien
tgtccccaggactgtgctggtcaga

SEQ ID NO: 2310793 - DNA, 25 bp, Homo sapien
tggtgtcctgtctctggctgaccct

SEQ ID NO: 2310794 - DNA, 25 bp, Homo sapien
gtgtcctgtctctggctgaccctgg

SEQ ID NO: 2310795 - DNA, 25 bp, Homo sapien
gccttggccgttccttgccttgctc

SEQ ID NO: 2310796 - DNA, 25 bp, Homo sapien
tgtcctgtctctggctgaccctggc

SEQ ID NO: 2310797 - DNA, 25 bp, Homo sapien
cctgcacgccaacatgctggcccag

SEQ ID NO: 2310798 - DNA, 25 bp, Homo sapien
tttccaaagcctgcacgccaacatg

SEQ ID NO: 2310799 - DNA, 25 bp, Homo sapien
gctttccaaagcctgcacgccaaca

SEQ ID NO: 2310800 - DNA, 25 bp, Homo sapien
caaagcctgcacgccaacatgctgg

SEQ ID NO: 2310801 - DNA, 25 bp, Homo sapien
ggcatgaccccataaagcagagcag

SEQ ID NO: 2310802 - DNA, 25 bp, Homo sapien
aagggtctctcggatgtctcccggc

SEQ ID NO: 2310803 - DNA, 25 bp, Homo sapien
ggcaatctgtagcacggagggaagt

SEQ ID NO: 2310804 - DNA, 25 bp, Homo sapien
tgtgggccagcgcatgactgagccc

SEQ ID NO: 2310805 - DNA, 25 bp, Homo sapien
gaacttgggaacagtcggagagcag

SEQ ID NO: 2310806 - DNA, 25 bp, Homo sapien
tcggagagcagaggacgtgggtgga

SEQ ID NO: 2310807 - DNA, 25 bp, Homo sapien
gtcggagagcagaggacgtgggtgg

SEQ ID NO: 2310808 - DNA, 25 bp, Homo sapien
agtcggagagcagaggacgtgggtg

SEQ ID NO: 2310809 - DNA, 25 bp, Homo sapien
ttactctggaccagacgcgggctct

SEQ ID NO: 2310810 - DNA, 25 bp, Homo sapien
ctggacagagggagttactctggac

SEQ ID NO: 2310811 - DNA, 25 bp, Homo sapien
aggggggtgacacctcactgccgcc

SEQ ID NO: 2310812 - DNA, 25 bp, Homo sapien
gacagagaaacccctgccactgggc

SEQ ID NO: 2310813 - DNA, 25 bp, Homo sapien
tggccagttgagacactgttccgga

SEQ ID NO: 2310814 - DNA, 25 bp, Homo sapien
ctggccagttgagacactgttccgg

SEQ ID NO: 2310815 - DNA, 25 bp, Homo sapien
ggccagttgagacactgttccggac

SEQ ID NO: 2310816 - DNA, 25 bp, Homo sapien
ctgtcggtggaagcgaagacacaga

SEQ ID NO: 2310817 - DNA, 25 bp, Homo sapien
cacagagatcccaatcatggtggcc

SEQ ID NO: 2310818 - DNA, 25 bp, Homo sapien
cggtggaagcgaagacacagagcac

SEQ ID NO: 2310819 - DNA, 25 bp, Homo sapien
agcctgatgtctgacggctgtcggt

SEQ ID NO: 2310820 - DNA, 25 bp, Homo sapien
gatggcagggccgaaggagcgggct

SEQ ID NO: 2310821 - DNA, 25 bp, Homo sapien
gaaggagcgggctggattcatggag

SEQ ID NO: 2310822 - DNA, 25 bp, Homo sapien
cgaaggagcgggctggattcatgga

SEQ ID NO: 2310823 - DNA, 25 bp, Homo sapien
caatgatgatggcagggccgaagga

SEQ ID NO: 2310824 - DNA, 25 bp, Homo sapien
gagctatcaggaccacagggtggct

SEQ ID NO: 2310825 - DNA, 25 bp, Homo sapien
caggtctccctcaactgtctgtaag

SEQ ID NO: 2310826 - DNA, 25 bp, Homo sapien
agtcgtgtttcccaagcccacaagg

SEQ ID NO: 2310827 - DNA, 25 bp, Homo sapien
taaatttgagaaccacgagtcgtgt

SEQ ID NO: 2310828 - DNA, 25 bp, Homo sapien
gtgaggatagccagccgctgcgcca

SEQ ID NO: 2310829 - DNA, 25 bp, Homo sapien
ctctacggtgcctgtgaggatagcc

SEQ ID NO: 2310830 - DNA, 25 bp, Homo sapien
acgaagttgtagatcagtgaggcca

SEQ ID NO: 2310831 - DNA, 25 bp, Homo sapien
agtgaggccaggagggctcccatca

SEQ ID NO: 2310832 - DNA, 25 bp, Homo sapien
tccatctccacggctcccgaacccg

SEQ ID NO: 2310833 - DNA, 25 bp, Homo sapien
gctgggattccttcttcaggggctc

SEQ ID NO: 2310834 - DNA, 25 bp, Homo sapien
cacggctcccgaacccggctgggat

SEQ ID NO: 2310835 - DNA, 25 bp, Homo sapien
atctccacggctcccgaacccggct

SEQ ID NO: 2310836 - DNA, 25 bp, Homo sapien
tggtcaggacaaaaggtcaagcctc

SEQ ID NO: 2310837 - DNA, 25 bp, Homo sapien
gagacggcttctttgacccaggtca

SEQ ID NO: 2310838 - DNA, 25 bp, Homo sapien
tcaatggctagatgggcacttcccc

SEQ ID NO: 2310839 - DNA, 25 bp, Homo sapien
aataaagacctattgggagaggccg

SEQ ID NO: 2310840 - DNA, 25 bp, Homo sapien
ggagaggagacgttcactgtgaggg

SEQ ID NO: 2310841 - DNA, 25 bp, Homo sapien
gaggagacgttcactgtgaggggtg

SEQ ID NO: 2310842 - DNA, 25 bp, Homo sapien
agggagaggagacgttcactgtgag

SEQ ID NO: 2310843 - DNA, 25 bp, Homo sapien
ggagacgttcactgtgaggggtggc

SEQ ID NO: 2310844 - DNA, 25 bp, Homo sapien
tggcatcccaactaacaataaagag

SEQ ID NO: 2310845 - DNA, 25 bp, Homo sapien
gatgcattgaggacagaactagtga

SEQ ID NO: 2310846 - DNA, 25 bp, Homo sapien
gaactgatttccgtgagacaatgac

SEQ ID NO: 2310847 - DNA, 25 bp, Homo sapien
aagattagcttgtctcagggtggga

SEQ ID NO: 2310848 - DNA, 25 bp, Homo sapien
tccaaattgcgggtagccatgcgtt

SEQ ID NO: 2310849 - DNA, 25 bp, Homo sapien
tgttttctagagctatcgcctccat

SEQ ID NO: 2310850 - DNA, 25 bp, Homo sapien
gcgcttcttgtatgctccagccagt

SEQ ID NO: 2310851 - DNA, 25 bp, Homo sapien
cagagttttcattacccggttgcaa

SEQ ID NO: 2310852 - DNA, 25 bp, Homo sapien
ctccgcactctgcgctgcaggccct

SEQ ID NO: 2310853 - DNA, 25 bp, Homo sapien
cagattcaggtaagatatgcccata

SEQ ID NO: 2310854 - DNA, 25 bp, Homo sapien
agattcaggtaagatatgcccataa

SEQ ID NO: 2310855 - DNA, 25 bp, Homo sapien
gcaagccaaatttcatcatcagcgg

SEQ ID NO: 2310856 - DNA, 25 bp, Homo sapien
tatctcgacgcccagcttgtaatgc

SEQ ID NO: 2310857 - DNA, 25 bp, Homo sapien
aacagggtaataggcggccctctca

SEQ ID NO: 2310858 - DNA, 25 bp, Homo sapien
aatgcagcccgccatatcacaggca

SEQ ID NO: 2310859 - DNA, 25 bp, Homo sapien
gaggcagtgccggtgaataattcat

SEQ ID NO: 2310860 - DNA, 25 bp, Homo sapien
ccctctggaagacgcaatctcagcg

SEQ ID NO: 2310861 - DNA, 25 bp, Homo sapien
aagacgcaatctcagcgcccagggc

SEQ ID NO: 2310862 - DNA, 25 bp, Homo sapien
agaggaggcagtgccggtgaataat

SEQ ID NO: 2310863 - DNA, 25 bp, Homo sapien
tcattcctggctctctcggtgtctc

SEQ ID NO: 2310864 - DNA, 25 bp, Homo sapien
tggctctctcggtgtctcaggctct

SEQ ID NO: 2310865 - DNA, 25 bp, Homo sapien
cagcacctctcattcctggctctct

SEQ ID NO: 2310866 - DNA, 25 bp, Homo sapien
tcctggctctctcggtgtctcaggc

SEQ ID NO: 2310867 - DNA, 25 bp, Homo sapien
gtgcacatatgtgagccaacacgca

SEQ ID NO: 2310868 - DNA, 25 bp, Homo sapien
atgtgagccaacacgcagccttgac

SEQ ID NO: 2310869 - DNA, 25 bp, Homo sapien
catatgtgagccaacacgcagcctt

SEQ ID NO: 2310870 - DNA, 25 bp, Homo sapien
tacacgtgcacatatgtgagccaac

SEQ ID NO: 2310871 - DNA, 25 bp, Homo sapien
ccccgctcggctccgatctgtccgc

SEQ ID NO: 2310872 - DNA, 25 bp, Homo sapien
ggcgctggaccggtggcgggctcag

SEQ ID NO: 2310873 - DNA, 25 bp, Homo sapien
gggcttcggcaagccggcagccggc

SEQ ID NO: 2310874 - DNA, 25 bp, Homo sapien
gggctcagcgccgagtcgcggaggg

SEQ ID NO: 2310875 - DNA, 25 bp, Homo sapien
ctgcgggtgtctccagttctcacat

SEQ ID NO: 2310876 - DNA, 25 bp, Homo sapien
tcttggagacttggctaaagcggaa

SEQ ID NO: 2310877 - DNA, 25 bp, Homo sapien
agaggcagccacctcgtcgagcttg

SEQ ID NO: 2310878 - DNA, 25 bp, Homo sapien
gcttcagagacagccgctcgtagga

SEQ ID NO: 2310879 - DNA, 25 bp, Homo sapien
actcgttgaggttgcacagcgtgac

SEQ ID NO: 2310880 - DNA, 25 bp, Homo sapien
agcagcatgtctcgaatgtcgtgcc

SEQ ID NO: 2310881 - DNA, 25 bp, Homo sapien
cacgcatgttgaagggtttgggttt

SEQ ID NO: 2310882 - DNA, 25 bp, Homo sapien
gtgcccagctcggtcgtagaactca

SEQ ID NO: 2310883 - DNA, 25 bp, Homo sapien
gctgcggaagttggctttgtcctgc

SEQ ID NO: 2310884 - DNA, 25 bp, Homo sapien
tcaagctctggggaatccaggactc

SEQ ID NO: 2310885 - DNA, 25 bp, Homo sapien
aagctctggggaatccaggactctc

SEQ ID NO: 2310886 - DNA, 25 bp, Homo sapien
caagctctggggaatccaggactct

SEQ ID NO: 2310887 - DNA, 25 bp, Homo sapien
cagcccaggttccattagcagcagt

SEQ ID NO: 2310888 - DNA, 25 bp, Homo sapien
gccagcccaggttccattagcagca

SEQ ID NO: 2310889 - DNA, 25 bp, Homo sapien
ccagcccaggttccattagcagcag

SEQ ID NO: 2310890 - DNA, 25 bp, Homo sapien
gggaaggtgccagaggggaaggcga

SEQ ID NO: 2310891 - DNA, 25 bp, Homo sapien
tgccagaggggaaggcgatgtgact

SEQ ID NO: 2310892 - DNA, 25 bp, Homo sapien
gaaggtgccagaggggaaggcgatg

SEQ ID NO: 2310893 - DNA, 25 bp, Homo sapien
ggtgccagaggggaaggcgatgtga

SEQ ID NO: 2310894 - DNA, 25 bp, Homo sapien
cgattctgagatgtcctgctgctgc

SEQ ID NO: 2310895 - DNA, 25 bp, Homo sapien
cagaggagaatgacatggagcagaa

SEQ ID NO: 2310896 - DNA, 25 bp, Homo sapien
tcctcttccgattctgagatgtcct

SEQ ID NO: 2310897 - DNA, 25 bp, Homo sapien
ctccagaggagaatgacatggagca

SEQ ID NO: 2310898 - DNA, 25 bp, Homo sapien
aaaaatgtggttggtgccatggagg

SEQ ID NO: 2310899 - DNA, 25 bp, Homo sapien
tgcagctgttggcaaaggccaccaa

SEQ ID NO: 2310900 - DNA, 25 bp, Homo sapien
agctgttggcaaaggccaccaagtc

SEQ ID NO: 2310901 - DNA, 25 bp, Homo sapien
gtgccatggagggtgcagctgttgg

SEQ ID NO: 2310902 - DNA, 25 bp, Homo sapien
aggacaaaggccaccgcccacagca

SEQ ID NO: 2310903 - DNA, 25 bp, Homo sapien
ggcacccagtgccaggacaaaggcc

SEQ ID NO: 2310904 - DNA, 25 bp, Homo sapien
caggaaggcacccagtgccaggaca

SEQ ID NO: 2310905 - DNA, 25 bp, Homo sapien
ggaaggcacccagtgccaggacaaa

SEQ ID NO: 2310906 - DNA, 25 bp, Homo sapien
cattagtgttgcagagggtgactgc

SEQ ID NO: 2310907 - DNA, 25 bp, Homo sapien
tgggacagccgcacagcattagtgt

SEQ ID NO: 2310908 - DNA, 25 bp, Homo sapien
ccttggtaggagcaatagagcagca

SEQ ID NO: 2310909 - DNA, 25 bp, Homo sapien
ctgaggtaataagcaacgcggtccc

SEQ ID NO: 2310910 - DNA, 25 bp, Homo sapien
gccttaggccctccatgattacaga

SEQ ID NO: 2310911 - DNA, 25 bp, Homo sapien
ctcgcccctctgtagctctagtagt

SEQ ID NO: 2310912 - DNA, 25 bp, Homo sapien
gtagctctagtagtgccttaggccc

SEQ ID NO: 2310913 - DNA, 25 bp, Homo sapien
gaaagattggggtatgaatccttcc

SEQ ID NO: 2310914 - DNA, 25 bp, Homo sapien
aactgttcctggtagggtgcatcgc

SEQ ID NO: 2310915 - DNA, 25 bp, Homo sapien
aaactgttcctggtagggtgcatcg

SEQ ID NO: 2310916 - DNA, 25 bp, Homo sapien
ctgttcctggtagggtgcatcgcct

SEQ ID NO: 2310917 - DNA, 25 bp, Homo sapien
gttcctggtagggtgcatcgcctga

SEQ ID NO: 2310918 - DNA, 25 bp, Homo sapien
cacccttcatggtcttcagccgcgg

SEQ ID NO: 2310919 - DNA, 25 bp, Homo sapien
cacacaggcaggtactcgtcctgct

SEQ ID NO: 2310920 - DNA, 25 bp, Homo sapien
tctcggcccgagttgaacgtgtagc

SEQ ID NO: 2310921 - DNA, 25 bp, Homo sapien
tagcactttccatagcgtgtgaaga

SEQ ID NO: 2310922 - DNA, 25 bp, Homo sapien
ccagagtgtcactgtttcagatgct

SEQ ID NO: 2310923 - DNA, 25 bp, Homo sapien
tcccagagtgtcactgtttcagatg

SEQ ID NO: 2310924 - DNA, 25 bp, Homo sapien
tgtttcagatgctctccatttctcc

SEQ ID NO: 2310925 - DNA, 25 bp, Homo sapien
cagagtgtcactgtttcagatgctc

SEQ ID NO: 2310926 - DNA, 25 bp, Homo sapien
gatgcctgcttcgaaggacgtctcg

SEQ ID NO: 2310927 - DNA, 25 bp, Homo sapien
gactatggatctgcactttgatgcc

SEQ ID NO: 2310928 - DNA, 25 bp, Homo sapien
ccagctggtcgatgaaaggaggttc

SEQ ID NO: 2310929 - DNA, 25 bp, Homo sapien
ggtcgatgaaaggaggttcatcctg

SEQ ID NO: 2310930 - DNA, 25 bp, Homo sapien
cccaggaccagcctcccatggccct

SEQ ID NO: 2310931 - DNA, 25 bp, Homo sapien
gaccagcctcccatggccctctcac

SEQ ID NO: 2310932 - DNA, 25 bp, Homo sapien
ggaccagcctcccatggccctctca

SEQ ID NO: 2310933 - DNA, 25 bp, Homo sapien
caggaccagcctcccatggccctct

SEQ ID NO: 2310934 - DNA, 25 bp, Homo sapien
cagagtttacagagcattcttgttc

SEQ ID NO: 2310935 - DNA, 25 bp, Homo sapien
gactagccagattaccacccaggtc

SEQ ID NO: 2310936 - DNA, 25 bp, Homo sapien
caaatcagcttgatggactcctctg

SEQ ID NO: 2310937 - DNA, 25 bp, Homo sapien
tctgacaagatgcagatctctggag

SEQ ID NO: 2310938 - DNA, 25 bp, Homo sapien
gatgctgtaggagtcgaagaaatcc

SEQ ID NO: 2310939 - DNA, 25 bp, Homo sapien
tctcacagtcgatgcggcaggcagt

SEQ ID NO: 2310940 - DNA, 25 bp, Homo sapien
accaggtagcgcgtctcacagtcga

SEQ ID NO: 2310941 - DNA, 25 bp, Homo sapien
caaatccgagtccatggtaacagct

SEQ ID NO: 2310942 - DNA, 25 bp, Homo sapien
gggagctagtgaagggcagcaaagg

SEQ ID NO: 2310943 - DNA, 25 bp, Homo sapien
ggagctagtgaagggcagcaaaggc

SEQ ID NO: 2310944 - DNA, 25 bp, Homo sapien
tccttgtactgctctggagtacagt

SEQ ID NO: 2310945 - DNA, 25 bp, Homo sapien
gaagatgctattctcaactttattg

SEQ ID NO: 2310946 - DNA, 25 bp, Homo sapien
tcaccaagcctccccatggatattt

SEQ ID NO: 2310947 - DNA, 25 bp, Homo sapien
tccagggtcaaccagctgaggggct

SEQ ID NO: 2310948 - DNA, 25 bp, Homo sapien
ttcataggggcctctgaagatgcta

SEQ ID NO: 2310949 - DNA, 25 bp, Homo sapien
cacacgcagtactcctggtccttct

SEQ ID NO: 2310950 - DNA, 25 bp, Homo sapien
tggacagctctttgccatagcgggt

SEQ ID NO: 2310951 - DNA, 25 bp, Homo sapien
gcgggtcaggttgcaaggcatttca

SEQ ID NO: 2310952 - DNA, 25 bp, Homo sapien
cctatgtattgctcagatttgttga

SEQ ID NO: 2310953 - DNA, 25 bp, Homo sapien
ggagccctgcaatctcataggcctt

SEQ ID NO: 2310954 - DNA, 25 bp, Homo sapien
caggagccctgcaatctcataggcc

SEQ ID NO: 2310955 - DNA, 25 bp, Homo sapien
ccaggagccctgcaatctcataggc

SEQ ID NO: 2310956 - DNA, 25 bp, Homo sapien
gagccctgcaatctcataggccttc

SEQ ID NO: 2310957 - DNA, 25 bp, Homo sapien
tgatagggagccacgccatgcccat

SEQ ID NO: 2310958 - DNA, 25 bp, Homo sapien
ggagccacgccatgcccatggcatg

SEQ ID NO: 2310959 - DNA, 25 bp, Homo sapien
cttttggatgatagggagccacgcc

SEQ ID NO: 2310960 - DNA, 25 bp, Homo sapien
tggatgatagggagccacgccatgc

SEQ ID NO: 2310961 - DNA, 25 bp, Homo sapien
taggcgtagtcaaagagctccagca

SEQ ID NO: 2310962 - DNA, 25 bp, Homo sapien
ctccagcaccgtgaggatgctggcc

SEQ ID NO: 2310963 - DNA, 25 bp, Homo sapien
ccgtgaggatgctggccccgatgaa

SEQ ID NO: 2310964 - DNA, 25 bp, Homo sapien
ctcgtaggcgtagtcaaagagctcc

SEQ ID NO: 2310965 - DNA, 25 bp, Homo sapien
ttgtccgcactgctccttttggcct

SEQ ID NO: 2310966 - DNA, 25 bp, Homo sapien
aggctgagggccacgcccttgtccg

SEQ ID NO: 2310967 - DNA, 25 bp, Homo sapien
ctggcattttcctcgtcggcacagc

SEQ ID NO: 2310968 - DNA, 25 bp, Homo sapien
gtgtcttttgacgtcgtccaggctg

SEQ ID NO: 2310969 - DNA, 25 bp, Homo sapien
ctggagggcgccctcgctcgctccc

SEQ ID NO: 2310970 - DNA, 25 bp, Homo sapien
tcaggtagtgctggggcattcggga

SEQ ID NO: 2310971 - DNA, 25 bp, Homo sapien
cggaagggcttcaggtagtgctggg

SEQ ID NO: 2310972 - DNA, 25 bp, Homo sapien
caggacagggacgggttatccctcg

SEQ ID NO: 2310973 - DNA, 25 bp, Homo sapien
tcgggccggatggtgaggtaggatg

SEQ ID NO: 2310974 - DNA, 25 bp, Homo sapien
cagcgtatgtcatcccggcagggtg

SEQ ID NO: 2310975 - DNA, 25 bp, Homo sapien
tcagcaggtaaagtcctcgaacgtg

SEQ ID NO: 2310976 - DNA, 25 bp, Homo sapien
taggatgttggcagcgtatgtcatc

SEQ ID NO: 2310977 - DNA, 25 bp, Homo sapien
cccatctaggcctttggttcagcgg

SEQ ID NO: 2310978 - DNA, 25 bp, Homo sapien
taggcctttggttcagcggcctgcg

SEQ ID NO: 2310979 - DNA, 25 bp, Homo sapien
catctaggcctttggttcagcggcc

SEQ ID NO: 2310980 - DNA, 25 bp, Homo sapien
tcgctctcctagtcctccccatcta

SEQ ID NO: 2310981 - DNA, 25 bp, Homo sapien
caaaggttacaatgcgcgtgtcgtc

SEQ ID NO: 2310982 - DNA, 25 bp, Homo sapien
ccaactctttatacaggcgaaggca

SEQ ID NO: 2310983 - DNA, 25 bp, Homo sapien
gaaaatttatggacgtggccctcta

SEQ ID NO: 2310984 - DNA, 25 bp, Homo sapien
tggacactcagatggcagacagcta

SEQ ID NO: 2310985 - DNA, 25 bp, Homo sapien
cggccggccggcacgggaggctcag

SEQ ID NO: 2310986 - DNA, 25 bp, Homo sapien
ctcagggcagcgagactatgggata

SEQ ID NO: 2310987 - DNA, 25 bp, Homo sapien
ccgatgcagccgcacaaagaaccgg

SEQ ID NO: 2310988 - DNA, 25 bp, Homo sapien
cgatgcagccgcacaaagaaccgga

SEQ ID NO: 2310989 - DNA, 25 bp, Homo sapien
gagttccgcccgggcccaaggcagc

SEQ ID NO: 2310990 - DNA, 25 bp, Homo sapien
agttccgcccgggcccaaggcagca

SEQ ID NO: 2310991 - DNA, 25 bp, Homo sapien
tcgcacaggaggccccggagttccg

SEQ ID NO: 2310992 - DNA, 25 bp, Homo sapien
gcacaggaggccccggagttccgcc

SEQ ID NO: 2310993 - DNA, 25 bp, Homo sapien
gcggtacagcccttgacccggagcc

SEQ ID NO: 2310994 - DNA, 25 bp, Homo sapien
ggagcggtacagcccttgacccgga

SEQ ID NO: 2310995 - DNA, 25 bp, Homo sapien
ccgggcatcggggagcggtacagcc

SEQ ID NO: 2310996 - DNA, 25 bp, Homo sapien
catcggggagcggtacagcccttga

SEQ ID NO: 2310997 - DNA, 25 bp, Homo sapien
gtgtcattcggctgcctggcaacat

SEQ ID NO: 2310998 - DNA, 25 bp, Homo sapien
ggtgtcattcggctgcctggcaaca

SEQ ID NO: 2310999 - DNA, 25 bp, Homo sapien
tgaggtgtcattcggctgcctggca

SEQ ID NO: 2311000 - DNA, 25 bp, Homo sapien
gaggtgtcattcggctgcctggcaa

SEQ ID NO: 2311001 - DNA, 25 bp, Homo sapien
ccccatagccagggggtcccatgga

SEQ ID NO: 2311002 - DNA, 25 bp, Homo sapien
tagccagggggtcccatggaaggtc

SEQ ID NO: 2311003 - DNA, 25 bp, Homo sapien
catagccagggggtcccatggaagg

SEQ ID NO: 2311004 - DNA, 25 bp, Homo sapien
cccatagccagggggtcccatggaa

SEQ ID NO: 2311005 - DNA, 25 bp, Homo sapien
ggtctcttgcgggactgatccatcc

SEQ ID NO: 2311006 - DNA, 25 bp, Homo sapien
tcttgcgggactgatccatccctga

SEQ ID NO: 2311007 - DNA, 25 bp, Homo sapien
ggcaggtctcttgcgggactgatcc

SEQ ID NO: 2311008 - DNA, 25 bp, Homo sapien
tgcgggactgatccatccctgactg

SEQ ID NO: 2311009 - DNA, 25 bp, Homo sapien
gtttcgattttggaccgcctgctgc

SEQ ID NO: 2311010 - DNA, 25 bp, Homo sapien
tgtggtttcgattttggaccgcctg

SEQ ID NO: 2311011 - DNA, 25 bp, Homo sapien
tggtttcgattttggaccgcctgct

SEQ ID NO: 2311012 - DNA, 25 bp, Homo sapien
ggtttcgattttggaccgcctgctg

SEQ ID NO: 2311013 - DNA, 25 bp, Homo sapien
ggtagaattttgtcagccatcttct

SEQ ID NO: 2311014 - DNA, 25 bp, Homo sapien
ttgaggtagaattttgtcagccatc

SEQ ID NO: 2311015 - DNA, 25 bp, Homo sapien
tgaggtagaattttgtcagccatct

SEQ ID NO: 2311016 - DNA, 25 bp, Homo sapien
cctttgaggtagaattttgtcagcc

SEQ ID NO: 2311017 - DNA, 25 bp, Homo sapien
ccaagagatccatataggcctggga

SEQ ID NO: 2311018 - DNA, 25 bp, Homo sapien
cctcatgatagtctggtccagtttc

SEQ ID NO: 2311019 - DNA, 25 bp, Homo sapien
ggatatctagccgtttcctcatgat

SEQ ID NO: 2311020 - DNA, 25 bp, Homo sapien
tgatgggacgtttcaaggcctcttg

SEQ ID NO: 2311021 - DNA, 25 bp, Homo sapien
catcctcggcatctgacttagccgg

SEQ ID NO: 2311022 - DNA, 25 bp, Homo sapien
tagaaatgaaaattcgcagcttccg

SEQ ID NO: 2311023 - DNA, 25 bp, Homo sapien
aggagccgtccttctacccgaagct

SEQ ID NO: 2311024 - DNA, 25 bp, Homo sapien
gacttagccggattgaaagtgttag

SEQ ID NO: 2311025 - DNA, 25 bp, Homo sapien
gaacttcctcttttgtttagtggca

SEQ ID NO: 2311026 - DNA, 25 bp, Homo sapien
tctaccagatggttgtctggcccat

SEQ ID NO: 2311027 - DNA, 25 bp, Homo sapien
tgtctggcccatacaggtctttgtc

SEQ ID NO: 2311028 - DNA, 25 bp, Homo sapien
ctttgtccagttcaatcaccaagga

SEQ ID NO: 2311029 - DNA, 25 bp, Homo sapien
gtctcccggccgcttcacctgaaag

SEQ ID NO: 2311030 - DNA, 25 bp, Homo sapien
ctcctgggtagtggcggtcctgtgc

SEQ ID NO: 2311031 - DNA, 25 bp, Homo sapien
aaagccatcggtctcctgggtagtg

SEQ ID NO: 2311032 - DNA, 25 bp, Homo sapien
tcacctgaaagccatcggtctcctg

SEQ ID NO: 2311033 - DNA, 25 bp, Homo sapien
taatccagcatcagtaggacagtac

SEQ ID NO: 2311034 - DNA, 25 bp, Homo sapien
tccagcatcagtaggacagtacacc

SEQ ID NO: 2311035 - DNA, 25 bp, Homo sapien
agcatcagtaggacagtacaccgta

SEQ ID NO: 2311036 - DNA, 25 bp, Homo sapien
tggtaatccagcatcagtaggacag

SEQ ID NO: 2311037 - DNA, 25 bp, Homo sapien
gggtcctggagcttatgtgtcttaa

SEQ ID NO: 2311038 - DNA, 25 bp, Homo sapien
agatgacaaactcccgctcgtgagg

SEQ ID NO: 2311039 - DNA, 25 bp, Homo sapien
gatgatcactggacgagtctgggta

SEQ ID NO: 2311040 - DNA, 25 bp, Homo sapien
gcaggtacttgtcacagatgacaaa

SEQ ID NO: 2311041 - DNA, 25 bp, Homo sapien
gcataactagtgttctaatggattc

SEQ ID NO: 2311042 - DNA, 25 bp, Homo sapien
cagtttgagcataactagtgttcta

SEQ ID NO: 2311043 - DNA, 25 bp, Homo sapien
tgttctaatggattctagcaaaaga

SEQ ID NO: 2311044 - DNA, 25 bp, Homo sapien
tagcagtttgagcataactagtgtt

SEQ ID NO: 2311045 - DNA, 25 bp, Homo sapien
gctgagggatctctgaaaacttcat

SEQ ID NO: 2311046 - DNA, 25 bp, Homo sapien
tggcataagcaaggcatggagccgc

SEQ ID NO: 2311047 - DNA, 25 bp, Homo sapien
aatgatgataggttctggtggcata

SEQ ID NO: 2311048 - DNA, 25 bp, Homo sapien
tgataggttctggtggcataagcaa

SEQ ID NO: 2311049 - DNA, 25 bp, Homo sapien
tgggtcttcaaggtgtcatccactt

SEQ ID NO: 2311050 - DNA, 25 bp, Homo sapien
gcaatctcctgttggctggcagtgg

SEQ ID NO: 2311051 - DNA, 25 bp, Homo sapien
catcaatgtcataacaagctgtctt

SEQ ID NO: 2311052 - DNA, 25 bp, Homo sapien
tgttgtctagagtagcaatctcctg

SEQ ID NO: 2311053 - DNA, 25 bp, Homo sapien
gaagctcataccattttcaaactag

SEQ ID NO: 2311054 - DNA, 25 bp, Homo sapien
gctggcaccatcatatagagctcca

SEQ ID NO: 2311055 - DNA, 25 bp, Homo sapien
tgaaaggaagaacgaagctcatacc

SEQ ID NO: 2311056 - DNA, 25 bp, Homo sapien
gctccgacccttggcattctttcag

SEQ ID NO: 2311057 - DNA, 25 bp, Homo sapien
gggtctctggcaaagctcagcatga

SEQ ID NO: 2311058 - DNA, 25 bp, Homo sapien
catgaactcccgctgagtcttcagc

SEQ ID NO: 2311059 - DNA, 25 bp, Homo sapien
gaagccagtcattgatgaaaccctg

SEQ ID NO: 2311060 - DNA, 25 bp, Homo sapien
tgatggtttctattgtctcatggat

SEQ ID NO: 2311061 - DNA, 25 bp, Homo sapien
cagaatgtaggctgctttgaaagca

SEQ ID NO: 2311062 - DNA, 25 bp, Homo sapien
ttcttcagacagaatgtaggctgct

SEQ ID NO: 2311063 - DNA, 25 bp, Homo sapien
accatgcccggctatactagcctag

SEQ ID NO: 2311064 - DNA, 25 bp, Homo sapien
gcccggctatactagcctagtttct

SEQ ID NO: 2311065 - DNA, 25 bp, Homo sapien
agaagtatcggcacacagcctcctg

SEQ ID NO: 2311066 - DNA, 25 bp, Homo sapien
cttggagtagaagtatcggcacaca

SEQ ID NO: 2311067 - DNA, 25 bp, Homo sapien
tggaagtagaactcagctcggcgct

SEQ ID NO: 2311068 - DNA, 25 bp, Homo sapien
gggttacccaccacatcagtcattg

SEQ ID NO: 2311069 - DNA, 25 bp, Homo sapien
ttgctctaattcttgtcgtctctgc

SEQ ID NO: 2311070 - DNA, 25 bp, Homo sapien
tgtattccggattcccagggcttgc

SEQ ID NO: 2311071 - DNA, 25 bp, Homo sapien
cagggcttgctctaattcttgtcgt

SEQ ID NO: 2311072 - DNA, 25 bp, Homo sapien
ctatgtattccggattcccagggct

SEQ ID NO: 2311073 - DNA, 25 bp, Homo sapien
gaattggtgcagtcgaatcagggct

SEQ ID NO: 2311074 - DNA, 25 bp, Homo sapien
tgtccttgaaccaacagcatcccct

SEQ ID NO: 2311075 - DNA, 25 bp, Homo sapien
tggaacgccccaagcaagaccaagg

SEQ ID NO: 2311076 - DNA, 25 bp, Homo sapien
caggcagcacagggcccaaatcaag

SEQ ID NO: 2311077 - DNA, 25 bp, Homo sapien
tcttggagaaggagcgaaagctccc

SEQ ID NO: 2311078 - DNA, 25 bp, Homo sapien
tcaggagagccaagatcaactagct

SEQ ID NO: 2311079 - DNA, 25 bp, Homo sapien
gatcagttagctggtccccttgaag

SEQ ID NO: 2311080 - DNA, 25 bp, Homo sapien
gagggtacaggcacatgggaacttt

SEQ ID NO: 2311081 - DNA, 25 bp, Homo sapien
gaagagtcacaaacccaactcagcg

SEQ ID NO: 2311082 - DNA, 25 bp, Homo sapien
gaaccagggtttctgtagtgctaca

SEQ ID NO: 2311083 - DNA, 25 bp, Homo sapien
tgtggaccccaactaaggagtgaga

SEQ ID NO: 2311084 - DNA, 25 bp, Homo sapien
cagtaggtgtcaactgggcagacaa

SEQ ID NO: 2311085 - DNA, 25 bp, Homo sapien
caaggtcctgctgctacctgagggg

SEQ ID NO: 2311086 - DNA, 25 bp, Homo sapien
ggtcctgctgctacctgaggggtct

SEQ ID NO: 2311087 - DNA, 25 bp, Homo sapien
tcacaaggtcctgctgctacctgag

SEQ ID NO: 2311088 - DNA, 25 bp, Homo sapien
cctgctgctacctgaggggtctgaa

SEQ ID NO: 2311089 - DNA, 25 bp, Homo sapien
ttctcatggttccagccaggaggcg

SEQ ID NO: 2311090 - DNA, 25 bp, Homo sapien
tagagcccatgctgaacggaattcc

SEQ ID NO: 2311091 - DNA, 25 bp, Homo sapien
tgctgtccccagtgtagaacaggga

SEQ ID NO: 2311092 - DNA, 25 bp, Homo sapien
cacccttgctgtgttgagtctgcga

SEQ ID NO: 2311093 - DNA, 25 bp, Homo sapien
ctctctcacagtaggtaggaggacc

SEQ ID NO: 2311094 - DNA, 25 bp, Homo sapien
tcagggaagagctctctcacagtag

SEQ ID NO: 2311095 - DNA, 25 bp, Homo sapien
agctcagggaagagctctctcacag

SEQ ID NO: 2311096 - DNA, 25 bp, Homo sapien
gctctctcacagtaggtaggaggac

SEQ ID NO: 2311097 - DNA, 25 bp, Homo sapien
ccgcgtctctgcctgagccggctca

SEQ ID NO: 2311098 - DNA, 25 bp, Homo sapien
gtctctgcctgagccggctcagtgc

SEQ ID NO: 2311099 - DNA, 25 bp, Homo sapien
gcgtctctgcctgagccggctcagt

SEQ ID NO: 2311100 - DNA, 25 bp, Homo sapien
ggtgccgcgtctctgcctgagccgg

SEQ ID NO: 2311101 - DNA, 25 bp, Homo sapien
ccggagcctacaatgcagactttct

SEQ ID NO: 2311102 - DNA, 25 bp, Homo sapien
gttcccggagcctacaatgcagact

SEQ ID NO: 2311103 - DNA, 25 bp, Homo sapien
agttcccggagcctacaatgcagac

SEQ ID NO: 2311104 - DNA, 25 bp, Homo sapien
tcccggagcctacaatgcagacttt

SEQ ID NO: 2311105 - DNA, 25 bp, Homo sapien
ccctggcaggtatttgacattctca

SEQ ID NO: 2311106 - DNA, 25 bp, Homo sapien
tgcattgccacccacgatcttggcg

SEQ ID NO: 2311107 - DNA, 25 bp, Homo sapien
tcacccgtgggtcaaactgtgccag

SEQ ID NO: 2311108 - DNA, 25 bp, Homo sapien
gatctcagtcagctttttgcctcca

SEQ ID NO: 2311109 - DNA, 25 bp, Homo sapien
agcctggaccacatctgggacagcc

SEQ ID NO: 2311110 - DNA, 25 bp, Homo sapien
gggcaccacaaagatcaggatgtca

SEQ ID NO: 2311111 - DNA, 25 bp, Homo sapien
tgatggggcaccacaaagatcagga

SEQ ID NO: 2311112 - DNA, 25 bp, Homo sapien
agcatcctctgcagcctggaccaca

SEQ ID NO: 2311113 - DNA, 25 bp, Homo sapien
tatgccagtggcgtttgccttcaga

SEQ ID NO: 2311114 - DNA, 25 bp, Homo sapien
gctggtcacagatcttgccgatgaa

SEQ ID NO: 2311115 - DNA, 25 bp, Homo sapien
cttaataagagatatgccagtggcg

SEQ ID NO: 2311116 - DNA, 25 bp, Homo sapien
cttcagatggcccttgagctggtca

SEQ ID NO: 2311117 - DNA, 25 bp, Homo sapien
cctcccccatccacatgaaggtgtc

SEQ ID NO: 2311118 - DNA, 25 bp, Homo sapien
atccacatgaaggtgtccctggcac

SEQ ID NO: 2311119 - DNA, 25 bp, Homo sapien
cccatccacatgaaggtgtccctgg

SEQ ID NO: 2311120 - DNA, 25 bp, Homo sapien
ctcccccatccacatgaaggtgtcc

SEQ ID NO: 2311121 - DNA, 25 bp, Homo sapien
ccacctcgctggcaatgttggcccc

SEQ ID NO: 2311122 - DNA, 25 bp, Homo sapien
tcagcacactcatggggatgccgag

SEQ ID NO: 2311123 - DNA, 25 bp, Homo sapien
tggggatgccgaggcgctccccaat

SEQ ID NO: 2311124 - DNA, 25 bp, Homo sapien
cacttccgagatgagcttcagccca

SEQ ID NO: 2311125 - DNA, 25 bp, Homo sapien
gagggagggctcatcactgtgtttc

SEQ ID NO: 2311126 - DNA, 25 bp, Homo sapien
tgtttccctaagcaggccctgaagc

SEQ ID NO: 2311127 - DNA, 25 bp, Homo sapien
gggatgcaactagatgcactgtgta

SEQ ID NO: 2311128 - DNA, 25 bp, Homo sapien
tagatgcactgtgtatgcaggtgcc

SEQ ID NO: 2311129 - DNA, 25 bp, Homo sapien
cactgtgatacggaagtttggtgtc

SEQ ID NO: 2311130 - DNA, 25 bp, Homo sapien
cacctcttgcaccactgtgatacgg

SEQ ID NO: 2311131 - DNA, 25 bp, Homo sapien
tctttcaggagttgtccctgggccg

SEQ ID NO: 2311132 - DNA, 25 bp, Homo sapien
tttaaggctccacagatctctactg

SEQ ID NO: 2311133 - DNA, 25 bp, Homo sapien
gatgaataatcagccggcctgaatg

SEQ ID NO: 2311134 - DNA, 25 bp, Homo sapien
gggtccacggtctgatgatgaataa

SEQ ID NO: 2311135 - DNA, 25 bp, Homo sapien
gcagctcctcctatatgcatgggac

SEQ ID NO: 2311136 - DNA, 25 bp, Homo sapien
tgtacagccctcaagtcaacagctg

SEQ ID NO: 2311137 - DNA, 25 bp, Homo sapien
tcttctctctagttgatcttcccat

SEQ ID NO: 2311138 - DNA, 25 bp, Homo sapien
tccctcctcgaggacattttctgaa

SEQ ID NO: 2311139 - DNA, 25 bp, Homo sapien
gaaaaccactcttctctctagttga

SEQ ID NO: 2311140 - DNA, 25 bp, Homo sapien
cctcgaggacattttctgaaaacca

SEQ ID NO: 2311141 - DNA, 25 bp, Homo sapien
tagtgtgtggccttttagaagccta

SEQ ID NO: 2311142 - DNA, 25 bp, Homo sapien
tagaagcctacttccgcctcttggt

SEQ ID NO: 2311143 - DNA, 25 bp, Homo sapien
atttcatcagccgtgacacccactg

SEQ ID NO: 2311144 - DNA, 25 bp, Homo sapien
tgtggagccccctcatactcatttc

SEQ ID NO: 2311145 - DNA, 25 bp, Homo sapien
aaggagtggaggtcataggtgagaa

SEQ ID NO: 2311146 - DNA, 25 bp, Homo sapien
gaaggagtggaggtcataggtgaga

SEQ ID NO: 2311147 - DNA, 25 bp, Homo sapien
cttgaaggagtggaggtcataggtg

SEQ ID NO: 2311148 - DNA, 25 bp, Homo sapien
ttgaaggagtggaggtcataggtga

SEQ ID NO: 2311149 - DNA, 25 bp, Homo sapien
ggttccgccctccatagcaggtagt

SEQ ID NO: 2311150 - DNA, 25 bp, Homo sapien
tgatcaggtcagcaacaccacagct

SEQ ID NO: 2311151 - DNA, 25 bp, Homo sapien
tggcgaaggctatcatctccatgag

SEQ ID NO: 2311152 - DNA, 25 bp, Homo sapien
cactgcagaagagcttggcgaaggc

SEQ ID NO: 2311153 - DNA, 25 bp, Homo sapien
agagccgcccctctgttctcccttc

SEQ ID NO: 2311154 - DNA, 25 bp, Homo sapien
cagagccgcccctctgttctccctt

SEQ ID NO: 2311155 - DNA, 25 bp, Homo sapien
tacagagccgcccctctgttctccc

SEQ ID NO: 2311156 - DNA, 25 bp, Homo sapien
gagccgcccctctgttctcccttct

SEQ ID NO: 2311157 - DNA, 25 bp, Homo sapien
aggatgctgtatagctcccgggctg

SEQ ID NO: 2311158 - DNA, 25 bp, Homo sapien
cgggctgtctcgggcccctgcagtt

SEQ ID NO: 2311159 - DNA, 25 bp, Homo sapien
tgctgtatagctcccgggctgtctc

SEQ ID NO: 2311160 - DNA, 25 bp, Homo sapien
ttgtctaccaggcccttgtgctgga

SEQ ID NO: 2311161 - DNA, 25 bp, Homo sapien
tctgaaaacgagcaccttgaagccc

SEQ ID NO: 2311162 - DNA, 25 bp, Homo sapien
gacaatgggcatgccagactctgca

SEQ ID NO: 2311163 - DNA, 25 bp, Homo sapien
ggctgtggctcccttaatcagtggg

SEQ ID NO: 2311164 - DNA, 25 bp, Homo sapien
tcaaagaccatgaactagctggcgg

SEQ ID NO: 2311165 - DNA, 25 bp, Homo sapien
tggccctcgtagcacaccttgtaca

SEQ ID NO: 2311166 - DNA, 25 bp, Homo sapien
cactggctggccctcgtagcacacc

SEQ ID NO: 2311167 - DNA, 25 bp, Homo sapien
cgtagcacaccttgtacacagccat

SEQ ID NO: 2311168 - DNA, 25 bp, Homo sapien
tcgtagcacaccttgtacacagcca

SEQ ID NO: 2311169 - DNA, 25 bp, Homo sapien
atatgttctggatgattctgcaggc

SEQ ID NO: 2311170 - DNA, 25 bp, Homo sapien
tgttctggatgattctgcaggcagt

SEQ ID NO: 2311171 - DNA, 25 bp, Homo sapien
ttctgcaggcagtggatgaattcac

SEQ ID NO: 2311172 - DNA, 25 bp, Homo sapien
gattctgcaggcagtggatgaattc

SEQ ID NO: 2311173 - DNA, 25 bp, Homo sapien
gacctgtgacattcctctgctgcca

SEQ ID NO: 2311174 - DNA, 25 bp, Homo sapien
tcgggccctccggactatttatagc

SEQ ID NO: 2311175 - DNA, 25 bp, Homo sapien
tgtcagtacctcacgagaaggccct

SEQ ID NO: 2311176 - DNA, 25 bp, Homo sapien
cagaattctcaagggataggcgcag

SEQ ID NO: 2311177 - DNA, 25 bp, Homo sapien
tggaaccggaagttttaggatgcta

SEQ ID NO: 2311178 - DNA, 25 bp, Homo sapien
ctacggtgcggtgacgtcgccagta

SEQ ID NO: 2311179 - DNA, 25 bp, Homo sapien
taaatcagagtcagccaatcctcag

SEQ ID NO: 2311180 - DNA, 25 bp, Homo sapien
aatcctcagcctacggtgcggtgac

SEQ ID NO: 2311181 - DNA, 25 bp, Homo sapien
tacgcatcctcagacgcgccgtgct

SEQ ID NO: 2311182 - DNA, 25 bp, Homo sapien
agggagggtctttggcgagccaagc

SEQ ID NO: 2311183 - DNA, 25 bp, Homo sapien
tgctctcggagaggcccgctgaatt

SEQ ID NO: 2311184 - DNA, 25 bp, Homo sapien
tccctcgagggagggtctttggcga

SEQ ID NO: 2311185 - DNA, 25 bp, Homo sapien
tataaagggaactgcgcatcagacg

SEQ ID NO: 2311186 - DNA, 25 bp, Homo sapien
tcggaaccagacacgtgagggtagc

SEQ ID NO: 2311187 - DNA, 25 bp, Homo sapien
gaacgcctcagctattggtgcagaa

SEQ ID NO: 2311188 - DNA, 25 bp, Homo sapien
cacctgccgggttagcctctaggat

SEQ ID NO: 2311189 - DNA, 25 bp, Homo sapien
gcggcaagcggagactggcccaggt

SEQ ID NO: 2311190 - DNA, 25 bp, Homo sapien
tgggcgcgcaggcagtgggactggc

SEQ ID NO: 2311191 - DNA, 25 bp, Homo sapien
ctaggggatgggaggacgcggcaag

SEQ ID NO: 2311192 - DNA, 25 bp, Homo sapien
tgctcggccctagccggcagcgtac

SEQ ID NO: 2311193 - DNA, 25 bp, Homo sapien
gaagcagtgcagctcgcggtccgca

SEQ ID NO: 2311194 - DNA, 25 bp, Homo sapien
caacgcaacagaagcgggtgaattc

SEQ ID NO: 2311195 - DNA, 25 bp, Homo sapien
tcgcggtccgcaacgcaacagaagc

SEQ ID NO: 2311196 - DNA, 25 bp, Homo sapien
gtgcagctcgcggtccgcaacgcaa

SEQ ID NO: 2311197 - DNA, 25 bp, Homo sapien
tacggaggccgctaaaaagaacatg

SEQ ID NO: 2311198 - DNA, 25 bp, Homo sapien
gtcatacaggagcttatggtctcat

SEQ ID NO: 2311199 - DNA, 25 bp, Homo sapien
atcatgctacggaggccgctaaaaa

SEQ ID NO: 2311200 - DNA, 25 bp, Homo sapien
caggagcttatggtctcatggagag

SEQ ID NO: 2311201 - DNA, 25 bp, Homo sapien
tagagaaggtcttatagccaatgtc

SEQ ID NO: 2311202 - DNA, 25 bp, Homo sapien
tagactcggacactgcagaggtacc

SEQ ID NO: 2311203 - DNA, 25 bp, Homo sapien
ggtaccccccatacacagtgagaag

SEQ ID NO: 2311204 - DNA, 25 bp, Homo sapien
gccctgcgccactggaaatagtggt

SEQ ID NO: 2311205 - DNA, 25 bp, Homo sapien
taatgtctgtaggtgtacctcaccc

SEQ ID NO: 2311206 - DNA, 25 bp, Homo sapien
taaactgtcaaactggcagaaccag

SEQ ID NO: 2311207 - DNA, 25 bp, Homo sapien
gaaaaccatcaacgctctagtcctg

SEQ ID NO: 2311208 - DNA, 25 bp, Homo sapien
catgggcactttcttccaacagggt

SEQ ID NO: 2311209 - DNA, 25 bp, Homo sapien
ccatatgctatttgggtaaacaaaa

SEQ ID NO: 2311210 - DNA, 25 bp, Homo sapien
tccatatgctatttgggtaaacaaa

SEQ ID NO: 2311211 - DNA, 25 bp, Homo sapien
tgtggtccatatgctatttgggtaa

SEQ ID NO: 2311212 - DNA, 25 bp, Homo sapien
ttgtggtccatatgctatttgggta

SEQ ID NO: 2311213 - DNA, 25 bp, Homo sapien
ggagttaggttatatgctcagctaa

SEQ ID NO: 2311214 - DNA, 25 bp, Homo sapien
actgtacagtcttgcctctatttag

SEQ ID NO: 2311215 - DNA, 25 bp, Homo sapien
gcatgcctgcagaactgtacaaaaa

SEQ ID NO: 2311216 - DNA, 25 bp, Homo sapien
tctatttagttgcatgcctgcagaa

SEQ ID NO: 2311217 - DNA, 25 bp, Homo sapien
aaacactctactatcctgtgcagac

SEQ ID NO: 2311218 - DNA, 25 bp, Homo sapien
tgatctatattctgttgtatcagag

SEQ ID NO: 2311219 - DNA, 25 bp, Homo sapien
tactatcctgtgcagactgatctat

SEQ ID NO: 2311220 - DNA, 25 bp, Homo sapien
cctgtgcagactgatctatattctg

SEQ ID NO: 2311221 - DNA, 25 bp, Homo sapien
tgcactgcaacctaggtaacagagg

SEQ ID NO: 2311222 - DNA, 25 bp, Homo sapien
actgcaacctaggtaacagaggaag

SEQ ID NO: 2311223 - DNA, 25 bp, Homo sapien
gaggaagactgtctcaaaaaaagaa

SEQ ID NO: 2311224 - DNA, 25 bp, Homo sapien
cgccactgcactgcaacctaggtaa

SEQ ID NO: 2311225 - DNA, 25 bp, Homo sapien
tacccagcctttgggctactttctg

SEQ ID NO: 2311226 - DNA, 25 bp, Homo sapien
accatggtacccagcctttgggcta

SEQ ID NO: 2311227 - DNA, 25 bp, Homo sapien
atggtacccagcctttgggctactt

SEQ ID NO: 2311228 - DNA, 25 bp, Homo sapien
tactttctgtatttacaacacaccc

SEQ ID NO: 2311229 - DNA, 25 bp, Homo sapien
aggatggacctctcgtgatgggatt

SEQ ID NO: 2311230 - DNA, 25 bp, Homo sapien
tggacctctcgtgatgggattagtg

SEQ ID NO: 2311231 - DNA, 25 bp, Homo sapien
agagggaatgtgttatggactgcat

SEQ ID NO: 2311232 - DNA, 25 bp, Homo sapien
caacggagaggagaccctacctcaa

SEQ ID NO: 2311233 - DNA, 25 bp, Homo sapien
tagttccaggccaattccaaaggcc

SEQ ID NO: 2311234 - DNA, 25 bp, Homo sapien
cagtctgagtccacgtcacaaggta

SEQ ID NO: 2311235 - DNA, 25 bp, Homo sapien
taatgcttcactagggtaatggaac

SEQ ID NO: 2311236 - DNA, 25 bp, Homo sapien
cctgaaaaccaagagagctgacggt

SEQ ID NO: 2311237 - DNA, 25 bp, Homo sapien
gattggttggtgtagctaatctgac

SEQ ID NO: 2311238 - DNA, 25 bp, Homo sapien
cctcaacttgctatattgaatagac

SEQ ID NO: 2311239 - DNA, 25 bp, Homo sapien
gccttgttaatacaaactggattgg

SEQ ID NO: 2311240 - DNA, 25 bp, Homo sapien
agtcagatgagaaatgtattttgcc

SEQ ID NO: 2311241 - DNA, 25 bp, Homo sapien
gaccatctgaatggagcagccaagt

SEQ ID NO: 2311242 - DNA, 25 bp, Homo sapien
gctctttactcaatggtacccaggg

SEQ ID NO: 2311243 - DNA, 25 bp, Homo sapien
tcacctgatagcaacagggacagct

SEQ ID NO: 2311244 - DNA, 25 bp, Homo sapien
ttgccgtggtccctagctagatccc

SEQ ID NO: 2311245 - DNA, 25 bp, Homo sapien
ggtagcatgattagaactgggattc

SEQ ID NO: 2311246 - DNA, 25 bp, Homo sapien
ttctcattgactgccaatccatttg

SEQ ID NO: 2311247 - DNA, 25 bp, Homo sapien
gaaatactttgcttgatatgcagga

SEQ ID NO: 2311248 - DNA, 25 bp, Homo sapien
taagcattcacagatggtagcatga

SEQ ID NO: 2311249 - DNA, 25 bp, Homo sapien
gcaggtactgatactaggaccaagt

SEQ ID NO: 2311250 - DNA, 25 bp, Homo sapien
tagtcaaagggctagggatttcagc

SEQ ID NO: 2311251 - DNA, 25 bp, Homo sapien
ttagacgcaagaggaaagttctacc

SEQ ID NO: 2311252 - DNA, 25 bp, Homo sapien
tgccaagagcgaaagaaaggtgcca

SEQ ID NO: 2311253 - DNA, 25 bp, Homo sapien
tgtgcatcacttggtcaccattggg

SEQ ID NO: 2311254 - DNA, 25 bp, Homo sapien
aataatgcaggacgttgggttggct

SEQ ID NO: 2311255 - DNA, 25 bp, Homo sapien
tcgcccggccaatggaaactattct

SEQ ID NO: 2311256 - DNA, 25 bp, Homo sapien
caacaatatggttcgagtgggaact

SEQ ID NO: 2311257 - DNA, 25 bp, Homo sapien
cagaagagtcatagaatctcaggga

SEQ ID NO: 2311258 - DNA, 25 bp, Homo sapien
tctcctatggtcagaagacacaggt

SEQ ID NO: 2311259 - DNA, 25 bp, Homo sapien
tagagacttccccaggtctaacttg

SEQ ID NO: 2311260 - DNA, 25 bp, Homo sapien
tatacgtattctgcagttaccaaag

SEQ ID NO: 2311261 - DNA, 25 bp, Homo sapien
tgtcgctcagctagtcaatgggatt

SEQ ID NO: 2311262 - DNA, 25 bp, Homo sapien
caatgctggtttcgccatcggagga

SEQ ID NO: 2311263 - DNA, 25 bp, Homo sapien
gacggtgggatacaactggactgaa

SEQ ID NO: 2311264 - DNA, 25 bp, Homo sapien
tctgtgaaagcatgtaagtacgcaa

SEQ ID NO: 2311265 - DNA, 25 bp, Homo sapien
taggtttgagttttaggcccagcag

SEQ ID NO: 2311266 - DNA, 25 bp, Homo sapien
ggacagtggtccttatcaggcccaa

SEQ ID NO: 2311267 - DNA, 25 bp, Homo sapien
tatggagagctttatcccctcaggg

SEQ ID NO: 2311268 - DNA, 25 bp, Homo sapien
ttcacataaggcgttgctccatggg

SEQ ID NO: 2311269 - DNA, 25 bp, Homo sapien
tagatctgagactacgatagagtgc

SEQ ID NO: 2311270 - DNA, 25 bp, Homo sapien
tgggactctgcttgatataacctct

SEQ ID NO: 2311271 - DNA, 25 bp, Homo sapien
tcttggttaggcaggaaggtatcca

SEQ ID NO: 2311272 - DNA, 25 bp, Homo sapien
gatgatgaaaccaagacccaagagg

SEQ ID NO: 2311273 - DNA, 25 bp, Homo sapien
taaaattggcttcaccgaggtgagc

SEQ ID NO: 2311274 - DNA, 25 bp, Homo sapien
tgcgcccggctgtcaaatgttctta

SEQ ID NO: 2311275 - DNA, 25 bp, Homo sapien
tgttaagtccactccatgatccaga

SEQ ID NO: 2311276 - DNA, 25 bp, Homo sapien
gaactctgaactaacgagggcagga

SEQ ID NO: 2311277 - DNA, 25 bp, Homo sapien
cagagatcttgaatgaactgcctta

SEQ ID NO: 2311278 - DNA, 25 bp, Homo sapien
tctccgttgtatgcctttaatgaag

SEQ ID NO: 2311279 - DNA, 25 bp, Homo sapien
tgaagtcaaggatctaggtaaagtg

SEQ ID NO: 2311280 - DNA, 25 bp, Homo sapien
tgggctctgtttatggacttgtctc

SEQ ID NO: 2311281 - DNA, 25 bp, Homo sapien
atacaaaaatagccccgcgtagtgg

SEQ ID NO: 2311282 - DNA, 25 bp, Homo sapien
aaatagccccgcgtagtggcgggcg

SEQ ID NO: 2311283 - DNA, 25 bp, Homo sapien
caaaaatagccccgcgtagtggcgg

SEQ ID NO: 2311284 - DNA, 25 bp, Homo sapien
ggaataaactagatccaggtactct

SEQ ID NO: 2311285 - DNA, 25 bp, Homo sapien
taatcgttgtagttagtcatcctgg

SEQ ID NO: 2311286 - DNA, 25 bp, Homo sapien
agctagtcacgcatccatttattcg

SEQ ID NO: 2311287 - DNA, 25 bp, Homo sapien
tgctctgccagacgttcaagtgcaa

SEQ ID NO: 2311288 - DNA, 25 bp, Homo sapien
tcttcggtgcttagagagatctgct

SEQ ID NO: 2311289 - DNA, 25 bp, Homo sapien
gagatctgctgtctcccaaataagc

SEQ ID NO: 2311290 - DNA, 25 bp, Homo sapien
tacatcctgaactcgacgtcctgag

SEQ ID NO: 2311291 - DNA, 25 bp, Homo sapien
catcttccgtgttagagcaaagtga

SEQ ID NO: 2311292 - DNA, 25 bp, Homo sapien
gacaaattgcaatgatgctgggcct

SEQ ID NO: 2311293 - DNA, 25 bp, Homo sapien
aaattcatgttagtgttagcgagcc

SEQ ID NO: 2311294 - DNA, 25 bp, Homo sapien
gaaaatggtgcagactccgatgaag

SEQ ID NO: 2311295 - DNA, 25 bp, Homo sapien
gcaggtatcccagcatgaaatgtaa

SEQ ID NO: 2311296 - DNA, 25 bp, Homo sapien
gctgcaagtatggaagccaaggcct

SEQ ID NO: 2311297 - DNA, 25 bp, Homo sapien
gaagatgcccctattgctaaggtgg

SEQ ID NO: 2311298 - DNA, 25 bp, Homo sapien
gaagagattttggagagaccagccc

SEQ ID NO: 2311299 - DNA, 25 bp, Homo sapien
cttgcaaatgcaagggagacccctc

SEQ ID NO: 2311300 - DNA, 25 bp, Homo sapien
gaaagaatgtgtccactggaatggg

SEQ ID NO: 2311301 - DNA, 25 bp, Homo sapien
ttaggacctgttgtttacaacaatg

SEQ ID NO: 2311302 - DNA, 25 bp, Homo sapien
ttaacgaaagaatgtgtccactgga

SEQ ID NO: 2311303 - DNA, 25 bp, Homo sapien
catttttaacgaaagaatgtgtcca

SEQ ID NO: 2311304 - DNA, 25 bp, Homo sapien
gaagagacataagattcacctgggc

SEQ ID NO: 2311305 - DNA, 25 bp, Homo sapien
tggaagagacataagattcacctgg

SEQ ID NO: 2311306 - DNA, 25 bp, Homo sapien
ggaagagacataagattcacctggg

SEQ ID NO: 2311307 - DNA, 25 bp, Homo sapien
tgtgcggatgtcctcaggcaagaac

SEQ ID NO: 2311308 - DNA, 25 bp, Homo sapien
aagagaaaggtcaaatggtgtcatt

SEQ ID NO: 2311309 - DNA, 25 bp, Homo sapien
aacgtttgagcagagatttgaagac

SEQ ID NO: 2311310 - DNA, 25 bp, Homo sapien
cagaaggaaccgcttgtgcggatgt

SEQ ID NO: 2311311 - DNA, 25 bp, Homo sapien
gggccagggttgctactcttctata

SEQ ID NO: 2311312 - DNA, 25 bp, Homo sapien
tatctccaataatgtttcccattca

SEQ ID NO: 2311313 - DNA, 25 bp, Homo sapien
gggttgctactcttctatatctcca

SEQ ID NO: 2311314 - DNA, 25 bp, Homo sapien
tgtttctcatgcctgcttctgaagt

SEQ ID NO: 2311315 - DNA, 25 bp, Homo sapien
cgggcatggtggcggactcttgtaa

SEQ ID NO: 2311316 - DNA, 25 bp, Homo sapien
agctacttaggaggctgaggcagga

SEQ ID NO: 2311317 - DNA, 25 bp, Homo sapien
ctacttaggaggctgaggcaggaga

SEQ ID NO: 2311318 - DNA, 25 bp, Homo sapien
catggtggcggactcttgtaattcc

SEQ ID NO: 2311319 - DNA, 25 bp, Homo sapien
tttttgaaacacactgttgccgggc

SEQ ID NO: 2311320 - DNA, 25 bp, Homo sapien
ctttttgaaacacactgttgccggg

SEQ ID NO: 2311321 - DNA, 25 bp, Homo sapien
tttgaaacacactgttgccgggcat

SEQ ID NO: 2311322 - DNA, 25 bp, Homo sapien
ttttgaaacacactgttgccgggca

SEQ ID NO: 2311323 - DNA, 25 bp, Homo sapien
tattccaccaggataagggatccct

SEQ ID NO: 2311324 - DNA, 25 bp, Homo sapien
tgcgatgggattggacaccttgagc

SEQ ID NO: 2311325 - DNA, 25 bp, Homo sapien
gagtgtgtactctaggccaagcaga

SEQ ID NO: 2311326 - DNA, 25 bp, Homo sapien
gagagtcttctaccatcaagtgaca

SEQ ID NO: 2311327 - DNA, 25 bp, Homo sapien
tacagcctctacctaccaggttcaa

SEQ ID NO: 2311328 - DNA, 25 bp, Homo sapien
actacagcctctacctaccaggttc

SEQ ID NO: 2311329 - DNA, 25 bp, Homo sapien
tcactacagcctctacctaccaggt

SEQ ID NO: 2311330 - DNA, 25 bp, Homo sapien
ctcactacagcctctacctaccagg

SEQ ID NO: 2311331 - DNA, 25 bp, Homo sapien
aatggcggcacgacctcagctaact

SEQ ID NO: 2311332 - DNA, 25 bp, Homo sapien
taactgcaggctccatattctagtc

SEQ ID NO: 2311333 - DNA, 25 bp, Homo sapien
gcgcctggccatggttctaattcta

SEQ ID NO: 2311334 - DNA, 25 bp, Homo sapien
ctgctatacaaaaacccaggtttag

SEQ ID NO: 2311335 - DNA, 25 bp, Homo sapien
gagccacaacactcagcctaatttt

SEQ ID NO: 2311336 - DNA, 25 bp, Homo sapien
atgagccacaacactcagcctaatt

SEQ ID NO: 2311337 - DNA, 25 bp, Homo sapien
gccacaacactcagcctaattttta

SEQ ID NO: 2311338 - DNA, 25 bp, Homo sapien
ccacaacactcagcctaatttttaa

SEQ ID NO: 2311339 - DNA, 25 bp, Homo sapien
gctggaactttttctagctgtgaca

SEQ ID NO: 2311340 - DNA, 25 bp, Homo sapien
gtagctgggattagtgtatatttag

SEQ ID NO: 2311341 - DNA, 25 bp, Homo sapien
aatgttagctggaactttttctagc

SEQ ID NO: 2311342 - DNA, 25 bp, Homo sapien
agtagtcaatgaaaagataagtcaa

SEQ ID NO: 2311343 - DNA, 25 bp, Homo sapien
cacaatcacaaggttgcacaataag

SEQ ID NO: 2311344 - DNA, 25 bp, Homo sapien
agcatccggcatgggagaaaggtat

SEQ ID NO: 2311345 - DNA, 25 bp, Homo sapien
catccggcatgggagaaaggtatag

SEQ ID NO: 2311346 - DNA, 25 bp, Homo sapien
gttgcacaataagctgtctacaagc

SEQ ID NO: 2311347 - DNA, 25 bp, Homo sapien
aagttgcctattgatcacttcatgc

SEQ ID NO: 2311348 - DNA, 25 bp, Homo sapien
aaataaagcggtagcctgcaatcag

SEQ ID NO: 2311349 - DNA, 25 bp, Homo sapien
gtgcgatctcggttcttgaaattct

SEQ ID NO: 2311350 - DNA, 25 bp, Homo sapien
gatctcggttcttgaaattctgcct

SEQ ID NO: 2311351 - DNA, 25 bp, Homo sapien
aaatgatctatcttatcccctaagg

SEQ ID NO: 2311352 - DNA, 25 bp, Homo sapien
tgatctatcttatcccctaaggtaa

SEQ ID NO: 2311353 - DNA, 25 bp, Homo sapien
tccataattgtattaagtactttct

SEQ ID NO: 2311354 - DNA, 25 bp, Homo sapien
gatctatcttatcccctaaggtaat

SEQ ID NO: 2311355 - DNA, 25 bp, Homo sapien
actctcacccctcagcaggcccagg

SEQ ID NO: 2311356 - DNA, 25 bp, Homo sapien
tcagcaggcgcaggctcaggggatc

SEQ ID NO: 2311357 - DNA, 25 bp, Homo sapien
gcaggctcaggggatcactctcacc

SEQ ID NO: 2311358 - DNA, 25 bp, Homo sapien
tctcacccctcagcaggcgcaggct

SEQ ID NO: 2311359 - DNA, 25 bp, Homo sapien
cgcaggaactggggatccctctcac

SEQ ID NO: 2311360 - DNA, 25 bp, Homo sapien
gcaggaactggggatccctctcacc

SEQ ID NO: 2311361 - DNA, 25 bp, Homo sapien
aactggggatccctctcacccctca

SEQ ID NO: 2311362 - DNA, 25 bp, Homo sapien
gcgcaggaactggggatccctctca

SEQ ID NO: 2311363 - DNA, 25 bp, Homo sapien
ctctcacccctaagcaggttcagga

SEQ ID NO: 2311364 - DNA, 25 bp, Homo sapien
gcacaggctcaggagatcactctca

SEQ ID NO: 2311365 - DNA, 25 bp, Homo sapien
ctcaggaattggagatccctctcac

SEQ ID NO: 2311366 - DNA, 25 bp, Homo sapien
tcacccctaagcaggctcaggaatt

SEQ ID NO: 2311367 - DNA, 25 bp, Homo sapien
tgtatgtatgttgagacgaagtctc

SEQ ID NO: 2311368 - DNA, 25 bp, Homo sapien
atgtatgtatgttgagacgaagtct

SEQ ID NO: 2311369 - DNA, 25 bp, Homo sapien
gcgagggcccacatggacagttgtg

SEQ ID NO: 2311370 - DNA, 25 bp, Homo sapien
caccttgctggggcgagggcccaca

SEQ ID NO: 2311371 - DNA, 25 bp, Homo sapien
ttgctggggcgagggcccacatgga

SEQ ID NO: 2311372 - DNA, 25 bp, Homo sapien
ggggcgagggcccacatggacagtt

SEQ ID NO: 2311373 - DNA, 25 bp, Homo sapien
aagattactttattcctacatcttc

SEQ ID NO: 2311374 - DNA, 25 bp, Homo sapien
tatataagattactttattcctaca

SEQ ID NO: 2311375 - DNA, 25 bp, Homo sapien
gtattaatcaaagctcgtatataag

SEQ ID NO: 2311376 - DNA, 25 bp, Homo sapien
attaatcaaagctcgtatataagat

SEQ ID NO: 2311377 - DNA, 25 bp, Homo sapien
ctgccgtcagccgctgcggcctgac

SEQ ID NO: 2311378 - DNA, 25 bp, Homo sapien
ccgtcagccgctgcggcctgacccg

SEQ ID NO: 2311379 - DNA, 25 bp, Homo sapien
gctgcggcctgacccgcccagtccc

SEQ ID NO: 2311380 - DNA, 25 bp, Homo sapien
agccgctgcggcctgacccgcccag

SEQ ID NO: 2311381 - DNA, 25 bp, Homo sapien
cgccgcaactccaactggctcacag

SEQ ID NO: 2311382 - DNA, 25 bp, Homo sapien
ccccaattgctaggataaggacaca

SEQ ID NO: 2311383 - DNA, 25 bp, Homo sapien
ggataaggacacacactcgccttgc

SEQ ID NO: 2311384 - DNA, 25 bp, Homo sapien
aggcccgcgccccaattgctaggat

SEQ ID NO: 2311385 - DNA, 25 bp, Homo sapien
ccactacgggcctcacctcccatag

SEQ ID NO: 2311386 - DNA, 25 bp, Homo sapien
caattcttctccactacgggcctca

SEQ ID NO: 2311387 - DNA, 25 bp, Homo sapien
tccactacgggcctcacctcccata

SEQ ID NO: 2311388 - DNA, 25 bp, Homo sapien
ttcttctccactacgggcctcacct

SEQ ID NO: 2311389 - DNA, 25 bp, Homo sapien
cgtccatgatttgacatcagcatga

SEQ ID NO: 2311390 - DNA, 25 bp, Homo sapien
cagcatgacctggatctaaatccca

SEQ ID NO: 2311391 - DNA, 25 bp, Homo sapien
agtcggacaggcctgaattgctaac

SEQ ID NO: 2311392 - DNA, 25 bp, Homo sapien
gaattgctaacatcccgtccatgat

SEQ ID NO: 2311393 - DNA, 25 bp, Homo sapien
acaatttgttgtaaaagaattcatg

SEQ ID NO: 2311394 - DNA, 25 bp, Homo sapien
ttgttgtaaaagaattcatggcagg

SEQ ID NO: 2311395 - DNA, 25 bp, Homo sapien
gttgtaaaagaattcatggcaggtc

SEQ ID NO: 2311396 - DNA, 25 bp, Homo sapien
tgtaaaagaattcatggcaggtcat

SEQ ID NO: 2311397 - DNA, 25 bp, Homo sapien
gaaatcccatgccacttaaccccat

SEQ ID NO: 2311398 - DNA, 25 bp, Homo sapien
cccatgccacttaaccccataaatg

SEQ ID NO: 2311399 - DNA, 25 bp, Homo sapien
acagaaatcccatgccacttaaccc

SEQ ID NO: 2311400 - DNA, 25 bp, Homo sapien
aatcccatgccacttaaccccataa

SEQ ID NO: 2311401 - DNA, 25 bp, Homo sapien
gtcccagccacttggagagctgaga

SEQ ID NO: 2311402 - DNA, 25 bp, Homo sapien
cagccacttggagagctgagacagg

SEQ ID NO: 2311403 - DNA, 25 bp, Homo sapien
cagccggggtaacaaagtgagcccg

SEQ ID NO: 2311404 - DNA, 25 bp, Homo sapien
cccagccacttggagagctgagaca

SEQ ID NO: 2311405 - DNA, 25 bp, Homo sapien
tctgaaaggtgcagtagacgctctg

SEQ ID NO: 2311406 - DNA, 25 bp, Homo sapien
aggtgcagtagacgctctgattctc

SEQ ID NO: 2311407 - DNA, 25 bp, Homo sapien
cccggtcatctgaaaggtgcagtag

SEQ ID NO: 2311408 - DNA, 25 bp, Homo sapien
cacggcacccggtcatctgaaaggt

SEQ ID NO: 2311409 - DNA, 25 bp, Homo sapien
cctgatgtagctgctatttcatgcc

SEQ ID NO: 2311410 - DNA, 25 bp, Homo sapien
acctgatgtagctgctatttcatgc

SEQ ID NO: 2311411 - DNA, 25 bp, Homo sapien
cacctgatgtagctgctatttcatg

SEQ ID NO: 2311412 - DNA, 25 bp, Homo sapien
tattctttacatatatcttctgaga

SEQ ID NO: 2311413 - DNA, 25 bp, Homo sapien
catattctttacatatatcttctga

SEQ ID NO: 2311414 - DNA, 25 bp, Homo sapien
ttctttacatatatcttctgagagc

SEQ ID NO: 2311415 - DNA, 25 bp, Homo sapien
cttcatattctttacatatatcttc

SEQ ID NO: 2311416 - DNA, 25 bp, Homo sapien
tgtagtatttcttgtggtttcacaa

SEQ ID NO: 2311417 - DNA, 25 bp, Homo sapien
tgattcttcaatgcctgtagtattt

SEQ ID NO: 2311418 - DNA, 25 bp, Homo sapien
ctaaaatcatcccatcagttgattc

SEQ ID NO: 2311419 - DNA, 25 bp, Homo sapien
atcagttgattcttcaatgcctgta

SEQ ID NO: 2311420 - DNA, 25 bp, Homo sapien
agacattcttttaggtcttctgtag

SEQ ID NO: 2311421 - DNA, 25 bp, Homo sapien
agattttcaagcagtatggggtagg

SEQ ID NO: 2311422 - DNA, 25 bp, Homo sapien
ttcaagcagtatggggtaggaagtt

SEQ ID NO: 2311423 - DNA, 25 bp, Homo sapien
tcaaacctctgtattagagatctaa

SEQ ID NO: 2311424 - DNA, 25 bp, Homo sapien
caggctaatactgaactcctcacct

SEQ ID NO: 2311425 - DNA, 25 bp, Homo sapien
tgggatgaactgatcactatccatt

SEQ ID NO: 2311426 - DNA, 25 bp, Homo sapien
tgtccaaattgggatgaactgatca

SEQ ID NO: 2311427 - DNA, 25 bp, Homo sapien
ccaaattgggatgaactgatcacta

SEQ ID NO: 2311428 - DNA, 25 bp, Homo sapien
caactgtccaaattgggatgaactg

SEQ ID NO: 2311429 - DNA, 25 bp, Homo sapien
ttctcatcaacttgtaccatgggag

SEQ ID NO: 2311430 - DNA, 25 bp, Homo sapien
ttctcacccttctcatcaacttgta

SEQ ID NO: 2311431 - DNA, 25 bp, Homo sapien
tcatcaacttgtaccatgggagaag

SEQ ID NO: 2311432 - DNA, 25 bp, Homo sapien
ccttctcatcaacttgtaccatggg

SEQ ID NO: 2311433 - DNA, 25 bp, Homo sapien
ctctattggtgttgtttcaggaatc

SEQ ID NO: 2311434 - DNA, 25 bp, Homo sapien
ctattggtgttgtttcaggaatctc

SEQ ID NO: 2311435 - DNA, 25 bp, Homo sapien
tctattggtgttgtttcaggaatct

SEQ ID NO: 2311436 - DNA, 25 bp, Homo sapien
tataccagttgctattgtgtgcaaa

SEQ ID NO: 2311437 - DNA, 25 bp, Homo sapien
tgtgcaaactcacagcttatcactt

SEQ ID NO: 2311438 - DNA, 25 bp, Homo sapien
cagttgctattgtgtgcaaactcac

SEQ ID NO: 2311439 - DNA, 25 bp, Homo sapien
caaactcacagcttatcactttggg

SEQ ID NO: 2311440 - DNA, 25 bp, Homo sapien
cataattggcttgccctgaaatgtt

SEQ ID NO: 2311441 - DNA, 25 bp, Homo sapien
aattggcttgccctgaaatgtttta

SEQ ID NO: 2311442 - DNA, 25 bp, Homo sapien
taattggcttgccctgaaatgtttt

SEQ ID NO: 2311443 - DNA, 25 bp, Homo sapien
gaaacaagagtccagaatggtatct

SEQ ID NO: 2311444 - DNA, 25 bp, Homo sapien
gaatctcagtgacatcaatcagtcc

SEQ ID NO: 2311445 - DNA, 25 bp, Homo sapien
aataattttagctgtcatccctgca

SEQ ID NO: 2311446 - DNA, 25 bp, Homo sapien
aaagcatactagacacaccatagcc

SEQ ID NO: 2311447 - DNA, 25 bp, Homo sapien
aaaacagcaattggtcaggcgcggt

SEQ ID NO: 2311448 - DNA, 25 bp, Homo sapien
aaaataaatcagccaagcgtgatgg

SEQ ID NO: 2311449 - DNA, 25 bp, Homo sapien
gagagagagaccactagtcaagaaa

SEQ ID NO: 2311450 - DNA, 25 bp, Homo sapien
ggcagtggtccacaaaataccattt

SEQ ID NO: 2311451 - DNA, 25 bp, Homo sapien
aacagctctgtctaaaaaagcttag

SEQ ID NO: 2311452 - DNA, 25 bp, Homo sapien
caaatactacttgtgtctaggcagt

SEQ ID NO: 2311453 - DNA, 25 bp, Homo sapien
tgtaagcatcagtacaaacctacat

SEQ ID NO: 2311454 - DNA, 25 bp, Homo sapien
gggtgactatagatactagaatcca

SEQ ID NO: 2311455 - DNA, 25 bp, Homo sapien
taatcgataaccattcttagcaaaa

SEQ ID NO: 2311456 - DNA, 25 bp, Homo sapien
gaggcatactgtgcttgagtttgaa

SEQ ID NO: 2311457 - DNA, 25 bp, Homo sapien
ccgagtactgttggtgaggattata

SEQ ID NO: 2311458 - DNA, 25 bp, Homo sapien
ttcaaagtaaggtgtaggatttgga

SEQ ID NO: 2311459 - DNA, 25 bp, Homo sapien
tttttggaatggtcgacccatattc

SEQ ID NO: 2311460 - DNA, 25 bp, Homo sapien
tggaatggtcgacccatattcatag

SEQ ID NO: 2311461 - DNA, 25 bp, Homo sapien
ggaatggtcgacccatattcatagc

SEQ ID NO: 2311462 - DNA, 25 bp, Homo sapien
tttggaatggtcgacccatattcat

SEQ ID NO: 2311463 - DNA, 25 bp, Homo sapien
gtctgttacatgcattaccaactca

SEQ ID NO: 2311464 - DNA, 25 bp, Homo sapien
tactgagcctgacaacaaacattgc

SEQ ID NO: 2311465 - DNA, 25 bp, Homo sapien
actgtagttcttgggtgtcatttca

SEQ ID NO: 2311466 - DNA, 25 bp, Homo sapien
aagcccttaggaacagagtttgtga

SEQ ID NO: 2311467 - DNA, 25 bp, Homo sapien
caacaacaagccataacatacacca

SEQ ID NO: 2311468 - DNA, 25 bp, Homo sapien
tgaacatagtgctttaagtgcgggc

SEQ ID NO: 2311469 - DNA, 25 bp, Homo sapien
tcgtcccaggcaacataaacagacc

SEQ ID NO: 2311470 - DNA, 25 bp, Homo sapien
gttaaaagccatagtatcacgcctg

SEQ ID NO: 2311471 - DNA, 25 bp, Homo sapien
gcccaccttggcctcccaaagtgtc

SEQ ID NO: 2311472 - DNA, 25 bp, Homo sapien
tgaactcttgacctcgtgaaccgcc

SEQ ID NO: 2311473 - DNA, 25 bp, Homo sapien
tgaaccgcccaccttggcctcccaa

SEQ ID NO: 2311474 - DNA, 25 bp, Homo sapien
cgcccaccttggcctcccaaagtgt

SEQ ID NO: 2311475 - DNA, 25 bp, Homo sapien
aaaaatgttgtgggctggacacagt

SEQ ID NO: 2311476 - DNA, 25 bp, Homo sapien
gtgccaggccaaagtgaagtaaatt

SEQ ID NO: 2311477 - DNA, 25 bp, Homo sapien
ccgtgccaggccaaagtgaagtaaa

SEQ ID NO: 2311478 - DNA, 25 bp, Homo sapien
ttaaaaaatgttgtgggctggacac

SEQ ID NO: 2311479 - DNA, 25 bp, Homo sapien
caaagcagtaaatcgagacagaaaa

SEQ ID NO: 2311480 - DNA, 25 bp, Homo sapien
aagcagtaaatcgagacagaaaaac

SEQ ID NO: 2311481 - DNA, 25 bp, Homo sapien
acacaaagcagtaaatcgagacaga

SEQ ID NO: 2311482 - DNA, 25 bp, Homo sapien
gctcctgttgtactggggttttcaa

SEQ ID NO: 2311483 - DNA, 25 bp, Homo sapien
gggttatgccgttcagctggaaagt

SEQ ID NO: 2311484 - DNA, 25 bp, Homo sapien
gcaaagtggaagtctccttctgaag

SEQ ID NO: 2311485 - DNA, 25 bp, Homo sapien
tatatctgttcaactgtccatcccc

SEQ ID NO: 2311486 - DNA, 25 bp, Homo sapien
ggaaagtttcttgaactatatctgt

SEQ ID NO: 2311487 - DNA, 25 bp, Homo sapien
attattatgaagatcatgttcttca

SEQ ID NO: 2311488 - DNA, 25 bp, Homo sapien
tgttcttcaattattcaggatgatc

SEQ ID NO: 2311489 - DNA, 25 bp, Homo sapien
caggatgatcacattattatcaaag

SEQ ID NO: 2311490 - DNA, 25 bp, Homo sapien
tattcaggatgatcacattattatc

SEQ ID NO: 2311491 - DNA, 25 bp, Homo sapien
gtcatcttctcgtcgtcttcgacct

SEQ ID NO: 2311492 - DNA, 25 bp, Homo sapien
ttctcgtcgtcttcgacctctgaag

SEQ ID NO: 2311493 - DNA, 25 bp, Homo sapien
ctgtcatcttctcgtcgtcttcgac

SEQ ID NO: 2311494 - DNA, 25 bp, Homo sapien
ctcgtcgtcttcgacctctgaagag

SEQ ID NO: 2311495 - DNA, 25 bp, Homo sapien
cctgaccgttctgcttggttttgca

SEQ ID NO: 2311496 - DNA, 25 bp, Homo sapien
ttttggagctttgaagatgtcctga

SEQ ID NO: 2311497 - DNA, 25 bp, Homo sapien
gagctgacattacagacttgagtcg

SEQ ID NO: 2311498 - DNA, 25 bp, Homo sapien
accccgactcgagaggaggatcact

SEQ ID NO: 2311499 - DNA, 25 bp, Homo sapien
ctacttctgccatgtataaactgtg

SEQ ID NO: 2311500 - DNA, 25 bp, Homo sapien
acttctgccatgtataaactgtgtg

SEQ ID NO: 2311501 - DNA, 25 bp, Homo sapien
tctcctacttctgccatgtataaac

SEQ ID NO: 2311502 - DNA, 25 bp, Homo sapien
ttctctcctacttctgccatgtata

SEQ ID NO: 2311503 - DNA, 25 bp, Homo sapien
gagaaaacaatatccctcctctata

SEQ ID NO: 2311504 - DNA, 25 bp, Homo sapien
aggcttaagcaactgtgcccgccca

SEQ ID NO: 2311505 - DNA, 25 bp, Homo sapien
atccctcctctatataacatatatg

SEQ ID NO: 2311506 - DNA, 25 bp, Homo sapien
tctatttatctcaagagaaaacaat

SEQ ID NO: 2311507 - DNA, 25 bp, Homo sapien
ttgattcagctgttgaaggatgagg

SEQ ID NO: 2311508 - DNA, 25 bp, Homo sapien
gattcagctgttgaaggatgaggtc

SEQ ID NO: 2311509 - DNA, 25 bp, Homo sapien
attcagctgttgaaggatgaggtct

SEQ ID NO: 2311510 - DNA, 25 bp, Homo sapien
ctttgattcagctgttgaaggatga

SEQ ID NO: 2311511 - DNA, 25 bp, Homo sapien
gagttcacctggcattcttgatgaa

SEQ ID NO: 2311512 - DNA, 25 bp, Homo sapien
aaacgagttcacctggcattcttga

SEQ ID NO: 2311513 - DNA, 25 bp, Homo sapien
tcctattctccaaaacgagttcacc

SEQ ID NO: 2311514 - DNA, 25 bp, Homo sapien
tctccaaaacgagttcacctggcat

SEQ ID NO: 2311515 - DNA, 25 bp, Homo sapien
tgggcaactaattgtcaactcttca

SEQ ID NO: 2311516 - DNA, 25 bp, Homo sapien
ctgggcaactaattgtcaactcttc

SEQ ID NO: 2311517 - DNA, 25 bp, Homo sapien
actgggcaactaattgtcaactctt

SEQ ID NO: 2311518 - DNA, 25 bp, Homo sapien
tacttggaggagaaactggtatagt

SEQ ID NO: 2311519 - DNA, 25 bp, Homo sapien
gaggagaaactggtatagttgtctg

SEQ ID NO: 2311520 - DNA, 25 bp, Homo sapien
tgtagtacttggaggagaaactggt

SEQ ID NO: 2311521 - DNA, 25 bp, Homo sapien
atggctttgtagtacttggaggaga

SEQ ID NO: 2311522 - DNA, 25 bp, Homo sapien
ctgtagagccacagctgtagctgca

SEQ ID NO: 2311523 - DNA, 25 bp, Homo sapien
cacagctgtagctgcatttatgtta

SEQ ID NO: 2311524 - DNA, 25 bp, Homo sapien
gccacagctgtagctgcatttatgt

SEQ ID NO: 2311525 - DNA, 25 bp, Homo sapien
agctgtagctgcatttatgttatta

SEQ ID NO: 2311526 - DNA, 25 bp, Homo sapien
ataatgatgggagcgacctaaatgc

SEQ ID NO: 2311527 - DNA, 25 bp, Homo sapien
cagcgttgtttataatgatgggagc

SEQ ID NO: 2311528 - DNA, 25 bp, Homo sapien
atacaataatttcacgtaaggaatt

SEQ ID NO: 2311529 - DNA, 25 bp, Homo sapien
gaaggatgttcatgtcagcgttgtt

SEQ ID NO: 2311530 - DNA, 25 bp, Homo sapien
caccacattggagcgaagttcccgt

SEQ ID NO: 2311531 - DNA, 25 bp, Homo sapien
acttcagcataacttaactttcggg

SEQ ID NO: 2311532 - DNA, 25 bp, Homo sapien
tgtggtttctcaacggagttctcag

SEQ ID NO: 2311533 - DNA, 25 bp, Homo sapien
gaagttcccgtagtggctgcacaag

SEQ ID NO: 2311534 - DNA, 25 bp, Homo sapien
gcacatattgctctttgccattacg

SEQ ID NO: 2311535 - DNA, 25 bp, Homo sapien
tatggctaaactggcgtctctgttc

SEQ ID NO: 2311536 - DNA, 25 bp, Homo sapien
ggggattatattgcctcggaagcca

SEQ ID NO: 2311537 - DNA, 25 bp, Homo sapien
cattacgtcgagtcactccctgagg

SEQ ID NO: 2311538 - DNA, 25 bp, Homo sapien
tttatattgattggaatcctccagc

SEQ ID NO: 2311539 - DNA, 25 bp, Homo sapien
gagatgaattttgggatcctatcac

SEQ ID NO: 2311540 - DNA, 25 bp, Homo sapien
caagtttaatgggaagagagtgaag

SEQ ID NO: 2311541 - DNA, 25 bp, Homo sapien
cataatgaaatggacgtactttctc

SEQ ID NO: 2311542 - DNA, 25 bp, Homo sapien
actgatccgctttgcaatacaaggc

SEQ ID NO: 2311543 - DNA, 25 bp, Homo sapien
catatagtcagagatggcattcttc

SEQ ID NO: 2311544 - DNA, 25 bp, Homo sapien
aatccatttgacctatgcactgagg

SEQ ID NO: 2311545 - DNA, 25 bp, Homo sapien
ggtcagtctgccctaccatcttggg

SEQ ID NO: 2311546 - DNA, 25 bp, Homo sapien
gcaactgccaagctaataataagtc

SEQ ID NO: 2311547 - DNA, 25 bp, Homo sapien
tgaaatccaacgcattcaaaggatg

SEQ ID NO: 2311548 - DNA, 25 bp, Homo sapien
taaccactaacatgtatctccaaag

SEQ ID NO: 2311549 - DNA, 25 bp, Homo sapien
attgttatgtttcacctagtaggca

SEQ ID NO: 2311550 - DNA, 25 bp, Homo sapien
tatgtatcttttcggaagctcagac

SEQ ID NO: 2311551 - DNA, 25 bp, Homo sapien
acatttaagagatgcaaaggacacc

SEQ ID NO: 2311552 - DNA, 25 bp, Homo sapien
gacaggccctaggtattatgaaaac

SEQ ID NO: 2311553 - DNA, 25 bp, Homo sapien
ctctatgaagtgcaaagtggtgaac

SEQ ID NO: 2311554 - DNA, 25 bp, Homo sapien
tccgccagccacactccggaagaca

SEQ ID NO: 2311555 - DNA, 25 bp, Homo sapien
cacacccggctacaggatccggctc

SEQ ID NO: 2311556 - DNA, 25 bp, Homo sapien
acccggctacaggatccggctccgg

SEQ ID NO: 2311557 - DNA, 25 bp, Homo sapien
gccacactccggaagacaagagagg

SEQ ID NO: 2311558 - DNA, 25 bp, Homo sapien
gcccgcacttcaggcggcagcgccg

SEQ ID NO: 2311559 - DNA, 25 bp, Homo sapien
tccgccagctgcgcccgcacttcag

SEQ ID NO: 2311560 - DNA, 25 bp, Homo sapien
cgcccgcacttcaggcggcagcgcc

SEQ ID NO: 2311561 - DNA, 25 bp, Homo sapien
ccagctgcgcccgcacttcaggcgg

SEQ ID NO: 2311562 - DNA, 25 bp, Homo sapien
tgtctcccaagtcgccgcgatccgc

SEQ ID NO: 2311563 - DNA, 25 bp, Homo sapien
ctgtctcccaagtcgccgcgatccg

SEQ ID NO: 2311564 - DNA, 25 bp, Homo sapien
ctcccaagtcgccgcgatccgcagg

SEQ ID NO: 2311565 - DNA, 25 bp, Homo sapien
gtctcccaagtcgccgcgatccgca

SEQ ID NO: 2311566 - DNA, 25 bp, Homo sapien
cgcacggccgccagagcgcgcggcg

SEQ ID NO: 2311567 - DNA, 25 bp, Homo sapien
cacggccgccagagcgcgcggcggg

SEQ ID NO: 2311568 - DNA, 25 bp, Homo sapien
cctcgtccccctcgccgcacggccg

SEQ ID NO: 2311569 - DNA, 25 bp, Homo sapien
gccgcacggccgccagagcgcgcgg

SEQ ID NO: 2311570 - DNA, 25 bp, Homo sapien
tcgtggagcgccaggccaggttctc

SEQ ID NO: 2311571 - DNA, 25 bp, Homo sapien
gtcgtggagcgccaggccaggttct

SEQ ID NO: 2311572 - DNA, 25 bp, Homo sapien
aaaacggtcgtggagcgccaggcca

SEQ ID NO: 2311573 - DNA, 25 bp, Homo sapien
gagggaaaacggtcgtggagcgcca

SEQ ID NO: 2311574 - DNA, 25 bp, Homo sapien
tccctctccgtgtgaaagcaatcaa

SEQ ID NO: 2311575 - DNA, 25 bp, Homo sapien
taaacaacaatcagctggaagcaga

SEQ ID NO: 2311576 - DNA, 25 bp, Homo sapien
ccttcattggaaagcaaaccatgca

SEQ ID NO: 2311577 - DNA, 25 bp, Homo sapien
tgggtcctagaaatagttcctcaga

SEQ ID NO: 2311578 - DNA, 25 bp, Homo sapien
acctcttccccattaaaagtcactg

SEQ ID NO: 2311579 - DNA, 25 bp, Homo sapien
aagtcactgcaattcctaggaagca

SEQ ID NO: 2311580 - DNA, 25 bp, Homo sapien
ccccttctgagactgtaaaatcttt

SEQ ID NO: 2311581 - DNA, 25 bp, Homo sapien
caattcctaggaagcagtcttctct

SEQ ID NO: 2311582 - DNA, 25 bp, Homo sapien
caccgtgcccagccttctctgtccc

SEQ ID NO: 2311583 - DNA, 25 bp, Homo sapien
accgtgcccagccttctctgtccct

SEQ ID NO: 2311584 - DNA, 25 bp, Homo sapien
gccaccgtgcccagccttctctgtc

SEQ ID NO: 2311585 - DNA, 25 bp, Homo sapien
cgtgcccagccttctctgtccctct

SEQ ID NO: 2311586 - DNA, 25 bp, Homo sapien
cagggaacaagacagtaaaatctct

SEQ ID NO: 2311587 - DNA, 25 bp, Homo sapien
tttactctttaaagctgccaccatc

SEQ ID NO: 2311588 - DNA, 25 bp, Homo sapien
gggacagagcctacacttctttact

SEQ ID NO: 2311589 - DNA, 25 bp, Homo sapien
cactgaacaagtgtctattgagtct

SEQ ID NO: 2311590 - DNA, 25 bp, Homo sapien
taagcaaagtagtcaggcagactga

SEQ ID NO: 2311591 - DNA, 25 bp, Homo sapien
tatcacccaactgtaaaagtcaagt

SEQ ID NO: 2311592 - DNA, 25 bp, Homo sapien
ctgaagaaacggaaagttgtcacat

SEQ ID NO: 2311593 - DNA, 25 bp, Homo sapien
aaatcagagggtatatagtgaggaa

SEQ ID NO: 2311594 - DNA, 25 bp, Homo sapien
tgaacgtccttggtagttggccaca

SEQ ID NO: 2311595 - DNA, 25 bp, Homo sapien
tcaaagagacctgagataacgtggg

SEQ ID NO: 2311596 - DNA, 25 bp, Homo sapien
cagttggacatgttatgcacagccc

SEQ ID NO: 2311597 - DNA, 25 bp, Homo sapien
caaaggtctgacttggttcaacaaa

SEQ ID NO: 2311598 - DNA, 25 bp, Homo sapien
cccaaagtgctgtcggccaaggata

SEQ ID NO: 2311599 - DNA, 25 bp, Homo sapien
tgtttcttccaatttgtactgaaaa

SEQ ID NO: 2311600 - DNA, 25 bp, Homo sapien
ccataaccacctagggacagagtct

SEQ ID NO: 2311601 - DNA, 25 bp, Homo sapien
gtgcacatcaccataaccacctagg

SEQ ID NO: 2311602 - DNA, 25 bp, Homo sapien
tgctcacatcaatcctacaacgtag

SEQ ID NO: 2311603 - DNA, 25 bp, Homo sapien
ggccttaagaaatcctgccgcctca

SEQ ID NO: 2311604 - DNA, 25 bp, Homo sapien
tagtaactgattcagtgctcacatc

SEQ ID NO: 2311605 - DNA, 25 bp, Homo sapien
cactgagacactaaatctgactacc

SEQ ID NO: 2311606 - DNA, 25 bp, Homo sapien
ccagacaggatttaacaagtgagat

SEQ ID NO: 2311607 - DNA, 25 bp, Homo sapien
catttacatctgagtcagtcaccca

SEQ ID NO: 2311608 - DNA, 25 bp, Homo sapien
caaggtttctaggtgtggttgcagc

SEQ ID NO: 2311609 - DNA, 25 bp, Homo sapien
tgagatatatcaaacacaggccctg

SEQ ID NO: 2311610 - DNA, 25 bp, Homo sapien
actttaacagcttggcataagacat

SEQ ID NO: 2311611 - DNA, 25 bp, Homo sapien
aaactttaacagcttggcataagac

SEQ ID NO: 2311612 - DNA, 25 bp, Homo sapien
acattgaaattgtctcttaacctta

SEQ ID NO: 2311613 - DNA, 25 bp, Homo sapien
tgaaattgtctcttaaccttaatta

SEQ ID NO: 2311614 - DNA, 25 bp, Homo sapien
tgagacaccatgaccggcccaacat

SEQ ID NO: 2311615 - DNA, 25 bp, Homo sapien
cagactggagttcattggcactacc

SEQ ID NO: 2311616 - DNA, 25 bp, Homo sapien
catgaccggcccaacatgtgctatt

SEQ ID NO: 2311617 - DNA, 25 bp, Homo sapien
agactggagttcattggcactacct

SEQ ID NO: 2311618 - DNA, 25 bp, Homo sapien
tctgaatcactgatctcaggcatgg

SEQ ID NO: 2311619 - DNA, 25 bp, Homo sapien
tactgggcacctattatctatctgc

SEQ ID NO: 2311620 - DNA, 25 bp, Homo sapien
cattggccctgaaaagtgaaacatg

SEQ ID NO: 2311621 - DNA, 25 bp, Homo sapien
taatcctagcaagaatgtgacctcc

SEQ ID NO: 2311622 - DNA, 25 bp, Homo sapien
ggacagattcctagacatataatgt

SEQ ID NO: 2311623 - DNA, 25 bp, Homo sapien
tctctacatatgtttttaccattca

SEQ ID NO: 2311624 - DNA, 25 bp, Homo sapien
tacttcgattaatatctctctacat

SEQ ID NO: 2311625 - DNA, 25 bp, Homo sapien
ttgacaagtgtttaagttgtttcca

SEQ ID NO: 2311626 - DNA, 25 bp, Homo sapien
ttaaaagttaaagtagctagctgga

SEQ ID NO: 2311627 - DNA, 25 bp, Homo sapien
tgccaataccatgcattctgtagct

SEQ ID NO: 2311628 - DNA, 25 bp, Homo sapien
tagcttaattgaatgtcagactgca

SEQ ID NO: 2311629 - DNA, 25 bp, Homo sapien
catgagtatgcatacaaatacaaac

SEQ ID NO: 2311630 - DNA, 25 bp, Homo sapien
gcaggaatactcaaggctcagattt

SEQ ID NO: 2311631 - DNA, 25 bp, Homo sapien
tgaagttaaacaggctaccaatgtc

SEQ ID NO: 2311632 - DNA, 25 bp, Homo sapien
gctatctatttataagtggccatga

SEQ ID NO: 2311633 - DNA, 25 bp, Homo sapien
gccatcccgctggttaaagcaggaa

SEQ ID NO: 2311634 - DNA, 25 bp, Homo sapien
ttcccactgaagcaacactgtttcg

SEQ ID NO: 2311635 - DNA, 25 bp, Homo sapien
ggttatctagaccattcccctcagg

SEQ ID NO: 2311636 - DNA, 25 bp, Homo sapien
tcaggaccctagaacatggaaaact

SEQ ID NO: 2311637 - DNA, 25 bp, Homo sapien
cactgtgtcggaccatctttctgga

SEQ ID NO: 2311638 - DNA, 25 bp, Homo sapien
aatacaaaaaaatgcaccgggcgcg

SEQ ID NO: 2311639 - DNA, 25 bp, Homo sapien
actatgggaggccgatgtaggtgaa

SEQ ID NO: 2311640 - DNA, 25 bp, Homo sapien
tatgggaggccgatgtaggtgaatc

SEQ ID NO: 2311641 - DNA, 25 bp, Homo sapien
aaaaaatgcaccgggcgcggtgact

SEQ ID NO: 2311642 - DNA, 25 bp, Homo sapien
ctattacttgtgctacccctaaggg

SEQ ID NO: 2311643 - DNA, 25 bp, Homo sapien
gaattacaggcttaggacgctaccg

SEQ ID NO: 2311644 - DNA, 25 bp, Homo sapien
gattctcaattattacccctggcag

SEQ ID NO: 2311645 - DNA, 25 bp, Homo sapien
ccctaagggtacaggagactgatca

SEQ ID NO: 2311646 - DNA, 25 bp, Homo sapien
cccaaaggccttagtgatgtactca

SEQ ID NO: 2311647 - DNA, 25 bp, Homo sapien
gaccaattgttggttagtcaaactg

SEQ ID NO: 2311648 - DNA, 25 bp, Homo sapien
gagttaataagaagtctgtcccttg

SEQ ID NO: 2311649 - DNA, 25 bp, Homo sapien
gatgtactcagtggagaggagttaa

SEQ ID NO: 2311650 - DNA, 25 bp, Homo sapien
ctgagattagtgatcatcaggctgt

SEQ ID NO: 2311651 - DNA, 25 bp, Homo sapien
tgttactgtttaagatgactgtcaa

SEQ ID NO: 2311652 - DNA, 25 bp, Homo sapien
ttaacatgttactgtttaagatgac

SEQ ID NO: 2311653 - DNA, 25 bp, Homo sapien
atgaactatctcactgagattagtg

SEQ ID NO: 2311654 - DNA, 25 bp, Homo sapien
gaccagagctcttagaatgccatgg

SEQ ID NO: 2311655 - DNA, 25 bp, Homo sapien
gctggcattgacgtaacaaacataa

SEQ ID NO: 2311656 - DNA, 25 bp, Homo sapien
gagtagtggcacagatcacaaggtc

SEQ ID NO: 2311657 - DNA, 25 bp, Homo sapien
gatgtatcctactagatgtgaagac

SEQ ID NO: 2311658 - DNA, 25 bp, Homo sapien
gcccaagaatgaggagatataccaa

SEQ ID NO: 2311659 - DNA, 25 bp, Homo sapien
tctccagaggattgtaataggaccc

SEQ ID NO: 2311660 - DNA, 25 bp, Homo sapien
tctggaccagtcacaggactatgct

SEQ ID NO: 2311661 - DNA, 25 bp, Homo sapien
ggccctatcttgaggtctggaccag

SEQ ID NO: 2311662 - DNA, 25 bp, Homo sapien
gtctcctagagctgctcagatctga

SEQ ID NO: 2311663 - DNA, 25 bp, Homo sapien
ctcctagagctgctcagatctgatt

SEQ ID NO: 2311664 - DNA, 25 bp, Homo sapien
gagctgctcagatctgatttaatac

SEQ ID NO: 2311665 - DNA, 25 bp, Homo sapien
tcagatctgatttaatactgtccat

SEQ ID NO: 2311666 - DNA, 25 bp, Homo sapien
ggaagctgggcatgagatagggtaa

SEQ ID NO: 2311667 - DNA, 25 bp, Homo sapien
ccaaactcccatgcaaacagactgg

SEQ ID NO: 2311668 - DNA, 25 bp, Homo sapien
aagatggtgcctagcaccaaactcc

SEQ ID NO: 2311669 - DNA, 25 bp, Homo sapien
agactggggtcattggaagctgggc

SEQ ID NO: 2311670 - DNA, 25 bp, Homo sapien
cacaaaacagtgctacgtgcatcta

SEQ ID NO: 2311671 - DNA, 25 bp, Homo sapien
gatcatggtactagactcagcacta

SEQ ID NO: 2311672 - DNA, 25 bp, Homo sapien
tgctccacagtgctagactcagatc

SEQ ID NO: 2311673 - DNA, 25 bp, Homo sapien
gaattaaatggtgcatgtgccaggc

SEQ ID NO: 2311674 - DNA, 25 bp, Homo sapien
ccaacaagagaatggtcgtggcgag

SEQ ID NO: 2311675 - DNA, 25 bp, Homo sapien
agtctgcgacccacacgctgtgaga

SEQ ID NO: 2311676 - DNA, 25 bp, Homo sapien
gcgacccacacgctgtgagactgtc

SEQ ID NO: 2311677 - DNA, 25 bp, Homo sapien
aatggtcgtggcgagtctgcgaccc

SEQ ID NO: 2311678 - DNA, 25 bp, Homo sapien
cccaagtggctggcacgccaccatg

SEQ ID NO: 2311679 - DNA, 25 bp, Homo sapien
ccaagtggctggcacgccaccatgc

SEQ ID NO: 2311680 - DNA, 25 bp, Homo sapien
ctcccaagtggctggcacgccacca

SEQ ID NO: 2311681 - DNA, 25 bp, Homo sapien
tcccaagtggctggcacgccaccat

SEQ ID NO: 2311682 - DNA, 25 bp, Homo sapien
agcaagaaacagaaataggttatgc

SEQ ID NO: 2311683 - DNA, 25 bp, Homo sapien
gcattattcttactctgtggttttc

SEQ ID NO: 2311684 - DNA, 25 bp, Homo sapien
cagaaataggttatgcattattctt

SEQ ID NO: 2311685 - DNA, 25 bp, Homo sapien
cattattcttactctgtggttttcc

SEQ ID NO: 2311686 - DNA, 25 bp, Homo sapien
tgtgtctgcgggctgtaaggagata

SEQ ID NO: 2311687 - DNA, 25 bp, Homo sapien
tctgcgggctgtaaggagataggag

SEQ ID NO: 2311688 - DNA, 25 bp, Homo sapien
cttgtgtctgcgggctgtaaggaga

SEQ ID NO: 2311689 - DNA, 25 bp, Homo sapien
tgcgggctgtaaggagataggagtt

SEQ ID NO: 2311690 - DNA, 25 bp, Homo sapien
aaaaagatgaaacgcatcatgaatt

SEQ ID NO: 2311691 - DNA, 25 bp, Homo sapien
aagttctttctgtactgctgaatca

SEQ ID NO: 2311692 - DNA, 25 bp, Homo sapien
gttctttctgtactgctgaatcagt

SEQ ID NO: 2311693 - DNA, 25 bp, Homo sapien
tctttctgtactgctgaatcagttt

SEQ ID NO: 2311694 - DNA, 25 bp, Homo sapien
ctaagttctttctgtactgctgaat

SEQ ID NO: 2311695 - DNA, 25 bp, Homo sapien
gatcgatatcgttcatccctggctc

SEQ ID NO: 2311696 - DNA, 25 bp, Homo sapien
gtacttagagggagcagaagtttga

SEQ ID NO: 2311697 - DNA, 25 bp, Homo sapien
tggctcccccagatcgagttcggtg

SEQ ID NO: 2311698 - DNA, 25 bp, Homo sapien
agatcgagttcggtggtacttagag

SEQ ID NO: 2311699 - DNA, 25 bp, Homo sapien
caggatacacagttcatactactgt

SEQ ID NO: 2311700 - DNA, 25 bp, Homo sapien
tcaggatacacagttcatactactg

SEQ ID NO: 2311701 - DNA, 25 bp, Homo sapien
cagagtaaattctgacaagagagaa

SEQ ID NO: 2311702 - DNA, 25 bp, Homo sapien
cttcagagtaaattctgacaagaga

SEQ ID NO: 2311703 - DNA, 25 bp, Homo sapien
gagtaaattctgacaagagagaatt

SEQ ID NO: 2311704 - DNA, 25 bp, Homo sapien
tcagagtaaattctgacaagagaga

SEQ ID NO: 2311705 - DNA, 25 bp, Homo sapien
tgatgagttcatattaatacctcca

SEQ ID NO: 2311706 - DNA, 25 bp, Homo sapien
aagtggctccttttagtgaagaatg

SEQ ID NO: 2311707 - DNA, 25 bp, Homo sapien
ttggtggatcaagaaattcatatac

SEQ ID NO: 2311708 - DNA, 25 bp, Homo sapien
cttctctaataggatgaaacaacat

SEQ ID NO: 2311709 - DNA, 25 bp, Homo sapien
acatttcacgagtttgtgtgtcacc

SEQ ID NO: 2311710 - DNA, 25 bp, Homo sapien
gaacatttcacgagtttgtgtgtca

SEQ ID NO: 2311711 - DNA, 25 bp, Homo sapien
ttgtgtgtcaccttgctcaggggcc

SEQ ID NO: 2311712 - DNA, 25 bp, Homo sapien
atttcacgagtttgtgtgtcacctt

SEQ ID NO: 2311713 - DNA, 25 bp, Homo sapien
tttgtcaacctttcaactcactagt

SEQ ID NO: 2311714 - DNA, 25 bp, Homo sapien
cattcttccgtttgcaattaataag

SEQ ID NO: 2311715 - DNA, 25 bp, Homo sapien
aggtgtctgctccactatggtaaca

SEQ ID NO: 2311716 - DNA, 25 bp, Homo sapien
tttctcaaaacatgatgtcaggagg

SEQ ID NO: 2311717 - DNA, 25 bp, Homo sapien
gattcccctataatccagaactgtt

SEQ ID NO: 2311718 - DNA, 25 bp, Homo sapien
gttgtcctgtctcttgattccccta

SEQ ID NO: 2311719 - DNA, 25 bp, Homo sapien
tattccaacatagtctattgtccca

SEQ ID NO: 2311720 - DNA, 25 bp, Homo sapien
cctgatctgggatctactggaggaa

SEQ ID NO: 2311721 - DNA, 25 bp, Homo sapien
taacgacaatgtgacaatgccctag

SEQ ID NO: 2311722 - DNA, 25 bp, Homo sapien
caaggttgagattcccagagttatc

SEQ ID NO: 2311723 - DNA, 25 bp, Homo sapien
tataagagctagaccaatgagatcc

SEQ ID NO: 2311724 - DNA, 25 bp, Homo sapien
tctgaatcaagaaactgcaggtcct

SEQ ID NO: 2311725 - DNA, 25 bp, Homo sapien
tatgctttgccagtgcagcctgaac

SEQ ID NO: 2311726 - DNA, 25 bp, Homo sapien
cttttggttggcatgggcaaagcca

SEQ ID NO: 2311727 - DNA, 25 bp, Homo sapien
gatcgccttttggttggcatgggca

SEQ ID NO: 2311728 - DNA, 25 bp, Homo sapien
aatgtggatcgccttttggttggca

SEQ ID NO: 2311729 - DNA, 25 bp, Homo sapien
actgaacaaatgtggatcgcctttt

SEQ ID NO: 2311730 - DNA, 25 bp, Homo sapien
gaatagctactaaactgagagcccc

SEQ ID NO: 2311731 - DNA, 25 bp, Homo sapien
catgaggacccaacttgtgctgtac

SEQ ID NO: 2311732 - DNA, 25 bp, Homo sapien
tgatagccggctagaggtaccctgt

SEQ ID NO: 2311733 - DNA, 25 bp, Homo sapien
gagttcgtgaattcccctcaggcag

SEQ ID NO: 2311734 - DNA, 25 bp, Homo sapien
tacaactaggcattggaaacagcca

SEQ ID NO: 2311735 - DNA, 25 bp, Homo sapien
gaaatcactatgcagggtgcgctca

SEQ ID NO: 2311736 - DNA, 25 bp, Homo sapien
cacatcgctgggttaggctgtaaca

SEQ ID NO: 2311737 - DNA, 25 bp, Homo sapien
tgcatgacagcatcaagatatccca

SEQ ID NO: 2311738 - DNA, 25 bp, Homo sapien
ggcttgctgattctcctccctacag

SEQ ID NO: 2311739 - DNA, 25 bp, Homo sapien
gactggtacactgagggcatgcaat

SEQ ID NO: 2311740 - DNA, 25 bp, Homo sapien
tgttaagcacttagccctttgactg

SEQ ID NO: 2311741 - DNA, 25 bp, Homo sapien
taacattaaggtccctggcttgctg

SEQ ID NO: 2311742 - DNA, 25 bp, Homo sapien
accacgcccggcctcaggcaagctt

SEQ ID NO: 2311743 - DNA, 25 bp, Homo sapien
gacaagtaggtagcattgggccacc

SEQ ID NO: 2311744 - DNA, 25 bp, Homo sapien
aaagttgggcaagaagacatagtcc

SEQ ID NO: 2311745 - DNA, 25 bp, Homo sapien
tagccagagcacagatgcaagactg

SEQ ID NO: 2311746 - DNA, 25 bp, Homo sapien
tagctgggagaccatgaacaaagac

SEQ ID NO: 2311747 - DNA, 25 bp, Homo sapien
ctgtgtggaattagaaaaaaagaag

SEQ ID NO: 2311748 - DNA, 25 bp, Homo sapien
gacgatccctgaattgaacggttga

SEQ ID NO: 2311749 - DNA, 25 bp, Homo sapien
cattctgtaagctctgttgcaaggc

SEQ ID NO: 2311750 - DNA, 25 bp, Homo sapien
aatacatcagctagagacccactgg

SEQ ID NO: 2311751 - DNA, 25 bp, Homo sapien
ctccgtgggacagcgtagaagatgc

SEQ ID NO: 2311752 - DNA, 25 bp, Homo sapien
tttgggcttcttgggtagatccagc

SEQ ID NO: 2311753 - DNA, 25 bp, Homo sapien
atttgggcttcttgggtagatccag

SEQ ID NO: 2311754 - DNA, 25 bp, Homo sapien
atttcctggatactgggagccaaat

SEQ ID NO: 2311755 - DNA, 25 bp, Homo sapien
ttcctggatactgggagccaaatgg

SEQ ID NO: 2311756 - DNA, 25 bp, Homo sapien
tccagtgtagcaatatcacagcagc

SEQ ID NO: 2311757 - DNA, 25 bp, Homo sapien
cagagctaagcgtgcaagacaagtc

SEQ ID NO: 2311758 - DNA, 25 bp, Homo sapien
agagtaccaatatcctcggcctgca

SEQ ID NO: 2311759 - DNA, 25 bp, Homo sapien
gcagtgtatcgatagcagctcagag

SEQ ID NO: 2311760 - DNA, 25 bp, Homo sapien
tgttcaagcatgttcaatccaatag

SEQ ID NO: 2311761 - DNA, 25 bp, Homo sapien
tggtccagcaattcaaacttatagg

SEQ ID NO: 2311762 - DNA, 25 bp, Homo sapien
tgtaaaagatgttcatcacatactg

SEQ ID NO: 2311763 - DNA, 25 bp, Homo sapien
aataaaccagggcagagagtcacac

SEQ ID NO: 2311764 - DNA, 25 bp, Homo sapien
gacctgttggatcctttgtgcatgc

SEQ ID NO: 2311765 - DNA, 25 bp, Homo sapien
gctgtatccataaggctggacctgt

SEQ ID NO: 2311766 - DNA, 25 bp, Homo sapien
gcatgcctttaactatccccgaggg

SEQ ID NO: 2311767 - DNA, 25 bp, Homo sapien
tagttgtagtgacatcaggaggagc

SEQ ID NO: 2311768 - DNA, 25 bp, Homo sapien
aggtacccaggattagttattagtg

SEQ ID NO: 2311769 - DNA, 25 bp, Homo sapien
ttagttattagtgggccaactacaa

SEQ ID NO: 2311770 - DNA, 25 bp, Homo sapien
tacccaggattagttattagtgggc

SEQ ID NO: 2311771 - DNA, 25 bp, Homo sapien
caggattagttattagtgggccaac

SEQ ID NO: 2311772 - DNA, 25 bp, Homo sapien
aggtttttgttcaaagtatcatctg

SEQ ID NO: 2311773 - DNA, 25 bp, Homo sapien
ggaagtatccactaagttcaattaa

SEQ ID NO: 2311774 - DNA, 25 bp, Homo sapien
tctggaagtatccactaagttcaat

SEQ ID NO: 2311775 - DNA, 25 bp, Homo sapien
ctggaagtatccactaagttcaatt

SEQ ID NO: 2311776 - DNA, 25 bp, Homo sapien
cttttgggtcgtttcagagtgttca

SEQ ID NO: 2311777 - DNA, 25 bp, Homo sapien
cagagtcatccacaaaaaattcctt

SEQ ID NO: 2311778 - DNA, 25 bp, Homo sapien
gatttttgtagatactctgctactg

SEQ ID NO: 2311779 - DNA, 25 bp, Homo sapien
cttcagagtcatccacaaaaaattc

SEQ ID NO: 2311780 - DNA, 25 bp, Homo sapien
acatggatatattttagcacccgtc

SEQ ID NO: 2311781 - DNA, 25 bp, Homo sapien
cttctcagaagtgcctatattggct

SEQ ID NO: 2311782 - DNA, 25 bp, Homo sapien
catctaacacgctgccttgtagaaa

SEQ ID NO: 2311783 - DNA, 25 bp, Homo sapien
gcacccgtctaaattgtaaacaaca

SEQ ID NO: 2311784 - DNA, 25 bp, Homo sapien
cgtccctccggcttgggctggttgg

SEQ ID NO: 2311785 - DNA, 25 bp, Homo sapien
cccagcgctgcagggcagattcaag

SEQ ID NO: 2311786 - DNA, 25 bp, Homo sapien
gagcattttgcttgagtggtacccc

SEQ ID NO: 2311787 - DNA, 25 bp, Homo sapien
gagcaggaggccagttacagatgac

SEQ ID NO: 2311788 - DNA, 25 bp, Homo sapien
aaggatctggaatcttgcagactca

SEQ ID NO: 2311789 - DNA, 25 bp, Homo sapien
aggatctggaatcttgcagactcac

SEQ ID NO: 2311790 - DNA, 25 bp, Homo sapien
cataggtggtatcagacacttgagg

SEQ ID NO: 2311791 - DNA, 25 bp, Homo sapien
catctaggtctatggacactgtgct

SEQ ID NO: 2311792 - DNA, 25 bp, Homo sapien
taaactatgtcaacctgcgtaattc

SEQ ID NO: 2311793 - DNA, 25 bp, Homo sapien
gctttacttagagcttaggatcctt

SEQ ID NO: 2311794 - DNA, 25 bp, Homo sapien
ctgtctccaggttttaacacaggtt

SEQ ID NO: 2311795 - DNA, 25 bp, Homo sapien
tgtctccaggttttaacacaggttc

SEQ ID NO: 2311796 - DNA, 25 bp, Homo sapien
cctgtctccaggttttaacacaggt

SEQ ID NO: 2311797 - DNA, 25 bp, Homo sapien
tcattgttggggtaaaccagggcta

SEQ ID NO: 2311798 - DNA, 25 bp, Homo sapien
caggaggcatccatagaaagccacc

SEQ ID NO: 2311799 - DNA, 25 bp, Homo sapien
taaacatgactggatcattgttggg

SEQ ID NO: 2311800 - DNA, 25 bp, Homo sapien
ccataaacatgactggatcattgtt

SEQ ID NO: 2311801 - DNA, 25 bp, Homo sapien
ggatcacaggcttgtgccatcacac

SEQ ID NO: 2311802 - DNA, 25 bp, Homo sapien
acctggctaatttctgtatttttag

SEQ ID NO: 2311803 - DNA, 25 bp, Homo sapien
atcacaggcttgtgccatcacacct

SEQ ID NO: 2311804 - DNA, 25 bp, Homo sapien
tacatcccaacaactagagattagg

SEQ ID NO: 2311805 - DNA, 25 bp, Homo sapien
ccaaaattcgagagaaaagcaagtc

SEQ ID NO: 2311806 - DNA, 25 bp, Homo sapien
tgatcaaatgaaggatactacatcc

SEQ ID NO: 2311807 - DNA, 25 bp, Homo sapien
tgtccaagctgacaatgaaagtcaa

SEQ ID NO: 2311808 - DNA, 25 bp, Homo sapien
ggtaagagctaaggcaataccacag

SEQ ID NO: 2311809 - DNA, 25 bp, Homo sapien
aacttcactggtaagagctaaggca

SEQ ID NO: 2311810 - DNA, 25 bp, Homo sapien
tggcagtccttttagacaaacttca

SEQ ID NO: 2311811 - DNA, 25 bp, Homo sapien
ttagacaaacttcactggtaagagc

SEQ ID NO: 2311812 - DNA, 25 bp, Homo sapien
aatcgttccacatgctaattccagg

SEQ ID NO: 2311813 - DNA, 25 bp, Homo sapien
caacaactgggaggtccgtttggca

SEQ ID NO: 2311814 - DNA, 25 bp, Homo sapien
aattgaattgcctaagccatcaggg

SEQ ID NO: 2311815 - DNA, 25 bp, Homo sapien
tacagagtggtagctttttccaacc

SEQ ID NO: 2311816 - DNA, 25 bp, Homo sapien
tgtggctgccagtctttcggtggct

SEQ ID NO: 2311817 - DNA, 25 bp, Homo sapien
gtatgccggttctgtcccagcaggt

SEQ ID NO: 2311818 - DNA, 25 bp, Homo sapien
ggtacttggaatctgttacaaccca

SEQ ID NO: 2311819 - DNA, 25 bp, Homo sapien
tctgttacaacccatttgagccggg

SEQ ID NO: 2311820 - DNA, 25 bp, Homo sapien
gcaggaggatcttctaacattaacg

SEQ ID NO: 2311821 - DNA, 25 bp, Homo sapien
ggatagaagatccactacaaggcat

SEQ ID NO: 2311822 - DNA, 25 bp, Homo sapien
gatggaaatctcacaaagcaggagg

SEQ ID NO: 2311823 - DNA, 25 bp, Homo sapien
tatattttgaaaggtggcaagcaaa

SEQ ID NO: 2311824 - DNA, 25 bp, Homo sapien
gaaacctgagtctgtcttgccttct

SEQ ID NO: 2311825 - DNA, 25 bp, Homo sapien
tctgctctctaccataagcttgggc

SEQ ID NO: 2311826 - DNA, 25 bp, Homo sapien
gcatcagtaactaagccctgcctgc

SEQ ID NO: 2311827 - DNA, 25 bp, Homo sapien
gacagagtcaactaatcccctggaa

SEQ ID NO: 2311828 - DNA, 25 bp, Homo sapien
aactgagataattaactaccttagg

SEQ ID NO: 2311829 - DNA, 25 bp, Homo sapien
agtcaactgagataattaactacct

SEQ ID NO: 2311830 - DNA, 25 bp, Homo sapien
aacagtcaactgagataattaacta

SEQ ID NO: 2311831 - DNA, 25 bp, Homo sapien
caaggtcaataatgagaaggggaga

SEQ ID NO: 2311832 - DNA, 25 bp, Homo sapien
tgcaggcctgcgacagagcttggca

SEQ ID NO: 2311833 - DNA, 25 bp, Homo sapien
ttcagaataattgcaggcctgcgac

SEQ ID NO: 2311834 - DNA, 25 bp, Homo sapien
gagcttggcagtgagacaacattgc

SEQ ID NO: 2311835 - DNA, 25 bp, Homo sapien
gacaacattgcaagccgggatactg

SEQ ID NO: 2311836 - DNA, 25 bp, Homo sapien
cgcaaacatgccgtgccacagccca

SEQ ID NO: 2311837 - DNA, 25 bp, Homo sapien
caaacatgccgtgccacagcccagc

SEQ ID NO: 2311838 - DNA, 25 bp, Homo sapien
gcaaacatgccgtgccacagcccag

SEQ ID NO: 2311839 - DNA, 25 bp, Homo sapien
tacgctgattgtgtgcatcttattc

SEQ ID NO: 2311840 - DNA, 25 bp, Homo sapien
gttttcataacagagtagggtacgc

SEQ ID NO: 2311841 - DNA, 25 bp, Homo sapien
gagcatgtactctttggacccaaga

SEQ ID NO: 2311842 - DNA, 25 bp, Homo sapien
ctttgtgagcatgtactctttggac

SEQ ID NO: 2311843 - DNA, 25 bp, Homo sapien
cattcggagggaactcaagctcacg

SEQ ID NO: 2311844 - DNA, 25 bp, Homo sapien
caagctcacgtctctttggtcccga

SEQ ID NO: 2311845 - DNA, 25 bp, Homo sapien
atcatagcccagtgcaagtcccgac

SEQ ID NO: 2311846 - DNA, 25 bp, Homo sapien
gggttagctccatcagtcacaatta

SEQ ID NO: 2311847 - DNA, 25 bp, Homo sapien
aaggcatcacaggatgacacggacc

SEQ ID NO: 2311848 - DNA, 25 bp, Homo sapien
ggcttcagcagacgtggcgcacgga

SEQ ID NO: 2311849 - DNA, 25 bp, Homo sapien
gacagatggcctcaggcttcagtcc

SEQ ID NO: 2311850 - DNA, 25 bp, Homo sapien
gactttggaacagactcaggaaggc

SEQ ID NO: 2311851 - DNA, 25 bp, Homo sapien
atcaagagcatctgacatcctgaac

SEQ ID NO: 2311852 - DNA, 25 bp, Homo sapien
caagagcatctgacatcctgaacag

SEQ ID NO: 2311853 - DNA, 25 bp, Homo sapien
tcaagagcatctgacatcctgaaca

SEQ ID NO: 2311854 - DNA, 25 bp, Homo sapien
aagagcatctgacatcctgaacagt

SEQ ID NO: 2311855 - DNA, 25 bp, Homo sapien
taccccatagctcaatccattcatt

SEQ ID NO: 2311856 - DNA, 25 bp, Homo sapien
cattcattgagagaatggctcttcc

SEQ ID NO: 2311857 - DNA, 25 bp, Homo sapien
tcctggaccgtcagtgctgaatttt

SEQ ID NO: 2311858 - DNA, 25 bp, Homo sapien
tatcttcagtattgacccgtattac

SEQ ID NO: 2311859 - DNA, 25 bp, Homo sapien
gaggtgttacccttaggcaggtcaa

SEQ ID NO: 2311860 - DNA, 25 bp, Homo sapien
gaaagtcctgcctttactgagtggc

SEQ ID NO: 2311861 - DNA, 25 bp, Homo sapien
tattaacgatgaatgcaaagcccaa

SEQ ID NO: 2311862 - DNA, 25 bp, Homo sapien
gtcatacaatactgctggaaggtca

SEQ ID NO: 2311863 - DNA, 25 bp, Homo sapien
tattttttgtcacaccagcaagccc

SEQ ID NO: 2311864 - DNA, 25 bp, Homo sapien
tccagttctggagctaacacagatt

SEQ ID NO: 2311865 - DNA, 25 bp, Homo sapien
aaagtacatcatgcctccagttctg

SEQ ID NO: 2311866 - DNA, 25 bp, Homo sapien
gaggtccatctggtttcacaatgca

SEQ ID NO: 2311867 - DNA, 25 bp, Homo sapien
gctacattgccttgctacattgcta

SEQ ID NO: 2311868 - DNA, 25 bp, Homo sapien
ctacattgccttgctacattgctac

SEQ ID NO: 2311869 - DNA, 25 bp, Homo sapien
tgctacattgccttgctacattgct

SEQ ID NO: 2311870 - DNA, 25 bp, Homo sapien
aaaccccagcaatcctgatcggatg

SEQ ID NO: 2311871 - DNA, 25 bp, Homo sapien
tcggatgaatggcacatccccaaca

SEQ ID NO: 2311872 - DNA, 25 bp, Homo sapien
cagcaatcctgatcggatgaatggc

SEQ ID NO: 2311873 - DNA, 25 bp, Homo sapien
ccccagcaatcctgatcggatgaat

SEQ ID NO: 2311874 - DNA, 25 bp, Homo sapien
tcatcagcattatgtcttcgaccac

SEQ ID NO: 2311875 - DNA, 25 bp, Homo sapien
ttcgaccactaaccatcagtaagcc

SEQ ID NO: 2311876 - DNA, 25 bp, Homo sapien
cagtctttattgattctacagccaa

SEQ ID NO: 2311877 - DNA, 25 bp, Homo sapien
gccaatccagtagcaacaatgtcat

SEQ ID NO: 2311878 - DNA, 25 bp, Homo sapien
cgagccacgcgaagatctggaggaa

SEQ ID NO: 2311879 - DNA, 25 bp, Homo sapien
cctgaatgaggtgaggacgcgagcc

SEQ ID NO: 2311880 - DNA, 25 bp, Homo sapien
tagggacgagcttggcaggtttgag

SEQ ID NO: 2311881 - DNA, 25 bp, Homo sapien
ggttctgaggtagggacgagcttgg

SEQ ID NO: 2311882 - DNA, 25 bp, Homo sapien
ctcagaagcatcaggtctttgttcc

SEQ ID NO: 2311883 - DNA, 25 bp, Homo sapien
caatgcgctcatcataaaatacaga

SEQ ID NO: 2311884 - DNA, 25 bp, Homo sapien
aaccaccacaatgcgctcatcataa

SEQ ID NO: 2311885 - DNA, 25 bp, Homo sapien
tcaggtctttgttccgcaaccacca

SEQ ID NO: 2311886 - DNA, 25 bp, Homo sapien
ctgacacagaccccaaagtgtgctc

SEQ ID NO: 2311887 - DNA, 25 bp, Homo sapien
tgacacagaccccaaagtgtgctca

SEQ ID NO: 2311888 - DNA, 25 bp, Homo sapien
gcaccagagcaagacaataaacccc

SEQ ID NO: 2311889 - DNA, 25 bp, Homo sapien
gatccctccagaaagagttgtttcg

SEQ ID NO: 2311890 - DNA, 25 bp, Homo sapien
ggcaagtttgtcacacatgtatggg

SEQ ID NO: 2311891 - DNA, 25 bp, Homo sapien
gatatatggattcctcctagtggag

SEQ ID NO: 2311892 - DNA, 25 bp, Homo sapien
gccaagcagatccacattccatgag

SEQ ID NO: 2311893 - DNA, 25 bp, Homo sapien
tgatgaggagacacatggaacagct

SEQ ID NO: 2311894 - DNA, 25 bp, Homo sapien
tcaaggatatgtttgcctccgggct

SEQ ID NO: 2311895 - DNA, 25 bp, Homo sapien
tcaagtccagtggatcccagccaag

SEQ ID NO: 2311896 - DNA, 25 bp, Homo sapien
aaccagattcccaaccatcacggaa

SEQ ID NO: 2311897 - DNA, 25 bp, Homo sapien
gtgctatacgttttccagcaaccag

SEQ ID NO: 2311898 - DNA, 25 bp, Homo sapien
ccagcagcttgtgctatacgttttc

SEQ ID NO: 2311899 - DNA, 25 bp, Homo sapien
agattcccaaccatcacggaagcag

SEQ ID NO: 2311900 - DNA, 25 bp, Homo sapien
gcctgggctcgccactgtaggatct

SEQ ID NO: 2311901 - DNA, 25 bp, Homo sapien
tgtaggatctctgccagaaactggt

SEQ ID NO: 2311902 - DNA, 25 bp, Homo sapien
tacatggtcaggagtcgcctgggct

SEQ ID NO: 2311903 - DNA, 25 bp, Homo sapien
ttaacagcatgaagagtacatggtc

SEQ ID NO: 2311904 - DNA, 25 bp, Homo sapien
caggtggatagagcaacaccacatt

SEQ ID NO: 2311905 - DNA, 25 bp, Homo sapien
gctcgcttatgaagctgaaggcagc

SEQ ID NO: 2311906 - DNA, 25 bp, Homo sapien
gatgcaatcctctctgctcgcttat

SEQ ID NO: 2311907 - DNA, 25 bp, Homo sapien
gatgtcccttatcaccaagaacaga

SEQ ID NO: 2311908 - DNA, 25 bp, Homo sapien
cacaggtatacagcccgcatacagg

SEQ ID NO: 2311909 - DNA, 25 bp, Homo sapien
tagaaggcggcgattaactcaatgc

SEQ ID NO: 2311910 - DNA, 25 bp, Homo sapien
caatcattcggacagtgggcagcgt

SEQ ID NO: 2311911 - DNA, 25 bp, Homo sapien
agcatgtggaggtctgacggtcaca

SEQ ID NO: 2311912 - DNA, 25 bp, Homo sapien
tgctgcctctcgggacctcagtagc

SEQ ID NO: 2311913 - DNA, 25 bp, Homo sapien
ctggtgagaatacaggctgctttgc

SEQ ID NO: 2311914 - DNA, 25 bp, Homo sapien
tgtgtcaatgatggttggccaggtt

SEQ ID NO: 2311915 - DNA, 25 bp, Homo sapien
gcctcattagggtctgactggtgag

SEQ ID NO: 2311916 - DNA, 25 bp, Homo sapien
catctgctgagttcaaatgatcctc

SEQ ID NO: 2311917 - DNA, 25 bp, Homo sapien
catgcctagctaattaaataaaaat

SEQ ID NO: 2311918 - DNA, 25 bp, Homo sapien
ctccatctgctgagttcaaatgatc

SEQ ID NO: 2311919 - DNA, 25 bp, Homo sapien
acctccatctgctgagttcaaatga

SEQ ID NO: 2311920 - DNA, 25 bp, Homo sapien
gaggacaacactagacaacacaggc

SEQ ID NO: 2311921 - DNA, 25 bp, Homo sapien
gaagcagactgctgttcaaatgcca

SEQ ID NO: 2311922 - DNA, 25 bp, Homo sapien
acatatgtcattcttagaggtgggc

SEQ ID NO: 2311923 - DNA, 25 bp, Homo sapien
gatttgctaaagcttaggcctctca

SEQ ID NO: 2311924 - DNA, 25 bp, Homo sapien
catgccagttgtggagacactaaaa

SEQ ID NO: 2311925 - DNA, 25 bp, Homo sapien
catctcaggagtgggcggtttatac

SEQ ID NO: 2311926 - DNA, 25 bp, Homo sapien
cagctgaggtaaccttttcctgggt

SEQ ID NO: 2311927 - DNA, 25 bp, Homo sapien
tcaagatatgccaacatctcaggag

SEQ ID NO: 2311928 - DNA, 25 bp, Homo sapien
ggcctctgcatctatagtttctggg

SEQ ID NO: 2311929 - DNA, 25 bp, Homo sapien
tttctggggcagtggtcatctctat

SEQ ID NO: 2311930 - DNA, 25 bp, Homo sapien
ttggcctctgcatctatagtttctg

SEQ ID NO: 2311931 - DNA, 25 bp, Homo sapien
ggggcagtggtcatctctatttttt

SEQ ID NO: 2311932 - DNA, 25 bp, Homo sapien
ccagaggagccaatgcctttattta

SEQ ID NO: 2311933 - DNA, 25 bp, Homo sapien
tcagcttctatgctaggttcagacg

SEQ ID NO: 2311934 - DNA, 25 bp, Homo sapien
ttatttaaatagagcagcgacttag

SEQ ID NO: 2311935 - DNA, 25 bp, Homo sapien
gcgacttagatcttcactctgccta

SEQ ID NO: 2311936 - DNA, 25 bp, Homo sapien
gagaagagtacaactcacactggag

SEQ ID NO: 2311937 - DNA, 25 bp, Homo sapien
cgcgaagccaagtccacagtaaggg

SEQ ID NO: 2311938 - DNA, 25 bp, Homo sapien
cacactggagcttgatggctcgaca

SEQ ID NO: 2311939 - DNA, 25 bp, Homo sapien
cagagcgttcactgcagagtgggac

SEQ ID NO: 2311940 - DNA, 25 bp, Homo sapien
ggtgcagagctccatcactgaatag

SEQ ID NO: 2311941 - DNA, 25 bp, Homo sapien
tagcacttccacttggttcccaaga

SEQ ID NO: 2311942 - DNA, 25 bp, Homo sapien
ttgttctctaactccataggaggaa

SEQ ID NO: 2311943 - DNA, 25 bp, Homo sapien
actgaataggagcagaaagtgtccc

SEQ ID NO: 2311944 - DNA, 25 bp, Homo sapien
gacaccattatatgggagccaagtc

SEQ ID NO: 2311945 - DNA, 25 bp, Homo sapien
aaagaactgaacaggtaaggccact

SEQ ID NO: 2311946 - DNA, 25 bp, Homo sapien
caagtcagtaggatcataaaagaac

SEQ ID NO: 2311947 - DNA, 25 bp, Homo sapien
taaaagaactgaacaggtaaggcca

SEQ ID NO: 2311948 - DNA, 25 bp, Homo sapien
ggacagcccgatgtctttgaagagc

SEQ ID NO: 2311949 - DNA, 25 bp, Homo sapien
tagagaaggactgctggagtgcaac

SEQ ID NO: 2311950 - DNA, 25 bp, Homo sapien
tccggacgcaggagaggttgatccc

SEQ ID NO: 2311951 - DNA, 25 bp, Homo sapien
gatccaaaagtggtgctgacagccc

SEQ ID NO: 2311952 - DNA, 25 bp, Homo sapien
tcagtgattgtgcaagctgcctggg

SEQ ID NO: 2311953 - DNA, 25 bp, Homo sapien
gaactccgagttggcagctcagtga

SEQ ID NO: 2311954 - DNA, 25 bp, Homo sapien
tgaccacacgacgatgactcaagta

SEQ ID NO: 2311955 - DNA, 25 bp, Homo sapien
gactcaagtaaacaccaacactgcg

SEQ ID NO: 2311956 - DNA, 25 bp, Homo sapien
gatttcagatccacatacacagtag

SEQ ID NO: 2311957 - DNA, 25 bp, Homo sapien
tcagatccacatacacagtagtcgg

SEQ ID NO: 2311958 - DNA, 25 bp, Homo sapien
cacagtagtcggatcaggccctgag

SEQ ID NO: 2311959 - DNA, 25 bp, Homo sapien
tccacatacacagtagtcggatcag

SEQ ID NO: 2311960 - DNA, 25 bp, Homo sapien
agcaaactctgaggggcgccacgtt

SEQ ID NO: 2311961 - DNA, 25 bp, Homo sapien
aagcaaactctgaggggcgccacgt

SEQ ID NO: 2311962 - DNA, 25 bp, Homo sapien
tctgaggggcgccacgttccacgag

SEQ ID NO: 2311963 - DNA, 25 bp, Homo sapien
gggcgccacgttccacgagacgaac

SEQ ID NO: 2311964 - DNA, 25 bp, Homo sapien
ctttctcattcactggaatgatggc

SEQ ID NO: 2311965 - DNA, 25 bp, Homo sapien
catgttctttctcattcactggaat

SEQ ID NO: 2311966 - DNA, 25 bp, Homo sapien
ttctcattcactggaatgatggcag

SEQ ID NO: 2311967 - DNA, 25 bp, Homo sapien
ttcactggaatgatggcagtgaaac

SEQ ID NO: 2311968 - DNA, 25 bp, Homo sapien
tttggtctcaggattaacaataacc

SEQ ID NO: 2311969 - DNA, 25 bp, Homo sapien
cggccctttggtctcaggattaaca

SEQ ID NO: 2311970 - DNA, 25 bp, Homo sapien
tccaaccggccctttggtctcagga

SEQ ID NO: 2311971 - DNA, 25 bp, Homo sapien
tggtctcaggattaacaataaccac

SEQ ID NO: 2311972 - DNA, 25 bp, Homo sapien
aaatgatcagcttgaagagtctcgc

SEQ ID NO: 2311973 - DNA, 25 bp, Homo sapien
tatcctgtccgagcccagagtgtct

SEQ ID NO: 2311974 - DNA, 25 bp, Homo sapien
tctccaaagctgaggcgagtgttga

SEQ ID NO: 2311975 - DNA, 25 bp, Homo sapien
tgtgagctcggtccggcggacaaaa

SEQ ID NO: 2311976 - DNA, 25 bp, Homo sapien
tatcgtaatcctctcagctccagtg

SEQ ID NO: 2311977 - DNA, 25 bp, Homo sapien
accacatacaatgcatcatgacgct

SEQ ID NO: 2311978 - DNA, 25 bp, Homo sapien
aatgcttctgtggatccgggacacc

SEQ ID NO: 2311979 - DNA, 25 bp, Homo sapien
ccgggacaccgaggtctcaatatca

SEQ ID NO: 2311980 - DNA, 25 bp, Homo sapien
cactgtggccggccaaaccacagtt

SEQ ID NO: 2311981 - DNA, 25 bp, Homo sapien
gattttaagtcaatatgtggttgga

SEQ ID NO: 2311982 - DNA, 25 bp, Homo sapien
ggttggacgatcctttatcagggaa

SEQ ID NO: 2311983 - DNA, 25 bp, Homo sapien
aagtcaatatgtggttggacgatcc

SEQ ID NO: 2311984 - DNA, 25 bp, Homo sapien
aagagtagaacgaatagtttgattg

SEQ ID NO: 2311985 - DNA, 25 bp, Homo sapien
gactattaacaatcaattaaattaa

SEQ ID NO: 2311986 - DNA, 25 bp, Homo sapien
gagtagaacgaatagtttgattgat

SEQ ID NO: 2311987 - DNA, 25 bp, Homo sapien
tagaacgaatagtttgattgatttg

SEQ ID NO: 2311988 - DNA, 25 bp, Homo sapien
gctaggaagctatcacggaggtgca

SEQ ID NO: 2311989 - DNA, 25 bp, Homo sapien
cctctggagttgatcgggatgacac

SEQ ID NO: 2311990 - DNA, 25 bp, Homo sapien
caagttggtccatgtgaacacggca

SEQ ID NO: 2311991 - DNA, 25 bp, Homo sapien
ctaatgggaccagatctagggcttc

SEQ ID NO: 2311992 - DNA, 25 bp, Homo sapien
tcctgtgtgccccaatgtaagtgct

SEQ ID NO: 2311993 - DNA, 25 bp, Homo sapien
gacagactcatgtgaccaagacagg

SEQ ID NO: 2311994 - DNA, 25 bp, Homo sapien
cattaagcaaggattgcccagggac

SEQ ID NO: 2311995 - DNA, 25 bp, Homo sapien
caatggtccctaaacagcctgaggc

SEQ ID NO: 2311996 - DNA, 25 bp, Homo sapien
taattcaaaactagtacttatcatc

SEQ ID NO: 2311997 - DNA, 25 bp, Homo sapien
aggctaattcaaaactagtacttat

SEQ ID NO: 2311998 - DNA, 25 bp, Homo sapien
cccatggctccctatctcatttaat

SEQ ID NO: 2311999 - DNA, 25 bp, Homo sapien
aggcaccgatcccacttcctgtcaa

SEQ ID NO: 2312000 - DNA, 25 bp, Homo sapien
gaaccgaaggctaatggccacactc

SEQ ID NO: 2312001 - DNA, 25 bp, Homo sapien
ttctaatcccatgccagaaccgaag

SEQ ID NO: 2312002 - DNA, 25 bp, Homo sapien
gaaatcatgctgacagttggagtaa

SEQ ID NO: 2312003 - DNA, 25 bp, Homo sapien
gctgacagttggagtaagccatttc

SEQ ID NO: 2312004 - DNA, 25 bp, Homo sapien
tcccatagggttttgtagactgaat

SEQ ID NO: 2312005 - DNA, 25 bp, Homo sapien
ctgaattactttgatacacgtaaag

SEQ ID NO: 2312006 - DNA, 25 bp, Homo sapien
taataacactgcctatcccataggg

SEQ ID NO: 2312007 - DNA, 25 bp, Homo sapien
tacacgtaaagttagagctgtgcct

SEQ ID NO: 2312008 - DNA, 25 bp, Homo sapien
tactggcggcatgatctacacaagc

SEQ ID NO: 2312009 - DNA, 25 bp, Homo sapien
cctaagctaccgtttcctcggcagt

SEQ ID NO: 2312010 - DNA, 25 bp, Homo sapien
cctcccaggtagatccgaattcact

SEQ ID NO: 2312011 - DNA, 25 bp, Homo sapien
tagatccgaattcactacccacttc

SEQ ID NO: 2312012 - DNA, 25 bp, Homo sapien
tcggttgcccgctagactgcaagct

SEQ ID NO: 2312013 - DNA, 25 bp, Homo sapien
gacgcccttgtgtcattcctagcca

SEQ ID NO: 2312014 - DNA, 25 bp, Homo sapien
ctgcgactgcaaagggcggcttctg

SEQ ID NO: 2312015 - DNA, 25 bp, Homo sapien
tgcgcaatgcccgtgcgtcggttgc

SEQ ID NO: 2312016 - DNA, 25 bp, Homo sapien
ggaatggacagatagctcacagacc

SEQ ID NO: 2312017 - DNA, 25 bp, Homo sapien
tatttaaagtcagaagggactgcca

SEQ ID NO: 2312018 - DNA, 25 bp, Homo sapien
caggtgaggccagtttgacaaagat

SEQ ID NO: 2312019 - DNA, 25 bp, Homo sapien
aatacattcgactttagggcaacag

SEQ ID NO: 2312020 - DNA, 25 bp, Homo sapien
tggtactcttgtgggaatcttccat

SEQ ID NO: 2312021 - DNA, 25 bp, Homo sapien
tctgacgtggtactcttgtgggaat

SEQ ID NO: 2312022 - DNA, 25 bp, Homo sapien
tgaggtgctgtctctgacgtggtac

SEQ ID NO: 2312023 - DNA, 25 bp, Homo sapien
ttgaggtgctgtctctgacgtggta

SEQ ID NO: 2312024 - DNA, 25 bp, Homo sapien
agtgggcctgtaccacctaccaagg

SEQ ID NO: 2312025 - DNA, 25 bp, Homo sapien
gattctatacgctcacgcttgccta

SEQ ID NO: 2312026 - DNA, 25 bp, Homo sapien
taattttcctgctagtacgcagccc

SEQ ID NO: 2312027 - DNA, 25 bp, Homo sapien
gtctgcagctcccaaggattctata

SEQ ID NO: 2312028 - DNA, 25 bp, Homo sapien
cacattttacacagctgaccatcac

SEQ ID NO: 2312029 - DNA, 25 bp, Homo sapien
gtcacatgactttgatcacactaca

SEQ ID NO: 2312030 - DNA, 25 bp, Homo sapien
gctaaagaagcccagatccattgac

SEQ ID NO: 2312031 - DNA, 25 bp, Homo sapien
cagtaatcccatctagtcacatgac

SEQ ID NO: 2312032 - DNA, 25 bp, Homo sapien
tcagatgcggtttcatggaaatacc

SEQ ID NO: 2312033 - DNA, 25 bp, Homo sapien
cttcgggcagcatcttgaaaaaata

SEQ ID NO: 2312034 - DNA, 25 bp, Homo sapien
tcaggtcctacctcttccaaaaagc

SEQ ID NO: 2312035 - DNA, 25 bp, Homo sapien
tgagtgaaacaccaacttcgggcag

SEQ ID NO: 2312036 - DNA, 25 bp, Homo sapien
tctgtgaggagcctatgctgtcgga

SEQ ID NO: 2312037 - DNA, 25 bp, Homo sapien
ctaggatcccgtgggctttctgtga

SEQ ID NO: 2312038 - DNA, 25 bp, Homo sapien
aagatgggcgccgtgctaggatccc

SEQ ID NO: 2312039 - DNA, 25 bp, Homo sapien
ctatgctgtcggatgagtcctggga

SEQ ID NO: 2312040 - DNA, 25 bp, Homo sapien
tcgcatggtcacaacacggttcaca

SEQ ID NO: 2312041 - DNA, 25 bp, Homo sapien
acagacaggtaccaatccacggcct

SEQ ID NO: 2312042 - DNA, 25 bp, Homo sapien
taattattgtcgcacaggtcgctga

SEQ ID NO: 2312043 - DNA, 25 bp, Homo sapien
aattttgggtgccaagacccaggag

SEQ ID NO: 2312044 - DNA, 25 bp, Homo sapien
catgagactgtggaatgctgcaccc

SEQ ID NO: 2312045 - DNA, 25 bp, Homo sapien
cagaacctggtgttgatgggaacca

SEQ ID NO: 2312046 - DNA, 25 bp, Homo sapien
gataagttgtgctgcgtatgggcca

SEQ ID NO: 2312047 - DNA, 25 bp, Homo sapien
ggtcctacagccagtctatcatgag

SEQ ID NO: 2312048 - DNA, 25 bp, Homo sapien
actccagaattttctccgtctcctt

SEQ ID NO: 2312049 - DNA, 25 bp, Homo sapien
cgctgctagtctgatagatgggagt

SEQ ID NO: 2312050 - DNA, 25 bp, Homo sapien
ctgctagtctgatagatgggagttg

SEQ ID NO: 2312051 - DNA, 25 bp, Homo sapien
gctagtctgatagatgggagttgga

SEQ ID NO: 2312052 - DNA, 25 bp, Homo sapien
actgtaaggctccatttggggcaat

SEQ ID NO: 2312053 - DNA, 25 bp, Homo sapien
tggacttgccaactgtaaggctcca

SEQ ID NO: 2312054 - DNA, 25 bp, Homo sapien
acgaccacctgattgctgggcacaa

SEQ ID NO: 2312055 - DNA, 25 bp, Homo sapien
tgtacgaccacctgattgctgggca

SEQ ID NO: 2312056 - DNA, 25 bp, Homo sapien
tttgtacgaccacctgattgctggg

SEQ ID NO: 2312057 - DNA, 25 bp, Homo sapien
tacgaccacctgattgctgggcaca

SEQ ID NO: 2312058 - DNA, 25 bp, Homo sapien
catctgtcttagttgtctgagaggt

SEQ ID NO: 2312059 - DNA, 25 bp, Homo sapien
tagttcggatctgatatgtttgcat

SEQ ID NO: 2312060 - DNA, 25 bp, Homo sapien
tctcttttcaattgggggtcatctg

SEQ ID NO: 2312061 - DNA, 25 bp, Homo sapien
ctgaaggtgtagttcggatctgata

SEQ ID NO: 2312062 - DNA, 25 bp, Homo sapien
tgacaaaaagcgaacctcactgctt

SEQ ID NO: 2312063 - DNA, 25 bp, Homo sapien
taaaatggttgtcagtctagcggct

SEQ ID NO: 2312064 - DNA, 25 bp, Homo sapien
ccctcattatgcacaaagtttggaa

SEQ ID NO: 2312065 - DNA, 25 bp, Homo sapien
catgagagtgcctgttatgaacatt

SEQ ID NO: 2312066 - DNA, 25 bp, Homo sapien
gcaactcggttttccaggcatttca

SEQ ID NO: 2312067 - DNA, 25 bp, Homo sapien
cttctttctgcgacattctcgagca

SEQ ID NO: 2312068 - DNA, 25 bp, Homo sapien
tctgcgacattctcgagcagcttct

SEQ ID NO: 2312069 - DNA, 25 bp, Homo sapien
ttgattttccaggactgcaactcgg

SEQ ID NO: 2312070 - DNA, 25 bp, Homo sapien
ttattggaataaagatccttcaaag

SEQ ID NO: 2312071 - DNA, 25 bp, Homo sapien
tattggaataaagatccttcaaagt

SEQ ID NO: 2312072 - DNA, 25 bp, Homo sapien
ttttattggaataaagatccttcaa

SEQ ID NO: 2312073 - DNA, 25 bp, Homo sapien
attggaataaagatccttcaaagtt

SEQ ID NO: 2312074 - DNA, 25 bp, Homo sapien
caaatgcaaacctgtagggtaaatg

SEQ ID NO: 2312075 - DNA, 25 bp, Homo sapien
tatttatccttgatttggaaaagcc

SEQ ID NO: 2312076 - DNA, 25 bp, Homo sapien
tgtgcccgtagcttccttgaggtca

SEQ ID NO: 2312077 - DNA, 25 bp, Homo sapien
tcctctgtcactagatatcgtgcgt

SEQ ID NO: 2312078 - DNA, 25 bp, Homo sapien
tcaaaaataattaacctagtctcaa

SEQ ID NO: 2312079 - DNA, 25 bp, Homo sapien
taaaaagacttgacactagaacaag

SEQ ID NO: 2312080 - DNA, 25 bp, Homo sapien
taaaatcaccatactccattcatgt

SEQ ID NO: 2312081 - DNA, 25 bp, Homo sapien
tcatgtaccttagatgccttttagg

SEQ ID NO: 2312082 - DNA, 25 bp, Homo sapien
gagcacacaatagttttgcagtaca

SEQ ID NO: 2312083 - DNA, 25 bp, Homo sapien
taaaggtaccactcactacattaca

SEQ ID NO: 2312084 - DNA, 25 bp, Homo sapien
gcacagcagaataagtaatggatat

SEQ ID NO: 2312085 - DNA, 25 bp, Homo sapien
ttggaatatagatgttaaacgctgg

SEQ ID NO: 2312086 - DNA, 25 bp, Homo sapien
gaagccagcattacattaataccaa

SEQ ID NO: 2312087 - DNA, 25 bp, Homo sapien
gaccaagtagtggttattctgagaa

SEQ ID NO: 2312088 - DNA, 25 bp, Homo sapien
tctgagaatacaagactggtggttc

SEQ ID NO: 2312089 - DNA, 25 bp, Homo sapien
tagcaactcattaaatgaagccagc

SEQ ID NO: 2312090 - DNA, 25 bp, Homo sapien
ctagcttctttataactccacggtt

SEQ ID NO: 2312091 - DNA, 25 bp, Homo sapien
gaaggtgtcgtacagctcacttgag

SEQ ID NO: 2312092 - DNA, 25 bp, Homo sapien
actccacggttcactggagttaaag

SEQ ID NO: 2312093 - DNA, 25 bp, Homo sapien
gagttaaagcaatgaaggtgtcgta

SEQ ID NO: 2312094 - DNA, 25 bp, Homo sapien
gctggtgagcaagatggcggcaggt

SEQ ID NO: 2312095 - DNA, 25 bp, Homo sapien
tttggaggctggtgagcaagatggc

SEQ ID NO: 2312096 - DNA, 25 bp, Homo sapien
gaggctggtgagcaagatggcggca

SEQ ID NO: 2312097 - DNA, 25 bp, Homo sapien
ttggaggctggtgagcaagatggcg

SEQ ID NO: 2312098 - DNA, 25 bp, Homo sapien
aaacaacagcgccacgctcaggagc

SEQ ID NO: 2312099 - DNA, 25 bp, Homo sapien
tgctgggaactagccgccggttccg

SEQ ID NO: 2312100 - DNA, 25 bp, Homo sapien
tagtggtctgagtataagtgagagc

SEQ ID NO: 2312101 - DNA, 25 bp, Homo sapien
aggggccgagcctgtgccttccaga

SEQ ID NO: 2312102 - DNA, 25 bp, Homo sapien
catccttaagcggtgctgttccaca

SEQ ID NO: 2312103 - DNA, 25 bp, Homo sapien
tatttaatctgcaggctcaccaccc

SEQ ID NO: 2312104 - DNA, 25 bp, Homo sapien
tataatccgagacccttgcaacaca

SEQ ID NO: 2312105 - DNA, 25 bp, Homo sapien
catgcgccagcttgtgcttcggtgc

SEQ ID NO: 2312106 - DNA, 25 bp, Homo sapien
agcgtctttagtgcagtgggcagct

SEQ ID NO: 2312107 - DNA, 25 bp, Homo sapien
tagcgtctttagtgcagtgggcagc

SEQ ID NO: 2312108 - DNA, 25 bp, Homo sapien
ctagcgtctttagtgcagtgggcag

SEQ ID NO: 2312109 - DNA, 25 bp, Homo sapien
tgaaagaaagtaaacattcttatta

SEQ ID NO: 2312110 - DNA, 25 bp, Homo sapien
ctgaaagaaagtaaacattcttatt

SEQ ID NO: 2312111 - DNA, 25 bp, Homo sapien
aatttttatcttcttggtatgagga

SEQ ID NO: 2312112 - DNA, 25 bp, Homo sapien
tgaggatagcgtccatgtatattat

SEQ ID NO: 2312113 - DNA, 25 bp, Homo sapien
tatattattagttccaatcacagct

SEQ ID NO: 2312114 - DNA, 25 bp, Homo sapien
cacagctgtccacattaaaggatcg

SEQ ID NO: 2312115 - DNA, 25 bp, Homo sapien
tttgtgtttccgtccaggatttgga

SEQ ID NO: 2312116 - DNA, 25 bp, Homo sapien
aacatcaaaaggtaggcaaataggc

SEQ ID NO: 2312117 - DNA, 25 bp, Homo sapien
tgaatatagtcattatacctcactg

SEQ ID NO: 2312118 - DNA, 25 bp, Homo sapien
acactttgtgtttccgtccaggatt

SEQ ID NO: 2312119 - DNA, 25 bp, Homo sapien
aatcttatagaccaccatcgtgtgt

SEQ ID NO: 2312120 - DNA, 25 bp, Homo sapien
ttgaccttcctctgcccataatcag

SEQ ID NO: 2312121 - DNA, 25 bp, Homo sapien
tgaccttcctctgcccataatcagg

SEQ ID NO: 2312122 - DNA, 25 bp, Homo sapien
tatagaccaccatcgtgtgtgtggt

SEQ ID NO: 2312123 - DNA, 25 bp, Homo sapien
cataccattagtgaagacagatagt

SEQ ID NO: 2312124 - DNA, 25 bp, Homo sapien
tattttaaatgacatcgcattcttg

SEQ ID NO: 2312125 - DNA, 25 bp, Homo sapien
tatggctaggacttcttattgctat

SEQ ID NO: 2312126 - DNA, 25 bp, Homo sapien
gacagatagtttggctgcttttcct

SEQ ID NO: 2312127 - DNA, 25 bp, Homo sapien
cgagaaatataatgcacttctgcat

SEQ ID NO: 2312128 - DNA, 25 bp, Homo sapien
cctgcaagtatcaaaagctccatct

SEQ ID NO: 2312129 - DNA, 25 bp, Homo sapien
agaattacacatctctcgagaaata

SEQ ID NO: 2312130 - DNA, 25 bp, Homo sapien
cctgcacaaaatgaagtgttaggaa

SEQ ID NO: 2312131 - DNA, 25 bp, Homo sapien
tgtttggcctaggaatgcaattcac

SEQ ID NO: 2312132 - DNA, 25 bp, Homo sapien
taggaatgcacccaaatgctgttac

SEQ ID NO: 2312133 - DNA, 25 bp, Homo sapien
cactgcgcacccacaaggatggtta

SEQ ID NO: 2312134 - DNA, 25 bp, Homo sapien
ctcttgctgaatactgcgtgtggaa

SEQ ID NO: 2312135 - DNA, 25 bp, Homo sapien
ccacagccatgtccgtaactggtaa

SEQ ID NO: 2312136 - DNA, 25 bp, Homo sapien
aggatggcccaatatagacaccagg

SEQ ID NO: 2312137 - DNA, 25 bp, Homo sapien
gctatgaggatctggccacgtaaaa

SEQ ID NO: 2312138 - DNA, 25 bp, Homo sapien
ggtaagtagcacattaatggtcccc

SEQ ID NO: 2312139 - DNA, 25 bp, Homo sapien
gggacacaatgcaaaataaagatat

SEQ ID NO: 2312140 - DNA, 25 bp, Homo sapien
tatttcaaggagacatgtgattcag

SEQ ID NO: 2312141 - DNA, 25 bp, Homo sapien
tatctgtcacaatacttatagccca

SEQ ID NO: 2312142 - DNA, 25 bp, Homo sapien
tgtacaaactctatgagtattccag

SEQ ID NO: 2312143 - DNA, 25 bp, Homo sapien
ggcattcacatcaacgcagacctta

SEQ ID NO: 2312144 - DNA, 25 bp, Homo sapien
gaagtgaaaggacatgcatgcccgg

SEQ ID NO: 2312145 - DNA, 25 bp, Homo sapien
tgcccggccacagtcagcaagaatt

SEQ ID NO: 2312146 - DNA, 25 bp, Homo sapien
tcttttacattctgggcagaggctc

SEQ ID NO: 2312147 - DNA, 25 bp, Homo sapien
gatgtttggcagcagtcgattcagc

SEQ ID NO: 2312148 - DNA, 25 bp, Homo sapien
gagacccgactcctttaattgcagg

SEQ ID NO: 2312149 - DNA, 25 bp, Homo sapien
aaagtcaaatcatgggcaagaggcc

SEQ ID NO: 2312150 - DNA, 25 bp, Homo sapien
ctccagagccaatcagctgcagagg

SEQ ID NO: 2312151 - DNA, 25 bp, Homo sapien
ccattttttgcatatccagctccac

SEQ ID NO: 2312152 - DNA, 25 bp, Homo sapien
cagcaggtacaagggaaatgtcagg

SEQ ID NO: 2312153 - DNA, 25 bp, Homo sapien
cattttttgcatatccagctccaca

SEQ ID NO: 2312154 - DNA, 25 bp, Homo sapien
ggatgtaaatggccagtctcaggat

SEQ ID NO: 2312155 - DNA, 25 bp, Homo sapien
cactctgcacacctcgcggagaatc

SEQ ID NO: 2312156 - DNA, 25 bp, Homo sapien
gaatccgctcctggttcttcacaga

SEQ ID NO: 2312157 - DNA, 25 bp, Homo sapien
aaactcctgcaggttactgaagagc

SEQ ID NO: 2312158 - DNA, 25 bp, Homo sapien
tcctgcaggttactgaagagctccc

SEQ ID NO: 2312159 - DNA, 25 bp, Homo sapien
cccactaaggccccacatgcacgct

SEQ ID NO: 2312160 - DNA, 25 bp, Homo sapien
actaaggccccacatgcacgctggg

SEQ ID NO: 2312161 - DNA, 25 bp, Homo sapien
tgcctgcagcccactaaggccccac

SEQ ID NO: 2312162 - DNA, 25 bp, Homo sapien
gcctgcagcccactaaggccccaca

SEQ ID NO: 2312163 - DNA, 25 bp, Homo sapien
cataggatagggcagcataaaggag

SEQ ID NO: 2312164 - DNA, 25 bp, Homo sapien
aaatcttcataggatagggcagcat

SEQ ID NO: 2312165 - DNA, 25 bp, Homo sapien
gaggtgcctctgagcaatccaggag

SEQ ID NO: 2312166 - DNA, 25 bp, Homo sapien
cagtgttgccctctggtttacatat

SEQ ID NO: 2312167 - DNA, 25 bp, Homo sapien
ttcagcttagagaagctggcccgct

SEQ ID NO: 2312168 - DNA, 25 bp, Homo sapien
aggatccaggacttgttgccagaag

SEQ ID NO: 2312169 - DNA, 25 bp, Homo sapien
taattccaagtcgaacactcagctg

SEQ ID NO: 2312170 - DNA, 25 bp, Homo sapien
ggttgcacccatcaaacagaaggtg

SEQ ID NO: 2312171 - DNA, 25 bp, Homo sapien
cacagcatatccatagatatgaggg

SEQ ID NO: 2312172 - DNA, 25 bp, Homo sapien
ctatttcacagcatatccatagata

SEQ ID NO: 2312173 - DNA, 25 bp, Homo sapien
tttcacagcatatccatagatatga

SEQ ID NO: 2312174 - DNA, 25 bp, Homo sapien
tcacagcatatccatagatatgagg

SEQ ID NO: 2312175 - DNA, 25 bp, Homo sapien
tttgagccattcagctcttaactgc

SEQ ID NO: 2312176 - DNA, 25 bp, Homo sapien
ttgagccattcagctcttaactgcc

SEQ ID NO: 2312177 - DNA, 25 bp, Homo sapien
ctttgagccattcagctcttaactg

SEQ ID NO: 2312178 - DNA, 25 bp, Homo sapien
tctttgagccattcagctcttaact

SEQ ID NO: 2312179 - DNA, 25 bp, Homo sapien
aagaatcgcttaaacccgcgaggtg

SEQ ID NO: 2312180 - DNA, 25 bp, Homo sapien
ctccagcctgggcaacaagagcaaa

SEQ ID NO: 2312181 - DNA, 25 bp, Homo sapien
gaggttgcagtgagcggagatcacg

SEQ ID NO: 2312182 - DNA, 25 bp, Homo sapien
ggagatcacgtcattgcactccagc

SEQ ID NO: 2312183 - DNA, 25 bp, Homo sapien
aaaccttaagctgggtgcggttgct

SEQ ID NO: 2312184 - DNA, 25 bp, Homo sapien
accttaagctgggtgcggttgctca

SEQ ID NO: 2312185 - DNA, 25 bp, Homo sapien
aaccttaagctgggtgcggttgctc

SEQ ID NO: 2312186 - DNA, 25 bp, Homo sapien
tcttctttggagtgatttaagtgct

SEQ ID NO: 2312187 - DNA, 25 bp, Homo sapien
ttattaccaagctctcaaagagaag

SEQ ID NO: 2312188 - DNA, 25 bp, Homo sapien
tggtagatgctaattatgaaagtcg

SEQ ID NO: 2312189 - DNA, 25 bp, Homo sapien
taaattattaagaccttttcactgc

SEQ ID NO: 2312190 - DNA, 25 bp, Homo sapien
agtagggttttgccatgttggccag

SEQ ID NO: 2312191 - DNA, 25 bp, Homo sapien
ttgtatctttagtagggttttgcca

SEQ ID NO: 2312192 - DNA, 25 bp, Homo sapien
gtagggttttgccatgttggccagg

SEQ ID NO: 2312193 - DNA, 25 bp, Homo sapien
tctttacagactcacagattgcttg

SEQ ID NO: 2312194 - DNA, 25 bp, Homo sapien
gaaagccagaccagtgacgctaaga

SEQ ID NO: 2312195 - DNA, 25 bp, Homo sapien
ctgggcagaactaggtgtggcaacc

SEQ ID NO: 2312196 - DNA, 25 bp, Homo sapien
tcacagcttccatagttgcaaagaa

SEQ ID NO: 2312197 - DNA, 25 bp, Homo sapien
aaatagtacttttacaaaatcatct

SEQ ID NO: 2312198 - DNA, 25 bp, Homo sapien
acacaaatgtgaatttattggttga

SEQ ID NO: 2312199 - DNA, 25 bp, Homo sapien
cctaacacaaatgtgaatttattgg

SEQ ID NO: 2312200 - DNA, 25 bp, Homo sapien
aatgtgaatttattggttgatttga

SEQ ID NO: 2312201 - DNA, 25 bp, Homo sapien
gaagcagtaggtgtgcattcgacct

SEQ ID NO: 2312202 - DNA, 25 bp, Homo sapien
gcattcgacctcactgcatcaataa

SEQ ID NO: 2312203 - DNA, 25 bp, Homo sapien
tgttccagagcttaggaagcagtag

SEQ ID NO: 2312204 - DNA, 25 bp, Homo sapien
tccagagcttaggaagcagtaggtg

SEQ ID NO: 2312205 - DNA, 25 bp, Homo sapien
gactgaccaatagtgagatggttgg

SEQ ID NO: 2312206 - DNA, 25 bp, Homo sapien
caatagtgagatggttggattaagg

SEQ ID NO: 2312207 - DNA, 25 bp, Homo sapien
tatttctcaatcactagactgacca

SEQ ID NO: 2312208 - DNA, 25 bp, Homo sapien
tcaatcactagactgaccaatagtg

SEQ ID NO: 2312209 - DNA, 25 bp, Homo sapien
ttgccacaccacttagacaagaggg

SEQ ID NO: 2312210 - DNA, 25 bp, Homo sapien
acttgtggaatgactgtaaaaaact

SEQ ID NO: 2312211 - DNA, 25 bp, Homo sapien
caagagggaattgacaagactgtgc

SEQ ID NO: 2312212 - DNA, 25 bp, Homo sapien
tatggcagcaatgattatcaaagga

SEQ ID NO: 2312213 - DNA, 25 bp, Homo sapien
agaggaggtgcgctccctgcagttg

SEQ ID NO: 2312214 - DNA, 25 bp, Homo sapien
tcagaggccaggattcttgccatcc

SEQ ID NO: 2312215 - DNA, 25 bp, Homo sapien
ggagaagatagccatcagaggccag

SEQ ID NO: 2312216 - DNA, 25 bp, Homo sapien
tcggaaacacgccctagccagagga

SEQ ID NO: 2312217 - DNA, 25 bp, Homo sapien
aagggggagtctctagatttcctga

SEQ ID NO: 2312218 - DNA, 25 bp, Homo sapien
tagtcgggataattggccttcatcc

SEQ ID NO: 2312219 - DNA, 25 bp, Homo sapien
ttcctgattagtcgggataattggc

SEQ ID NO: 2312220 - DNA, 25 bp, Homo sapien
ctatagggacaaagggggagtctct

SEQ ID NO: 2312221 - DNA, 25 bp, Homo sapien
tagagtcacagctccaacaacaaat

SEQ ID NO: 2312222 - DNA, 25 bp, Homo sapien
gatgaattgacattttctgatctct

SEQ ID NO: 2312223 - DNA, 25 bp, Homo sapien
ctttagcttgtaaagaccacaggac

SEQ ID NO: 2312224 - DNA, 25 bp, Homo sapien
ttgggcagcaactctcatgtgaata

SEQ ID NO: 2312225 - DNA, 25 bp, Homo sapien
agacagctgaacataagatacaaat

SEQ ID NO: 2312226 - DNA, 25 bp, Homo sapien
aaagacagctgaacataagatacaa

SEQ ID NO: 2312227 - DNA, 25 bp, Homo sapien
tcaaagacagctgaacataagatac

SEQ ID NO: 2312228 - DNA, 25 bp, Homo sapien
cataagatacaaattaagcgggtta

SEQ ID NO: 2312229 - DNA, 25 bp, Homo sapien
ggagatggctgaaaacccacaaggg

SEQ ID NO: 2312230 - DNA, 25 bp, Homo sapien
tcaagttgacaagggctggacagtg

SEQ ID NO: 2312231 - DNA, 25 bp, Homo sapien
gcagggttcagcaatcatgagcaca

SEQ ID NO: 2312232 - DNA, 25 bp, Homo sapien
ccagggttagtgcaaaagagacatc

SEQ ID NO: 2312233 - DNA, 25 bp, Homo sapien
tagtcaagcctggtgggtcactgaa

SEQ ID NO: 2312234 - DNA, 25 bp, Homo sapien
cctgacctgcaaagtaagggctatt

SEQ ID NO: 2312235 - DNA, 25 bp, Homo sapien
tgagtgtggcctaccagtcaaagta

SEQ ID NO: 2312236 - DNA, 25 bp, Homo sapien
tgtgggtctgtttcatagtcaagcc

SEQ ID NO: 2312237 - DNA, 25 bp, Homo sapien
tgaagaatcgtggtctaatgtaatc

SEQ ID NO: 2312238 - DNA, 25 bp, Homo sapien
gaagaatcgtggtctaatgtaatcc

SEQ ID NO: 2312239 - DNA, 25 bp, Homo sapien
aatgtaatccttatacatagaatag

SEQ ID NO: 2312240 - DNA, 25 bp, Homo sapien
tccttatacatagaatagagaacac

SEQ ID NO: 2312241 - DNA, 25 bp, Homo sapien
tttcagcattaaatatatgacctct

SEQ ID NO: 2312242 - DNA, 25 bp, Homo sapien
tctttctagccccaaaggtgttgag

SEQ ID NO: 2312243 - DNA, 25 bp, Homo sapien
taaatatatgacctctctgccttat

SEQ ID NO: 2312244 - DNA, 25 bp, Homo sapien
tttctagccccaaaggtgttgagtc

SEQ ID NO: 2312245 - DNA, 25 bp, Homo sapien
tatttttagagatggggattcacca

SEQ ID NO: 2312246 - DNA, 25 bp, Homo sapien
cacctcagcctccctaagtgctggg

SEQ ID NO: 2312247 - DNA, 25 bp, Homo sapien
tgtatttttagagatggggattcac

SEQ ID NO: 2312248 - DNA, 25 bp, Homo sapien
aggcacacaccactaaggccagcta

SEQ ID NO: 2312249 - DNA, 25 bp, Homo sapien
ttgcactgggcatgtccttcctgga

SEQ ID NO: 2312250 - DNA, 25 bp, Homo sapien
ctggactgtgggcatacggtaagca

SEQ ID NO: 2312251 - DNA, 25 bp, Homo sapien
tctaaaggcctgctgacagaagaag

SEQ ID NO: 2312252 - DNA, 25 bp, Homo sapien
tgcaggtagccatcagagccagtgt

SEQ ID NO: 2312253 - DNA, 25 bp, Homo sapien
gaagatcctagataacattgctgct

SEQ ID NO: 2312254 - DNA, 25 bp, Homo sapien
tgtttcccgtctatggaacctctga

SEQ ID NO: 2312255 - DNA, 25 bp, Homo sapien
tctgctttgactgaggattctattc

SEQ ID NO: 2312256 - DNA, 25 bp, Homo sapien
tcatcatttaaagtaccccagcgtt

SEQ ID NO: 2312257 - DNA, 25 bp, Homo sapien
agtggcacagtcttggctcactgcc

SEQ ID NO: 2312258 - DNA, 25 bp, Homo sapien
tgcactgtcatccaagctggagtgc

SEQ ID NO: 2312259 - DNA, 25 bp, Homo sapien
gcctccacctcctgggttcaagcga

SEQ ID NO: 2312260 - DNA, 25 bp, Homo sapien
ccacacccagctaattttttgtaat

SEQ ID NO: 2312261 - DNA, 25 bp, Homo sapien
cagtggccctgaagacagacggtac

SEQ ID NO: 2312262 - DNA, 25 bp, Homo sapien
gtatgtcaccgtcagtatcccaagg

SEQ ID NO: 2312263 - DNA, 25 bp, Homo sapien
cagacggtaccaacggaaatactgt

SEQ ID NO: 2312264 - DNA, 25 bp, Homo sapien
tgctccagcggcttgcagctagact

SEQ ID NO: 2312265 - DNA, 25 bp, Homo sapien
tgtatcattccagttgtagcatatg

SEQ ID NO: 2312266 - DNA, 25 bp, Homo sapien
tatcattccagttgtagcatatgtg

SEQ ID NO: 2312267 - DNA, 25 bp, Homo sapien
catatgtgctgccaaagtgagcacc

SEQ ID NO: 2312268 - DNA, 25 bp, Homo sapien
ctctgtatcattccagttgtagcat

SEQ ID NO: 2312269 - DNA, 25 bp, Homo sapien
gtcgcgttcgttcgaagacgcatgc

SEQ ID NO: 2312270 - DNA, 25 bp, Homo sapien
gacgcatgcgtcttttctgagcgct

SEQ ID NO: 2312271 - DNA, 25 bp, Homo sapien
tgagcgctgattggtagccatagcc

SEQ ID NO: 2312272 - DNA, 25 bp, Homo sapien
cgtcttttctgagcgctgattggta

SEQ ID NO: 2312273 - DNA, 25 bp, Homo sapien
cttcacagcgagagaagcgggagag

SEQ ID NO: 2312274 - DNA, 25 bp, Homo sapien
ttcacagcgagagaagcgggagaga

SEQ ID NO: 2312275 - DNA, 25 bp, Homo sapien
gaccaagttgcagcctccgggtgac

SEQ ID NO: 2312276 - DNA, 25 bp, Homo sapien
cctccgggtgacaaaatgtccaggg

SEQ ID NO: 2312277 - DNA, 25 bp, Homo sapien
ggggtgactgccgagccccacacag

SEQ ID NO: 2312278 - DNA, 25 bp, Homo sapien
agccaggccagagcgaccaagttgc

SEQ ID NO: 2312279 - DNA, 25 bp, Homo sapien
ataaaaattccagggccaaggcgtg

SEQ ID NO: 2312280 - DNA, 25 bp, Homo sapien
gatagcagcggtaaaacctgagccg

SEQ ID NO: 2312281 - DNA, 25 bp, Homo sapien
cctctggagagagcgcaatgcctgt

SEQ ID NO: 2312282 - DNA, 25 bp, Homo sapien
gcaaggttgagacactgaaagagcc

SEQ ID NO: 2312283 - DNA, 25 bp, Homo sapien
ttcttcacatctgcctttggagaaa

SEQ ID NO: 2312284 - DNA, 25 bp, Homo sapien
tcacatctgcctttggagaaaggtg

SEQ ID NO: 2312285 - DNA, 25 bp, Homo sapien
caagttcttcacatctgcctttgga

SEQ ID NO: 2312286 - DNA, 25 bp, Homo sapien
tggagaaaggtgaagctttgaagac

SEQ ID NO: 2312287 - DNA, 25 bp, Homo sapien
tagaagcgggggaaatgacgaccca

SEQ ID NO: 2312288 - DNA, 25 bp, Homo sapien
attgtgtacaggacatagaagcggg

SEQ ID NO: 2312289 - DNA, 25 bp, Homo sapien
tgacgacccaagaaacgatggtatt

SEQ ID NO: 2312290 - DNA, 25 bp, Homo sapien
cattaatcgcttttgtcttggttac

SEQ ID NO: 2312291 - DNA, 25 bp, Homo sapien
gctccagagtagacacttgacacga

SEQ ID NO: 2312292 - DNA, 25 bp, Homo sapien
taattagtccaatcgcacagtgacg

SEQ ID NO: 2312293 - DNA, 25 bp, Homo sapien
tacttggcacttactagggatcagg

SEQ ID NO: 2312294 - DNA, 25 bp, Homo sapien
gatccctgccgtgtgcaaggcaaaa

SEQ ID NO: 2312295 - DNA, 25 bp, Homo sapien
ggcagccatgagttatgataatgaa

SEQ ID NO: 2312296 - DNA, 25 bp, Homo sapien
cgcgcccggcttcttgcatctattt

SEQ ID NO: 2312297 - DNA, 25 bp, Homo sapien
tacatggaagtttgttacactactc

SEQ ID NO: 2312298 - DNA, 25 bp, Homo sapien
tatataaataggattggcagccatg

SEQ ID NO: 2312299 - DNA, 25 bp, Homo sapien
tcctgaggtcaactcgaatctcttt

SEQ ID NO: 2312300 - DNA, 25 bp, Homo sapien
taggtaacttgaaactcctgaggtc

SEQ ID NO: 2312301 - DNA, 25 bp, Homo sapien
tgtaatctgctatggaatggtctcc

SEQ ID NO: 2312302 - DNA, 25 bp, Homo sapien
ttaaccctatgtattccccagccag

SEQ ID NO: 2312303 - DNA, 25 bp, Homo sapien
ctccatctcccggtatggaagttga

SEQ ID NO: 2312304 - DNA, 25 bp, Homo sapien
tttttggcatcagcccataacatct

SEQ ID NO: 2312305 - DNA, 25 bp, Homo sapien
gaaactttatattgtgcttccacat

SEQ ID NO: 2312306 - DNA, 25 bp, Homo sapien
ctcccggtatggaagttgatgaaac

SEQ ID NO: 2312307 - DNA, 25 bp, Homo sapien
aacttctggatatctgcccctggcc

SEQ ID NO: 2312308 - DNA, 25 bp, Homo sapien
tgaacttctggatatctgcccctgg

SEQ ID NO: 2312309 - DNA, 25 bp, Homo sapien
tcaccatgaacttctggatatctgc

SEQ ID NO: 2312310 - DNA, 25 bp, Homo sapien
catgaacttctggatatctgcccct

SEQ ID NO: 2312311 - DNA, 25 bp, Homo sapien
gaaagtgtgccagaaattctatgga

SEQ ID NO: 2312312 - DNA, 25 bp, Homo sapien
caaagggcaaaagcttgatcaatgg

SEQ ID NO: 2312313 - DNA, 25 bp, Homo sapien
tatggagggctacaactctggatga

SEQ ID NO: 2312314 - DNA, 25 bp, Homo sapien
tattttgttctcacggcaaagggca

SEQ ID NO: 2312315 - DNA, 25 bp, Homo sapien
gctgccctttggatccttgcagact

SEQ ID NO: 2312316 - DNA, 25 bp, Homo sapien
atgctgccctttggatccttgcaga

SEQ ID NO: 2312317 - DNA, 25 bp, Homo sapien
accaaatactactttcatgctgccc

SEQ ID NO: 2312318 - DNA, 25 bp, Homo sapien
caaatactactttcatgctgccctt

SEQ ID NO: 2312319 - DNA, 25 bp, Homo sapien
gcactgcatgtggtccccaagttta

SEQ ID NO: 2312320 - DNA, 25 bp, Homo sapien
gttggacaagctggtatcaatctcc

SEQ ID NO: 2312321 - DNA, 25 bp, Homo sapien
gattattggcataagccgccactct

SEQ ID NO: 2312322 - DNA, 25 bp, Homo sapien
tctggatggttagttccttgaggac

SEQ ID NO: 2312323 - DNA, 25 bp, Homo sapien
aaacacagatgcagttttaacccaa

SEQ ID NO: 2312324 - DNA, 25 bp, Homo sapien
gaaaagacacttggtgacgtcttgg

SEQ ID NO: 2312325 - DNA, 25 bp, Homo sapien
aaagacacttggtgacgtcttggcg

SEQ ID NO: 2312326 - DNA, 25 bp, Homo sapien
gacacttggtgacgtcttggcggaa

SEQ ID NO: 2312327 - DNA, 25 bp, Homo sapien
ctaggaaaagacacttggtgacgtc

SEQ ID NO: 2312328 - DNA, 25 bp, Homo sapien
tggcaaaaggtggaatggaaataat

SEQ ID NO: 2312329 - DNA, 25 bp, Homo sapien
ttggcaaaaggtggaatggaaataa

SEQ ID NO: 2312330 - DNA, 25 bp, Homo sapien
gacctctgtcaaccctatatggaag

SEQ ID NO: 2312331 - DNA, 25 bp, Homo sapien
gttgacagttctagccgtgtagcca

SEQ ID NO: 2312332 - DNA, 25 bp, Homo sapien
tagtctaaaagtactctctctcggg

SEQ ID NO: 2312333 - DNA, 25 bp, Homo sapien
tagaagtcccactatcttgaggctg

SEQ ID NO: 2312334 - DNA, 25 bp, Homo sapien
gaagagatggagacactatttccct

SEQ ID NO: 2312335 - DNA, 25 bp, Homo sapien
cctgaccaggacactatatgtgatg

SEQ ID NO: 2312336 - DNA, 25 bp, Homo sapien
gcctgccacgcagcaatcagatata

SEQ ID NO: 2312337 - DNA, 25 bp, Homo sapien
gaaaggaaggactagcagaatagcc

SEQ ID NO: 2312338 - DNA, 25 bp, Homo sapien
caaagaaagcatttggtagacatga

SEQ ID NO: 2312339 - DNA, 25 bp, Homo sapien
agaaagcatttggtagacatgaata

SEQ ID NO: 2312340 - DNA, 25 bp, Homo sapien
ccaaagaaagcatttggtagacatg

SEQ ID NO: 2312341 - DNA, 25 bp, Homo sapien
aaagaaagcatttggtagacatgaa

SEQ ID NO: 2312342 - DNA, 25 bp, Homo sapien
aaaggagaaagaatcacaaactcac

SEQ ID NO: 2312343 - DNA, 25 bp, Homo sapien
gaaaggagaaagaatcacaaactca

SEQ ID NO: 2312344 - DNA, 25 bp, Homo sapien
tgaaaggagaaagaatcacaaactc

SEQ ID NO: 2312345 - DNA, 25 bp, Homo sapien
ctgaaaggagaaagaatcacaaact

SEQ ID NO: 2312346 - DNA, 25 bp, Homo sapien
cagtagttgcctgggaaacaggtac

SEQ ID NO: 2312347 - DNA, 25 bp, Homo sapien
tcagtagttgcctgggaaacaggta

SEQ ID NO: 2312348 - DNA, 25 bp, Homo sapien
ggactgcttccggaaagcatgatag

SEQ ID NO: 2312349 - DNA, 25 bp, Homo sapien
tgcacagatctgtcagacgccaccg

SEQ ID NO: 2312350 - DNA, 25 bp, Homo sapien
ccggaaagcatgatagatatctaag

SEQ ID NO: 2312351 - DNA, 25 bp, Homo sapien
ccaccggagtcctgcatcagaaatg

SEQ ID NO: 2312352 - DNA, 25 bp, Homo sapien
gaatctaacaagattccacatttgt

SEQ ID NO: 2312353 - DNA, 25 bp, Homo sapien
atttgtagatgttaggaaagtcctg

SEQ ID NO: 2312354 - DNA, 25 bp, Homo sapien
tagtgcacactgaatctaacaagat

SEQ ID NO: 2312355 - DNA, 25 bp, Homo sapien
tgactactcctcttacctagtttag

SEQ ID NO: 2312356 - DNA, 25 bp, Homo sapien
cacgtgcaaagcctggagttggttc

SEQ ID NO: 2312357 - DNA, 25 bp, Homo sapien
ttggttcatgcccagaggatggtta

SEQ ID NO: 2312358 - DNA, 25 bp, Homo sapien
caagatatcatgtattgctgggtgg

SEQ ID NO: 2312359 - DNA, 25 bp, Homo sapien
gaggatggttagagaaacactctct

SEQ ID NO: 2312360 - DNA, 25 bp, Homo sapien
catggtgatgctatggaaaagagaa

SEQ ID NO: 2312361 - DNA, 25 bp, Homo sapien
tatggaaaagagaagccctcaaagt

SEQ ID NO: 2312362 - DNA, 25 bp, Homo sapien
ctgaaacatggtgatgctatggaaa

SEQ ID NO: 2312363 - DNA, 25 bp, Homo sapien
tgatgctatggaaaagagaagccct

SEQ ID NO: 2312364 - DNA, 25 bp, Homo sapien
ggcaaatagtatgagctcaagcaaa

SEQ ID NO: 2312365 - DNA, 25 bp, Homo sapien
cacaaccacataggaggggaaaggc

SEQ ID NO: 2312366 - DNA, 25 bp, Homo sapien
tgtaacacaaccacataggagggga

SEQ ID NO: 2312367 - DNA, 25 bp, Homo sapien
aggcaaatagtatgagctcaagcaa

SEQ ID NO: 2312368 - DNA, 25 bp, Homo sapien
gtatgagtcttcaaacgatgtctca

SEQ ID NO: 2312369 - DNA, 25 bp, Homo sapien
gaatcacagttgtatgagtcttcaa

SEQ ID NO: 2312370 - DNA, 25 bp, Homo sapien
tggccaatccccagctttgccaaag

SEQ ID NO: 2312371 - DNA, 25 bp, Homo sapien
cgatgtctcaacaagggaggaggca

SEQ ID NO: 2312372 - DNA, 25 bp, Homo sapien
gagcccctgtaaacctccggcctgc

SEQ ID NO: 2312373 - DNA, 25 bp, Homo sapien
gcctgccataggctcaaaagcacac

SEQ ID NO: 2312374 - DNA, 25 bp, Homo sapien
tgggttctataaacaaacaagacaa

SEQ ID NO: 2312375 - DNA, 25 bp, Homo sapien
cacaccaagggttgagggttgatgt

SEQ ID NO: 2312376 - DNA, 25 bp, Homo sapien
gcttggttaaaatagtgagactgaa

SEQ ID NO: 2312377 - DNA, 25 bp, Homo sapien
tagtctcggcactttgggttgatgg

SEQ ID NO: 2312378 - DNA, 25 bp, Homo sapien
cttggttaaaatagtgagactgaaa

SEQ ID NO: 2312379 - DNA, 25 bp, Homo sapien
agcttggttaaaatagtgagactga

SEQ ID NO: 2312380 - DNA, 25 bp, Homo sapien
agctaaaatagtaggtctaaactgc

SEQ ID NO: 2312381 - DNA, 25 bp, Homo sapien
tccccctagctaagtttcttgagaa

SEQ ID NO: 2312382 - DNA, 25 bp, Homo sapien
tctaaactgcagtatccttgctttc

SEQ ID NO: 2312383 - DNA, 25 bp, Homo sapien
gcaaagagtcctatataagctaaaa

SEQ ID NO: 2312384 - DNA, 25 bp, Homo sapien
atgcgtagaattcaggccacggaga

SEQ ID NO: 2312385 - DNA, 25 bp, Homo sapien
tatgcgtagaattcaggccacggag

SEQ ID NO: 2312386 - DNA, 25 bp, Homo sapien
tcccagccaagttcgacacctatct

SEQ ID NO: 2312387 - DNA, 25 bp, Homo sapien
ttctcccagccaagttcgacaccta

SEQ ID NO: 2312388 - DNA, 25 bp, Homo sapien
tctcccagccaagttcgacacctat

SEQ ID NO: 2312389 - DNA, 25 bp, Homo sapien
attctcccagccaagttcgacacct

SEQ ID NO: 2312390 - DNA, 25 bp, Homo sapien
tgacttggattttagtggtataacc

SEQ ID NO: 2312391 - DNA, 25 bp, Homo sapien
tatggcctacttcgttacctgccgg

SEQ ID NO: 2312392 - DNA, 25 bp, Homo sapien
tcttaggtttccacagtccccacta

SEQ ID NO: 2312393 - DNA, 25 bp, Homo sapien
gcatgtgagtttgtgccctttcaat

SEQ ID NO: 2312394 - DNA, 25 bp, Homo sapien
tataaagaacaggataggctggaca

SEQ ID NO: 2312395 - DNA, 25 bp, Homo sapien
ctataaagaacaggataggctggac

SEQ ID NO: 2312396 - DNA, 25 bp, Homo sapien
taaagaacaggataggctggacatg

SEQ ID NO: 2312397 - DNA, 25 bp, Homo sapien
aaagaacaggataggctggacatgg

SEQ ID NO: 2312398 - DNA, 25 bp, Homo sapien
tgtttcagcccctgtatgcatgcct

SEQ ID NO: 2312399 - DNA, 25 bp, Homo sapien
ctaaacaccagtcgcgttgggattc

SEQ ID NO: 2312400 - DNA, 25 bp, Homo sapien
tatatatggcttaagcctggaggca

SEQ ID NO: 2312401 - DNA, 25 bp, Homo sapien
gcttcaagattagtaggcctaccct

SEQ ID NO: 2312402 - DNA, 25 bp, Homo sapien
cgccttgtcccaaggtagttggtgg

SEQ ID NO: 2312403 - DNA, 25 bp, Homo sapien
agcgccttgtcccaaggtagttggt

SEQ ID NO: 2312404 - DNA, 25 bp, Homo sapien
gcgccttgtcccaaggtagttggtg

SEQ ID NO: 2312405 - DNA, 25 bp, Homo sapien
tcagcgccttgtcccaaggtagttg

SEQ ID NO: 2312406 - DNA, 25 bp, Homo sapien
tatactatacgactgcaggacaatg

SEQ ID NO: 2312407 - DNA, 25 bp, Homo sapien
catggaagtggatcagtcctaagcc

SEQ ID NO: 2312408 - DNA, 25 bp, Homo sapien
gggaaacacccaagtacatgcacgg

SEQ ID NO: 2312409 - DNA, 25 bp, Homo sapien
aaaagaagtggttagcccatgccag

SEQ ID NO: 2312410 - DNA, 25 bp, Homo sapien
cccaggctgggcagtaattagtacc

SEQ ID NO: 2312411 - DNA, 25 bp, Homo sapien
gagttgaagatccacagagggctgt

SEQ ID NO: 2312412 - DNA, 25 bp, Homo sapien
acaggtgtgatccatggcccagaga

SEQ ID NO: 2312413 - DNA, 25 bp, Homo sapien
tccatcaacaggtttcaagcagtct

SEQ ID NO: 2312414 - DNA, 25 bp, Homo sapien
gaagtagattccagctgcacgatga

SEQ ID NO: 2312415 - DNA, 25 bp, Homo sapien
tcatggttgctaggaaagctaggcc

SEQ ID NO: 2312416 - DNA, 25 bp, Homo sapien
gatagcttcagtcccagtctaggcc

SEQ ID NO: 2312417 - DNA, 25 bp, Homo sapien
tcttgtcaagcgaaaggccttctct

SEQ ID NO: 2312418 - DNA, 25 bp, Homo sapien
aggaggaatacagttcctgttcatc

SEQ ID NO: 2312419 - DNA, 25 bp, Homo sapien
gaatacagttcctgttcatcctgtg

SEQ ID NO: 2312420 - DNA, 25 bp, Homo sapien
tcctgtgttctaagatctccattga

SEQ ID NO: 2312421 - DNA, 25 bp, Homo sapien
gtgttctaagatctccattgaacag

SEQ ID NO: 2312422 - DNA, 25 bp, Homo sapien
ggctggagtgccgtagcgcgtgatc

SEQ ID NO: 2312423 - DNA, 25 bp, Homo sapien
tggagtgccgtagcgcgtgatctcg

SEQ ID NO: 2312424 - DNA, 25 bp, Homo sapien
ccgcacctggccagcttttgtattt

SEQ ID NO: 2312425 - DNA, 25 bp, Homo sapien
tggccgggcaggtctcaaacgcctg

SEQ ID NO: 2312426 - DNA, 25 bp, Homo sapien
gaagaggagttagtacatttaacat

SEQ ID NO: 2312427 - DNA, 25 bp, Homo sapien
tcctaaatactgattccttgagata

SEQ ID NO: 2312428 - DNA, 25 bp, Homo sapien
cttaggctgtggaggtatctcatct

SEQ ID NO: 2312429 - DNA, 25 bp, Homo sapien
tccttgagataaaaggaagcaggac

SEQ ID NO: 2312430 - DNA, 25 bp, Homo sapien
gctcatgcctgtaatcccatcactt

SEQ ID NO: 2312431 - DNA, 25 bp, Homo sapien
aaggtcaggagattgagaccatcct

SEQ ID NO: 2312432 - DNA, 25 bp, Homo sapien
agaaaggagaaggaagccgggcacg

SEQ ID NO: 2312433 - DNA, 25 bp, Homo sapien
tgggaggccgaggtgggcagattac

SEQ ID NO: 2312434 - DNA, 25 bp, Homo sapien
cctgttcacactcttaccatgtttt

SEQ ID NO: 2312435 - DNA, 25 bp, Homo sapien
tatgttgaggtacacaaagataatg

SEQ ID NO: 2312436 - DNA, 25 bp, Homo sapien
aaaaaagatgcattcccttcctgtt

SEQ ID NO: 2312437 - DNA, 25 bp, Homo sapien
taagtgtgtaagtgtaacatcatgg

SEQ ID NO: 2312438 - DNA, 25 bp, Homo sapien
gaaaacggggaatatactgagcact

SEQ ID NO: 2312439 - DNA, 25 bp, Homo sapien
tacaaatagataccttcaaggagaa

SEQ ID NO: 2312440 - DNA, 25 bp, Homo sapien
cagagttcactatgaggaaacatgg

SEQ ID NO: 2312441 - DNA, 25 bp, Homo sapien
gggtgccattccgagtacaaataga

SEQ ID NO: 2312442 - DNA, 25 bp, Homo sapien
aacaaaagtatacatcatatcagtg

SEQ ID NO: 2312443 - DNA, 25 bp, Homo sapien
ataggagtttagtggcctcctataa

SEQ ID NO: 2312444 - DNA, 25 bp, Homo sapien
taggagtttagtggcctcctataat

SEQ ID NO: 2312445 - DNA, 25 bp, Homo sapien
catatcagtgaatatttgctaagaa

SEQ ID NO: 2312446 - DNA, 25 bp, Homo sapien
caccgcgggggacggcctgatggag

SEQ ID NO: 2312447 - DNA, 25 bp, Homo sapien
actcactggccaccgcgggggacgg

SEQ ID NO: 2312448 - DNA, 25 bp, Homo sapien
tccaaggcaaccgagctgattgcca

SEQ ID NO: 2312449 - DNA, 25 bp, Homo sapien
aaggcaaccgagctgattgccaact

SEQ ID NO: 2312450 - DNA, 25 bp, Homo sapien
caagtcagtggtggctcgctttgat

SEQ ID NO: 2312451 - DNA, 25 bp, Homo sapien
tcttcaccagcatcggagaggacta

SEQ ID NO: 2312452 - DNA, 25 bp, Homo sapien
tgtgctgacgtacatcacgaccgag

SEQ ID NO: 2312453 - DNA, 25 bp, Homo sapien
ggcaggtgagcaacgaccttacgga

SEQ ID NO: 2312454 - DNA, 25 bp, Homo sapien
tcaaatttgtacactcagaactaag

SEQ ID NO: 2312455 - DNA, 25 bp, Homo sapien
agtgattttggcagctgtaacaggc

SEQ ID NO: 2312456 - DNA, 25 bp, Homo sapien
aaagcctagttgtttctcactgtcc

SEQ ID NO: 2312457 - DNA, 25 bp, Homo sapien
gggtctttcactgtcgcccgagctg

SEQ ID NO: 2312458 - DNA, 25 bp, Homo sapien
tttttggatctggccatattgttca

SEQ ID NO: 2312459 - DNA, 25 bp, Homo sapien
aatttttggatctggccatattgtt

SEQ ID NO: 2312460 - DNA, 25 bp, Homo sapien
atttttggatctggccatattgttc

SEQ ID NO: 2312461 - DNA, 25 bp, Homo sapien
caaagaggcaatggttattgttgca

SEQ ID NO: 2312462 - DNA, 25 bp, Homo sapien
aggcaatggttattgttgcatctca

SEQ ID NO: 2312463 - DNA, 25 bp, Homo sapien
ttgcaaagaggcaatggttattgtt

SEQ ID NO: 2312464 - DNA, 25 bp, Homo sapien
aagaggcaatggttattgttgcatc

SEQ ID NO: 2312465 - DNA, 25 bp, Homo sapien
gcatgtcatccttgctcagaggcca

SEQ ID NO: 2312466 - DNA, 25 bp, Homo sapien
gtatatgtgctgctgaagtgagcat

SEQ ID NO: 2312467 - DNA, 25 bp, Homo sapien
tcttctctgaatcattccaacttta

SEQ ID NO: 2312468 - DNA, 25 bp, Homo sapien
gctaatcttctctgaatcattccaa

SEQ ID NO: 2312469 - DNA, 25 bp, Homo sapien
gaaattgtattactgtgtcacatca

SEQ ID NO: 2312470 - DNA, 25 bp, Homo sapien
tacttgggagaacctaacttctctg

SEQ ID NO: 2312471 - DNA, 25 bp, Homo sapien
tcttacccaggatgtgctaggtgtg

SEQ ID NO: 2312472 - DNA, 25 bp, Homo sapien
tgtgtcacatcaccctttgcctttc

SEQ ID NO: 2312473 - DNA, 25 bp, Homo sapien
tacaggccactgtggtctttgggcc

SEQ ID NO: 2312474 - DNA, 25 bp, Homo sapien
aaaggtctaagggtctgcatttaca

SEQ ID NO: 2312475 - DNA, 25 bp, Homo sapien
cttacgactgtagtttgtggctcta

SEQ ID NO: 2312476 - DNA, 25 bp, Homo sapien
tgtggctctagtcagacaacctgtc

SEQ ID NO: 2312477 - DNA, 25 bp, Homo sapien
accaccatgcctggctaatttttgt

SEQ ID NO: 2312478 - DNA, 25 bp, Homo sapien
ccaactagctggaactataggcgca

SEQ ID NO: 2312479 - DNA, 25 bp, Homo sapien
gggtttcactctgtcgctcagtctg

SEQ ID NO: 2312480 - DNA, 25 bp, Homo sapien
aactagctggaactataggcgcaca

SEQ ID NO: 2312481 - DNA, 25 bp, Homo sapien
tggctgagcgatgtctgagttcccc

SEQ ID NO: 2312482 - DNA, 25 bp, Homo sapien
gacccttcgctgctttggcgctggg

SEQ ID NO: 2312483 - DNA, 25 bp, Homo sapien
cttggacaagaaggccggaaatctg

SEQ ID NO: 2312484 - DNA, 25 bp, Homo sapien
cagctgttcagaggttctccacgtt

SEQ ID NO: 2312485 - DNA, 25 bp, Homo sapien
ggtatatatggccaagcctacctga

SEQ ID NO: 2312486 - DNA, 25 bp, Homo sapien
acaagagaccaaatgtttgtgtccc

SEQ ID NO: 2312487 - DNA, 25 bp, Homo sapien
tgcggtgtcctagcctacaagagac

SEQ ID NO: 2312488 - DNA, 25 bp, Homo sapien
gatcacactactacatccagactgg

SEQ ID NO: 2312489 - DNA, 25 bp, Homo sapien
cttaagatatccttgcattgttaac

SEQ ID NO: 2312490 - DNA, 25 bp, Homo sapien
aagatatccttgcattgttaacagc

SEQ ID NO: 2312491 - DNA, 25 bp, Homo sapien
taagatatccttgcattgttaacag

SEQ ID NO: 2312492 - DNA, 25 bp, Homo sapien
gatatccttgcattgttaacagcat

SEQ ID NO: 2312493 - DNA, 25 bp, Homo sapien
cactgtgcccgttggattccattta

SEQ ID NO: 2312494 - DNA, 25 bp, Homo sapien
gaaagtgtctaccaacaggtaaatg

SEQ ID NO: 2312495 - DNA, 25 bp, Homo sapien
agtgcataggcgtggtcatagttca

SEQ ID NO: 2312496 - DNA, 25 bp, Homo sapien
cagatcaatggttgctgtgaaggga

SEQ ID NO: 2312497 - DNA, 25 bp, Homo sapien
atgatggtccgtccgcctagcgtca

SEQ ID NO: 2312498 - DNA, 25 bp, Homo sapien
gtcctcttcctgttcggagctactt

SEQ ID NO: 2312499 - DNA, 25 bp, Homo sapien
tccggtttgtctcggcgtcgcggac

SEQ ID NO: 2312500 - DNA, 25 bp, Homo sapien
tacttccgtgtcacatgatggtccg

SEQ ID NO: 2312501 - DNA, 25 bp, Homo sapien
tggaggcagcaagctgccgtaattt

SEQ ID NO: 2312502 - DNA, 25 bp, Homo sapien
tgggctccgaatccgctcgctctgg

SEQ ID NO: 2312503 - DNA, 25 bp, Homo sapien
taatttgggtatgacgaaggcgtca

SEQ ID NO: 2312504 - DNA, 25 bp, Homo sapien
actgcagccggccaaggagcatggc

SEQ ID NO: 2312505 - DNA, 25 bp, Homo sapien
gaaggttgcctactacacagagcta

SEQ ID NO: 2312506 - DNA, 25 bp, Homo sapien
tctgatcccgtcagcgaagggcgag

SEQ ID NO: 2312507 - DNA, 25 bp, Homo sapien
gatttgcaaatagtctgccccagag

SEQ ID NO: 2312508 - DNA, 25 bp, Homo sapien
cagtagttaagttcggccccgctgg

SEQ ID NO: 2312509 - DNA, 25 bp, Homo sapien
taggcaggtggagcatcggtatagg

SEQ ID NO: 2312510 - DNA, 25 bp, Homo sapien
tggagcatcggtatagggtggagcc

SEQ ID NO: 2312511 - DNA, 25 bp, Homo sapien
tgagtaggcaggtggagcatcggta

SEQ ID NO: 2312512 - DNA, 25 bp, Homo sapien
catcggtatagggtggagcctgagg

SEQ ID NO: 2312513 - DNA, 25 bp, Homo sapien
tagttcaaatctggcaaactggaag

SEQ ID NO: 2312514 - DNA, 25 bp, Homo sapien
ttcccagctagttcaaatctggcaa

SEQ ID NO: 2312515 - DNA, 25 bp, Homo sapien
cagctagttcaaatctggcaaactg

SEQ ID NO: 2312516 - DNA, 25 bp, Homo sapien
gctagttcaaatctggcaaactgga

SEQ ID NO: 2312517 - DNA, 25 bp, Homo sapien
ggccttcaatattctcctggatcac

SEQ ID NO: 2312518 - DNA, 25 bp, Homo sapien
gctatagctaatgttgggctcacag

SEQ ID NO: 2312519 - DNA, 25 bp, Homo sapien
gatttagctaaggactaaaggacca

SEQ ID NO: 2312520 - DNA, 25 bp, Homo sapien
caaataatgcactttcaactccgac

SEQ ID NO: 2312521 - DNA, 25 bp, Homo sapien
ctgggtgcacaaagctcggacgata

SEQ ID NO: 2312522 - DNA, 25 bp, Homo sapien
tgggtgcacaaagctcggacgatag

SEQ ID NO: 2312523 - DNA, 25 bp, Homo sapien
cctgggtgcacaaagctcggacgat

SEQ ID NO: 2312524 - DNA, 25 bp, Homo sapien
ccctgggtgcacaaagctcggacga

SEQ ID NO: 2312525 - DNA, 25 bp, Homo sapien
tgggccatgggaagatacagagagg

SEQ ID NO: 2312526 - DNA, 25 bp, Homo sapien
gatacagagaggctccaggaaatgc

SEQ ID NO: 2312527 - DNA, 25 bp, Homo sapien
ggaagatacagagaggctccaggaa

SEQ ID NO: 2312528 - DNA, 25 bp, Homo sapien
catgggaagatacagagaggctcca

SEQ ID NO: 2312529 - DNA, 25 bp, Homo sapien
ggaacctaaaggcccaacagccaca

SEQ ID NO: 2312530 - DNA, 25 bp, Homo sapien
aacctaaaggcccaacagccacaga

SEQ ID NO: 2312531 - DNA, 25 bp, Homo sapien
gaacctaaaggcccaacagccacag

SEQ ID NO: 2312532 - DNA, 25 bp, Homo sapien
aaatctggcacctgcatcataccct

SEQ ID NO: 2312533 - DNA, 25 bp, Homo sapien
aggaatgttgccagcagtagcccca

SEQ ID NO: 2312534 - DNA, 25 bp, Homo sapien
gaccgactggataataagccatggg

SEQ ID NO: 2312535 - DNA, 25 bp, Homo sapien
ccaggtggatagatgggaccgactg

SEQ ID NO: 2312536 - DNA, 25 bp, Homo sapien
aaatacacaagggctgagtttcttc

SEQ ID NO: 2312537 - DNA, 25 bp, Homo sapien
aatacacaagggctgagtttcttct

SEQ ID NO: 2312538 - DNA, 25 bp, Homo sapien
caaagggttccagctctaagatgaa

SEQ ID NO: 2312539 - DNA, 25 bp, Homo sapien
tgaggcaatgtgctaaccagctgcg

SEQ ID NO: 2312540 - DNA, 25 bp, Homo sapien
ttttgagggtagagaaccactgtcc

SEQ ID NO: 2312541 - DNA, 25 bp, Homo sapien
ttttaaggagctagttccgccacca

SEQ ID NO: 2312542 - DNA, 25 bp, Homo sapien
cgctgagttacgaggacgttggctc

SEQ ID NO: 2312543 - DNA, 25 bp, Homo sapien
gctgagttacgaggacgttggctcc

SEQ ID NO: 2312544 - DNA, 25 bp, Homo sapien
aatccttagggcggcttcacccaca

SEQ ID NO: 2312545 - DNA, 25 bp, Homo sapien
gtattactccagagaaattaaagga

SEQ ID NO: 2312546 - DNA, 25 bp, Homo sapien
tggtacagtattactccagagaaat

SEQ ID NO: 2312547 - DNA, 25 bp, Homo sapien
agtatggtacagtattactccagag

SEQ ID NO: 2312548 - DNA, 25 bp, Homo sapien
cattgattcaatggagactggcggg

SEQ ID NO: 2312549 - DNA, 25 bp, Homo sapien
aaagaaggaaattagtctgactggc

SEQ ID NO: 2312550 - DNA, 25 bp, Homo sapien
tcagaggatccttgtgaaacactag

SEQ ID NO: 2312551 - DNA, 25 bp, Homo sapien
ggcacagagagggtttcagaggatc

SEQ ID NO: 2312552 - DNA, 25 bp, Homo sapien
ggcaccctccacttttgcctgagga

SEQ ID NO: 2312553 - DNA, 25 bp, Homo sapien
taaggcaccctccacttttgcctga

SEQ ID NO: 2312554 - DNA, 25 bp, Homo sapien
gcaccctccacttttgcctgaggag

SEQ ID NO: 2312555 - DNA, 25 bp, Homo sapien
gcccataaggcaccctccacttttg

SEQ ID NO: 2312556 - DNA, 25 bp, Homo sapien
cagtcaatggtacagtcaaacatca

SEQ ID NO: 2312557 - DNA, 25 bp, Homo sapien
ttcacagtacagtttgcacgacatc

SEQ ID NO: 2312558 - DNA, 25 bp, Homo sapien
taggttcgtgtatgcagagacaacc

SEQ ID NO: 2312559 - DNA, 25 bp, Homo sapien
gcacgacatctttgttcaaacatag

SEQ ID NO: 2312560 - DNA, 25 bp, Homo sapien
agcagcagcacctagctgaattcta

SEQ ID NO: 2312561 - DNA, 25 bp, Homo sapien
gcctttatttcaaagcgtcatcaaa

SEQ ID NO: 2312562 - DNA, 25 bp, Homo sapien
gctgaattctagatgggatataaat

SEQ ID NO: 2312563 - DNA, 25 bp, Homo sapien
tttcaaagcgtcatcaaaggaaaca

SEQ ID NO: 2312564 - DNA, 25 bp, Homo sapien
gataccacagtaaaaggccaggcca

SEQ ID NO: 2312565 - DNA, 25 bp, Homo sapien
ggacatctgagtatgtgcccagtca

SEQ ID NO: 2312566 - DNA, 25 bp, Homo sapien
aatgccgacatcactgactccaggg

SEQ ID NO: 2312567 - DNA, 25 bp, Homo sapien
cacctagtgatagccccagtggaga

SEQ ID NO: 2312568 - DNA, 25 bp, Homo sapien
ggcttctgtcagaggcactaccagt

SEQ ID NO: 2312569 - DNA, 25 bp, Homo sapien
cttagcttaagcaccaggagactcc

SEQ ID NO: 2312570 - DNA, 25 bp, Homo sapien
catacggacgttacacttgagtacg

SEQ ID NO: 2312571 - DNA, 25 bp, Homo sapien
ggaggtggccgcaaatagatatgca

SEQ ID NO: 2312572 - DNA, 25 bp, Homo sapien
gaagaactgatgaccaccccaattt

SEQ ID NO: 2312573 - DNA, 25 bp, Homo sapien
tgcaggtaatagactctgagccaac

SEQ ID NO: 2312574 - DNA, 25 bp, Homo sapien
tgagccaactccaagggaccttctg

SEQ ID NO: 2312575 - DNA, 25 bp, Homo sapien
ccttctggatcaagggcatctctct

SEQ ID NO: 2312576 - DNA, 25 bp, Homo sapien
gctagtaaaggacagagttcatatt

SEQ ID NO: 2312577 - DNA, 25 bp, Homo sapien
gggagaaatccatcaacatattgtc

SEQ ID NO: 2312578 - DNA, 25 bp, Homo sapien
taatggcttatcctactgagtgact

SEQ ID NO: 2312579 - DNA, 25 bp, Homo sapien
acccagtctgtcaggctctatagcc

SEQ ID NO: 2312580 - DNA, 25 bp, Homo sapien
gaggatcttatgacccactatggga

SEQ ID NO: 2312581 - DNA, 25 bp, Homo sapien
gcttcatgatgtcagcattcccttc

SEQ ID NO: 2312582 - DNA, 25 bp, Homo sapien
cacatcataacacaaggctaacggg

SEQ ID NO: 2312583 - DNA, 25 bp, Homo sapien
cagccatgttcaactatgcggaagc

SEQ ID NO: 2312584 - DNA, 25 bp, Homo sapien
ctatgtgagcaagcgataaacaaat

SEQ ID NO: 2312585 - DNA, 25 bp, Homo sapien
tgagcaagcgataaacaaatgcaaa

SEQ ID NO: 2312586 - DNA, 25 bp, Homo sapien
tgtgagcaagcgataaacaaatgca

SEQ ID NO: 2312587 - DNA, 25 bp, Homo sapien
atgtgagcaagcgataaacaaatgc

SEQ ID NO: 2312588 - DNA, 25 bp, Homo sapien
cacaagaacgtccagctggcaagac

SEQ ID NO: 2312589 - DNA, 25 bp, Homo sapien
tttcctgccacaaacgagtgagtca

SEQ ID NO: 2312590 - DNA, 25 bp, Homo sapien
gagctgattccagtgcctgcgctat

SEQ ID NO: 2312591 - DNA, 25 bp, Homo sapien
ttgccccagataagagaaacggaac

SEQ ID NO: 2312592 - DNA, 25 bp, Homo sapien
gaggcaagaggactgactgagtctc

SEQ ID NO: 2312593 - DNA, 25 bp, Homo sapien
tcttcctaaactacaacaatgttat

SEQ ID NO: 2312594 - DNA, 25 bp, Homo sapien
aacaaaacgattatgattttacatc

SEQ ID NO: 2312595 - DNA, 25 bp, Homo sapien
tatctttacaattactttgctatgt

SEQ ID NO: 2312596 - DNA, 25 bp, Homo sapien
actatgatgcccaggctggtcttga

SEQ ID NO: 2312597 - DNA, 25 bp, Homo sapien
cctggagtgctgggattataggcgt

SEQ ID NO: 2312598 - DNA, 25 bp, Homo sapien
gccatcacacccagctaattttgtt

SEQ ID NO: 2312599 - DNA, 25 bp, Homo sapien
tgtttttggtagtgacaaggtttca

SEQ ID NO: 2312600 - DNA, 25 bp, Homo sapien
gcagtctccctgtgcttaagtcaga

SEQ ID NO: 2312601 - DNA, 25 bp, Homo sapien
cagcaggcttttccctaaagtgggc

SEQ ID NO: 2312602 - DNA, 25 bp, Homo sapien
gatcgtgtagtcatggcctaggaag

SEQ ID NO: 2312603 - DNA, 25 bp, Homo sapien
caacatcagaaagcctgggatcgtg

SEQ ID NO: 2312604 - DNA, 25 bp, Homo sapien
cagtgttacgtgcatcctaggttga

SEQ ID NO: 2312605 - DNA, 25 bp, Homo sapien
tctcatgcagtgtaaatcaccaggg

SEQ ID NO: 2312606 - DNA, 25 bp, Homo sapien
ggctaggcgcctactaaaactgtgg

SEQ ID NO: 2312607 - DNA, 25 bp, Homo sapien
tgtgtccatcatgtagcacgggccc

SEQ ID NO: 2312608 - DNA, 25 bp, Homo sapien
tgccttcgctctctgctggtcgcgg

SEQ ID NO: 2312609 - DNA, 25 bp, Homo sapien
cactacccccgacagtaaaatgaag

SEQ ID NO: 2312610 - DNA, 25 bp, Homo sapien
gcctgtagctcctccctcggtagga

SEQ ID NO: 2312611 - DNA, 25 bp, Homo sapien
aggctggtccctcctgccttcgctc

SEQ ID NO: 2312612 - DNA, 25 bp, Homo sapien
tgactaggaccctccaatctttttc

SEQ ID NO: 2312613 - DNA, 25 bp, Homo sapien
agcacattccggttccatgcacccg

SEQ ID NO: 2312614 - DNA, 25 bp, Homo sapien
cgggctgagacgcagagaagccggg

SEQ ID NO: 2312615 - DNA, 25 bp, Homo sapien
gcgctgaaagcctggccgcaaagac

SEQ ID NO: 2312616 - DNA, 25 bp, Homo sapien
gttcatggcacacggaatacgagct

SEQ ID NO: 2312617 - DNA, 25 bp, Homo sapien
cacggaatacgagctcttgttggat

SEQ ID NO: 2312618 - DNA, 25 bp, Homo sapien
tcttgttggatggagcacaaatgag

SEQ ID NO: 2312619 - DNA, 25 bp, Homo sapien
gatggagcacaaatgagaagcaaac

SEQ ID NO: 2312620 - DNA, 25 bp, Homo sapien
cagcagatgtaatttagaagaccca

SEQ ID NO: 2312621 - DNA, 25 bp, Homo sapien
ccctagctaagtggagccagcacct

SEQ ID NO: 2312622 - DNA, 25 bp, Homo sapien
ccgtgtggaaggaagagactagata

SEQ ID NO: 2312623 - DNA, 25 bp, Homo sapien
gaatatgcaggaaagtagagcagca

SEQ ID NO: 2312624 - DNA, 25 bp, Homo sapien
catcaccatgcccagctaatttttt

SEQ ID NO: 2312625 - DNA, 25 bp, Homo sapien
gggattataggaacgcatcaccatg

SEQ ID NO: 2312626 - DNA, 25 bp, Homo sapien
gtattttagtagagacagcgtttca

SEQ ID NO: 2312627 - DNA, 25 bp, Homo sapien
ctgggattataggaacgcatcacca

SEQ ID NO: 2312628 - DNA, 25 bp, Homo sapien
tctaaatttcacaacagactctata

SEQ ID NO: 2312629 - DNA, 25 bp, Homo sapien
taaatttcacaacagactctatata

SEQ ID NO: 2312630 - DNA, 25 bp, Homo sapien
tcacaacagactctatataattgtc

SEQ ID NO: 2312631 - DNA, 25 bp, Homo sapien
tttcacaacagactctatataattg

SEQ ID NO: 2312632 - DNA, 25 bp, Homo sapien
ggctccactgatccttctgttcagg

SEQ ID NO: 2312633 - DNA, 25 bp, Homo sapien
ctcagtaaagtttaggtatcctggg

SEQ ID NO: 2312634 - DNA, 25 bp, Homo sapien
tagcgaggagtgcttctgagtttgt

SEQ ID NO: 2312635 - DNA, 25 bp, Homo sapien
gttcaggcttgagtggccccaactc

SEQ ID NO: 2312636 - DNA, 25 bp, Homo sapien
agggagcatggccttgtagatttct

SEQ ID NO: 2312637 - DNA, 25 bp, Homo sapien
tttcttcagcactgtgagacaataa

SEQ ID NO: 2312638 - DNA, 25 bp, Homo sapien
ctgtgagacaataaacatgcttgga

SEQ ID NO: 2312639 - DNA, 25 bp, Homo sapien
gacaataaacatgcttggagccacc

SEQ ID NO: 2312640 - DNA, 25 bp, Homo sapien
agggcttgttcgtgctgtcgtctgg

SEQ ID NO: 2312641 - DNA, 25 bp, Homo sapien
gcttgttcgtgctgtcgtctgggag

SEQ ID NO: 2312642 - DNA, 25 bp, Homo sapien
ggcttgttcgtgctgtcgtctggga

SEQ ID NO: 2312643 - DNA, 25 bp, Homo sapien
ttagggcttgttcgtgctgtcgtct

SEQ ID NO: 2312644 - DNA, 25 bp, Homo sapien
gagcagatcactcgaacggcgaccc

SEQ ID NO: 2312645 - DNA, 25 bp, Homo sapien
cgcgccctctggtcgggtctgagca

SEQ ID NO: 2312646 - DNA, 25 bp, Homo sapien
tggtcgggtctgagcagatcactcg

SEQ ID NO: 2312647 - DNA, 25 bp, Homo sapien
ggagccaacggtcaaccatcaaccg

SEQ ID NO: 2312648 - DNA, 25 bp, Homo sapien
gctcgttactcccggcggccggcat

SEQ ID NO: 2312649 - DNA, 25 bp, Homo sapien
tgatagctgaggacgccgtccggct

SEQ ID NO: 2312650 - DNA, 25 bp, Homo sapien
ctgatagctgaggacgccgtccggc

SEQ ID NO: 2312651 - DNA, 25 bp, Homo sapien
ggctcgttactcccggcggccggca

SEQ ID NO: 2312652 - DNA, 25 bp, Homo sapien
gccccttccaacagaaagacgcgag

SEQ ID NO: 2312653 - DNA, 25 bp, Homo sapien
agatcccaggttcggcccaaggtca

SEQ ID NO: 2312654 - DNA, 25 bp, Homo sapien
cacgttctggcaggacaacgcgagg

SEQ ID NO: 2312655 - DNA, 25 bp, Homo sapien
cgaggagaacaagaggtcgccgccc

SEQ ID NO: 2312656 - DNA, 25 bp, Homo sapien
gtgaatgttgagaattgtactggtc

SEQ ID NO: 2312657 - DNA, 25 bp, Homo sapien
gagaattgtactggtcccaccctga

SEQ ID NO: 2312658 - DNA, 25 bp, Homo sapien
aattgtactggtcccaccctgatcc

SEQ ID NO: 2312659 - DNA, 25 bp, Homo sapien
tgttgagaattgtactggtcccacc

SEQ ID NO: 2312660 - DNA, 25 bp, Homo sapien
ttcaccgtgttcaaagcactatctc

SEQ ID NO: 2312661 - DNA, 25 bp, Homo sapien
ggcagttgtcaagaattaacgcact

SEQ ID NO: 2312662 - DNA, 25 bp, Homo sapien
gcactatctcccatgtaggcaatta

SEQ ID NO: 2312663 - DNA, 25 bp, Homo sapien
gaactgagtacatcacattctcaaa

SEQ ID NO: 2312664 - DNA, 25 bp, Homo sapien
gaggttgtacaactttgatgaaaaa

SEQ ID NO: 2312665 - DNA, 25 bp, Homo sapien
tctggaggttgtacaactttgatga

SEQ ID NO: 2312666 - DNA, 25 bp, Homo sapien
agccacccacgtcagttctcatggt

SEQ ID NO: 2312667 - DNA, 25 bp, Homo sapien
cccacgtcagttctcatggtaacag

SEQ ID NO: 2312668 - DNA, 25 bp, Homo sapien
ttcttccatctggtcaaaataactt

SEQ ID NO: 2312669 - DNA, 25 bp, Homo sapien
atgttctcttcttccatctggtcaa

SEQ ID NO: 2312670 - DNA, 25 bp, Homo sapien
tcttcttccatctggtcaaaataac

SEQ ID NO: 2312671 - DNA, 25 bp, Homo sapien
tctcttcttccatctggtcaaaata

SEQ ID NO: 2312672 - DNA, 25 bp, Homo sapien
cccatctaactcgtcattctttttt

SEQ ID NO: 2312673 - DNA, 25 bp, Homo sapien
aagaagcagaaggtctgtggagaga

SEQ ID NO: 2312674 - DNA, 25 bp, Homo sapien
gaagcagaaggtctgtggagagaac

SEQ ID NO: 2312675 - DNA, 25 bp, Homo sapien
tatagagattttggagttgaaggtc

SEQ ID NO: 2312676 - DNA, 25 bp, Homo sapien
ttccaggagtaaagatatagagatt

SEQ ID NO: 2312677 - DNA, 25 bp, Homo sapien
ggcatccgaactcccacatacagag

SEQ ID NO: 2312678 - DNA, 25 bp, Homo sapien
cctcgtctccggtgcttctggccat

SEQ ID NO: 2312679 - DNA, 25 bp, Homo sapien
tgatgccgatggctctgccggccaa

SEQ ID NO: 2312680 - DNA, 25 bp, Homo sapien
cttctggccatgagtgcggtgatgc

SEQ ID NO: 2312681 - DNA, 25 bp, Homo sapien
tcttcatcttcctcggtgccaagaa

SEQ ID NO: 2312682 - DNA, 25 bp, Homo sapien
cagctcatgaggcacatgctcttca

SEQ ID NO: 2312683 - DNA, 25 bp, Homo sapien
tttcatacagatctcatccagctct

SEQ ID NO: 2312684 - DNA, 25 bp, Homo sapien
aactgaacacgctgagatggtgtgt

SEQ ID NO: 2312685 - DNA, 25 bp, Homo sapien
cctcattaaccctgcagttgtggaa

SEQ ID NO: 2312686 - DNA, 25 bp, Homo sapien
aagagagaatcttcgatgtgagcca

SEQ ID NO: 2312687 - DNA, 25 bp, Homo sapien
tagaacactgcaagattgagtatag

SEQ ID NO: 2312688 - DNA, 25 bp, Homo sapien
aatctaatctgtatgttcagggtac

SEQ ID NO: 2312689 - DNA, 25 bp, Homo sapien
atttgcatgcatatccaggaggact

SEQ ID NO: 2312690 - DNA, 25 bp, Homo sapien
ggaggactgttccattaataaggca

SEQ ID NO: 2312691 - DNA, 25 bp, Homo sapien
tccttagctcaaacaggctgtgcaa

SEQ ID NO: 2312692 - DNA, 25 bp, Homo sapien
ggctgtgcaatgaaagggttgccac

SEQ ID NO: 2312693 - DNA, 25 bp, Homo sapien
ccaggaaggttgtggcttgcccaag

SEQ ID NO: 2312694 - DNA, 25 bp, Homo sapien
ggtagagtcgtttattagcctgaaa

SEQ ID NO: 2312695 - DNA, 25 bp, Homo sapien
ccaaggacacacaacccactgtatt

SEQ ID NO: 2312696 - DNA, 25 bp, Homo sapien
tacacctgtgaagtaggtagagtcg

SEQ ID NO: 2312697 - DNA, 25 bp, Homo sapien
gctccactagggtcattgaggtgca

SEQ ID NO: 2312698 - DNA, 25 bp, Homo sapien
cattgaggtgcaatttcagcttcct

SEQ ID NO: 2312699 - DNA, 25 bp, Homo sapien
cactcagattgagggttaatgaacc

SEQ ID NO: 2312700 - DNA, 25 bp, Homo sapien
acccaagaaggccaacatcaggtgg

SEQ ID NO: 2312701 - DNA, 25 bp, Homo sapien
cattcaggtcactggacagttcttg

SEQ ID NO: 2312702 - DNA, 25 bp, Homo sapien
cctcagcaaaggagcgaacaatggg

SEQ ID NO: 2312703 - DNA, 25 bp, Homo sapien
gaggatcagactgcttcttgccaac

SEQ ID NO: 2312704 - DNA, 25 bp, Homo sapien
tgagaagggcttcccgcactttaac

SEQ ID NO: 2312705 - DNA, 25 bp, Homo sapien
tacttcaagatttgtagttggaaca

SEQ ID NO: 2312706 - DNA, 25 bp, Homo sapien
acagactgaggagacacggtttgac

SEQ ID NO: 2312707 - DNA, 25 bp, Homo sapien
aggactatgttcacaattcactcca

SEQ ID NO: 2312708 - DNA, 25 bp, Homo sapien
cttgcttaaatccacaggactatgt

SEQ ID NO: 2312709 - DNA, 25 bp, Homo sapien
ctgaaagtccaaaagaaacatctga

SEQ ID NO: 2312710 - DNA, 25 bp, Homo sapien
tgaaagtccaaaagaaacatctgac

SEQ ID NO: 2312711 - DNA, 25 bp, Homo sapien
gaaagtccaaaagaaacatctgaca

SEQ ID NO: 2312712 - DNA, 25 bp, Homo sapien
aaagtccaaaagaaacatctgacaa

SEQ ID NO: 2312713 - DNA, 25 bp, Homo sapien
cacctctccaaccaggacattggag

SEQ ID NO: 2312714 - DNA, 25 bp, Homo sapien
gcctcacaaaggcaacaatgggacg

SEQ ID NO: 2312715 - DNA, 25 bp, Homo sapien
atgggacggtccaaaatatccacct

SEQ ID NO: 2312716 - DNA, 25 bp, Homo sapien
gttaggcctgagagaagaacagctg

SEQ ID NO: 2312717 - DNA, 25 bp, Homo sapien
gctgacctttccctactggacccaa

SEQ ID NO: 2312718 - DNA, 25 bp, Homo sapien
tttccctactggacccaataagata

SEQ ID NO: 2312719 - DNA, 25 bp, Homo sapien
tgacctttccctactggacccaata

SEQ ID NO: 2312720 - DNA, 25 bp, Homo sapien
ttccctactggacccaataagataa

SEQ ID NO: 2312721 - DNA, 25 bp, Homo sapien
gagcagtgcagtccttaccagagta

SEQ ID NO: 2312722 - DNA, 25 bp, Homo sapien
tagagcttggtccttccacactggg

SEQ ID NO: 2312723 - DNA, 25 bp, Homo sapien
aatcagctttcccacgttgagaggg

SEQ ID NO: 2312724 - DNA, 25 bp, Homo sapien
tactttgcagcttaccgagcagtgc

SEQ ID NO: 2312725 - DNA, 25 bp, Homo sapien
taggaactcatcaatccccgccagg

SEQ ID NO: 2312726 - DNA, 25 bp, Homo sapien
gaagggacatttttgggtggctcaa

SEQ ID NO: 2312727 - DNA, 25 bp, Homo sapien
ggagcaccgtcacctggtctaggaa

SEQ ID NO: 2312728 - DNA, 25 bp, Homo sapien
caattctaatggagggatcccactc

SEQ ID NO: 2312729 - DNA, 25 bp, Homo sapien
attgttttgatattctaggtgcacc

SEQ ID NO: 2312730 - DNA, 25 bp, Homo sapien
tctaggtgcaccaaaacagagctgc

SEQ ID NO: 2312731 - DNA, 25 bp, Homo sapien
taagtgacaatagccacattggctg

SEQ ID NO: 2312732 - DNA, 25 bp, Homo sapien
tgatatatttagcatatacccacat

SEQ ID NO: 2312733 - DNA, 25 bp, Homo sapien
aacatttccatttggaactccaggc

SEQ ID NO: 2312734 - DNA, 25 bp, Homo sapien
ctatgtggcaaacatttccatttgg

SEQ ID NO: 2312735 - DNA, 25 bp, Homo sapien
catttggaactccaggcattttcct

SEQ ID NO: 2312736 - DNA, 25 bp, Homo sapien
tttccatttggaactccaggcattt

SEQ ID NO: 2312737 - DNA, 25 bp, Homo sapien
gcccagtgcgctgaagttctggccc

SEQ ID NO: 2312738 - DNA, 25 bp, Homo sapien
cgcccagtgcgctgaagttctggcc

SEQ ID NO: 2312739 - DNA, 25 bp, Homo sapien
agtagcagcagatacttggtgccaa

SEQ ID NO: 2312740 - DNA, 25 bp, Homo sapien
tagcagcagatacttggtgccaagc

SEQ ID NO: 2312741 - DNA, 25 bp, Homo sapien
gtagcagcagatacttggtgccaag

SEQ ID NO: 2312742 - DNA, 25 bp, Homo sapien
caaacactgtaagctgagtgcatct

SEQ ID NO: 2312743 - DNA, 25 bp, Homo sapien
catgcaggcacagtacaggaacaga

SEQ ID NO: 2312744 - DNA, 25 bp, Homo sapien
gggccttccgcttgatgtccagcac

SEQ ID NO: 2312745 - DNA, 25 bp, Homo sapien
gagtgcatctcggtagtcgctccag

SEQ ID NO: 2312746 - DNA, 25 bp, Homo sapien
ttcccaggatggtgagagcctgtcc

SEQ ID NO: 2312747 - DNA, 25 bp, Homo sapien
ggaataagcaatcccagtcatggaa

SEQ ID NO: 2312748 - DNA, 25 bp, Homo sapien
tttcaaacacaagcactggtccagt

SEQ ID NO: 2312749 - DNA, 25 bp, Homo sapien
gagcctgtcccgcaaacaaggaata

SEQ ID NO: 2312750 - DNA, 25 bp, Homo sapien
gttgccacaaggacaatacacagga

SEQ ID NO: 2312751 - DNA, 25 bp, Homo sapien
tccaatacaagctcgcagggagagg

SEQ ID NO: 2312752 - DNA, 25 bp, Homo sapien
gcagacaagggaactggcatcagtt

SEQ ID NO: 2312753 - DNA, 25 bp, Homo sapien
ggaaagcggtccacagtccaataca

SEQ ID NO: 2312754 - DNA, 25 bp, Homo sapien
taaaaataagcagaaagcacactta

SEQ ID NO: 2312755 - DNA, 25 bp, Homo sapien
aaaaataagcagaaagcacacttac

SEQ ID NO: 2312756 - DNA, 25 bp, Homo sapien
ttaaaaataagcagaaagcacactt

SEQ ID NO: 2312757 - DNA, 25 bp, Homo sapien
tagaacaactggtttaaaggctgtc

SEQ ID NO: 2312758 - DNA, 25 bp, Homo sapien
gaacaactggtttaaaggctgtcag

SEQ ID NO: 2312759 - DNA, 25 bp, Homo sapien
ctgtcaggagctgccttgctgcttc

SEQ ID NO: 2312760 - DNA, 25 bp, Homo sapien
aacagccaaatactcagttaaatgt

SEQ ID NO: 2312761 - DNA, 25 bp, Homo sapien
tactggagggtgtgattgtttggat

SEQ ID NO: 2312762 - DNA, 25 bp, Homo sapien
gacttctgctgtcacgatgttgtgg

SEQ ID NO: 2312763 - DNA, 25 bp, Homo sapien
caggttagcccagtggacttctgct

SEQ ID NO: 2312764 - DNA, 25 bp, Homo sapien
tgtggtccttccagtactggagggt

SEQ ID NO: 2312765 - DNA, 25 bp, Homo sapien
tgtggtcacaatgctaggacatctg

SEQ ID NO: 2312766 - DNA, 25 bp, Homo sapien
aacctgtggtcacaatgctaggaca

SEQ ID NO: 2312767 - DNA, 25 bp, Homo sapien
ggtcacaatgctaggacatctggca

SEQ ID NO: 2312768 - DNA, 25 bp, Homo sapien
cctcctaaacctgtggtcacaatgc

SEQ ID NO: 2312769 - DNA, 25 bp, Homo sapien
gagtttggccaaagggctactcctc

SEQ ID NO: 2312770 - DNA, 25 bp, Homo sapien
gagaatacaggaccaaaagaggaca

SEQ ID NO: 2312771 - DNA, 25 bp, Homo sapien
tgtagggtccatgatggccgcacgc

SEQ ID NO: 2312772 - DNA, 25 bp, Homo sapien
tctggttgggaaataacggctcgtc

SEQ ID NO: 2312773 - DNA, 25 bp, Homo sapien
taaacgtctttaaggtgcttgagag

SEQ ID NO: 2312774 - DNA, 25 bp, Homo sapien
gtgaaagaaatgcatgaacatgcta

SEQ ID NO: 2312775 - DNA, 25 bp, Homo sapien
tgaaagaaatgcatgaacatgctac

SEQ ID NO: 2312776 - DNA, 25 bp, Homo sapien
tctatatgaaacaccaagaaggttt

SEQ ID NO: 2312777 - DNA, 25 bp, Homo sapien
aatgccgtaaataatgccccgccca

SEQ ID NO: 2312778 - DNA, 25 bp, Homo sapien
tataggtcagaaattattgtgtgca

SEQ ID NO: 2312779 - DNA, 25 bp, Homo sapien
ggccacataaataggtttctctgaa

SEQ ID NO: 2312780 - DNA, 25 bp, Homo sapien
ggactcctaacaagctgataatcag

SEQ ID NO: 2312781 - DNA, 25 bp, Homo sapien
catgtctcacacagaggactcctaa

SEQ ID NO: 2312782 - DNA, 25 bp, Homo sapien
gataatcagttgacccaatccacgt

SEQ ID NO: 2312783 - DNA, 25 bp, Homo sapien
aataaagaatagcacttggccaggc

SEQ ID NO: 2312784 - DNA, 25 bp, Homo sapien
tgaacacactgggaacttgaagctt

SEQ ID NO: 2312785 - DNA, 25 bp, Homo sapien
tttggtgatgggactccaatcaaaa

SEQ ID NO: 2312786 - DNA, 25 bp, Homo sapien
cttgaacacactgggaacttgaagc

SEQ ID NO: 2312787 - DNA, 25 bp, Homo sapien
acttgaagctttggtgatgggactc

SEQ ID NO: 2312788 - DNA, 25 bp, Homo sapien
accaagtactctgagatctgtttac

SEQ ID NO: 2312789 - DNA, 25 bp, Homo sapien
gcaccaagtactctgagatctgttt

SEQ ID NO: 2312790 - DNA, 25 bp, Homo sapien
agtgcaccaagtactctgagatctg

SEQ ID NO: 2312791 - DNA, 25 bp, Homo sapien
atgagtgcaccaagtactctgagat

SEQ ID NO: 2312792 - DNA, 25 bp, Homo sapien
gggccaatgggattaataatccatc

SEQ ID NO: 2312793 - DNA, 25 bp, Homo sapien
ggataattgcagctatcacagtcca

SEQ ID NO: 2312794 - DNA, 25 bp, Homo sapien
gggattaataatccatccgcgatca

SEQ ID NO: 2312795 - DNA, 25 bp, Homo sapien
tccatccgcgatcatcccttgttgg

SEQ ID NO: 2312796 - DNA, 25 bp, Homo sapien
tgttaataatgacggctgtgatctg

SEQ ID NO: 2312797 - DNA, 25 bp, Homo sapien
gttaataatgacggctgtgatctgc

SEQ ID NO: 2312798 - DNA, 25 bp, Homo sapien
ctgttaataatgacggctgtgatct

SEQ ID NO: 2312799 - DNA, 25 bp, Homo sapien
cctgttaataatgacggctgtgatc

SEQ ID NO: 2312800 - DNA, 25 bp, Homo sapien
tggaagattaaccagacaccctgcc

SEQ ID NO: 2312801 - DNA, 25 bp, Homo sapien
tacctgcctctaggaaacagtggcc

SEQ ID NO: 2312802 - DNA, 25 bp, Homo sapien
tatagggatcaccaggaactctacc

SEQ ID NO: 2312803 - DNA, 25 bp, Homo sapien
tatagtaacagacaccagtgggaga

SEQ ID NO: 2312804 - DNA, 25 bp, Homo sapien
gacaagacagttgcagctacaaacc

SEQ ID NO: 2312805 - DNA, 25 bp, Homo sapien
tcagcacaaagatcataaggcctgt

SEQ ID NO: 2312806 - DNA, 25 bp, Homo sapien
tagccgtcatgaagactgagcagcc

SEQ ID NO: 2312807 - DNA, 25 bp, Homo sapien
taaggcctgtcactctctgttctcg

SEQ ID NO: 2312808 - DNA, 25 bp, Homo sapien
aggaaaactccgtagagtactggca

SEQ ID NO: 2312809 - DNA, 25 bp, Homo sapien
tagtgaagaaactcccatgtaaagg

SEQ ID NO: 2312810 - DNA, 25 bp, Homo sapien
ccgtagagtactggcattggaataa

SEQ ID NO: 2312811 - DNA, 25 bp, Homo sapien
ctgaattccctgtagtgaagaaact

SEQ ID NO: 2312812 - DNA, 25 bp, Homo sapien
atttattttcaggagggcattctgg

SEQ ID NO: 2312813 - DNA, 25 bp, Homo sapien
ttattttcaggagggcattctgggt

SEQ ID NO: 2312814 - DNA, 25 bp, Homo sapien
ttttcaggagggcattctgggtcag

SEQ ID NO: 2312815 - DNA, 25 bp, Homo sapien
ttcaggagggcattctgggtcagaa

SEQ ID NO: 2312816 - DNA, 25 bp, Homo sapien
cagagcaggacgagacaggtcaact

SEQ ID NO: 2312817 - DNA, 25 bp, Homo sapien
cccaaagagctttagacgatcaaag

SEQ ID NO: 2312818 - DNA, 25 bp, Homo sapien
catgccgcaggtagatgaaatctgg

SEQ ID NO: 2312819 - DNA, 25 bp, Homo sapien
agctggagatgccttgatgacccag

SEQ ID NO: 2312820 - DNA, 25 bp, Homo sapien
tctttttggcatcatccaacttctt

SEQ ID NO: 2312821 - DNA, 25 bp, Homo sapien
catgagatcatctagccagctcagc

SEQ ID NO: 2312822 - DNA, 25 bp, Homo sapien
aaacagagatccatgactttcctga

SEQ ID NO: 2312823 - DNA, 25 bp, Homo sapien
cagctctcgcttagagaaacagaga

SEQ ID NO: 2312824 - DNA, 25 bp, Homo sapien
gtatacagttggtgcaaggactatg

SEQ ID NO: 2312825 - DNA, 25 bp, Homo sapien
tatacagttggtgcaaggactatga

SEQ ID NO: 2312826 - DNA, 25 bp, Homo sapien
atacagttggtgcaaggactatgac

SEQ ID NO: 2312827 - DNA, 25 bp, Homo sapien
taaccctcgggattccagacatgct

SEQ ID NO: 2312828 - DNA, 25 bp, Homo sapien
gacagaaagtcctatgcaagttatc

SEQ ID NO: 2312829 - DNA, 25 bp, Homo sapien
tgagcctggtgagtagattgtaaac

SEQ ID NO: 2312830 - DNA, 25 bp, Homo sapien
caagatgccaagtgctgagggaaat

SEQ ID NO: 2312831 - DNA, 25 bp, Homo sapien
agatgctgcacaatcatttctttga

SEQ ID NO: 2312832 - DNA, 25 bp, Homo sapien
tattaacatgtctcaacttatctgt

SEQ ID NO: 2312833 - DNA, 25 bp, Homo sapien
gaaatttttgtcataaggcaactgg

SEQ ID NO: 2312834 - DNA, 25 bp, Homo sapien
tatatatgtccattgctcatttcaa

SEQ ID NO: 2312835 - DNA, 25 bp, Homo sapien
catattaaaaactggtcaacatcat

SEQ ID NO: 2312836 - DNA, 25 bp, Homo sapien
catgtttttgattaggtgtattccc

SEQ ID NO: 2312837 - DNA, 25 bp, Homo sapien
ccctctagagagtgctttcatgttt

SEQ ID NO: 2312838 - DNA, 25 bp, Homo sapien
tattggtgcatagaagcgaaagggc

SEQ ID NO: 2312839 - DNA, 25 bp, Homo sapien
tgttctttccaggactacttagtaa

SEQ ID NO: 2312840 - DNA, 25 bp, Homo sapien
atgttctttccaggactacttagta

SEQ ID NO: 2312841 - DNA, 25 bp, Homo sapien
tccaggactacttagtaacttcctg

SEQ ID NO: 2312842 - DNA, 25 bp, Homo sapien
ccaggactacttagtaacttcctgc

SEQ ID NO: 2312843 - DNA, 25 bp, Homo sapien
ttcatcagatatattaatctcagag

SEQ ID NO: 2312844 - DNA, 25 bp, Homo sapien
tatattaatctcagaggggtcacat

SEQ ID NO: 2312845 - DNA, 25 bp, Homo sapien
agagctttccaaactgtagttttag

SEQ ID NO: 2312846 - DNA, 25 bp, Homo sapien
cagaattcatactgagagctttcca

SEQ ID NO: 2312847 - DNA, 25 bp, Homo sapien
gcatatagcctacctcaatgcaggc

SEQ ID NO: 2312848 - DNA, 25 bp, Homo sapien
aaagttgactttaggaaggcctcag

SEQ ID NO: 2312849 - DNA, 25 bp, Homo sapien
ccactggtggctgtgacttttcaga

SEQ ID NO: 2312850 - DNA, 25 bp, Homo sapien
gaattaatcgaaggactaggtctcc

SEQ ID NO: 2312851 - DNA, 25 bp, Homo sapien
gaataactgaatgcttcggcatggc

SEQ ID NO: 2312852 - DNA, 25 bp, Homo sapien
tctgtaaccagaacttccctgaggc

SEQ ID NO: 2312853 - DNA, 25 bp, Homo sapien
ttctctgagagactcgccattttct

SEQ ID NO: 2312854 - DNA, 25 bp, Homo sapien
tcggcatggctttgagatgaccaag

SEQ ID NO: 2312855 - DNA, 25 bp, Homo sapien
gcttccacattcacatctggtgact

SEQ ID NO: 2312856 - DNA, 25 bp, Homo sapien
gactggctgctggtatggggatagc

SEQ ID NO: 2312857 - DNA, 25 bp, Homo sapien
gtatggggatagctggatgccttcc

SEQ ID NO: 2312858 - DNA, 25 bp, Homo sapien
ctgcttccacattcacatctggtga

SEQ ID NO: 2312859 - DNA, 25 bp, Homo sapien
tacgtaagcacttggatctcgccag

SEQ ID NO: 2312860 - DNA, 25 bp, Homo sapien
gatgatcgtttactctaaggcagct

SEQ ID NO: 2312861 - DNA, 25 bp, Homo sapien
gaaaggtttataagcactggatccc

SEQ ID NO: 2312862 - DNA, 25 bp, Homo sapien
caagaagtcgaagagtcccgcaaaa

SEQ ID NO: 2312863 - DNA, 25 bp, Homo sapien
tcaaggcagcacaagacatccgtgt

SEQ ID NO: 2312864 - DNA, 25 bp, Homo sapien
gatactctcacccagttttgataca

SEQ ID NO: 2312865 - DNA, 25 bp, Homo sapien
gatacactccttacagctgtgctga

SEQ ID NO: 2312866 - DNA, 25 bp, Homo sapien
catccgtgtgttaggggaggcattt

SEQ ID NO: 2312867 - DNA, 25 bp, Homo sapien
tggaaccgctgttgggacctacaat

SEQ ID NO: 2312868 - DNA, 25 bp, Homo sapien
tgaactgcaactgtacggaggcaac

SEQ ID NO: 2312869 - DNA, 25 bp, Homo sapien
tagctaacattcctaaggcgcagtg

SEQ ID NO: 2312870 - DNA, 25 bp, Homo sapien
tcgagaagtaccctaaagtgcacag

SEQ ID NO: 2312871 - DNA, 25 bp, Homo sapien
cttgatggaaaggtcgagaaacttc

SEQ ID NO: 2312872 - DNA, 25 bp, Homo sapien
agatccttgatggaaaggtcgagaa

SEQ ID NO: 2312873 - DNA, 25 bp, Homo sapien
gaaaggtcgagaaacttcaaattga

SEQ ID NO: 2312874 - DNA, 25 bp, Homo sapien
gatggaaaggtcgagaaacttcaaa

SEQ ID NO: 2312875 - DNA, 25 bp, Homo sapien
gagaaagctatcagtcccatgtggt

SEQ ID NO: 2312876 - DNA, 25 bp, Homo sapien
taatgagtcaaaggccacaaccagt

SEQ ID NO: 2312877 - DNA, 25 bp, Homo sapien
catgtggtttccctacgtgaaggca

SEQ ID NO: 2312878 - DNA, 25 bp, Homo sapien
cttgccgttaagagatcctggtgcc

SEQ ID NO: 2312879 - DNA, 25 bp, Homo sapien
cctgctaggatgtggcttggaaacc

SEQ ID NO: 2312880 - DNA, 25 bp, Homo sapien
gacttctacctaatgggaggcccaa

SEQ ID NO: 2312881 - DNA, 25 bp, Homo sapien
taatgtaagccaacctgacagaagg

SEQ ID NO: 2312882 - DNA, 25 bp, Homo sapien
tctgagatatcaaccaagcctggga

SEQ ID NO: 2312883 - DNA, 25 bp, Homo sapien
gcaggcagagttctatgagatgcag

SEQ ID NO: 2312884 - DNA, 25 bp, Homo sapien
attgaggtgagcacacaaaaatctg

SEQ ID NO: 2312885 - DNA, 25 bp, Homo sapien
gaggtgagcacacaaaaatctgggc

SEQ ID NO: 2312886 - DNA, 25 bp, Homo sapien
gcagagttctatgagatgcagtgtc

SEQ ID NO: 2312887 - DNA, 25 bp, Homo sapien
gaccactgtcaggtagactgaaacc

SEQ ID NO: 2312888 - DNA, 25 bp, Homo sapien
tcaggtagactgaaaccatggctcc

SEQ ID NO: 2312889 - DNA, 25 bp, Homo sapien
actgtcaggtagactgaaaccatgg

SEQ ID NO: 2312890 - DNA, 25 bp, Homo sapien
tgaccactgtcaggtagactgaaac

SEQ ID NO: 2312891 - DNA, 25 bp, Homo sapien
ttgcctggaccctcctggatgtctc

SEQ ID NO: 2312892 - DNA, 25 bp, Homo sapien
gaccccagacttcagcttgcctgga

SEQ ID NO: 2312893 - DNA, 25 bp, Homo sapien
ctgctggaccccagacttcagcttg

SEQ ID NO: 2312894 - DNA, 25 bp, Homo sapien
cctggatgtctctggtcctgagcat

SEQ ID NO: 2312895 - DNA, 25 bp, Homo sapien
tccaccttcctggttgggactttgc

SEQ ID NO: 2312896 - DNA, 25 bp, Homo sapien
aagactctggttccagggatttgat

SEQ ID NO: 2312897 - DNA, 25 bp, Homo sapien
gatgaagactctggttccagggatt

SEQ ID NO: 2312898 - DNA, 25 bp, Homo sapien
ggactttgcccgtgggatgaagact

SEQ ID NO: 2312899 - DNA, 25 bp, Homo sapien
agcggcacctggggagctcgctcat

SEQ ID NO: 2312900 - DNA, 25 bp, Homo sapien
cagggaggaggagcggcacctgggg

SEQ ID NO: 2312901 - DNA, 25 bp, Homo sapien
gaggagcggcacctggggagctcgc

SEQ ID NO: 2312902 - DNA, 25 bp, Homo sapien
gaggaggagcggcacctggggagct

SEQ ID NO: 2312903 - DNA, 25 bp, Homo sapien
tctgattgccttgtctgcctgtttg

SEQ ID NO: 2312904 - DNA, 25 bp, Homo sapien
tgcctgtgcggcgttgtcaagactc

SEQ ID NO: 2312905 - DNA, 25 bp, Homo sapien
ggtgatgtccactctctgattgcct

SEQ ID NO: 2312906 - DNA, 25 bp, Homo sapien
cccacgtgtgggctgtcttgatggt

SEQ ID NO: 2312907 - DNA, 25 bp, Homo sapien
ggaagatgtcgctccctctagccat

SEQ ID NO: 2312908 - DNA, 25 bp, Homo sapien
atgtggaagatgtcgctccctctag

SEQ ID NO: 2312909 - DNA, 25 bp, Homo sapien
tggaagatgtcgctccctctagcca

SEQ ID NO: 2312910 - DNA, 25 bp, Homo sapien
tgtggaagatgtcgctccctctagc

SEQ ID NO: 2312911 - DNA, 25 bp, Homo sapien
tctgacatccaaaagcgcagggaac

SEQ ID NO: 2312912 - DNA, 25 bp, Homo sapien
ctcaatttacaggatcttgggccca

SEQ ID NO: 2312913 - DNA, 25 bp, Homo sapien
cgcagggaactcaatttacaggatc

SEQ ID NO: 2312914 - DNA, 25 bp, Homo sapien
aacagtgccgcgctcagtgaagttt

SEQ ID NO: 2312915 - DNA, 25 bp, Homo sapien
ccggactgcaaaggcgccgaggatg

SEQ ID NO: 2312916 - DNA, 25 bp, Homo sapien
gaggcgcggccggactgcaaaggcg

SEQ ID NO: 2312917 - DNA, 25 bp, Homo sapien
cggccggactgcaaaggcgccgagg

SEQ ID NO: 2312918 - DNA, 25 bp, Homo sapien
tgcaaaggcgccgaggatgcggcgg

SEQ ID NO: 2312919 - DNA, 25 bp, Homo sapien
gcggcggcgagggaggcagcggcgg

SEQ ID NO: 2312920 - DNA, 25 bp, Homo sapien
cagcggcggcggcgagggaggcagc

SEQ ID NO: 2312921 - DNA, 25 bp, Homo sapien
ggcggcgagggaggcagcggcggcc

SEQ ID NO: 2312922 - DNA, 25 bp, Homo sapien
cggcggcggcgagggaggcagcggc

SEQ ID NO: 2312923 - DNA, 25 bp, Homo sapien
ccagtttcagccttgcataagcaaa

SEQ ID NO: 2312924 - DNA, 25 bp, Homo sapien
caaagaagtccaggtaacaatggtc

SEQ ID NO: 2312925 - DNA, 25 bp, Homo sapien
ggtcataattccctacagtcctggt

SEQ ID NO: 2312926 - DNA, 25 bp, Homo sapien
gccttgcataagcaaagaagtccag

SEQ ID NO: 2312927 - DNA, 25 bp, Homo sapien
cattgacaaagtagttgccatctct

SEQ ID NO: 2312928 - DNA, 25 bp, Homo sapien
tgacaaagtagttgccatctcttcc

SEQ ID NO: 2312929 - DNA, 25 bp, Homo sapien
tcattgacaaagtagttgccatctc

SEQ ID NO: 2312930 - DNA, 25 bp, Homo sapien
tttttcattgacaaagtagttgcca

SEQ ID NO: 2312931 - DNA, 25 bp, Homo sapien
gcagatataaaagctgactgtgaaa

SEQ ID NO: 2312932 - DNA, 25 bp, Homo sapien
caaaaggactgaaatggccaaaaca

SEQ ID NO: 2312933 - DNA, 25 bp, Homo sapien
catgtagaatctataggctgaaaac

SEQ ID NO: 2312934 - DNA, 25 bp, Homo sapien
tcatgttgattaactggaatatttg

SEQ ID NO: 2312935 - DNA, 25 bp, Homo sapien
gaatcctgaaaacacaggcgtacac

SEQ ID NO: 2312936 - DNA, 25 bp, Homo sapien
cacggtcagatgcttccttaccaga

SEQ ID NO: 2312937 - DNA, 25 bp, Homo sapien
tctccggatgagataaactgggtct

SEQ ID NO: 2312938 - DNA, 25 bp, Homo sapien
tactgtcttgtgaactgagtctcct

SEQ ID NO: 2312939 - DNA, 25 bp, Homo sapien
ttcgttagttatgctgcgtccagga

SEQ ID NO: 2312940 - DNA, 25 bp, Homo sapien
tcgttagttatgctgcgtccaggac

SEQ ID NO: 2312941 - DNA, 25 bp, Homo sapien
cttcgttagttatgctgcgtccagg

SEQ ID NO: 2312942 - DNA, 25 bp, Homo sapien
tgcgcctctcaatgtttgccagtga

SEQ ID NO: 2312943 - DNA, 25 bp, Homo sapien
ggatgtccccgtagatgaaaggcaa

SEQ ID NO: 2312944 - DNA, 25 bp, Homo sapien
gatgactgccatcggcctttggtgg

SEQ ID NO: 2312945 - DNA, 25 bp, Homo sapien
tccaggtcgctgtttggcttgggct

SEQ ID NO: 2312946 - DNA, 25 bp, Homo sapien
ttaaacaattatttgtagcaaacag

SEQ ID NO: 2312947 - DNA, 25 bp, Homo sapien
cttaaacaattatttgtagcaaaca

SEQ ID NO: 2312948 - DNA, 25 bp, Homo sapien
aggtaccctccacatctaacctgag

SEQ ID NO: 2312949 - DNA, 25 bp, Homo sapien
cattattgggaacacaggtaccctc

SEQ ID NO: 2312950 - DNA, 25 bp, Homo sapien
tccgtaatggtctctgtgctgcaca

SEQ ID NO: 2312951 - DNA, 25 bp, Homo sapien
gccaggagctcatatagggctgcgt

SEQ ID NO: 2312952 - DNA, 25 bp, Homo sapien
ttaatttggatccacatacttggca

SEQ ID NO: 2312953 - DNA, 25 bp, Homo sapien
aatttggatccacatacttggcaca

SEQ ID NO: 2312954 - DNA, 25 bp, Homo sapien
ttggatccacatacttggcacaagc

SEQ ID NO: 2312955 - DNA, 25 bp, Homo sapien
tttggatccacatacttggcacaag

SEQ ID NO: 2312956 - DNA, 25 bp, Homo sapien
gctttatatggctttcaagagcccc

SEQ ID NO: 2312957 - DNA, 25 bp, Homo sapien
tgtcctcggaacaggttctcataat

SEQ ID NO: 2312958 - DNA, 25 bp, Homo sapien
gaatgttcccatctagccaaactag

SEQ ID NO: 2312959 - DNA, 25 bp, Homo sapien
tagccaaactagctcatgtcctcgg

SEQ ID NO: 2312960 - DNA, 25 bp, Homo sapien
tagctattcttcttatcaggttaaa

SEQ ID NO: 2312961 - DNA, 25 bp, Homo sapien
cgtggcactaaatctgaagagagtt

SEQ ID NO: 2312962 - DNA, 25 bp, Homo sapien
aaatgtacaaggcaggcgtggcact

SEQ ID NO: 2312963 - DNA, 25 bp, Homo sapien
tattcttcttatcaggttaaaagga

SEQ ID NO: 2312964 - DNA, 25 bp, Homo sapien
tccacattcttcgaccagtcaggag

SEQ ID NO: 2312965 - DNA, 25 bp, Homo sapien
cctgaactgtattccaaggaagtta

SEQ ID NO: 2312966 - DNA, 25 bp, Homo sapien
ctaagacctttggaatgttgtactg

SEQ ID NO: 2312967 - DNA, 25 bp, Homo sapien
gttaactttgcagctatctagtaca

SEQ ID NO: 2312968 - DNA, 25 bp, Homo sapien
tgttgtactgggtcctgaactgtat

SEQ ID NO: 2312969 - DNA, 25 bp, Homo sapien
tgaaccttttaagttagcacttgcc

SEQ ID NO: 2312970 - DNA, 25 bp, Homo sapien
atgaaccttttaagttagcacttgc

SEQ ID NO: 2312971 - DNA, 25 bp, Homo sapien
aaatgtataaatccctgtgaacgtg

SEQ ID NO: 2312972 - DNA, 25 bp, Homo sapien
tcaaatgtataaatccctgtgaacg

SEQ ID NO: 2312973 - DNA, 25 bp, Homo sapien
tcactagtgattcaaatgtataaat

SEQ ID NO: 2312974 - DNA, 25 bp, Homo sapien
tgtataaatccctgtgaacgtgtac

SEQ ID NO: 2312975 - DNA, 25 bp, Homo sapien
tcagtaccctgaaagtgcgtagagc

SEQ ID NO: 2312976 - DNA, 25 bp, Homo sapien
gccctcagtaccctgaaagtgcgta

SEQ ID NO: 2312977 - DNA, 25 bp, Homo sapien
ccctgaaagtgcgtagagctgaaac

SEQ ID NO: 2312978 - DNA, 25 bp, Homo sapien
gtaccctgaaagtgcgtagagctga

SEQ ID NO: 2312979 - DNA, 25 bp, Homo sapien
agttttcaaagctcggagaaccctg

SEQ ID NO: 2312980 - DNA, 25 bp, Homo sapien
gtctgagaatgaaccctgaatatgt

SEQ ID NO: 2312981 - DNA, 25 bp, Homo sapien
gaaccactgggctagctcaaccaga

SEQ ID NO: 2312982 - DNA, 25 bp, Homo sapien
ggttcttattctagtgagacagaca

SEQ ID NO: 2312983 - DNA, 25 bp, Homo sapien
agtgcctgcataagctttcattggg

SEQ ID NO: 2312984 - DNA, 25 bp, Homo sapien
gccacgtaataggaataggataaga

SEQ ID NO: 2312985 - DNA, 25 bp, Homo sapien
gccacaaggggaagagccacgtaat

SEQ ID NO: 2312986 - DNA, 25 bp, Homo sapien
gggaagagccacgtaataggaatag

SEQ ID NO: 2312987 - DNA, 25 bp, Homo sapien
cgtaataggaataggataagaatag

SEQ ID NO: 2312988 - DNA, 25 bp, Homo sapien
gatagggagtcagctaccatcgcta

SEQ ID NO: 2312989 - DNA, 25 bp, Homo sapien
aaatggctaggaactaaatcttggt

SEQ ID NO: 2312990 - DNA, 25 bp, Homo sapien
tcatctttggtagggcactgattta

SEQ ID NO: 2312991 - DNA, 25 bp, Homo sapien
tgccaagaagtatatactccaactg

SEQ ID NO: 2312992 - DNA, 25 bp, Homo sapien
tgccctgttcccagagttaggcttg

SEQ ID NO: 2312993 - DNA, 25 bp, Homo sapien
gctgcaactgcaatcctcatgataa

SEQ ID NO: 2312994 - DNA, 25 bp, Homo sapien
taagagacaagatcgcactatgctg

SEQ ID NO: 2312995 - DNA, 25 bp, Homo sapien
gcttgggttcagacaaagcataggg

SEQ ID NO: 2312996 - DNA, 25 bp, Homo sapien
tagctctcgttgaagtttatgggcc

SEQ ID NO: 2312997 - DNA, 25 bp, Homo sapien
catgaacagctgcagtccgatcaag

SEQ ID NO: 2312998 - DNA, 25 bp, Homo sapien
tttatgggccacacaacacacttgt

SEQ ID NO: 2312999 - DNA, 25 bp, Homo sapien
tccgatcaaggcaaaaacactcagg

SEQ ID NO: 2313000 - DNA, 25 bp, Homo sapien
cttttcctattcctcttgcagagaa

SEQ ID NO: 2313001 - DNA, 25 bp, Homo sapien
gcttctgaccatgtgaactaggaat

SEQ ID NO: 2313002 - DNA, 25 bp, Homo sapien
ttttaagccctgtggtagcttctga

SEQ ID NO: 2313003 - DNA, 25 bp, Homo sapien
tagacttttcctattcctcttgcag

SEQ ID NO: 2313004 - DNA, 25 bp, Homo sapien
agcatcagaactgttcccacagagt

SEQ ID NO: 2313005 - DNA, 25 bp, Homo sapien
ccacagagtaaaggttccagcatgc

SEQ ID NO: 2313006 - DNA, 25 bp, Homo sapien
ttcccacagagtaaaggttccagca

SEQ ID NO: 2313007 - DNA, 25 bp, Homo sapien
ctgttcccacagagtaaaggttcca

SEQ ID NO: 2313008 - DNA, 25 bp, Homo sapien
agttttcccaatagtcctgggtcat

SEQ ID NO: 2313009 - DNA, 25 bp, Homo sapien
ggtcataaggcgaaataatgccaag

SEQ ID NO: 2313010 - DNA, 25 bp, Homo sapien
agtgtcaaaacttgtgtaaccatag

SEQ ID NO: 2313011 - DNA, 25 bp, Homo sapien
tcctgctttcatacactggtatccc

SEQ ID NO: 2313012 - DNA, 25 bp, Homo sapien
tcctgttgcttcttaagttgctcca

SEQ ID NO: 2313013 - DNA, 25 bp, Homo sapien
catgtatgttttcccggctgctcgt

SEQ ID NO: 2313014 - DNA, 25 bp, Homo sapien
gcttcttaagttgctccaacattgc

SEQ ID NO: 2313015 - DNA, 25 bp, Homo sapien
ttcaccagatagaaagaacccacaa

SEQ ID NO: 2313016 - DNA, 25 bp, Homo sapien
tcatggcggttgcacactgaacagt

SEQ ID NO: 2313017 - DNA, 25 bp, Homo sapien
gggtcttagtcaccatgatctggca

SEQ ID NO: 2313018 - DNA, 25 bp, Homo sapien
gaataattggagcaaccatctgcag

SEQ ID NO: 2313019 - DNA, 25 bp, Homo sapien
cactatataaactgccctggtcact

SEQ ID NO: 2313020 - DNA, 25 bp, Homo sapien
tgtctggcagccgaaaggccttcct

SEQ ID NO: 2313021 - DNA, 25 bp, Homo sapien
gactctgacttaaacaccttctcgg

SEQ ID NO: 2313022 - DNA, 25 bp, Homo sapien
gagacagttcctgctgaagtggcca

SEQ ID NO: 2313023 - DNA, 25 bp, Homo sapien
tgcactctttgagctgagtttagag

SEQ ID NO: 2313024 - DNA, 25 bp, Homo sapien
tatgagatgagtaggccttactccc

SEQ ID NO: 2313025 - DNA, 25 bp, Homo sapien
catggctctattaaatcctgggatc

SEQ ID NO: 2313026 - DNA, 25 bp, Homo sapien
caaaagagtagtctgcaatggacaa

SEQ ID NO: 2313027 - DNA, 25 bp, Homo sapien
taaggagctacatcctgagggctga

SEQ ID NO: 2313028 - DNA, 25 bp, Homo sapien
acggattcaaaacgtctacccactg

SEQ ID NO: 2313029 - DNA, 25 bp, Homo sapien
tgaccagttacggattcaaaacgtc

SEQ ID NO: 2313030 - DNA, 25 bp, Homo sapien
ctgtgcttgaccagttacggattca

SEQ ID NO: 2313031 - DNA, 25 bp, Homo sapien
gtctacccactgttcttgcacgcat

SEQ ID NO: 2313032 - DNA, 25 bp, Homo sapien
cgtgctgtgctcgtcatccgcgaac

SEQ ID NO: 2313033 - DNA, 25 bp, Homo sapien
gaggaagggcgagcctgggatgctg

SEQ ID NO: 2313034 - DNA, 25 bp, Homo sapien
tcgtcatccgcgaactcattctcgg

SEQ ID NO: 2313035 - DNA, 25 bp, Homo sapien
cgaactcattctcggagcccgggtc

SEQ ID NO: 2313036 - DNA, 25 bp, Homo sapien
cgctgtagccgctgtagctgctccg

SEQ ID NO: 2313037 - DNA, 25 bp, Homo sapien
gccgctgtagccgctgtagctgctc

SEQ ID NO: 2313038 - DNA, 25 bp, Homo sapien
gatgaagagggagtcccggcggccc

SEQ ID NO: 2313039 - DNA, 25 bp, Homo sapien
tgtagccgctgtagccgctgtagct

SEQ ID NO: 2313040 - DNA, 25 bp, Homo sapien
tctggcaggagacgcccgccgatgt

SEQ ID NO: 2313041 - DNA, 25 bp, Homo sapien
gggccgccgatgagggacaccacgc

SEQ ID NO: 2313042 - DNA, 25 bp, Homo sapien
cagtccaccgtgctgttgcgcttca

SEQ ID NO: 2313043 - DNA, 25 bp, Homo sapien
gggaagatgcgcgaggagcggctgc

SEQ ID NO: 2313044 - DNA, 25 bp, Homo sapien
actgtcatcggtagctgccttatca

SEQ ID NO: 2313045 - DNA, 25 bp, Homo sapien
ctgtcatcggtagctgccttatcaa

SEQ ID NO: 2313046 - DNA, 25 bp, Homo sapien
aatattgtgtgagaccagtgcgtgc

SEQ ID NO: 2313047 - DNA, 25 bp, Homo sapien
gatggagacgcaggaaaaagtccct

SEQ ID NO: 2313048 - DNA, 25 bp, Homo sapien
cagtgcgtgcactatcagtggctcc

SEQ ID NO: 2313049 - DNA, 25 bp, Homo sapien
cctactttcccagctcagagatgga

SEQ ID NO: 2313050 - DNA, 25 bp, Homo sapien
tgggcttccgtgagatgtacctttg

SEQ ID NO: 2313051 - DNA, 25 bp, Homo sapien
gagggcttcttccaactatgttgag

SEQ ID NO: 2313052 - DNA, 25 bp, Homo sapien
ctctctcccaggtaaagcagcttca

SEQ ID NO: 2313053 - DNA, 25 bp, Homo sapien
caacctgtaagaagccttggaggaa

SEQ ID NO: 2313054 - DNA, 25 bp, Homo sapien
tgattctgtccttccgcccgtagga

SEQ ID NO: 2313055 - DNA, 25 bp, Homo sapien
gcccgtaggaggctaattggtccat

SEQ ID NO: 2313056 - DNA, 25 bp, Homo sapien
tctactagtgtatttgtaacaacac

SEQ ID NO: 2313057 - DNA, 25 bp, Homo sapien
taaaagagatccagggcctttcttc

SEQ ID NO: 2313058 - DNA, 25 bp, Homo sapien
gatggctaaatccacaaaagggtcc

SEQ ID NO: 2313059 - DNA, 25 bp, Homo sapien
cagccaagacatgttcaaattgtgg

SEQ ID NO: 2313060 - DNA, 25 bp, Homo sapien
tggtgctccattgccataaacagtg

SEQ ID NO: 2313061 - DNA, 25 bp, Homo sapien
catggcgggcactttctctgagact

SEQ ID NO: 2313062 - DNA, 25 bp, Homo sapien
tattctcaggttcagtcaaagcctc

SEQ ID NO: 2313063 - DNA, 25 bp, Homo sapien
cccaaccagtgatggcatggtatta

SEQ ID NO: 2313064 - DNA, 25 bp, Homo sapien
cacaggacaaggtcatactttattt

SEQ ID NO: 2313065 - DNA, 25 bp, Homo sapien
taagatacttttagctatcccaaag

SEQ ID NO: 2313066 - DNA, 25 bp, Homo sapien
ccttgtggtaccagaaagccaggaa

SEQ ID NO: 2313067 - DNA, 25 bp, Homo sapien
tttccactggccacatcagaggaag

SEQ ID NO: 2313068 - DNA, 25 bp, Homo sapien
tgcctcagctgatactcagcctaga

SEQ ID NO: 2313069 - DNA, 25 bp, Homo sapien
gaagacatgtgaaagggatcagaag

SEQ ID NO: 2313070 - DNA, 25 bp, Homo sapien
caatcggaaagatcgcagcactgaa

SEQ ID NO: 2313071 - DNA, 25 bp, Homo sapien
aactgagggagacaataaatccgtc

SEQ ID NO: 2313072 - DNA, 25 bp, Homo sapien
aacatttccgctgtgaaaattccag

SEQ ID NO: 2313073 - DNA, 25 bp, Homo sapien
tagtagggatccatggctatgagct

SEQ ID NO: 2313074 - DNA, 25 bp, Homo sapien
atttggccaatttgaagactcggag

SEQ ID NO: 2313075 - DNA, 25 bp, Homo sapien
agggtgggccaggatttggccaatt

SEQ ID NO: 2313076 - DNA, 25 bp, Homo sapien
ttcagggtgggccaggatttggcca

SEQ ID NO: 2313077 - DNA, 25 bp, Homo sapien
ggatttggccaatttgaagactcgg

SEQ ID NO: 2313078 - DNA, 25 bp, Homo sapien
catatgccagcgagggagttcacag

SEQ ID NO: 2313079 - DNA, 25 bp, Homo sapien
taaagacaatgaggcacatggcctg

SEQ ID NO: 2313080 - DNA, 25 bp, Homo sapien
gaagacaataatggccagcaccagt

SEQ ID NO: 2313081 - DNA, 25 bp, Homo sapien
cacagtcctggttgatcttgcagac

SEQ ID NO: 2313082 - DNA, 25 bp, Homo sapien
tatagtcactgaagtagtgagaaga

SEQ ID NO: 2313083 - DNA, 25 bp, Homo sapien
tgttatagtcactgaagtagtgaga

SEQ ID NO: 2313084 - DNA, 25 bp, Homo sapien
ttatagtcactgaagtagtgagaag

SEQ ID NO: 2313085 - DNA, 25 bp, Homo sapien
attgttatagtcactgaagtagtga

SEQ ID NO: 2313086 - DNA, 25 bp, Homo sapien
tcacgctgcttaaagtgggcctgca

SEQ ID NO: 2313087 - DNA, 25 bp, Homo sapien
tgcaccggtgtgattggcgatacag

SEQ ID NO: 2313088 - DNA, 25 bp, Homo sapien
gtcagactcgcccacagcaatgggt

SEQ ID NO: 2313089 - DNA, 25 bp, Homo sapien
caggccacacccttcttgatacgga

SEQ ID NO: 2313090 - DNA, 25 bp, Homo sapien
tcttctacttctggtttgatatcaa

SEQ ID NO: 2313091 - DNA, 25 bp, Homo sapien
gacctcttctacttctggtttgata

SEQ ID NO: 2313092 - DNA, 25 bp, Homo sapien
acttctggtttgatatcaatggtgc

SEQ ID NO: 2313093 - DNA, 25 bp, Homo sapien
gtttgatatcaatggtgcttccttc

SEQ ID NO: 2313094 - DNA, 25 bp, Homo sapien
cttctgtgaagcaggcatctggatc

SEQ ID NO: 2313095 - DNA, 25 bp, Homo sapien
aagcaggcatctggatccaagtatt

SEQ ID NO: 2313096 - DNA, 25 bp, Homo sapien
ttctgtgaagcaggcatctggatcc

SEQ ID NO: 2313097 - DNA, 25 bp, Homo sapien
caggcatctggatccaagtattcct

SEQ ID NO: 2313098 - DNA, 25 bp, Homo sapien
gcagcacttgaaccgctggacacaa

SEQ ID NO: 2313099 - DNA, 25 bp, Homo sapien
ttttccgcaggatccaccaagactt

SEQ ID NO: 2313100 - DNA, 25 bp, Homo sapien
aaaccagttgtgctccacgatgagg

SEQ ID NO: 2313101 - DNA, 25 bp, Homo sapien
tcgatgttgacctggcagcacttga

SEQ ID NO: 2313102 - DNA, 25 bp, Homo sapien
tgtccacttgagcaacatctccagg

SEQ ID NO: 2313103 - DNA, 25 bp, Homo sapien
tcagcatattccaggatggtgcgga

SEQ ID NO: 2313104 - DNA, 25 bp, Homo sapien
tattccaggatggtgcggatggtct

SEQ ID NO: 2313105 - DNA, 25 bp, Homo sapien
ggtgaagaacttgacgaagccatag

SEQ ID NO: 2313106 - DNA, 25 bp, Homo sapien
tctgcaggtcccagaagtccccatt

SEQ ID NO: 2313107 - DNA, 25 bp, Homo sapien
ctgcaggtcccagaagtccccatta

SEQ ID NO: 2313108 - DNA, 25 bp, Homo sapien
cagaagtccccattaaattaagcca

SEQ ID NO: 2313109 - DNA, 25 bp, Homo sapien
ggtctcaaagctcttagggtcctaa

SEQ ID NO: 2313110 - DNA, 25 bp, Homo sapien
gggactttatggcacctagttccga

SEQ ID NO: 2313111 - DNA, 25 bp, Homo sapien
cgtgataaggctcttaagggtctca

SEQ ID NO: 2313112 - DNA, 25 bp, Homo sapien
ctagttccgagtagcccagggcatt

SEQ ID NO: 2313113 - DNA, 25 bp, Homo sapien
gatgaggcagcttaacgcaattccc

SEQ ID NO: 2313114 - DNA, 25 bp, Homo sapien
tctagcatgcttaaacagtttccac

SEQ ID NO: 2313115 - DNA, 25 bp, Homo sapien
ttccaccatgtgatcagttctagca

SEQ ID NO: 2313116 - DNA, 25 bp, Homo sapien
catgcagaaggatcagctgctctta

SEQ ID NO: 2313117 - DNA, 25 bp, Homo sapien
tcagtgttgggtggaaatgagagca

SEQ ID NO: 2313118 - DNA, 25 bp, Homo sapien
gggaggttgctcagtgttgggtgga

SEQ ID NO: 2313119 - DNA, 25 bp, Homo sapien
ttggaaggggaggttgctcagtgtt

SEQ ID NO: 2313120 - DNA, 25 bp, Homo sapien
tgggtggaaatgagagcaagcacat

SEQ ID NO: 2313121 - DNA, 25 bp, Homo sapien
taaagcagtagtggtactttcccgc

SEQ ID NO: 2313122 - DNA, 25 bp, Homo sapien
ttcaaatcggatttcagaagtctca

SEQ ID NO: 2313123 - DNA, 25 bp, Homo sapien
cagccagaagatgagacacaccagc

SEQ ID NO: 2313124 - DNA, 25 bp, Homo sapien
gccaggtatcctgccccaacattgt

SEQ ID NO: 2313125 - DNA, 25 bp, Homo sapien
tggcaaacagagtcagtcattagac

SEQ ID NO: 2313126 - DNA, 25 bp, Homo sapien
gcaaacagagtcagtcattagacgg

SEQ ID NO: 2313127 - DNA, 25 bp, Homo sapien
aacagagtcagtcattagacggtgc

SEQ ID NO: 2313128 - DNA, 25 bp, Homo sapien
caaacagagtcagtcattagacggt

SEQ ID NO: 2313129 - DNA, 25 bp, Homo sapien
ccgggaatctacagctgcatacatg

SEQ ID NO: 2313130 - DNA, 25 bp, Homo sapien
tgtccatccagcctttgaaggttgc

SEQ ID NO: 2313131 - DNA, 25 bp, Homo sapien
cttccgggaatctacagctgcatac

SEQ ID NO: 2313132 - DNA, 25 bp, Homo sapien
gggaatctacagctgcatacatgat

SEQ ID NO: 2313133 - DNA, 25 bp, Homo sapien
gatgtacatgtagatattgtcctca

SEQ ID NO: 2313134 - DNA, 25 bp, Homo sapien
tgtagatattgtcctcatacttagg

SEQ ID NO: 2313135 - DNA, 25 bp, Homo sapien
tcctcatacttaggctgctcatcag

SEQ ID NO: 2313136 - DNA, 25 bp, Homo sapien
cttttgttgattgaagttatcaatg

SEQ ID NO: 2313137 - DNA, 25 bp, Homo sapien
ctgttcttcggtcatgaagatgtcc

SEQ ID NO: 2313138 - DNA, 25 bp, Homo sapien
ggcctcagcctgcacaatgcactta

SEQ ID NO: 2313139 - DNA, 25 bp, Homo sapien
caaggcctcagcctgcacaatgcac

SEQ ID NO: 2313140 - DNA, 25 bp, Homo sapien
gcctcagcctgcacaatgcacttac

SEQ ID NO: 2313141 - DNA, 25 bp, Homo sapien
aaggcctcagcctgcacaatgcact

SEQ ID NO: 2313142 - DNA, 25 bp, Homo sapien
ggcatgatatagcttaccatatcct

SEQ ID NO: 2313143 - DNA, 25 bp, Homo sapien
tgatatagcttaccatatcctctgc

SEQ ID NO: 2313144 - DNA, 25 bp, Homo sapien
agtggcatgatatagcttaccatat

SEQ ID NO: 2313145 - DNA, 25 bp, Homo sapien
tatagcttaccatatcctctgcagc

SEQ ID NO: 2313146 - DNA, 25 bp, Homo sapien
gaaggaaaagataaaagattcatga

SEQ ID NO: 2313147 - DNA, 25 bp, Homo sapien
gataaaagattcatgaaaacctttc

SEQ ID NO: 2313148 - DNA, 25 bp, Homo sapien
aaagattcatgaaaacctttccaag

SEQ ID NO: 2313149 - DNA, 25 bp, Homo sapien
ttcatgaaaacctttccaagccaac

SEQ ID NO: 2313150 - DNA, 25 bp, Homo sapien
ctcacaggtgaagaagataacaaac

SEQ ID NO: 2313151 - DNA, 25 bp, Homo sapien
tgcttgctttgagtgtctgtctcca

SEQ ID NO: 2313152 - DNA, 25 bp, Homo sapien
caaacaccaggttaatccagtagag

SEQ ID NO: 2313153 - DNA, 25 bp, Homo sapien
aagtagtagtgcctcaacgcaaaca

SEQ ID NO: 2313154 - DNA, 25 bp, Homo sapien
caatacgggccaatcggatgactcg

SEQ ID NO: 2313155 - DNA, 25 bp, Homo sapien
gcaaagagcagggtacgaatccctt

SEQ ID NO: 2313156 - DNA, 25 bp, Homo sapien
tccctttggcgcctttgatcagacg

SEQ ID NO: 2313157 - DNA, 25 bp, Homo sapien
tgatcagacgcaagatgcgcccaat

SEQ ID NO: 2313158 - DNA, 25 bp, Homo sapien
caattaggaaagagatgatgatgta

SEQ ID NO: 2313159 - DNA, 25 bp, Homo sapien
acaattaggaaagagatgatgatgt

SEQ ID NO: 2313160 - DNA, 25 bp, Homo sapien
aatgtacatgttcacgacaattagg

SEQ ID NO: 2313161 - DNA, 25 bp, Homo sapien
gtacatgttcacgacaattaggaaa

SEQ ID NO: 2313162 - DNA, 25 bp, Homo sapien
ttacactgtcataggacgggaggga

SEQ ID NO: 2313163 - DNA, 25 bp, Homo sapien
ggattggatgccacgaaccgctctt

SEQ ID NO: 2313164 - DNA, 25 bp, Homo sapien
cattggcagatccatagcgatgagc

SEQ ID NO: 2313165 - DNA, 25 bp, Homo sapien
gattggctcgtaagacactttggaa

SEQ ID NO: 2313166 - DNA, 25 bp, Homo sapien
aaaaattctacggatgctgctgcag

SEQ ID NO: 2313167 - DNA, 25 bp, Homo sapien
cagtgtgtgagtatgcgatgacccc

SEQ ID NO: 2313168 - DNA, 25 bp, Homo sapien
tacttggcgggatcttacagctctg

SEQ ID NO: 2313169 - DNA, 25 bp, Homo sapien
caatgtttggaatcggcctgagcaa

SEQ ID NO: 2313170 - DNA, 25 bp, Homo sapien
gatgggtgccagataccaaggccca

SEQ ID NO: 2313171 - DNA, 25 bp, Homo sapien
cgatgcctgttaactgcgggtgtaa

SEQ ID NO: 2313172 - DNA, 25 bp, Homo sapien
tacccactcagcgaagatgcacaaa

SEQ ID NO: 2313173 - DNA, 25 bp, Homo sapien
aaacttcaaatacagcggaggtggc

SEQ ID NO: 2313174 - DNA, 25 bp, Homo sapien
cacgtctcattagggcagcattggc

SEQ ID NO: 2313175 - DNA, 25 bp, Homo sapien
tacaggtttacgttggttgcagcaa

SEQ ID NO: 2313176 - DNA, 25 bp, Homo sapien
tataaatactgcaccaaggacctgg

SEQ ID NO: 2313177 - DNA, 25 bp, Homo sapien
gagtctcctcatcctaagcaacaag

SEQ ID NO: 2313178 - DNA, 25 bp, Homo sapien
cagggcccagtatgagcttgcagag

SEQ ID NO: 2313179 - DNA, 25 bp, Homo sapien
aaatgtgaaggagaccagccctcgt

SEQ ID NO: 2313180 - DNA, 25 bp, Homo sapien
tagccagaactttgcgagagcccct

SEQ ID NO: 2313181 - DNA, 25 bp, Homo sapien
cctaggcctagagagggatgtcccc

SEQ ID NO: 2313182 - DNA, 25 bp, Homo sapien
tgcagctgatcgtggagcgcctgcc

SEQ ID NO: 2313183 - DNA, 25 bp, Homo sapien
gctggtcgtcctgctcacgctatgg

SEQ ID NO: 2313184 - DNA, 25 bp, Homo sapien
gctggtgggaaacaaagctgctcct

SEQ ID NO: 2313185 - DNA, 25 bp, Homo sapien
cacgctatggatcactggcggcgac

SEQ ID NO: 2313186 - DNA, 25 bp, Homo sapien
atttccggtcgctcctggaggcgcc

SEQ ID NO: 2313187 - DNA, 25 bp, Homo sapien
tgaccccggaggagtgcggccattt

SEQ ID NO: 2313188 - DNA, 25 bp, Homo sapien
tggaggccgagttgtcccggctttc

SEQ ID NO: 2313189 - DNA, 25 bp, Homo sapien
agccgtccgtctggccgagctgctg

SEQ ID NO: 2313190 - DNA, 25 bp, Homo sapien
gggacaatgtatggaccttgcagtc

SEQ ID NO: 2313191 - DNA, 25 bp, Homo sapien
tgcatcttacgtgctgtgccacgag

SEQ ID NO: 2313192 - DNA, 25 bp, Homo sapien
ttaagaattcacacaatggccctgc

SEQ ID NO: 2313193 - DNA, 25 bp, Homo sapien
taaaaaggccgagctgcagtgtgct

SEQ ID NO: 2313194 - DNA, 25 bp, Homo sapien
cagagtgtttggctcacgctgggag

SEQ ID NO: 2313195 - DNA, 25 bp, Homo sapien
gaggtgctaagggggtgtcaggaac

SEQ ID NO: 2313196 - DNA, 25 bp, Homo sapien
gagtgtttggctcacgctgggaggt

SEQ ID NO: 2313197 - DNA, 25 bp, Homo sapien
tttggctcacgctgggaggtgctaa

SEQ ID NO: 2313198 - DNA, 25 bp, Homo sapien
cagtcacctgaagtagagagcatca

SEQ ID NO: 2313199 - DNA, 25 bp, Homo sapien
tgtcaacaagctgctgctaggaagg

SEQ ID NO: 2313200 - DNA, 25 bp, Homo sapien
tgtccacaagcctttccaacagggc

SEQ ID NO: 2313201 - DNA, 25 bp, Homo sapien
tttatgagctttccagaaggtggca

SEQ ID NO: 2313202 - DNA, 25 bp, Homo sapien
aggacttcgtcctgtgggtagagtc

SEQ ID NO: 2313203 - DNA, 25 bp, Homo sapien
tagagtcaagcggggttccagcttc

SEQ ID NO: 2313204 - DNA, 25 bp, Homo sapien
gggtagagtcaagcggggttccagc

SEQ ID NO: 2313205 - DNA, 25 bp, Homo sapien
agtcaagcggggttccagcttccta

SEQ ID NO: 2313206 - DNA, 25 bp, Homo sapien
gcaaagtccttgagtgcaagtgcca

SEQ ID NO: 2313207 - DNA, 25 bp, Homo sapien
tcattggacagtacaggattagagg

SEQ ID NO: 2313208 - DNA, 25 bp, Homo sapien
agttagagaatcatctgttcctttg

SEQ ID NO: 2313209 - DNA, 25 bp, Homo sapien
gtgactgggcttccctcaagaggtc

SEQ ID NO: 2313210 - DNA, 25 bp, Homo sapien
cctcatatgatggtgatgtggccct

SEQ ID NO: 2313211 - DNA, 25 bp, Homo sapien
tgtgtgaaagttctggcccacagca

SEQ ID NO: 2313212 - DNA, 25 bp, Homo sapien
ttcaaatagtctgcccctttgattc

SEQ ID NO: 2313213 - DNA, 25 bp, Homo sapien
gggactccagagaacgaccttctag

SEQ ID NO: 2313214 - DNA, 25 bp, Homo sapien
caaagctctttggaagatggctgac

SEQ ID NO: 2313215 - DNA, 25 bp, Homo sapien
tggctgacagcaagagttgccaaag

SEQ ID NO: 2313216 - DNA, 25 bp, Homo sapien
gcaagagttgccaaaggaatggctc

SEQ ID NO: 2313217 - DNA, 25 bp, Homo sapien
ctctttggaagatggctgacagcaa

SEQ ID NO: 2313218 - DNA, 25 bp, Homo sapien
tagcactttgcaaggcgttttcaca

SEQ ID NO: 2313219 - DNA, 25 bp, Homo sapien
taactgcccactactctagggtggg

SEQ ID NO: 2313220 - DNA, 25 bp, Homo sapien
tgagtcccactacgaccctgtgagg

SEQ ID NO: 2313221 - DNA, 25 bp, Homo sapien
gaagtttctccaacgtggtacctgc

SEQ ID NO: 2313222 - DNA, 25 bp, Homo sapien
ccgagtgcttggcgttatcgatcat

SEQ ID NO: 2313223 - DNA, 25 bp, Homo sapien
gcccgagtgcttggcgttatcgatc

SEQ ID NO: 2313224 - DNA, 25 bp, Homo sapien
cccgagtgcttggcgttatcgatca

SEQ ID NO: 2313225 - DNA, 25 bp, Homo sapien
atgaaaacagatcctgcatgtaatc

SEQ ID NO: 2313226 - DNA, 25 bp, Homo sapien
ctgcatgtaatctttgccaaaagcc

SEQ ID NO: 2313227 - DNA, 25 bp, Homo sapien
gaaatgatcccatccacattgtcac

SEQ ID NO: 2313228 - DNA, 25 bp, Homo sapien
ccaaaagcctgagaaatgatcccat

SEQ ID NO: 2313229 - DNA, 25 bp, Homo sapien
ttcccagcgggtccacggagctgtg

SEQ ID NO: 2313230 - DNA, 25 bp, Homo sapien
cgggtccacggagctgtggtggtgc

SEQ ID NO: 2313231 - DNA, 25 bp, Homo sapien
atccttccctttgcagtcaggcgtc

SEQ ID NO: 2313232 - DNA, 25 bp, Homo sapien
cctttgcagtcaggcgtccccatgg

SEQ ID NO: 2313233 - DNA, 25 bp, Homo sapien
ggcagcccggggcacggcctgggga

SEQ ID NO: 2313234 - DNA, 25 bp, Homo sapien
tctcatttgcatagcgctcccaggg

SEQ ID NO: 2313235 - DNA, 25 bp, Homo sapien
tttgcatctcatttgcatagcgctc

SEQ ID NO: 2313236 - DNA, 25 bp, Homo sapien
catctcatttgcatagcgctcccag

SEQ ID NO: 2313237 - DNA, 25 bp, Homo sapien
gtgaccaggcgttgagcagacacag

SEQ ID NO: 2313238 - DNA, 25 bp, Homo sapien
agagagaaatcagacccagccgaat

SEQ ID NO: 2313239 - DNA, 25 bp, Homo sapien
cagcatgaataggagctcatggtgg

SEQ ID NO: 2313240 - DNA, 25 bp, Homo sapien
cagtctcccaaaagtctctagagag

SEQ ID NO: 2313241 - DNA, 25 bp, Homo sapien
gggcccaggagctcggacaggctgc

SEQ ID NO: 2313242 - DNA, 25 bp, Homo sapien
ccaggagctcggacaggctgcattc

SEQ ID NO: 2313243 - DNA, 25 bp, Homo sapien
cccaggagctcggacaggctgcatt

SEQ ID NO: 2313244 - DNA, 25 bp, Homo sapien
ccaggggcccaggagctcggacagg

SEQ ID NO: 2313245 - DNA, 25 bp, Homo sapien
agcggactcagaccagccccaagat

SEQ ID NO: 2313246 - DNA, 25 bp, Homo sapien
acaaagacgactcctcctgacggac

SEQ ID NO: 2313247 - DNA, 25 bp, Homo sapien
ctgagccggatcaagcagctgggac

SEQ ID NO: 2313248 - DNA, 25 bp, Homo sapien
tggtcacgtctcaggagcggactca

SEQ ID NO: 2313249 - DNA, 25 bp, Homo sapien
gaatgcctccaggtggactatccct

SEQ ID NO: 2313250 - DNA, 25 bp, Homo sapien
gtatctatgaggcagtcaacgcggg

SEQ ID NO: 2313251 - DNA, 25 bp, Homo sapien
caatcactgggtctccgaatgcctc

SEQ ID NO: 2313252 - DNA, 25 bp, Homo sapien
caggtaacagatggctggactttca

SEQ ID NO: 2313253 - DNA, 25 bp, Homo sapien
agcagctgcgaagtgcacagccctt

SEQ ID NO: 2313254 - DNA, 25 bp, Homo sapien
agtgtctccctggatcctagggagg

SEQ ID NO: 2313255 - DNA, 25 bp, Homo sapien
gagaggagtagtgagtgtctccctg

SEQ ID NO: 2313256 - DNA, 25 bp, Homo sapien
atggagaggagtagtgagtgtctcc

SEQ ID NO: 2313257 - DNA, 25 bp, Homo sapien
agccgtctcctgtgcaatgccagct

SEQ ID NO: 2313258 - DNA, 25 bp, Homo sapien
aaggtgagtcccttttctcatgcag

SEQ ID NO: 2313259 - DNA, 25 bp, Homo sapien
ccagaaggtgagtcccttttctcat

SEQ ID NO: 2313260 - DNA, 25 bp, Homo sapien
gaaggtgagtcccttttctcatgca

SEQ ID NO: 2313261 - DNA, 25 bp, Homo sapien
gctgggtgggatcattgtggacaca

SEQ ID NO: 2313262 - DNA, 25 bp, Homo sapien
cattgtggacacaggcccaatacag

SEQ ID NO: 2313263 - DNA, 25 bp, Homo sapien
gagaccccaccatccagtatggctt

SEQ ID NO: 2313264 - DNA, 25 bp, Homo sapien
tccttgcccgggcagggcagtgcct

SEQ ID NO: 2313265 - DNA, 25 bp, Homo sapien
tgaacccctctcagggagccaggcc

SEQ ID NO: 2313266 - DNA, 25 bp, Homo sapien
gtattgcccctgaacccctctcagg

SEQ ID NO: 2313267 - DNA, 25 bp, Homo sapien
ccccttgcaccctctaaacccatat

SEQ ID NO: 2313268 - DNA, 25 bp, Homo sapien
cagctgttctgggaagccaggacat

SEQ ID NO: 2313269 - DNA, 25 bp, Homo sapien
ctgctggttcacatcaaggaaagga

SEQ ID NO: 2313270 - DNA, 25 bp, Homo sapien
aacatgagggccgtgtcccctcctt

SEQ ID NO: 2313271 - DNA, 25 bp, Homo sapien
ccacaacactctggaagccgtggta

SEQ ID NO: 2313272 - DNA, 25 bp, Homo sapien
ggaagccgtggtagcatgcgaccat

SEQ ID NO: 2313273 - DNA, 25 bp, Homo sapien
agcaagggtaagcttggtccccagg

SEQ ID NO: 2313274 - DNA, 25 bp, Homo sapien
tgacagagtctggtgtagaacaccg

SEQ ID NO: 2313275 - DNA, 25 bp, Homo sapien
tagaacaccgtgcaacaagggtggg

SEQ ID NO: 2313276 - DNA, 25 bp, Homo sapien
tctgcatcaaaagggggctgtcgga

SEQ ID NO: 2313277 - DNA, 25 bp, Homo sapien
aggagactcactagaggcacgtggc

SEQ ID NO: 2313278 - DNA, 25 bp, Homo sapien
gctggtcccggcgttccaggtccag

SEQ ID NO: 2313279 - DNA, 25 bp, Homo sapien
cacatagtagttgagcaggagactc

SEQ ID NO: 2313280 - DNA, 25 bp, Homo sapien
gcagccttcattaacgccgtgagcc

SEQ ID NO: 2313281 - DNA, 25 bp, Homo sapien
atgaggagggtggccacgcactcac

SEQ ID NO: 2313282 - DNA, 25 bp, Homo sapien
catgaggagggtggccacgcactca

SEQ ID NO: 2313283 - DNA, 25 bp, Homo sapien
gccatgaggagggtggccacgcact

SEQ ID NO: 2313284 - DNA, 25 bp, Homo sapien
ctgccatgaggagggtggccacgca

SEQ ID NO: 2313285 - DNA, 25 bp, Homo sapien
cacctagggcagaatagggatctcc

SEQ ID NO: 2313286 - DNA, 25 bp, Homo sapien
gacttggttgattgtacgaagccca

SEQ ID NO: 2313287 - DNA, 25 bp, Homo sapien
gagggaagccactcagctaggaaca

SEQ ID NO: 2313288 - DNA, 25 bp, Homo sapien
catggacaatgtggacttcaccgca

SEQ ID NO: 2313289 - DNA, 25 bp, Homo sapien
tgaaggtggaatcagggaggccagt

SEQ ID NO: 2313290 - DNA, 25 bp, Homo sapien
cctgttgaaggtggaatcagggagg

SEQ ID NO: 2313291 - DNA, 25 bp, Homo sapien
catcctgttgaaggtggaatcaggg

SEQ ID NO: 2313292 - DNA, 25 bp, Homo sapien
gttgaaggtggaatcagggaggcca

SEQ ID NO: 2313293 - DNA, 25 bp, Homo sapien
ggggttggtgatttgtggaagggca

SEQ ID NO: 2313294 - DNA, 25 bp, Homo sapien
gaagggcagattctttaggagcaag

SEQ ID NO: 2313295 - DNA, 25 bp, Homo sapien
ataggggttggtgatttgtggaagg

SEQ ID NO: 2313296 - DNA, 25 bp, Homo sapien
gtggaagggcagattctttaggagc

SEQ ID NO: 2313297 - DNA, 25 bp, Homo sapien
gtcttgccccgaacagggtccactg

SEQ ID NO: 2313298 - DNA, 25 bp, Homo sapien
gaagctgtcggtcagcactgcccat

SEQ ID NO: 2313299 - DNA, 25 bp, Homo sapien
cactgcccattccagggccgtcttg

SEQ ID NO: 2313300 - DNA, 25 bp, Homo sapien
agggtccactgctgtcaggtcagca

SEQ ID NO: 2313301 - DNA, 25 bp, Homo sapien
cttgtagtgctggctaagctgctcc

SEQ ID NO: 2313302 - DNA, 25 bp, Homo sapien
aaggccggccactcgggcttgtagt

SEQ ID NO: 2313303 - DNA, 25 bp, Homo sapien
tcagcagctgccgaatcctccacac

SEQ ID NO: 2313304 - DNA, 25 bp, Homo sapien
cggacaaggccggccactcgggctt

SEQ ID NO: 2313305 - DNA, 25 bp, Homo sapien
aaggtagcctgcagccgttctagga

SEQ ID NO: 2313306 - DNA, 25 bp, Homo sapien
cctgcagccgttctaggagtgaagg

SEQ ID NO: 2313307 - DNA, 25 bp, Homo sapien
gaggctcaaggtagcctgcagccgt

SEQ ID NO: 2313308 - DNA, 25 bp, Homo sapien
tagcctgcagccgttctaggagtga

SEQ ID NO: 2313309 - DNA, 25 bp, Homo sapien
cagtggtgacgaagggactggccag

SEQ ID NO: 2313310 - DNA, 25 bp, Homo sapien
gcaggcagtggtgacgaagggactg

SEQ ID NO: 2313311 - DNA, 25 bp, Homo sapien
gcagtcacaaggtggtccagaacac

SEQ ID NO: 2313312 - DNA, 25 bp, Homo sapien
ggtgcccagcgaaggtggatggtca

SEQ ID NO: 2313313 - DNA, 25 bp, Homo sapien
ggttgtagccactgaaggcacttgc

SEQ ID NO: 2313314 - DNA, 25 bp, Homo sapien
gctcaatatgccctgagggctctgg

SEQ ID NO: 2313315 - DNA, 25 bp, Homo sapien
gggctggtgctatccctgggttgta

SEQ ID NO: 2313316 - DNA, 25 bp, Homo sapien
gctctggtaggggacgaagacccac

SEQ ID NO: 2313317 - DNA, 25 bp, Homo sapien
tcctgaaggactgggcttcggctgg

SEQ ID NO: 2313318 - DNA, 25 bp, Homo sapien
aggaagggccagactttggtgtcct

SEQ ID NO: 2313319 - DNA, 25 bp, Homo sapien
tgagctcctggtatcgccagagagg

SEQ ID NO: 2313320 - DNA, 25 bp, Homo sapien
aagggccagactttggtgtcctgaa

SEQ ID NO: 2313321 - DNA, 25 bp, Homo sapien
ttacctgttcccagcctgtcctatc

SEQ ID NO: 2313322 - DNA, 25 bp, Homo sapien
tacctgttcccagcctgtcctatcc

SEQ ID NO: 2313323 - DNA, 25 bp, Homo sapien
acctgttcccagcctgtcctatccc

SEQ ID NO: 2313324 - DNA, 25 bp, Homo sapien
cctgttcccagcctgtcctatccca

SEQ ID NO: 2313325 - DNA, 25 bp, Homo sapien
ttacatccgtaatcaatctagcctg

SEQ ID NO: 2313326 - DNA, 25 bp, Homo sapien
tagagtatgctctgtatggatggac

SEQ ID NO: 2313327 - DNA, 25 bp, Homo sapien
ctttcactcttgcaaacaatgctag

SEQ ID NO: 2313328 - DNA, 25 bp, Homo sapien
ccttactgatggacacttcgggtgt

SEQ ID NO: 2313329 - DNA, 25 bp, Homo sapien
ctggtggcggggagagcgcaatgcg

SEQ ID NO: 2313330 - DNA, 25 bp, Homo sapien
tggtggcggggagagcgcaatgcgc

SEQ ID NO: 2313331 - DNA, 25 bp, Homo sapien
ggcaccagcttgtgaacgtcttctg

SEQ ID NO: 2313332 - DNA, 25 bp, Homo sapien
tccgccagatccttcttggtcactg

SEQ ID NO: 2313333 - DNA, 25 bp, Homo sapien
ctcgtggcaccagcttgtgaacgtc

SEQ ID NO: 2313334 - DNA, 25 bp, Homo sapien
cgtggcaccagcttgtgaacgtctt

SEQ ID NO: 2313335 - DNA, 25 bp, Homo sapien
ggtcagcgccaatgccgtttgttca

SEQ ID NO: 2313336 - DNA, 25 bp, Homo sapien
caggtcagcgccaatgccgtttgtt

SEQ ID NO: 2313337 - DNA, 25 bp, Homo sapien
gtcagcgccaatgccgtttgttcac

SEQ ID NO: 2313338 - DNA, 25 bp, Homo sapien
ctcaggtcagcgccaatgccgtttg

SEQ ID NO: 2313339 - DNA, 25 bp, Homo sapien
gcagcgcaatgggcggcagcccgtc

SEQ ID NO: 2313340 - DNA, 25 bp, Homo sapien
ctcgagcagcgcaatgggcggcagc

SEQ ID NO: 2313341 - DNA, 25 bp, Homo sapien
tcgagcagcgcaatgggcggcagcc

SEQ ID NO: 2313342 - DNA, 25 bp, Homo sapien
cagcgcaatgggcggcagcccgtcg

SEQ ID NO: 2313343 - DNA, 25 bp, Homo sapien
gctttgctatcgatggacacgagct

SEQ ID NO: 2313344 - DNA, 25 bp, Homo sapien
ggctttgctatcgatggacacgagc

SEQ ID NO: 2313345 - DNA, 25 bp, Homo sapien
tggctttgctatcgatggacacgag

SEQ ID NO: 2313346 - DNA, 25 bp, Homo sapien
gcttctcctgcgttatccacaggtt

SEQ ID NO: 2313347 - DNA, 25 bp, Homo sapien
ggcttctcctgcgttatccacaggt

SEQ ID NO: 2313348 - DNA, 25 bp, Homo sapien
tgttcgtccacatccgggtgaatgg

SEQ ID NO: 2313349 - DNA, 25 bp, Homo sapien
tcataactgagtgttcgtccacatc

SEQ ID NO: 2313350 - DNA, 25 bp, Homo sapien
cacatccgggtgaatggtttcttca

SEQ ID NO: 2313351 - DNA, 25 bp, Homo sapien
tccgggtgaatggtttcttcaggag

SEQ ID NO: 2313352 - DNA, 25 bp, Homo sapien
cctggctttcttcgggttgagtttg

SEQ ID NO: 2313353 - DNA, 25 bp, Homo sapien
aggcttgcagcaatgagggcagagt

SEQ ID NO: 2313354 - DNA, 25 bp, Homo sapien
gaggcttgcagcaatgagggcagag

SEQ ID NO: 2313355 - DNA, 25 bp, Homo sapien
ggatgggggctggagcaaaaatgtt

SEQ ID NO: 2313356 - DNA, 25 bp, Homo sapien
ggaggggctcgctcggcgcagctgg

SEQ ID NO: 2313357 - DNA, 25 bp, Homo sapien
gggatgggggctggagcaaaaatgt

SEQ ID NO: 2313358 - DNA, 25 bp, Homo sapien
cagctggcgcggcagcctcccggga

SEQ ID NO: 2313359 - DNA, 25 bp, Homo sapien
cgccagcgctggacggcgggctggg

SEQ ID NO: 2313360 - DNA, 25 bp, Homo sapien
agttgcaccgccagcgctggacggc

SEQ ID NO: 2313361 - DNA, 25 bp, Homo sapien
cgcgcggccgcagttgcaccgccag

SEQ ID NO: 2313362 - DNA, 25 bp, Homo sapien
tctgggcccgctctgcgggtggcgg

SEQ ID NO: 2313363 - DNA, 25 bp, Homo sapien
gccctctcggagctgttccctggcc

SEQ ID NO: 2313364 - DNA, 25 bp, Homo sapien
caggaatcaagattgtttagattgg

SEQ ID NO: 2313365 - DNA, 25 bp, Homo sapien
cattcagggtcctgccaagccagga

SEQ ID NO: 2313366 - DNA, 25 bp, Homo sapien
cagggtcctgccaagccaggaacag

SEQ ID NO: 2313367 - DNA, 25 bp, Homo sapien
ttcctgccattcagggtcctgccaa

SEQ ID NO: 2313368 - DNA, 25 bp, Homo sapien
tgcccagaggaaatcacagagtttt

SEQ ID NO: 2313369 - DNA, 25 bp, Homo sapien
ctgcccagaggaaatcacagagttt

SEQ ID NO: 2313370 - DNA, 25 bp, Homo sapien
cccagaggaaatcacagagtttttt

SEQ ID NO: 2313371 - DNA, 25 bp, Homo sapien
cagaggaaatcacagagtttttttt

SEQ ID NO: 2313372 - DNA, 25 bp, Homo sapien
tgtgacagccgctggccgtggctcc

SEQ ID NO: 2313373 - DNA, 25 bp, Homo sapien
agcaagagaggtggagtaagagcca

SEQ ID NO: 2313374 - DNA, 25 bp, Homo sapien
tggagtaagagccatgaagtgtgac

SEQ ID NO: 2313375 - DNA, 25 bp, Homo sapien
atgaagtgtgacagccgctggccgt

SEQ ID NO: 2313376 - DNA, 25 bp, Homo sapien
cctgggtcaccaaggccatcagcag

SEQ ID NO: 2313377 - DNA, 25 bp, Homo sapien
catcagcagcatcagaaggcctttc

SEQ ID NO: 2313378 - DNA, 25 bp, Homo sapien
tgggtcaccaaggccatcagcagca

SEQ ID NO: 2313379 - DNA, 25 bp, Homo sapien
gtcaccaaggccatcagcagcatca

SEQ ID NO: 2313380 - DNA, 25 bp, Homo sapien
cagcagtagtggttgacgaactcgg

SEQ ID NO: 2313381 - DNA, 25 bp, Homo sapien
caggtaggccccttgcaatgtgggc

SEQ ID NO: 2313382 - DNA, 25 bp, Homo sapien
tgggctctcacacgtgcaggtcacc

SEQ ID NO: 2313383 - DNA, 25 bp, Homo sapien
gccccgagacggcttcacagggtct

SEQ ID NO: 2313384 - DNA, 25 bp, Homo sapien
gggccagctggccatctgttcccgg

SEQ ID NO: 2313385 - DNA, 25 bp, Homo sapien
ccggctgctccgaaggaggttgggt

SEQ ID NO: 2313386 - DNA, 25 bp, Homo sapien
tcggacatgccacaggcccaggaca

SEQ ID NO: 2313387 - DNA, 25 bp, Homo sapien
tgctgtcgccctgctcagatgcttt

SEQ ID NO: 2313388 - DNA, 25 bp, Homo sapien
acactccaccaaggcaacctgccgt

SEQ ID NO: 2313389 - DNA, 25 bp, Homo sapien
actccaccaaggcaacctgccgtgc

SEQ ID NO: 2313390 - DNA, 25 bp, Homo sapien
ccaaggcaacctgccgtgccactgt

SEQ ID NO: 2313391 - DNA, 25 bp, Homo sapien
tccaccaaggcaacctgccgtgcca

SEQ ID NO: 2313392 - DNA, 25 bp, Homo sapien
gatggccagaggggaaggtgagggt

SEQ ID NO: 2313393 - DNA, 25 bp, Homo sapien
atggccagaggggaaggtgagggtt

SEQ ID NO: 2313394 - DNA, 25 bp, Homo sapien
tgatggccagaggggaaggtgaggg

SEQ ID NO: 2313395 - DNA, 25 bp, Homo sapien
ctgatggccagaggggaaggtgagg

SEQ ID NO: 2313396 - DNA, 25 bp, Homo sapien
gccccgccacacttcgccatagcgg

SEQ ID NO: 2313397 - DNA, 25 bp, Homo sapien
cccgccacacttcgccatagcggcc

SEQ ID NO: 2313398 - DNA, 25 bp, Homo sapien
ccccgccacacttcgccatagcggc

SEQ ID NO: 2313399 - DNA, 25 bp, Homo sapien
tcagtctcccggaaccaggactgtt

SEQ ID NO: 2313400 - DNA, 25 bp, Homo sapien
tcgaggagaagatcttgacggccac

SEQ ID NO: 2313401 - DNA, 25 bp, Homo sapien
gagaagatcttgacggccacactct

SEQ ID NO: 2313402 - DNA, 25 bp, Homo sapien
gaaccaggactgttcatccctcgag

SEQ ID NO: 2313403 - DNA, 25 bp, Homo sapien
ctaggatgttgtcgtgtctgagcaa

SEQ ID NO: 2313404 - DNA, 25 bp, Homo sapien
ggatgttgtcgtgtctgagcaacac

SEQ ID NO: 2313405 - DNA, 25 bp, Homo sapien
taggatgttgtcgtgtctgagcaac

SEQ ID NO: 2313406 - DNA, 25 bp, Homo sapien
aggatgttgtcgtgtctgagcaaca

SEQ ID NO: 2313407 - DNA, 25 bp, Homo sapien
tctgttaatgtctggaggtctgcaa

SEQ ID NO: 2313408 - DNA, 25 bp, Homo sapien
agggttctgttaatgtctggaggtc

SEQ ID NO: 2313409 - DNA, 25 bp, Homo sapien
ctggaggtctgcaaacttgagccct

SEQ ID NO: 2313410 - DNA, 25 bp, Homo sapien
ggaggtctgcaaacttgagccctga

SEQ ID NO: 2313411 - DNA, 25 bp, Homo sapien
tctgcagaaagtcgtagagggagcc

SEQ ID NO: 2313412 - DNA, 25 bp, Homo sapien
caatggctggtttgccctgtgtacc

SEQ ID NO: 2313413 - DNA, 25 bp, Homo sapien
gaccagcacattgcggctcttgaag

SEQ ID NO: 2313414 - DNA, 25 bp, Homo sapien
tgtgtaccgaagatctccacgtgca

SEQ ID NO: 2313415 - DNA, 25 bp, Homo sapien
tctaggttcccaagaacccagcgag

SEQ ID NO: 2313416 - DNA, 25 bp, Homo sapien
ggcaggcattatgagcccacttcac

SEQ ID NO: 2313417 - DNA, 25 bp, Homo sapien
aggctggcgaaaccaggatgagaac

SEQ ID NO: 2313418 - DNA, 25 bp, Homo sapien
ggccccaggtactctttgcttgtgt

SEQ ID NO: 2313419 - DNA, 25 bp, Homo sapien
gactcaaagcagtccgtgcggatct

SEQ ID NO: 2313420 - DNA, 25 bp, Homo sapien
gatgtccaggtaatcgctgccctgt

SEQ ID NO: 2313421 - DNA, 25 bp, Homo sapien
ggcccagatgtcagtccacttgtag

SEQ ID NO: 2313422 - DNA, 25 bp, Homo sapien
acctcgggtgccatgtaccgcttgg

SEQ ID NO: 2313423 - DNA, 25 bp, Homo sapien
catcatagaagggtggtctatagtc

SEQ ID NO: 2313424 - DNA, 25 bp, Homo sapien
tgcagccagccggttagggatggtg

SEQ ID NO: 2313425 - DNA, 25 bp, Homo sapien
gggtggtctatagtcctccacgatg

SEQ ID NO: 2313426 - DNA, 25 bp, Homo sapien
tcattgggcaccacatcatagaagg

SEQ ID NO: 2313427 - DNA, 25 bp, Homo sapien
gggagtacctagagaggtgccctaa

SEQ ID NO: 2313428 - DNA, 25 bp, Homo sapien
caacagtctggcatatatgcgcatg

SEQ ID NO: 2313429 - DNA, 25 bp, Homo sapien
gatagcctctgacttttcacaggga

SEQ ID NO: 2313430 - DNA, 25 bp, Homo sapien
ggtgccctaaccaggacactcagta

SEQ ID NO: 2313431 - DNA, 25 bp, Homo sapien
gggtttgggtaccagcactcccgca

SEQ ID NO: 2313432 - DNA, 25 bp, Homo sapien
tcttgatccgcagcgcggtgagtcg

SEQ ID NO: 2313433 - DNA, 25 bp, Homo sapien
ttgtagtgtcttcttgatccgcagc

SEQ ID NO: 2313434 - DNA, 25 bp, Homo sapien
cgcatcatctgagctaggcctgaga

SEQ ID NO: 2313435 - DNA, 25 bp, Homo sapien
cagatagggcaccatccactgcccc

SEQ ID NO: 2313436 - DNA, 25 bp, Homo sapien
cccagctgtatttttggctgggtgg

SEQ ID NO: 2313437 - DNA, 25 bp, Homo sapien
cactcacactacctctacccagata

SEQ ID NO: 2313438 - DNA, 25 bp, Homo sapien
tacctctacccagatagggcaccat

SEQ ID NO: 2313439 - DNA, 25 bp, Homo sapien
atgcttggcctcgatatcctctcag

SEQ ID NO: 2313440 - DNA, 25 bp, Homo sapien
taatgccctagtaagtcaggcccca

SEQ ID NO: 2313441 - DNA, 25 bp, Homo sapien
cactcttgttgaggagacagaaagc

SEQ ID NO: 2313442 - DNA, 25 bp, Homo sapien
ttgtcacatggagcaaacatccggg

SEQ ID NO: 2313443 - DNA, 25 bp, Homo sapien
gaagacacacataagatgccggcct

SEQ ID NO: 2313444 - DNA, 25 bp, Homo sapien
tagataagaaacaaaggtcctggcc

SEQ ID NO: 2313445 - DNA, 25 bp, Homo sapien
cagagaagactatgccacagagagg

SEQ ID NO: 2313446 - DNA, 25 bp, Homo sapien
tactctgggtcattacagcaggagc

SEQ ID NO: 2313447 - DNA, 25 bp, Homo sapien
cagaagcatgtgcagactgctctca

SEQ ID NO: 2313448 - DNA, 25 bp, Homo sapien
agtgctcccacaaacagcgtctcca

SEQ ID NO: 2313449 - DNA, 25 bp, Homo sapien
cttcctgcactcagacagaagcatg

SEQ ID NO: 2313450 - DNA, 25 bp, Homo sapien
gaagtgtaatttcgaccctggaaca

SEQ ID NO: 2313451 - DNA, 25 bp, Homo sapien
aggatttaaccatggtttattgcag

SEQ ID NO: 2313452 - DNA, 25 bp, Homo sapien
ggatttaaccatggtttattgcaga

SEQ ID NO: 2313453 - DNA, 25 bp, Homo sapien
caggatttaaccatggtttattgca

SEQ ID NO: 2313454 - DNA, 25 bp, Homo sapien
tctgtttctggtgatgctggtaata

SEQ ID NO: 2313455 - DNA, 25 bp, Homo sapien
cctcttcctatcagttgaccctgag

SEQ ID NO: 2313456 - DNA, 25 bp, Homo sapien
ccctgagcaaccagattctgtttct

SEQ ID NO: 2313457 - DNA, 25 bp, Homo sapien
cctgcccatgtgtctccctggacaa

SEQ ID NO: 2313458 - DNA, 25 bp, Homo sapien
tccaacacaagaagggtggtagggc

SEQ ID NO: 2313459 - DNA, 25 bp, Homo sapien
agggcctgcctcgaaaacttgtttg

SEQ ID NO: 2313460 - DNA, 25 bp, Homo sapien
caggttatctcaactgcaggcccag

SEQ ID NO: 2313461 - DNA, 25 bp, Homo sapien
gcaggcccagcgctttaggacaact

SEQ ID NO: 2313462 - DNA, 25 bp, Homo sapien
caacactatggggattagattctca

SEQ ID NO: 2313463 - DNA, 25 bp, Homo sapien
ctcaacactatggggattagattct

SEQ ID NO: 2313464 - DNA, 25 bp, Homo sapien
tatggggattagattctcaaattca

SEQ ID NO: 2313465 - DNA, 25 bp, Homo sapien
cactatggggattagattctcaaat

SEQ ID NO: 2313466 - DNA, 25 bp, Homo sapien
gactaacatggtggccaggaaccac

SEQ ID NO: 2313467 - DNA, 25 bp, Homo sapien
cctctggcccagtaatctgtgggga

SEQ ID NO: 2313468 - DNA, 25 bp, Homo sapien
tcgtgttggactaacatggtggcca

SEQ ID NO: 2313469 - DNA, 25 bp, Homo sapien
agtgggctgcatcgtgttggactaa

SEQ ID NO: 2313470 - DNA, 25 bp, Homo sapien
catgctgttgtcatgggaacctaca

SEQ ID NO: 2313471 - DNA, 25 bp, Homo sapien
tgtcatgggaacctacagaggccgc

SEQ ID NO: 2313472 - DNA, 25 bp, Homo sapien
caggcatgctgttgtcatgggaacc

SEQ ID NO: 2313473 - DNA, 25 bp, Homo sapien
tgttgtcatgggaacctacagaggc

SEQ ID NO: 2313474 - DNA, 25 bp, Homo sapien
ccagcagcgcccagcgcgcgcgcgc

SEQ ID NO: 2313475 - DNA, 25 bp, Homo sapien
ccgccgcagcccagcagcgcccagc

SEQ ID NO: 2313476 - DNA, 25 bp, Homo sapien
ccgcagcccagcagcgcccagcgcg

SEQ ID NO: 2313477 - DNA, 25 bp, Homo sapien
agcccagcagcgcccagcgcgcgcg

SEQ ID NO: 2313478 - DNA, 25 bp, Homo sapien
ctgccggcgagcaggaggacaacaa

SEQ ID NO: 2313479 - DNA, 25 bp, Homo sapien
cgccgctgccggcgagcaggaggac

SEQ ID NO: 2313480 - DNA, 25 bp, Homo sapien
gctgccggcgagcaggaggacaaca

SEQ ID NO: 2313481 - DNA, 25 bp, Homo sapien
ccgctgccggcgagcaggaggacaa

SEQ ID NO: 2313482 - DNA, 25 bp, Homo sapien
cacccggccatattgtgctcgtggg

SEQ ID NO: 2313483 - DNA, 25 bp, Homo sapien
cctctctggaacacgagggcgctgg

SEQ ID NO: 2313484 - DNA, 25 bp, Homo sapien
gcgctgtagtccagcggccgcggct

SEQ ID NO: 2313485 - DNA, 25 bp, Homo sapien
ttccgcctggaacagggctcgggtc

SEQ ID NO: 2313486 - DNA, 25 bp, Homo sapien
tattaaagacgactgaacccacctg

SEQ ID NO: 2313487 - DNA, 25 bp, Homo sapien
taggagaagcattagcccgtgaaca

SEQ ID NO: 2313488 - DNA, 25 bp, Homo sapien
agcatcaggctttgtacgtcaggag

SEQ ID NO: 2313489 - DNA, 25 bp, Homo sapien
aaaggtacccgcttctacagagagg

SEQ ID NO: 2313490 - DNA, 25 bp, Homo sapien
ttcaactttatggaactaccacaaa

SEQ ID NO: 2313491 - DNA, 25 bp, Homo sapien
gaagatttggtaattcagttctaca

SEQ ID NO: 2313492 - DNA, 25 bp, Homo sapien
tgaaaaagtgaccagaggctcgcag

SEQ ID NO: 2313493 - DNA, 25 bp, Homo sapien
taacaagactgtattagccccattt

SEQ ID NO: 2313494 - DNA, 25 bp, Homo sapien
actctcgtactatacagcctgggtg

SEQ ID NO: 2313495 - DNA, 25 bp, Homo sapien
gtgcctggcctatgatacactctcg

SEQ ID NO: 2313496 - DNA, 25 bp, Homo sapien
tatgatacactctcgtactatacag

SEQ ID NO: 2313497 - DNA, 25 bp, Homo sapien
gcctggcctatgatacactctcgta

SEQ ID NO: 2313498 - DNA, 25 bp, Homo sapien
tagagaagcttagttcaggcatgag

SEQ ID NO: 2313499 - DNA, 25 bp, Homo sapien
aagatagtgatatgcctcacagaga

SEQ ID NO: 2313500 - DNA, 25 bp, Homo sapien
tgctgctgtcagtaaagttcaatgt

SEQ ID NO: 2313501 - DNA, 25 bp, Homo sapien
tactgtaaacaagttatcctttctg

SEQ ID NO: 2313502 - DNA, 25 bp, Homo sapien
tctcactggtatctagtacagcacc

SEQ ID NO: 2313503 - DNA, 25 bp, Homo sapien
tgccaatggtggtatacagaaaaac

SEQ ID NO: 2313504 - DNA, 25 bp, Homo sapien
tccgggaatctctgaactcacaaag

SEQ ID NO: 2313505 - DNA, 25 bp, Homo sapien
tagctactgatctagacaactgcca

SEQ ID NO: 2313506 - DNA, 25 bp, Homo sapien
ggtctgtcagatatgacaccaaagc

SEQ ID NO: 2313507 - DNA, 25 bp, Homo sapien
tcagaagaggggtaaaacttcatga

SEQ ID NO: 2313508 - DNA, 25 bp, Homo sapien
ggatttggcaatggtctgtcagata

SEQ ID NO: 2313509 - DNA, 25 bp, Homo sapien
ggcaatggtctgtcagatatgacac

SEQ ID NO: 2313510 - DNA, 25 bp, Homo sapien
cccattgtgctttgatgcagccgca

SEQ ID NO: 2313511 - DNA, 25 bp, Homo sapien
taatcactgacgtccggcctaattc

SEQ ID NO: 2313512 - DNA, 25 bp, Homo sapien
agttctaagactgcgtatcctaagg

SEQ ID NO: 2313513 - DNA, 25 bp, Homo sapien
tccatataaggaaaggacctcgctg

SEQ ID NO: 2313514 - DNA, 25 bp, Homo sapien
acttgttcacttcgaaataatttgg

SEQ ID NO: 2313515 - DNA, 25 bp, Homo sapien
taacatctacaacttgttcacttcg

SEQ ID NO: 2313516 - DNA, 25 bp, Homo sapien
ctcaagaggtatctaacatctacaa

SEQ ID NO: 2313517 - DNA, 25 bp, Homo sapien
cacttcgaaataatttggacttgta

SEQ ID NO: 2313518 - DNA, 25 bp, Homo sapien
cccgtatcaaatgcgctattggttt

SEQ ID NO: 2313519 - DNA, 25 bp, Homo sapien
caaatgcgctattggttttctgacc

SEQ ID NO: 2313520 - DNA, 25 bp, Homo sapien
cctccccgtatcaaatgcgctattg

SEQ ID NO: 2313521 - DNA, 25 bp, Homo sapien
gcgctattggttttctgaccaaaga

SEQ ID NO: 2313522 - DNA, 25 bp, Homo sapien
ggaggggtgtgggagtgtgcagcat

SEQ ID NO: 2313523 - DNA, 25 bp, Homo sapien
gaaattggggagcagacattgacat

SEQ ID NO: 2313524 - DNA, 25 bp, Homo sapien
ctgcaggaaattggggagcagacat

SEQ ID NO: 2313525 - DNA, 25 bp, Homo sapien
caggaaattggggagcagacattga

SEQ ID NO: 2313526 - DNA, 25 bp, Homo sapien
ggaaattggggagcagacattgaca

SEQ ID NO: 2313527 - DNA, 25 bp, Homo sapien
tggaggcagctggtgcacgcacaca

SEQ ID NO: 2313528 - DNA, 25 bp, Homo sapien
ctggaggcagctggtgcacgcacac

SEQ ID NO: 2313529 - DNA, 25 bp, Homo sapien
gaggcagctggtgcacgcacacagc

SEQ ID NO: 2313530 - DNA, 25 bp, Homo sapien
ggcagctggtgcacgcacacagcag

SEQ ID NO: 2313531 - DNA, 25 bp, Homo sapien
tgggcaccctcaagtcgatcctgtt

SEQ ID NO: 2313532 - DNA, 25 bp, Homo sapien
tccgagctcaggcagtagaagggct

SEQ ID NO: 2313533 - DNA, 25 bp, Homo sapien
tgcaggtgcgcacatggtgctccat

SEQ ID NO: 2313534 - DNA, 25 bp, Homo sapien
catctgtctcacacgtgtagttggc

SEQ ID NO: 2313535 - DNA, 25 bp, Homo sapien
ccctgaggtggagagatcgtagaca

SEQ ID NO: 2313536 - DNA, 25 bp, Homo sapien
tgagggatcttccatgtccagtctc

SEQ ID NO: 2313537 - DNA, 25 bp, Homo sapien
tcgtagacaagatcctggagcgtct

SEQ ID NO: 2313538 - DNA, 25 bp, Homo sapien
tctggcggttgtgatagacacgctg

SEQ ID NO: 2313539 - DNA, 25 bp, Homo sapien
gatgtacgtacagttgcaaagctta

SEQ ID NO: 2313540 - DNA, 25 bp, Homo sapien
taggaaaccaaatgactcaatgctg

SEQ ID NO: 2313541 - DNA, 25 bp, Homo sapien
caaagcttagagaggcaggacttct

SEQ ID NO: 2313542 - DNA, 25 bp, Homo sapien
ttgtgtactagaccttgggaatccc

SEQ ID NO: 2313543 - DNA, 25 bp, Homo sapien
gctagctgagctataccctgagacc

SEQ ID NO: 2313544 - DNA, 25 bp, Homo sapien
aaaattctttacgaggcaggcggat

SEQ ID NO: 2313545 - DNA, 25 bp, Homo sapien
tgttcacatttaatagctagctgag

SEQ ID NO: 2313546 - DNA, 25 bp, Homo sapien
tttcagagagcggaaattgcgccac

SEQ ID NO: 2313547 - DNA, 25 bp, Homo sapien
tgaaccaagaccgttcttcacgaga

SEQ ID NO: 2313548 - DNA, 25 bp, Homo sapien
catgaccgtctggtatatctctgct

SEQ ID NO: 2313549 - DNA, 25 bp, Homo sapien
cgacccttgccaataatctcttgta

SEQ ID NO: 2313550 - DNA, 25 bp, Homo sapien
taaaacgatggttcgggccactgtg

SEQ ID NO: 2313551 - DNA, 25 bp, Homo sapien
tctctagcatcctctatctgggaat

SEQ ID NO: 2313552 - DNA, 25 bp, Homo sapien
atctgggaatgctgtatccaagccc

SEQ ID NO: 2313553 - DNA, 25 bp, Homo sapien
ctttctctagcatcctctatctggg

SEQ ID NO: 2313554 - DNA, 25 bp, Homo sapien
gaatgctgtatccaagcccagccct

SEQ ID NO: 2313555 - DNA, 25 bp, Homo sapien
gcgcccagcccatcctagtgatttt

SEQ ID NO: 2313556 - DNA, 25 bp, Homo sapien
ggctccacactttaaggaaagcatg

SEQ ID NO: 2313557 - DNA, 25 bp, Homo sapien
ggaaagcatggaaaccttgacctta

SEQ ID NO: 2313558 - DNA, 25 bp, Homo sapien
cccctgcaggaactacaatggaggt

SEQ ID NO: 2313559 - DNA, 25 bp, Homo sapien
aaacagggacccgtgctcatgatag

SEQ ID NO: 2313560 - DNA, 25 bp, Homo sapien
aattgtcactgtgtaccggttcaga

SEQ ID NO: 2313561 - DNA, 25 bp, Homo sapien
atgtgcaggtgtgccagcccactag

SEQ ID NO: 2313562 - DNA, 25 bp, Homo sapien
tgggtgcccacgatctccatgtgca

SEQ ID NO: 2313563 - DNA, 25 bp, Homo sapien
tcagtgactgcatcatgacggacag

SEQ ID NO: 2313564 - DNA, 25 bp, Homo sapien
cgtttggtccccaccctctgattcg

SEQ ID NO: 2313565 - DNA, 25 bp, Homo sapien
ggcccaggtctgctatggcacacat

SEQ ID NO: 2313566 - DNA, 25 bp, Homo sapien
caccctctgattcggggcaatgtca

SEQ ID NO: 2313567 - DNA, 25 bp, Homo sapien
tggaagagtatcaccctgataaagt

SEQ ID NO: 2313568 - DNA, 25 bp, Homo sapien
ctgaatgtggaagagtatcaccctg

SEQ ID NO: 2313569 - DNA, 25 bp, Homo sapien
tcaaagtattgattcaggagccctc

SEQ ID NO: 2313570 - DNA, 25 bp, Homo sapien
atctcttcattgcaaactcccatgt

SEQ ID NO: 2313571 - DNA, 25 bp, Homo sapien
tctcccaatatacaagcccgagggc

SEQ ID NO: 2313572 - DNA, 25 bp, Homo sapien
gcccgagggcataaatatcagcaca

SEQ ID NO: 2313573 - DNA, 25 bp, Homo sapien
taatggtttcatcaagtacttcagg

SEQ ID NO: 2313574 - DNA, 25 bp, Homo sapien
tccagaattgcatcttcgagcaatc

SEQ ID NO: 2313575 - DNA, 25 bp, Homo sapien
ccttaaacgatgattcaggctctgg

SEQ ID NO: 2313576 - DNA, 25 bp, Homo sapien
caggcatccaacaggttgtaaaaag

SEQ ID NO: 2313577 - DNA, 25 bp, Homo sapien
ctttgatggcaaccttaaacgatga

SEQ ID NO: 2313578 - DNA, 25 bp, Homo sapien
cagctttgggtgatccagcatcctg

SEQ ID NO: 2313579 - DNA, 25 bp, Homo sapien
actgatccctgaagaataaacgcac

SEQ ID NO: 2313580 - DNA, 25 bp, Homo sapien
gatccctgaagaataaacgcaccct

SEQ ID NO: 2313581 - DNA, 25 bp, Homo sapien
aataaacgcaccctaagcacagcta

SEQ ID NO: 2313582 - DNA, 25 bp, Homo sapien
cctgaagaataaacgcaccctaagc

SEQ ID NO: 2313583 - DNA, 25 bp, Homo sapien
caaacgagccttcagaatggttacc

SEQ ID NO: 2313584 - DNA, 25 bp, Homo sapien
gattctgtcatgaataagcagctgc

SEQ ID NO: 2313585 - DNA, 25 bp, Homo sapien
gcttgggagccaccgcgttagaata

SEQ ID NO: 2313586 - DNA, 25 bp, Homo sapien
ggagaccactgcatgaatcccgtgc

SEQ ID NO: 2313587 - DNA, 25 bp, Homo sapien
tatatgtgctggcgaagtgagcacc

SEQ ID NO: 2313588 - DNA, 25 bp, Homo sapien
gatgttgggacgcagcttctgatca

SEQ ID NO: 2313589 - DNA, 25 bp, Homo sapien
tcaatggaagggtcagagggcacta

SEQ ID NO: 2313590 - DNA, 25 bp, Homo sapien
tctgatcacatacaacctttcgcat

SEQ ID NO: 2313591 - DNA, 25 bp, Homo sapien
cactaagtcgtaatatggcagctga

SEQ ID NO: 2313592 - DNA, 25 bp, Homo sapien
gggaaagccgcaggaggccagcttc

SEQ ID NO: 2313593 - DNA, 25 bp, Homo sapien
gaaagccgcaggaggccagcttctt

SEQ ID NO: 2313594 - DNA, 25 bp, Homo sapien
tcaggctgatgggaaagccgcagga

SEQ ID NO: 2313595 - DNA, 25 bp, Homo sapien
ctgatgggaaagccgcaggaggcca

SEQ ID NO: 2313596 - DNA, 25 bp, Homo sapien
tatgtaaaatagcacgtaatagtaa

SEQ ID NO: 2313597 - DNA, 25 bp, Homo sapien
gacaagagactgtagccctaaaggg

SEQ ID NO: 2313598 - DNA, 25 bp, Homo sapien
caaatggcaccctacagggtccagg

SEQ ID NO: 2313599 - DNA, 25 bp, Homo sapien
gggcctgaccccattgtcaagaaac

SEQ ID NO: 2313600 - DNA, 25 bp, Homo sapien
catgagcacttagctaggcgaagcc

SEQ ID NO: 2313601 - DNA, 25 bp, Homo sapien
gaaccgcaagtgaaaaggaggccca

SEQ ID NO: 2313602 - DNA, 25 bp, Homo sapien
ttacacaagtgaaaggcaaacgctg

SEQ ID NO: 2313603 - DNA, 25 bp, Homo sapien
ggctctaatggacggcaaggtgact

SEQ ID NO: 2313604 - DNA, 25 bp, Homo sapien
gtcttcttgatgcgcagggccgtca

SEQ ID NO: 2313605 - DNA, 25 bp, Homo sapien
ttggcataccaacactctcgcatca

SEQ ID NO: 2313606 - DNA, 25 bp, Homo sapien
tcttcctgcacgctgagctgggaga

SEQ ID NO: 2313607 - DNA, 25 bp, Homo sapien
tcaggcgggctgcgccgttggcata

SEQ ID NO: 2313608 - DNA, 25 bp, Homo sapien
cacacgcacgtgtaagggcatggca

SEQ ID NO: 2313609 - DNA, 25 bp, Homo sapien
gaaagctcaagcaggtaagtgcgca

SEQ ID NO: 2313610 - DNA, 25 bp, Homo sapien
ggcagattccgtctccactggcagt

SEQ ID NO: 2313611 - DNA, 25 bp, Homo sapien
gatgctgctcactactgaaaagagg

SEQ ID NO: 2313612 - DNA, 25 bp, Homo sapien
gctggacagtgcaagaaagggccct

SEQ ID NO: 2313613 - DNA, 25 bp, Homo sapien
caaacagaagtaccgagaatgccgt

SEQ ID NO: 2313614 - DNA, 25 bp, Homo sapien
tccaggagtaggacccaagcatgtc

SEQ ID NO: 2313615 - DNA, 25 bp, Homo sapien
taaaccgccaaggttctgctgcagg

SEQ ID NO: 2313616 - DNA, 25 bp, Homo sapien
tgaataaaacttttaataatgtaca

SEQ ID NO: 2313617 - DNA, 25 bp, Homo sapien
tcagaaggacccagggatatcttcc

SEQ ID NO: 2313618 - DNA, 25 bp, Homo sapien
tccccaataactttcaggccatagt

SEQ ID NO: 2313619 - DNA, 25 bp, Homo sapien
cactccattcattaaggttgctcga

SEQ ID NO: 2313620 - DNA, 25 bp, Homo sapien
taaaccccatcctctgaccaaggaa

SEQ ID NO: 2313621 - DNA, 25 bp, Homo sapien
ccattccaccaggtagggagccgct

SEQ ID NO: 2313622 - DNA, 25 bp, Homo sapien
cgctgtagggcagggatatgtcact

SEQ ID NO: 2313623 - DNA, 25 bp, Homo sapien
cttccccggacacctcatctgtggt

SEQ ID NO: 2313624 - DNA, 25 bp, Homo sapien
tcatctgtggtcccatggtactttg

SEQ ID NO: 2313625 - DNA, 25 bp, Homo sapien
tactgcgcgaccatttccatgggac

SEQ ID NO: 2313626 - DNA, 25 bp, Homo sapien
cgtggctcctactgcgcgaccattt

SEQ ID NO: 2313627 - DNA, 25 bp, Homo sapien
ctgtttttcttcgtggctcctactg

SEQ ID NO: 2313628 - DNA, 25 bp, Homo sapien
ttcttcgtggctcctactgcgcgac

SEQ ID NO: 2313629 - DNA, 25 bp, Homo sapien
ctcagagacggcgctggctcccctc

SEQ ID NO: 2313630 - DNA, 25 bp, Homo sapien
tcagagacggcgctggctcccctcg

SEQ ID NO: 2313631 - DNA, 25 bp, Homo sapien
cgcgacttccgagtcgggagtccgg

SEQ ID NO: 2313632 - DNA, 25 bp, Homo sapien
cgggcgcgacttccgagtcgggagt

SEQ ID NO: 2313633 - DNA, 25 bp, Homo sapien
agcggcgggcgcgacttccgagtcg

SEQ ID NO: 2313634 - DNA, 25 bp, Homo sapien
ggcgggcgcgacttccgagtcggga

SEQ ID NO: 2313635 - DNA, 25 bp, Homo sapien
acacggcgagcgcgcggtacagctc

SEQ ID NO: 2313636 - DNA, 25 bp, Homo sapien
ccggacacggcgagcgcgcggtaca

SEQ ID NO: 2313637 - DNA, 25 bp, Homo sapien
gcggtacagctcggcagggtgatag

SEQ ID NO: 2313638 - DNA, 25 bp, Homo sapien
gtacagctcggcagggtgatagtcc

SEQ ID NO: 2313639 - DNA, 25 bp, Homo sapien
gcggagttaagagccaccgagcctg

SEQ ID NO: 2313640 - DNA, 25 bp, Homo sapien
ggactccgcggacgccgaggagagg

SEQ ID NO: 2313641 - DNA, 25 bp, Homo sapien
cagaaagccagatggagcgggtagg

SEQ ID NO: 2313642 - DNA, 25 bp, Homo sapien
gtgtgcaggcgagggccacggcctt

SEQ ID NO: 2313643 - DNA, 25 bp, Homo sapien
ctctcggaccttcaacttgcctggg

SEQ ID NO: 2313644 - DNA, 25 bp, Homo sapien
tgtgctatccggagtcagcggctcc

SEQ ID NO: 2313645 - DNA, 25 bp, Homo sapien
gagtcccctcggaagggtgtgctat

SEQ ID NO: 2313646 - DNA, 25 bp, Homo sapien
gggctctcggaccttcaacttgcct

SEQ ID NO: 2313647 - DNA, 25 bp, Homo sapien
tgcgtccggttccgacagaagtcca

SEQ ID NO: 2313648 - DNA, 25 bp, Homo sapien
cgtccggttccgacagaagtccagg

SEQ ID NO: 2313649 - DNA, 25 bp, Homo sapien
gcgtccggttccgacagaagtccag

SEQ ID NO: 2313650 - DNA, 25 bp, Homo sapien
cccaaagctgcccaaggcaaggaag

SEQ ID NO: 2313651 - DNA, 25 bp, Homo sapien
taaagtagtctctcaccctccctaa

SEQ ID NO: 2313652 - DNA, 25 bp, Homo sapien
gagaaggttcagaaccagattggcc

SEQ ID NO: 2313653 - DNA, 25 bp, Homo sapien
cctggtgttgtgtaggttctgagcc

SEQ ID NO: 2313654 - DNA, 25 bp, Homo sapien
ttccagatccatgaacctctaagcc

SEQ ID NO: 2313655 - DNA, 25 bp, Homo sapien
gggactgcagggacacaaccatcct

SEQ ID NO: 2313656 - DNA, 25 bp, Homo sapien
cagatccatgaacctctaagccctt

SEQ ID NO: 2313657 - DNA, 25 bp, Homo sapien
tccagatccatgaacctctaagccc

SEQ ID NO: 2313658 - DNA, 25 bp, Homo sapien
tgagattcttccagcggaatcctga

SEQ ID NO: 2313659 - DNA, 25 bp, Homo sapien
gagattcttccagcggaatcctgag

SEQ ID NO: 2313660 - DNA, 25 bp, Homo sapien
cgctgctgttcaggactctggctga

SEQ ID NO: 2313661 - DNA, 25 bp, Homo sapien
gattcttccagcggaatcctgagcc

SEQ ID NO: 2313662 - DNA, 25 bp, Homo sapien
actagctaaggcccgaaattcagcc

SEQ ID NO: 2313663 - DNA, 25 bp, Homo sapien
tagctaaggcccgaaattcagccac

SEQ ID NO: 2313664 - DNA, 25 bp, Homo sapien
ctaaggcccgaaattcagccacagc

SEQ ID NO: 2313665 - DNA, 25 bp, Homo sapien
tgactagctaaggcccgaaattcag

SEQ ID NO: 2313666 - DNA, 25 bp, Homo sapien
ctggatctcaaagccgaaggtctgg

SEQ ID NO: 2313667 - DNA, 25 bp, Homo sapien
tggatctcaaagccgaaggtctggt

SEQ ID NO: 2313668 - DNA, 25 bp, Homo sapien
gactcatgaactcggcagacaaagg

SEQ ID NO: 2313669 - DNA, 25 bp, Homo sapien
agctgggcagggctagactcatgaa

SEQ ID NO: 2313670 - DNA, 25 bp, Homo sapien
tcggcagacaaaggtcaccatttcc

SEQ ID NO: 2313671 - DNA, 25 bp, Homo sapien
gggctagactcatgaactcggcaga

SEQ ID NO: 2313672 - DNA, 25 bp, Homo sapien
ccttcccagacctgggtgtcctggg

SEQ ID NO: 2313673 - DNA, 25 bp, Homo sapien
ccccttcccagacctgggtgtcctg

SEQ ID NO: 2313674 - DNA, 25 bp, Homo sapien
cctgggtgtcctgggctcaggcccc

SEQ ID NO: 2313675 - DNA, 25 bp, Homo sapien
tgggtgtcctgggctcaggccccac

SEQ ID NO: 2313676 - DNA, 25 bp, Homo sapien
cccctttgcttgggagtaaggtcat

SEQ ID NO: 2313677 - DNA, 25 bp, Homo sapien
aaaaggaagaggaattgatttcagg

SEQ ID NO: 2313678 - DNA, 25 bp, Homo sapien
aattgatttcaggagagattgctca

SEQ ID NO: 2313679 - DNA, 25 bp, Homo sapien
agtacatggcaaatttgcctagatc

SEQ ID NO: 2313680 - DNA, 25 bp, Homo sapien
catggcaaatttgcctagatccaaa

SEQ ID NO: 2313681 - DNA, 25 bp, Homo sapien
cagacaagggggttagatttgctcc

SEQ ID NO: 2313682 - DNA, 25 bp, Homo sapien
gatttgctccatggggcatgctaga

SEQ ID NO: 2313683 - DNA, 25 bp, Homo sapien
tggggcatgctagaataccagcctc

SEQ ID NO: 2313684 - DNA, 25 bp, Homo sapien
tgggtagtaactccagggaatactc

SEQ ID NO: 2313685 - DNA, 25 bp, Homo sapien
cattcaggccattgacgctggcgat

SEQ ID NO: 2313686 - DNA, 25 bp, Homo sapien
gcctgacgccttaatgatgtccaca

SEQ ID NO: 2313687 - DNA, 25 bp, Homo sapien
gatgtccacaatctctcgatgccgg

SEQ ID NO: 2313688 - DNA, 25 bp, Homo sapien
tctcgatgccggatgccttccacat

SEQ ID NO: 2313689 - DNA, 25 bp, Homo sapien
ctcaggaattcaggcacctcggctc

SEQ ID NO: 2313690 - DNA, 25 bp, Homo sapien
gaattcaggcacctcggctcccaga

SEQ ID NO: 2313691 - DNA, 25 bp, Homo sapien
tggagaatcaaagcctgagtgagcc

SEQ ID NO: 2313692 - DNA, 25 bp, Homo sapien
gagaatcaaagcctgagtgagccac

SEQ ID NO: 2313693 - DNA, 25 bp, Homo sapien
tgatgtcccatatagagtttccagt

SEQ ID NO: 2313694 - DNA, 25 bp, Homo sapien
ttcaggtactgcagacgagcctcca

SEQ ID NO: 2313695 - DNA, 25 bp, Homo sapien
gagcctccagttctgccttccgaat

SEQ ID NO: 2313696 - DNA, 25 bp, Homo sapien
gccttccgaattgatgtcccatata

SEQ ID NO: 2313697 - DNA, 25 bp, Homo sapien
ctgcaccattagggacctgtactct

SEQ ID NO: 2313698 - DNA, 25 bp, Homo sapien
caccattagggacctgtactctccc

SEQ ID NO: 2313699 - DNA, 25 bp, Homo sapien
tgcaccattagggacctgtactctc

SEQ ID NO: 2313700 - DNA, 25 bp, Homo sapien
gcaccattagggacctgtactctcc

SEQ ID NO: 2313701 - DNA, 25 bp, Homo sapien
tgtctgtagcagaacaagtggcccc

SEQ ID NO: 2313702 - DNA, 25 bp, Homo sapien
taaccagaaatgtggctgcggcagt

SEQ ID NO: 2313703 - DNA, 25 bp, Homo sapien
tatctgttacttacctgcagagggc

SEQ ID NO: 2313704 - DNA, 25 bp, Homo sapien
tgcggcagtacccaaagtagtagta

SEQ ID NO: 2313705 - DNA, 25 bp, Homo sapien
ccagcgtgtcgtagatgctggggtc

SEQ ID NO: 2313706 - DNA, 25 bp, Homo sapien
actccagcgtgtcgtagatgctggg

SEQ ID NO: 2313707 - DNA, 25 bp, Homo sapien
agcgtgtcgtagatgctggggtcct

SEQ ID NO: 2313708 - DNA, 25 bp, Homo sapien
cgactccagcgtgtcgtagatgctg

SEQ ID NO: 2313709 - DNA, 25 bp, Homo sapien
cgggcacggcgagcagaggcccgaa

SEQ ID NO: 2313710 - DNA, 25 bp, Homo sapien
ccgaagggcagcgagcccgggagca

SEQ ID NO: 2313711 - DNA, 25 bp, Homo sapien
gcaggcccgcgccgtagaggcagga

SEQ ID NO: 2313712 - DNA, 25 bp, Homo sapien
cgtcgtcggcgtcgcccctggcccg

SEQ ID NO: 2313713 - DNA, 25 bp, Homo sapien
gcggctcggagtccccgaagaagca

SEQ ID NO: 2313714 - DNA, 25 bp, Homo sapien
gcaccgcacactggcgctgcggctc

SEQ ID NO: 2313715 - DNA, 25 bp, Homo sapien
gcctcagtccagagcgcgcccggcg

SEQ ID NO: 2313716 - DNA, 25 bp, Homo sapien
cccgcgcaccgcacactggcgctgc

SEQ ID NO: 2313717 - DNA, 25 bp, Homo sapien
tacttggttttgcgcaggccggggc

SEQ ID NO: 2313718 - DNA, 25 bp, Homo sapien
ttgagtccggggatgaacttgagca

SEQ ID NO: 2313719 - DNA, 25 bp, Homo sapien
tgaacttgagcagccgccggcggaa

SEQ ID NO: 2313720 - DNA, 25 bp, Homo sapien
ggatgaacttgagcagccgccggcg

SEQ ID NO: 2313721 - DNA, 25 bp, Homo sapien
cagggagcggttgagtccggggatg

SEQ ID NO: 2313722 - DNA, 25 bp, Homo sapien
catttctccccaaggctaagggcgg

SEQ ID NO: 2313723 - DNA, 25 bp, Homo sapien
tatgcacaacggtggaacagtctgt

SEQ ID NO: 2313724 - DNA, 25 bp, Homo sapien
ggataccccacaaggcactacagat

SEQ ID NO: 2313725 - DNA, 25 bp, Homo sapien
tgcctggcaggacccgacttagtta

SEQ ID NO: 2313726 - DNA, 25 bp, Homo sapien
gatggggttcactcccttgggagcc

SEQ ID NO: 2313727 - DNA, 25 bp, Homo sapien
gcatgagatggggttcactcccttg

SEQ ID NO: 2313728 - DNA, 25 bp, Homo sapien
gttcactcccttgggagcccacaat

SEQ ID NO: 2313729 - DNA, 25 bp, Homo sapien
gggttcactcccttgggagcccaca

SEQ ID NO: 2313730 - DNA, 25 bp, Homo sapien
tgctgccagggcagattagcgcagg

SEQ ID NO: 2313731 - DNA, 25 bp, Homo sapien
cagattagcgcagggggccctcctg

SEQ ID NO: 2313732 - DNA, 25 bp, Homo sapien
agagcacaccggatgatgcacccag

SEQ ID NO: 2313733 - DNA, 25 bp, Homo sapien
atgatgcacccagggcgtgccagct

SEQ ID NO: 2313734 - DNA, 25 bp, Homo sapien
tccgacgacggcttccagatttttc

SEQ ID NO: 2313735 - DNA, 25 bp, Homo sapien
cgacgacggcttccagatttttctc

SEQ ID NO: 2313736 - DNA, 25 bp, Homo sapien
gagatgggatctggcccggcgggtc

SEQ ID NO: 2313737 - DNA, 25 bp, Homo sapien
tctccgcgtcgccagagatgggatc

SEQ ID NO: 2313738 - DNA, 25 bp, Homo sapien
ccccgcccgcagttccggccgcgcg

SEQ ID NO: 2313739 - DNA, 25 bp, Homo sapien
cccgcccgcagttccggccgcgcgg

SEQ ID NO: 2313740 - DNA, 25 bp, Homo sapien
cgcaccagccggccctgagctgctc

SEQ ID NO: 2313741 - DNA, 25 bp, Homo sapien
cccgctttccggggtcgcgcaccag

SEQ ID NO: 2313742 - DNA, 25 bp, Homo sapien
agctgctctgcaccgcaggggcgcc

SEQ ID NO: 2313743 - DNA, 25 bp, Homo sapien
ctgagctgctctgcaccgcaggggc

SEQ ID NO: 2313744 - DNA, 25 bp, Homo sapien
agggcaggaccaggccttcactggc

SEQ ID NO: 2313745 - DNA, 25 bp, Homo sapien
ggaccaggccttcactggctattgg

SEQ ID NO: 2313746 - DNA, 25 bp, Homo sapien
gcaggaccaggccttcactggctat

SEQ ID NO: 2313747 - DNA, 25 bp, Homo sapien
ccaggccttcactggctattggact

SEQ ID NO: 2313748 - DNA, 25 bp, Homo sapien
cctggcctctgtccatggtggaggc

SEQ ID NO: 2313749 - DNA, 25 bp, Homo sapien
gggcctggcctctgtccatggtgga

SEQ ID NO: 2313750 - DNA, 25 bp, Homo sapien
gcagggcctggcctctgtccatggt

SEQ ID NO: 2313751 - DNA, 25 bp, Homo sapien
cagggcctggcctctgtccatggtg

SEQ ID NO: 2313752 - DNA, 25 bp, Homo sapien
cactctggatggaccaacaggcctt

SEQ ID NO: 2313753 - DNA, 25 bp, Homo sapien
acattatcccgtctgccttcagggc

SEQ ID NO: 2313754 - DNA, 25 bp, Homo sapien
ttggccaaccacattatcccgtctg

SEQ ID NO: 2313755 - DNA, 25 bp, Homo sapien
gatggaccaacaggccttggccaac

SEQ ID NO: 2313756 - DNA, 25 bp, Homo sapien
gccccagcatgagcgtgaccctggg

SEQ ID NO: 2313757 - DNA, 25 bp, Homo sapien
gggagccccagcatgagcgtgaccc

SEQ ID NO: 2313758 - DNA, 25 bp, Homo sapien
caaaatagtcagctgacgggagccc

SEQ ID NO: 2313759 - DNA, 25 bp, Homo sapien
aaatagtcagctgacgggagcccca

SEQ ID NO: 2313760 - DNA, 25 bp, Homo sapien
cactttgggccctcttgactggacc

SEQ ID NO: 2313761 - DNA, 25 bp, Homo sapien
ttgggccctcttgactggacctgac

SEQ ID NO: 2313762 - DNA, 25 bp, Homo sapien
tttgggccctcttgactggacctga

SEQ ID NO: 2313763 - DNA, 25 bp, Homo sapien
ctttgggccctcttgactggacctg

SEQ ID NO: 2313764 - DNA, 25 bp, Homo sapien
ccagacaaccgcacgaagggagaat

SEQ ID NO: 2313765 - DNA, 25 bp, Homo sapien
gcttcctcctcacgatctgctttga

SEQ ID NO: 2313766 - DNA, 25 bp, Homo sapien
aagggagaatcccaagattggttgg

SEQ ID NO: 2313767 - DNA, 25 bp, Homo sapien
tggaaaaaggtcccagacaaccgca

SEQ ID NO: 2313768 - DNA, 25 bp, Homo sapien
gaaaggagaggctccacatccaaat

SEQ ID NO: 2313769 - DNA, 25 bp, Homo sapien
tatggaagagctatcagaggcatct

SEQ ID NO: 2313770 - DNA, 25 bp, Homo sapien
ggcccagtgctggtagaattcagtt

SEQ ID NO: 2313771 - DNA, 25 bp, Homo sapien
tttgtccaggagctagcaagcctga

SEQ ID NO: 2313772 - DNA, 25 bp, Homo sapien
tcagtagtaagtagcccagggcagg

SEQ ID NO: 2313773 - DNA, 25 bp, Homo sapien
tcctagtccgtggtgggaagatcct

SEQ ID NO: 2313774 - DNA, 25 bp, Homo sapien
gatcctttgtgcatcctcagtagta

SEQ ID NO: 2313775 - DNA, 25 bp, Homo sapien
aaatagccacgcctgaatgagagga

SEQ ID NO: 2313776 - DNA, 25 bp, Homo sapien
gccactgacgcaggccgcccgtcga

SEQ ID NO: 2313777 - DNA, 25 bp, Homo sapien
aggccgcccgtcgagctttggccat

SEQ ID NO: 2313778 - DNA, 25 bp, Homo sapien
gcgccactgacgcaggccgcccgtc

SEQ ID NO: 2313779 - DNA, 25 bp, Homo sapien
tgacgcaggccgcccgtcgagcttt

SEQ ID NO: 2313780 - DNA, 25 bp, Homo sapien
caagtttcgtagcctccgccactgg

SEQ ID NO: 2313781 - DNA, 25 bp, Homo sapien
tgtgcactcccccaagtttcgtagc

SEQ ID NO: 2313782 - DNA, 25 bp, Homo sapien
gcgtgcgctcccgaagttcttctgt

SEQ ID NO: 2313783 - DNA, 25 bp, Homo sapien
gccactgggactccccggccgagcc

SEQ ID NO: 2313784 - DNA, 25 bp, Homo sapien
cctgcccggactggcgccccgagtc

SEQ ID NO: 2313785 - DNA, 25 bp, Homo sapien
ccgagtctcagcctggtccctggtc

SEQ ID NO: 2313786 - DNA, 25 bp, Homo sapien
ggactggcgccccgagtctcagcct

SEQ ID NO: 2313787 - DNA, 25 bp, Homo sapien
tgcccctgcccggactggcgccccg

SEQ ID NO: 2313788 - DNA, 25 bp, Homo sapien
gcatgccggccctacaacatcctct

SEQ ID NO: 2313789 - DNA, 25 bp, Homo sapien
caccgctcctaaaaacagatgcacg

SEQ ID NO: 2313790 - DNA, 25 bp, Homo sapien
acagatgcacgttccccgaagggaa

SEQ ID NO: 2313791 - DNA, 25 bp, Homo sapien
ttcatgcaccgctcctaaaaacaga

SEQ ID NO: 2313792 - DNA, 25 bp, Homo sapien
catagggatgatcagcatctggagc

SEQ ID NO: 2313793 - DNA, 25 bp, Homo sapien
gctggaatggttgggaggtatcctc

SEQ ID NO: 2313794 - DNA, 25 bp, Homo sapien
gcagcaccgccccaagactccaaca

SEQ ID NO: 2313795 - DNA, 25 bp, Homo sapien
gggaggtatcctctaggcagcaccg

SEQ ID NO: 2313796 - DNA, 25 bp, Homo sapien
ttggcaacaatgtggcttgcacctg

SEQ ID NO: 2313797 - DNA, 25 bp, Homo sapien
cacctgttctgctgaacaagcctca

SEQ ID NO: 2313798 - DNA, 25 bp, Homo sapien
ggagaatccggcttcaggcaggtct

SEQ ID NO: 2313799 - DNA, 25 bp, Homo sapien
gagaatccggcttcaggcaggtctt

SEQ ID NO: 2313800 - DNA, 25 bp, Homo sapien
ggccacatctgcctgcactaggaca

SEQ ID NO: 2313801 - DNA, 25 bp, Homo sapien
caggcatgcagcaccctgcgagagg

SEQ ID NO: 2313802 - DNA, 25 bp, Homo sapien
tggccacatctgcctgcactaggac

SEQ ID NO: 2313803 - DNA, 25 bp, Homo sapien
catgcagcaccctgcgagaggtgag

SEQ ID NO: 2313804 - DNA, 25 bp, Homo sapien
gcaggaatcccagcctaaagatgag

SEQ ID NO: 2313805 - DNA, 25 bp, Homo sapien
ctctcaggagaatggacaacagtac

SEQ ID NO: 2313806 - DNA, 25 bp, Homo sapien
tcgcagtgcctaggaagaaggacat

SEQ ID NO: 2313807 - DNA, 25 bp, Homo sapien
ggaacctaggcctcctcatcggtaa

SEQ ID NO: 2313808 - DNA, 25 bp, Homo sapien
cggtgctggtgtcccatattgggct

SEQ ID NO: 2313809 - DNA, 25 bp, Homo sapien
tgctggtgtcccatattgggcttgg

SEQ ID NO: 2313810 - DNA, 25 bp, Homo sapien
actcggtgctggtgtcccatattgg

SEQ ID NO: 2313811 - DNA, 25 bp, Homo sapien
gctggtgtcccatattgggcttgga

SEQ ID NO: 2313812 - DNA, 25 bp, Homo sapien
gggtcagggggtcgcttgccaggtg

SEQ ID NO: 2313813 - DNA, 25 bp, Homo sapien
gtcagggggtcgcttgccaggtggt

SEQ ID NO: 2313814 - DNA, 25 bp, Homo sapien
aggggtcagggggtcgcttgccagg

SEQ ID NO: 2313815 - DNA, 25 bp, Homo sapien
tcagggggtcgcttgccaggtggtc

SEQ ID NO: 2313816 - DNA, 25 bp, Homo sapien
tagccgtccatgaaggtgctgaagc

SEQ ID NO: 2313817 - DNA, 25 bp, Homo sapien
ccgtccatgaaggtgctgaagctgg

SEQ ID NO: 2313818 - DNA, 25 bp, Homo sapien
tgtgtagccgtccatgaaggtgctg

SEQ ID NO: 2313819 - DNA, 25 bp, Homo sapien
ctctcctgtgtagccgtccatgaag

SEQ ID NO: 2313820 - DNA, 25 bp, Homo sapien
ggctgaggacgaggatgtggaggag

SEQ ID NO: 2313821 - DNA, 25 bp, Homo sapien
gaggtggctgaggacgaggatgtgg

SEQ ID NO: 2313822 - DNA, 25 bp, Homo sapien
ggacgaggatgtggaggaggccgag

SEQ ID NO: 2313823 - DNA, 25 bp, Homo sapien
ggtggctgaggacgaggatgtggag

SEQ ID NO: 2313824 - DNA, 25 bp, Homo sapien
ggggtagcagccgtacacctggaag

SEQ ID NO: 2313825 - DNA, 25 bp, Homo sapien
ctcatccactgggccgctcaggggg

SEQ ID NO: 2313826 - DNA, 25 bp, Homo sapien
ggccggggtagcagccgtacacctg

SEQ ID NO: 2313827 - DNA, 25 bp, Homo sapien
ggtagcagccgtacacctggaagtc

SEQ ID NO: 2313828 - DNA, 25 bp, Homo sapien
gcagctgctctgtccatgcccgcag

SEQ ID NO: 2313829 - DNA, 25 bp, Homo sapien
cttcgtaagtctggctgggcgagaa

SEQ ID NO: 2313830 - DNA, 25 bp, Homo sapien
tgggcgagaagtggccgaaggagcc

SEQ ID NO: 2313831 - DNA, 25 bp, Homo sapien
atgcccgcaggccttcgtaagtctg

SEQ ID NO: 2313832 - DNA, 25 bp, Homo sapien
ccgagccctcaaggtgtggagaagt

SEQ ID NO: 2313833 - DNA, 25 bp, Homo sapien
catgtgcggacaccataatgctggc

SEQ ID NO: 2313834 - DNA, 25 bp, Homo sapien
ggccgtaggcatggaatagctctct

SEQ ID NO: 2313835 - DNA, 25 bp, Homo sapien
taatgctggcatgaagcgttgtccc

SEQ ID NO: 2313836 - DNA, 25 bp, Homo sapien
aaaaggccccacctggggctgcgcg

SEQ ID NO: 2313837 - DNA, 25 bp, Homo sapien
gggagaccacaggtcccaatgggat

SEQ ID NO: 2313838 - DNA, 25 bp, Homo sapien
accacaggtcccaatgggatgaggc

SEQ ID NO: 2313839 - DNA, 25 bp, Homo sapien
gagaccacaggtcccaatgggatga

SEQ ID NO: 2313840 - DNA, 25 bp, Homo sapien
gggcaacacggaacaagctgtcaga

SEQ ID NO: 2313841 - DNA, 25 bp, Homo sapien
tgtgcaatcccatgggcccgagtgt

SEQ ID NO: 2313842 - DNA, 25 bp, Homo sapien
gagtgtcccggcaaatgaaagcttc

SEQ ID NO: 2313843 - DNA, 25 bp, Homo sapien
agggatcctttcatctcacgccagg

SEQ ID NO: 2313844 - DNA, 25 bp, Homo sapien
aagcggcagaactggcagcggtttc

SEQ ID NO: 2313845 - DNA, 25 bp, Homo sapien
tacttggcgtttttctgcactgtgc

SEQ ID NO: 2313846 - DNA, 25 bp, Homo sapien
ccttgttagccaggcagatgtactt

SEQ ID NO: 2313847 - DNA, 25 bp, Homo sapien
ggtttcgccgcctcttgtccacagg

SEQ ID NO: 2313848 - DNA, 25 bp, Homo sapien
tcaagcctacccttgccccgctggg

SEQ ID NO: 2313849 - DNA, 25 bp, Homo sapien
gacccagagtccctgagatccaagg

SEQ ID NO: 2313850 - DNA, 25 bp, Homo sapien
ggcctctcagcccaagccgtgcaca

SEQ ID NO: 2313851 - DNA, 25 bp, Homo sapien
ccaccgagtccctaggacccagagt

SEQ ID NO: 2313852 - DNA, 25 bp, Homo sapien
ccctgagtccaggtgtgcacggacc

SEQ ID NO: 2313853 - DNA, 25 bp, Homo sapien
aagtgaggagattggcaggggaggc

SEQ ID NO: 2313854 - DNA, 25 bp, Homo sapien
tgcttgggttttgaaggtagccggc

SEQ ID NO: 2313855 - DNA, 25 bp, Homo sapien
cccttcaggctgtctgttcggacaa

SEQ ID NO: 2313856 - DNA, 25 bp, Homo sapien
ggagtagtccagtttggcagtgctg

SEQ ID NO: 2313857 - DNA, 25 bp, Homo sapien
tggagtagtccagtttggcagtgct

SEQ ID NO: 2313858 - DNA, 25 bp, Homo sapien
agtagtccagtttggcagtgctggg

SEQ ID NO: 2313859 - DNA, 25 bp, Homo sapien
cttggagtagtccagtttggcagtg

SEQ ID NO: 2313860 - DNA, 25 bp, Homo sapien
ttctaattggccacctgcctgaggg

SEQ ID NO: 2313861 - DNA, 25 bp, Homo sapien
ggtagctctcctaacacgcacaaag

SEQ ID NO: 2313862 - DNA, 25 bp, Homo sapien
tctgtcgaactggagggagtcgctt

SEQ ID NO: 2313863 - DNA, 25 bp, Homo sapien
cattttcccatctggtcagccgaga

SEQ ID NO: 2313864 - DNA, 25 bp, Homo sapien
tccagagaaccggagagcaggtcgt

SEQ ID NO: 2313865 - DNA, 25 bp, Homo sapien
ccagagaaccggagagcaggtcgta

SEQ ID NO: 2313866 - DNA, 25 bp, Homo sapien
gagcaggtcgtagaactgctgtaca

SEQ ID NO: 2313867 - DNA, 25 bp, Homo sapien
aggtcgtagaactgctgtacatccc

SEQ ID NO: 2313868 - DNA, 25 bp, Homo sapien
aggcggaggatgaagagctccagga

SEQ ID NO: 2313869 - DNA, 25 bp, Homo sapien
cagggatcttctccgcccacttgcg

SEQ ID NO: 2313870 - DNA, 25 bp, Homo sapien
tcttctccgcccacttgcggatgac

SEQ ID NO: 2313871 - DNA, 25 bp, Homo sapien
caggaaggccgactccagcaacagg

SEQ ID NO: 2313872 - DNA, 25 bp, Homo sapien
cgaagagcgatcagggtggttcaca

SEQ ID NO: 2313873 - DNA, 25 bp, Homo sapien
gtggttcacaggcaggtgtatcagg

SEQ ID NO: 2313874 - DNA, 25 bp, Homo sapien
tcacaggcaggtgtatcagggaaag

SEQ ID NO: 2313875 - DNA, 25 bp, Homo sapien
ggcacgaagagcgatcagggtggtt

SEQ ID NO: 2313876 - DNA, 25 bp, Homo sapien
atgagcttgccctcgcctggcttag

SEQ ID NO: 2313877 - DNA, 25 bp, Homo sapien
ccttgagaaggccaggatactgtca

SEQ ID NO: 2313878 - DNA, 25 bp, Homo sapien
gatactgtcaatccagtccccgaag

SEQ ID NO: 2313879 - DNA, 25 bp, Homo sapien
caagcaagctgtgcagggaccttga

SEQ ID NO: 2313880 - DNA, 25 bp, Homo sapien
ggaagggtacaggattagctgtaca

SEQ ID NO: 2313881 - DNA, 25 bp, Homo sapien
gggtacaggattagctgtacatctg

SEQ ID NO: 2313882 - DNA, 25 bp, Homo sapien
aagggtacaggattagctgtacatc

SEQ ID NO: 2313883 - DNA, 25 bp, Homo sapien
ggtacaggattagctgtacatctga

SEQ ID NO: 2313884 - DNA, 25 bp, Homo sapien
agctcctccacccgccgcggctcct

SEQ ID NO: 2313885 - DNA, 25 bp, Homo sapien
cgccgcggctcctgcagcccatgcc

SEQ ID NO: 2313886 - DNA, 25 bp, Homo sapien
cagctcctccacccgccgcggctcc

SEQ ID NO: 2313887 - DNA, 25 bp, Homo sapien
cgcggctcctgcagcccatgccggt

SEQ ID NO: 2313888 - DNA, 25 bp, Homo sapien
cctgggtgcacagggtccgcagctc

SEQ ID NO: 2313889 - DNA, 25 bp, Homo sapien
gaagatcttgtcaatgatgggtgga

SEQ ID NO: 2313890 - DNA, 25 bp, Homo sapien
cttcaggcagctggcgatgcggttc

SEQ ID NO: 2313891 - DNA, 25 bp, Homo sapien
cagtttgcccaacagacgtgacagg

SEQ ID NO: 2313892 - DNA, 25 bp, Homo sapien
aaggcacatggggtggcatatgaga

SEQ ID NO: 2313893 - DNA, 25 bp, Homo sapien
tgggggtccgtggactaaaggcaca

SEQ ID NO: 2313894 - DNA, 25 bp, Homo sapien
tggcatatgagagtgcgcatgtgca

SEQ ID NO: 2313895 - DNA, 25 bp, Homo sapien
ggtgctctgggggtccgtggactaa

SEQ ID NO: 2313896 - DNA, 25 bp, Homo sapien
cctgcaaacctcctggagcaggtga

SEQ ID NO: 2313897 - DNA, 25 bp, Homo sapien
gagtcattctgcagctcaagcccag

SEQ ID NO: 2313898 - DNA, 25 bp, Homo sapien
ggtgagaaggtggagtcattctgca

SEQ ID NO: 2313899 - DNA, 25 bp, Homo sapien
gaaggtggagtcattctgcagctca

SEQ ID NO: 2313900 - DNA, 25 bp, Homo sapien
ttatttacagcacggcgctatgtgt

SEQ ID NO: 2313901 - DNA, 25 bp, Homo sapien
gcacggcgctatgtgttaaaaacgg

SEQ ID NO: 2313902 - DNA, 25 bp, Homo sapien
cactgggcttatttacagcacggcg

SEQ ID NO: 2313903 - DNA, 25 bp, Homo sapien
gataagacaaatcgtggggtcaccc

SEQ ID NO: 2313904 - DNA, 25 bp, Homo sapien
cagaaaagtcacatactataaatcc

SEQ ID NO: 2313905 - DNA, 25 bp, Homo sapien
aaagtcacatactataaatccagga

SEQ ID NO: 2313906 - DNA, 25 bp, Homo sapien
taaatatattaatcagaaaagtcac

SEQ ID NO: 2313907 - DNA, 25 bp, Homo sapien
gtttatgtacatgtggaaggagggt

SEQ ID NO: 2313908 - DNA, 25 bp, Homo sapien
ggaacactgatcaccgcaagatgag

SEQ ID NO: 2313909 - DNA, 25 bp, Homo sapien
gaacgctgtggtgtttcggcccgta

SEQ ID NO: 2313910 - DNA, 25 bp, Homo sapien
tgtgcgtaacagacgggatccctgg

SEQ ID NO: 2313911 - DNA, 25 bp, Homo sapien
caacatccgcgtagtcacagaagca

SEQ ID NO: 2313912 - DNA, 25 bp, Homo sapien
aggctccagaccacctgggtcggag

SEQ ID NO: 2313913 - DNA, 25 bp, Homo sapien
cactctcccggcaggctccagacca

SEQ ID NO: 2313914 - DNA, 25 bp, Homo sapien
cagcctctcagatgccaccactctc

SEQ ID NO: 2313915 - DNA, 25 bp, Homo sapien
agaccacctgggtcggaggctgagc

SEQ ID NO: 2313916 - DNA, 25 bp, Homo sapien
cagtccacgtaaccagggaggaacg

SEQ ID NO: 2313917 - DNA, 25 bp, Homo sapien
aagctggaggagcgcccgcgttcca

SEQ ID NO: 2313918 - DNA, 25 bp, Homo sapien
ctccacagtccacgtaaccagggag

SEQ ID NO: 2313919 - DNA, 25 bp, Homo sapien
aggaacggactcctcgggtgtctcg

SEQ ID NO: 2313920 - DNA, 25 bp, Homo sapien
tatcaagagactcgggacggacgca

SEQ ID NO: 2313921 - DNA, 25 bp, Homo sapien
catatcaagagactcgggacggacg

SEQ ID NO: 2313922 - DNA, 25 bp, Homo sapien
gctccatatcaagagactcgggacg

SEQ ID NO: 2313923 - DNA, 25 bp, Homo sapien
ttggctccatatcaagagactcggg

SEQ ID NO: 2313924 - DNA, 25 bp, Homo sapien
tccgcacggcgctgagccacaagag

SEQ ID NO: 2313925 - DNA, 25 bp, Homo sapien
tggagcacggattcctcaagctcgg

SEQ ID NO: 2313926 - DNA, 25 bp, Homo sapien
agtgtagagtttggagcacggattc

SEQ ID NO: 2313927 - DNA, 25 bp, Homo sapien
tgcgacctccgcaggtacgcttcaa

SEQ ID NO: 2313928 - DNA, 25 bp, Homo sapien
tgtgaaaaccttgttgtcccctgcc

SEQ ID NO: 2313929 - DNA, 25 bp, Homo sapien
ggcccaccagagtagggtctggaaa

SEQ ID NO: 2313930 - DNA, 25 bp, Homo sapien
ggtctggaaagtctcgtccctcttg

SEQ ID NO: 2313931 - DNA, 25 bp, Homo sapien
tggcagaggctaacagccgccttct

SEQ ID NO: 2313932 - DNA, 25 bp, Homo sapien
acacaaaataagtctcacctctttt

SEQ ID NO: 2313933 - DNA, 25 bp, Homo sapien
tatttaggggcagctattccaccac

SEQ ID NO: 2313934 - DNA, 25 bp, Homo sapien
cttagtgcttcaaaccacttttagt

SEQ ID NO: 2313935 - DNA, 25 bp, Homo sapien
cacctcttttccacaagtgagtttt

SEQ ID NO: 2313936 - DNA, 25 bp, Homo sapien
agacaggggatcttcaccctaccca

SEQ ID NO: 2313937 - DNA, 25 bp, Homo sapien
taaagacaggggatcttcaccctac

SEQ ID NO: 2313938 - DNA, 25 bp, Homo sapien
ggatcttcaccctacccaagggcca

SEQ ID NO: 2313939 - DNA, 25 bp, Homo sapien
caggggatcttcaccctacccaagg

SEQ ID NO: 2313940 - DNA, 25 bp, Homo sapien
cagtaacccacaccaaggtgtggaa

SEQ ID NO: 2313941 - DNA, 25 bp, Homo sapien
acccagtaacccacaccaaggtgtg

SEQ ID NO: 2313942 - DNA, 25 bp, Homo sapien
cacccagtaacccacaccaaggtgt

SEQ ID NO: 2313943 - DNA, 25 bp, Homo sapien
cccagtaacccacaccaaggtgtgg

SEQ ID NO: 2313944 - DNA, 25 bp, Homo sapien
ttgcgcagggcacgatccagttcct

SEQ ID NO: 2313945 - DNA, 25 bp, Homo sapien
gagacacgcacataagtgaagtcga

SEQ ID NO: 2313946 - DNA, 25 bp, Homo sapien
tgcccacggtgccaatggagtaggt

SEQ ID NO: 2313947 - DNA, 25 bp, Homo sapien
tgaagtcgatgaagtcacagtcaac

SEQ ID NO: 2313948 - DNA, 25 bp, Homo sapien
cccatgggatgcactcgtctgagaa

SEQ ID NO: 2313949 - DNA, 25 bp, Homo sapien
tgagaatggccagcgagacttcttc

SEQ ID NO: 2313950 - DNA, 25 bp, Homo sapien
tctttgatgagcctgcgcatggtgg

SEQ ID NO: 2313951 - DNA, 25 bp, Homo sapien
tcttgtacaggtagggctgcacgtc

SEQ ID NO: 2313952 - DNA, 25 bp, Homo sapien
ggcaggactgaaccgtcagcaaaga

SEQ ID NO: 2313953 - DNA, 25 bp, Homo sapien
ggatgacctgaggctggcaaccaca

SEQ ID NO: 2313954 - DNA, 25 bp, Homo sapien
ccaccagggctatggagagacagta

SEQ ID NO: 2313955 - DNA, 25 bp, Homo sapien
ggtctgggagccatcaaggagctcc

SEQ ID NO: 2313956 - DNA, 25 bp, Homo sapien
agtggtggctcttctgtacagtgga

SEQ ID NO: 2313957 - DNA, 25 bp, Homo sapien
ccagtggtggctcttctgtacagtg

SEQ ID NO: 2313958 - DNA, 25 bp, Homo sapien
tattccccatcccagtggtggctct

SEQ ID NO: 2313959 - DNA, 25 bp, Homo sapien
atgttctcaactttattccccatcc

SEQ ID NO: 2313960 - DNA, 25 bp, Homo sapien
cagccgttgtggctacggccctttc

SEQ ID NO: 2313961 - DNA, 25 bp, Homo sapien
ttctccataggcccggactccgggc

SEQ ID NO: 2313962 - DNA, 25 bp, Homo sapien
cggactccgggcctgctgtatttct

SEQ ID NO: 2313963 - DNA, 25 bp, Homo sapien
gccgttgtggctacggccctttctc

SEQ ID NO: 2313964 - DNA, 25 bp, Homo sapien
gatcgccagatgtgcaggagcccag

SEQ ID NO: 2313965 - DNA, 25 bp, Homo sapien
cgggatcgccagatgtgcaggagcc

SEQ ID NO: 2313966 - DNA, 25 bp, Homo sapien
ctgcccagatgtggcgggatcgcca

SEQ ID NO: 2313967 - DNA, 25 bp, Homo sapien
tggcgggatcgccagatgtgcagga

SEQ ID NO: 2313968 - DNA, 25 bp, Homo sapien
agcagggacagcacgccgagcacca

SEQ ID NO: 2313969 - DNA, 25 bp, Homo sapien
cggcgacgccgactggttacagcag

SEQ ID NO: 2313970 - DNA, 25 bp, Homo sapien
aggaccccgcaaagcaccagcaggg

SEQ ID NO: 2313971 - DNA, 25 bp, Homo sapien
gggtcagcagcgctgtcaggccctg

SEQ ID NO: 2313972 - DNA, 25 bp, Homo sapien
gtaaggggtcgggaccgcagcagcc

SEQ ID NO: 2313973 - DNA, 25 bp, Homo sapien
cgtcgggcatgctccggaccgctcg

SEQ ID NO: 2313974 - DNA, 25 bp, Homo sapien
accgctcggagtcaggggctgcctg

SEQ ID NO: 2313975 - DNA, 25 bp, Homo sapien
tggaggccgcgaccaccgagcgcag

SEQ ID NO: 2313976 - DNA, 25 bp, Homo sapien
cgagcacttccagaggtccagtgga

SEQ ID NO: 2313977 - DNA, 25 bp, Homo sapien
tcatctgcagcaagaatgggctgaa

SEQ ID NO: 2313978 - DNA, 25 bp, Homo sapien
tgaggtctcaccacaagccaggtat

SEQ ID NO: 2313979 - DNA, 25 bp, Homo sapien
atgcagcaggcctcaagcgggctgg

SEQ ID NO: 2313980 - DNA, 25 bp, Homo sapien
cctgcaaatgagaggcactgacttg

SEQ ID NO: 2313981 - DNA, 25 bp, Homo sapien
gcatatttaataacaggccacagaa

SEQ ID NO: 2313982 - DNA, 25 bp, Homo sapien
ctcacaccagacagtacaggcgctg

SEQ ID NO: 2313983 - DNA, 25 bp, Homo sapien
actgtcagaccgttgctgcctcaca

SEQ ID NO: 2313984 - DNA, 25 bp, Homo sapien
cttctcttctctcctctcctcttct

SEQ ID NO: 2313985 - DNA, 25 bp, Homo sapien
ctcctctcttcttctcttctctcct

SEQ ID NO: 2313986 - DNA, 25 bp, Homo sapien
tcctctcttcttctcttctctcctc

SEQ ID NO: 2313987 - DNA, 25 bp, Homo sapien
cttaacatgtcacttcccgtatgaa

SEQ ID NO: 2313988 - DNA, 25 bp, Homo sapien
ttcccgtatgaaaccttccagacac

SEQ ID NO: 2313989 - DNA, 25 bp, Homo sapien
taagatccagatcttaacatgtcac

SEQ ID NO: 2313990 - DNA, 25 bp, Homo sapien
tgtcacttcccgtatgaaaccttcc

SEQ ID NO: 2313991 - DNA, 25 bp, Homo sapien
gctcatcagccgcctgtctgcccat

SEQ ID NO: 2313992 - DNA, 25 bp, Homo sapien
ttgcctccaactcaaggagccacag

SEQ ID NO: 2313993 - DNA, 25 bp, Homo sapien
ctgacagcttgcctccaactcaagg

SEQ ID NO: 2313994 - DNA, 25 bp, Homo sapien
ctgagctcatcagccgcctgtctgc

SEQ ID NO: 2313995 - DNA, 25 bp, Homo sapien
gcaagtggcagactcggggggaagc

SEQ ID NO: 2313996 - DNA, 25 bp, Homo sapien
tgatggcaccgagcttcttcgggaa

SEQ ID NO: 2313997 - DNA, 25 bp, Homo sapien
tgttgatggcaccgagcttcttcgg

SEQ ID NO: 2313998 - DNA, 25 bp, Homo sapien
cagactcggggggaagccccagcag

SEQ ID NO: 2313999 - DNA, 25 bp, Homo sapien
gacagtagtgagagacacaggagca

SEQ ID NO: 2314000 - DNA, 25 bp, Homo sapien
agcagggaatcaagagggcagcagt

SEQ ID NO: 2314001 - DNA, 25 bp, Homo sapien
ggagcagggaatcaagagggcagca

SEQ ID NO: 2314002 - DNA, 25 bp, Homo sapien
tggagcacgtgagggacagtagtga

SEQ ID NO: 2314003 - DNA, 25 bp, Homo sapien
cggccactgaagactcggtgcctgg

SEQ ID NO: 2314004 - DNA, 25 bp, Homo sapien
gccactgaagactcggtgcctggca

SEQ ID NO: 2314005 - DNA, 25 bp, Homo sapien
cacggccactgaagactcggtgcct

SEQ ID NO: 2314006 - DNA, 25 bp, Homo sapien
tccacggccactgaagactcggtgc

SEQ ID NO: 2314007 - DNA, 25 bp, Homo sapien
tttcatagcctttggaacgccctcc

SEQ ID NO: 2314008 - DNA, 25 bp, Homo sapien
cctcccaggtacaagagcatgccgt

SEQ ID NO: 2314009 - DNA, 25 bp, Homo sapien
tttgaagtggttgagtctgttccca

SEQ ID NO: 2314010 - DNA, 25 bp, Homo sapien
aattacgtggccgtgtcactctcca

SEQ ID NO: 2314011 - DNA, 25 bp, Homo sapien
gtctctcggccaatacagccaactt

SEQ ID NO: 2314012 - DNA, 25 bp, Homo sapien
ggccaatacagccaacttcccagca

SEQ ID NO: 2314013 - DNA, 25 bp, Homo sapien
tcggccaatacagccaacttcccag

SEQ ID NO: 2314014 - DNA, 25 bp, Homo sapien
caatacagccaacttcccagcagag

SEQ ID NO: 2314015 - DNA, 25 bp, Homo sapien
ttgtttcattttgtgtttacatgga

SEQ ID NO: 2314016 - DNA, 25 bp, Homo sapien
ttcattttgtgtttacatggagtct

SEQ ID NO: 2314017 - DNA, 25 bp, Homo sapien
tcccacctcggtcttccaagatgct

SEQ ID NO: 2314018 - DNA, 25 bp, Homo sapien
ccgcaccggccagaagtgcctgcct

SEQ ID NO: 2314019 - DNA, 25 bp, Homo sapien
ctttcattatgggaaaatataccac

SEQ ID NO: 2314020 - DNA, 25 bp, Homo sapien
tcattatgggaaaatataccacata

SEQ ID NO: 2314021 - DNA, 25 bp, Homo sapien
aatctttcattatgggaaaatatac

SEQ ID NO: 2314022 - DNA, 25 bp, Homo sapien
ttcattatgggaaaatataccacat

SEQ ID NO: 2314023 - DNA, 25 bp, Homo sapien
ttctgtgggtctgtatagtttggac

SEQ ID NO: 2314024 - DNA, 25 bp, Homo sapien
tgtgggtctgtatagtttggacaac

SEQ ID NO: 2314025 - DNA, 25 bp, Homo sapien
gattctgtgggtctgtatagtttgg

SEQ ID NO: 2314026 - DNA, 25 bp, Homo sapien
tgggtctgtatagtttggacaactt

SEQ ID NO: 2314027 - DNA, 25 bp, Homo sapien
tgggagtcagggctcatggccggat

SEQ ID NO: 2314028 - DNA, 25 bp, Homo sapien
gtgggagtcagggctcatggccgga

SEQ ID NO: 2314029 - DNA, 25 bp, Homo sapien
cagggctcatggccggatgatgagc

SEQ ID NO: 2314030 - DNA, 25 bp, Homo sapien
tgatgaaggtgtcacaacggcaaga

SEQ ID NO: 2314031 - DNA, 25 bp, Homo sapien
gatgaaggtgtcacaacggcaagat

SEQ ID NO: 2314032 - DNA, 25 bp, Homo sapien
ttgatgaaggtgtcacaacggcaag

SEQ ID NO: 2314033 - DNA, 25 bp, Homo sapien
taaaggggttgagcatggaggtgac

SEQ ID NO: 2314034 - DNA, 25 bp, Homo sapien
tccaacacctcttccataaaatcag

SEQ ID NO: 2314035 - DNA, 25 bp, Homo sapien
gtagataaaggggttgagcatggag

SEQ ID NO: 2314036 - DNA, 25 bp, Homo sapien
ccaacacctcttccataaaatcagc

SEQ ID NO: 2314037 - DNA, 25 bp, Homo sapien
gttttatccgtaatgatagactgag

SEQ ID NO: 2314038 - DNA, 25 bp, Homo sapien
acagcaatggtaccacccctcgtgg

SEQ ID NO: 2314039 - DNA, 25 bp, Homo sapien
caatgccgatactcatgcacagcaa

SEQ ID NO: 2314040 - DNA, 25 bp, Homo sapien
gtaggaggcaacatccttcaaagat

SEQ ID NO: 2314041 - DNA, 25 bp, Homo sapien
tcttacctaataaggtgctttattc

SEQ ID NO: 2314042 - DNA, 25 bp, Homo sapien
acctaataaggtgctttattctctg

SEQ ID NO: 2314043 - DNA, 25 bp, Homo sapien
tacctaataaggtgctttattctct

SEQ ID NO: 2314044 - DNA, 25 bp, Homo sapien
ttacctaataaggtgctttattctc

SEQ ID NO: 2314045 - DNA, 25 bp, Homo sapien
agttcctcgggtggtccctgcccag

SEQ ID NO: 2314046 - DNA, 25 bp, Homo sapien
aggcagcagtgatcgtcgctgagac

SEQ ID NO: 2314047 - DNA, 25 bp, Homo sapien
cagcagtgatcgtcgctgagaccat

SEQ ID NO: 2314048 - DNA, 25 bp, Homo sapien
tcagttcctcgggtggtccctgccc

SEQ ID NO: 2314049 - DNA, 25 bp, Homo sapien
caaatgacagccttacaagggttct

SEQ ID NO: 2314050 - DNA, 25 bp, Homo sapien
tgttggcaggcatactcctatctcc

SEQ ID NO: 2314051 - DNA, 25 bp, Homo sapien
cactggagggttactgactctctgg

SEQ ID NO: 2314052 - DNA, 25 bp, Homo sapien
tttccaagggagcaaatcctcagtg

SEQ ID NO: 2314053 - DNA, 25 bp, Homo sapien
ccatcatccagtattcctgctggcg

SEQ ID NO: 2314054 - DNA, 25 bp, Homo sapien
aatgtcgaagggtcgtcagagcact

SEQ ID NO: 2314055 - DNA, 25 bp, Homo sapien
atggcagcccgcaaataccgtcaaa

SEQ ID NO: 2314056 - DNA, 25 bp, Homo sapien
tcctgctggcgttgtctgctgtgaa

SEQ ID NO: 2314057 - DNA, 25 bp, Homo sapien
aggtccccctggagactccacaggg

SEQ ID NO: 2314058 - DNA, 25 bp, Homo sapien
atgggtgagcaagaggacctgagac

SEQ ID NO: 2314059 - DNA, 25 bp, Homo sapien
ccaagctccttaatcacttcagaca

SEQ ID NO: 2314060 - DNA, 25 bp, Homo sapien
cacttcagacactacacagctgatg

SEQ ID NO: 2314061 - DNA, 25 bp, Homo sapien
cagctgatgggtgagcaagaggacc

SEQ ID NO: 2314062 - DNA, 25 bp, Homo sapien
gctcggcgaggcgacaagtctttct

SEQ ID NO: 2314063 - DNA, 25 bp, Homo sapien
aaaggccttgcccactctattcttc

SEQ ID NO: 2314064 - DNA, 25 bp, Homo sapien
aggcgacaagtctttctgagggcca

SEQ ID NO: 2314065 - DNA, 25 bp, Homo sapien
ggccttgcccactctattcttcaga

SEQ ID NO: 2314066 - DNA, 25 bp, Homo sapien
tgctagagcaccttttccaggagca

SEQ ID NO: 2314067 - DNA, 25 bp, Homo sapien
ttccaataggatgcaagtggcagac

SEQ ID NO: 2314068 - DNA, 25 bp, Homo sapien
caactcacagtgatcgccggagggt

SEQ ID NO: 2314069 - DNA, 25 bp, Homo sapien
gaactggaggttctcgttgcctaaa

SEQ ID NO: 2314070 - DNA, 25 bp, Homo sapien
tgaacaacagactatgcccaggtgt

SEQ ID NO: 2314071 - DNA, 25 bp, Homo sapien
ccaccagtagacttgtaagcgggac

SEQ ID NO: 2314072 - DNA, 25 bp, Homo sapien
catcaggaacgagagtacagcaggg

SEQ ID NO: 2314073 - DNA, 25 bp, Homo sapien
tccacacagcattcgcacgttcatg

SEQ ID NO: 2314074 - DNA, 25 bp, Homo sapien
ggtttcaggtgcctggctgatgtca

SEQ ID NO: 2314075 - DNA, 25 bp, Homo sapien
tcctgtggtttcaggtgcctggctg

SEQ ID NO: 2314076 - DNA, 25 bp, Homo sapien
ctcattcctgtggtttcaggtgcct

SEQ ID NO: 2314077 - DNA, 25 bp, Homo sapien
gtttcaggtgcctggctgatgtcag

SEQ ID NO: 2314078 - DNA, 25 bp, Homo sapien
cagtaggtgcttcgggaggcatcct

SEQ ID NO: 2314079 - DNA, 25 bp, Homo sapien
ttggcagcacactcctgcacccagt

SEQ ID NO: 2314080 - DNA, 25 bp, Homo sapien
acccagtaggtgcttcgggaggcat

SEQ ID NO: 2314081 - DNA, 25 bp, Homo sapien
agcacactcctgcacccagtaggtg

SEQ ID NO: 2314082 - DNA, 25 bp, Homo sapien
gtttttggcatttgcacccatatca

SEQ ID NO: 2314083 - DNA, 25 bp, Homo sapien
tgtttttggcatttgcacccatatc

SEQ ID NO: 2314084 - DNA, 25 bp, Homo sapien
catgtttttggcatttgcacccata

SEQ ID NO: 2314085 - DNA, 25 bp, Homo sapien
ccatgtttttggcatttgcacccat

SEQ ID NO: 2314086 - DNA, 25 bp, Homo sapien
taccataagggcctcagcaacttgg

SEQ ID NO: 2314087 - DNA, 25 bp, Homo sapien
ccacaccagttctttgaacagagta

SEQ ID NO: 2314088 - DNA, 25 bp, Homo sapien
tcagtcaggttcaataaggagacaa

SEQ ID NO: 2314089 - DNA, 25 bp, Homo sapien
tcaaggcctgtccattatcagtcag

SEQ ID NO: 2314090 - DNA, 25 bp, Homo sapien
ggtgtcactaaaggctggtcggtca

SEQ ID NO: 2314091 - DNA, 25 bp, Homo sapien
tggtcatgcgcagagaagaatcttc

SEQ ID NO: 2314092 - DNA, 25 bp, Homo sapien
caaatggctgcctagaatgtgcaag

SEQ ID NO: 2314093 - DNA, 25 bp, Homo sapien
tggtcggtcactccataagcatgaa

SEQ ID NO: 2314094 - DNA, 25 bp, Homo sapien
aggaggagcgcgcactcgctgacct

SEQ ID NO: 2314095 - DNA, 25 bp, Homo sapien
cctagacggccgcagagaacagcgg

SEQ ID NO: 2314096 - DNA, 25 bp, Homo sapien
tccggagtaggcaggagcgccatcc

SEQ ID NO: 2314097 - DNA, 25 bp, Homo sapien
tcagtccaagcagggatggtccgga

SEQ ID NO: 2314098 - DNA, 25 bp, Homo sapien
tgaataccggggagctgaagtggat

SEQ ID NO: 2314099 - DNA, 25 bp, Homo sapien
gcgaggtgaataccggggagctgaa

SEQ ID NO: 2314100 - DNA, 25 bp, Homo sapien
tgagcgcgaggtgaataccggggag

SEQ ID NO: 2314101 - DNA, 25 bp, Homo sapien
ccggggagctgaagtggatggacat

SEQ ID NO: 2314102 - DNA, 25 bp, Homo sapien
cgtgaggcgccgaggccgtagaggc

SEQ ID NO: 2314103 - DNA, 25 bp, Homo sapien
gtgaggcgccgaggccgtagaggct

SEQ ID NO: 2314104 - DNA, 25 bp, Homo sapien
taatggtgacctcgcggatgccggc

SEQ ID NO: 2314105 - DNA, 25 bp, Homo sapien
tggttaatggtgacctcgcggatgc

SEQ ID NO: 2314106 - DNA, 25 bp, Homo sapien
gctctggttaatggtgacctcgcgg

SEQ ID NO: 2314107 - DNA, 25 bp, Homo sapien
gttaatggtgacctcgcggatgccg

SEQ ID NO: 2314108 - DNA, 25 bp, Homo sapien
tctcctcctggcgcacccgctggag

SEQ ID NO: 2314109 - DNA, 25 bp, Homo sapien
cctcctggcgcacccgctggaggga

SEQ ID NO: 2314110 - DNA, 25 bp, Homo sapien
tggagggaggggtcggcgtccagcc

SEQ ID NO: 2314111 - DNA, 25 bp, Homo sapien
gctctcctcctggcgcacccgctgg

SEQ ID NO: 2314112 - DNA, 25 bp, Homo sapien
cttgtcgatgaaggaggcaaacttg

SEQ ID NO: 2314113 - DNA, 25 bp, Homo sapien
cgatgaaggaggcaaacttgttgtt

SEQ ID NO: 2314114 - DNA, 25 bp, Homo sapien
aacttgttgttgagggtcttgatct

SEQ ID NO: 2314115 - DNA, 25 bp, Homo sapien
cttgttgttgagggtcttgatctgc

SEQ ID NO: 2314116 - DNA, 25 bp, Homo sapien
tagttagggcggctggtgtggtctg

SEQ ID NO: 2314117 - DNA, 25 bp, Homo sapien
tctggagcgcggctcgaggagaggc

SEQ ID NO: 2314118 - DNA, 25 bp, Homo sapien
cgcggctcgaggagaggcgaggtcc

SEQ ID NO: 2314119 - DNA, 25 bp, Homo sapien
ggtgtggtctggagcgcggctcgag

SEQ ID NO: 2314120 - DNA, 25 bp, Homo sapien
tgttctgctgctccagaaaccgcac

SEQ ID NO: 2314121 - DNA, 25 bp, Homo sapien
ttgttctgctgctccagaaaccgca

SEQ ID NO: 2314122 - DNA, 25 bp, Homo sapien
ggccagcaatctgggcctcaaagat

SEQ ID NO: 2314123 - DNA, 25 bp, Homo sapien
gcggctgctcttggccgacttctgc

SEQ ID NO: 2314124 - DNA, 25 bp, Homo sapien
atccacctgcagtgcctcaagctga

SEQ ID NO: 2314125 - DNA, 25 bp, Homo sapien
tcaaagatgtctgggaggcggctgc

SEQ ID NO: 2314126 - DNA, 25 bp, Homo sapien
acagggtcagctcatgagggtcaca

SEQ ID NO: 2314127 - DNA, 25 bp, Homo sapien
ggctgagacatttcactgggactga

SEQ ID NO: 2314128 - DNA, 25 bp, Homo sapien
ttaggaggacctgggcaaacaaggc

SEQ ID NO: 2314129 - DNA, 25 bp, Homo sapien
tgcagtgtgagctcaaccaagtccc

SEQ ID NO: 2314130 - DNA, 25 bp, Homo sapien
ctggtgttgatgcagctttgcctcc

SEQ ID NO: 2314131 - DNA, 25 bp, Homo sapien
agggcctggtgttgatgcagctttg

SEQ ID NO: 2314132 - DNA, 25 bp, Homo sapien
ggcctggtgttgatgcagctttgcc

SEQ ID NO: 2314133 - DNA, 25 bp, Homo sapien
cagtagaggagggcctggtgttgat

SEQ ID NO: 2314134 - DNA, 25 bp, Homo sapien
ttcttcagcaccacaaactcattct

SEQ ID NO: 2314135 - DNA, 25 bp, Homo sapien
ttctcagcagctgtgcggtggttaa

SEQ ID NO: 2314136 - DNA, 25 bp, Homo sapien
aaactcattctcagcagctgtgcgg

SEQ ID NO: 2314137 - DNA, 25 bp, Homo sapien
cagctgtgcggtggttaatttcatc

SEQ ID NO: 2314138 - DNA, 25 bp, Homo sapien
tgttttcagacaaccctcctcgagc

SEQ ID NO: 2314139 - DNA, 25 bp, Homo sapien
ggatcctgtggtcctttgtcccatg

SEQ ID NO: 2314140 - DNA, 25 bp, Homo sapien
tcaggtgagaggatcctgtggtcct

SEQ ID NO: 2314141 - DNA, 25 bp, Homo sapien
tcctcgagcctgtctttcccactca

SEQ ID NO: 2314142 - DNA, 25 bp, Homo sapien
cgtctcattgagggtcctgaggaag

SEQ ID NO: 2314143 - DNA, 25 bp, Homo sapien
gtctcattgagggtcctgaggaagt

SEQ ID NO: 2314144 - DNA, 25 bp, Homo sapien
tctcattgagggtcctgaggaagtt

SEQ ID NO: 2314145 - DNA, 25 bp, Homo sapien
tcattgagggtcctgaggaagttga

SEQ ID NO: 2314146 - DNA, 25 bp, Homo sapien
tggtagcattgggtataagtaatcc

SEQ ID NO: 2314147 - DNA, 25 bp, Homo sapien
gtatatgtaagcacagaaaagtctg

SEQ ID NO: 2314148 - DNA, 25 bp, Homo sapien
cattgggtataagtaatccattttc

SEQ ID NO: 2314149 - DNA, 25 bp, Homo sapien
atccattttcaatttacgatttact

SEQ ID NO: 2314150 - DNA, 25 bp, Homo sapien
ggtctggtaccaggcttcagcctca

SEQ ID NO: 2314151 - DNA, 25 bp, Homo sapien
atttggccatctcctcatactgcgc

SEQ ID NO: 2314152 - DNA, 25 bp, Homo sapien
tgccgtccaggtccagggagcgact

SEQ ID NO: 2314153 - DNA, 25 bp, Homo sapien
tcagcccggctgcatttggccatct

SEQ ID NO: 2314154 - DNA, 25 bp, Homo sapien
gatgattaagcctcccaggtctagg

SEQ ID NO: 2314155 - DNA, 25 bp, Homo sapien
gacttaaaccactggtgcctgccag

SEQ ID NO: 2314156 - DNA, 25 bp, Homo sapien
gagagtttgagattcgcacccattc

SEQ ID NO: 2314157 - DNA, 25 bp, Homo sapien
cagtgatggaacgagggcctgaacc

SEQ ID NO: 2314158 - DNA, 25 bp, Homo sapien
gatggcccggttcatctctgaaatc

SEQ ID NO: 2314159 - DNA, 25 bp, Homo sapien
ctcattccgggtattccggaggtcg

SEQ ID NO: 2314160 - DNA, 25 bp, Homo sapien
tctgaaatctcattccgggtattcc

SEQ ID NO: 2314161 - DNA, 25 bp, Homo sapien
agcctctggatggcccggttcatct

SEQ ID NO: 2314162 - DNA, 25 bp, Homo sapien
catgccccaagtagcaggggaagcc

SEQ ID NO: 2314163 - DNA, 25 bp, Homo sapien
ccctgcatgccccaagtagcagggg

SEQ ID NO: 2314164 - DNA, 25 bp, Homo sapien
ctgcatgccccaagtagcaggggaa

SEQ ID NO: 2314165 - DNA, 25 bp, Homo sapien
tgcatgccccaagtagcaggggaag

SEQ ID NO: 2314166 - DNA, 25 bp, Homo sapien
acatcctgagtttggcctcagctgg

SEQ ID NO: 2314167 - DNA, 25 bp, Homo sapien
aacattctgtgctggagatctcaca

SEQ ID NO: 2314168 - DNA, 25 bp, Homo sapien
gggtctgagacagtggcaccagctt

SEQ ID NO: 2314169 - DNA, 25 bp, Homo sapien
gctttggccgggagatgggaacctc

SEQ ID NO: 2314170 - DNA, 25 bp, Homo sapien
cgccctgttgtgtgagaggagaacc

SEQ ID NO: 2314171 - DNA, 25 bp, Homo sapien
ttccagtggaggtagggaccatcaa

SEQ ID NO: 2314172 - DNA, 25 bp, Homo sapien
gctcagtatcaatgtggaaccagtg

SEQ ID NO: 2314173 - DNA, 25 bp, Homo sapien
gcttcaaagaacttcagacaggctg

SEQ ID NO: 2314174 - DNA, 25 bp, Homo sapien
gggcagcagtgcagctgtaagctgg

SEQ ID NO: 2314175 - DNA, 25 bp, Homo sapien
gtgcagctgtaagctggggctcacc

SEQ ID NO: 2314176 - DNA, 25 bp, Homo sapien
tcaccagtctgccttcctgcctgcc

SEQ ID NO: 2314177 - DNA, 25 bp, Homo sapien
gctggggctcaccagtctgccttcc

SEQ ID NO: 2314178 - DNA, 25 bp, Homo sapien
gcttggcacgagcatccttgagcgc

SEQ ID NO: 2314179 - DNA, 25 bp, Homo sapien
tggcacgagcatccttgagcgccag

SEQ ID NO: 2314180 - DNA, 25 bp, Homo sapien
cctgcttggcacgagcatccttgag

SEQ ID NO: 2314181 - DNA, 25 bp, Homo sapien
ctcctgcttggcacgagcatccttg

SEQ ID NO: 2314182 - DNA, 25 bp, Homo sapien
tctctgacctgactacctgaatgtg

SEQ ID NO: 2314183 - DNA, 25 bp, Homo sapien
tgaaggcccagctgcatagacagag

SEQ ID NO: 2314184 - DNA, 25 bp, Homo sapien
tgaagaatgtgctatcagactcccc

SEQ ID NO: 2314185 - DNA, 25 bp, Homo sapien
tcagttagccccacatgatgtagca

SEQ ID NO: 2314186 - DNA, 25 bp, Homo sapien
caaaataattcgtgaatcgttgact

SEQ ID NO: 2314187 - DNA, 25 bp, Homo sapien
taaaaatccattcgggacagctggc

SEQ ID NO: 2314188 - DNA, 25 bp, Homo sapien
ggctatgtttgttttgtgactcaca

SEQ ID NO: 2314189 - DNA, 25 bp, Homo sapien
aaatcctaaaggtgtctgtggccta

SEQ ID NO: 2314190 - DNA, 25 bp, Homo sapien
taatctgtctaaagccctgagcacc

SEQ ID NO: 2314191 - DNA, 25 bp, Homo sapien
acctgggattcggtgaatggtagct

SEQ ID NO: 2314192 - DNA, 25 bp, Homo sapien
cccaagcaggatcattgatttttcc

SEQ ID NO: 2314193 - DNA, 25 bp, Homo sapien
aggacggctctttcctagcgtggga

SEQ ID NO: 2314194 - DNA, 25 bp, Homo sapien
atattcacggctcccactccatctc

SEQ ID NO: 2314195 - DNA, 25 bp, Homo sapien
ggctcccactccatctccagccaac

SEQ ID NO: 2314196 - DNA, 25 bp, Homo sapien
agatattcacggctcccactccatc

SEQ ID NO: 2314197 - DNA, 25 bp, Homo sapien
acggctcccactccatctccagcca

SEQ ID NO: 2314198 - DNA, 25 bp, Homo sapien
gctactgccaccagtggaattcatc

SEQ ID NO: 2314199 - DNA, 25 bp, Homo sapien
tgctactgccaccagtggaattcat

SEQ ID NO: 2314200 - DNA, 25 bp, Homo sapien
ctactgccaccagtggaattcatca

SEQ ID NO: 2314201 - DNA, 25 bp, Homo sapien
tcagtcgcgggcactcctgcgactg

SEQ ID NO: 2314202 - DNA, 25 bp, Homo sapien
gatgcggtccggatggaataagcct

SEQ ID NO: 2314203 - DNA, 25 bp, Homo sapien
actcctgcgactggcggatgcggtc

SEQ ID NO: 2314204 - DNA, 25 bp, Homo sapien
atgcggtccggatggaataagcctt

SEQ ID NO: 2314205 - DNA, 25 bp, Homo sapien
agctattctgacatcactttccaga

SEQ ID NO: 2314206 - DNA, 25 bp, Homo sapien
aagctattctgacatcactttccag

SEQ ID NO: 2314207 - DNA, 25 bp, Homo sapien
tattctgacatcactttccagactg

SEQ ID NO: 2314208 - DNA, 25 bp, Homo sapien
gctattctgacatcactttccagac

SEQ ID NO: 2314209 - DNA, 25 bp, Homo sapien
ctgaacgtctgtggcctcctcacaa

SEQ ID NO: 2314210 - DNA, 25 bp, Homo sapien
ctggctgaccatgagcctggcagac

SEQ ID NO: 2314211 - DNA, 25 bp, Homo sapien
aggacggctggcatgaaagttggct

SEQ ID NO: 2314212 - DNA, 25 bp, Homo sapien
ttggctgggccacccgaaactggaa

SEQ ID NO: 2314213 - DNA, 25 bp, Homo sapien
gacactgtgcaaacatgcctgggag

SEQ ID NO: 2314214 - DNA, 25 bp, Homo sapien
catggcctgcctgatcagggagtac

SEQ ID NO: 2314215 - DNA, 25 bp, Homo sapien
ggagcactaatttgcaacccctggc

SEQ ID NO: 2314216 - DNA, 25 bp, Homo sapien
cactccgttgtcatgtaaagcagcc

SEQ ID NO: 2314217 - DNA, 25 bp, Homo sapien
taacatgggttggtttgaatgccca

SEQ ID NO: 2314218 - DNA, 25 bp, Homo sapien
tccaaaagatccagttcccggaatg

SEQ ID NO: 2314219 - DNA, 25 bp, Homo sapien
tcccggaatgtgtttgcctgtgcct

SEQ ID NO: 2314220 - DNA, 25 bp, Homo sapien
ggtcttcgaaaatgtgcagggcccc

SEQ ID NO: 2314221 - DNA, 25 bp, Homo sapien
cccacagagagtgggtgccagaaca

SEQ ID NO: 2314222 - DNA, 25 bp, Homo sapien
cttcagaactgtctaggacaactgt

SEQ ID NO: 2314223 - DNA, 25 bp, Homo sapien
taataaagagagcaagccccggctt

SEQ ID NO: 2314224 - DNA, 25 bp, Homo sapien
gaagtcagccttgggtgtacacaga

SEQ ID NO: 2314225 - DNA, 25 bp, Homo sapien
gatattctgagcctatcctgcccat

SEQ ID NO: 2314226 - DNA, 25 bp, Homo sapien
cctctgcaggtcaagcacctccagc

SEQ ID NO: 2314227 - DNA, 25 bp, Homo sapien
agcacttcgcttgatattctgagcc

SEQ ID NO: 2314228 - DNA, 25 bp, Homo sapien
cgcttgatattctgagcctatcctg

SEQ ID NO: 2314229 - DNA, 25 bp, Homo sapien
cacaggagcctaactgaggcatggg

SEQ ID NO: 2314230 - DNA, 25 bp, Homo sapien
gaaagcctgtcccatcagctttgag

SEQ ID NO: 2314231 - DNA, 25 bp, Homo sapien
tctttatcagagatacccttcaaga

SEQ ID NO: 2314232 - DNA, 25 bp, Homo sapien
gacaggcccacaggagcctaactga

SEQ ID NO: 2314233 - DNA, 25 bp, Homo sapien
cagtttgggccatcagatgagctgc

SEQ ID NO: 2314234 - DNA, 25 bp, Homo sapien
tcagtttgggccatcagatgagctg

SEQ ID NO: 2314235 - DNA, 25 bp, Homo sapien
aacacaatggtgttacaggcagtgc

SEQ ID NO: 2314236 - DNA, 25 bp, Homo sapien
ggcttgccgtgatgcagcagccacc

SEQ ID NO: 2314237 - DNA, 25 bp, Homo sapien
tgctgccagagtggtagctgaatct

SEQ ID NO: 2314238 - DNA, 25 bp, Homo sapien
gggtcataaccatatctctgagtgg

SEQ ID NO: 2314239 - DNA, 25 bp, Homo sapien
tgctttatgcactgtgcaatctcca

SEQ ID NO: 2314240 - DNA, 25 bp, Homo sapien
tttatgcactgtgcaatctccaggt

SEQ ID NO: 2314241 - DNA, 25 bp, Homo sapien
atgcactgtgcaatctccaggttga

SEQ ID NO: 2314242 - DNA, 25 bp, Homo sapien
tatgcactgtgcaatctccaggttg

SEQ ID NO: 2314243 - DNA, 25 bp, Homo sapien
gggggcagtgacttaagttgagaac

SEQ ID NO: 2314244 - DNA, 25 bp, Homo sapien
gggcagtgacttaagttgagaacat

SEQ ID NO: 2314245 - DNA, 25 bp, Homo sapien
gcagtgacttaagttgagaacatag

SEQ ID NO: 2314246 - DNA, 25 bp, Homo sapien
gtgggggcagtgacttaagttgaga

SEQ ID NO: 2314247 - DNA, 25 bp, Homo sapien
tctgagatgtgggattggagaacat

SEQ ID NO: 2314248 - DNA, 25 bp, Homo sapien
catactgtgccttgatctcggcaat

SEQ ID NO: 2314249 - DNA, 25 bp, Homo sapien
gatgcagtccatgttcaggtcctgg

SEQ ID NO: 2314250 - DNA, 25 bp, Homo sapien
caggtgacaatgtcgtcatactgtg

SEQ ID NO: 2314251 - DNA, 25 bp, Homo sapien
gaggctcagtgtgggatatcccttc

SEQ ID NO: 2314252 - DNA, 25 bp, Homo sapien
cctctggatcatgtgggtcagctcc

SEQ ID NO: 2314253 - DNA, 25 bp, Homo sapien
cacagtctccccgtgccagatcacc

SEQ ID NO: 2314254 - DNA, 25 bp, Homo sapien
ggatcatgtgggtcagctccttgat

SEQ ID NO: 2314255 - DNA, 25 bp, Homo sapien
tcatgtgggtcagctccttgatctc

SEQ ID NO: 2314256 - DNA, 25 bp, Homo sapien
aaacaggcctcttgccttcatcatc

SEQ ID NO: 2314257 - DNA, 25 bp, Homo sapien
ggcactccctgactgaccacaacca

SEQ ID NO: 2314258 - DNA, 25 bp, Homo sapien
cagaaacaggcctcttgccttcatc

SEQ ID NO: 2314259 - DNA, 25 bp, Homo sapien
gcactccctgactgaccacaaccag

SEQ ID NO: 2314260 - DNA, 25 bp, Homo sapien
aagaggcagccttcacattgaggcc

SEQ ID NO: 2314261 - DNA, 25 bp, Homo sapien
gcggttatcgctaagggccacctca

SEQ ID NO: 2314262 - DNA, 25 bp, Homo sapien
tcctcaccatctagaaggtggcaag

SEQ ID NO: 2314263 - DNA, 25 bp, Homo sapien
caaccagcttgcagcggttatcgct

SEQ ID NO: 2314264 - DNA, 25 bp, Homo sapien
tcacagcactgatgccatcacacag

SEQ ID NO: 2314265 - DNA, 25 bp, Homo sapien
tattcacagcactgatgccatcaca

SEQ ID NO: 2314266 - DNA, 25 bp, Homo sapien
agatattcacagcactgatgccatc

SEQ ID NO: 2314267 - DNA, 25 bp, Homo sapien
cacagcactgatgccatcacacagc

SEQ ID NO: 2314268 - DNA, 25 bp, Homo sapien
cccacaggagctgatgccgcaggtg

SEQ ID NO: 2314269 - DNA, 25 bp, Homo sapien
tgggctgggtgcatcctcaagctct

SEQ ID NO: 2314270 - DNA, 25 bp, Homo sapien
agctgggaccctcgcaagggtgaga

SEQ ID NO: 2314271 - DNA, 25 bp, Homo sapien
gccaacttaacacttcctgtagctg

SEQ ID NO: 2314272 - DNA, 25 bp, Homo sapien
aaagatggttggtgagaggctatcc

SEQ ID NO: 2314273 - DNA, 25 bp, Homo sapien
agagagattcccacacaacaagaag

SEQ ID NO: 2314274 - DNA, 25 bp, Homo sapien
caaacagaacatgcccatgggctac

SEQ ID NO: 2314275 - DNA, 25 bp, Homo sapien
gaggctatcctcttcgtgggttcag

SEQ ID NO: 2314276 - DNA, 25 bp, Homo sapien
ctgtggagcagacggcagaggggag

SEQ ID NO: 2314277 - DNA, 25 bp, Homo sapien
ctggatggcctgattaagcctgttc

SEQ ID NO: 2314278 - DNA, 25 bp, Homo sapien
ctgcacagttgcctttaattcctca

SEQ ID NO: 2314279 - DNA, 25 bp, Homo sapien
gcctgattaagcctgttcagatcct

SEQ ID NO: 2314280 - DNA, 25 bp, Homo sapien
gcacagttgcctttaattcctcaca

SEQ ID NO: 2314281 - DNA, 25 bp, Homo sapien
cagagctggcgggtccttgacttcc

SEQ ID NO: 2314282 - DNA, 25 bp, Homo sapien
ctctagttcacagggcgtagggagc

SEQ ID NO: 2314283 - DNA, 25 bp, Homo sapien
agcgaagggtagaccaaggacagaa

SEQ ID NO: 2314284 - DNA, 25 bp, Homo sapien
gacagaaggacattattggccctca

SEQ ID NO: 2314285 - DNA, 25 bp, Homo sapien
ctaaagcccacggacacagccggga

SEQ ID NO: 2314286 - DNA, 25 bp, Homo sapien
agcccacggacacagccgggagagc

SEQ ID NO: 2314287 - DNA, 25 bp, Homo sapien
tccagggcgccggagcctgctcggg

SEQ ID NO: 2314288 - DNA, 25 bp, Homo sapien
cgggagagccgcagagcgcgtagcc

SEQ ID NO: 2314289 - DNA, 25 bp, Homo sapien
caggctcccggccagtgactggcag

SEQ ID NO: 2314290 - DNA, 25 bp, Homo sapien
gccttcggggttcacaggtgtcagc

SEQ ID NO: 2314291 - DNA, 25 bp, Homo sapien
gtgcgccctgcggccaattgaacac

SEQ ID NO: 2314292 - DNA, 25 bp, Homo sapien
gcagtgtctgcagcgctccgtgcaa

SEQ ID NO: 2314293 - DNA, 25 bp, Homo sapien
cagagccaagaccatagagtggaga

SEQ ID NO: 2314294 - DNA, 25 bp, Homo sapien
gaccatagagtggagattctgccat

SEQ ID NO: 2314295 - DNA, 25 bp, Homo sapien
gccaagaccatagagtggagattct

SEQ ID NO: 2314296 - DNA, 25 bp, Homo sapien
gccagagccaagaccatagagtgga

SEQ ID NO: 2314297 - DNA, 25 bp, Homo sapien
ctgaggatggagacgtccgaatgga

SEQ ID NO: 2314298 - DNA, 25 bp, Homo sapien
gcccgcaggccgagatgcagctgaa

SEQ ID NO: 2314299 - DNA, 25 bp, Homo sapien
aggctctcgttgaccgacacggtgg

SEQ ID NO: 2314300 - DNA, 25 bp, Homo sapien
tgaaggccgcgaacctgctgttgag

SEQ ID NO: 2314301 - DNA, 25 bp, Homo sapien
agcggtagccgaagctgcgtccgca

SEQ ID NO: 2314302 - DNA, 25 bp, Homo sapien
gatggtgtctggtgccccaaagcca

SEQ ID NO: 2314303 - DNA, 25 bp, Homo sapien
ctgccattcggtgtgggaaggtggg

SEQ ID NO: 2314304 - DNA, 25 bp, Homo sapien
cgcagagtctcgatgtagccctcaa

SEQ ID NO: 2314305 - DNA, 25 bp, Homo sapien
cagagtctcgatgtagccctcaaac

SEQ ID NO: 2314306 - DNA, 25 bp, Homo sapien
gccgcagagtctcgatgtagccctc

SEQ ID NO: 2314307 - DNA, 25 bp, Homo sapien
gcagagtctcgatgtagccctcaaa

SEQ ID NO: 2314308 - DNA, 25 bp, Homo sapien
acaggtgctacaagtataggggctg

SEQ ID NO: 2314309 - DNA, 25 bp, Homo sapien
gacaggtgctacaagtataggggct

SEQ ID NO: 2314310 - DNA, 25 bp, Homo sapien
caggtgctacaagtataggggctga

SEQ ID NO: 2314311 - DNA, 25 bp, Homo sapien
tgacaggtgctacaagtataggggc

SEQ ID NO: 2314312 - DNA, 25 bp, Homo sapien
tcgttctcagctgttgctctcagag

SEQ ID NO: 2314313 - DNA, 25 bp, Homo sapien
tctcagctgttgctctcagagaaac

SEQ ID NO: 2314314 - DNA, 25 bp, Homo sapien
gttctcagctgttgctctcagagaa

SEQ ID NO: 2314315 - DNA, 25 bp, Homo sapien
tctcagagaaacctcctcctcatac

SEQ ID NO: 2314316 - DNA, 25 bp, Homo sapien
agatctgtgcttctcaatcctgtgt

SEQ ID NO: 2314317 - DNA, 25 bp, Homo sapien
tctgtgcttctcaatcctgtgtcac

SEQ ID NO: 2314318 - DNA, 25 bp, Homo sapien
caggaagaatctgtcattctgagat

SEQ ID NO: 2314319 - DNA, 25 bp, Homo sapien
tgtcattctgagatcccacagatct

SEQ ID NO: 2314320 - DNA, 25 bp, Homo sapien
tggggagtgttggagctcaaggacc

SEQ ID NO: 2314321 - DNA, 25 bp, Homo sapien
ggaaaggtggggagtgttggagctc

SEQ ID NO: 2314322 - DNA, 25 bp, Homo sapien
ctggaaaggtggggagtgttggagc

SEQ ID NO: 2314323 - DNA, 25 bp, Homo sapien
aaggtggggagtgttggagctcaag

SEQ ID NO: 2314324 - DNA, 25 bp, Homo sapien
tgcggaggtaggcgcagtccacatc

SEQ ID NO: 2314325 - DNA, 25 bp, Homo sapien
ccacattggcctccaggtctgattt

SEQ ID NO: 2314326 - DNA, 25 bp, Homo sapien
agccgcctcaggaagtcgatctcct

SEQ ID NO: 2314327 - DNA, 25 bp, Homo sapien
tgctgcggtaccaggactcggcctc

SEQ ID NO: 2314328 - DNA, 25 bp, Homo sapien
ttgctgcggtaccaggactcggcct

SEQ ID NO: 2314329 - DNA, 25 bp, Homo sapien
cttgctgcggtaccaggactcggcc

SEQ ID NO: 2314330 - DNA, 25 bp, Homo sapien
cggttcagctcgttgatctcctcct

SEQ ID NO: 2314331 - DNA, 25 bp, Homo sapien
cagggtctccccgtgcctgatcacc

SEQ ID NO: 2314332 - DNA, 25 bp, Homo sapien
tccttggtgcggcgcagggtctccc

SEQ ID NO: 2314333 - DNA, 25 bp, Homo sapien
catgcggttcagctcgttgatctcc

SEQ ID NO: 2314334 - DNA, 25 bp, Homo sapien
tcctggtactccctgatcaggcagg

SEQ ID NO: 2314335 - DNA, 25 bp, Homo sapien
gcgggcatcgctgagggccgcctca

SEQ ID NO: 2314336 - DNA, 25 bp, Homo sapien
cttgcagcgggcatcgctgagggcc

SEQ ID NO: 2314337 - DNA, 25 bp, Homo sapien
tactccctgatcaggcaggccatgt

SEQ ID NO: 2314338 - DNA, 25 bp, Homo sapien
ctcgccctccagcaggcgcctgtag

SEQ ID NO: 2314339 - DNA, 25 bp, Homo sapien
cgatgtccaggcccagcttggagtt

SEQ ID NO: 2314340 - DNA, 25 bp, Homo sapien
ccctccagcaggcgcctgtaggtgg

SEQ ID NO: 2314341 - DNA, 25 bp, Homo sapien
ccaggcccagcttggagttcatcac

SEQ ID NO: 2314342 - DNA, 25 bp, Homo sapien
tcaccgagccgacgccctcgcacag

SEQ ID NO: 2314343 - DNA, 25 bp, Homo sapien
gacattcaccgagccgacgccctcg

SEQ ID NO: 2314344 - DNA, 25 bp, Homo sapien
attcaccgagccgacgccctcgcac

SEQ ID NO: 2314345 - DNA, 25 bp, Homo sapien
agacattcaccgagccgacgccctc

SEQ ID NO: 2314346 - DNA, 25 bp, Homo sapien
cgctactgactctggtggagacaac

SEQ ID NO: 2314347 - DNA, 25 bp, Homo sapien
ggcgcaggcgttagtagtgcccacc

SEQ ID NO: 2314348 - DNA, 25 bp, Homo sapien
tagtggaggcgcagagatcgccaca

SEQ ID NO: 2314349 - DNA, 25 bp, Homo sapien
gcagagatcgccacagacaacgcca

SEQ ID NO: 2314350 - DNA, 25 bp, Homo sapien
gcctgtccctcgcagagtcatagaa

SEQ ID NO: 2314351 - DNA, 25 bp, Homo sapien
cacaggcaaaagcacatgggcagag

SEQ ID NO: 2314352 - DNA, 25 bp, Homo sapien
tagaaccactatccagggtccgcgt

SEQ ID NO: 2314353 - DNA, 25 bp, Homo sapien
caggtcgtgcagacagggacattcc

SEQ ID NO: 2314354 - DNA, 25 bp, Homo sapien
gctccaactccattccatgaaagct

SEQ ID NO: 2314355 - DNA, 25 bp, Homo sapien
agctgcctcttctccggaagcttcc

SEQ ID NO: 2314356 - DNA, 25 bp, Homo sapien
gcagaggtagatgctatgggccaat

SEQ ID NO: 2314357 - DNA, 25 bp, Homo sapien
catgaaagctttcttcacccaagag

SEQ ID NO: 2314358 - DNA, 25 bp, Homo sapien
ggtactgttacacaagcttgggttc

SEQ ID NO: 2314359 - DNA, 25 bp, Homo sapien
aaccaggagctcatttattccaaca

SEQ ID NO: 2314360 - DNA, 25 bp, Homo sapien
tgctgtgtagcaggtactgttacac

SEQ ID NO: 2314361 - DNA, 25 bp, Homo sapien
ttccaacaacaaatcattattgagc

SEQ ID NO: 2314362 - DNA, 25 bp, Homo sapien
tgtgtgcggggatctctgcgtgtcg

SEQ ID NO: 2314363 - DNA, 25 bp, Homo sapien
gccggtgacgggcagcgtctgcagt

SEQ ID NO: 2314364 - DNA, 25 bp, Homo sapien
tggtgagcactggtttgtgcaagcc

SEQ ID NO: 2314365 - DNA, 25 bp, Homo sapien
ctgcagtgccccctgcaacgggaac

SEQ ID NO: 2314366 - DNA, 25 bp, Homo sapien
catgatgggccatggcactgacaca

SEQ ID NO: 2314367 - DNA, 25 bp, Homo sapien
cgtacacaggctctgactgccaaag

SEQ ID NO: 2314368 - DNA, 25 bp, Homo sapien
cagagcgggagctgaagttcttgac

SEQ ID NO: 2314369 - DNA, 25 bp, Homo sapien
tcttgaccccgcagccagagctgat

SEQ ID NO: 2314370 - DNA, 25 bp, Homo sapien
acactgggcattggggtcgatctct

SEQ ID NO: 2314371 - DNA, 25 bp, Homo sapien
tggtaacagatgtgatgcggggtgg

SEQ ID NO: 2314372 - DNA, 25 bp, Homo sapien
cttctcctcatgcttcacacactgg

SEQ ID NO: 2314373 - DNA, 25 bp, Homo sapien
gcaaacttgttgagacacctgatgt

SEQ ID NO: 2314374 - DNA, 25 bp, Homo sapien
gctgtcctcccccaaagactgtgag

SEQ ID NO: 2314375 - DNA, 25 bp, Homo sapien
ctcctcctttaaactttggtggctg

SEQ ID NO: 2314376 - DNA, 25 bp, Homo sapien
cattcagccctggaagacgagcttc

SEQ ID NO: 2314377 - DNA, 25 bp, Homo sapien
cctggaagacgagcttctcctcctt

SEQ ID NO: 2314378 - DNA, 25 bp, Homo sapien
ttcttatgcagtcccagggtgtaga

SEQ ID NO: 2314379 - DNA, 25 bp, Homo sapien
tgcagtcccagggtgtagatataca

SEQ ID NO: 2314380 - DNA, 25 bp, Homo sapien
cagtcccagggtgtagatatacaca

SEQ ID NO: 2314381 - DNA, 25 bp, Homo sapien
tatgcagtcccagggtgtagatata

SEQ ID NO: 2314382 - DNA, 25 bp, Homo sapien
catatcaatgcactttgtagtctgg

SEQ ID NO: 2314383 - DNA, 25 bp, Homo sapien
actttgtagtctggagctcaatgca

SEQ ID NO: 2314384 - DNA, 25 bp, Homo sapien
caatgcactttgtagtctggagctc

SEQ ID NO: 2314385 - DNA, 25 bp, Homo sapien
tagtctggagctcaatgcagtttgg

SEQ ID NO: 2314386 - DNA, 25 bp, Homo sapien
ctgccattcaggaaggaggaaagag

SEQ ID NO: 2314387 - DNA, 25 bp, Homo sapien
tgccattcaggaaggaggaaagaga

SEQ ID NO: 2314388 - DNA, 25 bp, Homo sapien
ggtagaactgcagcttggtctccag

SEQ ID NO: 2314389 - DNA, 25 bp, Homo sapien
ctggtagaactgcagcttggtctcc

SEQ ID NO: 2314390 - DNA, 25 bp, Homo sapien
tgttctgctgctccaggaagcgcac

SEQ ID NO: 2314391 - DNA, 25 bp, Homo sapien
tggtctccagcagtttgttctgctg

SEQ ID NO: 2314392 - DNA, 25 bp, Homo sapien
gccgcagagtcgccatgtagccctg

SEQ ID NO: 2314393 - DNA, 25 bp, Homo sapien
ccgcagagtcgccatgtagccctgc

SEQ ID NO: 2314394 - DNA, 25 bp, Homo sapien
cctgcgtgcagttgagctctgaggc

SEQ ID NO: 2314395 - DNA, 25 bp, Homo sapien
tcctgcgtgcagttgagctctgagg

SEQ ID NO: 2314396 - DNA, 25 bp, Homo sapien
gcctcctgcgtgcagttgagctctg

SEQ ID NO: 2314397 - DNA, 25 bp, Homo sapien
ctcctgcgtgcagttgagctctgag

SEQ ID NO: 2314398 - DNA, 25 bp, Homo sapien
cttcttcagcatcatgaactcattc

SEQ ID NO: 2314399 - DNA, 25 bp, Homo sapien
cctgagggccagctcttcttcatac

SEQ ID NO: 2314400 - DNA, 25 bp, Homo sapien
gaactcattctcagctgtggccctg

SEQ ID NO: 2314401 - DNA, 25 bp, Homo sapien
gccctgagggccagctcttcttcat

SEQ ID NO: 2314402 - DNA, 25 bp, Homo sapien
ccttaccaccaacaattgggctaat

SEQ ID NO: 2314403 - DNA, 25 bp, Homo sapien
tccagtaccttaccaccaacaattg

SEQ ID NO: 2314404 - DNA, 25 bp, Homo sapien
cagtaccttaccaccaacaattggg

SEQ ID NO: 2314405 - DNA, 25 bp, Homo sapien
gggctccagtaccttaccaccaaca

SEQ ID NO: 2314406 - DNA, 25 bp, Homo sapien
ccgtctcgtgcagataggtgtagcc

SEQ ID NO: 2314407 - DNA, 25 bp, Homo sapien
cgtgcagataggtgtagcctacatc

SEQ ID NO: 2314408 - DNA, 25 bp, Homo sapien
gttggcctccaggtccgtctcgtgc

SEQ ID NO: 2314409 - DNA, 25 bp, Homo sapien
tccaggtccgtctcgtgcagatagg

SEQ ID NO: 2314410 - DNA, 25 bp, Homo sapien
aagactgactcctccttcagcggct

SEQ ID NO: 2314411 - DNA, 25 bp, Homo sapien
ggactgcaggaagactgactcctcc

SEQ ID NO: 2314412 - DNA, 25 bp, Homo sapien
tagagggactgcaggaagactgact

SEQ ID NO: 2314413 - DNA, 25 bp, Homo sapien
ctccccgtagagggactgcaggaag

SEQ ID NO: 2314414 - DNA, 25 bp, Homo sapien
ttcaccaccatggaggtgtcagaga

SEQ ID NO: 2314415 - DNA, 25 bp, Homo sapien
gatttgtgattgaaggaggcagatt

SEQ ID NO: 2314416 - DNA, 25 bp, Homo sapien
accaccatggaggtgtcagagattt

SEQ ID NO: 2314417 - DNA, 25 bp, Homo sapien
caagtccatgttgagctcccagctg

SEQ ID NO: 2314418 - DNA, 25 bp, Homo sapien
agctggcaatatcatcatactgagc

SEQ ID NO: 2314419 - DNA, 25 bp, Homo sapien
tgcagctggcaatatcatcatactg

SEQ ID NO: 2314420 - DNA, 25 bp, Homo sapien
gcctccacccggctgcagctggcaa

SEQ ID NO: 2314421 - DNA, 25 bp, Homo sapien
acccggctgcagctggcaatatcat

SEQ ID NO: 2314422 - DNA, 25 bp, Homo sapien
cagttcagctcgttgagctcatcct

SEQ ID NO: 2314423 - DNA, 25 bp, Homo sapien
agctcgttgagctcatccttggttc

SEQ ID NO: 2314424 - DNA, 25 bp, Homo sapien
ggttctgcggaggttctcaccctgt

SEQ ID NO: 2314425 - DNA, 25 bp, Homo sapien
ctcatccttggttctgcggaggttc

SEQ ID NO: 2314426 - DNA, 25 bp, Homo sapien
ggtgcaggttgtggggactctggtg

SEQ ID NO: 2314427 - DNA, 25 bp, Homo sapien
aaagggtgcaggttgtggggactct

SEQ ID NO: 2314428 - DNA, 25 bp, Homo sapien
aagggtgcaggttgtggggactctg

SEQ ID NO: 2314429 - DNA, 25 bp, Homo sapien
caggttgtggggactctggtgggtc

SEQ ID NO: 2314430 - DNA, 25 bp, Homo sapien
cagactgggccaccgcagcctccag

SEQ ID NO: 2314431 - DNA, 25 bp, Homo sapien
tgctcagactgggccaccgcagcct

SEQ ID NO: 2314432 - DNA, 25 bp, Homo sapien
ctgctcagactgggccaccgcagcc

SEQ ID NO: 2314433 - DNA, 25 bp, Homo sapien
ctcagactgggccaccgcagcctcc

SEQ ID NO: 2314434 - DNA, 25 bp, Homo sapien
ctcctggtactgcttgagcatgcag

SEQ ID NO: 2314435 - DNA, 25 bp, Homo sapien
gccagcttgcagtgggcattgctga

SEQ ID NO: 2314436 - DNA, 25 bp, Homo sapien
tactgcttgagcatgcaggccatgt

SEQ ID NO: 2314437 - DNA, 25 bp, Homo sapien
gcttgagcatgcaggccatgtcctg

SEQ ID NO: 2314438 - DNA, 25 bp, Homo sapien
taagtggcgatctccacgtccaagc

SEQ ID NO: 2314439 - DNA, 25 bp, Homo sapien
cagtttgcgataagtggcgatctcc

SEQ ID NO: 2314440 - DNA, 25 bp, Homo sapien
cctccagcagtttgcgataagtggc

SEQ ID NO: 2314441 - DNA, 25 bp, Homo sapien
tcaccctccagcagtttgcgataag

SEQ ID NO: 2314442 - DNA, 25 bp, Homo sapien
atattgactgagcccacgccttcac

SEQ ID NO: 2314443 - DNA, 25 bp, Homo sapien
tgactgagcccacgccttcacacag

SEQ ID NO: 2314444 - DNA, 25 bp, Homo sapien
agatattgactgagcccacgccttc

SEQ ID NO: 2314445 - DNA, 25 bp, Homo sapien
attgactgagcccacgccttcacac

SEQ ID NO: 2314446 - DNA, 25 bp, Homo sapien
ctcagcctcggtggtccgcaggcca

SEQ ID NO: 2314447 - DNA, 25 bp, Homo sapien
cgagagactcgggatgggaaggcga

SEQ ID NO: 2314448 - DNA, 25 bp, Homo sapien
gttatgtcgcccgtgcagtgctggc

SEQ ID NO: 2314449 - DNA, 25 bp, Homo sapien
agtcaccgtccaggccagcaggact

SEQ ID NO: 2314450 - DNA, 25 bp, Homo sapien
cactttaggcccaaagggctgtagc

SEQ ID NO: 2314451 - DNA, 25 bp, Homo sapien
tgaatggcatgtgaatggaaaatgt

SEQ ID NO: 2314452 - DNA, 25 bp, Homo sapien
tggcatgtgaatggaaaatgtgtgc

SEQ ID NO: 2314453 - DNA, 25 bp, Homo sapien
aaatgtgtgcttgcttccagaatct

SEQ ID NO: 2314454 - DNA, 25 bp, Homo sapien
ggaaaatgtgtgcttgcttccagaa

SEQ ID NO: 2314455 - DNA, 25 bp, Homo sapien
cggtggtggcccctgactcctgtgc

SEQ ID NO: 2314456 - DNA, 25 bp, Homo sapien
ccccagggcgccagatcacttctgg

SEQ ID NO: 2314457 - DNA, 25 bp, Homo sapien
ttcagctgcgggagtagccggtcgg

SEQ ID NO: 2314458 - DNA, 25 bp, Homo sapien
cataggcggcagcatcacggtggtg

SEQ ID NO: 2314459 - DNA, 25 bp, Homo sapien
atagctgtaggtggcttccgagccg

SEQ ID NO: 2314460 - DNA, 25 bp, Homo sapien
gggctgacgggcttcggcagccgca

SEQ ID NO: 2314461 - DNA, 25 bp, Homo sapien
tcctgcgggccccggatagctgtag

SEQ ID NO: 2314462 - DNA, 25 bp, Homo sapien
ctaccgagggctgacgggcttcggc

SEQ ID NO: 2314463 - DNA, 25 bp, Homo sapien
cagcatggcagggtgaagtcaaaag

SEQ ID NO: 2314464 - DNA, 25 bp, Homo sapien
ggcagggtgaagtcaaaaggaacag

SEQ ID NO: 2314465 - DNA, 25 bp, Homo sapien
cagggtgaagtcaaaaggaacagga

SEQ ID NO: 2314466 - DNA, 25 bp, Homo sapien
agcagcatggcagggtgaagtcaaa

SEQ ID NO: 2314467 - DNA, 25 bp, Homo sapien
ggggcggctggccaggcagaggggc

SEQ ID NO: 2314468 - DNA, 25 bp, Homo sapien
cggggcggctggccaggcagagggg

SEQ ID NO: 2314469 - DNA, 25 bp, Homo sapien
tgcaaagatgcatccaagtagggag

SEQ ID NO: 2314470 - DNA, 25 bp, Homo sapien
tagggagttcccgttgctgaaaata

SEQ ID NO: 2314471 - DNA, 25 bp, Homo sapien
gaagctgaacaattgtatcttggca

SEQ ID NO: 2314472 - DNA, 25 bp, Homo sapien
ttcgaaaaggaagtctatggctccc

SEQ ID NO: 2314473 - DNA, 25 bp, Homo sapien
gaactggctctcaaggatgcacggg

SEQ ID NO: 2314474 - DNA, 25 bp, Homo sapien
tcctcaaagcaagttgagctcacct

SEQ ID NO: 2314475 - DNA, 25 bp, Homo sapien
ggtgaggcagatgcaccaacttcat

SEQ ID NO: 2314476 - DNA, 25 bp, Homo sapien
ttccagcttgcaaacggccattgct

SEQ ID NO: 2314477 - DNA, 25 bp, Homo sapien
ggcggctttagttccagcagcggca

SEQ ID NO: 2314478 - DNA, 25 bp, Homo sapien
ctgccctcccgggtagagctgggat

SEQ ID NO: 2314479 - DNA, 25 bp, Homo sapien
gtgctgccgccagctctcagtccca

SEQ ID NO: 2314480 - DNA, 25 bp, Homo sapien
gaagagctacaagcactgaagtgct

SEQ ID NO: 2314481 - DNA, 25 bp, Homo sapien
ctcggtcccacagtcctcaggccct

SEQ ID NO: 2314482 - DNA, 25 bp, Homo sapien
agctctcggtcccacagtcctcagg

SEQ ID NO: 2314483 - DNA, 25 bp, Homo sapien
gtcccacagtcctcaggcccttctc

SEQ ID NO: 2314484 - DNA, 25 bp, Homo sapien
cccacagtcctcaggcccttctctg

SEQ ID NO: 2314485 - DNA, 25 bp, Homo sapien
cagtgttctatctctgaggctgagc

SEQ ID NO: 2314486 - DNA, 25 bp, Homo sapien
gactagtcctatgatgtacaaagcc

SEQ ID NO: 2314487 - DNA, 25 bp, Homo sapien
cagtatccatgaaagcacaagtgac

SEQ ID NO: 2314488 - DNA, 25 bp, Homo sapien
taaagtgcgtctgctagctctcggt

SEQ ID NO: 2314489 - DNA, 25 bp, Homo sapien
ggacagcattgtcggggaacggggc

SEQ ID NO: 2314490 - DNA, 25 bp, Homo sapien
cagcattgtcggggaacggggccgc

SEQ ID NO: 2314491 - DNA, 25 bp, Homo sapien
gctggacagcattgtcggggaacgg

SEQ ID NO: 2314492 - DNA, 25 bp, Homo sapien
gcagctggacagcattgtcggggaa

SEQ ID NO: 2314493 - DNA, 25 bp, Homo sapien
gcagcagaacaaggttctggaaaca

SEQ ID NO: 2314494 - DNA, 25 bp, Homo sapien
cagcagaacaaggttctggaaacaa

SEQ ID NO: 2314495 - DNA, 25 bp, Homo sapien
gcagaacaaggttctggaaacaaag

SEQ ID NO: 2314496 - DNA, 25 bp, Homo sapien
gagcagcagaacaaggttctggaaa

SEQ ID NO: 2314497 - DNA, 25 bp, Homo sapien
gaggagcgtgaacagatcaagaccc

SEQ ID NO: 2314498 - DNA, 25 bp, Homo sapien
aatcgatcccaccatccagcgggtg

SEQ ID NO: 2314499 - DNA, 25 bp, Homo sapien
ccctggaggcatccaagaggtcacc

SEQ ID NO: 2314500 - DNA, 25 bp, Homo sapien
tggagccggccttgctggtggcttt

SEQ ID NO: 2314501 - DNA, 25 bp, Homo sapien
tgctgacacgagaacccaaagtttt

SEQ ID NO: 2314502 - DNA, 25 bp, Homo sapien
gagtagtctagaccaagccaattgc

SEQ ID NO: 2314503 - DNA, 25 bp, Homo sapien
tttggttcccaggagagccccattc

SEQ ID NO: 2314504 - DNA, 25 bp, Homo sapien
tcccgtgccgcagttctatattctg

SEQ ID NO: 2314505 - DNA, 25 bp, Homo sapien
ggtggaggtcttgccggaggtagca

SEQ ID NO: 2314506 - DNA, 25 bp, Homo sapien
cagtgcaagcagtggccgagggctg

SEQ ID NO: 2314507 - DNA, 25 bp, Homo sapien
gaagctactactccagcagcagtgg

SEQ ID NO: 2314508 - DNA, 25 bp, Homo sapien
tgtcggcctaggtggtgggctcagt

SEQ ID NO: 2314509 - DNA, 25 bp, Homo sapien
gcagaacctggagccgttgttcgag

SEQ ID NO: 2314510 - DNA, 25 bp, Homo sapien
cgttgttcgagcagtacatcaacaa

SEQ ID NO: 2314511 - DNA, 25 bp, Homo sapien
cctggagccgttgttcgagcagtac

SEQ ID NO: 2314512 - DNA, 25 bp, Homo sapien
tgaggcagaacctggagccgttgtt

SEQ ID NO: 2314513 - DNA, 25 bp, Homo sapien
tggcagcttcaggaaccggtttggt

SEQ ID NO: 2314514 - DNA, 25 bp, Homo sapien
catcagcactagtggtggcagcttc

SEQ ID NO: 2314515 - DNA, 25 bp, Homo sapien
catgtctcgccagtcaagtgtgtcc

SEQ ID NO: 2314516 - DNA, 25 bp, Homo sapien
aaatcgaccccagcatccagagggt

SEQ ID NO: 2314517 - DNA, 25 bp, Homo sapien
tgttctatcaggagccgagggtccc

SEQ ID NO: 2314518 - DNA, 25 bp, Homo sapien
ggaggattcccacgaagctcggata

SEQ ID NO: 2314519 - DNA, 25 bp, Homo sapien
ccgatatcgatctttgagtggagca

SEQ ID NO: 2314520 - DNA, 25 bp, Homo sapien
gagcatcccactacgagtcctcaga

SEQ ID NO: 2314521 - DNA, 25 bp, Homo sapien
ccacacccactccaactaggcccca

SEQ ID NO: 2314522 - DNA, 25 bp, Homo sapien
cacacccactccaactaggccccaa

SEQ ID NO: 2314523 - DNA, 25 bp, Homo sapien
cacccactccaactaggccccaagc

SEQ ID NO: 2314524 - DNA, 25 bp, Homo sapien
acacccactccaactaggccccaag

SEQ ID NO: 2314525 - DNA, 25 bp, Homo sapien
ttttgagcgtgaagctgtccctgga

SEQ ID NO: 2314526 - DNA, 25 bp, Homo sapien
gatgctgcgcgagtaccaagagctt

SEQ ID NO: 2314527 - DNA, 25 bp, Homo sapien
caaagactgcgctcggagattgaga

SEQ ID NO: 2314528 - DNA, 25 bp, Homo sapien
ggttgacaggactccacctggatgt

SEQ ID NO: 2314529 - DNA, 25 bp, Homo sapien
tcacacagccttgcggagaagcagg

SEQ ID NO: 2314530 - DNA, 25 bp, Homo sapien
cagagcagtacaccagagtgctgaa

SEQ ID NO: 2314531 - DNA, 25 bp, Homo sapien
gggttggcaccaaagataaaataca

SEQ ID NO: 2314532 - DNA, 25 bp, Homo sapien
tctggataacttgacatctttagga

SEQ ID NO: 2314533 - DNA, 25 bp, Homo sapien
atagctgacaagtgacgcagctgga

SEQ ID NO: 2314534 - DNA, 25 bp, Homo sapien
tgacaagtgacgcagctggatcaga

SEQ ID NO: 2314535 - DNA, 25 bp, Homo sapien
gaatctaggtgactgacttcaaatt

SEQ ID NO: 2314536 - DNA, 25 bp, Homo sapien
cagctggatcagaatctaggtgact

SEQ ID NO: 2314537 - DNA, 25 bp, Homo sapien
gattctccataggacgtggacgcag

SEQ ID NO: 2314538 - DNA, 25 bp, Homo sapien
tggacgcagcttacacgagcaaagt

SEQ ID NO: 2314539 - DNA, 25 bp, Homo sapien
tagtgaagtatgcagggccctctgc

SEQ ID NO: 2314540 - DNA, 25 bp, Homo sapien
tgtaacttaagcagtccagggcacc

SEQ ID NO: 2314541 - DNA, 25 bp, Homo sapien
ctgcaagagcaagggttcggaagat

SEQ ID NO: 2314542 - DNA, 25 bp, Homo sapien
ggttcggaagatgcggagggctcct

SEQ ID NO: 2314543 - DNA, 25 bp, Homo sapien
ggaagatgcggagggctcctgggac

SEQ ID NO: 2314544 - DNA, 25 bp, Homo sapien
gctcctgcaagagcaagggttcgga

SEQ ID NO: 2314545 - DNA, 25 bp, Homo sapien
ctcatgagggagtatgctgaactaa

SEQ ID NO: 2314546 - DNA, 25 bp, Homo sapien
tagaaggaatcgattgtgcagaaca

SEQ ID NO: 2314547 - DNA, 25 bp, Homo sapien
ggatcactgccaaggtctgtttttg

SEQ ID NO: 2314548 - DNA, 25 bp, Homo sapien
gctaagttgtctaccaattccctga

SEQ ID NO: 2314549 - DNA, 25 bp, Homo sapien
aaagtatcaggccttgagagaggga

SEQ ID NO: 2314550 - DNA, 25 bp, Homo sapien
ggagtcaccttcacttgctagctga

SEQ ID NO: 2314551 - DNA, 25 bp, Homo sapien
gaatatgactcttaattttgaatct

SEQ ID NO: 2314552 - DNA, 25 bp, Homo sapien
ttatgtaagaggcttgagatgtgct

SEQ ID NO: 2314553 - DNA, 25 bp, Homo sapien
taatgggtctcagcaattttgccaa

SEQ ID NO: 2314554 - DNA, 25 bp, Homo sapien
gcagtcagattcacagctaggcaca

SEQ ID NO: 2314555 - DNA, 25 bp, Homo sapien
cagggtggataagtccaaacagcag

SEQ ID NO: 2314556 - DNA, 25 bp, Homo sapien
acacctcccacaggcggatcttgga

SEQ ID NO: 2314557 - DNA, 25 bp, Homo sapien
cagatcgagctctggaaacttaacc

SEQ ID NO: 2314558 - DNA, 25 bp, Homo sapien
gcagagatcagcaacgtgaagaagc

SEQ ID NO: 2314559 - DNA, 25 bp, Homo sapien
tggagcagattgaacagatgcagtc

SEQ ID NO: 2314560 - DNA, 25 bp, Homo sapien
tcctacaatgccctgccagatcgag

SEQ ID NO: 2314561 - DNA, 25 bp, Homo sapien
gaacaactagcattgatgactggct

SEQ ID NO: 2314562 - DNA, 25 bp, Homo sapien
gatctgtggccaactccaatcctgg

SEQ ID NO: 2314563 - DNA, 25 bp, Homo sapien
ttgaaagggcgtggctgacagtcca

SEQ ID NO: 2314564 - DNA, 25 bp, Homo sapien
gacagtccagtcactaaattctgaa

SEQ ID NO: 2314565 - DNA, 25 bp, Homo sapien
tgttggcccacagacctaggagttg

SEQ ID NO: 2314566 - DNA, 25 bp, Homo sapien
gcaccttgagcagggttctctgaac

SEQ ID NO: 2314567 - DNA, 25 bp, Homo sapien
gttggctctgccctcatccatgaga

SEQ ID NO: 2314568 - DNA, 25 bp, Homo sapien
gaaatcaacaagaggactggcagcg

SEQ ID NO: 2314569 - DNA, 25 bp, Homo sapien
tctgtcccagctatggtcctgaggt

SEQ ID NO: 2314570 - DNA, 25 bp, Homo sapien
tattaggtactggtagatgctcaac

SEQ ID NO: 2314571 - DNA, 25 bp, Homo sapien
gaagtctgaggcttatcaagcagca

SEQ ID NO: 2314572 - DNA, 25 bp, Homo sapien
ttttgccccaccaggacgatgctgt

SEQ ID NO: 2314573 - DNA, 25 bp, Homo sapien
cgtaccaggcgctgatgaatgccaa

SEQ ID NO: 2314574 - DNA, 25 bp, Homo sapien
tcaagtctggactgcggcaggccaa

SEQ ID NO: 2314575 - DNA, 25 bp, Homo sapien
tgcagatgaccatcgctgatgcaga

SEQ ID NO: 2314576 - DNA, 25 bp, Homo sapien
aatctaaattggactcctggctccc

SEQ ID NO: 2314577 - DNA, 25 bp, Homo sapien
atgatgtgctccaaaggtgcctgcc

SEQ ID NO: 2314578 - DNA, 25 bp, Homo sapien
taatgatgtgctccaaaggtgcctg

SEQ ID NO: 2314579 - DNA, 25 bp, Homo sapien
ttaatgatgtgctccaaaggtgcct

SEQ ID NO: 2314580 - DNA, 25 bp, Homo sapien
aatgatgtgctccaaaggtgcctgc

SEQ ID NO: 2314581 - DNA, 25 bp, Homo sapien
atggtcctttttgtcagccaactct

SEQ ID NO: 2314582 - DNA, 25 bp, Homo sapien
tggtcctttttgtcagccaactctc

SEQ ID NO: 2314583 - DNA, 25 bp, Homo sapien
catggtcctttttgtcagccaactc

SEQ ID NO: 2314584 - DNA, 25 bp, Homo sapien
tgttccttgaataatgctgcttcct

SEQ ID NO: 2314585 - DNA, 25 bp, Homo sapien
gctgcctcctcgatgtctgttcctt

SEQ ID NO: 2314586 - DNA, 25 bp, Homo sapien
aatggctgcctcctcgatgtctgtt

SEQ ID NO: 2314587 - DNA, 25 bp, Homo sapien
gcctcctcgatgtctgttccttgaa

SEQ ID NO: 2314588 - DNA, 25 bp, Homo sapien
tcttcgtgccgttgttctttttctg

SEQ ID NO: 2314589 - DNA, 25 bp, Homo sapien
tggtccttcttattccaatccctct

SEQ ID NO: 2314590 - DNA, 25 bp, Homo sapien
gagaaactggatcgtttctggtcct

SEQ ID NO: 2314591 - DNA, 25 bp, Homo sapien
tcattgtcttgatattggtccttct

SEQ ID NO: 2314592 - DNA, 25 bp, Homo sapien
tccatccttccgagatttaaagtct

SEQ ID NO: 2314593 - DNA, 25 bp, Homo sapien
gccgttgctttagagcttcagcctc

SEQ ID NO: 2314594 - DNA, 25 bp, Homo sapien
cagggataacagctgggccttaggc

SEQ ID NO: 2314595 - DNA, 25 bp, Homo sapien
gaggaacttgggcttaacctcagct

SEQ ID NO: 2314596 - DNA, 25 bp, Homo sapien
tcctctacaagcatcctctgctgct

SEQ ID NO: 2314597 - DNA, 25 bp, Homo sapien
tctcctctacaagcatcctctgctg

SEQ ID NO: 2314598 - DNA, 25 bp, Homo sapien
ctctcctctacaagcatcctctgct

SEQ ID NO: 2314599 - DNA, 25 bp, Homo sapien
ctcctctacaagcatcctctgctgc

SEQ ID NO: 2314600 - DNA, 25 bp, Homo sapien
caacatcttcctgcccaagtcttgg

SEQ ID NO: 2314601 - DNA, 25 bp, Homo sapien
tgagaatcttccaacatcttcctgc

SEQ ID NO: 2314602 - DNA, 25 bp, Homo sapien
ccaacatcttcctgcccaagtcttg

SEQ ID NO: 2314603 - DNA, 25 bp, Homo sapien
cttccaacatcttcctgcccaagtc

SEQ ID NO: 2314604 - DNA, 25 bp, Homo sapien
tgctcttatccttctcttcccgtat

SEQ ID NO: 2314605 - DNA, 25 bp, Homo sapien
cttaatggcatgcagttctttgctc

SEQ ID NO: 2314606 - DNA, 25 bp, Homo sapien
catttccactggtctctggctccat

SEQ ID NO: 2314607 - DNA, 25 bp, Homo sapien
ttcccgtatcttctgctgccctttc

SEQ ID NO: 2314608 - DNA, 25 bp, Homo sapien
ggttgtagtcaatggatgtatcctc

SEQ ID NO: 2314609 - DNA, 25 bp, Homo sapien
attgagatgtcttgtttggtgccgc

SEQ ID NO: 2314610 - DNA, 25 bp, Homo sapien
caaaaacaaactttcggtcattgag

SEQ ID NO: 2314611 - DNA, 25 bp, Homo sapien
caatggatgtatcctcagatgcatc

SEQ ID NO: 2314612 - DNA, 25 bp, Homo sapien
gcctgtaatgaaaccttgccctaac

SEQ ID NO: 2314613 - DNA, 25 bp, Homo sapien
tatgaagtttgcagagtcttgcctc

SEQ ID NO: 2314614 - DNA, 25 bp, Homo sapien
tgaagtttgcagagtcttgcctcct

SEQ ID NO: 2314615 - DNA, 25 bp, Homo sapien
atgcctgtaatgaaaccttgcccta

SEQ ID NO: 2314616 - DNA, 25 bp, Homo sapien
tgtagccctcacggaagagccacca

SEQ ID NO: 2314617 - DNA, 25 bp, Homo sapien
tagccctcacggaagagccaccagt

SEQ ID NO: 2314618 - DNA, 25 bp, Homo sapien
gctgtagccctcacggaagagccac

SEQ ID NO: 2314619 - DNA, 25 bp, Homo sapien
agccctcacggaagagccaccagtc

SEQ ID NO: 2314620 - DNA, 25 bp, Homo sapien
tggataggtgttgattccttgtagc

SEQ ID NO: 2314621 - DNA, 25 bp, Homo sapien
gacgctggataggtgttgattcctt

SEQ ID NO: 2314622 - DNA, 25 bp, Homo sapien
gctggataggtgttgattccttgta

SEQ ID NO: 2314623 - DNA, 25 bp, Homo sapien
acgctggataggtgttgattccttg

SEQ ID NO: 2314624 - DNA, 25 bp, Homo sapien
atgatgtcacgattctgtagcccaa

SEQ ID NO: 2314625 - DNA, 25 bp, Homo sapien
caatgatgtcacgattctgtagccc

SEQ ID NO: 2314626 - DNA, 25 bp, Homo sapien
aatgatgtcacgattctgtagccca

SEQ ID NO: 2314627 - DNA, 25 bp, Homo sapien
tgttgtcttgctgcggccagtctca

SEQ ID NO: 2314628 - DNA, 25 bp, Homo sapien
gaaggctgttgtcttgctgcggcca

SEQ ID NO: 2314629 - DNA, 25 bp, Homo sapien
tagactagcagtgggatgaggaagg

SEQ ID NO: 2314630 - DNA, 25 bp, Homo sapien
ctagactagcagtgggatgaggaag

SEQ ID NO: 2314631 - DNA, 25 bp, Homo sapien
agccaggatgatggcataagggcct

SEQ ID NO: 2314632 - DNA, 25 bp, Homo sapien
ctgtcaattttgggaagtgtggtga

SEQ ID NO: 2314633 - DNA, 25 bp, Homo sapien
tagcagcttcccaaacttgacggtc

SEQ ID NO: 2314634 - DNA, 25 bp, Homo sapien
cagcttcccaaacttgacggtctct

SEQ ID NO: 2314635 - DNA, 25 bp, Homo sapien
agcagcttcccaaacttgacggtct

SEQ ID NO: 2314636 - DNA, 25 bp, Homo sapien
gcttcccaaacttgacggtctcttc

SEQ ID NO: 2314637 - DNA, 25 bp, Homo sapien
ctggagatgccaccaatgacagcca

SEQ ID NO: 2314638 - DNA, 25 bp, Homo sapien
ccaccaatgacagccacagttggat

SEQ ID NO: 2314639 - DNA, 25 bp, Homo sapien
agatgccaccaatgacagccacagt

SEQ ID NO: 2314640 - DNA, 25 bp, Homo sapien
accaatgacagccacagttggatat

SEQ ID NO: 2314641 - DNA, 25 bp, Homo sapien
tccagaaccacgtaggtacagcagc

SEQ ID NO: 2314642 - DNA, 25 bp, Homo sapien
tggacatctggctcgaagcccacgt

SEQ ID NO: 2314643 - DNA, 25 bp, Homo sapien
tcagcaccaggtagcgattctccag

SEQ ID NO: 2314644 - DNA, 25 bp, Homo sapien
tcacaatctcacaacccatgagcag

SEQ ID NO: 2314645 - DNA, 25 bp, Homo sapien
tcgtgtctggcttctgattgctgac

SEQ ID NO: 2314646 - DNA, 25 bp, Homo sapien
atcgtgtctggcttctgattgctga

SEQ ID NO: 2314647 - DNA, 25 bp, Homo sapien
tcatcgtgtctggcttctgattgct

SEQ ID NO: 2314648 - DNA, 25 bp, Homo sapien
catcgtgtctggcttctgattgctg

SEQ ID NO: 2314649 - DNA, 25 bp, Homo sapien
caaagttggccagcatcttctcagg

SEQ ID NO: 2314650 - DNA, 25 bp, Homo sapien
tcaaagttggccagcatcttctcag

SEQ ID NO: 2314651 - DNA, 25 bp, Homo sapien
ttggccagcatcttctcagggtcct

SEQ ID NO: 2314652 - DNA, 25 bp, Homo sapien
ccagcatcttctcagggtcctcaga

SEQ ID NO: 2314653 - DNA, 25 bp, Homo sapien
ttgatggtacttaacgttttcctga

SEQ ID NO: 2314654 - DNA, 25 bp, Homo sapien
tgatggtacttaacgttttcctgac

SEQ ID NO: 2314655 - DNA, 25 bp, Homo sapien
aggtcgccgaagatagctcctggcc

SEQ ID NO: 2314656 - DNA, 25 bp, Homo sapien
gcaggtcgccgaagatagctcctgg

SEQ ID NO: 2314657 - DNA, 25 bp, Homo sapien
tcgccgaagatagctcctggccaga

SEQ ID NO: 2314658 - DNA, 25 bp, Homo sapien
ggtcgccgaagatagctcctggcca

SEQ ID NO: 2314659 - DNA, 25 bp, Homo sapien
atgaggaagacctgttccacacgct

SEQ ID NO: 2314660 - DNA, 25 bp, Homo sapien
gaggaagacctgttccacacgctca

SEQ ID NO: 2314661 - DNA, 25 bp, Homo sapien
aagacctgttccacacgctcatggg

SEQ ID NO: 2314662 - DNA, 25 bp, Homo sapien
ggaagacctgttccacacgctcatg

SEQ ID NO: 2314663 - DNA, 25 bp, Homo sapien
atctgtagtcaccaagacatccttg

SEQ ID NO: 2314664 - DNA, 25 bp, Homo sapien
catctgtagtcaccaagacatcctt

SEQ ID NO: 2314665 - DNA, 25 bp, Homo sapien
acatctgtagtcaccaagacatcct

SEQ ID NO: 2314666 - DNA, 25 bp, Homo sapien
tctgtagtcaccaagacatccttgg

SEQ ID NO: 2314667 - DNA, 25 bp, Homo sapien
tcactggtgtctcatctatctcttt

SEQ ID NO: 2314668 - DNA, 25 bp, Homo sapien
ggtcctccatcactggtgtctcatc

SEQ ID NO: 2314669 - DNA, 25 bp, Homo sapien
aggtcctccatcactggtgtctcat

SEQ ID NO: 2314670 - DNA, 25 bp, Homo sapien
tccatcactggtgtctcatctatct

SEQ ID NO: 2314671 - DNA, 25 bp, Homo sapien
gggacctctcctagtacagccctct

SEQ ID NO: 2314672 - DNA, 25 bp, Homo sapien
tctcctagtacagccctctggtaca

SEQ ID NO: 2314673 - DNA, 25 bp, Homo sapien
ctagtacagccctctggtacagctg

SEQ ID NO: 2314674 - DNA, 25 bp, Homo sapien
ccagggacctctcctagtacagccc

SEQ ID NO: 2314675 - DNA, 25 bp, Homo sapien
cacaggtacggttgctggagcagca

SEQ ID NO: 2314676 - DNA, 25 bp, Homo sapien
gaatcctacattggctgcctccagg

SEQ ID NO: 2314677 - DNA, 25 bp, Homo sapien
agaccaagtgatgcttcctgtagga

SEQ ID NO: 2314678 - DNA, 25 bp, Homo sapien
ccttctttgaatcctacattggctg

SEQ ID NO: 2314679 - DNA, 25 bp, Homo sapien
agtctgtacagctttgcagggagaa

SEQ ID NO: 2314680 - DNA, 25 bp, Homo sapien
ttgcagggagaaagatctcactgag

SEQ ID NO: 2314681 - DNA, 25 bp, Homo sapien
gagggttgctggaggtgccgcccag

SEQ ID NO: 2314682 - DNA, 25 bp, Homo sapien
cgtgacagggggcacctttggcagc

SEQ ID NO: 2314683 - DNA, 25 bp, Homo sapien
accctcaaggatgcccaggccaagt

SEQ ID NO: 2314684 - DNA, 25 bp, Homo sapien
atgctgaccctcaaggatgcccagg

SEQ ID NO: 2314685 - DNA, 25 bp, Homo sapien
ctcaaggatgcccaggccaagttgg

SEQ ID NO: 2314686 - DNA, 25 bp, Homo sapien
gggcgatgctgaccctcaaggatgc

SEQ ID NO: 2314687 - DNA, 25 bp, Homo sapien
tgaacttgactgactactgtttctg

SEQ ID NO: 2314688 - DNA, 25 bp, Homo sapien
gaacttgactgactactgtttctgc

SEQ ID NO: 2314689 - DNA, 25 bp, Homo sapien
cttgactgactactgtttctgctgc

SEQ ID NO: 2314690 - DNA, 25 bp, Homo sapien
acttgactgactactgtttctgctg

SEQ ID NO: 2314691 - DNA, 25 bp, Homo sapien
cactagctaccatgagagggaggat

SEQ ID NO: 2314692 - DNA, 25 bp, Homo sapien
aatcaaccacatcatcatctgtaag

SEQ ID NO: 2314693 - DNA, 25 bp, Homo sapien
gcaccatcatttgataactcatgca

SEQ ID NO: 2314694 - DNA, 25 bp, Homo sapien
tggtggatattcttcatcccaatca

SEQ ID NO: 2314695 - DNA, 25 bp, Homo sapien
aaagggtctttggacatagttgtag

SEQ ID NO: 2314696 - DNA, 25 bp, Homo sapien
taaagggtctttggacatagttgta

SEQ ID NO: 2314697 - DNA, 25 bp, Homo sapien
agggtctttggacatagttgtagat

SEQ ID NO: 2314698 - DNA, 25 bp, Homo sapien
aagggtctttggacatagttgtaga

SEQ ID NO: 2314699 - DNA, 25 bp, Homo sapien
tcaaggaacatcagcattacagcac

SEQ ID NO: 2314700 - DNA, 25 bp, Homo sapien
tgtgcatcaggatcggatcaaggcc

SEQ ID NO: 2314701 - DNA, 25 bp, Homo sapien
aaggccaccgttgccagaaggcaga

SEQ ID NO: 2314702 - DNA, 25 bp, Homo sapien
catcagcattacagcactggattct

SEQ ID NO: 2314703 - DNA, 25 bp, Homo sapien
cctggtgttgtctagtccaccttct

SEQ ID NO: 2314704 - DNA, 25 bp, Homo sapien
ggtgttgtctagtccaccttcttca

SEQ ID NO: 2314705 - DNA, 25 bp, Homo sapien
gccctggtgttgtctagtccacctt

SEQ ID NO: 2314706 - DNA, 25 bp, Homo sapien
ggggccctggtgttgtctagtccac

SEQ ID NO: 2314707 - DNA, 25 bp, Homo sapien
aaccaaccacagtattgaatttggc

SEQ ID NO: 2314708 - DNA, 25 bp, Homo sapien
gaagagatgggtagtgcaaagctct

SEQ ID NO: 2314709 - DNA, 25 bp, Homo sapien
gggtagtgcaaagctctcttcctct

SEQ ID NO: 2314710 - DNA, 25 bp, Homo sapien
cagtattgaatttggcttcagaggt

SEQ ID NO: 2314711 - DNA, 25 bp, Homo sapien
tctgtggtactggaactcgggatcc

SEQ ID NO: 2314712 - DNA, 25 bp, Homo sapien
tgtggtactggaactcgggatccat

SEQ ID NO: 2314713 - DNA, 25 bp, Homo sapien
ggtactggaactcgggatccatgat

SEQ ID NO: 2314714 - DNA, 25 bp, Homo sapien
ctctgtggtactggaactcgggatc

SEQ ID NO: 2314715 - DNA, 25 bp, Homo sapien
atcgccacttaaatccagtccctgg

SEQ ID NO: 2314716 - DNA, 25 bp, Homo sapien
tgctgtgaaggtcgccatgttgaat

SEQ ID NO: 2314717 - DNA, 25 bp, Homo sapien
catgttgaattctggaatccgctcc

SEQ ID NO: 2314718 - DNA, 25 bp, Homo sapien
gaaggtgttttgcacaacgaagtca

SEQ ID NO: 2314719 - DNA, 25 bp, Homo sapien
tctggaagatccctaaaagagttag

SEQ ID NO: 2314720 - DNA, 25 bp, Homo sapien
aaattgcccgttcaagtggagactg

SEQ ID NO: 2314721 - DNA, 25 bp, Homo sapien
gaaatcaataaacgtacagctgctg

SEQ ID NO: 2314722 - DNA, 25 bp, Homo sapien
gaagtcaggtgcaccttagtctgga

SEQ ID NO: 2314723 - DNA, 25 bp, Homo sapien
gaaggatgtcagctgacctctcacc

SEQ ID NO: 2314724 - DNA, 25 bp, Homo sapien
cctcttggagtttggtagctacttc

SEQ ID NO: 2314725 - DNA, 25 bp, Homo sapien
tggccctgcaagcttaggatgagaa

SEQ ID NO: 2314726 - DNA, 25 bp, Homo sapien
cgatagaggagacgaggtccctgca

SEQ ID NO: 2314727 - DNA, 25 bp, Homo sapien
ccagaaagtccggacggaagagcgc

SEQ ID NO: 2314728 - DNA, 25 bp, Homo sapien
gcgcgaacagatcaagctcctcaac

SEQ ID NO: 2314729 - DNA, 25 bp, Homo sapien
acggaagagcgcgaacagatcaagc

SEQ ID NO: 2314730 - DNA, 25 bp, Homo sapien
tccggacggaagagcgcgaacagat

SEQ ID NO: 2314731 - DNA, 25 bp, Homo sapien
gtcattgtttagggtcaggataaga

SEQ ID NO: 2314732 - DNA, 25 bp, Homo sapien
cattgtttagggtcaggataagaaa

SEQ ID NO: 2314733 - DNA, 25 bp, Homo sapien
tcattgtttagggtcaggataagaa

SEQ ID NO: 2314734 - DNA, 25 bp, Homo sapien
ggctgtcattgtttagggtcaggat

SEQ ID NO: 2314735 - DNA, 25 bp, Homo sapien
tgcaagagtgtgctctgcctgggta

SEQ ID NO: 2314736 - DNA, 25 bp, Homo sapien
tgcctgacaggccaagattggtgct

SEQ ID NO: 2314737 - DNA, 25 bp, Homo sapien
tctggactcccaggcaatgttttgc

SEQ ID NO: 2314738 - DNA, 25 bp, Homo sapien
caacttggaacttggagacatatac

SEQ ID NO: 2314739 - DNA, 25 bp, Homo sapien
tgtgattttactggcccgcacatgc

SEQ ID NO: 2314740 - DNA, 25 bp, Homo sapien
gatgatctctgcaccttcgcactca

SEQ ID NO: 2314741 - DNA, 25 bp, Homo sapien
tgtgtcactttcatagcccctgtga

SEQ ID NO: 2314742 - DNA, 25 bp, Homo sapien
catagatgatctctgcaccttcgca

SEQ ID NO: 2314743 - DNA, 25 bp, Homo sapien
cagcccatggctctgctagttgccc

SEQ ID NO: 2314744 - DNA, 25 bp, Homo sapien
actccccttcactggagccttcacc

SEQ ID NO: 2314745 - DNA, 25 bp, Homo sapien
ctgcccagcccatggctctgctagt

SEQ ID NO: 2314746 - DNA, 25 bp, Homo sapien
cccagcccatggctctgctagttgc

SEQ ID NO: 2314747 - DNA, 25 bp, Homo sapien
tcctgttcaatcacggccataccag

SEQ ID NO: 2314748 - DNA, 25 bp, Homo sapien
ccagcctggtcttccaagtagtgtt

SEQ ID NO: 2314749 - DNA, 25 bp, Homo sapien
tcaatcacggccataccagcctggt

SEQ ID NO: 2314750 - DNA, 25 bp, Homo sapien
cctggcagtaagaatcctttcctgt

SEQ ID NO: 2314751 - DNA, 25 bp, Homo sapien
tttggcggtcagcaggggcggtggt

SEQ ID NO: 2314752 - DNA, 25 bp, Homo sapien
ccggaatgtctctgcggggcactca

SEQ ID NO: 2314753 - DNA, 25 bp, Homo sapien
gggcatttcctgctacggtcttgac

SEQ ID NO: 2314754 - DNA, 25 bp, Homo sapien
agtcagcaacaccacacgctgtcat

SEQ ID NO: 2314755 - DNA, 25 bp, Homo sapien
ctgctacggtcttgacggcagaagt

SEQ ID NO: 2314756 - DNA, 25 bp, Homo sapien
gagagacccctgacgcggcacccag

SEQ ID NO: 2314757 - DNA, 25 bp, Homo sapien
catggtctctacttctggagagagg

SEQ ID NO: 2314758 - DNA, 25 bp, Homo sapien
ggctgtcggtgacggagcacagggc

SEQ ID NO: 2314759 - DNA, 25 bp, Homo sapien
aaccgagcggagacgtctcagctcc

SEQ ID NO: 2314760 - DNA, 25 bp, Homo sapien
aggcactgctgtagggattgagcct

SEQ ID NO: 2314761 - DNA, 25 bp, Homo sapien
cctgcagggtagcatctggccccag

SEQ ID NO: 2314762 - DNA, 25 bp, Homo sapien
ctgtagggattgagcctggcctgca

SEQ ID NO: 2314763 - DNA, 25 bp, Homo sapien
ctgcagggtagcatctggccccaga

SEQ ID NO: 2314764 - DNA, 25 bp, Homo sapien
cctacaaagtgtgcgtgggtcgagc

SEQ ID NO: 2314765 - DNA, 25 bp, Homo sapien
cagctggatctgtgcactgtgtcca

SEQ ID NO: 2314766 - DNA, 25 bp, Homo sapien
gaatctgtgtgtaatgactccactg

SEQ ID NO: 2314767 - DNA, 25 bp, Homo sapien
tggtaacagctctatatatcaggtg

SEQ ID NO: 2314768 - DNA, 25 bp, Homo sapien
cctgagctggtttgttcctacaaca

SEQ ID NO: 2314769 - DNA, 25 bp, Homo sapien
cgcccgagtgactgttgtgtgtaca

SEQ ID NO: 2314770 - DNA, 25 bp, Homo sapien
cagtagtccgggtcttaggcccaga

SEQ ID NO: 2314771 - DNA, 25 bp, Homo sapien
tgcttgttggaaaggcctatgtggc

SEQ ID NO: 2314772 - DNA, 25 bp, Homo sapien
tctgatgaccgccaacttggttggg

SEQ ID NO: 2314773 - DNA, 25 bp, Homo sapien
gatgaccgccaacttggttgggttc

SEQ ID NO: 2314774 - DNA, 25 bp, Homo sapien
accgccaacttggttgggttctgca

SEQ ID NO: 2314775 - DNA, 25 bp, Homo sapien
cgccaacttggttgggttctgcagg

SEQ ID NO: 2314776 - DNA, 25 bp, Homo sapien
caaaggtgaaaaagttgcaatacct

SEQ ID NO: 2314777 - DNA, 25 bp, Homo sapien
gacaaaggtgaaaaagttgcaatac

SEQ ID NO: 2314778 - DNA, 25 bp, Homo sapien
ttaattttgtcataaccacacttac

SEQ ID NO: 2314779 - DNA, 25 bp, Homo sapien
ttcttattaattttgtcataaccac

SEQ ID NO: 2314780 - DNA, 25 bp, Homo sapien
tattaattttgtcataaccacactt

SEQ ID NO: 2314781 - DNA, 25 bp, Homo sapien
tcttattaattttgtcataaccaca

SEQ ID NO: 2314782 - DNA, 25 bp, Homo sapien
cacaggaagttatttgcttttttga

SEQ ID NO: 2314783 - DNA, 25 bp, Homo sapien
tgcttttttgaagagttttccaaca

SEQ ID NO: 2314784 - DNA, 25 bp, Homo sapien
tcatggagaggataatttgaagggc

SEQ ID NO: 2314785 - DNA, 25 bp, Homo sapien
tgaatcagaacctccatgcagatga

SEQ ID NO: 2314786 - DNA, 25 bp, Homo sapien
cgctatgcagggtagcactgggaac

SEQ ID NO: 2314787 - DNA, 25 bp, Homo sapien
gcctgggaaggaggccgctatgcag

SEQ ID NO: 2314788 - DNA, 25 bp, Homo sapien
gttgtgaagaagatcgagacacgtg

SEQ ID NO: 2314789 - DNA, 25 bp, Homo sapien
agatcgagacacgtgatgggaagct

SEQ ID NO: 2314790 - DNA, 25 bp, Homo sapien
gcagaagacggctcgaagcaacatg

SEQ ID NO: 2314791 - DNA, 25 bp, Homo sapien
gaagacggctcgaagcaacatggac

SEQ ID NO: 2314792 - DNA, 25 bp, Homo sapien
cggctcgaagcaacatggacaacat

SEQ ID NO: 2314793 - DNA, 25 bp, Homo sapien
gcagcagaagacggctcgaagcaac

SEQ ID NO: 2314794 - DNA, 25 bp, Homo sapien
acgagtgggcccggttcccgcatca

SEQ ID NO: 2314795 - DNA, 25 bp, Homo sapien
gctcctacacgagtgggcccggttc

SEQ ID NO: 2314796 - DNA, 25 bp, Homo sapien
tccgcctggttcggcccgcctgcct

SEQ ID NO: 2314797 - DNA, 25 bp, Homo sapien
agtgggcccggttcccgcatcagct

SEQ ID NO: 2314798 - DNA, 25 bp, Homo sapien
tggttccacgtctttattggtgtac

SEQ ID NO: 2314799 - DNA, 25 bp, Homo sapien
gttccacgtctttattggtgtacat

SEQ ID NO: 2314800 - DNA, 25 bp, Homo sapien
tctggttccacgtctttattggtgt

SEQ ID NO: 2314801 - DNA, 25 bp, Homo sapien
ctctggttccacgtctttattggtg

SEQ ID NO: 2314802 - DNA, 25 bp, Homo sapien
cagcatggtcagcatgcgagaaggc

SEQ ID NO: 2314803 - DNA, 25 bp, Homo sapien
ccagcatggtcagcatgcgagaagg

SEQ ID NO: 2314804 - DNA, 25 bp, Homo sapien
gaaggcgggcttgtccacacttgct

SEQ ID NO: 2314805 - DNA, 25 bp, Homo sapien
cgagaaggcgggcttgtccacactt

SEQ ID NO: 2314806 - DNA, 25 bp, Homo sapien
cacagagtacagctgagggtccact

SEQ ID NO: 2314807 - DNA, 25 bp, Homo sapien
cgcagaccacagagtacagctgagg

SEQ ID NO: 2314808 - DNA, 25 bp, Homo sapien
cagaccacagagtacagctgagggt

SEQ ID NO: 2314809 - DNA, 25 bp, Homo sapien
gcgttggctgttgccgcagaccaca

SEQ ID NO: 2314810 - DNA, 25 bp, Homo sapien
tccctttgttggtaggctccacctc

SEQ ID NO: 2314811 - DNA, 25 bp, Homo sapien
tgtagtctcagctacttgggaggct

SEQ ID NO: 2314812 - DNA, 25 bp, Homo sapien
aattagccggacgtgatggtgcacg

SEQ ID NO: 2314813 - DNA, 25 bp, Homo sapien
cctgggaggcggaggttgcagtgag

SEQ ID NO: 2314814 - DNA, 25 bp, Homo sapien
gaggaaggggaatcgcttgaacctg

SEQ ID NO: 2314815 - DNA, 25 bp, Homo sapien
gccaaccgggcatggacacggacag

SEQ ID NO: 2314816 - DNA, 25 bp, Homo sapien
cggggtggccaaccgggcatggaca

SEQ ID NO: 2314817 - DNA, 25 bp, Homo sapien
tggccaaccgggcatggacacggac

SEQ ID NO: 2314818 - DNA, 25 bp, Homo sapien
gggtggccaaccgggcatggacacg

SEQ ID NO: 2314819 - DNA, 25 bp, Homo sapien
agccacaggtggacggctcggagcc

SEQ ID NO: 2314820 - DNA, 25 bp, Homo sapien
gcgagccgcgcgacccgagttatat

SEQ ID NO: 2314821 - DNA, 25 bp, Homo sapien
gcgcgacccgagttatatcgcagag

SEQ ID NO: 2314822 - DNA, 25 bp, Homo sapien
cgagttatatcgcagagtgaggccc

SEQ ID NO: 2314823 - DNA, 25 bp, Homo sapien
tggccgcgctgctgaccggccgggc

SEQ ID NO: 2314824 - DNA, 25 bp, Homo sapien
cgctggccgcgctgctgaccggccg

SEQ ID NO: 2314825 - DNA, 25 bp, Homo sapien
cgcgctgctgaccggccgggcgccg

SEQ ID NO: 2314826 - DNA, 25 bp, Homo sapien
gccgcgctgctgaccggccgggcgc

SEQ ID NO: 2314827 - DNA, 25 bp, Homo sapien
gcgggacacggagatccgggaacca

SEQ ID NO: 2314828 - DNA, 25 bp, Homo sapien
accccatgccgcccctgaagctggt

SEQ ID NO: 2314829 - DNA, 25 bp, Homo sapien
atgccgcccctgaagctggtggagc

SEQ ID NO: 2314830 - DNA, 25 bp, Homo sapien
gtggagcgggacacggagatccggg

SEQ ID NO: 2314831 - DNA, 25 bp, Homo sapien
tgccagacccccggctatcccggtg

SEQ ID NO: 2314832 - DNA, 25 bp, Homo sapien
tcctgccagacccccggctatcccg

SEQ ID NO: 2314833 - DNA, 25 bp, Homo sapien
cctgccagacccccggctatcccgg

SEQ ID NO: 2314834 - DNA, 25 bp, Homo sapien
ctgccagacccccggctatcccggt

SEQ ID NO: 2314835 - DNA, 25 bp, Homo sapien
ccagcctccggttctcggtctccag

SEQ ID NO: 2314836 - DNA, 25 bp, Homo sapien
ctccggttctcggtctccaggctcc

SEQ ID NO: 2314837 - DNA, 25 bp, Homo sapien
caggtaagaggccaggcggtcgttc

SEQ ID NO: 2314838 - DNA, 25 bp, Homo sapien
ggtaagaggccaggcggtcgttcag

SEQ ID NO: 2314839 - DNA, 25 bp, Homo sapien
ggtcctcgatgatcttgaagtaatg

SEQ ID NO: 2314840 - DNA, 25 bp, Homo sapien
gccctcaggtcctcgatgatcttga

SEQ ID NO: 2314841 - DNA, 25 bp, Homo sapien
tgagccctcaggtcctcgatgatct

SEQ ID NO: 2314842 - DNA, 25 bp, Homo sapien
gtcctcgatgatcttgaagtaatgg

SEQ ID NO: 2314843 - DNA, 25 bp, Homo sapien
ggaaggcctcttgtttactcctaga

SEQ ID NO: 2314844 - DNA, 25 bp, Homo sapien
ttgttccatgaatagaaagccaggg

SEQ ID NO: 2314845 - DNA, 25 bp, Homo sapien
gaagtgagtcgctactaacaagtcc

SEQ ID NO: 2314846 - DNA, 25 bp, Homo sapien
tactcctagatgactcagccttagc

SEQ ID NO: 2314847 - DNA, 25 bp, Homo sapien
ttgtcaatctgcagaacgatgcggg

SEQ ID NO: 2314848 - DNA, 25 bp, Homo sapien
cattgtcaatctgcagaacgatgcg

SEQ ID NO: 2314849 - DNA, 25 bp, Homo sapien
tgtcaatctgcagaacgatgcgggc

SEQ ID NO: 2314850 - DNA, 25 bp, Homo sapien
tcaatctgcagaacgatgcgggcat

SEQ ID NO: 2314851 - DNA, 25 bp, Homo sapien
gtcagcaattaggtggtaatcccct

SEQ ID NO: 2314852 - DNA, 25 bp, Homo sapien
aatgaatacactgatggaccctgac

SEQ ID NO: 2314853 - DNA, 25 bp, Homo sapien
cacctactaagagaagttctgtgcc

SEQ ID NO: 2314854 - DNA, 25 bp, Homo sapien
ggagcagatccttcttagctccacc

SEQ ID NO: 2314855 - DNA, 25 bp, Homo sapien
cgttctccacagactggcgcatggc

SEQ ID NO: 2314856 - DNA, 25 bp, Homo sapien
gcggagcccatggatgtcgttctcc

SEQ ID NO: 2314857 - DNA, 25 bp, Homo sapien
gtcgttctccacagactggcgcatg

SEQ ID NO: 2314858 - DNA, 25 bp, Homo sapien
cttgcggagcccatggatgtcgttc

SEQ ID NO: 2314859 - DNA, 25 bp, Homo sapien
cagtcgtgtgatattggtgtcatca

SEQ ID NO: 2314860 - DNA, 25 bp, Homo sapien
gctgcagtcgtgtgatattggtgtc

SEQ ID NO: 2314861 - DNA, 25 bp, Homo sapien
tctccagctgcagtcgtgtgatatt

SEQ ID NO: 2314862 - DNA, 25 bp, Homo sapien
tccagctgcagtcgtgtgatattgg

SEQ ID NO: 2314863 - DNA, 25 bp, Homo sapien
ttctcttggcccctcaatccctggc

SEQ ID NO: 2314864 - DNA, 25 bp, Homo sapien
cttggcccctcaatccctggcctgg

SEQ ID NO: 2314865 - DNA, 25 bp, Homo sapien
ccagacttctcttggcccctcaatc

SEQ ID NO: 2314866 - DNA, 25 bp, Homo sapien
cccctcaatccctggcctggccagt

SEQ ID NO: 2314867 - DNA, 25 bp, Homo sapien
gttggtttgtcttgtctattctccg

SEQ ID NO: 2314868 - DNA, 25 bp, Homo sapien
cagttggtttgtcttgtctattctc

SEQ ID NO: 2314869 - DNA, 25 bp, Homo sapien
tggtttgtcttgtctattctccgac

SEQ ID NO: 2314870 - DNA, 25 bp, Homo sapien
ttgcagttggtttgtcttgtctatt

SEQ ID NO: 2314871 - DNA, 25 bp, Homo sapien
caggaggaaccccttggcttgcact

SEQ ID NO: 2314872 - DNA, 25 bp, Homo sapien
gggtcagagctccaacaaggccttt

SEQ ID NO: 2314873 - DNA, 25 bp, Homo sapien
ctaggaggcctacagttggagaaga

SEQ ID NO: 2314874 - DNA, 25 bp, Homo sapien
taccatcttttaggaagcgctgcca

SEQ ID NO: 2314875 - DNA, 25 bp, Homo sapien
tagctcctctcggttcttccgagcc

SEQ ID NO: 2314876 - DNA, 25 bp, Homo sapien
tgtctagctcctctcggttcttccg

SEQ ID NO: 2314877 - DNA, 25 bp, Homo sapien
ccagctcgtcatattgggcccggat

SEQ ID NO: 2314878 - DNA, 25 bp, Homo sapien
accagtacttgtctagctcctctcg

SEQ ID NO: 2314879 - DNA, 25 bp, Homo sapien
tcaggcccctcattccgtctgcctc

SEQ ID NO: 2314880 - DNA, 25 bp, Homo sapien
atcaggcccctcattccgtctgcct

SEQ ID NO: 2314881 - DNA, 25 bp, Homo sapien
ggcccctcattccgtctgcctccct

SEQ ID NO: 2314882 - DNA, 25 bp, Homo sapien
caggcccctcattccgtctgcctcc

SEQ ID NO: 2314883 - DNA, 25 bp, Homo sapien
acgtctcagctctgtgagcgtcgtc

SEQ ID NO: 2314884 - DNA, 25 bp, Homo sapien
aacctcagcagactgtgtggtgacc

SEQ ID NO: 2314885 - DNA, 25 bp, Homo sapien
gcagctccaacctcagcagactgtg

SEQ ID NO: 2314886 - DNA, 25 bp, Homo sapien
agctctgtgagcgtcgtctcagcag

SEQ ID NO: 2314887 - DNA, 25 bp, Homo sapien
aacttttttgggcacctgctatgtg

SEQ ID NO: 2314888 - DNA, 25 bp, Homo sapien
tggaaacttttttgggcacctgcta

SEQ ID NO: 2314889 - DNA, 25 bp, Homo sapien
ctcatcccttcacttttggaaactt

SEQ ID NO: 2314890 - DNA, 25 bp, Homo sapien
ctgctcatcccttcacttttggaaa

SEQ ID NO: 2314891 - DNA, 25 bp, Homo sapien
ggaggggcagggtgagcccagagtc

SEQ ID NO: 2314892 - DNA, 25 bp, Homo sapien
aggggcagggtgagcccagagtccc

SEQ ID NO: 2314893 - DNA, 25 bp, Homo sapien
gggcagggtgagcccagagtcccag

SEQ ID NO: 2314894 - DNA, 25 bp, Homo sapien
gcagggtgagcccagagtcccagga

SEQ ID NO: 2314895 - DNA, 25 bp, Homo sapien
gagctgctccatctgtagggcgtag

SEQ ID NO: 2314896 - DNA, 25 bp, Homo sapien
tgctccatctgtagggcgtagcggg

SEQ ID NO: 2314897 - DNA, 25 bp, Homo sapien
gcgtagcgggcctccacctccctca

SEQ ID NO: 2314898 - DNA, 25 bp, Homo sapien
ccctcaggctgttctccaagctggc

SEQ ID NO: 2314899 - DNA, 25 bp, Homo sapien
ttaaagtcctcgccatcttccagca

SEQ ID NO: 2314900 - DNA, 25 bp, Homo sapien
gcaggcggcggtaggtggcgatctc

SEQ ID NO: 2314901 - DNA, 25 bp, Homo sapien
ttccagcaggcggcggtaggtggcg

SEQ ID NO: 2314902 - DNA, 25 bp, Homo sapien
gcggcggtaggtggcgatctcagcc

SEQ ID NO: 2314903 - DNA, 25 bp, Homo sapien
tgttactcccttgaagacacaggag

SEQ ID NO: 2314904 - DNA, 25 bp, Homo sapien
caagttataaacagccccgtggagt

SEQ ID NO: 2314905 - DNA, 25 bp, Homo sapien
tgcatactaagtacagctagggaca

SEQ ID NO: 2314906 - DNA, 25 bp, Homo sapien
ctgatcccagcacgtgtgggtagga

SEQ ID NO: 2314907 - DNA, 25 bp, Homo sapien
actttgccatccactatccggcggg

SEQ ID NO: 2314908 - DNA, 25 bp, Homo sapien
tgccatccactatccggcgggtggt

SEQ ID NO: 2314909 - DNA, 25 bp, Homo sapien
gcatggagttgctgctgtccaaggc

SEQ ID NO: 2314910 - DNA, 25 bp, Homo sapien
atccactatccggcgggtggtggtc

SEQ ID NO: 2314911 - DNA, 25 bp, Homo sapien
ccaaagggtaccctgcttctgctgg

SEQ ID NO: 2314912 - DNA, 25 bp, Homo sapien
caaagggtaccctgcttctgctggc

SEQ ID NO: 2314913 - DNA, 25 bp, Homo sapien
actctgaactttttattggcctcct

SEQ ID NO: 2314914 - DNA, 25 bp, Homo sapien
tgaactttttattggcctcctgctc

SEQ ID NO: 2314915 - DNA, 25 bp, Homo sapien
gaactttttattggcctcctgctcc

SEQ ID NO: 2314916 - DNA, 25 bp, Homo sapien
tctgaactttttattggcctcctgc

SEQ ID NO: 2314917 - DNA, 25 bp, Homo sapien
tccagggaaggattccgtacactgc

SEQ ID NO: 2314918 - DNA, 25 bp, Homo sapien
gattccgtacactgcatgccatgtg

SEQ ID NO: 2314919 - DNA, 25 bp, Homo sapien
acaggacaggatgaacctttctggg

SEQ ID NO: 2314920 - DNA, 25 bp, Homo sapien
caggacaggatgaacctttctgggc

SEQ ID NO: 2314921 - DNA, 25 bp, Homo sapien
gctgctgccactgtctcaaggggcc

SEQ ID NO: 2314922 - DNA, 25 bp, Homo sapien
ccactgtctcaaggggcccagaagt

SEQ ID NO: 2314923 - DNA, 25 bp, Homo sapien
gctgccactgtctcaaggggcccag

SEQ ID NO: 2314924 - DNA, 25 bp, Homo sapien
gccactgtctcaaggggcccagaag

SEQ ID NO: 2314925 - DNA, 25 bp, Homo sapien
tttagccagagcctcggaaggtgag

SEQ ID NO: 2314926 - DNA, 25 bp, Homo sapien
tgtataccagagcatttagccagag

SEQ ID NO: 2314927 - DNA, 25 bp, Homo sapien
tccccatactcatcaagctccttct

SEQ ID NO: 2314928 - DNA, 25 bp, Homo sapien
catcaagctccttctgtataccaga

SEQ ID NO: 2314929 - DNA, 25 bp, Homo sapien
ggaagtcaatgtggatggagcagcc

SEQ ID NO: 2314930 - DNA, 25 bp, Homo sapien
gaagtcaatgtggatggagcagccg

SEQ ID NO: 2314931 - DNA, 25 bp, Homo sapien
aagtcaatgtggatggagcagccgc

SEQ ID NO: 2314932 - DNA, 25 bp, Homo sapien
gaaaagaaattggaagtcaatgtgg

SEQ ID NO: 2314933 - DNA, 25 bp, Homo sapien
ccaagaggctctgattccatgaact

SEQ ID NO: 2314934 - DNA, 25 bp, Homo sapien
tggagagctcttacgtccactgacg

SEQ ID NO: 2314935 - DNA, 25 bp, Homo sapien
cattctgtctgtgccgctagcatgg

SEQ ID NO: 2314936 - DNA, 25 bp, Homo sapien
cctgacattcacagggccagttcct

SEQ ID NO: 2314937 - DNA, 25 bp, Homo sapien
tagcatggccctccagaatgaactg

SEQ ID NO: 2314938 - DNA, 25 bp, Homo sapien
gagaacgcaaaagacccggatgagg

SEQ ID NO: 2314939 - DNA, 25 bp, Homo sapien
tctaggttcgtaaagctgcgcggcg

SEQ ID NO: 2314940 - DNA, 25 bp, Homo sapien
gacatgcgcgacatgtggccaaagg

SEQ ID NO: 2314941 - DNA, 25 bp, Homo sapien
cacgtgattatagcgggcgcgtcga

SEQ ID NO: 2314942 - DNA, 25 bp, Homo sapien
gatgctttcgggcagcgtcctaaac

SEQ ID NO: 2314943 - DNA, 25 bp, Homo sapien
tagctctctgcagtacctcaggatg

SEQ ID NO: 2314944 - DNA, 25 bp, Homo sapien
gctgagaaataccactagctctctg

SEQ ID NO: 2314945 - DNA, 25 bp, Homo sapien
cctaaactgatgatgacaccttgat

SEQ ID NO: 2314946 - DNA, 25 bp, Homo sapien
tcttgaaggtcaataatggatcaca

SEQ ID NO: 2314947 - DNA, 25 bp, Homo sapien
ttcttgaaggtcaataatggatcac

SEQ ID NO: 2314948 - DNA, 25 bp, Homo sapien
gttcttgaaggtcaataatggatca

SEQ ID NO: 2314949 - DNA, 25 bp, Homo sapien
tgtagcagcagcactgactcagtca

SEQ ID NO: 2314950 - DNA, 25 bp, Homo sapien
cagcaggtttaaaggaattagccct

SEQ ID NO: 2314951 - DNA, 25 bp, Homo sapien
caggctaaaattccttacaagatct

SEQ ID NO: 2314952 - DNA, 25 bp, Homo sapien
tagatgagtcttaaaaaaacaggct

SEQ ID NO: 2314953 - DNA, 25 bp, Homo sapien
ccttgactcctttgacaaacaagtt

SEQ ID NO: 2314954 - DNA, 25 bp, Homo sapien
tttcaaatcacaagtctccccctcc

SEQ ID NO: 2314955 - DNA, 25 bp, Homo sapien
taaatcaactttgtagatcacagtt

SEQ ID NO: 2314956 - DNA, 25 bp, Homo sapien
cctctgattgccacccactcccagg

SEQ ID NO: 2314957 - DNA, 25 bp, Homo sapien
tacggttacagagaggttgggtctc

SEQ ID NO: 2314958 - DNA, 25 bp, Homo sapien
gaggttgggtctcatagcactttta

SEQ ID NO: 2314959 - DNA, 25 bp, Homo sapien
caaagaatacggttacagagaggtt

SEQ ID NO: 2314960 - DNA, 25 bp, Homo sapien
gctttcaaagaatacggttacagag

SEQ ID NO: 2314961 - DNA, 25 bp, Homo sapien
aggcaggggtcttgctacactgccc

SEQ ID NO: 2314962 - DNA, 25 bp, Homo sapien
gcaattctcccactgtagcctcttg

SEQ ID NO: 2314963 - DNA, 25 bp, Homo sapien
tagaggcaggggtcttgctacactg

SEQ ID NO: 2314964 - DNA, 25 bp, Homo sapien
aattctcccactgtagcctcttgag

SEQ ID NO: 2314965 - DNA, 25 bp, Homo sapien
tttttcatacgaagtctaaggctct

SEQ ID NO: 2314966 - DNA, 25 bp, Homo sapien
tacagagacattagatggctaggct

SEQ ID NO: 2314967 - DNA, 25 bp, Homo sapien
tctcaagtatcctggaggatcccag

SEQ ID NO: 2314968 - DNA, 25 bp, Homo sapien
cagtggtgtggccacggctatctga

SEQ ID NO: 2314969 - DNA, 25 bp, Homo sapien
agcccagctgactggtttggaaaca

SEQ ID NO: 2314970 - DNA, 25 bp, Homo sapien
ggtcatccgtttcatcagcccagct

SEQ ID NO: 2314971 - DNA, 25 bp, Homo sapien
tctgttagggagatagtcttcccct

SEQ ID NO: 2314972 - DNA, 25 bp, Homo sapien
tggaaacataggtgcttcctccacc

SEQ ID NO: 2314973 - DNA, 25 bp, Homo sapien
gcgccctatacacatcgtcatcgtt

SEQ ID NO: 2314974 - DNA, 25 bp, Homo sapien
ctgtaacatcatagggtaggtttcc

SEQ ID NO: 2314975 - DNA, 25 bp, Homo sapien
atcgtcatcgttactgtgccaagtg

SEQ ID NO: 2314976 - DNA, 25 bp, Homo sapien
tcgttactgtgccaagtggtcgaaa

SEQ ID NO: 2314977 - DNA, 25 bp, Homo sapien
agcagggaatccaggtcctcaaatt

SEQ ID NO: 2314978 - DNA, 25 bp, Homo sapien
ctgggttcacgtggtaaacgcactg

SEQ ID NO: 2314979 - DNA, 25 bp, Homo sapien
caggtcctcaaattcagcataacca

SEQ ID NO: 2314980 - DNA, 25 bp, Homo sapien
gattgctgggttcacgtggtaaacg

SEQ ID NO: 2314981 - DNA, 25 bp, Homo sapien
cactgtaatctagctaacactccaa

SEQ ID NO: 2314982 - DNA, 25 bp, Homo sapien
tactatgtaccagcaaaattgcata

SEQ ID NO: 2314983 - DNA, 25 bp, Homo sapien
cacataactagctgaataaaaggca

SEQ ID NO: 2314984 - DNA, 25 bp, Homo sapien
taagctggccttgaatattaggtca

SEQ ID NO: 2314985 - DNA, 25 bp, Homo sapien
ttgaacgtctgggcatagcagaagc

SEQ ID NO: 2314986 - DNA, 25 bp, Homo sapien
tgaacgtctgggcatagcagaagca

SEQ ID NO: 2314987 - DNA, 25 bp, Homo sapien
aaccttttgccccattatgcacaaa

SEQ ID NO: 2314988 - DNA, 25 bp, Homo sapien
ctgagagcataggaccatattaacc

SEQ ID NO: 2314989 - DNA, 25 bp, Homo sapien
gccccattatgcacaaatcccttga

SEQ ID NO: 2314990 - DNA, 25 bp, Homo sapien
gcataggaccatattaaccaacctt

SEQ ID NO: 2314991 - DNA, 25 bp, Homo sapien
ctttatcctgtgcttgatcagcaac

SEQ ID NO: 2314992 - DNA, 25 bp, Homo sapien
gatcagcaacgtccactcgaattct

SEQ ID NO: 2314993 - DNA, 25 bp, Homo sapien
gcttgatcagcaacgtccactcgaa

SEQ ID NO: 2314994 - DNA, 25 bp, Homo sapien
acgtccactcgaattctcctgttac

SEQ ID NO: 2314995 - DNA, 25 bp, Homo sapien
acagaaatctctaccagtttcctta

SEQ ID NO: 2314996 - DNA, 25 bp, Homo sapien
aacagaaatctctaccagtttcctt

SEQ ID NO: 2314997 - DNA, 25 bp, Homo sapien
aaacagaaatctctaccagtttcct

SEQ ID NO: 2314998 - DNA, 25 bp, Homo sapien
ttttcctattggtttaatgcttagc

SEQ ID NO: 2314999 - DNA, 25 bp, Homo sapien
taatgcttagctatctcaaattctg

SEQ ID NO: 2315000 - DNA, 25 bp, Homo sapien
taagtacatgctccaattcaacccc

SEQ ID NO: 2315001 - DNA, 25 bp, Homo sapien
tgctccaattcaaccccaggtggct

SEQ ID NO: 2315002 - DNA, 25 bp, Homo sapien
gaatcccgatttctatcacggccaa

SEQ ID NO: 2315003 - DNA, 25 bp, Homo sapien
cttctaggtgggtagtcatcaaagc

SEQ ID NO: 2315004 - DNA, 25 bp, Homo sapien
gtcagaatcccgatttctatcacgg

SEQ ID NO: 2315005 - DNA, 25 bp, Homo sapien
tcaaagctgtctgtagcaggacgag

SEQ ID NO: 2315006 - DNA, 25 bp, Homo sapien
ctcacgcctgtaatcccagcacttt

SEQ ID NO: 2315007 - DNA, 25 bp, Homo sapien
aggtcaagagatcaagactatcctg

SEQ ID NO: 2315008 - DNA, 25 bp, Homo sapien
gcaactgatgggccaggcgcagtgg

SEQ ID NO: 2315009 - DNA, 25 bp, Homo sapien
gggaggccaaggcgggcggatcatg

SEQ ID NO: 2315010 - DNA, 25 bp, Homo sapien
tgattacagacaaaccactatttat

SEQ ID NO: 2315011 - DNA, 25 bp, Homo sapien
ttatccctgttgttatgctattaag

SEQ ID NO: 2315012 - DNA, 25 bp, Homo sapien
caaacttatgaacctattacttagg

SEQ ID NO: 2315013 - DNA, 25 bp, Homo sapien
gggtggttaaattaccatgcgtagc

SEQ ID NO: 2315014 - DNA, 25 bp, Homo sapien
taaattcaaggtttcaggtgagaaa

SEQ ID NO: 2315015 - DNA, 25 bp, Homo sapien
cattctgcttgctctaaattcaagg

SEQ ID NO: 2315016 - DNA, 25 bp, Homo sapien
cgttatccattctgcttgctctaaa

SEQ ID NO: 2315017 - DNA, 25 bp, Homo sapien
gcttgctctaaattcaaggtttcag

SEQ ID NO: 2315018 - DNA, 25 bp, Homo sapien
ctcagatagcaaactgtgggtagcg

SEQ ID NO: 2315019 - DNA, 25 bp, Homo sapien
agccgtaacacccagcctcaaagat

SEQ ID NO: 2315020 - DNA, 25 bp, Homo sapien
tctgtataaagaaacgtagtagctc

SEQ ID NO: 2315021 - DNA, 25 bp, Homo sapien
caaagatcactttaagaggcaaaca

SEQ ID NO: 2315022 - DNA, 25 bp, Homo sapien
ccggcgtgggccatcccgataccca

SEQ ID NO: 2315023 - DNA, 25 bp, Homo sapien
gatacccatcccgataccggtctga

SEQ ID NO: 2315024 - DNA, 25 bp, Homo sapien
tctgaatcataacgatctcgatact

SEQ ID NO: 2315025 - DNA, 25 bp, Homo sapien
tcccgatacccatcccgatacccat

SEQ ID NO: 2315026 - DNA, 25 bp, Homo sapien
gatcccggccaccatatcgatccat

SEQ ID NO: 2315027 - DNA, 25 bp, Homo sapien
tgcctcggtcatcatagcgatcccg

SEQ ID NO: 2315028 - DNA, 25 bp, Homo sapien
tcggtcatcatagcgatcccggcca

SEQ ID NO: 2315029 - DNA, 25 bp, Homo sapien
atagcgatcccggccaccatatcga

SEQ ID NO: 2315030 - DNA, 25 bp, Homo sapien
gagcaattcgacatgttttacaatt

SEQ ID NO: 2315031 - DNA, 25 bp, Homo sapien
gaaagagcaattcgacatgttttac

SEQ ID NO: 2315032 - DNA, 25 bp, Homo sapien
agttactgaaagagcaattcgacat

SEQ ID NO: 2315033 - DNA, 25 bp, Homo sapien
aaattataatcatcacagcggaggg

SEQ ID NO: 2315034 - DNA, 25 bp, Homo sapien
tatcggtcttcatagcggtccccgc

SEQ ID NO: 2315035 - DNA, 25 bp, Homo sapien
cctctgtagtcatcatccctgcgat

SEQ ID NO: 2315036 - DNA, 25 bp, Homo sapien
gatcatcccgtctgtcatatcggtc

SEQ ID NO: 2315037 - DNA, 25 bp, Homo sapien
gtcatcatccctgcgatacccactg

SEQ ID NO: 2315038 - DNA, 25 bp, Homo sapien
tatatttgtgcccaactcagtagtt

SEQ ID NO: 2315039 - DNA, 25 bp, Homo sapien
gttcgtaacacaatcacaaattttc

SEQ ID NO: 2315040 - DNA, 25 bp, Homo sapien
tgcttcctgtacaatgtgcaaatta

SEQ ID NO: 2315041 - DNA, 25 bp, Homo sapien
ctgctccatgaagtacgtaaaaaga

SEQ ID NO: 2315042 - DNA, 25 bp, Homo sapien
ccaaagatagaagcagctcgagtgg

SEQ ID NO: 2315043 - DNA, 25 bp, Homo sapien
ctccaaagatagaagcagctcgagt

SEQ ID NO: 2315044 - DNA, 25 bp, Homo sapien
tccaaagatagaagcagctcgagtg

SEQ ID NO: 2315045 - DNA, 25 bp, Homo sapien
ctttctctagcagctgtgtcaacag

SEQ ID NO: 2315046 - DNA, 25 bp, Homo sapien
gttccttctgtagccgttcttctac

SEQ ID NO: 2315047 - DNA, 25 bp, Homo sapien
tagcagctgtgtcaacaggctttgc

SEQ ID NO: 2315048 - DNA, 25 bp, Homo sapien
ttctgtagccgttcttctacttctc

SEQ ID NO: 2315049 - DNA, 25 bp, Homo sapien
tctagttttggctcatccagctgac

SEQ ID NO: 2315050 - DNA, 25 bp, Homo sapien
cgaggccgtcgttctagttttggct

SEQ ID NO: 2315051 - DNA, 25 bp, Homo sapien
gtcgttctagttttggctcatccag

SEQ ID NO: 2315052 - DNA, 25 bp, Homo sapien
ggccgtcgttctagttttggctcat

SEQ ID NO: 2315053 - DNA, 25 bp, Homo sapien
ctgtcctcgaccgttcccgttcctg

SEQ ID NO: 2315054 - DNA, 25 bp, Homo sapien
agtttcttcacttcgccagcttggg

SEQ ID NO: 2315055 - DNA, 25 bp, Homo sapien
gttcctgagtttcttcacttcgcca

SEQ ID NO: 2315056 - DNA, 25 bp, Homo sapien
tgtcctcgaccgttcccgttcctga

SEQ ID NO: 2315057 - DNA, 25 bp, Homo sapien
gtggaggtcccagtttgtgatgact

SEQ ID NO: 2315058 - DNA, 25 bp, Homo sapien
tctgctagatgtggtggaggtccca

SEQ ID NO: 2315059 - DNA, 25 bp, Homo sapien
ttctgctagatgtggtggaggtccc

SEQ ID NO: 2315060 - DNA, 25 bp, Homo sapien
gaggtcccagtttgtgatgactcac

SEQ ID NO: 2315061 - DNA, 25 bp, Homo sapien
gctggcattacctttaggggctgat

SEQ ID NO: 2315062 - DNA, 25 bp, Homo sapien
tggcattacctttaggggctgatca

SEQ ID NO: 2315063 - DNA, 25 bp, Homo sapien
gcattacctttaggggctgatcagg

SEQ ID NO: 2315064 - DNA, 25 bp, Homo sapien
gagggttagaacttcgcttcaccca

SEQ ID NO: 2315065 - DNA, 25 bp, Homo sapien
gaatctgcagttaaccaactactgt

SEQ ID NO: 2315066 - DNA, 25 bp, Homo sapien
cacagtattttagaatctgcagtta

SEQ ID NO: 2315067 - DNA, 25 bp, Homo sapien
ccgtaggagatcttccatcattaca

SEQ ID NO: 2315068 - DNA, 25 bp, Homo sapien
atcccgtaggagatcttccatcatt

SEQ ID NO: 2315069 - DNA, 25 bp, Homo sapien
cctccaaatgcagtgggtaagcttt

SEQ ID NO: 2315070 - DNA, 25 bp, Homo sapien
caagctatcaaagtggtggaactcc

SEQ ID NO: 2315071 - DNA, 25 bp, Homo sapien
ggtcttatgagccagttccagcaca

SEQ ID NO: 2315072 - DNA, 25 bp, Homo sapien
gatttgtgcggcattagtactccca

SEQ ID NO: 2315073 - DNA, 25 bp, Homo sapien
cctggtccttcctcagatggttgag

SEQ ID NO: 2315074 - DNA, 25 bp, Homo sapien
ttcctggtccttcctcagatggttg

SEQ ID NO: 2315075 - DNA, 25 bp, Homo sapien
ttccttcctggtccttcctcagatg

SEQ ID NO: 2315076 - DNA, 25 bp, Homo sapien
ggttgagctggagctacttttcccc

SEQ ID NO: 2315077 - DNA, 25 bp, Homo sapien
taacacggtatcaggtgcgagacac

SEQ ID NO: 2315078 - DNA, 25 bp, Homo sapien
aaaagttccatgtagggatatgcca

SEQ ID NO: 2315079 - DNA, 25 bp, Homo sapien
tatgacgctctgtagtgaccttggt

SEQ ID NO: 2315080 - DNA, 25 bp, Homo sapien
aattgtgcccacatgtactgaggga

SEQ ID NO: 2315081 - DNA, 25 bp, Homo sapien
cgtcgcctggaccacggctagagtt

SEQ ID NO: 2315082 - DNA, 25 bp, Homo sapien
gtttggccttttggggcattcatcc

SEQ ID NO: 2315083 - DNA, 25 bp, Homo sapien
gggcattcatcccatctactttatt

SEQ ID NO: 2315084 - DNA, 25 bp, Homo sapien
ccagtggtctctgttccctccgtcg

SEQ ID NO: 2315085 - DNA, 25 bp, Homo sapien
aggtgcagatctggagtcttgatcc

SEQ ID NO: 2315086 - DNA, 25 bp, Homo sapien
tctttggctcaggtgcagatctgga

SEQ ID NO: 2315087 - DNA, 25 bp, Homo sapien
tggagtcttgatcctttttgccatc

SEQ ID NO: 2315088 - DNA, 25 bp, Homo sapien
cctcaggtttctttggctcaggtgc

SEQ ID NO: 2315089 - DNA, 25 bp, Homo sapien
aacacaacgagagtgacaggataat

SEQ ID NO: 2315090 - DNA, 25 bp, Homo sapien
tgtaacacaacgagagtgacaggat

SEQ ID NO: 2315091 - DNA, 25 bp, Homo sapien
ctgtaacacaacgagagtgacagga

SEQ ID NO: 2315092 - DNA, 25 bp, Homo sapien
taacacaacgagagtgacaggataa

SEQ ID NO: 2315093 - DNA, 25 bp, Homo sapien
ctattcggcataatcttctccctca

SEQ ID NO: 2315094 - DNA, 25 bp, Homo sapien
acagagagagcagcatacttgcttg

SEQ ID NO: 2315095 - DNA, 25 bp, Homo sapien
tcaacagagagagcagcatacttgc

SEQ ID NO: 2315096 - DNA, 25 bp, Homo sapien
ccatcaacagagagagcagcatact

SEQ ID NO: 2315097 - DNA, 25 bp, Homo sapien
atttgctctcgaatgttccagggtg

SEQ ID NO: 2315098 - DNA, 25 bp, Homo sapien
tcttgtctggatagaggttttgatt

SEQ ID NO: 2315099 - DNA, 25 bp, Homo sapien
ggttttgatttgctctcgaatgttc

SEQ ID NO: 2315100 - DNA, 25 bp, Homo sapien
ttgtcttgtctggatagaggttttg

SEQ ID NO: 2315101 - DNA, 25 bp, Homo sapien
tgagaattcatatatgccacaatag

SEQ ID NO: 2315102 - DNA, 25 bp, Homo sapien
tctccagttacttcaatactttaaa

SEQ ID NO: 2315103 - DNA, 25 bp, Homo sapien
taccatttctgctaaatggagaccc

SEQ ID NO: 2315104 - DNA, 25 bp, Homo sapien
agaattcatatatgccacaatagga

SEQ ID NO: 2315105 - DNA, 25 bp, Homo sapien
tggcctatagtctcactcccaacta

SEQ ID NO: 2315106 - DNA, 25 bp, Homo sapien
tatggcctatagtctcactcccaac

SEQ ID NO: 2315107 - DNA, 25 bp, Homo sapien
tttatggcctatagtctcactccca

SEQ ID NO: 2315108 - DNA, 25 bp, Homo sapien
ctttatggcctatagtctcactccc

SEQ ID NO: 2315109 - DNA, 25 bp, Homo sapien
gtgcaaaatgactcatcacttccca

SEQ ID NO: 2315110 - DNA, 25 bp, Homo sapien
tgcaaaatgactcatcacttcccaa

SEQ ID NO: 2315111 - DNA, 25 bp, Homo sapien
aagtgcttccggctccaggaaataa

SEQ ID NO: 2315112 - DNA, 25 bp, Homo sapien
aggaaataaccattcatgtgtttgc

SEQ ID NO: 2315113 - DNA, 25 bp, Homo sapien
tagctactggccaatccacaccaat

SEQ ID NO: 2315114 - DNA, 25 bp, Homo sapien
taaaagcccacttcttagctactgg

SEQ ID NO: 2315115 - DNA, 25 bp, Homo sapien
caagtttagctactgtgttgcaaga

SEQ ID NO: 2315116 - DNA, 25 bp, Homo sapien
catgaagagggcaaaccctagcttt

SEQ ID NO: 2315117 - DNA, 25 bp, Homo sapien
aactgaatgtgctcagatccttggg

SEQ ID NO: 2315118 - DNA, 25 bp, Homo sapien
gcctgtaactgaatgtgctcagatc

SEQ ID NO: 2315119 - DNA, 25 bp, Homo sapien
taactgaatgtgctcagatccttgg

SEQ ID NO: 2315120 - DNA, 25 bp, Homo sapien
tgtaactgaatgtgctcagatcctt

SEQ ID NO: 2315121 - DNA, 25 bp, Homo sapien
tgaagatggaaccccctcttccatg

SEQ ID NO: 2315122 - DNA, 25 bp, Homo sapien
ctgaagatggaaccccctcttccat

SEQ ID NO: 2315123 - DNA, 25 bp, Homo sapien
cttgactatgcagagggtggtccat

SEQ ID NO: 2315124 - DNA, 25 bp, Homo sapien
gataggaacttcatggaatggagct

SEQ ID NO: 2315125 - DNA, 25 bp, Homo sapien
catggaatggagctaatgggccgta

SEQ ID NO: 2315126 - DNA, 25 bp, Homo sapien
cattcccttcttttgcagtgcctgg

SEQ ID NO: 2315127 - DNA, 25 bp, Homo sapien
tgcctggtactggataggaacttca

SEQ ID NO: 2315128 - DNA, 25 bp, Homo sapien
gggagagagggtgcgcagacggcca

SEQ ID NO: 2315129 - DNA, 25 bp, Homo sapien
agccgggccgcgccagggacatact

SEQ ID NO: 2315130 - DNA, 25 bp, Homo sapien
agggtgcgcagacggccagccgggc

SEQ ID NO: 2315131 - DNA, 25 bp, Homo sapien
ccagggacatactggagacaggaag

SEQ ID NO: 2315132 - DNA, 25 bp, Homo sapien
tggccaacttcccgtcctgggagtc

SEQ ID NO: 2315133 - DNA, 25 bp, Homo sapien
tccctcctgggaacatggccaactt

SEQ ID NO: 2315134 - DNA, 25 bp, Homo sapien
agcccctgggacaggctatagctgt

SEQ ID NO: 2315135 - DNA, 25 bp, Homo sapien
agtcttcagccccaagctgtggaca

SEQ ID NO: 2315136 - DNA, 25 bp, Homo sapien
tgaggactggacaggaggtcccccc

SEQ ID NO: 2315137 - DNA, 25 bp, Homo sapien
caacacatactccacccccatccat

SEQ ID NO: 2315138 - DNA, 25 bp, Homo sapien
gcctgaggactggacaggaggtccc

SEQ ID NO: 2315139 - DNA, 25 bp, Homo sapien
tgtcccagggcctgaggactggaca

SEQ ID NO: 2315140 - DNA, 25 bp, Homo sapien
ccattccctggctttgtttcagaca

SEQ ID NO: 2315141 - DNA, 25 bp, Homo sapien
cattccctggctttgtttcagacat

SEQ ID NO: 2315142 - DNA, 25 bp, Homo sapien
aggccaggagatcagattcccagga

SEQ ID NO: 2315143 - DNA, 25 bp, Homo sapien
ttcccaggatctaccctgctgggag

SEQ ID NO: 2315144 - DNA, 25 bp, Homo sapien
agattcccaggatctaccctgctgg

SEQ ID NO: 2315145 - DNA, 25 bp, Homo sapien
ggagatcagattcccaggatctacc

SEQ ID NO: 2315146 - DNA, 25 bp, Homo sapien
tgcaggcgggaagggggcaggtcgc

SEQ ID NO: 2315147 - DNA, 25 bp, Homo sapien
gtgcaggcgggaagggggcaggtcg

SEQ ID NO: 2315148 - DNA, 25 bp, Homo sapien
aagtggagggaagtgcaggcgggaa

SEQ ID NO: 2315149 - DNA, 25 bp, Homo sapien
tggaagtggagggaagtgcaggcgg

SEQ ID NO: 2315150 - DNA, 25 bp, Homo sapien
tggctggtgtgaggagaagcccggc

SEQ ID NO: 2315151 - DNA, 25 bp, Homo sapien
gtctggctggtgtgaggagaagccc

SEQ ID NO: 2315152 - DNA, 25 bp, Homo sapien
ctgggcggagggtaggctgtctggc

SEQ ID NO: 2315153 - DNA, 25 bp, Homo sapien
gggcggagggtaggctgtctggctg

SEQ ID NO: 2315154 - DNA, 25 bp, Homo sapien
tggaagcggcctggcggaggcagcc

SEQ ID NO: 2315155 - DNA, 25 bp, Homo sapien
gcggcctggcggaggcagccgcttc

SEQ ID NO: 2315156 - DNA, 25 bp, Homo sapien
gaagcggcctggcggaggcagccgc

SEQ ID NO: 2315157 - DNA, 25 bp, Homo sapien
ctggaagcggcctggcggaggcagc

SEQ ID NO: 2315158 - DNA, 25 bp, Homo sapien
gccccagggcctgaacaatgctggg

SEQ ID NO: 2315159 - DNA, 25 bp, Homo sapien
cagggcctgaacaatgctggggcct

SEQ ID NO: 2315160 - DNA, 25 bp, Homo sapien
ggccccagggcctgaacaatgctgg

SEQ ID NO: 2315161 - DNA, 25 bp, Homo sapien
gcctgaacaatgctggggcctggcc

SEQ ID NO: 2315162 - DNA, 25 bp, Homo sapien
ttgcggcccggctgctgtccctcct

SEQ ID NO: 2315163 - DNA, 25 bp, Homo sapien
ctctccacagggccgctggacttca

SEQ ID NO: 2315164 - DNA, 25 bp, Homo sapien
cctgcttgcggcccggctgctgtcc

SEQ ID NO: 2315165 - DNA, 25 bp, Homo sapien
tctccacagggccgctggacttcat

SEQ ID NO: 2315166 - DNA, 25 bp, Homo sapien
cacagactggaggtttcttccggaa

SEQ ID NO: 2315167 - DNA, 25 bp, Homo sapien
agctatgaggctcagctttcctagg

SEQ ID NO: 2315168 - DNA, 25 bp, Homo sapien
gcctgtcccatcgatggtcacctta

SEQ ID NO: 2315169 - DNA, 25 bp, Homo sapien
tcaccttacatactgcacagactgg

SEQ ID NO: 2315170 - DNA, 25 bp, Homo sapien
cattttctgtgcgtcgccaccttgc

SEQ ID NO: 2315171 - DNA, 25 bp, Homo sapien
gcttcacattttctgtgcgtcgcca

SEQ ID NO: 2315172 - DNA, 25 bp, Homo sapien
tcacattttctgtgcgtcgccacct

SEQ ID NO: 2315173 - DNA, 25 bp, Homo sapien
ttttctgtgcgtcgccaccttgcag

SEQ ID NO: 2315174 - DNA, 25 bp, Homo sapien
aactccacgggaggcaaggcctgac

SEQ ID NO: 2315175 - DNA, 25 bp, Homo sapien
caactccacgggaggcaaggcctga

SEQ ID NO: 2315176 - DNA, 25 bp, Homo sapien
caggtgctctatgcgcctgactggg

SEQ ID NO: 2315177 - DNA, 25 bp, Homo sapien
tgctctatgcgcctgactggggccg

SEQ ID NO: 2315178 - DNA, 25 bp, Homo sapien
ggtgctctatgcgcctgactggggc

SEQ ID NO: 2315179 - DNA, 25 bp, Homo sapien
ctctatgcgcctgactggggccgtg

SEQ ID NO: 2315180 - DNA, 25 bp, Homo sapien
cgctgctttgagtggttcagagatt

SEQ ID NO: 2315181 - DNA, 25 bp, Homo sapien
tgctgcgctgctttgagtggttcag

SEQ ID NO: 2315182 - DNA, 25 bp, Homo sapien
tgcgctgctttgagtggttcagaga

SEQ ID NO: 2315183 - DNA, 25 bp, Homo sapien
ctttgagtggttcagagatttggtg

SEQ ID NO: 2315184 - DNA, 25 bp, Homo sapien
agcacatgggccagctcgcgcaggt

SEQ ID NO: 2315185 - DNA, 25 bp, Homo sapien
ggtacttgtcccggtgcttggattg

SEQ ID NO: 2315186 - DNA, 25 bp, Homo sapien
gtgaggtctaagtcccagcgccgct

SEQ ID NO: 2315187 - DNA, 25 bp, Homo sapien
aagatgcgctccgtcacgtaggtga

SEQ ID NO: 2315188 - DNA, 25 bp, Homo sapien
gggtttaagcgggtcaggtcatgcc

SEQ ID NO: 2315189 - DNA, 25 bp, Homo sapien
aagcgggtcaggtcatgccttttct

SEQ ID NO: 2315190 - DNA, 25 bp, Homo sapien
gcgggtcaggtcatgccttttctct

SEQ ID NO: 2315191 - DNA, 25 bp, Homo sapien
ttaagcgggtcaggtcatgcctttt

SEQ ID NO: 2315192 - DNA, 25 bp, Homo sapien
tatagtacgaccacgtgctgtgggt

SEQ ID NO: 2315193 - DNA, 25 bp, Homo sapien
gctcaggccagccgaagtcttgaac

SEQ ID NO: 2315194 - DNA, 25 bp, Homo sapien
cttgcagtatagtacgaccacgtgc

SEQ ID NO: 2315195 - DNA, 25 bp, Homo sapien
tacgaccacgtgctgtgggtcagca

SEQ ID NO: 2315196 - DNA, 25 bp, Homo sapien
aggcaccagggaacccgaggtcctg

SEQ ID NO: 2315197 - DNA, 25 bp, Homo sapien
gcaccagggaacccgaggtcctggc

SEQ ID NO: 2315198 - DNA, 25 bp, Homo sapien
caggcaccagggaacccgaggtcct

SEQ ID NO: 2315199 - DNA, 25 bp, Homo sapien
gagggtctgggagctccaggctgac

SEQ ID NO: 2315200 - DNA, 25 bp, Homo sapien
atgagggtctgggagctccaggctg

SEQ ID NO: 2315201 - DNA, 25 bp, Homo sapien
ggatgagggtctgggagctccaggc

SEQ ID NO: 2315202 - DNA, 25 bp, Homo sapien
cagggatgagggtctgggagctcca

SEQ ID NO: 2315203 - DNA, 25 bp, Homo sapien
tgtaggcagaaacgatgaccccaag

SEQ ID NO: 2315204 - DNA, 25 bp, Homo sapien
gtaggcagaaacgatgaccccaagc

SEQ ID NO: 2315205 - DNA, 25 bp, Homo sapien
taggcagaaacgatgaccccaagct

SEQ ID NO: 2315206 - DNA, 25 bp, Homo sapien
aggcagaaacgatgaccccaagctt

SEQ ID NO: 2315207 - DNA, 25 bp, Homo sapien
caggaaactctacagaccatctgct

SEQ ID NO: 2315208 - DNA, 25 bp, Homo sapien
cctgtttgtggctgccccaggaaac

SEQ ID NO: 2315209 - DNA, 25 bp, Homo sapien
gcagactatgttgcagtactagtga

SEQ ID NO: 2315210 - DNA, 25 bp, Homo sapien
ctctcaacgaagaggtgggctccag

SEQ ID NO: 2315211 - DNA, 25 bp, Homo sapien
tttccgcatggtaagagtggccagt

SEQ ID NO: 2315212 - DNA, 25 bp, Homo sapien
cgcatggtaagagtggccagtgcct

SEQ ID NO: 2315213 - DNA, 25 bp, Homo sapien
agaatttccgcatggtaagagtggc

SEQ ID NO: 2315214 - DNA, 25 bp, Homo sapien
accttgtcctcgcagaatttccgca

SEQ ID NO: 2315215 - DNA, 25 bp, Homo sapien
tgatggagccagatagcagcccact

SEQ ID NO: 2315216 - DNA, 25 bp, Homo sapien
ggagccagatagcagcccactgaag

SEQ ID NO: 2315217 - DNA, 25 bp, Homo sapien
ctgatggagccagatagcagcccac

SEQ ID NO: 2315218 - DNA, 25 bp, Homo sapien
atggagccagatagcagcccactga

SEQ ID NO: 2315219 - DNA, 25 bp, Homo sapien
atggggatgagcacatagtgcagga

SEQ ID NO: 2315220 - DNA, 25 bp, Homo sapien
tggggatgagcacatagtgcaggaa

SEQ ID NO: 2315221 - DNA, 25 bp, Homo sapien
ggggatgagcacatagtgcaggaag

SEQ ID NO: 2315222 - DNA, 25 bp, Homo sapien
aggcacaggaggggtgctgagtgga

SEQ ID NO: 2315223 - DNA, 25 bp, Homo sapien
ggagaaggcacaggaggggtgctga

SEQ ID NO: 2315224 - DNA, 25 bp, Homo sapien
ggaggggcagaggagaaggcacagg

SEQ ID NO: 2315225 - DNA, 25 bp, Homo sapien
cacaggaggggtgctgagtggagag

SEQ ID NO: 2315226 - DNA, 25 bp, Homo sapien
gactccagatgtgtagacaagctgc

SEQ ID NO: 2315227 - DNA, 25 bp, Homo sapien
caagctgcatggactggtagatttt

SEQ ID NO: 2315228 - DNA, 25 bp, Homo sapien
cagatgtgtagacaagctgcatgga

SEQ ID NO: 2315229 - DNA, 25 bp, Homo sapien
agctgcatggactggtagattttaa

SEQ ID NO: 2315230 - DNA, 25 bp, Homo sapien
tgcgtgcagaggcagctatgcagtc

SEQ ID NO: 2315231 - DNA, 25 bp, Homo sapien
aagctcctgcgtgcagaggcagcta

SEQ ID NO: 2315232 - DNA, 25 bp, Homo sapien
tcctgcgtgcagaggcagctatgca

SEQ ID NO: 2315233 - DNA, 25 bp, Homo sapien
cgtgcagaggcagctatgcagtcag

SEQ ID NO: 2315234 - DNA, 25 bp, Homo sapien
gacatcgcctttgaggaggagggct

SEQ ID NO: 2315235 - DNA, 25 bp, Homo sapien
acatcgcctttgaggaggagggctg

SEQ ID NO: 2315236 - DNA, 25 bp, Homo sapien
tgacatcgcctttgaggaggagggc

SEQ ID NO: 2315237 - DNA, 25 bp, Homo sapien
catgacatcgcctttgaggaggagg

SEQ ID NO: 2315238 - DNA, 25 bp, Homo sapien
caggtgtggaactggactcggaaca

SEQ ID NO: 2315239 - DNA, 25 bp, Homo sapien
cggccacccttgtgataacatgtta

SEQ ID NO: 2315240 - DNA, 25 bp, Homo sapien
cagtccaggcctcgtcaagctggtc

SEQ ID NO: 2315241 - DNA, 25 bp, Homo sapien
ctcggaacacgagggtccggtctgt

SEQ ID NO: 2315242 - DNA, 25 bp, Homo sapien
gccccaggccacttgtctcagactc

SEQ ID NO: 2315243 - DNA, 25 bp, Homo sapien
cccaggccacttgtctcagactcac

SEQ ID NO: 2315244 - DNA, 25 bp, Homo sapien
agtggacagtgaagaaccaggcccc

SEQ ID NO: 2315245 - DNA, 25 bp, Homo sapien
gagtggacagtgaagaaccaggccc

SEQ ID NO: 2315246 - DNA, 25 bp, Homo sapien
caaactccacggaggcttggaaggg

SEQ ID NO: 2315247 - DNA, 25 bp, Homo sapien
ggagaagacaaactccacggaggct

SEQ ID NO: 2315248 - DNA, 25 bp, Homo sapien
acaaactccacggaggcttggaagg

SEQ ID NO: 2315249 - DNA, 25 bp, Homo sapien
agaagacaaactccacggaggcttg

SEQ ID NO: 2315250 - DNA, 25 bp, Homo sapien
actcgggtattggggagcaggggag

SEQ ID NO: 2315251 - DNA, 25 bp, Homo sapien
aggccactcgggtattggggagcag

SEQ ID NO: 2315252 - DNA, 25 bp, Homo sapien
cactcgggtattggggagcagggga

SEQ ID NO: 2315253 - DNA, 25 bp, Homo sapien
gccactcgggtattggggagcaggg

SEQ ID NO: 2315254 - DNA, 25 bp, Homo sapien
tggtgttgtagtcgacagagaccga

SEQ ID NO: 2315255 - DNA, 25 bp, Homo sapien
ccgaggggtcgttccgtggagtgct

SEQ ID NO: 2315256 - DNA, 25 bp, Homo sapien
ctcagtggtgttgtagtcgacagag

SEQ ID NO: 2315257 - DNA, 25 bp, Homo sapien
cagtggtgttgtagtcgacagagac

SEQ ID NO: 2315258 - DNA, 25 bp, Homo sapien
ctggttgaagttctcataggagtcc

SEQ ID NO: 2315259 - DNA, 25 bp, Homo sapien
ggttgaagttctcataggagtccca

SEQ ID NO: 2315260 - DNA, 25 bp, Homo sapien
tggttgaagttctcataggagtccc

SEQ ID NO: 2315261 - DNA, 25 bp, Homo sapien
tgctggttgaagttctcataggagt

SEQ ID NO: 2315262 - DNA, 25 bp, Homo sapien
cccaccctgcaggctgcctgcgcac

SEQ ID NO: 2315263 - DNA, 25 bp, Homo sapien
tcccaccctgcaggctgcctgcgca

SEQ ID NO: 2315264 - DNA, 25 bp, Homo sapien
ctcccaccctgcaggctgcctgcgc

SEQ ID NO: 2315265 - DNA, 25 bp, Homo sapien
cgctgcacctgggcataaggactgc

SEQ ID NO: 2315266 - DNA, 25 bp, Homo sapien
ccgctgcacctgggcataaggactg

SEQ ID NO: 2315267 - DNA, 25 bp, Homo sapien
gctgcacctgggcataaggactgcc

SEQ ID NO: 2315268 - DNA, 25 bp, Homo sapien
gaatggcctgagtcgctgctgacag

SEQ ID NO: 2315269 - DNA, 25 bp, Homo sapien
tcttctccatcgaggcctcggcgta

SEQ ID NO: 2315270 - DNA, 25 bp, Homo sapien
ggtatagcccctctgacagcgatcg

SEQ ID NO: 2315271 - DNA, 25 bp, Homo sapien
tcgtcatctaggatggccgtctcgc

SEQ ID NO: 2315272 - DNA, 25 bp, Homo sapien
agcgccagcttctcctcgcaggctg

SEQ ID NO: 2315273 - DNA, 25 bp, Homo sapien
tgtaggcagcgccagcttctcctcg

SEQ ID NO: 2315274 - DNA, 25 bp, Homo sapien
ctgtaggcagcgccagcttctcctc

SEQ ID NO: 2315275 - DNA, 25 bp, Homo sapien
ggcagcgccagcttctcctcgcagg

SEQ ID NO: 2315276 - DNA, 25 bp, Homo sapien
tccagccgcagtccatacaaggctg

SEQ ID NO: 2315277 - DNA, 25 bp, Homo sapien
cacatggtgtaggagcagccctcgt

SEQ ID NO: 2315278 - DNA, 25 bp, Homo sapien
tcaggcagctgtagtcaggcatcgg

SEQ ID NO: 2315279 - DNA, 25 bp, Homo sapien
tgggtgcaggagaggcttgccagcc

SEQ ID NO: 2315280 - DNA, 25 bp, Homo sapien
catatgctgggcagtaactgggaac

SEQ ID NO: 2315281 - DNA, 25 bp, Homo sapien
gaactgctcctccatagctgtatgt

SEQ ID NO: 2315282 - DNA, 25 bp, Homo sapien
ccatagctgtatgtcaccagggcag

SEQ ID NO: 2315283 - DNA, 25 bp, Homo sapien
gctatgaggcacacggccatatgct

SEQ ID NO: 2315284 - DNA, 25 bp, Homo sapien
tccctcctccgtagggatctcgtag

SEQ ID NO: 2315285 - DNA, 25 bp, Homo sapien
caggtgcccaggcaatgggtacctg

SEQ ID NO: 2315286 - DNA, 25 bp, Homo sapien
tgcccaggcaatgggtacctgtccc

SEQ ID NO: 2315287 - DNA, 25 bp, Homo sapien
cgtagggatctcgtagctcagcttc

SEQ ID NO: 2315288 - DNA, 25 bp, Homo sapien
aaggggagaggtgggctgtgagcag

SEQ ID NO: 2315289 - DNA, 25 bp, Homo sapien
tgcagtgaaggggagaggtgggctg

SEQ ID NO: 2315290 - DNA, 25 bp, Homo sapien
gagaggtgggctgtgagcaggatgg

SEQ ID NO: 2315291 - DNA, 25 bp, Homo sapien
ctgcagtgaaggggagaggtgggct

SEQ ID NO: 2315292 - DNA, 25 bp, Homo sapien
agacaactctgacgaagcactgcat

SEQ ID NO: 2315293 - DNA, 25 bp, Homo sapien
ctggactggactgctggtgtgcagg

SEQ ID NO: 2315294 - DNA, 25 bp, Homo sapien
cgaagcactgcatggggcatctcgg

SEQ ID NO: 2315295 - DNA, 25 bp, Homo sapien
caactctgacgaagcactgcatggg

SEQ ID NO: 2315296 - DNA, 25 bp, Homo sapien
tgcttggacaagaaagcactcgagc

SEQ ID NO: 2315297 - DNA, 25 bp, Homo sapien
ggacaagaaagcactcgagcatccc

SEQ ID NO: 2315298 - DNA, 25 bp, Homo sapien
tcaactgcttggacaagaaagcact

SEQ ID NO: 2315299 - DNA, 25 bp, Homo sapien
aagaaagcactcgagcatccccggc

SEQ ID NO: 2315300 - DNA, 25 bp, Homo sapien
cagtctctgagtgggcgctgaggtg

SEQ ID NO: 2315301 - DNA, 25 bp, Homo sapien
tgggaaacagggggcaaggcctcgc

SEQ ID NO: 2315302 - DNA, 25 bp, Homo sapien
ggaaacagggggcaaggcctcgcca

SEQ ID NO: 2315303 - DNA, 25 bp, Homo sapien
ggacctggtgtcctgtcgccgggtg

SEQ ID NO: 2315304 - DNA, 25 bp, Homo sapien
cccacttcccgacggcagctcaggg

SEQ ID NO: 2315305 - DNA, 25 bp, Homo sapien
ggctcaggcccacttcccgacggca

SEQ ID NO: 2315306 - DNA, 25 bp, Homo sapien
gactgggctaggggccagaggctca

SEQ ID NO: 2315307 - DNA, 25 bp, Homo sapien
ttcccgacggcagctcaggggcctt

SEQ ID NO: 2315308 - DNA, 25 bp, Homo sapien
aggactggcgccatctgagtggccc

SEQ ID NO: 2315309 - DNA, 25 bp, Homo sapien
atgcctctggctggcgatgatgcct

SEQ ID NO: 2315310 - DNA, 25 bp, Homo sapien
tggctaaggccattggtgtcatagg

SEQ ID NO: 2315311 - DNA, 25 bp, Homo sapien
cgaaggtgacatggtgactgatgcc

SEQ ID NO: 2315312 - DNA, 25 bp, Homo sapien
gacaggtgtggcttgtaccagaact

SEQ ID NO: 2315313 - DNA, 25 bp, Homo sapien
gacaaacttgacattgctttggctc

SEQ ID NO: 2315314 - DNA, 25 bp, Homo sapien
tggatgtatcctggacaaacttgac

SEQ ID NO: 2315315 - DNA, 25 bp, Homo sapien
cttggtcacgggacaggtgtggctt

SEQ ID NO: 2315316 - DNA, 25 bp, Homo sapien
gggtggactgagccccatgcagccc

SEQ ID NO: 2315317 - DNA, 25 bp, Homo sapien
ggggtggactgagccccatgcagcc

SEQ ID NO: 2315318 - DNA, 25 bp, Homo sapien
aggggtggactgagccccatgcagc

SEQ ID NO: 2315319 - DNA, 25 bp, Homo sapien
aggagttttcacaggggtggactga

SEQ ID NO: 2315320 - DNA, 25 bp, Homo sapien
gaatgactgtccctgatcaggaagg

SEQ ID NO: 2315321 - DNA, 25 bp, Homo sapien
ttgagggccagcccataagctcctt

SEQ ID NO: 2315322 - DNA, 25 bp, Homo sapien
tccttggaatgaatgactgtccctg

SEQ ID NO: 2315323 - DNA, 25 bp, Homo sapien
cactgggtggcggtgtggccacctt

SEQ ID NO: 2315324 - DNA, 25 bp, Homo sapien
gaagattgcggctttaggattccag

SEQ ID NO: 2315325 - DNA, 25 bp, Homo sapien
ccactcaggtttgggtgttctgtac

SEQ ID NO: 2315326 - DNA, 25 bp, Homo sapien
ccagcttcttccctaatgggattct

SEQ ID NO: 2315327 - DNA, 25 bp, Homo sapien
gccctgttaccttgcctctggcacc

SEQ ID NO: 2315328 - DNA, 25 bp, Homo sapien
aatggcggaccagctgttccacggg

SEQ ID NO: 2315329 - DNA, 25 bp, Homo sapien
gtctcgatgaggaaatggcggacca

SEQ ID NO: 2315330 - DNA, 25 bp, Homo sapien
caaagtagggctcactggggcagcc

SEQ ID NO: 2315331 - DNA, 25 bp, Homo sapien
agcccttgatcttcacccctttggg

SEQ ID NO: 2315332 - DNA, 25 bp, Homo sapien
aggtaggaaagtcccgagatgccca

SEQ ID NO: 2315333 - DNA, 25 bp, Homo sapien
ggaggtaggaaagtcccgagatgcc

SEQ ID NO: 2315334 - DNA, 25 bp, Homo sapien
gagaggaggtaggaaagtcccgaga

SEQ ID NO: 2315335 - DNA, 25 bp, Homo sapien
gaggaggtaggaaagtcccgagatg

SEQ ID NO: 2315336 - DNA, 25 bp, Homo sapien
ctttgctgggaatgcgcaggcagca

SEQ ID NO: 2315337 - DNA, 25 bp, Homo sapien
tttgctgggaatgcgcaggcagcag

SEQ ID NO: 2315338 - DNA, 25 bp, Homo sapien
tgagaaccgacagggaagctcagaa

SEQ ID NO: 2315339 - DNA, 25 bp, Homo sapien
ggaaggcggggagccaagacctctg

SEQ ID NO: 2315340 - DNA, 25 bp, Homo sapien
aatgagaaccgacagggaagctcag

SEQ ID NO: 2315341 - DNA, 25 bp, Homo sapien
gagaaccgacagggaagctcagaag

SEQ ID NO: 2315342 - DNA, 25 bp, Homo sapien
ggaggtctgccgctgtgctcatgtt

SEQ ID NO: 2315343 - DNA, 25 bp, Homo sapien
caggaggtctgccgctgtgctcatg

SEQ ID NO: 2315344 - DNA, 25 bp, Homo sapien
gaggtctgccgctgtgctcatgttg

SEQ ID NO: 2315345 - DNA, 25 bp, Homo sapien
acgcaggaggtctgccgctgtgctc

SEQ ID NO: 2315346 - DNA, 25 bp, Homo sapien
ccatgccctgtatccacaatgcccc

SEQ ID NO: 2315347 - DNA, 25 bp, Homo sapien
atgccctgtatccacaatgccccct

SEQ ID NO: 2315348 - DNA, 25 bp, Homo sapien
cccatgccctgtatccacaatgccc

SEQ ID NO: 2315349 - DNA, 25 bp, Homo sapien
catgccctgtatccacaatgccccc

SEQ ID NO: 2315350 - DNA, 25 bp, Homo sapien
aaggcagattccatgactctactgg

SEQ ID NO: 2315351 - DNA, 25 bp, Homo sapien
cataggtgacttgttaaaaaggcag

SEQ ID NO: 2315352 - DNA, 25 bp, Homo sapien
tactggatctacagtcagaagcgag

SEQ ID NO: 2315353 - DNA, 25 bp, Homo sapien
catgctttacaatcacataggtgac

SEQ ID NO: 2315354 - DNA, 25 bp, Homo sapien
ccttgaagtggacaacagctggtgt

SEQ ID NO: 2315355 - DNA, 25 bp, Homo sapien
tgaggtcaagtagagcacgctgcag

SEQ ID NO: 2315356 - DNA, 25 bp, Homo sapien
ttcctttggttgtccgtcagtgtaa

SEQ ID NO: 2315357 - DNA, 25 bp, Homo sapien
ccgtcagtgtaatgccctgggctga

SEQ ID NO: 2315358 - DNA, 25 bp, Homo sapien
tcactggataatggcggcgaaagaa

SEQ ID NO: 2315359 - DNA, 25 bp, Homo sapien
tgatgctgttcactggataatggcg

SEQ ID NO: 2315360 - DNA, 25 bp, Homo sapien
aaggtgatgctgttcactggataat

SEQ ID NO: 2315361 - DNA, 25 bp, Homo sapien
tgctgttcactggataatggcggcg

SEQ ID NO: 2315362 - DNA, 25 bp, Homo sapien
tgggaccatggggatttggggcaaa

SEQ ID NO: 2315363 - DNA, 25 bp, Homo sapien
gcaaagggtttggagggagagtcac

SEQ ID NO: 2315364 - DNA, 25 bp, Homo sapien
gggacagctgctgaaggggggccgg

SEQ ID NO: 2315365 - DNA, 25 bp, Homo sapien
gaaggtgaagatgcacaccccaggg

SEQ ID NO: 2315366 - DNA, 25 bp, Homo sapien
agctggccttggtgagacaaatcaa

SEQ ID NO: 2315367 - DNA, 25 bp, Homo sapien
tccacaagggaatgtagctggcctt

SEQ ID NO: 2315368 - DNA, 25 bp, Homo sapien
aggggcttaacattccttccacaag

SEQ ID NO: 2315369 - DNA, 25 bp, Homo sapien
ttggtgagacaaatcaaatgccagc

SEQ ID NO: 2315370 - DNA, 25 bp, Homo sapien
cttcttggccacgaaaccaaagatc

SEQ ID NO: 2315371 - DNA, 25 bp, Homo sapien
acaatggcgccagcaggctgatctg

SEQ ID NO: 2315372 - DNA, 25 bp, Homo sapien
gtgacaatggcgccagcaggctgat

SEQ ID NO: 2315373 - DNA, 25 bp, Homo sapien
gaaggtgacaatggcgccagcaggc

SEQ ID NO: 2315374 - DNA, 25 bp, Homo sapien
catgcaaggtcatcttgtgggcctg

SEQ ID NO: 2315375 - DNA, 25 bp, Homo sapien
tctccttcggggctcaactgctgat

SEQ ID NO: 2315376 - DNA, 25 bp, Homo sapien
tgtgggcctgtccacttaacttagc

SEQ ID NO: 2315377 - DNA, 25 bp, Homo sapien
cacttaacttagcaggctgggggcg

SEQ ID NO: 2315378 - DNA, 25 bp, Homo sapien
tgatcccctggagggctgacgttct

SEQ ID NO: 2315379 - DNA, 25 bp, Homo sapien
ctgatcccctggagggctgacgttc

SEQ ID NO: 2315380 - DNA, 25 bp, Homo sapien
ctggagggctgacgttctcctgcag

SEQ ID NO: 2315381 - DNA, 25 bp, Homo sapien
tcccctggagggctgacgttctcct

SEQ ID NO: 2315382 - DNA, 25 bp, Homo sapien
ccctattcatgtgatcctactctga

SEQ ID NO: 2315383 - DNA, 25 bp, Homo sapien
cctgcagctgggtggaactggcagg

SEQ ID NO: 2315384 - DNA, 25 bp, Homo sapien
tctcccatccctgccgtgctggcac

SEQ ID NO: 2315385 - DNA, 25 bp, Homo sapien
agaggaggcagtgactcgctcccca

SEQ ID NO: 2315386 - DNA, 25 bp, Homo sapien
tgctcaggcaccacagaggatctag

SEQ ID NO: 2315387 - DNA, 25 bp, Homo sapien
gaccccagagccttagctgagcaag

SEQ ID NO: 2315388 - DNA, 25 bp, Homo sapien
gaggatctaggtctctggctcccca

SEQ ID NO: 2315389 - DNA, 25 bp, Homo sapien
catctttcccttgagagctggctcc

SEQ ID NO: 2315390 - DNA, 25 bp, Homo sapien
gaggaggtccctaggcaacatgttt

SEQ ID NO: 2315391 - DNA, 25 bp, Homo sapien
agattaaggaatcccaggtgaggcc

SEQ ID NO: 2315392 - DNA, 25 bp, Homo sapien
gtgtttcctacaccgaggccagttg

SEQ ID NO: 2315393 - DNA, 25 bp, Homo sapien
caacatgtttccttcagggctgcag

SEQ ID NO: 2315394 - DNA, 25 bp, Homo sapien
ggtcctgctgaaatgtgctcctgat

SEQ ID NO: 2315395 - DNA, 25 bp, Homo sapien
tgctgaaatgtgctcctgatcccat

SEQ ID NO: 2315396 - DNA, 25 bp, Homo sapien
ccaaactggtcctgctgaaatgtgc

SEQ ID NO: 2315397 - DNA, 25 bp, Homo sapien
catccaaactggtcctgctgaaatg

SEQ ID NO: 2315398 - DNA, 25 bp, Homo sapien
ttgtcagcacagcccgcttcgccat

SEQ ID NO: 2315399 - DNA, 25 bp, Homo sapien
tcattgtcagcacagcccgcttcgc

SEQ ID NO: 2315400 - DNA, 25 bp, Homo sapien
attgtcagcacagcccgcttcgcca

SEQ ID NO: 2315401 - DNA, 25 bp, Homo sapien
ctcattgtcagcacagcccgcttcg

SEQ ID NO: 2315402 - DNA, 25 bp, Homo sapien
ctacttgtccgccttcgctccaagg

SEQ ID NO: 2315403 - DNA, 25 bp, Homo sapien
acttgtccgccttcgctccaagggt

SEQ ID NO: 2315404 - DNA, 25 bp, Homo sapien
tgtccgccttcgctccaagggtcgg

SEQ ID NO: 2315405 - DNA, 25 bp, Homo sapien
ttgtccgccttcgctccaagggtcg

SEQ ID NO: 2315406 - DNA, 25 bp, Homo sapien
atccccgtccttcaggtaagctcgc

SEQ ID NO: 2315407 - DNA, 25 bp, Homo sapien
tccccgtccttcaggtaagctcgct

SEQ ID NO: 2315408 - DNA, 25 bp, Homo sapien
ccttcaggtaagctcgctcctccat

SEQ ID NO: 2315409 - DNA, 25 bp, Homo sapien
cgtccttcaggtaagctcgctcctc

SEQ ID NO: 2315410 - DNA, 25 bp, Homo sapien
gaatttgggagctgtacagctggct

SEQ ID NO: 2315411 - DNA, 25 bp, Homo sapien
tcttgctttgttcccgggaatctcg

SEQ ID NO: 2315412 - DNA, 25 bp, Homo sapien
aatttgggagctgtacagctggctg

SEQ ID NO: 2315413 - DNA, 25 bp, Homo sapien
tgctttgttcccgggaatctcggcc

SEQ ID NO: 2315414 - DNA, 25 bp, Homo sapien
gccgccgcccctctgtcttaagtag

SEQ ID NO: 2315415 - DNA, 25 bp, Homo sapien
gtcagggtttgtgccccgtcctctc

SEQ ID NO: 2315416 - DNA, 25 bp, Homo sapien
ctgtcttaagtagccgccggccagg

SEQ ID NO: 2315417 - DNA, 25 bp, Homo sapien
cttccagagcagtcgcagcgcagct

SEQ ID NO: 2315418 - DNA, 25 bp, Homo sapien
gcagcgagcagcagagctagcagca

SEQ ID NO: 2315419 - DNA, 25 bp, Homo sapien
tgggcaccgcgccaaggcgcctcct

SEQ ID NO: 2315420 - DNA, 25 bp, Homo sapien
ctgggcaccgcgccaaggcgcctcc

SEQ ID NO: 2315421 - DNA, 25 bp, Homo sapien
caccgcgccaaggcgcctcctgggc

SEQ ID NO: 2315422 - DNA, 25 bp, Homo sapien
ccgcgcagccctcggctggcgaccc

SEQ ID NO: 2315423 - DNA, 25 bp, Homo sapien
tggacaacccgcctgcaccccttgc

SEQ ID NO: 2315424 - DNA, 25 bp, Homo sapien
tccctcctgagacagccctcagctt

SEQ ID NO: 2315425 - DNA, 25 bp, Homo sapien
taggggtgtagaccccgcactcctg

SEQ ID NO: 2315426 - DNA, 25 bp, Homo sapien
cgcaaaggcgcctcgtcgtccttgg

SEQ ID NO: 2315427 - DNA, 25 bp, Homo sapien
agcaggcgcgcgggccggaaggcag

SEQ ID NO: 2315428 - DNA, 25 bp, Homo sapien
tccttgggcggatggcactgcagtc

SEQ ID NO: 2315429 - DNA, 25 bp, Homo sapien
tcgtccttgggcggatggcactgca

SEQ ID NO: 2315430 - DNA, 25 bp, Homo sapien
tggctctggagaaagtttccggagg

SEQ ID NO: 2315431 - DNA, 25 bp, Homo sapien
tctgttggtctctgcggttcacatc

SEQ ID NO: 2315432 - DNA, 25 bp, Homo sapien
ttcacatcctgtgggcgggcagtgc

SEQ ID NO: 2315433 - DNA, 25 bp, Homo sapien
ttggacacccgcagaattgggctgg

SEQ ID NO: 2315434 - DNA, 25 bp, Homo sapien
aggtgcctggattcctctgttggtc

SEQ ID NO: 2315435 - DNA, 25 bp, Homo sapien
gcacgtagagtgtttgagcccctcg

SEQ ID NO: 2315436 - DNA, 25 bp, Homo sapien
gatggtcacaattgggcacgtagag

SEQ ID NO: 2315437 - DNA, 25 bp, Homo sapien
tccggtagaagcctcgatggtcaca

SEQ ID NO: 2315438 - DNA, 25 bp, Homo sapien
agtccagatgtctacggcatgggcc

SEQ ID NO: 2315439 - DNA, 25 bp, Homo sapien
cacacaggtcaggagtgaggccaga

SEQ ID NO: 2315440 - DNA, 25 bp, Homo sapien
ggccagaggcttccagcaggagaat

SEQ ID NO: 2315441 - DNA, 25 bp, Homo sapien
agagaggcacacaggtcaggagtga

SEQ ID NO: 2315442 - DNA, 25 bp, Homo sapien
agtgaggccagaggcttccagcagg

SEQ ID NO: 2315443 - DNA, 25 bp, Homo sapien
gacctcggcgctgcccctgggagga

SEQ ID NO: 2315444 - DNA, 25 bp, Homo sapien
cagcagggacctcggcgctgcccct

SEQ ID NO: 2315445 - DNA, 25 bp, Homo sapien
cagggacctcggcgctgcccctggg

SEQ ID NO: 2315446 - DNA, 25 bp, Homo sapien
gggacctcggcgctgcccctgggag

SEQ ID NO: 2315447 - DNA, 25 bp, Homo sapien
gcagggacttgcccatccgatccac

SEQ ID NO: 2315448 - DNA, 25 bp, Homo sapien
gggacttgcccatccgatccacaca

SEQ ID NO: 2315449 - DNA, 25 bp, Homo sapien
ttagccgctactcccagtggggcag

SEQ ID NO: 2315450 - DNA, 25 bp, Homo sapien
agccgctactcccagtggggcagga

SEQ ID NO: 2315451 - DNA, 25 bp, Homo sapien
tttttgttgagtgatgacagctcca

SEQ ID NO: 2315452 - DNA, 25 bp, Homo sapien
acagctttattgacaccccagccaa

SEQ ID NO: 2315453 - DNA, 25 bp, Homo sapien
ggcctcggttttttgttgagtgatg

SEQ ID NO: 2315454 - DNA, 25 bp, Homo sapien
actctttccaaccagcggtgagggg

SEQ ID NO: 2315455 - DNA, 25 bp, Homo sapien
catgtaggcagaaaggagactaaac

SEQ ID NO: 2315456 - DNA, 25 bp, Homo sapien
gagactaaacaaacacgtattcagc

SEQ ID NO: 2315457 - DNA, 25 bp, Homo sapien
cacctgcttgggtgagcatgtaggc

SEQ ID NO: 2315458 - DNA, 25 bp, Homo sapien
tgacagggccgcttcctgacacctg

SEQ ID NO: 2315459 - DNA, 25 bp, Homo sapien
tgtagagctcttgtcccactcagct

SEQ ID NO: 2315460 - DNA, 25 bp, Homo sapien
tctgctgtctgtcgcagggatcgcc

SEQ ID NO: 2315461 - DNA, 25 bp, Homo sapien
gcctctgggagtgcgataggttatc

SEQ ID NO: 2315462 - DNA, 25 bp, Homo sapien
caaagactaaagtcctttcaggagg

SEQ ID NO: 2315463 - DNA, 25 bp, Homo sapien
cagggttggcgctcccgctcccctc

SEQ ID NO: 2315464 - DNA, 25 bp, Homo sapien
acagggttggcgctcccgctcccct

SEQ ID NO: 2315465 - DNA, 25 bp, Homo sapien
tgtcctctgcagacgcagacgggcc

SEQ ID NO: 2315466 - DNA, 25 bp, Homo sapien
tgtcgggtccattgtaccaagtccg

SEQ ID NO: 2315467 - DNA, 25 bp, Homo sapien
tccatgtgtcgggtccattgtacca

SEQ ID NO: 2315468 - DNA, 25 bp, Homo sapien
cattgtaccaagtccggggctctgt

SEQ ID NO: 2315469 - DNA, 25 bp, Homo sapien
ggggctctgtgcgtctcagtgtttc

SEQ ID NO: 2315470 - DNA, 25 bp, Homo sapien
gctccctcagttgtccctgcgcttg

SEQ ID NO: 2315471 - DNA, 25 bp, Homo sapien
atggcccgatccagcagctccctca

SEQ ID NO: 2315472 - DNA, 25 bp, Homo sapien
ggtaggattgtatagcctcccgcat

SEQ ID NO: 2315473 - DNA, 25 bp, Homo sapien
tgcgcttgctccagcaattgtgcct

SEQ ID NO: 2315474 - DNA, 25 bp, Homo sapien
tcaagcagggacttgcggatgatga

SEQ ID NO: 2315475 - DNA, 25 bp, Homo sapien
ctgccctcatcaatgaagtcgatgg

SEQ ID NO: 2315476 - DNA, 25 bp, Homo sapien
tcaatgaagtcgatggccagggtgc

SEQ ID NO: 2315477 - DNA, 25 bp, Homo sapien
gacacacaggccagcgatgaacatg

SEQ ID NO: 2315478 - DNA, 25 bp, Homo sapien
aacatgtggtagatggtgcggaaat

SEQ ID NO: 2315479 - DNA, 25 bp, Homo sapien
agagcagtagcctatttatatgtac

SEQ ID NO: 2315480 - DNA, 25 bp, Homo sapien
aaggccccgaaacagagagtgctac

SEQ ID NO: 2315481 - DNA, 25 bp, Homo sapien
gctactgcgaacaaatcaacctctt

SEQ ID NO: 2315482 - DNA, 25 bp, Homo sapien
gcttttggtgccccataacgacgac

SEQ ID NO: 2315483 - DNA, 25 bp, Homo sapien
cctttggagcgtctgttgttgtaga

SEQ ID NO: 2315484 - DNA, 25 bp, Homo sapien
tgtttacgtgaaacctccacaatgt

SEQ ID NO: 2315485 - DNA, 25 bp, Homo sapien
ggactaagtgaacaaatctggcacc

SEQ ID NO: 2315486 - DNA, 25 bp, Homo sapien
gaggtaataggatgccggttgttca

SEQ ID NO: 2315487 - DNA, 25 bp, Homo sapien
agctgatgctccacggccacgtgga

SEQ ID NO: 2315488 - DNA, 25 bp, Homo sapien
ctcgaagaccaggacacaacgggag

SEQ ID NO: 2315489 - DNA, 25 bp, Homo sapien
gcgccaatggcagctgtccgaagct

SEQ ID NO: 2315490 - DNA, 25 bp, Homo sapien
acggcgccaacagggtggacagaaa

SEQ ID NO: 2315491 - DNA, 25 bp, Homo sapien
tctcaggaaggagtagcttttcatc

SEQ ID NO: 2315492 - DNA, 25 bp, Homo sapien
ctcgtctggcacgaagggtcccagg

SEQ ID NO: 2315493 - DNA, 25 bp, Homo sapien
tctggcacgaagggtcccaggcaca

SEQ ID NO: 2315494 - DNA, 25 bp, Homo sapien
tcgtctggcacgaagggtcccaggc

SEQ ID NO: 2315495 - DNA, 25 bp, Homo sapien
ctggagaaactgggggcctggatcc

SEQ ID NO: 2315496 - DNA, 25 bp, Homo sapien
gaaactgggggcctggatcccctca

SEQ ID NO: 2315497 - DNA, 25 bp, Homo sapien
tggagaaactgggggcctggatccc

SEQ ID NO: 2315498 - DNA, 25 bp, Homo sapien
gggtaagtctccctgtagatgagtg

SEQ ID NO: 2315499 - DNA, 25 bp, Homo sapien
tagggtaagtctccctgtagatgag

SEQ ID NO: 2315500 - DNA, 25 bp, Homo sapien
ctagggtaagtctccctgtagatga

SEQ ID NO: 2315501 - DNA, 25 bp, Homo sapien
ggtaagtctccctgtagatgagtgt

SEQ ID NO: 2315502 - DNA, 25 bp, Homo sapien
ataattccacctgacatagggcgtc

SEQ ID NO: 2315503 - DNA, 25 bp, Homo sapien
ggcaaagttcttggccacataattc

SEQ ID NO: 2315504 - DNA, 25 bp, Homo sapien
tgggcaaagttcttggccacataat

SEQ ID NO: 2315505 - DNA, 25 bp, Homo sapien
gccacataattccacctgacatagg

SEQ ID NO: 2315506 - DNA, 25 bp, Homo sapien
gctgaagggctctcggctcatgttg

SEQ ID NO: 2315507 - DNA, 25 bp, Homo sapien
ctggcaacgtggcatgcaggataga

SEQ ID NO: 2315508 - DNA, 25 bp, Homo sapien
gatagagagcaccagggcacgggtg

SEQ ID NO: 2315509 - DNA, 25 bp, Homo sapien
agggctctcggctcatgttggcaaa

SEQ ID NO: 2315510 - DNA, 25 bp, Homo sapien
tagcatctcggcaaaggcgttgagc

SEQ ID NO: 2315511 - DNA, 25 bp, Homo sapien
caaaggcgttgagccagcaatggag

SEQ ID NO: 2315512 - DNA, 25 bp, Homo sapien
aaatcgtagcatctcggcaaaggcg

SEQ ID NO: 2315513 - DNA, 25 bp, Homo sapien
tcctgtctccaaatcgtagcatctc

SEQ ID NO: 2315514 - DNA, 25 bp, Homo sapien
gtcatggaccaccacgttccaagtg

SEQ ID NO: 2315515 - DNA, 25 bp, Homo sapien
agaaggacgttgagttccaccagtc

SEQ ID NO: 2315516 - DNA, 25 bp, Homo sapien
cacgttccaagtgcggtagtagttg

SEQ ID NO: 2315517 - DNA, 25 bp, Homo sapien
ctgatacacgtagctgtacagccag

SEQ ID NO: 2315518 - DNA, 25 bp, Homo sapien
ggagaccaggaacacacccagcatg

SEQ ID NO: 2315519 - DNA, 25 bp, Homo sapien
agaagaaccccaggacgaagcagaa

SEQ ID NO: 2315520 - DNA, 25 bp, Homo sapien
aaggaagagtatcagcatgacggga

SEQ ID NO: 2315521 - DNA, 25 bp, Homo sapien
atactcatgggccactgcggagacc

SEQ ID NO: 2315522 - DNA, 25 bp, Homo sapien
ccggtgcgctggtcatgcatcatga

SEQ ID NO: 2315523 - DNA, 25 bp, Homo sapien
agcacgttccatgccgggccggtgc

SEQ ID NO: 2315524 - DNA, 25 bp, Homo sapien
cctggcctagaaacagcatggtcca

SEQ ID NO: 2315525 - DNA, 25 bp, Homo sapien
tacaggctgacctggattccctggc

SEQ ID NO: 2315526 - DNA, 25 bp, Homo sapien
ggtaaggggcagtgccgccgtgcgt

SEQ ID NO: 2315527 - DNA, 25 bp, Homo sapien
ctggggtaaggggcagtgccgccgt

SEQ ID NO: 2315528 - DNA, 25 bp, Homo sapien
gtaaggggcagtgccgccgtgcgta

SEQ ID NO: 2315529 - DNA, 25 bp, Homo sapien
ggggtaaggggcagtgccgccgtgc

SEQ ID NO: 2315530 - DNA, 25 bp, Homo sapien
tatggcaggaccaagatcgaggtgt

SEQ ID NO: 2315531 - DNA, 25 bp, Homo sapien
gcaggaccaagatcgaggtgtcacc

SEQ ID NO: 2315532 - DNA, 25 bp, Homo sapien
tggcaggaccaagatcgaggtgtca

SEQ ID NO: 2315533 - DNA, 25 bp, Homo sapien
caggaccaagatcgaggtgtcacca

SEQ ID NO: 2315534 - DNA, 25 bp, Homo sapien
taggaggatatcctgtacccagccc

SEQ ID NO: 2315535 - DNA, 25 bp, Homo sapien
tgtgatcagttacccacaagtctgc

SEQ ID NO: 2315536 - DNA, 25 bp, Homo sapien
caagtctccctaagacagtcatggg

SEQ ID NO: 2315537 - DNA, 25 bp, Homo sapien
tgcctcgactcagagccaaatttgg

SEQ ID NO: 2315538 - DNA, 25 bp, Homo sapien
ctggatggagctcattcgtgtacaa

SEQ ID NO: 2315539 - DNA, 25 bp, Homo sapien
tcgtgtacaagtcccagtaccgtga

SEQ ID NO: 2315540 - DNA, 25 bp, Homo sapien
ctgggctcgtcagggatgcacccat

SEQ ID NO: 2315541 - DNA, 25 bp, Homo sapien
cacccatgagcgtttcggtggagga

SEQ ID NO: 2315542 - DNA, 25 bp, Homo sapien
tatggaaagatacgggtgcataatg

SEQ ID NO: 2315543 - DNA, 25 bp, Homo sapien
aggtgtacttcttgcctccagatgg

SEQ ID NO: 2315544 - DNA, 25 bp, Homo sapien
tgatagtcttgaagcttagacatca

SEQ ID NO: 2315545 - DNA, 25 bp, Homo sapien
ctgcaaaggtgtacttcttgcctcc

SEQ ID NO: 2315546 - DNA, 25 bp, Homo sapien
ttcatgtctcctcggtccccaggca

SEQ ID NO: 2315547 - DNA, 25 bp, Homo sapien
cggcccaggcttttggtgccttgga

SEQ ID NO: 2315548 - DNA, 25 bp, Homo sapien
cccaggcttttggtgccttggagaa

SEQ ID NO: 2315549 - DNA, 25 bp, Homo sapien
cccggcccaggcttttggtgccttg

SEQ ID NO: 2315550 - DNA, 25 bp, Homo sapien
aaccggcttccgatccctgcacgcg

SEQ ID NO: 2315551 - DNA, 25 bp, Homo sapien
aacctcacacactccaaccggcttc

SEQ ID NO: 2315552 - DNA, 25 bp, Homo sapien
tccgatccctgcacgcgcacccagt

SEQ ID NO: 2315553 - DNA, 25 bp, Homo sapien
ctagagcgagaaaacctcacacact

SEQ ID NO: 2315554 - DNA, 25 bp, Homo sapien
gaagtagcccataccaacagtcatt

SEQ ID NO: 2315555 - DNA, 25 bp, Homo sapien
aattcccgatacatgaagtagccca

SEQ ID NO: 2315556 - DNA, 25 bp, Homo sapien
ctattccaacgggtacaaatggtgc

SEQ ID NO: 2315557 - DNA, 25 bp, Homo sapien
ttccaataagttttgatccctgatc

SEQ ID NO: 2315558 - DNA, 25 bp, Homo sapien
tcaataatgagacgtctaactaaag

SEQ ID NO: 2315559 - DNA, 25 bp, Homo sapien
caataatgagacgtctaactaaagc

SEQ ID NO: 2315560 - DNA, 25 bp, Homo sapien
taacttcaataatgagacgtctaac

SEQ ID NO: 2315561 - DNA, 25 bp, Homo sapien
acttcaataatgagacgtctaacta

SEQ ID NO: 2315562 - DNA, 25 bp, Homo sapien
caagtgcgtttagttgacgtgttta

SEQ ID NO: 2315563 - DNA, 25 bp, Homo sapien
cccgcttgctcattagtcattaatc

SEQ ID NO: 2315564 - DNA, 25 bp, Homo sapien
accatcaagtgcgtttagttgacgt

SEQ ID NO: 2315565 - DNA, 25 bp, Homo sapien
catcaagtgcgtttagttgacgtgt

SEQ ID NO: 2315566 - DNA, 25 bp, Homo sapien
gcaatcacgtgataacccttgatac

SEQ ID NO: 2315567 - DNA, 25 bp, Homo sapien
ggcttgagcaatcacgtgataaccc

SEQ ID NO: 2315568 - DNA, 25 bp, Homo sapien
gagcaatcacgtgataacccttgat

SEQ ID NO: 2315569 - DNA, 25 bp, Homo sapien
ttgagcaatcacgtgataacccttg

SEQ ID NO: 2315570 - DNA, 25 bp, Homo sapien
cacgcatgttggtgcccctgataca

SEQ ID NO: 2315571 - DNA, 25 bp, Homo sapien
ctcagcacgcatgttggtgcccctg

SEQ ID NO: 2315572 - DNA, 25 bp, Homo sapien
catgttggtgcccctgatacaggca

SEQ ID NO: 2315573 - DNA, 25 bp, Homo sapien
tgttggtgcccctgatacaggcatg

SEQ ID NO: 2315574 - DNA, 25 bp, Homo sapien
cgttaagcatatcaaacacatggcc

SEQ ID NO: 2315575 - DNA, 25 bp, Homo sapien
tatcaaacacatggccaggggtacc

SEQ ID NO: 2315576 - DNA, 25 bp, Homo sapien
ctcccgttaagcatatcaaacacat

SEQ ID NO: 2315577 - DNA, 25 bp, Homo sapien
atatcaaacacatggccaggggtac

SEQ ID NO: 2315578 - DNA, 25 bp, Homo sapien
cttgatgtatttgggagacaggtat

SEQ ID NO: 2315579 - DNA, 25 bp, Homo sapien
aggtcaacacttccttcgtgacaag

SEQ ID NO: 2315580 - DNA, 25 bp, Homo sapien
ctggggtgatggtcagggtttcata

SEQ ID NO: 2315581 - DNA, 25 bp, Homo sapien
tggggtgatggtcagggtttcatac

SEQ ID NO: 2315582 - DNA, 25 bp, Homo sapien
tccgggtgttgatgaagatgactgc

SEQ ID NO: 2315583 - DNA, 25 bp, Homo sapien
cctccgggtgttgatgaagatgact

SEQ ID NO: 2315584 - DNA, 25 bp, Homo sapien
tcctccgggtgttgatgaagatgac

SEQ ID NO: 2315585 - DNA, 25 bp, Homo sapien
cttcctccgggtgttgatgaagatg

SEQ ID NO: 2315586 - DNA, 25 bp, Homo sapien
tcgagcatgcatcttctcggtgagc

SEQ ID NO: 2315587 - DNA, 25 bp, Homo sapien
gcatcttctcggtgagccagtccac

SEQ ID NO: 2315588 - DNA, 25 bp, Homo sapien
aaatctcgagcatgcatcttctcgg

SEQ ID NO: 2315589 - DNA, 25 bp, Homo sapien
agtgaaatctcgagcatgcatcttc

SEQ ID NO: 2315590 - DNA, 25 bp, Homo sapien
tccatatctccacgaatggtgaaga

SEQ ID NO: 2315591 - DNA, 25 bp, Homo sapien
ccatatctccacgaatggtgaagac

SEQ ID NO: 2315592 - DNA, 25 bp, Homo sapien
tggtccatatctccacgaatggtga

SEQ ID NO: 2315593 - DNA, 25 bp, Homo sapien
ggtccatatctccacgaatggtgaa

SEQ ID NO: 2315594 - DNA, 25 bp, Homo sapien
gagccataacgaaactccctcaaga

SEQ ID NO: 2315595 - DNA, 25 bp, Homo sapien
agccataacgaaactccctcaagat

SEQ ID NO: 2315596 - DNA, 25 bp, Homo sapien
agagccataacgaaactccctcaag

SEQ ID NO: 2315597 - DNA, 25 bp, Homo sapien
agcaggtcagtggtaatcaaaactg

SEQ ID NO: 2315598 - DNA, 25 bp, Homo sapien
ccagcaggtcagtggtaatcaaaac

SEQ ID NO: 2315599 - DNA, 25 bp, Homo sapien
tggccagcaggtcagtggtaatcaa

SEQ ID NO: 2315600 - DNA, 25 bp, Homo sapien
ctggccagcaggtcagtggtaatca

SEQ ID NO: 2315601 - DNA, 25 bp, Homo sapien
gagttgtagaagatctcgatgtctc

SEQ ID NO: 2315602 - DNA, 25 bp, Homo sapien
agttgtagaagatctcgatgtctcg

SEQ ID NO: 2315603 - DNA, 25 bp, Homo sapien
cacctcgaccgattctatggatatg

SEQ ID NO: 2315604 - DNA, 25 bp, Homo sapien
ctcgaccgattctatggatatggtt

SEQ ID NO: 2315605 - DNA, 25 bp, Homo sapien
agccccccgagatagagccctggct

SEQ ID NO: 2315606 - DNA, 25 bp, Homo sapien
cctcagccccccgagatagagccct

SEQ ID NO: 2315607 - DNA, 25 bp, Homo sapien
tttgtttttgcctcaaaaagtgaca

SEQ ID NO: 2315608 - DNA, 25 bp, Homo sapien
tcagccccccgagatagagccctgg

SEQ ID NO: 2315609 - DNA, 25 bp, Homo sapien
tccctggaataggataataggcaat

SEQ ID NO: 2315610 - DNA, 25 bp, Homo sapien
gccacagtgacctgcgcaatgttta

SEQ ID NO: 2315611 - DNA, 25 bp, Homo sapien
gagctgtgttcaaaaatacatagga

SEQ ID NO: 2315612 - DNA, 25 bp, Homo sapien
tatatgctttgacctactaactttc

SEQ ID NO: 2315613 - DNA, 25 bp, Homo sapien
taaccataaacctggctgagagcgc

SEQ ID NO: 2315614 - DNA, 25 bp, Homo sapien
tgagaaatgccacacggacctgtga

SEQ ID NO: 2315615 - DNA, 25 bp, Homo sapien
gagagcgcttcaggagacaattgcc

SEQ ID NO: 2315616 - DNA, 25 bp, Homo sapien
taatgcctctgtgcaagtccctggg

SEQ ID NO: 2315617 - DNA, 25 bp, Homo sapien
catgcctggccggatatgtaaattt

SEQ ID NO: 2315618 - DNA, 25 bp, Homo sapien
tgcctggccggatatgtaaatttta

SEQ ID NO: 2315619 - DNA, 25 bp, Homo sapien
caagctatccattggcctcggcctc

SEQ ID NO: 2315620 - DNA, 25 bp, Homo sapien
cctggccggatatgtaaattttaat

SEQ ID NO: 2315621 - DNA, 25 bp, Homo sapien
cccgctggctccctggccgcgcggc

SEQ ID NO: 2315622 - DNA, 25 bp, Homo sapien
tgccaggcgcggcctcccgctggct

SEQ ID NO: 2315623 - DNA, 25 bp, Homo sapien
gcctcccgctggctccctggccgcg

SEQ ID NO: 2315624 - DNA, 25 bp, Homo sapien
ggccccagcacaccctgccaacccc

SEQ ID NO: 2315625 - DNA, 25 bp, Homo sapien
tggctcctgcctattgtctgaagaa

SEQ ID NO: 2315626 - DNA, 25 bp, Homo sapien
gctgatttctcacttaaggcaaccc

SEQ ID NO: 2315627 - DNA, 25 bp, Homo sapien
gaactgtcaccaaatcacggtagcg

SEQ ID NO: 2315628 - DNA, 25 bp, Homo sapien
agataggtgttccaagaatccctgg

SEQ ID NO: 2315629 - DNA, 25 bp, Homo sapien
tatcttggaggaggactctagagct

SEQ ID NO: 2315630 - DNA, 25 bp, Homo sapien
tgttgactaaggcagcattcaagag

SEQ ID NO: 2315631 - DNA, 25 bp, Homo sapien
cctggtgcttaatacagagcttgga

SEQ ID NO: 2315632 - DNA, 25 bp, Homo sapien
tccttcatttgactggaagctccct

SEQ ID NO: 2315633 - DNA, 25 bp, Homo sapien
tgggaaccaaactcacacctgctag

SEQ ID NO: 2315634 - DNA, 25 bp, Homo sapien
gcagtgggaaccaaactcacacctg

SEQ ID NO: 2315635 - DNA, 25 bp, Homo sapien
tcacacctgctaggccttcacaagc

SEQ ID NO: 2315636 - DNA, 25 bp, Homo sapien
ctgctaggccttcacaagccaggag

SEQ ID NO: 2315637 - DNA, 25 bp, Homo sapien
acatcagggctacctgcccgctcgc

SEQ ID NO: 2315638 - DNA, 25 bp, Homo sapien
ctgcccgctcgccattctcggcctg

SEQ ID NO: 2315639 - DNA, 25 bp, Homo sapien
atcagggctacctgcccgctcgcca

SEQ ID NO: 2315640 - DNA, 25 bp, Homo sapien
tcgccattctcggcctgcttgctgg

SEQ ID NO: 2315641 - DNA, 25 bp, Homo sapien
tgtcatcatctttgcggctccggga

SEQ ID NO: 2315642 - DNA, 25 bp, Homo sapien
ggctccgggacttatcactgtcttt

SEQ ID NO: 2315643 - DNA, 25 bp, Homo sapien
aggcctcagacaagctgtcatcatc

SEQ ID NO: 2315644 - DNA, 25 bp, Homo sapien
gacttatcactgtcttttcggtgac

SEQ ID NO: 2315645 - DNA, 25 bp, Homo sapien
caaactgtatgagtttgggggatca

SEQ ID NO: 2315646 - DNA, 25 bp, Homo sapien
aaactgtatgagtttgggggatcac

SEQ ID NO: 2315647 - DNA, 25 bp, Homo sapien
caaggcaggagatcaactaccaagg

SEQ ID NO: 2315648 - DNA, 25 bp, Homo sapien
tgagtatgacttgagctggagcctg

SEQ ID NO: 2315649 - DNA, 25 bp, Homo sapien
ccattactgttccagcaaggcagga

SEQ ID NO: 2315650 - DNA, 25 bp, Homo sapien
gagtgggtaagctgtctatcctgtc

SEQ ID NO: 2315651 - DNA, 25 bp, Homo sapien
gggcaataatcaggcatgtcatgag

SEQ ID NO: 2315652 - DNA, 25 bp, Homo sapien
tccagctgttggagaaaggaacctc

SEQ ID NO: 2315653 - DNA, 25 bp, Homo sapien
tcaggcatgtcatgaggccaccact

SEQ ID NO: 2315654 - DNA, 25 bp, Homo sapien
tgatgctgtctaaaggtgctgccat

SEQ ID NO: 2315655 - DNA, 25 bp, Homo sapien
ggtggtaactgctccgaaaggctcc

SEQ ID NO: 2315656 - DNA, 25 bp, Homo sapien
gaataaggatgtgcctctttaggtg

SEQ ID NO: 2315657 - DNA, 25 bp, Homo sapien
tgaaaagaaccattttgttccacta

SEQ ID NO: 2315658 - DNA, 25 bp, Homo sapien
gaaccattttgttccactaccacca

SEQ ID NO: 2315659 - DNA, 25 bp, Homo sapien
agacacctaagtgatcataaatggg

SEQ ID NO: 2315660 - DNA, 25 bp, Homo sapien
aatacaagcgatagactattctccc

SEQ ID NO: 2315661 - DNA, 25 bp, Homo sapien
taaaataaacccaactagagccaca

SEQ ID NO: 2315662 - DNA, 25 bp, Homo sapien
atacaaagccatgcaatctctctgc

SEQ ID NO: 2315663 - DNA, 25 bp, Homo sapien
gatgaaacgcatatcacatatatcg

SEQ ID NO: 2315664 - DNA, 25 bp, Homo sapien
cgcttgtggcgttccaggtggtact

SEQ ID NO: 2315665 - DNA, 25 bp, Homo sapien
tttcaccactgtgcacacgcttgtg

SEQ ID NO: 2315666 - DNA, 25 bp, Homo sapien
gatgacaccgttcacactggtaagg

SEQ ID NO: 2315667 - DNA, 25 bp, Homo sapien
tattatggcgagtaacgctggtggc

SEQ ID NO: 2315668 - DNA, 25 bp, Homo sapien
tcagctgcataaggccagacagatg

SEQ ID NO: 2315669 - DNA, 25 bp, Homo sapien
tctgttcgtgatctgcggtgtccct

SEQ ID NO: 2315670 - DNA, 25 bp, Homo sapien
tgggacctagcaatgcatccaggaa

SEQ ID NO: 2315671 - DNA, 25 bp, Homo sapien
tatagagaaaactgcccgtcggaag

SEQ ID NO: 2315672 - DNA, 25 bp, Homo sapien
tcggaagtcttggactggcaccctt

SEQ ID NO: 2315673 - DNA, 25 bp, Homo sapien
tggcacccttggcacatccgtttgt

SEQ ID NO: 2315674 - DNA, 25 bp, Homo sapien
catccgtttgtgtctgagtaatcga

SEQ ID NO: 2315675 - DNA, 25 bp, Homo sapien
tcctccaggagtgggacaggttcac

SEQ ID NO: 2315676 - DNA, 25 bp, Homo sapien
tggggccactgtcccctgatgcact

SEQ ID NO: 2315677 - DNA, 25 bp, Homo sapien
gggcggtggtgggaccatcagacca

SEQ ID NO: 2315678 - DNA, 25 bp, Homo sapien
gtggtgggaccatcagaccagaggg

SEQ ID NO: 2315679 - DNA, 25 bp, Homo sapien
gagtccaaggttgtgggagccacac

SEQ ID NO: 2315680 - DNA, 25 bp, Homo sapien
gaagccaaagtaagctcagctgcca

SEQ ID NO: 2315681 - DNA, 25 bp, Homo sapien
gaatgctgtaagaacttccccgaga

SEQ ID NO: 2315682 - DNA, 25 bp, Homo sapien
tgtatccacagtttacccgctgaag

SEQ ID NO: 2315683 - DNA, 25 bp, Homo sapien
ggtgccatccactttttggatccag

SEQ ID NO: 2315684 - DNA, 25 bp, Homo sapien
tgggccatgacaacacccactggca

SEQ ID NO: 2315685 - DNA, 25 bp, Homo sapien
gccatcaggtgccaatgtgacatgg

SEQ ID NO: 2315686 - DNA, 25 bp, Homo sapien
aagtttcctcctaaaggcatttgag

SEQ ID NO: 2315687 - DNA, 25 bp, Homo sapien
aaagggcttcatgggccactctcac

SEQ ID NO: 2315688 - DNA, 25 bp, Homo sapien
catgactccttgctcaacacatctg

SEQ ID NO: 2315689 - DNA, 25 bp, Homo sapien
tctgtctcactttaggagtcaatgg

SEQ ID NO: 2315690 - DNA, 25 bp, Homo sapien
tggcagcgaggtagccacataccat

SEQ ID NO: 2315691 - DNA, 25 bp, Homo sapien
tgagcagctgttagccaacttggga

SEQ ID NO: 2315692 - DNA, 25 bp, Homo sapien
aacagctcctactgctcaacaggca

SEQ ID NO: 2315693 - DNA, 25 bp, Homo sapien
ccaacttgggaccagtcttgggttg

SEQ ID NO: 2315694 - DNA, 25 bp, Homo sapien
cctgaatacagtgataggacttggg

SEQ ID NO: 2315695 - DNA, 25 bp, Homo sapien
tagaaacatcctaaccaccaggctg

SEQ ID NO: 2315696 - DNA, 25 bp, Homo sapien
cacccttcatgtttgggcaagagga

SEQ ID NO: 2315697 - DNA, 25 bp, Homo sapien
gggtttggctcaataatatgccatc

SEQ ID NO: 2315698 - DNA, 25 bp, Homo sapien
gaaaattcatgttcacaagccctgg

SEQ ID NO: 2315699 - DNA, 25 bp, Homo sapien
tcagggaaaatcgaatgggtgccat

SEQ ID NO: 2315700 - DNA, 25 bp, Homo sapien
tgacagcttggcactcaggttcagc

SEQ ID NO: 2315701 - DNA, 25 bp, Homo sapien
agatccagcagaacccttgaacagg

SEQ ID NO: 2315702 - DNA, 25 bp, Homo sapien
gctcacatgcagaaagatgcccctg

SEQ ID NO: 2315703 - DNA, 25 bp, Homo sapien
tgcagcggtgtgagtcagtggcttc

SEQ ID NO: 2315704 - DNA, 25 bp, Homo sapien
tgaggcatcttccagtgctaggccc

SEQ ID NO: 2315705 - DNA, 25 bp, Homo sapien
cttccagtgctaggccccatgctgg

SEQ ID NO: 2315706 - DNA, 25 bp, Homo sapien
gcctctgcagcggtgtgagtcagtg

SEQ ID NO: 2315707 - DNA, 25 bp, Homo sapien
tggtctctgagagcgtgccctactt

SEQ ID NO: 2315708 - DNA, 25 bp, Homo sapien
tgtaaccctccaatgtcaagccatg

SEQ ID NO: 2315709 - DNA, 25 bp, Homo sapien
cagttgataaaaccccagggccaca

SEQ ID NO: 2315710 - DNA, 25 bp, Homo sapien
caagccatgggcgtgatcagtagct

SEQ ID NO: 2315711 - DNA, 25 bp, Homo sapien
ttaaatatcctaaatatatcacgaa

SEQ ID NO: 2315712 - DNA, 25 bp, Homo sapien
tttaaatatcctaaatatatcacga

SEQ ID NO: 2315713 - DNA, 25 bp, Homo sapien
tatttaaatatcctaaatatatcac

SEQ ID NO: 2315714 - DNA, 25 bp, Homo sapien
taaatatcctaaatatatcacgaag

SEQ ID NO: 2315715 - DNA, 25 bp, Homo sapien
tgtctccaactcttttgagaacttg

SEQ ID NO: 2315716 - DNA, 25 bp, Homo sapien
cagtgtttcactatacttaacatcc

SEQ ID NO: 2315717 - DNA, 25 bp, Homo sapien
cctacaatgtggtgtatgcaggtga

SEQ ID NO: 2315718 - DNA, 25 bp, Homo sapien
gaagcttcccatgtatgtccaggcc

SEQ ID NO: 2315719 - DNA, 25 bp, Homo sapien
tatgcaaggttctcacgggtcctcc

SEQ ID NO: 2315720 - DNA, 25 bp, Homo sapien
tacgaatcccagtgtgagggtcctg

SEQ ID NO: 2315721 - DNA, 25 bp, Homo sapien
taaacaatgtgagatctggagcctg

SEQ ID NO: 2315722 - DNA, 25 bp, Homo sapien
gaaatgctgtattagaggcctctgg

SEQ ID NO: 2315723 - DNA, 25 bp, Homo sapien
ctgtccatgccctctgatgcccaca

SEQ ID NO: 2315724 - DNA, 25 bp, Homo sapien
ctctgatgcccacacacattccact

SEQ ID NO: 2315725 - DNA, 25 bp, Homo sapien
tgccctctgatgcccacacacattc

SEQ ID NO: 2315726 - DNA, 25 bp, Homo sapien
ctgatgcccacacacattccactgg

SEQ ID NO: 2315727 - DNA, 25 bp, Homo sapien
agctcaaacaggcagctcggctcat

SEQ ID NO: 2315728 - DNA, 25 bp, Homo sapien
taggccccaagcgtaggcccagaga

SEQ ID NO: 2315729 - DNA, 25 bp, Homo sapien
ggtgggcaggcttcttattcctagg

SEQ ID NO: 2315730 - DNA, 25 bp, Homo sapien
tcatggagcaagggtaaactgggca

SEQ ID NO: 2315731 - DNA, 25 bp, Homo sapien
cggctcactccagggcatggactgt

SEQ ID NO: 2315732 - DNA, 25 bp, Homo sapien
catgagacaggcatagtgtgctcta

SEQ ID NO: 2315733 - DNA, 25 bp, Homo sapien
gtagacatgtctaccccggctcact

SEQ ID NO: 2315734 - DNA, 25 bp, Homo sapien
caacttccagaataagaatttggga

SEQ ID NO: 2315735 - DNA, 25 bp, Homo sapien
tactgattattgtcactcctttctt

SEQ ID NO: 2315736 - DNA, 25 bp, Homo sapien
tatggtccagacacctgagggaggc

SEQ ID NO: 2315737 - DNA, 25 bp, Homo sapien
ttataatggcctacaagaccctctg

SEQ ID NO: 2315738 - DNA, 25 bp, Homo sapien
aaagatgcccgcagtccggtagagc

SEQ ID NO: 2315739 - DNA, 25 bp, Homo sapien
ggcaagccgcataacttcccagtgt

SEQ ID NO: 2315740 - DNA, 25 bp, Homo sapien
tctgcggggacgccccggacacgtc

SEQ ID NO: 2315741 - DNA, 25 bp, Homo sapien
aatagagcttgtatggtgcccaaca

SEQ ID NO: 2315742 - DNA, 25 bp, Homo sapien
cactcagcagggaagtcatgccgtt

SEQ ID NO: 2315743 - DNA, 25 bp, Homo sapien
tagcccggcatcttgacagttccag

SEQ ID NO: 2315744 - DNA, 25 bp, Homo sapien
catggatataccaggcctcgaaggc

SEQ ID NO: 2315745 - DNA, 25 bp, Homo sapien
tctccgtaggaagctcatgctggga

SEQ ID NO: 2315746 - DNA, 25 bp, Homo sapien
acgatgagcacagcaagggacagca

SEQ ID NO: 2315747 - DNA, 25 bp, Homo sapien
ggaaccagttgagtacaccagcctg

SEQ ID NO: 2315748 - DNA, 25 bp, Homo sapien
gctatgaaggactccaccggactct

SEQ ID NO: 2315749 - DNA, 25 bp, Homo sapien
cacggtgaagagtcccaccactgcc

SEQ ID NO: 2315750 - DNA, 25 bp, Homo sapien
tgaacatattccgagtgcctgtttt

SEQ ID NO: 2315751 - DNA, 25 bp, Homo sapien
ctgaacatattccgagtgcctgttt

SEQ ID NO: 2315752 - DNA, 25 bp, Homo sapien
gctgaacatattccgagtgcctgtt

SEQ ID NO: 2315753 - DNA, 25 bp, Homo sapien
tcagtaggtgaaggtacccgcagct

SEQ ID NO: 2315754 - DNA, 25 bp, Homo sapien
taggtgaaggtacccgcagctcagc

SEQ ID NO: 2315755 - DNA, 25 bp, Homo sapien
ctcctcagtaggtgaaggtacccgc

SEQ ID NO: 2315756 - DNA, 25 bp, Homo sapien
gctcaggggcatagggctcctcagt

SEQ ID NO: 2315757 - DNA, 25 bp, Homo sapien
taaatgggagtaacacagagggaac

SEQ ID NO: 2315758 - DNA, 25 bp, Homo sapien
gagagatctgtacaatcccggatag

SEQ ID NO: 2315759 - DNA, 25 bp, Homo sapien
tcccagctatcttgtcctggagtgg

SEQ ID NO: 2315760 - DNA, 25 bp, Homo sapien
ggaattcaagagtctgtcccagcta

SEQ ID NO: 2315761 - DNA, 25 bp, Homo sapien
gagctcgccctctttcctaggtaca

SEQ ID NO: 2315762 - DNA, 25 bp, Homo sapien
ccagagctcgccctctttcctaggt

SEQ ID NO: 2315763 - DNA, 25 bp, Homo sapien
cgccccagagctcgccctctttcct

SEQ ID NO: 2315764 - DNA, 25 bp, Homo sapien
gctcgccctctttcctaggtacagg

SEQ ID NO: 2315765 - DNA, 25 bp, Homo sapien
gctcacgagtcccttccggccttac

SEQ ID NO: 2315766 - DNA, 25 bp, Homo sapien
acgtacccacgctcacgagtccctt

SEQ ID NO: 2315767 - DNA, 25 bp, Homo sapien
acccacgctcacgagtcccttccgg

SEQ ID NO: 2315768 - DNA, 25 bp, Homo sapien
tcagcacgtacccacgctcacgagt

SEQ ID NO: 2315769 - DNA, 25 bp, Homo sapien
gctgcttagcagagtcccaaagttg

SEQ ID NO: 2315770 - DNA, 25 bp, Homo sapien
tcaaggcgggcagcaactcttcagc

SEQ ID NO: 2315771 - DNA, 25 bp, Homo sapien
gcttagcagagtcccaaagttgact

SEQ ID NO: 2315772 - DNA, 25 bp, Homo sapien
cttcaaggcgggcagcaactcttca

SEQ ID NO: 2315773 - DNA, 25 bp, Homo sapien
tggaaagccaggtgtatcccgagcc

SEQ ID NO: 2315774 - DNA, 25 bp, Homo sapien
aggtgtatcccgagccaggcagcac

SEQ ID NO: 2315775 - DNA, 25 bp, Homo sapien
tcagtttggaaagccaggtgtatcc

SEQ ID NO: 2315776 - DNA, 25 bp, Homo sapien
aaacagctcagtttggaaagccagg

SEQ ID NO: 2315777 - DNA, 25 bp, Homo sapien
aaaaccagctggagggttggacagg

SEQ ID NO: 2315778 - DNA, 25 bp, Homo sapien
tgctgggaaaaccagctggagggtt

SEQ ID NO: 2315779 - DNA, 25 bp, Homo sapien
ggaaaaccagctggagggttggaca

SEQ ID NO: 2315780 - DNA, 25 bp, Homo sapien
accagctggagggttggacaggaac

SEQ ID NO: 2315781 - DNA, 25 bp, Homo sapien
gtcagctgctggttgcaagccctca

SEQ ID NO: 2315782 - DNA, 25 bp, Homo sapien
caagccctcaggatggcatcacaag

SEQ ID NO: 2315783 - DNA, 25 bp, Homo sapien
ttgtctcctctcagcatcagatcgg

SEQ ID NO: 2315784 - DNA, 25 bp, Homo sapien
cccagatgcctagggcaagctagct

SEQ ID NO: 2315785 - DNA, 25 bp, Homo sapien
cagtaagacaaagagaattcgttcc

SEQ ID NO: 2315786 - DNA, 25 bp, Homo sapien
ctgggcttccttgtgcagcagcatt

SEQ ID NO: 2315787 - DNA, 25 bp, Homo sapien
gcagcattccgcagtaagacaaaga

SEQ ID NO: 2315788 - DNA, 25 bp, Homo sapien
aagagaattcgttccaggtagaggg

SEQ ID NO: 2315789 - DNA, 25 bp, Homo sapien
gctgcaaatgcagctcgccgttcca

SEQ ID NO: 2315790 - DNA, 25 bp, Homo sapien
cgagccacggcctcatagtcctggg

SEQ ID NO: 2315791 - DNA, 25 bp, Homo sapien
tcctccaagagtactaggaagctca

SEQ ID NO: 2315792 - DNA, 25 bp, Homo sapien
gagcagcctcgcgagagcactgcac

SEQ ID NO: 2315793 - DNA, 25 bp, Homo sapien
ttggagaagcaaagtgaggaacctc

SEQ ID NO: 2315794 - DNA, 25 bp, Homo sapien
ggagaagcaaagtgaggaacctcac

SEQ ID NO: 2315795 - DNA, 25 bp, Homo sapien
tgttggagaagcaaagtgaggaacc

SEQ ID NO: 2315796 - DNA, 25 bp, Homo sapien
ctgttggagaagcaaagtgaggaac

SEQ ID NO: 2315797 - DNA, 25 bp, Homo sapien
caaatagctgatgggcagctaccgc

SEQ ID NO: 2315798 - DNA, 25 bp, Homo sapien
ttcatttagaccatggccactggca

SEQ ID NO: 2315799 - DNA, 25 bp, Homo sapien
caggtcatctaggaaatcagcatct

SEQ ID NO: 2315800 - DNA, 25 bp, Homo sapien
caaggctctgatcacgtgcctggag

SEQ ID NO: 2315801 - DNA, 25 bp, Homo sapien
agaagcccagaagagctccctctct

SEQ ID NO: 2315802 - DNA, 25 bp, Homo sapien
gcccagaagagctccctctctcacc

SEQ ID NO: 2315803 - DNA, 25 bp, Homo sapien
aaagaagcccagaagagctccctct

SEQ ID NO: 2315804 - DNA, 25 bp, Homo sapien
ggagaaagaagcccagaagagctcc

SEQ ID NO: 2315805 - DNA, 25 bp, Homo sapien
atggtggcggctccagcaaaagcga

SEQ ID NO: 2315806 - DNA, 25 bp, Homo sapien
cagctgacatagctgaaggctaggg

SEQ ID NO: 2315807 - DNA, 25 bp, Homo sapien
caaaagcgacggcagtgttccaagg

SEQ ID NO: 2315808 - DNA, 25 bp, Homo sapien
ccttaggtaactgtgagccttctcc

SEQ ID NO: 2315809 - DNA, 25 bp, Homo sapien
gcatcaagtctatagcgcctcttgg

SEQ ID NO: 2315810 - DNA, 25 bp, Homo sapien
aagaggctcagaatggcatcaagtc

SEQ ID NO: 2315811 - DNA, 25 bp, Homo sapien
gctctcatacaatgcccgaagtggg

SEQ ID NO: 2315812 - DNA, 25 bp, Homo sapien
agcgcctcttggtgcctcgttccag

SEQ ID NO: 2315813 - DNA, 25 bp, Homo sapien
tagaggtgaagtccctgaaagtaca

SEQ ID NO: 2315814 - DNA, 25 bp, Homo sapien
taaaccaccacagtgtagaggtgaa

SEQ ID NO: 2315815 - DNA, 25 bp, Homo sapien
ggtgaagtccctgaaagtacatctg

SEQ ID NO: 2315816 - DNA, 25 bp, Homo sapien
cacagtgtagaggtgaagtccctga

SEQ ID NO: 2315817 - DNA, 25 bp, Homo sapien
tcttggcccgacaggccctctaagg

SEQ ID NO: 2315818 - DNA, 25 bp, Homo sapien
tccagcatccagacaacggtagatt

SEQ ID NO: 2315819 - DNA, 25 bp, Homo sapien
atgtggtccgtcagctcttggcccg

SEQ ID NO: 2315820 - DNA, 25 bp, Homo sapien
tccactagttgggtcaggtcagcca

SEQ ID NO: 2315821 - DNA, 25 bp, Homo sapien
gaagctgtaggccaaattactggtg

SEQ ID NO: 2315822 - DNA, 25 bp, Homo sapien
aaacccaggtgctgacagagcggct

SEQ ID NO: 2315823 - DNA, 25 bp, Homo sapien
cacctcgggataagtgcctggcttc

SEQ ID NO: 2315824 - DNA, 25 bp, Homo sapien
caggcctcggcatagagcttgtgac

SEQ ID NO: 2315825 - DNA, 25 bp, Homo sapien
tcctttcctgcatctctcattccct

SEQ ID NO: 2315826 - DNA, 25 bp, Homo sapien
cacataagctcctttcctgcatctc

SEQ ID NO: 2315827 - DNA, 25 bp, Homo sapien
acataagctcctttcctgcatctct

SEQ ID NO: 2315828 - DNA, 25 bp, Homo sapien
ttcctgcatctctcattcccttgta

SEQ ID NO: 2315829 - DNA, 25 bp, Homo sapien
tatagcagcctgattacccggtctt

SEQ ID NO: 2315830 - DNA, 25 bp, Homo sapien
cgccaatgcatcagttcacaggtat

SEQ ID NO: 2315831 - DNA, 25 bp, Homo sapien
tcacagcgaagtcagggaaatccaa

SEQ ID NO: 2315832 - DNA, 25 bp, Homo sapien
taatccttggcttctcgcaccgatc

SEQ ID NO: 2315833 - DNA, 25 bp, Homo sapien
ctgaccagagaaagggaacagacca

SEQ ID NO: 2315834 - DNA, 25 bp, Homo sapien
gaccagagaaagggaacagaccaaa

SEQ ID NO: 2315835 - DNA, 25 bp, Homo sapien
tgaccagagaaagggaacagaccaa

SEQ ID NO: 2315836 - DNA, 25 bp, Homo sapien
aaaatcaccatcttgcagccctggg

SEQ ID NO: 2315837 - DNA, 25 bp, Homo sapien
ttgacccgaacccagaaagtgactg

SEQ ID NO: 2315838 - DNA, 25 bp, Homo sapien
caaactctctacttgtagccggaag

SEQ ID NO: 2315839 - DNA, 25 bp, Homo sapien
tacagggttgcagggctgccagcca

SEQ ID NO: 2315840 - DNA, 25 bp, Homo sapien
cagttctaccaggtgggtggctcgt

SEQ ID NO: 2315841 - DNA, 25 bp, Homo sapien
tgaagcgttcctgtccagtgtcggc

SEQ ID NO: 2315842 - DNA, 25 bp, Homo sapien
gccactgaggctgtctcgcagagtc

SEQ ID NO: 2315843 - DNA, 25 bp, Homo sapien
cgtaaagtcgtggtagcagagcacc

SEQ ID NO: 2315844 - DNA, 25 bp, Homo sapien
agtatctgccatagcgccctgggaa

SEQ ID NO: 2315845 - DNA, 25 bp, Homo sapien
gaagatgtgcttaagctgggcctac

SEQ ID NO: 2315846 - DNA, 25 bp, Homo sapien
cctgggaagggctagctgcagaaca

SEQ ID NO: 2315847 - DNA, 25 bp, Homo sapien
tgctcccatggccacaagatgaagg

SEQ ID NO: 2315848 - DNA, 25 bp, Homo sapien
gcttcccggatagcatccagagcag

SEQ ID NO: 2315849 - DNA, 25 bp, Homo sapien
agagtacagatgtaaagccacagca

SEQ ID NO: 2315850 - DNA, 25 bp, Homo sapien
tttggcttccagagtacagatgtaa

SEQ ID NO: 2315851 - DNA, 25 bp, Homo sapien
aggcctgtgctttatcgtccagaag

SEQ ID NO: 2315852 - DNA, 25 bp, Homo sapien
catagttcaggtcattgacttcaaa

SEQ ID NO: 2315853 - DNA, 25 bp, Homo sapien
ggagtttatcttcatagttcaggtc

SEQ ID NO: 2315854 - DNA, 25 bp, Homo sapien
tgggctctccgatcccgctcgatac

SEQ ID NO: 2315855 - DNA, 25 bp, Homo sapien
attcctccaagttaccaggggcctg

SEQ ID NO: 2315856 - DNA, 25 bp, Homo sapien
ctgctggagacaccgtacagctggg

SEQ ID NO: 2315857 - DNA, 25 bp, Homo sapien
gctgtctgctggagacaccgtacag

SEQ ID NO: 2315858 - DNA, 25 bp, Homo sapien
tgtctgctggagacaccgtacagct

SEQ ID NO: 2315859 - DNA, 25 bp, Homo sapien
tctgctggagacaccgtacagctgg

SEQ ID NO: 2315860 - DNA, 25 bp, Homo sapien
gctgccttcgagtggtccttcagtc

SEQ ID NO: 2315861 - DNA, 25 bp, Homo sapien
gtctctcagagacaatccgtagcag

SEQ ID NO: 2315862 - DNA, 25 bp, Homo sapien
acaatccgtagcagcaggaggacct

SEQ ID NO: 2315863 - DNA, 25 bp, Homo sapien
cttcgagtggtccttcagtctctca

SEQ ID NO: 2315864 - DNA, 25 bp, Homo sapien
tcagtagtctgatcgagatgcttca

SEQ ID NO: 2315865 - DNA, 25 bp, Homo sapien
aaggagcaggtatgtgtcagtagtc

SEQ ID NO: 2315866 - DNA, 25 bp, Homo sapien
agttgacttcgaagcagatcacagg

SEQ ID NO: 2315867 - DNA, 25 bp, Homo sapien
tctggtgagtccagtagagttgact

SEQ ID NO: 2315868 - DNA, 25 bp, Homo sapien
tggacacgcagcaagtaccaagcct

SEQ ID NO: 2315869 - DNA, 25 bp, Homo sapien
acgggaggctaaggtaagctgccac

SEQ ID NO: 2315870 - DNA, 25 bp, Homo sapien
aggatcccgaagcacagacagcagc

SEQ ID NO: 2315871 - DNA, 25 bp, Homo sapien
taccaagccttggaggacttctgga

SEQ ID NO: 2315872 - DNA, 25 bp, Homo sapien
tagtccaaaaacgatgtctccacag

SEQ ID NO: 2315873 - DNA, 25 bp, Homo sapien
tctgagttgagagaatgtcactgcc

SEQ ID NO: 2315874 - DNA, 25 bp, Homo sapien
agagctatctcaggtgtctgccagc

SEQ ID NO: 2315875 - DNA, 25 bp, Homo sapien
cttcggaggagcttatgggagtcta

SEQ ID NO: 2315876 - DNA, 25 bp, Homo sapien
cactcacactacccaggcggcccag

SEQ ID NO: 2315877 - DNA, 25 bp, Homo sapien
ttgtaagttttagggcctccaagca

SEQ ID NO: 2315878 - DNA, 25 bp, Homo sapien
tgcagctttgttgtaagttttaggg

SEQ ID NO: 2315879 - DNA, 25 bp, Homo sapien
aaaggccttggcttcactcacacta

SEQ ID NO: 2315880 - DNA, 25 bp, Homo sapien
tttggagatttgcaaggcacatccg

SEQ ID NO: 2315881 - DNA, 25 bp, Homo sapien
taagctgacttaaaggctccctggg

SEQ ID NO: 2315882 - DNA, 25 bp, Homo sapien
gcacatccgcatactgaaggacacg

SEQ ID NO: 2315883 - DNA, 25 bp, Homo sapien
tagggaaacactgtacactagatct

SEQ ID NO: 2315884 - DNA, 25 bp, Homo sapien
cagctcgcccttcagcaccaggaac

SEQ ID NO: 2315885 - DNA, 25 bp, Homo sapien
tgctgcaggtccgactgacagagat

SEQ ID NO: 2315886 - DNA, 25 bp, Homo sapien
ggtccgactgacagagatcaatgtc

SEQ ID NO: 2315887 - DNA, 25 bp, Homo sapien
atcaatgtcattgcgggccagctcc

SEQ ID NO: 2315888 - DNA, 25 bp, Homo sapien
cttctgcaggctctcgtttgatggc

SEQ ID NO: 2315889 - DNA, 25 bp, Homo sapien
tttgatggctggttcaggccctcca

SEQ ID NO: 2315890 - DNA, 25 bp, Homo sapien
agtggccaccagctctagagcaggg

SEQ ID NO: 2315891 - DNA, 25 bp, Homo sapien
aatacccagcgcagacagactgctg

SEQ ID NO: 2315892 - DNA, 25 bp, Homo sapien
caaaaagttgggtagtacagcagct

SEQ ID NO: 2315893 - DNA, 25 bp, Homo sapien
gccacctagttttgtgagggcccaa

SEQ ID NO: 2315894 - DNA, 25 bp, Homo sapien
acgtttttggccctgagtcttagag

SEQ ID NO: 2315895 - DNA, 25 bp, Homo sapien
gagcagaggctaacttttggcgccc

SEQ ID NO: 2315896 - DNA, 25 bp, Homo sapien
cttgaggcgcgtctggactctctgt

SEQ ID NO: 2315897 - DNA, 25 bp, Homo sapien
tgaggcgcgtctggactctctgttg

SEQ ID NO: 2315898 - DNA, 25 bp, Homo sapien
agacttcctcaaacaccgtgaaggg

SEQ ID NO: 2315899 - DNA, 25 bp, Homo sapien
caggcttgctctctgtagggcagac

SEQ ID NO: 2315900 - DNA, 25 bp, Homo sapien
tgacagccaacactctagatcaggg

SEQ ID NO: 2315901 - DNA, 25 bp, Homo sapien
ggtcttcagtgacaagacaccttgt

SEQ ID NO: 2315902 - DNA, 25 bp, Homo sapien
gtgaaagatgttggcctggcacagt

SEQ ID NO: 2315903 - DNA, 25 bp, Homo sapien
caccttgtgacagcaggtggcgtag

SEQ ID NO: 2315904 - DNA, 25 bp, Homo sapien
tcctgccattcaggccagggttccc

SEQ ID NO: 2315905 - DNA, 25 bp, Homo sapien
aagcagtgccccgtctcttaggctc

SEQ ID NO: 2315906 - DNA, 25 bp, Homo sapien
gggcaaccacggcatccgtctttag

SEQ ID NO: 2315907 - DNA, 25 bp, Homo sapien
gcatccgtctttaggctcaggccct

SEQ ID NO: 2315908 - DNA, 25 bp, Homo sapien
ctgaggatctcaaagctcatttttc

SEQ ID NO: 2315909 - DNA, 25 bp, Homo sapien
tcatttttctccagttgtcagtcag

SEQ ID NO: 2315910 - DNA, 25 bp, Homo sapien
cctcagggatggtcctcatgatctc

SEQ ID NO: 2315911 - DNA, 25 bp, Homo sapien
tggtcactggccctctggggacgcc

SEQ ID NO: 2315912 - DNA, 25 bp, Homo sapien
ggctgagtcttccccgtcagagccc

SEQ ID NO: 2315913 - DNA, 25 bp, Homo sapien
tgaggctgagtcttccccgtcagag

SEQ ID NO: 2315914 - DNA, 25 bp, Homo sapien
ctgaggctgagtcttccccgtcaga

SEQ ID NO: 2315915 - DNA, 25 bp, Homo sapien
gaggctgagtcttccccgtcagagc

SEQ ID NO: 2315916 - DNA, 25 bp, Homo sapien
ctcagggcccggagctggagtcttc

SEQ ID NO: 2315917 - DNA, 25 bp, Homo sapien
gggtcaaaagccctagaggctcagc

SEQ ID NO: 2315918 - DNA, 25 bp, Homo sapien
gaacgtcaggacacttggtacagct

SEQ ID NO: 2315919 - DNA, 25 bp, Homo sapien
tactggatccagatccgaacccagc

SEQ ID NO: 2315920 - DNA, 25 bp, Homo sapien
cacaggttcagaggctactggatcc

SEQ ID NO: 2315921 - DNA, 25 bp, Homo sapien
gcatagagcccactaggaggacagt

SEQ ID NO: 2315922 - DNA, 25 bp, Homo sapien
ggacagtgactaatgccccggaaag

SEQ ID NO: 2315923 - DNA, 25 bp, Homo sapien
gacagactcggtgacaaggaaagca

SEQ ID NO: 2315924 - DNA, 25 bp, Homo sapien
cagtggcataaggatcccggtggcc

SEQ ID NO: 2315925 - DNA, 25 bp, Homo sapien
ccagggggacatctccaggcatctc

SEQ ID NO: 2315926 - DNA, 25 bp, Homo sapien
aagtgatcctcggtgcttctgggcc

SEQ ID NO: 2315927 - DNA, 25 bp, Homo sapien
ccctgcagctggtctgctatttcaa

SEQ ID NO: 2315928 - DNA, 25 bp, Homo sapien
ggatgcgggccagggggacatctcc

SEQ ID NO: 2315929 - DNA, 25 bp, Homo sapien
tgctctaatagctccctgtgcacag

SEQ ID NO: 2315930 - DNA, 25 bp, Homo sapien
ccagctcccaagtaagaagatgcag

SEQ ID NO: 2315931 - DNA, 25 bp, Homo sapien
cctggtcactagaggtcaaggtgct

SEQ ID NO: 2315932 - DNA, 25 bp, Homo sapien
cagtcatctgaactcacctctgagg

SEQ ID NO: 2315933 - DNA, 25 bp, Homo sapien
gtccttttccagccgggtcagcagg

SEQ ID NO: 2315934 - DNA, 25 bp, Homo sapien
tgttgcccacggttccgggctggag

SEQ ID NO: 2315935 - DNA, 25 bp, Homo sapien
ccagccgggtcagcaggagggtgtt

SEQ ID NO: 2315936 - DNA, 25 bp, Homo sapien
tggccagtgggaatctgcacactga

SEQ ID NO: 2315937 - DNA, 25 bp, Homo sapien
agcttgacccgaagcccaatccagc

SEQ ID NO: 2315938 - DNA, 25 bp, Homo sapien
agaatgtgagcagcttgacccgaag

SEQ ID NO: 2315939 - DNA, 25 bp, Homo sapien
ctgtgagagctctgcttgtccacgt

SEQ ID NO: 2315940 - DNA, 25 bp, Homo sapien
tccacgtgatcaccatctctccctc

SEQ ID NO: 2315941 - DNA, 25 bp, Homo sapien
tgtccaccattctcgcttgtcagta

SEQ ID NO: 2315942 - DNA, 25 bp, Homo sapien
tctcgcttgtcagtacagctgctgt

SEQ ID NO: 2315943 - DNA, 25 bp, Homo sapien
atcctgtggtccagtgccagccgcc

SEQ ID NO: 2315944 - DNA, 25 bp, Homo sapien
tggatggcatcaaactcattcagga

SEQ ID NO: 2315945 - DNA, 25 bp, Homo sapien
tagcagctcctgtaggcgggaggcc

SEQ ID NO: 2315946 - DNA, 25 bp, Homo sapien
agcacagacttctctagggaagcga

SEQ ID NO: 2315947 - DNA, 25 bp, Homo sapien
ggctcctcactggacggcagcagca

SEQ ID NO: 2315948 - DNA, 25 bp, Homo sapien
cagagtgcggtcaggatatttccag

SEQ ID NO: 2315949 - DNA, 25 bp, Homo sapien
tgagggcaccggcaccactgagcat

SEQ ID NO: 2315950 - DNA, 25 bp, Homo sapien
agggcaccggcaccactgagcatga

SEQ ID NO: 2315951 - DNA, 25 bp, Homo sapien
gagggcaccggcaccactgagcatg

SEQ ID NO: 2315952 - DNA, 25 bp, Homo sapien
gtgagggcaccggcaccactgagca

SEQ ID NO: 2315953 - DNA, 25 bp, Homo sapien
tgggttgggcacagcccgtaggcca

SEQ ID NO: 2315954 - DNA, 25 bp, Homo sapien
gctattgcttggtactgtcaggccc

SEQ ID NO: 2315955 - DNA, 25 bp, Homo sapien
ggaccaagacaaggtggctattgct

SEQ ID NO: 2315956 - DNA, 25 bp, Homo sapien
cctgtagacgtcctactgcctcatt

SEQ ID NO: 2315957 - DNA, 25 bp, Homo sapien
gaggctgggcatgctttcccacggc

SEQ ID NO: 2315958 - DNA, 25 bp, Homo sapien
gctgagtaggaagcggaaggagggc

SEQ ID NO: 2315959 - DNA, 25 bp, Homo sapien
agtagctgagtaggaagcggaagga

SEQ ID NO: 2315960 - DNA, 25 bp, Homo sapien
gatggagtagctgagtaggaagcgg

SEQ ID NO: 2315961 - DNA, 25 bp, Homo sapien
attggctcgaaattgctcctctgtg

SEQ ID NO: 2315962 - DNA, 25 bp, Homo sapien
gacatagaaggtacttcgtggatcc

SEQ ID NO: 2315963 - DNA, 25 bp, Homo sapien
ttcgtggatccaccccttgactcag

SEQ ID NO: 2315964 - DNA, 25 bp, Homo sapien
tctgtgcttgacaggttattgtgag

SEQ ID NO: 2315965 - DNA, 25 bp, Homo sapien
aaatcatgctttgtcagggcttcct

SEQ ID NO: 2315966 - DNA, 25 bp, Homo sapien
caaatcatgctttgtcagggcttcc

SEQ ID NO: 2315967 - DNA, 25 bp, Homo sapien
tacaaatcatgctttgtcagggctt

SEQ ID NO: 2315968 - DNA, 25 bp, Homo sapien
aatcatgctttgtcagggcttcctg

SEQ ID NO: 2315969 - DNA, 25 bp, Homo sapien
tgcccatcaaggaagcgggcaccag

SEQ ID NO: 2315970 - DNA, 25 bp, Homo sapien
actgcccgacagctcagccgcagga

SEQ ID NO: 2315971 - DNA, 25 bp, Homo sapien
gtacttgagcacgatgccagccccc

SEQ ID NO: 2315972 - DNA, 25 bp, Homo sapien
gccgcactgctacagccaaacagca

SEQ ID NO: 2315973 - DNA, 25 bp, Homo sapien
gcttggcgggcctggtttacatagt

SEQ ID NO: 2315974 - DNA, 25 bp, Homo sapien
aatgtcgcggtcagtcacatcccag

SEQ ID NO: 2315975 - DNA, 25 bp, Homo sapien
gcagcagagcttccgtgtagcggtc

SEQ ID NO: 2315976 - DNA, 25 bp, Homo sapien
ccagagattacccagaaacaagggg

SEQ ID NO: 2315977 - DNA, 25 bp, Homo sapien
gctataggtgcagccccaataagat

SEQ ID NO: 2315978 - DNA, 25 bp, Homo sapien
cataggctataggtgcagccccaat

SEQ ID NO: 2315979 - DNA, 25 bp, Homo sapien
caagccataggctataggtgcagcc

SEQ ID NO: 2315980 - DNA, 25 bp, Homo sapien
agacaggcaagccataggctatagg

SEQ ID NO: 2315981 - DNA, 25 bp, Homo sapien
tagcatcaataagacagctccatgg

SEQ ID NO: 2315982 - DNA, 25 bp, Homo sapien
ggaggtagaacagttatgaggcttc

SEQ ID NO: 2315983 - DNA, 25 bp, Homo sapien
gaggcttctagcatcaataagacag

SEQ ID NO: 2315984 - DNA, 25 bp, Homo sapien
gattaaatctaaccttggaggtaga

SEQ ID NO: 2315985 - DNA, 25 bp, Homo sapien
tgcgccagacagctctatgatcctc

SEQ ID NO: 2315986 - DNA, 25 bp, Homo sapien
ggactcctgcctacaaggaactgca

SEQ ID NO: 2315987 - DNA, 25 bp, Homo sapien
tatgatcctccgtcccggaagggaa

SEQ ID NO: 2315988 - DNA, 25 bp, Homo sapien
gacttaacgaagaggaagtctctcg

SEQ ID NO: 2315989 - DNA, 25 bp, Homo sapien
gattcagctccgtgatgttaataga

SEQ ID NO: 2315990 - DNA, 25 bp, Homo sapien
cggcagattcagctccgtgatgtta

SEQ ID NO: 2315991 - DNA, 25 bp, Homo sapien
ccgtgatgttaatagactgcgccat

SEQ ID NO: 2315992 - DNA, 25 bp, Homo sapien
agctccgtgatgttaatagactgcg

SEQ ID NO: 2315993 - DNA, 25 bp, Homo sapien
taggctgccaacttggaaccgggcg

SEQ ID NO: 2315994 - DNA, 25 bp, Homo sapien
ccgggatagcgggtcaatgagagga

SEQ ID NO: 2315995 - DNA, 25 bp, Homo sapien
cctgggatcggatagaggtttcgcc

SEQ ID NO: 2315996 - DNA, 25 bp, Homo sapien
ggcgcgagaagtacgcgtgggcaag

SEQ ID NO: 2315997 - DNA, 25 bp, Homo sapien
cctcgttgctcttgttcagcacgtt

SEQ ID NO: 2315998 - DNA, 25 bp, Homo sapien
gttgctcttgttcagcacgttcaga

SEQ ID NO: 2315999 - DNA, 25 bp, Homo sapien
cgttgctcttgttcagcacgttcag

SEQ ID NO: 2316000 - DNA, 25 bp, Homo sapien
tcgttgctcttgttcagcacgttca

SEQ ID NO: 2316001 - DNA, 25 bp, Homo sapien
cgagagaagcaggttcgccacttta

SEQ ID NO: 2316002 - DNA, 25 bp, Homo sapien
gagagaagcaggttcgccactttag

SEQ ID NO: 2316003 - DNA, 25 bp, Homo sapien
gacgagagaagcaggttcgccactt

SEQ ID NO: 2316004 - DNA, 25 bp, Homo sapien
gagaagcaggttcgccactttaggt

SEQ ID NO: 2316005 - DNA, 25 bp, Homo sapien
caaagggttcatgaagcggtatacg

SEQ ID NO: 2316006 - DNA, 25 bp, Homo sapien
aatggattttctcgtttcaggtaag

SEQ ID NO: 2316007 - DNA, 25 bp, Homo sapien
ctaggcaggcaacatgcaaagggtt

SEQ ID NO: 2316008 - DNA, 25 bp, Homo sapien
cagtgtgaaaagaacggaaacaggg

SEQ ID NO: 2316009 - DNA, 25 bp, Homo sapien
aggttagcggctccaacgtaagacg

SEQ ID NO: 2316010 - DNA, 25 bp, Homo sapien
agagagttccaacagggcacagcac

SEQ ID NO: 2316011 - DNA, 25 bp, Homo sapien
ctccaacgtaagacgttaaagagag

SEQ ID NO: 2316012 - DNA, 25 bp, Homo sapien
tagcggctccaacgtaagacgttaa

SEQ ID NO: 2316013 - DNA, 25 bp, Homo sapien
gtcagtgggacgagtaattctttcc

SEQ ID NO: 2316014 - DNA, 25 bp, Homo sapien
agaactcgtcagtgggacgagtaat

SEQ ID NO: 2316015 - DNA, 25 bp, Homo sapien
cgtcagtgggacgagtaattctttc

SEQ ID NO: 2316016 - DNA, 25 bp, Homo sapien
cattgtgaggagagggtaatctgaa

SEQ ID NO: 2316017 - DNA, 25 bp, Homo sapien
aggtagccgttcctgtggaaaggat

SEQ ID NO: 2316018 - DNA, 25 bp, Homo sapien
aaaaagggtatcctcaaaatcattg

SEQ ID NO: 2316019 - DNA, 25 bp, Homo sapien
gtagccgttcctgtggaaaggatac

SEQ ID NO: 2316020 - DNA, 25 bp, Homo sapien
tgatgtatgctggaacaccctcttg

SEQ ID NO: 2316021 - DNA, 25 bp, Homo sapien
gcaattgcccgctatcggctcactg

SEQ ID NO: 2316022 - DNA, 25 bp, Homo sapien
tggtgttcacaagacattagctgga

SEQ ID NO: 2316023 - DNA, 25 bp, Homo sapien
tgagactacagattaaagatgccct

SEQ ID NO: 2316024 - DNA, 25 bp, Homo sapien
aaggcataaggactgaataatctgg

SEQ ID NO: 2316025 - DNA, 25 bp, Homo sapien
ggcataaggactgaataatctggag

SEQ ID NO: 2316026 - DNA, 25 bp, Homo sapien
aggcataaggactgaataatctgga

SEQ ID NO: 2316027 - DNA, 25 bp, Homo sapien
agggaaaaactagccagcccagcat

SEQ ID NO: 2316028 - DNA, 25 bp, Homo sapien
atgagccatgattccgccagccagc

SEQ ID NO: 2316029 - DNA, 25 bp, Homo sapien
cagcccagcatgagccatgattccg

SEQ ID NO: 2316030 - DNA, 25 bp, Homo sapien
taagggaaaaactagccagcccagc

SEQ ID NO: 2316031 - DNA, 25 bp, Homo sapien
tcatgcagcttcccagggacataca

SEQ ID NO: 2316032 - DNA, 25 bp, Homo sapien
catgcagcttcccagggacatacat

SEQ ID NO: 2316033 - DNA, 25 bp, Homo sapien
gttcccacatcgatgagcacgtgtt

SEQ ID NO: 2316034 - DNA, 25 bp, Homo sapien
agttcccacatcgatgagcacgtgt

SEQ ID NO: 2316035 - DNA, 25 bp, Homo sapien
cacatcgatgagcacgtgttccaca

SEQ ID NO: 2316036 - DNA, 25 bp, Homo sapien
cccacatcgatgagcacgtgttcca

SEQ ID NO: 2316037 - DNA, 25 bp, Homo sapien
ggccatgctgcgctctagagcttcc

SEQ ID NO: 2316038 - DNA, 25 bp, Homo sapien
gctgcgctctagagcttcccctgaa

SEQ ID NO: 2316039 - DNA, 25 bp, Homo sapien
cctctggccatgctgcgctctagag

SEQ ID NO: 2316040 - DNA, 25 bp, Homo sapien
tttagaggggcatccacatgctctc

SEQ ID NO: 2316041 - DNA, 25 bp, Homo sapien
tacaagatcagaggtgaataagggg

SEQ ID NO: 2316042 - DNA, 25 bp, Homo sapien
ctacaagatcagaggtgaataaggg

SEQ ID NO: 2316043 - DNA, 25 bp, Homo sapien
ctccatctgcttggttagaaaatct

SEQ ID NO: 2316044 - DNA, 25 bp, Homo sapien
atggcgtgcttctcctgaagagctg

SEQ ID NO: 2316045 - DNA, 25 bp, Homo sapien
ttcatggcgtgcttctcctgaagag

SEQ ID NO: 2316046 - DNA, 25 bp, Homo sapien
tctccatctgcttggttagaaaatc

SEQ ID NO: 2316047 - DNA, 25 bp, Homo sapien
aaatttctcaaacgctcaacccagg

SEQ ID NO: 2316048 - DNA, 25 bp, Homo sapien
cattccatcgtcattaaataggagc

SEQ ID NO: 2316049 - DNA, 25 bp, Homo sapien
ccgtggttcacactgcaatccatgt

SEQ ID NO: 2316050 - DNA, 25 bp, Homo sapien
actaagacatagttttactccagca

SEQ ID NO: 2316051 - DNA, 25 bp, Homo sapien
tctgaatcctgattataacagaggg

SEQ ID NO: 2316052 - DNA, 25 bp, Homo sapien
tttagggtctacaatgcatcggtca

SEQ ID NO: 2316053 - DNA, 25 bp, Homo sapien
catcggtcaatatgctaacacagct

SEQ ID NO: 2316054 - DNA, 25 bp, Homo sapien
ctttaactcagtgatccactgtggg

SEQ ID NO: 2316055 - DNA, 25 bp, Homo sapien
tcttctgactcatcatttccatgac

SEQ ID NO: 2316056 - DNA, 25 bp, Homo sapien
ttctgactcatcatttccatgacgg

SEQ ID NO: 2316057 - DNA, 25 bp, Homo sapien
aatcttctgactcatcatttccatg

SEQ ID NO: 2316058 - DNA, 25 bp, Homo sapien
gaatcttctgactcatcatttccat

SEQ ID NO: 2316059 - DNA, 25 bp, Homo sapien
ttaaaacacaagacccttcccatca

SEQ ID NO: 2316060 - DNA, 25 bp, Homo sapien
ttattggcattaaaacacaagaccc

SEQ ID NO: 2316061 - DNA, 25 bp, Homo sapien
gcattaaaacacaagacccttccca

SEQ ID NO: 2316062 - DNA, 25 bp, Homo sapien
tggcattaaaacacaagacccttcc

SEQ ID NO: 2316063 - DNA, 25 bp, Homo sapien
taggatttcttccagctggtcaaag

SEQ ID NO: 2316064 - DNA, 25 bp, Homo sapien
actcccagcctaggatttcttccag

SEQ ID NO: 2316065 - DNA, 25 bp, Homo sapien
gcagcagactcccagcctaggattt

SEQ ID NO: 2316066 - DNA, 25 bp, Homo sapien
gcctaggatttcttccagctggtca

SEQ ID NO: 2316067 - DNA, 25 bp, Homo sapien
cgcttgccaaccgttcccttggcaa

SEQ ID NO: 2316068 - DNA, 25 bp, Homo sapien
ccaaccgttcccttggcaaccagct

SEQ ID NO: 2316069 - DNA, 25 bp, Homo sapien
tccgcttgccaaccgttcccttggc

SEQ ID NO: 2316070 - DNA, 25 bp, Homo sapien
ttgccaaccgttcccttggcaacca

SEQ ID NO: 2316071 - DNA, 25 bp, Homo sapien
gcgccgacccggaagaggaagcgcc

SEQ ID NO: 2316072 - DNA, 25 bp, Homo sapien
agggaggcaggagcgccgacccgga

SEQ ID NO: 2316073 - DNA, 25 bp, Homo sapien
caggagcgccgacccggaagaggaa

SEQ ID NO: 2316074 - DNA, 25 bp, Homo sapien
tgcagggaggcaggagcgccgaccc

SEQ ID NO: 2316075 - DNA, 25 bp, Homo sapien
cggcagcagcagcgttaagaggccg

SEQ ID NO: 2316076 - DNA, 25 bp, Homo sapien
agcagcagcgttaagaggccgcgca

SEQ ID NO: 2316077 - DNA, 25 bp, Homo sapien
cggtgccgggtatacaggggtggcg

SEQ ID NO: 2316078 - DNA, 25 bp, Homo sapien
aggccgcgcaggaattggtgtccca

SEQ ID NO: 2316079 - DNA, 25 bp, Homo sapien
gtgccattgtgcgtcccgattcggg

SEQ ID NO: 2316080 - DNA, 25 bp, Homo sapien
ccatgagtttgctgcgggatcgttt

SEQ ID NO: 2316081 - DNA, 25 bp, Homo sapien
atgccagtgcctcgtcgcagtggaa

SEQ ID NO: 2316082 - DNA, 25 bp, Homo sapien
tactccggcaggaggcgaagcagtg

SEQ ID NO: 2316083 - DNA, 25 bp, Homo sapien
tgttggcggaatgccatccaccccg

SEQ ID NO: 2316084 - DNA, 25 bp, Homo sapien
gagtgaccctgttggcggaatgcca

SEQ ID NO: 2316085 - DNA, 25 bp, Homo sapien
tgccgggcgctatcggagtgaccct

SEQ ID NO: 2316086 - DNA, 25 bp, Homo sapien
ggaatgccatccaccccggaggcat

SEQ ID NO: 2316087 - DNA, 25 bp, Homo sapien
gggatcccgggtccgcacaatctct

SEQ ID NO: 2316088 - DNA, 25 bp, Homo sapien
cacaggaagcgagtttttcgggatc

SEQ ID NO: 2316089 - DNA, 25 bp, Homo sapien
gtgtctccgagggtcgtactcgccc

SEQ ID NO: 2316090 - DNA, 25 bp, Homo sapien
ggtgatggtcatatcggtgtctccg

SEQ ID NO: 2316091 - DNA, 25 bp, Homo sapien
cagcttgtgcccgaagtgcagatag

SEQ ID NO: 2316092 - DNA, 25 bp, Homo sapien
cgaagtgcagatagatgagtcccgc

SEQ ID NO: 2316093 - DNA, 25 bp, Homo sapien
tgcagatagatgagtcccgcactgc

SEQ ID NO: 2316094 - DNA, 25 bp, Homo sapien
gctcagcttggtctgccacggcttc

SEQ ID NO: 2316095 - DNA, 25 bp, Homo sapien
tgagtgttgggcctgctataggcca

SEQ ID NO: 2316096 - DNA, 25 bp, Homo sapien
caggcggcctgctggaaatgcatgt

SEQ ID NO: 2316097 - DNA, 25 bp, Homo sapien
ttcaaagcccttccccatatattac

SEQ ID NO: 2316098 - DNA, 25 bp, Homo sapien
ataggccaggaaccctgacccgagg

SEQ ID NO: 2316099 - DNA, 25 bp, Homo sapien
gggaagcccataatgtgcctcatga

SEQ ID NO: 2316100 - DNA, 25 bp, Homo sapien
tgtgagactagacaccaaaagctgg

SEQ ID NO: 2316101 - DNA, 25 bp, Homo sapien
caggagcggctctggttgagaacac

SEQ ID NO: 2316102 - DNA, 25 bp, Homo sapien
taggataatgcctcaagagtctcgg

SEQ ID NO: 2316103 - DNA, 25 bp, Homo sapien
ggaaaccttcttgaggctacctgct

SEQ ID NO: 2316104 - DNA, 25 bp, Homo sapien
gaggctacctgctacttatgtgaaa

SEQ ID NO: 2316105 - DNA, 25 bp, Homo sapien
acctgctacttatgtgaaatcttac

SEQ ID NO: 2316106 - DNA, 25 bp, Homo sapien
atgtgaaatcttacatgattcaaag

SEQ ID NO: 2316107 - DNA, 25 bp, Homo sapien
cctcctccacaaagttctcatacat

SEQ ID NO: 2316108 - DNA, 25 bp, Homo sapien
attgtccacagcatccacctcctcc

SEQ ID NO: 2316109 - DNA, 25 bp, Homo sapien
tccacctcctccacaaagttctcat

SEQ ID NO: 2316110 - DNA, 25 bp, Homo sapien
cacctcctccacaaagttctcatac

SEQ ID NO: 2316111 - DNA, 25 bp, Homo sapien
tggtcagtgcatatcgaggctcccc

SEQ ID NO: 2316112 - DNA, 25 bp, Homo sapien
gagcaactcgtgcactcagggtagt

SEQ ID NO: 2316113 - DNA, 25 bp, Homo sapien
cactcagggtagtggtcagtgcata

SEQ ID NO: 2316114 - DNA, 25 bp, Homo sapien
tccaggtaggattaagtcgagcaac

SEQ ID NO: 2316115 - DNA, 25 bp, Homo sapien
gctgtgttggtagaaatctaatctc

SEQ ID NO: 2316116 - DNA, 25 bp, Homo sapien
gaaactcctcttgaaccagatccat

SEQ ID NO: 2316117 - DNA, 25 bp, Homo sapien
gaaccagatccattgcacgcttgaa

SEQ ID NO: 2316118 - DNA, 25 bp, Homo sapien
agatccattgcacgcttgaaccctg

SEQ ID NO: 2316119 - DNA, 25 bp, Homo sapien
gaatcgctgggcaagggcctcttcc

SEQ ID NO: 2316120 - DNA, 25 bp, Homo sapien
ggaatcgctgggcaagggcctcttc

SEQ ID NO: 2316121 - DNA, 25 bp, Homo sapien
atcgctgggcaagggcctcttccac

SEQ ID NO: 2316122 - DNA, 25 bp, Homo sapien
ctggaatcgctgggcaagggcctct

SEQ ID NO: 2316123 - DNA, 25 bp, Homo sapien
gagcatagctagaaggtttaaggta

SEQ ID NO: 2316124 - DNA, 25 bp, Homo sapien
catgtttgtagtcacaacattttgg

SEQ ID NO: 2316125 - DNA, 25 bp, Homo sapien
tagctagaaggtttaaggtaggctg

SEQ ID NO: 2316126 - DNA, 25 bp, Homo sapien
agggagagcatagctagaaggttta

SEQ ID NO: 2316127 - DNA, 25 bp, Homo sapien
gggcacacactgtattcgccactgt

SEQ ID NO: 2316128 - DNA, 25 bp, Homo sapien
gctccttccagggacatgcaccttt

SEQ ID NO: 2316129 - DNA, 25 bp, Homo sapien
ggacatgcacctttcgccagttcca

SEQ ID NO: 2316130 - DNA, 25 bp, Homo sapien
acacactgtattcgccactgtccag

SEQ ID NO: 2316131 - DNA, 25 bp, Homo sapien
tggcagccttctcttaacaaggctg

SEQ ID NO: 2316132 - DNA, 25 bp, Homo sapien
acagcaggggtcagagttggcagcc

SEQ ID NO: 2316133 - DNA, 25 bp, Homo sapien
tgagacaagcctgaaggtctgcaga

SEQ ID NO: 2316134 - DNA, 25 bp, Homo sapien
cttctcttaacaaggctgagacaag

SEQ ID NO: 2316135 - DNA, 25 bp, Homo sapien
cctcgtcccgaagaccccgccatgg

SEQ ID NO: 2316136 - DNA, 25 bp, Homo sapien
ccagggatcccactgacctggtcca

SEQ ID NO: 2316137 - DNA, 25 bp, Homo sapien
agccagggatcccactgacctggtc

SEQ ID NO: 2316138 - DNA, 25 bp, Homo sapien
ttgcatggacgaagatgcagccagg

SEQ ID NO: 2316139 - DNA, 25 bp, Homo sapien
gcaccctctcgggtgtggtgaccgc

SEQ ID NO: 2316140 - DNA, 25 bp, Homo sapien
aaggcaccctctcgggtgtggtgac

SEQ ID NO: 2316141 - DNA, 25 bp, Homo sapien
cctctcgggtgtggtgaccgccagt

SEQ ID NO: 2316142 - DNA, 25 bp, Homo sapien
atgctcaaggcaccctctcgggtgt

SEQ ID NO: 2316143 - DNA, 25 bp, Homo sapien
atttgtgggaggtatgagcgctggg

SEQ ID NO: 2316144 - DNA, 25 bp, Homo sapien
gatttgtgggaggtatgagcgctgg

SEQ ID NO: 2316145 - DNA, 25 bp, Homo sapien
tacacctgttaccagcttggcctgg

SEQ ID NO: 2316146 - DNA, 25 bp, Homo sapien
ctgctctcagcttcacccgtggatg

SEQ ID NO: 2316147 - DNA, 25 bp, Homo sapien
ggcatacacctgttaccagcttggc

SEQ ID NO: 2316148 - DNA, 25 bp, Homo sapien
cctgggcatacacctgttaccagct

SEQ ID NO: 2316149 - DNA, 25 bp, Homo sapien
caagcttcgcctcccgagttcactc

SEQ ID NO: 2316150 - DNA, 25 bp, Homo sapien
tcccgagttcactccattctcgtgc

SEQ ID NO: 2316151 - DNA, 25 bp, Homo sapien
gcttcgcctcccgagttcactccat

SEQ ID NO: 2316152 - DNA, 25 bp, Homo sapien
cccgagttcactccattctcgtgcc

SEQ ID NO: 2316153 - DNA, 25 bp, Homo sapien
cgcctaaccgtgtgggtgcagcact

SEQ ID NO: 2316154 - DNA, 25 bp, Homo sapien
ggtacccgtccgcatacgaatctag

SEQ ID NO: 2316155 - DNA, 25 bp, Homo sapien
ggctagtctgcgaactcctttcaga

SEQ ID NO: 2316156 - DNA, 25 bp, Homo sapien
aagaagctttggaggtctgtcccgg

SEQ ID NO: 2316157 - DNA, 25 bp, Homo sapien
cattgctactatacatgcatttaac

SEQ ID NO: 2316158 - DNA, 25 bp, Homo sapien
ttgcattgctactatacatgcattt

SEQ ID NO: 2316159 - DNA, 25 bp, Homo sapien
taacagattccttgtctcccggttg

SEQ ID NO: 2316160 - DNA, 25 bp, Homo sapien
cttgtctcccggttgatcttcatca

SEQ ID NO: 2316161 - DNA, 25 bp, Homo sapien
agaaaaactgggcgagtgggtggct

SEQ ID NO: 2316162 - DNA, 25 bp, Homo sapien
tcagcgcttcttccggaagccttca

SEQ ID NO: 2316163 - DNA, 25 bp, Homo sapien
cccagggagaaaaactgggcgagtg

SEQ ID NO: 2316164 - DNA, 25 bp, Homo sapien
gcgcttcttccggaagccttcactg

SEQ ID NO: 2316165 - DNA, 25 bp, Homo sapien
gaggcaagcgaacccggaccggaca

SEQ ID NO: 2316166 - DNA, 25 bp, Homo sapien
gaaaaacgcggacgctgacgaggca

SEQ ID NO: 2316167 - DNA, 25 bp, Homo sapien
cggacgctgacgaggcaagcgaacc

SEQ ID NO: 2316168 - DNA, 25 bp, Homo sapien
gctgacgaggcaagcgaacccggac

SEQ ID NO: 2316169 - DNA, 25 bp, Homo sapien
ggcggaccaggcaggcggttggccc

SEQ ID NO: 2316170 - DNA, 25 bp, Homo sapien
gcggaccaggcaggcggttggcccg

SEQ ID NO: 2316171 - DNA, 25 bp, Homo sapien
gcatgcaggacatgaactaggttca

SEQ ID NO: 2316172 - DNA, 25 bp, Homo sapien
tataaagaaaatggattggagggca

SEQ ID NO: 2316173 - DNA, 25 bp, Homo sapien
aggcgaaagccaccagtataaagaa

SEQ ID NO: 2316174 - DNA, 25 bp, Homo sapien
tagcaatgactaacaggaaggcgaa

SEQ ID NO: 2316175 - DNA, 25 bp, Homo sapien
gctacttcgagcctgtgaaaaggca

SEQ ID NO: 2316176 - DNA, 25 bp, Homo sapien
accattaccattgcccccattattg

SEQ ID NO: 2316177 - DNA, 25 bp, Homo sapien
tgctgctacttcgagcctgtgaaaa

SEQ ID NO: 2316178 - DNA, 25 bp, Homo sapien
tacttcgagcctgtgaaaaggcacc

SEQ ID NO: 2316179 - DNA, 25 bp, Homo sapien
aggaaaggagttagtgacacccagc

SEQ ID NO: 2316180 - DNA, 25 bp, Homo sapien
gaaaggagttagtgacacccagctg

SEQ ID NO: 2316181 - DNA, 25 bp, Homo sapien
ggaaaggagttagtgacacccagct

SEQ ID NO: 2316182 - DNA, 25 bp, Homo sapien
tgagagtacattattagccaggcct

SEQ ID NO: 2316183 - DNA, 25 bp, Homo sapien
caacggtctggaactgtgggattac

SEQ ID NO: 2316184 - DNA, 25 bp, Homo sapien
gattcctgaagtacccaatgcactg

SEQ ID NO: 2316185 - DNA, 25 bp, Homo sapien
caacggcaggccttgaattgggtgc

SEQ ID NO: 2316186 - DNA, 25 bp, Homo sapien
caattctacagaggtgaaaagtaca

SEQ ID NO: 2316187 - DNA, 25 bp, Homo sapien
gcattatgcatgatagctaaaacac

SEQ ID NO: 2316188 - DNA, 25 bp, Homo sapien
ctgccaatgggcaagaggtgtttct

SEQ ID NO: 2316189 - DNA, 25 bp, Homo sapien
tgattaagccgggaccggtggctca

SEQ ID NO: 2316190 - DNA, 25 bp, Homo sapien
ctccgaccggcttggggttgggcat

SEQ ID NO: 2316191 - DNA, 25 bp, Homo sapien
actgtctttacagtaggggcaggtg

SEQ ID NO: 2316192 - DNA, 25 bp, Homo sapien
tccgaccggcttggggttgggcatc

SEQ ID NO: 2316193 - DNA, 25 bp, Homo sapien
ctgtctttacagtaggggcaggtgc

SEQ ID NO: 2316194 - DNA, 25 bp, Homo sapien
taaatggcctctcgcctgtatgcca

SEQ ID NO: 2316195 - DNA, 25 bp, Homo sapien
cccgcaggtgagaggtcttgccata

SEQ ID NO: 2316196 - DNA, 25 bp, Homo sapien
tatgaccaggtacacataaatggcc

SEQ ID NO: 2316197 - DNA, 25 bp, Homo sapien
tctgtagctcatccgaacgtgtgaa

SEQ ID NO: 2316198 - DNA, 25 bp, Homo sapien
tcattctagtctattactatttttc

SEQ ID NO: 2316199 - DNA, 25 bp, Homo sapien
ttctagtctattactatttttctct

SEQ ID NO: 2316200 - DNA, 25 bp, Homo sapien
tctagtctattactatttttctctc

SEQ ID NO: 2316201 - DNA, 25 bp, Homo sapien
ggaagaaaagataagaagctgacat

SEQ ID NO: 2316202 - DNA, 25 bp, Homo sapien
taaaggaagaaaagataagaagctg

SEQ ID NO: 2316203 - DNA, 25 bp, Homo sapien
aggaagaaaagataagaagctgaca

SEQ ID NO: 2316204 - DNA, 25 bp, Homo sapien
aaggaagaaaagataagaagctgac

SEQ ID NO: 2316205 - DNA, 25 bp, Homo sapien
ggcaaagtgcccacactcagagcta

SEQ ID NO: 2316206 - DNA, 25 bp, Homo sapien
tgaagcgcttaggacactcagggca

SEQ ID NO: 2316207 - DNA, 25 bp, Homo sapien
ccactgttggcaagacgggcaatgc

SEQ ID NO: 2316208 - DNA, 25 bp, Homo sapien
ccatattggtggtaataagggctga

SEQ ID NO: 2316209 - DNA, 25 bp, Homo sapien
tgatgtgtcacaacaaggctcagcc

SEQ ID NO: 2316210 - DNA, 25 bp, Homo sapien
catatgaacgcttaagctggtggga

SEQ ID NO: 2316211 - DNA, 25 bp, Homo sapien
aaatgctcatcaaagcgtggcacca

SEQ ID NO: 2316212 - DNA, 25 bp, Homo sapien
agttacttcaagcatcagcctgggc

SEQ ID NO: 2316213 - DNA, 25 bp, Homo sapien
gagctaccttggaagacagcagtac

SEQ ID NO: 2316214 - DNA, 25 bp, Homo sapien
gaacctgactacgagtcatttcctc

SEQ ID NO: 2316215 - DNA, 25 bp, Homo sapien
aatactccactaactcctgaacctg

SEQ ID NO: 2316216 - DNA, 25 bp, Homo sapien
gcagtaccaaagtccaaatactcca

SEQ ID NO: 2316217 - DNA, 25 bp, Homo sapien
gagacaatgcttttatggctgggcc

SEQ ID NO: 2316218 - DNA, 25 bp, Homo sapien
gaaccactgtcttgccactagcaca

SEQ ID NO: 2316219 - DNA, 25 bp, Homo sapien
caaatgcactaggttccctgccgtt

SEQ ID NO: 2316220 - DNA, 25 bp, Homo sapien
tctgcagaatggaaacctgaaacag

SEQ ID NO: 2316221 - DNA, 25 bp, Homo sapien
tattggctagcagaaaacctatccc

SEQ ID NO: 2316222 - DNA, 25 bp, Homo sapien
tttaatattggctagcagaaaacct

SEQ ID NO: 2316223 - DNA, 25 bp, Homo sapien
tagcagaaaacctatccccaaccta

SEQ ID NO: 2316224 - DNA, 25 bp, Homo sapien
attgcaggtctcttttaatattggc

SEQ ID NO: 2316225 - DNA, 25 bp, Homo sapien
tttcaaatataatttgtcatctgtg

SEQ ID NO: 2316226 - DNA, 25 bp, Homo sapien
tacgggcatgaacacacattcaccc

SEQ ID NO: 2316227 - DNA, 25 bp, Homo sapien
tgtgtagacatatacgggcatgaac

SEQ ID NO: 2316228 - DNA, 25 bp, Homo sapien
catatacgggcatgaacacacattc

SEQ ID NO: 2316229 - DNA, 25 bp, Homo sapien
tttaggcaccagagattggagcacc

SEQ ID NO: 2316230 - DNA, 25 bp, Homo sapien
aataggctacccagcttcagtgagg

SEQ ID NO: 2316231 - DNA, 25 bp, Homo sapien
tctgtaataagctcctgactcaagg

SEQ ID NO: 2316232 - DNA, 25 bp, Homo sapien
tgatctgatcccaaggtccaaaagg

SEQ ID NO: 2316233 - DNA, 25 bp, Homo sapien
agaaggagaagagcataagccagca

SEQ ID NO: 2316234 - DNA, 25 bp, Homo sapien
tgcccctggccaaatctttcttcag

SEQ ID NO: 2316235 - DNA, 25 bp, Homo sapien
aaggagaagagcataagccagcaca

SEQ ID NO: 2316236 - DNA, 25 bp, Homo sapien
ggagaagagcataagccagcacagc

SEQ ID NO: 2316237 - DNA, 25 bp, Homo sapien
ctgtgggaagtaatgcccaaagccc

SEQ ID NO: 2316238 - DNA, 25 bp, Homo sapien
cacagctgtgggaagtaatgcccaa

SEQ ID NO: 2316239 - DNA, 25 bp, Homo sapien
ccacagctgtgggaagtaatgccca

SEQ ID NO: 2316240 - DNA, 25 bp, Homo sapien
cagctgtgggaagtaatgcccaaag

SEQ ID NO: 2316241 - DNA, 25 bp, Homo sapien
agcggctgtagaggcagcggatagc

SEQ ID NO: 2316242 - DNA, 25 bp, Homo sapien
agcagctctcccagtgtctttgtgc

SEQ ID NO: 2316243 - DNA, 25 bp, Homo sapien
gctgtagaggcagcggatagctctg

SEQ ID NO: 2316244 - DNA, 25 bp, Homo sapien
agcagcggctgtagaggcagcggat

SEQ ID NO: 2316245 - DNA, 25 bp, Homo sapien
cagaagtcagtgccacaggagcagg

SEQ ID NO: 2316246 - DNA, 25 bp, Homo sapien
aggcagatggctgtaattggcattg

SEQ ID NO: 2316247 - DNA, 25 bp, Homo sapien
tgcagaagtcagtgccacaggagca

SEQ ID NO: 2316248 - DNA, 25 bp, Homo sapien
ggaggcagatggctgtaattggcat

SEQ ID NO: 2316249 - DNA, 25 bp, Homo sapien
ctggacatcaaggcaagaatgcagg

SEQ ID NO: 2316250 - DNA, 25 bp, Homo sapien
tggacatcaaggcaagaatgcaggc

SEQ ID NO: 2316251 - DNA, 25 bp, Homo sapien
gacatcaaggcaagaatgcaggctg

SEQ ID NO: 2316252 - DNA, 25 bp, Homo sapien
acatcaaggcaagaatgcaggctgg

SEQ ID NO: 2316253 - DNA, 25 bp, Homo sapien
accagtgccatccagatggactcac

SEQ ID NO: 2316254 - DNA, 25 bp, Homo sapien
gcaccagtgccatccagatggactc

SEQ ID NO: 2316255 - DNA, 25 bp, Homo sapien
caccagtgccatccagatggactca

SEQ ID NO: 2316256 - DNA, 25 bp, Homo sapien
agcaccagtgccatccagatggact

SEQ ID NO: 2316257 - DNA, 25 bp, Homo sapien
ctgtagttctttcgctgtagcaggg

SEQ ID NO: 2316258 - DNA, 25 bp, Homo sapien
tctgtagttctttcgctgtagcagg

SEQ ID NO: 2316259 - DNA, 25 bp, Homo sapien
ctctgtagttctttcgctgtagcag

SEQ ID NO: 2316260 - DNA, 25 bp, Homo sapien
ggagaaacacagctcaggcagctcc

SEQ ID NO: 2316261 - DNA, 25 bp, Homo sapien
cctgcagctccacactccagtccct

SEQ ID NO: 2316262 - DNA, 25 bp, Homo sapien
ctgggagaaacacagctcaggcagc

SEQ ID NO: 2316263 - DNA, 25 bp, Homo sapien
cagtccctgcctgagtctggccttg

SEQ ID NO: 2316264 - DNA, 25 bp, Homo sapien
gacactgtgctgagtgtgggcctct

SEQ ID NO: 2316265 - DNA, 25 bp, Homo sapien
cactgtgctgagtgtgggcctctga

SEQ ID NO: 2316266 - DNA, 25 bp, Homo sapien
acactgtgctgagtgtgggcctctg

SEQ ID NO: 2316267 - DNA, 25 bp, Homo sapien
ggcccaaaccactgcatgacctcct

SEQ ID NO: 2316268 - DNA, 25 bp, Homo sapien
cccggcccaaaccactgcatgacct

SEQ ID NO: 2316269 - DNA, 25 bp, Homo sapien
tgcccggcccaaaccactgcatgac

SEQ ID NO: 2316270 - DNA, 25 bp, Homo sapien
ctgcccggcccaaaccactgcatga

SEQ ID NO: 2316271 - DNA, 25 bp, Homo sapien
gaaggccttgatggcaaccagtttt

SEQ ID NO: 2316272 - DNA, 25 bp, Homo sapien
ggccttgatggcaaccagttttcct

SEQ ID NO: 2316273 - DNA, 25 bp, Homo sapien
ccttgatggcaaccagttttccttg

SEQ ID NO: 2316274 - DNA, 25 bp, Homo sapien
ttgatggcaaccagttttccttgca

SEQ ID NO: 2316275 - DNA, 25 bp, Homo sapien
aatgtggtcgtgctgtaggcctgga

SEQ ID NO: 2316276 - DNA, 25 bp, Homo sapien
tcgtacaatgctctctcagcttgga

SEQ ID NO: 2316277 - DNA, 25 bp, Homo sapien
ctggcagtgataaatcggacaatgt

SEQ ID NO: 2316278 - DNA, 25 bp, Homo sapien
gtaggcctggaagttcgtacaatgc

SEQ ID NO: 2316279 - DNA, 25 bp, Homo sapien
cttgggatgcagttccagtaccagc

SEQ ID NO: 2316280 - DNA, 25 bp, Homo sapien
gttccagtaccagcaggggcccaga

SEQ ID NO: 2316281 - DNA, 25 bp, Homo sapien
gggatgcagttccagtaccagcagg

SEQ ID NO: 2316282 - DNA, 25 bp, Homo sapien
ccagagagcaggcggccaggacccc

SEQ ID NO: 2316283 - DNA, 25 bp, Homo sapien
agctcttccacgtggacagagacac

SEQ ID NO: 2316284 - DNA, 25 bp, Homo sapien
aatagggcaaagtgagttgtgggga

SEQ ID NO: 2316285 - DNA, 25 bp, Homo sapien
ctcttccacgtggacagagacacac

SEQ ID NO: 2316286 - DNA, 25 bp, Homo sapien
gggcaaagtgagttgtggggagctc

SEQ ID NO: 2316287 - DNA, 25 bp, Homo sapien
ggacagtgccatccgcagggaactt

SEQ ID NO: 2316288 - DNA, 25 bp, Homo sapien
tgggtcaagtagtggcacagggagc

SEQ ID NO: 2316289 - DNA, 25 bp, Homo sapien
cttccccagtcactggtgtactggg

SEQ ID NO: 2316290 - DNA, 25 bp, Homo sapien
cagtcactggtgtactgggtcaagt

SEQ ID NO: 2316291 - DNA, 25 bp, Homo sapien
ccatcttcccgaatgagcacattct

SEQ ID NO: 2316292 - DNA, 25 bp, Homo sapien
tctcggtgggcaatacctggtttat

SEQ ID NO: 2316293 - DNA, 25 bp, Homo sapien
gctgctcagatctcggtgggcaata

SEQ ID NO: 2316294 - DNA, 25 bp, Homo sapien
tctccaatggcacacgatccatctt

SEQ ID NO: 2316295 - DNA, 25 bp, Homo sapien
tctggtgccatgtacctctgggtgc

SEQ ID NO: 2316296 - DNA, 25 bp, Homo sapien
ggcctcaaatctgggcagcggctca

SEQ ID NO: 2316297 - DNA, 25 bp, Homo sapien
gtaaatatcagctcgtcggagggcc

SEQ ID NO: 2316298 - DNA, 25 bp, Homo sapien
gccccaatcctgtaggtccagagtc

SEQ ID NO: 2316299 - DNA, 25 bp, Homo sapien
aaggtagaggggctgggtatcagtt

SEQ ID NO: 2316300 - DNA, 25 bp, Homo sapien
gaggaaggtagaggggctgggtatc

SEQ ID NO: 2316301 - DNA, 25 bp, Homo sapien
tagaggggctgggtatcagttagtc

SEQ ID NO: 2316302 - DNA, 25 bp, Homo sapien
ggtagaggggctgggtatcagttag

SEQ ID NO: 2316303 - DNA, 25 bp, Homo sapien
caaagcagcgccaggtggatgggat

SEQ ID NO: 2316304 - DNA, 25 bp, Homo sapien
ggtattgcccagttctgcctcatag

SEQ ID NO: 2316305 - DNA, 25 bp, Homo sapien
tgcctcataggccagttggaagggt

SEQ ID NO: 2316306 - DNA, 25 bp, Homo sapien
atgggatgtagggacgcctcctctc

SEQ ID NO: 2316307 - DNA, 25 bp, Homo sapien
tcagatcaggtacagaagggacatt

SEQ ID NO: 2316308 - DNA, 25 bp, Homo sapien
caacctaagacttgtgccgtggaaa

SEQ ID NO: 2316309 - DNA, 25 bp, Homo sapien
tctggcagagacgtccttgaagccc

SEQ ID NO: 2316310 - DNA, 25 bp, Homo sapien
gagtcttctgcaagtaatgcccagt

SEQ ID NO: 2316311 - DNA, 25 bp, Homo sapien
tgcatcccaacagtcttctaggagc

SEQ ID NO: 2316312 - DNA, 25 bp, Homo sapien
aacagtcttctaggagctccctcag

SEQ ID NO: 2316313 - DNA, 25 bp, Homo sapien
caacagtcttctaggagctccctca

SEQ ID NO: 2316314 - DNA, 25 bp, Homo sapien
atcccaacagtcttctaggagctcc

SEQ ID NO: 2316315 - DNA, 25 bp, Homo sapien
tcttgaggatgggccaaggcagcca

SEQ ID NO: 2316316 - DNA, 25 bp, Homo sapien
ggggcaggaattgaagtacagtctt

SEQ ID NO: 2316317 - DNA, 25 bp, Homo sapien
tggtaggggcaggaattgaagtaca

SEQ ID NO: 2316318 - DNA, 25 bp, Homo sapien
gggcaggaattgaagtacagtcttc

SEQ ID NO: 2316319 - DNA, 25 bp, Homo sapien
taggggcaggaattgaagtacagtc

SEQ ID NO: 2316320 - DNA, 25 bp, Homo sapien
ttgctgaacgctgaagtggcaggca

SEQ ID NO: 2316321 - DNA, 25 bp, Homo sapien
tggaacaagggccttgctgaacgct

SEQ ID NO: 2316322 - DNA, 25 bp, Homo sapien
caggctgaggattcctggaacaagg

SEQ ID NO: 2316323 - DNA, 25 bp, Homo sapien
gcaggctgaggattcctggaacaag

SEQ ID NO: 2316324 - DNA, 25 bp, Homo sapien
tggatgcccgcagaagaatccaagg

SEQ ID NO: 2316325 - DNA, 25 bp, Homo sapien
aatgcagtgatgaggcagacaagac

SEQ ID NO: 2316326 - DNA, 25 bp, Homo sapien
aatccaaggattcggcaggtgggaa

SEQ ID NO: 2316327 - DNA, 25 bp, Homo sapien
gacaagacagctatacaatcgccat

SEQ ID NO: 2316328 - DNA, 25 bp, Homo sapien
gactttattctctttcctgtgcaca

SEQ ID NO: 2316329 - DNA, 25 bp, Homo sapien
ctttattctctttcctgtgcacacc

SEQ ID NO: 2316330 - DNA, 25 bp, Homo sapien
tttattctctttcctgtgcacacct

SEQ ID NO: 2316331 - DNA, 25 bp, Homo sapien
tattctctttcctgtgcacacctac

SEQ ID NO: 2316332 - DNA, 25 bp, Homo sapien
ggtaactgtagtagttgggccctgc

SEQ ID NO: 2316333 - DNA, 25 bp, Homo sapien
ctagatcaggggaaacataacctac

SEQ ID NO: 2316334 - DNA, 25 bp, Homo sapien
gcctagatcaggggaaacataacct

SEQ ID NO: 2316335 - DNA, 25 bp, Homo sapien
cctagatcaggggaaacataaccta

SEQ ID NO: 2316336 - DNA, 25 bp, Homo sapien
ctgatttctgtatcttttccccaca

SEQ ID NO: 2316337 - DNA, 25 bp, Homo sapien
gatttctgtatcttttccccacatt

SEQ ID NO: 2316338 - DNA, 25 bp, Homo sapien
gacacagcaacaatctgatttctgt

SEQ ID NO: 2316339 - DNA, 25 bp, Homo sapien
atctgatttctgtatcttttcccca

SEQ ID NO: 2316340 - DNA, 25 bp, Homo sapien
attggtaattatgtggccgctcgac

SEQ ID NO: 2316341 - DNA, 25 bp, Homo sapien
gcctctgctactgcctaattggtaa

SEQ ID NO: 2316342 - DNA, 25 bp, Homo sapien
tcgcagtctcggctcttcctagtca

SEQ ID NO: 2316343 - DNA, 25 bp, Homo sapien
tagtcacccagaccccgtgcttcgg

SEQ ID NO: 2316344 - DNA, 25 bp, Homo sapien
tccctggaactgagtacggaggcct

SEQ ID NO: 2316345 - DNA, 25 bp, Homo sapien
taacacaggaatctagttcccaggg

SEQ ID NO: 2316346 - DNA, 25 bp, Homo sapien
gaagcgtctaactcttcggaagtag

SEQ ID NO: 2316347 - DNA, 25 bp, Homo sapien
atgaagatcctagccccaagctgcg

SEQ ID NO: 2316348 - DNA, 25 bp, Homo sapien
agagcccatcagaaaaagggttagg

SEQ ID NO: 2316349 - DNA, 25 bp, Homo sapien
aaacttcctgttatagagcccatca

SEQ ID NO: 2316350 - DNA, 25 bp, Homo sapien
gggagctgatacagaaacttcctgt

SEQ ID NO: 2316351 - DNA, 25 bp, Homo sapien
ggactttgcttttgcgggtacagca

SEQ ID NO: 2316352 - DNA, 25 bp, Homo sapien
aacctccagggcacccaatattggg

SEQ ID NO: 2316353 - DNA, 25 bp, Homo sapien
gcacccaatattggggggatatgga

SEQ ID NO: 2316354 - DNA, 25 bp, Homo sapien
cagggcacccaatattggggggata

SEQ ID NO: 2316355 - DNA, 25 bp, Homo sapien
agggtggattaataggtggtgggtg

SEQ ID NO: 2316356 - DNA, 25 bp, Homo sapien
ctggggggaaagctggattgccatg

SEQ ID NO: 2316357 - DNA, 25 bp, Homo sapien
aaagctggattgccatggggagctc

SEQ ID NO: 2316358 - DNA, 25 bp, Homo sapien
gggaaagctggattgccatggggag

SEQ ID NO: 2316359 - DNA, 25 bp, Homo sapien
tggggggaaagctggattgccatgg

SEQ ID NO: 2316360 - DNA, 25 bp, Homo sapien
tgtggcacaggatgagggggcccac

SEQ ID NO: 2316361 - DNA, 25 bp, Homo sapien
ctgtggcacaggatgagggggccca

SEQ ID NO: 2316362 - DNA, 25 bp, Homo sapien
gacccaacggttggcatcctggata

SEQ ID NO: 2316363 - DNA, 25 bp, Homo sapien
gggacccaacggttggcatcctgga

SEQ ID NO: 2316364 - DNA, 25 bp, Homo sapien
tagggacccaacggttggcatcctg

SEQ ID NO: 2316365 - DNA, 25 bp, Homo sapien
acggttggcatcctggataccctgg

SEQ ID NO: 2316366 - DNA, 25 bp, Homo sapien
tcacaggagggattccaggggcagg

SEQ ID NO: 2316367 - DNA, 25 bp, Homo sapien
cacaggagggattccaggggcaggc

SEQ ID NO: 2316368 - DNA, 25 bp, Homo sapien
ggagggattccaggggcaggcggtg

SEQ ID NO: 2316369 - DNA, 25 bp, Homo sapien
caggagggattccaggggcaggcgg

SEQ ID NO: 2316370 - DNA, 25 bp, Homo sapien
ttgtggtacttgtggtgcttttggt

SEQ ID NO: 2316371 - DNA, 25 bp, Homo sapien
catgcttgtggtacttgtggtgctt

SEQ ID NO: 2316372 - DNA, 25 bp, Homo sapien
cttgtggtacttgtggtgcttttgg

SEQ ID NO: 2316373 - DNA, 25 bp, Homo sapien
tgcttgtggtacttgtggtgctttt

SEQ ID NO: 2316374 - DNA, 25 bp, Homo sapien
tgcttattcattagctgcgtgcaaa

SEQ ID NO: 2316375 - DNA, 25 bp, Homo sapien
aaatgacctttcatcactccgtggg

SEQ ID NO: 2316376 - DNA, 25 bp, Homo sapien
tgagcatacaggaatggattaaacc

SEQ ID NO: 2316377 - DNA, 25 bp, Homo sapien
tacctgaatcgatgcctaggcaagg

SEQ ID NO: 2316378 - DNA, 25 bp, Homo sapien
cagaatcactgctggaagaggagga

SEQ ID NO: 2316379 - DNA, 25 bp, Homo sapien
agaatcactgctggaagaggaggag

SEQ ID NO: 2316380 - DNA, 25 bp, Homo sapien
ccccaatcacaagtattataagtgg

SEQ ID NO: 2316381 - DNA, 25 bp, Homo sapien
aaatagctcccctgcctaattcatt

SEQ ID NO: 2316382 - DNA, 25 bp, Homo sapien
aagctcatcaaccaaatggactcta

SEQ ID NO: 2316383 - DNA, 25 bp, Homo sapien
tttcccctagccactcagggctcaa

SEQ ID NO: 2316384 - DNA, 25 bp, Homo sapien
caggttcaggagctcctaactttca

SEQ ID NO: 2316385 - DNA, 25 bp, Homo sapien
gcacagactcagaagccggactgtc

SEQ ID NO: 2316386 - DNA, 25 bp, Homo sapien
gcagcctcatttcccgctttcagga

SEQ ID NO: 2316387 - DNA, 25 bp, Homo sapien
cttggtgcctttgtaatactgctgc

SEQ ID NO: 2316388 - DNA, 25 bp, Homo sapien
atgggttccacctcagaaacatctc

SEQ ID NO: 2316389 - DNA, 25 bp, Homo sapien
tgggttccacctcagaaacatctct

SEQ ID NO: 2316390 - DNA, 25 bp, Homo sapien
gggttccacctcagaaacatctctt

SEQ ID NO: 2316391 - DNA, 25 bp, Homo sapien
catgggttccacctcagaaacatct

SEQ ID NO: 2316392 - DNA, 25 bp, Homo sapien
tctttccagggaaagctatagatgc

SEQ ID NO: 2316393 - DNA, 25 bp, Homo sapien
ccagggaaagctatagatgcagtat

SEQ ID NO: 2316394 - DNA, 25 bp, Homo sapien
gtatagccaactcaaaacactcctt

SEQ ID NO: 2316395 - DNA, 25 bp, Homo sapien
tatttcatagaactctttccaggga

SEQ ID NO: 2316396 - DNA, 25 bp, Homo sapien
ggagagggcgcaggctgcggctgct

SEQ ID NO: 2316397 - DNA, 25 bp, Homo sapien
gcctcgcgtgaatgaccggcctggc

SEQ ID NO: 2316398 - DNA, 25 bp, Homo sapien
ccagggcctcgcgtgaatgaccggc

SEQ ID NO: 2316399 - DNA, 25 bp, Homo sapien
cctggcacagtgaggtggtaggcgc

SEQ ID NO: 2316400 - DNA, 25 bp, Homo sapien
tcgcgtgaatgaccggcctggcaca

SEQ ID NO: 2316401 - DNA, 25 bp, Homo sapien
cccgagaaacgtcctgattaactcg

SEQ ID NO: 2316402 - DNA, 25 bp, Homo sapien
tcctgattaactcggcaactgggag

SEQ ID NO: 2316403 - DNA, 25 bp, Homo sapien
tcccctcggttatccaagcattttc

SEQ ID NO: 2316404 - DNA, 25 bp, Homo sapien
ggactaatagcgcctccccgtgtgg

SEQ ID NO: 2316405 - DNA, 25 bp, Homo sapien
taaatagctcggtctgggattacat

SEQ ID NO: 2316406 - DNA, 25 bp, Homo sapien
ggattacatcggcaggcattttgta

SEQ ID NO: 2316407 - DNA, 25 bp, Homo sapien
cttccataaatagctcggtctggga

SEQ ID NO: 2316408 - DNA, 25 bp, Homo sapien
cggtctgggattacatcggcaggca

SEQ ID NO: 2316409 - DNA, 25 bp, Homo sapien
caataacgcaacttcgaaaaggcaa

SEQ ID NO: 2316410 - DNA, 25 bp, Homo sapien
ttgcagatgtaataggaagcccttt

SEQ ID NO: 2316411 - DNA, 25 bp, Homo sapien
ctgtatatggcaaactgtcctctgg

SEQ ID NO: 2316412 - DNA, 25 bp, Homo sapien
gaaaggacctctcccaagttgtaga

SEQ ID NO: 2316413 - DNA, 25 bp, Homo sapien
tatacacaccaagcacaactgcatg

SEQ ID NO: 2316414 - DNA, 25 bp, Homo sapien
acagggtttccgctgactctcagga

SEQ ID NO: 2316415 - DNA, 25 bp, Homo sapien
gaaactgctgaacgtgcaccacttg

SEQ ID NO: 2316416 - DNA, 25 bp, Homo sapien
tgcaaatctccaactacagcgaggg

SEQ ID NO: 2316417 - DNA, 25 bp, Homo sapien
ctttgagtggtcaagtctttggtca

SEQ ID NO: 2316418 - DNA, 25 bp, Homo sapien
tctttggtcactggttgggggtgaa

SEQ ID NO: 2316419 - DNA, 25 bp, Homo sapien
gtcaagtctttggtcactggttggg

SEQ ID NO: 2316420 - DNA, 25 bp, Homo sapien
tggtcactggttgggggtgaaagcc

SEQ ID NO: 2316421 - DNA, 25 bp, Homo sapien
tcgagcagtgttctggggagctgga

SEQ ID NO: 2316422 - DNA, 25 bp, Homo sapien
gtcgagcagtgttctggggagctgg

SEQ ID NO: 2316423 - DNA, 25 bp, Homo sapien
gtgacatttaatccaccttcaatca

SEQ ID NO: 2316424 - DNA, 25 bp, Homo sapien
taatccaccttcaatcacaccggtg

SEQ ID NO: 2316425 - DNA, 25 bp, Homo sapien
tagccggatggtgagagtgacattt

SEQ ID NO: 2316426 - DNA, 25 bp, Homo sapien
ctttccatgcataagtagccggatg

SEQ ID NO: 2316427 - DNA, 25 bp, Homo sapien
atgagctccaagatgcatgtctgct

SEQ ID NO: 2316428 - DNA, 25 bp, Homo sapien
tacactcacttctactccattaggg

SEQ ID NO: 2316429 - DNA, 25 bp, Homo sapien
cacagtgctaatctgatgagctcca

SEQ ID NO: 2316430 - DNA, 25 bp, Homo sapien
tccattagggaaatgtgctaaagcc

SEQ ID NO: 2316431 - DNA, 25 bp, Homo sapien
ttgctataagcaatcaccatgagaa

SEQ ID NO: 2316432 - DNA, 25 bp, Homo sapien
tgctaattattaccccaaaagattg

SEQ ID NO: 2316433 - DNA, 25 bp, Homo sapien
gggagtggacttgctataagcaatc

SEQ ID NO: 2316434 - DNA, 25 bp, Homo sapien
gccaacagactgctatctatgctaa

SEQ ID NO: 2316435 - DNA, 25 bp, Homo sapien
tacttcaatccagaattactaaatg

SEQ ID NO: 2316436 - DNA, 25 bp, Homo sapien
catgagctccaactgctacttcaat

SEQ ID NO: 2316437 - DNA, 25 bp, Homo sapien
gctacttcaatccagaattactaaa

SEQ ID NO: 2316438 - DNA, 25 bp, Homo sapien
actgctacttcaatccagaattact

SEQ ID NO: 2316439 - DNA, 25 bp, Homo sapien
gcgcatcttcttaactgattctcct

SEQ ID NO: 2316440 - DNA, 25 bp, Homo sapien
gcatcttcttaactgattctccttt

SEQ ID NO: 2316441 - DNA, 25 bp, Homo sapien
tcctcgcgcatcttcttaactgatt

SEQ ID NO: 2316442 - DNA, 25 bp, Homo sapien
tcgcgcatcttcttaactgattctc

SEQ ID NO: 2316443 - DNA, 25 bp, Homo sapien
gaagatggcattagtgggtccagcc

SEQ ID NO: 2316444 - DNA, 25 bp, Homo sapien
caaaggctttgaagatggcattagt

SEQ ID NO: 2316445 - DNA, 25 bp, Homo sapien
tagtgggtccagccaaagtgataat

SEQ ID NO: 2316446 - DNA, 25 bp, Homo sapien
ctttgaagatggcattagtgggtcc

SEQ ID NO: 2316447 - DNA, 25 bp, Homo sapien
gaatgagggagtgggagacaacaaa

SEQ ID NO: 2316448 - DNA, 25 bp, Homo sapien
aagaatgagggagtgggagacaaca

SEQ ID NO: 2316449 - DNA, 25 bp, Homo sapien
aatgagggagtgggagacaacaaac

SEQ ID NO: 2316450 - DNA, 25 bp, Homo sapien
tgaagaatgagggagtgggagacaa

SEQ ID NO: 2316451 - DNA, 25 bp, Homo sapien
acactgactagcagggaccaccagc

SEQ ID NO: 2316452 - DNA, 25 bp, Homo sapien
cacactgactagcagggaccaccag

SEQ ID NO: 2316453 - DNA, 25 bp, Homo sapien
tggagcgcgcctatggtaccaggta

SEQ ID NO: 2316454 - DNA, 25 bp, Homo sapien
tcgaatcatcggaagctcaggagtt

SEQ ID NO: 2316455 - DNA, 25 bp, Homo sapien
cctgtagtaataacactgggagcct

SEQ ID NO: 2316456 - DNA, 25 bp, Homo sapien
taagatctctgtcgtgccatgtacg

SEQ ID NO: 2316457 - DNA, 25 bp, Homo sapien
gcaaaaggtccttctaaatagttgc

SEQ ID NO: 2316458 - DNA, 25 bp, Homo sapien
ccttattccagataggactgtttag

SEQ ID NO: 2316459 - DNA, 25 bp, Homo sapien
gcgtgaataacagcctaaatttaac

SEQ ID NO: 2316460 - DNA, 25 bp, Homo sapien
gttctctgggcgaagcaaaagcccc

SEQ ID NO: 2316461 - DNA, 25 bp, Homo sapien
ctcagttgagttgggtagcatatcc

SEQ ID NO: 2316462 - DNA, 25 bp, Homo sapien
gctcagttgagttgggtagcatatc

SEQ ID NO: 2316463 - DNA, 25 bp, Homo sapien
agttgagttgggtagcatatcccct

SEQ ID NO: 2316464 - DNA, 25 bp, Homo sapien
cagttgagttgggtagcatatcccc

SEQ ID NO: 2316465 - DNA, 25 bp, Homo sapien
ctgcaaagatgaccggagagctgga

SEQ ID NO: 2316466 - DNA, 25 bp, Homo sapien
cctgcaaagatgaccggagagctgg

SEQ ID NO: 2316467 - DNA, 25 bp, Homo sapien
ggctaaatccttctggcgacactga

SEQ ID NO: 2316468 - DNA, 25 bp, Homo sapien
tgtgggaacaatccatgacagggcc

SEQ ID NO: 2316469 - DNA, 25 bp, Homo sapien
tacagagcccactttgccacaaagg

SEQ ID NO: 2316470 - DNA, 25 bp, Homo sapien
aaatggctcccagatcaaacgcagg

SEQ ID NO: 2316471 - DNA, 25 bp, Homo sapien
gggtggtgtggggaaagctcgcact

SEQ ID NO: 2316472 - DNA, 25 bp, Homo sapien
gggaaagctcgcactgtcgctgcct

SEQ ID NO: 2316473 - DNA, 25 bp, Homo sapien
cagggttgaggcacatggacggggt

SEQ ID NO: 2316474 - DNA, 25 bp, Homo sapien
tgtggggaaagctcgcactgtcgct

SEQ ID NO: 2316475 - DNA, 25 bp, Homo sapien
ttgagtgagccttggagactgaaca

SEQ ID NO: 2316476 - DNA, 25 bp, Homo sapien
ttggagactgaacatcccctctcac

SEQ ID NO: 2316477 - DNA, 25 bp, Homo sapien
gcggaaggattgagtgagccttgga

SEQ ID NO: 2316478 - DNA, 25 bp, Homo sapien
gccttggagactgaacatcccctct

SEQ ID NO: 2316479 - DNA, 25 bp, Homo sapien
actggccccccgtgtgttggcagtc

SEQ ID NO: 2316480 - DNA, 25 bp, Homo sapien
gccccccgtgtgttggcagtctcgg

SEQ ID NO: 2316481 - DNA, 25 bp, Homo sapien
tggccccccgtgtgttggcagtctc

SEQ ID NO: 2316482 - DNA, 25 bp, Homo sapien
cactggccccccgtgtgttggcagt

SEQ ID NO: 2316483 - DNA, 25 bp, Homo sapien
tctggtgggctacgcggcctgggtg

SEQ ID NO: 2316484 - DNA, 25 bp, Homo sapien
ggtcagtccaggtccccgtggacag

SEQ ID NO: 2316485 - DNA, 25 bp, Homo sapien
catctggtgggctacgcggcctggg

SEQ ID NO: 2316486 - DNA, 25 bp, Homo sapien
ccccgtggacaggtggtgtccacag

SEQ ID NO: 2316487 - DNA, 25 bp, Homo sapien
atctggctgtggaatggcatactgt

SEQ ID NO: 2316488 - DNA, 25 bp, Homo sapien
catactgtccttgaatggtataggc

SEQ ID NO: 2316489 - DNA, 25 bp, Homo sapien
tggctgtggaatggcatactgtcct

SEQ ID NO: 2316490 - DNA, 25 bp, Homo sapien
gctgtggaatggcatactgtccttg

SEQ ID NO: 2316491 - DNA, 25 bp, Homo sapien
tagaagatttaacagagccagggct

SEQ ID NO: 2316492 - DNA, 25 bp, Homo sapien
gctaggtaaacaaactgtgcagtgg

SEQ ID NO: 2316493 - DNA, 25 bp, Homo sapien
tacttaatgaaggtagtttgcagcc

SEQ ID NO: 2316494 - DNA, 25 bp, Homo sapien
tgcagtggtgctagggaaaacacac

SEQ ID NO: 2316495 - DNA, 25 bp, Homo sapien
actgttgcattgccaactggtgcag

SEQ ID NO: 2316496 - DNA, 25 bp, Homo sapien
gactgttgcattgccaactggtgca

SEQ ID NO: 2316497 - DNA, 25 bp, Homo sapien
agactgttgcattgccaactggtgc

SEQ ID NO: 2316498 - DNA, 25 bp, Homo sapien
ctgttgcattgccaactggtgcagc

SEQ ID NO: 2316499 - DNA, 25 bp, Homo sapien
tgggcttagccatagtagacaggca

SEQ ID NO: 2316500 - DNA, 25 bp, Homo sapien
ggactggcctctctcttgcactaca

SEQ ID NO: 2316501 - DNA, 25 bp, Homo sapien
gaaatatcagcctaccctttgcctg

SEQ ID NO: 2316502 - DNA, 25 bp, Homo sapien
gacaggcaagtttaaaccagcagga

SEQ ID NO: 2316503 - DNA, 25 bp, Homo sapien
aatagcctttcacctctggagagct

SEQ ID NO: 2316504 - DNA, 25 bp, Homo sapien
acctctggagagctggattcaatgc

SEQ ID NO: 2316505 - DNA, 25 bp, Homo sapien
cacctctggagagctggattcaatg

SEQ ID NO: 2316506 - DNA, 25 bp, Homo sapien
cccaatagcctttcacctctggaga

SEQ ID NO: 2316507 - DNA, 25 bp, Homo sapien
catgggcagtgaaacaagactccca

SEQ ID NO: 2316508 - DNA, 25 bp, Homo sapien
gcaaagcccagcctattagggatgg

SEQ ID NO: 2316509 - DNA, 25 bp, Homo sapien
caagggagtgtggtatcctcaaaaa

SEQ ID NO: 2316510 - DNA, 25 bp, Homo sapien
tattctcctaacctagactggaagg

SEQ ID NO: 2316511 - DNA, 25 bp, Homo sapien
gtagtctgagcagatgcatccaaac

SEQ ID NO: 2316512 - DNA, 25 bp, Homo sapien
tggtgagttcatgagaagtagtctg

SEQ ID NO: 2316513 - DNA, 25 bp, Homo sapien
catgagaagtagtctgagcagatgc

SEQ ID NO: 2316514 - DNA, 25 bp, Homo sapien
gagttcatgagaagtagtctgagca

SEQ ID NO: 2316515 - DNA, 25 bp, Homo sapien
ttacaggtgcgggccagcacacctg

SEQ ID NO: 2316516 - DNA, 25 bp, Homo sapien
gattacaggtgcgggccagcacacc

SEQ ID NO: 2316517 - DNA, 25 bp, Homo sapien
attacaggtgcgggccagcacacct

SEQ ID NO: 2316518 - DNA, 25 bp, Homo sapien
gacgcccgattatgcagccaatcaa

SEQ ID NO: 2316519 - DNA, 25 bp, Homo sapien
tgacggatctcattgattttggcgc

SEQ ID NO: 2316520 - DNA, 25 bp, Homo sapien
gatctcattgattttggcgccttga

SEQ ID NO: 2316521 - DNA, 25 bp, Homo sapien
tgattttggcgccttgacgcccgat

SEQ ID NO: 2316522 - DNA, 25 bp, Homo sapien
ggctaatgctggcagcagatccagt

SEQ ID NO: 2316523 - DNA, 25 bp, Homo sapien
taacctgcctatcagtagatccttc

SEQ ID NO: 2316524 - DNA, 25 bp, Homo sapien
acattgattagatattgagccaggc

SEQ ID NO: 2316525 - DNA, 25 bp, Homo sapien
cagtgatggtaacctgcctatcagt

SEQ ID NO: 2316526 - DNA, 25 bp, Homo sapien
aaagagacctaagggcctcaaggct

SEQ ID NO: 2316527 - DNA, 25 bp, Homo sapien
tcagcccatgagttgagaaagcaag

SEQ ID NO: 2316528 - DNA, 25 bp, Homo sapien
gacaacattccctattaaaagagac

SEQ ID NO: 2316529 - DNA, 25 bp, Homo sapien
agcaattaagggtgtgacttcagcc

SEQ ID NO: 2316530 - DNA, 25 bp, Homo sapien
cattctcaacattaaggacctagtg

SEQ ID NO: 2316531 - DNA, 25 bp, Homo sapien
gcacaatacagaccacatacttagg

SEQ ID NO: 2316532 - DNA, 25 bp, Homo sapien
agagtagtagcacctcaagatatga

SEQ ID NO: 2316533 - DNA, 25 bp, Homo sapien
ggaaatggtatgttcttagctagca

SEQ ID NO: 2316534 - DNA, 25 bp, Homo sapien
aaagttttgaccctaatccatggct

SEQ ID NO: 2316535 - DNA, 25 bp, Homo sapien
gctaggcaagcaggtcacatttaaa

SEQ ID NO: 2316536 - DNA, 25 bp, Homo sapien
gaagggcaagcctatcgaaagaaca

SEQ ID NO: 2316537 - DNA, 25 bp, Homo sapien
taacaatgatcctgaaaagagccac

SEQ ID NO: 2316538 - DNA, 25 bp, Homo sapien
gtaagtacaggacaaaaactgcttc

SEQ ID NO: 2316539 - DNA, 25 bp, Homo sapien
tgtatatttccattccacagagcta

SEQ ID NO: 2316540 - DNA, 25 bp, Homo sapien
ggaagacctagtgtcaacttgtgac

SEQ ID NO: 2316541 - DNA, 25 bp, Homo sapien
cagttatatcagtaagtgcctctgg

SEQ ID NO: 2316542 - DNA, 25 bp, Homo sapien
gaggtgatcagggatcgtgacggag

SEQ ID NO: 2316543 - DNA, 25 bp, Homo sapien
gggtgcgtcggaggtccccgctgtg

SEQ ID NO: 2316544 - DNA, 25 bp, Homo sapien
gggatcgtgacggaggctgcctggg

SEQ ID NO: 2316545 - DNA, 25 bp, Homo sapien
ggaggctggagggtgcgtcggaggt

SEQ ID NO: 2316546 - DNA, 25 bp, Homo sapien
tggtggtagctgaagccccggtacc

SEQ ID NO: 2316547 - DNA, 25 bp, Homo sapien
agggatgggtttcatgccaagcaga

SEQ ID NO: 2316548 - DNA, 25 bp, Homo sapien
cacaacatttagagccaggagaggg

SEQ ID NO: 2316549 - DNA, 25 bp, Homo sapien
tgttagttacacatggcacggcaga

SEQ ID NO: 2316550 - DNA, 25 bp, Homo sapien
cattgttatattgcaaggcagaata

SEQ ID NO: 2316551 - DNA, 25 bp, Homo sapien
ggcactcagctgaaatggcctaaac

SEQ ID NO: 2316552 - DNA, 25 bp, Homo sapien
gaaacggtaacaagctcacaatagt

SEQ ID NO: 2316553 - DNA, 25 bp, Homo sapien
gaaaactgtggctctagataaagaa

SEQ ID NO: 2316554 - DNA, 25 bp, Homo sapien
gaaggcctgctgatagcttaaccat

SEQ ID NO: 2316555 - DNA, 25 bp, Homo sapien
tatacaggcttcctagctgaatagc

SEQ ID NO: 2316556 - DNA, 25 bp, Homo sapien
aaaaagcccatgtcagttatacagg

SEQ ID NO: 2316557 - DNA, 25 bp, Homo sapien
tgtactaaggttcttactgcgccaa

SEQ ID NO: 2316558 - DNA, 25 bp, Homo sapien
gaggccttccaatcaagaactagat

SEQ ID NO: 2316559 - DNA, 25 bp, Homo sapien
taactacaggaggagcaagcttacc

SEQ ID NO: 2316560 - DNA, 25 bp, Homo sapien
cgtgtactctcgttgaatggaaggc

SEQ ID NO: 2316561 - DNA, 25 bp, Homo sapien
tagccattaggttaagaggccttcc

SEQ ID NO: 2316562 - DNA, 25 bp, Homo sapien
aaaaattggtggtagcactctggcc

SEQ ID NO: 2316563 - DNA, 25 bp, Homo sapien
taagaaaggaactgctagataccat

SEQ ID NO: 2316564 - DNA, 25 bp, Homo sapien
gataccattagatctaggacctgaa

SEQ ID NO: 2316565 - DNA, 25 bp, Homo sapien
gggtagattcgtgccaatttcaaaa

SEQ ID NO: 2316566 - DNA, 25 bp, Homo sapien
gagtagtctcaagggtttaatgctg

SEQ ID NO: 2316567 - DNA, 25 bp, Homo sapien
agagtcatctgagagtagtctcaag

SEQ ID NO: 2316568 - DNA, 25 bp, Homo sapien
agaattatactcagatttacttatt

SEQ ID NO: 2316569 - DNA, 25 bp, Homo sapien
tgtagggtattatgaggtaataccg

SEQ ID NO: 2316570 - DNA, 25 bp, Homo sapien
ctccccatgccacccgtctccgagg

SEQ ID NO: 2316571 - DNA, 25 bp, Homo sapien
catgccacccgtctccgaggaaagc

SEQ ID NO: 2316572 - DNA, 25 bp, Homo sapien
cccatgccacccgtctccgaggaaa

SEQ ID NO: 2316573 - DNA, 25 bp, Homo sapien
tccccatgccacccgtctccgagga

SEQ ID NO: 2316574 - DNA, 25 bp, Homo sapien
aaaatcacgagtggatgataaagtg

SEQ ID NO: 2316575 - DNA, 25 bp, Homo sapien
aatcacgagtggatgataaagtgtg

SEQ ID NO: 2316576 - DNA, 25 bp, Homo sapien
cacgagtggatgataaagtgtgtag

SEQ ID NO: 2316577 - DNA, 25 bp, Homo sapien
taaaaaatcacgagtggatgataaa

SEQ ID NO: 2316578 - DNA, 25 bp, Homo sapien
ccactcttacatttccatgacaaac

SEQ ID NO: 2316579 - DNA, 25 bp, Homo sapien
tcctgacattacagaactaaactga

SEQ ID NO: 2316580 - DNA, 25 bp, Homo sapien
taaaactaaatatggatctcagcat

SEQ ID NO: 2316581 - DNA, 25 bp, Homo sapien
ggatctcagcatcaacagctgaaca

SEQ ID NO: 2316582 - DNA, 25 bp, Homo sapien
gacaggtaagtcctcggaaagtcta

SEQ ID NO: 2316583 - DNA, 25 bp, Homo sapien
tcagggaaaaataggatcgagggcc

SEQ ID NO: 2316584 - DNA, 25 bp, Homo sapien
taagggccaaccaagcatggagtca

SEQ ID NO: 2316585 - DNA, 25 bp, Homo sapien
gaagtgcttgcctactcccctagga

SEQ ID NO: 2316586 - DNA, 25 bp, Homo sapien
aatataacactccatgcaggcccag

SEQ ID NO: 2316587 - DNA, 25 bp, Homo sapien
tccaacagcgttgatgccttgcggc

SEQ ID NO: 2316588 - DNA, 25 bp, Homo sapien
ccgtaagtcaggctcgagggagact

SEQ ID NO: 2316589 - DNA, 25 bp, Homo sapien
gactgtcctactgtaacccctgtga

SEQ ID NO: 2316590 - DNA, 25 bp, Homo sapien
gagctcaggtgagttcccgtgcttg

SEQ ID NO: 2316591 - DNA, 25 bp, Homo sapien
tctgcaccgcctagaagaggaactg

SEQ ID NO: 2316592 - DNA, 25 bp, Homo sapien
ggaggtgattttactaacagcaagg

SEQ ID NO: 2316593 - DNA, 25 bp, Homo sapien
cagcaaggactatgcacccagtcag

SEQ ID NO: 2316594 - DNA, 25 bp, Homo sapien
tctagagacagttgaccataagttc

SEQ ID NO: 2316595 - DNA, 25 bp, Homo sapien
cactttgggaaaggatgctccagtt

SEQ ID NO: 2316596 - DNA, 25 bp, Homo sapien
ggaatagcaaaccacgaaatcgccc

SEQ ID NO: 2316597 - DNA, 25 bp, Homo sapien
taggattggattctccaggacacac

SEQ ID NO: 2316598 - DNA, 25 bp, Homo sapien
tcagattttggcacttccaaggagc

SEQ ID NO: 2316599 - DNA, 25 bp, Homo sapien
ctttgcagggacagtagcctggatg

SEQ ID NO: 2316600 - DNA, 25 bp, Homo sapien
tggatggcccctgaggtgatccgca

SEQ ID NO: 2316601 - DNA, 25 bp, Homo sapien
tggtgaagatctcagattttggcac

SEQ ID NO: 2316602 - DNA, 25 bp, Homo sapien
gtcacccaagtgagtaagcaagcag

SEQ ID NO: 2316603 - DNA, 25 bp, Homo sapien
gaatcaggtgaatgctgagccagct

SEQ ID NO: 2316604 - DNA, 25 bp, Homo sapien
gatactatgctaaggcctggtaccc

SEQ ID NO: 2316605 - DNA, 25 bp, Homo sapien
gcatcctcatggagttctgcgccca

SEQ ID NO: 2316606 - DNA, 25 bp, Homo sapien
gatggcttgcctccatgagacccga

SEQ ID NO: 2316607 - DNA, 25 bp, Homo sapien
taccctaagtgaggcatccatgcgc

SEQ ID NO: 2316608 - DNA, 25 bp, Homo sapien
cctacccagtgtgtacttcgagatg

SEQ ID NO: 2316609 - DNA, 25 bp, Homo sapien
ttctgactgcactcccgagaaggac

SEQ ID NO: 2316610 - DNA, 25 bp, Homo sapien
catcgcctgtgtgtaggcagctcaa

SEQ ID NO: 2316611 - DNA, 25 bp, Homo sapien
tacaaccttcacttaccttggagag

SEQ ID NO: 2316612 - DNA, 25 bp, Homo sapien
tgagagggcctcagtagtaccgtgt

SEQ ID NO: 2316613 - DNA, 25 bp, Homo sapien
tgcctgaggttgaccccgaggtaaa

SEQ ID NO: 2316614 - DNA, 25 bp, Homo sapien
caccgtgccagattcaggtttttta

SEQ ID NO: 2316615 - DNA, 25 bp, Homo sapien
cacaccgtgccagattcaggttttt

SEQ ID NO: 2316616 - DNA, 25 bp, Homo sapien
ccaacacaccgtgccagattcaggt

SEQ ID NO: 2316617 - DNA, 25 bp, Homo sapien
aacacaccgtgccagattcaggttt

SEQ ID NO: 2316618 - DNA, 25 bp, Homo sapien
gtcttgaacttccaggcttcagtga

SEQ ID NO: 2316619 - DNA, 25 bp, Homo sapien
tggtcttgaacttccaggcttcagt

SEQ ID NO: 2316620 - DNA, 25 bp, Homo sapien
gccttggcccctcaaatttctggga

SEQ ID NO: 2316621 - DNA, 25 bp, Homo sapien
ctgccttggcccctcaaatttctgg

SEQ ID NO: 2316622 - DNA, 25 bp, Homo sapien
cgagcaccttctgcgtgccaggtgc

SEQ ID NO: 2316623 - DNA, 25 bp, Homo sapien
ccttctgcgtgccaggtgctgttgc

SEQ ID NO: 2316624 - DNA, 25 bp, Homo sapien
tgcgtgccaggtgctgttgcaagcc

SEQ ID NO: 2316625 - DNA, 25 bp, Homo sapien
tgccaggtgctgttgcaagccatgg

SEQ ID NO: 2316626 - DNA, 25 bp, Homo sapien
gcttccaaaatctcaggccagagaa

SEQ ID NO: 2316627 - DNA, 25 bp, Homo sapien
caggcttccaaaatctcaggccaga

SEQ ID NO: 2316628 - DNA, 25 bp, Homo sapien
cacaggcttccaaaatctcaggcca

SEQ ID NO: 2316629 - DNA, 25 bp, Homo sapien
ggcttccaaaatctcaggccagaga

SEQ ID NO: 2316630 - DNA, 25 bp, Homo sapien
tttttcagaggagcgtaggtgagtg

SEQ ID NO: 2316631 - DNA, 25 bp, Homo sapien
cctttttcagaggagcgtaggtgag

SEQ ID NO: 2316632 - DNA, 25 bp, Homo sapien
tttcagaggagcgtaggtgagtggc

SEQ ID NO: 2316633 - DNA, 25 bp, Homo sapien
gcctttttcagaggagcgtaggtga

SEQ ID NO: 2316634 - DNA, 25 bp, Homo sapien
aggccggcggctccatcgcagcatc

SEQ ID NO: 2316635 - DNA, 25 bp, Homo sapien
tggagcgcgccggatggcagcagcg

SEQ ID NO: 2316636 - DNA, 25 bp, Homo sapien
cccgctcagggcgtgtccgtcccgg

SEQ ID NO: 2316637 - DNA, 25 bp, Homo sapien
caggcgggccaggtacgagcctgga

SEQ ID NO: 2316638 - DNA, 25 bp, Homo sapien
cttttggatcgcgagaaaactacag

SEQ ID NO: 2316639 - DNA, 25 bp, Homo sapien
aagagcccgcgcgccatctgtgtcg

SEQ ID NO: 2316640 - DNA, 25 bp, Homo sapien
ccatctgtgtcgcagctggagaggc

SEQ ID NO: 2316641 - DNA, 25 bp, Homo sapien
gcacggagccttttggatcgcgaga

SEQ ID NO: 2316642 - DNA, 25 bp, Homo sapien
gccgtcgcttctcgagaaggccgta

SEQ ID NO: 2316643 - DNA, 25 bp, Homo sapien
acaaccctctgcgtgcgtggctcgc

SEQ ID NO: 2316644 - DNA, 25 bp, Homo sapien
cctacttcgtgagcctccatctgga

SEQ ID NO: 2316645 - DNA, 25 bp, Homo sapien
tccgtgaagctgtggacatgcgtac

SEQ ID NO: 2316646 - DNA, 25 bp, Homo sapien
tccacgcgccccaatacacagccga

SEQ ID NO: 2316647 - DNA, 25 bp, Homo sapien
cacgcgccccaatacacagccgacg

SEQ ID NO: 2316648 - DNA, 25 bp, Homo sapien
cgcgccccaatacacagccgacgag

SEQ ID NO: 2316649 - DNA, 25 bp, Homo sapien
ctccacgcgccccaatacacagccg

SEQ ID NO: 2316650 - DNA, 25 bp, Homo sapien
ccgcagcccgtggtagtgccggagc

SEQ ID NO: 2316651 - DNA, 25 bp, Homo sapien
ggtagtgccggagccttgctcctct

SEQ ID NO: 2316652 - DNA, 25 bp, Homo sapien
cagcccgtggtagtgccggagcctt

SEQ ID NO: 2316653 - DNA, 25 bp, Homo sapien
taggcagcccgcagcccgtggtagt

SEQ ID NO: 2316654 - DNA, 25 bp, Homo sapien
gccaaccccaaactatttagagctg

SEQ ID NO: 2316655 - DNA, 25 bp, Homo sapien
tgtgggggcataaagcccagtgttc

SEQ ID NO: 2316656 - DNA, 25 bp, Homo sapien
agtgcagtctgggaaccgggccaac

SEQ ID NO: 2316657 - DNA, 25 bp, Homo sapien
ccaaactatttagagctggaggcag

SEQ ID NO: 2316658 - DNA, 25 bp, Homo sapien
tcggggtcttgcctgggttggcggc

SEQ ID NO: 2316659 - DNA, 25 bp, Homo sapien
gatcggggtcttgcctgggttggcg

SEQ ID NO: 2316660 - DNA, 25 bp, Homo sapien
tgatcggggtcttgcctgggttggc

SEQ ID NO: 2316661 - DNA, 25 bp, Homo sapien
atcggggtcttgcctgggttggcgg

SEQ ID NO: 2316662 - DNA, 25 bp, Homo sapien
tttgagaaggtcgtacacaggcgtc

SEQ ID NO: 2316663 - DNA, 25 bp, Homo sapien
aaggtcgtacacaggcgtcttccct

SEQ ID NO: 2316664 - DNA, 25 bp, Homo sapien
tcgccaacggtgacccggaaggtga

SEQ ID NO: 2316665 - DNA, 25 bp, Homo sapien
cagtgcagctggtgtcgccaacggt

SEQ ID NO: 2316666 - DNA, 25 bp, Homo sapien
gaggtcactgaaaggacgggaaaga

SEQ ID NO: 2316667 - DNA, 25 bp, Homo sapien
gggcatgggcaatactggaggtcac

SEQ ID NO: 2316668 - DNA, 25 bp, Homo sapien
atgggcaatactggaggtcactgaa

SEQ ID NO: 2316669 - DNA, 25 bp, Homo sapien
catgggcaatactggaggtcactga

SEQ ID NO: 2316670 - DNA, 25 bp, Homo sapien
gcatgctcccccctttgaggtgttt

SEQ ID NO: 2316671 - DNA, 25 bp, Homo sapien
cagcatgctcccccctttgaggtgt

SEQ ID NO: 2316672 - DNA, 25 bp, Homo sapien
gctccagcatgctcccccctttgag

SEQ ID NO: 2316673 - DNA, 25 bp, Homo sapien
tgctcccccctttgaggtgtttgag

SEQ ID NO: 2316674 - DNA, 25 bp, Homo sapien
ttctgggatgcctcggttcctccct

SEQ ID NO: 2316675 - DNA, 25 bp, Homo sapien
aagggcttctgggatgcctcggttc

SEQ ID NO: 2316676 - DNA, 25 bp, Homo sapien
cagggcctgggttccttgaagggct

SEQ ID NO: 2316677 - DNA, 25 bp, Homo sapien
aggcctcggggcagagtgggtggtg

SEQ ID NO: 2316678 - DNA, 25 bp, Homo sapien
tggaaaaccctgttcaggtccagag

SEQ ID NO: 2316679 - DNA, 25 bp, Homo sapien
ccaacctgcgcgtgaaggaaggaca

SEQ ID NO: 2316680 - DNA, 25 bp, Homo sapien
ccaaacaccggcgaaaagactgaga

SEQ ID NO: 2316681 - DNA, 25 bp, Homo sapien
tatctttgtacccaagaaccagagg

SEQ ID NO: 2316682 - DNA, 25 bp, Homo sapien
tgcagcagtaaaaaccggaatgtcc

SEQ ID NO: 2316683 - DNA, 25 bp, Homo sapien
ctgcagcagtaaaaaccggaatgtc

SEQ ID NO: 2316684 - DNA, 25 bp, Homo sapien
gactacagatggaactggggtagca

SEQ ID NO: 2316685 - DNA, 25 bp, Homo sapien
ctacagatggaactggggtagcagc

SEQ ID NO: 2316686 - DNA, 25 bp, Homo sapien
taggactacagatggaactggggta

SEQ ID NO: 2316687 - DNA, 25 bp, Homo sapien
ggactacagatggaactggggtagc

SEQ ID NO: 2316688 - DNA, 25 bp, Homo sapien
ctcaggcagtcaggggacacagata

SEQ ID NO: 2316689 - DNA, 25 bp, Homo sapien
tcaggcagtcaggggacacagatac

SEQ ID NO: 2316690 - DNA, 25 bp, Homo sapien
caaagttgaggtgaagggttccatc

SEQ ID NO: 2316691 - DNA, 25 bp, Homo sapien
tggtcggacatcattcataaggctg

SEQ ID NO: 2316692 - DNA, 25 bp, Homo sapien
ggtatcatctaagccaggacagtgg

SEQ ID NO: 2316693 - DNA, 25 bp, Homo sapien
gaagtgcctgatgggcctcaaacac

SEQ ID NO: 2316694 - DNA, 25 bp, Homo sapien
aacggggttgcactcagactgctga

SEQ ID NO: 2316695 - DNA, 25 bp, Homo sapien
gggctgcagttccatgggggggctc

SEQ ID NO: 2316696 - DNA, 25 bp, Homo sapien
caacggggttgcactcagactgctg

SEQ ID NO: 2316697 - DNA, 25 bp, Homo sapien
tagccttccctcatggcccctggct

SEQ ID NO: 2316698 - DNA, 25 bp, Homo sapien
tggcccctggctcaagggaagacag

SEQ ID NO: 2316699 - DNA, 25 bp, Homo sapien
aaacacacatagccttccctcatgg

SEQ ID NO: 2316700 - DNA, 25 bp, Homo sapien
gaagacaggcatgcatgggaaatga

SEQ ID NO: 2316701 - DNA, 25 bp, Homo sapien
agggtgcatgaggctgagtgaaaaa

SEQ ID NO: 2316702 - DNA, 25 bp, Homo sapien
acagggtgcatgaggctgagtgaaa

SEQ ID NO: 2316703 - DNA, 25 bp, Homo sapien
gagcctcagactctaggtgagagga

SEQ ID NO: 2316704 - DNA, 25 bp, Homo sapien
ttctcacacccacgctggtccccac

SEQ ID NO: 2316705 - DNA, 25 bp, Homo sapien
gcaaccgccagcctttctgcaccac

SEQ ID NO: 2316706 - DNA, 25 bp, Homo sapien
cggcaaccgccagcctttctgcacc

SEQ ID NO: 2316707 - DNA, 25 bp, Homo sapien
accgccagcctttctgcaccaccag

SEQ ID NO: 2316708 - DNA, 25 bp, Homo sapien
ctccggcaaccgccagcctttctgc

SEQ ID NO: 2316709 - DNA, 25 bp, Homo sapien
cactcgacaggtcatggtgaattct

SEQ ID NO: 2316710 - DNA, 25 bp, Homo sapien
tcatggtgaattctttgcggtgggc

SEQ ID NO: 2316711 - DNA, 25 bp, Homo sapien
aaacgctccactcgacaggtcatgg

SEQ ID NO: 2316712 - DNA, 25 bp, Homo sapien
aattctttgcggtgggctggcccag

SEQ ID NO: 2316713 - DNA, 25 bp, Homo sapien
gttatgattccccacagacccagtg

SEQ ID NO: 2316714 - DNA, 25 bp, Homo sapien
ggagttgtgagaaccccttcttgcc

SEQ ID NO: 2316715 - DNA, 25 bp, Homo sapien
tgcccatgcacgtgagaacctggtc

SEQ ID NO: 2316716 - DNA, 25 bp, Homo sapien
ggtcatacttggattgagggtcccc

SEQ ID NO: 2316717 - DNA, 25 bp, Homo sapien
ccacctcattgccatcccgggcatc

SEQ ID NO: 2316718 - DNA, 25 bp, Homo sapien
gccgcattccgctttgccaattttt

SEQ ID NO: 2316719 - DNA, 25 bp, Homo sapien
gaagcagcattttggccgccgcatt

SEQ ID NO: 2316720 - DNA, 25 bp, Homo sapien
attgccatcccgggcatccagaggc

SEQ ID NO: 2316721 - DNA, 25 bp, Homo sapien
tcactgctgagtcacagacccaagt

SEQ ID NO: 2316722 - DNA, 25 bp, Homo sapien
ccctgggtctggtaggaaaactgtg

SEQ ID NO: 2316723 - DNA, 25 bp, Homo sapien
agtcaaggctgagtcggccccagga

SEQ ID NO: 2316724 - DNA, 25 bp, Homo sapien
tacagagcgggcctacagtcaaggc

SEQ ID NO: 2316725 - DNA, 25 bp, Homo sapien
caggcattgagacattcaacgtcaa

SEQ ID NO: 2316726 - DNA, 25 bp, Homo sapien
ccaggcattgagacattcaacgtca

SEQ ID NO: 2316727 - DNA, 25 bp, Homo sapien
atgaagcgagagactgtgggaccca

SEQ ID NO: 2316728 - DNA, 25 bp, Homo sapien
gtgagaaagatgaagcgagagactg

SEQ ID NO: 2316729 - DNA, 25 bp, Homo sapien
tactgaatttcgtagagaatcccag

SEQ ID NO: 2316730 - DNA, 25 bp, Homo sapien
caactgcggagggacaggatcttct

SEQ ID NO: 2316731 - DNA, 25 bp, Homo sapien
gctgacgtgaaaggcctgctcctca

SEQ ID NO: 2316732 - DNA, 25 bp, Homo sapien
cgtagagaatcccaggtgcaacctg

SEQ ID NO: 2316733 - DNA, 25 bp, Homo sapien
ctggggaggggtgcgttcacgttat

SEQ ID NO: 2316734 - DNA, 25 bp, Homo sapien
ggggaggggtgcgttcacgttatca

SEQ ID NO: 2316735 - DNA, 25 bp, Homo sapien
ggaggcaatgttgggggaggtagcc

SEQ ID NO: 2316736 - DNA, 25 bp, Homo sapien
gaggggtgcgttcacgttatcatca

SEQ ID NO: 2316737 - DNA, 25 bp, Homo sapien
ggtggacagttccaccaggcactgg

SEQ ID NO: 2316738 - DNA, 25 bp, Homo sapien
gtggccggctgggtggacagttcca

SEQ ID NO: 2316739 - DNA, 25 bp, Homo sapien
tgcctccctggtggttgcagagcca

SEQ ID NO: 2316740 - DNA, 25 bp, Homo sapien
gagccatgacacacagtggccggct

SEQ ID NO: 2316741 - DNA, 25 bp, Homo sapien
gctgcctgccatgatcttgaggtac

SEQ ID NO: 2316742 - DNA, 25 bp, Homo sapien
ttgctgcctgccatgatcttgaggt

SEQ ID NO: 2316743 - DNA, 25 bp, Homo sapien
tgctgcctgccatgatcttgaggta

SEQ ID NO: 2316744 - DNA, 25 bp, Homo sapien
agaggtagagatggcacccacagag

SEQ ID NO: 2316745 - DNA, 25 bp, Homo sapien
ccaataaaatgaggacggatcctgg

SEQ ID NO: 2316746 - DNA, 25 bp, Homo sapien
gagctgcgcagatacatgagcccag

SEQ ID NO: 2316747 - DNA, 25 bp, Homo sapien
agggtgcacatccatgagtccagct

SEQ ID NO: 2316748 - DNA, 25 bp, Homo sapien
tttattccaggctctagtagacagc

SEQ ID NO: 2316749 - DNA, 25 bp, Homo sapien
atttattccaggctctagtagacag

SEQ ID NO: 2316750 - DNA, 25 bp, Homo sapien
attccaggctctagtagacagcccc

SEQ ID NO: 2316751 - DNA, 25 bp, Homo sapien
tattccaggctctagtagacagccc

SEQ ID NO: 2316752 - DNA, 25 bp, Homo sapien
tctgctatccacactgctcaaggaa

SEQ ID NO: 2316753 - DNA, 25 bp, Homo sapien
aatgtggtgacctcctctgctatcc

SEQ ID NO: 2316754 - DNA, 25 bp, Homo sapien
tccacactgctcaaggaaacagaag

SEQ ID NO: 2316755 - DNA, 25 bp, Homo sapien
cacaaaagtaatgtggtgacctcct

SEQ ID NO: 2316756 - DNA, 25 bp, Homo sapien
tgtccagggtatttgcccatcttcc

SEQ ID NO: 2316757 - DNA, 25 bp, Homo sapien
tcactgttgcactacctgctccagg

SEQ ID NO: 2316758 - DNA, 25 bp, Homo sapien
ctgggtcactgttgcactacctgct

SEQ ID NO: 2316759 - DNA, 25 bp, Homo sapien
gaggaagacagcgaacccctcccac

SEQ ID NO: 2316760 - DNA, 25 bp, Homo sapien
gggactccctggagactggacccta

SEQ ID NO: 2316761 - DNA, 25 bp, Homo sapien
agagtcggggtcagaatgatagtcc

SEQ ID NO: 2316762 - DNA, 25 bp, Homo sapien
cagaggctgtggagaccagagtcgg

SEQ ID NO: 2316763 - DNA, 25 bp, Homo sapien
agccccacagtagcctgctcctgtc

SEQ ID NO: 2316764 - DNA, 25 bp, Homo sapien
cataccaaggtggttacctagcagg

SEQ ID NO: 2316765 - DNA, 25 bp, Homo sapien
gggctaatagcacagagttatctca

SEQ ID NO: 2316766 - DNA, 25 bp, Homo sapien
gcaggttaaaggagcttatgtcctc

SEQ ID NO: 2316767 - DNA, 25 bp, Homo sapien
taaggcagattaaaggactccctcc

SEQ ID NO: 2316768 - DNA, 25 bp, Homo sapien
cttttgctgctggttatgcatctca

SEQ ID NO: 2316769 - DNA, 25 bp, Homo sapien
ctggttatgcatctcaaatctgact

SEQ ID NO: 2316770 - DNA, 25 bp, Homo sapien
tgctgctggttatgcatctcaaatc

SEQ ID NO: 2316771 - DNA, 25 bp, Homo sapien
ctgctggttatgcatctcaaatctg

SEQ ID NO: 2316772 - DNA, 25 bp, Homo sapien
cttgttattgctaccagccatgtgg

SEQ ID NO: 2316773 - DNA, 25 bp, Homo sapien
cagaaccaaacatcatggaaggtgt

SEQ ID NO: 2316774 - DNA, 25 bp, Homo sapien
caaatctttgtcttccagatccatc

SEQ ID NO: 2316775 - DNA, 25 bp, Homo sapien
gtcacttggcccttcctaaagtcca

SEQ ID NO: 2316776 - DNA, 25 bp, Homo sapien
tcagtgggaagatgtgtacgggacc

SEQ ID NO: 2316777 - DNA, 25 bp, Homo sapien
gatgtgtacgggacctcagtgagga

SEQ ID NO: 2316778 - DNA, 25 bp, Homo sapien
ccagaaccacagtaacaaaatggca

SEQ ID NO: 2316779 - DNA, 25 bp, Homo sapien
tcagtgaggagcactgccagaacca

SEQ ID NO: 2316780 - DNA, 25 bp, Homo sapien
tgactgagtttatggctcctaagga

SEQ ID NO: 2316781 - DNA, 25 bp, Homo sapien
gatttcccagtagcagccttgccct

SEQ ID NO: 2316782 - DNA, 25 bp, Homo sapien
ggagctttcctaagactcttgacta

SEQ ID NO: 2316783 - DNA, 25 bp, Homo sapien
cagtctgtccctgtgttgggtggct

SEQ ID NO: 2316784 - DNA, 25 bp, Homo sapien
gagctggtgctgaacaggccacacc

SEQ ID NO: 2316785 - DNA, 25 bp, Homo sapien
tgcttttcagagctggtgctgaaca

SEQ ID NO: 2316786 - DNA, 25 bp, Homo sapien
ttttcagagctggtgctgaacaggc

SEQ ID NO: 2316787 - DNA, 25 bp, Homo sapien
tcaggtaacaggttctgctgcattt

SEQ ID NO: 2316788 - DNA, 25 bp, Homo sapien
tgatgacatattacccgctgaccca

SEQ ID NO: 2316789 - DNA, 25 bp, Homo sapien
caggatcttgaagcgtcatagccaa

SEQ ID NO: 2316790 - DNA, 25 bp, Homo sapien
ttataagagtttaccggccaaagca

SEQ ID NO: 2316791 - DNA, 25 bp, Homo sapien
tgcagtttctaccaggaccatagga

SEQ ID NO: 2316792 - DNA, 25 bp, Homo sapien
tgttagcgccctcataaaagagtcc

SEQ ID NO: 2316793 - DNA, 25 bp, Homo sapien
tttgtgatggccaactagtgcccag

SEQ ID NO: 2316794 - DNA, 25 bp, Homo sapien
tgacattgaaatttggcccagcccg

SEQ ID NO: 2316795 - DNA, 25 bp, Homo sapien
gagatttacaaacgaggaccacctg

SEQ ID NO: 2316796 - DNA, 25 bp, Homo sapien
tcttcctaaaagcccagtgtatagc

SEQ ID NO: 2316797 - DNA, 25 bp, Homo sapien
ttcctaaaagcccagtgtatagcca

SEQ ID NO: 2316798 - DNA, 25 bp, Homo sapien
cttcctaaaagcccagtgtatagcc

SEQ ID NO: 2316799 - DNA, 25 bp, Homo sapien
tcctaaaagcccagtgtatagccat

SEQ ID NO: 2316800 - DNA, 25 bp, Homo sapien
gatgtcttcaagctgaagtcttgcc

SEQ ID NO: 2316801 - DNA, 25 bp, Homo sapien
acaacaaagccttctcccctgagtg

SEQ ID NO: 2316802 - DNA, 25 bp, Homo sapien
gatgatttatacctaatcctttgtc

SEQ ID NO: 2316803 - DNA, 25 bp, Homo sapien
cacaactcctggcatctataaggct

SEQ ID NO: 2316804 - DNA, 25 bp, Homo sapien
catcagcgatgtcagattttgagca

SEQ ID NO: 2316805 - DNA, 25 bp, Homo sapien
tccactataaagattggcaccagca

SEQ ID NO: 2316806 - DNA, 25 bp, Homo sapien
gagttgcaccgctgcttatcaaaga

SEQ ID NO: 2316807 - DNA, 25 bp, Homo sapien
gaaagctgagtgctctgttcgacat

SEQ ID NO: 2316808 - DNA, 25 bp, Homo sapien
ctgcctccatgaacattatccctta

SEQ ID NO: 2316809 - DNA, 25 bp, Homo sapien
ccatgaacattatcccttaaatctc

SEQ ID NO: 2316810 - DNA, 25 bp, Homo sapien
cctccaaagctgtttattgcttcgt

SEQ ID NO: 2316811 - DNA, 25 bp, Homo sapien
agctgtttattgcttcgtatcctct

SEQ ID NO: 2316812 - DNA, 25 bp, Homo sapien
tttattactgggatcaacaaattcc

SEQ ID NO: 2316813 - DNA, 25 bp, Homo sapien
ttattactgggatcaacaaattcca

SEQ ID NO: 2316814 - DNA, 25 bp, Homo sapien
gctctatattccctttgtgatgcat

SEQ ID NO: 2316815 - DNA, 25 bp, Homo sapien
aaacttggtttcagctctatattcc

SEQ ID NO: 2316816 - DNA, 25 bp, Homo sapien
tgctaaacttggtttcagctctata

SEQ ID NO: 2316817 - DNA, 25 bp, Homo sapien
ggtttcagctctatattccctttgt

SEQ ID NO: 2316818 - DNA, 25 bp, Homo sapien
tactgagctgaaaggtattcggtac

SEQ ID NO: 2316819 - DNA, 25 bp, Homo sapien
tgtttgtgtgctaaaccggtcaatt

SEQ ID NO: 2316820 - DNA, 25 bp, Homo sapien
tactgttttctcctgatctgataga

SEQ ID NO: 2316821 - DNA, 25 bp, Homo sapien
gtagtagacgaggaatgtttgtgtg

SEQ ID NO: 2316822 - DNA, 25 bp, Homo sapien
tctcctgatctgatagattgcttct

SEQ ID NO: 2316823 - DNA, 25 bp, Homo sapien
attttgttactgtcttttggttgtg

SEQ ID NO: 2316824 - DNA, 25 bp, Homo sapien
tgcagtggcaggcttactgcaacct

SEQ ID NO: 2316825 - DNA, 25 bp, Homo sapien
gacgaagtctcgctgtgttccccag

SEQ ID NO: 2316826 - DNA, 25 bp, Homo sapien
caattctcaggccttagcttcccaa

SEQ ID NO: 2316827 - DNA, 25 bp, Homo sapien
tcccatagttctcccgcgtctggtt

SEQ ID NO: 2316828 - DNA, 25 bp, Homo sapien
tagttctcccgcgtctggttggccc

SEQ ID NO: 2316829 - DNA, 25 bp, Homo sapien
aacgtggttggctcagggtttgaca

SEQ ID NO: 2316830 - DNA, 25 bp, Homo sapien
ccgcgtctggttggccccgtgtgtt

SEQ ID NO: 2316831 - DNA, 25 bp, Homo sapien
aaattgctccgtgggctttcagcgg

SEQ ID NO: 2316832 - DNA, 25 bp, Homo sapien
tcatccgggcaaaattacattcctg

SEQ ID NO: 2316833 - DNA, 25 bp, Homo sapien
tcagcggcggtttttatcgccggcc

SEQ ID NO: 2316834 - DNA, 25 bp, Homo sapien
cattcctgtaatggcgtcgctcggg

SEQ ID NO: 2316835 - DNA, 25 bp, Homo sapien
aggagctcagggccataaaaatgca

SEQ ID NO: 2316836 - DNA, 25 bp, Homo sapien
cctgcaagatggattggccgcattg

SEQ ID NO: 2316837 - DNA, 25 bp, Homo sapien
aaaaatgcagatggaggatcggtgt

SEQ ID NO: 2316838 - DNA, 25 bp, Homo sapien
taacgggcccatataaatccctctg

SEQ ID NO: 2316839 - DNA, 25 bp, Homo sapien
tgatggcgcggagacaagcagaaat

SEQ ID NO: 2316840 - DNA, 25 bp, Homo sapien
caaagggacgggcagtaaagatgag

SEQ ID NO: 2316841 - DNA, 25 bp, Homo sapien
cctcgttgtagcagcgcgagagcaa

SEQ ID NO: 2316842 - DNA, 25 bp, Homo sapien
tgcagtctctcctcgttgtagcagc

SEQ ID NO: 2316843 - DNA, 25 bp, Homo sapien
agggtgaggatttggcgtgaagggc

SEQ ID NO: 2316844 - DNA, 25 bp, Homo sapien
cgtgaagggcacagcggcgtggggg

SEQ ID NO: 2316845 - DNA, 25 bp, Homo sapien
ccccgatctgcgtctcagggagggt

SEQ ID NO: 2316846 - DNA, 25 bp, Homo sapien
gtggggggcgcggatctctggcccc

SEQ ID NO: 2316847 - DNA, 25 bp, Homo sapien
ctaagctcattccttggcagtaact

SEQ ID NO: 2316848 - DNA, 25 bp, Homo sapien
cattatttgcatggagggtgtaaat

SEQ ID NO: 2316849 - DNA, 25 bp, Homo sapien
tttgcatggagggtgtaaattagct

SEQ ID NO: 2316850 - DNA, 25 bp, Homo sapien
ttacacatagccaactgtctctaag

SEQ ID NO: 2316851 - DNA, 25 bp, Homo sapien
tgcttcactgtcccgaatctgcttc

SEQ ID NO: 2316852 - DNA, 25 bp, Homo sapien
tcactgtcccgaatctgcttcatac

SEQ ID NO: 2316853 - DNA, 25 bp, Homo sapien
cttcactgtcccgaatctgcttcat

SEQ ID NO: 2316854 - DNA, 25 bp, Homo sapien
actgtcccgaatctgcttcatactc

SEQ ID NO: 2316855 - DNA, 25 bp, Homo sapien
cccctcatacctgtatgcacactct

SEQ ID NO: 2316856 - DNA, 25 bp, Homo sapien
tcccctcatacctgtatgcacactc

SEQ ID NO: 2316857 - DNA, 25 bp, Homo sapien
ccctcatacctgtatgcacactctg

SEQ ID NO: 2316858 - DNA, 25 bp, Homo sapien
tcatacctgtatgcacactctgcct

SEQ ID NO: 2316859 - DNA, 25 bp, Homo sapien
cctctcctcgcatctcctcacatgg

SEQ ID NO: 2316860 - DNA, 25 bp, Homo sapien
gtccccccacagcaataaaagcttc

SEQ ID NO: 2316861 - DNA, 25 bp, Homo sapien
aacaagtggtcccaggtatccccat

SEQ ID NO: 2316862 - DNA, 25 bp, Homo sapien
cctcgcatctcctcacatggaaaga

SEQ ID NO: 2316863 - DNA, 25 bp, Homo sapien
tcccctgtgggaatagaatcgtcca

SEQ ID NO: 2316864 - DNA, 25 bp, Homo sapien
gacatcatggcctctcaggtccctt

SEQ ID NO: 2316865 - DNA, 25 bp, Homo sapien
cctagccctggttgcttctgataca

SEQ ID NO: 2316866 - DNA, 25 bp, Homo sapien
tcctgttcggaagcagtggctgaat

SEQ ID NO: 2316867 - DNA, 25 bp, Homo sapien
tgacacaggaaatagattagtgggc

SEQ ID NO: 2316868 - DNA, 25 bp, Homo sapien
ttcagcctggtgtgggtttgtgatg

SEQ ID NO: 2316869 - DNA, 25 bp, Homo sapien
taaagttcctgtcccctggacttca

SEQ ID NO: 2316870 - DNA, 25 bp, Homo sapien
gggcgtgcatatgactagtgacaat

SEQ ID NO: 2316871 - DNA, 25 bp, Homo sapien
cagcagccacccctaatgcagccgg

SEQ ID NO: 2316872 - DNA, 25 bp, Homo sapien
agcagccacccctaatgcagccggc

SEQ ID NO: 2316873 - DNA, 25 bp, Homo sapien
gcagccacccctaatgcagccggcc

SEQ ID NO: 2316874 - DNA, 25 bp, Homo sapien
cagccacccctaatgcagccggccc

SEQ ID NO: 2316875 - DNA, 25 bp, Homo sapien
agctccgagactgttttctcgtaga

SEQ ID NO: 2316876 - DNA, 25 bp, Homo sapien
gctccgagactgttttctcgtagac

SEQ ID NO: 2316877 - DNA, 25 bp, Homo sapien
aaggagcaactctcatgtggattat

SEQ ID NO: 2316878 - DNA, 25 bp, Homo sapien
gcaactctcatgtggattattccca

SEQ ID NO: 2316879 - DNA, 25 bp, Homo sapien
gttgtgggtaagcagtagctcagct

SEQ ID NO: 2316880 - DNA, 25 bp, Homo sapien
tttatgtatatgcaggttgtgggta

SEQ ID NO: 2316881 - DNA, 25 bp, Homo sapien
tgtctttaacatgtggccttcaggg

SEQ ID NO: 2316882 - DNA, 25 bp, Homo sapien
cacgtgatgattcagggaaccagct

SEQ ID NO: 2316883 - DNA, 25 bp, Homo sapien
tagtggtccgctctctgccacgtga

SEQ ID NO: 2316884 - DNA, 25 bp, Homo sapien
cagggtcactgtgcctaaggtcatc

SEQ ID NO: 2316885 - DNA, 25 bp, Homo sapien
actccaccttccaaaatgccacaca

SEQ ID NO: 2316886 - DNA, 25 bp, Homo sapien
aggtgcccaggcactccaccttcca

SEQ ID NO: 2316887 - DNA, 25 bp, Homo sapien
tccaccttccaaaatgccacacaat

SEQ ID NO: 2316888 - DNA, 25 bp, Homo sapien
ctaggtgcccaggcactccaccttc

SEQ ID NO: 2316889 - DNA, 25 bp, Homo sapien
agatttaacatattgactctctgag

SEQ ID NO: 2316890 - DNA, 25 bp, Homo sapien
tccacagcttctccgagatttaaca

SEQ ID NO: 2316891 - DNA, 25 bp, Homo sapien
gcttctccgagatttaacatattga

SEQ ID NO: 2316892 - DNA, 25 bp, Homo sapien
taacatattgactctctgagctgca

SEQ ID NO: 2316893 - DNA, 25 bp, Homo sapien
gaaaaggggatggtagaagagtaca

SEQ ID NO: 2316894 - DNA, 25 bp, Homo sapien
ccagaaaaggggatggtagaagagt

SEQ ID NO: 2316895 - DNA, 25 bp, Homo sapien
cagaaaaggggatggtagaagagta

SEQ ID NO: 2316896 - DNA, 25 bp, Homo sapien
agccagaaaaggggatggtagaaga

SEQ ID NO: 2316897 - DNA, 25 bp, Homo sapien
tagcacaggaaattccagctgtctc

SEQ ID NO: 2316898 - DNA, 25 bp, Homo sapien
caggaaattccagctgtctctctgg

SEQ ID NO: 2316899 - DNA, 25 bp, Homo sapien
caggtagcacaggaaattccagctg

SEQ ID NO: 2316900 - DNA, 25 bp, Homo sapien
gctgtctctctggttatcttccttc

SEQ ID NO: 2316901 - DNA, 25 bp, Homo sapien
cagagaaatcattaaatctgaaagt

SEQ ID NO: 2316902 - DNA, 25 bp, Homo sapien
aatctgaaagttccatcttaaccat

SEQ ID NO: 2316903 - DNA, 25 bp, Homo sapien
tggaagcagagaaatcattaaatct

SEQ ID NO: 2316904 - DNA, 25 bp, Homo sapien
gaagcagagaaatcattaaatctga

SEQ ID NO: 2316905 - DNA, 25 bp, Homo sapien
cccacatagacactgataggccaga

SEQ ID NO: 2316906 - DNA, 25 bp, Homo sapien
ccacatagacactgataggccagag

SEQ ID NO: 2316907 - DNA, 25 bp, Homo sapien
aggtcatcccctgccaatgtcttct

SEQ ID NO: 2316908 - DNA, 25 bp, Homo sapien
gcccaggtcatcccctgccaatgtc

SEQ ID NO: 2316909 - DNA, 25 bp, Homo sapien
ccaagagccgatatggagatgaagg

SEQ ID NO: 2316910 - DNA, 25 bp, Homo sapien
ttggtaaccaagagccgatatggag

SEQ ID NO: 2316911 - DNA, 25 bp, Homo sapien
ttcttggtaaccaagagccgatatg

SEQ ID NO: 2316912 - DNA, 25 bp, Homo sapien
ccgatatggagatgaaggatacttt

SEQ ID NO: 2316913 - DNA, 25 bp, Homo sapien
gaacgtgggtgtacatatatcaatt

SEQ ID NO: 2316914 - DNA, 25 bp, Homo sapien
caatttactgttttccacggtggct

SEQ ID NO: 2316915 - DNA, 25 bp, Homo sapien
ttgccaaccagcagtacacaaaggt

SEQ ID NO: 2316916 - DNA, 25 bp, Homo sapien
tgtttgtctatctatcaatagatgc

SEQ ID NO: 2316917 - DNA, 25 bp, Homo sapien
agtaagttccactggttcccgtgct

SEQ ID NO: 2316918 - DNA, 25 bp, Homo sapien
tgccaatccggaagtttggcctcat

SEQ ID NO: 2316919 - DNA, 25 bp, Homo sapien
aagttccactggttcccgtgctggg

SEQ ID NO: 2316920 - DNA, 25 bp, Homo sapien
cgtgctggggtgctaacaatcttgc

SEQ ID NO: 2316921 - DNA, 25 bp, Homo sapien
ggaaagatgcctgttgtgcccacgc

SEQ ID NO: 2316922 - DNA, 25 bp, Homo sapien
ccacgctggagccagtctagtcttc

SEQ ID NO: 2316923 - DNA, 25 bp, Homo sapien
agatgcctgttgtgcccacgctgga

SEQ ID NO: 2316924 - DNA, 25 bp, Homo sapien
gctggagccagtctagtcttcaggg

SEQ ID NO: 2316925 - DNA, 25 bp, Homo sapien
cacgcaacgcttgcccaaggggagc

SEQ ID NO: 2316926 - DNA, 25 bp, Homo sapien
gcaaaattggcagcagtcctaaccc

SEQ ID NO: 2316927 - DNA, 25 bp, Homo sapien
gtccctttcagtccgtccatccata

SEQ ID NO: 2316928 - DNA, 25 bp, Homo sapien
ccatccatacgaagtaggggaagca

SEQ ID NO: 2316929 - DNA, 25 bp, Homo sapien
acctgttttgcttgctggctcctag

SEQ ID NO: 2316930 - DNA, 25 bp, Homo sapien
tcttaacacctgttttgcttgctgg

SEQ ID NO: 2316931 - DNA, 25 bp, Homo sapien
gcaagatcaaagctcttaacacctg

SEQ ID NO: 2316932 - DNA, 25 bp, Homo sapien
caagtctcctgcaagatcaaagctc

SEQ ID NO: 2316933 - DNA, 25 bp, Homo sapien
cccagtcattatttcagaggcctct

SEQ ID NO: 2316934 - DNA, 25 bp, Homo sapien
tccccagtcattatttcagaggcct

SEQ ID NO: 2316935 - DNA, 25 bp, Homo sapien
cagtcattatttcagaggcctctac

SEQ ID NO: 2316936 - DNA, 25 bp, Homo sapien
atccccagtcattatttcagaggcc

SEQ ID NO: 2316937 - DNA, 25 bp, Homo sapien
aattgtcattcactccaagctctct

SEQ ID NO: 2316938 - DNA, 25 bp, Homo sapien
tgtcattcactccaagctctctagc

SEQ ID NO: 2316939 - DNA, 25 bp, Homo sapien
gtcattcactccaagctctctagct

SEQ ID NO: 2316940 - DNA, 25 bp, Homo sapien
ttgtcattcactccaagctctctag

SEQ ID NO: 2316941 - DNA, 25 bp, Homo sapien
gatgaaaaggtagcatttctcactt

SEQ ID NO: 2316942 - DNA, 25 bp, Homo sapien
gcatttctcacttacagcgtcttct

SEQ ID NO: 2316943 - DNA, 25 bp, Homo sapien
agatgaaaaggtagcatttctcact

SEQ ID NO: 2316944 - DNA, 25 bp, Homo sapien
tcactgctcctctctcctttgtcca

SEQ ID NO: 2316945 - DNA, 25 bp, Homo sapien
ctttcactgctcctctctcctttgt

SEQ ID NO: 2316946 - DNA, 25 bp, Homo sapien
tttcactgctcctctctcctttgtc

SEQ ID NO: 2316947 - DNA, 25 bp, Homo sapien
cactgctcctctctcctttgtccat

SEQ ID NO: 2316948 - DNA, 25 bp, Homo sapien
taagtgaactgctagcgtagtgcat

SEQ ID NO: 2316949 - DNA, 25 bp, Homo sapien
tactggaagccggtattaagtgaac

SEQ ID NO: 2316950 - DNA, 25 bp, Homo sapien
tggaagccggtattaagtgaactgc

SEQ ID NO: 2316951 - DNA, 25 bp, Homo sapien
gccggtattaagtgaactgctagcg

SEQ ID NO: 2316952 - DNA, 25 bp, Homo sapien
ccatcagcatatccccaaacagtag

SEQ ID NO: 2316953 - DNA, 25 bp, Homo sapien
tccatcagcatatccccaaacagta

SEQ ID NO: 2316954 - DNA, 25 bp, Homo sapien
aaagtcctctaccttcagcttcctc

SEQ ID NO: 2316955 - DNA, 25 bp, Homo sapien
catcagcatatccccaaacagtagt

SEQ ID NO: 2316956 - DNA, 25 bp, Homo sapien
tctcaaagcacttagctgccaggtg

SEQ ID NO: 2316957 - DNA, 25 bp, Homo sapien
cctgatcgtctagagtaattgctgc

SEQ ID NO: 2316958 - DNA, 25 bp, Homo sapien
ttggcccgatggatctgagcccttg

SEQ ID NO: 2316959 - DNA, 25 bp, Homo sapien
ggtgctcattaagccctcttgggtg

SEQ ID NO: 2316960 - DNA, 25 bp, Homo sapien
taggaaacagcactcccttaaacac

SEQ ID NO: 2316961 - DNA, 25 bp, Homo sapien
tattaacattaggtgaaacctcagt

SEQ ID NO: 2316962 - DNA, 25 bp, Homo sapien
aaaggttctgagaagccctgctgct

SEQ ID NO: 2316963 - DNA, 25 bp, Homo sapien
tcctaaaatgacctgattcaatgct

SEQ ID NO: 2316964 - DNA, 25 bp, Homo sapien
ccacactggctcctccaggtcgctc

SEQ ID NO: 2316965 - DNA, 25 bp, Homo sapien
ccagataccacactggctcctccag

SEQ ID NO: 2316966 - DNA, 25 bp, Homo sapien
tcccagataccacactggctcctcc

SEQ ID NO: 2316967 - DNA, 25 bp, Homo sapien
agataccacactggctcctccaggt

SEQ ID NO: 2316968 - DNA, 25 bp, Homo sapien
aaatgccatggagaatgatgttgtg

SEQ ID NO: 2316969 - DNA, 25 bp, Homo sapien
ccatggagaatgatgttgtgactca

SEQ ID NO: 2316970 - DNA, 25 bp, Homo sapien
gagaatgatgttgtgactcatggct

SEQ ID NO: 2316971 - DNA, 25 bp, Homo sapien
tgccatggagaatgatgttgtgact

SEQ ID NO: 2316972 - DNA, 25 bp, Homo sapien
cttgctttgactgagtcttgtgaaa

SEQ ID NO: 2316973 - DNA, 25 bp, Homo sapien
tcttgctttgactgagtcttgtgaa

SEQ ID NO: 2316974 - DNA, 25 bp, Homo sapien
ttgctttgactgagtcttgtgaaat

SEQ ID NO: 2316975 - DNA, 25 bp, Homo sapien
ccgtggaggcacaccacacagaaca

SEQ ID NO: 2316976 - DNA, 25 bp, Homo sapien
tcactggagaccacaccgtggaggc

SEQ ID NO: 2316977 - DNA, 25 bp, Homo sapien
gagaccacaccgtggaggcacacca

SEQ ID NO: 2316978 - DNA, 25 bp, Homo sapien
caccacacagaacagccaaactccc

SEQ ID NO: 2316979 - DNA, 25 bp, Homo sapien
tgaagaggcttggaaatctaccggt

SEQ ID NO: 2316980 - DNA, 25 bp, Homo sapien
aagaggcttggaaatctaccggtgg

SEQ ID NO: 2316981 - DNA, 25 bp, Homo sapien
gggaggggcctcacagtcaacagcc

SEQ ID NO: 2316982 - DNA, 25 bp, Homo sapien
cagtcaacagcccagagagcttcgc

SEQ ID NO: 2316983 - DNA, 25 bp, Homo sapien
tatttcttagcaaacttgctgaaca

SEQ ID NO: 2316984 - DNA, 25 bp, Homo sapien
ttatttcttagcaaacttgctgaac

SEQ ID NO: 2316985 - DNA, 25 bp, Homo sapien
ttagcactcagtattcattcggatt

SEQ ID NO: 2316986 - DNA, 25 bp, Homo sapien
ctgaaactcttataagtccaagttt

SEQ ID NO: 2316987 - DNA, 25 bp, Homo sapien
ttcctttagcactcagtattcattc

SEQ ID NO: 2316988 - DNA, 25 bp, Homo sapien
ctttagcactcagtattcattcgga

SEQ ID NO: 2316989 - DNA, 25 bp, Homo sapien
ccccattctgcctctgccaattaat

SEQ ID NO: 2316990 - DNA, 25 bp, Homo sapien
ttctgcctctgccaattaatggaag

SEQ ID NO: 2316991 - DNA, 25 bp, Homo sapien
cattctgcctctgccaattaatgga

SEQ ID NO: 2316992 - DNA, 25 bp, Homo sapien
ccattctgcctctgccaattaatgg

SEQ ID NO: 2316993 - DNA, 25 bp, Homo sapien
aatgaccaattgcatgaccgagttg

SEQ ID NO: 2316994 - DNA, 25 bp, Homo sapien
catcagaaggcacctttagtaccac

SEQ ID NO: 2316995 - DNA, 25 bp, Homo sapien
cacctttagtaccacacatatgcat

SEQ ID NO: 2316996 - DNA, 25 bp, Homo sapien
ttgcatgaccgagttgacaacatca

SEQ ID NO: 2316997 - DNA, 25 bp, Homo sapien
actgcattactggcctcattatttc

SEQ ID NO: 2316998 - DNA, 25 bp, Homo sapien
ttacagtgacagactcccttttggt

SEQ ID NO: 2316999 - DNA, 25 bp, Homo sapien
tgttgattacagactgcttaattac

SEQ ID NO: 2317000 - DNA, 25 bp, Homo sapien
cagactgcttaattacagtgacaga

SEQ ID NO: 2317001 - DNA, 25 bp, Homo sapien
gtgggacacatggaatcagccagca

SEQ ID NO: 2317002 - DNA, 25 bp, Homo sapien
tgtgggacacatggaatcagccagc

SEQ ID NO: 2317003 - DNA, 25 bp, Homo sapien
tgggacacatggaatcagccagcat

SEQ ID NO: 2317004 - DNA, 25 bp, Homo sapien
ctgtgggacacatggaatcagccag

SEQ ID NO: 2317005 - DNA, 25 bp, Homo sapien
tttccatattctgaatagcaaaggc

SEQ ID NO: 2317006 - DNA, 25 bp, Homo sapien
ttctgctgcccactatccaaatcaa

SEQ ID NO: 2317007 - DNA, 25 bp, Homo sapien
ggctccatttctcccatttccatat

SEQ ID NO: 2317008 - DNA, 25 bp, Homo sapien
tgtaaacattttctggctccatttc

SEQ ID NO: 2317009 - DNA, 25 bp, Homo sapien
tcagctgtcctttgggtagttttcc

SEQ ID NO: 2317010 - DNA, 25 bp, Homo sapien
cagctgtcctttgggtagttttcct

SEQ ID NO: 2317011 - DNA, 25 bp, Homo sapien
caaagtaggttagtaggatgagccc

SEQ ID NO: 2317012 - DNA, 25 bp, Homo sapien
tctgttggcagaatgaaggctgagc

SEQ ID NO: 2317013 - DNA, 25 bp, Homo sapien
gaagtggaggccctacgattctggc

SEQ ID NO: 2317014 - DNA, 25 bp, Homo sapien
taaaactgggatagttgagctgctc

SEQ ID NO: 2317015 - DNA, 25 bp, Homo sapien
ttaaatgcacataggctgacaatgg

SEQ ID NO: 2317016 - DNA, 25 bp, Homo sapien
tggacaaaagcagaatatgcctttg

SEQ ID NO: 2317017 - DNA, 25 bp, Homo sapien
tcctatgataatcctgcacatggca

SEQ ID NO: 2317018 - DNA, 25 bp, Homo sapien
gcctttgagcatgacatagtagaaa

SEQ ID NO: 2317019 - DNA, 25 bp, Homo sapien
cctccattgactccttctgaaactt

SEQ ID NO: 2317020 - DNA, 25 bp, Homo sapien
aaagctttcctccacagtccactgt

SEQ ID NO: 2317021 - DNA, 25 bp, Homo sapien
ttctgttctgctccagaggacagcc

SEQ ID NO: 2317022 - DNA, 25 bp, Homo sapien
gaaacttcctctttggggcagccac

SEQ ID NO: 2317023 - DNA, 25 bp, Homo sapien
gatgttcatggttaacagttaagtc

SEQ ID NO: 2317024 - DNA, 25 bp, Homo sapien
attgtgttgaagattgaattatcca

SEQ ID NO: 2317025 - DNA, 25 bp, Homo sapien
gattttggatgttcatggttaacag

SEQ ID NO: 2317026 - DNA, 25 bp, Homo sapien
ggaggattttggatgttcatggtta

SEQ ID NO: 2317027 - DNA, 25 bp, Homo sapien
ggatctggagtccagtgcctccagg

SEQ ID NO: 2317028 - DNA, 25 bp, Homo sapien
gcagggatctggagtccagtgcctc

SEQ ID NO: 2317029 - DNA, 25 bp, Homo sapien
ctgcagggatctggagtccagtgcc

SEQ ID NO: 2317030 - DNA, 25 bp, Homo sapien
agggatctggagtccagtgcctcca

SEQ ID NO: 2317031 - DNA, 25 bp, Homo sapien
gttcttggcggaggacttgtcttct

SEQ ID NO: 2317032 - DNA, 25 bp, Homo sapien
cacagctgcgtaggctcgactggcg

SEQ ID NO: 2317033 - DNA, 25 bp, Homo sapien
gaggcttcgtattctgcccctgcaa

SEQ ID NO: 2317034 - DNA, 25 bp, Homo sapien
tattgtcttgtctaattccccggag

SEQ ID NO: 2317035 - DNA, 25 bp, Homo sapien
tctgtgggggagagtactctttctc

SEQ ID NO: 2317036 - DNA, 25 bp, Homo sapien
caaaatctgtgggggagagtactct

SEQ ID NO: 2317037 - DNA, 25 bp, Homo sapien
aatctgtgggggagagtactctttc

SEQ ID NO: 2317038 - DNA, 25 bp, Homo sapien
tgtgggggagagtactctttctcca

SEQ ID NO: 2317039 - DNA, 25 bp, Homo sapien
tgatccttgatgacttgatccttca

SEQ ID NO: 2317040 - DNA, 25 bp, Homo sapien
aacatgactgctccttgatccttga

SEQ ID NO: 2317041 - DNA, 25 bp, Homo sapien
accctctccccgtcaaacatgactg

SEQ ID NO: 2317042 - DNA, 25 bp, Homo sapien
caaatgtggttaatcctgggaagaa

SEQ ID NO: 2317043 - DNA, 25 bp, Homo sapien
agtcctggtttttggacagtgcaca

SEQ ID NO: 2317044 - DNA, 25 bp, Homo sapien
catttccgcggaacatgattgctaa

SEQ ID NO: 2317045 - DNA, 25 bp, Homo sapien
cattgtgcttgtgtagtatggagac

SEQ ID NO: 2317046 - DNA, 25 bp, Homo sapien
gtgttaaaacaagtatgcattgtgc

SEQ ID NO: 2317047 - DNA, 25 bp, Homo sapien
gctaaaatgactaaccttgactggg

SEQ ID NO: 2317048 - DNA, 25 bp, Homo sapien
ccccttcagggagtatttagaggca

SEQ ID NO: 2317049 - DNA, 25 bp, Homo sapien
tgactggagggaaactatcactctg

SEQ ID NO: 2317050 - DNA, 25 bp, Homo sapien
aaatcttagccgtcgtgttgccttg

SEQ ID NO: 2317051 - DNA, 25 bp, Homo sapien
tccacttgccagaggcagcgagcta

SEQ ID NO: 2317052 - DNA, 25 bp, Homo sapien
cagaggcagcgagctagggagacac

SEQ ID NO: 2317053 - DNA, 25 bp, Homo sapien
ccacttgccagaggcagcgagctag

SEQ ID NO: 2317054 - DNA, 25 bp, Homo sapien
cagcgagctagggagacacctcgct

SEQ ID NO: 2317055 - DNA, 25 bp, Homo sapien
aggctctccggccagcgtggatgca

SEQ ID NO: 2317056 - DNA, 25 bp, Homo sapien
gatgcaggagcagcgaagtcgtcat

SEQ ID NO: 2317057 - DNA, 25 bp, Homo sapien
ctgtcctcatagacgtacataaggc

SEQ ID NO: 2317058 - DNA, 25 bp, Homo sapien
gatgtccgtatagacggcgccctga

SEQ ID NO: 2317059 - DNA, 25 bp, Homo sapien
tggtaggcgcaaggcttctgctgca

SEQ ID NO: 2317060 - DNA, 25 bp, Homo sapien
aggcgaactccttggccctagagga

SEQ ID NO: 2317061 - DNA, 25 bp, Homo sapien
gctccttggagcagtacacctgact

SEQ ID NO: 2317062 - DNA, 25 bp, Homo sapien
tgcaggttcacgttgtgcgacaggc

SEQ ID NO: 2317063 - DNA, 25 bp, Homo sapien
gggagataaggcaagcgggaagaag

SEQ ID NO: 2317064 - DNA, 25 bp, Homo sapien
ctgcggggagataaggcaagcggga

SEQ ID NO: 2317065 - DNA, 25 bp, Homo sapien
ggcaagcgggaagaagtgaggcaag

SEQ ID NO: 2317066 - DNA, 25 bp, Homo sapien
taaggcaagcgggaagaagtgaggc

SEQ ID NO: 2317067 - DNA, 25 bp, Homo sapien
atgaacttgctagccgcgtattcct

SEQ ID NO: 2317068 - DNA, 25 bp, Homo sapien
gaggttcgtggtggcggagatgcgc

SEQ ID NO: 2317069 - DNA, 25 bp, Homo sapien
tagggcacgcgtttcttgcgcccgc

SEQ ID NO: 2317070 - DNA, 25 bp, Homo sapien
gctgcaccttagtgtagggcacgcg

SEQ ID NO: 2317071 - DNA, 25 bp, Homo sapien
gatgaggcgctttcgatttgctgac

SEQ ID NO: 2317072 - DNA, 25 bp, Homo sapien
gagatgaggcgctttcgatttgctg

SEQ ID NO: 2317073 - DNA, 25 bp, Homo sapien
tggagatgaggcgctttcgatttgc

SEQ ID NO: 2317074 - DNA, 25 bp, Homo sapien
agatgaggcgctttcgatttgctga

SEQ ID NO: 2317075 - DNA, 25 bp, Homo sapien
cgcagcgtctttccgtgggttcggt

SEQ ID NO: 2317076 - DNA, 25 bp, Homo sapien
gttcggttatggtacaaagcggaga

SEQ ID NO: 2317077 - DNA, 25 bp, Homo sapien
acccgcgcagcgtctttccgtgggt

SEQ ID NO: 2317078 - DNA, 25 bp, Homo sapien
caaagcggagacataaatagatggg

SEQ ID NO: 2317079 - DNA, 25 bp, Homo sapien
gcggcgcggttcttctctttcctta

SEQ ID NO: 2317080 - DNA, 25 bp, Homo sapien
ctccgggcggcgcggttcttctctt

SEQ ID NO: 2317081 - DNA, 25 bp, Homo sapien
ctgcctccgggcggcgcggttcttc

SEQ ID NO: 2317082 - DNA, 25 bp, Homo sapien
tgcctccgggcggcgcggttcttct

SEQ ID NO: 2317083 - DNA, 25 bp, Homo sapien
gttggggatggcccagcagcacggc

SEQ ID NO: 2317084 - DNA, 25 bp, Homo sapien
gaggagtagaggtcgacagccttcc

SEQ ID NO: 2317085 - DNA, 25 bp, Homo sapien
gactttctggcaaggtgagcgcaag

SEQ ID NO: 2317086 - DNA, 25 bp, Homo sapien
tttggttggaatgattgggctctgc

SEQ ID NO: 2317087 - DNA, 25 bp, Homo sapien
gttgaagccacgtgagtcccatctg

SEQ ID NO: 2317088 - DNA, 25 bp, Homo sapien
tggacagatcctgctccgaagctgc

SEQ ID NO: 2317089 - DNA, 25 bp, Homo sapien
gaggagccctatttagcagcgtggc

SEQ ID NO: 2317090 - DNA, 25 bp, Homo sapien
tacatctagctaattgagggccaga

SEQ ID NO: 2317091 - DNA, 25 bp, Homo sapien
gacagggactttgttgagggaccca

SEQ ID NO: 2317092 - DNA, 25 bp, Homo sapien
tgtggatgtttaccagcggccccac

SEQ ID NO: 2317093 - DNA, 25 bp, Homo sapien
aagtagaaggtgtctcccgtgtgga

SEQ ID NO: 2317094 - DNA, 25 bp, Homo sapien
tgcgggtagccattgcacggctccg

SEQ ID NO: 2317095 - DNA, 25 bp, Homo sapien
gcacggctcgcggtagtaacccttg

SEQ ID NO: 2317096 - DNA, 25 bp, Homo sapien
ctcccgggtcgcgcccgcgctcctc

SEQ ID NO: 2317097 - DNA, 25 bp, Homo sapien
gcggccccgacggctccagcgggag

SEQ ID NO: 2317098 - DNA, 25 bp, Homo sapien
gcgcaggcggccccgacggctccag

SEQ ID NO: 2317099 - DNA, 25 bp, Homo sapien
cccgggtcgcgcccgcgctcctcac

SEQ ID NO: 2317100 - DNA, 25 bp, Homo sapien
gccgccgcccgccgcgtagtcgtac

SEQ ID NO: 2317101 - DNA, 25 bp, Homo sapien
caggagggcgggtcgtgcggaggtc

SEQ ID NO: 2317102 - DNA, 25 bp, Homo sapien
tggcaggagggcgggtcgtgcggag

SEQ ID NO: 2317103 - DNA, 25 bp, Homo sapien
ctggagtcggattccagcgactggc

SEQ ID NO: 2317104 - DNA, 25 bp, Homo sapien
cgactggcaggagggcgggtcgtgc

SEQ ID NO: 2317105 - DNA, 25 bp, Homo sapien
gggttcaacggcgataccaagctgc

SEQ ID NO: 2317106 - DNA, 25 bp, Homo sapien
ttgttgccctcgttgagcagggacg

SEQ ID NO: 2317107 - DNA, 25 bp, Homo sapien
tcaacggcgataccaagctgccggg

SEQ ID NO: 2317108 - DNA, 25 bp, Homo sapien
cggcgcccttgttgccctcgttgag

SEQ ID NO: 2317109 - DNA, 25 bp, Homo sapien
ccagttgcaacttcgaatagggctt

SEQ ID NO: 2317110 - DNA, 25 bp, Homo sapien
tgaactcgttgaccagaaactcgcc

SEQ ID NO: 2317111 - DNA, 25 bp, Homo sapien
actaagattcaagcggtctgagagt

SEQ ID NO: 2317112 - DNA, 25 bp, Homo sapien
tagggcttgcgcttcttccgagagc

SEQ ID NO: 2317113 - DNA, 25 bp, Homo sapien
gcttgctccctcaacagaagtcttt

SEQ ID NO: 2317114 - DNA, 25 bp, Homo sapien
agagagcttgctccctcaacagaag

SEQ ID NO: 2317115 - DNA, 25 bp, Homo sapien
ttaaaagaaggagagagcttgctcc

SEQ ID NO: 2317116 - DNA, 25 bp, Homo sapien
tctttttcattctccggttctgaaa

SEQ ID NO: 2317117 - DNA, 25 bp, Homo sapien
catgaggctgatagtccttgtccac

SEQ ID NO: 2317118 - DNA, 25 bp, Homo sapien
tgaggttgaggtgccttggttccac

SEQ ID NO: 2317119 - DNA, 25 bp, Homo sapien
tccagatcctcagcggaggtgcagt

SEQ ID NO: 2317120 - DNA, 25 bp, Homo sapien
tgtatgggagggaaccacgaacaaa

SEQ ID NO: 2317121 - DNA, 25 bp, Homo sapien
tatgggaaacactccaagccagcag

SEQ ID NO: 2317122 - DNA, 25 bp, Homo sapien
atgaacagacattcgcccggtgcgg

SEQ ID NO: 2317123 - DNA, 25 bp, Homo sapien
ggatggcagcacacctatgaacaga

SEQ ID NO: 2317124 - DNA, 25 bp, Homo sapien
tgtcaggtgtcagatacccagcggg

SEQ ID NO: 2317125 - DNA, 25 bp, Homo sapien
gaaggcgagatgacgcgttatccgt

SEQ ID NO: 2317126 - DNA, 25 bp, Homo sapien
gggaaaatttgggaaggcgagatga

SEQ ID NO: 2317127 - DNA, 25 bp, Homo sapien
aaaatttgggaaggcgagatgacgc

SEQ ID NO: 2317128 - DNA, 25 bp, Homo sapien
cgagatgacgcgttatccgtcttag

SEQ ID NO: 2317129 - DNA, 25 bp, Homo sapien
ctcctctcctgccggctccggatgg

SEQ ID NO: 2317130 - DNA, 25 bp, Homo sapien
gccggctccggatggaggttttgga

SEQ ID NO: 2317131 - DNA, 25 bp, Homo sapien
ctctcctgccggctccggatggagg

SEQ ID NO: 2317132 - DNA, 25 bp, Homo sapien
ctcctgccggctccggatggaggtt

SEQ ID NO: 2317133 - DNA, 25 bp, Homo sapien
ggagtagctgttccgatggtgccac

SEQ ID NO: 2317134 - DNA, 25 bp, Homo sapien
tcttgttgactgaggagtagaagcc

SEQ ID NO: 2317135 - DNA, 25 bp, Homo sapien
catgtagtaagtgcaactgggcaga

SEQ ID NO: 2317136 - DNA, 25 bp, Homo sapien
ccttgcgcgacggagagcagaagtt

SEQ ID NO: 2317137 - DNA, 25 bp, Homo sapien
gatttcccgagaaatactgcagccg

SEQ ID NO: 2317138 - DNA, 25 bp, Homo sapien
gaatttcgaataagggcagcgcttc

SEQ ID NO: 2317139 - DNA, 25 bp, Homo sapien
tatacacgttgaagaaaaactctcg

SEQ ID NO: 2317140 - DNA, 25 bp, Homo sapien
aaattttcacttgtcggtccgtcag

SEQ ID NO: 2317141 - DNA, 25 bp, Homo sapien
cagcgagagtcagatagagggtcca

SEQ ID NO: 2317142 - DNA, 25 bp, Homo sapien
ttaaatcaaagtcttggcctcggcg

SEQ ID NO: 2317143 - DNA, 25 bp, Homo sapien
tcttagcggatcttttcacatgggc

SEQ ID NO: 2317144 - DNA, 25 bp, Homo sapien
gaagtttccgctggcagacatgctg

SEQ ID NO: 2317145 - DNA, 25 bp, Homo sapien
gcacccataggcacaccgagttaaa

SEQ ID NO: 2317146 - DNA, 25 bp, Homo sapien
ttgcaaatcttgtctcacgacccga

SEQ ID NO: 2317147 - DNA, 25 bp, Homo sapien
gcagggattcctaccatcaaaaatg

SEQ ID NO: 2317148 - DNA, 25 bp, Homo sapien
aaatttagatacctaagctgcaggg

SEQ ID NO: 2317149 - DNA, 25 bp, Homo sapien
ctttggagaagtctgtcccatcttt

SEQ ID NO: 2317150 - DNA, 25 bp, Homo sapien
gtcccatctttgtcctgacctccgg

SEQ ID NO: 2317151 - DNA, 25 bp, Homo sapien
tggagaagtctgtcccatctttgtc

SEQ ID NO: 2317152 - DNA, 25 bp, Homo sapien
cccatctttgtcctgacctccggag

SEQ ID NO: 2317153 - DNA, 25 bp, Homo sapien
tcctcctcacaaggcgaagtgtagg

SEQ ID NO: 2317154 - DNA, 25 bp, Homo sapien
cacatccacactagtgctgatggct

SEQ ID NO: 2317155 - DNA, 25 bp, Homo sapien
cccagcagtcgccattagagggagg

SEQ ID NO: 2317156 - DNA, 25 bp, Homo sapien
tgtagggctgccagtcatcagcagc

SEQ ID NO: 2317157 - DNA, 25 bp, Homo sapien
taaggagcaatactacagcggagga

SEQ ID NO: 2317158 - DNA, 25 bp, Homo sapien
ggagcaatactacagcggaggagct

SEQ ID NO: 2317159 - DNA, 25 bp, Homo sapien
tactacagcggaggagctgacatct

SEQ ID NO: 2317160 - DNA, 25 bp, Homo sapien
ggtttttaaggagcaatactacagc

SEQ ID NO: 2317161 - DNA, 25 bp, Homo sapien
ccgcaattgaagtcactcccagact

SEQ ID NO: 2317162 - DNA, 25 bp, Homo sapien
acatgcctgcgctccggctatagcg

SEQ ID NO: 2317163 - DNA, 25 bp, Homo sapien
caagggctccgcgtacgagttcgga

SEQ ID NO: 2317164 - DNA, 25 bp, Homo sapien
tcccagactgcatatacatgcctgc

SEQ ID NO: 2317165 - DNA, 25 bp, Homo sapien
tcctccttgacactaggtgggtagg

SEQ ID NO: 2317166 - DNA, 25 bp, Homo sapien
ttgttccaggcgataggcggctttg

SEQ ID NO: 2317167 - DNA, 25 bp, Homo sapien
tgaggcgattccagatgttcggcgc

SEQ ID NO: 2317168 - DNA, 25 bp, Homo sapien
ttcgaagtcgttggccccagaacag

SEQ ID NO: 2317169 - DNA, 25 bp, Homo sapien
gcgaagaccaagtgccggaacgtcc

SEQ ID NO: 2317170 - DNA, 25 bp, Homo sapien
cggccgcgaagaccaagtgccggaa

SEQ ID NO: 2317171 - DNA, 25 bp, Homo sapien
tagtcgaaagccagggtcgcattcc

SEQ ID NO: 2317172 - DNA, 25 bp, Homo sapien
ggtcgcattcccgaaatggtctggg

SEQ ID NO: 2317173 - DNA, 25 bp, Homo sapien
aagtgacgcgccaccagcctggagc

SEQ ID NO: 2317174 - DNA, 25 bp, Homo sapien
ttccccagctaagtgacgcgccacc

SEQ ID NO: 2317175 - DNA, 25 bp, Homo sapien
agctaagtgacgcgccaccagcctg

SEQ ID NO: 2317176 - DNA, 25 bp, Homo sapien
cttccccagctaagtgacgcgccac

SEQ ID NO: 2317177 - DNA, 25 bp, Homo sapien
ccccaggacaccagcattgagaaag

SEQ ID NO: 2317178 - DNA, 25 bp, Homo sapien
caacaaatcgcgtttcgcaggaaac

SEQ ID NO: 2317179 - DNA, 25 bp, Homo sapien
tgggaaaacgcagtaaagagaactc

SEQ ID NO: 2317180 - DNA, 25 bp, Homo sapien
tagtccctggcccaagatcgccatt

SEQ ID NO: 2317181 - DNA, 25 bp, Homo sapien
tttaggctttttgcaagcccctgac

SEQ ID NO: 2317182 - DNA, 25 bp, Homo sapien
tcctctcttaatcatttctcccagg

SEQ ID NO: 2317183 - DNA, 25 bp, Homo sapien
gagtgactctgctcccttaggtctc

SEQ ID NO: 2317184 - DNA, 25 bp, Homo sapien
aacctgagctgccacagagtgactc

SEQ ID NO: 2317185 - DNA, 25 bp, Homo sapien
cttaggtctcccattgccatctctt

SEQ ID NO: 2317186 - DNA, 25 bp, Homo sapien
tggtcttgctaatctccaggcggcg

SEQ ID NO: 2317187 - DNA, 25 bp, Homo sapien
ggcgctctcgcgtcaaatacatatt

SEQ ID NO: 2317188 - DNA, 25 bp, Homo sapien
aattggaggtcagttcccggatccg

SEQ ID NO: 2317189 - DNA, 25 bp, Homo sapien
tgctgtcagccaatttcctgtggtg

SEQ ID NO: 2317190 - DNA, 25 bp, Homo sapien
tggaggctctgggtgctacgacaaa

SEQ ID NO: 2317191 - DNA, 25 bp, Homo sapien
gcattgcatttatactcagggagga

SEQ ID NO: 2317192 - DNA, 25 bp, Homo sapien
tcccttggaaggagagtctgaggtc

SEQ ID NO: 2317193 - DNA, 25 bp, Homo sapien
gattcttagagcgactgggaggtaa

SEQ ID NO: 2317194 - DNA, 25 bp, Homo sapien
catgcccctccagcggttaagttta

SEQ ID NO: 2317195 - DNA, 25 bp, Homo sapien
gctcctggcgtttctgttagctgct

SEQ ID NO: 2317196 - DNA, 25 bp, Homo sapien
gctgctcctggcgtttctgttagct

SEQ ID NO: 2317197 - DNA, 25 bp, Homo sapien
gctcttggggtgacccccagcagca

SEQ ID NO: 2317198 - DNA, 25 bp, Homo sapien
taagccacagatcagctgagcgagc

SEQ ID NO: 2317199 - DNA, 25 bp, Homo sapien
taactcaggcagtttcttgttgccg

SEQ ID NO: 2317200 - DNA, 25 bp, Homo sapien
tcttgttgccgagttcaaaactcaa

SEQ ID NO: 2317201 - DNA, 25 bp, Homo sapien
gccctcgacgaaaaccgactgatgt

SEQ ID NO: 2317202 - DNA, 25 bp, Homo sapien
tccttggaattggctggaccctctt

SEQ ID NO: 2317203 - DNA, 25 bp, Homo sapien
gaattggctggaccctctttgtctg

SEQ ID NO: 2317204 - DNA, 25 bp, Homo sapien
tggaattggctggaccctctttgtc

SEQ ID NO: 2317205 - DNA, 25 bp, Homo sapien
ccttggaattggctggaccctcttt

SEQ ID NO: 2317206 - DNA, 25 bp, Homo sapien
gagagacccagaagactctgtccct

SEQ ID NO: 2317207 - DNA, 25 bp, Homo sapien
cagagagacccagaagactctgtcc

SEQ ID NO: 2317208 - DNA, 25 bp, Homo sapien
gagacccagaagactctgtccctct

SEQ ID NO: 2317209 - DNA, 25 bp, Homo sapien
ggcagagagacccagaagactctgt

SEQ ID NO: 2317210 - DNA, 25 bp, Homo sapien
tgatcttttgtgtgatgtatgtgtc

SEQ ID NO: 2317211 - DNA, 25 bp, Homo sapien
tatgtgtcgcaaggaaatttgcagt

SEQ ID NO: 2317212 - DNA, 25 bp, Homo sapien
tgtgtgatgtatgtgtcgcaaggaa

SEQ ID NO: 2317213 - DNA, 25 bp, Homo sapien
aatttgcagtgactttggagcccag

SEQ ID NO: 2317214 - DNA, 25 bp, Homo sapien
cccgctcccggctcgtcagcacccg

SEQ ID NO: 2317215 - DNA, 25 bp, Homo sapien
cgctcccggctcgtcagcacccgcc

SEQ ID NO: 2317216 - DNA, 25 bp, Homo sapien
ccccagcgggccatcccggctgccg

SEQ ID NO: 2317217 - DNA, 25 bp, Homo sapien
ccagcgggccatcccggctgccgca

SEQ ID NO: 2317218 - DNA, 25 bp, Homo sapien
ggtccggaactctggacccaaggca

SEQ ID NO: 2317219 - DNA, 25 bp, Homo sapien
tgtgcccatgtccacccataagcag

SEQ ID NO: 2317220 - DNA, 25 bp, Homo sapien
tgacgtaatccgtctctgtcggccc

SEQ ID NO: 2317221 - DNA, 25 bp, Homo sapien
tacccaaaaatacggcgcggatcaa

SEQ ID NO: 2317222 - DNA, 25 bp, Homo sapien
ttacatacataagattattgtatga

SEQ ID NO: 2317223 - DNA, 25 bp, Homo sapien
tacataagattattgtatgaactgt

SEQ ID NO: 2317224 - DNA, 25 bp, Homo sapien
acatacataagattattgtatgaac

SEQ ID NO: 2317225 - DNA, 25 bp, Homo sapien
catacataagattattgtatgaact

SEQ ID NO: 2317226 - DNA, 25 bp, Homo sapien
aatagttactgatgggccccgtcgc

SEQ ID NO: 2317227 - DNA, 25 bp, Homo sapien
tgatataccacggacgactgagagg

SEQ ID NO: 2317228 - DNA, 25 bp, Homo sapien
cattgtcgtgagagatgagcgagtc

SEQ ID NO: 2317229 - DNA, 25 bp, Homo sapien
gctacaggacggaaaatcgctacag

SEQ ID NO: 2317230 - DNA, 25 bp, Homo sapien
gggccaaacacaagcaggggtcagt

SEQ ID NO: 2317231 - DNA, 25 bp, Homo sapien
agcccctttccagcccaggacttct

SEQ ID NO: 2317232 - DNA, 25 bp, Homo sapien
tcagtggagcccctttccagcccag

SEQ ID NO: 2317233 - DNA, 25 bp, Homo sapien
cacaagcaggggtcagtggagcccc

SEQ ID NO: 2317234 - DNA, 25 bp, Homo sapien
cggtgagattgagaacccgggccac

SEQ ID NO: 2317235 - DNA, 25 bp, Homo sapien
tcttcctcgtggagcgggcgtgaat

SEQ ID NO: 2317236 - DNA, 25 bp, Homo sapien
tttgacctgccgctcggtgagattg

SEQ ID NO: 2317237 - DNA, 25 bp, Homo sapien
cgacggtccctggttaaatacatat

SEQ ID NO: 2317238 - DNA, 25 bp, Homo sapien
cctcccaaatcgcaagagttttctt

SEQ ID NO: 2317239 - DNA, 25 bp, Homo sapien
tgtcatttatttcggttgcgctggg

SEQ ID NO: 2317240 - DNA, 25 bp, Homo sapien
aaagagaacgcagtttctctccccg

SEQ ID NO: 2317241 - DNA, 25 bp, Homo sapien
cctcctcgctgggtagaactaactc

SEQ ID NO: 2317242 - DNA, 25 bp, Homo sapien
tacaaaatctgcacgcagagcgccc

SEQ ID NO: 2317243 - DNA, 25 bp, Homo sapien
gaagcacgttacaggacggacgctg

SEQ ID NO: 2317244 - DNA, 25 bp, Homo sapien
gagggaacactatgtacagcccaag

SEQ ID NO: 2317245 - DNA, 25 bp, Homo sapien
gagggatgacctggaccaaatacga

SEQ ID NO: 2317246 - DNA, 25 bp, Homo sapien
tgatgctggccccgcaccgactatt

SEQ ID NO: 2317247 - DNA, 25 bp, Homo sapien
tgtttgacccctggtttgtagccca

SEQ ID NO: 2317248 - DNA, 25 bp, Homo sapien
gggtgggactcggacttctccaggc

SEQ ID NO: 2317249 - DNA, 25 bp, Homo sapien
ctcggacttctccaggctgtttgac

SEQ ID NO: 2317250 - DNA, 25 bp, Homo sapien
gtggcggcgcttacacgcgattcgc

SEQ ID NO: 2317251 - DNA, 25 bp, Homo sapien
tagagctcgcgctctctcacttagc

SEQ ID NO: 2317252 - DNA, 25 bp, Homo sapien
tctaacagcccaggcgaattcctca

SEQ ID NO: 2317253 - DNA, 25 bp, Homo sapien
gcggcgctcctcactgtcggtaggt

SEQ ID NO: 2317254 - DNA, 25 bp, Homo sapien
gggggcgcctcggtgctgagctcgg

SEQ ID NO: 2317255 - DNA, 25 bp, Homo sapien
ctctggctcacgagtaccccgccca

SEQ ID NO: 2317256 - DNA, 25 bp, Homo sapien
ggggcgcctcggtgctgagctcggc

SEQ ID NO: 2317257 - DNA, 25 bp, Homo sapien
tggctcacgagtaccccgcccagta

SEQ ID NO: 2317258 - DNA, 25 bp, Homo sapien
cggcagtcgtaataggccggttcca

SEQ ID NO: 2317259 - DNA, 25 bp, Homo sapien
tggagaacagggggttgacgaagta

SEQ ID NO: 2317260 - DNA, 25 bp, Homo sapien
gcagtcgtaataggccggttccagg

SEQ ID NO: 2317261 - DNA, 25 bp, Homo sapien
ataggccggttccagggactcgccg

SEQ ID NO: 2317262 - DNA, 25 bp, Homo sapien
tcttgaacgtggtgcgaagcgtgct

SEQ ID NO: 2317263 - DNA, 25 bp, Homo sapien
atagaatttggaggcgtctccgtgg

SEQ ID NO: 2317264 - DNA, 25 bp, Homo sapien
ctgagttggagatgccggaggtgcc

SEQ ID NO: 2317265 - DNA, 25 bp, Homo sapien
tctccgtggcagctaagcgagcacg

SEQ ID NO: 2317266 - DNA, 25 bp, Homo sapien
agacgagttttgatttaagtggcct

SEQ ID NO: 2317267 - DNA, 25 bp, Homo sapien
taagtggccttgtccttcgctactg

SEQ ID NO: 2317268 - DNA, 25 bp, Homo sapien
aaacatgaggctgggagacgagttt

SEQ ID NO: 2317269 - DNA, 25 bp, Homo sapien
tagtgttggcggaggatttacagtc

SEQ ID NO: 2317270 - DNA, 25 bp, Homo sapien
ttgtttacaagtgcagcagggcatt

SEQ ID NO: 2317271 - DNA, 25 bp, Homo sapien
taatcctaggaactggcctttgcag

SEQ ID NO: 2317272 - DNA, 25 bp, Homo sapien
ggctcatgacctaagctactctgca

SEQ ID NO: 2317273 - DNA, 25 bp, Homo sapien
tctgctggaatgtgtcaccgctccg

SEQ ID NO: 2317274 - DNA, 25 bp, Homo sapien
cttcaatccgacgttttcgtgtcaa

SEQ ID NO: 2317275 - DNA, 25 bp, Homo sapien
tgtaagtttgccgtccactgcgcct

SEQ ID NO: 2317276 - DNA, 25 bp, Homo sapien
actccttttctagttccaaggtctg

SEQ ID NO: 2317277 - DNA, 25 bp, Homo sapien
tctgataccggctgtaagtttgccg

SEQ ID NO: 2317278 - DNA, 25 bp, Homo sapien
tctctcggtcagtcccagggcatga

SEQ ID NO: 2317279 - DNA, 25 bp, Homo sapien
tcggtcagtcccagggcatgagaga

SEQ ID NO: 2317280 - DNA, 25 bp, Homo sapien
tcttcacttgtctctcggtcagtcc

SEQ ID NO: 2317281 - DNA, 25 bp, Homo sapien
tcacttgtctctcggtcagtcccag

SEQ ID NO: 2317282 - DNA, 25 bp, Homo sapien
accttctcctcatctcgggctcccg

SEQ ID NO: 2317283 - DNA, 25 bp, Homo sapien
gcagtttatccttgttgttctcctt

SEQ ID NO: 2317284 - DNA, 25 bp, Homo sapien
ctcatctcgggctcccggcagttta

SEQ ID NO: 2317285 - DNA, 25 bp, Homo sapien
ggctcccggcagtttatccttgttg

SEQ ID NO: 2317286 - DNA, 25 bp, Homo sapien
ggtctcagaccttaaaatccaggaa

SEQ ID NO: 2317287 - DNA, 25 bp, Homo sapien
tccaaaggtaataaaaccagagctg

SEQ ID NO: 2317288 - DNA, 25 bp, Homo sapien
caaggagtgagacagagagtccgaa

SEQ ID NO: 2317289 - DNA, 25 bp, Homo sapien
tctgctaccataaaacgaaacttca

SEQ ID NO: 2317290 - DNA, 25 bp, Homo sapien
ggcgggcccaacagaatagaaatca

SEQ ID NO: 2317291 - DNA, 25 bp, Homo sapien
tacttggaccaggaacagggctgtc

SEQ ID NO: 2317292 - DNA, 25 bp, Homo sapien
taggattttagaggcgactgcaggc

SEQ ID NO: 2317293 - DNA, 25 bp, Homo sapien
agcacaataaaagcgcacaggaccg

SEQ ID NO: 2317294 - DNA, 25 bp, Homo sapien
cgtctgaacagaagttggagtggat

SEQ ID NO: 2317295 - DNA, 25 bp, Homo sapien
gagtggactttaaaccgtctgaaca

SEQ ID NO: 2317296 - DNA, 25 bp, Homo sapien
aagttggagtggatgcaagcgggct

SEQ ID NO: 2317297 - DNA, 25 bp, Homo sapien
gttagagaagatttcccggagctcc

SEQ ID NO: 2317298 - DNA, 25 bp, Homo sapien
ctcggagtatggaggacacgcctgt

SEQ ID NO: 2317299 - DNA, 25 bp, Homo sapien
ggtagccggtgtctcccactgagaa

SEQ ID NO: 2317300 - DNA, 25 bp, Homo sapien
cacagcctttctcggactgcaggag

SEQ ID NO: 2317301 - DNA, 25 bp, Homo sapien
gctgggatgtactaccgaggcctga

SEQ ID NO: 2317302 - DNA, 25 bp, Homo sapien
tccccacgggctcgagatttgaagg

SEQ ID NO: 2317303 - DNA, 25 bp, Homo sapien
gaaggtgagtccagaataaattccc

SEQ ID NO: 2317304 - DNA, 25 bp, Homo sapien
tcctgattcaatgtctgggcagctg

SEQ ID NO: 2317305 - DNA, 25 bp, Homo sapien
gatcgtgtcagattgcccataccca

SEQ ID NO: 2317306 - DNA, 25 bp, Homo sapien
tcaacttctaggaccctcaaaacga

SEQ ID NO: 2317307 - DNA, 25 bp, Homo sapien
gcagtaagccttttggatcgtgtca

SEQ ID NO: 2317308 - DNA, 25 bp, Homo sapien
ctaccctgggcaatcctgcagtgca

SEQ ID NO: 2317309 - DNA, 25 bp, Homo sapien
gactgttctgcggagcgctcggaac

SEQ ID NO: 2317310 - DNA, 25 bp, Homo sapien
cgctcggaacggacaaaccacaata

SEQ ID NO: 2317311 - DNA, 25 bp, Homo sapien
ttttctgcaaacaaccgggaatgcg

SEQ ID NO: 2317312 - DNA, 25 bp, Homo sapien
tcttgtggccaatccaacttgtgag

SEQ ID NO: 2317313 - DNA, 25 bp, Homo sapien
aaattaaggagagttgcaagaaggg

SEQ ID NO: 2317314 - DNA, 25 bp, Homo sapien
gagatgccctcaacttctgtctctc

SEQ ID NO: 2317315 - DNA, 25 bp, Homo sapien
gcttcggcaactccacctgggagga

SEQ ID NO: 2317316 - DNA, 25 bp, Homo sapien
tccctggcaatggttaggctcttac

SEQ ID NO: 2317317 - DNA, 25 bp, Homo sapien
caggtcccacagactccgggttccg

SEQ ID NO: 2317318 - DNA, 25 bp, Homo sapien
atccgcggggcatcagccactgggc

SEQ ID NO: 2317319 - DNA, 25 bp, Homo sapien
gcctgccgcaggctggatccgcggg

SEQ ID NO: 2317320 - DNA, 25 bp, Homo sapien
ggccgtgcctgagcggcgggagagc

SEQ ID NO: 2317321 - DNA, 25 bp, Homo sapien
cagtttatcccctggccagagtgga

SEQ ID NO: 2317322 - DNA, 25 bp, Homo sapien
aaaatgaaaacagagcgccggtcgc

SEQ ID NO: 2317323 - DNA, 25 bp, Homo sapien
gattcagtgtctctgccccgggtgt

SEQ ID NO: 2317324 - DNA, 25 bp, Homo sapien
caaacaaggtcgcattctgtcggga

SEQ ID NO: 2317325 - DNA, 25 bp, Homo sapien
cgacgaggattaaaacgcagttcat

SEQ ID NO: 2317326 - DNA, 25 bp, Homo sapien
ggattaaaacgcagttcatccagta

SEQ ID NO: 2317327 - DNA, 25 bp, Homo sapien
tcagatagcgacgaggattaaaacg

SEQ ID NO: 2317328 - DNA, 25 bp, Homo sapien
aactcccaatctgccgccacggatg

SEQ ID NO: 2317329 - DNA, 25 bp, Homo sapien
ctagagagagtagcggaaaacccct

SEQ ID NO: 2317330 - DNA, 25 bp, Homo sapien
gagtcttgggaggaacccgatcacc

SEQ ID NO: 2317331 - DNA, 25 bp, Homo sapien
gctcagaagtctgtccaccacaggg

SEQ ID NO: 2317332 - DNA, 25 bp, Homo sapien
cacagacacaataaacaggagcggc

SEQ ID NO: 2317333 - DNA, 25 bp, Homo sapien
ccactcagctctgggaaatatatta

SEQ ID NO: 2317334 - DNA, 25 bp, Homo sapien
ctcagctctgggaaatatattaatt

SEQ ID NO: 2317335 - DNA, 25 bp, Homo sapien
ttgctggcctttgctttccactcag

SEQ ID NO: 2317336 - DNA, 25 bp, Homo sapien
cttgctggcctttgctttccactca

SEQ ID NO: 2317337 - DNA, 25 bp, Homo sapien
tataaaacgagcctaaagaaatcag

SEQ ID NO: 2317338 - DNA, 25 bp, Homo sapien
ctgtaaatatgcacaagtcttggga

SEQ ID NO: 2317339 - DNA, 25 bp, Homo sapien
gaaatcagagaacactaccccccaa

SEQ ID NO: 2317340 - DNA, 25 bp, Homo sapien
caattatggaaactcatcagcagaa

SEQ ID NO: 2317341 - DNA, 25 bp, Homo sapien
ctagatggttatagggacggctcca

SEQ ID NO: 2317342 - DNA, 25 bp, Homo sapien
caaaatgacaaagtcagctgacccc

SEQ ID NO: 2317343 - DNA, 25 bp, Homo sapien
gacggctccaatccaggacagacaa

SEQ ID NO: 2317344 - DNA, 25 bp, Homo sapien
gacaaaatgacaaagtcagctgacc

SEQ ID NO: 2317345 - DNA, 25 bp, Homo sapien
tttacctggtcggtctatgatttct

SEQ ID NO: 2317346 - DNA, 25 bp, Homo sapien
gcctttacctggtcggtctatgatt

SEQ ID NO: 2317347 - DNA, 25 bp, Homo sapien
acctggtcggtctatgatttcttta

SEQ ID NO: 2317348 - DNA, 25 bp, Homo sapien
ctttgcctttacctggtcggtctat

SEQ ID NO: 2317349 - DNA, 25 bp, Homo sapien
ccggcgaggtggcaggataaggaag

SEQ ID NO: 2317350 - DNA, 25 bp, Homo sapien
cccggcgaggtggcaggataaggaa

SEQ ID NO: 2317351 - DNA, 25 bp, Homo sapien
aacggccgctccataggtcgagaaa

SEQ ID NO: 2317352 - DNA, 25 bp, Homo sapien
aataaaagggagtcgagtagatccg

SEQ ID NO: 2317353 - DNA, 25 bp, Homo sapien
agtagatccggttctgggcaacggc

SEQ ID NO: 2317354 - DNA, 25 bp, Homo sapien
gagaaatgcctcactggatcatagg

SEQ ID NO: 2317355 - DNA, 25 bp, Homo sapien
ccggctggaactgaacacgacattc

SEQ ID NO: 2317356 - DNA, 25 bp, Homo sapien
ccccggctggaactgaacacgacat

SEQ ID NO: 2317357 - DNA, 25 bp, Homo sapien
attagatccatagtcatacggcccc

SEQ ID NO: 2317358 - DNA, 25 bp, Homo sapien
cctggtaaaaggaattagatccata

SEQ ID NO: 2317359 - DNA, 25 bp, Homo sapien
tgcgaattcattcgctgcatccagg

SEQ ID NO: 2317360 - DNA, 25 bp, Homo sapien
gccctgctcagaactaaaatcctga

SEQ ID NO: 2317361 - DNA, 25 bp, Homo sapien
gggtaaatctggatactggctttct

SEQ ID NO: 2317362 - DNA, 25 bp, Homo sapien
aaatcctgagcgattgaggtctgtg

SEQ ID NO: 2317363 - DNA, 25 bp, Homo sapien
caagcatcctagttccttggaaact

SEQ ID NO: 2317364 - DNA, 25 bp, Homo sapien
tctgcagactgtttcgcctagcaaa

SEQ ID NO: 2317365 - DNA, 25 bp, Homo sapien
taaaagcaatcagcaaagcgtcctc

SEQ ID NO: 2317366 - DNA, 25 bp, Homo sapien
tagggctctagccttctcccttttg

SEQ ID NO: 2317367 - DNA, 25 bp, Homo sapien
ttccagggtctggtaccgcgagtag

SEQ ID NO: 2317368 - DNA, 25 bp, Homo sapien
taccgcgagtagatctggcggccgc

SEQ ID NO: 2317369 - DNA, 25 bp, Homo sapien
tgtcgctcggtcaggcaaagcgcgt

SEQ ID NO: 2317370 - DNA, 25 bp, Homo sapien
cagattttgatctgtcgctcggtca

SEQ ID NO: 2317371 - DNA, 25 bp, Homo sapien
aggctgtcggcggtggcccctccgc

SEQ ID NO: 2317372 - DNA, 25 bp, Homo sapien
gctgtcggcggtggcccctccgccg

SEQ ID NO: 2317373 - DNA, 25 bp, Homo sapien
cgcccaggctgtcggcggtggcccc

SEQ ID NO: 2317374 - DNA, 25 bp, Homo sapien
cccaggctgtcggcggtggcccctc

SEQ ID NO: 2317375 - DNA, 25 bp, Homo sapien
gaaaagggcctgtagacaagccgag

SEQ ID NO: 2317376 - DNA, 25 bp, Homo sapien
tcctcacttggagggcaatctgtag

SEQ ID NO: 2317377 - DNA, 25 bp, Homo sapien
caagccgagaacgagctagcaaggg

SEQ ID NO: 2317378 - DNA, 25 bp, Homo sapien
gagtctgagttcagggtccgagccc

SEQ ID NO: 2317379 - DNA, 25 bp, Homo sapien
tttgaaattggataggaacactgac

SEQ ID NO: 2317380 - DNA, 25 bp, Homo sapien
taaatattcgagaacggacccagag

SEQ ID NO: 2317381 - DNA, 25 bp, Homo sapien
tactggctaaacaaacgtcattcac

SEQ ID NO: 2317382 - DNA, 25 bp, Homo sapien
gaacactgacggtgctaaacataaa

SEQ ID NO: 2317383 - DNA, 25 bp, Homo sapien
aatttctgcaccctttttgattaag

SEQ ID NO: 2317384 - DNA, 25 bp, Homo sapien
gggtgatttgtgactctttgaagtt

SEQ ID NO: 2317385 - DNA, 25 bp, Homo sapien
tctgcaccctttttgattaagggtg

SEQ ID NO: 2317386 - DNA, 25 bp, Homo sapien
tttgattaagggtgatttgtgactc

SEQ ID NO: 2317387 - DNA, 25 bp, Homo sapien
catgtgcagtttggtcatccacggg

SEQ ID NO: 2317388 - DNA, 25 bp, Homo sapien
tctgaggccgatccatagttcccac

SEQ ID NO: 2317389 - DNA, 25 bp, Homo sapien
gatgcttaagtccaatccgccgtag

SEQ ID NO: 2317390 - DNA, 25 bp, Homo sapien
tctaccccgtggagagagttggaag

SEQ ID NO: 2317391 - DNA, 25 bp, Homo sapien
ggaattctttctcgagttccagagt

SEQ ID NO: 2317392 - DNA, 25 bp, Homo sapien
gacacaagttgttggcgatctctat

SEQ ID NO: 2317393 - DNA, 25 bp, Homo sapien
tagcgcgtgtaactggttcgggacc

SEQ ID NO: 2317394 - DNA, 25 bp, Homo sapien
tctctatgcgcctgcggcgagtgag

SEQ ID NO: 2317395 - DNA, 25 bp, Homo sapien
cattttggaatctttcttccacttc

SEQ ID NO: 2317396 - DNA, 25 bp, Homo sapien
ttcattttggaatctttcttccact

SEQ ID NO: 2317397 - DNA, 25 bp, Homo sapien
aaagagcctctttgcttttcatttt

SEQ ID NO: 2317398 - DNA, 25 bp, Homo sapien
ctaaagagcctctttgcttttcatt

SEQ ID NO: 2317399 - DNA, 25 bp, Homo sapien
aaggttcgttctgcgccagcctgta

SEQ ID NO: 2317400 - DNA, 25 bp, Homo sapien
aaattcgtggcagggactatgggac

SEQ ID NO: 2317401 - DNA, 25 bp, Homo sapien
tgcggaatgccaaggaaaagcgctt

SEQ ID NO: 2317402 - DNA, 25 bp, Homo sapien
caggaaaccccactagttgagctag

SEQ ID NO: 2317403 - DNA, 25 bp, Homo sapien
catgggaaaagccagtactcgaggc

SEQ ID NO: 2317404 - DNA, 25 bp, Homo sapien
tgagcacggtggagccactggttcc

SEQ ID NO: 2317405 - DNA, 25 bp, Homo sapien
ccttggacagccacagcatgggaaa

SEQ ID NO: 2317406 - DNA, 25 bp, Homo sapien
tactcactgcccctagaagctagaa

SEQ ID NO: 2317407 - DNA, 25 bp, Homo sapien
taattgtcctgcatagcccgaggcc

SEQ ID NO: 2317408 - DNA, 25 bp, Homo sapien
tagaggcccttatgagaccaaatgg

SEQ ID NO: 2317409 - DNA, 25 bp, Homo sapien
tatcttagatactgaggcacacctc

SEQ ID NO: 2317410 - DNA, 25 bp, Homo sapien
ggtgcaatcccttagccaagctcca

SEQ ID NO: 2317411 - DNA, 25 bp, Homo sapien
cacagcaatgttgccgggtaaataa

SEQ ID NO: 2317412 - DNA, 25 bp, Homo sapien
cgcctgcctggctattaggattctg

SEQ ID NO: 2317413 - DNA, 25 bp, Homo sapien
tgccgggtaaataagagtccgcctg

SEQ ID NO: 2317414 - DNA, 25 bp, Homo sapien
gagacgttggcatctgtagcaatca

SEQ ID NO: 2317415 - DNA, 25 bp, Homo sapien
gaatcaaggccgagagagatttctt

SEQ ID NO: 2317416 - DNA, 25 bp, Homo sapien
cagccataccagatcattaccatga

SEQ ID NO: 2317417 - DNA, 25 bp, Homo sapien
aagaactttggagagcgcggtctcc

SEQ ID NO: 2317418 - DNA, 25 bp, Homo sapien
catagatcagagtctttccgggcat

SEQ ID NO: 2317419 - DNA, 25 bp, Homo sapien
gaaatttgtctcttcgcaaatggcc

SEQ ID NO: 2317420 - DNA, 25 bp, Homo sapien
gacttgttccaatagttcactgcca

SEQ ID NO: 2317421 - DNA, 25 bp, Homo sapien
ttagatcttccagcgagttcaataa

SEQ ID NO: 2317422 - DNA, 25 bp, Homo sapien
tgacctgcatttcacctcgggtgtt

SEQ ID NO: 2317423 - DNA, 25 bp, Homo sapien
agcggctccatagattctctgctgc

SEQ ID NO: 2317424 - DNA, 25 bp, Homo sapien
tgagagagctcagcggctccataga

SEQ ID NO: 2317425 - DNA, 25 bp, Homo sapien
ccggctgagagagctcagcggctcc

SEQ ID NO: 2317426 - DNA, 25 bp, Homo sapien
catactgaccgttggataacccata

SEQ ID NO: 2317427 - DNA, 25 bp, Homo sapien
ggaatcgcccgcactctttgtgtcg

SEQ ID NO: 2317428 - DNA, 25 bp, Homo sapien
cagcctggttgacacttgaataagt

SEQ ID NO: 2317429 - DNA, 25 bp, Homo sapien
cataaatcagtctcgcggaatcgcc

SEQ ID NO: 2317430 - DNA, 25 bp, Homo sapien
tgatcgccgccgtgattagtcaatc

SEQ ID NO: 2317431 - DNA, 25 bp, Homo sapien
gatgcaaatgattctgacgtcattt

SEQ ID NO: 2317432 - DNA, 25 bp, Homo sapien
ttctgacgtcatttctggaggtctg

SEQ ID NO: 2317433 - DNA, 25 bp, Homo sapien
aaccctctggccatgcggccggcga

SEQ ID NO: 2317434 - DNA, 25 bp, Homo sapien
agaggcagcgggatgcaaatgattc

SEQ ID NO: 2317435 - DNA, 25 bp, Homo sapien
agtgcacatcccgccagactgacaa

SEQ ID NO: 2317436 - DNA, 25 bp, Homo sapien
gataaggaaccgaatcgctttattc

SEQ ID NO: 2317437 - DNA, 25 bp, Homo sapien
ggccaatcacacggagcaacccagt

SEQ ID NO: 2317438 - DNA, 25 bp, Homo sapien
tttcaccatgtgactcctccggcca

SEQ ID NO: 2317439 - DNA, 25 bp, Homo sapien
ttttctcgctttgtcgtttttctgc

SEQ ID NO: 2317440 - DNA, 25 bp, Homo sapien
ttttctgctccataaagccctccta

SEQ ID NO: 2317441 - DNA, 25 bp, Homo sapien
tggagtggaaaataatttttctcgc

SEQ ID NO: 2317442 - DNA, 25 bp, Homo sapien
tctcgctttgtcgtttttctgctcc

SEQ ID NO: 2317443 - DNA, 25 bp, Homo sapien
taatattccggactgtgttcaggga

SEQ ID NO: 2317444 - DNA, 25 bp, Homo sapien
ccctggagactggtgcagctatact

SEQ ID NO: 2317445 - DNA, 25 bp, Homo sapien
tagttagagtccatcaaatacgagc

SEQ ID NO: 2317446 - DNA, 25 bp, Homo sapien
tatactggcgctcagggtagctagg

SEQ ID NO: 2317447 - DNA, 25 bp, Homo sapien
tggtaatgtcctctgcccgttgctg

SEQ ID NO: 2317448 - DNA, 25 bp, Homo sapien
ggctgtcctcgagcgcttgggttcc

SEQ ID NO: 2317449 - DNA, 25 bp, Homo sapien
ctctaattccaggacttgctgccgg

SEQ ID NO: 2317450 - DNA, 25 bp, Homo sapien
ttgctgccgggtataggctgtcctc

SEQ ID NO: 2317451 - DNA, 25 bp, Homo sapien
ggagagattctacctatagactgcc

SEQ ID NO: 2317452 - DNA, 25 bp, Homo sapien
tagactgcctctctgaactgaaagt

SEQ ID NO: 2317453 - DNA, 25 bp, Homo sapien
ggtaccatgctaagacaacatcaca

SEQ ID NO: 2317454 - DNA, 25 bp, Homo sapien
caacatcacatgcttaaaagggtcc

SEQ ID NO: 2317455 - DNA, 25 bp, Homo sapien
gagggatacaatgcacttacaggca

SEQ ID NO: 2317456 - DNA, 25 bp, Homo sapien
gaaatccccagtcctacaaaagcag

SEQ ID NO: 2317457 - DNA, 25 bp, Homo sapien
gcagtggcatcctatctggagacca

SEQ ID NO: 2317458 - DNA, 25 bp, Homo sapien
gaaccctggaagattggtgtcgaca

SEQ ID NO: 2317459 - DNA, 25 bp, Homo sapien
gagggagaactgagggtcctacatt

SEQ ID NO: 2317460 - DNA, 25 bp, Homo sapien
acatatatttgcctaagaagggctc

SEQ ID NO: 2317461 - DNA, 25 bp, Homo sapien
ccatgaatacctatggcttacaggg

SEQ ID NO: 2317462 - DNA, 25 bp, Homo sapien
gaactgagggtcctacatttacata

SEQ ID NO: 2317463 - DNA, 25 bp, Homo sapien
tttatgggccttgagctctctgaag

SEQ ID NO: 2317464 - DNA, 25 bp, Homo sapien
gatttatgggccttgagctctctga

SEQ ID NO: 2317465 - DNA, 25 bp, Homo sapien
aagatttatgggccttgagctctct

SEQ ID NO: 2317466 - DNA, 25 bp, Homo sapien
tcaagatttatgggccttgagctct

SEQ ID NO: 2317467 - DNA, 25 bp, Homo sapien
gctgctgcacctttaacgctttctg

SEQ ID NO: 2317468 - DNA, 25 bp, Homo sapien
ctgctgcacctttaacgctttctgg

SEQ ID NO: 2317469 - DNA, 25 bp, Homo sapien
ttcaacagcagcgaaagccgtgtga

SEQ ID NO: 2317470 - DNA, 25 bp, Homo sapien
cttcaacagcagcgaaagccgtgtg

SEQ ID NO: 2317471 - DNA, 25 bp, Homo sapien
acagcagcgaaagccgtgtgaactc

SEQ ID NO: 2317472 - DNA, 25 bp, Homo sapien
caacagcagcgaaagccgtgtgaac

SEQ ID NO: 2317473 - DNA, 25 bp, Homo sapien
aggtggtatgcgggaagatctccct

SEQ ID NO: 2317474 - DNA, 25 bp, Homo sapien
ggtggtatgcgggaagatctccctt

SEQ ID NO: 2317475 - DNA, 25 bp, Homo sapien
tgaggtggtatgcgggaagatctcc

SEQ ID NO: 2317476 - DNA, 25 bp, Homo sapien
gtggtatgcgggaagatctcccttt

SEQ ID NO: 2317477 - DNA, 25 bp, Homo sapien
cagcacaccaattatattctgtcca

SEQ ID NO: 2317478 - DNA, 25 bp, Homo sapien
agcacaccaattatattctgtccat

SEQ ID NO: 2317479 - DNA, 25 bp, Homo sapien
gtagttgcgcaataaatgcttccca

SEQ ID NO: 2317480 - DNA, 25 bp, Homo sapien
taggcacatcactacgactctaagc

SEQ ID NO: 2317481 - DNA, 25 bp, Homo sapien
tataggttctttagggaggccctca

SEQ ID NO: 2317482 - DNA, 25 bp, Homo sapien
gcaggtctaatacgagaagtgtcag

SEQ ID NO: 2317483 - DNA, 25 bp, Homo sapien
aaaatgatgcaaactttgcatttta

SEQ ID NO: 2317484 - DNA, 25 bp, Homo sapien
tgatgcaaactttgcattttataac

SEQ ID NO: 2317485 - DNA, 25 bp, Homo sapien
ctgtcccaggttgtatctttaatga

SEQ ID NO: 2317486 - DNA, 25 bp, Homo sapien
gccactgtcccaggttgtatcttta

SEQ ID NO: 2317487 - DNA, 25 bp, Homo sapien
aagatcatgctggttaccaagtgga

SEQ ID NO: 2317488 - DNA, 25 bp, Homo sapien
aggtcactggtgatcgccctgtgag

SEQ ID NO: 2317489 - DNA, 25 bp, Homo sapien
ggcaaagtgctgacaagggtaaaac

SEQ ID NO: 2317490 - DNA, 25 bp, Homo sapien
gctggttaccaagtggagtattcca

SEQ ID NO: 2317491 - DNA, 25 bp, Homo sapien
tctgtgaagactccccagggtcgag

SEQ ID NO: 2317492 - DNA, 25 bp, Homo sapien
tttttacaggtgaggcccggagaca

SEQ ID NO: 2317493 - DNA, 25 bp, Homo sapien
taaggcaggcaaagagactcctcga

SEQ ID NO: 2317494 - DNA, 25 bp, Homo sapien
cgttcttggaggtatgaccgagcca

SEQ ID NO: 2317495 - DNA, 25 bp, Homo sapien
cttcaagaagctcagcagcctacta

SEQ ID NO: 2317496 - DNA, 25 bp, Homo sapien
tcagcagcctactactcatgttcat

SEQ ID NO: 2317497 - DNA, 25 bp, Homo sapien
aagctcagcagcctactactcatgt

SEQ ID NO: 2317498 - DNA, 25 bp, Homo sapien
gctcagcagcctactactcatgttc

SEQ ID NO: 2317499 - DNA, 25 bp, Homo sapien
ggagctggatttcaagcccactggg

SEQ ID NO: 2317500 - DNA, 25 bp, Homo sapien
tgtgcttggacaagcctctcgccag

SEQ ID NO: 2317501 - DNA, 25 bp, Homo sapien
taagtatgcgaaggactctatgcac

SEQ ID NO: 2317502 - DNA, 25 bp, Homo sapien
tacacacgaggaaacaggttcaagg

SEQ ID NO: 2317503 - DNA, 25 bp, Homo sapien
taaaaagattgtatcgggccaggtg

SEQ ID NO: 2317504 - DNA, 25 bp, Homo sapien
ggtatgaaaggaacacacgtccctg

SEQ ID NO: 2317505 - DNA, 25 bp, Homo sapien
ttgagccctggattaagactgcccg

SEQ ID NO: 2317506 - DNA, 25 bp, Homo sapien
cttgctgcacgagggtagagagaca

SEQ ID NO: 2317507 - DNA, 25 bp, Homo sapien
caatttccatgaagtttcaggtcct

SEQ ID NO: 2317508 - DNA, 25 bp, Homo sapien
ccatgaagtttcaggtcctcctgtt

SEQ ID NO: 2317509 - DNA, 25 bp, Homo sapien
tccatgaagtttcaggtcctcctgt

SEQ ID NO: 2317510 - DNA, 25 bp, Homo sapien
atttccatgaagtttcaggtcctcc

SEQ ID NO: 2317511 - DNA, 25 bp, Homo sapien
gcatactatgtactaggtacataca

SEQ ID NO: 2317512 - DNA, 25 bp, Homo sapien
aaagagttcattgaagttctgagag

SEQ ID NO: 2317513 - DNA, 25 bp, Homo sapien
tacacagtagtagctggatttcctg

SEQ ID NO: 2317514 - DNA, 25 bp, Homo sapien
tattgaaggcatactatgtactagg

SEQ ID NO: 2317515 - DNA, 25 bp, Homo sapien
aagattggaatcagatcaactcttt

SEQ ID NO: 2317516 - DNA, 25 bp, Homo sapien
ggctaagattggaatcagatcaact

SEQ ID NO: 2317517 - DNA, 25 bp, Homo sapien
aggctaagattggaatcagatcaac

SEQ ID NO: 2317518 - DNA, 25 bp, Homo sapien
ctaagattggaatcagatcaactct

SEQ ID NO: 2317519 - DNA, 25 bp, Homo sapien
ccacatggcgaaaagggagggtgaa

SEQ ID NO: 2317520 - DNA, 25 bp, Homo sapien
caacattccctcgacctcttctggg

SEQ ID NO: 2317521 - DNA, 25 bp, Homo sapien
ggtgaagggatgaggcgcccctccc

SEQ ID NO: 2317522 - DNA, 25 bp, Homo sapien
tgggtccctggcgacgtctctcgct

SEQ ID NO: 2317523 - DNA, 25 bp, Homo sapien
agtgggcgctatagcgtgagtggcc

SEQ ID NO: 2317524 - DNA, 25 bp, Homo sapien
aggcgcaggcgcctgatacagagca

SEQ ID NO: 2317525 - DNA, 25 bp, Homo sapien
gggctacactgctggcgcgggatgg

SEQ ID NO: 2317526 - DNA, 25 bp, Homo sapien
cagcgatccggagggagagcattca

SEQ ID NO: 2317527 - DNA, 25 bp, Homo sapien
tctcaaacgattccgggaggagcgc

SEQ ID NO: 2317528 - DNA, 25 bp, Homo sapien
tgtccttctctcaaacgattccggg

SEQ ID NO: 2317529 - DNA, 25 bp, Homo sapien
ctgctccggacaggctcatctagat

SEQ ID NO: 2317530 - DNA, 25 bp, Homo sapien
gaggagcgcaaactcggctcttggg

SEQ ID NO: 2317531 - DNA, 25 bp, Homo sapien
cagattaatatgtcagcctgcaggg

SEQ ID NO: 2317532 - DNA, 25 bp, Homo sapien
tctaggctggtaatcggtcccgact

SEQ ID NO: 2317533 - DNA, 25 bp, Homo sapien
ttagaatcaacgtaagggcccagga

SEQ ID NO: 2317534 - DNA, 25 bp, Homo sapien
gatctccaagcgtctctaagggcct

SEQ ID NO: 2317535 - DNA, 25 bp, Homo sapien
tcctggccctttccaaggagtcgga

SEQ ID NO: 2317536 - DNA, 25 bp, Homo sapien
cagatttgtggcttctgacccggca

SEQ ID NO: 2317537 - DNA, 25 bp, Homo sapien
taaacctctcagctaggccagtcca

SEQ ID NO: 2317538 - DNA, 25 bp, Homo sapien
caggtgtctacccaggaagggccag

SEQ ID NO: 2317539 - DNA, 25 bp, Homo sapien
ctctcagcagtaggcacaaggcaca

SEQ ID NO: 2317540 - DNA, 25 bp, Homo sapien
tttaacaggccccagactatctcta

SEQ ID NO: 2317541 - DNA, 25 bp, Homo sapien
ttttgtcctgcgtaagcccagccat

SEQ ID NO: 2317542 - DNA, 25 bp, Homo sapien
tttcatgttatctctatcccagcca

SEQ ID NO: 2317543 - DNA, 25 bp, Homo sapien
gctgtgtcgggggcaggtagggctg

SEQ ID NO: 2317544 - DNA, 25 bp, Homo sapien
ctgtgtcgggggcaggtagggctgc

SEQ ID NO: 2317545 - DNA, 25 bp, Homo sapien
gcatgtcatacagcctcaacgccat

SEQ ID NO: 2317546 - DNA, 25 bp, Homo sapien
catgcacgccttttggaaccagatc

SEQ ID NO: 2317547 - DNA, 25 bp, Homo sapien
ggcctcttgtacttcatgcacgcct

SEQ ID NO: 2317548 - DNA, 25 bp, Homo sapien
gaaccagatctggacctgcatgtca

SEQ ID NO: 2317549 - DNA, 25 bp, Homo sapien
cctctgccagtagggtgggaatgga

SEQ ID NO: 2317550 - DNA, 25 bp, Homo sapien
gcctctgccagtagggtgggaatgg

SEQ ID NO: 2317551 - DNA, 25 bp, Homo sapien
cccgagcccggaacaaagctgcccg

SEQ ID NO: 2317552 - DNA, 25 bp, Homo sapien
aagctgcccggtcttcagacagcct

SEQ ID NO: 2317553 - DNA, 25 bp, Homo sapien
ctgggagagtaacagccttgagggc

SEQ ID NO: 2317554 - DNA, 25 bp, Homo sapien
tgggagagtaacagccttgagggca

SEQ ID NO: 2317555 - DNA, 25 bp, Homo sapien
atcagcaattccatttttgggagca

SEQ ID NO: 2317556 - DNA, 25 bp, Homo sapien
gatggcggtgggcctggctaatcag

SEQ ID NO: 2317557 - DNA, 25 bp, Homo sapien
caaggtctggaacaagctgccttcc

SEQ ID NO: 2317558 - DNA, 25 bp, Homo sapien
tggcggtgggcctggctaatcaggg

SEQ ID NO: 2317559 - DNA, 25 bp, Homo sapien
ccttccttctttgccgagcagatgt

SEQ ID NO: 2317560 - DNA, 25 bp, Homo sapien
caggatgcaactgcggctctcagct

SEQ ID NO: 2317561 - DNA, 25 bp, Homo sapien
tattggtccacaacacattgaagcc

SEQ ID NO: 2317562 - DNA, 25 bp, Homo sapien
caagaacccaaagacggaagctgct

SEQ ID NO: 2317563 - DNA, 25 bp, Homo sapien
tattagtggaatgaacagccgaagc

SEQ ID NO: 2317564 - DNA, 25 bp, Homo sapien
tttcactgacaacaacattgctcag

SEQ ID NO: 2317565 - DNA, 25 bp, Homo sapien
actgacaacaacattgctcagaggc

SEQ ID NO: 2317566 - DNA, 25 bp, Homo sapien
tttaaggttttatgatatgccaagt

SEQ ID NO: 2317567 - DNA, 25 bp, Homo sapien
tctttaaggttttatgatatgccaa

SEQ ID NO: 2317568 - DNA, 25 bp, Homo sapien
tcacccctcgccactgcccttgtca

SEQ ID NO: 2317569 - DNA, 25 bp, Homo sapien
tttgatttccagagccggttccact

SEQ ID NO: 2317570 - DNA, 25 bp, Homo sapien
gagccggttccactctccctcttgt

SEQ ID NO: 2317571 - DNA, 25 bp, Homo sapien
gcatcgtttgatttccagagccggt

SEQ ID NO: 2317572 - DNA, 25 bp, Homo sapien
cgtttgatttccagagccggttcca

SEQ ID NO: 2317573 - DNA, 25 bp, Homo sapien
gaagccacctcatgctacagcaagt

SEQ ID NO: 2317574 - DNA, 25 bp, Homo sapien
caatgagcgggactggtacactttc

SEQ ID NO: 2317575 - DNA, 25 bp, Homo sapien
gaactgactcaaagagggacggcca

SEQ ID NO: 2317576 - DNA, 25 bp, Homo sapien
tgacagaggctagacaatgggaaga

SEQ ID NO: 2317577 - DNA, 25 bp, Homo sapien
tttaggatccactcgtgggctgctg

SEQ ID NO: 2317578 - DNA, 25 bp, Homo sapien
ccagacttgcagctgatgaaaatcc

SEQ ID NO: 2317579 - DNA, 25 bp, Homo sapien
tgaaaatcctttaggatccactcgt

SEQ ID NO: 2317580 - DNA, 25 bp, Homo sapien
tgtcctctattgctcaacatccaca

SEQ ID NO: 2317581 - DNA, 25 bp, Homo sapien
ctccatgcgcagcaccactggaagt

SEQ ID NO: 2317582 - DNA, 25 bp, Homo sapien
ccatgcgcagcaccactggaagttg

SEQ ID NO: 2317583 - DNA, 25 bp, Homo sapien
gtctccatgcgcagcaccactggaa

SEQ ID NO: 2317584 - DNA, 25 bp, Homo sapien
atgcgcagcaccactggaagttggg

SEQ ID NO: 2317585 - DNA, 25 bp, Homo sapien
gaagcttgcgtgttatgccagcacc

SEQ ID NO: 2317586 - DNA, 25 bp, Homo sapien
tgtgataggcagcatgcagagaccc

SEQ ID NO: 2317587 - DNA, 25 bp, Homo sapien
gagacccctgcccagagttggtgag

SEQ ID NO: 2317588 - DNA, 25 bp, Homo sapien
tggtgagctggacaacatgacccct

SEQ ID NO: 2317589 - DNA, 25 bp, Homo sapien
tctcggggtttaatgatctgtgcca

SEQ ID NO: 2317590 - DNA, 25 bp, Homo sapien
cctgctctcggggtttaatgatctg

SEQ ID NO: 2317591 - DNA, 25 bp, Homo sapien
gggcctgctctcggggtttaatgat

SEQ ID NO: 2317592 - DNA, 25 bp, Homo sapien
ttcatcttgtttgcggggcggctgg

SEQ ID NO: 2317593 - DNA, 25 bp, Homo sapien
gaggggatttattggtggctgcccc

SEQ ID NO: 2317594 - DNA, 25 bp, Homo sapien
cgacagctccctcgttccggcccat

SEQ ID NO: 2317595 - DNA, 25 bp, Homo sapien
gtgcagcctcctagcccgacagctc

SEQ ID NO: 2317596 - DNA, 25 bp, Homo sapien
gggatttattggtggctgcccccag

SEQ ID NO: 2317597 - DNA, 25 bp, Homo sapien
gcctgctgcggtgtaaagtctgcca

SEQ ID NO: 2317598 - DNA, 25 bp, Homo sapien
ggcactgcctgctgcggtgtaaagt

SEQ ID NO: 2317599 - DNA, 25 bp, Homo sapien
tgtggtccatcctcaagcccatttc

SEQ ID NO: 2317600 - DNA, 25 bp, Homo sapien
ttactagtccaggtgctttgagcag

SEQ ID NO: 2317601 - DNA, 25 bp, Homo sapien
tcatgtgcagtcacaccaggtcctg

SEQ ID NO: 2317602 - DNA, 25 bp, Homo sapien
aggggttgctacctgacaactggcc

SEQ ID NO: 2317603 - DNA, 25 bp, Homo sapien
ccccaaaacgaagggtctgctgatc

SEQ ID NO: 2317604 - DNA, 25 bp, Homo sapien
gctgatcatgtgcagtcacaccagg

SEQ ID NO: 2317605 - DNA, 25 bp, Homo sapien
gactccaagaggagggttctctcag

SEQ ID NO: 2317606 - DNA, 25 bp, Homo sapien
tgcattggtaccacgcttccaggga

SEQ ID NO: 2317607 - DNA, 25 bp, Homo sapien
ggcagatggtatcctcagcctaaat

SEQ ID NO: 2317608 - DNA, 25 bp, Homo sapien
gaataggtctgagttgaggtccaag

SEQ ID NO: 2317609 - DNA, 25 bp, Homo sapien
ggagctcagcgattctggcggtaat

SEQ ID NO: 2317610 - DNA, 25 bp, Homo sapien
ggtctgtccgcgtgcgtgtctctcg

SEQ ID NO: 2317611 - DNA, 25 bp, Homo sapien
tggcggtaatttccccgctcgacgc

SEQ ID NO: 2317612 - DNA, 25 bp, Homo sapien
tcgacgcggcttttacgagccagct

SEQ ID NO: 2317613 - DNA, 25 bp, Homo sapien
catcttcggggggcttgtcgtgtct

SEQ ID NO: 2317614 - DNA, 25 bp, Homo sapien
ctagtgtaattgagtgtgacccatt

SEQ ID NO: 2317615 - DNA, 25 bp, Homo sapien
cctctgtgtttggggcatcttcggg

SEQ ID NO: 2317616 - DNA, 25 bp, Homo sapien
gggcttgtcgtgtctttctgagtgt

SEQ ID NO: 2317617 - DNA, 25 bp, Homo sapien
gtgtgtcccctgtgaatcactgagt

SEQ ID NO: 2317618 - DNA, 25 bp, Homo sapien
ctgtatggaaggtctgtgtgtcccc

SEQ ID NO: 2317619 - DNA, 25 bp, Homo sapien
cctgtgaatcactgagttagcatca

SEQ ID NO: 2317620 - DNA, 25 bp, Homo sapien
ttgttcctgtgtttggtagcgctgc

SEQ ID NO: 2317621 - DNA, 25 bp, Homo sapien
ccatggagtggatatttgcaaaacg

SEQ ID NO: 2317622 - DNA, 25 bp, Homo sapien
gcaaaacgggaccattgtgtcagat

SEQ ID NO: 2317623 - DNA, 25 bp, Homo sapien
cattgtgtcagatatgtccaggaat

SEQ ID NO: 2317624 - DNA, 25 bp, Homo sapien
gatatttgcaaaacgggaccattgt

SEQ ID NO: 2317625 - DNA, 25 bp, Homo sapien
tgtgcaccctggtcgctgggaaacg

SEQ ID NO: 2317626 - DNA, 25 bp, Homo sapien
ccccactttgtagggaatctgcaga

SEQ ID NO: 2317627 - DNA, 25 bp, Homo sapien
catgggacacattcaagacctcgaa

SEQ ID NO: 2317628 - DNA, 25 bp, Homo sapien
gacctcgaagtcattcttggccaag

SEQ ID NO: 2317629 - DNA, 25 bp, Homo sapien
aaggctctacccgtaaatcacagtc

SEQ ID NO: 2317630 - DNA, 25 bp, Homo sapien
ggctctacccgtaaatcacagtcag

SEQ ID NO: 2317631 - DNA, 25 bp, Homo sapien
cacaaggctctacccgtaaatcaca

SEQ ID NO: 2317632 - DNA, 25 bp, Homo sapien
tgccccacaaggctctacccgtaaa

SEQ ID NO: 2317633 - DNA, 25 bp, Homo sapien
tccaagtgggacatgaaatgtcatt

SEQ ID NO: 2317634 - DNA, 25 bp, Homo sapien
caaagactgagtcatgcgggtggag

SEQ ID NO: 2317635 - DNA, 25 bp, Homo sapien
ggtgcttcttgcggcaggagatgac

SEQ ID NO: 2317636 - DNA, 25 bp, Homo sapien
tgcgggtggagtgcttcttgcggca

SEQ ID NO: 2317637 - DNA, 25 bp, Homo sapien
tttctctgcgttggtttctcttctc

SEQ ID NO: 2317638 - DNA, 25 bp, Homo sapien
tcttctcttgatggacaagacactt

SEQ ID NO: 2317639 - DNA, 25 bp, Homo sapien
cctccactttctctgcgttggtttc

SEQ ID NO: 2317640 - DNA, 25 bp, Homo sapien
cactgcaggtctatagcgttttcct

SEQ ID NO: 2317641 - DNA, 25 bp, Homo sapien
tcaatccgaccttcccatgacctga

SEQ ID NO: 2317642 - DNA, 25 bp, Homo sapien
accttcccatgacctgagcctggct

SEQ ID NO: 2317643 - DNA, 25 bp, Homo sapien
ttcccatgacctgagcctggctttc

SEQ ID NO: 2317644 - DNA, 25 bp, Homo sapien
cagctcaatccgaccttcccatgac

SEQ ID NO: 2317645 - DNA, 25 bp, Homo sapien
cacctctgagtaagcacctgatggg

SEQ ID NO: 2317646 - DNA, 25 bp, Homo sapien
cctctgagtaagcacctgatgggca

SEQ ID NO: 2317647 - DNA, 25 bp, Homo sapien
acctctgagtaagcacctgatgggc

SEQ ID NO: 2317648 - DNA, 25 bp, Homo sapien
catggagggtccatgggtgctgaaa

SEQ ID NO: 2317649 - DNA, 25 bp, Homo sapien
tggcggcccttgacgtcactcaggg

SEQ ID NO: 2317650 - DNA, 25 bp, Homo sapien
cactcagggacttgttgctaatggc

SEQ ID NO: 2317651 - DNA, 25 bp, Homo sapien
tgaaagaggagaccatagcctggcg

SEQ ID NO: 2317652 - DNA, 25 bp, Homo sapien
ctgggatgggtggtattcccttccg

SEQ ID NO: 2317653 - DNA, 25 bp, Homo sapien
ggagtgggctccagcttcagaatct

SEQ ID NO: 2317654 - DNA, 25 bp, Homo sapien
catcctactcaggaccttctctttc

SEQ ID NO: 2317655 - DNA, 25 bp, Homo sapien
ttctcctcgagctatttccaaagac

SEQ ID NO: 2317656 - DNA, 25 bp, Homo sapien
catcccctagctttggcgcattcag

SEQ ID NO: 2317657 - DNA, 25 bp, Homo sapien
gggtggcgcagacctcctcgaagac

SEQ ID NO: 2317658 - DNA, 25 bp, Homo sapien
aagaccctcacgtgggctcccgtgg

SEQ ID NO: 2317659 - DNA, 25 bp, Homo sapien
tgtgtttggatgaaccgtagcctcg

SEQ ID NO: 2317660 - DNA, 25 bp, Homo sapien
atggacacctgggtggtcccgccac

SEQ ID NO: 2317661 - DNA, 25 bp, Homo sapien
ctggatggacacctgggtggtcccg

SEQ ID NO: 2317662 - DNA, 25 bp, Homo sapien
acacctgggtggtcccgccacacac

SEQ ID NO: 2317663 - DNA, 25 bp, Homo sapien
tggatggacacctgggtggtcccgc

SEQ ID NO: 2317664 - DNA, 25 bp, Homo sapien
agattggcatttcaagatctcctgc

SEQ ID NO: 2317665 - DNA, 25 bp, Homo sapien
tggagattggcatttcaagatctcc

SEQ ID NO: 2317666 - DNA, 25 bp, Homo sapien
gagattggcatttcaagatctcctg

SEQ ID NO: 2317667 - DNA, 25 bp, Homo sapien
gattggcatttcaagatctcctgct

SEQ ID NO: 2317668 - DNA, 25 bp, Homo sapien
aaccgaagcgctggctgttgtgtgc

SEQ ID NO: 2317669 - DNA, 25 bp, Homo sapien
tgagtctggccatgatgcagaagat

SEQ ID NO: 2317670 - DNA, 25 bp, Homo sapien
tctggccatgatgcagaagataagg

SEQ ID NO: 2317671 - DNA, 25 bp, Homo sapien
agagcagttttgtgtaaccgaagcg

SEQ ID NO: 2317672 - DNA, 25 bp, Homo sapien
caggggtgagaggaatctcagaggt

SEQ ID NO: 2317673 - DNA, 25 bp, Homo sapien
ctaatagatgtcattatcaattgcc

SEQ ID NO: 2317674 - DNA, 25 bp, Homo sapien
aaaggaaagaacgtctgtgcaatga

SEQ ID NO: 2317675 - DNA, 25 bp, Homo sapien
tagatgtcattatcaattgccaggg

SEQ ID NO: 2317676 - DNA, 25 bp, Homo sapien
ggctggcttaatggtccatgacctc

SEQ ID NO: 2317677 - DNA, 25 bp, Homo sapien
ggcttaatggtccatgacctcataa

SEQ ID NO: 2317678 - DNA, 25 bp, Homo sapien
gaagacatctgtaggttggctggct

SEQ ID NO: 2317679 - DNA, 25 bp, Homo sapien
tgacctcataaacatgggacaggag

SEQ ID NO: 2317680 - DNA, 25 bp, Homo sapien
tgtgtataacactcagaattgggca

SEQ ID NO: 2317681 - DNA, 25 bp, Homo sapien
gtagccaggagttgacttgcccatg

SEQ ID NO: 2317682 - DNA, 25 bp, Homo sapien
ggtcctggctccttgcggtcacatt

SEQ ID NO: 2317683 - DNA, 25 bp, Homo sapien
cagcactagcagtaccagatggttc

SEQ ID NO: 2317684 - DNA, 25 bp, Homo sapien
gaggcagggatgctactgcgtattt

SEQ ID NO: 2317685 - DNA, 25 bp, Homo sapien
cattggattagggaatcgtgaggca

SEQ ID NO: 2317686 - DNA, 25 bp, Homo sapien
cagggatgctactgcgtatttctct

SEQ ID NO: 2317687 - DNA, 25 bp, Homo sapien
ggcagggatgctactgcgtatttct

SEQ ID NO: 2317688 - DNA, 25 bp, Homo sapien
ctgtgtcttgcattcacagagggag

SEQ ID NO: 2317689 - DNA, 25 bp, Homo sapien
tctgtgtcttgcattcacagaggga

SEQ ID NO: 2317690 - DNA, 25 bp, Homo sapien
ggaaggcacttgggattttctgtgt

SEQ ID NO: 2317691 - DNA, 25 bp, Homo sapien
aggcacttgggattttctgtgtctt

SEQ ID NO: 2317692 - DNA, 25 bp, Homo sapien
tgtctccaagactggaactacttag

SEQ ID NO: 2317693 - DNA, 25 bp, Homo sapien
tagtgactcggcaaattttctgccc

SEQ ID NO: 2317694 - DNA, 25 bp, Homo sapien
gagccagagtttaagcctgacacac

SEQ ID NO: 2317695 - DNA, 25 bp, Homo sapien
gaatgttggaatcttactagtccag

SEQ ID NO: 2317696 - DNA, 25 bp, Homo sapien
ttataagagcgctaccaagaaccac

SEQ ID NO: 2317697 - DNA, 25 bp, Homo sapien
taaagagttacatctctcacaggag

SEQ ID NO: 2317698 - DNA, 25 bp, Homo sapien
cagaaaggttggaaaaatgcagccc

SEQ ID NO: 2317699 - DNA, 25 bp, Homo sapien
tgctcccaagtacactctgagaggt

SEQ ID NO: 2317700 - DNA, 25 bp, Homo sapien
ccggcccctagtgaacattttactg

SEQ ID NO: 2317701 - DNA, 25 bp, Homo sapien
gattggattctaaacgagggctggt

SEQ ID NO: 2317702 - DNA, 25 bp, Homo sapien
cctcctcagtttaggataagagaca

SEQ ID NO: 2317703 - DNA, 25 bp, Homo sapien
cttaaggctcaagtcagtgttctgg

SEQ ID NO: 2317704 - DNA, 25 bp, Homo sapien
tgtcattgccaaaagatcagtctta

SEQ ID NO: 2317705 - DNA, 25 bp, Homo sapien
cagtcgattcaaggccaagtggtca

SEQ ID NO: 2317706 - DNA, 25 bp, Homo sapien
taaactttcttagcacctgtacctg

SEQ ID NO: 2317707 - DNA, 25 bp, Homo sapien
caggtgtgaccctaacagtcgattc

SEQ ID NO: 2317708 - DNA, 25 bp, Homo sapien
cagccatactgcatactactttgtg

SEQ ID NO: 2317709 - DNA, 25 bp, Homo sapien
ggacctgtggtgcttctaacaatta

SEQ ID NO: 2317710 - DNA, 25 bp, Homo sapien
tcctgttctgtagccacccagcagt

SEQ ID NO: 2317711 - DNA, 25 bp, Homo sapien
tttcttcgcggtttgccatgtgtga

SEQ ID NO: 2317712 - DNA, 25 bp, Homo sapien
tggcattagcatgttgacacaccct

SEQ ID NO: 2317713 - DNA, 25 bp, Homo sapien
acaggccctggcattagcatgttga

SEQ ID NO: 2317714 - DNA, 25 bp, Homo sapien
aaaaataaaggcatgttcctgaaag

SEQ ID NO: 2317715 - DNA, 25 bp, Homo sapien
tgttcctgaaagactgtcaccttgg

SEQ ID NO: 2317716 - DNA, 25 bp, Homo sapien
taaaaagccaatagcaactgcctac

SEQ ID NO: 2317717 - DNA, 25 bp, Homo sapien
gatgttgcccatctgttaaaaagcc

SEQ ID NO: 2317718 - DNA, 25 bp, Homo sapien
caaccttgttcagctctacccagga

SEQ ID NO: 2317719 - DNA, 25 bp, Homo sapien
gaagaccaggcatttacatactgag

SEQ ID NO: 2317720 - DNA, 25 bp, Homo sapien
catgcctggctcaattaacaatttt

SEQ ID NO: 2317721 - DNA, 25 bp, Homo sapien
cagttcagtggcatttatattctct

SEQ ID NO: 2317722 - DNA, 25 bp, Homo sapien
attctcttgatctattatttctaca

SEQ ID NO: 2317723 - DNA, 25 bp, Homo sapien
ccatgcctggctcaattaacaattt

SEQ ID NO: 2317724 - DNA, 25 bp, Homo sapien
gctatggcaacggactgggacagct

SEQ ID NO: 2317725 - DNA, 25 bp, Homo sapien
ccccttagtgtagtactgctgccag

SEQ ID NO: 2317726 - DNA, 25 bp, Homo sapien
gggacagctgcgcagtggcgcccag

SEQ ID NO: 2317727 - DNA, 25 bp, Homo sapien
tccacccagtcttcactgaaaagga

SEQ ID NO: 2317728 - DNA, 25 bp, Homo sapien
ttccatcagaactatgtcgtcatcc

SEQ ID NO: 2317729 - DNA, 25 bp, Homo sapien
atgtcgtcatccttgccagcttctg

SEQ ID NO: 2317730 - DNA, 25 bp, Homo sapien
ctatgtcgtcatccttgccagcttc

SEQ ID NO: 2317731 - DNA, 25 bp, Homo sapien
gacacattccatcagaactatgtcg

SEQ ID NO: 2317732 - DNA, 25 bp, Homo sapien
taatactccgggtcacactgtctaa

SEQ ID NO: 2317733 - DNA, 25 bp, Homo sapien
tccctcctcctaagctcagtgtgaa

SEQ ID NO: 2317734 - DNA, 25 bp, Homo sapien
gatgctttatctggtctaggctcta

SEQ ID NO: 2317735 - DNA, 25 bp, Homo sapien
gaattatgtcccctccgatgtctga

SEQ ID NO: 2317736 - DNA, 25 bp, Homo sapien
ggatttctgtaagccactcgaagcc

SEQ ID NO: 2317737 - DNA, 25 bp, Homo sapien
ttacacttgtgctggaagaacaccc

SEQ ID NO: 2317738 - DNA, 25 bp, Homo sapien
gaagagttcgcttgtccagagtcca

SEQ ID NO: 2317739 - DNA, 25 bp, Homo sapien
ggagctctaccaactagcatgtttg

SEQ ID NO: 2317740 - DNA, 25 bp, Homo sapien
tggtaatgcccactctgcttattcc

SEQ ID NO: 2317741 - DNA, 25 bp, Homo sapien
tgttttatgtaatccatgtgcccag

SEQ ID NO: 2317742 - DNA, 25 bp, Homo sapien
cattgaagatatcctaaagtccctc

SEQ ID NO: 2317743 - DNA, 25 bp, Homo sapien
tctttctcccgggaactttcatata

SEQ ID NO: 2317744 - DNA, 25 bp, Homo sapien
ttggcgggcggttggcgttgcgcag

SEQ ID NO: 2317745 - DNA, 25 bp, Homo sapien
gtccggtcccaggattggttgcgca

SEQ ID NO: 2317746 - DNA, 25 bp, Homo sapien
cctagctttgcgcatgcgtagtggg

SEQ ID NO: 2317747 - DNA, 25 bp, Homo sapien
tgttggcgggagtttgtcctagctt

SEQ ID NO: 2317748 - DNA, 25 bp, Homo sapien
gcagatacgttcgtcagcttgctcc

SEQ ID NO: 2317749 - DNA, 25 bp, Homo sapien
agatacgttcgtcagcttgctcctt

SEQ ID NO: 2317750 - DNA, 25 bp, Homo sapien
cgaaggtaggctggcagatacgttc

SEQ ID NO: 2317751 - DNA, 25 bp, Homo sapien
ggtaggctggcagatacgttcgtca

SEQ ID NO: 2317752 - DNA, 25 bp, Homo sapien
ctggcagatacgttcgtcagcttgc

SEQ ID NO: 2317753 - DNA, 25 bp, Homo sapien
taggctggcagatacgttcgtcagc

SEQ ID NO: 2317754 - DNA, 25 bp, Homo sapien
tgacgaacgtatctgccagcctacc

SEQ ID NO: 2317755 - DNA, 25 bp, Homo sapien
gcaagctgacgaacgtatctgccag

SEQ ID NO: 2317756 - DNA, 25 bp, Homo sapien
gctgacgaacgtatctgccagccta

SEQ ID NO: 2317757 - DNA, 25 bp, Homo sapien
aaggagcaagctgacgaacgtatct

SEQ ID NO: 2317758 - DNA, 25 bp, Homo sapien
gaacgtatctgccagcctaccttcg

SEQ ID NO: 2317759 - DNA, 25 bp, Homo sapien
ggagcaagctgacgaacgtatctgc

SEQ ID NO: 2317760 - DNA, 25 bp, Homo sapien
aatggggaacgctcacggactgtgt

SEQ ID NO: 2317761 - DNA, 25 bp, Homo sapien
gcccgaacagctgaggaagctcttc

SEQ ID NO: 2317762 - DNA, 25 bp, Homo sapien
ggagggttgagctttgaaacaactg

SEQ ID NO: 2317763 - DNA, 25 bp, Homo sapien
taaagagcccgaacagctgaggaag

SEQ ID NO: 2317764 - DNA, 25 bp, Homo sapien
atggggaacgctcacggactgtgtg

SEQ ID NO: 2317765 - DNA, 25 bp, Homo sapien
ttgagcaatggggaacgctcacgga

SEQ ID NO: 2317766 - DNA, 25 bp, Homo sapien
acacagtccgtgagcgttccccatt

SEQ ID NO: 2317767 - DNA, 25 bp, Homo sapien
cacacagtccgtgagcgttccccat

SEQ ID NO: 2317768 - DNA, 25 bp, Homo sapien
tccgtgagcgttccccattgctcaa

SEQ ID NO: 2317769 - DNA, 25 bp, Homo sapien
cttcctcagctgttcgggctcttta

SEQ ID NO: 2317770 - DNA, 25 bp, Homo sapien
cagttgtttcaaagctcaaccctcc

SEQ ID NO: 2317771 - DNA, 25 bp, Homo sapien
gaagagcttcctcagctgttcgggc

SEQ ID NO: 2317772 - DNA, 25 bp, Homo sapien
aaaacagccgatttccttggcttat

SEQ ID NO: 2317773 - DNA, 25 bp, Homo sapien
tggcttatcttggtgcagtcttctc

SEQ ID NO: 2317774 - DNA, 25 bp, Homo sapien
gacaaaagcttttgcggtcagactt

SEQ ID NO: 2317775 - DNA, 25 bp, Homo sapien
gcagtcttctccgaatgcttatgaa

SEQ ID NO: 2317776 - DNA, 25 bp, Homo sapien
ttggcaaaggaacgtcctgctttga

SEQ ID NO: 2317777 - DNA, 25 bp, Homo sapien
cattatagttagagctttgttggca

SEQ ID NO: 2317778 - DNA, 25 bp, Homo sapien
aagtctgaccgcaaaagcttttgtc

SEQ ID NO: 2317779 - DNA, 25 bp, Homo sapien
tcaaagcaggacgttcctttgccaa

SEQ ID NO: 2317780 - DNA, 25 bp, Homo sapien
gagaagactgcaccaagataagcca

SEQ ID NO: 2317781 - DNA, 25 bp, Homo sapien
ttcataagcattcggagaagactgc

SEQ ID NO: 2317782 - DNA, 25 bp, Homo sapien
gataagccaaggaaatcggctgttt

SEQ ID NO: 2317783 - DNA, 25 bp, Homo sapien
gcaataggaaactttacaccagcct

SEQ ID NO: 2317784 - DNA, 25 bp, Homo sapien
agagatccaaacaccaagcgctcca

SEQ ID NO: 2317785 - DNA, 25 bp, Homo sapien
atgcagctatgaatgcaaggccaca

SEQ ID NO: 2317786 - DNA, 25 bp, Homo sapien
aatgagagatccaaacaccaagcgc

SEQ ID NO: 2317787 - DNA, 25 bp, Homo sapien
aggtggatgcagctatgaatgcaag

SEQ ID NO: 2317788 - DNA, 25 bp, Homo sapien
accaaagagagctgtctccagagaa

SEQ ID NO: 2317789 - DNA, 25 bp, Homo sapien
gaggtggatgcagctatgaatgcaa

SEQ ID NO: 2317790 - DNA, 25 bp, Homo sapien
ttctctggagacagctctctttggt

SEQ ID NO: 2317791 - DNA, 25 bp, Homo sapien
gcgcttggtgtttggatctctcatt

SEQ ID NO: 2317792 - DNA, 25 bp, Homo sapien
cttgcattcatagctgcatccacct

SEQ ID NO: 2317793 - DNA, 25 bp, Homo sapien
tgtggccttgcattcatagctgcat

SEQ ID NO: 2317794 - DNA, 25 bp, Homo sapien
ctggagcgcttggtgtttggatctc

SEQ ID NO: 2317795 - DNA, 25 bp, Homo sapien
ttgcattcatagctgcatccacctc

SEQ ID NO: 2317796 - DNA, 25 bp, Homo sapien
caaagaccaggtgcccacttaactg

SEQ ID NO: 2317797 - DNA, 25 bp, Homo sapien
catcacctaagagattattttgaac

SEQ ID NO: 2317798 - DNA, 25 bp, Homo sapien
gaccaggtgcccacttaactgtgaa

SEQ ID NO: 2317799 - DNA, 25 bp, Homo sapien
gttggtggcattaaagaagacactg

SEQ ID NO: 2317800 - DNA, 25 bp, Homo sapien
ccaggtgcccacttaactgtgaaaa

SEQ ID NO: 2317801 - DNA, 25 bp, Homo sapien
tcacctaagagattattttgaacag

SEQ ID NO: 2317802 - DNA, 25 bp, Homo sapien
ctgttcaaaataatctcttaggtga

SEQ ID NO: 2317803 - DNA, 25 bp, Homo sapien
gttcaaaataatctcttaggtgatg

SEQ ID NO: 2317804 - DNA, 25 bp, Homo sapien
tgttcaaaataatctcttaggtgat

SEQ ID NO: 2317805 - DNA, 25 bp, Homo sapien
ttcacagttaagtgggcacctggtc

SEQ ID NO: 2317806 - DNA, 25 bp, Homo sapien
cagttaagtgggcacctggtctttg

SEQ ID NO: 2317807 - DNA, 25 bp, Homo sapien
ttttcacagttaagtgggcacctgg

SEQ ID NO: 2317808 - DNA, 25 bp, Homo sapien
tttgtaacctttgacgaccatgact

SEQ ID NO: 2317809 - DNA, 25 bp, Homo sapien
tgtaacctttgacgaccatgactcc

SEQ ID NO: 2317810 - DNA, 25 bp, Homo sapien
catgactgaccgaggcagtggcaag

SEQ ID NO: 2317811 - DNA, 25 bp, Homo sapien
gattgaaatcatgactgaccgaggc

SEQ ID NO: 2317812 - DNA, 25 bp, Homo sapien
tatggaaaaattgaagtgattgaaa

SEQ ID NO: 2317813 - DNA, 25 bp, Homo sapien
ctttgtaacctttgacgaccatgac

SEQ ID NO: 2317814 - DNA, 25 bp, Homo sapien
tttcaatcacttcaatttttccata

SEQ ID NO: 2317815 - DNA, 25 bp, Homo sapien
agtcatggtcgtcaaaggttacaaa

SEQ ID NO: 2317816 - DNA, 25 bp, Homo sapien
gcctcggtcagtcatgatttcaatc

SEQ ID NO: 2317817 - DNA, 25 bp, Homo sapien
tcttgccactgcctcggtcagtcat

SEQ ID NO: 2317818 - DNA, 25 bp, Homo sapien
ggagtcatggtcgtcaaaggttaca

SEQ ID NO: 2317819 - DNA, 25 bp, Homo sapien
gtcatggtcgtcaaaggttacaaag

SEQ ID NO: 2317820 - DNA, 25 bp, Homo sapien
actgtgaagttagaaaagccctgtc

SEQ ID NO: 2317821 - DNA, 25 bp, Homo sapien
ttagaaaagccctgtcaaagcaaga

SEQ ID NO: 2317822 - DNA, 25 bp, Homo sapien
gaagttagaaaagccctgtcaaagc

SEQ ID NO: 2317823 - DNA, 25 bp, Homo sapien
gttagaaaagccctgtcaaagcaag

SEQ ID NO: 2317824 - DNA, 25 bp, Homo sapien
aactgtgaagttagaaaagccctgt

SEQ ID NO: 2317825 - DNA, 25 bp, Homo sapien
tgaagttagaaaagccctgtcaaag

SEQ ID NO: 2317826 - DNA, 25 bp, Homo sapien
gacagggcttttctaacttcacagt

SEQ ID NO: 2317827 - DNA, 25 bp, Homo sapien
cttgctttgacagggcttttctaac

SEQ ID NO: 2317828 - DNA, 25 bp, Homo sapien
gctttgacagggcttttctaacttc

SEQ ID NO: 2317829 - DNA, 25 bp, Homo sapien
ctttgacagggcttttctaacttca

SEQ ID NO: 2317830 - DNA, 25 bp, Homo sapien
tttgacagggcttttctaacttcac

SEQ ID NO: 2317831 - DNA, 25 bp, Homo sapien
tcttgctttgacagggcttttctaa

SEQ ID NO: 2317832 - DNA, 25 bp, Homo sapien
cgtggaggtggtttcggtgggaatg

SEQ ID NO: 2317833 - DNA, 25 bp, Homo sapien
tcggtgggaatgacaacttcggtcg

SEQ ID NO: 2317834 - DNA, 25 bp, Homo sapien
tgacaacttcggtcgtggaggaaac

SEQ ID NO: 2317835 - DNA, 25 bp, Homo sapien
acttcggtcgtggaggaaacttcag

SEQ ID NO: 2317836 - DNA, 25 bp, Homo sapien
tgggaatgacaacttcggtcgtgga

SEQ ID NO: 2317837 - DNA, 25 bp, Homo sapien
atgacaacttcggtcgtggaggaaa

SEQ ID NO: 2317838 - DNA, 25 bp, Homo sapien
gaagttgtcattcccaccgaaacca

SEQ ID NO: 2317839 - DNA, 25 bp, Homo sapien
gtttcctccacgaccgaagttgtca

SEQ ID NO: 2317840 - DNA, 25 bp, Homo sapien
ctgaagtttcctccacgaccgaagt

SEQ ID NO: 2317841 - DNA, 25 bp, Homo sapien
tttcctccacgaccgaagttgtcat

SEQ ID NO: 2317842 - DNA, 25 bp, Homo sapien
cgaccgaagttgtcattcccaccga

SEQ ID NO: 2317843 - DNA, 25 bp, Homo sapien
tccacgaccgaagttgtcattccca

SEQ ID NO: 2317844 - DNA, 25 bp, Homo sapien
ggtggcagccgtggtggtggtggat

SEQ ID NO: 2317845 - DNA, 25 bp, Homo sapien
gcagccgtggtggtggtggatatgg

SEQ ID NO: 2317846 - DNA, 25 bp, Homo sapien
tggctttggtggcagccgtggtggt

SEQ ID NO: 2317847 - DNA, 25 bp, Homo sapien
gctttggtggcagccgtggtggtgg

SEQ ID NO: 2317848 - DNA, 25 bp, Homo sapien
ggctttggtggcagccgtggtggtg

SEQ ID NO: 2317849 - DNA, 25 bp, Homo sapien
tggtggcagccgtggtggtggtgga

SEQ ID NO: 2317850 - DNA, 25 bp, Homo sapien
accaccaccacggctgccaccaaag

SEQ ID NO: 2317851 - DNA, 25 bp, Homo sapien
atccaccaccaccacggctgccacc

SEQ ID NO: 2317852 - DNA, 25 bp, Homo sapien
accaccacggctgccaccaaagcca

SEQ ID NO: 2317853 - DNA, 25 bp, Homo sapien
ccaccaccacggctgccaccaaagc

SEQ ID NO: 2317854 - DNA, 25 bp, Homo sapien
caccaccacggctgccaccaaagcc

SEQ ID NO: 2317855 - DNA, 25 bp, Homo sapien
ccatatccaccaccaccacggctgc

SEQ ID NO: 2317856 - DNA, 25 bp, Homo sapien
gagactaaaattctggtgcatgtca

SEQ ID NO: 2317857 - DNA, 25 bp, Homo sapien
ggccttcagccgttacacttgcaca

SEQ ID NO: 2317858 - DNA, 25 bp, Homo sapien
cctggatctttagaataggttagta

SEQ ID NO: 2317859 - DNA, 25 bp, Homo sapien
ggtgcatgtcaaactcaactttgcc

SEQ ID NO: 2317860 - DNA, 25 bp, Homo sapien
aactttgcccataacacgcatgctg

SEQ ID NO: 2317861 - DNA, 25 bp, Homo sapien
ataacacgcatgctgtgagcaggcc

SEQ ID NO: 2317862 - DNA, 25 bp, Homo sapien
caaagttgagtttgacatgcaccag

SEQ ID NO: 2317863 - DNA, 25 bp, Homo sapien
gtaacggctgaaggcctgctcacag

SEQ ID NO: 2317864 - DNA, 25 bp, Homo sapien
catgcaccagaattttagtctctac

SEQ ID NO: 2317865 - DNA, 25 bp, Homo sapien
cacagcatgcgtgttatgggcaaag

SEQ ID NO: 2317866 - DNA, 25 bp, Homo sapien
tactaacctattctaaagatccagg

SEQ ID NO: 2317867 - DNA, 25 bp, Homo sapien
tgtgcaagtgtaacggctgaaggcc

SEQ ID NO: 2317868 - DNA, 25 bp, Homo sapien
gcggaggcggctttggcggtggtag

SEQ ID NO: 2317869 - DNA, 25 bp, Homo sapien
cgggagtggcagctatgacagctat

SEQ ID NO: 2317870 - DNA, 25 bp, Homo sapien
ttatggaaaccagggcagtggctat

SEQ ID NO: 2317871 - DNA, 25 bp, Homo sapien
gctataacaacggaggcggaggcgg

SEQ ID NO: 2317872 - DNA, 25 bp, Homo sapien
cggccctggttactctggaggaagc

SEQ ID NO: 2317873 - DNA, 25 bp, Homo sapien
cagctataacaacggaggcggaggc

SEQ ID NO: 2317874 - DNA, 25 bp, Homo sapien
gcttcctccagagtaaccagggccg

SEQ ID NO: 2317875 - DNA, 25 bp, Homo sapien
gcctccgcctccgttgttatagctg

SEQ ID NO: 2317876 - DNA, 25 bp, Homo sapien
ccgcctccgcctccgttgttatagc

SEQ ID NO: 2317877 - DNA, 25 bp, Homo sapien
tagccactgccctggtttccataac

SEQ ID NO: 2317878 - DNA, 25 bp, Homo sapien
atagctgtcatagctgccactcccg

SEQ ID NO: 2317879 - DNA, 25 bp, Homo sapien
actaccaccgccaaagccgcctccg

SEQ ID NO: 2317880 - DNA, 25 bp, Homo sapien
atcctcaggtaacagataaaggccc

SEQ ID NO: 2317881 - DNA, 25 bp, Homo sapien
gggcctttatctgttacctgaggat

SEQ ID NO: 2317882 - DNA, 25 bp, Homo sapien
taaaggccctctttcccattcatag

SEQ ID NO: 2317883 - DNA, 25 bp, Homo sapien
caaccttattttattctgactgcta

SEQ ID NO: 2317884 - DNA, 25 bp, Homo sapien
tggaaactaacatcatcctcaggta

SEQ ID NO: 2317885 - DNA, 25 bp, Homo sapien
tcctcaggtaacagataaaggccct

SEQ ID NO: 2317886 - DNA, 25 bp, Homo sapien
gaaaggaaggctgataactcaacct

SEQ ID NO: 2317887 - DNA, 25 bp, Homo sapien
tctgactgctaaacagaattggaaa

SEQ ID NO: 2317888 - DNA, 25 bp, Homo sapien
aataaggttgagttatcagccttcc

SEQ ID NO: 2317889 - DNA, 25 bp, Homo sapien
gtttccaattctgtttagcagtcag

SEQ ID NO: 2317890 - DNA, 25 bp, Homo sapien
tagcagtcagaataaaataaggttg

SEQ ID NO: 2317891 - DNA, 25 bp, Homo sapien
ctatgaatgggaaagagggccttta

SEQ ID NO: 2317892 - DNA, 25 bp, Homo sapien
tacctgaggatgatgttagtttcca

SEQ ID NO: 2317893 - DNA, 25 bp, Homo sapien
gagggcctttatctgttacctgagg

SEQ ID NO: 2317894 - DNA, 25 bp, Homo sapien
gccaatactttgcaaaaccacgaaa

SEQ ID NO: 2317895 - DNA, 25 bp, Homo sapien
gcccctatggcggtggaggccaata

SEQ ID NO: 2317896 - DNA, 25 bp, Homo sapien
ggccaatactttgcaaaaccacgaa

SEQ ID NO: 2317897 - DNA, 25 bp, Homo sapien
cccatgaagggaggaaattttggag

SEQ ID NO: 2317898 - DNA, 25 bp, Homo sapien
gggaattacaacaatcagtcttcaa

SEQ ID NO: 2317899 - DNA, 25 bp, Homo sapien
cccctatggcggtggaggccaatac

SEQ ID NO: 2317900 - DNA, 25 bp, Homo sapien
ctccaaaatttcctcccttcatggg

SEQ ID NO: 2317901 - DNA, 25 bp, Homo sapien
tattggcctccaccgccataggggc

SEQ ID NO: 2317902 - DNA, 25 bp, Homo sapien
ttgaagactgattgttgtaattccc

SEQ ID NO: 2317903 - DNA, 25 bp, Homo sapien
tttcgtggttttgcaaagtattggc

SEQ ID NO: 2317904 - DNA, 25 bp, Homo sapien
gtattggcctccaccgccatagggg

SEQ ID NO: 2317905 - DNA, 25 bp, Homo sapien
ttcgtggttttgcaaagtattggcc

SEQ ID NO: 2317906 - DNA, 25 bp, Homo sapien
taccacctcccttgtagtagggcca

SEQ ID NO: 2317907 - DNA, 25 bp, Homo sapien
gaaaaatcatgggacctctttacca

SEQ ID NO: 2317908 - DNA, 25 bp, Homo sapien
gagtgtctgtagctactgctgggaa

SEQ ID NO: 2317909 - DNA, 25 bp, Homo sapien
ctttaactgctatgtctgggcagca

SEQ ID NO: 2317910 - DNA, 25 bp, Homo sapien
tctgggcagcaaaacgtttatagtt

SEQ ID NO: 2317911 - DNA, 25 bp, Homo sapien
cattactgttggcactttgaaactt

SEQ ID NO: 2317912 - DNA, 25 bp, Homo sapien
gaggtggtaaagaggtcccatgatt

SEQ ID NO: 2317913 - DNA, 25 bp, Homo sapien
tgctgcccagacatagcagttaaag

SEQ ID NO: 2317914 - DNA, 25 bp, Homo sapien
aaatggccctactacaagggaggtg

SEQ ID NO: 2317915 - DNA, 25 bp, Homo sapien
taaagtttcaaagtgccaacagtaa

SEQ ID NO: 2317916 - DNA, 25 bp, Homo sapien
tttcttcccagcagtagctacagac

SEQ ID NO: 2317917 - DNA, 25 bp, Homo sapien
aactataaacgttttgctgcccaga

SEQ ID NO: 2317918 - DNA, 25 bp, Homo sapien
gcagcagcagtagctatggcagtgg

SEQ ID NO: 2317919 - DNA, 25 bp, Homo sapien
ccagcagcagcagtagctatggcag

SEQ ID NO: 2317920 - DNA, 25 bp, Homo sapien
tccagcagcagcagtagctatggca

SEQ ID NO: 2317921 - DNA, 25 bp, Homo sapien
ggctatggcggttccagcagcagca

SEQ ID NO: 2317922 - DNA, 25 bp, Homo sapien
gctatggcggttccagcagcagcag

SEQ ID NO: 2317923 - DNA, 25 bp, Homo sapien
tggctatggcggttccagcagcagc

SEQ ID NO: 2317924 - DNA, 25 bp, Homo sapien
ctgccatagctactgctgctgctgg

SEQ ID NO: 2317925 - DNA, 25 bp, Homo sapien
gctgctgctggaaccgccatagcca

SEQ ID NO: 2317926 - DNA, 25 bp, Homo sapien
ccactgccatagctactgctgctgc

SEQ ID NO: 2317927 - DNA, 25 bp, Homo sapien
tgccatagctactgctgctgctgga

SEQ ID NO: 2317928 - DNA, 25 bp, Homo sapien
ctgctgctgctggaaccgccatagc

SEQ ID NO: 2317929 - DNA, 25 bp, Homo sapien
tgctgctgctggaaccgccatagcc

SEQ ID NO: 2317930 - DNA, 25 bp, Homo sapien
caaacttgatattggattgtagcct

SEQ ID NO: 2317931 - DNA, 25 bp, Homo sapien
taaattgctgatgaacccaataacc

SEQ ID NO: 2317932 - DNA, 25 bp, Homo sapien
taagtaagcacctttttgtgtgttg

SEQ ID NO: 2317933 - DNA, 25 bp, Homo sapien
gagcagtgcaacatagttaacatta

SEQ ID NO: 2317934 - DNA, 25 bp, Homo sapien
tgtagctgagcagtgcaacatagtt

SEQ ID NO: 2317935 - DNA, 25 bp, Homo sapien
cccaataaccctaatgtagctgagc

SEQ ID NO: 2317936 - DNA, 25 bp, Homo sapien
gctcagctacattagggttattggg

SEQ ID NO: 2317937 - DNA, 25 bp, Homo sapien
tagggttattgggttcatcagcaat

SEQ ID NO: 2317938 - DNA, 25 bp, Homo sapien
tataatgttaactatgttgcactgc

SEQ ID NO: 2317939 - DNA, 25 bp, Homo sapien
aggctacaatccaatatcaagtttg

SEQ ID NO: 2317940 - DNA, 25 bp, Homo sapien
aactatgttgcactgctcagctaca

SEQ ID NO: 2317941 - DNA, 25 bp, Homo sapien
caacacacaaaaaggtgcttactta

SEQ ID NO: 2317942 - DNA, 25 bp, Homo sapien
tgtggaaagtgtaaagcattccaac

SEQ ID NO: 2317943 - DNA, 25 bp, Homo sapien
tgcaccccatgctgttgattgctaa

SEQ ID NO: 2317944 - DNA, 25 bp, Homo sapien
ttgattgctaaatgtaacagtctga

SEQ ID NO: 2317945 - DNA, 25 bp, Homo sapien
gcaccccatgctgttgattgctaaa

SEQ ID NO: 2317946 - DNA, 25 bp, Homo sapien
agcattccaacaaagggttttaatg

SEQ ID NO: 2317947 - DNA, 25 bp, Homo sapien
atttttttttttgcaccccatgctg

SEQ ID NO: 2317948 - DNA, 25 bp, Homo sapien
tcagactgttacatttagcaatcaa

SEQ ID NO: 2317949 - DNA, 25 bp, Homo sapien
ttagcaatcaacagcatggggtgca

SEQ ID NO: 2317950 - DNA, 25 bp, Homo sapien
caatcaacagcatggggtgcaaaaa

SEQ ID NO: 2317951 - DNA, 25 bp, Homo sapien
cattaaaaccctttgttggaatgct

SEQ ID NO: 2317952 - DNA, 25 bp, Homo sapien
cagcatggggtgcaaaaaaaaaaat

SEQ ID NO: 2317953 - DNA, 25 bp, Homo sapien
ttggaatgctttacactttccacag

SEQ ID NO: 2317954 - DNA, 25 bp, Homo sapien
gttagtctactcttaagccatcttg

SEQ ID NO: 2317955 - DNA, 25 bp, Homo sapien
gcttgtgtatccattatcatgtgta

SEQ ID NO: 2317956 - DNA, 25 bp, Homo sapien
taagccatcttggtaaatttcccca

SEQ ID NO: 2317957 - DNA, 25 bp, Homo sapien
catggaatggttataaaagtgattg

SEQ ID NO: 2317958 - DNA, 25 bp, Homo sapien
tacccaagcaaaatcatggaatggt

SEQ ID NO: 2317959 - DNA, 25 bp, Homo sapien
tgtatccattatcatgtgtaatcaa

SEQ ID NO: 2317960 - DNA, 25 bp, Homo sapien
taaccattccatgattttgcttggg

SEQ ID NO: 2317961 - DNA, 25 bp, Homo sapien
tgattacacatgataatggatacac

SEQ ID NO: 2317962 - DNA, 25 bp, Homo sapien
aagagtagactaactttacacagca

SEQ ID NO: 2317963 - DNA, 25 bp, Homo sapien
tacacatgataatggatacacaagc

SEQ ID NO: 2317964 - DNA, 25 bp, Homo sapien
caagatggcttaagagtagactaac

SEQ ID NO: 2317965 - DNA, 25 bp, Homo sapien
caatcacttttataaccattccatg

SEQ ID NO: 2317966 - DNA, 25 bp, Homo sapien
gttcaaagctctgccagggaataga

SEQ ID NO: 2317967 - DNA, 25 bp, Homo sapien
aaactgcagtttgactgggttctgg

SEQ ID NO: 2317968 - DNA, 25 bp, Homo sapien
ggccttcagaggttctatcagttaa

SEQ ID NO: 2317969 - DNA, 25 bp, Homo sapien
taatgccgctccataaatccgcaga

SEQ ID NO: 2317970 - DNA, 25 bp, Homo sapien
gaaactagctgctggctaatgccgc

SEQ ID NO: 2317971 - DNA, 25 bp, Homo sapien
taaatccgcagatttgaagtgtctg

SEQ ID NO: 2317972 - DNA, 25 bp, Homo sapien
tctattccctggcagagctttgaac

SEQ ID NO: 2317973 - DNA, 25 bp, Homo sapien
tatggagcggcattagccagcagct

SEQ ID NO: 2317974 - DNA, 25 bp, Homo sapien
caaccagaacccagtcaaactgcag

SEQ ID NO: 2317975 - DNA, 25 bp, Homo sapien
tgtgtgaccccttgtgccataaagg

SEQ ID NO: 2317976 - DNA, 25 bp, Homo sapien
caaatctgcggatttatggagcggc

SEQ ID NO: 2317977 - DNA, 25 bp, Homo sapien
ttaactgatagaacctctgaaggcc

SEQ ID NO: 2317978 - DNA, 25 bp, Homo sapien
tagctttcatggagcgtgccgtggc

SEQ ID NO: 2317979 - DNA, 25 bp, Homo sapien
ggcattgtcacgaatcctgaggtat

SEQ ID NO: 2317980 - DNA, 25 bp, Homo sapien
gagccattcgcgctatacttgctag

SEQ ID NO: 2317981 - DNA, 25 bp, Homo sapien
gctagtcctaagagtcaggtgtgcc

SEQ ID NO: 2317982 - DNA, 25 bp, Homo sapien
gctgataagactagtagcagactcc

SEQ ID NO: 2317983 - DNA, 25 bp, Homo sapien
taagagctgataagactagtagcag

SEQ ID NO: 2317984 - DNA, 25 bp, Homo sapien
ttttaagagctgataagactagtag

SEQ ID NO: 2317985 - DNA, 25 bp, Homo sapien
gataagactagtagcagactcctcc

SEQ ID NO: 2317986 - DNA, 25 bp, Homo sapien
gcagaggtgaatgactacacagtta

SEQ ID NO: 2317987 - DNA, 25 bp, Homo sapien
tgcaattggatgagattacgaagtg

SEQ ID NO: 2317988 - DNA, 25 bp, Homo sapien
tcactactgggaatacctggttggc

SEQ ID NO: 2317989 - DNA, 25 bp, Homo sapien
cttttactttgggaacgcagggcat

SEQ ID NO: 2317990 - DNA, 25 bp, Homo sapien
aatggaatttgagctgcagaacagc

SEQ ID NO: 2317991 - DNA, 25 bp, Homo sapien
gcagtgataacgaagtacagtggct

SEQ ID NO: 2317992 - DNA, 25 bp, Homo sapien
gataaaggtcttcacaaggacgttc

SEQ ID NO: 2317993 - DNA, 25 bp, Homo sapien
tgtaaactgcatggcagtgataacg

SEQ ID NO: 2317994 - DNA, 25 bp, Homo sapien
cagactctggcccagtaggatgtcc

SEQ ID NO: 2317995 - DNA, 25 bp, Homo sapien
gactctggcccagtaggatgtcccc

SEQ ID NO: 2317996 - DNA, 25 bp, Homo sapien
gcccagtaggatgtccccgtgtcct

SEQ ID NO: 2317997 - DNA, 25 bp, Homo sapien
ctggcccagtaggatgtccccgtgt

SEQ ID NO: 2317998 - DNA, 25 bp, Homo sapien
gcagggtgacccctgatgttgccct

SEQ ID NO: 2317999 - DNA, 25 bp, Homo sapien
gtgacccctgatgttgccctagaaa

SEQ ID NO: 2318000 - DNA, 25 bp, Homo sapien
gggtgacccctgatgttgccctaga

SEQ ID NO: 2318001 - DNA, 25 bp, Homo sapien
gaaagcagggtgacccctgatgttg

SEQ ID NO: 2318002 - DNA, 25 bp, Homo sapien
tcttataaactaagcttgcaatacc

SEQ ID NO: 2318003 - DNA, 25 bp, Homo sapien
accgcgcccgatgaaaaccaatctt

SEQ ID NO: 2318004 - DNA, 25 bp, Homo sapien
gttcttaacaagtgcttactaagtc

SEQ ID NO: 2318005 - DNA, 25 bp, Homo sapien
ccaatcttataaactaagcttgcaa

SEQ ID NO: 2318006 - DNA, 25 bp, Homo sapien
gcttccctatactgatatggcacgg

SEQ ID NO: 2318007 - DNA, 25 bp, Homo sapien
tgtgtgcgtgcacatagacacaatg

SEQ ID NO: 2318008 - DNA, 25 bp, Homo sapien
tctgaccgtagagatcaggaagacc

SEQ ID NO: 2318009 - DNA, 25 bp, Homo sapien
gaagaccttgccaaatctacttgga

SEQ ID NO: 2318010 - DNA, 25 bp, Homo sapien
ggacacaaggcgacgacaacctgta

SEQ ID NO: 2318011 - DNA, 25 bp, Homo sapien
aaagtttaaaggtcacattcgagtg

SEQ ID NO: 2318012 - DNA, 25 bp, Homo sapien
aggttggaattcgtcaaatgcatgg

SEQ ID NO: 2318013 - DNA, 25 bp, Homo sapien
cattcgagtggaccatcaggttgga

SEQ ID NO: 2318014 - DNA, 25 bp, Homo sapien
ccgctgattggccatacgttcccat

SEQ ID NO: 2318015 - DNA, 25 bp, Homo sapien
ctggtgccgacgtggagccgcaaaa

SEQ ID NO: 2318016 - DNA, 25 bp, Homo sapien
gattggccatacgttcccattaggc

SEQ ID NO: 2318017 - DNA, 25 bp, Homo sapien
gagccgcaaaagaaacgccgccgct

SEQ ID NO: 2318018 - DNA, 25 bp, Homo sapien
tatataatagggattaacaggaaac

SEQ ID NO: 2318019 - DNA, 25 bp, Homo sapien
tgtggcagggaatcggcaatggaga

SEQ ID NO: 2318020 - DNA, 25 bp, Homo sapien
gaagacaaaacagtttcctgaagga

SEQ ID NO: 2318021 - DNA, 25 bp, Homo sapien
gaatgtggcagggaatcggcaatgg

SEQ ID NO: 2318022 - DNA, 25 bp, Homo sapien
ggctcccttctaaacatatataggt

SEQ ID NO: 2318023 - DNA, 25 bp, Homo sapien
cgcccgacagagatactttcacata

SEQ ID NO: 2318024 - DNA, 25 bp, Homo sapien
catatataggtaagtctaaaaactt

SEQ ID NO: 2318025 - DNA, 25 bp, Homo sapien
tacacacaggcccattgttaaaagg

SEQ ID NO: 2318026 - DNA, 25 bp, Homo sapien
tacctctactgttagggccaaagga

SEQ ID NO: 2318027 - DNA, 25 bp, Homo sapien
gaaatatatctccacagcgcaggaa

SEQ ID NO: 2318028 - DNA, 25 bp, Homo sapien
gctcgcgccctagctgagaaatata

SEQ ID NO: 2318029 - DNA, 25 bp, Homo sapien
caaaggccaaggagcaacatcaacc

SEQ ID NO: 2318030 - DNA, 25 bp, Homo sapien
tgtcctcaagacaggtgaaacacca

SEQ ID NO: 2318031 - DNA, 25 bp, Homo sapien
cctcaaatgctaatcgtgcttggaa

SEQ ID NO: 2318032 - DNA, 25 bp, Homo sapien
gaacaagcaactaggctgctgcaaa

SEQ ID NO: 2318033 - DNA, 25 bp, Homo sapien
cacagcctgagtgtataacagaact

SEQ ID NO: 2318034 - DNA, 25 bp, Homo sapien
caacaaggtgatgaggaacataagc

SEQ ID NO: 2318035 - DNA, 25 bp, Homo sapien
atcattgccaagaacccagaaactg

SEQ ID NO: 2318036 - DNA, 25 bp, Homo sapien
gaggcttcaggaggtttatggttcc

SEQ ID NO: 2318037 - DNA, 25 bp, Homo sapien
caaacataaattgcctcatgaggct

SEQ ID NO: 2318038 - DNA, 25 bp, Homo sapien
gatatttcccattgagaaagaccca

SEQ ID NO: 2318039 - DNA, 25 bp, Homo sapien
tatttcccattgagaaagacccagg

SEQ ID NO: 2318040 - DNA, 25 bp, Homo sapien
tttgatatttcccattgagaaagac

SEQ ID NO: 2318041 - DNA, 25 bp, Homo sapien
atttcccattgagaaagacccaggg

SEQ ID NO: 2318042 - DNA, 25 bp, Homo sapien
aagagatacgaacataccttcagtc

SEQ ID NO: 2318043 - DNA, 25 bp, Homo sapien
gcaaaaagtcgatctccatcattgt

SEQ ID NO: 2318044 - DNA, 25 bp, Homo sapien
tggcaaaaagtcgatctccatcatt

SEQ ID NO: 2318045 - DNA, 25 bp, Homo sapien
caaaaagtcgatctccatcattgtc

SEQ ID NO: 2318046 - DNA, 25 bp, Homo sapien
ggcaaaaagtcgatctccatcattg

SEQ ID NO: 2318047 - DNA, 25 bp, Homo sapien
gctcgcccggagttaatacaccagg

SEQ ID NO: 2318048 - DNA, 25 bp, Homo sapien
tccaattacagggaggaacagctgg

SEQ ID NO: 2318049 - DNA, 25 bp, Homo sapien
taatccgtcgcagtcagctgaagac

SEQ ID NO: 2318050 - DNA, 25 bp, Homo sapien
gattgatttatgctacgctcgcccg

SEQ ID NO: 2318051 - DNA, 25 bp, Homo sapien
cagtccgatgggtcttgttgaaaat

SEQ ID NO: 2318052 - DNA, 25 bp, Homo sapien
cttgacactggggtaggtgtcgtca

SEQ ID NO: 2318053 - DNA, 25 bp, Homo sapien
cactggggtaggtgtcgtcatagta

SEQ ID NO: 2318054 - DNA, 25 bp, Homo sapien
ctccttgacactggggtaggtgtcg

SEQ ID NO: 2318055 - DNA, 25 bp, Homo sapien
gcttttgtataccactgtcaggcct

SEQ ID NO: 2318056 - DNA, 25 bp, Homo sapien
tcacatagaaatagagatctatact

SEQ ID NO: 2318057 - DNA, 25 bp, Homo sapien
tcattttcataggagctgccaatca

SEQ ID NO: 2318058 - DNA, 25 bp, Homo sapien
gatctatactgcttttgtataccac

SEQ ID NO: 2318059 - DNA, 25 bp, Homo sapien
gaagagacagttcagaacagccata

SEQ ID NO: 2318060 - DNA, 25 bp, Homo sapien
gcatctggctcaatgagtcgaagag

SEQ ID NO: 2318061 - DNA, 25 bp, Homo sapien
gctcaatgagtcgaagagacagttc

SEQ ID NO: 2318062 - DNA, 25 bp, Homo sapien
gtcgaagagacagttcagaacagcc

SEQ ID NO: 2318063 - DNA, 25 bp, Homo sapien
ccagcagtgctcgcttttctacatt

SEQ ID NO: 2318064 - DNA, 25 bp, Homo sapien
cagcagtgctcgcttttctacattt

SEQ ID NO: 2318065 - DNA, 25 bp, Homo sapien
ccggtgtaccacctgctggggatca

SEQ ID NO: 2318066 - DNA, 25 bp, Homo sapien
atgccacccggtgtaccacctgctg

SEQ ID NO: 2318067 - DNA, 25 bp, Homo sapien
ctggggatcactctctaggatcacc

SEQ ID NO: 2318068 - DNA, 25 bp, Homo sapien
ttaatgccacccggtgtaccacctg

SEQ ID NO: 2318069 - DNA, 25 bp, Homo sapien
gaggttctggcaaataagtacttcc

SEQ ID NO: 2318070 - DNA, 25 bp, Homo sapien
ttctatggttaactcagaggcccct

SEQ ID NO: 2318071 - DNA, 25 bp, Homo sapien
tcctaatggagaggtaccatcctca

SEQ ID NO: 2318072 - DNA, 25 bp, Homo sapien
cgtataatttgttggtgggctctct

SEQ ID NO: 2318073 - DNA, 25 bp, Homo sapien
ggtggaggacctgattccctagtca

SEQ ID NO: 2318074 - DNA, 25 bp, Homo sapien
gaatatcagtatcactagggaaagg

SEQ ID NO: 2318075 - DNA, 25 bp, Homo sapien
gcctgatgggtaacgacagcatgtt

SEQ ID NO: 2318076 - DNA, 25 bp, Homo sapien
taatggatcccgcaaagcctgatgg

SEQ ID NO: 2318077 - DNA, 25 bp, Homo sapien
cggtctgctccgtaagggggacatc

SEQ ID NO: 2318078 - DNA, 25 bp, Homo sapien
ggtctgctccgtaagggggacatct

SEQ ID NO: 2318079 - DNA, 25 bp, Homo sapien
ttgaagggtacagagcaaggctgac

SEQ ID NO: 2318080 - DNA, 25 bp, Homo sapien
cattgaggaaagcttgctgacaggg

SEQ ID NO: 2318081 - DNA, 25 bp, Homo sapien
taaggccctagcagattgtttggaa

SEQ ID NO: 2318082 - DNA, 25 bp, Homo sapien
caatctatctgcagtcaaggtagca

SEQ ID NO: 2318083 - DNA, 25 bp, Homo sapien
accgaaggagtgaccacttgatctg

SEQ ID NO: 2318084 - DNA, 25 bp, Homo sapien
ccacttgatctgttctttggctgac

SEQ ID NO: 2318085 - DNA, 25 bp, Homo sapien
tcaccgaaggagtgaccacttgatc

SEQ ID NO: 2318086 - DNA, 25 bp, Homo sapien
acttgatctgttctttggctgactg

SEQ ID NO: 2318087 - DNA, 25 bp, Homo sapien
tacagcaaagggcacagaatttaca

SEQ ID NO: 2318088 - DNA, 25 bp, Homo sapien
gatgaccctgagagcatcgattggg

SEQ ID NO: 2318089 - DNA, 25 bp, Homo sapien
taatccagtctagaaagaaagaggg

SEQ ID NO: 2318090 - DNA, 25 bp, Homo sapien
aaggatccctgtgatccccgagatg

SEQ ID NO: 2318091 - DNA, 25 bp, Homo sapien
tatgccagatcagggtacagaatgc

SEQ ID NO: 2318092 - DNA, 25 bp, Homo sapien
tagaggcccaagtcataagttccac

SEQ ID NO: 2318093 - DNA, 25 bp, Homo sapien
gacccacggcagagagtaaatgcat

SEQ ID NO: 2318094 - DNA, 25 bp, Homo sapien
taactaagagatggacactcgccac

SEQ ID NO: 2318095 - DNA, 25 bp, Homo sapien
gcagtttatgaaggtggttttctcc

SEQ ID NO: 2318096 - DNA, 25 bp, Homo sapien
aaatgttttattcctctttgcacag

SEQ ID NO: 2318097 - DNA, 25 bp, Homo sapien
aaaatgttttattcctctttgcaca

SEQ ID NO: 2318098 - DNA, 25 bp, Homo sapien
aatgttttattcctctttgcacaga

SEQ ID NO: 2318099 - DNA, 25 bp, Homo sapien
gctcagcgccgtttcagagcaggag

SEQ ID NO: 2318100 - DNA, 25 bp, Homo sapien
ctgaccttctggagcagcgctggct

SEQ ID NO: 2318101 - DNA, 25 bp, Homo sapien
tggctccgataaataacccgctcag

SEQ ID NO: 2318102 - DNA, 25 bp, Homo sapien
cgcaggtgcgcgtctctgggttact

SEQ ID NO: 2318103 - DNA, 25 bp, Homo sapien
ttgtgcgaataaaggtggaggaggg

SEQ ID NO: 2318104 - DNA, 25 bp, Homo sapien
cagggccaggcgctgcgccagccca

SEQ ID NO: 2318105 - DNA, 25 bp, Homo sapien
cagccgtcttccaggacaatagggt

SEQ ID NO: 2318106 - DNA, 25 bp, Homo sapien
aggacaatagggtaaaggcaagaag

SEQ ID NO: 2318107 - DNA, 25 bp, Homo sapien
gtaactctagcagccgtcttccagg

SEQ ID NO: 2318108 - DNA, 25 bp, Homo sapien
tcactcggaggtaactctagcagcc

SEQ ID NO: 2318109 - DNA, 25 bp, Homo sapien
tggcaataagcggactctgggactc

SEQ ID NO: 2318110 - DNA, 25 bp, Homo sapien
caggattcgccgagtctgtagcctc

SEQ ID NO: 2318111 - DNA, 25 bp, Homo sapien
gcttgacaatgtagcaacccaggcc

SEQ ID NO: 2318112 - DNA, 25 bp, Homo sapien
gggaccaaggagatgccaccataga

SEQ ID NO: 2318113 - DNA, 25 bp, Homo sapien
actaactatgcatggtgccccagga

SEQ ID NO: 2318114 - DNA, 25 bp, Homo sapien
cacacaaggatagatgctggcccag

SEQ ID NO: 2318115 - DNA, 25 bp, Homo sapien
ggaggcccagttcaccctgatttag

SEQ ID NO: 2318116 - DNA, 25 bp, Homo sapien
gacattggcacctaatccaggcaga

SEQ ID NO: 2318117 - DNA, 25 bp, Homo sapien
taggaaatccattcacagttctttg

SEQ ID NO: 2318118 - DNA, 25 bp, Homo sapien
tcacagttctttgggccagacatgc

SEQ ID NO: 2318119 - DNA, 25 bp, Homo sapien
tgaaggacccttgtttacacatacc

SEQ ID NO: 2318120 - DNA, 25 bp, Homo sapien
ctgtgaaggacccttgtttacacat

SEQ ID NO: 2318121 - DNA, 25 bp, Homo sapien
tgtcactgcactccagcgtgggcta

SEQ ID NO: 2318122 - DNA, 25 bp, Homo sapien
attgcagtgagctgaaatcatgtca

SEQ ID NO: 2318123 - DNA, 25 bp, Homo sapien
atcatgtcactgcactccagcgtgg

SEQ ID NO: 2318124 - DNA, 25 bp, Homo sapien
catgtcactgcactccagcgtgggc

SEQ ID NO: 2318125 - DNA, 25 bp, Homo sapien
agaaaagtgtacctgccaacctgca

SEQ ID NO: 2318126 - DNA, 25 bp, Homo sapien
tgaagtcttaaaaccagtggatgct

SEQ ID NO: 2318127 - DNA, 25 bp, Homo sapien
atgccatgtggcctcaggcacctac

SEQ ID NO: 2318128 - DNA, 25 bp, Homo sapien
tctagctgtggtagtctgtgtctcc

SEQ ID NO: 2318129 - DNA, 25 bp, Homo sapien
gggcaaactggagcagaatcctcct

SEQ ID NO: 2318130 - DNA, 25 bp, Homo sapien
taggtcctctagcaagctgactgcg

SEQ ID NO: 2318131 - DNA, 25 bp, Homo sapien
agaatcctcctgatgaatgacccca

SEQ ID NO: 2318132 - DNA, 25 bp, Homo sapien
cctgggttttcaatactagcaagct

SEQ ID NO: 2318133 - DNA, 25 bp, Homo sapien
aagtgacccgttcctctctgtttca

SEQ ID NO: 2318134 - DNA, 25 bp, Homo sapien
accaaagtgacccgttcctctctgt

SEQ ID NO: 2318135 - DNA, 25 bp, Homo sapien
ctccaccaaagtgacccgttcctct

SEQ ID NO: 2318136 - DNA, 25 bp, Homo sapien
caaagtgacccgttcctctctgttt

SEQ ID NO: 2318137 - DNA, 25 bp, Homo sapien
aaggacagccaagtagggacgcaga

SEQ ID NO: 2318138 - DNA, 25 bp, Homo sapien
tgacatctcatttgcattcctcagc

SEQ ID NO: 2318139 - DNA, 25 bp, Homo sapien
ccttgacttgtagggcagtagctgg

SEQ ID NO: 2318140 - DNA, 25 bp, Homo sapien
cagggctacagactttgaatgggct

SEQ ID NO: 2318141 - DNA, 25 bp, Homo sapien
tgagtcatgtggcacggttcctctc

SEQ ID NO: 2318142 - DNA, 25 bp, Homo sapien
tggcccctgtgcagtcttaccctta

SEQ ID NO: 2318143 - DNA, 25 bp, Homo sapien
tcttcctgggatctcattacccttc

SEQ ID NO: 2318144 - DNA, 25 bp, Homo sapien
tgtgcagtcttacccttatccaacc

SEQ ID NO: 2318145 - DNA, 25 bp, Homo sapien
cactctgtactgcaagctggttcac

SEQ ID NO: 2318146 - DNA, 25 bp, Homo sapien
tgtagtcaagatgtcaactaggctt

SEQ ID NO: 2318147 - DNA, 25 bp, Homo sapien
gcgaagcagttctgccttgatgtct

SEQ ID NO: 2318148 - DNA, 25 bp, Homo sapien
gaattcaagagcagtttagcgaagc

SEQ ID NO: 2318149 - DNA, 25 bp, Homo sapien
ggtggccgttgcagcccttttacta

SEQ ID NO: 2318150 - DNA, 25 bp, Homo sapien
tattctcaacttcgtagtccctact

SEQ ID NO: 2318151 - DNA, 25 bp, Homo sapien
gtggccgttgcagcccttttactat

SEQ ID NO: 2318152 - DNA, 25 bp, Homo sapien
caacttcgtagtccctactttccat

SEQ ID NO: 2318153 - DNA, 25 bp, Homo sapien
tgagcctgtcatacagctgaacagt

SEQ ID NO: 2318154 - DNA, 25 bp, Homo sapien
atgagcctgtcatacagctgaacag

SEQ ID NO: 2318155 - DNA, 25 bp, Homo sapien
gatgagcctgtcatacagctgaaca

SEQ ID NO: 2318156 - DNA, 25 bp, Homo sapien
tgatgagcctgtcatacagctgaac

SEQ ID NO: 2318157 - DNA, 25 bp, Homo sapien
ctctcattacgggctgtgctgcctg

SEQ ID NO: 2318158 - DNA, 25 bp, Homo sapien
tggctaccaacctgtttcgctgcat

SEQ ID NO: 2318159 - DNA, 25 bp, Homo sapien
cagctattttggctaccaacctgtt

SEQ ID NO: 2318160 - DNA, 25 bp, Homo sapien
tcaccttctaatatcctcatttcgc

SEQ ID NO: 2318161 - DNA, 25 bp, Homo sapien
tgtgggctctcaatgcagctatttt

SEQ ID NO: 2318162 - DNA, 25 bp, Homo sapien
tgatggctgtggagcaaactctctt

SEQ ID NO: 2318163 - DNA, 25 bp, Homo sapien
gaactgatggctgtggagcaaactc

SEQ ID NO: 2318164 - DNA, 25 bp, Homo sapien
taatctgaactgatggctgtggagc

SEQ ID NO: 2318165 - DNA, 25 bp, Homo sapien
ctgaactgatggctgtggagcaaac

SEQ ID NO: 2318166 - DNA, 25 bp, Homo sapien
caatgtctgatctccccaaacactt

SEQ ID NO: 2318167 - DNA, 25 bp, Homo sapien
aatgtctgatctccccaaacacttt

SEQ ID NO: 2318168 - DNA, 25 bp, Homo sapien
tgtctgatctccccaaacactttca

SEQ ID NO: 2318169 - DNA, 25 bp, Homo sapien
gcaatgtctgatctccccaaacact

SEQ ID NO: 2318170 - DNA, 25 bp, Homo sapien
atgttatacatacggatgagaaccc

SEQ ID NO: 2318171 - DNA, 25 bp, Homo sapien
tctctgctaatttatgctggtaagc

SEQ ID NO: 2318172 - DNA, 25 bp, Homo sapien
cccctgaccgcgatcattcaggata

SEQ ID NO: 2318173 - DNA, 25 bp, Homo sapien
tcaggatagtgagcttctctgctaa

SEQ ID NO: 2318174 - DNA, 25 bp, Homo sapien
gatggttccatggacttttccagta

SEQ ID NO: 2318175 - DNA, 25 bp, Homo sapien
cgtgctgtttcggacatctatgttg

SEQ ID NO: 2318176 - DNA, 25 bp, Homo sapien
tgtttcggacatctatgttgggaaa

SEQ ID NO: 2318177 - DNA, 25 bp, Homo sapien
gagatggttccatggacttttccag

SEQ ID NO: 2318178 - DNA, 25 bp, Homo sapien
ggaatctaattatctcggctttttc

SEQ ID NO: 2318179 - DNA, 25 bp, Homo sapien
gctttttcacgatgtactggtccta

SEQ ID NO: 2318180 - DNA, 25 bp, Homo sapien
tcacgatgtactggtcctaaatgtt

SEQ ID NO: 2318181 - DNA, 25 bp, Homo sapien
tagtagttggtgaggaatctaatta

SEQ ID NO: 2318182 - DNA, 25 bp, Homo sapien
gaatagcctctgaaagaccttgcct

SEQ ID NO: 2318183 - DNA, 25 bp, Homo sapien
ttggaaacggctcaagagagctcac

SEQ ID NO: 2318184 - DNA, 25 bp, Homo sapien
gatatccttccatattagtacatct

SEQ ID NO: 2318185 - DNA, 25 bp, Homo sapien
taaaatagtccagatctttcctaga

SEQ ID NO: 2318186 - DNA, 25 bp, Homo sapien
aaaataggccggcacagtccagcct

SEQ ID NO: 2318187 - DNA, 25 bp, Homo sapien
ttatagcccttatgcaccgttggtg

SEQ ID NO: 2318188 - DNA, 25 bp, Homo sapien
agataatacctcacacccactggga

SEQ ID NO: 2318189 - DNA, 25 bp, Homo sapien
gttaaaaataggccggcacagtcca

SEQ ID NO: 2318190 - DNA, 25 bp, Homo sapien
tgaatactctctgacctgaccctcg

SEQ ID NO: 2318191 - DNA, 25 bp, Homo sapien
tgtgatctactgaatatcctggatt

SEQ ID NO: 2318192 - DNA, 25 bp, Homo sapien
tcttgctaaccactactctcaattc

SEQ ID NO: 2318193 - DNA, 25 bp, Homo sapien
tcatacattacagtccttcttgtcc

SEQ ID NO: 2318194 - DNA, 25 bp, Homo sapien
caggcatcaatggtgttgagaagtt

SEQ ID NO: 2318195 - DNA, 25 bp, Homo sapien
ggcatcaatggtgttgagaagttca

SEQ ID NO: 2318196 - DNA, 25 bp, Homo sapien
gcatcaatggtgttgagaagttcat

SEQ ID NO: 2318197 - DNA, 25 bp, Homo sapien
atcaatggtgttgagaagttcatat

SEQ ID NO: 2318198 - DNA, 25 bp, Homo sapien
tgtacatgccaatgagtatccgccg

SEQ ID NO: 2318199 - DNA, 25 bp, Homo sapien
ttcaatccgtgacagaagtaaaatg

SEQ ID NO: 2318200 - DNA, 25 bp, Homo sapien
tctcatgggcacaattgtacatgcc

SEQ ID NO: 2318201 - DNA, 25 bp, Homo sapien
caagtccaggtaactccgagtgaaa

SEQ ID NO: 2318202 - DNA, 25 bp, Homo sapien
catctgacccagacgggcaaaactg

SEQ ID NO: 2318203 - DNA, 25 bp, Homo sapien
atctgacccagacgggcaaaactgg

SEQ ID NO: 2318204 - DNA, 25 bp, Homo sapien
tctgacccagacgggcaaaactggg

SEQ ID NO: 2318205 - DNA, 25 bp, Homo sapien
ctgacccagacgggcaaaactgggg

SEQ ID NO: 2318206 - DNA, 25 bp, Homo sapien
tcagagggtggtcatactccaagac

SEQ ID NO: 2318207 - DNA, 25 bp, Homo sapien
ctttgtgtgaggcccaaactcttct

SEQ ID NO: 2318208 - DNA, 25 bp, Homo sapien
ttgtgtgaggcccaaactcttctgt

SEQ ID NO: 2318209 - DNA, 25 bp, Homo sapien
ttcttcagagggtggtcatactcca

SEQ ID NO: 2318210 - DNA, 25 bp, Homo sapien
ttttgcctgaggaattctccattgt

SEQ ID NO: 2318211 - DNA, 25 bp, Homo sapien
tttgcctgaggaattctccattgtc

SEQ ID NO: 2318212 - DNA, 25 bp, Homo sapien
tgcctgaggaattctccattgtcag

SEQ ID NO: 2318213 - DNA, 25 bp, Homo sapien
ctgaggaattctccattgtcaggga

SEQ ID NO: 2318214 - DNA, 25 bp, Homo sapien
cttcggacaaagaggaaatgcaaag

SEQ ID NO: 2318215 - DNA, 25 bp, Homo sapien
atgcaaagagaggagggctccactc

SEQ ID NO: 2318216 - DNA, 25 bp, Homo sapien
aagagaggagggctccactcacagc

SEQ ID NO: 2318217 - DNA, 25 bp, Homo sapien
tcggacaaagaggaaatgcaaagag

SEQ ID NO: 2318218 - DNA, 25 bp, Homo sapien
aagttgggcactgcgccactgctca

SEQ ID NO: 2318219 - DNA, 25 bp, Homo sapien
attagcagggttaatcatggctggg

SEQ ID NO: 2318220 - DNA, 25 bp, Homo sapien
tgtatctgaattagcagggttaatc

SEQ ID NO: 2318221 - DNA, 25 bp, Homo sapien
gaagttgggcactgcgccactgctc

SEQ ID NO: 2318222 - DNA, 25 bp, Homo sapien
cttccacagacagatactcacaggc

SEQ ID NO: 2318223 - DNA, 25 bp, Homo sapien
ataatccagcgctccattacttcca

SEQ ID NO: 2318224 - DNA, 25 bp, Homo sapien
tgataatccagcgctccattacttc

SEQ ID NO: 2318225 - DNA, 25 bp, Homo sapien
tccacagacagatactcacaggcca

SEQ ID NO: 2318226 - DNA, 25 bp, Homo sapien
gaggcacccatgacaaagaagaaac

SEQ ID NO: 2318227 - DNA, 25 bp, Homo sapien
tgcagcacatcctcacggataaggg

SEQ ID NO: 2318228 - DNA, 25 bp, Homo sapien
aactgctaaacaggtcctcggtgac

SEQ ID NO: 2318229 - DNA, 25 bp, Homo sapien
cagcttctggcactggctattggag

SEQ ID NO: 2318230 - DNA, 25 bp, Homo sapien
taatggcatgggaaatttgagcaac

SEQ ID NO: 2318231 - DNA, 25 bp, Homo sapien
tcaaggaagatcagtttggctctcg

SEQ ID NO: 2318232 - DNA, 25 bp, Homo sapien
caactagtggtagagcctgaattca

SEQ ID NO: 2318233 - DNA, 25 bp, Homo sapien
taatcgttaccacctatatctggga

SEQ ID NO: 2318234 - DNA, 25 bp, Homo sapien
catcaatagaggattttgtaaataa

SEQ ID NO: 2318235 - DNA, 25 bp, Homo sapien
aaaataataagtctctatagactga

SEQ ID NO: 2318236 - DNA, 25 bp, Homo sapien
taaactatgttacaaccacataatg

SEQ ID NO: 2318237 - DNA, 25 bp, Homo sapien
tcacaaagatatatgcctaagaatg

SEQ ID NO: 2318238 - DNA, 25 bp, Homo sapien
tgagtgacactgagactgagcctcc

SEQ ID NO: 2318239 - DNA, 25 bp, Homo sapien
tcttagtgatggagaactgaacacc

SEQ ID NO: 2318240 - DNA, 25 bp, Homo sapien
cactattgccaccacattattggga

SEQ ID NO: 2318241 - DNA, 25 bp, Homo sapien
cacacaagttagttgctgctcttag

SEQ ID NO: 2318242 - DNA, 25 bp, Homo sapien
ctgaggattgacacaagcacaatgg

SEQ ID NO: 2318243 - DNA, 25 bp, Homo sapien
gtttgcaattacatgttccttgctc

SEQ ID NO: 2318244 - DNA, 25 bp, Homo sapien
tttgcaattacatgttccttgctct

SEQ ID NO: 2318245 - DNA, 25 bp, Homo sapien
tctcctttatgtctgccactctctt

SEQ ID NO: 2318246 - DNA, 25 bp, Homo sapien
ctcctttatgtctgccactctcttg

SEQ ID NO: 2318247 - DNA, 25 bp, Homo sapien
gaaattgccgccgttgacaatgaaa

SEQ ID NO: 2318248 - DNA, 25 bp, Homo sapien
tccgcagaaattgccgccgttgaca

SEQ ID NO: 2318249 - DNA, 25 bp, Homo sapien
ccgccgttgacaatgaaactggcca

SEQ ID NO: 2318250 - DNA, 25 bp, Homo sapien
gccatccgcagaaattgccgccgtt

SEQ ID NO: 2318251 - DNA, 25 bp, Homo sapien
gctacacagtctcttatcactggcc

SEQ ID NO: 2318252 - DNA, 25 bp, Homo sapien
tagctacacagtctcttatcactgg

SEQ ID NO: 2318253 - DNA, 25 bp, Homo sapien
gtagctacacagtctcttatcactg

SEQ ID NO: 2318254 - DNA, 25 bp, Homo sapien
ctacacagtctcttatcactggcca

SEQ ID NO: 2318255 - DNA, 25 bp, Homo sapien
aggtgacctcatcacgaatgaagga

SEQ ID NO: 2318256 - DNA, 25 bp, Homo sapien
catcacgaatgaaggacagggccat

SEQ ID NO: 2318257 - DNA, 25 bp, Homo sapien
cattctctgtgtggcgaaccagcca

SEQ ID NO: 2318258 - DNA, 25 bp, Homo sapien
ctgtgtggcgaaccagccaggtgac

SEQ ID NO: 2318259 - DNA, 25 bp, Homo sapien
tataaagtttaggatgagaacagag

SEQ ID NO: 2318260 - DNA, 25 bp, Homo sapien
gtttaggatgagaacagagatgaat

SEQ ID NO: 2318261 - DNA, 25 bp, Homo sapien
taggatgagaacagagatgaataag

SEQ ID NO: 2318262 - DNA, 25 bp, Homo sapien
ctataaagtttaggatgagaacaga

SEQ ID NO: 2318263 - DNA, 25 bp, Homo sapien
gtcactgagcacaagagcatcaaat

SEQ ID NO: 2318264 - DNA, 25 bp, Homo sapien
aatcttgccaagtactgaaggtggt

SEQ ID NO: 2318265 - DNA, 25 bp, Homo sapien
tatcactttgatgtgtcttcggacc

SEQ ID NO: 2318266 - DNA, 25 bp, Homo sapien
cctccaacaagaaaagtagctctgc

SEQ ID NO: 2318267 - DNA, 25 bp, Homo sapien
gagaggatactgacgaatgaggaca

SEQ ID NO: 2318268 - DNA, 25 bp, Homo sapien
ggatactgacgaatgaggacatgat

SEQ ID NO: 2318269 - DNA, 25 bp, Homo sapien
gaggagaggatactgacgaatgagg

SEQ ID NO: 2318270 - DNA, 25 bp, Homo sapien
gaggatactgacgaatgaggacatg

SEQ ID NO: 2318271 - DNA, 25 bp, Homo sapien
cacaccaatatccaactacatagaa

SEQ ID NO: 2318272 - DNA, 25 bp, Homo sapien
acatagaatggtagatcctcttcaa

SEQ ID NO: 2318273 - DNA, 25 bp, Homo sapien
ccaatatccaactacatagaatggt

SEQ ID NO: 2318274 - DNA, 25 bp, Homo sapien
tccaactacatagaatggtagatcc

SEQ ID NO: 2318275 - DNA, 25 bp, Homo sapien
gcctcaatcctgagaattcaaattt

SEQ ID NO: 2318276 - DNA, 25 bp, Homo sapien
ctgtaggcggaaccagtccagcctc

SEQ ID NO: 2318277 - DNA, 25 bp, Homo sapien
ggaaccagtccagcctcaatcctga

SEQ ID NO: 2318278 - DNA, 25 bp, Homo sapien
gtccagcctcaatcctgagaattca

SEQ ID NO: 2318279 - DNA, 25 bp, Homo sapien
aagtcagggttctcatgcaggtgca

SEQ ID NO: 2318280 - DNA, 25 bp, Homo sapien
caccttggctaagtcagggttctca

SEQ ID NO: 2318281 - DNA, 25 bp, Homo sapien
tgcagaggggccttagccacgctag

SEQ ID NO: 2318282 - DNA, 25 bp, Homo sapien
gggccttagccacgctagtgtatgc

SEQ ID NO: 2318283 - DNA, 25 bp, Homo sapien
ccagcaatttttctacggagtccag

SEQ ID NO: 2318284 - DNA, 25 bp, Homo sapien
tctacggagtccagcattcgggagt

SEQ ID NO: 2318285 - DNA, 25 bp, Homo sapien
tttttctacggagtccagcattcgg

SEQ ID NO: 2318286 - DNA, 25 bp, Homo sapien
gcaatttttctacggagtccagcat

SEQ ID NO: 2318287 - DNA, 25 bp, Homo sapien
acatggcagattcctccaaggtcat

SEQ ID NO: 2318288 - DNA, 25 bp, Homo sapien
tctgggcacatctcatgagtgcagt

SEQ ID NO: 2318289 - DNA, 25 bp, Homo sapien
aaagcaatggcataacgcaacatgg

SEQ ID NO: 2318290 - DNA, 25 bp, Homo sapien
tcttctcaaagatacgaagatgaaa

SEQ ID NO: 2318291 - DNA, 25 bp, Homo sapien
taaggatgatgactagaaagatgac

SEQ ID NO: 2318292 - DNA, 25 bp, Homo sapien
catcaagctgagatatttagggact

SEQ ID NO: 2318293 - DNA, 25 bp, Homo sapien
gggaccaaagaagagactgtcatca

SEQ ID NO: 2318294 - DNA, 25 bp, Homo sapien
tataccctttctgggaccaaaatca

SEQ ID NO: 2318295 - DNA, 25 bp, Homo sapien
tcagcacagatctccaggacgcaat

SEQ ID NO: 2318296 - DNA, 25 bp, Homo sapien
tggtgaagaccatggttcttgaggt

SEQ ID NO: 2318297 - DNA, 25 bp, Homo sapien
ggaaggagttgcagtggtgaagacc

SEQ ID NO: 2318298 - DNA, 25 bp, Homo sapien
tgctcgctcaggtttcgctgctcag

SEQ ID NO: 2318299 - DNA, 25 bp, Homo sapien
gactccagggcaacagcaaaacaag

SEQ ID NO: 2318300 - DNA, 25 bp, Homo sapien
acgaggtgctaagagtcagtcaagg

SEQ ID NO: 2318301 - DNA, 25 bp, Homo sapien
ggtaagtaccaactaatatagcagg

SEQ ID NO: 2318302 - DNA, 25 bp, Homo sapien
gttgaactaattatgacgaggtgct

SEQ ID NO: 2318303 - DNA, 25 bp, Homo sapien
gaaaaagatgtgtcaaccctgagat

SEQ ID NO: 2318304 - DNA, 25 bp, Homo sapien
tctgagagcagcataagacccacac

SEQ ID NO: 2318305 - DNA, 25 bp, Homo sapien
tgagacgacagcacagagcaaatct

SEQ ID NO: 2318306 - DNA, 25 bp, Homo sapien
catgttttagtcatccctgagacga

SEQ ID NO: 2318307 - DNA, 25 bp, Homo sapien
ggtgactggaattctctccatttac

SEQ ID NO: 2318308 - DNA, 25 bp, Homo sapien
cagacatcctagtcagacatctcct

SEQ ID NO: 2318309 - DNA, 25 bp, Homo sapien
agggtgactggaattctctccattt

SEQ ID NO: 2318310 - DNA, 25 bp, Homo sapien
gacatcctagtcagacatctccttc

SEQ ID NO: 2318311 - DNA, 25 bp, Homo sapien
tggctttgctgattgtagtggcaca

SEQ ID NO: 2318312 - DNA, 25 bp, Homo sapien
tggtgacaatgctgcggttcttccg

SEQ ID NO: 2318313 - DNA, 25 bp, Homo sapien
tagtggcacagtgcttaggtagaag

SEQ ID NO: 2318314 - DNA, 25 bp, Homo sapien
ggttcttccggtgactctcagctcc

SEQ ID NO: 2318315 - DNA, 25 bp, Homo sapien
gaaactgtatacatgattcattgtc

SEQ ID NO: 2318316 - DNA, 25 bp, Homo sapien
caagtttaggtgtagcttgtccatg

SEQ ID NO: 2318317 - DNA, 25 bp, Homo sapien
actcagaagggaagatagtatgttc

SEQ ID NO: 2318318 - DNA, 25 bp, Homo sapien
gaagatagtatgttcaaacacggag

SEQ ID NO: 2318319 - DNA, 25 bp, Homo sapien
tcaaataagttggacgatctgctcc

SEQ ID NO: 2318320 - DNA, 25 bp, Homo sapien
taatgaccaggttgtcaacacaggt

SEQ ID NO: 2318321 - DNA, 25 bp, Homo sapien
cattcacccacttgcagactgtagt

SEQ ID NO: 2318322 - DNA, 25 bp, Homo sapien
cactagaagtaagcatggaggcaga

SEQ ID NO: 2318323 - DNA, 25 bp, Homo sapien
caatgtatgctttgactcctgccaa

SEQ ID NO: 2318324 - DNA, 25 bp, Homo sapien
cagaaggccgtacgatctcctgggt

SEQ ID NO: 2318325 - DNA, 25 bp, Homo sapien
tagagtgtggtgattgtctgttccc

SEQ ID NO: 2318326 - DNA, 25 bp, Homo sapien
ggccagtgactgtatgaaaccaatg

SEQ ID NO: 2318327 - DNA, 25 bp, Homo sapien
ctccattttggagtctatgaccctg

SEQ ID NO: 2318328 - DNA, 25 bp, Homo sapien
aaaagtgccaacacaaagtaaggca

SEQ ID NO: 2318329 - DNA, 25 bp, Homo sapien
gtctatgaccctgggagctaaaatg

SEQ ID NO: 2318330 - DNA, 25 bp, Homo sapien
agctaaaatgctcgggccctgaggt

SEQ ID NO: 2318331 - DNA, 25 bp, Homo sapien
ctgtctaagcagactttccaggtac

SEQ ID NO: 2318332 - DNA, 25 bp, Homo sapien
actgcttgcctgtctaagcagactt

SEQ ID NO: 2318333 - DNA, 25 bp, Homo sapien
ttgcctgtctaagcagactttccag

SEQ ID NO: 2318334 - DNA, 25 bp, Homo sapien
gcttgcctgtctaagcagactttcc

SEQ ID NO: 2318335 - DNA, 25 bp, Homo sapien
tggaacagagttacagaggccccag

SEQ ID NO: 2318336 - DNA, 25 bp, Homo sapien
aggcactggagtatttgtacaacag

SEQ ID NO: 2318337 - DNA, 25 bp, Homo sapien
gaacagagttacagaggccccagat

SEQ ID NO: 2318338 - DNA, 25 bp, Homo sapien
aggagttctgccaaggcccgcatct

SEQ ID NO: 2318339 - DNA, 25 bp, Homo sapien
cacatcaggttttcactcaggaact

SEQ ID NO: 2318340 - DNA, 25 bp, Homo sapien
aacttcatgccataggggcccagga

SEQ ID NO: 2318341 - DNA, 25 bp, Homo sapien
caggagttctgccaaggcccgcatc

SEQ ID NO: 2318342 - DNA, 25 bp, Homo sapien
taaagttggatctgatctgaacaag

SEQ ID NO: 2318343 - DNA, 25 bp, Homo sapien
gaagccatcaagtccggcttgctaa

SEQ ID NO: 2318344 - DNA, 25 bp, Homo sapien
tcaagtccggcttgctaaagttgga

SEQ ID NO: 2318345 - DNA, 25 bp, Homo sapien
gcttgctaaagttggatctgatctg

SEQ ID NO: 2318346 - DNA, 25 bp, Homo sapien
gataaccccaatgatggtcatgcgc

SEQ ID NO: 2318347 - DNA, 25 bp, Homo sapien
caatgatggtcatgcgctttagcac

SEQ ID NO: 2318348 - DNA, 25 bp, Homo sapien
catgcgctttagcacattttcagcc

SEQ ID NO: 2318349 - DNA, 25 bp, Homo sapien
tgaaactgaggataaccccaatgat

SEQ ID NO: 2318350 - DNA, 25 bp, Homo sapien
tccttcaagcactcaatgggaccca

SEQ ID NO: 2318351 - DNA, 25 bp, Homo sapien
agcactcaatgggacccataagaaa

SEQ ID NO: 2318352 - DNA, 25 bp, Homo sapien
cttcaagcactcaatgggacccata

SEQ ID NO: 2318353 - DNA, 25 bp, Homo sapien
tcaagcactcaatgggacccataag

SEQ ID NO: 2318354 - DNA, 25 bp, Homo sapien
aggctgggtcaatgtcacagcccac

SEQ ID NO: 2318355 - DNA, 25 bp, Homo sapien
agatgccagctcaaagatactcaag

SEQ ID NO: 2318356 - DNA, 25 bp, Homo sapien
agccaccaaggctgggtcaatgtca

SEQ ID NO: 2318357 - DNA, 25 bp, Homo sapien
gatgccagctcaaagatactcaagg

SEQ ID NO: 2318358 - DNA, 25 bp, Homo sapien
agcaggcaggccaccttatattcct

SEQ ID NO: 2318359 - DNA, 25 bp, Homo sapien
gaaactgccagaaagatcaagagca

SEQ ID NO: 2318360 - DNA, 25 bp, Homo sapien
gcaggcaggccaccttatattcctc

SEQ ID NO: 2318361 - DNA, 25 bp, Homo sapien
cactggtgtctcaaacctacccctt

SEQ ID NO: 2318362 - DNA, 25 bp, Homo sapien
aagtctatattttccagtatctctg

SEQ ID NO: 2318363 - DNA, 25 bp, Homo sapien
ggacactaacttgaatagcactggt

SEQ ID NO: 2318364 - DNA, 25 bp, Homo sapien
aacagaactttacacccaagtcaga

SEQ ID NO: 2318365 - DNA, 25 bp, Homo sapien
ttgtagagcgtgaagagggcagcag

SEQ ID NO: 2318366 - DNA, 25 bp, Homo sapien
tccttgaggtgagtttcaatgttct

SEQ ID NO: 2318367 - DNA, 25 bp, Homo sapien
tcttgttgtagagcgtgaagagggc

SEQ ID NO: 2318368 - DNA, 25 bp, Homo sapien
gctttggtcaagcaatgaatattgt

SEQ ID NO: 2318369 - DNA, 25 bp, Homo sapien
cgatttctggttttaagcttgtcag

SEQ ID NO: 2318370 - DNA, 25 bp, Homo sapien
aatggattctcgatttctggtttta

SEQ ID NO: 2318371 - DNA, 25 bp, Homo sapien
tctggttttaagcttgtcagtctcc

SEQ ID NO: 2318372 - DNA, 25 bp, Homo sapien
ttctcgatttctggttttaagcttg

SEQ ID NO: 2318373 - DNA, 25 bp, Homo sapien
ctcccgataggcatttcgaagcagg

SEQ ID NO: 2318374 - DNA, 25 bp, Homo sapien
tcagtttaggtggaaggcccgagac

SEQ ID NO: 2318375 - DNA, 25 bp, Homo sapien
cagtttaggtggaaggcccgagaca

SEQ ID NO: 2318376 - DNA, 25 bp, Homo sapien
tatggcaagggtttaggaaggtcca

SEQ ID NO: 2318377 - DNA, 25 bp, Homo sapien
gcctcactgctctacgatttctcag

SEQ ID NO: 2318378 - DNA, 25 bp, Homo sapien
tcagccctggattgttcttccacag

SEQ ID NO: 2318379 - DNA, 25 bp, Homo sapien
aagggctcttcagtgggtactggca

SEQ ID NO: 2318380 - DNA, 25 bp, Homo sapien
gatgattgatcatctctgcccgcca

SEQ ID NO: 2318381 - DNA, 25 bp, Homo sapien
atgaaggtcggagaggcccatgcct

SEQ ID NO: 2318382 - DNA, 25 bp, Homo sapien
tgcccgccagcattatcctaagaat

SEQ ID NO: 2318383 - DNA, 25 bp, Homo sapien
agctcaagctcaagtcaccagaaga

SEQ ID NO: 2318384 - DNA, 25 bp, Homo sapien
aatgtgcaggagacaatagcagctc

SEQ ID NO: 2318385 - DNA, 25 bp, Homo sapien
gataatggtcctaatgaatgtgcag

SEQ ID NO: 2318386 - DNA, 25 bp, Homo sapien
ctcgaagagccccacaaaggaaaag

SEQ ID NO: 2318387 - DNA, 25 bp, Homo sapien
agagacccaatgacccctcgaagag

SEQ ID NO: 2318388 - DNA, 25 bp, Homo sapien
taggtgggcagtgaacatctctgaa

SEQ ID NO: 2318389 - DNA, 25 bp, Homo sapien
caagagagaacttgtaacaaacaat

SEQ ID NO: 2318390 - DNA, 25 bp, Homo sapien
ctgctctgggttgtggagatatcaa

SEQ ID NO: 2318391 - DNA, 25 bp, Homo sapien
aacaatgtagtagagtaggtgggca

SEQ ID NO: 2318392 - DNA, 25 bp, Homo sapien
gccaatcagttgtcatgtaacctag

SEQ ID NO: 2318393 - DNA, 25 bp, Homo sapien
tagtccctcccaataaaaggcagag

SEQ ID NO: 2318394 - DNA, 25 bp, Homo sapien
gcagagtacccccaaatggtacagg

SEQ ID NO: 2318395 - DNA, 25 bp, Homo sapien
ctagaattgacggagactaactgac

SEQ ID NO: 2318396 - DNA, 25 bp, Homo sapien
ttttgctgaaaaccgacaactgctt

SEQ ID NO: 2318397 - DNA, 25 bp, Homo sapien
taagttgaaacagcttgtactccct

SEQ ID NO: 2318398 - DNA, 25 bp, Homo sapien
ttctaattagcgcagaaaagggcta

SEQ ID NO: 2318399 - DNA, 25 bp, Homo sapien
ccccaggctctgtgacgcttgaaat

SEQ ID NO: 2318400 - DNA, 25 bp, Homo sapien
ctaagcctgggtctcaagaaataaa

SEQ ID NO: 2318401 - DNA, 25 bp, Homo sapien
aatctgtatgttgattatgggtgcc

SEQ ID NO: 2318402 - DNA, 25 bp, Homo sapien
tattgactaagcctgggtctcaaga

SEQ ID NO: 2318403 - DNA, 25 bp, Homo sapien
ttgattatgggtgccaagttaagaa

SEQ ID NO: 2318404 - DNA, 25 bp, Homo sapien
gatgttagcattcagggaaactgtg

SEQ ID NO: 2318405 - DNA, 25 bp, Homo sapien
caagtgcaggtggattaagtatctc

SEQ ID NO: 2318406 - DNA, 25 bp, Homo sapien
taagcagttctatatgcagatgcag

SEQ ID NO: 2318407 - DNA, 25 bp, Homo sapien
cagttatcctggttgtggcagtgta

SEQ ID NO: 2318408 - DNA, 25 bp, Homo sapien
ccaggttgtaagaggacagagaccc

SEQ ID NO: 2318409 - DNA, 25 bp, Homo sapien
taaagcaaacttacaacctgggaca

SEQ ID NO: 2318410 - DNA, 25 bp, Homo sapien
tgacctgaaataggaaagccttccc

SEQ ID NO: 2318411 - DNA, 25 bp, Homo sapien
tcctggtaaaggaagcaaattgcct

SEQ ID NO: 2318412 - DNA, 25 bp, Homo sapien
taagtgataaaaccagagccaagtc

SEQ ID NO: 2318413 - DNA, 25 bp, Homo sapien
gcaaagtgctacagggcatcatccc

SEQ ID NO: 2318414 - DNA, 25 bp, Homo sapien
gatgtgatctgcctcctacgggaat

SEQ ID NO: 2318415 - DNA, 25 bp, Homo sapien
tgagtgcatttcagccatgtgccag

SEQ ID NO: 2318416 - DNA, 25 bp, Homo sapien
gcagaagtatcagcagaaccagctc

SEQ ID NO: 2318417 - DNA, 25 bp, Homo sapien
gaggcaagacatacatccagagggc

SEQ ID NO: 2318418 - DNA, 25 bp, Homo sapien
ggctgcatctgagaccctagtcaca

SEQ ID NO: 2318419 - DNA, 25 bp, Homo sapien
gaagaagcggatgaactgtcacagc

SEQ ID NO: 2318420 - DNA, 25 bp, Homo sapien
tgtctccaagactgtggccttctcc

SEQ ID NO: 2318421 - DNA, 25 bp, Homo sapien
ctgtctccaagactgtggccttctc

SEQ ID NO: 2318422 - DNA, 25 bp, Homo sapien
gtctccaagactgtggccttctcca

SEQ ID NO: 2318423 - DNA, 25 bp, Homo sapien
tctccaagactgtggccttctccat

SEQ ID NO: 2318424 - DNA, 25 bp, Homo sapien
ctgcccagccgagctttgggctccc

SEQ ID NO: 2318425 - DNA, 25 bp, Homo sapien
tgggctcccagtccaagctctccgc

SEQ ID NO: 2318426 - DNA, 25 bp, Homo sapien
gcccagccgagctttgggctcccag

SEQ ID NO: 2318427 - DNA, 25 bp, Homo sapien
caagctctccgcaccgccgctgctg

SEQ ID NO: 2318428 - DNA, 25 bp, Homo sapien
gctcggcccaagctggcagagctgc

SEQ ID NO: 2318429 - DNA, 25 bp, Homo sapien
cagccaggccggtgtctctaggctc

SEQ ID NO: 2318430 - DNA, 25 bp, Homo sapien
gtgtctctaggctcggcccaagctg

SEQ ID NO: 2318431 - DNA, 25 bp, Homo sapien
gcggctggcgtggaccagccaggcc

SEQ ID NO: 2318432 - DNA, 25 bp, Homo sapien
cagccccagccgagagaccctcacc

SEQ ID NO: 2318433 - DNA, 25 bp, Homo sapien
gcacctcggctcagcttcagcccca

SEQ ID NO: 2318434 - DNA, 25 bp, Homo sapien
aggagacagcacctcggctcagctt

SEQ ID NO: 2318435 - DNA, 25 bp, Homo sapien
cagccgagagaccctcaccccccat

SEQ ID NO: 2318436 - DNA, 25 bp, Homo sapien
agagaccgaagcttaatccacatct

SEQ ID NO: 2318437 - DNA, 25 bp, Homo sapien
catctccggaggactgcggggggac

SEQ ID NO: 2318438 - DNA, 25 bp, Homo sapien
gtgacgggcaatccgactcctccag

SEQ ID NO: 2318439 - DNA, 25 bp, Homo sapien
cgaagcttaatccacatcttcttgc

SEQ ID NO: 2318440 - DNA, 25 bp, Homo sapien
tttgcaactcctaagcccgctccaa

SEQ ID NO: 2318441 - DNA, 25 bp, Homo sapien
gctccaactggccagcttgctccgc

SEQ ID NO: 2318442 - DNA, 25 bp, Homo sapien
gccacgcgtgtcagggccgtgcttc

SEQ ID NO: 2318443 - DNA, 25 bp, Homo sapien
tggccagcttgctccgcacatgcct

SEQ ID NO: 2318444 - DNA, 25 bp, Homo sapien
caccgttgtaattgttagggcagaa

SEQ ID NO: 2318445 - DNA, 25 bp, Homo sapien
aatgtgaactcgaactcaagtctcc

SEQ ID NO: 2318446 - DNA, 25 bp, Homo sapien
tcaacttaaggcaggaattttctac

SEQ ID NO: 2318447 - DNA, 25 bp, Homo sapien
cctatcctgaccagaggtttgtgaa

SEQ ID NO: 2318448 - DNA, 25 bp, Homo sapien
ctgctgtcctggttttgtccctctt

SEQ ID NO: 2318449 - DNA, 25 bp, Homo sapien
ttgtccctctttctctgctgctatc

SEQ ID NO: 2318450 - DNA, 25 bp, Homo sapien
gctgtcctggttttgtccctctttc

SEQ ID NO: 2318451 - DNA, 25 bp, Homo sapien
tgtcctggttttgtccctctttctc

SEQ ID NO: 2318452 - DNA, 25 bp, Homo sapien
gaatctggacctggtgttttcttct

SEQ ID NO: 2318453 - DNA, 25 bp, Homo sapien
tcttctcagacagcgataagctcca

SEQ ID NO: 2318454 - DNA, 25 bp, Homo sapien
aggtctgagtgctgaagtggaatct

SEQ ID NO: 2318455 - DNA, 25 bp, Homo sapien
gataagctccatagatgcaacccca

SEQ ID NO: 2318456 - DNA, 25 bp, Homo sapien
tctggacgtttagggcttctctctg

SEQ ID NO: 2318457 - DNA, 25 bp, Homo sapien
gctctagtctccctgacgccaccac

SEQ ID NO: 2318458 - DNA, 25 bp, Homo sapien
tccctgacgccaccactctggacgt

SEQ ID NO: 2318459 - DNA, 25 bp, Homo sapien
ccaccactctggacgtttagggctt

SEQ ID NO: 2318460 - DNA, 25 bp, Homo sapien
tgaccagagagaactttggggaggg

SEQ ID NO: 2318461 - DNA, 25 bp, Homo sapien
tcctccaggtcccagtagaactgag

SEQ ID NO: 2318462 - DNA, 25 bp, Homo sapien
caagaggggacaacttcctctttgg

SEQ ID NO: 2318463 - DNA, 25 bp, Homo sapien
ccaagaggggacaacttcctctttg

SEQ ID NO: 2318464 - DNA, 25 bp, Homo sapien
tccaggtcccagtagaactgagcaa

SEQ ID NO: 2318465 - DNA, 25 bp, Homo sapien
catgggaatcaaagtttcctgcttc

SEQ ID NO: 2318466 - DNA, 25 bp, Homo sapien
atgggaatcaaagtttcctgcttca

SEQ ID NO: 2318467 - DNA, 25 bp, Homo sapien
attcccaaaaagatcaccataagta

SEQ ID NO: 2318468 - DNA, 25 bp, Homo sapien
atcaccataagtagggggcttagga

SEQ ID NO: 2318469 - DNA, 25 bp, Homo sapien
cccaaaaagatcaccataagtaggg

SEQ ID NO: 2318470 - DNA, 25 bp, Homo sapien
tcaccataagtagggggcttaggac

SEQ ID NO: 2318471 - DNA, 25 bp, Homo sapien
aactttccttcgaactccatccctg

SEQ ID NO: 2318472 - DNA, 25 bp, Homo sapien
aaccccgtccagtccacatctggcc

SEQ ID NO: 2318473 - DNA, 25 bp, Homo sapien
aacaggatgctcaaccccgtccagt

SEQ ID NO: 2318474 - DNA, 25 bp, Homo sapien
tgtagaacaggatgctcaaccccgt

SEQ ID NO: 2318475 - DNA, 25 bp, Homo sapien
caactgcttcaccatgtagcgcagc

SEQ ID NO: 2318476 - DNA, 25 bp, Homo sapien
tctccaactgcttcaccatgtagcg

SEQ ID NO: 2318477 - DNA, 25 bp, Homo sapien
tccaactgcttcaccatgtagcgca

SEQ ID NO: 2318478 - DNA, 25 bp, Homo sapien
tcttcagctcctcaatgtttatctc

SEQ ID NO: 2318479 - DNA, 25 bp, Homo sapien
tctatgtagacggcttccagcagag

SEQ ID NO: 2318480 - DNA, 25 bp, Homo sapien
tatgtagacggcttccagcagagaa

SEQ ID NO: 2318481 - DNA, 25 bp, Homo sapien
catctatgtagacggcttccagcag

SEQ ID NO: 2318482 - DNA, 25 bp, Homo sapien
ctcatctatgtagacggcttccagc

SEQ ID NO: 2318483 - DNA, 25 bp, Homo sapien
ccgaaggcacggcatctgaccgcag

SEQ ID NO: 2318484 - DNA, 25 bp, Homo sapien
cagtcccgcacctccgaaggcacgg

SEQ ID NO: 2318485 - DNA, 25 bp, Homo sapien
aaggcacggcatctgaccgcagctc

SEQ ID NO: 2318486 - DNA, 25 bp, Homo sapien
acctccgaaggcacggcatctgacc

SEQ ID NO: 2318487 - DNA, 25 bp, Homo sapien
cacagcgtgcacaatgcttcggaac

SEQ ID NO: 2318488 - DNA, 25 bp, Homo sapien
agcctgcacagcgtgcacaatgctt

SEQ ID NO: 2318489 - DNA, 25 bp, Homo sapien
gtgcacaatgcttcggaacttgggc

SEQ ID NO: 2318490 - DNA, 25 bp, Homo sapien
tgcacagcgtgcacaatgcttcgga

SEQ ID NO: 2318491 - DNA, 25 bp, Homo sapien
gacagttgagaaccgcagtagagta

SEQ ID NO: 2318492 - DNA, 25 bp, Homo sapien
cttgagacagttgagaaccgcagta

SEQ ID NO: 2318493 - DNA, 25 bp, Homo sapien
cgcagtagagtaagtggggcccaca

SEQ ID NO: 2318494 - DNA, 25 bp, Homo sapien
ttgagaaccgcagtagagtaagtgg

SEQ ID NO: 2318495 - DNA, 25 bp, Homo sapien
tcctcagggcatggtcatctgctgc

SEQ ID NO: 2318496 - DNA, 25 bp, Homo sapien
gacatcaaagcaccagagatccagg

SEQ ID NO: 2318497 - DNA, 25 bp, Homo sapien
actcaaaaacaatggtcctcagggc

SEQ ID NO: 2318498 - DNA, 25 bp, Homo sapien
tgctgcctggttcaaggaaaagaca

SEQ ID NO: 2318499 - DNA, 25 bp, Homo sapien
tggatctggttgtggtaaggattct

SEQ ID NO: 2318500 - DNA, 25 bp, Homo sapien
gaagcaatggactgtctgggtaaca

SEQ ID NO: 2318501 - DNA, 25 bp, Homo sapien
tccctgtgcggagcaagaagcaatg

SEQ ID NO: 2318502 - DNA, 25 bp, Homo sapien
gtaacatcggctgcgtggatctggt

SEQ ID NO: 2318503 - DNA, 25 bp, Homo sapien
ggagctcaatctccgacaggcagtg

SEQ ID NO: 2318504 - DNA, 25 bp, Homo sapien
aagctgttggtagtgcccgtgtgct

SEQ ID NO: 2318505 - DNA, 25 bp, Homo sapien
ccaggagctcaatctccgacaggca

SEQ ID NO: 2318506 - DNA, 25 bp, Homo sapien
agtgcccgtgtgctcataatcatgg

SEQ ID NO: 2318507 - DNA, 25 bp, Homo sapien
tgcatcaatcggaaaacagagctga

SEQ ID NO: 2318508 - DNA, 25 bp, Homo sapien
tctccagcactgaacgatcattgta

SEQ ID NO: 2318509 - DNA, 25 bp, Homo sapien
cattgtacacgatggcacattctga

SEQ ID NO: 2318510 - DNA, 25 bp, Homo sapien
acagagctgatgtggtgattctcca

SEQ ID NO: 2318511 - DNA, 25 bp, Homo sapien
ccaacaccatctcaatgaccagggc

SEQ ID NO: 2318512 - DNA, 25 bp, Homo sapien
caacaccatctcaatgaccagggct

SEQ ID NO: 2318513 - DNA, 25 bp, Homo sapien
caccatctcaatgaccagggctcgg

SEQ ID NO: 2318514 - DNA, 25 bp, Homo sapien
acaccatctcaatgaccagggctcg

SEQ ID NO: 2318515 - DNA, 25 bp, Homo sapien
gggcagatggcaagggaagggagac

SEQ ID NO: 2318516 - DNA, 25 bp, Homo sapien
ttggggcagatggcaagggaaggga

SEQ ID NO: 2318517 - DNA, 25 bp, Homo sapien
ctggttggggcagatggcaagggaa

SEQ ID NO: 2318518 - DNA, 25 bp, Homo sapien
tggttggggcagatggcaagggaag

SEQ ID NO: 2318519 - DNA, 25 bp, Homo sapien
ggccttggtccaacggctgtggacc

SEQ ID NO: 2318520 - DNA, 25 bp, Homo sapien
tggtccaacggctgtggaccaacca

SEQ ID NO: 2318521 - DNA, 25 bp, Homo sapien
acggctgtggaccaaccactgcttg

SEQ ID NO: 2318522 - DNA, 25 bp, Homo sapien
gaccaaccactgcttggttgggtgg

SEQ ID NO: 2318523 - DNA, 25 bp, Homo sapien
atctggggtacaggtggcaagtggt

SEQ ID NO: 2318524 - DNA, 25 bp, Homo sapien
tctggggtacaggtggcaagtggtg

SEQ ID NO: 2318525 - DNA, 25 bp, Homo sapien
ctggggtacaggtggcaagtggtgg

SEQ ID NO: 2318526 - DNA, 25 bp, Homo sapien
gatctggggtacaggtggcaagtgg

SEQ ID NO: 2318527 - DNA, 25 bp, Homo sapien
gaagtgcggtcacagagtggagaaa

SEQ ID NO: 2318528 - DNA, 25 bp, Homo sapien
actagagtggaagtgcggtcacaga

SEQ ID NO: 2318529 - DNA, 25 bp, Homo sapien
gaaaagggcaggcccaactctgcct

SEQ ID NO: 2318530 - DNA, 25 bp, Homo sapien
tgccactagagtggaagtgcggtca

SEQ ID NO: 2318531 - DNA, 25 bp, Homo sapien
gacttggagtcctcatccgccaggg

SEQ ID NO: 2318532 - DNA, 25 bp, Homo sapien
tttagacttggagtcctcatccgcc

SEQ ID NO: 2318533 - DNA, 25 bp, Homo sapien
ctgggctggtttttagacttggagt

SEQ ID NO: 2318534 - DNA, 25 bp, Homo sapien
atccgccaggggctgaacactcttc

SEQ ID NO: 2318535 - DNA, 25 bp, Homo sapien
caccatggctgtgagtcggtcctct

SEQ ID NO: 2318536 - DNA, 25 bp, Homo sapien
gagcataggtacaggtcacaccctt

SEQ ID NO: 2318537 - DNA, 25 bp, Homo sapien
cagaaccaccttagccctgggagtg

SEQ ID NO: 2318538 - DNA, 25 bp, Homo sapien
gagggactcccaagcttgaagcagt

SEQ ID NO: 2318539 - DNA, 25 bp, Homo sapien
cacttgctgcccgttccttccattt

SEQ ID NO: 2318540 - DNA, 25 bp, Homo sapien
ccatttctgcttattctcctgaatg

SEQ ID NO: 2318541 - DNA, 25 bp, Homo sapien
tgaatgcgcttgacccaggtggaac

SEQ ID NO: 2318542 - DNA, 25 bp, Homo sapien
ggtggaacgaaagctgaccacatca

SEQ ID NO: 2318543 - DNA, 25 bp, Homo sapien
gacccttgggttgtggaatatctga

SEQ ID NO: 2318544 - DNA, 25 bp, Homo sapien
caaatcaaggagtccggcaaagggt

SEQ ID NO: 2318545 - DNA, 25 bp, Homo sapien
tctttcctgtgatctaactggtctg

SEQ ID NO: 2318546 - DNA, 25 bp, Homo sapien
cacagtgtgcacagggacccttggg

SEQ ID NO: 2318547 - DNA, 25 bp, Homo sapien
aggagcataaaggaggctgagctta

SEQ ID NO: 2318548 - DNA, 25 bp, Homo sapien
ctgagcttaggccaagaagtattct

SEQ ID NO: 2318549 - DNA, 25 bp, Homo sapien
ccccagaacccaaggagtatgtgga

SEQ ID NO: 2318550 - DNA, 25 bp, Homo sapien
ggagacatgtaagggattctcatcc

SEQ ID NO: 2318551 - DNA, 25 bp, Homo sapien
cagattcccattctggttgtgttca

SEQ ID NO: 2318552 - DNA, 25 bp, Homo sapien
tcttcacagggggacagctcgtcaa

SEQ ID NO: 2318553 - DNA, 25 bp, Homo sapien
tcaatggacatctggttggtgatgc

SEQ ID NO: 2318554 - DNA, 25 bp, Homo sapien
tctggttgtgttcatcttcggcagg

SEQ ID NO: 2318555 - DNA, 25 bp, Homo sapien
catcaaacactttggactcaatgaa

SEQ ID NO: 2318556 - DNA, 25 bp, Homo sapien
gacatcaaacactttggactcaatg

SEQ ID NO: 2318557 - DNA, 25 bp, Homo sapien
caaacactttggactcaatgaagac

SEQ ID NO: 2318558 - DNA, 25 bp, Homo sapien
tgacatcaaacactttggactcaat

SEQ ID NO: 2318559 - DNA, 25 bp, Homo sapien
ggtcctagaaaggtaccatgccctg

SEQ ID NO: 2318560 - DNA, 25 bp, Homo sapien
tcttgctgccggaacattaaagtgc

SEQ ID NO: 2318561 - DNA, 25 bp, Homo sapien
tgtggatttcgcatgaacagggccc

SEQ ID NO: 2318562 - DNA, 25 bp, Homo sapien
tacagacattggtcggatggagcct

SEQ ID NO: 2318563 - DNA, 25 bp, Homo sapien
ccagaaccacctctacaggaggaag

SEQ ID NO: 2318564 - DNA, 25 bp, Homo sapien
agaaccacctctacaggaggaagag

SEQ ID NO: 2318565 - DNA, 25 bp, Homo sapien
accagaaccacctctacaggaggaa

SEQ ID NO: 2318566 - DNA, 25 bp, Homo sapien
aaccacctctacaggaggaagaggt

SEQ ID NO: 2318567 - DNA, 25 bp, Homo sapien
ctcaggtcctgctcgactccttcct

SEQ ID NO: 2318568 - DNA, 25 bp, Homo sapien
ccagggcacatccttcaaccagtca

SEQ ID NO: 2318569 - DNA, 25 bp, Homo sapien
catttgctcactccagggcacatcc

SEQ ID NO: 2318570 - DNA, 25 bp, Homo sapien
tcaggtcctgctcgactccttcctc

SEQ ID NO: 2318571 - DNA, 25 bp, Homo sapien
ctggattgatcaagttctttgttgt

SEQ ID NO: 2318572 - DNA, 25 bp, Homo sapien
gattgatcaagttctttgttgttgt

SEQ ID NO: 2318573 - DNA, 25 bp, Homo sapien
tctattagagggtgcaatgaagcta

SEQ ID NO: 2318574 - DNA, 25 bp, Homo sapien
taagcctaatcaaaactttcaggat

SEQ ID NO: 2318575 - DNA, 25 bp, Homo sapien
gaaacaagagtgagaaaggtcagaa

SEQ ID NO: 2318576 - DNA, 25 bp, Homo sapien
tgaagctattagaactaagcctaat

SEQ ID NO: 2318577 - DNA, 25 bp, Homo sapien
tgtgcacaacacactctgctacaca

SEQ ID NO: 2318578 - DNA, 25 bp, Homo sapien
tcctctgggctgtctaataggtgtg

SEQ ID NO: 2318579 - DNA, 25 bp, Homo sapien
gtctaataggtgtggatggaatgat

SEQ ID NO: 2318580 - DNA, 25 bp, Homo sapien
gtgcacaacacactctgctacacag

SEQ ID NO: 2318581 - DNA, 25 bp, Homo sapien
ggatagatgacccacatggctccaa

SEQ ID NO: 2318582 - DNA, 25 bp, Homo sapien
gaatgtcactcaggagacttgagaa

SEQ ID NO: 2318583 - DNA, 25 bp, Homo sapien
tgtgggcatccttccaattcagtct

SEQ ID NO: 2318584 - DNA, 25 bp, Homo sapien
tccaagccctaagcccagaatgtca

SEQ ID NO: 2318585 - DNA, 25 bp, Homo sapien
tggccatgtgtctcccatgtggtgg

SEQ ID NO: 2318586 - DNA, 25 bp, Homo sapien
tcactagagaccatgaagtatccag

SEQ ID NO: 2318587 - DNA, 25 bp, Homo sapien
gggtccagggtccatagtttcagca

SEQ ID NO: 2318588 - DNA, 25 bp, Homo sapien
tgatgactttgggaagctacctttc

SEQ ID NO: 2318589 - DNA, 25 bp, Homo sapien
agatgatggagcaagtactggaggc

SEQ ID NO: 2318590 - DNA, 25 bp, Homo sapien
gatgcgagggcttaaaatacagcag

SEQ ID NO: 2318591 - DNA, 25 bp, Homo sapien
aggcgtccacgtgtgccaggaaagt

SEQ ID NO: 2318592 - DNA, 25 bp, Homo sapien
tgatgaggatgcgagggcttaaaat

SEQ ID NO: 2318593 - DNA, 25 bp, Homo sapien
gccagagctgtgaagcccttaggag

SEQ ID NO: 2318594 - DNA, 25 bp, Homo sapien
tggagccagagctgtgaagccctta

SEQ ID NO: 2318595 - DNA, 25 bp, Homo sapien
caagtggagccagagctgtgaagcc

SEQ ID NO: 2318596 - DNA, 25 bp, Homo sapien
acaggccactggcaagtggagccag

SEQ ID NO: 2318597 - DNA, 25 bp, Homo sapien
tgctgttcacacagactgtggtgtc

SEQ ID NO: 2318598 - DNA, 25 bp, Homo sapien
tatcctggaagttcctatggtccgt

SEQ ID NO: 2318599 - DNA, 25 bp, Homo sapien
tatggtccgtcttcttggaaatcag

SEQ ID NO: 2318600 - DNA, 25 bp, Homo sapien
tcatggcaactctcacaacttcggt

SEQ ID NO: 2318601 - DNA, 25 bp, Homo sapien
tgctttagtcactgccagttgatac

SEQ ID NO: 2318602 - DNA, 25 bp, Homo sapien
agttgatacccatggtcacctccca

SEQ ID NO: 2318603 - DNA, 25 bp, Homo sapien
tgccagttgatacccatggtcacct

SEQ ID NO: 2318604 - DNA, 25 bp, Homo sapien
tagtcactgccagttgatacccatg

SEQ ID NO: 2318605 - DNA, 25 bp, Homo sapien
tgacctgaagatcagggagcacaga

SEQ ID NO: 2318606 - DNA, 25 bp, Homo sapien
ggtggtgacctgaagatcagggagc

SEQ ID NO: 2318607 - DNA, 25 bp, Homo sapien
acctgaagatcagggagcacagaca

SEQ ID NO: 2318608 - DNA, 25 bp, Homo sapien
agatcagggagcacagacaaaaatg

SEQ ID NO: 2318609 - DNA, 25 bp, Homo sapien
agtaccaggactgctaagaacttca

SEQ ID NO: 2318610 - DNA, 25 bp, Homo sapien
gtaccaggactgctaagaacttcat

SEQ ID NO: 2318611 - DNA, 25 bp, Homo sapien
agctggagcagctgttgtcggattc

SEQ ID NO: 2318612 - DNA, 25 bp, Homo sapien
gtgtcagctggagcagctgttgtcg

SEQ ID NO: 2318613 - DNA, 25 bp, Homo sapien
gctggagcagctgttgtcggattct

SEQ ID NO: 2318614 - DNA, 25 bp, Homo sapien
tcagctggagcagctgttgtcggat

SEQ ID NO: 2318615 - DNA, 25 bp, Homo sapien
tggttattgctggaaagagatgaca

SEQ ID NO: 2318616 - DNA, 25 bp, Homo sapien
gctcttgtgccttatgctggaaaac

SEQ ID NO: 2318617 - DNA, 25 bp, Homo sapien
caaagactatccacatggaaactgg

SEQ ID NO: 2318618 - DNA, 25 bp, Homo sapien
catttgtataagtctatggcctaga

SEQ ID NO: 2318619 - DNA, 25 bp, Homo sapien
ggaatgtctttacgagcagtggtag

SEQ ID NO: 2318620 - DNA, 25 bp, Homo sapien
gcagtggttgcagtggttgcagcag

SEQ ID NO: 2318621 - DNA, 25 bp, Homo sapien
agaagcagcggtggttgcagtggta

SEQ ID NO: 2318622 - DNA, 25 bp, Homo sapien
ggtggttgcagtggtaggagcagca

SEQ ID NO: 2318623 - DNA, 25 bp, Homo sapien
accattcgggagatccccaacccat

SEQ ID NO: 2318624 - DNA, 25 bp, Homo sapien
actctaccattcgggagatccccaa

SEQ ID NO: 2318625 - DNA, 25 bp, Homo sapien
gacacactctaccattcgggagatc

SEQ ID NO: 2318626 - DNA, 25 bp, Homo sapien
acacactctaccattcgggagatcc

SEQ ID NO: 2318627 - DNA, 25 bp, Homo sapien
gaaatcacaggaagcatgaatagtt

SEQ ID NO: 2318628 - DNA, 25 bp, Homo sapien
tagttgtgaccaattgcagaagact

SEQ ID NO: 2318629 - DNA, 25 bp, Homo sapien
aaataaactgattagagataaaggg

SEQ ID NO: 2318630 - DNA, 25 bp, Homo sapien
gatatcgtaggcaaggtaagtagtt

SEQ ID NO: 2318631 - DNA, 25 bp, Homo sapien
tctttctacagcctatgaaaaggta

SEQ ID NO: 2318632 - DNA, 25 bp, Homo sapien
acagcatacagaattctctggattc

SEQ ID NO: 2318633 - DNA, 25 bp, Homo sapien
acttggatacagcatacagaattct

SEQ ID NO: 2318634 - DNA, 25 bp, Homo sapien
cagcctatgaaaaggtattccatgg

SEQ ID NO: 2318635 - DNA, 25 bp, Homo sapien
tccattgtactcaatctcaatatac

SEQ ID NO: 2318636 - DNA, 25 bp, Homo sapien
tatgactgtgcatactgggtagcac

SEQ ID NO: 2318637 - DNA, 25 bp, Homo sapien
gcacagattccattgtactcaatct

SEQ ID NO: 2318638 - DNA, 25 bp, Homo sapien
tcagtccgatgttaagtcctttatt

SEQ ID NO: 2318639 - DNA, 25 bp, Homo sapien
tttgtcatgcagttgacaacttcca

SEQ ID NO: 2318640 - DNA, 25 bp, Homo sapien
ttgtcatgcagttgacaacttccat

SEQ ID NO: 2318641 - DNA, 25 bp, Homo sapien
ctttgtcatgcagttgacaacttcc

SEQ ID NO: 2318642 - DNA, 25 bp, Homo sapien
tacttgtatgtcgttgcaggctctg

SEQ ID NO: 2318643 - DNA, 25 bp, Homo sapien
ggctctgtgatcctcaacatctgct

SEQ ID NO: 2318644 - DNA, 25 bp, Homo sapien
tgcaggtacacttttagagccgcca

SEQ ID NO: 2318645 - DNA, 25 bp, Homo sapien
tggcctggcactcatgaacttccaa

SEQ ID NO: 2318646 - DNA, 25 bp, Homo sapien
attgggaaatgccagaagacgtcat

SEQ ID NO: 2318647 - DNA, 25 bp, Homo sapien
tagctgaagacgtcttcattgggaa

SEQ ID NO: 2318648 - DNA, 25 bp, Homo sapien
gtcataaccattcgcttctttgagg

SEQ ID NO: 2318649 - DNA, 25 bp, Homo sapien
aattcttagctgaagacgtcttcat

SEQ ID NO: 2318650 - DNA, 25 bp, Homo sapien
atgaaaactctacccagtaatccaa

SEQ ID NO: 2318651 - DNA, 25 bp, Homo sapien
aatgaaaactctacccagtaatcca

SEQ ID NO: 2318652 - DNA, 25 bp, Homo sapien
gaaaactctacccagtaatccaatc

SEQ ID NO: 2318653 - DNA, 25 bp, Homo sapien
aaactctacccagtaatccaatcac

SEQ ID NO: 2318654 - DNA, 25 bp, Homo sapien
gaggagtggaaagatcctccaccct

SEQ ID NO: 2318655 - DNA, 25 bp, Homo sapien
ctttgctttctgtgggtatgacctc

SEQ ID NO: 2318656 - DNA, 25 bp, Homo sapien
aactgcagcaagatatattgaggtc

SEQ ID NO: 2318657 - DNA, 25 bp, Homo sapien
aaacttgttgagataaactgcagca

SEQ ID NO: 2318658 - DNA, 25 bp, Homo sapien
tctgtgggtatgacctctttcttca

SEQ ID NO: 2318659 - DNA, 25 bp, Homo sapien
gatcaagttttaaaactcttccaca

SEQ ID NO: 2318660 - DNA, 25 bp, Homo sapien
ccacatttcttgtttgtcaagtcca

SEQ ID NO: 2318661 - DNA, 25 bp, Homo sapien
tcttccacatttcttgtttgtcaag

SEQ ID NO: 2318662 - DNA, 25 bp, Homo sapien
cttttgggaagagagatcaagtttt

SEQ ID NO: 2318663 - DNA, 25 bp, Homo sapien
ctttgtaccaggtcccaggtgtagg

SEQ ID NO: 2318664 - DNA, 25 bp, Homo sapien
tataccgttgctataagtgtttact

SEQ ID NO: 2318665 - DNA, 25 bp, Homo sapien
tctttccccatcaataattataccg

SEQ ID NO: 2318666 - DNA, 25 bp, Homo sapien
tgctataagtgtttactttgtacca

SEQ ID NO: 2318667 - DNA, 25 bp, Homo sapien
ttcacttccccacatagccttgtag

SEQ ID NO: 2318668 - DNA, 25 bp, Homo sapien
aggcttctgttgctgtatactcccg

SEQ ID NO: 2318669 - DNA, 25 bp, Homo sapien
ttatcacttgaaagaccttccctga

SEQ ID NO: 2318670 - DNA, 25 bp, Homo sapien
aacacagattactagagacttctgc

SEQ ID NO: 2318671 - DNA, 25 bp, Homo sapien
cttgtcatactcctcagtgtagtct

SEQ ID NO: 2318672 - DNA, 25 bp, Homo sapien
tgtagcgagcaagaaggtggacttc

SEQ ID NO: 2318673 - DNA, 25 bp, Homo sapien
ggagtccagggacatatatcaggaa

SEQ ID NO: 2318674 - DNA, 25 bp, Homo sapien
cttcccatcggagatcactagcttc

SEQ ID NO: 2318675 - DNA, 25 bp, Homo sapien
aatgcgaccaacaaatggagtccag

SEQ ID NO: 2318676 - DNA, 25 bp, Homo sapien
gctgatggtccccagatgtctctcc

SEQ ID NO: 2318677 - DNA, 25 bp, Homo sapien
ccacggatcctgttgctgatggtcc

SEQ ID NO: 2318678 - DNA, 25 bp, Homo sapien
gacctgaaaccaatgtctgacatta

SEQ ID NO: 2318679 - DNA, 25 bp, Homo sapien
gggtgctaagcctcaagccacggat

SEQ ID NO: 2318680 - DNA, 25 bp, Homo sapien
aactcattgacagttgtacagttgg

SEQ ID NO: 2318681 - DNA, 25 bp, Homo sapien
gacagttgtacagttggctgttcaa

SEQ ID NO: 2318682 - DNA, 25 bp, Homo sapien
tgcagagggatgggttgaatctatt

SEQ ID NO: 2318683 - DNA, 25 bp, Homo sapien
ggtcaccctcgtcacaactcattga

SEQ ID NO: 2318684 - DNA, 25 bp, Homo sapien
tgcgtgtcaaggacacagcatcagt

SEQ ID NO: 2318685 - DNA, 25 bp, Homo sapien
gggtctttggcttataaacttcagc

SEQ ID NO: 2318686 - DNA, 25 bp, Homo sapien
tgagaaagatgcgtgtcaaggacac

SEQ ID NO: 2318687 - DNA, 25 bp, Homo sapien
gctgcttccttacacatgtggactg

SEQ ID NO: 2318688 - DNA, 25 bp, Homo sapien
tccagatggtagaagagacgctttc

SEQ ID NO: 2318689 - DNA, 25 bp, Homo sapien
tcagcgatccatgtcaaacccggtt

SEQ ID NO: 2318690 - DNA, 25 bp, Homo sapien
ggagaggagctttcaggaccacaag

SEQ ID NO: 2318691 - DNA, 25 bp, Homo sapien
tatgctcctcaaggacgccttcggg

SEQ ID NO: 2318692 - DNA, 25 bp, Homo sapien
gatggtgtgttgactagctctccca

SEQ ID NO: 2318693 - DNA, 25 bp, Homo sapien
ttcagttaagctgctgagcatccca

SEQ ID NO: 2318694 - DNA, 25 bp, Homo sapien
gagcatcccataagtacctggtctg

SEQ ID NO: 2318695 - DNA, 25 bp, Homo sapien
ttttgggagcccagacctttatcca

SEQ ID NO: 2318696 - DNA, 25 bp, Homo sapien
tgaccataaggagggctaggaagcc

SEQ ID NO: 2318697 - DNA, 25 bp, Homo sapien
tcaggttatccagggcgtcattcag

SEQ ID NO: 2318698 - DNA, 25 bp, Homo sapien
ggaagccccggagactgatagttga

SEQ ID NO: 2318699 - DNA, 25 bp, Homo sapien
caggagacccatcttgcttcaagga

SEQ ID NO: 2318700 - DNA, 25 bp, Homo sapien
gactgtattgagttgggtcccaata

SEQ ID NO: 2318701 - DNA, 25 bp, Homo sapien
cagtgaagactgtattgagttgggt

SEQ ID NO: 2318702 - DNA, 25 bp, Homo sapien
gaagactgtattgagttgggtccca

SEQ ID NO: 2318703 - DNA, 25 bp, Homo sapien
gtgaagactgtattgagttgggtcc

SEQ ID NO: 2318704 - DNA, 25 bp, Homo sapien
aattggccctattgatgtaccctgc

SEQ ID NO: 2318705 - DNA, 25 bp, Homo sapien
gagaccaccctatgttggagagcag

SEQ ID NO: 2318706 - DNA, 25 bp, Homo sapien
tacagccgctcacaaaggtaagtgc

SEQ ID NO: 2318707 - DNA, 25 bp, Homo sapien
aaatgctagcttcgaggatagaccc

SEQ ID NO: 2318708 - DNA, 25 bp, Homo sapien
ggccagccacgtgcctgcctgcttt

SEQ ID NO: 2318709 - DNA, 25 bp, Homo sapien
cctgagcagcttgcggctgttcccg

SEQ ID NO: 2318710 - DNA, 25 bp, Homo sapien
gggatagtctgctccaactccctga

SEQ ID NO: 2318711 - DNA, 25 bp, Homo sapien
cctgctttggatctgcctcagctca

SEQ ID NO: 2318712 - DNA, 25 bp, Homo sapien
aaaggataactgaattctcactttt

SEQ ID NO: 2318713 - DNA, 25 bp, Homo sapien
aaggataactgaattctcacttttg

SEQ ID NO: 2318714 - DNA, 25 bp, Homo sapien
aggataactgaattctcacttttgg

SEQ ID NO: 2318715 - DNA, 25 bp, Homo sapien
caaaggataactgaattctcacttt

SEQ ID NO: 2318716 - DNA, 25 bp, Homo sapien
gagtgggtaaaagctctcctatatc

SEQ ID NO: 2318717 - DNA, 25 bp, Homo sapien
agctctcctatatcagctgctattc

SEQ ID NO: 2318718 - DNA, 25 bp, Homo sapien
ttagagtgggtaaaagctctcctat

SEQ ID NO: 2318719 - DNA, 25 bp, Homo sapien
gctctcctatatcagctgctattct

SEQ ID NO: 2318720 - DNA, 25 bp, Homo sapien
gaatggttgcctgttcccttgtcac

SEQ ID NO: 2318721 - DNA, 25 bp, Homo sapien
tggttgcctgttcccttgtcaccca

SEQ ID NO: 2318722 - DNA, 25 bp, Homo sapien
ctgaatggttgcctgttcccttgtc

SEQ ID NO: 2318723 - DNA, 25 bp, Homo sapien
aatggttgcctgttcccttgtcacc

SEQ ID NO: 2318724 - DNA, 25 bp, Homo sapien
tgattgtcatcacactaatgttccc

SEQ ID NO: 2318725 - DNA, 25 bp, Homo sapien
caaaagaaccatgctatagatcagc

SEQ ID NO: 2318726 - DNA, 25 bp, Homo sapien
gaagccttcaagaatgaaatcagtt

SEQ ID NO: 2318727 - DNA, 25 bp, Homo sapien
gaatgtagaactctgggcggaccct

SEQ ID NO: 2318728 - DNA, 25 bp, Homo sapien
ccctctgttacaatgaacagggcaa

SEQ ID NO: 2318729 - DNA, 25 bp, Homo sapien
gagtaggagacgtcaatgaaggaga

SEQ ID NO: 2318730 - DNA, 25 bp, Homo sapien
gcaaaaaggaataactgggcaacac

SEQ ID NO: 2318731 - DNA, 25 bp, Homo sapien
agtgggccatggctttaggagcaat

SEQ ID NO: 2318732 - DNA, 25 bp, Homo sapien
taagaaccagcaaccaactgagtgc

SEQ ID NO: 2318733 - DNA, 25 bp, Homo sapien
gggatcttcaagactgaggatacaa

SEQ ID NO: 2318734 - DNA, 25 bp, Homo sapien
gaatgttacactgacttggaggatg

SEQ ID NO: 2318735 - DNA, 25 bp, Homo sapien
cagaggcgtcttgacatgtgaacac

SEQ ID NO: 2318736 - DNA, 25 bp, Homo sapien
attgcttggaggtgtgaggtacaca

SEQ ID NO: 2318737 - DNA, 25 bp, Homo sapien
tttgcgaagttcaggattgcttgga

SEQ ID NO: 2318738 - DNA, 25 bp, Homo sapien
tttcttagagagtagatcagagggt

SEQ ID NO: 2318739 - DNA, 25 bp, Homo sapien
actgaagccactttgcgaagttcag

SEQ ID NO: 2318740 - DNA, 25 bp, Homo sapien
tttaggaattaatactgcaaaggat

SEQ ID NO: 2318741 - DNA, 25 bp, Homo sapien
gtttggatcctagcattacaaataa

SEQ ID NO: 2318742 - DNA, 25 bp, Homo sapien
ggtttggatcctagcattacaaata

SEQ ID NO: 2318743 - DNA, 25 bp, Homo sapien
tggtttggatcctagcattacaaat

SEQ ID NO: 2318744 - DNA, 25 bp, Homo sapien
tccctagaaggatcatggcataaac

SEQ ID NO: 2318745 - DNA, 25 bp, Homo sapien
tcagaccagaagttgatcatagcct

SEQ ID NO: 2318746 - DNA, 25 bp, Homo sapien
tgttcagccgaggatcagtcataat

SEQ ID NO: 2318747 - DNA, 25 bp, Homo sapien
gagatagacttgttttcagaccaga

SEQ ID NO: 2318748 - DNA, 25 bp, Homo sapien
gactagggagtaacataaggatgcc

SEQ ID NO: 2318749 - DNA, 25 bp, Homo sapien
aaaagtggtcaacagcccgagaagc

SEQ ID NO: 2318750 - DNA, 25 bp, Homo sapien
taggaaccagccaccaactgagtac

SEQ ID NO: 2318751 - DNA, 25 bp, Homo sapien
cccgagaagcgcaaaaagataaagt

SEQ ID NO: 2318752 - DNA, 25 bp, Homo sapien
tcttctctagaaatttttttagagc

SEQ ID NO: 2318753 - DNA, 25 bp, Homo sapien
agagaaataataatcaaagaataat

SEQ ID NO: 2318754 - DNA, 25 bp, Homo sapien
gagaaataataatcaaagaataata

SEQ ID NO: 2318755 - DNA, 25 bp, Homo sapien
ctagaaatttttttagagcctcttg

SEQ ID NO: 2318756 - DNA, 25 bp, Homo sapien
cattgtgctcgaagttccattcttt

SEQ ID NO: 2318757 - DNA, 25 bp, Homo sapien
aagttccattctttacagtacccag

SEQ ID NO: 2318758 - DNA, 25 bp, Homo sapien
ctttacagtacccagaatctttaga

SEQ ID NO: 2318759 - DNA, 25 bp, Homo sapien
tacagtacccagaatctttagattt

SEQ ID NO: 2318760 - DNA, 25 bp, Homo sapien
agtcctcctctgccaaatgggaggc

SEQ ID NO: 2318761 - DNA, 25 bp, Homo sapien
tcctcctctgccaaatgggaggcac

SEQ ID NO: 2318762 - DNA, 25 bp, Homo sapien
gtcctcctctgccaaatgggaggca

SEQ ID NO: 2318763 - DNA, 25 bp, Homo sapien
tctgtcacctctgagtaattcctgt

SEQ ID NO: 2318764 - DNA, 25 bp, Homo sapien
gatttctcaacacaatgaccatgta

SEQ ID NO: 2318765 - DNA, 25 bp, Homo sapien
gaccatgtagataagcaagaacagg

SEQ ID NO: 2318766 - DNA, 25 bp, Homo sapien
gcttctggcgatgttctgaatccca

SEQ ID NO: 2318767 - DNA, 25 bp, Homo sapien
gaagtctggagtctatttcaatgac

SEQ ID NO: 2318768 - DNA, 25 bp, Homo sapien
aaatacacaggtgtgtgaagtctgg

SEQ ID NO: 2318769 - DNA, 25 bp, Homo sapien
gtgaagtctggagtctatttcaatg

SEQ ID NO: 2318770 - DNA, 25 bp, Homo sapien
caggtgtgtgaagtctggagtctat

SEQ ID NO: 2318771 - DNA, 25 bp, Homo sapien
gcggagatccaaataggacaaattt

SEQ ID NO: 2318772 - DNA, 25 bp, Homo sapien
aataaagtagtcagttttggaagca

SEQ ID NO: 2318773 - DNA, 25 bp, Homo sapien
tgtgttgctcaaccattgtaagaaa

SEQ ID NO: 2318774 - DNA, 25 bp, Homo sapien
caataactgtggagtagcggagatc

SEQ ID NO: 2318775 - DNA, 25 bp, Homo sapien
tagaagaaaggtgaacaaatagctg

SEQ ID NO: 2318776 - DNA, 25 bp, Homo sapien
aaaggtgaacaaatagctgagaagc

SEQ ID NO: 2318777 - DNA, 25 bp, Homo sapien
aatagctgagaagcgatcatatgcc

SEQ ID NO: 2318778 - DNA, 25 bp, Homo sapien
gaacaaatagctgagaagcgatcat

SEQ ID NO: 2318779 - DNA, 25 bp, Homo sapien
gatgcatccacagatagaggagcca

SEQ ID NO: 2318780 - DNA, 25 bp, Homo sapien
gtatcatggagttgatgcatccaca

SEQ ID NO: 2318781 - DNA, 25 bp, Homo sapien
ttgtatcatggagttgatgcatcca

SEQ ID NO: 2318782 - DNA, 25 bp, Homo sapien
tccacagatagaggagccaaccacc

SEQ ID NO: 2318783 - DNA, 25 bp, Homo sapien
gaagccagaatgacagttgtggtgg

SEQ ID NO: 2318784 - DNA, 25 bp, Homo sapien
aacagtactacctcattcacaagga

SEQ ID NO: 2318785 - DNA, 25 bp, Homo sapien
tctgccgtgggttgagagaatcttc

SEQ ID NO: 2318786 - DNA, 25 bp, Homo sapien
gatgtcaatacatgagatcttgatc

SEQ ID NO: 2318787 - DNA, 25 bp, Homo sapien
agaatacagttccatagaataaact

SEQ ID NO: 2318788 - DNA, 25 bp, Homo sapien
atacagttccatagaataaactcac

SEQ ID NO: 2318789 - DNA, 25 bp, Homo sapien
atgaagaatacagttccatagaata

SEQ ID NO: 2318790 - DNA, 25 bp, Homo sapien
tgaagaatacagttccatagaataa

SEQ ID NO: 2318791 - DNA, 25 bp, Homo sapien
gacaagagtttagaatacaactata

SEQ ID NO: 2318792 - DNA, 25 bp, Homo sapien
gcattttgcacctatttcttagact

SEQ ID NO: 2318793 - DNA, 25 bp, Homo sapien
aaatcagatatttaacatagggatg

SEQ ID NO: 2318794 - DNA, 25 bp, Homo sapien
tctttggagatggccccaggttggg

SEQ ID NO: 2318795 - DNA, 25 bp, Homo sapien
ttctctctccgtgctatttattgtg

SEQ ID NO: 2318796 - DNA, 25 bp, Homo sapien
ttattgtgagtccttgtttcctcat

SEQ ID NO: 2318797 - DNA, 25 bp, Homo sapien
tttcctcattctgtgctcccacatg

SEQ ID NO: 2318798 - DNA, 25 bp, Homo sapien
tcattctgtgctcccacatgcacat

SEQ ID NO: 2318799 - DNA, 25 bp, Homo sapien
gtcagcccagatcaccctgatcttc

SEQ ID NO: 2318800 - DNA, 25 bp, Homo sapien
gagtcagcccagatcaccctgatct

SEQ ID NO: 2318801 - DNA, 25 bp, Homo sapien
atgggccctcgtgtttgtttgaaat

SEQ ID NO: 2318802 - DNA, 25 bp, Homo sapien
tcatgggccctcgtgtttgtttgaa

SEQ ID NO: 2318803 - DNA, 25 bp, Homo sapien
attcagtgactctggtgtgattttc

SEQ ID NO: 2318804 - DNA, 25 bp, Homo sapien
gtgactctggtgtgattttcacaga

SEQ ID NO: 2318805 - DNA, 25 bp, Homo sapien
tgtaaaaccaagaagaataaattca

SEQ ID NO: 2318806 - DNA, 25 bp, Homo sapien
gaataaattcagtgactctggtgtg

SEQ ID NO: 2318807 - DNA, 25 bp, Homo sapien
tgggtgtttgaagtgcgagatccac

SEQ ID NO: 2318808 - DNA, 25 bp, Homo sapien
cgagatccacactggtaactgtgac

SEQ ID NO: 2318809 - DNA, 25 bp, Homo sapien
tttttggcaccataaccaaggtgaa

SEQ ID NO: 2318810 - DNA, 25 bp, Homo sapien
actgtgacaataagaaagttgccca

SEQ ID NO: 2318811 - DNA, 25 bp, Homo sapien
tccaagagcctatggccatccacaa

SEQ ID NO: 2318812 - DNA, 25 bp, Homo sapien
tatggccatccacaagcatagggac

SEQ ID NO: 2318813 - DNA, 25 bp, Homo sapien
gcatagggacctgttcattatgact

SEQ ID NO: 2318814 - DNA, 25 bp, Homo sapien
tccacaagcatagggacctgttcat

SEQ ID NO: 2318815 - DNA, 25 bp, Homo sapien
tgagtgattgtcctcttgacagccc

SEQ ID NO: 2318816 - DNA, 25 bp, Homo sapien
atttgggccgcaggtaggtcagact

SEQ ID NO: 2318817 - DNA, 25 bp, Homo sapien
gaaaggaagggccatcatccaagct

SEQ ID NO: 2318818 - DNA, 25 bp, Homo sapien
ctggctgttccgtagaagagggaca

SEQ ID NO: 2318819 - DNA, 25 bp, Homo sapien
aaaacacatctaacttctgtaagac

SEQ ID NO: 2318820 - DNA, 25 bp, Homo sapien
caaaacacatctaacttctgtaaga

SEQ ID NO: 2318821 - DNA, 25 bp, Homo sapien
taggttcaatatcacgtcttccgtg

SEQ ID NO: 2318822 - DNA, 25 bp, Homo sapien
ctgctgccaaaatgcctggtgccac

SEQ ID NO: 2318823 - DNA, 25 bp, Homo sapien
actgtgttcgtggtgcttaggttca

SEQ ID NO: 2318824 - DNA, 25 bp, Homo sapien
gggactgtcttcgaggactgccccg

SEQ ID NO: 2318825 - DNA, 25 bp, Homo sapien
aaataatcacctgtaattgtggatc

SEQ ID NO: 2318826 - DNA, 25 bp, Homo sapien
tggatcatctgtcagtccaagaaga

SEQ ID NO: 2318827 - DNA, 25 bp, Homo sapien
gtccaagaagaataaagtttgctac

SEQ ID NO: 2318828 - DNA, 25 bp, Homo sapien
tttgctactgttgtatggtttctca

SEQ ID NO: 2318829 - DNA, 25 bp, Homo sapien
gatggttagattcccagtgatgctc

SEQ ID NO: 2318830 - DNA, 25 bp, Homo sapien
ggtcttatcacctgttgccatacta

SEQ ID NO: 2318831 - DNA, 25 bp, Homo sapien
tgagatgcaaatccagtagggtgag

SEQ ID NO: 2318832 - DNA, 25 bp, Homo sapien
gctgtgctgcacaatcgttgtaaga

SEQ ID NO: 2318833 - DNA, 25 bp, Homo sapien
gaagccagccatccatgaagcaaag

SEQ ID NO: 2318834 - DNA, 25 bp, Homo sapien
gacccatcaggagtggcggaaaaat

SEQ ID NO: 2318835 - DNA, 25 bp, Homo sapien
catccatgaagcaaagaccagcaag

SEQ ID NO: 2318836 - DNA, 25 bp, Homo sapien
tcaggagtggcggaaaaattattag

SEQ ID NO: 2318837 - DNA, 25 bp, Homo sapien
agctgcagtataggagaaacatcac

SEQ ID NO: 2318838 - DNA, 25 bp, Homo sapien
gagctgcagtataggagaaacatca

SEQ ID NO: 2318839 - DNA, 25 bp, Homo sapien
gctgcagtataggagaaacatcaca

SEQ ID NO: 2318840 - DNA, 25 bp, Homo sapien
cagtgtaaccaggagcgtcaaaatg

SEQ ID NO: 2318841 - DNA, 25 bp, Homo sapien
gaaatggacacgaccaccatgtggg

SEQ ID NO: 2318842 - DNA, 25 bp, Homo sapien
cactaataccagtgtaaccaggagc

SEQ ID NO: 2318843 - DNA, 25 bp, Homo sapien
ttcagaatagtcctgataatatttg

SEQ ID NO: 2318844 - DNA, 25 bp, Homo sapien
ttcttttgctgagggtttcacatac

SEQ ID NO: 2318845 - DNA, 25 bp, Homo sapien
ctttcttttgctgagggtttcacat

SEQ ID NO: 2318846 - DNA, 25 bp, Homo sapien
tttcttttgctgagggtttcacata

SEQ ID NO: 2318847 - DNA, 25 bp, Homo sapien
tctttcttttgctgagggtttcaca

SEQ ID NO: 2318848 - DNA, 25 bp, Homo sapien
ttcaatctttttgactgtgtgctta

SEQ ID NO: 2318849 - DNA, 25 bp, Homo sapien
caatctttttgactgtgtgcttaaa

SEQ ID NO: 2318850 - DNA, 25 bp, Homo sapien
gactgtgtgcttaaaaacatctttt

SEQ ID NO: 2318851 - DNA, 25 bp, Homo sapien
ttttgactgtgtgcttaaaaacatc

SEQ ID NO: 2318852 - DNA, 25 bp, Homo sapien
ccacttcttccatattaatagaagt

SEQ ID NO: 2318853 - DNA, 25 bp, Homo sapien
tcttccatattaatagaagtttcca

SEQ ID NO: 2318854 - DNA, 25 bp, Homo sapien
cttcttccatattaatagaagtttc

SEQ ID NO: 2318855 - DNA, 25 bp, Homo sapien
cttccatattaatagaagtttccat

SEQ ID NO: 2318856 - DNA, 25 bp, Homo sapien
ctgtatagaaaaaagtaataattat

SEQ ID NO: 2318857 - DNA, 25 bp, Homo sapien
tactatcctctgaattttatcagct

SEQ ID NO: 2318858 - DNA, 25 bp, Homo sapien
aactttcaattctgggttatcagtc

SEQ ID NO: 2318859 - DNA, 25 bp, Homo sapien
gatgctcagcacataggtgagaagc

SEQ ID NO: 2318860 - DNA, 25 bp, Homo sapien
aattctgggttatcagtcaaacctg

SEQ ID NO: 2318861 - DNA, 25 bp, Homo sapien
tgagtgtgatgataatcagattgcc

SEQ ID NO: 2318862 - DNA, 25 bp, Homo sapien
aattctgaccctccaagtaggaagg

SEQ ID NO: 2318863 - DNA, 25 bp, Homo sapien
catgggagtcttaaggtgaatatcc

SEQ ID NO: 2318864 - DNA, 25 bp, Homo sapien
gcaaaaaacacttgagtgacacaac

SEQ ID NO: 2318865 - DNA, 25 bp, Homo sapien
caatttagggatgcatgtagtagta

SEQ ID NO: 2318866 - DNA, 25 bp, Homo sapien
catgatggtggtgtaatgcagaggc

SEQ ID NO: 2318867 - DNA, 25 bp, Homo sapien
tgatggtggtgtaatgcagaggctt

SEQ ID NO: 2318868 - DNA, 25 bp, Homo sapien
ctgctcatgatggtggtgtaatgca

SEQ ID NO: 2318869 - DNA, 25 bp, Homo sapien
atggtggtgtaatgcagaggcttac

SEQ ID NO: 2318870 - DNA, 25 bp, Homo sapien
cccaagcacaagatgcatgcagatt

SEQ ID NO: 2318871 - DNA, 25 bp, Homo sapien
caagcacaagatgcatgcagatttt

SEQ ID NO: 2318872 - DNA, 25 bp, Homo sapien
ccaacacccaagcacaagatgcatg

SEQ ID NO: 2318873 - DNA, 25 bp, Homo sapien
cacccaagcacaagatgcatgcaga

SEQ ID NO: 2318874 - DNA, 25 bp, Homo sapien
tgggagtgtggaaagatgatgagaa

SEQ ID NO: 2318875 - DNA, 25 bp, Homo sapien
gggagtgtggaaagatgatgagaaa

SEQ ID NO: 2318876 - DNA, 25 bp, Homo sapien
cagctgccataagaaagggatatca

SEQ ID NO: 2318877 - DNA, 25 bp, Homo sapien
tcaacgacgttggaggcacagaagt

SEQ ID NO: 2318878 - DNA, 25 bp, Homo sapien
ccaggagctgcgtgtctgtgcaaga

SEQ ID NO: 2318879 - DNA, 25 bp, Homo sapien
gaggtattgagcaccgaaattccct

SEQ ID NO: 2318880 - DNA, 25 bp, Homo sapien
gaatgttcatttccttgagaaagag

SEQ ID NO: 2318881 - DNA, 25 bp, Homo sapien
catttccttgagaaagagacaatcc

SEQ ID NO: 2318882 - DNA, 25 bp, Homo sapien
ccttgagaaagagacaatcctgtac

SEQ ID NO: 2318883 - DNA, 25 bp, Homo sapien
taatacaattgaatgttcatttcct

SEQ ID NO: 2318884 - DNA, 25 bp, Homo sapien
taaaccaactgaagcaccagagatg

SEQ ID NO: 2318885 - DNA, 25 bp, Homo sapien
aaccaactgaagcaccagagatggc

SEQ ID NO: 2318886 - DNA, 25 bp, Homo sapien
ataaaccaactgaagcaccagagat

SEQ ID NO: 2318887 - DNA, 25 bp, Homo sapien
accaactgaagcaccagagatggca

SEQ ID NO: 2318888 - DNA, 25 bp, Homo sapien
cagtcagaatgcttgtcgagaatcg

SEQ ID NO: 2318889 - DNA, 25 bp, Homo sapien
tacgaatccagctacccaagagatg

SEQ ID NO: 2318890 - DNA, 25 bp, Homo sapien
gagtcttgagccatggatccagcag

SEQ ID NO: 2318891 - DNA, 25 bp, Homo sapien
tcgtttgtcagtccaagcagagtga

SEQ ID NO: 2318892 - DNA, 25 bp, Homo sapien
tctttgaagcatgtccttgagagct

SEQ ID NO: 2318893 - DNA, 25 bp, Homo sapien
tacagatactcctttagttaaagtc

SEQ ID NO: 2318894 - DNA, 25 bp, Homo sapien
tcccataagtaatagagacaacaat

SEQ ID NO: 2318895 - DNA, 25 bp, Homo sapien
aaagccttggtgtgttgttgaacag

SEQ ID NO: 2318896 - DNA, 25 bp, Homo sapien
aagaaaaaattcagacgcacccatg

SEQ ID NO: 2318897 - DNA, 25 bp, Homo sapien
actagagtctgtcaaggtaaggatg

SEQ ID NO: 2318898 - DNA, 25 bp, Homo sapien
aattacaatctgaagctctgggctg

SEQ ID NO: 2318899 - DNA, 25 bp, Homo sapien
gatcataagacattgcagctagaag

SEQ ID NO: 2318900 - DNA, 25 bp, Homo sapien
taatttgaggataagcgtgagtggt

SEQ ID NO: 2318901 - DNA, 25 bp, Homo sapien
ctaatttgaggataagcgtgagtgg

SEQ ID NO: 2318902 - DNA, 25 bp, Homo sapien
tgaggataagcgtgagtggtggaaa

SEQ ID NO: 2318903 - DNA, 25 bp, Homo sapien
ggataagcgtgagtggtggaaaaat

SEQ ID NO: 2318904 - DNA, 25 bp, Homo sapien
ctgagcatgagagttgtaaaatggg

SEQ ID NO: 2318905 - DNA, 25 bp, Homo sapien
gaatagtgcaaatgatgcatacgta

SEQ ID NO: 2318906 - DNA, 25 bp, Homo sapien
tacgtaggacagaattactaatgcc

SEQ ID NO: 2318907 - DNA, 25 bp, Homo sapien
cagaattactaatgccaaggtgatc

SEQ ID NO: 2318908 - DNA, 25 bp, Homo sapien
agcatgggggcaattgaagtgttca

SEQ ID NO: 2318909 - DNA, 25 bp, Homo sapien
ctcagggtgtaaatagaagggttca

SEQ ID NO: 2318910 - DNA, 25 bp, Homo sapien
tctcagggtgtaaatagaagggttc

SEQ ID NO: 2318911 - DNA, 25 bp, Homo sapien
attgaagtgttcagaatagctactc

SEQ ID NO: 2318912 - DNA, 25 bp, Homo sapien
aaacactactttgtgagccaaatct

SEQ ID NO: 2318913 - DNA, 25 bp, Homo sapien
ctactttgtgagccaaatctttaaa

SEQ ID NO: 2318914 - DNA, 25 bp, Homo sapien
aacactactttgtgagccaaatctt

SEQ ID NO: 2318915 - DNA, 25 bp, Homo sapien
cactactttgtgagccaaatcttta

SEQ ID NO: 2318916 - DNA, 25 bp, Homo sapien
ctgttatttctgtatggtttctcat

SEQ ID NO: 2318917 - DNA, 25 bp, Homo sapien
taattgtgataagggtcaggttccc

SEQ ID NO: 2318918 - DNA, 25 bp, Homo sapien
ccagaaacttgggtatactgacggt

SEQ ID NO: 2318919 - DNA, 25 bp, Homo sapien
tgtgtctgaacaagcaagttgcagc

SEQ ID NO: 2318920 - DNA, 25 bp, Homo sapien
tgaacattagagtaaacgcagcaca

SEQ ID NO: 2318921 - DNA, 25 bp, Homo sapien
gcttgtgaaaaatacagtcttcctt

SEQ ID NO: 2318922 - DNA, 25 bp, Homo sapien
tcttccttgccatgttaatgaaagc

SEQ ID NO: 2318923 - DNA, 25 bp, Homo sapien
tacagtcttccttgccatgttaatg

SEQ ID NO: 2318924 - DNA, 25 bp, Homo sapien
gtgcttgtgaaaaatacagtcttcc

SEQ ID NO: 2318925 - DNA, 25 bp, Homo sapien
taaagatattttggtagaatgataa

SEQ ID NO: 2318926 - DNA, 25 bp, Homo sapien
aagatattttggtagaatgataatt

SEQ ID NO: 2318927 - DNA, 25 bp, Homo sapien
tttaaagatattttggtagaatgat

SEQ ID NO: 2318928 - DNA, 25 bp, Homo sapien
ttaaagatattttggtagaatgata

SEQ ID NO: 2318929 - DNA, 25 bp, Homo sapien
aagaaaaagagttgggctgcacagt

SEQ ID NO: 2318930 - DNA, 25 bp, Homo sapien
caatgacgttggaagcacagtaatc

SEQ ID NO: 2318931 - DNA, 25 bp, Homo sapien
tctttgactggcagacgggattctc

SEQ ID NO: 2318932 - DNA, 25 bp, Homo sapien
tgatgatagtcaggtttccagtaac

SEQ ID NO: 2318933 - DNA, 25 bp, Homo sapien
aactttgtggaccacatttttgaag

SEQ ID NO: 2318934 - DNA, 25 bp, Homo sapien
gaaaaacaactgagctgtacaacta

SEQ ID NO: 2318935 - DNA, 25 bp, Homo sapien
ggtcatctgatagccctagaagaat

SEQ ID NO: 2318936 - DNA, 25 bp, Homo sapien
caccaaggtgagagtgatgatggtc

SEQ ID NO: 2318937 - DNA, 25 bp, Homo sapien
taatggtggccagaaatatagggaa

SEQ ID NO: 2318938 - DNA, 25 bp, Homo sapien
cacaaaagacaagcaatatgcagac

SEQ ID NO: 2318939 - DNA, 25 bp, Homo sapien
ccaaccaagcacaaaagacaagcaa

SEQ ID NO: 2318940 - DNA, 25 bp, Homo sapien
gcacaaaagacaagcaatatgcaga

SEQ ID NO: 2318941 - DNA, 25 bp, Homo sapien
ctgccaaccaagcacaaaagacaag

SEQ ID NO: 2318942 - DNA, 25 bp, Homo sapien
gagccacagtaatctaaccggagaa

SEQ ID NO: 2318943 - DNA, 25 bp, Homo sapien
cacagtaatctaaccggagaaaaag

SEQ ID NO: 2318944 - DNA, 25 bp, Homo sapien
attggagccacagtaatctaaccgg

SEQ ID NO: 2318945 - DNA, 25 bp, Homo sapien
tggagccacagtaatctaaccggag

SEQ ID NO: 2318946 - DNA, 25 bp, Homo sapien
catgtaggatagaatgattaatgcc

SEQ ID NO: 2318947 - DNA, 25 bp, Homo sapien
tgtaggatagaatgattaatgccaa

SEQ ID NO: 2318948 - DNA, 25 bp, Homo sapien
acatgtaggatagaatgattaatgc

SEQ ID NO: 2318949 - DNA, 25 bp, Homo sapien
atgtaggatagaatgattaatgcca

SEQ ID NO: 2318950 - DNA, 25 bp, Homo sapien
tggattcatcataggagcaacggag

SEQ ID NO: 2318951 - DNA, 25 bp, Homo sapien
ccttttttcgctgactagcagaggg

SEQ ID NO: 2318952 - DNA, 25 bp, Homo sapien
tcttttgcagagtgattagcgtaca

SEQ ID NO: 2318953 - DNA, 25 bp, Homo sapien
gaatagctactcctttggtcaacga

SEQ ID NO: 2318954 - DNA, 25 bp, Homo sapien
cactgtgggtcacttgtcaatccaa

SEQ ID NO: 2318955 - DNA, 25 bp, Homo sapien
gaaagatgatcagaaaccctgcaag

SEQ ID NO: 2318956 - DNA, 25 bp, Homo sapien
caagaagggtacacactctggtgct

SEQ ID NO: 2318957 - DNA, 25 bp, Homo sapien
caagagagctgcagcattggagaag

SEQ ID NO: 2318958 - DNA, 25 bp, Homo sapien
ctggcagaagtcttaatgtacatga

SEQ ID NO: 2318959 - DNA, 25 bp, Homo sapien
tgtacatgaagatacagctactgta

SEQ ID NO: 2318960 - DNA, 25 bp, Homo sapien
gctactgtaagagatggagacaact

SEQ ID NO: 2318961 - DNA, 25 bp, Homo sapien
caactatcatatgggaggagcaagt

SEQ ID NO: 2318962 - DNA, 25 bp, Homo sapien
gtgtatatgaagggattcaagagag

SEQ ID NO: 2318963 - DNA, 25 bp, Homo sapien
gtgtgtatatgaagggattcaagag

SEQ ID NO: 2318964 - DNA, 25 bp, Homo sapien
agtgtgtatatgaagggattcaaga

SEQ ID NO: 2318965 - DNA, 25 bp, Homo sapien
tgtgtatatgaagggattcaagaga

SEQ ID NO: 2318966 - DNA, 25 bp, Homo sapien
aaatcatcttctggaccatgctctt

SEQ ID NO: 2318967 - DNA, 25 bp, Homo sapien
atcttctggaccatgctcttgaagg

SEQ ID NO: 2318968 - DNA, 25 bp, Homo sapien
aatcatcttctggaccatgctcttg

SEQ ID NO: 2318969 - DNA, 25 bp, Homo sapien
tcatcttctggaccatgctcttgaa

SEQ ID NO: 2318970 - DNA, 25 bp, Homo sapien
attttcttggatataggtgagggga

SEQ ID NO: 2318971 - DNA, 25 bp, Homo sapien
tggatataggtgaggggagtgaaac

SEQ ID NO: 2318972 - DNA, 25 bp, Homo sapien
aagtcattttcttggatataggtga

SEQ ID NO: 2318973 - DNA, 25 bp, Homo sapien
tcattttcttggatataggtgaggg

SEQ ID NO: 2318974 - DNA, 25 bp, Homo sapien
ttacgatgctgaccagaaacctagg

SEQ ID NO: 2318975 - DNA, 25 bp, Homo sapien
ggtgcacatctatcaaagtgagagt

SEQ ID NO: 2318976 - DNA, 25 bp, Homo sapien
tggtcttatcccctgttacgatgct

SEQ ID NO: 2318977 - DNA, 25 bp, Homo sapien
tgtcaggttcccagttatactcagt

SEQ ID NO: 2318978 - DNA, 25 bp, Homo sapien
cattattgttgtgtagtgcagtggc

SEQ ID NO: 2318979 - DNA, 25 bp, Homo sapien
aagagctaattacaagctggatgca

SEQ ID NO: 2318980 - DNA, 25 bp, Homo sapien
ggatgcagactctgctgttcattat

SEQ ID NO: 2318981 - DNA, 25 bp, Homo sapien
tcataggacatagcagtcaaaagga

SEQ ID NO: 2318982 - DNA, 25 bp, Homo sapien
aattacaggtggaaagataatgaga

SEQ ID NO: 2318983 - DNA, 25 bp, Homo sapien
ttacaggtggaaagataatgagaaa

SEQ ID NO: 2318984 - DNA, 25 bp, Homo sapien
tggaaagataatgagaaatccagct

SEQ ID NO: 2318985 - DNA, 25 bp, Homo sapien
gaaagataatgagaaatccagctag

SEQ ID NO: 2318986 - DNA, 25 bp, Homo sapien
cacagaaatccagttgaagccccat

SEQ ID NO: 2318987 - DNA, 25 bp, Homo sapien
tcccatgaactctagaaacgctgtg

SEQ ID NO: 2318988 - DNA, 25 bp, Homo sapien
gagcactgctatacccttggtcaaa

SEQ ID NO: 2318989 - DNA, 25 bp, Homo sapien
ggctacagaggtattgagcactgct

SEQ ID NO: 2318990 - DNA, 25 bp, Homo sapien
tttgatcaagttctgaaaagactgt

SEQ ID NO: 2318991 - DNA, 25 bp, Homo sapien
ttttttgatcaagttctgaaaagac

SEQ ID NO: 2318992 - DNA, 25 bp, Homo sapien
aacattttttgatcaagttctgaaa

SEQ ID NO: 2318993 - DNA, 25 bp, Homo sapien
tgatcaagttctgaaaagactgttt

SEQ ID NO: 2318994 - DNA, 25 bp, Homo sapien
gtaactctgggttatctgtaaatcc

SEQ ID NO: 2318995 - DNA, 25 bp, Homo sapien
cataaagaagaatatcacaacttgt

SEQ ID NO: 2318996 - DNA, 25 bp, Homo sapien
tacactcaataagtatgtgatcaac

SEQ ID NO: 2318997 - DNA, 25 bp, Homo sapien
aatgatgatcatgtttccacttaca

SEQ ID NO: 2318998 - DNA, 25 bp, Homo sapien
tgccataagctctagaaactgtgtg

SEQ ID NO: 2318999 - DNA, 25 bp, Homo sapien
ccatgagtgtgaatactgctagcaa

SEQ ID NO: 2319000 - DNA, 25 bp, Homo sapien
tgaaatggtcaatagtgctggagtc

SEQ ID NO: 2319001 - DNA, 25 bp, Homo sapien
gagagaaccaccaaggccaaagtta

SEQ ID NO: 2319002 - DNA, 25 bp, Homo sapien
tgaattccctaagggcctgtttcac

SEQ ID NO: 2319003 - DNA, 25 bp, Homo sapien
ggtattaagcactgctacacctttg

SEQ ID NO: 2319004 - DNA, 25 bp, Homo sapien
cacctgctggtttcttaaggtataa

SEQ ID NO: 2319005 - DNA, 25 bp, Homo sapien
tattgcttgttcaatgataatattt

SEQ ID NO: 2319006 - DNA, 25 bp, Homo sapien
tgtggcacaggagtaccaattttcc

SEQ ID NO: 2319007 - DNA, 25 bp, Homo sapien
aaaaggtcaaaaccacatgcctgtg

SEQ ID NO: 2319008 - DNA, 25 bp, Homo sapien
gatgaaagacatcaggatcccacca

SEQ ID NO: 2319009 - DNA, 25 bp, Homo sapien
tttcctgtcctaatctcagaggtgg

SEQ ID NO: 2319010 - DNA, 25 bp, Homo sapien
gaaatgtgggcaagaagacacttcc

SEQ ID NO: 2319011 - DNA, 25 bp, Homo sapien
gggagggatgcaaacaaataacaaa

SEQ ID NO: 2319012 - DNA, 25 bp, Homo sapien
caggtttctgggcacatggcctaaa

SEQ ID NO: 2319013 - DNA, 25 bp, Homo sapien
ccctcttttgtgtccagtggagcca

SEQ ID NO: 2319014 - DNA, 25 bp, Homo sapien
tagagacttggttggcatcttctgc

SEQ ID NO: 2319015 - DNA, 25 bp, Homo sapien
ggatccccagccagtatagagactt

SEQ ID NO: 2319016 - DNA, 25 bp, Homo sapien
ggagtataagtacctgccttaggca

SEQ ID NO: 2319017 - DNA, 25 bp, Homo sapien
ggctgttgtcattctttctgcatcc

SEQ ID NO: 2319018 - DNA, 25 bp, Homo sapien
tatgagtgccatgaacatcaagctg

SEQ ID NO: 2319019 - DNA, 25 bp, Homo sapien
taatcccagccgttggagtgtagag

SEQ ID NO: 2319020 - DNA, 25 bp, Homo sapien
ggagacctaaggtggccctcttgca

SEQ ID NO: 2319021 - DNA, 25 bp, Homo sapien
cctacaccggaattacatggcatca

SEQ ID NO: 2319022 - DNA, 25 bp, Homo sapien
ttgattcctgtcagagattactgat

SEQ ID NO: 2319023 - DNA, 25 bp, Homo sapien
attgattcctgtcagagattactga

SEQ ID NO: 2319024 - DNA, 25 bp, Homo sapien
tgtcagagattactgataaaatcaa

SEQ ID NO: 2319025 - DNA, 25 bp, Homo sapien
tgcggattatccgtcagacccagaa

SEQ ID NO: 2319026 - DNA, 25 bp, Homo sapien
gaaaaatagctgagctgcacaagca

SEQ ID NO: 2319027 - DNA, 25 bp, Homo sapien
caggaggaaaaactccgttgagcca

SEQ ID NO: 2319028 - DNA, 25 bp, Homo sapien
tgtcccctgttagaatgctgatcag

SEQ ID NO: 2319029 - DNA, 25 bp, Homo sapien
tagagacaacaatcacatgtgagga

SEQ ID NO: 2319030 - DNA, 25 bp, Homo sapien
gcagagtcacaggtaaagtggtcaa

SEQ ID NO: 2319031 - DNA, 25 bp, Homo sapien
cgacagaggtattgagtatagctac

SEQ ID NO: 2319032 - DNA, 25 bp, Homo sapien
tggattcagcataggagcgacagag

SEQ ID NO: 2319033 - DNA, 25 bp, Homo sapien
cttgtaagtgtctgtatctgcaggt

SEQ ID NO: 2319034 - DNA, 25 bp, Homo sapien
ttgtaagtgtctgtatctgcaggta

SEQ ID NO: 2319035 - DNA, 25 bp, Homo sapien
atgtgctcctggaagaacggtgttg

SEQ ID NO: 2319036 - DNA, 25 bp, Homo sapien
atcttgagcataggcaactggatga

SEQ ID NO: 2319037 - DNA, 25 bp, Homo sapien
caaaatcttgagcataggcaactgg

SEQ ID NO: 2319038 - DNA, 25 bp, Homo sapien
cggtgttgggtgtctgcactcaaaa

SEQ ID NO: 2319039 - DNA, 25 bp, Homo sapien
gagaatgttgctgccactcaaagtc

SEQ ID NO: 2319040 - DNA, 25 bp, Homo sapien
actcgcagcagagaatgttgctgcc

SEQ ID NO: 2319041 - DNA, 25 bp, Homo sapien
tactcgcagcagagaatgttgctgc

SEQ ID NO: 2319042 - DNA, 25 bp, Homo sapien
ttactcgcagcagagaatgttgctg

SEQ ID NO: 2319043 - DNA, 25 bp, Homo sapien
tattgtacaagaatctgggaatgca

SEQ ID NO: 2319044 - DNA, 25 bp, Homo sapien
cagactgtagtaaatgagacttcta

SEQ ID NO: 2319045 - DNA, 25 bp, Homo sapien
gggtgataatagtcaggttccctgt

SEQ ID NO: 2319046 - DNA, 25 bp, Homo sapien
tggtccaccaatgtgagggtgataa

SEQ ID NO: 2319047 - DNA, 25 bp, Homo sapien
gactggcacaagcattgtaggtaat

SEQ ID NO: 2319048 - DNA, 25 bp, Homo sapien
gaatatttgactggcacaagcattg

SEQ ID NO: 2319049 - DNA, 25 bp, Homo sapien
acaaagaatatttgactggcacaag

SEQ ID NO: 2319050 - DNA, 25 bp, Homo sapien
cattgtaggtaatggtattgtcccc

SEQ ID NO: 2319051 - DNA, 25 bp, Homo sapien
tgatgaccacataatgaaggggttt

SEQ ID NO: 2319052 - DNA, 25 bp, Homo sapien
catgatgaccacataatgaaggggt

SEQ ID NO: 2319053 - DNA, 25 bp, Homo sapien
ttcatgatgaccacataatgaaggg

SEQ ID NO: 2319054 - DNA, 25 bp, Homo sapien
tgttcatgatgaccacataatgaag

SEQ ID NO: 2319055 - DNA, 25 bp, Homo sapien
gaggcctaagctaagtggtggaaca

SEQ ID NO: 2319056 - DNA, 25 bp, Homo sapien
cacaaactagggtgataatgagtgc

SEQ ID NO: 2319057 - DNA, 25 bp, Homo sapien
gactatgtacaagtaggacagaatc

SEQ ID NO: 2319058 - DNA, 25 bp, Homo sapien
tcacagaattcgagctggaggccta

SEQ ID NO: 2319059 - DNA, 25 bp, Homo sapien
ttccataggcaatggaaaccacaat

SEQ ID NO: 2319060 - DNA, 25 bp, Homo sapien
gaaaccacaatcatgtgggatgaac

SEQ ID NO: 2319061 - DNA, 25 bp, Homo sapien
tagatgaagatgcagcttccatagg

SEQ ID NO: 2319062 - DNA, 25 bp, Homo sapien
tgggatgaacaggtagaaaaggcct

SEQ ID NO: 2319063 - DNA, 25 bp, Homo sapien
ggttcaacaagggtgcgacagaagt

SEQ ID NO: 2319064 - DNA, 25 bp, Homo sapien
gttcaacaagggtgcgacagaagta

SEQ ID NO: 2319065 - DNA, 25 bp, Homo sapien
ttgagagaaatgcaatcctctttat

SEQ ID NO: 2319066 - DNA, 25 bp, Homo sapien
gaaatgcaatcctctttatagagtc

SEQ ID NO: 2319067 - DNA, 25 bp, Homo sapien
aatcctctttatagagtcactgaaa

SEQ ID NO: 2319068 - DNA, 25 bp, Homo sapien
tgcaatcctctttatagagtcactg

SEQ ID NO: 2319069 - DNA, 25 bp, Homo sapien
tctcttcatgtctttgtcagttgca

SEQ ID NO: 2319070 - DNA, 25 bp, Homo sapien
tcatgtctttgtcagttgcatgcat

SEQ ID NO: 2319071 - DNA, 25 bp, Homo sapien
ctcttcatgtctttgtcagttgcat

SEQ ID NO: 2319072 - DNA, 25 bp, Homo sapien
cttcatgtctttgtcagttgcatgc

SEQ ID NO: 2319073 - DNA, 25 bp, Homo sapien
tctcttggtattggattcagctttg

SEQ ID NO: 2319074 - DNA, 25 bp, Homo sapien
gttctcttggtattggattcagctt

SEQ ID NO: 2319075 - DNA, 25 bp, Homo sapien
tcttggtattggattcagctttgtt

SEQ ID NO: 2319076 - DNA, 25 bp, Homo sapien
tggtattggattcagctttgtttgg

SEQ ID NO: 2319077 - DNA, 25 bp, Homo sapien
ccaaaactacatgtaaatgtcagag

SEQ ID NO: 2319078 - DNA, 25 bp, Homo sapien
tccaaaactacatgtaaatgtcaga

SEQ ID NO: 2319079 - DNA, 25 bp, Homo sapien
tcttctgtcagtcccagaaggatga

SEQ ID NO: 2319080 - DNA, 25 bp, Homo sapien
gatccaacatggtgagggcgataat

SEQ ID NO: 2319081 - DNA, 25 bp, Homo sapien
gtataagaatcttggaacacaggta

SEQ ID NO: 2319082 - DNA, 25 bp, Homo sapien
tcagttaccccaaagaggtctgcaa

SEQ ID NO: 2319083 - DNA, 25 bp, Homo sapien
gattgccatataatgcaagggtttg

SEQ ID NO: 2319084 - DNA, 25 bp, Homo sapien
tttgttgctcatgattgccatataa

SEQ ID NO: 2319085 - DNA, 25 bp, Homo sapien
ttgctcatgattgccatataatgca

SEQ ID NO: 2319086 - DNA, 25 bp, Homo sapien
tgattgccatataatgcaagggttt

SEQ ID NO: 2319087 - DNA, 25 bp, Homo sapien
ggcaatgcatcacagccaaaatgat

SEQ ID NO: 2319088 - DNA, 25 bp, Homo sapien
taagctaagtggtgggaggataatc

SEQ ID NO: 2319089 - DNA, 25 bp, Homo sapien
taagtgctgccatccaacaacaaat

SEQ ID NO: 2319090 - DNA, 25 bp, Homo sapien
taaaggttaatacagcagaggctac

SEQ ID NO: 2319091 - DNA, 25 bp, Homo sapien
gaattgttcttatgatatatgtgta

SEQ ID NO: 2319092 - DNA, 25 bp, Homo sapien
tgttcttatgatatatgtgtaggac

SEQ ID NO: 2319093 - DNA, 25 bp, Homo sapien
tagaattgttcttatgatatatgtg

SEQ ID NO: 2319094 - DNA, 25 bp, Homo sapien
tttagaattgttcttatgatatatg

SEQ ID NO: 2319095 - DNA, 25 bp, Homo sapien
agtgatggaaaccacagtaatatgt

SEQ ID NO: 2319096 - DNA, 25 bp, Homo sapien
gaaaccacagtaatatgtgaagaac

SEQ ID NO: 2319097 - DNA, 25 bp, Homo sapien
gatggaaaccacagtaatatgtgaa

SEQ ID NO: 2319098 - DNA, 25 bp, Homo sapien
tggaaaccacagtaatatgtgaaga

SEQ ID NO: 2319099 - DNA, 25 bp, Homo sapien
atggatgaaataagcactgacacac

SEQ ID NO: 2319100 - DNA, 25 bp, Homo sapien
aagagtatatatgaaagaattcaac

SEQ ID NO: 2319101 - DNA, 25 bp, Homo sapien
aagaattcaacataggtgatatgga

SEQ ID NO: 2319102 - DNA, 25 bp, Homo sapien
ttgctcattcctaagagtatatatg

SEQ ID NO: 2319103 - DNA, 25 bp, Homo sapien
gagtgagtcatgaaaggcttgttta

SEQ ID NO: 2319104 - DNA, 25 bp, Homo sapien
gtgagtcatgaaaggcttgtttaac

SEQ ID NO: 2319105 - DNA, 25 bp, Homo sapien
ttttgagtgagtcatgaaaggcttg

SEQ ID NO: 2319106 - DNA, 25 bp, Homo sapien
ttgagtgagtcatgaaaggcttgtt

SEQ ID NO: 2319107 - DNA, 25 bp, Homo sapien
tatagcttggtctgtgtttaaaaat

SEQ ID NO: 2319108 - DNA, 25 bp, Homo sapien
taacagaaaaattagagcagagaaa

SEQ ID NO: 2319109 - DNA, 25 bp, Homo sapien
ctatagcttggtctgtgtttaaaaa

SEQ ID NO: 2319110 - DNA, 25 bp, Homo sapien
cagaaaaattagagcagagaaaggg

SEQ ID NO: 2319111 - DNA, 25 bp, Homo sapien
tctgttagtcccaccaggataagtg

SEQ ID NO: 2319112 - DNA, 25 bp, Homo sapien
aggtgggagtccacaaaagtgaacg

SEQ ID NO: 2319113 - DNA, 25 bp, Homo sapien
tagatttgtgtcatctgttagtccc

SEQ ID NO: 2319114 - DNA, 25 bp, Homo sapien
aaaaagcagaatctgtagatttgtg

SEQ ID NO: 2319115 - DNA, 25 bp, Homo sapien
tgagacttccaagatggaaaaattc

SEQ ID NO: 2319116 - DNA, 25 bp, Homo sapien
tgtaaatgagacttccaagatggaa

SEQ ID NO: 2319117 - DNA, 25 bp, Homo sapien
tccaagatggaaaaattccggagga

SEQ ID NO: 2319118 - DNA, 25 bp, Homo sapien
agttgtaaatgagacttccaagatg

SEQ ID NO: 2319119 - DNA, 25 bp, Homo sapien
gcacatgcattataggtaacagtat

SEQ ID NO: 2319120 - DNA, 25 bp, Homo sapien
catgcattataggtaacagtatttt

SEQ ID NO: 2319121 - DNA, 25 bp, Homo sapien
ggcacatgcattataggtaacagta

SEQ ID NO: 2319122 - DNA, 25 bp, Homo sapien
cacatgcattataggtaacagtatt

SEQ ID NO: 2319123 - DNA, 25 bp, Homo sapien
gatggtcgtgtaatgcaggggtttg

SEQ ID NO: 2319124 - DNA, 25 bp, Homo sapien
gtgtaatgcaggggtttgcagatgg

SEQ ID NO: 2319125 - DNA, 25 bp, Homo sapien
taatgcaggggtttgcagatggcta

SEQ ID NO: 2319126 - DNA, 25 bp, Homo sapien
aatgcaggggtttgcagatggctac

SEQ ID NO: 2319127 - DNA, 25 bp, Homo sapien
tatatgacagccagtgaggaacttg

SEQ ID NO: 2319128 - DNA, 25 bp, Homo sapien
gctcaaagcccatgccaaatggtgg

SEQ ID NO: 2319129 - DNA, 25 bp, Homo sapien
tagagcaggtaatcttcaggatggg

SEQ ID NO: 2319130 - DNA, 25 bp, Homo sapien
caaggtaaacaggagtgtcaacacc

SEQ ID NO: 2319131 - DNA, 25 bp, Homo sapien
tgtaagtgtaggacataatcacaca

SEQ ID NO: 2319132 - DNA, 25 bp, Homo sapien
gggaatctgagaatggtcctgatga

SEQ ID NO: 2319133 - DNA, 25 bp, Homo sapien
tccataagtgatagaaaccacaatt

SEQ ID NO: 2319134 - DNA, 25 bp, Homo sapien
taacatagataaagatgcagcttcc

SEQ ID NO: 2319135 - DNA, 25 bp, Homo sapien
caatccttttgatcatgtctttgaa

SEQ ID NO: 2319136 - DNA, 25 bp, Homo sapien
aaagcctgtatcagcactgacacca

SEQ ID NO: 2319137 - DNA, 25 bp, Homo sapien
ttgaaagcctgtatcagcactgaca

SEQ ID NO: 2319138 - DNA, 25 bp, Homo sapien
gttttttgagatagatgcaatcctt

SEQ ID NO: 2319139 - DNA, 25 bp, Homo sapien
aatgcaggtctgtgggctctgagac

SEQ ID NO: 2319140 - DNA, 25 bp, Homo sapien
atgcaggtctgtgggctctgagaca

SEQ ID NO: 2319141 - DNA, 25 bp, Homo sapien
tctgtgggctctgagacatggccat

SEQ ID NO: 2319142 - DNA, 25 bp, Homo sapien
aggtctgtgggctctgagacatggc

SEQ ID NO: 2319143 - DNA, 25 bp, Homo sapien
gatttgtaaggcccagtagaataaa

SEQ ID NO: 2319144 - DNA, 25 bp, Homo sapien
ggatacttagcatgtaggtgaggaa

SEQ ID NO: 2319145 - DNA, 25 bp, Homo sapien
agatttcctaggatacttagcatgt

SEQ ID NO: 2319146 - DNA, 25 bp, Homo sapien
gtctagtaaggtgagggtgataata

SEQ ID NO: 2319147 - DNA, 25 bp, Homo sapien
taaccatgagagtcacaacggccaa

SEQ ID NO: 2319148 - DNA, 25 bp, Homo sapien
cacgagaggcccatagtcacagtaa

SEQ ID NO: 2319149 - DNA, 25 bp, Homo sapien
caacggccaagaggatgaccatcag

SEQ ID NO: 2319150 - DNA, 25 bp, Homo sapien
taagaggcttgtgtctgagcaggca

SEQ ID NO: 2319151 - DNA, 25 bp, Homo sapien
tctttttgactgagtccttgaaagc

SEQ ID NO: 2319152 - DNA, 25 bp, Homo sapien
tttcacaatctttttgactgagtcc

SEQ ID NO: 2319153 - DNA, 25 bp, Homo sapien
cacaatctttttgactgagtccttg

SEQ ID NO: 2319154 - DNA, 25 bp, Homo sapien
gactgagtccttgaaagcttgtttc

SEQ ID NO: 2319155 - DNA, 25 bp, Homo sapien
gtttcagtctttacaactccagaga

SEQ ID NO: 2319156 - DNA, 25 bp, Homo sapien
ttcagggagtggttgaatattcaca

SEQ ID NO: 2319157 - DNA, 25 bp, Homo sapien
gtcttcagggagtggttgaatattc

SEQ ID NO: 2319158 - DNA, 25 bp, Homo sapien
ttcacatctgcatcagtttcagtct

SEQ ID NO: 2319159 - DNA, 25 bp, Homo sapien
agaggtgctctgaaatgaacggatg

SEQ ID NO: 2319160 - DNA, 25 bp, Homo sapien
aagaggtgctctgaaatgaacggat

SEQ ID NO: 2319161 - DNA, 25 bp, Homo sapien
gaggtgctctgaaatgaacggatga

SEQ ID NO: 2319162 - DNA, 25 bp, Homo sapien
gaatgtatccccttcttttgcagag

SEQ ID NO: 2319163 - DNA, 25 bp, Homo sapien
tctgttggatgcacaaaagtcctgc

SEQ ID NO: 2319164 - DNA, 25 bp, Homo sapien
gggacatctgttagacccagaagga

SEQ ID NO: 2319165 - DNA, 25 bp, Homo sapien
taaaactctgtagccccaaggaaca

SEQ ID NO: 2319166 - DNA, 25 bp, Homo sapien
aagctaacggtcttggtccccatgg

SEQ ID NO: 2319167 - DNA, 25 bp, Homo sapien
tcttgggcacgatgactgtctggaa

SEQ ID NO: 2319168 - DNA, 25 bp, Homo sapien
gaagctctttggtatccgtcaggcc

SEQ ID NO: 2319169 - DNA, 25 bp, Homo sapien
tcaggttcccagagacagtcacaag

SEQ ID NO: 2319170 - DNA, 25 bp, Homo sapien
agctgtgtgcagactctactactta

SEQ ID NO: 2319171 - DNA, 25 bp, Homo sapien
tgtgtgcagactctactacttatga

SEQ ID NO: 2319172 - DNA, 25 bp, Homo sapien
agactctactacttatgagcatggg

SEQ ID NO: 2319173 - DNA, 25 bp, Homo sapien
tgtgcagactctactacttatgagc

SEQ ID NO: 2319174 - DNA, 25 bp, Homo sapien
taaggccagggtaaaatccaccatc

SEQ ID NO: 2319175 - DNA, 25 bp, Homo sapien
gacatcaacccactttcctggagag

SEQ ID NO: 2319176 - DNA, 25 bp, Homo sapien
gccaaacagtgctactaaggccagg

SEQ ID NO: 2319177 - DNA, 25 bp, Homo sapien
cagggtgatgagtaccaaggtgcca

SEQ ID NO: 2319178 - DNA, 25 bp, Homo sapien
tttttctgactaggtctttcattac

SEQ ID NO: 2319179 - DNA, 25 bp, Homo sapien
ctagatgtagatataaacttggtgg

SEQ ID NO: 2319180 - DNA, 25 bp, Homo sapien
tgtagatataaacttggtgggggag

SEQ ID NO: 2319181 - DNA, 25 bp, Homo sapien
agatgtagatataaacttggtgggg

SEQ ID NO: 2319182 - DNA, 25 bp, Homo sapien
atgtagatataaacttggtggggga

SEQ ID NO: 2319183 - DNA, 25 bp, Homo sapien
gcagagtttattaatctgtgagtac

SEQ ID NO: 2319184 - DNA, 25 bp, Homo sapien
tcctccttggcaattgtatttaggc

SEQ ID NO: 2319185 - DNA, 25 bp, Homo sapien
ggcaattgtatttaggcagagttta

SEQ ID NO: 2319186 - DNA, 25 bp, Homo sapien
ttaatctgtgagtactccccttcag

SEQ ID NO: 2319187 - DNA, 25 bp, Homo sapien
ttatttagaaataacaagcaacatt

SEQ ID NO: 2319188 - DNA, 25 bp, Homo sapien
ggcacagccaagaagagaagttatt

SEQ ID NO: 2319189 - DNA, 25 bp, Homo sapien
tatttagaaataacaagcaacattt

SEQ ID NO: 2319190 - DNA, 25 bp, Homo sapien
tgaggcacagccaagaagagaagtt

SEQ ID NO: 2319191 - DNA, 25 bp, Homo sapien
cagaaggaggaattcaggcagtgta

SEQ ID NO: 2319192 - DNA, 25 bp, Homo sapien
ggaattcaggcagtgtagtatggtt

SEQ ID NO: 2319193 - DNA, 25 bp, Homo sapien
ggcagtgtagtatggttttccccag

SEQ ID NO: 2319194 - DNA, 25 bp, Homo sapien
ttcaggcagtgtagtatggttttcc

SEQ ID NO: 2319195 - DNA, 25 bp, Homo sapien
ccagcaaggtgaccaggtagaccag

SEQ ID NO: 2319196 - DNA, 25 bp, Homo sapien
aggaggatgatcagggagttaccca

SEQ ID NO: 2319197 - DNA, 25 bp, Homo sapien
tgaggaggatgatcagggagttacc

SEQ ID NO: 2319198 - DNA, 25 bp, Homo sapien
aaggtgaccaggtagaccagaagca

SEQ ID NO: 2319199 - DNA, 25 bp, Homo sapien
tcacagagaaagtgcgggatgatcg

SEQ ID NO: 2319200 - DNA, 25 bp, Homo sapien
ttgctaggatggcacccaggatgcg

SEQ ID NO: 2319201 - DNA, 25 bp, Homo sapien
tctgtggtaacagaggagcctgcct

SEQ ID NO: 2319202 - DNA, 25 bp, Homo sapien
tgaagacgtacatctgggctgcaca

SEQ ID NO: 2319203 - DNA, 25 bp, Homo sapien
tcttcaccaagtgtcgcagggccct

SEQ ID NO: 2319204 - DNA, 25 bp, Homo sapien
ccaagtgtcgcagggccctcctcac

SEQ ID NO: 2319205 - DNA, 25 bp, Homo sapien
caccaagtgtcgcagggccctcctc

SEQ ID NO: 2319206 - DNA, 25 bp, Homo sapien
ttcaccaagtgtcgcagggccctcc

SEQ ID NO: 2319207 - DNA, 25 bp, Homo sapien
tgagagtggggtttaaatccagtcc

SEQ ID NO: 2319208 - DNA, 25 bp, Homo sapien
tgggataagaggcaatatgtagatt

SEQ ID NO: 2319209 - DNA, 25 bp, Homo sapien
gaggcaatatgtagatttatctctg

SEQ ID NO: 2319210 - DNA, 25 bp, Homo sapien
gaggtgctgcatgatttctgtgaga

SEQ ID NO: 2319211 - DNA, 25 bp, Homo sapien
gcttcccgctgctgggtttcttcgc

SEQ ID NO: 2319212 - DNA, 25 bp, Homo sapien
gccgaatgcgcttgcgcagggccat

SEQ ID NO: 2319213 - DNA, 25 bp, Homo sapien
ttcgccctccctggcatcgccgaat

SEQ ID NO: 2319214 - DNA, 25 bp, Homo sapien
cctggcatcgccgaatgcgcttgcg

SEQ ID NO: 2319215 - DNA, 25 bp, Homo sapien
agtctcggatgcaggccgattccct

SEQ ID NO: 2319216 - DNA, 25 bp, Homo sapien
tctcggatgcaggccgattcccttc

SEQ ID NO: 2319217 - DNA, 25 bp, Homo sapien
cccacgccacagcggcggagtctcg

SEQ ID NO: 2319218 - DNA, 25 bp, Homo sapien
cggatgcaggccgattcccttcccc

SEQ ID NO: 2319219 - DNA, 25 bp, Homo sapien
ggcaatggcacagcatgactgagct

SEQ ID NO: 2319220 - DNA, 25 bp, Homo sapien
tggacaactccctgatcgtcgtcct

SEQ ID NO: 2319221 - DNA, 25 bp, Homo sapien
tttgtctttgcctggatgcttcctg

SEQ ID NO: 2319222 - DNA, 25 bp, Homo sapien
gccttctgttttgggcagtgctctg

SEQ ID NO: 2319223 - DNA, 25 bp, Homo sapien
cagggcaacggtaaggctgtgaacc

SEQ ID NO: 2319224 - DNA, 25 bp, Homo sapien
gggcaacggtaaggctgtgaaccac

SEQ ID NO: 2319225 - DNA, 25 bp, Homo sapien
cgtcagggcaacggtaaggctgtga

SEQ ID NO: 2319226 - DNA, 25 bp, Homo sapien
tcagggcaacggtaaggctgtgaac

SEQ ID NO: 2319227 - DNA, 25 bp, Homo sapien
gctggctaggtgtggcagtaagtgg

SEQ ID NO: 2319228 - DNA, 25 bp, Homo sapien
taagtgggcctagatggaagtggta

SEQ ID NO: 2319229 - DNA, 25 bp, Homo sapien
gctaggtgtggcagtaagtgggcct

SEQ ID NO: 2319230 - DNA, 25 bp, Homo sapien
atggaagtggtaggccagatagtca

SEQ ID NO: 2319231 - DNA, 25 bp, Homo sapien
cctcccgctgtgataggactttgct

SEQ ID NO: 2319232 - DNA, 25 bp, Homo sapien
ccctcccgctgtgataggactttgc

SEQ ID NO: 2319233 - DNA, 25 bp, Homo sapien
cccctcccgctgtgataggactttg

SEQ ID NO: 2319234 - DNA, 25 bp, Homo sapien
tcttgggagtcagcacggccatcag

SEQ ID NO: 2319235 - DNA, 25 bp, Homo sapien
tgggagtcagcacggccatcaggta

SEQ ID NO: 2319236 - DNA, 25 bp, Homo sapien
ttgggagtcagcacggccatcaggt

SEQ ID NO: 2319237 - DNA, 25 bp, Homo sapien
gctcttgggagtcagcacggccatc

SEQ ID NO: 2319238 - DNA, 25 bp, Homo sapien
ctgaaagttggctccggttccgcag

SEQ ID NO: 2319239 - DNA, 25 bp, Homo sapien
ctgcagcccggtgggtagaactgaa

SEQ ID NO: 2319240 - DNA, 25 bp, Homo sapien
caaaccgctcatattggaggtgcct

SEQ ID NO: 2319241 - DNA, 25 bp, Homo sapien
tggctgaagagctcccgtttcttgc

SEQ ID NO: 2319242 - DNA, 25 bp, Homo sapien
tacctcagacgccccattctggggg

SEQ ID NO: 2319243 - DNA, 25 bp, Homo sapien
gcggctgatgctgcgtttgcctgcc

SEQ ID NO: 2319244 - DNA, 25 bp, Homo sapien
tggggcggctgatgctgcgtttgcc

SEQ ID NO: 2319245 - DNA, 25 bp, Homo sapien
gatgctgcgtttgcctgccccacac

SEQ ID NO: 2319246 - DNA, 25 bp, Homo sapien
aataaccgagggcatgcagaagggg

SEQ ID NO: 2319247 - DNA, 25 bp, Homo sapien
cagaataaccgagggcatgcagaag

SEQ ID NO: 2319248 - DNA, 25 bp, Homo sapien
agaataaccgagggcatgcagaagg

SEQ ID NO: 2319249 - DNA, 25 bp, Homo sapien
aaccgagggcatgcagaaggggaaa

SEQ ID NO: 2319250 - DNA, 25 bp, Homo sapien
ctcataactgaaaggagtggctggt

SEQ ID NO: 2319251 - DNA, 25 bp, Homo sapien
atgtgaagaacctcataactgaaag

SEQ ID NO: 2319252 - DNA, 25 bp, Homo sapien
ttctgcatcccctgctaccgccttc

SEQ ID NO: 2319253 - DNA, 25 bp, Homo sapien
gctaccgccttcaaagtgcatgtga

SEQ ID NO: 2319254 - DNA, 25 bp, Homo sapien
ttggatttcggagaactgggcgttc

SEQ ID NO: 2319255 - DNA, 25 bp, Homo sapien
caatgtgtttccaggtgggctcgaa

SEQ ID NO: 2319256 - DNA, 25 bp, Homo sapien
gctcgaaaacttgctgccacatgaa

SEQ ID NO: 2319257 - DNA, 25 bp, Homo sapien
gggcgttctcaagatccttccaggt

SEQ ID NO: 2319258 - DNA, 25 bp, Homo sapien
tggcttgttctaattggaggctggg

SEQ ID NO: 2319259 - DNA, 25 bp, Homo sapien
tcagtggaagatagataggctggtg

SEQ ID NO: 2319260 - DNA, 25 bp, Homo sapien
ctggtgggtggcttgttctaattgg

SEQ ID NO: 2319261 - DNA, 25 bp, Homo sapien
gaaggagcaaatgagtgccttggag

SEQ ID NO: 2319262 - DNA, 25 bp, Homo sapien
tgaagttagagattgccctggcaga

SEQ ID NO: 2319263 - DNA, 25 bp, Homo sapien
gagaggagctttaccatgggaacga

SEQ ID NO: 2319264 - DNA, 25 bp, Homo sapien
ccctgggtcagcgtagaagtagagc

SEQ ID NO: 2319265 - DNA, 25 bp, Homo sapien
tgtgaccagttcctagagacgcatg

SEQ ID NO: 2319266 - DNA, 25 bp, Homo sapien
gagtactcagctgtgaagtccctgg

SEQ ID NO: 2319267 - DNA, 25 bp, Homo sapien
ctggaagtgattgtccgggccaaca

SEQ ID NO: 2319268 - DNA, 25 bp, Homo sapien
aaagaacttgatgctccgagatgcc

SEQ ID NO: 2319269 - DNA, 25 bp, Homo sapien
ggtatacttggaccccatggctgtg

SEQ ID NO: 2319270 - DNA, 25 bp, Homo sapien
ggctttgccgaatatggacctgagt

SEQ ID NO: 2319271 - DNA, 25 bp, Homo sapien
gatgataatgtgcaccttgtaggac

SEQ ID NO: 2319272 - DNA, 25 bp, Homo sapien
cctttctggaggtgaggataccact

SEQ ID NO: 2319273 - DNA, 25 bp, Homo sapien
gataccactcggctctagtctgtgt

SEQ ID NO: 2319274 - DNA, 25 bp, Homo sapien
tgaggttgggaaccgccctcttgag

SEQ ID NO: 2319275 - DNA, 25 bp, Homo sapien
gggccatgtcacgtgaccgctgtgt

SEQ ID NO: 2319276 - DNA, 25 bp, Homo sapien
tccggctccggaagctggaacgctc

SEQ ID NO: 2319277 - DNA, 25 bp, Homo sapien
cgtgaccgctgtgtcacgtgaggtt

SEQ ID NO: 2319278 - DNA, 25 bp, Homo sapien
gcagctccttgcgttcattctgctt

SEQ ID NO: 2319279 - DNA, 25 bp, Homo sapien
tgttcttttaggaggcgggacagca

SEQ ID NO: 2319280 - DNA, 25 bp, Homo sapien
agctccttgcgttcattctgcttgg

SEQ ID NO: 2319281 - DNA, 25 bp, Homo sapien
ttctgcttggcctggtgttctttta

SEQ ID NO: 2319282 - DNA, 25 bp, Homo sapien
agaaaacggccgacaggatatttgg

SEQ ID NO: 2319283 - DNA, 25 bp, Homo sapien
ctaggccgcggccgaagagaaaacg

SEQ ID NO: 2319284 - DNA, 25 bp, Homo sapien
aagagaaaacggccgacaggatatt

SEQ ID NO: 2319285 - DNA, 25 bp, Homo sapien
gagaaaacggccgacaggatatttg

SEQ ID NO: 2319286 - DNA, 25 bp, Homo sapien
tccggtggtttcaggcctccaagaa

SEQ ID NO: 2319287 - DNA, 25 bp, Homo sapien
tccgagatttccagcccggactcag

SEQ ID NO: 2319288 - DNA, 25 bp, Homo sapien
tactcggccgcagaatcggtaactc

SEQ ID NO: 2319289 - DNA, 25 bp, Homo sapien
tattgcccaagggaccggagccagt

SEQ ID NO: 2319290 - DNA, 25 bp, Homo sapien
ggcaggtcgctgcagtgatagcctc

SEQ ID NO: 2319291 - DNA, 25 bp, Homo sapien
tcaggcaggtcgctgcagtgatagc

SEQ ID NO: 2319292 - DNA, 25 bp, Homo sapien
cccacattgaggtgatccaccaaag

SEQ ID NO: 2319293 - DNA, 25 bp, Homo sapien
cattgaggtgatccaccaaagcttc

SEQ ID NO: 2319294 - DNA, 25 bp, Homo sapien
cagactggccagtgcctaaacttgg

SEQ ID NO: 2319295 - DNA, 25 bp, Homo sapien
ggataggggaattagtggaacatcc

SEQ ID NO: 2319296 - DNA, 25 bp, Homo sapien
gaaactgatgttgataagaggtcca

SEQ ID NO: 2319297 - DNA, 25 bp, Homo sapien
acagctatttgagggccagactggc

SEQ ID NO: 2319298 - DNA, 25 bp, Homo sapien
tgcttggcaaattgggcagcctgga

SEQ ID NO: 2319299 - DNA, 25 bp, Homo sapien
ctgtagggtcttcacctcatggtcc

SEQ ID NO: 2319300 - DNA, 25 bp, Homo sapien
caccattccgatccactggcctgtc

SEQ ID NO: 2319301 - DNA, 25 bp, Homo sapien
gcagcctggacctgtagggtcttca

SEQ ID NO: 2319302 - DNA, 25 bp, Homo sapien
aatgggtagagtatggcttccagtc

SEQ ID NO: 2319303 - DNA, 25 bp, Homo sapien
gcccaggaatcagaatgggtagagt

SEQ ID NO: 2319304 - DNA, 25 bp, Homo sapien
gaggtaacctgactggaggcagcca

SEQ ID NO: 2319305 - DNA, 25 bp, Homo sapien
aggctttacttggacccaccaactg

SEQ ID NO: 2319306 - DNA, 25 bp, Homo sapien
tagacatattccagtgcagtggcaa

SEQ ID NO: 2319307 - DNA, 25 bp, Homo sapien
tccagctcgatgctccgagcccagt

SEQ ID NO: 2319308 - DNA, 25 bp, Homo sapien
ctcgatgctccgagcccagttctcc

SEQ ID NO: 2319309 - DNA, 25 bp, Homo sapien
tgcagctgccctttgtagacatatt

SEQ ID NO: 2319310 - DNA, 25 bp, Homo sapien
tttattcaaggcttgtcagcctccc

SEQ ID NO: 2319311 - DNA, 25 bp, Homo sapien
ctccttccccctgcgggtgaggtag

SEQ ID NO: 2319312 - DNA, 25 bp, Homo sapien
ggaggcttgtgttttattcaaggct

SEQ ID NO: 2319313 - DNA, 25 bp, Homo sapien
tgtgttttattcaaggcttgtcagc

SEQ ID NO: 2319314 - DNA, 25 bp, Homo sapien
cacactaactactgctaaggccaaa

SEQ ID NO: 2319315 - DNA, 25 bp, Homo sapien
tacagcgcccgaagcttattctttt

SEQ ID NO: 2319316 - DNA, 25 bp, Homo sapien
actaactactgctaaggccaaagtc

SEQ ID NO: 2319317 - DNA, 25 bp, Homo sapien
tcctgtggcgaaagctggcaggtac

SEQ ID NO: 2319318 - DNA, 25 bp, Homo sapien
gatgtatagggccaagaggtttgct

SEQ ID NO: 2319319 - DNA, 25 bp, Homo sapien
aagttttgagttggcaatacatgta

SEQ ID NO: 2319320 - DNA, 25 bp, Homo sapien
ctctccttctaaaccagggacactg

SEQ ID NO: 2319321 - DNA, 25 bp, Homo sapien
gctgtgtgatactgagcatctcact

SEQ ID NO: 2319322 - DNA, 25 bp, Homo sapien
gctggagcccaagtgacctacaggt

SEQ ID NO: 2319323 - DNA, 25 bp, Homo sapien
tggagcccaagtgacctacaggtgg

SEQ ID NO: 2319324 - DNA, 25 bp, Homo sapien
gcccaagtgacctacaggtggcagc

SEQ ID NO: 2319325 - DNA, 25 bp, Homo sapien
agcccaagtgacctacaggtggcag

SEQ ID NO: 2319326 - DNA, 25 bp, Homo sapien
cccagagtaaggcacccagcagaag

SEQ ID NO: 2319327 - DNA, 25 bp, Homo sapien
gaagacaaaggcattgctggcgggc

SEQ ID NO: 2319328 - DNA, 25 bp, Homo sapien
agacaaaggcattgctggcgggcag

SEQ ID NO: 2319329 - DNA, 25 bp, Homo sapien
caaaggcattgctggcgggcaggct

SEQ ID NO: 2319330 - DNA, 25 bp, Homo sapien
atgaagacaaaggcattgctggcgg

SEQ ID NO: 2319331 - DNA, 25 bp, Homo sapien
gcagctggccaggactcggaagcct

SEQ ID NO: 2319332 - DNA, 25 bp, Homo sapien
ccagaaggcgcccaaagcctgagtc

SEQ ID NO: 2319333 - DNA, 25 bp, Homo sapien
ttaacgtgcatctccacccacttgg

SEQ ID NO: 2319334 - DNA, 25 bp, Homo sapien
tcagtgatatccaacagggtggtgt

SEQ ID NO: 2319335 - DNA, 25 bp, Homo sapien
attcctggtggtctaccatacttac

SEQ ID NO: 2319336 - DNA, 25 bp, Homo sapien
tggggatcaggacaccccacaccat

SEQ ID NO: 2319337 - DNA, 25 bp, Homo sapien
accatattcctggtggtctaccata

SEQ ID NO: 2319338 - DNA, 25 bp, Homo sapien
gggatcaggacaccccacaccatat

SEQ ID NO: 2319339 - DNA, 25 bp, Homo sapien
tccctttagcttaccacagcccttg

SEQ ID NO: 2319340 - DNA, 25 bp, Homo sapien
attgtccctttagcttaccacagcc

SEQ ID NO: 2319341 - DNA, 25 bp, Homo sapien
tttagcttaccacagcccttgcagg

SEQ ID NO: 2319342 - DNA, 25 bp, Homo sapien
aattgtccctttagcttaccacagc

SEQ ID NO: 2319343 - DNA, 25 bp, Homo sapien
aatcgtcccgggtcagccatggtgt

SEQ ID NO: 2319344 - DNA, 25 bp, Homo sapien
cccaggacgctggtgatgttgatca

SEQ ID NO: 2319345 - DNA, 25 bp, Homo sapien
tgtgttcacattcagcacccgctgg

SEQ ID NO: 2319346 - DNA, 25 bp, Homo sapien
gccatggtgtgggtccgatgatacc

SEQ ID NO: 2319347 - DNA, 25 bp, Homo sapien
caaaacacatggttgagccctgagt

SEQ ID NO: 2319348 - DNA, 25 bp, Homo sapien
caagagttttgacggagatgcctac

SEQ ID NO: 2319349 - DNA, 25 bp, Homo sapien
tgatggtgacaaacgcaggcttcct

SEQ ID NO: 2319350 - DNA, 25 bp, Homo sapien
tgagaaagttaccacagaccaggga

SEQ ID NO: 2319351 - DNA, 25 bp, Homo sapien
gatggagactcgtatcccaaaatga

SEQ ID NO: 2319352 - DNA, 25 bp, Homo sapien
aaggcccccccatagtgggcctgtg

SEQ ID NO: 2319353 - DNA, 25 bp, Homo sapien
aagaagccaggctccacgatggaga

SEQ ID NO: 2319354 - DNA, 25 bp, Homo sapien
caggctccacgatggagactcgtat

SEQ ID NO: 2319355 - DNA, 25 bp, Homo sapien
catggcctgggcactcttgtaacat

SEQ ID NO: 2319356 - DNA, 25 bp, Homo sapien
ggcttatgcaggactggcctttctg

SEQ ID NO: 2319357 - DNA, 25 bp, Homo sapien
tgtttcccttcatgtgcccctgtgt

SEQ ID NO: 2319358 - DNA, 25 bp, Homo sapien
tccagcccatcttaggtactgtctt

SEQ ID NO: 2319359 - DNA, 25 bp, Homo sapien
tcaccttggttaggtccgggtcaca

SEQ ID NO: 2319360 - DNA, 25 bp, Homo sapien
tccgggtcacagatcaggttcatga

SEQ ID NO: 2319361 - DNA, 25 bp, Homo sapien
caggcatcggctcaccttggttagg

SEQ ID NO: 2319362 - DNA, 25 bp, Homo sapien
tgtcgagcagtcagggcatgctcca

SEQ ID NO: 2319363 - DNA, 25 bp, Homo sapien
ggctggctggcaggtaggaggcagg

SEQ ID NO: 2319364 - DNA, 25 bp, Homo sapien
tcagtagactgcttgggcaggcttg

SEQ ID NO: 2319365 - DNA, 25 bp, Homo sapien
caggtgagcacagcatccaccaggc

SEQ ID NO: 2319366 - DNA, 25 bp, Homo sapien
caggcttgggaaggacccaggtgag

SEQ ID NO: 2319367 - DNA, 25 bp, Homo sapien
gaaaaacaatctcttgctggaaggc

SEQ ID NO: 2319368 - DNA, 25 bp, Homo sapien
taaatggggtcagccttccactggg

SEQ ID NO: 2319369 - DNA, 25 bp, Homo sapien
taaacaatacacttttgttagtgct

SEQ ID NO: 2319370 - DNA, 25 bp, Homo sapien
cagaaataaatcaaagtccttgtcc

SEQ ID NO: 2319371 - DNA, 25 bp, Homo sapien
tcttgattgactgggtagcgtggct

SEQ ID NO: 2319372 - DNA, 25 bp, Homo sapien
tagtggcagcacaataaggaacctg

SEQ ID NO: 2319373 - DNA, 25 bp, Homo sapien
aagccctcgctatcacagacggatg

SEQ ID NO: 2319374 - DNA, 25 bp, Homo sapien
tcttgaggcaggaccttaagagccc

SEQ ID NO: 2319375 - DNA, 25 bp, Homo sapien
cccaacctgccatgtactttacaaa

SEQ ID NO: 2319376 - DNA, 25 bp, Homo sapien
ttttccacagtcgactgcttctctg

SEQ ID NO: 2319377 - DNA, 25 bp, Homo sapien
tatatgaccgttttgttaaccatga

SEQ ID NO: 2319378 - DNA, 25 bp, Homo sapien
tgttcaaccattcaatgaaggacca

SEQ ID NO: 2319379 - DNA, 25 bp, Homo sapien
ctctgtctatggagcagctgttgtt

SEQ ID NO: 2319380 - DNA, 25 bp, Homo sapien
tgcgcctagcccctcctcttacttt

SEQ ID NO: 2319381 - DNA, 25 bp, Homo sapien
tttggggaacatcctactctgtcta

SEQ ID NO: 2319382 - DNA, 25 bp, Homo sapien
cgcctagcccctcctcttactttgg

SEQ ID NO: 2319383 - DNA, 25 bp, Homo sapien
tttggaaggctgagggggcggatca

SEQ ID NO: 2319384 - DNA, 25 bp, Homo sapien
cgaggtcaatagatggagaccatcc

SEQ ID NO: 2319385 - DNA, 25 bp, Homo sapien
ctactaaaaacacaaaaattagctg

SEQ ID NO: 2319386 - DNA, 25 bp, Homo sapien
tggccaatatggtgaaaccccatct

SEQ ID NO: 2319387 - DNA, 25 bp, Homo sapien
gaaggtagtacaggcttcacttcct

SEQ ID NO: 2319388 - DNA, 25 bp, Homo sapien
cttcttctcccttagagaaggtagt

SEQ ID NO: 2319389 - DNA, 25 bp, Homo sapien
tcttctcccttagagaaggtagtac

SEQ ID NO: 2319390 - DNA, 25 bp, Homo sapien
tctcccttagagaaggtagtacagg

SEQ ID NO: 2319391 - DNA, 25 bp, Homo sapien
gacttagctagagagggaaattgtg

SEQ ID NO: 2319392 - DNA, 25 bp, Homo sapien
gtgtgtctgtgggagacacagaacc

SEQ ID NO: 2319393 - DNA, 25 bp, Homo sapien
gagacagaggtctacagagccagac

SEQ ID NO: 2319394 - DNA, 25 bp, Homo sapien
gccaacaaaagaggcagcgctgtca

SEQ ID NO: 2319395 - DNA, 25 bp, Homo sapien
gctggccggctggagcgctcccccc

SEQ ID NO: 2319396 - DNA, 25 bp, Homo sapien
tgccgccaaacgcacacggggcagc

SEQ ID NO: 2319397 - DNA, 25 bp, Homo sapien
gcagccgtccggctcgggcgccacg

SEQ ID NO: 2319398 - DNA, 25 bp, Homo sapien
agccgtccggctcgggcgccacgga

SEQ ID NO: 2319399 - DNA, 25 bp, Homo sapien
gggccatgctaatgacggtctcggt

SEQ ID NO: 2319400 - DNA, 25 bp, Homo sapien
ttgatgctctctaggcgcagctcgc

SEQ ID NO: 2319401 - DNA, 25 bp, Homo sapien
gaagtcgtgtaggtccaggatctgc

SEQ ID NO: 2319402 - DNA, 25 bp, Homo sapien
tgggcgcctccttgagccgcagttt

SEQ ID NO: 2319403 - DNA, 25 bp, Homo sapien
tgctcgcgccccgcagcccacttac

SEQ ID NO: 2319404 - DNA, 25 bp, Homo sapien
tatccccattaccagagctaactct

SEQ ID NO: 2319405 - DNA, 25 bp, Homo sapien
ttcacttcgtgtatccccattacca

SEQ ID NO: 2319406 - DNA, 25 bp, Homo sapien
cgtgtatccccattaccagagctaa

SEQ ID NO: 2319407 - DNA, 25 bp, Homo sapien
ttcgtgtatccccattaccagagct

SEQ ID NO: 2319408 - DNA, 25 bp, Homo sapien
gagggctacatctaagtctttggtt

SEQ ID NO: 2319409 - DNA, 25 bp, Homo sapien
cagggtttgaagatgagggctacat

SEQ ID NO: 2319410 - DNA, 25 bp, Homo sapien
gaagatgagggctacatctaagtct

SEQ ID NO: 2319411 - DNA, 25 bp, Homo sapien
tccacatacttgtcccagtggacag

SEQ ID NO: 2319412 - DNA, 25 bp, Homo sapien
tctccatgagagtggacactgttgt

SEQ ID NO: 2319413 - DNA, 25 bp, Homo sapien
agttattttactggctggagcttca

SEQ ID NO: 2319414 - DNA, 25 bp, Homo sapien
gccattaggtactaatctccatgag

SEQ ID NO: 2319415 - DNA, 25 bp, Homo sapien
ccagggccctggtagtccagttatt

SEQ ID NO: 2319416 - DNA, 25 bp, Homo sapien
tgaagtcgatgctctgccaatggcc

SEQ ID NO: 2319417 - DNA, 25 bp, Homo sapien
caagatctgcaggtagactgtggct

SEQ ID NO: 2319418 - DNA, 25 bp, Homo sapien
caaaggcgttgatctcgatgcccca

SEQ ID NO: 2319419 - DNA, 25 bp, Homo sapien
caatcttcagtgagcggatacggat

SEQ ID NO: 2319420 - DNA, 25 bp, Homo sapien
aaatgtgatatggtcctgaacagtt

SEQ ID NO: 2319421 - DNA, 25 bp, Homo sapien
aaagaaatgtgatatggtcctgaac

SEQ ID NO: 2319422 - DNA, 25 bp, Homo sapien
gaaatgtgatatggtcctgaacagt

SEQ ID NO: 2319423 - DNA, 25 bp, Homo sapien
aagaaatgtgatatggtcctgaaca

SEQ ID NO: 2319424 - DNA, 25 bp, Homo sapien
gcttgagtgctcgtcgcagtccaga

SEQ ID NO: 2319425 - DNA, 25 bp, Homo sapien
tgtgttctctaggactcgaagctcc

SEQ ID NO: 2319426 - DNA, 25 bp, Homo sapien
accatgccagggatcttgccgtaga

SEQ ID NO: 2319427 - DNA, 25 bp, Homo sapien
catgaacatgtactcgcactggccg

SEQ ID NO: 2319428 - DNA, 25 bp, Homo sapien
gaagagtggagggagctctagggct

SEQ ID NO: 2319429 - DNA, 25 bp, Homo sapien
gaacggtgtgatgttcgcgggaaga

SEQ ID NO: 2319430 - DNA, 25 bp, Homo sapien
tctgtctctatcactgtctctacat

SEQ ID NO: 2319431 - DNA, 25 bp, Homo sapien
ttgtattgcacacggcttggtcggg

SEQ ID NO: 2319432 - DNA, 25 bp, Homo sapien
gggatctccccaaactataccaagc

SEQ ID NO: 2319433 - DNA, 25 bp, Homo sapien
tgatttcttctcctactgaatagtc

SEQ ID NO: 2319434 - DNA, 25 bp, Homo sapien
tcaccttgccagtggaagaaaggag

SEQ ID NO: 2319435 - DNA, 25 bp, Homo sapien
tactgaatagtcaggggatctcccc

SEQ ID NO: 2319436 - DNA, 25 bp, Homo sapien
tatacaagtgcttaagtgagtaggt

SEQ ID NO: 2319437 - DNA, 25 bp, Homo sapien
ggccctcctattccagtaaagccaa

SEQ ID NO: 2319438 - DNA, 25 bp, Homo sapien
aataagggataaacggggcacagtg

SEQ ID NO: 2319439 - DNA, 25 bp, Homo sapien
ggcaggggccctcctattccagtaa

SEQ ID NO: 2319440 - DNA, 25 bp, Homo sapien
cacgaggcatttgaccttggaggga

SEQ ID NO: 2319441 - DNA, 25 bp, Homo sapien
tgacatcctctaagctcttgcctgg

SEQ ID NO: 2319442 - DNA, 25 bp, Homo sapien
aagtgcccgtggtaagtgctcagaa

SEQ ID NO: 2319443 - DNA, 25 bp, Homo sapien
gctcttgggaagaatgagccatcca

SEQ ID NO: 2319444 - DNA, 25 bp, Homo sapien
tggcagtacattgaacccgcagtag

SEQ ID NO: 2319445 - DNA, 25 bp, Homo sapien
gaattgtgctctaggtacatgggaa

SEQ ID NO: 2319446 - DNA, 25 bp, Homo sapien
tagtcattgaacacgaggtttcctg

SEQ ID NO: 2319447 - DNA, 25 bp, Homo sapien
gactgcaggagaataggacactagc

SEQ ID NO: 2319448 - DNA, 25 bp, Homo sapien
tctacgccactacagaccagaagct

SEQ ID NO: 2319449 - DNA, 25 bp, Homo sapien
tatgagtgccctagtttgaacatgt

SEQ ID NO: 2319450 - DNA, 25 bp, Homo sapien
catacacccagttaatgcagtcgta

SEQ ID NO: 2319451 - DNA, 25 bp, Homo sapien
tgatcagggtactgtggaaatacat

SEQ ID NO: 2319452 - DNA, 25 bp, Homo sapien
agatattcagccttacttgccagga

SEQ ID NO: 2319453 - DNA, 25 bp, Homo sapien
tggtcagaagtctctaacctccaag

SEQ ID NO: 2319454 - DNA, 25 bp, Homo sapien
gactttggtactatgatcaggtccc

SEQ ID NO: 2319455 - DNA, 25 bp, Homo sapien
taataagacttaggagcctgacacc

SEQ ID NO: 2319456 - DNA, 25 bp, Homo sapien
gtttattcccttctgtcatactcac

SEQ ID NO: 2319457 - DNA, 25 bp, Homo sapien
agcattttttatcctctgtgaagag

SEQ ID NO: 2319458 - DNA, 25 bp, Homo sapien
tcccttctgtcatactcacaagcat

SEQ ID NO: 2319459 - DNA, 25 bp, Homo sapien
tctgtgaagaggttaagttacccac

SEQ ID NO: 2319460 - DNA, 25 bp, Homo sapien
tagagaattggccataataccttta

SEQ ID NO: 2319461 - DNA, 25 bp, Homo sapien
gcttcaggggcaaatattatagaga

SEQ ID NO: 2319462 - DNA, 25 bp, Homo sapien
ggagctagattagaccagataaggg

SEQ ID NO: 2319463 - DNA, 25 bp, Homo sapien
tacctttatcccttagaagagaaga

SEQ ID NO: 2319464 - DNA, 25 bp, Homo sapien
tacaagattactaactggagccctt

SEQ ID NO: 2319465 - DNA, 25 bp, Homo sapien
tcctccttgggagttaagcacttaa

SEQ ID NO: 2319466 - DNA, 25 bp, Homo sapien
cccgacctcaggattttagaagatc

SEQ ID NO: 2319467 - DNA, 25 bp, Homo sapien
ggagcccttttcctagatactgtta

SEQ ID NO: 2319468 - DNA, 25 bp, Homo sapien
gaactgtgttgatttactgggccca

SEQ ID NO: 2319469 - DNA, 25 bp, Homo sapien
tcttctcacacaggagtatgcatgg

SEQ ID NO: 2319470 - DNA, 25 bp, Homo sapien
tgcaacaccgtcacgctagaagggt

SEQ ID NO: 2319471 - DNA, 25 bp, Homo sapien
cagttgtgcactttccctgcaggga

SEQ ID NO: 2319472 - DNA, 25 bp, Homo sapien
ccagtcccctcatatattaccttaa

SEQ ID NO: 2319473 - DNA, 25 bp, Homo sapien
gagaacctgggattggatctacata

SEQ ID NO: 2319474 - DNA, 25 bp, Homo sapien
tagaggttagatccttgcccagtcc

SEQ ID NO: 2319475 - DNA, 25 bp, Homo sapien
taattattagggtttatgaaatcag

SEQ ID NO: 2319476 - DNA, 25 bp, Homo sapien
gaacaacttggctataggaatttgg

SEQ ID NO: 2319477 - DNA, 25 bp, Homo sapien
actagggcgctagacaatgtattct

SEQ ID NO: 2319478 - DNA, 25 bp, Homo sapien
caacacatactttttacgtagccag

SEQ ID NO: 2319479 - DNA, 25 bp, Homo sapien
tatgtgtgccattcaactgctgttg

SEQ ID NO: 2319480 - DNA, 25 bp, Homo sapien
gatacaacgtgtaatcctatatctg

SEQ ID NO: 2319481 - DNA, 25 bp, Homo sapien
gccttttcaaggagagatacaacgt

SEQ ID NO: 2319482 - DNA, 25 bp, Homo sapien
tcagtttattccatcatctggttct

SEQ ID NO: 2319483 - DNA, 25 bp, Homo sapien
cctgcggaggaacagaacttgtctt

SEQ ID NO: 2319484 - DNA, 25 bp, Homo sapien
gcatgatgctgagaccattggtgct

SEQ ID NO: 2319485 - DNA, 25 bp, Homo sapien
ctgagaccattggtgctcagtggga

SEQ ID NO: 2319486 - DNA, 25 bp, Homo sapien
agcatcaggtccatgtgcctagcat

SEQ ID NO: 2319487 - DNA, 25 bp, Homo sapien
catcaggtccatgtgcctagcatga

SEQ ID NO: 2319488 - DNA, 25 bp, Homo sapien
taaagcaagatcttatccacagact

SEQ ID NO: 2319489 - DNA, 25 bp, Homo sapien
tcatctttgtggacctagagccttg

SEQ ID NO: 2319490 - DNA, 25 bp, Homo sapien
tatcgttagaggaaaatggatcatc

SEQ ID NO: 2319491 - DNA, 25 bp, Homo sapien
tcttgctcgtggtttggagaccaag

SEQ ID NO: 2319492 - DNA, 25 bp, Homo sapien
tcagatccccgtccggctatgggcg

SEQ ID NO: 2319493 - DNA, 25 bp, Homo sapien
aggaacagaatcagcgctgccacca

SEQ ID NO: 2319494 - DNA, 25 bp, Homo sapien
aggaagtaacgcctctccttctgcc

SEQ ID NO: 2319495 - DNA, 25 bp, Homo sapien
gcccctttcctattggaggaacaga

SEQ ID NO: 2319496 - DNA, 25 bp, Homo sapien
ggcagcagtgattatctgaactcgg

SEQ ID NO: 2319497 - DNA, 25 bp, Homo sapien
gtgattatctgaactcggatcttta

SEQ ID NO: 2319498 - DNA, 25 bp, Homo sapien
ctcgaaaggtggagccttggctctg

SEQ ID NO: 2319499 - DNA, 25 bp, Homo sapien
tcgaaaggtggagccttggctctga

SEQ ID NO: 2319500 - DNA, 25 bp, Homo sapien
ccctcttgagctatctcccagttgt

SEQ ID NO: 2319501 - DNA, 25 bp, Homo sapien
tgagctatctcccagttgtctctca

SEQ ID NO: 2319502 - DNA, 25 bp, Homo sapien
ttttctcaacccctcttgagctatc

SEQ ID NO: 2319503 - DNA, 25 bp, Homo sapien
agttgtctctcagatagccccaatc

SEQ ID NO: 2319504 - DNA, 25 bp, Homo sapien
ggtttacttcgctgtgtgccacccc

SEQ ID NO: 2319505 - DNA, 25 bp, Homo sapien
ggctattcatcactcgggtgttggg

SEQ ID NO: 2319506 - DNA, 25 bp, Homo sapien
gatgcctcggctattcatcactcgg

SEQ ID NO: 2319507 - DNA, 25 bp, Homo sapien
gatgatgtaggccagccagatgcct

SEQ ID NO: 2319508 - DNA, 25 bp, Homo sapien
ggatgctgagtagaaccatatgcag

SEQ ID NO: 2319509 - DNA, 25 bp, Homo sapien
ggtccagacaacaggaatgctgaag

SEQ ID NO: 2319510 - DNA, 25 bp, Homo sapien
tggtcagggtccagacaacaggaat

SEQ ID NO: 2319511 - DNA, 25 bp, Homo sapien
ttatggatgacgttggtcagggtcc

SEQ ID NO: 2319512 - DNA, 25 bp, Homo sapien
ttggtcaggagtctcaaagggtgtc

SEQ ID NO: 2319513 - DNA, 25 bp, Homo sapien
agggtgtccctttcaccgtatgaag

SEQ ID NO: 2319514 - DNA, 25 bp, Homo sapien
aggtaaactggagcccatagtccat

SEQ ID NO: 2319515 - DNA, 25 bp, Homo sapien
catagtccatttgctcccagtgtgt

SEQ ID NO: 2319516 - DNA, 25 bp, Homo sapien
ttgttgatgccaaagacacgaaccc

SEQ ID NO: 2319517 - DNA, 25 bp, Homo sapien
ttggtatagaagctggccaggagat

SEQ ID NO: 2319518 - DNA, 25 bp, Homo sapien
gaagtgcgcagcatcatacttggta

SEQ ID NO: 2319519 - DNA, 25 bp, Homo sapien
caaagacacgaaccccatggaactg

SEQ ID NO: 2319520 - DNA, 25 bp, Homo sapien
atggagctgtcccaaaacccatccc

SEQ ID NO: 2319521 - DNA, 25 bp, Homo sapien
taagcttagagtgaagggcacctcc

SEQ ID NO: 2319522 - DNA, 25 bp, Homo sapien
gaggaggcccttccaacgttgatgc

SEQ ID NO: 2319523 - DNA, 25 bp, Homo sapien
caacagcacagtacccaagggagaa

SEQ ID NO: 2319524 - DNA, 25 bp, Homo sapien
tttgttgcccatatagccggagccc

SEQ ID NO: 2319525 - DNA, 25 bp, Homo sapien
tactgtgctgagtgtaataggctgc

SEQ ID NO: 2319526 - DNA, 25 bp, Homo sapien
gaccgggaacctaagagtgccagat

SEQ ID NO: 2319527 - DNA, 25 bp, Homo sapien
cagagtcaagcatgttgggcctcaa

SEQ ID NO: 2319528 - DNA, 25 bp, Homo sapien
tagcagtgccctaggtaggcttgac

SEQ ID NO: 2319529 - DNA, 25 bp, Homo sapien
tcaggctgacatgatagataatccc

SEQ ID NO: 2319530 - DNA, 25 bp, Homo sapien
gatagatattcatgatggcacacgc

SEQ ID NO: 2319531 - DNA, 25 bp, Homo sapien
ccaacaatccatgatagatattcat

SEQ ID NO: 2319532 - DNA, 25 bp, Homo sapien
caacaatccatgatagatattcagg

SEQ ID NO: 2319533 - DNA, 25 bp, Homo sapien
ctaattctactagtagtagagctct

SEQ ID NO: 2319534 - DNA, 25 bp, Homo sapien
gccttgatcccccaggcttaggtgg

SEQ ID NO: 2319535 - DNA, 25 bp, Homo sapien
ggcttctgctgtattcttagagtgg

SEQ ID NO: 2319536 - DNA, 25 bp, Homo sapien
tcttagagtgggtaacaattgttta

SEQ ID NO: 2319537 - DNA, 25 bp, Homo sapien
tggagctggactggtaaaacatcac

SEQ ID NO: 2319538 - DNA, 25 bp, Homo sapien
gcaaattacctcaatggctgcatga

SEQ ID NO: 2319539 - DNA, 25 bp, Homo sapien
ggaggcctacttacactggagtgta

SEQ ID NO: 2319540 - DNA, 25 bp, Homo sapien
tgcatgacaccaaagaggaatgggc

SEQ ID NO: 2319541 - DNA, 25 bp, Homo sapien
ggagccgaggaactatgtcaacttg

SEQ ID NO: 2319542 - DNA, 25 bp, Homo sapien
tgaagaaggcctatagacagctggc

SEQ ID NO: 2319543 - DNA, 25 bp, Homo sapien
gctttccaacgaaggaggatactcg

SEQ ID NO: 2319544 - DNA, 25 bp, Homo sapien
catcggctgggtcggaaacgaagtc

SEQ ID NO: 2319545 - DNA, 25 bp, Homo sapien
gccctagctggattggcttgcctct

SEQ ID NO: 2319546 - DNA, 25 bp, Homo sapien
aatcccattcccacacgcggaggga

SEQ ID NO: 2319547 - DNA, 25 bp, Homo sapien
ttgcttcctgcggtgcaacctgcgg

SEQ ID NO: 2319548 - DNA, 25 bp, Homo sapien
tcagccaaccgctatttcttttcct

SEQ ID NO: 2319549 - DNA, 25 bp, Homo sapien
aagttacgctcccagttcctaggca

SEQ ID NO: 2319550 - DNA, 25 bp, Homo sapien
tgtggacgtccaccaaatagcttgg

SEQ ID NO: 2319551 - DNA, 25 bp, Homo sapien
agttctgagccgagccaagttacgc

SEQ ID NO: 2319552 - DNA, 25 bp, Homo sapien
taaactctttcaagtcgcagcccag

SEQ ID NO: 2319553 - DNA, 25 bp, Homo sapien
ggttgactctcggagctcctctcct

SEQ ID NO: 2319554 - DNA, 25 bp, Homo sapien
aggctggagggttgactctcggagc

SEQ ID NO: 2319555 - DNA, 25 bp, Homo sapien
gagggttgactctcggagctcctct

SEQ ID NO: 2319556 - DNA, 25 bp, Homo sapien
ctggagggttgactctcggagctcc

SEQ ID NO: 2319557 - DNA, 25 bp, Homo sapien
aaaatgcaggcacattactttcttc

SEQ ID NO: 2319558 - DNA, 25 bp, Homo sapien
aaatgcaggcacattactttcttca

SEQ ID NO: 2319559 - DNA, 25 bp, Homo sapien
caaggaggagctggcatttcgggca

SEQ ID NO: 2319560 - DNA, 25 bp, Homo sapien
gaaaggagaacaccaaggaggagct

SEQ ID NO: 2319561 - DNA, 25 bp, Homo sapien
accaaggaggagctggcatttcggg

SEQ ID NO: 2319562 - DNA, 25 bp, Homo sapien
ctgaaaggagaacaccaaggaggag

SEQ ID NO: 2319563 - DNA, 25 bp, Homo sapien
agggctgccaatgggatttgaattc

SEQ ID NO: 2319564 - DNA, 25 bp, Homo sapien
ccccagcggtatcagggctgccaat

SEQ ID NO: 2319565 - DNA, 25 bp, Homo sapien
tatcagggctgccaatgggatttga

SEQ ID NO: 2319566 - DNA, 25 bp, Homo sapien
cggtatcagggctgccaatgggatt

SEQ ID NO: 2319567 - DNA, 25 bp, Homo sapien
catctcacatcctggtagccactcg

SEQ ID NO: 2319568 - DNA, 25 bp, Homo sapien
gggactttgcccacagacatctcac

SEQ ID NO: 2319569 - DNA, 25 bp, Homo sapien
ctccccttaggatattggtgggact

SEQ ID NO: 2319570 - DNA, 25 bp, Homo sapien
cacagcccctcatggaataagcagg

SEQ ID NO: 2319571 - DNA, 25 bp, Homo sapien
cagtatgaccctgttgaggtaactg

SEQ ID NO: 2319572 - DNA, 25 bp, Homo sapien
ccagtatgaccctgttgaggtaact

SEQ ID NO: 2319573 - DNA, 25 bp, Homo sapien
gccagtatgaccctgttgaggtaac

SEQ ID NO: 2319574 - DNA, 25 bp, Homo sapien
caggggcagcaagacttcctccatg

SEQ ID NO: 2319575 - DNA, 25 bp, Homo sapien
agagaaagtggtcacagagcgggag

SEQ ID NO: 2319576 - DNA, 25 bp, Homo sapien
catgaatgtctttaggggattggga

SEQ ID NO: 2319577 - DNA, 25 bp, Homo sapien
cacagagcgggaggtgtcagctcct

SEQ ID NO: 2319578 - DNA, 25 bp, Homo sapien
tccaaaacacatcttgggtctggag

SEQ ID NO: 2319579 - DNA, 25 bp, Homo sapien
caaaacacatcttgggtctggaggc

SEQ ID NO: 2319580 - DNA, 25 bp, Homo sapien
ccaaaacacatcttgggtctggagg

SEQ ID NO: 2319581 - DNA, 25 bp, Homo sapien
agcagcacgtcaagggacctcaagg

SEQ ID NO: 2319582 - DNA, 25 bp, Homo sapien
caacatgggccacactagaggtagg

SEQ ID NO: 2319583 - DNA, 25 bp, Homo sapien
aggatgacagtcttgggcaatggcc

SEQ ID NO: 2319584 - DNA, 25 bp, Homo sapien
taaggatagaaagaaggtctagtcc

SEQ ID NO: 2319585 - DNA, 25 bp, Homo sapien
gggggctctacagggatgactctga

SEQ ID NO: 2319586 - DNA, 25 bp, Homo sapien
gggctctacagggatgactctgatg

SEQ ID NO: 2319587 - DNA, 25 bp, Homo sapien
ggaagggggctctacagggatgact

SEQ ID NO: 2319588 - DNA, 25 bp, Homo sapien
aagggggctctacagggatgactct

SEQ ID NO: 2319589 - DNA, 25 bp, Homo sapien
agcgctcctgacagctgaccggaga

SEQ ID NO: 2319590 - DNA, 25 bp, Homo sapien
agaaacgtcactgtcttgaagcagc

SEQ ID NO: 2319591 - DNA, 25 bp, Homo sapien
gctcctgacagctgaccggagagaa

SEQ ID NO: 2319592 - DNA, 25 bp, Homo sapien
tgaccggagagaaacgtcactgtct

SEQ ID NO: 2319593 - DNA, 25 bp, Homo sapien
agtcatgatgaccacggcgatgccc

SEQ ID NO: 2319594 - DNA, 25 bp, Homo sapien
cccactctcatttccaggctcagct

SEQ ID NO: 2319595 - DNA, 25 bp, Homo sapien
gcgatgcccactctcatttccaggc

SEQ ID NO: 2319596 - DNA, 25 bp, Homo sapien
cgccgcagaggagtcatgatgacca

SEQ ID NO: 2319597 - DNA, 25 bp, Homo sapien
ccaaggtcaggcctagcaggagacc

SEQ ID NO: 2319598 - DNA, 25 bp, Homo sapien
tgcccagaactgtgaatggacgtgg

SEQ ID NO: 2319599 - DNA, 25 bp, Homo sapien
gcaggagacccgtcaataagagccc

SEQ ID NO: 2319600 - DNA, 25 bp, Homo sapien
aatggacgtggccaccgaagtgtga

SEQ ID NO: 2319601 - DNA, 25 bp, Homo sapien
tctgcaggcgttggcccagccaact

SEQ ID NO: 2319602 - DNA, 25 bp, Homo sapien
aggaagtagtcaacacaggccacaa

SEQ ID NO: 2319603 - DNA, 25 bp, Homo sapien
ggctggaagtgtctgcaggcgttgg

SEQ ID NO: 2319604 - DNA, 25 bp, Homo sapien
ggaagtagtcaacacaggccacaag

SEQ ID NO: 2319605 - DNA, 25 bp, Homo sapien
gttcctcaggcacgagcttccactg

SEQ ID NO: 2319606 - DNA, 25 bp, Homo sapien
tcctcaggcacgagcttccactggg

SEQ ID NO: 2319607 - DNA, 25 bp, Homo sapien
ccatgttcctcaggcacgagcttcc

SEQ ID NO: 2319608 - DNA, 25 bp, Homo sapien
atgttcctcaggcacgagcttccac

SEQ ID NO: 2319609 - DNA, 25 bp, Homo sapien
tctccttcctcaagtgtatttctcc

SEQ ID NO: 2319610 - DNA, 25 bp, Homo sapien
cttccctccttaagtctaggaactg

SEQ ID NO: 2319611 - DNA, 25 bp, Homo sapien
gggacatgagtaggcacaggttggc

SEQ ID NO: 2319612 - DNA, 25 bp, Homo sapien
agtaggcacaggttggctgcttctg

SEQ ID NO: 2319613 - DNA, 25 bp, Homo sapien
gggggcaatacagactcaagaaggc

SEQ ID NO: 2319614 - DNA, 25 bp, Homo sapien
aaggcctctttaggccctgaatcct

SEQ ID NO: 2319615 - DNA, 25 bp, Homo sapien
ctgaatcctaccctatacacactca

SEQ ID NO: 2319616 - DNA, 25 bp, Homo sapien
tttgctggtggcttaagaccactgc

SEQ ID NO: 2319617 - DNA, 25 bp, Homo sapien
cagggagctgatgccgacagctgcc

SEQ ID NO: 2319618 - DNA, 25 bp, Homo sapien
caccccagaggggatccagtgccat

SEQ ID NO: 2319619 - DNA, 25 bp, Homo sapien
gggctgcaggtattggcagggagct

SEQ ID NO: 2319620 - DNA, 25 bp, Homo sapien
agaggggatccagtgccatttggcc

SEQ ID NO: 2319621 - DNA, 25 bp, Homo sapien
ccctgaccatccccatatgtcctct

SEQ ID NO: 2319622 - DNA, 25 bp, Homo sapien
ctgaccatccccatatgtcctctgc

SEQ ID NO: 2319623 - DNA, 25 bp, Homo sapien
cctgaccatccccatatgtcctctg

SEQ ID NO: 2319624 - DNA, 25 bp, Homo sapien
agggcagagagggagtaaggagggg

SEQ ID NO: 2319625 - DNA, 25 bp, Homo sapien
ggtcctggtcccagttggcactctt

SEQ ID NO: 2319626 - DNA, 25 bp, Homo sapien
ggtcccagttggcactcttgaagac

SEQ ID NO: 2319627 - DNA, 25 bp, Homo sapien
gaatccaggtccaggacggtgtggg

SEQ ID NO: 2319628 - DNA, 25 bp, Homo sapien
cagttggcactcttgaagactctgg

SEQ ID NO: 2319629 - DNA, 25 bp, Homo sapien
aggctcaggtctggttagaaccaga

SEQ ID NO: 2319630 - DNA, 25 bp, Homo sapien
tggaacatatccctacaaagctggt

SEQ ID NO: 2319631 - DNA, 25 bp, Homo sapien
tcctgtccccaagtccaagaggtgg

SEQ ID NO: 2319632 - DNA, 25 bp, Homo sapien
tctgggttgaggcacagatcctgtc

SEQ ID NO: 2319633 - DNA, 25 bp, Homo sapien
tgtggtcacgccacggcactggaca

SEQ ID NO: 2319634 - DNA, 25 bp, Homo sapien
gggaccagggcacctctattattgg

SEQ ID NO: 2319635 - DNA, 25 bp, Homo sapien
caaagttgtcatgagctgtggtcac

SEQ ID NO: 2319636 - DNA, 25 bp, Homo sapien
caaaagctatatgggtaaggcttgg

SEQ ID NO: 2319637 - DNA, 25 bp, Homo sapien
aggctatttcaagacgaggtgcggt

SEQ ID NO: 2319638 - DNA, 25 bp, Homo sapien
ggctatttcaagacgaggtgcggtg

SEQ ID NO: 2319639 - DNA, 25 bp, Homo sapien
gctatttcaagacgaggtgcggtgg

SEQ ID NO: 2319640 - DNA, 25 bp, Homo sapien
aaaaggtatcaaatgccttggaagc

SEQ ID NO: 2319641 - DNA, 25 bp, Homo sapien
caaaaaggtatcaaatgccttggaa

SEQ ID NO: 2319642 - DNA, 25 bp, Homo sapien
catcaaaaaggtatcaaatgccttg

SEQ ID NO: 2319643 - DNA, 25 bp, Homo sapien
tcaaaaaggtatcaaatgccttgga

SEQ ID NO: 2319644 - DNA, 25 bp, Homo sapien
cccctaatgaagggcctggaggttg

SEQ ID NO: 2319645 - DNA, 25 bp, Homo sapien
ctggaggttggggtatcttggagct

SEQ ID NO: 2319646 - DNA, 25 bp, Homo sapien
gaggttggggtatcttggagctcct

SEQ ID NO: 2319647 - DNA, 25 bp, Homo sapien
gttggggtatcttggagctcctcag

SEQ ID NO: 2319648 - DNA, 25 bp, Homo sapien
agctgaggtaggaggcggaggtggg

SEQ ID NO: 2319649 - DNA, 25 bp, Homo sapien
cagctgaggtaggaggcggaggtgg

SEQ ID NO: 2319650 - DNA, 25 bp, Homo sapien
gctgaggtaggaggcggaggtgggg

SEQ ID NO: 2319651 - DNA, 25 bp, Homo sapien
ctgaggtaggaggcggaggtggggg

SEQ ID NO: 2319652 - DNA, 25 bp, Homo sapien
ggtcttccccaggttgaggagagaa

SEQ ID NO: 2319653 - DNA, 25 bp, Homo sapien
tggcaggtgggtcaatgctctctcc

SEQ ID NO: 2319654 - DNA, 25 bp, Homo sapien
gaagccccatggaagacagtgctcc

SEQ ID NO: 2319655 - DNA, 25 bp, Homo sapien
ccaggctcctttgggcaaaaggcaa

SEQ ID NO: 2319656 - DNA, 25 bp, Homo sapien
ggtgagaagcagagaaggcacttgc

SEQ ID NO: 2319657 - DNA, 25 bp, Homo sapien
taaggaggaaattagtgccacccac

SEQ ID NO: 2319658 - DNA, 25 bp, Homo sapien
tcagtggctggaacaaagttctggt

SEQ ID NO: 2319659 - DNA, 25 bp, Homo sapien
gaagagttagaatgggtcagtggct

SEQ ID NO: 2319660 - DNA, 25 bp, Homo sapien
gctggaacaaagttctggttaagga

SEQ ID NO: 2319661 - DNA, 25 bp, Homo sapien
gcccaggggagggatatgtcttcct

SEQ ID NO: 2319662 - DNA, 25 bp, Homo sapien
cccaggggagggatatgtcttcctt

SEQ ID NO: 2319663 - DNA, 25 bp, Homo sapien
tgcccaggggagggatatgtcttcc

SEQ ID NO: 2319664 - DNA, 25 bp, Homo sapien
caaacaagaagcctcgccctggaaa

SEQ ID NO: 2319665 - DNA, 25 bp, Homo sapien
ggagtgcaaacaagaagcctcgccc

SEQ ID NO: 2319666 - DNA, 25 bp, Homo sapien
caagaagcctcgccctggaaaaatc

SEQ ID NO: 2319667 - DNA, 25 bp, Homo sapien
agtgcaaacaagaagcctcgccctg

SEQ ID NO: 2319668 - DNA, 25 bp, Homo sapien
tagaacacttgagtcagcacaacca

SEQ ID NO: 2319669 - DNA, 25 bp, Homo sapien
cttgagtcagcacaaccagcactct

SEQ ID NO: 2319670 - DNA, 25 bp, Homo sapien
gaggaatagaacacttgagtcagca

SEQ ID NO: 2319671 - DNA, 25 bp, Homo sapien
catgaggaatagaacacttgagtca

SEQ ID NO: 2319672 - DNA, 25 bp, Homo sapien
cagcaggttgtagtaagcgagggat

SEQ ID NO: 2319673 - DNA, 25 bp, Homo sapien
agcaggttgtagtaagcgagggata

SEQ ID NO: 2319674 - DNA, 25 bp, Homo sapien
gcaggttgtagtaagcgagggatat

SEQ ID NO: 2319675 - DNA, 25 bp, Homo sapien
aggtgtgccatgtaggccgagagca

SEQ ID NO: 2319676 - DNA, 25 bp, Homo sapien
gtgtgccatgtaggccgagagcagg

SEQ ID NO: 2319677 - DNA, 25 bp, Homo sapien
tgaggtgtgccatgtaggccgagag

SEQ ID NO: 2319678 - DNA, 25 bp, Homo sapien
tgtaggccgagagcagggggaacac

SEQ ID NO: 2319679 - DNA, 25 bp, Homo sapien
tattgccagcccacgcataaggagt

SEQ ID NO: 2319680 - DNA, 25 bp, Homo sapien
catactgtagggaagtcactattgc

SEQ ID NO: 2319681 - DNA, 25 bp, Homo sapien
tattgaccgtgatcatctggcagag

SEQ ID NO: 2319682 - DNA, 25 bp, Homo sapien
tgcccagcctgttagtattgaccgt

SEQ ID NO: 2319683 - DNA, 25 bp, Homo sapien
tctgggcgagaagcaactagggccc

SEQ ID NO: 2319684 - DNA, 25 bp, Homo sapien
aaccgtccctagaaacacttgtgcg

SEQ ID NO: 2319685 - DNA, 25 bp, Homo sapien
gacagcaatcggcacacgaattcga

SEQ ID NO: 2319686 - DNA, 25 bp, Homo sapien
tcttagggttagatagggtctccaa

SEQ ID NO: 2319687 - DNA, 25 bp, Homo sapien
acaacagttgctgaaatgggcggcg

SEQ ID NO: 2319688 - DNA, 25 bp, Homo sapien
tattggcgagttgccccgctttaga

SEQ ID NO: 2319689 - DNA, 25 bp, Homo sapien
aatactaagtaggtccgcccagaag

SEQ ID NO: 2319690 - DNA, 25 bp, Homo sapien
caaatggagtgacactacgggaccg

SEQ ID NO: 2319691 - DNA, 25 bp, Homo sapien
tactgctggacattaaactaagcca

SEQ ID NO: 2319692 - DNA, 25 bp, Homo sapien
actaagccaaagtggggatataagc

SEQ ID NO: 2319693 - DNA, 25 bp, Homo sapien
agccaaagtggggatataagcagga

SEQ ID NO: 2319694 - DNA, 25 bp, Homo sapien
caggggtactgctggacattaaact

SEQ ID NO: 2319695 - DNA, 25 bp, Homo sapien
gttggaggtagtcaccaatacttac

SEQ ID NO: 2319696 - DNA, 25 bp, Homo sapien
tagtgttggaggtagtcaccaatac

SEQ ID NO: 2319697 - DNA, 25 bp, Homo sapien
aatgggacatgctgcctagtgttgg

SEQ ID NO: 2319698 - DNA, 25 bp, Homo sapien
gcctagtgttggaggtagtcaccaa

SEQ ID NO: 2319699 - DNA, 25 bp, Homo sapien
ggacaagatgttagaccctgcaggg

SEQ ID NO: 2319700 - DNA, 25 bp, Homo sapien
taatgcctacggttccaggtgctca

SEQ ID NO: 2319701 - DNA, 25 bp, Homo sapien
ctgcagggctgaagtacaatcggtg

SEQ ID NO: 2319702 - DNA, 25 bp, Homo sapien
ggtcccaggcaggtctactaagcag

SEQ ID NO: 2319703 - DNA, 25 bp, Homo sapien
ttctagagtcattaaggctcttggg

SEQ ID NO: 2319704 - DNA, 25 bp, Homo sapien
gagagatggaggcctagggactcac

SEQ ID NO: 2319705 - DNA, 25 bp, Homo sapien
cctgcctggagtctcttctagagtc

SEQ ID NO: 2319706 - DNA, 25 bp, Homo sapien
gccctggccaaaagtagggagtgaa

SEQ ID NO: 2319707 - DNA, 25 bp, Homo sapien
taaggacacctcctgtcaagactca

SEQ ID NO: 2319708 - DNA, 25 bp, Homo sapien
gctaacagaacagctcggcagttgg

SEQ ID NO: 2319709 - DNA, 25 bp, Homo sapien
cgggctctaccctgcttgagacaat

SEQ ID NO: 2319710 - DNA, 25 bp, Homo sapien
caaacctgggagaccaagataccgg

SEQ ID NO: 2319711 - DNA, 25 bp, Homo sapien
gggccgccccgttcctgacgacata

SEQ ID NO: 2319712 - DNA, 25 bp, Homo sapien
ccgttcctgacgacatagctgcccg

SEQ ID NO: 2319713 - DNA, 25 bp, Homo sapien
gttcctgacgacatagctgcccgcc

SEQ ID NO: 2319714 - DNA, 25 bp, Homo sapien
cgccccgttcctgacgacatagctg

SEQ ID NO: 2319715 - DNA, 25 bp, Homo sapien
agggctcgcggtcgcagctgaagcg

SEQ ID NO: 2319716 - DNA, 25 bp, Homo sapien
tgcttgagagggctcgcggtcgcag

SEQ ID NO: 2319717 - DNA, 25 bp, Homo sapien
tcgcggtcgcagctgaagcgccggc

SEQ ID NO: 2319718 - DNA, 25 bp, Homo sapien
gtcgcagctgaagcgccggcgctgg

SEQ ID NO: 2319719 - DNA, 25 bp, Homo sapien
gctggggggctcgcggggtctctac

SEQ ID NO: 2319720 - DNA, 25 bp, Homo sapien
ccgacccagcagcacgaacgcagcc

SEQ ID NO: 2319721 - DNA, 25 bp, Homo sapien
cagcagcacgaacgcagcccgtggg

SEQ ID NO: 2319722 - DNA, 25 bp, Homo sapien
acccagcagcacgaacgcagcccgt

SEQ ID NO: 2319723 - DNA, 25 bp, Homo sapien
cagcccgtgggtcctcggcttccct

SEQ ID NO: 2319724 - DNA, 25 bp, Homo sapien
ctgcacccccgcgtcccagcgcaga

SEQ ID NO: 2319725 - DNA, 25 bp, Homo sapien
cgcgtcccagcgcagacccttctcg

SEQ ID NO: 2319726 - DNA, 25 bp, Homo sapien
gtcccagcgcagacccttctcgata

SEQ ID NO: 2319727 - DNA, 25 bp, Homo sapien
ccccgcgtcccagcgcagacccttc

SEQ ID NO: 2319728 - DNA, 25 bp, Homo sapien
caccatccctccgaatgagcgggag

SEQ ID NO: 2319729 - DNA, 25 bp, Homo sapien
cgaagaggacttccctccgagtcgg

SEQ ID NO: 2319730 - DNA, 25 bp, Homo sapien
gggcttcaccatccctccgaatgag

SEQ ID NO: 2319731 - DNA, 25 bp, Homo sapien
ccgtgcggcactgtggaggttccga

SEQ ID NO: 2319732 - DNA, 25 bp, Homo sapien
gaggccaaacaagaacccttctcca

SEQ ID NO: 2319733 - DNA, 25 bp, Homo sapien
atttctcctatcaaggtgaaaagtg

SEQ ID NO: 2319734 - DNA, 25 bp, Homo sapien
tttctcctatcaaggtgaaaagtga

SEQ ID NO: 2319735 - DNA, 25 bp, Homo sapien
cattgcgtagtataggaggaagtta

SEQ ID NO: 2319736 - DNA, 25 bp, Homo sapien
gtagagggtgtcattgcgtagtata

SEQ ID NO: 2319737 - DNA, 25 bp, Homo sapien
tagagggtgtcattgcgtagtatag

SEQ ID NO: 2319738 - DNA, 25 bp, Homo sapien
gtgtcattgcgtagtataggaggaa

SEQ ID NO: 2319739 - DNA, 25 bp, Homo sapien
actgaagactgcagtgctacacctg

SEQ ID NO: 2319740 - DNA, 25 bp, Homo sapien
gaagactgcagtgctacacctggct

SEQ ID NO: 2319741 - DNA, 25 bp, Homo sapien
tgaagactgcagtgctacacctggc

SEQ ID NO: 2319742 - DNA, 25 bp, Homo sapien
gactgcagtgctacacctggctgag

SEQ ID NO: 2319743 - DNA, 25 bp, Homo sapien
tgaagcccagttgtacgtcttaccc

SEQ ID NO: 2319744 - DNA, 25 bp, Homo sapien
ggcataaatttcagggactgctagc

SEQ ID NO: 2319745 - DNA, 25 bp, Homo sapien
aacatgtagtatcaggattctgaac

SEQ ID NO: 2319746 - DNA, 25 bp, Homo sapien
gttattaatatatctgtcaggtgca

SEQ ID NO: 2319747 - DNA, 25 bp, Homo sapien
gttaatataatacagcacggttttg

SEQ ID NO: 2319748 - DNA, 25 bp, Homo sapien
ggaacagaactagatcagtcatatc

SEQ ID NO: 2319749 - DNA, 25 bp, Homo sapien
tcagtcatatctgggtcccattctt

SEQ ID NO: 2319750 - DNA, 25 bp, Homo sapien
gtcccattcttagctctgataccac

SEQ ID NO: 2319751 - DNA, 25 bp, Homo sapien
gagtgactcttactgcgttagcgcg

SEQ ID NO: 2319752 - DNA, 25 bp, Homo sapien
agtgctagtgtctcggctcctggga

SEQ ID NO: 2319753 - DNA, 25 bp, Homo sapien
gcagtgcttagggagccccaggttt

SEQ ID NO: 2319754 - DNA, 25 bp, Homo sapien
caggttttggctactggatccaggg

SEQ ID NO: 2319755 - DNA, 25 bp, Homo sapien
cccaacctatcttgattcatctgac

SEQ ID NO: 2319756 - DNA, 25 bp, Homo sapien
ctcctagtccctccctaaacatctt

SEQ ID NO: 2319757 - DNA, 25 bp, Homo sapien
cccccaacctatcttgattcatctg

SEQ ID NO: 2319758 - DNA, 25 bp, Homo sapien
ttctctcctagtccctccctaaaca

SEQ ID NO: 2319759 - DNA, 25 bp, Homo sapien
aaaggtgacagagcgtacagtggga

SEQ ID NO: 2319760 - DNA, 25 bp, Homo sapien
ggtgacagagcgtacagtgggaaga

SEQ ID NO: 2319761 - DNA, 25 bp, Homo sapien
acagagcgtacagtgggaagagcca

SEQ ID NO: 2319762 - DNA, 25 bp, Homo sapien
gggaaaggtgacagagcgtacagtg

SEQ ID NO: 2319763 - DNA, 25 bp, Homo sapien
tacttccgttgcttggacctcttca

SEQ ID NO: 2319764 - DNA, 25 bp, Homo sapien
gcagcttcgtagtagtacttccgtt

SEQ ID NO: 2319765 - DNA, 25 bp, Homo sapien
cgtagtagtacttccgttgcttgga

SEQ ID NO: 2319766 - DNA, 25 bp, Homo sapien
gccagaaaggcagcttcgtagtagt

SEQ ID NO: 2319767 - DNA, 25 bp, Homo sapien
tcactggggcttattaggcccctct

SEQ ID NO: 2319768 - DNA, 25 bp, Homo sapien
cactggggcttattaggcccctctc

SEQ ID NO: 2319769 - DNA, 25 bp, Homo sapien
aatcactggggcttattaggcccct

SEQ ID NO: 2319770 - DNA, 25 bp, Homo sapien
ctggggcttattaggcccctctcct

SEQ ID NO: 2319771 - DNA, 25 bp, Homo sapien
gtccagctgagttctcttgccagag

SEQ ID NO: 2319772 - DNA, 25 bp, Homo sapien
catttccagtcatgggcacatctga

SEQ ID NO: 2319773 - DNA, 25 bp, Homo sapien
caagcagtccaggtatagcgaaggt

SEQ ID NO: 2319774 - DNA, 25 bp, Homo sapien
gagagccgagaccttgcacaatgca

SEQ ID NO: 2319775 - DNA, 25 bp, Homo sapien
tctcgccatcctcgaagagctttag

SEQ ID NO: 2319776 - DNA, 25 bp, Homo sapien
catcctcgaagagctttaggacatc

SEQ ID NO: 2319777 - DNA, 25 bp, Homo sapien
tagccatctcgccatcctcgaagag

SEQ ID NO: 2319778 - DNA, 25 bp, Homo sapien
cgaagagctttaggacatcactgac

SEQ ID NO: 2319779 - DNA, 25 bp, Homo sapien
tgtctgggaacattatccacttcga

SEQ ID NO: 2319780 - DNA, 25 bp, Homo sapien
ctcaaaggattgaaacagtgccagg

SEQ ID NO: 2319781 - DNA, 25 bp, Homo sapien
catttgtctcatttaagcagtgacc

SEQ ID NO: 2319782 - DNA, 25 bp, Homo sapien
tgctggaatccctcgtacccaatgg

SEQ ID NO: 2319783 - DNA, 25 bp, Homo sapien
ctaacttgtcttctggccgaccacc

SEQ ID NO: 2319784 - DNA, 25 bp, Homo sapien
caggaaacatcattgagacacacca

SEQ ID NO: 2319785 - DNA, 25 bp, Homo sapien
tggccgaccaccctccagaagggaa

SEQ ID NO: 2319786 - DNA, 25 bp, Homo sapien
aagtagcaggaaacatcattgagac

SEQ ID NO: 2319787 - DNA, 25 bp, Homo sapien
catatcccaaggacatcctaggccg

SEQ ID NO: 2319788 - DNA, 25 bp, Homo sapien
caggggagacaatacataatccata

SEQ ID NO: 2319789 - DNA, 25 bp, Homo sapien
caaggacatcctaggccgcctacat

SEQ ID NO: 2319790 - DNA, 25 bp, Homo sapien
cctcagtgaatgtgtcaggggagac

SEQ ID NO: 2319791 - DNA, 25 bp, Homo sapien
ggagagagcttttgggtgagaagcc

SEQ ID NO: 2319792 - DNA, 25 bp, Homo sapien
gtcagtttgtgagagatacccaaag

SEQ ID NO: 2319793 - DNA, 25 bp, Homo sapien
agagagcttttgggtgagaagccta

SEQ ID NO: 2319794 - DNA, 25 bp, Homo sapien
agggtcagtttgtgagagataccca

SEQ ID NO: 2319795 - DNA, 25 bp, Homo sapien
tcccatttctgtccgtgtcgtacag

SEQ ID NO: 2319796 - DNA, 25 bp, Homo sapien
tgtccgtgtcgtacagcttgaaggt

SEQ ID NO: 2319797 - DNA, 25 bp, Homo sapien
tttctgtccgtgtcgtacagcttga

SEQ ID NO: 2319798 - DNA, 25 bp, Homo sapien
ccatttctgtccgtgtcgtacagct

SEQ ID NO: 2319799 - DNA, 25 bp, Homo sapien
gagggtgcagacaaattaacacata

SEQ ID NO: 2319800 - DNA, 25 bp, Homo sapien
atattcccttgcccagcatacaggg

SEQ ID NO: 2319801 - DNA, 25 bp, Homo sapien
caggagggtgcagacaaattaacac

SEQ ID NO: 2319802 - DNA, 25 bp, Homo sapien
ggcaggagggtgcagacaaattaac

SEQ ID NO: 2319803 - DNA, 25 bp, Homo sapien
aatttagtcctagaggactcaacct

SEQ ID NO: 2319804 - DNA, 25 bp, Homo sapien
tagtcctagaggactcaacctctcc

SEQ ID NO: 2319805 - DNA, 25 bp, Homo sapien
tcaaatttagtcctagaggactcaa

SEQ ID NO: 2319806 - DNA, 25 bp, Homo sapien
tttagtcctagaggactcaacctct

SEQ ID NO: 2319807 - DNA, 25 bp, Homo sapien
aagagccacagccatatccccttta

SEQ ID NO: 2319808 - DNA, 25 bp, Homo sapien
taaggcagacccaattcatgtatcc

SEQ ID NO: 2319809 - DNA, 25 bp, Homo sapien
ccagcattctctttgaggggtcaag

SEQ ID NO: 2319810 - DNA, 25 bp, Homo sapien
tctcaggtatgtctgccaagtaaat

SEQ ID NO: 2319811 - DNA, 25 bp, Homo sapien
atccaggtattcagccactcgcatc

SEQ ID NO: 2319812 - DNA, 25 bp, Homo sapien
tccaggtattcagccactcgcatca

SEQ ID NO: 2319813 - DNA, 25 bp, Homo sapien
ccaggtattcagccactcgcatcat

SEQ ID NO: 2319814 - DNA, 25 bp, Homo sapien
ggaagaaggtacaagaagggacatg

SEQ ID NO: 2319815 - DNA, 25 bp, Homo sapien
agaaggtacaagaagggacatgaag

SEQ ID NO: 2319816 - DNA, 25 bp, Homo sapien
gaagaaggtacaagaagggacatga

SEQ ID NO: 2319817 - DNA, 25 bp, Homo sapien
aggtacaagaagggacatgaaggaa

SEQ ID NO: 2319818 - DNA, 25 bp, Homo sapien
tggtggccccagcccggacccactc

SEQ ID NO: 2319819 - DNA, 25 bp, Homo sapien
cagcactagcagtggcacggtggtg

SEQ ID NO: 2319820 - DNA, 25 bp, Homo sapien
gagccactgccatcatagtcaatct

SEQ ID NO: 2319821 - DNA, 25 bp, Homo sapien
cactagcagtggcacggtggtggcc

SEQ ID NO: 2319822 - DNA, 25 bp, Homo sapien
tgtgctgtccgtcgtccttcagagt

SEQ ID NO: 2319823 - DNA, 25 bp, Homo sapien
cacagattgcagtagactggtctgg

SEQ ID NO: 2319824 - DNA, 25 bp, Homo sapien
gctcagtccctgtttgccaagacca

SEQ ID NO: 2319825 - DNA, 25 bp, Homo sapien
caagaccaatgcttgactcgcacag

SEQ ID NO: 2319826 - DNA, 25 bp, Homo sapien
agctggataatgcttgggaggccca

SEQ ID NO: 2319827 - DNA, 25 bp, Homo sapien
ggcccaggtctaacagcaacagtaa

SEQ ID NO: 2319828 - DNA, 25 bp, Homo sapien
tcaagctcccacagatagctgggct

SEQ ID NO: 2319829 - DNA, 25 bp, Homo sapien
tcccttgcttgagggtgtagcagaa

SEQ ID NO: 2319830 - DNA, 25 bp, Homo sapien
ggtgctgacttcacaaggcagggct

SEQ ID NO: 2319831 - DNA, 25 bp, Homo sapien
gcacactggtcgtgaacagtgtact

SEQ ID NO: 2319832 - DNA, 25 bp, Homo sapien
caaggcagggctttcatggcacact

SEQ ID NO: 2319833 - DNA, 25 bp, Homo sapien
tccttccgagacttggcataggtgc

SEQ ID NO: 2319834 - DNA, 25 bp, Homo sapien
tgagggcagcaatgggccaagggcc

SEQ ID NO: 2319835 - DNA, 25 bp, Homo sapien
gccagggccaggatgtaggtgatgt

SEQ ID NO: 2319836 - DNA, 25 bp, Homo sapien
gggggtggaggcatgagatcactca

SEQ ID NO: 2319837 - DNA, 25 bp, Homo sapien
ggggctgagggcagcaatgggccaa

SEQ ID NO: 2319838 - DNA, 25 bp, Homo sapien
gaaaggcagttccttgtctggcagg

SEQ ID NO: 2319839 - DNA, 25 bp, Homo sapien
gcagttccttgtctggcagggtctg

SEQ ID NO: 2319840 - DNA, 25 bp, Homo sapien
ggcagttccttgtctggcagggtct

SEQ ID NO: 2319841 - DNA, 25 bp, Homo sapien
aaggcagttccttgtctggcagggt

SEQ ID NO: 2319842 - DNA, 25 bp, Homo sapien
cctcctcgcacccacacatgtgatt

SEQ ID NO: 2319843 - DNA, 25 bp, Homo sapien
ctctaggtggcaccatacacaatgc

SEQ ID NO: 2319844 - DNA, 25 bp, Homo sapien
cggatctttttctgacagcggtcgc

SEQ ID NO: 2319845 - DNA, 25 bp, Homo sapien
atacacaatgcagcccggtcagact

SEQ ID NO: 2319846 - DNA, 25 bp, Homo sapien
tgacagcggtcgcagcgcccggact

SEQ ID NO: 2319847 - DNA, 25 bp, Homo sapien
cagctctgcggggtaagacgcaccc

SEQ ID NO: 2319848 - DNA, 25 bp, Homo sapien
cagaagggatggctcccaaactgac

SEQ ID NO: 2319849 - DNA, 25 bp, Homo sapien
gtaagacgcacccagaagggatggc

SEQ ID NO: 2319850 - DNA, 25 bp, Homo sapien
aaggaggtgtggccggaggcccgtg

SEQ ID NO: 2319851 - DNA, 25 bp, Homo sapien
gaggcaggatgtgatcccggagcag

SEQ ID NO: 2319852 - DNA, 25 bp, Homo sapien
atgtgatcccggagcagcccacagt

SEQ ID NO: 2319853 - DNA, 25 bp, Homo sapien
ccgcttgcaggcagtcatcgtggat

SEQ ID NO: 2319854 - DNA, 25 bp, Homo sapien
caggacactgggatagatggaagat

SEQ ID NO: 2319855 - DNA, 25 bp, Homo sapien
ccatggtcttctggcttgttttgct

SEQ ID NO: 2319856 - DNA, 25 bp, Homo sapien
tttgctatttttacgatccggtcca

SEQ ID NO: 2319857 - DNA, 25 bp, Homo sapien
gctatttttacgatccggtccagag

SEQ ID NO: 2319858 - DNA, 25 bp, Homo sapien
tatttttacgatccggtccagaggc

SEQ ID NO: 2319859 - DNA, 25 bp, Homo sapien
ttgcccctgcttcccgccactctta

SEQ ID NO: 2319860 - DNA, 25 bp, Homo sapien
gcttcccgccactcttaggattgac

SEQ ID NO: 2319861 - DNA, 25 bp, Homo sapien
ctgcttcccgccactcttaggattg

SEQ ID NO: 2319862 - DNA, 25 bp, Homo sapien
tcccgccactcttaggattgacaaa

SEQ ID NO: 2319863 - DNA, 25 bp, Homo sapien
cctgtcgagggtttaatatatactg

SEQ ID NO: 2319864 - DNA, 25 bp, Homo sapien
tatctcaggaccatcctttaggagg

SEQ ID NO: 2319865 - DNA, 25 bp, Homo sapien
ttaatatatactggaacttccagag

SEQ ID NO: 2319866 - DNA, 25 bp, Homo sapien
ttaggaggttgaacacctgtcgagg

SEQ ID NO: 2319867 - DNA, 25 bp, Homo sapien
tccggctatcaggaacatccttgaa

SEQ ID NO: 2319868 - DNA, 25 bp, Homo sapien
aatccagcctactgtgccgtctcca

SEQ ID NO: 2319869 - DNA, 25 bp, Homo sapien
cacacaccaaaatccggctatcagg

SEQ ID NO: 2319870 - DNA, 25 bp, Homo sapien
caggaacatccttgaataatcggag

SEQ ID NO: 2319871 - DNA, 25 bp, Homo sapien
cttccccacgcccctccctgcactg

SEQ ID NO: 2319872 - DNA, 25 bp, Homo sapien
tccccacgcccctccctgcactgac

SEQ ID NO: 2319873 - DNA, 25 bp, Homo sapien
ttccccacgcccctccctgcactga

SEQ ID NO: 2319874 - DNA, 25 bp, Homo sapien
caacacagcaacaggaggcaaaact

SEQ ID NO: 2319875 - DNA, 25 bp, Homo sapien
ggcatcgagccagatcatttccagt

SEQ ID NO: 2319876 - DNA, 25 bp, Homo sapien
ggaggcaaaactggcaagttagctt

SEQ ID NO: 2319877 - DNA, 25 bp, Homo sapien
ccccatcttaggcatcgagccagat

SEQ ID NO: 2319878 - DNA, 25 bp, Homo sapien
tcctggcttaaagcgatcttctgac

SEQ ID NO: 2319879 - DNA, 25 bp, Homo sapien
cagatgttgaggatctgaaaactgg

SEQ ID NO: 2319880 - DNA, 25 bp, Homo sapien
tcaggttgagttagcagaaaactgc

SEQ ID NO: 2319881 - DNA, 25 bp, Homo sapien
aacaagttataatgagcactcagag

SEQ ID NO: 2319882 - DNA, 25 bp, Homo sapien
tagaaaagaactcagccctgccaac

SEQ ID NO: 2319883 - DNA, 25 bp, Homo sapien
catactggatcatctgggtggtacc

SEQ ID NO: 2319884 - DNA, 25 bp, Homo sapien
gcaatgggacgctaatgcagaccct

SEQ ID NO: 2319885 - DNA, 25 bp, Homo sapien
taattggcgacagcagcaatgggac

SEQ ID NO: 2319886 - DNA, 25 bp, Homo sapien
agaggtggtattgagcccagaccgt

SEQ ID NO: 2319887 - DNA, 25 bp, Homo sapien
gaggtggtattgagcccagaccgtg

SEQ ID NO: 2319888 - DNA, 25 bp, Homo sapien
cagaggtggtattgagcccagaccg

SEQ ID NO: 2319889 - DNA, 25 bp, Homo sapien
ggctctgttgcccaaactagagtgc

SEQ ID NO: 2319890 - DNA, 25 bp, Homo sapien
ccggctctgttgcccaaactagagt

SEQ ID NO: 2319891 - DNA, 25 bp, Homo sapien
ctctgttgcccaaactagagtgcag

SEQ ID NO: 2319892 - DNA, 25 bp, Homo sapien
ctgttgcccaaactagagtgcagtg

SEQ ID NO: 2319893 - DNA, 25 bp, Homo sapien
tatgtaccactttactcatctctaa

SEQ ID NO: 2319894 - DNA, 25 bp, Homo sapien
gttgaggtatcacctccacagacca

SEQ ID NO: 2319895 - DNA, 25 bp, Homo sapien
tccacagaccatcgatccatatgta

SEQ ID NO: 2319896 - DNA, 25 bp, Homo sapien
cacgccaatagagaagtagttattg

SEQ ID NO: 2319897 - DNA, 25 bp, Homo sapien
gaaggtcagtacagagctcaatctc

SEQ ID NO: 2319898 - DNA, 25 bp, Homo sapien
tcccttgcaactcagcactgtactg

SEQ ID NO: 2319899 - DNA, 25 bp, Homo sapien
agcactgtactgcactcccaatttc

SEQ ID NO: 2319900 - DNA, 25 bp, Homo sapien
gagttcgggacatgaaggtcagtac

SEQ ID NO: 2319901 - DNA, 25 bp, Homo sapien
ctgctgttgaacttctccggatatt

SEQ ID NO: 2319902 - DNA, 25 bp, Homo sapien
catgatgtggaatcgatgagcaata

SEQ ID NO: 2319903 - DNA, 25 bp, Homo sapien
gaacttctccggatatttctctcgc

SEQ ID NO: 2319904 - DNA, 25 bp, Homo sapien
ggatatttctctcgcatgatgtgga

SEQ ID NO: 2319905 - DNA, 25 bp, Homo sapien
gtacgtgacagggaagggcatcaac

SEQ ID NO: 2319906 - DNA, 25 bp, Homo sapien
caacacaaggcccagtagggaggga

SEQ ID NO: 2319907 - DNA, 25 bp, Homo sapien
acacaaggcccagtagggagggaca

SEQ ID NO: 2319908 - DNA, 25 bp, Homo sapien
caacctcctaactttagtcccatgg

SEQ ID NO: 2319909 - DNA, 25 bp, Homo sapien
cagatgtggcaaattcgaagtacca

SEQ ID NO: 2319910 - DNA, 25 bp, Homo sapien
gcaaattcgaagtaccatagcttgt

SEQ ID NO: 2319911 - DNA, 25 bp, Homo sapien
tcaactgtcaaagactcctccagct

SEQ ID NO: 2319912 - DNA, 25 bp, Homo sapien
tgtggcaaattcgaagtaccatagc

SEQ ID NO: 2319913 - DNA, 25 bp, Homo sapien
gtacagatcctcacctcatggcatg

SEQ ID NO: 2319914 - DNA, 25 bp, Homo sapien
gactagtgtatcttgaggacttgga

SEQ ID NO: 2319915 - DNA, 25 bp, Homo sapien
tcccagttagggagggtacagatcc

SEQ ID NO: 2319916 - DNA, 25 bp, Homo sapien
tcatagatgtgatcgctccctccac

SEQ ID NO: 2319917 - DNA, 25 bp, Homo sapien
gccttctagggacaggttgctcaga

SEQ ID NO: 2319918 - DNA, 25 bp, Homo sapien
ggttgatcccatagatatccccatg

SEQ ID NO: 2319919 - DNA, 25 bp, Homo sapien
tagggatgtttagcactgcgatgcc

SEQ ID NO: 2319920 - DNA, 25 bp, Homo sapien
tcagatccagcggtttcccacagat

SEQ ID NO: 2319921 - DNA, 25 bp, Homo sapien
gacgtccagcattcttgagcttggt

SEQ ID NO: 2319922 - DNA, 25 bp, Homo sapien
tgagcttggtatagatttggcccat

SEQ ID NO: 2319923 - DNA, 25 bp, Homo sapien
gatttggcccatctcaattgcaccc

SEQ ID NO: 2319924 - DNA, 25 bp, Homo sapien
ctcagagcacttggccagccgacgt

SEQ ID NO: 2319925 - DNA, 25 bp, Homo sapien
tgtacagggcgtctgcatccagggt

SEQ ID NO: 2319926 - DNA, 25 bp, Homo sapien
cagggttctccgtcaatttgcatgg

SEQ ID NO: 2319927 - DNA, 25 bp, Homo sapien
catccagggttctccgtcaatttgc

SEQ ID NO: 2319928 - DNA, 25 bp, Homo sapien
caatttgcatgggaagggtttttgt

SEQ ID NO: 2319929 - DNA, 25 bp, Homo sapien
tagagaggccacgatagggaaacca

SEQ ID NO: 2319930 - DNA, 25 bp, Homo sapien
caggcatcagaagggtgtaaagaag

SEQ ID NO: 2319931 - DNA, 25 bp, Homo sapien
cagaggcaggacctgatactttggg

SEQ ID NO: 2319932 - DNA, 25 bp, Homo sapien
tttggctgggatcgtcaatactcac

SEQ ID NO: 2319933 - DNA, 25 bp, Homo sapien
agccaaagaaattggtggagcgggg

SEQ ID NO: 2319934 - DNA, 25 bp, Homo sapien
atctggttcttgtgggtgatcttga

SEQ ID NO: 2319935 - DNA, 25 bp, Homo sapien
cgggggggtgggcccatgagcatgg

SEQ ID NO: 2319936 - DNA, 25 bp, Homo sapien
tctggttcttgtgggtgatcttgat

SEQ ID NO: 2319937 - DNA, 25 bp, Homo sapien
cacttacttagcagatcccaaaggg

SEQ ID NO: 2319938 - DNA, 25 bp, Homo sapien
gggagaatctacgtcatttaaggag

SEQ ID NO: 2319939 - DNA, 25 bp, Homo sapien
cattttattcagatgaggcactttc

SEQ ID NO: 2319940 - DNA, 25 bp, Homo sapien
gcaggagtatgtggcagcaatgtac

SEQ ID NO: 2319941 - DNA, 25 bp, Homo sapien
ctctcgctcttgtcaatttggccaa

SEQ ID NO: 2319942 - DNA, 25 bp, Homo sapien
accgagttcccgaccgccaccagag

SEQ ID NO: 2319943 - DNA, 25 bp, Homo sapien
ggccaacttgaaacaatgttgccgc

SEQ ID NO: 2319944 - DNA, 25 bp, Homo sapien
aatgttgccgcctcccaccgagttc

SEQ ID NO: 2319945 - DNA, 25 bp, Homo sapien
tgcagaaggcggaccctggctctcg

SEQ ID NO: 2319946 - DNA, 25 bp, Homo sapien
tgggaaccctgcagaaggcggaccc

SEQ ID NO: 2319947 - DNA, 25 bp, Homo sapien
aagcgccagcgagtcgggtcagccc

SEQ ID NO: 2319948 - DNA, 25 bp, Homo sapien
ccgggtcgggatggaacgcagtata

SEQ ID NO: 2319949 - DNA, 25 bp, Homo sapien
ttgtacacaactccgtacgtgccct

SEQ ID NO: 2319950 - DNA, 25 bp, Homo sapien
gtttctggctttgtacacaactccg

SEQ ID NO: 2319951 - DNA, 25 bp, Homo sapien
acctctcccgtcaacttgtttctgg

SEQ ID NO: 2319952 - DNA, 25 bp, Homo sapien
tgtccaggcggattttcttaagcgc

SEQ ID NO: 2319953 - DNA, 25 bp, Homo sapien
caatcaaggaggtccccagttagga

SEQ ID NO: 2319954 - DNA, 25 bp, Homo sapien
ccagttaggagtcccgggtacagag

SEQ ID NO: 2319955 - DNA, 25 bp, Homo sapien
tctccccagggagtataagtatact

SEQ ID NO: 2319956 - DNA, 25 bp, Homo sapien
cacgatccggctcagtttgggaaga

SEQ ID NO: 2319957 - DNA, 25 bp, Homo sapien
aaagccgcctggtgaaggtgaagca

SEQ ID NO: 2319958 - DNA, 25 bp, Homo sapien
gattctcgccggttcccacataact

SEQ ID NO: 2319959 - DNA, 25 bp, Homo sapien
gagctaattcttgggtagtcagggt

SEQ ID NO: 2319960 - DNA, 25 bp, Homo sapien
ttcattcagaaaggcgattctcgcc

SEQ ID NO: 2319961 - DNA, 25 bp, Homo sapien
aatattaggatggttaagctcctta

SEQ ID NO: 2319962 - DNA, 25 bp, Homo sapien
ttaagcagagagatctctcggatgg

SEQ ID NO: 2319963 - DNA, 25 bp, Homo sapien
gctccttaagcagagagatctctcg

SEQ ID NO: 2319964 - DNA, 25 bp, Homo sapien
taggatggttaagctccttaagcag

SEQ ID NO: 2319965 - DNA, 25 bp, Homo sapien
gaagaggaatgccagtgagagcaga

SEQ ID NO: 2319966 - DNA, 25 bp, Homo sapien
agaggcatccatgaatttcttgaga

SEQ ID NO: 2319967 - DNA, 25 bp, Homo sapien
cagaaattcaaaaaccaggtagagt

SEQ ID NO: 2319968 - DNA, 25 bp, Homo sapien
cagaggcatccatgaatttcttgag

SEQ ID NO: 2319969 - DNA, 25 bp, Homo sapien
caaaagctctggctagtccaaagtc

SEQ ID NO: 2319970 - DNA, 25 bp, Homo sapien
tctcggtggaggacccgatgagaat

SEQ ID NO: 2319971 - DNA, 25 bp, Homo sapien
caaagtctgctagcttgatggcccc

SEQ ID NO: 2319972 - DNA, 25 bp, Homo sapien
tgtaagtacgaacagggactccaaa

SEQ ID NO: 2319973 - DNA, 25 bp, Homo sapien
ggaataatatttgcagcccaggagg

SEQ ID NO: 2319974 - DNA, 25 bp, Homo sapien
tggaataatatttgcagcccaggag

SEQ ID NO: 2319975 - DNA, 25 bp, Homo sapien
gtggaataatatttgcagcccagga

SEQ ID NO: 2319976 - DNA, 25 bp, Homo sapien
gcggtcatcccccaaccttgtgatg

SEQ ID NO: 2319977 - DNA, 25 bp, Homo sapien
agatacgagcacagcgggcagagac

SEQ ID NO: 2319978 - DNA, 25 bp, Homo sapien
gatgcagccacttctagatacgagc

SEQ ID NO: 2319979 - DNA, 25 bp, Homo sapien
tagggggtagacactgcggtcatcc

SEQ ID NO: 2319980 - DNA, 25 bp, Homo sapien
ctaaaatcttgccgggcccacttgg

SEQ ID NO: 2319981 - DNA, 25 bp, Homo sapien
tgtaatcaggcatagaagtaactcc

SEQ ID NO: 2319982 - DNA, 25 bp, Homo sapien
agaatctccagggaatagggcccgg

SEQ ID NO: 2319983 - DNA, 25 bp, Homo sapien
cagagtccgaaagatccggaagagc

SEQ ID NO: 2319984 - DNA, 25 bp, Homo sapien
gctgccttggccgaaatccgcttgt

SEQ ID NO: 2319985 - DNA, 25 bp, Homo sapien
tggggtactggcttggtcacatcct

SEQ ID NO: 2319986 - DNA, 25 bp, Homo sapien
tgttagggtcgtagtgcagcatttg

SEQ ID NO: 2319987 - DNA, 25 bp, Homo sapien
aatccgcttgttagggtcgtagtgc

SEQ ID NO: 2319988 - DNA, 25 bp, Homo sapien
cctcataaggccatggtgaagcaat

SEQ ID NO: 2319989 - DNA, 25 bp, Homo sapien
ttaaggcaagttcagagggcccacc

SEQ ID NO: 2319990 - DNA, 25 bp, Homo sapien
tacaaaaccccaaggtgcacatggc

SEQ ID NO: 2319991 - DNA, 25 bp, Homo sapien
ttggctggccaagactagaaggtga

SEQ ID NO: 2319992 - DNA, 25 bp, Homo sapien
aaactaggcacatttttttaatgag

SEQ ID NO: 2319993 - DNA, 25 bp, Homo sapien
actaggcacatttttttaatgagct

SEQ ID NO: 2319994 - DNA, 25 bp, Homo sapien
ctaggcacatttttttaatgagcta

SEQ ID NO: 2319995 - DNA, 25 bp, Homo sapien
aactaggcacatttttttaatgagc

SEQ ID NO: 2319996 - DNA, 25 bp, Homo sapien
gtgtcgaacagacaaacagctgcag

SEQ ID NO: 2319997 - DNA, 25 bp, Homo sapien
caagcctgtgtcgaacagacaaaca

SEQ ID NO: 2319998 - DNA, 25 bp, Homo sapien
ccccaagcctgtgtcgaacagacaa

SEQ ID NO: 2319999 - DNA, 25 bp, Homo sapien
gcctgtgtcgaacagacaaacagct

SEQ ID NO: 2320000 - DNA, 25 bp, Homo sapien
tcttgaaatgagagttctaccactt

SEQ ID NO: 2320001 - DNA, 25 bp, Homo sapien
gaaatgagagttctaccacttggct

SEQ ID NO: 2320002 - DNA, 25 bp, Homo sapien
taaacccaagtcaccaaaatcttga

SEQ ID NO: 2320003 - DNA, 25 bp, Homo sapien
ttgaaatgagagttctaccacttgg

SEQ ID NO: 2320004 - DNA, 25 bp, Homo sapien
cctagcatacgacatcacggatgag

SEQ ID NO: 2320005 - DNA, 25 bp, Homo sapien
attgatttcaagatccgcactgtgg

SEQ ID NO: 2320006 - DNA, 25 bp, Homo sapien
tgcagaggacaacttcaacaacact

SEQ ID NO: 2320007 - DNA, 25 bp, Homo sapien
cctactaccgtggagccatgggcat

SEQ ID NO: 2320008 - DNA, 25 bp, Homo sapien
tagaagtgcagctctgccgggtgca

SEQ ID NO: 2320009 - DNA, 25 bp, Homo sapien
taactagggaggattgaggcctgac

SEQ ID NO: 2320010 - DNA, 25 bp, Homo sapien
gaagtacggctctacaagaatgact

SEQ ID NO: 2320011 - DNA, 25 bp, Homo sapien
gattattaccttcaaacccgagaca

SEQ ID NO: 2320012 - DNA, 25 bp, Homo sapien
aggggatttccaggcttcaacactc

SEQ ID NO: 2320013 - DNA, 25 bp, Homo sapien
gggaggggatttccaggcttcaaca

SEQ ID NO: 2320014 - DNA, 25 bp, Homo sapien
cagaatgggaaagggtggagggagg

SEQ ID NO: 2320015 - DNA, 25 bp, Homo sapien
ggccagattatcagaatgggaaagg

SEQ ID NO: 2320016 - DNA, 25 bp, Homo sapien
cagcaggaccaatttgaactggcaa

SEQ ID NO: 2320017 - DNA, 25 bp, Homo sapien
gacaaaacgtaataccaggcttgac

SEQ ID NO: 2320018 - DNA, 25 bp, Homo sapien
caggcttgactttcccactgcagat

SEQ ID NO: 2320019 - DNA, 25 bp, Homo sapien
catggaactgccctttgacaaaacg

SEQ ID NO: 2320020 - DNA, 25 bp, Homo sapien
taagctgtgatatcgctcctgccca

SEQ ID NO: 2320021 - DNA, 25 bp, Homo sapien
gcttgggcacccctgtagtacatgg

SEQ ID NO: 2320022 - DNA, 25 bp, Homo sapien
tctagacaaacggactgggtgagga

SEQ ID NO: 2320023 - DNA, 25 bp, Homo sapien
taaaccacgattgcagcttgggcac

SEQ ID NO: 2320024 - DNA, 25 bp, Homo sapien
tcacccatgtctttgctcgggcaaa

SEQ ID NO: 2320025 - DNA, 25 bp, Homo sapien
ggtcagctttgttccctgccagggc

SEQ ID NO: 2320026 - DNA, 25 bp, Homo sapien
gggcaataacgatgctaggactggc

SEQ ID NO: 2320027 - DNA, 25 bp, Homo sapien
acgtttgttggccaggtcagctttg

SEQ ID NO: 2320028 - DNA, 25 bp, Homo sapien
acagaggaagtgttagagaggaact

SEQ ID NO: 2320029 - DNA, 25 bp, Homo sapien
cccaggaacagaggaagtgttagag

SEQ ID NO: 2320030 - DNA, 25 bp, Homo sapien
gaacagaggaagtgttagagaggaa

SEQ ID NO: 2320031 - DNA, 25 bp, Homo sapien
aggaacagaggaagtgttagagagg

SEQ ID NO: 2320032 - DNA, 25 bp, Homo sapien
ctgcaaggagtgggatgtattagtg

SEQ ID NO: 2320033 - DNA, 25 bp, Homo sapien
gttgtcatctgcatatgcctgggcc

SEQ ID NO: 2320034 - DNA, 25 bp, Homo sapien
attcacgttcatagctgtcttggct

SEQ ID NO: 2320035 - DNA, 25 bp, Homo sapien
agtctccatgaacaataagctgttg

SEQ ID NO: 2320036 - DNA, 25 bp, Homo sapien
catagctgtcttggctgaagtctcc

SEQ ID NO: 2320037 - DNA, 25 bp, Homo sapien
gaagacaagggagctaaagctgcag

SEQ ID NO: 2320038 - DNA, 25 bp, Homo sapien
cctggccggcaaacttacacattga

SEQ ID NO: 2320039 - DNA, 25 bp, Homo sapien
tactcgcacctatccttgatttggg

SEQ ID NO: 2320040 - DNA, 25 bp, Homo sapien
gcagccaaggatggaggtcataaca

SEQ ID NO: 2320041 - DNA, 25 bp, Homo sapien
ggttcactctttggcaacttcttag

SEQ ID NO: 2320042 - DNA, 25 bp, Homo sapien
tgctgcacctcccagattctggggt

SEQ ID NO: 2320043 - DNA, 25 bp, Homo sapien
agattctggggttcactctttggca

SEQ ID NO: 2320044 - DNA, 25 bp, Homo sapien
cctcccagattctggggttcactct

SEQ ID NO: 2320045 - DNA, 25 bp, Homo sapien
gctgggactgttcatggagatccac

SEQ ID NO: 2320046 - DNA, 25 bp, Homo sapien
tctgctgggactgttcatggagatc

SEQ ID NO: 2320047 - DNA, 25 bp, Homo sapien
tgctgggactgttcatggagatcca

SEQ ID NO: 2320048 - DNA, 25 bp, Homo sapien
tgggactgttcatggagatccacac

SEQ ID NO: 2320049 - DNA, 25 bp, Homo sapien
gtagggatggaggttatttcttagc

SEQ ID NO: 2320050 - DNA, 25 bp, Homo sapien
ttcttagctcttgtgctagctccat

SEQ ID NO: 2320051 - DNA, 25 bp, Homo sapien
gaagcgttaaaaagtgccatgacgg

SEQ ID NO: 2320052 - DNA, 25 bp, Homo sapien
aaagtgccatgacggagctgtcagg

SEQ ID NO: 2320053 - DNA, 25 bp, Homo sapien
ctcagtgtgctgttaccgtaggggt

SEQ ID NO: 2320054 - DNA, 25 bp, Homo sapien
ctggtgtttgttgctgaagcgttaa

SEQ ID NO: 2320055 - DNA, 25 bp, Homo sapien
gaggctcaagaacagggactgacca

SEQ ID NO: 2320056 - DNA, 25 bp, Homo sapien
gaggagaaaagatacgtaagtcgct

SEQ ID NO: 2320057 - DNA, 25 bp, Homo sapien
taagtcgctgtcttgtacctataat

SEQ ID NO: 2320058 - DNA, 25 bp, Homo sapien
aaagaggctcaagaacagggactga

SEQ ID NO: 2320059 - DNA, 25 bp, Homo sapien
agttcctgggttcaccactttctgc

SEQ ID NO: 2320060 - DNA, 25 bp, Homo sapien
tcctgggttcaccactttctgcatc

SEQ ID NO: 2320061 - DNA, 25 bp, Homo sapien
tcagttcctgggttcaccactttct

SEQ ID NO: 2320062 - DNA, 25 bp, Homo sapien
gttcctgggttcaccactttctgca

SEQ ID NO: 2320063 - DNA, 25 bp, Homo sapien
agggcccttaatgtaaatgaactgg

SEQ ID NO: 2320064 - DNA, 25 bp, Homo sapien
gggcccttaatgtaaatgaactgga

SEQ ID NO: 2320065 - DNA, 25 bp, Homo sapien
cagggcccttaatgtaaatgaactg

SEQ ID NO: 2320066 - DNA, 25 bp, Homo sapien
cttgtaaaaaggatgcactgggtgc

SEQ ID NO: 2320067 - DNA, 25 bp, Homo sapien
taccttggcctgtgctatcctgaga

SEQ ID NO: 2320068 - DNA, 25 bp, Homo sapien
taagtggaagaacctaagctgggtc

SEQ ID NO: 2320069 - DNA, 25 bp, Homo sapien
aatacatcggtaaatcagcagtcgc

SEQ ID NO: 2320070 - DNA, 25 bp, Homo sapien
tggcagcttaacaccccgaagtatg

SEQ ID NO: 2320071 - DNA, 25 bp, Homo sapien
cccttaacaagagcaatggcagctt

SEQ ID NO: 2320072 - DNA, 25 bp, Homo sapien
gtagtctcttatctcaaagtaaggg

SEQ ID NO: 2320073 - DNA, 25 bp, Homo sapien
acccttttgtcatttgatgcaggac

SEQ ID NO: 2320074 - DNA, 25 bp, Homo sapien
tgcaccagggctgtatgtccggagc

SEQ ID NO: 2320075 - DNA, 25 bp, Homo sapien
tgtgatctccactttaaacccaggg

SEQ ID NO: 2320076 - DNA, 25 bp, Homo sapien
gagtccattatacccctggtgtgca

SEQ ID NO: 2320077 - DNA, 25 bp, Homo sapien
agaatgggacccttgtgcaccaggg

SEQ ID NO: 2320078 - DNA, 25 bp, Homo sapien
agcttatccctcagccattggctgg

SEQ ID NO: 2320079 - DNA, 25 bp, Homo sapien
gaagcgggtggctcaaccattggct

SEQ ID NO: 2320080 - DNA, 25 bp, Homo sapien
tccggctgcagtaagtgacctctca

SEQ ID NO: 2320081 - DNA, 25 bp, Homo sapien
gcccagctctgcgagttctcgagaa

SEQ ID NO: 2320082 - DNA, 25 bp, Homo sapien
caggtttgggagggacagccttttg

SEQ ID NO: 2320083 - DNA, 25 bp, Homo sapien
cagcagcctgtttgtactagaccag

SEQ ID NO: 2320084 - DNA, 25 bp, Homo sapien
ctgtttgtactagaccagagcagtg

SEQ ID NO: 2320085 - DNA, 25 bp, Homo sapien
gggctgactcgcaggtgaactcagt

SEQ ID NO: 2320086 - DNA, 25 bp, Homo sapien
agctcagcaaattgaggagttaatg

SEQ ID NO: 2320087 - DNA, 25 bp, Homo sapien
ctcagcaaattgaggagttaatggc

SEQ ID NO: 2320088 - DNA, 25 bp, Homo sapien
tcagcaaattgaggagttaatggcc

SEQ ID NO: 2320089 - DNA, 25 bp, Homo sapien
cagcaaattgaggagttaatggcca

SEQ ID NO: 2320090 - DNA, 25 bp, Homo sapien
tcaactattttccaagcggttgacc

SEQ ID NO: 2320091 - DNA, 25 bp, Homo sapien
agctgggaactggaccccaacctag

SEQ ID NO: 2320092 - DNA, 25 bp, Homo sapien
ttccaagcggttgaccatagctaac

SEQ ID NO: 2320093 - DNA, 25 bp, Homo sapien
cagctgggaactggaccccaaccta

SEQ ID NO: 2320094 - DNA, 25 bp, Homo sapien
ggagacctacacaggaggactgcta

SEQ ID NO: 2320095 - DNA, 25 bp, Homo sapien
aattccggacacactagcactttgg

SEQ ID NO: 2320096 - DNA, 25 bp, Homo sapien
tttgggagacctacacaggaggact

SEQ ID NO: 2320097 - DNA, 25 bp, Homo sapien
attccggacacactagcactttggg

SEQ ID NO: 2320098 - DNA, 25 bp, Homo sapien
ctgctactccggagacaggagaatg

SEQ ID NO: 2320099 - DNA, 25 bp, Homo sapien
ccctgctactccggagacaggagaa

SEQ ID NO: 2320100 - DNA, 25 bp, Homo sapien
cctgctactccggagacaggagaat

SEQ ID NO: 2320101 - DNA, 25 bp, Homo sapien
tccctgctactccggagacaggaga

SEQ ID NO: 2320102 - DNA, 25 bp, Homo sapien
tccaccatagagaacgatgcctggg

SEQ ID NO: 2320103 - DNA, 25 bp, Homo sapien
taaccagcccgatttcctgagcaag

SEQ ID NO: 2320104 - DNA, 25 bp, Homo sapien
tgagcaagattccaagccgttctga

SEQ ID NO: 2320105 - DNA, 25 bp, Homo sapien
gaaaccaaatgtctactggccagat

SEQ ID NO: 2320106 - DNA, 25 bp, Homo sapien
ctaagggaatgggtgagaggaagac

SEQ ID NO: 2320107 - DNA, 25 bp, Homo sapien
gggagtccaaatgggcccttagaga

SEQ ID NO: 2320108 - DNA, 25 bp, Homo sapien
tgaggagtcttgagagtgggagtcc

SEQ ID NO: 2320109 - DNA, 25 bp, Homo sapien
ttagagaaaacttggagcacttcag

SEQ ID NO: 2320110 - DNA, 25 bp, Homo sapien
aggaagattctgggatcaagatagg

SEQ ID NO: 2320111 - DNA, 25 bp, Homo sapien
attctgggatcaagatagggagacc

SEQ ID NO: 2320112 - DNA, 25 bp, Homo sapien
ggaagattctgggatcaagataggg

SEQ ID NO: 2320113 - DNA, 25 bp, Homo sapien
gattctgggatcaagatagggagac

SEQ ID NO: 2320114 - DNA, 25 bp, Homo sapien
gagcctgaggaccacagctctgtgc

SEQ ID NO: 2320115 - DNA, 25 bp, Homo sapien
agcctgaggaccacagctctgtgca

SEQ ID NO: 2320116 - DNA, 25 bp, Homo sapien
gcagatccttgaggggattgacttg

SEQ ID NO: 2320117 - DNA, 25 bp, Homo sapien
catttgtggagcaggcctgaatgca

SEQ ID NO: 2320118 - DNA, 25 bp, Homo sapien
gatccttgaggggattgacttgagt

SEQ ID NO: 2320119 - DNA, 25 bp, Homo sapien
gcaggcctgaatgcagatccttgag

SEQ ID NO: 2320120 - DNA, 25 bp, Homo sapien
gatggtcctgataggccaacactgc

SEQ ID NO: 2320121 - DNA, 25 bp, Homo sapien
caccgagacctaatagggtccccat

SEQ ID NO: 2320122 - DNA, 25 bp, Homo sapien
cctacaccgatggtcctgataggcc

SEQ ID NO: 2320123 - DNA, 25 bp, Homo sapien
ataggccaacactgcaccgagacct

SEQ ID NO: 2320124 - DNA, 25 bp, Homo sapien
tcagcataagggtcagaggtctcca

SEQ ID NO: 2320125 - DNA, 25 bp, Homo sapien
tgactgtgatctcgtacctgggaaa

SEQ ID NO: 2320126 - DNA, 25 bp, Homo sapien
gttgtgaacagcatagagggcccag

SEQ ID NO: 2320127 - DNA, 25 bp, Homo sapien
gagagaagcctttgtaatcccgccg

SEQ ID NO: 2320128 - DNA, 25 bp, Homo sapien
ccagagttgtgatccaagaagttga

SEQ ID NO: 2320129 - DNA, 25 bp, Homo sapien
catagtgtccaaagagggaaggtcc

SEQ ID NO: 2320130 - DNA, 25 bp, Homo sapien
aaacaaggccttgatggcagtaggc

SEQ ID NO: 2320131 - DNA, 25 bp, Homo sapien
gaactataaagggagacggttgtgc

SEQ ID NO: 2320132 - DNA, 25 bp, Homo sapien
cgcgcgcgcgcaggctgtgaggggt

SEQ ID NO: 2320133 - DNA, 25 bp, Homo sapien
ccgcgcgcgcgcaggctgtgagggg

SEQ ID NO: 2320134 - DNA, 25 bp, Homo sapien
tagatctcagatggatgcatctttt

SEQ ID NO: 2320135 - DNA, 25 bp, Homo sapien
ttctttgcgcttctctgtcctcccc

SEQ ID NO: 2320136 - DNA, 25 bp, Homo sapien
tctcttgttctttgcgcttctctgt

SEQ ID NO: 2320137 - DNA, 25 bp, Homo sapien
agatctcagatggatgcatcttttc

SEQ ID NO: 2320138 - DNA, 25 bp, Homo sapien
cagcttcattatccaagtgcttggg

SEQ ID NO: 2320139 - DNA, 25 bp, Homo sapien
cagtggaaaggtctgactcattttt

SEQ ID NO: 2320140 - DNA, 25 bp, Homo sapien
aggtctgactcatttttcaccaggc

SEQ ID NO: 2320141 - DNA, 25 bp, Homo sapien
ggtgaccttctgtctacatataata

SEQ ID NO: 2320142 - DNA, 25 bp, Homo sapien
agcggccattgcagtcttctatgtc

SEQ ID NO: 2320143 - DNA, 25 bp, Homo sapien
cataggagcggccattgcagtcttc

SEQ ID NO: 2320144 - DNA, 25 bp, Homo sapien
cagacacataggagcggccattgca

SEQ ID NO: 2320145 - DNA, 25 bp, Homo sapien
ggccattgcagtcttctatgtccat

SEQ ID NO: 2320146 - DNA, 25 bp, Homo sapien
tatgtgtgtctgacccatcttgcta

SEQ ID NO: 2320147 - DNA, 25 bp, Homo sapien
gccaatgactctcatatgtgtgtct

SEQ ID NO: 2320148 - DNA, 25 bp, Homo sapien
tcctttagtgcatgccaataattcc

SEQ ID NO: 2320149 - DNA, 25 bp, Homo sapien
tacattacccgggtgttgccaatga

SEQ ID NO: 2320150 - DNA, 25 bp, Homo sapien
cgcagtgtgcttcgggagggctgca

SEQ ID NO: 2320151 - DNA, 25 bp, Homo sapien
gaggcccgcagtgtgcttcgggagg

SEQ ID NO: 2320152 - DNA, 25 bp, Homo sapien
agaagaactatgatggcctgtggag

SEQ ID NO: 2320153 - DNA, 25 bp, Homo sapien
ctatgatggcctgtggaggcccgca

SEQ ID NO: 2320154 - DNA, 25 bp, Homo sapien
gggagagcacgcttggatgtgcttg

SEQ ID NO: 2320155 - DNA, 25 bp, Homo sapien
aagaggaactgcacaacaaatgcct

SEQ ID NO: 2320156 - DNA, 25 bp, Homo sapien
gaggaactgcacaacaaatgcctga

SEQ ID NO: 2320157 - DNA, 25 bp, Homo sapien
gagatgctaggctacagcatccctt

SEQ ID NO: 2320158 - DNA, 25 bp, Homo sapien
gggaaccgccgtcatttcgcaggca

SEQ ID NO: 2320159 - DNA, 25 bp, Homo sapien
accgccgtcatttcgcaggcagcag

SEQ ID NO: 2320160 - DNA, 25 bp, Homo sapien
gaaccgccgtcatttcgcaggcagc

SEQ ID NO: 2320161 - DNA, 25 bp, Homo sapien
aggggaaccgccgtcatttcgcagg

SEQ ID NO: 2320162 - DNA, 25 bp, Homo sapien
ttatccttcccttgccggtgagacc

SEQ ID NO: 2320163 - DNA, 25 bp, Homo sapien
gagtgcgggtggtgtatgcatgtct

SEQ ID NO: 2320164 - DNA, 25 bp, Homo sapien
ggtggtgtatgcatgtctgcgtctc

SEQ ID NO: 2320165 - DNA, 25 bp, Homo sapien
cttggaaacggcgagggagtgcggg

SEQ ID NO: 2320166 - DNA, 25 bp, Homo sapien
gtggctttcccaattaaggcccaga

SEQ ID NO: 2320167 - DNA, 25 bp, Homo sapien
ttgtggctttcccaattaaggccca

SEQ ID NO: 2320168 - DNA, 25 bp, Homo sapien
tggctttcccaattaaggcccagaa

SEQ ID NO: 2320169 - DNA, 25 bp, Homo sapien
tgtggctttcccaattaaggcccag

SEQ ID NO: 2320170 - DNA, 25 bp, Homo sapien
gaggccttgaccctaaaaggatgag

SEQ ID NO: 2320171 - DNA, 25 bp, Homo sapien
gaacttgttggaaatccatcactgg

SEQ ID NO: 2320172 - DNA, 25 bp, Homo sapien
cactggtcccagcttattcggctga

SEQ ID NO: 2320173 - DNA, 25 bp, Homo sapien
ccagcgacttgctatgtggaggaaa

SEQ ID NO: 2320174 - DNA, 25 bp, Homo sapien
gctttttaggtgagccatggttacc

SEQ ID NO: 2320175 - DNA, 25 bp, Homo sapien
catatcatgaagtgagcatctcagg

SEQ ID NO: 2320176 - DNA, 25 bp, Homo sapien
catggttacctaaaaatgttgcccg

SEQ ID NO: 2320177 - DNA, 25 bp, Homo sapien
cattctatcccgtcaaagcctgagg

SEQ ID NO: 2320178 - DNA, 25 bp, Homo sapien
caaaataaagattccattataaaat

SEQ ID NO: 2320179 - DNA, 25 bp, Homo sapien
ctgaggcaagaaatccggaacacac

SEQ ID NO: 2320180 - DNA, 25 bp, Homo sapien
gaaatccggaacacaccctcctgag

SEQ ID NO: 2320181 - DNA, 25 bp, Homo sapien
aagaaatccggaacacaccctcctg

SEQ ID NO: 2320182 - DNA, 25 bp, Homo sapien
cattatctgctaacatgaacatgca

SEQ ID NO: 2320183 - DNA, 25 bp, Homo sapien
ctattgggataaacatactggtagc

SEQ ID NO: 2320184 - DNA, 25 bp, Homo sapien
gggataaacatactggtagccttct

SEQ ID NO: 2320185 - DNA, 25 bp, Homo sapien
ggtagccttctacattatctgctaa

SEQ ID NO: 2320186 - DNA, 25 bp, Homo sapien
cagatgttcaggacagacattcttc

SEQ ID NO: 2320187 - DNA, 25 bp, Homo sapien
tgcgccagggcggagaggaaaatgg

SEQ ID NO: 2320188 - DNA, 25 bp, Homo sapien
ctggagcccccagccggttcaggat

SEQ ID NO: 2320189 - DNA, 25 bp, Homo sapien
tgttcaggacagacattcttcccta

SEQ ID NO: 2320190 - DNA, 25 bp, Homo sapien
gagcatcactgcctgacgtccacag

SEQ ID NO: 2320191 - DNA, 25 bp, Homo sapien
ctttatctaggcctgagggcaagag

SEQ ID NO: 2320192 - DNA, 25 bp, Homo sapien
tcactgcctgacgtccacaggaagc

SEQ ID NO: 2320193 - DNA, 25 bp, Homo sapien
taggcctgagggcaagagcatcact

SEQ ID NO: 2320194 - DNA, 25 bp, Homo sapien
cagtgttgtatgctgggcaccatac

SEQ ID NO: 2320195 - DNA, 25 bp, Homo sapien
gccatgtacaaagcagtgttgtatg

SEQ ID NO: 2320196 - DNA, 25 bp, Homo sapien
caaagcagtgttgtatgctgggcac

SEQ ID NO: 2320197 - DNA, 25 bp, Homo sapien
tgtacaaagcagtgttgtatgctgg

SEQ ID NO: 2320198 - DNA, 25 bp, Homo sapien
tggagctggagatatctactgtcca

SEQ ID NO: 2320199 - DNA, 25 bp, Homo sapien
agagaacaagagggcaggtaaagct

SEQ ID NO: 2320200 - DNA, 25 bp, Homo sapien
ctggagctggagatatctactgtcc

SEQ ID NO: 2320201 - DNA, 25 bp, Homo sapien
ggagagaacaagagggcaggtaaag

SEQ ID NO: 2320202 - DNA, 25 bp, Homo sapien
agcggctaggagaagagtgctggct

SEQ ID NO: 2320203 - DNA, 25 bp, Homo sapien
tgttgggggtgctcaccgagggccc

SEQ ID NO: 2320204 - DNA, 25 bp, Homo sapien
ctgagtgagcggctaggagaagagt

SEQ ID NO: 2320205 - DNA, 25 bp, Homo sapien
ttctccagagatgagtccccgctac

SEQ ID NO: 2320206 - DNA, 25 bp, Homo sapien
tgtgactgcgcttgtgcaccatgag

SEQ ID NO: 2320207 - DNA, 25 bp, Homo sapien
cacacttgagcttgccattgggcag

SEQ ID NO: 2320208 - DNA, 25 bp, Homo sapien
ggtccaatacagaccatgccgcaga

SEQ ID NO: 2320209 - DNA, 25 bp, Homo sapien
caccatgagcacgttgggtccaata

SEQ ID NO: 2320210 - DNA, 25 bp, Homo sapien
tgaacacattgctgacgggcagaag

SEQ ID NO: 2320211 - DNA, 25 bp, Homo sapien
tgacgggcagaagtgcaatgcacac

SEQ ID NO: 2320212 - DNA, 25 bp, Homo sapien
gggaaggtgctctgaacacattgct

SEQ ID NO: 2320213 - DNA, 25 bp, Homo sapien
ggtgctctgaacacattgctgacgg

SEQ ID NO: 2320214 - DNA, 25 bp, Homo sapien
ctgcaagtgaaagaacaaatcccag

SEQ ID NO: 2320215 - DNA, 25 bp, Homo sapien
gcaagtgaaagaacaaatcccagag

SEQ ID NO: 2320216 - DNA, 25 bp, Homo sapien
aagtgaaagaacaaatcccagagga

SEQ ID NO: 2320217 - DNA, 25 bp, Homo sapien
caagtgaaagaacaaatcccagagg

SEQ ID NO: 2320218 - DNA, 25 bp, Homo sapien
tcacgccggcggcaggcatagttgc

SEQ ID NO: 2320219 - DNA, 25 bp, Homo sapien
caggcatagttgcagaagggacatt

SEQ ID NO: 2320220 - DNA, 25 bp, Homo sapien
ggtgaccagtgagtgcatcacgccg

SEQ ID NO: 2320221 - DNA, 25 bp, Homo sapien
accacactggttgcaatggaagggc

SEQ ID NO: 2320222 - DNA, 25 bp, Homo sapien
cctcctcccactggacagacactga

SEQ ID NO: 2320223 - DNA, 25 bp, Homo sapien
ttccctcctcccactggacagacac

SEQ ID NO: 2320224 - DNA, 25 bp, Homo sapien
ctcctcccactggacagacactgac

SEQ ID NO: 2320225 - DNA, 25 bp, Homo sapien
tcattccctcctcccactggacaga

SEQ ID NO: 2320226 - DNA, 25 bp, Homo sapien
tattccttttgctccaagtagatgg

SEQ ID NO: 2320227 - DNA, 25 bp, Homo sapien
caagggtgaccgttaacagccaaga

SEQ ID NO: 2320228 - DNA, 25 bp, Homo sapien
agaacattgctcctattccttttgc

SEQ ID NO: 2320229 - DNA, 25 bp, Homo sapien
tccaagtagatggattttacatcca

SEQ ID NO: 2320230 - DNA, 25 bp, Homo sapien
gacagactggttgctcaagacctct

SEQ ID NO: 2320231 - DNA, 25 bp, Homo sapien
tcttgactgggctagaaaaccttgt

SEQ ID NO: 2320232 - DNA, 25 bp, Homo sapien
tgcctctgggaaggtgacaacctct

SEQ ID NO: 2320233 - DNA, 25 bp, Homo sapien
cattgatctctaggtaccctctgga

SEQ ID NO: 2320234 - DNA, 25 bp, Homo sapien
gccaagagcaagtatacactggcat

SEQ ID NO: 2320235 - DNA, 25 bp, Homo sapien
agagctatttctcgctgtgccctgg

SEQ ID NO: 2320236 - DNA, 25 bp, Homo sapien
agattcagccaagagcaagtataca

SEQ ID NO: 2320237 - DNA, 25 bp, Homo sapien
gaggagagtggaaagatggcatcag

SEQ ID NO: 2320238 - DNA, 25 bp, Homo sapien
tagctccggccacagtagttacact

SEQ ID NO: 2320239 - DNA, 25 bp, Homo sapien
tgtaggtagttatggcaccgctcct

SEQ ID NO: 2320240 - DNA, 25 bp, Homo sapien
gcttgggcttcagtgctgagactct

SEQ ID NO: 2320241 - DNA, 25 bp, Homo sapien
ggttggccagccaaagcttgggctt

SEQ ID NO: 2320242 - DNA, 25 bp, Homo sapien
catctccaggtcacgtatttcgtca

SEQ ID NO: 2320243 - DNA, 25 bp, Homo sapien
gaacgcttgcgtttggtgaggctat

SEQ ID NO: 2320244 - DNA, 25 bp, Homo sapien
ggctattggccagacgatcgatgaa

SEQ ID NO: 2320245 - DNA, 25 bp, Homo sapien
aaagttggccgctcagaggatgagt

SEQ ID NO: 2320246 - DNA, 25 bp, Homo sapien
ctggaagctccagtcgaccagggag

SEQ ID NO: 2320247 - DNA, 25 bp, Homo sapien
atgacaggcgtgagttctgagatgc

SEQ ID NO: 2320248 - DNA, 25 bp, Homo sapien
tagccacccgagttcacatcatagg

SEQ ID NO: 2320249 - DNA, 25 bp, Homo sapien
cctgcttctcgggatcctggaagct

SEQ ID NO: 2320250 - DNA, 25 bp, Homo sapien
tgagggagggataccacccccgcaa

SEQ ID NO: 2320251 - DNA, 25 bp, Homo sapien
ccggcccaccacaatggtgggaggt

SEQ ID NO: 2320252 - DNA, 25 bp, Homo sapien
gatcttcgtggttgctttctgtgtc

SEQ ID NO: 2320253 - DNA, 25 bp, Homo sapien
ccgcaacccgatcttcgtggttgct

SEQ ID NO: 2320254 - DNA, 25 bp, Homo sapien
tgtgggaagagaattcgtaccggtc

SEQ ID NO: 2320255 - DNA, 25 bp, Homo sapien
gttgcactcaaaagggtctctgaag

SEQ ID NO: 2320256 - DNA, 25 bp, Homo sapien
caggaagaggatacggcagtgctca

SEQ ID NO: 2320257 - DNA, 25 bp, Homo sapien
gtggatagtgaacatgacgtggtcc

SEQ ID NO: 2320258 - DNA, 25 bp, Homo sapien
cccataagaaggcaaggtagactcc

SEQ ID NO: 2320259 - DNA, 25 bp, Homo sapien
gagtaccaggttgaagagtcccaga

SEQ ID NO: 2320260 - DNA, 25 bp, Homo sapien
catgttccgggaggttacaggtgcc

SEQ ID NO: 2320261 - DNA, 25 bp, Homo sapien
taggttactcaaatagccaagggtc

SEQ ID NO: 2320262 - DNA, 25 bp, Homo sapien
tatagcatgagatccctacgcggac

SEQ ID NO: 2320263 - DNA, 25 bp, Homo sapien
taggagacgggcttcaagaacggca

SEQ ID NO: 2320264 - DNA, 25 bp, Homo sapien
aaatcgaggttatgtgtctcccagc

SEQ ID NO: 2320265 - DNA, 25 bp, Homo sapien
ggcagggccctcctatatagcatga

SEQ ID NO: 2320266 - DNA, 25 bp, Homo sapien
cttgtccttgggcacgcatcgggca

SEQ ID NO: 2320267 - DNA, 25 bp, Homo sapien
ttgggcacgcatcgggcacagttag

SEQ ID NO: 2320268 - DNA, 25 bp, Homo sapien
cgcatcgggcacagttagtgcagcg

SEQ ID NO: 2320269 - DNA, 25 bp, Homo sapien
cggccctttttggcacgaccattgt

SEQ ID NO: 2320270 - DNA, 25 bp, Homo sapien
tcttgacaccgcaaggaccagactg

SEQ ID NO: 2320271 - DNA, 25 bp, Homo sapien
ttgcaatctcataaccgaaacaggc

SEQ ID NO: 2320272 - DNA, 25 bp, Homo sapien
ccttaaatacgtggaaattgcctga

SEQ ID NO: 2320273 - DNA, 25 bp, Homo sapien
tgcctgtcgggcacataaaagcacc

SEQ ID NO: 2320274 - DNA, 25 bp, Homo sapien
tccttgcgggcttcacgagatcgat

SEQ ID NO: 2320275 - DNA, 25 bp, Homo sapien
cttgcgggcttcacgagatcgattc

SEQ ID NO: 2320276 - DNA, 25 bp, Homo sapien
cgggcttcacgagatcgattcctga

SEQ ID NO: 2320277 - DNA, 25 bp, Homo sapien
ggtccttgcgggcttcacgagatcg

SEQ ID NO: 2320278 - DNA, 25 bp, Homo sapien
cactcccctggcttccattctcctt

SEQ ID NO: 2320279 - DNA, 25 bp, Homo sapien
ttccattctccttttaaaatactca

SEQ ID NO: 2320280 - DNA, 25 bp, Homo sapien
tccattctccttttaaaatactcac

SEQ ID NO: 2320281 - DNA, 25 bp, Homo sapien
tcccctggcttccattctcctttta

SEQ ID NO: 2320282 - DNA, 25 bp, Homo sapien
gctttggtgggggacgtggggcagc

SEQ ID NO: 2320283 - DNA, 25 bp, Homo sapien
tttggtgggggacgtggggcagcac

SEQ ID NO: 2320284 - DNA, 25 bp, Homo sapien
ctttggtgggggacgtggggcagca

SEQ ID NO: 2320285 - DNA, 25 bp, Homo sapien
ttggtgggggacgtggggcagcacc

SEQ ID NO: 2320286 - DNA, 25 bp, Homo sapien
ctccagagaatagcctgtcttcagt

SEQ ID NO: 2320287 - DNA, 25 bp, Homo sapien
agagaatagcctgtcttcagtcttt

SEQ ID NO: 2320288 - DNA, 25 bp, Homo sapien
gagaatagcctgtcttcagtcttta

SEQ ID NO: 2320289 - DNA, 25 bp, Homo sapien
ttttctccagagaatagcctgtctt

SEQ ID NO: 2320290 - DNA, 25 bp, Homo sapien
cacttcacacttggtctaacacaca

SEQ ID NO: 2320291 - DNA, 25 bp, Homo sapien
aaaatccccaccttatctggcacag

SEQ ID NO: 2320292 - DNA, 25 bp, Homo sapien
tggcacagatacacttaacatgcaa

SEQ ID NO: 2320293 - DNA, 25 bp, Homo sapien
tttacataaatagctaggcgaggtg

SEQ ID NO: 2320294 - DNA, 25 bp, Homo sapien
cttcccacacattctcatatttcag

SEQ ID NO: 2320295 - DNA, 25 bp, Homo sapien
gctgccttcccacacattctcatat

SEQ ID NO: 2320296 - DNA, 25 bp, Homo sapien
cccacacattctcatatttcagaaa

SEQ ID NO: 2320297 - DNA, 25 bp, Homo sapien
ccacacattctcatatttcagaaat

SEQ ID NO: 2320298 - DNA, 25 bp, Homo sapien
taagcatcccggatatacacagtag

SEQ ID NO: 2320299 - DNA, 25 bp, Homo sapien
gatatacacagtagataaagctgcc

SEQ ID NO: 2320300 - DNA, 25 bp, Homo sapien
tgccaagtaactggccacctctgtt

SEQ ID NO: 2320301 - DNA, 25 bp, Homo sapien
gccacctctgttgggtgctgtcctg

SEQ ID NO: 2320302 - DNA, 25 bp, Homo sapien
gacttcgaaaacagttgagccttga

SEQ ID NO: 2320303 - DNA, 25 bp, Homo sapien
tctcgcccggagagcctagttgttt

SEQ ID NO: 2320304 - DNA, 25 bp, Homo sapien
tatgcaacctagagggcctgttctc

SEQ ID NO: 2320305 - DNA, 25 bp, Homo sapien
taaactggtattcgggatctcgccc

SEQ ID NO: 2320306 - DNA, 25 bp, Homo sapien
cccctaggctaggacatcgaggcaa

SEQ ID NO: 2320307 - DNA, 25 bp, Homo sapien
aaccgctggcgaattggtggctgct

SEQ ID NO: 2320308 - DNA, 25 bp, Homo sapien
atcgaggcaagagccacctgaaccg

SEQ ID NO: 2320309 - DNA, 25 bp, Homo sapien
tgcaaattgcaatcggagccggagc

SEQ ID NO: 2320310 - DNA, 25 bp, Homo sapien
tgcctgagagttgcccacctcggag

SEQ ID NO: 2320311 - DNA, 25 bp, Homo sapien
ctgcctgagagttgcccacctcgga

SEQ ID NO: 2320312 - DNA, 25 bp, Homo sapien
cagcacctgcagagcgtcgttcgcc

SEQ ID NO: 2320313 - DNA, 25 bp, Homo sapien
cctgcagagcgtcgttcgccctcat

SEQ ID NO: 2320314 - DNA, 25 bp, Homo sapien
gctgggagtgttcacatctaaaaat

SEQ ID NO: 2320315 - DNA, 25 bp, Homo sapien
ggcccagcaactgtgagggaagcac

SEQ ID NO: 2320316 - DNA, 25 bp, Homo sapien
acatctaaaaatcccaggatctaaa

SEQ ID NO: 2320317 - DNA, 25 bp, Homo sapien
gatctaaatttaggcccagcaactg

SEQ ID NO: 2320318 - DNA, 25 bp, Homo sapien
aggtcggcattgtgtcccgtgagca

SEQ ID NO: 2320319 - DNA, 25 bp, Homo sapien
cgtagagcttgtacagtgtctggta

SEQ ID NO: 2320320 - DNA, 25 bp, Homo sapien
tgtcccgtgagcacaatctcaaggt

SEQ ID NO: 2320321 - DNA, 25 bp, Homo sapien
tattggttctcagcatcgccggtca

SEQ ID NO: 2320322 - DNA, 25 bp, Homo sapien
tcgcaccacgcggaggttgggcaat

SEQ ID NO: 2320323 - DNA, 25 bp, Homo sapien
catagcctgtcacttctcgaatcca

SEQ ID NO: 2320324 - DNA, 25 bp, Homo sapien
tatagttcaacatgacgaagatggc

SEQ ID NO: 2320325 - DNA, 25 bp, Homo sapien
ggcaaacttcccatcgtagacctgg

SEQ ID NO: 2320326 - DNA, 25 bp, Homo sapien
tcaaggaggtaccagtcttgggctg

SEQ ID NO: 2320327 - DNA, 25 bp, Homo sapien
gaggcacttagagtgagcagtcttg

SEQ ID NO: 2320328 - DNA, 25 bp, Homo sapien
tagagtgagcagtcttgggtcatca

SEQ ID NO: 2320329 - DNA, 25 bp, Homo sapien
ccagaaggaaccatcgggaactgac

SEQ ID NO: 2320330 - DNA, 25 bp, Homo sapien
gcctggcctccggtacactgtactt

SEQ ID NO: 2320331 - DNA, 25 bp, Homo sapien
tactgggggccctctattgcttagg

SEQ ID NO: 2320332 - DNA, 25 bp, Homo sapien
tagaaaaacggttaacagatccagc

SEQ ID NO: 2320333 - DNA, 25 bp, Homo sapien
gagcaatggacctttagacagcggc

SEQ ID NO: 2320334 - DNA, 25 bp, Homo sapien
caaagcttatcgttcttctcaatat

SEQ ID NO: 2320335 - DNA, 25 bp, Homo sapien
cagtcaattgtgtccatgtgacaaa

SEQ ID NO: 2320336 - DNA, 25 bp, Homo sapien
tcaatataaacaccccctgacagaa

SEQ ID NO: 2320337 - DNA, 25 bp, Homo sapien
cagcatctcggtccctcacgatgtc

SEQ ID NO: 2320338 - DNA, 25 bp, Homo sapien
gccccttgcaaacctcatgacaggg

SEQ ID NO: 2320339 - DNA, 25 bp, Homo sapien
atcgccccttgcaaacctcatgaca

SEQ ID NO: 2320340 - DNA, 25 bp, Homo sapien
ccagcatcgccccttgcaaacctca

SEQ ID NO: 2320341 - DNA, 25 bp, Homo sapien
agcatcgccccttgcaaacctcatg

SEQ ID NO: 2320342 - DNA, 25 bp, Homo sapien
gctcctaggactgaattctgaggcc

SEQ ID NO: 2320343 - DNA, 25 bp, Homo sapien
aaagcatggctgttagggctcctag

SEQ ID NO: 2320344 - DNA, 25 bp, Homo sapien
aagggatatgaaagcgtatgagtga

SEQ ID NO: 2320345 - DNA, 25 bp, Homo sapien
ccccacagtgttgacccaggcttgg

SEQ ID NO: 2320346 - DNA, 25 bp, Homo sapien
agtgaccattacactgaggagcaca

SEQ ID NO: 2320347 - DNA, 25 bp, Homo sapien
actcatcatggcagcactggttggg

SEQ ID NO: 2320348 - DNA, 25 bp, Homo sapien
gcagtgaccattacactgaggagca

SEQ ID NO: 2320349 - DNA, 25 bp, Homo sapien
catcatggcagcactggttggggtt

SEQ ID NO: 2320350 - DNA, 25 bp, Homo sapien
tagcttgttgtagacaagaggctgt

SEQ ID NO: 2320351 - DNA, 25 bp, Homo sapien
tgtggacagcgaggtacacaggctc

SEQ ID NO: 2320352 - DNA, 25 bp, Homo sapien
gaaagttagcttgttgtagacaaga

SEQ ID NO: 2320353 - DNA, 25 bp, Homo sapien
cctccatactgatacttggtgtggg

SEQ ID NO: 2320354 - DNA, 25 bp, Homo sapien
gactggacgtaagggtcactcactg

SEQ ID NO: 2320355 - DNA, 25 bp, Homo sapien
aatggaacccttgctctgggcctag

SEQ ID NO: 2320356 - DNA, 25 bp, Homo sapien
ggaacatcaccagctaccaatggaa

SEQ ID NO: 2320357 - DNA, 25 bp, Homo sapien
cagctctgcactggatttgtcccca

SEQ ID NO: 2320358 - DNA, 25 bp, Homo sapien
ggatgtttgatccaccacaaagtta

SEQ ID NO: 2320359 - DNA, 25 bp, Homo sapien
ggccctgacacaggatgtttgatcc

SEQ ID NO: 2320360 - DNA, 25 bp, Homo sapien
cacacatcttgagcccatttttatc

SEQ ID NO: 2320361 - DNA, 25 bp, Homo sapien
tatctacttccatcttgtcaggagg

SEQ ID NO: 2320362 - DNA, 25 bp, Homo sapien
ctgcaaatgtaagagaggttcagtg

SEQ ID NO: 2320363 - DNA, 25 bp, Homo sapien
ggttcagtgggggtggtctgcgcag

SEQ ID NO: 2320364 - DNA, 25 bp, Homo sapien
gggtggtctgcgcaggctcagagga

SEQ ID NO: 2320365 - DNA, 25 bp, Homo sapien
tgcaaatgtaagagaggttcagtgg

SEQ ID NO: 2320366 - DNA, 25 bp, Homo sapien
ccattgaggccggtgatcagaaagt

SEQ ID NO: 2320367 - DNA, 25 bp, Homo sapien
ggtgcagttcacaaatccatcaatg

SEQ ID NO: 2320368 - DNA, 25 bp, Homo sapien
gatcttggtgcagttcacaaatcca

SEQ ID NO: 2320369 - DNA, 25 bp, Homo sapien
tccatcaatgttgctcgagtccaca

SEQ ID NO: 2320370 - DNA, 25 bp, Homo sapien
ttttatgactttgattcctagtcag

SEQ ID NO: 2320371 - DNA, 25 bp, Homo sapien
tagtcagctccacataggaaagttt

SEQ ID NO: 2320372 - DNA, 25 bp, Homo sapien
acataggaaagttttggccaatgaa

SEQ ID NO: 2320373 - DNA, 25 bp, Homo sapien
tgattcctagtcagctccacatagg

SEQ ID NO: 2320374 - DNA, 25 bp, Homo sapien
gtgctcagctggaaagactcttcct

SEQ ID NO: 2320375 - DNA, 25 bp, Homo sapien
tatcataacaataattgattcaggc

SEQ ID NO: 2320376 - DNA, 25 bp, Homo sapien
ggcaattatcccaagacattcatta

SEQ ID NO: 2320377 - DNA, 25 bp, Homo sapien
cttaactaagtgaccagagacatca

SEQ ID NO: 2320378 - DNA, 25 bp, Homo sapien
ccgtactgtccggaagacattgagc

SEQ ID NO: 2320379 - DNA, 25 bp, Homo sapien
ctgtgatctcccgtactgtccggaa

SEQ ID NO: 2320380 - DNA, 25 bp, Homo sapien
gatctcccgtactgtccggaagaca

SEQ ID NO: 2320381 - DNA, 25 bp, Homo sapien
tactgtccggaagacattgagcttc

SEQ ID NO: 2320382 - DNA, 25 bp, Homo sapien
tagaggcttctgcctccaatggttg

SEQ ID NO: 2320383 - DNA, 25 bp, Homo sapien
cactgaagttgtgcatgtggggcgg

SEQ ID NO: 2320384 - DNA, 25 bp, Homo sapien
gaggcttctgcctccaatggttgtc

SEQ ID NO: 2320385 - DNA, 25 bp, Homo sapien
aacactgaagttgtgcatgtggggc

SEQ ID NO: 2320386 - DNA, 25 bp, Homo sapien
ccttggtccagttcaaagagtggtg

SEQ ID NO: 2320387 - DNA, 25 bp, Homo sapien
tcatgatcaacaatgagaagccccg

SEQ ID NO: 2320388 - DNA, 25 bp, Homo sapien
gatgtctagtcgctcttccgtaggc

SEQ ID NO: 2320389 - DNA, 25 bp, Homo sapien
tccttcagggatcggaagcccagag

SEQ ID NO: 2320390 - DNA, 25 bp, Homo sapien
tctgaggactcccagcaagccctct

SEQ ID NO: 2320391 - DNA, 25 bp, Homo sapien
tattctcaccacctagcagaccctt

SEQ ID NO: 2320392 - DNA, 25 bp, Homo sapien
ctcaaccctactcccacgtctaggg

SEQ ID NO: 2320393 - DNA, 25 bp, Homo sapien
gcagaatagtcctttcagccctctc

SEQ ID NO: 2320394 - DNA, 25 bp, Homo sapien
cacctcctcggctataatttcgaca

SEQ ID NO: 2320395 - DNA, 25 bp, Homo sapien
ttcgacaggacaagcactgaccagg

SEQ ID NO: 2320396 - DNA, 25 bp, Homo sapien
gctataatttcgacaggacaagcac

SEQ ID NO: 2320397 - DNA, 25 bp, Homo sapien
acacagacacctcctcggctataat

SEQ ID NO: 2320398 - DNA, 25 bp, Homo sapien
cacctgaacagttccattgcagggc

SEQ ID NO: 2320399 - DNA, 25 bp, Homo sapien
aaagacttttattgtatgccacctg

SEQ ID NO: 2320400 - DNA, 25 bp, Homo sapien
cttttattgtatgccacctgaacag

SEQ ID NO: 2320401 - DNA, 25 bp, Homo sapien
gaacagttccattgcagggccccac

SEQ ID NO: 2320402 - DNA, 25 bp, Homo sapien
agtgccctccatgggttggcattcc

SEQ ID NO: 2320403 - DNA, 25 bp, Homo sapien
cctccatgggttggcattccgggtg

SEQ ID NO: 2320404 - DNA, 25 bp, Homo sapien
ctcatgggcaaattctcgaggctcc

SEQ ID NO: 2320405 - DNA, 25 bp, Homo sapien
gcattcggcctcatgggcaaattct

SEQ ID NO: 2320406 - DNA, 25 bp, Homo sapien
ggagatcctggtgctactagtatac

SEQ ID NO: 2320407 - DNA, 25 bp, Homo sapien
ttccccagatgctccaagtattgcc

SEQ ID NO: 2320408 - DNA, 25 bp, Homo sapien
ttggagatcctggtgctactagtat

SEQ ID NO: 2320409 - DNA, 25 bp, Homo sapien
tcattccccagatgctccaagtatt

SEQ ID NO: 2320410 - DNA, 25 bp, Homo sapien
gtcaattccatacctcccagcaaag

SEQ ID NO: 2320411 - DNA, 25 bp, Homo sapien
cattcaggatcttctatctgcaggc

SEQ ID NO: 2320412 - DNA, 25 bp, Homo sapien
caaagaccaacccagacattcagga

SEQ ID NO: 2320413 - DNA, 25 bp, Homo sapien
gaatcagatcccaaggtcaattcca

SEQ ID NO: 2320414 - DNA, 25 bp, Homo sapien
gcacattgagcacaagtatcagagc

SEQ ID NO: 2320415 - DNA, 25 bp, Homo sapien
gggcacattgagcacaagtatcaga

SEQ ID NO: 2320416 - DNA, 25 bp, Homo sapien
ggcacattgagcacaagtatcagag

SEQ ID NO: 2320417 - DNA, 25 bp, Homo sapien
cacattgagcacaagtatcagagcc

SEQ ID NO: 2320418 - DNA, 25 bp, Homo sapien
gaacatctgggtacttgtagattgg

SEQ ID NO: 2320419 - DNA, 25 bp, Homo sapien
cccttggcacctaggactccatggg

SEQ ID NO: 2320420 - DNA, 25 bp, Homo sapien
gttctcatggcagggccgacattca

SEQ ID NO: 2320421 - DNA, 25 bp, Homo sapien
gtgcagttctcatggcagggccgac

SEQ ID NO: 2320422 - DNA, 25 bp, Homo sapien
gctgggagtgattcttgaatcacag

SEQ ID NO: 2320423 - DNA, 25 bp, Homo sapien
actctagttctgtgctcctaccctt

SEQ ID NO: 2320424 - DNA, 25 bp, Homo sapien
ttccctcactctagttctgtgctcc

SEQ ID NO: 2320425 - DNA, 25 bp, Homo sapien
tcactctagttctgtgctcctaccc

SEQ ID NO: 2320426 - DNA, 25 bp, Homo sapien
gcttgtttcagaacttaccgtggca

SEQ ID NO: 2320427 - DNA, 25 bp, Homo sapien
ggctcaatttcaacagcctaacata

SEQ ID NO: 2320428 - DNA, 25 bp, Homo sapien
tgtgctgttactgattttccctttc

SEQ ID NO: 2320429 - DNA, 25 bp, Homo sapien
ctgtgaaactcccttgaactgaggt

SEQ ID NO: 2320430 - DNA, 25 bp, Homo sapien
taaacagtcttgaagctctggtcct

SEQ ID NO: 2320431 - DNA, 25 bp, Homo sapien
cagcaccagtgtttgtcctaaacag

SEQ ID NO: 2320432 - DNA, 25 bp, Homo sapien
cagtgtttgtcctaaacagtcttga

SEQ ID NO: 2320433 - DNA, 25 bp, Homo sapien
ccgatcagcaccagtgtttgtccta

SEQ ID NO: 2320434 - DNA, 25 bp, Homo sapien
aagcctgcattcttgagtcccaagt

SEQ ID NO: 2320435 - DNA, 25 bp, Homo sapien
gatagtggactgcatacataaaagg

SEQ ID NO: 2320436 - DNA, 25 bp, Homo sapien
tatccccagtttccagaatctccaa

SEQ ID NO: 2320437 - DNA, 25 bp, Homo sapien
ccaagtgtccagtgatagtggactg

SEQ ID NO: 2320438 - DNA, 25 bp, Homo sapien
tgccgcccagcatcatgaaaatcac

SEQ ID NO: 2320439 - DNA, 25 bp, Homo sapien
ttttattctgaatccggcgcccacg

SEQ ID NO: 2320440 - DNA, 25 bp, Homo sapien
caagtatcgcctcatagccctttta

SEQ ID NO: 2320441 - DNA, 25 bp, Homo sapien
ggcgcccacgccagtagagaaaagt

SEQ ID NO: 2320442 - DNA, 25 bp, Homo sapien
tataggcatattgaggtacagaccc

SEQ ID NO: 2320443 - DNA, 25 bp, Homo sapien
tctgtatagatgcataaaccgaggc

SEQ ID NO: 2320444 - DNA, 25 bp, Homo sapien
ggaagcaccgttagtcctggaatgg

SEQ ID NO: 2320445 - DNA, 25 bp, Homo sapien
caaaatcaggactagaatgcatgcc

SEQ ID NO: 2320446 - DNA, 25 bp, Homo sapien
ttctcactggggtccagaggctcta

SEQ ID NO: 2320447 - DNA, 25 bp, Homo sapien
cttctcactggggtccagaggctct

SEQ ID NO: 2320448 - DNA, 25 bp, Homo sapien
ctcactggggtccagaggctctatg

SEQ ID NO: 2320449 - DNA, 25 bp, Homo sapien
cactggggtccagaggctctatgct

SEQ ID NO: 2320450 - DNA, 25 bp, Homo sapien
gcactttaagcttccttagctctgt

SEQ ID NO: 2320451 - DNA, 25 bp, Homo sapien
tgcacagttccaaagacacccgagc

SEQ ID NO: 2320452 - DNA, 25 bp, Homo sapien
gacacccgagccaagcactttaagc

SEQ ID NO: 2320453 - DNA, 25 bp, Homo sapien
gagccaagcactttaagcttcctta

SEQ ID NO: 2320454 - DNA, 25 bp, Homo sapien
agactggaatcttgattgattcacc

SEQ ID NO: 2320455 - DNA, 25 bp, Homo sapien
cttgaaaactctgccgtccactctt

SEQ ID NO: 2320456 - DNA, 25 bp, Homo sapien
gaaaactctgccgtccactcttgtc

SEQ ID NO: 2320457 - DNA, 25 bp, Homo sapien
ctggaatcttgattgattcaccctc

SEQ ID NO: 2320458 - DNA, 25 bp, Homo sapien
atgatccagcagagaacccagaggc

SEQ ID NO: 2320459 - DNA, 25 bp, Homo sapien
ccccggtgttgtctcacatgatcca

SEQ ID NO: 2320460 - DNA, 25 bp, Homo sapien
gggcatagtcccagcagccttacaa

SEQ ID NO: 2320461 - DNA, 25 bp, Homo sapien
gccttacaatgtgggcatggtccag

SEQ ID NO: 2320462 - DNA, 25 bp, Homo sapien
tagcagctgcttatcatcaggaggc

SEQ ID NO: 2320463 - DNA, 25 bp, Homo sapien
catgttcctcaaggtagtacattcc

SEQ ID NO: 2320464 - DNA, 25 bp, Homo sapien
ttcgggcagccaggtttctatgcac

SEQ ID NO: 2320465 - DNA, 25 bp, Homo sapien
acttgagtagcacgtttcgggcagc

SEQ ID NO: 2320466 - DNA, 25 bp, Homo sapien
gcccggccagtcccaagttcttgat

SEQ ID NO: 2320467 - DNA, 25 bp, Homo sapien
ctgcggattaaagatagaggtatca

SEQ ID NO: 2320468 - DNA, 25 bp, Homo sapien
agatagaggtatcacaagtttattt

SEQ ID NO: 2320469 - DNA, 25 bp, Homo sapien
gccagtcccaagttcttgatcatta

SEQ ID NO: 2320470 - DNA, 25 bp, Homo sapien
aaagtggatactctcaagggccatc

SEQ ID NO: 2320471 - DNA, 25 bp, Homo sapien
tcccaaagtggatactctcaagggc

SEQ ID NO: 2320472 - DNA, 25 bp, Homo sapien
tgtatttcccaaagtggatactctc

SEQ ID NO: 2320473 - DNA, 25 bp, Homo sapien
atttcccaaagtggatactctcaag

SEQ ID NO: 2320474 - DNA, 25 bp, Homo sapien
agacatgggcatgaagtgaagggaa

SEQ ID NO: 2320475 - DNA, 25 bp, Homo sapien
gaaggcagaacctgatctaacacaa

SEQ ID NO: 2320476 - DNA, 25 bp, Homo sapien
tagacatgggcatgaagtgaaggga

SEQ ID NO: 2320477 - DNA, 25 bp, Homo sapien
gtagacatgggcatgaagtgaaggg

SEQ ID NO: 2320478 - DNA, 25 bp, Homo sapien
gttgcaggaagacatggactagtca

SEQ ID NO: 2320479 - DNA, 25 bp, Homo sapien
tagcaggtctggtacttcagccaat

SEQ ID NO: 2320480 - DNA, 25 bp, Homo sapien
tcagccaatcgtagccctgcatagg

SEQ ID NO: 2320481 - DNA, 25 bp, Homo sapien
tgcatagggctctgccccgaaggtc

SEQ ID NO: 2320482 - DNA, 25 bp, Homo sapien
tagacatcaattgtgcagatctggg

SEQ ID NO: 2320483 - DNA, 25 bp, Homo sapien
aaaaaaggaatagagccataagagg

SEQ ID NO: 2320484 - DNA, 25 bp, Homo sapien
taaaagtgtaacagttatccaggtg

SEQ ID NO: 2320485 - DNA, 25 bp, Homo sapien
gagaatacattccatggccgggcgc

SEQ ID NO: 2320486 - DNA, 25 bp, Homo sapien
cataagaggagtacagagggaagtc

SEQ ID NO: 2320487 - DNA, 25 bp, Homo sapien
taaaggttgggcgaatgttctcatc

SEQ ID NO: 2320488 - DNA, 25 bp, Homo sapien
ctttatgaccagataccgtggtggg

SEQ ID NO: 2320489 - DNA, 25 bp, Homo sapien
catcctggtgaactcattggctagt

SEQ ID NO: 2320490 - DNA, 25 bp, Homo sapien
ataccgtggtgggtctcgggccatc

SEQ ID NO: 2320491 - DNA, 25 bp, Homo sapien
cccacgtggccgattaagtgttcca

SEQ ID NO: 2320492 - DNA, 25 bp, Homo sapien
actggtaggctgagggcggagccca

SEQ ID NO: 2320493 - DNA, 25 bp, Homo sapien
cgattaagtgttccaactggtaggc

SEQ ID NO: 2320494 - DNA, 25 bp, Homo sapien
tgtggtggttgccaggttgtcctcc

SEQ ID NO: 2320495 - DNA, 25 bp, Homo sapien
ggttcatgggcatgtatccagatga

SEQ ID NO: 2320496 - DNA, 25 bp, Homo sapien
ctggttcatgggcatgtatccagat

SEQ ID NO: 2320497 - DNA, 25 bp, Homo sapien
ttcatgggcatgtatccagatgatg

SEQ ID NO: 2320498 - DNA, 25 bp, Homo sapien
catgggcatgtatccagatgatgga

SEQ ID NO: 2320499 - DNA, 25 bp, Homo sapien
ccagcctctcagcaacagaacttac

SEQ ID NO: 2320500 - DNA, 25 bp, Homo sapien
aacccagcctctcagcaacagaact

SEQ ID NO: 2320501 - DNA, 25 bp, Homo sapien
atcctaaaacccagcctctcagcaa

SEQ ID NO: 2320502 - DNA, 25 bp, Homo sapien
tcctaaaacccagcctctcagcaac

SEQ ID NO: 2320503 - DNA, 25 bp, Homo sapien
gaatggtaggcgctatctccgcgtg

SEQ ID NO: 2320504 - DNA, 25 bp, Homo sapien
catccccgtggcattgggtgtagag

SEQ ID NO: 2320505 - DNA, 25 bp, Homo sapien
tccggctcctacacattgacacttt

SEQ ID NO: 2320506 - DNA, 25 bp, Homo sapien
gagcctgttacatgcccctctgatg

SEQ ID NO: 2320507 - DNA, 25 bp, Homo sapien
tgtatctggcatgacataaccgttg

SEQ ID NO: 2320508 - DNA, 25 bp, Homo sapien
gacataaccgttgacatcctcttcc

SEQ ID NO: 2320509 - DNA, 25 bp, Homo sapien
gtgtgtatctggcatgacataaccg

SEQ ID NO: 2320510 - DNA, 25 bp, Homo sapien
ggcatgacataaccgttgacatcct

SEQ ID NO: 2320511 - DNA, 25 bp, Homo sapien
aaggcagagtctgtagcctctaagc

SEQ ID NO: 2320512 - DNA, 25 bp, Homo sapien
ccactgaagaaagggtgccttcccg

SEQ ID NO: 2320513 - DNA, 25 bp, Homo sapien
tgtgccttctcctccggttcatgta

SEQ ID NO: 2320514 - DNA, 25 bp, Homo sapien
gctacgtagagtttttaggcgggca

SEQ ID NO: 2320515 - DNA, 25 bp, Homo sapien
gttctctgggcattagccttgggga

SEQ ID NO: 2320516 - DNA, 25 bp, Homo sapien
tctctgggcattagccttggggaaa

SEQ ID NO: 2320517 - DNA, 25 bp, Homo sapien
ggcattagccttggggaaaagcctg

SEQ ID NO: 2320518 - DNA, 25 bp, Homo sapien
ctgggcattagccttggggaaaagc

SEQ ID NO: 2320519 - DNA, 25 bp, Homo sapien
gaagatcatttacggcacatgtgga

SEQ ID NO: 2320520 - DNA, 25 bp, Homo sapien
gaagaaagtgcacagctggctacat

SEQ ID NO: 2320521 - DNA, 25 bp, Homo sapien
cagtctgatgggaaacaaaggcaca

SEQ ID NO: 2320522 - DNA, 25 bp, Homo sapien
tcactgctggatgagaatggcttct

SEQ ID NO: 2320523 - DNA, 25 bp, Homo sapien
gcatttttattcagacacgtataaa

SEQ ID NO: 2320524 - DNA, 25 bp, Homo sapien
taatgaaaaggactatgcgctatgg

SEQ ID NO: 2320525 - DNA, 25 bp, Homo sapien
gacagagtagcactgtcagaacaca

SEQ ID NO: 2320526 - DNA, 25 bp, Homo sapien
tctgaaggagggcttatagggcttt

SEQ ID NO: 2320527 - DNA, 25 bp, Homo sapien
cctggatggagcacctaagggaagt

SEQ ID NO: 2320528 - DNA, 25 bp, Homo sapien
cacgctgggacaactagtcctctcg

SEQ ID NO: 2320529 - DNA, 25 bp, Homo sapien
gcagggcacgctgggacaactagtc

SEQ ID NO: 2320530 - DNA, 25 bp, Homo sapien
tgggacaactagtcctctcggccgc

SEQ ID NO: 2320531 - DNA, 25 bp, Homo sapien
gcgagagcgagaagctgcgagcgcg

SEQ ID NO: 2320532 - DNA, 25 bp, Homo sapien
tactaccaccactgcagcctcgttt

SEQ ID NO: 2320533 - DNA, 25 bp, Homo sapien
accactgcagcctcgtttcccctga

SEQ ID NO: 2320534 - DNA, 25 bp, Homo sapien
tgcagcctcgtttcccctgagccgc

SEQ ID NO: 2320535 - DNA, 25 bp, Homo sapien
gccgcctctgtctcccttcccagcc

SEQ ID NO: 2320536 - DNA, 25 bp, Homo sapien
ttgctcctgttgctcgtcctcgccc

SEQ ID NO: 2320537 - DNA, 25 bp, Homo sapien
tcctgttgctcgtcctcgcccgaca

SEQ ID NO: 2320538 - DNA, 25 bp, Homo sapien
gctcctgttgctcgtcctcgcccga

SEQ ID NO: 2320539 - DNA, 25 bp, Homo sapien
tgctcctgttgctcgtcctcgcccg

SEQ ID NO: 2320540 - DNA, 25 bp, Homo sapien
tggcgatgtcgccccccatcttata

SEQ ID NO: 2320541 - DNA, 25 bp, Homo sapien
gttggcgatgtcgccccccatctta

SEQ ID NO: 2320542 - DNA, 25 bp, Homo sapien
ggcgatgtcgccccccatcttatac

SEQ ID NO: 2320543 - DNA, 25 bp, Homo sapien
tgttggcgatgtcgccccccatctt

SEQ ID NO: 2320544 - DNA, 25 bp, Homo sapien
ctatcagccttgattccccgacccc

SEQ ID NO: 2320545 - DNA, 25 bp, Homo sapien
ttccctatcagccttgattccccga

SEQ ID NO: 2320546 - DNA, 25 bp, Homo sapien
ccctatcagccttgattccccgacc

SEQ ID NO: 2320547 - DNA, 25 bp, Homo sapien
ctttccctatcagccttgattcccc

SEQ ID NO: 2320548 - DNA, 25 bp, Homo sapien
ccgcacctccatagacttcagcctg

SEQ ID NO: 2320549 - DNA, 25 bp, Homo sapien
ggtcttcccaccacgccgtgcccag

SEQ ID NO: 2320550 - DNA, 25 bp, Homo sapien
gcctcgggtcggagcctgccagggt

SEQ ID NO: 2320551 - DNA, 25 bp, Homo sapien
ctctgcgctcatcctggtcgccgac

SEQ ID NO: 2320552 - DNA, 25 bp, Homo sapien
gcctagttgggataagacggagacc

SEQ ID NO: 2320553 - DNA, 25 bp, Homo sapien
gagtgctctccaacggtctccttag

SEQ ID NO: 2320554 - DNA, 25 bp, Homo sapien
tgctgagatcgtcagagcacacctg

SEQ ID NO: 2320555 - DNA, 25 bp, Homo sapien
gacttgcattagaagctccaggagt

SEQ ID NO: 2320556 - DNA, 25 bp, Homo sapien
gaattgctgactcgaagccgatgca

SEQ ID NO: 2320557 - DNA, 25 bp, Homo sapien
cattgtctagttaccacccaaggaa

SEQ ID NO: 2320558 - DNA, 25 bp, Homo sapien
gctacctttggtgtgacaggacaga

SEQ ID NO: 2320559 - DNA, 25 bp, Homo sapien
gccgatgcactgttaaatgttaccg

SEQ ID NO: 2320560 - DNA, 25 bp, Homo sapien
taccgacacacctgagctagatgct

SEQ ID NO: 2320561 - DNA, 25 bp, Homo sapien
acaggctcagtaccgacacacctga

SEQ ID NO: 2320562 - DNA, 25 bp, Homo sapien
tagatgcttccaccaaggaccgaag

SEQ ID NO: 2320563 - DNA, 25 bp, Homo sapien
tgagctagatgcttccaccaaggac

SEQ ID NO: 2320564 - DNA, 25 bp, Homo sapien
ttttccctgtttcttccataatcat

SEQ ID NO: 2320565 - DNA, 25 bp, Homo sapien
agattttccctgtttcttccataat

SEQ ID NO: 2320566 - DNA, 25 bp, Homo sapien
tcttgaagattttccctgtttcttc

SEQ ID NO: 2320567 - DNA, 25 bp, Homo sapien
catttccttttctttcttgaagatt

SEQ ID NO: 2320568 - DNA, 25 bp, Homo sapien
tgtatcccacttgccattccaaatt

SEQ ID NO: 2320569 - DNA, 25 bp, Homo sapien
ttgctgtctcccgggagccctagtg

SEQ ID NO: 2320570 - DNA, 25 bp, Homo sapien
agaaagaatcatcagcctactgcct

SEQ ID NO: 2320571 - DNA, 25 bp, Homo sapien
tttggattaggtaggaaactgcttg

SEQ ID NO: 2320572 - DNA, 25 bp, Homo sapien
tccttgagaatataatcctggtcgc

SEQ ID NO: 2320573 - DNA, 25 bp, Homo sapien
tataatcctggtcgctcttcaaagg

SEQ ID NO: 2320574 - DNA, 25 bp, Homo sapien
gaatataatcctggtcgctcttcaa

SEQ ID NO: 2320575 - DNA, 25 bp, Homo sapien
agaatataatcctggtcgctcttca

SEQ ID NO: 2320576 - DNA, 25 bp, Homo sapien
ggcaagatcagagtactgcattagg

SEQ ID NO: 2320577 - DNA, 25 bp, Homo sapien
aggcaagatcagagtactgcattag

SEQ ID NO: 2320578 - DNA, 25 bp, Homo sapien
gcaagatcagagtactgcattagga

SEQ ID NO: 2320579 - DNA, 25 bp, Homo sapien
aagatcagagtactgcattaggaac

SEQ ID NO: 2320580 - DNA, 25 bp, Homo sapien
agtgtgagctacattagcgatgaag

SEQ ID NO: 2320581 - DNA, 25 bp, Homo sapien
tgagctacatcaaccacaaaagtgt

SEQ ID NO: 2320582 - DNA, 25 bp, Homo sapien
aaaagtgtgagctacattagcgatg

SEQ ID NO: 2320583 - DNA, 25 bp, Homo sapien
tcaaccacaaaagtgtgagctacat

SEQ ID NO: 2320584 - DNA, 25 bp, Homo sapien
ttcagcacaaaggtgagctgcctta

SEQ ID NO: 2320585 - DNA, 25 bp, Homo sapien
gatttccaggtttgaccaggcgtag

SEQ ID NO: 2320586 - DNA, 25 bp, Homo sapien
tgagctgccttaataacatctgctt

SEQ ID NO: 2320587 - DNA, 25 bp, Homo sapien
tgctttcctccctgttacttgggtc

SEQ ID NO: 2320588 - DNA, 25 bp, Homo sapien
tttcatatagagtagctataggtgc

SEQ ID NO: 2320589 - DNA, 25 bp, Homo sapien
gcctaatgcatctttggttcaaacg

SEQ ID NO: 2320590 - DNA, 25 bp, Homo sapien
tggttcaaacgagctttggaattgg

SEQ ID NO: 2320591 - DNA, 25 bp, Homo sapien
gtagctataggtgcctaatgcatct

SEQ ID NO: 2320592 - DNA, 25 bp, Homo sapien
ttctattggcgtgcagttaaatgag

SEQ ID NO: 2320593 - DNA, 25 bp, Homo sapien
taaatgagtgggcaactttgttcca

SEQ ID NO: 2320594 - DNA, 25 bp, Homo sapien
cgtgcagttaaatgagtgggcaact

SEQ ID NO: 2320595 - DNA, 25 bp, Homo sapien
aatgagtgggcaactttgttccagg

SEQ ID NO: 2320596 - DNA, 25 bp, Homo sapien
gatgacatgctgcttcaactggtgt

SEQ ID NO: 2320597 - DNA, 25 bp, Homo sapien
tgctggtctgtgggattctggataa

SEQ ID NO: 2320598 - DNA, 25 bp, Homo sapien
gctggtctgtgggattctggataat

SEQ ID NO: 2320599 - DNA, 25 bp, Homo sapien
tggttttttctccatcgatgacatg

SEQ ID NO: 2320600 - DNA, 25 bp, Homo sapien
gactagtcttgtgtggtagaaggta

SEQ ID NO: 2320601 - DNA, 25 bp, Homo sapien
tagaaggtaataagtagggttggca

SEQ ID NO: 2320602 - DNA, 25 bp, Homo sapien
cggacaagattcagttgggagtata

SEQ ID NO: 2320603 - DNA, 25 bp, Homo sapien
aaaacatggagtagagggcggacaa

SEQ ID NO: 2320604 - DNA, 25 bp, Homo sapien
tatacttcatgtacctcaaattcag

SEQ ID NO: 2320605 - DNA, 25 bp, Homo sapien
acttcatgtacctcaaattcagctt

SEQ ID NO: 2320606 - DNA, 25 bp, Homo sapien
tccacagcatatacttcatgtacct

SEQ ID NO: 2320607 - DNA, 25 bp, Homo sapien
cagcatatacttcatgtacctcaaa

SEQ ID NO: 2320608 - DNA, 25 bp, Homo sapien
tttgccaactctggtactctcctca

SEQ ID NO: 2320609 - DNA, 25 bp, Homo sapien
atttggtctggtgaacactctcagt

SEQ ID NO: 2320610 - DNA, 25 bp, Homo sapien
gtctggtgaacactctcagtcaccc

SEQ ID NO: 2320611 - DNA, 25 bp, Homo sapien
tctttgccaactctggtactctcct

SEQ ID NO: 2320612 - DNA, 25 bp, Homo sapien
taaacggcatggcatcaaaacgcct

SEQ ID NO: 2320613 - DNA, 25 bp, Homo sapien
cacctcactgaagaaggcacgtgaa

SEQ ID NO: 2320614 - DNA, 25 bp, Homo sapien
agaggggtctcgtttgtaaatagtg

SEQ ID NO: 2320615 - DNA, 25 bp, Homo sapien
cattttcagtccatactgtttagag

SEQ ID NO: 2320616 - DNA, 25 bp, Homo sapien
ggttccaagtactatcattgcttag

SEQ ID NO: 2320617 - DNA, 25 bp, Homo sapien
cacgctacaagtctaggcaggaagg

SEQ ID NO: 2320618 - DNA, 25 bp, Homo sapien
gcagggaagatgatattcagaggta

SEQ ID NO: 2320619 - DNA, 25 bp, Homo sapien
tctgtgagtcagactggttccaagt

SEQ ID NO: 2320620 - DNA, 25 bp, Homo sapien
gcagttcatgtttggcgcactccac

SEQ ID NO: 2320621 - DNA, 25 bp, Homo sapien
ggttgcagcagttcatgtttggcgc

SEQ ID NO: 2320622 - DNA, 25 bp, Homo sapien
tctcatagagaacattaaatggttg

SEQ ID NO: 2320623 - DNA, 25 bp, Homo sapien
cattaaatggttgcagcagttcatg

SEQ ID NO: 2320624 - DNA, 25 bp, Homo sapien
cttacaggaaggatatcttataatc

SEQ ID NO: 2320625 - DNA, 25 bp, Homo sapien
ttctgaacttacaggaaggatatct

SEQ ID NO: 2320626 - DNA, 25 bp, Homo sapien
aaagtgaagctctttttggaactca

SEQ ID NO: 2320627 - DNA, 25 bp, Homo sapien
tccaaagtgaagctctttttggaac

SEQ ID NO: 2320628 - DNA, 25 bp, Homo sapien
ctggttatccgcatggggccattgg

SEQ ID NO: 2320629 - DNA, 25 bp, Homo sapien
tgtagaggtcaggctcgaagggacc

SEQ ID NO: 2320630 - DNA, 25 bp, Homo sapien
cgaagggaccactggttatccgcat

SEQ ID NO: 2320631 - DNA, 25 bp, Homo sapien
ccattgggcatgagcagaactgtaa

SEQ ID NO: 2320632 - DNA, 25 bp, Homo sapien
ttttcgacttgcagaactctggagg

SEQ ID NO: 2320633 - DNA, 25 bp, Homo sapien
tgggtttttcgacttgcagaactct

SEQ ID NO: 2320634 - DNA, 25 bp, Homo sapien
tctgggtttttcgacttgcagaact

SEQ ID NO: 2320635 - DNA, 25 bp, Homo sapien
ggtttttcgacttgcagaactctgg

SEQ ID NO: 2320636 - DNA, 25 bp, Homo sapien
catacaggtctctgacttacaatgg

SEQ ID NO: 2320637 - DNA, 25 bp, Homo sapien
gccaggctaagctatgaggttcatg

SEQ ID NO: 2320638 - DNA, 25 bp, Homo sapien
ggtaggttaaggtacatcaaatcca

SEQ ID NO: 2320639 - DNA, 25 bp, Homo sapien
ggtggctactcagcaggtcaaggca

SEQ ID NO: 2320640 - DNA, 25 bp, Homo sapien
taatgtttccccactggtggcattc

SEQ ID NO: 2320641 - DNA, 25 bp, Homo sapien
cttctaatgtttccccactggtggc

SEQ ID NO: 2320642 - DNA, 25 bp, Homo sapien
gtttccccactggtggcattctctg

SEQ ID NO: 2320643 - DNA, 25 bp, Homo sapien
tgtttccccactggtggcattctct

SEQ ID NO: 2320644 - DNA, 25 bp, Homo sapien
gggatgaggcaggagcagcaagctg

SEQ ID NO: 2320645 - DNA, 25 bp, Homo sapien
ctaggtggagaagaactgcacttca

SEQ ID NO: 2320646 - DNA, 25 bp, Homo sapien
actgcacttcacagagtctggggtt

SEQ ID NO: 2320647 - DNA, 25 bp, Homo sapien
tgggaaggggatgaggcaggagcag

SEQ ID NO: 2320648 - DNA, 25 bp, Homo sapien
ctcccaagaccagagtcagttggag

SEQ ID NO: 2320649 - DNA, 25 bp, Homo sapien
caagaccagagtcagttggagctgg

SEQ ID NO: 2320650 - DNA, 25 bp, Homo sapien
ccagagtcagttggagctggttgtt

SEQ ID NO: 2320651 - DNA, 25 bp, Homo sapien
cagttggagctggttgttgttggaa

SEQ ID NO: 2320652 - DNA, 25 bp, Homo sapien
agtcttccgtggttgggaagcctca

SEQ ID NO: 2320653 - DNA, 25 bp, Homo sapien
gtcttccgtggttgggaagcctcac

SEQ ID NO: 2320654 - DNA, 25 bp, Homo sapien
catttaaagtagtcttccgtggttg

SEQ ID NO: 2320655 - DNA, 25 bp, Homo sapien
tagtcttccgtggttgggaagcctc

SEQ ID NO: 2320656 - DNA, 25 bp, Homo sapien
gagccctagtttcctgggacagcat

SEQ ID NO: 2320657 - DNA, 25 bp, Homo sapien
cctcataagttagtgggagccctag

SEQ ID NO: 2320658 - DNA, 25 bp, Homo sapien
ggacagcatgccagaggtactgaaa

SEQ ID NO: 2320659 - DNA, 25 bp, Homo sapien
gagttgtgtcttcagtcagtctacg

SEQ ID NO: 2320660 - DNA, 25 bp, Homo sapien
gagcaaatccaaatttattttaatg

SEQ ID NO: 2320661 - DNA, 25 bp, Homo sapien
tgagcaaatccaaatttattttaat

SEQ ID NO: 2320662 - DNA, 25 bp, Homo sapien
agcaaatccaaatttattttaatgt

SEQ ID NO: 2320663 - DNA, 25 bp, Homo sapien
atgagcaaatccaaatttattttaa

SEQ ID NO: 2320664 - DNA, 25 bp, Homo sapien
agagaaaggcgaagttccgtctacg

SEQ ID NO: 2320665 - DNA, 25 bp, Homo sapien
gcgaagttccgtctacggctattta

SEQ ID NO: 2320666 - DNA, 25 bp, Homo sapien
ctaaggccgagagaaaggcgaagtt

SEQ ID NO: 2320667 - DNA, 25 bp, Homo sapien
aagttccgtctacggctatttaatg

SEQ ID NO: 2320668 - DNA, 25 bp, Homo sapien
ttgctgtgatgatgctaagtgccga

SEQ ID NO: 2320669 - DNA, 25 bp, Homo sapien
tgtacacggaatcccaacgcaggaa

SEQ ID NO: 2320670 - DNA, 25 bp, Homo sapien
ccgaggtcagatgtctatggattgt

SEQ ID NO: 2320671 - DNA, 25 bp, Homo sapien
gagagaaaggctacagttagtttgc

SEQ ID NO: 2320672 - DNA, 25 bp, Homo sapien
tcccaagcttactaccaggaaccgc

SEQ ID NO: 2320673 - DNA, 25 bp, Homo sapien
ccaagcttactaccaggaaccgctc

SEQ ID NO: 2320674 - DNA, 25 bp, Homo sapien
ctcccaagcttactaccaggaaccg

SEQ ID NO: 2320675 - DNA, 25 bp, Homo sapien
aagcttactaccaggaaccgctcac

SEQ ID NO: 2320676 - DNA, 25 bp, Homo sapien
ctcgctactactcgccaactcctac

SEQ ID NO: 2320677 - DNA, 25 bp, Homo sapien
cttcgtctcctcgctactactcgcc

SEQ ID NO: 2320678 - DNA, 25 bp, Homo sapien
gtctcctcgctactactcgccaact

SEQ ID NO: 2320679 - DNA, 25 bp, Homo sapien
tcctcgctactactcgccaactcct

SEQ ID NO: 2320680 - DNA, 25 bp, Homo sapien
ccttgaaacccagtagttcaggagg

SEQ ID NO: 2320681 - DNA, 25 bp, Homo sapien
agctcttgggcacccttgaaaccca

SEQ ID NO: 2320682 - DNA, 25 bp, Homo sapien
ggcacccttgaaacccagtagttca

SEQ ID NO: 2320683 - DNA, 25 bp, Homo sapien
gaaacccagtagttcaggaggtatg

SEQ ID NO: 2320684 - DNA, 25 bp, Homo sapien
tagcaaccgatcacaagcagcagat

SEQ ID NO: 2320685 - DNA, 25 bp, Homo sapien
gaaatgcactctttagaaccggaca

SEQ ID NO: 2320686 - DNA, 25 bp, Homo sapien
gacaccctcccaacataagatcaga

SEQ ID NO: 2320687 - DNA, 25 bp, Homo sapien
tacatcagtaacttggacaccctcc

SEQ ID NO: 2320688 - DNA, 25 bp, Homo sapien
gaatacacctcaaaccagagttgcc

SEQ ID NO: 2320689 - DNA, 25 bp, Homo sapien
tcctgggctggcaaagtctcaacgt

SEQ ID NO: 2320690 - DNA, 25 bp, Homo sapien
gcactacggttctatcgttctctgt

SEQ ID NO: 2320691 - DNA, 25 bp, Homo sapien
tggtaaaatgaacaagcactacggt

SEQ ID NO: 2320692 - DNA, 25 bp, Homo sapien
ctcatctttcttcttttgcgcttca

SEQ ID NO: 2320693 - DNA, 25 bp, Homo sapien
ttggacctctgcctcatctttcttc

SEQ ID NO: 2320694 - DNA, 25 bp, Homo sapien
gcctcatctttcttcttttgcgctt

SEQ ID NO: 2320695 - DNA, 25 bp, Homo sapien
catctttcttcttttgcgcttcagc

SEQ ID NO: 2320696 - DNA, 25 bp, Homo sapien
ttatatggttgttacactcggccac

SEQ ID NO: 2320697 - DNA, 25 bp, Homo sapien
tatatggttgttacactcggccaca

SEQ ID NO: 2320698 - DNA, 25 bp, Homo sapien
attatatggttgttacactcggcca

SEQ ID NO: 2320699 - DNA, 25 bp, Homo sapien
tattatatggttgttacactcggcc

SEQ ID NO: 2320700 - DNA, 25 bp, Homo sapien
ggtagtgacagggcaaactctaatg

SEQ ID NO: 2320701 - DNA, 25 bp, Homo sapien
gataccctccatagcacaggtagtg

SEQ ID NO: 2320702 - DNA, 25 bp, Homo sapien
aatgacagaaaacccccacccgatg

SEQ ID NO: 2320703 - DNA, 25 bp, Homo sapien
cataaaaaacataatagacaagatg

SEQ ID NO: 2320704 - DNA, 25 bp, Homo sapien
actatggcaacccaacccaaaggca

SEQ ID NO: 2320705 - DNA, 25 bp, Homo sapien
tcccagcacgctttgcgtgtcacta

SEQ ID NO: 2320706 - DNA, 25 bp, Homo sapien
tctaagcggtagtcgccaaggcagc

SEQ ID NO: 2320707 - DNA, 25 bp, Homo sapien
cccaaaggcacgacatggtctaagc

SEQ ID NO: 2320708 - DNA, 25 bp, Homo sapien
ggtgtatgaagtacgcgtgcgacat

SEQ ID NO: 2320709 - DNA, 25 bp, Homo sapien
ctatggtgtatgaagtacgcgtgcg

SEQ ID NO: 2320710 - DNA, 25 bp, Homo sapien
tatggtgtatgaagtacgcgtgcga

SEQ ID NO: 2320711 - DNA, 25 bp, Homo sapien
tggtgtatgaagtacgcgtgcgaca

SEQ ID NO: 2320712 - DNA, 25 bp, Homo sapien
tctagcttcgacaaagagccgccta

SEQ ID NO: 2320713 - DNA, 25 bp, Homo sapien
tctagccagcagacccggaaccata

SEQ ID NO: 2320714 - DNA, 25 bp, Homo sapien
ttcctgcggaagaagtgacgctcta

SEQ ID NO: 2320715 - DNA, 25 bp, Homo sapien
ctgccggtcctctagcttcgacaaa

SEQ ID NO: 2320716 - DNA, 25 bp, Homo sapien
gaagtcctaggagttttcccgcagc

SEQ ID NO: 2320717 - DNA, 25 bp, Homo sapien
gggcgccctgcctcaagatgaaaga

SEQ ID NO: 2320718 - DNA, 25 bp, Homo sapien
tacgtgaatgggacactaagggcgc

SEQ ID NO: 2320719 - DNA, 25 bp, Homo sapien
caccctagagtttgcgaaagaagtc

SEQ ID NO: 2320720 - DNA, 25 bp, Homo sapien
tagctcaggtgaagtccggggctcc

SEQ ID NO: 2320721 - DNA, 25 bp, Homo sapien
agctcaggtgaagtccggggctcct

SEQ ID NO: 2320722 - DNA, 25 bp, Homo sapien
aggtagctcaggtgaagtccggggc

SEQ ID NO: 2320723 - DNA, 25 bp, Homo sapien
gtagctcaggtgaagtccggggctc

SEQ ID NO: 2320724 - DNA, 25 bp, Homo sapien
gcaagtcgcaccagcagcagataat

SEQ ID NO: 2320725 - DNA, 25 bp, Homo sapien
gtcgcaccagcagcagataattagt

SEQ ID NO: 2320726 - DNA, 25 bp, Homo sapien
agtcgcaccagcagcagataattag

SEQ ID NO: 2320727 - DNA, 25 bp, Homo sapien
caagtcgcaccagcagcagataatt

SEQ ID NO: 2320728 - DNA, 25 bp, Homo sapien
gagaactgtatcaaacaggagtcct

SEQ ID NO: 2320729 - DNA, 25 bp, Homo sapien
agaggagaactgtatcaaacaggag

SEQ ID NO: 2320730 - DNA, 25 bp, Homo sapien
cctgactataaagcaggtggcccag

SEQ ID NO: 2320731 - DNA, 25 bp, Homo sapien
tccagggagatcccactcttcctga

SEQ ID NO: 2320732 - DNA, 25 bp, Homo sapien
ccaactcagggttttctttatcttg

SEQ ID NO: 2320733 - DNA, 25 bp, Homo sapien
tctttatcttgccactcttggtgac

SEQ ID NO: 2320734 - DNA, 25 bp, Homo sapien
tttatcttgccactcttggtgacca

SEQ ID NO: 2320735 - DNA, 25 bp, Homo sapien
tttctttatcttgccactcttggtg

SEQ ID NO: 2320736 - DNA, 25 bp, Homo sapien
tatgaccttggcctgattgcggaac

SEQ ID NO: 2320737 - DNA, 25 bp, Homo sapien
gaaacggcaatttgggcggctacac

SEQ ID NO: 2320738 - DNA, 25 bp, Homo sapien
agtcacccttgagaaagtcacggca

SEQ ID NO: 2320739 - DNA, 25 bp, Homo sapien
gccatttggtaggtcagccggtgaa

SEQ ID NO: 2320740 - DNA, 25 bp, Homo sapien
tattgtccaacccaagcaactagga

SEQ ID NO: 2320741 - DNA, 25 bp, Homo sapien
gaggacaagacgagggatgttccca

SEQ ID NO: 2320742 - DNA, 25 bp, Homo sapien
caaactagggtaatgaatgctcccc

SEQ ID NO: 2320743 - DNA, 25 bp, Homo sapien
tcctagttctcaagggagcccttca

SEQ ID NO: 2320744 - DNA, 25 bp, Homo sapien
ttccacacagaatagctaagcaagt

SEQ ID NO: 2320745 - DNA, 25 bp, Homo sapien
ccatcttaccaaagctatgtgaggc

SEQ ID NO: 2320746 - DNA, 25 bp, Homo sapien
ggcttctatccatcttaccaaagct

SEQ ID NO: 2320747 - DNA, 25 bp, Homo sapien
gcatgagatctatttactgctccca

SEQ ID NO: 2320748 - DNA, 25 bp, Homo sapien
tgagtgatcaaccagacaagaaagc

SEQ ID NO: 2320749 - DNA, 25 bp, Homo sapien
acattaactgccatcaactgagcgg

SEQ ID NO: 2320750 - DNA, 25 bp, Homo sapien
gaccctgaggcttgtgtccctagaa

SEQ ID NO: 2320751 - DNA, 25 bp, Homo sapien
tccaatcccagatgtgacctgagtg

SEQ ID NO: 2320752 - DNA, 25 bp, Homo sapien
tcgttcctaacaccctcatgctgag

SEQ ID NO: 2320753 - DNA, 25 bp, Homo sapien
taatagtctagaattgccgggcacg

SEQ ID NO: 2320754 - DNA, 25 bp, Homo sapien
cactccggtctggtgactgggcaag

SEQ ID NO: 2320755 - DNA, 25 bp, Homo sapien
catgctgagacacaccacgttatcc

SEQ ID NO: 2320756 - DNA, 25 bp, Homo sapien
tgggcttatcactagagaacagaga

SEQ ID NO: 2320757 - DNA, 25 bp, Homo sapien
gacttcatcatcgactgtgcttagg

SEQ ID NO: 2320758 - DNA, 25 bp, Homo sapien
aaaaatgctacgattaactgacccg

SEQ ID NO: 2320759 - DNA, 25 bp, Homo sapien
gaaagtagctcctgtaatctgggaa

SEQ ID NO: 2320760 - DNA, 25 bp, Homo sapien
ggaaggtttgccatacagtcaggtg

SEQ ID NO: 2320761 - DNA, 25 bp, Homo sapien
gatgtaagactagttggctccaaaa

SEQ ID NO: 2320762 - DNA, 25 bp, Homo sapien
ccctagggctagcagtatcttgact

SEQ ID NO: 2320763 - DNA, 25 bp, Homo sapien
tgtggtgtaacgactgaccctggag

SEQ ID NO: 2320764 - DNA, 25 bp, Homo sapien
ggaggttgcctagtcttgcgatcag

SEQ ID NO: 2320765 - DNA, 25 bp, Homo sapien
tgccacctctgggaggatccgcccg

SEQ ID NO: 2320766 - DNA, 25 bp, Homo sapien
ggttgcctagtcttgcgatcagctc

SEQ ID NO: 2320767 - DNA, 25 bp, Homo sapien
ttgcctagtcttgcgatcagctccc

SEQ ID NO: 2320768 - DNA, 25 bp, Homo sapien
cagcaggttggcccccagaacctgg

SEQ ID NO: 2320769 - DNA, 25 bp, Homo sapien
gggctggtcagtggggtcggaggga

SEQ ID NO: 2320770 - DNA, 25 bp, Homo sapien
ggtctggctttgcgtgagcagcggg

SEQ ID NO: 2320771 - DNA, 25 bp, Homo sapien
tggtcagtggggtcggagggagcag

SEQ ID NO: 2320772 - DNA, 25 bp, Homo sapien
gaaggctccgttctttctcgtcgcg

SEQ ID NO: 2320773 - DNA, 25 bp, Homo sapien
aagagcacgaaacccacgctgagtc

SEQ ID NO: 2320774 - DNA, 25 bp, Homo sapien
tcgtcgtccagtagctgcctcgctg

SEQ ID NO: 2320775 - DNA, 25 bp, Homo sapien
aaccgcctcccgaatgaagtcagca

SEQ ID NO: 2320776 - DNA, 25 bp, Homo sapien
agagagttttcgcagtgagctgctc

SEQ ID NO: 2320777 - DNA, 25 bp, Homo sapien
tagagagttttcgcagtgagctgct

SEQ ID NO: 2320778 - DNA, 25 bp, Homo sapien
atagagagttttcgcagtgagctgc

SEQ ID NO: 2320779 - DNA, 25 bp, Homo sapien
caggcaggtagctctcgatgactca

SEQ ID NO: 2320780 - DNA, 25 bp, Homo sapien
aggcaggtagctctcgatgactcat

SEQ ID NO: 2320781 - DNA, 25 bp, Homo sapien
gtggaagggggctatgctgcacaga

SEQ ID NO: 2320782 - DNA, 25 bp, Homo sapien
aagggggctatgctgcacagaggac

SEQ ID NO: 2320783 - DNA, 25 bp, Homo sapien
cacagaggaccgagggtggtcgctc

SEQ ID NO: 2320784 - DNA, 25 bp, Homo sapien
acagaggaccgagggtggtcgctca

SEQ ID NO: 2320785 - DNA, 25 bp, Homo sapien
aagtcctgattctgtggaaggatcc

SEQ ID NO: 2320786 - DNA, 25 bp, Homo sapien
gataaaagcgagaaaagagagaacc

SEQ ID NO: 2320787 - DNA, 25 bp, Homo sapien
aagcaagagggacgttcaagatggc

SEQ ID NO: 2320788 - DNA, 25 bp, Homo sapien
cgcgagtggcaccaaaagcaagagg

SEQ ID NO: 2320789 - DNA, 25 bp, Homo sapien
gaggcttgaaggtggctgcccgagg

SEQ ID NO: 2320790 - DNA, 25 bp, Homo sapien
gcggctggaggcttgaaggtggctg

SEQ ID NO: 2320791 - DNA, 25 bp, Homo sapien
aagggtgtggccggccgaggagtgc

SEQ ID NO: 2320792 - DNA, 25 bp, Homo sapien
aggtggctgcccgagggtcgtccag

SEQ ID NO: 2320793 - DNA, 25 bp, Homo sapien
tgccccaacggaacaagcgcagccc

SEQ ID NO: 2320794 - DNA, 25 bp, Homo sapien
tctgccccaacggaacaagcgcagc

SEQ ID NO: 2320795 - DNA, 25 bp, Homo sapien
ccccaacggaacaagcgcagcccac

SEQ ID NO: 2320796 - DNA, 25 bp, Homo sapien
ggtctctgccccaacggaacaagcg

SEQ ID NO: 2320797 - DNA, 25 bp, Homo sapien
gccttttccacgtctgggaagctga

SEQ ID NO: 2320798 - DNA, 25 bp, Homo sapien
ccttttccacgtctgggaagctgac

SEQ ID NO: 2320799 - DNA, 25 bp, Homo sapien
ctccatatactggcccaggaagggc

SEQ ID NO: 2320800 - DNA, 25 bp, Homo sapien
tccatatactggcccaggaagggcc

SEQ ID NO: 2320801 - DNA, 25 bp, Homo sapien
ccatatactggcccaggaagggcca

SEQ ID NO: 2320802 - DNA, 25 bp, Homo sapien
cagatgggggttagatcccctaaca

SEQ ID NO: 2320803 - DNA, 25 bp, Homo sapien
agttccactcgtgtaaatgtaaatg

SEQ ID NO: 2320804 - DNA, 25 bp, Homo sapien
ggttagatcccctaacagccggagc

SEQ ID NO: 2320805 - DNA, 25 bp, Homo sapien
cggagccacagtttcagccagaagc

SEQ ID NO: 2320806 - DNA, 25 bp, Homo sapien
ccttgactccaatgatgcgcaatgg

SEQ ID NO: 2320807 - DNA, 25 bp, Homo sapien
tcaagtccagcaggatctgctcttt

SEQ ID NO: 2320808 - DNA, 25 bp, Homo sapien
ctgatgttcaagtccagcaggatct

SEQ ID NO: 2320809 - DNA, 25 bp, Homo sapien
tctctgacctgggtgaaccttgact

SEQ ID NO: 2320810 - DNA, 25 bp, Homo sapien
gcccttgactcctgctttgcaaaaa

SEQ ID NO: 2320811 - DNA, 25 bp, Homo sapien
atcaatctgcacatcacctacatag

SEQ ID NO: 2320812 - DNA, 25 bp, Homo sapien
ctgcatgcccttgactcctgctttg

SEQ ID NO: 2320813 - DNA, 25 bp, Homo sapien
cacttccacatcaatctgcacatca

SEQ ID NO: 2320814 - DNA, 25 bp, Homo sapien
agtggctccagtatcacccgcaaaa

SEQ ID NO: 2320815 - DNA, 25 bp, Homo sapien
gtatcacccgcaaaacgccatgtag

SEQ ID NO: 2320816 - DNA, 25 bp, Homo sapien
tgacacagcccccacgaagggaagg

SEQ ID NO: 2320817 - DNA, 25 bp, Homo sapien
aaggtccccaatgagtggctccagt

SEQ ID NO: 2320818 - DNA, 25 bp, Homo sapien
tggtcatccctgtccagttgatgtc

SEQ ID NO: 2320819 - DNA, 25 bp, Homo sapien
ttggtcatccctgtccagttgatgt

SEQ ID NO: 2320820 - DNA, 25 bp, Homo sapien
agaaaggagtgggtatggcctcaac

SEQ ID NO: 2320821 - DNA, 25 bp, Homo sapien
ggtatggcctcaacttccaattttc

SEQ ID NO: 2320822 - DNA, 25 bp, Homo sapien
ggagtagaaaggagtgggtatggcc

SEQ ID NO: 2320823 - DNA, 25 bp, Homo sapien
cccaactatgtttcccacacccaag

SEQ ID NO: 2320824 - DNA, 25 bp, Homo sapien
gcagcaatggagtccatgatcatgg

SEQ ID NO: 2320825 - DNA, 25 bp, Homo sapien
taatcggttgggcaacacgaggaag

SEQ ID NO: 2320826 - DNA, 25 bp, Homo sapien
gcacaaggggcaccagtaatcggtt

SEQ ID NO: 2320827 - DNA, 25 bp, Homo sapien
ccatgatcatggtgtcagagagtga

SEQ ID NO: 2320828 - DNA, 25 bp, Homo sapien
gatctatctagtgggggaaaggcca

SEQ ID NO: 2320829 - DNA, 25 bp, Homo sapien
tgagaaactaaggacccagcaaggg

SEQ ID NO: 2320830 - DNA, 25 bp, Homo sapien
ccagcaaggggttcctgagagaagg

SEQ ID NO: 2320831 - DNA, 25 bp, Homo sapien
atggtgagaaactaaggacccagca

SEQ ID NO: 2320832 - DNA, 25 bp, Homo sapien
tgggtacccaaacgcacaagtgcat

SEQ ID NO: 2320833 - DNA, 25 bp, Homo sapien
gcatatgggtctgacttgccctcaa

SEQ ID NO: 2320834 - DNA, 25 bp, Homo sapien
ccagcaggtgaattcgaataatgcc

SEQ ID NO: 2320835 - DNA, 25 bp, Homo sapien
ccccactgtgggttgagttcttcat

SEQ ID NO: 2320836 - DNA, 25 bp, Homo sapien
gggaacacagaaggctgagtgtctc

SEQ ID NO: 2320837 - DNA, 25 bp, Homo sapien
gggctgcagctgtgaggatcatcca

SEQ ID NO: 2320838 - DNA, 25 bp, Homo sapien
gaacacagaaggctgagtgtctcat

SEQ ID NO: 2320839 - DNA, 25 bp, Homo sapien
cacagaaggctgagtgtctcatggg

SEQ ID NO: 2320840 - DNA, 25 bp, Homo sapien
ttgtcgaacacctccacttcaatct

SEQ ID NO: 2320841 - DNA, 25 bp, Homo sapien
tgccctgggacctcgtgtaccatca

SEQ ID NO: 2320842 - DNA, 25 bp, Homo sapien
atctttatctggatccttgtcgaac

SEQ ID NO: 2320843 - DNA, 25 bp, Homo sapien
ggatccttgtcgaacacctccactt

SEQ ID NO: 2320844 - DNA, 25 bp, Homo sapien
ttagaatcctaacaggcagagtctc

SEQ ID NO: 2320845 - DNA, 25 bp, Homo sapien
tagaatcctaacaggcagagtctca

SEQ ID NO: 2320846 - DNA, 25 bp, Homo sapien
cagaacgctagcctgtaacaccttc

SEQ ID NO: 2320847 - DNA, 25 bp, Homo sapien
gatgtagtagagatcagatacctgc

SEQ ID NO: 2320848 - DNA, 25 bp, Homo sapien
caatgtagcaactactatctaccca

SEQ ID NO: 2320849 - DNA, 25 bp, Homo sapien
tctacccaaagggtgagatcagccc

SEQ ID NO: 2320850 - DNA, 25 bp, Homo sapien
agatacctgctcaactacttcccta

SEQ ID NO: 2320851 - DNA, 25 bp, Homo sapien
aaaagtgacagccattctagcctca

SEQ ID NO: 2320852 - DNA, 25 bp, Homo sapien
gtgacagccattctagcctcaagtg

SEQ ID NO: 2320853 - DNA, 25 bp, Homo sapien
gacaaaagtgacagccattctagcc

SEQ ID NO: 2320854 - DNA, 25 bp, Homo sapien
aagtgacagccattctagcctcaag

SEQ ID NO: 2320855 - DNA, 25 bp, Homo sapien
ggatctggtcgagaggagactcccc

SEQ ID NO: 2320856 - DNA, 25 bp, Homo sapien
cgagaggagactccccaattccact

SEQ ID NO: 2320857 - DNA, 25 bp, Homo sapien
caggtagacaactaagatggcagct

SEQ ID NO: 2320858 - DNA, 25 bp, Homo sapien
gatcctgggcccgatccaggtagac

SEQ ID NO: 2320859 - DNA, 25 bp, Homo sapien
ggtgggtacaattcagaggtcacca

SEQ ID NO: 2320860 - DNA, 25 bp, Homo sapien
tggtgggtacaattcagaggtcacc

SEQ ID NO: 2320861 - DNA, 25 bp, Homo sapien
gtggtgggtacaattcagaggtcac

SEQ ID NO: 2320862 - DNA, 25 bp, Homo sapien
gtgggtacaattcagaggtcaccat

SEQ ID NO: 2320863 - DNA, 25 bp, Homo sapien
ctgagtcacatcctgaattgacagt

SEQ ID NO: 2320864 - DNA, 25 bp, Homo sapien
tgacagttgtaccatagggttgggt

SEQ ID NO: 2320865 - DNA, 25 bp, Homo sapien
cacatcctgaattgacagttgtacc

SEQ ID NO: 2320866 - DNA, 25 bp, Homo sapien
tgaattgacagttgtaccatagggt

SEQ ID NO: 2320867 - DNA, 25 bp, Homo sapien
gagatgtagaggagggattaagggt

SEQ ID NO: 2320868 - DNA, 25 bp, Homo sapien
ggagggattaagggtgtataccaca

SEQ ID NO: 2320869 - DNA, 25 bp, Homo sapien
tgtagaggagggattaagggtgtat

SEQ ID NO: 2320870 - DNA, 25 bp, Homo sapien
ctggagatgtagaggagggattaag

SEQ ID NO: 2320871 - DNA, 25 bp, Homo sapien
cactgggcagttggtactgtagaca

SEQ ID NO: 2320872 - DNA, 25 bp, Homo sapien
tcccacactgggcagttggtactgt

SEQ ID NO: 2320873 - DNA, 25 bp, Homo sapien
ctgggcagttggtactgtagacagc

SEQ ID NO: 2320874 - DNA, 25 bp, Homo sapien
cacactgggcagttggtactgtaga

SEQ ID NO: 2320875 - DNA, 25 bp, Homo sapien
tagagtgcagtgcttgaaatcagct

SEQ ID NO: 2320876 - DNA, 25 bp, Homo sapien
gtgcttgaaatcagctcactacaac

SEQ ID NO: 2320877 - DNA, 25 bp, Homo sapien
agtgcagtgcttgaaatcagctcac

SEQ ID NO: 2320878 - DNA, 25 bp, Homo sapien
gcagtgcttgaaatcagctcactac

SEQ ID NO: 2320879 - DNA, 25 bp, Homo sapien
cagtgctcctaaagtcagggccctg

SEQ ID NO: 2320880 - DNA, 25 bp, Homo sapien
ctcatgactagtttcatatagagtc

SEQ ID NO: 2320881 - DNA, 25 bp, Homo sapien
gactagtttcatatagagtctggag

SEQ ID NO: 2320882 - DNA, 25 bp, Homo sapien
gccagaggcagcgtcagtgctccta

SEQ ID NO: 2320883 - DNA, 25 bp, Homo sapien
caggcaccgtggggaagcatatttc

SEQ ID NO: 2320884 - DNA, 25 bp, Homo sapien
ggcaccgtggggaagcatatttctg

SEQ ID NO: 2320885 - DNA, 25 bp, Homo sapien
tcactgtccacgtcccaagcaccag

SEQ ID NO: 2320886 - DNA, 25 bp, Homo sapien
gcaccgtggggaagcatatttctga

SEQ ID NO: 2320887 - DNA, 25 bp, Homo sapien
cccaaactggctatcaggagtcgtg

SEQ ID NO: 2320888 - DNA, 25 bp, Homo sapien
gtcccaaactggctatcaggagtcg

SEQ ID NO: 2320889 - DNA, 25 bp, Homo sapien
ctcagtcccaaactggctatcagga

SEQ ID NO: 2320890 - DNA, 25 bp, Homo sapien
caggagtcgtgtgacagggtcgagg

SEQ ID NO: 2320891 - DNA, 25 bp, Homo sapien
gaacaacatggctccggaagcttcg

SEQ ID NO: 2320892 - DNA, 25 bp, Homo sapien
gattgagatcttcccgaacaacatg

SEQ ID NO: 2320893 - DNA, 25 bp, Homo sapien
caggtcctgggcctctaatacatgg

SEQ ID NO: 2320894 - DNA, 25 bp, Homo sapien
ggaagcttcgtcctgccaactttag

SEQ ID NO: 2320895 - DNA, 25 bp, Homo sapien
gtcaaagacttcaacctctagctct

SEQ ID NO: 2320896 - DNA, 25 bp, Homo sapien
aaagacttcaacctctagctcttgg

SEQ ID NO: 2320897 - DNA, 25 bp, Homo sapien
caaagacttcaacctctagctcttg

SEQ ID NO: 2320898 - DNA, 25 bp, Homo sapien
tgtcaaagacttcaacctctagctc

SEQ ID NO: 2320899 - DNA, 25 bp, Homo sapien
ctcatcaaggaagccactgtttaag

SEQ ID NO: 2320900 - DNA, 25 bp, Homo sapien
tcatcaaggaagccactgtttaaga

SEQ ID NO: 2320901 - DNA, 25 bp, Homo sapien
gttgttgactctaattcaatgctca

SEQ ID NO: 2320902 - DNA, 25 bp, Homo sapien
gaagtaggcagggtgaagacttggg

SEQ ID NO: 2320903 - DNA, 25 bp, Homo sapien
gatatgcagacaggagaactttgag

SEQ ID NO: 2320904 - DNA, 25 bp, Homo sapien
gaactttgagaatgaagcttgggca

SEQ ID NO: 2320905 - DNA, 25 bp, Homo sapien
agtgcaggcggccagatgggacatc

SEQ ID NO: 2320906 - DNA, 25 bp, Homo sapien
ggccagatgggacatcctccagggt

SEQ ID NO: 2320907 - DNA, 25 bp, Homo sapien
aggcggccagatgggacatcctcca

SEQ ID NO: 2320908 - DNA, 25 bp, Homo sapien
acggggggtgagacgctccaggcgc

SEQ ID NO: 2320909 - DNA, 25 bp, Homo sapien
ggcatgtgccttgaacgctaagaga

SEQ ID NO: 2320910 - DNA, 25 bp, Homo sapien
ttgaacgctaagagaagagctcatc

SEQ ID NO: 2320911 - DNA, 25 bp, Homo sapien
gctggggagtggtaactgacacctt

SEQ ID NO: 2320912 - DNA, 25 bp, Homo sapien
caccttgggttctggcatgtgcctt

SEQ ID NO: 2320913 - DNA, 25 bp, Homo sapien
ggatcaaactattcacctgcagcac

SEQ ID NO: 2320914 - DNA, 25 bp, Homo sapien
ctctgcccgctccatatagatggat

SEQ ID NO: 2320915 - DNA, 25 bp, Homo sapien
catatagatggatagcagggccgca

SEQ ID NO: 2320916 - DNA, 25 bp, Homo sapien
cgcactcttctgagtctggatcaaa

SEQ ID NO: 2320917 - DNA, 25 bp, Homo sapien
ttatgagaactatctcccacagtga

SEQ ID NO: 2320918 - DNA, 25 bp, Homo sapien
gagagtagcataagggctgaggtgc

SEQ ID NO: 2320919 - DNA, 25 bp, Homo sapien
gctgaggtgcttggtgccttttcgc

SEQ ID NO: 2320920 - DNA, 25 bp, Homo sapien
tgagaactatctcccacagtgagag

SEQ ID NO: 2320921 - DNA, 25 bp, Homo sapien
ctggtggagatgagggcttatgatc

SEQ ID NO: 2320922 - DNA, 25 bp, Homo sapien
tggtggagatgagggcttatgatca

SEQ ID NO: 2320923 - DNA, 25 bp, Homo sapien
agatgagggcttatgatcagtagct

SEQ ID NO: 2320924 - DNA, 25 bp, Homo sapien
tggagatgagggcttatgatcagta

SEQ ID NO: 2320925 - DNA, 25 bp, Homo sapien
gcactctcatcccagacaggggctg

SEQ ID NO: 2320926 - DNA, 25 bp, Homo sapien
tctcatcccagacaggggctgaagt

SEQ ID NO: 2320927 - DNA, 25 bp, Homo sapien
cctgatgagaaaggaggcactctca

SEQ ID NO: 2320928 - DNA, 25 bp, Homo sapien
ttcctgatgagaaaggaggcactct

SEQ ID NO: 2320929 - DNA, 25 bp, Homo sapien
gatgttccaataagagggcaaggga

SEQ ID NO: 2320930 - DNA, 25 bp, Homo sapien
ttgctcatgatgttccaataagagg

SEQ ID NO: 2320931 - DNA, 25 bp, Homo sapien
tcacccatgactacacttatgagtg

SEQ ID NO: 2320932 - DNA, 25 bp, Homo sapien
acacttatgagtggttgcttgctca

SEQ ID NO: 2320933 - DNA, 25 bp, Homo sapien
taccagtaatacctacagcatacag

SEQ ID NO: 2320934 - DNA, 25 bp, Homo sapien
gcgcccaacctagctttcagaaatt

SEQ ID NO: 2320935 - DNA, 25 bp, Homo sapien
tattgattccctgctataaaagatg

SEQ ID NO: 2320936 - DNA, 25 bp, Homo sapien
tctcacggaattctaatatgcttgt

SEQ ID NO: 2320937 - DNA, 25 bp, Homo sapien
cagcggtccaagcagagctggtcag

SEQ ID NO: 2320938 - DNA, 25 bp, Homo sapien
agctggtcagccacgaggagctctg

SEQ ID NO: 2320939 - DNA, 25 bp, Homo sapien
cactgctgagtgtaaaccagcggtc

SEQ ID NO: 2320940 - DNA, 25 bp, Homo sapien
ggataatgagcccagcacgccagtg

SEQ ID NO: 2320941 - DNA, 25 bp, Homo sapien
tgtggctatgagcttccactcccga

SEQ ID NO: 2320942 - DNA, 25 bp, Homo sapien
gttcttcactcagcgatgaggagct

SEQ ID NO: 2320943 - DNA, 25 bp, Homo sapien
tgagcttccactcccgagtgctggg

SEQ ID NO: 2320944 - DNA, 25 bp, Homo sapien
cactcagcgatgaggagctgtggct

SEQ ID NO: 2320945 - DNA, 25 bp, Homo sapien
caacatgtgttaggcgctgccggag

SEQ ID NO: 2320946 - DNA, 25 bp, Homo sapien
acatgtgttaggcgctgccggagct

SEQ ID NO: 2320947 - DNA, 25 bp, Homo sapien
gtcaacatgtgttaggcgctgccgg

SEQ ID NO: 2320948 - DNA, 25 bp, Homo sapien
ctgtcaacatgtgttaggcgctgcc

SEQ ID NO: 2320949 - DNA, 25 bp, Homo sapien
cggcaaccatgaacaatgctgacca

SEQ ID NO: 2320950 - DNA, 25 bp, Homo sapien
gaccagctttcgttcttcactgtag

SEQ ID NO: 2320951 - DNA, 25 bp, Homo sapien
caaccatgaacaatgctgaccagct

SEQ ID NO: 2320952 - DNA, 25 bp, Homo sapien
taccacagagtcagtttcacctggc

SEQ ID NO: 2320953 - DNA, 25 bp, Homo sapien
tcctcttggtgcctcggttcttgtc

SEQ ID NO: 2320954 - DNA, 25 bp, Homo sapien
aacagtgacacatagggatcaggag

SEQ ID NO: 2320955 - DNA, 25 bp, Homo sapien
tcaggaggatcacgtccattctgtc

SEQ ID NO: 2320956 - DNA, 25 bp, Homo sapien
gatcacgtccattctgtcgaaggga

SEQ ID NO: 2320957 - DNA, 25 bp, Homo sapien
cacgctctcttgacatgaaggagga

SEQ ID NO: 2320958 - DNA, 25 bp, Homo sapien
gagacatccagctttcgtctctggg

SEQ ID NO: 2320959 - DNA, 25 bp, Homo sapien
gcagctcacgctctcttgacatgaa

SEQ ID NO: 2320960 - DNA, 25 bp, Homo sapien
gaattagacttgacagagacatcca

SEQ ID NO: 2320961 - DNA, 25 bp, Homo sapien
ctgggaaaggtctgtctcagctagg

SEQ ID NO: 2320962 - DNA, 25 bp, Homo sapien
cccttgtccttgttgtccatcaggt

SEQ ID NO: 2320963 - DNA, 25 bp, Homo sapien
tgtccttgttgtccatcaggtcata

SEQ ID NO: 2320964 - DNA, 25 bp, Homo sapien
gtccttgttgtccatcaggtcatac

SEQ ID NO: 2320965 - DNA, 25 bp, Homo sapien
cttgtccttgttgtccatcaggtca

SEQ ID NO: 2320966 - DNA, 25 bp, Homo sapien
tagctttaggctcatcacattgagg

SEQ ID NO: 2320967 - DNA, 25 bp, Homo sapien
cagtcaggctgggactcgccagctc

SEQ ID NO: 2320968 - DNA, 25 bp, Homo sapien
tctgcccttggaccctagctttagg

SEQ ID NO: 2320969 - DNA, 25 bp, Homo sapien
tgatggagcgagacgaaggcaggaa

SEQ ID NO: 2320970 - DNA, 25 bp, Homo sapien
gtgcagtaaagggaacatacggttc

SEQ ID NO: 2320971 - DNA, 25 bp, Homo sapien
agggaacatacggttcttctctttg

SEQ ID NO: 2320972 - DNA, 25 bp, Homo sapien
gaaggataaaggccgtgcagtaaag

SEQ ID NO: 2320973 - DNA, 25 bp, Homo sapien
ccagaaggataaaggccgtgcagta

SEQ ID NO: 2320974 - DNA, 25 bp, Homo sapien
catgcagtagtctaagaggctcaca

SEQ ID NO: 2320975 - DNA, 25 bp, Homo sapien
cacagctggagaggttagcctgtcc

SEQ ID NO: 2320976 - DNA, 25 bp, Homo sapien
tcccacccatgtgtggtagggaaga

SEQ ID NO: 2320977 - DNA, 25 bp, Homo sapien
actggccaggcacagatacagaagg

SEQ ID NO: 2320978 - DNA, 25 bp, Homo sapien
gagtagaatccacgcgtcctcagtt

SEQ ID NO: 2320979 - DNA, 25 bp, Homo sapien
ggagctccaagactgatatgccact

SEQ ID NO: 2320980 - DNA, 25 bp, Homo sapien
tgagttagcagcctaggcacttggg

SEQ ID NO: 2320981 - DNA, 25 bp, Homo sapien
aaaaaattggccctgctgtcccaag

SEQ ID NO: 2320982 - DNA, 25 bp, Homo sapien
caattggcagaacagatggagcaca

SEQ ID NO: 2320983 - DNA, 25 bp, Homo sapien
aagggtcactgagaacatagaggct

SEQ ID NO: 2320984 - DNA, 25 bp, Homo sapien
tcgacaacttgtggaactgagcagg

SEQ ID NO: 2320985 - DNA, 25 bp, Homo sapien
aaatccccaagttcctatgccagtg

SEQ ID NO: 2320986 - DNA, 25 bp, Homo sapien
tagagtgcagtggcgccatcttggc

SEQ ID NO: 2320987 - DNA, 25 bp, Homo sapien
tccctggttcaagcgactctcctgt

SEQ ID NO: 2320988 - DNA, 25 bp, Homo sapien
agagtgcagtggcgccatcttggct

SEQ ID NO: 2320989 - DNA, 25 bp, Homo sapien
ctggttcaagcgactctcctgtttc

SEQ ID NO: 2320990 - DNA, 25 bp, Homo sapien
ttccagcgcgctttatgtcccggaa

SEQ ID NO: 2320991 - DNA, 25 bp, Homo sapien
gtccttccagcgcgctttatgtccc

SEQ ID NO: 2320992 - DNA, 25 bp, Homo sapien
ccttccagcgcgctttatgtcccgg

SEQ ID NO: 2320993 - DNA, 25 bp, Homo sapien
cttccagcgcgctttatgtcccgga

SEQ ID NO: 2320994 - DNA, 25 bp, Homo sapien
cgcgagggcggtggcttccggccca

SEQ ID NO: 2320995 - DNA, 25 bp, Homo sapien
ggatgcgccgcgctctagattgcag

SEQ ID NO: 2320996 - DNA, 25 bp, Homo sapien
gccgcgctctagattgcagttgacg

SEQ ID NO: 2320997 - DNA, 25 bp, Homo sapien
tctagattgcagttgacgcgagggc

SEQ ID NO: 2320998 - DNA, 25 bp, Homo sapien
cagccctgaagggttaattccggtg

SEQ ID NO: 2320999 - DNA, 25 bp, Homo sapien
gagtcgtagttccccgcgggctcac

SEQ ID NO: 2321000 - DNA, 25 bp, Homo sapien
ggggcggggcatagcgcggccccca

SEQ ID NO: 2321001 - DNA, 25 bp, Homo sapien
catgccgggagtcgtagttccccgc

SEQ ID NO: 2321002 - DNA, 25 bp, Homo sapien
gacaaacaaaaggtagggtgcttgc

SEQ ID NO: 2321003 - DNA, 25 bp, Homo sapien
catctgctacccattcttccatgga

SEQ ID NO: 2321004 - DNA, 25 bp, Homo sapien
cacaagcccacggtcattcaagaca

SEQ ID NO: 2321005 - DNA, 25 bp, Homo sapien
tggaagaaaccttccacaagcccac

SEQ ID NO: 2321006 - DNA, 25 bp, Homo sapien
tcccttctgaccatggctttgtaaa

SEQ ID NO: 2321007 - DNA, 25 bp, Homo sapien
aaagtgtggtctgggagcaatgaca

SEQ ID NO: 2321008 - DNA, 25 bp, Homo sapien
ctaatacttgtagttcctgagcccc

SEQ ID NO: 2321009 - DNA, 25 bp, Homo sapien
gaggcttgtgtgaactggaacaagt

SEQ ID NO: 2321010 - DNA, 25 bp, Homo sapien
cgggggcaggggcagggagccagtt

SEQ ID NO: 2321011 - DNA, 25 bp, Homo sapien
gggcgggggcaggggcagggagcca

SEQ ID NO: 2321012 - DNA, 25 bp, Homo sapien
ggggcaggggcagggagccagttgg

SEQ ID NO: 2321013 - DNA, 25 bp, Homo sapien
gcgggggcaggggcagggagccagt

SEQ ID NO: 2321014 - DNA, 25 bp, Homo sapien
ggacagtgtgcggatgggggcaccc

SEQ ID NO: 2321015 - DNA, 25 bp, Homo sapien
acagtgtgcggatgggggcacccat

SEQ ID NO: 2321016 - DNA, 25 bp, Homo sapien
ggccaaaggacagtgtgcggatggg

SEQ ID NO: 2321017 - DNA, 25 bp, Homo sapien
gtggccaaaggacagtgtgcggatg

SEQ ID NO: 2321018 - DNA, 25 bp, Homo sapien
caccactttggagagatcgactgga

SEQ ID NO: 2321019 - DNA, 25 bp, Homo sapien
ttggagagatcgactggaggctcct

SEQ ID NO: 2321020 - DNA, 25 bp, Homo sapien
gctggtttcttcacgggaacatcct

SEQ ID NO: 2321021 - DNA, 25 bp, Homo sapien
gatggagggccctgctggtttcttc

SEQ ID NO: 2321022 - DNA, 25 bp, Homo sapien
ccagctggtccttgttaaactcgat

SEQ ID NO: 2321023 - DNA, 25 bp, Homo sapien
taaagtataaggaagggtcagtgta

SEQ ID NO: 2321024 - DNA, 25 bp, Homo sapien
taaggaagggtcagtgtagacactg

SEQ ID NO: 2321025 - DNA, 25 bp, Homo sapien
agacactgactagggttcccatcac

SEQ ID NO: 2321026 - DNA, 25 bp, Homo sapien
gaaactatgtgaacagaacaaggga

SEQ ID NO: 2321027 - DNA, 25 bp, Homo sapien
cccactcggtcaaacagctcgaagg

SEQ ID NO: 2321028 - DNA, 25 bp, Homo sapien
cgtccccacactggctgtacaggat

SEQ ID NO: 2321029 - DNA, 25 bp, Homo sapien
gaccttgagcacctcggcgttggtg

SEQ ID NO: 2321030 - DNA, 25 bp, Homo sapien
aggatcttgccatcccccactcggt

SEQ ID NO: 2321031 - DNA, 25 bp, Homo sapien
gcctcggttcttggccactgcctgg

SEQ ID NO: 2321032 - DNA, 25 bp, Homo sapien
tcaaagtccacacgccgcgacttca

SEQ ID NO: 2321033 - DNA, 25 bp, Homo sapien
cttggcctcggttcttggccactgc

SEQ ID NO: 2321034 - DNA, 25 bp, Homo sapien
caggaaagtctcaaagtccacacgc

SEQ ID NO: 2321035 - DNA, 25 bp, Homo sapien
ttgccgttcccctccttgtcaaaca

SEQ ID NO: 2321036 - DNA, 25 bp, Homo sapien
aagggtggtgagaacatgtctgagc

SEQ ID NO: 2321037 - DNA, 25 bp, Homo sapien
gccgttcccctccttgtcaaacaca

SEQ ID NO: 2321038 - DNA, 25 bp, Homo sapien
tgtcaaacacacgaaacccctccaa

SEQ ID NO: 2321039 - DNA, 25 bp, Homo sapien
cctctccactctaaaggagttctgg

SEQ ID NO: 2321040 - DNA, 25 bp, Homo sapien
tctccactctaaaggagttctggtc

SEQ ID NO: 2321041 - DNA, 25 bp, Homo sapien
tccactctaaaggagttctggtccc

SEQ ID NO: 2321042 - DNA, 25 bp, Homo sapien
ccctctccactctaaaggagttctg

SEQ ID NO: 2321043 - DNA, 25 bp, Homo sapien
cagtgattcacatcggccttcgaag

SEQ ID NO: 2321044 - DNA, 25 bp, Homo sapien
actcacccaggccacgcttttcctt

SEQ ID NO: 2321045 - DNA, 25 bp, Homo sapien
agacacaacgtctgaggccctcctt

SEQ ID NO: 2321046 - DNA, 25 bp, Homo sapien
tgaatcccagacacaacgtctgagg

SEQ ID NO: 2321047 - DNA, 25 bp, Homo sapien
cgttgctgtcctcgtgtcctgccag

SEQ ID NO: 2321048 - DNA, 25 bp, Homo sapien
atgcagccgttgctgtcctcgtgtc

SEQ ID NO: 2321049 - DNA, 25 bp, Homo sapien
gcagccgttgctgtcctcgtgtcct

SEQ ID NO: 2321050 - DNA, 25 bp, Homo sapien
agccgttgctgtcctcgtgtcctgc

SEQ ID NO: 2321051 - DNA, 25 bp, Homo sapien
tcagaagcaggcctttggataatac

SEQ ID NO: 2321052 - DNA, 25 bp, Homo sapien
caggcctttggataatacatctgac

SEQ ID NO: 2321053 - DNA, 25 bp, Homo sapien
acatctgactctaggtaatccaggg

SEQ ID NO: 2321054 - DNA, 25 bp, Homo sapien
cacacgcggcaagacgccaggctgc

SEQ ID NO: 2321055 - DNA, 25 bp, Homo sapien
tcagacgcttaggatgtgtttcaag

SEQ ID NO: 2321056 - DNA, 25 bp, Homo sapien
ccaaagttgcgaagcgctggagccc

SEQ ID NO: 2321057 - DNA, 25 bp, Homo sapien
actccgctgcttttctatgttggct

SEQ ID NO: 2321058 - DNA, 25 bp, Homo sapien
gacttgcctcgtaaggcgcggcgaa

SEQ ID NO: 2321059 - DNA, 25 bp, Homo sapien
cggacagcagaatgaactccgctgc

SEQ ID NO: 2321060 - DNA, 25 bp, Homo sapien
gtggctggaacgtgctttcgcctgc

SEQ ID NO: 2321061 - DNA, 25 bp, Homo sapien
tttgaaacaataggtggcctcctgg

SEQ ID NO: 2321062 - DNA, 25 bp, Homo sapien
ttattttgaaacaataggtggcctc

SEQ ID NO: 2321063 - DNA, 25 bp, Homo sapien
tggctggaacgtgctttcgcctgcg

SEQ ID NO: 2321064 - DNA, 25 bp, Homo sapien
agtaatggctccgactctcggccca

SEQ ID NO: 2321065 - DNA, 25 bp, Homo sapien
ctagtcttagtacgtcccgatgacg

SEQ ID NO: 2321066 - DNA, 25 bp, Homo sapien
tctcggcccaaccctagtcttagta

SEQ ID NO: 2321067 - DNA, 25 bp, Homo sapien
ccgatgacgtcaccctcagaggact

SEQ ID NO: 2321068 - DNA, 25 bp, Homo sapien
tccccaatcctgcccgtctcccaag

SEQ ID NO: 2321069 - DNA, 25 bp, Homo sapien
ccccaatcctgcccgtctcccaaga

SEQ ID NO: 2321070 - DNA, 25 bp, Homo sapien
tcaggctgcagactcgcttccccgc

SEQ ID NO: 2321071 - DNA, 25 bp, Homo sapien
cacctccaacctttcgggtcctcag

SEQ ID NO: 2321072 - DNA, 25 bp, Homo sapien
gctgcagactcgcttccccgcaggg

SEQ ID NO: 2321073 - DNA, 25 bp, Homo sapien
ctttcgggtcctcagattccctttg

SEQ ID NO: 2321074 - DNA, 25 bp, Homo sapien
agaagagggaagtggtcagcatctg

SEQ ID NO: 2321075 - DNA, 25 bp, Homo sapien
atctgaacgccaatcccccgagttt

SEQ ID NO: 2321076 - DNA, 25 bp, Homo sapien
agtggtcagcatctgaacgccaatc

SEQ ID NO: 2321077 - DNA, 25 bp, Homo sapien
agagaagagggaagtggtcagcatc

SEQ ID NO: 2321078 - DNA, 25 bp, Homo sapien
ctgcggtctggtcttcggtgaagtc

SEQ ID NO: 2321079 - DNA, 25 bp, Homo sapien
tgcggtctggtcttcggtgaagtca

SEQ ID NO: 2321080 - DNA, 25 bp, Homo sapien
cggtctggtcttcggtgaagtcaca

SEQ ID NO: 2321081 - DNA, 25 bp, Homo sapien
gcggtctggtcttcggtgaagtcac

SEQ ID NO: 2321082 - DNA, 25 bp, Homo sapien
gattaagattagaggataggtgctg

SEQ ID NO: 2321083 - DNA, 25 bp, Homo sapien
tcatgggggtgctaaagagatgaca

SEQ ID NO: 2321084 - DNA, 25 bp, Homo sapien
ctctccctaagggtgacctcggtag

SEQ ID NO: 2321085 - DNA, 25 bp, Homo sapien
acctcggtagggatcagagataacc

SEQ ID NO: 2321086 - DNA, 25 bp, Homo sapien
ttcacaactgcaagctgggagggcg

SEQ ID NO: 2321087 - DNA, 25 bp, Homo sapien
cttccagagggtatagctacagtca

SEQ ID NO: 2321088 - DNA, 25 bp, Homo sapien
catgctgaggaaacgagatatctgc

SEQ ID NO: 2321089 - DNA, 25 bp, Homo sapien
gctactacacttctcagggcaggaa

SEQ ID NO: 2321090 - DNA, 25 bp, Homo sapien
cggtcaaacagctggaaggcctcct

SEQ ID NO: 2321091 - DNA, 25 bp, Homo sapien
tcaaacagctggaaggcctccttga

SEQ ID NO: 2321092 - DNA, 25 bp, Homo sapien
tgttcggtcaaacagctggaaggcc

SEQ ID NO: 2321093 - DNA, 25 bp, Homo sapien
ctgttcggtcaaacagctggaaggc

SEQ ID NO: 2321094 - DNA, 25 bp, Homo sapien
tccccacactggctgtacaggatct

SEQ ID NO: 2321095 - DNA, 25 bp, Homo sapien
ccacactggctgtacaggatcttgc

SEQ ID NO: 2321096 - DNA, 25 bp, Homo sapien
cccacactggctgtacaggatcttg

SEQ ID NO: 2321097 - DNA, 25 bp, Homo sapien
catccccacactggctgtacaggat

SEQ ID NO: 2321098 - DNA, 25 bp, Homo sapien
tgagcacctcggcgttggtagggtt

SEQ ID NO: 2321099 - DNA, 25 bp, Homo sapien
gaccttgagcacctcggcgttggta

SEQ ID NO: 2321100 - DNA, 25 bp, Homo sapien
ccttgagcacctcggcgttggtagg

SEQ ID NO: 2321101 - DNA, 25 bp, Homo sapien
agcacctcggcgttggtagggttct

SEQ ID NO: 2321102 - DNA, 25 bp, Homo sapien
gctgaagaactgtgggcccatgacc

SEQ ID NO: 2321103 - DNA, 25 bp, Homo sapien
tatagagacctcaactgaacagaga

SEQ ID NO: 2321104 - DNA, 25 bp, Homo sapien
gatgactccccactaaaagcaagga

SEQ ID NO: 2321105 - DNA, 25 bp, Homo sapien
ccatgaccacactgaggagttgttc

SEQ ID NO: 2321106 - DNA, 25 bp, Homo sapien
caaacacccgaagtccttcgacata

SEQ ID NO: 2321107 - DNA, 25 bp, Homo sapien
cacccgaagtccttcgacataatcc

SEQ ID NO: 2321108 - DNA, 25 bp, Homo sapien
aacacccgaagtccttcgacataat

SEQ ID NO: 2321109 - DNA, 25 bp, Homo sapien
gtcaaacacccgaagtccttcgaca

SEQ ID NO: 2321110 - DNA, 25 bp, Homo sapien
catttttggaattgggtgacaagtg

SEQ ID NO: 2321111 - DNA, 25 bp, Homo sapien
tgacaagtgaggtacctcagggtgc

SEQ ID NO: 2321112 - DNA, 25 bp, Homo sapien
aggtacctcagggtgccatctcagc

SEQ ID NO: 2321113 - DNA, 25 bp, Homo sapien
aaagcatttttggaattgggtgaca

SEQ ID NO: 2321114 - DNA, 25 bp, Homo sapien
gtcctcatgccctgccaccagcatc

SEQ ID NO: 2321115 - DNA, 25 bp, Homo sapien
atacaaccattgctgtcctcatgcc

SEQ ID NO: 2321116 - DNA, 25 bp, Homo sapien
catagttgatacaaccattgctgtc

SEQ ID NO: 2321117 - DNA, 25 bp, Homo sapien
cttcatagttgatacaaccattgct

SEQ ID NO: 2321118 - DNA, 25 bp, Homo sapien
tatacttgacctgccccatatggct

SEQ ID NO: 2321119 - DNA, 25 bp, Homo sapien
gggaaagccccagacactatacttg

SEQ ID NO: 2321120 - DNA, 25 bp, Homo sapien
tgcctcctggctctttttggagccc

SEQ ID NO: 2321121 - DNA, 25 bp, Homo sapien
cattcatggtgaagacaagacaaag

SEQ ID NO: 2321122 - DNA, 25 bp, Homo sapien
ccccgacaggatatgcctcacaaac

SEQ ID NO: 2321123 - DNA, 25 bp, Homo sapien
tcaccccgacaggatatgcctcaca

SEQ ID NO: 2321124 - DNA, 25 bp, Homo sapien
cccgacaggatatgcctcacaaacg

SEQ ID NO: 2321125 - DNA, 25 bp, Homo sapien
accccgacaggatatgcctcacaaa

SEQ ID NO: 2321126 - DNA, 25 bp, Homo sapien
cagggccgcataagtaaaacctcag

SEQ ID NO: 2321127 - DNA, 25 bp, Homo sapien
tcagggcccattctagaggtaagga

SEQ ID NO: 2321128 - DNA, 25 bp, Homo sapien
tgggttagggtacctccaagctgcc

SEQ ID NO: 2321129 - DNA, 25 bp, Homo sapien
tagcataagcgggaacatgcccaca

SEQ ID NO: 2321130 - DNA, 25 bp, Homo sapien
tcagccattcagcaccatgcggacg

SEQ ID NO: 2321131 - DNA, 25 bp, Homo sapien
agccattcagcaccatgcggacgag

SEQ ID NO: 2321132 - DNA, 25 bp, Homo sapien
cagccattcagcaccatgcggacga

SEQ ID NO: 2321133 - DNA, 25 bp, Homo sapien
ttcacacagggaaaggcacggactc

SEQ ID NO: 2321134 - DNA, 25 bp, Homo sapien
tagggaaactttaggctagatacaa

SEQ ID NO: 2321135 - DNA, 25 bp, Homo sapien
gatgggaaagttgctgagacaagaa

SEQ ID NO: 2321136 - DNA, 25 bp, Homo sapien
agttgctgagacaagaaagcctagg

SEQ ID NO: 2321137 - DNA, 25 bp, Homo sapien
acggcaaacatcatccaagagagac

SEQ ID NO: 2321138 - DNA, 25 bp, Homo sapien
gacggcaaacatcatccaagagaga

SEQ ID NO: 2321139 - DNA, 25 bp, Homo sapien
cggcaaacatcatccaagagagaca

SEQ ID NO: 2321140 - DNA, 25 bp, Homo sapien
ggcaaacatcatccaagagagacaa

SEQ ID NO: 2321141 - DNA, 25 bp, Homo sapien
tggctttcctaatctcccaagaggt

SEQ ID NO: 2321142 - DNA, 25 bp, Homo sapien
gaacggcagcacaactgtcgagact

SEQ ID NO: 2321143 - DNA, 25 bp, Homo sapien
tgacggacaggcttaggcagtgcta

SEQ ID NO: 2321144 - DNA, 25 bp, Homo sapien
gattgaccttggactctgcctcagg

SEQ ID NO: 2321145 - DNA, 25 bp, Homo sapien
tggagtccttcacagcggcgtttac

SEQ ID NO: 2321146 - DNA, 25 bp, Homo sapien
ggattgtgatgggagcagctttcct

SEQ ID NO: 2321147 - DNA, 25 bp, Homo sapien
tcctggagtccttcacagcggcgtt

SEQ ID NO: 2321148 - DNA, 25 bp, Homo sapien
tgatgggagcagctttcctggagtc

SEQ ID NO: 2321149 - DNA, 25 bp, Homo sapien
gttccatcttgtgggtgcattctgt

SEQ ID NO: 2321150 - DNA, 25 bp, Homo sapien
ccctttgttcctcatgtccccatgt

SEQ ID NO: 2321151 - DNA, 25 bp, Homo sapien
caggctctgcactggttcttcttgg

SEQ ID NO: 2321152 - DNA, 25 bp, Homo sapien
tccccatgtttctctccctctgcgt

SEQ ID NO: 2321153 - DNA, 25 bp, Homo sapien
ctgtgacgggaaggcaggtgtgact

SEQ ID NO: 2321154 - DNA, 25 bp, Homo sapien
gcattcctgctccacgtgtcccagc

SEQ ID NO: 2321155 - DNA, 25 bp, Homo sapien
cgcattcctgctccacgtgtcccag

SEQ ID NO: 2321156 - DNA, 25 bp, Homo sapien
gttggaccaacccttggctcgcagc

SEQ ID NO: 2321157 - DNA, 25 bp, Homo sapien
tattatgacttggtgggtcacccct

SEQ ID NO: 2321158 - DNA, 25 bp, Homo sapien
ggagctataagaggatgtgaagttt

SEQ ID NO: 2321159 - DNA, 25 bp, Homo sapien
tttttaaagcacttaagcacctcca

SEQ ID NO: 2321160 - DNA, 25 bp, Homo sapien
cccaccaagactatgagaacttcag

SEQ ID NO: 2321161 - DNA, 25 bp, Homo sapien
ttaaaaagccacattggagctccct

SEQ ID NO: 2321162 - DNA, 25 bp, Homo sapien
tagaacagggcgcagattccatctc

SEQ ID NO: 2321163 - DNA, 25 bp, Homo sapien
tagtgactaagtcaaggccccaact

SEQ ID NO: 2321164 - DNA, 25 bp, Homo sapien
tcgtactaataatccctcctgcggc

SEQ ID NO: 2321165 - DNA, 25 bp, Homo sapien
acatatgttttttaccgtggtatgc

SEQ ID NO: 2321166 - DNA, 25 bp, Homo sapien
attgtataaaatggctaggtgcagt

SEQ ID NO: 2321167 - DNA, 25 bp, Homo sapien
taaggacttccttttaacatctgag

SEQ ID NO: 2321168 - DNA, 25 bp, Homo sapien
tatgctgactagctatatgcatgaa

SEQ ID NO: 2321169 - DNA, 25 bp, Homo sapien
acaaaaaccccagctggacgcggtg

SEQ ID NO: 2321170 - DNA, 25 bp, Homo sapien
caaaaaccccagctggacgcggtgt

SEQ ID NO: 2321171 - DNA, 25 bp, Homo sapien
cgtcacgaacaggattcgaacctgt

SEQ ID NO: 2321172 - DNA, 25 bp, Homo sapien
cacgaacaggattcgaacctgtgcg

SEQ ID NO: 2321173 - DNA, 25 bp, Homo sapien
tcacgaacaggattcgaacctgtgc

SEQ ID NO: 2321174 - DNA, 25 bp, Homo sapien
cgaacaggattcgaacctgtgcggg

SEQ ID NO: 2321175 - DNA, 25 bp, Homo sapien
gctggagtgcatgacgtaattttgg

SEQ ID NO: 2321176 - DNA, 25 bp, Homo sapien
gagtgcatgacgtaattttggctca

SEQ ID NO: 2321177 - DNA, 25 bp, Homo sapien
gggtctggctctgtagctgaggctg

SEQ ID NO: 2321178 - DNA, 25 bp, Homo sapien
tgaggctggagtgcatgacgtaatt

SEQ ID NO: 2321179 - DNA, 25 bp, Homo sapien
tattccaggctagcttgctgcaggt

SEQ ID NO: 2321180 - DNA, 25 bp, Homo sapien
ccaagggagtcctcggctgaactta

SEQ ID NO: 2321181 - DNA, 25 bp, Homo sapien
ggtataccttgatccctagagtgac

SEQ ID NO: 2321182 - DNA, 25 bp, Homo sapien
gaaaacgctgctatacttactctgg

SEQ ID NO: 2321183 - DNA, 25 bp, Homo sapien
ttcctgtctagagtggaggcctggc

SEQ ID NO: 2321184 - DNA, 25 bp, Homo sapien
tagagttctccctcctaaatggcta

SEQ ID NO: 2321185 - DNA, 25 bp, Homo sapien
ggctgggaccatatagactctagac

SEQ ID NO: 2321186 - DNA, 25 bp, Homo sapien
taaatggctacatagtcctggctgg

SEQ ID NO: 2321187 - DNA, 25 bp, Homo sapien
catctttaatgcactacccagcttg

SEQ ID NO: 2321188 - DNA, 25 bp, Homo sapien
ctctgggaaaagtggcatttacacc

SEQ ID NO: 2321189 - DNA, 25 bp, Homo sapien
gtctctgggaaaagtggcatttaca

SEQ ID NO: 2321190 - DNA, 25 bp, Homo sapien
tttaatgcactacccagcttggtca

SEQ ID NO: 2321191 - DNA, 25 bp, Homo sapien
gatgctgccccgtggaacgcgggag

SEQ ID NO: 2321192 - DNA, 25 bp, Homo sapien
ctccggccaatcagcaccgcccggg

SEQ ID NO: 2321193 - DNA, 25 bp, Homo sapien
gagtgcggacattcccggaagtttc

SEQ ID NO: 2321194 - DNA, 25 bp, Homo sapien
caggactgtgcacgccgctgagcag

SEQ ID NO: 2321195 - DNA, 25 bp, Homo sapien
cggaaccctcatcccgacaagccgg

SEQ ID NO: 2321196 - DNA, 25 bp, Homo sapien
tggccagatcttccggaaccctcat

SEQ ID NO: 2321197 - DNA, 25 bp, Homo sapien
caagccgggactcggtccatcccct

SEQ ID NO: 2321198 - DNA, 25 bp, Homo sapien
tcatcccgacaagccgggactcggt

SEQ ID NO: 2321199 - DNA, 25 bp, Homo sapien
aggcctacctaccccattaggctgg

SEQ ID NO: 2321200 - DNA, 25 bp, Homo sapien
gatgaaggctcaatgcttggatcct

SEQ ID NO: 2321201 - DNA, 25 bp, Homo sapien
tcttttagtctcaagccgcgaagtg

SEQ ID NO: 2321202 - DNA, 25 bp, Homo sapien
cccctgccgggatgctcttttagtc

SEQ ID NO: 2321203 - DNA, 25 bp, Homo sapien
ggcttgatatccttcacaaaggtct

SEQ ID NO: 2321204 - DNA, 25 bp, Homo sapien
cccagacagagatattgatgctgcc

SEQ ID NO: 2321205 - DNA, 25 bp, Homo sapien
gattgccaacatcgtcccagacaga

SEQ ID NO: 2321206 - DNA, 25 bp, Homo sapien
ttgcaggtccgaacctcatgcccgt

SEQ ID NO: 2321207 - DNA, 25 bp, Homo sapien
tttggtgagccggataatgtcccca

SEQ ID NO: 2321208 - DNA, 25 bp, Homo sapien
ccccacggccagtatatagtgtcag

SEQ ID NO: 2321209 - DNA, 25 bp, Homo sapien
cacccccacggccagtatatagtgt

SEQ ID NO: 2321210 - DNA, 25 bp, Homo sapien
cacggccagtatatagtgtcagaca

SEQ ID NO: 2321211 - DNA, 25 bp, Homo sapien
acggccagtatatagtgtcagacaa

SEQ ID NO: 2321212 - DNA, 25 bp, Homo sapien
gggtgctgtactctgggtttggctc

SEQ ID NO: 2321213 - DNA, 25 bp, Homo sapien
ctgtactctgggtttggctcactga

SEQ ID NO: 2321214 - DNA, 25 bp, Homo sapien
gtgctgtactctgggtttggctcac

SEQ ID NO: 2321215 - DNA, 25 bp, Homo sapien
ctgggtgctgtactctgggtttggc

SEQ ID NO: 2321216 - DNA, 25 bp, Homo sapien
gcacagattacatattcagatcctg

SEQ ID NO: 2321217 - DNA, 25 bp, Homo sapien
cacagattacatattcagatcctgc

SEQ ID NO: 2321218 - DNA, 25 bp, Homo sapien
cagattacatattcagatcctgctc

SEQ ID NO: 2321219 - DNA, 25 bp, Homo sapien
gattacatattcagatcctgctccc

SEQ ID NO: 2321220 - DNA, 25 bp, Homo sapien
gaagctgaagggttgctgtcgttct

SEQ ID NO: 2321221 - DNA, 25 bp, Homo sapien
cagcagagggtccagtggtaggctg

SEQ ID NO: 2321222 - DNA, 25 bp, Homo sapien
cagagggtccagtggtaggctggga

SEQ ID NO: 2321223 - DNA, 25 bp, Homo sapien
ctgaagggttgctgtcgttctgcac

SEQ ID NO: 2321224 - DNA, 25 bp, Homo sapien
gtgtggttgggctggcttcgagtga

SEQ ID NO: 2321225 - DNA, 25 bp, Homo sapien
tggttgggctggcttcgagtgattc

SEQ ID NO: 2321226 - DNA, 25 bp, Homo sapien
tgggctggcttcgagtgattcgggt

SEQ ID NO: 2321227 - DNA, 25 bp, Homo sapien
gttgggctggcttcgagtgattcgg

SEQ ID NO: 2321228 - DNA, 25 bp, Homo sapien
tactgctacaccagccaatcagtgg

SEQ ID NO: 2321229 - DNA, 25 bp, Homo sapien
tagggtggataaggacactgctcac

SEQ ID NO: 2321230 - DNA, 25 bp, Homo sapien
gacaggtagttcagctggacaatga

SEQ ID NO: 2321231 - DNA, 25 bp, Homo sapien
gagacttcagttagactcccatgtc

SEQ ID NO: 2321232 - DNA, 25 bp, Homo sapien
gagtggtaacatttattaggaagga

SEQ ID NO: 2321233 - DNA, 25 bp, Homo sapien
agagtggtaacatttattaggaagg

SEQ ID NO: 2321234 - DNA, 25 bp, Homo sapien
tagcaggagacaaggacacccagag

SEQ ID NO: 2321235 - DNA, 25 bp, Homo sapien
aggagacaaggacacccagaggaag

SEQ ID NO: 2321236 - DNA, 25 bp, Homo sapien
ctgatagcaggagacaaggacaccc

SEQ ID NO: 2321237 - DNA, 25 bp, Homo sapien
caggagacaaggacacccagaggaa

SEQ ID NO: 2321238 - DNA, 25 bp, Homo sapien
tccagggggttgaggttggcattac

SEQ ID NO: 2321239 - DNA, 25 bp, Homo sapien
caggcaagcaaagtctgatcggggt

SEQ ID NO: 2321240 - DNA, 25 bp, Homo sapien
caaagtctgatcggggtgactggtc

SEQ ID NO: 2321241 - DNA, 25 bp, Homo sapien
gtccagggggttgaggttggcatta

SEQ ID NO: 2321242 - DNA, 25 bp, Homo sapien
gctctagggatcgatgaccaagaaa

SEQ ID NO: 2321243 - DNA, 25 bp, Homo sapien
ctagggatcgatgaccaagaaaggg

SEQ ID NO: 2321244 - DNA, 25 bp, Homo sapien
agccagagctctagggatcgatgac

SEQ ID NO: 2321245 - DNA, 25 bp, Homo sapien
cagagctctagggatcgatgaccaa

SEQ ID NO: 2321246 - DNA, 25 bp, Homo sapien
ccaggtggatcggaggccacgtcac

SEQ ID NO: 2321247 - DNA, 25 bp, Homo sapien
gctgtagacgttaagcagttcctga

SEQ ID NO: 2321248 - DNA, 25 bp, Homo sapien
tcaggtcccctattaggccttgctg

SEQ ID NO: 2321249 - DNA, 25 bp, Homo sapien
ttaggccttgctgtagacgttaagc

SEQ ID NO: 2321250 - DNA, 25 bp, Homo sapien
ctactggcaacataagagctgtcac

SEQ ID NO: 2321251 - DNA, 25 bp, Homo sapien
cacccctactggcaacataagagct

SEQ ID NO: 2321252 - DNA, 25 bp, Homo sapien
agggcctcacccctactggcaacat

SEQ ID NO: 2321253 - DNA, 25 bp, Homo sapien
gggcctcacccctactggcaacata

SEQ ID NO: 2321254 - DNA, 25 bp, Homo sapien
tcctggagcacctccctgagtcaga

SEQ ID NO: 2321255 - DNA, 25 bp, Homo sapien
gagctctcctcatacttcatccaga

SEQ ID NO: 2321256 - DNA, 25 bp, Homo sapien
ttcacactgcctcctgcgggagcag

SEQ ID NO: 2321257 - DNA, 25 bp, Homo sapien
agcctcttgtttgctggttcctgga

SEQ ID NO: 2321258 - DNA, 25 bp, Homo sapien
cattggtgaggggaatagcttaggg

SEQ ID NO: 2321259 - DNA, 25 bp, Homo sapien
ggttctggctcctattctccccgaa

SEQ ID NO: 2321260 - DNA, 25 bp, Homo sapien
ctcaggttctggctcctattctccc

SEQ ID NO: 2321261 - DNA, 25 bp, Homo sapien
tattctccccgaaacatcctgagga

SEQ ID NO: 2321262 - DNA, 25 bp, Homo sapien
cctacccagcccaagacgacccaca

SEQ ID NO: 2321263 - DNA, 25 bp, Homo sapien
aagacgacccacacacagaagccgg

SEQ ID NO: 2321264 - DNA, 25 bp, Homo sapien
aagccggccagcagatgactcactg

SEQ ID NO: 2321265 - DNA, 25 bp, Homo sapien
cacacacagaagccggccagcagat

SEQ ID NO: 2321266 - DNA, 25 bp, Homo sapien
tgcagtcagcgtcccattctcgccg

SEQ ID NO: 2321267 - DNA, 25 bp, Homo sapien
gcagcccgtccagtcagaggcccat

SEQ ID NO: 2321268 - DNA, 25 bp, Homo sapien
aggcgaagcccctgaactcggccta

SEQ ID NO: 2321269 - DNA, 25 bp, Homo sapien
ggctgtggagaagccgcgccaagcc

SEQ ID NO: 2321270 - DNA, 25 bp, Homo sapien
aatgagtggtccagcaacagaagcc

SEQ ID NO: 2321271 - DNA, 25 bp, Homo sapien
caggtggtcagccaatgagtggtcc

SEQ ID NO: 2321272 - DNA, 25 bp, Homo sapien
tggtccagcaacagaagcctgtgaa

SEQ ID NO: 2321273 - DNA, 25 bp, Homo sapien
tcagccaatgagtggtccagcaaca

SEQ ID NO: 2321274 - DNA, 25 bp, Homo sapien
gggaaaagaccctgaaatgccatct

SEQ ID NO: 2321275 - DNA, 25 bp, Homo sapien
gatcccagagggaacatagttcact

SEQ ID NO: 2321276 - DNA, 25 bp, Homo sapien
tcgatgttcatccagcctcagcttg

SEQ ID NO: 2321277 - DNA, 25 bp, Homo sapien
cctgcaatgggcactcactggacct

SEQ ID NO: 2321278 - DNA, 25 bp, Homo sapien
tgcagacgcggctgtcgatctgata

SEQ ID NO: 2321279 - DNA, 25 bp, Homo sapien
tcgatctgataaagcagggctgggc

SEQ ID NO: 2321280 - DNA, 25 bp, Homo sapien
gcacagcagagcaaactgacgaggg

SEQ ID NO: 2321281 - DNA, 25 bp, Homo sapien
caagccaaaattgaccagcagctgg

SEQ ID NO: 2321282 - DNA, 25 bp, Homo sapien
gcccagcaagggccgtagtagacga

SEQ ID NO: 2321283 - DNA, 25 bp, Homo sapien
ccgtagtagacgaggtcccaggagc

SEQ ID NO: 2321284 - DNA, 25 bp, Homo sapien
gaagggaggctgagcaacaggactg

SEQ ID NO: 2321285 - DNA, 25 bp, Homo sapien
gcaagggccgtagtagacgaggtcc

SEQ ID NO: 2321286 - DNA, 25 bp, Homo sapien
gtagcagatgtagcagtgcatcccc

SEQ ID NO: 2321287 - DNA, 25 bp, Homo sapien
tagcagatgtagcagtgcatcccca

SEQ ID NO: 2321288 - DNA, 25 bp, Homo sapien
atgcggtagcagatgtagcagtgca

SEQ ID NO: 2321289 - DNA, 25 bp, Homo sapien
ctggtagtccgccaggtcctgcgtg

SEQ ID NO: 2321290 - DNA, 25 bp, Homo sapien
ttctctggtagtccgccaggtcctg

SEQ ID NO: 2321291 - DNA, 25 bp, Homo sapien
gtccttctctggtagtccgccaggt

SEQ ID NO: 2321292 - DNA, 25 bp, Homo sapien
gtagtccgccaggtcctgcgtgccg

SEQ ID NO: 2321293 - DNA, 25 bp, Homo sapien
gcctgagccctcggtgccgcaaaag

SEQ ID NO: 2321294 - DNA, 25 bp, Homo sapien
ctgagccctcggtgccgcaaaagcc

SEQ ID NO: 2321295 - DNA, 25 bp, Homo sapien
tggcctgagccctcggtgccgcaaa

SEQ ID NO: 2321296 - DNA, 25 bp, Homo sapien
tgagccctcggtgccgcaaaagccc

SEQ ID NO: 2321297 - DNA, 25 bp, Homo sapien
gtggaggaggcagcagagccaggga

SEQ ID NO: 2321298 - DNA, 25 bp, Homo sapien
ggtggaggaggcagcagagccaggg

SEQ ID NO: 2321299 - DNA, 25 bp, Homo sapien
ctgaaataggagggcatccctcctg

SEQ ID NO: 2321300 - DNA, 25 bp, Homo sapien
ggcatccctcctggtggaggaggca

SEQ ID NO: 2321301 - DNA, 25 bp, Homo sapien
ccaagttgcgtgtttcgagattcct

SEQ ID NO: 2321302 - DNA, 25 bp, Homo sapien
cgagattccttcgttttcgcctgca

SEQ ID NO: 2321303 - DNA, 25 bp, Homo sapien
cactgccattctccggatccaagtt

SEQ ID NO: 2321304 - DNA, 25 bp, Homo sapien
cattctccggatccaagttgcgtgt

SEQ ID NO: 2321305 - DNA, 25 bp, Homo sapien
tcttcaaattttctcctctagtcac

SEQ ID NO: 2321306 - DNA, 25 bp, Homo sapien
gccagcccatcagtgaggttgtgta

SEQ ID NO: 2321307 - DNA, 25 bp, Homo sapien
cgtgatatcagtgccaccctggtgc

SEQ ID NO: 2321308 - DNA, 25 bp, Homo sapien
tcccaggaggaccatccacgtgata

SEQ ID NO: 2321309 - DNA, 25 bp, Homo sapien
ttgtgtagaccatctcccaggagga

SEQ ID NO: 2321310 - DNA, 25 bp, Homo sapien
cagaagaccgctaaggtggtactga

SEQ ID NO: 2321311 - DNA, 25 bp, Homo sapien
catggcagaagaccgctaaggtggt

SEQ ID NO: 2321312 - DNA, 25 bp, Homo sapien
cagctcatggcagaagaccgctaag

SEQ ID NO: 2321313 - DNA, 25 bp, Homo sapien
ccgctaaggtggtactgaggccgct

SEQ ID NO: 2321314 - DNA, 25 bp, Homo sapien
cagggctccagacacgaggctcagc

SEQ ID NO: 2321315 - DNA, 25 bp, Homo sapien
gaggcggagggactgctacctccct

SEQ ID NO: 2321316 - DNA, 25 bp, Homo sapien
ggtctgacgcccttccaggagctaa

SEQ ID NO: 2321317 - DNA, 25 bp, Homo sapien
ttctcagacttttgcgggcctatgg

SEQ ID NO: 2321318 - DNA, 25 bp, Homo sapien
tctcaactccagaggaatggtgtca

SEQ ID NO: 2321319 - DNA, 25 bp, Homo sapien
ccagcagggttatggcaagcatgag

SEQ ID NO: 2321320 - DNA, 25 bp, Homo sapien
gctcctccagcagggttatggcaag

SEQ ID NO: 2321321 - DNA, 25 bp, Homo sapien
cctccagcagggttatggcaagcat

SEQ ID NO: 2321322 - DNA, 25 bp, Homo sapien
tcctccagcagggttatggcaagca

SEQ ID NO: 2321323 - DNA, 25 bp, Homo sapien
tcctactggccctgtgtcccgcctc

SEQ ID NO: 2321324 - DNA, 25 bp, Homo sapien
tgtttattaaaatcctattgctcct

SEQ ID NO: 2321325 - DNA, 25 bp, Homo sapien
tattaaaatcctattgctcctactg

SEQ ID NO: 2321326 - DNA, 25 bp, Homo sapien
ttaaaatcctattgctcctactggc

SEQ ID NO: 2321327 - DNA, 25 bp, Homo sapien
ggtacccgctgtgggcatctatgtg

SEQ ID NO: 2321328 - DNA, 25 bp, Homo sapien
cctgtgacccatgtactcggttgta

SEQ ID NO: 2321329 - DNA, 25 bp, Homo sapien
gagggtgcctactctcgctgctgtg

SEQ ID NO: 2321330 - DNA, 25 bp, Homo sapien
caaagcaatatagttcccctgcggg

SEQ ID NO: 2321331 - DNA, 25 bp, Homo sapien
ccgagcaccttcttactccctggac

SEQ ID NO: 2321332 - DNA, 25 bp, Homo sapien
acccgagcaccttcttactccctgg

SEQ ID NO: 2321333 - DNA, 25 bp, Homo sapien
cactgtctgcccacccgagcacctt

SEQ ID NO: 2321334 - DNA, 25 bp, Homo sapien
tgcccacccgagcaccttcttactc

SEQ ID NO: 2321335 - DNA, 25 bp, Homo sapien
ttagttgtataccctgaatgtcttg

SEQ ID NO: 2321336 - DNA, 25 bp, Homo sapien
tagttgtataccctgaatgtcttgc

SEQ ID NO: 2321337 - DNA, 25 bp, Homo sapien
accaccagatcacctgaagagactc

SEQ ID NO: 2321338 - DNA, 25 bp, Homo sapien
ccaccagatcacctgaagagactct

SEQ ID NO: 2321339 - DNA, 25 bp, Homo sapien
tcctcactccaaaggcggagcggca

SEQ ID NO: 2321340 - DNA, 25 bp, Homo sapien
ttgctcccgtccaggctgccgggta

SEQ ID NO: 2321341 - DNA, 25 bp, Homo sapien
tctaagttctgacgcgggctgcgcc

SEQ ID NO: 2321342 - DNA, 25 bp, Homo sapien
ggctagaactgaagccgggaccgct

SEQ ID NO: 2321343 - DNA, 25 bp, Homo sapien
ggccggttgcgcgcccgggctgagc

SEQ ID NO: 2321344 - DNA, 25 bp, Homo sapien
gggccggttgcgcgcccgggctgag

SEQ ID NO: 2321345 - DNA, 25 bp, Homo sapien
tgccgcgcgcgtcccagctgggacc

SEQ ID NO: 2321346 - DNA, 25 bp, Homo sapien
tcggctgccgcgcgcgtcccagctg

SEQ ID NO: 2321347 - DNA, 25 bp, Homo sapien
ttgcaaaagcattatccaaagctct

SEQ ID NO: 2321348 - DNA, 25 bp, Homo sapien
caaagctctacgttagctcccaggg

SEQ ID NO: 2321349 - DNA, 25 bp, Homo sapien
gaacttcccttctcgtacaacttgc

SEQ ID NO: 2321350 - DNA, 25 bp, Homo sapien
tcccagggcatgattgctgccagtc

SEQ ID NO: 2321351 - DNA, 25 bp, Homo sapien
gaaagaggagccaaccgtatagttc

SEQ ID NO: 2321352 - DNA, 25 bp, Homo sapien
cctctatcatttgtaggtgaaggag

SEQ ID NO: 2321353 - DNA, 25 bp, Homo sapien
ttcgtaatcctctatcatttgtagg

SEQ ID NO: 2321354 - DNA, 25 bp, Homo sapien
ccgtatagttcttcgtaatcctcta

SEQ ID NO: 2321355 - DNA, 25 bp, Homo sapien
cccatgattctacgctccgagtaag

SEQ ID NO: 2321356 - DNA, 25 bp, Homo sapien
gtaagcctttcgcttgttggtgaag

SEQ ID NO: 2321357 - DNA, 25 bp, Homo sapien
aatcccatgaaggaacggctcgaag

SEQ ID NO: 2321358 - DNA, 25 bp, Homo sapien
agcctcagccgccaagatctgggca

SEQ ID NO: 2321359 - DNA, 25 bp, Homo sapien
tacagatcccaaataagcctggatg

SEQ ID NO: 2321360 - DNA, 25 bp, Homo sapien
taagtcaagctgctagcatgtagca

SEQ ID NO: 2321361 - DNA, 25 bp, Homo sapien
ggatcagatcccagctcttaacaat

SEQ ID NO: 2321362 - DNA, 25 bp, Homo sapien
tactggtgatcacacaaggatcaga

SEQ ID NO: 2321363 - DNA, 25 bp, Homo sapien
acgttggacaccacctcatacatct

SEQ ID NO: 2321364 - DNA, 25 bp, Homo sapien
ggacgttggacaccacctcatacat

SEQ ID NO: 2321365 - DNA, 25 bp, Homo sapien
ctcatacatctcctgcattgagtac

SEQ ID NO: 2321366 - DNA, 25 bp, Homo sapien
ttggacaccacctcatacatctcct

SEQ ID NO: 2321367 - DNA, 25 bp, Homo sapien
cttgaccatgtgaggtttgaccatg

SEQ ID NO: 2321368 - DNA, 25 bp, Homo sapien
gaaactgcagaggtgtaacgttcca

SEQ ID NO: 2321369 - DNA, 25 bp, Homo sapien
caaatgacccttacggctggatacc

SEQ ID NO: 2321370 - DNA, 25 bp, Homo sapien
gtggaaagccaacctccagctgggc

SEQ ID NO: 2321371 - DNA, 25 bp, Homo sapien
caaggaaggccaaaatagcactttc

SEQ ID NO: 2321372 - DNA, 25 bp, Homo sapien
ctagaatagggtaatcaggtagtta

SEQ ID NO: 2321373 - DNA, 25 bp, Homo sapien
tgagggaaatacttgacacatggac

SEQ ID NO: 2321374 - DNA, 25 bp, Homo sapien
cacatggacataaagtacttacaag

SEQ ID NO: 2321375 - DNA, 25 bp, Homo sapien
ggaataccagggctgaatcgccaaa

SEQ ID NO: 2321376 - DNA, 25 bp, Homo sapien
ccacagtgcaggttcgaggataggc

SEQ ID NO: 2321377 - DNA, 25 bp, Homo sapien
ttcgaggataggcaggaataccagg

SEQ ID NO: 2321378 - DNA, 25 bp, Homo sapien
gaatcgccaaatagtctctaagtgg

SEQ ID NO: 2321379 - DNA, 25 bp, Homo sapien
tggtggctgcccgacgctcaaaggc

SEQ ID NO: 2321380 - DNA, 25 bp, Homo sapien
tctgtttgacaacctcatcaaaaaa

SEQ ID NO: 2321381 - DNA, 25 bp, Homo sapien
ggagtgcagcagagaacgaaattca

SEQ ID NO: 2321382 - DNA, 25 bp, Homo sapien
tcaagtctggtgcacctcatggaac

SEQ ID NO: 2321383 - DNA, 25 bp, Homo sapien
tggaacaggagccaaaccaaataaa

SEQ ID NO: 2321384 - DNA, 25 bp, Homo sapien
gaacacagactcctttcaaattgga

SEQ ID NO: 2321385 - DNA, 25 bp, Homo sapien
tttcaaattggaacaggagccaaac

SEQ ID NO: 2321386 - DNA, 25 bp, Homo sapien
gagaggagaaacagtattatgaaca

SEQ ID NO: 2321387 - DNA, 25 bp, Homo sapien
cactaaggtgtcttgataaggtcca

SEQ ID NO: 2321388 - DNA, 25 bp, Homo sapien
cactggtggtaagaaagccccttgc

SEQ ID NO: 2321389 - DNA, 25 bp, Homo sapien
tatggtgctcctacgatgggcctga

SEQ ID NO: 2321390 - DNA, 25 bp, Homo sapien
tctaattcgtagtgaaaaggctgca

SEQ ID NO: 2321391 - DNA, 25 bp, Homo sapien
tacacctgttgcacctcaggcagag

SEQ ID NO: 2321392 - DNA, 25 bp, Homo sapien
tagagacctctcaacagatctgtgg

SEQ ID NO: 2321393 - DNA, 25 bp, Homo sapien
tagaactccggaatgaccagcatga

SEQ ID NO: 2321394 - DNA, 25 bp, Homo sapien
tttccatgggtcaaagccggttgca

SEQ ID NO: 2321395 - DNA, 25 bp, Homo sapien
tggcatgagcccataactaggctag

SEQ ID NO: 2321396 - DNA, 25 bp, Homo sapien
cccacagtgaccatgagggtggcaa

SEQ ID NO: 2321397 - DNA, 25 bp, Homo sapien
ctctccatggactggcaaatcaggt

SEQ ID NO: 2321398 - DNA, 25 bp, Homo sapien
taactgactggctataggctggcat

SEQ ID NO: 2321399 - DNA, 25 bp, Homo sapien
cagaggatttggcaaccacctggcc

SEQ ID NO: 2321400 - DNA, 25 bp, Homo sapien
gaacttttgtctgcccaaaccgaga

SEQ ID NO: 2321401 - DNA, 25 bp, Homo sapien
agtgcttcctccacggtaaggtttg

SEQ ID NO: 2321402 - DNA, 25 bp, Homo sapien
gaataagaatcattgcggccagcct

SEQ ID NO: 2321403 - DNA, 25 bp, Homo sapien
tacaggtggcatgcatccagaagcc

SEQ ID NO: 2321404 - DNA, 25 bp, Homo sapien
tgacctattgagtgagatgactgcc

SEQ ID NO: 2321405 - DNA, 25 bp, Homo sapien
gctgttccagtaaggtgactctaca

SEQ ID NO: 2321406 - DNA, 25 bp, Homo sapien
cgtgattgtgataacgccacctcca

SEQ ID NO: 2321407 - DNA, 25 bp, Homo sapien
gcttacccaggttatgccgttgatc

SEQ ID NO: 2321408 - DNA, 25 bp, Homo sapien
tgccttttgggacatagaaatactg

SEQ ID NO: 2321409 - DNA, 25 bp, Homo sapien
tggcccttttagacagaaactgctg

SEQ ID NO: 2321410 - DNA, 25 bp, Homo sapien
caagctggagtcttgtggtgtgacc

SEQ ID NO: 2321411 - DNA, 25 bp, Homo sapien
ttcagaggtcgagtcctggagcgtc

SEQ ID NO: 2321412 - DNA, 25 bp, Homo sapien
tattacggaattggctccaaggacc

SEQ ID NO: 2321413 - DNA, 25 bp, Homo sapien
cttaaagggccctgcgcttggctgg

SEQ ID NO: 2321414 - DNA, 25 bp, Homo sapien
gacattcctcaagaaagcgcgccaa

SEQ ID NO: 2321415 - DNA, 25 bp, Homo sapien
ctataatatcgtggcctctgctgac

SEQ ID NO: 2321416 - DNA, 25 bp, Homo sapien
tagtaagggcgcagttaagacttgg

SEQ ID NO: 2321417 - DNA, 25 bp, Homo sapien
gggtctgttagtatctataatatcg

SEQ ID NO: 2321418 - DNA, 25 bp, Homo sapien
aagcactggatattcaggctcctgc

SEQ ID NO: 2321419 - DNA, 25 bp, Homo sapien
gagctatgaaccactggagcagccc

SEQ ID NO: 2321420 - DNA, 25 bp, Homo sapien
tatcgcatgatgagctatgaaccac

SEQ ID NO: 2321421 - DNA, 25 bp, Homo sapien
tgtgaccatgccctgcacatatcgc

SEQ ID NO: 2321422 - DNA, 25 bp, Homo sapien
acactggcttgatggatcaccccca

SEQ ID NO: 2321423 - DNA, 25 bp, Homo sapien
tacgaggatgaactcattgaattct

SEQ ID NO: 2321424 - DNA, 25 bp, Homo sapien
tcccgagaggctgacaatgttaaag

SEQ ID NO: 2321425 - DNA, 25 bp, Homo sapien
cattgtggaggaatacgaggatgaa

SEQ ID NO: 2321426 - DNA, 25 bp, Homo sapien
cattgaattcttttcccgagaggct

SEQ ID NO: 2321427 - DNA, 25 bp, Homo sapien
aagagagtgacccaaggctgaggac

SEQ ID NO: 2321428 - DNA, 25 bp, Homo sapien
gaactggacctacaaggcatccgaa

SEQ ID NO: 2321429 - DNA, 25 bp, Homo sapien
gactcagatattagcggcaccctca

SEQ ID NO: 2321430 - DNA, 25 bp, Homo sapien
gacatttctaggtgccttatgcccg

SEQ ID NO: 2321431 - DNA, 25 bp, Homo sapien
gctgggtgtggtggtgtgcatctgt

SEQ ID NO: 2321432 - DNA, 25 bp, Homo sapien
gggtgtggtggtgtgcatctgtgtg

SEQ ID NO: 2321433 - DNA, 25 bp, Homo sapien
ctgggtgtggtggtgtgcatctgtg

SEQ ID NO: 2321434 - DNA, 25 bp, Homo sapien
gtgtggtggtgtgcatctgtgtgag

SEQ ID NO: 2321435 - DNA, 25 bp, Homo sapien
taaaatcatatagttgaaactactg

SEQ ID NO: 2321436 - DNA, 25 bp, Homo sapien
agaattgtacaatgaggtaaaataa

SEQ ID NO: 2321437 - DNA, 25 bp, Homo sapien
gttgaaactactgccaagtacagtg

SEQ ID NO: 2321438 - DNA, 25 bp, Homo sapien
tgaaactactgccaagtacagtggc

SEQ ID NO: 2321439 - DNA, 25 bp, Homo sapien
caaacagggagtcctgatcagcacc

SEQ ID NO: 2321440 - DNA, 25 bp, Homo sapien
tattccccatgcacttgcttcctgg

SEQ ID NO: 2321441 - DNA, 25 bp, Homo sapien
tgcaaacatccgttcaaaatctgag

SEQ ID NO: 2321442 - DNA, 25 bp, Homo sapien
gtagcactgtggtatacatgcaaac

SEQ ID NO: 2321443 - DNA, 25 bp, Homo sapien
tggatcctggacaaagcttggctgc

SEQ ID NO: 2321444 - DNA, 25 bp, Homo sapien
gatctgttcgccacgcaagtctggg

SEQ ID NO: 2321445 - DNA, 25 bp, Homo sapien
tagttgctcacaaagatgggtccgg

SEQ ID NO: 2321446 - DNA, 25 bp, Homo sapien
gatggcgactgtaaccctagctgag

SEQ ID NO: 2321447 - DNA, 25 bp, Homo sapien
aatggtcctcctgcatagagctgcc

SEQ ID NO: 2321448 - DNA, 25 bp, Homo sapien
catcacttagtctgtagccatccaa

SEQ ID NO: 2321449 - DNA, 25 bp, Homo sapien
tcttgatagttgtacccatcactta

SEQ ID NO: 2321450 - DNA, 25 bp, Homo sapien
ggtcctcctgcatagagctgccaaa

SEQ ID NO: 2321451 - DNA, 25 bp, Homo sapien
tagacgtaattttgttcaagaagac

SEQ ID NO: 2321452 - DNA, 25 bp, Homo sapien
tgttcaagaagactaaaaacagagt

SEQ ID NO: 2321453 - DNA, 25 bp, Homo sapien
tttgttcaagaagactaaaaacaga

SEQ ID NO: 2321454 - DNA, 25 bp, Homo sapien
tcaagaagactaaaaacagagttac

SEQ ID NO: 2321455 - DNA, 25 bp, Homo sapien
ttgtgtacaacgtctcctatgttct

SEQ ID NO: 2321456 - DNA, 25 bp, Homo sapien
tgtgtacaacgtctcctatgttctt

SEQ ID NO: 2321457 - DNA, 25 bp, Homo sapien
tacaacgtctcctatgttcttccca

SEQ ID NO: 2321458 - DNA, 25 bp, Homo sapien
tgtacaacgtctcctatgttcttcc

SEQ ID NO: 2321459 - DNA, 25 bp, Homo sapien
agttctgggtagtcgaaggtgcact

SEQ ID NO: 2321460 - DNA, 25 bp, Homo sapien
aatccactgacaccgatttcatcac

SEQ ID NO: 2321461 - DNA, 25 bp, Homo sapien
gaaggtgcactgtcaatgactctgg

SEQ ID NO: 2321462 - DNA, 25 bp, Homo sapien
ggtaaaatccactgacaccgatttc

SEQ ID NO: 2321463 - DNA, 25 bp, Homo sapien
gaagtttgattcctacctgatgccc

SEQ ID NO: 2321464 - DNA, 25 bp, Homo sapien
taaggcccgccctttataccagcag

SEQ ID NO: 2321465 - DNA, 25 bp, Homo sapien
tttcaggactagtgcaaataaggcc

SEQ ID NO: 2321466 - DNA, 25 bp, Homo sapien
gacattccagcacctagtcccatgg

SEQ ID NO: 2321467 - DNA, 25 bp, Homo sapien
aaagctgctggcactgagtccaggc

SEQ ID NO: 2321468 - DNA, 25 bp, Homo sapien
cttgtcctctcttactccctaatgg

SEQ ID NO: 2321469 - DNA, 25 bp, Homo sapien
taatggccttcaaccctccagcttc

SEQ ID NO: 2321470 - DNA, 25 bp, Homo sapien
ctcaaggtcacggtcttctgccaca

SEQ ID NO: 2321471 - DNA, 25 bp, Homo sapien
aaagaatgaagaagtaagatagtac

SEQ ID NO: 2321472 - DNA, 25 bp, Homo sapien
cctgagtccttgggggtcacagcca

SEQ ID NO: 2321473 - DNA, 25 bp, Homo sapien
gccatctccacactggatatgggga

SEQ ID NO: 2321474 - DNA, 25 bp, Homo sapien
tggatatggggaacatcatttgtag

SEQ ID NO: 2321475 - DNA, 25 bp, Homo sapien
agccatctccacactggatatgggg

SEQ ID NO: 2321476 - DNA, 25 bp, Homo sapien
ggctcccctgtgaaaatatccgatc

SEQ ID NO: 2321477 - DNA, 25 bp, Homo sapien
aatatccgatcctagcagcttctca

SEQ ID NO: 2321478 - DNA, 25 bp, Homo sapien
cctgtgaaaatatccgatcctagca

SEQ ID NO: 2321479 - DNA, 25 bp, Homo sapien
gaaaatatccgatcctagcagcttc

SEQ ID NO: 2321480 - DNA, 25 bp, Homo sapien
gttggctgaggcccagtagggaggc

SEQ ID NO: 2321481 - DNA, 25 bp, Homo sapien
ggagttggctgaggcccagtaggga

SEQ ID NO: 2321482 - DNA, 25 bp, Homo sapien
gagttggctgaggcccagtagggag

SEQ ID NO: 2321483 - DNA, 25 bp, Homo sapien
caggagttggctgaggcccagtagg

SEQ ID NO: 2321484 - DNA, 25 bp, Homo sapien
ctgcgaaggattttgaagcggagaa

SEQ ID NO: 2321485 - DNA, 25 bp, Homo sapien
ctgaggcttggaatctgctgagtct

SEQ ID NO: 2321486 - DNA, 25 bp, Homo sapien
gcggagaaggagacgctgccatggc

SEQ ID NO: 2321487 - DNA, 25 bp, Homo sapien
gctgagtctcccagtggtgaccctc

SEQ ID NO: 2321488 - DNA, 25 bp, Homo sapien
ttagggactcagggttgctgctcca

SEQ ID NO: 2321489 - DNA, 25 bp, Homo sapien
gggttgctgctccatgggcaaagac

SEQ ID NO: 2321490 - DNA, 25 bp, Homo sapien
gactcagggttgctgctccatgggc

SEQ ID NO: 2321491 - DNA, 25 bp, Homo sapien
agggactcagggttgctgctccatg

SEQ ID NO: 2321492 - DNA, 25 bp, Homo sapien
aggtcagcatcacatgtcagtcagt

SEQ ID NO: 2321493 - DNA, 25 bp, Homo sapien
taattaacctgttggctcacaggtg

SEQ ID NO: 2321494 - DNA, 25 bp, Homo sapien
tggagatctgagtgccatccttgag

SEQ ID NO: 2321495 - DNA, 25 bp, Homo sapien
taattttcaacatatgcaggtccca

SEQ ID NO: 2321496 - DNA, 25 bp, Homo sapien
gatgttctcctgatgtagcttgaga

SEQ ID NO: 2321497 - DNA, 25 bp, Homo sapien
tcacaccttagctattcccagggaa

SEQ ID NO: 2321498 - DNA, 25 bp, Homo sapien
gaagcaatgggtcttagctctttct

SEQ ID NO: 2321499 - DNA, 25 bp, Homo sapien
cataggactctggacaatctcacac

SEQ ID NO: 2321500 - DNA, 25 bp, Homo sapien
aaaaaaagtgctatttgtggccagg

SEQ ID NO: 2321501 - DNA, 25 bp, Homo sapien
caaaactaccctgggccacgtggtg

SEQ ID NO: 2321502 - DNA, 25 bp, Homo sapien
aaaaagtgctatttgtggccaggcg

SEQ ID NO: 2321503 - DNA, 25 bp, Homo sapien
aaagtgctatttgtggccaggcgtg

SEQ ID NO: 2321504 - DNA, 25 bp, Homo sapien
tcacgcgcgggttctcgaaaatcag

SEQ ID NO: 2321505 - DNA, 25 bp, Homo sapien
gctcctcaagctagtttcggttccg

SEQ ID NO: 2321506 - DNA, 25 bp, Homo sapien
tggactcctcccctcgtagaaagtg

SEQ ID NO: 2321507 - DNA, 25 bp, Homo sapien
gctgtttcagtcttgggctagtcca

SEQ ID NO: 2321508 - DNA, 25 bp, Homo sapien
gaaggctgtacagtaaaacgtaaga

SEQ ID NO: 2321509 - DNA, 25 bp, Homo sapien
acttgttagagcctcggtgatcact

SEQ ID NO: 2321510 - DNA, 25 bp, Homo sapien
cacagggtttggtttcgaatctagg

SEQ ID NO: 2321511 - DNA, 25 bp, Homo sapien
tagtaacttctttcttgaactaaga

SEQ ID NO: 2321512 - DNA, 25 bp, Homo sapien
gaaacggcagaaaaagttggcatcc

SEQ ID NO: 2321513 - DNA, 25 bp, Homo sapien
gatgtcctgggtcatatcatgaaga

SEQ ID NO: 2321514 - DNA, 25 bp, Homo sapien
tcacgggcccgaatagtggataaac

SEQ ID NO: 2321515 - DNA, 25 bp, Homo sapien
gaatatcacagccaaacgctcacgg

SEQ ID NO: 2321516 - DNA, 25 bp, Homo sapien
cttgcgccttggatgaaccgggcac

SEQ ID NO: 2321517 - DNA, 25 bp, Homo sapien
tctctgggcctctgtggaggcaact

SEQ ID NO: 2321518 - DNA, 25 bp, Homo sapien
ggaggcaactcccaatcgtttggct

SEQ ID NO: 2321519 - DNA, 25 bp, Homo sapien
ccagcggcacaagcgcaaagaacgt

SEQ ID NO: 2321520 - DNA, 25 bp, Homo sapien
caaagaacgtgcaaaaagcagcgcc

SEQ ID NO: 2321521 - DNA, 25 bp, Homo sapien
tatccggaactgctgggagcgcttc

SEQ ID NO: 2321522 - DNA, 25 bp, Homo sapien
ggtgaacacccaggaacgatcatca

SEQ ID NO: 2321523 - DNA, 25 bp, Homo sapien
aatctgtctgtagcgtgtgaaccac

SEQ ID NO: 2321524 - DNA, 25 bp, Homo sapien
caatgcagctatcccgggacatgtc

SEQ ID NO: 2321525 - DNA, 25 bp, Homo sapien
gctgaatgataagaccccaggatgg

SEQ ID NO: 2321526 - DNA, 25 bp, Homo sapien
tggaatcacagggtcaaagcacagc

SEQ ID NO: 2321527 - DNA, 25 bp, Homo sapien
catgatattgcacagaggacccaac

SEQ ID NO: 2321528 - DNA, 25 bp, Homo sapien
caaaggcgtgattagggactccagt

SEQ ID NO: 2321529 - DNA, 25 bp, Homo sapien
gaggccctgtccaaagagaacttag

SEQ ID NO: 2321530 - DNA, 25 bp, Homo sapien
catctggaggtggtcaaactgcttc

SEQ ID NO: 2321531 - DNA, 25 bp, Homo sapien
gagggactctagctaccatgcacat

SEQ ID NO: 2321532 - DNA, 25 bp, Homo sapien
gactgggcttcaaggtacagcctaa

SEQ ID NO: 2321533 - DNA, 25 bp, Homo sapien
gtgaatccttttgccaaggacaggt

SEQ ID NO: 2321534 - DNA, 25 bp, Homo sapien
aaagtgaatccttttgccaaggaca

SEQ ID NO: 2321535 - DNA, 25 bp, Homo sapien
tgaatccttttgccaaggacaggtg

SEQ ID NO: 2321536 - DNA, 25 bp, Homo sapien
agtgaatccttttgccaaggacagg

SEQ ID NO: 2321537 - DNA, 25 bp, Homo sapien
tatgactcgcgcacagctctgcatg

SEQ ID NO: 2321538 - DNA, 25 bp, Homo sapien
aagactatgactcgcgcacagctct

SEQ ID NO: 2321539 - DNA, 25 bp, Homo sapien
actatgactcgcgcacagctctgca

SEQ ID NO: 2321540 - DNA, 25 bp, Homo sapien
gaaagactatgactcgcgcacagct

SEQ ID NO: 2321541 - DNA, 25 bp, Homo sapien
cctaggaagtaggtaccctgcctca

SEQ ID NO: 2321542 - DNA, 25 bp, Homo sapien
tctgatctaggcaactctagctgct

SEQ ID NO: 2321543 - DNA, 25 bp, Homo sapien
cacctgtgattccagtctgatctag

SEQ ID NO: 2321544 - DNA, 25 bp, Homo sapien
caaatctggctataggctgtttcac

SEQ ID NO: 2321545 - DNA, 25 bp, Homo sapien
gaaggtgagcactaccaaggctcag

SEQ ID NO: 2321546 - DNA, 25 bp, Homo sapien
aagtggcctgcgctacaacaagctc

SEQ ID NO: 2321547 - DNA, 25 bp, Homo sapien
tccctgtgcactgtggatggtcaac

SEQ ID NO: 2321548 - DNA, 25 bp, Homo sapien
caagtttgtgggcaaagagccaagt

SEQ ID NO: 2321549 - DNA, 25 bp, Homo sapien
tattagcagattagtgggtatcttc

SEQ ID NO: 2321550 - DNA, 25 bp, Homo sapien
cttttcccagaagtaaatattagca

SEQ ID NO: 2321551 - DNA, 25 bp, Homo sapien
tctcatatcccaagacatagtgtct

SEQ ID NO: 2321552 - DNA, 25 bp, Homo sapien
ccaaaggtaacagagctgttgatcc

SEQ ID NO: 2321553 - DNA, 25 bp, Homo sapien
cgtgcacgcagcgagacaggtcgtc

SEQ ID NO: 2321554 - DNA, 25 bp, Homo sapien
cggcggcagggcgtgcacgcagcga

SEQ ID NO: 2321555 - DNA, 25 bp, Homo sapien
agggcgtgcacgcagcgagacaggt

SEQ ID NO: 2321556 - DNA, 25 bp, Homo sapien
gcagggcgtgcacgcagcgagacag

SEQ ID NO: 2321557 - DNA, 25 bp, Homo sapien
cgggcatctgcaccgaattttacat

SEQ ID NO: 2321558 - DNA, 25 bp, Homo sapien
gaggagccagcaccctggacaccag

SEQ ID NO: 2321559 - DNA, 25 bp, Homo sapien
cagtggtagggccatccccagtctc

SEQ ID NO: 2321560 - DNA, 25 bp, Homo sapien
gcgaaagactgtgggtaaccgaagc

SEQ ID NO: 2321561 - DNA, 25 bp, Homo sapien
tcttttcgctcaacagaacataggc

SEQ ID NO: 2321562 - DNA, 25 bp, Homo sapien
gcctcgatcaaactttatgccttca

SEQ ID NO: 2321563 - DNA, 25 bp, Homo sapien
agaaattttcttttcgctcaacaga

SEQ ID NO: 2321564 - DNA, 25 bp, Homo sapien
agaaatatagcctcgatcaaacttt

SEQ ID NO: 2321565 - DNA, 25 bp, Homo sapien
tttttcttttaagagcgtggcatca

SEQ ID NO: 2321566 - DNA, 25 bp, Homo sapien
caagatttagggtcagcccctcttc

SEQ ID NO: 2321567 - DNA, 25 bp, Homo sapien
tcttttaagagcgtggcatcatctt

SEQ ID NO: 2321568 - DNA, 25 bp, Homo sapien
accctggagccttgattgccacatc

SEQ ID NO: 2321569 - DNA, 25 bp, Homo sapien
tgcttaacttctcatctggtggtgg

SEQ ID NO: 2321570 - DNA, 25 bp, Homo sapien
ctgcttaacttctcatctggtggtg

SEQ ID NO: 2321571 - DNA, 25 bp, Homo sapien
attatgcctcgctgcagccttgaca

SEQ ID NO: 2321572 - DNA, 25 bp, Homo sapien
gccaccatgcctcactaattaaaaa

SEQ ID NO: 2321573 - DNA, 25 bp, Homo sapien
ccttgacattctgggctcaactgat

SEQ ID NO: 2321574 - DNA, 25 bp, Homo sapien
cctcgctgcagccttgacattctgg

SEQ ID NO: 2321575 - DNA, 25 bp, Homo sapien
ttaatgttagggaacgagcgagaga

SEQ ID NO: 2321576 - DNA, 25 bp, Homo sapien
tctctttaatgttagggaacgagcg

SEQ ID NO: 2321577 - DNA, 25 bp, Homo sapien
ttctctttaatgttagggaacgagc

SEQ ID NO: 2321578 - DNA, 25 bp, Homo sapien
tctttaatgttagggaacgagcgag

SEQ ID NO: 2321579 - DNA, 25 bp, Homo sapien
gcctggaagtcacggatagcagcat

SEQ ID NO: 2321580 - DNA, 25 bp, Homo sapien
ggcctggaagtcacggatagcagca

SEQ ID NO: 2321581 - DNA, 25 bp, Homo sapien
cgggcctggaagtcacggatagcag

SEQ ID NO: 2321582 - DNA, 25 bp, Homo sapien
tgttgtttctattgtagccaaaagt

SEQ ID NO: 2321583 - DNA, 25 bp, Homo sapien
ttatcttgcagaatccctctttgaa

SEQ ID NO: 2321584 - DNA, 25 bp, Homo sapien
atcttgcagaatccctctttgaaat

SEQ ID NO: 2321585 - DNA, 25 bp, Homo sapien
aattatcttgcagaatccctctttg

SEQ ID NO: 2321586 - DNA, 25 bp, Homo sapien
tgcagaatccctctttgaaatccac

SEQ ID NO: 2321587 - DNA, 25 bp, Homo sapien
cctcgacctctaccagctcaggtga

SEQ ID NO: 2321588 - DNA, 25 bp, Homo sapien
tatattgcatattgcatattctcct

SEQ ID NO: 2321589 - DNA, 25 bp, Homo sapien
tattctcctatggaataagaaatgt

SEQ ID NO: 2321590 - DNA, 25 bp, Homo sapien
aactgacttcttagtccagttgata

SEQ ID NO: 2321591 - DNA, 25 bp, Homo sapien
tgtatgggcataccatgtattttat

SEQ ID NO: 2321592 - DNA, 25 bp, Homo sapien
ccttttgagaacctgccaagatgtt

SEQ ID NO: 2321593 - DNA, 25 bp, Homo sapien
tggggcaatcaaccgcagccttgac

SEQ ID NO: 2321594 - DNA, 25 bp, Homo sapien
tccttaaccttttgagaacctgcca

SEQ ID NO: 2321595 - DNA, 25 bp, Homo sapien
ggtgagtgcctatagtcctacctac

SEQ ID NO: 2321596 - DNA, 25 bp, Homo sapien
taaaaagcaagagagtaataaatac

SEQ ID NO: 2321597 - DNA, 25 bp, Homo sapien
agcaagagagtaataaatacagaat

SEQ ID NO: 2321598 - DNA, 25 bp, Homo sapien
tggtgagtgcctatagtcctaccta

SEQ ID NO: 2321599 - DNA, 25 bp, Homo sapien
aaagagaggccatagaaataagaag

SEQ ID NO: 2321600 - DNA, 25 bp, Homo sapien
tatcaagtgttgtcgataggttaag

SEQ ID NO: 2321601 - DNA, 25 bp, Homo sapien
gaatagagtgatcaattgtatcaag

SEQ ID NO: 2321602 - DNA, 25 bp, Homo sapien
actgcacccgtccaagacctggata

SEQ ID NO: 2321603 - DNA, 25 bp, Homo sapien
agaacagtaactggtatgctcagga

SEQ ID NO: 2321604 - DNA, 25 bp, Homo sapien
actggtatgtaaaaatactgtctat

SEQ ID NO: 2321605 - DNA, 25 bp, Homo sapien
gcatattatatagcttagctagaaa

SEQ ID NO: 2321606 - DNA, 25 bp, Homo sapien
gaacaaaggaactattatcatagca

SEQ ID NO: 2321607 - DNA, 25 bp, Homo sapien
agtgagatccccttttgcaataaat

SEQ ID NO: 2321608 - DNA, 25 bp, Homo sapien
acatgtaaaactcttatcatgctgc

SEQ ID NO: 2321609 - DNA, 25 bp, Homo sapien
atgtaaaactcttatcatgctgcct

SEQ ID NO: 2321610 - DNA, 25 bp, Homo sapien
ggagctgacatctattcattcaata

SEQ ID NO: 2321611 - DNA, 25 bp, Homo sapien
tcatggttcgctgtagccccaaatt

SEQ ID NO: 2321612 - DNA, 25 bp, Homo sapien
catggttcgctgtagccccaaattc

SEQ ID NO: 2321613 - DNA, 25 bp, Homo sapien
aattttttgctatgttgtttaggct

SEQ ID NO: 2321614 - DNA, 25 bp, Homo sapien
accatacctggctgatttctaaatt

SEQ ID NO: 2321615 - DNA, 25 bp, Homo sapien
ggctgatttctaaattttttgctat

SEQ ID NO: 2321616 - DNA, 25 bp, Homo sapien
attttttgctatgttgtttaggctg

SEQ ID NO: 2321617 - DNA, 25 bp, Homo sapien
aaaagccccagccttgagactactt

SEQ ID NO: 2321618 - DNA, 25 bp, Homo sapien
aatgtcctttccacacgggtgtctt

SEQ ID NO: 2321619 - DNA, 25 bp, Homo sapien
tatgctaaattccagtcatccaact

SEQ ID NO: 2321620 - DNA, 25 bp, Homo sapien
tacgtgtggctgctcactctgagaa

SEQ ID NO: 2321621 - DNA, 25 bp, Homo sapien
tgccatctgctgagccaatgacaca

SEQ ID NO: 2321622 - DNA, 25 bp, Homo sapien
ctactgctgttaggtgtactgttgc

SEQ ID NO: 2321623 - DNA, 25 bp, Homo sapien
ttgcttgggctaggtggtgccatct

SEQ ID NO: 2321624 - DNA, 25 bp, Homo sapien
aggttggttttgctcagctggtcat

SEQ ID NO: 2321625 - DNA, 25 bp, Homo sapien
acagcttgacaagatcttggtcagt

SEQ ID NO: 2321626 - DNA, 25 bp, Homo sapien
caagatcttggtcagtagtgcctgg

SEQ ID NO: 2321627 - DNA, 25 bp, Homo sapien
tgacaagatcttggtcagtagtgcc

SEQ ID NO: 2321628 - DNA, 25 bp, Homo sapien
cttggtcagtagtgcctggttgcaa

SEQ ID NO: 2321629 - DNA, 25 bp, Homo sapien
catttgtttgtggtcttgtccagta

SEQ ID NO: 2321630 - DNA, 25 bp, Homo sapien
ggccttagtggaaacaatcttgcca

SEQ ID NO: 2321631 - DNA, 25 bp, Homo sapien
cttagtggaaacaatcttgccatat

SEQ ID NO: 2321632 - DNA, 25 bp, Homo sapien
tacatttgtttgtggtcttgtccag

SEQ ID NO: 2321633 - DNA, 25 bp, Homo sapien
ggtgctctccaacaccaaggacagt

SEQ ID NO: 2321634 - DNA, 25 bp, Homo sapien
caacaccaaggacagttgttctctc

SEQ ID NO: 2321635 - DNA, 25 bp, Homo sapien
tctccaacaccaaggacagttgttc

SEQ ID NO: 2321636 - DNA, 25 bp, Homo sapien
tggtgctctccaacaccaaggacag

SEQ ID NO: 2321637 - DNA, 25 bp, Homo sapien
gaactaggctctgctaataacccaa

SEQ ID NO: 2321638 - DNA, 25 bp, Homo sapien
tttcaggtagttatccacatgctcc

SEQ ID NO: 2321639 - DNA, 25 bp, Homo sapien
caaggcaatgagctactctggtgtc

SEQ ID NO: 2321640 - DNA, 25 bp, Homo sapien
gatataccccagaaatgctaggcat

SEQ ID NO: 2321641 - DNA, 25 bp, Homo sapien
tgctgaagggctgtcaaaatctaca

SEQ ID NO: 2321642 - DNA, 25 bp, Homo sapien
gggctgtcaaaatctacaaagccat

SEQ ID NO: 2321643 - DNA, 25 bp, Homo sapien
ctgtcaaaatctacaaagccatagc

SEQ ID NO: 2321644 - DNA, 25 bp, Homo sapien
ttctgtgctgctgaagggctgtcaa

SEQ ID NO: 2321645 - DNA, 25 bp, Homo sapien
ctgtacaccgctggccttcagtgct

SEQ ID NO: 2321646 - DNA, 25 bp, Homo sapien
tctgtgcctgtacaccgctggcctt

SEQ ID NO: 2321647 - DNA, 25 bp, Homo sapien
ctttgccatctgtgcctgtacaccg

SEQ ID NO: 2321648 - DNA, 25 bp, Homo sapien
gccatctgtgcctgtacaccgctgg

SEQ ID NO: 2321649 - DNA, 25 bp, Homo sapien
tagaaagcaccacggatagcccttg

SEQ ID NO: 2321650 - DNA, 25 bp, Homo sapien
gccctctggaaaccttagaactgga

SEQ ID NO: 2321651 - DNA, 25 bp, Homo sapien
tgatagagctacctgccatagactt

SEQ ID NO: 2321652 - DNA, 25 bp, Homo sapien
aatttcatggttcttaagccctctg

SEQ ID NO: 2321653 - DNA, 25 bp, Homo sapien
gctcatccattgacagtgggaggtt

SEQ ID NO: 2321654 - DNA, 25 bp, Homo sapien
cgaaggatacgggtggagataacct

SEQ ID NO: 2321655 - DNA, 25 bp, Homo sapien
gctggtcccactggtatctcgaagg

SEQ ID NO: 2321656 - DNA, 25 bp, Homo sapien
cagtgggaggtttgagatgtataaa

SEQ ID NO: 2321657 - DNA, 25 bp, Homo sapien
gcttggctcacttagtccagtcatt

SEQ ID NO: 2321658 - DNA, 25 bp, Homo sapien
gggtgttcacggaccagacaagata

SEQ ID NO: 2321659 - DNA, 25 bp, Homo sapien
catttcttaagtgggctaagggagg

SEQ ID NO: 2321660 - DNA, 25 bp, Homo sapien
gaggctgataccctacgacagtgag

SEQ ID NO: 2321661 - DNA, 25 bp, Homo sapien
caaaagtctctaaagccacagttcc

SEQ ID NO: 2321662 - DNA, 25 bp, Homo sapien
cacttcttaagctgtatggaccatg

SEQ ID NO: 2321663 - DNA, 25 bp, Homo sapien
tgtgtaggtgtccattctgatacca

SEQ ID NO: 2321664 - DNA, 25 bp, Homo sapien
tctgttggagaatgtgtgcactact

SEQ ID NO: 2321665 - DNA, 25 bp, Homo sapien
tcaggaggcagaggtgagagaatcg

SEQ ID NO: 2321666 - DNA, 25 bp, Homo sapien
tgaacctgggaggcagaggttgtag

SEQ ID NO: 2321667 - DNA, 25 bp, Homo sapien
ttgtagtgagtcgagatcacgccat

SEQ ID NO: 2321668 - DNA, 25 bp, Homo sapien
ccagcctgggcaacagggcgagaat

SEQ ID NO: 2321669 - DNA, 25 bp, Homo sapien
tttccattaaagtgggtgatgatgg

SEQ ID NO: 2321670 - DNA, 25 bp, Homo sapien
ctccagggggtgtcttaatatattt

SEQ ID NO: 2321671 - DNA, 25 bp, Homo sapien
attttccattaaagtgggtgatgat

SEQ ID NO: 2321672 - DNA, 25 bp, Homo sapien
ctggtactccagggggtgtcttaat

SEQ ID NO: 2321673 - DNA, 25 bp, Homo sapien
tctttggcccgccatcagcaaattt

SEQ ID NO: 2321674 - DNA, 25 bp, Homo sapien
atttgcaaagcaagggatcggatgg

SEQ ID NO: 2321675 - DNA, 25 bp, Homo sapien
ggccaagcccgtccattttgcacaa

SEQ ID NO: 2321676 - DNA, 25 bp, Homo sapien
ttggccaagcccgtccattttgcac

SEQ ID NO: 2321677 - DNA, 25 bp, Homo sapien
gcatttctcaattacgtactgtagc

SEQ ID NO: 2321678 - DNA, 25 bp, Homo sapien
tccacctaagctcacagaaatcatg

SEQ ID NO: 2321679 - DNA, 25 bp, Homo sapien
gtagctctcaagctttccacctaag

SEQ ID NO: 2321680 - DNA, 25 bp, Homo sapien
taatgtcgttagtactcctgtctcc

SEQ ID NO: 2321681 - DNA, 25 bp, Homo sapien
ggtggggtcataggtcaaggccatg

SEQ ID NO: 2321682 - DNA, 25 bp, Homo sapien
ggtcataggtcaaggccatgacgcc

SEQ ID NO: 2321683 - DNA, 25 bp, Homo sapien
tggggtcataggtcaaggccatgac

SEQ ID NO: 2321684 - DNA, 25 bp, Homo sapien
ccattctgaagagctgtggtggggt

SEQ ID NO: 2321685 - DNA, 25 bp, Homo sapien
tcaggtggcttgattatataaaacc

SEQ ID NO: 2321686 - DNA, 25 bp, Homo sapien
tgtgggaaggaacctcaatcagtac

SEQ ID NO: 2321687 - DNA, 25 bp, Homo sapien
ggaagggtcccaactgataggcaca

SEQ ID NO: 2321688 - DNA, 25 bp, Homo sapien
gataggcacagccaacgttcccttg

SEQ ID NO: 2321689 - DNA, 25 bp, Homo sapien
tcctgttgggggtgatgttataggg

SEQ ID NO: 2321690 - DNA, 25 bp, Homo sapien
agagtgcagactgagcaagcatcct

SEQ ID NO: 2321691 - DNA, 25 bp, Homo sapien
caagcatcctgttgggggtgatgtt

SEQ ID NO: 2321692 - DNA, 25 bp, Homo sapien
gaaaggtatggggagagtgcagact

SEQ ID NO: 2321693 - DNA, 25 bp, Homo sapien
gaggacaccattaaaactgtatacc

SEQ ID NO: 2321694 - DNA, 25 bp, Homo sapien
taacatgagtttacttgtggaggtg

SEQ ID NO: 2321695 - DNA, 25 bp, Homo sapien
actccccaaatgctatacatatgtg

SEQ ID NO: 2321696 - DNA, 25 bp, Homo sapien
cttcacttaaagcacagtagtaggg

SEQ ID NO: 2321697 - DNA, 25 bp, Homo sapien
cccagcaagacaggaacaattttaa

SEQ ID NO: 2321698 - DNA, 25 bp, Homo sapien
agcaagacaggaacaattttaaaag

SEQ ID NO: 2321699 - DNA, 25 bp, Homo sapien
ctgcatgaggtatgaatggtggtgc

SEQ ID NO: 2321700 - DNA, 25 bp, Homo sapien
cttgtagaggagatgtctgagtcac

SEQ ID NO: 2321701 - DNA, 25 bp, Homo sapien
caggatgggttaggtacttgtagag

SEQ ID NO: 2321702 - DNA, 25 bp, Homo sapien
tgaaggctgcatgaggtatgaatgg

SEQ ID NO: 2321703 - DNA, 25 bp, Homo sapien
gagatggcccagttgctgggtaagg

SEQ ID NO: 2321704 - DNA, 25 bp, Homo sapien
agagatggcccagttgctgggtaag

SEQ ID NO: 2321705 - DNA, 25 bp, Homo sapien
agatggcccagttgctgggtaaggg

SEQ ID NO: 2321706 - DNA, 25 bp, Homo sapien
atttttggctacatttgaagcagct

SEQ ID NO: 2321707 - DNA, 25 bp, Homo sapien
gagaaacatcaacaggcttacagca

SEQ ID NO: 2321708 - DNA, 25 bp, Homo sapien
tacccttgagccctttctatgcaaa

SEQ ID NO: 2321709 - DNA, 25 bp, Homo sapien
agtacactgttagggagacgtctcc

SEQ ID NO: 2321710 - DNA, 25 bp, Homo sapien
tactgggagatgtaagctccttgca

SEQ ID NO: 2321711 - DNA, 25 bp, Homo sapien
ggagatgtaagctccttgcatagct

SEQ ID NO: 2321712 - DNA, 25 bp, Homo sapien
ctgggagatgtaagctccttgcata

SEQ ID NO: 2321713 - DNA, 25 bp, Homo sapien
ggtgtactgggagatgtaagctcct

SEQ ID NO: 2321714 - DNA, 25 bp, Homo sapien
ttcctaatctcaatccaaagaaatg

SEQ ID NO: 2321715 - DNA, 25 bp, Homo sapien
gaatcagcatcattgtgagagaaag

SEQ ID NO: 2321716 - DNA, 25 bp, Homo sapien
cctaccagctatttgtgaacacaga

SEQ ID NO: 2321717 - DNA, 25 bp, Homo sapien
tacgttcttcgtatacctaccagct

SEQ ID NO: 2321718 - DNA, 25 bp, Homo sapien
ttccaattttagtatgcatgctgcc

SEQ ID NO: 2321719 - DNA, 25 bp, Homo sapien
ccaattttagtatgcatgctgccga

SEQ ID NO: 2321720 - DNA, 25 bp, Homo sapien
aattttagtatgcatgctgccgaag

SEQ ID NO: 2321721 - DNA, 25 bp, Homo sapien
ttagtatgcatgctgccgaagcgag

SEQ ID NO: 2321722 - DNA, 25 bp, Homo sapien
tactggctggccaaatgtaaggaag

SEQ ID NO: 2321723 - DNA, 25 bp, Homo sapien
gcctcattcatgaactcagaccaag

SEQ ID NO: 2321724 - DNA, 25 bp, Homo sapien
ctcttcccaagacgcattagtcaat

SEQ ID NO: 2321725 - DNA, 25 bp, Homo sapien
tagtcaatacaagccagcatcctgg

SEQ ID NO: 2321726 - DNA, 25 bp, Homo sapien
actggaaagaatagaccccatgctc

SEQ ID NO: 2321727 - DNA, 25 bp, Homo sapien
cttggttctgttggccgctgctctc

SEQ ID NO: 2321728 - DNA, 25 bp, Homo sapien
gaactggaaagaatagaccccatgc

SEQ ID NO: 2321729 - DNA, 25 bp, Homo sapien
aactggaaagaatagaccccatgct

SEQ ID NO: 2321730 - DNA, 25 bp, Homo sapien
ggcaggctcagctgtttagaaaaga

SEQ ID NO: 2321731 - DNA, 25 bp, Homo sapien
caccatgtctcttcaaggtagggga

SEQ ID NO: 2321732 - DNA, 25 bp, Homo sapien
tagggctccttcatcgatgttccag

SEQ ID NO: 2321733 - DNA, 25 bp, Homo sapien
tcaaaaaagtccataactaagctca

SEQ ID NO: 2321734 - DNA, 25 bp, Homo sapien
tatgtggattcaactaggtcgcagc

SEQ ID NO: 2321735 - DNA, 25 bp, Homo sapien
gtctctagatgttgccaaaggcctg

SEQ ID NO: 2321736 - DNA, 25 bp, Homo sapien
gagaattcaaggatcccagtccagt

SEQ ID NO: 2321737 - DNA, 25 bp, Homo sapien
caagtttggctcaagggtgtgttcc

SEQ ID NO: 2321738 - DNA, 25 bp, Homo sapien
tgggccgagctctacttgtgacaac

SEQ ID NO: 2321739 - DNA, 25 bp, Homo sapien
tatggccagcctaatgaacacctgt

SEQ ID NO: 2321740 - DNA, 25 bp, Homo sapien
tctgactgtctagtggagaggcacc

SEQ ID NO: 2321741 - DNA, 25 bp, Homo sapien
actctcaattctagggtggctggga

SEQ ID NO: 2321742 - DNA, 25 bp, Homo sapien
cctgtgaagcagcaaagtctggtct

SEQ ID NO: 2321743 - DNA, 25 bp, Homo sapien
tatgccatctgaggaaaggactcta

SEQ ID NO: 2321744 - DNA, 25 bp, Homo sapien
tagtagactacgactgcatcactgc

SEQ ID NO: 2321745 - DNA, 25 bp, Homo sapien
tacaaagagagtaagagctgggctc

SEQ ID NO: 2321746 - DNA, 25 bp, Homo sapien
tcatatgacgcaaagtaacagccca

SEQ ID NO: 2321747 - DNA, 25 bp, Homo sapien
ggttttagctgccaactcctatgga

SEQ ID NO: 2321748 - DNA, 25 bp, Homo sapien
tcagaacggagacagaagctcacag

SEQ ID NO: 2321749 - DNA, 25 bp, Homo sapien
ttcaaaacaagtggacaggtcaggg

SEQ ID NO: 2321750 - DNA, 25 bp, Homo sapien
tagacgtgtaacaaggacaaggaag

SEQ ID NO: 2321751 - DNA, 25 bp, Homo sapien
aggttgtgaggtagacgtgtaacaa

SEQ ID NO: 2321752 - DNA, 25 bp, Homo sapien
tacctgttgttgaattgtgaggttg

SEQ ID NO: 2321753 - DNA, 25 bp, Homo sapien
taaaaattatgagccttttctagcc

SEQ ID NO: 2321754 - DNA, 25 bp, Homo sapien
cagcaggacctatctggagagttca

SEQ ID NO: 2321755 - DNA, 25 bp, Homo sapien
gcgatcagtgagctaaaaatcccag

SEQ ID NO: 2321756 - DNA, 25 bp, Homo sapien
gagagttcacactattctagggcga

SEQ ID NO: 2321757 - DNA, 25 bp, Homo sapien
cactcgcgctggatatgtattaccc

SEQ ID NO: 2321758 - DNA, 25 bp, Homo sapien
tcccactcacggataagacaccaag

SEQ ID NO: 2321759 - DNA, 25 bp, Homo sapien
tagcaaatatgggaccatcaccagc

SEQ ID NO: 2321760 - DNA, 25 bp, Homo sapien
tgctcctgcctaaatgtctggctga

SEQ ID NO: 2321761 - DNA, 25 bp, Homo sapien
ttaagagaccacaggcaagggaaca

SEQ ID NO: 2321762 - DNA, 25 bp, Homo sapien
ttaggaccaatctcatttttaataa

SEQ ID NO: 2321763 - DNA, 25 bp, Homo sapien
gccatgtgatgttccacaagtgcag

SEQ ID NO: 2321764 - DNA, 25 bp, Homo sapien
ttttgccatgtgatgttccacaagt

SEQ ID NO: 2321765 - DNA, 25 bp, Homo sapien
tgccatgtgatgttccacaagtgca

SEQ ID NO: 2321766 - DNA, 25 bp, Homo sapien
acgagaggaaagctgctgactccca

SEQ ID NO: 2321767 - DNA, 25 bp, Homo sapien
cagctatagccatgggcacttggcc

SEQ ID NO: 2321768 - DNA, 25 bp, Homo sapien
taactgcgctgtaacaaactttgtg

SEQ ID NO: 2321769 - DNA, 25 bp, Homo sapien
tgtgactatgtccaagttaagcccc

SEQ ID NO: 2321770 - DNA, 25 bp, Homo sapien
cctctcttctcggtagctttgaatc

SEQ ID NO: 2321771 - DNA, 25 bp, Homo sapien
ctctcttctcggtagctttgaatct

SEQ ID NO: 2321772 - DNA, 25 bp, Homo sapien
aaagtggacttaactcccaagtgtg

SEQ ID NO: 2321773 - DNA, 25 bp, Homo sapien
cgcagtgacggccagtaaagtggac

SEQ ID NO: 2321774 - DNA, 25 bp, Homo sapien
tgacggccagtaaagtggacttaac

SEQ ID NO: 2321775 - DNA, 25 bp, Homo sapien
actcccaagtgtgtcgcgccggaca

SEQ ID NO: 2321776 - DNA, 25 bp, Homo sapien
ggttgtgcatctttccctactcacc

SEQ ID NO: 2321777 - DNA, 25 bp, Homo sapien
gacaatgtgtcagagatcctgcgct

SEQ ID NO: 2321778 - DNA, 25 bp, Homo sapien
ggcatatggagtagagccagccctc

SEQ ID NO: 2321779 - DNA, 25 bp, Homo sapien
tctgagatcccactgacaagagaca

SEQ ID NO: 2321780 - DNA, 25 bp, Homo sapien
tgctctaaaatcagtccgtgggttt

SEQ ID NO: 2321781 - DNA, 25 bp, Homo sapien
gcaggacaccttctaaagcagtctg

SEQ ID NO: 2321782 - DNA, 25 bp, Homo sapien
cttttagtgaagcaagacatggagc

SEQ ID NO: 2321783 - DNA, 25 bp, Homo sapien
tatcctgggagagagattggctcca

SEQ ID NO: 2321784 - DNA, 25 bp, Homo sapien
tcatatactggttcagttgtaccct

SEQ ID NO: 2321785 - DNA, 25 bp, Homo sapien
catttctactatcatggaggttcag

SEQ ID NO: 2321786 - DNA, 25 bp, Homo sapien
tgcccccaggtgtgtttagcccaga

SEQ ID NO: 2321787 - DNA, 25 bp, Homo sapien
tcaaaagataattgggagccaggca

SEQ ID NO: 2321788 - DNA, 25 bp, Homo sapien
tgactgtggcaggatcagactggct

SEQ ID NO: 2321789 - DNA, 25 bp, Homo sapien
tagcattagtacacgtgacagcccc

SEQ ID NO: 2321790 - DNA, 25 bp, Homo sapien
taaagtcgtctgagcccaatgtagt

SEQ ID NO: 2321791 - DNA, 25 bp, Homo sapien
tatacggagtggttagggtctagca

SEQ ID NO: 2321792 - DNA, 25 bp, Homo sapien
ttaatataacctctggactgtggct

SEQ ID NO: 2321793 - DNA, 25 bp, Homo sapien
cttaatataacctctggactgtggc

SEQ ID NO: 2321794 - DNA, 25 bp, Homo sapien
tcccgcaggaagtggccgggaaatg

SEQ ID NO: 2321795 - DNA, 25 bp, Homo sapien
gctgtgcgtttgctgctgcgtgtct

SEQ ID NO: 2321796 - DNA, 25 bp, Homo sapien
cccgcaggaagtggccgggaaatgg

SEQ ID NO: 2321797 - DNA, 25 bp, Homo sapien
aatggcagctgtgcgtttgctgctg

SEQ ID NO: 2321798 - DNA, 25 bp, Homo sapien
gaaagtggtgatccaggcaggacca

SEQ ID NO: 2321799 - DNA, 25 bp, Homo sapien
tctggttccagagccgaaccttctt

SEQ ID NO: 2321800 - DNA, 25 bp, Homo sapien
tggttccagagccgaaccttctttc

SEQ ID NO: 2321801 - DNA, 25 bp, Homo sapien
ctggttccagagccgaaccttcttt

SEQ ID NO: 2321802 - DNA, 25 bp, Homo sapien
cccgggattcgggatctgactctcc

SEQ ID NO: 2321803 - DNA, 25 bp, Homo sapien
tgtcctccgcgaccggaatccggag

SEQ ID NO: 2321804 - DNA, 25 bp, Homo sapien
gaatccggaggcttctcacgcctct

SEQ ID NO: 2321805 - DNA, 25 bp, Homo sapien
cttggcgggccgttcctgcggtatc

SEQ ID NO: 2321806 - DNA, 25 bp, Homo sapien
agggcactgagtgggacgcaggatt

SEQ ID NO: 2321807 - DNA, 25 bp, Homo sapien
cagggctgctattgatggcccccac

SEQ ID NO: 2321808 - DNA, 25 bp, Homo sapien
cccacagccgtagggatggagccct

SEQ ID NO: 2321809 - DNA, 25 bp, Homo sapien
cccacactacagtcactgagggcac

SEQ ID NO: 2321810 - DNA, 25 bp, Homo sapien
tgcttgtgctggtagtttgctccca

SEQ ID NO: 2321811 - DNA, 25 bp, Homo sapien
ttgtgctggtagtttgctcccagaa

SEQ ID NO: 2321812 - DNA, 25 bp, Homo sapien
tctcctgtgtcatgatctggacaga

SEQ ID NO: 2321813 - DNA, 25 bp, Homo sapien
cttccatctgcctgtgacgtccttg

SEQ ID NO: 2321814 - DNA, 25 bp, Homo sapien
tgccctctcgcggtagcactggaga

SEQ ID NO: 2321815 - DNA, 25 bp, Homo sapien
taaagactgtttacagaccagctgg

SEQ ID NO: 2321816 - DNA, 25 bp, Homo sapien
ctcttgtgttcttttccgggaccag

SEQ ID NO: 2321817 - DNA, 25 bp, Homo sapien
taaaagaagcgtgcaaggtcagatt

SEQ ID NO: 2321818 - DNA, 25 bp, Homo sapien
tctttgtcctctgtactgtctctct

SEQ ID NO: 2321819 - DNA, 25 bp, Homo sapien
cattcatcgtgaggggtctttgtcc

SEQ ID NO: 2321820 - DNA, 25 bp, Homo sapien
tttttctgtgtaggctgcacaagag

SEQ ID NO: 2321821 - DNA, 25 bp, Homo sapien
cacaagagccttgattgaagatata

SEQ ID NO: 2321822 - DNA, 25 bp, Homo sapien
cagtgttccaggtgtatcttagcta

SEQ ID NO: 2321823 - DNA, 25 bp, Homo sapien
catggaggacgaagaaagctgtaca

SEQ ID NO: 2321824 - DNA, 25 bp, Homo sapien
tttttgattcagcttatacccgggc

SEQ ID NO: 2321825 - DNA, 25 bp, Homo sapien
taagtgatgacttgtcagtgttcca

SEQ ID NO: 2321826 - DNA, 25 bp, Homo sapien
gcttgatatgactacctacctgtgc

SEQ ID NO: 2321827 - DNA, 25 bp, Homo sapien
gaatggattcaacgggtgggctaaa

SEQ ID NO: 2321828 - DNA, 25 bp, Homo sapien
caacagctaggattagagttcactg

SEQ ID NO: 2321829 - DNA, 25 bp, Homo sapien
taggtaaacctagtcaagtccaatg

SEQ ID NO: 2321830 - DNA, 25 bp, Homo sapien
aaacctgttgcatgaatagctttgc

SEQ ID NO: 2321831 - DNA, 25 bp, Homo sapien
gcattttttgatatctgtggcagac

SEQ ID NO: 2321832 - DNA, 25 bp, Homo sapien
cagaggtaaccactactcaagtaga

SEQ ID NO: 2321833 - DNA, 25 bp, Homo sapien
cctaacttaagatagatagctgtgc

SEQ ID NO: 2321834 - DNA, 25 bp, Homo sapien
ccgcactcggccctgtttgtagttt

SEQ ID NO: 2321835 - DNA, 25 bp, Homo sapien
tgtgttagccaacttgtataaaggg

SEQ ID NO: 2321836 - DNA, 25 bp, Homo sapien
ttgtagttttaatgtgttagccaac

SEQ ID NO: 2321837 - DNA, 25 bp, Homo sapien
caacttgtataaagggtcagccagt

SEQ ID NO: 2321838 - DNA, 25 bp, Homo sapien
gaccctgaagcattcttcttttaac

SEQ ID NO: 2321839 - DNA, 25 bp, Homo sapien
tcttgctttggttttagaccctgaa

SEQ ID NO: 2321840 - DNA, 25 bp, Homo sapien
ttagcacttttctatcaagcaactc

SEQ ID NO: 2321841 - DNA, 25 bp, Homo sapien
cacattccgtcttttgagcactctt

SEQ ID NO: 2321842 - DNA, 25 bp, Homo sapien
cactctgttagccaggaaggtctgg

SEQ ID NO: 2321843 - DNA, 25 bp, Homo sapien
tcactctgttagccaggaaggtctg

SEQ ID NO: 2321844 - DNA, 25 bp, Homo sapien
tacaggctcccgccacctcatccgg

SEQ ID NO: 2321845 - DNA, 25 bp, Homo sapien
caggctcccgccacctcatccggct

SEQ ID NO: 2321846 - DNA, 25 bp, Homo sapien
tgcttcctcggtatacctttgtaaa

SEQ ID NO: 2321847 - DNA, 25 bp, Homo sapien
tagattctagaatgaggctgcttcc

SEQ ID NO: 2321848 - DNA, 25 bp, Homo sapien
tccctgcttcctcggtatacctttg

SEQ ID NO: 2321849 - DNA, 25 bp, Homo sapien
cgcagccggcaatgatagattctag

SEQ ID NO: 2321850 - DNA, 25 bp, Homo sapien
gagcaggtagttccgcacgtgtcga

SEQ ID NO: 2321851 - DNA, 25 bp, Homo sapien
cgcacgtgtcgactttggaaagata

SEQ ID NO: 2321852 - DNA, 25 bp, Homo sapien
cattgagcaggtagttccgcacgtg

SEQ ID NO: 2321853 - DNA, 25 bp, Homo sapien
tagttccgcacgtgtcgactttgga

SEQ ID NO: 2321854 - DNA, 25 bp, Homo sapien
aacacgggaggttgccaaaactcag

SEQ ID NO: 2321855 - DNA, 25 bp, Homo sapien
tcttgaaaacacgggaggttgccaa

SEQ ID NO: 2321856 - DNA, 25 bp, Homo sapien
aggttgccaaaactcagccgcttcc

SEQ ID NO: 2321857 - DNA, 25 bp, Homo sapien
ttccagtccgcctcctaactccagt

SEQ ID NO: 2321858 - DNA, 25 bp, Homo sapien
tctccagtgtctgggtttcttgagt

SEQ ID NO: 2321859 - DNA, 25 bp, Homo sapien
cctctccagtgtctgggtttcttga

SEQ ID NO: 2321860 - DNA, 25 bp, Homo sapien
tccagtgtctgggtttcttgagtgt

SEQ ID NO: 2321861 - DNA, 25 bp, Homo sapien
ttccctctccagtgtctgggtttct

SEQ ID NO: 2321862 - DNA, 25 bp, Homo sapien
taggccttaagctcccggtagctgc

SEQ ID NO: 2321863 - DNA, 25 bp, Homo sapien
tgggcgctccggttctgttgctttg

SEQ ID NO: 2321864 - DNA, 25 bp, Homo sapien
atgcggcgccctgaagcgtgaacct

SEQ ID NO: 2321865 - DNA, 25 bp, Homo sapien
ttcgtgggtcgcctctcggctgctt

SEQ ID NO: 2321866 - DNA, 25 bp, Homo sapien
ttggctgtctgggttactcgcctct

SEQ ID NO: 2321867 - DNA, 25 bp, Homo sapien
ccctttggctgtctgggttactcgc

SEQ ID NO: 2321868 - DNA, 25 bp, Homo sapien
tactcgcctctttcggtaacttcac

SEQ ID NO: 2321869 - DNA, 25 bp, Homo sapien
tgtctgggttactcgcctctttcgg

SEQ ID NO: 2321870 - DNA, 25 bp, Homo sapien
ttctcgcatcggtggtggcagtcgt

SEQ ID NO: 2321871 - DNA, 25 bp, Homo sapien
tagcctttctcgcatcggtggtggc

SEQ ID NO: 2321872 - DNA, 25 bp, Homo sapien
tcggtggtggcagtcgttcctgcct

SEQ ID NO: 2321873 - DNA, 25 bp, Homo sapien
ttggcttccccatgccggaaatcct

SEQ ID NO: 2321874 - DNA, 25 bp, Homo sapien
gctctttccgcgcggtgcattctgg

SEQ ID NO: 2321875 - DNA, 25 bp, Homo sapien
ctcgtttgcacgcacgcacgttcat

SEQ ID NO: 2321876 - DNA, 25 bp, Homo sapien
acgcacgttcattctccgtcctcgc

SEQ ID NO: 2321877 - DNA, 25 bp, Homo sapien
ctcttctccccgaccggaggagccg

SEQ ID NO: 2321878 - DNA, 25 bp, Homo sapien
tcaacgcaaccgtttctcagagaaa

SEQ ID NO: 2321879 - DNA, 25 bp, Homo sapien
agaaatcgccgaaggcgcatggcag

SEQ ID NO: 2321880 - DNA, 25 bp, Homo sapien
tttctcagagaaatcgccgaaggcg

SEQ ID NO: 2321881 - DNA, 25 bp, Homo sapien
caacgcaaccgtttctcagagaaat

SEQ ID NO: 2321882 - DNA, 25 bp, Homo sapien
cttcagaaaaatggcgaggtggacc

SEQ ID NO: 2321883 - DNA, 25 bp, Homo sapien
aagagtaaccaacgcgccatttcag

SEQ ID NO: 2321884 - DNA, 25 bp, Homo sapien
caaacgatgtgcgtggaaacacaca

SEQ ID NO: 2321885 - DNA, 25 bp, Homo sapien
ctaatatgttgcacaaagcgacggg

SEQ ID NO: 2321886 - DNA, 25 bp, Homo sapien
acccaacctgttgtgcctccacggt

SEQ ID NO: 2321887 - DNA, 25 bp, Homo sapien
gtgcctccacggtgtgattttggtt

SEQ ID NO: 2321888 - DNA, 25 bp, Homo sapien
ttttcacttaagtgtatctgggggc

SEQ ID NO: 2321889 - DNA, 25 bp, Homo sapien
ttaagtgtatctgggggcaccttct

SEQ ID NO: 2321890 - DNA, 25 bp, Homo sapien
tgatctgacattgaaaaccaagacc

SEQ ID NO: 2321891 - DNA, 25 bp, Homo sapien
gtagtctttactgatgcttggcctt

SEQ ID NO: 2321892 - DNA, 25 bp, Homo sapien
taactaaccttgtccctgggcctga

SEQ ID NO: 2321893 - DNA, 25 bp, Homo sapien
tttgtgtaatgtggcccggactacc

SEQ ID NO: 2321894 - DNA, 25 bp, Homo sapien
tagcaaccactctgaggataccagt

SEQ ID NO: 2321895 - DNA, 25 bp, Homo sapien
tgtattaccgttagtccaggcagcc

SEQ ID NO: 2321896 - DNA, 25 bp, Homo sapien
gtgactaacccctgtacaattgctg

SEQ ID NO: 2321897 - DNA, 25 bp, Homo sapien
tctccctataggtaagccagccagc

SEQ ID NO: 2321898 - DNA, 25 bp, Homo sapien
gagttggaggctttactgggccaca

SEQ ID NO: 2321899 - DNA, 25 bp, Homo sapien
gtaacaccgttctccctgtgacaag

SEQ ID NO: 2321900 - DNA, 25 bp, Homo sapien
tgggaactgcttcacaggatccaga

SEQ ID NO: 2321901 - DNA, 25 bp, Homo sapien
caaagtcggcaaacgtagtccagga

SEQ ID NO: 2321902 - DNA, 25 bp, Homo sapien
cacactggcctaaaacttatcttta

SEQ ID NO: 2321903 - DNA, 25 bp, Homo sapien
cacattgcagagtaaatgatcttac

SEQ ID NO: 2321904 - DNA, 25 bp, Homo sapien
agtacggtaacgtgaccacagctca

SEQ ID NO: 2321905 - DNA, 25 bp, Homo sapien
gtcatagtagctacatgttttaaga

SEQ ID NO: 2321906 - DNA, 25 bp, Homo sapien
tatcgctggctcaactacggtggag

SEQ ID NO: 2321907 - DNA, 25 bp, Homo sapien
gagctgcttaaactttattaccgga

SEQ ID NO: 2321908 - DNA, 25 bp, Homo sapien
cgagttccgcgctcaatggagacgt

SEQ ID NO: 2321909 - DNA, 25 bp, Homo sapien
tcaatggagacgtttgaccccaccg

SEQ ID NO: 2321910 - DNA, 25 bp, Homo sapien
ggccttctgcccacaagagcggtgg

SEQ ID NO: 2321911 - DNA, 25 bp, Homo sapien
tttccggagaagatcctcttcctgg

SEQ ID NO: 2321912 - DNA, 25 bp, Homo sapien
cttcctggaatggacgcggccttct

SEQ ID NO: 2321913 - DNA, 25 bp, Homo sapien
agagcggtggccctagtgcccgaac

SEQ ID NO: 2321914 - DNA, 25 bp, Homo sapien
taggaagagtccagtcctagagact

SEQ ID NO: 2321915 - DNA, 25 bp, Homo sapien
tcttgtggtaagagtccaggctgct

SEQ ID NO: 2321916 - DNA, 25 bp, Homo sapien
attgctcttataacacctccctctt

SEQ ID NO: 2321917 - DNA, 25 bp, Homo sapien
tagagacttgaaaggacttctttgc

SEQ ID NO: 2321918 - DNA, 25 bp, Homo sapien
caaacttcatgggagtaaagatcaa

SEQ ID NO: 2321919 - DNA, 25 bp, Homo sapien
gaaatcactcccaacttgtaaccag

SEQ ID NO: 2321920 - DNA, 25 bp, Homo sapien
cactgccgagaatcccgttttcaga

SEQ ID NO: 2321921 - DNA, 25 bp, Homo sapien
ccagagtccctatttgtaagtatga

SEQ ID NO: 2321922 - DNA, 25 bp, Homo sapien
aggaatttcacgaagttaatcactc

SEQ ID NO: 2321923 - DNA, 25 bp, Homo sapien
aatttcacgaagttaatcactcagt

SEQ ID NO: 2321924 - DNA, 25 bp, Homo sapien
gaaggaatttcacgaagttaatcac

SEQ ID NO: 2321925 - DNA, 25 bp, Homo sapien
gaatttcacgaagttaatcactcag

SEQ ID NO: 2321926 - DNA, 25 bp, Homo sapien
accatccatgttctctagctgccag

SEQ ID NO: 2321927 - DNA, 25 bp, Homo sapien
gggtgcttcactagcaccccaaagc

SEQ ID NO: 2321928 - DNA, 25 bp, Homo sapien
ccaaagcctttaccatccatgttct

SEQ ID NO: 2321929 - DNA, 25 bp, Homo sapien
agcctttaccatccatgttctctag

SEQ ID NO: 2321930 - DNA, 25 bp, Homo sapien
ccgtcagacacgcagccagcactct

SEQ ID NO: 2321931 - DNA, 25 bp, Homo sapien
ccacatgctccttcacccactgagt

SEQ ID NO: 2321932 - DNA, 25 bp, Homo sapien
tgcagcgatgctctccatcttggta

SEQ ID NO: 2321933 - DNA, 25 bp, Homo sapien
ataaagacatacttgtcttggaggt

SEQ ID NO: 2321934 - DNA, 25 bp, Homo sapien
catattcatagagtcctcagtgttc

SEQ ID NO: 2321935 - DNA, 25 bp, Homo sapien
ctttgagcatattcatagagtcctc

SEQ ID NO: 2321936 - DNA, 25 bp, Homo sapien
tgcctgcattgttcaccagtcccca

SEQ ID NO: 2321937 - DNA, 25 bp, Homo sapien
gagcatattcatagagtcctcagtg

SEQ ID NO: 2321938 - DNA, 25 bp, Homo sapien
ctcaaggtcacctggatcacaccaa

SEQ ID NO: 2321939 - DNA, 25 bp, Homo sapien
ggagacattgacaattcttccccgt

SEQ ID NO: 2321940 - DNA, 25 bp, Homo sapien
gacattgacaattcttccccgtgct

SEQ ID NO: 2321941 - DNA, 25 bp, Homo sapien
acctggatcacaccaatgaggttca

SEQ ID NO: 2321942 - DNA, 25 bp, Homo sapien
gagacacagtagcctcctacaaaga

SEQ ID NO: 2321943 - DNA, 25 bp, Homo sapien
cttccactccatacttggagacaca

SEQ ID NO: 2321944 - DNA, 25 bp, Homo sapien
agacacagtagcctcctacaaagaa

SEQ ID NO: 2321945 - DNA, 25 bp, Homo sapien
cataggtctccttaatatgcttggg

SEQ ID NO: 2321946 - DNA, 25 bp, Homo sapien
gcatcaaaatactgctgtccatagg

SEQ ID NO: 2321947 - DNA, 25 bp, Homo sapien
tcattcccgttctgaagtagccagg

SEQ ID NO: 2321948 - DNA, 25 bp, Homo sapien
tgcttcattcgctctaaggactgtg

SEQ ID NO: 2321949 - DNA, 25 bp, Homo sapien
agaagtcattcccatttttcaccgc

SEQ ID NO: 2321950 - DNA, 25 bp, Homo sapien
gaaattgacaaatcccactcccaca

SEQ ID NO: 2321951 - DNA, 25 bp, Homo sapien
ctccaggtcttcagaataatattct

SEQ ID NO: 2321952 - DNA, 25 bp, Homo sapien
ataatattcttataggaaattgaca

SEQ ID NO: 2321953 - DNA, 25 bp, Homo sapien
caacagcccttccttcatgatattg

SEQ ID NO: 2321954 - DNA, 25 bp, Homo sapien
agcccttccttcatgatattgtaaa

SEQ ID NO: 2321955 - DNA, 25 bp, Homo sapien
acagcccttccttcatgatattgta

SEQ ID NO: 2321956 - DNA, 25 bp, Homo sapien
attcaacagcccttccttcatgata

SEQ ID NO: 2321957 - DNA, 25 bp, Homo sapien
cgatgtcagagcatgttccatgcag

SEQ ID NO: 2321958 - DNA, 25 bp, Homo sapien
cagtcagtgaccaggttcaggtttg

SEQ ID NO: 2321959 - DNA, 25 bp, Homo sapien
gtcagtgaccaggttcaggtttgtg

SEQ ID NO: 2321960 - DNA, 25 bp, Homo sapien
tcagagcatgttccatgcagtcagt

SEQ ID NO: 2321961 - DNA, 25 bp, Homo sapien
gtctgccagtgatgtaggtaaataa

SEQ ID NO: 2321962 - DNA, 25 bp, Homo sapien
ctgaatatcgagttcgcggatgcac

SEQ ID NO: 2321963 - DNA, 25 bp, Homo sapien
gaaaaatttagcatcccagccagct

SEQ ID NO: 2321964 - DNA, 25 bp, Homo sapien
tgggccaagatctagtcaaaatgta

SEQ ID NO: 2321965 - DNA, 25 bp, Homo sapien
gatttttgccttcattccaagaagc

SEQ ID NO: 2321966 - DNA, 25 bp, Homo sapien
cctaaagtggtaagctttggatatc

SEQ ID NO: 2321967 - DNA, 25 bp, Homo sapien
acatgttagtactctgatgatgcca

SEQ ID NO: 2321968 - DNA, 25 bp, Homo sapien
agtaaagattcatcacctaaagtgg

SEQ ID NO: 2321969 - DNA, 25 bp, Homo sapien
aacacaccaacatatttcttagtag

SEQ ID NO: 2321970 - DNA, 25 bp, Homo sapien
agtagtttcctcacaatagattatt

SEQ ID NO: 2321971 - DNA, 25 bp, Homo sapien
gcatagaacaattattcatattcat

SEQ ID NO: 2321972 - DNA, 25 bp, Homo sapien
ttcaagtaaggacaaacacaccaac

SEQ ID NO: 2321973 - DNA, 25 bp, Homo sapien
ggtgcaccttggcacctacagcctg

SEQ ID NO: 2321974 - DNA, 25 bp, Homo sapien
gacattgggcactgatgtgcctagg

SEQ ID NO: 2321975 - DNA, 25 bp, Homo sapien
tgccagtcccatggaccatagtggg

SEQ ID NO: 2321976 - DNA, 25 bp, Homo sapien
tacacatgctcagtgcagtgctgac

SEQ ID NO: 2321977 - DNA, 25 bp, Homo sapien
aagtgatagttgctgctgtcacaga

SEQ ID NO: 2321978 - DNA, 25 bp, Homo sapien
aatgtccgagtcaagaaaaaccctg

SEQ ID NO: 2321979 - DNA, 25 bp, Homo sapien
cacagtcagtgggtgaaagtgccct

SEQ ID NO: 2321980 - DNA, 25 bp, Homo sapien
ttacggacttgctgccccacatttg

SEQ ID NO: 2321981 - DNA, 25 bp, Homo sapien
ttccgtgctcccctttccatgaggg

SEQ ID NO: 2321982 - DNA, 25 bp, Homo sapien
aagggtgactcagcataattgttac

SEQ ID NO: 2321983 - DNA, 25 bp, Homo sapien
tgttcttccaaaggagatacttctc

SEQ ID NO: 2321984 - DNA, 25 bp, Homo sapien
aagatacagcctgaaggcccaccag

SEQ ID NO: 2321985 - DNA, 25 bp, Homo sapien
gaacaggctccatcaaaggtcatgg

SEQ ID NO: 2321986 - DNA, 25 bp, Homo sapien
ctccagtggaaaagcagatggaact

SEQ ID NO: 2321987 - DNA, 25 bp, Homo sapien
tagggcaggcaagtcaatagattat

SEQ ID NO: 2321988 - DNA, 25 bp, Homo sapien
ctttcccctccacaactgtgggtat

SEQ ID NO: 2321989 - DNA, 25 bp, Homo sapien
aggcaattccctccttgaacacctc

SEQ ID NO: 2321990 - DNA, 25 bp, Homo sapien
ctcctctctgaacctaaccctcttt

SEQ ID NO: 2321991 - DNA, 25 bp, Homo sapien
tacgcaaagcttgagggtgctggct

SEQ ID NO: 2321992 - DNA, 25 bp, Homo sapien
tggcaagacagctggatacgcaaag

SEQ ID NO: 2321993 - DNA, 25 bp, Homo sapien
gcttcgggaatctgctggcaagaca

SEQ ID NO: 2321994 - DNA, 25 bp, Homo sapien
tcatcatgggctgtgactcgggctt

SEQ ID NO: 2321995 - DNA, 25 bp, Homo sapien
aaccaagcatgggaacagaccaaaa

SEQ ID NO: 2321996 - DNA, 25 bp, Homo sapien
gatgctactctaccagatcgggaac

SEQ ID NO: 2321997 - DNA, 25 bp, Homo sapien
caagcatgggaacagaccaaaagcc

SEQ ID NO: 2321998 - DNA, 25 bp, Homo sapien
gctggtattagatggtcaccaccaa

SEQ ID NO: 2321999 - DNA, 25 bp, Homo sapien
gcatggacttctactgcacttgaaa

SEQ ID NO: 2322000 - DNA, 25 bp, Homo sapien
tgtggagacattcacgctaaggaca

SEQ ID NO: 2322001 - DNA, 25 bp, Homo sapien
tacacttcagttttgccaggatgca

SEQ ID NO: 2322002 - DNA, 25 bp, Homo sapien
gagaggagttctcaagagcttccgc

SEQ ID NO: 2322003 - DNA, 25 bp, Homo sapien
catgtatgtgtaggccactgaaagc

SEQ ID NO: 2322004 - DNA, 25 bp, Homo sapien
cacccaggtagtgatgtagtcgtac

SEQ ID NO: 2322005 - DNA, 25 bp, Homo sapien
gatgtagtcgtaccatctggccagc

SEQ ID NO: 2322006 - DNA, 25 bp, Homo sapien
tcattgaacagcttggtgccctgct

SEQ ID NO: 2322007 - DNA, 25 bp, Homo sapien
ctaggcagacctgtgatcccctgac

SEQ ID NO: 2322008 - DNA, 25 bp, Homo sapien
tcttgtcggaggtaacagttttctg

SEQ ID NO: 2322009 - DNA, 25 bp, Homo sapien
tttctgctcaatgctcaaggtgacc

SEQ ID NO: 2322010 - DNA, 25 bp, Homo sapien
tactttctcctgatagcccttaatc

SEQ ID NO: 2322011 - DNA, 25 bp, Homo sapien
tcagactctactttctcctgatagc

SEQ ID NO: 2322012 - DNA, 25 bp, Homo sapien
ttcggcaaggtacaggaagtaatct

SEQ ID NO: 2322013 - DNA, 25 bp, Homo sapien
tcggcaaggtacaggaagtaatctc

SEQ ID NO: 2322014 - DNA, 25 bp, Homo sapien
ggcaaggtacaggaagtaatctccc

SEQ ID NO: 2322015 - DNA, 25 bp, Homo sapien
cggcaaggtacaggaagtaatctcc

SEQ ID NO: 2322016 - DNA, 25 bp, Homo sapien
gctctgcattattaagggtctcaca

SEQ ID NO: 2322017 - DNA, 25 bp, Homo sapien
tctctaagcagataagggtgctgtc

SEQ ID NO: 2322018 - DNA, 25 bp, Homo sapien
tttgggacttcagtcaatgacgagc

SEQ ID NO: 2322019 - DNA, 25 bp, Homo sapien
taagacgttacatcgaacactgctg

SEQ ID NO: 2322020 - DNA, 25 bp, Homo sapien
gactgtggatatggtggatatagaa

SEQ ID NO: 2322021 - DNA, 25 bp, Homo sapien
tcttcaggcaaactttgactgtgga

SEQ ID NO: 2322022 - DNA, 25 bp, Homo sapien
gatatagaattcagaatcagcagat

SEQ ID NO: 2322023 - DNA, 25 bp, Homo sapien
ggccagttgaccttctgaccattag

SEQ ID NO: 2322024 - DNA, 25 bp, Homo sapien
tggataaggtgtggggcgacagggc

SEQ ID NO: 2322025 - DNA, 25 bp, Homo sapien
tgtggataaggtgtggggcgacagg

SEQ ID NO: 2322026 - DNA, 25 bp, Homo sapien
ctgtggataaggtgtggggcgacag

SEQ ID NO: 2322027 - DNA, 25 bp, Homo sapien
gataaggtgtggggcgacagggcag

SEQ ID NO: 2322028 - DNA, 25 bp, Homo sapien
ttttatctgctatctgctgcccttc

SEQ ID NO: 2322029 - DNA, 25 bp, Homo sapien
aacttttatctgctatctgctgccc

SEQ ID NO: 2322030 - DNA, 25 bp, Homo sapien
cataacttttatctgctatctgctg

SEQ ID NO: 2322031 - DNA, 25 bp, Homo sapien
tttatctgctatctgctgcccttcc

SEQ ID NO: 2322032 - DNA, 25 bp, Homo sapien
gcagagggacgctccttagaggaca

SEQ ID NO: 2322033 - DNA, 25 bp, Homo sapien
gggacgctccttagaggacagctgc

SEQ ID NO: 2322034 - DNA, 25 bp, Homo sapien
tagaggacagctgccatcacccagc

SEQ ID NO: 2322035 - DNA, 25 bp, Homo sapien
aaggcagagggacgctccttagagg

SEQ ID NO: 2322036 - DNA, 25 bp, Homo sapien
agaggagcaagagagccagaaccat

SEQ ID NO: 2322037 - DNA, 25 bp, Homo sapien
agagaggagcaagagagccagaacc

SEQ ID NO: 2322038 - DNA, 25 bp, Homo sapien
tgagagaggagcaagagagccagaa

SEQ ID NO: 2322039 - DNA, 25 bp, Homo sapien
ctgagagaggagcaagagagccaga

SEQ ID NO: 2322040 - DNA, 25 bp, Homo sapien
tcatgctattagtttgctcccctat

SEQ ID NO: 2322041 - DNA, 25 bp, Homo sapien
gcctggagtccgtagttctgtagct

SEQ ID NO: 2322042 - DNA, 25 bp, Homo sapien
tatgtcttctgtagagtcttcccca

SEQ ID NO: 2322043 - DNA, 25 bp, Homo sapien
tctgtagctctgactgctccagatc

SEQ ID NO: 2322044 - DNA, 25 bp, Homo sapien
gacttcacatcaaacaccgagtgat

SEQ ID NO: 2322045 - DNA, 25 bp, Homo sapien
ccgcttgattcacgaggacactggg

SEQ ID NO: 2322046 - DNA, 25 bp, Homo sapien
tgagggctttaagatgatctccgct

SEQ ID NO: 2322047 - DNA, 25 bp, Homo sapien
tcaaacaccgagtgatgaatcctgt

SEQ ID NO: 2322048 - DNA, 25 bp, Homo sapien
ctgacggttggcatgagaccatcgg

SEQ ID NO: 2322049 - DNA, 25 bp, Homo sapien
cagtctctggataacgttgggtcct

SEQ ID NO: 2322050 - DNA, 25 bp, Homo sapien
gcaggatccaggcttctgatctcag

SEQ ID NO: 2322051 - DNA, 25 bp, Homo sapien
aacgttgggtcctgacggttggcat

SEQ ID NO: 2322052 - DNA, 25 bp, Homo sapien
tcaagggtccaagcctctagggcca

SEQ ID NO: 2322053 - DNA, 25 bp, Homo sapien
gaaagtttcaagttacgcagctgag

SEQ ID NO: 2322054 - DNA, 25 bp, Homo sapien
cattgtcaccgtgggtggccactca

SEQ ID NO: 2322055 - DNA, 25 bp, Homo sapien
cacaggatctgtcgttggtgaccaa

SEQ ID NO: 2322056 - DNA, 25 bp, Homo sapien
cagagaattttgttactctgacctt

SEQ ID NO: 2322057 - DNA, 25 bp, Homo sapien
cactaggttctccaaggctggccaa

SEQ ID NO: 2322058 - DNA, 25 bp, Homo sapien
gccatgctccactaggttctccaag

SEQ ID NO: 2322059 - DNA, 25 bp, Homo sapien
ggcggatgccatgctccactaggtt

SEQ ID NO: 2322060 - DNA, 25 bp, Homo sapien
ttcctggcggatgccatgctccact

SEQ ID NO: 2322061 - DNA, 25 bp, Homo sapien
gcagagggacgctccttagaggaca

SEQ ID NO: 2322062 - DNA, 25 bp, Homo sapien
tagaggacagctgccatcacccagc

SEQ ID NO: 2322063 - DNA, 25 bp, Homo sapien
gggacgctccttagaggacagctgc

SEQ ID NO: 2322064 - DNA, 25 bp, Homo sapien
aaggcagagggacgctccttagagg

SEQ ID NO: 2322065 - DNA, 25 bp, Homo sapien
ccgcttgattcacgaggacactggg

SEQ ID NO: 2322066 - DNA, 25 bp, Homo sapien
tcaaacaccgagtgatgaatcctgt

SEQ ID NO: 2322067 - DNA, 25 bp, Homo sapien
tgagggctttaagatgatctccgct

SEQ ID NO: 2322068 - DNA, 25 bp, Homo sapien
gacttcacatcaaacaccgagtgat

SEQ ID NO: 2322069 - DNA, 25 bp, Homo sapien
gagcccagtctctggataacgttgg

SEQ ID NO: 2322070 - DNA, 25 bp, Homo sapien
aaagcagaagtcctagagtggttgt

SEQ ID NO: 2322071 - DNA, 25 bp, Homo sapien
gggcttgagctttctgttttccaaa

SEQ ID NO: 2322072 - DNA, 25 bp, Homo sapien
gagtccaggctgtggttagagccca

SEQ ID NO: 2322073 - DNA, 25 bp, Homo sapien
tggggtttgcagttgcatgcatgaa

SEQ ID NO: 2322074 - DNA, 25 bp, Homo sapien
agcttggggtttgcagttgcatgca

SEQ ID NO: 2322075 - DNA, 25 bp, Homo sapien
gcttggggtttgcagttgcatgcat

SEQ ID NO: 2322076 - DNA, 25 bp, Homo sapien
ggtttgcagttgcatgcatgaacac

SEQ ID NO: 2322077 - DNA, 25 bp, Homo sapien
tggactctccctgtgggtgttccac

SEQ ID NO: 2322078 - DNA, 25 bp, Homo sapien
aggttggactctccctgtgggtgtt

SEQ ID NO: 2322079 - DNA, 25 bp, Homo sapien
gtgaggttggactctccctgtgggt

SEQ ID NO: 2322080 - DNA, 25 bp, Homo sapien
gactctccctgtgggtgttccacat

SEQ ID NO: 2322081 - DNA, 25 bp, Homo sapien
cgatgcccacgtcgtgactgcaggg

SEQ ID NO: 2322082 - DNA, 25 bp, Homo sapien
tgctggagagagtggccattgggat

SEQ ID NO: 2322083 - DNA, 25 bp, Homo sapien
caggccgatgcccacgtcgtgactg

SEQ ID NO: 2322084 - DNA, 25 bp, Homo sapien
ccttcttggaggatccgtgcaggga

SEQ ID NO: 2322085 - DNA, 25 bp, Homo sapien
tgtgcctcgattgttttacttaaaa

SEQ ID NO: 2322086 - DNA, 25 bp, Homo sapien
cacaagcataacatgcattgtaccc

SEQ ID NO: 2322087 - DNA, 25 bp, Homo sapien
cttttagggtatccaccacaagcat

SEQ ID NO: 2322088 - DNA, 25 bp, Homo sapien
ttagcactcacattatgagtgagaa

SEQ ID NO: 2322089 - DNA, 25 bp, Homo sapien
gagggatggggtttttcctgcattc

SEQ ID NO: 2322090 - DNA, 25 bp, Homo sapien
tctcatccgggaagtagctgtcact

SEQ ID NO: 2322091 - DNA, 25 bp, Homo sapien
ccggcaggtccaggctatggggagc

SEQ ID NO: 2322092 - DNA, 25 bp, Homo sapien
tccgggaagtagctgtcactgctga

SEQ ID NO: 2322093 - DNA, 25 bp, Homo sapien
ctggcttcacggccgcccttctcat

SEQ ID NO: 2322094 - DNA, 25 bp, Homo sapien
ctattgggatgaagggagggttgga

SEQ ID NO: 2322095 - DNA, 25 bp, Homo sapien
tattgggatgaagggagggttggaa

SEQ ID NO: 2322096 - DNA, 25 bp, Homo sapien
attgggatgaagggagggttggaag

SEQ ID NO: 2322097 - DNA, 25 bp, Homo sapien
tgcggtgaccccctccgaggggcca

SEQ ID NO: 2322098 - DNA, 25 bp, Homo sapien
gcccaggtgctgtacgtttcaaaag

SEQ ID NO: 2322099 - DNA, 25 bp, Homo sapien
cagttgacgcatatcaccaggaggt

SEQ ID NO: 2322100 - DNA, 25 bp, Homo sapien
tagggcagccagcacatgacaaaga

SEQ ID NO: 2322101 - DNA, 25 bp, Homo sapien
ttgaagaggtcaagcagctcggtcc

SEQ ID NO: 2322102 - DNA, 25 bp, Homo sapien
agaggaggcgcatgtgcccgccttg

SEQ ID NO: 2322103 - DNA, 25 bp, Homo sapien
tggtccttaggaaggtaatggacta

SEQ ID NO: 2322104 - DNA, 25 bp, Homo sapien
gaagaggaggcgcatgtgcccgcct

SEQ ID NO: 2322105 - DNA, 25 bp, Homo sapien
aagaggaggcgcatgtgcccgcctt

SEQ ID NO: 2322106 - DNA, 25 bp, Homo sapien
caaatggtgtgcctgaaagctcagg

SEQ ID NO: 2322107 - DNA, 25 bp, Homo sapien
agcaaatggtgtgcctgaaagctca

SEQ ID NO: 2322108 - DNA, 25 bp, Homo sapien
ttggaagcaaatggtgtgcctgaaa

SEQ ID NO: 2322109 - DNA, 25 bp, Homo sapien
ggaagcaaatggtgtgcctgaaagc

SEQ ID NO: 2322110 - DNA, 25 bp, Homo sapien
tgtgccttttccttcactgttggag

SEQ ID NO: 2322111 - DNA, 25 bp, Homo sapien
ctgtgccttttccttcactgttgga

SEQ ID NO: 2322112 - DNA, 25 bp, Homo sapien
ctgttggaggagtctggcctctacc

SEQ ID NO: 2322113 - DNA, 25 bp, Homo sapien
tcactgttggaggagtctggcctct

SEQ ID NO: 2322114 - DNA, 25 bp, Homo sapien
tgctctctatcgctcctgatcctgt

SEQ ID NO: 2322115 - DNA, 25 bp, Homo sapien
tctgcattgctccttagacacaagg

SEQ ID NO: 2322116 - DNA, 25 bp, Homo sapien
ttgaccacgagtgctttgaccctcc

SEQ ID NO: 2322117 - DNA, 25 bp, Homo sapien
gacaaatagtacaacactgagggcc

SEQ ID NO: 2322118 - DNA, 25 bp, Homo sapien
tctggcctcttgtccccataacctg

SEQ ID NO: 2322119 - DNA, 25 bp, Homo sapien
tgcacagctagggaacgtcctgctg

SEQ ID NO: 2322120 - DNA, 25 bp, Homo sapien
ataggatgcacagctagggaacgtc

SEQ ID NO: 2322121 - DNA, 25 bp, Homo sapien
gatgcacagctagggaacgtcctgc

SEQ ID NO: 2322122 - DNA, 25 bp, Homo sapien
ggaagtttcctagatccgaagctgg

SEQ ID NO: 2322123 - DNA, 25 bp, Homo sapien
ccaagggctgctcccggaatgacat

SEQ ID NO: 2322124 - DNA, 25 bp, Homo sapien
tgggacaactcctcttgcttgtggg

SEQ ID NO: 2322125 - DNA, 25 bp, Homo sapien
tctgccctgtgacggaattgagaag

SEQ ID NO: 2322126 - DNA, 25 bp, Homo sapien
gaggcagtgatatgggcatcagatc

SEQ ID NO: 2322127 - DNA, 25 bp, Homo sapien
agtctttttcaatgtgaattctgca

SEQ ID NO: 2322128 - DNA, 25 bp, Homo sapien
gagatgtaaaatttggtttccttca

SEQ ID NO: 2322129 - DNA, 25 bp, Homo sapien
gaattctgcattgataggctaagcc

SEQ ID NO: 2322130 - DNA, 25 bp, Homo sapien
tgatacatgcgtgaatccacagagg

SEQ ID NO: 2322131 - DNA, 25 bp, Homo sapien
gagacagacctcaagaagttaggga

SEQ ID NO: 2322132 - DNA, 25 bp, Homo sapien
gataactaatcttgggagcgtggcc

SEQ ID NO: 2322133 - DNA, 25 bp, Homo sapien
gagtgatgtccatttggccccacag

SEQ ID NO: 2322134 - DNA, 25 bp, Homo sapien
cccaccttgaatagctaaagtctct

SEQ ID NO: 2322135 - DNA, 25 bp, Homo sapien
ggcagggtgcacagcattagtttca

SEQ ID NO: 2322136 - DNA, 25 bp, Homo sapien
cagagaagagttgttgacgtctaac

SEQ ID NO: 2322137 - DNA, 25 bp, Homo sapien
cctaaatcctgcaccaaatgagtca

SEQ ID NO: 2322138 - DNA, 25 bp, Homo sapien
ggaggtgggataagggtcaggccca

SEQ ID NO: 2322139 - DNA, 25 bp, Homo sapien
gactccatggagttcccgtagtcca

SEQ ID NO: 2322140 - DNA, 25 bp, Homo sapien
atgactccatggagttcccgtagtc

SEQ ID NO: 2322141 - DNA, 25 bp, Homo sapien
actccatggagttcccgtagtccat

SEQ ID NO: 2322142 - DNA, 25 bp, Homo sapien
tccatggagttcccgtagtccatgg

SEQ ID NO: 2322143 - DNA, 25 bp, Homo sapien
gcacccgctaggaagctctgctgaa

SEQ ID NO: 2322144 - DNA, 25 bp, Homo sapien
tggtaatacttgtgtggcacccggg

SEQ ID NO: 2322145 - DNA, 25 bp, Homo sapien
gcattaaaccaaatatgaggccatt

SEQ ID NO: 2322146 - DNA, 25 bp, Homo sapien
gagattagtatcctggcactccagt

SEQ ID NO: 2322147 - DNA, 25 bp, Homo sapien
tgttgagactcttcattgctgactg

SEQ ID NO: 2322148 - DNA, 25 bp, Homo sapien
tgtacagtggccagtttaaaggtcc

SEQ ID NO: 2322149 - DNA, 25 bp, Homo sapien
gaccattagatgaagggacttgtac

SEQ ID NO: 2322150 - DNA, 25 bp, Homo sapien
tcctcatcaggaaagcagtgttgag

SEQ ID NO: 2322151 - DNA, 25 bp, Homo sapien
atggagtgatggcccgggacgtccg

SEQ ID NO: 2322152 - DNA, 25 bp, Homo sapien
agtgatggcccgggacgtccggcct

SEQ ID NO: 2322153 - DNA, 25 bp, Homo sapien
ttatggagtgatggcccgggacgtc

SEQ ID NO: 2322154 - DNA, 25 bp, Homo sapien
ggagtgatggcccgggacgtccggc

SEQ ID NO: 2322155 - DNA, 25 bp, Homo sapien
ttcaagcatgtgcatggtatttggc

SEQ ID NO: 2322156 - DNA, 25 bp, Homo sapien
accaccttatatgttcctcagtagc

SEQ ID NO: 2322157 - DNA, 25 bp, Homo sapien
ttattgagaggttgaagacacagca

SEQ ID NO: 2322158 - DNA, 25 bp, Homo sapien
agtggctctggtaatgaagtataag

SEQ ID NO: 2322159 - DNA, 25 bp, Homo sapien
gcggcgagccgcgcggcggatggag

SEQ ID NO: 2322160 - DNA, 25 bp, Homo sapien
agccgcgcggcggatggagagtctg

SEQ ID NO: 2322161 - DNA, 25 bp, Homo sapien
ggcggatggagagtctggccgcggc

SEQ ID NO: 2322162 - DNA, 25 bp, Homo sapien
gggcctttgtgtgaagcggcggcgg

SEQ ID NO: 2322163 - DNA, 25 bp, Homo sapien
gagtgccaagtatgggctggacacc

SEQ ID NO: 2322164 - DNA, 25 bp, Homo sapien
cttttaagatgattgcgggtgggac

SEQ ID NO: 2322165 - DNA, 25 bp, Homo sapien
tccagcccaggatagttagagtatc

SEQ ID NO: 2322166 - DNA, 25 bp, Homo sapien
gctggacaccgtttggagccacaaa

SEQ ID NO: 2322167 - DNA, 25 bp, Homo sapien
ggtgccttatgtgacacgagccaga

SEQ ID NO: 2322168 - DNA, 25 bp, Homo sapien
caagatgggctcagatggatgccta

SEQ ID NO: 2322169 - DNA, 25 bp, Homo sapien
gatgcctacgtaaaaatggttccta

SEQ ID NO: 2322170 - DNA, 25 bp, Homo sapien
gattcatgccaacaccaactcgtag

SEQ ID NO: 2322171 - DNA, 25 bp, Homo sapien
gaggaggactcatattctcggtgtc

SEQ ID NO: 2322172 - DNA, 25 bp, Homo sapien
tatggattagggagcattattgccc

SEQ ID NO: 2322173 - DNA, 25 bp, Homo sapien
tatctttacgtggactggcttggtg

SEQ ID NO: 2322174 - DNA, 25 bp, Homo sapien
ggtgtcctgctatcacacagaacaa

SEQ ID NO: 2322175 - DNA, 25 bp, Homo sapien
gtggcctctctgctaatcatcattt

SEQ ID NO: 2322176 - DNA, 25 bp, Homo sapien
tactctactgggatgactgtgggaa

SEQ ID NO: 2322177 - DNA, 25 bp, Homo sapien
tctttcggctgggttagttgtccta

SEQ ID NO: 2322178 - DNA, 25 bp, Homo sapien
tgtctctgatgcttgtactgctcta

SEQ ID NO: 2322179 - DNA, 25 bp, Homo sapien
tatttgtggagtagtgaatgcaaga

SEQ ID NO: 2322180 - DNA, 25 bp, Homo sapien
caagattaacaattggagtttgaag

SEQ ID NO: 2322181 - DNA, 25 bp, Homo sapien
cctactagttaagacaggtgagact

SEQ ID NO: 2322182 - DNA, 25 bp, Homo sapien
gtgagactgacatgtacaaatatga

SEQ ID NO: 2322183 - DNA, 25 bp, Homo sapien
aacaaatatcacagctcagcctggg

SEQ ID NO: 2322184 - DNA, 25 bp, Homo sapien
gaaacaaatatcacagctcagcctg

SEQ ID NO: 2322185 - DNA, 25 bp, Homo sapien
acaaatatcacagctcagcctgggc

SEQ ID NO: 2322186 - DNA, 25 bp, Homo sapien
aaggaaacaaatatcacagctcagc

SEQ ID NO: 2322187 - DNA, 25 bp, Homo sapien
taacgtgggtctatacagcacaaaa

SEQ ID NO: 2322188 - DNA, 25 bp, Homo sapien
caagtacagtgtcattgtgatccgg

SEQ ID NO: 2322189 - DNA, 25 bp, Homo sapien
gaagtcagcctaagacagctccagt

SEQ ID NO: 2322190 - DNA, 25 bp, Homo sapien
tgaatgacacctatgttaacgtggg

SEQ ID NO: 2322191 - DNA, 25 bp, Homo sapien
ttggcgcccacgtacccacgtgagc

SEQ ID NO: 2322192 - DNA, 25 bp, Homo sapien
agccggccctcttggcgcccacgta

SEQ ID NO: 2322193 - DNA, 25 bp, Homo sapien
cgggcggggcgaggtcgttctgtgc

SEQ ID NO: 2322194 - DNA, 25 bp, Homo sapien
cgcccacgccggatgcacagccggc

SEQ ID NO: 2322195 - DNA, 25 bp, Homo sapien
gcgggcggagggcgtgggcagagcc

SEQ ID NO: 2322196 - DNA, 25 bp, Homo sapien
tggcgggcggagggcgtgggcagag

SEQ ID NO: 2322197 - DNA, 25 bp, Homo sapien
ctggcgggcggagggcgtgggcaga

SEQ ID NO: 2322198 - DNA, 25 bp, Homo sapien
ggcgggcggagggcgtgggcagagc

SEQ ID NO: 2322199 - DNA, 25 bp, Homo sapien
ccccgcaggacgcacagggagcgag

SEQ ID NO: 2322200 - DNA, 25 bp, Homo sapien
tccccggctgcgcttgccgcctctc

SEQ ID NO: 2322201 - DNA, 25 bp, Homo sapien
cgcacagggagcgaggcccggagct

SEQ ID NO: 2322202 - DNA, 25 bp, Homo sapien
cctccgcgcctctgtctgtgcctct

SEQ ID NO: 2322203 - DNA, 25 bp, Homo sapien
ggacggccggagatcacccgggctg

SEQ ID NO: 2322204 - DNA, 25 bp, Homo sapien
ggctgcccttctcggtgcccggcgc

SEQ ID NO: 2322205 - DNA, 25 bp, Homo sapien
ctcttccccgcgcacgatgccgtgt

SEQ ID NO: 2322206 - DNA, 25 bp, Homo sapien
agatcacccgggctgcccttctcgg

SEQ ID NO: 2322207 - DNA, 25 bp, Homo sapien
ttgagtctgggctgcagggtccggc

SEQ ID NO: 2322208 - DNA, 25 bp, Homo sapien
gtccggcgggcgctgtcccctccgc

SEQ ID NO: 2322209 - DNA, 25 bp, Homo sapien
tccgcccggcggctgctcggctgtg

SEQ ID NO: 2322210 - DNA, 25 bp, Homo sapien
gctgtgggggaaggcgctctgtgca

SEQ ID NO: 2322211 - DNA, 25 bp, Homo sapien
ctggtgcttggaggctcccacattc

SEQ ID NO: 2322212 - DNA, 25 bp, Homo sapien
cccctggtgcttggaggctcccaca

SEQ ID NO: 2322213 - DNA, 25 bp, Homo sapien
gctcccacattctttgcagggggct

SEQ ID NO: 2322214 - DNA, 25 bp, Homo sapien
ggctcccacattctttgcagggggc

SEQ ID NO: 2322215 - DNA, 25 bp, Homo sapien
cactgatgccagctcgagctccagg

SEQ ID NO: 2322216 - DNA, 25 bp, Homo sapien
ccgcactgatgccagctcgagctcc

SEQ ID NO: 2322217 - DNA, 25 bp, Homo sapien
cttccgcactgatgccagctcgagc

SEQ ID NO: 2322218 - DNA, 25 bp, Homo sapien
ttccgcactgatgccagctcgagct

SEQ ID NO: 2322219 - DNA, 25 bp, Homo sapien
gggtacccgcagtctcagagatctt

SEQ ID NO: 2322220 - DNA, 25 bp, Homo sapien
cactggttgactgaagagccctgga

SEQ ID NO: 2322221 - DNA, 25 bp, Homo sapien
tctcatagtaggaaaggaggttggc

SEQ ID NO: 2322222 - DNA, 25 bp, Homo sapien
ccctccctgctggatgaaggtctca

SEQ ID NO: 2322223 - DNA, 25 bp, Homo sapien
cctcagggactcctccccctgcagg

SEQ ID NO: 2322224 - DNA, 25 bp, Homo sapien
cccagccccagtcccctcagggact

SEQ ID NO: 2322225 - DNA, 25 bp, Homo sapien
ctcagggactcctccccctgcaggg

SEQ ID NO: 2322226 - DNA, 25 bp, Homo sapien
agccccagtcccctcagggactcct

SEQ ID NO: 2322227 - DNA, 25 bp, Homo sapien
accatctctggctccagtcggtctg

SEQ ID NO: 2322228 - DNA, 25 bp, Homo sapien
tctctggctccagtcggtctggacc

SEQ ID NO: 2322229 - DNA, 25 bp, Homo sapien
tctggctccagtcggtctggaccac

SEQ ID NO: 2322230 - DNA, 25 bp, Homo sapien
catctctggctccagtcggtctgga

SEQ ID NO: 2322231 - DNA, 25 bp, Homo sapien
tcagctttagcagggatgtgacctc

SEQ ID NO: 2322232 - DNA, 25 bp, Homo sapien
gatgctgtatttgcggatctcctct

SEQ ID NO: 2322233 - DNA, 25 bp, Homo sapien
ctcccgccgcttagagtcgaaacgg

SEQ ID NO: 2322234 - DNA, 25 bp, Homo sapien
gtcgaaacggccatagatgatgctg

SEQ ID NO: 2322235 - DNA, 25 bp, Homo sapien
gataatgaaagatagtcggagactg

SEQ ID NO: 2322236 - DNA, 25 bp, Homo sapien
agtcaagggcaatcctaggaggcct

SEQ ID NO: 2322237 - DNA, 25 bp, Homo sapien
aaactcgcagaggtaagcggctgga

SEQ ID NO: 2322238 - DNA, 25 bp, Homo sapien
gggtcctggtcaagagataatgaaa

SEQ ID NO: 2322239 - DNA, 25 bp, Homo sapien
tggttttgacactacatgggagctt

SEQ ID NO: 2322240 - DNA, 25 bp, Homo sapien
ggcccatccatcagacgcttgcttt

SEQ ID NO: 2322241 - DNA, 25 bp, Homo sapien
ggtcctgagtgacaaggagctgaac

SEQ ID NO: 2322242 - DNA, 25 bp, Homo sapien
ccattggacaaatgaggcccatcca

SEQ ID NO: 2322243 - DNA, 25 bp, Homo sapien
tctccgtaataagagcgtgttgtcc

SEQ ID NO: 2322244 - DNA, 25 bp, Homo sapien
tcaaggaggacaagtaggtgctctc

SEQ ID NO: 2322245 - DNA, 25 bp, Homo sapien
cgtgttgtccctcatgcagaactgg

SEQ ID NO: 2322246 - DNA, 25 bp, Homo sapien
gctacttggcgggacaaagagaaga

SEQ ID NO: 2322247 - DNA, 25 bp, Homo sapien
agcttcttcagtggagggcctccca

SEQ ID NO: 2322248 - DNA, 25 bp, Homo sapien
ttcagcttcttcagtggagggcctc

SEQ ID NO: 2322249 - DNA, 25 bp, Homo sapien
ttcttcagtggagggcctcccagtt

SEQ ID NO: 2322250 - DNA, 25 bp, Homo sapien
tcagtggagggcctcccagttcttc

SEQ ID NO: 2322251 - DNA, 25 bp, Homo sapien
gctggatttcagggtgactctgttc

SEQ ID NO: 2322252 - DNA, 25 bp, Homo sapien
gcggtatgggggtacataggactca

SEQ ID NO: 2322253 - DNA, 25 bp, Homo sapien
gggtacataggactcagggcctggg

SEQ ID NO: 2322254 - DNA, 25 bp, Homo sapien
tggatttcagggtgactctgttctc

SEQ ID NO: 2322255 - DNA, 25 bp, Homo sapien
gtccatccagactctccccagacag

SEQ ID NO: 2322256 - DNA, 25 bp, Homo sapien
gcaaatgtccatccagactctcccc

SEQ ID NO: 2322257 - DNA, 25 bp, Homo sapien
tccatccagactctccccagacagg

SEQ ID NO: 2322258 - DNA, 25 bp, Homo sapien
cctgcaaatgtccatccagactctc

SEQ ID NO: 2322259 - DNA, 25 bp, Homo sapien
tggcaatgccagaggcaggtcagca

SEQ ID NO: 2322260 - DNA, 25 bp, Homo sapien
agaggcaggtcagcagggggcggcg

SEQ ID NO: 2322261 - DNA, 25 bp, Homo sapien
ctggcaatgccagaggcaggtcagc

SEQ ID NO: 2322262 - DNA, 25 bp, Homo sapien
gccagaggcaggtcagcagggggcg

SEQ ID NO: 2322263 - DNA, 25 bp, Homo sapien
gatgtgtcggctccatagcccatgg

SEQ ID NO: 2322264 - DNA, 25 bp, Homo sapien
tgcgagaggtggcttcgcaggcaca

SEQ ID NO: 2322265 - DNA, 25 bp, Homo sapien
gtcgtgggagacgaggcgggcgagc

SEQ ID NO: 2322266 - DNA, 25 bp, Homo sapien
gcagcccctcgtccatcagtgtctg

SEQ ID NO: 2322267 - DNA, 25 bp, Homo sapien
tgccctctctgacgactatatccct

SEQ ID NO: 2322268 - DNA, 25 bp, Homo sapien
cagatctacactaggaccagacttt

SEQ ID NO: 2322269 - DNA, 25 bp, Homo sapien
tttcacagatctacactaggaccag

SEQ ID NO: 2322270 - DNA, 25 bp, Homo sapien
agttcccctttcacagatctacact

SEQ ID NO: 2322271 - DNA, 25 bp, Homo sapien
ctccaccagcgcgggatggggtcct

SEQ ID NO: 2322272 - DNA, 25 bp, Homo sapien
ccaccagcgcgggatggggtcctgg

SEQ ID NO: 2322273 - DNA, 25 bp, Homo sapien
caccagcgcgggatggggtcctggg

SEQ ID NO: 2322274 - DNA, 25 bp, Homo sapien
cctccaccagcgcgggatggggtcc

SEQ ID NO: 2322275 - DNA, 25 bp, Homo sapien
gaagccccacagtcttatgcccatg

SEQ ID NO: 2322276 - DNA, 25 bp, Homo sapien
atgccctggaggcagagtccttgcc

SEQ ID NO: 2322277 - DNA, 25 bp, Homo sapien
tccagggttgtgactagattccggg

SEQ ID NO: 2322278 - DNA, 25 bp, Homo sapien
ggtcctgggtctgaagacaccagtc

SEQ ID NO: 2322279 - DNA, 25 bp, Homo sapien
ccttgtccaaactgagtccaactgc

SEQ ID NO: 2322280 - DNA, 25 bp, Homo sapien
agtgttcccaggcccccaattctgg

SEQ ID NO: 2322281 - DNA, 25 bp, Homo sapien
aatgttgccacttttagctggacct

SEQ ID NO: 2322282 - DNA, 25 bp, Homo sapien
caattctgggggcaaatgttgccac

SEQ ID NO: 2322283 - DNA, 25 bp, Homo sapien
ttgccacttttagctggaccttccc

SEQ ID NO: 2322284 - DNA, 25 bp, Homo sapien
cacccaccgcccctatgtagggcag

SEQ ID NO: 2322285 - DNA, 25 bp, Homo sapien
tgtagggcagggaagaaattgcaaa

SEQ ID NO: 2322286 - DNA, 25 bp, Homo sapien
aaggacttgggggatagatgggaat

SEQ ID NO: 2322287 - DNA, 25 bp, Homo sapien
cagtgaagggatcccacacccaccg

SEQ ID NO: 2322288 - DNA, 25 bp, Homo sapien
gaaagacgctctaactgctcagata

SEQ ID NO: 2322289 - DNA, 25 bp, Homo sapien
tgctcagataggtgctgcggtccag

SEQ ID NO: 2322290 - DNA, 25 bp, Homo sapien
tctgaaaagaaagacgctctaactg

SEQ ID NO: 2322291 - DNA, 25 bp, Homo sapien
tggaggagaccctgagtccaaccca

SEQ ID NO: 2322292 - DNA, 25 bp, Homo sapien
cggataggcaggaacatacagacac

SEQ ID NO: 2322293 - DNA, 25 bp, Homo sapien
tacagacacatttacactagaggcc

SEQ ID NO: 2322294 - DNA, 25 bp, Homo sapien
ggtccaagtggctgtgacatctacg

SEQ ID NO: 2322295 - DNA, 25 bp, Homo sapien
gactatgcaaaagtacaagggctga

SEQ ID NO: 2322296 - DNA, 25 bp, Homo sapien
ccacaaagggaaggctctttgccca

SEQ ID NO: 2322297 - DNA, 25 bp, Homo sapien
gctgacattgcctaccgctttaaaa

SEQ ID NO: 2322298 - DNA, 25 bp, Homo sapien
caacagggcatcttcggtttcgtac

SEQ ID NO: 2322299 - DNA, 25 bp, Homo sapien
gatgagaagatcgaagcccacaaag

SEQ ID NO: 2322300 - DNA, 25 bp, Homo sapien
ggtccaggcctcagtactcccctcc

SEQ ID NO: 2322301 - DNA, 25 bp, Homo sapien
tgccctccactaaaggttcctgttc

SEQ ID NO: 2322302 - DNA, 25 bp, Homo sapien
aggaggtgaaggagtgcccctctgc

SEQ ID NO: 2322303 - DNA, 25 bp, Homo sapien
gagggcagtggatccttgttaaacc

SEQ ID NO: 2322304 - DNA, 25 bp, Homo sapien
tctggtcctgctacttctctccttc

SEQ ID NO: 2322305 - DNA, 25 bp, Homo sapien
cgcctccggctgcaaaaatgcacaa

SEQ ID NO: 2322306 - DNA, 25 bp, Homo sapien
agaggtagagttccgagccccttgg

SEQ ID NO: 2322307 - DNA, 25 bp, Homo sapien
tttccttcggcaaagcgcaccaggg

SEQ ID NO: 2322308 - DNA, 25 bp, Homo sapien
tcgatagccgccgcgaccagagctg

SEQ ID NO: 2322309 - DNA, 25 bp, Homo sapien
gtcgatagccgccgcgaccagagct

SEQ ID NO: 2322310 - DNA, 25 bp, Homo sapien
gatagccgccgcgaccagagctgag

SEQ ID NO: 2322311 - DNA, 25 bp, Homo sapien
tagccgccgcgaccagagctgagag

SEQ ID NO: 2322312 - DNA, 25 bp, Homo sapien
aatagaactcctttagagccctggg

SEQ ID NO: 2322313 - DNA, 25 bp, Homo sapien
tctattcctcccagaagcggctgca

SEQ ID NO: 2322314 - DNA, 25 bp, Homo sapien
gctgtgcggcatctggaggatattc

SEQ ID NO: 2322315 - DNA, 25 bp, Homo sapien
tgacaggagttataggcagaagccg

SEQ ID NO: 2322316 - DNA, 25 bp, Homo sapien
gcactaccaagtcaggggccttcct

SEQ ID NO: 2322317 - DNA, 25 bp, Homo sapien
gatgccccaagagcaatgagcccac

SEQ ID NO: 2322318 - DNA, 25 bp, Homo sapien
ccaagagcaatgagcccacacgcag

SEQ ID NO: 2322319 - DNA, 25 bp, Homo sapien
gccttcctgcagtaccattcagctg

SEQ ID NO: 2322320 - DNA, 25 bp, Homo sapien
ccagggagggtttatattggtgcct

SEQ ID NO: 2322321 - DNA, 25 bp, Homo sapien
tcccagggagggtttatattggtgc

SEQ ID NO: 2322322 - DNA, 25 bp, Homo sapien
cagggagggtttatattggtgcctg

SEQ ID NO: 2322323 - DNA, 25 bp, Homo sapien
tgtgaggtcttcccgggaaacacag

SEQ ID NO: 2322324 - DNA, 25 bp, Homo sapien
ttcccgggaaacacagcccgccagc

SEQ ID NO: 2322325 - DNA, 25 bp, Homo sapien
taatgctgagttcattgccccactg

SEQ ID NO: 2322326 - DNA, 25 bp, Homo sapien
gataatgctgagttcattgccccac

SEQ ID NO: 2322327 - DNA, 25 bp, Homo sapien
gagatacaggttatttgatctctgc

SEQ ID NO: 2322328 - DNA, 25 bp, Homo sapien
acaggttatttgatctctgcaggca

SEQ ID NO: 2322329 - DNA, 25 bp, Homo sapien
ccgccagccctttgagatacaggtt

SEQ ID NO: 2322330 - DNA, 25 bp, Homo sapien
gccagccctttgagatacaggttat

SEQ ID NO: 2322331 - DNA, 25 bp, Homo sapien
gcctcgtcagatccgtctgggcagt

SEQ ID NO: 2322332 - DNA, 25 bp, Homo sapien
tcaggggcctcgtcagatccgtctg

SEQ ID NO: 2322333 - DNA, 25 bp, Homo sapien
gggcctcgtcagatccgtctgggca

SEQ ID NO: 2322334 - DNA, 25 bp, Homo sapien
cgtcagatccgtctgggcagtccct

SEQ ID NO: 2322335 - DNA, 25 bp, Homo sapien
gtagcgggaagagcacaggggtggg

SEQ ID NO: 2322336 - DNA, 25 bp, Homo sapien
tatggggctgagcaagtgccagtgg

SEQ ID NO: 2322337 - DNA, 25 bp, Homo sapien
cgggggtagcgggaagagcacaggg

SEQ ID NO: 2322338 - DNA, 25 bp, Homo sapien
gggcttctggtatggggctgagcaa

SEQ ID NO: 2322339 - DNA, 25 bp, Homo sapien
ggcagttatgctcgtttggctggca

SEQ ID NO: 2322340 - DNA, 25 bp, Homo sapien
catcgctgggccttactctgtggac

SEQ ID NO: 2322341 - DNA, 25 bp, Homo sapien
ttgcagaggcgggacatgggaacac

SEQ ID NO: 2322342 - DNA, 25 bp, Homo sapien
gggcccctcatctgagccgtccatg

SEQ ID NO: 2322343 - DNA, 25 bp, Homo sapien
aatggtgctggcagcccaggcgaga

SEQ ID NO: 2322344 - DNA, 25 bp, Homo sapien
cccaggcgagagcagttgccttgga

SEQ ID NO: 2322345 - DNA, 25 bp, Homo sapien
gcccatcgagtgtggggacacaatg

SEQ ID NO: 2322346 - DNA, 25 bp, Homo sapien
tgcagtagcaggtgggcccatcgag

SEQ ID NO: 2322347 - DNA, 25 bp, Homo sapien
ttgcaggagcggttatccggctgca

SEQ ID NO: 2322348 - DNA, 25 bp, Homo sapien
gagccgtctgtgttggtgcatagct

SEQ ID NO: 2322349 - DNA, 25 bp, Homo sapien
ttggccttgcaggagcggttatccg

SEQ ID NO: 2322350 - DNA, 25 bp, Homo sapien
acagccacatatgaaggagccgtct

SEQ ID NO: 2322351 - DNA, 25 bp, Homo sapien
ggagttggctatcaacagcacaggg

SEQ ID NO: 2322352 - DNA, 25 bp, Homo sapien
tgatggtgtgctcatccacgaagcc

SEQ ID NO: 2322353 - DNA, 25 bp, Homo sapien
tacggtctcgttggcatagctgaag

SEQ ID NO: 2322354 - DNA, 25 bp, Homo sapien
tctgccgcgtgctcgtaggtgtgat

SEQ ID NO: 2322355 - DNA, 25 bp, Homo sapien
catgctaaacaattgctgaagtaac

SEQ ID NO: 2322356 - DNA, 25 bp, Homo sapien
catgcttatgtacagcttgcgctac

SEQ ID NO: 2322357 - DNA, 25 bp, Homo sapien
tgatgtgctagttacaggagtttcc

SEQ ID NO: 2322358 - DNA, 25 bp, Homo sapien
gactaagggactatcaggcctgttg

SEQ ID NO: 2322359 - DNA, 25 bp, Homo sapien
atttcctgttgtgatttcgaaaaca

SEQ ID NO: 2322360 - DNA, 25 bp, Homo sapien
ttcctgttgtgatttcgaaaacaca

SEQ ID NO: 2322361 - DNA, 25 bp, Homo sapien
tcctgttgtgatttcgaaaacacac

SEQ ID NO: 2322362 - DNA, 25 bp, Homo sapien
ctgttgtgatttcgaaaacacacac

SEQ ID NO: 2322363 - DNA, 25 bp, Homo sapien
ggattccactcagcccatcttaggg

SEQ ID NO: 2322364 - DNA, 25 bp, Homo sapien
ccttgccgggctctaaaacacatct

SEQ ID NO: 2322365 - DNA, 25 bp, Homo sapien
gcatcccatgggtcagaaaggccaa

SEQ ID NO: 2322366 - DNA, 25 bp, Homo sapien
ggcatttcgacctagatcccaggga

SEQ ID NO: 2322367 - DNA, 25 bp, Homo sapien
tagccgtgttgtgtcacctcgttct

SEQ ID NO: 2322368 - DNA, 25 bp, Homo sapien
ttagccgtgttgtgtcacctcgttc

SEQ ID NO: 2322369 - DNA, 25 bp, Homo sapien
agccgtgttgtgtcacctcgttctc

SEQ ID NO: 2322370 - DNA, 25 bp, Homo sapien
tctggccttgggacactccaagaca

SEQ ID NO: 2322371 - DNA, 25 bp, Homo sapien
gatgtggcctcatgctccttgtttc

SEQ ID NO: 2322372 - DNA, 25 bp, Homo sapien
gaagctctgctaaacgatgtggcct

SEQ ID NO: 2322373 - DNA, 25 bp, Homo sapien
tagtaatcctactcagggatctcgc

SEQ ID NO: 2322374 - DNA, 25 bp, Homo sapien
gaagaggctctggccaaaggccgaa

SEQ ID NO: 2322375 - DNA, 25 bp, Homo sapien
aggctctggccaaaggccgaaaatc

SEQ ID NO: 2322376 - DNA, 25 bp, Homo sapien
cttctgaagaggctctggccaaagg

SEQ ID NO: 2322377 - DNA, 25 bp, Homo sapien
agaggctctggccaaaggccgaaaa

SEQ ID NO: 2322378 - DNA, 25 bp, Homo sapien
gggttgtagagttccaggtctagca

SEQ ID NO: 2322379 - DNA, 25 bp, Homo sapien
aagttgcctgtcagccagtcgatgg

SEQ ID NO: 2322380 - DNA, 25 bp, Homo sapien
caggtctagcaatgtgacacatgtg

SEQ ID NO: 2322381 - DNA, 25 bp, Homo sapien
tgttgcagacaaagatcctatcatc

SEQ ID NO: 2322382 - DNA, 25 bp, Homo sapien
ccaggtccagcgtgatgccatgagg

SEQ ID NO: 2322383 - DNA, 25 bp, Homo sapien
catgtcacagcgttccacctttggg

SEQ ID NO: 2322384 - DNA, 25 bp, Homo sapien
tcgacgagcttggtgcggttctgcc

SEQ ID NO: 2322385 - DNA, 25 bp, Homo sapien
tctgcccagtagacaaggcggctga

SEQ ID NO: 2322386 - DNA, 25 bp, Homo sapien
cagaaggccctggatcatggttccc

SEQ ID NO: 2322387 - DNA, 25 bp, Homo sapien
agaaggccctggatcatggttcccc

SEQ ID NO: 2322388 - DNA, 25 bp, Homo sapien
tcccctacagaggcttcccccctca

SEQ ID NO: 2322389 - DNA, 25 bp, Homo sapien
tcagagaacggttcccctacagagg

SEQ ID NO: 2322390 - DNA, 25 bp, Homo sapien
gcttatctgcggtggccaactgtcc

SEQ ID NO: 2322391 - DNA, 25 bp, Homo sapien
tatcacccggctttgtaaacacagg

SEQ ID NO: 2322392 - DNA, 25 bp, Homo sapien
gttatgagggctaagaggacacact

SEQ ID NO: 2322393 - DNA, 25 bp, Homo sapien
tctgctgaaagggaactgaaccacc

SEQ ID NO: 2322394 - DNA, 25 bp, Homo sapien
cattggcattgtccgagttggtggc

SEQ ID NO: 2322395 - DNA, 25 bp, Homo sapien
taattctcaaacacagtcaggccgt

SEQ ID NO: 2322396 - DNA, 25 bp, Homo sapien
tgttaaagcggttcacacggatcac

SEQ ID NO: 2322397 - DNA, 25 bp, Homo sapien
gatcacactcgtcttctgctgggca

SEQ ID NO: 2322398 - DNA, 25 bp, Homo sapien
tggtcgttttcacaggcatggctcc

SEQ ID NO: 2322399 - DNA, 25 bp, Homo sapien
tcttgcatgacttcccgtcactgcc

SEQ ID NO: 2322400 - DNA, 25 bp, Homo sapien
caggtccgcgccttgtggctgttgg

SEQ ID NO: 2322401 - DNA, 25 bp, Homo sapien
aggctgaagccggaacggcagcggc

SEQ ID NO: 2322402 - DNA, 25 bp, Homo sapien
gggatcatgtgctcatccgggacct

SEQ ID NO: 2322403 - DNA, 25 bp, Homo sapien
acgaggaacagctcatgctccggct

SEQ ID NO: 2322404 - DNA, 25 bp, Homo sapien
caaagtagatgaagccggtctcagc

SEQ ID NO: 2322405 - DNA, 25 bp, Homo sapien
cttcaggatggtctcccgctcagtg

SEQ ID NO: 2322406 - DNA, 25 bp, Homo sapien
gtggatccaccacaatagccctggg

SEQ ID NO: 2322407 - DNA, 25 bp, Homo sapien
agtcttgcgggtctgagcagctttc

SEQ ID NO: 2322408 - DNA, 25 bp, Homo sapien
tttgccctcgattaaagtcttgcgg

SEQ ID NO: 2322409 - DNA, 25 bp, Homo sapien
tctttttgggcccatcgtccgtcca

SEQ ID NO: 2322410 - DNA, 25 bp, Homo sapien
gccgggatgtccaggcttagcccat

SEQ ID NO: 2322411 - DNA, 25 bp, Homo sapien
cgtctcgatgcggtcgtagaaggca

SEQ ID NO: 2322412 - DNA, 25 bp, Homo sapien
cccattgggccaaagcactgtcttg

SEQ ID NO: 2322413 - DNA, 25 bp, Homo sapien
tgacaaagatgtctcggtgtgagcc

SEQ ID NO: 2322414 - DNA, 25 bp, Homo sapien
ccgttccaagcggtagacactgcca

SEQ ID NO: 2322415 - DNA, 25 bp, Homo sapien
gccactccgatactcagtccagaag

SEQ ID NO: 2322416 - DNA, 25 bp, Homo sapien
caggccaaaggcgtggttcagctca

SEQ ID NO: 2322417 - DNA, 25 bp, Homo sapien
tgctgctgggcatcatacattcgga

SEQ ID NO: 2322418 - DNA, 25 bp, Homo sapien
gttcacccggcatttgttggtgcca

SEQ ID NO: 2322419 - DNA, 25 bp, Homo sapien
gccgccattgttcacccggcatttg

SEQ ID NO: 2322420 - DNA, 25 bp, Homo sapien
ccaagcaagtgacgccgtctgcgtc

SEQ ID NO: 2322421 - DNA, 25 bp, Homo sapien
caagtgacgccgtctgcgtccaaca

SEQ ID NO: 2322422 - DNA, 25 bp, Homo sapien
ccccactcttcggcatcctcctgat

SEQ ID NO: 2322423 - DNA, 25 bp, Homo sapien
tgcttcctgttggccccctaagggc

SEQ ID NO: 2322424 - DNA, 25 bp, Homo sapien
tcactcagtttcccctaattgccat

SEQ ID NO: 2322425 - DNA, 25 bp, Homo sapien
cctccttaatctctgactgggaccc

SEQ ID NO: 2322426 - DNA, 25 bp, Homo sapien
cattagcagctaaatcacgacgtcc

SEQ ID NO: 2322427 - DNA, 25 bp, Homo sapien
ttggtaacctccacaagtgcaggct

SEQ ID NO: 2322428 - DNA, 25 bp, Homo sapien
tcatcggtcccaccagcagaagtga

SEQ ID NO: 2322429 - DNA, 25 bp, Homo sapien
taaatcctgctctaactttgggcct

SEQ ID NO: 2322430 - DNA, 25 bp, Homo sapien
ctaagccctttgcaccatttttgtt

SEQ ID NO: 2322431 - DNA, 25 bp, Homo sapien
agccctttgcaccatttttgtttgt

SEQ ID NO: 2322432 - DNA, 25 bp, Homo sapien
aagccctttgcaccatttttgtttg

SEQ ID NO: 2322433 - DNA, 25 bp, Homo sapien
agtcagaccccggtcgtgggacaag

SEQ ID NO: 2322434 - DNA, 25 bp, Homo sapien
gggcaccacaggatcgtgaggggga

SEQ ID NO: 2322435 - DNA, 25 bp, Homo sapien
tcagaccccggtcgtgggacaagta

SEQ ID NO: 2322436 - DNA, 25 bp, Homo sapien
cacaggatcgtgagggggaaagtca

SEQ ID NO: 2322437 - DNA, 25 bp, Homo sapien
ggtggaggcacgtaggatgggttcg

SEQ ID NO: 2322438 - DNA, 25 bp, Homo sapien
acacttccagcgctcctggatgcag

SEQ ID NO: 2322439 - DNA, 25 bp, Homo sapien
ggcaatcgttgtctccgtcacactt

SEQ ID NO: 2322440 - DNA, 25 bp, Homo sapien
tgttgtccaggcaatcgttgtctcc

SEQ ID NO: 2322441 - DNA, 25 bp, Homo sapien
tccccgtcgcagagccagcggttgg

SEQ ID NO: 2322442 - DNA, 25 bp, Homo sapien
ttgtccccgtcgcagagccagcggt

SEQ ID NO: 2322443 - DNA, 25 bp, Homo sapien
gggatgcaccggttgttctcgcact

SEQ ID NO: 2322444 - DNA, 25 bp, Homo sapien
tctcgcacttgaatcggtccgaggg

SEQ ID NO: 2322445 - DNA, 25 bp, Homo sapien
gaggggtgcctcgtgtgatctgagc

SEQ ID NO: 2322446 - DNA, 25 bp, Homo sapien
tgcctcgtgtgatctgagccccgct

SEQ ID NO: 2322447 - DNA, 25 bp, Homo sapien
gggtgcctcgtgtgatctgagcccc

SEQ ID NO: 2322448 - DNA, 25 bp, Homo sapien
cctgcctccttgactgaggggtgcc

SEQ ID NO: 2322449 - DNA, 25 bp, Homo sapien
tttttgtaaagagtgggaggtctca

SEQ ID NO: 2322450 - DNA, 25 bp, Homo sapien
ccagatcacacgtccaggagatggg

SEQ ID NO: 2322451 - DNA, 25 bp, Homo sapien
gaagcagactcatcagagcggtccc

SEQ ID NO: 2322452 - DNA, 25 bp, Homo sapien
cacagtcgtcatccagatcacacgt

SEQ ID NO: 2322453 - DNA, 25 bp, Homo sapien
gccactggcacaggagaactggttg

SEQ ID NO: 2322454 - DNA, 25 bp, Homo sapien
tgatgttgatacatctgccattgtt

SEQ ID NO: 2322455 - DNA, 25 bp, Homo sapien
ctgccattgttgcaggtaaactgag

SEQ ID NO: 2322456 - DNA, 25 bp, Homo sapien
tgttgatacatctgccattgttgca

SEQ ID NO: 2322457 - DNA, 25 bp, Homo sapien
gccattgttgcaggtaaactgagtc

SEQ ID NO: 2322458 - DNA, 25 bp, Homo sapien
cgtcagagccgtccccacaatcctt

SEQ ID NO: 2322459 - DNA, 25 bp, Homo sapien
aggacaggtctgttcgtcagagccg

SEQ ID NO: 2322460 - DNA, 25 bp, Homo sapien
acaggtctgttcgtcagagccgtcc

SEQ ID NO: 2322461 - DNA, 25 bp, Homo sapien
ggtctgttcgtcagagccgtcccca

SEQ ID NO: 2322462 - DNA, 25 bp, Homo sapien
caacgcccgctgttgcacttgaact

SEQ ID NO: 2322463 - DNA, 25 bp, Homo sapien
gctgcagccggcttcgtcactgttg

SEQ ID NO: 2322464 - DNA, 25 bp, Homo sapien
ggtgcagttggcgtgtgtctcatca

SEQ ID NO: 2322465 - DNA, 25 bp, Homo sapien
cacttgaactgggtgctagaacagg

SEQ ID NO: 2322466 - DNA, 25 bp, Homo sapien
tttgcagacgaaactcacagaggcc

SEQ ID NO: 2322467 - DNA, 25 bp, Homo sapien
ccagaactgtgagacgagagaaact

SEQ ID NO: 2322468 - DNA, 25 bp, Homo sapien
gacacaccgtgggtctgaaagacag

SEQ ID NO: 2322469 - DNA, 25 bp, Homo sapien
tgaaggacaagagccatgcctaggc

SEQ ID NO: 2322470 - DNA, 25 bp, Homo sapien
tcacagctcttctcatcgctggagt

SEQ ID NO: 2322471 - DNA, 25 bp, Homo sapien
atgcagtcagtgtccccatcgcagc

SEQ ID NO: 2322472 - DNA, 25 bp, Homo sapien
aaacttgacactgggatcgcagacg

SEQ ID NO: 2322473 - DNA, 25 bp, Homo sapien
ggatgcatagtccatccagccggca

SEQ ID NO: 2322474 - DNA, 25 bp, Homo sapien
acccacgctttgctgatgcaccgag

SEQ ID NO: 2322475 - DNA, 25 bp, Homo sapien
gcagactgaggtgttgttggcacaa

SEQ ID NO: 2322476 - DNA, 25 bp, Homo sapien
cacaagggtgcgagggtggcctgca

SEQ ID NO: 2322477 - DNA, 25 bp, Homo sapien
gtcgttgccatcacacagcttgtca

SEQ ID NO: 2322478 - DNA, 25 bp, Homo sapien
tgttctggtcgcacttttggctgca

SEQ ID NO: 2322479 - DNA, 25 bp, Homo sapien
gggcaggaacacacaatgccttcgc

SEQ ID NO: 2322480 - DNA, 25 bp, Homo sapien
cctcgtagcaggagcacttcacgct

SEQ ID NO: 2322481 - DNA, 25 bp, Homo sapien
gctgcagccaccgttattcagagag

SEQ ID NO: 2322482 - DNA, 25 bp, Homo sapien
tcgatgcgccggatttcatggcggt

SEQ ID NO: 2322483 - DNA, 25 bp, Homo sapien
gagaaaatgatgaacggcttgaagg

SEQ ID NO: 2322484 - DNA, 25 bp, Homo sapien
gcttcccgcggtagatcttgtcctc

SEQ ID NO: 2322485 - DNA, 25 bp, Homo sapien
gacgctgtagtctcctttgtgaaga

SEQ ID NO: 2322486 - DNA, 25 bp, Homo sapien
aaatgtgcctcttagaagcctttgc

SEQ ID NO: 2322487 - DNA, 25 bp, Homo sapien
tatcatcacagtttacttagcctcc

SEQ ID NO: 2322488 - DNA, 25 bp, Homo sapien
aagtgactgccataaagatttttcc

SEQ ID NO: 2322489 - DNA, 25 bp, Homo sapien
ttttagagactgttgcacagtgtgg

SEQ ID NO: 2322490 - DNA, 25 bp, Homo sapien
tgtggccaggccatactgaatcacc

SEQ ID NO: 2322491 - DNA, 25 bp, Homo sapien
gaatcaccacctcgaaactagtcag

SEQ ID NO: 2322492 - DNA, 25 bp, Homo sapien
tccagtgcgattgcccttgggtgct

SEQ ID NO: 2322493 - DNA, 25 bp, Homo sapien
gatccaggttactctccacccagta

SEQ ID NO: 2322494 - DNA, 25 bp, Homo sapien
agtccacggtgagcccgttgggcca

SEQ ID NO: 2322495 - DNA, 25 bp, Homo sapien
ggcgtcaatccaaaggatgcgcttc

SEQ ID NO: 2322496 - DNA, 25 bp, Homo sapien
caaaggatgcgcttctccaggtagt

SEQ ID NO: 2322497 - DNA, 25 bp, Homo sapien
tgcgcttctccaggtagtccacggt

SEQ ID NO: 2322498 - DNA, 25 bp, Homo sapien
cagggctttgatgaaagtcagaaaa

SEQ ID NO: 2322499 - DNA, 25 bp, Homo sapien
tgagaacccaacaggtccaggtttc

SEQ ID NO: 2322500 - DNA, 25 bp, Homo sapien
gaaaaaggcaccctcagcgtgaacc

SEQ ID NO: 2322501 - DNA, 25 bp, Homo sapien
caagggaatctttcggtcacttctc

SEQ ID NO: 2322502 - DNA, 25 bp, Homo sapien
tacagcgtcactgcaaacgggtgcg

SEQ ID NO: 2322503 - DNA, 25 bp, Homo sapien
cgtaacgggctgagtaaatggcatc

SEQ ID NO: 2322504 - DNA, 25 bp, Homo sapien
cacggtgacattgtggccggtccac

SEQ ID NO: 2322505 - DNA, 25 bp, Homo sapien
gtgtttgttcgccagtcagtccagt

SEQ ID NO: 2322506 - DNA, 25 bp, Homo sapien
ttccggctgctcgaggccccgagcc

SEQ ID NO: 2322507 - DNA, 25 bp, Homo sapien
gctcccttccggctgctcgaggccc

SEQ ID NO: 2322508 - DNA, 25 bp, Homo sapien
gctgctggctcccttccggctgctc

SEQ ID NO: 2322509 - DNA, 25 bp, Homo sapien
gctggctcccttccggctgctcgag

SEQ ID NO: 2322510 - DNA, 25 bp, Homo sapien
ccggttgtagttgatgagacacagg

SEQ ID NO: 2322511 - DNA, 25 bp, Homo sapien
ccattggcctcacagggattgggag

SEQ ID NO: 2322512 - DNA, 25 bp, Homo sapien
tgtccttgtggagcttcatgaggtg

SEQ ID NO: 2322513 - DNA, 25 bp, Homo sapien
cgcaggacacggtccggttgtagtt

SEQ ID NO: 2322514 - DNA, 25 bp, Homo sapien
catctgacgtgcgtacagcaggaac

SEQ ID NO: 2322515 - DNA, 25 bp, Homo sapien
tgtgacgttgtcgatgtcgggcacc

SEQ ID NO: 2322516 - DNA, 25 bp, Homo sapien
tgtagtagggagcatccaggtccac

SEQ ID NO: 2322517 - DNA, 25 bp, Homo sapien
gctgctcgcgggcatcgtagtctag

SEQ ID NO: 2322518 - DNA, 25 bp, Homo sapien
tgtgtccgcacgtcagaccagtaca

SEQ ID NO: 2322519 - DNA, 25 bp, Homo sapien
tgcagagacgactgtctccacgcct

SEQ ID NO: 2322520 - DNA, 25 bp, Homo sapien
ctccacgcctgtgccgttgatgaag

SEQ ID NO: 2322521 - DNA, 25 bp, Homo sapien
gatgaaggcccgcttgatggcctgt

SEQ ID NO: 2322522 - DNA, 25 bp, Homo sapien
ggtgcccatgtccactggtgggcat

SEQ ID NO: 2322523 - DNA, 25 bp, Homo sapien
ggaggtgcccatgtccactggtggg

SEQ ID NO: 2322524 - DNA, 25 bp, Homo sapien
gggcgggtggaggtgcccatgtcca

SEQ ID NO: 2322525 - DNA, 25 bp, Homo sapien
cccatgtccactggtgggcatccag

SEQ ID NO: 2322526 - DNA, 25 bp, Homo sapien
ggtgtcatagcttgtccagaacagg

SEQ ID NO: 2322527 - DNA, 25 bp, Homo sapien
cagccagcccgtgggcatttggcaa

SEQ ID NO: 2322528 - DNA, 25 bp, Homo sapien
ccagccgggccacattgatctgctt

SEQ ID NO: 2322529 - DNA, 25 bp, Homo sapien
caccactgcgttcttgaaggagcca

SEQ ID NO: 2322530 - DNA, 25 bp, Homo sapien
ggcccttctggccactgaagagcag

SEQ ID NO: 2322531 - DNA, 25 bp, Homo sapien
agcagggtgcgattgctgccatcca

SEQ ID NO: 2322532 - DNA, 25 bp, Homo sapien
ggccatgctgatgttgtcaccatcg

SEQ ID NO: 2322533 - DNA, 25 bp, Homo sapien
gatgttgtcaccatcggtccagtag

SEQ ID NO: 2322534 - DNA, 25 bp, Homo sapien
ccggagctgatccagtagagtttgc

SEQ ID NO: 2322535 - DNA, 25 bp, Homo sapien
tgcagcggttgatggtatggttccc

SEQ ID NO: 2322536 - DNA, 25 bp, Homo sapien
ttgcccagctggctccgcatggcat

SEQ ID NO: 2322537 - DNA, 25 bp, Homo sapien
agctggctccgcatggcatcgatga

SEQ ID NO: 2322538 - DNA, 25 bp, Homo sapien
tggatgctctcgtcatagaccttca

SEQ ID NO: 2322539 - DNA, 25 bp, Homo sapien
gtgcccatcttttccgacacctgat

SEQ ID NO: 2322540 - DNA, 25 bp, Homo sapien
ttcatgtgcatcaccagggtggtgc

SEQ ID NO: 2322541 - DNA, 25 bp, Homo sapien
tggtgctgttccgaaggaccacgga

SEQ ID NO: 2322542 - DNA, 25 bp, Homo sapien
gggctgctcagaaacaggatggtca

SEQ ID NO: 2322543 - DNA, 25 bp, Homo sapien
tgggtggtgggtacagcctaaccca

SEQ ID NO: 2322544 - DNA, 25 bp, Homo sapien
tgctgggagcctacaaggcgccttt

SEQ ID NO: 2322545 - DNA, 25 bp, Homo sapien
cactgactaccctggacctaatggg

SEQ ID NO: 2322546 - DNA, 25 bp, Homo sapien
gtcgtctctgacgtgggcaggcaga

SEQ ID NO: 2322547 - DNA, 25 bp, Homo sapien
ggcctgctggccactccggaggcta

SEQ ID NO: 2322548 - DNA, 25 bp, Homo sapien
ggctatagccggctgtgcacatgca

SEQ ID NO: 2322549 - DNA, 25 bp, Homo sapien
gcacatgcaggagcgggtcgtctct

SEQ ID NO: 2322550 - DNA, 25 bp, Homo sapien
caaacgcttgaaaaattcttggcac

SEQ ID NO: 2322551 - DNA, 25 bp, Homo sapien
tatccctttgatacagcacatccca

SEQ ID NO: 2322552 - DNA, 25 bp, Homo sapien
gttttcccatgtcttgaggcaccac

SEQ ID NO: 2322553 - DNA, 25 bp, Homo sapien
aagtgaatccccacatggtccctgg

SEQ ID NO: 2322554 - DNA, 25 bp, Homo sapien
caaggtaatccgccctctttagcct

SEQ ID NO: 2322555 - DNA, 25 bp, Homo sapien
ccggcctcaaggtaatccgccctct

SEQ ID NO: 2322556 - DNA, 25 bp, Homo sapien
gcctcaaggtaatccgccctcttta

SEQ ID NO: 2322557 - DNA, 25 bp, Homo sapien
cctcaaggtaatccgccctctttag

SEQ ID NO: 2322558 - DNA, 25 bp, Homo sapien
ggctggtagctctggggaaccacct

SEQ ID NO: 2322559 - DNA, 25 bp, Homo sapien
ggtagctctggggaaccacctgcag

SEQ ID NO: 2322560 - DNA, 25 bp, Homo sapien
ctggctggtagctctggggaaccac

SEQ ID NO: 2322561 - DNA, 25 bp, Homo sapien
tggctggtagctctggggaaccacc

SEQ ID NO: 2322562 - DNA, 25 bp, Homo sapien
gtggaagtcgatgccgacagccagc

SEQ ID NO: 2322563 - DNA, 25 bp, Homo sapien
cagcgaggtcccggacactgggacc

SEQ ID NO: 2322564 - DNA, 25 bp, Homo sapien
cagcgtggaagtcgatgccgacagc

SEQ ID NO: 2322565 - DNA, 25 bp, Homo sapien
gtcgatgccgacagccagcgaggtc

SEQ ID NO: 2322566 - DNA, 25 bp, Homo sapien
ggctgatcgtgctcaggcccatgtc

SEQ ID NO: 2322567 - DNA, 25 bp, Homo sapien
tccacacggccaatgccattggtca

SEQ ID NO: 2322568 - DNA, 25 bp, Homo sapien
tgccattggtcaccacgtcttcacg

SEQ ID NO: 2322569 - DNA, 25 bp, Homo sapien
gtctggtcccgcttggcccggctga

SEQ ID NO: 2322570 - DNA, 25 bp, Homo sapien
ccgggcgacctcgatgacatcaaag

SEQ ID NO: 2322571 - DNA, 25 bp, Homo sapien
cacgtagcggaaggagccattgagc

SEQ ID NO: 2322572 - DNA, 25 bp, Homo sapien
gggcttgtctagaccctgggagatc

SEQ ID NO: 2322573 - DNA, 25 bp, Homo sapien
ctttctccgggtggacggtgatggc

SEQ ID NO: 2322574 - DNA, 25 bp, Homo sapien
catctagccgagaccgctcaatacg

SEQ ID NO: 2322575 - DNA, 25 bp, Homo sapien
gccagctgatgctgacgttgaccag

SEQ ID NO: 2322576 - DNA, 25 bp, Homo sapien
gctcaatacgcggatactgacccca

SEQ ID NO: 2322577 - DNA, 25 bp, Homo sapien
actgagatgccgttgggccagctga

SEQ ID NO: 2322578 - DNA, 25 bp, Homo sapien
gatccaaggccaagttggcgtgcga

SEQ ID NO: 2322579 - DNA, 25 bp, Homo sapien
cggatccaaggccaagttggcgtgc

SEQ ID NO: 2322580 - DNA, 25 bp, Homo sapien
tccaaggccaagttggcgtgcgaac

SEQ ID NO: 2322581 - DNA, 25 bp, Homo sapien
catcggatccaaggccaagttggcg

SEQ ID NO: 2322582 - DNA, 25 bp, Homo sapien
ccagggctgagctcgctgccagccc

SEQ ID NO: 2322583 - DNA, 25 bp, Homo sapien
tcacctccagggctgagctcgctgc

SEQ ID NO: 2322584 - DNA, 25 bp, Homo sapien
ctcacctccagggctgagctcgctg

SEQ ID NO: 2322585 - DNA, 25 bp, Homo sapien
gctgagctcgctgccagccccatgt

SEQ ID NO: 2322586 - DNA, 25 bp, Homo sapien
cgttcaatcttgtctgtccgtgcat

SEQ ID NO: 2322587 - DNA, 25 bp, Homo sapien
cctgtctccaggtcgatccgttcaa

SEQ ID NO: 2322588 - DNA, 25 bp, Homo sapien
tgtctgtccgtgcatcgcaccagta

SEQ ID NO: 2322589 - DNA, 25 bp, Homo sapien
tggacagaaccacctcgcggttctc

SEQ ID NO: 2322590 - DNA, 25 bp, Homo sapien
ctttgatgtctttaagctggacgcc

SEQ ID NO: 2322591 - DNA, 25 bp, Homo sapien
tgtggcattgtctttgctcccgcgc

SEQ ID NO: 2322592 - DNA, 25 bp, Homo sapien
cgcgcttgatagagccgttggcatg

SEQ ID NO: 2322593 - DNA, 25 bp, Homo sapien
ctggacgccgatgccggttcgcagg

SEQ ID NO: 2322594 - DNA, 25 bp, Homo sapien
tcctggagccatcgtcgttgatctg

SEQ ID NO: 2322595 - DNA, 25 bp, Homo sapien
tgagtagagcaggtagccggcatac

SEQ ID NO: 2322596 - DNA, 25 bp, Homo sapien
ttgaggttgcgctcatccgacaggt

SEQ ID NO: 2322597 - DNA, 25 bp, Homo sapien
aaaggccagggcgatgacgttcttc

SEQ ID NO: 2322598 - DNA, 25 bp, Homo sapien
aggcccgtgggtggtcatctccaga

SEQ ID NO: 2322599 - DNA, 25 bp, Homo sapien
tagcttgtccaatagagagtgtccc

SEQ ID NO: 2322600 - DNA, 25 bp, Homo sapien
gagtgtcccagccacggtgataggc

SEQ ID NO: 2322601 - DNA, 25 bp, Homo sapien
tctggcactcgtccaaaacgaaggc

SEQ ID NO: 2322602 - DNA, 25 bp, Homo sapien
tagaggcccaaacagccgggatgag

SEQ ID NO: 2322603 - DNA, 25 bp, Homo sapien
aagtagagcttctcggcacggtggt

SEQ ID NO: 2322604 - DNA, 25 bp, Homo sapien
gatgtccttctcgataagggtcagg

SEQ ID NO: 2322605 - DNA, 25 bp, Homo sapien
tcaggacattggctcccgagagcgc

SEQ ID NO: 2322606 - DNA, 25 bp, Homo sapien
tcttgtccagggtggcgtcagagaa

SEQ ID NO: 2322607 - DNA, 25 bp, Homo sapien
cagtcagtccagaaaatgtgctccc

SEQ ID NO: 2322608 - DNA, 25 bp, Homo sapien
ggacaggctctgactttaggatcac

SEQ ID NO: 2322609 - DNA, 25 bp, Homo sapien
actgcccgccgcacccagtcagtcc

SEQ ID NO: 2322610 - DNA, 25 bp, Homo sapien
aaatgtgctccccatacacggccag

SEQ ID NO: 2322611 - DNA, 25 bp, Homo sapien
ggatgtccacgcgcagcagcttcat

SEQ ID NO: 2322612 - DNA, 25 bp, Homo sapien
tgggggatgtccacgcgcagcagct

SEQ ID NO: 2322613 - DNA, 25 bp, Homo sapien
ggggatgtccacgcgcagcagcttc

SEQ ID NO: 2322614 - DNA, 25 bp, Homo sapien
atgtccacgcgcagcagcttcatgt

SEQ ID NO: 2322615 - DNA, 25 bp, Homo sapien
ttggccacggcgatgatgcccatgg

SEQ ID NO: 2322616 - DNA, 25 bp, Homo sapien
ctgttggtgtcgttggccacggcga

SEQ ID NO: 2322617 - DNA, 25 bp, Homo sapien
agctgttggtgtcgttggccacggc

SEQ ID NO: 2322618 - DNA, 25 bp, Homo sapien
ggccacggcgatgatgcccatgggc

SEQ ID NO: 2322619 - DNA, 25 bp, Homo sapien
cccctcggcatgagcagttgacatg

SEQ ID NO: 2322620 - DNA, 25 bp, Homo sapien
gaggtcatcctggaggattcggccc

SEQ ID NO: 2322621 - DNA, 25 bp, Homo sapien
ttgattcggcatggagagagttcac

SEQ ID NO: 2322622 - DNA, 25 bp, Homo sapien
catgagcagttgacatggccctggt

SEQ ID NO: 2322623 - DNA, 25 bp, Homo sapien
gatggcttctcatcggacttgtcct

SEQ ID NO: 2322624 - DNA, 25 bp, Homo sapien
caggtcaggctgaagttgatgcact

SEQ ID NO: 2322625 - DNA, 25 bp, Homo sapien
gaagttgatgcactcgccattggca

SEQ ID NO: 2322626 - DNA, 25 bp, Homo sapien
tgtgctcggcaagaggaattcaccg

SEQ ID NO: 2322627 - DNA, 25 bp, Homo sapien
agtggttctgcccttcatgagctcc

SEQ ID NO: 2322628 - DNA, 25 bp, Homo sapien
acgtcatgcacgtgtccagctggcc

SEQ ID NO: 2322629 - DNA, 25 bp, Homo sapien
agtaggctgcgtgtcagccacaggc

SEQ ID NO: 2322630 - DNA, 25 bp, Homo sapien
cccagtccaggctaacagtggttct

SEQ ID NO: 2322631 - DNA, 25 bp, Homo sapien
aaagtcttcttgcagcggcgggagt

SEQ ID NO: 2322632 - DNA, 25 bp, Homo sapien
gcccattgctgcactgccggaaagt

SEQ ID NO: 2322633 - DNA, 25 bp, Homo sapien
atgttggacacacagcgcccattgc

SEQ ID NO: 2322634 - DNA, 25 bp, Homo sapien
tgttgcaagggatctcgtcagagcc

SEQ ID NO: 2322635 - DNA, 25 bp, Homo sapien
gtcccggcagcggaactcgcccaca

SEQ ID NO: 2322636 - DNA, 25 bp, Homo sapien
tgcaggtcccgtcccggcagcggaa

SEQ ID NO: 2322637 - DNA, 25 bp, Homo sapien
ccgatgcaggtcccgtcccggcagc

SEQ ID NO: 2322638 - DNA, 25 bp, Homo sapien
gatgcaggtcccgtcccggcagcgg

SEQ ID NO: 2322639 - DNA, 25 bp, Homo sapien
tcatctgaggcgtcctcacaatcca

SEQ ID NO: 2322640 - DNA, 25 bp, Homo sapien
cacaaactggttgcagcggctggag

SEQ ID NO: 2322641 - DNA, 25 bp, Homo sapien
gcgtcctcacaatccacaaactggt

SEQ ID NO: 2322642 - DNA, 25 bp, Homo sapien
tgcagttcatctcatctgaggcgtc

SEQ ID NO: 2322643 - DNA, 25 bp, Homo sapien
cagccctatggagccttcatgtgtt

SEQ ID NO: 2322644 - DNA, 25 bp, Homo sapien
aagttgaacggtgcccttctggtgg

SEQ ID NO: 2322645 - DNA, 25 bp, Homo sapien
ccaaaagttgaacggtgcccttctg

SEQ ID NO: 2322646 - DNA, 25 bp, Homo sapien
tcggaaccccacgagagcccaggag

SEQ ID NO: 2322647 - DNA, 25 bp, Homo sapien
ctgggtgcgtagcagagtgaggtcc

SEQ ID NO: 2322648 - DNA, 25 bp, Homo sapien
cgcccaggcggaagtagctgctgca

SEQ ID NO: 2322649 - DNA, 25 bp, Homo sapien
tgggcagtcgcgctcatcactgtag

SEQ ID NO: 2322650 - DNA, 25 bp, Homo sapien
tcgcagggctggaagagcacgccct

SEQ ID NO: 2322651 - DNA, 25 bp, Homo sapien
tcatggggatgcagcgcccactagg

SEQ ID NO: 2322652 - DNA, 25 bp, Homo sapien
tcctctttgtcacacgtccagctca

SEQ ID NO: 2322653 - DNA, 25 bp, Homo sapien
cagtgggtctcgtcctcgccatgtt

SEQ ID NO: 2322654 - DNA, 25 bp, Homo sapien
cccactagggcaggcgaagtaattc

SEQ ID NO: 2322655 - DNA, 25 bp, Homo sapien
catcgctgccgtcacacagccactg

SEQ ID NO: 2322656 - DNA, 25 bp, Homo sapien
ggttctggcactcaaactgggcctc

SEQ ID NO: 2322657 - DNA, 25 bp, Homo sapien
atccccacagtcatcgctgccgtca

SEQ ID NO: 2322658 - DNA, 25 bp, Homo sapien
gagatgcagcgatggttctggcact

SEQ ID NO: 2322659 - DNA, 25 bp, Homo sapien
gagagggccactgagagacttagga

SEQ ID NO: 2322660 - DNA, 25 bp, Homo sapien
tagatcaggtctagcagtggaggtg

SEQ ID NO: 2322661 - DNA, 25 bp, Homo sapien
aggtgatggttcgccgtcgtctgca

SEQ ID NO: 2322662 - DNA, 25 bp, Homo sapien
acttaggagcgggtagatcaggtct

SEQ ID NO: 2322663 - DNA, 25 bp, Homo sapien
ctttgtcaccgtcacagagccagcg

SEQ ID NO: 2322664 - DNA, 25 bp, Homo sapien
gctgcgatgctctcgtctgcaccat

SEQ ID NO: 2322665 - DNA, 25 bp, Homo sapien
gcaaccagctgcgatgctctcgtct

SEQ ID NO: 2322666 - DNA, 25 bp, Homo sapien
agagccagcgctcggggacgcacac

SEQ ID NO: 2322667 - DNA, 25 bp, Homo sapien
cgtggtcacacacgaagtgcttggg

SEQ ID NO: 2322668 - DNA, 25 bp, Homo sapien
gatgcactggcggttctggcacatg

SEQ ID NO: 2322669 - DNA, 25 bp, Homo sapien
atctgcacagtcacggtcgtggtca

SEQ ID NO: 2322670 - DNA, 25 bp, Homo sapien
tggcacatgaactcacggtcgtcac

SEQ ID NO: 2322671 - DNA, 25 bp, Homo sapien
tgggttcttgggagcctcgtcactc

SEQ ID NO: 2322672 - DNA, 25 bp, Homo sapien
tggcagtcattctcgccatcacact

SEQ ID NO: 2322673 - DNA, 25 bp, Homo sapien
ctcgtcactctggtcgtggcagtca

SEQ ID NO: 2322674 - DNA, 25 bp, Homo sapien
tcccactggcgggagctcagacagc

SEQ ID NO: 2322675 - DNA, 25 bp, Homo sapien
acaggaactgtgacgaggcattgca

SEQ ID NO: 2322676 - DNA, 25 bp, Homo sapien
gccactgagcttgcggctgagacac

SEQ ID NO: 2322677 - DNA, 25 bp, Homo sapien
cacagtcatcctggccgttgcagag

SEQ ID NO: 2322678 - DNA, 25 bp, Homo sapien
tgaagccgatcttgaggtcctcaca

SEQ ID NO: 2322679 - DNA, 25 bp, Homo sapien
cacacagacacttatagctgccatg

SEQ ID NO: 2322680 - DNA, 25 bp, Homo sapien
catgagtgttgatgcagcgctggct

SEQ ID NO: 2322681 - DNA, 25 bp, Homo sapien
actcgtccacatcagcacacgtccg

SEQ ID NO: 2322682 - DNA, 25 bp, Homo sapien
tccggccgtcgtccttcagccggaa

SEQ ID NO: 2322683 - DNA, 25 bp, Homo sapien
tgcttaagtaacgtgtagttggacc

SEQ ID NO: 2322684 - DNA, 25 bp, Homo sapien
ctgcttaagtaacgtgtagttggac

SEQ ID NO: 2322685 - DNA, 25 bp, Homo sapien
ttgagcttgcgcaggtagtaccggt

SEQ ID NO: 2322686 - DNA, 25 bp, Homo sapien
gtagtaccggttggcgaagatcaga

SEQ ID NO: 2322687 - DNA, 25 bp, Homo sapien
gatcatctgctctcggtagtcaaaa

SEQ ID NO: 2322688 - DNA, 25 bp, Homo sapien
tgccctgggtggtcacatctgtcca

SEQ ID NO: 2322689 - DNA, 25 bp, Homo sapien
cacattgctcccgttaaggtgcatc

SEQ ID NO: 2322690 - DNA, 25 bp, Homo sapien
tagtcaaaatccaaggcaacggcgt

SEQ ID NO: 2322691 - DNA, 25 bp, Homo sapien
acctcgatggtgtcccggcctttgt

SEQ ID NO: 2322692 - DNA, 25 bp, Homo sapien
gccccattgagcttggacacctcga

SEQ ID NO: 2322693 - DNA, 25 bp, Homo sapien
agagctgaccagcaccgtccgatag

SEQ ID NO: 2322694 - DNA, 25 bp, Homo sapien
cagagccctgggctcacggaggcca

SEQ ID NO: 2322695 - DNA, 25 bp, Homo sapien
gctggacccatccatgccgatgcgg

SEQ ID NO: 2322696 - DNA, 25 bp, Homo sapien
ccgatgcggccgatcagtgaatggt

SEQ ID NO: 2322697 - DNA, 25 bp, Homo sapien
ttcaatgtagtcctcgcgggcgtcg

SEQ ID NO: 2322698 - DNA, 25 bp, Homo sapien
ggcccagtagatgcgctcagtgaca

SEQ ID NO: 2322699 - DNA, 25 bp, Homo sapien
tcccagtcggtccagtagacgtagt

SEQ ID NO: 2322700 - DNA, 25 bp, Homo sapien
cgtagtcctcaaacagggtcagtgc

SEQ ID NO: 2322701 - DNA, 25 bp, Homo sapien
aaagatgtgcgggatgtcctggctc

SEQ ID NO: 2322702 - DNA, 25 bp, Homo sapien
aagacatgcaggtccatgggccggt

SEQ ID NO: 2322703 - DNA, 25 bp, Homo sapien
tgcgcccatcgctgcccaggtagaa

SEQ ID NO: 2322704 - DNA, 25 bp, Homo sapien
ctggctagccgtgcagttggacaca

SEQ ID NO: 2322705 - DNA, 25 bp, Homo sapien
tagccgtgcagttggacacacaggt

SEQ ID NO: 2322706 - DNA, 25 bp, Homo sapien
agttggacacacaggtgcgcccatc

SEQ ID NO: 2322707 - DNA, 25 bp, Homo sapien
ggctcgtctgagtggtccccgcagt

SEQ ID NO: 2322708 - DNA, 25 bp, Homo sapien
gtcctcggtgtcacacttccaccag

SEQ ID NO: 2322709 - DNA, 25 bp, Homo sapien
tgcacttgtcgttcttgcatacaaa

SEQ ID NO: 2322710 - DNA, 25 bp, Homo sapien
ccaccagaaggggatgcacttgtcg

SEQ ID NO: 2322711 - DNA, 25 bp, Homo sapien
ccatcgcagatgaaggcagggtttg

SEQ ID NO: 2322712 - DNA, 25 bp, Homo sapien
tacctgtggagcactggaactgtcc

SEQ ID NO: 2322713 - DNA, 25 bp, Homo sapien
tggcagtcattgtcgccatcgcaga

SEQ ID NO: 2322714 - DNA, 25 bp, Homo sapien
gttggcctcgtcactgttgtcctgg

SEQ ID NO: 2322715 - DNA, 25 bp, Homo sapien
agttgtcctgcccattgcagcggaa

SEQ ID NO: 2322716 - DNA, 25 bp, Homo sapien
catttgaactgactgggcaagcaga

SEQ ID NO: 2322717 - DNA, 25 bp, Homo sapien
aatacagcggttggtgttggtgcat

SEQ ID NO: 2322718 - DNA, 25 bp, Homo sapien
tgcagcggaagatgccgggaataca

SEQ ID NO: 2322719 - DNA, 25 bp, Homo sapien
cagacccgggggatgcaccgtttgg

SEQ ID NO: 2322720 - DNA, 25 bp, Homo sapien
tgcagttggcgggctcatcactgcc

SEQ ID NO: 2322721 - DNA, 25 bp, Homo sapien
atccacacagtcattgtcccggtcg

SEQ ID NO: 2322722 - DNA, 25 bp, Homo sapien
caccgtttggtaatggagcactgga

SEQ ID NO: 2322723 - DNA, 25 bp, Homo sapien
cgtcacacttccaacgcgctgggat

SEQ ID NO: 2322724 - DNA, 25 bp, Homo sapien
cttccaacgcgctgggatgcagcgg

SEQ ID NO: 2322725 - DNA, 25 bp, Homo sapien
atccttgcagcggaactcgtccaca

SEQ ID NO: 2322726 - DNA, 25 bp, Homo sapien
atgcagcggcccgaatccttgcagc

SEQ ID NO: 2322727 - DNA, 25 bp, Homo sapien
cacactcttccttgggctcatccga

SEQ ID NO: 2322728 - DNA, 25 bp, Homo sapien
tccttgggctcatccgagccatccc

SEQ ID NO: 2322729 - DNA, 25 bp, Homo sapien
tcttccttgggctcatccgagccat

SEQ ID NO: 2322730 - DNA, 25 bp, Homo sapien
ttgggctcatccgagccatccccac

SEQ ID NO: 2322731 - DNA, 25 bp, Homo sapien
tcatcggagttgtcaccgcaatcgt

SEQ ID NO: 2322732 - DNA, 25 bp, Homo sapien
ccgcaatcgttgtcgtagtcgcact

SEQ ID NO: 2322733 - DNA, 25 bp, Homo sapien
gcacgcagcggttgttcttgcagcg

SEQ ID NO: 2322734 - DNA, 25 bp, Homo sapien
ctggtatggctcacaggtgcgttca

SEQ ID NO: 2322735 - DNA, 25 bp, Homo sapien
ggagggccgcgagacaagggccagg

SEQ ID NO: 2322736 - DNA, 25 bp, Homo sapien
caggagggccgcgagacaagggcca

SEQ ID NO: 2322737 - DNA, 25 bp, Homo sapien
ggcaggagggccgcgagacaagggc

SEQ ID NO: 2322738 - DNA, 25 bp, Homo sapien
aggagggccgcgagacaagggccag

SEQ ID NO: 2322739 - DNA, 25 bp, Homo sapien
tcctatggaacagctgggcacaggc

SEQ ID NO: 2322740 - DNA, 25 bp, Homo sapien
cactgagacaagcaccagggtttgg

SEQ ID NO: 2322741 - DNA, 25 bp, Homo sapien
ggctcgcacttaccccatgggacag

SEQ ID NO: 2322742 - DNA, 25 bp, Homo sapien
tccaggcctcagtagtgccacagtc

SEQ ID NO: 2322743 - DNA, 25 bp, Homo sapien
gagccgtccgcgcagtcgtggtctc

SEQ ID NO: 2322744 - DNA, 25 bp, Homo sapien
agcggccgttggcacaggagaactc

SEQ ID NO: 2322745 - DNA, 25 bp, Homo sapien
cgtggtctccatcgcatttccagcg

SEQ ID NO: 2322746 - DNA, 25 bp, Homo sapien
aactcactctcggagcagggccgag

SEQ ID NO: 2322747 - DNA, 25 bp, Homo sapien
tgcagtggccgctcttgcactggaa

SEQ ID NO: 2322748 - DNA, 25 bp, Homo sapien
tggaactggtccatgtcacagcggg

SEQ ID NO: 2322749 - DNA, 25 bp, Homo sapien
tgcagtcggcgtctgcgtcacagcg

SEQ ID NO: 2322750 - DNA, 25 bp, Homo sapien
catgcagtcggcgtctgcgtcacag

SEQ ID NO: 2322751 - DNA, 25 bp, Homo sapien
tgggccatgtggcggggtgggcagc

SEQ ID NO: 2322752 - DNA, 25 bp, Homo sapien
gcagcagagggaggacccagggaga

SEQ ID NO: 2322753 - DNA, 25 bp, Homo sapien
agggagaccaagccaaggggcgcac

SEQ ID NO: 2322754 - DNA, 25 bp, Homo sapien
aggacccagggagaccaagccaagg

SEQ ID NO: 2322755 - DNA, 25 bp, Homo sapien
tcttgtggcagcagactgtctcgga

SEQ ID NO: 2322756 - DNA, 25 bp, Homo sapien
agctcaactggtcccctagactagg

SEQ ID NO: 2322757 - DNA, 25 bp, Homo sapien
ggagccaagagatagaatgagccat

SEQ ID NO: 2322758 - DNA, 25 bp, Homo sapien
cagttgggatttccgctccaaggcc

SEQ ID NO: 2322759 - DNA, 25 bp, Homo sapien
ttgttgcactggaactcgtccaggg

SEQ ID NO: 2322760 - DNA, 25 bp, Homo sapien
atcgcacttccaggccagcggcttg

SEQ ID NO: 2322761 - DNA, 25 bp, Homo sapien
cagcggcttgcacaaggtgttgttg

SEQ ID NO: 2322762 - DNA, 25 bp, Homo sapien
cacagtcatcctcgccatcgcactt

SEQ ID NO: 2322763 - DNA, 25 bp, Homo sapien
gatccacagacagacgcggtcattc

SEQ ID NO: 2322764 - DNA, 25 bp, Homo sapien
attggcgcccgatccacagacagac

SEQ ID NO: 2322765 - DNA, 25 bp, Homo sapien
cacagttgtccgtgccatcgcattg

SEQ ID NO: 2322766 - DNA, 25 bp, Homo sapien
tcattcttgcaacggaagggccggt

SEQ ID NO: 2322767 - DNA, 25 bp, Homo sapien
agcccccaggctcctagcaatggat

SEQ ID NO: 2322768 - DNA, 25 bp, Homo sapien
tccaagacctaaggcatcaggcagc

SEQ ID NO: 2322769 - DNA, 25 bp, Homo sapien
gcagaggctttaggccctgggtatt

SEQ ID NO: 2322770 - DNA, 25 bp, Homo sapien
caggtcaaacatttgggttcccagc

SEQ ID NO: 2322771 - DNA, 25 bp, Homo sapien
gtccccgcagtcatcgaacatgttg

SEQ ID NO: 2322772 - DNA, 25 bp, Homo sapien
catcgaacatgttgcagcgcaggga

SEQ ID NO: 2322773 - DNA, 25 bp, Homo sapien
gcagcgctggttccggcacagaaac

SEQ ID NO: 2322774 - DNA, 25 bp, Homo sapien
gctggttccggcacagaaactcctt

SEQ ID NO: 2322775 - DNA, 25 bp, Homo sapien
tcgtccccacagatgctggcattgg

SEQ ID NO: 2322776 - DNA, 25 bp, Homo sapien
cacagtaggccgctttctcggtgcg

SEQ ID NO: 2322777 - DNA, 25 bp, Homo sapien
cattggtggcgcagctggtcagctt

SEQ ID NO: 2322778 - DNA, 25 bp, Homo sapien
ttggcatccgggctggccgggcacg

SEQ ID NO: 2322779 - DNA, 25 bp, Homo sapien
aagttccgagcgcagctgcagaggt

SEQ ID NO: 2322780 - DNA, 25 bp, Homo sapien
gcgtcttcatgaagttccgagcgca

SEQ ID NO: 2322781 - DNA, 25 bp, Homo sapien
tcttcatgaagttccgagcgcagct

SEQ ID NO: 2322782 - DNA, 25 bp, Homo sapien
atgaagttccgagcgcagctgcaga

SEQ ID NO: 2322783 - DNA, 25 bp, Homo sapien
gaatgcctgctcgtaagccgaatgg

SEQ ID NO: 2322784 - DNA, 25 bp, Homo sapien
tggacatccatagcatcaatgcgga

SEQ ID NO: 2322785 - DNA, 25 bp, Homo sapien
cagttggtccaatagacacggccag

SEQ ID NO: 2322786 - DNA, 25 bp, Homo sapien
tcatcagcgatgtacaggacctggt

SEQ ID NO: 2322787 - DNA, 25 bp, Homo sapien
aggttcaggggccactgctttgtct

SEQ ID NO: 2322788 - DNA, 25 bp, Homo sapien
caggttcaggggccactgctttgtc

SEQ ID NO: 2322789 - DNA, 25 bp, Homo sapien
ggttcaggggccactgctttgtctt

SEQ ID NO: 2322790 - DNA, 25 bp, Homo sapien
tcggtccagtacacgtttccggcca

SEQ ID NO: 2322791 - DNA, 25 bp, Homo sapien
cagtcgatggcgatgcctctgggca

SEQ ID NO: 2322792 - DNA, 25 bp, Homo sapien
tcaatcacatctcggcccgagtcgg

SEQ ID NO: 2322793 - DNA, 25 bp, Homo sapien
agcgtcttgcggttctcgcccttca

SEQ ID NO: 2322794 - DNA, 25 bp, Homo sapien
atggcgtggggctcgtcaatcatgc

SEQ ID NO: 2322795 - DNA, 25 bp, Homo sapien
caccacaatggcgtggggctcgtca

SEQ ID NO: 2322796 - DNA, 25 bp, Homo sapien
ggtccaccacaatggcgtggggctc

SEQ ID NO: 2322797 - DNA, 25 bp, Homo sapien
ccacaatggcgtggggctcgtcaat

SEQ ID NO: 2322798 - DNA, 25 bp, Homo sapien
ctaaaaccacagtgtgctcattcag

SEQ ID NO: 2322799 - DNA, 25 bp, Homo sapien
aagggcacgcatgtgggtgcagccc

SEQ ID NO: 2322800 - DNA, 25 bp, Homo sapien
tgctcattcagagccaccgacgctg

SEQ ID NO: 2322801 - DNA, 25 bp, Homo sapien
ggagggcattctgtccttctacaga

SEQ ID NO: 2322802 - DNA, 25 bp, Homo sapien
ccatcgctgccgtctcaatcttggg

SEQ ID NO: 2322803 - DNA, 25 bp, Homo sapien
tcccatccatcgctgccgtctcaat

SEQ ID NO: 2322804 - DNA, 25 bp, Homo sapien
tgcaccagtgtctcccgaagcgtcc

SEQ ID NO: 2322805 - DNA, 25 bp, Homo sapien
cttggggtggttgccccagtctgac

SEQ ID NO: 2322806 - DNA, 25 bp, Homo sapien
ccatgcccgtccctcctgcaccctg

SEQ ID NO: 2322807 - DNA, 25 bp, Homo sapien
ccctcctgcaccctgccccacaaac

SEQ ID NO: 2322808 - DNA, 25 bp, Homo sapien
atgcccgtccctcctgcaccctgcc

SEQ ID NO: 2322809 - DNA, 25 bp, Homo sapien
cgtccctcctgcaccctgccccaca

SEQ ID NO: 2322810 - DNA, 25 bp, Homo sapien
gagccggatgctgccgatgactgaa

SEQ ID NO: 2322811 - DNA, 25 bp, Homo sapien
tcattgtgataatccacggccaggc

SEQ ID NO: 2322812 - DNA, 25 bp, Homo sapien
tgactgaaagcttggcgtctgccca

SEQ ID NO: 2322813 - DNA, 25 bp, Homo sapien
ccagtacagccgctcattgtgataa

SEQ ID NO: 2322814 - DNA, 25 bp, Homo sapien
gatgtaatcctcaaagacgtcgatg

SEQ ID NO: 2322815 - DNA, 25 bp, Homo sapien
cacgattattgatgtaggtgacacc

SEQ ID NO: 2322816 - DNA, 25 bp, Homo sapien
caaacttatggatcttgaagacacg

SEQ ID NO: 2322817 - DNA, 25 bp, Homo sapien
gcttgtgctgatggtaaaggaccac

SEQ ID NO: 2322818 - DNA, 25 bp, Homo sapien
ttcttgcggtcacatgggttggtca

SEQ ID NO: 2322819 - DNA, 25 bp, Homo sapien
agccgcttcccattgggacaggtgc

SEQ ID NO: 2322820 - DNA, 25 bp, Homo sapien
gcatgtgccgttgtccagccgcttc

SEQ ID NO: 2322821 - DNA, 25 bp, Homo sapien
ggcagagccactcgcatttcttgcg

SEQ ID NO: 2322822 - DNA, 25 bp, Homo sapien
actgcaggttacaggttccaggccg

SEQ ID NO: 2322823 - DNA, 25 bp, Homo sapien
tcacacttgtcacccgtgtagcggg

SEQ ID NO: 2322824 - DNA, 25 bp, Homo sapien
gaggaaacagctgccaccgttgaag

SEQ ID NO: 2322825 - DNA, 25 bp, Homo sapien
cacttgggctgcctccgtgcattga

SEQ ID NO: 2322826 - DNA, 25 bp, Homo sapien
cgactgtggccctcgagaccacctg

SEQ ID NO: 2322827 - DNA, 25 bp, Homo sapien
gaggatgtgtgagcgcgactgtggc

SEQ ID NO: 2322828 - DNA, 25 bp, Homo sapien
atgtgtgagcgcgactgtggccctc

SEQ ID NO: 2322829 - DNA, 25 bp, Homo sapien
gagcgcgactgtggccctcgagacc

SEQ ID NO: 2322830 - DNA, 25 bp, Homo sapien
ggttgccctggttgacagtgcaggt

SEQ ID NO: 2322831 - DNA, 25 bp, Homo sapien
tcgcccaggaagccgggtaggcatc

SEQ ID NO: 2322832 - DNA, 25 bp, Homo sapien
gctgttgttggcacagtagcccgca

SEQ ID NO: 2322833 - DNA, 25 bp, Homo sapien
tactggcagcggtcgcccaggaagc

SEQ ID NO: 2322834 - DNA, 25 bp, Homo sapien
tcaaagtaggcagtgcagcggcatt

SEQ ID NO: 2322835 - DNA, 25 bp, Homo sapien
gagacagcggctgcacttgttcacc

SEQ ID NO: 2322836 - DNA, 25 bp, Homo sapien
tcacacctcgatccctcaaagtagg

SEQ ID NO: 2322837 - DNA, 25 bp, Homo sapien
cagcggcattgtcgggagccatcag

SEQ ID NO: 2322838 - DNA, 25 bp, Homo sapien
cattgctgcagtggccgacgcaggt

SEQ ID NO: 2322839 - DNA, 25 bp, Homo sapien
acaggagccgccattgctgcagtgg

SEQ ID NO: 2322840 - DNA, 25 bp, Homo sapien
atcattttgctgttcatggtacagg

SEQ ID NO: 2322841 - DNA, 25 bp, Homo sapien
agtggccgacgcaggtcagacagct

SEQ ID NO: 2322842 - DNA, 25 bp, Homo sapien
tgggtgaagcccgggcccaactcac

SEQ ID NO: 2322843 - DNA, 25 bp, Homo sapien
gctggctgaagacgtgctcctcaca

SEQ ID NO: 2322844 - DNA, 25 bp, Homo sapien
tgctggctgaagacgtgctcctcac

SEQ ID NO: 2322845 - DNA, 25 bp, Homo sapien
gcttataccagaataccactccggc

SEQ ID NO: 2322846 - DNA, 25 bp, Homo sapien
cagcaacagcagagggattaggatg

SEQ ID NO: 2322847 - DNA, 25 bp, Homo sapien
tcgccgcttataccagaataccact

SEQ ID NO: 2322848 - DNA, 25 bp, Homo sapien
ttggactcgccgcttataccagaat

SEQ ID NO: 2322849 - DNA, 25 bp, Homo sapien
gggtttccaatctccacgttcatgg

SEQ ID NO: 2322850 - DNA, 25 bp, Homo sapien
ggctctccgccttcgtacatcttgt

SEQ ID NO: 2322851 - DNA, 25 bp, Homo sapien
agggcaaagtcagcgtccagtaggc

SEQ ID NO: 2322852 - DNA, 25 bp, Homo sapien
ggtcatccgttggtgctggaagccc

SEQ ID NO: 2322853 - DNA, 25 bp, Homo sapien
ccagggagtggcgactgccatggcc

SEQ ID NO: 2322854 - DNA, 25 bp, Homo sapien
ggcccaggagttctcgcttctcgtc

SEQ ID NO: 2322855 - DNA, 25 bp, Homo sapien
ttctcgtccgtgctggccagggagt

SEQ ID NO: 2322856 - DNA, 25 bp, Homo sapien
aaggggtcccctatctcgtcctcag

SEQ ID NO: 2322857 - DNA, 25 bp, Homo sapien
tgccggcttgctcgctcacatataa

SEQ ID NO: 2322858 - DNA, 25 bp, Homo sapien
aataatactgtgctcgcttgccggc

SEQ ID NO: 2322859 - DNA, 25 bp, Homo sapien
tggcaaagtgtcttatacagggagg

SEQ ID NO: 2322860 - DNA, 25 bp, Homo sapien
tacatttatacatccggcggggcca

SEQ ID NO: 2322861 - DNA, 25 bp, Homo sapien
ccagagccacgtcttccagacaggg

SEQ ID NO: 2322862 - DNA, 25 bp, Homo sapien
ggaagctgtgggagcgggcaagcag

SEQ ID NO: 2322863 - DNA, 25 bp, Homo sapien
actccatcctttcccgcctacctca

SEQ ID NO: 2322864 - DNA, 25 bp, Homo sapien
gaagctgtgggagcgggcaagcagg

SEQ ID NO: 2322865 - DNA, 25 bp, Homo sapien
gctttcccttcctgggtgtggccca

SEQ ID NO: 2322866 - DNA, 25 bp, Homo sapien
tcagcaaaaattattaaaacgttca

SEQ ID NO: 2322867 - DNA, 25 bp, Homo sapien
gctgcccgctttcccttcctgggtg

SEQ ID NO: 2322868 - DNA, 25 bp, Homo sapien
atatctgtgttatttagttgtaaag

SEQ ID NO: 2322869 - DNA, 25 bp, Homo sapien
gcccgcggactgggcgcgaggcgcg

SEQ ID NO: 2322870 - DNA, 25 bp, Homo sapien
aaagagcaagaggaaccattccggg

SEQ ID NO: 2322871 - DNA, 25 bp, Homo sapien
cttcctaaggagccacgggccaaag

SEQ ID NO: 2322872 - DNA, 25 bp, Homo sapien
cctaaggagccacgggccaaagagc

SEQ ID NO: 2322873 - DNA, 25 bp, Homo sapien
ggaaccattccgggagcagccgcat

SEQ ID NO: 2322874 - DNA, 25 bp, Homo sapien
atggatgctcccgacacagagccca

SEQ ID NO: 2322875 - DNA, 25 bp, Homo sapien
tgggaaatgtgatgggaggctggct

SEQ ID NO: 2322876 - DNA, 25 bp, Homo sapien
tagccaagttcagccgtgtctgcct

SEQ ID NO: 2322877 - DNA, 25 bp, Homo sapien
tgtctgcctgagtccgtgtgtgcgt

SEQ ID NO: 2322878 - DNA, 25 bp, Homo sapien
caattacctcgtccctgacccctct

SEQ ID NO: 2322879 - DNA, 25 bp, Homo sapien
tctttagacgtttgtgttgtctctc

SEQ ID NO: 2322880 - DNA, 25 bp, Homo sapien
gccttgcttctgtccttattacctc

SEQ ID NO: 2322881 - DNA, 25 bp, Homo sapien
gttgtctctctccaattacctcgtc

SEQ ID NO: 2322882 - DNA, 25 bp, Homo sapien
gggaggatcaggctgtcagcccccc

SEQ ID NO: 2322883 - DNA, 25 bp, Homo sapien
tgctgctgggggcaacaaactccac

SEQ ID NO: 2322884 - DNA, 25 bp, Homo sapien
agccgcattgcagggtgcacctccc

SEQ ID NO: 2322885 - DNA, 25 bp, Homo sapien
caaactccacttcggggagtggctc

SEQ ID NO: 2322886 - DNA, 25 bp, Homo sapien
ccaccgatcttggagacagcatggg

SEQ ID NO: 2322887 - DNA, 25 bp, Homo sapien
ccgttctatgtgtctcaggtggcca

SEQ ID NO: 2322888 - DNA, 25 bp, Homo sapien
catgggctcgaggacaagatggatc

SEQ ID NO: 2322889 - DNA, 25 bp, Homo sapien
gatggatcgagaggcaggagcggcc

SEQ ID NO: 2322890 - DNA, 25 bp, Homo sapien
gccccaggtactgcggccttccgga

SEQ ID NO: 2322891 - DNA, 25 bp, Homo sapien
tactgcggccttccggactctggta

SEQ ID NO: 2322892 - DNA, 25 bp, Homo sapien
aggtactgcggccttccggactctg

SEQ ID NO: 2322893 - DNA, 25 bp, Homo sapien
gcgcagccccaggtactgcggcctt

SEQ ID NO: 2322894 - DNA, 25 bp, Homo sapien
aggcgcggcccacgcctaggccgtc

SEQ ID NO: 2322895 - DNA, 25 bp, Homo sapien
ccgtgtggttggtcggccaggccca

SEQ ID NO: 2322896 - DNA, 25 bp, Homo sapien
acgcctaggccgtccgaagaccttg

SEQ ID NO: 2322897 - DNA, 25 bp, Homo sapien
ggccgtccgaagaccttggctctgg

SEQ ID NO: 2322898 - DNA, 25 bp, Homo sapien
ctgcgcgggcaacgccccggctgcc

SEQ ID NO: 2322899 - DNA, 25 bp, Homo sapien
tgcgcgggcaacgccccggctgccc

SEQ ID NO: 2322900 - DNA, 25 bp, Homo sapien
gcgaaaacttgagggtatgcacccg

SEQ ID NO: 2322901 - DNA, 25 bp, Homo sapien
ccgaagatctttttggcgcgcgccg

SEQ ID NO: 2322902 - DNA, 25 bp, Homo sapien
tgccggtcaccagcagcgaaaactt

SEQ ID NO: 2322903 - DNA, 25 bp, Homo sapien
tatgcacccgaaagtagaagtcccc

SEQ ID NO: 2322904 - DNA, 25 bp, Homo sapien
tccgaactcgacacgcttggagggc

SEQ ID NO: 2322905 - DNA, 25 bp, Homo sapien
cgagttgtggcggaaatacacactg

SEQ ID NO: 2322906 - DNA, 25 bp, Homo sapien
cctccagggcgagcgtagactgcag

SEQ ID NO: 2322907 - DNA, 25 bp, Homo sapien
agggcggcacgatgctgacactgag

SEQ ID NO: 2322908 - DNA, 25 bp, Homo sapien
acctgcgacgggtcgtacaggcacg

SEQ ID NO: 2322909 - DNA, 25 bp, Homo sapien
gctctgcgtgtgctcggtgaagcac

SEQ ID NO: 2322910 - DNA, 25 bp, Homo sapien
actccacgtggcaattgaaagcgcg

SEQ ID NO: 2322911 - DNA, 25 bp, Homo sapien
cttgcgcgcgcggtttgtcttctca

SEQ ID NO: 2322912 - DNA, 25 bp, Homo sapien
actctggaagttatagtctgggcac

SEQ ID NO: 2322913 - DNA, 25 bp, Homo sapien
ctatccgaagtaggggtgctcactc

SEQ ID NO: 2322914 - DNA, 25 bp, Homo sapien
tctggaagttatagtctgggcacac

SEQ ID NO: 2322915 - DNA, 25 bp, Homo sapien
tccgaagtaggggtgctcactctgg

SEQ ID NO: 2322916 - DNA, 25 bp, Homo sapien
tgccaggccaggagttattaaagct

SEQ ID NO: 2322917 - DNA, 25 bp, Homo sapien
ctagctgagggtcccgagaagccat

SEQ ID NO: 2322918 - DNA, 25 bp, Homo sapien
caggtggagctcgactgcctggact

SEQ ID NO: 2322919 - DNA, 25 bp, Homo sapien
cactccgcataaggaaaagggcacc

SEQ ID NO: 2322920 - DNA, 25 bp, Homo sapien
actgattatgatcaagtaaacatca

SEQ ID NO: 2322921 - DNA, 25 bp, Homo sapien
gattatgatcaagtaaacatcactg

SEQ ID NO: 2322922 - DNA, 25 bp, Homo sapien
ttatgatcaagtaaacatcactgca

SEQ ID NO: 2322923 - DNA, 25 bp, Homo sapien
tatgatcaattatcataatgtaact

SEQ ID NO: 2322924 - DNA, 25 bp, Homo sapien
ccctcctgttgttcacttgtcccat

SEQ ID NO: 2322925 - DNA, 25 bp, Homo sapien
cacccctcctgttgttcacttgtcc

SEQ ID NO: 2322926 - DNA, 25 bp, Homo sapien
atgattcccgtctgtagccccaggg

SEQ ID NO: 2322927 - DNA, 25 bp, Homo sapien
tttctttatgattcccgtctgtagc

SEQ ID NO: 2322928 - DNA, 25 bp, Homo sapien
ttctttatgattcccgtctgtagcc

SEQ ID NO: 2322929 - DNA, 25 bp, Homo sapien
tttatgattcccgtctgtagcccca

SEQ ID NO: 2322930 - DNA, 25 bp, Homo sapien
ggcagcaagctgtcggaagaagacc

SEQ ID NO: 2322931 - DNA, 25 bp, Homo sapien
gaagaagaccgttcggagaacgcat

SEQ ID NO: 2322932 - DNA, 25 bp, Homo sapien
ttcggagaacgcatgcgcgagaaga

SEQ ID NO: 2322933 - DNA, 25 bp, Homo sapien
aacgcatgcgcgagaagagctcgct

SEQ ID NO: 2322934 - DNA, 25 bp, Homo sapien
caactcggaagtcgcaggaggtcca

SEQ ID NO: 2322935 - DNA, 25 bp, Homo sapien
actcggaagtcgcaggaggtccagc

SEQ ID NO: 2322936 - DNA, 25 bp, Homo sapien
cggaagtcgcaggaggtccagccac

SEQ ID NO: 2322937 - DNA, 25 bp, Homo sapien
tcggaagtcgcaggaggtccagcca

SEQ ID NO: 2322938 - DNA, 25 bp, Homo sapien
ccgagccgcccaaaacaaagagaag

SEQ ID NO: 2322939 - DNA, 25 bp, Homo sapien
cgagccgcccaaaacaaagagaagt

SEQ ID NO: 2322940 - DNA, 25 bp, Homo sapien
aatgccacgtgaaatgggcggtcac

SEQ ID NO: 2322941 - DNA, 25 bp, Homo sapien
gtgaaatgggcggtcacgaggccct

SEQ ID NO: 2322942 - DNA, 25 bp, Homo sapien
tgccacgtgaaatgggcggtcacga

SEQ ID NO: 2322943 - DNA, 25 bp, Homo sapien
gaaatgggcggtcacgaggccctgg

SEQ ID NO: 2322944 - DNA, 25 bp, Homo sapien
gaaaactccgctcatttgccagcac

SEQ ID NO: 2322945 - DNA, 25 bp, Homo sapien
gctcagagctggccggaaaggctca

SEQ ID NO: 2322946 - DNA, 25 bp, Homo sapien
caagcagtgaagctcggttgcatca

SEQ ID NO: 2322947 - DNA, 25 bp, Homo sapien
tcagcttgtgagaccaggccgaaaa

SEQ ID NO: 2322948 - DNA, 25 bp, Homo sapien
ccgttccacctccttccagccctca

SEQ ID NO: 2322949 - DNA, 25 bp, Homo sapien
cgttccacctccttccagccctcac

SEQ ID NO: 2322950 - DNA, 25 bp, Homo sapien
ggagacctttagcagtccgtgagga

SEQ ID NO: 2322951 - DNA, 25 bp, Homo sapien
ctttagcagtccgtgaggaagagct

SEQ ID NO: 2322952 - DNA, 25 bp, Homo sapien
gctgaggccacagattgtagagcaa

SEQ ID NO: 2322953 - DNA, 25 bp, Homo sapien
gccacagattgtagagcaatgcagg

SEQ ID NO: 2322954 - DNA, 25 bp, Homo sapien
tcctgcagggcaccataaactgata

SEQ ID NO: 2322955 - DNA, 25 bp, Homo sapien
ttcctgcagggcaccataaactgat

SEQ ID NO: 2322956 - DNA, 25 bp, Homo sapien
cctgcagggcaccataaactgatac

SEQ ID NO: 2322957 - DNA, 25 bp, Homo sapien
tccagagagggcaactgagattcca

SEQ ID NO: 2322958 - DNA, 25 bp, Homo sapien
caagcttgagatcaacgtccaaggg

SEQ ID NO: 2322959 - DNA, 25 bp, Homo sapien
ttgtcctccaaaagcctatgtctcc

SEQ ID NO: 2322960 - DNA, 25 bp, Homo sapien
caaggggtggttctgatttgctcca

SEQ ID NO: 2322961 - DNA, 25 bp, Homo sapien
tgagcccgaatggccatcctgacca

SEQ ID NO: 2322962 - DNA, 25 bp, Homo sapien
agcccgaatggccatcctgaccagc

SEQ ID NO: 2322963 - DNA, 25 bp, Homo sapien
gctgagcccgaatggccatcctgac

SEQ ID NO: 2322964 - DNA, 25 bp, Homo sapien
gtgctgagcccgaatggccatcctg

SEQ ID NO: 2322965 - DNA, 25 bp, Homo sapien
gagctccaggccacgacactgcctg

SEQ ID NO: 2322966 - DNA, 25 bp, Homo sapien
tcaggatcactgtccgacaggctct

SEQ ID NO: 2322967 - DNA, 25 bp, Homo sapien
tctgcagcaactcccacatctcagg

SEQ ID NO: 2322968 - DNA, 25 bp, Homo sapien
tgtccgacaggctctcctggcctgt

SEQ ID NO: 2322969 - DNA, 25 bp, Homo sapien
gacttgcactgcctttgcttgaggg

SEQ ID NO: 2322970 - DNA, 25 bp, Homo sapien
aaacttgtgcttctaggctcctcct

SEQ ID NO: 2322971 - DNA, 25 bp, Homo sapien
tgttacttcctgtacccatggtggc

SEQ ID NO: 2322972 - DNA, 25 bp, Homo sapien
ccagagctgaaagcgggagtactcc

SEQ ID NO: 2322973 - DNA, 25 bp, Homo sapien
ctcttgccaggataaccctccgagt

SEQ ID NO: 2322974 - DNA, 25 bp, Homo sapien
tccagcgcagctcggctgcagaagt

SEQ ID NO: 2322975 - DNA, 25 bp, Homo sapien
caggataaccctccgagtacttgtt

SEQ ID NO: 2322976 - DNA, 25 bp, Homo sapien
ccctccgagtacttgttgttcagac

SEQ ID NO: 2322977 - DNA, 25 bp, Homo sapien
tgggttcccccactgggagcaccat

SEQ ID NO: 2322978 - DNA, 25 bp, Homo sapien
aaggactgggaagttcactcctcaa

SEQ ID NO: 2322979 - DNA, 25 bp, Homo sapien
tcaatgaacactgggaaggtacagg

SEQ ID NO: 2322980 - DNA, 25 bp, Homo sapien
agaaaggactctcaaccatcagcaa

SEQ ID NO: 2322981 - DNA, 25 bp, Homo sapien
tgtgtagacggccaggttggctggg

SEQ ID NO: 2322982 - DNA, 25 bp, Homo sapien
actgtgcaggatccaggtcaaaggc

SEQ ID NO: 2322983 - DNA, 25 bp, Homo sapien
catgatccggtcgtgaggttgcaga

SEQ ID NO: 2322984 - DNA, 25 bp, Homo sapien
ccggagtagggctggacattgactc

SEQ ID NO: 2322985 - DNA, 25 bp, Homo sapien
gcttatagggcatagactcgaagaa

SEQ ID NO: 2322986 - DNA, 25 bp, Homo sapien
gttgagcttatagggcatagactcg

SEQ ID NO: 2322987 - DNA, 25 bp, Homo sapien
gctgatatccgcttgacgtcagaca

SEQ ID NO: 2322988 - DNA, 25 bp, Homo sapien
gtggctgatatccgcttgacgtcag

SEQ ID NO: 2322989 - DNA, 25 bp, Homo sapien
caccaccagggccaagagcccctcc

SEQ ID NO: 2322990 - DNA, 25 bp, Homo sapien
aggaagcagggcagctcactctcct

SEQ ID NO: 2322991 - DNA, 25 bp, Homo sapien
ttctccaggggaggaccaccaccag

SEQ ID NO: 2322992 - DNA, 25 bp, Homo sapien
ctgagaaggaagcagggcagctcac

SEQ ID NO: 2322993 - DNA, 25 bp, Homo sapien
ggacagacacacaaacagctaaagc

SEQ ID NO: 2322994 - DNA, 25 bp, Homo sapien
tggacagacacacaaacagctaaag

SEQ ID NO: 2322995 - DNA, 25 bp, Homo sapien
ctggacagacacacaaacagctaaa

SEQ ID NO: 2322996 - DNA, 25 bp, Homo sapien
gacagacacacaaacagctaaagcc

SEQ ID NO: 2322997 - DNA, 25 bp, Homo sapien
tctcatgcgggcgtagtcaatgagg

SEQ ID NO: 2322998 - DNA, 25 bp, Homo sapien
tatgatgagccgtggccggaaaagt

SEQ ID NO: 2322999 - DNA, 25 bp, Homo sapien
ccggaaaagtcgagcagtcagtgcc

SEQ ID NO: 2323000 - DNA, 25 bp, Homo sapien
cgagcataggcgctggtgccagcta

SEQ ID NO: 2323001 - DNA, 25 bp, Homo sapien
tggcccctcgaagagtcttgtgagt

SEQ ID NO: 2323002 - DNA, 25 bp, Homo sapien
tgcttgaaaggcgagggaatcacct

SEQ ID NO: 2323003 - DNA, 25 bp, Homo sapien
tggtgacgatgtccgcgtgcttgaa

SEQ ID NO: 2323004 - DNA, 25 bp, Homo sapien
gcaggtgtgctttgacttcatcaca

SEQ ID NO: 2323005 - DNA, 25 bp, Homo sapien
gctgcaggtgggaatgaattcctct

SEQ ID NO: 2323006 - DNA, 25 bp, Homo sapien
ctgggcaggagtcttaagggctgca

SEQ ID NO: 2323007 - DNA, 25 bp, Homo sapien
aaggagaactctcacagactgggca

SEQ ID NO: 2323008 - DNA, 25 bp, Homo sapien
gaatgaattcctctcaggtccaggc

SEQ ID NO: 2323009 - DNA, 25 bp, Homo sapien
agtggtagagggaatcagcccctca

SEQ ID NO: 2323010 - DNA, 25 bp, Homo sapien
cagtggtagagggaatcagcccctc

SEQ ID NO: 2323011 - DNA, 25 bp, Homo sapien
gtggtagagggaatcagcccctcaa

SEQ ID NO: 2323012 - DNA, 25 bp, Homo sapien
gcagaggaagctggcggacctgggc

SEQ ID NO: 2323013 - DNA, 25 bp, Homo sapien
aggaagctggcggacctgggcccca

SEQ ID NO: 2323014 - DNA, 25 bp, Homo sapien
agctggcggacctgggccccaaggg

SEQ ID NO: 2323015 - DNA, 25 bp, Homo sapien
ggcagaggaagctggcggacctggg

SEQ ID NO: 2323016 - DNA, 25 bp, Homo sapien
aagttgattcggtcctcaaatgtgt

SEQ ID NO: 2323017 - DNA, 25 bp, Homo sapien
tgggaacacggcaaagttgattcgg

SEQ ID NO: 2323018 - DNA, 25 bp, Homo sapien
tcccggccagtcttggggtccacag

SEQ ID NO: 2323019 - DNA, 25 bp, Homo sapien
cacccctttccggtagaagatgagc

SEQ ID NO: 2323020 - DNA, 25 bp, Homo sapien
cccagcatcagttagcaaggtgcag

SEQ ID NO: 2323021 - DNA, 25 bp, Homo sapien
cctgcaccctcagcatagctctgtg

SEQ ID NO: 2323022 - DNA, 25 bp, Homo sapien
caaggtgcagggtctaagcctccag

SEQ ID NO: 2323023 - DNA, 25 bp, Homo sapien
caccctacaaagacaggatccccaa

SEQ ID NO: 2323024 - DNA, 25 bp, Homo sapien
agaacctgcagggagtactcccgga

SEQ ID NO: 2323025 - DNA, 25 bp, Homo sapien
ctgataccagtgagtagcctcgctc

SEQ ID NO: 2323026 - DNA, 25 bp, Homo sapien
gcatctgccatggcccgagcattct

SEQ ID NO: 2323027 - DNA, 25 bp, Homo sapien
agtgagtagcctcgctctagcaggg

SEQ ID NO: 2323028 - DNA, 25 bp, Homo sapien
cttcggtctccaggacaggtgttct

SEQ ID NO: 2323029 - DNA, 25 bp, Homo sapien
tggcagtgatggatacaagctctag

SEQ ID NO: 2323030 - DNA, 25 bp, Homo sapien
agtgatggatacaagctctagcacc

SEQ ID NO: 2323031 - DNA, 25 bp, Homo sapien
caggccgcccggtgtgatggcactt

SEQ ID NO: 2323032 - DNA, 25 bp, Homo sapien
gagggatgagcatagcccaaggtca

SEQ ID NO: 2323033 - DNA, 25 bp, Homo sapien
aggggagggatgagcatagcccaag

SEQ ID NO: 2323034 - DNA, 25 bp, Homo sapien
ttccctcctcaaaccccaggtctca

SEQ ID NO: 2323035 - DNA, 25 bp, Homo sapien
gggatgagcatagcccaaggtcacc

SEQ ID NO: 2323036 - DNA, 25 bp, Homo sapien
aagtcatcctcacggaactgtcgag

SEQ ID NO: 2323037 - DNA, 25 bp, Homo sapien
cacggaactgtcgagaagttaaggc

SEQ ID NO: 2323038 - DNA, 25 bp, Homo sapien
aaagtccacaactctccggaagtca

SEQ ID NO: 2323039 - DNA, 25 bp, Homo sapien
tctaagccaatgttgaccccttcat

SEQ ID NO: 2323040 - DNA, 25 bp, Homo sapien
agagggtgaggaaacaagtggtcag

SEQ ID NO: 2323041 - DNA, 25 bp, Homo sapien
gtgaggaaacaagtggtcagagctc

SEQ ID NO: 2323042 - DNA, 25 bp, Homo sapien
aaggcagtgagatcagctgggggag

SEQ ID NO: 2323043 - DNA, 25 bp, Homo sapien
aggaaacaagtggtcagagctctag

SEQ ID NO: 2323044 - DNA, 25 bp, Homo sapien
tgctccacccgttgcctgaggttgg

SEQ ID NO: 2323045 - DNA, 25 bp, Homo sapien
gaggttggccagacgctgacttgtt

SEQ ID NO: 2323046 - DNA, 25 bp, Homo sapien
cttgtttctgagtccttaagcagga

SEQ ID NO: 2323047 - DNA, 25 bp, Homo sapien
ctgacttgtttctgagtccttaagc

SEQ ID NO: 2323048 - DNA, 25 bp, Homo sapien
ccaggcatggggaaggccctggcaa

SEQ ID NO: 2323049 - DNA, 25 bp, Homo sapien
aggcatggggaaggccctggcaaac

SEQ ID NO: 2323050 - DNA, 25 bp, Homo sapien
tcaatgctcatcaaaaccaggcatg

SEQ ID NO: 2323051 - DNA, 25 bp, Homo sapien
aaccaggcatggggaaggccctggc

SEQ ID NO: 2323052 - DNA, 25 bp, Homo sapien
taagtgagaggtcttccctcccgca

SEQ ID NO: 2323053 - DNA, 25 bp, Homo sapien
ttccccaagaaagaggacgcgtctc

SEQ ID NO: 2323054 - DNA, 25 bp, Homo sapien
tctcagttacaaattctgggaaggg

SEQ ID NO: 2323055 - DNA, 25 bp, Homo sapien
ggaagggagactatacctggctctt

SEQ ID NO: 2323056 - DNA, 25 bp, Homo sapien
gagcggagcggtgtacacattgagg

SEQ ID NO: 2323057 - DNA, 25 bp, Homo sapien
ggtgtcggctctgatcagagacaga

SEQ ID NO: 2323058 - DNA, 25 bp, Homo sapien
caaattgaatttgctgcgcctgcta

SEQ ID NO: 2323059 - DNA, 25 bp, Homo sapien
tgcgcctgctaatcacgtctggtgt

SEQ ID NO: 2323060 - DNA, 25 bp, Homo sapien
tggagagataggagcttccgcgtcc

SEQ ID NO: 2323061 - DNA, 25 bp, Homo sapien
cacagaaaaaccgatgcagagggac

SEQ ID NO: 2323062 - DNA, 25 bp, Homo sapien
tcagagggcttagggcaatctcgaa

SEQ ID NO: 2323063 - DNA, 25 bp, Homo sapien
ggaccaggcgcccttaataatggca

SEQ ID NO: 2323064 - DNA, 25 bp, Homo sapien
cctggagaaggacgatctggatttc

SEQ ID NO: 2323065 - DNA, 25 bp, Homo sapien
tctggatttcccgtgagaggccttg

SEQ ID NO: 2323066 - DNA, 25 bp, Homo sapien
tagagtgtgtggtgaatgtccctgc

SEQ ID NO: 2323067 - DNA, 25 bp, Homo sapien
tctctatcggttcaaagccctggag

SEQ ID NO: 2323068 - DNA, 25 bp, Homo sapien
gtggatgggattacaggcgtccgcc

SEQ ID NO: 2323069 - DNA, 25 bp, Homo sapien
cacacccggctaatttttatatatt

SEQ ID NO: 2323070 - DNA, 25 bp, Homo sapien
cgattatccttcctcagcttcctga

SEQ ID NO: 2323071 - DNA, 25 bp, Homo sapien
agcgattatccttcctcagcttcct

SEQ ID NO: 2323072 - DNA, 25 bp, Homo sapien
gttcgtgccgcagtaacagacacag

SEQ ID NO: 2323073 - DNA, 25 bp, Homo sapien
tcttgtcttcctagaccccacagag

SEQ ID NO: 2323074 - DNA, 25 bp, Homo sapien
gaattgggaaagtcccacactgtcc

SEQ ID NO: 2323075 - DNA, 25 bp, Homo sapien
tattgtttgtttgaggttcgtgccg

SEQ ID NO: 2323076 - DNA, 25 bp, Homo sapien
gatcctgacagaccatggacagagg

SEQ ID NO: 2323077 - DNA, 25 bp, Homo sapien
cgcttcaaacttcgaatggccaaaa

SEQ ID NO: 2323078 - DNA, 25 bp, Homo sapien
ttcgtctcaacaactccgtgagtcg

SEQ ID NO: 2323079 - DNA, 25 bp, Homo sapien
gatacctacactggcattggactcc

SEQ ID NO: 2323080 - DNA, 25 bp, Homo sapien
taagatgtagtatggcagtcacagc

SEQ ID NO: 2323081 - DNA, 25 bp, Homo sapien
gctgatgggccattagaaacccagg

SEQ ID NO: 2323082 - DNA, 25 bp, Homo sapien
taaagttggtgcgtagcctggcagt

SEQ ID NO: 2323083 - DNA, 25 bp, Homo sapien
gaaacccaggtaggtcatttgcagg

SEQ ID NO: 2323084 - DNA, 25 bp, Homo sapien
tttagagacagggttacccagctct

SEQ ID NO: 2323085 - DNA, 25 bp, Homo sapien
aattagggcccactgcaccctcaaa

SEQ ID NO: 2323086 - DNA, 25 bp, Homo sapien
gacagggttacccagctctgtctgt

SEQ ID NO: 2323087 - DNA, 25 bp, Homo sapien
caattagggcccactgcaccctcaa

SEQ ID NO: 2323088 - DNA, 25 bp, Homo sapien
tatatctaagactccaagtaaggaa

SEQ ID NO: 2323089 - DNA, 25 bp, Homo sapien
tttatatctaagactccaagtaagg

SEQ ID NO: 2323090 - DNA, 25 bp, Homo sapien
agtttatatctaagactccaagtaa

SEQ ID NO: 2323091 - DNA, 25 bp, Homo sapien
tatctaagactccaagtaaggaaga

SEQ ID NO: 2323092 - DNA, 25 bp, Homo sapien
ttcagatgcagcttatgagaacagt

SEQ ID NO: 2323093 - DNA, 25 bp, Homo sapien
cgctgttggtgtaagtacagatcca

SEQ ID NO: 2323094 - DNA, 25 bp, Homo sapien
tccggcagaacagatctttacaatg

SEQ ID NO: 2323095 - DNA, 25 bp, Homo sapien
gaagtctccattaataatgtgagct

SEQ ID NO: 2323096 - DNA, 25 bp, Homo sapien
tttcttccggcaaaattccggcaga

SEQ ID NO: 2323097 - DNA, 25 bp, Homo sapien
cattcaagggtgaagggggcgggag

SEQ ID NO: 2323098 - DNA, 25 bp, Homo sapien
tcattcaagggtgaagggggcggga

SEQ ID NO: 2323099 - DNA, 25 bp, Homo sapien
gatataccatgcaaacaccaattag

SEQ ID NO: 2323100 - DNA, 25 bp, Homo sapien
cagccgcatgctgtctgcaacaaac

SEQ ID NO: 2323101 - DNA, 25 bp, Homo sapien
gattgcatctaaaagcacgacccag

SEQ ID NO: 2323102 - DNA, 25 bp, Homo sapien
tagaaggatgaaagacgatatacca

SEQ ID NO: 2323103 - DNA, 25 bp, Homo sapien
cctgccctagtttgttgggtgtctc

SEQ ID NO: 2323104 - DNA, 25 bp, Homo sapien
tgatatatgaatacacagctactcc

SEQ ID NO: 2323105 - DNA, 25 bp, Homo sapien
aactttgtttgcctgccctagtttg

SEQ ID NO: 2323106 - DNA, 25 bp, Homo sapien
tttgcctgccctagtttgttgggtg

SEQ ID NO: 2323107 - DNA, 25 bp, Homo sapien
aagagcttgggaatttgttgacaga

SEQ ID NO: 2323108 - DNA, 25 bp, Homo sapien
tgtgctctgtattgcggcagttctt

SEQ ID NO: 2323109 - DNA, 25 bp, Homo sapien
cattgttgggagctgaatggagcac

SEQ ID NO: 2323110 - DNA, 25 bp, Homo sapien
gctctcttgttatcagatttgccaa

SEQ ID NO: 2323111 - DNA, 25 bp, Homo sapien
acttatctaggatcacaaagcctgg

SEQ ID NO: 2323112 - DNA, 25 bp, Homo sapien
tagggctaggtaggcatggtcctaa

SEQ ID NO: 2323113 - DNA, 25 bp, Homo sapien
caaagcctggtatgtgatagggcta

SEQ ID NO: 2323114 - DNA, 25 bp, Homo sapien
tgctgcccaatgcactacaagccaa

SEQ ID NO: 2323115 - DNA, 25 bp, Homo sapien
gctgggtgcagtgacctgtaattgc

SEQ ID NO: 2323116 - DNA, 25 bp, Homo sapien
actttgggaggccaaagcagaagga

SEQ ID NO: 2323117 - DNA, 25 bp, Homo sapien
gggtgcagtgacctgtaattgcagc

SEQ ID NO: 2323118 - DNA, 25 bp, Homo sapien
ctgggtgcagtgacctgtaattgca

SEQ ID NO: 2323119 - DNA, 25 bp, Homo sapien
gaattatacagaatttgtcgttttg

SEQ ID NO: 2323120 - DNA, 25 bp, Homo sapien
tagcgtgtcgtcaaggttatccatg

SEQ ID NO: 2323121 - DNA, 25 bp, Homo sapien
ttctaccatgtagctattatgaata

SEQ ID NO: 2323122 - DNA, 25 bp, Homo sapien
gtgactggctttagcgtgtcgtcaa

SEQ ID NO: 2323123 - DNA, 25 bp, Homo sapien
ttgcttgaggccaggagtctgagac

SEQ ID NO: 2323124 - DNA, 25 bp, Homo sapien
tgcctataattccaggtgctcagga

SEQ ID NO: 2323125 - DNA, 25 bp, Homo sapien
tgctcaggaggctgaggcaggagaa

SEQ ID NO: 2323126 - DNA, 25 bp, Homo sapien
gagtctgagaccagcctggacaaca

SEQ ID NO: 2323127 - DNA, 25 bp, Homo sapien
ccagatagttgccactcaaaatact

SEQ ID NO: 2323128 - DNA, 25 bp, Homo sapien
gttgccactcaaaatactcctcttc

SEQ ID NO: 2323129 - DNA, 25 bp, Homo sapien
gatagttgccactcaaaatactcct

SEQ ID NO: 2323130 - DNA, 25 bp, Homo sapien
gccccagatagttgccactcaaaat

SEQ ID NO: 2323131 - DNA, 25 bp, Homo sapien
tcccactactagttatggattcggt

SEQ ID NO: 2323132 - DNA, 25 bp, Homo sapien
agtattatatgagaaaggattgaaa

SEQ ID NO: 2323133 - DNA, 25 bp, Homo sapien
tatagctagtgatgtcctcttacat

SEQ ID NO: 2323134 - DNA, 25 bp, Homo sapien
ctggcgggaccaagggaatgcaaaa

SEQ ID NO: 2323135 - DNA, 25 bp, Homo sapien
agtccaaaaccattctgttgtttat

SEQ ID NO: 2323136 - DNA, 25 bp, Homo sapien
atgagtccaaaaccattctgttgtt

SEQ ID NO: 2323137 - DNA, 25 bp, Homo sapien
gatgagtccaaaaccattctgttgt

SEQ ID NO: 2323138 - DNA, 25 bp, Homo sapien
gagtccaaaaccattctgttgttta

SEQ ID NO: 2323139 - DNA, 25 bp, Homo sapien
ccaaggtgtgcttatctgtgtaaaa

SEQ ID NO: 2323140 - DNA, 25 bp, Homo sapien
tggcattgccacaggctatcaaaca

SEQ ID NO: 2323141 - DNA, 25 bp, Homo sapien
tgcatctggctaggtaattctctct

SEQ ID NO: 2323142 - DNA, 25 bp, Homo sapien
gcctttccaacctaagtgcatctgg

SEQ ID NO: 2323143 - DNA, 25 bp, Homo sapien
acccccaccaccagtttcaagcgat

SEQ ID NO: 2323144 - DNA, 25 bp, Homo sapien
cttttgcctaggctgctggagtgaa

SEQ ID NO: 2323145 - DNA, 25 bp, Homo sapien
cgctcttttgcctaggctgctggag

SEQ ID NO: 2323146 - DNA, 25 bp, Homo sapien
ctcattacaacctctgcccctctcc

SEQ ID NO: 2323147 - DNA, 25 bp, Homo sapien
taatttgcatgttatccttggtcag

SEQ ID NO: 2323148 - DNA, 25 bp, Homo sapien
agaatgcttcattaatttgcatgtt

SEQ ID NO: 2323149 - DNA, 25 bp, Homo sapien
tcattaatttgcatgttatccttgg

SEQ ID NO: 2323150 - DNA, 25 bp, Homo sapien
ttaatttgcatgttatccttggtca

SEQ ID NO: 2323151 - DNA, 25 bp, Homo sapien
gattccttcaaggaacatgtgttgc

SEQ ID NO: 2323152 - DNA, 25 bp, Homo sapien
ccaggccgattgttttgaagaatgt

SEQ ID NO: 2323153 - DNA, 25 bp, Homo sapien
tactacccaggtgatgttgtgtgca

SEQ ID NO: 2323154 - DNA, 25 bp, Homo sapien
gcatgtatcacctgagaacagtggt

SEQ ID NO: 2323155 - DNA, 25 bp, Homo sapien
tcatctcaaattgccttttaggaca

SEQ ID NO: 2323156 - DNA, 25 bp, Homo sapien
gcagccaagtattttggttaatgtt

SEQ ID NO: 2323157 - DNA, 25 bp, Homo sapien
gggcagccaagtattttggttaatg

SEQ ID NO: 2323158 - DNA, 25 bp, Homo sapien
tgccttttaggacagggcaagtttc

SEQ ID NO: 2323159 - DNA, 25 bp, Homo sapien
atgcccagctggcttttttttgtgg

SEQ ID NO: 2323160 - DNA, 25 bp, Homo sapien
ccagctggcttttttttgtggggcg

SEQ ID NO: 2323161 - DNA, 25 bp, Homo sapien
gtggggcgggggggacagagtctca

SEQ ID NO: 2323162 - DNA, 25 bp, Homo sapien
tgtggggcgggggggacagagtctc

SEQ ID NO: 2323163 - DNA, 25 bp, Homo sapien
tgagaaggatgagctcttggatgac

SEQ ID NO: 2323164 - DNA, 25 bp, Homo sapien
taggaagatgcacgtttgggaacaa

SEQ ID NO: 2323165 - DNA, 25 bp, Homo sapien
tgtgtacatgcgtgattgacaaagc

SEQ ID NO: 2323166 - DNA, 25 bp, Homo sapien
catgctaaggtggatagtgacttcc

SEQ ID NO: 2323167 - DNA, 25 bp, Homo sapien
agctcccagcaaccatcaaaatcaa

SEQ ID NO: 2323168 - DNA, 25 bp, Homo sapien
gtttctaatgctgttggtagagaca

SEQ ID NO: 2323169 - DNA, 25 bp, Homo sapien
cctggcccacttaaagtttctaatg

SEQ ID NO: 2323170 - DNA, 25 bp, Homo sapien
aagtctcccactttagtcttacaag

SEQ ID NO: 2323171 - DNA, 25 bp, Homo sapien
ggcctgatgaactcctaacaagtta

SEQ ID NO: 2323172 - DNA, 25 bp, Homo sapien
gaaggcctgatgaactcctaacaag

SEQ ID NO: 2323173 - DNA, 25 bp, Homo sapien
cctaacaagttaaatttcagagttg

SEQ ID NO: 2323174 - DNA, 25 bp, Homo sapien
tcttgaaggcctgatgaactcctaa

SEQ ID NO: 2323175 - DNA, 25 bp, Homo sapien
ccgcgggaaggactgctccaagtgt

SEQ ID NO: 2323176 - DNA, 25 bp, Homo sapien
actattgcgcccttccagtgcttcg

SEQ ID NO: 2323177 - DNA, 25 bp, Homo sapien
ccttcgagcgtggagcatggaaaaa

SEQ ID NO: 2323178 - DNA, 25 bp, Homo sapien
cgatgggtcagggtcggatggccgc

SEQ ID NO: 2323179 - DNA, 25 bp, Homo sapien
gattggtgtcctgacacaggtaacg

SEQ ID NO: 2323180 - DNA, 25 bp, Homo sapien
ggctcccagtgactccggattggtg

SEQ ID NO: 2323181 - DNA, 25 bp, Homo sapien
gagcgagcgagtgcgagtgcgcgcg

SEQ ID NO: 2323182 - DNA, 25 bp, Homo sapien
ctatctgacagacttgaagggttta

SEQ ID NO: 2323183 - DNA, 25 bp, Homo sapien
aggcccttcttgagcaatacagact

SEQ ID NO: 2323184 - DNA, 25 bp, Homo sapien
tcagggtctcaacagctgtggtctc

SEQ ID NO: 2323185 - DNA, 25 bp, Homo sapien
tccagctggcatggctccttgttgc

SEQ ID NO: 2323186 - DNA, 25 bp, Homo sapien
ccttcttgagcaatacagactcagg

SEQ ID NO: 2323187 - DNA, 25 bp, Homo sapien
gctggctctccagttccaaggtggg

SEQ ID NO: 2323188 - DNA, 25 bp, Homo sapien
tgctggacactgaccgccagctctg

SEQ ID NO: 2323189 - DNA, 25 bp, Homo sapien
tcttggccagatcaagaagcagctc

SEQ ID NO: 2323190 - DNA, 25 bp, Homo sapien
tccctgttgtcctctagaagtgccc

SEQ ID NO: 2323191 - DNA, 25 bp, Homo sapien
cggaggagatgacggcagccaatct

SEQ ID NO: 2323192 - DNA, 25 bp, Homo sapien
gaagtggatgggctcacaccacagc

SEQ ID NO: 2323193 - DNA, 25 bp, Homo sapien
tttccagctgcctattggtcaggtc

SEQ ID NO: 2323194 - DNA, 25 bp, Homo sapien
tcagaggtaagtctggcgaggaaac

SEQ ID NO: 2323195 - DNA, 25 bp, Homo sapien
ccagcaggtactgagtagccaaggt

SEQ ID NO: 2323196 - DNA, 25 bp, Homo sapien
ggcagcttgagcttcaggccctagg

SEQ ID NO: 2323197 - DNA, 25 bp, Homo sapien
acaaagaacatgagactggcctgct

SEQ ID NO: 2323198 - DNA, 25 bp, Homo sapien
gttggtattatgtggacccagcaca

SEQ ID NO: 2323199 - DNA, 25 bp, Homo sapien
ggccttgagaagattgagcactgca

SEQ ID NO: 2323200 - DNA, 25 bp, Homo sapien
tgaaaggaggcagcaataccaggca

SEQ ID NO: 2323201 - DNA, 25 bp, Homo sapien
aactcttgtcgacagcacatcctgg

SEQ ID NO: 2323202 - DNA, 25 bp, Homo sapien
gaagttcatggcgtagccctcaggc

SEQ ID NO: 2323203 - DNA, 25 bp, Homo sapien
ggccccagggactagcaagatagaa

SEQ ID NO: 2323204 - DNA, 25 bp, Homo sapien
tggactagcgggatggactatgccc

SEQ ID NO: 2323205 - DNA, 25 bp, Homo sapien
gagagctttagtagttcacctggac

SEQ ID NO: 2323206 - DNA, 25 bp, Homo sapien
tcaggtgatagagctcaggcaagtc

SEQ ID NO: 2323207 - DNA, 25 bp, Homo sapien
aagctcagatttacagtcccccagg

SEQ ID NO: 2323208 - DNA, 25 bp, Homo sapien
ccttttcagactttctcctctaggg

SEQ ID NO: 2323209 - DNA, 25 bp, Homo sapien
gggataacttccatgggttgctcag

SEQ ID NO: 2323210 - DNA, 25 bp, Homo sapien
cagactttctcctctagggttccta

SEQ ID NO: 2323211 - DNA, 25 bp, Homo sapien
ctggagactaagctgtaattgggaa

SEQ ID NO: 2323212 - DNA, 25 bp, Homo sapien
taaaagtaggctattttgttcatca

SEQ ID NO: 2323213 - DNA, 25 bp, Homo sapien
tgcattaaagtcctatcttgattaa

SEQ ID NO: 2323214 - DNA, 25 bp, Homo sapien
taaaataatattgcattaaagtcct

SEQ ID NO: 2323215 - DNA, 25 bp, Homo sapien
tcctagaacctcagggcactctttg

SEQ ID NO: 2323216 - DNA, 25 bp, Homo sapien
tggcaatggagcttggtgatgtacc

SEQ ID NO: 2323217 - DNA, 25 bp, Homo sapien
catcactgctacctttggttttgga

SEQ ID NO: 2323218 - DNA, 25 bp, Homo sapien
tttggacctcatcacacaaacacgt

SEQ ID NO: 2323219 - DNA, 25 bp, Homo sapien
tgtgcttgaccctcacagctcatgt

SEQ ID NO: 2323220 - DNA, 25 bp, Homo sapien
cttggccaagggtacagccacctgt

SEQ ID NO: 2323221 - DNA, 25 bp, Homo sapien
tcaggagcctcggatggcagttgct

SEQ ID NO: 2323222 - DNA, 25 bp, Homo sapien
catctgatggatagctgtgcttgac

SEQ ID NO: 2323223 - DNA, 25 bp, Homo sapien
agcaccagagctcgttctgcttggg

SEQ ID NO: 2323224 - DNA, 25 bp, Homo sapien
tgggacgactggtcaggtgcaaccc

SEQ ID NO: 2323225 - DNA, 25 bp, Homo sapien
acccatccaggatttgctgcttggc

SEQ ID NO: 2323226 - DNA, 25 bp, Homo sapien
agtagcaaagctgatgacctcctcc

SEQ ID NO: 2323227 - DNA, 25 bp, Homo sapien
cacaggcgggcatggtacaggtggt

SEQ ID NO: 2323228 - DNA, 25 bp, Homo sapien
gaagatcctcaagcaaagagtgcca

SEQ ID NO: 2323229 - DNA, 25 bp, Homo sapien
tagagggcagagttaaggtatgcca

SEQ ID NO: 2323230 - DNA, 25 bp, Homo sapien
tccttggtccccatcggaagatcct

SEQ ID NO: 2323231 - DNA, 25 bp, Homo sapien
ctgcagtctagttgcagtttcagga

SEQ ID NO: 2323232 - DNA, 25 bp, Homo sapien
gcagtctagttgcagtttcaggaca

SEQ ID NO: 2323233 - DNA, 25 bp, Homo sapien
aggacaccagacttctcacccctca

SEQ ID NO: 2323234 - DNA, 25 bp, Homo sapien
agtctagttgcagtttcaggacacc

SEQ ID NO: 2323235 - DNA, 25 bp, Homo sapien
gagccgcctcggttgtccagtaact

SEQ ID NO: 2323236 - DNA, 25 bp, Homo sapien
gccttcgggcagtagggacacaaca

SEQ ID NO: 2323237 - DNA, 25 bp, Homo sapien
tggaagtctacgtaatggtctcgcc

SEQ ID NO: 2323238 - DNA, 25 bp, Homo sapien
cggatcttaagctctaggaagggct

SEQ ID NO: 2323239 - DNA, 25 bp, Homo sapien
tcacaggacttagggcaggaaatca

SEQ ID NO: 2323240 - DNA, 25 bp, Homo sapien
cagagtctcagacaagaaagtgccc

SEQ ID NO: 2323241 - DNA, 25 bp, Homo sapien
gaaagtgcccatttgggtcccatag

SEQ ID NO: 2323242 - DNA, 25 bp, Homo sapien
tgtaatcacatgtcacacggcctct

SEQ ID NO: 2323243 - DNA, 25 bp, Homo sapien
tccctcttgccgttctggaggatga

SEQ ID NO: 2323244 - DNA, 25 bp, Homo sapien
gatgaggcggggtagctggaagcaa

SEQ ID NO: 2323245 - DNA, 25 bp, Homo sapien
gcaagcccggaccacccgcgagaag

SEQ ID NO: 2323246 - DNA, 25 bp, Homo sapien
cacccgcgagaagcgcaaacttttt

SEQ ID NO: 2323247 - DNA, 25 bp, Homo sapien
tgggctcgggatgcgcggtccaggg

SEQ ID NO: 2323248 - DNA, 25 bp, Homo sapien
ctgggctcgggatgcgcggtccagg

SEQ ID NO: 2323249 - DNA, 25 bp, Homo sapien
ggatgcgcggtccagggctggagtc

SEQ ID NO: 2323250 - DNA, 25 bp, Homo sapien
tcgggatgcgcggtccagggctgga

SEQ ID NO: 2323251 - DNA, 25 bp, Homo sapien
ggcactggctgcagacggctccgct

SEQ ID NO: 2323252 - DNA, 25 bp, Homo sapien
ccgggagcccagtagagcgagccat

SEQ ID NO: 2323253 - DNA, 25 bp, Homo sapien
aagtcgccgccgcaggcactggctg

SEQ ID NO: 2323254 - DNA, 25 bp, Homo sapien
cccgggagcccagtagagcgagcca

SEQ ID NO: 2323255 - DNA, 25 bp, Homo sapien
cgtctcagaggagggtgtggggaca

SEQ ID NO: 2323256 - DNA, 25 bp, Homo sapien
ggcgtctcagaggagggtgtgggga

SEQ ID NO: 2323257 - DNA, 25 bp, Homo sapien
gcgtctcagaggagggtgtggggac

SEQ ID NO: 2323258 - DNA, 25 bp, Homo sapien
gcagggctcgccatagctactgatt

SEQ ID NO: 2323259 - DNA, 25 bp, Homo sapien
agacagcagggctcgccatagctac

SEQ ID NO: 2323260 - DNA, 25 bp, Homo sapien
ccggagacagcagggctcgccatag

SEQ ID NO: 2323261 - DNA, 25 bp, Homo sapien
cgccatagctactgattggtggtgg

SEQ ID NO: 2323262 - DNA, 25 bp, Homo sapien
gtggcagaagggcgggccagacagt

SEQ ID NO: 2323263 - DNA, 25 bp, Homo sapien
tggcagaagggcgggccagacagtc

SEQ ID NO: 2323264 - DNA, 25 bp, Homo sapien
cttggtggcagaagggcgggccaga

SEQ ID NO: 2323265 - DNA, 25 bp, Homo sapien
tggtggcagaagggcgggccagaca

SEQ ID NO: 2323266 - DNA, 25 bp, Homo sapien
ctggcccataactgtgggggccgga

SEQ ID NO: 2323267 - DNA, 25 bp, Homo sapien
ccataactgtgggggccggacatga

SEQ ID NO: 2323268 - DNA, 25 bp, Homo sapien
actgtgggggccggacatgaggtta

SEQ ID NO: 2323269 - DNA, 25 bp, Homo sapien
ctgtgggggccggacatgaggttag

SEQ ID NO: 2323270 - DNA, 25 bp, Homo sapien
catggtgccaatggagagatgaccg

SEQ ID NO: 2323271 - DNA, 25 bp, Homo sapien
gagatgaccgtaggagcctcctgga

SEQ ID NO: 2323272 - DNA, 25 bp, Homo sapien
tccaggctggcatccgacagaggtg

SEQ ID NO: 2323273 - DNA, 25 bp, Homo sapien
gagatggacagtgcccgcttcttgg

SEQ ID NO: 2323274 - DNA, 25 bp, Homo sapien
ggcttgagacttttaatggacttgg

SEQ ID NO: 2323275 - DNA, 25 bp, Homo sapien
ggaagtactgaggagagttgtcttt

SEQ ID NO: 2323276 - DNA, 25 bp, Homo sapien
caaggattcaaatagggttaggtag

SEQ ID NO: 2323277 - DNA, 25 bp, Homo sapien
ttaggtagtttgagggcttgagact

SEQ ID NO: 2323278 - DNA, 25 bp, Homo sapien
gggccctttttggtgattcatctgg

SEQ ID NO: 2323279 - DNA, 25 bp, Homo sapien
aagggtccccgggactgaggatgtg

SEQ ID NO: 2323280 - DNA, 25 bp, Homo sapien
gatgtgggatcatcccaccccgggc

SEQ ID NO: 2323281 - DNA, 25 bp, Homo sapien
ccacaaggctggaccccaaaggaag

SEQ ID NO: 2323282 - DNA, 25 bp, Homo sapien
gttcctcccggcacttgccaaccag

SEQ ID NO: 2323283 - DNA, 25 bp, Homo sapien
gacatatcaccttccaagggttcct

SEQ ID NO: 2323284 - DNA, 25 bp, Homo sapien
gggctggacatatcaccttccaagg

SEQ ID NO: 2323285 - DNA, 25 bp, Homo sapien
ggcacttgccaaccagcatgtccag

SEQ ID NO: 2323286 - DNA, 25 bp, Homo sapien
acagattcaggctcacgcttctcct

SEQ ID NO: 2323287 - DNA, 25 bp, Homo sapien
tctcctctctctcgaggtcctcccg

SEQ ID NO: 2323288 - DNA, 25 bp, Homo sapien
cggcagtcagtttcatacacagatt

SEQ ID NO: 2323289 - DNA, 25 bp, Homo sapien
gcagccatcccaacggcagtcagtt

SEQ ID NO: 2323290 - DNA, 25 bp, Homo sapien
tgtctgcgcatgtgaaccaccagca

SEQ ID NO: 2323291 - DNA, 25 bp, Homo sapien
gccagtgtgtctgcgcatgtgaacc

SEQ ID NO: 2323292 - DNA, 25 bp, Homo sapien
ttctcgccagtgtgtctgcgcatgt

SEQ ID NO: 2323293 - DNA, 25 bp, Homo sapien
agtgtgtctgcgcatgtgaaccacc

SEQ ID NO: 2323294 - DNA, 25 bp, Homo sapien
tcggtcactggcattgctgaaggct

SEQ ID NO: 2323295 - DNA, 25 bp, Homo sapien
gctgaaggctttactgcagccctcg

SEQ ID NO: 2323296 - DNA, 25 bp, Homo sapien
gcgtcttcaggttttcgaggcgtga

SEQ ID NO: 2323297 - DNA, 25 bp, Homo sapien
cgaggcgtgagtatgacttccggca

SEQ ID NO: 2323298 - DNA, 25 bp, Homo sapien
ccgtttggtcacatgggcgtcagga

SEQ ID NO: 2323299 - DNA, 25 bp, Homo sapien
tcttgacatgttttcgcagcgagct

SEQ ID NO: 2323300 - DNA, 25 bp, Homo sapien
tctgtatagcgtttggtgcagccag

SEQ ID NO: 2323301 - DNA, 25 bp, Homo sapien
actgtagaaatggatggtgcccgag

SEQ ID NO: 2323302 - DNA, 25 bp, Homo sapien
gccagcaatgcaaggtccctcgtcc

SEQ ID NO: 2323303 - DNA, 25 bp, Homo sapien
actgtctgtattggctgcactccct

SEQ ID NO: 2323304 - DNA, 25 bp, Homo sapien
accactgtctgtattggctgcactc

SEQ ID NO: 2323305 - DNA, 25 bp, Homo sapien
acaccactgtctgtattggctgcac

SEQ ID NO: 2323306 - DNA, 25 bp, Homo sapien
aagctgggcagtttgagaccccggg

SEQ ID NO: 2323307 - DNA, 25 bp, Homo sapien
cctattggccggagttgatgtagct

SEQ ID NO: 2323308 - DNA, 25 bp, Homo sapien
ctgaggttctcaaggcggcgaagag

SEQ ID NO: 2323309 - DNA, 25 bp, Homo sapien
tctcaaggcggcgaagagtggacag

SEQ ID NO: 2323310 - DNA, 25 bp, Homo sapien
tatcctggatactcggctcggcttc

SEQ ID NO: 2323311 - DNA, 25 bp, Homo sapien
tatcttgcccgaagcaggtagtgct

SEQ ID NO: 2323312 - DNA, 25 bp, Homo sapien
tgctgctgcggcgttcaagagagac

SEQ ID NO: 2323313 - DNA, 25 bp, Homo sapien
gaacctctggactctagctggagca

SEQ ID NO: 2323314 - DNA, 25 bp, Homo sapien
atggaggtcccaacttctggctctt

SEQ ID NO: 2323315 - DNA, 25 bp, Homo sapien
catggaggtcccaacttctggctct

SEQ ID NO: 2323316 - DNA, 25 bp, Homo sapien
tcttcctgtagccctctagcatcca

SEQ ID NO: 2323317 - DNA, 25 bp, Homo sapien
agagtatcagtaggtgggaagtcca

SEQ ID NO: 2323318 - DNA, 25 bp, Homo sapien
catataggggttcagaccactgccc

SEQ ID NO: 2323319 - DNA, 25 bp, Homo sapien
catagttggtgggtggaccaggccc

SEQ ID NO: 2323320 - DNA, 25 bp, Homo sapien
tggacccctcgctccataaggctca

SEQ ID NO: 2323321 - DNA, 25 bp, Homo sapien
tgggtggggtcaggatatgaggcct

SEQ ID NO: 2323322 - DNA, 25 bp, Homo sapien
cccatgtttcttgggtggggtcagg

SEQ ID NO: 2323323 - DNA, 25 bp, Homo sapien
ccatgtttcttgggtggggtcagga

SEQ ID NO: 2323324 - DNA, 25 bp, Homo sapien
tcttgggtggggtcaggatatgagg

SEQ ID NO: 2323325 - DNA, 25 bp, Homo sapien
ctgggtacagcccagagtgggaagg

SEQ ID NO: 2323326 - DNA, 25 bp, Homo sapien
agcccagagtgggaagggaactcac

SEQ ID NO: 2323327 - DNA, 25 bp, Homo sapien
gggtacagcccagagtgggaaggga

SEQ ID NO: 2323328 - DNA, 25 bp, Homo sapien
tacagcccagagtgggaagggaact

SEQ ID NO: 2323329 - DNA, 25 bp, Homo sapien
tgtaggttccacctagagccttggg

SEQ ID NO: 2323330 - DNA, 25 bp, Homo sapien
tgggcacccctgttctggcttgact

SEQ ID NO: 2323331 - DNA, 25 bp, Homo sapien
taatgttcaagtcgaggacactggc

SEQ ID NO: 2323332 - DNA, 25 bp, Homo sapien
tgtggagtcagaccccactgggcac

SEQ ID NO: 2323333 - DNA, 25 bp, Homo sapien
cctgggttctgaaggaagataatca

SEQ ID NO: 2323334 - DNA, 25 bp, Homo sapien
gcctgactggagatattggggagga

SEQ ID NO: 2323335 - DNA, 25 bp, Homo sapien
gggcctgactggagatattggggag

SEQ ID NO: 2323336 - DNA, 25 bp, Homo sapien
ggcctgactggagatattggggagg

SEQ ID NO: 2323337 - DNA, 25 bp, Homo sapien
actctggtaggaaggttcctgggcg

SEQ ID NO: 2323338 - DNA, 25 bp, Homo sapien
aattacacacaagctgagccttgag

SEQ ID NO: 2323339 - DNA, 25 bp, Homo sapien
cagaaacttgggactctggtaggaa

SEQ ID NO: 2323340 - DNA, 25 bp, Homo sapien
gctcctgttgagattgaacataatt

SEQ ID NO: 2323341 - DNA, 25 bp, Homo sapien
caaaattttcatggcatggtgaagg

SEQ ID NO: 2323342 - DNA, 25 bp, Homo sapien
tgttcactggagctttagcacggct

SEQ ID NO: 2323343 - DNA, 25 bp, Homo sapien
taggaacctgacttgtgattgggca

SEQ ID NO: 2323344 - DNA, 25 bp, Homo sapien
gcaagttgggtccaaagccaggtcc

SEQ ID NO: 2323345 - DNA, 25 bp, Homo sapien
gggcaatgggggcagaagtcgaggt

SEQ ID NO: 2323346 - DNA, 25 bp, Homo sapien
tttgagaggcccatagcaagtgggc

SEQ ID NO: 2323347 - DNA, 25 bp, Homo sapien
acagctggggtttgtgcctcccact

SEQ ID NO: 2323348 - DNA, 25 bp, Homo sapien
gggcagaagtcgaggtggtgctgct

SEQ ID NO: 2323349 - DNA, 25 bp, Homo sapien
caaagtccagctgagtgttgtcaag

SEQ ID NO: 2323350 - DNA, 25 bp, Homo sapien
tcaagatcaagagagtccagggggt

SEQ ID NO: 2323351 - DNA, 25 bp, Homo sapien
agagctgccccgctgatcatgggaa

SEQ ID NO: 2323352 - DNA, 25 bp, Homo sapien
taagacactcatgttgcccacagcc

SEQ ID NO: 2323353 - DNA, 25 bp, Homo sapien
gatagaaaccccttaggaaatgcga

SEQ ID NO: 2323354 - DNA, 25 bp, Homo sapien
aggaaatgcgatctgtgatggatga

SEQ ID NO: 2323355 - DNA, 25 bp, Homo sapien
cagtgtcattatcaaatttctcctc

SEQ ID NO: 2323356 - DNA, 25 bp, Homo sapien
aaacgtatacagactatacatagcc

SEQ ID NO: 2323357 - DNA, 25 bp, Homo sapien
gtcattagttaaggtctgtctctcc

SEQ ID NO: 2323358 - DNA, 25 bp, Homo sapien
gaagctggcatcagtcccctatcta

SEQ ID NO: 2323359 - DNA, 25 bp, Homo sapien
tggtaatccagggaaggtcacttcc

SEQ ID NO: 2323360 - DNA, 25 bp, Homo sapien
tatctacctgtcatagcgtcttgca

SEQ ID NO: 2323361 - DNA, 25 bp, Homo sapien
taacagcagctactcgcagtggctc

SEQ ID NO: 2323362 - DNA, 25 bp, Homo sapien
tatcctcttacgctgctggagggcg

SEQ ID NO: 2323363 - DNA, 25 bp, Homo sapien
tagagttcggagttaccatgtgcgg

SEQ ID NO: 2323364 - DNA, 25 bp, Homo sapien
agaggcgggctttgaccattttggc

SEQ ID NO: 2323365 - DNA, 25 bp, Homo sapien
agttccgtattaggccactgccctg

SEQ ID NO: 2323366 - DNA, 25 bp, Homo sapien
gagttcagcggcctccgcgaggcac

SEQ ID NO: 2323367 - DNA, 25 bp, Homo sapien
tagactatttctcccatcatgcaac

SEQ ID NO: 2323368 - DNA, 25 bp, Homo sapien
cctggcaccgctaccggaaagtaga

SEQ ID NO: 2323369 - DNA, 25 bp, Homo sapien
tcgctgatgcaaccggaaccggcct

SEQ ID NO: 2323370 - DNA, 25 bp, Homo sapien
ttcgccgtgaatccctcgctgatgc

SEQ ID NO: 2323371 - DNA, 25 bp, Homo sapien
gtgaatccctcgctgatgcaaccgg

SEQ ID NO: 2323372 - DNA, 25 bp, Homo sapien
aatccctcgctgatgcaaccggaac

SEQ ID NO: 2323373 - DNA, 25 bp, Homo sapien
aagcaacccgggacgccatcactca

SEQ ID NO: 2323374 - DNA, 25 bp, Homo sapien
ggacgccatcactcacgaacagtct

SEQ ID NO: 2323375 - DNA, 25 bp, Homo sapien
cggcggccagcaccggcaagcaacc

SEQ ID NO: 2323376 - DNA, 25 bp, Homo sapien
agcaccggcaagcaacccgggacgc

SEQ ID NO: 2323377 - DNA, 25 bp, Homo sapien
gagaatctggcgtgtttcggtcccg

SEQ ID NO: 2323378 - DNA, 25 bp, Homo sapien
tacaagagaacctcctaagagtcac

SEQ ID NO: 2323379 - DNA, 25 bp, Homo sapien
tcaaggataataggagaagtggtcg

SEQ ID NO: 2323380 - DNA, 25 bp, Homo sapien
taagagtcacccaaacaatcggctg

SEQ ID NO: 2323381 - DNA, 25 bp, Homo sapien
gaagaggtagttgccgctatccagc

SEQ ID NO: 2323382 - DNA, 25 bp, Homo sapien
tgcaagacagggaccttaggccggg

SEQ ID NO: 2323383 - DNA, 25 bp, Homo sapien
gccgggtcaggaacgggaccacaca

SEQ ID NO: 2323384 - DNA, 25 bp, Homo sapien
cggcagattgcactagtggagaaga

SEQ ID NO: 2323385 - DNA, 25 bp, Homo sapien
ctccctacaccaaggaccaatactg

SEQ ID NO: 2323386 - DNA, 25 bp, Homo sapien
tccctacaccaaggaccaatactga

SEQ ID NO: 2323387 - DNA, 25 bp, Homo sapien
ccctacaccaaggaccaatactgac

SEQ ID NO: 2323388 - DNA, 25 bp, Homo sapien
agagcaacagatgatggacttagag

SEQ ID NO: 2323389 - DNA, 25 bp, Homo sapien
agagagagcaacagatgatggactt

SEQ ID NO: 2323390 - DNA, 25 bp, Homo sapien
cttagaggggcccatttagcccatt

SEQ ID NO: 2323391 - DNA, 25 bp, Homo sapien
gatggacttagaggggcccatttag

SEQ ID NO: 2323392 - DNA, 25 bp, Homo sapien
gaggtcatcttgctcccagccagat

SEQ ID NO: 2323393 - DNA, 25 bp, Homo sapien
ttgctcccagccagataacaaaaaa

SEQ ID NO: 2323394 - DNA, 25 bp, Homo sapien
atcttgctcccagccagataacaaa

SEQ ID NO: 2323395 - DNA, 25 bp, Homo sapien
tgaggtcatcttgctcccagccaga

SEQ ID NO: 2323396 - DNA, 25 bp, Homo sapien
gcagctctgtcgcttcccattccag

SEQ ID NO: 2323397 - DNA, 25 bp, Homo sapien
agctctgtcgcttcccattccagcc

SEQ ID NO: 2323398 - DNA, 25 bp, Homo sapien
gctctgtcgcttcccattccagcca

SEQ ID NO: 2323399 - DNA, 25 bp, Homo sapien
ctgcagctctgtcgcttcccattcc

SEQ ID NO: 2323400 - DNA, 25 bp, Homo sapien
taaatagtacagggcagcagacaaa

SEQ ID NO: 2323401 - DNA, 25 bp, Homo sapien
aaatagtacagggcagcagacaaag

SEQ ID NO: 2323402 - DNA, 25 bp, Homo sapien
ctaaatagtacagggcagcagacaa

SEQ ID NO: 2323403 - DNA, 25 bp, Homo sapien
ctgaaccaagaacatcttccccctt

SEQ ID NO: 2323404 - DNA, 25 bp, Homo sapien
tccgcactgaaccaagaacatcttc

SEQ ID NO: 2323405 - DNA, 25 bp, Homo sapien
ggctctccgcactgaaccaagaaca

SEQ ID NO: 2323406 - DNA, 25 bp, Homo sapien
tgaaccaagaacatcttcccccttc

SEQ ID NO: 2323407 - DNA, 25 bp, Homo sapien
cagttctgacgactcaagctgtggt

SEQ ID NO: 2323408 - DNA, 25 bp, Homo sapien
aggacagttctgacgactcaagctg

SEQ ID NO: 2323409 - DNA, 25 bp, Homo sapien
ggaaaggacagttctgacgactcaa

SEQ ID NO: 2323410 - DNA, 25 bp, Homo sapien
ttctgacgactcaagctgtggtcaa

SEQ ID NO: 2323411 - DNA, 25 bp, Homo sapien
taactcactgagataggtactaata

SEQ ID NO: 2323412 - DNA, 25 bp, Homo sapien
tgtcaagcactgtattaagcacttt

SEQ ID NO: 2323413 - DNA, 25 bp, Homo sapien
ttactgagcactttatatgtcaagc

SEQ ID NO: 2323414 - DNA, 25 bp, Homo sapien
tgtacacaaatgagacactcagttt

SEQ ID NO: 2323415 - DNA, 25 bp, Homo sapien
gtaatgggtatagggctccccacaa

SEQ ID NO: 2323416 - DNA, 25 bp, Homo sapien
tgcagtaatgggtatagggctcccc

SEQ ID NO: 2323417 - DNA, 25 bp, Homo sapien
gcgggatcttgcagtaatgggtata

SEQ ID NO: 2323418 - DNA, 25 bp, Homo sapien
gaggtaggcgggatcttgcagtaat

SEQ ID NO: 2323419 - DNA, 25 bp, Homo sapien
cagtcaagctgtaccttgaagggag

SEQ ID NO: 2323420 - DNA, 25 bp, Homo sapien
tcaaccatcttctgctatagttgcc

SEQ ID NO: 2323421 - DNA, 25 bp, Homo sapien
caccaagctcctagggttggagtga

SEQ ID NO: 2323422 - DNA, 25 bp, Homo sapien
cctacaccaagctcctagggttgga

SEQ ID NO: 2323423 - DNA, 25 bp, Homo sapien
gttcctgggtactcagtgtctggaa

SEQ ID NO: 2323424 - DNA, 25 bp, Homo sapien
ggttcctgggtactcagtgtctgga

SEQ ID NO: 2323425 - DNA, 25 bp, Homo sapien
gcagctcgctgacatggttcctggg

SEQ ID NO: 2323426 - DNA, 25 bp, Homo sapien
gctcgctgacatggttcctgggtac

SEQ ID NO: 2323427 - DNA, 25 bp, Homo sapien
ttttggaggtaaggccggagagcca

SEQ ID NO: 2323428 - DNA, 25 bp, Homo sapien
cccaaggctctgccctattccaaac

SEQ ID NO: 2323429 - DNA, 25 bp, Homo sapien
caggccccaaggctctgccctattc

SEQ ID NO: 2323430 - DNA, 25 bp, Homo sapien
ctcaggccccaaggctctgccctat

SEQ ID NO: 2323431 - DNA, 25 bp, Homo sapien
ggccccaaggctctgccctattcca

SEQ ID NO: 2323432 - DNA, 25 bp, Homo sapien
cctcctcagatagggtagccagctc

SEQ ID NO: 2323433 - DNA, 25 bp, Homo sapien
ctcctcagatagggtagccagctcc

SEQ ID NO: 2323434 - DNA, 25 bp, Homo sapien
tcctcctcagatagggtagccagct

SEQ ID NO: 2323435 - DNA, 25 bp, Homo sapien
aggcccttctcccaagcagtaacag

SEQ ID NO: 2323436 - DNA, 25 bp, Homo sapien
ctccagactggatgacaaggcgaaa

SEQ ID NO: 2323437 - DNA, 25 bp, Homo sapien
cactccagactggatgacaaggcga

SEQ ID NO: 2323438 - DNA, 25 bp, Homo sapien
tgcactccagactggatgacaaggc

SEQ ID NO: 2323439 - DNA, 25 bp, Homo sapien
tccagactggatgacaaggcgaaac

SEQ ID NO: 2323440 - DNA, 25 bp, Homo sapien
agagatgcagtctatgttgacagga

SEQ ID NO: 2323441 - DNA, 25 bp, Homo sapien
caacacagcacactgtaatcttgaa

SEQ ID NO: 2323442 - DNA, 25 bp, Homo sapien
gcagtctatgttgacaggactggtc

SEQ ID NO: 2323443 - DNA, 25 bp, Homo sapien
ggcacaacacagcacactgtaatct

SEQ ID NO: 2323444 - DNA, 25 bp, Homo sapien
cattgttgacgtaagggagggcact

SEQ ID NO: 2323445 - DNA, 25 bp, Homo sapien
cactgagcacacaaccaatgatgtt

SEQ ID NO: 2323446 - DNA, 25 bp, Homo sapien
gagggcactggtgatgagcacattc

SEQ ID NO: 2323447 - DNA, 25 bp, Homo sapien
aaagacatcggcactgagcacacaa

SEQ ID NO: 2323448 - DNA, 25 bp, Homo sapien
gaggtctctccccgagcagctggct

SEQ ID NO: 2323449 - DNA, 25 bp, Homo sapien
ttaggaggtctctccccgagcagct

SEQ ID NO: 2323450 - DNA, 25 bp, Homo sapien
cttaggaggtctctccccgagcagc

SEQ ID NO: 2323451 - DNA, 25 bp, Homo sapien
aggaggtctctccccgagcagctgg

SEQ ID NO: 2323452 - DNA, 25 bp, Homo sapien
gagtggtggtgcgaccaaaaatatc

SEQ ID NO: 2323453 - DNA, 25 bp, Homo sapien
acagatagagggtgttccactggcg

SEQ ID NO: 2323454 - DNA, 25 bp, Homo sapien
taaaccagcggtagatgtcagcatg

SEQ ID NO: 2323455 - DNA, 25 bp, Homo sapien
tatcaaacgaaatgttaaaccagcg

SEQ ID NO: 2323456 - DNA, 25 bp, Homo sapien
tctattcatcttttgagagttttac

SEQ ID NO: 2323457 - DNA, 25 bp, Homo sapien
tgagagttttactggatgagctcag

SEQ ID NO: 2323458 - DNA, 25 bp, Homo sapien
aaccagggacccaaactcagtgaca

SEQ ID NO: 2323459 - DNA, 25 bp, Homo sapien
gtcagaagacgtggtggaccccttc

SEQ ID NO: 2323460 - DNA, 25 bp, Homo sapien
gccaggaagcgagcacagtgctcac

SEQ ID NO: 2323461 - DNA, 25 bp, Homo sapien
cagttgctccacagtatcttgcagc

SEQ ID NO: 2323462 - DNA, 25 bp, Homo sapien
gagcctcctcatagccacagaaggg

SEQ ID NO: 2323463 - DNA, 25 bp, Homo sapien
gcacaaaacctcgtttcagcaactg

SEQ ID NO: 2323464 - DNA, 25 bp, Homo sapien
tcgacagcattgatgagcttgccac

SEQ ID NO: 2323465 - DNA, 25 bp, Homo sapien
ttaagctcgacagcattgatgagct

SEQ ID NO: 2323466 - DNA, 25 bp, Homo sapien
cttaagctcgacagcattgatgagc

SEQ ID NO: 2323467 - DNA, 25 bp, Homo sapien
agctcgacagcattgatgagcttgc

SEQ ID NO: 2323468 - DNA, 25 bp, Homo sapien
caataactctactatgtggcctact

SEQ ID NO: 2323469 - DNA, 25 bp, Homo sapien
gactcaaatcttctcagtataactc

SEQ ID NO: 2323470 - DNA, 25 bp, Homo sapien
agaaggattagctcctcagtctgcc

SEQ ID NO: 2323471 - DNA, 25 bp, Homo sapien
tactctaaacatggagactcaaatc

SEQ ID NO: 2323472 - DNA, 25 bp, Homo sapien
tcgactgcaccacagggcatgatcg

SEQ ID NO: 2323473 - DNA, 25 bp, Homo sapien
gatcggcagactttacactgaggct

SEQ ID NO: 2323474 - DNA, 25 bp, Homo sapien
gtccagaaacaggtgctggctcgac

SEQ ID NO: 2323475 - DNA, 25 bp, Homo sapien
gaaacaggtgctggctcgactgcac

SEQ ID NO: 2323476 - DNA, 25 bp, Homo sapien
gggactacagctgctcacaactcac

SEQ ID NO: 2323477 - DNA, 25 bp, Homo sapien
taattgtttcactgtttgtagagtc

SEQ ID NO: 2323478 - DNA, 25 bp, Homo sapien
tgctcacaactcacccagttaactt

SEQ ID NO: 2323479 - DNA, 25 bp, Homo sapien
aagtcatcggcccacctaggtagcc

SEQ ID NO: 2323480 - DNA, 25 bp, Homo sapien
tatgcagcgtggcttgaggccatcc

SEQ ID NO: 2323481 - DNA, 25 bp, Homo sapien
cccatttgaggtctcgggttatgca

SEQ ID NO: 2323482 - DNA, 25 bp, Homo sapien
caagaacgggtgataaactgggcat

SEQ ID NO: 2323483 - DNA, 25 bp, Homo sapien
aggccatcccgaagccaagaacggg

SEQ ID NO: 2323484 - DNA, 25 bp, Homo sapien
tagtggcatcaaaccagacatagaa

SEQ ID NO: 2323485 - DNA, 25 bp, Homo sapien
gacagatagccaatagtggcatcaa

SEQ ID NO: 2323486 - DNA, 25 bp, Homo sapien
gccaatagtggcatcaaaccagaca

SEQ ID NO: 2323487 - DNA, 25 bp, Homo sapien
gatggacagatagccaatagtggca

SEQ ID NO: 2323488 - DNA, 25 bp, Homo sapien
tgagacctccttcaaaggcccaagg

SEQ ID NO: 2323489 - DNA, 25 bp, Homo sapien
gaatgtggttaggagagatttcctg

SEQ ID NO: 2323490 - DNA, 25 bp, Homo sapien
gcacagcctaaccaagaactgctca

SEQ ID NO: 2323491 - DNA, 25 bp, Homo sapien
ccatgcacagcctaaccaagaactg

SEQ ID NO: 2323492 - DNA, 25 bp, Homo sapien
ctttggccatgaactgatacaggtc

SEQ ID NO: 2323493 - DNA, 25 bp, Homo sapien
agcaaggaaagactaagctatggaa

SEQ ID NO: 2323494 - DNA, 25 bp, Homo sapien
caaggaaagactaagctatggaaag

SEQ ID NO: 2323495 - DNA, 25 bp, Homo sapien
ggaaaggaacattgtctttggccat

SEQ ID NO: 2323496 - DNA, 25 bp, Homo sapien
tgtagcaatgaggtggctgaccaag

SEQ ID NO: 2323497 - DNA, 25 bp, Homo sapien
ctgtagcaatgaggtggctgaccaa

SEQ ID NO: 2323498 - DNA, 25 bp, Homo sapien
ggtggctgaccaaggtatagttatc

SEQ ID NO: 2323499 - DNA, 25 bp, Homo sapien
aaggtatagttatcctcagctccta

SEQ ID NO: 2323500 - DNA, 25 bp, Homo sapien
taactcaagatagcagctctccaag

SEQ ID NO: 2323501 - DNA, 25 bp, Homo sapien
gaacaccccatcagtagtcttccag

SEQ ID NO: 2323502 - DNA, 25 bp, Homo sapien
tgctcagattttgggagtcccttcc

SEQ ID NO: 2323503 - DNA, 25 bp, Homo sapien
tatgggtgtctagcaacatttctcc

SEQ ID NO: 2323504 - DNA, 25 bp, Homo sapien
cgcggctcttagagaatttcccatc

SEQ ID NO: 2323505 - DNA, 25 bp, Homo sapien
aaacactcccacaccgcggctctta

SEQ ID NO: 2323506 - DNA, 25 bp, Homo sapien
cccacaccgcggctcttagagaatt

SEQ ID NO: 2323507 - DNA, 25 bp, Homo sapien
atttcccatcctcatagttcaggta

SEQ ID NO: 2323508 - DNA, 25 bp, Homo sapien
agcgccagatgtcagcagggatccc

SEQ ID NO: 2323509 - DNA, 25 bp, Homo sapien
atagaagcgccagatgtcagcaggg

SEQ ID NO: 2323510 - DNA, 25 bp, Homo sapien
aagcgccagatgtcagcagggatcc

SEQ ID NO: 2323511 - DNA, 25 bp, Homo sapien
agaagcgccagatgtcagcagggat

SEQ ID NO: 2323512 - DNA, 25 bp, Homo sapien
tggccctcaggccgaatgtacagca

SEQ ID NO: 2323513 - DNA, 25 bp, Homo sapien
ctggccctcaggccgaatgtacagc

SEQ ID NO: 2323514 - DNA, 25 bp, Homo sapien
ggccctcaggccgaatgtacagcag

SEQ ID NO: 2323515 - DNA, 25 bp, Homo sapien
taaatcacatctctacagctaactg

SEQ ID NO: 2323516 - DNA, 25 bp, Homo sapien
aagttcaagagaccatcccgcctca

SEQ ID NO: 2323517 - DNA, 25 bp, Homo sapien
gggtacgagtactgctccactgcag

SEQ ID NO: 2323518 - DNA, 25 bp, Homo sapien
gcaggtgaactattttgctgggaga

SEQ ID NO: 2323519 - DNA, 25 bp, Homo sapien
gggtgagcaccatctcaggcacata

SEQ ID NO: 2323520 - DNA, 25 bp, Homo sapien
gcgctgatcatcaggggtgagcacc

SEQ ID NO: 2323521 - DNA, 25 bp, Homo sapien
atcaggggtgagcaccatctcaggc

SEQ ID NO: 2323522 - DNA, 25 bp, Homo sapien
ccagcaggcgctgatcatcaggggt

SEQ ID NO: 2323523 - DNA, 25 bp, Homo sapien
ggatactgcgcaaggcatcccggat

SEQ ID NO: 2323524 - DNA, 25 bp, Homo sapien
tatggtgaggatactgcgcaaggca

SEQ ID NO: 2323525 - DNA, 25 bp, Homo sapien
ccatgtcgagatatggtgaggatac

SEQ ID NO: 2323526 - DNA, 25 bp, Homo sapien
gaatatattggttgccatgtcgaga

SEQ ID NO: 2323527 - DNA, 25 bp, Homo sapien
ctttaatccgcttccagggctcatt

SEQ ID NO: 2323528 - DNA, 25 bp, Homo sapien
actgcctttaatccgcttccagggc

SEQ ID NO: 2323529 - DNA, 25 bp, Homo sapien
gcctcactgcctttaatccgcttcc

SEQ ID NO: 2323530 - DNA, 25 bp, Homo sapien
gcctttaatccgcttccagggctca

SEQ ID NO: 2323531 - DNA, 25 bp, Homo sapien
ggaagaggagacattagtcaagacc

SEQ ID NO: 2323532 - DNA, 25 bp, Homo sapien
gacattagtcaagacctccaggagg

SEQ ID NO: 2323533 - DNA, 25 bp, Homo sapien
cactttatgcctttagccaaccctc

SEQ ID NO: 2323534 - DNA, 25 bp, Homo sapien
tccaggaggatacagcttacaagcc

SEQ ID NO: 2323535 - DNA, 25 bp, Homo sapien
agccagtcactgttcctgcccgttg

SEQ ID NO: 2323536 - DNA, 25 bp, Homo sapien
gagagcaaggcagctatattcactg

SEQ ID NO: 2323537 - DNA, 25 bp, Homo sapien
tgccaagccagtcactgttcctgcc

SEQ ID NO: 2323538 - DNA, 25 bp, Homo sapien
ccaagccagtcactgttcctgcccg

SEQ ID NO: 2323539 - DNA, 25 bp, Homo sapien
gtggcactaaccgtgggcatgtaag

SEQ ID NO: 2323540 - DNA, 25 bp, Homo sapien
tctggtgtcctgctggtaaggtaca

SEQ ID NO: 2323541 - DNA, 25 bp, Homo sapien
tgtcagcaggatactgcaggctgga

SEQ ID NO: 2323542 - DNA, 25 bp, Homo sapien
tgtgccaatctggtgtcctgctggt

SEQ ID NO: 2323543 - DNA, 25 bp, Homo sapien
taattccggacttgtgaacgactac

SEQ ID NO: 2323544 - DNA, 25 bp, Homo sapien
cattatggagactaggtgatcacag

SEQ ID NO: 2323545 - DNA, 25 bp, Homo sapien
gctctctaaggatgctaggctgatc

SEQ ID NO: 2323546 - DNA, 25 bp, Homo sapien
gaaacttaggagtcccatgaccaaa

SEQ ID NO: 2323547 - DNA, 25 bp, Homo sapien
ccaaagcgctgccttaaactttcaa

SEQ ID NO: 2323548 - DNA, 25 bp, Homo sapien
aaagcgctgccttaaactttcaatc

SEQ ID NO: 2323549 - DNA, 25 bp, Homo sapien
gcgctgccttaaactttcaatctgg

SEQ ID NO: 2323550 - DNA, 25 bp, Homo sapien
tgccttaaactttcaatctggtcat

SEQ ID NO: 2323551 - DNA, 25 bp, Homo sapien
gctgtggctgttgtggagcgagggc

SEQ ID NO: 2323552 - DNA, 25 bp, Homo sapien
gaagcggcagggccaaaagatggaa

SEQ ID NO: 2323553 - DNA, 25 bp, Homo sapien
agggaaattagggaagtgatgctgt

SEQ ID NO: 2323554 - DNA, 25 bp, Homo sapien
atgggtgaggactacttagggaaat

SEQ ID NO: 2323555 - DNA, 25 bp, Homo sapien
accagcaaccataaatatcccctaa

SEQ ID NO: 2323556 - DNA, 25 bp, Homo sapien
caacaaagttatcaccagcaaccat

SEQ ID NO: 2323557 - DNA, 25 bp, Homo sapien
taacctccagttttatacagcatct

SEQ ID NO: 2323558 - DNA, 25 bp, Homo sapien
ccctaacctccagttttatacagca

SEQ ID NO: 2323559 - DNA, 25 bp, Homo sapien
tgtcacttcatccatcagcgcttgt

SEQ ID NO: 2323560 - DNA, 25 bp, Homo sapien
catcagcgcttgtatctgctgtggc

SEQ ID NO: 2323561 - DNA, 25 bp, Homo sapien
tctgctgtggcttggctgttgtaac

SEQ ID NO: 2323562 - DNA, 25 bp, Homo sapien
agtctctacaactgctggcttcggg

SEQ ID NO: 2323563 - DNA, 25 bp, Homo sapien
ggggtggggaggtaacagtgaggca

SEQ ID NO: 2323564 - DNA, 25 bp, Homo sapien
tctatttaggattcagcttgtccag

SEQ ID NO: 2323565 - DNA, 25 bp, Homo sapien
ggggaggtaacagtgaggcaagaaa

SEQ ID NO: 2323566 - DNA, 25 bp, Homo sapien
ctatttaggattcagcttgtccagt

SEQ ID NO: 2323567 - DNA, 25 bp, Homo sapien
ttgtgctttcagttctcggacaatg

SEQ ID NO: 2323568 - DNA, 25 bp, Homo sapien
tgtgctttcagttctcggacaatgt

SEQ ID NO: 2323569 - DNA, 25 bp, Homo sapien
cagggggtttcccctcagctacagc

SEQ ID NO: 2323570 - DNA, 25 bp, Homo sapien
tgtttctttagatccaagagtttcg

SEQ ID NO: 2323571 - DNA, 25 bp, Homo sapien
ccaactgtttctttagatccaagag

SEQ ID NO: 2323572 - DNA, 25 bp, Homo sapien
gggtttcccctcagctacagccaac

SEQ ID NO: 2323573 - DNA, 25 bp, Homo sapien
gtccctatctattaaagtgactttc

SEQ ID NO: 2323574 - DNA, 25 bp, Homo sapien
tactgtccctatctattaaagtgac

SEQ ID NO: 2323575 - DNA, 25 bp, Homo sapien
ctgtccctatctattaaagtgactt

SEQ ID NO: 2323576 - DNA, 25 bp, Homo sapien
tattactgtccctatctattaaagt

SEQ ID NO: 2323577 - DNA, 25 bp, Homo sapien
ccaacttgtggcatagactgtttgc

SEQ ID NO: 2323578 - DNA, 25 bp, Homo sapien
tccccattatcctgcagatgtgctt

SEQ ID NO: 2323579 - DNA, 25 bp, Homo sapien
cagactgatccaactgcagagatgg

SEQ ID NO: 2323580 - DNA, 25 bp, Homo sapien
gactgtttgctacatggagcttgtt

SEQ ID NO: 2323581 - DNA, 25 bp, Homo sapien
ggaagtgtatcttcatacatcacca

SEQ ID NO: 2323582 - DNA, 25 bp, Homo sapien
tctagcgtgactcttcatctctgcc

SEQ ID NO: 2323583 - DNA, 25 bp, Homo sapien
aaaataagggcccagcacggtagct

SEQ ID NO: 2323584 - DNA, 25 bp, Homo sapien
taaaagtcctatagtctctagcgtg

SEQ ID NO: 2323585 - DNA, 25 bp, Homo sapien
tcgagatgtcgacaatcccagtgga

SEQ ID NO: 2323586 - DNA, 25 bp, Homo sapien
ctaggtgggcggaacagcagcttct

SEQ ID NO: 2323587 - DNA, 25 bp, Homo sapien
agacaagcggcaaagaggctcacga

SEQ ID NO: 2323588 - DNA, 25 bp, Homo sapien
gaaaagttcaaaaggcctatgtgcc

SEQ ID NO: 2323589 - DNA, 25 bp, Homo sapien
ccccgccctgcgcagtcgcggccca

SEQ ID NO: 2323590 - DNA, 25 bp, Homo sapien
cgccctgcgcagtcgcggcccagag

SEQ ID NO: 2323591 - DNA, 25 bp, Homo sapien
ggagggtcggtggagcccgagcctc

SEQ ID NO: 2323592 - DNA, 25 bp, Homo sapien
cgcagtcgcggcccagagggtgagt

SEQ ID NO: 2323593 - DNA, 25 bp, Homo sapien
tgcctgctccatcagacaatcgctg

SEQ ID NO: 2323594 - DNA, 25 bp, Homo sapien
taggccactaggaagtttcccagag

SEQ ID NO: 2323595 - DNA, 25 bp, Homo sapien
tgatataaaaagtacagattgcccc

SEQ ID NO: 2323596 - DNA, 25 bp, Homo sapien
tggctcctgttgttctctacccagg

SEQ ID NO: 2323597 - DNA, 25 bp, Homo sapien
gtccagtctaaagccggggccacca

SEQ ID NO: 2323598 - DNA, 25 bp, Homo sapien
ctctgcaaacattgtggggtccagt

SEQ ID NO: 2323599 - DNA, 25 bp, Homo sapien
tgcaaacattgtggggtccagtcta

SEQ ID NO: 2323600 - DNA, 25 bp, Homo sapien
taaagccggggccaccagcttagcc

SEQ ID NO: 2323601 - DNA, 25 bp, Homo sapien
ccagccgatggggacagatgtggcc

SEQ ID NO: 2323602 - DNA, 25 bp, Homo sapien
acagcgctgccagccgatggggaca

SEQ ID NO: 2323603 - DNA, 25 bp, Homo sapien
acacagcgctgccagccgatgggga

SEQ ID NO: 2323604 - DNA, 25 bp, Homo sapien
gctgccagccgatggggacagatgt

SEQ ID NO: 2323605 - DNA, 25 bp, Homo sapien
cacttgcaggtcccatcgctgagga

SEQ ID NO: 2323606 - DNA, 25 bp, Homo sapien
cttggggacattaagtggacactcc

SEQ ID NO: 2323607 - DNA, 25 bp, Homo sapien
ggacactccagaccgcacttgcagg

SEQ ID NO: 2323608 - DNA, 25 bp, Homo sapien
ggtagctccgggtttgctccaagga

SEQ ID NO: 2323609 - DNA, 25 bp, Homo sapien
caggtggtctccatgctgcggtaca

SEQ ID NO: 2323610 - DNA, 25 bp, Homo sapien
ttgcacagcttggtcatgtcctcct

SEQ ID NO: 2323611 - DNA, 25 bp, Homo sapien
catgctgcggtacagagttgccata

SEQ ID NO: 2323612 - DNA, 25 bp, Homo sapien
tgccatagcaacagctttccgccgg

SEQ ID NO: 2323613 - DNA, 25 bp, Homo sapien
cctggggacacagtgtggaacattt

SEQ ID NO: 2323614 - DNA, 25 bp, Homo sapien
acacagtgtggaacatttgggggct

SEQ ID NO: 2323615 - DNA, 25 bp, Homo sapien
tggggacacagtgtggaacatttgg

SEQ ID NO: 2323616 - DNA, 25 bp, Homo sapien
ctcgacagggagggcgggcagaggg

SEQ ID NO: 2323617 - DNA, 25 bp, Homo sapien
tgctactgcccccagaagggactgg

SEQ ID NO: 2323618 - DNA, 25 bp, Homo sapien
agccaggacccccattaagtggagt

SEQ ID NO: 2323619 - DNA, 25 bp, Homo sapien
ccagggcctgctagagtgggaaagg

SEQ ID NO: 2323620 - DNA, 25 bp, Homo sapien
gcctgggaaactgagggtggttctg

SEQ ID NO: 2323621 - DNA, 25 bp, Homo sapien
gcattgaggctgatagcaggtggag

SEQ ID NO: 2323622 - DNA, 25 bp, Homo sapien
agttgtatgagggagcattgaggct

SEQ ID NO: 2323623 - DNA, 25 bp, Homo sapien
cattgaggctgatagcaggtggagg

SEQ ID NO: 2323624 - DNA, 25 bp, Homo sapien
gagcattgaggctgatagcaggtgg

SEQ ID NO: 2323625 - DNA, 25 bp, Homo sapien
taaggcatcactacagtggaagaga

SEQ ID NO: 2323626 - DNA, 25 bp, Homo sapien
gggtgttaaggcatcactacagtgg

SEQ ID NO: 2323627 - DNA, 25 bp, Homo sapien
tgttaaggcatcactacagtggaag

SEQ ID NO: 2323628 - DNA, 25 bp, Homo sapien
catcactacagtggaagagaggagg

SEQ ID NO: 2323629 - DNA, 25 bp, Homo sapien
ttctagcaatcgaaatacagtaggg

SEQ ID NO: 2323630 - DNA, 25 bp, Homo sapien
ggccttcggccctgtaaagtgctgg

SEQ ID NO: 2323631 - DNA, 25 bp, Homo sapien
cagagagtaggctgctagcaaggaa

SEQ ID NO: 2323632 - DNA, 25 bp, Homo sapien
aggttaaagcttccatcagagtggg

SEQ ID NO: 2323633 - DNA, 25 bp, Homo sapien
acactgctgaggctgccactggtgg

SEQ ID NO: 2323634 - DNA, 25 bp, Homo sapien
ctgaggctgccactggtggtcccag

SEQ ID NO: 2323635 - DNA, 25 bp, Homo sapien
ctggcacactgctgaggctgccact

SEQ ID NO: 2323636 - DNA, 25 bp, Homo sapien
actgctgaggctgccactggtggtc

SEQ ID NO: 2323637 - DNA, 25 bp, Homo sapien
gacaggtctcccaagcctgaaaatg

SEQ ID NO: 2323638 - DNA, 25 bp, Homo sapien
cacaccaaataaactgtggttgagc

SEQ ID NO: 2323639 - DNA, 25 bp, Homo sapien
ccaccaaaagcgaaggcccttcagg

SEQ ID NO: 2323640 - DNA, 25 bp, Homo sapien
ccttcggatgggctttgaagcacag

SEQ ID NO: 2323641 - DNA, 25 bp, Homo sapien
cgaggggggatccagggtggcagcc

SEQ ID NO: 2323642 - DNA, 25 bp, Homo sapien
agccagcagcgcagaatttaaagct

SEQ ID NO: 2323643 - DNA, 25 bp, Homo sapien
ccagcagcgcagaatttaaagctat

SEQ ID NO: 2323644 - DNA, 25 bp, Homo sapien
agcagcgcagaatttaaagctatga

SEQ ID NO: 2323645 - DNA, 25 bp, Homo sapien
tcccatctcttattctacatcttgt

SEQ ID NO: 2323646 - DNA, 25 bp, Homo sapien
ctcaagtgagataggccatgcttat

SEQ ID NO: 2323647 - DNA, 25 bp, Homo sapien
taaatacagacccaattcttgcagt

SEQ ID NO: 2323648 - DNA, 25 bp, Homo sapien
catccactatctgactgaagcctca

SEQ ID NO: 2323649 - DNA, 25 bp, Homo sapien
ggttggggggcactcaggacacagg

SEQ ID NO: 2323650 - DNA, 25 bp, Homo sapien
gttggggggcactcaggacacaggg

SEQ ID NO: 2323651 - DNA, 25 bp, Homo sapien
ccaggttggggggcactcaggacac

SEQ ID NO: 2323652 - DNA, 25 bp, Homo sapien
ctggaggtaggtggtccaggttggg

SEQ ID NO: 2323653 - DNA, 25 bp, Homo sapien
acccagcagagggctaaggagttgg

SEQ ID NO: 2323654 - DNA, 25 bp, Homo sapien
cccagcagagggctaaggagttggg

SEQ ID NO: 2323655 - DNA, 25 bp, Homo sapien
ctgcagccccaactggccagagaga

SEQ ID NO: 2323656 - DNA, 25 bp, Homo sapien
agggctgctggtcagtgaagacagg

SEQ ID NO: 2323657 - DNA, 25 bp, Homo sapien
gagactctgtagcaggcaggctagg

SEQ ID NO: 2323658 - DNA, 25 bp, Homo sapien
gctaggggactagaagcctctgaga

SEQ ID NO: 2323659 - DNA, 25 bp, Homo sapien
cagggctctcggggggtagacaggg

SEQ ID NO: 2323660 - DNA, 25 bp, Homo sapien
tcgggagaaccatggggtggggcta

SEQ ID NO: 2323661 - DNA, 25 bp, Homo sapien
caggctctggttcgagggctgaggc

SEQ ID NO: 2323662 - DNA, 25 bp, Homo sapien
tggcaggctctggttcgagggctga

SEQ ID NO: 2323663 - DNA, 25 bp, Homo sapien
ttgtccattgaagccaccacgtgtc

SEQ ID NO: 2323664 - DNA, 25 bp, Homo sapien
tggcctcaccattaatgcccctaag

SEQ ID NO: 2323665 - DNA, 25 bp, Homo sapien
catttgagggccagtcggccaggct

SEQ ID NO: 2323666 - DNA, 25 bp, Homo sapien
cttaaggtcctcagaatggggcccg

SEQ ID NO: 2323667 - DNA, 25 bp, Homo sapien
gtattttctcctacggccacgacga

SEQ ID NO: 2323668 - DNA, 25 bp, Homo sapien
cggccacgacgagactttctgacta

SEQ ID NO: 2323669 - DNA, 25 bp, Homo sapien
acgagactttctgactactcccggg

SEQ ID NO: 2323670 - DNA, 25 bp, Homo sapien
ttgtattttctcctacggccacgac

SEQ ID NO: 2323671 - DNA, 25 bp, Homo sapien
tgcaataaggggcacagatgatcag

SEQ ID NO: 2323672 - DNA, 25 bp, Homo sapien
ctgcaataaggggcacagatgatca

SEQ ID NO: 2323673 - DNA, 25 bp, Homo sapien
gcaataaggggcacagatgatcagg

SEQ ID NO: 2323674 - DNA, 25 bp, Homo sapien
agcaccaggtgaatttcagaagttt

SEQ ID NO: 2323675 - DNA, 25 bp, Homo sapien
tgtcctggcgggagctattgctgtt

SEQ ID NO: 2323676 - DNA, 25 bp, Homo sapien
caaggtaatgtcctggcgggagcta

SEQ ID NO: 2323677 - DNA, 25 bp, Homo sapien
gttccaaggtaatgtcctggcggga

SEQ ID NO: 2323678 - DNA, 25 bp, Homo sapien
ggagctattgctgttccgggtaggg

SEQ ID NO: 2323679 - DNA, 25 bp, Homo sapien
ctcttgtttttggcaggacggccag

SEQ ID NO: 2323680 - DNA, 25 bp, Homo sapien
ctcctcttgtttttggcaggacggc

SEQ ID NO: 2323681 - DNA, 25 bp, Homo sapien
cctcttgtttttggcaggacggcca

SEQ ID NO: 2323682 - DNA, 25 bp, Homo sapien
tcctcttgtttttggcaggacggcc

SEQ ID NO: 2323683 - DNA, 25 bp, Homo sapien
gcactcagctctccccaatcagggt

SEQ ID NO: 2323684 - DNA, 25 bp, Homo sapien
tccccaatcagggtcagatccagct

SEQ ID NO: 2323685 - DNA, 25 bp, Homo sapien
tcagctctccccaatcagggtcaga

SEQ ID NO: 2323686 - DNA, 25 bp, Homo sapien
ccaatcagggtcagatccagctcca

SEQ ID NO: 2323687 - DNA, 25 bp, Homo sapien
ggaaggagttgcatttgtgctctga

SEQ ID NO: 2323688 - DNA, 25 bp, Homo sapien
aggcaatgaaatcgaattaaatata

SEQ ID NO: 2323689 - DNA, 25 bp, Homo sapien
tggggaaagggccatataccatccc

SEQ ID NO: 2323690 - DNA, 25 bp, Homo sapien
ctgcaatggctcaggatgggattgt

SEQ ID NO: 2323691 - DNA, 25 bp, Homo sapien
cacaggtttgtaaactgagcctgtt

SEQ ID NO: 2323692 - DNA, 25 bp, Homo sapien
tcacaggtttgtaaactgagcctgt

SEQ ID NO: 2323693 - DNA, 25 bp, Homo sapien
acaggtttgtaaactgagcctgttg

SEQ ID NO: 2323694 - DNA, 25 bp, Homo sapien
ctttcactgggaaggagggcagcag

SEQ ID NO: 2323695 - DNA, 25 bp, Homo sapien
gggaacctggctacaccttgaaatg

SEQ ID NO: 2323696 - DNA, 25 bp, Homo sapien
taaggggaggatgcatgatgcttat

SEQ ID NO: 2323697 - DNA, 25 bp, Homo sapien
tgaggctatgtgtttcaaacctggg

SEQ ID NO: 2323698 - DNA, 25 bp, Homo sapien
gcagtgtagtgtgtatgggaggaga

SEQ ID NO: 2323699 - DNA, 25 bp, Homo sapien
gttaaattaagagtgtctcccatag

SEQ ID NO: 2323700 - DNA, 25 bp, Homo sapien
tcatgctggccgctccggttggacc

SEQ ID NO: 2323701 - DNA, 25 bp, Homo sapien
gctccggttggaccacgttgcataa

SEQ ID NO: 2323702 - DNA, 25 bp, Homo sapien
aatcctcagtcgcatcatcacaacg

SEQ ID NO: 2323703 - DNA, 25 bp, Homo sapien
cctgtgactgtccagaacctctgag

SEQ ID NO: 2323704 - DNA, 25 bp, Homo sapien
tcaagacactgctggagtaggtgct

SEQ ID NO: 2323705 - DNA, 25 bp, Homo sapien
taggttccatctgcatagtgcccgc

SEQ ID NO: 2323706 - DNA, 25 bp, Homo sapien
tagtgcccgcccataataagggctt

SEQ ID NO: 2323707 - DNA, 25 bp, Homo sapien
tttcatatgcatacaaccatcctca

SEQ ID NO: 2323708 - DNA, 25 bp, Homo sapien
gcatcgtctagggaacagagaggtt

SEQ ID NO: 2323709 - DNA, 25 bp, Homo sapien
taatcccaccatggtttttcatatg

SEQ ID NO: 2323710 - DNA, 25 bp, Homo sapien
gattaagaggtatctggatgaaatc

SEQ ID NO: 2323711 - DNA, 25 bp, Homo sapien
tgcgggcgacctgggcgtctggtcc

SEQ ID NO: 2323712 - DNA, 25 bp, Homo sapien
ttgagggcgcccgggcgaagcctgg

SEQ ID NO: 2323713 - DNA, 25 bp, Homo sapien
acagagttgagggcgcccgggcgaa

SEQ ID NO: 2323714 - DNA, 25 bp, Homo sapien
ggccggggcgcgctgtctctctcct

SEQ ID NO: 2323715 - DNA, 25 bp, Homo sapien
cgctgtcgtccccttggaaaatggg

SEQ ID NO: 2323716 - DNA, 25 bp, Homo sapien
gctacattcgttgttggtctccgcc

SEQ ID NO: 2323717 - DNA, 25 bp, Homo sapien
ggccggaatcggcagagcaccttga

SEQ ID NO: 2323718 - DNA, 25 bp, Homo sapien
ttgtctccccgcagaatctcagcct

SEQ ID NO: 2323719 - DNA, 25 bp, Homo sapien
tagagatctgagccaataacaaagg

SEQ ID NO: 2323720 - DNA, 25 bp, Homo sapien
ggtagagatctgagccaataacaaa

SEQ ID NO: 2323721 - DNA, 25 bp, Homo sapien
gtagagatctgagccaataacaaag

SEQ ID NO: 2323722 - DNA, 25 bp, Homo sapien
tatattaggcgcataattatgacct

SEQ ID NO: 2323723 - DNA, 25 bp, Homo sapien
taagacttattgacttcgtatcagc

SEQ ID NO: 2323724 - DNA, 25 bp, Homo sapien
ttgaagatttgtacgatctcaggag

SEQ ID NO: 2323725 - DNA, 25 bp, Homo sapien
ggattggtgcatttccggttgtacg

SEQ ID NO: 2323726 - DNA, 25 bp, Homo sapien
tggcacatgcatgataaacttgctc

SEQ ID NO: 2323727 - DNA, 25 bp, Homo sapien
tacacggtcaaaaacatatggcttc

SEQ ID NO: 2323728 - DNA, 25 bp, Homo sapien
ctttgacaatctgcatggcacatgc

SEQ ID NO: 2323729 - DNA, 25 bp, Homo sapien
aacttgctcttgagtcgtgtttggg

SEQ ID NO: 2323730 - DNA, 25 bp, Homo sapien
ggtgccattgtagccagcaaggaca

SEQ ID NO: 2323731 - DNA, 25 bp, Homo sapien
tccctgaggatgtctgtccataagc

SEQ ID NO: 2323732 - DNA, 25 bp, Homo sapien
ccataagcaaaaatggtgccattgt

SEQ ID NO: 2323733 - DNA, 25 bp, Homo sapien
tggtatgtgttttccctgaggatgt

SEQ ID NO: 2323734 - DNA, 25 bp, Homo sapien
gaagatgtctcgggcaattcgagga

SEQ ID NO: 2323735 - DNA, 25 bp, Homo sapien
agtagatgtggttgaagatgtctcg

SEQ ID NO: 2323736 - DNA, 25 bp, Homo sapien
gatgtctcgggcaattcgaggaatg

SEQ ID NO: 2323737 - DNA, 25 bp, Homo sapien
tgtctcgggcaattcgaggaatgat

SEQ ID NO: 2323738 - DNA, 25 bp, Homo sapien
catccagaaggtcacgaattttgtc

SEQ ID NO: 2323739 - DNA, 25 bp, Homo sapien
ccagaaggtcacgaattttgtccag

SEQ ID NO: 2323740 - DNA, 25 bp, Homo sapien
atccagaaggtcacgaattttgtcc

SEQ ID NO: 2323741 - DNA, 25 bp, Homo sapien
tccagaaggtcacgaattttgtcca

SEQ ID NO: 2323742 - DNA, 25 bp, Homo sapien
cctcatccactgggacaaaacactc

SEQ ID NO: 2323743 - DNA, 25 bp, Homo sapien
ctcatccactgggacaaaacactca

SEQ ID NO: 2323744 - DNA, 25 bp, Homo sapien
tgtcctcgtgcacggacagatttgt

SEQ ID NO: 2323745 - DNA, 25 bp, Homo sapien
gttcttgtcctcgtgcacggacaga

SEQ ID NO: 2323746 - DNA, 25 bp, Homo sapien
tgacaaatggcacccggttcttgtc

SEQ ID NO: 2323747 - DNA, 25 bp, Homo sapien
cttgacaaatggcacccggttcttg

SEQ ID NO: 2323748 - DNA, 25 bp, Homo sapien
atttcccttcatcaatcacatccag

SEQ ID NO: 2323749 - DNA, 25 bp, Homo sapien
tggacacaaagcgttcagtacaacc

SEQ ID NO: 2323750 - DNA, 25 bp, Homo sapien
gtgacagccacatgacgatttgatt

SEQ ID NO: 2323751 - DNA, 25 bp, Homo sapien
tcctccgggctggacacaaagcgtt

SEQ ID NO: 2323752 - DNA, 25 bp, Homo sapien
ccaggtccaccagatacagcttccc

SEQ ID NO: 2323753 - DNA, 25 bp, Homo sapien
gccaggtccaccagatacagcttcc

SEQ ID NO: 2323754 - DNA, 25 bp, Homo sapien
actgagcttctgctccgtttccatg

SEQ ID NO: 2323755 - DNA, 25 bp, Homo sapien
tcgtccagcacggctccctctgctc

SEQ ID NO: 2323756 - DNA, 25 bp, Homo sapien
gcctcgtccagcacggctccctctg

SEQ ID NO: 2323757 - DNA, 25 bp, Homo sapien
ctttgcctcgtccagcacggctccc

SEQ ID NO: 2323758 - DNA, 25 bp, Homo sapien
tttgcctcgtccagcacggctccct

SEQ ID NO: 2323759 - DNA, 25 bp, Homo sapien
gtgccctcagccagtgcggagatca

SEQ ID NO: 2323760 - DNA, 25 bp, Homo sapien
gccagtgcggagatcacattgccca

SEQ ID NO: 2323761 - DNA, 25 bp, Homo sapien
tgcggagatcacattgcccagagct

SEQ ID NO: 2323762 - DNA, 25 bp, Homo sapien
agtgccctcagccagtgcggagatc

SEQ ID NO: 2323763 - DNA, 25 bp, Homo sapien
tcattttgctgtcacgatatggaac

SEQ ID NO: 2323764 - DNA, 25 bp, Homo sapien
gaacatagtcgtccggcagtttccc

SEQ ID NO: 2323765 - DNA, 25 bp, Homo sapien
ttataactggatggtgagcaacaga

SEQ ID NO: 2323766 - DNA, 25 bp, Homo sapien
cagggtggacttggtctctgcatca

SEQ ID NO: 2323767 - DNA, 25 bp, Homo sapien
tccctctggggaccctgccactgac

SEQ ID NO: 2323768 - DNA, 25 bp, Homo sapien
cagggatccctctggggaccctgcc

SEQ ID NO: 2323769 - DNA, 25 bp, Homo sapien
ggatccctctggggaccctgccact

SEQ ID NO: 2323770 - DNA, 25 bp, Homo sapien
agggatccctctggggaccctgcca

SEQ ID NO: 2323771 - DNA, 25 bp, Homo sapien
tgaggcagtgttcttaatggtcttt

SEQ ID NO: 2323772 - DNA, 25 bp, Homo sapien
gaggcagtgttcttaatggtctttg

SEQ ID NO: 2323773 - DNA, 25 bp, Homo sapien
ggcagtgttcttaatggtctttgcc

SEQ ID NO: 2323774 - DNA, 25 bp, Homo sapien
aggcagtgttcttaatggtctttgc

SEQ ID NO: 2323775 - DNA, 25 bp, Homo sapien
ttcttccactgctcagcagtcaact

SEQ ID NO: 2323776 - DNA, 25 bp, Homo sapien
cttcgcaatcgtctccttctgggcc

SEQ ID NO: 2323777 - DNA, 25 bp, Homo sapien
ttcgcaatcgtctccttctgggcct

SEQ ID NO: 2323778 - DNA, 25 bp, Homo sapien
tttcttcttccactgctcagcagtc

SEQ ID NO: 2323779 - DNA, 25 bp, Homo sapien
cattgcgccaccggctcagctcagc

SEQ ID NO: 2323780 - DNA, 25 bp, Homo sapien
gccaccggctcagctcagcctccag

SEQ ID NO: 2323781 - DNA, 25 bp, Homo sapien
gcgccaccggctcagctcagcctcc

SEQ ID NO: 2323782 - DNA, 25 bp, Homo sapien
ttgcgccaccggctcagctcagcct

SEQ ID NO: 2323783 - DNA, 25 bp, Homo sapien
aacacagcccctcttctaggagatt

SEQ ID NO: 2323784 - DNA, 25 bp, Homo sapien
acagcccctcttctaggagattggc

SEQ ID NO: 2323785 - DNA, 25 bp, Homo sapien
ctgtccagaaacacagcccctcttc

SEQ ID NO: 2323786 - DNA, 25 bp, Homo sapien
gaaacacagcccctcttctaggaga

SEQ ID NO: 2323787 - DNA, 25 bp, Homo sapien
cttgaactctcttgccaggtggacc

SEQ ID NO: 2323788 - DNA, 25 bp, Homo sapien
tgaactctcttgccaggtggaccct

SEQ ID NO: 2323789 - DNA, 25 bp, Homo sapien
ccttgaactctcttgccaggtggac

SEQ ID NO: 2323790 - DNA, 25 bp, Homo sapien
ccccttgaactctcttgccaggtgg

SEQ ID NO: 2323791 - DNA, 25 bp, Homo sapien
tgcttatagagacggcggatctcct

SEQ ID NO: 2323792 - DNA, 25 bp, Homo sapien
ctcgggcgcgatgcgcaccacgatg

SEQ ID NO: 2323793 - DNA, 25 bp, Homo sapien
caggcgctctgtctcaggcacattc

SEQ ID NO: 2323794 - DNA, 25 bp, Homo sapien
gatggatgagttgtcattcacaggg

SEQ ID NO: 2323795 - DNA, 25 bp, Homo sapien
cttgagcttctctatgagttggctt

SEQ ID NO: 2323796 - DNA, 25 bp, Homo sapien
tgagcttctctatgagttggctttg

SEQ ID NO: 2323797 - DNA, 25 bp, Homo sapien
gcttctctatgagttggctttgttg

SEQ ID NO: 2323798 - DNA, 25 bp, Homo sapien
ttctctatgagttggctttgttggt

SEQ ID NO: 2323799 - DNA, 25 bp, Homo sapien
ttccttcacctcatccttagcggca

SEQ ID NO: 2323800 - DNA, 25 bp, Homo sapien
catccttagcggcatcgttctctga

SEQ ID NO: 2323801 - DNA, 25 bp, Homo sapien
tggaccttctcgttgtctcctcggg

SEQ ID NO: 2323802 - DNA, 25 bp, Homo sapien
tagcggcatcgttctctgattgcag

SEQ ID NO: 2323803 - DNA, 25 bp, Homo sapien
gcactgaacagcagtgcagaggtgc

SEQ ID NO: 2323804 - DNA, 25 bp, Homo sapien
gcagaggtgcagccaccatacagcc

SEQ ID NO: 2323805 - DNA, 25 bp, Homo sapien
tgcagaggtgcagccaccatacagc

SEQ ID NO: 2323806 - DNA, 25 bp, Homo sapien
aatgcactgaacagcagtgcagagg

SEQ ID NO: 2323807 - DNA, 25 bp, Homo sapien
agaggcctctcccttcatgcaagac

SEQ ID NO: 2323808 - DNA, 25 bp, Homo sapien
gagggctgctatgaagagaacacag

SEQ ID NO: 2323809 - DNA, 25 bp, Homo sapien
ccttcatgcaagaccctgagggctg

SEQ ID NO: 2323810 - DNA, 25 bp, Homo sapien
ggacagcccctcaggtcattcctgt

SEQ ID NO: 2323811 - DNA, 25 bp, Homo sapien
caatgacactgaactcgctcagatc

SEQ ID NO: 2323812 - DNA, 25 bp, Homo sapien
ttaatctccccgttgcccacaatga

SEQ ID NO: 2323813 - DNA, 25 bp, Homo sapien
gcaattcgttttcgctggtgtccac

SEQ ID NO: 2323814 - DNA, 25 bp, Homo sapien
agatccttcatcagcccgttcagca

SEQ ID NO: 2323815 - DNA, 25 bp, Homo sapien
gccacagtgaactcctcctcgatgg

SEQ ID NO: 2323816 - DNA, 25 bp, Homo sapien
aggatgagagctcccgcccggtcac

SEQ ID NO: 2323817 - DNA, 25 bp, Homo sapien
gattttgctgatgtagagtcgggcc

SEQ ID NO: 2323818 - DNA, 25 bp, Homo sapien
catcttgcggtgacactccacctgg

SEQ ID NO: 2323819 - DNA, 25 bp, Homo sapien
acgctctgcatgtattccgtaagcg

SEQ ID NO: 2323820 - DNA, 25 bp, Homo sapien
gtcataggactcttccaggtgccgc

SEQ ID NO: 2323821 - DNA, 25 bp, Homo sapien
gagtcataggactcttccaggtgcc

SEQ ID NO: 2323822 - DNA, 25 bp, Homo sapien
ttccgtaagcgagcggatcttggcc

SEQ ID NO: 2323823 - DNA, 25 bp, Homo sapien
gcatcctgagtgtcaggctccttgt

SEQ ID NO: 2323824 - DNA, 25 bp, Homo sapien
gccgggccagctgccggtgatgggc

SEQ ID NO: 2323825 - DNA, 25 bp, Homo sapien
cttctgcttctcgttgatctcgtcc

SEQ ID NO: 2323826 - DNA, 25 bp, Homo sapien
tgcttctcgttgatctcgtcccgga

SEQ ID NO: 2323827 - DNA, 25 bp, Homo sapien
ggtgatgggcctcccggtgactctc

SEQ ID NO: 2323828 - DNA, 25 bp, Homo sapien
tcttctcgtgttcttcgctcttcag

SEQ ID NO: 2323829 - DNA, 25 bp, Homo sapien
ctgcagcttggtgctcttctcgtgt

SEQ ID NO: 2323830 - DNA, 25 bp, Homo sapien
ttctctagctctaactggagcttct

SEQ ID NO: 2323831 - DNA, 25 bp, Homo sapien
cttctctagctctaactggagcttc

SEQ ID NO: 2323832 - DNA, 25 bp, Homo sapien
gtctcctccagacccttgaggtcct

SEQ ID NO: 2323833 - DNA, 25 bp, Homo sapien
ctgctcatgtcgctcgtacagaaat

SEQ ID NO: 2323834 - DNA, 25 bp, Homo sapien
ggactgctcatgtcgctcgtacaga

SEQ ID NO: 2323835 - DNA, 25 bp, Homo sapien
cctgcttggactgctcatgtcgctc

SEQ ID NO: 2323836 - DNA, 25 bp, Homo sapien
gacgtcttgaacgaacagcttgcga

SEQ ID NO: 2323837 - DNA, 25 bp, Homo sapien
gagtcgtgacgtcttgaacgaacag

SEQ ID NO: 2323838 - DNA, 25 bp, Homo sapien
tttcttgactcgagtcgtgacgtct

SEQ ID NO: 2323839 - DNA, 25 bp, Homo sapien
aacgaacagcttgcgaaggttgtgg

SEQ ID NO: 2323840 - DNA, 25 bp, Homo sapien
aacagatagaaggaaagacgtggct

SEQ ID NO: 2323841 - DNA, 25 bp, Homo sapien
agatagaaggaaagacgtggctgtc

SEQ ID NO: 2323842 - DNA, 25 bp, Homo sapien
gaacagatagaaggaaagacgtggc

SEQ ID NO: 2323843 - DNA, 25 bp, Homo sapien
ctgagaacagatagaaggaaagacg

SEQ ID NO: 2323844 - DNA, 25 bp, Homo sapien
actgtcttcgggctccatttctgca

SEQ ID NO: 2323845 - DNA, 25 bp, Homo sapien
tgtcttcgggctccatttctgcact

SEQ ID NO: 2323846 - DNA, 25 bp, Homo sapien
ctgtttgtgaacctttgtaagctgt

SEQ ID NO: 2323847 - DNA, 25 bp, Homo sapien
tgtaagctgttccaggttgttctca

SEQ ID NO: 2323848 - DNA, 25 bp, Homo sapien
tttgcccgagctcttgtagcgaacg

SEQ ID NO: 2323849 - DNA, 25 bp, Homo sapien
gtagcgaacggcctccttgatgcgg

SEQ ID NO: 2323850 - DNA, 25 bp, Homo sapien
taggaagctcacaacgcagatctgc

SEQ ID NO: 2323851 - DNA, 25 bp, Homo sapien
tctctcagccgtagccctaagtcgt

SEQ ID NO: 2323852 - DNA, 25 bp, Homo sapien
gtgtggcctgcaggtagagattctg

SEQ ID NO: 2323853 - DNA, 25 bp, Homo sapien
gtaactgatgcactcagggctccgg

SEQ ID NO: 2323854 - DNA, 25 bp, Homo sapien
gaggatgctgggtagtggccaggcc

SEQ ID NO: 2323855 - DNA, 25 bp, Homo sapien
aagaggctgttggtgtaactgatgc

SEQ ID NO: 2323856 - DNA, 25 bp, Homo sapien
ctatgccttctagggtccagggagc

SEQ ID NO: 2323857 - DNA, 25 bp, Homo sapien
gggcagacacctaccttctaatcat

SEQ ID NO: 2323858 - DNA, 25 bp, Homo sapien
tagtctgaggaccactaatccacac

SEQ ID NO: 2323859 - DNA, 25 bp, Homo sapien
ggtgggactccaacccacacgtgtg

SEQ ID NO: 2323860 - DNA, 25 bp, Homo sapien
ggccgccagaagatgtggctccact

SEQ ID NO: 2323861 - DNA, 25 bp, Homo sapien
aggggccgccagaagatgtggctcc

SEQ ID NO: 2323862 - DNA, 25 bp, Homo sapien
ccatgttggccttctggtaggaagc

SEQ ID NO: 2323863 - DNA, 25 bp, Homo sapien
ttctggtaggaagccaaggggccgc

SEQ ID NO: 2323864 - DNA, 25 bp, Homo sapien
tatgcctctcaacttgccctgagga

SEQ ID NO: 2323865 - DNA, 25 bp, Homo sapien
cactaaggtcacttacttttatgcc

SEQ ID NO: 2323866 - DNA, 25 bp, Homo sapien
gggattacccatctttttcactcac

SEQ ID NO: 2323867 - DNA, 25 bp, Homo sapien
cttggcacaccagaaaggttcagtc

SEQ ID NO: 2323868 - DNA, 25 bp, Homo sapien
attgtcattgatatctgtggcattt

SEQ ID NO: 2323869 - DNA, 25 bp, Homo sapien
tattgtcattgatatctgtggcatt

SEQ ID NO: 2323870 - DNA, 25 bp, Homo sapien
ttgtcattgatatctgtggcatttc

SEQ ID NO: 2323871 - DNA, 25 bp, Homo sapien
ctattgtcattgatatctgtggcat

SEQ ID NO: 2323872 - DNA, 25 bp, Homo sapien
gagagggaaaagcttggcctggtcc

SEQ ID NO: 2323873 - DNA, 25 bp, Homo sapien
agtgcaggtatgcagccgtgggtgt

SEQ ID NO: 2323874 - DNA, 25 bp, Homo sapien
ctgaaagtgcaggtatgcagccgtg

SEQ ID NO: 2323875 - DNA, 25 bp, Homo sapien
ggtatgcagccgtgggtgtgggaga

SEQ ID NO: 2323876 - DNA, 25 bp, Homo sapien
tgcaggtatgcagccgtgggtgtgg

SEQ ID NO: 2323877 - DNA, 25 bp, Homo sapien
tatacagatgggaagaggatgggac

SEQ ID NO: 2323878 - DNA, 25 bp, Homo sapien
gacacaggtgcaggcgtgaagcaaa

SEQ ID NO: 2323879 - DNA, 25 bp, Homo sapien
actggagatgtcttagttccaaaaa

SEQ ID NO: 2323880 - DNA, 25 bp, Homo sapien
tgaagcaaacatcgccttaactgga

SEQ ID NO: 2323881 - DNA, 25 bp, Homo sapien
gactgatttcgtggggcgtttccta

SEQ ID NO: 2323882 - DNA, 25 bp, Homo sapien
cacctccactgagcaagatgggagg

SEQ ID NO: 2323883 - DNA, 25 bp, Homo sapien
gaggggagcgctgactgatttcgtg

SEQ ID NO: 2323884 - DNA, 25 bp, Homo sapien
acctccactgagcaagatgggaggg

SEQ ID NO: 2323885 - DNA, 25 bp, Homo sapien
ctggagagggctcagcttagatgca

SEQ ID NO: 2323886 - DNA, 25 bp, Homo sapien
gatgcagcccagtaagagactggcc

SEQ ID NO: 2323887 - DNA, 25 bp, Homo sapien
ccttggtgagaaacccagtgacaca

SEQ ID NO: 2323888 - DNA, 25 bp, Homo sapien
tctgggccctaaagcaaccttggtg

SEQ ID NO: 2323889 - DNA, 25 bp, Homo sapien
gggagttagtatcagagaccacagg

SEQ ID NO: 2323890 - DNA, 25 bp, Homo sapien
tcccctgtgctatatgtgaaagagg

SEQ ID NO: 2323891 - DNA, 25 bp, Homo sapien
gaccacaggtttgcagcatgctgag

SEQ ID NO: 2323892 - DNA, 25 bp, Homo sapien
tgtgtgtatgaagggtcacaaccct

SEQ ID NO: 2323893 - DNA, 25 bp, Homo sapien
gagcaacccatttctcagtccaggg

SEQ ID NO: 2323894 - DNA, 25 bp, Homo sapien
gacagatgagcagccattgacaggc

SEQ ID NO: 2323895 - DNA, 25 bp, Homo sapien
cacttcaacttgagggcactgtgac

SEQ ID NO: 2323896 - DNA, 25 bp, Homo sapien
gggcagggaatatcaaaaggagctt

SEQ ID NO: 2323897 - DNA, 25 bp, Homo sapien
cctcttcagtatggagggtgctgca

SEQ ID NO: 2323898 - DNA, 25 bp, Homo sapien
taaagtgcacttaataccagatggg

SEQ ID NO: 2323899 - DNA, 25 bp, Homo sapien
tagagagattttgccaatgagctgg

SEQ ID NO: 2323900 - DNA, 25 bp, Homo sapien
gaaaagtcaggctccagcttgaaag

SEQ ID NO: 2323901 - DNA, 25 bp, Homo sapien
ggattcttaagtgccctgctgacag

SEQ ID NO: 2323902 - DNA, 25 bp, Homo sapien
tgaggagcctttgaacagtcagtcc

SEQ ID NO: 2323903 - DNA, 25 bp, Homo sapien
tagtgcagaggagccagattggacc

SEQ ID NO: 2323904 - DNA, 25 bp, Homo sapien
cttagaagttgggtgataggctgcc

SEQ ID NO: 2323905 - DNA, 25 bp, Homo sapien
cgctgctgtcacgtgaccggaggcc

SEQ ID NO: 2323906 - DNA, 25 bp, Homo sapien
gctcacctgcgctgctgtcacgtga

SEQ ID NO: 2323907 - DNA, 25 bp, Homo sapien
gcaaccgaccaagtggaagccggag

SEQ ID NO: 2323908 - DNA, 25 bp, Homo sapien
agccggagccggcagctatccaggc

SEQ ID NO: 2323909 - DNA, 25 bp, Homo sapien
ataccgtggctggtgggaccgagga

SEQ ID NO: 2323910 - DNA, 25 bp, Homo sapien
gtcttggaggcgaagccgaaacctg

SEQ ID NO: 2323911 - DNA, 25 bp, Homo sapien
ccttctgctgcacgaaatgcttctt

SEQ ID NO: 2323912 - DNA, 25 bp, Homo sapien
ccgcccggaacaccttcaccttctg

SEQ ID NO: 2323913 - DNA, 25 bp, Homo sapien
cgagtgggctacgccccacaggaac

SEQ ID NO: 2323914 - DNA, 25 bp, Homo sapien
agccaaaccatgaatagggaagcca

SEQ ID NO: 2323915 - DNA, 25 bp, Homo sapien
gggtgtggagagctacccatacact

SEQ ID NO: 2323916 - DNA, 25 bp, Homo sapien
ccatgaatagggaagccatgaagaa

SEQ ID NO: 2323917 - DNA, 25 bp, Homo sapien
aagaagggtgtggagagctacccat

SEQ ID NO: 2323918 - DNA, 25 bp, Homo sapien
gaaaaggtgattgttgaccttgatc

SEQ ID NO: 2323919 - DNA, 25 bp, Homo sapien
aggtgattgttgaccttgatcttgg

SEQ ID NO: 2323920 - DNA, 25 bp, Homo sapien
agcagcatcaccgggggaggcacct

SEQ ID NO: 2323921 - DNA, 25 bp, Homo sapien
gcatcaccgggggaggcacctggct

SEQ ID NO: 2323922 - DNA, 25 bp, Homo sapien
atcgatcacggaggttcctgaagac

SEQ ID NO: 2323923 - DNA, 25 bp, Homo sapien
tcatcaatgccaaatcgatcacgga

SEQ ID NO: 2323924 - DNA, 25 bp, Homo sapien
gaagacctggggacaatactccttg

SEQ ID NO: 2323925 - DNA, 25 bp, Homo sapien
gggacaatactccttgaacttgaaa

SEQ ID NO: 2323926 - DNA, 25 bp, Homo sapien
agcgcctggccaaaattcttaatgt

SEQ ID NO: 2323927 - DNA, 25 bp, Homo sapien
cagcgcctggccaaaattcttaatg

SEQ ID NO: 2323928 - DNA, 25 bp, Homo sapien
ccacagcgcctggccaaaattctta

SEQ ID NO: 2323929 - DNA, 25 bp, Homo sapien
acagcgcctggccaaaattcttaat

SEQ ID NO: 2323930 - DNA, 25 bp, Homo sapien
aaccttcgcctcccaagttcaggtg

SEQ ID NO: 2323931 - DNA, 25 bp, Homo sapien
gcaaccttcgcctcccaagttcagg

SEQ ID NO: 2323932 - DNA, 25 bp, Homo sapien
gcctcccaagtagcggggactagac

SEQ ID NO: 2323933 - DNA, 25 bp, Homo sapien
ctcccaagtagcggggactagacgt

SEQ ID NO: 2323934 - DNA, 25 bp, Homo sapien
taggagataaggaagcgaccatcac

SEQ ID NO: 2323935 - DNA, 25 bp, Homo sapien
ccagagtccgatcgtaggagataag

SEQ ID NO: 2323936 - DNA, 25 bp, Homo sapien
ttggagaggttgctatgcatgtcag

SEQ ID NO: 2323937 - DNA, 25 bp, Homo sapien
actggatacttctttgatgaccaga

SEQ ID NO: 2323938 - DNA, 25 bp, Homo sapien
cagccaaccttctcaggaaagtaat

SEQ ID NO: 2323939 - DNA, 25 bp, Homo sapien
accttctcaggaaagtaatcagcaa

SEQ ID NO: 2323940 - DNA, 25 bp, Homo sapien
ctcaggaaagtaatcagcaagaaat

SEQ ID NO: 2323941 - DNA, 25 bp, Homo sapien
cacagccaaccttctcaggaaagta

SEQ ID NO: 2323942 - DNA, 25 bp, Homo sapien
agacggtggctaaacatattgcgca

SEQ ID NO: 2323943 - DNA, 25 bp, Homo sapien
tgcgcatcacaagcatgtagctgtc

SEQ ID NO: 2323944 - DNA, 25 bp, Homo sapien
gtagctgtcttcgttgtccacactg

SEQ ID NO: 2323945 - DNA, 25 bp, Homo sapien
tgactcggtacatccccaggaactg

SEQ ID NO: 2323946 - DNA, 25 bp, Homo sapien
atcgctggcttcccgggacactagg

SEQ ID NO: 2323947 - DNA, 25 bp, Homo sapien
cttttccttatcgctggcttcccgg

SEQ ID NO: 2323948 - DNA, 25 bp, Homo sapien
tatcgctggcttcccgggacactag

SEQ ID NO: 2323949 - DNA, 25 bp, Homo sapien
tcgctggcttcccgggacactaggg

SEQ ID NO: 2323950 - DNA, 25 bp, Homo sapien
tggtagagattacgttgctcaggct

SEQ ID NO: 2323951 - DNA, 25 bp, Homo sapien
caatccccggatcaacagaagttta

SEQ ID NO: 2323952 - DNA, 25 bp, Homo sapien
ccggcctgtgtcttcttaagcaaaa

SEQ ID NO: 2323953 - DNA, 25 bp, Homo sapien
tgccagtgttaaagcagctgctccc

SEQ ID NO: 2323954 - DNA, 25 bp, Homo sapien
atatccttaagggtgggcaattctt

SEQ ID NO: 2323955 - DNA, 25 bp, Homo sapien
ccatatccttaagggtgggcaattc

SEQ ID NO: 2323956 - DNA, 25 bp, Homo sapien
catatccttaagggtgggcaattct

SEQ ID NO: 2323957 - DNA, 25 bp, Homo sapien
tccatatccttaagggtgggcaatt

SEQ ID NO: 2323958 - DNA, 25 bp, Homo sapien
cgtgaatgaaagagacaactaccct

SEQ ID NO: 2323959 - DNA, 25 bp, Homo sapien
aggtgccataggagcccacaagagc

SEQ ID NO: 2323960 - DNA, 25 bp, Homo sapien
tggatgtagcctccgataccctctg

SEQ ID NO: 2323961 - DNA, 25 bp, Homo sapien
cgaatgatgtcgtggatgcctagca

SEQ ID NO: 2323962 - DNA, 25 bp, Homo sapien
tcagcactccggatggcatagacat

SEQ ID NO: 2323963 - DNA, 25 bp, Homo sapien
gcatcatactgtgtaaggatatcaa

SEQ ID NO: 2323964 - DNA, 25 bp, Homo sapien
taaggatatcaatgaggcccatgaa

SEQ ID NO: 2323965 - DNA, 25 bp, Homo sapien
tcttagcatcatactgtgtaaggat

SEQ ID NO: 2323966 - DNA, 25 bp, Homo sapien
tactgtgtaaggatatcaatgaggc

SEQ ID NO: 2323967 - DNA, 25 bp, Homo sapien
tggacagtagagatctctgccccag

SEQ ID NO: 2323968 - DNA, 25 bp, Homo sapien
aataaaatccaggaatcgcttagca

SEQ ID NO: 2323969 - DNA, 25 bp, Homo sapien
ttagcatactgctccggatggacag

SEQ ID NO: 2323970 - DNA, 25 bp, Homo sapien
tactgctccggatggacagtagaga

SEQ ID NO: 2323971 - DNA, 25 bp, Homo sapien
acatcagagagaaccaggcagtctc

SEQ ID NO: 2323972 - DNA, 25 bp, Homo sapien
tgaacatcagagagaaccaggcagt

SEQ ID NO: 2323973 - DNA, 25 bp, Homo sapien
ttgaacatcagagagaaccaggcag

SEQ ID NO: 2323974 - DNA, 25 bp, Homo sapien
gaacatcagagagaaccaggcagtc

SEQ ID NO: 2323975 - DNA, 25 bp, Homo sapien
caaggcacttgggagagagtcaaca

SEQ ID NO: 2323976 - DNA, 25 bp, Homo sapien
aatactacaagcagacttctcatgg

SEQ ID NO: 2323977 - DNA, 25 bp, Homo sapien
gaaagagcctactcgacaggatgga

SEQ ID NO: 2323978 - DNA, 25 bp, Homo sapien
gagaactggtggctagaatatcccc

SEQ ID NO: 2323979 - DNA, 25 bp, Homo sapien
cacttttagttcatcccacacagca

SEQ ID NO: 2323980 - DNA, 25 bp, Homo sapien
catccagagtagttgcttgagccag

SEQ ID NO: 2323981 - DNA, 25 bp, Homo sapien
tgtccagtcaggtcctgaagaaggc

SEQ ID NO: 2323982 - DNA, 25 bp, Homo sapien
tcttgagtgtcatccatcctagggc

SEQ ID NO: 2323983 - DNA, 25 bp, Homo sapien
tcttgtgagacagatcagtccagcc

SEQ ID NO: 2323984 - DNA, 25 bp, Homo sapien
gacacagttgcagtataagacagga

SEQ ID NO: 2323985 - DNA, 25 bp, Homo sapien
gctttgcatcaccacaggccagttg

SEQ ID NO: 2323986 - DNA, 25 bp, Homo sapien
cactgaagggttccagtcccaggag

SEQ ID NO: 2323987 - DNA, 25 bp, Homo sapien
atgaagacatccatactgcccataa

SEQ ID NO: 2323988 - DNA, 25 bp, Homo sapien
tcagaaaacccatttctaaagagca

SEQ ID NO: 2323989 - DNA, 25 bp, Homo sapien
acacatcagccatatgatcagaaaa

SEQ ID NO: 2323990 - DNA, 25 bp, Homo sapien
gacatccatactgcccataacacat

SEQ ID NO: 2323991 - DNA, 25 bp, Homo sapien
gattgaataatttattccctgtatt

SEQ ID NO: 2323992 - DNA, 25 bp, Homo sapien
tgaataatttattccctgtattatt

SEQ ID NO: 2323993 - DNA, 25 bp, Homo sapien
gaataatttattccctgtattatta

SEQ ID NO: 2323994 - DNA, 25 bp, Homo sapien
ttggattgaataatttattccctgt

SEQ ID NO: 2323995 - DNA, 25 bp, Homo sapien
gcaggaatctcccaaactggcaaca

SEQ ID NO: 2323996 - DNA, 25 bp, Homo sapien
tttccaccagccaaaagacttcctc

SEQ ID NO: 2323997 - DNA, 25 bp, Homo sapien
acatcaagccaggtttttccaccag

SEQ ID NO: 2323998 - DNA, 25 bp, Homo sapien
aagacttcctcagccaagacaggca

SEQ ID NO: 2323999 - DNA, 25 bp, Homo sapien
caggtgataatcaccgttcctttga

SEQ ID NO: 2324000 - DNA, 25 bp, Homo sapien
tgataatcaccgttcctttgacccc

SEQ ID NO: 2324001 - DNA, 25 bp, Homo sapien
cctcacaggtgataatcaccgttcc

SEQ ID NO: 2324002 - DNA, 25 bp, Homo sapien
tttgacccccttctatccgcaagcc

SEQ ID NO: 2324003 - DNA, 25 bp, Homo sapien
ctgttgctgggatgacggtccgggc

SEQ ID NO: 2324004 - DNA, 25 bp, Homo sapien
gctgttgctgggatgacggtccggg

SEQ ID NO: 2324005 - DNA, 25 bp, Homo sapien
aacccccgaatggaggccaaggctg

SEQ ID NO: 2324006 - DNA, 25 bp, Homo sapien
tagggtgggtctgtgattcctctgt

SEQ ID NO: 2324007 - DNA, 25 bp, Homo sapien
tgtggcaacccaggccggacaagga

SEQ ID NO: 2324008 - DNA, 25 bp, Homo sapien
cacagcccggatgggcaagggtccc

SEQ ID NO: 2324009 - DNA, 25 bp, Homo sapien
gagtctcagcccatacagtctatcc

SEQ ID NO: 2324010 - DNA, 25 bp, Homo sapien
gaagggccattagtgtgacctccat

SEQ ID NO: 2324011 - DNA, 25 bp, Homo sapien
ggccagatgcacctcgagattcata

SEQ ID NO: 2324012 - DNA, 25 bp, Homo sapien
gaaaatggaaccctagagtctcagc

SEQ ID NO: 2324013 - DNA, 25 bp, Homo sapien
ttttccctgagtctggtcgcattgg

SEQ ID NO: 2324014 - DNA, 25 bp, Homo sapien
ccctgagtctggtcgcattgggcta

SEQ ID NO: 2324015 - DNA, 25 bp, Homo sapien
cctgagtctggtcgcattgggctac

SEQ ID NO: 2324016 - DNA, 25 bp, Homo sapien
ttccctgagtctggtcgcattgggc

SEQ ID NO: 2324017 - DNA, 25 bp, Homo sapien
tgtctgtcagctcccaagtctggca

SEQ ID NO: 2324018 - DNA, 25 bp, Homo sapien
tcccaagtctggcatttagggaggg

SEQ ID NO: 2324019 - DNA, 25 bp, Homo sapien
tcagctcccaagtctggcatttagg

SEQ ID NO: 2324020 - DNA, 25 bp, Homo sapien
gcagtgctgtctgtcagctcccaag

SEQ ID NO: 2324021 - DNA, 25 bp, Homo sapien
tagggcacacataagagaagtcagg

SEQ ID NO: 2324022 - DNA, 25 bp, Homo sapien
cctcagatcacatggaccggaatat

SEQ ID NO: 2324023 - DNA, 25 bp, Homo sapien
ttaaggatgtgaacaaagtggcagc

SEQ ID NO: 2324024 - DNA, 25 bp, Homo sapien
aaagaaaacgcccacacaggtggag

SEQ ID NO: 2324025 - DNA, 25 bp, Homo sapien
ccagctctgaggcccccaagaaagc

SEQ ID NO: 2324026 - DNA, 25 bp, Homo sapien
gggtaaaaagttatgatggcaaatg

SEQ ID NO: 2324027 - DNA, 25 bp, Homo sapien
tctccccaagttgctcaagaaggaa

SEQ ID NO: 2324028 - DNA, 25 bp, Homo sapien
aaaagttatgatggcaaatgttacc

SEQ ID NO: 2324029 - DNA, 25 bp, Homo sapien
caagaaggaacttcaacatgctaac

SEQ ID NO: 2324030 - DNA, 25 bp, Homo sapien
atccttctatttccactcagctgac

SEQ ID NO: 2324031 - DNA, 25 bp, Homo sapien
tccttctatttccactcagctgacc

SEQ ID NO: 2324032 - DNA, 25 bp, Homo sapien
cttctatttccactcagctgaccag

SEQ ID NO: 2324033 - DNA, 25 bp, Homo sapien
tctatttccactcagctgaccagga

SEQ ID NO: 2324034 - DNA, 25 bp, Homo sapien
cctgctccctacttgtaggtcgtgt

SEQ ID NO: 2324035 - DNA, 25 bp, Homo sapien
tgctccctacttgtaggtcgtgtga

SEQ ID NO: 2324036 - DNA, 25 bp, Homo sapien
ccctgctccctacttgtaggtcgtg

SEQ ID NO: 2324037 - DNA, 25 bp, Homo sapien
gctccctacttgtaggtcgtgtgac

SEQ ID NO: 2324038 - DNA, 25 bp, Homo sapien
ttgatcctgaagagcttagaattgg

SEQ ID NO: 2324039 - DNA, 25 bp, Homo sapien
atcctgaagagcttagaattggcat

SEQ ID NO: 2324040 - DNA, 25 bp, Homo sapien
tgatcctgaagagcttagaattggc

SEQ ID NO: 2324041 - DNA, 25 bp, Homo sapien
gatcctgaagagcttagaattggca

SEQ ID NO: 2324042 - DNA, 25 bp, Homo sapien
gatcatagaaacaacttgcccctcc

SEQ ID NO: 2324043 - DNA, 25 bp, Homo sapien
agtatcagtgcctcctacttcaggt

SEQ ID NO: 2324044 - DNA, 25 bp, Homo sapien
tcatctaagccaagtatcagtcttg

SEQ ID NO: 2324045 - DNA, 25 bp, Homo sapien
agtttccagagctatattatcatct

SEQ ID NO: 2324046 - DNA, 25 bp, Homo sapien
cacacgggcttggacacagtcactt

SEQ ID NO: 2324047 - DNA, 25 bp, Homo sapien
gaacatagatgtcagaagtctcgcc

SEQ ID NO: 2324048 - DNA, 25 bp, Homo sapien
ctttgctcaggaagtcccacacggg

SEQ ID NO: 2324049 - DNA, 25 bp, Homo sapien
tatgaggatggacacacggtgctcc

SEQ ID NO: 2324050 - DNA, 25 bp, Homo sapien
tgcctcttttagcagccccttgaga

SEQ ID NO: 2324051 - DNA, 25 bp, Homo sapien
ccccttgagagccttccgggctagg

SEQ ID NO: 2324052 - DNA, 25 bp, Homo sapien
tctgcctcttttagcagccccttga

SEQ ID NO: 2324053 - DNA, 25 bp, Homo sapien
ccgggctaggtagagcccatttgga

SEQ ID NO: 2324054 - DNA, 25 bp, Homo sapien
gcctgcgcggtgcatctcagggtgc

SEQ ID NO: 2324055 - DNA, 25 bp, Homo sapien
ggtgggcctgcgcggtgcatctcag

SEQ ID NO: 2324056 - DNA, 25 bp, Homo sapien
tgggcctgcgcggtgcatctcaggg

SEQ ID NO: 2324057 - DNA, 25 bp, Homo sapien
gggcagaagtggggctgctcggaga

SEQ ID NO: 2324058 - DNA, 25 bp, Homo sapien
acagatggggcaggtgctctcctgc

SEQ ID NO: 2324059 - DNA, 25 bp, Homo sapien
ccagacagatggggcaggtgctctc

SEQ ID NO: 2324060 - DNA, 25 bp, Homo sapien
ctcccccagacagatggggcaggtg

SEQ ID NO: 2324061 - DNA, 25 bp, Homo sapien
gatggggcaggtgctctcctgctct

SEQ ID NO: 2324062 - DNA, 25 bp, Homo sapien
agggtggcgtccttagagaccagca

SEQ ID NO: 2324063 - DNA, 25 bp, Homo sapien
caatggtgccgtacttctcatagct

SEQ ID NO: 2324064 - DNA, 25 bp, Homo sapien
gcgggaagacgtactggatgacaat

SEQ ID NO: 2324065 - DNA, 25 bp, Homo sapien
ctgcccatagaagcggccgcacatg

SEQ ID NO: 2324066 - DNA, 25 bp, Homo sapien
cccggttttcctaggtcagagcttg

SEQ ID NO: 2324067 - DNA, 25 bp, Homo sapien
gcaggaagacacctataggccttga

SEQ ID NO: 2324068 - DNA, 25 bp, Homo sapien
gattttcacgtgtgccttgggatca

SEQ ID NO: 2324069 - DNA, 25 bp, Homo sapien
gaatttacctctgccaagatgtcag

SEQ ID NO: 2324070 - DNA, 25 bp, Homo sapien
tccctgtggtcatggacgtgccgat

SEQ ID NO: 2324071 - DNA, 25 bp, Homo sapien
aaacgccttgcggaacagggtcagc

SEQ ID NO: 2324072 - DNA, 25 bp, Homo sapien
tcgttccaggtgatgacattcggtc

SEQ ID NO: 2324073 - DNA, 25 bp, Homo sapien
ggtgagacgctggtcaaacgccttg

SEQ ID NO: 2324074 - DNA, 25 bp, Homo sapien
tggtgggtccctcagtggaaatgga

SEQ ID NO: 2324075 - DNA, 25 bp, Homo sapien
tctctccagttaggaggctccgtga

SEQ ID NO: 2324076 - DNA, 25 bp, Homo sapien
ctgagatggctgaacagtttggaag

SEQ ID NO: 2324077 - DNA, 25 bp, Homo sapien
gaccaggttgaatgtaggagaaact

SEQ ID NO: 2324078 - DNA, 25 bp, Homo sapien
ccttcgctctcagctcctcttgcac

SEQ ID NO: 2324079 - DNA, 25 bp, Homo sapien
gcggttaggaatcaagagaccctcc

SEQ ID NO: 2324080 - DNA, 25 bp, Homo sapien
tctcggcttggtcgtggagcacagc

SEQ ID NO: 2324081 - DNA, 25 bp, Homo sapien
aattaaaagctacagtctggcagcg

SEQ ID NO: 2324082 - DNA, 25 bp, Homo sapien
cagacaggtcccctacaggtgtggt

SEQ ID NO: 2324083 - DNA, 25 bp, Homo sapien
tcagggtcgagggggcactgaagct

SEQ ID NO: 2324084 - DNA, 25 bp, Homo sapien
aagtttcagggtcgagggggcactg

SEQ ID NO: 2324085 - DNA, 25 bp, Homo sapien
tttcagggtcgagggggcactgaag

SEQ ID NO: 2324086 - DNA, 25 bp, Homo sapien
caagtttcagggtcgagggggcact

SEQ ID NO: 2324087 - DNA, 25 bp, Homo sapien
gacccccagtatccggtcagtgcgg

SEQ ID NO: 2324088 - DNA, 25 bp, Homo sapien
ccctcctgcccagggagggcgcatg

SEQ ID NO: 2324089 - DNA, 25 bp, Homo sapien
agggcgcatgcgcgcagcatgcccc

SEQ ID NO: 2324090 - DNA, 25 bp, Homo sapien
cgcatgcgcgcagcatgccccccat

SEQ ID NO: 2324091 - DNA, 25 bp, Homo sapien
gggagggcgcatgcgcgcagcatgc

SEQ ID NO: 2324092 - DNA, 25 bp, Homo sapien
gactgccccgcagaactcgttttcg

SEQ ID NO: 2324093 - DNA, 25 bp, Homo sapien
cgttttcggataagttgagttgtgg

SEQ ID NO: 2324094 - DNA, 25 bp, Homo sapien
cattgttataaaaggctcgcccaga

SEQ ID NO: 2324095 - DNA, 25 bp, Homo sapien
gggctatggccctcgtaatagaatt

SEQ ID NO: 2324096 - DNA, 25 bp, Homo sapien
tggctcggtacccaccaaccctaga

SEQ ID NO: 2324097 - DNA, 25 bp, Homo sapien
tgatctccctccgtacgttcagact

SEQ ID NO: 2324098 - DNA, 25 bp, Homo sapien
ctccgtacgttcagactctggctcg

SEQ ID NO: 2324099 - DNA, 25 bp, Homo sapien
tctgtgatctccctccgtacgttca

SEQ ID NO: 2324100 - DNA, 25 bp, Homo sapien
ctgcagagccccggcgaggacctca

SEQ ID NO: 2324101 - DNA, 25 bp, Homo sapien
ggctgcagagccccggcgaggacct

SEQ ID NO: 2324102 - DNA, 25 bp, Homo sapien
gggctgcagagccccggcgaggacc

SEQ ID NO: 2324103 - DNA, 25 bp, Homo sapien
tgcagagccccggcgaggacctcat

SEQ ID NO: 2324104 - DNA, 25 bp, Homo sapien
gtggggcgcggggacactctgcctg

SEQ ID NO: 2324105 - DNA, 25 bp, Homo sapien
cactctgcctgcgagggctcgggat

SEQ ID NO: 2324106 - DNA, 25 bp, Homo sapien
ggacactctgcctgcgagggctcgg

SEQ ID NO: 2324107 - DNA, 25 bp, Homo sapien
gggtggggcgcggggacactctgcc

SEQ ID NO: 2324108 - DNA, 25 bp, Homo sapien
ggtcccagcggagcggagagctgaa

SEQ ID NO: 2324109 - DNA, 25 bp, Homo sapien
taggcggaagtctagtcttgaggag

SEQ ID NO: 2324110 - DNA, 25 bp, Homo sapien
cagctgtctccggcctctggttagg

SEQ ID NO: 2324111 - DNA, 25 bp, Homo sapien
cctagggtccagatgtccagtggaa

SEQ ID NO: 2324112 - DNA, 25 bp, Homo sapien
ttgccagcacttttcggatcacacg

SEQ ID NO: 2324113 - DNA, 25 bp, Homo sapien
tgccagcacttttcggatcacacgg

SEQ ID NO: 2324114 - DNA, 25 bp, Homo sapien
cagcacttttcggatcacacgggga

SEQ ID NO: 2324115 - DNA, 25 bp, Homo sapien
gccagcacttttcggatcacacggg

SEQ ID NO: 2324116 - DNA, 25 bp, Homo sapien
cccccccgggcgaagcagcagccgc

SEQ ID NO: 2324117 - DNA, 25 bp, Homo sapien
gccatcctcatttgagttggccagg

SEQ ID NO: 2324118 - DNA, 25 bp, Homo sapien
catcctcatttgagttggccaggat

SEQ ID NO: 2324119 - DNA, 25 bp, Homo sapien
ttgccatcctcatttgagttggcca

SEQ ID NO: 2324120 - DNA, 25 bp, Homo sapien
tcctcatttgagttggccaggatag

SEQ ID NO: 2324121 - DNA, 25 bp, Homo sapien
ggtcttctcttcatgatgctcagcc

SEQ ID NO: 2324122 - DNA, 25 bp, Homo sapien
cccagggtcttctcttcatgatgct

SEQ ID NO: 2324123 - DNA, 25 bp, Homo sapien
agggtcttctcttcatgatgctcag

SEQ ID NO: 2324124 - DNA, 25 bp, Homo sapien
cagggtcttctcttcatgatgctca

SEQ ID NO: 2324125 - DNA, 25 bp, Homo sapien
gcagcagaagccgatatactcccct

SEQ ID NO: 2324126 - DNA, 25 bp, Homo sapien
gaggcagcagaagccgatatactcc

SEQ ID NO: 2324127 - DNA, 25 bp, Homo sapien
ggaggcagcagaagccgatatactc

SEQ ID NO: 2324128 - DNA, 25 bp, Homo sapien
agcagaagccgatatactcccctca

SEQ ID NO: 2324129 - DNA, 25 bp, Homo sapien
tgtttggaatgatccaaccatctcc

SEQ ID NO: 2324130 - DNA, 25 bp, Homo sapien
ttccacactgagacaatgtttggaa

SEQ ID NO: 2324131 - DNA, 25 bp, Homo sapien
tcctcaggccactgacgggccctgg

SEQ ID NO: 2324132 - DNA, 25 bp, Homo sapien
cactgagacaatgtttggaatgatc

SEQ ID NO: 2324133 - DNA, 25 bp, Homo sapien
ctgtggctagagctggctccaacat

SEQ ID NO: 2324134 - DNA, 25 bp, Homo sapien
agcaaggtcagttccggcagctcct

SEQ ID NO: 2324135 - DNA, 25 bp, Homo sapien
gcaaggtcagttccggcagctcctc

SEQ ID NO: 2324136 - DNA, 25 bp, Homo sapien
tcagcaaggtcagttccggcagctc

SEQ ID NO: 2324137 - DNA, 25 bp, Homo sapien
aaggtcagttccggcagctcctctc

SEQ ID NO: 2324138 - DNA, 25 bp, Homo sapien
tcctcctcactctcaggggcttggg

SEQ ID NO: 2324139 - DNA, 25 bp, Homo sapien
ctctcaggggcttgggacaaagtct

SEQ ID NO: 2324140 - DNA, 25 bp, Homo sapien
tactcctttccagagccttcttctt

SEQ ID NO: 2324141 - DNA, 25 bp, Homo sapien
ggcttgggacaaagtctcctcttca

SEQ ID NO: 2324142 - DNA, 25 bp, Homo sapien
tctctgtttctaccagttcactcag

SEQ ID NO: 2324143 - DNA, 25 bp, Homo sapien
aagtcgtccacgtacattttctctg

SEQ ID NO: 2324144 - DNA, 25 bp, Homo sapien
tctgtttctaccagttcactcagga

SEQ ID NO: 2324145 - DNA, 25 bp, Homo sapien
acaatctgccccaagtcgtccacgt

SEQ ID NO: 2324146 - DNA, 25 bp, Homo sapien
tcctgaaaatagccctgggcagatg

SEQ ID NO: 2324147 - DNA, 25 bp, Homo sapien
gaaaatagccctgggcagatggaaa

SEQ ID NO: 2324148 - DNA, 25 bp, Homo sapien
ctcctgaaaatagccctgggcagat

SEQ ID NO: 2324149 - DNA, 25 bp, Homo sapien
ctgaaaatagccctgggcagatgga

SEQ ID NO: 2324150 - DNA, 25 bp, Homo sapien
agactctcggggaccccctgagcag

SEQ ID NO: 2324151 - DNA, 25 bp, Homo sapien
acaatcctgtcacggcctcgaagac

SEQ ID NO: 2324152 - DNA, 25 bp, Homo sapien
aaacacaatcctgtcacggcctcga

SEQ ID NO: 2324153 - DNA, 25 bp, Homo sapien
tgtcacggcctcgaagactctcggg

SEQ ID NO: 2324154 - DNA, 25 bp, Homo sapien
agcagcaggtcaaatacatttcaca

SEQ ID NO: 2324155 - DNA, 25 bp, Homo sapien
cagtttcgagctgtctgccctggta

SEQ ID NO: 2324156 - DNA, 25 bp, Homo sapien
cattccttaagtcgcaatgggctga

SEQ ID NO: 2324157 - DNA, 25 bp, Homo sapien
tagtgtgccctacaaaacttctcca

SEQ ID NO: 2324158 - DNA, 25 bp, Homo sapien
gagccagccaatcaggatctttcag

SEQ ID NO: 2324159 - DNA, 25 bp, Homo sapien
tgtttgatgaatagctgagccagcc

SEQ ID NO: 2324160 - DNA, 25 bp, Homo sapien
gatctttcagacaccgttgtagctc

SEQ ID NO: 2324161 - DNA, 25 bp, Homo sapien
ccgttgtagctcttgcaagaaatag

SEQ ID NO: 2324162 - DNA, 25 bp, Homo sapien
ctaacaggggtaatgtttaagagag

SEQ ID NO: 2324163 - DNA, 25 bp, Homo sapien
agggaggacgcatctccagagaatc

SEQ ID NO: 2324164 - DNA, 25 bp, Homo sapien
caaggagggaggacgcatctccaga

SEQ ID NO: 2324165 - DNA, 25 bp, Homo sapien
caggggtaatgtttaagagagagca

SEQ ID NO: 2324166 - DNA, 25 bp, Homo sapien
agtacaccacatacatatgcagccg

SEQ ID NO: 2324167 - DNA, 25 bp, Homo sapien
accacatacatatgcagccggcgct

SEQ ID NO: 2324168 - DNA, 25 bp, Homo sapien
tgacagtacaccacatacatatgca

SEQ ID NO: 2324169 - DNA, 25 bp, Homo sapien
cacatgctctgacttgggcttattc

SEQ ID NO: 2324170 - DNA, 25 bp, Homo sapien
gacagggtggttatgcagcctggaa

SEQ ID NO: 2324171 - DNA, 25 bp, Homo sapien
ggtatttcatgatccgctgcacagg

SEQ ID NO: 2324172 - DNA, 25 bp, Homo sapien
tttcatgatccgctgcacaggtttg

SEQ ID NO: 2324173 - DNA, 25 bp, Homo sapien
cagctggtatttcatgatccgctgc

SEQ ID NO: 2324174 - DNA, 25 bp, Homo sapien
caggtttgatgaggaggtcgttcag

SEQ ID NO: 2324175 - DNA, 25 bp, Homo sapien
ctctaggtctgcagtatccatccca

SEQ ID NO: 2324176 - DNA, 25 bp, Homo sapien
catcccagctctattgtaatacttg

SEQ ID NO: 2324177 - DNA, 25 bp, Homo sapien
cagctctattgtaatacttgagaaa

SEQ ID NO: 2324178 - DNA, 25 bp, Homo sapien
tctaggtctgcagtatccatcccag

SEQ ID NO: 2324179 - DNA, 25 bp, Homo sapien
catatcgttgcagcgcttgggcaca

SEQ ID NO: 2324180 - DNA, 25 bp, Homo sapien
aatctccccagcgtcatcatatcgt

SEQ ID NO: 2324181 - DNA, 25 bp, Homo sapien
gttgcagcgcttgggcacaaagcac

SEQ ID NO: 2324182 - DNA, 25 bp, Homo sapien
ccagcgtcatcatatcgttgcagcg

SEQ ID NO: 2324183 - DNA, 25 bp, Homo sapien
acccagaaagtgtcctggcccaaga

SEQ ID NO: 2324184 - DNA, 25 bp, Homo sapien
aagagcttcccctgagcagtcagtt

SEQ ID NO: 2324185 - DNA, 25 bp, Homo sapien
ctcggtgacccagaaagtgtcctgg

SEQ ID NO: 2324186 - DNA, 25 bp, Homo sapien
gcttcccctgagcagtcagtttgcc

SEQ ID NO: 2324187 - DNA, 25 bp, Homo sapien
gacgcgcctctctcgacctcgggaa

SEQ ID NO: 2324188 - DNA, 25 bp, Homo sapien
gcctctctcgacctcgggaagacag

SEQ ID NO: 2324189 - DNA, 25 bp, Homo sapien
gcgcctctctcgacctcgggaagac

SEQ ID NO: 2324190 - DNA, 25 bp, Homo sapien
gatgatgatttgctcaaagaggaag

SEQ ID NO: 2324191 - DNA, 25 bp, Homo sapien
ttcttgtatacatatccaggctgtg

SEQ ID NO: 2324192 - DNA, 25 bp, Homo sapien
ttgtatacatatccaggctgtgttc

SEQ ID NO: 2324193 - DNA, 25 bp, Homo sapien
tatccaggctgtgttccacctctca

SEQ ID NO: 2324194 - DNA, 25 bp, Homo sapien
ctgttcttgtatacatatccaggct

SEQ ID NO: 2324195 - DNA, 25 bp, Homo sapien
tgagacatcctctcagaggcctcat

SEQ ID NO: 2324196 - DNA, 25 bp, Homo sapien
cctgcaggacatagcgctggatccc

SEQ ID NO: 2324197 - DNA, 25 bp, Homo sapien
tctggaggtcagtgcaaagcggcaa

SEQ ID NO: 2324198 - DNA, 25 bp, Homo sapien
ggaagtcccgttggctctccaagat

SEQ ID NO: 2324199 - DNA, 25 bp, Homo sapien
cacatgcttgatccaggcctgactg

SEQ ID NO: 2324200 - DNA, 25 bp, Homo sapien
cacatcgggaagaaaggatgagagc

SEQ ID NO: 2324201 - DNA, 25 bp, Homo sapien
gggctgagagagcacatcgggaaga

SEQ ID NO: 2324202 - DNA, 25 bp, Homo sapien
ctgagagagcacatcgggaagaaag

SEQ ID NO: 2324203 - DNA, 25 bp, Homo sapien
agagcacatcgggaagaaaggatga

SEQ ID NO: 2324204 - DNA, 25 bp, Homo sapien
caatgtcaattgcttagggctttag

SEQ ID NO: 2324205 - DNA, 25 bp, Homo sapien
gagggtaggtactggagactgggca

SEQ ID NO: 2324206 - DNA, 25 bp, Homo sapien
tccctgtcagccaatgtcaattgct

SEQ ID NO: 2324207 - DNA, 25 bp, Homo sapien
ctatcaaattttgagctagcagtgg

SEQ ID NO: 2324208 - DNA, 25 bp, Homo sapien
aggaacagaaggagggttaccgcag

SEQ ID NO: 2324209 - DNA, 25 bp, Homo sapien
ggaacagaaggagggttaccgcaga

SEQ ID NO: 2324210 - DNA, 25 bp, Homo sapien
cctgggcctgatctccaagctgaat

SEQ ID NO: 2324211 - DNA, 25 bp, Homo sapien
caagctgaattcttccagggctccc

SEQ ID NO: 2324212 - DNA, 25 bp, Homo sapien
cctcccctttgggtgacagcagcag

SEQ ID NO: 2324213 - DNA, 25 bp, Homo sapien
ggctctcccgtctctggtactcaat

SEQ ID NO: 2324214 - DNA, 25 bp, Homo sapien
gctcatcttcatccagcttggcaag

SEQ ID NO: 2324215 - DNA, 25 bp, Homo sapien
tccagcttggcaagtctggcttggc

SEQ ID NO: 2324216 - DNA, 25 bp, Homo sapien
tcatcttcatccagcttggcaagtc

SEQ ID NO: 2324217 - DNA, 25 bp, Homo sapien
atcttcatccagcttggcaagtctg

SEQ ID NO: 2324218 - DNA, 25 bp, Homo sapien
cagacacaccaagaaggaggaattc

SEQ ID NO: 2324219 - DNA, 25 bp, Homo sapien
ggactgccctgaagctccttgggga

SEQ ID NO: 2324220 - DNA, 25 bp, Homo sapien
aataatttctatctggcccctgccc

SEQ ID NO: 2324221 - DNA, 25 bp, Homo sapien
tccttgggtctaggtgttctcctcc

SEQ ID NO: 2324222 - DNA, 25 bp, Homo sapien
aggtcctggtgccctgaatcccgct

SEQ ID NO: 2324223 - DNA, 25 bp, Homo sapien
tcctggtgccctgaatcccgctcat

SEQ ID NO: 2324224 - DNA, 25 bp, Homo sapien
aggtcagaggtgtcccccgcgcctg

SEQ ID NO: 2324225 - DNA, 25 bp, Homo sapien
tcgccaaggggtacttaaggtcaga

SEQ ID NO: 2324226 - DNA, 25 bp, Homo sapien
tcttcaggtagctccggttcctgct

SEQ ID NO: 2324227 - DNA, 25 bp, Homo sapien
tcttcgcccctgaagagctgatgga

SEQ ID NO: 2324228 - DNA, 25 bp, Homo sapien
ggaaagccgcgctcttcaggtagct

SEQ ID NO: 2324229 - DNA, 25 bp, Homo sapien
atggaaccgagcctcggtgagagct

SEQ ID NO: 2324230 - DNA, 25 bp, Homo sapien
acaaggtcagggacgctgtggccaa

SEQ ID NO: 2324231 - DNA, 25 bp, Homo sapien
cagactcttaggagctgacatcaag

SEQ ID NO: 2324232 - DNA, 25 bp, Homo sapien
aaatcaagcctcatcagggaactga

SEQ ID NO: 2324233 - DNA, 25 bp, Homo sapien
tctaaggcttctcgcaggattgcgc

SEQ ID NO: 2324234 - DNA, 25 bp, Homo sapien
aagaagtgtagagtccaaacaccgg

SEQ ID NO: 2324235 - DNA, 25 bp, Homo sapien
cagtacctagcaagctgtagatgag

SEQ ID NO: 2324236 - DNA, 25 bp, Homo sapien
ccagtacctagcaagctgtagatga

SEQ ID NO: 2324237 - DNA, 25 bp, Homo sapien
tgtagagtccaaacaccgggggcac

SEQ ID NO: 2324238 - DNA, 25 bp, Homo sapien
gctcgacggccgagcctgtcatgag

SEQ ID NO: 2324239 - DNA, 25 bp, Homo sapien
catgaggctgagtatggcgaaagtt

SEQ ID NO: 2324240 - DNA, 25 bp, Homo sapien
attccgctcagattccccacgaggg

SEQ ID NO: 2324241 - DNA, 25 bp, Homo sapien
ctaccccaacccgttgagcgtccag

SEQ ID NO: 2324242 - DNA, 25 bp, Homo sapien
aaaaaggtggacaagacgccgagct

SEQ ID NO: 2324243 - DNA, 25 bp, Homo sapien
cagctgggacaagagcacgtgcagc

SEQ ID NO: 2324244 - DNA, 25 bp, Homo sapien
ttgaccacaggctcggacaaaaagg

SEQ ID NO: 2324245 - DNA, 25 bp, Homo sapien
accccaagaggctcggcagctggga

SEQ ID NO: 2324246 - DNA, 25 bp, Homo sapien
agatggtcagttcggccggactgct

SEQ ID NO: 2324247 - DNA, 25 bp, Homo sapien
gccggtctcggaatctcacgttcaa

SEQ ID NO: 2324248 - DNA, 25 bp, Homo sapien
tgctccgaggcagcgcagtcagcaa

SEQ ID NO: 2324249 - DNA, 25 bp, Homo sapien
ttcaattccttgaccggcacgagca

SEQ ID NO: 2324250 - DNA, 25 bp, Homo sapien
caggaccgcagggtctgcgcgggca

SEQ ID NO: 2324251 - DNA, 25 bp, Homo sapien
gttcccacaggaccgcagggtctgc

SEQ ID NO: 2324252 - DNA, 25 bp, Homo sapien
cacaggaccgcagggtctgcgcggg

SEQ ID NO: 2324253 - DNA, 25 bp, Homo sapien
gccagttcccacaggaccgcagggt

SEQ ID NO: 2324254 - DNA, 25 bp, Homo sapien
aggcatgggaagagatggggtccct

SEQ ID NO: 2324255 - DNA, 25 bp, Homo sapien
aaggcatgggaagagatggggtccc

SEQ ID NO: 2324256 - DNA, 25 bp, Homo sapien
gacttggtatcttgtgtccacagaa

SEQ ID NO: 2324257 - DNA, 25 bp, Homo sapien
tctggacttggtatcttgtgtccac

SEQ ID NO: 2324258 - DNA, 25 bp, Homo sapien
tggacttggtatcttgtgtccacag

SEQ ID NO: 2324259 - DNA, 25 bp, Homo sapien
ctatctggacttggtatcttgtgtc

SEQ ID NO: 2324260 - DNA, 25 bp, Homo sapien
ttaggtgcttcagtgagataaggaa

SEQ ID NO: 2324261 - DNA, 25 bp, Homo sapien
gaggaggggttaggtgcttcagtga

SEQ ID NO: 2324262 - DNA, 25 bp, Homo sapien
gagggagggatccatggtgaggagg

SEQ ID NO: 2324263 - DNA, 25 bp, Homo sapien
tggagagggagggatccatggtgag

SEQ ID NO: 2324264 - DNA, 25 bp, Homo sapien
agggaggcagacaccgcaaaactaa

SEQ ID NO: 2324265 - DNA, 25 bp, Homo sapien
ctggttggagtcaatagtgtagcta

SEQ ID NO: 2324266 - DNA, 25 bp, Homo sapien
tgggcagcgagtcagccagaatcct

SEQ ID NO: 2324267 - DNA, 25 bp, Homo sapien
gcaaaactaaccagtgcaatgggca

SEQ ID NO: 2324268 - DNA, 25 bp, Homo sapien
gcatggtgggaagtcaaatgagagg

SEQ ID NO: 2324269 - DNA, 25 bp, Homo sapien
gtgggaagtcaaatgagagggttgg

SEQ ID NO: 2324270 - DNA, 25 bp, Homo sapien
caaaggcatggtgggaagtcaaatg

SEQ ID NO: 2324271 - DNA, 25 bp, Homo sapien
acaaaggcatggtgggaagtcaaat

SEQ ID NO: 2324272 - DNA, 25 bp, Homo sapien
caccagtagattggtggtggccagc

SEQ ID NO: 2324273 - DNA, 25 bp, Homo sapien
tccaccagtagattggtggtggcca

SEQ ID NO: 2324274 - DNA, 25 bp, Homo sapien
agcatccaccagtagattggtggtg

SEQ ID NO: 2324275 - DNA, 25 bp, Homo sapien
agcgtagccgagttgggaaagcaag

SEQ ID NO: 2324276 - DNA, 25 bp, Homo sapien
gagcctacaaaggtcttactggaac

SEQ ID NO: 2324277 - DNA, 25 bp, Homo sapien
taggtgccacctgggattctagcca

SEQ ID NO: 2324278 - DNA, 25 bp, Homo sapien
taaactttttcagcgcttagagcct

SEQ ID NO: 2324279 - DNA, 25 bp, Homo sapien
cccagtcttctctatataggtgcca

SEQ ID NO: 2324280 - DNA, 25 bp, Homo sapien
gatagtaaaagaagggccccagcca

SEQ ID NO: 2324281 - DNA, 25 bp, Homo sapien
cttgggcagatagtaaaagaagggc

SEQ ID NO: 2324282 - DNA, 25 bp, Homo sapien
ggcagatagtaaaagaagggcccca

SEQ ID NO: 2324283 - DNA, 25 bp, Homo sapien
cagatagtaaaagaagggccccagc

SEQ ID NO: 2324284 - DNA, 25 bp, Homo sapien
tgggctgactacctcgatgtcctgg

SEQ ID NO: 2324285 - DNA, 25 bp, Homo sapien
tcctggaatacagctacccctccca

SEQ ID NO: 2324286 - DNA, 25 bp, Homo sapien
tgactacctcgatgtcctggaatac

SEQ ID NO: 2324287 - DNA, 25 bp, Homo sapien
gaggtgggctgactacctcgatgtc

SEQ ID NO: 2324288 - DNA, 25 bp, Homo sapien
ggagatgttgatgcaagccaggaca

SEQ ID NO: 2324289 - DNA, 25 bp, Homo sapien
gagatgttgatgcaagccaggacag

SEQ ID NO: 2324290 - DNA, 25 bp, Homo sapien
gatgtgccatagttgtggaagttcc

SEQ ID NO: 2324291 - DNA, 25 bp, Homo sapien
cggctgatgtgccatagttgtggaa

SEQ ID NO: 2324292 - DNA, 25 bp, Homo sapien
catagttgtggaagttcctgcatct

SEQ ID NO: 2324293 - DNA, 25 bp, Homo sapien
aagtccactcggctgatgtgccata

SEQ ID NO: 2324294 - DNA, 25 bp, Homo sapien
tgggttgcagaacttaagaccagga

SEQ ID NO: 2324295 - DNA, 25 bp, Homo sapien
catactaggagttatgtttgctggg

SEQ ID NO: 2324296 - DNA, 25 bp, Homo sapien
aatgacccgcaccagttgggaagtt

SEQ ID NO: 2324297 - DNA, 25 bp, Homo sapien
ctttcccttgcctgtgagtaaagca

SEQ ID NO: 2324298 - DNA, 25 bp, Homo sapien
cagggttgattcaatgggacacaca

SEQ ID NO: 2324299 - DNA, 25 bp, Homo sapien
ggaaacaacagggttgattcaatgg

SEQ ID NO: 2324300 - DNA, 25 bp, Homo sapien
agagatgatccaggaagaagtggaa

SEQ ID NO: 2324301 - DNA, 25 bp, Homo sapien
cactgctgggtaaagagatccaggg

SEQ ID NO: 2324302 - DNA, 25 bp, Homo sapien
gtggattgcccaaaagaaaagccag

SEQ ID NO: 2324303 - DNA, 25 bp, Homo sapien
ggtggattgcccaaaagaaaagcca

SEQ ID NO: 2324304 - DNA, 25 bp, Homo sapien
cactcagggtcactactgccaccca

SEQ ID NO: 2324305 - DNA, 25 bp, Homo sapien
ggcccaaatccacactcagggtcac

SEQ ID NO: 2324306 - DNA, 25 bp, Homo sapien
acactcagggtcactactgccaccc

SEQ ID NO: 2324307 - DNA, 25 bp, Homo sapien
ccaggcccaaatccacactcagggt

SEQ ID NO: 2324308 - DNA, 25 bp, Homo sapien
tctgagtggtctgtagagctctgtc

SEQ ID NO: 2324309 - DNA, 25 bp, Homo sapien
tgagtggtctgtagagctctgtccc

SEQ ID NO: 2324310 - DNA, 25 bp, Homo sapien
gtggtctgtagagctctgtcccctc

SEQ ID NO: 2324311 - DNA, 25 bp, Homo sapien
tcctctgagtggtctgtagagctct

SEQ ID NO: 2324312 - DNA, 25 bp, Homo sapien
actccaggttgcagcgaaactgccc

SEQ ID NO: 2324313 - DNA, 25 bp, Homo sapien
tacagtggtgttggatagctcagga

SEQ ID NO: 2324314 - DNA, 25 bp, Homo sapien
ccactccaggttgcagcgaaactgc

SEQ ID NO: 2324315 - DNA, 25 bp, Homo sapien
tgcccacgggtcccaaagtacagtg

SEQ ID NO: 2324316 - DNA, 25 bp, Homo sapien
tccacatccctcctaaaccaagctc

SEQ ID NO: 2324317 - DNA, 25 bp, Homo sapien
actccctgaggatccacatccctcc

SEQ ID NO: 2324318 - DNA, 25 bp, Homo sapien
tgaggatccacatccctcctaaacc

SEQ ID NO: 2324319 - DNA, 25 bp, Homo sapien
atccctcctaaaccaagctccttca

SEQ ID NO: 2324320 - DNA, 25 bp, Homo sapien
attgggccatctggctttgaagtct

SEQ ID NO: 2324321 - DNA, 25 bp, Homo sapien
ctgcaaccattgggccatctggctt

SEQ ID NO: 2324322 - DNA, 25 bp, Homo sapien
accattgggccatctggctttgaag

SEQ ID NO: 2324323 - DNA, 25 bp, Homo sapien
caaccattgggccatctggctttga

SEQ ID NO: 2324324 - DNA, 25 bp, Homo sapien
acaccactgaagtctaggaccacca

SEQ ID NO: 2324325 - DNA, 25 bp, Homo sapien
ggtgacaccactgaagtctaggacc

SEQ ID NO: 2324326 - DNA, 25 bp, Homo sapien
gtgacaccactgaagtctaggacca

SEQ ID NO: 2324327 - DNA, 25 bp, Homo sapien
gacaccactgaagtctaggaccacc

SEQ ID NO: 2324328 - DNA, 25 bp, Homo sapien
tcctagcatctcgacatcggctggc

SEQ ID NO: 2324329 - DNA, 25 bp, Homo sapien
caggaggaggcggatcctagcatct

SEQ ID NO: 2324330 - DNA, 25 bp, Homo sapien
gcggatcctagcatctcgacatcgg

SEQ ID NO: 2324331 - DNA, 25 bp, Homo sapien
gaggcggatcctagcatctcgacat

SEQ ID NO: 2324332 - DNA, 25 bp, Homo sapien
cttttccctaccgcaggtgtccagt

SEQ ID NO: 2324333 - DNA, 25 bp, Homo sapien
gggagggtgtcagactctgagaccc

SEQ ID NO: 2324334 - DNA, 25 bp, Homo sapien
tccttttccctaccgcaggtgtcca

SEQ ID NO: 2324335 - DNA, 25 bp, Homo sapien
tgagaccctaagtccacaccgggtc

SEQ ID NO: 2324336 - DNA, 25 bp, Homo sapien
tcctggtgctactgccccttaacag

SEQ ID NO: 2324337 - DNA, 25 bp, Homo sapien
tcctgcacactcacaaacagctgat

SEQ ID NO: 2324338 - DNA, 25 bp, Homo sapien
ccaggagtcctacccgggtcagtgt

SEQ ID NO: 2324339 - DNA, 25 bp, Homo sapien
tgccccttaacaggctccccagggc

SEQ ID NO: 2324340 - DNA, 25 bp, Homo sapien
catgtcaggaatagattaggcaccc

SEQ ID NO: 2324341 - DNA, 25 bp, Homo sapien
taccccacctacttagggatctgag

SEQ ID NO: 2324342 - DNA, 25 bp, Homo sapien
taggcacccctcttccttaatgaaa

SEQ ID NO: 2324343 - DNA, 25 bp, Homo sapien
tcagcccgggctccctgatttggtc

SEQ ID NO: 2324344 - DNA, 25 bp, Homo sapien
gggttcaagggtcatggtcctcatc

SEQ ID NO: 2324345 - DNA, 25 bp, Homo sapien
gggtcatggtcctcatcacacacat

SEQ ID NO: 2324346 - DNA, 25 bp, Homo sapien
gtgcaaatctttgggtcagtgagct

SEQ ID NO: 2324347 - DNA, 25 bp, Homo sapien
catgatgaggtcagacccacacggt

SEQ ID NO: 2324348 - DNA, 25 bp, Homo sapien
tttcagaacctgatgcccagtaggg

SEQ ID NO: 2324349 - DNA, 25 bp, Homo sapien
tccgacgtcgtggtggatcatgcat

SEQ ID NO: 2324350 - DNA, 25 bp, Homo sapien
tgctcagggtccttagaaacaagcc

SEQ ID NO: 2324351 - DNA, 25 bp, Homo sapien
caagagtaagactgagacccaggga

SEQ ID NO: 2324352 - DNA, 25 bp, Homo sapien
gttcagaccacagtcggtgcaaccc

SEQ ID NO: 2324353 - DNA, 25 bp, Homo sapien
accacagtcggtgcaacccatctgg

SEQ ID NO: 2324354 - DNA, 25 bp, Homo sapien
cctagttcagaccacagtcggtgca

SEQ ID NO: 2324355 - DNA, 25 bp, Homo sapien
cccctagttcagaccacagtcggtg

SEQ ID NO: 2324356 - DNA, 25 bp, Homo sapien
gacctcggccatcgagcactaggac

SEQ ID NO: 2324357 - DNA, 25 bp, Homo sapien
gccatcgagcactaggacctgcccc

SEQ ID NO: 2324358 - DNA, 25 bp, Homo sapien
gtgacctcggccatcgagcactagg

SEQ ID NO: 2324359 - DNA, 25 bp, Homo sapien
cggccatcgagcactaggacctgcc

SEQ ID NO: 2324360 - DNA, 25 bp, Homo sapien
tgtcgatgccctcgcagcgcacgat

SEQ ID NO: 2324361 - DNA, 25 bp, Homo sapien
ggctcgcaagctctgccagaagacg

SEQ ID NO: 2324362 - DNA, 25 bp, Homo sapien
tggcggcaggtcctaggcggcctgg

SEQ ID NO: 2324363 - DNA, 25 bp, Homo sapien
tggctgctgtcgtggggcggcccgg

SEQ ID NO: 2324364 - DNA, 25 bp, Homo sapien
accatccgctttttcctctcacggg

SEQ ID NO: 2324365 - DNA, 25 bp, Homo sapien
cccaggtaggcgaactttctcgtag

SEQ ID NO: 2324366 - DNA, 25 bp, Homo sapien
cttgggggcaacaggaagcaccatc

SEQ ID NO: 2324367 - DNA, 25 bp, Homo sapien
tcagccaatctcgtgagccaggtac

SEQ ID NO: 2324368 - DNA, 25 bp, Homo sapien
tccacattcttttcggcctgtctcc

SEQ ID NO: 2324369 - DNA, 25 bp, Homo sapien
ccacattcttttcggcctgtctcca

SEQ ID NO: 2324370 - DNA, 25 bp, Homo sapien
cacattcttttcggcctgtctccat

SEQ ID NO: 2324371 - DNA, 25 bp, Homo sapien
ctttcgttccccttcttatgcagag

SEQ ID NO: 2324372 - DNA, 25 bp, Homo sapien
cttatgcagagaatctgtttccgcc

SEQ ID NO: 2324373 - DNA, 25 bp, Homo sapien
tccccttcttatgcagagaatctgt

SEQ ID NO: 2324374 - DNA, 25 bp, Homo sapien
tcgttccccttcttatgcagagaat

SEQ ID NO: 2324375 - DNA, 25 bp, Homo sapien
gatctcgatcccataacgcatctca

SEQ ID NO: 2324376 - DNA, 25 bp, Homo sapien
acttgcgggtaacaggagtcccaga

SEQ ID NO: 2324377 - DNA, 25 bp, Homo sapien
gacaccgccggtcagacttgcgggt

SEQ ID NO: 2324378 - DNA, 25 bp, Homo sapien
tcccatgacaggcaacggcaggatc

SEQ ID NO: 2324379 - DNA, 25 bp, Homo sapien
acctgaaggttgacagcgggaagcc

SEQ ID NO: 2324380 - DNA, 25 bp, Homo sapien
gatcagtcgaagacagaataagcca

SEQ ID NO: 2324381 - DNA, 25 bp, Homo sapien
cggagtccgggtgtttcgatcataa

SEQ ID NO: 2324382 - DNA, 25 bp, Homo sapien
gaataagccataagccctccagctg

SEQ ID NO: 2324383 - DNA, 25 bp, Homo sapien
ttagaggagacaatcaccacgtccg

SEQ ID NO: 2324384 - DNA, 25 bp, Homo sapien
tctcattgggctcaacaactcaggg

SEQ ID NO: 2324385 - DNA, 25 bp, Homo sapien
tcagcaagcagggagcatctctcat

SEQ ID NO: 2324386 - DNA, 25 bp, Homo sapien
catagcgctgtttgtacttagagga

SEQ ID NO: 2324387 - DNA, 25 bp, Homo sapien
tctccagactttcagtaaggaggga

SEQ ID NO: 2324388 - DNA, 25 bp, Homo sapien
tccttctgtgacttggagagatatc

SEQ ID NO: 2324389 - DNA, 25 bp, Homo sapien
cttggagagatatctctaaagtctg

SEQ ID NO: 2324390 - DNA, 25 bp, Homo sapien
tcatctacttacacactcaattctc

SEQ ID NO: 2324391 - DNA, 25 bp, Homo sapien
tccatgtggtattgctggatgtggc

SEQ ID NO: 2324392 - DNA, 25 bp, Homo sapien
cttccatgtggtattgctggatgtg

SEQ ID NO: 2324393 - DNA, 25 bp, Homo sapien
aattcatatgtccaccagtcctttg

SEQ ID NO: 2324394 - DNA, 25 bp, Homo sapien
gtggcgtccataacagaattcatat

SEQ ID NO: 2324395 - DNA, 25 bp, Homo sapien
tttcatcatcccagtcgaaggctga

SEQ ID NO: 2324396 - DNA, 25 bp, Homo sapien
cagtcgaaggctgattggtagtagc

SEQ ID NO: 2324397 - DNA, 25 bp, Homo sapien
tagtagccgagatagaggacttcac

SEQ ID NO: 2324398 - DNA, 25 bp, Homo sapien
ttggctgtttcatcatcccagtcga

SEQ ID NO: 2324399 - DNA, 25 bp, Homo sapien
gaaacagatcagctaatcttgaccc

SEQ ID NO: 2324400 - DNA, 25 bp, Homo sapien
cactgcgtccccaaagagacaaaag

SEQ ID NO: 2324401 - DNA, 25 bp, Homo sapien
tcttgtcagggctctcagccggtgg

SEQ ID NO: 2324402 - DNA, 25 bp, Homo sapien
gaaactttgtcctaatggccaccaa

SEQ ID NO: 2324403 - DNA, 25 bp, Homo sapien
gctgtggtagcgtttaagacgatgc

SEQ ID NO: 2324404 - DNA, 25 bp, Homo sapien
gggcctcccattaaggtcgcacttg

SEQ ID NO: 2324405 - DNA, 25 bp, Homo sapien
ggtagcgtttaagacgatgctgctt

SEQ ID NO: 2324406 - DNA, 25 bp, Homo sapien
gacccattgccataggtctggctgt

SEQ ID NO: 2324407 - DNA, 25 bp, Homo sapien
gaattgagttggtctactaccctag

SEQ ID NO: 2324408 - DNA, 25 bp, Homo sapien
catgcacgctgttcctattgaggag

SEQ ID NO: 2324409 - DNA, 25 bp, Homo sapien
gatcacctaggcaagtggcataaga

SEQ ID NO: 2324410 - DNA, 25 bp, Homo sapien
tacaccattccagttacgaccctag

SEQ ID NO: 2324411 - DNA, 25 bp, Homo sapien
actggaaccctgtgcactgctacta

SEQ ID NO: 2324412 - DNA, 25 bp, Homo sapien
cataaggcacattctactcctaggt

SEQ ID NO: 2324413 - DNA, 25 bp, Homo sapien
aatagtagtgatggtgatagaacac

SEQ ID NO: 2324414 - DNA, 25 bp, Homo sapien
gacaatggaacatgattaagccata

SEQ ID NO: 2324415 - DNA, 25 bp, Homo sapien
tgtaaaaccaataatgtgaccatgt

SEQ ID NO: 2324416 - DNA, 25 bp, Homo sapien
tgaccatgtaccagcaacaatcaga

SEQ ID NO: 2324417 - DNA, 25 bp, Homo sapien
ctttagtaggccgacggtggatcac

SEQ ID NO: 2324418 - DNA, 25 bp, Homo sapien
ctgagtgtaagatcaatatgtaaaa

SEQ ID NO: 2324419 - DNA, 25 bp, Homo sapien
gcctggccagaattttttaatgtta

SEQ ID NO: 2324420 - DNA, 25 bp, Homo sapien
catgcctggccagaattttttaatg

SEQ ID NO: 2324421 - DNA, 25 bp, Homo sapien
aaaatgctaggattatagggcatga

SEQ ID NO: 2324422 - DNA, 25 bp, Homo sapien
gctaccatgcctggccagaattttt

SEQ ID NO: 2324423 - DNA, 25 bp, Homo sapien
gaacctaattacagatgccacagag

SEQ ID NO: 2324424 - DNA, 25 bp, Homo sapien
gtgactgaccagtaacaaattagtg

SEQ ID NO: 2324425 - DNA, 25 bp, Homo sapien
atacaacagagaagctcaacagagc

SEQ ID NO: 2324426 - DNA, 25 bp, Homo sapien
gtaaaactgactaacctctgatgtg

SEQ ID NO: 2324427 - DNA, 25 bp, Homo sapien
tatttcaaccagtagaataatggtg

SEQ ID NO: 2324428 - DNA, 25 bp, Homo sapien
gacaaaatgatggaacacacaatgg

SEQ ID NO: 2324429 - DNA, 25 bp, Homo sapien
gggtggaactatttcaaccagtaga

SEQ ID NO: 2324430 - DNA, 25 bp, Homo sapien
tagaataatggtgacaaaatgatgg

SEQ ID NO: 2324431 - DNA, 25 bp, Homo sapien
gaaaggatgaatacacttaatcacc

SEQ ID NO: 2324432 - DNA, 25 bp, Homo sapien
ggacagaaaggatgaatacacttaa

SEQ ID NO: 2324433 - DNA, 25 bp, Homo sapien
ggatgaatacacttaatcaccaaca

SEQ ID NO: 2324434 - DNA, 25 bp, Homo sapien
gaatacacttaatcaccaacaataa

SEQ ID NO: 2324435 - DNA, 25 bp, Homo sapien
tacctgcaccctcgtcacagaggaa

SEQ ID NO: 2324436 - DNA, 25 bp, Homo sapien
ccgaggagtgcgaatggtcagcaca

SEQ ID NO: 2324437 - DNA, 25 bp, Homo sapien
taagagcaggacaagggctcgtcca

SEQ ID NO: 2324438 - DNA, 25 bp, Homo sapien
gatcgatgtagtccccagagatacc

SEQ ID NO: 2324439 - DNA, 25 bp, Homo sapien
ttgcctctgaacgtaggccatgtac

SEQ ID NO: 2324440 - DNA, 25 bp, Homo sapien
cctctgaacgtaggccatgtactcc

SEQ ID NO: 2324441 - DNA, 25 bp, Homo sapien
cggcttgcctctgaacgtaggccat

SEQ ID NO: 2324442 - DNA, 25 bp, Homo sapien
gcttgcctctgaacgtaggccatgt

SEQ ID NO: 2324443 - DNA, 25 bp, Homo sapien
acagcatgcaagcaggccaggaaca

SEQ ID NO: 2324444 - DNA, 25 bp, Homo sapien
atacttgatcttttgccaccccctg

SEQ ID NO: 2324445 - DNA, 25 bp, Homo sapien
aaacagcatgcaagcaggccaggaa

SEQ ID NO: 2324446 - DNA, 25 bp, Homo sapien
agaaacagcatgcaagcaggccagg

SEQ ID NO: 2324447 - DNA, 25 bp, Homo sapien
ccaccccagacttggtctcactcca

SEQ ID NO: 2324448 - DNA, 25 bp, Homo sapien
acacttgggggcctagatcttgcag

SEQ ID NO: 2324449 - DNA, 25 bp, Homo sapien
accccagacttggtctcactccaca

SEQ ID NO: 2324450 - DNA, 25 bp, Homo sapien
tgggggcctagatcttgcagctcct

SEQ ID NO: 2324451 - DNA, 25 bp, Homo sapien
ttcacggaacaggtgaaacaaggtc

SEQ ID NO: 2324452 - DNA, 25 bp, Homo sapien
gaggagggcccatggtacttttcca

SEQ ID NO: 2324453 - DNA, 25 bp, Homo sapien
gagcaaataggatggggtcccttcc

SEQ ID NO: 2324454 - DNA, 25 bp, Homo sapien
gaaatggaagtgagtttcacggaac

SEQ ID NO: 2324455 - DNA, 25 bp, Homo sapien
ggtacagagaacagggagagactga

SEQ ID NO: 2324456 - DNA, 25 bp, Homo sapien
gtacagagaacagggagagactgat

SEQ ID NO: 2324457 - DNA, 25 bp, Homo sapien
agggtacagagaacagggagagact

SEQ ID NO: 2324458 - DNA, 25 bp, Homo sapien
ctagggtacagagaacagggagaga

SEQ ID NO: 2324459 - DNA, 25 bp, Homo sapien
gtcctctggctcattaagcatcttc

SEQ ID NO: 2324460 - DNA, 25 bp, Homo sapien
gaaagcctgttcatgccctccatac

SEQ ID NO: 2324461 - DNA, 25 bp, Homo sapien
gatgtaggtcacctcacaatggccc

SEQ ID NO: 2324462 - DNA, 25 bp, Homo sapien
ctccatactatgaaggcaaaggttc

SEQ ID NO: 2324463 - DNA, 25 bp, Homo sapien
ccttgcatccctaggtagatgtagg

SEQ ID NO: 2324464 - DNA, 25 bp, Homo sapien
gagcaccagaagctgaatctgctgc

SEQ ID NO: 2324465 - DNA, 25 bp, Homo sapien
cattgggagcaccagaagctgaatc

SEQ ID NO: 2324466 - DNA, 25 bp, Homo sapien
ttgggagcaccagaagctgaatctg

SEQ ID NO: 2324467 - DNA, 25 bp, Homo sapien
gggagcaccagaagctgaatctgct

SEQ ID NO: 2324468 - DNA, 25 bp, Homo sapien
tccgcagggcttcgaatgactttga

SEQ ID NO: 2324469 - DNA, 25 bp, Homo sapien
tatgaatcgaatcaaatccgcaggg

SEQ ID NO: 2324470 - DNA, 25 bp, Homo sapien
aatgactttgacctgcacgttgttc

SEQ ID NO: 2324471 - DNA, 25 bp, Homo sapien
tcagctcctctatgaatcgaatcaa

SEQ ID NO: 2324472 - DNA, 25 bp, Homo sapien
tctctctgccgttctggatcacccc

SEQ ID NO: 2324473 - DNA, 25 bp, Homo sapien
tgccgttctggatcacccctttcct

SEQ ID NO: 2324474 - DNA, 25 bp, Homo sapien
tctctgccgttctggatcacccctt

SEQ ID NO: 2324475 - DNA, 25 bp, Homo sapien
cgttctggatcacccctttccttct

SEQ ID NO: 2324476 - DNA, 25 bp, Homo sapien
agccggtctcggtctgacggaagca

SEQ ID NO: 2324477 - DNA, 25 bp, Homo sapien
gtctcggtctgacggaagcaggatc

SEQ ID NO: 2324478 - DNA, 25 bp, Homo sapien
tctgacggaagcaggatcccttcca

SEQ ID NO: 2324479 - DNA, 25 bp, Homo sapien
cgaacggagccggtctcggtctgac

SEQ ID NO: 2324480 - DNA, 25 bp, Homo sapien
ccagttcccgctccatgccagcctt

SEQ ID NO: 2324481 - DNA, 25 bp, Homo sapien
tggatgatgttttccagttcccgct

SEQ ID NO: 2324482 - DNA, 25 bp, Homo sapien
ttccagttcccgctccatgccagcc

SEQ ID NO: 2324483 - DNA, 25 bp, Homo sapien
gttcccgctccatgccagccttcac

SEQ ID NO: 2324484 - DNA, 25 bp, Homo sapien
gaagagagtgagtcaagggtctggg

SEQ ID NO: 2324485 - DNA, 25 bp, Homo sapien
ctggaatacccaagagaagagagtg

SEQ ID NO: 2324486 - DNA, 25 bp, Homo sapien
gctctgtaggagagtctgatatttt

SEQ ID NO: 2324487 - DNA, 25 bp, Homo sapien
ggtgtggaggcagccagcgggctgg

SEQ ID NO: 2324488 - DNA, 25 bp, Homo sapien
gcccgatcccgctctgactccttct

SEQ ID NO: 2324489 - DNA, 25 bp, Homo sapien
gtgagagccagcattgcccgatccc

SEQ ID NO: 2324490 - DNA, 25 bp, Homo sapien
tgagagccagcattgcccgatcccg

SEQ ID NO: 2324491 - DNA, 25 bp, Homo sapien
agcattgcccgatcccgctctgact

SEQ ID NO: 2324492 - DNA, 25 bp, Homo sapien
tcttttgatgagtttgttgagagtg

SEQ ID NO: 2324493 - DNA, 25 bp, Homo sapien
tttgatgagtttgttgagagtggat

SEQ ID NO: 2324494 - DNA, 25 bp, Homo sapien
cagtcttttgatgagtttgttgaga

SEQ ID NO: 2324495 - DNA, 25 bp, Homo sapien
ttcctccagtcttttgatgagtttg

SEQ ID NO: 2324496 - DNA, 25 bp, Homo sapien
caaccctctttttcttgtgcttctt

SEQ ID NO: 2324497 - DNA, 25 bp, Homo sapien
gacaaccctctttttcttgtgcttc

SEQ ID NO: 2324498 - DNA, 25 bp, Homo sapien
tgatgggggaggctttttggggaca

SEQ ID NO: 2324499 - DNA, 25 bp, Homo sapien
ccctctttttcttgtgcttcttcac

SEQ ID NO: 2324500 - DNA, 25 bp, Homo sapien
tcaacatgtatatgagccagggctc

SEQ ID NO: 2324501 - DNA, 25 bp, Homo sapien
taggaggtaaacacgcaaagggatg

SEQ ID NO: 2324502 - DNA, 25 bp, Homo sapien
aaagcagaggcgtgactccagggtt

SEQ ID NO: 2324503 - DNA, 25 bp, Homo sapien
taattctgcccgtcacctataggaa

SEQ ID NO: 2324504 - DNA, 25 bp, Homo sapien
gacagtcagatcctgattagggcct

SEQ ID NO: 2324505 - DNA, 25 bp, Homo sapien
ccgtttcatctcgaggacagtcaga

SEQ ID NO: 2324506 - DNA, 25 bp, Homo sapien
tggtgacccggacccggactctgtg

SEQ ID NO: 2324507 - DNA, 25 bp, Homo sapien
ccagcccctcgatttgtttcagctg

SEQ ID NO: 2324508 - DNA, 25 bp, Homo sapien
ctggaaaggagcagtatgcagtgag

SEQ ID NO: 2324509 - DNA, 25 bp, Homo sapien
cctccacttccggcagcttgccctt

SEQ ID NO: 2324510 - DNA, 25 bp, Homo sapien
agaggagaggatggttgggagcctc

SEQ ID NO: 2324511 - DNA, 25 bp, Homo sapien
gcttgcccttccgacagcactgggt

SEQ ID NO: 2324512 - DNA, 25 bp, Homo sapien
caagatattgaagaagatctccttg

SEQ ID NO: 2324513 - DNA, 25 bp, Homo sapien
tccttgaggtttctcgtgtcctcat

SEQ ID NO: 2324514 - DNA, 25 bp, Homo sapien
gtcctcatcagtcagccaacgtgca

SEQ ID NO: 2324515 - DNA, 25 bp, Homo sapien
catgggcggacaattttgatctcaa

SEQ ID NO: 2324516 - DNA, 25 bp, Homo sapien
aggagggctgggggccaggactcgg

SEQ ID NO: 2324517 - DNA, 25 bp, Homo sapien
ctccactccaggagggctgggggcc

SEQ ID NO: 2324518 - DNA, 25 bp, Homo sapien
caggactcgggggtagaagcctctt

SEQ ID NO: 2324519 - DNA, 25 bp, Homo sapien
gccaggactcgggggtagaagcctc

SEQ ID NO: 2324520 - DNA, 25 bp, Homo sapien
tgccgctggcgttccttctgggcct

SEQ ID NO: 2324521 - DNA, 25 bp, Homo sapien
ccagctctttctgccgctggcgttc

SEQ ID NO: 2324522 - DNA, 25 bp, Homo sapien
cagaagtcaaattcgtccaggtccc

SEQ ID NO: 2324523 - DNA, 25 bp, Homo sapien
tcagaagtcaaattcgtccaggtcc

SEQ ID NO: 2324524 - DNA, 25 bp, Homo sapien
tggattccgtgaagggtcaagtgta

SEQ ID NO: 2324525 - DNA, 25 bp, Homo sapien
agtctggattccgtgaagggtcaag

SEQ ID NO: 2324526 - DNA, 25 bp, Homo sapien
tccgtgaagggtcaagtgtagtgtt

SEQ ID NO: 2324527 - DNA, 25 bp, Homo sapien
aagagtctggattccgtgaagggtc

SEQ ID NO: 2324528 - DNA, 25 bp, Homo sapien
gtaggcagcagggaatatcctatca

SEQ ID NO: 2324529 - DNA, 25 bp, Homo sapien
gcaaatatcacaggcccggtgaggt

SEQ ID NO: 2324530 - DNA, 25 bp, Homo sapien
gtgagagttcaggagagcaaatatc

SEQ ID NO: 2324531 - DNA, 25 bp, Homo sapien
acacccacagagttgcccgagaggt

SEQ ID NO: 2324532 - DNA, 25 bp, Homo sapien
ggagaaggaaatcccaaggcaattc

SEQ ID NO: 2324533 - DNA, 25 bp, Homo sapien
gaggtgaaggctcctcaactcagaa

SEQ ID NO: 2324534 - DNA, 25 bp, Homo sapien
aaacgactccaaacatcactaaggg

SEQ ID NO: 2324535 - DNA, 25 bp, Homo sapien
ggaggtgataggcagcattctacca

SEQ ID NO: 2324536 - DNA, 25 bp, Homo sapien
caggccaggctttgtttagctaccc

SEQ ID NO: 2324537 - DNA, 25 bp, Homo sapien
tacccttgggcatactaagaaactg

SEQ ID NO: 2324538 - DNA, 25 bp, Homo sapien
tctggagcatgatatgggagagacc

SEQ ID NO: 2324539 - DNA, 25 bp, Homo sapien
gacccatgcctgcacttggtagtga

SEQ ID NO: 2324540 - DNA, 25 bp, Homo sapien
atagacacatgggagttctgggccc

SEQ ID NO: 2324541 - DNA, 25 bp, Homo sapien
caaaacaacgtaagcatagcatgca

SEQ ID NO: 2324542 - DNA, 25 bp, Homo sapien
gccctcaaggcagtgtctaagctct

SEQ ID NO: 2324543 - DNA, 25 bp, Homo sapien
cactagtccacgttcagcaagagct

SEQ ID NO: 2324544 - DNA, 25 bp, Homo sapien
tggaatgacaaaatatcaagccctc

SEQ ID NO: 2324545 - DNA, 25 bp, Homo sapien
caacaaatcccaacaccaagtaatc

SEQ ID NO: 2324546 - DNA, 25 bp, Homo sapien
caaggtgtcagcaaacctcacaaca

SEQ ID NO: 2324547 - DNA, 25 bp, Homo sapien
tttccagccagtgaaaaatggtcaa

SEQ ID NO: 2324548 - DNA, 25 bp, Homo sapien
caggttgggcacagccatatgttgt

SEQ ID NO: 2324549 - DNA, 25 bp, Homo sapien
aactcagtgtcagctgatgcaggca

SEQ ID NO: 2324550 - DNA, 25 bp, Homo sapien
gcactaggtaccagagtagaacata

SEQ ID NO: 2324551 - DNA, 25 bp, Homo sapien
ctaccatttctcgagggcagctgaa

SEQ ID NO: 2324552 - DNA, 25 bp, Homo sapien
acagttctgggttcatgtagtggag

SEQ ID NO: 2324553 - DNA, 25 bp, Homo sapien
gttccatcatgtacaacagttctgg

SEQ ID NO: 2324554 - DNA, 25 bp, Homo sapien
aggacagtacccatgggcatggagg

SEQ ID NO: 2324555 - DNA, 25 bp, Homo sapien
ccagtcctgggagagttgggatatg

SEQ ID NO: 2324556 - DNA, 25 bp, Homo sapien
tccacactcggattgctctgggtct

SEQ ID NO: 2324557 - DNA, 25 bp, Homo sapien
acactcggattgctctgggtctacc

SEQ ID NO: 2324558 - DNA, 25 bp, Homo sapien
tgtttccacactcggattgctctgg

SEQ ID NO: 2324559 - DNA, 25 bp, Homo sapien
attgtttccacactcggattgctct

SEQ ID NO: 2324560 - DNA, 25 bp, Homo sapien
tcagacgtggcactttgaggcagcc

SEQ ID NO: 2324561 - DNA, 25 bp, Homo sapien
gattcgcgccaagtacgagcagcta

SEQ ID NO: 2324562 - DNA, 25 bp, Homo sapien
gggtccaggccatcgagagtcagat

SEQ ID NO: 2324563 - DNA, 25 bp, Homo sapien
ggaattcaatctgcgtggactgcgg

SEQ ID NO: 2324564 - DNA, 25 bp, Homo sapien
tcatctcgctgaccctggttaagct

SEQ ID NO: 2324565 - DNA, 25 bp, Homo sapien
ggttaagctcgagtcggtgcctccg

SEQ ID NO: 2324566 - DNA, 25 bp, Homo sapien
cgccggtgccagaggctccgagact

SEQ ID NO: 2324567 - DNA, 25 bp, Homo sapien
gaagcggcacgaacgtctcttccac

SEQ ID NO: 2324568 - DNA, 25 bp, Homo sapien
cttgaactccaagacccctagaggg

SEQ ID NO: 2324569 - DNA, 25 bp, Homo sapien
cttatacttggggagtgaaatcctc

SEQ ID NO: 2324570 - DNA, 25 bp, Homo sapien
gctggaggatagagagccttgaact

SEQ ID NO: 2324571 - DNA, 25 bp, Homo sapien
gggacacggagcagacggtttccat

SEQ ID NO: 2324572 - DNA, 25 bp, Homo sapien
caagtgatgacaacacagggaggaa

SEQ ID NO: 2324573 - DNA, 25 bp, Homo sapien
ttccgctctacctccttagtgccat

SEQ ID NO: 2324574 - DNA, 25 bp, Homo sapien
ccattagagcaagtgatgacaacac

SEQ ID NO: 2324575 - DNA, 25 bp, Homo sapien
ctccttagtgccattagagcaagtg

SEQ ID NO: 2324576 - DNA, 25 bp, Homo sapien
tcagttcctcatctaccttcttttc

SEQ ID NO: 2324577 - DNA, 25 bp, Homo sapien
cagttcctcatctaccttcttttct

SEQ ID NO: 2324578 - DNA, 25 bp, Homo sapien
cccaagtcccatcttcattgtctcc

SEQ ID NO: 2324579 - DNA, 25 bp, Homo sapien
agtcccatcttcattgtctccttca

SEQ ID NO: 2324580 - DNA, 25 bp, Homo sapien
atcgaggccagccaaacccaatact

SEQ ID NO: 2324581 - DNA, 25 bp, Homo sapien
tccaggaccccgacagcttctgtct

SEQ ID NO: 2324582 - DNA, 25 bp, Homo sapien
aacccaatactctgcgcctgcaccg

SEQ ID NO: 2324583 - DNA, 25 bp, Homo sapien
ttctgtctctttaaatcgaggccag

SEQ ID NO: 2324584 - DNA, 25 bp, Homo sapien
catgtagaccacgttgagagcgcaa

SEQ ID NO: 2324585 - DNA, 25 bp, Homo sapien
ttggagcaggcaaagccgccacaaa

SEQ ID NO: 2324586 - DNA, 25 bp, Homo sapien
gagcgcaaagcgcattcttggagca

SEQ ID NO: 2324587 - DNA, 25 bp, Homo sapien
tagaccacgttgagagcgcaaagcg

SEQ ID NO: 2324588 - DNA, 25 bp, Homo sapien
gatcatcctatcacttccagtttgg

SEQ ID NO: 2324589 - DNA, 25 bp, Homo sapien
caaggccatacaagaggacttggga

SEQ ID NO: 2324590 - DNA, 25 bp, Homo sapien
tcaacaattctagcatgcggcacag

SEQ ID NO: 2324591 - DNA, 25 bp, Homo sapien
gaatgcaaaagatgaaccctcagga

SEQ ID NO: 2324592 - DNA, 25 bp, Homo sapien
cacagcaatgactccgccgatgatg

SEQ ID NO: 2324593 - DNA, 25 bp, Homo sapien
ctccaatgagcaacaagctcaccag

SEQ ID NO: 2324594 - DNA, 25 bp, Homo sapien
gactccgccgatgatgtggatgctg

SEQ ID NO: 2324595 - DNA, 25 bp, Homo sapien
ccactgcaataaggagaaggaagac

SEQ ID NO: 2324596 - DNA, 25 bp, Homo sapien
gacttggtggtggttgacagcaccc

SEQ ID NO: 2324597 - DNA, 25 bp, Homo sapien
cttggtggtggttgacagcacccac

SEQ ID NO: 2324598 - DNA, 25 bp, Homo sapien
aggacttggtggtggttgacagcac

SEQ ID NO: 2324599 - DNA, 25 bp, Homo sapien
aaagaacagcaggacttggtggtgg

SEQ ID NO: 2324600 - DNA, 25 bp, Homo sapien
ttgcttcggttaatagccagacatg

SEQ ID NO: 2324601 - DNA, 25 bp, Homo sapien
gatgaagaccaaaccaaggatgatc

SEQ ID NO: 2324602 - DNA, 25 bp, Homo sapien
gagcaagagattacaaattggaaga

SEQ ID NO: 2324603 - DNA, 25 bp, Homo sapien
ctgtttgcttcggttaatagccaga

SEQ ID NO: 2324604 - DNA, 25 bp, Homo sapien
gaaattaagtctccctacatcctgt

SEQ ID NO: 2324605 - DNA, 25 bp, Homo sapien
tcctgttatcagttcaagtgcctca

SEQ ID NO: 2324606 - DNA, 25 bp, Homo sapien
tcaaacagaagcataacggtgtgca

SEQ ID NO: 2324607 - DNA, 25 bp, Homo sapien
ggccagaagcagtgcacctaaggat

SEQ ID NO: 2324608 - DNA, 25 bp, Homo sapien
catcccgagtcttgttgctcatgac

SEQ ID NO: 2324609 - DNA, 25 bp, Homo sapien
catgacccaccaagaagcattgatg

SEQ ID NO: 2324610 - DNA, 25 bp, Homo sapien
acagggttgtgaggttgaataagcc

SEQ ID NO: 2324611 - DNA, 25 bp, Homo sapien
tgaataagccacaacaatcaaaact

SEQ ID NO: 2324612 - DNA, 25 bp, Homo sapien
tcccctggctgctgcaccaccccca

SEQ ID NO: 2324613 - DNA, 25 bp, Homo sapien
ctcccctggctgctgcaccaccccc

SEQ ID NO: 2324614 - DNA, 25 bp, Homo sapien
ccctggctgctgcaccacccccaac

SEQ ID NO: 2324615 - DNA, 25 bp, Homo sapien
ctggctgctgcaccacccccaacac

SEQ ID NO: 2324616 - DNA, 25 bp, Homo sapien
atgtggggctctggctcttgcagat

SEQ ID NO: 2324617 - DNA, 25 bp, Homo sapien
ctggcatgtggggctctggctcttg

SEQ ID NO: 2324618 - DNA, 25 bp, Homo sapien
ggcatgtggggctctggctcttgca

SEQ ID NO: 2324619 - DNA, 25 bp, Homo sapien
catgtggggctctggctcttgcaga

SEQ ID NO: 2324620 - DNA, 25 bp, Homo sapien
tttcagggcttcgtctgaatgctta

SEQ ID NO: 2324621 - DNA, 25 bp, Homo sapien
tcagggcttcgtctgaatgcttaag

SEQ ID NO: 2324622 - DNA, 25 bp, Homo sapien
agggcttcgtctgaatgcttaagaa

SEQ ID NO: 2324623 - DNA, 25 bp, Homo sapien
agaagagtccaacaccccctaggat

SEQ ID NO: 2324624 - DNA, 25 bp, Homo sapien
acaaagggagagagataagtatcaa

SEQ ID NO: 2324625 - DNA, 25 bp, Homo sapien
taagtatcaattaattctcagtctc

SEQ ID NO: 2324626 - DNA, 25 bp, Homo sapien
gataagtatcaattaattctcagtc

SEQ ID NO: 2324627 - DNA, 25 bp, Homo sapien
gagataagtatcaattaattctcag

SEQ ID NO: 2324628 - DNA, 25 bp, Homo sapien
gggttggctctaggatccttctgat

SEQ ID NO: 2324629 - DNA, 25 bp, Homo sapien
tctgattccgaaatctcattgctag

SEQ ID NO: 2324630 - DNA, 25 bp, Homo sapien
gaaatctcattgctagccaaacacc

SEQ ID NO: 2324631 - DNA, 25 bp, Homo sapien
tctaggatccttctgattccgaaat

SEQ ID NO: 2324632 - DNA, 25 bp, Homo sapien
cctagatattccctaagggaggaag

SEQ ID NO: 2324633 - DNA, 25 bp, Homo sapien
tccttatagtctggctcccactaaa

SEQ ID NO: 2324634 - DNA, 25 bp, Homo sapien
caaaacggttacagaccctagatat

SEQ ID NO: 2324635 - DNA, 25 bp, Homo sapien
aatatgtcaaggcataaagtcttgc

SEQ ID NO: 2324636 - DNA, 25 bp, Homo sapien
gccattgtgcgatttggaaaaacca

SEQ ID NO: 2324637 - DNA, 25 bp, Homo sapien
gaagcttcccatatcctcttggaga

SEQ ID NO: 2324638 - DNA, 25 bp, Homo sapien
caccagggtatgttgaggtgatcca

SEQ ID NO: 2324639 - DNA, 25 bp, Homo sapien
gatttacccttagagccacaccagg

SEQ ID NO: 2324640 - DNA, 25 bp, Homo sapien
tgactggcctcgagatgtatccctg

SEQ ID NO: 2324641 - DNA, 25 bp, Homo sapien
aactctgaagccgaccagttgggca

SEQ ID NO: 2324642 - DNA, 25 bp, Homo sapien
gaaatagagcagtatgcagggccct

SEQ ID NO: 2324643 - DNA, 25 bp, Homo sapien
tctctgaggctatggagggtcctcc

SEQ ID NO: 2324644 - DNA, 25 bp, Homo sapien
atcgccgttctctcggtcccagtcc

SEQ ID NO: 2324645 - DNA, 25 bp, Homo sapien
ccccatcgccgttctctcggtccca

SEQ ID NO: 2324646 - DNA, 25 bp, Homo sapien
cccctccggctccgggatcaggctt

SEQ ID NO: 2324647 - DNA, 25 bp, Homo sapien
tcggcccgtgcgctcggcggtggca

SEQ ID NO: 2324648 - DNA, 25 bp, Homo sapien
cggggcctgcgacagccgttcactg

SEQ ID NO: 2324649 - DNA, 25 bp, Homo sapien
gggcgcgcgctagagagccgagccg

SEQ ID NO: 2324650 - DNA, 25 bp, Homo sapien
gctccggtgcttgcggggccgagcg

SEQ ID NO: 2324651 - DNA, 25 bp, Homo sapien
gtcttcggggcctgcgacagccgtt

SEQ ID NO: 2324652 - DNA, 25 bp, Homo sapien
gcggggggcagcgtgcaaggggggc

SEQ ID NO: 2324653 - DNA, 25 bp, Homo sapien
agcttcagctcgttcagaaacatgc

SEQ ID NO: 2324654 - DNA, 25 bp, Homo sapien
tcagctcgttcagaaacatgcggag

SEQ ID NO: 2324655 - DNA, 25 bp, Homo sapien
acatgcggagccgagacttgagcat

SEQ ID NO: 2324656 - DNA, 25 bp, Homo sapien
cgttcagaaacatgcggagccgaga

SEQ ID NO: 2324657 - DNA, 25 bp, Homo sapien
actgctgagcgacagggcgtccagc

SEQ ID NO: 2324658 - DNA, 25 bp, Homo sapien
ccgctgtccaggctactgctgagcg

SEQ ID NO: 2324659 - DNA, 25 bp, Homo sapien
tccaggctactgctgagcgacaggg

SEQ ID NO: 2324660 - DNA, 25 bp, Homo sapien
cctggaagcagatccggcactgagg

SEQ ID NO: 2324661 - DNA, 25 bp, Homo sapien
agagaacaggtccccttagcttacg

SEQ ID NO: 2324662 - DNA, 25 bp, Homo sapien
caagagaacaggtccccttagctta

SEQ ID NO: 2324663 - DNA, 25 bp, Homo sapien
ctgcaagagaacaggtccccttagc

SEQ ID NO: 2324664 - DNA, 25 bp, Homo sapien
tgcaagagaacaggtccccttagct

SEQ ID NO: 2324665 - DNA, 25 bp, Homo sapien
ctcaggcctttcacccaagacaggg

SEQ ID NO: 2324666 - DNA, 25 bp, Homo sapien
caagaggctaagtaaggctgcaaca

SEQ ID NO: 2324667 - DNA, 25 bp, Homo sapien
cttcctcttaggatctggagggagg

SEQ ID NO: 2324668 - DNA, 25 bp, Homo sapien
gaaaagaagcttcccttggagatca

SEQ ID NO: 2324669 - DNA, 25 bp, Homo sapien
ccctctcgctgatccagcggatgag

SEQ ID NO: 2324670 - DNA, 25 bp, Homo sapien
tcttggtgctgatcgccaggacctg

SEQ ID NO: 2324671 - DNA, 25 bp, Homo sapien
gatcgccaggacctggtacttgaag

SEQ ID NO: 2324672 - DNA, 25 bp, Homo sapien
gctgatgcgtgcagcgcactgagcc

SEQ ID NO: 2324673 - DNA, 25 bp, Homo sapien
aaggatatacagacacacgggagac

SEQ ID NO: 2324674 - DNA, 25 bp, Homo sapien
ggtccctgagtccaatagctaaaag

SEQ ID NO: 2324675 - DNA, 25 bp, Homo sapien
tgaaataggcttcctggagggtccc

SEQ ID NO: 2324676 - DNA, 25 bp, Homo sapien
tagctaaaaggtcctcgcccaatct

SEQ ID NO: 2324677 - DNA, 25 bp, Homo sapien
cctcagcttcgcgagtagcttacag

SEQ ID NO: 2324678 - DNA, 25 bp, Homo sapien
ctcagcttcgcgagtagcttacagg

SEQ ID NO: 2324679 - DNA, 25 bp, Homo sapien
tcagcttcgcgagtagcttacaggc

SEQ ID NO: 2324680 - DNA, 25 bp, Homo sapien
acgagccaccacgcctggctaattt

SEQ ID NO: 2324681 - DNA, 25 bp, Homo sapien
gattaagagttaatacacaccaaaa

SEQ ID NO: 2324682 - DNA, 25 bp, Homo sapien
gtatctaataagattattgtgaaga

SEQ ID NO: 2324683 - DNA, 25 bp, Homo sapien
aaatcttgactccatcacttactgg

SEQ ID NO: 2324684 - DNA, 25 bp, Homo sapien
tgggcaagtgctctgaaaccaaaac

SEQ ID NO: 2324685 - DNA, 25 bp, Homo sapien
tccctaaaaccttcaggcaggatca

SEQ ID NO: 2324686 - DNA, 25 bp, Homo sapien
ggcaggatcaacatctgtcttctct

SEQ ID NO: 2324687 - DNA, 25 bp, Homo sapien
gaaagggctccaaagagtcccagaa

SEQ ID NO: 2324688 - DNA, 25 bp, Homo sapien
ctagaatgtggcacttgtctgacac

SEQ ID NO: 2324689 - DNA, 25 bp, Homo sapien
cagatcctgtcgttgccacttggct

SEQ ID NO: 2324690 - DNA, 25 bp, Homo sapien
tatgcagacgacatccatgaagcca

SEQ ID NO: 2324691 - DNA, 25 bp, Homo sapien
catgccgtagcagatctgaaagagc

SEQ ID NO: 2324692 - DNA, 25 bp, Homo sapien
gaagagcgagcccagaactatggca

SEQ ID NO: 2324693 - DNA, 25 bp, Homo sapien
gggcaccaggatagcactaaaggct

SEQ ID NO: 2324694 - DNA, 25 bp, Homo sapien
aggaagatacagagcaggtaaagga

SEQ ID NO: 2324695 - DNA, 25 bp, Homo sapien
gaaatccagggttaactgtggccta

SEQ ID NO: 2324696 - DNA, 25 bp, Homo sapien
taggccagaggtacttaagcaagca

SEQ ID NO: 2324697 - DNA, 25 bp, Homo sapien
tgcctgccagcgcttgaagatgcgg

SEQ ID NO: 2324698 - DNA, 25 bp, Homo sapien
cactgcctgccagcgcttgaagatg

SEQ ID NO: 2324699 - DNA, 25 bp, Homo sapien
cctgccagcgcttgaagatgcggta

SEQ ID NO: 2324700 - DNA, 25 bp, Homo sapien
ttgaagatgcggtagacagaggagc

SEQ ID NO: 2324701 - DNA, 25 bp, Homo sapien
tgaggcaagagcgtccgcatgcgct

SEQ ID NO: 2324702 - DNA, 25 bp, Homo sapien
tcatgacaacctctcggccagaatg

SEQ ID NO: 2324703 - DNA, 25 bp, Homo sapien
ggtgcaagattgtataaccgcagcg

SEQ ID NO: 2324704 - DNA, 25 bp, Homo sapien
cagactgtagtgaccctcatgacaa

SEQ ID NO: 2324705 - DNA, 25 bp, Homo sapien
ggagtctccacgtgcatataaatga

SEQ ID NO: 2324706 - DNA, 25 bp, Homo sapien
taccctttagatacctcggagtgct

SEQ ID NO: 2324707 - DNA, 25 bp, Homo sapien
tgccagcgggtactgaaatgtcatc

SEQ ID NO: 2324708 - DNA, 25 bp, Homo sapien
ccattaataccactggctgggcaca

SEQ ID NO: 2324709 - DNA, 25 bp, Homo sapien
ctcctttctccttgtgagatctctc

SEQ ID NO: 2324710 - DNA, 25 bp, Homo sapien
tttctccttgtgagatctctcctca

SEQ ID NO: 2324711 - DNA, 25 bp, Homo sapien
ctccttgtgagatctctcctcagct

SEQ ID NO: 2324712 - DNA, 25 bp, Homo sapien
tcctttctccttgtgagatctctcc

SEQ ID NO: 2324713 - DNA, 25 bp, Homo sapien
gaagaatacaagatcccgtcctcca

SEQ ID NO: 2324714 - DNA, 25 bp, Homo sapien
tactctaccttagctggacctcgtc

SEQ ID NO: 2324715 - DNA, 25 bp, Homo sapien
cctggtcactgactgcttactctac

SEQ ID NO: 2324716 - DNA, 25 bp, Homo sapien
gaacccactggtgttcatgactacc

SEQ ID NO: 2324717 - DNA, 25 bp, Homo sapien
tccaatagccctgtgaagccagagg

SEQ ID NO: 2324718 - DNA, 25 bp, Homo sapien
ttcgctccactcactcaaaatcaga

SEQ ID NO: 2324719 - DNA, 25 bp, Homo sapien
actggtctgagctatacccagagtt

SEQ ID NO: 2324720 - DNA, 25 bp, Homo sapien
tgagctatacccagagttcttcgct

SEQ ID NO: 2324721 - DNA, 25 bp, Homo sapien
aaccaggatggtaacccagaccagg

SEQ ID NO: 2324722 - DNA, 25 bp, Homo sapien
cctgcaaccaggatggtaacccaga

SEQ ID NO: 2324723 - DNA, 25 bp, Homo sapien
ctcccagttggaggctaacggtgcg

SEQ ID NO: 2324724 - DNA, 25 bp, Homo sapien
tcgccctcccagttggaggctaacg

SEQ ID NO: 2324725 - DNA, 25 bp, Homo sapien
gtgtccctgtggaacgagccccgcc

SEQ ID NO: 2324726 - DNA, 25 bp, Homo sapien
ccgcgagccgtcgtggtgtccctgt

SEQ ID NO: 2324727 - DNA, 25 bp, Homo sapien
gctcagatcccggatccggagcggg

SEQ ID NO: 2324728 - DNA, 25 bp, Homo sapien
ggcgctcagatcccggatccggagc

SEQ ID NO: 2324729 - DNA, 25 bp, Homo sapien
gcgggaacaccgattccgactcaga

SEQ ID NO: 2324730 - DNA, 25 bp, Homo sapien
ccgactcagattcgggatctgggcc

SEQ ID NO: 2324731 - DNA, 25 bp, Homo sapien
taagagtctgcaaagagcccgacct

SEQ ID NO: 2324732 - DNA, 25 bp, Homo sapien
acccaaagttctgcgtgatggtcag

SEQ ID NO: 2324733 - DNA, 25 bp, Homo sapien
ctcgaaataattgcacaggctcagg

SEQ ID NO: 2324734 - DNA, 25 bp, Homo sapien
tcggaaatccacattttgactctcg

SEQ ID NO: 2324735 - DNA, 25 bp, Homo sapien
gaaatccacattttgactctcgaaa

SEQ ID NO: 2324736 - DNA, 25 bp, Homo sapien
ttttgactctcgaaataattgcaca

SEQ ID NO: 2324737 - DNA, 25 bp, Homo sapien
cgctgccaagatccccacgatgcct

SEQ ID NO: 2324738 - DNA, 25 bp, Homo sapien
gcgctgccaagatccccacgatgcc

SEQ ID NO: 2324739 - DNA, 25 bp, Homo sapien
gatccccacgatgcctgtccccgca

SEQ ID NO: 2324740 - DNA, 25 bp, Homo sapien
caagatccccacgatgcctgtcccc

SEQ ID NO: 2324741 - DNA, 25 bp, Homo sapien
aagatccacgaagtgaccatttctc

SEQ ID NO: 2324742 - DNA, 25 bp, Homo sapien
accctaggtgctttgacaggcaatt

SEQ ID NO: 2324743 - DNA, 25 bp, Homo sapien
tttgacaggcaattcgcgctgtctg

SEQ ID NO: 2324744 - DNA, 25 bp, Homo sapien
gaagcagacgccaaaataaaaacaa

SEQ ID NO: 2324745 - DNA, 25 bp, Homo sapien
gagttcttgttctatgacatcgtcc

SEQ ID NO: 2324746 - DNA, 25 bp, Homo sapien
ttctatgacatcgtcctctgtctcc

SEQ ID NO: 2324747 - DNA, 25 bp, Homo sapien
tgttctatgacatcgtcctctgtct

SEQ ID NO: 2324748 - DNA, 25 bp, Homo sapien
tcttgttctatgacatcgtcctctg

SEQ ID NO: 2324749 - DNA, 25 bp, Homo sapien
gacagagcttcccttgatggattcc

SEQ ID NO: 2324750 - DNA, 25 bp, Homo sapien
acagagcttcccttgatggattccc

SEQ ID NO: 2324751 - DNA, 25 bp, Homo sapien
aaagatcactctgaccactaggtgg

SEQ ID NO: 2324752 - DNA, 25 bp, Homo sapien
caagtgtggctgttgtagtagtcca

SEQ ID NO: 2324753 - DNA, 25 bp, Homo sapien
gcagaggtctaggtgaggacaagga

SEQ ID NO: 2324754 - DNA, 25 bp, Homo sapien
tccaggcaagtgatcgtggtggttt

SEQ ID NO: 2324755 - DNA, 25 bp, Homo sapien
agggcatagaggacaaagtcttggc

SEQ ID NO: 2324756 - DNA, 25 bp, Homo sapien
cattctagaggtagagacacactag

SEQ ID NO: 2324757 - DNA, 25 bp, Homo sapien
gacacactaggtactgcatcataat

SEQ ID NO: 2324758 - DNA, 25 bp, Homo sapien
gcaagaagtactaggaatccattca

SEQ ID NO: 2324759 - DNA, 25 bp, Homo sapien
tttggagaaccttctaagtgctggg

SEQ ID NO: 2324760 - DNA, 25 bp, Homo sapien
aatgcaagtcagaggaaccaaccaa

SEQ ID NO: 2324761 - DNA, 25 bp, Homo sapien
accaagggttcttggctcctgcctg

SEQ ID NO: 2324762 - DNA, 25 bp, Homo sapien
cagagcatagaggacaatgtcttga

SEQ ID NO: 2324763 - DNA, 25 bp, Homo sapien
tagaggacaatgtcttgacagccca

SEQ ID NO: 2324764 - DNA, 25 bp, Homo sapien
ttggaggccagatagatggtgccat

SEQ ID NO: 2324765 - DNA, 25 bp, Homo sapien
tgagccagctccagttggaaatgct

SEQ ID NO: 2324766 - DNA, 25 bp, Homo sapien
tgggttccaggtacacgatatcagc

SEQ ID NO: 2324767 - DNA, 25 bp, Homo sapien
cagctggcacattggcctggacgtt

SEQ ID NO: 2324768 - DNA, 25 bp, Homo sapien
cagactaagtaccaagcagaggagc

SEQ ID NO: 2324769 - DNA, 25 bp, Homo sapien
cgtgatcaaggctctaactctggaa

SEQ ID NO: 2324770 - DNA, 25 bp, Homo sapien
taagcagtaagtaaagagagcccca

SEQ ID NO: 2324771 - DNA, 25 bp, Homo sapien
tttagacaggagtaaaccacagccc

SEQ ID NO: 2324772 - DNA, 25 bp, Homo sapien
tgtgtggttggtgaatgggttcgag

SEQ ID NO: 2324773 - DNA, 25 bp, Homo sapien
tccaaggtcacctaggaaggcaggg

SEQ ID NO: 2324774 - DNA, 25 bp, Homo sapien
ttttcaatgcgcatttatattcatt

SEQ ID NO: 2324775 - DNA, 25 bp, Homo sapien
tccatttatgactcacaacaaactt

SEQ ID NO: 2324776 - DNA, 25 bp, Homo sapien
tctagccgcgataaacaccctccgg

SEQ ID NO: 2324777 - DNA, 25 bp, Homo sapien
tctctagccgcgataaacaccctcc

SEQ ID NO: 2324778 - DNA, 25 bp, Homo sapien
ctctagccgcgataaacaccctccg

SEQ ID NO: 2324779 - DNA, 25 bp, Homo sapien
ctctctagccgcgataaacaccctc

SEQ ID NO: 2324780 - DNA, 25 bp, Homo sapien
tcccggtccgcgcgaccagaaacac

SEQ ID NO: 2324781 - DNA, 25 bp, Homo sapien
gaaacacgcgcagcgaccgcagcag

SEQ ID NO: 2324782 - DNA, 25 bp, Homo sapien
ctcccggtccgcgcgaccagaaaca

SEQ ID NO: 2324783 - DNA, 25 bp, Homo sapien
accagaaacacgcgcagcgaccgca

SEQ ID NO: 2324784 - DNA, 25 bp, Homo sapien
agggacagcaggtcggtaccagcac

SEQ ID NO: 2324785 - DNA, 25 bp, Homo sapien
gacagcaggtcggtaccagcaccag

SEQ ID NO: 2324786 - DNA, 25 bp, Homo sapien
cagggacagcaggtcggtaccagca

SEQ ID NO: 2324787 - DNA, 25 bp, Homo sapien
gcaggtcggtaccagcaccaggact

SEQ ID NO: 2324788 - DNA, 25 bp, Homo sapien
gagtagcctgttttccgccgcagct

SEQ ID NO: 2324789 - DNA, 25 bp, Homo sapien
gacggggcccagcataaaatgtgtg

SEQ ID NO: 2324790 - DNA, 25 bp, Homo sapien
gggcgactgacgcagaagagaccca

SEQ ID NO: 2324791 - DNA, 25 bp, Homo sapien
gagctttcttgcaatttacaaagga

SEQ ID NO: 2324792 - DNA, 25 bp, Homo sapien
cctgggccacagagcaagactccgt

SEQ ID NO: 2324793 - DNA, 25 bp, Homo sapien
cattgcacgccggcctgggccacag

SEQ ID NO: 2324794 - DNA, 25 bp, Homo sapien
attgcacgccggcctgggccacaga

SEQ ID NO: 2324795 - DNA, 25 bp, Homo sapien
cggcctgggccacagagcaagactc

SEQ ID NO: 2324796 - DNA, 25 bp, Homo sapien
caattccatatagcccaggttgtag

SEQ ID NO: 2324797 - DNA, 25 bp, Homo sapien
taagccaaaatctcctaacgacgcc

SEQ ID NO: 2324798 - DNA, 25 bp, Homo sapien
ttcctattaagagacgcatgaccgt

SEQ ID NO: 2324799 - DNA, 25 bp, Homo sapien
gcctaggagcagctggcaattccat

SEQ ID NO: 2324800 - DNA, 25 bp, Homo sapien
ctctactaatacagttgtgtttcct

SEQ ID NO: 2324801 - DNA, 25 bp, Homo sapien
cctgcaacagcccaatcaggccttc

SEQ ID NO: 2324802 - DNA, 25 bp, Homo sapien
ccaagggctacttgctggaccaaca

SEQ ID NO: 2324803 - DNA, 25 bp, Homo sapien
tgatcctttagggtctgacaatgca

SEQ ID NO: 2324804 - DNA, 25 bp, Homo sapien
tatgcagagggttgatcctttaggg

SEQ ID NO: 2324805 - DNA, 25 bp, Homo sapien
gacaatgcatcatggttccaagggc

SEQ ID NO: 2324806 - DNA, 25 bp, Homo sapien
gctggaagtccagaaagctcagagg

SEQ ID NO: 2324807 - DNA, 25 bp, Homo sapien
gctaaagccaactgatccttgagtg

SEQ ID NO: 2324808 - DNA, 25 bp, Homo sapien
aattgctaaagccaactgatccttg

SEQ ID NO: 2324809 - DNA, 25 bp, Homo sapien
agctggaagtccagaaagctcagag

SEQ ID NO: 2324810 - DNA, 25 bp, Homo sapien
cacaccaacaaattgtgatgtctgt

SEQ ID NO: 2324811 - DNA, 25 bp, Homo sapien
cataggatatgcagtaagatgaaga

SEQ ID NO: 2324812 - DNA, 25 bp, Homo sapien
tccctttgcatttacataggatatg

SEQ ID NO: 2324813 - DNA, 25 bp, Homo sapien
tgtgatgtctgtgatggtaccaaaa

SEQ ID NO: 2324814 - DNA, 25 bp, Homo sapien
acatactgccccaaggtaatggagg

SEQ ID NO: 2324815 - DNA, 25 bp, Homo sapien
cattgctccgtggacataagagcca

SEQ ID NO: 2324816 - DNA, 25 bp, Homo sapien
taagagccaacgtagaacccagatg

SEQ ID NO: 2324817 - DNA, 25 bp, Homo sapien
atcgtccagggagccaacagagagg

SEQ ID NO: 2324818 - DNA, 25 bp, Homo sapien
gtccagagctaaaagtaaatattcc

SEQ ID NO: 2324819 - DNA, 25 bp, Homo sapien
ctgaagaggtttgggaaatattcct

SEQ ID NO: 2324820 - DNA, 25 bp, Homo sapien
ttcctcctgggccaaaagtctctgg

SEQ ID NO: 2324821 - DNA, 25 bp, Homo sapien
taattttacccatgcattctcggtc

SEQ ID NO: 2324822 - DNA, 25 bp, Homo sapien
aaaatctgccttacagctggccagg

SEQ ID NO: 2324823 - DNA, 25 bp, Homo sapien
tatcacgtcaataaggcccacctgt

SEQ ID NO: 2324824 - DNA, 25 bp, Homo sapien
tccgaggcagaagcacggttcacag

SEQ ID NO: 2324825 - DNA, 25 bp, Homo sapien
tataactagggaggttccgaggcag

SEQ ID NO: 2324826 - DNA, 25 bp, Homo sapien
tttgtgtagtatccccaccctagaa

SEQ ID NO: 2324827 - DNA, 25 bp, Homo sapien
catgagaaagactcccacagtaagg

SEQ ID NO: 2324828 - DNA, 25 bp, Homo sapien
tgacctgaaccctactgacgtgatg

SEQ ID NO: 2324829 - DNA, 25 bp, Homo sapien
gacgtgatgctcctagatacctggg

SEQ ID NO: 2324830 - DNA, 25 bp, Homo sapien
tgatggcagcgagaacactgtggcc

SEQ ID NO: 2324831 - DNA, 25 bp, Homo sapien
gctgatcctggcacactgagttatt

SEQ ID NO: 2324832 - DNA, 25 bp, Homo sapien
gggaaaactccctatgccaatgata

SEQ ID NO: 2324833 - DNA, 25 bp, Homo sapien
tgaatgttccaataagaccggccaa

SEQ ID NO: 2324834 - DNA, 25 bp, Homo sapien
tttagtgtggcctagcccctctcag

SEQ ID NO: 2324835 - DNA, 25 bp, Homo sapien
gaacatggagtaaacgtcagcacct

SEQ ID NO: 2324836 - DNA, 25 bp, Homo sapien
tatctggtcctctacacatacgagg

SEQ ID NO: 2324837 - DNA, 25 bp, Homo sapien
cacgcctcacaggatgagctggcag

SEQ ID NO: 2324838 - DNA, 25 bp, Homo sapien
caggatggcccagttcatctcacga

SEQ ID NO: 2324839 - DNA, 25 bp, Homo sapien
ttcagggtagtgaaaggcacatcct

SEQ ID NO: 2324840 - DNA, 25 bp, Homo sapien
tgcaaagaccgagccatgatgggat

SEQ ID NO: 2324841 - DNA, 25 bp, Homo sapien
catgcaaatgtgatgagtcctcagc

SEQ ID NO: 2324842 - DNA, 25 bp, Homo sapien
tcatcaagatgaagagctaccccag

SEQ ID NO: 2324843 - DNA, 25 bp, Homo sapien
gcaccaatgtggagaccgtcaacga

SEQ ID NO: 2324844 - DNA, 25 bp, Homo sapien
tgagtcggccatgttcaagcagctg

SEQ ID NO: 2324845 - DNA, 25 bp, Homo sapien
gagacgcttatatcatgtggcttca

SEQ ID NO: 2324846 - DNA, 25 bp, Homo sapien
cacaggtttcccacaatagtgcgag

SEQ ID NO: 2324847 - DNA, 25 bp, Homo sapien
gaccgctggcactctccaaatgtta

SEQ ID NO: 2324848 - DNA, 25 bp, Homo sapien
tacatgcagtgataaatcagggccc

SEQ ID NO: 2324849 - DNA, 25 bp, Homo sapien
tacatcaaggctgtgtgaacagtcc

SEQ ID NO: 2324850 - DNA, 25 bp, Homo sapien
caaaactgtggcctaataaaattct

SEQ ID NO: 2324851 - DNA, 25 bp, Homo sapien
aatattgattggtttactgtatgac

SEQ ID NO: 2324852 - DNA, 25 bp, Homo sapien
tactgtatgactagtagagacccca

SEQ ID NO: 2324853 - DNA, 25 bp, Homo sapien
tagagaccccaacgagcaaaactgt

SEQ ID NO: 2324854 - DNA, 25 bp, Homo sapien
taacagtggcccagacgctgctttg

SEQ ID NO: 2324855 - DNA, 25 bp, Homo sapien
tttgggaggcaataggccaccatgc

SEQ ID NO: 2324856 - DNA, 25 bp, Homo sapien
actgggctatgggattctgactacc

SEQ ID NO: 2324857 - DNA, 25 bp, Homo sapien
cccatgggtcccttactagagaggt

SEQ ID NO: 2324858 - DNA, 25 bp, Homo sapien
tgctgcatctgcatgaagcccctgc

SEQ ID NO: 2324859 - DNA, 25 bp, Homo sapien
caggatggcttggtgggagtgtccc

SEQ ID NO: 2324860 - DNA, 25 bp, Homo sapien
tttcctaacagacttgtccaagtgc

SEQ ID NO: 2324861 - DNA, 25 bp, Homo sapien
tgcttggcgtgggacccatgaccaa

SEQ ID NO: 2324862 - DNA, 25 bp, Homo sapien
cagttcaggcctactctaggaggga

SEQ ID NO: 2324863 - DNA, 25 bp, Homo sapien
taaaatgagggagcactacctgccc

SEQ ID NO: 2324864 - DNA, 25 bp, Homo sapien
gaagttaagttgtggctgcctagaa

SEQ ID NO: 2324865 - DNA, 25 bp, Homo sapien
gaacagagggttcctgcagagctct

SEQ ID NO: 2324866 - DNA, 25 bp, Homo sapien
caaattttgttgtggacttgggaga

SEQ ID NO: 2324867 - DNA, 25 bp, Homo sapien
agagctctcaggcacctttccctca

SEQ ID NO: 2324868 - DNA, 25 bp, Homo sapien
tctcaagtgaaacagtcttacttgc

SEQ ID NO: 2324869 - DNA, 25 bp, Homo sapien
ggagacagcgatttttgtctcaagt

SEQ ID NO: 2324870 - DNA, 25 bp, Homo sapien
cctggcactttagggcatgtccata

SEQ ID NO: 2324871 - DNA, 25 bp, Homo sapien
gggagtcccagtcaaatgtgtcttg

SEQ ID NO: 2324872 - DNA, 25 bp, Homo sapien
caagaagggccggaaatgctccaaa

SEQ ID NO: 2324873 - DNA, 25 bp, Homo sapien
catagccaaggaacagatgcccctt

SEQ ID NO: 2324874 - DNA, 25 bp, Homo sapien
gcagttgacttgcagagctttccac

SEQ ID NO: 2324875 - DNA, 25 bp, Homo sapien
gaagtcacatttctagccaacgtga

SEQ ID NO: 2324876 - DNA, 25 bp, Homo sapien
tgtgaaaaatccctcggaggatggc

SEQ ID NO: 2324877 - DNA, 25 bp, Homo sapien
gccaacgtgaattgatgctcccaac

SEQ ID NO: 2324878 - DNA, 25 bp, Homo sapien
gcgctgataaatcagcaacaaagtt

SEQ ID NO: 2324879 - DNA, 25 bp, Homo sapien
cacacgccttttggaggaatcagag

SEQ ID NO: 2324880 - DNA, 25 bp, Homo sapien
ccatctttgggtaagggttgcagcc

SEQ ID NO: 2324881 - DNA, 25 bp, Homo sapien
gctgtaacctcccaacgtgaaatga

SEQ ID NO: 2324882 - DNA, 25 bp, Homo sapien
agattgtcaccccattgctaagagg

SEQ ID NO: 2324883 - DNA, 25 bp, Homo sapien
tgggtggctatttagtgaagttact

SEQ ID NO: 2324884 - DNA, 25 bp, Homo sapien
gaaacaaattgctcctagcttgggt

SEQ ID NO: 2324885 - DNA, 25 bp, Homo sapien
aaattgctcctagcttgggtggcta

SEQ ID NO: 2324886 - DNA, 25 bp, Homo sapien
cctagcttgggtggctatttagtga

SEQ ID NO: 2324887 - DNA, 25 bp, Homo sapien
gatgttttaattggctccttttgga

SEQ ID NO: 2324888 - DNA, 25 bp, Homo sapien
cgtcctctccacaacatcccatctc

SEQ ID NO: 2324889 - DNA, 25 bp, Homo sapien
ggggaagcagatgttttaattggct

SEQ ID NO: 2324890 - DNA, 25 bp, Homo sapien
ctctccacaacatcccatctccatg

SEQ ID NO: 2324891 - DNA, 25 bp, Homo sapien
tagatcttggcctaaactaagtggc

SEQ ID NO: 2324892 - DNA, 25 bp, Homo sapien
caggctcgacagagggtacccagtt

SEQ ID NO: 2324893 - DNA, 25 bp, Homo sapien
cccagccagtgtcttcgagtaggat

SEQ ID NO: 2324894 - DNA, 25 bp, Homo sapien
taggcccaaagtacagctctcagag

SEQ ID NO: 2324895 - DNA, 25 bp, Homo sapien
ttctctaaagaaccccatggacttc

SEQ ID NO: 2324896 - DNA, 25 bp, Homo sapien
agcaggaatcccttaagagcattct

SEQ ID NO: 2324897 - DNA, 25 bp, Homo sapien
gatccagatttataccaggtgctac

SEQ ID NO: 2324898 - DNA, 25 bp, Homo sapien
caggtgcaggccttgggatccagat

SEQ ID NO: 2324899 - DNA, 25 bp, Homo sapien
gctcccctcgcctgtcattgctgaa

SEQ ID NO: 2324900 - DNA, 25 bp, Homo sapien
tggtgaacgagccagagatgactcc

SEQ ID NO: 2324901 - DNA, 25 bp, Homo sapien
gaatggagccagcttgttgcttgct

SEQ ID NO: 2324902 - DNA, 25 bp, Homo sapien
ggatgctgctgggtcgcgtggccag

SEQ ID NO: 2324903 - DNA, 25 bp, Homo sapien
atcaacttcggagagcaccagggat

SEQ ID NO: 2324904 - DNA, 25 bp, Homo sapien
agctggggggtattctccggatcaa

SEQ ID NO: 2324905 - DNA, 25 bp, Homo sapien
tgcttcattaccagctggggggtat

SEQ ID NO: 2324906 - DNA, 25 bp, Homo sapien
gggtattctccggatcaacttcgga

SEQ ID NO: 2324907 - DNA, 25 bp, Homo sapien
tagcacagcctggaatgtatgagcc

SEQ ID NO: 2324908 - DNA, 25 bp, Homo sapien
acagcctggaatgtatgagccacca

SEQ ID NO: 2324909 - DNA, 25 bp, Homo sapien
gaaccgctagcacagcctggaatgt

SEQ ID NO: 2324910 - DNA, 25 bp, Homo sapien
tggccgaaccgctagcacagcctgg

SEQ ID NO: 2324911 - DNA, 25 bp, Homo sapien
ggtgctgagcaatcactgtggctga

SEQ ID NO: 2324912 - DNA, 25 bp, Homo sapien
ggggtgctgagcaatcactgtggct

SEQ ID NO: 2324913 - DNA, 25 bp, Homo sapien
caggggtaggggtgctgagcaatca

SEQ ID NO: 2324914 - DNA, 25 bp, Homo sapien
gtaggggtgctgagcaatcactgtg

SEQ ID NO: 2324915 - DNA, 25 bp, Homo sapien
gaccccacccatgtggctgtagact

SEQ ID NO: 2324916 - DNA, 25 bp, Homo sapien
ctgaccccacccatgtggctgtaga

SEQ ID NO: 2324917 - DNA, 25 bp, Homo sapien
tgaccccacccatgtggctgtagac

SEQ ID NO: 2324918 - DNA, 25 bp, Homo sapien
accccacccatgtggctgtagactt

SEQ ID NO: 2324919 - DNA, 25 bp, Homo sapien
accttaccacaatacaaacaataat

SEQ ID NO: 2324920 - DNA, 25 bp, Homo sapien
tataccttaccacaatacaaacaat

SEQ ID NO: 2324921 - DNA, 25 bp, Homo sapien
atgtccagccaaaatggtacatttt

SEQ ID NO: 2324922 - DNA, 25 bp, Homo sapien
gtataccttaccacaatacaaacaa

SEQ ID NO: 2324923 - DNA, 25 bp, Homo sapien
gtgttgcagggacttcctcattacc

SEQ ID NO: 2324924 - DNA, 25 bp, Homo sapien
aggctgtctaactggcgtgcctgcc

SEQ ID NO: 2324925 - DNA, 25 bp, Homo sapien
tgccttgtccaagtgttgccaaagg

SEQ ID NO: 2324926 - DNA, 25 bp, Homo sapien
tctggaaatcttggaggcactgagc

SEQ ID NO: 2324927 - DNA, 25 bp, Homo sapien
atcagttcatcacggacactgtgtc

SEQ ID NO: 2324928 - DNA, 25 bp, Homo sapien
gatctggaccgctgaggtttttaaa

SEQ ID NO: 2324929 - DNA, 25 bp, Homo sapien
caatgagcgaattagtgaaatcagt

SEQ ID NO: 2324930 - DNA, 25 bp, Homo sapien
agaagccagatctggaccgctgagg

SEQ ID NO: 2324931 - DNA, 25 bp, Homo sapien
cagattcctgattattccataaatc

SEQ ID NO: 2324932 - DNA, 25 bp, Homo sapien
agtaggcagattcctgattattcca

SEQ ID NO: 2324933 - DNA, 25 bp, Homo sapien
ggcagattcctgattattccataaa

SEQ ID NO: 2324934 - DNA, 25 bp, Homo sapien
gtaggcagattcctgattattccat

SEQ ID NO: 2324935 - DNA, 25 bp, Homo sapien
ccgcctgtggctggagtaaaatata

SEQ ID NO: 2324936 - DNA, 25 bp, Homo sapien
ggttcaagttcgtcagagagcatgt

SEQ ID NO: 2324937 - DNA, 25 bp, Homo sapien
gtaaaatatacggagcccatcccag

SEQ ID NO: 2324938 - DNA, 25 bp, Homo sapien
ggtcatctcactcatccgcctgtgg

SEQ ID NO: 2324939 - DNA, 25 bp, Homo sapien
taagaaataatctggttggcaaagg

SEQ ID NO: 2324940 - DNA, 25 bp, Homo sapien
aatcagccatttctagagctgaggg

SEQ ID NO: 2324941 - DNA, 25 bp, Homo sapien
ggcaaagggcgtcatgaaaatcagc

SEQ ID NO: 2324942 - DNA, 25 bp, Homo sapien
cactggcgtctgtgtcccagaacac

SEQ ID NO: 2324943 - DNA, 25 bp, Homo sapien
ggcgcggcagtttggtccccacgct

SEQ ID NO: 2324944 - DNA, 25 bp, Homo sapien
tcttccttgcggacctcagacgcgg

SEQ ID NO: 2324945 - DNA, 25 bp, Homo sapien
tatataagcgggaaaatcatgtgat

SEQ ID NO: 2324946 - DNA, 25 bp, Homo sapien
gactgggtcggctgctaccctcagg

SEQ ID NO: 2324947 - DNA, 25 bp, Homo sapien
caggtagagggggccattctgacat

SEQ ID NO: 2324948 - DNA, 25 bp, Homo sapien
tagagggggccattctgacatctgt

SEQ ID NO: 2324949 - DNA, 25 bp, Homo sapien
ctcaggtagagggggccattctgac

SEQ ID NO: 2324950 - DNA, 25 bp, Homo sapien
ggtagagggggccattctgacatct

SEQ ID NO: 2324951 - DNA, 25 bp, Homo sapien
ccttggccacttcaccaattaccca

SEQ ID NO: 2324952 - DNA, 25 bp, Homo sapien
cctacccttggccacttcaccaatt

SEQ ID NO: 2324953 - DNA, 25 bp, Homo sapien
caccaattacccactggtacttcaa

SEQ ID NO: 2324954 - DNA, 25 bp, Homo sapien
tgcactcctcctacccttggccact

SEQ ID NO: 2324955 - DNA, 25 bp, Homo sapien
tgcccaacaatacgccacattctgt

SEQ ID NO: 2324956 - DNA, 25 bp, Homo sapien
tccgaacccggaagtgaagcgataa

SEQ ID NO: 2324957 - DNA, 25 bp, Homo sapien
ccagaaaacgccaggtgactggcag

SEQ ID NO: 2324958 - DNA, 25 bp, Homo sapien
cattctgtctagtaaagccacacag

SEQ ID NO: 2324959 - DNA, 25 bp, Homo sapien
ccgtgagagtaaagcctttgcttag

SEQ ID NO: 2324960 - DNA, 25 bp, Homo sapien
attccgtgagagtaaagcctttgct

SEQ ID NO: 2324961 - DNA, 25 bp, Homo sapien
aattccgtgagagtaaagcctttgc

SEQ ID NO: 2324962 - DNA, 25 bp, Homo sapien
ttccgtgagagtaaagcctttgctt

SEQ ID NO: 2324963 - DNA, 25 bp, Homo sapien
ctcggggcgaatattggccactaac

SEQ ID NO: 2324964 - DNA, 25 bp, Homo sapien
tgctcttgtgccgccgaaggtctcg

SEQ ID NO: 2324965 - DNA, 25 bp, Homo sapien
ttgtgccgccgaaggtctcggccat

SEQ ID NO: 2324966 - DNA, 25 bp, Homo sapien
gaatattggccactaactgctcttg

SEQ ID NO: 2324967 - DNA, 25 bp, Homo sapien
tgggctgaagacgttaggcgggagg

SEQ ID NO: 2324968 - DNA, 25 bp, Homo sapien
ctgggctgaagacgttaggcgggag

SEQ ID NO: 2324969 - DNA, 25 bp, Homo sapien
gctgggctgaagacgttaggcggga

SEQ ID NO: 2324970 - DNA, 25 bp, Homo sapien
ggccagagcgagactgggaaaggta

SEQ ID NO: 2324971 - DNA, 25 bp, Homo sapien
cctccctccgcagggaagaagggca

SEQ ID NO: 2324972 - DNA, 25 bp, Homo sapien
ctcccgcagacctcgccgctgcttc

SEQ ID NO: 2324973 - DNA, 25 bp, Homo sapien
gcggccagagcgagactgggaaagg

SEQ ID NO: 2324974 - DNA, 25 bp, Homo sapien
cccgccggcgctcgtccggagctcc

SEQ ID NO: 2324975 - DNA, 25 bp, Homo sapien
ggcgctcgtccggagctcccgccat

SEQ ID NO: 2324976 - DNA, 25 bp, Homo sapien
gccccgccggcgctcgtccggagct

SEQ ID NO: 2324977 - DNA, 25 bp, Homo sapien
gccggcgctcgtccggagctcccgc

SEQ ID NO: 2324978 - DNA, 25 bp, Homo sapien
gagacgtgttgctgctgcagctgct

SEQ ID NO: 2324979 - DNA, 25 bp, Homo sapien
tggcaagagacgtgttgctgctgca

SEQ ID NO: 2324980 - DNA, 25 bp, Homo sapien
ctggcaagagacgtgttgctgctgc

SEQ ID NO: 2324981 - DNA, 25 bp, Homo sapien
acgtgttgctgctgcagctgctccc

SEQ ID NO: 2324982 - DNA, 25 bp, Homo sapien
ctaagctggcacttctggttgctgg

SEQ ID NO: 2324983 - DNA, 25 bp, Homo sapien
tccagcgtcttcaggagcctaagct

SEQ ID NO: 2324984 - DNA, 25 bp, Homo sapien
tcttcaggagcctaagctggcactt

SEQ ID NO: 2324985 - DNA, 25 bp, Homo sapien
tggagaagaacccttgctggggatt

SEQ ID NO: 2324986 - DNA, 25 bp, Homo sapien
acagcctccaggtcatggctcctac

SEQ ID NO: 2324987 - DNA, 25 bp, Homo sapien
cacagcctccaggtcatggctccta

SEQ ID NO: 2324988 - DNA, 25 bp, Homo sapien
ccagcccccatgatgcccagtctgt

SEQ ID NO: 2324989 - DNA, 25 bp, Homo sapien
tctagactctgtgctgaacctgaag

SEQ ID NO: 2324990 - DNA, 25 bp, Homo sapien
tctgtctagactctgtgctgaacct

SEQ ID NO: 2324991 - DNA, 25 bp, Homo sapien
catgatgcccagtctgtctagactc

SEQ ID NO: 2324992 - DNA, 25 bp, Homo sapien
gacgaaaagggtctcagcgccacct

SEQ ID NO: 2324993 - DNA, 25 bp, Homo sapien
ttcattccacaagccaaaaacagcg

SEQ ID NO: 2324994 - DNA, 25 bp, Homo sapien
tgtcacaacagtgagtgacaaaaaa

SEQ ID NO: 2324995 - DNA, 25 bp, Homo sapien
caagccaaaaacagcgacgaaaagg

SEQ ID NO: 2324996 - DNA, 25 bp, Homo sapien
cataacttatgtaagaaatcggagg

SEQ ID NO: 2324997 - DNA, 25 bp, Homo sapien
ctgcataacttatgtaagaaatcgg

SEQ ID NO: 2324998 - DNA, 25 bp, Homo sapien
gtggctgcataacttatgtaagaaa

SEQ ID NO: 2324999 - DNA, 25 bp, Homo sapien
taacttatgtaagaaatcggaggat

SEQ ID NO: 2325000 - DNA, 25 bp, Homo sapien
tacatttttacagcctttgtgtgcc

SEQ ID NO: 2325001 - DNA, 25 bp, Homo sapien
tatatttttacagccttggtatgcc

SEQ ID NO: 2325002 - DNA, 25 bp, Homo sapien
cctggctggcactttaaaacttggc

SEQ ID NO: 2325003 - DNA, 25 bp, Homo sapien
gccttggtatgccttaattacattt

SEQ ID NO: 2325004 - DNA, 25 bp, Homo sapien
ggaaagtacaaggagcccaaatgcc

SEQ ID NO: 2325005 - DNA, 25 bp, Homo sapien
catctaagactctatgggcccgtga

SEQ ID NO: 2325006 - DNA, 25 bp, Homo sapien
ggtctgtagagtatctggccagcaa

SEQ ID NO: 2325007 - DNA, 25 bp, Homo sapien
gagcctcaaggaacaggtaactgta

SEQ ID NO: 2325008 - DNA, 25 bp, Homo sapien
acccaggagacagacattacagtga

SEQ ID NO: 2325009 - DNA, 25 bp, Homo sapien
cctggacgatagagtgactctgtct

SEQ ID NO: 2325010 - DNA, 25 bp, Homo sapien
ccagcctggacgatagagtgactct

SEQ ID NO: 2325011 - DNA, 25 bp, Homo sapien
caggagacagacattacagtgagct

SEQ ID NO: 2325012 - DNA, 25 bp, Homo sapien
gtgtttcatagcatcaagcagaagt

SEQ ID NO: 2325013 - DNA, 25 bp, Homo sapien
catagcatcaagcagaagtttgaca

SEQ ID NO: 2325014 - DNA, 25 bp, Homo sapien
tttcatagcatcaagcagaagtttg

SEQ ID NO: 2325015 - DNA, 25 bp, Homo sapien
tcatagcatcaagcagaagtttgac

SEQ ID NO: 2325016 - DNA, 25 bp, Homo sapien
tgagatgttgaagcatcaaaacctc

SEQ ID NO: 2325017 - DNA, 25 bp, Homo sapien
gtcttcgcaagaaaagtgtctatct

SEQ ID NO: 2325018 - DNA, 25 bp, Homo sapien
catttccattacagtcttcgcaaga

SEQ ID NO: 2325019 - DNA, 25 bp, Homo sapien
gaaaagtgtctatctttgttaacag

SEQ ID NO: 2325020 - DNA, 25 bp, Homo sapien
ctgaagtgtccttaagacccttaag

SEQ ID NO: 2325021 - DNA, 25 bp, Homo sapien
gtctgaagtgtccttaagaccctta

SEQ ID NO: 2325022 - DNA, 25 bp, Homo sapien
caagtctgaagtgtccttaagaccc

SEQ ID NO: 2325023 - DNA, 25 bp, Homo sapien
ttcaagtctgaagtgtccttaagac

SEQ ID NO: 2325024 - DNA, 25 bp, Homo sapien
atgagcatatacaatgaggttgggt

SEQ ID NO: 2325025 - DNA, 25 bp, Homo sapien
gagcatatacaatgaggttgggtgc

SEQ ID NO: 2325026 - DNA, 25 bp, Homo sapien
tgagcatatacaatgaggttgggtg

SEQ ID NO: 2325027 - DNA, 25 bp, Homo sapien
tgttggtgaaccagtcgacatgggc

SEQ ID NO: 2325028 - DNA, 25 bp, Homo sapien
catgggcacgacaatgatcaaatgc

SEQ ID NO: 2325029 - DNA, 25 bp, Homo sapien
tctgagcacgccaaatgtctgatgt

SEQ ID NO: 2325030 - DNA, 25 bp, Homo sapien
catgaataagctcgtgtgtgaccac

SEQ ID NO: 2325031 - DNA, 25 bp, Homo sapien
ctccactaaggttagcagctcgaac

SEQ ID NO: 2325032 - DNA, 25 bp, Homo sapien
tgacaagtgagcagtctccactaag

SEQ ID NO: 2325033 - DNA, 25 bp, Homo sapien
gagcagtctccactaaggttagcag

SEQ ID NO: 2325034 - DNA, 25 bp, Homo sapien
caagtgagcagtctccactaaggtt

SEQ ID NO: 2325035 - DNA, 25 bp, Homo sapien
gagtggctctgtctcgcacacaagt

SEQ ID NO: 2325036 - DNA, 25 bp, Homo sapien
ccgatcacggttttcaaagtctctg

SEQ ID NO: 2325037 - DNA, 25 bp, Homo sapien
tatatttgaataataccgatcacgg

SEQ ID NO: 2325038 - DNA, 25 bp, Homo sapien
aagtcttgttatgtgggatccttcc

SEQ ID NO: 2325039 - DNA, 25 bp, Homo sapien
tatgctagaatcacagtcttctctg

SEQ ID NO: 2325040 - DNA, 25 bp, Homo sapien
gctataaagatacaatttctgcctt

SEQ ID NO: 2325041 - DNA, 25 bp, Homo sapien
tatctggattgtagggattgtttac

SEQ ID NO: 2325042 - DNA, 25 bp, Homo sapien
tcttcatgatgatggaagctctgta

SEQ ID NO: 2325043 - DNA, 25 bp, Homo sapien
cacacttcacaggtttcataatcaa

SEQ ID NO: 2325044 - DNA, 25 bp, Homo sapien
cagtggtcacctatcaacatcatgg

SEQ ID NO: 2325045 - DNA, 25 bp, Homo sapien
tcaacatcatggaagagcacacttc

SEQ ID NO: 2325046 - DNA, 25 bp, Homo sapien
taatgtaaataccaacagtggtcac

SEQ ID NO: 2325047 - DNA, 25 bp, Homo sapien
tcttgcaggagtatggtggtactgc

SEQ ID NO: 2325048 - DNA, 25 bp, Homo sapien
tggcctatcctaaggtctaccttgg

SEQ ID NO: 2325049 - DNA, 25 bp, Homo sapien
tggcttttattacaagggacatacc

SEQ ID NO: 2325050 - DNA, 25 bp, Homo sapien
cttttatggttatgtcctgccctga

SEQ ID NO: 2325051 - DNA, 25 bp, Homo sapien
accttcccctgcacatgtactgtaa

SEQ ID NO: 2325052 - DNA, 25 bp, Homo sapien
tacttttgaatgtcatagtcttcag

SEQ ID NO: 2325053 - DNA, 25 bp, Homo sapien
acacccacctgccacaaggataggg

SEQ ID NO: 2325054 - DNA, 25 bp, Homo sapien
caaagcacagatctccactatttgg

SEQ ID NO: 2325055 - DNA, 25 bp, Homo sapien
ctgcagtgagagacaaaggcctgtg

SEQ ID NO: 2325056 - DNA, 25 bp, Homo sapien
aatgtcaatgatctcatttctaggc

SEQ ID NO: 2325057 - DNA, 25 bp, Homo sapien
agcaatatactcaggaagaccaggt

SEQ ID NO: 2325058 - DNA, 25 bp, Homo sapien
taaacacaagactgggagctctggc

SEQ ID NO: 2325059 - DNA, 25 bp, Homo sapien
tatgaatagtaaggtgcgaggactg

SEQ ID NO: 2325060 - DNA, 25 bp, Homo sapien
atgaatagtaaggtgcgaggactgg

SEQ ID NO: 2325061 - DNA, 25 bp, Homo sapien
tgaatagtaaggtgcgaggactggt

SEQ ID NO: 2325062 - DNA, 25 bp, Homo sapien
gaatagtaaggtgcgaggactggtt

SEQ ID NO: 2325063 - DNA, 25 bp, Homo sapien
attatcttgcgtctcttaagaattg

SEQ ID NO: 2325064 - DNA, 25 bp, Homo sapien
aattatcttgcgtctcttaagaatt

SEQ ID NO: 2325065 - DNA, 25 bp, Homo sapien
ccttttaacagctcaggacatttct

SEQ ID NO: 2325066 - DNA, 25 bp, Homo sapien
cttttgagaatacccaaccagcctt

SEQ ID NO: 2325067 - DNA, 25 bp, Homo sapien
ccagccttttaacagctcaggacat

SEQ ID NO: 2325068 - DNA, 25 bp, Homo sapien
tgagaatacccaaccagccttttaa

SEQ ID NO: 2325069 - DNA, 25 bp, Homo sapien
tgcagagagaacaggtcgagtaccc

SEQ ID NO: 2325070 - DNA, 25 bp, Homo sapien
ctagaatcactctttaaaccccgtg

SEQ ID NO: 2325071 - DNA, 25 bp, Homo sapien
ccagtctttgtgagagttcctggca

SEQ ID NO: 2325072 - DNA, 25 bp, Homo sapien
caagaaatacgtgcagccccatgtt

SEQ ID NO: 2325073 - DNA, 25 bp, Homo sapien
ctccaacagtataggattccccctt

SEQ ID NO: 2325074 - DNA, 25 bp, Homo sapien
tgatgtggagattttcatacacctg

SEQ ID NO: 2325075 - DNA, 25 bp, Homo sapien
atgccctccaacagtataggattcc

SEQ ID NO: 2325076 - DNA, 25 bp, Homo sapien
ccaacagtataggattcccccttct

SEQ ID NO: 2325077 - DNA, 25 bp, Homo sapien
tccatttccttctgtattttctccc

SEQ ID NO: 2325078 - DNA, 25 bp, Homo sapien
tcctccatttccttctgtattttct

SEQ ID NO: 2325079 - DNA, 25 bp, Homo sapien
catttccttctgtattttctcccat

SEQ ID NO: 2325080 - DNA, 25 bp, Homo sapien
cctccatttccttctgtattttctc

SEQ ID NO: 2325081 - DNA, 25 bp, Homo sapien
tagagtatttaccagcttgtgcaag

SEQ ID NO: 2325082 - DNA, 25 bp, Homo sapien
cctgcgtttcatgtggatctggaca

SEQ ID NO: 2325083 - DNA, 25 bp, Homo sapien
gactggatgttctcgagccttgtga

SEQ ID NO: 2325084 - DNA, 25 bp, Homo sapien
tctcaacactgaaccatggtgctgt

SEQ ID NO: 2325085 - DNA, 25 bp, Homo sapien
tgtctatctcgtagagttgctgtca

SEQ ID NO: 2325086 - DNA, 25 bp, Homo sapien
aataatgtctatctcgtagagttgc

SEQ ID NO: 2325087 - DNA, 25 bp, Homo sapien
ctatctcgtagagttgctgtcaaca

SEQ ID NO: 2325088 - DNA, 25 bp, Homo sapien
taataataatgtctatctcgtagag

SEQ ID NO: 2325089 - DNA, 25 bp, Homo sapien
gaaagccacttcacggatgatgagg

SEQ ID NO: 2325090 - DNA, 25 bp, Homo sapien
cagaatatctatgtgtgagtcctcc

SEQ ID NO: 2325091 - DNA, 25 bp, Homo sapien
gaaggcagaagtcccatgctaagga

SEQ ID NO: 2325092 - DNA, 25 bp, Homo sapien
tgggctgttttcacatccaaacggc

SEQ ID NO: 2325093 - DNA, 25 bp, Homo sapien
caatccagccaatcaggattctcct

SEQ ID NO: 2325094 - DNA, 25 bp, Homo sapien
tcaatccagccaatcaggattctcc

SEQ ID NO: 2325095 - DNA, 25 bp, Homo sapien
cctcaatccagccaatcaggattct

SEQ ID NO: 2325096 - DNA, 25 bp, Homo sapien
ctcaatccagccaatcaggattctc

SEQ ID NO: 2325097 - DNA, 25 bp, Homo sapien
tctggtgagcgtttccaacatgtgc

SEQ ID NO: 2325098 - DNA, 25 bp, Homo sapien
cactcggtagagagattaggaccta

SEQ ID NO: 2325099 - DNA, 25 bp, Homo sapien
ttgttattcagacgctaccactcgg

SEQ ID NO: 2325100 - DNA, 25 bp, Homo sapien
ggttcttatctaccagcagccagaa

SEQ ID NO: 2325101 - DNA, 25 bp, Homo sapien
acaggttcagaaacaagatttgcag

SEQ ID NO: 2325102 - DNA, 25 bp, Homo sapien
ttcagaaacaagatttgcagtttct

SEQ ID NO: 2325103 - DNA, 25 bp, Homo sapien
caggttcagaaacaagatttgcagt

SEQ ID NO: 2325104 - DNA, 25 bp, Homo sapien
ggttcagaaacaagatttgcagttt

SEQ ID NO: 2325105 - DNA, 25 bp, Homo sapien
tctgattaaatttccaagccgatta

SEQ ID NO: 2325106 - DNA, 25 bp, Homo sapien
atggtttcccgccttgaggagcaca

SEQ ID NO: 2325107 - DNA, 25 bp, Homo sapien
gagtccaaaagattggcaagcatgg

SEQ ID NO: 2325108 - DNA, 25 bp, Homo sapien
ttccaagccgattaaaaatgagtcc

SEQ ID NO: 2325109 - DNA, 25 bp, Homo sapien
ggaggtatagaacagagctgtatgt

SEQ ID NO: 2325110 - DNA, 25 bp, Homo sapien
ctgtgggtagctaattaatagattt

SEQ ID NO: 2325111 - DNA, 25 bp, Homo sapien
aactggagaaggcaagactgtgggt

SEQ ID NO: 2325112 - DNA, 25 bp, Homo sapien
ctggaggtatagaacagagctgtat

SEQ ID NO: 2325113 - DNA, 25 bp, Homo sapien
taatcccaggcggtggtttccatac

SEQ ID NO: 2325114 - DNA, 25 bp, Homo sapien
tgaattcctcctaagcagcatcttc

SEQ ID NO: 2325115 - DNA, 25 bp, Homo sapien
ttaatcccaggcggtggtttccata

SEQ ID NO: 2325116 - DNA, 25 bp, Homo sapien
tcagtgatccagtaatgagctctca

SEQ ID NO: 2325117 - DNA, 25 bp, Homo sapien
cagtgatccagtaatgagctctcat

SEQ ID NO: 2325118 - DNA, 25 bp, Homo sapien
gttcagtgatccagtaatgagctct

SEQ ID NO: 2325119 - DNA, 25 bp, Homo sapien
cagttcagtgatccagtaatgagct

SEQ ID NO: 2325120 - DNA, 25 bp, Homo sapien
gaaatgtcaactttcattagcaaag

SEQ ID NO: 2325121 - DNA, 25 bp, Homo sapien
gatgcacatctcttgaaattaagca

SEQ ID NO: 2325122 - DNA, 25 bp, Homo sapien
caaagtgaatgtttggtcctttata

SEQ ID NO: 2325123 - DNA, 25 bp, Homo sapien
gaaaaaggcgagctctttataattc

SEQ ID NO: 2325124 - DNA, 25 bp, Homo sapien
taaatccccctgtctctgtaacttg

SEQ ID NO: 2325125 - DNA, 25 bp, Homo sapien
gtaacttggtcccttgctactcaaa

SEQ ID NO: 2325126 - DNA, 25 bp, Homo sapien
taaggtgtctgggctcttaaatccc

SEQ ID NO: 2325127 - DNA, 25 bp, Homo sapien
actagttagaaatgcggagtctcag

SEQ ID NO: 2325128 - DNA, 25 bp, Homo sapien
tttgtcaggtgggtcctttgcagag

SEQ ID NO: 2325129 - DNA, 25 bp, Homo sapien
tttgcaatatgcctcctcatatcgc

SEQ ID NO: 2325130 - DNA, 25 bp, Homo sapien
ggctgtgtcctttttgcaatatgcc

SEQ ID NO: 2325131 - DNA, 25 bp, Homo sapien
tcctcatatcgctttgtcaggtggg

SEQ ID NO: 2325132 - DNA, 25 bp, Homo sapien
tcttgctgcccctccataagaagtg

SEQ ID NO: 2325133 - DNA, 25 bp, Homo sapien
taatggtcttaccagaagtcccaca

SEQ ID NO: 2325134 - DNA, 25 bp, Homo sapien
caattaaatcttgttgcaggcagct

SEQ ID NO: 2325135 - DNA, 25 bp, Homo sapien
taattatcagtggttgtgcatctcc

SEQ ID NO: 2325136 - DNA, 25 bp, Homo sapien
tgatcacaacaagggacttatccat

SEQ ID NO: 2325137 - DNA, 25 bp, Homo sapien
ggatttggtgatcacaacaagggac

SEQ ID NO: 2325138 - DNA, 25 bp, Homo sapien
cctccgtggatttggtgatcacaac

SEQ ID NO: 2325139 - DNA, 25 bp, Homo sapien
ctttcctccgtggatttggtgatca

SEQ ID NO: 2325140 - DNA, 25 bp, Homo sapien
ccacttgaaccataaaccctttgtg

SEQ ID NO: 2325141 - DNA, 25 bp, Homo sapien
gcaaatgcctagatttaccacttga

SEQ ID NO: 2325142 - DNA, 25 bp, Homo sapien
ttttgtgtactgatgtctgatagcc

SEQ ID NO: 2325143 - DNA, 25 bp, Homo sapien
tctgatagcctagggcacagatcat

SEQ ID NO: 2325144 - DNA, 25 bp, Homo sapien
ctgctcctggcagttgtttccccat

SEQ ID NO: 2325145 - DNA, 25 bp, Homo sapien
agaggagcgaaggaaaatgggcgaa

SEQ ID NO: 2325146 - DNA, 25 bp, Homo sapien
gactgctcctggcagttgtttcccc

SEQ ID NO: 2325147 - DNA, 25 bp, Homo sapien
aaaatgggcgaagactgactgctcc

SEQ ID NO: 2325148 - DNA, 25 bp, Homo sapien
aggaagcagtcccctgattgctgta

SEQ ID NO: 2325149 - DNA, 25 bp, Homo sapien
tcaggaagcagtcccctgattgctg

SEQ ID NO: 2325150 - DNA, 25 bp, Homo sapien
atcaggaagcagtcccctgattgct

SEQ ID NO: 2325151 - DNA, 25 bp, Homo sapien
ggaagcagtcccctgattgctgtac

SEQ ID NO: 2325152 - DNA, 25 bp, Homo sapien
atgcatttctctaggtagaacacgc

SEQ ID NO: 2325153 - DNA, 25 bp, Homo sapien
ggtagaacacgctggtgctttggtt

SEQ ID NO: 2325154 - DNA, 25 bp, Homo sapien
gcatttctctaggtagaacacgctg

SEQ ID NO: 2325155 - DNA, 25 bp, Homo sapien
acacgctggtgctttggttgaaccc

SEQ ID NO: 2325156 - DNA, 25 bp, Homo sapien
ccaagccggcactggtggcagatgg

SEQ ID NO: 2325157 - DNA, 25 bp, Homo sapien
cttccaagccggcactggtggcaga

SEQ ID NO: 2325158 - DNA, 25 bp, Homo sapien
ttccaagccggcactggtggcagat

SEQ ID NO: 2325159 - DNA, 25 bp, Homo sapien
tccaagccggcactggtggcagatg

SEQ ID NO: 2325160 - DNA, 25 bp, Homo sapien
ttagaagaacctcttcgaagttgaa

SEQ ID NO: 2325161 - DNA, 25 bp, Homo sapien
tcttcgaagttgaaattcatcgagt

SEQ ID NO: 2325162 - DNA, 25 bp, Homo sapien
gaacctcttcgaagttgaaattcat

SEQ ID NO: 2325163 - DNA, 25 bp, Homo sapien
tcgaagttgaaattcatcgagttct

SEQ ID NO: 2325164 - DNA, 25 bp, Homo sapien
ggtgaaggctttatatttcctctgt

SEQ ID NO: 2325165 - DNA, 25 bp, Homo sapien
agtgcttttcttgtcacaggacaat

SEQ ID NO: 2325166 - DNA, 25 bp, Homo sapien
cacaggacaatttgatggtggtgaa

SEQ ID NO: 2325167 - DNA, 25 bp, Homo sapien
ttcttgtcacaggacaatttgatgg

SEQ ID NO: 2325168 - DNA, 25 bp, Homo sapien
tagaacctatttcaaccagagcatt

SEQ ID NO: 2325169 - DNA, 25 bp, Homo sapien
cagcatttttagaacctatttcaac

SEQ ID NO: 2325170 - DNA, 25 bp, Homo sapien
ttttagaacctatttcaaccagagc

SEQ ID NO: 2325171 - DNA, 25 bp, Homo sapien
aaccagagcatttccaaaaccagtg

SEQ ID NO: 2325172 - DNA, 25 bp, Homo sapien
agatctccatggaaggccctctctt

SEQ ID NO: 2325173 - DNA, 25 bp, Homo sapien
tctcttctcagcattgaccagctcc

SEQ ID NO: 2325174 - DNA, 25 bp, Homo sapien
gctgagagatctccatggaaggccc

SEQ ID NO: 2325175 - DNA, 25 bp, Homo sapien
tcagcattgaccagctcccacgttt

SEQ ID NO: 2325176 - DNA, 25 bp, Homo sapien
tcctctaccattatcacttccatat

SEQ ID NO: 2325177 - DNA, 25 bp, Homo sapien
ctcctctaccattatcacttccata

SEQ ID NO: 2325178 - DNA, 25 bp, Homo sapien
atctcctctaccattatcacttcca

SEQ ID NO: 2325179 - DNA, 25 bp, Homo sapien
tctcctctaccattatcacttccat

SEQ ID NO: 2325180 - DNA, 25 bp, Homo sapien
tcactatggataaaaataccagagt

SEQ ID NO: 2325181 - DNA, 25 bp, Homo sapien
tggcttccctctacacatgagatag

SEQ ID NO: 2325182 - DNA, 25 bp, Homo sapien
cacatgagatagaatccaagtgcca

SEQ ID NO: 2325183 - DNA, 25 bp, Homo sapien
tctttcgaaaaattccactaatggc

SEQ ID NO: 2325184 - DNA, 25 bp, Homo sapien
gaaattctccccaaagccgatgatt

SEQ ID NO: 2325185 - DNA, 25 bp, Homo sapien
gccctgcccttgtaagcactcaaag

SEQ ID NO: 2325186 - DNA, 25 bp, Homo sapien
taaccataggcaagacgctgctcaa

SEQ ID NO: 2325187 - DNA, 25 bp, Homo sapien
tagcaatctcagcacctatacagtg

SEQ ID NO: 2325188 - DNA, 25 bp, Homo sapien
ggcccaccatgaggacaagcgtttc

SEQ ID NO: 2325189 - DNA, 25 bp, Homo sapien
atgaggacaagcgtttcttttttgc

SEQ ID NO: 2325190 - DNA, 25 bp, Homo sapien
ctcaaccagcttcagcttatacaga

SEQ ID NO: 2325191 - DNA, 25 bp, Homo sapien
cagcttcagcttatacagaatcatc

SEQ ID NO: 2325192 - DNA, 25 bp, Homo sapien
tgtatctgcattgaagcctgtgatg

SEQ ID NO: 2325193 - DNA, 25 bp, Homo sapien
ctccatgtatctgcattgaagcctg

SEQ ID NO: 2325194 - DNA, 25 bp, Homo sapien
ccatgtatctgcattgaagcctgtg

SEQ ID NO: 2325195 - DNA, 25 bp, Homo sapien
catgtatctgcattgaagcctgtga

SEQ ID NO: 2325196 - DNA, 25 bp, Homo sapien
gctctctgtcactactgtcctccat

SEQ ID NO: 2325197 - DNA, 25 bp, Homo sapien
tgctctctgtcactactgtcctcca

SEQ ID NO: 2325198 - DNA, 25 bp, Homo sapien
gtgctctctgtcactactgtcctcc

SEQ ID NO: 2325199 - DNA, 25 bp, Homo sapien
cagggggaccgcattccagagctca

SEQ ID NO: 2325200 - DNA, 25 bp, Homo sapien
gggggaccgcattccagagctcatc

SEQ ID NO: 2325201 - DNA, 25 bp, Homo sapien
agggggaccgcattccagagctcat

SEQ ID NO: 2325202 - DNA, 25 bp, Homo sapien
aaggtcttagtcaattattctgtgc

SEQ ID NO: 2325203 - DNA, 25 bp, Homo sapien
tgtgtaagttggatgtttattgatc

SEQ ID NO: 2325204 - DNA, 25 bp, Homo sapien
tttgtctatttttgggtttgtcaca

SEQ ID NO: 2325205 - DNA, 25 bp, Homo sapien
tgcataggccaatgtcctgaagagg

SEQ ID NO: 2325206 - DNA, 25 bp, Homo sapien
attttggccacagggttccatacca

SEQ ID NO: 2325207 - DNA, 25 bp, Homo sapien
ttccctctgaattttggccacaggg

SEQ ID NO: 2325208 - DNA, 25 bp, Homo sapien
ggaaacagtgcaacttccctctgaa

SEQ ID NO: 2325209 - DNA, 25 bp, Homo sapien
cacttgggaaacagtgcaacttccc

SEQ ID NO: 2325210 - DNA, 25 bp, Homo sapien
ctgggatcagagccacaggtgtcat

SEQ ID NO: 2325211 - DNA, 25 bp, Homo sapien
tgtgcccatgctaaatagatcagct

SEQ ID NO: 2325212 - DNA, 25 bp, Homo sapien
gatcagctcaattaatgtagtatcc

SEQ ID NO: 2325213 - DNA, 25 bp, Homo sapien
aaatagatcagctcaattaatgtag

SEQ ID NO: 2325214 - DNA, 25 bp, Homo sapien
gattcagctgttgtgcccatgctaa

SEQ ID NO: 2325215 - DNA, 25 bp, Homo sapien
taaaatattcagcagtctgatacct

SEQ ID NO: 2325216 - DNA, 25 bp, Homo sapien
aatattcagcagtctgataccttta

SEQ ID NO: 2325217 - DNA, 25 bp, Homo sapien
ttcagcagtctgatacctttactgt

SEQ ID NO: 2325218 - DNA, 25 bp, Homo sapien
agcagtctgatacctttactgttaa

SEQ ID NO: 2325219 - DNA, 25 bp, Homo sapien
gaatgcaattcctttagttcctagt

SEQ ID NO: 2325220 - DNA, 25 bp, Homo sapien
attgaatgcaattcctttagttcct

SEQ ID NO: 2325221 - DNA, 25 bp, Homo sapien
ttagttcctagtaaaggcattgtgc

SEQ ID NO: 2325222 - DNA, 25 bp, Homo sapien
tagtaaaggcattgtgcatttcaaa

SEQ ID NO: 2325223 - DNA, 25 bp, Homo sapien
atactgaatatcagtgttctttctt

SEQ ID NO: 2325224 - DNA, 25 bp, Homo sapien
ttctctgcctagttcttctggttct

SEQ ID NO: 2325225 - DNA, 25 bp, Homo sapien
tctctgcctagttcttctggttctt

SEQ ID NO: 2325226 - DNA, 25 bp, Homo sapien
tcttcaatatagagggagattctga

SEQ ID NO: 2325227 - DNA, 25 bp, Homo sapien
tgtatttctcctctcacaatactca

SEQ ID NO: 2325228 - DNA, 25 bp, Homo sapien
catcaccttcacctagacaaccctt

SEQ ID NO: 2325229 - DNA, 25 bp, Homo sapien
taagcttaaacaagtccttctggga

SEQ ID NO: 2325230 - DNA, 25 bp, Homo sapien
ggagtctctggtcacttccaccaca

SEQ ID NO: 2325231 - DNA, 25 bp, Homo sapien
acaggcctacttccaaaaggaacag

SEQ ID NO: 2325232 - DNA, 25 bp, Homo sapien
ctgtgtcaacaggcctacttccaaa

SEQ ID NO: 2325233 - DNA, 25 bp, Homo sapien
gtgtcaacaggcctacttccaaaag

SEQ ID NO: 2325234 - DNA, 25 bp, Homo sapien
tcaacaggcctacttccaaaaggaa

SEQ ID NO: 2325235 - DNA, 25 bp, Homo sapien
ttctagaaagggcacttctaaagag

SEQ ID NO: 2325236 - DNA, 25 bp, Homo sapien
cagaagttcgttctagaaagggcac

SEQ ID NO: 2325237 - DNA, 25 bp, Homo sapien
cgttctagaaagggcacttctaaag

SEQ ID NO: 2325238 - DNA, 25 bp, Homo sapien
agttcgttctagaaagggcacttct

SEQ ID NO: 2325239 - DNA, 25 bp, Homo sapien
catctatagggcactctggacaaaa

SEQ ID NO: 2325240 - DNA, 25 bp, Homo sapien
tactgagaggtacaacgtggctgga

SEQ ID NO: 2325241 - DNA, 25 bp, Homo sapien
taagaacgttccgtgataatggaca

SEQ ID NO: 2325242 - DNA, 25 bp, Homo sapien
tgtgggactagcctccaagacggct

SEQ ID NO: 2325243 - DNA, 25 bp, Homo sapien
ggtccactcttggtgtgactccctc

SEQ ID NO: 2325244 - DNA, 25 bp, Homo sapien
tatctgtcttcaccccttgctttgg

SEQ ID NO: 2325245 - DNA, 25 bp, Homo sapien
cagtttctgtgctcggattcctctt

SEQ ID NO: 2325246 - DNA, 25 bp, Homo sapien
gctttggcccataactgcacagttg

SEQ ID NO: 2325247 - DNA, 25 bp, Homo sapien
tacccaatagctgtcaatacacagg

SEQ ID NO: 2325248 - DNA, 25 bp, Homo sapien
ggttgggtaaactgtgctggcaatc

SEQ ID NO: 2325249 - DNA, 25 bp, Homo sapien
gttgggtaaactgtgctggcaatca

SEQ ID NO: 2325250 - DNA, 25 bp, Homo sapien
ctaggtgagtaatacccaatagctg

SEQ ID NO: 2325251 - DNA, 25 bp, Homo sapien
agcagggcggcagctttgctattcc

SEQ ID NO: 2325252 - DNA, 25 bp, Homo sapien
gccatccataggaagtggtttctcc

SEQ ID NO: 2325253 - DNA, 25 bp, Homo sapien
cagtagtaaccacaagacagcaggg

SEQ ID NO: 2325254 - DNA, 25 bp, Homo sapien
ggtgaagctacaacatccactgcca

SEQ ID NO: 2325255 - DNA, 25 bp, Homo sapien
ctatttggagatactggaaaactga

SEQ ID NO: 2325256 - DNA, 25 bp, Homo sapien
tgcaatttgtgtcaaatgcacatcg

SEQ ID NO: 2325257 - DNA, 25 bp, Homo sapien
gtgtcaaatgcacatcgcatcgaga

SEQ ID NO: 2325258 - DNA, 25 bp, Homo sapien
tttcagactctcttgcaatttgtgt

SEQ ID NO: 2325259 - DNA, 25 bp, Homo sapien
cagttagtttcaagtatttggtggt

SEQ ID NO: 2325260 - DNA, 25 bp, Homo sapien
tttcaagtatttggtggttactcat

SEQ ID NO: 2325261 - DNA, 25 bp, Homo sapien
gtttcaagtatttggtggttactca

SEQ ID NO: 2325262 - DNA, 25 bp, Homo sapien
ccactccacatacgtccaacagtgc

SEQ ID NO: 2325263 - DNA, 25 bp, Homo sapien
tccacatacgtccaacagtgcaaat

SEQ ID NO: 2325264 - DNA, 25 bp, Homo sapien
actccacatacgtccaacagtgcaa

SEQ ID NO: 2325265 - DNA, 25 bp, Homo sapien
ccacatacgtccaacagtgcaaatg

SEQ ID NO: 2325266 - DNA, 25 bp, Homo sapien
gtacctatcttagctgtggtgacac

SEQ ID NO: 2325267 - DNA, 25 bp, Homo sapien
catacgtagtactctgagtgccaca

SEQ ID NO: 2325268 - DNA, 25 bp, Homo sapien
ctgtggtgacacatacgtagtactc

SEQ ID NO: 2325269 - DNA, 25 bp, Homo sapien
acagtacctatcttagctgtggtga

SEQ ID NO: 2325270 - DNA, 25 bp, Homo sapien
tatatgtgaatgcaacaaacacatc

SEQ ID NO: 2325271 - DNA, 25 bp, Homo sapien
gaatgcaacaaacacatctcacagt

SEQ ID NO: 2325272 - DNA, 25 bp, Homo sapien
ctgtatatgtgaatgcaacaaacac

SEQ ID NO: 2325273 - DNA, 25 bp, Homo sapien
tgtgaatgcaacaaacacatctcac

SEQ ID NO: 2325274 - DNA, 25 bp, Homo sapien
tcaaagattttgtagtgtccatggc

SEQ ID NO: 2325275 - DNA, 25 bp, Homo sapien
gctttagtggctcctaaaacttgca

SEQ ID NO: 2325276 - DNA, 25 bp, Homo sapien
agacctagacctgaaagagaaatga

SEQ ID NO: 2325277 - DNA, 25 bp, Homo sapien
tcaagcctgaatctcctagttccca

SEQ ID NO: 2325278 - DNA, 25 bp, Homo sapien
ctgatgacgctagacccactggaat

SEQ ID NO: 2325279 - DNA, 25 bp, Homo sapien
agtctctcaggattagccctggtaa

SEQ ID NO: 2325280 - DNA, 25 bp, Homo sapien
ccactggaatctcgcataactcatc

SEQ ID NO: 2325281 - DNA, 25 bp, Homo sapien
taactcatcctgaacgtgttgggaa

SEQ ID NO: 2325282 - DNA, 25 bp, Homo sapien
gatgctacaatagcctcatgttttc

SEQ ID NO: 2325283 - DNA, 25 bp, Homo sapien
gctacaatagcctcatgttttctgt

SEQ ID NO: 2325284 - DNA, 25 bp, Homo sapien
cagatgctacaatagcctcatgttt

SEQ ID NO: 2325285 - DNA, 25 bp, Homo sapien
tgctacaatagcctcatgttttctg

SEQ ID NO: 2325286 - DNA, 25 bp, Homo sapien
tttcagttgaagattctgttttcat

SEQ ID NO: 2325287 - DNA, 25 bp, Homo sapien
tctttcagttgaagattctgttttc

SEQ ID NO: 2325288 - DNA, 25 bp, Homo sapien
ctttcagttgaagattctgttttca

SEQ ID NO: 2325289 - DNA, 25 bp, Homo sapien
ctctttcagttgaagattctgtttt

SEQ ID NO: 2325290 - DNA, 25 bp, Homo sapien
taaattatccgaccaaaattagcca

SEQ ID NO: 2325291 - DNA, 25 bp, Homo sapien
gcagctcttaaatcaagtaacccat

SEQ ID NO: 2325292 - DNA, 25 bp, Homo sapien
tagccagcagctcttaaatcaagta

SEQ ID NO: 2325293 - DNA, 25 bp, Homo sapien
tcttctattaaattatccgaccaaa

SEQ ID NO: 2325294 - DNA, 25 bp, Homo sapien
agataagacctctgggattctagac

SEQ ID NO: 2325295 - DNA, 25 bp, Homo sapien
gacttcatttatcacctttatgagg

SEQ ID NO: 2325296 - DNA, 25 bp, Homo sapien
gttttttctccagataagacctctg

SEQ ID NO: 2325297 - DNA, 25 bp, Homo sapien
tatcacctttatgagggatgcctct

SEQ ID NO: 2325298 - DNA, 25 bp, Homo sapien
cttggttaacctgttgttgtcctca

SEQ ID NO: 2325299 - DNA, 25 bp, Homo sapien
ctttgctccctgcatattgtcaggc

SEQ ID NO: 2325300 - DNA, 25 bp, Homo sapien
tgctccctgcatattgtcaggcccc

SEQ ID NO: 2325301 - DNA, 25 bp, Homo sapien
tttgctccctgcatattgtcaggcc

SEQ ID NO: 2325302 - DNA, 25 bp, Homo sapien
ctgatccttgggagtaatatgagag

SEQ ID NO: 2325303 - DNA, 25 bp, Homo sapien
gagcctccaaggatttggctgatcc

SEQ ID NO: 2325304 - DNA, 25 bp, Homo sapien
agagagctttgcgaagcttcatgaa

SEQ ID NO: 2325305 - DNA, 25 bp, Homo sapien
gaatgacacattgacccagagcctc

SEQ ID NO: 2325306 - DNA, 25 bp, Homo sapien
aggaatccgagtccatctgctctgt

SEQ ID NO: 2325307 - DNA, 25 bp, Homo sapien
ctaggaatccgagtccatctgctct

SEQ ID NO: 2325308 - DNA, 25 bp, Homo sapien
tttagcatatctggcctgctgatgg

SEQ ID NO: 2325309 - DNA, 25 bp, Homo sapien
ctttagcatatctggcctgctgatg

SEQ ID NO: 2325310 - DNA, 25 bp, Homo sapien
agaaggcccttactagaggaacaga

SEQ ID NO: 2325311 - DNA, 25 bp, Homo sapien
acacagaaggcccttactagaggaa

SEQ ID NO: 2325312 - DNA, 25 bp, Homo sapien
acagaaggcccttactagaggaaca

SEQ ID NO: 2325313 - DNA, 25 bp, Homo sapien
cctgggttagaggtggacacagaag

SEQ ID NO: 2325314 - DNA, 25 bp, Homo sapien
acagagcccagccagtgtccctggg

SEQ ID NO: 2325315 - DNA, 25 bp, Homo sapien
gccagtgtccctgggcccaacaggg

SEQ ID NO: 2325316 - DNA, 25 bp, Homo sapien
agcacagagcccagccagtgtccct

SEQ ID NO: 2325317 - DNA, 25 bp, Homo sapien
agccagtgtccctgggcccaacagg

SEQ ID NO: 2325318 - DNA, 25 bp, Homo sapien
gattctagccccataataagcattt

SEQ ID NO: 2325319 - DNA, 25 bp, Homo sapien
gattttccagataccaggataacag

SEQ ID NO: 2325320 - DNA, 25 bp, Homo sapien
gccatataactacaccatcagggtg

SEQ ID NO: 2325321 - DNA, 25 bp, Homo sapien
gaaacagattgtgttcccatgatct

SEQ ID NO: 2325322 - DNA, 25 bp, Homo sapien
tctgtaccggatcatgaaatttcca

SEQ ID NO: 2325323 - DNA, 25 bp, Homo sapien
gagtgttacaaagaaacagtgtgcc

SEQ ID NO: 2325324 - DNA, 25 bp, Homo sapien
ccatgaggttatgcctaagtgctga

SEQ ID NO: 2325325 - DNA, 25 bp, Homo sapien
cagcctgcaggttatagtttgttaa

SEQ ID NO: 2325326 - DNA, 25 bp, Homo sapien
acatcagtcactgtccctgcaatag

SEQ ID NO: 2325327 - DNA, 25 bp, Homo sapien
catagacaggttacaaacatcagtc

SEQ ID NO: 2325328 - DNA, 25 bp, Homo sapien
caatagaagttgcagccaggtagaa

SEQ ID NO: 2325329 - DNA, 25 bp, Homo sapien
gcaatagaagttgcagccaggtaga

SEQ ID NO: 2325330 - DNA, 25 bp, Homo sapien
aggaaatgccttaaccttgaaggca

SEQ ID NO: 2325331 - DNA, 25 bp, Homo sapien
ttccatagtcaactgtgtctttccc

SEQ ID NO: 2325332 - DNA, 25 bp, Homo sapien
aatgccttaaccttgaaggcatcca

SEQ ID NO: 2325333 - DNA, 25 bp, Homo sapien
ccatagtcaactgtgtctttcccaa

SEQ ID NO: 2325334 - DNA, 25 bp, Homo sapien
tcaggctcctttccagaacttcccc

SEQ ID NO: 2325335 - DNA, 25 bp, Homo sapien
ctccatcaggctcctttccagaact

SEQ ID NO: 2325336 - DNA, 25 bp, Homo sapien
aggctcctttccagaacttcccctg

SEQ ID NO: 2325337 - DNA, 25 bp, Homo sapien
ctgtggctccatcaggctcctttcc

SEQ ID NO: 2325338 - DNA, 25 bp, Homo sapien
cataaatttctacgatatttagtaa

SEQ ID NO: 2325339 - DNA, 25 bp, Homo sapien
cgatatttagtaaaatcttctgaag

SEQ ID NO: 2325340 - DNA, 25 bp, Homo sapien
ttctacgatatttagtaaaatcttc

SEQ ID NO: 2325341 - DNA, 25 bp, Homo sapien
gtcataaatttctacgatatttagt

SEQ ID NO: 2325342 - DNA, 25 bp, Homo sapien
gcccacacatccaactagtaatttg

SEQ ID NO: 2325343 - DNA, 25 bp, Homo sapien
caactagtaatttgctcaccacgaa

SEQ ID NO: 2325344 - DNA, 25 bp, Homo sapien
tttgctcaccacgaatgtgtttggc

SEQ ID NO: 2325345 - DNA, 25 bp, Homo sapien
ctgcccacacatccaactagtaatt

SEQ ID NO: 2325346 - DNA, 25 bp, Homo sapien
tttactctggccatttctgtggcag

SEQ ID NO: 2325347 - DNA, 25 bp, Homo sapien
actctggccatttctgtggcagcca

SEQ ID NO: 2325348 - DNA, 25 bp, Homo sapien
tactctggccatttctgtggcagcc

SEQ ID NO: 2325349 - DNA, 25 bp, Homo sapien
catttactctggccatttctgtggc

SEQ ID NO: 2325350 - DNA, 25 bp, Homo sapien
ttagttgtcgttgtcgctgtttttc

SEQ ID NO: 2325351 - DNA, 25 bp, Homo sapien
tagttgtcgttgtcgctgtttttcc

SEQ ID NO: 2325352 - DNA, 25 bp, Homo sapien
tgtcgttgtcgctgtttttcccctc

SEQ ID NO: 2325353 - DNA, 25 bp, Homo sapien
gggctccacgctcctctaagttcat

SEQ ID NO: 2325354 - DNA, 25 bp, Homo sapien
tgcatgatgcatgggctccacgctc

SEQ ID NO: 2325355 - DNA, 25 bp, Homo sapien
atgcatgggctccacgctcctctaa

SEQ ID NO: 2325356 - DNA, 25 bp, Homo sapien
gcctgcatgatgcatgggctccacg

SEQ ID NO: 2325357 - DNA, 25 bp, Homo sapien
tcagtaaacgtattccatcacatca

SEQ ID NO: 2325358 - DNA, 25 bp, Homo sapien
gtaaacgtattccatcacatcaaca

SEQ ID NO: 2325359 - DNA, 25 bp, Homo sapien
aatcagtaaacgtattccatcacat

SEQ ID NO: 2325360 - DNA, 25 bp, Homo sapien
cagtaaacgtattccatcacatcaa

SEQ ID NO: 2325361 - DNA, 25 bp, Homo sapien
ctttccagatcagaagcactgttca

SEQ ID NO: 2325362 - DNA, 25 bp, Homo sapien
tgcaagaattgcaccagaggtacaa

SEQ ID NO: 2325363 - DNA, 25 bp, Homo sapien
gcctatgctataagcctgagtccat

SEQ ID NO: 2325364 - DNA, 25 bp, Homo sapien
aattaattaatttctgtgagctgta

SEQ ID NO: 2325365 - DNA, 25 bp, Homo sapien
aattcaggagcagaaaattcaggcc

SEQ ID NO: 2325366 - DNA, 25 bp, Homo sapien
tttgaattcaggagcagaaaattca

SEQ ID NO: 2325367 - DNA, 25 bp, Homo sapien
gaattcaggagcagaaaattcaggc

SEQ ID NO: 2325368 - DNA, 25 bp, Homo sapien
tgaattcaggagcagaaaattcagg

SEQ ID NO: 2325369 - DNA, 25 bp, Homo sapien
aagcagactcctgatgtatcttggg

SEQ ID NO: 2325370 - DNA, 25 bp, Homo sapien
agagaagcagactcctgatgtatct

SEQ ID NO: 2325371 - DNA, 25 bp, Homo sapien
gaagcagactcctgatgtatcttgg

SEQ ID NO: 2325372 - DNA, 25 bp, Homo sapien
gagaagcagactcctgatgtatctt

SEQ ID NO: 2325373 - DNA, 25 bp, Homo sapien
tcccagtactgatataccacacatt

SEQ ID NO: 2325374 - DNA, 25 bp, Homo sapien
gatacgtcctatttgctccaaaagg

SEQ ID NO: 2325375 - DNA, 25 bp, Homo sapien
cacattgtcctcataaatcccagta

SEQ ID NO: 2325376 - DNA, 25 bp, Homo sapien
ctgttgtgttcaggaccacgcactt

SEQ ID NO: 2325377 - DNA, 25 bp, Homo sapien
cagaactagttagtcttcaatatga

SEQ ID NO: 2325378 - DNA, 25 bp, Homo sapien
agaagacatccaaaacgtctcagaa

SEQ ID NO: 2325379 - DNA, 25 bp, Homo sapien
cttcaatatgaaatcttccctgctg

SEQ ID NO: 2325380 - DNA, 25 bp, Homo sapien
caaaacgtctcagaactagttagtc

SEQ ID NO: 2325381 - DNA, 25 bp, Homo sapien
gagcccacagacaatagcacaaatt

SEQ ID NO: 2325382 - DNA, 25 bp, Homo sapien
ctgcctttaaccagctgggggtaag

SEQ ID NO: 2325383 - DNA, 25 bp, Homo sapien
tagcttctgcctttaaccagctggg

SEQ ID NO: 2325384 - DNA, 25 bp, Homo sapien
catagcttctgcctttaaccagctg

SEQ ID NO: 2325385 - DNA, 25 bp, Homo sapien
ttcataatactgttttcagctgaaa

SEQ ID NO: 2325386 - DNA, 25 bp, Homo sapien
cttatagtgagtcttttgggttgag

SEQ ID NO: 2325387 - DNA, 25 bp, Homo sapien
ccttcataatactgttttcagctga

SEQ ID NO: 2325388 - DNA, 25 bp, Homo sapien
tctccttcataatactgttttcagc

SEQ ID NO: 2325389 - DNA, 25 bp, Homo sapien
tagcagagcacttggagacatggag

SEQ ID NO: 2325390 - DNA, 25 bp, Homo sapien
gagatactggatcaccatgagcaga

SEQ ID NO: 2325391 - DNA, 25 bp, Homo sapien
gcagatcgtagaacagaggttttat

SEQ ID NO: 2325392 - DNA, 25 bp, Homo sapien
acatggagtgggaggtcagcagtgg

SEQ ID NO: 2325393 - DNA, 25 bp, Homo sapien
cttgtgtgacagatgggcataactt

SEQ ID NO: 2325394 - DNA, 25 bp, Homo sapien
cacaagagcagtgtagcttttgaga

SEQ ID NO: 2325395 - DNA, 25 bp, Homo sapien
tacatttcagcgctctctaaagggt

SEQ ID NO: 2325396 - DNA, 25 bp, Homo sapien
taattgctcttatcaggctctgtgg

SEQ ID NO: 2325397 - DNA, 25 bp, Homo sapien
tgaggaaacaagcatcattgacagt

SEQ ID NO: 2325398 - DNA, 25 bp, Homo sapien
caagcatcattgacagtgctgaatt

SEQ ID NO: 2325399 - DNA, 25 bp, Homo sapien
ttgtaaaggcatgggtttttgtgtg

SEQ ID NO: 2325400 - DNA, 25 bp, Homo sapien
cattgacagtgctgaatttattgtt

SEQ ID NO: 2325401 - DNA, 25 bp, Homo sapien
tggttctttgtgacacaactttttc

SEQ ID NO: 2325402 - DNA, 25 bp, Homo sapien
gcaactgagtcacttggagagacct

SEQ ID NO: 2325403 - DNA, 25 bp, Homo sapien
gttctttgtgacacaactttttcca

SEQ ID NO: 2325404 - DNA, 25 bp, Homo sapien
ttccatgcaactgagtcacttggag

SEQ ID NO: 2325405 - DNA, 25 bp, Homo sapien
attcctctacacccttgcacctcat

SEQ ID NO: 2325406 - DNA, 25 bp, Homo sapien
tattcctctacacccttgcacctca

SEQ ID NO: 2325407 - DNA, 25 bp, Homo sapien
ctattcctctacacccttgcacctc

SEQ ID NO: 2325408 - DNA, 25 bp, Homo sapien
ttttgccgatttcttcaggctcctt

SEQ ID NO: 2325409 - DNA, 25 bp, Homo sapien
ccaggtgtttctaaatgagtaatgt

SEQ ID NO: 2325410 - DNA, 25 bp, Homo sapien
gacctcccttttgccgatttcttca

SEQ ID NO: 2325411 - DNA, 25 bp, Homo sapien
cacttggactcaacctcagaccagg

SEQ ID NO: 2325412 - DNA, 25 bp, Homo sapien
tgcatgatggttgatatccatgaat

SEQ ID NO: 2325413 - DNA, 25 bp, Homo sapien
catgatggttgatatccatgaatac

SEQ ID NO: 2325414 - DNA, 25 bp, Homo sapien
tcagatctggattccatatctgcct

SEQ ID NO: 2325415 - DNA, 25 bp, Homo sapien
gattccatatctgcctgcatgatgg

SEQ ID NO: 2325416 - DNA, 25 bp, Homo sapien
gggaatgatgctcatataagaatac

SEQ ID NO: 2325417 - DNA, 25 bp, Homo sapien
tgatgctcatataagaatacctttt

SEQ ID NO: 2325418 - DNA, 25 bp, Homo sapien
ataatacctgccttgtaccattttt

SEQ ID NO: 2325419 - DNA, 25 bp, Homo sapien
tatgcaaaaaagtatcttacgtaaa

SEQ ID NO: 2325420 - DNA, 25 bp, Homo sapien
aaatcttccttgattgccccagcct

SEQ ID NO: 2325421 - DNA, 25 bp, Homo sapien
ggatcagtggagtattaatctctgc

SEQ ID NO: 2325422 - DNA, 25 bp, Homo sapien
tggatcagtggagtattaatctctg

SEQ ID NO: 2325423 - DNA, 25 bp, Homo sapien
tccttgattgccccagcctcttcgt

SEQ ID NO: 2325424 - DNA, 25 bp, Homo sapien
gaatgacctgctcgagcattggaca

SEQ ID NO: 2325425 - DNA, 25 bp, Homo sapien
tggtgtggaatgacctgctcgagca

SEQ ID NO: 2325426 - DNA, 25 bp, Homo sapien
aactctggctttgcgtggtgtggaa

SEQ ID NO: 2325427 - DNA, 25 bp, Homo sapien
atgaactctggctttgcgtggtgtg

SEQ ID NO: 2325428 - DNA, 25 bp, Homo sapien
taaaagaaggaattgaccgggcagc

SEQ ID NO: 2325429 - DNA, 25 bp, Homo sapien
tggactgcagtcgtaagcggctagc

SEQ ID NO: 2325430 - DNA, 25 bp, Homo sapien
gacgctgctcaagctgcaactctgt

SEQ ID NO: 2325431 - DNA, 25 bp, Homo sapien
tcctgggtcgctcggctgtaagtat

SEQ ID NO: 2325432 - DNA, 25 bp, Homo sapien
gcccgcagccgagtcggccaatggg

SEQ ID NO: 2325433 - DNA, 25 bp, Homo sapien
cgagtcggccaatgggcgcgcgtcg

SEQ ID NO: 2325434 - DNA, 25 bp, Homo sapien
cggtgttattgtcacgtggccacgg

SEQ ID NO: 2325435 - DNA, 25 bp, Homo sapien
cccccggctggagcggtgttattgt

SEQ ID NO: 2325436 - DNA, 25 bp, Homo sapien
ccgtctatgactctgccaaatggtt

SEQ ID NO: 2325437 - DNA, 25 bp, Homo sapien
cttttgccgtctatgactctgccaa

SEQ ID NO: 2325438 - DNA, 25 bp, Homo sapien
aacaggccttttgccgtctatgact

SEQ ID NO: 2325439 - DNA, 25 bp, Homo sapien
ggaaacaggccttttgccgtctatg

SEQ ID NO: 2325440 - DNA, 25 bp, Homo sapien
ctgtatttgtgtttcaatttccggg

SEQ ID NO: 2325441 - DNA, 25 bp, Homo sapien
ctggaatttcctgtatttgtgtttc

SEQ ID NO: 2325442 - DNA, 25 bp, Homo sapien
ttcttcacattcttcatgaaaagag

SEQ ID NO: 2325443 - DNA, 25 bp, Homo sapien
tttcttcacattcttcatgaaaaga

SEQ ID NO: 2325444 - DNA, 25 bp, Homo sapien
tgagaaaagggaagtcgagaggagt

SEQ ID NO: 2325445 - DNA, 25 bp, Homo sapien
aaggtgcacatatttcaagcagagg

SEQ ID NO: 2325446 - DNA, 25 bp, Homo sapien
aagtcgagaggagtccattccagcc

SEQ ID NO: 2325447 - DNA, 25 bp, Homo sapien
cacatatttcaagcagaggtgagaa

SEQ ID NO: 2325448 - DNA, 25 bp, Homo sapien
gaagttgtgaggccaagcagcaaac

SEQ ID NO: 2325449 - DNA, 25 bp, Homo sapien
aagttgtgaggccaagcagcaaaca

SEQ ID NO: 2325450 - DNA, 25 bp, Homo sapien
atgggaagttgtgaggccaagcagc

SEQ ID NO: 2325451 - DNA, 25 bp, Homo sapien
gggaagttgtgaggccaagcagcaa

SEQ ID NO: 2325452 - DNA, 25 bp, Homo sapien
cgggtagccacacccctcctcctgt

SEQ ID NO: 2325453 - DNA, 25 bp, Homo sapien
gtagccacacccctcctcctgtccc

SEQ ID NO: 2325454 - DNA, 25 bp, Homo sapien
ccgggtagccacacccctcctcctg

SEQ ID NO: 2325455 - DNA, 25 bp, Homo sapien
agccacacccctcctcctgtcccat

SEQ ID NO: 2325456 - DNA, 25 bp, Homo sapien
tcagcctggggtccactctcaggtc

SEQ ID NO: 2325457 - DNA, 25 bp, Homo sapien
tcccagaccactgctcaatccaact

SEQ ID NO: 2325458 - DNA, 25 bp, Homo sapien
agtctgtgtcagaactgaggcctcc

SEQ ID NO: 2325459 - DNA, 25 bp, Homo sapien
ggtccagctgaaccactgccagcgc

SEQ ID NO: 2325460 - DNA, 25 bp, Homo sapien
gcacagggtatcaaaagacacaagc

SEQ ID NO: 2325461 - DNA, 25 bp, Homo sapien
tcttgttctcagtgatgggggcatc

SEQ ID NO: 2325462 - DNA, 25 bp, Homo sapien
tcatgtttgaaatcggagcacaggg

SEQ ID NO: 2325463 - DNA, 25 bp, Homo sapien
gtaatgctaacaacctcagggagag

SEQ ID NO: 2325464 - DNA, 25 bp, Homo sapien
attttgcctaaagtcatgagtggta

SEQ ID NO: 2325465 - DNA, 25 bp, Homo sapien
gcattttgcctaaagtcatgagtgg

SEQ ID NO: 2325466 - DNA, 25 bp, Homo sapien
tcaataagcattttgcctaaagtca

SEQ ID NO: 2325467 - DNA, 25 bp, Homo sapien
taagcattttgcctaaagtcatgag

SEQ ID NO: 2325468 - DNA, 25 bp, Homo sapien
gccaattctgacacatctttcttca

SEQ ID NO: 2325469 - DNA, 25 bp, Homo sapien
tgccaattctgacacatctttcttc

SEQ ID NO: 2325470 - DNA, 25 bp, Homo sapien
ccaattctgacacatctttcttcat

SEQ ID NO: 2325471 - DNA, 25 bp, Homo sapien
acaatctaagcagctgtaggagccc

SEQ ID NO: 2325472 - DNA, 25 bp, Homo sapien
gacacaatctaagcagctgtaggag

SEQ ID NO: 2325473 - DNA, 25 bp, Homo sapien
cacaatctaagcagctgtaggagcc

SEQ ID NO: 2325474 - DNA, 25 bp, Homo sapien
acagacacaatctaagcagctgtag

SEQ ID NO: 2325475 - DNA, 25 bp, Homo sapien
gagggttattgatctataaaagtct

SEQ ID NO: 2325476 - DNA, 25 bp, Homo sapien
cactgtgcttttgcggctccctgaa

SEQ ID NO: 2325477 - DNA, 25 bp, Homo sapien
ttgcggctccctgaaactctctttg

SEQ ID NO: 2325478 - DNA, 25 bp, Homo sapien
gaagatgctttgtaatgcagcaagg

SEQ ID NO: 2325479 - DNA, 25 bp, Homo sapien
gccagtggctgggaagaagatgttc

SEQ ID NO: 2325480 - DNA, 25 bp, Homo sapien
ccagtggctgggaagaagatgttca

SEQ ID NO: 2325481 - DNA, 25 bp, Homo sapien
ttaaatgagtttctggcagccagtg

SEQ ID NO: 2325482 - DNA, 25 bp, Homo sapien
gcagccagtggctgggaagaagatg

SEQ ID NO: 2325483 - DNA, 25 bp, Homo sapien
ccggagcgtcagcagctacttctgt

SEQ ID NO: 2325484 - DNA, 25 bp, Homo sapien
tctcataaaaagtaagaattttgca

SEQ ID NO: 2325485 - DNA, 25 bp, Homo sapien
gtaagaattttgcattcatcaatca

SEQ ID NO: 2325486 - DNA, 25 bp, Homo sapien
aaagtaagaattttgcattcatcaa

SEQ ID NO: 2325487 - DNA, 25 bp, Homo sapien
aacaaggcaccgtagtaccagtcag

SEQ ID NO: 2325488 - DNA, 25 bp, Homo sapien
aaattgaaaagtttgtggattctgc

SEQ ID NO: 2325489 - DNA, 25 bp, Homo sapien
caggcaacaaggcaccgtagtacca

SEQ ID NO: 2325490 - DNA, 25 bp, Homo sapien
ggcaacaaggcaccgtagtaccagt

SEQ ID NO: 2325491 - DNA, 25 bp, Homo sapien
gaatcttctgtgcttcggtcctagg

SEQ ID NO: 2325492 - DNA, 25 bp, Homo sapien
cttacaacatgctcacagacatcat

SEQ ID NO: 2325493 - DNA, 25 bp, Homo sapien
tggagtagtaagacgctgaatcttc

SEQ ID NO: 2325494 - DNA, 25 bp, Homo sapien
gctttcttacaacatgctcacagac

SEQ ID NO: 2325495 - DNA, 25 bp, Homo sapien
gaggccctgggtttggctcagaaaa

SEQ ID NO: 2325496 - DNA, 25 bp, Homo sapien
cagaaaagggtgattatttaactct

SEQ ID NO: 2325497 - DNA, 25 bp, Homo sapien
tcttcttcggcagttttcttcataa

SEQ ID NO: 2325498 - DNA, 25 bp, Homo sapien
taactcttcttcggcagttttcttc

SEQ ID NO: 2325499 - DNA, 25 bp, Homo sapien
tgaaatatgtacttggcttcgctgg

SEQ ID NO: 2325500 - DNA, 25 bp, Homo sapien
ctagcccatgacaggttcttctccc

SEQ ID NO: 2325501 - DNA, 25 bp, Homo sapien
tcttctcccatctcatcagagggcc

SEQ ID NO: 2325502 - DNA, 25 bp, Homo sapien
tagcccatgacaggttcttctccca

SEQ ID NO: 2325503 - DNA, 25 bp, Homo sapien
atcagagggcctctgagcaccgtcc

SEQ ID NO: 2325504 - DNA, 25 bp, Homo sapien
tccagatatctaagaaacacaatgg

SEQ ID NO: 2325505 - DNA, 25 bp, Homo sapien
gcttcatgctcattgggccatggag

SEQ ID NO: 2325506 - DNA, 25 bp, Homo sapien
aagaagtaatagactcttgccccgg

SEQ ID NO: 2325507 - DNA, 25 bp, Homo sapien
tcagattaccactcttaaaaagaag

SEQ ID NO: 2325508 - DNA, 25 bp, Homo sapien
aggttgaggctccacacaaccatcc

SEQ ID NO: 2325509 - DNA, 25 bp, Homo sapien
caggttgaggctccacacaaccatc

SEQ ID NO: 2325510 - DNA, 25 bp, Homo sapien
tccacacaaccatcctctcatcttc

SEQ ID NO: 2325511 - DNA, 25 bp, Homo sapien
ctccacacaaccatcctctcatctt

SEQ ID NO: 2325512 - DNA, 25 bp, Homo sapien
taataatgattgatctatcctcctt

SEQ ID NO: 2325513 - DNA, 25 bp, Homo sapien
tttgtgtatgcccttataaccgtgt

SEQ ID NO: 2325514 - DNA, 25 bp, Homo sapien
taaccgtgtcattagctataataat

SEQ ID NO: 2325515 - DNA, 25 bp, Homo sapien
tgattgatctatcctccttccagcc

SEQ ID NO: 2325516 - DNA, 25 bp, Homo sapien
tgggctttctatgggccacgggctc

SEQ ID NO: 2325517 - DNA, 25 bp, Homo sapien
ggtgggctttctatgggccacgggc

SEQ ID NO: 2325518 - DNA, 25 bp, Homo sapien
atgggccacgggctctgctcagcag

SEQ ID NO: 2325519 - DNA, 25 bp, Homo sapien
ctttctatgggccacgggctctgct

SEQ ID NO: 2325520 - DNA, 25 bp, Homo sapien
gagggtcctgcatttccagcacaca

SEQ ID NO: 2325521 - DNA, 25 bp, Homo sapien
ccagcacacaacaccgagtacagta

SEQ ID NO: 2325522 - DNA, 25 bp, Homo sapien
atctttcgactgtcctccaggaatg

SEQ ID NO: 2325523 - DNA, 25 bp, Homo sapien
ccttgttcatatgcttgccccacag

SEQ ID NO: 2325524 - DNA, 25 bp, Homo sapien
tatttctcacgggtttagatccacc

SEQ ID NO: 2325525 - DNA, 25 bp, Homo sapien
taatctatttctggggctcttggca

SEQ ID NO: 2325526 - DNA, 25 bp, Homo sapien
tctcccttaagcttctctgatttct

SEQ ID NO: 2325527 - DNA, 25 bp, Homo sapien
attttcttataggatgaaatctctc

SEQ ID NO: 2325528 - DNA, 25 bp, Homo sapien
caagctggagcaaagttacaaatca

SEQ ID NO: 2325529 - DNA, 25 bp, Homo sapien
gctggtattccaggccttggaggtt

SEQ ID NO: 2325530 - DNA, 25 bp, Homo sapien
ttggaggttatttccaagccaagtc

SEQ ID NO: 2325531 - DNA, 25 bp, Homo sapien
ggtgcacccaggtaaggctgtcaat

SEQ ID NO: 2325532 - DNA, 25 bp, Homo sapien
tactcttatgaacgaaaattacagt

SEQ ID NO: 2325533 - DNA, 25 bp, Homo sapien
gaaaattgacatctgtgagcggaat

SEQ ID NO: 2325534 - DNA, 25 bp, Homo sapien
tttgtggtgcatccataatgggcag

SEQ ID NO: 2325535 - DNA, 25 bp, Homo sapien
taaaatgctaagtcaggaaatatac

SEQ ID NO: 2325536 - DNA, 25 bp, Homo sapien
ggacagatgtagcaatcaattcgga

SEQ ID NO: 2325537 - DNA, 25 bp, Homo sapien
taataagcaccagctcatcaggaca

SEQ ID NO: 2325538 - DNA, 25 bp, Homo sapien
tcaattcggacagataccagctctt

SEQ ID NO: 2325539 - DNA, 25 bp, Homo sapien
gggaatagcacacgcaaaactctgg

SEQ ID NO: 2325540 - DNA, 25 bp, Homo sapien
taagaaagagaatttctatggcaaa

SEQ ID NO: 2325541 - DNA, 25 bp, Homo sapien
ggcatagtcaaataataactgctgg

SEQ ID NO: 2325542 - DNA, 25 bp, Homo sapien
gtcaaataataactgctggctgcat

SEQ ID NO: 2325543 - DNA, 25 bp, Homo sapien
gaatcaacaggcatagtcaaataat

SEQ ID NO: 2325544 - DNA, 25 bp, Homo sapien
caacagccactgaccgatatctagg

SEQ ID NO: 2325545 - DNA, 25 bp, Homo sapien
cactgaccgatatctaggtcctgca

SEQ ID NO: 2325546 - DNA, 25 bp, Homo sapien
tgcagatggccactgaaggtgccac

SEQ ID NO: 2325547 - DNA, 25 bp, Homo sapien
tggtgctaccagaaatactattgca

SEQ ID NO: 2325548 - DNA, 25 bp, Homo sapien
catttgagcaaacgcggcctatttt

SEQ ID NO: 2325549 - DNA, 25 bp, Homo sapien
ccatttgagcaaacgcggcctattt

SEQ ID NO: 2325550 - DNA, 25 bp, Homo sapien
gtaaccatttgagcaaacgcggcct

SEQ ID NO: 2325551 - DNA, 25 bp, Homo sapien
aaccatttgagcaaacgcggcctat

SEQ ID NO: 2325552 - DNA, 25 bp, Homo sapien
ggaaaagcaagcatatacacgtttt

SEQ ID NO: 2325553 - DNA, 25 bp, Homo sapien
gtcatgtgattcagactgcctgagg

SEQ ID NO: 2325554 - DNA, 25 bp, Homo sapien
atacacgttttttgtcatgtgattc

SEQ ID NO: 2325555 - DNA, 25 bp, Homo sapien
catgtgattcagactgcctgaggca

SEQ ID NO: 2325556 - DNA, 25 bp, Homo sapien
tttgatgttaagtagacaggagctg

SEQ ID NO: 2325557 - DNA, 25 bp, Homo sapien
tgttaagtagacaggagctgctaat

SEQ ID NO: 2325558 - DNA, 25 bp, Homo sapien
agtagacaggagctgctaatactgt

SEQ ID NO: 2325559 - DNA, 25 bp, Homo sapien
gatgttaagtagacaggagctgcta

SEQ ID NO: 2325560 - DNA, 25 bp, Homo sapien
cattggctgcattcgctgcctcctg

SEQ ID NO: 2325561 - DNA, 25 bp, Homo sapien
tactttatatttggccactttatgc

SEQ ID NO: 2325562 - DNA, 25 bp, Homo sapien
gcttgatatgcgtacaaacccatga

SEQ ID NO: 2325563 - DNA, 25 bp, Homo sapien
ttatgctggtaagcaatgcttccat

SEQ ID NO: 2325564 - DNA, 25 bp, Homo sapien
caattaaatgcacatatggcccata

SEQ ID NO: 2325565 - DNA, 25 bp, Homo sapien
tcttgcctggaaagttgcaaattca

SEQ ID NO: 2325566 - DNA, 25 bp, Homo sapien
tatggcccatagcagtaagcattca

SEQ ID NO: 2325567 - DNA, 25 bp, Homo sapien
agactatccatttggcatcttgcct

SEQ ID NO: 2325568 - DNA, 25 bp, Homo sapien
gttacagtttctaacagctgtttct

SEQ ID NO: 2325569 - DNA, 25 bp, Homo sapien
catctaaacacgaagtcaggttatg

SEQ ID NO: 2325570 - DNA, 25 bp, Homo sapien
tacagtttctaacagctgtttctcc

SEQ ID NO: 2325571 - DNA, 25 bp, Homo sapien
aagtcaggttatgccacagcatcct

SEQ ID NO: 2325572 - DNA, 25 bp, Homo sapien
aatgacagccaaataatggaaaatg

SEQ ID NO: 2325573 - DNA, 25 bp, Homo sapien
tacagtaaaaactgttagtgatagt

SEQ ID NO: 2325574 - DNA, 25 bp, Homo sapien
cagtaaaaactgttagtgatagttt

SEQ ID NO: 2325575 - DNA, 25 bp, Homo sapien
atgatacagtaaaaactgttagtga

SEQ ID NO: 2325576 - DNA, 25 bp, Homo sapien
tagggaagacagatgaaacagtact

SEQ ID NO: 2325577 - DNA, 25 bp, Homo sapien
gaagacagatgaaacagtactttcc

SEQ ID NO: 2325578 - DNA, 25 bp, Homo sapien
tcatagggaagacagatgaaacagt

SEQ ID NO: 2325579 - DNA, 25 bp, Homo sapien
gggaagacagatgaaacagtacttt

SEQ ID NO: 2325580 - DNA, 25 bp, Homo sapien
gcgggtgtgtgtaatctcagcgact

SEQ ID NO: 2325581 - DNA, 25 bp, Homo sapien
gtgtgtgtaatctcagcgacttggg

SEQ ID NO: 2325582 - DNA, 25 bp, Homo sapien
gctatgtggcgggtgtgtgtaatct

SEQ ID NO: 2325583 - DNA, 25 bp, Homo sapien
tatgtggcgggtgtgtgtaatctca

SEQ ID NO: 2325584 - DNA, 25 bp, Homo sapien
cctgaggtgaggcataccctcagct

SEQ ID NO: 2325585 - DNA, 25 bp, Homo sapien
tgaggcataccctcagcttatgaag

SEQ ID NO: 2325586 - DNA, 25 bp, Homo sapien
gaggtgaggcataccctcagcttat

SEQ ID NO: 2325587 - DNA, 25 bp, Homo sapien
gtggtcctgaggtgaggcataccct

SEQ ID NO: 2325588 - DNA, 25 bp, Homo sapien
ggtacgaagattgcatgcttcaaag

SEQ ID NO: 2325589 - DNA, 25 bp, Homo sapien
acagggagtaggtacgaagattgca

SEQ ID NO: 2325590 - DNA, 25 bp, Homo sapien
acgaagattgcatgcttcaaagggc

SEQ ID NO: 2325591 - DNA, 25 bp, Homo sapien
ggagtaggtacgaagattgcatgct

SEQ ID NO: 2325592 - DNA, 25 bp, Homo sapien
ccactgtaggatagggcaccagaca

SEQ ID NO: 2325593 - DNA, 25 bp, Homo sapien
gaatagtcagtagcagtagtcaggc

SEQ ID NO: 2325594 - DNA, 25 bp, Homo sapien
gagaagaacctagtcctgggaagat

SEQ ID NO: 2325595 - DNA, 25 bp, Homo sapien
gcttctgctagatgaaagcctagga

SEQ ID NO: 2325596 - DNA, 25 bp, Homo sapien
gtgctgcccagtcacaataaaaagc

SEQ ID NO: 2325597 - DNA, 25 bp, Homo sapien
tcccctgagcagaggttgcatggca

SEQ ID NO: 2325598 - DNA, 25 bp, Homo sapien
agaagcctccactgatcatgctcct

SEQ ID NO: 2325599 - DNA, 25 bp, Homo sapien
aactatcctcacaaaaagcaccttg

SEQ ID NO: 2325600 - DNA, 25 bp, Homo sapien
aaatgctggcaccttattctaggac

SEQ ID NO: 2325601 - DNA, 25 bp, Homo sapien
gcagctttcaccagatactaaatgc

SEQ ID NO: 2325602 - DNA, 25 bp, Homo sapien
tttgccatgtgaggagtcagcctca

SEQ ID NO: 2325603 - DNA, 25 bp, Homo sapien
ggtcttgccataacacactgtcttg

SEQ ID NO: 2325604 - DNA, 25 bp, Homo sapien
ttgggtggataggtgcagtaaacca

SEQ ID NO: 2325605 - DNA, 25 bp, Homo sapien
tttcctacactgtgttcatgtcctt

SEQ ID NO: 2325606 - DNA, 25 bp, Homo sapien
ttttttcctacactgtgttcatgtc

SEQ ID NO: 2325607 - DNA, 25 bp, Homo sapien
tttttcctacactgtgttcatgtcc

SEQ ID NO: 2325608 - DNA, 25 bp, Homo sapien
tcttttttcctacactgtgttcatg

SEQ ID NO: 2325609 - DNA, 25 bp, Homo sapien
gtcctccagttttcatattggcttc

SEQ ID NO: 2325610 - DNA, 25 bp, Homo sapien
tattggcttcctgtcaaggtttgca

SEQ ID NO: 2325611 - DNA, 25 bp, Homo sapien
cacttttgtcctccagttttcatat

SEQ ID NO: 2325612 - DNA, 25 bp, Homo sapien
ttcatattggcttcctgtcaaggtt

SEQ ID NO: 2325613 - DNA, 25 bp, Homo sapien
gtctttctacagagcggttattatc

SEQ ID NO: 2325614 - DNA, 25 bp, Homo sapien
cctgtaatgaacacgaatacctact

SEQ ID NO: 2325615 - DNA, 25 bp, Homo sapien
ttcaggaaatgattagcttcttctg

SEQ ID NO: 2325616 - DNA, 25 bp, Homo sapien
gaaattagcttggaggtcacataga

SEQ ID NO: 2325617 - DNA, 25 bp, Homo sapien
cgctgtcaacgggtgaatggaatta

SEQ ID NO: 2325618 - DNA, 25 bp, Homo sapien
atttatggcccctgacgtgtcctcg

SEQ ID NO: 2325619 - DNA, 25 bp, Homo sapien
tttatctggtctctggcgcagggtg

SEQ ID NO: 2325620 - DNA, 25 bp, Homo sapien
agccgattcgcctcgctgtcaacgg

SEQ ID NO: 2325621 - DNA, 25 bp, Homo sapien
ccttcaaatagtaaggaagccttat

SEQ ID NO: 2325622 - DNA, 25 bp, Homo sapien
ccttcggtccctactggttctccag

SEQ ID NO: 2325623 - DNA, 25 bp, Homo sapien
tgttactttctctaagctttctagc

SEQ ID NO: 2325624 - DNA, 25 bp, Homo sapien
gctttctagcttggttccaggtaac

SEQ ID NO: 2325625 - DNA, 25 bp, Homo sapien
tagactatctgggagcacatgctgc

SEQ ID NO: 2325626 - DNA, 25 bp, Homo sapien
gttgtaagttttctgcggcctcgca

SEQ ID NO: 2325627 - DNA, 25 bp, Homo sapien
ttcaaattacggcagctatacaggc

SEQ ID NO: 2325628 - DNA, 25 bp, Homo sapien
tattcataaggcaggaaccctcaca

SEQ ID NO: 2325629 - DNA, 25 bp, Homo sapien
tgagagacttctcacggatgtgaaa

SEQ ID NO: 2325630 - DNA, 25 bp, Homo sapien
tactttgttgctgcgtcctactgag

SEQ ID NO: 2325631 - DNA, 25 bp, Homo sapien
cattgcgtcctgaaatggctgaaga

SEQ ID NO: 2325632 - DNA, 25 bp, Homo sapien
cctactgagaggaaacattgcgtcc

SEQ ID NO: 2325633 - DNA, 25 bp, Homo sapien
gggaagaaagagtgattctatcaat

SEQ ID NO: 2325634 - DNA, 25 bp, Homo sapien
cacatttactgcctaatgatgttca

SEQ ID NO: 2325635 - DNA, 25 bp, Homo sapien
ccttaggtctcaacaattaattcag

SEQ ID NO: 2325636 - DNA, 25 bp, Homo sapien
gtcgattaggccagaccttaggtct

SEQ ID NO: 2325637 - DNA, 25 bp, Homo sapien
tcactttacagtagtcagacttcag

SEQ ID NO: 2325638 - DNA, 25 bp, Homo sapien
tacagtagtcagacttcagctttcg

SEQ ID NO: 2325639 - DNA, 25 bp, Homo sapien
tttcggatggggttcaaggactgct

SEQ ID NO: 2325640 - DNA, 25 bp, Homo sapien
agtcagacttcagctttcggatggg

SEQ ID NO: 2325641 - DNA, 25 bp, Homo sapien
attagttccctgtatttcacgcaat

SEQ ID NO: 2325642 - DNA, 25 bp, Homo sapien
ctcttgagactggttagtctcttga

SEQ ID NO: 2325643 - DNA, 25 bp, Homo sapien
tgagactggttagtctcttgataca

SEQ ID NO: 2325644 - DNA, 25 bp, Homo sapien
tccctgtatttcacgcaatctaaaa

SEQ ID NO: 2325645 - DNA, 25 bp, Homo sapien
aaagtatcacatcttaagattgact

SEQ ID NO: 2325646 - DNA, 25 bp, Homo sapien
aagtatcacatcttaagattgactc

SEQ ID NO: 2325647 - DNA, 25 bp, Homo sapien
agtaactctgttggcaccaagagtc

SEQ ID NO: 2325648 - DNA, 25 bp, Homo sapien
gagtctttggttccccagatcacct

SEQ ID NO: 2325649 - DNA, 25 bp, Homo sapien
tagagagagaacctgcgtttgacac

SEQ ID NO: 2325650 - DNA, 25 bp, Homo sapien
ccaagtctggcaatttgaactgcta

SEQ ID NO: 2325651 - DNA, 25 bp, Homo sapien
caagaacctgctttgacgtgcacta

SEQ ID NO: 2325652 - DNA, 25 bp, Homo sapien
gaagagaggcaactgatcattaact

SEQ ID NO: 2325653 - DNA, 25 bp, Homo sapien
ccttgtgaaccattgctctttttag

SEQ ID NO: 2325654 - DNA, 25 bp, Homo sapien
gtttccctgatctatggactcctct

SEQ ID NO: 2325655 - DNA, 25 bp, Homo sapien
ttcaccaagacataagtttccctga

SEQ ID NO: 2325656 - DNA, 25 bp, Homo sapien
ggtgtttagaaacatggtcttccat

SEQ ID NO: 2325657 - DNA, 25 bp, Homo sapien
tgaggcaggattaagaacagtacca

SEQ ID NO: 2325658 - DNA, 25 bp, Homo sapien
aagaacagtaccacagcaaggtgaa

SEQ ID NO: 2325659 - DNA, 25 bp, Homo sapien
cactgaggcaggattaagaacagta

SEQ ID NO: 2325660 - DNA, 25 bp, Homo sapien
gaacagtaccacagcaaggtgaacc

SEQ ID NO: 2325661 - DNA, 25 bp, Homo sapien
gtgttgatagatgtccacttgaaca

SEQ ID NO: 2325662 - DNA, 25 bp, Homo sapien
acagatttctttggattatatgtgg

SEQ ID NO: 2325663 - DNA, 25 bp, Homo sapien
tagatgtccacttgaacagatttct

SEQ ID NO: 2325664 - DNA, 25 bp, Homo sapien
gaagagtgatatttgaaggcaatac

SEQ ID NO: 2325665 - DNA, 25 bp, Homo sapien
taaaagctgctccaaccacaatcca

SEQ ID NO: 2325666 - DNA, 25 bp, Homo sapien
tacataacagccagcataatggatg

SEQ ID NO: 2325667 - DNA, 25 bp, Homo sapien
actgtaggtagtgtggaatatttgc

SEQ ID NO: 2325668 - DNA, 25 bp, Homo sapien
tgaagaatacggtgacagctttggg

SEQ ID NO: 2325669 - DNA, 25 bp, Homo sapien
gtccaaatctgtcgccagtaactgt

SEQ ID NO: 2325670 - DNA, 25 bp, Homo sapien
ccagaatggctgattcttccaagtc

SEQ ID NO: 2325671 - DNA, 25 bp, Homo sapien
gaaactggcagtccaaatctgtcgc

SEQ ID NO: 2325672 - DNA, 25 bp, Homo sapien
gttaccatggagacaaagccaattc

SEQ ID NO: 2325673 - DNA, 25 bp, Homo sapien
ccccatgtaaagtagttcatcacaa

SEQ ID NO: 2325674 - DNA, 25 bp, Homo sapien
gtgttctaatgttcaatccccatgt

SEQ ID NO: 2325675 - DNA, 25 bp, Homo sapien
caccaacctgctatgttaaagcctt

SEQ ID NO: 2325676 - DNA, 25 bp, Homo sapien
tctcggcctccagtaaaataagctc

SEQ ID NO: 2325677 - DNA, 25 bp, Homo sapien
cctctgtagggaaagtgtgtcctgg

SEQ ID NO: 2325678 - DNA, 25 bp, Homo sapien
ttcaaaggctctaagcacacttcca

SEQ ID NO: 2325679 - DNA, 25 bp, Homo sapien
ttccaatctgttgttgacctctgtc

SEQ ID NO: 2325680 - DNA, 25 bp, Homo sapien
ggctctaagcacacttccaatctgt

SEQ ID NO: 2325681 - DNA, 25 bp, Homo sapien
taacacgtcaatcaactgatggaat

SEQ ID NO: 2325682 - DNA, 25 bp, Homo sapien
cagcgatcccataataacacgtcaa

SEQ ID NO: 2325683 - DNA, 25 bp, Homo sapien
tgtgttctttagacagcgatcccat

SEQ ID NO: 2325684 - DNA, 25 bp, Homo sapien
tacagctattgcatatgataccaac

SEQ ID NO: 2325685 - DNA, 25 bp, Homo sapien
ggcattcagaaaactcctaactttc

SEQ ID NO: 2325686 - DNA, 25 bp, Homo sapien
gaaggtgccacaaaatcctggaagt

SEQ ID NO: 2325687 - DNA, 25 bp, Homo sapien
ctcatcctacctcgcactgacactc

SEQ ID NO: 2325688 - DNA, 25 bp, Homo sapien
actgacactccctgaatggcattca

SEQ ID NO: 2325689 - DNA, 25 bp, Homo sapien
cagctaaattgtcagcaagccacat

SEQ ID NO: 2325690 - DNA, 25 bp, Homo sapien
ggtgtagggtcagctaaattgtcag

SEQ ID NO: 2325691 - DNA, 25 bp, Homo sapien
tagggtcagctaaattgtcagcaag

SEQ ID NO: 2325692 - DNA, 25 bp, Homo sapien
ccaggtgtagggtcagctaaattgt

SEQ ID NO: 2325693 - DNA, 25 bp, Homo sapien
cataagactatccatgtggacggga

SEQ ID NO: 2325694 - DNA, 25 bp, Homo sapien
tagacagtgctaacggagaggtgcc

SEQ ID NO: 2325695 - DNA, 25 bp, Homo sapien
tgatgtggacacctgcaagctaagg

SEQ ID NO: 2325696 - DNA, 25 bp, Homo sapien
gaaagcttgcagactactcagtaga

SEQ ID NO: 2325697 - DNA, 25 bp, Homo sapien
tggtgaagagacttgagagcaagtc

SEQ ID NO: 2325698 - DNA, 25 bp, Homo sapien
cataatcacaagtggtgaagagact

SEQ ID NO: 2325699 - DNA, 25 bp, Homo sapien
ttagtggaggaaaatagtactgggc

SEQ ID NO: 2325700 - DNA, 25 bp, Homo sapien
catgaaactttcttaaatctaataa

SEQ ID NO: 2325701 - DNA, 25 bp, Homo sapien
aactatactacaaggctacagtcac

SEQ ID NO: 2325702 - DNA, 25 bp, Homo sapien
tttctgcatctgctacctgacttca

SEQ ID NO: 2325703 - DNA, 25 bp, Homo sapien
gccttttctgcatctgctacctgac

SEQ ID NO: 2325704 - DNA, 25 bp, Homo sapien
ccttttctgcatctgctacctgact

SEQ ID NO: 2325705 - DNA, 25 bp, Homo sapien
caaattgatgtttccttgcttcttg

SEQ ID NO: 2325706 - DNA, 25 bp, Homo sapien
aattgatgtttccttgcttcttgaa

SEQ ID NO: 2325707 - DNA, 25 bp, Homo sapien
ggcttcagagattcccgtgaatttt

SEQ ID NO: 2325708 - DNA, 25 bp, Homo sapien
cagagattcccgtgaattttcttca

SEQ ID NO: 2325709 - DNA, 25 bp, Homo sapien
attcattaataagactgttactttt

SEQ ID NO: 2325710 - DNA, 25 bp, Homo sapien
cattaataagactgttacttttctt

SEQ ID NO: 2325711 - DNA, 25 bp, Homo sapien
ttaataagactgttacttttcttga

SEQ ID NO: 2325712 - DNA, 25 bp, Homo sapien
ttcattaataagactgttacttttc

SEQ ID NO: 2325713 - DNA, 25 bp, Homo sapien
tagactcgagatcctcccaactaag

SEQ ID NO: 2325714 - DNA, 25 bp, Homo sapien
taagaagcaactctccttgattcaa

SEQ ID NO: 2325715 - DNA, 25 bp, Homo sapien
gtagcatgcgatgtcatttgacagc

SEQ ID NO: 2325716 - DNA, 25 bp, Homo sapien
gacctcctcccataacagtgaatga

SEQ ID NO: 2325717 - DNA, 25 bp, Homo sapien
cataataagcctcctgctatcacca

SEQ ID NO: 2325718 - DNA, 25 bp, Homo sapien
aagacagcataataagcctcctgct

SEQ ID NO: 2325719 - DNA, 25 bp, Homo sapien
accaccggccggctgccgtatttat

SEQ ID NO: 2325720 - DNA, 25 bp, Homo sapien
ccggctgccgtatttattcaccaaa

SEQ ID NO: 2325721 - DNA, 25 bp, Homo sapien
accacgctgctactaaaggaggcca

SEQ ID NO: 2325722 - DNA, 25 bp, Homo sapien
gctgtaccacgctgctactaaagga

SEQ ID NO: 2325723 - DNA, 25 bp, Homo sapien
tacagctgtaccacgctgctactaa

SEQ ID NO: 2325724 - DNA, 25 bp, Homo sapien
agtgaggtacagctgtaccacgctg

SEQ ID NO: 2325725 - DNA, 25 bp, Homo sapien
ccaattatggttaaggcgggttgca

SEQ ID NO: 2325726 - DNA, 25 bp, Homo sapien
tgccatgggtcgcttcctatagaag

SEQ ID NO: 2325727 - DNA, 25 bp, Homo sapien
ggaaaatcttggtgcacccacgagg

SEQ ID NO: 2325728 - DNA, 25 bp, Homo sapien
acaattgtgacaagtccgacggcac

SEQ ID NO: 2325729 - DNA, 25 bp, Homo sapien
catttaaaatctagcctggtgccat

SEQ ID NO: 2325730 - DNA, 25 bp, Homo sapien
tactgtgaagtaatctgggcatggt

SEQ ID NO: 2325731 - DNA, 25 bp, Homo sapien
gaatggcttcacctaacctgttgtt

SEQ ID NO: 2325732 - DNA, 25 bp, Homo sapien
ggcttttacatggttcctaacagtg

SEQ ID NO: 2325733 - DNA, 25 bp, Homo sapien
cacacgcttgctgctaccacaatag

SEQ ID NO: 2325734 - DNA, 25 bp, Homo sapien
tagccccacaggacatgtacatgta

SEQ ID NO: 2325735 - DNA, 25 bp, Homo sapien
ttgccaatgagcagccacacgcttg

SEQ ID NO: 2325736 - DNA, 25 bp, Homo sapien
caagggttcagattctctggtcttc

SEQ ID NO: 2325737 - DNA, 25 bp, Homo sapien
cacacccagagtcaggtatggaaat

SEQ ID NO: 2325738 - DNA, 25 bp, Homo sapien
ccaagaccgaaagtcactggaagac

SEQ ID NO: 2325739 - DNA, 25 bp, Homo sapien
tgtaggattaggcatcctccttcta

SEQ ID NO: 2325740 - DNA, 25 bp, Homo sapien
tgtgactcctcatttcagctaaaac

SEQ ID NO: 2325741 - DNA, 25 bp, Homo sapien
caacattgtaaagtagcacgcagac

SEQ ID NO: 2325742 - DNA, 25 bp, Homo sapien
gagggttctattctctagcaccagg

SEQ ID NO: 2325743 - DNA, 25 bp, Homo sapien
tacgattgcaagtcatacagtgcct

SEQ ID NO: 2325744 - DNA, 25 bp, Homo sapien
tccagtggttgagcacaaggcctgt

SEQ ID NO: 2325745 - DNA, 25 bp, Homo sapien
tttgacgtgacgagaaactcatcag

SEQ ID NO: 2325746 - DNA, 25 bp, Homo sapien
gaaggccactgaaatgcacccagga

SEQ ID NO: 2325747 - DNA, 25 bp, Homo sapien
cttctaacaagttcaagagggtggg

SEQ ID NO: 2325748 - DNA, 25 bp, Homo sapien
gctactgccaggtgtgactgtacaa

SEQ ID NO: 2325749 - DNA, 25 bp, Homo sapien
tttaactttgggtagtctgctgagc

SEQ ID NO: 2325750 - DNA, 25 bp, Homo sapien
cctctattgggaggcagcacggtag

SEQ ID NO: 2325751 - DNA, 25 bp, Homo sapien
gcaaatgcagttctctaataaacac

SEQ ID NO: 2325752 - DNA, 25 bp, Homo sapien
catattcaggttctagcaaatgcag

SEQ ID NO: 2325753 - DNA, 25 bp, Homo sapien
gagaaaaagagtcatattgaagtaa

SEQ ID NO: 2325754 - DNA, 25 bp, Homo sapien
gaaaaaatgtattatgcctgactca

SEQ ID NO: 2325755 - DNA, 25 bp, Homo sapien
tgtagcaaccaatctgggaattatt

SEQ ID NO: 2325756 - DNA, 25 bp, Homo sapien
ttttgaatcatgatatgtagcaacc

SEQ ID NO: 2325757 - DNA, 25 bp, Homo sapien
cagattgtagcaccctgtaaagagc

SEQ ID NO: 2325758 - DNA, 25 bp, Homo sapien
tgtagatcatgcaaacaagtgtaac

SEQ ID NO: 2325759 - DNA, 25 bp, Homo sapien
gataattgggcctttcagcttttaa

SEQ ID NO: 2325760 - DNA, 25 bp, Homo sapien
taagtgccttctcaaacatgagttc

SEQ ID NO: 2325761 - DNA, 25 bp, Homo sapien
tacggcttctgtagtgcaatggaga

SEQ ID NO: 2325762 - DNA, 25 bp, Homo sapien
taacgctgtagtatacctgaaaggc

SEQ ID NO: 2325763 - DNA, 25 bp, Homo sapien
cagtcttagcatacgggtgtcggtt

SEQ ID NO: 2325764 - DNA, 25 bp, Homo sapien
tacagatgtttttagggcccaccca

SEQ ID NO: 2325765 - DNA, 25 bp, Homo sapien
acagaggaacatggacagggttaaa

SEQ ID NO: 2325766 - DNA, 25 bp, Homo sapien
agcacagacctgcagtaaaaattag

SEQ ID NO: 2325767 - DNA, 25 bp, Homo sapien
cagaggaacatggacagggttaaac

SEQ ID NO: 2325768 - DNA, 25 bp, Homo sapien
gactattttgcgtacagagttccag

SEQ ID NO: 2325769 - DNA, 25 bp, Homo sapien
gttccagtgcactgaaactactgca

SEQ ID NO: 2325770 - DNA, 25 bp, Homo sapien
gaaatgcccttaatttggtctggtg

SEQ ID NO: 2325771 - DNA, 25 bp, Homo sapien
tatttttggccgtgtctgacttcta

SEQ ID NO: 2325772 - DNA, 25 bp, Homo sapien
agcagcggcaacagccgcgaacagc

SEQ ID NO: 2325773 - DNA, 25 bp, Homo sapien
agcgcgctgcgctgagttctgcaca

SEQ ID NO: 2325774 - DNA, 25 bp, Homo sapien
aacactggaggcgtatttgtagcgg

SEQ ID NO: 2325775 - DNA, 25 bp, Homo sapien
tttgtagcgggcaacagccccagcc

SEQ ID NO: 2325776 - DNA, 25 bp, Homo sapien
tgtccctgcacttggacctcaggct

SEQ ID NO: 2325777 - DNA, 25 bp, Homo sapien
gaatggagagactcggggaactcta

SEQ ID NO: 2325778 - DNA, 25 bp, Homo sapien
caggcgctgtactgcaagatgagag

SEQ ID NO: 2325779 - DNA, 25 bp, Homo sapien
tccctgcacttggacctcaggctgg

SEQ ID NO: 2325780 - DNA, 25 bp, Homo sapien
ttgtaactgatcacaacaggtcacg

SEQ ID NO: 2325781 - DNA, 25 bp, Homo sapien
tgatcacaacaggtcacggatgtgg

SEQ ID NO: 2325782 - DNA, 25 bp, Homo sapien
caggtcacggatgtggacttgctac

SEQ ID NO: 2325783 - DNA, 25 bp, Homo sapien
cacggatgtggacttgctacctatt

SEQ ID NO: 2325784 - DNA, 25 bp, Homo sapien
caaagacacaggagtaaaagctgca

SEQ ID NO: 2325785 - DNA, 25 bp, Homo sapien
aagctgcaattttattaaatagacc

SEQ ID NO: 2325786 - DNA, 25 bp, Homo sapien
aagacacaggagtaaaagctgcaat

SEQ ID NO: 2325787 - DNA, 25 bp, Homo sapien
gacacaggagtaaaagctgcaattt

SEQ ID NO: 2325788 - DNA, 25 bp, Homo sapien
cctagataaacacgctgagtgccat

SEQ ID NO: 2325789 - DNA, 25 bp, Homo sapien
acacgctgccctagataaacacgct

SEQ ID NO: 2325790 - DNA, 25 bp, Homo sapien
cagtttgaggtattgcaggaggact

SEQ ID NO: 2325791 - DNA, 25 bp, Homo sapien
ctatttagttgtgcagtttgaggta

SEQ ID NO: 2325792 - DNA, 25 bp, Homo sapien
tattgaggctttgcaaaatggctgc

SEQ ID NO: 2325793 - DNA, 25 bp, Homo sapien
gcctctcttgcacgtgatcatgatt

SEQ ID NO: 2325794 - DNA, 25 bp, Homo sapien
attctaccatatttaggatgttgtt

SEQ ID NO: 2325795 - DNA, 25 bp, Homo sapien
taatgtctttctgatatgagttcta

SEQ ID NO: 2325796 - DNA, 25 bp, Homo sapien
tgcttatctgaccataacagctcca

SEQ ID NO: 2325797 - DNA, 25 bp, Homo sapien
gccaaccttgccctgtccaaacagc

SEQ ID NO: 2325798 - DNA, 25 bp, Homo sapien
cttctcctagagataagcagtccct

SEQ ID NO: 2325799 - DNA, 25 bp, Homo sapien
agctccatgggacaaagttcttctc

SEQ ID NO: 2325800 - DNA, 25 bp, Homo sapien
aactcaacagtaatgaaatggccaa

SEQ ID NO: 2325801 - DNA, 25 bp, Homo sapien
tttcaggaatttacagagcaaggca

SEQ ID NO: 2325802 - DNA, 25 bp, Homo sapien
ggcacaaccagaagattttcctgat

SEQ ID NO: 2325803 - DNA, 25 bp, Homo sapien
gaagtgtgtaaatgcaaggaggaac

SEQ ID NO: 2325804 - DNA, 25 bp, Homo sapien
ggaagcaggtcttgcagcatggtct

SEQ ID NO: 2325805 - DNA, 25 bp, Homo sapien
tgtgcccacaacaaagataactgac

SEQ ID NO: 2325806 - DNA, 25 bp, Homo sapien
agcatggtcttcctgtgcccacaac

SEQ ID NO: 2325807 - DNA, 25 bp, Homo sapien
ttcagcatctccagtaatggcccca

SEQ ID NO: 2325808 - DNA, 25 bp, Homo sapien
tcacaggtctaatgcaagacgtctg

SEQ ID NO: 2325809 - DNA, 25 bp, Homo sapien
cattctctggagaatgaggattgaa

SEQ ID NO: 2325810 - DNA, 25 bp, Homo sapien
ggtctaatgcaagacgtctgccatt

SEQ ID NO: 2325811 - DNA, 25 bp, Homo sapien
gaagagaagtagtaattctgcattt

SEQ ID NO: 2325812 - DNA, 25 bp, Homo sapien
tcttatccgaactaaatcatcttca

SEQ ID NO: 2325813 - DNA, 25 bp, Homo sapien
tatccgaactaaatcatcttcattg

SEQ ID NO: 2325814 - DNA, 25 bp, Homo sapien
cttcattgccaatgagtgtctggtt

SEQ ID NO: 2325815 - DNA, 25 bp, Homo sapien
atccgaactaaatcatcttcattgc

SEQ ID NO: 2325816 - DNA, 25 bp, Homo sapien
tcaaagttctgagagagtatagcct

SEQ ID NO: 2325817 - DNA, 25 bp, Homo sapien
gttctgagagagtatagccttcaag

SEQ ID NO: 2325818 - DNA, 25 bp, Homo sapien
cctgtggactcctctttgcagctct

SEQ ID NO: 2325819 - DNA, 25 bp, Homo sapien
aagttctgagagagtatagccttca

SEQ ID NO: 2325820 - DNA, 25 bp, Homo sapien
ctgaggaaatgagttgtctgtcttt

SEQ ID NO: 2325821 - DNA, 25 bp, Homo sapien
tgcaaagcgtcctagtctccgggtt

SEQ ID NO: 2325822 - DNA, 25 bp, Homo sapien
cgggtttggtcgctacaccattgac

SEQ ID NO: 2325823 - DNA, 25 bp, Homo sapien
tgtagggtcactgcccacagtttca

SEQ ID NO: 2325824 - DNA, 25 bp, Homo sapien
tggagtctcagatgtgttttcacct

SEQ ID NO: 2325825 - DNA, 25 bp, Homo sapien
cagattgtttgggtagacgctttca

SEQ ID NO: 2325826 - DNA, 25 bp, Homo sapien
aaatgacatagcattagaatttcct

SEQ ID NO: 2325827 - DNA, 25 bp, Homo sapien
ggtagacgctttcaccaaatgacat

SEQ ID NO: 2325828 - DNA, 25 bp, Homo sapien
tatttaggcctgagcagattgtttg

SEQ ID NO: 2325829 - DNA, 25 bp, Homo sapien
tgctgagcactgtaatgcatttcct

SEQ ID NO: 2325830 - DNA, 25 bp, Homo sapien
gctgagcactgtaatgcatttcctt

SEQ ID NO: 2325831 - DNA, 25 bp, Homo sapien
tttccaacttctggtcattcaaatt

SEQ ID NO: 2325832 - DNA, 25 bp, Homo sapien
tccaacttctggtcattcaaattta

SEQ ID NO: 2325833 - DNA, 25 bp, Homo sapien
gtttttccaacttctggtcattcaa

SEQ ID NO: 2325834 - DNA, 25 bp, Homo sapien
caacttctggtcattcaaatttagt

SEQ ID NO: 2325835 - DNA, 25 bp, Homo sapien
ccattcatatggaatctctggggat

SEQ ID NO: 2325836 - DNA, 25 bp, Homo sapien
cattcatatggaatctctggggatc

SEQ ID NO: 2325837 - DNA, 25 bp, Homo sapien
caaacgatgagcaaacatgatatcc

SEQ ID NO: 2325838 - DNA, 25 bp, Homo sapien
gagtaagtatgaccagaatccagac

SEQ ID NO: 2325839 - DNA, 25 bp, Homo sapien
gaatgatcattaagtctgggcgcag

SEQ ID NO: 2325840 - DNA, 25 bp, Homo sapien
catgatatccactacagagagaaac

SEQ ID NO: 2325841 - DNA, 25 bp, Homo sapien
gtcctcttctgcagagtcctgcaaa

SEQ ID NO: 2325842 - DNA, 25 bp, Homo sapien
ctcttctgcagagtcctgcaaacat

SEQ ID NO: 2325843 - DNA, 25 bp, Homo sapien
tctttgtcctcttctgcagagtcct

SEQ ID NO: 2325844 - DNA, 25 bp, Homo sapien
ctctttgtcctcttctgcagagtcc

SEQ ID NO: 2325845 - DNA, 25 bp, Homo sapien
aaatgggaacttgagacctataaag

SEQ ID NO: 2325846 - DNA, 25 bp, Homo sapien
cttgcagacgtctaaaggctattct

SEQ ID NO: 2325847 - DNA, 25 bp, Homo sapien
caataataaaactccttgcagacgt

SEQ ID NO: 2325848 - DNA, 25 bp, Homo sapien
tctaaaggctattctaagttaaaca

SEQ ID NO: 2325849 - DNA, 25 bp, Homo sapien
gaaatatacgtgctgcaaatactgc

SEQ ID NO: 2325850 - DNA, 25 bp, Homo sapien
tacctttcactaagaagtcacttaa

SEQ ID NO: 2325851 - DNA, 25 bp, Homo sapien
tctgagagaaccctcacagtttaag

SEQ ID NO: 2325852 - DNA, 25 bp, Homo sapien
ttcagcaaaccttcaccttgagagt

SEQ ID NO: 2325853 - DNA, 25 bp, Homo sapien
cctcgtcttttgtcgttcactttct

SEQ ID NO: 2325854 - DNA, 25 bp, Homo sapien
ggtggtcctcgtcttttgtcgttca

SEQ ID NO: 2325855 - DNA, 25 bp, Homo sapien
cactttctttctgcatgataattat

SEQ ID NO: 2325856 - DNA, 25 bp, Homo sapien
tggtcctcgtcttttgtcgttcact

SEQ ID NO: 2325857 - DNA, 25 bp, Homo sapien
taggccaccattccacgtaagtatg

SEQ ID NO: 2325858 - DNA, 25 bp, Homo sapien
caccattccacgtaagtatgaccca

SEQ ID NO: 2325859 - DNA, 25 bp, Homo sapien
cacgtaagtatgacccacactgtcc

SEQ ID NO: 2325860 - DNA, 25 bp, Homo sapien
cattccacgtaagtatgacccacac

SEQ ID NO: 2325861 - DNA, 25 bp, Homo sapien
ggtaaattggatcccagtagagaaa

SEQ ID NO: 2325862 - DNA, 25 bp, Homo sapien
tgtcggagaagtatccaagaggaaa

SEQ ID NO: 2325863 - DNA, 25 bp, Homo sapien
gaaacttggcaaatccaccatcaac

SEQ ID NO: 2325864 - DNA, 25 bp, Homo sapien
ggcaaatccaccatcaacacaattt

SEQ ID NO: 2325865 - DNA, 25 bp, Homo sapien
ctcttttcttctctatgtattccat

SEQ ID NO: 2325866 - DNA, 25 bp, Homo sapien
tctcttttcttctctatgtattcca

SEQ ID NO: 2325867 - DNA, 25 bp, Homo sapien
ttctcttttcttctctatgtattcc

SEQ ID NO: 2325868 - DNA, 25 bp, Homo sapien
tcatcaggagataatagagcattga

SEQ ID NO: 2325869 - DNA, 25 bp, Homo sapien
tggggtacaaatgactgacaggcac

SEQ ID NO: 2325870 - DNA, 25 bp, Homo sapien
cagccagcataatcatcatcaggag

SEQ ID NO: 2325871 - DNA, 25 bp, Homo sapien
agagcattgatggactttatgattc

SEQ ID NO: 2325872 - DNA, 25 bp, Homo sapien
acatgtctatggaggatgatgaaca

SEQ ID NO: 2325873 - DNA, 25 bp, Homo sapien
catgtctatggaggatgatgaacaa

SEQ ID NO: 2325874 - DNA, 25 bp, Homo sapien
atgtctatggaggatgatgaacaag

SEQ ID NO: 2325875 - DNA, 25 bp, Homo sapien
agtgggtgtcttttctgctatctaa

SEQ ID NO: 2325876 - DNA, 25 bp, Homo sapien
gggtgtcttttctgctatctaattc

SEQ ID NO: 2325877 - DNA, 25 bp, Homo sapien
tgaagtgggtgtcttttctgctatc

SEQ ID NO: 2325878 - DNA, 25 bp, Homo sapien
gtcttttctgctatctaattcttca

SEQ ID NO: 2325879 - DNA, 25 bp, Homo sapien
actacatagaaagagaccttttcgc

SEQ ID NO: 2325880 - DNA, 25 bp, Homo sapien
ccttttcgctgaaactcaatctcaa

SEQ ID NO: 2325881 - DNA, 25 bp, Homo sapien
gagatcctcattatgtgtatcacta

SEQ ID NO: 2325882 - DNA, 25 bp, Homo sapien
ttagagatgaatctggagatcctca

SEQ ID NO: 2325883 - DNA, 25 bp, Homo sapien
gtaagtacgaacctgtagaaacatc

SEQ ID NO: 2325884 - DNA, 25 bp, Homo sapien
caatgtaagtacgaacctgtagaaa

SEQ ID NO: 2325885 - DNA, 25 bp, Homo sapien
tgttttagcaatgtaagtacgaacc

SEQ ID NO: 2325886 - DNA, 25 bp, Homo sapien
tagcaatgtaagtacgaacctgtag

SEQ ID NO: 2325887 - DNA, 25 bp, Homo sapien
aatgggtttggtgaagtggcactaa

SEQ ID NO: 2325888 - DNA, 25 bp, Homo sapien
agtggcactaagagttctatgctta

SEQ ID NO: 2325889 - DNA, 25 bp, Homo sapien
cttatcaatagaagcaatcttaatc

SEQ ID NO: 2325890 - DNA, 25 bp, Homo sapien
gagttctatgcttatcaatagaagc

SEQ ID NO: 2325891 - DNA, 25 bp, Homo sapien
gcttgttgaccagaaaagtaagttc

SEQ ID NO: 2325892 - DNA, 25 bp, Homo sapien
tccccaaagtagaattctaactgtc

SEQ ID NO: 2325893 - DNA, 25 bp, Homo sapien
ctaactgtccaattctgttactcaa

SEQ ID NO: 2325894 - DNA, 25 bp, Homo sapien
ctgcttgttgaccagaaaagtaagt

SEQ ID NO: 2325895 - DNA, 25 bp, Homo sapien
attttcatccggaatcatttcttct

SEQ ID NO: 2325896 - DNA, 25 bp, Homo sapien
gtttacattttcatccggaatcatt

SEQ ID NO: 2325897 - DNA, 25 bp, Homo sapien
ttacattttcatccggaatcatttc

SEQ ID NO: 2325898 - DNA, 25 bp, Homo sapien
acattttcatccggaatcatttctt

SEQ ID NO: 2325899 - DNA, 25 bp, Homo sapien
aatgatgagaatactgaggttctcc

SEQ ID NO: 2325900 - DNA, 25 bp, Homo sapien
tgtaatgatgagaatactgaggttc

SEQ ID NO: 2325901 - DNA, 25 bp, Homo sapien
tgatgagaatactgaggttctccat

SEQ ID NO: 2325902 - DNA, 25 bp, Homo sapien
taatgatgagaatactgaggttctc

SEQ ID NO: 2325903 - DNA, 25 bp, Homo sapien
caaccacaggcccaactggcttaga

SEQ ID NO: 2325904 - DNA, 25 bp, Homo sapien
ccacaggcccaactggcttagaagt

SEQ ID NO: 2325905 - DNA, 25 bp, Homo sapien
acaggcccaactggcttagaagttt

SEQ ID NO: 2325906 - DNA, 25 bp, Homo sapien
aggcccaactggcttagaagtttct

SEQ ID NO: 2325907 - DNA, 25 bp, Homo sapien
ttccaagccaggaccttgactcttg

SEQ ID NO: 2325908 - DNA, 25 bp, Homo sapien
tccttactttcagtcagtggctcct

SEQ ID NO: 2325909 - DNA, 25 bp, Homo sapien
ctcctgaccaggcataacatcctta

SEQ ID NO: 2325910 - DNA, 25 bp, Homo sapien
caagccaggaccttgactcttgggt

SEQ ID NO: 2325911 - DNA, 25 bp, Homo sapien
tattggtcagatattggcaaataat

SEQ ID NO: 2325912 - DNA, 25 bp, Homo sapien
ttattggtcagatattggcaaataa

SEQ ID NO: 2325913 - DNA, 25 bp, Homo sapien
cctcacatatcctctgcagttgaca

SEQ ID NO: 2325914 - DNA, 25 bp, Homo sapien
catatcctctgcagttgacaaccca

SEQ ID NO: 2325915 - DNA, 25 bp, Homo sapien
agcctcacatatcctctgcagttga

SEQ ID NO: 2325916 - DNA, 25 bp, Homo sapien
cacatatcctctgcagttgacaacc

SEQ ID NO: 2325917 - DNA, 25 bp, Homo sapien
tcttacagtgaactaatgccatgga

SEQ ID NO: 2325918 - DNA, 25 bp, Homo sapien
gcttcttcacgactttacacaatat

SEQ ID NO: 2325919 - DNA, 25 bp, Homo sapien
cccatagaggattcttgccttccga

SEQ ID NO: 2325920 - DNA, 25 bp, Homo sapien
tttccaaattatatgtcgcttcttc

SEQ ID NO: 2325921 - DNA, 25 bp, Homo sapien
ttacatagccggaaattaggaaatg

SEQ ID NO: 2325922 - DNA, 25 bp, Homo sapien
gaaatgatcgaggagcacaaatatg

SEQ ID NO: 2325923 - DNA, 25 bp, Homo sapien
cccgacttccactactgctagtgta

SEQ ID NO: 2325924 - DNA, 25 bp, Homo sapien
acaaatatgactgtgcacgagtgca

SEQ ID NO: 2325925 - DNA, 25 bp, Homo sapien
ttcagtgaaactcccctcagacaca

SEQ ID NO: 2325926 - DNA, 25 bp, Homo sapien
tttcccgctaagctctgccagtctc

SEQ ID NO: 2325927 - DNA, 25 bp, Homo sapien
gctaggcaagcacctttcccgctaa

SEQ ID NO: 2325928 - DNA, 25 bp, Homo sapien
gctgctttgctgctaggcaagcacc

SEQ ID NO: 2325929 - DNA, 25 bp, Homo sapien
tcccaatggtaaaacccacacatca

SEQ ID NO: 2325930 - DNA, 25 bp, Homo sapien
tgctcccaatggtaaaacccacaca

SEQ ID NO: 2325931 - DNA, 25 bp, Homo sapien
gctcccaatggtaaaacccacacat

SEQ ID NO: 2325932 - DNA, 25 bp, Homo sapien
atgctcccaatggtaaaacccacac

SEQ ID NO: 2325933 - DNA, 25 bp, Homo sapien
gcattccagccaaccgaggtgcctg

SEQ ID NO: 2325934 - DNA, 25 bp, Homo sapien
gccaccaggggccagctagaaacca

SEQ ID NO: 2325935 - DNA, 25 bp, Homo sapien
tggagttaatcgtgcccggactttg

SEQ ID NO: 2325936 - DNA, 25 bp, Homo sapien
agaagcgagatggagttaatcgtgc

SEQ ID NO: 2325937 - DNA, 25 bp, Homo sapien
accaaatttgatttaatagctactt

SEQ ID NO: 2325938 - DNA, 25 bp, Homo sapien
gatcagcaaactatagtccacaaac

SEQ ID NO: 2325939 - DNA, 25 bp, Homo sapien
cttttgggaggagaactaaatatag

SEQ ID NO: 2325940 - DNA, 25 bp, Homo sapien
aatctctagaatgaggttttttgtc

SEQ ID NO: 2325941 - DNA, 25 bp, Homo sapien
gtgaaatcattttcggggctcttca

SEQ ID NO: 2325942 - DNA, 25 bp, Homo sapien
atgtgaaatcattttcggggctctt

SEQ ID NO: 2325943 - DNA, 25 bp, Homo sapien
tgtgaaatcattttcggggctcttc

SEQ ID NO: 2325944 - DNA, 25 bp, Homo sapien
tgaaatcattttcggggctcttcat

SEQ ID NO: 2325945 - DNA, 25 bp, Homo sapien
tccaaacacaaatagtggcttcagt

SEQ ID NO: 2325946 - DNA, 25 bp, Homo sapien
tctgaagagcacaggtgtagtgtat

SEQ ID NO: 2325947 - DNA, 25 bp, Homo sapien
aattcacgtaagttaaggctcttgg

SEQ ID NO: 2325948 - DNA, 25 bp, Homo sapien
tttaaaagactgtgcctgagtttgc

SEQ ID NO: 2325949 - DNA, 25 bp, Homo sapien
ttaatgcctagctccccaagaagct

SEQ ID NO: 2325950 - DNA, 25 bp, Homo sapien
ctttccctgggcatgtccatacact

SEQ ID NO: 2325951 - DNA, 25 bp, Homo sapien
tttaatacccagaaattttagctga

SEQ ID NO: 2325952 - DNA, 25 bp, Homo sapien
ggttacaactatagggagaggtgca

SEQ ID NO: 2325953 - DNA, 25 bp, Homo sapien
ttcaatccctttcttgctgaagtta

SEQ ID NO: 2325954 - DNA, 25 bp, Homo sapien
gagcaagtaagtaatagatttacac

SEQ ID NO: 2325955 - DNA, 25 bp, Homo sapien
gccttccaacttctcgttttgtgag

SEQ ID NO: 2325956 - DNA, 25 bp, Homo sapien
atgagtttgtgccattttccccagt

SEQ ID NO: 2325957 - DNA, 25 bp, Homo sapien
ctcctcttgctattagcatccttag

SEQ ID NO: 2325958 - DNA, 25 bp, Homo sapien
tccaactatgtctagagagtctcac

SEQ ID NO: 2325959 - DNA, 25 bp, Homo sapien
ccttactagtgtcgaagtgctgaaa

SEQ ID NO: 2325960 - DNA, 25 bp, Homo sapien
gaaactgggacacacatccaacaca

SEQ ID NO: 2325961 - DNA, 25 bp, Homo sapien
taagatccttccctacatgaggtca

SEQ ID NO: 2325962 - DNA, 25 bp, Homo sapien
tgtgagtcagctgttgacatcctct

SEQ ID NO: 2325963 - DNA, 25 bp, Homo sapien
tagaagtcaacttaagcccaagatt

SEQ ID NO: 2325964 - DNA, 25 bp, Homo sapien
cccttattgttatgttatgagcttc

SEQ ID NO: 2325965 - DNA, 25 bp, Homo sapien
aagtcagcttcatccgatttaagta

SEQ ID NO: 2325966 - DNA, 25 bp, Homo sapien
ttgtgtagcttcaaaagtctttcgg

SEQ ID NO: 2325967 - DNA, 25 bp, Homo sapien
taggaatgtatctgctatatctcag

SEQ ID NO: 2325968 - DNA, 25 bp, Homo sapien
ttacaatgcagtctgagaacatact

SEQ ID NO: 2325969 - DNA, 25 bp, Homo sapien
tatctcagaagtttgggcatgttgt

SEQ ID NO: 2325970 - DNA, 25 bp, Homo sapien
aatacgtccttgcttcagacctcat

SEQ ID NO: 2325971 - DNA, 25 bp, Homo sapien
tccaaatacgtccttgcttcagacc

SEQ ID NO: 2325972 - DNA, 25 bp, Homo sapien
gactccaaatacgtccttgcttcag

SEQ ID NO: 2325973 - DNA, 25 bp, Homo sapien
ctggagactccaaatacgtccttgc

SEQ ID NO: 2325974 - DNA, 25 bp, Homo sapien
tcccactgtactccttgggggcttc

SEQ ID NO: 2325975 - DNA, 25 bp, Homo sapien
actgccacagacagaattactccca

SEQ ID NO: 2325976 - DNA, 25 bp, Homo sapien
agaattactcccactgtactccttg

SEQ ID NO: 2325977 - DNA, 25 bp, Homo sapien
ctaaactgccacagacagaattact

SEQ ID NO: 2325978 - DNA, 25 bp, Homo sapien
tattgtaaaacgttaggcttctgga

SEQ ID NO: 2325979 - DNA, 25 bp, Homo sapien
ttgtaaaacgttaggcttctggatg

SEQ ID NO: 2325980 - DNA, 25 bp, Homo sapien
attgtaaaacgttaggcttctggat

SEQ ID NO: 2325981 - DNA, 25 bp, Homo sapien
accagcctcataacacgatgtgtga

SEQ ID NO: 2325982 - DNA, 25 bp, Homo sapien
aaatgtggctagcaccagcctcata

SEQ ID NO: 2325983 - DNA, 25 bp, Homo sapien
tagcaccagcctcataacacgatgt

SEQ ID NO: 2325984 - DNA, 25 bp, Homo sapien
taacacgatgtgtgataagaatgtt

SEQ ID NO: 2325985 - DNA, 25 bp, Homo sapien
taattggaccacatgtgtgtccggc

SEQ ID NO: 2325986 - DNA, 25 bp, Homo sapien
tgttcattccttgaagaaacgcttc

SEQ ID NO: 2325987 - DNA, 25 bp, Homo sapien
tgccctcgtttgatgacagaattga

SEQ ID NO: 2325988 - DNA, 25 bp, Homo sapien
cagaattgagcaggactctctggta

SEQ ID NO: 2325989 - DNA, 25 bp, Homo sapien
tgcagctgaatgacgcacagaccat

SEQ ID NO: 2325990 - DNA, 25 bp, Homo sapien
gaatatcaggtaatgcagctgaatg

SEQ ID NO: 2325991 - DNA, 25 bp, Homo sapien
caactgctagaatatcaggtaatgc

SEQ ID NO: 2325992 - DNA, 25 bp, Homo sapien
ttttccaactgctagaatatcaggt

SEQ ID NO: 2325993 - DNA, 25 bp, Homo sapien
tattctactggtatttgtttttcca

SEQ ID NO: 2325994 - DNA, 25 bp, Homo sapien
gtttttccagctcattaagtttctg

SEQ ID NO: 2325995 - DNA, 25 bp, Homo sapien
ttccagctcattaagtttctgaatg

SEQ ID NO: 2325996 - DNA, 25 bp, Homo sapien
tttctgaatgattaatctttgctct

SEQ ID NO: 2325997 - DNA, 25 bp, Homo sapien
gagataccttctcttacgaatgctt

SEQ ID NO: 2325998 - DNA, 25 bp, Homo sapien
gattcccctggttgactctgcagtt

SEQ ID NO: 2325999 - DNA, 25 bp, Homo sapien
tagatatgagcacatgagatacctt

SEQ ID NO: 2326000 - DNA, 25 bp, Homo sapien
gtttgggtattaagctccagacaga

SEQ ID NO: 2326001 - DNA, 25 bp, Homo sapien
gaaattggctcctggctactaaact

SEQ ID NO: 2326002 - DNA, 25 bp, Homo sapien
gcttggcctttaagtccactattac

SEQ ID NO: 2326003 - DNA, 25 bp, Homo sapien
ccttcaagatgcttggcctttaagt

SEQ ID NO: 2326004 - DNA, 25 bp, Homo sapien
gtccactattaccttacctatttca

SEQ ID NO: 2326005 - DNA, 25 bp, Homo sapien
ctatttcatgcttgcttatgtggtc

SEQ ID NO: 2326006 - DNA, 25 bp, Homo sapien
caaaattccttgtgcgatgcaggca

SEQ ID NO: 2326007 - DNA, 25 bp, Homo sapien
tattactactctctctattcagggc

SEQ ID NO: 2326008 - DNA, 25 bp, Homo sapien
cattcatgggcgtcttccactttga

SEQ ID NO: 2326009 - DNA, 25 bp, Homo sapien
cactttgaaataggaacaggatact

SEQ ID NO: 2326010 - DNA, 25 bp, Homo sapien
gggagtccagagctcaatcatttta

SEQ ID NO: 2326011 - DNA, 25 bp, Homo sapien
gcttaattacaatctacatgccaat

SEQ ID NO: 2326012 - DNA, 25 bp, Homo sapien
tcatatccctaatccctaatcctgg

SEQ ID NO: 2326013 - DNA, 25 bp, Homo sapien
tgactatgccatcttccttgaaact

SEQ ID NO: 2326014 - DNA, 25 bp, Homo sapien
aacattaaatgatttcaggtgccag

SEQ ID NO: 2326015 - DNA, 25 bp, Homo sapien
gatttcaggtgccagagaccttttt

SEQ ID NO: 2326016 - DNA, 25 bp, Homo sapien
gctttcaaagttgttgctgcagcaa

SEQ ID NO: 2326017 - DNA, 25 bp, Homo sapien
tctgcagtttgataagtgaagtcag

SEQ ID NO: 2326018 - DNA, 25 bp, Homo sapien
taagtcaaatcctacacacacgagg

SEQ ID NO: 2326019 - DNA, 25 bp, Homo sapien
ggtttgatacctgtccccttcaagc

SEQ ID NO: 2326020 - DNA, 25 bp, Homo sapien
taaactcatagcacatagcattgga

SEQ ID NO: 2326021 - DNA, 25 bp, Homo sapien
tagcacatagcattggatcccttga

SEQ ID NO: 2326022 - DNA, 25 bp, Homo sapien
gggcaatcgagactggcagctatga

SEQ ID NO: 2326023 - DNA, 25 bp, Homo sapien
ttacttctgcagacgcagtgctggg

SEQ ID NO: 2326024 - DNA, 25 bp, Homo sapien
gcagctatgaagtgcgtgacacttg

SEQ ID NO: 2326025 - DNA, 25 bp, Homo sapien
cgcagtgctgggttttactgttagg

SEQ ID NO: 2326026 - DNA, 25 bp, Homo sapien
aagcagataatcagccattggagaa

SEQ ID NO: 2326027 - DNA, 25 bp, Homo sapien
attggagaatggctcctacactgta

SEQ ID NO: 2326028 - DNA, 25 bp, Homo sapien
gaatggctcctacactgtaaataag

SEQ ID NO: 2326029 - DNA, 25 bp, Homo sapien
gccattggagaatggctcctacact

SEQ ID NO: 2326030 - DNA, 25 bp, Homo sapien
tgggggcaatttctgtgatctaatg

SEQ ID NO: 2326031 - DNA, 25 bp, Homo sapien
caatttctgtgatctaatgcttaat

SEQ ID NO: 2326032 - DNA, 25 bp, Homo sapien
tttgggggcaatttctgtgatctaa

SEQ ID NO: 2326033 - DNA, 25 bp, Homo sapien
gggcaatttctgtgatctaatgctt

SEQ ID NO: 2326034 - DNA, 25 bp, Homo sapien
cagtcctcagtcctactgaaaatgt

SEQ ID NO: 2326035 - DNA, 25 bp, Homo sapien
catagttccacactatgttttgaga

SEQ ID NO: 2326036 - DNA, 25 bp, Homo sapien
ggatctgtgagtcctatgtttgtca

SEQ ID NO: 2326037 - DNA, 25 bp, Homo sapien
gcgtttcagccaccaaaagttcaac

SEQ ID NO: 2326038 - DNA, 25 bp, Homo sapien
ttgagaaatgcgtttcagccaccaa

SEQ ID NO: 2326039 - DNA, 25 bp, Homo sapien
aagtgttcactattccgtttcactc

SEQ ID NO: 2326040 - DNA, 25 bp, Homo sapien
gttcactattccgtttcactccact

SEQ ID NO: 2326041 - DNA, 25 bp, Homo sapien
aaagtgttcactattccgtttcact

SEQ ID NO: 2326042 - DNA, 25 bp, Homo sapien
gtgttcactattccgtttcactcca

SEQ ID NO: 2326043 - DNA, 25 bp, Homo sapien
tctaaaagggttggactattgctag

SEQ ID NO: 2326044 - DNA, 25 bp, Homo sapien
aagcagcattcatcatgttggttta

SEQ ID NO: 2326045 - DNA, 25 bp, Homo sapien
tgctagtcagcaaaattccaatagt

SEQ ID NO: 2326046 - DNA, 25 bp, Homo sapien
tgaagttgggaacagtgttttgccc

SEQ ID NO: 2326047 - DNA, 25 bp, Homo sapien
cacttgtgtctttactgacaacaac

SEQ ID NO: 2326048 - DNA, 25 bp, Homo sapien
ttgtgtctttactgacaacaaccat

SEQ ID NO: 2326049 - DNA, 25 bp, Homo sapien
acttgtgtctttactgacaacaacc

SEQ ID NO: 2326050 - DNA, 25 bp, Homo sapien
cttgtgtctttactgacaacaacca

SEQ ID NO: 2326051 - DNA, 25 bp, Homo sapien
tacacgttgtaagtctttgtaagtc

SEQ ID NO: 2326052 - DNA, 25 bp, Homo sapien
ggccaagaccaaacattcaagctga

SEQ ID NO: 2326053 - DNA, 25 bp, Homo sapien
cgccaaaatgagagtcgttcttgtc

SEQ ID NO: 2326054 - DNA, 25 bp, Homo sapien
ttgagtaacgattggctgactggcc

SEQ ID NO: 2326055 - DNA, 25 bp, Homo sapien
gaacaagagataatcttggccctcc

SEQ ID NO: 2326056 - DNA, 25 bp, Homo sapien
cagcttcccagtatgttgagattat

SEQ ID NO: 2326057 - DNA, 25 bp, Homo sapien
gaatagattactgccatatgcaaca

SEQ ID NO: 2326058 - DNA, 25 bp, Homo sapien
taacactggatcacttggctattca

SEQ ID NO: 2326059 - DNA, 25 bp, Homo sapien
caaacagctgcagtctgagctgaat

SEQ ID NO: 2326060 - DNA, 25 bp, Homo sapien
taagtgaataaacatccttgatcat

SEQ ID NO: 2326061 - DNA, 25 bp, Homo sapien
atgtggtccgtagtaagagccaaac

SEQ ID NO: 2326062 - DNA, 25 bp, Homo sapien
acagctgcagtctgagctgaataag

SEQ ID NO: 2326063 - DNA, 25 bp, Homo sapien
gagatagacagcatatctctgttct

SEQ ID NO: 2326064 - DNA, 25 bp, Homo sapien
catcactgtcagagatagacagcat

SEQ ID NO: 2326065 - DNA, 25 bp, Homo sapien
tagacagcatatctctgttctgagt

SEQ ID NO: 2326066 - DNA, 25 bp, Homo sapien
ctgtcagagatagacagcatatctc

SEQ ID NO: 2326067 - DNA, 25 bp, Homo sapien
ttccattggcaatattgagtaattt

SEQ ID NO: 2326068 - DNA, 25 bp, Homo sapien
tccattggcaatattgagtaattta

SEQ ID NO: 2326069 - DNA, 25 bp, Homo sapien
ccattggcaatattgagtaatttat

SEQ ID NO: 2326070 - DNA, 25 bp, Homo sapien
ggtcttcctagactcctcattccag

SEQ ID NO: 2326071 - DNA, 25 bp, Homo sapien
gatattacacaagaccagagacaga

SEQ ID NO: 2326072 - DNA, 25 bp, Homo sapien
tcattccagctctgattagccttgt

SEQ ID NO: 2326073 - DNA, 25 bp, Homo sapien
ctctgattagccttgtatgtgagga

SEQ ID NO: 2326074 - DNA, 25 bp, Homo sapien
gttaagttgtaagcaagtcacttaa

SEQ ID NO: 2326075 - DNA, 25 bp, Homo sapien
ttaagttgtaagcaagtcacttaat

SEQ ID NO: 2326076 - DNA, 25 bp, Homo sapien
taagttgtaagcaagtcacttaatg

SEQ ID NO: 2326077 - DNA, 25 bp, Homo sapien
taattggtattgtcagcttttctga

SEQ ID NO: 2326078 - DNA, 25 bp, Homo sapien
gaacatttctagacttccagaatgc

SEQ ID NO: 2326079 - DNA, 25 bp, Homo sapien
gcagggcatgagtattccagttgct

SEQ ID NO: 2326080 - DNA, 25 bp, Homo sapien
ccactgtaatgagttggaagtagtt

SEQ ID NO: 2326081 - DNA, 25 bp, Homo sapien
tataggcactgcattgagccagatg

SEQ ID NO: 2326082 - DNA, 25 bp, Homo sapien
catattcaatgggtctagcttcaca

SEQ ID NO: 2326083 - DNA, 25 bp, Homo sapien
tgatggctggtgtcgtatagaagca

SEQ ID NO: 2326084 - DNA, 25 bp, Homo sapien
tcacattgtgtaaagtataggcact

SEQ ID NO: 2326085 - DNA, 25 bp, Homo sapien
gcacatccaccgaaaaaaacatata

SEQ ID NO: 2326086 - DNA, 25 bp, Homo sapien
gaagtttggcacatccaccgaaaaa

SEQ ID NO: 2326087 - DNA, 25 bp, Homo sapien
agaagtttggcacatccaccgaaaa

SEQ ID NO: 2326088 - DNA, 25 bp, Homo sapien
tttggcacatccaccgaaaaaaaca

SEQ ID NO: 2326089 - DNA, 25 bp, Homo sapien
gatgtcggcataccagctctattaa

SEQ ID NO: 2326090 - DNA, 25 bp, Homo sapien
tattaactatgctatctgagatatc

SEQ ID NO: 2326091 - DNA, 25 bp, Homo sapien
gctctattaactatgctatctgaga

SEQ ID NO: 2326092 - DNA, 25 bp, Homo sapien
gggacaggcaaatcctagatgtcgg

SEQ ID NO: 2326093 - DNA, 25 bp, Homo sapien
aatagcctctatagaagaacttgag

SEQ ID NO: 2326094 - DNA, 25 bp, Homo sapien
gaagaacttgagagcctgctttcca

SEQ ID NO: 2326095 - DNA, 25 bp, Homo sapien
ttttcatttgcgtcgagtaatagcc

SEQ ID NO: 2326096 - DNA, 25 bp, Homo sapien
taaatagaataattgagtcttttca

SEQ ID NO: 2326097 - DNA, 25 bp, Homo sapien
tgcaggggtactgaaaggctggctt

SEQ ID NO: 2326098 - DNA, 25 bp, Homo sapien
catgcaggggtactgaaaggctggc

SEQ ID NO: 2326099 - DNA, 25 bp, Homo sapien
caggatgacactgtaccatgcaggg

SEQ ID NO: 2326100 - DNA, 25 bp, Homo sapien
gatgacactgtaccatgcaggggta

SEQ ID NO: 2326101 - DNA, 25 bp, Homo sapien
aataggggctttcggtcgtgagttg

SEQ ID NO: 2326102 - DNA, 25 bp, Homo sapien
atcttcatccttcatacaggaatag

SEQ ID NO: 2326103 - DNA, 25 bp, Homo sapien
caggaataggggctttcggtcgtga

SEQ ID NO: 2326104 - DNA, 25 bp, Homo sapien
tcggtcgtgagttgggggactctag

SEQ ID NO: 2326105 - DNA, 25 bp, Homo sapien
tcctccattgaacttaagatcgact

SEQ ID NO: 2326106 - DNA, 25 bp, Homo sapien
tacaagcaccataaactctcctgtg

SEQ ID NO: 2326107 - DNA, 25 bp, Homo sapien
cctgtgacattgtgctgtagtcgca

SEQ ID NO: 2326108 - DNA, 25 bp, Homo sapien
tactgtcagtcatgttatttcctcc

SEQ ID NO: 2326109 - DNA, 25 bp, Homo sapien
gacctgttacacttcatttcctgag

SEQ ID NO: 2326110 - DNA, 25 bp, Homo sapien
tttatttctgctagggcactgaccc

SEQ ID NO: 2326111 - DNA, 25 bp, Homo sapien
cctgagcctttgtcctgatagagtc

SEQ ID NO: 2326112 - DNA, 25 bp, Homo sapien
cagtggccgccccaaattgatacag

SEQ ID NO: 2326113 - DNA, 25 bp, Homo sapien
aatacattcattttggagaataggg

SEQ ID NO: 2326114 - DNA, 25 bp, Homo sapien
ttcctgagaatcttcaatttcatta

SEQ ID NO: 2326115 - DNA, 25 bp, Homo sapien
attaatacattcattttggagaata

SEQ ID NO: 2326116 - DNA, 25 bp, Homo sapien
ctttttaattcctgagaatcttcaa

SEQ ID NO: 2326117 - DNA, 25 bp, Homo sapien
agttctgtagagtttgtccaattgt

SEQ ID NO: 2326118 - DNA, 25 bp, Homo sapien
atagttctgtagagtttgtccaatt

SEQ ID NO: 2326119 - DNA, 25 bp, Homo sapien
ctgatagttctgtagagtttgtcca

SEQ ID NO: 2326120 - DNA, 25 bp, Homo sapien
gatagttctgtagagtttgtccaat

SEQ ID NO: 2326121 - DNA, 25 bp, Homo sapien
cttggcattgttctaaactgtttga

SEQ ID NO: 2326122 - DNA, 25 bp, Homo sapien
aggattctaagaagtatgcattgaa

SEQ ID NO: 2326123 - DNA, 25 bp, Homo sapien
gaagtatgcattgaagtttccatga

SEQ ID NO: 2326124 - DNA, 25 bp, Homo sapien
tctaaactgtttgaaggattctaag

SEQ ID NO: 2326125 - DNA, 25 bp, Homo sapien
aatccttttggcagcaaccaaccag

SEQ ID NO: 2326126 - DNA, 25 bp, Homo sapien
caaccaggcatttgtaccagctctt

SEQ ID NO: 2326127 - DNA, 25 bp, Homo sapien
tgtacattgccccaagcagctctca

SEQ ID NO: 2326128 - DNA, 25 bp, Homo sapien
ccaggtggaccaagcaacttgtaca

SEQ ID NO: 2326129 - DNA, 25 bp, Homo sapien
tacctcctgagagcatggcttttaa

SEQ ID NO: 2326130 - DNA, 25 bp, Homo sapien
tgtactaaccttaccctgagcacag

SEQ ID NO: 2326131 - DNA, 25 bp, Homo sapien
tgaaagattcctaccattggatgac

SEQ ID NO: 2326132 - DNA, 25 bp, Homo sapien
gagcacagaaccttacactgggaag

SEQ ID NO: 2326133 - DNA, 25 bp, Homo sapien
tttccaggcctaaataatacagtgt

SEQ ID NO: 2326134 - DNA, 25 bp, Homo sapien
gaagcacagaacacaactcaaaaag

SEQ ID NO: 2326135 - DNA, 25 bp, Homo sapien
tgaataaaattcctagcagatgagt

SEQ ID NO: 2326136 - DNA, 25 bp, Homo sapien
cctagcagatgagtggagaagcaca

SEQ ID NO: 2326137 - DNA, 25 bp, Homo sapien
gaagttccaagttccttgatgaagt

SEQ ID NO: 2326138 - DNA, 25 bp, Homo sapien
tgaaaattgccgcataaaacaacgg

SEQ ID NO: 2326139 - DNA, 25 bp, Homo sapien
ccgcataaaacaacggaactccaag

SEQ ID NO: 2326140 - DNA, 25 bp, Homo sapien
gatgaagttccaacttcatcaagtt

SEQ ID NO: 2326141 - DNA, 25 bp, Homo sapien
gacaccgtcttagagcacttggact

SEQ ID NO: 2326142 - DNA, 25 bp, Homo sapien
aaaccctttgtgttcaagctagagc

SEQ ID NO: 2326143 - DNA, 25 bp, Homo sapien
taatgctcttgctcatgccatcggt

SEQ ID NO: 2326144 - DNA, 25 bp, Homo sapien
tctactgtggaaaacgacaccgtct

SEQ ID NO: 2326145 - DNA, 25 bp, Homo sapien
tcagtcgaagttgcagtcagggatg

SEQ ID NO: 2326146 - DNA, 25 bp, Homo sapien
cgaagttgcagtcagggatgatgat

SEQ ID NO: 2326147 - DNA, 25 bp, Homo sapien
cagtcgaagttgcagtcagggatga

SEQ ID NO: 2326148 - DNA, 25 bp, Homo sapien
ttgcagtcagggatgatgatttttc

SEQ ID NO: 2326149 - DNA, 25 bp, Homo sapien
ggaagtcatcttcgcatatttgcac

SEQ ID NO: 2326150 - DNA, 25 bp, Homo sapien
tttgcacagcgatgataacacacat

SEQ ID NO: 2326151 - DNA, 25 bp, Homo sapien
tgctgactggaagtcatcttcgcat

SEQ ID NO: 2326152 - DNA, 25 bp, Homo sapien
tcttcgcatatttgcacagcgatga

SEQ ID NO: 2326153 - DNA, 25 bp, Homo sapien
aagacagacttcaatcggtttgtat

SEQ ID NO: 2326154 - DNA, 25 bp, Homo sapien
cttcaatcggtttgtattctaaggg

SEQ ID NO: 2326155 - DNA, 25 bp, Homo sapien
gttttgataagggtagatcatattg

SEQ ID NO: 2326156 - DNA, 25 bp, Homo sapien
tgaacttcagtaatgcctgagtatt

SEQ ID NO: 2326157 - DNA, 25 bp, Homo sapien
gaaaagtgcatagccattctgtaac

SEQ ID NO: 2326158 - DNA, 25 bp, Homo sapien
tacgttggtttccaggatagaggcc

SEQ ID NO: 2326159 - DNA, 25 bp, Homo sapien
gacaatattcaaaggccaaaacact

SEQ ID NO: 2326160 - DNA, 25 bp, Homo sapien
cactactcagacactttcctgggaa

SEQ ID NO: 2326161 - DNA, 25 bp, Homo sapien
gcttgctcatgcgtgaatatcccag

SEQ ID NO: 2326162 - DNA, 25 bp, Homo sapien
gttgtctggtcagcttgctcatgcg

SEQ ID NO: 2326163 - DNA, 25 bp, Homo sapien
tgaatatcccagaccaataggtgtc

SEQ ID NO: 2326164 - DNA, 25 bp, Homo sapien
tcccagaccaataggtgtctttcat

SEQ ID NO: 2326165 - DNA, 25 bp, Homo sapien
aaaaagttttggctccatgttggag

SEQ ID NO: 2326166 - DNA, 25 bp, Homo sapien
catgttggagcactagttgtggcga

SEQ ID NO: 2326167 - DNA, 25 bp, Homo sapien
taggcaaacgtgtaaaactcttcaa

SEQ ID NO: 2326168 - DNA, 25 bp, Homo sapien
gttgtggcgaatcctagtgttggtc

SEQ ID NO: 2326169 - DNA, 25 bp, Homo sapien
tgcgcaaggtcattcacaataggaa

SEQ ID NO: 2326170 - DNA, 25 bp, Homo sapien
tccagttaatccttagggtgagccc

SEQ ID NO: 2326171 - DNA, 25 bp, Homo sapien
gactgctgctactaccaaggtaaga

SEQ ID NO: 2326172 - DNA, 25 bp, Homo sapien
tatttgaccctaaagaatgagctcc

SEQ ID NO: 2326173 - DNA, 25 bp, Homo sapien
gactgggccatctgtatttgctaat

SEQ ID NO: 2326174 - DNA, 25 bp, Homo sapien
tttaaacactggaaggagcgagtga

SEQ ID NO: 2326175 - DNA, 25 bp, Homo sapien
taagaccgttgcaatataagtgaag

SEQ ID NO: 2326176 - DNA, 25 bp, Homo sapien
aatgtcaaagggatatatggctcca

SEQ ID NO: 2326177 - DNA, 25 bp, Homo sapien
taatgacctccatacttttgaaaca

SEQ ID NO: 2326178 - DNA, 25 bp, Homo sapien
tttcactgttgtagcaaatcacttc

SEQ ID NO: 2326179 - DNA, 25 bp, Homo sapien
ttttcataggccaatttcctgagta

SEQ ID NO: 2326180 - DNA, 25 bp, Homo sapien
tctattattgctaatgacctccata

SEQ ID NO: 2326181 - DNA, 25 bp, Homo sapien
aatcagttgctgtgcttattctagg

SEQ ID NO: 2326182 - DNA, 25 bp, Homo sapien
aactgtctcacacaatcagttgctg

SEQ ID NO: 2326183 - DNA, 25 bp, Homo sapien
tagggtccacatccgcagtgtcttc

SEQ ID NO: 2326184 - DNA, 25 bp, Homo sapien
gtttctctctatcaactgtctcaca

SEQ ID NO: 2326185 - DNA, 25 bp, Homo sapien
ttgaagaggaatagtaagagtccca

SEQ ID NO: 2326186 - DNA, 25 bp, Homo sapien
agaggaatagtaagagtcccactaa

SEQ ID NO: 2326187 - DNA, 25 bp, Homo sapien
tcccactaatgcagttggtgctcat

SEQ ID NO: 2326188 - DNA, 25 bp, Homo sapien
gtcccactaatgcagttggtgctca

SEQ ID NO: 2326189 - DNA, 25 bp, Homo sapien
tgggaaaatttctcacgattgcaca

SEQ ID NO: 2326190 - DNA, 25 bp, Homo sapien
cctgcatcatgactgaggaaaccaa

SEQ ID NO: 2326191 - DNA, 25 bp, Homo sapien
acatttaaccacttgactgctgctt

SEQ ID NO: 2326192 - DNA, 25 bp, Homo sapien
tttgccatatgattgcatactgcag

SEQ ID NO: 2326193 - DNA, 25 bp, Homo sapien
gggccccaaccaggcggagattcga

SEQ ID NO: 2326194 - DNA, 25 bp, Homo sapien
aggtgggccccaaccaggcggagat

SEQ ID NO: 2326195 - DNA, 25 bp, Homo sapien
cggagattcgagaaggagtggagaa

SEQ ID NO: 2326196 - DNA, 25 bp, Homo sapien
aggagtggaagcaggtgggccccaa

SEQ ID NO: 2326197 - DNA, 25 bp, Homo sapien
tgtaggaagcggctgctgaaggccc

SEQ ID NO: 2326198 - DNA, 25 bp, Homo sapien
gataccttgtaggacttctggatca

SEQ ID NO: 2326199 - DNA, 25 bp, Homo sapien
ctgaaggcccgggggccagaggtgg

SEQ ID NO: 2326200 - DNA, 25 bp, Homo sapien
cgggggccagaggtggataccttgt

SEQ ID NO: 2326201 - DNA, 25 bp, Homo sapien
ttgaggagctgatgggggcaccggg

SEQ ID NO: 2326202 - DNA, 25 bp, Homo sapien
tgaggagctgatgggggcaccggga

SEQ ID NO: 2326203 - DNA, 25 bp, Homo sapien
gcttgaggagctgatgggggcaccg

SEQ ID NO: 2326204 - DNA, 25 bp, Homo sapien
ggagctgatgggggcaccgggacca

SEQ ID NO: 2326205 - DNA, 25 bp, Homo sapien
agcagtgatccctccaataccgctg

SEQ ID NO: 2326206 - DNA, 25 bp, Homo sapien
gacagcagtgatccctccaataccg

SEQ ID NO: 2326207 - DNA, 25 bp, Homo sapien
catgacagcagtgatccctccaata

SEQ ID NO: 2326208 - DNA, 25 bp, Homo sapien
atgacagcagtgatccctccaatac

SEQ ID NO: 2326209 - DNA, 25 bp, Homo sapien
ctccaggttaaggggcctcagcagg

SEQ ID NO: 2326210 - DNA, 25 bp, Homo sapien
aaggggcctcagcaggctctggttg

SEQ ID NO: 2326211 - DNA, 25 bp, Homo sapien
ccaggttaaggggcctcagcaggct

SEQ ID NO: 2326212 - DNA, 25 bp, Homo sapien
ggggcctcagcaggctctggttgac

SEQ ID NO: 2326213 - DNA, 25 bp, Homo sapien
tgttttgaatgtcttgatctgctcc

SEQ ID NO: 2326214 - DNA, 25 bp, Homo sapien
tgaatgtcttgatctgctccttctc

SEQ ID NO: 2326215 - DNA, 25 bp, Homo sapien
cttgttttgaatgtcttgatctgct

SEQ ID NO: 2326216 - DNA, 25 bp, Homo sapien
tttgaatgtcttgatctgctccttc

SEQ ID NO: 2326217 - DNA, 25 bp, Homo sapien
gatctcatcatggtacttcttcttg

SEQ ID NO: 2326218 - DNA, 25 bp, Homo sapien
atgctgtcagccttagcccagctgc

SEQ ID NO: 2326219 - DNA, 25 bp, Homo sapien
cttattgatctcatcatggtacttc

SEQ ID NO: 2326220 - DNA, 25 bp, Homo sapien
ggtacatgctgtcagccttagccca

SEQ ID NO: 2326221 - DNA, 25 bp, Homo sapien
ttgtacacctcaggttatccccgtg

SEQ ID NO: 2326222 - DNA, 25 bp, Homo sapien
tacacctcaggttatccccgtgctt

SEQ ID NO: 2326223 - DNA, 25 bp, Homo sapien
cggagatgtcagtctttgtacacct

SEQ ID NO: 2326224 - DNA, 25 bp, Homo sapien
gatgtcagtctttgtacacctcagg

SEQ ID NO: 2326225 - DNA, 25 bp, Homo sapien
ttcttgtaggtggcagtcttgatgt

SEQ ID NO: 2326226 - DNA, 25 bp, Homo sapien
gctcctggtatacacgcagctgctg

SEQ ID NO: 2326227 - DNA, 25 bp, Homo sapien
tggtatacacgcagctgctgtgcca

SEQ ID NO: 2326228 - DNA, 25 bp, Homo sapien
cttgtaggtggcagtcttgatgtcc

SEQ ID NO: 2326229 - DNA, 25 bp, Homo sapien
aacagagccaaagctagagctcagg

SEQ ID NO: 2326230 - DNA, 25 bp, Homo sapien
gaagtagctggagcctgcaacagag

SEQ ID NO: 2326231 - DNA, 25 bp, Homo sapien
cactggtggtctttgagtagatact

SEQ ID NO: 2326232 - DNA, 25 bp, Homo sapien
tctttgagtagatactcatgttctg

SEQ ID NO: 2326233 - DNA, 25 bp, Homo sapien
aacttgccactctgcggacccagtg

SEQ ID NO: 2326234 - DNA, 25 bp, Homo sapien
gcctaacttgtgttctcaggatcca

SEQ ID NO: 2326235 - DNA, 25 bp, Homo sapien
gtaagcccttagtgatcaactccag

SEQ ID NO: 2326236 - DNA, 25 bp, Homo sapien
gacccagtgctggaatcaggcctaa

SEQ ID NO: 2326237 - DNA, 25 bp, Homo sapien
gtggcagtggaacataaaatatcta

SEQ ID NO: 2326238 - DNA, 25 bp, Homo sapien
tttgtggcagtggaacataaaatat

SEQ ID NO: 2326239 - DNA, 25 bp, Homo sapien
ggattttgtggcagtggaacataaa

SEQ ID NO: 2326240 - DNA, 25 bp, Homo sapien
gattttgtggcagtggaacataaaa

SEQ ID NO: 2326241 - DNA, 25 bp, Homo sapien
gtggctgcacagtctgaggacccat

SEQ ID NO: 2326242 - DNA, 25 bp, Homo sapien
aagtgtccagattccatactggaga

SEQ ID NO: 2326243 - DNA, 25 bp, Homo sapien
aacctgtagtgttttttgatccaag

SEQ ID NO: 2326244 - DNA, 25 bp, Homo sapien
ctggagattgtttgtattcaacctg

SEQ ID NO: 2326245 - DNA, 25 bp, Homo sapien
cagtgtggtgggctacatgtggctc

SEQ ID NO: 2326246 - DNA, 25 bp, Homo sapien
acatgtggctcttttgtatttgcta

SEQ ID NO: 2326247 - DNA, 25 bp, Homo sapien
gacaatccattaaggaccaatttca

SEQ ID NO: 2326248 - DNA, 25 bp, Homo sapien
ggaataggtatactttttcttgaca

SEQ ID NO: 2326249 - DNA, 25 bp, Homo sapien
caaatcattggcagtgttagagctt

SEQ ID NO: 2326250 - DNA, 25 bp, Homo sapien
aattgcacagggtgagtttatcagc

SEQ ID NO: 2326251 - DNA, 25 bp, Homo sapien
aaatagagttgtccaaatcattggc

SEQ ID NO: 2326252 - DNA, 25 bp, Homo sapien
gaaacacagatggttcggaattgca

SEQ ID NO: 2326253 - DNA, 25 bp, Homo sapien
tcaagctcctggtgtctctcattca

SEQ ID NO: 2326254 - DNA, 25 bp, Homo sapien
ctgtccagacctgatgcttcctttc

SEQ ID NO: 2326255 - DNA, 25 bp, Homo sapien
cattcagattccctgtaatcaatcc

SEQ ID NO: 2326256 - DNA, 25 bp, Homo sapien
caccctcaattctatttgtgactct

SEQ ID NO: 2326257 - DNA, 25 bp, Homo sapien
ttcttgtttcctggctattactgtg

SEQ ID NO: 2326258 - DNA, 25 bp, Homo sapien
gattcttgtttcctggctattactg

SEQ ID NO: 2326259 - DNA, 25 bp, Homo sapien
gtttcctggctattactgtgatgtt

SEQ ID NO: 2326260 - DNA, 25 bp, Homo sapien
cttgtttcctggctattactgtgat

SEQ ID NO: 2326261 - DNA, 25 bp, Homo sapien
tgttttgcttgtgttttgattgctc

SEQ ID NO: 2326262 - DNA, 25 bp, Homo sapien
tctgttttgcttgtgttttgattgc

SEQ ID NO: 2326263 - DNA, 25 bp, Homo sapien
ttttgcttgtgttttgattgctcac

SEQ ID NO: 2326264 - DNA, 25 bp, Homo sapien
ctacatcttttcttgtgtttctgtt

SEQ ID NO: 2326265 - DNA, 25 bp, Homo sapien
tttatcacagttgttcacaaaatct

SEQ ID NO: 2326266 - DNA, 25 bp, Homo sapien
tggcagtggtaagcaaagtgattcc

SEQ ID NO: 2326267 - DNA, 25 bp, Homo sapien
ggagtgtgtttccacttttggatgc

SEQ ID NO: 2326268 - DNA, 25 bp, Homo sapien
gggaagtgaacaggagtgtgtttcc

SEQ ID NO: 2326269 - DNA, 25 bp, Homo sapien
gaatatagctaaactgtaacccttg

SEQ ID NO: 2326270 - DNA, 25 bp, Homo sapien
tggcaatatagctggggttttcccc

SEQ ID NO: 2326271 - DNA, 25 bp, Homo sapien
ccaaaaattcatattcaactgattg

SEQ ID NO: 2326272 - DNA, 25 bp, Homo sapien
caattggggtggtgtcggtatggca

SEQ ID NO: 2326273 - DNA, 25 bp, Homo sapien
gactaatttcccaatccttgtacta

SEQ ID NO: 2326274 - DNA, 25 bp, Homo sapien
ctaaattgactaatttcccaatcct

SEQ ID NO: 2326275 - DNA, 25 bp, Homo sapien
cacaaaatcactgaagcttccatct

SEQ ID NO: 2326276 - DNA, 25 bp, Homo sapien
caatccttgtactataaacttccac

SEQ ID NO: 2326277 - DNA, 25 bp, Homo sapien
cagacatagagttgccaaggctttc

SEQ ID NO: 2326278 - DNA, 25 bp, Homo sapien
ccagacatagagttgccaaggcttt

SEQ ID NO: 2326279 - DNA, 25 bp, Homo sapien
agacatagagttgccaaggctttcc

SEQ ID NO: 2326280 - DNA, 25 bp, Homo sapien
ttttctggacttgtggtagtttggc

SEQ ID NO: 2326281 - DNA, 25 bp, Homo sapien
cagacttttctggacttgtggtagt

SEQ ID NO: 2326282 - DNA, 25 bp, Homo sapien
ttctggacttgtggtagtttggcat

SEQ ID NO: 2326283 - DNA, 25 bp, Homo sapien
gtgcagacttttctggacttgtggt

SEQ ID NO: 2326284 - DNA, 25 bp, Homo sapien
gatagcattcctgtgataactctca

SEQ ID NO: 2326285 - DNA, 25 bp, Homo sapien
ctcaaaatgtgggtattgccaggaa

SEQ ID NO: 2326286 - DNA, 25 bp, Homo sapien
gttctgtctggagctcagattgggc

SEQ ID NO: 2326287 - DNA, 25 bp, Homo sapien
cattgacacccgtgaagtagggtgc

SEQ ID NO: 2326288 - DNA, 25 bp, Homo sapien
gttttctcctcagttgtatgccacc

SEQ ID NO: 2326289 - DNA, 25 bp, Homo sapien
tattctggttttgctatcggtatga

SEQ ID NO: 2326290 - DNA, 25 bp, Homo sapien
cggaggaatgttgttgcagtatgcc

SEQ ID NO: 2326291 - DNA, 25 bp, Homo sapien
tatgccacctgcatcttgattctaa

SEQ ID NO: 2326292 - DNA, 25 bp, Homo sapien
gagaaggaacagtaagttcatgggc

SEQ ID NO: 2326293 - DNA, 25 bp, Homo sapien
aaggaacagtaagttcatgggcaga

SEQ ID NO: 2326294 - DNA, 25 bp, Homo sapien
tagttttcgagcacagatggagaag

SEQ ID NO: 2326295 - DNA, 25 bp, Homo sapien
cacagatgggcaatagttttcgagc

SEQ ID NO: 2326296 - DNA, 25 bp, Homo sapien
tgaaaataggatgtcttgctgtcct

SEQ ID NO: 2326297 - DNA, 25 bp, Homo sapien
gaaaataggatgtcttgctgtcctg

SEQ ID NO: 2326298 - DNA, 25 bp, Homo sapien
ccaataacactggttgggtgcaggt

SEQ ID NO: 2326299 - DNA, 25 bp, Homo sapien
gtctcccttccaagtcacagtgctg

SEQ ID NO: 2326300 - DNA, 25 bp, Homo sapien
aggtgctaggtacttcttgcctgag

SEQ ID NO: 2326301 - DNA, 25 bp, Homo sapien
gtctgctaatgtttctttgtgagtg

SEQ ID NO: 2326302 - DNA, 25 bp, Homo sapien
tgtactcaccaacctcgaattcagc

SEQ ID NO: 2326303 - DNA, 25 bp, Homo sapien
aatgccatggtactgtctgagcaca

SEQ ID NO: 2326304 - DNA, 25 bp, Homo sapien
ggcacagtcaagatacaaagacacc

SEQ ID NO: 2326305 - DNA, 25 bp, Homo sapien
taatgctatgctaggcaagtcaaca

SEQ ID NO: 2326306 - DNA, 25 bp, Homo sapien
agaagacactcttgtaatagcaggg

SEQ ID NO: 2326307 - DNA, 25 bp, Homo sapien
tgaattttggctagggggtgtccaa

SEQ ID NO: 2326308 - DNA, 25 bp, Homo sapien
gaagttgtcattaccattcagaaac

SEQ ID NO: 2326309 - DNA, 25 bp, Homo sapien
tcagaaacttatagaaactgtagta

SEQ ID NO: 2326310 - DNA, 25 bp, Homo sapien
catagcgctgtaatatgctgtcata

SEQ ID NO: 2326311 - DNA, 25 bp, Homo sapien
gatctgatacatacacttggaaagt

SEQ ID NO: 2326312 - DNA, 25 bp, Homo sapien
tagcgctgtaatatgctgtcataaa

SEQ ID NO: 2326313 - DNA, 25 bp, Homo sapien
tgctgcagcatggagttgatctgat

SEQ ID NO: 2326314 - DNA, 25 bp, Homo sapien
ggataccactgcagataaatagagt

SEQ ID NO: 2326315 - DNA, 25 bp, Homo sapien
aatagagtttgcgaatcagattcac

SEQ ID NO: 2326316 - DNA, 25 bp, Homo sapien
tggtacaaaccagacacaaccgtgg

SEQ ID NO: 2326317 - DNA, 25 bp, Homo sapien
tcctgtgcagttaagtaagctccct

SEQ ID NO: 2326318 - DNA, 25 bp, Homo sapien
caagggtgatatgagctagatgatg

SEQ ID NO: 2326319 - DNA, 25 bp, Homo sapien
gcctagaaaagcttcaagggtgata

SEQ ID NO: 2326320 - DNA, 25 bp, Homo sapien
agctggaagagcctagaaaagcttc

SEQ ID NO: 2326321 - DNA, 25 bp, Homo sapien
gaaaagcttcaagggtgatatgagc

SEQ ID NO: 2326322 - DNA, 25 bp, Homo sapien
tacaccagtaactagaggttctgcc

SEQ ID NO: 2326323 - DNA, 25 bp, Homo sapien
caatatctgtactggaatttctaag

SEQ ID NO: 2326324 - DNA, 25 bp, Homo sapien
gagaaaggatatgggctggctacac

SEQ ID NO: 2326325 - DNA, 25 bp, Homo sapien
aatttctaagccgtggaatatccaa

SEQ ID NO: 2326326 - DNA, 25 bp, Homo sapien
gattgtgcctcccatggatttcttt

SEQ ID NO: 2326327 - DNA, 25 bp, Homo sapien
ttcttgccttgattgtgcctcccat

SEQ ID NO: 2326328 - DNA, 25 bp, Homo sapien
ccttgattgtgcctcccatggattt

SEQ ID NO: 2326329 - DNA, 25 bp, Homo sapien
tgccttgattgtgcctcccatggat

SEQ ID NO: 2326330 - DNA, 25 bp, Homo sapien
tctcctgcgacagaagtaactggca

SEQ ID NO: 2326331 - DNA, 25 bp, Homo sapien
taactggcaggaacgatatccagtc

SEQ ID NO: 2326332 - DNA, 25 bp, Homo sapien
gaagtaactggcaggaacgatatcc

SEQ ID NO: 2326333 - DNA, 25 bp, Homo sapien
tttgagctctcctgcgacagaagta

SEQ ID NO: 2326334 - DNA, 25 bp, Homo sapien
tgacctcggatctgggtttgctcca

SEQ ID NO: 2326335 - DNA, 25 bp, Homo sapien
agggcaagaagaatacccttcctgc

SEQ ID NO: 2326336 - DNA, 25 bp, Homo sapien
tactgattagccaggtgacctcgga

SEQ ID NO: 2326337 - DNA, 25 bp, Homo sapien
ggaagcaagcaagataggtactgat

SEQ ID NO: 2326338 - DNA, 25 bp, Homo sapien
gcgaaagactttcaaccaaggacta

SEQ ID NO: 2326339 - DNA, 25 bp, Homo sapien
ttcctctgtggcgaaagactttcaa

SEQ ID NO: 2326340 - DNA, 25 bp, Homo sapien
tctgtggcgaaagactttcaaccaa

SEQ ID NO: 2326341 - DNA, 25 bp, Homo sapien
tggcgaaagactttcaaccaaggac

SEQ ID NO: 2326342 - DNA, 25 bp, Homo sapien
cgtgactgctcatttggtttcaaca

SEQ ID NO: 2326343 - DNA, 25 bp, Homo sapien
atttccgtgactgctcatttggttt

SEQ ID NO: 2326344 - DNA, 25 bp, Homo sapien
ccgtgactgctcatttggtttcaac

SEQ ID NO: 2326345 - DNA, 25 bp, Homo sapien
ttccgtgactgctcatttggtttca

SEQ ID NO: 2326346 - DNA, 25 bp, Homo sapien
gaaataacttttgacatagttggct

SEQ ID NO: 2326347 - DNA, 25 bp, Homo sapien
aaataacttttgacatagttggcta

SEQ ID NO: 2326348 - DNA, 25 bp, Homo sapien
cttttgacatagttggctacagtgt

SEQ ID NO: 2326349 - DNA, 25 bp, Homo sapien
gacatagttggctacagtgttactg

SEQ ID NO: 2326350 - DNA, 25 bp, Homo sapien
ccctgttgtctttgctttctatgga

SEQ ID NO: 2326351 - DNA, 25 bp, Homo sapien
cctgttgtctttgctttctatggag

SEQ ID NO: 2326352 - DNA, 25 bp, Homo sapien
cagacccatcctggctggtaaccat

SEQ ID NO: 2326353 - DNA, 25 bp, Homo sapien
ggttgtaattcgattcctcacccag

SEQ ID NO: 2326354 - DNA, 25 bp, Homo sapien
taataacagcaaacgaccaggtcga

SEQ ID NO: 2326355 - DNA, 25 bp, Homo sapien
cgaggattgaagtgggttgtaattc

SEQ ID NO: 2326356 - DNA, 25 bp, Homo sapien
gcatgcgaaatgaggctccgtgagc

SEQ ID NO: 2326357 - DNA, 25 bp, Homo sapien
gcggagtagagggacgccgagaggg

SEQ ID NO: 2326358 - DNA, 25 bp, Homo sapien
atgcgggtccatcggccggcgtctc

SEQ ID NO: 2326359 - DNA, 25 bp, Homo sapien
gtccgggactgtagagggatcgccc

SEQ ID NO: 2326360 - DNA, 25 bp, Homo sapien
ggggctgcaggtaggtgcgagccgc

SEQ ID NO: 2326361 - DNA, 25 bp, Homo sapien
gcggggctgcaggtaggtgcgagcc

SEQ ID NO: 2326362 - DNA, 25 bp, Homo sapien
ggctgcaggtaggtgcgagccgcgc

SEQ ID NO: 2326363 - DNA, 25 bp, Homo sapien
aagcggggctgcaggtaggtgcgag

SEQ ID NO: 2326364 - DNA, 25 bp, Homo sapien
gagcatcgctaggtgttgccgccac

SEQ ID NO: 2326365 - DNA, 25 bp, Homo sapien
aggagcatcgctaggtgttgccgcc

SEQ ID NO: 2326366 - DNA, 25 bp, Homo sapien
ctgcaggagcatcgctaggtgttgc

SEQ ID NO: 2326367 - DNA, 25 bp, Homo sapien
gcaggagcatcgctaggtgttgccg

SEQ ID NO: 2326368 - DNA, 25 bp, Homo sapien
tcttggaagcgatgcgagagcgata

SEQ ID NO: 2326369 - DNA, 25 bp, Homo sapien
atggtgacggcggattggcatcttg

SEQ ID NO: 2326370 - DNA, 25 bp, Homo sapien
ttggcatcttggaagcgatgcgaga

SEQ ID NO: 2326371 - DNA, 25 bp, Homo sapien
cgagagcgataaggctggcgccggc

SEQ ID NO: 2326372 - DNA, 25 bp, Homo sapien
gggccacactcacacgccgccctcc

SEQ ID NO: 2326373 - DNA, 25 bp, Homo sapien
agggccacactcacacgccgccctc

SEQ ID NO: 2326374 - DNA, 25 bp, Homo sapien
cagggccacactcacacgccgccct

SEQ ID NO: 2326375 - DNA, 25 bp, Homo sapien
gccacactcacacgccgccctccac

SEQ ID NO: 2326376 - DNA, 25 bp, Homo sapien
cttggatgtcagattcctgaaccgt

SEQ ID NO: 2326377 - DNA, 25 bp, Homo sapien
gggattccagcttggatgtcagatt

SEQ ID NO: 2326378 - DNA, 25 bp, Homo sapien
ccagcttggatgtcagattcctgaa

SEQ ID NO: 2326379 - DNA, 25 bp, Homo sapien
tcagggggattccagcttggatgtc

SEQ ID NO: 2326380 - DNA, 25 bp, Homo sapien
gtacctgcgagagccagggaactcg

SEQ ID NO: 2326381 - DNA, 25 bp, Homo sapien
aagtgcgtggccgaggctgctttcc

SEQ ID NO: 2326382 - DNA, 25 bp, Homo sapien
tgattcttgcagtccagggagctga

SEQ ID NO: 2326383 - DNA, 25 bp, Homo sapien
ggtaattgcagcaagaccgccttga

SEQ ID NO: 2326384 - DNA, 25 bp, Homo sapien
ttgtgttcgatgttggaactcgcac

SEQ ID NO: 2326385 - DNA, 25 bp, Homo sapien
tcgcttgtgttcgatgttggaactc

SEQ ID NO: 2326386 - DNA, 25 bp, Homo sapien
gctcgcttgtgttcgatgttggaac

SEQ ID NO: 2326387 - DNA, 25 bp, Homo sapien
ctgctcgcttgtgttcgatgttgga

SEQ ID NO: 2326388 - DNA, 25 bp, Homo sapien
gagaggaggctttgcttgctaaacg

SEQ ID NO: 2326389 - DNA, 25 bp, Homo sapien
tttagcaaagtgacacaggcgacac

SEQ ID NO: 2326390 - DNA, 25 bp, Homo sapien
ccgccggtgatctggatttgtttcc

SEQ ID NO: 2326391 - DNA, 25 bp, Homo sapien
gtcttttgacagtatagcatctggg

SEQ ID NO: 2326392 - DNA, 25 bp, Homo sapien
tttgctaggctacatctgtcataga

SEQ ID NO: 2326393 - DNA, 25 bp, Homo sapien
tgaaaagcttctggagatcattcac

SEQ ID NO: 2326394 - DNA, 25 bp, Homo sapien
tactgttgagagctactggcttcac

SEQ ID NO: 2326395 - DNA, 25 bp, Homo sapien
gacaatacatttggtcatccaacag

SEQ ID NO: 2326396 - DNA, 25 bp, Homo sapien
catgcactgtgcttgggcagacacc

SEQ ID NO: 2326397 - DNA, 25 bp, Homo sapien
ttcatgcactgtgcttgggcagaca

SEQ ID NO: 2326398 - DNA, 25 bp, Homo sapien
cattcatgcactgtgcttgggcaga

SEQ ID NO: 2326399 - DNA, 25 bp, Homo sapien
tatacattcatgcactgtgcttggg

SEQ ID NO: 2326400 - DNA, 25 bp, Homo sapien
ccagagcattatgggaatggcgtcc

SEQ ID NO: 2326401 - DNA, 25 bp, Homo sapien
cattatgggaatggcgtcccacggc

SEQ ID NO: 2326402 - DNA, 25 bp, Homo sapien
cttcttccactagcggtaggggagg

SEQ ID NO: 2326403 - DNA, 25 bp, Homo sapien
ggcggcacgccccagagcattatgg

SEQ ID NO: 2326404 - DNA, 25 bp, Homo sapien
aggttttgagcagcgtcgcgatgtc

SEQ ID NO: 2326405 - DNA, 25 bp, Homo sapien
ctgggtgtccagatccgccgctccg

SEQ ID NO: 2326406 - DNA, 25 bp, Homo sapien
cgcgatgtcagaccgctgggtgtcc

SEQ ID NO: 2326407 - DNA, 25 bp, Homo sapien
cctttccggagcgaggttttgagca

SEQ ID NO: 2326408 - DNA, 25 bp, Homo sapien
taaagccggtgagatcgtgataagc

SEQ ID NO: 2326409 - DNA, 25 bp, Homo sapien
tgcctcccggaagaccaagaatcag

SEQ ID NO: 2326410 - DNA, 25 bp, Homo sapien
tggacgccgacaattctaggaaagg

SEQ ID NO: 2326411 - DNA, 25 bp, Homo sapien
tgtcactagcgaaagaaccagctcg

SEQ ID NO: 2326412 - DNA, 25 bp, Homo sapien
ttgataattagcacacttatctatg

SEQ ID NO: 2326413 - DNA, 25 bp, Homo sapien
gtttttgataattagcacacttatc

SEQ ID NO: 2326414 - DNA, 25 bp, Homo sapien
tttttgataattagcacacttatct

SEQ ID NO: 2326415 - DNA, 25 bp, Homo sapien
ttttgataattagcacacttatcta

SEQ ID NO: 2326416 - DNA, 25 bp, Homo sapien
tgatttagcatttatcattccatga

SEQ ID NO: 2326417 - DNA, 25 bp, Homo sapien
atttagcatttatcattccatgaat

SEQ ID NO: 2326418 - DNA, 25 bp, Homo sapien
tagcatttatcattccatgaatatt

SEQ ID NO: 2326419 - DNA, 25 bp, Homo sapien
tctgatttagcatttatcattccat

SEQ ID NO: 2326420 - DNA, 25 bp, Homo sapien
cagaaacttcgtagaataagagccc

SEQ ID NO: 2326421 - DNA, 25 bp, Homo sapien
taagagcccaaatgttcacacgcat

SEQ ID NO: 2326422 - DNA, 25 bp, Homo sapien
cacacgcatgcctataagagattca

SEQ ID NO: 2326423 - DNA, 25 bp, Homo sapien
tagggttagagctttgactatcaga

SEQ ID NO: 2326424 - DNA, 25 bp, Homo sapien
tgttcctgcttaattgcctaatatt

SEQ ID NO: 2326425 - DNA, 25 bp, Homo sapien
taacactactcggtgggtacacaaa

SEQ ID NO: 2326426 - DNA, 25 bp, Homo sapien
tataacttatcaaggtcatgtaaca

SEQ ID NO: 2326427 - DNA, 25 bp, Homo sapien
ggtacacaaagtcccgcactctagt

SEQ ID NO: 2326428 - DNA, 25 bp, Homo sapien
caaggagggttatccaaaatctgcc

SEQ ID NO: 2326429 - DNA, 25 bp, Homo sapien
atgggacaaccctgccctaggcctt

SEQ ID NO: 2326430 - DNA, 25 bp, Homo sapien
tgtacaggtttgcatgcttccctaa

SEQ ID NO: 2326431 - DNA, 25 bp, Homo sapien
gagttattatcaagtggtgcaagga

SEQ ID NO: 2326432 - DNA, 25 bp, Homo sapien
tcaagattatgcaattgaaagcccc

SEQ ID NO: 2326433 - DNA, 25 bp, Homo sapien
tgtcaagattatgcaattgaaagcc

SEQ ID NO: 2326434 - DNA, 25 bp, Homo sapien
tatgcaattgaaagcccccacacat

SEQ ID NO: 2326435 - DNA, 25 bp, Homo sapien
gattatgcaattgaaagcccccaca

SEQ ID NO: 2326436 - DNA, 25 bp, Homo sapien
tatcttaggaaacactttaagtgtc

SEQ ID NO: 2326437 - DNA, 25 bp, Homo sapien
tacacatagagcgtgaataacagac

SEQ ID NO: 2326438 - DNA, 25 bp, Homo sapien
cagctgatggctacattagaagccc

SEQ ID NO: 2326439 - DNA, 25 bp, Homo sapien
caatgtagcatatatggatacacac

SEQ ID NO: 2326440 - DNA, 25 bp, Homo sapien
gaaccagcgactatcgactaggtac

SEQ ID NO: 2326441 - DNA, 25 bp, Homo sapien
cactgtttgaaccagcgactatcga

SEQ ID NO: 2326442 - DNA, 25 bp, Homo sapien
gtcccaactgtcaaagccaacatat

SEQ ID NO: 2326443 - DNA, 25 bp, Homo sapien
attttttccactgtttgaaccagcg

SEQ ID NO: 2326444 - DNA, 25 bp, Homo sapien
tccaggatacacattttgatctccc

SEQ ID NO: 2326445 - DNA, 25 bp, Homo sapien
ggtccaggatacacattttgatctc

SEQ ID NO: 2326446 - DNA, 25 bp, Homo sapien
gtccagagttatcaatgggtccagg

SEQ ID NO: 2326447 - DNA, 25 bp, Homo sapien
tccagagttatcaatgggtccagga

SEQ ID NO: 2326448 - DNA, 25 bp, Homo sapien
tttccaaattcaacccactgacatt

SEQ ID NO: 2326449 - DNA, 25 bp, Homo sapien
aaacaaaacttgtcatacagaataa

SEQ ID NO: 2326450 - DNA, 25 bp, Homo sapien
taatgagttcattaggtaaaatctg

SEQ ID NO: 2326451 - DNA, 25 bp, Homo sapien
aacttatttgcgctaacattttcca

SEQ ID NO: 2326452 - DNA, 25 bp, Homo sapien
gttagtcttgcttaccacagcctgg

SEQ ID NO: 2326453 - DNA, 25 bp, Homo sapien
gccaggtaatatttggtcagatcca

SEQ ID NO: 2326454 - DNA, 25 bp, Homo sapien
agtggtaccttgtctgaccttgggc

SEQ ID NO: 2326455 - DNA, 25 bp, Homo sapien
cacagcctggtgttatcttgttcca

SEQ ID NO: 2326456 - DNA, 25 bp, Homo sapien
ttcagttatcgtattccaaaatttg

SEQ ID NO: 2326457 - DNA, 25 bp, Homo sapien
gtctacaagtttgccaattcatcta

SEQ ID NO: 2326458 - DNA, 25 bp, Homo sapien
cagttatcgtattccaaaatttgtt

SEQ ID NO: 2326459 - DNA, 25 bp, Homo sapien
aaatgatccgtctacaagtttgcca

SEQ ID NO: 2326460 - DNA, 25 bp, Homo sapien
ttcagttggcaacagtatgtaatcc

SEQ ID NO: 2326461 - DNA, 25 bp, Homo sapien
aaggtgttccttaagtgactgggca

SEQ ID NO: 2326462 - DNA, 25 bp, Homo sapien
ccatcaatgtgtaccagctgacaag

SEQ ID NO: 2326463 - DNA, 25 bp, Homo sapien
tgacaagtttattccaaccttcagt

SEQ ID NO: 2326464 - DNA, 25 bp, Homo sapien
aataatacatacttacaatagtggc

SEQ ID NO: 2326465 - DNA, 25 bp, Homo sapien
tagtggctagcataagtaaaccttc

SEQ ID NO: 2326466 - DNA, 25 bp, Homo sapien
tctctatatatagaggattaatcaa

SEQ ID NO: 2326467 - DNA, 25 bp, Homo sapien
cacagtgtacggttattttgctggc

SEQ ID NO: 2326468 - DNA, 25 bp, Homo sapien
gaactccacgcaatgtaatatagca

SEQ ID NO: 2326469 - DNA, 25 bp, Homo sapien
gacacaggtttcaagaactctcaat

SEQ ID NO: 2326470 - DNA, 25 bp, Homo sapien
tatgtggtctcccaagagatttgtc

SEQ ID NO: 2326471 - DNA, 25 bp, Homo sapien
tgaagaccgctagtgtataatgtgc

SEQ ID NO: 2326472 - DNA, 25 bp, Homo sapien
ggaaccaccaatcctagattcttta

SEQ ID NO: 2326473 - DNA, 25 bp, Homo sapien
tttaatgcaatcagagatgggtaac

SEQ ID NO: 2326474 - DNA, 25 bp, Homo sapien
cacctgcatcagtcatgtgggccac

SEQ ID NO: 2326475 - DNA, 25 bp, Homo sapien
acattgaaagttgggcttcagacac

SEQ ID NO: 2326476 - DNA, 25 bp, Homo sapien
aaatctactaactcaattacctggg

SEQ ID NO: 2326477 - DNA, 25 bp, Homo sapien
cttttcgtccattctttgagtgttg

SEQ ID NO: 2326478 - DNA, 25 bp, Homo sapien
ggattttgattccatcgtattttct

SEQ ID NO: 2326479 - DNA, 25 bp, Homo sapien
cgtattttctgcttatatccttgct

SEQ ID NO: 2326480 - DNA, 25 bp, Homo sapien
tgtgcacccaagatgtaagccgcgg

SEQ ID NO: 2326481 - DNA, 25 bp, Homo sapien
gagtgtcctcgccatatgcagttga

SEQ ID NO: 2326482 - DNA, 25 bp, Homo sapien
agtacaacatggaagaagagtgccc

SEQ ID NO: 2326483 - DNA, 25 bp, Homo sapien
tgcagttgaattccccgagtgagaa

SEQ ID NO: 2326484 - DNA, 25 bp, Homo sapien
tgtcatgtttatgctagccttataa

SEQ ID NO: 2326485 - DNA, 25 bp, Homo sapien
ggttttcaatgactcaatttcttta

SEQ ID NO: 2326486 - DNA, 25 bp, Homo sapien
atcacataggtgaattcgagtttcc

SEQ ID NO: 2326487 - DNA, 25 bp, Homo sapien
ggtagaatacactggtaaagctttc

SEQ ID NO: 2326488 - DNA, 25 bp, Homo sapien
gtgctttacaaacataccctgttca

SEQ ID NO: 2326489 - DNA, 25 bp, Homo sapien
tgtgagatatacttctactttgcag

SEQ ID NO: 2326490 - DNA, 25 bp, Homo sapien
ctattgtgtcagctttgctaaatct

SEQ ID NO: 2326491 - DNA, 25 bp, Homo sapien
gctaaatcttcgagttacaacatta

SEQ ID NO: 2326492 - DNA, 25 bp, Homo sapien
tatcatccaagtagcatatacaaag

SEQ ID NO: 2326493 - DNA, 25 bp, Homo sapien
agacattgtatcaaagctggaaatc

SEQ ID NO: 2326494 - DNA, 25 bp, Homo sapien
aatccttaaaatggttatcatccaa

SEQ ID NO: 2326495 - DNA, 25 bp, Homo sapien
gctggaaatcaaatgtctatatata

SEQ ID NO: 2326496 - DNA, 25 bp, Homo sapien
tgtgtcaaaataacgctaagcctgc

SEQ ID NO: 2326497 - DNA, 25 bp, Homo sapien
acagaggtacggtttcggcccactg

SEQ ID NO: 2326498 - DNA, 25 bp, Homo sapien
cattaggattaaccaagcactgagt

SEQ ID NO: 2326499 - DNA, 25 bp, Homo sapien
tccaagctgggttctacaagttatg

SEQ ID NO: 2326500 - DNA, 25 bp, Homo sapien
gtctacctagatataaccactgttg

SEQ ID NO: 2326501 - DNA, 25 bp, Homo sapien
gcatgttttagaatagcctgataca

SEQ ID NO: 2326502 - DNA, 25 bp, Homo sapien
tagtaacgcaaaagccttgaggtgc

SEQ ID NO: 2326503 - DNA, 25 bp, Homo sapien
tggacacacccatgtaaattgcacc

SEQ ID NO: 2326504 - DNA, 25 bp, Homo sapien
catgtatttgttccacaatctggtc

SEQ ID NO: 2326505 - DNA, 25 bp, Homo sapien
ataaaccagcatcctgaatggtgct

SEQ ID NO: 2326506 - DNA, 25 bp, Homo sapien
catcctgaatggtgctgtctggttt

SEQ ID NO: 2326507 - DNA, 25 bp, Homo sapien
aaatgtgttactcatgtatttgttc

SEQ ID NO: 2326508 - DNA, 25 bp, Homo sapien
cagtagacaaggtgaacaggtaatc

SEQ ID NO: 2326509 - DNA, 25 bp, Homo sapien
catttcgattccaaagctaggcagg

SEQ ID NO: 2326510 - DNA, 25 bp, Homo sapien
tatgcaaatgcagacgaagggcgac

SEQ ID NO: 2326511 - DNA, 25 bp, Homo sapien
cagtaatgatagtgagaaggaatcc

SEQ ID NO: 2326512 - DNA, 25 bp, Homo sapien
agtagaaggaccccttggccatgtt

SEQ ID NO: 2326513 - DNA, 25 bp, Homo sapien
gtagaaggaccccttggccatgttc

SEQ ID NO: 2326514 - DNA, 25 bp, Homo sapien
gaatttctgcaatacacatctaggt

SEQ ID NO: 2326515 - DNA, 25 bp, Homo sapien
agccataagaagtgggagcacttac

SEQ ID NO: 2326516 - DNA, 25 bp, Homo sapien
tgatttgactgtatcagacaacgca

SEQ ID NO: 2326517 - DNA, 25 bp, Homo sapien
tttgattatctagcatcaagggctt

SEQ ID NO: 2326518 - DNA, 25 bp, Homo sapien
ccttatcagaacatgtgaaattcca

SEQ ID NO: 2326519 - DNA, 25 bp, Homo sapien
ttacagtaatggagggacatgtacc

SEQ ID NO: 2326520 - DNA, 25 bp, Homo sapien
cggagggcattgtagttttaaatca

SEQ ID NO: 2326521 - DNA, 25 bp, Homo sapien
ggtggcaacctaacctgaactgata

SEQ ID NO: 2326522 - DNA, 25 bp, Homo sapien
gctgatctctcggtatagaaaaaac

SEQ ID NO: 2326523 - DNA, 25 bp, Homo sapien
gctatagacttgaggtgcacaggat

SEQ ID NO: 2326524 - DNA, 25 bp, Homo sapien
gagaatcttttcatacataggtgca

SEQ ID NO: 2326525 - DNA, 25 bp, Homo sapien
tattggaacacaggcattgccatgt

SEQ ID NO: 2326526 - DNA, 25 bp, Homo sapien
ctgggtcagagggattaaacacttc

SEQ ID NO: 2326527 - DNA, 25 bp, Homo sapien
aaagatctcaccattgttactccca

SEQ ID NO: 2326528 - DNA, 25 bp, Homo sapien
tagctaggctatctccaaatcccca

SEQ ID NO: 2326529 - DNA, 25 bp, Homo sapien
ccaatacttggcatcagaaaacttt

SEQ ID NO: 2326530 - DNA, 25 bp, Homo sapien
taaaattacgtgttctgtgctggag

SEQ ID NO: 2326531 - DNA, 25 bp, Homo sapien
tggtgtttgacaccctagctaggaa

SEQ ID NO: 2326532 - DNA, 25 bp, Homo sapien
caacagcattggtgtgacctgcaag

SEQ ID NO: 2326533 - DNA, 25 bp, Homo sapien
gagtgtcatccttagaccaacagca

SEQ ID NO: 2326534 - DNA, 25 bp, Homo sapien
ggttcttagatctctaatacagact

SEQ ID NO: 2326535 - DNA, 25 bp, Homo sapien
agaagacttttgagtgagtattttt

SEQ ID NO: 2326536 - DNA, 25 bp, Homo sapien
gactttgagttgttttaggtgctga

SEQ ID NO: 2326537 - DNA, 25 bp, Homo sapien
gctacccaaagtggagtgcactggc

SEQ ID NO: 2326538 - DNA, 25 bp, Homo sapien
ctagcaactctgctctagtggcttt

SEQ ID NO: 2326539 - DNA, 25 bp, Homo sapien
taaatcctgaatgggtggcaagcaa

SEQ ID NO: 2326540 - DNA, 25 bp, Homo sapien
caaggagggcctatcacatagacta

SEQ ID NO: 2326541 - DNA, 25 bp, Homo sapien
taaagaggaaccgagctagacagac

SEQ ID NO: 2326542 - DNA, 25 bp, Homo sapien
tacaggtagagtagagggactgtcc

SEQ ID NO: 2326543 - DNA, 25 bp, Homo sapien
atcttatttcaatttcgaatatgac

SEQ ID NO: 2326544 - DNA, 25 bp, Homo sapien
caaaatacaatggttttgtactgtt

SEQ ID NO: 2326545 - DNA, 25 bp, Homo sapien
tcatgtcaaaatacaatggttttgt

SEQ ID NO: 2326546 - DNA, 25 bp, Homo sapien
ttcaatttcgaatatgacaaatatt

SEQ ID NO: 2326547 - DNA, 25 bp, Homo sapien
tgactaaaagagtaaattggtacca

SEQ ID NO: 2326548 - DNA, 25 bp, Homo sapien
taccagtagaatggggtgttgttga

SEQ ID NO: 2326549 - DNA, 25 bp, Homo sapien
ctgggtaataggcagagaggttgga

SEQ ID NO: 2326550 - DNA, 25 bp, Homo sapien
tgttaagtccaatgaacctctttct

SEQ ID NO: 2326551 - DNA, 25 bp, Homo sapien
ttgtagctttcataatcctctggtg

SEQ ID NO: 2326552 - DNA, 25 bp, Homo sapien
gaactacaagtggaaccagtcattg

SEQ ID NO: 2326553 - DNA, 25 bp, Homo sapien
aacgactacgtgtggttatgtgaac

SEQ ID NO: 2326554 - DNA, 25 bp, Homo sapien
caaactgaagtatcatggctgtcat

SEQ ID NO: 2326555 - DNA, 25 bp, Homo sapien
taaatgactactgtatgcctcaccc

SEQ ID NO: 2326556 - DNA, 25 bp, Homo sapien
agactaggaagtactgacaggaaca

SEQ ID NO: 2326557 - DNA, 25 bp, Homo sapien
gaaagacacagttcctgacctcaaa

SEQ ID NO: 2326558 - DNA, 25 bp, Homo sapien
gcctcacccttgataagtactggga

SEQ ID NO: 2326559 - DNA, 25 bp, Homo sapien
tctgttgttcatgttgttataatta

SEQ ID NO: 2326560 - DNA, 25 bp, Homo sapien
taattatttgatagagatgaaggag

SEQ ID NO: 2326561 - DNA, 25 bp, Homo sapien
agttgaaaaattggatgcacctggg

SEQ ID NO: 2326562 - DNA, 25 bp, Homo sapien
ggagagatctttggtaaagttgaaa

SEQ ID NO: 2326563 - DNA, 25 bp, Homo sapien
tatagcaatataacacacacttcaa

SEQ ID NO: 2326564 - DNA, 25 bp, Homo sapien
catggaagaactgaccggtaattta

SEQ ID NO: 2326565 - DNA, 25 bp, Homo sapien
tgtgattacacatctagttctaaaa

SEQ ID NO: 2326566 - DNA, 25 bp, Homo sapien
gctgtgtaaccttgactttcaactg

SEQ ID NO: 2326567 - DNA, 25 bp, Homo sapien
attctgttattgtaatagagtaaaa

SEQ ID NO: 2326568 - DNA, 25 bp, Homo sapien
tctcctttatgaccctttgcattct

SEQ ID NO: 2326569 - DNA, 25 bp, Homo sapien
tgttattgtaatagagtaaaaatgg

SEQ ID NO: 2326570 - DNA, 25 bp, Homo sapien
aatcatctcctttatgaccctttgc

SEQ ID NO: 2326571 - DNA, 25 bp, Homo sapien
ctttgattaactagagcagctttac

SEQ ID NO: 2326572 - DNA, 25 bp, Homo sapien
tgattaactagagcagctttacagt

SEQ ID NO: 2326573 - DNA, 25 bp, Homo sapien
ttgattaactagagcagctttacag

SEQ ID NO: 2326574 - DNA, 25 bp, Homo sapien
gattaactagagcagctttacagtt

SEQ ID NO: 2326575 - DNA, 25 bp, Homo sapien
ttcccaagttacttaggccacagag

SEQ ID NO: 2326576 - DNA, 25 bp, Homo sapien
taatcatagttcttataagcggtat

SEQ ID NO: 2326577 - DNA, 25 bp, Homo sapien
tttcttccaggttccgaataatcat

SEQ ID NO: 2326578 - DNA, 25 bp, Homo sapien
cggtatatgatggaagacagtaatt

SEQ ID NO: 2326579 - DNA, 25 bp, Homo sapien
tcaagtgatcatgtatgctcactat

SEQ ID NO: 2326580 - DNA, 25 bp, Homo sapien
gctgaatatgaaccactccctttct

SEQ ID NO: 2326581 - DNA, 25 bp, Homo sapien
gagaaagttgtcttttgtaatgctg

SEQ ID NO: 2326582 - DNA, 25 bp, Homo sapien
aaagagaaagttgtcttttgtaatg

SEQ ID NO: 2326583 - DNA, 25 bp, Homo sapien
ggacaaaactttctgcaacagccat

SEQ ID NO: 2326584 - DNA, 25 bp, Homo sapien
ctcaatgcttcctggactgttaaac

SEQ ID NO: 2326585 - DNA, 25 bp, Homo sapien
ctgttaaacaggacaaaactttctg

SEQ ID NO: 2326586 - DNA, 25 bp, Homo sapien
acaggacaaaactttctgcaacagc

SEQ ID NO: 2326587 - DNA, 25 bp, Homo sapien
tacgactatatactatgcattgttt

SEQ ID NO: 2326588 - DNA, 25 bp, Homo sapien
aactacgactatatactatgcattg

SEQ ID NO: 2326589 - DNA, 25 bp, Homo sapien
atgccataaactacgactatatact

SEQ ID NO: 2326590 - DNA, 25 bp, Homo sapien
cataaactacgactatatactatgc

SEQ ID NO: 2326591 - DNA, 25 bp, Homo sapien
gtagaaattatggattgtctactca

SEQ ID NO: 2326592 - DNA, 25 bp, Homo sapien
tagaaattatggattgtctactcat

SEQ ID NO: 2326593 - DNA, 25 bp, Homo sapien
ggtagaaattatggattgtctactc

SEQ ID NO: 2326594 - DNA, 25 bp, Homo sapien
ttggtagaaattatggattgtctac

SEQ ID NO: 2326595 - DNA, 25 bp, Homo sapien
cctctcattcctaagggattgtcaa

SEQ ID NO: 2326596 - DNA, 25 bp, Homo sapien
taagtggaggtgtgttgctcaaaca

SEQ ID NO: 2326597 - DNA, 25 bp, Homo sapien
gggtgacgtagctaaactttccaga

SEQ ID NO: 2326598 - DNA, 25 bp, Homo sapien
tgatcagttcggcataagatttagc

SEQ ID NO: 2326599 - DNA, 25 bp, Homo sapien
tcaaatcctcatgtaatccatctaa

SEQ ID NO: 2326600 - DNA, 25 bp, Homo sapien
ctgaggtgcaaaacgtcctacctgt

SEQ ID NO: 2326601 - DNA, 25 bp, Homo sapien
tatccagagaactgaggtgcaaaac

SEQ ID NO: 2326602 - DNA, 25 bp, Homo sapien
taattctattcaaatcctcatgtaa

SEQ ID NO: 2326603 - DNA, 25 bp, Homo sapien
gaagtgtcaagtaacaaaaaggatc

SEQ ID NO: 2326604 - DNA, 25 bp, Homo sapien
cattctaactaagtaaacttccaag

SEQ ID NO: 2326605 - DNA, 25 bp, Homo sapien
caaatgttactgaaatcttagcaca

SEQ ID NO: 2326606 - DNA, 25 bp, Homo sapien
taggtttggtaagtggatccattct

SEQ ID NO: 2326607 - DNA, 25 bp, Homo sapien
tagaggctggtgtgctacaaatcca

SEQ ID NO: 2326608 - DNA, 25 bp, Homo sapien
caggccctacatgctttatcacgaa

SEQ ID NO: 2326609 - DNA, 25 bp, Homo sapien
tcagagctgttcacatgtgctgaag

SEQ ID NO: 2326610 - DNA, 25 bp, Homo sapien
tgatcctttgacagtactcagaaat

SEQ ID NO: 2326611 - DNA, 25 bp, Homo sapien
gacaatgctgtacaaagatctaata

SEQ ID NO: 2326612 - DNA, 25 bp, Homo sapien
tgcaggtattcctgacaaagcagac

SEQ ID NO: 2326613 - DNA, 25 bp, Homo sapien
ctgcaggtattcctgacaaagcaga

SEQ ID NO: 2326614 - DNA, 25 bp, Homo sapien
aatgctgtacaaagatctaatatgt

SEQ ID NO: 2326615 - DNA, 25 bp, Homo sapien
catccatagcgaatattctgtgaaa

SEQ ID NO: 2326616 - DNA, 25 bp, Homo sapien
gattgtatatatcagtaactatcat

SEQ ID NO: 2326617 - DNA, 25 bp, Homo sapien
tatcatcccgttccataatactact

SEQ ID NO: 2326618 - DNA, 25 bp, Homo sapien
tctgtgaaatctatgattgtatata

SEQ ID NO: 2326619 - DNA, 25 bp, Homo sapien
tcttaggcaaacaggaataatcacg

SEQ ID NO: 2326620 - DNA, 25 bp, Homo sapien
tcgtggtacagccataagaaagggc

SEQ ID NO: 2326621 - DNA, 25 bp, Homo sapien
caaaaagtgaagaaccagtatggtg

SEQ ID NO: 2326622 - DNA, 25 bp, Homo sapien
tatggtgggtataactcgagtgtct

SEQ ID NO: 2326623 - DNA, 25 bp, Homo sapien
catgtatgccatttgggccattccc

SEQ ID NO: 2326624 - DNA, 25 bp, Homo sapien
gcagtgtagggatccttcagtttct

SEQ ID NO: 2326625 - DNA, 25 bp, Homo sapien
cttcatgtatgccatttgggccatt

SEQ ID NO: 2326626 - DNA, 25 bp, Homo sapien
cccattaatattttggtccttacag

SEQ ID NO: 2326627 - DNA, 25 bp, Homo sapien
acaatcgttttttgtgtcccgtgag

SEQ ID NO: 2326628 - DNA, 25 bp, Homo sapien
cttatatgcctggtatcatctttga

SEQ ID NO: 2326629 - DNA, 25 bp, Homo sapien
tattgcctaagttgttgaactggaa

SEQ ID NO: 2326630 - DNA, 25 bp, Homo sapien
gatgtagttgatatcagtattgcct

SEQ ID NO: 2326631 - DNA, 25 bp, Homo sapien
caaacacacattttagtctacttag

SEQ ID NO: 2326632 - DNA, 25 bp, Homo sapien
acatgctcggcttgtttaatgttca

SEQ ID NO: 2326633 - DNA, 25 bp, Homo sapien
ttagtctacttagatattaagtcct

SEQ ID NO: 2326634 - DNA, 25 bp, Homo sapien
taacatgctcggcttgtttaatgtt

SEQ ID NO: 2326635 - DNA, 25 bp, Homo sapien
aggatcccaatccaaagcaagaaaa

SEQ ID NO: 2326636 - DNA, 25 bp, Homo sapien
tttcaaatcaggatcccaatccaaa

SEQ ID NO: 2326637 - DNA, 25 bp, Homo sapien
ttcaaatcaggatcccaatccaaag

SEQ ID NO: 2326638 - DNA, 25 bp, Homo sapien
tcaggatcccaatccaaagcaagaa

SEQ ID NO: 2326639 - DNA, 25 bp, Homo sapien
cagggatcttcagcacctagctttt

SEQ ID NO: 2326640 - DNA, 25 bp, Homo sapien
agggatcttcagcacctagcttttc

SEQ ID NO: 2326641 - DNA, 25 bp, Homo sapien
gggatcttcagcacctagcttttct

SEQ ID NO: 2326642 - DNA, 25 bp, Homo sapien
ggatcttcagcacctagcttttctt

SEQ ID NO: 2326643 - DNA, 25 bp, Homo sapien
caacttgtctctcatgtatcgactg

SEQ ID NO: 2326644 - DNA, 25 bp, Homo sapien
gatgtactacaagtactggaggcag

SEQ ID NO: 2326645 - DNA, 25 bp, Homo sapien
aatcaactaaggtatccaacttgtc

SEQ ID NO: 2326646 - DNA, 25 bp, Homo sapien
gtatcgactgtaagaaaatcgcttg

SEQ ID NO: 2326647 - DNA, 25 bp, Homo sapien
gttacctttatagatacacctgcct

SEQ ID NO: 2326648 - DNA, 25 bp, Homo sapien
gaattctcaactgttaaaagcaggg

SEQ ID NO: 2326649 - DNA, 25 bp, Homo sapien
ttctgctgaataactaagtgacggg

SEQ ID NO: 2326650 - DNA, 25 bp, Homo sapien
tttatagccaccaattagaatgagt

SEQ ID NO: 2326651 - DNA, 25 bp, Homo sapien
catagtggttggaaacagcaatcag

SEQ ID NO: 2326652 - DNA, 25 bp, Homo sapien
taagaattccgacatatccaagtca

SEQ ID NO: 2326653 - DNA, 25 bp, Homo sapien
gacctgcatttggattaattaagaa

SEQ ID NO: 2326654 - DNA, 25 bp, Homo sapien
cagcaatcagattatagcggcaagg

SEQ ID NO: 2326655 - DNA, 25 bp, Homo sapien
acaccatgatttgggtaaaaaggca

SEQ ID NO: 2326656 - DNA, 25 bp, Homo sapien
ctggagttcttcaaacaccatgatt

SEQ ID NO: 2326657 - DNA, 25 bp, Homo sapien
agttcttcaaacaccatgatttggg

SEQ ID NO: 2326658 - DNA, 25 bp, Homo sapien
cttcaaacaccatgatttgggtaaa

SEQ ID NO: 2326659 - DNA, 25 bp, Homo sapien
gaatttgccacgtgctgagtactat

SEQ ID NO: 2326660 - DNA, 25 bp, Homo sapien
catacatgggttctgcgtccctgaa

SEQ ID NO: 2326661 - DNA, 25 bp, Homo sapien
tactcaaggtactatactgttagct

SEQ ID NO: 2326662 - DNA, 25 bp, Homo sapien
caaaagtgtagtcggtcctgtgcat

SEQ ID NO: 2326663 - DNA, 25 bp, Homo sapien
tataatcactgtgacgaaaatgatc

SEQ ID NO: 2326664 - DNA, 25 bp, Homo sapien
tctggggactcctcaaaactctata

SEQ ID NO: 2326665 - DNA, 25 bp, Homo sapien
cactgtgacgaaaatgatcttggtt

SEQ ID NO: 2326666 - DNA, 25 bp, Homo sapien
aaaaaatataatcactgtgacgaaa

SEQ ID NO: 2326667 - DNA, 25 bp, Homo sapien
gagacactactgtcatcaaaatagt

SEQ ID NO: 2326668 - DNA, 25 bp, Homo sapien
cacaatttggtcttcagatgcagtg

SEQ ID NO: 2326669 - DNA, 25 bp, Homo sapien
atgcagtggagacactactgtcatc

SEQ ID NO: 2326670 - DNA, 25 bp, Homo sapien
acaatttggtcttcagatgcagtgg

SEQ ID NO: 2326671 - DNA, 25 bp, Homo sapien
tgtgctggttattgtcccctcaaac

SEQ ID NO: 2326672 - DNA, 25 bp, Homo sapien
tactagactcaggtcagacatcatc

SEQ ID NO: 2326673 - DNA, 25 bp, Homo sapien
aaatgtcacgctttgtcatgcctcc

SEQ ID NO: 2326674 - DNA, 25 bp, Homo sapien
aactctggactgagtgacagctatc

SEQ ID NO: 2326675 - DNA, 25 bp, Homo sapien
cacctttagtttctcggtcaagagg

SEQ ID NO: 2326676 - DNA, 25 bp, Homo sapien
tttctaatgggatgccagtggcagc

SEQ ID NO: 2326677 - DNA, 25 bp, Homo sapien
tagttagtgtgcatacagttttcat

SEQ ID NO: 2326678 - DNA, 25 bp, Homo sapien
aaagtgtcttgtctctggtagaaga

SEQ ID NO: 2326679 - DNA, 25 bp, Homo sapien
caggaaagtgtctcttttatggctt

SEQ ID NO: 2326680 - DNA, 25 bp, Homo sapien
tacattcggttatctgaaactcccc

SEQ ID NO: 2326681 - DNA, 25 bp, Homo sapien
tttccatagataccaccagcaggaa

SEQ ID NO: 2326682 - DNA, 25 bp, Homo sapien
caagtactgcacaagttaaaatctg

SEQ ID NO: 2326683 - DNA, 25 bp, Homo sapien
cctggatccttgaatgtggtgaact

SEQ ID NO: 2326684 - DNA, 25 bp, Homo sapien
gttttcgaagaatgctgccgcagta

SEQ ID NO: 2326685 - DNA, 25 bp, Homo sapien
tatcatagtagtatatacggcagcc

SEQ ID NO: 2326686 - DNA, 25 bp, Homo sapien
tcgatatgtgaaatgtgccccagca

SEQ ID NO: 2326687 - DNA, 25 bp, Homo sapien
taaaataccaggatgataaaccagc

SEQ ID NO: 2326688 - DNA, 25 bp, Homo sapien
tgtaaactcaagtgaactcaagtgc

SEQ ID NO: 2326689 - DNA, 25 bp, Homo sapien
gatataaagcaaagccatgatcaac

SEQ ID NO: 2326690 - DNA, 25 bp, Homo sapien
gcaaagccatgatcaacatacctca

SEQ ID NO: 2326691 - DNA, 25 bp, Homo sapien
taccctgtattacctatgaatatct

SEQ ID NO: 2326692 - DNA, 25 bp, Homo sapien
gaagtagaaattctagtctagatat

SEQ ID NO: 2326693 - DNA, 25 bp, Homo sapien
tagtctagatatattcccattaccc

SEQ ID NO: 2326694 - DNA, 25 bp, Homo sapien
aaagtcatatgattgctaagtggca

SEQ ID NO: 2326695 - DNA, 25 bp, Homo sapien
ccaggctgcaactttttcaaggagg

SEQ ID NO: 2326696 - DNA, 25 bp, Homo sapien
ttggtgtaccactgaaggagactcc

SEQ ID NO: 2326697 - DNA, 25 bp, Homo sapien
taaagcggtgagctcatctacactg

SEQ ID NO: 2326698 - DNA, 25 bp, Homo sapien
tatggccctagaaaggagctcttcc

SEQ ID NO: 2326699 - DNA, 25 bp, Homo sapien
atttcacaaccctgacaagttccag

SEQ ID NO: 2326700 - DNA, 25 bp, Homo sapien
taattaaaccatggcaccgtgtggg

SEQ ID NO: 2326701 - DNA, 25 bp, Homo sapien
taccccatcattagtgaagaaaaaa

SEQ ID NO: 2326702 - DNA, 25 bp, Homo sapien
tgtttcccgatgcatatattttcca

SEQ ID NO: 2326703 - DNA, 25 bp, Homo sapien
caaactatatagaacaagctgcaag

SEQ ID NO: 2326704 - DNA, 25 bp, Homo sapien
ctccagctaacaacaaacttaaatg

SEQ ID NO: 2326705 - DNA, 25 bp, Homo sapien
cttaaatgtcacagcagataaaaac

SEQ ID NO: 2326706 - DNA, 25 bp, Homo sapien
tcaccaaactatatagaacaagctg

SEQ ID NO: 2326707 - DNA, 25 bp, Homo sapien
tagaagagaactttaagacagaaac

SEQ ID NO: 2326708 - DNA, 25 bp, Homo sapien
gaagatcattctggtagcaggataa

SEQ ID NO: 2326709 - DNA, 25 bp, Homo sapien
tgtaatcctattgagtgcaccctga

SEQ ID NO: 2326710 - DNA, 25 bp, Homo sapien
tatatatgagggagagagctataca

SEQ ID NO: 2326711 - DNA, 25 bp, Homo sapien
gacacacgtaacttatagcccaagg

SEQ ID NO: 2326712 - DNA, 25 bp, Homo sapien
gaatcgtattgaacagagagctgct

SEQ ID NO: 2326713 - DNA, 25 bp, Homo sapien
gggaaagccccattgtcaagtagta

SEQ ID NO: 2326714 - DNA, 25 bp, Homo sapien
cccaaggtggcagttgatgtcagaa

SEQ ID NO: 2326715 - DNA, 25 bp, Homo sapien
caaccccggcggcaggccgtcggcg

SEQ ID NO: 2326716 - DNA, 25 bp, Homo sapien
cgcggccaaccccggcggcaggccg

SEQ ID NO: 2326717 - DNA, 25 bp, Homo sapien
aattccgagcgctgccgggacacgt

SEQ ID NO: 2326718 - DNA, 25 bp, Homo sapien
cgctgccgggacacgtcagccgcac

SEQ ID NO: 2326719 - DNA, 25 bp, Homo sapien
attccgagcgctgccgggacacgtc

SEQ ID NO: 2326720 - DNA, 25 bp, Homo sapien
gagcgctgccgggacacgtcagccg

SEQ ID NO: 2326721 - DNA, 25 bp, Homo sapien
ctcgccgacgccattagccgagtcg

SEQ ID NO: 2326722 - DNA, 25 bp, Homo sapien
ccgacgccattagccgagtcgccca

SEQ ID NO: 2326723 - DNA, 25 bp, Homo sapien
aagactcgccgacgccattagccga

SEQ ID NO: 2326724 - DNA, 25 bp, Homo sapien
ctaagactcgccgacgccattagcc

SEQ ID NO: 2326725 - DNA, 25 bp, Homo sapien
ctggcaagaagcttcagcgccagct

SEQ ID NO: 2326726 - DNA, 25 bp, Homo sapien
tggcaagaagcttcagcgccagctc

SEQ ID NO: 2326727 - DNA, 25 bp, Homo sapien
gcttcagcgccagctccccaggccc

SEQ ID NO: 2326728 - DNA, 25 bp, Homo sapien
gaagcttcagcgccagctccccagg

SEQ ID NO: 2326729 - DNA, 25 bp, Homo sapien
tgccgcggggcccagccacaccggg

SEQ ID NO: 2326730 - DNA, 25 bp, Homo sapien
ccagccacaccgggtgtcaccagcc

SEQ ID NO: 2326731 - DNA, 25 bp, Homo sapien
cggggcccagccacaccgggtgtca

SEQ ID NO: 2326732 - DNA, 25 bp, Homo sapien
gccacaccgggtgtcaccagccaac

SEQ ID NO: 2326733 - DNA, 25 bp, Homo sapien
gagaaacccacaaggcgggcaggtc

SEQ ID NO: 2326734 - DNA, 25 bp, Homo sapien
cgagaaacccacaaggcgggcaggt

SEQ ID NO: 2326735 - DNA, 25 bp, Homo sapien
tacaaacaagctctggcacggtcag

SEQ ID NO: 2326736 - DNA, 25 bp, Homo sapien
gcacggtcagctccttagggccaca

SEQ ID NO: 2326737 - DNA, 25 bp, Homo sapien
tgcgaacccggagcctgctcgagcg

SEQ ID NO: 2326738 - DNA, 25 bp, Homo sapien
ggtcccagccaatttccgagaggta

SEQ ID NO: 2326739 - DNA, 25 bp, Homo sapien
aagtcgctctgcatattctccagca

SEQ ID NO: 2326740 - DNA, 25 bp, Homo sapien
tgacaaggcgcgcaagtcgctctgc

SEQ ID NO: 2326741 - DNA, 25 bp, Homo sapien
aaggcgcgcaagtcgctctgcatat

SEQ ID NO: 2326742 - DNA, 25 bp, Homo sapien
gcgcgcaagtcgctctgcatattct

SEQ ID NO: 2326743 - DNA, 25 bp, Homo sapien
gaagcactgagtctaacaggaccag

SEQ ID NO: 2326744 - DNA, 25 bp, Homo sapien
actggggtgaagcactgagtctaac

SEQ ID NO: 2326745 - DNA, 25 bp, Homo sapien
gtctaacaggaccaggcatgctcac

SEQ ID NO: 2326746 - DNA, 25 bp, Homo sapien
tgccttctcctgacgtcacctgaag

SEQ ID NO: 2326747 - DNA, 25 bp, Homo sapien
tgccataaacgtgaggagtacaggt

SEQ ID NO: 2326748 - DNA, 25 bp, Homo sapien
tcaaaggattgatacagagttaagc

SEQ ID NO: 2326749 - DNA, 25 bp, Homo sapien
caggtgtattcgctctgactgcaag

SEQ ID NO: 2326750 - DNA, 25 bp, Homo sapien
cttcataaattaggtggctctggat

SEQ ID NO: 2326751 - DNA, 25 bp, Homo sapien
ggctcagttagatacccctcatctg

SEQ ID NO: 2326752 - DNA, 25 bp, Homo sapien
caggctcagttagatacccctcatc

SEQ ID NO: 2326753 - DNA, 25 bp, Homo sapien
tcagttagatacccctcatctgtac

SEQ ID NO: 2326754 - DNA, 25 bp, Homo sapien
gctcagttagatacccctcatctgt

SEQ ID NO: 2326755 - DNA, 25 bp, Homo sapien
taagcccagtagtgacatatacgtt

SEQ ID NO: 2326756 - DNA, 25 bp, Homo sapien
tatctggaatacctcaatcccctgc

SEQ ID NO: 2326757 - DNA, 25 bp, Homo sapien
caaaatatcaagcacaaagtcagtc

SEQ ID NO: 2326758 - DNA, 25 bp, Homo sapien
tcaaaccatcagatactaagcccag

SEQ ID NO: 2326759 - DNA, 25 bp, Homo sapien
cagtgtttcgtgcagcaattgtttt

SEQ ID NO: 2326760 - DNA, 25 bp, Homo sapien
tgtttcgtgcagcaattgttttaac

SEQ ID NO: 2326761 - DNA, 25 bp, Homo sapien
tttcagtgtttcgtgcagcaattgt

SEQ ID NO: 2326762 - DNA, 25 bp, Homo sapien
ttcgtgcagcaattgttttaacttt

SEQ ID NO: 2326763 - DNA, 25 bp, Homo sapien
ctggcatagcattcccacttatgtc

SEQ ID NO: 2326764 - DNA, 25 bp, Homo sapien
tagcattcccacttatgtcagcatt

SEQ ID NO: 2326765 - DNA, 25 bp, Homo sapien
gcattcccacttatgtcagcattca

SEQ ID NO: 2326766 - DNA, 25 bp, Homo sapien
gcatagcattcccacttatgtcagc

SEQ ID NO: 2326767 - DNA, 25 bp, Homo sapien
cttgctctgagcagtttcactgcat

SEQ ID NO: 2326768 - DNA, 25 bp, Homo sapien
aaggtccaccaggtccccatatcct

SEQ ID NO: 2326769 - DNA, 25 bp, Homo sapien
caccaggtccccatatcctaggggt

SEQ ID NO: 2326770 - DNA, 25 bp, Homo sapien
cagtttcactgcataattgcagttt

SEQ ID NO: 2326771 - DNA, 25 bp, Homo sapien
gctatacgccttaactactgctttc

SEQ ID NO: 2326772 - DNA, 25 bp, Homo sapien
tttctcctaacactctgtcctttgg

SEQ ID NO: 2326773 - DNA, 25 bp, Homo sapien
actccagactctgtatctaagctat

SEQ ID NO: 2326774 - DNA, 25 bp, Homo sapien
gactctgtatctaagctatacgcct

SEQ ID NO: 2326775 - DNA, 25 bp, Homo sapien
ctcagacacgacttcatgtgacatg

SEQ ID NO: 2326776 - DNA, 25 bp, Homo sapien
agtgatcttcggttccttggttcca

SEQ ID NO: 2326777 - DNA, 25 bp, Homo sapien
tgagtctctgaatagcagccaaaca

SEQ ID NO: 2326778 - DNA, 25 bp, Homo sapien
gccaaacatagctgagtgatcttcg

SEQ ID NO: 2326779 - DNA, 25 bp, Homo sapien
taattattgtcaacaaatacaatat

SEQ ID NO: 2326780 - DNA, 25 bp, Homo sapien
ttaattattgtcaacaaatacaata

SEQ ID NO: 2326781 - DNA, 25 bp, Homo sapien
cttcaagactattctccattagctg

SEQ ID NO: 2326782 - DNA, 25 bp, Homo sapien
catcatgaactactgtattggttgt

SEQ ID NO: 2326783 - DNA, 25 bp, Homo sapien
tattctccattagctgccaaagcat

SEQ ID NO: 2326784 - DNA, 25 bp, Homo sapien
gaagtagcttaagttcttcaagact

SEQ ID NO: 2326785 - DNA, 25 bp, Homo sapien
tcaccatagctgtagggaagttgct

SEQ ID NO: 2326786 - DNA, 25 bp, Homo sapien
aacgtgatttcaactctaacctgga

SEQ ID NO: 2326787 - DNA, 25 bp, Homo sapien
tttgcttaagcaccccaacgtgatt

SEQ ID NO: 2326788 - DNA, 25 bp, Homo sapien
caaagcacatatgaactctggcaaa

SEQ ID NO: 2326789 - DNA, 25 bp, Homo sapien
aacaacagtaacaacttgtcgcact

SEQ ID NO: 2326790 - DNA, 25 bp, Homo sapien
tcttttgtgaagtgtagtcgaaaac

SEQ ID NO: 2326791 - DNA, 25 bp, Homo sapien
gtagtcgaaaacaaagaacgattgc

SEQ ID NO: 2326792 - DNA, 25 bp, Homo sapien
ctctgtgtcgttcatcttcagcaac

SEQ ID NO: 2326793 - DNA, 25 bp, Homo sapien
ggtttgagggtactgacagatcttc

SEQ ID NO: 2326794 - DNA, 25 bp, Homo sapien
tactatttccttgtaccagtactgg

SEQ ID NO: 2326795 - DNA, 25 bp, Homo sapien
gcatctttagcacaaggtttgaggg

SEQ ID NO: 2326796 - DNA, 25 bp, Homo sapien
ggaaaagcatatatgcatctttagc

SEQ ID NO: 2326797 - DNA, 25 bp, Homo sapien
ttcgaggccaaacgtccgagtcatt

SEQ ID NO: 2326798 - DNA, 25 bp, Homo sapien
tgtcatgcccactagccaataagga

SEQ ID NO: 2326799 - DNA, 25 bp, Homo sapien
gcggaaaatcattgaggactgactc

SEQ ID NO: 2326800 - DNA, 25 bp, Homo sapien
gactgactcaagtaattcgaggcca

SEQ ID NO: 2326801 - DNA, 25 bp, Homo sapien
gaggacataccctttctttgaggag

SEQ ID NO: 2326802 - DNA, 25 bp, Homo sapien
ggacataccctttctttgaggagga

SEQ ID NO: 2326803 - DNA, 25 bp, Homo sapien
tatttggagaaaagagctttatcac

SEQ ID NO: 2326804 - DNA, 25 bp, Homo sapien
ctttatatttggagaaaagagcttt

SEQ ID NO: 2326805 - DNA, 25 bp, Homo sapien
catgcagataggaaaatatggtttt

SEQ ID NO: 2326806 - DNA, 25 bp, Homo sapien
aacgcatgcagataggaaaatatgg

SEQ ID NO: 2326807 - DNA, 25 bp, Homo sapien
tctcagcaaacgcatgcagatagga

SEQ ID NO: 2326808 - DNA, 25 bp, Homo sapien
gcaaacgcatgcagataggaaaata

SEQ ID NO: 2326809 - DNA, 25 bp, Homo sapien
taagaagctgagttccaaaacgaca

SEQ ID NO: 2326810 - DNA, 25 bp, Homo sapien
tttagagtacctagactacacgtag

SEQ ID NO: 2326811 - DNA, 25 bp, Homo sapien
caaaacgacaattcctatgctggct

SEQ ID NO: 2326812 - DNA, 25 bp, Homo sapien
aactaaatgcgctacaacagaccac

SEQ ID NO: 2326813 - DNA, 25 bp, Homo sapien
tccttctcctaactagtatgttgtt

SEQ ID NO: 2326814 - DNA, 25 bp, Homo sapien
tttccatacatttgagactcttctc

SEQ ID NO: 2326815 - DNA, 25 bp, Homo sapien
gagcataatctatgtgcacttgaaa

SEQ ID NO: 2326816 - DNA, 25 bp, Homo sapien
ggcttaacataagctctatccttga

SEQ ID NO: 2326817 - DNA, 25 bp, Homo sapien
caaaaatgcgacaatgaacatgggt

SEQ ID NO: 2326818 - DNA, 25 bp, Homo sapien
cagtgaccactcatgggcataagcc

SEQ ID NO: 2326819 - DNA, 25 bp, Homo sapien
tctgacaatgaacactggaactgct

SEQ ID NO: 2326820 - DNA, 25 bp, Homo sapien
gaatttgactactcaaggtaccacg

SEQ ID NO: 2326821 - DNA, 25 bp, Homo sapien
tgtgtattgattccaccgcaacagc

SEQ ID NO: 2326822 - DNA, 25 bp, Homo sapien
cagctcgtagccactgtggtttatc

SEQ ID NO: 2326823 - DNA, 25 bp, Homo sapien
tctgtgtattgattccaccgcaaca

SEQ ID NO: 2326824 - DNA, 25 bp, Homo sapien
ctcgtagccactgtggtttatctgc

SEQ ID NO: 2326825 - DNA, 25 bp, Homo sapien
ggttgcttgttgcaggatttccagt

SEQ ID NO: 2326826 - DNA, 25 bp, Homo sapien
cacgaaaaaccttggtagaatgctg

SEQ ID NO: 2326827 - DNA, 25 bp, Homo sapien
gctgtttcatatcataggactgaca

SEQ ID NO: 2326828 - DNA, 25 bp, Homo sapien
caaggactgtataaaagatcccagt

SEQ ID NO: 2326829 - DNA, 25 bp, Homo sapien
gaatataagaaacaaaattatgaat

SEQ ID NO: 2326830 - DNA, 25 bp, Homo sapien
gcagaatataagaaacaaaattatg

SEQ ID NO: 2326831 - DNA, 25 bp, Homo sapien
taagaaacaaaattatgaatatgtt

SEQ ID NO: 2326832 - DNA, 25 bp, Homo sapien
tataagaaacaaaattatgaatatg

SEQ ID NO: 2326833 - DNA, 25 bp, Homo sapien
taggtaacccaaatttctctagtca

SEQ ID NO: 2326834 - DNA, 25 bp, Homo sapien
tcataatatcctctcagaacagtca

SEQ ID NO: 2326835 - DNA, 25 bp, Homo sapien
atttcataatatcctctcagaacag

SEQ ID NO: 2326836 - DNA, 25 bp, Homo sapien
ttcataatatcctctcagaacagtc

SEQ ID NO: 2326837 - DNA, 25 bp, Homo sapien
gtagcaaagtaacacctccaccaat

SEQ ID NO: 2326838 - DNA, 25 bp, Homo sapien
tcccctatattcaaatgctggtagc

SEQ ID NO: 2326839 - DNA, 25 bp, Homo sapien
cattcctgagttagctggtgctgag

SEQ ID NO: 2326840 - DNA, 25 bp, Homo sapien
cttgaactgtgattgtcagaatagg

SEQ ID NO: 2326841 - DNA, 25 bp, Homo sapien
tgtgattccacgaacaaggtctagc

SEQ ID NO: 2326842 - DNA, 25 bp, Homo sapien
tcgactgtgttggtgaagaaccttc

SEQ ID NO: 2326843 - DNA, 25 bp, Homo sapien
gacatggcgtaaccttcaggtatag

SEQ ID NO: 2326844 - DNA, 25 bp, Homo sapien
gtaaatcctgctgttctgtcgactg

SEQ ID NO: 2326845 - DNA, 25 bp, Homo sapien
aggcattcaccatttcttcccaaac

SEQ ID NO: 2326846 - DNA, 25 bp, Homo sapien
ttcaccatttcttcccaaacagccc

SEQ ID NO: 2326847 - DNA, 25 bp, Homo sapien
gcaggcattcaccatttcttcccaa

SEQ ID NO: 2326848 - DNA, 25 bp, Homo sapien
catttcttcccaaacagccctacta

SEQ ID NO: 2326849 - DNA, 25 bp, Homo sapien
gaaggagtgagagtgcagcaagaag

SEQ ID NO: 2326850 - DNA, 25 bp, Homo sapien
aaggagtgagagtgcagcaagaaga

SEQ ID NO: 2326851 - DNA, 25 bp, Homo sapien
aggagtgagagtgcagcaagaagac

SEQ ID NO: 2326852 - DNA, 25 bp, Homo sapien
agaaggagtgagagtgcagcaagaa

SEQ ID NO: 2326853 - DNA, 25 bp, Homo sapien
cagccatagtcagttcagcttttaa

SEQ ID NO: 2326854 - DNA, 25 bp, Homo sapien
ttcaatacagtaagagcataatggg

SEQ ID NO: 2326855 - DNA, 25 bp, Homo sapien
ttgaagttacaaggcccagtcttcc

SEQ ID NO: 2326856 - DNA, 25 bp, Homo sapien
ggcagggaacctttgcatattgcag

SEQ ID NO: 2326857 - DNA, 25 bp, Homo sapien
gactgctaaaggttgacccactgcc

SEQ ID NO: 2326858 - DNA, 25 bp, Homo sapien
ggtgagattcacttgatggacttat

SEQ ID NO: 2326859 - DNA, 25 bp, Homo sapien
tggacttatcatcataacactttgg

SEQ ID NO: 2326860 - DNA, 25 bp, Homo sapien
acactttggccctgaacggaatatg

SEQ ID NO: 2326861 - DNA, 25 bp, Homo sapien
gccccatggcaatgcgccaagttaa

SEQ ID NO: 2326862 - DNA, 25 bp, Homo sapien
gacaagttgccatgatgttccaaga

SEQ ID NO: 2326863 - DNA, 25 bp, Homo sapien
ctgaagagttgccaagacaagttgc

SEQ ID NO: 2326864 - DNA, 25 bp, Homo sapien
gcgccaagttaagtaaagtcctcat

SEQ ID NO: 2326865 - DNA, 25 bp, Homo sapien
tcccaggtttcaaggcaccgccact

SEQ ID NO: 2326866 - DNA, 25 bp, Homo sapien
tactgggtccttctacagctctccc

SEQ ID NO: 2326867 - DNA, 25 bp, Homo sapien
ggtttcaaggcaccgccactactag

SEQ ID NO: 2326868 - DNA, 25 bp, Homo sapien
caggtttcaaggcaccgccactact

SEQ ID NO: 2326869 - DNA, 25 bp, Homo sapien
aaatcactggtaaatctgtcatcac

SEQ ID NO: 2326870 - DNA, 25 bp, Homo sapien
tcactggtaaatctgtcatcactgc

SEQ ID NO: 2326871 - DNA, 25 bp, Homo sapien
atcactggtaaatctgtcatcactg

SEQ ID NO: 2326872 - DNA, 25 bp, Homo sapien
aatcactggtaaatctgtcatcact

SEQ ID NO: 2326873 - DNA, 25 bp, Homo sapien
tccataggccatatccattgcttct

SEQ ID NO: 2326874 - DNA, 25 bp, Homo sapien
ttgcttctagagacaaggagcaaag

SEQ ID NO: 2326875 - DNA, 25 bp, Homo sapien
aaatgatgcagtgatacatcatcaa

SEQ ID NO: 2326876 - DNA, 25 bp, Homo sapien
gatgcagtgatacatcatcaagata

SEQ ID NO: 2326877 - DNA, 25 bp, Homo sapien
tttctattcggtgcatattaactaa

SEQ ID NO: 2326878 - DNA, 25 bp, Homo sapien
agaatttctattcggtgcatattaa

SEQ ID NO: 2326879 - DNA, 25 bp, Homo sapien
accagtttctaacaatttggcaaca

SEQ ID NO: 2326880 - DNA, 25 bp, Homo sapien
ccagtttctaacaatttggcaacag

SEQ ID NO: 2326881 - DNA, 25 bp, Homo sapien
aatgttaatcctgctttaataagag

SEQ ID NO: 2326882 - DNA, 25 bp, Homo sapien
ctggttttgtgagagtggaggatca

SEQ ID NO: 2326883 - DNA, 25 bp, Homo sapien
agagaagttaaagcttctgctcccc

SEQ ID NO: 2326884 - DNA, 25 bp, Homo sapien
cattcgagagtttggatgctggcag

SEQ ID NO: 2326885 - DNA, 25 bp, Homo sapien
ggttcaataaaagcaactgcagcct

SEQ ID NO: 2326886 - DNA, 25 bp, Homo sapien
taacgggttcaataaaagcaactgc

SEQ ID NO: 2326887 - DNA, 25 bp, Homo sapien
cgggttcaataaaagcaactgcagc

SEQ ID NO: 2326888 - DNA, 25 bp, Homo sapien
aacgggttcaataaaagcaactgca

SEQ ID NO: 2326889 - DNA, 25 bp, Homo sapien
gaatctgcaacacgcattctaactg

SEQ ID NO: 2326890 - DNA, 25 bp, Homo sapien
atttctgattgctcccatgactcca

SEQ ID NO: 2326891 - DNA, 25 bp, Homo sapien
tccaagcactaatggccatccaggc

SEQ ID NO: 2326892 - DNA, 25 bp, Homo sapien
gcttgagtcgaatatctggatgatt

SEQ ID NO: 2326893 - DNA, 25 bp, Homo sapien
ccctgatatctagtacagtgtccag

SEQ ID NO: 2326894 - DNA, 25 bp, Homo sapien
gagaatggcaagtttgctacagtta

SEQ ID NO: 2326895 - DNA, 25 bp, Homo sapien
gctcctcattcttttatatccgtac

SEQ ID NO: 2326896 - DNA, 25 bp, Homo sapien
tgtatttcataccaactaaccaaag

SEQ ID NO: 2326897 - DNA, 25 bp, Homo sapien
gaatgcagttcgtatcaaggattct

SEQ ID NO: 2326898 - DNA, 25 bp, Homo sapien
tggtagaaaatctgtcacaaccaac

SEQ ID NO: 2326899 - DNA, 25 bp, Homo sapien
acactggaatgcagttcgtatcaag

SEQ ID NO: 2326900 - DNA, 25 bp, Homo sapien
gtagaaaatctgtcacaaccaactg

SEQ ID NO: 2326901 - DNA, 25 bp, Homo sapien
aaactaatattgagttcttggttat

SEQ ID NO: 2326902 - DNA, 25 bp, Homo sapien
agttcttggttatggaggccaaagc

SEQ ID NO: 2326903 - DNA, 25 bp, Homo sapien
taaactaatattgagttcttggtta

SEQ ID NO: 2326904 - DNA, 25 bp, Homo sapien
gagttcttggttatggaggccaaag

SEQ ID NO: 2326905 - DNA, 25 bp, Homo sapien
tggaatggccgatttaaaacaactc

SEQ ID NO: 2326906 - DNA, 25 bp, Homo sapien
gttcacccaattttgcataaagaca

SEQ ID NO: 2326907 - DNA, 25 bp, Homo sapien
aagcaatcaaatggcggtgcagggt

SEQ ID NO: 2326908 - DNA, 25 bp, Homo sapien
cataaagacataaccacaagcaatc

SEQ ID NO: 2326909 - DNA, 25 bp, Homo sapien
ggttgaatgctgtaataaagttcca

SEQ ID NO: 2326910 - DNA, 25 bp, Homo sapien
aggttgaatgctgtaataaagttcc

SEQ ID NO: 2326911 - DNA, 25 bp, Homo sapien
gttgaatgctgtaataaagttccat

SEQ ID NO: 2326912 - DNA, 25 bp, Homo sapien
tctataagtagacctcaaaagtaaa

SEQ ID NO: 2326913 - DNA, 25 bp, Homo sapien
aaaggcagaaatcacgagagatata

SEQ ID NO: 2326914 - DNA, 25 bp, Homo sapien
gggaatgatcactaataaactgctg

SEQ ID NO: 2326915 - DNA, 25 bp, Homo sapien
gctttctactctatggtaagggatt

SEQ ID NO: 2326916 - DNA, 25 bp, Homo sapien
tgcctggccataattatacattctt

SEQ ID NO: 2326917 - DNA, 25 bp, Homo sapien
tgaagatccttgctactccagccaa

SEQ ID NO: 2326918 - DNA, 25 bp, Homo sapien
tcggcggtgtcccttgaatgatgaa

SEQ ID NO: 2326919 - DNA, 25 bp, Homo sapien
tagaggactctcgaactctgtccag

SEQ ID NO: 2326920 - DNA, 25 bp, Homo sapien
aatgttaatacccacgtctcagccc

SEQ ID NO: 2326921 - DNA, 25 bp, Homo sapien
gaaaacacagatgcttacacacaca

SEQ ID NO: 2326922 - DNA, 25 bp, Homo sapien
taattatgggtacttcctcatgccc

SEQ ID NO: 2326923 - DNA, 25 bp, Homo sapien
gtatcctctagaggctagcccacag

SEQ ID NO: 2326924 - DNA, 25 bp, Homo sapien
tagcccacagtaggtacaaacgaat

SEQ ID NO: 2326925 - DNA, 25 bp, Homo sapien
taaacatgctagcatccaccatctc

SEQ ID NO: 2326926 - DNA, 25 bp, Homo sapien
tctggatgatctggcctttcactac

SEQ ID NO: 2326927 - DNA, 25 bp, Homo sapien
gactataaggctctccacacttcgt

SEQ ID NO: 2326928 - DNA, 25 bp, Homo sapien
aacacattctacatgatctggatga

SEQ ID NO: 2326929 - DNA, 25 bp, Homo sapien
ttcctgggaaagcagtcggttaata

SEQ ID NO: 2326930 - DNA, 25 bp, Homo sapien
ggctagagtgtcatgtggtatgatc

SEQ ID NO: 2326931 - DNA, 25 bp, Homo sapien
gaagtaggtctggtataaaacaata

SEQ ID NO: 2326932 - DNA, 25 bp, Homo sapien
tccaaagcagtacaacataagtagg

SEQ ID NO: 2326933 - DNA, 25 bp, Homo sapien
tcaacgaggttgaaacaaaagcatt

SEQ ID NO: 2326934 - DNA, 25 bp, Homo sapien
tcagatataggaacaaagggcacca

SEQ ID NO: 2326935 - DNA, 25 bp, Homo sapien
cgttcttaaccagagaatcattgga

SEQ ID NO: 2326936 - DNA, 25 bp, Homo sapien
aaactcaggtaggtgacgagtgcac

SEQ ID NO: 2326937 - DNA, 25 bp, Homo sapien
tgctcatgcctgatatgggccctat

SEQ ID NO: 2326938 - DNA, 25 bp, Homo sapien
tgttcttacaaatggcctgctcatg

SEQ ID NO: 2326939 - DNA, 25 bp, Homo sapien
caagctcatcagtaacaatgggtgg

SEQ ID NO: 2326940 - DNA, 25 bp, Homo sapien
caggcacaggtacattaactacagg

SEQ ID NO: 2326941 - DNA, 25 bp, Homo sapien
cttttagataaaactgcactgagat

SEQ ID NO: 2326942 - DNA, 25 bp, Homo sapien
aatttattttatgcactccatggct

SEQ ID NO: 2326943 - DNA, 25 bp, Homo sapien
gatgatcactttatgcctgagaggg

SEQ ID NO: 2326944 - DNA, 25 bp, Homo sapien
tagatatgcaagtgctccccatacc

SEQ ID NO: 2326945 - DNA, 25 bp, Homo sapien
tatagctggatacattatctgcatg

SEQ ID NO: 2326946 - DNA, 25 bp, Homo sapien
cagctgtccatactgtggaggttta

SEQ ID NO: 2326947 - DNA, 25 bp, Homo sapien
tatctgcatgttttctggtcctaca

SEQ ID NO: 2326948 - DNA, 25 bp, Homo sapien
tgttttctggtcctacacaaatggc

SEQ ID NO: 2326949 - DNA, 25 bp, Homo sapien
gattccattgtgttgcaagacaaat

SEQ ID NO: 2326950 - DNA, 25 bp, Homo sapien
tgattccattgtgttgcaagacaaa

SEQ ID NO: 2326951 - DNA, 25 bp, Homo sapien
gtgattccattgtgttgcaagacaa

SEQ ID NO: 2326952 - DNA, 25 bp, Homo sapien
atgtactttatttgttgccaagagg

SEQ ID NO: 2326953 - DNA, 25 bp, Homo sapien
ctattggaaaaagcacatacagcat

SEQ ID NO: 2326954 - DNA, 25 bp, Homo sapien
cattctaccaagaaccgggaaagat

SEQ ID NO: 2326955 - DNA, 25 bp, Homo sapien
tgccaagaggttaggacaattttag

SEQ ID NO: 2326956 - DNA, 25 bp, Homo sapien
tctaaagacctttcagcaaacggca

SEQ ID NO: 2326957 - DNA, 25 bp, Homo sapien
tttggtataaatccacaactacttc

SEQ ID NO: 2326958 - DNA, 25 bp, Homo sapien
taaatccacaactacttctaaagac

SEQ ID NO: 2326959 - DNA, 25 bp, Homo sapien
cataattcaaggctacccattccgc

SEQ ID NO: 2326960 - DNA, 25 bp, Homo sapien
agaagaagcatgctgccgggcaaca

SEQ ID NO: 2326961 - DNA, 25 bp, Homo sapien
ggaatacttcaaactgagaggaacc

SEQ ID NO: 2326962 - DNA, 25 bp, Homo sapien
caggtagcccaatagaaagaactct

SEQ ID NO: 2326963 - DNA, 25 bp, Homo sapien
gctagttctggccacatactgtcaa

SEQ ID NO: 2326964 - DNA, 25 bp, Homo sapien
tgctcttatccactatgctggctgc

SEQ ID NO: 2326965 - DNA, 25 bp, Homo sapien
tagtacaaagtagtactactgggat

SEQ ID NO: 2326966 - DNA, 25 bp, Homo sapien
ccaggtagtctggttgccaagccaa

SEQ ID NO: 2326967 - DNA, 25 bp, Homo sapien
taaggtaagtagagccataatcagg

SEQ ID NO: 2326968 - DNA, 25 bp, Homo sapien
tatcaactgaccaataaaagctttc

SEQ ID NO: 2326969 - DNA, 25 bp, Homo sapien
catggacctttacaattactccaac

SEQ ID NO: 2326970 - DNA, 25 bp, Homo sapien
taacactgcacttttagtatcaact

SEQ ID NO: 2326971 - DNA, 25 bp, Homo sapien
caaaaactaaactggctttatccag

SEQ ID NO: 2326972 - DNA, 25 bp, Homo sapien
ttctgtgttattgtattcccttgcc

SEQ ID NO: 2326973 - DNA, 25 bp, Homo sapien
tatagccctcaacgacatgcaaagg

SEQ ID NO: 2326974 - DNA, 25 bp, Homo sapien
tcacccattgtgtctcctttataac

SEQ ID NO: 2326975 - DNA, 25 bp, Homo sapien
cacagattgtgtaacttcccactca

SEQ ID NO: 2326976 - DNA, 25 bp, Homo sapien
gagggaagagagtagcatacaaaac

SEQ ID NO: 2326977 - DNA, 25 bp, Homo sapien
cagttctctctgtatgacatattaa

SEQ ID NO: 2326978 - DNA, 25 bp, Homo sapien
aactcctgggaaccataaatctact

SEQ ID NO: 2326979 - DNA, 25 bp, Homo sapien
caatggtcaatactgcaggttacaa

SEQ ID NO: 2326980 - DNA, 25 bp, Homo sapien
gatgaggccacaatctcaacctaga

SEQ ID NO: 2326981 - DNA, 25 bp, Homo sapien
gaatgcctactaatatgcccaagaa

SEQ ID NO: 2326982 - DNA, 25 bp, Homo sapien
gattccagactctgtggctcataag

SEQ ID NO: 2326983 - DNA, 25 bp, Homo sapien
tctcccatagcaattccatgtagta

SEQ ID NO: 2326984 - DNA, 25 bp, Homo sapien
taccattgtggtgttacctgaattc

SEQ ID NO: 2326985 - DNA, 25 bp, Homo sapien
tacaaaaacactaggtccaatcttg

SEQ ID NO: 2326986 - DNA, 25 bp, Homo sapien
tgctgaattattcactcagagacag

SEQ ID NO: 2326987 - DNA, 25 bp, Homo sapien
ggtaaagagctatcatctgcagcag

SEQ ID NO: 2326988 - DNA, 25 bp, Homo sapien
gaaactcttgaatagagagattatc

SEQ ID NO: 2326989 - DNA, 25 bp, Homo sapien
cttgaatagagagattatctggagg

SEQ ID NO: 2326990 - DNA, 25 bp, Homo sapien
actcttgaatagagagattatctgg

SEQ ID NO: 2326991 - DNA, 25 bp, Homo sapien
tgaaactcttgaatagagagattat

SEQ ID NO: 2326992 - DNA, 25 bp, Homo sapien
tacaagtacgagtcacagttcccag

SEQ ID NO: 2326993 - DNA, 25 bp, Homo sapien
taagaattccataggctgtatatac

SEQ ID NO: 2326994 - DNA, 25 bp, Homo sapien
gctttaagaattccataggctgtat

SEQ ID NO: 2326995 - DNA, 25 bp, Homo sapien
actaggattacaagtacgagtcaca

SEQ ID NO: 2326996 - DNA, 25 bp, Homo sapien
tatttgaccaacaaattccttagga

SEQ ID NO: 2326997 - DNA, 25 bp, Homo sapien
gagcccttgttaagcattgtcatta

SEQ ID NO: 2326998 - DNA, 25 bp, Homo sapien
tctcattgctgataagttgaactac

SEQ ID NO: 2326999 - DNA, 25 bp, Homo sapien
ggtagtatctcattgctgataagtt

SEQ ID NO: 2327000 - DNA, 25 bp, Homo sapien
taatagaagttaaatcaatgagctt

SEQ ID NO: 2327001 - DNA, 25 bp, Homo sapien
ggcacctagaacaacctatagctaa

SEQ ID NO: 2327002 - DNA, 25 bp, Homo sapien
aacaaattttgatggttaatagaag

SEQ ID NO: 2327003 - DNA, 25 bp, Homo sapien
gtgaaaggcacctagaacaacctat

SEQ ID NO: 2327004 - DNA, 25 bp, Homo sapien
catcctctatatagcgatgtagtac

SEQ ID NO: 2327005 - DNA, 25 bp, Homo sapien
gccttcttgaggtgttgtgacttta

SEQ ID NO: 2327006 - DNA, 25 bp, Homo sapien
gagagtgccattcgtgagatgtagc

SEQ ID NO: 2327007 - DNA, 25 bp, Homo sapien
gatgtagtacatcttgggacctctt

SEQ ID NO: 2327008 - DNA, 25 bp, Homo sapien
gaaaagcctagtgcaccttccactg

SEQ ID NO: 2327009 - DNA, 25 bp, Homo sapien
tccatgagggatctaaaaaagcacc

SEQ ID NO: 2327010 - DNA, 25 bp, Homo sapien
taggtccatgggcttaactaagcag

SEQ ID NO: 2327011 - DNA, 25 bp, Homo sapien
gaagacctaagatcaggctagctga

SEQ ID NO: 2327012 - DNA, 25 bp, Homo sapien
cctaaggtagcactatttggagaca

SEQ ID NO: 2327013 - DNA, 25 bp, Homo sapien
taagactttctaataccatgtcagg

SEQ ID NO: 2327014 - DNA, 25 bp, Homo sapien
tcaacaagagtagcgtgattccctt

SEQ ID NO: 2327015 - DNA, 25 bp, Homo sapien
tcaattttcaatcatgcccatagcc

SEQ ID NO: 2327016 - DNA, 25 bp, Homo sapien
gagttttcttaagtgaatcaataag

SEQ ID NO: 2327017 - DNA, 25 bp, Homo sapien
tgagttttcttaagtgaatcaataa

SEQ ID NO: 2327018 - DNA, 25 bp, Homo sapien
ctgagttttcttaagtgaatcaata

SEQ ID NO: 2327019 - DNA, 25 bp, Homo sapien
ggtattccaaataggctgatacaag

SEQ ID NO: 2327020 - DNA, 25 bp, Homo sapien
gggtggtattccaaataggctgata

SEQ ID NO: 2327021 - DNA, 25 bp, Homo sapien
agtagggtggtattccaaataggct

SEQ ID NO: 2327022 - DNA, 25 bp, Homo sapien
gtggtattccaaataggctgataca

SEQ ID NO: 2327023 - DNA, 25 bp, Homo sapien
gaataaagacaagtgtactgcctct

SEQ ID NO: 2327024 - DNA, 25 bp, Homo sapien
caaaataagaagcttgtgccagaat

SEQ ID NO: 2327025 - DNA, 25 bp, Homo sapien
ggtgccaatctgctacaaaataaga

SEQ ID NO: 2327026 - DNA, 25 bp, Homo sapien
taaaagtaatgctccttaaggtgcc

SEQ ID NO: 2327027 - DNA, 25 bp, Homo sapien
ggcttcttcaccactatcatgaaca

SEQ ID NO: 2327028 - DNA, 25 bp, Homo sapien
gctcagtgtgcagtcatcagtaaca

SEQ ID NO: 2327029 - DNA, 25 bp, Homo sapien
cagttgtctgctaaaagtagaaatc

SEQ ID NO: 2327030 - DNA, 25 bp, Homo sapien
taattgcgagaggatgtagtgtaca

SEQ ID NO: 2327031 - DNA, 25 bp, Homo sapien
ggtgatgcattctactaaagttggg

SEQ ID NO: 2327032 - DNA, 25 bp, Homo sapien
gatgcattctactaaagttgggtat

SEQ ID NO: 2327033 - DNA, 25 bp, Homo sapien
tctactaaagttgggtataaggcaa

SEQ ID NO: 2327034 - DNA, 25 bp, Homo sapien
agttgggtataaggcaattacttgt

SEQ ID NO: 2327035 - DNA, 25 bp, Homo sapien
ttttgaactctggatgctggtggct

SEQ ID NO: 2327036 - DNA, 25 bp, Homo sapien
attttgaactctggatgctggtggc

SEQ ID NO: 2327037 - DNA, 25 bp, Homo sapien
tttgaactctggatgctggtggctg

SEQ ID NO: 2327038 - DNA, 25 bp, Homo sapien
tttaaaggaggccaacaacagctgc

SEQ ID NO: 2327039 - DNA, 25 bp, Homo sapien
tactgtagtgttaattatccctccc

SEQ ID NO: 2327040 - DNA, 25 bp, Homo sapien
caggagcctttgttgatgtgcaagc

SEQ ID NO: 2327041 - DNA, 25 bp, Homo sapien
ccaactggagatatggtagcatgta

SEQ ID NO: 2327042 - DNA, 25 bp, Homo sapien
gatcatatggtgagcttatccgcca

SEQ ID NO: 2327043 - DNA, 25 bp, Homo sapien
gcattttactccgtgacagcaagtt

SEQ ID NO: 2327044 - DNA, 25 bp, Homo sapien
tactgaatcggtacactacccttgg

SEQ ID NO: 2327045 - DNA, 25 bp, Homo sapien
cagtgagctaggtcaaagtcagtat

SEQ ID NO: 2327046 - DNA, 25 bp, Homo sapien
tgttttgaactgtagggcatggtcc

SEQ ID NO: 2327047 - DNA, 25 bp, Homo sapien
caattcatactaacaagacaagggc

SEQ ID NO: 2327048 - DNA, 25 bp, Homo sapien
tatgaataaaacaggcactggcagt

SEQ ID NO: 2327049 - DNA, 25 bp, Homo sapien
taaaactcatggtattggctgggcg

SEQ ID NO: 2327050 - DNA, 25 bp, Homo sapien
tagggactcctgtaagtgttctgcc

SEQ ID NO: 2327051 - DNA, 25 bp, Homo sapien
tggaaatctaaggaacatacctggc

SEQ ID NO: 2327052 - DNA, 25 bp, Homo sapien
caagggtggcacagttagggactcc

SEQ ID NO: 2327053 - DNA, 25 bp, Homo sapien
tattctgagcctgtacactaaccca

SEQ ID NO: 2327054 - DNA, 25 bp, Homo sapien
ttatgaacaaggaataggcacaatt

SEQ ID NO: 2327055 - DNA, 25 bp, Homo sapien
acaaggaataggcacaattagagaa

SEQ ID NO: 2327056 - DNA, 25 bp, Homo sapien
tatgaacaaggaataggcacaatta

SEQ ID NO: 2327057 - DNA, 25 bp, Homo sapien
gaacaaggaataggcacaattagag

SEQ ID NO: 2327058 - DNA, 25 bp, Homo sapien
tgtagtggtagaaccatgagcagtg

SEQ ID NO: 2327059 - DNA, 25 bp, Homo sapien
ttggcaaaaacgcaacagtggccaa

SEQ ID NO: 2327060 - DNA, 25 bp, Homo sapien
agtatttctactttccactttgtag

SEQ ID NO: 2327061 - DNA, 25 bp, Homo sapien
caacagtggccaaagtgcaaagtat

SEQ ID NO: 2327062 - DNA, 25 bp, Homo sapien
tttatggcacttccagtttttggaa

SEQ ID NO: 2327063 - DNA, 25 bp, Homo sapien
ttttatggcacttccagtttttgga

SEQ ID NO: 2327064 - DNA, 25 bp, Homo sapien
taagattccgggtcttccatcaaag

SEQ ID NO: 2327065 - DNA, 25 bp, Homo sapien
gtgtaactacattcgcagcaactga

SEQ ID NO: 2327066 - DNA, 25 bp, Homo sapien
catatggtagctgccttaagagaca

SEQ ID NO: 2327067 - DNA, 25 bp, Homo sapien
caattgacctctgggtgacctctgg

SEQ ID NO: 2327068 - DNA, 25 bp, Homo sapien
tactaggtactccagaaatggtggt

SEQ ID NO: 2327069 - DNA, 25 bp, Homo sapien
tatctgactgcagtacacactgagt

SEQ ID NO: 2327070 - DNA, 25 bp, Homo sapien
aaagcaagacatagtgatccacctg

SEQ ID NO: 2327071 - DNA, 25 bp, Homo sapien
aaagccttggcctgcacatactagg

SEQ ID NO: 2327072 - DNA, 25 bp, Homo sapien
gtaataagcacttgagagcgctcca

SEQ ID NO: 2327073 - DNA, 25 bp, Homo sapien
tatatgcggtttccttgactagctg

SEQ ID NO: 2327074 - DNA, 25 bp, Homo sapien
caggcacagcgctttagaacacact

SEQ ID NO: 2327075 - DNA, 25 bp, Homo sapien
cagaggaggacaccaaaacaggtta

SEQ ID NO: 2327076 - DNA, 25 bp, Homo sapien
gcgatggcccgggtggcgactgcga

SEQ ID NO: 2327077 - DNA, 25 bp, Homo sapien
aacagtgaaaccgggcccggcgatg

SEQ ID NO: 2327078 - DNA, 25 bp, Homo sapien
acgcgtgcggacacaagacccgtct

SEQ ID NO: 2327079 - DNA, 25 bp, Homo sapien
tggcgactgcgacgactcgacgcgt

SEQ ID NO: 2327080 - DNA, 25 bp, Homo sapien
gaaatgggcggcaaaagcgcagtca

SEQ ID NO: 2327081 - DNA, 25 bp, Homo sapien
agccaaggcatagccgggaagtccc

SEQ ID NO: 2327082 - DNA, 25 bp, Homo sapien
cctcagccgctcgaaagcaggaaat

SEQ ID NO: 2327083 - DNA, 25 bp, Homo sapien
cccgggtgatacagccggcgttctg

SEQ ID NO: 2327084 - DNA, 25 bp, Homo sapien
ggcgctcctccgtccttcctcgccg

SEQ ID NO: 2327085 - DNA, 25 bp, Homo sapien
ccatggtgtcggggaggcacgggac

SEQ ID NO: 2327086 - DNA, 25 bp, Homo sapien
ggcacgggaccacgcggagggcagc

SEQ ID NO: 2327087 - DNA, 25 bp, Homo sapien
gcagcaaagcggctccggcgctcct

SEQ ID NO: 2327088 - DNA, 25 bp, Homo sapien
tagcaaggcagtagcttgcgcagtt

SEQ ID NO: 2327089 - DNA, 25 bp, Homo sapien
ggcaatgtcacaacccgaccaacag

SEQ ID NO: 2327090 - DNA, 25 bp, Homo sapien
gcgcagttatctccacagcgggcaa

SEQ ID NO: 2327091 - DNA, 25 bp, Homo sapien
cacagcgggcaatgtcacaacccga

SEQ ID NO: 2327092 - DNA, 25 bp, Homo sapien
attgtcctccgcggcgctgagcatc

SEQ ID NO: 2327093 - DNA, 25 bp, Homo sapien
cattgtcctccgcggcgctgagcat

SEQ ID NO: 2327094 - DNA, 25 bp, Homo sapien
ccattgtcctccgcggcgctgagca

SEQ ID NO: 2327095 - DNA, 25 bp, Homo sapien
tgtcctccgcggcgctgagcatcac

SEQ ID NO: 2327096 - DNA, 25 bp, Homo sapien
cctcaattccttctaggaaaatgtg

SEQ ID NO: 2327097 - DNA, 25 bp, Homo sapien
ccagttctgcagatcgctcacacca

SEQ ID NO: 2327098 - DNA, 25 bp, Homo sapien
aaacaggtacacactaaatttggca

SEQ ID NO: 2327099 - DNA, 25 bp, Homo sapien
ctttaaaatgcatcgcggtccaccc

SEQ ID NO: 2327100 - DNA, 25 bp, Homo sapien
cacactcagatttactaagagagca

SEQ ID NO: 2327101 - DNA, 25 bp, Homo sapien
aaatcggaatagtgcaattacctac

SEQ ID NO: 2327102 - DNA, 25 bp, Homo sapien
catatcagaaaccagatctaaaatg

SEQ ID NO: 2327103 - DNA, 25 bp, Homo sapien
cattcgcgagttgcaaagtttaaag

SEQ ID NO: 2327104 - DNA, 25 bp, Homo sapien
tctagattatcagtagcgccaacag

SEQ ID NO: 2327105 - DNA, 25 bp, Homo sapien
tcagcttcaccatggagcgggtgga

SEQ ID NO: 2327106 - DNA, 25 bp, Homo sapien
cccatggtgcccaatagtgataacc

SEQ ID NO: 2327107 - DNA, 25 bp, Homo sapien
ttttgggtactaccaatctggccta

SEQ ID NO: 2327108 - DNA, 25 bp, Homo sapien
ggctttaaaatacactatgtgcaga

SEQ ID NO: 2327109 - DNA, 25 bp, Homo sapien
gacatagagcaggtatccgattcac

SEQ ID NO: 2327110 - DNA, 25 bp, Homo sapien
tatgactaaaactagcccatgcctg

SEQ ID NO: 2327111 - DNA, 25 bp, Homo sapien
aactctttcggccatctattacggt

SEQ ID NO: 2327112 - DNA, 25 bp, Homo sapien
gagagtctagagtcttagtaaacca

SEQ ID NO: 2327113 - DNA, 25 bp, Homo sapien
cctgtggtgatttaacaatgttccc

SEQ ID NO: 2327114 - DNA, 25 bp, Homo sapien
caaccattaagttagccattgaaga

SEQ ID NO: 2327115 - DNA, 25 bp, Homo sapien
gacgttctgcactgtgaaactggaa

SEQ ID NO: 2327116 - DNA, 25 bp, Homo sapien
tgaaagcagttaaagccaaacaaat

SEQ ID NO: 2327117 - DNA, 25 bp, Homo sapien
taggctaacattaaagcaagtactt

SEQ ID NO: 2327118 - DNA, 25 bp, Homo sapien
tgtgggtatgtgtgaacttgcacta

SEQ ID NO: 2327119 - DNA, 25 bp, Homo sapien
taaacaatggtatccttgttgtggg

SEQ ID NO: 2327120 - DNA, 25 bp, Homo sapien
tccttgaagagtccatgcctttcca

SEQ ID NO: 2327121 - DNA, 25 bp, Homo sapien
caaaactcctaatgcttacaggtca

SEQ ID NO: 2327122 - DNA, 25 bp, Homo sapien
tgtgccaattcgctagttgaaactg

SEQ ID NO: 2327123 - DNA, 25 bp, Homo sapien
gtgttcagcattcccatggcatgtc

SEQ ID NO: 2327124 - DNA, 25 bp, Homo sapien
actatggcctagaagtcaaatctgg

SEQ ID NO: 2327125 - DNA, 25 bp, Homo sapien
ccagcagcatatgcaacagaggcca

SEQ ID NO: 2327126 - DNA, 25 bp, Homo sapien
gaagttgacccctgtttcaaagcac

SEQ ID NO: 2327127 - DNA, 25 bp, Homo sapien
taaaatggagggtcggcaaactatg

SEQ ID NO: 2327128 - DNA, 25 bp, Homo sapien
tcagggctccaaaggcacatgttct

SEQ ID NO: 2327129 - DNA, 25 bp, Homo sapien
catgtggcgacctccatagcaagtc

SEQ ID NO: 2327130 - DNA, 25 bp, Homo sapien
tgagtacagctcacgtggcattcct

SEQ ID NO: 2327131 - DNA, 25 bp, Homo sapien
tagctattcttacatggcaacccag

SEQ ID NO: 2327132 - DNA, 25 bp, Homo sapien
ttggctggattcagctaggtagttc

SEQ ID NO: 2327133 - DNA, 25 bp, Homo sapien
ggaagcatctgaagacttactaatt

SEQ ID NO: 2327134 - DNA, 25 bp, Homo sapien
ctggattcagctaggtagttcttgc

SEQ ID NO: 2327135 - DNA, 25 bp, Homo sapien
aagacttactaattgcagccgggca

SEQ ID NO: 2327136 - DNA, 25 bp, Homo sapien
acttgccaataggttcatgaacaaa

SEQ ID NO: 2327137 - DNA, 25 bp, Homo sapien
aaagtcaattatggaatgtggcaga

SEQ ID NO: 2327138 - DNA, 25 bp, Homo sapien
tctgttgataatataaattactccg

SEQ ID NO: 2327139 - DNA, 25 bp, Homo sapien
gcaataaggcaaacttgccaatagg

SEQ ID NO: 2327140 - DNA, 25 bp, Homo sapien
aatggtagcaaagaggagacaacgc

SEQ ID NO: 2327141 - DNA, 25 bp, Homo sapien
cttactcaaaatagactcaggtggc

SEQ ID NO: 2327142 - DNA, 25 bp, Homo sapien
gagacaacgcatacatctgacctag

SEQ ID NO: 2327143 - DNA, 25 bp, Homo sapien
tacagatggcccatagcatggagag

SEQ ID NO: 2327144 - DNA, 25 bp, Homo sapien
tagcacctaccttgtaaagggagag

SEQ ID NO: 2327145 - DNA, 25 bp, Homo sapien
ttatcttcacgtactggaggtcgga

SEQ ID NO: 2327146 - DNA, 25 bp, Homo sapien
gagtcctcattatctcaggcagggc

SEQ ID NO: 2327147 - DNA, 25 bp, Homo sapien
tgtaatctgcagtcagcgaggcatg

SEQ ID NO: 2327148 - DNA, 25 bp, Homo sapien
gagtctgggcctgatctaataaaca

SEQ ID NO: 2327149 - DNA, 25 bp, Homo sapien
gaggaatcaacccacggcataaaga

SEQ ID NO: 2327150 - DNA, 25 bp, Homo sapien
gtcacaggccagaccagattccagg

SEQ ID NO: 2327151 - DNA, 25 bp, Homo sapien
tacagataggcaggcagaggaatca

SEQ ID NO: 2327152 - DNA, 25 bp, Homo sapien
tatggtcatcggtggaatggcttta

SEQ ID NO: 2327153 - DNA, 25 bp, Homo sapien
ctaatttatggtcatcggtggaatg

SEQ ID NO: 2327154 - DNA, 25 bp, Homo sapien
aatttatggtcatcggtggaatggc

SEQ ID NO: 2327155 - DNA, 25 bp, Homo sapien
tcatcggtggaatggctttaacatg

SEQ ID NO: 2327156 - DNA, 25 bp, Homo sapien
gaacctcagctgtaaatagcctcgg

SEQ ID NO: 2327157 - DNA, 25 bp, Homo sapien
gctgccattccaacacgaatgaaag

SEQ ID NO: 2327158 - DNA, 25 bp, Homo sapien
gagaaatgagttttccgtcccagca

SEQ ID NO: 2327159 - DNA, 25 bp, Homo sapien
aatgaaagcctccttaataagagtg

SEQ ID NO: 2327160 - DNA, 25 bp, Homo sapien
tagaaacgtggaggtcccgtgtctg

SEQ ID NO: 2327161 - DNA, 25 bp, Homo sapien
tctgccctcaaggtcgcggcgcagg

SEQ ID NO: 2327162 - DNA, 25 bp, Homo sapien
cgcgcgcctttgtccccgcacgccg

SEQ ID NO: 2327163 - DNA, 25 bp, Homo sapien
ccaaggcgctcaactttccggggtg

SEQ ID NO: 2327164 - DNA, 25 bp, Homo sapien
tctcagctttccttaagcgacccag

SEQ ID NO: 2327165 - DNA, 25 bp, Homo sapien
ccaatcaactttataaggccacaag

SEQ ID NO: 2327166 - DNA, 25 bp, Homo sapien
ccttccacaggtttgaggttctcag

SEQ ID NO: 2327167 - DNA, 25 bp, Homo sapien
tcaactttataaggccacaagtggt

SEQ ID NO: 2327168 - DNA, 25 bp, Homo sapien
gatcagagttctgtcaaggagcagc

SEQ ID NO: 2327169 - DNA, 25 bp, Homo sapien
ggaagttctgtgtccaagtcccacc

SEQ ID NO: 2327170 - DNA, 25 bp, Homo sapien
tgtttctgtggaccagtagttcctc

SEQ ID NO: 2327171 - DNA, 25 bp, Homo sapien
gaacaggcctgggactttccaacac

SEQ ID NO: 2327172 - DNA, 25 bp, Homo sapien
aggcacatttcacacgtaagtgtga

SEQ ID NO: 2327173 - DNA, 25 bp, Homo sapien
tgtgaaaactcaaacatcaagctta

SEQ ID NO: 2327174 - DNA, 25 bp, Homo sapien
cacacgtaagtgtgaaaactcaaac

SEQ ID NO: 2327175 - DNA, 25 bp, Homo sapien
tgctgacgtagtaacaaggtttaag

SEQ ID NO: 2327176 - DNA, 25 bp, Homo sapien
tgtcagaaaggaataaattgttact

SEQ ID NO: 2327177 - DNA, 25 bp, Homo sapien
ttgtcagaaaggaataaattgttac

SEQ ID NO: 2327178 - DNA, 25 bp, Homo sapien
ttaattttgacatattggtcagact

SEQ ID NO: 2327179 - DNA, 25 bp, Homo sapien
gacatattggtcagactggtgctgg

SEQ ID NO: 2327180 - DNA, 25 bp, Homo sapien
attggtcagactggtgctggatgaa

SEQ ID NO: 2327181 - DNA, 25 bp, Homo sapien
catattggtcagactggtgctggat

SEQ ID NO: 2327182 - DNA, 25 bp, Homo sapien
gtaagatttgttgcatggcagcagc

SEQ ID NO: 2327183 - DNA, 25 bp, Homo sapien
ccggctccttgacgctgtggatcag

SEQ ID NO: 2327184 - DNA, 25 bp, Homo sapien
cttccggctccttgacgctgtggat

SEQ ID NO: 2327185 - DNA, 25 bp, Homo sapien
tccggctccttgacgctgtggatca

SEQ ID NO: 2327186 - DNA, 25 bp, Homo sapien
tggttgctctcgcaaaagcaatagt

SEQ ID NO: 2327187 - DNA, 25 bp, Homo sapien
ttccagggtagatcagatgctgtgt

SEQ ID NO: 2327188 - DNA, 25 bp, Homo sapien
tctgctgagacaggatcagccttga

SEQ ID NO: 2327189 - DNA, 25 bp, Homo sapien
gagtcttccagggtagatcagatgc

SEQ ID NO: 2327190 - DNA, 25 bp, Homo sapien
ttgcaatagtatgagcagccaacat

SEQ ID NO: 2327191 - DNA, 25 bp, Homo sapien
tgatcagttacatcaaggcctgatg

SEQ ID NO: 2327192 - DNA, 25 bp, Homo sapien
tgcagcccaatgttctgaagtcctg

SEQ ID NO: 2327193 - DNA, 25 bp, Homo sapien
tgtcactggattcacttgcagccca

SEQ ID NO: 2327194 - DNA, 25 bp, Homo sapien
accaaggctggcttcaaaattcaca

SEQ ID NO: 2327195 - DNA, 25 bp, Homo sapien
tcaaaattcacagccctgttgacag

SEQ ID NO: 2327196 - DNA, 25 bp, Homo sapien
ggctggcttcaaaattcacagccct

SEQ ID NO: 2327197 - DNA, 25 bp, Homo sapien
cttccgaaccaaggctggcttcaaa

SEQ ID NO: 2327198 - DNA, 25 bp, Homo sapien
gcattgtcggggaccagagcttggg

SEQ ID NO: 2327199 - DNA, 25 bp, Homo sapien
caatcaggtgatttcctccagggca

SEQ ID NO: 2327200 - DNA, 25 bp, Homo sapien
gcagctgcattgtcggggaccagag

SEQ ID NO: 2327201 - DNA, 25 bp, Homo sapien
cctccagggcagctgcattgtcggg

SEQ ID NO: 2327202 - DNA, 25 bp, Homo sapien
tagagtctcccaaagaacattgacc

SEQ ID NO: 2327203 - DNA, 25 bp, Homo sapien
acccagtagagtctcccaaagaaca

SEQ ID NO: 2327204 - DNA, 25 bp, Homo sapien
aaatgagagcaatctctgttgcctc

SEQ ID NO: 2327205 - DNA, 25 bp, Homo sapien
gaacattgaccagcaaaatgagagc

SEQ ID NO: 2327206 - DNA, 25 bp, Homo sapien
tgttccttgctggagagctgaaagc

SEQ ID NO: 2327207 - DNA, 25 bp, Homo sapien
tgtctgttccttgctggagagctga

SEQ ID NO: 2327208 - DNA, 25 bp, Homo sapien
gaggctaaagttttgtgtctgttcc

SEQ ID NO: 2327209 - DNA, 25 bp, Homo sapien
gtaaatcaaggacttattaagagag

SEQ ID NO: 2327210 - DNA, 25 bp, Homo sapien
catctaaatcagctgtggtgatggt

SEQ ID NO: 2327211 - DNA, 25 bp, Homo sapien
tatgaagatggtcacctgcggtggc

SEQ ID NO: 2327212 - DNA, 25 bp, Homo sapien
gtttcaaactccttgcttctgggct

SEQ ID NO: 2327213 - DNA, 25 bp, Homo sapien
cctgggggcctcttcatctaaatca

SEQ ID NO: 2327214 - DNA, 25 bp, Homo sapien
tggcacagctggtttcgagctgata

SEQ ID NO: 2327215 - DNA, 25 bp, Homo sapien
ggcacagctggtttcgagctgataa

SEQ ID NO: 2327216 - DNA, 25 bp, Homo sapien
tattatggagagtgaaagggtcagc

SEQ ID NO: 2327217 - DNA, 25 bp, Homo sapien
gctgcctctgcaaggtaatgagaag

SEQ ID NO: 2327218 - DNA, 25 bp, Homo sapien
gtctacagtctgttgctgaaatgct

SEQ ID NO: 2327219 - DNA, 25 bp, Homo sapien
gcctcaggaggtctacagtctgttg

SEQ ID NO: 2327220 - DNA, 25 bp, Homo sapien
aactcactggagatagttccacaca

SEQ ID NO: 2327221 - DNA, 25 bp, Homo sapien
catccaaacgctttctggagagaga

SEQ ID NO: 2327222 - DNA, 25 bp, Homo sapien
tatgatttaaaagcagcttggcttc

SEQ ID NO: 2327223 - DNA, 25 bp, Homo sapien
taattcaggccctgagaatatgatt

SEQ ID NO: 2327224 - DNA, 25 bp, Homo sapien
gtgggcttcacacccctttcctgat

SEQ ID NO: 2327225 - DNA, 25 bp, Homo sapien
ggtgcctctgatgccagactctgag

SEQ ID NO: 2327226 - DNA, 25 bp, Homo sapien
cagaggggtgggcttcacacccctt

SEQ ID NO: 2327227 - DNA, 25 bp, Homo sapien
ctgatgccagactctgagtcagcag

SEQ ID NO: 2327228 - DNA, 25 bp, Homo sapien
tggagttttgatgccccagggtcat

SEQ ID NO: 2327229 - DNA, 25 bp, Homo sapien
tgagttctggagttttgatgcccca

SEQ ID NO: 2327230 - DNA, 25 bp, Homo sapien
cctgactgggttttcttgtgaatcc

SEQ ID NO: 2327231 - DNA, 25 bp, Homo sapien
ggtcatcataccaaccctgactggg

SEQ ID NO: 2327232 - DNA, 25 bp, Homo sapien
aagttgtttggccactctgcgtttg

SEQ ID NO: 2327233 - DNA, 25 bp, Homo sapien
tctgcgctggcctgatgggaatctg

SEQ ID NO: 2327234 - DNA, 25 bp, Homo sapien
tgcggacaaaacatctctgcgctgg

SEQ ID NO: 2327235 - DNA, 25 bp, Homo sapien
tgatgggaatctgcggcttccacat

SEQ ID NO: 2327236 - DNA, 25 bp, Homo sapien
tatttttccacagtgcaatgctcat

SEQ ID NO: 2327237 - DNA, 25 bp, Homo sapien
cagtttctgctcaggactagagagg

SEQ ID NO: 2327238 - DNA, 25 bp, Homo sapien
caattcccctactcaaactctggtg

SEQ ID NO: 2327239 - DNA, 25 bp, Homo sapien
cctcctgttatgtctccattcttca

SEQ ID NO: 2327240 - DNA, 25 bp, Homo sapien
accaactcttaagctcctttgcaga

SEQ ID NO: 2327241 - DNA, 25 bp, Homo sapien
gaccaactcttaagctcctttgcag

SEQ ID NO: 2327242 - DNA, 25 bp, Homo sapien
tgaccaactcttaagctcctttgca

SEQ ID NO: 2327243 - DNA, 25 bp, Homo sapien
tatctgaggtgatttcttgcaatgt

SEQ ID NO: 2327244 - DNA, 25 bp, Homo sapien
gcagaaaagtattccttaagcctga

SEQ ID NO: 2327245 - DNA, 25 bp, Homo sapien
aatgtccttggaactacccccagct

SEQ ID NO: 2327246 - DNA, 25 bp, Homo sapien
tctcaacgccgagccgggttctgtt

SEQ ID NO: 2327247 - DNA, 25 bp, Homo sapien
gagatgcttccatggcctgattggg

SEQ ID NO: 2327248 - DNA, 25 bp, Homo sapien
gctcctggcactcaggtcctagagg

SEQ ID NO: 2327249 - DNA, 25 bp, Homo sapien
ctcaggtcctagaggagatgcttcc

SEQ ID NO: 2327250 - DNA, 25 bp, Homo sapien
tgagctcctggcactcaggtcctag

SEQ ID NO: 2327251 - DNA, 25 bp, Homo sapien
tctgtaaaatctaccccgtgtgact

SEQ ID NO: 2327252 - DNA, 25 bp, Homo sapien
tctatgggcagagatccagtggaaa

SEQ ID NO: 2327253 - DNA, 25 bp, Homo sapien
cagtgagtgtctagctgaaggcccc

SEQ ID NO: 2327254 - DNA, 25 bp, Homo sapien
tgacattgggagaaccccgaggtgt

SEQ ID NO: 2327255 - DNA, 25 bp, Homo sapien
gttaatattcgaagtgaccatcctg

SEQ ID NO: 2327256 - DNA, 25 bp, Homo sapien
gtcctgctctgagaacatcacactg

SEQ ID NO: 2327257 - DNA, 25 bp, Homo sapien
tgtgcattttcatggactagtgaga

SEQ ID NO: 2327258 - DNA, 25 bp, Homo sapien
cctgttggcacatgtcagtcctgct

SEQ ID NO: 2327259 - DNA, 25 bp, Homo sapien
gagaggccttacaggtagggctggt

SEQ ID NO: 2327260 - DNA, 25 bp, Homo sapien
agagaggccttacaggtagggctgg

SEQ ID NO: 2327261 - DNA, 25 bp, Homo sapien
actttgatcttcaccttcaccgtag

SEQ ID NO: 2327262 - DNA, 25 bp, Homo sapien
tttgatcttcaccttcaccgtagtg

SEQ ID NO: 2327263 - DNA, 25 bp, Homo sapien
tgactttgatcttcaccttcaccgt

SEQ ID NO: 2327264 - DNA, 25 bp, Homo sapien
ttgatcttcaccttcaccgtagtgt

SEQ ID NO: 2327265 - DNA, 25 bp, Homo sapien
ctggaacacacagaccatgtagttg

SEQ ID NO: 2327266 - DNA, 25 bp, Homo sapien
ggggtcattgatggcaacaatatcc

SEQ ID NO: 2327267 - DNA, 25 bp, Homo sapien
attgatggcaacaatatccacttta

SEQ ID NO: 2327268 - DNA, 25 bp, Homo sapien
tggaacacacagaccatgtagttga

SEQ ID NO: 2327269 - DNA, 25 bp, Homo sapien
aggattttcgttgatgacaagcttc

SEQ ID NO: 2327270 - DNA, 25 bp, Homo sapien
ccggtggattccatgatatactcag

SEQ ID NO: 2327271 - DNA, 25 bp, Homo sapien
gaagacaccggtggattccatgata

SEQ ID NO: 2327272 - DNA, 25 bp, Homo sapien
ggaagatggtgataggattttcgtt

SEQ ID NO: 2327273 - DNA, 25 bp, Homo sapien
tgggggtgtcagcagaaggggcaga

SEQ ID NO: 2327274 - DNA, 25 bp, Homo sapien
catgggggtgtcagcagaaggggca

SEQ ID NO: 2327275 - DNA, 25 bp, Homo sapien
agacatgggggtgtcagcagaaggg

SEQ ID NO: 2327276 - DNA, 25 bp, Homo sapien
gggggtgtcagcagaaggggcagag

SEQ ID NO: 2327277 - DNA, 25 bp, Homo sapien
gttggtgatacaggaggcatgctga

SEQ ID NO: 2327278 - DNA, 25 bp, Homo sapien
ttggtgatacaggaggcatgctgat

SEQ ID NO: 2327279 - DNA, 25 bp, Homo sapien
gggtggcagtgatggcatggactgt

SEQ ID NO: 2327280 - DNA, 25 bp, Homo sapien
cagtgatggcatggactgtggtcat

SEQ ID NO: 2327281 - DNA, 25 bp, Homo sapien
tggcagtgatggcatggactgtggt

SEQ ID NO: 2327282 - DNA, 25 bp, Homo sapien
ctgggtggcagtgatggcatggact

SEQ ID NO: 2327283 - DNA, 25 bp, Homo sapien
gtttcccagaggggccatccacagt

SEQ ID NO: 2327284 - DNA, 25 bp, Homo sapien
ctgtcacaccacagtttcccagagg

SEQ ID NO: 2327285 - DNA, 25 bp, Homo sapien
tgtcacaccacagtttcccagaggg

SEQ ID NO: 2327286 - DNA, 25 bp, Homo sapien
tcccagaggggccatccacagtctt

SEQ ID NO: 2327287 - DNA, 25 bp, Homo sapien
acacattggcagtagggacacagaa

SEQ ID NO: 2327288 - DNA, 25 bp, Homo sapien
gaccttgcccacaaccttagcagca

SEQ ID NO: 2327289 - DNA, 25 bp, Homo sapien
tgacacattggcagtagggacacag

SEQ ID NO: 2327290 - DNA, 25 bp, Homo sapien
cacaaccttagcagcaccagtagag

SEQ ID NO: 2327291 - DNA, 25 bp, Homo sapien
cagtttttccagacagcagttcagg

SEQ ID NO: 2327292 - DNA, 25 bp, Homo sapien
ggcagtttttccagacagcagttca

SEQ ID NO: 2327293 - DNA, 25 bp, Homo sapien
ttggcagtttttccagacagcagtt

SEQ ID NO: 2327294 - DNA, 25 bp, Homo sapien
tttccagacagcagttcaggcccac

SEQ ID NO: 2327295 - DNA, 25 bp, Homo sapien
ttgagggggtctcggacgcctgctt

SEQ ID NO: 2327296 - DNA, 25 bp, Homo sapien
cttgagggggtctcggacgcctgct

SEQ ID NO: 2327297 - DNA, 25 bp, Homo sapien
acaacctggtgctcagtgtagccca

SEQ ID NO: 2327298 - DNA, 25 bp, Homo sapien
ctgttaaaatcagaggagacaacct

SEQ ID NO: 2327299 - DNA, 25 bp, Homo sapien
cctggtgctcagtgtagcccaggat

SEQ ID NO: 2327300 - DNA, 25 bp, Homo sapien
gttaaaatcagaggagacaacctgg

SEQ ID NO: 2327301 - DNA, 25 bp, Homo sapien
ccagcatcaaaggttgaagagtgga

SEQ ID NO: 2327302 - DNA, 25 bp, Homo sapien
aggtcaatgccatccccagcatcaa

SEQ ID NO: 2327303 - DNA, 25 bp, Homo sapien
gcatcaaaggttgaagagtggatgt

SEQ ID NO: 2327304 - DNA, 25 bp, Homo sapien
atcaaaggttgaagagtggatgtcg

SEQ ID NO: 2327305 - DNA, 25 bp, Homo sapien
ccaggtaaatctgcttctcggtccc

SEQ ID NO: 2327306 - DNA, 25 bp, Homo sapien
atctgggaggtagcacatattggga

SEQ ID NO: 2327307 - DNA, 25 bp, Homo sapien
aggtagcacatattgggagccaggt

SEQ ID NO: 2327308 - DNA, 25 bp, Homo sapien
ggtaaatctgcttctcggtccctgc

SEQ ID NO: 2327309 - DNA, 25 bp, Homo sapien
tgtggtctctctgggtgcatctctt

SEQ ID NO: 2327310 - DNA, 25 bp, Homo sapien
catttcactatttttgtccctggca

SEQ ID NO: 2327311 - DNA, 25 bp, Homo sapien
tcttctgggtcactcccatttgttc

SEQ ID NO: 2327312 - DNA, 25 bp, Homo sapien
ctagacggtgcctccacatcctgac

SEQ ID NO: 2327313 - DNA, 25 bp, Homo sapien
gatttcttccaccagtgttctttgt

SEQ ID NO: 2327314 - DNA, 25 bp, Homo sapien
tgaggaccagttgctcacacgcagg

SEQ ID NO: 2327315 - DNA, 25 bp, Homo sapien
taaagcggtattctggttagggaca

SEQ ID NO: 2327316 - DNA, 25 bp, Homo sapien
ttgtcagtgattgggcaactgtgcc

SEQ ID NO: 2327317 - DNA, 25 bp, Homo sapien
gccacgaggctggttttgtcagtga

SEQ ID NO: 2327318 - DNA, 25 bp, Homo sapien
ccaggcctgcctgcaaaaattggat

SEQ ID NO: 2327319 - DNA, 25 bp, Homo sapien
gagctcagctgcacaagaagcctag

SEQ ID NO: 2327320 - DNA, 25 bp, Homo sapien
tttgaaatcgcagagtgggaacgct

SEQ ID NO: 2327321 - DNA, 25 bp, Homo sapien
gctctcaggcattcgaaaaacacag

SEQ ID NO: 2327322 - DNA, 25 bp, Homo sapien
tgttcctctgaagagtagagttggg

SEQ ID NO: 2327323 - DNA, 25 bp, Homo sapien
tcctagaacttaggccctgttcctc

SEQ ID NO: 2327324 - DNA, 25 bp, Homo sapien
agaatttctaacatgatccagctcc

SEQ ID NO: 2327325 - DNA, 25 bp, Homo sapien
tgacatcctagaacttaggccctgt

SEQ ID NO: 2327326 - DNA, 25 bp, Homo sapien
ccgtgtctccccttccactctgcag

SEQ ID NO: 2327327 - DNA, 25 bp, Homo sapien
ctgcagcagccggacaccacacgca

SEQ ID NO: 2327328 - DNA, 25 bp, Homo sapien
acaccacacgcagggcaagctcctg

SEQ ID NO: 2327329 - DNA, 25 bp, Homo sapien
aacccgtgtctccccttccactctg

SEQ ID NO: 2327330 - DNA, 25 bp, Homo sapien
tgtgactgacactattagcaatgtg

SEQ ID NO: 2327331 - DNA, 25 bp, Homo sapien
gtgctcagagccgtgttttaactca

SEQ ID NO: 2327332 - DNA, 25 bp, Homo sapien
caatagtaggcagtagagtgctggc

SEQ ID NO: 2327333 - DNA, 25 bp, Homo sapien
aaggaatgagcatgtgattccacca

SEQ ID NO: 2327334 - DNA, 25 bp, Homo sapien
tgtgtcagcatctcggccaagacca

SEQ ID NO: 2327335 - DNA, 25 bp, Homo sapien
tccaggcaaataggatcaaaatggg

SEQ ID NO: 2327336 - DNA, 25 bp, Homo sapien
ttctggttctacaacagcagccctt

SEQ ID NO: 2327337 - DNA, 25 bp, Homo sapien
ccccgaaacatgaaatgaaggttgc

SEQ ID NO: 2327338 - DNA, 25 bp, Homo sapien
gaggcagtgcctgttggaactcagc

SEQ ID NO: 2327339 - DNA, 25 bp, Homo sapien
agctttggccaagagaacccttgcc

SEQ ID NO: 2327340 - DNA, 25 bp, Homo sapien
gcctgttggaactcagctttggcca

SEQ ID NO: 2327341 - DNA, 25 bp, Homo sapien
cagctttggccaagagaacccttgc

SEQ ID NO: 2327342 - DNA, 25 bp, Homo sapien
ttagaatttcatgtcccagaaccat

SEQ ID NO: 2327343 - DNA, 25 bp, Homo sapien
tctaagcttcgtgaacactcttgtt

SEQ ID NO: 2327344 - DNA, 25 bp, Homo sapien
gggaattgcctagtaagaacttcta

SEQ ID NO: 2327345 - DNA, 25 bp, Homo sapien
tgttttagaatttcatgtcccagaa

SEQ ID NO: 2327346 - DNA, 25 bp, Homo sapien
ctgcagacacagaggatggttcccc

SEQ ID NO: 2327347 - DNA, 25 bp, Homo sapien
gaaccaggtgactccactcggtgga

SEQ ID NO: 2327348 - DNA, 25 bp, Homo sapien
caacatatgcatggtagttagaacc

SEQ ID NO: 2327349 - DNA, 25 bp, Homo sapien
gctcattaggagtctgggctgcaga

SEQ ID NO: 2327350 - DNA, 25 bp, Homo sapien
tacaaggggacaccattcgagggtg

SEQ ID NO: 2327351 - DNA, 25 bp, Homo sapien
tggaggggagtaactgatgagttct

SEQ ID NO: 2327352 - DNA, 25 bp, Homo sapien
ttatgttagatcactgagattggag

SEQ ID NO: 2327353 - DNA, 25 bp, Homo sapien
agattggagttacaaggggacacca

SEQ ID NO: 2327354 - DNA, 25 bp, Homo sapien
cattttggaacgtggagcaaggaga

SEQ ID NO: 2327355 - DNA, 25 bp, Homo sapien
aaggagaatggtgctttgtccttgc

SEQ ID NO: 2327356 - DNA, 25 bp, Homo sapien
ccaaggactcttgggctgcgtctga

SEQ ID NO: 2327357 - DNA, 25 bp, Homo sapien
acgaaagggatacaagtgggacagc

SEQ ID NO: 2327358 - DNA, 25 bp, Homo sapien
atctctgcactattccccacttgtg

SEQ ID NO: 2327359 - DNA, 25 bp, Homo sapien
tgcactattccccacttgtgatgga

SEQ ID NO: 2327360 - DNA, 25 bp, Homo sapien
cacttgtgatggactggcttttccc

SEQ ID NO: 2327361 - DNA, 25 bp, Homo sapien
tattccccacttgtgatggactggc

SEQ ID NO: 2327362 - DNA, 25 bp, Homo sapien
cagtggccataaagctggactcttg

SEQ ID NO: 2327363 - DNA, 25 bp, Homo sapien
aagaaatgaactgcaccagctactt

SEQ ID NO: 2327364 - DNA, 25 bp, Homo sapien
gaactgcaccagctacttcaaatgg

SEQ ID NO: 2327365 - DNA, 25 bp, Homo sapien
ggtaatgtctgaatgcagtggccat

SEQ ID NO: 2327366 - DNA, 25 bp, Homo sapien
taacatttcagggtatttctggacg

SEQ ID NO: 2327367 - DNA, 25 bp, Homo sapien
gcatcgcgggtggaagtcttaaaat

SEQ ID NO: 2327368 - DNA, 25 bp, Homo sapien
tggaggatgagattgcatcgcgggt

SEQ ID NO: 2327369 - DNA, 25 bp, Homo sapien
tttctggacggtgcatgtgcttgac

SEQ ID NO: 2327370 - DNA, 25 bp, Homo sapien
cacatctgaaacttcaccattgtat

SEQ ID NO: 2327371 - DNA, 25 bp, Homo sapien
ccctctccacatctgaaacttcacc

SEQ ID NO: 2327372 - DNA, 25 bp, Homo sapien
tgttctagacacatttatattcttc

SEQ ID NO: 2327373 - DNA, 25 bp, Homo sapien
accattgtatttcattgttctagac

SEQ ID NO: 2327374 - DNA, 25 bp, Homo sapien
tatacctcagatttgctggctggtg

SEQ ID NO: 2327375 - DNA, 25 bp, Homo sapien
ctggctggtgctccaatggcttggt

SEQ ID NO: 2327376 - DNA, 25 bp, Homo sapien
tccttgcgggcagctgctttgtata

SEQ ID NO: 2327377 - DNA, 25 bp, Homo sapien
ctttgtattctgaactagagtaagc

SEQ ID NO: 2327378 - DNA, 25 bp, Homo sapien
aggagtcccatccagccgaacaagc

SEQ ID NO: 2327379 - DNA, 25 bp, Homo sapien
aagccactgtaggaaggcttcccca

SEQ ID NO: 2327380 - DNA, 25 bp, Homo sapien
tccagccgaacaagccactgtagga

SEQ ID NO: 2327381 - DNA, 25 bp, Homo sapien
ccccaggacatgagtcaggagctga

SEQ ID NO: 2327382 - DNA, 25 bp, Homo sapien
aaccattcctgattgaaccacgcag

SEQ ID NO: 2327383 - DNA, 25 bp, Homo sapien
ctgattgaaccacgcagggagcaga

SEQ ID NO: 2327384 - DNA, 25 bp, Homo sapien
cattcctgattgaaccacgcaggga

SEQ ID NO: 2327385 - DNA, 25 bp, Homo sapien
tccaaccattcctgattgaaccacg

SEQ ID NO: 2327386 - DNA, 25 bp, Homo sapien
cactttggccgttaaattgccgcag

SEQ ID NO: 2327387 - DNA, 25 bp, Homo sapien
ttaaattgccgcagaaagcagctgc

SEQ ID NO: 2327388 - DNA, 25 bp, Homo sapien
tgtacttatacgtggccctgcagcc

SEQ ID NO: 2327389 - DNA, 25 bp, Homo sapien
cctgcagccacgtgtcactgtactg

SEQ ID NO: 2327390 - DNA, 25 bp, Homo sapien
gcagcatggtctcttgcggtggcca

SEQ ID NO: 2327391 - DNA, 25 bp, Homo sapien
ggcagcatggtctcttgcggtggcc

SEQ ID NO: 2327392 - DNA, 25 bp, Homo sapien
cagcatggtctcttgcggtggccat

SEQ ID NO: 2327393 - DNA, 25 bp, Homo sapien
atgaaacagttggtcttagagatgc

SEQ ID NO: 2327394 - DNA, 25 bp, Homo sapien
tgatgaaacagttggtcttagagat

SEQ ID NO: 2327395 - DNA, 25 bp, Homo sapien
tgtttgcccgatttttatcctgttg

SEQ ID NO: 2327396 - DNA, 25 bp, Homo sapien
ctgttgatgaaacagttggtcttag

SEQ ID NO: 2327397 - DNA, 25 bp, Homo sapien
tttaaccctgtcagataatatactg

SEQ ID NO: 2327398 - DNA, 25 bp, Homo sapien
gcttccttatatcttgaactgttag

SEQ ID NO: 2327399 - DNA, 25 bp, Homo sapien
gaactgttagtttatcttcctgcaa

SEQ ID NO: 2327400 - DNA, 25 bp, Homo sapien
gataatatactgtaccgcttcctta

SEQ ID NO: 2327401 - DNA, 25 bp, Homo sapien
actgccaaacgcctgagatctgtcc

SEQ ID NO: 2327402 - DNA, 25 bp, Homo sapien
gtgactgccaaacgcctgagatctg

SEQ ID NO: 2327403 - DNA, 25 bp, Homo sapien
cagtgagtttcccagggcgagggcg

SEQ ID NO: 2327404 - DNA, 25 bp, Homo sapien
agtgagtttcccagggcgagggcgc

SEQ ID NO: 2327405 - DNA, 25 bp, Homo sapien
gaaccaatcagctcttccaatgcct

SEQ ID NO: 2327406 - DNA, 25 bp, Homo sapien
tccgtgcacggcctcgctggttgat

SEQ ID NO: 2327407 - DNA, 25 bp, Homo sapien
atgctgaccctgttctggtggcccg

SEQ ID NO: 2327408 - DNA, 25 bp, Homo sapien
tgattggttcgtccgggaaccaatc

SEQ ID NO: 2327409 - DNA, 25 bp, Homo sapien
acgcaaaacctggtggctggcacac

SEQ ID NO: 2327410 - DNA, 25 bp, Homo sapien
gtgcacgcaaaacctggtggctggc

SEQ ID NO: 2327411 - DNA, 25 bp, Homo sapien
caaggttattaatgaaccagggagt

SEQ ID NO: 2327412 - DNA, 25 bp, Homo sapien
aggttattaatgaaccagggagtgc

SEQ ID NO: 2327413 - DNA, 25 bp, Homo sapien
tgacgacccagagtggaatcgggaa

SEQ ID NO: 2327414 - DNA, 25 bp, Homo sapien
cattttggtaatccgctttggtgat

SEQ ID NO: 2327415 - DNA, 25 bp, Homo sapien
aaatgctgcgctttcggtaaatgcc

SEQ ID NO: 2327416 - DNA, 25 bp, Homo sapien
ccgactgagttaggttgacgaccca

SEQ ID NO: 2327417 - DNA, 25 bp, Homo sapien
atcaattaattgtaaataccactgc

SEQ ID NO: 2327418 - DNA, 25 bp, Homo sapien
caattaattgtaaataccactgccc

SEQ ID NO: 2327419 - DNA, 25 bp, Homo sapien
attaattgtaaataccactgccctc

SEQ ID NO: 2327420 - DNA, 25 bp, Homo sapien
ttaattgtaaataccactgccctca

SEQ ID NO: 2327421 - DNA, 25 bp, Homo sapien
tatttttaactcagttttgagtgag

SEQ ID NO: 2327422 - DNA, 25 bp, Homo sapien
tttttaactcagttttgagtgaggc

SEQ ID NO: 2327423 - DNA, 25 bp, Homo sapien
ttttgagtgaggcaatagtcatagt

SEQ ID NO: 2327424 - DNA, 25 bp, Homo sapien
gtgaggcaatagtcatagtaccaaa

SEQ ID NO: 2327425 - DNA, 25 bp, Homo sapien
ggccttctcacctaacgccaccaac

SEQ ID NO: 2327426 - DNA, 25 bp, Homo sapien
gttggtggcgttaggtgagaaggcc

SEQ ID NO: 2327427 - DNA, 25 bp, Homo sapien
tagtggccttctcacctaacgccac

SEQ ID NO: 2327428 - DNA, 25 bp, Homo sapien
atagtggccttctcacctaacgcca

SEQ ID NO: 2327429 - DNA, 25 bp, Homo sapien
ataatagtggccttctcacctaacg

SEQ ID NO: 2327430 - DNA, 25 bp, Homo sapien
ggccttctcacctaacgccaccaac

SEQ ID NO: 2327431 - DNA, 25 bp, Homo sapien
aatagtggccttctcacctaacgcc

SEQ ID NO: 2327432 - DNA, 25 bp, Homo sapien
taatagtggccttctcacctaacgc

SEQ ID NO: 2327433 - DNA, 25 bp, Homo sapien
gttggtggcgttaggtgagaaggcc

SEQ ID NO: 2327434 - DNA, 25 bp, Homo sapien
tggcgttaggtgagaaggccactat

SEQ ID NO: 2327435 - DNA, 25 bp, Homo sapien
gcgttaggtgagaaggccactatta

SEQ ID NO: 2327436 - DNA, 25 bp, Homo sapien
ggcgttaggtgagaaggccactatt

SEQ ID NO: 2327437 - DNA, 25 bp, Homo sapien
gtggcgttaggtgagaaggccacta

SEQ ID NO: 2327438 - DNA, 25 bp, Homo sapien
cgttaggtgagaaggccactattat

SEQ ID NO: 2327439 - DNA, 25 bp, Homo sapien
ggacctcatgccggaaaattggtcg

SEQ ID NO: 2327440 - DNA, 25 bp, Homo sapien
cgaccaattttccggcatgaggtcc

SEQ ID NO: 2327441 - DNA, 25 bp, Homo sapien
tggccgggtggcctatgtctccttt

SEQ ID NO: 2327442 - DNA, 25 bp, Homo sapien
ggacctcatgccggaaaattggtcg

SEQ ID NO: 2327443 - DNA, 25 bp, Homo sapien
caggcgcttcgtggaggttggccgg

SEQ ID NO: 2327444 - DNA, 25 bp, Homo sapien
tttggacctcatgccggaaaattgg

SEQ ID NO: 2327445 - DNA, 25 bp, Homo sapien
gccgggtggcctatgtctcctttgg

SEQ ID NO: 2327446 - DNA, 25 bp, Homo sapien
tatgtctcctttggacctcatgccg

SEQ ID NO: 2327447 - DNA, 25 bp, Homo sapien
ccaattttccggcatgaggtccaaa

SEQ ID NO: 2327448 - DNA, 25 bp, Homo sapien
cgaccaattttccggcatgaggtcc

SEQ ID NO: 2327449 - DNA, 25 bp, Homo sapien
gaggtccaaaggagacataggccac

SEQ ID NO: 2327450 - DNA, 25 bp, Homo sapien
ccaaaggagacataggccacccggc

SEQ ID NO: 2327451 - DNA, 25 bp, Homo sapien
ggccaacctccacgaagcgcctgaa

SEQ ID NO: 2327452 - DNA, 25 bp, Homo sapien
aaaggagacataggccacccggcca

SEQ ID NO: 2327453 - DNA, 25 bp, Homo sapien
tccgcacagtgcccgccaaaagtat

SEQ ID NO: 2327454 - DNA, 25 bp, Homo sapien
atacttttggcgggcactgtgcgga

SEQ ID NO: 2327455 - DNA, 25 bp, Homo sapien
tttccgcacagtgcccgccaaaagt

SEQ ID NO: 2327456 - DNA, 25 bp, Homo sapien
cgatggaccttgcactcaagtgagg

SEQ ID NO: 2327457 - DNA, 25 bp, Homo sapien
gaacagggctttggtcgatggacct

SEQ ID NO: 2327458 - DNA, 25 bp, Homo sapien
tccgcacagtgcccgccaaaagtat

SEQ ID NO: 2327459 - DNA, 25 bp, Homo sapien
tttcatcctcaagtttccgcacagt

SEQ ID NO: 2327460 - DNA, 25 bp, Homo sapien
aagtttccgcacagtgcccgccaaa

SEQ ID NO: 2327461 - DNA, 25 bp, Homo sapien
cactgtgcggaaacttgaggatgaa

SEQ ID NO: 2327462 - DNA, 25 bp, Homo sapien
aggtccatcgaccaaagccctgttc

SEQ ID NO: 2327463 - DNA, 25 bp, Homo sapien
tcacttgagtgcaaggtccatcgac

SEQ ID NO: 2327464 - DNA, 25 bp, Homo sapien
atacttttggcgggcactgtgcgga

SEQ ID NO: 2327465 - DNA, 25 bp, Homo sapien
tttggcgggcactgtgcggaaactt

SEQ ID NO: 2327466 - DNA, 25 bp, Homo sapien
cttttggcgggcactgtgcggaaac

SEQ ID NO: 2327467 - DNA, 25 bp, Homo sapien
gaaggcaaagaaaacgaggaacaga

SEQ ID NO: 2327468 - DNA, 25 bp, Homo sapien
tctcccaaaaaagcacctggtacta

SEQ ID NO: 2327469 - DNA, 25 bp, Homo sapien
cagacatcaatacaaaatgggcagc

SEQ ID NO: 2327470 - DNA, 25 bp, Homo sapien
gcttctcccaaaaaagcacctggta

SEQ ID NO: 2327471 - DNA, 25 bp, Homo sapien
caaagaaaacgaggaacagaataat

SEQ ID NO: 2327472 - DNA, 25 bp, Homo sapien
cacacgatgggccaagaagattgaa

SEQ ID NO: 2327473 - DNA, 25 bp, Homo sapien
taccaggtgcttttttgggagaagc

SEQ ID NO: 2327474 - DNA, 25 bp, Homo sapien
tagtaccaggtgcttttttgggaga

SEQ ID NO: 2327475 - DNA, 25 bp, Homo sapien
ttcaatcttcttggcccatcgtgtg

SEQ ID NO: 2327476 - DNA, 25 bp, Homo sapien
actttaaaacgatcaaaatctgtca

SEQ ID NO: 2327477 - DNA, 25 bp, Homo sapien
tattctgttcctcgttttctttgcc

SEQ ID NO: 2327478 - DNA, 25 bp, Homo sapien
gctgcccattttgtattgatgtctg

SEQ ID NO: 2327479 - DNA, 25 bp, Homo sapien
agaaagcataagtggcaatcataaa

SEQ ID NO: 2327480 - DNA, 25 bp, Homo sapien
ggcaagaaagcataagtggcaatca

SEQ ID NO: 2327481 - DNA, 25 bp, Homo sapien
aagaaagcataagtggcaatcataa

SEQ ID NO: 2327482 - DNA, 25 bp, Homo sapien
gcaagaaagcataagtggcaatcat

SEQ ID NO: 2327483 - DNA, 25 bp, Homo sapien
caagaaagcataagtggcaatcata

SEQ ID NO: 2327484 - DNA, 25 bp, Homo sapien
atgattgccacttatgctttcttgc

SEQ ID NO: 2327485 - DNA, 25 bp, Homo sapien
ttatgattgccacttatgctttctt

SEQ ID NO: 2327486 - DNA, 25 bp, Homo sapien
tgattgccacttatgctttcttgcc

SEQ ID NO: 2327487 - DNA, 25 bp, Homo sapien
tttatgattgccacttatgctttct

SEQ ID NO: 2327488 - DNA, 25 bp, Homo sapien
tatgattgccacttatgctttcttg

SEQ ID NO: 2327489 - DNA, 25 bp, Homo sapien
cagctgacaccccagccattgggga

SEQ ID NO: 2327490 - DNA, 25 bp, Homo sapien
ttgaaccaagagtgtcattttctct

SEQ ID NO: 2327491 - DNA, 25 bp, Homo sapien
cactttttgccctaaacccatattg

SEQ ID NO: 2327492 - DNA, 25 bp, Homo sapien
cagccattggggaacccactttttg

SEQ ID NO: 2327493 - DNA, 25 bp, Homo sapien
tgctctcggttcatggagaactgat

SEQ ID NO: 2327494 - DNA, 25 bp, Homo sapien
tcggttcatggagaactgatagctg

SEQ ID NO: 2327495 - DNA, 25 bp, Homo sapien
ttcatggagaactgatagctgtcct

SEQ ID NO: 2327496 - DNA, 25 bp, Homo sapien
cgctgctctcggttcatggagaact

SEQ ID NO: 2327497 - DNA, 25 bp, Homo sapien
caagagggacttggaaccatcgtta

SEQ ID NO: 2327498 - DNA, 25 bp, Homo sapien
tacacagtagtgggccaagagggac

SEQ ID NO: 2327499 - DNA, 25 bp, Homo sapien
cactggggtacacagtagtgggcca

SEQ ID NO: 2327500 - DNA, 25 bp, Homo sapien
gaaccatcgttaaatgtggcacatc

SEQ ID NO: 2327501 - DNA, 25 bp, Homo sapien
aatgcagtcgtgaccatacttccct

SEQ ID NO: 2327502 - DNA, 25 bp, Homo sapien
taatgcagtcgtgaccatacttccc

SEQ ID NO: 2327503 - DNA, 25 bp, Homo sapien
gcagtcgtgaccatacttcccttat

SEQ ID NO: 2327504 - DNA, 25 bp, Homo sapien
agctagcgttcctgctgcagcaaca

SEQ ID NO: 2327505 - DNA, 25 bp, Homo sapien
catgtcactgtgaacccctaaagct

SEQ ID NO: 2327506 - DNA, 25 bp, Homo sapien
tgtcactgtgaacccctaaagcttt

SEQ ID NO: 2327507 - DNA, 25 bp, Homo sapien
tacatgtcactgtgaacccctaaag

SEQ ID NO: 2327508 - DNA, 25 bp, Homo sapien
ttacatgtcactgtgaacccctaaa

SEQ ID NO: 2327509 - DNA, 25 bp, Homo sapien
cgacttctcgggtagaaagttggtg

SEQ ID NO: 2327510 - DNA, 25 bp, Homo sapien
ctcctttctcatgccggaggaaagc

SEQ ID NO: 2327511 - DNA, 25 bp, Homo sapien
gcctttgattgtgggtcccgaagaa

SEQ ID NO: 2327512 - DNA, 25 bp, Homo sapien
ttctcatgccggaggaaagcctttg

SEQ ID NO: 2327513 - DNA, 25 bp, Homo sapien
ccccaggcacagaaaattcgctcct

SEQ ID NO: 2327514 - DNA, 25 bp, Homo sapien
cccaggcacagaaaattcgctcctg

SEQ ID NO: 2327515 - DNA, 25 bp, Homo sapien
ccaggcacagaaaattcgctcctgc

SEQ ID NO: 2327516 - DNA, 25 bp, Homo sapien
tgagtggcatgcacgctgcctgacg

SEQ ID NO: 2327517 - DNA, 25 bp, Homo sapien
catgagtggcatgcacgctgcctga

SEQ ID NO: 2327518 - DNA, 25 bp, Homo sapien
gcccatgagtggcatgcacgctgcc

SEQ ID NO: 2327519 - DNA, 25 bp, Homo sapien
caggtgcccatgagtggcatgcacg

SEQ ID NO: 2327520 - DNA, 25 bp, Homo sapien
gaattgaaaacgaacagtatccaga

SEQ ID NO: 2327521 - DNA, 25 bp, Homo sapien
ggccaatggcccacgaagtagaact

SEQ ID NO: 2327522 - DNA, 25 bp, Homo sapien
tgccggactaaattaaagcgcattt

SEQ ID NO: 2327523 - DNA, 25 bp, Homo sapien
cacattttgccggactaaattaaag

SEQ ID NO: 2327524 - DNA, 25 bp, Homo sapien
tctctccaaagaaggaatactgagg

SEQ ID NO: 2327525 - DNA, 25 bp, Homo sapien
ctctccaaagaaggaatactgagga

SEQ ID NO: 2327526 - DNA, 25 bp, Homo sapien
tcctcttcaggggtcagctttctct

SEQ ID NO: 2327527 - DNA, 25 bp, Homo sapien
ctttttcagatgggcctcctcttca

SEQ ID NO: 2327528 - DNA, 25 bp, Homo sapien
ggcctcctcttcaggggtcagcttt

SEQ ID NO: 2327529 - DNA, 25 bp, Homo sapien
cctcctcttcaggggtcagctttct

SEQ ID NO: 2327530 - DNA, 25 bp, Homo sapien
tctgaatttcccaaagtgtttttgc

SEQ ID NO: 2327531 - DNA, 25 bp, Homo sapien
caagctccttctgaatttcccaaag

SEQ ID NO: 2327532 - DNA, 25 bp, Homo sapien
ctcaagctccttctgaatttcccaa

SEQ ID NO: 2327533 - DNA, 25 bp, Homo sapien
aagctccttctgaatttcccaaagt

SEQ ID NO: 2327534 - DNA, 25 bp, Homo sapien
ctgctatatcagcattaccaaaaac

SEQ ID NO: 2327535 - DNA, 25 bp, Homo sapien
aaagaatcagaatttctcaaacaca

SEQ ID NO: 2327536 - DNA, 25 bp, Homo sapien
ggtaagtactgctatatcagcatta

SEQ ID NO: 2327537 - DNA, 25 bp, Homo sapien
agaatcagaatttctcaaacacagt

SEQ ID NO: 2327538 - DNA, 25 bp, Homo sapien
caagagaaatacatgccccaagcag

SEQ ID NO: 2327539 - DNA, 25 bp, Homo sapien
ttgatgtaccaataggagcagagcc

SEQ ID NO: 2327540 - DNA, 25 bp, Homo sapien
gcgggccggagcacagtaagataat

SEQ ID NO: 2327541 - DNA, 25 bp, Homo sapien
tataaactttgtgagcctgccatag

SEQ ID NO: 2327542 - DNA, 25 bp, Homo sapien
ggacccacgggacaagccacaagtg

SEQ ID NO: 2327543 - DNA, 25 bp, Homo sapien
cgggacccacgggacaagccacaag

SEQ ID NO: 2327544 - DNA, 25 bp, Homo sapien
cacgggacccacgggacaagccaca

SEQ ID NO: 2327545 - DNA, 25 bp, Homo sapien
ttaatctgtgctgattctgacaagg

SEQ ID NO: 2327546 - DNA, 25 bp, Homo sapien
ttctgacaaggattttcactttact

SEQ ID NO: 2327547 - DNA, 25 bp, Homo sapien
ttcactttactaaatgaaacatttc

SEQ ID NO: 2327548 - DNA, 25 bp, Homo sapien
cactttactaaatgaaacatttcca

SEQ ID NO: 2327549 - DNA, 25 bp, Homo sapien
tggcagcaaatgttgtcttcgcatc

SEQ ID NO: 2327550 - DNA, 25 bp, Homo sapien
gccttgcctgcatgtagctactctg

SEQ ID NO: 2327551 - DNA, 25 bp, Homo sapien
ctttgttgacaatcccacttgtgga

SEQ ID NO: 2327552 - DNA, 25 bp, Homo sapien
tagcaaacggtaaactctttggcac

SEQ ID NO: 2327553 - DNA, 25 bp, Homo sapien
gcagaaagaataaaaggttctagta

SEQ ID NO: 2327554 - DNA, 25 bp, Homo sapien
tgagtactgtacttcaggggcgatg

SEQ ID NO: 2327555 - DNA, 25 bp, Homo sapien
tccacagtctgaagtagttttttac

SEQ ID NO: 2327556 - DNA, 25 bp, Homo sapien
caggggcgatgtagacgtccacagt

SEQ ID NO: 2327557 - DNA, 25 bp, Homo sapien
tcaaacatgttgaagcctaagaata

SEQ ID NO: 2327558 - DNA, 25 bp, Homo sapien
caaacatgttgaagcctaagaatac

SEQ ID NO: 2327559 - DNA, 25 bp, Homo sapien
aaatactgcctttttctagaagcat

SEQ ID NO: 2327560 - DNA, 25 bp, Homo sapien
caggtaaaatgtcagagcatttgca

SEQ ID NO: 2327561 - DNA, 25 bp, Homo sapien
taccatatattgagacccctttgtg

SEQ ID NO: 2327562 - DNA, 25 bp, Homo sapien
aatctccttgttgtcaaactagctg

SEQ ID NO: 2327563 - DNA, 25 bp, Homo sapien
catgtgtatggagaagtgttatttc

SEQ ID NO: 2327564 - DNA, 25 bp, Homo sapien
gtccacaactattgcagggtgttca

SEQ ID NO: 2327565 - DNA, 25 bp, Homo sapien
cacggcatgatgttcgtccacaact

SEQ ID NO: 2327566 - DNA, 25 bp, Homo sapien
gtgttatttctatctggggcccatc

SEQ ID NO: 2327567 - DNA, 25 bp, Homo sapien
agacctttatcctgtgctgtactct

SEQ ID NO: 2327568 - DNA, 25 bp, Homo sapien
tctgattcagacctttatcctgtgc

SEQ ID NO: 2327569 - DNA, 25 bp, Homo sapien
ctttatcctgtgctgtactctgtgc

SEQ ID NO: 2327570 - DNA, 25 bp, Homo sapien
tgtgctgtactctgtgctggaaatc

SEQ ID NO: 2327571 - DNA, 25 bp, Homo sapien
tgctgctacggtagctcccagccat

SEQ ID NO: 2327572 - DNA, 25 bp, Homo sapien
agtgctgctacggtagctcccagcc

SEQ ID NO: 2327573 - DNA, 25 bp, Homo sapien
cagtgctgctacggtagctcccagc

SEQ ID NO: 2327574 - DNA, 25 bp, Homo sapien
gtgctgctacggtagctcccagcca

SEQ ID NO: 2327575 - DNA, 25 bp, Homo sapien
tggcaaaaggtttatggctgccctt

SEQ ID NO: 2327576 - DNA, 25 bp, Homo sapien
ttgccggagctgactgctactttca

SEQ ID NO: 2327577 - DNA, 25 bp, Homo sapien
caaatacacagtttgtgatagaatg

SEQ ID NO: 2327578 - DNA, 25 bp, Homo sapien
tcatctgagctatgaccgtttgccg

SEQ ID NO: 2327579 - DNA, 25 bp, Homo sapien
tgtcgtggaagatgagagtatcctt

SEQ ID NO: 2327580 - DNA, 25 bp, Homo sapien
tggaagatgagagtatccttctggg

SEQ ID NO: 2327581 - DNA, 25 bp, Homo sapien
tcgtggaagatgagagtatccttct

SEQ ID NO: 2327582 - DNA, 25 bp, Homo sapien
gagagtatccttctggggtaagcag

SEQ ID NO: 2327583 - DNA, 25 bp, Homo sapien
tgtgagaacccggaagcgataactt

SEQ ID NO: 2327584 - DNA, 25 bp, Homo sapien
tttgaaattctcagcccttaggctc

SEQ ID NO: 2327585 - DNA, 25 bp, Homo sapien
tagagattataaacctagggactcc

SEQ ID NO: 2327586 - DNA, 25 bp, Homo sapien
ggctccttgtattgataggcctaaa

SEQ ID NO: 2327587 - DNA, 25 bp, Homo sapien
gtttgcgtcggcctacatgctggta

SEQ ID NO: 2327588 - DNA, 25 bp, Homo sapien
gcttacatcgtctgctgggcgcctt

SEQ ID NO: 2327589 - DNA, 25 bp, Homo sapien
caaactggagatcgccgtgctggcg

SEQ ID NO: 2327590 - DNA, 25 bp, Homo sapien
gtgaagtccatttcccgggccaaga

SEQ ID NO: 2327591 - DNA, 25 bp, Homo sapien
gatgcagaggacaaacaccgacgta

SEQ ID NO: 2327592 - DNA, 25 bp, Homo sapien
gaggaggaatctgcgagtctcccag

SEQ ID NO: 2327593 - DNA, 25 bp, Homo sapien
gacaaacaccgacgtagggagagga

SEQ ID NO: 2327594 - DNA, 25 bp, Homo sapien
gaggaatctgcgagtctcccagctc

SEQ ID NO: 2327595 - DNA, 25 bp, Homo sapien
aaaagatgtccccacgactcagtag

SEQ ID NO: 2327596 - DNA, 25 bp, Homo sapien
cctggatggccgctgtccggcagct

SEQ ID NO: 2327597 - DNA, 25 bp, Homo sapien
cgccatccccgctgtgggaatcagg

SEQ ID NO: 2327598 - DNA, 25 bp, Homo sapien
gactcagtagtaaccagacggtccc

SEQ ID NO: 2327599 - DNA, 25 bp, Homo sapien
gtggtgacggttcccttggctattc

SEQ ID NO: 2327600 - DNA, 25 bp, Homo sapien
tgtgtttccgtgtggtgacggttcc

SEQ ID NO: 2327601 - DNA, 25 bp, Homo sapien
tgacggttcccttggctattcccca

SEQ ID NO: 2327602 - DNA, 25 bp, Homo sapien
tccgtgtggtgacggttcccttggc

SEQ ID NO: 2327603 - DNA, 25 bp, Homo sapien
ctctcctccggttgtaaaaagcatc

SEQ ID NO: 2327604 - DNA, 25 bp, Homo sapien
tctcctccggttgtaaaaagcatca

SEQ ID NO: 2327605 - DNA, 25 bp, Homo sapien
cactctcctccggttgtaaaaagca

SEQ ID NO: 2327606 - DNA, 25 bp, Homo sapien
tcactctcctccggttgtaaaaagc

SEQ ID NO: 2327607 - DNA, 25 bp, Homo sapien
tcactggagcatactggagctgctg

SEQ ID NO: 2327608 - DNA, 25 bp, Homo sapien
gcccatgtccctagactctgccatg

SEQ ID NO: 2327609 - DNA, 25 bp, Homo sapien
ccctggcttaggctgcccatgtccc

SEQ ID NO: 2327610 - DNA, 25 bp, Homo sapien
ccatggagtaacctgaactgtcagt

SEQ ID NO: 2327611 - DNA, 25 bp, Homo sapien
caatcaactgttgataaactctgac

SEQ ID NO: 2327612 - DNA, 25 bp, Homo sapien
gacagatttaggtttggcaaatacc

SEQ ID NO: 2327613 - DNA, 25 bp, Homo sapien
aagtagcatcaccagcaatcaactg

SEQ ID NO: 2327614 - DNA, 25 bp, Homo sapien
agaagtagcatcaccagcaatcaac

SEQ ID NO: 2327615 - DNA, 25 bp, Homo sapien
tcaaaatagtctcttaactcatgcc

SEQ ID NO: 2327616 - DNA, 25 bp, Homo sapien
tagtctcttaactcatgccctttgg

SEQ ID NO: 2327617 - DNA, 25 bp, Homo sapien
tggcacatgtgacaaccccaaagac

SEQ ID NO: 2327618 - DNA, 25 bp, Homo sapien
taactcatgccctttggtatcttct

SEQ ID NO: 2327619 - DNA, 25 bp, Homo sapien
gcttctgaagtttccttccatcatg

SEQ ID NO: 2327620 - DNA, 25 bp, Homo sapien
gaagattgacagttgtaactgccaa

SEQ ID NO: 2327621 - DNA, 25 bp, Homo sapien
tgaagtttccttccatcatgggtcc

SEQ ID NO: 2327622 - DNA, 25 bp, Homo sapien
atagggaccagaacttctgcttctg

SEQ ID NO: 2327623 - DNA, 25 bp, Homo sapien
ctctcagcatactgtattctttgta

SEQ ID NO: 2327624 - DNA, 25 bp, Homo sapien
ttacgtcctttgaagacaggaatgg

SEQ ID NO: 2327625 - DNA, 25 bp, Homo sapien
tttacgtcctttgaagacaggaatg

SEQ ID NO: 2327626 - DNA, 25 bp, Homo sapien
gctctcagcatactgtattctttgt

SEQ ID NO: 2327627 - DNA, 25 bp, Homo sapien
aagcatgtcctccatgaagtcttcc

SEQ ID NO: 2327628 - DNA, 25 bp, Homo sapien
gcagctctgaagcatgtcctccatg

SEQ ID NO: 2327629 - DNA, 25 bp, Homo sapien
agctctgaagcatgtcctccatgaa

SEQ ID NO: 2327630 - DNA, 25 bp, Homo sapien
cttttgcagagcagctctgaagcat

SEQ ID NO: 2327631 - DNA, 25 bp, Homo sapien
catacgggactgctgtttgtggaaa

SEQ ID NO: 2327632 - DNA, 25 bp, Homo sapien
tttaattgttcctacccttgagctg

SEQ ID NO: 2327633 - DNA, 25 bp, Homo sapien
atggttaataagtgacatacgggac

SEQ ID NO: 2327634 - DNA, 25 bp, Homo sapien
tacccttgagctgactgattcctca

SEQ ID NO: 2327635 - DNA, 25 bp, Homo sapien
cagaaacggtcccttcagctacttc

SEQ ID NO: 2327636 - DNA, 25 bp, Homo sapien
ggcagaaacggtcccttcagctact

SEQ ID NO: 2327637 - DNA, 25 bp, Homo sapien
ctggcagaaacggtcccttcagcta

SEQ ID NO: 2327638 - DNA, 25 bp, Homo sapien
gaaacggtcccttcagctacttctc

SEQ ID NO: 2327639 - DNA, 25 bp, Homo sapien
gcaggcacaacaggagccttcaaat

SEQ ID NO: 2327640 - DNA, 25 bp, Homo sapien
tgctgtcactagcaggcacaacagg

SEQ ID NO: 2327641 - DNA, 25 bp, Homo sapien
cttgactgctgtcactagcaggcac

SEQ ID NO: 2327642 - DNA, 25 bp, Homo sapien
aggagccttcaaattggctcctgca

SEQ ID NO: 2327643 - DNA, 25 bp, Homo sapien
gatgacattgtggtatacttaggtg

SEQ ID NO: 2327644 - DNA, 25 bp, Homo sapien
gtgaggatgacattgtggtatactt

SEQ ID NO: 2327645 - DNA, 25 bp, Homo sapien
gacattgtggtatacttaggtgcta

SEQ ID NO: 2327646 - DNA, 25 bp, Homo sapien
gaggatgacattgtggtatacttag

SEQ ID NO: 2327647 - DNA, 25 bp, Homo sapien
gcacagggctaaactctatgaggcc

SEQ ID NO: 2327648 - DNA, 25 bp, Homo sapien
tctatgaggcctaacagaaggtggc

SEQ ID NO: 2327649 - DNA, 25 bp, Homo sapien
gcaggtctttgcccaagagtagggc

SEQ ID NO: 2327650 - DNA, 25 bp, Homo sapien
ggcctaacagaaggtggcctttgca

SEQ ID NO: 2327651 - DNA, 25 bp, Homo sapien
tccttagcaggatagcgatcagtga

SEQ ID NO: 2327652 - DNA, 25 bp, Homo sapien
aaatccttagcaggatagcgatcag

SEQ ID NO: 2327653 - DNA, 25 bp, Homo sapien
gatagcgatcagtgacccctaaaca

SEQ ID NO: 2327654 - DNA, 25 bp, Homo sapien
tagcaggatagcgatcagtgacccc

SEQ ID NO: 2327655 - DNA, 25 bp, Homo sapien
gcatggcctaagtctaacaggctct

SEQ ID NO: 2327656 - DNA, 25 bp, Homo sapien
gtgcagcatggcctaagtctaacag

SEQ ID NO: 2327657 - DNA, 25 bp, Homo sapien
actgttgactccttcttctcgtctc

SEQ ID NO: 2327658 - DNA, 25 bp, Homo sapien
cctaagtctaacaggctcttcagaa

SEQ ID NO: 2327659 - DNA, 25 bp, Homo sapien
caaatggatctgagagattttgccc

SEQ ID NO: 2327660 - DNA, 25 bp, Homo sapien
tggtttgatttcagctgcgcatgag

SEQ ID NO: 2327661 - DNA, 25 bp, Homo sapien
cacttgggccgaatcgaatacattt

SEQ ID NO: 2327662 - DNA, 25 bp, Homo sapien
tgcgcatgaggtacaggagcctgaa

SEQ ID NO: 2327663 - DNA, 25 bp, Homo sapien
tgtggatagagttcatgttatttgg

SEQ ID NO: 2327664 - DNA, 25 bp, Homo sapien
ctgtggatagagttcatgttatttg

SEQ ID NO: 2327665 - DNA, 25 bp, Homo sapien
gggagccagtggttcccgtagatag

SEQ ID NO: 2327666 - DNA, 25 bp, Homo sapien
gccagtggttcccgtagatagattt

SEQ ID NO: 2327667 - DNA, 25 bp, Homo sapien
ccagtggttcccgtagatagatttc

SEQ ID NO: 2327668 - DNA, 25 bp, Homo sapien
gagccagtggttcccgtagatagat

SEQ ID NO: 2327669 - DNA, 25 bp, Homo sapien
tcccataatctcctctatttgctta

SEQ ID NO: 2327670 - DNA, 25 bp, Homo sapien
attcccataatctcctctatttgct

SEQ ID NO: 2327671 - DNA, 25 bp, Homo sapien
cccataatctcctctatttgcttac

SEQ ID NO: 2327672 - DNA, 25 bp, Homo sapien
ttcccataatctcctctatttgctt

SEQ ID NO: 2327673 - DNA, 25 bp, Homo sapien
tcttccagacattgaatcaggccag

SEQ ID NO: 2327674 - DNA, 25 bp, Homo sapien
tcctgaaataactctcattcttact

SEQ ID NO: 2327675 - DNA, 25 bp, Homo sapien
aggaatcctgaaataactctcattc

SEQ ID NO: 2327676 - DNA, 25 bp, Homo sapien
aaagtagctattcttccagacattg

SEQ ID NO: 2327677 - DNA, 25 bp, Homo sapien
cattctatctgaaacggactggttt

SEQ ID NO: 2327678 - DNA, 25 bp, Homo sapien
tcagaacaaccaagccacataatat

SEQ ID NO: 2327679 - DNA, 25 bp, Homo sapien
ttctcacaataaacacacactgctg

SEQ ID NO: 2327680 - DNA, 25 bp, Homo sapien
tataaagggcttgtttaccactatg

SEQ ID NO: 2327681 - DNA, 25 bp, Homo sapien
tacacaactcttttttctgtgggac

SEQ ID NO: 2327682 - DNA, 25 bp, Homo sapien
ctgtgggacttttgggtaagacatc

SEQ ID NO: 2327683 - DNA, 25 bp, Homo sapien
gaggagttctcttacctgggtattg

SEQ ID NO: 2327684 - DNA, 25 bp, Homo sapien
taaattgtgtttagaatccctgtgt

SEQ ID NO: 2327685 - DNA, 25 bp, Homo sapien
ttcagacgaattttaaacgctgtgt

SEQ ID NO: 2327686 - DNA, 25 bp, Homo sapien
aggttcagacgaattttaaacgctg

SEQ ID NO: 2327687 - DNA, 25 bp, Homo sapien
atttctaaatgtaggttcagacgaa

SEQ ID NO: 2327688 - DNA, 25 bp, Homo sapien
tctaaatgtaggttcagacgaattt

SEQ ID NO: 2327689 - DNA, 25 bp, Homo sapien
gcaaaaatcagtaagtgagacattg

SEQ ID NO: 2327690 - DNA, 25 bp, Homo sapien
tgcaaatacctatggaacacaaata

SEQ ID NO: 2327691 - DNA, 25 bp, Homo sapien
agtaattaaaacatgctaggaaagc

SEQ ID NO: 2327692 - DNA, 25 bp, Homo sapien
taattaaagcccacattctctgaac

SEQ ID NO: 2327693 - DNA, 25 bp, Homo sapien
gagcttcgaaagcattgacaggaac

SEQ ID NO: 2327694 - DNA, 25 bp, Homo sapien
gcttcgaaagcattgacaggaacaa

SEQ ID NO: 2327695 - DNA, 25 bp, Homo sapien
tcagaagtgagcttcgaaagcattg

SEQ ID NO: 2327696 - DNA, 25 bp, Homo sapien
gaagtgagcttcgaaagcattgaca

SEQ ID NO: 2327697 - DNA, 25 bp, Homo sapien
caatgcccttccagagaatgatggc

SEQ ID NO: 2327698 - DNA, 25 bp, Homo sapien
gagaatgatggcttcaaggccattc

SEQ ID NO: 2327699 - DNA, 25 bp, Homo sapien
cttagtaccacttcttttgccaatg

SEQ ID NO: 2327700 - DNA, 25 bp, Homo sapien
tcttttgccaatgcccttccagaga

SEQ ID NO: 2327701 - DNA, 25 bp, Homo sapien
caacaaagtgagatattggcattct

SEQ ID NO: 2327702 - DNA, 25 bp, Homo sapien
gatattagctgctgcacatgacagg

SEQ ID NO: 2327703 - DNA, 25 bp, Homo sapien
gaggcctttgtttaggctcctaagc

SEQ ID NO: 2327704 - DNA, 25 bp, Homo sapien
caaaacaggttctacagtcacttca

SEQ ID NO: 2327705 - DNA, 25 bp, Homo sapien
catgggtagatttgttcttaccgta

SEQ ID NO: 2327706 - DNA, 25 bp, Homo sapien
agcatcactgctcttgaactttggg

SEQ ID NO: 2327707 - DNA, 25 bp, Homo sapien
tctttggcatatctcaactgccagc

SEQ ID NO: 2327708 - DNA, 25 bp, Homo sapien
actcatcatggactgtggccataac

SEQ ID NO: 2327709 - DNA, 25 bp, Homo sapien
tgggcttgcccttattttgtttctg

SEQ ID NO: 2327710 - DNA, 25 bp, Homo sapien
tgaagaatgcctttagtgtctcact

SEQ ID NO: 2327711 - DNA, 25 bp, Homo sapien
tctggattttctaggcaggttatca

SEQ ID NO: 2327712 - DNA, 25 bp, Homo sapien
tcttgtcgtgctagaacttccagaa

SEQ ID NO: 2327713 - DNA, 25 bp, Homo sapien
ctataaattaccctggcaatttttg

SEQ ID NO: 2327714 - DNA, 25 bp, Homo sapien
atctataaattaccctggcaatttt

SEQ ID NO: 2327715 - DNA, 25 bp, Homo sapien
aatctataaattaccctggcaattt

SEQ ID NO: 2327716 - DNA, 25 bp, Homo sapien
ttggaaaagcgcactgttagggtag

SEQ ID NO: 2327717 - DNA, 25 bp, Homo sapien
ggaaaagcgcactgttagggtagga

SEQ ID NO: 2327718 - DNA, 25 bp, Homo sapien
gttggaaaagcgcactgttagggta

SEQ ID NO: 2327719 - DNA, 25 bp, Homo sapien
aaaagcgcactgttagggtaggagt

SEQ ID NO: 2327720 - DNA, 25 bp, Homo sapien
atttgatcatccatcactgataccc

SEQ ID NO: 2327721 - DNA, 25 bp, Homo sapien
tgatcatccatcactgatacccttt

SEQ ID NO: 2327722 - DNA, 25 bp, Homo sapien
tttaacttctttgccatgggttcta

SEQ ID NO: 2327723 - DNA, 25 bp, Homo sapien
tgatcgaattggctactgaggcttg

SEQ ID NO: 2327724 - DNA, 25 bp, Homo sapien
tgttttaagcatgctcattagagta

SEQ ID NO: 2327725 - DNA, 25 bp, Homo sapien
cacttgaaacctagatattttgagt

SEQ ID NO: 2327726 - DNA, 25 bp, Homo sapien
tctggtatcactcaagcaaaggaag

SEQ ID NO: 2327727 - DNA, 25 bp, Homo sapien
ttcatctctgtattggaatccattt

SEQ ID NO: 2327728 - DNA, 25 bp, Homo sapien
ctgtagggccggagatttttgccat

SEQ ID NO: 2327729 - DNA, 25 bp, Homo sapien
ctggaaaacagctatcagggactca

SEQ ID NO: 2327730 - DNA, 25 bp, Homo sapien
tctttgtaaaggcagccagctcttt

SEQ ID NO: 2327731 - DNA, 25 bp, Homo sapien
gagagattgcagttgtaaccatcct

SEQ ID NO: 2327732 - DNA, 25 bp, Homo sapien
tatcagggactcaatgcaccgcgca

SEQ ID NO: 2327733 - DNA, 25 bp, Homo sapien
cagccagtttcttcatgcggtcaag

SEQ ID NO: 2327734 - DNA, 25 bp, Homo sapien
atcgctgctgacagccagtttcttc

SEQ ID NO: 2327735 - DNA, 25 bp, Homo sapien
gccagtttcttcatgcggtcaagga

SEQ ID NO: 2327736 - DNA, 25 bp, Homo sapien
ccatcgctgctgacagccagtttct

SEQ ID NO: 2327737 - DNA, 25 bp, Homo sapien
gcttttttgaggtatgacttacatg

SEQ ID NO: 2327738 - DNA, 25 bp, Homo sapien
tataaatctttgtcaccaaatcagc

SEQ ID NO: 2327739 - DNA, 25 bp, Homo sapien
gattttgaattgtcagaccctgtga

SEQ ID NO: 2327740 - DNA, 25 bp, Homo sapien
tactcttacgatggctgtgatatgc

SEQ ID NO: 2327741 - DNA, 25 bp, Homo sapien
gtgttctattgacacagtgctgctg

SEQ ID NO: 2327742 - DNA, 25 bp, Homo sapien
gcggcggttctccagcagaaccact

SEQ ID NO: 2327743 - DNA, 25 bp, Homo sapien
gcaggaactgcaggcgcggcggttc

SEQ ID NO: 2327744 - DNA, 25 bp, Homo sapien
gcagaaccactctcggcatcggtga

SEQ ID NO: 2327745 - DNA, 25 bp, Homo sapien
gtaattccctggcgcagctccggga

SEQ ID NO: 2327746 - DNA, 25 bp, Homo sapien
caggcgagtcaggtctctctggacc

SEQ ID NO: 2327747 - DNA, 25 bp, Homo sapien
tggacctcgcctgactcggctgggc

SEQ ID NO: 2327748 - DNA, 25 bp, Homo sapien
agtccgttgaggctgccaggcgagt

SEQ ID NO: 2327749 - DNA, 25 bp, Homo sapien
cctcgcctgactcggctgggctgtg

SEQ ID NO: 2327750 - DNA, 25 bp, Homo sapien
aaggtgaggactgcgcatgtgggct

SEQ ID NO: 2327751 - DNA, 25 bp, Homo sapien
tcgccgcaaggttatgggccgaagt

SEQ ID NO: 2327752 - DNA, 25 bp, Homo sapien
aagttcttcagacagtcgccgcaag

SEQ ID NO: 2327753 - DNA, 25 bp, Homo sapien
atgaaaccacgggaagttcttcaga

SEQ ID NO: 2327754 - DNA, 25 bp, Homo sapien
tcggcccgttccctctgcgttggca

SEQ ID NO: 2327755 - DNA, 25 bp, Homo sapien
tccctctgcgttggcaacgggcact

SEQ ID NO: 2327756 - DNA, 25 bp, Homo sapien
cgatcgtaggggagtagagacgttc

SEQ ID NO: 2327757 - DNA, 25 bp, Homo sapien
cgttccctctgcgttggcaacgggc

SEQ ID NO: 2327758 - DNA, 25 bp, Homo sapien
ctgaggaaccttattggaaaagcat

SEQ ID NO: 2327759 - DNA, 25 bp, Homo sapien
tgaggaaccttattggaaaagcatt

SEQ ID NO: 2327760 - DNA, 25 bp, Homo sapien
tctgaggaaccttattggaaaagca

SEQ ID NO: 2327761 - DNA, 25 bp, Homo sapien
ctagggctgatgacttctgaggaac

SEQ ID NO: 2327762 - DNA, 25 bp, Homo sapien
gctgaaagcgcttgagcacaccgct

SEQ ID NO: 2327763 - DNA, 25 bp, Homo sapien
gtgactgggagctaagcgctcccct

SEQ ID NO: 2327764 - DNA, 25 bp, Homo sapien
gccgctttggcctcttgtagggctg

SEQ ID NO: 2327765 - DNA, 25 bp, Homo sapien
gcatgtggcccgtgacagaggacat

SEQ ID NO: 2327766 - DNA, 25 bp, Homo sapien
tgcatttacatctaaacttgctgta

SEQ ID NO: 2327767 - DNA, 25 bp, Homo sapien
catctaaacttgctgtatgcttcac

SEQ ID NO: 2327768 - DNA, 25 bp, Homo sapien
agatgcatttacatctaaacttgct

SEQ ID NO: 2327769 - DNA, 25 bp, Homo sapien
tttacatctaaacttgctgtatgct

SEQ ID NO: 2327770 - DNA, 25 bp, Homo sapien
gtcacctagcaaaggccctgtgtag

SEQ ID NO: 2327771 - DNA, 25 bp, Homo sapien
cttcctgatgagtcgtcacctagca

SEQ ID NO: 2327772 - DNA, 25 bp, Homo sapien
caaagaggtgttaggatatttatcc

SEQ ID NO: 2327773 - DNA, 25 bp, Homo sapien
tgagtcgtcacctagcaaaggccct

SEQ ID NO: 2327774 - DNA, 25 bp, Homo sapien
catcggttgttggatcagtgcaatt

SEQ ID NO: 2327775 - DNA, 25 bp, Homo sapien
tagactatgttacaggaggaagacc

SEQ ID NO: 2327776 - DNA, 25 bp, Homo sapien
tcctgtggtcaggtttcatagctcc

SEQ ID NO: 2327777 - DNA, 25 bp, Homo sapien
caatataccaatttacctagaggct

SEQ ID NO: 2327778 - DNA, 25 bp, Homo sapien
tcgtgatggcccacactgttcagtg

SEQ ID NO: 2327779 - DNA, 25 bp, Homo sapien
gccgtgggattccttcctcctagac

SEQ ID NO: 2327780 - DNA, 25 bp, Homo sapien
gtgtgccaaatacaccatgtgctgg

SEQ ID NO: 2327781 - DNA, 25 bp, Homo sapien
actccagctgcgtggcaacctgttc

SEQ ID NO: 2327782 - DNA, 25 bp, Homo sapien
tggaaaaaatgaagccgtgttttga

SEQ ID NO: 2327783 - DNA, 25 bp, Homo sapien
aatacctagtctcactgaaaggctg

SEQ ID NO: 2327784 - DNA, 25 bp, Homo sapien
tgaagccgtgttttgaataggcacc

SEQ ID NO: 2327785 - DNA, 25 bp, Homo sapien
gcaccataagttttgcatgctctat

SEQ ID NO: 2327786 - DNA, 25 bp, Homo sapien
ctcattctccgtatcagtgtctgtg

SEQ ID NO: 2327787 - DNA, 25 bp, Homo sapien
tgtgattaggaacttataagtctcc

SEQ ID NO: 2327788 - DNA, 25 bp, Homo sapien
tgcctcccttccatacaacaaaggt

SEQ ID NO: 2327789 - DNA, 25 bp, Homo sapien
ttaagcttgtttgccccagattcct

SEQ ID NO: 2327790 - DNA, 25 bp, Homo sapien
agagtgatggcatcaaggccattca

SEQ ID NO: 2327791 - DNA, 25 bp, Homo sapien
agagagtgatggcatcaaggccatt

SEQ ID NO: 2327792 - DNA, 25 bp, Homo sapien
ttgccaatgcccttccagagagtga

SEQ ID NO: 2327793 - DNA, 25 bp, Homo sapien
tcttttgccaatgcccttccagaga

SEQ ID NO: 2327794 - DNA, 25 bp, Homo sapien
tttttctggcagtgatgacctcccc

SEQ ID NO: 2327795 - DNA, 25 bp, Homo sapien
gagagcatgcctcttgggaaggctc

SEQ ID NO: 2327796 - DNA, 25 bp, Homo sapien
tagtagttttgtgggtcgtctgctc

SEQ ID NO: 2327797 - DNA, 25 bp, Homo sapien
gcccaggatgccataagatcagcat

SEQ ID NO: 2327798 - DNA, 25 bp, Homo sapien
ccgtagcctttgttattcacctcct

SEQ ID NO: 2327799 - DNA, 25 bp, Homo sapien
tcaccttggtttgccgtggtgccat

SEQ ID NO: 2327800 - DNA, 25 bp, Homo sapien
tcactttgcatgaacgcttgtctcc

SEQ ID NO: 2327801 - DNA, 25 bp, Homo sapien
aatatctcttcccccgtagcctttg

SEQ ID NO: 2327802 - DNA, 25 bp, Homo sapien
gctgcttccagacgccgggctgagt

SEQ ID NO: 2327803 - DNA, 25 bp, Homo sapien
gctgagtgggaacctctctgacctc

SEQ ID NO: 2327804 - DNA, 25 bp, Homo sapien
tgacctctgccgtgtactcattgca

SEQ ID NO: 2327805 - DNA, 25 bp, Homo sapien
tactcattgcacctttcaaccctgg

SEQ ID NO: 2327806 - DNA, 25 bp, Homo sapien
gtcaggcatccaccgccatggagcg

SEQ ID NO: 2327807 - DNA, 25 bp, Homo sapien
tggagcgggcggaaagagaatccgc

SEQ ID NO: 2327808 - DNA, 25 bp, Homo sapien
cagtcaggcatccaccgccatggag

SEQ ID NO: 2327809 - DNA, 25 bp, Homo sapien
agagaatccgcgacaccggcggcgt

SEQ ID NO: 2327810 - DNA, 25 bp, Homo sapien
gataagaaacgagcagagccgcttc

SEQ ID NO: 2327811 - DNA, 25 bp, Homo sapien
gaaacgagcagagccgcttccgcgt

SEQ ID NO: 2327812 - DNA, 25 bp, Homo sapien
taggcagcgtagagggagaataggc

SEQ ID NO: 2327813 - DNA, 25 bp, Homo sapien
gcagtacagggcgataagaaacgag

SEQ ID NO: 2327814 - DNA, 25 bp, Homo sapien
ctcggccgcgtctctcccgcgcggg

SEQ ID NO: 2327815 - DNA, 25 bp, Homo sapien
ggccgcgtctctcccgcgcgggggc

SEQ ID NO: 2327816 - DNA, 25 bp, Homo sapien
tcggccgcgtctctcccgcgcgggg

SEQ ID NO: 2327817 - DNA, 25 bp, Homo sapien
ccgcgtctctcccgcgcgggggccg

SEQ ID NO: 2327818 - DNA, 25 bp, Homo sapien
cgggtaatcccggacttgagagccg

SEQ ID NO: 2327819 - DNA, 25 bp, Homo sapien
cctgcgggtaatcccggacttgaga

SEQ ID NO: 2327820 - DNA, 25 bp, Homo sapien
ggggcaaagcgcttctcaggccctg

SEQ ID NO: 2327821 - DNA, 25 bp, Homo sapien
caggccctgcgggtaatcccggact

SEQ ID NO: 2327822 - DNA, 25 bp, Homo sapien
taacacgtgtttgaaaggcgtgcgc

SEQ ID NO: 2327823 - DNA, 25 bp, Homo sapien
gcggcgattttgaggccttccagga

SEQ ID NO: 2327824 - DNA, 25 bp, Homo sapien
gagacgacgtcttggattttaacac

SEQ ID NO: 2327825 - DNA, 25 bp, Homo sapien
tctccaattccgagccaagggctgg

SEQ ID NO: 2327826 - DNA, 25 bp, Homo sapien
gacttcagagtgtagtgttcaccag

SEQ ID NO: 2327827 - DNA, 25 bp, Homo sapien
gaaataaaatgctaccttgagacag

SEQ ID NO: 2327828 - DNA, 25 bp, Homo sapien
gaaagccgagtctgatcttaacaca

SEQ ID NO: 2327829 - DNA, 25 bp, Homo sapien
gccttatggtcactgcaggattaga

SEQ ID NO: 2327830 - DNA, 25 bp, Homo sapien
tcgtggatttatctaatatttgaag

SEQ ID NO: 2327831 - DNA, 25 bp, Homo sapien
tatttgaaggctagttttaaatctg

SEQ ID NO: 2327832 - DNA, 25 bp, Homo sapien
tttaaatctgtgttgttgctcattt

SEQ ID NO: 2327833 - DNA, 25 bp, Homo sapien
tttcatctccttcccaaggattcca

SEQ ID NO: 2327834 - DNA, 25 bp, Homo sapien
tcccatctaatggagtgaatcctgt

SEQ ID NO: 2327835 - DNA, 25 bp, Homo sapien
acacagagggcccacaaggttcttc

SEQ ID NO: 2327836 - DNA, 25 bp, Homo sapien
aatgttttatgagcagaaacgctgc

SEQ ID NO: 2327837 - DNA, 25 bp, Homo sapien
tgaatcctgtgacatacacagaggg

SEQ ID NO: 2327838 - DNA, 25 bp, Homo sapien
agagcagtgttactcaatgaggcac

SEQ ID NO: 2327839 - DNA, 25 bp, Homo sapien
tcaatgaggcactatggagaccata

SEQ ID NO: 2327840 - DNA, 25 bp, Homo sapien
ggagaccatacaccacctctgggca

SEQ ID NO: 2327841 - DNA, 25 bp, Homo sapien
tggagaccatacaccacctctgggc

SEQ ID NO: 2327842 - DNA, 25 bp, Homo sapien
ccttcaaaaatatgctcccagagat

SEQ ID NO: 2327843 - DNA, 25 bp, Homo sapien
gctgggatcaagtaagccttcaaaa

SEQ ID NO: 2327844 - DNA, 25 bp, Homo sapien
tactgtgttcttcctacgattgact

SEQ ID NO: 2327845 - DNA, 25 bp, Homo sapien
tccattgagcagtcacatcgctggg

SEQ ID NO: 2327846 - DNA, 25 bp, Homo sapien
caatttcataaggtccaagtaagct

SEQ ID NO: 2327847 - DNA, 25 bp, Homo sapien
gccaaaaaggagtattctgtaatat

SEQ ID NO: 2327848 - DNA, 25 bp, Homo sapien
catcaaaggttaatgttgcacaact

SEQ ID NO: 2327849 - DNA, 25 bp, Homo sapien
aagatgtggagtatgaacttttcta

SEQ ID NO: 2327850 - DNA, 25 bp, Homo sapien
ttttgtgaaggaagagtcaactgat

SEQ ID NO: 2327851 - DNA, 25 bp, Homo sapien
gagtcaactgatgtggcaaacttca

SEQ ID NO: 2327852 - DNA, 25 bp, Homo sapien
ttgtgaaggaagagtcaactgatgt

SEQ ID NO: 2327853 - DNA, 25 bp, Homo sapien
ggaagagtcaactgatgtggcaaac

SEQ ID NO: 2327854 - DNA, 25 bp, Homo sapien
ctcatacctgctaacaaaatatcta

SEQ ID NO: 2327855 - DNA, 25 bp, Homo sapien
cctcatacctgctaacaaaatatct

SEQ ID NO: 2327856 - DNA, 25 bp, Homo sapien
tcatacctgctaacaaaatatctat

SEQ ID NO: 2327857 - DNA, 25 bp, Homo sapien
tgctgccacgcacaaagtttttctg

SEQ ID NO: 2327858 - DNA, 25 bp, Homo sapien
tttgtgctgccacgcacaaagtttt

SEQ ID NO: 2327859 - DNA, 25 bp, Homo sapien
tgtgctgccacgcacaaagtttttc

SEQ ID NO: 2327860 - DNA, 25 bp, Homo sapien
ggtttgtgctgccacgcacaaagtt

SEQ ID NO: 2327861 - DNA, 25 bp, Homo sapien
aacacagaaatagcccaacttttat

SEQ ID NO: 2327862 - DNA, 25 bp, Homo sapien
tctggatgaaaggtgtaatggattt

SEQ ID NO: 2327863 - DNA, 25 bp, Homo sapien
cctctcattaaggaaaggtgttata

SEQ ID NO: 2327864 - DNA, 25 bp, Homo sapien
gaagacacagcctataaattcacct

SEQ ID NO: 2327865 - DNA, 25 bp, Homo sapien
tataattgaatagcatggaactctg

SEQ ID NO: 2327866 - DNA, 25 bp, Homo sapien
taaaaatttgaatgggaggatccac

SEQ ID NO: 2327867 - DNA, 25 bp, Homo sapien
tcaacccttttatggtgtgagctgc

SEQ ID NO: 2327868 - DNA, 25 bp, Homo sapien
aaaagcaaggattaggacactcaca

SEQ ID NO: 2327869 - DNA, 25 bp, Homo sapien
gttgctactcctaaaggccactgaa

SEQ ID NO: 2327870 - DNA, 25 bp, Homo sapien
catttccgagcaaaacaacagcaag

SEQ ID NO: 2327871 - DNA, 25 bp, Homo sapien
tcacatcaacggagaagtaccctgg

SEQ ID NO: 2327872 - DNA, 25 bp, Homo sapien
tgtgcataaagtaaccactgggtgg

SEQ ID NO: 2327873 - DNA, 25 bp, Homo sapien
tggaggctgtcctatacattgtggg

SEQ ID NO: 2327874 - DNA, 25 bp, Homo sapien
tatactggcctagtgcaacaacatc

SEQ ID NO: 2327875 - DNA, 25 bp, Homo sapien
cagttggacaggaggaataagcttt

SEQ ID NO: 2327876 - DNA, 25 bp, Homo sapien
tgccaaatgcctcccggtgggcaaa

SEQ ID NO: 2327877 - DNA, 25 bp, Homo sapien
gaattttcataaatcgttcctaaga

SEQ ID NO: 2327878 - DNA, 25 bp, Homo sapien
tagtgcctgtctggatgaattttca

SEQ ID NO: 2327879 - DNA, 25 bp, Homo sapien
gttctcttgctgaaacccaacaaag

SEQ ID NO: 2327880 - DNA, 25 bp, Homo sapien
gcctctcatcatgcagcattgacca

SEQ ID NO: 2327881 - DNA, 25 bp, Homo sapien
gtcacacgggactctatcatgcagg

SEQ ID NO: 2327882 - DNA, 25 bp, Homo sapien
tcagtaaagaaagatagacgcggct

SEQ ID NO: 2327883 - DNA, 25 bp, Homo sapien
gatgagggactgtcttactgcggca

SEQ ID NO: 2327884 - DNA, 25 bp, Homo sapien
caagcatttaagtgccaggagggca

SEQ ID NO: 2327885 - DNA, 25 bp, Homo sapien
attctgtgtttactccgaccgggca

SEQ ID NO: 2327886 - DNA, 25 bp, Homo sapien
ggagcaagcctcatagattcgatag

SEQ ID NO: 2327887 - DNA, 25 bp, Homo sapien
cacccatggacttgagtaactgcag

SEQ ID NO: 2327888 - DNA, 25 bp, Homo sapien
tgataaagataaagggagcacccat

SEQ ID NO: 2327889 - DNA, 25 bp, Homo sapien
aagctctgtcttgaagtgctgatac

SEQ ID NO: 2327890 - DNA, 25 bp, Homo sapien
ttttaagctctgtcttgaagtgctg

SEQ ID NO: 2327891 - DNA, 25 bp, Homo sapien
ttcattttaagctctgtcttgaagt

SEQ ID NO: 2327892 - DNA, 25 bp, Homo sapien
atgagctttctaaaatattagtaaa

SEQ ID NO: 2327893 - DNA, 25 bp, Homo sapien
tgtacttttacttgactggcagtgc

SEQ ID NO: 2327894 - DNA, 25 bp, Homo sapien
cacgtgagtgatgtattgcaataca

SEQ ID NO: 2327895 - DNA, 25 bp, Homo sapien
tgcaatacatatgtcatcactaggc

SEQ ID NO: 2327896 - DNA, 25 bp, Homo sapien
tcaagggtaccttaaagaacatcta

SEQ ID NO: 2327897 - DNA, 25 bp, Homo sapien
tcagtccggacagcgggaaggcctc

SEQ ID NO: 2327898 - DNA, 25 bp, Homo sapien
cgaaggtggaggtgtcagtccggac

SEQ ID NO: 2327899 - DNA, 25 bp, Homo sapien
cagaatggtgttgatccgctgccgc

SEQ ID NO: 2327900 - DNA, 25 bp, Homo sapien
gcgagtcggcctcggctgcttcacg

SEQ ID NO: 2327901 - DNA, 25 bp, Homo sapien
gcgcaagcgcagagggacaaaaatc

SEQ ID NO: 2327902 - DNA, 25 bp, Homo sapien
gggcaagcgcaagcgcaagcgcaga

SEQ ID NO: 2327903 - DNA, 25 bp, Homo sapien
ggtgagcgggggcaagcgcaagcgc

SEQ ID NO: 2327904 - DNA, 25 bp, Homo sapien
aagcgcaagcgcaagcgcagaggga

SEQ ID NO: 2327905 - DNA, 25 bp, Homo sapien
tccgtgagaggaggagagcgaatgc

SEQ ID NO: 2327906 - DNA, 25 bp, Homo sapien
tttccgtgagaggaggagagcgaat

SEQ ID NO: 2327907 - DNA, 25 bp, Homo sapien
ctttccgtgagaggaggagagcgaa

SEQ ID NO: 2327908 - DNA, 25 bp, Homo sapien
cgtgagaggaggagagcgaatgctg

SEQ ID NO: 2327909 - DNA, 25 bp, Homo sapien
cggcactgctgctcgcagggccaca

SEQ ID NO: 2327910 - DNA, 25 bp, Homo sapien
gctgctcgcagggccacaggccgcg

SEQ ID NO: 2327911 - DNA, 25 bp, Homo sapien
ctcggcactgctgctcgcagggcca

SEQ ID NO: 2327912 - DNA, 25 bp, Homo sapien
tgctcgcagggccacaggccgcgac

SEQ ID NO: 2327913 - DNA, 25 bp, Homo sapien
gtcccccacgtacagcgaggacgta

SEQ ID NO: 2327914 - DNA, 25 bp, Homo sapien
tcccccacgtacagcgaggacgtag

SEQ ID NO: 2327915 - DNA, 25 bp, Homo sapien
ccccacgtacagcgaggacgtagct

SEQ ID NO: 2327916 - DNA, 25 bp, Homo sapien
ccacgtacagcgaggacgtagctgg

SEQ ID NO: 2327917 - DNA, 25 bp, Homo sapien
gtccgcgggctactggaagttcaca

SEQ ID NO: 2327918 - DNA, 25 bp, Homo sapien
gcatgctccgcgtccgcgggctact

SEQ ID NO: 2327919 - DNA, 25 bp, Homo sapien
aaaattcatagtgttcacagcatgc

SEQ ID NO: 2327920 - DNA, 25 bp, Homo sapien
tcaaaattcatagtgttcacagcat

SEQ ID NO: 2327921 - DNA, 25 bp, Homo sapien
atcacagcccaccttacatgaaagg

SEQ ID NO: 2327922 - DNA, 25 bp, Homo sapien
actacacgatgcgtactggcttgcc

SEQ ID NO: 2327923 - DNA, 25 bp, Homo sapien
gatggatcacgctgagactacacga

SEQ ID NO: 2327924 - DNA, 25 bp, Homo sapien
agatccatagcccttggaatcattt

SEQ ID NO: 2327925 - DNA, 25 bp, Homo sapien
actctttcacgtagctccaagttca

SEQ ID NO: 2327926 - DNA, 25 bp, Homo sapien
tgaactctttcacgtagctccaagt

SEQ ID NO: 2327927 - DNA, 25 bp, Homo sapien
ggtgaactctttcacgtagctccaa

SEQ ID NO: 2327928 - DNA, 25 bp, Homo sapien
tggtgaactctttcacgtagctcca

SEQ ID NO: 2327929 - DNA, 25 bp, Homo sapien
tttaaggcaggcccaaacttgccaa

SEQ ID NO: 2327930 - DNA, 25 bp, Homo sapien
tttctgtgcatcttcaagcctttca

SEQ ID NO: 2327931 - DNA, 25 bp, Homo sapien
cattgagctcctttcatttcatcca

SEQ ID NO: 2327932 - DNA, 25 bp, Homo sapien
caaagagattcttaaggcgctcatc

SEQ ID NO: 2327933 - DNA, 25 bp, Homo sapien
cttgcctcacctgttcaaatttgcg

SEQ ID NO: 2327934 - DNA, 25 bp, Homo sapien
gacgttaattattaatgccatcatc

SEQ ID NO: 2327935 - DNA, 25 bp, Homo sapien
ttccggagacgttaattattaatgc

SEQ ID NO: 2327936 - DNA, 25 bp, Homo sapien
ccggagacgttaattattaatgcca

SEQ ID NO: 2327937 - DNA, 25 bp, Homo sapien
tggtgattgtaccaaatggagaaaa

SEQ ID NO: 2327938 - DNA, 25 bp, Homo sapien
gtgattgtaccaaatggagaaaact

SEQ ID NO: 2327939 - DNA, 25 bp, Homo sapien
ggtgattgtaccaaatggagaaaac

SEQ ID NO: 2327940 - DNA, 25 bp, Homo sapien
ctggtgattgtaccaaatggagaaa

SEQ ID NO: 2327941 - DNA, 25 bp, Homo sapien
tggtgaggagaaacatacaaaacca

SEQ ID NO: 2327942 - DNA, 25 bp, Homo sapien
ctggtgaggagaaacatacaaaacc

SEQ ID NO: 2327943 - DNA, 25 bp, Homo sapien
tacaaaaccaaaccctttgcagcga

SEQ ID NO: 2327944 - DNA, 25 bp, Homo sapien
ctttgcagcgaccaccctccatcat

SEQ ID NO: 2327945 - DNA, 25 bp, Homo sapien
agcaacatacaatggctttgtggcc

SEQ ID NO: 2327946 - DNA, 25 bp, Homo sapien
ttgcatatactggttagtgaggtga

SEQ ID NO: 2327947 - DNA, 25 bp, Homo sapien
tggtaggggttgatttcaagattgg

SEQ ID NO: 2327948 - DNA, 25 bp, Homo sapien
gatttcaagattgggcacagctcgt

SEQ ID NO: 2327949 - DNA, 25 bp, Homo sapien
ggaggatagtatgcagcaccgttct

SEQ ID NO: 2327950 - DNA, 25 bp, Homo sapien
caccgttctgagtctgtgggatagc

SEQ ID NO: 2327951 - DNA, 25 bp, Homo sapien
cgaggacttggtcttagttgagcaa

SEQ ID NO: 2327952 - DNA, 25 bp, Homo sapien
tgagcaatttggctaggaggatagt

SEQ ID NO: 2327953 - DNA, 25 bp, Homo sapien
agctggtctcatagtactaaatggt

SEQ ID NO: 2327954 - DNA, 25 bp, Homo sapien
aagctggtctcatagtactaaatgg

SEQ ID NO: 2327955 - DNA, 25 bp, Homo sapien
catagttataatgtggagtggcagc

SEQ ID NO: 2327956 - DNA, 25 bp, Homo sapien
cccgcagcatagttataatgtggag

SEQ ID NO: 2327957 - DNA, 25 bp, Homo sapien
cagcatagttataatgtggagtggc

SEQ ID NO: 2327958 - DNA, 25 bp, Homo sapien
agcatgggcagataccaacatggaa

SEQ ID NO: 2327959 - DNA, 25 bp, Homo sapien
catttaaggaattgttattaaagca

SEQ ID NO: 2327960 - DNA, 25 bp, Homo sapien
aatatttacatttttcgatgtttag

SEQ ID NO: 2327961 - DNA, 25 bp, Homo sapien
cattttctcggtacataaggttcaa

SEQ ID NO: 2327962 - DNA, 25 bp, Homo sapien
agtttcttttcatggtacctgatca

SEQ ID NO: 2327963 - DNA, 25 bp, Homo sapien
agtgtgcgagacaactgcttactcc

SEQ ID NO: 2327964 - DNA, 25 bp, Homo sapien
tctttcggacatagactgcacttgc

SEQ ID NO: 2327965 - DNA, 25 bp, Homo sapien
ctgggtgttctgctcaatggctgta

SEQ ID NO: 2327966 - DNA, 25 bp, Homo sapien
tgcacttgcaccatgagagtcatcc

SEQ ID NO: 2327967 - DNA, 25 bp, Homo sapien
caaaatgagacatatgtggtggctc

SEQ ID NO: 2327968 - DNA, 25 bp, Homo sapien
aaattttgtaacgtctcatttactg

SEQ ID NO: 2327969 - DNA, 25 bp, Homo sapien
aacaaaatgagacatatgtggtggc

SEQ ID NO: 2327970 - DNA, 25 bp, Homo sapien
cgtctcatttactgttctaaaagag

SEQ ID NO: 2327971 - DNA, 25 bp, Homo sapien
gagggcaggcgctgggaacgcgccc

SEQ ID NO: 2327972 - DNA, 25 bp, Homo sapien
aacgcgcccagctcgggcgccacaa

SEQ ID NO: 2327973 - DNA, 25 bp, Homo sapien
aggcgctgggaacgcgcccagctcg

SEQ ID NO: 2327974 - DNA, 25 bp, Homo sapien
tgttcgagacccgcaccgggcgccc

SEQ ID NO: 2327975 - DNA, 25 bp, Homo sapien
gggctcgcgccggcgctccgcacca

SEQ ID NO: 2327976 - DNA, 25 bp, Homo sapien
ggctcgcgccggcgctccgcaccat

SEQ ID NO: 2327977 - DNA, 25 bp, Homo sapien
gcggggctcgcgccggcgctccgca

SEQ ID NO: 2327978 - DNA, 25 bp, Homo sapien
gggcgcggggctcgcgccggcgctc

SEQ ID NO: 2327979 - DNA, 25 bp, Homo sapien
aattgagctccgtcggtaatcccag

SEQ ID NO: 2327980 - DNA, 25 bp, Homo sapien
cagctgttccgggtttgctttcaat

SEQ ID NO: 2327981 - DNA, 25 bp, Homo sapien
tgttcagtggtcacaacccgttctc

SEQ ID NO: 2327982 - DNA, 25 bp, Homo sapien
cgctggcaccatactctcgaaattg

SEQ ID NO: 2327983 - DNA, 25 bp, Homo sapien
ttgactttcatactcggctatgatc

SEQ ID NO: 2327984 - DNA, 25 bp, Homo sapien
tcttgaatcggctcggggtggacat

SEQ ID NO: 2327985 - DNA, 25 bp, Homo sapien
gactttcatactcggctatgatctc

SEQ ID NO: 2327986 - DNA, 25 bp, Homo sapien
tttgtccttcttgaatcggctcggg

SEQ ID NO: 2327987 - DNA, 25 bp, Homo sapien
ttagatacgcaactccacgagcaca

SEQ ID NO: 2327988 - DNA, 25 bp, Homo sapien
aggagcaaggcagccgctcccatcc

SEQ ID NO: 2327989 - DNA, 25 bp, Homo sapien
ccacgagcacaatgacaagaaggca

SEQ ID NO: 2327990 - DNA, 25 bp, Homo sapien
gcacaatgacaagaaggcacacaaa

SEQ ID NO: 2327991 - DNA, 25 bp, Homo sapien
cactgtaaaggccttgttgcagtag

SEQ ID NO: 2327992 - DNA, 25 bp, Homo sapien
gcagtagcgcaatcagcttcaccaa

SEQ ID NO: 2327993 - DNA, 25 bp, Homo sapien
gcttcaccaaaacatcaggcaaatc

SEQ ID NO: 2327994 - DNA, 25 bp, Homo sapien
caccaaaacatcaggcaaatcatat

SEQ ID NO: 2327995 - DNA, 25 bp, Homo sapien
aatccactgactgaactacagtttt

SEQ ID NO: 2327996 - DNA, 25 bp, Homo sapien
ttttcacccacaggtaagtcaaatc

SEQ ID NO: 2327997 - DNA, 25 bp, Homo sapien
gatgtcataagaatctttttcaccc

SEQ ID NO: 2327998 - DNA, 25 bp, Homo sapien
ctatgagattaaggcagtgacttta

SEQ ID NO: 2327999 - DNA, 25 bp, Homo sapien
taagaactgctggaatgtttgtaaa

SEQ ID NO: 2328000 - DNA, 25 bp, Homo sapien
gtaaatgctcgtcttgtgccaagtt

SEQ ID NO: 2328001 - DNA, 25 bp, Homo sapien
ctttaagaactgctggaatgtttgt

SEQ ID NO: 2328002 - DNA, 25 bp, Homo sapien
tgtttgtaaatgctcgtcttgtgcc

SEQ ID NO: 2328003 - DNA, 25 bp, Homo sapien
tgggggtgttttagaagggtgctgc

SEQ ID NO: 2328004 - DNA, 25 bp, Homo sapien
aatgcatataaagaggcagctccac

SEQ ID NO: 2328005 - DNA, 25 bp, Homo sapien
tttggaaactagcaaagccatgtgg

SEQ ID NO: 2328006 - DNA, 25 bp, Homo sapien
gtaacaaggagctgacacagtgatt

SEQ ID NO: 2328007 - DNA, 25 bp, Homo sapien
tcttattatccctaggaacagggca

SEQ ID NO: 2328008 - DNA, 25 bp, Homo sapien
tgtcctaagagctggcggtaactgt

SEQ ID NO: 2328009 - DNA, 25 bp, Homo sapien
tgaaatgtgctagcgaagccctacg

SEQ ID NO: 2328010 - DNA, 25 bp, Homo sapien
caggtgtggcatgaaaaggcgcttt

SEQ ID NO: 2328011 - DNA, 25 bp, Homo sapien
cattaatcctcaagggctcatcagg

SEQ ID NO: 2328012 - DNA, 25 bp, Homo sapien
tcccatataactattgttaaatcaa

SEQ ID NO: 2328013 - DNA, 25 bp, Homo sapien
tgtagttcccatataactattgtta

SEQ ID NO: 2328014 - DNA, 25 bp, Homo sapien
tcacgtacgttgtagttcccatata

SEQ ID NO: 2328015 - DNA, 25 bp, Homo sapien
cgtacgttgtagttcccatataact

SEQ ID NO: 2328016 - DNA, 25 bp, Homo sapien
ttgagagttcactataaggccaggc

SEQ ID NO: 2328017 - DNA, 25 bp, Homo sapien
cagtaaaagctcatatttgagagtt

SEQ ID NO: 2328018 - DNA, 25 bp, Homo sapien
ttgtaatatattccggtatatactg

SEQ ID NO: 2328019 - DNA, 25 bp, Homo sapien
caattaattacaattagagtgagtt

SEQ ID NO: 2328020 - DNA, 25 bp, Homo sapien
tgagaagactgatccctagaaaagc

SEQ ID NO: 2328021 - DNA, 25 bp, Homo sapien
tcaattctcagcaacccaacaaggt

SEQ ID NO: 2328022 - DNA, 25 bp, Homo sapien
tgcacacgcacacgaatagaggaat

SEQ ID NO: 2328023 - DNA, 25 bp, Homo sapien
gactatccaactgtaaagccaggac

SEQ ID NO: 2328024 - DNA, 25 bp, Homo sapien
caccatagatagtctgagaggcaca

SEQ ID NO: 2328025 - DNA, 25 bp, Homo sapien
gacagggtgaggaagctcacacttg

SEQ ID NO: 2328026 - DNA, 25 bp, Homo sapien
aggcacagctccaaataattcagag

SEQ ID NO: 2328027 - DNA, 25 bp, Homo sapien
ggaacaaaattaggccttcaccata

SEQ ID NO: 2328028 - DNA, 25 bp, Homo sapien
gcaaatgtcatgcctcagccccaca

SEQ ID NO: 2328029 - DNA, 25 bp, Homo sapien
catagatttgcgtcctttgtcagta

SEQ ID NO: 2328030 - DNA, 25 bp, Homo sapien
ttcaagggggacatagatttgcgtc

SEQ ID NO: 2328031 - DNA, 25 bp, Homo sapien
gatggagtggagtagtacagtctca

SEQ ID NO: 2328032 - DNA, 25 bp, Homo sapien
gcttctaagtaagctggcaaaaaca

SEQ ID NO: 2328033 - DNA, 25 bp, Homo sapien
tctatttttgagaaggtaaacttca

SEQ ID NO: 2328034 - DNA, 25 bp, Homo sapien
ggaagttttaaggtatggcatatca

SEQ ID NO: 2328035 - DNA, 25 bp, Homo sapien
aatgtaataatggtaactcagctgc

SEQ ID NO: 2328036 - DNA, 25 bp, Homo sapien
gaagactgaggttgctataacccta

SEQ ID NO: 2328037 - DNA, 25 bp, Homo sapien
tagtctctctacttgaaagcgtgct

SEQ ID NO: 2328038 - DNA, 25 bp, Homo sapien
tacaatctaattgggaggtcaagac

SEQ ID NO: 2328039 - DNA, 25 bp, Homo sapien
tataaccctaggaaatgagcaaatg

SEQ ID NO: 2328040 - DNA, 25 bp, Homo sapien
gcactgagcacaccatcctgatgac

SEQ ID NO: 2328041 - DNA, 25 bp, Homo sapien
ccttttaaatatagcgcactgagca

SEQ ID NO: 2328042 - DNA, 25 bp, Homo sapien
tgcaagctaccattcctccatgggt

SEQ ID NO: 2328043 - DNA, 25 bp, Homo sapien
cagattccccagtatgtaaaatgca

SEQ ID NO: 2328044 - DNA, 25 bp, Homo sapien
tgtccaacctgattgatgctcttca

SEQ ID NO: 2328045 - DNA, 25 bp, Homo sapien
caagcccttagcatggaatatctcc

SEQ ID NO: 2328046 - DNA, 25 bp, Homo sapien
tagccctgcctacttctgtttcaaa

SEQ ID NO: 2328047 - DNA, 25 bp, Homo sapien
ttattcatatggcagttagccctgc

SEQ ID NO: 2328048 - DNA, 25 bp, Homo sapien
tcaagtacattcatctagaaggagg

SEQ ID NO: 2328049 - DNA, 25 bp, Homo sapien
tactggttctgttagacatcaaggc

SEQ ID NO: 2328050 - DNA, 25 bp, Homo sapien
aatgcacgttggctctgagaagtcc

SEQ ID NO: 2328051 - DNA, 25 bp, Homo sapien
gcatatcctgagtgggttcctgaaa

SEQ ID NO: 2328052 - DNA, 25 bp, Homo sapien
tttctctgtgaaaacaaaatgaagc

SEQ ID NO: 2328053 - DNA, 25 bp, Homo sapien
aaatgaagcaaacatcagtaattct

SEQ ID NO: 2328054 - DNA, 25 bp, Homo sapien
gagtgttacgaatttctgttatttc

SEQ ID NO: 2328055 - DNA, 25 bp, Homo sapien
ccatgggagctcccttttgagtgtt

SEQ ID NO: 2328056 - DNA, 25 bp, Homo sapien
tcgctccccaaaaagtgaggtacat

SEQ ID NO: 2328057 - DNA, 25 bp, Homo sapien
aagaaattgatgtaacctatttcta

SEQ ID NO: 2328058 - DNA, 25 bp, Homo sapien
ctccccaaaaagtgaggtacatttg

SEQ ID NO: 2328059 - DNA, 25 bp, Homo sapien
tcatcaaagatacttatgcttccag

SEQ ID NO: 2328060 - DNA, 25 bp, Homo sapien
gactctggtgccctctatgtcttca

SEQ ID NO: 2328061 - DNA, 25 bp, Homo sapien
tctacacttgtctactggttcctct

SEQ ID NO: 2328062 - DNA, 25 bp, Homo sapien
ggctgaacaatggtattgatgactc

SEQ ID NO: 2328063 - DNA, 25 bp, Homo sapien
gacaatgaagggtcatctctcttag

SEQ ID NO: 2328064 - DNA, 25 bp, Homo sapien
gattccaggccaaccgtgccacggg

SEQ ID NO: 2328065 - DNA, 25 bp, Homo sapien
tgccacggggcgcttctggacacag

SEQ ID NO: 2328066 - DNA, 25 bp, Homo sapien
gagattccaggccaaccgtgccacg

SEQ ID NO: 2328067 - DNA, 25 bp, Homo sapien
gcgcttctggacacagtgtgctgtt

SEQ ID NO: 2328068 - DNA, 25 bp, Homo sapien
aaccagggcggcatctgctcttcca

SEQ ID NO: 2328069 - DNA, 25 bp, Homo sapien
catggctccgcagtaacaggtgaca

SEQ ID NO: 2328070 - DNA, 25 bp, Homo sapien
tccacctctacaagggctcctaaag

SEQ ID NO: 2328071 - DNA, 25 bp, Homo sapien
aggcgagcacaaccggacaccctgg

SEQ ID NO: 2328072 - DNA, 25 bp, Homo sapien
ccgatgatgcataattcataggaga

SEQ ID NO: 2328073 - DNA, 25 bp, Homo sapien
ttgtttttaggcggcctccactgtc

SEQ ID NO: 2328074 - DNA, 25 bp, Homo sapien
ctttctggtcacactctgaggcatg

SEQ ID NO: 2328075 - DNA, 25 bp, Homo sapien
ggcatgttgcctccaacgatgataa

SEQ ID NO: 2328076 - DNA, 25 bp, Homo sapien
aaagtgttagcacctgtaactcctt

SEQ ID NO: 2328077 - DNA, 25 bp, Homo sapien
aagtgttagcacctggcccggtaca

SEQ ID NO: 2328078 - DNA, 25 bp, Homo sapien
gatattttttatccccagtaccatg

SEQ ID NO: 2328079 - DNA, 25 bp, Homo sapien
tattagtttaggtttattcagcacc

SEQ ID NO: 2328080 - DNA, 25 bp, Homo sapien
gacttggagtgcacaaaaccagctt

SEQ ID NO: 2328081 - DNA, 25 bp, Homo sapien
atttcctccagacttggagtgcaca

SEQ ID NO: 2328082 - DNA, 25 bp, Homo sapien
gcacaaaaccagcttccagtatcac

SEQ ID NO: 2328083 - DNA, 25 bp, Homo sapien
acaaaaccagcttccagtatcacca

SEQ ID NO: 2328084 - DNA, 25 bp, Homo sapien
gacaatctgcagttccaattagctt

SEQ ID NO: 2328085 - DNA, 25 bp, Homo sapien
gctctcagtgctgatacaaaacctg

SEQ ID NO: 2328086 - DNA, 25 bp, Homo sapien
tggaactgtttctcaggatgagcac

SEQ ID NO: 2328087 - DNA, 25 bp, Homo sapien
tgttgatgctgactccagaaactgg

SEQ ID NO: 2328088 - DNA, 25 bp, Homo sapien
taaatctggaagatgatctgaagtc

SEQ ID NO: 2328089 - DNA, 25 bp, Homo sapien
ctaaatctggaagatgatctgaagt

SEQ ID NO: 2328090 - DNA, 25 bp, Homo sapien
tggaagatgatctgaagtccaggct

SEQ ID NO: 2328091 - DNA, 25 bp, Homo sapien
aagatgatctgaagtccaggcttac

SEQ ID NO: 2328092 - DNA, 25 bp, Homo sapien
ccctctggttacagagttgactggc

SEQ ID NO: 2328093 - DNA, 25 bp, Homo sapien
ggcccagtctcctagactagggctc

SEQ ID NO: 2328094 - DNA, 25 bp, Homo sapien
ttcttccctctggttacagagttga

SEQ ID NO: 2328095 - DNA, 25 bp, Homo sapien
caggcccagtctcctagactagggc

SEQ ID NO: 2328096 - DNA, 25 bp, Homo sapien
gtctgaatggatggcattgagcctc

SEQ ID NO: 2328097 - DNA, 25 bp, Homo sapien
cattggatgcttccccaagcacagg

SEQ ID NO: 2328098 - DNA, 25 bp, Homo sapien
cttggctgccggcattcagaaagct

SEQ ID NO: 2328099 - DNA, 25 bp, Homo sapien
gtaaccatgagcagaggcaagcgag

SEQ ID NO: 2328100 - DNA, 25 bp, Homo sapien
ttctggcggggacccacactactca

SEQ ID NO: 2328101 - DNA, 25 bp, Homo sapien
tctggcggggacccacactactcac

SEQ ID NO: 2328102 - DNA, 25 bp, Homo sapien
tttgaagtttagatgtttctggcgg

SEQ ID NO: 2328103 - DNA, 25 bp, Homo sapien
gaagtttagatgtttctggcgggga

SEQ ID NO: 2328104 - DNA, 25 bp, Homo sapien
taattctaaggtagctctgacacca

SEQ ID NO: 2328105 - DNA, 25 bp, Homo sapien
actactctagcttaattatcttggc

SEQ ID NO: 2328106 - DNA, 25 bp, Homo sapien
tatcttggcacctaaaaacaggtgg

SEQ ID NO: 2328107 - DNA, 25 bp, Homo sapien
ggtgcaatcaaaatcagtcatgaat

SEQ ID NO: 2328108 - DNA, 25 bp, Homo sapien
ttgggccagcatgagaataaaattt

SEQ ID NO: 2328109 - DNA, 25 bp, Homo sapien
tttaaacagtacattttgctgccag

SEQ ID NO: 2328110 - DNA, 25 bp, Homo sapien
ttaaacagtacattttgctgccagt

SEQ ID NO: 2328111 - DNA, 25 bp, Homo sapien
tactcttgggccagcatgagaataa

SEQ ID NO: 2328112 - DNA, 25 bp, Homo sapien
cagactggctcatggatgtaatccc

SEQ ID NO: 2328113 - DNA, 25 bp, Homo sapien
tgctgctcggaacagatcaaagggc

SEQ ID NO: 2328114 - DNA, 25 bp, Homo sapien
gacttcactagatttgtgctcacct

SEQ ID NO: 2328115 - DNA, 25 bp, Homo sapien
gctcaccttaatcagcaccaaagaa

SEQ ID NO: 2328116 - DNA, 25 bp, Homo sapien
tgccccagcatcataaggctgcaca

SEQ ID NO: 2328117 - DNA, 25 bp, Homo sapien
gaaaatctttggattccttatactg

SEQ ID NO: 2328118 - DNA, 25 bp, Homo sapien
atcataaggctgcacagtacagtgg

SEQ ID NO: 2328119 - DNA, 25 bp, Homo sapien
gattccttatactgccccagcatca

SEQ ID NO: 2328120 - DNA, 25 bp, Homo sapien
ccagtgtccgtgcatttcccaaaaa

SEQ ID NO: 2328121 - DNA, 25 bp, Homo sapien
tctgttcacaacaaaaaggcctctt

SEQ ID NO: 2328122 - DNA, 25 bp, Homo sapien
tcagggcttatagggatgctgtgcc

SEQ ID NO: 2328123 - DNA, 25 bp, Homo sapien
taatccattcataacagtgcagtcc

SEQ ID NO: 2328124 - DNA, 25 bp, Homo sapien
gttgttctaccagttgagctcgaat

SEQ ID NO: 2328125 - DNA, 25 bp, Homo sapien
tttgttgttctaccagttgagctcg

SEQ ID NO: 2328126 - DNA, 25 bp, Homo sapien
tgttctaccagttgagctcgaattt

SEQ ID NO: 2328127 - DNA, 25 bp, Homo sapien
tgttgttctaccagttgagctcgaa

SEQ ID NO: 2328128 - DNA, 25 bp, Homo sapien
cttctctagattccgggaatattcc

SEQ ID NO: 2328129 - DNA, 25 bp, Homo sapien
gggaatattccgtctcaatttcagc

SEQ ID NO: 2328130 - DNA, 25 bp, Homo sapien
ttcggaagaaatcttgcagatcctg

SEQ ID NO: 2328131 - DNA, 25 bp, Homo sapien
tattgttgatgatccttagtgcttc

SEQ ID NO: 2328132 - DNA, 25 bp, Homo sapien
aatcctcacttatctgcatgaaccg

SEQ ID NO: 2328133 - DNA, 25 bp, Homo sapien
gcatgaaccgcataatcacattgtt

SEQ ID NO: 2328134 - DNA, 25 bp, Homo sapien
taaacatcctggtagaatcctcact

SEQ ID NO: 2328135 - DNA, 25 bp, Homo sapien
tacttggttcaggagcaaataccag

SEQ ID NO: 2328136 - DNA, 25 bp, Homo sapien
atagacaaggcagttattggaaagc

SEQ ID NO: 2328137 - DNA, 25 bp, Homo sapien
tattggaaagcacactatggcagga

SEQ ID NO: 2328138 - DNA, 25 bp, Homo sapien
tcagataccgttctcagtcctggtt

SEQ ID NO: 2328139 - DNA, 25 bp, Homo sapien
ctatggcaggatttatggagtgtac

SEQ ID NO: 2328140 - DNA, 25 bp, Homo sapien
gaaaataggcttctgacctagaacc

SEQ ID NO: 2328141 - DNA, 25 bp, Homo sapien
ctaaaggctgcttcagattcacact

SEQ ID NO: 2328142 - DNA, 25 bp, Homo sapien
tagaaccataacaatggaagaagag

SEQ ID NO: 2328143 - DNA, 25 bp, Homo sapien
ggctgcttcagattcacactaataa

SEQ ID NO: 2328144 - DNA, 25 bp, Homo sapien
ttcacttagctttccggacacctca

SEQ ID NO: 2328145 - DNA, 25 bp, Homo sapien
tcagttcagtggacatcatggacct

SEQ ID NO: 2328146 - DNA, 25 bp, Homo sapien
agagataaccaatgaccctttgctg

SEQ ID NO: 2328147 - DNA, 25 bp, Homo sapien
tcatggacctttgcatattgaccac

SEQ ID NO: 2328148 - DNA, 25 bp, Homo sapien
ttggctagcaaccagaatactgttc

SEQ ID NO: 2328149 - DNA, 25 bp, Homo sapien
tctgacagccatattcggtatctct

SEQ ID NO: 2328150 - DNA, 25 bp, Homo sapien
tatattccaaggtatcacaagtgtt

SEQ ID NO: 2328151 - DNA, 25 bp, Homo sapien
taaggattcaatgtgtctatgcctc

SEQ ID NO: 2328152 - DNA, 25 bp, Homo sapien
tgtggtattctacatccaggtgaaa

SEQ ID NO: 2328153 - DNA, 25 bp, Homo sapien
ccaggtgaaaaaggtcggctgttgc

SEQ ID NO: 2328154 - DNA, 25 bp, Homo sapien
gtgcatagtcatcaacaccaaagtc

SEQ ID NO: 2328155 - DNA, 25 bp, Homo sapien
gcagacaatttgaaaggtgcatagt

SEQ ID NO: 2328156 - DNA, 25 bp, Homo sapien
ccataaagggaactatctggggcat

SEQ ID NO: 2328157 - DNA, 25 bp, Homo sapien
accataaagggaactatctggggca

SEQ ID NO: 2328158 - DNA, 25 bp, Homo sapien
tgcttaagccaattcccagacatga

SEQ ID NO: 2328159 - DNA, 25 bp, Homo sapien
ggacaacaatgtcactcaagtcaga

SEQ ID NO: 2328160 - DNA, 25 bp, Homo sapien
tatcataaatgctggtcaaaaggca

SEQ ID NO: 2328161 - DNA, 25 bp, Homo sapien
aaatctagggttcctctaagactgg

SEQ ID NO: 2328162 - DNA, 25 bp, Homo sapien
ggtggcgtgcaaccaagctcaacta

SEQ ID NO: 2328163 - DNA, 25 bp, Homo sapien
tgacaaccatgggtgaacggctccc

SEQ ID NO: 2328164 - DNA, 25 bp, Homo sapien
taacacgacagaaagacagcaagcc

SEQ ID NO: 2328165 - DNA, 25 bp, Homo sapien
gatggtccccataagataaacagag

SEQ ID NO: 2328166 - DNA, 25 bp, Homo sapien
tcatgaagttggaatgcaatctctt

SEQ ID NO: 2328167 - DNA, 25 bp, Homo sapien
tgaagttggaatgcaatctctttgc

SEQ ID NO: 2328168 - DNA, 25 bp, Homo sapien
taaagctcattaagaaccttcatta

SEQ ID NO: 2328169 - DNA, 25 bp, Homo sapien
cgtataaagctcattaagaaccttc

SEQ ID NO: 2328170 - DNA, 25 bp, Homo sapien
gaaaagaagaaagattatgtcctta

SEQ ID NO: 2328171 - DNA, 25 bp, Homo sapien
tctagaaaagaagaaagattatgtc

SEQ ID NO: 2328172 - DNA, 25 bp, Homo sapien
ctagaaaagaagaaagattatgtcc

SEQ ID NO: 2328173 - DNA, 25 bp, Homo sapien
tagaaaagaagaaagattatgtcct

SEQ ID NO: 2328174 - DNA, 25 bp, Homo sapien
tcatcttgaattctaaggacaaacc

SEQ ID NO: 2328175 - DNA, 25 bp, Homo sapien
gtaatggctggagttctagcaatca

SEQ ID NO: 2328176 - DNA, 25 bp, Homo sapien
tgaacaatgcagtaggaggagcttg

SEQ ID NO: 2328177 - DNA, 25 bp, Homo sapien
ttctgttgccacgaatgcagatgta

SEQ ID NO: 2328178 - DNA, 25 bp, Homo sapien
ctgtgtgttactcggccatgctcag

SEQ ID NO: 2328179 - DNA, 25 bp, Homo sapien
gctccctgatcacagggctgtgtgt

SEQ ID NO: 2328180 - DNA, 25 bp, Homo sapien
gacttacatattcgtagaaagaacc

SEQ ID NO: 2328181 - DNA, 25 bp, Homo sapien
gccatgctcaggacttacatattcg

SEQ ID NO: 2328182 - DNA, 25 bp, Homo sapien
ccttctggttctgttgacctgagac

SEQ ID NO: 2328183 - DNA, 25 bp, Homo sapien
tgccagggatataagattcctccgg

SEQ ID NO: 2328184 - DNA, 25 bp, Homo sapien
cctgagacagcaaggagtccactgt

SEQ ID NO: 2328185 - DNA, 25 bp, Homo sapien
tcctccgggaattctccatgggctc

SEQ ID NO: 2328186 - DNA, 25 bp, Homo sapien
tagatgggtcaaataatgcagcaga

SEQ ID NO: 2328187 - DNA, 25 bp, Homo sapien
gcactgatactcatacatttagatg

SEQ ID NO: 2328188 - DNA, 25 bp, Homo sapien
gcagaaaattcacagacaggctaaa

SEQ ID NO: 2328189 - DNA, 25 bp, Homo sapien
cagacaggctaaagaaatgtttgaa

SEQ ID NO: 2328190 - DNA, 25 bp, Homo sapien
ccttttgacatttgacccattctcc

SEQ ID NO: 2328191 - DNA, 25 bp, Homo sapien
ctcccaagcaagtccctgagctgct

SEQ ID NO: 2328192 - DNA, 25 bp, Homo sapien
ttctcccaagcaagtccctgagctg

SEQ ID NO: 2328193 - DNA, 25 bp, Homo sapien
ttttgacatttgacccattctccat

SEQ ID NO: 2328194 - DNA, 25 bp, Homo sapien
taacccactgatgggtgtgaaaaga

SEQ ID NO: 2328195 - DNA, 25 bp, Homo sapien
cactgatgggtgtgaaaagaaatac

SEQ ID NO: 2328196 - DNA, 25 bp, Homo sapien
cacccataacccactgatgggtgtg

SEQ ID NO: 2328197 - DNA, 25 bp, Homo sapien
cccataacccactgatgggtgtgaa

SEQ ID NO: 2328198 - DNA, 25 bp, Homo sapien
tcctctagtcgaatatggaagactg

SEQ ID NO: 2328199 - DNA, 25 bp, Homo sapien
gctctctgcatgatacatatggtat

SEQ ID NO: 2328200 - DNA, 25 bp, Homo sapien
ttcgccgttgatgtctctcctctag

SEQ ID NO: 2328201 - DNA, 25 bp, Homo sapien
tgtttttcggcctctttcagcttgc

SEQ ID NO: 2328202 - DNA, 25 bp, Homo sapien
gcattggtggcttcaagtgttagga

SEQ ID NO: 2328203 - DNA, 25 bp, Homo sapien
tcagaaagatcatgaatatagtact

SEQ ID NO: 2328204 - DNA, 25 bp, Homo sapien
tgttaggagatattcgttccgtgcc

SEQ ID NO: 2328205 - DNA, 25 bp, Homo sapien
ccgtgccttaattgattttagctta

SEQ ID NO: 2328206 - DNA, 25 bp, Homo sapien
atatggaaaagacaaaaacttcaag

SEQ ID NO: 2328207 - DNA, 25 bp, Homo sapien
catttcagtagacctccaaaaacca

SEQ ID NO: 2328208 - DNA, 25 bp, Homo sapien
aagtaaattatagctcagatgttgc

SEQ ID NO: 2328209 - DNA, 25 bp, Homo sapien
tgatcctaacaaggcacaattaagt

SEQ ID NO: 2328210 - DNA, 25 bp, Homo sapien
gaaggagtcatgttcagtgatggaa

SEQ ID NO: 2328211 - DNA, 25 bp, Homo sapien
gctgtgacacagacaatatgggctc

SEQ ID NO: 2328212 - DNA, 25 bp, Homo sapien
tgctctcaagcatagtgaccaatgc

SEQ ID NO: 2328213 - DNA, 25 bp, Homo sapien
cacacagccagtaggtgctctctaa

SEQ ID NO: 2328214 - DNA, 25 bp, Homo sapien
taggtgaggcaaaggtataacaact

SEQ ID NO: 2328215 - DNA, 25 bp, Homo sapien
gaagaggcttaatttaggaaactgc

SEQ ID NO: 2328216 - DNA, 25 bp, Homo sapien
catatgagtgtaagcttaggaagct

SEQ ID NO: 2328217 - DNA, 25 bp, Homo sapien
tgacagtagggcgaatggatataaa

SEQ ID NO: 2328218 - DNA, 25 bp, Homo sapien
caagtacagctagtgagaagtggca

SEQ ID NO: 2328219 - DNA, 25 bp, Homo sapien
caaacttcattggtggacagaacgc

SEQ ID NO: 2328220 - DNA, 25 bp, Homo sapien
ggtttcaaggttgtactccgcagac

SEQ ID NO: 2328221 - DNA, 25 bp, Homo sapien
aacgcagcagggtacatctccatga

SEQ ID NO: 2328222 - DNA, 25 bp, Homo sapien
tgaatctctgcttatcgctcctggg

SEQ ID NO: 2328223 - DNA, 25 bp, Homo sapien
ggtacctgagcatgagctctgcctg

SEQ ID NO: 2328224 - DNA, 25 bp, Homo sapien
caaggcgggactgcaactgttggta

SEQ ID NO: 2328225 - DNA, 25 bp, Homo sapien
cattctcgattttgagcgtggcaag

SEQ ID NO: 2328226 - DNA, 25 bp, Homo sapien
tctcgattttgagcgtggcaaggcg

SEQ ID NO: 2328227 - DNA, 25 bp, Homo sapien
acttttgtggactggctttgttgcc

SEQ ID NO: 2328228 - DNA, 25 bp, Homo sapien
tttgtgttaccaggacattaccatc

SEQ ID NO: 2328229 - DNA, 25 bp, Homo sapien
tgggagaacaagacagccatttcag

SEQ ID NO: 2328230 - DNA, 25 bp, Homo sapien
tgcctttgtgttaccaggacattac

SEQ ID NO: 2328231 - DNA, 25 bp, Homo sapien
gacaaaggattcgtgagaaaccaga

SEQ ID NO: 2328232 - DNA, 25 bp, Homo sapien
aaggattcgtgagaaaccagaagaa

SEQ ID NO: 2328233 - DNA, 25 bp, Homo sapien
aagatttgacaaaggattcgtgaga

SEQ ID NO: 2328234 - DNA, 25 bp, Homo sapien
gagaggccaaagatttgacaaagga

SEQ ID NO: 2328235 - DNA, 25 bp, Homo sapien
ggactgcatatcatcccatgggatg

SEQ ID NO: 2328236 - DNA, 25 bp, Homo sapien
cgagcttctgacatacaccagccat

SEQ ID NO: 2328237 - DNA, 25 bp, Homo sapien
ccatgggatgctcgcaacagacagt

SEQ ID NO: 2328238 - DNA, 25 bp, Homo sapien
gtgacagaagccaccagactcaatg

SEQ ID NO: 2328239 - DNA, 25 bp, Homo sapien
ctcttggcgatgctgggtttactca

SEQ ID NO: 2328240 - DNA, 25 bp, Homo sapien
gaccatatcttgtatcgtctgcaag

SEQ ID NO: 2328241 - DNA, 25 bp, Homo sapien
catcatagtcctcgatggtgaccat

SEQ ID NO: 2328242 - DNA, 25 bp, Homo sapien
gattctgtggaacgactgtgctgga

SEQ ID NO: 2328243 - DNA, 25 bp, Homo sapien
tcctctgcagcaagtcatgtttggc

SEQ ID NO: 2328244 - DNA, 25 bp, Homo sapien
ggtcctctgcagcaagtcatgtttg

SEQ ID NO: 2328245 - DNA, 25 bp, Homo sapien
ctctgcagcaagtcatgtttggctt

SEQ ID NO: 2328246 - DNA, 25 bp, Homo sapien
ctgcagcaagtcatgtttggcttga

SEQ ID NO: 2328247 - DNA, 25 bp, Homo sapien
caattcatactctttctggaatata

SEQ ID NO: 2328248 - DNA, 25 bp, Homo sapien
aaatctaaacacagagtgtcctctg

SEQ ID NO: 2328249 - DNA, 25 bp, Homo sapien
ctggaatatatacatgatacgatgt

SEQ ID NO: 2328250 - DNA, 25 bp, Homo sapien
tacgatgtatcatccaggtcatctt

SEQ ID NO: 2328251 - DNA, 25 bp, Homo sapien
cctccctaggagctcggtattgact

SEQ ID NO: 2328252 - DNA, 25 bp, Homo sapien
tagaagaaaatcgtgccaggagaac

SEQ ID NO: 2328253 - DNA, 25 bp, Homo sapien
gacttttctacgatcaggagcacca

SEQ ID NO: 2328254 - DNA, 25 bp, Homo sapien
tccagagtctaaacaggcaacagat

SEQ ID NO: 2328255 - DNA, 25 bp, Homo sapien
ttcagcagctaaagacggaatttgg

SEQ ID NO: 2328256 - DNA, 25 bp, Homo sapien
agagatgtctgcaaccagtgggcag

SEQ ID NO: 2328257 - DNA, 25 bp, Homo sapien
tggtataccagagcccgttgaaaaa

SEQ ID NO: 2328258 - DNA, 25 bp, Homo sapien
cacagcttgtgtccctggtatacca

SEQ ID NO: 2328259 - DNA, 25 bp, Homo sapien
tacttcactatgtgatgggcgccat

SEQ ID NO: 2328260 - DNA, 25 bp, Homo sapien
gtaaggcaggccaaacacatgtctg

SEQ ID NO: 2328261 - DNA, 25 bp, Homo sapien
aaagaacttactgggccattggcag

SEQ ID NO: 2328262 - DNA, 25 bp, Homo sapien
gagcaactgctaaatcttcgggtta

SEQ ID NO: 2328263 - DNA, 25 bp, Homo sapien
cgagaaggatgggttcaaatacagt

SEQ ID NO: 2328264 - DNA, 25 bp, Homo sapien
gactgacacttgttagcgagaagga

SEQ ID NO: 2328265 - DNA, 25 bp, Homo sapien
tccaccaacttgtaagctaaaagcc

SEQ ID NO: 2328266 - DNA, 25 bp, Homo sapien
tagggctccgacaatctgcaataat

SEQ ID NO: 2328267 - DNA, 25 bp, Homo sapien
tgtatgtggtactcttttgtatctc

SEQ ID NO: 2328268 - DNA, 25 bp, Homo sapien
taagtaaactgaaaggaatcagcag

SEQ ID NO: 2328269 - DNA, 25 bp, Homo sapien
gcagagtgtatgtggtactcttttg

SEQ ID NO: 2328270 - DNA, 25 bp, Homo sapien
cactgagtttgtaataacttacacg

SEQ ID NO: 2328271 - DNA, 25 bp, Homo sapien
ttgtagtcatatattcagctctatg

SEQ ID NO: 2328272 - DNA, 25 bp, Homo sapien
tgtagtcatatattcagctctatga

SEQ ID NO: 2328273 - DNA, 25 bp, Homo sapien
gtagtcatatattcagctctatgac

SEQ ID NO: 2328274 - DNA, 25 bp, Homo sapien
cttgtagtcatatattcagctctat

SEQ ID NO: 2328275 - DNA, 25 bp, Homo sapien
aagtaaaatacgctataagttatga

SEQ ID NO: 2328276 - DNA, 25 bp, Homo sapien
aagagaaagtaaaatacgctataag

SEQ ID NO: 2328277 - DNA, 25 bp, Homo sapien
aaatacgctataagttatgataaaa

SEQ ID NO: 2328278 - DNA, 25 bp, Homo sapien
agagaaagtaaaatacgctataagt

SEQ ID NO: 2328279 - DNA, 25 bp, Homo sapien
ttgtcaagccaaaactatctcccgt

SEQ ID NO: 2328280 - DNA, 25 bp, Homo sapien
tctggattagataaaccaagccggt

SEQ ID NO: 2328281 - DNA, 25 bp, Homo sapien
catacctagtcttgtaagaagccca

SEQ ID NO: 2328282 - DNA, 25 bp, Homo sapien
caaaagtcctgtcacgctatttaga

SEQ ID NO: 2328283 - DNA, 25 bp, Homo sapien
gaagaaagtacaatatgggagtatg

SEQ ID NO: 2328284 - DNA, 25 bp, Homo sapien
tgcacaaatggtgacatagaaaaat

SEQ ID NO: 2328285 - DNA, 25 bp, Homo sapien
agataatttctgtctgttgcacaaa

SEQ ID NO: 2328286 - DNA, 25 bp, Homo sapien
tttcccgaacccaaatcagaatctg

SEQ ID NO: 2328287 - DNA, 25 bp, Homo sapien
aatagtggccgtgagtgtcagaacc

SEQ ID NO: 2328288 - DNA, 25 bp, Homo sapien
tcatatgatgaacaaggtgcacagc

SEQ ID NO: 2328289 - DNA, 25 bp, Homo sapien
gaggatacacaccacaccaggaaat

SEQ ID NO: 2328290 - DNA, 25 bp, Homo sapien
gaagttacgtggaagcctgactagc

SEQ ID NO: 2328291 - DNA, 25 bp, Homo sapien
gcccatttgctctggtgaataaacc

SEQ ID NO: 2328292 - DNA, 25 bp, Homo sapien
tctctgacatatgcacatctagtgc

SEQ ID NO: 2328293 - DNA, 25 bp, Homo sapien
gggacatacaggctcgcatgagtta

SEQ ID NO: 2328294 - DNA, 25 bp, Homo sapien
atctgttcgatacccctccagcagt

SEQ ID NO: 2328295 - DNA, 25 bp, Homo sapien
tagactcgttagctatttggccaaa

SEQ ID NO: 2328296 - DNA, 25 bp, Homo sapien
ggctccggtagatccccaaatgagg

SEQ ID NO: 2328297 - DNA, 25 bp, Homo sapien
ggtcataaagattagggctccggta

SEQ ID NO: 2328298 - DNA, 25 bp, Homo sapien
gtttccctgtatgctgcagctgaca

SEQ ID NO: 2328299 - DNA, 25 bp, Homo sapien
cttagtattatactgtgagcggggc

SEQ ID NO: 2328300 - DNA, 25 bp, Homo sapien
tagtattatactgtgagcggggcct

SEQ ID NO: 2328301 - DNA, 25 bp, Homo sapien
agtattatactgtgagcggggcctg

SEQ ID NO: 2328302 - DNA, 25 bp, Homo sapien
aacttagtattatactgtgagcggg

SEQ ID NO: 2328303 - DNA, 25 bp, Homo sapien
tatagtaagaagcatggagatcagc

SEQ ID NO: 2328304 - DNA, 25 bp, Homo sapien
tgaaggcactcgacccaaatattct

SEQ ID NO: 2328305 - DNA, 25 bp, Homo sapien
gagccccaggacagacttggacata

SEQ ID NO: 2328306 - DNA, 25 bp, Homo sapien
tcctcctcttacaagaggctgagac

SEQ ID NO: 2328307 - DNA, 25 bp, Homo sapien
gatgtcttgtgtgcgagtttcttcg

SEQ ID NO: 2328308 - DNA, 25 bp, Homo sapien
tcttgtgtgcgagtttcttcgtcct

SEQ ID NO: 2328309 - DNA, 25 bp, Homo sapien
tgtcttgtgtgcgagtttcttcgtc

SEQ ID NO: 2328310 - DNA, 25 bp, Homo sapien
ctgatgtcttgtgtgcgagtttctt

SEQ ID NO: 2328311 - DNA, 25 bp, Homo sapien
ctctctctccatataatttgtccct

SEQ ID NO: 2328312 - DNA, 25 bp, Homo sapien
tctccatataatttgtccctgctta

SEQ ID NO: 2328313 - DNA, 25 bp, Homo sapien
tctctccatataatttgtccctgct

SEQ ID NO: 2328314 - DNA, 25 bp, Homo sapien
gccatcagctgcatatctcattgct

SEQ ID NO: 2328315 - DNA, 25 bp, Homo sapien
ttgatgaaccgaatacagctttcca

SEQ ID NO: 2328316 - DNA, 25 bp, Homo sapien
caatgaggggaataacctgtcctga

SEQ ID NO: 2328317 - DNA, 25 bp, Homo sapien
catagagattgatgaaccgaataca

SEQ ID NO: 2328318 - DNA, 25 bp, Homo sapien
tagagattgatgaaccgaatacagc

SEQ ID NO: 2328319 - DNA, 25 bp, Homo sapien
ttccacctgggaaccagacactctg

SEQ ID NO: 2328320 - DNA, 25 bp, Homo sapien
ctgaaaatcccctgatgctgaagac

SEQ ID NO: 2328321 - DNA, 25 bp, Homo sapien
taatatcattgacttccacctggga

SEQ ID NO: 2328322 - DNA, 25 bp, Homo sapien
tgggaaccagacactctgaaaatcc

SEQ ID NO: 2328323 - DNA, 25 bp, Homo sapien
tactctggtcatcagccaaaggatt

SEQ ID NO: 2328324 - DNA, 25 bp, Homo sapien
cagatcgttaaatctttccttagga

SEQ ID NO: 2328325 - DNA, 25 bp, Homo sapien
tagagcttcagaacgccagcaactg

SEQ ID NO: 2328326 - DNA, 25 bp, Homo sapien
gttttccagcccacggaaatagagc

SEQ ID NO: 2328327 - DNA, 25 bp, Homo sapien
cctcctttcccttaggcagctggca

SEQ ID NO: 2328328 - DNA, 25 bp, Homo sapien
gctcaattccagccatgagtgggaa

SEQ ID NO: 2328329 - DNA, 25 bp, Homo sapien
ctttcccttaggcagctggcacctg

SEQ ID NO: 2328330 - DNA, 25 bp, Homo sapien
tcctttcccttaggcagctggcacc

SEQ ID NO: 2328331 - DNA, 25 bp, Homo sapien
gggaggattatgaccgggaaattca

SEQ ID NO: 2328332 - DNA, 25 bp, Homo sapien
aattccaatgggacatcagactggg

SEQ ID NO: 2328333 - DNA, 25 bp, Homo sapien
tcaggctacgcaagggccgtggaat

SEQ ID NO: 2328334 - DNA, 25 bp, Homo sapien
gaaattcatacccaactggagccaa

SEQ ID NO: 2328335 - DNA, 25 bp, Homo sapien
caaaatttatggttgctgctgacac

SEQ ID NO: 2328336 - DNA, 25 bp, Homo sapien
tggctgctcaacaggcgcgcaatgt

SEQ ID NO: 2328337 - DNA, 25 bp, Homo sapien
ggagcttcgctctggtacaaatgac

SEQ ID NO: 2328338 - DNA, 25 bp, Homo sapien
cgcgcaatgtgtatcctacaggagc

SEQ ID NO: 2328339 - DNA, 25 bp, Homo sapien
gagtttgcggatgtgaagcgccctc

SEQ ID NO: 2328340 - DNA, 25 bp, Homo sapien
tgtgaagcgccctctcatagagatt

SEQ ID NO: 2328341 - DNA, 25 bp, Homo sapien
tgcggatgtgaagcgccctctcata

SEQ ID NO: 2328342 - DNA, 25 bp, Homo sapien
gcgccctctcatagagattatctat

SEQ ID NO: 2328343 - DNA, 25 bp, Homo sapien
gaggtacctcatcactataaggacc

SEQ ID NO: 2328344 - DNA, 25 bp, Homo sapien
aaagaggtacctcatcactataagg

SEQ ID NO: 2328345 - DNA, 25 bp, Homo sapien
gaaggcaaagaggtacctcatcact

SEQ ID NO: 2328346 - DNA, 25 bp, Homo sapien
gtacctcatcactataaggaccgac

SEQ ID NO: 2328347 - DNA, 25 bp, Homo sapien
gcaagcctctggacttttaaaactg

SEQ ID NO: 2328348 - DNA, 25 bp, Homo sapien
tagttcacagtggattttgttcagg

SEQ ID NO: 2328349 - DNA, 25 bp, Homo sapien
gccattctttgagatgcatgatgag

SEQ ID NO: 2328350 - DNA, 25 bp, Homo sapien
gccagcaggaatgcaaggtactcca

SEQ ID NO: 2328351 - DNA, 25 bp, Homo sapien
gaccttaactaagtagaaattgaga

SEQ ID NO: 2328352 - DNA, 25 bp, Homo sapien
aagaaagtgaaatgacttatgacct

SEQ ID NO: 2328353 - DNA, 25 bp, Homo sapien
aagtcctatttgcttaactaagtag

SEQ ID NO: 2328354 - DNA, 25 bp, Homo sapien
aatattcactacaatggagaccagg

SEQ ID NO: 2328355 - DNA, 25 bp, Homo sapien
tagcatctgggaaaatagtctcatg

SEQ ID NO: 2328356 - DNA, 25 bp, Homo sapien
gcctggcaagacacttgatcctgta

SEQ ID NO: 2328357 - DNA, 25 bp, Homo sapien
gcaaatggccaggttataagggtcc

SEQ ID NO: 2328358 - DNA, 25 bp, Homo sapien
ctgggacaggcatcaatgttgggcc

SEQ ID NO: 2328359 - DNA, 25 bp, Homo sapien
accgtgctcactgtatgggctgtcg

SEQ ID NO: 2328360 - DNA, 25 bp, Homo sapien
tcttcacttgtgtggggctctgtac

SEQ ID NO: 2328361 - DNA, 25 bp, Homo sapien
ctccaatgtaccgtgctcactgtat

SEQ ID NO: 2328362 - DNA, 25 bp, Homo sapien
gggctctgtaccagcatcttggtcc

SEQ ID NO: 2328363 - DNA, 25 bp, Homo sapien
tcagatgcacggtgatacagcagca

SEQ ID NO: 2328364 - DNA, 25 bp, Homo sapien
tggctattgcttctattggctcaca

SEQ ID NO: 2328365 - DNA, 25 bp, Homo sapien
tatcctgcaccactatatactggtg

SEQ ID NO: 2328366 - DNA, 25 bp, Homo sapien
gaaggatagttctctggcagaccgc

SEQ ID NO: 2328367 - DNA, 25 bp, Homo sapien
gacttgtcttccgtgactggcccac

SEQ ID NO: 2328368 - DNA, 25 bp, Homo sapien
cagagtgtctgaaaacgtatcatcc

SEQ ID NO: 2328369 - DNA, 25 bp, Homo sapien
taaatagccgtcaggatgacggtct

SEQ ID NO: 2328370 - DNA, 25 bp, Homo sapien
tgtcggctttttggctcagagtgtc

SEQ ID NO: 2328371 - DNA, 25 bp, Homo sapien
cagaagagcttatcacaccgggcag

SEQ ID NO: 2328372 - DNA, 25 bp, Homo sapien
aacagaagagcttatcacaccgggc

SEQ ID NO: 2328373 - DNA, 25 bp, Homo sapien
gaagagcttatcacaccgggcagta

SEQ ID NO: 2328374 - DNA, 25 bp, Homo sapien
caccgggcagtactgcaaggctgag

SEQ ID NO: 2328375 - DNA, 25 bp, Homo sapien
aatggccatcactggtcctgccagg

SEQ ID NO: 2328376 - DNA, 25 bp, Homo sapien
cattgaagcccgtgtattgccctga

SEQ ID NO: 2328377 - DNA, 25 bp, Homo sapien
ccttctaatgggagggctgtcgatc

SEQ ID NO: 2328378 - DNA, 25 bp, Homo sapien
tcttcttgagggagtcgtgccggct

SEQ ID NO: 2328379 - DNA, 25 bp, Homo sapien
tcactggaggagctcgtgctacgtc

SEQ ID NO: 2328380 - DNA, 25 bp, Homo sapien
gctcctgagggcaacgttgtgcaaa

SEQ ID NO: 2328381 - DNA, 25 bp, Homo sapien
tgctacgtcgaatctgaggctcgga

SEQ ID NO: 2328382 - DNA, 25 bp, Homo sapien
caaagggctgagagattccgtggaa

SEQ ID NO: 2328383 - DNA, 25 bp, Homo sapien
tggactcgaactactaggcccaaag

SEQ ID NO: 2328384 - DNA, 25 bp, Homo sapien
tacaatgtggagagcggtgttgcct

SEQ ID NO: 2328385 - DNA, 25 bp, Homo sapien
catcgagtctttaagctggacccgg

SEQ ID NO: 2328386 - DNA, 25 bp, Homo sapien
taatcatgctcgcaaaaggagtgac

SEQ ID NO: 2328387 - DNA, 25 bp, Homo sapien
tcattgcagtagattgtgggaccct

SEQ ID NO: 2328388 - DNA, 25 bp, Homo sapien
tctatggatgggatgtgaacacaca

SEQ ID NO: 2328389 - DNA, 25 bp, Homo sapien
cactgaacgtgaacatggagctcta

SEQ ID NO: 2328390 - DNA, 25 bp, Homo sapien
tcatttgtgaaattaggccccaggc

SEQ ID NO: 2328391 - DNA, 25 bp, Homo sapien
catcagtgtgtcagctcgtgagaac

SEQ ID NO: 2328392 - DNA, 25 bp, Homo sapien
cttaaactgggtggtggatacatca

SEQ ID NO: 2328393 - DNA, 25 bp, Homo sapien
gaaaccaaagatgggcttgccgtgg

SEQ ID NO: 2328394 - DNA, 25 bp, Homo sapien
tcacagaggcatgagcacagtagct

SEQ ID NO: 2328395 - DNA, 25 bp, Homo sapien
tatcctagagctgacgatctcctgg

SEQ ID NO: 2328396 - DNA, 25 bp, Homo sapien
catgttgtttcagcactgcgggagg

SEQ ID NO: 2328397 - DNA, 25 bp, Homo sapien
gaaggatccatccataagtcgccag

SEQ ID NO: 2328398 - DNA, 25 bp, Homo sapien
tcggaagcacccctgatagacagct

SEQ ID NO: 2328399 - DNA, 25 bp, Homo sapien
tatttgttgaagtctagtaactgag

SEQ ID NO: 2328400 - DNA, 25 bp, Homo sapien
ccttcttttcctaatgcatctcgta

SEQ ID NO: 2328401 - DNA, 25 bp, Homo sapien
gtaacaatctttgggcttacagacc

SEQ ID NO: 2328402 - DNA, 25 bp, Homo sapien
gtaactgagtttgacttatgactat

SEQ ID NO: 2328403 - DNA, 25 bp, Homo sapien
tcactcagtgacaggaaaatggtta

SEQ ID NO: 2328404 - DNA, 25 bp, Homo sapien
tattatatacagagctgctcaccac

SEQ ID NO: 2328405 - DNA, 25 bp, Homo sapien
gactgagactcctagtgtgaattgc

SEQ ID NO: 2328406 - DNA, 25 bp, Homo sapien
aaccttcaaacaggctcactcagtg

SEQ ID NO: 2328407 - DNA, 25 bp, Homo sapien
tgactctttaaccacgtgagcatgg

SEQ ID NO: 2328408 - DNA, 25 bp, Homo sapien
ggcattcaagctgtcccatctaaaa

SEQ ID NO: 2328409 - DNA, 25 bp, Homo sapien
aggaagtacactccatgagaccagg

SEQ ID NO: 2328410 - DNA, 25 bp, Homo sapien
tcttgcttatggtggtacagtcaca

SEQ ID NO: 2328411 - DNA, 25 bp, Homo sapien
cttcctcatcccgatccctggcaat

SEQ ID NO: 2328412 - DNA, 25 bp, Homo sapien
aacactgaacaacaatttccatttt

SEQ ID NO: 2328413 - DNA, 25 bp, Homo sapien
ccttctacctggctatctagtccaa

SEQ ID NO: 2328414 - DNA, 25 bp, Homo sapien
ttgctccttaattgtggtctctcac

SEQ ID NO: 2328415 - DNA, 25 bp, Homo sapien
tttcagtttacccatgttgtagcgt

SEQ ID NO: 2328416 - DNA, 25 bp, Homo sapien
aagaacatcccatactcccattagc

SEQ ID NO: 2328417 - DNA, 25 bp, Homo sapien
agccctcagcaactacaaatctact

SEQ ID NO: 2328418 - DNA, 25 bp, Homo sapien
tacagatgtgtagttatcacacaat

SEQ ID NO: 2328419 - DNA, 25 bp, Homo sapien
agaagaaataggcttgatgtgcatt

SEQ ID NO: 2328420 - DNA, 25 bp, Homo sapien
caattatttcgtggccttttgcctg

SEQ ID NO: 2328421 - DNA, 25 bp, Homo sapien
taccaggttcctgttaccaatgcaa

SEQ ID NO: 2328422 - DNA, 25 bp, Homo sapien
aagaaataggcttgatgtgcatttc

SEQ ID NO: 2328423 - DNA, 25 bp, Homo sapien
cttagcatcttccagacaatgggga

SEQ ID NO: 2328424 - DNA, 25 bp, Homo sapien
acatatttagttccttagcatcttc

SEQ ID NO: 2328425 - DNA, 25 bp, Homo sapien
tcttccagacaatggggagttttaa

SEQ ID NO: 2328426 - DNA, 25 bp, Homo sapien
tactagttcttaacatatttagttc

SEQ ID NO: 2328427 - DNA, 25 bp, Homo sapien
tatatacttcagtggaaccccgaga

SEQ ID NO: 2328428 - DNA, 25 bp, Homo sapien
tccacataatttggttcaagccaag

SEQ ID NO: 2328429 - DNA, 25 bp, Homo sapien
gacaatatgtattactgtgcagctg

SEQ ID NO: 2328430 - DNA, 25 bp, Homo sapien
ccccgagagaggtgtaagtaaagca

SEQ ID NO: 2328431 - DNA, 25 bp, Homo sapien
ggactgcctggcagaagaaagaaga

SEQ ID NO: 2328432 - DNA, 25 bp, Homo sapien
cagaagaaagaagaaccggccaggc

SEQ ID NO: 2328433 - DNA, 25 bp, Homo sapien
tggactgcctggcagaagaaagaag

SEQ ID NO: 2328434 - DNA, 25 bp, Homo sapien
aagaaagaagaaccggccaggcacg

SEQ ID NO: 2328435 - DNA, 25 bp, Homo sapien
aacagttcagaagatcctcatggca

SEQ ID NO: 2328436 - DNA, 25 bp, Homo sapien
gaaggtcttcatacgctgtacttgc

SEQ ID NO: 2328437 - DNA, 25 bp, Homo sapien
tgtaaagtcagcataagccatcatg

SEQ ID NO: 2328438 - DNA, 25 bp, Homo sapien
aaagcatgcagtcggtttttcagcc

SEQ ID NO: 2328439 - DNA, 25 bp, Homo sapien
tgttatccttgtataggggacatgc

SEQ ID NO: 2328440 - DNA, 25 bp, Homo sapien
gtgttatccttgtataggggacatg

SEQ ID NO: 2328441 - DNA, 25 bp, Homo sapien
cagttaccataatgtccttgagatt

SEQ ID NO: 2328442 - DNA, 25 bp, Homo sapien
taagcatcatggctcaattcaaatg

SEQ ID NO: 2328443 - DNA, 25 bp, Homo sapien
catatgcctatgtaccaaagctgca

SEQ ID NO: 2328444 - DNA, 25 bp, Homo sapien
cttctgccatggaaggtccagtggg

SEQ ID NO: 2328445 - DNA, 25 bp, Homo sapien
tgttccaggcacattacacaccaaa

SEQ ID NO: 2328446 - DNA, 25 bp, Homo sapien
gaggttttatcctagatgtgggcac

SEQ ID NO: 2328447 - DNA, 25 bp, Homo sapien
tagtttgcacatcaacatagcctgt

SEQ ID NO: 2328448 - DNA, 25 bp, Homo sapien
tcttattaccctcctaagccgagag

SEQ ID NO: 2328449 - DNA, 25 bp, Homo sapien
tgcctaacactagcaagaagagact

SEQ ID NO: 2328450 - DNA, 25 bp, Homo sapien
gcaataagtataagtagatgagaag

SEQ ID NO: 2328451 - DNA, 25 bp, Homo sapien
tactagtagaagcaataagtataag

SEQ ID NO: 2328452 - DNA, 25 bp, Homo sapien
aagattcaagagctgattcaactga

SEQ ID NO: 2328453 - DNA, 25 bp, Homo sapien
tcctattctaccttgacggtccgaa

SEQ ID NO: 2328454 - DNA, 25 bp, Homo sapien
tagtcagagctacaggagccgaagc

SEQ ID NO: 2328455 - DNA, 25 bp, Homo sapien
aagcgccgaaggagctcagcaaccg

SEQ ID NO: 2328456 - DNA, 25 bp, Homo sapien
cagagcgcaggcaacttcttagagc

SEQ ID NO: 2328457 - DNA, 25 bp, Homo sapien
gtcacgtttgcatgacgtcaccagc

SEQ ID NO: 2328458 - DNA, 25 bp, Homo sapien
tcacgtttgcatgacgtcaccagcg

SEQ ID NO: 2328459 - DNA, 25 bp, Homo sapien
ttccagcgctttggaaagtcgacgc

SEQ ID NO: 2328460 - DNA, 25 bp, Homo sapien
tagcggtttgagatcatcctaggca

SEQ ID NO: 2328461 - DNA, 25 bp, Homo sapien
tttggaaagtcgacgcaggaggatt

SEQ ID NO: 2328462 - DNA, 25 bp, Homo sapien
ttgagcttagcggtttgagatcatc

SEQ ID NO: 2328463 - DNA, 25 bp, Homo sapien
cctgcctgcctttctgattattgca

SEQ ID NO: 2328464 - DNA, 25 bp, Homo sapien
gattttataagctcctgataccctg

SEQ ID NO: 2328465 - DNA, 25 bp, Homo sapien
gtgaccattcctttagacttcccaa

SEQ ID NO: 2328466 - DNA, 25 bp, Homo sapien
tcctcagtagaccatccagcagact

SEQ ID NO: 2328467 - DNA, 25 bp, Homo sapien
tctgttgtggatatattcacgcagg

SEQ ID NO: 2328468 - DNA, 25 bp, Homo sapien
aaataaacaacagcgggctgtgagc

SEQ ID NO: 2328469 - DNA, 25 bp, Homo sapien
tgtgagccaaaattgtcctgcaggt

SEQ ID NO: 2328470 - DNA, 25 bp, Homo sapien
gaagcattcatgtgctagaacatgg

SEQ ID NO: 2328471 - DNA, 25 bp, Homo sapien
tataaaaacaggctgaggactatgg

SEQ ID NO: 2328472 - DNA, 25 bp, Homo sapien
aacatagttaccatatgctcaggca

SEQ ID NO: 2328473 - DNA, 25 bp, Homo sapien
cgctccctacgatggctatataaaa

SEQ ID NO: 2328474 - DNA, 25 bp, Homo sapien
aaccttcatacattactcctgggaa

SEQ ID NO: 2328475 - DNA, 25 bp, Homo sapien
ccacgcctggctgttatgtgcatat

SEQ ID NO: 2328476 - DNA, 25 bp, Homo sapien
cctggctgttatgtgcatatttcta

SEQ ID NO: 2328477 - DNA, 25 bp, Homo sapien
cacgcctggctgttatgtgcatatt

SEQ ID NO: 2328478 - DNA, 25 bp, Homo sapien
cgcctggctgttatgtgcatatttc

SEQ ID NO: 2328479 - DNA, 25 bp, Homo sapien
aagtaatgctctcacttcagactcc

SEQ ID NO: 2328480 - DNA, 25 bp, Homo sapien
caagtaatgctctcacttcagactc

SEQ ID NO: 2328481 - DNA, 25 bp, Homo sapien
ctcaagtaatgctctcacttcagac

SEQ ID NO: 2328482 - DNA, 25 bp, Homo sapien
gtaatgctctcacttcagactcctg

SEQ ID NO: 2328483 - DNA, 25 bp, Homo sapien
taaatgagttaaacattccacttaa

SEQ ID NO: 2328484 - DNA, 25 bp, Homo sapien
cattccacttaagaaattgtaggct

SEQ ID NO: 2328485 - DNA, 25 bp, Homo sapien
tgagttaaacattccacttaagaaa

SEQ ID NO: 2328486 - DNA, 25 bp, Homo sapien
aaacattccacttaagaaattgtag

SEQ ID NO: 2328487 - DNA, 25 bp, Homo sapien
caagggctcgtggagagtacagact

SEQ ID NO: 2328488 - DNA, 25 bp, Homo sapien
tgactgggcaatgtgaggacttagc

SEQ ID NO: 2328489 - DNA, 25 bp, Homo sapien
tatggaatcctcagctttagggaca

SEQ ID NO: 2328490 - DNA, 25 bp, Homo sapien
tgtataagaatctcccaagggctcg

SEQ ID NO: 2328491 - DNA, 25 bp, Homo sapien
tggagaaagttaggcctaaacaggc

SEQ ID NO: 2328492 - DNA, 25 bp, Homo sapien
gggcatctttcgcatgagggtttta

SEQ ID NO: 2328493 - DNA, 25 bp, Homo sapien
gatctgaagaagtggttaaacctga

SEQ ID NO: 2328494 - DNA, 25 bp, Homo sapien
ggccctggtaacaaaagatagatta

SEQ ID NO: 2328495 - DNA, 25 bp, Homo sapien
cctgctgggaaacgtcttggaagga

SEQ ID NO: 2328496 - DNA, 25 bp, Homo sapien
tgtacccctttcgtccaggaataga

SEQ ID NO: 2328497 - DNA, 25 bp, Homo sapien
ggcttgaaagacgtcgggcctgcca

SEQ ID NO: 2328498 - DNA, 25 bp, Homo sapien
ttgatccaaactgggcgcagggcct

SEQ ID NO: 2328499 - DNA, 25 bp, Homo sapien
taggacaaagatcgagaggctggac

SEQ ID NO: 2328500 - DNA, 25 bp, Homo sapien
tgatccgcaacagagtacgcagtgg

SEQ ID NO: 2328501 - DNA, 25 bp, Homo sapien
catcgccgtctgaggttaggacaaa

SEQ ID NO: 2328502 - DNA, 25 bp, Homo sapien
gaagacctatgtttacactccgaca

SEQ ID NO: 2328503 - DNA, 25 bp, Homo sapien
tctgcagcctcagggtatgtaatcc

SEQ ID NO: 2328504 - DNA, 25 bp, Homo sapien
aatccgcattcttcagtctatcagc

SEQ ID NO: 2328505 - DNA, 25 bp, Homo sapien
ccattcattcttcctgcatagattg

SEQ ID NO: 2328506 - DNA, 25 bp, Homo sapien
tttcaagatgccagcatcacccatt

SEQ ID NO: 2328507 - DNA, 25 bp, Homo sapien
tttccacctctgatattgtagtcat

SEQ ID NO: 2328508 - DNA, 25 bp, Homo sapien
tccacctctgatattgtagtcattc

SEQ ID NO: 2328509 - DNA, 25 bp, Homo sapien
ttccacctctgatattgtagtcatt

SEQ ID NO: 2328510 - DNA, 25 bp, Homo sapien
ccacctctgatattgtagtcattca

SEQ ID NO: 2328511 - DNA, 25 bp, Homo sapien
cattgttcttaaagccgaatgtcat

SEQ ID NO: 2328512 - DNA, 25 bp, Homo sapien
cttgccagtttcctttagcagtacc

SEQ ID NO: 2328513 - DNA, 25 bp, Homo sapien
ctcttcttgctttgaatgatggtca

SEQ ID NO: 2328514 - DNA, 25 bp, Homo sapien
tggtaggcatgctcagtctcaatcc

SEQ ID NO: 2328515 - DNA, 25 bp, Homo sapien
gaatgatggtcagctgcttgtggta

SEQ ID NO: 2328516 - DNA, 25 bp, Homo sapien
acctcttgaagcctagaccgatgtt

SEQ ID NO: 2328517 - DNA, 25 bp, Homo sapien
tgccctcaatagtctctttggacct

SEQ ID NO: 2328518 - DNA, 25 bp, Homo sapien
aggtgccctcaatagtctctttgga

SEQ ID NO: 2328519 - DNA, 25 bp, Homo sapien
ctctttggacctcttgaagcctaga

SEQ ID NO: 2328520 - DNA, 25 bp, Homo sapien
tcagggactggcacttatccaacgt

SEQ ID NO: 2328521 - DNA, 25 bp, Homo sapien
cttgatgtctgcgaccttggtgacc

SEQ ID NO: 2328522 - DNA, 25 bp, Homo sapien
gagcacattgaagtacaccgtcttg

SEQ ID NO: 2328523 - DNA, 25 bp, Homo sapien
caacgtgacaatgtcgctgatctgg

SEQ ID NO: 2328524 - DNA, 25 bp, Homo sapien
ttgtgtgtatgaatgagaaaataac

SEQ ID NO: 2328525 - DNA, 25 bp, Homo sapien
ttggggagcaggcagacattcagcc

SEQ ID NO: 2328526 - DNA, 25 bp, Homo sapien
ttttgtgtgtatgaatgagaaaata

SEQ ID NO: 2328527 - DNA, 25 bp, Homo sapien
tttcattttggggagcaggcagaca

SEQ ID NO: 2328528 - DNA, 25 bp, Homo sapien
cgcgaagcgcgctccccgcgtcggt

SEQ ID NO: 2328529 - DNA, 25 bp, Homo sapien
gagcgcgagggccggctaacgccgc

SEQ ID NO: 2328530 - DNA, 25 bp, Homo sapien
cgccgccgctgagtcagcgcgaagc

SEQ ID NO: 2328531 - DNA, 25 bp, Homo sapien
gtctcttggagagtgcgggcggcag

SEQ ID NO: 2328532 - DNA, 25 bp, Homo sapien
cagctacaacgccagagacggtgct

SEQ ID NO: 2328533 - DNA, 25 bp, Homo sapien
tacaacgccagagacggtgctggcc

SEQ ID NO: 2328534 - DNA, 25 bp, Homo sapien
ccgcagctacaacgccagagacggt

SEQ ID NO: 2328535 - DNA, 25 bp, Homo sapien
acggccgcagctacaacgccagaga

SEQ ID NO: 2328536 - DNA, 25 bp, Homo sapien
actccagatggtcagccagcggagc

SEQ ID NO: 2328537 - DNA, 25 bp, Homo sapien
agcctgcactccagatggtcagcca

SEQ ID NO: 2328538 - DNA, 25 bp, Homo sapien
tggtcagccagcggagcggagcggc

SEQ ID NO: 2328539 - DNA, 25 bp, Homo sapien
cagatggtcagccagcggagcggag

SEQ ID NO: 2328540 - DNA, 25 bp, Homo sapien
tcgggacgcgctcctcggcggcggc

SEQ ID NO: 2328541 - DNA, 25 bp, Homo sapien
tccgcccagccagggggtgcaccgc

SEQ ID NO: 2328542 - DNA, 25 bp, Homo sapien
ggacgcgctcctcggcggcggcccc

SEQ ID NO: 2328543 - DNA, 25 bp, Homo sapien
gcccagccagggggtgcaccgccat

SEQ ID NO: 2328544 - DNA, 25 bp, Homo sapien
cgtgccctctgatcccacagaagaa

SEQ ID NO: 2328545 - DNA, 25 bp, Homo sapien
tgtagttttctggttgtaataggcg

SEQ ID NO: 2328546 - DNA, 25 bp, Homo sapien
tctggttgtaataggcgtgccctct

SEQ ID NO: 2328547 - DNA, 25 bp, Homo sapien
cctcgctgttatacttgtagttttc

SEQ ID NO: 2328548 - DNA, 25 bp, Homo sapien
ggatttagccctaatagagcctgtt

SEQ ID NO: 2328549 - DNA, 25 bp, Homo sapien
cagcatttggatttagccctaatag

SEQ ID NO: 2328550 - DNA, 25 bp, Homo sapien
catttggatttagccctaatagagc

SEQ ID NO: 2328551 - DNA, 25 bp, Homo sapien
tgaatcagcatttggatttagccct

SEQ ID NO: 2328552 - DNA, 25 bp, Homo sapien
tataaaatggcacgtgaagggcact

SEQ ID NO: 2328553 - DNA, 25 bp, Homo sapien
tcagcatgttgcaccagatgcaggt

SEQ ID NO: 2328554 - DNA, 25 bp, Homo sapien
caggtttcacacatggcaatggaca

SEQ ID NO: 2328555 - DNA, 25 bp, Homo sapien
catacgctctctaccaaactgttgg

SEQ ID NO: 2328556 - DNA, 25 bp, Homo sapien
tttttaactgctcaaaataggccag

SEQ ID NO: 2328557 - DNA, 25 bp, Homo sapien
ctgccaggcatctggggaaattttt

SEQ ID NO: 2328558 - DNA, 25 bp, Homo sapien
ggcatctggggaaatttttaactgc

SEQ ID NO: 2328559 - DNA, 25 bp, Homo sapien
atttttaactgctcaaaataggcca

SEQ ID NO: 2328560 - DNA, 25 bp, Homo sapien
ctctgggctagagcttctgcacaca

SEQ ID NO: 2328561 - DNA, 25 bp, Homo sapien
tctgggctagagcttctgcacacac

SEQ ID NO: 2328562 - DNA, 25 bp, Homo sapien
tgttccagtacttgaaagcagaaaa

SEQ ID NO: 2328563 - DNA, 25 bp, Homo sapien
acttgatgttccagtacttgaaagc

SEQ ID NO: 2328564 - DNA, 25 bp, Homo sapien
gcagaaaaacttcacatgatcatca

SEQ ID NO: 2328565 - DNA, 25 bp, Homo sapien
tttaacttgatgttccagtacttga

SEQ ID NO: 2328566 - DNA, 25 bp, Homo sapien
tgagcttgcagccatgatatgagcg

SEQ ID NO: 2328567 - DNA, 25 bp, Homo sapien
gttgaacagtggttagttctgagta

SEQ ID NO: 2328568 - DNA, 25 bp, Homo sapien
tccctaattagctgttgttgaacag

SEQ ID NO: 2328569 - DNA, 25 bp, Homo sapien
gatatgagcgtctccctaattagct

SEQ ID NO: 2328570 - DNA, 25 bp, Homo sapien
ttggatttaggtccactactgagag

SEQ ID NO: 2328571 - DNA, 25 bp, Homo sapien
cttggatttaggtccactactgaga

SEQ ID NO: 2328572 - DNA, 25 bp, Homo sapien
ccttggatttaggtccactactgag

SEQ ID NO: 2328573 - DNA, 25 bp, Homo sapien
ccccttggatttaggtccactactg

SEQ ID NO: 2328574 - DNA, 25 bp, Homo sapien
ccagatttggaatgcactgttccct

SEQ ID NO: 2328575 - DNA, 25 bp, Homo sapien
caccagatttggaatgcactgttcc

SEQ ID NO: 2328576 - DNA, 25 bp, Homo sapien
agatttggaatgcactgttccctca

SEQ ID NO: 2328577 - DNA, 25 bp, Homo sapien
tccaccagatttggaatgcactgtt

SEQ ID NO: 2328578 - DNA, 25 bp, Homo sapien
agtcacatgcttcttcccgtagaac

SEQ ID NO: 2328579 - DNA, 25 bp, Homo sapien
gtcacatgcttcttcccgtagaact

SEQ ID NO: 2328580 - DNA, 25 bp, Homo sapien
gctgcaacatcagtgccacttttgt

SEQ ID NO: 2328581 - DNA, 25 bp, Homo sapien
tagtgcctcttgagcattcttaata

SEQ ID NO: 2328582 - DNA, 25 bp, Homo sapien
tcctcatgaattagtagctgcaaca

SEQ ID NO: 2328583 - DNA, 25 bp, Homo sapien
tgtttcaatagcttgtagtgcctct

SEQ ID NO: 2328584 - DNA, 25 bp, Homo sapien
catggctcctttgtattatgtattg

SEQ ID NO: 2328585 - DNA, 25 bp, Homo sapien
cagtaaatatctttaggtagtagaa

SEQ ID NO: 2328586 - DNA, 25 bp, Homo sapien
tctccatggctcctttgtattatgt

SEQ ID NO: 2328587 - DNA, 25 bp, Homo sapien
tagtagaattatgggtattttctca

SEQ ID NO: 2328588 - DNA, 25 bp, Homo sapien
cctaaacctataactacctctgaag

SEQ ID NO: 2328589 - DNA, 25 bp, Homo sapien
gaaaatttcaactgtattcacaaat

SEQ ID NO: 2328590 - DNA, 25 bp, Homo sapien
tggttagtctactgaatttagaacc

SEQ ID NO: 2328591 - DNA, 25 bp, Homo sapien
gaacctgaaactattttctggccaa

SEQ ID NO: 2328592 - DNA, 25 bp, Homo sapien
tctacattagctttttgctgatccg

SEQ ID NO: 2328593 - DNA, 25 bp, Homo sapien
agctttttgctgatccgagagcact

SEQ ID NO: 2328594 - DNA, 25 bp, Homo sapien
tttgctgatccgagagcactgtaag

SEQ ID NO: 2328595 - DNA, 25 bp, Homo sapien
tacattagctttttgctgatccgag

SEQ ID NO: 2328596 - DNA, 25 bp, Homo sapien
caattttttcataacggccaacatg

SEQ ID NO: 2328597 - DNA, 25 bp, Homo sapien
ttttcataacggccaacatgattgc

SEQ ID NO: 2328598 - DNA, 25 bp, Homo sapien
attttttcataacggccaacatgat

SEQ ID NO: 2328599 - DNA, 25 bp, Homo sapien
tttttcataacggccaacatgattg

SEQ ID NO: 2328600 - DNA, 25 bp, Homo sapien
tctgcgaacagaggccagtagtaac

SEQ ID NO: 2328601 - DNA, 25 bp, Homo sapien
aaactctgcgaacagaggccagtag

SEQ ID NO: 2328602 - DNA, 25 bp, Homo sapien
aaaactctgcgaacagaggccagta

SEQ ID NO: 2328603 - DNA, 25 bp, Homo sapien
tggaagagcttctgccaacatatac

SEQ ID NO: 2328604 - DNA, 25 bp, Homo sapien
gagcttctgccaacatatacagcaa

SEQ ID NO: 2328605 - DNA, 25 bp, Homo sapien
gcttctgccaacatatacagcaatc

SEQ ID NO: 2328606 - DNA, 25 bp, Homo sapien
aagagcttctgccaacatatacagc

SEQ ID NO: 2328607 - DNA, 25 bp, Homo sapien
gtcacagatgtatgctgataggaac

SEQ ID NO: 2328608 - DNA, 25 bp, Homo sapien
tagtacacatggaatgtgctgaggt

SEQ ID NO: 2328609 - DNA, 25 bp, Homo sapien
gtacacatggaatgtgctgaggttc

SEQ ID NO: 2328610 - DNA, 25 bp, Homo sapien
cacatggaatgtgctgaggttcaac

SEQ ID NO: 2328611 - DNA, 25 bp, Homo sapien
tacacatggaatgtgctgaggttca

SEQ ID NO: 2328612 - DNA, 25 bp, Homo sapien
caaatctagaaaacaggtaagccgt

SEQ ID NO: 2328613 - DNA, 25 bp, Homo sapien
gaaaacaggtaagccgtcctgctcc

SEQ ID NO: 2328614 - DNA, 25 bp, Homo sapien
actggaatgccgcagacctctgtga

SEQ ID NO: 2328615 - DNA, 25 bp, Homo sapien
cgtcctgctccgaacttttgcactg

SEQ ID NO: 2328616 - DNA, 25 bp, Homo sapien
ataaatcttgtattctattcaaaat

SEQ ID NO: 2328617 - DNA, 25 bp, Homo sapien
taataaatcttgtattctattcaaa

SEQ ID NO: 2328618 - DNA, 25 bp, Homo sapien
taaatcttgtattctattcaaaata

SEQ ID NO: 2328619 - DNA, 25 bp, Homo sapien
aataaatcttgtattctattcaaaa

SEQ ID NO: 2328620 - DNA, 25 bp, Homo sapien
gacagtctgctagagaggcttgcct

SEQ ID NO: 2328621 - DNA, 25 bp, Homo sapien
agacagtctgctagagaggcttgcc

SEQ ID NO: 2328622 - DNA, 25 bp, Homo sapien
tttggccgtaatctggttgataaga

SEQ ID NO: 2328623 - DNA, 25 bp, Homo sapien
gaatttggccgtaatctggttgata

SEQ ID NO: 2328624 - DNA, 25 bp, Homo sapien
tgaatttggccgtaatctggttgat

SEQ ID NO: 2328625 - DNA, 25 bp, Homo sapien
cttgaatttggccgtaatctggttg

SEQ ID NO: 2328626 - DNA, 25 bp, Homo sapien
gcctgtgactgtttgcaggaaagca

SEQ ID NO: 2328627 - DNA, 25 bp, Homo sapien
tggccggagcagcacttcaaaaatt

SEQ ID NO: 2328628 - DNA, 25 bp, Homo sapien
gaaagcaaagtaactcctccgcaac

SEQ ID NO: 2328629 - DNA, 25 bp, Homo sapien
aaagtaactcctccgcaacatctgc

SEQ ID NO: 2328630 - DNA, 25 bp, Homo sapien
taacagtaaccaacactctttctac

SEQ ID NO: 2328631 - DNA, 25 bp, Homo sapien
agtaaccaacactctttctacattc

SEQ ID NO: 2328632 - DNA, 25 bp, Homo sapien
ttggataacagtaaccaacactctt

SEQ ID NO: 2328633 - DNA, 25 bp, Homo sapien
gataacagtaaccaacactctttct

SEQ ID NO: 2328634 - DNA, 25 bp, Homo sapien
caaaatcagcaaatcccactggtcc

SEQ ID NO: 2328635 - DNA, 25 bp, Homo sapien
tgctaggaaacatgcggggacaatg

SEQ ID NO: 2328636 - DNA, 25 bp, Homo sapien
tctgccaggtcaaaggtttgtttta

SEQ ID NO: 2328637 - DNA, 25 bp, Homo sapien
caatactgtttgtgcatctgccagg

SEQ ID NO: 2328638 - DNA, 25 bp, Homo sapien
tttgagatgaattgttttcagtgtc

SEQ ID NO: 2328639 - DNA, 25 bp, Homo sapien
tatttctggagctacttgcaaggag

SEQ ID NO: 2328640 - DNA, 25 bp, Homo sapien
caggtattcttgttgaagatactga

SEQ ID NO: 2328641 - DNA, 25 bp, Homo sapien
gagggcaggtattcttgttgaagat

SEQ ID NO: 2328642 - DNA, 25 bp, Homo sapien
attatttctggagctacttgcaagg

SEQ ID NO: 2328643 - DNA, 25 bp, Homo sapien
ctctctttggtgtttgactgccacc

SEQ ID NO: 2328644 - DNA, 25 bp, Homo sapien
gacttggtgaaggtcataagagtga

SEQ ID NO: 2328645 - DNA, 25 bp, Homo sapien
tgatgtagtagtgttcagggacttg

SEQ ID NO: 2328646 - DNA, 25 bp, Homo sapien
tacccttctgcaatacccagaccag

SEQ ID NO: 2328647 - DNA, 25 bp, Homo sapien
ttttgatgagcactaagatcacaag

SEQ ID NO: 2328648 - DNA, 25 bp, Homo sapien
taaccaaacagagctagaccaaaag

SEQ ID NO: 2328649 - DNA, 25 bp, Homo sapien
tacggctgctcacatctagtaagag

SEQ ID NO: 2328650 - DNA, 25 bp, Homo sapien
caaaaactacattgctacggctgct

SEQ ID NO: 2328651 - DNA, 25 bp, Homo sapien
tcacttttgagaacatagctctcct

SEQ ID NO: 2328652 - DNA, 25 bp, Homo sapien
tctcctagacaaggtggattcatgc

SEQ ID NO: 2328653 - DNA, 25 bp, Homo sapien
aacatagctctcctagacaaggtgg

SEQ ID NO: 2328654 - DNA, 25 bp, Homo sapien
ttttgagaacatagctctcctagac

SEQ ID NO: 2328655 - DNA, 25 bp, Homo sapien
aattcatggtatttaacttatcaag

SEQ ID NO: 2328656 - DNA, 25 bp, Homo sapien
tgtcagtacttgtcaaacaggctgc

SEQ ID NO: 2328657 - DNA, 25 bp, Homo sapien
ccacaagaggtttatagcattttca

SEQ ID NO: 2328658 - DNA, 25 bp, Homo sapien
tctgtcaaaggaatttaaggttgct

SEQ ID NO: 2328659 - DNA, 25 bp, Homo sapien
tttaaaaactttagcatcaggctgc

SEQ ID NO: 2328660 - DNA, 25 bp, Homo sapien
tcaggctgctgaagcgcttgacaaa

SEQ ID NO: 2328661 - DNA, 25 bp, Homo sapien
taaaaactttagcatcaggctgctg

SEQ ID NO: 2328662 - DNA, 25 bp, Homo sapien
gctgctgaagcgcttgacaaaactc

SEQ ID NO: 2328663 - DNA, 25 bp, Homo sapien
taggtaagaccaagacagtttcatc

SEQ ID NO: 2328664 - DNA, 25 bp, Homo sapien
tatttactgcgcaaagccctctgac

SEQ ID NO: 2328665 - DNA, 25 bp, Homo sapien
ggcttgatggcccaaatctgaggat

SEQ ID NO: 2328666 - DNA, 25 bp, Homo sapien
gacaagggaagatgttagaaccaca

SEQ ID NO: 2328667 - DNA, 25 bp, Homo sapien
tcagggctttgctctctggaagaac

SEQ ID NO: 2328668 - DNA, 25 bp, Homo sapien
cagggctttgctctctggaagaaca

SEQ ID NO: 2328669 - DNA, 25 bp, Homo sapien
agggctttgctctctggaagaacac

SEQ ID NO: 2328670 - DNA, 25 bp, Homo sapien
agtacactgttttccactgctatgg

SEQ ID NO: 2328671 - DNA, 25 bp, Homo sapien
aaaaagtacactgttttccactgct

SEQ ID NO: 2328672 - DNA, 25 bp, Homo sapien
aagtacactgttttccactgctatg

SEQ ID NO: 2328673 - DNA, 25 bp, Homo sapien
tacactgttttccactgctatggtc

SEQ ID NO: 2328674 - DNA, 25 bp, Homo sapien
tgtctatacgaattctgctgctcag

SEQ ID NO: 2328675 - DNA, 25 bp, Homo sapien
tatcaagtctttatgtgccagctac

SEQ ID NO: 2328676 - DNA, 25 bp, Homo sapien
gaattgatagcatagtaaggccgtg

SEQ ID NO: 2328677 - DNA, 25 bp, Homo sapien
cattcatgaggccaaagggcaaaac

SEQ ID NO: 2328678 - DNA, 25 bp, Homo sapien
gcggcaactgccgagtcggcttccg

SEQ ID NO: 2328679 - DNA, 25 bp, Homo sapien
aagccctggccggaggccacgtgac

SEQ ID NO: 2328680 - DNA, 25 bp, Homo sapien
tatggcccgtctggtagtcaccaca

SEQ ID NO: 2328681 - DNA, 25 bp, Homo sapien
ctcaggacacttccggcttcgcaag

SEQ ID NO: 2328682 - DNA, 25 bp, Homo sapien
atttgttgagggatgaaaacaggtt

SEQ ID NO: 2328683 - DNA, 25 bp, Homo sapien
tatttgttgagggatgaaaacaggt

SEQ ID NO: 2328684 - DNA, 25 bp, Homo sapien
atgaaaacaggtttgacgacatggc

SEQ ID NO: 2328685 - DNA, 25 bp, Homo sapien
tatataaacgtaccaagtagcctgt

SEQ ID NO: 2328686 - DNA, 25 bp, Homo sapien
tacacagaacctgacaaacataaag

SEQ ID NO: 2328687 - DNA, 25 bp, Homo sapien
taacataaacactagtcccaccatg

SEQ ID NO: 2328688 - DNA, 25 bp, Homo sapien
tacaaagtatccaagctccacactg

SEQ ID NO: 2328689 - DNA, 25 bp, Homo sapien
tggatcaggcaatcctcttgttata

SEQ ID NO: 2328690 - DNA, 25 bp, Homo sapien
gctggatcaggcaatcctcttgtta

SEQ ID NO: 2328691 - DNA, 25 bp, Homo sapien
tggctggatcaggcaatcctcttgt

SEQ ID NO: 2328692 - DNA, 25 bp, Homo sapien
cttggctggatcaggcaatcctctt

SEQ ID NO: 2328693 - DNA, 25 bp, Homo sapien
cagtagctccttggcctaaaatatc

SEQ ID NO: 2328694 - DNA, 25 bp, Homo sapien
gataaaagccacagatgattagaag

SEQ ID NO: 2328695 - DNA, 25 bp, Homo sapien
tgcagtagctccttggcctaaaata

SEQ ID NO: 2328696 - DNA, 25 bp, Homo sapien
ttgcagtagctccttggcctaaaat

SEQ ID NO: 2328697 - DNA, 25 bp, Homo sapien
ttgatagcaaataaatcaccagttt

SEQ ID NO: 2328698 - DNA, 25 bp, Homo sapien
tgatagcaaataaatcaccagtttt

SEQ ID NO: 2328699 - DNA, 25 bp, Homo sapien
ctttgatagcaaataaatcaccagt

SEQ ID NO: 2328700 - DNA, 25 bp, Homo sapien
tttgatagcaaataaatcaccagtt

SEQ ID NO: 2328701 - DNA, 25 bp, Homo sapien
cgaaggaagcttatgttattaaata

SEQ ID NO: 2328702 - DNA, 25 bp, Homo sapien
cactggacgaaggaagcttatgtta

SEQ ID NO: 2328703 - DNA, 25 bp, Homo sapien
tcatttgaacatccactggacgaag

SEQ ID NO: 2328704 - DNA, 25 bp, Homo sapien
tgaacatccactggacgaaggaagc

SEQ ID NO: 2328705 - DNA, 25 bp, Homo sapien
actggtaaccatattcaataccctt

SEQ ID NO: 2328706 - DNA, 25 bp, Homo sapien
aacagtgtataaactcccacatgga

SEQ ID NO: 2328707 - DNA, 25 bp, Homo sapien
agaattcagattctggtagtccata

SEQ ID NO: 2328708 - DNA, 25 bp, Homo sapien
ccacatctcgcaaaacaattaagaa

SEQ ID NO: 2328709 - DNA, 25 bp, Homo sapien
gtccataggcattagaaggttcttc

SEQ ID NO: 2328710 - DNA, 25 bp, Homo sapien
gagttgtctggataaaaatcccttg

SEQ ID NO: 2328711 - DNA, 25 bp, Homo sapien
tatgtacttgttagccacttgtgta

SEQ ID NO: 2328712 - DNA, 25 bp, Homo sapien
cctaataaccaatgatgtcggttat

SEQ ID NO: 2328713 - DNA, 25 bp, Homo sapien
caatgatgtcggttattaattaatt

SEQ ID NO: 2328714 - DNA, 25 bp, Homo sapien
ctaagtacactggagtacaagtttt

SEQ ID NO: 2328715 - DNA, 25 bp, Homo sapien
ggggtatatacgtagcagtggaact

SEQ ID NO: 2328716 - DNA, 25 bp, Homo sapien
ctctagctgcaccaaaatctgtgag

SEQ ID NO: 2328717 - DNA, 25 bp, Homo sapien
gtgagtttgtacacagactgtccat

SEQ ID NO: 2328718 - DNA, 25 bp, Homo sapien
tataacacgcatgatatttcctggc

SEQ ID NO: 2328719 - DNA, 25 bp, Homo sapien
ggtgcactataccattctctcgtag

SEQ ID NO: 2328720 - DNA, 25 bp, Homo sapien
catgcctgggccaggtacctttttt

SEQ ID NO: 2328721 - DNA, 25 bp, Homo sapien
ccatgcctgggccaggtaccttttt

SEQ ID NO: 2328722 - DNA, 25 bp, Homo sapien
tcttgctttatagcccaggccagat

SEQ ID NO: 2328723 - DNA, 25 bp, Homo sapien
gctttatagcccaggccagattgca

SEQ ID NO: 2328724 - DNA, 25 bp, Homo sapien
caacaacacaggttgtaggggagag

SEQ ID NO: 2328725 - DNA, 25 bp, Homo sapien
catcctgggccctcaacaacacagg

SEQ ID NO: 2328726 - DNA, 25 bp, Homo sapien
actgatgcagtagggttcagactga

SEQ ID NO: 2328727 - DNA, 25 bp, Homo sapien
ccgaggagtatgaggactggtggtt

SEQ ID NO: 2328728 - DNA, 25 bp, Homo sapien
tagaatatagctaggctgctgagcc

SEQ ID NO: 2328729 - DNA, 25 bp, Homo sapien
tcctgggagcttcaaaacgagggaa

SEQ ID NO: 2328730 - DNA, 25 bp, Homo sapien
tttcagcctagagtacagcacagac

SEQ ID NO: 2328731 - DNA, 25 bp, Homo sapien
tcatgaaggctggtacaggactgct

SEQ ID NO: 2328732 - DNA, 25 bp, Homo sapien
cactgctctctcatacatatcaggg

SEQ ID NO: 2328733 - DNA, 25 bp, Homo sapien
aaagggtctaaatggcagtgatcca

SEQ ID NO: 2328734 - DNA, 25 bp, Homo sapien
cagtgatccagtagctgcatggtaa

SEQ ID NO: 2328735 - DNA, 25 bp, Homo sapien
gttaccccaatgctccaaagatcaa

SEQ ID NO: 2328736 - DNA, 25 bp, Homo sapien
cactccagtcaattggtccattttc

SEQ ID NO: 2328737 - DNA, 25 bp, Homo sapien
agaaacaggcatgtctccactccag

SEQ ID NO: 2328738 - DNA, 25 bp, Homo sapien
ctccagatattgcaccagaaggctt

SEQ ID NO: 2328739 - DNA, 25 bp, Homo sapien
tactccagatattgcaccagaaggc

SEQ ID NO: 2328740 - DNA, 25 bp, Homo sapien
gaatataaatcttatgagctgtcat

SEQ ID NO: 2328741 - DNA, 25 bp, Homo sapien
aaacatgaattaccattcggtgaag

SEQ ID NO: 2328742 - DNA, 25 bp, Homo sapien
gctgtcatttgttgtagcgaaaaaa

SEQ ID NO: 2328743 - DNA, 25 bp, Homo sapien
ccattcggtgaagtatatcactagt

SEQ ID NO: 2328744 - DNA, 25 bp, Homo sapien
ccagctattaacattgatacaccca

SEQ ID NO: 2328745 - DNA, 25 bp, Homo sapien
ggtggcatcctgcatatagcaaagc

SEQ ID NO: 2328746 - DNA, 25 bp, Homo sapien
caaatttccccagttttacatgcaa

SEQ ID NO: 2328747 - DNA, 25 bp, Homo sapien
tattaacgataatcacactgggtga

SEQ ID NO: 2328748 - DNA, 25 bp, Homo sapien
aaccagtccatataaacttgctttg

SEQ ID NO: 2328749 - DNA, 25 bp, Homo sapien
aaactccattccatataacctgtcc

SEQ ID NO: 2328750 - DNA, 25 bp, Homo sapien
ttaaatgagtgcaacaacatccatt

SEQ ID NO: 2328751 - DNA, 25 bp, Homo sapien
tatccctaatatcataaccagtcca

SEQ ID NO: 2328752 - DNA, 25 bp, Homo sapien
gttttagggaaatgttgtgccagcc

SEQ ID NO: 2328753 - DNA, 25 bp, Homo sapien
tattcagaggttcccggcttactac

SEQ ID NO: 2328754 - DNA, 25 bp, Homo sapien
tccaggttctaagactaagcgtcgc

SEQ ID NO: 2328755 - DNA, 25 bp, Homo sapien
taagcgtcgcccttcgtagataagt

SEQ ID NO: 2328756 - DNA, 25 bp, Homo sapien
ccgtctaaatcataacgtggatgta

SEQ ID NO: 2328757 - DNA, 25 bp, Homo sapien
gccatgctagcatccccgtctaaat

SEQ ID NO: 2328758 - DNA, 25 bp, Homo sapien
atccccgtctaaatcataacgtgga

SEQ ID NO: 2328759 - DNA, 25 bp, Homo sapien
ttagccatgctagcatccccgtcta

SEQ ID NO: 2328760 - DNA, 25 bp, Homo sapien
caggcataacacacaacccctgtta

SEQ ID NO: 2328761 - DNA, 25 bp, Homo sapien
tgcaggcataacacacaacccctgt

SEQ ID NO: 2328762 - DNA, 25 bp, Homo sapien
ctgcaggcataacacacaacccctg

SEQ ID NO: 2328763 - DNA, 25 bp, Homo sapien
gcataacacacaacccctgttattg

SEQ ID NO: 2328764 - DNA, 25 bp, Homo sapien
gataaagcagtaaggtactggcaat

SEQ ID NO: 2328765 - DNA, 25 bp, Homo sapien
cattaattcctgataaagcagtaag

SEQ ID NO: 2328766 - DNA, 25 bp, Homo sapien
tatcccctttcgcattaattcctga

SEQ ID NO: 2328767 - DNA, 25 bp, Homo sapien
ccatcgtatcccctttcgcattaat

SEQ ID NO: 2328768 - DNA, 25 bp, Homo sapien
tttctgatacagaaatccaatgtga

SEQ ID NO: 2328769 - DNA, 25 bp, Homo sapien
ttctgatacagaaatccaatgtgat

SEQ ID NO: 2328770 - DNA, 25 bp, Homo sapien
taactctgccgcttccaggttgatc

SEQ ID NO: 2328771 - DNA, 25 bp, Homo sapien
ttcacctaactctgccgcttccagg

SEQ ID NO: 2328772 - DNA, 25 bp, Homo sapien
atttcacctaactctgccgcttcca

SEQ ID NO: 2328773 - DNA, 25 bp, Homo sapien
ctctgccgcttccaggttgatcttc

SEQ ID NO: 2328774 - DNA, 25 bp, Homo sapien
taaggatgccctttaaaccacactc

SEQ ID NO: 2328775 - DNA, 25 bp, Homo sapien
tattttaaaggtcctgatacacact

SEQ ID NO: 2328776 - DNA, 25 bp, Homo sapien
cagtagtagctgacattgccactag

SEQ ID NO: 2328777 - DNA, 25 bp, Homo sapien
cacactcttgtcagcactggcatta

SEQ ID NO: 2328778 - DNA, 25 bp, Homo sapien
ttgatgtgcccatgcgtctgccagt

SEQ ID NO: 2328779 - DNA, 25 bp, Homo sapien
tgatccacctggagataatctgctg

SEQ ID NO: 2328780 - DNA, 25 bp, Homo sapien
cctgaagactggtttctattgttcc

SEQ ID NO: 2328781 - DNA, 25 bp, Homo sapien
tctgtctttcggatgagtgccttct

SEQ ID NO: 2328782 - DNA, 25 bp, Homo sapien
aagagcagaaactacgcataaagct

SEQ ID NO: 2328783 - DNA, 25 bp, Homo sapien
gaaactacgcataaagctataacct

SEQ ID NO: 2328784 - DNA, 25 bp, Homo sapien
gtgaaaaaggacattaataagagca

SEQ ID NO: 2328785 - DNA, 25 bp, Homo sapien
caaataaattaactgagtcaatgtg

SEQ ID NO: 2328786 - DNA, 25 bp, Homo sapien
tgatagtaaatctctgtcatgcaat

SEQ ID NO: 2328787 - DNA, 25 bp, Homo sapien
gtaaatctctgtcatgcaatttaac

SEQ ID NO: 2328788 - DNA, 25 bp, Homo sapien
tgcaatttaacaggacttgtagttt

SEQ ID NO: 2328789 - DNA, 25 bp, Homo sapien
tagtaaatctctgtcatgcaattta

SEQ ID NO: 2328790 - DNA, 25 bp, Homo sapien
gctacccttacagatataccaaatt

SEQ ID NO: 2328791 - DNA, 25 bp, Homo sapien
cccttacagatataccaaattaatt

SEQ ID NO: 2328792 - DNA, 25 bp, Homo sapien
taagaagctacccttacagatatac

SEQ ID NO: 2328793 - DNA, 25 bp, Homo sapien
gaagctacccttacagatataccaa

SEQ ID NO: 2328794 - DNA, 25 bp, Homo sapien
ttatcaaatttgtggatttgttctt

SEQ ID NO: 2328795 - DNA, 25 bp, Homo sapien
gatttgttcttcattataagctaat

SEQ ID NO: 2328796 - DNA, 25 bp, Homo sapien
tcaaatttgtggatttgttcttcat

SEQ ID NO: 2328797 - DNA, 25 bp, Homo sapien
aaatttgtggatttgttcttcatta

SEQ ID NO: 2328798 - DNA, 25 bp, Homo sapien
gcttttgtggcatggtaatacagtt

SEQ ID NO: 2328799 - DNA, 25 bp, Homo sapien
cttttgtggcatggtaatacagttt

SEQ ID NO: 2328800 - DNA, 25 bp, Homo sapien
actgattagtcagcgataataactg

SEQ ID NO: 2328801 - DNA, 25 bp, Homo sapien
tcagcgataataactgtttcctaag

SEQ ID NO: 2328802 - DNA, 25 bp, Homo sapien
taactgtttcctaagatgaagcatc

SEQ ID NO: 2328803 - DNA, 25 bp, Homo sapien
tcaaaacactgattagtcagcgata

SEQ ID NO: 2328804 - DNA, 25 bp, Homo sapien
ctcattagtatattcttgatatttt

SEQ ID NO: 2328805 - DNA, 25 bp, Homo sapien
cattagtatattcttgatattttga

SEQ ID NO: 2328806 - DNA, 25 bp, Homo sapien
tcattagtatattcttgatattttg

SEQ ID NO: 2328807 - DNA, 25 bp, Homo sapien
tagtatattcttgatattttgatac

SEQ ID NO: 2328808 - DNA, 25 bp, Homo sapien
agaacttggataaattggggtcatg

SEQ ID NO: 2328809 - DNA, 25 bp, Homo sapien
ggtcatggtatgtttgattccactg

SEQ ID NO: 2328810 - DNA, 25 bp, Homo sapien
gaacttggataaattggggtcatgg

SEQ ID NO: 2328811 - DNA, 25 bp, Homo sapien
taaattggggtcatggtatgtttga

SEQ ID NO: 2328812 - DNA, 25 bp, Homo sapien
ccttattaaacattgtattacaaca

SEQ ID NO: 2328813 - DNA, 25 bp, Homo sapien
acagtttccaaatgatgagtttctt

SEQ ID NO: 2328814 - DNA, 25 bp, Homo sapien
ttaactggtcaatagataaccttat

SEQ ID NO: 2328815 - DNA, 25 bp, Homo sapien
ttttcttttaactggtcaatagata

SEQ ID NO: 2328816 - DNA, 25 bp, Homo sapien
tttctaaaatgtggttattttcagc

SEQ ID NO: 2328817 - DNA, 25 bp, Homo sapien
gtggttattttcagcaagttcttta

SEQ ID NO: 2328818 - DNA, 25 bp, Homo sapien
aatgtggttattttcagcaagttct

SEQ ID NO: 2328819 - DNA, 25 bp, Homo sapien
ctttctaaaatgtggttattttcag

SEQ ID NO: 2328820 - DNA, 25 bp, Homo sapien
catgaaaaaccgatgtaatgatgta

SEQ ID NO: 2328821 - DNA, 25 bp, Homo sapien
tggaacagcatggtattatcataaa

SEQ ID NO: 2328822 - DNA, 25 bp, Homo sapien
gagtttaagtaactatgatttgttc

SEQ ID NO: 2328823 - DNA, 25 bp, Homo sapien
tgttctatttcttactggaacagca

SEQ ID NO: 2328824 - DNA, 25 bp, Homo sapien
agtcaacgttgcgaaggccaccatc

SEQ ID NO: 2328825 - DNA, 25 bp, Homo sapien
accatccatggttaaagagccaaac

SEQ ID NO: 2328826 - DNA, 25 bp, Homo sapien
aggccaccatccatggttaaagagc

SEQ ID NO: 2328827 - DNA, 25 bp, Homo sapien
aagacagtcaacgttgcgaaggcca

SEQ ID NO: 2328828 - DNA, 25 bp, Homo sapien
aaatatttccagtaggcggtcagag

SEQ ID NO: 2328829 - DNA, 25 bp, Homo sapien
tgtcaacatattggtcggtcatggc

SEQ ID NO: 2328830 - DNA, 25 bp, Homo sapien
tataacagtggtgcggttctgctcc

SEQ ID NO: 2328831 - DNA, 25 bp, Homo sapien
tatttagccccactcagagtagagg

SEQ ID NO: 2328832 - DNA, 25 bp, Homo sapien
aagaaatatacagcttaaaacagtt

SEQ ID NO: 2328833 - DNA, 25 bp, Homo sapien
agaaatatacagcttaaaacagttg

SEQ ID NO: 2328834 - DNA, 25 bp, Homo sapien
gaaatatacagcttaaaacagttga

SEQ ID NO: 2328835 - DNA, 25 bp, Homo sapien
aaatatacagcttaaaacagttgaa

SEQ ID NO: 2328836 - DNA, 25 bp, Homo sapien
tgaacattagcagactggtatcatg

SEQ ID NO: 2328837 - DNA, 25 bp, Homo sapien
tttaaatagtcactgaacattagca

SEQ ID NO: 2328838 - DNA, 25 bp, Homo sapien
tcactgaacattagcagactggtat

SEQ ID NO: 2328839 - DNA, 25 bp, Homo sapien
taaaaagctactaaagtgaagatac

SEQ ID NO: 2328840 - DNA, 25 bp, Homo sapien
taaacagcctgatgtaatatttggg

SEQ ID NO: 2328841 - DNA, 25 bp, Homo sapien
aaacagcctgatgtaatatttgggc

SEQ ID NO: 2328842 - DNA, 25 bp, Homo sapien
aaaagagccgggctattcttctgaa

SEQ ID NO: 2328843 - DNA, 25 bp, Homo sapien
gaaggtctcatgaaagtcacttctt

SEQ ID NO: 2328844 - DNA, 25 bp, Homo sapien
tggccatagcgagaaccaggagtgt

SEQ ID NO: 2328845 - DNA, 25 bp, Homo sapien
gcagcttggatttccgattctttga

SEQ ID NO: 2328846 - DNA, 25 bp, Homo sapien
cagggcttctgatctacataggtgt

SEQ ID NO: 2328847 - DNA, 25 bp, Homo sapien
gcatccatgctagagtgttcctctg

SEQ ID NO: 2328848 - DNA, 25 bp, Homo sapien
ggtgtccttgagaaagccatacaat

SEQ ID NO: 2328849 - DNA, 25 bp, Homo sapien
tccaatagacaagacaccagagcat

SEQ ID NO: 2328850 - DNA, 25 bp, Homo sapien
ccaaacatcagaggcattgcttggg

SEQ ID NO: 2328851 - DNA, 25 bp, Homo sapien
gaggcattgcttgggtgggtcagct

SEQ ID NO: 2328852 - DNA, 25 bp, Homo sapien
gctgaggagggtagtcccaaacatc

SEQ ID NO: 2328853 - DNA, 25 bp, Homo sapien
gaggagggtagtcccaaacatcaga

SEQ ID NO: 2328854 - DNA, 25 bp, Homo sapien
cgttgtataatttcacagactccct

SEQ ID NO: 2328855 - DNA, 25 bp, Homo sapien
aatttgaagcttcacaagatgagcg

SEQ ID NO: 2328856 - DNA, 25 bp, Homo sapien
tctccaattgagatgaatcaaccaa

SEQ ID NO: 2328857 - DNA, 25 bp, Homo sapien
tcccttctccaattgagatgaatca

SEQ ID NO: 2328858 - DNA, 25 bp, Homo sapien
gagagcttataaatcgcagttccca

SEQ ID NO: 2328859 - DNA, 25 bp, Homo sapien
tcacctgaaagttgattttgcccga

SEQ ID NO: 2328860 - DNA, 25 bp, Homo sapien
ttttgcccgagagcttataaatcgc

SEQ ID NO: 2328861 - DNA, 25 bp, Homo sapien
aggtatgtgagttttcttcacctga

SEQ ID NO: 2328862 - DNA, 25 bp, Homo sapien
cagaagtcggcatgcagcttgatac

SEQ ID NO: 2328863 - DNA, 25 bp, Homo sapien
tggataatccagatgtaccaggtct

SEQ ID NO: 2328864 - DNA, 25 bp, Homo sapien
ccaggtctcggcagtgagcatgaca

SEQ ID NO: 2328865 - DNA, 25 bp, Homo sapien
agcttgatacgttcccattttgtgg

SEQ ID NO: 2328866 - DNA, 25 bp, Homo sapien
gactgttctttttgattgaatatct

SEQ ID NO: 2328867 - DNA, 25 bp, Homo sapien
ctgactgttctttttgattgaatat

SEQ ID NO: 2328868 - DNA, 25 bp, Homo sapien
ctgttctttttgattgaatatctta

SEQ ID NO: 2328869 - DNA, 25 bp, Homo sapien
tgttctttttgattgaatatcttac

SEQ ID NO: 2328870 - DNA, 25 bp, Homo sapien
acaaggcttcctgattgtgctcact

SEQ ID NO: 2328871 - DNA, 25 bp, Homo sapien
ataacaaggcttcctgattgtgctc

SEQ ID NO: 2328872 - DNA, 25 bp, Homo sapien
aaggcttcctgattgtgctcactgg

SEQ ID NO: 2328873 - DNA, 25 bp, Homo sapien
gcttcctgattgtgctcactggtgt

SEQ ID NO: 2328874 - DNA, 25 bp, Homo sapien
caactcatagctgggcatggccaag

SEQ ID NO: 2328875 - DNA, 25 bp, Homo sapien
tttgtgtatgcagcaactcatagct

SEQ ID NO: 2328876 - DNA, 25 bp, Homo sapien
tgtatgcagcaactcatagctgggc

SEQ ID NO: 2328877 - DNA, 25 bp, Homo sapien
tgcagcaactcatagctgggcatgg

SEQ ID NO: 2328878 - DNA, 25 bp, Homo sapien
gaccgttatgtctttcttagacact

SEQ ID NO: 2328879 - DNA, 25 bp, Homo sapien
caagggtgaccgttatgtctttctt

SEQ ID NO: 2328880 - DNA, 25 bp, Homo sapien
agggtgaccgttatgtctttcttag

SEQ ID NO: 2328881 - DNA, 25 bp, Homo sapien
ggtgaccgttatgtctttcttagac

SEQ ID NO: 2328882 - DNA, 25 bp, Homo sapien
tacactacacagccttcgggctcag

SEQ ID NO: 2328883 - DNA, 25 bp, Homo sapien
acactacacagccttcgggctcagc

SEQ ID NO: 2328884 - DNA, 25 bp, Homo sapien
ctacactacacagccttcgggctca

SEQ ID NO: 2328885 - DNA, 25 bp, Homo sapien
cactacacagccttcgggctcagcc

SEQ ID NO: 2328886 - DNA, 25 bp, Homo sapien
tgatctgaacgtggtcacataccct

SEQ ID NO: 2328887 - DNA, 25 bp, Homo sapien
tctgctttgcgttctgttgatctga

SEQ ID NO: 2328888 - DNA, 25 bp, Homo sapien
tctctgcttggtatcggtcagccgt

SEQ ID NO: 2328889 - DNA, 25 bp, Homo sapien
cacataccctactgggttctctgct

SEQ ID NO: 2328890 - DNA, 25 bp, Homo sapien
tgcggccgccgctcaatcaggctct

SEQ ID NO: 2328891 - DNA, 25 bp, Homo sapien
agccccgcgaggttcccggcgcgca

SEQ ID NO: 2328892 - DNA, 25 bp, Homo sapien
agccccgggcagtccttatgcagct

SEQ ID NO: 2328893 - DNA, 25 bp, Homo sapien
gccgctcaatcaggctctcccggcc

SEQ ID NO: 2328894 - DNA, 25 bp, Homo sapien
gctgccggtcccgtcgcgcgcgggc

SEQ ID NO: 2328895 - DNA, 25 bp, Homo sapien
ttgttggccggagcggggcttgccc

SEQ ID NO: 2328896 - DNA, 25 bp, Homo sapien
agaaggaggtcctggcggtgaagaa

SEQ ID NO: 2328897 - DNA, 25 bp, Homo sapien
gaagaagaagtcctcggcgtcctcc

SEQ ID NO: 2328898 - DNA, 25 bp, Homo sapien
ggtgaagaagaagtcctcggcgtcc

SEQ ID NO: 2328899 - DNA, 25 bp, Homo sapien
gctgcagcgcccgccgcgcgccact

SEQ ID NO: 2328900 - DNA, 25 bp, Homo sapien
tgcagcgcccgccgcgcgccactca

SEQ ID NO: 2328901 - DNA, 25 bp, Homo sapien
cgggctgcagcgcccgccgcgcgcc

SEQ ID NO: 2328902 - DNA, 25 bp, Homo sapien
cgcgggctgcagcgcccgccgcgcg

SEQ ID NO: 2328903 - DNA, 25 bp, Homo sapien
acccgaaaaggcagaagccacttct

SEQ ID NO: 2328904 - DNA, 25 bp, Homo sapien
tccttcccggcgagcatcccccgag

SEQ ID NO: 2328905 - DNA, 25 bp, Homo sapien
cgccccgcagagacacgtggaggca

SEQ ID NO: 2328906 - DNA, 25 bp, Homo sapien
ccgagcgccccgcagagacacgtgg

SEQ ID NO: 2328907 - DNA, 25 bp, Homo sapien
ctggcgcggaaggcagaagccggcc

SEQ ID NO: 2328908 - DNA, 25 bp, Homo sapien
tccgccttccctcgcctacacgcac

SEQ ID NO: 2328909 - DNA, 25 bp, Homo sapien
ttcctccgccttccctcgcctacac

SEQ ID NO: 2328910 - DNA, 25 bp, Homo sapien
cggaaggcagaagccggccctcagc

SEQ ID NO: 2328911 - DNA, 25 bp, Homo sapien
taacaggaaggacaggcgcgcgaac

SEQ ID NO: 2328912 - DNA, 25 bp, Homo sapien
agatgagtaagctgactaacaggaa

SEQ ID NO: 2328913 - DNA, 25 bp, Homo sapien
tattacacgttgacccaagccactc

SEQ ID NO: 2328914 - DNA, 25 bp, Homo sapien
ctagctattacacgttgacccaagc

SEQ ID NO: 2328915 - DNA, 25 bp, Homo sapien
ggcatgctgcctccaaaaaaggaag

SEQ ID NO: 2328916 - DNA, 25 bp, Homo sapien
cccgcaacggagatttagtgagagc

SEQ ID NO: 2328917 - DNA, 25 bp, Homo sapien
tacagctggcgaaactggcacaagt

SEQ ID NO: 2328918 - DNA, 25 bp, Homo sapien
tacagaaaacgcacaaccctgagtc

SEQ ID NO: 2328919 - DNA, 25 bp, Homo sapien
tactacctgtaagatactgtgaagg

SEQ ID NO: 2328920 - DNA, 25 bp, Homo sapien
gctttaccacactacaaaataggtg

SEQ ID NO: 2328921 - DNA, 25 bp, Homo sapien
aacattgccaaaagaggccagggac

SEQ ID NO: 2328922 - DNA, 25 bp, Homo sapien
caaatacactaaaggagcaagctct

SEQ ID NO: 2328923 - DNA, 25 bp, Homo sapien
tacagcacagttttagaatggtcac

SEQ ID NO: 2328924 - DNA, 25 bp, Homo sapien
cacagcaatctcaatcagactagcc

SEQ ID NO: 2328925 - DNA, 25 bp, Homo sapien
gtttcgattgcttaaaaactacatg

SEQ ID NO: 2328926 - DNA, 25 bp, Homo sapien
gactagccacgtttcgattgcttaa

SEQ ID NO: 2328927 - DNA, 25 bp, Homo sapien
ttttaatgactatatccaatggaag

SEQ ID NO: 2328928 - DNA, 25 bp, Homo sapien
ataaggtgcctttagttattgaagt

SEQ ID NO: 2328929 - DNA, 25 bp, Homo sapien
ccaatggaagtaagggtgtaatgaa

SEQ ID NO: 2328930 - DNA, 25 bp, Homo sapien
aaagtcacaccctcataattagtaa

SEQ ID NO: 2328931 - DNA, 25 bp, Homo sapien
gagcaaaactaaccaggatcccgtg

SEQ ID NO: 2328932 - DNA, 25 bp, Homo sapien
tttgtcaccaggtcaagcgagctgc

SEQ ID NO: 2328933 - DNA, 25 bp, Homo sapien
gaagagtcggccaagcagatcacat

SEQ ID NO: 2328934 - DNA, 25 bp, Homo sapien
tatatgccaggtatagttccaagcc

SEQ ID NO: 2328935 - DNA, 25 bp, Homo sapien
ttgaggtggtcccaacctccgatcc

SEQ ID NO: 2328936 - DNA, 25 bp, Homo sapien
actgcagtgtgactgtacgcctcca

SEQ ID NO: 2328937 - DNA, 25 bp, Homo sapien
catgcttctgtggtatcctccatgc

SEQ ID NO: 2328938 - DNA, 25 bp, Homo sapien
ggttcctccatggacatgcccttct

SEQ ID NO: 2328939 - DNA, 25 bp, Homo sapien
cacctttggcgtggcaacctttgct

SEQ ID NO: 2328940 - DNA, 25 bp, Homo sapien
tcaggctggcaagcacggcctttca

SEQ ID NO: 2328941 - DNA, 25 bp, Homo sapien
tccactcaacgatgggagagacgtc

SEQ ID NO: 2328942 - DNA, 25 bp, Homo sapien
ttccagtgcgaagggaggcatctct

SEQ ID NO: 2328943 - DNA, 25 bp, Homo sapien
tcaggtatctttattgcgatgcccc

SEQ ID NO: 2328944 - DNA, 25 bp, Homo sapien
tctttattgcgatgcccctctcctg

SEQ ID NO: 2328945 - DNA, 25 bp, Homo sapien
tatctttattgcgatgcccctctcc

SEQ ID NO: 2328946 - DNA, 25 bp, Homo sapien
ggtatctttattgcgatgcccctct

SEQ ID NO: 2328947 - DNA, 25 bp, Homo sapien
tgtcaccacgcagggctagaattct

SEQ ID NO: 2328948 - DNA, 25 bp, Homo sapien
aactttgcctgccaaattcaagcga

SEQ ID NO: 2328949 - DNA, 25 bp, Homo sapien
gctcactgtaaactttgcctgccaa

SEQ ID NO: 2328950 - DNA, 25 bp, Homo sapien
aagtggataacccttcaagaagtgc

SEQ ID NO: 2328951 - DNA, 25 bp, Homo sapien
taacctgccagtaatctctaggtgc

SEQ ID NO: 2328952 - DNA, 25 bp, Homo sapien
ggcttactatccctgcagagcaaaa

SEQ ID NO: 2328953 - DNA, 25 bp, Homo sapien
tgctcaattcaagctacgctctagg

SEQ ID NO: 2328954 - DNA, 25 bp, Homo sapien
caggaacagttttgacaggttaggc

SEQ ID NO: 2328955 - DNA, 25 bp, Homo sapien
aagtcagggccactcagcatttccc

SEQ ID NO: 2328956 - DNA, 25 bp, Homo sapien
ctttcactgcaactgctttgggaga

SEQ ID NO: 2328957 - DNA, 25 bp, Homo sapien
cccaccaccagaagataagagtgtt

SEQ ID NO: 2328958 - DNA, 25 bp, Homo sapien
gttctttatctttcactgcaactgc

SEQ ID NO: 2328959 - DNA, 25 bp, Homo sapien
tttttaggctataaacaagtctcat

SEQ ID NO: 2328960 - DNA, 25 bp, Homo sapien
atttttaggctataaacaagtctca

SEQ ID NO: 2328961 - DNA, 25 bp, Homo sapien
gcccatcaattccttaaggccttga

SEQ ID NO: 2328962 - DNA, 25 bp, Homo sapien
agttgccttgggaaaccgtagtcag

SEQ ID NO: 2328963 - DNA, 25 bp, Homo sapien
caaaagcacacagttcctttggcac

SEQ ID NO: 2328964 - DNA, 25 bp, Homo sapien
gaaaacctcatgctgatgggctcct

SEQ ID NO: 2328965 - DNA, 25 bp, Homo sapien
tttcactagtttagacagtgctcca

SEQ ID NO: 2328966 - DNA, 25 bp, Homo sapien
tagacagtgctccataaccatgctt

SEQ ID NO: 2328967 - DNA, 25 bp, Homo sapien
cactagtttagacagtgctccataa

SEQ ID NO: 2328968 - DNA, 25 bp, Homo sapien
tagtttagacagtgctccataacca

SEQ ID NO: 2328969 - DNA, 25 bp, Homo sapien
tgctccaaatttggcacttacataa

SEQ ID NO: 2328970 - DNA, 25 bp, Homo sapien
ttgagtgcttagcactattctaagc

SEQ ID NO: 2328971 - DNA, 25 bp, Homo sapien
agaacgtggcccttctagtttctat

SEQ ID NO: 2328972 - DNA, 25 bp, Homo sapien
gagatcaacattatgtgcatgctcc

SEQ ID NO: 2328973 - DNA, 25 bp, Homo sapien
taacacatccgaggttcccgcctta

SEQ ID NO: 2328974 - DNA, 25 bp, Homo sapien
gaaggcctttgttacgtaacacatc

SEQ ID NO: 2328975 - DNA, 25 bp, Homo sapien
tactgatccactagacagtaacaca

SEQ ID NO: 2328976 - DNA, 25 bp, Homo sapien
acagtaacacaagaaggcctttgtt

SEQ ID NO: 2328977 - DNA, 25 bp, Homo sapien
catgctttgagaatgtgtttcttcc

SEQ ID NO: 2328978 - DNA, 25 bp, Homo sapien
gctttgagaatgtgtttcttccttt

SEQ ID NO: 2328979 - DNA, 25 bp, Homo sapien
ttgagaatgtgtttcttccttttgc

SEQ ID NO: 2328980 - DNA, 25 bp, Homo sapien
atgctttgagaatgtgtttcttcct

SEQ ID NO: 2328981 - DNA, 25 bp, Homo sapien
ctaagtacattttaaggaatctgac

SEQ ID NO: 2328982 - DNA, 25 bp, Homo sapien
tgcaccacacctttactagatttct

SEQ ID NO: 2328983 - DNA, 25 bp, Homo sapien
catgcaccacacctttactagattt

SEQ ID NO: 2328984 - DNA, 25 bp, Homo sapien
caccacacctttactagatttctta

SEQ ID NO: 2328985 - DNA, 25 bp, Homo sapien
gcaccacacctttactagatttctt

SEQ ID NO: 2328986 - DNA, 25 bp, Homo sapien
tctcttgtatatattggcgtgctgc

SEQ ID NO: 2328987 - DNA, 25 bp, Homo sapien
actgcatagaataagcttgcatccc

SEQ ID NO: 2328988 - DNA, 25 bp, Homo sapien
caataacaattgcaggtgtaaactg

SEQ ID NO: 2328989 - DNA, 25 bp, Homo sapien
taagtcattgcccaaatcagttttc

SEQ ID NO: 2328990 - DNA, 25 bp, Homo sapien
aggatatgccctgcctagagccaca

SEQ ID NO: 2328991 - DNA, 25 bp, Homo sapien
caagcacctaaagaatgtcccagag

SEQ ID NO: 2328992 - DNA, 25 bp, Homo sapien
aaatcaatcccaggtgtaacccaag

SEQ ID NO: 2328993 - DNA, 25 bp, Homo sapien
gaaacgtgctaaagtacaaggctga

SEQ ID NO: 2328994 - DNA, 25 bp, Homo sapien
agaagtgcagctctaggttttggtt

SEQ ID NO: 2328995 - DNA, 25 bp, Homo sapien
cagaagtgcagctctaggttttggt

SEQ ID NO: 2328996 - DNA, 25 bp, Homo sapien
taataagattaattgcagttgtgat

SEQ ID NO: 2328997 - DNA, 25 bp, Homo sapien
acattaaaagagcttcatctgggcc

SEQ ID NO: 2328998 - DNA, 25 bp, Homo sapien
aagattaattgcagttgtgatacac

SEQ ID NO: 2328999 - DNA, 25 bp, Homo sapien
ttgtgatacacattaaaagagcttc

SEQ ID NO: 2329000 - DNA, 25 bp, Homo sapien
cagcgaaagcaggaacaggcccagc

SEQ ID NO: 2329001 - DNA, 25 bp, Homo sapien
gcgaaagcaggaacaggcccagcat

SEQ ID NO: 2329002 - DNA, 25 bp, Homo sapien
agcgaaagcaggaacaggcccagca

SEQ ID NO: 2329003 - DNA, 25 bp, Homo sapien
ggtccttgaggttacttgttaagca

SEQ ID NO: 2329004 - DNA, 25 bp, Homo sapien
cattagaggattattagcacacgca

SEQ ID NO: 2329005 - DNA, 25 bp, Homo sapien
taaaccagttaaaggacatagcaag

SEQ ID NO: 2329006 - DNA, 25 bp, Homo sapien
tatgtgatattcattaactatgagc

SEQ ID NO: 2329007 - DNA, 25 bp, Homo sapien
gcatcactgttatctcagggtagga

SEQ ID NO: 2329008 - DNA, 25 bp, Homo sapien
tgttccatggaacaccaatcctcca

SEQ ID NO: 2329009 - DNA, 25 bp, Homo sapien
taagcgggcaacttttttagtgcag

SEQ ID NO: 2329010 - DNA, 25 bp, Homo sapien
tcctccttgtagcaatagatgcatc

SEQ ID NO: 2329011 - DNA, 25 bp, Homo sapien
tcttttggcaataggcagtcacctg

SEQ ID NO: 2329012 - DNA, 25 bp, Homo sapien
cacatttattggagcagtgggccca

SEQ ID NO: 2329013 - DNA, 25 bp, Homo sapien
aacttcccaggccaacaggtgcttt

SEQ ID NO: 2329014 - DNA, 25 bp, Homo sapien
tcatggagggacttataagcaaacc

SEQ ID NO: 2329015 - DNA, 25 bp, Homo sapien
ctgtaaactgtacacaactaccaga

SEQ ID NO: 2329016 - DNA, 25 bp, Homo sapien
aactgtacacaactaccagaggata

SEQ ID NO: 2329017 - DNA, 25 bp, Homo sapien
tgtacacaactaccagaggataatt

SEQ ID NO: 2329018 - DNA, 25 bp, Homo sapien
gtaaactgtacacaactaccagagg

SEQ ID NO: 2329019 - DNA, 25 bp, Homo sapien
tttgctgaggtaactgtgggtttcc

SEQ ID NO: 2329020 - DNA, 25 bp, Homo sapien
gctgaggtaactgtgggtttccttc

SEQ ID NO: 2329021 - DNA, 25 bp, Homo sapien
tgactgctaagttgtatttatgaac

SEQ ID NO: 2329022 - DNA, 25 bp, Homo sapien
gtgactgctaagttgtatttatgaa

SEQ ID NO: 2329023 - DNA, 25 bp, Homo sapien
gctccgctgtcagctcgtttcccta

SEQ ID NO: 2329024 - DNA, 25 bp, Homo sapien
cctgtacgccgactccctgcatgct

SEQ ID NO: 2329025 - DNA, 25 bp, Homo sapien
ggcttctccctcctgtacgccgact

SEQ ID NO: 2329026 - DNA, 25 bp, Homo sapien
gctgtcagctcgtttccctatcccc

SEQ ID NO: 2329027 - DNA, 25 bp, Homo sapien
tccctgtgacaacgcttataaagtg

SEQ ID NO: 2329028 - DNA, 25 bp, Homo sapien
tataaagtgcaaacttggcagggct

SEQ ID NO: 2329029 - DNA, 25 bp, Homo sapien
gagaaactttttgagcagggcctcg

SEQ ID NO: 2329030 - DNA, 25 bp, Homo sapien
ggcagggctctcagtcacgagaaac

SEQ ID NO: 2329031 - DNA, 25 bp, Homo sapien
ctaccaaacgcaggtagagtggatg

SEQ ID NO: 2329032 - DNA, 25 bp, Homo sapien
aacgcaggtagagtggatgttcccg

SEQ ID NO: 2329033 - DNA, 25 bp, Homo sapien
caggtagagtggatgttcccggtct

SEQ ID NO: 2329034 - DNA, 25 bp, Homo sapien
ccaaacgcaggtagagtggatgttc

SEQ ID NO: 2329035 - DNA, 25 bp, Homo sapien
gaacaaaactaagtgtgtctgttct

SEQ ID NO: 2329036 - DNA, 25 bp, Homo sapien
caaaactaagtgtgtctgttctggg

SEQ ID NO: 2329037 - DNA, 25 bp, Homo sapien
acaaaactaagtgtgtctgttctgg

SEQ ID NO: 2329038 - DNA, 25 bp, Homo sapien
aacaaaactaagtgtgtctgttctg

SEQ ID NO: 2329039 - DNA, 25 bp, Homo sapien
ttcttccttgtccaagatgcgcaag

SEQ ID NO: 2329040 - DNA, 25 bp, Homo sapien
gtaggctgtgtagcgcctcttcagg

SEQ ID NO: 2329041 - DNA, 25 bp, Homo sapien
ccaagatgcgcaagaaattctgtag

SEQ ID NO: 2329042 - DNA, 25 bp, Homo sapien
tctgcctgtaggctgtgtagcgcct

SEQ ID NO: 2329043 - DNA, 25 bp, Homo sapien
tgccaagaggtaacactgcggtgct

SEQ ID NO: 2329044 - DNA, 25 bp, Homo sapien
tctacagatagaaaggcgaagaccc

SEQ ID NO: 2329045 - DNA, 25 bp, Homo sapien
tgaacaacaagcttgcagagtccct

SEQ ID NO: 2329046 - DNA, 25 bp, Homo sapien
tcgaatgctcctgatgaggcgacag

SEQ ID NO: 2329047 - DNA, 25 bp, Homo sapien
gaattaaagggtcggatccagctgc

SEQ ID NO: 2329048 - DNA, 25 bp, Homo sapien
taacaatcaagggaaaaacagctgc

SEQ ID NO: 2329049 - DNA, 25 bp, Homo sapien
gctgcagagttcatgggtccctcct

SEQ ID NO: 2329050 - DNA, 25 bp, Homo sapien
tgcagagcagctacaccaatcagac

SEQ ID NO: 2329051 - DNA, 25 bp, Homo sapien
caataaaaggcacagttcacttggg

SEQ ID NO: 2329052 - DNA, 25 bp, Homo sapien
cacatgacagtaagcgaggttttgg

SEQ ID NO: 2329053 - DNA, 25 bp, Homo sapien
tacaaaaaatcacgaaggcattccc

SEQ ID NO: 2329054 - DNA, 25 bp, Homo sapien
ttaagtctgcctccaacaagatggg

SEQ ID NO: 2329055 - DNA, 25 bp, Homo sapien
ttcaaaaggaccctgttcactgctg

SEQ ID NO: 2329056 - DNA, 25 bp, Homo sapien
gaaagttgtcccaggattcatccta

SEQ ID NO: 2329057 - DNA, 25 bp, Homo sapien
taatgatagccatggaagttttacc

SEQ ID NO: 2329058 - DNA, 25 bp, Homo sapien
catttgacttagaaagtgcccttca

SEQ ID NO: 2329059 - DNA, 25 bp, Homo sapien
taagcactttgtaagacatggctga

SEQ ID NO: 2329060 - DNA, 25 bp, Homo sapien
gttcaactcaggcaataagcgattt

SEQ ID NO: 2329061 - DNA, 25 bp, Homo sapien
tgcagatagtcatgttgggctaaca

SEQ ID NO: 2329062 - DNA, 25 bp, Homo sapien
ccacgcttggctaagaacacctaaa

SEQ ID NO: 2329063 - DNA, 25 bp, Homo sapien
gacagggctcttgaacagacaagtg

SEQ ID NO: 2329064 - DNA, 25 bp, Homo sapien
tgataaaggccaattccaggtagct

SEQ ID NO: 2329065 - DNA, 25 bp, Homo sapien
cactggaaggattaaggcaaggtcc

SEQ ID NO: 2329066 - DNA, 25 bp, Homo sapien
tgaaggttgtctcttccgagggcct

SEQ ID NO: 2329067 - DNA, 25 bp, Homo sapien
cctgaaataggaagtccagtcccta

SEQ ID NO: 2329068 - DNA, 25 bp, Homo sapien
ggcatggacaccagtaaactaaagc

SEQ ID NO: 2329069 - DNA, 25 bp, Homo sapien
cctggctgactctgggaacttaaag

SEQ ID NO: 2329070 - DNA, 25 bp, Homo sapien
gaaatagatcctagcttggtaccag

SEQ ID NO: 2329071 - DNA, 25 bp, Homo sapien
tctttaagtaagctgcgacccactg

SEQ ID NO: 2329072 - DNA, 25 bp, Homo sapien
tactttagccagaggtacagccctg

SEQ ID NO: 2329073 - DNA, 25 bp, Homo sapien
cagcccgttgtgctgggaaaatcaa

SEQ ID NO: 2329074 - DNA, 25 bp, Homo sapien
aaagggagccctttttgctgtgaga

SEQ ID NO: 2329075 - DNA, 25 bp, Homo sapien
gaccaagtgacttctatgcttacat

SEQ ID NO: 2329076 - DNA, 25 bp, Homo sapien
tgcctggcacagtaaactttagttc

SEQ ID NO: 2329077 - DNA, 25 bp, Homo sapien
cctgtcagtaagtaatggcttttcc

SEQ ID NO: 2329078 - DNA, 25 bp, Homo sapien
taggcctgcattatccacttgtggc

SEQ ID NO: 2329079 - DNA, 25 bp, Homo sapien
ccttgaataagtgcccgtcgacttg

SEQ ID NO: 2329080 - DNA, 25 bp, Homo sapien
aagatttatctcacaagttgtagag

SEQ ID NO: 2329081 - DNA, 25 bp, Homo sapien
taaatatggtagagtccactttcct

SEQ ID NO: 2329082 - DNA, 25 bp, Homo sapien
tgttatgtacagtcctcctttctct

SEQ ID NO: 2329083 - DNA, 25 bp, Homo sapien
taagagactcttcttggcaaacagt

SEQ ID NO: 2329084 - DNA, 25 bp, Homo sapien
tgacttgacagttcaccttgccagg

SEQ ID NO: 2329085 - DNA, 25 bp, Homo sapien
tggcaaacagttcaactcagagaaa

SEQ ID NO: 2329086 - DNA, 25 bp, Homo sapien
tacttttaccagcaaggaggtatac

SEQ ID NO: 2329087 - DNA, 25 bp, Homo sapien
gtcctcatcgccgtcccacgtgtcc

SEQ ID NO: 2329088 - DNA, 25 bp, Homo sapien
gcggaattccagctccgtccggagc

SEQ ID NO: 2329089 - DNA, 25 bp, Homo sapien
agctgcaggaatcgtttcttcctcc

SEQ ID NO: 2329090 - DNA, 25 bp, Homo sapien
cgccgccgcggaattccagctccgt

SEQ ID NO: 2329091 - DNA, 25 bp, Homo sapien
ggacgccgtgcggcttgtgcggccg

SEQ ID NO: 2329092 - DNA, 25 bp, Homo sapien
cgccgtgcggcttgtgcggccgccg

SEQ ID NO: 2329093 - DNA, 25 bp, Homo sapien
ccgtgcggcttgtgcggccgccgca

SEQ ID NO: 2329094 - DNA, 25 bp, Homo sapien
gacgccgtgcggcttgtgcggccgc

SEQ ID NO: 2329095 - DNA, 25 bp, Homo sapien
agctgtcgaggctgtcgcggcgccg

SEQ ID NO: 2329096 - DNA, 25 bp, Homo sapien
tgtacagctcgttgagcagcccgct

SEQ ID NO: 2329097 - DNA, 25 bp, Homo sapien
tcctctgtgcagctgtacagctcgt

SEQ ID NO: 2329098 - DNA, 25 bp, Homo sapien
tcggtggagctgtcgaggctgtcgc

SEQ ID NO: 2329099 - DNA, 25 bp, Homo sapien
ccgcccaggaccacgtcggagcccg

SEQ ID NO: 2329100 - DNA, 25 bp, Homo sapien
ccaggaccacgtcggagcccgaggc

SEQ ID NO: 2329101 - DNA, 25 bp, Homo sapien
gcccaggaccacgtcggagcccgag

SEQ ID NO: 2329102 - DNA, 25 bp, Homo sapien
cccaggaccacgtcggagcccgagg

SEQ ID NO: 2329103 - DNA, 25 bp, Homo sapien
ctgcagcacgcgggagtcgccggca

SEQ ID NO: 2329104 - DNA, 25 bp, Homo sapien
gcagcacgcgggagtcgccggcacc

SEQ ID NO: 2329105 - DNA, 25 bp, Homo sapien
cagcacgcgggagtcgccggcaccg

SEQ ID NO: 2329106 - DNA, 25 bp, Homo sapien
tgcagcacgcgggagtcgccggcac

SEQ ID NO: 2329107 - DNA, 25 bp, Homo sapien
gcaggtacagcatctgatgccgctg

SEQ ID NO: 2329108 - DNA, 25 bp, Homo sapien
tctgccgcaggtacagcatctgatg

SEQ ID NO: 2329109 - DNA, 25 bp, Homo sapien
ctttctgccgcaggtacagcatctg

SEQ ID NO: 2329110 - DNA, 25 bp, Homo sapien
gccgcaggtacagcatctgatgccg

SEQ ID NO: 2329111 - DNA, 25 bp, Homo sapien
ataaacctcaacactctagggccct

SEQ ID NO: 2329112 - DNA, 25 bp, Homo sapien
taataaacctcaacactctagggcc

SEQ ID NO: 2329113 - DNA, 25 bp, Homo sapien
tccatgccaactgaaggtaccagca

SEQ ID NO: 2329114 - DNA, 25 bp, Homo sapien
ctctccatgccaactgaaggtacca

SEQ ID NO: 2329115 - DNA, 25 bp, Homo sapien
ctatcagtaaagaaaaataagaata

SEQ ID NO: 2329116 - DNA, 25 bp, Homo sapien
tatcagtaaagaaaaataagaataa

SEQ ID NO: 2329117 - DNA, 25 bp, Homo sapien
tgcagaagcctatctttctgcttca

SEQ ID NO: 2329118 - DNA, 25 bp, Homo sapien
gcttcagatgccgaagtaacttggc

SEQ ID NO: 2329119 - DNA, 25 bp, Homo sapien
attctgtactttagctctcgaagga

SEQ ID NO: 2329120 - DNA, 25 bp, Homo sapien
aaggatcgtcttcagttcattagcg

SEQ ID NO: 2329121 - DNA, 25 bp, Homo sapien
gaagtcacagggctcgtttataacc

SEQ ID NO: 2329122 - DNA, 25 bp, Homo sapien
ggttgggacccagagacagtatagt

SEQ ID NO: 2329123 - DNA, 25 bp, Homo sapien
tcaagcttgacaggtgaatatccac

SEQ ID NO: 2329124 - DNA, 25 bp, Homo sapien
cagaaccatatattgcttaggaacc

SEQ ID NO: 2329125 - DNA, 25 bp, Homo sapien
cgtgtgagggaagtcaacacaagag

SEQ ID NO: 2329126 - DNA, 25 bp, Homo sapien
tcaatcaacagtcgtgtgagggaag

SEQ ID NO: 2329127 - DNA, 25 bp, Homo sapien
caacagtcgtgtgagggaagtcaac

SEQ ID NO: 2329128 - DNA, 25 bp, Homo sapien
gtcgtgtgagggaagtcaacacaag

SEQ ID NO: 2329129 - DNA, 25 bp, Homo sapien
cttacaacatttgtcatagattacc

SEQ ID NO: 2329130 - DNA, 25 bp, Homo sapien
tgtcatagattaccaacaatgccgc

SEQ ID NO: 2329131 - DNA, 25 bp, Homo sapien
tgctctttattttcgttaccaccca

SEQ ID NO: 2329132 - DNA, 25 bp, Homo sapien
gattaccaacaatgccgccaggtca

SEQ ID NO: 2329133 - DNA, 25 bp, Homo sapien
gggctccgtgcacatttgacagtca

SEQ ID NO: 2329134 - DNA, 25 bp, Homo sapien
tgacacaggaactaagtcgtactca

SEQ ID NO: 2329135 - DNA, 25 bp, Homo sapien
tagcatggggctccgtgcacatttg

SEQ ID NO: 2329136 - DNA, 25 bp, Homo sapien
ctaagtcgtactcattgttgtctct

SEQ ID NO: 2329137 - DNA, 25 bp, Homo sapien
aagagtttacagttggccaggtgca

SEQ ID NO: 2329138 - DNA, 25 bp, Homo sapien
cagcctggcaacagcacgagactgt

SEQ ID NO: 2329139 - DNA, 25 bp, Homo sapien
ctgcattccagcattccagcctggc

SEQ ID NO: 2329140 - DNA, 25 bp, Homo sapien
ggttgagtgagccaggattgcgcca

SEQ ID NO: 2329141 - DNA, 25 bp, Homo sapien
caccaaatttccagactgccaaagc

SEQ ID NO: 2329142 - DNA, 25 bp, Homo sapien
cagtcagtaacctgaagacaccaaa

SEQ ID NO: 2329143 - DNA, 25 bp, Homo sapien
gacaccaaatttccagactgccaaa

SEQ ID NO: 2329144 - DNA, 25 bp, Homo sapien
aagacaccaaatttccagactgcca

SEQ ID NO: 2329145 - DNA, 25 bp, Homo sapien
tcccacttccgagcagtctcagaag

SEQ ID NO: 2329146 - DNA, 25 bp, Homo sapien
gagatgtccgtgcttctcccaagat

SEQ ID NO: 2329147 - DNA, 25 bp, Homo sapien
ctcccaagatctgggagggaacaga

SEQ ID NO: 2329148 - DNA, 25 bp, Homo sapien
gaacacccgtaagggcaagcatcct

SEQ ID NO: 2329149 - DNA, 25 bp, Homo sapien
tggcacggctaccgtccgtctcggt

SEQ ID NO: 2329150 - DNA, 25 bp, Homo sapien
ctaccccactcgctgagcggctgag

SEQ ID NO: 2329151 - DNA, 25 bp, Homo sapien
ccagcaggcatctgcagtgcggagc

SEQ ID NO: 2329152 - DNA, 25 bp, Homo sapien
tgtctgcggctgaccggcccgtggg

SEQ ID NO: 2329153 - DNA, 25 bp, Homo sapien
gctgcgcttcttgagcacattgctc

SEQ ID NO: 2329154 - DNA, 25 bp, Homo sapien
cgcgcctcagagacccggtcagctt

SEQ ID NO: 2329155 - DNA, 25 bp, Homo sapien
ggcgcggtccgggaaatgcagctgc

SEQ ID NO: 2329156 - DNA, 25 bp, Homo sapien
tccgggaaatgcagctgcgcttctt

SEQ ID NO: 2329157 - DNA, 25 bp, Homo sapien
ctgcaggtgccaacgcggtgccccg

SEQ ID NO: 2329158 - DNA, 25 bp, Homo sapien
tggcacgcggactttccccagagct

SEQ ID NO: 2329159 - DNA, 25 bp, Homo sapien
cgcggtgccccgcaccaggtggcac

SEQ ID NO: 2329160 - DNA, 25 bp, Homo sapien
ttccagaccaatcgctccctgcagg

SEQ ID NO: 2329161 - DNA, 25 bp, Homo sapien
tacaggctccagttcgagctgaccc

SEQ ID NO: 2329162 - DNA, 25 bp, Homo sapien
gacctgcagtgtcaaacctgtgcca

SEQ ID NO: 2329163 - DNA, 25 bp, Homo sapien
taacacccgattttgcctttgcagc

SEQ ID NO: 2329164 - DNA, 25 bp, Homo sapien
cactcacgctgaagggactcttggg

SEQ ID NO: 2329165 - DNA, 25 bp, Homo sapien
agtgagagtacagccaactccctct

SEQ ID NO: 2329166 - DNA, 25 bp, Homo sapien
cgcgctagggccaggctcttaaaat

SEQ ID NO: 2329167 - DNA, 25 bp, Homo sapien
gatggagccgacacggagttatgca

SEQ ID NO: 2329168 - DNA, 25 bp, Homo sapien
tgagcgccaagcaccagtgagagta

SEQ ID NO: 2329169 - DNA, 25 bp, Homo sapien
ctgaaaaccattttgacctaaagat

SEQ ID NO: 2329170 - DNA, 25 bp, Homo sapien
tgaaaaccattttgacctaaagatg

SEQ ID NO: 2329171 - DNA, 25 bp, Homo sapien
ttgacctaaagatggctcaagagtg

SEQ ID NO: 2329172 - DNA, 25 bp, Homo sapien
cctaaagatggctcaagagtgaatt

SEQ ID NO: 2329173 - DNA, 25 bp, Homo sapien
gcaactgccttgagagcatcgtacc

SEQ ID NO: 2329174 - DNA, 25 bp, Homo sapien
caactgccttgagagcatcgtacca

SEQ ID NO: 2329175 - DNA, 25 bp, Homo sapien
ctgtggatagcctggcaactgcctt

SEQ ID NO: 2329176 - DNA, 25 bp, Homo sapien
ttcccatggagtcatcatcaggatt

SEQ ID NO: 2329177 - DNA, 25 bp, Homo sapien
gaagcgcatggttttgtcccagtca

SEQ ID NO: 2329178 - DNA, 25 bp, Homo sapien
cagtcaatggctatactgtgcaaat

SEQ ID NO: 2329179 - DNA, 25 bp, Homo sapien
aaataatgatctgccaaggtcaacc

SEQ ID NO: 2329180 - DNA, 25 bp, Homo sapien
gttttgttccatcgggcataggcca

SEQ ID NO: 2329181 - DNA, 25 bp, Homo sapien
tcctggccacagtaagaactacagc

SEQ ID NO: 2329182 - DNA, 25 bp, Homo sapien
tttcagggcatccccttcattgcct

SEQ ID NO: 2329183 - DNA, 25 bp, Homo sapien
gcttcaacacaaccctgtcctgctc

SEQ ID NO: 2329184 - DNA, 25 bp, Homo sapien
tccaggtgctgagataattccggca

SEQ ID NO: 2329185 - DNA, 25 bp, Homo sapien
gacaatgcccggagattattgacga

SEQ ID NO: 2329186 - DNA, 25 bp, Homo sapien
tagctttcgggaagtaccttatcaa

SEQ ID NO: 2329187 - DNA, 25 bp, Homo sapien
ttccggcagcttcattcttaaaagg

SEQ ID NO: 2329188 - DNA, 25 bp, Homo sapien
cactgcatcgtgaagacatttgtaa

SEQ ID NO: 2329189 - DNA, 25 bp, Homo sapien
taaaacggtctgattagggaggcat

SEQ ID NO: 2329190 - DNA, 25 bp, Homo sapien
taattttgcccagatagccagcgac

SEQ ID NO: 2329191 - DNA, 25 bp, Homo sapien
aagagagtcagaaaccactgcatcg

SEQ ID NO: 2329192 - DNA, 25 bp, Homo sapien
tgcttcttccgttacccaaaaggca

SEQ ID NO: 2329193 - DNA, 25 bp, Homo sapien
cactcgtcatttatagctccagaag

SEQ ID NO: 2329194 - DNA, 25 bp, Homo sapien
cgctcggccgatagttggtggatct

SEQ ID NO: 2329195 - DNA, 25 bp, Homo sapien
cagaagtctcccaggaaacaactta

SEQ ID NO: 2329196 - DNA, 25 bp, Homo sapien
gtgagccaggttggacttcaatctt

SEQ ID NO: 2329197 - DNA, 25 bp, Homo sapien
tgtgagccaggttggacttcaatct

SEQ ID NO: 2329198 - DNA, 25 bp, Homo sapien
ctgtgagccaggttggacttcaatc

SEQ ID NO: 2329199 - DNA, 25 bp, Homo sapien
cctgtgagccaggttggacttcaat

SEQ ID NO: 2329200 - DNA, 25 bp, Homo sapien
ccatggtgctgtagaattcatctgc

SEQ ID NO: 2329201 - DNA, 25 bp, Homo sapien
tgctgtttcacaacattctatctgc

SEQ ID NO: 2329202 - DNA, 25 bp, Homo sapien
tctcctgggtaaggcgccccatggt

SEQ ID NO: 2329203 - DNA, 25 bp, Homo sapien
tcatctgctgtttcacaacattcta

SEQ ID NO: 2329204 - DNA, 25 bp, Homo sapien
tgctctggcactggttgttcccacc

SEQ ID NO: 2329205 - DNA, 25 bp, Homo sapien
tctggcactggttgttcccaccgtg

SEQ ID NO: 2329206 - DNA, 25 bp, Homo sapien
tggcactggttgttcccaccgtgcc

SEQ ID NO: 2329207 - DNA, 25 bp, Homo sapien
gctctggcactggttgttcccaccg

SEQ ID NO: 2329208 - DNA, 25 bp, Homo sapien
ctgaaacatcaagtccaagtgcctt

SEQ ID NO: 2329209 - DNA, 25 bp, Homo sapien
gaaacatcaagtccaagtgccttac

SEQ ID NO: 2329210 - DNA, 25 bp, Homo sapien
tgaaacatcaagtccaagtgcctta

SEQ ID NO: 2329211 - DNA, 25 bp, Homo sapien
gagcagagctatgaccagtgccata

SEQ ID NO: 2329212 - DNA, 25 bp, Homo sapien
tggatgggagcagagctatgaccag

SEQ ID NO: 2329213 - DNA, 25 bp, Homo sapien
gctatgaccagtgccatagagtctg

SEQ ID NO: 2329214 - DNA, 25 bp, Homo sapien
atgggagcagagctatgaccagtgc

SEQ ID NO: 2329215 - DNA, 25 bp, Homo sapien
ttttcacagatgcagcatcagaggg

SEQ ID NO: 2329216 - DNA, 25 bp, Homo sapien
tactggaggagtacagaggaaccat

SEQ ID NO: 2329217 - DNA, 25 bp, Homo sapien
agaataagcaatggcctacagaggc

SEQ ID NO: 2329218 - DNA, 25 bp, Homo sapien
aagagaggagattgagcggcatcca

SEQ ID NO: 2329219 - DNA, 25 bp, Homo sapien
ggctctcaaatcaacccagctgcag

SEQ ID NO: 2329220 - DNA, 25 bp, Homo sapien
gagagattccacttcaacatccgct

SEQ ID NO: 2329221 - DNA, 25 bp, Homo sapien
aagtcgagtgtgaagaggcagatac

SEQ ID NO: 2329222 - DNA, 25 bp, Homo sapien
gaagatgattaaacccgacccagtg

SEQ ID NO: 2329223 - DNA, 25 bp, Homo sapien
gaacggtgtaatgttgtaggtgtat

SEQ ID NO: 2329224 - DNA, 25 bp, Homo sapien
ggaacggagccatggaataaacagt

SEQ ID NO: 2329225 - DNA, 25 bp, Homo sapien
tttaactgtggctgggaacggtgta

SEQ ID NO: 2329226 - DNA, 25 bp, Homo sapien
ccagaaactgaggtgggtttaactg

SEQ ID NO: 2329227 - DNA, 25 bp, Homo sapien
ctaaaaggtccaagacaccccactg

SEQ ID NO: 2329228 - DNA, 25 bp, Homo sapien
tgcattaacgacagcatcctcatcg

SEQ ID NO: 2329229 - DNA, 25 bp, Homo sapien
gtttttggtacttctgcagttcagg

SEQ ID NO: 2329230 - DNA, 25 bp, Homo sapien
cccactgcattaacgacagcatcct

SEQ ID NO: 2329231 - DNA, 25 bp, Homo sapien
ggtaggtggaagttatctctttgta

SEQ ID NO: 2329232 - DNA, 25 bp, Homo sapien
taggtggaagttatctctttgtaaa

SEQ ID NO: 2329233 - DNA, 25 bp, Homo sapien
gtaggtggaagttatctctttgtaa

SEQ ID NO: 2329234 - DNA, 25 bp, Homo sapien
cgggtaggtggaagttatctctttg

SEQ ID NO: 2329235 - DNA, 25 bp, Homo sapien
acaggaattgattgctcctggactc

SEQ ID NO: 2329236 - DNA, 25 bp, Homo sapien
ttcgacaggaattgattgctcctgg

SEQ ID NO: 2329237 - DNA, 25 bp, Homo sapien
ggactcagctctgcaatgttattag

SEQ ID NO: 2329238 - DNA, 25 bp, Homo sapien
caatgttattagatctcagactctg

SEQ ID NO: 2329239 - DNA, 25 bp, Homo sapien
tgtggtcatgcgttccatcatcata

SEQ ID NO: 2329240 - DNA, 25 bp, Homo sapien
actgccgcttcagtgcattgatatc

SEQ ID NO: 2329241 - DNA, 25 bp, Homo sapien
tctttttaattcgagagtactgccg

SEQ ID NO: 2329242 - DNA, 25 bp, Homo sapien
tacacctgatgaacctgctgctgtt

SEQ ID NO: 2329243 - DNA, 25 bp, Homo sapien
tgaaaggtagtatgaagtgtaccac

SEQ ID NO: 2329244 - DNA, 25 bp, Homo sapien
aaatgttgaaaggtagtatgaagtg

SEQ ID NO: 2329245 - DNA, 25 bp, Homo sapien
aaaggtagtatgaagtgtaccacaa

SEQ ID NO: 2329246 - DNA, 25 bp, Homo sapien
tgttgaaaggtagtatgaagtgtac

SEQ ID NO: 2329247 - DNA, 25 bp, Homo sapien
ctgagacgggagaatgctggtcact

SEQ ID NO: 2329248 - DNA, 25 bp, Homo sapien
ggagaatgctggtcactggcccttt

SEQ ID NO: 2329249 - DNA, 25 bp, Homo sapien
acgggagaatgctggtcactggccc

SEQ ID NO: 2329250 - DNA, 25 bp, Homo sapien
agaatgctggtcactggccctttgt

SEQ ID NO: 2329251 - DNA, 25 bp, Homo sapien
aggtggtttataactggagaactgt

SEQ ID NO: 2329252 - DNA, 25 bp, Homo sapien
aaggtggtttataactggagaactg

SEQ ID NO: 2329253 - DNA, 25 bp, Homo sapien
tggactcggatgtgagttcgccacg

SEQ ID NO: 2329254 - DNA, 25 bp, Homo sapien
gagcttcgtcttaaggtcttcgtag

SEQ ID NO: 2329255 - DNA, 25 bp, Homo sapien
cacagcccggatgactcttggtcct

SEQ ID NO: 2329256 - DNA, 25 bp, Homo sapien
cagctgtcgctgtacaaccagaggg

SEQ ID NO: 2329257 - DNA, 25 bp, Homo sapien
tccaccgccgggtttgctgaagctc

SEQ ID NO: 2329258 - DNA, 25 bp, Homo sapien
catttgaggaaagtgcacagttggg

SEQ ID NO: 2329259 - DNA, 25 bp, Homo sapien
gggccatataatcccaagttcctgg

SEQ ID NO: 2329260 - DNA, 25 bp, Homo sapien
tgttttcttcgggtgcactcggcgg

SEQ ID NO: 2329261 - DNA, 25 bp, Homo sapien
aaaacagccctgttctaactcctat

SEQ ID NO: 2329262 - DNA, 25 bp, Homo sapien
agaatccacttcgtcagttagcaag

SEQ ID NO: 2329263 - DNA, 25 bp, Homo sapien
tatactactgtgaaaaggtgagtcc

SEQ ID NO: 2329264 - DNA, 25 bp, Homo sapien
tatgggctgttgctcatccctgaac

SEQ ID NO: 2329265 - DNA, 25 bp, Homo sapien
ttcaagtaacagagtcacaggtgct

SEQ ID NO: 2329266 - DNA, 25 bp, Homo sapien
caagctgtccggagcaactgcgtaa

SEQ ID NO: 2329267 - DNA, 25 bp, Homo sapien
tccttgaacccagaccatcagggag

SEQ ID NO: 2329268 - DNA, 25 bp, Homo sapien
gacaaggccatttttacctcagagg

SEQ ID NO: 2329269 - DNA, 25 bp, Homo sapien
tctgagctgcctgatgtggataaca

SEQ ID NO: 2329270 - DNA, 25 bp, Homo sapien
tattcaggaaccagcgagtctgcaa

SEQ ID NO: 2329271 - DNA, 25 bp, Homo sapien
ggaacggcatgaaagctgacccaat

SEQ ID NO: 2329272 - DNA, 25 bp, Homo sapien
tacagaatccttaatgccatgcagc

SEQ ID NO: 2329273 - DNA, 25 bp, Homo sapien
taatatagattcctggactctccag

SEQ ID NO: 2329274 - DNA, 25 bp, Homo sapien
aactagaattgttatagcaaggatg

SEQ ID NO: 2329275 - DNA, 25 bp, Homo sapien
cctaggctgaggtatcaggaagttt

SEQ ID NO: 2329276 - DNA, 25 bp, Homo sapien
tcccataggagaattgatccacctc

SEQ ID NO: 2329277 - DNA, 25 bp, Homo sapien
tgtcagacaaatcccacaaatatgc

SEQ ID NO: 2329278 - DNA, 25 bp, Homo sapien
tgtttccattgcgttctgtcagaca

SEQ ID NO: 2329279 - DNA, 25 bp, Homo sapien
caaatcccacaaatatgctgcttgg

SEQ ID NO: 2329280 - DNA, 25 bp, Homo sapien
gagatggagcgaatgccacgctctg

SEQ ID NO: 2329281 - DNA, 25 bp, Homo sapien
attggttacctctaagataatttca

SEQ ID NO: 2329282 - DNA, 25 bp, Homo sapien
cctggaggggatccattggttacct

SEQ ID NO: 2329283 - DNA, 25 bp, Homo sapien
tcaagatacacacagtagtgacatc

SEQ ID NO: 2329284 - DNA, 25 bp, Homo sapien
tgtgtttttggcaagcctttaaaca

SEQ ID NO: 2329285 - DNA, 25 bp, Homo sapien
agacccctgttgttctgccatttgg

SEQ ID NO: 2329286 - DNA, 25 bp, Homo sapien
tataccctccggttcagaaactcag

SEQ ID NO: 2329287 - DNA, 25 bp, Homo sapien
gccagacccctgttgttctgccatt

SEQ ID NO: 2329288 - DNA, 25 bp, Homo sapien
catataccctccggttcagaaactc

SEQ ID NO: 2329289 - DNA, 25 bp, Homo sapien
agagtggttagtcatgcctttggga

SEQ ID NO: 2329290 - DNA, 25 bp, Homo sapien
acacaggtcgtctaccaggagaagc

SEQ ID NO: 2329291 - DNA, 25 bp, Homo sapien
ttgaggaacacaggtcgtctaccag

SEQ ID NO: 2329292 - DNA, 25 bp, Homo sapien
tggagaatcgggataacaccgagga

SEQ ID NO: 2329293 - DNA, 25 bp, Homo sapien
aataatagtggttccaagaacagac

SEQ ID NO: 2329294 - DNA, 25 bp, Homo sapien
ggcagcaacatcatagtcttgaaat

SEQ ID NO: 2329295 - DNA, 25 bp, Homo sapien
tccatggaccccagaatatcctttt

SEQ ID NO: 2329296 - DNA, 25 bp, Homo sapien
tgccagtcccagttgaataatagtg

SEQ ID NO: 2329297 - DNA, 25 bp, Homo sapien
caaacggaggaacaatcctctgttg

SEQ ID NO: 2329298 - DNA, 25 bp, Homo sapien
cagatggcaggatgcacgtatcatc

SEQ ID NO: 2329299 - DNA, 25 bp, Homo sapien
tttctagattcttggctccaagaca

SEQ ID NO: 2329300 - DNA, 25 bp, Homo sapien
gacagaacagtcaattgaattccag

SEQ ID NO: 2329301 - DNA, 25 bp, Homo sapien
ctgtattcccggctgcttggctctt

SEQ ID NO: 2329302 - DNA, 25 bp, Homo sapien
tatgaggcctaactgatgcaggaca

SEQ ID NO: 2329303 - DNA, 25 bp, Homo sapien
gatttagggcagaaattatgaggcc

SEQ ID NO: 2329304 - DNA, 25 bp, Homo sapien
cttccttggtgatttcagacaggca

SEQ ID NO: 2329305 - DNA, 25 bp, Homo sapien
cacaaaaagcctgcatgggcactcc

SEQ ID NO: 2329306 - DNA, 25 bp, Homo sapien
tgattctgggcatcacacaaaaagc

SEQ ID NO: 2329307 - DNA, 25 bp, Homo sapien
ggaaacacttggctcgttgtgaagg

SEQ ID NO: 2329308 - DNA, 25 bp, Homo sapien
gcgtcaggcccacgacagccagtta

SEQ ID NO: 2329309 - DNA, 25 bp, Homo sapien
cagaagttgtcctcttcacggtatc

SEQ ID NO: 2329310 - DNA, 25 bp, Homo sapien
gctgcctagtcttccaccattgaaa

SEQ ID NO: 2329311 - DNA, 25 bp, Homo sapien
aggtgagtgactggcccctgtggac

SEQ ID NO: 2329312 - DNA, 25 bp, Homo sapien
cagccatagccatataacactaggt

SEQ ID NO: 2329313 - DNA, 25 bp, Homo sapien
aagcccatgagcctgctttgaggaa

SEQ ID NO: 2329314 - DNA, 25 bp, Homo sapien
cttcagtcacgtgttccatatcttc

SEQ ID NO: 2329315 - DNA, 25 bp, Homo sapien
cagttctgtaaagatggattcttca

SEQ ID NO: 2329316 - DNA, 25 bp, Homo sapien
cacgtgttccatatcttctacttgc

SEQ ID NO: 2329317 - DNA, 25 bp, Homo sapien
tccagccaagtggaaatcacacggc

SEQ ID NO: 2329318 - DNA, 25 bp, Homo sapien
tctgcttcaggatcaccatgtgagt

SEQ ID NO: 2329319 - DNA, 25 bp, Homo sapien
taggacaagttaggcagaggctctg

SEQ ID NO: 2329320 - DNA, 25 bp, Homo sapien
cctgtgcaggcctatcccttaggta

SEQ ID NO: 2329321 - DNA, 25 bp, Homo sapien
catttccttgtgtactgccaagaca

SEQ ID NO: 2329322 - DNA, 25 bp, Homo sapien
atgccacaagtaatcttcatgggcc

SEQ ID NO: 2329323 - DNA, 25 bp, Homo sapien
tgccacaagtaatcttcatgggcct

SEQ ID NO: 2329324 - DNA, 25 bp, Homo sapien
aagctcttgataccaagggttaagg

SEQ ID NO: 2329325 - DNA, 25 bp, Homo sapien
tttttaggcctgagggcctcttcca

SEQ ID NO: 2329326 - DNA, 25 bp, Homo sapien
ccatccttgtcaagggtagtgctaa

SEQ ID NO: 2329327 - DNA, 25 bp, Homo sapien
cttgtcaagggtagtgctaaccttt

SEQ ID NO: 2329328 - DNA, 25 bp, Homo sapien
tcaagggtagtgctaaccttttgtc

SEQ ID NO: 2329329 - DNA, 25 bp, Homo sapien
acttttcctgtaataatccatgttc

SEQ ID NO: 2329330 - DNA, 25 bp, Homo sapien
caaaaaactgttctgtactctatac

SEQ ID NO: 2329331 - DNA, 25 bp, Homo sapien
ctttcaatgagattaatactagagt

SEQ ID NO: 2329332 - DNA, 25 bp, Homo sapien
taagcagattaccttttctaaagga

SEQ ID NO: 2329333 - DNA, 25 bp, Homo sapien
actttgctgaccttcagtaaaattg

SEQ ID NO: 2329334 - DNA, 25 bp, Homo sapien
cagtaaaattgcaacatgaaccagt

SEQ ID NO: 2329335 - DNA, 25 bp, Homo sapien
gaaccagttgtcttggacactcttc

SEQ ID NO: 2329336 - DNA, 25 bp, Homo sapien
ttgcaacatgaaccagttgtcttgg

SEQ ID NO: 2329337 - DNA, 25 bp, Homo sapien
cagtggtttggttgacccaaggagg

SEQ ID NO: 2329338 - DNA, 25 bp, Homo sapien
caaggaggtcctggtgaccccttgc

SEQ ID NO: 2329339 - DNA, 25 bp, Homo sapien
acagtggtttggttgacccaaggag

SEQ ID NO: 2329340 - DNA, 25 bp, Homo sapien
ccaaggaggtcctggtgaccccttg

SEQ ID NO: 2329341 - DNA, 25 bp, Homo sapien
ctttcagtgctgctattatgtcttg

SEQ ID NO: 2329342 - DNA, 25 bp, Homo sapien
tgtcttgagaaggttgaacaacatt

SEQ ID NO: 2329343 - DNA, 25 bp, Homo sapien
ctattatgtcttgagaaggttgaac

SEQ ID NO: 2329344 - DNA, 25 bp, Homo sapien
tgctgctattatgtcttgagaaggt

SEQ ID NO: 2329345 - DNA, 25 bp, Homo sapien
taccatgtagtgacaaatcagttct

SEQ ID NO: 2329346 - DNA, 25 bp, Homo sapien
catgtagtgacaaatcagttcttct

SEQ ID NO: 2329347 - DNA, 25 bp, Homo sapien
gaataccatgtagtgacaaatcagt

SEQ ID NO: 2329348 - DNA, 25 bp, Homo sapien
cctgaataccatgtagtgacaaatc

SEQ ID NO: 2329349 - DNA, 25 bp, Homo sapien
tcttggagtcctaccacgcagagct

SEQ ID NO: 2329350 - DNA, 25 bp, Homo sapien
caacagggagtctggcaaccatgac

SEQ ID NO: 2329351 - DNA, 25 bp, Homo sapien
gaagactccggtcagatctagcact

SEQ ID NO: 2329352 - DNA, 25 bp, Homo sapien
gccgaggaaatgtagacgccatctt

SEQ ID NO: 2329353 - DNA, 25 bp, Homo sapien
tcccagggcctaataacaccagttg

SEQ ID NO: 2329354 - DNA, 25 bp, Homo sapien
gagagcatggtggtctgttgaaata

SEQ ID NO: 2329355 - DNA, 25 bp, Homo sapien
tcaaagtttggtggagagcatggtg

SEQ ID NO: 2329356 - DNA, 25 bp, Homo sapien
ttgaaatagtacactcctcccaggg

SEQ ID NO: 2329357 - DNA, 25 bp, Homo sapien
gctcaagggccatacatcaagtcca

SEQ ID NO: 2329358 - DNA, 25 bp, Homo sapien
gagggcctcacgatacgtggcagca

SEQ ID NO: 2329359 - DNA, 25 bp, Homo sapien
ggcagcaggcttgtattttcctaaa

SEQ ID NO: 2329360 - DNA, 25 bp, Homo sapien
gcaatttggtctttcgtcagggtcc

SEQ ID NO: 2329361 - DNA, 25 bp, Homo sapien
ttcctccactgtaactttctcagca

SEQ ID NO: 2329362 - DNA, 25 bp, Homo sapien
ccttcctccactgtaactttctcag

SEQ ID NO: 2329363 - DNA, 25 bp, Homo sapien
ctgtaactttctcagcaaaattcat

SEQ ID NO: 2329364 - DNA, 25 bp, Homo sapien
gcccttcctccactgtaactttctc

SEQ ID NO: 2329365 - DNA, 25 bp, Homo sapien
cagctccagaaagggcttatacaag

SEQ ID NO: 2329366 - DNA, 25 bp, Homo sapien
gacaccttgacatggcttggcagcc

SEQ ID NO: 2329367 - DNA, 25 bp, Homo sapien
gaaactgataactgagggaggagac

SEQ ID NO: 2329368 - DNA, 25 bp, Homo sapien
gaagactatgaaaagttctgctgct

SEQ ID NO: 2329369 - DNA, 25 bp, Homo sapien
agcagagatgcattccattttgact

SEQ ID NO: 2329370 - DNA, 25 bp, Homo sapien
gagcagagatgcattccattttgac

SEQ ID NO: 2329371 - DNA, 25 bp, Homo sapien
tatataggcacccaacaatgtctgt

SEQ ID NO: 2329372 - DNA, 25 bp, Homo sapien
tgctgacaaactgtaggttaccctc

SEQ ID NO: 2329373 - DNA, 25 bp, Homo sapien
gaaaccacagtatgttaaccagcag

SEQ ID NO: 2329374 - DNA, 25 bp, Homo sapien
tagtaaagcgtctcccacagaaaga

SEQ ID NO: 2329375 - DNA, 25 bp, Homo sapien
tggagacatagagtaagagaagctt

SEQ ID NO: 2329376 - DNA, 25 bp, Homo sapien
cagaagtagatgcagaagtacctca

SEQ ID NO: 2329377 - DNA, 25 bp, Homo sapien
cagttctgtgagcagaagtagatgc

SEQ ID NO: 2329378 - DNA, 25 bp, Homo sapien
cttggtggaccacctaggcagttct

SEQ ID NO: 2329379 - DNA, 25 bp, Homo sapien
gaagacctattccagccaacctata

SEQ ID NO: 2329380 - DNA, 25 bp, Homo sapien
ggaagcctacctgagatctgaagac

SEQ ID NO: 2329381 - DNA, 25 bp, Homo sapien
gattaaacagttcctcaatgcatga

SEQ ID NO: 2329382 - DNA, 25 bp, Homo sapien
tgggaaaagcatgcccagactagcc

SEQ ID NO: 2329383 - DNA, 25 bp, Homo sapien
ttctaatgcagctcacaagtgaaca

SEQ ID NO: 2329384 - DNA, 25 bp, Homo sapien
gatcccatttctgacaccagtctgt

SEQ ID NO: 2329385 - DNA, 25 bp, Homo sapien
ccttggatccagaggaacctatgat

SEQ ID NO: 2329386 - DNA, 25 bp, Homo sapien
tcctgggagtcactaaggttctacc

SEQ ID NO: 2329387 - DNA, 25 bp, Homo sapien
cataaacccaacaattgctctgttt

SEQ ID NO: 2329388 - DNA, 25 bp, Homo sapien
tacagcataagacttagctaaagcc

SEQ ID NO: 2329389 - DNA, 25 bp, Homo sapien
taccagtaccctgctagtaccaaga

SEQ ID NO: 2329390 - DNA, 25 bp, Homo sapien
ggattactttcaaattccatactac

SEQ ID NO: 2329391 - DNA, 25 bp, Homo sapien
agacaatgtaatgcattggcattca

SEQ ID NO: 2329392 - DNA, 25 bp, Homo sapien
catggccagacaatgtaatgcattg

SEQ ID NO: 2329393 - DNA, 25 bp, Homo sapien
gccagacaatgtaatgcattggcat

SEQ ID NO: 2329394 - DNA, 25 bp, Homo sapien
tggccagacaatgtaatgcattggc

SEQ ID NO: 2329395 - DNA, 25 bp, Homo sapien
tcatccataagatgtagacgcctct

SEQ ID NO: 2329396 - DNA, 25 bp, Homo sapien
tgattgccaaagtttgcataagtgg

SEQ ID NO: 2329397 - DNA, 25 bp, Homo sapien
aaagtttgcataagtggttggtggc

SEQ ID NO: 2329398 - DNA, 25 bp, Homo sapien
caacacagtgctctttccctcatga

SEQ ID NO: 2329399 - DNA, 25 bp, Homo sapien
ccctcatgattgtccttgtaaattg

SEQ ID NO: 2329400 - DNA, 25 bp, Homo sapien
tggttttaggaggtgcagcatttgg

SEQ ID NO: 2329401 - DNA, 25 bp, Homo sapien
gaaggtggagatttcgtgaatggga

SEQ ID NO: 2329402 - DNA, 25 bp, Homo sapien
cttataaaagagaccgtaggctggg

SEQ ID NO: 2329403 - DNA, 25 bp, Homo sapien
tgaaattcatacatcaaattccaaa

SEQ ID NO: 2329404 - DNA, 25 bp, Homo sapien
gtaaactgcgtctgtttagtggctc

SEQ ID NO: 2329405 - DNA, 25 bp, Homo sapien
tttagtggctcattgttcagaagcc

SEQ ID NO: 2329406 - DNA, 25 bp, Homo sapien
ggtggcgttgagttgttgccagctg

SEQ ID NO: 2329407 - DNA, 25 bp, Homo sapien
ccagggtggcgttgagttgttgcca

SEQ ID NO: 2329408 - DNA, 25 bp, Homo sapien
ccatggatgttaggcccagatgatt

SEQ ID NO: 2329409 - DNA, 25 bp, Homo sapien
tttggtccttccaagagcagctgga

SEQ ID NO: 2329410 - DNA, 25 bp, Homo sapien
tgaagtttctcagcaccatggatgt

SEQ ID NO: 2329411 - DNA, 25 bp, Homo sapien
tctggaagctcaatccactgtgggt

SEQ ID NO: 2329412 - DNA, 25 bp, Homo sapien
catcagaaaggttaaattgggcaaa

SEQ ID NO: 2329413 - DNA, 25 bp, Homo sapien
ttacaatgcatttatggtgtctggg

SEQ ID NO: 2329414 - DNA, 25 bp, Homo sapien
gaactttttgcattggcttgaagca

SEQ ID NO: 2329415 - DNA, 25 bp, Homo sapien
ttttgaccttaccattattccagag

SEQ ID NO: 2329416 - DNA, 25 bp, Homo sapien
aacttatatacctgggctgatggga

SEQ ID NO: 2329417 - DNA, 25 bp, Homo sapien
caatggtggaaagccgtatcttcta

SEQ ID NO: 2329418 - DNA, 25 bp, Homo sapien
tacaaatcattctgcagtagggttc

SEQ ID NO: 2329419 - DNA, 25 bp, Homo sapien
tgaaattataagctaggtacctcct

SEQ ID NO: 2329420 - DNA, 25 bp, Homo sapien
atgctaaccttctctgtatcgtttc

SEQ ID NO: 2329421 - DNA, 25 bp, Homo sapien
ttttagtatatgtgctgccgaagtg

SEQ ID NO: 2329422 - DNA, 25 bp, Homo sapien
gctaaccttctctgtatcgtttcaa

SEQ ID NO: 2329423 - DNA, 25 bp, Homo sapien
tatatgtgctgccgaagtgagcacg

SEQ ID NO: 2329424 - DNA, 25 bp, Homo sapien
tttgcagtacttaatttcccggata

SEQ ID NO: 2329425 - DNA, 25 bp, Homo sapien
ggacttcattaaagtttgcagtact

SEQ ID NO: 2329426 - DNA, 25 bp, Homo sapien
gacttcattaaagtttgcagtactt

SEQ ID NO: 2329427 - DNA, 25 bp, Homo sapien
gcagtacttaatttcccggatataa

SEQ ID NO: 2329428 - DNA, 25 bp, Homo sapien
gatgttcgtgaagctgtttaatgag

SEQ ID NO: 2329429 - DNA, 25 bp, Homo sapien
catgtaacagtggaactggagctca

SEQ ID NO: 2329430 - DNA, 25 bp, Homo sapien
gcttcaccgaggagacatgtaacag

SEQ ID NO: 2329431 - DNA, 25 bp, Homo sapien
tagaggaaggcttcaccgaggagac

SEQ ID NO: 2329432 - DNA, 25 bp, Homo sapien
ggtttgctgtcataccttagtggtg

SEQ ID NO: 2329433 - DNA, 25 bp, Homo sapien
tggaaatcccttaatgtgtactgtc

SEQ ID NO: 2329434 - DNA, 25 bp, Homo sapien
tggtagttatgacccaagtggtttc

SEQ ID NO: 2329435 - DNA, 25 bp, Homo sapien
ccaaccctgcagttatggtaacact

SEQ ID NO: 2329436 - DNA, 25 bp, Homo sapien
tttatcagtatgaggtataagttac

SEQ ID NO: 2329437 - DNA, 25 bp, Homo sapien
tataagttactaagagaatgggctt

SEQ ID NO: 2329438 - DNA, 25 bp, Homo sapien
tcatttaccagctggatatccacag

SEQ ID NO: 2329439 - DNA, 25 bp, Homo sapien
ttgagccctctttcctcgtcagtaa

SEQ ID NO: 2329440 - DNA, 25 bp, Homo sapien
tccgggtctcctccaggatatgcat

SEQ ID NO: 2329441 - DNA, 25 bp, Homo sapien
tatgtggctcacgataatgctggag

SEQ ID NO: 2329442 - DNA, 25 bp, Homo sapien
gctgggttcttaactcctccacgta

SEQ ID NO: 2329443 - DNA, 25 bp, Homo sapien
gaaagctcaggctagctggccccat

SEQ ID NO: 2329444 - DNA, 25 bp, Homo sapien
tccaacaaggccagcaaaattatag

SEQ ID NO: 2329445 - DNA, 25 bp, Homo sapien
gaacgagatgagctggtatcttttt

SEQ ID NO: 2329446 - DNA, 25 bp, Homo sapien
tataagcaaagctgaacgagatgag

SEQ ID NO: 2329447 - DNA, 25 bp, Homo sapien
gcttctgttacaatgtgatataatg

SEQ ID NO: 2329448 - DNA, 25 bp, Homo sapien
caaagctgaacgagatgagctggta

SEQ ID NO: 2329449 - DNA, 25 bp, Homo sapien
gcttgctcagccttgtcctctttaa

SEQ ID NO: 2329450 - DNA, 25 bp, Homo sapien
cttattaatcttattcttagtgata

SEQ ID NO: 2329451 - DNA, 25 bp, Homo sapien
gtgatatattcttttgcttgctcag

SEQ ID NO: 2329452 - DNA, 25 bp, Homo sapien
cagccttgtcctctttaaaaactgc

SEQ ID NO: 2329453 - DNA, 25 bp, Homo sapien
gtgctgtaaaatgccgatgtcataa

SEQ ID NO: 2329454 - DNA, 25 bp, Homo sapien
gcatcccaggcacaactggaaaacc

SEQ ID NO: 2329455 - DNA, 25 bp, Homo sapien
tcacaacgaccccagtgctgtaaaa

SEQ ID NO: 2329456 - DNA, 25 bp, Homo sapien
cataatgcagcggaccaaaatgtat

SEQ ID NO: 2329457 - DNA, 25 bp, Homo sapien
taacgctatgtttgaggaggattaa

SEQ ID NO: 2329458 - DNA, 25 bp, Homo sapien
caaagcaacagccagtttggtggta

SEQ ID NO: 2329459 - DNA, 25 bp, Homo sapien
taacaaatgtatgattaacgctatg

SEQ ID NO: 2329460 - DNA, 25 bp, Homo sapien
atgtatgattaacgctatgtttgag

SEQ ID NO: 2329461 - DNA, 25 bp, Homo sapien
tcaagaagctgatgccgctgccact

SEQ ID NO: 2329462 - DNA, 25 bp, Homo sapien
ctgatgccgctgccactgcaacttc

SEQ ID NO: 2329463 - DNA, 25 bp, Homo sapien
agctgatgccgctgccactgcaact

SEQ ID NO: 2329464 - DNA, 25 bp, Homo sapien
caagaagctgatgccgctgccactg

SEQ ID NO: 2329465 - DNA, 25 bp, Homo sapien
tgatgtttcttgtctgttcttccca

SEQ ID NO: 2329466 - DNA, 25 bp, Homo sapien
gatgtttcttgtctgttcttcccag

SEQ ID NO: 2329467 - DNA, 25 bp, Homo sapien
aggtgtctgtaatggggtgaagaag

SEQ ID NO: 2329468 - DNA, 25 bp, Homo sapien
ttttctttgttgctacgtgcaacaa

SEQ ID NO: 2329469 - DNA, 25 bp, Homo sapien
ggaaggtgtctgtaatggggtgaag

SEQ ID NO: 2329470 - DNA, 25 bp, Homo sapien
tcttttctttgttgctacgtgcaac

SEQ ID NO: 2329471 - DNA, 25 bp, Homo sapien
gtctattttcagttcgtctttagct

SEQ ID NO: 2329472 - DNA, 25 bp, Homo sapien
tctggattcccaatgccgagggagc

SEQ ID NO: 2329473 - DNA, 25 bp, Homo sapien
ggcagctttcccgtctgacttcagg

SEQ ID NO: 2329474 - DNA, 25 bp, Homo sapien
tctttacatctggattcccaatgcc

SEQ ID NO: 2329475 - DNA, 25 bp, Homo sapien
agctccgcgctaccggaagtgacgc

SEQ ID NO: 2329476 - DNA, 25 bp, Homo sapien
aagctccgcgctaccggaagtgacg

SEQ ID NO: 2329477 - DNA, 25 bp, Homo sapien
cggaagtgacgcgccgccctagacc

SEQ ID NO: 2329478 - DNA, 25 bp, Homo sapien
tacaagctccgcgctaccggaagtg

SEQ ID NO: 2329479 - DNA, 25 bp, Homo sapien
tgaggcgccgaagctgctgccgccg

SEQ ID NO: 2329480 - DNA, 25 bp, Homo sapien
gcgccgaagctgctgccgccgccat

SEQ ID NO: 2329481 - DNA, 25 bp, Homo sapien
aggcgccgaagctgctgccgccgcc

SEQ ID NO: 2329482 - DNA, 25 bp, Homo sapien
ctgctgaggcgccgaagctgctgcc

SEQ ID NO: 2329483 - DNA, 25 bp, Homo sapien
ggcgggtgctctccgtcactggtcc

SEQ ID NO: 2329484 - DNA, 25 bp, Homo sapien
taacggcggagctgagagaaaagct

SEQ ID NO: 2329485 - DNA, 25 bp, Homo sapien
tccgtcactggtccgggagacaggc

SEQ ID NO: 2329486 - DNA, 25 bp, Homo sapien
ggagacaggccgtaacggcggagct

SEQ ID NO: 2329487 - DNA, 25 bp, Homo sapien
tgctgctcttcctctcgaagcttct

SEQ ID NO: 2329488 - DNA, 25 bp, Homo sapien
ctgttgctgctcttcctctcgaagc

SEQ ID NO: 2329489 - DNA, 25 bp, Homo sapien
gcttcttcagcttcttgaggtagac

SEQ ID NO: 2329490 - DNA, 25 bp, Homo sapien
gttgctgctcttcctctcgaagctt

SEQ ID NO: 2329491 - DNA, 25 bp, Homo sapien
cgtcttgttgccgcggccccctgac

SEQ ID NO: 2329492 - DNA, 25 bp, Homo sapien
tgttccgcgtcttgttgccgcggcc

SEQ ID NO: 2329493 - DNA, 25 bp, Homo sapien
ttccgcgtcttgttgccgcggcccc

SEQ ID NO: 2329494 - DNA, 25 bp, Homo sapien
ccgcgtcttgttgccgcggccccct

SEQ ID NO: 2329495 - DNA, 25 bp, Homo sapien
gtggcggctgccgtgttattgttat

SEQ ID NO: 2329496 - DNA, 25 bp, Homo sapien
cggctgcgaccgtggcggctgccgt

SEQ ID NO: 2329497 - DNA, 25 bp, Homo sapien
ggcggctgccgtgttattgttatta

SEQ ID NO: 2329498 - DNA, 25 bp, Homo sapien
tggtcccgcggctgcgaccgtggcg

SEQ ID NO: 2329499 - DNA, 25 bp, Homo sapien
gaggccgagattcggcacaggcccc

SEQ ID NO: 2329500 - DNA, 25 bp, Homo sapien
ccccaggagtccgtaagtaggagag

SEQ ID NO: 2329501 - DNA, 25 bp, Homo sapien
gggccagaggccgagattcggcaca

SEQ ID NO: 2329502 - DNA, 25 bp, Homo sapien
taagtaggagaggtcgcccgagacc

SEQ ID NO: 2329503 - DNA, 25 bp, Homo sapien
tttgagcccgcggtactggagcgaa

SEQ ID NO: 2329504 - DNA, 25 bp, Homo sapien
ggactggcctccacgtccgactcgt

SEQ ID NO: 2329505 - DNA, 25 bp, Homo sapien
gctgttagtcacctcgctggcggcc

SEQ ID NO: 2329506 - DNA, 25 bp, Homo sapien
tccttcgctctgcagagttgctgtt

SEQ ID NO: 2329507 - DNA, 25 bp, Homo sapien
ctcgcccagagcggctcctcggtct

SEQ ID NO: 2329508 - DNA, 25 bp, Homo sapien
tccccggcggggtctgcagctcggg

SEQ ID NO: 2329509 - DNA, 25 bp, Homo sapien
tcgtcctccactgctccatctttcc

SEQ ID NO: 2329510 - DNA, 25 bp, Homo sapien
tcggtctccgggtccctctcctcac

SEQ ID NO: 2329511 - DNA, 25 bp, Homo sapien
aggggacaagccggctgccattcac

SEQ ID NO: 2329512 - DNA, 25 bp, Homo sapien
tgtaggggacaagccggctgccatt

SEQ ID NO: 2329513 - DNA, 25 bp, Homo sapien
ctgtaggggacaagccggctgccat

SEQ ID NO: 2329514 - DNA, 25 bp, Homo sapien
taggggacaagccggctgccattca

SEQ ID NO: 2329515 - DNA, 25 bp, Homo sapien
cctctgagtccgaatagttttcccg

SEQ ID NO: 2329516 - DNA, 25 bp, Homo sapien
tctgagtccgaatagttttcccggc

SEQ ID NO: 2329517 - DNA, 25 bp, Homo sapien
cttcctctgagtccgaatagttttc

SEQ ID NO: 2329518 - DNA, 25 bp, Homo sapien
tgagtccgaatagttttcccggcag

SEQ ID NO: 2329519 - DNA, 25 bp, Homo sapien
gcttactatgggttcgtctgggccg

SEQ ID NO: 2329520 - DNA, 25 bp, Homo sapien
gccctgtcattcatcgcgagtcctc

SEQ ID NO: 2329521 - DNA, 25 bp, Homo sapien
gtctgggccgatgccgggaaaggga

SEQ ID NO: 2329522 - DNA, 25 bp, Homo sapien
tgccgccggccgatttagcagtcag

SEQ ID NO: 2329523 - DNA, 25 bp, Homo sapien
ttcgaggtttcggctcctgtctaga

SEQ ID NO: 2329524 - DNA, 25 bp, Homo sapien
tcgaggtttcggctcctgtctagac

SEQ ID NO: 2329525 - DNA, 25 bp, Homo sapien
aagggagcctgttgacgaatccaag

SEQ ID NO: 2329526 - DNA, 25 bp, Homo sapien
gtgggcactgaaactccctgttggg

SEQ ID NO: 2329527 - DNA, 25 bp, Homo sapien
gaaacatcgacaagtagtgggcact

SEQ ID NO: 2329528 - DNA, 25 bp, Homo sapien
cattcctaggtaagtcagtcccagt

SEQ ID NO: 2329529 - DNA, 25 bp, Homo sapien
tttaaaaccagccatatgacatcat

SEQ ID NO: 2329530 - DNA, 25 bp, Homo sapien
gagaattgtcacatatacaaatgag

SEQ ID NO: 2329531 - DNA, 25 bp, Homo sapien
tacaaatgagttttactaacaagct

SEQ ID NO: 2329532 - DNA, 25 bp, Homo sapien
tcacaatacatcatgcagaaaactt

SEQ ID NO: 2329533 - DNA, 25 bp, Homo sapien
agtaactggcatctgcgcaaatagt

SEQ ID NO: 2329534 - DNA, 25 bp, Homo sapien
catctgcgcaaatagtctttcaggg

SEQ ID NO: 2329535 - DNA, 25 bp, Homo sapien
ctggcatctgcgcaaatagtctttc

SEQ ID NO: 2329536 - DNA, 25 bp, Homo sapien
taactggcatctgcgcaaatagtct

SEQ ID NO: 2329537 - DNA, 25 bp, Homo sapien
taataccacaaaatatttaatccga

SEQ ID NO: 2329538 - DNA, 25 bp, Homo sapien
atttaatccgaatttatgcatacag

SEQ ID NO: 2329539 - DNA, 25 bp, Homo sapien
tattagaatcacaactcaatttgga

SEQ ID NO: 2329540 - DNA, 25 bp, Homo sapien
agagctattacattgcctattagaa

SEQ ID NO: 2329541 - DNA, 25 bp, Homo sapien
gtgtttaagggcagagatactttga

SEQ ID NO: 2329542 - DNA, 25 bp, Homo sapien
cctacagtcatttagcaagtaaata

SEQ ID NO: 2329543 - DNA, 25 bp, Homo sapien
gacaatgaacacacctgcctacagt

SEQ ID NO: 2329544 - DNA, 25 bp, Homo sapien
gcaagtaaatagtaggacctggaaa

SEQ ID NO: 2329545 - DNA, 25 bp, Homo sapien
tatgcaaatccctggcattcacggg

SEQ ID NO: 2329546 - DNA, 25 bp, Homo sapien
cccaggttctctgatagctatgcca

SEQ ID NO: 2329547 - DNA, 25 bp, Homo sapien
tgaggtttacaatggctaagcaact

SEQ ID NO: 2329548 - DNA, 25 bp, Homo sapien
tgtatcctcaaactagtctccgtgg

SEQ ID NO: 2329549 - DNA, 25 bp, Homo sapien
aaggttccaagccatagctcagagg

SEQ ID NO: 2329550 - DNA, 25 bp, Homo sapien
tattcagggcagaacagcaattggt

SEQ ID NO: 2329551 - DNA, 25 bp, Homo sapien
aaatctatgttagggcagggcacgg

SEQ ID NO: 2329552 - DNA, 25 bp, Homo sapien
gaaagcatttgtgatcccatgggag

SEQ ID NO: 2329553 - DNA, 25 bp, Homo sapien
gaattgtaggcaatccagctactac

SEQ ID NO: 2329554 - DNA, 25 bp, Homo sapien
ttctcagtccacagttgaaaactac

SEQ ID NO: 2329555 - DNA, 25 bp, Homo sapien
cagacaaactttataatgggcacag

SEQ ID NO: 2329556 - DNA, 25 bp, Homo sapien
cgagtaattacttgaggctagcctg

SEQ ID NO: 2329557 - DNA, 25 bp, Homo sapien
tattcattcagtgtatcctcccttc

SEQ ID NO: 2329558 - DNA, 25 bp, Homo sapien
ttattcattcagtgtatcctccctt

SEQ ID NO: 2329559 - DNA, 25 bp, Homo sapien
gggattcctagaatatctcaaaaga

SEQ ID NO: 2329560 - DNA, 25 bp, Homo sapien
gagatgttaaactaccttattcagt

SEQ ID NO: 2329561 - DNA, 25 bp, Homo sapien
gcccagcctccattaggtctttctc

SEQ ID NO: 2329562 - DNA, 25 bp, Homo sapien
tctcaccttgaactaacttcggtag

SEQ ID NO: 2329563 - DNA, 25 bp, Homo sapien
atatatctatataatccaggccaca

SEQ ID NO: 2329564 - DNA, 25 bp, Homo sapien
ttcagatacctgtaaacttttatat

SEQ ID NO: 2329565 - DNA, 25 bp, Homo sapien
tataatccaggccacaactaagact

SEQ ID NO: 2329566 - DNA, 25 bp, Homo sapien
gccacaactaagactaactaagact

SEQ ID NO: 2329567 - DNA, 25 bp, Homo sapien
gtctcagtattaagcaattccaaat

SEQ ID NO: 2329568 - DNA, 25 bp, Homo sapien
aaatgtttacggctgaatatgtagc

SEQ ID NO: 2329569 - DNA, 25 bp, Homo sapien
gcacctctcagggtttttattcaga

SEQ ID NO: 2329570 - DNA, 25 bp, Homo sapien
gaattaagtctcagtattaagcaat

SEQ ID NO: 2329571 - DNA, 25 bp, Homo sapien
tcacaatcattgagatcaggtgctc

SEQ ID NO: 2329572 - DNA, 25 bp, Homo sapien
gacaagtattagcatcacttacgaa

SEQ ID NO: 2329573 - DNA, 25 bp, Homo sapien
gaaatgccagcatgtactttgctaa

SEQ ID NO: 2329574 - DNA, 25 bp, Homo sapien
gatacctaccttatacagttgttgt

SEQ ID NO: 2329575 - DNA, 25 bp, Homo sapien
ttgtatttttccaaatgtttcacca

SEQ ID NO: 2329576 - DNA, 25 bp, Homo sapien
tgtatttttccaaatgtttcaccaa

SEQ ID NO: 2329577 - DNA, 25 bp, Homo sapien
caaaattatcagtattatgatcgtt

SEQ ID NO: 2329578 - DNA, 25 bp, Homo sapien
aattatcagtattatgatcgtttac

SEQ ID NO: 2329579 - DNA, 25 bp, Homo sapien
atcagtattatgatcgtttacttac

SEQ ID NO: 2329580 - DNA, 25 bp, Homo sapien
cacaaaattatcagtattatgatcg

SEQ ID NO: 2329581 - DNA, 25 bp, Homo sapien
taggcatgccaatatgcagaagatc

SEQ ID NO: 2329582 - DNA, 25 bp, Homo sapien
gatccaaagaggtaaaatgagggca

SEQ ID NO: 2329583 - DNA, 25 bp, Homo sapien
cttttgatggtcgaataggcatgcc

SEQ ID NO: 2329584 - DNA, 25 bp, Homo sapien
tccaacaactacaggcaacaggcat

SEQ ID NO: 2329585 - DNA, 25 bp, Homo sapien
acagtttgattacactcttcttcca

SEQ ID NO: 2329586 - DNA, 25 bp, Homo sapien
tttacagtttgattacactcttctt

SEQ ID NO: 2329587 - DNA, 25 bp, Homo sapien
tggtttacagtttgattacactctt

SEQ ID NO: 2329588 - DNA, 25 bp, Homo sapien
cagtttgattacactcttcttccat

SEQ ID NO: 2329589 - DNA, 25 bp, Homo sapien
caagctgtgccaatcgatcatgaag

SEQ ID NO: 2329590 - DNA, 25 bp, Homo sapien
gccaatcgatcatgaagcttatata

SEQ ID NO: 2329591 - DNA, 25 bp, Homo sapien
tgcaagctgtgccaatcgatcatga

SEQ ID NO: 2329592 - DNA, 25 bp, Homo sapien
tgtgccaatcgatcatgaagcttat

SEQ ID NO: 2329593 - DNA, 25 bp, Homo sapien
gaaagcgttctttgactagaactgc

SEQ ID NO: 2329594 - DNA, 25 bp, Homo sapien
tctttgactagaactgccacattca

SEQ ID NO: 2329595 - DNA, 25 bp, Homo sapien
tcttgaacagaaagcgttctttgac

SEQ ID NO: 2329596 - DNA, 25 bp, Homo sapien
ctagaactgccacattcatgatctc

SEQ ID NO: 2329597 - DNA, 25 bp, Homo sapien
cacaaccacagaaaagatatctaag

SEQ ID NO: 2329598 - DNA, 25 bp, Homo sapien
ttggatagcttatggcagctccaga

SEQ ID NO: 2329599 - DNA, 25 bp, Homo sapien
ctaagaaatccagaatgtctacaca

SEQ ID NO: 2329600 - DNA, 25 bp, Homo sapien
agagttggatagcttatggcagctc

SEQ ID NO: 2329601 - DNA, 25 bp, Homo sapien
ttgacaagcataatcacaggagact

SEQ ID NO: 2329602 - DNA, 25 bp, Homo sapien
tgacatcagcagaataggaagcccc

SEQ ID NO: 2329603 - DNA, 25 bp, Homo sapien
taaaaggttcctgcacctaggcaag

SEQ ID NO: 2329604 - DNA, 25 bp, Homo sapien
cagggcagtgcaatagagaggaaac

SEQ ID NO: 2329605 - DNA, 25 bp, Homo sapien
gatctacggtattacctctcagaga

SEQ ID NO: 2329606 - DNA, 25 bp, Homo sapien
tcccggaagtaatccccagatacca

SEQ ID NO: 2329607 - DNA, 25 bp, Homo sapien
tgctccaggaatttatgaccaatca

SEQ ID NO: 2329608 - DNA, 25 bp, Homo sapien
cactgaatgggataagatagtccta

SEQ ID NO: 2329609 - DNA, 25 bp, Homo sapien
aataatttcaggcaattagtttcaa

SEQ ID NO: 2329610 - DNA, 25 bp, Homo sapien
atgcaaaacccatgtatacgtaggg

SEQ ID NO: 2329611 - DNA, 25 bp, Homo sapien
atatgtactcatatgagtagcacaa

SEQ ID NO: 2329612 - DNA, 25 bp, Homo sapien
ccatgtatacgtagggccaactgta

SEQ ID NO: 2329613 - DNA, 25 bp, Homo sapien
tgcctggctcgtagaggaaaaaatg

SEQ ID NO: 2329614 - DNA, 25 bp, Homo sapien
cagggctcaagcacagtcttgtgcc

SEQ ID NO: 2329615 - DNA, 25 bp, Homo sapien
gggctcaagcacagtcttgtgcctc

SEQ ID NO: 2329616 - DNA, 25 bp, Homo sapien
cactgtgcctggctcgtagaggaaa

SEQ ID NO: 2329617 - DNA, 25 bp, Homo sapien
tgtgtcaatgtcagtttacatggaa

SEQ ID NO: 2329618 - DNA, 25 bp, Homo sapien
tataaatgtatatctcccacaaaca

SEQ ID NO: 2329619 - DNA, 25 bp, Homo sapien
gccagagtcctcagtaattataggg

SEQ ID NO: 2329620 - DNA, 25 bp, Homo sapien
gcttaagaactgctatgtgtgggta

SEQ ID NO: 2329621 - DNA, 25 bp, Homo sapien
taaatataccttcatattcaggacc

SEQ ID NO: 2329622 - DNA, 25 bp, Homo sapien
aatataccttcatattcaggaccta

SEQ ID NO: 2329623 - DNA, 25 bp, Homo sapien
aaatataccttcatattcaggacct

SEQ ID NO: 2329624 - DNA, 25 bp, Homo sapien
atataccttcatattcaggacctaa

SEQ ID NO: 2329625 - DNA, 25 bp, Homo sapien
cagtaacaaaagcacgtcgaaaacg

SEQ ID NO: 2329626 - DNA, 25 bp, Homo sapien
ggtcttgtggactgtaaaaactgca

SEQ ID NO: 2329627 - DNA, 25 bp, Homo sapien
aaactgcacatcagttatatttgtc

SEQ ID NO: 2329628 - DNA, 25 bp, Homo sapien
aaagacatcagtggtcttgtggact

SEQ ID NO: 2329629 - DNA, 25 bp, Homo sapien
tgtaacgcagaacgacacaaaccat

SEQ ID NO: 2329630 - DNA, 25 bp, Homo sapien
taatctttaccaccatatcatacat

SEQ ID NO: 2329631 - DNA, 25 bp, Homo sapien
tttaccaccatatcatacatctgcc

SEQ ID NO: 2329632 - DNA, 25 bp, Homo sapien
tcttcttttgtccatcgatatttca

SEQ ID NO: 2329633 - DNA, 25 bp, Homo sapien
tgtcatgaggctgtattaaggaatc

SEQ ID NO: 2329634 - DNA, 25 bp, Homo sapien
ggcttcattatgacttcgtaaaaca

SEQ ID NO: 2329635 - DNA, 25 bp, Homo sapien
gaatcgcgtacatgtggaataggca

SEQ ID NO: 2329636 - DNA, 25 bp, Homo sapien
gaataggcatgtaaggttgtaaatc

SEQ ID NO: 2329637 - DNA, 25 bp, Homo sapien
attttctgatttacttgaactcata

SEQ ID NO: 2329638 - DNA, 25 bp, Homo sapien
gcagaaagcacttaaattttctgat

SEQ ID NO: 2329639 - DNA, 25 bp, Homo sapien
atttacttgaactcataatgctttg

SEQ ID NO: 2329640 - DNA, 25 bp, Homo sapien
taattttcaatactgcagaaagcac

SEQ ID NO: 2329641 - DNA, 25 bp, Homo sapien
gagaatgacttagaaatccaggtgt

SEQ ID NO: 2329642 - DNA, 25 bp, Homo sapien
aataagatggagactaacaacaaag

SEQ ID NO: 2329643 - DNA, 25 bp, Homo sapien
tcaagaatgcctaggaatgagaatg

SEQ ID NO: 2329644 - DNA, 25 bp, Homo sapien
gatggagactaacaacaaagaatca

SEQ ID NO: 2329645 - DNA, 25 bp, Homo sapien
tttccagagctagagcacaaacatc

SEQ ID NO: 2329646 - DNA, 25 bp, Homo sapien
aatttccagagctagagcacaaaca

SEQ ID NO: 2329647 - DNA, 25 bp, Homo sapien
atttccagagctagagcacaaacat

SEQ ID NO: 2329648 - DNA, 25 bp, Homo sapien
ggtaatagttaactctagctgttct

SEQ ID NO: 2329649 - DNA, 25 bp, Homo sapien
ttgaaatattagtatctgaggtaat

SEQ ID NO: 2329650 - DNA, 25 bp, Homo sapien
aatggcaaatttactatcatcttgg

SEQ ID NO: 2329651 - DNA, 25 bp, Homo sapien
gcaaatttactatcatcttggcttg

SEQ ID NO: 2329652 - DNA, 25 bp, Homo sapien
cattagcagcaaggaagtcaacagc

SEQ ID NO: 2329653 - DNA, 25 bp, Homo sapien
cctattcttcgtgtttccgtgcgaa

SEQ ID NO: 2329654 - DNA, 25 bp, Homo sapien
atgcagaaggctggatccaccgcca

SEQ ID NO: 2329655 - DNA, 25 bp, Homo sapien
tccgtgcgaactctagactcattag

SEQ ID NO: 2329656 - DNA, 25 bp, Homo sapien
taatgatgtgggtaagacaggccaa

SEQ ID NO: 2329657 - DNA, 25 bp, Homo sapien
ccaacagtgcaagtgacaagcggat

SEQ ID NO: 2329658 - DNA, 25 bp, Homo sapien
tgattgcttgtacacagctcctggg

SEQ ID NO: 2329659 - DNA, 25 bp, Homo sapien
tatgtggagactcaggtaaaagcag

SEQ ID NO: 2329660 - DNA, 25 bp, Homo sapien
taacgggatcaaacatattccgaat

SEQ ID NO: 2329661 - DNA, 25 bp, Homo sapien
acatattccgaatctttagacacgg

SEQ ID NO: 2329662 - DNA, 25 bp, Homo sapien
tccgaatctttagacacggtgtcaa

SEQ ID NO: 2329663 - DNA, 25 bp, Homo sapien
cacggtgtcaaactatttggtggtg

SEQ ID NO: 2329664 - DNA, 25 bp, Homo sapien
tatcactggatagataagcagtgcc

SEQ ID NO: 2329665 - DNA, 25 bp, Homo sapien
gagatttgaaatttgtaagcagcag

SEQ ID NO: 2329666 - DNA, 25 bp, Homo sapien
tctctggaagcatatgttgttggaa

SEQ ID NO: 2329667 - DNA, 25 bp, Homo sapien
ttatattgacaagtggagacaggac

SEQ ID NO: 2329668 - DNA, 25 bp, Homo sapien
aatttttgtctactgcaatgtgaac

SEQ ID NO: 2329669 - DNA, 25 bp, Homo sapien
gaacaatgccatcattatcactgca

SEQ ID NO: 2329670 - DNA, 25 bp, Homo sapien
tgtgaacaatgccatcattatcact

SEQ ID NO: 2329671 - DNA, 25 bp, Homo sapien
atttttgtctactgcaatgtgaaca

SEQ ID NO: 2329672 - DNA, 25 bp, Homo sapien
aaagcctttccagcatattctggag

SEQ ID NO: 2329673 - DNA, 25 bp, Homo sapien
aaccaagagccatgcaatgctttaa

SEQ ID NO: 2329674 - DNA, 25 bp, Homo sapien
tattctggagacagacatttaacat

SEQ ID NO: 2329675 - DNA, 25 bp, Homo sapien
gctttaaaagcctttccagcatatt

SEQ ID NO: 2329676 - DNA, 25 bp, Homo sapien
tagatcagtaaaactgtttaatatt

SEQ ID NO: 2329677 - DNA, 25 bp, Homo sapien
actgtttaatatttgcagaaaatta

SEQ ID NO: 2329678 - DNA, 25 bp, Homo sapien
tattttagatcagtaaaactgttta

SEQ ID NO: 2329679 - DNA, 25 bp, Homo sapien
aataatattttagatcagtaaaact

SEQ ID NO: 2329680 - DNA, 25 bp, Homo sapien
gggaaagcgatggtggtatctatct

SEQ ID NO: 2329681 - DNA, 25 bp, Homo sapien
tgatggcttcaatggagtgttggaa

SEQ ID NO: 2329682 - DNA, 25 bp, Homo sapien
gacgaagatgagacatggagttcat

SEQ ID NO: 2329683 - DNA, 25 bp, Homo sapien
ttaggccagtccgaagacgaagatg

SEQ ID NO: 2329684 - DNA, 25 bp, Homo sapien
gaaattatgggactacaagaagcct

SEQ ID NO: 2329685 - DNA, 25 bp, Homo sapien
tgtaggaactatgcaggtgactgta

SEQ ID NO: 2329686 - DNA, 25 bp, Homo sapien
tattccagccgtagcaaatgaatcg

SEQ ID NO: 2329687 - DNA, 25 bp, Homo sapien
aatgtattggcttaactgagctcca

SEQ ID NO: 2329688 - DNA, 25 bp, Homo sapien
caatggtactatgtcatggccctag

SEQ ID NO: 2329689 - DNA, 25 bp, Homo sapien
gcaagttcatgctgcaaacccaacg

SEQ ID NO: 2329690 - DNA, 25 bp, Homo sapien
acaggtaaggcacaatagggctttc

SEQ ID NO: 2329691 - DNA, 25 bp, Homo sapien
tgaggcacaaagcaacagtcaatcg

SEQ ID NO: 2329692 - DNA, 25 bp, Homo sapien
tattttcacacgttagcatctgaga

SEQ ID NO: 2329693 - DNA, 25 bp, Homo sapien
gatcttggtcggcttaacagtttca

SEQ ID NO: 2329694 - DNA, 25 bp, Homo sapien
tagttattatacacattcccatctg

SEQ ID NO: 2329695 - DNA, 25 bp, Homo sapien
tcaaaggcgaccttttaaaatgcca

SEQ ID NO: 2329696 - DNA, 25 bp, Homo sapien
ttgtcagatcatcctttgtaggcat

SEQ ID NO: 2329697 - DNA, 25 bp, Homo sapien
ctggcttgtcagatcatcctttgta

SEQ ID NO: 2329698 - DNA, 25 bp, Homo sapien
ggcttgtcagatcatcctttgtagg

SEQ ID NO: 2329699 - DNA, 25 bp, Homo sapien
gcttgtcagatcatcctttgtaggc

SEQ ID NO: 2329700 - DNA, 25 bp, Homo sapien
ttccacctgagaccgctgaaggagt

SEQ ID NO: 2329701 - DNA, 25 bp, Homo sapien
cggacaaaccaacacgaagagaccg

SEQ ID NO: 2329702 - DNA, 25 bp, Homo sapien
gttccacctgagaccgctgaaggag

SEQ ID NO: 2329703 - DNA, 25 bp, Homo sapien
acgaagagaccggacagcgagccag

SEQ ID NO: 2329704 - DNA, 25 bp, Homo sapien
cggcgggaggcatgacgggaaattc

SEQ ID NO: 2329705 - DNA, 25 bp, Homo sapien
cgggcagccgagtccaaatatgagc

SEQ ID NO: 2329706 - DNA, 25 bp, Homo sapien
catgacgggaaattcctgggcacgg

SEQ ID NO: 2329707 - DNA, 25 bp, Homo sapien
aatatgagcataggagacgagcgag

SEQ ID NO: 2329708 - DNA, 25 bp, Homo sapien
cagccgccgccggtgtccgaacctc

SEQ ID NO: 2329709 - DNA, 25 bp, Homo sapien
cgccgccggtgtccgaacctcgctc

SEQ ID NO: 2329710 - DNA, 25 bp, Homo sapien
agccgccgccggtgtccgaacctcg

SEQ ID NO: 2329711 - DNA, 25 bp, Homo sapien
gccggtgtccgaacctcgctccctc

SEQ ID NO: 2329712 - DNA, 25 bp, Homo sapien
aggcagagcgagagggggcgcggga

SEQ ID NO: 2329713 - DNA, 25 bp, Homo sapien
gactgcgcacttcccagagccgcgg

SEQ ID NO: 2329714 - DNA, 25 bp, Homo sapien
gagaggcagagcgagagggggcgcg

SEQ ID NO: 2329715 - DNA, 25 bp, Homo sapien
gcgcgggagggtccgccgcgggctc

SEQ ID NO: 2329716 - DNA, 25 bp, Homo sapien
cgttcggcccctcaccgctggcgcg

SEQ ID NO: 2329717 - DNA, 25 bp, Homo sapien
ttcggcccctcaccgctggcgcggg

SEQ ID NO: 2329718 - DNA, 25 bp, Homo sapien
gctggcgcggggcgcaacccttctg

SEQ ID NO: 2329719 - DNA, 25 bp, Homo sapien
tggcgcggggcgcaacccttctgct

SEQ ID NO: 2329720 - DNA, 25 bp, Homo sapien
tggaatgctcacagataactagcct

SEQ ID NO: 2329721 - DNA, 25 bp, Homo sapien
gctaaatcagataggtagatccaat

SEQ ID NO: 2329722 - DNA, 25 bp, Homo sapien
tagccttcccaaccacagaaatgtt

SEQ ID NO: 2329723 - DNA, 25 bp, Homo sapien
caaaaggtgataacccattataggc

SEQ ID NO: 2329724 - DNA, 25 bp, Homo sapien
cacctgattctagggagttcgaggc

SEQ ID NO: 2329725 - DNA, 25 bp, Homo sapien
ggtgattcactgacatatggaattt

SEQ ID NO: 2329726 - DNA, 25 bp, Homo sapien
aaaaaaaattctaggtgattcactg

SEQ ID NO: 2329727 - DNA, 25 bp, Homo sapien
cctgattctagggagttcgaggctg

SEQ ID NO: 2329728 - DNA, 25 bp, Homo sapien
actacaagcatgcaacacaatgccc

SEQ ID NO: 2329729 - DNA, 25 bp, Homo sapien
gactacaagcatgcaacacaatgcc

SEQ ID NO: 2329730 - DNA, 25 bp, Homo sapien
gcactgatttgcttagatctctccc

SEQ ID NO: 2329731 - DNA, 25 bp, Homo sapien
cacatcccctataacaactttcagg

SEQ ID NO: 2329732 - DNA, 25 bp, Homo sapien
tagcaccaaatacgctatcacatcc

SEQ ID NO: 2329733 - DNA, 25 bp, Homo sapien
gcctccaattctagtccccagtata

SEQ ID NO: 2329734 - DNA, 25 bp, Homo sapien
ctccatgtcttcgttccagatcctt

SEQ ID NO: 2329735 - DNA, 25 bp, Homo sapien
gtcttcgttccagatccttactatc

SEQ ID NO: 2329736 - DNA, 25 bp, Homo sapien
ccatgtcttcgttccagatccttac

SEQ ID NO: 2329737 - DNA, 25 bp, Homo sapien
catgtcttcgttccagatccttact

SEQ ID NO: 2329738 - DNA, 25 bp, Homo sapien
atttttgtaataggtcagctgtttc

SEQ ID NO: 2329739 - DNA, 25 bp, Homo sapien
catactaacatggtggtaatttttg

SEQ ID NO: 2329740 - DNA, 25 bp, Homo sapien
cacactcctgccatactaacatggt

SEQ ID NO: 2329741 - DNA, 25 bp, Homo sapien
taatttttgtaataggtcagctgtt

SEQ ID NO: 2329742 - DNA, 25 bp, Homo sapien
cctgaactgtctgagtgaaggccat

SEQ ID NO: 2329743 - DNA, 25 bp, Homo sapien
aattcggcagctttcacccgtttgt

SEQ ID NO: 2329744 - DNA, 25 bp, Homo sapien
cccgtttgtattccctgaactgtct

SEQ ID NO: 2329745 - DNA, 25 bp, Homo sapien
aaattgaagtttcaattcggcagct

SEQ ID NO: 2329746 - DNA, 25 bp, Homo sapien
caaagatgcattctacaattaaaac

SEQ ID NO: 2329747 - DNA, 25 bp, Homo sapien
agaacaaagatgcattctacaatta

SEQ ID NO: 2329748 - DNA, 25 bp, Homo sapien
agggaaagaacaaagatgcattcta

SEQ ID NO: 2329749 - DNA, 25 bp, Homo sapien
ctgcaggtcagggaaagaacaaaga

SEQ ID NO: 2329750 - DNA, 25 bp, Homo sapien
tggcttatgtcaaagccagcgcaca

SEQ ID NO: 2329751 - DNA, 25 bp, Homo sapien
acagctgaccataaaacgtcttcct

SEQ ID NO: 2329752 - DNA, 25 bp, Homo sapien
ttagcaaagctgcagtctcactgtg

SEQ ID NO: 2329753 - DNA, 25 bp, Homo sapien
aaccacggtggccatctggcttatg

SEQ ID NO: 2329754 - DNA, 25 bp, Homo sapien
caccaacaaaacgagaagcaaagaa

SEQ ID NO: 2329755 - DNA, 25 bp, Homo sapien
cttcaccaacaaaacgagaagcaaa

SEQ ID NO: 2329756 - DNA, 25 bp, Homo sapien
ccaacaaaacgagaagcaaagaaca

SEQ ID NO: 2329757 - DNA, 25 bp, Homo sapien
caacaaaacgagaagcaaagaacag

SEQ ID NO: 2329758 - DNA, 25 bp, Homo sapien
tcaccaaatgcagcaggttgaatgc

SEQ ID NO: 2329759 - DNA, 25 bp, Homo sapien
caaatgcagcaggttgaatgcagac

SEQ ID NO: 2329760 - DNA, 25 bp, Homo sapien
ctctttgtcaccaaatgcagcaggt

SEQ ID NO: 2329761 - DNA, 25 bp, Homo sapien
ctttgtcaccaaatgcagcaggttg

SEQ ID NO: 2329762 - DNA, 25 bp, Homo sapien
taaagtgtatttgtgagtcccatga

SEQ ID NO: 2329763 - DNA, 25 bp, Homo sapien
gatcagaacaacaggtcaagatggt

SEQ ID NO: 2329764 - DNA, 25 bp, Homo sapien
aaactagtggtgcttgaatggtcga

SEQ ID NO: 2329765 - DNA, 25 bp, Homo sapien
tatgtagacacccaaagactgactt

SEQ ID NO: 2329766 - DNA, 25 bp, Homo sapien
gccgctgattcatggagttctagtt

SEQ ID NO: 2329767 - DNA, 25 bp, Homo sapien
cctcacttggctgaaagctatcatg

SEQ ID NO: 2329768 - DNA, 25 bp, Homo sapien
gacttctctgtataagttcccagca

SEQ ID NO: 2329769 - DNA, 25 bp, Homo sapien
gctctggagccataagccgctgatt

SEQ ID NO: 2329770 - DNA, 25 bp, Homo sapien
tatgaaagaatgtaaacctagtgcc

SEQ ID NO: 2329771 - DNA, 25 bp, Homo sapien
gaaacacggtgttctgatccgagtt

SEQ ID NO: 2329772 - DNA, 25 bp, Homo sapien
cgagttttagattgggttcatgtgc

SEQ ID NO: 2329773 - DNA, 25 bp, Homo sapien
gagggcattaatctgaacacaaggg

SEQ ID NO: 2329774 - DNA, 25 bp, Homo sapien
tctggtaattagatgctgcacagca

SEQ ID NO: 2329775 - DNA, 25 bp, Homo sapien
aaaatatagctgcatcagagtactc

SEQ ID NO: 2329776 - DNA, 25 bp, Homo sapien
gcctatatgattcctccaaagtgca

SEQ ID NO: 2329777 - DNA, 25 bp, Homo sapien
gattcatgcttaacagtcaacatgc

SEQ ID NO: 2329778 - DNA, 25 bp, Homo sapien
gatgtcaggacacttttgcttcagt

SEQ ID NO: 2329779 - DNA, 25 bp, Homo sapien
ttccacaaaactagagctgcagggt

SEQ ID NO: 2329780 - DNA, 25 bp, Homo sapien
ccagcaggagtaagggaagacagac

SEQ ID NO: 2329781 - DNA, 25 bp, Homo sapien
ctgcagggtttactttgaggaccac

SEQ ID NO: 2329782 - DNA, 25 bp, Homo sapien
cctggcctgcaaagatccacaggca

SEQ ID NO: 2329783 - DNA, 25 bp, Homo sapien
ctggcctgcaaagatccacaggcac

SEQ ID NO: 2329784 - DNA, 25 bp, Homo sapien
ggagcagtgacaatatgctacagcc

SEQ ID NO: 2329785 - DNA, 25 bp, Homo sapien
gtcacttgtcaatgaccagaccagt

SEQ ID NO: 2329786 - DNA, 25 bp, Homo sapien
gccagtctctagcatgtgatactaa

SEQ ID NO: 2329787 - DNA, 25 bp, Homo sapien
gattcagatgattccactggagcag

SEQ ID NO: 2329788 - DNA, 25 bp, Homo sapien
ggtgttagccgcttcctcagttcct

SEQ ID NO: 2329789 - DNA, 25 bp, Homo sapien
gtactgcaggggtgttagccgcttc

SEQ ID NO: 2329790 - DNA, 25 bp, Homo sapien
tcctgagtgacatggtactgcaggg

SEQ ID NO: 2329791 - DNA, 25 bp, Homo sapien
gcaggggtgttagccgcttcctcag

SEQ ID NO: 2329792 - DNA, 25 bp, Homo sapien
attaattggcaaggaaaagcactgc

SEQ ID NO: 2329793 - DNA, 25 bp, Homo sapien
tagactttagcaagtaagtatagaa

SEQ ID NO: 2329794 - DNA, 25 bp, Homo sapien
aaattaattggcaaggaaaagcact

SEQ ID NO: 2329795 - DNA, 25 bp, Homo sapien
ctttagcaagtaagtatagaatgct

SEQ ID NO: 2329796 - DNA, 25 bp, Homo sapien
tatattccaggatctttgtgatgtg

SEQ ID NO: 2329797 - DNA, 25 bp, Homo sapien
ggagttccacaaacaacacatttat

SEQ ID NO: 2329798 - DNA, 25 bp, Homo sapien
acaacacatttatatattccaggat

SEQ ID NO: 2329799 - DNA, 25 bp, Homo sapien
acaatggagttccacaaacaacaca

SEQ ID NO: 2329800 - DNA, 25 bp, Homo sapien
accatgcctatctaatttttgtatt

SEQ ID NO: 2329801 - DNA, 25 bp, Homo sapien
gcagtggcacacttggctgactgca

SEQ ID NO: 2329802 - DNA, 25 bp, Homo sapien
ttgagtgcagtggcacacttggctg

SEQ ID NO: 2329803 - DNA, 25 bp, Homo sapien
cggaatcttactctgtcgcccaggc

SEQ ID NO: 2329804 - DNA, 25 bp, Homo sapien
cccaagaagtcttgcctgagtttga

SEQ ID NO: 2329805 - DNA, 25 bp, Homo sapien
tgaacccctctcttggcctggtaaa

SEQ ID NO: 2329806 - DNA, 25 bp, Homo sapien
aaaactgaacccctctcttggcctg

SEQ ID NO: 2329807 - DNA, 25 bp, Homo sapien
gagtttgatgtagtcatattccttc

SEQ ID NO: 2329808 - DNA, 25 bp, Homo sapien
atgttgaatggcctgatgacttcct

SEQ ID NO: 2329809 - DNA, 25 bp, Homo sapien
ttcttgtcaggattccaagggactt

SEQ ID NO: 2329810 - DNA, 25 bp, Homo sapien
ttttcttgtcaggattccaagggac

SEQ ID NO: 2329811 - DNA, 25 bp, Homo sapien
acttcctgaacattggctccatttt

SEQ ID NO: 2329812 - DNA, 25 bp, Homo sapien
cacaaaattgcatcacagagggaaa

SEQ ID NO: 2329813 - DNA, 25 bp, Homo sapien
gcaatttccagctagagttccacaa

SEQ ID NO: 2329814 - DNA, 25 bp, Homo sapien
gaaagtctcttttagtggtgaacag

SEQ ID NO: 2329815 - DNA, 25 bp, Homo sapien
tagcatgcatgaagtagcacagttg

SEQ ID NO: 2329816 - DNA, 25 bp, Homo sapien
ttatttaggtaatacgaggcaaggc

SEQ ID NO: 2329817 - DNA, 25 bp, Homo sapien
cagttcttttccgtgtgtatataac

SEQ ID NO: 2329818 - DNA, 25 bp, Homo sapien
acacacaacttcacacacctaggta

SEQ ID NO: 2329819 - DNA, 25 bp, Homo sapien
gcaaggcaagattgttctttcctca

SEQ ID NO: 2329820 - DNA, 25 bp, Homo sapien
ctctgagttactcatgtaagttata

SEQ ID NO: 2329821 - DNA, 25 bp, Homo sapien
cagttataccgacttagttttgaga

SEQ ID NO: 2329822 - DNA, 25 bp, Homo sapien
tgttgacatcaaaagccagttatac

SEQ ID NO: 2329823 - DNA, 25 bp, Homo sapien
tggagaatttaaaatccacactaaa

SEQ ID NO: 2329824 - DNA, 25 bp, Homo sapien
tctcatgcctagaattggcaaatgc

SEQ ID NO: 2329825 - DNA, 25 bp, Homo sapien
acgtggacattttatcccaatttct

SEQ ID NO: 2329826 - DNA, 25 bp, Homo sapien
ggaatctttacctctcttctcatgc

SEQ ID NO: 2329827 - DNA, 25 bp, Homo sapien
caaatgcctggaggaaaaacgtgga

SEQ ID NO: 2329828 - DNA, 25 bp, Homo sapien
tgtacttgaaatagcccacagtgga

SEQ ID NO: 2329829 - DNA, 25 bp, Homo sapien
cacagtggaagtatctgcaccacag

SEQ ID NO: 2329830 - DNA, 25 bp, Homo sapien
caagagacaattttgccccagggaa

SEQ ID NO: 2329831 - DNA, 25 bp, Homo sapien
tttaaggaacctgttgagctagctg

SEQ ID NO: 2329832 - DNA, 25 bp, Homo sapien
aaatcagataggtctatagtttttc

SEQ ID NO: 2329833 - DNA, 25 bp, Homo sapien
tccagtctctattccaacaagcagc

SEQ ID NO: 2329834 - DNA, 25 bp, Homo sapien
ttcactgatgaacctttgttctgaa

SEQ ID NO: 2329835 - DNA, 25 bp, Homo sapien
tctattccaacaagcagcatgcctc

SEQ ID NO: 2329836 - DNA, 25 bp, Homo sapien
gatctccagtctctattccaacaag

SEQ ID NO: 2329837 - DNA, 25 bp, Homo sapien
ttcttctacccctagaagtaactca

SEQ ID NO: 2329838 - DNA, 25 bp, Homo sapien
tcttctacccctagaagtaactcaa

SEQ ID NO: 2329839 - DNA, 25 bp, Homo sapien
gctcatgcctaattctagtgctgtg

SEQ ID NO: 2329840 - DNA, 25 bp, Homo sapien
cctggatatctctgtttaaccaaca

SEQ ID NO: 2329841 - DNA, 25 bp, Homo sapien
tatctctgtttaaccaacagcagca

SEQ ID NO: 2329842 - DNA, 25 bp, Homo sapien
tacaaccagaagcacatatcctgga

SEQ ID NO: 2329843 - DNA, 25 bp, Homo sapien
tcctgtcactaatcactttctcaca

SEQ ID NO: 2329844 - DNA, 25 bp, Homo sapien
atatggcattagctgtcggttttca

SEQ ID NO: 2329845 - DNA, 25 bp, Homo sapien
tagactgttcaatgtcaaaccaacc

SEQ ID NO: 2329846 - DNA, 25 bp, Homo sapien
ggctagaaccatcagcataatgctg

SEQ ID NO: 2329847 - DNA, 25 bp, Homo sapien
agaatgagttgggacatgtttcctc

SEQ ID NO: 2329848 - DNA, 25 bp, Homo sapien
gatagttttactcactcctttccaa

SEQ ID NO: 2329849 - DNA, 25 bp, Homo sapien
agagatagttttactcactcctttc

SEQ ID NO: 2329850 - DNA, 25 bp, Homo sapien
agatagttttactcactcctttcca

SEQ ID NO: 2329851 - DNA, 25 bp, Homo sapien
atagttttactcactcctttccaat

SEQ ID NO: 2329852 - DNA, 25 bp, Homo sapien
cctggccggagggatggctaggggt

SEQ ID NO: 2329853 - DNA, 25 bp, Homo sapien
tcctacaggtagtgaaaatccagac

SEQ ID NO: 2329854 - DNA, 25 bp, Homo sapien
ttagccgcttcttagtctccgggag

SEQ ID NO: 2329855 - DNA, 25 bp, Homo sapien
tgatgcagctcagatgtttagccgc

SEQ ID NO: 2329856 - DNA, 25 bp, Homo sapien
gatgaactaccagatcttgctgaga

SEQ ID NO: 2329857 - DNA, 25 bp, Homo sapien
gattgtactattgggttatcctcta

SEQ ID NO: 2329858 - DNA, 25 bp, Homo sapien
ccttgtagccacatacatgatatat

SEQ ID NO: 2329859 - DNA, 25 bp, Homo sapien
aatatgggctatacgaaatctctac

SEQ ID NO: 2329860 - DNA, 25 bp, Homo sapien
tattgtaccccatagagttagatat

SEQ ID NO: 2329861 - DNA, 25 bp, Homo sapien
aatgatgatgactgcctataagcca

SEQ ID NO: 2329862 - DNA, 25 bp, Homo sapien
accctccccgggaactgaatcagtg

SEQ ID NO: 2329863 - DNA, 25 bp, Homo sapien
tataagccaggatagagaaccctcc

SEQ ID NO: 2329864 - DNA, 25 bp, Homo sapien
tggaaaggagcattattatttaggg

SEQ ID NO: 2329865 - DNA, 25 bp, Homo sapien
ctaccattccgacagttattttgat

SEQ ID NO: 2329866 - DNA, 25 bp, Homo sapien
cagttattttgattaatcttctaca

SEQ ID NO: 2329867 - DNA, 25 bp, Homo sapien
gttattttgattaatcttctacaca

SEQ ID NO: 2329868 - DNA, 25 bp, Homo sapien
ccattccgacagttattttgattaa

SEQ ID NO: 2329869 - DNA, 25 bp, Homo sapien
tgagtattctcattgcctaacacag

SEQ ID NO: 2329870 - DNA, 25 bp, Homo sapien
tagtttctcactgcactgtccaacg

SEQ ID NO: 2329871 - DNA, 25 bp, Homo sapien
tgtccaacgtggctcaatcactgtg

SEQ ID NO: 2329872 - DNA, 25 bp, Homo sapien
tgtccagtacaaaggcacaactcaa

SEQ ID NO: 2329873 - DNA, 25 bp, Homo sapien
tctttctcttgtcttcagagtcact

SEQ ID NO: 2329874 - DNA, 25 bp, Homo sapien
ttctcttgtcttcagagtcactcag

SEQ ID NO: 2329875 - DNA, 25 bp, Homo sapien
ctcttgtcttcagagtcactcagca

SEQ ID NO: 2329876 - DNA, 25 bp, Homo sapien
cactctttctcttgtcttcagagtc

SEQ ID NO: 2329877 - DNA, 25 bp, Homo sapien
tgagagcagcttgtttccaccctgt

SEQ ID NO: 2329878 - DNA, 25 bp, Homo sapien
tcatctgtgaatgtgattgcctcag

SEQ ID NO: 2329879 - DNA, 25 bp, Homo sapien
tgtgcatcccataggaaaagtcatc

SEQ ID NO: 2329880 - DNA, 25 bp, Homo sapien
gatcacatcgtggaatgaaggccaa

SEQ ID NO: 2329881 - DNA, 25 bp, Homo sapien
gaacataggcatccatcggacttca

SEQ ID NO: 2329882 - DNA, 25 bp, Homo sapien
cagtcgcttggccttagttgctata

SEQ ID NO: 2329883 - DNA, 25 bp, Homo sapien
tatttagcacaaccaggagtcctga

SEQ ID NO: 2329884 - DNA, 25 bp, Homo sapien
gcttgagctatcatgccgaccttaa

SEQ ID NO: 2329885 - DNA, 25 bp, Homo sapien
cactgccagtagaggcattctgact

SEQ ID NO: 2329886 - DNA, 25 bp, Homo sapien
ttctgactgaacagtgggtacacag

SEQ ID NO: 2329887 - DNA, 25 bp, Homo sapien
tcactgccagtagaggcattctgac

SEQ ID NO: 2329888 - DNA, 25 bp, Homo sapien
taccctgtggtgtcaataactttca

SEQ ID NO: 2329889 - DNA, 25 bp, Homo sapien
caagtctctcgattgtgggtgtcag

SEQ ID NO: 2329890 - DNA, 25 bp, Homo sapien
tattacagctgcctgatcatgctcc

SEQ ID NO: 2329891 - DNA, 25 bp, Homo sapien
ttaagcacaaaatacccacaagttc

SEQ ID NO: 2329892 - DNA, 25 bp, Homo sapien
ctccctgagagtacgcgcacggagc

SEQ ID NO: 2329893 - DNA, 25 bp, Homo sapien
gaaaagcgcacaagccttgaaggct

SEQ ID NO: 2329894 - DNA, 25 bp, Homo sapien
gtttctttgaaaagcgcacaagcct

SEQ ID NO: 2329895 - DNA, 25 bp, Homo sapien
aagccttgaaggctcctccctgaga

SEQ ID NO: 2329896 - DNA, 25 bp, Homo sapien
tgctaatctggtactagtattctgg

SEQ ID NO: 2329897 - DNA, 25 bp, Homo sapien
ggcttcattatacttgccacagggt

SEQ ID NO: 2329898 - DNA, 25 bp, Homo sapien
ctcagaaacggtttgagtcccctga

SEQ ID NO: 2329899 - DNA, 25 bp, Homo sapien
ggtgtgtccctaatccaaggcaaaa

SEQ ID NO: 2329900 - DNA, 25 bp, Homo sapien
tatcttttcccagttggacgaggcc

SEQ ID NO: 2329901 - DNA, 25 bp, Homo sapien
gacaaggcagccgaatttatgcagt

SEQ ID NO: 2329902 - DNA, 25 bp, Homo sapien
cactgctatccgcaggtgtaaaaga

SEQ ID NO: 2329903 - DNA, 25 bp, Homo sapien
catcaaaaatgtgcccaaggtgagc

SEQ ID NO: 2329904 - DNA, 25 bp, Homo sapien
ctagagctccgctttgtctgcctgg

SEQ ID NO: 2329905 - DNA, 25 bp, Homo sapien
gagctccgctttgtctgcctgggcc

SEQ ID NO: 2329906 - DNA, 25 bp, Homo sapien
ctccgctttgtctgcctgggccggg

SEQ ID NO: 2329907 - DNA, 25 bp, Homo sapien
tccgctttgtctgcctgggccgggc

SEQ ID NO: 2329908 - DNA, 25 bp, Homo sapien
aataagctgtgcattaagtacactt

SEQ ID NO: 2329909 - DNA, 25 bp, Homo sapien
ttttaataagctgtgcattaagtac

SEQ ID NO: 2329910 - DNA, 25 bp, Homo sapien
tgtgcattaagtacactttgtttcc

SEQ ID NO: 2329911 - DNA, 25 bp, Homo sapien
ctgtgcattaagtacactttgtttc

SEQ ID NO: 2329912 - DNA, 25 bp, Homo sapien
gagtcccagtttatgcatgaagaaa

SEQ ID NO: 2329913 - DNA, 25 bp, Homo sapien
tgggtctgtgcaaaggcctcaaggc

SEQ ID NO: 2329914 - DNA, 25 bp, Homo sapien
cctttgaggcaattagaaccagatc

SEQ ID NO: 2329915 - DNA, 25 bp, Homo sapien
ggccagggcttctgtttaagcaaaa

SEQ ID NO: 2329916 - DNA, 25 bp, Homo sapien
tttctagagagacgtgaagcctacg

SEQ ID NO: 2329917 - DNA, 25 bp, Homo sapien
tataaagagtccaccgggatgtcag

SEQ ID NO: 2329918 - DNA, 25 bp, Homo sapien
ttgtctacctcaacactgtggcccg

SEQ ID NO: 2329919 - DNA, 25 bp, Homo sapien
tttgagtgaaatgttaagccctacg

SEQ ID NO: 2329920 - DNA, 25 bp, Homo sapien
ataagggtgagtgagtatatgctta

SEQ ID NO: 2329921 - DNA, 25 bp, Homo sapien
gataataagggtgagtgagtatatg

SEQ ID NO: 2329922 - DNA, 25 bp, Homo sapien
aataagggtgagtgagtatatgctt

SEQ ID NO: 2329923 - DNA, 25 bp, Homo sapien
taataagggtgagtgagtatatgct

SEQ ID NO: 2329924 - DNA, 25 bp, Homo sapien
gcacttattaatttctgactgactt

SEQ ID NO: 2329925 - DNA, 25 bp, Homo sapien
gctgtgctgaactaagcacttatta

SEQ ID NO: 2329926 - DNA, 25 bp, Homo sapien
tgaactaagcacttattaatttctg

SEQ ID NO: 2329927 - DNA, 25 bp, Homo sapien
tcggggctgtgctgaactaagcact

SEQ ID NO: 2329928 - DNA, 25 bp, Homo sapien
taaagatgtaaaccggatgaggcca

SEQ ID NO: 2329929 - DNA, 25 bp, Homo sapien
tcgaatgctaggagatgttccccag

SEQ ID NO: 2329930 - DNA, 25 bp, Homo sapien
gatgtaagcaggtatgcgagaagcc

SEQ ID NO: 2329931 - DNA, 25 bp, Homo sapien
gatgaggccattttgtgccccatag

SEQ ID NO: 2329932 - DNA, 25 bp, Homo sapien
aggccaggaaatccaagattgaggg

SEQ ID NO: 2329933 - DNA, 25 bp, Homo sapien
tcagaatgaatagaaatttattggc

SEQ ID NO: 2329934 - DNA, 25 bp, Homo sapien
tgaggggcagcatctggtgaggtcc

SEQ ID NO: 2329935 - DNA, 25 bp, Homo sapien
tggaggccaggaaatccaagattga

SEQ ID NO: 2329936 - DNA, 25 bp, Homo sapien
gtgagcacacctgtctcagttcatt

SEQ ID NO: 2329937 - DNA, 25 bp, Homo sapien
attgaaatgtaacatgcacgcagag

SEQ ID NO: 2329938 - DNA, 25 bp, Homo sapien
agtgagcacacctgtctcagttcat

SEQ ID NO: 2329939 - DNA, 25 bp, Homo sapien
ttgaaatgtaacatgcacgcagaga

SEQ ID NO: 2329940 - DNA, 25 bp, Homo sapien
gaacatatctatcaccatgacactt

SEQ ID NO: 2329941 - DNA, 25 bp, Homo sapien
tttcccatacctcctcaacccagag

SEQ ID NO: 2329942 - DNA, 25 bp, Homo sapien
agtctgtctctgtgagatcaactct

SEQ ID NO: 2329943 - DNA, 25 bp, Homo sapien
taacatctattaccgattttgaaat

SEQ ID NO: 2329944 - DNA, 25 bp, Homo sapien
cataaacgtcttggtgcaaaaatga

SEQ ID NO: 2329945 - DNA, 25 bp, Homo sapien
aaaatgaatggcaaaccaagccatg

SEQ ID NO: 2329946 - DNA, 25 bp, Homo sapien
tggccgtctgcacttgagagccctg

SEQ ID NO: 2329947 - DNA, 25 bp, Homo sapien
tccacttcataaacgtcttggtgca

SEQ ID NO: 2329948 - DNA, 25 bp, Homo sapien
caaggtcaacctggaattggaaggc

SEQ ID NO: 2329949 - DNA, 25 bp, Homo sapien
attggaaggctgagtccaggctcag

SEQ ID NO: 2329950 - DNA, 25 bp, Homo sapien
aattggaaggctgagtccaggctca

SEQ ID NO: 2329951 - DNA, 25 bp, Homo sapien
aggtcaacctggaattggaaggctg

SEQ ID NO: 2329952 - DNA, 25 bp, Homo sapien
caaatagtcctcttgctgttaggga

SEQ ID NO: 2329953 - DNA, 25 bp, Homo sapien
ctcttgtttaattccatatgagcag

SEQ ID NO: 2329954 - DNA, 25 bp, Homo sapien
tgggcatggtcctcattaaagtctt

SEQ ID NO: 2329955 - DNA, 25 bp, Homo sapien
tgagtgagcgacataaatcatcatc

SEQ ID NO: 2329956 - DNA, 25 bp, Homo sapien
caagatgggagtttgagggatcgct

SEQ ID NO: 2329957 - DNA, 25 bp, Homo sapien
gcaacgtcaagatgggagtttgagg

SEQ ID NO: 2329958 - DNA, 25 bp, Homo sapien
ttgagggatcgctctgtcctttctc

SEQ ID NO: 2329959 - DNA, 25 bp, Homo sapien
ggagtttgagggatcgctctgtcct

SEQ ID NO: 2329960 - DNA, 25 bp, Homo sapien
tggaataaatttccgtgagaagtga

SEQ ID NO: 2329961 - DNA, 25 bp, Homo sapien
ggagaccccagcattgccctttgca

SEQ ID NO: 2329962 - DNA, 25 bp, Homo sapien
attgtcactcctgaagctgggcagc

SEQ ID NO: 2329963 - DNA, 25 bp, Homo sapien
tggcgtcccctatattctgctgtgg

SEQ ID NO: 2329964 - DNA, 25 bp, Homo sapien
ccttcacgtctgagttcatgtggct

SEQ ID NO: 2329965 - DNA, 25 bp, Homo sapien
agcaacagaaaggtccgcccacttg

SEQ ID NO: 2329966 - DNA, 25 bp, Homo sapien
acaaccgctgagtacaggcagacca

SEQ ID NO: 2329967 - DNA, 25 bp, Homo sapien
tggctctcactcagaagcggaagtg

SEQ ID NO: 2329968 - DNA, 25 bp, Homo sapien
gtggtcagtgctgggctgttacatt

SEQ ID NO: 2329969 - DNA, 25 bp, Homo sapien
gggctgttacattgtcttctctcca

SEQ ID NO: 2329970 - DNA, 25 bp, Homo sapien
ggctgttacattgtcttctctccat

SEQ ID NO: 2329971 - DNA, 25 bp, Homo sapien
ctgcaggtggtcagtgctgggctgt

SEQ ID NO: 2329972 - DNA, 25 bp, Homo sapien
aacaggtgcatgcattacaacccgg

SEQ ID NO: 2329973 - DNA, 25 bp, Homo sapien
attacaacccgggacaggtgctttg

SEQ ID NO: 2329974 - DNA, 25 bp, Homo sapien
ataaacaggtgcatgcattacaacc

SEQ ID NO: 2329975 - DNA, 25 bp, Homo sapien
gacaggtgctttgaagtaggcaacc

SEQ ID NO: 2329976 - DNA, 25 bp, Homo sapien
gtgcctcattttcaagggcccgagt

SEQ ID NO: 2329977 - DNA, 25 bp, Homo sapien
aagggcccgagttcccgaccatgag

SEQ ID NO: 2329978 - DNA, 25 bp, Homo sapien
gcctcattttcaagggcccgagttc

SEQ ID NO: 2329979 - DNA, 25 bp, Homo sapien
tcccgaccatgagctaaacagaatc

SEQ ID NO: 2329980 - DNA, 25 bp, Homo sapien
agctttcctctcagactctctgtac

SEQ ID NO: 2329981 - DNA, 25 bp, Homo sapien
tcgaagatgtagagctttcctctca

SEQ ID NO: 2329982 - DNA, 25 bp, Homo sapien
attgccttcgaagatgtagagcttt

SEQ ID NO: 2329983 - DNA, 25 bp, Homo sapien
ccttcgaagatgtagagctttcctc

SEQ ID NO: 2329984 - DNA, 25 bp, Homo sapien
aaaaagttgagaagtctggcagaaa

SEQ ID NO: 2329985 - DNA, 25 bp, Homo sapien
tgagaagtctggcagaaatgtggac

SEQ ID NO: 2329986 - DNA, 25 bp, Homo sapien
cagaaatgtggacctaagttaatta

SEQ ID NO: 2329987 - DNA, 25 bp, Homo sapien
tctggcagaaatgtggacctaagtt

SEQ ID NO: 2329988 - DNA, 25 bp, Homo sapien
agagggatgaaatggacaggagaac

SEQ ID NO: 2329989 - DNA, 25 bp, Homo sapien
agggatgaaatggacaggagaacat

SEQ ID NO: 2329990 - DNA, 25 bp, Homo sapien
aaatggacaggagaacatgagggtc

SEQ ID NO: 2329991 - DNA, 25 bp, Homo sapien
gatgaaatggacaggagaacatgag

SEQ ID NO: 2329992 - DNA, 25 bp, Homo sapien
ttccacaggacctcagaaactgttg

SEQ ID NO: 2329993 - DNA, 25 bp, Homo sapien
ctgttgtccgaacagctgcttttca

SEQ ID NO: 2329994 - DNA, 25 bp, Homo sapien
tccctgagcattgggtaggcgttgc

SEQ ID NO: 2329995 - DNA, 25 bp, Homo sapien
tagaaagatctggaatgttgctggg

SEQ ID NO: 2329996 - DNA, 25 bp, Homo sapien
gacaatcaaattactccgagctacg

SEQ ID NO: 2329997 - DNA, 25 bp, Homo sapien
tataactacaataaacaatacagag

SEQ ID NO: 2329998 - DNA, 25 bp, Homo sapien
agcctcaggagctgatgtgatcaac

SEQ ID NO: 2329999 - DNA, 25 bp, Homo sapien
aaccaaggctcgagaactatgtgaa

SEQ ID NO: 2330000 - DNA, 25 bp, Homo sapien
tgttgccagcaacgagccaagagac

SEQ ID NO: 2330001 - DNA, 25 bp, Homo sapien
tattgagaacgaattcggacaccct

SEQ ID NO: 2330002 - DNA, 25 bp, Homo sapien
gacaccctgaaagcggagttctaga

SEQ ID NO: 2330003 - DNA, 25 bp, Homo sapien
gagttctagatccagtgttgccagc

SEQ ID NO: 2330004 - DNA, 25 bp, Homo sapien
tcactgatgggaactttgaccagca

SEQ ID NO: 2330005 - DNA, 25 bp, Homo sapien
cgcaggtcactgatgggaactttga

SEQ ID NO: 2330006 - DNA, 25 bp, Homo sapien
aattttccgcaggtcactgatggga

SEQ ID NO: 2330007 - DNA, 25 bp, Homo sapien
ttttccaattttccgcaggtcactg

SEQ ID NO: 2330008 - DNA, 25 bp, Homo sapien
aagagagagaggtctagaagacttg

SEQ ID NO: 2330009 - DNA, 25 bp, Homo sapien
accttctctgacgactctttgcaaa

SEQ ID NO: 2330010 - DNA, 25 bp, Homo sapien
tggaaccttctctgacgactctttg

SEQ ID NO: 2330011 - DNA, 25 bp, Homo sapien
tcattaagcagttggcttggaacct

SEQ ID NO: 2330012 - DNA, 25 bp, Homo sapien
cagtaggccttctaggaaactgtac

SEQ ID NO: 2330013 - DNA, 25 bp, Homo sapien
tgattccaggaaactcgattgtggg

SEQ ID NO: 2330014 - DNA, 25 bp, Homo sapien
ggaaactgtactatgattccaggaa

SEQ ID NO: 2330015 - DNA, 25 bp, Homo sapien
ctatatgccagcagtaggccttcta

SEQ ID NO: 2330016 - DNA, 25 bp, Homo sapien
tagatgctcagaacccagtctgtgt

SEQ ID NO: 2330017 - DNA, 25 bp, Homo sapien
ttggtagaacataggtcccagacct

SEQ ID NO: 2330018 - DNA, 25 bp, Homo sapien
gaagctcaaggctaagctcatagga

SEQ ID NO: 2330019 - DNA, 25 bp, Homo sapien
cattgggaggtctggcaaaaaagaa

SEQ ID NO: 2330020 - DNA, 25 bp, Homo sapien
ctttcttgagggacgcacagcttcc

SEQ ID NO: 2330021 - DNA, 25 bp, Homo sapien
tcctcagacctcttcatgctactgc

SEQ ID NO: 2330022 - DNA, 25 bp, Homo sapien
tccttgttaatgatcccctatggat

SEQ ID NO: 2330023 - DNA, 25 bp, Homo sapien
ctttgatgggcaataaagaattgct

SEQ ID NO: 2330024 - DNA, 25 bp, Homo sapien
gagtagaggaagtactagaacttgg

SEQ ID NO: 2330025 - DNA, 25 bp, Homo sapien
gcatcacctggatagaagactttct

SEQ ID NO: 2330026 - DNA, 25 bp, Homo sapien
gctgagtttattactctcaagagtc

SEQ ID NO: 2330027 - DNA, 25 bp, Homo sapien
tgggttggcagagttcatctttgta

SEQ ID NO: 2330028 - DNA, 25 bp, Homo sapien
ccctccttgggaactcagatgcaca

SEQ ID NO: 2330029 - DNA, 25 bp, Homo sapien
aactcagatgcacactgggttcccg

SEQ ID NO: 2330030 - DNA, 25 bp, Homo sapien
tccctccttgggaactcagatgcac

SEQ ID NO: 2330031 - DNA, 25 bp, Homo sapien
tggccatgcctgagcaaggtttttt

SEQ ID NO: 2330032 - DNA, 25 bp, Homo sapien
gactgccacagctttgctggccatg

SEQ ID NO: 2330033 - DNA, 25 bp, Homo sapien
tgcctgagcaaggttttttataaaa

SEQ ID NO: 2330034 - DNA, 25 bp, Homo sapien
aggactgccacagctttgctggcca

SEQ ID NO: 2330035 - DNA, 25 bp, Homo sapien
agagttggagttgggtaagtgtcac

SEQ ID NO: 2330036 - DNA, 25 bp, Homo sapien
agttggagttgggtaagtgtcactc

SEQ ID NO: 2330037 - DNA, 25 bp, Homo sapien
ttggagttgggtaagtgtcactcat

SEQ ID NO: 2330038 - DNA, 25 bp, Homo sapien
aagagttggagttgggtaagtgtca

SEQ ID NO: 2330039 - DNA, 25 bp, Homo sapien
tggatgattgtctgtcctctgttgg

SEQ ID NO: 2330040 - DNA, 25 bp, Homo sapien
cctacagcctttgcatggatgattg

SEQ ID NO: 2330041 - DNA, 25 bp, Homo sapien
ggtgtttgactcttcctacagcctt

SEQ ID NO: 2330042 - DNA, 25 bp, Homo sapien
caggtgtttgactcttcctacagcc

SEQ ID NO: 2330043 - DNA, 25 bp, Homo sapien
gcctgaggagccctgatcctagagt

SEQ ID NO: 2330044 - DNA, 25 bp, Homo sapien
tgaggagccctgatcctagagtggc

SEQ ID NO: 2330045 - DNA, 25 bp, Homo sapien
ggagccctgatcctagagtggcagc

SEQ ID NO: 2330046 - DNA, 25 bp, Homo sapien
gaggagccctgatcctagagtggca

SEQ ID NO: 2330047 - DNA, 25 bp, Homo sapien
gcattagtggcttcataatcctgat

SEQ ID NO: 2330048 - DNA, 25 bp, Homo sapien
ttgcatgggtatttaggagaaaggc

SEQ ID NO: 2330049 - DNA, 25 bp, Homo sapien
gagaaaggcaatggacatccatttt

SEQ ID NO: 2330050 - DNA, 25 bp, Homo sapien
aaaggcaatggacatccatttttgc

SEQ ID NO: 2330051 - DNA, 25 bp, Homo sapien
cagagatttggttgctagcataggt

SEQ ID NO: 2330052 - DNA, 25 bp, Homo sapien
gtcagcagagatttggttgctagca

SEQ ID NO: 2330053 - DNA, 25 bp, Homo sapien
ggcaatgtcagcagagatttggttg

SEQ ID NO: 2330054 - DNA, 25 bp, Homo sapien
gagatttggttgctagcataggtac

SEQ ID NO: 2330055 - DNA, 25 bp, Homo sapien
ttctccactatttggaaaaggcgga

SEQ ID NO: 2330056 - DNA, 25 bp, Homo sapien
tcttctccactatttggaaaaggcg

SEQ ID NO: 2330057 - DNA, 25 bp, Homo sapien
taatcatgtctgtcttctccactat

SEQ ID NO: 2330058 - DNA, 25 bp, Homo sapien
tgtcttctccactatttggaaaagg

SEQ ID NO: 2330059 - DNA, 25 bp, Homo sapien
aatgaccgtcgttgctcctcttgcc

SEQ ID NO: 2330060 - DNA, 25 bp, Homo sapien
tccctccataatgaccgtcgttgct

SEQ ID NO: 2330061 - DNA, 25 bp, Homo sapien
tcttgcccaaggtaatccccgttca

SEQ ID NO: 2330062 - DNA, 25 bp, Homo sapien
tccataatgaccgtcgttgctcctc

SEQ ID NO: 2330063 - DNA, 25 bp, Homo sapien
caaacgtgctctgaaatgggatgag

SEQ ID NO: 2330064 - DNA, 25 bp, Homo sapien
tgaactctatcaaacgtgctctgaa

SEQ ID NO: 2330065 - DNA, 25 bp, Homo sapien
gagaagttcctcagcccacggaaag

SEQ ID NO: 2330066 - DNA, 25 bp, Homo sapien
aggaagggcttggtacatgaactct

SEQ ID NO: 2330067 - DNA, 25 bp, Homo sapien
ttccatcagaatccctttcaggaag

SEQ ID NO: 2330068 - DNA, 25 bp, Homo sapien
tccatcagaatccctttcaggaaga

SEQ ID NO: 2330069 - DNA, 25 bp, Homo sapien
ccatcagaatccctttcaggaagaa

SEQ ID NO: 2330070 - DNA, 25 bp, Homo sapien
ggtcaatgttatattactcagtcta

SEQ ID NO: 2330071 - DNA, 25 bp, Homo sapien
ccatgacgctctatattggtcaatg

SEQ ID NO: 2330072 - DNA, 25 bp, Homo sapien
gcatttccatgacgctctatattgg

SEQ ID NO: 2330073 - DNA, 25 bp, Homo sapien
gagtgtattagtaaatggtatttcc

SEQ ID NO: 2330074 - DNA, 25 bp, Homo sapien
ttctgttgtttattcatataacccg

SEQ ID NO: 2330075 - DNA, 25 bp, Homo sapien
ttattcatataacccgtgttgtcaa

SEQ ID NO: 2330076 - DNA, 25 bp, Homo sapien
catataacccgtgttgtcaaatgtt

SEQ ID NO: 2330077 - DNA, 25 bp, Homo sapien
tgtttattcatataacccgtgttgt

SEQ ID NO: 2330078 - DNA, 25 bp, Homo sapien
ttctccagatctatggaaattctcc

SEQ ID NO: 2330079 - DNA, 25 bp, Homo sapien
atcctttctccagatctatggaaat

SEQ ID NO: 2330080 - DNA, 25 bp, Homo sapien
ccatcctttctccagatctatggaa

SEQ ID NO: 2330081 - DNA, 25 bp, Homo sapien
ccagatctatggaaattctccccat

SEQ ID NO: 2330082 - DNA, 25 bp, Homo sapien
caggaaccggctgtttatgaaagct

SEQ ID NO: 2330083 - DNA, 25 bp, Homo sapien
tccagttgccaaaacccaggaggtg

SEQ ID NO: 2330084 - DNA, 25 bp, Homo sapien
tatgaaagctgaagtaccgctagag

SEQ ID NO: 2330085 - DNA, 25 bp, Homo sapien
gcaaagaagccacttgtgattccag

SEQ ID NO: 2330086 - DNA, 25 bp, Homo sapien
tttgtgctccaaaagaattgtaatc

SEQ ID NO: 2330087 - DNA, 25 bp, Homo sapien
cattgtagaatactccaccccagga

SEQ ID NO: 2330088 - DNA, 25 bp, Homo sapien
caacgatttagggaggttacatagc

SEQ ID NO: 2330089 - DNA, 25 bp, Homo sapien
gatttgaaccagaactgactgactt

SEQ ID NO: 2330090 - DNA, 25 bp, Homo sapien
tgttgaaccaccaagggttgctccc

SEQ ID NO: 2330091 - DNA, 25 bp, Homo sapien
taatggaggcttcattgttgaacca

SEQ ID NO: 2330092 - DNA, 25 bp, Homo sapien
tggtgactatgtttggccacgcctg

SEQ ID NO: 2330093 - DNA, 25 bp, Homo sapien
aagcacgtcagtctgggcggaacca

SEQ ID NO: 2330094 - DNA, 25 bp, Homo sapien
tatggaacacttctgacatcaggga

SEQ ID NO: 2330095 - DNA, 25 bp, Homo sapien
caaagtctcttggatccaacccagg

SEQ ID NO: 2330096 - DNA, 25 bp, Homo sapien
catcttggaattgtagccactgcca

SEQ ID NO: 2330097 - DNA, 25 bp, Homo sapien
gatgacttcaagcaactcggctgtg

SEQ ID NO: 2330098 - DNA, 25 bp, Homo sapien
caagcaggcaccagatactataatg

SEQ ID NO: 2330099 - DNA, 25 bp, Homo sapien
caccaggaaggatcactgttttaca

SEQ ID NO: 2330100 - DNA, 25 bp, Homo sapien
gataacacacatgaccttgtcctgc

SEQ ID NO: 2330101 - DNA, 25 bp, Homo sapien
tatagaacccattgagtaccagaag

SEQ ID NO: 2330102 - DNA, 25 bp, Homo sapien
cgccttgtcatataactgcagtgct

SEQ ID NO: 2330103 - DNA, 25 bp, Homo sapien
tctgtacagcggacaaggcattcat

SEQ ID NO: 2330104 - DNA, 25 bp, Homo sapien
ttctgtacagcggacaaggcattca

SEQ ID NO: 2330105 - DNA, 25 bp, Homo sapien
catttgcatccacacgccttgtcat

SEQ ID NO: 2330106 - DNA, 25 bp, Homo sapien
caagggctatctttggagacctccc

SEQ ID NO: 2330107 - DNA, 25 bp, Homo sapien
caagctcctggtatcttaggtcttt

SEQ ID NO: 2330108 - DNA, 25 bp, Homo sapien
catattttgctagaacagtatttcc

SEQ ID NO: 2330109 - DNA, 25 bp, Homo sapien
cagaattctgccaagggctatcttt

SEQ ID NO: 2330110 - DNA, 25 bp, Homo sapien
tcatgaattatcagagccattgaac

SEQ ID NO: 2330111 - DNA, 25 bp, Homo sapien
aaggcagggacatcacccatggctc

SEQ ID NO: 2330112 - DNA, 25 bp, Homo sapien
caagtcaatatcgaaggcagggaca

SEQ ID NO: 2330113 - DNA, 25 bp, Homo sapien
tattggcagcattagttttcattgg

SEQ ID NO: 2330114 - DNA, 25 bp, Homo sapien
ccatcgttccactcattactcatga

SEQ ID NO: 2330115 - DNA, 25 bp, Homo sapien
tcattactcatgaagcgtactttgc

SEQ ID NO: 2330116 - DNA, 25 bp, Homo sapien
tgaagcgtactttgctacggtccat

SEQ ID NO: 2330117 - DNA, 25 bp, Homo sapien
gttccactcattactcatgaagcgt

SEQ ID NO: 2330118 - DNA, 25 bp, Homo sapien
ctggcacccaggaggattcactcac

SEQ ID NO: 2330119 - DNA, 25 bp, Homo sapien
tagcagccaccctaaagtatttgtt

SEQ ID NO: 2330120 - DNA, 25 bp, Homo sapien
tttcaattccattggtagacgagga

SEQ ID NO: 2330121 - DNA, 25 bp, Homo sapien
cattggtagacgaggaaacaacctc

SEQ ID NO: 2330122 - DNA, 25 bp, Homo sapien
cagtttacgttcactttttcatttg

SEQ ID NO: 2330123 - DNA, 25 bp, Homo sapien
taaatattcgatcttttggctttaa

SEQ ID NO: 2330124 - DNA, 25 bp, Homo sapien
gctctgcagcagatctttaaagtca

SEQ ID NO: 2330125 - DNA, 25 bp, Homo sapien
taaacctcgccccacagctctgcag

SEQ ID NO: 2330126 - DNA, 25 bp, Homo sapien
tgtcaaaacggatcttaaacctcgc

SEQ ID NO: 2330127 - DNA, 25 bp, Homo sapien
catgtgtgttgaaacaagaccgaac

SEQ ID NO: 2330128 - DNA, 25 bp, Homo sapien
cctgctgcgctgaatatggatatgg

SEQ ID NO: 2330129 - DNA, 25 bp, Homo sapien
tacctctagggtttccagctttgag

SEQ ID NO: 2330130 - DNA, 25 bp, Homo sapien
tatggtgagtgaatctagagcagcc

SEQ ID NO: 2330131 - DNA, 25 bp, Homo sapien
agtgactccccattggccagagggc

SEQ ID NO: 2330132 - DNA, 25 bp, Homo sapien
cctagcatggtaagtaacgatcttg

SEQ ID NO: 2330133 - DNA, 25 bp, Homo sapien
cagtggcagatacttgtagttgtcc

SEQ ID NO: 2330134 - DNA, 25 bp, Homo sapien
ggcaaagttggagcttcaaagcaat

SEQ ID NO: 2330135 - DNA, 25 bp, Homo sapien
aagcaacatagctctcctacatatt

SEQ ID NO: 2330136 - DNA, 25 bp, Homo sapien
tgttaaagcaacatagctctcctac

SEQ ID NO: 2330137 - DNA, 25 bp, Homo sapien
taaagcaacatagctctcctacata

SEQ ID NO: 2330138 - DNA, 25 bp, Homo sapien
gcaacatagctctcctacatattct

SEQ ID NO: 2330139 - DNA, 25 bp, Homo sapien
agtagtgcaatctttggtgagcgcc

SEQ ID NO: 2330140 - DNA, 25 bp, Homo sapien
caggctgctgcacgacgggattgta

SEQ ID NO: 2330141 - DNA, 25 bp, Homo sapien
tgccgtgtccttcagatggtgcaag

SEQ ID NO: 2330142 - DNA, 25 bp, Homo sapien
tctaggctggtcaatagcacaggct

SEQ ID NO: 2330143 - DNA, 25 bp, Homo sapien
cttacacattgcaaactttgttttc

SEQ ID NO: 2330144 - DNA, 25 bp, Homo sapien
atttcttacacattgcaaactttgt

SEQ ID NO: 2330145 - DNA, 25 bp, Homo sapien
tcaatgaattgcatcctccagctcc

SEQ ID NO: 2330146 - DNA, 25 bp, Homo sapien
ggttgactggggttgtgctgtggtc

SEQ ID NO: 2330147 - DNA, 25 bp, Homo sapien
agtgttgtgtgctctgattttgcca

SEQ ID NO: 2330148 - DNA, 25 bp, Homo sapien
cagtgttgtgtgctctgattttgcc

SEQ ID NO: 2330149 - DNA, 25 bp, Homo sapien
agtttgaattggcacctggattttc

SEQ ID NO: 2330150 - DNA, 25 bp, Homo sapien
cacctggattttcagtgttgtgtgc

SEQ ID NO: 2330151 - DNA, 25 bp, Homo sapien
tctgctaagaccaggtggaatcatt

SEQ ID NO: 2330152 - DNA, 25 bp, Homo sapien
ctttctgctaagaccaggtggaatc

SEQ ID NO: 2330153 - DNA, 25 bp, Homo sapien
catgtattacaacttccgggccagc

SEQ ID NO: 2330154 - DNA, 25 bp, Homo sapien
gctaagaccaggtggaatcatttca

SEQ ID NO: 2330155 - DNA, 25 bp, Homo sapien
aagatagaaagggaacagtagtgga

SEQ ID NO: 2330156 - DNA, 25 bp, Homo sapien
gtattaggttggtagttgttagcga

SEQ ID NO: 2330157 - DNA, 25 bp, Homo sapien
ttaggttggtagttgttagcgacag

SEQ ID NO: 2330158 - DNA, 25 bp, Homo sapien
tagaaagggaacagtagtggagcca

SEQ ID NO: 2330159 - DNA, 25 bp, Homo sapien
gaagaggcacttcagctcttttgaa

SEQ ID NO: 2330160 - DNA, 25 bp, Homo sapien
gacaagtaggaagattgctaaggtc

SEQ ID NO: 2330161 - DNA, 25 bp, Homo sapien
tcctggtgtggataacgatttgttc

SEQ ID NO: 2330162 - DNA, 25 bp, Homo sapien
tcttcgtcgtggaggaaggtgcaat

SEQ ID NO: 2330163 - DNA, 25 bp, Homo sapien
tgttcggcccttatactgttgggca

SEQ ID NO: 2330164 - DNA, 25 bp, Homo sapien
tctgttctctttagggtcgtgccta

SEQ ID NO: 2330165 - DNA, 25 bp, Homo sapien
ctgttgggcagtgaaaagtcgatct

SEQ ID NO: 2330166 - DNA, 25 bp, Homo sapien
cgatcttaatctgtttaggattcca

SEQ ID NO: 2330167 - DNA, 25 bp, Homo sapien
gccaggaggtctgcgctcaggcaat

SEQ ID NO: 2330168 - DNA, 25 bp, Homo sapien
aggtctgcgctcaggcaataggagt

SEQ ID NO: 2330169 - DNA, 25 bp, Homo sapien
gagtcatgggaggtttttgagcaga

SEQ ID NO: 2330170 - DNA, 25 bp, Homo sapien
cgctcaggcaataggagtcatggga

SEQ ID NO: 2330171 - DNA, 25 bp, Homo sapien
cctagtgccctcagtttagctctac

SEQ ID NO: 2330172 - DNA, 25 bp, Homo sapien
ttagctctacacatctcaggtgtga

SEQ ID NO: 2330173 - DNA, 25 bp, Homo sapien
gaactccacaaatctgttctgaatt

SEQ ID NO: 2330174 - DNA, 25 bp, Homo sapien
tttctagaggatctgttgtcaaagc

SEQ ID NO: 2330175 - DNA, 25 bp, Homo sapien
ggaaagtcggctaatactgtgtccg

SEQ ID NO: 2330176 - DNA, 25 bp, Homo sapien
aaattacagtgatgtaccatccact

SEQ ID NO: 2330177 - DNA, 25 bp, Homo sapien
tggatggcagtttagaggactcact

SEQ ID NO: 2330178 - DNA, 25 bp, Homo sapien
accctggcaagaaagttctattgaa

SEQ ID NO: 2330179 - DNA, 25 bp, Homo sapien
ggtctcagatccagtccatatgttc

SEQ ID NO: 2330180 - DNA, 25 bp, Homo sapien
tatgttcctacactccaagtggtac

SEQ ID NO: 2330181 - DNA, 25 bp, Homo sapien
caatgaaggtgaagtttgctcccac

SEQ ID NO: 2330182 - DNA, 25 bp, Homo sapien
cttagaggtcctcttgaagttcctg

SEQ ID NO: 2330183 - DNA, 25 bp, Homo sapien
ttaaggcagccccatggtggctccc

SEQ ID NO: 2330184 - DNA, 25 bp, Homo sapien
ggcagccccatggtggctccctttg

SEQ ID NO: 2330185 - DNA, 25 bp, Homo sapien
cagccccatggtggctccctttgac

SEQ ID NO: 2330186 - DNA, 25 bp, Homo sapien
aaggcagccccatggtggctccctt

SEQ ID NO: 2330187 - DNA, 25 bp, Homo sapien
ttggcacagtcagcaagcactgact

SEQ ID NO: 2330188 - DNA, 25 bp, Homo sapien
taactatgggtagttggtgtgggca

SEQ ID NO: 2330189 - DNA, 25 bp, Homo sapien
aactatgggtagttggtgtgggcat

SEQ ID NO: 2330190 - DNA, 25 bp, Homo sapien
tttgtaactatgggtagttggtgtg

SEQ ID NO: 2330191 - DNA, 25 bp, Homo sapien
tgtaactatgggtagttggtgtggg

SEQ ID NO: 2330192 - DNA, 25 bp, Homo sapien
tcagctgcccttaagaggtggctgc

SEQ ID NO: 2330193 - DNA, 25 bp, Homo sapien
agctgcccttaagaggtggctgctg

SEQ ID NO: 2330194 - DNA, 25 bp, Homo sapien
cagctgcccttaagaggtggctgct

SEQ ID NO: 2330195 - DNA, 25 bp, Homo sapien
cccaagacattcaaagacatttctc

SEQ ID NO: 2330196 - DNA, 25 bp, Homo sapien
gaagtaaaaggttcaccaatatgta

SEQ ID NO: 2330197 - DNA, 25 bp, Homo sapien
cacaaaacccaagacattcaaagac

SEQ ID NO: 2330198 - DNA, 25 bp, Homo sapien
acatttctcatcataacattaattc

SEQ ID NO: 2330199 - DNA, 25 bp, Homo sapien
gcaacatgaactttttggacaaagg

SEQ ID NO: 2330200 - DNA, 25 bp, Homo sapien
ttggcaacatgaactttttggacaa

SEQ ID NO: 2330201 - DNA, 25 bp, Homo sapien
gaaataacaagtgccagtcccaggc

SEQ ID NO: 2330202 - DNA, 25 bp, Homo sapien
gcagaaataacaagtgccagtccca

SEQ ID NO: 2330203 - DNA, 25 bp, Homo sapien
tggagagagagagcctccatccctc

SEQ ID NO: 2330204 - DNA, 25 bp, Homo sapien
gagcctccatccctccggatggagc

SEQ ID NO: 2330205 - DNA, 25 bp, Homo sapien
gagagcctccatccctccggatgga

SEQ ID NO: 2330206 - DNA, 25 bp, Homo sapien
ctgtaatggagagagagagcctcca

SEQ ID NO: 2330207 - DNA, 25 bp, Homo sapien
agggtttctgctgggtctgggaacg

SEQ ID NO: 2330208 - DNA, 25 bp, Homo sapien
ttctgctgggtctgggaacgcttag

SEQ ID NO: 2330209 - DNA, 25 bp, Homo sapien
tgcaggaacccagggtttctgctgg

SEQ ID NO: 2330210 - DNA, 25 bp, Homo sapien
aacccagggtttctgctgggtctgg

SEQ ID NO: 2330211 - DNA, 25 bp, Homo sapien
cgccaggttccgctgtgcatgtgga

SEQ ID NO: 2330212 - DNA, 25 bp, Homo sapien
gattggtccgcgttgccattttaaa

SEQ ID NO: 2330213 - DNA, 25 bp, Homo sapien
gagctgggacactttgctgcacgtt

SEQ ID NO: 2330214 - DNA, 25 bp, Homo sapien
aatgtctgctttggcgcggcagcgc

SEQ ID NO: 2330215 - DNA, 25 bp, Homo sapien
cacatacacggagacatgcatgcag

SEQ ID NO: 2330216 - DNA, 25 bp, Homo sapien
gcattcatgcgctggtaaacacccg

SEQ ID NO: 2330217 - DNA, 25 bp, Homo sapien
tgcacgcagatacacgtggacacgg

SEQ ID NO: 2330218 - DNA, 25 bp, Homo sapien
gaacacgcgtgtaagcacatgcacg

SEQ ID NO: 2330219 - DNA, 25 bp, Homo sapien
tgccttgggcagtcggaaagcaaag

SEQ ID NO: 2330220 - DNA, 25 bp, Homo sapien
gagttcctgccccaagattcaagtg

SEQ ID NO: 2330221 - DNA, 25 bp, Homo sapien
tagccagaggcagcgttcgaaatac

SEQ ID NO: 2330222 - DNA, 25 bp, Homo sapien
ttcgaaatacaactgcctcggcggc

SEQ ID NO: 2330223 - DNA, 25 bp, Homo sapien
cgctgcagccgcttcgcctcgaccg

SEQ ID NO: 2330224 - DNA, 25 bp, Homo sapien
gctgcagccgcttcgcctcgaccgc

SEQ ID NO: 2330225 - DNA, 25 bp, Homo sapien
gcttcgcctcgaccgccccggagct

SEQ ID NO: 2330226 - DNA, 25 bp, Homo sapien
agccgcttcgcctcgaccgccccgg

SEQ ID NO: 2330227 - DNA, 25 bp, Homo sapien
ggcggccgcgtcctctcttctgagg

SEQ ID NO: 2330228 - DNA, 25 bp, Homo sapien
ggctgaagtggacggctgccccgcg

SEQ ID NO: 2330229 - DNA, 25 bp, Homo sapien
gcgtcctctcttctgaggcgctggg

SEQ ID NO: 2330230 - DNA, 25 bp, Homo sapien
ccctgggctgaagtggacggctgcc

SEQ ID NO: 2330231 - DNA, 25 bp, Homo sapien
aagcaactcggaaagcgcctgcgag

SEQ ID NO: 2330232 - DNA, 25 bp, Homo sapien
tgcgagcccgggtttgtcggatccc

SEQ ID NO: 2330233 - DNA, 25 bp, Homo sapien
ttcctcccgggcagttgcaaaagca

SEQ ID NO: 2330234 - DNA, 25 bp, Homo sapien
ccagatcggccgaagcgcccgggtc

SEQ ID NO: 2330235 - DNA, 25 bp, Homo sapien
taatcggcgtgtttgccatgaagga

SEQ ID NO: 2330236 - DNA, 25 bp, Homo sapien
cacgcttaattggttgcatccgcag

SEQ ID NO: 2330237 - DNA, 25 bp, Homo sapien
gcccgccgcggcttggaaattacag

SEQ ID NO: 2330238 - DNA, 25 bp, Homo sapien
tgctctcggacaactttgggactct

SEQ ID NO: 2330239 - DNA, 25 bp, Homo sapien
tcttgtttttgctgcctttgggtct

SEQ ID NO: 2330240 - DNA, 25 bp, Homo sapien
tgggtctcttaggagagggctcacc

SEQ ID NO: 2330241 - DNA, 25 bp, Homo sapien
tagagggactcttgtttttgctgcc

SEQ ID NO: 2330242 - DNA, 25 bp, Homo sapien
gctgctttagagggactcttgtttt

SEQ ID NO: 2330243 - DNA, 25 bp, Homo sapien
gagagcttgacttgagaaatctcac

SEQ ID NO: 2330244 - DNA, 25 bp, Homo sapien
gaagttaggagagcttgacttgaga

SEQ ID NO: 2330245 - DNA, 25 bp, Homo sapien
ttgatgaagttaggagagcttgact

SEQ ID NO: 2330246 - DNA, 25 bp, Homo sapien
tcagtcattgatgaagttaggagag

SEQ ID NO: 2330247 - DNA, 25 bp, Homo sapien
catgcattaaccctgacatagttcc

SEQ ID NO: 2330248 - DNA, 25 bp, Homo sapien
tttgcagtagccatgtaataagcac

SEQ ID NO: 2330249 - DNA, 25 bp, Homo sapien
cagttagtacccacagtcacaaaga

SEQ ID NO: 2330250 - DNA, 25 bp, Homo sapien
tccccaaacgatgagcatatagtcc

SEQ ID NO: 2330251 - DNA, 25 bp, Homo sapien
tttgcattgcaaaatcctgacgaac

SEQ ID NO: 2330252 - DNA, 25 bp, Homo sapien
tgatgggtctcagtttacaggaaaa

SEQ ID NO: 2330253 - DNA, 25 bp, Homo sapien
tcagggacaaattttgagcactcag

SEQ ID NO: 2330254 - DNA, 25 bp, Homo sapien
ttgtaagtcaagaaactccaagcag

SEQ ID NO: 2330255 - DNA, 25 bp, Homo sapien
catccgtgcaatggagatgactcct

SEQ ID NO: 2330256 - DNA, 25 bp, Homo sapien
tgtgagacatcattcctagaagtac

SEQ ID NO: 2330257 - DNA, 25 bp, Homo sapien
agtacttagaagttcctgcctccca

SEQ ID NO: 2330258 - DNA, 25 bp, Homo sapien
catgaggtgctccataagtgttctt

SEQ ID NO: 2330259 - DNA, 25 bp, Homo sapien
cccagagtgtcaagtaaataatacc

SEQ ID NO: 2330260 - DNA, 25 bp, Homo sapien
catgaatttagcgaaagcccagagt

SEQ ID NO: 2330261 - DNA, 25 bp, Homo sapien
cttcagtcccaagggcatgaattta

SEQ ID NO: 2330262 - DNA, 25 bp, Homo sapien
taccctcttcagagcattgcctcat

SEQ ID NO: 2330263 - DNA, 25 bp, Homo sapien
gggtacttggtacagtgatattgac

SEQ ID NO: 2330264 - DNA, 25 bp, Homo sapien
tgttatctgagttagcagccggtgg

SEQ ID NO: 2330265 - DNA, 25 bp, Homo sapien
gatattgactgtctacactgccaaa

SEQ ID NO: 2330266 - DNA, 25 bp, Homo sapien
ttgttatctgagttagcagccggtg

SEQ ID NO: 2330267 - DNA, 25 bp, Homo sapien
taggtctgcctcttggccgtttttc

SEQ ID NO: 2330268 - DNA, 25 bp, Homo sapien
cctaggtctgcctcttggccgtttt

SEQ ID NO: 2330269 - DNA, 25 bp, Homo sapien
aggtctgcctcttggccgtttttct

SEQ ID NO: 2330270 - DNA, 25 bp, Homo sapien
gtctgcctcttggccgtttttctcc

SEQ ID NO: 2330271 - DNA, 25 bp, Homo sapien
cagccttgagaggtagcaagttccc

SEQ ID NO: 2330272 - DNA, 25 bp, Homo sapien
tcaagcacgctagatgatcaccact

SEQ ID NO: 2330273 - DNA, 25 bp, Homo sapien
ccgtttgcagggctatcatgagtga

SEQ ID NO: 2330274 - DNA, 25 bp, Homo sapien
gatgacctagagacagtggacggaa

SEQ ID NO: 2330275 - DNA, 25 bp, Homo sapien
agatctgatgcctgaaatccagatc

SEQ ID NO: 2330276 - DNA, 25 bp, Homo sapien
ccagcaggaagatctgatgcctgaa

SEQ ID NO: 2330277 - DNA, 25 bp, Homo sapien
tctgatgcctgaaatccagatcccc

SEQ ID NO: 2330278 - DNA, 25 bp, Homo sapien
ctgatgcctgaaatccagatccccc

SEQ ID NO: 2330279 - DNA, 25 bp, Homo sapien
gacgagctcctttcctaggcaagaa

SEQ ID NO: 2330280 - DNA, 25 bp, Homo sapien
cattgtattcttgagcctgagcccc

SEQ ID NO: 2330281 - DNA, 25 bp, Homo sapien
tctaagctgcaatgtaaaactcctc

SEQ ID NO: 2330282 - DNA, 25 bp, Homo sapien
caaatttcaattggcaggactggct

SEQ ID NO: 2330283 - DNA, 25 bp, Homo sapien
ggtccttggatcaatttctaggtca

SEQ ID NO: 2330284 - DNA, 25 bp, Homo sapien
gctgggatctttctagtgaccaatt

SEQ ID NO: 2330285 - DNA, 25 bp, Homo sapien
gaactttaagcatctggtccttgga

SEQ ID NO: 2330286 - DNA, 25 bp, Homo sapien
gaagcactagctgcatcactaagca

SEQ ID NO: 2330287 - DNA, 25 bp, Homo sapien
cattagcagacagtttttgatgtca

SEQ ID NO: 2330288 - DNA, 25 bp, Homo sapien
tggcaagggtctaagggaaaatgat

SEQ ID NO: 2330289 - DNA, 25 bp, Homo sapien
taaagcacgtgataatggcaagggt

SEQ ID NO: 2330290 - DNA, 25 bp, Homo sapien
tctgactccagtacaaagttgcaat

SEQ ID NO: 2330291 - DNA, 25 bp, Homo sapien
ccatgttgacataagcctaggattt

SEQ ID NO: 2330292 - DNA, 25 bp, Homo sapien
tgaagtacttactcccatgttgaca

SEQ ID NO: 2330293 - DNA, 25 bp, Homo sapien
cattgctagctattattctaactga

SEQ ID NO: 2330294 - DNA, 25 bp, Homo sapien
tatgtaacattgctagctattattc

SEQ ID NO: 2330295 - DNA, 25 bp, Homo sapien
gattgcaaggtgctttatttgtaca

SEQ ID NO: 2330296 - DNA, 25 bp, Homo sapien
tatattattctgaccacaacccaga

SEQ ID NO: 2330297 - DNA, 25 bp, Homo sapien
actgctgttaccttatgattgcaag

SEQ ID NO: 2330298 - DNA, 25 bp, Homo sapien
atccagctagtgtatgaaattttaa

SEQ ID NO: 2330299 - DNA, 25 bp, Homo sapien
tgcaaccttccaggtcatttccact

SEQ ID NO: 2330300 - DNA, 25 bp, Homo sapien
tccaggtcatttccactccaagcca

SEQ ID NO: 2330301 - DNA, 25 bp, Homo sapien
tgtcctctcctgcctgggatcactg

SEQ ID NO: 2330302 - DNA, 25 bp, Homo sapien
tcctctcctgcctgggatcactgca

SEQ ID NO: 2330303 - DNA, 25 bp, Homo sapien
aattttccaactggtcttctccagt

SEQ ID NO: 2330304 - DNA, 25 bp, Homo sapien
ttccccacacgtcagtcggcaacct

SEQ ID NO: 2330305 - DNA, 25 bp, Homo sapien
tcatggttcagctgtcacagccagg

SEQ ID NO: 2330306 - DNA, 25 bp, Homo sapien
actgtaccactgcagacacggccat

SEQ ID NO: 2330307 - DNA, 25 bp, Homo sapien
aaaagcagtctataaatcttttgaa

SEQ ID NO: 2330308 - DNA, 25 bp, Homo sapien
caggtctattcattccttccttaaa

SEQ ID NO: 2330309 - DNA, 25 bp, Homo sapien
tgttttcaggtctattcattccttc

SEQ ID NO: 2330310 - DNA, 25 bp, Homo sapien
gggaattaatccaaaaatcacacca

SEQ ID NO: 2330311 - DNA, 25 bp, Homo sapien
gcaaaagcttttgctagcttccagg

SEQ ID NO: 2330312 - DNA, 25 bp, Homo sapien
ttaaagagaatgcagtcaggaagac

SEQ ID NO: 2330313 - DNA, 25 bp, Homo sapien
aatattgttctcctaggtctgtaag

SEQ ID NO: 2330314 - DNA, 25 bp, Homo sapien
aagacagagcaatccattcccatga

SEQ ID NO: 2330315 - DNA, 25 bp, Homo sapien
gaaatactgtacaagaagggctgcc

SEQ ID NO: 2330316 - DNA, 25 bp, Homo sapien
aatttgaggccattttgcaagccca

SEQ ID NO: 2330317 - DNA, 25 bp, Homo sapien
tataatagcagtaacgacctcagca

SEQ ID NO: 2330318 - DNA, 25 bp, Homo sapien
ggaatgtcaaataactaggctgtgc

SEQ ID NO: 2330319 - DNA, 25 bp, Homo sapien
cctgacctatgatggcctgactgga

SEQ ID NO: 2330320 - DNA, 25 bp, Homo sapien
tattaagcggttactgtataccaca

SEQ ID NO: 2330321 - DNA, 25 bp, Homo sapien
gaatgacctgagtagcctagccacg

SEQ ID NO: 2330322 - DNA, 25 bp, Homo sapien
tataccacagtcctaggttttgaag

SEQ ID NO: 2330323 - DNA, 25 bp, Homo sapien
cctcagagtctaagcatggttggca

SEQ ID NO: 2330324 - DNA, 25 bp, Homo sapien
taaaggatccctatttgtagtgctc

SEQ ID NO: 2330325 - DNA, 25 bp, Homo sapien
gaattaggaatcctggagccctcag

SEQ ID NO: 2330326 - DNA, 25 bp, Homo sapien
aataagcacgatggaaatgggccct

SEQ ID NO: 2330327 - DNA, 25 bp, Homo sapien
ggaaaaagaagacaaaggtgaatgc

SEQ ID NO: 2330328 - DNA, 25 bp, Homo sapien
aaagaagacaaaggtgaatgctcag

SEQ ID NO: 2330329 - DNA, 25 bp, Homo sapien
aaaagaagacaaaggtgaatgctca

SEQ ID NO: 2330330 - DNA, 25 bp, Homo sapien
gaaaaagaagacaaaggtgaatgct

SEQ ID NO: 2330331 - DNA, 25 bp, Homo sapien
cgggctaaggtacaagaggtaatgt

SEQ ID NO: 2330332 - DNA, 25 bp, Homo sapien
cactttgaagcttataggtagttac

SEQ ID NO: 2330333 - DNA, 25 bp, Homo sapien
catcttgccttttacctgactctta

SEQ ID NO: 2330334 - DNA, 25 bp, Homo sapien
gacacctgcaacatatcccttggat

SEQ ID NO: 2330335 - DNA, 25 bp, Homo sapien
ggtgcccatgtccagttattcaagt

SEQ ID NO: 2330336 - DNA, 25 bp, Homo sapien
tacagagagcccaatgaggaatgtg

SEQ ID NO: 2330337 - DNA, 25 bp, Homo sapien
taaccactagtttccccttgagatg

SEQ ID NO: 2330338 - DNA, 25 bp, Homo sapien
tcaacttagcaacatggtgcccatg

SEQ ID NO: 2330339 - DNA, 25 bp, Homo sapien
gaggctccatcaaccacccagatgg

SEQ ID NO: 2330340 - DNA, 25 bp, Homo sapien
taaggagagctgctatctctagccc

SEQ ID NO: 2330341 - DNA, 25 bp, Homo sapien
ggtggttcactatgatccctaagaa

SEQ ID NO: 2330342 - DNA, 25 bp, Homo sapien
cccagatggaattttaggagctatg

SEQ ID NO: 2330343 - DNA, 25 bp, Homo sapien
taaagtatgggcagaagtcaaactg

SEQ ID NO: 2330344 - DNA, 25 bp, Homo sapien
cctggaggccaagctaaaggtgtct

SEQ ID NO: 2330345 - DNA, 25 bp, Homo sapien
ctcacctagagggaaaaccgcacct

SEQ ID NO: 2330346 - DNA, 25 bp, Homo sapien
tcttaagaagcccatgtgacattgt

SEQ ID NO: 2330347 - DNA, 25 bp, Homo sapien
gaaggtgatgtatggcccataaatc

SEQ ID NO: 2330348 - DNA, 25 bp, Homo sapien
caaggtgtcaacaaagccaaccagg

SEQ ID NO: 2330349 - DNA, 25 bp, Homo sapien
aagcccaagcaagaatgtgacaagg

SEQ ID NO: 2330350 - DNA, 25 bp, Homo sapien
gaacaatgaattcctcaagcccaag

SEQ ID NO: 2330351 - DNA, 25 bp, Homo sapien
taaataagcatttaccgggagatat

SEQ ID NO: 2330352 - DNA, 25 bp, Homo sapien
gatgaggtcttaactgtacattgtc

SEQ ID NO: 2330353 - DNA, 25 bp, Homo sapien
ccaagacctagactcctggaataag

SEQ ID NO: 2330354 - DNA, 25 bp, Homo sapien
tacaaacactgaactagtacttcta

SEQ ID NO: 2330355 - DNA, 25 bp, Homo sapien
caccagcacgggctcttcattagca

SEQ ID NO: 2330356 - DNA, 25 bp, Homo sapien
agcacgggctcttcattagcaacca

SEQ ID NO: 2330357 - DNA, 25 bp, Homo sapien
tgtcatcccaccacttgcgcgcaag

SEQ ID NO: 2330358 - DNA, 25 bp, Homo sapien
ggccagttccgggatcagcaggctt

SEQ ID NO: 2330359 - DNA, 25 bp, Homo sapien
catggaaacatactccgggacctac

SEQ ID NO: 2330360 - DNA, 25 bp, Homo sapien
ccgcaattggaatctctccatgcct

SEQ ID NO: 2330361 - DNA, 25 bp, Homo sapien
atggagacgttcagctgcaaaggct

SEQ ID NO: 2330362 - DNA, 25 bp, Homo sapien
agctgcaaaggctacggaggaaccc

SEQ ID NO: 2330363 - DNA, 25 bp, Homo sapien
catctatctgggtctaaggaggcaa

SEQ ID NO: 2330364 - DNA, 25 bp, Homo sapien
tgggaaggttcagacgcacattgac

SEQ ID NO: 2330365 - DNA, 25 bp, Homo sapien
tagacagtactttgcacaataccag

SEQ ID NO: 2330366 - DNA, 25 bp, Homo sapien
caataccagacacccagtaagggct

SEQ ID NO: 2330367 - DNA, 25 bp, Homo sapien
gctagtaagatatcttactgtaaag

SEQ ID NO: 2330368 - DNA, 25 bp, Homo sapien
taaagctcctaatgacgcaactcca

SEQ ID NO: 2330369 - DNA, 25 bp, Homo sapien
cctgtggcaggctaatattggctag

SEQ ID NO: 2330370 - DNA, 25 bp, Homo sapien
tcctaatgacgcaactccaaagaat

SEQ ID NO: 2330371 - DNA, 25 bp, Homo sapien
gctggaatattctatcctattcctt

SEQ ID NO: 2330372 - DNA, 25 bp, Homo sapien
aatattctatcctattccttgttgg

SEQ ID NO: 2330373 - DNA, 25 bp, Homo sapien
tggccttttgtgtactgtgttttca

SEQ ID NO: 2330374 - DNA, 25 bp, Homo sapien
ttggccttttgtgtactgtgttttc

SEQ ID NO: 2330375 - DNA, 25 bp, Homo sapien
ccatcagagtgagtgtcggcgcaga

SEQ ID NO: 2330376 - DNA, 25 bp, Homo sapien
tattgtacaaactgtaatctctgaa

SEQ ID NO: 2330377 - DNA, 25 bp, Homo sapien
cagaggcagagcactccggtccaga

SEQ ID NO: 2330378 - DNA, 25 bp, Homo sapien
cagcgagaagacaaggcagcgcatt

SEQ ID NO: 2330379 - DNA, 25 bp, Homo sapien
ccaatgattagagggaattcgccaa

SEQ ID NO: 2330380 - DNA, 25 bp, Homo sapien
gaagatctgcttctagaaatggcca

SEQ ID NO: 2330381 - DNA, 25 bp, Homo sapien
gccattggccattgacttacgagta

SEQ ID NO: 2330382 - DNA, 25 bp, Homo sapien
gaaaattcctgggagcacaagccct

SEQ ID NO: 2330383 - DNA, 25 bp, Homo sapien
taacatgaagagctatcctggactc

SEQ ID NO: 2330384 - DNA, 25 bp, Homo sapien
tggatccctgtacgagagtaactgg

SEQ ID NO: 2330385 - DNA, 25 bp, Homo sapien
tatatcggagaaagccacacataag

SEQ ID NO: 2330386 - DNA, 25 bp, Homo sapien
ttttcaaattcgtacaagggtgcca

SEQ ID NO: 2330387 - DNA, 25 bp, Homo sapien
tgtgtgaggtctgataaatgttctt

SEQ ID NO: 2330388 - DNA, 25 bp, Homo sapien
gaaacaagactgtctagacctccct

SEQ ID NO: 2330389 - DNA, 25 bp, Homo sapien
caaggtgctttgaaaattgtagtca

SEQ ID NO: 2330390 - DNA, 25 bp, Homo sapien
agagatttatcagaaccgtacccct

SEQ ID NO: 2330391 - DNA, 25 bp, Homo sapien
gatctcttgacctcaagccatccac

SEQ ID NO: 2330392 - DNA, 25 bp, Homo sapien
ccacctgcctcagtctcccaaagtg

SEQ ID NO: 2330393 - DNA, 25 bp, Homo sapien
ccatccacctgcctcagtctcccaa

SEQ ID NO: 2330394 - DNA, 25 bp, Homo sapien
atccacctgcctcagtctcccaaag

SEQ ID NO: 2330395 - DNA, 25 bp, Homo sapien
gaatagttagagtcacacctggtgg

SEQ ID NO: 2330396 - DNA, 25 bp, Homo sapien
cacaactgaaaatgcccgagatccg

SEQ ID NO: 2330397 - DNA, 25 bp, Homo sapien
gaagcgttccccaatacaacagaag

SEQ ID NO: 2330398 - DNA, 25 bp, Homo sapien
taagaacttatgtgagggcacacac

SEQ ID NO: 2330399 - DNA, 25 bp, Homo sapien
tcaacatggtcacgcagaaaagcac

SEQ ID NO: 2330400 - DNA, 25 bp, Homo sapien
aaaaagacccctgattactgcatgg

SEQ ID NO: 2330401 - DNA, 25 bp, Homo sapien
ttcctggaatgaacagcgtgctgct

SEQ ID NO: 2330402 - DNA, 25 bp, Homo sapien
tcccgtgtgttgaaagaaggccatg

SEQ ID NO: 2330403 - DNA, 25 bp, Homo sapien
tcagctcaacgcagatttgccatct

SEQ ID NO: 2330404 - DNA, 25 bp, Homo sapien
ttcagctcaacgcagatttgccatc

SEQ ID NO: 2330405 - DNA, 25 bp, Homo sapien
ggcgcccatccactaatagatccat

SEQ ID NO: 2330406 - DNA, 25 bp, Homo sapien
tgactgtgtcgttctggcgcccatc

SEQ ID NO: 2330407 - DNA, 25 bp, Homo sapien
tgcattgactgtgtcgttctggcgc

SEQ ID NO: 2330408 - DNA, 25 bp, Homo sapien
gcccatccactaatagatccatgca

SEQ ID NO: 2330409 - DNA, 25 bp, Homo sapien
tcttgttttatacttcttagaatga

SEQ ID NO: 2330410 - DNA, 25 bp, Homo sapien
aaaatgcagatttctcgtgctcgaa

SEQ ID NO: 2330411 - DNA, 25 bp, Homo sapien
tctcgtgctcgaaaacctggacatt

SEQ ID NO: 2330412 - DNA, 25 bp, Homo sapien
tttatacttcttagaatgaaaatgc

SEQ ID NO: 2330413 - DNA, 25 bp, Homo sapien
tactgaagaaatctccacgtctctt

SEQ ID NO: 2330414 - DNA, 25 bp, Homo sapien
ctggtgctcccgtgcatgtgttcat

SEQ ID NO: 2330415 - DNA, 25 bp, Homo sapien
tcccataatgatgtaggcccatcta

SEQ ID NO: 2330416 - DNA, 25 bp, Homo sapien
aatcccttgtccagtatggtctctg

SEQ ID NO: 2330417 - DNA, 25 bp, Homo sapien
catgtattatgtgttattgtctgtg

SEQ ID NO: 2330418 - DNA, 25 bp, Homo sapien
tatgtgttattgtctgtgaccaaaa

SEQ ID NO: 2330419 - DNA, 25 bp, Homo sapien
tattatgtgttattgtctgtgacca

SEQ ID NO: 2330420 - DNA, 25 bp, Homo sapien
tgtgttattgtctgtgaccaaaata

SEQ ID NO: 2330421 - DNA, 25 bp, Homo sapien
cctttcacgaaattatgtgatcgac

SEQ ID NO: 2330422 - DNA, 25 bp, Homo sapien
tgtgatcgacatacttgttcatggc

SEQ ID NO: 2330423 - DNA, 25 bp, Homo sapien
tgttcatggccctccggatttagtt

SEQ ID NO: 2330424 - DNA, 25 bp, Homo sapien
gaatttgcctttcacgaaattatgt

SEQ ID NO: 2330425 - DNA, 25 bp, Homo sapien
aggctgactggttcctactgctcag

SEQ ID NO: 2330426 - DNA, 25 bp, Homo sapien
ggctgactggttcctactgctcaga

SEQ ID NO: 2330427 - DNA, 25 bp, Homo sapien
tgagcaggcttcttctgaacaactt

SEQ ID NO: 2330428 - DNA, 25 bp, Homo sapien
gcttcttctgaacaacttgttgtgg

SEQ ID NO: 2330429 - DNA, 25 bp, Homo sapien
gcaggcttcttctgaacaacttgtt

SEQ ID NO: 2330430 - DNA, 25 bp, Homo sapien
aggcttcttctgaacaacttgttgt

SEQ ID NO: 2330431 - DNA, 25 bp, Homo sapien
aagtggcatttttagagaacagtag

SEQ ID NO: 2330432 - DNA, 25 bp, Homo sapien
ttattccacttaaagctcatatgta

SEQ ID NO: 2330433 - DNA, 25 bp, Homo sapien
atatataagattgcccgggtggtcc

SEQ ID NO: 2330434 - DNA, 25 bp, Homo sapien
gtgtttggaagtttcaattctcttc

SEQ ID NO: 2330435 - DNA, 25 bp, Homo sapien
tgccagggctgtacaacaatgggga

SEQ ID NO: 2330436 - DNA, 25 bp, Homo sapien
cctaattgccagaggcatcgtttgc

SEQ ID NO: 2330437 - DNA, 25 bp, Homo sapien
tgtcctaattgccagaggcatcgtt

SEQ ID NO: 2330438 - DNA, 25 bp, Homo sapien
aaagtggattgaaagggtggagagc

SEQ ID NO: 2330439 - DNA, 25 bp, Homo sapien
gcaagtgcacggtgacatttttatg

SEQ ID NO: 2330440 - DNA, 25 bp, Homo sapien
agtgcacggtgacatttttatgagc

SEQ ID NO: 2330441 - DNA, 25 bp, Homo sapien
ttcaaagtgcaagtgcacggtgaca

SEQ ID NO: 2330442 - DNA, 25 bp, Homo sapien
agtgcaagtgcacggtgacattttt

SEQ ID NO: 2330443 - DNA, 25 bp, Homo sapien
cccagtgacttggtctttggttaca

SEQ ID NO: 2330444 - DNA, 25 bp, Homo sapien
tctgtacgacaagtgtgcattcaat

SEQ ID NO: 2330445 - DNA, 25 bp, Homo sapien
tacatgtgcggattctgtacgacaa

SEQ ID NO: 2330446 - DNA, 25 bp, Homo sapien
cttggtctttggttacatgtgcgga

SEQ ID NO: 2330447 - DNA, 25 bp, Homo sapien
taaaacagcttataacagtcttcat

SEQ ID NO: 2330448 - DNA, 25 bp, Homo sapien
ctttaagaatggccagcttaaaaca

SEQ ID NO: 2330449 - DNA, 25 bp, Homo sapien
catgggtggtaaagcggagacaata

SEQ ID NO: 2330450 - DNA, 25 bp, Homo sapien
taaaagcgtcgttagtgagaggatg

SEQ ID NO: 2330451 - DNA, 25 bp, Homo sapien
ataaacatttccgataaaagcgtcg

SEQ ID NO: 2330452 - DNA, 25 bp, Homo sapien
ctgcacattgtctcataagacggca

SEQ ID NO: 2330453 - DNA, 25 bp, Homo sapien
tctgcgagccggcttgagccgcaaa

SEQ ID NO: 2330454 - DNA, 25 bp, Homo sapien
gcttgagccgcaaagttctctttcc

SEQ ID NO: 2330455 - DNA, 25 bp, Homo sapien
gagccggcttgagccgcaaagttct

SEQ ID NO: 2330456 - DNA, 25 bp, Homo sapien
aatttgttggggtttctgcgagccg

SEQ ID NO: 2330457 - DNA, 25 bp, Homo sapien
gggcacagccatgacgctcaatcgt

SEQ ID NO: 2330458 - DNA, 25 bp, Homo sapien
gccatgacgctcaatcgttatactg

SEQ ID NO: 2330459 - DNA, 25 bp, Homo sapien
cgctcaatcgttatactgtgtgggc

SEQ ID NO: 2330460 - DNA, 25 bp, Homo sapien
cgttatactgtgtgggctgctcttg

SEQ ID NO: 2330461 - DNA, 25 bp, Homo sapien
tcttcggcagactcttgtgaggatg

SEQ ID NO: 2330462 - DNA, 25 bp, Homo sapien
ctagtcctcttcggcagactcttgt

SEQ ID NO: 2330463 - DNA, 25 bp, Homo sapien
gtcctcttcggcagactcttgtgag

SEQ ID NO: 2330464 - DNA, 25 bp, Homo sapien
ttcggcagactcttgtgaggatgtc

SEQ ID NO: 2330465 - DNA, 25 bp, Homo sapien
gaggtagaaatcgaacgttggcgcc

SEQ ID NO: 2330466 - DNA, 25 bp, Homo sapien
tgaatgcccgacgtcacaagtgtga

SEQ ID NO: 2330467 - DNA, 25 bp, Homo sapien
aaagcagggcttgttgcatctcacc

SEQ ID NO: 2330468 - DNA, 25 bp, Homo sapien
gaactcaagccgaagaaaagcacct

SEQ ID NO: 2330469 - DNA, 25 bp, Homo sapien
tactcatttaatggaactgtaacaa

SEQ ID NO: 2330470 - DNA, 25 bp, Homo sapien
gaactgtaacaaagagcaggaatca

SEQ ID NO: 2330471 - DNA, 25 bp, Homo sapien
taatggaactgtaacaaagagcagg

SEQ ID NO: 2330472 - DNA, 25 bp, Homo sapien
caaactttattactcatttaatgga

SEQ ID NO: 2330473 - DNA, 25 bp, Homo sapien
caggtaccaggattgatccaagcag

SEQ ID NO: 2330474 - DNA, 25 bp, Homo sapien
tactggactgcaaataggacctcgg

SEQ ID NO: 2330475 - DNA, 25 bp, Homo sapien
ccaggtggtatgttttgggtgtcca

SEQ ID NO: 2330476 - DNA, 25 bp, Homo sapien
taagccagtgcacagtgaagaagac

SEQ ID NO: 2330477 - DNA, 25 bp, Homo sapien
cagggcctggacttggggtgaacag

SEQ ID NO: 2330478 - DNA, 25 bp, Homo sapien
agagaccctcggacccctgcagggc

SEQ ID NO: 2330479 - DNA, 25 bp, Homo sapien
tcagtcagcgcaagtattccatttg

SEQ ID NO: 2330480 - DNA, 25 bp, Homo sapien
cagggcttcagtcagcgcaagtatt

SEQ ID NO: 2330481 - DNA, 25 bp, Homo sapien
ggatttttatttgcccagcagtagg

SEQ ID NO: 2330482 - DNA, 25 bp, Homo sapien
tagccctgtcagtactcccaatgtt

SEQ ID NO: 2330483 - DNA, 25 bp, Homo sapien
tccctcagcgggataaggctttctt

SEQ ID NO: 2330484 - DNA, 25 bp, Homo sapien
cagtgtggttcaaaagaatttctcc

SEQ ID NO: 2330485 - DNA, 25 bp, Homo sapien
tgtcttctttccctttgtattcgtc

SEQ ID NO: 2330486 - DNA, 25 bp, Homo sapien
gtcttctttccctttgtattcgtca

SEQ ID NO: 2330487 - DNA, 25 bp, Homo sapien
atatattgggtgcctgtcttctttc

SEQ ID NO: 2330488 - DNA, 25 bp, Homo sapien
agaacatatattgggtgcctgtctt

SEQ ID NO: 2330489 - DNA, 25 bp, Homo sapien
tatcacctttcttatagattcgcat

SEQ ID NO: 2330490 - DNA, 25 bp, Homo sapien
atatcacctttcttatagattcgca

SEQ ID NO: 2330491 - DNA, 25 bp, Homo sapien
ttctcttacatctacaatatcacct

SEQ ID NO: 2330492 - DNA, 25 bp, Homo sapien
tttgaaaagtacccattctcttaca

SEQ ID NO: 2330493 - DNA, 25 bp, Homo sapien
aactgtagactcttccagttttgcc

SEQ ID NO: 2330494 - DNA, 25 bp, Homo sapien
gtaactgtagactcttccagttttg

SEQ ID NO: 2330495 - DNA, 25 bp, Homo sapien
ctgtagactcttccagttttgccat

SEQ ID NO: 2330496 - DNA, 25 bp, Homo sapien
ctgggtaactgtagactcttccagt

SEQ ID NO: 2330497 - DNA, 25 bp, Homo sapien
ctcgcgtttcaggaagccatctcgg

SEQ ID NO: 2330498 - DNA, 25 bp, Homo sapien
gagcagactggggcttcagtcgaac

SEQ ID NO: 2330499 - DNA, 25 bp, Homo sapien
gcagactggggcttcagtcgaaccc

SEQ ID NO: 2330500 - DNA, 25 bp, Homo sapien
agactggggcttcagtcgaacccag

SEQ ID NO: 2330501 - DNA, 25 bp, Homo sapien
ttgggtactgagtgtgcagacctga

SEQ ID NO: 2330502 - DNA, 25 bp, Homo sapien
tgacacattgggtactgagtgtgca

SEQ ID NO: 2330503 - DNA, 25 bp, Homo sapien
cagtaatcttaaaagttttgcactt

SEQ ID NO: 2330504 - DNA, 25 bp, Homo sapien
tctattatgttgacacattgggtac

SEQ ID NO: 2330505 - DNA, 25 bp, Homo sapien
cttgagcagttggtgtcacacacaa

SEQ ID NO: 2330506 - DNA, 25 bp, Homo sapien
ttgagcagttggtgtcacacacaac

SEQ ID NO: 2330507 - DNA, 25 bp, Homo sapien
cacaacattttgggacctggtagcc

SEQ ID NO: 2330508 - DNA, 25 bp, Homo sapien
tgagcagttggtgtcacacacaaca

SEQ ID NO: 2330509 - DNA, 25 bp, Homo sapien
cagatcctggaccagtatttggcag

SEQ ID NO: 2330510 - DNA, 25 bp, Homo sapien
ggtcctcttagaaaggcaggcagat

SEQ ID NO: 2330511 - DNA, 25 bp, Homo sapien
ttatctagcgctaaagcttttcttt

SEQ ID NO: 2330512 - DNA, 25 bp, Homo sapien
tggcagactagcactgtgttagcaa

SEQ ID NO: 2330513 - DNA, 25 bp, Homo sapien
tgctgtcgtgctcggattatattga

SEQ ID NO: 2330514 - DNA, 25 bp, Homo sapien
tgagtttaggtgctgctggatacat

SEQ ID NO: 2330515 - DNA, 25 bp, Homo sapien
ttatattgagtttaggtgctgctgg

SEQ ID NO: 2330516 - DNA, 25 bp, Homo sapien
gacagatggtgtgttggccatttgc

SEQ ID NO: 2330517 - DNA, 25 bp, Homo sapien
tctttaaggcgacacgaaggaggaa

SEQ ID NO: 2330518 - DNA, 25 bp, Homo sapien
taagaaaatacagcagtgtctcctc

SEQ ID NO: 2330519 - DNA, 25 bp, Homo sapien
tcttaagcgaatggatggttcccag

SEQ ID NO: 2330520 - DNA, 25 bp, Homo sapien
aattgaatctgcacatgggatggac

SEQ ID NO: 2330521 - DNA, 25 bp, Homo sapien
tagacttttgcagcttccgagcctt

SEQ ID NO: 2330522 - DNA, 25 bp, Homo sapien
gaagtcagatggtcttcacttctca

SEQ ID NO: 2330523 - DNA, 25 bp, Homo sapien
ggctgaataattctataggaagtca

SEQ ID NO: 2330524 - DNA, 25 bp, Homo sapien
catcttgggtcaacgtagacttttg

SEQ ID NO: 2330525 - DNA, 25 bp, Homo sapien
tctctgtgttgtccaagattccagc

SEQ ID NO: 2330526 - DNA, 25 bp, Homo sapien
tattaattctgagcccgcatatttt

SEQ ID NO: 2330527 - DNA, 25 bp, Homo sapien
cagcaacaaaacagtagggaactcc

SEQ ID NO: 2330528 - DNA, 25 bp, Homo sapien
ctctctgtaaagttcctggatccca

SEQ ID NO: 2330529 - DNA, 25 bp, Homo sapien
agccctgctacagcagcatcctgag

SEQ ID NO: 2330530 - DNA, 25 bp, Homo sapien
tggcacagccctgctacagcagcat

SEQ ID NO: 2330531 - DNA, 25 bp, Homo sapien
cagccttcggctctctcatctgcct

SEQ ID NO: 2330532 - DNA, 25 bp, Homo sapien
tggactccagccttcggctctctca

SEQ ID NO: 2330533 - DNA, 25 bp, Homo sapien
gctgtagttggtaatggctttttga

SEQ ID NO: 2330534 - DNA, 25 bp, Homo sapien
ctgctgtagttggtaatggcttttt

SEQ ID NO: 2330535 - DNA, 25 bp, Homo sapien
ggctgctgtagttggtaatggcttt

SEQ ID NO: 2330536 - DNA, 25 bp, Homo sapien
tgtagttggtaatggctttttgaga

SEQ ID NO: 2330537 - DNA, 25 bp, Homo sapien
gccagtgcgagatccatggtgagac

SEQ ID NO: 2330538 - DNA, 25 bp, Homo sapien
caagaatctccctcttcacttgttt

SEQ ID NO: 2330539 - DNA, 25 bp, Homo sapien
agtctcttctgcaacacatttccaa

SEQ ID NO: 2330540 - DNA, 25 bp, Homo sapien
ctgagtgggccagtgcgagatccat

SEQ ID NO: 2330541 - DNA, 25 bp, Homo sapien
gggattctaaaaatgggtatgaaca

SEQ ID NO: 2330542 - DNA, 25 bp, Homo sapien
tctgccacgtttggaagattgctga

SEQ ID NO: 2330543 - DNA, 25 bp, Homo sapien
agattgctgatgctctaggggtaag

SEQ ID NO: 2330544 - DNA, 25 bp, Homo sapien
ggtttaagtgacttagttctgccac

SEQ ID NO: 2330545 - DNA, 25 bp, Homo sapien
cctgttgttagcagcgatggagtct

SEQ ID NO: 2330546 - DNA, 25 bp, Homo sapien
tgagttgcaagttggtttgggaaac

SEQ ID NO: 2330547 - DNA, 25 bp, Homo sapien
tgggaaactccttcaagaagttgag

SEQ ID NO: 2330548 - DNA, 25 bp, Homo sapien
gctggtgaaatcctggtcaacagat

SEQ ID NO: 2330549 - DNA, 25 bp, Homo sapien
cctgaagggacagcaaccgatcaag

SEQ ID NO: 2330550 - DNA, 25 bp, Homo sapien
ggacagcaaccgatcaagggcggct

SEQ ID NO: 2330551 - DNA, 25 bp, Homo sapien
gcggctgtgctgcagtagtgccagc

SEQ ID NO: 2330552 - DNA, 25 bp, Homo sapien
gcaaccgatcaagggcggctgtgct

SEQ ID NO: 2330553 - DNA, 25 bp, Homo sapien
tcatctagtaccatggatggacaag

SEQ ID NO: 2330554 - DNA, 25 bp, Homo sapien
gggccctgcagatattccattctag

SEQ ID NO: 2330555 - DNA, 25 bp, Homo sapien
caagagttatcaaggaaagtcctgg

SEQ ID NO: 2330556 - DNA, 25 bp, Homo sapien
aggaaagaattcacatgggacgcac

SEQ ID NO: 2330557 - DNA, 25 bp, Homo sapien
ggtatttctgatccatgtaataaag

SEQ ID NO: 2330558 - DNA, 25 bp, Homo sapien
tgcatacctttcagctgttacttca

SEQ ID NO: 2330559 - DNA, 25 bp, Homo sapien
tacagcaactgttagtacatgtggt

SEQ ID NO: 2330560 - DNA, 25 bp, Homo sapien
tcatgtatcttgtgatctgcatacc

SEQ ID NO: 2330561 - DNA, 25 bp, Homo sapien
catgtatactttgatttcaactgcc

SEQ ID NO: 2330562 - DNA, 25 bp, Homo sapien
aagcagtgaaagtggcaaagggttt

SEQ ID NO: 2330563 - DNA, 25 bp, Homo sapien
gatgacggattagaatgtatacaca

SEQ ID NO: 2330564 - DNA, 25 bp, Homo sapien
tttttcttcaattcaaacccagcat

SEQ ID NO: 2330565 - DNA, 25 bp, Homo sapien
gaatttcgtttcttgacactcgctg

SEQ ID NO: 2330566 - DNA, 25 bp, Homo sapien
gcttgattccgccacccttggagaa

SEQ ID NO: 2330567 - DNA, 25 bp, Homo sapien
ccggcttccgagtgcactggataaa

SEQ ID NO: 2330568 - DNA, 25 bp, Homo sapien
gctatacttgagctccagtccggag

SEQ ID NO: 2330569 - DNA, 25 bp, Homo sapien
ggacacccgtcagcattctccaaat

SEQ ID NO: 2330570 - DNA, 25 bp, Homo sapien
ttgaccggacacccgtcagcattct

SEQ ID NO: 2330571 - DNA, 25 bp, Homo sapien
cgtcagcattctccaaatccgactt

SEQ ID NO: 2330572 - DNA, 25 bp, Homo sapien
taaccttgaccggacacccgtcagc

SEQ ID NO: 2330573 - DNA, 25 bp, Homo sapien
atcagggattccatgggagaggcct

SEQ ID NO: 2330574 - DNA, 25 bp, Homo sapien
catcatgtagcatgccttttggatg

SEQ ID NO: 2330575 - DNA, 25 bp, Homo sapien
ttccatgggagaggcctgactgcag

SEQ ID NO: 2330576 - DNA, 25 bp, Homo sapien
tgttctgcatcatgtagcatgcctt

SEQ ID NO: 2330577 - DNA, 25 bp, Homo sapien
atggggtcactatctgaatcccaga

SEQ ID NO: 2330578 - DNA, 25 bp, Homo sapien
gggcaacatggggtcactatctgaa

SEQ ID NO: 2330579 - DNA, 25 bp, Homo sapien
gaatgggcaacatggggtcactatc

SEQ ID NO: 2330580 - DNA, 25 bp, Homo sapien
caacatggggtcactatctgaatcc

SEQ ID NO: 2330581 - DNA, 25 bp, Homo sapien
gcatggtgggtaagagcatctagat

SEQ ID NO: 2330582 - DNA, 25 bp, Homo sapien
ttagaatcattgcagtccaaccagg

SEQ ID NO: 2330583 - DNA, 25 bp, Homo sapien
gcaatcaagtttaacagcatggtgg

SEQ ID NO: 2330584 - DNA, 25 bp, Homo sapien
tccaaccaggtgcttaagtgacatt

SEQ ID NO: 2330585 - DNA, 25 bp, Homo sapien
taggtcagtgtaccagtaaccaatg

SEQ ID NO: 2330586 - DNA, 25 bp, Homo sapien
aacaaagttctacagcttgggtggc

SEQ ID NO: 2330587 - DNA, 25 bp, Homo sapien
tagaggacaccaaagatactgggtc

SEQ ID NO: 2330588 - DNA, 25 bp, Homo sapien
tgttggtccacacagcatgttaggt

SEQ ID NO: 2330589 - DNA, 25 bp, Homo sapien
gaatatcagtttaccgttgtctagt

SEQ ID NO: 2330590 - DNA, 25 bp, Homo sapien
acattaaaagttggcctgaaagtca

SEQ ID NO: 2330591 - DNA, 25 bp, Homo sapien
gcatagcagttcgtttgcaattcaa

SEQ ID NO: 2330592 - DNA, 25 bp, Homo sapien
cttcctaaattagccacgcatagca

SEQ ID NO: 2330593 - DNA, 25 bp, Homo sapien
cacctgttacggtttctggaagcag

SEQ ID NO: 2330594 - DNA, 25 bp, Homo sapien
atggagttggtcttagccgctgcag

SEQ ID NO: 2330595 - DNA, 25 bp, Homo sapien
cttccatccaacagaggcaagtttg

SEQ ID NO: 2330596 - DNA, 25 bp, Homo sapien
cctgaagagtacgtattagctgcca

SEQ ID NO: 2330597 - DNA, 25 bp, Homo sapien
tcacctggtaggaatgcatagactc

SEQ ID NO: 2330598 - DNA, 25 bp, Homo sapien
tagtacaggtattgaaagggtctgc

SEQ ID NO: 2330599 - DNA, 25 bp, Homo sapien
ggattatggtacagcattgccctca

SEQ ID NO: 2330600 - DNA, 25 bp, Homo sapien
taaatgttaccaagaccatccacgt

SEQ ID NO: 2330601 - DNA, 25 bp, Homo sapien
tctccagcccctactatgtataaag

SEQ ID NO: 2330602 - DNA, 25 bp, Homo sapien
catagatgaggtaatctgagaacat

SEQ ID NO: 2330603 - DNA, 25 bp, Homo sapien
taggattgaagcttcttaacagaga

SEQ ID NO: 2330604 - DNA, 25 bp, Homo sapien
gttcaccttcctaatcctgtaatgg

SEQ ID NO: 2330605 - DNA, 25 bp, Homo sapien
taactgccccatatacttcgcaggg

SEQ ID NO: 2330606 - DNA, 25 bp, Homo sapien
tatgcgattagagcttaaagagtca

SEQ ID NO: 2330607 - DNA, 25 bp, Homo sapien
tgggatcacattaagctgctagaaa

SEQ ID NO: 2330608 - DNA, 25 bp, Homo sapien
cattatggtgggtttactaactgcc

SEQ ID NO: 2330609 - DNA, 25 bp, Homo sapien
caatttagtgaaggtgacaagggcc

SEQ ID NO: 2330610 - DNA, 25 bp, Homo sapien
taaggtccaggcattcctagagtgg

SEQ ID NO: 2330611 - DNA, 25 bp, Homo sapien
aagggcccacgcttctgctaaggtc

SEQ ID NO: 2330612 - DNA, 25 bp, Homo sapien
gtatcgttacgtagtcagacctaga

SEQ ID NO: 2330613 - DNA, 25 bp, Homo sapien
aataccatttttgctctggtgctga

SEQ ID NO: 2330614 - DNA, 25 bp, Homo sapien
gatggtttcctgatatcaggtaggg

SEQ ID NO: 2330615 - DNA, 25 bp, Homo sapien
gtggagtacagggatgcttctacca

SEQ ID NO: 2330616 - DNA, 25 bp, Homo sapien
taccaggagtgtgattatacagcca

SEQ ID NO: 2330617 - DNA, 25 bp, Homo sapien
ctagtttggtcatttgatcgccgaa

SEQ ID NO: 2330618 - DNA, 25 bp, Homo sapien
tgtttaggcagctggaacttgttct

SEQ ID NO: 2330619 - DNA, 25 bp, Homo sapien
gaaacagccccagactttcagcctg

SEQ ID NO: 2330620 - DNA, 25 bp, Homo sapien
aagccattgcctgctctagtttggt

SEQ ID NO: 2330621 - DNA, 25 bp, Homo sapien
ccaatgggcagaaatttttgaattt

SEQ ID NO: 2330622 - DNA, 25 bp, Homo sapien
gtagtagccaatgggcagaaatttt

SEQ ID NO: 2330623 - DNA, 25 bp, Homo sapien
gtagccaatgggcagaaatttttga

SEQ ID NO: 2330624 - DNA, 25 bp, Homo sapien
agccaatgggcagaaatttttgaat

SEQ ID NO: 2330625 - DNA, 25 bp, Homo sapien
tctccgggtaccagaggactggcgc

SEQ ID NO: 2330626 - DNA, 25 bp, Homo sapien
caccgtgcacatccgaatgggtacg

SEQ ID NO: 2330627 - DNA, 25 bp, Homo sapien
gacttcaactatggcagcagcgtgg

SEQ ID NO: 2330628 - DNA, 25 bp, Homo sapien
aatgggtacgttgtcccctctccag

SEQ ID NO: 2330629 - DNA, 25 bp, Homo sapien
aaaatcgactcgctcggtgttcgcc

SEQ ID NO: 2330630 - DNA, 25 bp, Homo sapien
ccttgatgaaatatcgttccatcat

SEQ ID NO: 2330631 - DNA, 25 bp, Homo sapien
tccttgatgaaatatcgttccatca

SEQ ID NO: 2330632 - DNA, 25 bp, Homo sapien
ttccttgatgaaatatcgttccatc

SEQ ID NO: 2330633 - DNA, 25 bp, Homo sapien
tacacaaccgcggaaatcctgcttc

SEQ ID NO: 2330634 - DNA, 25 bp, Homo sapien
aggaacacgccgttctccggtcact

SEQ ID NO: 2330635 - DNA, 25 bp, Homo sapien
gacggcagcagagccctaggaacac

SEQ ID NO: 2330636 - DNA, 25 bp, Homo sapien
tgcacgcctgcgacaggccgttaca

SEQ ID NO: 2330637 - DNA, 25 bp, Homo sapien
cgggcggcaggtcgaacagcagcgt

SEQ ID NO: 2330638 - DNA, 25 bp, Homo sapien
cagagctctccgagcagcgcgggcg

SEQ ID NO: 2330639 - DNA, 25 bp, Homo sapien
ctgtccagaacagcgcagagctctc

SEQ ID NO: 2330640 - DNA, 25 bp, Homo sapien
cgtcgcagctgtccagaacagcgca

SEQ ID NO: 2330641 - DNA, 25 bp, Homo sapien
gagccgcgttcattgcaaaccgtag

SEQ ID NO: 2330642 - DNA, 25 bp, Homo sapien
aagactgtcaccatactgttcatca

SEQ ID NO: 2330643 - DNA, 25 bp, Homo sapien
ggctacactcaacacttccagcagg

SEQ ID NO: 2330644 - DNA, 25 bp, Homo sapien
aatgcctgtacttaacaaaacgaag

SEQ ID NO: 2330645 - DNA, 25 bp, Homo sapien
gagaggtttttacggtgtcagctgc

SEQ ID NO: 2330646 - DNA, 25 bp, Homo sapien
tgtaaaatgcttaccacaatggcca

SEQ ID NO: 2330647 - DNA, 25 bp, Homo sapien
tcagatgagttgtctccagaggttc

SEQ ID NO: 2330648 - DNA, 25 bp, Homo sapien
gcaaaaagcgtttctcagtacatcg

SEQ ID NO: 2330649 - DNA, 25 bp, Homo sapien
gatgcatcgggtggcaatagtagca

SEQ ID NO: 2330650 - DNA, 25 bp, Homo sapien
tttaaaagtgcagcaggccatgact

SEQ ID NO: 2330651 - DNA, 25 bp, Homo sapien
gaaatcagatgctcaaaagtccttg

SEQ ID NO: 2330652 - DNA, 25 bp, Homo sapien
agtcccagggaatgtcagcttttca

SEQ ID NO: 2330653 - DNA, 25 bp, Homo sapien
cacagcctcactgaacaatctcaaa

SEQ ID NO: 2330654 - DNA, 25 bp, Homo sapien
tcgacctatgacacaactccaggca

SEQ ID NO: 2330655 - DNA, 25 bp, Homo sapien
acatgtatttagtggtggcactgcc

SEQ ID NO: 2330656 - DNA, 25 bp, Homo sapien
tcttccctggcctgttaattaatta

SEQ ID NO: 2330657 - DNA, 25 bp, Homo sapien
aatatgacgaacatccagccagctg

SEQ ID NO: 2330658 - DNA, 25 bp, Homo sapien
tcctggaggacctgtaaaaggtcac

SEQ ID NO: 2330659 - DNA, 25 bp, Homo sapien
gaccaaagtaattctcttgttccac

SEQ ID NO: 2330660 - DNA, 25 bp, Homo sapien
taaatgaatagctcgacgatgtccc

SEQ ID NO: 2330661 - DNA, 25 bp, Homo sapien
gataggaaacgcctgttgagcaagc

SEQ ID NO: 2330662 - DNA, 25 bp, Homo sapien
tgtgatacataaggacatgcatgcc

SEQ ID NO: 2330663 - DNA, 25 bp, Homo sapien
gcagcagcaacctgaattgtaggca

SEQ ID NO: 2330664 - DNA, 25 bp, Homo sapien
tatgcatctttagttaggagctcca

SEQ ID NO: 2330665 - DNA, 25 bp, Homo sapien
gaaatccaccttcctgataactctt

SEQ ID NO: 2330666 - DNA, 25 bp, Homo sapien
ggaaatccaccttcctgataactct

SEQ ID NO: 2330667 - DNA, 25 bp, Homo sapien
ctcttctctgaaggactcaacactg

SEQ ID NO: 2330668 - DNA, 25 bp, Homo sapien
tcttctctgaaggactcaacactgc

SEQ ID NO: 2330669 - DNA, 25 bp, Homo sapien
aaagttcaaggctcattttctatgc

SEQ ID NO: 2330670 - DNA, 25 bp, Homo sapien
aagttcaaggctcattttctatgca

SEQ ID NO: 2330671 - DNA, 25 bp, Homo sapien
tcaaggctcattttctatgcacaca

SEQ ID NO: 2330672 - DNA, 25 bp, Homo sapien
gttcaaggctcattttctatgcaca

SEQ ID NO: 2330673 - DNA, 25 bp, Homo sapien
aagaacattatccacggtgacattg

SEQ ID NO: 2330674 - DNA, 25 bp, Homo sapien
caaagccgaagaccaccatgtgctc

SEQ ID NO: 2330675 - DNA, 25 bp, Homo sapien
ttagaaacaaatcagagtccagtgg

SEQ ID NO: 2330676 - DNA, 25 bp, Homo sapien
caaagggtttcttcggacagcagca

SEQ ID NO: 2330677 - DNA, 25 bp, Homo sapien
tctcaaaagagatcagccaaagagc

SEQ ID NO: 2330678 - DNA, 25 bp, Homo sapien
ctgatggaagatttaagcagtattc

SEQ ID NO: 2330679 - DNA, 25 bp, Homo sapien
aatttgacagcatatgttaggtttt

SEQ ID NO: 2330680 - DNA, 25 bp, Homo sapien
ccaattaggaagtctttgtggaaat

SEQ ID NO: 2330681 - DNA, 25 bp, Homo sapien
tccttctccaattaggaagtctttg

SEQ ID NO: 2330682 - DNA, 25 bp, Homo sapien
agcatatgttaggttttgaatctcc

SEQ ID NO: 2330683 - DNA, 25 bp, Homo sapien
taagtggaactgatgtcctgtgaca

SEQ ID NO: 2330684 - DNA, 25 bp, Homo sapien
tctcacaccagtgaggtacatttgt

SEQ ID NO: 2330685 - DNA, 25 bp, Homo sapien
gaaagtaaggcgttcccacacacat

SEQ ID NO: 2330686 - DNA, 25 bp, Homo sapien
tcttgtctgcatcgtaaggcgtgcc

SEQ ID NO: 2330687 - DNA, 25 bp, Homo sapien
ttaccgtagtttacactagagttca

SEQ ID NO: 2330688 - DNA, 25 bp, Homo sapien
cttccaatgcttcttacactgcatt

SEQ ID NO: 2330689 - DNA, 25 bp, Homo sapien
agctcagataaaaacctcttccaat

SEQ ID NO: 2330690 - DNA, 25 bp, Homo sapien
ttccaatgcttcttacactgcattt

SEQ ID NO: 2330691 - DNA, 25 bp, Homo sapien
caaaagatgttttaaagccatcaaa

SEQ ID NO: 2330692 - DNA, 25 bp, Homo sapien
aacaaaagatgttttaaagccatca

SEQ ID NO: 2330693 - DNA, 25 bp, Homo sapien
aagatgttttaaagccatcaaattg

SEQ ID NO: 2330694 - DNA, 25 bp, Homo sapien
aaaagatgttttaaagccatcaaat

SEQ ID NO: 2330695 - DNA, 25 bp, Homo sapien
ctctagtatgtttgggtgatgaaac

SEQ ID NO: 2330696 - DNA, 25 bp, Homo sapien
tctcatgtatggataaatcagacag

SEQ ID NO: 2330697 - DNA, 25 bp, Homo sapien
aatatgcagccaactctagtatgtt

SEQ ID NO: 2330698 - DNA, 25 bp, Homo sapien
ctgcaatctgtcaaaaagtgttcca

SEQ ID NO: 2330699 - DNA, 25 bp, Homo sapien
catggttgaacgttgtgcaggtagt

SEQ ID NO: 2330700 - DNA, 25 bp, Homo sapien
gaatggctttggatattcctattaa

SEQ ID NO: 2330701 - DNA, 25 bp, Homo sapien
gatatactgccacagatgaccgagc

SEQ ID NO: 2330702 - DNA, 25 bp, Homo sapien
ccgattcgaatgtgccaagggagtg

SEQ ID NO: 2330703 - DNA, 25 bp, Homo sapien
cagcagagaatagtgtgaagtatga

SEQ ID NO: 2330704 - DNA, 25 bp, Homo sapien
gaagtatgactcacatgtgaggata

SEQ ID NO: 2330705 - DNA, 25 bp, Homo sapien
tgtgaggataaaagaagctttcagg

SEQ ID NO: 2330706 - DNA, 25 bp, Homo sapien
cacacatacataccaggagaactac

SEQ ID NO: 2330707 - DNA, 25 bp, Homo sapien
ggtatttactctgggtgaatgattc

SEQ ID NO: 2330708 - DNA, 25 bp, Homo sapien
catgtacttttggacaggttgaaga

SEQ ID NO: 2330709 - DNA, 25 bp, Homo sapien
gatattcagcaaaggtgtattcatg

SEQ ID NO: 2330710 - DNA, 25 bp, Homo sapien
caccgacagggggtatttactctgg

SEQ ID NO: 2330711 - DNA, 25 bp, Homo sapien
gatgctccctttgcttcagttagtg

SEQ ID NO: 2330712 - DNA, 25 bp, Homo sapien
tcagctgtgaaaaagaacgggacat

SEQ ID NO: 2330713 - DNA, 25 bp, Homo sapien
taccagcagagagacactgttaggc

SEQ ID NO: 2330714 - DNA, 25 bp, Homo sapien
gaaaggatttgatgaactcagtcac

SEQ ID NO: 2330715 - DNA, 25 bp, Homo sapien
taagagttggctaaagatggctcac

SEQ ID NO: 2330716 - DNA, 25 bp, Homo sapien
tggactgaggcctctatgacaataa

SEQ ID NO: 2330717 - DNA, 25 bp, Homo sapien
cattactgctccacaagagggctgg

SEQ ID NO: 2330718 - DNA, 25 bp, Homo sapien
acagctgagccacagtctgggaact

SEQ ID NO: 2330719 - DNA, 25 bp, Homo sapien
tgtgagaccacctaagagactctag

SEQ ID NO: 2330720 - DNA, 25 bp, Homo sapien
cagactttcactagagcccagcttg

SEQ ID NO: 2330721 - DNA, 25 bp, Homo sapien
gaacaaattattgcctccaccagga

SEQ ID NO: 2330722 - DNA, 25 bp, Homo sapien
ttctcagaccaaccactcagtgggc

SEQ ID NO: 2330723 - DNA, 25 bp, Homo sapien
tcatctgtcactaggcagcaccgga

SEQ ID NO: 2330724 - DNA, 25 bp, Homo sapien
tgaacatatgcagacgacagcggct

SEQ ID NO: 2330725 - DNA, 25 bp, Homo sapien
ggtgccgtgttaactccctcaatgg

SEQ ID NO: 2330726 - DNA, 25 bp, Homo sapien
tatattctacagcaccccggtgccg

SEQ ID NO: 2330727 - DNA, 25 bp, Homo sapien
gaagctctgtcaaccatatgggaaa

SEQ ID NO: 2330728 - DNA, 25 bp, Homo sapien
gccctatcgcaagcagcagtctctg

SEQ ID NO: 2330729 - DNA, 25 bp, Homo sapien
gatgggatcagctcagcaaaacgaa

SEQ ID NO: 2330730 - DNA, 25 bp, Homo sapien
gaacctctatatccgaggactgcct

SEQ ID NO: 2330731 - DNA, 25 bp, Homo sapien
gcggctgcccgagctgctcgagtct

SEQ ID NO: 2330732 - DNA, 25 bp, Homo sapien
tccatggcacgcagagcggcggctg

SEQ ID NO: 2330733 - DNA, 25 bp, Homo sapien
gctgccgccgggagagtcggcgacg

SEQ ID NO: 2330734 - DNA, 25 bp, Homo sapien
tccgcgcgcgaactcccgtccatgg

SEQ ID NO: 2330735 - DNA, 25 bp, Homo sapien
atatacattgttccatgctatttca

SEQ ID NO: 2330736 - DNA, 25 bp, Homo sapien
ttatatacattgttccatgctattt

SEQ ID NO: 2330737 - DNA, 25 bp, Homo sapien
tatatacattgttccatgctatttc

SEQ ID NO: 2330738 - DNA, 25 bp, Homo sapien
tttatatacattgttccatgctatt

SEQ ID NO: 2330739 - DNA, 25 bp, Homo sapien
tcctccctgctgaagacatgagaac

SEQ ID NO: 2330740 - DNA, 25 bp, Homo sapien
cactttgctttagacaaaagatgtt

SEQ ID NO: 2330741 - DNA, 25 bp, Homo sapien
atttcactttgctttagacaaaaga

SEQ ID NO: 2330742 - DNA, 25 bp, Homo sapien
gacagattatcaagcttctttactg

SEQ ID NO: 2330743 - DNA, 25 bp, Homo sapien
tccagcggcaaatgggcaagtcaca

SEQ ID NO: 2330744 - DNA, 25 bp, Homo sapien
catggaacatgagacaacactgact

SEQ ID NO: 2330745 - DNA, 25 bp, Homo sapien
caaaaccgcttaatagcagggccag

SEQ ID NO: 2330746 - DNA, 25 bp, Homo sapien
tgggcccaccatacagcaagggttc

SEQ ID NO: 2330747 - DNA, 25 bp, Homo sapien
tctgccaggagtccaatgtcagcat

SEQ ID NO: 2330748 - DNA, 25 bp, Homo sapien
tctctgctgatgacgccaacatgct

SEQ ID NO: 2330749 - DNA, 25 bp, Homo sapien
tgcacactaattatgctctcctctc

SEQ ID NO: 2330750 - DNA, 25 bp, Homo sapien
gctgatgacgccaacatgcttccat

SEQ ID NO: 2330751 - DNA, 25 bp, Homo sapien
gataattcctttaacagaatgatca

SEQ ID NO: 2330752 - DNA, 25 bp, Homo sapien
cattggttgtacactgaggaagtat

SEQ ID NO: 2330753 - DNA, 25 bp, Homo sapien
gaatgatcattggttgtacactgag

SEQ ID NO: 2330754 - DNA, 25 bp, Homo sapien
cctttaacagaatgatcattggttg

SEQ ID NO: 2330755 - DNA, 25 bp, Homo sapien
gcaggtcagctgagtaagttaatcc

SEQ ID NO: 2330756 - DNA, 25 bp, Homo sapien
atggcaatatcatgcaaaagggcag

SEQ ID NO: 2330757 - DNA, 25 bp, Homo sapien
tctaaataaaggttagcggtagctg

SEQ ID NO: 2330758 - DNA, 25 bp, Homo sapien
gaacctaacacaactacagtcatgg

SEQ ID NO: 2330759 - DNA, 25 bp, Homo sapien
ggttgaaactgatcatccaaaagga

SEQ ID NO: 2330760 - DNA, 25 bp, Homo sapien
ttgaaactgatcatccaaaaggatg

SEQ ID NO: 2330761 - DNA, 25 bp, Homo sapien
gaaactgatcatccaaaaggatgtt

SEQ ID NO: 2330762 - DNA, 25 bp, Homo sapien
gttgaaactgatcatccaaaaggat

SEQ ID NO: 2330763 - DNA, 25 bp, Homo sapien
aactctgatgttctaggtgggaccg

SEQ ID NO: 2330764 - DNA, 25 bp, Homo sapien
tcttctggcatgtaccacagatgtt

SEQ ID NO: 2330765 - DNA, 25 bp, Homo sapien
gctgctggtcatatttatggtacaa

SEQ ID NO: 2330766 - DNA, 25 bp, Homo sapien
aatggaaagtttcccctgtctgatg

SEQ ID NO: 2330767 - DNA, 25 bp, Homo sapien
gatatgttttggatcatctaacact

SEQ ID NO: 2330768 - DNA, 25 bp, Homo sapien
tcatctaacactactctacatcctg

SEQ ID NO: 2330769 - DNA, 25 bp, Homo sapien
tttggatcatctaacactactctac

SEQ ID NO: 2330770 - DNA, 25 bp, Homo sapien
aacactactctacatcctgttagaa

SEQ ID NO: 2330771 - DNA, 25 bp, Homo sapien
catccattgatggtcttaactttgc

SEQ ID NO: 2330772 - DNA, 25 bp, Homo sapien
cttatctagaaatgagagacatgaa

SEQ ID NO: 2330773 - DNA, 25 bp, Homo sapien
ggtcttaactttgcccgcgttgcag

SEQ ID NO: 2330774 - DNA, 25 bp, Homo sapien
tggcagagaaattccgagggcaggg

SEQ ID NO: 2330775 - DNA, 25 bp, Homo sapien
caagctggcttgagtactttcaaga

SEQ ID NO: 2330776 - DNA, 25 bp, Homo sapien
cactggaatacttggtacattctcc

SEQ ID NO: 2330777 - DNA, 25 bp, Homo sapien
tgtgggaggatcttcagcaaaatac

SEQ ID NO: 2330778 - DNA, 25 bp, Homo sapien
aggagaaggacacctgaaggacttt

SEQ ID NO: 2330779 - DNA, 25 bp, Homo sapien
tgggcatgttgcaagcttcctcatt

SEQ ID NO: 2330780 - DNA, 25 bp, Homo sapien
cttatagggccttaagtcctgggat

SEQ ID NO: 2330781 - DNA, 25 bp, Homo sapien
ttatagggccttaagtcctgggatg

SEQ ID NO: 2330782 - DNA, 25 bp, Homo sapien
tagggccttaagtcctgggatggaa

SEQ ID NO: 2330783 - DNA, 25 bp, Homo sapien
tatagggccttaagtcctgggatgg

SEQ ID NO: 2330784 - DNA, 25 bp, Homo sapien
ttcatattcatcccaggaaaatttg

SEQ ID NO: 2330785 - DNA, 25 bp, Homo sapien
actgttcatattcatcccaggaaaa

SEQ ID NO: 2330786 - DNA, 25 bp, Homo sapien
tgttcatattcatcccaggaaaatt

SEQ ID NO: 2330787 - DNA, 25 bp, Homo sapien
ctgttcatattcatcccaggaaaat

SEQ ID NO: 2330788 - DNA, 25 bp, Homo sapien
caaggtcatacctatgctcaggtgc

SEQ ID NO: 2330789 - DNA, 25 bp, Homo sapien
ctctaattgagcgtggatttggtca

SEQ ID NO: 2330790 - DNA, 25 bp, Homo sapien
tcaggtgcctatgcaatacttgctt

SEQ ID NO: 2330791 - DNA, 25 bp, Homo sapien
ggctgaagtcagaacccatgatctt

SEQ ID NO: 2330792 - DNA, 25 bp, Homo sapien
ccaaaggtatctattaacatttaca

SEQ ID NO: 2330793 - DNA, 25 bp, Homo sapien
gcaagcaagctaaaccaaacgatgg

SEQ ID NO: 2330794 - DNA, 25 bp, Homo sapien
aattagacatttcctacaacccgtg

SEQ ID NO: 2330795 - DNA, 25 bp, Homo sapien
gaatccaactgaatgttcttggcag

SEQ ID NO: 2330796 - DNA, 25 bp, Homo sapien
aacagcaggaatgaaggcccagagt

SEQ ID NO: 2330797 - DNA, 25 bp, Homo sapien
ggcccttgaccagccattttctcag

SEQ ID NO: 2330798 - DNA, 25 bp, Homo sapien
gatttcaaaagagggagatccaaga

SEQ ID NO: 2330799 - DNA, 25 bp, Homo sapien
caaaaagctgacctaggcccttgac

SEQ ID NO: 2330800 - DNA, 25 bp, Homo sapien
gaagagatggcccttacacactcag

SEQ ID NO: 2330801 - DNA, 25 bp, Homo sapien
caactgcttaccgagggcctgtata

SEQ ID NO: 2330802 - DNA, 25 bp, Homo sapien
aagatgtccacgtcccaattccaga

SEQ ID NO: 2330803 - DNA, 25 bp, Homo sapien
tgagcagccagataccgtacagagc

SEQ ID NO: 2330804 - DNA, 25 bp, Homo sapien
gatgggatccacaccttcagggtga

SEQ ID NO: 2330805 - DNA, 25 bp, Homo sapien
aacttcgggtgcaatctagatgaca

SEQ ID NO: 2330806 - DNA, 25 bp, Homo sapien
tgataaaggcaggagacatggtacc
